(19) United States
(12) Patent Application Publication
(10) Pub. No.: US 2026/0021141 A1
(43) Pub. Date: Jan. 22, 2026

(54) Strategies For Knock-Ins At APLP2 Safe Harbor Sites

(71) Applicant: EmendoBio Inc., Wimington, DE (US)

(72) Inventors: Rafi EMMANUEL, Ramla (IL); Michal GOLAN MASHIACH, Ness-Ziona (IL)

(73) Assignee: EmendoBio Inc., Wimington, DE (US)

(21) Appl. No.: 18/994,782

(22) PCT Filed: Jul. 14, 2023
(86) PCT No.: PCT/US2023/070221

§ 371 Date: Jan. 15, 2025

Related U.S. Application Data
(60) Provisional application No. 63/368,566, filed on Jul. 15, 2022.
(60) Provisional application No. 63/478,586, filed on Jan. 5, 2023.

(51) Int. Cl. A61K 35/28; A61K 38/17; C12N 9/22; C12N 15/11; C12N 15/90

(52) U.S. Cl. CPC A61K 35/28; A61K 38/1716; C12N 9/226; C12N 15/11; C12N 15/907; C12N 2310/20

(57) ABSTRACT

RNA molecules comprising a guide sequence portion having 17-50 contiguous nucleotides in the sequence set forth in any one of SEQ ID NOs: 1-159641 and compositions, methods, and uses thereof. Further, wherein a method for modifying in a cell at least one allele of the Amyloid Beta Precursor Like Protein 2 (APLP2) gene is disclosed.

[0001] This application claims the benefit of U.S. Provisional Application Nos. 63/478,586 filed Jan. 5, 2023 and 63/368,566, filed Jul. 15, 2022, the content of each of which is hereby incorporated by reference.

[0002] Throughout this application, various publications are referenced, including referenced in parenthesis. The disclosures of all publications mentioned in this application in their entireties are hereby incorporated by reference into this application in order to provide additional description of the art to which this invention pertains and of the features in the art which can be employed with this invention.

### REFERENCE TO SEQUENCE LISTING

[0003] This application incorporates-by-reference nucleotide sequences which are present in the file named “230714_91781-A-PCT_Sequence_Listing_AWG.xml”, which is 141,616,317 bytes in size, and which was created on Jul. 13, 2023 in the IBM-PC machine format, having an operating system compatibility with MS-Windows, which is contained in the XML file contained on a compact disc express mailed on Jul. 14, 2023 as part of this application. EXHIBIT A is a transmittal for the compact disc containing the sequence listing, and was express mailed with the compact disc.

### BACKGROUND OF INVENTION

[0004] An Amyloid Beta Precursor Like Protein 2 (APLP2) safe harbor site may be targeted to introduce a desired sequence to the site without causing deleterious disruptions to the APLP2 gene or affecting its expression. Such targeting strategies may be utilized to enable APLP2 promoter mediated expression of the introduced sequence.

### SUMMARY OF THE INVENTION

[0005] The present disclosure also provides a method for modifying in a cell at least one allele of the Amyloid Beta Precursor Like Protein 2 (APLP2) gene, the method comprising
[0006] introducing to the cell a composition comprising:
   [0007] at least one CRISPR nuclease, or a polynucleotide molecule encoding the CRISPR nuclease; and
[0008] an RNA molecule comprising a guide sequence portion having 17-50 nucleotides or a nucleotide sequence encoding the same,
[0009] wherein a complex of the CRISPR nuclease and the RNA molecule affects a double strand break in at least one allele of the APLP2 gene.

[0010] In some embodiments, the composition also comprises a donor molecule, wherein a sequence of nucleotides from the donor molecule is inserted or copied at or near the double strand break site. Similarly, in some embodiments, the composition further comprises a donor molecule containing a sequence of nucleotides that is introduced at the double strand break site such that the expression of the introduced sequence is mediated by the promoter of the APLP2 gene. Accordingly, also disclosed herein are strategies to enable the expression of a gene, or portion thereof, under control of the APLP2 promoter. In some embodiments, the expression of a gene, or portion thereof, under control of the APLP2 promoter is enabled without knocking-out APLP2 gene expression.

[0011] According to embodiments of the present invention, there is provided a first RNA molecule comprising a guide sequence portion having 17-50 contiguous nucleotides containing nucleotides in the sequence set forth in any one of SEQ ID NOs: 1-159641. In some embodiments, the composition further comprises a CRISPR nuclease. In some embodiments, the composition further comprises a donor molecule.

[0012] According to some aspects of the present invention, there is provided a cell modified to express and secrete a protein of interest within a desired body tissue. Such a cell can be modified by insertion of a sequence of a gene of interest under the control of a promoter of a selected gene which contains a safe harbor site (e.g., APLP2). Non-limiting examples of methods for modifying a cell to express a gene of interest include knock-in by utilizing a CRISPR nuclease system that generates a double-strand break and a donor molecule which encodes a sequence of the gene of interest. In some embodiments, the donor molecule is a ssODN, dsDNA, plasmid, AAV, lentivirus, or transposon. In addition, knock-in can be mediated by a composition comprising i) a fusion protein comprising a nickase and a reverse transcriptase and ii) a RNA donor molecule.

[0013] According to embodiments of the present invention, there is provided a cell modified by any one of the methods described herein. In some embodiments, the cell is a stem cell. In some embodiments, the cell is a monocyte. In some embodiments, the cell is a macrophage. In some embodiments, the cell is an iPS-derived monocyte or macrophage. In some embodiments, the cell is a hematopoietic stem cell (HSC), a hematopoietic stem and progenitor cell (HSPC), a myeloid precursor cell, a myeloblast, a lymphoblast, an erythroid precursor cell, a platelet cell, a natural killer (NK) cell, a B-lymphocyte, a T-lymphocyte, an eosinophil, a neutrophil, or a basophil. In some embodiments, the cell is an iPS-derived cell.

[0014] In some embodiments, the delivering of any one of the compositions described herein to the cell is performed in vitro, ex vivo, or in vivo. In some embodiments, the method is performed ex vivo and the cell is provided/explanted from an individual patient. In some embodiments, the method further comprises the step of introducing the resulting cell, with a modified or edited APLP2 allele, into the individual patient (e.g. autologous transplantation).

[0015] According to some embodiments of the present invention, there is provided use of a composition comprising an RNA molecule comprising a guide sequence portion having 17-50 contiguous nucleotides containing nucleotides in the sequence set forth in any one of SEQ ID NOs: 1-159641 and a CRISPR nuclease for modifying or editing a APLP2 allele in a cell, comprising delivering to the cell the composition comprising an RNA molecule comprising a guide sequence portion having 17-50 contiguous nucleotides containing nucleotides in the sequence set forth in any one of SEQ ID NOs: 1-159641 and a CRISPR nuclease. In some embodiments, the composition further comprises a donor molecule.

[0016] According to embodiments of the present invention, there is provided a medicament comprising an RNA molecule comprising a guide sequence portion having 17-50 contiguous nucleotides containing nucleotides in the sequence set forth in any one of SEQ ID NOs: 1-159641 and a CRISPR nuclease for use in modifying or editing a APLP2 allele in a cell, wherein the medicament is administered by delivering to the cell the composition comprising an RNA molecule comprising a guide sequence portion having 17-50 contiguous nucleotides containing nucleotides in the sequence set forth in any one of SEQ ID NOs: 1-159641 and a CRISPR nuclease. In some embodiments, the medicament further comprises a donor molecule.

[0017] According to some embodiments of the present invention, there is provided a kit for modifying or editing APLP2 allele in a cell, comprising an RNA molecule comprising a guide sequence portion having 17-50 contiguous nucleotides containing nucleotides in the sequence set forth in any one of SEQ ID NOs: 1-159641, a CRISPR nuclease, and/or a tracrRNA molecule; and instructions for delivering the RNA molecule; CRISPR nuclease, and/or the tracrRNA to the cell. In some embodiments, the kit further comprises a donor molecule.

### BRIEF DESCRIPTION OF THE DRAWINGS

[0018] FIG. 1A: Screening guides for optimal editing activity in Intron 1 of APLP2 in HeLa cells using OMNI-50 nuclease. Cells were harvested 72 hours post-DNA transfection, genomic DNA was extracted, and the region of the mutation was analyzed by next generation sequencing (NGS). FIG. 1B: Examination of editing activity of selected guides in HSCs using OMNI-50 or OMNI-50 V6172 CRISPR nucleases identifies optimal composition for editing in Intron 1 of APLP2. HSCs were electroporated with RNP (CRISPR nuclease and RNA guide), 72 hours post-electroporation the genomic DNA was extracted, and the region of the mutation was analyzed by NGS. Graphs represent % editing ±standard deviation (SD) of two independent repeats.

[0019] FIG. 2: Insertion of GFP by HDR into an APLP2 endogenous locus. Pre-editing shows the native form of an APLP2 locus encodes for APLP2 protein including its signal peptide (SP) in its N-terminus. The SP portion of APLP2 is encoded by Exon 1. A donor sequence carrying GFP-2A-SP flanked by left and right homology arms (LHA and RHA, respectively), and splice acceptor and splice donor sites, is also shown. Successful integration results in a new intermediate exon and a new, chimeric, polypeptide of SP-GFP-2A-SP-APLP2. The chimeric polypeptide is self-cleaved into two distinct proteins with an SP.

[0020] FIGS. 3A-3E: Integration of GFP into an APLP2 locus in HSCs enables GFP expression and secretion without altering APLP2 expression. FIG. 3A: FACS analysis of HSCs treated with donor virus (GFP-2A) and RNP results in GFP-expressing cells. GFP signal was not detected in HSCs treated with donor virus alone or with an irrelevant RNP. Examination of APLP2 protein expression (FIG. 3B) and quantification (FIG. 3C) show that expression of the protein containing the safe harbor site remains intact after integration of GFP sequence. Data shown is two independent repeats. FIG. 3D: Examination of total APLP2 transcript levels normalized to GAPDH reveals no change in APLP2 transcript levels following HDR integration. Data shown is two biological repeats and three technical repeats (nested analysis). FIG. 3E: GFP secretion assayed by ELISA detects GFP in HSC media following HDR into an APLP2 locus. Data shown is two biological repeats and two technical repeats (nested analysis). Graphs show mean SD.

[0021] FIGS. 4A-4B: Integration of GFP into an APLP2 locus in HSCs, followed by differentiation into macrophages, enables the generation of GFP-secreting macrophages. FIG. 4A: FACS analysis of macrophages to verify effectiveness of a differentiation protocol and to validate GFP expression. FIG. 4B: GFP secretion as measured by ELISA detects GFP in macrophage media following HDR into an APLP2 locus in HSCs. Data shown is two biological repeats and two technical repeats (nested analysis). Graph shows mean±SD.

[0022] FIGS. 5A-5B: Integration of GFP into APLP2 locus in iPSCs enables GFP expression and secretion. FIG. 5A: FACS of iPSCs treated with donor virus (GFP-2A)+RNP results in GFP expression. GFP was not observed in cells treated with donor virus when combined with irrelevant RNP. FIG. 5B: GFP secretion as measured by ELISA detects GFP in cell media following HDR into an APLP2 locus. Data shown is two biological repeats and two technical repeats (nested analysis). Graphs show mean±SD.

### DETAILED DESCRIPTION

[0023] Unless otherwise defined, all technical and/or scientific terms used herein have the same meaning as commonly understood by one of ordinary skill in the art to which the invention pertains. Although methods and materials similar or equivalent to those described herein can be used in the practice or testing of embodiments of the invention, exemplary methods and/or materials are described below. In case of conflict, the patent specification, including definitions, will control. In addition, the materials, methods, and examples are illustrative only and are not intended to be necessarily limiting.

[0024] It should be understood that the terms “a” and “an” as used above and elsewhere herein refer to “one or more” of the enumerated components. It will be clear to one of ordinary skill in the art that the use of the singular includes the plural unless specifically stated otherwise. Therefore, the terms “a,” “an” and “at least one” are used interchangeably in this application.

[0025] For purposes of better understanding the present teachings and in no way limiting the scope of the teachings, unless otherwise indicated, all numbers expressing quantities, percentages or proportions, and other numerical values used in the specification and claims, are to be understood as being modified in all instances by the term “about.” Accordingly, unless indicated to the contrary, the numerical parameters set forth in the following specification and attached claims are approximations that may vary depending upon the desired properties sought to be obtained. At the very least, each numerical parameter should at least be construed in light of the number of reported significant digits and by applying ordinary rounding techniques.

[0026] Unless otherwise stated, adjectives such as “substantially” and “about” modifying a condition or relationship characteristic of a feature or features of an embodiment of the invention, are understood to mean that the condition or characteristic is defined to within tolerances that are acceptable for operation of the embodiment for an application for which it is intended. Unless otherwise indicated, the word “or” in the specification and claims is considered to be the inclusive “or” rather than the exclusive or, and indicates at least one of, or any combination of items it conjoins.

[0027] In the description and claims of the present application, each of the verbs, “comprise,” “include” and “have” and conjugates thereof, are used to indicate that the object or objects of the verb are not necessarily a complete listing of components, elements or parts of the subject or subjects of the verb. Other terms as used herein are meant to be defined by their well-known meanings in the art.

[0028] The term “homology-directed repair” or “HDR” refers to a mechanism for repairing DNA damage in cells, for example, during repair of double-stranded and single-stranded breaks in DNA. HDR requires nucleotide sequence homology and uses a “nucleic acid template” (nucleic acid template or donor template used interchangeably herein) to repair the sequence where the double-stranded or single break occurred (e.g., DNA target sequence). This results in the transfer of genetic information from, for example, the nucleic acid template to the DNA target sequence. HDR may result in alteration of the DNA target sequence (e.g., insertion, deletion, mutation) if the nucleic acid template sequence differs from the DNA target sequence and part or all of the nucleic acid template polynucleotide or oligonucleotide is incorporated into the DNA target sequence. In some embodiments, an entire nucleic acid template polynucleotide, a portion of the nucleic acid template polynucleotide, or a copy of the nucleic acid template is integrated at the site of the DNA target sequence.

[0029] The terms “nucleic acid template” and “donor”, refer to a nucleotide sequence that is inserted or copied into a genome. The nucleic acid template comprises a nucleotide sequence, e.g., of one or more nucleotides, that will be added to or will template a change in the target nucleic acid or may be used to modify the target sequence. A nucleic acid template sequence may be of any length, for example between 2 and 10,000 nucleotides in length. A nucleic acid template may be a single stranded nucleic acid, a double stranded nucleic acid. In some embodiments, the nucleic acid template comprises a nucleotide sequence, e.g., of one or more nucleotides, that corresponds to wild type sequence of the target nucleic acid, e.g., of the target position. In some embodiments, the nucleic acid template comprises a nucleotide sequence, e.g., of one or more ribonucleotides, that corresponds to wild type sequence of the target nucleic acid, e.g., of the target position. In some embodiments, the nucleic acid template comprises modified nucleotides.

[0030] Insertion of an exogenous sequence (also called a “donor sequence,” donor template,” “donor molecule” or “donor”) can also be carried out. For example, a donor sequence can contain a non-homologous sequence flanked by two regions of homology to allow for efficient homology directed repair (HDR) at the location of interest. Additionally, donor sequences can comprise a vector molecule containing sequences that are not homologous to the region of interest in cellular chromatin. A donor molecule can contain several, discontinuous regions of homology to cellular chromatin. For example, for targeted insertion of sequences not normally present in a region of interest, said sequences can be present in a donor nucleic acid molecule and flanked by regions of homology to sequence in the region of interest. A donor molecule may be any length, for example ranging from several bases e.g. 10-20 bases to multiple kilobases in length.

[0031] The donor polynucleotide can be DNA or RNA, single-stranded and/or double-stranded and can be introduced into a cell in linear or circular form. See, e.g., U.S. Publication Nos. 2010/0047805; 2011/0281361; 2011/0207221; and 2019/0330620. See also Anzalone et al. (2019). If introduced in linear form, the ends of the donor sequence can be protected (e.g., from exonucleolytic degradation) by methods known to those of skill in the art. For example, one or more dideoxynucleotide residues are added to the 3′ terminus of a linear molecule and/or self-complementary oligonucleotides are ligated to one or both ends. See, for example, Chang et al. (1987) and Nehls et al. (1996). Additional methods for protecting exogenous polynucleotides from degradation include, but are not limited to, addition of terminal amino group(s) and the use of modified internucleotide linkages such as, for example, phosphorothioates, phosphoramidates, and O-methyl ribose or deoxyribose residues.

[0032] A donor sequence may be an oligonucleotide and be used for targeted alteration of an endogenous sequence. The oligonucleotide may be introduced to the cell on a vector, may be electroporated into the cell, or may be introduced via other methods known in the art. Donor polynucleotides can be introduced as naked nucleic acid, as nucleic acid complexed with an agent such as a liposome or poloxamer, or can be delivered by viruses (e.g., adenovirus, AAV, herpesvirus, retrovirus, lentivirus and integrase defective lentivirus (IDLV)).

[0033] As used herein, the term “modified cells” refers to cells in which a double strand break is affected by a complex of an RNA molecule and the CRISPR nuclease as a result of hybridization with the target sequence, i.e. on-target hybridization. The term “modified cells” may further encompass cells in which an edit or modification, including the introduction of an exogenous sequence, was affected following the double strand break.

[0034] This invention provides a modified cell or cells obtained by use of any of the methods described herein. In an embodiment these modified cell or cells are capable of giving rise to progeny cells. In an embodiment these modified cell or cells are capable of giving rise to progeny cells after engraftment. As a non-limiting example, the modified cells may be hematopoietic stem cells (HSCs), or any cell suitable for an allogenic cell transplant or autologous cell transplant. As a non-limiting example, the modified cells may be stem cells, monocytes, macrophages, or iPS-derived monocytes or macrophages.

[0035] This invention also provides a composition comprising these modified cells and a pharmaceutically acceptable carrier. Also provided is an in vitro or ex vivo method of preparing this, comprising mixing the cells with the pharmaceutically acceptable carrier.

[0036] As used herein, the term “targeting sequence” or “targeting molecule” refers a nucleotide sequence or molecule comprising a nucleotide sequence that is capable of hybridizing to a specific target sequence, e.g., the targeting sequence has a nucleotide sequence which is at least partially complementary to the sequence being targeted along the length of the targeting sequence. The targeting sequence or targeting molecule may be part of an RNA molecule that can form a complex with a CRISPR nuclease, either alone or in combination with other RNA molecules, with the targeting sequence serving as the targeting portion of the CRISPR complex. When the molecule having the targeting sequence is present contemporaneously with the CRISPR molecule, the RNA molecule, alone or in combination with an additional one or more RNA molecules (e.g. a tracrRNA molecule), is capable of targeting the CRISPR nuclease to the specific target sequence. As non-limiting example, a guide sequence portion of a CRISPR RNA molecule or single-guide RNA molecule may serve as a targeting molecule. Each possibility represents a separate embodiment. A targeting sequence can be custom designed to target any desired sequence.

[0037] The term “targets” as used herein, refers to preferentially hybridizing a targeting sequence of a targeting molecule to a nucleic acid having a targeted nucleotide sequence. It is understood that the term “targets” encompasses variable hybridization efficiencies, such that there is preferential targeting of the nucleic acid having the targeted nucleotide sequence, but unintentional off-target hybridization in addition to on-target hybridization might also occur. It is understood that where an RNA molecule targets a sequence, a complex of the RNA molecule and a CRISPR nuclease molecule targets the sequence for nuclease activity.

[0038] The “guide sequence portion” of an RNA molecule refers to a nucleotide sequence that is capable of hybridizing to a specific target DNA sequence, e.g., the guide sequence portion has a nucleotide sequence which is partially or fully complementary to the DNA sequence being targeted along the length of the guide sequence portion. In some embodiments, the guide sequence portion is 17, 18, 19, 20, 21, 22, 23, 24, 25, 26, 27, 28, 29, 30, 31, 32, 33, 34, 35, 36, 37, 38, 39, 40, 41, 42, 43, 44, 45, 46, 47, 48, 49 or 50 nucleotides in length, or approximately 17-50, 17-49, 17-48, 17-47, 17-46, 17-45, 17-44, 17-43, 17-42, 17-41, 17-40, 17-39, 17-38, 17-37, 17-36, 17-35, 17-34, 17-33, 17-31, 17-30, 17-29, 17-28, 17-27, 17-26, 17-25, 17-24, 17-22, 17-21, 18-25, 18-24, 18-23, 18-22, 18-21, 19-25, 19-24, 19-23, 19-22, 19-21, 19-20, 20-22, 18-20, 20-21, 21-22, or 17-20 nucleotides in length. Preferably, the entire length of the guide sequence portion is fully complementary to the DNA sequence being targeted along the length of the guide sequence portion. The guide sequence portion may be part of an RNA molecule that can form a complex with a CRISPR nuclease with the guide sequence portion serving as the DNA targeting portion of the CRISPR complex. When the RNA molecule having the guide sequence portion is present contemporaneously with the CRISPR molecule, alone or in combination with an additional one or more RNA molecules (e.g. a tracrRNA molecule), the RNA molecule is capable of targeting the CRISPR nuclease to the specific target DNA sequence. Accordingly, a CRISPR complex can be formed by direct binding of the RNA molecule having the guide sequence portion to a CRISPR nuclease or by binding of the RNA molecule having the guide sequence portion and an additional one or more RNA molecules to the CRISPR nuclease. Each possibility represents a separate embodiment. A guide sequence portion can be custom designed to target any desired sequence. Accordingly, a molecule comprising a “guide sequence portion” is a type of targeting molecule. In some embodiments, the guide sequence portion comprises a sequence that is the same as, or differs by no more than 1, 2, 3, 4, or 5 nucleotides from, a guide sequence portion described herein, e.g., a guide sequence set forth in any of SEQ ID NOs:1-159641. Each possibility represents a separate embodiment. In some of these embodiments, the guide sequence portion comprises a sequence that is the same as a sequence set forth in any of SEQ ID NOs:1-159641. Throughout this application, the terms “guide molecule,” “RNA guide molecule,” “guide RNA molecule,” and “gRNA molecule” are synonymous with a molecule comprising a guide sequence portion.

[0039] The term “non-discriminatory” as used herein refers to a guide sequence portion of an RNA molecule that targets a specific DNA sequence that is common in both alleles of a gene. For example, a non-discriminatory guide sequence portion is capable of targeting both alleles of a gene present in a cell.

[0040] In embodiments of the present invention, an RNA molecule comprises a guide sequence portion having 17-50 contiguous nucleotides containing nucleotides in the sequence set forth in any one of SEQ ID NOs: 1-159641. In some embodiments, the guide sequence portion comprises a sequence that is the same as or differs by no more than 1, 2, or 3 nucleotides from a sequence set forth in any of SEQ ID NOs:1-159641.

[0041] The RNA molecule and or the guide sequence portion of the RNA molecule may contain modified nucleotides. Exemplary modifications to nucleotides or polynucleotides may be synthetic and encompass polynucleotides which contain nucleotides comprising bases other than the naturally occurring adenine, cytosine, thymine, uracil, or guanine bases. Modifications to polynucleotides include polynucleotides which contain synthetic, non-naturally occurring nucleosides e.g., locked nucleic acids. Modifications to polynucleotides may be utilized to increase or decrease stability of an RNA. An example of a modified polynucleotide is an mRNA containing 1-methyl pseudo-uridine. For examples of modified polynucleotides and their uses, see U.S. Pat. No. 8,278,036, PCT International Publication No. WO/2015/006747, and Weissman and Kariko (2015), hereby incorporated by reference.

[0042] As used herein, “contiguous nucleotides” set forth in a SEQ ID NO refers to nucleotides in a sequence of nucleotides in the order set forth in the SEQ ID NO without any intervening nucleotides.

[0043] In embodiments of the present invention, the guide sequence portion may be 25 nucleotides in length and contain 20-22 contiguous nucleotides in the sequence set forth in any one of SEQ ID NOs: 1-159641. In embodiments of the present invention, the guide sequence portion may be less than 22 nucleotides in length. For example, in embodiments of the present invention the guide sequence portion may be 17, 18, 19, 20, or 21 nucleotides in length. In such embodiments the guide sequence portion may consist of 17, 18, 19, 20, or 21 nucleotides, respectively, in the sequence of 17-22 contiguous nucleotides set forth in any one of SEQ ID NOs: 1-159641. For example, a guide sequence portion having 17 nucleotides in the sequence of 17 contiguous nucleotides set forth in SEQ ID NO: 159642 may consist of any one of the following nucleotide sequences (nucleotides excluded from the contiguous sequence are marked in strike-through):

(SEQ ID NO: 159642)
AAAAAAAUGUACUUGGUUCC
17 nucleotide guide sequence 1:
(SEQ ID NO: 159643) [symbol]
AAAAUGUACUUGGUUCC
17 nucleotide guide sequence 2:
(SEQ ID NO: 159644) [symbol]
AAAAAUGUACUUGGUUC [symbol]
17 nucleotide guide sequence 3:
(SEQ ID NO: 159645) [symbol]
AAAAAAUGUACUUGGUU [symbol]
17 nucleotide guide sequence 4:
(SEQ ID NO: 159646)
AAAAAAAUGUACUUGGU

[symbol]

[0044] In embodiments of the present invention, the guide sequence portion may be greater than 20 nucleotides in length. For example, in embodiments of the present invention the guide sequence portion may be 21, 22, 23, 24, 25, 26, 27, 28, 29, or 30 nucleotides in length. In such embodiments the guide sequence portion comprises 17-50 nucleotides containing the sequence of 20, 21 or 22 contiguous nucleotides set forth in any one of SEQ ID NOs: 1-159641 and additional nucleotides fully complimentary to a nucleotide or sequence of nucleotides adjacent to the 3′ end of the target sequence, 5′ end of the target sequence, or both.

[0045] In embodiments of the present invention a CRISPR nuclease and an RNA molecule comprising a guide sequence portion form a CRISPR complex that binds to a target DNA sequence to effect cleavage of the target DNA sequence. CRISPR nucleases, e.g. Cpf1, may form a CRISPR complex comprising a CRISPR nuclease and RNA molecule without a further tracrRNA molecule. Alternatively, CRISPR nucleases, e.g. Cas9, may form a CRISPR complex between the CRISPR nuclease, an RNA molecule, and a tracrRNA molecule. A guide sequence portion, which comprises a nucleotide sequence that is capable of hybridizing to a specific target DNA sequence, and a sequence portion that participates in CRISPR nuclease binding, e.g. a tracrRNA sequence portion, can be located on the same RNA molecule. Alternatively, a guide sequence portion may be located on one RNA molecule and a sequence portion that participates in CRISPR nuclease binding, e.g. a tracrRNA portion, may located on a separate RNA molecule. A single RNA molecule comprising a guide sequence portion (e.g. a DNA-targeting RNA sequence) and at least one CRISPR protein-binding RNA sequence portion (e.g. a tracrRNA sequence portion), can form a complex with a CRISPR nuclease and serve as the DNA-targeting molecule. In some embodiments, a first RNA molecule comprising a DNA-targeting RNA portion, which includes a guide sequence portion, and a second RNA molecule comprising a CRISPR protein-binding RNA sequence interact by base pairing to form an RNA complex that targets the CRISPR nuclease to a DNA target site or, alternatively, are fused together to form an RNA molecule that complexes with the CRISPR nuclease and targets the CRISPR nuclease to a DNA target site.

[0046] In embodiments of the present invention, a RNA molecule comprising a guide sequence portion may further comprise the sequence of a tracrRNA molecule. Such embodiments may be designed as a synthetic fusion of the guide portion of the RNA molecule and the trans-activating crRNA (tracrRNA). (See Jinek et al., 2012). In such an embodiment, the RNA molecule is a single guide RNA (sgRNA) molecule. Embodiments of the present invention may also form CRISPR complexes utilizing a separate tracrRNA molecule and a separate RNA molecule comprising a guide sequence portion. In such embodiments the tracrRNA molecule may hybridize with the RNA molecule via basepairing and may be advantageous in certain applications of the invention described herein.

[0047] The term “tracr mate sequence” refers to a sequence sufficiently complementary to a tracrRNA molecule so as to hybridize to the tracrRNA via basepairing and promote the formation of a CRISPR complex. (See U.S. Pat. No. 8,906,616). In embodiments of the present invention, the RNA molecule may further comprise a portion having a tracr mate sequence.

[0048] A “gene,” for the purposes of the present disclosure, includes a DNA region encoding a gene product, as well as all DNA regions which regulate the production of the gene product, whether or not such regulatory sequences are adjacent to coding and/or transcribed sequences. Accordingly, a gene includes, but is not necessarily limited to, promoter sequences, terminators, translational regulatory sequences such as ribosome binding sites and internal ribosome entry sites, enhancers, silencers, insulators, boundary elements, replication origins, matrix attachment sites and locus control regions.

[0049] “Eukaryotic” cells include, but are not limited to, fungal cells (such as yeast), plant cells, animal cells, mammalian cells and human cells.

[0050] The term “nuclease” as used herein refers to an enzyme capable of cleaving the phosphodiester bonds between the nucleotide subunits of nucleic acid. A nuclease may be isolated or derived from a natural source. The natural source may be any living organism. Alternatively, a nuclease may be a modified or a synthetic protein which retains the phosphodiester bond cleaving activity. Gene modification can be achieved using a nuclease, for example a CRISPR nuclease.

[0051] According to embodiments of the present invention, there is provided an RNA molecule comprising a guide sequence portion (e.g. a targeting sequence) comprising a nucleotide sequence that is fully or partially complementary to a target located in or near an allele of the APLP2 gene. In some embodiments, the guide sequence portion of the RNA molecule consists of 16, 17, 18, 19, 20, 21, 22, 23, 24, 25, 26, or more than 26 nucleotides. In some embodiments the guide sequence portion is configured to target a CRISPR nuclease to a APLP2 target site and induce a double-strand break or a single-strand break within 500, 400, 300, 200, 100, 50, 25, or 10 nucleotides of the APLP2 target site. In some embodiments, the RNA molecule is a guide RNA molecule such as a crRNA molecule or a single-guide RNA molecule. In some embodiments, the guide sequence portion is complementary to a target sequence located from 30 base pairs upstream to 30 base pairs downstream of Intron 1 or Exon 17 of the APLP2 gene. In some embodiments, the guide sequence portion is complementary to a target sequence located from 50 base pairs upstream to 50 base pairs downstream of Intron 1 or Exon 17 of the APLP2 gene. Each possibility represents a separate embodiment. In some embodiments, the guide sequence portion is complementary to a target sequence located from 7 base pairs upstream to 7 base pairs downstream of Intron 1 or Exon 17 of the APLP2 gene.

[0052] As used herein, the term “HSC” refers to both hematopoietic stem cells and hematopoietic stem progenitor cells. Non-limiting examples of stem cells include bone marrow cells, myeloid progenitor cells, a multipotent progenitor cells, and lineage restricted progenitor cells.

[0053] As used herein, “progenitor cell” refers to a lineage cell that is derived from stem cell and retains mitotic capacity and multipotency (e.g., can differentiate or develop into more than one but not all types of mature lineage of cell). As used herein “hematopoiesis” or “hemopoiesis” refers to the formation and development of various types of blood cells (e.g., red blood cells, megakaryocytes, myeloid cells (e.g., monocytes, macrophages and neutrophil), and lymphocytes) and other formed elements in the body (e.g., in the bone marrow).

[0054] According to some embodiments of the present invention, there is provided a method for modifying in a cell an allele of the Amyloid Beta Precursor Like Protein 2 (APLP2) gene, the method comprising
[0055] introducing to the cell a composition comprising:
   [0056] at least one CRISPR nuclease, or a polynucleotide molecule encoding the CRISPR nuclease; and
   [0057] a RNA molecule comprising a guide sequence portion having 17-50 nucleotides, or a nucleotide molecule encoding the same,
[0058] wherein a complex of the CRISPR nuclease and the RNA molecule affects a double strand break in the allele of the APLP2 gene.

[0059] In some embodiments, the composition also comprises a donor molecule. In some embodiments, a sequence of nucleotides from the donor molecule is inserted or copied at or near the double strand break site. In some embodiments, the composition further comprises a donor molecule comprising a sequence of nucleotides that is introduced at the double strand break site.

[0060] In some embodiments, the composition further comprises a donor molecule containing a sequence of nucleotides that is introduced at the double strand break site such that the expression of the introduced sequence is mediated by the promoter of the APLP2 gene.

[0061] In some embodiments, the introduced sequence comprises a sequence from an Alpha-1 antitrypsin, Glucose-6-phosphatase (G6PC), Serpin Family A Member (SERPINA), Transthyretin (TTR), ornithine transcarbamylase, argininosuccinic acid synthetase, arginase, argininosuccinase, carbamoyl phosphate synthetase, and N-acetylglutamate synthetase, Alpha Galactosidase A, Coagulation Factor IX, Coagulation Factor VII, Lysosomal Alpha Glucosidase, Fibrinogen, Phenylalanine 4 Hydroxylase, Alkaline Phosphatase, Glucosylceramidase, Beta Galactosidase, Porphobilinogen Deaminase, Arylsulfatase B, Beta Glucuronidase, Alpha-N-Acetylglucosaminidase, Lysosomal Alpha, Alpha L-Iduronidase, Mannosidase, Phosphatidylcholine Sterol Acyltransferase, N-Sulphoglucosamine Sulphohydrolase, Coagulation Factor X, N-Acetylgalactosamine-6-Sulfatase, Sphingomyelin Phosphodiesterase, iduronate-2-sulfatase, Lysosomal Alpha Glucosidase, Cyclin Dependent Kinase Like 5, Prolow Density Lipoprotein Receptor Related Protein 1, Phenylalanine Ammonia Lyase, Protein Glutamine Gamma Glutamyltransferase K, or Lysosomal Protective Protein encoding gene.

[0062] In some embodiments, the introduced sequence comprises a sequence from an acid α-glucosidase, α-L-iduronidase, α-galactosidase, iduronate-2-sulfatase, N-acetylgalactosamine-6-sulfatase, N-acetylgalactosamine-4-sulfatase, a lysophosphatidylcholine metabolism-related protein, preferably phospholipase A2, a T-REC or K-REC related protein, β-glucosidase, β-glucocerebrosidase, arylsulfatase A, Factor VIII, insulin-like growth factor 1 (IGF-1), surfactant protein A, surfactant protein B, aspartyl-β-glucosaminidase, acetyl-CoA α-glucosaminide, acetyl-CoA-arylamine N-acetyltransferase, N-acetylglucosamine-6-sulfatase, N-acetylglucosamine-1-Phosphotransferase, α-N-acetylglucosaminidase, acid ceramidase, aspartacylase, lysosomal acid lipase, acid sphingomyelinase, arylsulfatase B, α-L-fucosidase, galactosylceramidase, galactocerebrosidase, β-galactosidase, protective protein/cathepsin A, β-glucoronidase, heparan N-sulfatase, β-hexosaminidase A, hyaluronidase-1, alpha-D-mannosidase, beta-mannosidase, alpha-neuraminidase, beta-hexosaminidase A, beta-hexosaminidase B, palmitoyl-protein thioesterase, tripeptidyl peptidase I, Battenin, Ceroid-lipofuscinosis neuronal protein 5 (CLN5), Ceroid-lipofuscinosis neuronal protein 6 (CLN6), Ceroid-lipofuscinosis neuronal protein 7 (CLN7), Ceroid-lipofuscinosis neuronal protein 8 (CLN8), (Cathepsin D), cystinosin, cathepsin K, Sialin, Lysosome-associated membrane protein 2 (LAMP2), human growth hormone, follicle-stimulating hormone, erythropoietin, a cytokine, a chemokine, IL-10, IGF1, TGF-β, IL-15, CXCR4, IL-4, or a granulocyte colony-stimulating factor (G-CSF) encoding gene.

[0063] In some embodiments, the donor molecule contains a sequence from a gene encoding a protein that is secreted by a cell.

[0064] In some embodiments, the introduced sequence comprises a sequence that encodes a polypeptide of interest that is expressed by the cell.

[0065] In some embodiments, the expressed polypeptide of interest is secreted by the cell.

[0066] In some embodiments, the expressed polypeptide of interest further comprises a signal peptide.

[0067] In some embodiments, the signal peptide is encoded by the allele of the APLP2 gene.

[0068] In some embodiments, the introduced sequence comprises a sequence encoding a 2A self-cleaving peptide.

[0069] In some embodiments, the introduced sequence comprises a sequence that encodes a signal peptide.

[0070] In some embodiments, the signal peptide is an APLP2 signal peptide.

[0071] In some embodiments, the introduced sequence comprises a splice acceptor sequence and a splice donor sequence.

[0072] In some embodiments, the introduced sequence comprises a splice acceptor sequence, a sequence encoding a polypeptide of interest, a sequence encoding a 2A self-cleaving peptide, a signal peptide, and a splice donor sequence.

[0073] In some embodiments, the donor molecule comprises a first homology arm sequence that shares at least 90%, preferably 100%, sequence identity with an APLP2 sequence upstream of the double-strand break and a second homology arm sequence that shares at least 90%, preferably 100%, sequence identity with an APLP2 sequence downstream of the double-strand break.

[0074] In some embodiments, the first homology arm sequence and second homology arm sequences are each about 20-50, 50-100, 100-200, 200-500, 500-1000, or 1000-2000 nucleotides in length.

[0075] In some embodiments, the polypeptide of interest is a soluble protein.

[0076] In some embodiments, the polypeptide of interest is about 20-50, 50-100, 100-200, 200-500, 500-1000, or 1000-2000 amino acids in length.

[0077] In some embodiments, the RNA molecule comprises a guide sequence portion having 17-50 contiguous nucleotides containing nucleotides in the sequence set forth in any one of SEQ ID NOs: 1-159641.

[0078] In some embodiments, the RNA molecule comprises a non-discriminatory guide sequence portion that targets both APLP2 alleles.

[0079] In some embodiments, the RNA molecule comprises a non-discriminatory guide portion that targets any one of a non-discriminatory guide portion that targets Intron 1 of APLP2 or a 3′ untranslated region (3′ UTR) of APLP2.

[0080] In some embodiments, the RNA molecule comprises a non-discriminatory guide portion that targets a sequence that is located within a genomic range selected from any one of 11:130142110-130144147 and 11:130070140-130109426.

[0081] In some embodiments, the modified allele of the APLP2 gene expresses an APLP2 gene product.

[0082] In some embodiments, the modified allele of the APLP2 gene expresses an APLP2 polypeptide and the polypeptide of interest.

[0083] In some embodiments, the cell is a stem cell, a monocyte, a macrophage, an iPS-derived monocyte, an iPS-derived macrophage, a hematopoietic stem cell (HSC), a hematopoietic stem and progenitor cell (HSPC), a myeloid precursor cell, a myeloblast, a lymphoblast, an erythroid precursor cell, a platelet cell, a natural killer (NK) cell, a B-lymphocyte, a T-lymphocyte, an eosinophil, a neutrophil, an iPS-derived cell, or a basophil.

[0084] In some embodiments, the cell is a stem cell, and the method further comprises differentiating the stem cell after modifying the stem cell.

[0085] According to embodiments of the present invention, there is provided a modified cell obtained by the method of any one of the embodiments presented herein.

[0086] According to some embodiments, the cell is a stem cell, a monocyte, a macrophage, an iPS-derived monocyte, an iPS-derived macrophage, a hematopoietic stem cell (HSC), a hematopoietic stem and progenitor cell (HSPC), a myeloid precursor cell, a myeloblast, a lymphoblast, an erythroid precursor cell, a platelet cell, a natural killer (NK) cell, a B-lymphocyte, a T-lymphocyte, an eosinophil, a neutrophil, an iPS-derived cell, or a basophil.

[0087] According to embodiments of the present invention, there is provided a RNA molecule comprising a guide sequence portion having 17-50 contiguous nucleotides containing nucleotides in the sequence set forth in any one of SEQ ID NOs: 1-159641.

[0088] According to embodiments of the present invention, there is provided a composition comprising the RNA molecule and at least one CRISPR nuclease.

[0089] According to some embodiments, the composition further comprises a donor molecule.

[0090] In some embodiments, the donor molecule comprises a sequence from an Alpha-1 antitrypsin, Glucose-6-phosphatase (G6PC), Serpin Family A Member (SERPINA), Transthyretin (TTR), ornithine transcarbamylase, argininosuccinic acid synthetase, arginase, argininosuccinase, carbamoyl phosphate synthetase, and N-acetylglutamate synthetase, Alpha Galactosidase A, Coagulation Factor IX, Coagulation Factor VII, Lysosomal Alpha Glucosidase, Fibrinogen, Phenylalanine 4 Hydroxylase, Alkaline Phosphatase, Glucosylceramidase, Beta Galactosidase, Porphobilinogen Deaminase, Arylsulfatase B, Beta Glucuronidase, Alpha-N-Acetylglucosaminidase, Lysosomal Alpha, Alpha L-Iduronidase, Mannosidase, Phosphatidylcholine Sterol Acyltransferase, N-Sulphoglucosamine Sulphohydrolase, Coagulation Factor X, N-Acetylgalactosamine-6-Sulfatase, Sphingomyelin Phosphodiesterase, iduronate-2-sulfatase, Lysosomal Alpha Glucosidase, Cyclin Dependent Kinase Like 5, Prolow Density Lipoprotein Receptor Related Protein 1, Phenylalanine Ammonia Lyase, Protein Glutamine Gamma Glutamyltransferase K, or Lysosomal Protective Protein encoding gene.

[0091] In some embodiments, the donor molecule comprises a sequence from an acid α-glucosidase, α-L-iduronidase, α-galactosidase, iduronate-2-sulfatase, N-acetylgalactosamine-6-sulfatase, N-acetylgalactosamine-4-sulfatase, a lysophosphatidylcholine metabolism-related protein, preferably phospholipase A2, a T-REC or K-REC related protein, β-glucosidase, β-glucocerebrosidase, arylsulfatase A, Factor VIII, insulin-like growth factor 1 (IGF-1), surfactant protein A, surfactant protein B, aspartyl-β-glucosaminidase, acetyl-CoA α-glucosaminide, acetyl-CoA-arylamine N-acetyltransferase, N-acetylglucosamine-6-sulfatase, N-acetylglucosamine-1-Phosphotransferase, α-N-acetylglucosaminidase, acid ceramidase, aspartoacylase, lysosomal acid lipase, acid sphingomyelinase, arylsulfatase B, α-L-fucosidase, galactosylceramidase, galactocerebrosidase, β-galactosidase, protective protein/cathepsin A, β-glucoronidase, heparan N-sulfatase, β-hexosaminidase A, hyaluronidase-1, alpha-D-mannosidase, beta-mannosidase, alpha-neuraminidase, beta-hexosaminidase A, beta-hexosaminidase B, palmitoyl-protein thioesterase, tripeptidyl peptidase I, Battenin, Ceroid-lipofuscinosis neuronal protein 5 (CLN5), Ceroid-lipofuscinosis neuronal protein 6 (CLN6), Ceroid-lipofuscinosis neuronal protein 7 (CLN7), Ceroid-lipofuscinosis neuronal protein 8 (CLN8), (Cathepsin D), cystinosin, cathepsin K, Sialin, Lysosome-associated membrane protein 2 (LAMP2), human growth hormone, follicle-stimulating hormone, erythropoietin, a cytokine, a chemokine, IL-10, IGF1, TGF-β, IL-15, CXCR4, IL-4, or a granulocyte colony-stimulating factor (G-CSF) encoding gene.

[0092] In some embodiments, the donor molecule comprises a sequence from a gene encoding a protein that is secreted by a cell.

[0093] In some embodiments, the donor molecule comprises a sequence that encodes a polypeptide of interest. A nucleotide sequence encoding a polypeptide that is desired to be expressed in a target cell and secreted by the cell may be inserted into the APLP2 allele such that the modified APLP2 allele is capable of expressing both the polypeptide encoded by the inserted sequence as well as the original APLP2 gene product.

[0094] In some embodiments, the donor molecule comprises a sequence encoding a 2A self-cleaving peptide.

[0095] In some embodiments, the donor molecule comprises a sequence that encodes a signal peptide.

[0096] In some embodiments, the signal peptide is an APLP2 signal peptide.

[0097] In some embodiments, the donor molecule comprises a splice acceptor sequence and a splice donor sequence.

[0098] In some embodiments, the donor molecule comprises a splice acceptor sequence, a sequence encoding a polypeptide of interest, a sequence encoding a 2A self-cleaving peptide, a signal peptide, and a splice donor sequence.

[0099] In some embodiments, the donor molecule comprises a first homology arm sequence that shares at least 90%, preferably 100%, sequence identity with a first sequence in the APLP2 gene, and a second homology arm sequence that shares at least 90%, preferably 100%, sequence identity with a second sequence in the APLP2 gene.

[0100] In some embodiments, the first homology arm sequence and second homology arm sequences are each about 20-50, 50-100, 100-200, 200-500, 500-1000, or 1000-2000 nucleotides in length.

[0101] In some embodiments, the polypeptide of interest is a soluble protein.

[0102] In some embodiments, the polypeptide of interest is up to 20-50, 50-100, 100-200, 200-500, 500-1000, or 1000-2000 amino acids in length.

[0103] According to some embodiments, the composition further comprises a tracrRNA molecule. According to embodiments of the present invention, there is provided a method for modifying or editing an APLP2 allele in a cell, the method comprising delivering to the cell the composition of any one of the embodiments presented herein.

[0104] According to embodiments of the present invention, there is provided use of any one of the compositions presented herein for modifying or editing a APLP2 allele in a cell, comprising delivering to the cell the composition of any one of the embodiments presented herein.

[0105] According to embodiments of the present invention, there is provided a medicament comprising the composition of any one of the embodiments presented herein for use in modifying or editing an APLP2 allele in a cell, wherein the medicament is administered by delivering to the cell the composition of any one of the embodiments presented herein.

[0106] According to embodiments of the present invention, there is provided a kit for modifying or editing an APLP2 allele in a cell, comprising an RNA molecule of any one of the embodiments presented herein, a CRISPR nuclease, and/or a tracrRNA molecule; and instructions for delivering the RNA molecule; CRISPR nuclease, and/or the tracrRNA to the cell. In some embodiments, the kit further comprises a donor molecule and instructions for delivering the donor molecule to a cell.

[0107] According to embodiments of the present invention, there is provided a gene editing composition comprising an RNA molecule comprising a guide sequence portion having 17-50 contiguous nucleotides containing nucleotides in the sequence set forth in any one of SEQ ID NOs: 1-159641. In some embodiments, the RNA molecule further comprises a portion having a sequence which binds to a CRISPR nuclease. In some embodiments, the sequence which binds to a CRISPR nuclease is a tracrRNA sequence. In some embodiments the RNA comprising a guide sequence portion is a crRNA molecule. In some embodiments an RNA molecule comprising a guide sequence portion is a single-guide RNA (sgRNA) molecule.

[0108] In some embodiments, the RNA molecule further comprises a portion having a tracr mate sequence.

[0109] In some embodiments, the RNA molecule may further comprise one or more linker portions.

[0110] According to embodiments of the present invention, an RNA molecule may be up to 1000, 900, 800, 700, 600, 500, 450, 400, 350, 300, 290, 280, 270, 260, 250, 240, 230, 220, 210, 200, 190, 180, 170, 160, 150, 140, 130, 120, 110, or 100 nucleotides in length. Each possibility represents a separate embodiment. In embodiments of the present invention, the RNA molecule may be 17 up to 300 nucleotides in length, 100 up to 300 nucleotides in length, 150 up to 300 nucleotides in length, 100 up to 500 nucleotides in length, 100 up to 400 nucleotides in length, 200 up to 300 nucleotides in length. 100 to 200 nucleotides in length, or 150 up to 250 nucleotides in length. Each possibility represents a separate embodiment.

[0111] According to some embodiments of the present invention, the composition further comprises a tracrRNA molecule.

[0112] According to some embodiments of the present invention, there is provided a method for modifying or editing a APLP2 allele in a cell, the method comprising delivering to the cell a composition comprising an RNA molecule comprising a guide sequence portion having 17-50 contiguous nucleotides containing nucleotides in the sequence set forth in any one of SEQ ID NOs: 1-159641 and a CRISPR nuclease. In some embodiments, the composition further comprises a donor molecule.

[0113] According to some embodiments of the present invention, there is provided a method for treating a disorder or disease, the method comprising delivering to a cell of a subject having the disorder or disease a composition comprising an RNA molecule comprising a guide sequence portion having 17-50 contiguous nucleotides containing nucleotides in the sequence set forth in any one of SEQ ID NOs: 1-159641 and a CRISPR nuclease. In some embodiments, the composition further comprises a donor molecule.

[0114] According to some embodiments of the present invention, there is provided a method for treating a disorder or disease, the method comprising delivering to a cell of a subject having the disorder the composition of any one of the above embodiments or delivering to the subject the modified cell of any one of the above embodiments.

[0115] According to some embodiments, the disease or disorder is Pompe disease, Mucopolysaccharidosis Type I, Fabry disease, Mucopolysaccharidosis type II, Mucopolysaccharidosis type IVA, Mucopolysaccharidosis type VI, Adrenoleukodystrophy, Severe combined immunodeficiency, Gaucher disease, metachromatic leukodystrophy (MLD), primary immune deficiency, hemophilia A, hemophilia B, IGF-1 deficiency, surfactant deficiency, Aspartylglucosaminuria, Sanfilippo syndrome, mucopolysaccharidosis type III, Sanfilippo Syndrome type IIId, I-cell disease, Schindler Disease, Farber disease (FD), Spinal muscular atrophy with progressive myoclonic epilepsy (SMA-PME), Canavan disease, Lysosomal acid lipase deficiency, Niemann-Pick disease, Mucopolysaccharidosis type 6, Fucosidosis, Krabbe disease, GM1 gangliosidosis, mucopolysaccharidosis type IVB (MPS IVB), or galactosialidosis, Sly disease, Mucopolysaccharidosis type III, Late-onset Tay Sachs, Hyaluronidase-1 deficiency, Alpha-mannosidosis, Beta-mannosidosis, Sialidosis, Stanhoff disease, Santavuori-Haltia disease, Jansky-Bielschowsky disease, Batten disease, Neuronal ceroid lipofuscinosis type 5, Neuronal ceroid lipofuscinosis type 6, Neuronal ceroid lipofuscinosis type 7, Neuronal ceroid lipofuscinosis type 8, Congenital cathepsin D deficiency, Cystinosis, Pycnodysostosis, Salla disease, Danon disease, and/or Alpha-1 antitrypsin deficiency.

[0116] In some embodiments, the composition or the modified cell is delivered to a tissue or tumor of the subject.

[0117] According to some embodiments of the present invention, there is provided a medicament comprising the composition any one of the above embodiments for use in modifying a APLP2 allele in a cell, wherein the medicament is administered by delivering to the cell the composition any one of the above embodiments.

[0118] According to some embodiments of the present invention, there is provided use of the composition any one of the above embodiments or the modified cell of any one of the above embodiments for treating ameliorating or preventing a disorder or disease, comprising delivering to a cell of a subject having or at risk of having the disorder the composition any one of the above embodiments or delivering to the subject the modified cell of any one of the above embodiments.

[0119] According to some embodiments of the present invention, there is provided a medicament comprising the composition of any one of the above embodiments or the modified cell of any one of the above embodiments for use in treating ameliorating or preventing a disorder or disease, wherein the medicament is administered by delivering to a cell of a subject having or at risk of having the disorder the composition of any one of the above embodiments or delivering to the subject the modified cell of any one of the above embodiments.

[0120] According to some embodiments, the disorder or disease is Pompe disease, Mucopolysaccharidosis Type I, Fabry disease, Mucopolysaccharidosis type II, Mucopolysaccharidosis type IVA, Mucopolysaccharidosis type VI, Adrenoleukodystrophy, Severe combined immunodeficiency, Gaucher disease, metachromatic leukodystrophy (MLD), primary immune deficiency, hemophilia A, hemophilia B, IGF-1 deficiency, surfactant deficiency, Aspartylglucosaminuria, Sanfilippo syndrome, mucopolysaccharidosis type III, Sanfilippo Syndrome type IIId, I-cell disease, Schindler Disease, Farber disease (FD), Spinal muscular atrophy with progressive myoclonic epilepsy (SMA-PME), Canavan disease, Lysosomal acid lipase deficiency, Niemann-Pick disease, Mucopolysaccharidosis type 6, Fucosidosis, Krabbe disease, GM1 gangliosidosis, mucopolysaccharidosis type IVB (MPS IVB), or galactosialidosis, Sly disease, Mucopolysaccharidosis type III, Late-onset Tay Sachs, Hyaluronidase-1 deficiency, Alpha-mannosidosis, Beta-mannosidosis, Sialidosis, Stanhoff disease, Santavuori-Haltia disease, Jansky-Bielschowsky disease, Batten disease, Neuronal ceroid lipofuscinosis type 5, Neuronal ceroid lipofuscinosis type 6, Neuronal ceroid lipofuscinosis type 7, Neuronal ceroid lipofuscinosis type 8, Congenital cathepsin D deficiency, Cystinosis, Pycnodysostosis, Salla disease, Danon disease, and/or Alpha-1 antitrypsin deficiency.

[0121] In some embodiments, the disorder or disease is a lysosomal storage disorder.

[0122] In some embodiments, the disorder or disease is a disorder or disease of the blood, lungs, brain, liver, guts, intestines, bones, muscles, or central nervous system, or is an inflammatory disease or autoinflammatory disease.

[0123] In some embodiments, the composition of any one of the above embodiments or the modified cell of any one of the above embodiments is a medicament that is an enzyme replacement therapy.

[0124] According to some embodiments of the present invention, there is provided a method of treating a disease or disorder, wherein the method is an immunotherapy comprising delivering to the subject the modified cell of any one of the above embodiments.

[0125] In some embodiments, the disease or disorder is cancer.

[0126] In some embodiments, the composition of any one of the above embodiments or the modified cell of any one of the above embodiments is for use in treating ameliorating or preventing a disorder or disease.

[0127] According to some embodiments of the present invention, there is provided a method for modifying a DNA target site in a monocyte or macrophage of a subject, wherein the modification of the DNA target site induces the monocyte or macrophage to express a desired protein encoded by the modification, the method comprising delivering to the cell of the subject a composition comprising an RNA molecule comprising a guide sequence portion having 17-50 contiguous nucleotides containing nucleotides in the sequence set forth in any one of SEQ ID NOs: 1-159641 and a CRISPR nuclease. In some embodiments, the composition further comprises a donor molecule.

[0128] According to embodiments of the present invention, at least one CRISPR nuclease and the RNA molecule or RNA molecules are delivered to the subject and/or cells substantially at the same time or at different times.

[0129] In some embodiments, a tracrRNA molecule is delivered to the subject and/or cells substantially at the same time or at different times as the CRISPR nuclease and RNA molecule or RNA molecules.

[0130] According to embodiments of the present invention, the RNA molecule targets an alternative splicing signal sequence between an exon and an intron of an APLP2 allele.

[0131] According to embodiments of the present invention, the RNA molecule is non-discriminatory and targets a sequence present in both APLP2 alleles. In some embodiments, the sequence is present in both APLP2 alleles. In some embodiments, the sequence is present in an intron of the APLP2 gene. In some embodiments, the intron is the first intron that follows the first coding exon of the APLP2 gene.

[0132] Any one of, or combination of, the above-mentioned strategies for modifying or editing an APLP2 allele may be used in the context of the invention.

[0133] In some embodiments, the method comprises contacting at least one allele of a gene of interest with a non-discriminatory RNA molecule, e.g. an RNA molecule comprising a guide sequence portion which is capable of targeting both alleles of a gene, and a CRISPR nuclease e.g., a Cas9 protein, wherein the non-discriminatory RNA molecule and the CRISPR nuclease associate with a nucleotide sequence of the at least one allele of the gene of interest, thereby modifying or editing the at least one allele. Notably, although biallelic cleavage may occur upon introduction of a non-discriminatory RNA molecule to a cell, insertion of a nucleotide sequence at a cleavage site may occur in only a single allele and not in both alleles. Accordingly, inducing biallelic cleavage with a non-discriminatory RNA molecule that targets an intron of the APLP2 gene may result in preservation of expression of an endogenous APLP2 gene from one allele and introduction of a nucleotide sequence, e.g. a nucleotide sequence from a donor molecule, in the other allele. Introduction of the nucleotide sequence in an APLP2 allele may or may not disrupt expression of the APLP2 encoded gene product at the APLP2 allele.

[0134] In some embodiments, the method comprises contacting an allele of a gene of interest with an RNA molecule and a CRISPR nuclease e.g., a Cas9 protein, wherein the RNA molecule and the CRISPR nuclease associate with a nucleotide sequence of the allele of the gene of interest which differs by at least one nucleotide from a nucleotide sequence of a different allele of the gene of interest, thereby modifying or editing the targeted allele.

[0135] In some embodiments, the RNA molecule and a CRISPR nuclease is introduced to a cell encoding the gene of interest. In some embodiments, the cell encoding the gene of interest is in a mammalian subject.

[0136] Embodiments of compositions described herein include at least one CRISPR nuclease, RNA molecule(s) comprising a guide sequence portion, and a tracrRNA molecule, which may be separate or attached to an RNA molecule comprising a guide sequence portion, being effective in a subject or cells at the same time. The at least one CRISPR nuclease, RNA molecule(s) comprising a guide sequence portion, and tracrRNA may be delivered substantially at the same time or can be delivered at different times but have effect at the same time. For example, this includes delivering the CRISPR nuclease to the subject or cells before the RNA molecule comprising a guide sequence portion and/or tracrRNA is substantially extant in the subject or cells.

[0137] In some embodiments, the cell is a stem cell. In some embodiments, the cell is a monocyte. In some embodiments, the cell is a macrophage. In some embodiments, the cell is an iPS-derived monocyte. In some embodiments, the cell is an iPS-derived macrophage. In some embodiments, the cell is a hematopoietic stem cell (HSC), a hematopoietic stem and progenitor cell (HSPC), a myeloid precursor cell, a myeloblast, a lymphoblast, an erythroid precursor cell, a platelet cell, a natural killer (NK) cell, a B-lymphocyte, a T-lymphocyte, an eosinophil, a neutrophil, an iPS-derived cell, or a basophil.

### Genetic APLP2 Safe Harbor Knock-Ins to Treat Diseases and Disorders

[0138] In some embodiments, methods of the present invention may be used to knock-in a sequence at an APLP2 safe harbor site. In some embodiments, APLP2-mediated expression of the knocked-in sequence is involved in or associated with treatment of a disorder or a disease.

[0139] For example, in some embodiments a APLP2 DNA target site in target cell (e.g. a monocyte, macrophage, a hematopoietic stem cell (HSC), hematopoietic stem and progenitor cells (HSPCs), myeloid precursor cell, myeloblast, lymphoblast, erythroid precursor cell, platelet cell, natural killer (NK) cell, B-lymphocyte, T-lymphocyte, eosinophil, neutrophil, a basophil, or an iPS cell) is modified such that the target cell expresses and secretes a protein product encoded by the modification, e.g. an introduced or knocked-in protein-encoding sequence. These target cells may be utilized, for example, to treat lysosomal storage diseases or other disorders of the blood, lungs, brain, liver, guts, intestines, bones, muscles, or central nervous system, or inflammatory or autoinflammatory diseases. In some embodiments, these modified cells serve as an alternative to traditional enzyme replacement therapies. In some embodiments, these modified cells are used for immunotherapy such as cancer immunotherapy.

[0140] As a non-limiting example, expression of the knocked-in sequence may be involved in or associated with treatment of a disease or disorder of the blood, lungs, brain, guts, intestines, bones, liver, muscles, or central nervous system. As non-limiting examples, the knocked in sequence may be a A1AT, G6PC, SERPINA, TTR, ornithine transcarbamylase, argininosuccinic acid synthetase, arginase, argininosuccinase, carbamoyl phosphate synthetase, or N-acetylglutamate synthetase sequence, or a portion thereof.

[0141] As a non-limiting example, expression of the knocked-in sequence may be involved in or associated with treatment of an inflammatory or autoinflammatory disease or disorder, such as inflammatory bowel disease (IBD). For example, IL-4 insertion into neuronal cells shows reduction in symptoms of multiple sclerosis mice. Furthermore, insertion of IL-10 into a type-1-diabetes mouse model exhibits reduction of insulitis and reduced T cell activation. As non-limiting examples, the knocked-in sequence may be a cytokine or a chemokine such as anti-inflammatory cytokines or chemokines (e.g., IL-10, IGF1, TGF-β and IL-4). In such embodiments, the secretion of the knocked-in cytokine or chemokine facilitates the manipulation of immune and inflammatory responses for the treatment of disease or disorder.

[0142] As a non-limiting example, expression of the knocked-in sequence may be involved in or associated with treatment of cancer. As non-limiting examples, the knocked in sequence may be a cytokine, a chemokine, a factor, or a protein capable of activating the immune system or helping to recruit immune system cells to the tumor site to eliminate the tumor. For example, IL-15 may be knocked-in and secreted to increase persistence of T cells or natural killer cells, or CXCR4 may be knocked-in to increase recruitment of T cells and natural killer cells to a tumor site.

[0143] As a non-limiting example, a target cell (e.g. a monocyte or macrophage) may be modified to express a cytokine or a chemokine, including but limited to IL-10, IGF1, TGF-β, IL-15, CXCR4 and/or IL-4.

[0144] As a non-limiting example, expression of the knocked-in sequence may be involved in or associated with treatment of a lysosomal storage disease or other disorder. As a non-limiting example, a target cell (e.g. a monocyte or macrophage) may be modified to express Alpha Galactosidase A, Coagulation Factor IX, Coagulation Factor VII, Lysosomal Alpha Glucosidase, Fibrinogen, Phenylalanine 4 Hydroxylase, Alkaline Phosphatase, Glucosylceramidase, Beta Galactosidase, Porphobilinogen Deaminase, Arylsulfatase B, Beta Glucuronidase, Alpha-N-Acetylglucosaminidase, Lysosomal Alpha, Alpha L-Iduronidase, Mannosidase, Phosphatidylcholine Sterol Acyltransferase, N-Sulphoglucosamine Sulphohydrolase, Coagulation Factor X, N-Acetylgalactosamine-6-Sulfatase, Sphingomyelin Phosphodiesterase, Alpha-1 antitrypsin, iduronate-2-sulfatase, Lysosomal Alpha Glucosidase, Cyclin Dependent Kinase Like 5, Prolow Density Lipoprotein Receptor Related Protein 1, Phenylalanine Ammonia Lyase, Protein Glutamine Gamma Glutamyltransferase K, Lysosomal Protective Protein, or a portion thereof.

[0145] As non-limiting examples, expression of the knocked-in sequence may be involved in or associated with treatment of any one of the following diseases or disorders (which are each followed by a related gene or enzyme in parentheses): Pompe disease (acid α-glucosidase), Mucopolysaccharidosis Type I (α-L-iduronidase), Fabry disease (α-galactosidase), Mucopolysaccharidosis type II (iduronate-2-sulfatase), Mucopolysaccharidosis type IVA (N-acetylgalactosamine-6-sulfatase), Mucopolysaccharidosis type VI (N-acetylgalactosamine-4-sulfatase), Adrenoleukodystrophy (a lysophosphatidylcholine metabolism-related gene, e.g. phospholipase A2), Severe combined immunodeficiency (T-REC or K-REC related gene), Gaucher disease (β-glucosidase or β-glucocerebrosidase), metachromatic leukodystrophy (MLD) (arylsulfatase A), primary immune deficiency, hemophilia A and B (Factor VIII), IGF-1 deficiency (IGF-1), surfactant deficiency (surfactant protein A (SP-A) and/or surfactant protein B (SP-B), Aspartylglucosaminuria (aspartyl-β-glucosaminidase), Sanfilippo syndrome (acetyl-CoA α-glucosaminide), mucopolysaccharidosis type III (acetyl-CoA-arylamine N-acetyltransferase), Sanfilippo Syndrome type IIId (N-acetylglucosamine-6-sulfatase), I-cell disease (N-acetylglucosamine-1-Phosphotransferase), Schindler Disease (α-N-acetylglucosaminidase), Farber disease (FD) or Spinal muscular atrophy with progressive myoclonic epilepsy (SMA-PME) (acid ceramidase), Canavan disease (aspartacylase), Lysosomal acid lipase deficiency (lysosomal acid lipase), Niemann-Pick disease (acid sphingomyelinase), Mucopolysaccharidosis type 6 (arylsulfatase B), Fucosidosis (α-L-fucosidase), Krabbe disease (galactosylceramidase, galactocerebrosidase), GM1 gangliosidosis, mucopolysaccharidosis type IVB (MPS IVB), or galactosialidosis (galactosidase-beta-1 or β-galactosidase (GLB1), or protective protein/cathepsin A), Sly disease (β-glucoronidase), Mucopolysaccharidosis type III (heparan N-sulfatase), Late-onset Tay Sachs (β-hexosaminidase A), Hyaluronidase-1 deficiency (hyaluronidase-1), Alpha-mannosidosis (alpha-D-mannosidase), Beta-mannosidosis (beta-mannosidase), Sialidosis (alpha-neuraminidase), Stanhoff disease (beta-hexosaminidase A and/or beta-hexosaminidase B), Santavuori-Haltia disease (palmitoyl-protein thioesterase), Jansky-Bielschowsky disease (tripeptidyl peptidase I), Batten disease (Battenin), Neuronal ceroid lipofuscinosis type 5 (Ceroid-lipofuscinosis neuronal protein 5 (CLN5)), Neuronal ceroid lipofuscinosis type 6 (CLN6), Neuronal ceroid lipofuscinosis type 7 (CLN7), Neuronal ceroid lipofuscinosis type 8 (CLN8), Congenital cathepsin D deficiency (Cathepsin D), Cystinosis (cystinosin), Pycnodysostosis (cathepsin K), Salla disease (Sialin), and/or Danon disease (Lysosome-associated membrane protein 2 (LAMP2)). As a non-limiting example, a target cell (e.g. a monocyte or macrophage) may be modified to express a metabolic modulator. As a non-limiting example, a target cell may be modified to express human growth hormone, insulin-like growth factor 1 (IGF-1), Factor VIII (hemophilia A and B), follicle-stimulating hormone, erythropoietin, a cytokine, a chemokine, IL-10, IGF1, TGF-β, IL-15, CXCR4, IL-4, granulocyte colony-stimulating factor (G-CSF), galactosamine-6-sulfatase, and/or β-hexosamini enzymes.

[0146] Specifically, monocytes and macrophages reside in target tissues, including in the lungs and brain, and can serve as an expression vector for long-term secretion of proteins in those target tissues. Expression of a transgene under the control of an APLP2 promoter is achieved by CRISPR mediated knock-in at a safe harbor site that is targeted by the guide sequence portions described herein. The protein product of the expressed transgene may be secreted. Accordingly, the ability to generate blood and/or tissues containing modified target cells which continuously secrete a protein of interest serves as an alternative to enzyme replacement therapy (ERT). For example, modified monocytes may be useful to target the central nervous system (CNS) or the lungs and secrete a protein of interest in the target tissue.

[0147] Such an approach is also useful, for example, to treat lysosomal storage diseases. Some of these diseases also display a phenotype in the CNS. Notably, there is a challenge to treat brain damage with enzyme replacement therapy due to the brain blood barrier (BBB). Monocytes may be utilized for delivery across the BBB such that the secreted protein of interest will be secreted in the CNS.

[0148] For example, modified monocytes or macrophages delivered to the brain may be utilized to treat a lysosomal storage disease; modified monocytes or macrophages delivered to the lungs may be utilized to treat anti-trypsin deficiency (A1AT), D-Surfactant deficiency, or proteinosis; or modified monocytes or macrophages in the blood may be utilized to treat A1AT or deficiency of adenosine deaminase 2 (DADA2).

[0149] APLP2 editing strategies include strategies that enable expression of a desired sequence under the control of an APLP2 promoter, optionally without knocking out the edited APLP2 alleles. This can be achieved by the following strategies: (1) knock-in in the first intron of an APLP2 allele, or the first intron that follows the first coding exon of the APLP2 allele or (2) knock-in by replacement of the stop codon of a APLP2 allele.

[0150] For the first strategy (i.e. utilizing a RNA molecule comprising guide sequence portion targeting Intron 1 of the APLP2 gene and mediating a biallelic break), since the break is mediated in a nonregulatory region, it is not expected to affect the expression of the APLP2 gene. For knock-in of a desired sequence without knocking-out the endogenous APLP2 gene, the desired sequence will be inserted as a new exon (e.g. a new exon 2), by adding a splicing acceptor (SA), a branch site, and a splicing donor (SD) element to the knock-in cassette (e.g. as part of a donor molecule). In this manner a mRNA comprising two coding regions (denoted a “bicistronic transcript”) is generated. In addition, to prevent the interruption of the expression of the endogenous APLP2 gene, the cassette will include a self-cleaving peptide (e.g., 2A self-cleaving peptide such as P2A, F2A, E2A, T2A, or combination of two or more thereof) and/or the signal peptide of APLP2 at the C-terminus of the inserted gene, which will be cleaved in the endoplasmic reticulum enabling the separation of the inserted gene product from the APLP2 gene product.

[0151] For the second strategy (i.e. knock-in by replacing the APLP2 stop codon), the biallelic break will be mediated in the 3′UTR region up to 150 nucleotides downstream to the stop codon or upstream to the stop codon but within an intron region. The location of the break is not expected to affect the expression of the APLP2 gene. The knocked-in desired sequence will be inserted instead of the stop codon and the knock-in cassette will contain a 2A self-cleaving peptide at the N-terminus of the inserted sequence enabling the separation of the inserted gene product from the APLP2 gene product.

[0152] APLP2 editing strategies may be utilized to edit T cells for use in chimeric antigen receptor-T cell (CAR-T) therapies. For example, a sequence of interest encoded by a donor molecule (e.g. a CD-19 sequence) may be introduced to an APLP2 safe harbor site that is targeted by an RNA molecule comprising a guide sequence portion described herein. Such editing may be utilized to alter the T-cell receptor expression and/or receptor signaling exhibited by the cell.

### CRISPR Nucleases and PAM Recognition

[0153] In some embodiments, the sequence specific nuclease is selected from CRISPR nucleases, or a functional variant thereof. In some embodiments, the sequence specific nuclease is an RNA-guided DNA nuclease. In some embodiments, the CRISPR complex does not further comprise a tracrRNA. In a non-limiting example, in which the RNA-guided DNA nuclease is a CRISPR protein, the at least one nucleotide which differs between APLP2 alleles may be within the PAM site and/or proximal to the PAM site within the region that the RNA molecule is designed to hybridize to. A skilled artisan will appreciate that RNA molecules can be engineered to bind to a target of choice in a genome by commonly known methods in the art.

[0154] The term “PAM” as used herein refers to a nucleotide sequence of a target DNA located in proximity to the targeted DNA sequence and recognized by the CRISPR nuclease complex. The PAM sequence may differ depending on the nuclease identity. In addition, there are CRISPR nucleases that can target almost all PAMs. In some embodiments of the present invention, a CRISPR system utilizes one or more RNA molecules having a guide sequence portion to direct a CRISPR nuclease to a target DNA site via Watson-Crick base-pairing between the guide sequence portion and the protospacer on the target DNA site, which is next to the protospacer adjacent motif (PAM), which is an additional requirement for target recognition. The CRISPR nuclease then mediates cleavage of the target DNA site to create a double-stranded break within the protospacer. In a non-limiting example, a type II CRISPR system utilizes a mature crRNA:tracrRNA complex that directs the CRISPR nuclease, e.g. Cas9 to the target DNA the target DNA via Watson-Crick base-pairing between the guide sequence portion of the crRNA and the protospacer on the target DNA next to the protospacer adjacent motif (PAM). A skilled artisan will appreciate that each of the engineered RNA molecule of the present invention is further designed such as to associate with a target genomic DNA sequence of interest next to a protospacer adjacent motif (PAM), e.g., a PAM matching the sequence relevant for the type of CRISPR nuclease utilized, such as for a non-limiting example, NGG or NAG, wherein “N” is any nucleobase, for Streptococcus pyogenes Cas9 WT (SpCAS9); NNGRRT for Staphylococcus aureus (SaCas9); NNNVRYM for Jejuni Cas9 WT; NGAN or NGNG for SpCas9-VQR variant; NGCG for SpCas9-VRER variant; NGAG for SpCas9-EQR variant; NRRH for SpCas9-NRRH variant, wherein N is any nucleobase, R is A or G and H is A, C, or T; NRTH for SpCas9-NRTH variant, wherein N is any nucleobase, R is A or G and H is A, C, or T; NRCH for SpCas9-NRCH variant, wherein N is any nucleobase, R is A or G and H is A, C, or T; NG for SpG variant of SpCas9 wherein N is any nucleobase; NG or NA for SpCas9-NG variant of SpCas9 wherein N is any nucleobase; NR or NRN or NYN for SpRY variant of SpCas9, wherein N is any nucleobase, R is A or G and Y is C or T; NNG for Streptococcus canis Cas9 variant (ScCas9), wherein N is any nucleobase; NNNRRT for SaKKH-Cas9 variant of Staphylococcus aureus (SaCas9), wherein N is any nucleobase, and R is A or G; NNNNGATT for Neisseria meningitidis (NmCas9), wherein N is any nucleobase; TTN for Alicyclobacillus acidiphilus Cas12b (AacCas12b), wherein N is any nucleobase; or TTTV for Cpf1, wherein V is A, C or G. RNA molecules of the present invention are each designed to form complexes in conjunction with one or more different CRISPR nucleases and designed to target polynucleotide sequences of interest utilizing one or more different PAM sequences respective to the CRISPR nuclease utilized.

[0155] In some embodiments, an RNA-guided DNA nuclease e.g., a CRISPR nuclease, may be used to cause a DNA break, either double or single-stranded in nature, at a desired location in the genome of a cell. The most commonly used RNA-guided DNA nucleases are derived from CRISPR systems, however, other RNA-guided DNA nucleases are also contemplated for use in the genome editing compositions and methods described herein. For instance, see U.S. Publication No. 2015/0211023, incorporated herein by reference.

[0156] CRISPR systems that may be used in the practice of the invention vary greatly. CRISPR systems can be a type I, a type II, or a type III system. Non-limiting examples of suitable CRISPR proteins include Cas3, Cas4, Cas5, Cas5e (or CasD), Cas6, Cas6e, Cas6f, Cas7, Cas8al, Cas8a2, Cas8b, Cas8c, Cas9, Casl0, Casl Od, CasF, CasG, CasH, Csyl, Csy2, Csy3, Csel (or CasA), Cse2 (or CasB), Cse3 (or CasE), Cse4 (or CasC), Cscl, Csc2, Csa5, Csn2, Csm2, Csm3, Csm4, Csm5, Csm6, Cmrl, Cmr3, Cmr4, Cmr5, Cmr6, Csbl, Csb2, Csb3, Csxl7, Csxl4, Csxl0, Csxl6, CsaX, Csx3, Cszl, Csxl5, Csfl, Csf2, Csf3, Csf4, and Cul966.

[0157] In some embodiments, the RNA-guided DNA nuclease is a CRISPR nuclease derived from a type II CRISPR system (e.g., Cas9). The CRISPR nuclease may be derived from Streptococcus pyogenes, Streptococcus thermophilus, Streptococcus sp., Staphylococcus aureus, Neisseria meningitidis, Treponema denticola, Nocardiopsis dassonvillei, Streptomyces pristinaespiralis, Streptomyces viridochromogenes, Streptomyces viridochromogenes, Streptosporangium roseum, Streptosporangium roseum, Alicyclobacillus acidocaldarius, Bacillus pseudomycoides, Bacillus selenitireducens, Exiguobacterium sibiricum, Lactobacillus delbrueckii, Lactobacillus salivarius, Microscilla marina, Burkholderiales bacterium, Polaromonas naphthalenivorans, Polaromonas sp., Crocosphaera watsonii, Cyanothece sp., Microcystis aeruginosa, Synechococcus sp., Acetohalobium arabaticum, Ammonifex degensii, Caldicelulosiruptor becscii, Candidatus Desulforudis, Clostridium botulinum, Clostridium difficile, Finegoldia magna, Natranaerobius thermophilus, Pelotomaculum thermopropionicum, Acidithiobacillus caldus, Acidithiobacillus ferrooxidans, Allochromatium vinosum, Marinobacter sp., Nitrosococcus halophilus, Nitrosococcus watsoni, Pseudoalteromonas haloplanktis, Ktedonobacter racemifer, Methanohalobium evestigatum, Anabaena variabilis, Nodularia spumigena, Nostoc sp., Arthrospira maxima, Arthrospira platensis, Arthrospira sp., Lyngbya sp., Microcoleus chthonoplastes, Oscillatoria sp., Petrotoga mobilis, Thermosipho africanus, Acaryochloris marina, or any species which encodes a CRISPR nuclease with a known PAM sequence. CRISPR nucleases encoded by uncultured bacteria may also be used in the context of the invention. (See Burstein et al. Nature, 2017). Variants of CRISPR proteins having known PAM sequences e.g., SpCas9 D1135E variant, SpCas9 VQR variant, SpCas9 EQR variant, or SpCas9 VRER variant may also be used in the context of the invention.

[0158] Thus, an RNA-guided DNA nuclease of a CRISPR system, such as a Cas9 protein or modified Cas9 or homolog or ortholog of Cas9, or other RNA-guided DNA nucleases belonging to other types of CRISPR systems, such as Cpf1 and its homologs and orthologs, may be used in the compositions of the present invention. Additional CRISPR nucleases may also be used, for example, the nucleases described in PCT International Application Publication Nos. WO2020/223514 and WO2020/223553, which are hereby incorporated by reference

[0159] In certain embodiments, the CRISPR nuclease may be a “functional derivative” of a naturally occurring Cas protein. A “functional derivative” of a native sequence polypeptide is a compound having a qualitative biological property in common with a native sequence polypeptide. “Functional derivatives” include, but are not limited to, fragments of a native sequence and derivatives of a native sequence polypeptide and its fragments, provided that they have a biological activity in common with a corresponding native sequence polypeptide. A biological activity contemplated herein is the ability of the functional derivative to hydrolyze a DNA substrate into fragments. The term “derivative” encompasses both amino acid sequence variants of polypeptide, covalent modifications, and fusions thereof. Suitable derivatives of a Cas polypeptide or a fragment thereof include but are not limited to mutants, fusions, covalent modifications of Cas protein or a fragment thereof. Derivatives include, but are not limited to, CRISPR nickases, catalytically inactive or “dead” CRISPR nucleases, and fusion of a CRISPR nuclease or derivative thereof to other enzymes such as base editors or retrotransposons. See for example, Anzalone et al. (2019) and PCT International Application No. PCT/US2020/037560.

[0160] Cas protein, which includes Cas protein or a fragment thereof, as well as derivatives of Cas protein or a fragment thereof, may be obtainable from a cell or synthesized chemically or by a combination of these two procedures. The cell may be a cell that naturally produces Cas protein, or a cell that naturally produces Cas protein and is genetically engineered to produce the endogenous Cas protein at a higher expression level or to produce a Cas protein from an exogenously introduced nucleic acid, which nucleic acid encodes a Cas that is same or different from the endogenous Cas. In some cases, the cell does not naturally produce Cas protein and is genetically engineered to produce a Cas protein.

[0161] In some embodiments, the CRISPR nuclease is Cpf1. Cpf1 is a single RNA-guided endonuclease which utilizes a T-rich protospacer-adjacent motif Cpf1 cleaves DNA via a staggered DNA double-stranded break. Two Cpf1 enzymes from Acidaminococcus and Lachnospiraceae have been shown to carry out efficient genome-editing activity in human cells. (See Zetsche et al., 2015).

[0162] Thus, an RNA-guided DNA nuclease of a Type II CRISPR System, such as a Cas9 protein or modified Cas9 or homologs, orthologues, or variants of Cas9, or other RNA-guided DNA nucleases belonging to other types of CRISPR systems, such as Cpf1 and its homologs, orthologues, or variants, may be used in the present invention.

[0163] In some embodiments, the guide molecule comprises one or more chemical modifications which imparts a new or improved property (e.g., improved stability from degradation, improved hybridization energetics, or improved binding properties with an RNA-guided DNA nuclease). Suitable chemical modifications include, but are not limited to: modified bases, modified sugar moieties, or modified inter-nucleoside linkages. Non-limiting examples of suitable chemical modifications include: 4-acetylcytidine, 5-(carboxyhydroxymethyl)uridine, 2′-O-methylcytidine, 5-carboxymethylaminomethyl-2-thiouridine, 5-carboxymethylaminomethyluridine, dihydrouridine, 2′-O-methylpseudouridine, “beta, D-galactosylqueosine”, 2′-O-methylguanosine, inosine, N6-isopentenyladenosine, 1-methyladenosine, 1-methylpseudouridine, 1-methylguanosine, 1-methylinosine, “2,2-dimethylguanosine”, 2-methyladenosine, 2-methylguanosine, 3-methylcytidine, 5-methylcytidine, N6-methyladenosine, 7-methylguanosine, 5-methylaminomethyluridine, 5-methoxyaminomethyl-2-thiouridine, “beta, D-mannosylqueosine”, 5-methoxycarbonylmethyl-2-thiouridine, 5-methoxycarbonylmethyluridine, 5-methoxyuridine, 2-methylthio-N6-isopentenyladenosine, N-((9-beta-D-ribofuranosyl-2-methylthiopurine-6-yl)carbamoyl)threonine, N-((9-beta-D-ribofuranosylpurine-6-yl)N-methylcarbamoyl)threonine, uridine-5-oxyacetic acid-methylester, uridine-5-oxyacetic acid, wybutoxosine, queuosine, 2-thiocytidine, 5-methyl-2-thiouridine, 2-thiouridine, 4-thiouridine, 5-methyluridine, N-((9-beta-D-ribofuranosylpurine-6-yl)-carbamoyl)threonine, 2′-O-methyl-5-methyluridine, 2′-O-methyluridine, wybutosine, “3-(3-amino-3-carboxy-propyl)uridine, (acp3)u”, 2′-0-methyl (M), 3′-phosphorothioate (MS), 3′-thioPACE (MSP), pseudouridine, or 1-methyl pseudo-uridine. Each possibility represents a separate embodiment of the present invention.

Guide Sequences which Target a APLP2 Allele

[0164] Any given RNA molecule comprising a guide sequence portion utilized to target a DNA site may result in degradation of the RNA molecule, limited activity, no activity, or off-target effects. Accordingly, suitable guide sequence portions are necessary for targeting a given DNA site in a gene.

[0165] By the present invention, a novel set of guide sequence portions have been identified for targeting at least one APLP2 allele and introducing to the at least one allele a sequence of nucleotides to be expressed under the control of the APLP2 promoter. Such a gene editing approach may be used to treat a disorder or disease or modify behavior of a cell. Preferably, a non-discriminatory RNA molecule capable of targeting both APLP2 alleles is used for targeting.

[0166] In some embodiments of the present invention, an RNA molecule is used to target a site in the APLP2 gene to introduce, or knock-in, an exogenous sequence of nucleotides into the APLP2 gene. In some embodiments, the location of the site is near the intended knock-in site, preferably near the start codon or the stop codon, preferably within 150 nucleotides of the start codon or stop codon. In some embodiments, the site is located within the first intron that follows the first coding exon of a targeted APLP2 allele. In some embodiments, the site is located within Intron 1 or Exon 17 of a targeted APLP2 allele.

### Delivery to Cells

[0167] The compositions described herein may be delivered to a target cell by any suitable means. Compositions of the present invention may be targeted to any cell which contains and/or expresses a APLP2 allele, including any mammalian cell, preferably a monocyte or macrophage. For example, in one embodiment an RNA molecule that specifically targets a APLP2 allele is delivered to a target cell and the target cell is monocyte or macrophage. The delivery to the cell may be performed in vitro, ex vivo, or in vivo. Further, the nucleic acid compositions described herein may be delivered as one or more of DNA molecules, RNA molecules, ribonucleoproteins (RNPs), nucleic acid vectors, or any combination thereof.

[0168] In some embodiments, in vivo delivery methods of the compositions described herein include delivery by a lentivirus, adeno-associated virus (AAV) or nanoparticle. In some embodiments, in vivo delivery methods of the compositions described herein include delivery by a lentivirus, adeno-associated virus (AAV) or nanoparticle. The composition may be in the form of an RNP composition. Accordingly, the delivery can be in vivo to monocytes or macrophages within a subject.

[0169] In some embodiments, any one of the compositions described herein is delivered to a cell ex vivo. In some embodiments, the cell is a stem cell. In some embodiments, the cell is a monocyte. In some embodiments, the cell is a macrophage. In some embodiments, the cell is an iPS-derived monocyte or macrophage. In some embodiments, the cell is a hematopoietic stem cell (HSC), a hematopoietic stem and progenitor cell (HSPC), a myeloid precursor cell, a myeloblast, a lymphoblast, an erythroid precursor cell, a platelet cell, a natural killer (NK) cell, a B-lymphocyte, a T-lymphocyte, an eosinophil, a neutrophil, or a basophil The composition may be delivered to the cell by any known ex vivo delivery method, including but not limited to, electroporation, viral transduction, nanoparticle delivery, liposomes, etc. The composition may be in the form of an RNP composition. Additional detailed delivery methods are described throughout this section.

[0170] In some embodiments, an RNA molecule of a composition described herein comprises a chemical modification. Non-limiting examples of suitable chemical modifications include 2′-0-methyl (M), 2′-0-methyl, 3phosphorothioate (MS) or 2′-0-methyl, 3′thioPACE (MSP), pseudouridine, and 1-methyl pseudo-uridine. Each possibility represents a separate embodiment of the present invention.

[0171] Any suitable viral vector system may be used to deliver nucleic acid compositions e.g., the RNA molecule compositions of the subject invention. Conventional viral and non-viral based gene transfer methods can be used to introduce nucleic acids and target tissues. In certain embodiments, nucleic acids are administered for in vivo or ex vivo gene therapy uses. Non-viral vector delivery systems include naked nucleic acid, and nucleic acid complexed with a delivery vehicle such as a liposome or poloxamer. For a review of gene therapy procedures, see Anderson (1992); Nabel & Felgner (1993); Mitani & Caskey (1993); Dillon (1993); Miller (1992); Van Brunt (1988); Vigne (1995); Kremer & Perricaudet (1995); Haddada et al. (1995); and Yu et al. (1994).

[0172] Methods of non-viral delivery of nucleic acids and/or proteins include electroporation, lipofection, microinjection, biolistics, particle gun acceleration, virosomes, liposomes, immunoliposomes, lipid nanoparticles (LNPs), polycation or lipid:nucleic acid conjugates, artificial virions, and agent-enhanced uptake of nucleic acids or can be delivered to plant cells by bacteria or viruses (e.g., Agrobacterium, Rhizobium sp. NGR234, Sinorhizobium meliloti, Mesorhizobium loti, tobacco mosaic virus, potato virus X, cauliflower mosaic virus and cassava vein mosaic virus). (See, e.g., Chung et al., 2006). Sonoporation using, e.g., the Sonitron 2000 system (Rich-Mar), can also be used for delivery of nucleic acids. Cationic-lipid mediated delivery of proteins and/or nucleic acids is also contemplated as an in vivo, ex vivo, or in vitro delivery method. (See Zuris et al. (2015); see also Coelho et al. (2013); Judge et al. (2006); and Basha et al. (2011)).

[0173] Non-viral vectors, such as transposon-based systems e.g. recombinant Sleeping Beauty transposon systems or recombinant PiggyBac transposon systems, may also be delivered to a target cell and utilized for transposition of a polynucleotide sequence of a molecule of the composition or a polynucleotide sequence encoding a molecule of the composition in the target cell.

[0174] Additional exemplary nucleic acid delivery systems include those provided by Amaxa® Biosystems (Cologne, Germany), Maxcyte, Inc. (Rockville, Md.), BTX Molecular Delivery Systems (Holliston, Mass.) and Copernicus Therapeutics Inc., (see, e.g., U.S. Pat. No. 6,008,336). Lipofection is described in e.g., U.S. Pat. Nos. 5,049,386, 4,946,787; and 4,897,355, and lipofection reagents are sold commercially (e.g., Transfectam™, Lipofectin™ and Lipofectamine™ RNAiMAX). Cationic and neutral lipids that are suitable for efficient receptor-recognition lipofection of polynucleotides include those disclosed in PCT International Publication Nos. WO/1991/017424 and WO/1991/016024. Delivery can be to cells (ex vivo administration) or target tissues (in vivo administration).

[0175] The preparation of lipid:nucleic acid complexes, including targeted liposomes such as immunolipid complexes, is well known to one of skill in the art (see, e.g., Crystal, Science (1995); Blaese et al., (1995); Behr et al., (1994); Remy et al. (1994); Gao and Huang (1995); Ahmad and Allen (1992); U.S. Pat. Nos. 4,186,183; 4,217,344; 4,235,871; 4,261,975; 4,485,054; 4,501,728; 4,774,085; 4,837,028; and 4,946,787).

[0176] Additional methods of delivery include the use of packaging the nucleic acids to be delivered into EnGeneIC delivery vehicles (EDVs). These EDVs are specifically delivered to target tissues using bispecific antibodies where one arm of the antibody has specificity for the target tissue and the other has specificity for the EDV. The antibody brings the EDVs to the target cell surface and then the EDV is brought into the cell by endocytosis. Once in the cell, the contents are released (See MacDiarmid et al., 2009).

[0177] The use of RNA or DNA viral based systems for viral mediated delivery of nucleic acids take advantage of highly evolved processes for targeting a virus to specific cells in the body and trafficking the viral payload to the nucleus. Viral vectors can be administered directly to patients (in vivo) or they can be used to treat cells in vitro and the modified cells are administered to patients (ex vivo). Conventional viral based systems for the delivery of nucleic acids include, but are not limited to, retroviral, lentivirus, adenoviral, adeno-associated, vaccinia and herpes simplex virus vectors for gene transfer.

[0178] The tropism of a retrovirus can be altered by incorporating foreign envelope proteins, expanding the potential target population of target cells. Lentiviral vectors are retroviral vectors that are able to transduce or infect non-dividing cells and typically produce high viral titers. Selection of a retroviral gene transfer system depends on the target tissue. Retroviral vectors are comprised of cis-acting long terminal repeats with packaging capacity for up to 6-10 kb of foreign sequence. The minimum cis-acting LTRs are sufficient for replication and packaging of the vectors, which are then used to integrate the therapeutic gene into the target cell to provide permanent transgene expression. Widely used retroviral vectors include those based upon murine leukemia virus (MuLV), gibbon ape leukemia virus (GaLV), Simian Immunodeficiency virus (SIV), human immunodeficiency virus (HIV), and combinations thereof (See, e.g., Buchschacher et al. (1992); Johann et al. (1992); Sommerfelt et al. (1990); Wilson et al. (1989); Miller et al. (1991); PCT International Publication No. WO/1994/026877A1).

[0179] At least six viral vector approaches are currently available for gene transfer in clinical trials, which utilize approaches that involve complementation of defective vectors by genes inserted into helper cell lines to generate the transducing agent.

[0180] pLASN and MFG-S are examples of retroviral vectors that have been used in clinical trials (See Dunbar et al., 1995; Kohn et al., 1995; Malech et al., 1997). PA317/pLASN was the first therapeutic vector used in a gene therapy trial (Blaese et al., 1995). Transduction efficiencies of 50% or greater have been observed for MFG-S packaged vectors. (Ellem et al., (1997); Dranoff et al., 1997).

[0181] Packaging cells are used to form virus particles that are capable of infecting a host cell. Such cells include 293 cells, which package adenovirus, AAV, and Psi-2 cells or PA317 cells, which package retrovirus. Viral vectors used in gene therapy are usually generated by a producer cell line that packages a nucleic acid vector into a viral particle. The vectors typically contain the minimal viral sequences required for packaging and subsequent integration into a host (if applicable), other viral sequences being replaced by an expression cassette encoding the protein to be expressed. The missing viral functions are supplied in trans by the packaging cell line. For example, AAV vectors used in gene therapy typically only possess inverted terminal repeat (ITR) sequences from the AAV genome which are required for packaging and integration into the host genome. Viral DNA is packaged in a cell line, which contains a helper plasmid encoding the other AAV genes, namely rep and cap, but lacking ITR sequences. The cell line is also infected with adenovirus as a helper. The helper virus promotes replication of the AAV vector and expression of AAV genes from the helper plasmid. The helper plasmid is not packaged in significant amounts due to a lack of ITR sequences. Contamination with adenovirus can be reduced by, e.g., heat treatment to which adenovirus is more sensitive than AAV. Additionally, AAV can be produced at clinical scale using baculovirus systems (see U.S. Pat. No. 7,479,554).

[0182] In many gene therapy applications, it is desirable that the gene therapy vector be delivered with a high degree of specificity to a particular tissue type. Accordingly, a viral vector can be modified to have specificity for a given cell type by expressing a ligand as a fusion protein with a viral coat protein on the outer surface of the virus. The ligand is chosen to have affinity for a receptor known to be present on the cell type of interest. For example, Han et al. (1995) reported that Moloney murine leukemia virus can be modified to express human heregulin fused to gp70, and the recombinant virus infects certain human breast cancer cells expressing human epidermal growth factor receptor. This principle can be extended to other virus-target cell pairs, in which the target cell expresses a receptor and the virus expresses a fusion protein comprising a ligand for the cell-surface receptor. For example, filamentous phage can be engineered to display antibody fragments (e.g., FAB or Fv) having specific binding affinity for virtually any chosen cellular receptor. Although the above description applies primarily to viral vectors, the same principles can be applied to nonviral vectors. Such vectors can be engineered to contain specific uptake sequences which favor uptake by specific target cells.

[0183] Gene therapy vectors can be delivered in vivo by administration to an individual patient, typically by systemic administration (e.g., intravitreal, intravenous, intraperitoneal, intramuscular, subdermal, or intracranial infusion) or topical application, as described below. Alternatively, vectors can be delivered to cells ex vivo, such as cells explanted from an individual patient (e.g., lymphocytes, bone marrow aspirates, tissue biopsy) or universal donor hematopoietic stem cells, followed by reimplantation of the cells into a patient, optionally after selection for cells which have incorporated the vector. A non-limiting exemplary ex vivo approach may involve removal of tissue (e.g., peripheral blood, bone marrow, and spleen) from a patient for culture, nucleic acid transfer to the cultured cells (e.g., hematopoietic stem cells), followed by grafting the cells to a target tissue (e.g., bone marrow, and spleen) of the patient. In some embodiments, the stem cell or hematopoietic stem cell may be further treated with a viability enhancer.

[0184] Ex vivo cell transfection for diagnostics, research, or for gene therapy (e.g., via re-infusion of the transfected cells into the host organism) is well known to those of skill in the art. In a preferred embodiment, cells are isolated from the subject organism, transfected with a nucleic acid composition, and re-infused back into the subject organism (e.g., patient). Various cell types suitable for ex vivo transfection are well known to those of skill in the art (See, e.g., Freshney, “Culture of Animal Cells, A Manual of Basic Technique and Specialized Applications (6th edition, 2010) and the references cited therein for a discussion of how to isolate and culture cells from patients).

[0185] Suitable cells include, but are not limited to, eukaryotic cells and/or cell lines. Non-limiting examples of such cells or cell lines generated from such cells include COS, CHO (e.g., CHO—S, CHO-K1, CHO-DG44, CHO-DUXB11, CHO-DUKX, CHOK1SV), VERO, MDCK, WI38, V79, B14AF28-G3, BHK, HaK, NSO, SP2/0-Ag14, HeLa, HEK293 (e.g., HEK293-F, HEK293-H, HEK293-T), perC6 cells, any plant cell (differentiated or undifferentiated), as well as insect cells such as Spodoptera frugiperda (Sf), or fungal cells such as Saccharomyces, Pichia and Schizosaccharomyces. In certain embodiments, the cell line is a CHO-K1, MDCK or HEK293 cell line. Additionally, primary cells may be isolated and used ex vivo for reintroduction into the subject to be treated following treatment with a guided nuclease system (e.g. CRISPR/Cas). Suitable primary cells include peripheral blood mononuclear cells (PBMC), and other blood cell subsets such as, but not limited to, CD4+ T cells or CD8+ T cells. Suitable cells also include stem cells such as, by way of example, embryonic stem cells, induced pluripotent stem cells, hematopoietic stem cells (CD34+), neuronal stem cells and mesenchymal stem cells.

[0186] In one embodiment, stem cells are used in ex vivo procedures for cell transfection and gene therapy. The advantage to using stem cells is that they can be differentiated into other cell types in vitro, or can be introduced into a mammal (such as the donor of the cells) where they will engraft in the bone marrow. Methods for differentiating CD34+ cells in vitro into clinically important immune cell types using cytokines such a GM-CSF, IFN-gamma, and TNF-alpha are known (as a non-limiting example see, Inaba et al., 1992).

[0187] Stem cells are isolated for transduction and differentiation using known methods. For example, stem cells are isolated from bone marrow cells by panning the bone marrow cells with antibodies which bind unwanted cells, such as CD4+ and CD8+ (T cells), CD45+ (panB cells), GR-1 (granulocytes), and lad (differentiated antigen presenting cells) (as a non-limiting example, see Inaba et al., 1992). Stem cells that have been modified may also be used in some embodiments.

[0188] Vectors (e.g., retroviruses, liposomes, etc.) containing therapeutic nucleic acid compositions can also be administered directly to an organism for transduction of cells in vivo. Administration is by any of the routes normally used for introducing a molecule into ultimate contact with blood or tissue cells including, but not limited to, injection, infusion, topical application (e.g., eye drops and cream) and electroporation. Suitable methods of administering such nucleic acids are available and well known to those of skill in the art, and, although more than one route can be used to administer a particular composition, a particular route can often provide a more immediate and more effective reaction than another route. According to some embodiments, the composition is delivered via IV injection.

[0189] Vectors suitable for introduction of transgenes into immune cells (e.g., T-cells) include non-integrating lentivirus vectors. See, e.g., U.S. Publication No. 2009/0117617.

[0190] Pharmaceutically acceptable carriers are determined in part by the particular composition being administered, as well as by the particular method used to administer the composition. Accordingly, there is a wide variety of suitable formulations of pharmaceutical compositions available, as described below (See, e.g., Remington's Pharmaceutical Sciences, 17th ed., 1989).

[0191] The disclosed compositions and methods may also be used in the manufacture of a medicament for treating a disease or disorder in a patient.

### Mechanisms of Action for APLP2 Safe Harbor Knock-In Methods

[0192] Without being bound by any theory or mechanism, the instant invention may be utilized to apply a CRISPR nuclease to process a APLP2 allele in order to introduce a sequence to a safe harbor site within the APLP2 allele and thereby control expression of the introduced sequence by the promoter of the APLP2 allele. A specific guide sequence may be selected from Table 1 based on the targeted position and the type of CRISPR nuclease used (e.g. according to a required PAM sequence).

[0193] The APLP2 gene is located on chromosome 11 and encodes the Amyloid Beta Precursor Like Protein 2 protein. A donor molecule may be used to introduce a desired sequence of nucleotides into an APLP2 safe harbor site via knock-in.

[0194] One strategy is to knock-in a sequence of nucleotides in the first intron or the first intron that follows the first coding exon of the APLP2 gene. This strategy utilizes an RNA molecule to target a CRISPR nuclease to Intron 1 of the APLP2 gene and thereby mediate a double-stranded break. Since the break is mediated in a nonregulatory region, it is not expected to affect the expression of the gene. For knock-in of a sequence without a knockout of APLP2, the sequence is inserted as a new exon (namely, Exon 2), by adding splicing acceptor (SA) and splicing donor (SD) elements to the knock-in donor cassette. In addition, to prevent the interruption of the expression of the APLP2 gene, the donor cassette includes a 2A self-cleaving peptide and/or the signal peptide of APLP2 at the C-terminus of the inserted gene, which is cleaved in the endoplasmic reticulum and enables the separation of the inserted sequence protein expression product from APLP2 protein.

[0195] Another strategy is to knock-in a sequence of nucleotides in the APLP2 gene by replacing the stop codon. In this case a biallelic break will be mediated in a 3′UTR region either up to 150 nucleotides downstream of the stop codon or upstream to the stop codon but in an intron region. The location of the break in these regions does not affect the expression of APLP2. The knocked-in sequence of nucleotides is inserted in place of the stop codon and the knock-in donor cassette contains a 2A self-cleaving peptide at the N-terminus of the inserted sequence of nucleotides enabling the separation of the inserted sequence protein expression product from APLP2 protein.

### Examples of RNA Guide Sequences which Specifically Target Alleles of the APLP2 Gene

[0196] Although a large number of guide sequences can be designed to target a APLP2 allele, the nucleotide sequences described in Table 1 identified by SEQ ID NOs: 1-159641 below were specifically selected to effectively implement the methods set forth herein.

[0197] Table 1 lists guide sequences designed for use as described in the embodiments above to associate specific sequences within an APLP2 allele. Each engineered guide molecule is further designed such as to associate with a target genomic DNA sequence of interest that lies next to a protospacer adjacent motif (PAM), e.g., a PAM matching the sequence NGG or NAG, where “N” is any nucleobase. The guide sequences were designed to work in conjunction with one or more different CRISPR nucleases, including, but not limited to, e.g. SpCas9WT (PAM SEQ: NGG), SpCas9.VQR.1 (PAM SEQ: NGAN), SpCas9.VQR.2 (PAM SEQ: NGNG), SpCas9.EQR (PAM SEQ: NGAG), SpCas9.VRER (PAM SEQ: NGCG), SaCas9WT (PAM SEQ: NNGRRT), SpRY (PAM SEQ: NRN or NYN), NmCas9WT (PAM SEQ: NNNNGATT), Cpf1 (PAM SEQ: TTTV), or JeCas9WT (PAM SEQ: NNNVRYM). RNA molecules of the present invention are each designed to form complexes in conjunction with one or more different CRISPR nucleases and designed to target polynucleotide sequences of interest utilizing one or more different PAM sequences respective to the CRISPR nuclease utilized.

TABLE 1
Guide sequence portions designed to associate
with specific APLP2 gene targets

| | SEQ ID NOs: | SEQ ID NOs: | SEQ ID NOs: |
|---|---|---|---|
| | of 20 base | of 21 base | of 22 base |
| Target | guides | guides | guides |
| 11: 130142110- | 1-3338 | 3339-6601 | 6602-9941 |
| 130144147 Exon 17 | | | |
| 11: 130070140- | 9942-61290 | 61291-109427 | 109428-159641 |
| 130109426 Intron 1 | | | |

The indicated locations listed in column 1 of Table 1 are based on gnomAD v3 database and UCSC Genome Browser assembly ID: hg38, Sequencing/Assembly provider ID: Genome Reference Consortium Human GRCh38.p12 (GCA_000001405.27). Assembly date: December 2013 initial release; December 2017 patch release 12.

[0198] Examples are provided below to facilitate a more complete understanding of the invention. The following examples illustrate the exemplary modes of making and practicing the invention. However, the scope of the invention is not limited to specific embodiments disclosed in these Examples, which are for purposes of illustration only.

### EXPERIMENTAL DETAILS

### Example 1: APLP2 On-Target Activity Analysis

[0199] Guide sequences comprising 17-50 contiguous nucleotides containing nucleotides in the sequence set forth in any one of SEQ ID NOs: 1-159641 are screened for high on target activity using a CRISPR nuclease in HeLa cells. On target activity is determined by DNA capillary electrophoresis analysis.

### Example 2: Insertion of a Sequence of Interest at a APLP2 Safe Harbor Site

[0200] APLP2 was selected as a genomic safe harbor site in macrophages for the following reasons: 1) APLP2 is highly expressed in the target cells; 2) the first exon of APLP2 encodes a signal peptide (SP) which could be utilized to enable secretion of an introduced gene of interest; and 3) no risk of APLP2 haploinsufficiency. To take advantage of the APLP2 SP, a strategy was designed to insert a donor DNA in the first intron of APLP2 downstream to the SP. This homology directed repair (HDR) dependent insertion is enabled by CRISPR-induced DNA damage paired with a donor sequence encoding the gene of interest. The strategy aims to enable both expression and secretion of the gene of interest while maintaining the expression and function of the safe harbor site-containing gene.

### CRISPR-Based Ribonucleoprotein (RNP) Composition Allows Editing in Intron 1 of APLP2

[0201] A guide screen in HeLa cells was performed to identify a potential CRISPR-based RNP composition which allows for editing in Intron 1 of APLP2. Briefly, an OMNI-50 nuclease coding plasmid (64 ng) was co-transfected with each of the guide expressing plasmids (20 ng) in a 96-well plate format using jetOPTIMUS reagent (Polyplus). Cells were harvested 72 hours post-transfection, genomic DNA was extracted, and the DNA was analyzed using next generation sequencing (NGS). The observed percent editing (%) as measured by indel abundance varied between the guides used and resulted in up to 50% editing using the OMNI-50 nuclease (FIG. 1A).

[0202] The top guides were then examined in hematopoietic stem cells (HSCs) using electroporation of RNPs. A composition of a single-guide RNA (sgRNA) (120 pmole) with either an OMNI-50 or OMNI-50 V6172 nuclease (105 pmole) was electroporated into cells using Lonza P3 cell 4D-nucleofector X Kiu S (CA-137 program, PBC2-00675, Lonza). 72 hours later HSCs were harvested and genomic DNA was analyzed using NGS. Analysis revealed editing levels comparable to levels observed in HeLa cells (FIG. 1B). APLP2 guide s30 showed the highest editing efficacy of ˜70% with either OMNI-50 or OMNI-50 V6172 and was selected as the composition for our further studies with OMNI-50 V6172. Upon examining protein APLP2 levels using western blot, we did not observe any change in APLP2 expression (see FIGS. 3B-3C).

### HDR Editing Template Integration in Intron 1 of APLP2

[0203] AAV particles carrying a donor construct encoding for GFP fused to the self-cleaving P2A-T2A elements (2A) and SP were generated to examine the feasibility of HDR editing template integration in Intron 1 of APLP2. As shown in FIG. 2, our donor targets Intron 1 of APLP2 downstream to the APLP2 SP. Our donor construct contains a GFP-2A-SP sequence flanked by a splice acceptor and splice donor, and by 800 basepair homology arms matching the APLP2 s30 cleavage site (see SEQ ID NO: 159654 as well as details of the donor construct sequence for each element in the table below). CRISPR-mediated DNA cleavage facilitates HDR integration of the donor sequence into Intron 1. This results in an open reading frame encoding for SP-GFP-2A-SP-APLP2 which, following 2A self-cleaving, results in two separated polypeptides of SP-GFP and SP-APLP2. Importantly, since the donor does not contain any promoter or other mRNA-stabilizing elements, GFP cannot be expressed without successful integration into the desired locus.

| Element | Sequence |
|---|---|
| 5′ homology | TGAAAACTAAGGTCAAGAGAGATTAAATAACTTCCATGAGATTA |
| arm to APLP2 | CATAGCAAGGAAGCAGAATGTCCATCAGGAAAACCAGTTTAGAA |
| Sequence | AAATAATTTACATAGTGCTCTTCTGATCACAGAAGTGTTTTGATA |
| | GTTGCAGATTCATCTTGACTTCACTTCCAAGTCCCGGAAGCTGGG |
| | CTAGAGCCAGGAAGTCAGCAACTCTTGGCCATTTTCTTTTAAATG |
| | TATTAAATCATTCATCTAAACGTTTGGTGACTGAATTCCCACAAA |
| | ATATGAAGCATTAATGCAACCTGCTTTCCTCATGTCCATAGTTAA |
| | TGTGTGAAGAAGGAATGTGCACTCTTTTAAACCCATTTCATGCCA |
| | TCCTGGATTTGGGAAGGATGGCCAGTCATGTGGGGACTTTGTGG |
| | CCTCTTCCCTTGTGCACCTCGGGTTCAAGCCCCAGTTCTGCGCAA |
| | TTGCAGCCAGAGAGTGGAAAGAGCCAGCCTGATGATGATGGTGA |
| | TGCTAACGTGCTTGCTCTGCGGCAGGCATTGTGCTCAGTGGTTCT |
| | GCGTGTTATTTTAATCGAATCCTCACAACAGGCCTGAGCCGTCGG |
| | TATGTTAATAACCCTGTTTTGTAGATTAAAAAATTAAAACCTGGT |
| | AATAATGAAAGCTCCCAATGCTTGAAGAGCGCTTCTATGTGACA |
| | AACACTTTTCAAACACTTAACATATATTAACTCATTTAAACGTCA |
| | GAGCAGCACTGATGTGTAGTTATTATTGTCATTACCTTATAGATG |
| | ACGAAAGTGAAGCCCAGAGAGGCTAGGTGACCTGCCAGAG (SEQ |
| | ID NO: 159647) |
| Splice acceptor | TACTGACATCCACTTTGCCTTTCTCTCCACAG |
| sequence | (SEQ ID NO: 159648) |
| GFP | GTGAGCAAGGGCGAGGAGCTGTTCACCGGGGTGGTGCCCATCCT |
| | GGTCGAGCTGGACGGCGACGTAAACGGCCACAAGTTCAGCGTGT |
| | CCGGCGAGGGCGAGGGCGATGCCACCTACGGCAAGCTGACCCTG |
| | AAGTTCATCTGCACCACCGGCAAGCTGCCCGTGCCCTGGCCCACC |
| | CTCGTGACCACCCTGACCTACGGCGTGCAGTGCTTCAGCCGCTAC |
| | CCCGACCACATGAAGCAGCACGACTTCTTCAAGTCCGCCATGCC |
| | CGAAGGCTACGTCCAGGAGCGCACCATCTTCTTCAAGGACGACG |
| | GCAACTACAAGACCCGCGCCGAGGTGAAGTTCGAGGGCGACACC |
| | CTGGTGAACCGCATCGAGCTGAAGGGCATCGACTTCAAGGAGGA |
| | CGGCAACATCCTGGGGCACAAGCTGGAGTACAACTACAACAGCC |
| | ACAACGTCTATATCATGGCCGACAAGCAGAAGAACGGCATCAAG |
| | GTGAACTTCAAGATCCGCCACAACATCGAGGACGGCAGCGTGCA |
| | GCTCGCCGACCACTACCAGCAGAACACCCCCATCGGCGACGGCC |
| | CCGTGCTGCTGCCCGACAACCACTACCTGAGCACCCAGTCCGCCC |
| | TGAGCAAAGACCCCAACGAGAAGCGCGATCACATGGTCCTGCTG |
| | GAGTTCGTGACCGCCGCCGGGATCACTCTCGGCATGGACGAGCT |
| | GTACAAG (SEQ ID NO: 159649) |
| HA-P2A-T2A | TCCTACCCATACGATGTTCCAGATTACGCGGCCGCTGCCACCAAC |
| | TTCAGCCTGCTGAAGCAGGCCGGCGACGTGGAGGAGAACCCCGG |
| | CCCCGGAAGCGGAGAGGGCAGAGGAAGTCTGCTAACATGCGGT |
| | GACGTCGAGGAGAATCCTGGACCT (SEQ ID NO: ) |
| APOH-signal | ATGATTTCTCCAGTGCTCATCTTGTTCTCGAGTTTTCTCTGCCATG |
| peptide | TTGCTATTGCAGGACGG (SEQ ID NO: 159650) |
| Splice donor | GTAAGTTCAAGGTTACAAGACAGGTTTAAGGAGACCAATAGAAA |
| sequence | CTG (SEQ ID NO: 159651) |
| 3′ Homology | TTGGCACAGCCAGTCAGTGATGGAGGTGGAACTCTGTCATGGTG |
| arm | TGTCTGCGCCTTAAAGCCACACTCTTGGTCTTTCTCCCAGGTCAG |
| | TAGTACAGTGAGTAGAAGAGTAATGGTTGGCCGAGGCCAGTCCC |
| | TAGTGTCTCCATACCCCCTGGAAATAAGTTTCATGGACTTCCTAT |
| | TTTATAATGGGCAATCAGAAAAAAAACACAGGGACTGATGAAGA |
| | ACCTGTTCATTTGAGAATTTCAGGTGTGTAAACACTGTTCTGCGT |
| | GGTTTTTTTTTTACATGAAAGTATTTTATGTATTTGTATATTTTGA |
| | AAAAACTTCCCTTAGCTCTCATGTCAGAGACACATACTGAAAGA |
| | CAGACCTCTATTAAATCATGATGTTTGGCTCCTTACCACTATAAT |
| | CCAGATGGACAAATTACCATGTTTCCATAAAAAGCGTTGGAGAC |
| | AGCCTAAACCATTTTCAATCTTGGAAATGATACCTCATTTATACT |
| | TTAATATTTAAAGCTCTAATAAAAGCTGGAGTTATTTGTATAAAT |
| | TACTGTCTGTGAAAATAATACCTAACAGCCGGCATATGTCACTGT |
| | AAGAATAATGTCTTTTTACACTTGGAGTTTTCCCCCTACACCCAG |
| | TTCACCAGTTTCTAATTAGAATTAAGTTTAAATGTTAAAAAATCA |
| | AAAGACCAAGAATTTTCCATTCATGTAATGCAAACTCTAAATAAT |
| | AGGTTTTTTCATTTTACTGCTATACAACCGGAAAATGCTTAACAA |
| | GAATCCTGCTATTTTATTAGATAGTGGTTTGAAGCTTCA (SEQ ID |
| | NO: 159653) |

GFP Integration into an APLP2 Locus in HSCs

[0204] The above approach was first examined in primary HSCs. Cells were electroporated with an RNP composed of an OMNI-50 V6172 nuclease and an APLP2 guide s30, followed by infection with AAV6 particles carrying a GFP donor molecule at a multiplicity of infection (MOI) of 10⁵. First, HSCs were analyzed by FACS for GFP expression three days following treatment (FIG. 3A). A combination of the RNP comprising APLP2 guide s30 with the donor AAV resulted in 53% GFP-expressing cells (average of two repeats). To confirm that GFP expression was dependent on successful integration into an APLP2 locus, we examined two control groups: one group which was infected only with the donor AAV (No RNP) and another group that was infected with the donor AAV but combined with an irrelevant RNP (NR RNP). No significant GFP expression was observed in these groups as they matched the untreated HSCs control group. To confirm the expression of APLP2 is maintained after HDR integration, we then examined APLP2 protein expression and transcript levels. To assess the protein levels, we analyzed cell lysate using western blot (see FIGS. 3B-3C) and observed unaltered APLP2 protein expression in the HDR groups relative to the untreated group, suggesting that the APLP2 protein is normally expressed. To assess the total APLP2 transcript level, we used qRT-PCR with a primer set which targets Exon 4 of APLP2, which is downstream to the editing site and thus identifies both the native and the GFP-integrated transcripts (FIG. 3D). The transcript levels of the HDR group showed similar levels to those of the untreated control group, which further confirms that GFP integration into APLP2 locus did not alter APLP2 expression. Finally, to examine whether GFP is successfully secreted from HSCs following integration into an APLP2 locus, we sampled the cell media using a GFP ELISA kit (Abcam, ab171581). HSCs in the HDR group secreted ˜1.3 ng GFP/10⁶ cells while no GFP was detected in the control group (FIG. 3E—note that this value is the absolute GFP levels detected after considering the media volume).

Differentiation of Edited HSCs into Macrophages Maintains GFP Expression from an APLP2 Locus

[0205] Edited HSCs can be differentiated into numerous hematopoietic cells lineages with various therapeutic potential. Here we examine whether edited HSCs retain GFP expression and secretion after differentiation into macrophages. To that end, edited HSCs were differentiated into macrophages as previously described (Gomez-Ospina et al, Nature Communications, 2019). In short, cells were plated in differentiation media (SFEM II supplemented with SCF (200 ng/ml), Il-3 (10 ng/mL), IL-6 (10 ng/mL), FLT3-L (50 ng/mL), M-CSF (10 ng/ml), GM-CSF (10 ng/ml), penicillin/streptomycin (10 U/mL) for 48 hours. Adherent cells were maintained in maintenance medium (RPMI supplemented with FBS (10% v/v), M-CSF (10 ng/ml), GM-CSF (10 ng/ml), and penicillin/streptomycin (10 U/mL), for 19 days. To validate the differentiation procedure, cells were scraped and analyzed using the following FACS panel: CD14, CD16 and HLA-DR. As shown in FIG. 4A, by inspection of the staining panel of edited and un-edited controls we can see that most of the cells examined were successfully differentiated into macrophages and express all tested macrophage markers. The percentage of macrophages in the population is unaltered by editing and was comparable between edited and un-edited controls. Furthermore, looking at the FITC channel in the FACS analysis, we can see that ˜20% of the cells express GFP even after differentiation. To examine GFP secretion, we performed an ELISA assay of the cell media (FIG. 4B). Similar to the originating HSC population, we observed GFP secretion in edited population, which confirms GFP insertion into APLP2 locus allows both expression and secretion of a gene of interest.

GFP Integration into an APLP2 Locus in iPSCs

[0206] To show confirm this system is relevant in other multipotent cell types, we repeated these experiments in iPSCs. Similar to HSCs, we delivered RNP using electroporation and delivered the donor DNA using AAV. For a high infection rate of iPSCs, we used AAV-DJ. Examination of GFP expression in iPSCs three days post-treatment showed GFP is successfully expressed in iPSCs after HDR integration (FIG. 5A). Echoing results shown with HSCs, integration of a GFP cassette is essential for GFP expression as control groups without specific CRISPR activity did not exhibit GFP expression. Secretion of GFP from modified iPSCs was assessed by ELISA (FIG. 5B). GFP secretion was detected only in HDR groups, confirming that GFP integration into Intron 1 of APLP2 enables expression of a polypeptide containing the SP which leads to its subsequent secretion.

FACS Analysis in iPSCs

TABLE 2
Guide sequence portions that are 22-nucleotides in length and target APLP 2 intron 1.

| Guide Sequence | |
|---|---|
| Portion Name | Guide Sequence Portion |
| S1 | GACAGCAUCCCCAGAAAGAGAG (SEQ ID NO: 135806) |
| S2 | ACAGCAUCCCCAGAAAGAGAGA (SEQ ID NO: 114822) |
| S3 | CAGCAUCCCCAGAAAGAGAGAG (SEQ ID NO: 126167) |
| S4 | AGCAUCCCCAGAAAGAGAGAGG (SEQ ID NO: 118286) |
| S5 | GCAUCCCCAGAAAGAGAGAGGG (SEQ ID NO: 138353) |
| S6 | UCUUUCUGGGGAUGCUGUCUAU (SEQ ID NO: 151204) |
| S7 | GCUUCCCCCCUCUCUCUUUCUG (SEQ ID NO: 139783) |
| S8 | AGCUUCCCCCCUCUCUCUUUCU (SEQ ID NO: 118763) |
| S9 | AAGCUUCCCCCCUCUCUCUUUC (SEQ ID NO: 112580) |
| S10 | UUCAGUUGGUGAAGAGAGCCUG (SEQ ID NO: 156181) |
| S11 | AAGAGAGCCUGUGGUCUCUUCG (SEQ ID NO: 112203) |
| S12 | AGAGAGCCUGUGGUCUCUUCGA (SEQ ID NO: 117581) |
| S13 | GAGAGCCUGUGGUCUCUUCGAG (SEQ ID NO: 136406) |
| S14 | AGAGCCUGUGGUCUCUUCGAGG (SEQ ID NO: 117647) |
| S15 | GUCUCUUCGAGGGGGCUGAGUA (SEQ ID NO: 143514) |
| S16 | UCUCUUCGAGGGGGCUGAGUAU (SEQ ID NO: 150610) |
| S17 | GGCUGAGUAUGGGUCUCCAUUU (SEQ ID NO: 141197) |
| S18 | GCUCUCUUCACCAACUGAAGCG (SEQ ID NO: 139455) |
| S19 | GGCUCUCUUCACCAACUGAAGC (SEQ ID NO: 141169) |
| S20 | AGGCUCUCUUCACCAACUGAAG (SEQ ID NO: 119253) |
| S21 | UCAGCCCCCUCGAAGAGACCAC (SEQ ID NO: 148799) |
| S22 | AGGCUAGGUGACCUGCCAGAGU (SEQ ID NO: 119245) |
| S23 | AGUUGGCACAGCCAGUCAGUGA (SEQ ID NO: 120511) |
| S24 | UGGCACAGCCAGUCAGUGAUGG (SEQ ID NO: 153328) |
| S25 | CACAGCCAGUCAGUGAUGGAGG (SEQ ID NO: 125164) |
| S26 | UGAUGGAGGUGGAACUCUGUCA (SEQ ID NO: 152195) |
| S27 | UGGCAGGUCACCUAGCCUCUCU (SEQ ID NO: 153340) |
| S28 | CUGGCAGGUCACCUAGCCUCUC (SEQ ID NO: 133080) |
| S29 | GACUGGCUGUGCCAACUCUGGC (SEQ ID NO: 136146) |
| S30 | CACUGACUGGCUGUGCCAACUC (SEQ ID NO: 125649) |
| S31 | GAGUUCCACCUCCAUCACUGAC (SEQ ID NO: 137014) |

TABLE 3
Details of CRISPR nucleases used in Example 2
and a compatible sgRNA scaffold sequence.
Additional descriptions of the OMNI-50 CRISPR
nuclease and its variants are provided in
U.S. Pat No. 11,666,641 and PCT International
Application Publication Nos. WO 2022/098693 Al
and WO 2023/019263A1, the contents of each of
which are hereby incorporated by reference.

| | PAM | |
|---|---|---|
| CRISPR | Se- | |
| Nuclease | quence | sgRNA Scaffold Sequence |
| OMNI-50 | NGG | GUUUGAGAGUUAUGAAAAUGACGAGUU |
| (SEQ ID | | CAAAUAAAAAUUUAUUCAAACCGCCUA |
| NO: 159655) | | UUUAUAGGCCGCAGAUGUUCUGCUUU |
| | | (SEQ ID NO: 159657) |
| OMNI-50 | NGG | GUUUGAGAGUUAUGAAAAUGACGAGUU |
| V6172 | | CAAAUAAAAAUUUAUUCAAACCGCCUA |
| (SEQ ID | | UUUAUAGGCCGCAGAUGUUCUGCUUU |
| NO: 159656) | | (SEQ ID NO: 159657) |

### REFERENCES

[0207] 1. Ahmad and Allen (1992) “Antibody-mediated Specific Binging and Cytotoxicity of Liposome-entrapped Doxorubicin to Lung Cancer Cells in Vitro”, Cancer Research 52:4817-20.
[0208] 2. Anderson (1992) “Human gene therapy”, Science 256:808-13.
[0209] 3. Anzalone et al. (2019) “Search-and-replace genome editing without double-strand brakes or donor DNA”, Nature 576, 149-157.
[0210] 4. Basha et al. (2011) “Influence of Cationic Lipid Composition on Gene Silencing Properties of Lipid Nanoparticle Formulations of siRNA in Antigen-Presenting Cells”, Mol. Ther. 19(12):2186-200.
[0211] 5. Behr (1994) Gene transfer with synthetic cationic amphiphiles: Prospects for gene therapy”, Bioconjugate Chem 5:382-89.
[0212] 6. Blaese (1995) “Vectors in cancer therapy: how will they deliver”, Cancer Gene Ther. 2:291-97.
[0213] 7. Blaese et al. (1995) “T lymphocyte-directed gene therapy for ADA-SCID: initial trial results after 4 years”, Science 270(5235):475-80.
[0214] 8. Buchschacher and Panganiban (1992) “Human immunodeficiency virus vectors for inducible expression of foreign genes”, J. Virol. 66:2731-39.
[0215] 9. Burstein et al. (2017) “New CRISPR-Cas systems from uncultivated microbes”, Nature 542:237-41.
[0216] 10. Chang and Wilson (1987) “Modification of DNA ends can decrease end-joining relative to homologous recombination in mammalian cells”, Proc. Natl. Acad. Sci. USA 84:4959-4963.
[0217] 11. Chung et al. (2006) “Agrobacterium is not alone: gene transfer to plants by viruses and other bacteria”, Trends Plant Sci. 11(1):1-4.
[0218] 12. Coelho et al. (2013) “Safety and efficacy of RNAi therapy for transthyretin amyloidosis” N. Engl. J. Med. 369, 819-829.
[0219] 13. Crystal (1995) “Transfer of genes to humans: early lessons and obstacles to success”, Science 270(5235):404-10.
[0220] 14. Dillon (1993) “Regulation gene expression in gene therapy” Trends in Biotechnology 11(5):167-173.
[0221] 15. Dranoff et al. (1997) “A phase I study of vaccination with autologous, irradiated melanoma cells engineered to secrete human granulocyte macrophage colony stimulating factor”, Hum. Gene Ther. 8(1):111-23.
[0222] 16. Dunbar et al. (1995) “Retrovirally marked CD34-enriched peripheral blood and bone marrow cells contribute to long-term engraftment after autologous transplantation”, Blood 85:3048-57.
[0223] 17. Ellem et al. (1997) “A case report: immune responses and clinical course of the first human use of granulocyte/macrophage-colony-stimulating-factor-transduced autologous melanoma cells for immunotherapy”, Cancer Immunol Immunother 44:10-20.
[0224] 18. Gao and Huang (1995) “Cationic liposome-mediated gene transfer” Gene Ther. 2(10):710-22.
[0225] 19. Haddada et al. (1995) “Gene Therapy Using Adenovirus Vectors”, in: The Molecular Repertoire of Adenoviruses III: Biology and Pathogenesis, ed. Doerfler and Böhm, pp. 297-306.
[0226] 20. Han et al. (1995) “Ligand-directed retro-viral targeting of human breast cancer cells”, Proc Natl Acad Sci U.S.A. 92(21):9747-51.
[0227] 21. Inaba et al. (1992) “Generation of large numbers of dendritic cells from mouse bone marrow cultures supplemented with granulocyte/macrophage colony-stimulating factor”, J Exp Med. 176(6):1693-702.
[0228] 22. Jinek et al. (2012) “A programmable dual-RNA-guided DNA endonuclease in adaptive bacterial immunity,” Science 337(6096):816-21.
[0229] 23. Johan et al. (1992) “GLVR1, a receptor for gibbon ape leukemia virus, is homologous to a phosphate permease of Neurospora crassa and is expressed at high levels in the brain and thymus”, J Virol 66(3):1635-40.
[0230] 24. Judge et al. (2006) “Design of noninflammatory synthetic siRNA mediating potent gene silencing in vivo”, Mol Ther. 13(3):494-505.
[0231] 25. Kohn et al. (1995) “Engraftment of gene-modified umbilical cord blood cells in neonates with adenosine deaminase deficiency”, Nature Medicine 1:1017-23.
[0232] 26. Kremer and Perricaudet (1995) “Adenovirus and adeno-associated virus mediated gene transfer”, Br. Med. Bull. 51(1):31-44.
[0233] 27. Macdiarmid et al. (2009) “Sequential treatment of drug-resistant tumors with targeted minicells containing siRNA or a cytotoxic drug”, Nat Biotechnol. 27(7):643-51.
[0234] 28. Malech et al. (1997) “Prolonged production of NADPH oxidase-corrected granulocytes after gene therapy of chronic granulomatous disease”, PNAS 94(22):12133-38.
[0235] 29. Miller et al. (1991) “Construction and properties of retrovirus packaging cells based on gibbon ape leukemia virus”, J Virol. 65(5):2220-24.
[0236] 30. Miller (1992) “Human gene therapy comes of age”, Nature 357:455-60.
[0237] 31. Mitani and Caskey (1993) “Delivering therapeutic genes—matching approach and application”, Trends in Biotechnology 11(5):162-66.
[0238] 32. Nabel and Felgner (1993) “Direct gene transfer for immunotherapy and immunization”, Trends in Biotechnology 11(5):211-15.
[0239] 33. Remy et al. (1994) “Gene Transfer with a Series of Lipophilic DNA-Binding Molecules”, Bioconjugate Chem. 5(6):647-54.
[0240] 34. Sentmanat et al. (2018) “A Survey of Validation Strategies for CRISPR-Cas9 Editing”, Scientific Reports 8:888, doi:10.1038/s41598-018-19441-8.
[0241] 35. Sommerfelt et al. (1990) “Localization of the receptor gene for type D simian retroviruses on human chromosome 19”, J. Virol. 64(12):6214-20.
[0242] 36. Van Brunt (1988) “Molecular framing: transgenic animals as bioactors” Biotechnology 6:1149-54.
[0243] 37. Vigne et al. (1995) “Third-generation adenovectors for gene therapy”, Restorative Neurology and Neuroscience 8(1,2): 35-36.
[0244] 38. Weissman and Kariko (2015) “mRNA: Fulfilling the promise of gene therapy”, Molecular Therapy (9):1416-7.
[0245] 39. Wilson et al. (1989) “Formation of infectious hybrid virion with gibbon ape leukemia virus and human T-cell leukemia virus retroviral envelope glycoproteins and the gag and pol proteins of Moloney murine leukemia virus”, J. Virol. 63:2374-78.
[0246] 40. Yu et al. (1994) “Progress towards gene therapy for HIV infection”, Gene Ther. 1(1):13-26.
[0247] 41. Zetsche et al. (2015) “Cpf1 is a single RNA-guided endonuclease of a class 2 CRISPR-Cas system” Cell 163(3):759-71.
[0248] 42. Zuris et al. (2015) “Cationic lipid-mediated delivery of proteins enables efficient protein based genome editing in vitro and in vivo” Nat Biotechnol. 33(1):73-80.

The application's sequence listing, which the Patent Office published only in electronic form, follows.

SEQUENCE LISTING (159657 sequences)

SEQ ID NO: 1 - RNA, 20 nt, synthetic construct
  source 1..20: mol_type = other RNA
aaaaaaggcagtattccctt

SEQ ID NO: 2 - RNA, 20 nt, synthetic construct
  source 1..20: mol_type = other RNA
aaaaaatacctggaaaaagg

SEQ ID NO: 3 - RNA, 20 nt, synthetic construct
  source 1..20: mol_type = other RNA
aaaaaatgatctattgcaga

SEQ ID NO: 4 - RNA, 20 nt, synthetic construct
  source 1..20: mol_type = other RNA
aaaaacacgacctaggaatc

SEQ ID NO: 5 - RNA, 20 nt, synthetic construct
  source 1..20: mol_type = other RNA
aaaaagaccagagatcccct

SEQ ID NO: 6 - RNA, 20 nt, synthetic construct
  source 1..20: mol_type = other RNA
aaaaaggaacactaaggaaa

SEQ ID NO: 7 - RNA, 20 nt, synthetic construct
  source 1..20: mol_type = other RNA
aaaaaggcagtattcccttt

SEQ ID NO: 8 - RNA, 20 nt, synthetic construct
  source 1..20: mol_type = other RNA
aaaaagggaatactgccttt

SEQ ID NO: 9 - RNA, 20 nt, synthetic construct
  source 1..20: mol_type = other RNA
aaaaatacaaagactagctg

SEQ ID NO: 10 - RNA, 20 nt, synthetic construct
  source 1..20: mol_type = other RNA
aaaaatacctggaaaaagga

SEQ ID NO: 11 - RNA, 20 nt, synthetic construct
  source 1..20: mol_type = other RNA
aaaaatgatctattgcagat

SEQ ID NO: 12 - RNA, 20 nt, synthetic construct
  source 1..20: mol_type = other RNA
aaaacacaaataactaagac

SEQ ID NO: 13 - RNA, 20 nt, synthetic construct
  source 1..20: mol_type = other RNA
aaaacacgacctaggaatcc

SEQ ID NO: 14 - RNA, 20 nt, synthetic construct
  source 1..20: mol_type = other RNA
aaaaccaagtaactggccag

SEQ ID NO: 15 - RNA, 20 nt, synthetic construct
  source 1..20: mol_type = other RNA
aaaacctgagggtcattgtg

SEQ ID NO: 16 - RNA, 20 nt, synthetic construct
  source 1..20: mol_type = other RNA
aaaactacatcaaatatctg

SEQ ID NO: 17 - RNA, 20 nt, synthetic construct
  source 1..20: mol_type = other RNA
aaaactcttttctcagatta

SEQ ID NO: 18 - RNA, 20 nt, synthetic construct
  source 1..20: mol_type = other RNA
aaaagaatggaaattgcagt

SEQ ID NO: 19 - RNA, 20 nt, synthetic construct
  source 1..20: mol_type = other RNA
aaaagaccagagatcccctg

SEQ ID NO: 20 - RNA, 20 nt, synthetic construct
  source 1..20: mol_type = other RNA
aaaagagttttcaccctctg

SEQ ID NO: 21 - RNA, 20 nt, synthetic construct
  source 1..20: mol_type = other RNA
aaaagccaggacagtgaatg

SEQ ID NO: 22 - RNA, 20 nt, synthetic construct
  source 1..20: mol_type = other RNA
aaaaggaacactaaggaaat

SEQ ID NO: 23 - RNA, 20 nt, synthetic construct
  source 1..20: mol_type = other RNA
aaaaggcagtattccctttt

SEQ ID NO: 24 - RNA, 20 nt, synthetic construct
  source 1..20: mol_type = other RNA
aaaagggaatactgcctttt

SEQ ID NO: 25 - RNA, 20 nt, synthetic construct
  source 1..20: mol_type = other RNA
aaaagtcctgtcaccaagga

SEQ ID NO: 26 - RNA, 20 nt, synthetic construct
  source 1..20: mol_type = other RNA
aaaataaggggatcaaagag

SEQ ID NO: 27 - RNA, 20 nt, synthetic construct
  source 1..20: mol_type = other RNA
aaaatacaaagactagctgg

SEQ ID NO: 28 - RNA, 20 nt, synthetic construct
  source 1..20: mol_type = other RNA
aaaatacctggaaaaaggaa

SEQ ID NO: 29 - RNA, 20 nt, synthetic construct
  source 1..20: mol_type = other RNA
aaaatcgacatttcccattt

SEQ ID NO: 30 - RNA, 20 nt, synthetic construct
  source 1..20: mol_type = other RNA
aaaatgatctattgcagata

SEQ ID NO: 31 - RNA, 20 nt, synthetic construct
  source 1..20: mol_type = other RNA
aaaatgatgtgaaaggacca

SEQ ID NO: 32 - RNA, 20 nt, synthetic construct
  source 1..20: mol_type = other RNA
aaaatgcctttaacgtcctt

SEQ ID NO: 33 - RNA, 20 nt, synthetic construct
  source 1..20: mol_type = other RNA
aaaatgttcacatgactttc

SEQ ID NO: 34 - RNA, 20 nt, synthetic construct
  source 1..20: mol_type = other RNA
aaacacaaataactaagacc

SEQ ID NO: 35 - RNA, 20 nt, synthetic construct
  source 1..20: mol_type = other RNA
aaacacaggagaaagaaaat

SEQ ID NO: 36 - RNA, 20 nt, synthetic construct
  source 1..20: mol_type = other RNA
aaacacgacctaggaatcca

SEQ ID NO: 37 - RNA, 20 nt, synthetic construct
  source 1..20: mol_type = other RNA
aaacactggacttcaagaaa

SEQ ID NO: 38 - RNA, 20 nt, synthetic construct
  source 1..20: mol_type = other RNA
aaacagtctgcttcagcact

SEQ ID NO: 39 - RNA, 20 nt, synthetic construct
  source 1..20: mol_type = other RNA
aaaccaagtaactggccagg

SEQ ID NO: 40 - RNA, 20 nt, synthetic construct
  source 1..20: mol_type = other RNA
aaaccccacttccattgtat

SEQ ID NO: 41 - RNA, 20 nt, synthetic construct
  source 1..20: mol_type = other RNA
aaacctgagggtcattgtgg

SEQ ID NO: 42 - RNA, 20 nt, synthetic construct
  source 1..20: mol_type = other RNA
aaacgagagccctgaaagct

SEQ ID NO: 43 - RNA, 20 nt, synthetic construct
  source 1..20: mol_type = other RNA
aaactaatgttgaaagttgg

SEQ ID NO: 44 - RNA, 20 nt, synthetic construct
  source 1..20: mol_type = other RNA
aaactacatcaaatatctgc

SEQ ID NO: 45 - RNA, 20 nt, synthetic construct
  source 1..20: mol_type = other RNA
aaactcttttctcagattat

SEQ ID NO: 46 - RNA, 20 nt, synthetic construct
  source 1..20: mol_type = other RNA
aaactggtcctttcacatca

SEQ ID NO: 47 - RNA, 20 nt, synthetic construct
  source 1..20: mol_type = other RNA
aaagaaaataaggggatcaa

SEQ ID NO: 48 - RNA, 20 nt, synthetic construct
  source 1..20: mol_type = other RNA
aaagaatggaaattgcagtt

SEQ ID NO: 49 - RNA, 20 nt, synthetic construct
  source 1..20: mol_type = other RNA
aaagaccagagatcccctgg

SEQ ID NO: 50 - RNA, 20 nt, synthetic construct
  source 1..20: mol_type = other RNA
aaagaggcaatgctttcgaa

SEQ ID NO: 51 - RNA, 20 nt, synthetic construct
  source 1..20: mol_type = other RNA
aaagagttttcaccctctgt

SEQ ID NO: 52 - RNA, 20 nt, synthetic construct
  source 1..20: mol_type = other RNA
aaagcattgcctctttgatc

SEQ ID NO: 53 - RNA, 20 nt, synthetic construct
  source 1..20: mol_type = other RNA
aaagccaggacagtgaatga

SEQ ID NO: 54 - RNA, 20 nt, synthetic construct
  source 1..20: mol_type = other RNA
aaagctcatttaaaaaggga

SEQ ID NO: 55 - RNA, 20 nt, synthetic construct
  source 1..20: mol_type = other RNA
aaagcttagccctcacggaa

SEQ ID NO: 56 - RNA, 20 nt, synthetic construct
  source 1..20: mol_type = other RNA
aaaggaacactaaggaaata

SEQ ID NO: 57 - RNA, 20 nt, synthetic construct
  source 1..20: mol_type = other RNA
aaaggaccagtttcttgaag

SEQ ID NO: 58 - RNA, 20 nt, synthetic construct
  source 1..20: mol_type = other RNA
aaaggagcaacaggaaattt

SEQ ID NO: 59 - RNA, 20 nt, synthetic construct
  source 1..20: mol_type = other RNA
aaaggcagtattcccttttt

SEQ ID NO: 60 - RNA, 20 nt, synthetic construct
  source 1..20: mol_type = other RNA
aaaggcattttattccagcg

SEQ ID NO: 61 - RNA, 20 nt, synthetic construct
  source 1..20: mol_type = other RNA
aaagggaatactgccttttt

SEQ ID NO: 62 - RNA, 20 nt, synthetic construct
  source 1..20: mol_type = other RNA
aaagtactactgtagaactg

SEQ ID NO: 63 - RNA, 20 nt, synthetic construct
  source 1..20: mol_type = other RNA
aaagtcatgtgaacatttta

SEQ ID NO: 64 - RNA, 20 nt, synthetic construct
  source 1..20: mol_type = other RNA
aaagtcctgtcaccaaggac

SEQ ID NO: 65 - RNA, 20 nt, synthetic construct
  source 1..20: mol_type = other RNA
aaagtgctgaagcagactgt

SEQ ID NO: 66 - RNA, 20 nt, synthetic construct
  source 1..20: mol_type = other RNA
aaagttggcaacagcccctt

SEQ ID NO: 67 - RNA, 20 nt, synthetic construct
  source 1..20: mol_type = other RNA
aaataaaagccaggacagtg

SEQ ID NO: 68 - RNA, 20 nt, synthetic construct
  source 1..20: mol_type = other RNA
aaataactaagaccagcatc

SEQ ID NO: 69 - RNA, 20 nt, synthetic construct
  source 1..20: mol_type = other RNA
aaataaggggatcaaagagg

SEQ ID NO: 70 - RNA, 20 nt, synthetic construct
  source 1..20: mol_type = other RNA
aaataatctgagaaaagagt

SEQ ID NO: 71 - RNA, 20 nt, synthetic construct
  source 1..20: mol_type = other RNA
aaatacaaagactagctggg

SEQ ID NO: 72 - RNA, 20 nt, synthetic construct
  source 1..20: mol_type = other RNA
aaatacagtaaggaccttaa

SEQ ID NO: 73 - RNA, 20 nt, synthetic construct
  source 1..20: mol_type = other RNA
aaatacctggaaaaaggaac

SEQ ID NO: 74 - RNA, 20 nt, synthetic construct
  source 1..20: mol_type = other RNA
aaatacctggagcagatgca

SEQ ID NO: 75 - RNA, 20 nt, synthetic construct
  source 1..20: mol_type = other RNA
aaatatctgcaatagatcat

SEQ ID NO: 76 - RNA, 20 nt, synthetic construct
  source 1..20: mol_type = other RNA
aaatcagcccctgccacaag

SEQ ID NO: 77 - RNA, 20 nt, synthetic construct
  source 1..20: mol_type = other RNA
aaatccagttgactgtcatc

SEQ ID NO: 78 - RNA, 20 nt, synthetic construct
  source 1..20: mol_type = other RNA
aaatcgacatttcccattta

SEQ ID NO: 79 - RNA, 20 nt, synthetic construct
  source 1..20: mol_type = other RNA
aaatctgcatctgctccagg

SEQ ID NO: 80 - RNA, 20 nt, synthetic construct
  source 1..20: mol_type = other RNA
aaatgagaaccggtggtgaa

SEQ ID NO: 81 - RNA, 20 nt, synthetic construct
  source 1..20: mol_type = other RNA
aaatgagctttcaggaagtt

SEQ ID NO: 82 - RNA, 20 nt, synthetic construct
  source 1..20: mol_type = other RNA
aaatgatctattgcagatat

SEQ ID NO: 83 - RNA, 20 nt, synthetic construct
  source 1..20: mol_type = other RNA
aaatgatgtgaaaggaccag

SEQ ID NO: 84 - RNA, 20 nt, synthetic construct
  source 1..20: mol_type = other RNA
aaatgcagccagcagcccgt

SEQ ID NO: 85 - RNA, 20 nt, synthetic construct
  source 1..20: mol_type = other RNA
aaatgcctttaacgtccttg

SEQ ID NO: 86 - RNA, 20 nt, synthetic construct
  source 1..20: mol_type = other RNA
aaatggctcaggtctcccag

SEQ ID NO: 87 - RNA, 20 nt, synthetic construct
  source 1..20: mol_type = other RNA
aaatgggaaatgtcgatttt

SEQ ID NO: 88 - RNA, 20 nt, synthetic construct
  source 1..20: mol_type = other RNA
aaatggggtggaatagggaa

SEQ ID NO: 89 - RNA, 20 nt, synthetic construct
  source 1..20: mol_type = other RNA
aaatgggtgaaaaatggtaa

SEQ ID NO: 90 - RNA, 20 nt, synthetic construct
  source 1..20: mol_type = other RNA
aaatgttcacatgactttct

SEQ ID NO: 91 - RNA, 20 nt, synthetic construct
  source 1..20: mol_type = other RNA
aaattaatcagaaaccccac

SEQ ID NO: 92 - RNA, 20 nt, synthetic construct
  source 1..20: mol_type = other RNA
aaattagtgcagatgctggt

SEQ ID NO: 93 - RNA, 20 nt, synthetic construct
  source 1..20: mol_type = other RNA
aaattctacagctaggccag

SEQ ID NO: 94 - RNA, 20 nt, synthetic construct
  source 1..20: mol_type = other RNA
aaattgcagttctacagtag

SEQ ID NO: 95 - RNA, 20 nt, synthetic construct
  source 1..20: mol_type = other RNA
aaatttagaaagtgctgaag

SEQ ID NO: 96 - RNA, 20 nt, synthetic construct
  source 1..20: mol_type = other RNA
aaatttcctgttgctccttt

SEQ ID NO: 97 - RNA, 20 nt, synthetic construct
  source 1..20: mol_type = other RNA
aacaaaacctgagggtcatt

SEQ ID NO: 98 - RNA, 20 nt, synthetic construct
  source 1..20: mol_type = other RNA
aacaagatgcagaaccatgg

SEQ ID NO: 99 - RNA, 20 nt, synthetic construct
  source 1..20: mol_type = other RNA
aacacaaataactaagacca

SEQ ID NO: 100 - RNA, 20 nt, synthetic construct
  source 1..20: mol_type = other RNA
aacacaggagaaagaaaata

SEQ ID NO: 101 - RNA, 20 nt, synthetic construct
  source 1..20: mol_type = other RNA
aacacgacctaggaatccag

SEQ ID NO: 102 - RNA, 20 nt, synthetic construct
  source 1..20: mol_type = other RNA
aacactaaggaaataatctg

SEQ ID NO: 103 - RNA, 20 nt, synthetic construct
  source 1..20: mol_type = other RNA
aacactggacttcaagaaac

SEQ ID NO: 104 - RNA, 20 nt, synthetic construct
  source 1..20: mol_type = other RNA
aacagaaacagtctgcttca

SEQ ID NO: 105 - RNA, 20 nt, synthetic construct
  source 1..20: mol_type = other RNA
aacagcagcatgtccagtac

SEQ ID NO: 106 - RNA, 20 nt, synthetic construct
  source 1..20: mol_type = other RNA
aacagccccttgtggcaggg

SEQ ID NO: 107 - RNA, 20 nt, synthetic construct
  source 1..20: mol_type = other RNA
aacaggaaatttagaaagtg

SEQ ID NO: 108 - RNA, 20 nt, synthetic construct
  source 1..20: mol_type = other RNA
aacagtctgcttcagcactt

SEQ ID NO: 109 - RNA, 20 nt, synthetic construct
  source 1..20: mol_type = other RNA
aacagtgggaatgtccagag

SEQ ID NO: 110 - RNA, 20 nt, synthetic construct
  source 1..20: mol_type = other RNA
aacataaccggaacgacagc

SEQ ID NO: 111 - RNA, 20 nt, synthetic construct
  source 1..20: mol_type = other RNA
aacattagtttgggccttgg

SEQ ID NO: 112 - RNA, 20 nt, synthetic construct
  source 1..20: mol_type = other RNA
aacattttatgctacagagg

SEQ ID NO: 113 - RNA, 20 nt, synthetic construct
  source 1..20: mol_type = other RNA
aaccaagtaactggccaggt

SEQ ID NO: 114 - RNA, 20 nt, synthetic construct
  source 1..20: mol_type = other RNA
aaccagcagaagacagaaca

SEQ ID NO: 115 - RNA, 20 nt, synthetic construct
  source 1..20: mol_type = other RNA
aaccatggctatgagaaccc

SEQ ID NO: 116 - RNA, 20 nt, synthetic construct
  source 1..20: mol_type = other RNA
aaccccacctacaaatacct

SEQ ID NO: 117 - RNA, 20 nt, synthetic construct
  source 1..20: mol_type = other RNA
aaccccacttccattgtatt

SEQ ID NO: 118 - RNA, 20 nt, synthetic construct
  source 1..20: mol_type = other RNA
aaccggaacgacagcctgca

SEQ ID NO: 119 - RNA, 20 nt, synthetic construct
  source 1..20: mol_type = other RNA
aaccggtggtgaaacacagg

SEQ ID NO: 120 - RNA, 20 nt, synthetic construct
  source 1..20: mol_type = other RNA
aacctgagggtcattgtggt

SEQ ID NO: 121 - RNA, 20 nt, synthetic construct
  source 1..20: mol_type = other RNA
aacctggaagaacaaaacct

SEQ ID NO: 122 - RNA, 20 nt, synthetic construct
  source 1..20: mol_type = other RNA
aacctgtggaattaataggc

SEQ ID NO: 123 - RNA, 20 nt, synthetic construct
  source 1..20: mol_type = other RNA
aacgacagcctgcatataag

SEQ ID NO: 124 - RNA, 20 nt, synthetic construct
  source 1..20: mol_type = other RNA
aacgagagccctgaaagctt

SEQ ID NO: 125 - RNA, 20 nt, synthetic construct
  source 1..20: mol_type = other RNA
aacgggctgctggctgcatt

SEQ ID NO: 126 - RNA, 20 nt, synthetic construct
  source 1..20: mol_type = other RNA
aacgtccttggtgacaggac

SEQ ID NO: 127 - RNA, 20 nt, synthetic construct
  source 1..20: mol_type = other RNA
aactaagaccagcatctgca

SEQ ID NO: 128 - RNA, 20 nt, synthetic construct
  source 1..20: mol_type = other RNA
aactaatgttgaaagttggc

SEQ ID NO: 129 - RNA, 20 nt, synthetic construct
  source 1..20: mol_type = other RNA
aactacatcaaatatctgca

SEQ ID NO: 130 - RNA, 20 nt, synthetic construct
  source 1..20: mol_type = other RNA
aactcttcagcctcattcac

SEQ ID NO: 131 - RNA, 20 nt, synthetic construct
  source 1..20: mol_type = other RNA
aactcttttctcagattatt

SEQ ID NO: 132 - RNA, 20 nt, synthetic construct
  source 1..20: mol_type = other RNA
aactgaaaaagaccagagat

SEQ ID NO: 133 - RNA, 20 nt, synthetic construct
  source 1..20: mol_type = other RNA
aactgaactgataacagcag

SEQ ID NO: 134 - RNA, 20 nt, synthetic construct
  source 1..20: mol_type = other RNA
aactgataacagcagcatgt

SEQ ID NO: 135 - RNA, 20 nt, synthetic construct
  source 1..20: mol_type = other RNA
aactgcaatttccattcttt

SEQ ID NO: 136 - RNA, 20 nt, synthetic construct
  source 1..20: mol_type = other RNA
aactggatttcctagcaccg

SEQ ID NO: 137 - RNA, 20 nt, synthetic construct
  source 1..20: mol_type = other RNA
aactggccaggtgcagtagc

SEQ ID NO: 138 - RNA, 20 nt, synthetic construct
  source 1..20: mol_type = other RNA
aactggtcctttcacatcat

SEQ ID NO: 139 - RNA, 20 nt, synthetic construct
  source 1..20: mol_type = other RNA
aactgtaatggccactgaag

SEQ ID NO: 140 - RNA, 20 nt, synthetic construct
  source 1..20: mol_type = other RNA
aacttcctgaaagctcattt

SEQ ID NO: 141 - RNA, 20 nt, synthetic construct
  source 1..20: mol_type = other RNA
aacttgtcttgccactcact

SEQ ID NO: 142 - RNA, 20 nt, synthetic construct
  source 1..20: mol_type = other RNA
aactttcaacattagtttgg

SEQ ID NO: 143 - RNA, 20 nt, synthetic construct
  source 1..20: mol_type = other RNA
aagaaaataaggggatcaaa

SEQ ID NO: 144 - RNA, 20 nt, synthetic construct
  source 1..20: mol_type = other RNA
aagaaactggtcctttcaca

SEQ ID NO: 145 - RNA, 20 nt, synthetic construct
  source 1..20: mol_type = other RNA
aagaacaaaacctgagggtc

SEQ ID NO: 146 - RNA, 20 nt, synthetic construct
  source 1..20: mol_type = other RNA
aagaatcacctgaacccggg

SEQ ID NO: 147 - RNA, 20 nt, synthetic construct
  source 1..20: mol_type = other RNA
aagaatggaaattgcagttc

SEQ ID NO: 148 - RNA, 20 nt, synthetic construct
  source 1..20: mol_type = other RNA
aagacaagttcagtaaccag

SEQ ID NO: 149 - RNA, 20 nt, synthetic construct
  source 1..20: mol_type = other RNA
aagacagaacagaaacagtc

SEQ ID NO: 150 - RNA, 20 nt, synthetic construct
  source 1..20: mol_type = other RNA
aagaccagagatcccctggt

SEQ ID NO: 151 - RNA, 20 nt, synthetic construct
  source 1..20: mol_type = other RNA
aagaccagcatctgcactaa

SEQ ID NO: 152 - RNA, 20 nt, synthetic construct
  source 1..20: mol_type = other RNA
aagacgctggaataaaatgc

SEQ ID NO: 153 - RNA, 20 nt, synthetic construct
  source 1..20: mol_type = other RNA
aagagacctgcacagggtgc

SEQ ID NO: 154 - RNA, 20 nt, synthetic construct
  source 1..20: mol_type = other RNA
aagagcgtcacctgaacaag

SEQ ID NO: 155 - RNA, 20 nt, synthetic construct
  source 1..20: mol_type = other RNA
aagaggcaatgctttcgaaa

SEQ ID NO: 156 - RNA, 20 nt, synthetic construct
  source 1..20: mol_type = other RNA
aagagttgacttacacaaca

SEQ ID NO: 157 - RNA, 20 nt, synthetic construct
  source 1..20: mol_type = other RNA
aagagttttcaccctctgta

SEQ ID NO: 158 - RNA, 20 nt, synthetic construct
  source 1..20: mol_type = other RNA
aagatcccacgattccgatc

SEQ ID NO: 159 - RNA, 20 nt, synthetic construct
  source 1..20: mol_type = other RNA
aagatgacagtcaactggat

SEQ ID NO: 160 - RNA, 20 nt, synthetic construct
  source 1..20: mol_type = other RNA
aagatgcagaaccatggcta

SEQ ID NO: 161 - RNA, 20 nt, synthetic construct
  source 1..20: mol_type = other RNA
aagatgcctattaattccac

SEQ ID NO: 162 - RNA, 20 nt, synthetic construct
  source 1..20: mol_type = other RNA
aagcaaggctcggcgccact

SEQ ID NO: 163 - RNA, 20 nt, synthetic construct
  source 1..20: mol_type = other RNA
aagcacgtgagagaccctcg

SEQ ID NO: 164 - RNA, 20 nt, synthetic construct
  source 1..20: mol_type = other RNA
aagcagacggtgggaccagg

SEQ ID NO: 165 - RNA, 20 nt, synthetic construct
  source 1..20: mol_type = other RNA
aagcagactgtttctgttct

SEQ ID NO: 166 - RNA, 20 nt, synthetic construct
  source 1..20: mol_type = other RNA
aagcagcagccgctgccagg

SEQ ID NO: 167 - RNA, 20 nt, synthetic construct
  source 1..20: mol_type = other RNA
aagcagtggcgccgagcctt

SEQ ID NO: 168 - RNA, 20 nt, synthetic construct
  source 1..20: mol_type = other RNA
aagcattgcctctttgatcc

SEQ ID NO: 169 - RNA, 20 nt, synthetic construct
  source 1..20: mol_type = other RNA
aagccaggacagtgaatgag

SEQ ID NO: 170 - RNA, 20 nt, synthetic construct
  source 1..20: mol_type = other RNA
aagccagtcagcagtaggct

SEQ ID NO: 171 - RNA, 20 nt, synthetic construct
  source 1..20: mol_type = other RNA
aagctcatttaaaaagggaa

SEQ ID NO: 172 - RNA, 20 nt, synthetic construct
  source 1..20: mol_type = other RNA
aagctctctagaagacgctg

SEQ ID NO: 173 - RNA, 20 nt, synthetic construct
  source 1..20: mol_type = other RNA
aagcttagccctcacggaag

SEQ ID NO: 174 - RNA, 20 nt, synthetic construct
  source 1..20: mol_type = other RNA
aagctttcagggctctcgtt

SEQ ID NO: 175 - RNA, 20 nt, synthetic construct
  source 1..20: mol_type = other RNA
aaggaaataatctgagaaaa

SEQ ID NO: 176 - RNA, 20 nt, synthetic construct
  source 1..20: mol_type = other RNA
aaggaacactaaggaaataa

SEQ ID NO: 177 - RNA, 20 nt, synthetic construct
  source 1..20: mol_type = other RNA
aaggaccagtttcttgaagt

SEQ ID NO: 178 - RNA, 20 nt, synthetic construct
  source 1..20: mol_type = other RNA
aaggaccttaatgagccctg

SEQ ID NO: 179 - RNA, 20 nt, synthetic construct
  source 1..20: mol_type = other RNA
aaggacgttaaaggcatttt

SEQ ID NO: 180 - RNA, 20 nt, synthetic construct
  source 1..20: mol_type = other RNA
aaggagcaacaggaaattta

SEQ ID NO: 181 - RNA, 20 nt, synthetic construct
  source 1..20: mol_type = other RNA
aaggagtgagtggcaagaca

SEQ ID NO: 182 - RNA, 20 nt, synthetic construct
  source 1..20: mol_type = other RNA
aaggcaagccagtcagcagt

SEQ ID NO: 183 - RNA, 20 nt, synthetic construct
  source 1..20: mol_type = other RNA
aaggcagtattcccttttta

SEQ ID NO: 184 - RNA, 20 nt, synthetic construct
  source 1..20: mol_type = other RNA
aaggcattttattccagcgt

SEQ ID NO: 185 - RNA, 20 nt, synthetic construct
  source 1..20: mol_type = other RNA
aaggcccaaactaatgttga

SEQ ID NO: 186 - RNA, 20 nt, synthetic construct
  source 1..20: mol_type = other RNA
aaggctcggcgccactgctt

SEQ ID NO: 187 - RNA, 20 nt, synthetic construct
  source 1..20: mol_type = other RNA
aagggaatactgcctttttt

SEQ ID NO: 188 - RNA, 20 nt, synthetic construct
  source 1..20: mol_type = other RNA
aagggactctggacattccc

SEQ ID NO: 189 - RNA, 20 nt, synthetic construct
  source 1..20: mol_type = other RNA
aaggggatcaaagaggcaat

SEQ ID NO: 190 - RNA, 20 nt, synthetic construct
  source 1..20: mol_type = other RNA
aaggggctgttgccaacttt

SEQ ID NO: 191 - RNA, 20 nt, synthetic construct
  source 1..20: mol_type = other RNA
aaggtccttactgtatttat

SEQ ID NO: 192 - RNA, 20 nt, synthetic construct
  source 1..20: mol_type = other RNA
aagtaactggccaggtgcag

SEQ ID NO: 193 - RNA, 20 nt, synthetic construct
  source 1..20: mol_type = other RNA
aagtactactgtagaactgc

SEQ ID NO: 194 - RNA, 20 nt, synthetic construct
  source 1..20: mol_type = other RNA
aagtcaactcttcagcctca

SEQ ID NO: 195 - RNA, 20 nt, synthetic construct
  source 1..20: mol_type = other RNA
aagtcatgtgaacattttat

SEQ ID NO: 196 - RNA, 20 nt, synthetic construct
  source 1..20: mol_type = other RNA
aagtccagtgtttccacggc

SEQ ID NO: 197 - RNA, 20 nt, synthetic construct
  source 1..20: mol_type = other RNA
aagtcctgtcaccaaggacg

SEQ ID NO: 198 - RNA, 20 nt, synthetic construct
  source 1..20: mol_type = other RNA
aagtctattattgaaaatcg

SEQ ID NO: 199 - RNA, 20 nt, synthetic construct
  source 1..20: mol_type = other RNA
aagtgctgaagcagactgtt

SEQ ID NO: 200 - RNA, 20 nt, synthetic construct
  source 1..20: mol_type = other RNA
aagtggggtttctgattaat

SEQ ID NO: 201 - RNA, 20 nt, synthetic construct
  source 1..20: mol_type = other RNA
aagttcagtaaccagcagaa

SEQ ID NO: 202 - RNA, 20 nt, synthetic construct
  source 1..20: mol_type = other RNA
aagttgctgagaaatggggt

SEQ ID NO: 203 - RNA, 20 nt, synthetic construct
  source 1..20: mol_type = other RNA
aagttggcaacagccccttg

SEQ ID NO: 204 - RNA, 20 nt, synthetic construct
  source 1..20: mol_type = other RNA
aataaaagccaggacagtga

SEQ ID NO: 205 - RNA, 20 nt, synthetic construct
  source 1..20: mol_type = other RNA
aataaaatgcctttaacgtc

SEQ ID NO: 206 - RNA, 20 nt, synthetic construct
  source 1..20: mol_type = other RNA
aataaatgggaaatgtcgat

SEQ ID NO: 207 - RNA, 20 nt, synthetic construct
  source 1..20: mol_type = other RNA
aataactaagaccagcatct

SEQ ID NO: 208 - RNA, 20 nt, synthetic construct
  source 1..20: mol_type = other RNA
aataaggggatcaaagaggc

SEQ ID NO: 209 - RNA, 20 nt, synthetic construct
  source 1..20: mol_type = other RNA
aataatagacttatatgcag

SEQ ID NO: 210 - RNA, 20 nt, synthetic construct
  source 1..20: mol_type = other RNA
aataatctgagaaaagagtt

SEQ ID NO: 211 - RNA, 20 nt, synthetic construct
  source 1..20: mol_type = other RNA
aatacaaagactagctgggc

SEQ ID NO: 212 - RNA, 20 nt, synthetic construct
  source 1..20: mol_type = other RNA
aatacaatggaagtggggtt

SEQ ID NO: 213 - RNA, 20 nt, synthetic construct
  source 1..20: mol_type = other RNA
aatacagtaaggaccttaat

SEQ ID NO: 214 - RNA, 20 nt, synthetic construct
  source 1..20: mol_type = other RNA
aatacctggaaaaaggaaca

SEQ ID NO: 215 - RNA, 20 nt, synthetic construct
  source 1..20: mol_type = other RNA
aatacctggagcagatgcag

SEQ ID NO: 216 - RNA, 20 nt, synthetic construct
  source 1..20: mol_type = other RNA
aatagacttatatgcaggct

SEQ ID NO: 217 - RNA, 20 nt, synthetic construct
  source 1..20: mol_type = other RNA
aataggcatcttcactcctc

SEQ ID NO: 218 - RNA, 20 nt, synthetic construct
  source 1..20: mol_type = other RNA
aatagggaactgtaatggcc

SEQ ID NO: 219 - RNA, 20 nt, synthetic construct
  source 1..20: mol_type = other RNA
aatataaatacagtaaggac

SEQ ID NO: 220 - RNA, 20 nt, synthetic construct
  source 1..20: mol_type = other RNA
aatatctgcaatagatcatt

SEQ ID NO: 221 - RNA, 20 nt, synthetic construct
  source 1..20: mol_type = other RNA
aatatggggaaatcctatct

SEQ ID NO: 222 - RNA, 20 nt, synthetic construct
  source 1..20: mol_type = other RNA
aatcagaaaccccacttcca

SEQ ID NO: 223 - RNA, 20 nt, synthetic construct
  source 1..20: mol_type = other RNA
aatcagcccctgccacaagg

SEQ ID NO: 224 - RNA, 20 nt, synthetic construct
  source 1..20: mol_type = other RNA
aatccagtgagtaactgaac

SEQ ID NO: 225 - RNA, 20 nt, synthetic construct
  source 1..20: mol_type = other RNA
aatccagttgactgtcatct

SEQ ID NO: 226 - RNA, 20 nt, synthetic construct
  source 1..20: mol_type = other RNA
aatcccctgaggaccaaatg

SEQ ID NO: 227 - RNA, 20 nt, synthetic construct
  source 1..20: mol_type = other RNA
aatcgacatttcccatttat

SEQ ID NO: 228 - RNA, 20 nt, synthetic construct
  source 1..20: mol_type = other RNA
aatcgtgggatcttccggcc

SEQ ID NO: 229 - RNA, 20 nt, synthetic construct
  source 1..20: mol_type = other RNA
aatctgagaaaagagttttc

SEQ ID NO: 230 - RNA, 20 nt, synthetic construct
  source 1..20: mol_type = other RNA
aatctgcatctgctccaggt

SEQ ID NO: 231 - RNA, 20 nt, synthetic construct
  source 1..20: mol_type = other RNA
aatgaccctcaggttttgtt

SEQ ID NO: 232 - RNA, 20 nt, synthetic construct
  source 1..20: mol_type = other RNA
aatgagaaccggtggtgaaa

SEQ ID NO: 233 - RNA, 20 nt, synthetic construct
  source 1..20: mol_type = other RNA
aatgagccctgggaaattag

SEQ ID NO: 234 - RNA, 20 nt, synthetic construct
  source 1..20: mol_type = other RNA
aatgagctttcaggaagttg

SEQ ID NO: 235 - RNA, 20 nt, synthetic construct
  source 1..20: mol_type = other RNA
aatgaggctgaagagttgac

SEQ ID NO: 236 - RNA, 20 nt, synthetic construct
  source 1..20: mol_type = other RNA
aatgatctattgcagatatt

SEQ ID NO: 237 - RNA, 20 nt, synthetic construct
  source 1..20: mol_type = other RNA
aatgatgtgaaaggaccagt

SEQ ID NO: 238 - RNA, 20 nt, synthetic construct
  source 1..20: mol_type = other RNA
aatgcagccagcagcccgtt

SEQ ID NO: 239 - RNA, 20 nt, synthetic construct
  source 1..20: mol_type = other RNA
aatgcctttaacgtccttgg

SEQ ID NO: 240 - RNA, 20 nt, synthetic construct
  source 1..20: mol_type = other RNA
aatgctcaccccagaagagc

SEQ ID NO: 241 - RNA, 20 nt, synthetic construct
  source 1..20: mol_type = other RNA
aatgctttcgaaacgagagc

SEQ ID NO: 242 - RNA, 20 nt, synthetic construct
  source 1..20: mol_type = other RNA
aatggaaattgcagttctac

SEQ ID NO: 243 - RNA, 20 nt, synthetic construct
  source 1..20: mol_type = other RNA
aatggaagtggggtttctga

SEQ ID NO: 244 - RNA, 20 nt, synthetic construct
  source 1..20: mol_type = other RNA
aatggccactgaagcacgtg

SEQ ID NO: 245 - RNA, 20 nt, synthetic construct
  source 1..20: mol_type = other RNA
aatggctcaggtctcccagc

SEQ ID NO: 246 - RNA, 20 nt, synthetic construct
  source 1..20: mol_type = other RNA
aatgggaaatgtcgattttc

SEQ ID NO: 247 - RNA, 20 nt, synthetic construct
  source 1..20: mol_type = other RNA
aatgggggaaaggagcaaca

SEQ ID NO: 248 - RNA, 20 nt, synthetic construct
  source 1..20: mol_type = other RNA
aatggggtggaatagggaac

SEQ ID NO: 249 - RNA, 20 nt, synthetic construct
  source 1..20: mol_type = other RNA
aatgggtgaaaaatggtaat

SEQ ID NO: 250 - RNA, 20 nt, synthetic construct
  source 1..20: mol_type = other RNA
aatgtcagaaagtcatgtga

SEQ ID NO: 251 - RNA, 20 nt, synthetic construct
  source 1..20: mol_type = other RNA
aatgtccagagtcccttgat

SEQ ID NO: 252 - RNA, 20 nt, synthetic construct
  source 1..20: mol_type = other RNA
aatgttcacatgactttctg

SEQ ID NO: 253 - RNA, 20 nt, synthetic construct
  source 1..20: mol_type = other RNA
aatgttgaaagttggcaaca

SEQ ID NO: 254 - RNA, 20 nt, synthetic construct
  source 1..20: mol_type = other RNA
aattaataggcatcttcact

SEQ ID NO: 255 - RNA, 20 nt, synthetic construct
  source 1..20: mol_type = other RNA
aattaatcagaaaccccact

SEQ ID NO: 256 - RNA, 20 nt, synthetic construct
  source 1..20: mol_type = other RNA
aattagtgcagatgctggtc

SEQ ID NO: 257 - RNA, 20 nt, synthetic construct
  source 1..20: mol_type = other RNA
aattccacaggttcccaccc

SEQ ID NO: 258 - RNA, 20 nt, synthetic construct
  source 1..20: mol_type = other RNA
aattctacagctaggccagt

SEQ ID NO: 259 - RNA, 20 nt, synthetic construct
  source 1..20: mol_type = other RNA
aattgcagttctacagtagt

SEQ ID NO: 260 - RNA, 20 nt, synthetic construct
  source 1..20: mol_type = other RNA
aatttagaaagtgctgaagc

SEQ ID NO: 261 - RNA, 20 nt, synthetic construct
  source 1..20: mol_type = other RNA
aatttcagaactgaaaaaga

SEQ ID NO: 262 - RNA, 20 nt, synthetic construct
  source 1..20: mol_type = other RNA
aatttcccagggctcattaa

SEQ ID NO: 263 - RNA, 20 nt, synthetic construct
  source 1..20: mol_type = other RNA
aatttcctgttgctcctttc

SEQ ID NO: 264 - RNA, 20 nt, synthetic construct
  source 1..20: mol_type = other RNA
acaaaacctgagggtcattg

SEQ ID NO: 265 - RNA, 20 nt, synthetic construct
  source 1..20: mol_type = other RNA
acaaagactagctgggcgtg

SEQ ID NO: 266 - RNA, 20 nt, synthetic construct
  source 1..20: mol_type = other RNA
acaaataactaagaccagca

SEQ ID NO: 267 - RNA, 20 nt, synthetic construct
  source 1..20: mol_type = other RNA
acaaatacctggagcagatg

SEQ ID NO: 268 - RNA, 20 nt, synthetic construct
  source 1..20: mol_type = other RNA
acaacataaccggaacgaca

SEQ ID NO: 269 - RNA, 20 nt, synthetic construct
  source 1..20: mol_type = other RNA
acaagatgcagaaccatggc

SEQ ID NO: 270 - RNA, 20 nt, synthetic construct
  source 1..20: mol_type = other RNA
acaagcaaggctcggcgcca

SEQ ID NO: 271 - RNA, 20 nt, synthetic construct
  source 1..20: mol_type = other RNA
acaaggggctgttgccaact

SEQ ID NO: 272 - RNA, 20 nt, synthetic construct
  source 1..20: mol_type = other RNA
acaagttcagtaaccagcag

SEQ ID NO: 273 - RNA, 20 nt, synthetic construct
  source 1..20: mol_type = other RNA
acaatacaatggaagtgggg

SEQ ID NO: 274 - RNA, 20 nt, synthetic construct
  source 1..20: mol_type = other RNA
acaatcccctgaggaccaaa

SEQ ID NO: 275 - RNA, 20 nt, synthetic construct
  source 1..20: mol_type = other RNA
acaatgaccctcaggttttg

SEQ ID NO: 276 - RNA, 20 nt, synthetic construct
  source 1..20: mol_type = other RNA
acaatggaagtggggtttct

SEQ ID NO: 277 - RNA, 20 nt, synthetic construct
  source 1..20: mol_type = other RNA
acacaaataactaagaccag

SEQ ID NO: 278 - RNA, 20 nt, synthetic construct
  source 1..20: mol_type = other RNA
acacaacataaccggaacga

SEQ ID NO: 279 - RNA, 20 nt, synthetic construct
  source 1..20: mol_type = other RNA
acacacaggtatccagccgt

SEQ ID NO: 280 - RNA, 20 nt, synthetic construct
  source 1..20: mol_type = other RNA
acacacctgtagtctcagct

SEQ ID NO: 281 - RNA, 20 nt, synthetic construct
  source 1..20: mol_type = other RNA
acacagcgagactgtctcca

SEQ ID NO: 282 - RNA, 20 nt, synthetic construct
  source 1..20: mol_type = other RNA
acacaggagaaagaaaataa

SEQ ID NO: 283 - RNA, 20 nt, synthetic construct
  source 1..20: mol_type = other RNA
acacaggtatccagccgtgg

SEQ ID NO: 284 - RNA, 20 nt, synthetic construct
  source 1..20: mol_type = other RNA
acacatgctctcaatatata

SEQ ID NO: 285 - RNA, 20 nt, synthetic construct
  source 1..20: mol_type = other RNA
acaccacaatgaccctcagg

SEQ ID NO: 286 - RNA, 20 nt, synthetic construct
  source 1..20: mol_type = other RNA
acaccctcatctgtatacac

SEQ ID NO: 287 - RNA, 20 nt, synthetic construct
  source 1..20: mol_type = other RNA
acacctgtagtctcagctag

SEQ ID NO: 288 - RNA, 20 nt, synthetic construct
  source 1..20: mol_type = other RNA
acacgacctaggaatccagt

SEQ ID NO: 289 - RNA, 20 nt, synthetic construct
  source 1..20: mol_type = other RNA
acactaagctctctagaaga

SEQ ID NO: 290 - RNA, 20 nt, synthetic construct
  source 1..20: mol_type = other RNA
acactaaggaaataatctga

SEQ ID NO: 291 - RNA, 20 nt, synthetic construct
  source 1..20: mol_type = other RNA
acactggacttcaagaaact

SEQ ID NO: 292 - RNA, 20 nt, synthetic construct
  source 1..20: mol_type = other RNA
acagaaacagtctgcttcag

SEQ ID NO: 293 - RNA, 20 nt, synthetic construct
  source 1..20: mol_type = other RNA
acagaacagaaacagtctgc

SEQ ID NO: 294 - RNA, 20 nt, synthetic construct
  source 1..20: mol_type = other RNA
acagagggtgaaaactcttt

SEQ ID NO: 295 - RNA, 20 nt, synthetic construct
  source 1..20: mol_type = other RNA
acagaggttgcagtgcgctg

SEQ ID NO: 296 - RNA, 20 nt, synthetic construct
  source 1..20: mol_type = other RNA
acagcagcatgtccagtact

SEQ ID NO: 297 - RNA, 20 nt, synthetic construct
  source 1..20: mol_type = other RNA
acagccccttgtggcagggg

SEQ ID NO: 298 - RNA, 20 nt, synthetic construct
  source 1..20: mol_type = other RNA
acagcctgcatataagtcta

SEQ ID NO: 299 - RNA, 20 nt, synthetic construct
  source 1..20: mol_type = other RNA
acagcgagactgtctccaaa

SEQ ID NO: 300 - RNA, 20 nt, synthetic construct
  source 1..20: mol_type = other RNA
acagctaggccagtctccag

SEQ ID NO: 301 - RNA, 20 nt, synthetic construct
  source 1..20: mol_type = other RNA
acaggaaatttagaaagtgc

SEQ ID NO: 302 - RNA, 20 nt, synthetic construct
  source 1..20: mol_type = other RNA
acaggacttttatggagaca

SEQ ID NO: 303 - RNA, 20 nt, synthetic construct
  source 1..20: mol_type = other RNA
acaggagaaagaaaataagg

SEQ ID NO: 304 - RNA, 20 nt, synthetic construct
  source 1..20: mol_type = other RNA
acaggccaaatgagaaccgg

SEQ ID NO: 305 - RNA, 20 nt, synthetic construct
  source 1..20: mol_type = other RNA
acagggtgctgggagacctg

SEQ ID NO: 306 - RNA, 20 nt, synthetic construct
  source 1..20: mol_type = other RNA
acaggtatccagccgtggaa

SEQ ID NO: 307 - RNA, 20 nt, synthetic construct
  source 1..20: mol_type = other RNA
acaggttcccacccccaacc

SEQ ID NO: 308 - RNA, 20 nt, synthetic construct
  source 1..20: mol_type = other RNA
acagtaaggaccttaatgag

SEQ ID NO: 309 - RNA, 20 nt, synthetic construct
  source 1..20: mol_type = other RNA
acagtagtactttatatagt

SEQ ID NO: 310 - RNA, 20 nt, synthetic construct
  source 1..20: mol_type = other RNA
acagtcaactggatttccta

SEQ ID NO: 311 - RNA, 20 nt, synthetic construct
  source 1..20: mol_type = other RNA
acagtccaggaggtcaggat

SEQ ID NO: 312 - RNA, 20 nt, synthetic construct
  source 1..20: mol_type = other RNA
acagtctgcttcagcacttt

SEQ ID NO: 313 - RNA, 20 nt, synthetic construct
  source 1..20: mol_type = other RNA
acagtgaatgaggctgaaga

SEQ ID NO: 314 - RNA, 20 nt, synthetic construct
  source 1..20: mol_type = other RNA
acagtgggaatgtccagagt

SEQ ID NO: 315 - RNA, 20 nt, synthetic construct
  source 1..20: mol_type = other RNA
acagttccctattccacccc

SEQ ID NO: 316 - RNA, 20 nt, synthetic construct
  source 1..20: mol_type = other RNA
acataaccggaacgacagcc

SEQ ID NO: 317 - RNA, 20 nt, synthetic construct
  source 1..20: mol_type = other RNA
acatcaaatatctgcaatag

SEQ ID NO: 318 - RNA, 20 nt, synthetic construct
  source 1..20: mol_type = other RNA
acatcattttgcgagggtct

SEQ ID NO: 319 - RNA, 20 nt, synthetic construct
  source 1..20: mol_type = other RNA
acatcctgacctcctggact

SEQ ID NO: 320 - RNA, 20 nt, synthetic construct
  source 1..20: mol_type = other RNA
acatgactttctgacattca

SEQ ID NO: 321 - RNA, 20 nt, synthetic construct
  source 1..20: mol_type = other RNA
acatgctctcaatatataat

SEQ ID NO: 322 - RNA, 20 nt, synthetic construct
  source 1..20: mol_type = other RNA
acatgctgctgttatcagtt

SEQ ID NO: 323 - RNA, 20 nt, synthetic construct
  source 1..20: mol_type = other RNA
acattagtttgggccttggc

SEQ ID NO: 324 - RNA, 20 nt, synthetic construct
  source 1..20: mol_type = other RNA
acattcatagccaaggccca

SEQ ID NO: 325 - RNA, 20 nt, synthetic construct
  source 1..20: mol_type = other RNA
acattcccactgttcactaa

SEQ ID NO: 326 - RNA, 20 nt, synthetic construct
  source 1..20: mol_type = other RNA
acattttatgctacagaggg

SEQ ID NO: 327 - RNA, 20 nt, synthetic construct
  source 1..20: mol_type = other RNA
accaaatgcagccagcagcc

SEQ ID NO: 328 - RNA, 20 nt, synthetic construct
  source 1..20: mol_type = other RNA
accaaggacgttaaaggcat

SEQ ID NO: 329 - RNA, 20 nt, synthetic construct
  source 1..20: mol_type = other RNA
accaagtaactggccaggtg

SEQ ID NO: 330 - RNA, 20 nt, synthetic construct
  source 1..20: mol_type = other RNA
accacaatgaccctcaggtt

SEQ ID NO: 331 - RNA, 20 nt, synthetic construct
  source 1..20: mol_type = other RNA
accaccggttctcatttggc

SEQ ID NO: 332 - RNA, 20 nt, synthetic construct
  source 1..20: mol_type = other RNA
accacgcccagctagtcttt

SEQ ID NO: 333 - RNA, 20 nt, synthetic construct
  source 1..20: mol_type = other RNA
accacggtgctaggaaatcc

SEQ ID NO: 334 - RNA, 20 nt, synthetic construct
  source 1..20: mol_type = other RNA
accagagatcccctggtccc

SEQ ID NO: 335 - RNA, 20 nt, synthetic construct
  source 1..20: mol_type = other RNA
accagcagaagacagaacag

SEQ ID NO: 336 - RNA, 20 nt, synthetic construct
  source 1..20: mol_type = other RNA
accagcatctgcactaattt

SEQ ID NO: 337 - RNA, 20 nt, synthetic construct
  source 1..20: mol_type = other RNA
accaggggatctctggtctt

SEQ ID NO: 338 - RNA, 20 nt, synthetic construct
  source 1..20: mol_type = other RNA
accagggtgatctcaaatcc

SEQ ID NO: 339 - RNA, 20 nt, synthetic construct
  source 1..20: mol_type = other RNA
accagtttcttgaagtccag

SEQ ID NO: 340 - RNA, 20 nt, synthetic construct
  source 1..20: mol_type = other RNA
accatggctatgagaacccc

SEQ ID NO: 341 - RNA, 20 nt, synthetic construct
  source 1..20: mol_type = other RNA
accatttttcacccatttaa

SEQ ID NO: 342 - RNA, 20 nt, synthetic construct
  source 1..20: mol_type = other RNA
acccatttaaaagaatggaa

SEQ ID NO: 343 - RNA, 20 nt, synthetic construct
  source 1..20: mol_type = other RNA
accccacctacaaatacctg

SEQ ID NO: 344 - RNA, 20 nt, synthetic construct
  source 1..20: mol_type = other RNA
accccacttccattgtattg

SEQ ID NO: 345 - RNA, 20 nt, synthetic construct
  source 1..20: mol_type = other RNA
accccagaagagcgtcacct

SEQ ID NO: 346 - RNA, 20 nt, synthetic construct
  source 1..20: mol_type = other RNA
accccatttctcagcaactt

SEQ ID NO: 347 - RNA, 20 nt, synthetic construct
  source 1..20: mol_type = other RNA
accctcaggttttgttcttc

SEQ ID NO: 348 - RNA, 20 nt, synthetic construct
  source 1..20: mol_type = other RNA
accctcatctgtatacacta

SEQ ID NO: 349 - RNA, 20 nt, synthetic construct
  source 1..20: mol_type = other RNA
accctcgcaaaatgatgtga

SEQ ID NO: 350 - RNA, 20 nt, synthetic construct
  source 1..20: mol_type = other RNA
accctctgtagcataaaatg

SEQ ID NO: 351 - RNA, 20 nt, synthetic construct
  source 1..20: mol_type = other RNA
accctggtcaatatggggaa

SEQ ID NO: 352 - RNA, 20 nt, synthetic construct
  source 1..20: mol_type = other RNA
accctgtgcaggtctcttcc

SEQ ID NO: 353 - RNA, 20 nt, synthetic construct
  source 1..20: mol_type = other RNA
accggaacgacagcctgcat

SEQ ID NO: 354 - RNA, 20 nt, synthetic construct
  source 1..20: mol_type = other RNA
accggacaggccaaatgaga

SEQ ID NO: 355 - RNA, 20 nt, synthetic construct
  source 1..20: mol_type = other RNA
accggtggtgaaacacagga

SEQ ID NO: 356 - RNA, 20 nt, synthetic construct
  source 1..20: mol_type = other RNA
accggttctcatttggcctg

SEQ ID NO: 357 - RNA, 20 nt, synthetic construct
  source 1..20: mol_type = other RNA
accgtctgcttgctagccta

SEQ ID NO: 358 - RNA, 20 nt, synthetic construct
  source 1..20: mol_type = other RNA
accgtggtgacaagcaaggc

SEQ ID NO: 359 - RNA, 20 nt, synthetic construct
  source 1..20: mol_type = other RNA
acctaaatctgcatctgctc

SEQ ID NO: 360 - RNA, 20 nt, synthetic construct
  source 1..20: mol_type = other RNA
acctacaaatacctggagca

SEQ ID NO: 361 - RNA, 20 nt, synthetic construct
  source 1..20: mol_type = other RNA
acctagctgagactacaggt

SEQ ID NO: 362 - RNA, 20 nt, synthetic construct
  source 1..20: mol_type = other RNA
acctaggaatccagtgagta

SEQ ID NO: 363 - RNA, 20 nt, synthetic construct
  source 1..20: mol_type = other RNA
acctcctggactgtaggact

SEQ ID NO: 364 - RNA, 20 nt, synthetic construct
  source 1..20: mol_type = other RNA
acctgaacaagatgcagaac

SEQ ID NO: 365 - RNA, 20 nt, synthetic construct
  source 1..20: mol_type = other RNA
acctgagccatttgctgcac

SEQ ID NO: 366 - RNA, 20 nt, synthetic construct
  source 1..20: mol_type = other RNA
acctgagggtcattgtggtg

SEQ ID NO: 367 - RNA, 20 nt, synthetic construct
  source 1..20: mol_type = other RNA
acctgcacagggtgctggga

SEQ ID NO: 368 - RNA, 20 nt, synthetic construct
  source 1..20: mol_type = other RNA
acctgcatccctccgccagg

SEQ ID NO: 369 - RNA, 20 nt, synthetic construct
  source 1..20: mol_type = other RNA
acctggaaaaaggaacacta

SEQ ID NO: 370 - RNA, 20 nt, synthetic construct
  source 1..20: mol_type = other RNA
acctggaagaacaaaacctg

SEQ ID NO: 371 - RNA, 20 nt, synthetic construct
  source 1..20: mol_type = other RNA
acctggagcagatgcagatt

SEQ ID NO: 372 - RNA, 20 nt, synthetic construct
  source 1..20: mol_type = other RNA
acctggccagttacttggtt

SEQ ID NO: 373 - RNA, 20 nt, synthetic construct
  source 1..20: mol_type = other RNA
acctgggccagccaaggcaa

SEQ ID NO: 374 - RNA, 20 nt, synthetic construct
  source 1..20: mol_type = other RNA
acctgtagtctcagctaggt

SEQ ID NO: 375 - RNA, 20 nt, synthetic construct
  source 1..20: mol_type = other RNA
acctgtggaattaataggca

SEQ ID NO: 376 - RNA, 20 nt, synthetic construct
  source 1..20: mol_type = other RNA
acctgtgtgtctccataaaa

SEQ ID NO: 377 - RNA, 20 nt, synthetic construct
  source 1..20: mol_type = other RNA
accttaatgagccctgggaa

SEQ ID NO: 378 - RNA, 20 nt, synthetic construct
  source 1..20: mol_type = other RNA
acgacagcctgcatataagt

SEQ ID NO: 379 - RNA, 20 nt, synthetic construct
  source 1..20: mol_type = other RNA
acgacctaggaatccagtga

SEQ ID NO: 380 - RNA, 20 nt, synthetic construct
  source 1..20: mol_type = other RNA
acgagagccctgaaagctta

SEQ ID NO: 381 - RNA, 20 nt, synthetic construct
  source 1..20: mol_type = other RNA
acgattccgatcgactgcca

SEQ ID NO: 382 - RNA, 20 nt, synthetic construct
  source 1..20: mol_type = other RNA
acgcagcccctggcagcggc

SEQ ID NO: 383 - RNA, 20 nt, synthetic construct
  source 1..20: mol_type = other RNA
acgcccagctagtctttgta

SEQ ID NO: 384 - RNA, 20 nt, synthetic construct
  source 1..20: mol_type = other RNA
acgctcttctggggtgagca

SEQ ID NO: 385 - RNA, 20 nt, synthetic construct
  source 1..20: mol_type = other RNA
acgctggaataaaatgcctt

SEQ ID NO: 386 - RNA, 20 nt, synthetic construct
  source 1..20: mol_type = other RNA
acggaagatgacagtcaact

SEQ ID NO: 387 - RNA, 20 nt, synthetic construct
  source 1..20: mol_type = other RNA
acggctggatacctgtgtgt

SEQ ID NO: 388 - RNA, 20 nt, synthetic construct
  source 1..20: mol_type = other RNA
acgggctgctggctgcattt

SEQ ID NO: 389 - RNA, 20 nt, synthetic construct
  source 1..20: mol_type = other RNA
acggtgctaggaaatccagt

SEQ ID NO: 390 - RNA, 20 nt, synthetic construct
  source 1..20: mol_type = other RNA
acggtgggaccaggggatct

SEQ ID NO: 391 - RNA, 20 nt, synthetic construct
  source 1..20: mol_type = other RNA
acgtccttggtgacaggact

SEQ ID NO: 392 - RNA, 20 nt, synthetic construct
  source 1..20: mol_type = other RNA
acgtgagagaccctcgcaaa

SEQ ID NO: 393 - RNA, 20 nt, synthetic construct
  source 1..20: mol_type = other RNA
acgtgcttcagtggccatta

SEQ ID NO: 394 - RNA, 20 nt, synthetic construct
  source 1..20: mol_type = other RNA
acgttaaaggcattttattc

SEQ ID NO: 395 - RNA, 20 nt, synthetic construct
  source 1..20: mol_type = other RNA
actaagaccagcatctgcac

SEQ ID NO: 396 - RNA, 20 nt, synthetic construct
  source 1..20: mol_type = other RNA
actaagctctctagaagacg

SEQ ID NO: 397 - RNA, 20 nt, synthetic construct
  source 1..20: mol_type = other RNA
actaaggaaataatctgaga

SEQ ID NO: 398 - RNA, 20 nt, synthetic construct
  source 1..20: mol_type = other RNA
actaaggagtgagtggcaag

SEQ ID NO: 399 - RNA, 20 nt, synthetic construct
  source 1..20: mol_type = other RNA
actaatgttgaaagttggca

SEQ ID NO: 400 - RNA, 20 nt, synthetic construct
  source 1..20: mol_type = other RNA
actaatttcccagggctcat

SEQ ID NO: 401 - RNA, 20 nt, synthetic construct
  source 1..20: mol_type = other RNA
actacatcaaatatctgcaa

SEQ ID NO: 402 - RNA, 20 nt, synthetic construct
  source 1..20: mol_type = other RNA
actacctgggccagccaagg

SEQ ID NO: 403 - RNA, 20 nt, synthetic construct
  source 1..20: mol_type = other RNA
actactgtagaactgcaatt

SEQ ID NO: 404 - RNA, 20 nt, synthetic construct
  source 1..20: mol_type = other RNA
actatataaagtactactgt

SEQ ID NO: 405 - RNA, 20 nt, synthetic construct
  source 1..20: mol_type = other RNA
actcactccttagtgaacag

SEQ ID NO: 406 - RNA, 20 nt, synthetic construct
  source 1..20: mol_type = other RNA
actcactggattcctaggtc

SEQ ID NO: 407 - RNA, 20 nt, synthetic construct
  source 1..20: mol_type = other RNA
actcctcgagtactggacat

SEQ ID NO: 408 - RNA, 20 nt, synthetic construct
  source 1..20: mol_type = other RNA
actccttagtgaacagtggg

SEQ ID NO: 409 - RNA, 20 nt, synthetic construct
  source 1..20: mol_type = other RNA
actcgaggagtgaagatgcc

SEQ ID NO: 410 - RNA, 20 nt, synthetic construct
  source 1..20: mol_type = other RNA
actctggacattcccactgt

SEQ ID NO: 411 - RNA, 20 nt, synthetic construct
  source 1..20: mol_type = other RNA
actcttcagcctcattcact

SEQ ID NO: 412 - RNA, 20 nt, synthetic construct
  source 1..20: mol_type = other RNA
actcttttctcagattattt

SEQ ID NO: 413 - RNA, 20 nt, synthetic construct
  source 1..20: mol_type = other RNA
actgaaaaagaccagagatc

SEQ ID NO: 414 - RNA, 20 nt, synthetic construct
  source 1..20: mol_type = other RNA
actgaactgataacagcagc

SEQ ID NO: 415 - RNA, 20 nt, synthetic construct
  source 1..20: mol_type = other RNA
actgaacttgtcttgccact

SEQ ID NO: 416 - RNA, 20 nt, synthetic construct
  source 1..20: mol_type = other RNA
actgaagcacgtgagagacc

SEQ ID NO: 417 - RNA, 20 nt, synthetic construct
  source 1..20: mol_type = other RNA
actgataacagcagcatgtc

SEQ ID NO: 418 - RNA, 20 nt, synthetic construct
  source 1..20: mol_type = other RNA
actgcaatttccattctttt

SEQ ID NO: 419 - RNA, 20 nt, synthetic construct
  source 1..20: mol_type = other RNA
actgcacctggccagttact

SEQ ID NO: 420 - RNA, 20 nt, synthetic construct
  source 1..20: mol_type = other RNA
actgccaagcagcagccgct

SEQ ID NO: 421 - RNA, 20 nt, synthetic construct
  source 1..20: mol_type = other RNA
actgctgactggcttgcctt

SEQ ID NO: 422 - RNA, 20 nt, synthetic construct
  source 1..20: mol_type = other RNA
actgcttactacctgggcca

SEQ ID NO: 423 - RNA, 20 nt, synthetic construct
  source 1..20: mol_type = other RNA
actggacatgctgctgttat

SEQ ID NO: 424 - RNA, 20 nt, synthetic construct
  source 1..20: mol_type = other RNA
actggacttcaagaaactgg

SEQ ID NO: 425 - RNA, 20 nt, synthetic construct
  source 1..20: mol_type = other RNA
actggattcctaggtcgtgt

SEQ ID NO: 426 - RNA, 20 nt, synthetic construct
  source 1..20: mol_type = other RNA
actggatttcctagcaccgt

SEQ ID NO: 427 - RNA, 20 nt, synthetic construct
  source 1..20: mol_type = other RNA
actggccaggtgcagtagct

SEQ ID NO: 428 - RNA, 20 nt, synthetic construct
  source 1..20: mol_type = other RNA
actggcctagctgtagaatt

SEQ ID NO: 429 - RNA, 20 nt, synthetic construct
  source 1..20: mol_type = other RNA
actggcttgccttggctggc

SEQ ID NO: 430 - RNA, 20 nt, synthetic construct
  source 1..20: mol_type = other RNA
actggtcctttcacatcatt

SEQ ID NO: 431 - RNA, 20 nt, synthetic construct
  source 1..20: mol_type = other RNA
actgtaatggccactgaagc

SEQ ID NO: 432 - RNA, 20 nt, synthetic construct
  source 1..20: mol_type = other RNA
actgtagaactgcaatttcc

SEQ ID NO: 433 - RNA, 20 nt, synthetic construct
  source 1..20: mol_type = other RNA
actgtaggactatataaagt

SEQ ID NO: 434 - RNA, 20 nt, synthetic construct
  source 1..20: mol_type = other RNA
actgtatttatatttgggga

SEQ ID NO: 435 - RNA, 20 nt, synthetic construct
  source 1..20: mol_type = other RNA
actgtcatcttccgtgaggg

SEQ ID NO: 436 - RNA, 20 nt, synthetic construct
  source 1..20: mol_type = other RNA
actgtcctggcttttattta

SEQ ID NO: 437 - RNA, 20 nt, synthetic construct
  source 1..20: mol_type = other RNA
actgtctccaaaaaaccaaa

SEQ ID NO: 438 - RNA, 20 nt, synthetic construct
  source 1..20: mol_type = other RNA
actgttcactaaggagtgag

SEQ ID NO: 439 - RNA, 20 nt, synthetic construct
  source 1..20: mol_type = other RNA
actgtttctgttctgtcttc

SEQ ID NO: 440 - RNA, 20 nt, synthetic construct
  source 1..20: mol_type = other RNA
acttacacaacataaccgga

SEQ ID NO: 441 - RNA, 20 nt, synthetic construct
  source 1..20: mol_type = other RNA
acttatatgcaggctgtcgt

SEQ ID NO: 442 - RNA, 20 nt, synthetic construct
  source 1..20: mol_type = other RNA
acttcaagaaactggtcctt

SEQ ID NO: 443 - RNA, 20 nt, synthetic construct
  source 1..20: mol_type = other RNA
acttccattgtattgtctga

SEQ ID NO: 444 - RNA, 20 nt, synthetic construct
  source 1..20: mol_type = other RNA
acttcctgaaagctcattta

SEQ ID NO: 445 - RNA, 20 nt, synthetic construct
  source 1..20: mol_type = other RNA
acttggttttatctcctgct

SEQ ID NO: 446 - RNA, 20 nt, synthetic construct
  source 1..20: mol_type = other RNA
acttgtcttgccactcactc

SEQ ID NO: 447 - RNA, 20 nt, synthetic construct
  source 1..20: mol_type = other RNA
actttatatagtcctacagt

SEQ ID NO: 448 - RNA, 20 nt, synthetic construct
  source 1..20: mol_type = other RNA
actttcaacattagtttggg

SEQ ID NO: 449 - RNA, 20 nt, synthetic construct
  source 1..20: mol_type = other RNA
actttctaaatttcctgttg

SEQ ID NO: 450 - RNA, 20 nt, synthetic construct
  source 1..20: mol_type = other RNA
actttctgacattcatagcc

SEQ ID NO: 451 - RNA, 20 nt, synthetic construct
  source 1..20: mol_type = other RNA
acttttatggagacacacag

SEQ ID NO: 452 - RNA, 20 nt, synthetic construct
  source 1..20: mol_type = other RNA
agaaaactacatcaaatatc

SEQ ID NO: 453 - RNA, 20 nt, synthetic construct
  source 1..20: mol_type = other RNA
agaaaagagttttcaccctc

SEQ ID NO: 454 - RNA, 20 nt, synthetic construct
  source 1..20: mol_type = other RNA
agaaaataaggggatcaaag

SEQ ID NO: 455 - RNA, 20 nt, synthetic construct
  source 1..20: mol_type = other RNA
agaaacagtctgcttcagca

SEQ ID NO: 456 - RNA, 20 nt, synthetic construct
  source 1..20: mol_type = other RNA
agaaaccccacttccattgt

SEQ ID NO: 457 - RNA, 20 nt, synthetic construct
  source 1..20: mol_type = other RNA
agaaactggtcctttcacat

SEQ ID NO: 458 - RNA, 20 nt, synthetic construct
  source 1..20: mol_type = other RNA
agaaagaaaataaggggatc

SEQ ID NO: 459 - RNA, 20 nt, synthetic construct
  source 1..20: mol_type = other RNA
agaaagtcatgtgaacattt

SEQ ID NO: 460 - RNA, 20 nt, synthetic construct
  source 1..20: mol_type = other RNA
agaaagtgctgaagcagact

SEQ ID NO: 461 - RNA, 20 nt, synthetic construct
  source 1..20: mol_type = other RNA
agaaatggggtggaataggg

SEQ ID NO: 462 - RNA, 20 nt, synthetic construct
  source 1..20: mol_type = other RNA
agaacaaaacctgagggtca

SEQ ID NO: 463 - RNA, 20 nt, synthetic construct
  source 1..20: mol_type = other RNA
agaacagaaacagtctgctt

SEQ ID NO: 464 - RNA, 20 nt, synthetic construct
  source 1..20: mol_type = other RNA
agaaccatggctatgagaac

SEQ ID NO: 465 - RNA, 20 nt, synthetic construct
  source 1..20: mol_type = other RNA
agaaccccacctacaaatac

SEQ ID NO: 466 - RNA, 20 nt, synthetic construct
  source 1..20: mol_type = other RNA
agaaccggtggtgaaacaca

SEQ ID NO: 467 - RNA, 20 nt, synthetic construct
  source 1..20: mol_type = other RNA
agaactgaaaaagaccagag

SEQ ID NO: 468 - RNA, 20 nt, synthetic construct
  source 1..20: mol_type = other RNA
agaactgcaatttccattct

SEQ ID NO: 469 - RNA, 20 nt, synthetic construct
  source 1..20: mol_type = other RNA
agaagacagaacagaaacag

SEQ ID NO: 470 - RNA, 20 nt, synthetic construct
  source 1..20: mol_type = other RNA
agaagacgctggaataaaat

SEQ ID NO: 471 - RNA, 20 nt, synthetic construct
  source 1..20: mol_type = other RNA
agaagagcgtcacctgaaca

SEQ ID NO: 472 - RNA, 20 nt, synthetic construct
  source 1..20: mol_type = other RNA
agaatggaaattgcagttct

SEQ ID NO: 473 - RNA, 20 nt, synthetic construct
  source 1..20: mol_type = other RNA
agaatttcagaactgaaaaa

SEQ ID NO: 474 - RNA, 20 nt, synthetic construct
  source 1..20: mol_type = other RNA
agacaagttcagtaaccagc

SEQ ID NO: 475 - RNA, 20 nt, synthetic construct
  source 1..20: mol_type = other RNA
agacaatacaatggaagtgg

SEQ ID NO: 476 - RNA, 20 nt, synthetic construct
  source 1..20: mol_type = other RNA
agacacacaggtatccagcc

SEQ ID NO: 477 - RNA, 20 nt, synthetic construct
  source 1..20: mol_type = other RNA
agacaccacaatgaccctca

SEQ ID NO: 478 - RNA, 20 nt, synthetic construct
  source 1..20: mol_type = other RNA
agacagaacagaaacagtct

SEQ ID NO: 479 - RNA, 20 nt, synthetic construct
  source 1..20: mol_type = other RNA
agaccagagatcccctggtc

SEQ ID NO: 480 - RNA, 20 nt, synthetic construct
  source 1..20: mol_type = other RNA
agaccagcatctgcactaat

SEQ ID NO: 481 - RNA, 20 nt, synthetic construct
  source 1..20: mol_type = other RNA
agaccctcgcaaaatgatgt

SEQ ID NO: 482 - RNA, 20 nt, synthetic construct
  source 1..20: mol_type = other RNA
agacctgagccatttgctgc

SEQ ID NO: 483 - RNA, 20 nt, synthetic construct
  source 1..20: mol_type = other RNA
agacctgcacagggtgctgg

SEQ ID NO: 484 - RNA, 20 nt, synthetic construct
  source 1..20: mol_type = other RNA
agacgcagcccctggcagcg

SEQ ID NO: 485 - RNA, 20 nt, synthetic construct
  source 1..20: mol_type = other RNA
agacgctggaataaaatgcc

SEQ ID NO: 486 - RNA, 20 nt, synthetic construct
  source 1..20: mol_type = other RNA
agacggtgggaccaggggat

SEQ ID NO: 487 - RNA, 20 nt, synthetic construct
  source 1..20: mol_type = other RNA
agactagctgggcgtggtgg

SEQ ID NO: 488 - RNA, 20 nt, synthetic construct
  source 1..20: mol_type = other RNA
agactggcctagctgtagaa

SEQ ID NO: 489 - RNA, 20 nt, synthetic construct
  source 1..20: mol_type = other RNA
agactgtctccaaaaaacca

SEQ ID NO: 490 - RNA, 20 nt, synthetic construct
  source 1..20: mol_type = other RNA
agactgtttctgttctgtct

SEQ ID NO: 491 - RNA, 20 nt, synthetic construct
  source 1..20: mol_type = other RNA
agacttatatgcaggctgtc

SEQ ID NO: 492 - RNA, 20 nt, synthetic construct
  source 1..20: mol_type = other RNA
agagaccctcgcaaaatgat

SEQ ID NO: 493 - RNA, 20 nt, synthetic construct
  source 1..20: mol_type = other RNA
agagacctgcacagggtgct

SEQ ID NO: 494 - RNA, 20 nt, synthetic construct
  source 1..20: mol_type = other RNA
agagagcttagtgtatacag

SEQ ID NO: 495 - RNA, 20 nt, synthetic construct
  source 1..20: mol_type = other RNA
agagataggatttccccata

SEQ ID NO: 496 - RNA, 20 nt, synthetic construct
  source 1..20: mol_type = other RNA
agagatcccctggtcccacc

SEQ ID NO: 497 - RNA, 20 nt, synthetic construct
  source 1..20: mol_type = other RNA
agagcatgtgtcagacaata

SEQ ID NO: 498 - RNA, 20 nt, synthetic construct
  source 1..20: mol_type = other RNA
agagccctgaaagcttagcc

SEQ ID NO: 499 - RNA, 20 nt, synthetic construct
  source 1..20: mol_type = other RNA
agagcgtcacctgaacaaga

SEQ ID NO: 500 - RNA, 20 nt, synthetic construct
  source 1..20: mol_type = other RNA
agagcttagtgtatacagat

SEQ ID NO: 501 - RNA, 20 nt, synthetic construct
  source 1..20: mol_type = other RNA
agaggcaatgctttcgaaac

SEQ ID NO: 502 - RNA, 20 nt, synthetic construct
  source 1..20: mol_type = other RNA
agagggtgaaaactcttttc

SEQ ID NO: 503 - RNA, 20 nt, synthetic construct
  source 1..20: mol_type = other RNA
agagtcccttgatccccaaa

SEQ ID NO: 504 - RNA, 20 nt, synthetic construct
  source 1..20: mol_type = other RNA
agagttgacttacacaacat

SEQ ID NO: 505 - RNA, 20 nt, synthetic construct
  source 1..20: mol_type = other RNA
agagttttcaccctctgtag

SEQ ID NO: 506 - RNA, 20 nt, synthetic construct
  source 1..20: mol_type = other RNA
agataaaaccaagtaactgg

SEQ ID NO: 507 - RNA, 20 nt, synthetic construct
  source 1..20: mol_type = other RNA
agataggatttccccatatt

SEQ ID NO: 508 - RNA, 20 nt, synthetic construct
  source 1..20: mol_type = other RNA
agatatttgatgtagttttc

SEQ ID NO: 509 - RNA, 20 nt, synthetic construct
  source 1..20: mol_type = other RNA
agatcaccctggtcaatatg

SEQ ID NO: 510 - RNA, 20 nt, synthetic construct
  source 1..20: mol_type = other RNA
agatcccacgattccgatcg

SEQ ID NO: 511 - RNA, 20 nt, synthetic construct
  source 1..20: mol_type = other RNA
agatcccctggtcccaccgt

SEQ ID NO: 512 - RNA, 20 nt, synthetic construct
  source 1..20: mol_type = other RNA
agatgacagtcaactggatt

SEQ ID NO: 513 - RNA, 20 nt, synthetic construct
  source 1..20: mol_type = other RNA
agatgcagaaccatggctat

SEQ ID NO: 514 - RNA, 20 nt, synthetic construct
  source 1..20: mol_type = other RNA
agatgcagatttaggtggca

SEQ ID NO: 515 - RNA, 20 nt, synthetic construct
  source 1..20: mol_type = other RNA
agatgcctattaattccaca

SEQ ID NO: 516 - RNA, 20 nt, synthetic construct
  source 1..20: mol_type = other RNA
agatgctggtcttagttatt

SEQ ID NO: 517 - RNA, 20 nt, synthetic construct
  source 1..20: mol_type = other RNA
agattatttccttagtgttc

SEQ ID NO: 518 - RNA, 20 nt, synthetic construct
  source 1..20: mol_type = other RNA
agatttaggtggcagggagc

SEQ ID NO: 519 - RNA, 20 nt, synthetic construct
  source 1..20: mol_type = other RNA
agcaaatggctcaggtctcc

SEQ ID NO: 520 - RNA, 20 nt, synthetic construct
  source 1..20: mol_type = other RNA
agcaacaggaaatttagaaa

SEQ ID NO: 521 - RNA, 20 nt, synthetic construct
  source 1..20: mol_type = other RNA
agcaacttcctgaaagctca

SEQ ID NO: 522 - RNA, 20 nt, synthetic construct
  source 1..20: mol_type = other RNA
agcaagcagacggtgggacc

SEQ ID NO: 523 - RNA, 20 nt, synthetic construct
  source 1..20: mol_type = other RNA
agcaaggctcggcgccactg

SEQ ID NO: 524 - RNA, 20 nt, synthetic construct
  source 1..20: mol_type = other RNA
agcaccctgtgcaggtctct

SEQ ID NO: 525 - RNA, 20 nt, synthetic construct
  source 1..20: mol_type = other RNA
agcaccgtggtgacaagcaa

SEQ ID NO: 526 - RNA, 20 nt, synthetic construct
  source 1..20: mol_type = other RNA
agcacgtgagagaccctcgc

SEQ ID NO: 527 - RNA, 20 nt, synthetic construct
  source 1..20: mol_type = other RNA
agcactttctaaatttcctg

SEQ ID NO: 528 - RNA, 20 nt, synthetic construct
  source 1..20: mol_type = other RNA
agcagaagacagaacagaaa

SEQ ID NO: 529 - RNA, 20 nt, synthetic construct
  source 1..20: mol_type = other RNA
agcagacggtgggaccaggg

SEQ ID NO: 530 - RNA, 20 nt, synthetic construct
  source 1..20: mol_type = other RNA
agcagactgtttctgttctg

SEQ ID NO: 531 - RNA, 20 nt, synthetic construct
  source 1..20: mol_type = other RNA
agcagatgcagatttaggtg

SEQ ID NO: 532 - RNA, 20 nt, synthetic construct
  source 1..20: mol_type = other RNA
agcagcagccgctgccaggg

SEQ ID NO: 533 - RNA, 20 nt, synthetic construct
  source 1..20: mol_type = other RNA
agcagcatgtccagtactcg

SEQ ID NO: 534 - RNA, 20 nt, synthetic construct
  source 1..20: mol_type = other RNA
agcagcccgttcccaccgga

SEQ ID NO: 535 - RNA, 20 nt, synthetic construct
  source 1..20: mol_type = other RNA
agcagccgctgccaggggct

SEQ ID NO: 536 - RNA, 20 nt, synthetic construct
  source 1..20: mol_type = other RNA
agcaggagataaaaccaagt

SEQ ID NO: 537 - RNA, 20 nt, synthetic construct
  source 1..20: mol_type = other RNA
agcagtaggctagcaagcag

SEQ ID NO: 538 - RNA, 20 nt, synthetic construct
  source 1..20: mol_type = other RNA
agcagtggcgccgagccttg

SEQ ID NO: 539 - RNA, 20 nt, synthetic construct
  source 1..20: mol_type = other RNA
agcataaaatgttcacatga

SEQ ID NO: 540 - RNA, 20 nt, synthetic construct
  source 1..20: mol_type = other RNA
agcatctgcactaatttccc

SEQ ID NO: 541 - RNA, 20 nt, synthetic construct
  source 1..20: mol_type = other RNA
agcatgagctactgcacctg

SEQ ID NO: 542 - RNA, 20 nt, synthetic construct
  source 1..20: mol_type = other RNA
agcatgtccagtactcgagg

SEQ ID NO: 543 - RNA, 20 nt, synthetic construct
  source 1..20: mol_type = other RNA
agcatgtgtcagacaataca

SEQ ID NO: 544 - RNA, 20 nt, synthetic construct
  source 1..20: mol_type = other RNA
agcattgcctctttgatccc

SEQ ID NO: 545 - RNA, 20 nt, synthetic construct
  source 1..20: mol_type = other RNA
agcattggatcaacctggaa

SEQ ID NO: 546 - RNA, 20 nt, synthetic construct
  source 1..20: mol_type = other RNA
agccaaggcaagccagtcag

SEQ ID NO: 547 - RNA, 20 nt, synthetic construct
  source 1..20: mol_type = other RNA
agccaaggcccaaactaatg

SEQ ID NO: 548 - RNA, 20 nt, synthetic construct
  source 1..20: mol_type = other RNA
agccagcagcccgttcccac

SEQ ID NO: 549 - RNA, 20 nt, synthetic construct
  source 1..20: mol_type = other RNA
agccaggacagtgaatgagg

SEQ ID NO: 550 - RNA, 20 nt, synthetic construct
  source 1..20: mol_type = other RNA
agccagtcagcagtaggcta

SEQ ID NO: 551 - RNA, 20 nt, synthetic construct
  source 1..20: mol_type = other RNA
agccatggttctgcatcttg

SEQ ID NO: 552 - RNA, 20 nt, synthetic construct
  source 1..20: mol_type = other RNA
agccatttgctgcacaatcc

SEQ ID NO: 553 - RNA, 20 nt, synthetic construct
  source 1..20: mol_type = other RNA
agcccctgccacaaggggct

SEQ ID NO: 554 - RNA, 20 nt, synthetic construct
  source 1..20: mol_type = other RNA
agcccctggcagcggctgct

SEQ ID NO: 555 - RNA, 20 nt, synthetic construct
  source 1..20: mol_type = other RNA
agccccttgtggcaggggct

SEQ ID NO: 556 - RNA, 20 nt, synthetic construct
  source 1..20: mol_type = other RNA
agcccgttcccaccggacag

SEQ ID NO: 557 - RNA, 20 nt, synthetic construct
  source 1..20: mol_type = other RNA
agccctcacggaagatgaca

SEQ ID NO: 558 - RNA, 20 nt, synthetic construct
  source 1..20: mol_type = other RNA
agccctgaaagcttagccct

SEQ ID NO: 559 - RNA, 20 nt, synthetic construct
  source 1..20: mol_type = other RNA
agccctggcggagggatgca

SEQ ID NO: 560 - RNA, 20 nt, synthetic construct
  source 1..20: mol_type = other RNA
agccctgggaaattagtgca

SEQ ID NO: 561 - RNA, 20 nt, synthetic construct
  source 1..20: mol_type = other RNA
agccgctgccaggggctgcg

SEQ ID NO: 562 - RNA, 20 nt, synthetic construct
  source 1..20: mol_type = other RNA
agccgtggaaacactggact

SEQ ID NO: 563 - RNA, 20 nt, synthetic construct
  source 1..20: mol_type = other RNA
agcctactgctgactggctt

SEQ ID NO: 564 - RNA, 20 nt, synthetic construct
  source 1..20: mol_type = other RNA
agcctcattcactgtcctgg

SEQ ID NO: 565 - RNA, 20 nt, synthetic construct
  source 1..20: mol_type = other RNA
agcctcccacctagctgaga

SEQ ID NO: 566 - RNA, 20 nt, synthetic construct
  source 1..20: mol_type = other RNA
agcctgcatataagtctatt

SEQ ID NO: 567 - RNA, 20 nt, synthetic construct
  source 1..20: mol_type = other RNA
agccttgcttgtcaccacgg

SEQ ID NO: 568 - RNA, 20 nt, synthetic construct
  source 1..20: mol_type = other RNA
agcgagactgtctccaaaaa

SEQ ID NO: 569 - RNA, 20 nt, synthetic construct
  source 1..20: mol_type = other RNA
agcgcactgcaacctctgtc

SEQ ID NO: 570 - RNA, 20 nt, synthetic construct
  source 1..20: mol_type = other RNA
agcgcggcagccctggcgga

SEQ ID NO: 571 - RNA, 20 nt, synthetic construct
  source 1..20: mol_type = other RNA
agcggctgctgcttggcagt

SEQ ID NO: 572 - RNA, 20 nt, synthetic construct
  source 1..20: mol_type = other RNA
agcgtcacctgaacaagatg

SEQ ID NO: 573 - RNA, 20 nt, synthetic construct
  source 1..20: mol_type = other RNA
agcgtcttctagagagctta

SEQ ID NO: 574 - RNA, 20 nt, synthetic construct
  source 1..20: mol_type = other RNA
agctactgcacctggccagt

SEQ ID NO: 575 - RNA, 20 nt, synthetic construct
  source 1..20: mol_type = other RNA
agctaggccagtctccagca

SEQ ID NO: 576 - RNA, 20 nt, synthetic construct
  source 1..20: mol_type = other RNA
agctagtctttgtattttta

SEQ ID NO: 577 - RNA, 20 nt, synthetic construct
  source 1..20: mol_type = other RNA
agctcatttaaaaagggaat

SEQ ID NO: 578 - RNA, 20 nt, synthetic construct
  source 1..20: mol_type = other RNA
agctctctagaagacgctgg

SEQ ID NO: 579 - RNA, 20 nt, synthetic construct
  source 1..20: mol_type = other RNA
agctgtagaatttcagaact

SEQ ID NO: 580 - RNA, 20 nt, synthetic construct
  source 1..20: mol_type = other RNA
agcttagccctcacggaaga

SEQ ID NO: 581 - RNA, 20 nt, synthetic construct
  source 1..20: mol_type = other RNA
agcttagtgtatacagatga

SEQ ID NO: 582 - RNA, 20 nt, synthetic construct
  source 1..20: mol_type = other RNA
agctttcaggaagttgctga

SEQ ID NO: 583 - RNA, 20 nt, synthetic construct
  source 1..20: mol_type = other RNA
agctttcagggctctcgttt

SEQ ID NO: 584 - RNA, 20 nt, synthetic construct
  source 1..20: mol_type = other RNA
aggaaataatctgagaaaag

SEQ ID NO: 585 - RNA, 20 nt, synthetic construct
  source 1..20: mol_type = other RNA
aggaaatccagttgactgtc

SEQ ID NO: 586 - RNA, 20 nt, synthetic construct
  source 1..20: mol_type = other RNA
aggaaatttagaaagtgctg

SEQ ID NO: 587 - RNA, 20 nt, synthetic construct
  source 1..20: mol_type = other RNA
aggaacactaaggaaataat

SEQ ID NO: 588 - RNA, 20 nt, synthetic construct
  source 1..20: mol_type = other RNA
aggaagttgctgagaaatgg

SEQ ID NO: 589 - RNA, 20 nt, synthetic construct
  source 1..20: mol_type = other RNA
aggaatccagtgagtaactg

SEQ ID NO: 590 - RNA, 20 nt, synthetic construct
  source 1..20: mol_type = other RNA
aggacagtgaatgaggctga

SEQ ID NO: 591 - RNA, 20 nt, synthetic construct
  source 1..20: mol_type = other RNA
aggaccaaatgcagccagca

SEQ ID NO: 592 - RNA, 20 nt, synthetic construct
  source 1..20: mol_type = other RNA
aggaccagtttcttgaagtc

SEQ ID NO: 593 - RNA, 20 nt, synthetic construct
  source 1..20: mol_type = other RNA
aggaccttaatgagccctgg

SEQ ID NO: 594 - RNA, 20 nt, synthetic construct
  source 1..20: mol_type = other RNA
aggacgttaaaggcatttta

SEQ ID NO: 595 - RNA, 20 nt, synthetic construct
  source 1..20: mol_type = other RNA
aggactatataaagtactac

SEQ ID NO: 596 - RNA, 20 nt, synthetic construct
  source 1..20: mol_type = other RNA
aggacttttatggagacaca

SEQ ID NO: 597 - RNA, 20 nt, synthetic construct
  source 1..20: mol_type = other RNA
aggagaaagaaaataagggg

SEQ ID NO: 598 - RNA, 20 nt, synthetic construct
  source 1..20: mol_type = other RNA
aggagataaaaccaagtaac

SEQ ID NO: 599 - RNA, 20 nt, synthetic construct
  source 1..20: mol_type = other RNA
aggagcaacaggaaatttag

SEQ ID NO: 600 - RNA, 20 nt, synthetic construct
  source 1..20: mol_type = other RNA
aggaggtcaggatgtcagac

SEQ ID NO: 601 - RNA, 20 nt, synthetic construct
  source 1..20: mol_type = other RNA
aggagtgaagatgcctatta

SEQ ID NO: 602 - RNA, 20 nt, synthetic construct
  source 1..20: mol_type = other RNA
aggagtgagtggcaagacaa

SEQ ID NO: 603 - RNA, 20 nt, synthetic construct
  source 1..20: mol_type = other RNA
aggatgtcagacgcagcccc

SEQ ID NO: 604 - RNA, 20 nt, synthetic construct
  source 1..20: mol_type = other RNA
aggatttccccatattgacc

SEQ ID NO: 605 - RNA, 20 nt, synthetic construct
  source 1..20: mol_type = other RNA
aggatttgagatcaccctgg

SEQ ID NO: 606 - RNA, 20 nt, synthetic construct
  source 1..20: mol_type = other RNA
aggcaagccagtcagcagta

SEQ ID NO: 607 - RNA, 20 nt, synthetic construct
  source 1..20: mol_type = other RNA
aggcaatgctttcgaaacga

SEQ ID NO: 608 - RNA, 20 nt, synthetic construct
  source 1..20: mol_type = other RNA
aggcagtattccctttttaa

SEQ ID NO: 609 - RNA, 20 nt, synthetic construct
  source 1..20: mol_type = other RNA
aggcatcttcactcctcgag

SEQ ID NO: 610 - RNA, 20 nt, synthetic construct
  source 1..20: mol_type = other RNA
aggcattttattccagcgtc

SEQ ID NO: 611 - RNA, 20 nt, synthetic construct
  source 1..20: mol_type = other RNA
aggccaaatgagaaccggtg

SEQ ID NO: 612 - RNA, 20 nt, synthetic construct
  source 1..20: mol_type = other RNA
aggccagtctccagcaggag

SEQ ID NO: 613 - RNA, 20 nt, synthetic construct
  source 1..20: mol_type = other RNA
aggcccaaactaatgttgaa

SEQ ID NO: 614 - RNA, 20 nt, synthetic construct
  source 1..20: mol_type = other RNA
aggctagcaagcagacggtg

SEQ ID NO: 615 - RNA, 20 nt, synthetic construct
  source 1..20: mol_type = other RNA
aggctcggcgccactgctta

SEQ ID NO: 616 - RNA, 20 nt, synthetic construct
  source 1..20: mol_type = other RNA
aggctgaagagttgacttac

SEQ ID NO: 617 - RNA, 20 nt, synthetic construct
  source 1..20: mol_type = other RNA
aggctgtcgttccggttatg

SEQ ID NO: 618 - RNA, 20 nt, synthetic construct
  source 1..20: mol_type = other RNA
agggaactgtaatggccact

SEQ ID NO: 619 - RNA, 20 nt, synthetic construct
  source 1..20: mol_type = other RNA
agggactctggacattccca

SEQ ID NO: 620 - RNA, 20 nt, synthetic construct
  source 1..20: mol_type = other RNA
agggagcgcggcagccctgg

SEQ ID NO: 621 - RNA, 20 nt, synthetic construct
  source 1..20: mol_type = other RNA
agggatgcaggtgggccgga

SEQ ID NO: 622 - RNA, 20 nt, synthetic construct
  source 1..20: mol_type = other RNA
agggctaagctttcagggct

SEQ ID NO: 623 - RNA, 20 nt, synthetic construct
  source 1..20: mol_type = other RNA
agggctcattaaggtcctta

SEQ ID NO: 624 - RNA, 20 nt, synthetic construct
  source 1..20: mol_type = other RNA
agggctctcgtttcgaaagc

SEQ ID NO: 625 - RNA, 20 nt, synthetic construct
  source 1..20: mol_type = other RNA
agggctgccgcgctccctgc

SEQ ID NO: 626 - RNA, 20 nt, synthetic construct
  source 1..20: mol_type = other RNA
aggggatcaaagaggcaatg

SEQ ID NO: 627 - RNA, 20 nt, synthetic construct
  source 1..20: mol_type = other RNA
aggggatctctggtcttttt

SEQ ID NO: 628 - RNA, 20 nt, synthetic construct
  source 1..20: mol_type = other RNA
aggggattgtgcagcaaatg

SEQ ID NO: 629 - RNA, 20 nt, synthetic construct
  source 1..20: mol_type = other RNA
aggggctgatttccaaaaac

SEQ ID NO: 630 - RNA, 20 nt, synthetic construct
  source 1..20: mol_type = other RNA
aggggctgcgtctgacatcc

SEQ ID NO: 631 - RNA, 20 nt, synthetic construct
  source 1..20: mol_type = other RNA
aggggctgttgccaactttc

SEQ ID NO: 632 - RNA, 20 nt, synthetic construct
  source 1..20: mol_type = other RNA
agggtcattgtggtgtctgg

SEQ ID NO: 633 - RNA, 20 nt, synthetic construct
  source 1..20: mol_type = other RNA
agggtctctcacgtgcttca

SEQ ID NO: 634 - RNA, 20 nt, synthetic construct
  source 1..20: mol_type = other RNA
agggtgaaaactcttttctc

SEQ ID NO: 635 - RNA, 20 nt, synthetic construct
  source 1..20: mol_type = other RNA
agggtgctgggagacctgag

SEQ ID NO: 636 - RNA, 20 nt, synthetic construct
  source 1..20: mol_type = other RNA
aggtagtaagcagtggcgcc

SEQ ID NO: 637 - RNA, 20 nt, synthetic construct
  source 1..20: mol_type = other RNA
aggtatccagccgtggaaac

SEQ ID NO: 638 - RNA, 20 nt, synthetic construct
  source 1..20: mol_type = other RNA
aggtatttgtaggtggggtt

SEQ ID NO: 639 - RNA, 20 nt, synthetic construct
  source 1..20: mol_type = other RNA
aggtcaggatgtcagacgca

SEQ ID NO: 640 - RNA, 20 nt, synthetic construct
  source 1..20: mol_type = other RNA
aggtcaggatttgagatcac

SEQ ID NO: 641 - RNA, 20 nt, synthetic construct
  source 1..20: mol_type = other RNA
aggtccttactgtatttata

SEQ ID NO: 642 - RNA, 20 nt, synthetic construct
  source 1..20: mol_type = other RNA
aggtcgtgtttttggaaatc

SEQ ID NO: 643 - RNA, 20 nt, synthetic construct
  source 1..20: mol_type = other RNA
aggtctcccagcaccctgtg

SEQ ID NO: 644 - RNA, 20 nt, synthetic construct
  source 1..20: mol_type = other RNA
aggtctcttcccagacacca

SEQ ID NO: 645 - RNA, 20 nt, synthetic construct
  source 1..20: mol_type = other RNA
aggtgacgctcttctggggt

SEQ ID NO: 646 - RNA, 20 nt, synthetic construct
  source 1..20: mol_type = other RNA
aggtggcagggagcgcggca

SEQ ID NO: 647 - RNA, 20 nt, synthetic construct
  source 1..20: mol_type = other RNA
aggtgggaggctgaggcaca

SEQ ID NO: 648 - RNA, 20 nt, synthetic construct
  source 1..20: mol_type = other RNA
aggtgggccggaagatccca

SEQ ID NO: 649 - RNA, 20 nt, synthetic construct
  source 1..20: mol_type = other RNA
aggtggggttctcatagcca

SEQ ID NO: 650 - RNA, 20 nt, synthetic construct
  source 1..20: mol_type = other RNA
aggttcccacccccaaccca

SEQ ID NO: 651 - RNA, 20 nt, synthetic construct
  source 1..20: mol_type = other RNA
aggttgatccaatgctcacc

SEQ ID NO: 652 - RNA, 20 nt, synthetic construct
  source 1..20: mol_type = other RNA
aggttttgttcttccaggtt

SEQ ID NO: 653 - RNA, 20 nt, synthetic construct
  source 1..20: mol_type = other RNA
agtaaccagcagaagacaga

SEQ ID NO: 654 - RNA, 20 nt, synthetic construct
  source 1..20: mol_type = other RNA
agtaactgaactgataacag

SEQ ID NO: 655 - RNA, 20 nt, synthetic construct
  source 1..20: mol_type = other RNA
agtaactggccaggtgcagt

SEQ ID NO: 656 - RNA, 20 nt, synthetic construct
  source 1..20: mol_type = other RNA
agtaagcagtggcgccgagc

SEQ ID NO: 657 - RNA, 20 nt, synthetic construct
  source 1..20: mol_type = other RNA
agtaaggaccttaatgagcc

SEQ ID NO: 658 - RNA, 20 nt, synthetic construct
  source 1..20: mol_type = other RNA
agtactactgtagaactgca

SEQ ID NO: 659 - RNA, 20 nt, synthetic construct
  source 1..20: mol_type = other RNA
agtactcgaggagtgaagat

SEQ ID NO: 660 - RNA, 20 nt, synthetic construct
  source 1..20: mol_type = other RNA
agtactggacatgctgctgt

SEQ ID NO: 661 - RNA, 20 nt, synthetic construct
  source 1..20: mol_type = other RNA
agtactttatatagtcctac

SEQ ID NO: 662 - RNA, 20 nt, synthetic construct
  source 1..20: mol_type = other RNA
agtaggctagcaagcagacg

SEQ ID NO: 663 - RNA, 20 nt, synthetic construct
  source 1..20: mol_type = other RNA
agtagtactttatatagtcc

SEQ ID NO: 664 - RNA, 20 nt, synthetic construct
  source 1..20: mol_type = other RNA
agtattccctttttaaatga

SEQ ID NO: 665 - RNA, 20 nt, synthetic construct
  source 1..20: mol_type = other RNA
agtcaactcttcagcctcat

SEQ ID NO: 666 - RNA, 20 nt, synthetic construct
  source 1..20: mol_type = other RNA
agtcaactggatttcctagc

SEQ ID NO: 667 - RNA, 20 nt, synthetic construct
  source 1..20: mol_type = other RNA
agtcagcagtaggctagcaa

SEQ ID NO: 668 - RNA, 20 nt, synthetic construct
  source 1..20: mol_type = other RNA
agtcatgtgaacattttatg

SEQ ID NO: 669 - RNA, 20 nt, synthetic construct
  source 1..20: mol_type = other RNA
agtccaggaggtcaggatgt

SEQ ID NO: 670 - RNA, 20 nt, synthetic construct
  source 1..20: mol_type = other RNA
agtccagtgtttccacggct

SEQ ID NO: 671 - RNA, 20 nt, synthetic construct
  source 1..20: mol_type = other RNA
agtcccttgatccccaaata

SEQ ID NO: 672 - RNA, 20 nt, synthetic construct
  source 1..20: mol_type = other RNA
agtcctacagtccaggaggt

SEQ ID NO: 673 - RNA, 20 nt, synthetic construct
  source 1..20: mol_type = other RNA
agtcctgtcaccaaggacgt

SEQ ID NO: 674 - RNA, 20 nt, synthetic construct
  source 1..20: mol_type = other RNA
agtcgatcggaatcgtggga

SEQ ID NO: 675 - RNA, 20 nt, synthetic construct
  source 1..20: mol_type = other RNA
agtctattattgaaaatcga

SEQ ID NO: 676 - RNA, 20 nt, synthetic construct
  source 1..20: mol_type = other RNA
agtctccagcaggagataaa

SEQ ID NO: 677 - RNA, 20 nt, synthetic construct
  source 1..20: mol_type = other RNA
agtctgcttcagcactttct

SEQ ID NO: 678 - RNA, 20 nt, synthetic construct
  source 1..20: mol_type = other RNA
agtgaacagtgggaatgtcc

SEQ ID NO: 679 - RNA, 20 nt, synthetic construct
  source 1..20: mol_type = other RNA
agtgaagatgcctattaatt

SEQ ID NO: 680 - RNA, 20 nt, synthetic construct
  source 1..20: mol_type = other RNA
agtgaatgaggctgaagagt

SEQ ID NO: 681 - RNA, 20 nt, synthetic construct
  source 1..20: mol_type = other RNA
agtgagtaactgaactgata

SEQ ID NO: 682 - RNA, 20 nt, synthetic construct
  source 1..20: mol_type = other RNA
agtgagtggcaagacaagtt

SEQ ID NO: 683 - RNA, 20 nt, synthetic construct
  source 1..20: mol_type = other RNA
agtgcagatgctggtcttag

SEQ ID NO: 684 - RNA, 20 nt, synthetic construct
  source 1..20: mol_type = other RNA
agtgctgaagcagactgttt

SEQ ID NO: 685 - RNA, 20 nt, synthetic construct
  source 1..20: mol_type = other RNA
agtggcaagacaagttcagt

SEQ ID NO: 686 - RNA, 20 nt, synthetic construct
  source 1..20: mol_type = other RNA
agtggccattacagttccct

SEQ ID NO: 687 - RNA, 20 nt, synthetic construct
  source 1..20: mol_type = other RNA
agtggcgccgagccttgctt

SEQ ID NO: 688 - RNA, 20 nt, synthetic construct
  source 1..20: mol_type = other RNA
agtgggaatgtccagagtcc

SEQ ID NO: 689 - RNA, 20 nt, synthetic construct
  source 1..20: mol_type = other RNA
agtggggtttctgattaatt

SEQ ID NO: 690 - RNA, 20 nt, synthetic construct
  source 1..20: mol_type = other RNA
agtgttcctttttccaggta

SEQ ID NO: 691 - RNA, 20 nt, synthetic construct
  source 1..20: mol_type = other RNA
agtgtttccacggctggata

SEQ ID NO: 692 - RNA, 20 nt, synthetic construct
  source 1..20: mol_type = other RNA
agttactcactggattccta

SEQ ID NO: 693 - RNA, 20 nt, synthetic construct
  source 1..20: mol_type = other RNA
agttacttggttttatctcc

SEQ ID NO: 694 - RNA, 20 nt, synthetic construct
  source 1..20: mol_type = other RNA
agttcagtaaccagcagaag

SEQ ID NO: 695 - RNA, 20 nt, synthetic construct
  source 1..20: mol_type = other RNA
agttcagttactcactggat

SEQ ID NO: 696 - RNA, 20 nt, synthetic construct
  source 1..20: mol_type = other RNA
agttccctattccaccccat

SEQ ID NO: 697 - RNA, 20 nt, synthetic construct
  source 1..20: mol_type = other RNA
agttctacagtagtacttta

SEQ ID NO: 698 - RNA, 20 nt, synthetic construct
  source 1..20: mol_type = other RNA
agttctgaaattctacagct

SEQ ID NO: 699 - RNA, 20 nt, synthetic construct
  source 1..20: mol_type = other RNA
agttgactgtcatcttccgt

SEQ ID NO: 700 - RNA, 20 nt, synthetic construct
  source 1..20: mol_type = other RNA
agttgacttacacaacataa

SEQ ID NO: 701 - RNA, 20 nt, synthetic construct
  source 1..20: mol_type = other RNA
agttgctgagaaatggggtg

SEQ ID NO: 702 - RNA, 20 nt, synthetic construct
  source 1..20: mol_type = other RNA
agttggcaacagccccttgt

SEQ ID NO: 703 - RNA, 20 nt, synthetic construct
  source 1..20: mol_type = other RNA
agtttcttgaagtccagtgt

SEQ ID NO: 704 - RNA, 20 nt, synthetic construct
  source 1..20: mol_type = other RNA
agtttgggccttggctatga

SEQ ID NO: 705 - RNA, 20 nt, synthetic construct
  source 1..20: mol_type = other RNA
agttttcaccctctgtagca

SEQ ID NO: 706 - RNA, 20 nt, synthetic construct
  source 1..20: mol_type = other RNA
ataaaaatacaaagactagc

SEQ ID NO: 707 - RNA, 20 nt, synthetic construct
  source 1..20: mol_type = other RNA
ataaaaccaagtaactggcc

SEQ ID NO: 708 - RNA, 20 nt, synthetic construct
  source 1..20: mol_type = other RNA
ataaaagccaggacagtgaa

SEQ ID NO: 709 - RNA, 20 nt, synthetic construct
  source 1..20: mol_type = other RNA
ataaaagtcctgtcaccaag

SEQ ID NO: 710 - RNA, 20 nt, synthetic construct
  source 1..20: mol_type = other RNA
ataaaatgcctttaacgtcc

SEQ ID NO: 711 - RNA, 20 nt, synthetic construct
  source 1..20: mol_type = other RNA
ataaaatgttcacatgactt

SEQ ID NO: 712 - RNA, 20 nt, synthetic construct
  source 1..20: mol_type = other RNA
ataaagtactactgtagaac

SEQ ID NO: 713 - RNA, 20 nt, synthetic construct
  source 1..20: mol_type = other RNA
ataaatacagtaaggacctt

SEQ ID NO: 714 - RNA, 20 nt, synthetic construct
  source 1..20: mol_type = other RNA
ataaatgggaaatgtcgatt

SEQ ID NO: 715 - RNA, 20 nt, synthetic construct
  source 1..20: mol_type = other RNA
ataacagcagcatgtccagt

SEQ ID NO: 716 - RNA, 20 nt, synthetic construct
  source 1..20: mol_type = other RNA
ataaccggaacgacagcctg

SEQ ID NO: 717 - RNA, 20 nt, synthetic construct
  source 1..20: mol_type = other RNA
ataactaagaccagcatctg

SEQ ID NO: 718 - RNA, 20 nt, synthetic construct
  source 1..20: mol_type = other RNA
ataaggggatcaaagaggca

SEQ ID NO: 719 - RNA, 20 nt, synthetic construct
  source 1..20: mol_type = other RNA
ataataaatgggaaatgtcg

SEQ ID NO: 720 - RNA, 20 nt, synthetic construct
  source 1..20: mol_type = other RNA
ataatagacttatatgcagg

SEQ ID NO: 721 - RNA, 20 nt, synthetic construct
  source 1..20: mol_type = other RNA
ataatctgagaaaagagttt

SEQ ID NO: 722 - RNA, 20 nt, synthetic construct
  source 1..20: mol_type = other RNA
atacaaagactagctgggcg

SEQ ID NO: 723 - RNA, 20 nt, synthetic construct
  source 1..20: mol_type = other RNA
atacaatggaagtggggttt

SEQ ID NO: 724 - RNA, 20 nt, synthetic construct
  source 1..20: mol_type = other RNA
atacactaagctctctagaa

SEQ ID NO: 725 - RNA, 20 nt, synthetic construct
  source 1..20: mol_type = other RNA
atacagtaaggaccttaatg

SEQ ID NO: 726 - RNA, 20 nt, synthetic construct
  source 1..20: mol_type = other RNA
atacctggaaaaaggaacac

SEQ ID NO: 727 - RNA, 20 nt, synthetic construct
  source 1..20: mol_type = other RNA
atacctggagcagatgcaga

SEQ ID NO: 728 - RNA, 20 nt, synthetic construct
  source 1..20: mol_type = other RNA
atacctgtgtgtctccataa

SEQ ID NO: 729 - RNA, 20 nt, synthetic construct
  source 1..20: mol_type = other RNA
atagacttatatgcaggctg

SEQ ID NO: 730 - RNA, 20 nt, synthetic construct
  source 1..20: mol_type = other RNA
atagccaaggcccaaactaa

SEQ ID NO: 731 - RNA, 20 nt, synthetic construct
  source 1..20: mol_type = other RNA
atagccatggttctgcatct

SEQ ID NO: 732 - RNA, 20 nt, synthetic construct
  source 1..20: mol_type = other RNA
ataggatttccccatattga

SEQ ID NO: 733 - RNA, 20 nt, synthetic construct
  source 1..20: mol_type = other RNA
ataggcatcttcactcctcg

SEQ ID NO: 734 - RNA, 20 nt, synthetic construct
  source 1..20: mol_type = other RNA
atagggaactgtaatggcca

SEQ ID NO: 735 - RNA, 20 nt, synthetic construct
  source 1..20: mol_type = other RNA
atagtcctacagtccaggag

SEQ ID NO: 736 - RNA, 20 nt, synthetic construct
  source 1..20: mol_type = other RNA
atataaagtactactgtaga

SEQ ID NO: 737 - RNA, 20 nt, synthetic construct
  source 1..20: mol_type = other RNA
atataaatacagtaaggacc

SEQ ID NO: 738 - RNA, 20 nt, synthetic construct
  source 1..20: mol_type = other RNA
atatagtcctacagtccagg

SEQ ID NO: 739 - RNA, 20 nt, synthetic construct
  source 1..20: mol_type = other RNA
atatattgagagcatgtgtc

SEQ ID NO: 740 - RNA, 20 nt, synthetic construct
  source 1..20: mol_type = other RNA
atatctgcaatagatcattt

SEQ ID NO: 741 - RNA, 20 nt, synthetic construct
  source 1..20: mol_type = other RNA
atatgcaggctgtcgttccg

SEQ ID NO: 742 - RNA, 20 nt, synthetic construct
  source 1..20: mol_type = other RNA
atatggggaaatcctatctc

SEQ ID NO: 743 - RNA, 20 nt, synthetic construct
  source 1..20: mol_type = other RNA
atattaccatttttcaccca

SEQ ID NO: 744 - RNA, 20 nt, synthetic construct
  source 1..20: mol_type = other RNA
atattgaccagggtgatctc

SEQ ID NO: 745 - RNA, 20 nt, synthetic construct
  source 1..20: mol_type = other RNA
atattgagagcatgtgtcag

SEQ ID NO: 746 - RNA, 20 nt, synthetic construct
  source 1..20: mol_type = other RNA
atatttggggatcaagggac

SEQ ID NO: 747 - RNA, 20 nt, synthetic construct
  source 1..20: mol_type = other RNA
atcaaagaggcaatgctttc

SEQ ID NO: 748 - RNA, 20 nt, synthetic construct
  source 1..20: mol_type = other RNA
atcaaatatctgcaatagat

SEQ ID NO: 749 - RNA, 20 nt, synthetic construct
  source 1..20: mol_type = other RNA
atcaacctggaagaacaaaa

SEQ ID NO: 750 - RNA, 20 nt, synthetic construct
  source 1..20: mol_type = other RNA
atcaagggactctggacatt

SEQ ID NO: 751 - RNA, 20 nt, synthetic construct
  source 1..20: mol_type = other RNA
atcaccctggtcaatatggg

SEQ ID NO: 752 - RNA, 20 nt, synthetic construct
  source 1..20: mol_type = other RNA
atcagaaaccccacttccat

SEQ ID NO: 753 - RNA, 20 nt, synthetic construct
  source 1..20: mol_type = other RNA
atcagcccctgccacaaggg

SEQ ID NO: 754 - RNA, 20 nt, synthetic construct
  source 1..20: mol_type = other RNA
atcagttcagttactcactg

SEQ ID NO: 755 - RNA, 20 nt, synthetic construct
  source 1..20: mol_type = other RNA
atcattttgcgagggtctct

SEQ ID NO: 756 - RNA, 20 nt, synthetic construct
  source 1..20: mol_type = other RNA
atccaatgctcaccccagaa

SEQ ID NO: 757 - RNA, 20 nt, synthetic construct
  source 1..20: mol_type = other RNA
atccagccgtggaaacactg

SEQ ID NO: 758 - RNA, 20 nt, synthetic construct
  source 1..20: mol_type = other RNA
atccagtgagtaactgaact

SEQ ID NO: 759 - RNA, 20 nt, synthetic construct
  source 1..20: mol_type = other RNA
atccagttgactgtcatctt

SEQ ID NO: 760 - RNA, 20 nt, synthetic construct
  source 1..20: mol_type = other RNA
atcccacgattccgatcgac

SEQ ID NO: 761 - RNA, 20 nt, synthetic construct
  source 1..20: mol_type = other RNA
atccccaaatataaatacag

SEQ ID NO: 762 - RNA, 20 nt, synthetic construct
  source 1..20: mol_type = other RNA
atcccctgaggaccaaatgc

SEQ ID NO: 763 - RNA, 20 nt, synthetic construct
  source 1..20: mol_type = other RNA
atcccctggtcccaccgtct

SEQ ID NO: 764 - RNA, 20 nt, synthetic construct
  source 1..20: mol_type = other RNA
atccccttattttctttctc

SEQ ID NO: 765 - RNA, 20 nt, synthetic construct
  source 1..20: mol_type = other RNA
atccctccgccagggctgcc

SEQ ID NO: 766 - RNA, 20 nt, synthetic construct
  source 1..20: mol_type = other RNA
atcctgacctcctggactgt

SEQ ID NO: 767 - RNA, 20 nt, synthetic construct
  source 1..20: mol_type = other RNA
atcgacatttcccatttatt

SEQ ID NO: 768 - RNA, 20 nt, synthetic construct
  source 1..20: mol_type = other RNA
atcgactgccaagcagcagc

SEQ ID NO: 769 - RNA, 20 nt, synthetic construct
  source 1..20: mol_type = other RNA
atcggaatcgtgggatcttc

SEQ ID NO: 770 - RNA, 20 nt, synthetic construct
  source 1..20: mol_type = other RNA
atcgtgggatcttccggccc

SEQ ID NO: 771 - RNA, 20 nt, synthetic construct
  source 1..20: mol_type = other RNA
atctattgcagatatttgat

SEQ ID NO: 772 - RNA, 20 nt, synthetic construct
  source 1..20: mol_type = other RNA
atctcctgctggagactggc

SEQ ID NO: 773 - RNA, 20 nt, synthetic construct
  source 1..20: mol_type = other RNA
atctctggtctttttcagtt

SEQ ID NO: 774 - RNA, 20 nt, synthetic construct
  source 1..20: mol_type = other RNA
atctgagaaaagagttttca

SEQ ID NO: 775 - RNA, 20 nt, synthetic construct
  source 1..20: mol_type = other RNA
atctgcaatagatcattttt

SEQ ID NO: 776 - RNA, 20 nt, synthetic construct
  source 1..20: mol_type = other RNA
atctgcactaatttcccagg

SEQ ID NO: 777 - RNA, 20 nt, synthetic construct
  source 1..20: mol_type = other RNA
atctgcatctgctccaggta

SEQ ID NO: 778 - RNA, 20 nt, synthetic construct
  source 1..20: mol_type = other RNA
atctgctccaggtatttgta

SEQ ID NO: 779 - RNA, 20 nt, synthetic construct
  source 1..20: mol_type = other RNA
atctgtatacactaagctct

SEQ ID NO: 780 - RNA, 20 nt, synthetic construct
  source 1..20: mol_type = other RNA
atcttcactcctcgagtact

SEQ ID NO: 781 - RNA, 20 nt, synthetic construct
  source 1..20: mol_type = other RNA
atcttccggcccacctgcat

SEQ ID NO: 782 - RNA, 20 nt, synthetic construct
  source 1..20: mol_type = other RNA
atcttccgtgagggctaagc

SEQ ID NO: 783 - RNA, 20 nt, synthetic construct
  source 1..20: mol_type = other RNA
atcttgttcaggtgacgctc

SEQ ID NO: 784 - RNA, 20 nt, synthetic construct
  source 1..20: mol_type = other RNA
atgaatgtcagaaagtcatg

SEQ ID NO: 785 - RNA, 20 nt, synthetic construct
  source 1..20: mol_type = other RNA
atgacagtcaactggatttc

SEQ ID NO: 786 - RNA, 20 nt, synthetic construct
  source 1..20: mol_type = other RNA
atgaccctcaggttttgttc

SEQ ID NO: 787 - RNA, 20 nt, synthetic construct
  source 1..20: mol_type = other RNA
atgactttctgacattcata

SEQ ID NO: 788 - RNA, 20 nt, synthetic construct
  source 1..20: mol_type = other RNA
atgagaaccccacctacaaa

SEQ ID NO: 789 - RNA, 20 nt, synthetic construct
  source 1..20: mol_type = other RNA
atgagaaccggtggtgaaac

SEQ ID NO: 790 - RNA, 20 nt, synthetic construct
  source 1..20: mol_type = other RNA
atgagccctgggaaattagt

SEQ ID NO: 791 - RNA, 20 nt, synthetic construct
  source 1..20: mol_type = other RNA
atgagctactgcacctggcc

SEQ ID NO: 792 - RNA, 20 nt, synthetic construct
  source 1..20: mol_type = other RNA
atgagctttcaggaagttgc

SEQ ID NO: 793 - RNA, 20 nt, synthetic construct
  source 1..20: mol_type = other RNA
atgaggctgaagagttgact

SEQ ID NO: 794 - RNA, 20 nt, synthetic construct
  source 1..20: mol_type = other RNA
atgatctattgcagatattt

SEQ ID NO: 795 - RNA, 20 nt, synthetic construct
  source 1..20: mol_type = other RNA
atgatgtgaaaggaccagtt

SEQ ID NO: 796 - RNA, 20 nt, synthetic construct
  source 1..20: mol_type = other RNA
atgcagaaccatggctatga

SEQ ID NO: 797 - RNA, 20 nt, synthetic construct
  source 1..20: mol_type = other RNA
atgcagatttaggtggcagg

SEQ ID NO: 798 - RNA, 20 nt, synthetic construct
  source 1..20: mol_type = other RNA
atgcagccagcagcccgttc

SEQ ID NO: 799 - RNA, 20 nt, synthetic construct
  source 1..20: mol_type = other RNA
atgcaggctgtcgttccggt

SEQ ID NO: 800 - RNA, 20 nt, synthetic construct
  source 1..20: mol_type = other RNA
atgcaggtgggccggaagat

SEQ ID NO: 801 - RNA, 20 nt, synthetic construct
  source 1..20: mol_type = other RNA
atgcctattaattccacagg

SEQ ID NO: 802 - RNA, 20 nt, synthetic construct
  source 1..20: mol_type = other RNA
atgcctttaacgtccttggt

SEQ ID NO: 803 - RNA, 20 nt, synthetic construct
  source 1..20: mol_type = other RNA
atgctacagagggtgaaaac

SEQ ID NO: 804 - RNA, 20 nt, synthetic construct
  source 1..20: mol_type = other RNA
atgctcaccccagaagagcg

SEQ ID NO: 805 - RNA, 20 nt, synthetic construct
  source 1..20: mol_type = other RNA
atgctgctgttatcagttca

SEQ ID NO: 806 - RNA, 20 nt, synthetic construct
  source 1..20: mol_type = other RNA
atgctggtcttagttatttg

SEQ ID NO: 807 - RNA, 20 nt, synthetic construct
  source 1..20: mol_type = other RNA
atgctttcgaaacgagagcc

SEQ ID NO: 808 - RNA, 20 nt, synthetic construct
  source 1..20: mol_type = other RNA
atggaaattgcagttctaca

SEQ ID NO: 809 - RNA, 20 nt, synthetic construct
  source 1..20: mol_type = other RNA
atggaagtggggtttctgat

SEQ ID NO: 810 - RNA, 20 nt, synthetic construct
  source 1..20: mol_type = other RNA
atggagacacacaggtatcc

SEQ ID NO: 811 - RNA, 20 nt, synthetic construct
  source 1..20: mol_type = other RNA
atggccactgaagcacgtga

SEQ ID NO: 812 - RNA, 20 nt, synthetic construct
  source 1..20: mol_type = other RNA
atggctatgagaaccccacc

SEQ ID NO: 813 - RNA, 20 nt, synthetic construct
  source 1..20: mol_type = other RNA
atggctcaggtctcccagca

SEQ ID NO: 814 - RNA, 20 nt, synthetic construct
  source 1..20: mol_type = other RNA
atgggaaatgtcgattttca

SEQ ID NO: 815 - RNA, 20 nt, synthetic construct
  source 1..20: mol_type = other RNA
atggggaaatcctatctcta

SEQ ID NO: 816 - RNA, 20 nt, synthetic construct
  source 1..20: mol_type = other RNA
atgggggaaaggagcaacag

SEQ ID NO: 817 - RNA, 20 nt, synthetic construct
  source 1..20: mol_type = other RNA
atggggtggaatagggaact

SEQ ID NO: 818 - RNA, 20 nt, synthetic construct
  source 1..20: mol_type = other RNA
atgggtgaaaaatggtaata

SEQ ID NO: 819 - RNA, 20 nt, synthetic construct
  source 1..20: mol_type = other RNA
atggttctgcatcttgttca

SEQ ID NO: 820 - RNA, 20 nt, synthetic construct
  source 1..20: mol_type = other RNA
atgtcagaaagtcatgtgaa

SEQ ID NO: 821 - RNA, 20 nt, synthetic construct
  source 1..20: mol_type = other RNA
atgtcagacgcagcccctgg

SEQ ID NO: 822 - RNA, 20 nt, synthetic construct
  source 1..20: mol_type = other RNA
atgtccagagtcccttgatc

SEQ ID NO: 823 - RNA, 20 nt, synthetic construct
  source 1..20: mol_type = other RNA
atgtccagtactcgaggagt

SEQ ID NO: 824 - RNA, 20 nt, synthetic construct
  source 1..20: mol_type = other RNA
atgtcgattttcaataatag

SEQ ID NO: 825 - RNA, 20 nt, synthetic construct
  source 1..20: mol_type = other RNA
atgtgaaaggaccagtttct

SEQ ID NO: 826 - RNA, 20 nt, synthetic construct
  source 1..20: mol_type = other RNA
atgtgaacattttatgctac

SEQ ID NO: 827 - RNA, 20 nt, synthetic construct
  source 1..20: mol_type = other RNA
atgtgtcagacaatacaatg

SEQ ID NO: 828 - RNA, 20 nt, synthetic construct
  source 1..20: mol_type = other RNA
atgttcacatgactttctga

SEQ ID NO: 829 - RNA, 20 nt, synthetic construct
  source 1..20: mol_type = other RNA
atgttgaaagttggcaacag

SEQ ID NO: 830 - RNA, 20 nt, synthetic construct
  source 1..20: mol_type = other RNA
atgttgtgtaagtcaactct

SEQ ID NO: 831 - RNA, 20 nt, synthetic construct
  source 1..20: mol_type = other RNA
attaaggtccttactgtatt

SEQ ID NO: 832 - RNA, 20 nt, synthetic construct
  source 1..20: mol_type = other RNA
attaataggcatcttcactc

SEQ ID NO: 833 - RNA, 20 nt, synthetic construct
  source 1..20: mol_type = other RNA
attaatcagaaaccccactt

SEQ ID NO: 834 - RNA, 20 nt, synthetic construct
  source 1..20: mol_type = other RNA
attaattccacaggttccca

SEQ ID NO: 835 - RNA, 20 nt, synthetic construct
  source 1..20: mol_type = other RNA
attacagttccctattccac

SEQ ID NO: 836 - RNA, 20 nt, synthetic construct
  source 1..20: mol_type = other RNA
attaccatttttcacccatt

SEQ ID NO: 837 - RNA, 20 nt, synthetic construct
  source 1..20: mol_type = other RNA
attagagataggatttcccc

SEQ ID NO: 838 - RNA, 20 nt, synthetic construct
  source 1..20: mol_type = other RNA
attagtgcagatgctggtct

SEQ ID NO: 839 - RNA, 20 nt, synthetic construct
  source 1..20: mol_type = other RNA
attagtttgggccttggcta

SEQ ID NO: 840 - RNA, 20 nt, synthetic construct
  source 1..20: mol_type = other RNA
attatatattgagagcatgt

SEQ ID NO: 841 - RNA, 20 nt, synthetic construct
  source 1..20: mol_type = other RNA
attatttccttagtgttcct

SEQ ID NO: 842 - RNA, 20 nt, synthetic construct
  source 1..20: mol_type = other RNA
attcactgtcctggctttta

SEQ ID NO: 843 - RNA, 20 nt, synthetic construct
  source 1..20: mol_type = other RNA
attcatagccaaggcccaaa

SEQ ID NO: 844 - RNA, 20 nt, synthetic construct
  source 1..20: mol_type = other RNA
attccacaggttcccacccc

SEQ ID NO: 845 - RNA, 20 nt, synthetic construct
  source 1..20: mol_type = other RNA
attccaccccatttctcagc

SEQ ID NO: 846 - RNA, 20 nt, synthetic construct
  source 1..20: mol_type = other RNA
attccagcgtcttctagaga

SEQ ID NO: 847 - RNA, 20 nt, synthetic construct
  source 1..20: mol_type = other RNA
attcccactgttcactaagg

SEQ ID NO: 848 - RNA, 20 nt, synthetic construct
  source 1..20: mol_type = other RNA
attccctttttaaatgagct

SEQ ID NO: 849 - RNA, 20 nt, synthetic construct
  source 1..20: mol_type = other RNA
attccgatcgactgccaagc

SEQ ID NO: 850 - RNA, 20 nt, synthetic construct
  source 1..20: mol_type = other RNA
attcctaggtcgtgtttttg

SEQ ID NO: 851 - RNA, 20 nt, synthetic construct
  source 1..20: mol_type = other RNA
attctacagctaggccagtc

SEQ ID NO: 852 - RNA, 20 nt, synthetic construct
  source 1..20: mol_type = other RNA
attcttttaaatgggtgaaa

SEQ ID NO: 853 - RNA, 20 nt, synthetic construct
  source 1..20: mol_type = other RNA
attgaaaatcgacatttccc

SEQ ID NO: 854 - RNA, 20 nt, synthetic construct
  source 1..20: mol_type = other RNA
attgaccagggtgatctcaa

SEQ ID NO: 855 - RNA, 20 nt, synthetic construct
  source 1..20: mol_type = other RNA
attgagagcatgtgtcagac

SEQ ID NO: 856 - RNA, 20 nt, synthetic construct
  source 1..20: mol_type = other RNA
attgcagatatttgatgtag

SEQ ID NO: 857 - RNA, 20 nt, synthetic construct
  source 1..20: mol_type = other RNA
attgcagttctacagtagta

SEQ ID NO: 858 - RNA, 20 nt, synthetic construct
  source 1..20: mol_type = other RNA
attgcctctttgatcccctt

SEQ ID NO: 859 - RNA, 20 nt, synthetic construct
  source 1..20: mol_type = other RNA
attggatcaacctggaagaa

SEQ ID NO: 860 - RNA, 20 nt, synthetic construct
  source 1..20: mol_type = other RNA
attgtattgtctgacacatg

SEQ ID NO: 861 - RNA, 20 nt, synthetic construct
  source 1..20: mol_type = other RNA
attgtctgacacatgctctc

SEQ ID NO: 862 - RNA, 20 nt, synthetic construct
  source 1..20: mol_type = other RNA
attgtgcagcaaatggctca

SEQ ID NO: 863 - RNA, 20 nt, synthetic construct
  source 1..20: mol_type = other RNA
attgtggtgtctgggaagag

SEQ ID NO: 864 - RNA, 20 nt, synthetic construct
  source 1..20: mol_type = other RNA
atttaaaaagggaatactgc

SEQ ID NO: 865 - RNA, 20 nt, synthetic construct
  source 1..20: mol_type = other RNA
atttagaaagtgctgaagca

SEQ ID NO: 866 - RNA, 20 nt, synthetic construct
  source 1..20: mol_type = other RNA
atttaggtggcagggagcgc

SEQ ID NO: 867 - RNA, 20 nt, synthetic construct
  source 1..20: mol_type = other RNA
atttatatttggggatcaag

SEQ ID NO: 868 - RNA, 20 nt, synthetic construct
  source 1..20: mol_type = other RNA
atttcagaactgaaaaagac

SEQ ID NO: 869 - RNA, 20 nt, synthetic construct
  source 1..20: mol_type = other RNA
atttccaaaaacacgaccta

SEQ ID NO: 870 - RNA, 20 nt, synthetic construct
  source 1..20: mol_type = other RNA
atttccattcttttaaatgg

SEQ ID NO: 871 - RNA, 20 nt, synthetic construct
  source 1..20: mol_type = other RNA
atttcccagggctcattaag

SEQ ID NO: 872 - RNA, 20 nt, synthetic construct
  source 1..20: mol_type = other RNA
atttccccatattgaccagg

SEQ ID NO: 873 - RNA, 20 nt, synthetic construct
  source 1..20: mol_type = other RNA
atttcctagcaccgtggtga

SEQ ID NO: 874 - RNA, 20 nt, synthetic construct
  source 1..20: mol_type = other RNA
atttcctgttgctcctttcc

SEQ ID NO: 875 - RNA, 20 nt, synthetic construct
  source 1..20: mol_type = other RNA
atttccttagtgttcctttt

SEQ ID NO: 876 - RNA, 20 nt, synthetic construct
  source 1..20: mol_type = other RNA
atttctcagcaacttcctga

SEQ ID NO: 877 - RNA, 20 nt, synthetic construct
  source 1..20: mol_type = other RNA
atttgagatcaccctggtca

SEQ ID NO: 878 - RNA, 20 nt, synthetic construct
  source 1..20: mol_type = other RNA
atttgctgcacaatcccctg

SEQ ID NO: 879 - RNA, 20 nt, synthetic construct
  source 1..20: mol_type = other RNA
atttggcctgtccggtggga

SEQ ID NO: 880 - RNA, 20 nt, synthetic construct
  source 1..20: mol_type = other RNA
atttggggatcaagggactc

SEQ ID NO: 881 - RNA, 20 nt, synthetic construct
  source 1..20: mol_type = other RNA
atttggtcctcaggggattg

SEQ ID NO: 882 - RNA, 20 nt, synthetic construct
  source 1..20: mol_type = other RNA
atttgtaggtggggttctca

SEQ ID NO: 883 - RNA, 20 nt, synthetic construct
  source 1..20: mol_type = other RNA
attttatgctacagagggtg

SEQ ID NO: 884 - RNA, 20 nt, synthetic construct
  source 1..20: mol_type = other RNA
attttattccagcgtcttct

SEQ ID NO: 885 - RNA, 20 nt, synthetic construct
  source 1..20: mol_type = other RNA
attttctttctcctgtgttt

SEQ ID NO: 886 - RNA, 20 nt, synthetic construct
  source 1..20: mol_type = other RNA
attttgcgagggtctctcac

SEQ ID NO: 887 - RNA, 20 nt, synthetic construct
  source 1..20: mol_type = other RNA
atttttcacccatttaaaag

SEQ ID NO: 888 - RNA, 20 nt, synthetic construct
  source 1..20: mol_type = other RNA
caaaaaaccaaaaaaccaaa

SEQ ID NO: 889 - RNA, 20 nt, synthetic construct
  source 1..20: mol_type = other RNA
caaaaacacgacctaggaat

SEQ ID NO: 890 - RNA, 20 nt, synthetic construct
  source 1..20: mol_type = other RNA
caaaacctgagggtcattgt

SEQ ID NO: 891 - RNA, 20 nt, synthetic construct
  source 1..20: mol_type = other RNA
caaaatgatgtgaaaggacc

SEQ ID NO: 892 - RNA, 20 nt, synthetic construct
  source 1..20: mol_type = other RNA
caaactaatgttgaaagttg

SEQ ID NO: 893 - RNA, 20 nt, synthetic construct
  source 1..20: mol_type = other RNA
caaagactagctgggcgtgg

SEQ ID NO: 894 - RNA, 20 nt, synthetic construct
  source 1..20: mol_type = other RNA
caaagaggcaatgctttcga

SEQ ID NO: 895 - RNA, 20 nt, synthetic construct
  source 1..20: mol_type = other RNA
caaataactaagaccagcat

SEQ ID NO: 896 - RNA, 20 nt, synthetic construct
  source 1..20: mol_type = other RNA
caaatacctggagcagatgc

SEQ ID NO: 897 - RNA, 20 nt, synthetic construct
  source 1..20: mol_type = other RNA
caaatataaatacagtaagg

SEQ ID NO: 898 - RNA, 20 nt, synthetic construct
  source 1..20: mol_type = other RNA
caaatatctgcaatagatca

SEQ ID NO: 899 - RNA, 20 nt, synthetic construct
  source 1..20: mol_type = other RNA
caaatgagaaccggtggtga

SEQ ID NO: 900 - RNA, 20 nt, synthetic construct
  source 1..20: mol_type = other RNA
caaatgcagccagcagcccg

SEQ ID NO: 901 - RNA, 20 nt, synthetic construct
  source 1..20: mol_type = other RNA
caaatggctcaggtctccca

SEQ ID NO: 902 - RNA, 20 nt, synthetic construct
  source 1..20: mol_type = other RNA
caacagccccttgtggcagg

SEQ ID NO: 903 - RNA, 20 nt, synthetic construct
  source 1..20: mol_type = other RNA
caacaggaaatttagaaagt

SEQ ID NO: 904 - RNA, 20 nt, synthetic construct
  source 1..20: mol_type = other RNA
caacataaccggaacgacag

SEQ ID NO: 905 - RNA, 20 nt, synthetic construct
  source 1..20: mol_type = other RNA
caacattagtttgggccttg

SEQ ID NO: 906 - RNA, 20 nt, synthetic construct
  source 1..20: mol_type = other RNA
caacctggaagaacaaaacc

SEQ ID NO: 907 - RNA, 20 nt, synthetic construct
  source 1..20: mol_type = other RNA
caactcttcagcctcattca

SEQ ID NO: 908 - RNA, 20 nt, synthetic construct
  source 1..20: mol_type = other RNA
caactggatttcctagcacc

SEQ ID NO: 909 - RNA, 20 nt, synthetic construct
  source 1..20: mol_type = other RNA
caacttcctgaaagctcatt

SEQ ID NO: 910 - RNA, 20 nt, synthetic construct
  source 1..20: mol_type = other RNA
caactttcaacattagtttg

SEQ ID NO: 911 - RNA, 20 nt, synthetic construct
  source 1..20: mol_type = other RNA
caagaaactggtcctttcac

SEQ ID NO: 912 - RNA, 20 nt, synthetic construct
  source 1..20: mol_type = other RNA
caagaatcacctgaacccgg

SEQ ID NO: 913 - RNA, 20 nt, synthetic construct
  source 1..20: mol_type = other RNA
caagacaagttcagtaacca

SEQ ID NO: 914 - RNA, 20 nt, synthetic construct
  source 1..20: mol_type = other RNA
caagatgcagaaccatggct

SEQ ID NO: 915 - RNA, 20 nt, synthetic construct
  source 1..20: mol_type = other RNA
caagcaaggctcggcgccac

SEQ ID NO: 916 - RNA, 20 nt, synthetic construct
  source 1..20: mol_type = other RNA
caagcagacggtgggaccag

SEQ ID NO: 917 - RNA, 20 nt, synthetic construct
  source 1..20: mol_type = other RNA
caagcagcagccgctgccag

SEQ ID NO: 918 - RNA, 20 nt, synthetic construct
  source 1..20: mol_type = other RNA
caagccagtcagcagtaggc

SEQ ID NO: 919 - RNA, 20 nt, synthetic construct
  source 1..20: mol_type = other RNA
caaggacgttaaaggcattt

SEQ ID NO: 920 - RNA, 20 nt, synthetic construct
  source 1..20: mol_type = other RNA
caaggcaagccagtcagcag

SEQ ID NO: 921 - RNA, 20 nt, synthetic construct
  source 1..20: mol_type = other RNA
caaggcccaaactaatgttg

SEQ ID NO: 922 - RNA, 20 nt, synthetic construct
  source 1..20: mol_type = other RNA
caaggctcggcgccactgct

SEQ ID NO: 923 - RNA, 20 nt, synthetic construct
  source 1..20: mol_type = other RNA
caagggactctggacattcc

SEQ ID NO: 924 - RNA, 20 nt, synthetic construct
  source 1..20: mol_type = other RNA
caaggggctgttgccaactt

SEQ ID NO: 925 - RNA, 20 nt, synthetic construct
  source 1..20: mol_type = other RNA
caagtaactggccaggtgca

SEQ ID NO: 926 - RNA, 20 nt, synthetic construct
  source 1..20: mol_type = other RNA
caagttcagtaaccagcaga

SEQ ID NO: 927 - RNA, 20 nt, synthetic construct
  source 1..20: mol_type = other RNA
caataatagacttatatgca

SEQ ID NO: 928 - RNA, 20 nt, synthetic construct
  source 1..20: mol_type = other RNA
caatacaatggaagtggggt

SEQ ID NO: 929 - RNA, 20 nt, synthetic construct
  source 1..20: mol_type = other RNA
caatatggggaaatcctatc

SEQ ID NO: 930 - RNA, 20 nt, synthetic construct
  source 1..20: mol_type = other RNA
caatcccctgaggaccaaat

SEQ ID NO: 931 - RNA, 20 nt, synthetic construct
  source 1..20: mol_type = other RNA
caatgaccctcaggttttgt

SEQ ID NO: 932 - RNA, 20 nt, synthetic construct
  source 1..20: mol_type = other RNA
caatgctcaccccagaagag

SEQ ID NO: 933 - RNA, 20 nt, synthetic construct
  source 1..20: mol_type = other RNA
caatgctttcgaaacgagag

SEQ ID NO: 934 - RNA, 20 nt, synthetic construct
  source 1..20: mol_type = other RNA
caatggaagtggggtttctg

SEQ ID NO: 935 - RNA, 20 nt, synthetic construct
  source 1..20: mol_type = other RNA
cacaaataactaagaccagc

SEQ ID NO: 936 - RNA, 20 nt, synthetic construct
  source 1..20: mol_type = other RNA
cacaacataaccggaacgac

SEQ ID NO: 937 - RNA, 20 nt, synthetic construct
  source 1..20: mol_type = other RNA
cacaaggggctgttgccaac

SEQ ID NO: 938 - RNA, 20 nt, synthetic construct
  source 1..20: mol_type = other RNA
cacaatcccctgaggaccaa

SEQ ID NO: 939 - RNA, 20 nt, synthetic construct
  source 1..20: mol_type = other RNA
cacaatgaccctcaggtttt

SEQ ID NO: 940 - RNA, 20 nt, synthetic construct
  source 1..20: mol_type = other RNA
cacacacctgtagtctcagc

SEQ ID NO: 941 - RNA, 20 nt, synthetic construct
  source 1..20: mol_type = other RNA
cacacaggtatccagccgtg

SEQ ID NO: 942 - RNA, 20 nt, synthetic construct
  source 1..20: mol_type = other RNA
cacacctgtagtctcagcta

SEQ ID NO: 943 - RNA, 20 nt, synthetic construct
  source 1..20: mol_type = other RNA
cacagcgagactgtctccaa

SEQ ID NO: 944 - RNA, 20 nt, synthetic construct
  source 1..20: mol_type = other RNA
cacaggagaaagaaaataag

SEQ ID NO: 945 - RNA, 20 nt, synthetic construct
  source 1..20: mol_type = other RNA
cacagggtgctgggagacct

SEQ ID NO: 946 - RNA, 20 nt, synthetic construct
  source 1..20: mol_type = other RNA
cacaggtatccagccgtgga

SEQ ID NO: 947 - RNA, 20 nt, synthetic construct
  source 1..20: mol_type = other RNA
cacaggttcccacccccaac

SEQ ID NO: 948 - RNA, 20 nt, synthetic construct
  source 1..20: mol_type = other RNA
cacatcattttgcgagggtc

SEQ ID NO: 949 - RNA, 20 nt, synthetic construct
  source 1..20: mol_type = other RNA
cacatgactttctgacattc

SEQ ID NO: 950 - RNA, 20 nt, synthetic construct
  source 1..20: mol_type = other RNA
cacatgctctcaatatataa

SEQ ID NO: 951 - RNA, 20 nt, synthetic construct
  source 1..20: mol_type = other RNA
caccaaggacgttaaaggca

SEQ ID NO: 952 - RNA, 20 nt, synthetic construct
  source 1..20: mol_type = other RNA
caccacaatgaccctcaggt

SEQ ID NO: 953 - RNA, 20 nt, synthetic construct
  source 1..20: mol_type = other RNA
caccaccggttctcatttgg

SEQ ID NO: 954 - RNA, 20 nt, synthetic construct
  source 1..20: mol_type = other RNA
caccacgcccagctagtctt

SEQ ID NO: 955 - RNA, 20 nt, synthetic construct
  source 1..20: mol_type = other RNA
caccacggtgctaggaaatc

SEQ ID NO: 956 - RNA, 20 nt, synthetic construct
  source 1..20: mol_type = other RNA
cacccatttaaaagaatgga

SEQ ID NO: 957 - RNA, 20 nt, synthetic construct
  source 1..20: mol_type = other RNA
caccccagaagagcgtcacc

SEQ ID NO: 958 - RNA, 20 nt, synthetic construct
  source 1..20: mol_type = other RNA
caccccatttctcagcaact

SEQ ID NO: 959 - RNA, 20 nt, synthetic construct
  source 1..20: mol_type = other RNA
caccctcatctgtatacact

SEQ ID NO: 960 - RNA, 20 nt, synthetic construct
  source 1..20: mol_type = other RNA
caccctctgtagcataaaat

SEQ ID NO: 961 - RNA, 20 nt, synthetic construct
  source 1..20: mol_type = other RNA
caccctggtcaatatgggga

SEQ ID NO: 962 - RNA, 20 nt, synthetic construct
  source 1..20: mol_type = other RNA
caccctgtgcaggtctcttc

SEQ ID NO: 963 - RNA, 20 nt, synthetic construct
  source 1..20: mol_type = other RNA
caccggacaggccaaatgag

SEQ ID NO: 964 - RNA, 20 nt, synthetic construct
  source 1..20: mol_type = other RNA
caccggttctcatttggcct

SEQ ID NO: 965 - RNA, 20 nt, synthetic construct
  source 1..20: mol_type = other RNA
caccgtctgcttgctagcct

SEQ ID NO: 966 - RNA, 20 nt, synthetic construct
  source 1..20: mol_type = other RNA
caccgtggtgacaagcaagg

SEQ ID NO: 967 - RNA, 20 nt, synthetic construct
  source 1..20: mol_type = other RNA
cacctaaatctgcatctgct

SEQ ID NO: 968 - RNA, 20 nt, synthetic construct
  source 1..20: mol_type = other RNA
cacctacaaatacctggagc

SEQ ID NO: 969 - RNA, 20 nt, synthetic construct
  source 1..20: mol_type = other RNA
cacctagctgagactacagg

SEQ ID NO: 970 - RNA, 20 nt, synthetic construct
  source 1..20: mol_type = other RNA
cacctgaacaagatgcagaa

SEQ ID NO: 971 - RNA, 20 nt, synthetic construct
  source 1..20: mol_type = other RNA
cacctgcatccctccgccag

SEQ ID NO: 972 - RNA, 20 nt, synthetic construct
  source 1..20: mol_type = other RNA
cacctggccagttacttggt

SEQ ID NO: 973 - RNA, 20 nt, synthetic construct
  source 1..20: mol_type = other RNA
cacctgtagtctcagctagg

SEQ ID NO: 974 - RNA, 20 nt, synthetic construct
  source 1..20: mol_type = other RNA
cacgacctaggaatccagtg

SEQ ID NO: 975 - RNA, 20 nt, synthetic construct
  source 1..20: mol_type = other RNA
cacgattccgatcgactgcc

SEQ ID NO: 976 - RNA, 20 nt, synthetic construct
  source 1..20: mol_type = other RNA
cacgcccagctagtctttgt

SEQ ID NO: 977 - RNA, 20 nt, synthetic construct
  source 1..20: mol_type = other RNA
cacggaagatgacagtcaac

SEQ ID NO: 978 - RNA, 20 nt, synthetic construct
  source 1..20: mol_type = other RNA
cacggctggatacctgtgtg

SEQ ID NO: 979 - RNA, 20 nt, synthetic construct
  source 1..20: mol_type = other RNA
cacggtgctaggaaatccag

SEQ ID NO: 980 - RNA, 20 nt, synthetic construct
  source 1..20: mol_type = other RNA
cacgtgagagaccctcgcaa

SEQ ID NO: 981 - RNA, 20 nt, synthetic construct
  source 1..20: mol_type = other RNA
cacgtgcttcagtggccatt

SEQ ID NO: 982 - RNA, 20 nt, synthetic construct
  source 1..20: mol_type = other RNA
cactaagctctctagaagac

SEQ ID NO: 983 - RNA, 20 nt, synthetic construct
  source 1..20: mol_type = other RNA
cactaaggaaataatctgag

SEQ ID NO: 984 - RNA, 20 nt, synthetic construct
  source 1..20: mol_type = other RNA
cactaaggagtgagtggcaa

SEQ ID NO: 985 - RNA, 20 nt, synthetic construct
  source 1..20: mol_type = other RNA
cactaatttcccagggctca

SEQ ID NO: 986 - RNA, 20 nt, synthetic construct
  source 1..20: mol_type = other RNA
cactcactccttagtgaaca

SEQ ID NO: 987 - RNA, 20 nt, synthetic construct
  source 1..20: mol_type = other RNA
cactcctcgagtactggaca

SEQ ID NO: 988 - RNA, 20 nt, synthetic construct
  source 1..20: mol_type = other RNA
cactccttagtgaacagtgg

SEQ ID NO: 989 - RNA, 20 nt, synthetic construct
  source 1..20: mol_type = other RNA
cactgaagcacgtgagagac

SEQ ID NO: 990 - RNA, 20 nt, synthetic construct
  source 1..20: mol_type = other RNA
cactgcttactacctgggcc

SEQ ID NO: 991 - RNA, 20 nt, synthetic construct
  source 1..20: mol_type = other RNA
cactggacttcaagaaactg

SEQ ID NO: 992 - RNA, 20 nt, synthetic construct
  source 1..20: mol_type = other RNA
cactggattcctaggtcgtg

SEQ ID NO: 993 - RNA, 20 nt, synthetic construct
  source 1..20: mol_type = other RNA
cactgtcctggcttttattt

SEQ ID NO: 994 - RNA, 20 nt, synthetic construct
  source 1..20: mol_type = other RNA
cactgttcactaaggagtga

SEQ ID NO: 995 - RNA, 20 nt, synthetic construct
  source 1..20: mol_type = other RNA
cacttccattgtattgtctg

SEQ ID NO: 996 - RNA, 20 nt, synthetic construct
  source 1..20: mol_type = other RNA
cactttctaaatttcctgtt

SEQ ID NO: 997 - RNA, 20 nt, synthetic construct
  source 1..20: mol_type = other RNA
cagaaacagtctgcttcagc

SEQ ID NO: 998 - RNA, 20 nt, synthetic construct
  source 1..20: mol_type = other RNA
cagaaaccccacttccattg

SEQ ID NO: 999 - RNA, 20 nt, synthetic construct
  source 1..20: mol_type = other RNA
cagaaagtcatgtgaacatt

SEQ ID NO: 1000 - RNA, 20 nt, synthetic construct
  source 1..20: mol_type = other RNA
cagaacagaaacagtctgct

SEQ ID NO: 1001 - RNA, 20 nt, synthetic construct
  source 1..20: mol_type = other RNA
cagaaccatggctatgagaa

SEQ ID NO: 1002 - RNA, 20 nt, synthetic construct
  source 1..20: mol_type = other RNA
cagaactgaaaaagaccaga

SEQ ID NO: 1003 - RNA, 20 nt, synthetic construct
  source 1..20: mol_type = other RNA
cagaagacagaacagaaaca

SEQ ID NO: 1004 - RNA, 20 nt, synthetic construct
  source 1..20: mol_type = other RNA
cagaagagcgtcacctgaac

SEQ ID NO: 1005 - RNA, 20 nt, synthetic construct
  source 1..20: mol_type = other RNA
cagacaatacaatggaagtg

SEQ ID NO: 1006 - RNA, 20 nt, synthetic construct
  source 1..20: mol_type = other RNA
cagacaccacaatgaccctc

SEQ ID NO: 1007 - RNA, 20 nt, synthetic construct
  source 1..20: mol_type = other RNA
cagacgcagcccctggcagc

SEQ ID NO: 1008 - RNA, 20 nt, synthetic construct
  source 1..20: mol_type = other RNA
cagacggtgggaccagggga

SEQ ID NO: 1009 - RNA, 20 nt, synthetic construct
  source 1..20: mol_type = other RNA
cagactgtttctgttctgtc

SEQ ID NO: 1010 - RNA, 20 nt, synthetic construct
  source 1..20: mol_type = other RNA
cagagatcccctggtcccac

SEQ ID NO: 1011 - RNA, 20 nt, synthetic construct
  source 1..20: mol_type = other RNA
cagagggtgaaaactctttt

SEQ ID NO: 1012 - RNA, 20 nt, synthetic construct
  source 1..20: mol_type = other RNA
cagagtcccttgatccccaa

SEQ ID NO: 1013 - RNA, 20 nt, synthetic construct
  source 1..20: mol_type = other RNA
cagatatttgatgtagtttt

SEQ ID NO: 1014 - RNA, 20 nt, synthetic construct
  source 1..20: mol_type = other RNA
cagatgcagatttaggtggc

SEQ ID NO: 1015 - RNA, 20 nt, synthetic construct
  source 1..20: mol_type = other RNA
cagatgctggtcttagttat

SEQ ID NO: 1016 - RNA, 20 nt, synthetic construct
  source 1..20: mol_type = other RNA
cagattatttccttagtgtt

SEQ ID NO: 1017 - RNA, 20 nt, synthetic construct
  source 1..20: mol_type = other RNA
cagatttaggtggcagggag

SEQ ID NO: 1018 - RNA, 20 nt, synthetic construct
  source 1..20: mol_type = other RNA
cagcaaatggctcaggtctc

SEQ ID NO: 1019 - RNA, 20 nt, synthetic construct
  source 1..20: mol_type = other RNA
cagcaacttcctgaaagctc

SEQ ID NO: 1020 - RNA, 20 nt, synthetic construct
  source 1..20: mol_type = other RNA
cagcaccctgtgcaggtctc

SEQ ID NO: 1021 - RNA, 20 nt, synthetic construct
  source 1..20: mol_type = other RNA
cagcactttctaaatttcct

SEQ ID NO: 1022 - RNA, 20 nt, synthetic construct
  source 1..20: mol_type = other RNA
cagcagaagacagaacagaa

SEQ ID NO: 1023 - RNA, 20 nt, synthetic construct
  source 1..20: mol_type = other RNA
cagcagcatgtccagtactc

SEQ ID NO: 1024 - RNA, 20 nt, synthetic construct
  source 1..20: mol_type = other RNA
cagcagcccgttcccaccgg

SEQ ID NO: 1025 - RNA, 20 nt, synthetic construct
  source 1..20: mol_type = other RNA
cagcagccgctgccaggggc

SEQ ID NO: 1026 - RNA, 20 nt, synthetic construct
  source 1..20: mol_type = other RNA
cagcaggagataaaaccaag

SEQ ID NO: 1027 - RNA, 20 nt, synthetic construct
  source 1..20: mol_type = other RNA
cagcagtaggctagcaagca

SEQ ID NO: 1028 - RNA, 20 nt, synthetic construct
  source 1..20: mol_type = other RNA
cagcatctgcactaatttcc

SEQ ID NO: 1029 - RNA, 20 nt, synthetic construct
  source 1..20: mol_type = other RNA
cagcatgtccagtactcgag

SEQ ID NO: 1030 - RNA, 20 nt, synthetic construct
  source 1..20: mol_type = other RNA
cagccaaggcaagccagtca

SEQ ID NO: 1031 - RNA, 20 nt, synthetic construct
  source 1..20: mol_type = other RNA
cagccagcagcccgttccca

SEQ ID NO: 1032 - RNA, 20 nt, synthetic construct
  source 1..20: mol_type = other RNA
cagcccctgccacaaggggc

SEQ ID NO: 1033 - RNA, 20 nt, synthetic construct
  source 1..20: mol_type = other RNA
cagcccctggcagcggctgc

SEQ ID NO: 1034 - RNA, 20 nt, synthetic construct
  source 1..20: mol_type = other RNA
cagccccttgtggcaggggc

SEQ ID NO: 1035 - RNA, 20 nt, synthetic construct
  source 1..20: mol_type = other RNA
cagcccgttcccaccggaca

SEQ ID NO: 1036 - RNA, 20 nt, synthetic construct
  source 1..20: mol_type = other RNA
cagccctggcggagggatgc

SEQ ID NO: 1037 - RNA, 20 nt, synthetic construct
  source 1..20: mol_type = other RNA
cagccgctgccaggggctgc

SEQ ID NO: 1038 - RNA, 20 nt, synthetic construct
  source 1..20: mol_type = other RNA
cagccgtggaaacactggac

SEQ ID NO: 1039 - RNA, 20 nt, synthetic construct
  source 1..20: mol_type = other RNA
cagcctcattcactgtcctg

SEQ ID NO: 1040 - RNA, 20 nt, synthetic construct
  source 1..20: mol_type = other RNA
cagcctcccacctagctgag

SEQ ID NO: 1041 - RNA, 20 nt, synthetic construct
  source 1..20: mol_type = other RNA
cagcctgcatataagtctat

SEQ ID NO: 1042 - RNA, 20 nt, synthetic construct
  source 1..20: mol_type = other RNA
cagcgagactgtctccaaaa

SEQ ID NO: 1043 - RNA, 20 nt, synthetic construct
  source 1..20: mol_type = other RNA
cagcgcactgcaacctctgt

SEQ ID NO: 1044 - RNA, 20 nt, synthetic construct
  source 1..20: mol_type = other RNA
cagcggctgctgcttggcag

SEQ ID NO: 1045 - RNA, 20 nt, synthetic construct
  source 1..20: mol_type = other RNA
cagcgtcttctagagagctt

SEQ ID NO: 1046 - RNA, 20 nt, synthetic construct
  source 1..20: mol_type = other RNA
cagctaggccagtctccagc

SEQ ID NO: 1047 - RNA, 20 nt, synthetic construct
  source 1..20: mol_type = other RNA
cagctagtctttgtattttt

SEQ ID NO: 1048 - RNA, 20 nt, synthetic construct
  source 1..20: mol_type = other RNA
caggaaatttagaaagtgct

SEQ ID NO: 1049 - RNA, 20 nt, synthetic construct
  source 1..20: mol_type = other RNA
caggaagttgctgagaaatg

SEQ ID NO: 1050 - RNA, 20 nt, synthetic construct
  source 1..20: mol_type = other RNA
caggacagtgaatgaggctg

SEQ ID NO: 1051 - RNA, 20 nt, synthetic construct
  source 1..20: mol_type = other RNA
caggacttttatggagacac

SEQ ID NO: 1052 - RNA, 20 nt, synthetic construct
  source 1..20: mol_type = other RNA
caggagaaagaaaataaggg

SEQ ID NO: 1053 - RNA, 20 nt, synthetic construct
  source 1..20: mol_type = other RNA
caggagataaaaccaagtaa

SEQ ID NO: 1054 - RNA, 20 nt, synthetic construct
  source 1..20: mol_type = other RNA
caggaggtcaggatgtcaga

SEQ ID NO: 1055 - RNA, 20 nt, synthetic construct
  source 1..20: mol_type = other RNA
caggatgtcagacgcagccc

SEQ ID NO: 1056 - RNA, 20 nt, synthetic construct
  source 1..20: mol_type = other RNA
caggatttgagatcaccctg

SEQ ID NO: 1057 - RNA, 20 nt, synthetic construct
  source 1..20: mol_type = other RNA
caggccaaatgagaaccggt

SEQ ID NO: 1058 - RNA, 20 nt, synthetic construct
  source 1..20: mol_type = other RNA
caggctgtcgttccggttat

SEQ ID NO: 1059 - RNA, 20 nt, synthetic construct
  source 1..20: mol_type = other RNA
cagggagcgcggcagccctg

SEQ ID NO: 1060 - RNA, 20 nt, synthetic construct
  source 1..20: mol_type = other RNA
cagggctcattaaggtcctt

SEQ ID NO: 1061 - RNA, 20 nt, synthetic construct
  source 1..20: mol_type = other RNA
cagggctctcgtttcgaaag

SEQ ID NO: 1062 - RNA, 20 nt, synthetic construct
  source 1..20: mol_type = other RNA
cagggctgccgcgctccctg

SEQ ID NO: 1063 - RNA, 20 nt, synthetic construct
  source 1..20: mol_type = other RNA
caggggatctctggtctttt

SEQ ID NO: 1064 - RNA, 20 nt, synthetic construct
  source 1..20: mol_type = other RNA
caggggattgtgcagcaaat

SEQ ID NO: 1065 - RNA, 20 nt, synthetic construct
  source 1..20: mol_type = other RNA
caggggctgatttccaaaaa

SEQ ID NO: 1066 - RNA, 20 nt, synthetic construct
  source 1..20: mol_type = other RNA
caggggctgcgtctgacatc

SEQ ID NO: 1067 - RNA, 20 nt, synthetic construct
  source 1..20: mol_type = other RNA
cagggtgctgggagacctga

SEQ ID NO: 1068 - RNA, 20 nt, synthetic construct
  source 1..20: mol_type = other RNA
caggtagtaagcagtggcgc

SEQ ID NO: 1069 - RNA, 20 nt, synthetic construct
  source 1..20: mol_type = other RNA
caggtatccagccgtggaaa

SEQ ID NO: 1070 - RNA, 20 nt, synthetic construct
  source 1..20: mol_type = other RNA
caggtatttgtaggtggggt

SEQ ID NO: 1071 - RNA, 20 nt, synthetic construct
  source 1..20: mol_type = other RNA
caggtctcccagcaccctgt

SEQ ID NO: 1072 - RNA, 20 nt, synthetic construct
  source 1..20: mol_type = other RNA
caggtctcttcccagacacc

SEQ ID NO: 1073 - RNA, 20 nt, synthetic construct
  source 1..20: mol_type = other RNA
caggtgacgctcttctgggg

SEQ ID NO: 1074 - RNA, 20 nt, synthetic construct
  source 1..20: mol_type = other RNA
caggtgggccggaagatccc

SEQ ID NO: 1075 - RNA, 20 nt, synthetic construct
  source 1..20: mol_type = other RNA
caggttcccacccccaaccc

SEQ ID NO: 1076 - RNA, 20 nt, synthetic construct
  source 1..20: mol_type = other RNA
caggttgatccaatgctcac

SEQ ID NO: 1077 - RNA, 20 nt, synthetic construct
  source 1..20: mol_type = other RNA
caggttttgttcttccaggt

SEQ ID NO: 1078 - RNA, 20 nt, synthetic construct
  source 1..20: mol_type = other RNA
cagtaaccagcagaagacag

SEQ ID NO: 1079 - RNA, 20 nt, synthetic construct
  source 1..20: mol_type = other RNA
cagtaaggaccttaatgagc

SEQ ID NO: 1080 - RNA, 20 nt, synthetic construct
  source 1..20: mol_type = other RNA
cagtactcgaggagtgaaga

SEQ ID NO: 1081 - RNA, 20 nt, synthetic construct
  source 1..20: mol_type = other RNA
cagtaggctagcaagcagac

SEQ ID NO: 1082 - RNA, 20 nt, synthetic construct
  source 1..20: mol_type = other RNA
cagtagtactttatatagtc

SEQ ID NO: 1083 - RNA, 20 nt, synthetic construct
  source 1..20: mol_type = other RNA
cagtattccctttttaaatg

SEQ ID NO: 1084 - RNA, 20 nt, synthetic construct
  source 1..20: mol_type = other RNA
cagtcaactggatttcctag

SEQ ID NO: 1085 - RNA, 20 nt, synthetic construct
  source 1..20: mol_type = other RNA
cagtcagcagtaggctagca

SEQ ID NO: 1086 - RNA, 20 nt, synthetic construct
  source 1..20: mol_type = other RNA
cagtccaggaggtcaggatg

SEQ ID NO: 1087 - RNA, 20 nt, synthetic construct
  source 1..20: mol_type = other RNA
cagtcgatcggaatcgtggg

SEQ ID NO: 1088 - RNA, 20 nt, synthetic construct
  source 1..20: mol_type = other RNA
cagtctccagcaggagataa

SEQ ID NO: 1089 - RNA, 20 nt, synthetic construct
  source 1..20: mol_type = other RNA
cagtctgcttcagcactttc

SEQ ID NO: 1090 - RNA, 20 nt, synthetic construct
  source 1..20: mol_type = other RNA
cagtgaatgaggctgaagag

SEQ ID NO: 1091 - RNA, 20 nt, synthetic construct
  source 1..20: mol_type = other RNA
cagtgagtaactgaactgat

SEQ ID NO: 1092 - RNA, 20 nt, synthetic construct
  source 1..20: mol_type = other RNA
cagtggccattacagttccc

SEQ ID NO: 1093 - RNA, 20 nt, synthetic construct
  source 1..20: mol_type = other RNA
cagtggcgccgagccttgct

SEQ ID NO: 1094 - RNA, 20 nt, synthetic construct
  source 1..20: mol_type = other RNA
cagtgggaatgtccagagtc

SEQ ID NO: 1095 - RNA, 20 nt, synthetic construct
  source 1..20: mol_type = other RNA
cagtgtttccacggctggat

SEQ ID NO: 1096 - RNA, 20 nt, synthetic construct
  source 1..20: mol_type = other RNA
cagttactcactggattcct

SEQ ID NO: 1097 - RNA, 20 nt, synthetic construct
  source 1..20: mol_type = other RNA
cagttacttggttttatctc

SEQ ID NO: 1098 - RNA, 20 nt, synthetic construct
  source 1..20: mol_type = other RNA
cagttcagttactcactgga

SEQ ID NO: 1099 - RNA, 20 nt, synthetic construct
  source 1..20: mol_type = other RNA
cagttccctattccacccca

SEQ ID NO: 1100 - RNA, 20 nt, synthetic construct
  source 1..20: mol_type = other RNA
cagttctacagtagtacttt

SEQ ID NO: 1101 - RNA, 20 nt, synthetic construct
  source 1..20: mol_type = other RNA
cagttctgaaattctacagc

SEQ ID NO: 1102 - RNA, 20 nt, synthetic construct
  source 1..20: mol_type = other RNA
cagttgactgtcatcttccg

SEQ ID NO: 1103 - RNA, 20 nt, synthetic construct
  source 1..20: mol_type = other RNA
cagtttcttgaagtccagtg

SEQ ID NO: 1104 - RNA, 20 nt, synthetic construct
  source 1..20: mol_type = other RNA
cataaaagtcctgtcaccaa

SEQ ID NO: 1105 - RNA, 20 nt, synthetic construct
  source 1..20: mol_type = other RNA
cataaaatgttcacatgact

SEQ ID NO: 1106 - RNA, 20 nt, synthetic construct
  source 1..20: mol_type = other RNA
cataaccggaacgacagcct

SEQ ID NO: 1107 - RNA, 20 nt, synthetic construct
  source 1..20: mol_type = other RNA
catagccaaggcccaaacta

SEQ ID NO: 1108 - RNA, 20 nt, synthetic construct
  source 1..20: mol_type = other RNA
catagccatggttctgcatc

SEQ ID NO: 1109 - RNA, 20 nt, synthetic construct
  source 1..20: mol_type = other RNA
catattgaccagggtgatct

SEQ ID NO: 1110 - RNA, 20 nt, synthetic construct
  source 1..20: mol_type = other RNA
catcaaatatctgcaataga

SEQ ID NO: 1111 - RNA, 20 nt, synthetic construct
  source 1..20: mol_type = other RNA
catcattttgcgagggtctc

SEQ ID NO: 1112 - RNA, 20 nt, synthetic construct
  source 1..20: mol_type = other RNA
catccctccgccagggctgc

SEQ ID NO: 1113 - RNA, 20 nt, synthetic construct
  source 1..20: mol_type = other RNA
catcctgacctcctggactg

SEQ ID NO: 1114 - RNA, 20 nt, synthetic construct
  source 1..20: mol_type = other RNA
catctgcactaatttcccag

SEQ ID NO: 1115 - RNA, 20 nt, synthetic construct
  source 1..20: mol_type = other RNA
catctgctccaggtatttgt

SEQ ID NO: 1116 - RNA, 20 nt, synthetic construct
  source 1..20: mol_type = other RNA
catctgtatacactaagctc

SEQ ID NO: 1117 - RNA, 20 nt, synthetic construct
  source 1..20: mol_type = other RNA
catcttcactcctcgagtac

SEQ ID NO: 1118 - RNA, 20 nt, synthetic construct
  source 1..20: mol_type = other RNA
catcttccgtgagggctaag

SEQ ID NO: 1119 - RNA, 20 nt, synthetic construct
  source 1..20: mol_type = other RNA
catcttgttcaggtgacgct

SEQ ID NO: 1120 - RNA, 20 nt, synthetic construct
  source 1..20: mol_type = other RNA
catgactttctgacattcat

SEQ ID NO: 1121 - RNA, 20 nt, synthetic construct
  source 1..20: mol_type = other RNA
catgagctactgcacctggc

SEQ ID NO: 1122 - RNA, 20 nt, synthetic construct
  source 1..20: mol_type = other RNA
catgctctcaatatataata

SEQ ID NO: 1123 - RNA, 20 nt, synthetic construct
  source 1..20: mol_type = other RNA
catgctgctgttatcagttc

SEQ ID NO: 1124 - RNA, 20 nt, synthetic construct
  source 1..20: mol_type = other RNA
catggctatgagaaccccac

SEQ ID NO: 1125 - RNA, 20 nt, synthetic construct
  source 1..20: mol_type = other RNA
catggttctgcatcttgttc

SEQ ID NO: 1126 - RNA, 20 nt, synthetic construct
  source 1..20: mol_type = other RNA
catgtccagtactcgaggag

SEQ ID NO: 1127 - RNA, 20 nt, synthetic construct
  source 1..20: mol_type = other RNA
catgtgaacattttatgcta

SEQ ID NO: 1128 - RNA, 20 nt, synthetic construct
  source 1..20: mol_type = other RNA
catgtgtcagacaatacaat

SEQ ID NO: 1129 - RNA, 20 nt, synthetic construct
  source 1..20: mol_type = other RNA
cattaaggtccttactgtat

SEQ ID NO: 1130 - RNA, 20 nt, synthetic construct
  source 1..20: mol_type = other RNA
cattacagttccctattcca

SEQ ID NO: 1131 - RNA, 20 nt, synthetic construct
  source 1..20: mol_type = other RNA
cattagtttgggccttggct

SEQ ID NO: 1132 - RNA, 20 nt, synthetic construct
  source 1..20: mol_type = other RNA
cattcactgtcctggctttt

SEQ ID NO: 1133 - RNA, 20 nt, synthetic construct
  source 1..20: mol_type = other RNA
cattcatagccaaggcccaa

SEQ ID NO: 1134 - RNA, 20 nt, synthetic construct
  source 1..20: mol_type = other RNA
cattcccactgttcactaag

SEQ ID NO: 1135 - RNA, 20 nt, synthetic construct
  source 1..20: mol_type = other RNA
cattcttttaaatgggtgaa

SEQ ID NO: 1136 - RNA, 20 nt, synthetic construct
  source 1..20: mol_type = other RNA
cattgcctctttgatcccct

SEQ ID NO: 1137 - RNA, 20 nt, synthetic construct
  source 1..20: mol_type = other RNA
cattggatcaacctggaaga

SEQ ID NO: 1138 - RNA, 20 nt, synthetic construct
  source 1..20: mol_type = other RNA
cattgtattgtctgacacat

SEQ ID NO: 1139 - RNA, 20 nt, synthetic construct
  source 1..20: mol_type = other RNA
cattgtggtgtctgggaaga

SEQ ID NO: 1140 - RNA, 20 nt, synthetic construct
  source 1..20: mol_type = other RNA
catttaaaaagggaatactg

SEQ ID NO: 1141 - RNA, 20 nt, synthetic construct
  source 1..20: mol_type = other RNA
catttctcagcaacttcctg

SEQ ID NO: 1142 - RNA, 20 nt, synthetic construct
  source 1..20: mol_type = other RNA
catttgctgcacaatcccct

SEQ ID NO: 1143 - RNA, 20 nt, synthetic construct
  source 1..20: mol_type = other RNA
catttggcctgtccggtggg

SEQ ID NO: 1144 - RNA, 20 nt, synthetic construct
  source 1..20: mol_type = other RNA
catttggtcctcaggggatt

SEQ ID NO: 1145 - RNA, 20 nt, synthetic construct
  source 1..20: mol_type = other RNA
cattttatgctacagagggt

SEQ ID NO: 1146 - RNA, 20 nt, synthetic construct
  source 1..20: mol_type = other RNA
cattttattccagcgtcttc

SEQ ID NO: 1147 - RNA, 20 nt, synthetic construct
  source 1..20: mol_type = other RNA
cattttgcgagggtctctca

SEQ ID NO: 1148 - RNA, 20 nt, synthetic construct
  source 1..20: mol_type = other RNA
catttttcacccatttaaaa

SEQ ID NO: 1149 - RNA, 20 nt, synthetic construct
  source 1..20: mol_type = other RNA
ccaaaaaaccaaaaaaccaa

SEQ ID NO: 1150 - RNA, 20 nt, synthetic construct
  source 1..20: mol_type = other RNA
ccaaaaacacgacctaggaa

SEQ ID NO: 1151 - RNA, 20 nt, synthetic construct
  source 1..20: mol_type = other RNA
ccaaactaatgttgaaagtt

SEQ ID NO: 1152 - RNA, 20 nt, synthetic construct
  source 1..20: mol_type = other RNA
ccaaatataaatacagtaag

SEQ ID NO: 1153 - RNA, 20 nt, synthetic construct
  source 1..20: mol_type = other RNA
ccaaatgagaaccggtggtg

SEQ ID NO: 1154 - RNA, 20 nt, synthetic construct
  source 1..20: mol_type = other RNA
ccaaatgcagccagcagccc

SEQ ID NO: 1155 - RNA, 20 nt, synthetic construct
  source 1..20: mol_type = other RNA
ccaactttcaacattagttt

SEQ ID NO: 1156 - RNA, 20 nt, synthetic construct
  source 1..20: mol_type = other RNA
ccaagcagcagccgctgcca

SEQ ID NO: 1157 - RNA, 20 nt, synthetic construct
  source 1..20: mol_type = other RNA
ccaaggacgttaaaggcatt

SEQ ID NO: 1158 - RNA, 20 nt, synthetic construct
  source 1..20: mol_type = other RNA
ccaaggcaagccagtcagca

SEQ ID NO: 1159 - RNA, 20 nt, synthetic construct
  source 1..20: mol_type = other RNA
ccaaggcccaaactaatgtt

SEQ ID NO: 1160 - RNA, 20 nt, synthetic construct
  source 1..20: mol_type = other RNA
ccaagtaactggccaggtgc

SEQ ID NO: 1161 - RNA, 20 nt, synthetic construct
  source 1..20: mol_type = other RNA
ccaatgctcaccccagaaga

SEQ ID NO: 1162 - RNA, 20 nt, synthetic construct
  source 1..20: mol_type = other RNA
ccacaaggggctgttgccaa

SEQ ID NO: 1163 - RNA, 20 nt, synthetic construct
  source 1..20: mol_type = other RNA
ccacaatgaccctcaggttt

SEQ ID NO: 1164 - RNA, 20 nt, synthetic construct
  source 1..20: mol_type = other RNA
ccacaggttcccacccccaa

SEQ ID NO: 1165 - RNA, 20 nt, synthetic construct
  source 1..20: mol_type = other RNA
ccaccacgcccagctagtct

SEQ ID NO: 1166 - RNA, 20 nt, synthetic construct
  source 1..20: mol_type = other RNA
ccaccccatttctcagcaac

SEQ ID NO: 1167 - RNA, 20 nt, synthetic construct
  source 1..20: mol_type = other RNA
ccaccggacaggccaaatga

SEQ ID NO: 1168 - RNA, 20 nt, synthetic construct
  source 1..20: mol_type = other RNA
ccaccggttctcatttggcc

SEQ ID NO: 1169 - RNA, 20 nt, synthetic construct
  source 1..20: mol_type = other RNA
ccaccgtctgcttgctagcc

SEQ ID NO: 1170 - RNA, 20 nt, synthetic construct
  source 1..20: mol_type = other RNA
ccacctaaatctgcatctgc

SEQ ID NO: 1171 - RNA, 20 nt, synthetic construct
  source 1..20: mol_type = other RNA
ccacctacaaatacctggag

SEQ ID NO: 1172 - RNA, 20 nt, synthetic construct
  source 1..20: mol_type = other RNA
ccacctagctgagactacag

SEQ ID NO: 1173 - RNA, 20 nt, synthetic construct
  source 1..20: mol_type = other RNA
ccacctgcatccctccgcca

SEQ ID NO: 1174 - RNA, 20 nt, synthetic construct
  source 1..20: mol_type = other RNA
ccacgattccgatcgactgc

SEQ ID NO: 1175 - RNA, 20 nt, synthetic construct
  source 1..20: mol_type = other RNA
ccacgcccagctagtctttg

SEQ ID NO: 1176 - RNA, 20 nt, synthetic construct
  source 1..20: mol_type = other RNA
ccacggctggatacctgtgt

SEQ ID NO: 1177 - RNA, 20 nt, synthetic construct
  source 1..20: mol_type = other RNA
ccacggtgctaggaaatcca

SEQ ID NO: 1178 - RNA, 20 nt, synthetic construct
  source 1..20: mol_type = other RNA
ccactcactccttagtgaac

SEQ ID NO: 1179 - RNA, 20 nt, synthetic construct
  source 1..20: mol_type = other RNA
ccactgaagcacgtgagaga

SEQ ID NO: 1180 - RNA, 20 nt, synthetic construct
  source 1..20: mol_type = other RNA
ccactgcttactacctgggc

SEQ ID NO: 1181 - RNA, 20 nt, synthetic construct
  source 1..20: mol_type = other RNA
ccactgttcactaaggagtg

SEQ ID NO: 1182 - RNA, 20 nt, synthetic construct
  source 1..20: mol_type = other RNA
ccacttccattgtattgtct

SEQ ID NO: 1183 - RNA, 20 nt, synthetic construct
  source 1..20: mol_type = other RNA
ccagaagagcgtcacctgaa

SEQ ID NO: 1184 - RNA, 20 nt, synthetic construct
  source 1..20: mol_type = other RNA
ccagacaccacaatgaccct

SEQ ID NO: 1185 - RNA, 20 nt, synthetic construct
  source 1..20: mol_type = other RNA
ccagagatcccctggtccca

SEQ ID NO: 1186 - RNA, 20 nt, synthetic construct
  source 1..20: mol_type = other RNA
ccagagtcccttgatcccca

SEQ ID NO: 1187 - RNA, 20 nt, synthetic construct
  source 1..20: mol_type = other RNA
ccagcaccctgtgcaggtct

SEQ ID NO: 1188 - RNA, 20 nt, synthetic construct
  source 1..20: mol_type = other RNA
ccagcagaagacagaacaga

SEQ ID NO: 1189 - RNA, 20 nt, synthetic construct
  source 1..20: mol_type = other RNA
ccagcagcccgttcccaccg

SEQ ID NO: 1190 - RNA, 20 nt, synthetic construct
  source 1..20: mol_type = other RNA
ccagcaggagataaaaccaa

SEQ ID NO: 1191 - RNA, 20 nt, synthetic construct
  source 1..20: mol_type = other RNA
ccagcatctgcactaatttc

SEQ ID NO: 1192 - RNA, 20 nt, synthetic construct
  source 1..20: mol_type = other RNA
ccagccaaggcaagccagtc

SEQ ID NO: 1193 - RNA, 20 nt, synthetic construct
  source 1..20: mol_type = other RNA
ccagccgtggaaacactgga

SEQ ID NO: 1194 - RNA, 20 nt, synthetic construct
  source 1..20: mol_type = other RNA
ccagcgtcttctagagagct

SEQ ID NO: 1195 - RNA, 20 nt, synthetic construct
  source 1..20: mol_type = other RNA
ccagctagtctttgtatttt

SEQ ID NO: 1196 - RNA, 20 nt, synthetic construct
  source 1..20: mol_type = other RNA
ccaggacagtgaatgaggct

SEQ ID NO: 1197 - RNA, 20 nt, synthetic construct
  source 1..20: mol_type = other RNA
ccaggaggtcaggatgtcag

SEQ ID NO: 1198 - RNA, 20 nt, synthetic construct
  source 1..20: mol_type = other RNA
ccagggctcattaaggtcct

SEQ ID NO: 1199 - RNA, 20 nt, synthetic construct
  source 1..20: mol_type = other RNA
ccagggctgccgcgctccct

SEQ ID NO: 1200 - RNA, 20 nt, synthetic construct
  source 1..20: mol_type = other RNA
ccaggggatctctggtcttt

SEQ ID NO: 1201 - RNA, 20 nt, synthetic construct
  source 1..20: mol_type = other RNA
ccaggggctgcgtctgacat

SEQ ID NO: 1202 - RNA, 20 nt, synthetic construct
  source 1..20: mol_type = other RNA
ccaggtagtaagcagtggcg

SEQ ID NO: 1203 - RNA, 20 nt, synthetic construct
  source 1..20: mol_type = other RNA
ccaggtatttgtaggtgggg

SEQ ID NO: 1204 - RNA, 20 nt, synthetic construct
  source 1..20: mol_type = other RNA
ccaggttgatccaatgctca

SEQ ID NO: 1205 - RNA, 20 nt, synthetic construct
  source 1..20: mol_type = other RNA
ccagtactcgaggagtgaag

SEQ ID NO: 1206 - RNA, 20 nt, synthetic construct
  source 1..20: mol_type = other RNA
ccagtcagcagtaggctagc

SEQ ID NO: 1207 - RNA, 20 nt, synthetic construct
  source 1..20: mol_type = other RNA
ccagtctccagcaggagata

SEQ ID NO: 1208 - RNA, 20 nt, synthetic construct
  source 1..20: mol_type = other RNA
ccagtgagtaactgaactga

SEQ ID NO: 1209 - RNA, 20 nt, synthetic construct
  source 1..20: mol_type = other RNA
ccagtgtttccacggctgga

SEQ ID NO: 1210 - RNA, 20 nt, synthetic construct
  source 1..20: mol_type = other RNA
ccagttacttggttttatct

SEQ ID NO: 1211 - RNA, 20 nt, synthetic construct
  source 1..20: mol_type = other RNA
ccagttgactgtcatcttcc

SEQ ID NO: 1212 - RNA, 20 nt, synthetic construct
  source 1..20: mol_type = other RNA
ccagtttcttgaagtccagt

SEQ ID NO: 1213 - RNA, 20 nt, synthetic construct
  source 1..20: mol_type = other RNA
ccataaaagtcctgtcacca

SEQ ID NO: 1214 - RNA, 20 nt, synthetic construct
  source 1..20: mol_type = other RNA
ccatattgaccagggtgatc

SEQ ID NO: 1215 - RNA, 20 nt, synthetic construct
  source 1..20: mol_type = other RNA
ccatggctatgagaacccca

SEQ ID NO: 1216 - RNA, 20 nt, synthetic construct
  source 1..20: mol_type = other RNA
ccatggttctgcatcttgtt

SEQ ID NO: 1217 - RNA, 20 nt, synthetic construct
  source 1..20: mol_type = other RNA
ccattacagttccctattcc

SEQ ID NO: 1218 - RNA, 20 nt, synthetic construct
  source 1..20: mol_type = other RNA
ccattcttttaaatgggtga

SEQ ID NO: 1219 - RNA, 20 nt, synthetic construct
  source 1..20: mol_type = other RNA
ccattgtattgtctgacaca

SEQ ID NO: 1220 - RNA, 20 nt, synthetic construct
  source 1..20: mol_type = other RNA
ccatttaaaagaatggaaat

SEQ ID NO: 1221 - RNA, 20 nt, synthetic construct
  source 1..20: mol_type = other RNA
ccatttctcagcaacttcct

SEQ ID NO: 1222 - RNA, 20 nt, synthetic construct
  source 1..20: mol_type = other RNA
ccatttgctgcacaatcccc

SEQ ID NO: 1223 - RNA, 20 nt, synthetic construct
  source 1..20: mol_type = other RNA
ccatttttcacccatttaaa

SEQ ID NO: 1224 - RNA, 20 nt, synthetic construct
  source 1..20: mol_type = other RNA
cccaaactaatgttgaaagt

SEQ ID NO: 1225 - RNA, 20 nt, synthetic construct
  source 1..20: mol_type = other RNA
cccaaatataaatacagtaa

SEQ ID NO: 1226 - RNA, 20 nt, synthetic construct
  source 1..20: mol_type = other RNA
cccaccggacaggccaaatg

SEQ ID NO: 1227 - RNA, 20 nt, synthetic construct
  source 1..20: mol_type = other RNA
cccaccgtctgcttgctagc

SEQ ID NO: 1228 - RNA, 20 nt, synthetic construct
  source 1..20: mol_type = other RNA
cccacctacaaatacctgga

SEQ ID NO: 1229 - RNA, 20 nt, synthetic construct
  source 1..20: mol_type = other RNA
cccacctagctgagactaca

SEQ ID NO: 1230 - RNA, 20 nt, synthetic construct
  source 1..20: mol_type = other RNA
cccacctgcatccctccgcc

SEQ ID NO: 1231 - RNA, 20 nt, synthetic construct
  source 1..20: mol_type = other RNA
cccacgattccgatcgactg

SEQ ID NO: 1232 - RNA, 20 nt, synthetic construct
  source 1..20: mol_type = other RNA
cccactgttcactaaggagt

SEQ ID NO: 1233 - RNA, 20 nt, synthetic construct
  source 1..20: mol_type = other RNA
cccacttccattgtattgtc

SEQ ID NO: 1234 - RNA, 20 nt, synthetic construct
  source 1..20: mol_type = other RNA
cccagaagagcgtcacctga

SEQ ID NO: 1235 - RNA, 20 nt, synthetic construct
  source 1..20: mol_type = other RNA
cccagacaccacaatgaccc

SEQ ID NO: 1236 - RNA, 20 nt, synthetic construct
  source 1..20: mol_type = other RNA
cccagcaccctgtgcaggtc

SEQ ID NO: 1237 - RNA, 20 nt, synthetic construct
  source 1..20: mol_type = other RNA
cccagctagtctttgtattt

SEQ ID NO: 1238 - RNA, 20 nt, synthetic construct
  source 1..20: mol_type = other RNA
cccagggctcattaaggtcc

SEQ ID NO: 1239 - RNA, 20 nt, synthetic construct
  source 1..20: mol_type = other RNA
cccaggtagtaagcagtggc

SEQ ID NO: 1240 - RNA, 20 nt, synthetic construct
  source 1..20: mol_type = other RNA
cccatattgaccagggtgat

SEQ ID NO: 1241 - RNA, 20 nt, synthetic construct
  source 1..20: mol_type = other RNA
cccatttaaaagaatggaaa

SEQ ID NO: 1242 - RNA, 20 nt, synthetic construct
  source 1..20: mol_type = other RNA
cccatttattatatattgag

SEQ ID NO: 1243 - RNA, 20 nt, synthetic construct
  source 1..20: mol_type = other RNA
cccatttctcagcaacttcc

SEQ ID NO: 1244 - RNA, 20 nt, synthetic construct
  source 1..20: mol_type = other RNA
ccccaaatataaatacagta

SEQ ID NO: 1245 - RNA, 20 nt, synthetic construct
  source 1..20: mol_type = other RNA
ccccacctacaaatacctgg

SEQ ID NO: 1246 - RNA, 20 nt, synthetic construct
  source 1..20: mol_type = other RNA
ccccacttccattgtattgt

SEQ ID NO: 1247 - RNA, 20 nt, synthetic construct
  source 1..20: mol_type = other RNA
ccccagaagagcgtcacctg

SEQ ID NO: 1248 - RNA, 20 nt, synthetic construct
  source 1..20: mol_type = other RNA
ccccatattgaccagggtga

SEQ ID NO: 1249 - RNA, 20 nt, synthetic construct
  source 1..20: mol_type = other RNA
ccccatttctcagcaacttc

SEQ ID NO: 1250 - RNA, 20 nt, synthetic construct
  source 1..20: mol_type = other RNA
cccctgaggaccaaatgcag

SEQ ID NO: 1251 - RNA, 20 nt, synthetic construct
  source 1..20: mol_type = other RNA
cccctgccacaaggggctgt

SEQ ID NO: 1252 - RNA, 20 nt, synthetic construct
  source 1..20: mol_type = other RNA
cccctggcagcggctgctgc

SEQ ID NO: 1253 - RNA, 20 nt, synthetic construct
  source 1..20: mol_type = other RNA
cccctggtcccaccgtctgc

SEQ ID NO: 1254 - RNA, 20 nt, synthetic construct
  source 1..20: mol_type = other RNA
ccccttattttctttctcct

SEQ ID NO: 1255 - RNA, 20 nt, synthetic construct
  source 1..20: mol_type = other RNA
ccccttgtggcaggggctga

SEQ ID NO: 1256 - RNA, 20 nt, synthetic construct
  source 1..20: mol_type = other RNA
cccgttcccaccggacaggc

SEQ ID NO: 1257 - RNA, 20 nt, synthetic construct
  source 1..20: mol_type = other RNA
ccctattccaccccatttct

SEQ ID NO: 1258 - RNA, 20 nt, synthetic construct
  source 1..20: mol_type = other RNA
ccctcacggaagatgacagt

SEQ ID NO: 1259 - RNA, 20 nt, synthetic construct
  source 1..20: mol_type = other RNA
ccctcaggttttgttcttcc

SEQ ID NO: 1260 - RNA, 20 nt, synthetic construct
  source 1..20: mol_type = other RNA
ccctcatctgtatacactaa

SEQ ID NO: 1261 - RNA, 20 nt, synthetic construct
  source 1..20: mol_type = other RNA
ccctcgcaaaatgatgtgaa

SEQ ID NO: 1262 - RNA, 20 nt, synthetic construct
  source 1..20: mol_type = other RNA
ccctctgtagcataaaatgt

SEQ ID NO: 1263 - RNA, 20 nt, synthetic construct
  source 1..20: mol_type = other RNA
ccctgaaagcttagccctca

SEQ ID NO: 1264 - RNA, 20 nt, synthetic construct
  source 1..20: mol_type = other RNA
ccctgaggaccaaatgcagc

SEQ ID NO: 1265 - RNA, 20 nt, synthetic construct
  source 1..20: mol_type = other RNA
ccctgccacaaggggctgtt

SEQ ID NO: 1266 - RNA, 20 nt, synthetic construct
  source 1..20: mol_type = other RNA
ccctgccacctaaatctgca

SEQ ID NO: 1267 - RNA, 20 nt, synthetic construct
  source 1..20: mol_type = other RNA
ccctggcagcggctgctgct

SEQ ID NO: 1268 - RNA, 20 nt, synthetic construct
  source 1..20: mol_type = other RNA
ccctggcggagggatgcagg

SEQ ID NO: 1269 - RNA, 20 nt, synthetic construct
  source 1..20: mol_type = other RNA
ccctgggaaattagtgcaga

SEQ ID NO: 1270 - RNA, 20 nt, synthetic construct
  source 1..20: mol_type = other RNA
ccctggtcaatatggggaaa

SEQ ID NO: 1271 - RNA, 20 nt, synthetic construct
  source 1..20: mol_type = other RNA
ccctggtcccaccgtctgct

SEQ ID NO: 1272 - RNA, 20 nt, synthetic construct
  source 1..20: mol_type = other RNA
ccctgtgcaggtctcttccc

SEQ ID NO: 1273 - RNA, 20 nt, synthetic construct
  source 1..20: mol_type = other RNA
cccttattttctttctcctg

SEQ ID NO: 1274 - RNA, 20 nt, synthetic construct
  source 1..20: mol_type = other RNA
cccttgatccccaaatataa

SEQ ID NO: 1275 - RNA, 20 nt, synthetic construct
  source 1..20: mol_type = other RNA
cccttgtggcaggggctgat

SEQ ID NO: 1276 - RNA, 20 nt, synthetic construct
  source 1..20: mol_type = other RNA
ccctttttaaatgagctttc

SEQ ID NO: 1277 - RNA, 20 nt, synthetic construct
  source 1..20: mol_type = other RNA
ccgagccttgcttgtcacca

SEQ ID NO: 1278 - RNA, 20 nt, synthetic construct
  source 1..20: mol_type = other RNA
ccgatcgactgccaagcagc

SEQ ID NO: 1279 - RNA, 20 nt, synthetic construct
  source 1..20: mol_type = other RNA
ccgcgctccctgccacctaa

SEQ ID NO: 1280 - RNA, 20 nt, synthetic construct
  source 1..20: mol_type = other RNA
ccgctgccaggggctgcgtc

SEQ ID NO: 1281 - RNA, 20 nt, synthetic construct
  source 1..20: mol_type = other RNA
ccggaacgacagcctgcata

SEQ ID NO: 1282 - RNA, 20 nt, synthetic construct
  source 1..20: mol_type = other RNA
ccggaagatcccacgattcc

SEQ ID NO: 1283 - RNA, 20 nt, synthetic construct
  source 1..20: mol_type = other RNA
ccggacaggccaaatgagaa

SEQ ID NO: 1284 - RNA, 20 nt, synthetic construct
  source 1..20: mol_type = other RNA
ccggcccacctgcatccctc

SEQ ID NO: 1285 - RNA, 20 nt, synthetic construct
  source 1..20: mol_type = other RNA
ccgggagacagaggttgcag

SEQ ID NO: 1286 - RNA, 20 nt, synthetic construct
  source 1..20: mol_type = other RNA
ccggtgggaacgggctgctg

SEQ ID NO: 1287 - RNA, 20 nt, synthetic construct
  source 1..20: mol_type = other RNA
ccggtggtgaaacacaggag

SEQ ID NO: 1288 - RNA, 20 nt, synthetic construct
  source 1..20: mol_type = other RNA
ccggttatgttgtgtaagtc

SEQ ID NO: 1289 - RNA, 20 nt, synthetic construct
  source 1..20: mol_type = other RNA
ccggttctcatttggcctgt

SEQ ID NO: 1290 - RNA, 20 nt, synthetic construct
  source 1..20: mol_type = other RNA
ccgtctgcttgctagcctac

SEQ ID NO: 1291 - RNA, 20 nt, synthetic construct
  source 1..20: mol_type = other RNA
ccgtgagggctaagctttca

SEQ ID NO: 1292 - RNA, 20 nt, synthetic construct
  source 1..20: mol_type = other RNA
ccgtggaaacactggacttc

SEQ ID NO: 1293 - RNA, 20 nt, synthetic construct
  source 1..20: mol_type = other RNA
ccgtggtgacaagcaaggct

SEQ ID NO: 1294 - RNA, 20 nt, synthetic construct
  source 1..20: mol_type = other RNA
ccgttcccaccggacaggcc

SEQ ID NO: 1295 - RNA, 20 nt, synthetic construct
  source 1..20: mol_type = other RNA
cctaaatctgcatctgctcc

SEQ ID NO: 1296 - RNA, 20 nt, synthetic construct
  source 1..20: mol_type = other RNA
cctacaaatacctggagcag

SEQ ID NO: 1297 - RNA, 20 nt, synthetic construct
  source 1..20: mol_type = other RNA
cctacagtccaggaggtcag

SEQ ID NO: 1298 - RNA, 20 nt, synthetic construct
  source 1..20: mol_type = other RNA
cctactgctgactggcttgc

SEQ ID NO: 1299 - RNA, 20 nt, synthetic construct
  source 1..20: mol_type = other RNA
cctagcaccgtggtgacaag

SEQ ID NO: 1300 - RNA, 20 nt, synthetic construct
  source 1..20: mol_type = other RNA
cctagctgtagaatttcaga

SEQ ID NO: 1301 - RNA, 20 nt, synthetic construct
  source 1..20: mol_type = other RNA
cctaggaatccagtgagtaa

SEQ ID NO: 1302 - RNA, 20 nt, synthetic construct
  source 1..20: mol_type = other RNA
cctaggtcgtgtttttggaa

SEQ ID NO: 1303 - RNA, 20 nt, synthetic construct
  source 1..20: mol_type = other RNA
cctatctctaataaaaatac

SEQ ID NO: 1304 - RNA, 20 nt, synthetic construct
  source 1..20: mol_type = other RNA
cctattaattccacaggttc

SEQ ID NO: 1305 - RNA, 20 nt, synthetic construct
  source 1..20: mol_type = other RNA
cctattccaccccatttctc

SEQ ID NO: 1306 - RNA, 20 nt, synthetic construct
  source 1..20: mol_type = other RNA
cctcacggaagatgacagtc

SEQ ID NO: 1307 - RNA, 20 nt, synthetic construct
  source 1..20: mol_type = other RNA
cctcaggggattgtgcagca

SEQ ID NO: 1308 - RNA, 20 nt, synthetic construct
  source 1..20: mol_type = other RNA
cctcaggttttgttcttcca

SEQ ID NO: 1309 - RNA, 20 nt, synthetic construct
  source 1..20: mol_type = other RNA
cctcatctgtatacactaag

SEQ ID NO: 1310 - RNA, 20 nt, synthetic construct
  source 1..20: mol_type = other RNA
cctcattcactgtcctggct

SEQ ID NO: 1311 - RNA, 20 nt, synthetic construct
  source 1..20: mol_type = other RNA
cctcccacctagctgagact

SEQ ID NO: 1312 - RNA, 20 nt, synthetic construct
  source 1..20: mol_type = other RNA
cctcctggactgtaggacta

SEQ ID NO: 1313 - RNA, 20 nt, synthetic construct
  source 1..20: mol_type = other RNA
cctcgagtactggacatgct

SEQ ID NO: 1314 - RNA, 20 nt, synthetic construct
  source 1..20: mol_type = other RNA
cctcgcaaaatgatgtgaaa

SEQ ID NO: 1315 - RNA, 20 nt, synthetic construct
  source 1..20: mol_type = other RNA
cctctgtagcataaaatgtt

SEQ ID NO: 1316 - RNA, 20 nt, synthetic construct
  source 1..20: mol_type = other RNA
cctctttgatccccttattt

SEQ ID NO: 1317 - RNA, 20 nt, synthetic construct
  source 1..20: mol_type = other RNA
cctgaaagctcatttaaaaa

SEQ ID NO: 1318 - RNA, 20 nt, synthetic construct
  source 1..20: mol_type = other RNA
cctgaaagcttagccctcac

SEQ ID NO: 1319 - RNA, 20 nt, synthetic construct
  source 1..20: mol_type = other RNA
cctgaacaagatgcagaacc

SEQ ID NO: 1320 - RNA, 20 nt, synthetic construct
  source 1..20: mol_type = other RNA
cctgacctcctggactgtag

SEQ ID NO: 1321 - RNA, 20 nt, synthetic construct
  source 1..20: mol_type = other RNA
cctgagccatttgctgcaca

SEQ ID NO: 1322 - RNA, 20 nt, synthetic construct
  source 1..20: mol_type = other RNA
cctgaggaccaaatgcagcc

SEQ ID NO: 1323 - RNA, 20 nt, synthetic construct
  source 1..20: mol_type = other RNA
cctgagggtcattgtggtgt

SEQ ID NO: 1324 - RNA, 20 nt, synthetic construct
  source 1..20: mol_type = other RNA
cctgcacagggtgctgggag

SEQ ID NO: 1325 - RNA, 20 nt, synthetic construct
  source 1..20: mol_type = other RNA
cctgcatataagtctattat

SEQ ID NO: 1326 - RNA, 20 nt, synthetic construct
  source 1..20: mol_type = other RNA
cctgcatccctccgccaggg

SEQ ID NO: 1327 - RNA, 20 nt, synthetic construct
  source 1..20: mol_type = other RNA
cctgccacaaggggctgttg

SEQ ID NO: 1328 - RNA, 20 nt, synthetic construct
  source 1..20: mol_type = other RNA
cctgccacctaaatctgcat

SEQ ID NO: 1329 - RNA, 20 nt, synthetic construct
  source 1..20: mol_type = other RNA
cctgctggagactggcctag

SEQ ID NO: 1330 - RNA, 20 nt, synthetic construct
  source 1..20: mol_type = other RNA
cctggaaaaaggaacactaa

SEQ ID NO: 1331 - RNA, 20 nt, synthetic construct
  source 1..20: mol_type = other RNA
cctggaagaacaaaacctga

SEQ ID NO: 1332 - RNA, 20 nt, synthetic construct
  source 1..20: mol_type = other RNA
cctggactgtaggactatat

SEQ ID NO: 1333 - RNA, 20 nt, synthetic construct
  source 1..20: mol_type = other RNA
cctggagcagatgcagattt

SEQ ID NO: 1334 - RNA, 20 nt, synthetic construct
  source 1..20: mol_type = other RNA
cctggcagcggctgctgctt

SEQ ID NO: 1335 - RNA, 20 nt, synthetic construct
  source 1..20: mol_type = other RNA
cctggccagttacttggttt

SEQ ID NO: 1336 - RNA, 20 nt, synthetic construct
  source 1..20: mol_type = other RNA
cctggcggagggatgcaggt

SEQ ID NO: 1337 - RNA, 20 nt, synthetic construct
  source 1..20: mol_type = other RNA
cctggcttttatttaaagaa

SEQ ID NO: 1338 - RNA, 20 nt, synthetic construct
  source 1..20: mol_type = other RNA
cctgggaaattagtgcagat

SEQ ID NO: 1339 - RNA, 20 nt, synthetic construct
  source 1..20: mol_type = other RNA
cctgggccagccaaggcaag

SEQ ID NO: 1340 - RNA, 20 nt, synthetic construct
  source 1..20: mol_type = other RNA
cctggtcaatatggggaaat

SEQ ID NO: 1341 - RNA, 20 nt, synthetic construct
  source 1..20: mol_type = other RNA
cctggtcccaccgtctgctt

SEQ ID NO: 1342 - RNA, 20 nt, synthetic construct
  source 1..20: mol_type = other RNA
cctgtagtctcagctaggtg

SEQ ID NO: 1343 - RNA, 20 nt, synthetic construct
  source 1..20: mol_type = other RNA
cctgtcaccaaggacgttaa

SEQ ID NO: 1344 - RNA, 20 nt, synthetic construct
  source 1..20: mol_type = other RNA
cctgtccggtgggaacgggc

SEQ ID NO: 1345 - RNA, 20 nt, synthetic construct
  source 1..20: mol_type = other RNA
cctgtgcaggtctcttccca

SEQ ID NO: 1346 - RNA, 20 nt, synthetic construct
  source 1..20: mol_type = other RNA
cctgtggaattaataggcat

SEQ ID NO: 1347 - RNA, 20 nt, synthetic construct
  source 1..20: mol_type = other RNA
cctgtgtgtctccataaaag

SEQ ID NO: 1348 - RNA, 20 nt, synthetic construct
  source 1..20: mol_type = other RNA
cctgtgtttcaccaccggtt

SEQ ID NO: 1349 - RNA, 20 nt, synthetic construct
  source 1..20: mol_type = other RNA
cctgttgctcctttccccca

SEQ ID NO: 1350 - RNA, 20 nt, synthetic construct
  source 1..20: mol_type = other RNA
ccttaatgagccctgggaaa

SEQ ID NO: 1351 - RNA, 20 nt, synthetic construct
  source 1..20: mol_type = other RNA
ccttactgtatttatatttg

SEQ ID NO: 1352 - RNA, 20 nt, synthetic construct
  source 1..20: mol_type = other RNA
ccttagtgaacagtgggaat

SEQ ID NO: 1353 - RNA, 20 nt, synthetic construct
  source 1..20: mol_type = other RNA
ccttagtgttcctttttcca

SEQ ID NO: 1354 - RNA, 20 nt, synthetic construct
  source 1..20: mol_type = other RNA
ccttattttctttctcctgt

SEQ ID NO: 1355 - RNA, 20 nt, synthetic construct
  source 1..20: mol_type = other RNA
ccttgatccccaaatataaa

SEQ ID NO: 1356 - RNA, 20 nt, synthetic construct
  source 1..20: mol_type = other RNA
ccttgcttgtcaccacggtg

SEQ ID NO: 1357 - RNA, 20 nt, synthetic construct
  source 1..20: mol_type = other RNA
ccttggctatgaatgtcaga

SEQ ID NO: 1358 - RNA, 20 nt, synthetic construct
  source 1..20: mol_type = other RNA
ccttggctggcccaggtagt

SEQ ID NO: 1359 - RNA, 20 nt, synthetic construct
  source 1..20: mol_type = other RNA
ccttggtgacaggactttta

SEQ ID NO: 1360 - RNA, 20 nt, synthetic construct
  source 1..20: mol_type = other RNA
ccttgtggcaggggctgatt

SEQ ID NO: 1361 - RNA, 20 nt, synthetic construct
  source 1..20: mol_type = other RNA
cctttaacgtccttggtgac

SEQ ID NO: 1362 - RNA, 20 nt, synthetic construct
  source 1..20: mol_type = other RNA
cctttcacatcattttgcga

SEQ ID NO: 1363 - RNA, 20 nt, synthetic construct
  source 1..20: mol_type = other RNA
cctttttaaatgagctttca

SEQ ID NO: 1364 - RNA, 20 nt, synthetic construct
  source 1..20: mol_type = other RNA
cctttttccaggtatttttt

SEQ ID NO: 1365 - RNA, 20 nt, synthetic construct
  source 1..20: mol_type = other RNA
cgaaacgagagccctgaaag

SEQ ID NO: 1366 - RNA, 20 nt, synthetic construct
  source 1..20: mol_type = other RNA
cgaaagcattgcctctttga

SEQ ID NO: 1367 - RNA, 20 nt, synthetic construct
  source 1..20: mol_type = other RNA
cgacacagcgagactgtctc

SEQ ID NO: 1368 - RNA, 20 nt, synthetic construct
  source 1..20: mol_type = other RNA
cgacagcctgcatataagtc

SEQ ID NO: 1369 - RNA, 20 nt, synthetic construct
  source 1..20: mol_type = other RNA
cgacatttcccatttattat

SEQ ID NO: 1370 - RNA, 20 nt, synthetic construct
  source 1..20: mol_type = other RNA
cgacctaggaatccagtgag

SEQ ID NO: 1371 - RNA, 20 nt, synthetic construct
  source 1..20: mol_type = other RNA
cgactgccaagcagcagccg

SEQ ID NO: 1372 - RNA, 20 nt, synthetic construct
  source 1..20: mol_type = other RNA
cgagactgtctccaaaaaac

SEQ ID NO: 1373 - RNA, 20 nt, synthetic construct
  source 1..20: mol_type = other RNA
cgagagccctgaaagcttag

SEQ ID NO: 1374 - RNA, 20 nt, synthetic construct
  source 1..20: mol_type = other RNA
cgagccttgcttgtcaccac

SEQ ID NO: 1375 - RNA, 20 nt, synthetic construct
  source 1..20: mol_type = other RNA
cgaggagtgaagatgcctat

SEQ ID NO: 1376 - RNA, 20 nt, synthetic construct
  source 1..20: mol_type = other RNA
cgagggtctctcacgtgctt

SEQ ID NO: 1377 - RNA, 20 nt, synthetic construct
  source 1..20: mol_type = other RNA
cgagtactggacatgctgct

SEQ ID NO: 1378 - RNA, 20 nt, synthetic construct
  source 1..20: mol_type = other RNA
cgatcgactgccaagcagca

SEQ ID NO: 1379 - RNA, 20 nt, synthetic construct
  source 1..20: mol_type = other RNA
cgatcggaatcgtgggatct

SEQ ID NO: 1380 - RNA, 20 nt, synthetic construct
  source 1..20: mol_type = other RNA
cgatctcagcgcactgcaac

SEQ ID NO: 1381 - RNA, 20 nt, synthetic construct
  source 1..20: mol_type = other RNA
cgattccgatcgactgccaa

SEQ ID NO: 1382 - RNA, 20 nt, synthetic construct
  source 1..20: mol_type = other RNA
cgattttcaataatagactt

SEQ ID NO: 1383 - RNA, 20 nt, synthetic construct
  source 1..20: mol_type = other RNA
cgcaaaatgatgtgaaagga

SEQ ID NO: 1384 - RNA, 20 nt, synthetic construct
  source 1..20: mol_type = other RNA
cgcagcccctggcagcggct

SEQ ID NO: 1385 - RNA, 20 nt, synthetic construct
  source 1..20: mol_type = other RNA
cgccactgcttactacctgg

SEQ ID NO: 1386 - RNA, 20 nt, synthetic construct
  source 1..20: mol_type = other RNA
cgcccagctagtctttgtat

SEQ ID NO: 1387 - RNA, 20 nt, synthetic construct
  source 1..20: mol_type = other RNA
cgccgagccttgcttgtcac

SEQ ID NO: 1388 - RNA, 20 nt, synthetic construct
  source 1..20: mol_type = other RNA
cgcgctccctgccacctaaa

SEQ ID NO: 1389 - RNA, 20 nt, synthetic construct
  source 1..20: mol_type = other RNA
cgctccctgccacctaaatc

SEQ ID NO: 1390 - RNA, 20 nt, synthetic construct
  source 1..20: mol_type = other RNA
cgctcttctggggtgagcat

SEQ ID NO: 1391 - RNA, 20 nt, synthetic construct
  source 1..20: mol_type = other RNA
cgctgccaggggctgcgtct

SEQ ID NO: 1392 - RNA, 20 nt, synthetic construct
  source 1..20: mol_type = other RNA
cgctggaataaaatgccttt

SEQ ID NO: 1393 - RNA, 20 nt, synthetic construct
  source 1..20: mol_type = other RNA
cggaacgacagcctgcatat

SEQ ID NO: 1394 - RNA, 20 nt, synthetic construct
  source 1..20: mol_type = other RNA
cggaagatcccacgattccg

SEQ ID NO: 1395 - RNA, 20 nt, synthetic construct
  source 1..20: mol_type = other RNA
cggaagatgacagtcaactg

SEQ ID NO: 1396 - RNA, 20 nt, synthetic construct
  source 1..20: mol_type = other RNA
cggaatcgtgggatcttccg

SEQ ID NO: 1397 - RNA, 20 nt, synthetic construct
  source 1..20: mol_type = other RNA
cggacaccctcatctgtata

SEQ ID NO: 1398 - RNA, 20 nt, synthetic construct
  source 1..20: mol_type = other RNA
cggacaggccaaatgagaac

SEQ ID NO: 1399 - RNA, 20 nt, synthetic construct
  source 1..20: mol_type = other RNA
cggagggatgcaggtgggcc

SEQ ID NO: 1400 - RNA, 20 nt, synthetic construct
  source 1..20: mol_type = other RNA
cggcagccctggcggaggga

SEQ ID NO: 1401 - RNA, 20 nt, synthetic construct
  source 1..20: mol_type = other RNA
cggcccacctgcatccctcc

SEQ ID NO: 1402 - RNA, 20 nt, synthetic construct
  source 1..20: mol_type = other RNA
cggcgccactgcttactacc

SEQ ID NO: 1403 - RNA, 20 nt, synthetic construct
  source 1..20: mol_type = other RNA
cggctgctgcttggcagtcg

SEQ ID NO: 1404 - RNA, 20 nt, synthetic construct
  source 1..20: mol_type = other RNA
cggctggatacctgtgtgtc

SEQ ID NO: 1405 - RNA, 20 nt, synthetic construct
  source 1..20: mol_type = other RNA
cgggagacagaggttgcagt

SEQ ID NO: 1406 - RNA, 20 nt, synthetic construct
  source 1..20: mol_type = other RNA
cgggctgctggctgcatttg

SEQ ID NO: 1407 - RNA, 20 nt, synthetic construct
  source 1..20: mol_type = other RNA
cggtgctaggaaatccagtt

SEQ ID NO: 1408 - RNA, 20 nt, synthetic construct
  source 1..20: mol_type = other RNA
cggtgggaacgggctgctgg

SEQ ID NO: 1409 - RNA, 20 nt, synthetic construct
  source 1..20: mol_type = other RNA
cggtgggaccaggggatctc

SEQ ID NO: 1410 - RNA, 20 nt, synthetic construct
  source 1..20: mol_type = other RNA
cggtggtgaaacacaggaga

SEQ ID NO: 1411 - RNA, 20 nt, synthetic construct
  source 1..20: mol_type = other RNA
cggttatgttgtgtaagtca

SEQ ID NO: 1412 - RNA, 20 nt, synthetic construct
  source 1..20: mol_type = other RNA
cggttctcatttggcctgtc

SEQ ID NO: 1413 - RNA, 20 nt, synthetic construct
  source 1..20: mol_type = other RNA
cgtcacctgaacaagatgca

SEQ ID NO: 1414 - RNA, 20 nt, synthetic construct
  source 1..20: mol_type = other RNA
cgtccttggtgacaggactt

SEQ ID NO: 1415 - RNA, 20 nt, synthetic construct
  source 1..20: mol_type = other RNA
cgtctgacatcctgacctcc

SEQ ID NO: 1416 - RNA, 20 nt, synthetic construct
  source 1..20: mol_type = other RNA
cgtctgcttgctagcctact

SEQ ID NO: 1417 - RNA, 20 nt, synthetic construct
  source 1..20: mol_type = other RNA
cgtcttctagagagcttagt

SEQ ID NO: 1418 - RNA, 20 nt, synthetic construct
  source 1..20: mol_type = other RNA
cgtgagagaccctcgcaaaa

SEQ ID NO: 1419 - RNA, 20 nt, synthetic construct
  source 1..20: mol_type = other RNA
cgtgagggctaagctttcag

SEQ ID NO: 1420 - RNA, 20 nt, synthetic construct
  source 1..20: mol_type = other RNA
cgtgcttcagtggccattac

SEQ ID NO: 1421 - RNA, 20 nt, synthetic construct
  source 1..20: mol_type = other RNA
cgtggaaacactggacttca

SEQ ID NO: 1422 - RNA, 20 nt, synthetic construct
  source 1..20: mol_type = other RNA
cgtgggatcttccggcccac

SEQ ID NO: 1423 - RNA, 20 nt, synthetic construct
  source 1..20: mol_type = other RNA
cgtggtgacaagcaaggctc

SEQ ID NO: 1424 - RNA, 20 nt, synthetic construct
  source 1..20: mol_type = other RNA
cgtgtttttggaaatcagcc

SEQ ID NO: 1425 - RNA, 20 nt, synthetic construct
  source 1..20: mol_type = other RNA
cgttaaaggcattttattcc

SEQ ID NO: 1426 - RNA, 20 nt, synthetic construct
  source 1..20: mol_type = other RNA
cgttcccaccggacaggcca

SEQ ID NO: 1427 - RNA, 20 nt, synthetic construct
  source 1..20: mol_type = other RNA
cgttccggttatgttgtgta

SEQ ID NO: 1428 - RNA, 20 nt, synthetic construct
  source 1..20: mol_type = other RNA
cgtttcgaaagcattgcctc

SEQ ID NO: 1429 - RNA, 20 nt, synthetic construct
  source 1..20: mol_type = other RNA
ctaaatctgcatctgctcca

SEQ ID NO: 1430 - RNA, 20 nt, synthetic construct
  source 1..20: mol_type = other RNA
ctaaatttcctgttgctcct

SEQ ID NO: 1431 - RNA, 20 nt, synthetic construct
  source 1..20: mol_type = other RNA
ctaagaccagcatctgcact

SEQ ID NO: 1432 - RNA, 20 nt, synthetic construct
  source 1..20: mol_type = other RNA
ctaagctctctagaagacgc

SEQ ID NO: 1433 - RNA, 20 nt, synthetic construct
  source 1..20: mol_type = other RNA
ctaagctttcagggctctcg

SEQ ID NO: 1434 - RNA, 20 nt, synthetic construct
  source 1..20: mol_type = other RNA
ctaaggaaataatctgagaa

SEQ ID NO: 1435 - RNA, 20 nt, synthetic construct
  source 1..20: mol_type = other RNA
ctaaggagtgagtggcaaga

SEQ ID NO: 1436 - RNA, 20 nt, synthetic construct
  source 1..20: mol_type = other RNA
ctaatgttgaaagttggcaa

SEQ ID NO: 1437 - RNA, 20 nt, synthetic construct
  source 1..20: mol_type = other RNA
ctaatttcccagggctcatt

SEQ ID NO: 1438 - RNA, 20 nt, synthetic construct
  source 1..20: mol_type = other RNA
ctacaaatacctggagcaga

SEQ ID NO: 1439 - RNA, 20 nt, synthetic construct
  source 1..20: mol_type = other RNA
ctacagagggtgaaaactct

SEQ ID NO: 1440 - RNA, 20 nt, synthetic construct
  source 1..20: mol_type = other RNA
ctacagctaggccagtctcc

SEQ ID NO: 1441 - RNA, 20 nt, synthetic construct
  source 1..20: mol_type = other RNA
ctacagtagtactttatata

SEQ ID NO: 1442 - RNA, 20 nt, synthetic construct
  source 1..20: mol_type = other RNA
ctacagtccaggaggtcagg

SEQ ID NO: 1443 - RNA, 20 nt, synthetic construct
  source 1..20: mol_type = other RNA
ctacatcaaatatctgcaat

SEQ ID NO: 1444 - RNA, 20 nt, synthetic construct
  source 1..20: mol_type = other RNA
ctacctgggccagccaaggc

SEQ ID NO: 1445 - RNA, 20 nt, synthetic construct
  source 1..20: mol_type = other RNA
ctactgcacctggccagtta

SEQ ID NO: 1446 - RNA, 20 nt, synthetic construct
  source 1..20: mol_type = other RNA
ctactgctgactggcttgcc

SEQ ID NO: 1447 - RNA, 20 nt, synthetic construct
  source 1..20: mol_type = other RNA
ctactgtagaactgcaattt

SEQ ID NO: 1448 - RNA, 20 nt, synthetic construct
  source 1..20: mol_type = other RNA
ctagaagacgctggaataaa

SEQ ID NO: 1449 - RNA, 20 nt, synthetic construct
  source 1..20: mol_type = other RNA
ctagagagcttagtgtatac

SEQ ID NO: 1450 - RNA, 20 nt, synthetic construct
  source 1..20: mol_type = other RNA
ctagcaagcagacggtggga

SEQ ID NO: 1451 - RNA, 20 nt, synthetic construct
  source 1..20: mol_type = other RNA
ctagcaccgtggtgacaagc

SEQ ID NO: 1452 - RNA, 20 nt, synthetic construct
  source 1..20: mol_type = other RNA
ctagcctactgctgactggc

SEQ ID NO: 1453 - RNA, 20 nt, synthetic construct
  source 1..20: mol_type = other RNA
ctagctgtagaatttcagaa

SEQ ID NO: 1454 - RNA, 20 nt, synthetic construct
  source 1..20: mol_type = other RNA
ctaggaaatccagttgactg

SEQ ID NO: 1455 - RNA, 20 nt, synthetic construct
  source 1..20: mol_type = other RNA
ctaggaatccagtgagtaac

SEQ ID NO: 1456 - RNA, 20 nt, synthetic construct
  source 1..20: mol_type = other RNA
ctaggccagtctccagcagg

SEQ ID NO: 1457 - RNA, 20 nt, synthetic construct
  source 1..20: mol_type = other RNA
ctaggtcgtgtttttggaaa

SEQ ID NO: 1458 - RNA, 20 nt, synthetic construct
  source 1..20: mol_type = other RNA
ctatataaagtactactgta

SEQ ID NO: 1459 - RNA, 20 nt, synthetic construct
  source 1..20: mol_type = other RNA
ctatgaatgtcagaaagtca

SEQ ID NO: 1460 - RNA, 20 nt, synthetic construct
  source 1..20: mol_type = other RNA
ctatgagaaccccacctaca

SEQ ID NO: 1461 - RNA, 20 nt, synthetic construct
  source 1..20: mol_type = other RNA
ctattaattccacaggttcc

SEQ ID NO: 1462 - RNA, 20 nt, synthetic construct
  source 1..20: mol_type = other RNA
ctattattgaaaatcgacat

SEQ ID NO: 1463 - RNA, 20 nt, synthetic construct
  source 1..20: mol_type = other RNA
ctattccaccccatttctca

SEQ ID NO: 1464 - RNA, 20 nt, synthetic construct
  source 1..20: mol_type = other RNA
ctattgcagatatttgatgt

SEQ ID NO: 1465 - RNA, 20 nt, synthetic construct
  source 1..20: mol_type = other RNA
ctcaatatataataaatggg

SEQ ID NO: 1466 - RNA, 20 nt, synthetic construct
  source 1..20: mol_type = other RNA
ctcaccccagaagagcgtca

SEQ ID NO: 1467 - RNA, 20 nt, synthetic construct
  source 1..20: mol_type = other RNA
ctcacggaagatgacagtca

SEQ ID NO: 1468 - RNA, 20 nt, synthetic construct
  source 1..20: mol_type = other RNA
ctcacgtgcttcagtggcca

SEQ ID NO: 1469 - RNA, 20 nt, synthetic construct
  source 1..20: mol_type = other RNA
ctcactccttagtgaacagt

SEQ ID NO: 1470 - RNA, 20 nt, synthetic construct
  source 1..20: mol_type = other RNA
ctcactggattcctaggtcg

SEQ ID NO: 1471 - RNA, 20 nt, synthetic construct
  source 1..20: mol_type = other RNA
ctcagattatttccttagtg

SEQ ID NO: 1472 - RNA, 20 nt, synthetic construct
  source 1..20: mol_type = other RNA
ctcagcaacttcctgaaagc

SEQ ID NO: 1473 - RNA, 20 nt, synthetic construct
  source 1..20: mol_type = other RNA
ctcagctaggtgggaggctg

SEQ ID NO: 1474 - RNA, 20 nt, synthetic construct
  source 1..20: mol_type = other RNA
ctcaggggattgtgcagcaa

SEQ ID NO: 1475 - RNA, 20 nt, synthetic construct
  source 1..20: mol_type = other RNA
ctcaggtctcccagcaccct

SEQ ID NO: 1476 - RNA, 20 nt, synthetic construct
  source 1..20: mol_type = other RNA
ctcaggttttgttcttccag

SEQ ID NO: 1477 - RNA, 20 nt, synthetic construct
  source 1..20: mol_type = other RNA
ctcatagccatggttctgca

SEQ ID NO: 1478 - RNA, 20 nt, synthetic construct
  source 1..20: mol_type = other RNA
ctcatctgtatacactaagc

SEQ ID NO: 1479 - RNA, 20 nt, synthetic construct
  source 1..20: mol_type = other RNA
ctcattaaggtccttactgt

SEQ ID NO: 1480 - RNA, 20 nt, synthetic construct
  source 1..20: mol_type = other RNA
ctcattcactgtcctggctt

SEQ ID NO: 1481 - RNA, 20 nt, synthetic construct
  source 1..20: mol_type = other RNA
ctcatttaaaaagggaatac

SEQ ID NO: 1482 - RNA, 20 nt, synthetic construct
  source 1..20: mol_type = other RNA
ctcatttggcctgtccggtg

SEQ ID NO: 1483 - RNA, 20 nt, synthetic construct
  source 1..20: mol_type = other RNA
ctccaaaaaaccaaaaaacc

SEQ ID NO: 1484 - RNA, 20 nt, synthetic construct
  source 1..20: mol_type = other RNA
ctccagcaggagataaaacc

SEQ ID NO: 1485 - RNA, 20 nt, synthetic construct
  source 1..20: mol_type = other RNA
ctccaggtatttgtaggtgg

SEQ ID NO: 1486 - RNA, 20 nt, synthetic construct
  source 1..20: mol_type = other RNA
ctccataaaagtcctgtcac

SEQ ID NO: 1487 - RNA, 20 nt, synthetic construct
  source 1..20: mol_type = other RNA
ctcccacctagctgagacta

SEQ ID NO: 1488 - RNA, 20 nt, synthetic construct
  source 1..20: mol_type = other RNA
ctcccagcaccctgtgcagg

SEQ ID NO: 1489 - RNA, 20 nt, synthetic construct
  source 1..20: mol_type = other RNA
ctccctgccacctaaatctg

SEQ ID NO: 1490 - RNA, 20 nt, synthetic construct
  source 1..20: mol_type = other RNA
ctcctcgagtactggacatg

SEQ ID NO: 1491 - RNA, 20 nt, synthetic construct
  source 1..20: mol_type = other RNA
ctcctgctggagactggcct

SEQ ID NO: 1492 - RNA, 20 nt, synthetic construct
  source 1..20: mol_type = other RNA
ctcctggactgtaggactat

SEQ ID NO: 1493 - RNA, 20 nt, synthetic construct
  source 1..20: mol_type = other RNA
ctcctgtgtttcaccaccgg

SEQ ID NO: 1494 - RNA, 20 nt, synthetic construct
  source 1..20: mol_type = other RNA
ctccttagtgaacagtggga

SEQ ID NO: 1495 - RNA, 20 nt, synthetic construct
  source 1..20: mol_type = other RNA
ctcctttcccccattaaaaa

SEQ ID NO: 1496 - RNA, 20 nt, synthetic construct
  source 1..20: mol_type = other RNA
ctcgaggagtgaagatgcct

SEQ ID NO: 1497 - RNA, 20 nt, synthetic construct
  source 1..20: mol_type = other RNA
ctcgagtactggacatgctg

SEQ ID NO: 1498 - RNA, 20 nt, synthetic construct
  source 1..20: mol_type = other RNA
ctcgcaaaatgatgtgaaag

SEQ ID NO: 1499 - RNA, 20 nt, synthetic construct
  source 1..20: mol_type = other RNA
ctcggcgccactgcttacta

SEQ ID NO: 1500 - RNA, 20 nt, synthetic construct
  source 1..20: mol_type = other RNA
ctcgtttcgaaagcattgcc

SEQ ID NO: 1501 - RNA, 20 nt, synthetic construct
  source 1..20: mol_type = other RNA
ctctagaagacgctggaata

SEQ ID NO: 1502 - RNA, 20 nt, synthetic construct
  source 1..20: mol_type = other RNA
ctctcacgtgcttcagtggc

SEQ ID NO: 1503 - RNA, 20 nt, synthetic construct
  source 1..20: mol_type = other RNA
ctctcgtttcgaaagcattg

SEQ ID NO: 1504 - RNA, 20 nt, synthetic construct
  source 1..20: mol_type = other RNA
ctctctagaagacgctggaa

SEQ ID NO: 1505 - RNA, 20 nt, synthetic construct
  source 1..20: mol_type = other RNA
ctctggacattcccactgtt

SEQ ID NO: 1506 - RNA, 20 nt, synthetic construct
  source 1..20: mol_type = other RNA
ctctggtctttttcagttct

SEQ ID NO: 1507 - RNA, 20 nt, synthetic construct
  source 1..20: mol_type = other RNA
ctctgtagcataaaatgttc

SEQ ID NO: 1508 - RNA, 20 nt, synthetic construct
  source 1..20: mol_type = other RNA
ctcttcagcctcattcactg

SEQ ID NO: 1509 - RNA, 20 nt, synthetic construct
  source 1..20: mol_type = other RNA
ctcttcccagacaccacaat

SEQ ID NO: 1510 - RNA, 20 nt, synthetic construct
  source 1..20: mol_type = other RNA
ctcttctggggtgagcattg

SEQ ID NO: 1511 - RNA, 20 nt, synthetic construct
  source 1..20: mol_type = other RNA
ctctttgatccccttatttt

SEQ ID NO: 1512 - RNA, 20 nt, synthetic construct
  source 1..20: mol_type = other RNA
ctcttttctcagattatttc

SEQ ID NO: 1513 - RNA, 20 nt, synthetic construct
  source 1..20: mol_type = other RNA
ctgaaaaagaccagagatcc

SEQ ID NO: 1514 - RNA, 20 nt, synthetic construct
  source 1..20: mol_type = other RNA
ctgaaagctcatttaaaaag

SEQ ID NO: 1515 - RNA, 20 nt, synthetic construct
  source 1..20: mol_type = other RNA
ctgaaagcttagccctcacg

SEQ ID NO: 1516 - RNA, 20 nt, synthetic construct
  source 1..20: mol_type = other RNA
ctgaaattctacagctaggc

SEQ ID NO: 1517 - RNA, 20 nt, synthetic construct
  source 1..20: mol_type = other RNA
ctgaacaagatgcagaacca

SEQ ID NO: 1518 - RNA, 20 nt, synthetic construct
  source 1..20: mol_type = other RNA
ctgaactgataacagcagca

SEQ ID NO: 1519 - RNA, 20 nt, synthetic construct
  source 1..20: mol_type = other RNA
ctgaacttgtcttgccactc

SEQ ID NO: 1520 - RNA, 20 nt, synthetic construct
  source 1..20: mol_type = other RNA
ctgaagagttgacttacaca

SEQ ID NO: 1521 - RNA, 20 nt, synthetic construct
  source 1..20: mol_type = other RNA
ctgaagcacgtgagagaccc

SEQ ID NO: 1522 - RNA, 20 nt, synthetic construct
  source 1..20: mol_type = other RNA
ctgaagcagactgtttctgt

SEQ ID NO: 1523 - RNA, 20 nt, synthetic construct
  source 1..20: mol_type = other RNA
ctgacacatgctctcaatat

SEQ ID NO: 1524 - RNA, 20 nt, synthetic construct
  source 1..20: mol_type = other RNA
ctgacatcctgacctcctgg

SEQ ID NO: 1525 - RNA, 20 nt, synthetic construct
  source 1..20: mol_type = other RNA
ctgacattcatagccaaggc

SEQ ID NO: 1526 - RNA, 20 nt, synthetic construct
  source 1..20: mol_type = other RNA
ctgacctcctggactgtagg

SEQ ID NO: 1527 - RNA, 20 nt, synthetic construct
  source 1..20: mol_type = other RNA
ctgactggcttgccttggct

SEQ ID NO: 1528 - RNA, 20 nt, synthetic construct
  source 1..20: mol_type = other RNA
ctgagaaaagagttttcacc

SEQ ID NO: 1529 - RNA, 20 nt, synthetic construct
  source 1..20: mol_type = other RNA
ctgagaaatggggtggaata

SEQ ID NO: 1530 - RNA, 20 nt, synthetic construct
  source 1..20: mol_type = other RNA
ctgagccatttgctgcacaa

SEQ ID NO: 1531 - RNA, 20 nt, synthetic construct
  source 1..20: mol_type = other RNA
ctgaggaccaaatgcagcca

SEQ ID NO: 1532 - RNA, 20 nt, synthetic construct
  source 1..20: mol_type = other RNA
ctgagggtcattgtggtgtc

SEQ ID NO: 1533 - RNA, 20 nt, synthetic construct
  source 1..20: mol_type = other RNA
ctgataacagcagcatgtcc

SEQ ID NO: 1534 - RNA, 20 nt, synthetic construct
  source 1..20: mol_type = other RNA
ctgatttccaaaaacacgac

SEQ ID NO: 1535 - RNA, 20 nt, synthetic construct
  source 1..20: mol_type = other RNA
ctgcaatttccattctttta

SEQ ID NO: 1536 - RNA, 20 nt, synthetic construct
  source 1..20: mol_type = other RNA
ctgcacaatcccctgaggac

SEQ ID NO: 1537 - RNA, 20 nt, synthetic construct
  source 1..20: mol_type = other RNA
ctgcacagggtgctgggaga

SEQ ID NO: 1538 - RNA, 20 nt, synthetic construct
  source 1..20: mol_type = other RNA
ctgcacctggccagttactt

SEQ ID NO: 1539 - RNA, 20 nt, synthetic construct
  source 1..20: mol_type = other RNA
ctgcactaatttcccagggc

SEQ ID NO: 1540 - RNA, 20 nt, synthetic construct
  source 1..20: mol_type = other RNA
ctgcatataagtctattatt

SEQ ID NO: 1541 - RNA, 20 nt, synthetic construct
  source 1..20: mol_type = other RNA
ctgcatccctccgccagggc

SEQ ID NO: 1542 - RNA, 20 nt, synthetic construct
  source 1..20: mol_type = other RNA
ctgcatctgctccaggtatt

SEQ ID NO: 1543 - RNA, 20 nt, synthetic construct
  source 1..20: mol_type = other RNA
ctgcatcttgttcaggtgac

SEQ ID NO: 1544 - RNA, 20 nt, synthetic construct
  source 1..20: mol_type = other RNA
ctgcatttggtcctcagggg

SEQ ID NO: 1545 - RNA, 20 nt, synthetic construct
  source 1..20: mol_type = other RNA
ctgccaagcagcagccgctg

SEQ ID NO: 1546 - RNA, 20 nt, synthetic construct
  source 1..20: mol_type = other RNA
ctgccacaaggggctgttgc

SEQ ID NO: 1547 - RNA, 20 nt, synthetic construct
  source 1..20: mol_type = other RNA
ctgccacctaaatctgcatc

SEQ ID NO: 1548 - RNA, 20 nt, synthetic construct
  source 1..20: mol_type = other RNA
ctgccaggggctgcgtctga

SEQ ID NO: 1549 - RNA, 20 nt, synthetic construct
  source 1..20: mol_type = other RNA
ctgccgcgctccctgccacc

SEQ ID NO: 1550 - RNA, 20 nt, synthetic construct
  source 1..20: mol_type = other RNA
ctgcgtctgacatcctgacc

SEQ ID NO: 1551 - RNA, 20 nt, synthetic construct
  source 1..20: mol_type = other RNA
ctgctccaggtatttgtagg

SEQ ID NO: 1552 - RNA, 20 nt, synthetic construct
  source 1..20: mol_type = other RNA
ctgctgactggcttgccttg

SEQ ID NO: 1553 - RNA, 20 nt, synthetic construct
  source 1..20: mol_type = other RNA
ctgctgcttggcagtcgatc

SEQ ID NO: 1554 - RNA, 20 nt, synthetic construct
  source 1..20: mol_type = other RNA
ctgctggagactggcctagc

SEQ ID NO: 1555 - RNA, 20 nt, synthetic construct
  source 1..20: mol_type = other RNA
ctgctggctgcatttggtcc

SEQ ID NO: 1556 - RNA, 20 nt, synthetic construct
  source 1..20: mol_type = other RNA
ctgctggttactgaacttgt

SEQ ID NO: 1557 - RNA, 20 nt, synthetic construct
  source 1..20: mol_type = other RNA
ctgctgttatcagttcagtt

SEQ ID NO: 1558 - RNA, 20 nt, synthetic construct
  source 1..20: mol_type = other RNA
ctgcttactacctgggccag

SEQ ID NO: 1559 - RNA, 20 nt, synthetic construct
  source 1..20: mol_type = other RNA
ctgcttcagcactttctaaa

SEQ ID NO: 1560 - RNA, 20 nt, synthetic construct
  source 1..20: mol_type = other RNA
ctgcttgctagcctactgct

SEQ ID NO: 1561 - RNA, 20 nt, synthetic construct
  source 1..20: mol_type = other RNA
ctgcttggcagtcgatcgga

SEQ ID NO: 1562 - RNA, 20 nt, synthetic construct
  source 1..20: mol_type = other RNA
ctggaaaaaggaacactaag

SEQ ID NO: 1563 - RNA, 20 nt, synthetic construct
  source 1..20: mol_type = other RNA
ctggaagaacaaaacctgag

SEQ ID NO: 1564 - RNA, 20 nt, synthetic construct
  source 1..20: mol_type = other RNA
ctggaataaaatgcctttaa

SEQ ID NO: 1565 - RNA, 20 nt, synthetic construct
  source 1..20: mol_type = other RNA
ctggacatgctgctgttatc

SEQ ID NO: 1566 - RNA, 20 nt, synthetic construct
  source 1..20: mol_type = other RNA
ctggacattcccactgttca

SEQ ID NO: 1567 - RNA, 20 nt, synthetic construct
  source 1..20: mol_type = other RNA
ctggactgtaggactatata

SEQ ID NO: 1568 - RNA, 20 nt, synthetic construct
  source 1..20: mol_type = other RNA
ctggacttcaagaaactggt

SEQ ID NO: 1569 - RNA, 20 nt, synthetic construct
  source 1..20: mol_type = other RNA
ctggagactggcctagctgt

SEQ ID NO: 1570 - RNA, 20 nt, synthetic construct
  source 1..20: mol_type = other RNA
ctggagcagatgcagattta

SEQ ID NO: 1571 - RNA, 20 nt, synthetic construct
  source 1..20: mol_type = other RNA
ctggatacctgtgtgtctcc

SEQ ID NO: 1572 - RNA, 20 nt, synthetic construct
  source 1..20: mol_type = other RNA
ctggattcctaggtcgtgtt

SEQ ID NO: 1573 - RNA, 20 nt, synthetic construct
  source 1..20: mol_type = other RNA
ctggatttcctagcaccgtg

SEQ ID NO: 1574 - RNA, 20 nt, synthetic construct
  source 1..20: mol_type = other RNA
ctggcagcggctgctgcttg

SEQ ID NO: 1575 - RNA, 20 nt, synthetic construct
  source 1..20: mol_type = other RNA
ctggccagttacttggtttt

SEQ ID NO: 1576 - RNA, 20 nt, synthetic construct
  source 1..20: mol_type = other RNA
ctggcccaggtagtaagcag

SEQ ID NO: 1577 - RNA, 20 nt, synthetic construct
  source 1..20: mol_type = other RNA
ctggcctagctgtagaattt

SEQ ID NO: 1578 - RNA, 20 nt, synthetic construct
  source 1..20: mol_type = other RNA
ctggcggagggatgcaggtg

SEQ ID NO: 1579 - RNA, 20 nt, synthetic construct
  source 1..20: mol_type = other RNA
ctggctgcatttggtcctca

SEQ ID NO: 1580 - RNA, 20 nt, synthetic construct
  source 1..20: mol_type = other RNA
ctggcttgccttggctggcc

SEQ ID NO: 1581 - RNA, 20 nt, synthetic construct
  source 1..20: mol_type = other RNA
ctggcttttatttaaagaaa

SEQ ID NO: 1582 - RNA, 20 nt, synthetic construct
  source 1..20: mol_type = other RNA
ctgggaaattagtgcagatg

SEQ ID NO: 1583 - RNA, 20 nt, synthetic construct
  source 1..20: mol_type = other RNA
ctgggaagagacctgcacag

SEQ ID NO: 1584 - RNA, 20 nt, synthetic construct
  source 1..20: mol_type = other RNA
ctgggagacctgagccattt

SEQ ID NO: 1585 - RNA, 20 nt, synthetic construct
  source 1..20: mol_type = other RNA
ctgggccagccaaggcaagc

SEQ ID NO: 1586 - RNA, 20 nt, synthetic construct
  source 1..20: mol_type = other RNA
ctgggcgacacagcgagact

SEQ ID NO: 1587 - RNA, 20 nt, synthetic construct
  source 1..20: mol_type = other RNA
ctggggtgagcattggatca

SEQ ID NO: 1588 - RNA, 20 nt, synthetic construct
  source 1..20: mol_type = other RNA
ctgggttgggggtgggaacc

SEQ ID NO: 1589 - RNA, 20 nt, synthetic construct
  source 1..20: mol_type = other RNA
ctggtcaatatggggaaatc

SEQ ID NO: 1590 - RNA, 20 nt, synthetic construct
  source 1..20: mol_type = other RNA
ctggtcccaccgtctgcttg

SEQ ID NO: 1591 - RNA, 20 nt, synthetic construct
  source 1..20: mol_type = other RNA
ctggtcctttcacatcattt

SEQ ID NO: 1592 - RNA, 20 nt, synthetic construct
  source 1..20: mol_type = other RNA
ctggtcttagttatttgtgt

SEQ ID NO: 1593 - RNA, 20 nt, synthetic construct
  source 1..20: mol_type = other RNA
ctggtctttttcagttctga

SEQ ID NO: 1594 - RNA, 20 nt, synthetic construct
  source 1..20: mol_type = other RNA
ctggttactgaacttgtctt

SEQ ID NO: 1595 - RNA, 20 nt, synthetic construct
  source 1..20: mol_type = other RNA
ctgtaatggccactgaagca

SEQ ID NO: 1596 - RNA, 20 nt, synthetic construct
  source 1..20: mol_type = other RNA
ctgtagaactgcaatttcca

SEQ ID NO: 1597 - RNA, 20 nt, synthetic construct
  source 1..20: mol_type = other RNA
ctgtagaatttcagaactga

SEQ ID NO: 1598 - RNA, 20 nt, synthetic construct
  source 1..20: mol_type = other RNA
ctgtagcataaaatgttcac

SEQ ID NO: 1599 - RNA, 20 nt, synthetic construct
  source 1..20: mol_type = other RNA
ctgtaggactatataaagta

SEQ ID NO: 1600 - RNA, 20 nt, synthetic construct
  source 1..20: mol_type = other RNA
ctgtagtctcagctaggtgg

SEQ ID NO: 1601 - RNA, 20 nt, synthetic construct
  source 1..20: mol_type = other RNA
ctgtatacactaagctctct

SEQ ID NO: 1602 - RNA, 20 nt, synthetic construct
  source 1..20: mol_type = other RNA
ctgtatttatatttggggat

SEQ ID NO: 1603 - RNA, 20 nt, synthetic construct
  source 1..20: mol_type = other RNA
ctgtcaccaaggacgttaaa

SEQ ID NO: 1604 - RNA, 20 nt, synthetic construct
  source 1..20: mol_type = other RNA
ctgtcatcttccgtgagggc

SEQ ID NO: 1605 - RNA, 20 nt, synthetic construct
  source 1..20: mol_type = other RNA
ctgtccggtgggaacgggct

SEQ ID NO: 1606 - RNA, 20 nt, synthetic construct
  source 1..20: mol_type = other RNA
ctgtcctggcttttatttaa

SEQ ID NO: 1607 - RNA, 20 nt, synthetic construct
  source 1..20: mol_type = other RNA
ctgtcgttccggttatgttg

SEQ ID NO: 1608 - RNA, 20 nt, synthetic construct
  source 1..20: mol_type = other RNA
ctgtctccaaaaaaccaaaa

SEQ ID NO: 1609 - RNA, 20 nt, synthetic construct
  source 1..20: mol_type = other RNA
ctgtctcccgggttcaggtg

SEQ ID NO: 1610 - RNA, 20 nt, synthetic construct
  source 1..20: mol_type = other RNA
ctgtcttctgctggttactg

SEQ ID NO: 1611 - RNA, 20 nt, synthetic construct
  source 1..20: mol_type = other RNA
ctgtgcaggtctcttcccag

SEQ ID NO: 1612 - RNA, 20 nt, synthetic construct
  source 1..20: mol_type = other RNA
ctgtggaattaataggcatc

SEQ ID NO: 1613 - RNA, 20 nt, synthetic construct
  source 1..20: mol_type = other RNA
ctgtgtgtctccataaaagt

SEQ ID NO: 1614 - RNA, 20 nt, synthetic construct
  source 1..20: mol_type = other RNA
ctgtgtttcaccaccggttc

SEQ ID NO: 1615 - RNA, 20 nt, synthetic construct
  source 1..20: mol_type = other RNA
ctgttatcagttcagttact

SEQ ID NO: 1616 - RNA, 20 nt, synthetic construct
  source 1..20: mol_type = other RNA
ctgttcactaaggagtgagt

SEQ ID NO: 1617 - RNA, 20 nt, synthetic construct
  source 1..20: mol_type = other RNA
ctgttctgtcttctgctggt

SEQ ID NO: 1618 - RNA, 20 nt, synthetic construct
  source 1..20: mol_type = other RNA
ctgttgccaactttcaacat

SEQ ID NO: 1619 - RNA, 20 nt, synthetic construct
  source 1..20: mol_type = other RNA
ctgttgctcctttcccccat

SEQ ID NO: 1620 - RNA, 20 nt, synthetic construct
  source 1..20: mol_type = other RNA
ctgtttctgttctgtcttct

SEQ ID NO: 1621 - RNA, 20 nt, synthetic construct
  source 1..20: mol_type = other RNA
cttaatgagccctgggaaat

SEQ ID NO: 1622 - RNA, 20 nt, synthetic construct
  source 1..20: mol_type = other RNA
cttacacaacataaccggaa

SEQ ID NO: 1623 - RNA, 20 nt, synthetic construct
  source 1..20: mol_type = other RNA
cttactacctgggccagcca

SEQ ID NO: 1624 - RNA, 20 nt, synthetic construct
  source 1..20: mol_type = other RNA
cttactgtatttatatttgg

SEQ ID NO: 1625 - RNA, 20 nt, synthetic construct
  source 1..20: mol_type = other RNA
cttagccctcacggaagatg

SEQ ID NO: 1626 - RNA, 20 nt, synthetic construct
  source 1..20: mol_type = other RNA
cttagtgaacagtgggaatg

SEQ ID NO: 1627 - RNA, 20 nt, synthetic construct
  source 1..20: mol_type = other RNA
cttagtgtatacagatgagg

SEQ ID NO: 1628 - RNA, 20 nt, synthetic construct
  source 1..20: mol_type = other RNA
cttagtgttcctttttccag

SEQ ID NO: 1629 - RNA, 20 nt, synthetic construct
  source 1..20: mol_type = other RNA
cttatatgcaggctgtcgtt

SEQ ID NO: 1630 - RNA, 20 nt, synthetic construct
  source 1..20: mol_type = other RNA
cttattttctttctcctgtg

SEQ ID NO: 1631 - RNA, 20 nt, synthetic construct
  source 1..20: mol_type = other RNA
cttcaagaaactggtccttt

SEQ ID NO: 1632 - RNA, 20 nt, synthetic construct
  source 1..20: mol_type = other RNA
cttcactcctcgagtactgg

SEQ ID NO: 1633 - RNA, 20 nt, synthetic construct
  source 1..20: mol_type = other RNA
cttcagcactttctaaattt

SEQ ID NO: 1634 - RNA, 20 nt, synthetic construct
  source 1..20: mol_type = other RNA
cttcagcctcattcactgtc

SEQ ID NO: 1635 - RNA, 20 nt, synthetic construct
  source 1..20: mol_type = other RNA
cttcagtggccattacagtt

SEQ ID NO: 1636 - RNA, 20 nt, synthetic construct
  source 1..20: mol_type = other RNA
cttccaggttgatccaatgc

SEQ ID NO: 1637 - RNA, 20 nt, synthetic construct
  source 1..20: mol_type = other RNA
cttccattgtattgtctgac

SEQ ID NO: 1638 - RNA, 20 nt, synthetic construct
  source 1..20: mol_type = other RNA
cttcccagacaccacaatga

SEQ ID NO: 1639 - RNA, 20 nt, synthetic construct
  source 1..20: mol_type = other RNA
cttccggcccacctgcatcc

SEQ ID NO: 1640 - RNA, 20 nt, synthetic construct
  source 1..20: mol_type = other RNA
cttccgtgagggctaagctt

SEQ ID NO: 1641 - RNA, 20 nt, synthetic construct
  source 1..20: mol_type = other RNA
cttcctgaaagctcatttaa

SEQ ID NO: 1642 - RNA, 20 nt, synthetic construct
  source 1..20: mol_type = other RNA
cttctagagagcttagtgta

SEQ ID NO: 1643 - RNA, 20 nt, synthetic construct
  source 1..20: mol_type = other RNA
cttctgctggttactgaact

SEQ ID NO: 1644 - RNA, 20 nt, synthetic construct
  source 1..20: mol_type = other RNA
cttctggggtgagcattgga

SEQ ID NO: 1645 - RNA, 20 nt, synthetic construct
  source 1..20: mol_type = other RNA
cttgaagtccagtgtttcca

SEQ ID NO: 1646 - RNA, 20 nt, synthetic construct
  source 1..20: mol_type = other RNA
cttgatccccaaatataaat

SEQ ID NO: 1647 - RNA, 20 nt, synthetic construct
  source 1..20: mol_type = other RNA
cttgccactcactccttagt

SEQ ID NO: 1648 - RNA, 20 nt, synthetic construct
  source 1..20: mol_type = other RNA
cttgccttggctggcccagg

SEQ ID NO: 1649 - RNA, 20 nt, synthetic construct
  source 1..20: mol_type = other RNA
cttgctagcctactgctgac

SEQ ID NO: 1650 - RNA, 20 nt, synthetic construct
  source 1..20: mol_type = other RNA
cttgcttgtcaccacggtgc

SEQ ID NO: 1651 - RNA, 20 nt, synthetic construct
  source 1..20: mol_type = other RNA
cttggcagtcgatcggaatc

SEQ ID NO: 1652 - RNA, 20 nt, synthetic construct
  source 1..20: mol_type = other RNA
cttggctatgaatgtcagaa

SEQ ID NO: 1653 - RNA, 20 nt, synthetic construct
  source 1..20: mol_type = other RNA
cttggctggcccaggtagta

SEQ ID NO: 1654 - RNA, 20 nt, synthetic construct
  source 1..20: mol_type = other RNA
cttggtgacaggacttttat

SEQ ID NO: 1655 - RNA, 20 nt, synthetic construct
  source 1..20: mol_type = other RNA
cttggttttatctcctgctg

SEQ ID NO: 1656 - RNA, 20 nt, synthetic construct
  source 1..20: mol_type = other RNA
cttgtcaccacggtgctagg

SEQ ID NO: 1657 - RNA, 20 nt, synthetic construct
  source 1..20: mol_type = other RNA
cttgtcttgccactcactcc

SEQ ID NO: 1658 - RNA, 20 nt, synthetic construct
  source 1..20: mol_type = other RNA
cttgtggcaggggctgattt

SEQ ID NO: 1659 - RNA, 20 nt, synthetic construct
  source 1..20: mol_type = other RNA
cttgttcaggtgacgctctt

SEQ ID NO: 1660 - RNA, 20 nt, synthetic construct
  source 1..20: mol_type = other RNA
ctttaaataaaagccaggac

SEQ ID NO: 1661 - RNA, 20 nt, synthetic construct
  source 1..20: mol_type = other RNA
ctttaacgtccttggtgaca

SEQ ID NO: 1662 - RNA, 20 nt, synthetic construct
  source 1..20: mol_type = other RNA
ctttatatagtcctacagtc

SEQ ID NO: 1663 - RNA, 20 nt, synthetic construct
  source 1..20: mol_type = other RNA
ctttcaacattagtttgggc

SEQ ID NO: 1664 - RNA, 20 nt, synthetic construct
  source 1..20: mol_type = other RNA
ctttcacatcattttgcgag

SEQ ID NO: 1665 - RNA, 20 nt, synthetic construct
  source 1..20: mol_type = other RNA
ctttcaggaagttgctgaga

SEQ ID NO: 1666 - RNA, 20 nt, synthetic construct
  source 1..20: mol_type = other RNA
ctttcagggctctcgtttcg

SEQ ID NO: 1667 - RNA, 20 nt, synthetic construct
  source 1..20: mol_type = other RNA
ctttcgaaacgagagccctg

SEQ ID NO: 1668 - RNA, 20 nt, synthetic construct
  source 1..20: mol_type = other RNA
ctttctaaatttcctgttgc

SEQ ID NO: 1669 - RNA, 20 nt, synthetic construct
  source 1..20: mol_type = other RNA
ctttctcctgtgtttcacca

SEQ ID NO: 1670 - RNA, 20 nt, synthetic construct
  source 1..20: mol_type = other RNA
ctttctgacattcatagcca

SEQ ID NO: 1671 - RNA, 20 nt, synthetic construct
  source 1..20: mol_type = other RNA
ctttgatccccttattttct

SEQ ID NO: 1672 - RNA, 20 nt, synthetic construct
  source 1..20: mol_type = other RNA
cttttaaatgggtgaaaaat

SEQ ID NO: 1673 - RNA, 20 nt, synthetic construct
  source 1..20: mol_type = other RNA
cttttatggagacacacagg

SEQ ID NO: 1674 - RNA, 20 nt, synthetic construct
  source 1..20: mol_type = other RNA
cttttctcagattatttcct

SEQ ID NO: 1675 - RNA, 20 nt, synthetic construct
  source 1..20: mol_type = other RNA
ctttttaaatgagctttcag

SEQ ID NO: 1676 - RNA, 20 nt, synthetic construct
  source 1..20: mol_type = other RNA
ctttttcagttctgaaattc

SEQ ID NO: 1677 - RNA, 20 nt, synthetic construct
  source 1..20: mol_type = other RNA
gaaaaagaccagagatcccc

SEQ ID NO: 1678 - RNA, 20 nt, synthetic construct
  source 1..20: mol_type = other RNA
gaaaaaggaacactaaggaa

SEQ ID NO: 1679 - RNA, 20 nt, synthetic construct
  source 1..20: mol_type = other RNA
gaaaactacatcaaatatct

SEQ ID NO: 1680 - RNA, 20 nt, synthetic construct
  source 1..20: mol_type = other RNA
gaaaactcttttctcagatt

SEQ ID NO: 1681 - RNA, 20 nt, synthetic construct
  source 1..20: mol_type = other RNA
gaaaagagttttcaccctct

SEQ ID NO: 1682 - RNA, 20 nt, synthetic construct
  source 1..20: mol_type = other RNA
gaaaataaggggatcaaaga

SEQ ID NO: 1683 - RNA, 20 nt, synthetic construct
  source 1..20: mol_type = other RNA
gaaaatcgacatttcccatt

SEQ ID NO: 1684 - RNA, 20 nt, synthetic construct
  source 1..20: mol_type = other RNA
gaaacacaggagaaagaaaa

SEQ ID NO: 1685 - RNA, 20 nt, synthetic construct
  source 1..20: mol_type = other RNA
gaaacactggacttcaagaa

SEQ ID NO: 1686 - RNA, 20 nt, synthetic construct
  source 1..20: mol_type = other RNA
gaaacagtctgcttcagcac

SEQ ID NO: 1687 - RNA, 20 nt, synthetic construct
  source 1..20: mol_type = other RNA
gaaaccccacttccattgta

SEQ ID NO: 1688 - RNA, 20 nt, synthetic construct
  source 1..20: mol_type = other RNA
gaaacgagagccctgaaagc

SEQ ID NO: 1689 - RNA, 20 nt, synthetic construct
  source 1..20: mol_type = other RNA
gaaactggtcctttcacatc

SEQ ID NO: 1690 - RNA, 20 nt, synthetic construct
  source 1..20: mol_type = other RNA
gaaagaaaataaggggatca

SEQ ID NO: 1691 - RNA, 20 nt, synthetic construct
  source 1..20: mol_type = other RNA
gaaagcattgcctctttgat

SEQ ID NO: 1692 - RNA, 20 nt, synthetic construct
  source 1..20: mol_type = other RNA
gaaagctcatttaaaaaggg

SEQ ID NO: 1693 - RNA, 20 nt, synthetic construct
  source 1..20: mol_type = other RNA
gaaagcttagccctcacgga

SEQ ID NO: 1694 - RNA, 20 nt, synthetic construct
  source 1..20: mol_type = other RNA
gaaaggaccagtttcttgaa

SEQ ID NO: 1695 - RNA, 20 nt, synthetic construct
  source 1..20: mol_type = other RNA
gaaaggagcaacaggaaatt

SEQ ID NO: 1696 - RNA, 20 nt, synthetic construct
  source 1..20: mol_type = other RNA
gaaagtcatgtgaacatttt

SEQ ID NO: 1697 - RNA, 20 nt, synthetic construct
  source 1..20: mol_type = other RNA
gaaagtgctgaagcagactg

SEQ ID NO: 1698 - RNA, 20 nt, synthetic construct
  source 1..20: mol_type = other RNA
gaaagttggcaacagcccct

SEQ ID NO: 1699 - RNA, 20 nt, synthetic construct
  source 1..20: mol_type = other RNA
gaaataatctgagaaaagag

SEQ ID NO: 1700 - RNA, 20 nt, synthetic construct
  source 1..20: mol_type = other RNA
gaaatcagcccctgccacaa

SEQ ID NO: 1701 - RNA, 20 nt, synthetic construct
  source 1..20: mol_type = other RNA
gaaatccagttgactgtcat

SEQ ID NO: 1702 - RNA, 20 nt, synthetic construct
  source 1..20: mol_type = other RNA
gaaatggggtggaataggga

SEQ ID NO: 1703 - RNA, 20 nt, synthetic construct
  source 1..20: mol_type = other RNA
gaaatgtcgattttcaataa

SEQ ID NO: 1704 - RNA, 20 nt, synthetic construct
  source 1..20: mol_type = other RNA
gaaattagtgcagatgctgg

SEQ ID NO: 1705 - RNA, 20 nt, synthetic construct
  source 1..20: mol_type = other RNA
gaaattctacagctaggcca

SEQ ID NO: 1706 - RNA, 20 nt, synthetic construct
  source 1..20: mol_type = other RNA
gaaattgcagttctacagta

SEQ ID NO: 1707 - RNA, 20 nt, synthetic construct
  source 1..20: mol_type = other RNA
gaaatttagaaagtgctgaa

SEQ ID NO: 1708 - RNA, 20 nt, synthetic construct
  source 1..20: mol_type = other RNA
gaacaaaacctgagggtcat

SEQ ID NO: 1709 - RNA, 20 nt, synthetic construct
  source 1..20: mol_type = other RNA
gaacaagatgcagaaccatg

SEQ ID NO: 1710 - RNA, 20 nt, synthetic construct
  source 1..20: mol_type = other RNA
gaacactaaggaaataatct

SEQ ID NO: 1711 - RNA, 20 nt, synthetic construct
  source 1..20: mol_type = other RNA
gaacagaaacagtctgcttc

SEQ ID NO: 1712 - RNA, 20 nt, synthetic construct
  source 1..20: mol_type = other RNA
gaacagtgggaatgtccaga

SEQ ID NO: 1713 - RNA, 20 nt, synthetic construct
  source 1..20: mol_type = other RNA
gaacattttatgctacagag

SEQ ID NO: 1714 - RNA, 20 nt, synthetic construct
  source 1..20: mol_type = other RNA
gaaccatggctatgagaacc

SEQ ID NO: 1715 - RNA, 20 nt, synthetic construct
  source 1..20: mol_type = other RNA
gaaccccacctacaaatacc

SEQ ID NO: 1716 - RNA, 20 nt, synthetic construct
  source 1..20: mol_type = other RNA
gaaccggtggtgaaacacag

SEQ ID NO: 1717 - RNA, 20 nt, synthetic construct
  source 1..20: mol_type = other RNA
gaacctgtggaattaatagg

SEQ ID NO: 1718 - RNA, 20 nt, synthetic construct
  source 1..20: mol_type = other RNA
gaacgacagcctgcatataa

SEQ ID NO: 1719 - RNA, 20 nt, synthetic construct
  source 1..20: mol_type = other RNA
gaacgggctgctggctgcat

SEQ ID NO: 1720 - RNA, 20 nt, synthetic construct
  source 1..20: mol_type = other RNA
gaactgaaaaagaccagaga

SEQ ID NO: 1721 - RNA, 20 nt, synthetic construct
  source 1..20: mol_type = other RNA
gaactgataacagcagcatg

SEQ ID NO: 1722 - RNA, 20 nt, synthetic construct
  source 1..20: mol_type = other RNA
gaactgcaatttccattctt

SEQ ID NO: 1723 - RNA, 20 nt, synthetic construct
  source 1..20: mol_type = other RNA
gaactgtaatggccactgaa

SEQ ID NO: 1724 - RNA, 20 nt, synthetic construct
  source 1..20: mol_type = other RNA
gaacttgtcttgccactcac

SEQ ID NO: 1725 - RNA, 20 nt, synthetic construct
  source 1..20: mol_type = other RNA
gaagaacaaaacctgagggt

SEQ ID NO: 1726 - RNA, 20 nt, synthetic construct
  source 1..20: mol_type = other RNA
gaagacagaacagaaacagt

SEQ ID NO: 1727 - RNA, 20 nt, synthetic construct
  source 1..20: mol_type = other RNA
gaagacgctggaataaaatg

SEQ ID NO: 1728 - RNA, 20 nt, synthetic construct
  source 1..20: mol_type = other RNA
gaagagacctgcacagggtg

SEQ ID NO: 1729 - RNA, 20 nt, synthetic construct
  source 1..20: mol_type = other RNA
gaagagcgtcacctgaacaa

SEQ ID NO: 1730 - RNA, 20 nt, synthetic construct
  source 1..20: mol_type = other RNA
gaagagttgacttacacaac

SEQ ID NO: 1731 - RNA, 20 nt, synthetic construct
  source 1..20: mol_type = other RNA
gaagatcccacgattccgat

SEQ ID NO: 1732 - RNA, 20 nt, synthetic construct
  source 1..20: mol_type = other RNA
gaagatgacagtcaactgga

SEQ ID NO: 1733 - RNA, 20 nt, synthetic construct
  source 1..20: mol_type = other RNA
gaagatgcctattaattcca

SEQ ID NO: 1734 - RNA, 20 nt, synthetic construct
  source 1..20: mol_type = other RNA
gaagcacgtgagagaccctc

SEQ ID NO: 1735 - RNA, 20 nt, synthetic construct
  source 1..20: mol_type = other RNA
gaagcagactgtttctgttc

SEQ ID NO: 1736 - RNA, 20 nt, synthetic construct
  source 1..20: mol_type = other RNA
gaagtccagtgtttccacgg

SEQ ID NO: 1737 - RNA, 20 nt, synthetic construct
  source 1..20: mol_type = other RNA
gaagtggggtttctgattaa

SEQ ID NO: 1738 - RNA, 20 nt, synthetic construct
  source 1..20: mol_type = other RNA
gaagttgctgagaaatgggg

SEQ ID NO: 1739 - RNA, 20 nt, synthetic construct
  source 1..20: mol_type = other RNA
gaataaaatgcctttaacgt

SEQ ID NO: 1740 - RNA, 20 nt, synthetic construct
  source 1..20: mol_type = other RNA
gaatagggaactgtaatggc

SEQ ID NO: 1741 - RNA, 20 nt, synthetic construct
  source 1..20: mol_type = other RNA
gaatccagtgagtaactgaa

SEQ ID NO: 1742 - RNA, 20 nt, synthetic construct
  source 1..20: mol_type = other RNA
gaatcgtgggatcttccggc

SEQ ID NO: 1743 - RNA, 20 nt, synthetic construct
  source 1..20: mol_type = other RNA
gaatgaggctgaagagttga

SEQ ID NO: 1744 - RNA, 20 nt, synthetic construct
  source 1..20: mol_type = other RNA
gaatggaaattgcagttcta

SEQ ID NO: 1745 - RNA, 20 nt, synthetic construct
  source 1..20: mol_type = other RNA
gaatgtcagaaagtcatgtg

SEQ ID NO: 1746 - RNA, 20 nt, synthetic construct
  source 1..20: mol_type = other RNA
gaatgtccagagtcccttga

SEQ ID NO: 1747 - RNA, 20 nt, synthetic construct
  source 1..20: mol_type = other RNA
gaattaataggcatcttcac

SEQ ID NO: 1748 - RNA, 20 nt, synthetic construct
  source 1..20: mol_type = other RNA
gaatttcagaactgaaaaag

SEQ ID NO: 1749 - RNA, 20 nt, synthetic construct
  source 1..20: mol_type = other RNA
gacaagcaaggctcggcgcc

SEQ ID NO: 1750 - RNA, 20 nt, synthetic construct
  source 1..20: mol_type = other RNA
gacaagttcagtaaccagca

SEQ ID NO: 1751 - RNA, 20 nt, synthetic construct
  source 1..20: mol_type = other RNA
gacaatacaatggaagtggg

SEQ ID NO: 1752 - RNA, 20 nt, synthetic construct
  source 1..20: mol_type = other RNA
gacacacaggtatccagccg

SEQ ID NO: 1753 - RNA, 20 nt, synthetic construct
  source 1..20: mol_type = other RNA
gacacatgctctcaatatat

SEQ ID NO: 1754 - RNA, 20 nt, synthetic construct
  source 1..20: mol_type = other RNA
gacaccacaatgaccctcag

SEQ ID NO: 1755 - RNA, 20 nt, synthetic construct
  source 1..20: mol_type = other RNA
gacaccctcatctgtataca

SEQ ID NO: 1756 - RNA, 20 nt, synthetic construct
  source 1..20: mol_type = other RNA
gacagaacagaaacagtctg

SEQ ID NO: 1757 - RNA, 20 nt, synthetic construct
  source 1..20: mol_type = other RNA
gacagcctgcatataagtct

SEQ ID NO: 1758 - RNA, 20 nt, synthetic construct
  source 1..20: mol_type = other RNA
gacaggacttttatggagac

SEQ ID NO: 1759 - RNA, 20 nt, synthetic construct
  source 1..20: mol_type = other RNA
gacaggccaaatgagaaccg

SEQ ID NO: 1760 - RNA, 20 nt, synthetic construct
  source 1..20: mol_type = other RNA
gacagtcaactggatttcct

SEQ ID NO: 1761 - RNA, 20 nt, synthetic construct
  source 1..20: mol_type = other RNA
gacagtgaatgaggctgaag

SEQ ID NO: 1762 - RNA, 20 nt, synthetic construct
  source 1..20: mol_type = other RNA
gacatcctgacctcctggac

SEQ ID NO: 1763 - RNA, 20 nt, synthetic construct
  source 1..20: mol_type = other RNA
gacatgctgctgttatcagt

SEQ ID NO: 1764 - RNA, 20 nt, synthetic construct
  source 1..20: mol_type = other RNA
gacattcatagccaaggccc

SEQ ID NO: 1765 - RNA, 20 nt, synthetic construct
  source 1..20: mol_type = other RNA
gacattcccactgttcacta

SEQ ID NO: 1766 - RNA, 20 nt, synthetic construct
  source 1..20: mol_type = other RNA
gacatttcccatttattata

SEQ ID NO: 1767 - RNA, 20 nt, synthetic construct
  source 1..20: mol_type = other RNA
gaccaaatgcagccagcagc

SEQ ID NO: 1768 - RNA, 20 nt, synthetic construct
  source 1..20: mol_type = other RNA
gaccagagatcccctggtcc

SEQ ID NO: 1769 - RNA, 20 nt, synthetic construct
  source 1..20: mol_type = other RNA
gaccagcatctgcactaatt

SEQ ID NO: 1770 - RNA, 20 nt, synthetic construct
  source 1..20: mol_type = other RNA
gaccaggggatctctggtct

SEQ ID NO: 1771 - RNA, 20 nt, synthetic construct
  source 1..20: mol_type = other RNA
gaccagggtgatctcaaatc

SEQ ID NO: 1772 - RNA, 20 nt, synthetic construct
  source 1..20: mol_type = other RNA
gaccagtttcttgaagtcca

SEQ ID NO: 1773 - RNA, 20 nt, synthetic construct
  source 1..20: mol_type = other RNA
gaccctcaggttttgttctt

SEQ ID NO: 1774 - RNA, 20 nt, synthetic construct
  source 1..20: mol_type = other RNA
gaccctcgcaaaatgatgtg

SEQ ID NO: 1775 - RNA, 20 nt, synthetic construct
  source 1..20: mol_type = other RNA
gacctaggaatccagtgagt

SEQ ID NO: 1776 - RNA, 20 nt, synthetic construct
  source 1..20: mol_type = other RNA
gacctcctggactgtaggac

SEQ ID NO: 1777 - RNA, 20 nt, synthetic construct
  source 1..20: mol_type = other RNA
gacctgagccatttgctgca

SEQ ID NO: 1778 - RNA, 20 nt, synthetic construct
  source 1..20: mol_type = other RNA
gacctgcacagggtgctggg

SEQ ID NO: 1779 - RNA, 20 nt, synthetic construct
  source 1..20: mol_type = other RNA
gaccttaatgagccctggga

SEQ ID NO: 1780 - RNA, 20 nt, synthetic construct
  source 1..20: mol_type = other RNA
gacgcagcccctggcagcgg

SEQ ID NO: 1781 - RNA, 20 nt, synthetic construct
  source 1..20: mol_type = other RNA
gacgctcttctggggtgagc

SEQ ID NO: 1782 - RNA, 20 nt, synthetic construct
  source 1..20: mol_type = other RNA
gacgctggaataaaatgcct

SEQ ID NO: 1783 - RNA, 20 nt, synthetic construct
  source 1..20: mol_type = other RNA
gacggtgggaccaggggatc

SEQ ID NO: 1784 - RNA, 20 nt, synthetic construct
  source 1..20: mol_type = other RNA
gacgttaaaggcattttatt

SEQ ID NO: 1785 - RNA, 20 nt, synthetic construct
  source 1..20: mol_type = other RNA
gactagctgggcgtggtggc

SEQ ID NO: 1786 - RNA, 20 nt, synthetic construct
  source 1..20: mol_type = other RNA
gactatataaagtactactg

SEQ ID NO: 1787 - RNA, 20 nt, synthetic construct
  source 1..20: mol_type = other RNA
gactctggacattcccactg

SEQ ID NO: 1788 - RNA, 20 nt, synthetic construct
  source 1..20: mol_type = other RNA
gactgccaagcagcagccgc

SEQ ID NO: 1789 - RNA, 20 nt, synthetic construct
  source 1..20: mol_type = other RNA
gactggcctagctgtagaat

SEQ ID NO: 1790 - RNA, 20 nt, synthetic construct
  source 1..20: mol_type = other RNA
gactggcttgccttggctgg

SEQ ID NO: 1791 - RNA, 20 nt, synthetic construct
  source 1..20: mol_type = other RNA
gactgtaggactatataaag

SEQ ID NO: 1792 - RNA, 20 nt, synthetic construct
  source 1..20: mol_type = other RNA
gactgtcatcttccgtgagg

SEQ ID NO: 1793 - RNA, 20 nt, synthetic construct
  source 1..20: mol_type = other RNA
gactgtctccaaaaaaccaa

SEQ ID NO: 1794 - RNA, 20 nt, synthetic construct
  source 1..20: mol_type = other RNA
gactgtttctgttctgtctt

SEQ ID NO: 1795 - RNA, 20 nt, synthetic construct
  source 1..20: mol_type = other RNA
gacttacacaacataaccgg

SEQ ID NO: 1796 - RNA, 20 nt, synthetic construct
  source 1..20: mol_type = other RNA
gacttatatgcaggctgtcg

SEQ ID NO: 1797 - RNA, 20 nt, synthetic construct
  source 1..20: mol_type = other RNA
gacttcaagaaactggtcct

SEQ ID NO: 1798 - RNA, 20 nt, synthetic construct
  source 1..20: mol_type = other RNA
gactttctgacattcatagc

SEQ ID NO: 1799 - RNA, 20 nt, synthetic construct
  source 1..20: mol_type = other RNA
gacttttatggagacacaca

SEQ ID NO: 1800 - RNA, 20 nt, synthetic construct
  source 1..20: mol_type = other RNA
gagaaaagagttttcaccct

SEQ ID NO: 1801 - RNA, 20 nt, synthetic construct
  source 1..20: mol_type = other RNA
gagaaagaaaataaggggat

SEQ ID NO: 1802 - RNA, 20 nt, synthetic construct
  source 1..20: mol_type = other RNA
gagaaatggggtggaatagg

SEQ ID NO: 1803 - RNA, 20 nt, synthetic construct
  source 1..20: mol_type = other RNA
gagaaccccacctacaaata

SEQ ID NO: 1804 - RNA, 20 nt, synthetic construct
  source 1..20: mol_type = other RNA
gagaaccggtggtgaaacac

SEQ ID NO: 1805 - RNA, 20 nt, synthetic construct
  source 1..20: mol_type = other RNA
gagacacacaggtatccagc

SEQ ID NO: 1806 - RNA, 20 nt, synthetic construct
  source 1..20: mol_type = other RNA
gagaccctcgcaaaatgatg

SEQ ID NO: 1807 - RNA, 20 nt, synthetic construct
  source 1..20: mol_type = other RNA
gagacctgagccatttgctg

SEQ ID NO: 1808 - RNA, 20 nt, synthetic construct
  source 1..20: mol_type = other RNA
gagacctgcacagggtgctg

SEQ ID NO: 1809 - RNA, 20 nt, synthetic construct
  source 1..20: mol_type = other RNA
gagactggcctagctgtaga

SEQ ID NO: 1810 - RNA, 20 nt, synthetic construct
  source 1..20: mol_type = other RNA
gagactgtctccaaaaaacc

SEQ ID NO: 1811 - RNA, 20 nt, synthetic construct
  source 1..20: mol_type = other RNA
gagagaccctcgcaaaatga

SEQ ID NO: 1812 - RNA, 20 nt, synthetic construct
  source 1..20: mol_type = other RNA
gagagcatgtgtcagacaat

SEQ ID NO: 1813 - RNA, 20 nt, synthetic construct
  source 1..20: mol_type = other RNA
gagagccctgaaagcttagc

SEQ ID NO: 1814 - RNA, 20 nt, synthetic construct
  source 1..20: mol_type = other RNA
gagagcttagtgtatacaga

SEQ ID NO: 1815 - RNA, 20 nt, synthetic construct
  source 1..20: mol_type = other RNA
gagataaaaccaagtaactg

SEQ ID NO: 1816 - RNA, 20 nt, synthetic construct
  source 1..20: mol_type = other RNA
gagataggatttccccatat

SEQ ID NO: 1817 - RNA, 20 nt, synthetic construct
  source 1..20: mol_type = other RNA
gagatcaccctggtcaatat

SEQ ID NO: 1818 - RNA, 20 nt, synthetic construct
  source 1..20: mol_type = other RNA
gagatcccctggtcccaccg

SEQ ID NO: 1819 - RNA, 20 nt, synthetic construct
  source 1..20: mol_type = other RNA
gagcaacaggaaatttagaa

SEQ ID NO: 1820 - RNA, 20 nt, synthetic construct
  source 1..20: mol_type = other RNA
gagcagatgcagatttaggt

SEQ ID NO: 1821 - RNA, 20 nt, synthetic construct
  source 1..20: mol_type = other RNA
gagcatgtgtcagacaatac

SEQ ID NO: 1822 - RNA, 20 nt, synthetic construct
  source 1..20: mol_type = other RNA
gagcattggatcaacctgga

SEQ ID NO: 1823 - RNA, 20 nt, synthetic construct
  source 1..20: mol_type = other RNA
gagccatttgctgcacaatc

SEQ ID NO: 1824 - RNA, 20 nt, synthetic construct
  source 1..20: mol_type = other RNA
gagccctgaaagcttagccc

SEQ ID NO: 1825 - RNA, 20 nt, synthetic construct
  source 1..20: mol_type = other RNA
gagccctgggaaattagtgc

SEQ ID NO: 1826 - RNA, 20 nt, synthetic construct
  source 1..20: mol_type = other RNA
gagccttgcttgtcaccacg

SEQ ID NO: 1827 - RNA, 20 nt, synthetic construct
  source 1..20: mol_type = other RNA
gagcgtcacctgaacaagat

SEQ ID NO: 1828 - RNA, 20 nt, synthetic construct
  source 1..20: mol_type = other RNA
gagctactgcacctggccag

SEQ ID NO: 1829 - RNA, 20 nt, synthetic construct
  source 1..20: mol_type = other RNA
gagcttagtgtatacagatg

SEQ ID NO: 1830 - RNA, 20 nt, synthetic construct
  source 1..20: mol_type = other RNA
gagctttcaggaagttgctg

SEQ ID NO: 1831 - RNA, 20 nt, synthetic construct
  source 1..20: mol_type = other RNA
gaggaccaaatgcagccagc

SEQ ID NO: 1832 - RNA, 20 nt, synthetic construct
  source 1..20: mol_type = other RNA
gaggagtgaagatgcctatt

SEQ ID NO: 1833 - RNA, 20 nt, synthetic construct
  source 1..20: mol_type = other RNA
gaggcaatgctttcgaaacg

SEQ ID NO: 1834 - RNA, 20 nt, synthetic construct
  source 1..20: mol_type = other RNA
gaggctgaagagttgactta

SEQ ID NO: 1835 - RNA, 20 nt, synthetic construct
  source 1..20: mol_type = other RNA
gagggatgcaggtgggccgg

SEQ ID NO: 1836 - RNA, 20 nt, synthetic construct
  source 1..20: mol_type = other RNA
gagggctaagctttcagggc

SEQ ID NO: 1837 - RNA, 20 nt, synthetic construct
  source 1..20: mol_type = other RNA
gagggtcattgtggtgtctg

SEQ ID NO: 1838 - RNA, 20 nt, synthetic construct
  source 1..20: mol_type = other RNA
gagggtctctcacgtgcttc

SEQ ID NO: 1839 - RNA, 20 nt, synthetic construct
  source 1..20: mol_type = other RNA
gagggtgaaaactcttttct

SEQ ID NO: 1840 - RNA, 20 nt, synthetic construct
  source 1..20: mol_type = other RNA
gaggtcaggatgtcagacgc

SEQ ID NO: 1841 - RNA, 20 nt, synthetic construct
  source 1..20: mol_type = other RNA
gagtaactgaactgataaca

SEQ ID NO: 1842 - RNA, 20 nt, synthetic construct
  source 1..20: mol_type = other RNA
gagtactggacatgctgctg

SEQ ID NO: 1843 - RNA, 20 nt, synthetic construct
  source 1..20: mol_type = other RNA
gagtcccttgatccccaaat

SEQ ID NO: 1844 - RNA, 20 nt, synthetic construct
  source 1..20: mol_type = other RNA
gagtgaagatgcctattaat

SEQ ID NO: 1845 - RNA, 20 nt, synthetic construct
  source 1..20: mol_type = other RNA
gagtgagtggcaagacaagt

SEQ ID NO: 1846 - RNA, 20 nt, synthetic construct
  source 1..20: mol_type = other RNA
gagtggcaagacaagttcag

SEQ ID NO: 1847 - RNA, 20 nt, synthetic construct
  source 1..20: mol_type = other RNA
gagttgacttacacaacata

SEQ ID NO: 1848 - RNA, 20 nt, synthetic construct
  source 1..20: mol_type = other RNA
gagttttcaccctctgtagc

SEQ ID NO: 1849 - RNA, 20 nt, synthetic construct
  source 1..20: mol_type = other RNA
gataaaaccaagtaactggc

SEQ ID NO: 1850 - RNA, 20 nt, synthetic construct
  source 1..20: mol_type = other RNA
gataacagcagcatgtccag

SEQ ID NO: 1851 - RNA, 20 nt, synthetic construct
  source 1..20: mol_type = other RNA
gatacctgtgtgtctccata

SEQ ID NO: 1852 - RNA, 20 nt, synthetic construct
  source 1..20: mol_type = other RNA
gataggatttccccatattg

SEQ ID NO: 1853 - RNA, 20 nt, synthetic construct
  source 1..20: mol_type = other RNA
gatatttgatgtagttttct

SEQ ID NO: 1854 - RNA, 20 nt, synthetic construct
  source 1..20: mol_type = other RNA
gatcaaagaggcaatgcttt

SEQ ID NO: 1855 - RNA, 20 nt, synthetic construct
  source 1..20: mol_type = other RNA
gatcaacctggaagaacaaa

SEQ ID NO: 1856 - RNA, 20 nt, synthetic construct
  source 1..20: mol_type = other RNA
gatcaagggactctggacat

SEQ ID NO: 1857 - RNA, 20 nt, synthetic construct
  source 1..20: mol_type = other RNA
gatcaccctggtcaatatgg

SEQ ID NO: 1858 - RNA, 20 nt, synthetic construct
  source 1..20: mol_type = other RNA
gatccaatgctcaccccaga

SEQ ID NO: 1859 - RNA, 20 nt, synthetic construct
  source 1..20: mol_type = other RNA
gatcccacgattccgatcga

SEQ ID NO: 1860 - RNA, 20 nt, synthetic construct
  source 1..20: mol_type = other RNA
gatccccaaatataaataca

SEQ ID NO: 1861 - RNA, 20 nt, synthetic construct
  source 1..20: mol_type = other RNA
gatcccctggtcccaccgtc

SEQ ID NO: 1862 - RNA, 20 nt, synthetic construct
  source 1..20: mol_type = other RNA
gatccccttattttctttct

SEQ ID NO: 1863 - RNA, 20 nt, synthetic construct
  source 1..20: mol_type = other RNA
gatcgactgccaagcagcag

SEQ ID NO: 1864 - RNA, 20 nt, synthetic construct
  source 1..20: mol_type = other RNA
gatcggaatcgtgggatctt

SEQ ID NO: 1865 - RNA, 20 nt, synthetic construct
  source 1..20: mol_type = other RNA
gatctattgcagatatttga

SEQ ID NO: 1866 - RNA, 20 nt, synthetic construct
  source 1..20: mol_type = other RNA
gatctctggtctttttcagt

SEQ ID NO: 1867 - RNA, 20 nt, synthetic construct
  source 1..20: mol_type = other RNA
gatcttccggcccacctgca

SEQ ID NO: 1868 - RNA, 20 nt, synthetic construct
  source 1..20: mol_type = other RNA
gatgacagtcaactggattt

SEQ ID NO: 1869 - RNA, 20 nt, synthetic construct
  source 1..20: mol_type = other RNA
gatgcagaaccatggctatg

SEQ ID NO: 1870 - RNA, 20 nt, synthetic construct
  source 1..20: mol_type = other RNA
gatgcagatttaggtggcag

SEQ ID NO: 1871 - RNA, 20 nt, synthetic construct
  source 1..20: mol_type = other RNA
gatgcaggtgggccggaaga

SEQ ID NO: 1872 - RNA, 20 nt, synthetic construct
  source 1..20: mol_type = other RNA
gatgcctattaattccacag

SEQ ID NO: 1873 - RNA, 20 nt, synthetic construct
  source 1..20: mol_type = other RNA
gatgctggtcttagttattt

SEQ ID NO: 1874 - RNA, 20 nt, synthetic construct
  source 1..20: mol_type = other RNA
gatgtcagacgcagcccctg

SEQ ID NO: 1875 - RNA, 20 nt, synthetic construct
  source 1..20: mol_type = other RNA
gatgtgaaaggaccagtttc

SEQ ID NO: 1876 - RNA, 20 nt, synthetic construct
  source 1..20: mol_type = other RNA
gattatttccttagtgttcc

SEQ ID NO: 1877 - RNA, 20 nt, synthetic construct
  source 1..20: mol_type = other RNA
gattccgatcgactgccaag

SEQ ID NO: 1878 - RNA, 20 nt, synthetic construct
  source 1..20: mol_type = other RNA
gattcctaggtcgtgttttt

SEQ ID NO: 1879 - RNA, 20 nt, synthetic construct
  source 1..20: mol_type = other RNA
gattcttgtgcctcagcctc

SEQ ID NO: 1880 - RNA, 20 nt, synthetic construct
  source 1..20: mol_type = other RNA
gattgtgcagcaaatggctc

SEQ ID NO: 1881 - RNA, 20 nt, synthetic construct
  source 1..20: mol_type = other RNA
gatttaggtggcagggagcg

SEQ ID NO: 1882 - RNA, 20 nt, synthetic construct
  source 1..20: mol_type = other RNA
gatttccaaaaacacgacct

SEQ ID NO: 1883 - RNA, 20 nt, synthetic construct
  source 1..20: mol_type = other RNA
gatttccccatattgaccag

SEQ ID NO: 1884 - RNA, 20 nt, synthetic construct
  source 1..20: mol_type = other RNA
gatttcctagcaccgtggtg

SEQ ID NO: 1885 - RNA, 20 nt, synthetic construct
  source 1..20: mol_type = other RNA
gatttgagatcaccctggtc

SEQ ID NO: 1886 - RNA, 20 nt, synthetic construct
  source 1..20: mol_type = other RNA
gcaaaatgatgtgaaaggac

SEQ ID NO: 1887 - RNA, 20 nt, synthetic construct
  source 1..20: mol_type = other RNA
gcaaatggctcaggtctccc

SEQ ID NO: 1888 - RNA, 20 nt, synthetic construct
  source 1..20: mol_type = other RNA
gcaacagccccttgtggcag

SEQ ID NO: 1889 - RNA, 20 nt, synthetic construct
  source 1..20: mol_type = other RNA
gcaacaggaaatttagaaag

SEQ ID NO: 1890 - RNA, 20 nt, synthetic construct
  source 1..20: mol_type = other RNA
gcaacttcctgaaagctcat

SEQ ID NO: 1891 - RNA, 20 nt, synthetic construct
  source 1..20: mol_type = other RNA
gcaagacaagttcagtaacc

SEQ ID NO: 1892 - RNA, 20 nt, synthetic construct
  source 1..20: mol_type = other RNA
gcaagcagacggtgggacca

SEQ ID NO: 1893 - RNA, 20 nt, synthetic construct
  source 1..20: mol_type = other RNA
gcaagccagtcagcagtagg

SEQ ID NO: 1894 - RNA, 20 nt, synthetic construct
  source 1..20: mol_type = other RNA
gcaaggctcggcgccactgc

SEQ ID NO: 1895 - RNA, 20 nt, synthetic construct
  source 1..20: mol_type = other RNA
gcaatgctttcgaaacgaga

SEQ ID NO: 1896 - RNA, 20 nt, synthetic construct
  source 1..20: mol_type = other RNA
gcaatttccattcttttaaa

SEQ ID NO: 1897 - RNA, 20 nt, synthetic construct
  source 1..20: mol_type = other RNA
gcacaatcccctgaggacca

SEQ ID NO: 1898 - RNA, 20 nt, synthetic construct
  source 1..20: mol_type = other RNA
gcacacacctgtagtctcag

SEQ ID NO: 1899 - RNA, 20 nt, synthetic construct
  source 1..20: mol_type = other RNA
gcacagggtgctgggagacc

SEQ ID NO: 1900 - RNA, 20 nt, synthetic construct
  source 1..20: mol_type = other RNA
gcaccctgtgcaggtctctt

SEQ ID NO: 1901 - RNA, 20 nt, synthetic construct
  source 1..20: mol_type = other RNA
gcaccgtggtgacaagcaag

SEQ ID NO: 1902 - RNA, 20 nt, synthetic construct
  source 1..20: mol_type = other RNA
gcacctggccagttacttgg

SEQ ID NO: 1903 - RNA, 20 nt, synthetic construct
  source 1..20: mol_type = other RNA
gcacgtgagagaccctcgca

SEQ ID NO: 1904 - RNA, 20 nt, synthetic construct
  source 1..20: mol_type = other RNA
gcactaatttcccagggctc

SEQ ID NO: 1905 - RNA, 20 nt, synthetic construct
  source 1..20: mol_type = other RNA
gcactttctaaatttcctgt

SEQ ID NO: 1906 - RNA, 20 nt, synthetic construct
  source 1..20: mol_type = other RNA
gcagaaccatggctatgaga

SEQ ID NO: 1907 - RNA, 20 nt, synthetic construct
  source 1..20: mol_type = other RNA
gcagaagacagaacagaaac

SEQ ID NO: 1908 - RNA, 20 nt, synthetic construct
  source 1..20: mol_type = other RNA
gcagacggtgggaccagggg

SEQ ID NO: 1909 - RNA, 20 nt, synthetic construct
  source 1..20: mol_type = other RNA
gcagactgtttctgttctgt

SEQ ID NO: 1910 - RNA, 20 nt, synthetic construct
  source 1..20: mol_type = other RNA
gcagatatttgatgtagttt

SEQ ID NO: 1911 - RNA, 20 nt, synthetic construct
  source 1..20: mol_type = other RNA
gcagatgcagatttaggtgg

SEQ ID NO: 1912 - RNA, 20 nt, synthetic construct
  source 1..20: mol_type = other RNA
gcagatgctggtcttagtta

SEQ ID NO: 1913 - RNA, 20 nt, synthetic construct
  source 1..20: mol_type = other RNA
gcagatttaggtggcaggga

SEQ ID NO: 1914 - RNA, 20 nt, synthetic construct
  source 1..20: mol_type = other RNA
gcagcaaatggctcaggtct

SEQ ID NO: 1915 - RNA, 20 nt, synthetic construct
  source 1..20: mol_type = other RNA
gcagcagccgctgccagggg

SEQ ID NO: 1916 - RNA, 20 nt, synthetic construct
  source 1..20: mol_type = other RNA
gcagcatgtccagtactcga

SEQ ID NO: 1917 - RNA, 20 nt, synthetic construct
  source 1..20: mol_type = other RNA
gcagccagcagcccgttccc

SEQ ID NO: 1918 - RNA, 20 nt, synthetic construct
  source 1..20: mol_type = other RNA
gcagcccctggcagcggctg

SEQ ID NO: 1919 - RNA, 20 nt, synthetic construct
  source 1..20: mol_type = other RNA
gcagcccgttcccaccggac

SEQ ID NO: 1920 - RNA, 20 nt, synthetic construct
  source 1..20: mol_type = other RNA
gcagccctggcggagggatg

SEQ ID NO: 1921 - RNA, 20 nt, synthetic construct
  source 1..20: mol_type = other RNA
gcagccgctgccaggggctg

SEQ ID NO: 1922 - RNA, 20 nt, synthetic construct
  source 1..20: mol_type = other RNA
gcagcggctgctgcttggca

SEQ ID NO: 1923 - RNA, 20 nt, synthetic construct
  source 1..20: mol_type = other RNA
gcaggagataaaaccaagta

SEQ ID NO: 1924 - RNA, 20 nt, synthetic construct
  source 1..20: mol_type = other RNA
gcaggctgtcgttccggtta

SEQ ID NO: 1925 - RNA, 20 nt, synthetic construct
  source 1..20: mol_type = other RNA
gcagggagcgcggcagccct

SEQ ID NO: 1926 - RNA, 20 nt, synthetic construct
  source 1..20: mol_type = other RNA
gcaggggctgatttccaaaa

SEQ ID NO: 1927 - RNA, 20 nt, synthetic construct
  source 1..20: mol_type = other RNA
gcaggtctcttcccagacac

SEQ ID NO: 1928 - RNA, 20 nt, synthetic construct
  source 1..20: mol_type = other RNA
gcaggtgggccggaagatcc

SEQ ID NO: 1929 - RNA, 20 nt, synthetic construct
  source 1..20: mol_type = other RNA
gcagtaggctagcaagcaga

SEQ ID NO: 1930 - RNA, 20 nt, synthetic construct
  source 1..20: mol_type = other RNA
gcagtattccctttttaaat

SEQ ID NO: 1931 - RNA, 20 nt, synthetic construct
  source 1..20: mol_type = other RNA
gcagtcgatcggaatcgtgg

SEQ ID NO: 1932 - RNA, 20 nt, synthetic construct
  source 1..20: mol_type = other RNA
gcagtggcgccgagccttgc

SEQ ID NO: 1933 - RNA, 20 nt, synthetic construct
  source 1..20: mol_type = other RNA
gcagttctacagtagtactt

SEQ ID NO: 1934 - RNA, 20 nt, synthetic construct
  source 1..20: mol_type = other RNA
gcataaaatgttcacatgac

SEQ ID NO: 1935 - RNA, 20 nt, synthetic construct
  source 1..20: mol_type = other RNA
gcatataagtctattattga

SEQ ID NO: 1936 - RNA, 20 nt, synthetic construct
  source 1..20: mol_type = other RNA
gcatccctccgccagggctg

SEQ ID NO: 1937 - RNA, 20 nt, synthetic construct
  source 1..20: mol_type = other RNA
gcatctgcactaatttccca

SEQ ID NO: 1938 - RNA, 20 nt, synthetic construct
  source 1..20: mol_type = other RNA
gcatctgctccaggtatttg

SEQ ID NO: 1939 - RNA, 20 nt, synthetic construct
  source 1..20: mol_type = other RNA
gcatcttcactcctcgagta

SEQ ID NO: 1940 - RNA, 20 nt, synthetic construct
  source 1..20: mol_type = other RNA
gcatcttgttcaggtgacgc

SEQ ID NO: 1941 - RNA, 20 nt, synthetic construct
  source 1..20: mol_type = other RNA
gcatgagctactgcacctgg

SEQ ID NO: 1942 - RNA, 20 nt, synthetic construct
  source 1..20: mol_type = other RNA
gcatgtccagtactcgagga

SEQ ID NO: 1943 - RNA, 20 nt, synthetic construct
  source 1..20: mol_type = other RNA
gcatgtgtcagacaatacaa

SEQ ID NO: 1944 - RNA, 20 nt, synthetic construct
  source 1..20: mol_type = other RNA
gcattgcctctttgatcccc

SEQ ID NO: 1945 - RNA, 20 nt, synthetic construct
  source 1..20: mol_type = other RNA
gcattggatcaacctggaag

SEQ ID NO: 1946 - RNA, 20 nt, synthetic construct
  source 1..20: mol_type = other RNA
gcatttggtcctcaggggat

SEQ ID NO: 1947 - RNA, 20 nt, synthetic construct
  source 1..20: mol_type = other RNA
gcattttattccagcgtctt

SEQ ID NO: 1948 - RNA, 20 nt, synthetic construct
  source 1..20: mol_type = other RNA
gccaaatgagaaccggtggt

SEQ ID NO: 1949 - RNA, 20 nt, synthetic construct
  source 1..20: mol_type = other RNA
gccaactttcaacattagtt

SEQ ID NO: 1950 - RNA, 20 nt, synthetic construct
  source 1..20: mol_type = other RNA
gccaagcagcagccgctgcc

SEQ ID NO: 1951 - RNA, 20 nt, synthetic construct
  source 1..20: mol_type = other RNA
gccaaggcaagccagtcagc

SEQ ID NO: 1952 - RNA, 20 nt, synthetic construct
  source 1..20: mol_type = other RNA
gccaaggcccaaactaatgt

SEQ ID NO: 1953 - RNA, 20 nt, synthetic construct
  source 1..20: mol_type = other RNA
gccacaaggggctgttgcca

SEQ ID NO: 1954 - RNA, 20 nt, synthetic construct
  source 1..20: mol_type = other RNA
gccaccacgcccagctagtc

SEQ ID NO: 1955 - RNA, 20 nt, synthetic construct
  source 1..20: mol_type = other RNA
gccacctaaatctgcatctg

SEQ ID NO: 1956 - RNA, 20 nt, synthetic construct
  source 1..20: mol_type = other RNA
gccactcactccttagtgaa

SEQ ID NO: 1957 - RNA, 20 nt, synthetic construct
  source 1..20: mol_type = other RNA
gccactgaagcacgtgagag

SEQ ID NO: 1958 - RNA, 20 nt, synthetic construct
  source 1..20: mol_type = other RNA
gccactgcttactacctggg

SEQ ID NO: 1959 - RNA, 20 nt, synthetic construct
  source 1..20: mol_type = other RNA
gccagcagcccgttcccacc

SEQ ID NO: 1960 - RNA, 20 nt, synthetic construct
  source 1..20: mol_type = other RNA
gccagccaaggcaagccagt

SEQ ID NO: 1961 - RNA, 20 nt, synthetic construct
  source 1..20: mol_type = other RNA
gccaggacagtgaatgaggc

SEQ ID NO: 1962 - RNA, 20 nt, synthetic construct
  source 1..20: mol_type = other RNA
gccaggggctgcgtctgaca

SEQ ID NO: 1963 - RNA, 20 nt, synthetic construct
  source 1..20: mol_type = other RNA
gccagtcagcagtaggctag

SEQ ID NO: 1964 - RNA, 20 nt, synthetic construct
  source 1..20: mol_type = other RNA
gccagtctccagcaggagat

SEQ ID NO: 1965 - RNA, 20 nt, synthetic construct
  source 1..20: mol_type = other RNA
gccagttacttggttttatc

SEQ ID NO: 1966 - RNA, 20 nt, synthetic construct
  source 1..20: mol_type = other RNA
gccatggttctgcatcttgt

SEQ ID NO: 1967 - RNA, 20 nt, synthetic construct
  source 1..20: mol_type = other RNA
gccattacagttccctattc

SEQ ID NO: 1968 - RNA, 20 nt, synthetic construct
  source 1..20: mol_type = other RNA
gccatttgctgcacaatccc

SEQ ID NO: 1969 - RNA, 20 nt, synthetic construct
  source 1..20: mol_type = other RNA
gcccaaactaatgttgaaag

SEQ ID NO: 1970 - RNA, 20 nt, synthetic construct
  source 1..20: mol_type = other RNA
gcccacctgcatccctccgc

SEQ ID NO: 1971 - RNA, 20 nt, synthetic construct
  source 1..20: mol_type = other RNA
gcccagctagtctttgtatt

SEQ ID NO: 1972 - RNA, 20 nt, synthetic construct
  source 1..20: mol_type = other RNA
gcccaggtagtaagcagtgg

SEQ ID NO: 1973 - RNA, 20 nt, synthetic construct
  source 1..20: mol_type = other RNA
gcccctgccacaaggggctg

SEQ ID NO: 1974 - RNA, 20 nt, synthetic construct
  source 1..20: mol_type = other RNA
gcccctggcagcggctgctg

SEQ ID NO: 1975 - RNA, 20 nt, synthetic construct
  source 1..20: mol_type = other RNA
gccccttgtggcaggggctg

SEQ ID NO: 1976 - RNA, 20 nt, synthetic construct
  source 1..20: mol_type = other RNA
gcccgttcccaccggacagg

SEQ ID NO: 1977 - RNA, 20 nt, synthetic construct
  source 1..20: mol_type = other RNA
gccctcacggaagatgacag

SEQ ID NO: 1978 - RNA, 20 nt, synthetic construct
  source 1..20: mol_type = other RNA
gccctgaaagcttagccctc

SEQ ID NO: 1979 - RNA, 20 nt, synthetic construct
  source 1..20: mol_type = other RNA
gccctggcggagggatgcag

SEQ ID NO: 1980 - RNA, 20 nt, synthetic construct
  source 1..20: mol_type = other RNA
gccctgggaaattagtgcag

SEQ ID NO: 1981 - RNA, 20 nt, synthetic construct
  source 1..20: mol_type = other RNA
gccgagccttgcttgtcacc

SEQ ID NO: 1982 - RNA, 20 nt, synthetic construct
  source 1..20: mol_type = other RNA
gccgcgctccctgccaccta

SEQ ID NO: 1983 - RNA, 20 nt, synthetic construct
  source 1..20: mol_type = other RNA
gccgctgccaggggctgcgt

SEQ ID NO: 1984 - RNA, 20 nt, synthetic construct
  source 1..20: mol_type = other RNA
gccggaagatcccacgattc

SEQ ID NO: 1985 - RNA, 20 nt, synthetic construct
  source 1..20: mol_type = other RNA
gccgtggaaacactggactt

SEQ ID NO: 1986 - RNA, 20 nt, synthetic construct
  source 1..20: mol_type = other RNA
gcctactgctgactggcttg

SEQ ID NO: 1987 - RNA, 20 nt, synthetic construct
  source 1..20: mol_type = other RNA
gcctagctgtagaatttcag

SEQ ID NO: 1988 - RNA, 20 nt, synthetic construct
  source 1..20: mol_type = other RNA
gcctattaattccacaggtt

SEQ ID NO: 1989 - RNA, 20 nt, synthetic construct
  source 1..20: mol_type = other RNA
gcctcagcctcccacctagc

SEQ ID NO: 1990 - RNA, 20 nt, synthetic construct
  source 1..20: mol_type = other RNA
gcctcattcactgtcctggc

SEQ ID NO: 1991 - RNA, 20 nt, synthetic construct
  source 1..20: mol_type = other RNA
gcctcccacctagctgagac

SEQ ID NO: 1992 - RNA, 20 nt, synthetic construct
  source 1..20: mol_type = other RNA
gcctctttgatccccttatt

SEQ ID NO: 1993 - RNA, 20 nt, synthetic construct
  source 1..20: mol_type = other RNA
gcctgcatataagtctatta

SEQ ID NO: 1994 - RNA, 20 nt, synthetic construct
  source 1..20: mol_type = other RNA
gcctgtccggtgggaacggg

SEQ ID NO: 1995 - RNA, 20 nt, synthetic construct
  source 1..20: mol_type = other RNA
gccttgcttgtcaccacggt

SEQ ID NO: 1996 - RNA, 20 nt, synthetic construct
  source 1..20: mol_type = other RNA
gccttggctatgaatgtcag

SEQ ID NO: 1997 - RNA, 20 nt, synthetic construct
  source 1..20: mol_type = other RNA
gccttggctggcccaggtag

SEQ ID NO: 1998 - RNA, 20 nt, synthetic construct
  source 1..20: mol_type = other RNA
gcctttaacgtccttggtga

SEQ ID NO: 1999 - RNA, 20 nt, synthetic construct
  source 1..20: mol_type = other RNA
gcgacacagcgagactgtct

SEQ ID NO: 2000 - RNA, 20 nt, synthetic construct
  source 1..20: mol_type = other RNA
gcgagactgtctccaaaaaa

SEQ ID NO: 2001 - RNA, 20 nt, synthetic construct
  source 1..20: mol_type = other RNA
gcgagggtctctcacgtgct

SEQ ID NO: 2002 - RNA, 20 nt, synthetic construct
  source 1..20: mol_type = other RNA
gcgccactgcttactacctg

SEQ ID NO: 2003 - RNA, 20 nt, synthetic construct
  source 1..20: mol_type = other RNA
gcgccgagccttgcttgtca

SEQ ID NO: 2004 - RNA, 20 nt, synthetic construct
  source 1..20: mol_type = other RNA
gcgctccctgccacctaaat

SEQ ID NO: 2005 - RNA, 20 nt, synthetic construct
  source 1..20: mol_type = other RNA
gcggacaccctcatctgtat

SEQ ID NO: 2006 - RNA, 20 nt, synthetic construct
  source 1..20: mol_type = other RNA
gcggagggatgcaggtgggc

SEQ ID NO: 2007 - RNA, 20 nt, synthetic construct
  source 1..20: mol_type = other RNA
gcggctgctgcttggcagtc

SEQ ID NO: 2008 - RNA, 20 nt, synthetic construct
  source 1..20: mol_type = other RNA
gcgtcacctgaacaagatgc

SEQ ID NO: 2009 - RNA, 20 nt, synthetic construct
  source 1..20: mol_type = other RNA
gcgtctgacatcctgacctc

SEQ ID NO: 2010 - RNA, 20 nt, synthetic construct
  source 1..20: mol_type = other RNA
gcgtcttctagagagcttag

SEQ ID NO: 2011 - RNA, 20 nt, synthetic construct
  source 1..20: mol_type = other RNA
gctaagctttcagggctctc

SEQ ID NO: 2012 - RNA, 20 nt, synthetic construct
  source 1..20: mol_type = other RNA
gctacagagggtgaaaactc

SEQ ID NO: 2013 - RNA, 20 nt, synthetic construct
  source 1..20: mol_type = other RNA
gctactgcacctggccagtt

SEQ ID NO: 2014 - RNA, 20 nt, synthetic construct
  source 1..20: mol_type = other RNA
gctagcaagcagacggtggg

SEQ ID NO: 2015 - RNA, 20 nt, synthetic construct
  source 1..20: mol_type = other RNA
gctagcctactgctgactgg

SEQ ID NO: 2016 - RNA, 20 nt, synthetic construct
  source 1..20: mol_type = other RNA
gctaggaaatccagttgact

SEQ ID NO: 2017 - RNA, 20 nt, synthetic construct
  source 1..20: mol_type = other RNA
gctaggccagtctccagcag

SEQ ID NO: 2018 - RNA, 20 nt, synthetic construct
  source 1..20: mol_type = other RNA
gctagtctttgtatttttat

SEQ ID NO: 2019 - RNA, 20 nt, synthetic construct
  source 1..20: mol_type = other RNA
gctatgaatgtcagaaagtc

SEQ ID NO: 2020 - RNA, 20 nt, synthetic construct
  source 1..20: mol_type = other RNA
gctatgagaaccccacctac

SEQ ID NO: 2021 - RNA, 20 nt, synthetic construct
  source 1..20: mol_type = other RNA
gctcaccccagaagagcgtc

SEQ ID NO: 2022 - RNA, 20 nt, synthetic construct
  source 1..20: mol_type = other RNA
gctcaggtctcccagcaccc

SEQ ID NO: 2023 - RNA, 20 nt, synthetic construct
  source 1..20: mol_type = other RNA
gctcattaaggtccttactg

SEQ ID NO: 2024 - RNA, 20 nt, synthetic construct
  source 1..20: mol_type = other RNA
gctcatttaaaaagggaata

SEQ ID NO: 2025 - RNA, 20 nt, synthetic construct
  source 1..20: mol_type = other RNA
gctccaggtatttgtaggtg

SEQ ID NO: 2026 - RNA, 20 nt, synthetic construct
  source 1..20: mol_type = other RNA
gctccctgccacctaaatct

SEQ ID NO: 2027 - RNA, 20 nt, synthetic construct
  source 1..20: mol_type = other RNA
gctcctttcccccattaaaa

SEQ ID NO: 2028 - RNA, 20 nt, synthetic construct
  source 1..20: mol_type = other RNA
gctcggcgccactgcttact

SEQ ID NO: 2029 - RNA, 20 nt, synthetic construct
  source 1..20: mol_type = other RNA
gctctcgtttcgaaagcatt

SEQ ID NO: 2030 - RNA, 20 nt, synthetic construct
  source 1..20: mol_type = other RNA
gctctctagaagacgctgga

SEQ ID NO: 2031 - RNA, 20 nt, synthetic construct
  source 1..20: mol_type = other RNA
gctcttctggggtgagcatt

SEQ ID NO: 2032 - RNA, 20 nt, synthetic construct
  source 1..20: mol_type = other RNA
gctgaagagttgacttacac

SEQ ID NO: 2033 - RNA, 20 nt, synthetic construct
  source 1..20: mol_type = other RNA
gctgaagcagactgtttctg

SEQ ID NO: 2034 - RNA, 20 nt, synthetic construct
  source 1..20: mol_type = other RNA
gctgactggcttgccttggc

SEQ ID NO: 2035 - RNA, 20 nt, synthetic construct
  source 1..20: mol_type = other RNA
gctgagaaatggggtggaat

SEQ ID NO: 2036 - RNA, 20 nt, synthetic construct
  source 1..20: mol_type = other RNA
gctgatttccaaaaacacga

SEQ ID NO: 2037 - RNA, 20 nt, synthetic construct
  source 1..20: mol_type = other RNA
gctgcacaatcccctgagga

SEQ ID NO: 2038 - RNA, 20 nt, synthetic construct
  source 1..20: mol_type = other RNA
gctgcatttggtcctcaggg

SEQ ID NO: 2039 - RNA, 20 nt, synthetic construct
  source 1..20: mol_type = other RNA
gctgccaggggctgcgtctg

SEQ ID NO: 2040 - RNA, 20 nt, synthetic construct
  source 1..20: mol_type = other RNA
gctgccgcgctccctgccac

SEQ ID NO: 2041 - RNA, 20 nt, synthetic construct
  source 1..20: mol_type = other RNA
gctgcgtctgacatcctgac

SEQ ID NO: 2042 - RNA, 20 nt, synthetic construct
  source 1..20: mol_type = other RNA
gctgctgcttggcagtcgat

SEQ ID NO: 2043 - RNA, 20 nt, synthetic construct
  source 1..20: mol_type = other RNA
gctgctggctgcatttggtc

SEQ ID NO: 2044 - RNA, 20 nt, synthetic construct
  source 1..20: mol_type = other RNA
gctgctgttatcagttcagt

SEQ ID NO: 2045 - RNA, 20 nt, synthetic construct
  source 1..20: mol_type = other RNA
gctgcttggcagtcgatcgg

SEQ ID NO: 2046 - RNA, 20 nt, synthetic construct
  source 1..20: mol_type = other RNA
gctggaataaaatgccttta

SEQ ID NO: 2047 - RNA, 20 nt, synthetic construct
  source 1..20: mol_type = other RNA
gctggagactggcctagctg

SEQ ID NO: 2048 - RNA, 20 nt, synthetic construct
  source 1..20: mol_type = other RNA
gctggatacctgtgtgtctc

SEQ ID NO: 2049 - RNA, 20 nt, synthetic construct
  source 1..20: mol_type = other RNA
gctggcccaggtagtaagca

SEQ ID NO: 2050 - RNA, 20 nt, synthetic construct
  source 1..20: mol_type = other RNA
gctggctgcatttggtcctc

SEQ ID NO: 2051 - RNA, 20 nt, synthetic construct
  source 1..20: mol_type = other RNA
gctgggagacctgagccatt

SEQ ID NO: 2052 - RNA, 20 nt, synthetic construct
  source 1..20: mol_type = other RNA
gctgggttgggggtgggaac

SEQ ID NO: 2053 - RNA, 20 nt, synthetic construct
  source 1..20: mol_type = other RNA
gctggtcttagttatttgtg

SEQ ID NO: 2054 - RNA, 20 nt, synthetic construct
  source 1..20: mol_type = other RNA
gctggttactgaacttgtct

SEQ ID NO: 2055 - RNA, 20 nt, synthetic construct
  source 1..20: mol_type = other RNA
gctgtagaatttcagaactg

SEQ ID NO: 2056 - RNA, 20 nt, synthetic construct
  source 1..20: mol_type = other RNA
gctgtcgttccggttatgtt

SEQ ID NO: 2057 - RNA, 20 nt, synthetic construct
  source 1..20: mol_type = other RNA
gctgttatcagttcagttac

SEQ ID NO: 2058 - RNA, 20 nt, synthetic construct
  source 1..20: mol_type = other RNA
gctgttgccaactttcaaca

SEQ ID NO: 2059 - RNA, 20 nt, synthetic construct
  source 1..20: mol_type = other RNA
gcttactacctgggccagcc

SEQ ID NO: 2060 - RNA, 20 nt, synthetic construct
  source 1..20: mol_type = other RNA
gcttagccctcacggaagat

SEQ ID NO: 2061 - RNA, 20 nt, synthetic construct
  source 1..20: mol_type = other RNA
gcttagtgtatacagatgag

SEQ ID NO: 2062 - RNA, 20 nt, synthetic construct
  source 1..20: mol_type = other RNA
gcttcagcactttctaaatt

SEQ ID NO: 2063 - RNA, 20 nt, synthetic construct
  source 1..20: mol_type = other RNA
gcttcagtggccattacagt

SEQ ID NO: 2064 - RNA, 20 nt, synthetic construct
  source 1..20: mol_type = other RNA
gcttgccttggctggcccag

SEQ ID NO: 2065 - RNA, 20 nt, synthetic construct
  source 1..20: mol_type = other RNA
gcttgctagcctactgctga

SEQ ID NO: 2066 - RNA, 20 nt, synthetic construct
  source 1..20: mol_type = other RNA
gcttggcagtcgatcggaat

SEQ ID NO: 2067 - RNA, 20 nt, synthetic construct
  source 1..20: mol_type = other RNA
gcttgtcaccacggtgctag

SEQ ID NO: 2068 - RNA, 20 nt, synthetic construct
  source 1..20: mol_type = other RNA
gctttcaggaagttgctgag

SEQ ID NO: 2069 - RNA, 20 nt, synthetic construct
  source 1..20: mol_type = other RNA
gctttcagggctctcgtttc

SEQ ID NO: 2070 - RNA, 20 nt, synthetic construct
  source 1..20: mol_type = other RNA
gctttcgaaacgagagccct

SEQ ID NO: 2071 - RNA, 20 nt, synthetic construct
  source 1..20: mol_type = other RNA
ggaaaaaggaacactaagga

SEQ ID NO: 2072 - RNA, 20 nt, synthetic construct
  source 1..20: mol_type = other RNA
ggaaacactggacttcaaga

SEQ ID NO: 2073 - RNA, 20 nt, synthetic construct
  source 1..20: mol_type = other RNA
ggaaaggagcaacaggaaat

SEQ ID NO: 2074 - RNA, 20 nt, synthetic construct
  source 1..20: mol_type = other RNA
ggaaataatctgagaaaaga

SEQ ID NO: 2075 - RNA, 20 nt, synthetic construct
  source 1..20: mol_type = other RNA
ggaaatcagcccctgccaca

SEQ ID NO: 2076 - RNA, 20 nt, synthetic construct
  source 1..20: mol_type = other RNA
ggaaatccagttgactgtca

SEQ ID NO: 2077 - RNA, 20 nt, synthetic construct
  source 1..20: mol_type = other RNA
ggaaatcctatctctaataa

SEQ ID NO: 2078 - RNA, 20 nt, synthetic construct
  source 1..20: mol_type = other RNA
ggaaatgtcgattttcaata

SEQ ID NO: 2079 - RNA, 20 nt, synthetic construct
  source 1..20: mol_type = other RNA
ggaaattagtgcagatgctg

SEQ ID NO: 2080 - RNA, 20 nt, synthetic construct
  source 1..20: mol_type = other RNA
ggaaattgcagttctacagt

SEQ ID NO: 2081 - RNA, 20 nt, synthetic construct
  source 1..20: mol_type = other RNA
ggaaatttagaaagtgctga

SEQ ID NO: 2082 - RNA, 20 nt, synthetic construct
  source 1..20: mol_type = other RNA
ggaacactaaggaaataatc

SEQ ID NO: 2083 - RNA, 20 nt, synthetic construct
  source 1..20: mol_type = other RNA
ggaacctgtggaattaatag

SEQ ID NO: 2084 - RNA, 20 nt, synthetic construct
  source 1..20: mol_type = other RNA
ggaacgacagcctgcatata

SEQ ID NO: 2085 - RNA, 20 nt, synthetic construct
  source 1..20: mol_type = other RNA
ggaacgggctgctggctgca

SEQ ID NO: 2086 - RNA, 20 nt, synthetic construct
  source 1..20: mol_type = other RNA
ggaactgtaatggccactga

SEQ ID NO: 2087 - RNA, 20 nt, synthetic construct
  source 1..20: mol_type = other RNA
ggaagaacaaaacctgaggg

SEQ ID NO: 2088 - RNA, 20 nt, synthetic construct
  source 1..20: mol_type = other RNA
ggaagagacctgcacagggt

SEQ ID NO: 2089 - RNA, 20 nt, synthetic construct
  source 1..20: mol_type = other RNA
ggaagatcccacgattccga

SEQ ID NO: 2090 - RNA, 20 nt, synthetic construct
  source 1..20: mol_type = other RNA
ggaagatgacagtcaactgg

SEQ ID NO: 2091 - RNA, 20 nt, synthetic construct
  source 1..20: mol_type = other RNA
ggaagtggggtttctgatta

SEQ ID NO: 2092 - RNA, 20 nt, synthetic construct
  source 1..20: mol_type = other RNA
ggaagttgctgagaaatggg

SEQ ID NO: 2093 - RNA, 20 nt, synthetic construct
  source 1..20: mol_type = other RNA
ggaataaaatgcctttaacg

SEQ ID NO: 2094 - RNA, 20 nt, synthetic construct
  source 1..20: mol_type = other RNA
ggaatagggaactgtaatgg

SEQ ID NO: 2095 - RNA, 20 nt, synthetic construct
  source 1..20: mol_type = other RNA
ggaatccagtgagtaactga

SEQ ID NO: 2096 - RNA, 20 nt, synthetic construct
  source 1..20: mol_type = other RNA
ggaatcgtgggatcttccgg

SEQ ID NO: 2097 - RNA, 20 nt, synthetic construct
  source 1..20: mol_type = other RNA
ggaatgtccagagtcccttg

SEQ ID NO: 2098 - RNA, 20 nt, synthetic construct
  source 1..20: mol_type = other RNA
ggaattaataggcatcttca

SEQ ID NO: 2099 - RNA, 20 nt, synthetic construct
  source 1..20: mol_type = other RNA
ggacaccctcatctgtatac

SEQ ID NO: 2100 - RNA, 20 nt, synthetic construct
  source 1..20: mol_type = other RNA
ggacaggccaaatgagaacc

SEQ ID NO: 2101 - RNA, 20 nt, synthetic construct
  source 1..20: mol_type = other RNA
ggacagtgaatgaggctgaa

SEQ ID NO: 2102 - RNA, 20 nt, synthetic construct
  source 1..20: mol_type = other RNA
ggacatgctgctgttatcag

SEQ ID NO: 2103 - RNA, 20 nt, synthetic construct
  source 1..20: mol_type = other RNA
ggacattcccactgttcact

SEQ ID NO: 2104 - RNA, 20 nt, synthetic construct
  source 1..20: mol_type = other RNA
ggaccaaatgcagccagcag

SEQ ID NO: 2105 - RNA, 20 nt, synthetic construct
  source 1..20: mol_type = other RNA
ggaccaggggatctctggtc

SEQ ID NO: 2106 - RNA, 20 nt, synthetic construct
  source 1..20: mol_type = other RNA
ggaccagtttcttgaagtcc

SEQ ID NO: 2107 - RNA, 20 nt, synthetic construct
  source 1..20: mol_type = other RNA
ggaccttaatgagccctggg

SEQ ID NO: 2108 - RNA, 20 nt, synthetic construct
  source 1..20: mol_type = other RNA
ggacgttaaaggcattttat

SEQ ID NO: 2109 - RNA, 20 nt, synthetic construct
  source 1..20: mol_type = other RNA
ggactatataaagtactact

SEQ ID NO: 2110 - RNA, 20 nt, synthetic construct
  source 1..20: mol_type = other RNA
ggactctggacattcccact

SEQ ID NO: 2111 - RNA, 20 nt, synthetic construct
  source 1..20: mol_type = other RNA
ggactgtaggactatataaa

SEQ ID NO: 2112 - RNA, 20 nt, synthetic construct
  source 1..20: mol_type = other RNA
ggacttcaagaaactggtcc

SEQ ID NO: 2113 - RNA, 20 nt, synthetic construct
  source 1..20: mol_type = other RNA
ggacttttatggagacacac

SEQ ID NO: 2114 - RNA, 20 nt, synthetic construct
  source 1..20: mol_type = other RNA
ggagaaagaaaataagggga

SEQ ID NO: 2115 - RNA, 20 nt, synthetic construct
  source 1..20: mol_type = other RNA
ggagacacacaggtatccag

SEQ ID NO: 2116 - RNA, 20 nt, synthetic construct
  source 1..20: mol_type = other RNA
ggagacagtctcgctgtgtc

SEQ ID NO: 2117 - RNA, 20 nt, synthetic construct
  source 1..20: mol_type = other RNA
ggagacctgagccatttgct

SEQ ID NO: 2118 - RNA, 20 nt, synthetic construct
  source 1..20: mol_type = other RNA
ggagactggcctagctgtag

SEQ ID NO: 2119 - RNA, 20 nt, synthetic construct
  source 1..20: mol_type = other RNA
ggagataaaaccaagtaact

SEQ ID NO: 2120 - RNA, 20 nt, synthetic construct
  source 1..20: mol_type = other RNA
ggagcaacaggaaatttaga

SEQ ID NO: 2121 - RNA, 20 nt, synthetic construct
  source 1..20: mol_type = other RNA
ggagcagatgcagatttagg

SEQ ID NO: 2122 - RNA, 20 nt, synthetic construct
  source 1..20: mol_type = other RNA
ggagggatgcaggtgggccg

SEQ ID NO: 2123 - RNA, 20 nt, synthetic construct
  source 1..20: mol_type = other RNA
ggaggtcaggatgtcagacg

SEQ ID NO: 2124 - RNA, 20 nt, synthetic construct
  source 1..20: mol_type = other RNA
ggagtgaagatgcctattaa

SEQ ID NO: 2125 - RNA, 20 nt, synthetic construct
  source 1..20: mol_type = other RNA
ggagtgagtggcaagacaag

SEQ ID NO: 2126 - RNA, 20 nt, synthetic construct
  source 1..20: mol_type = other RNA
ggatacctgtgtgtctccat

SEQ ID NO: 2127 - RNA, 20 nt, synthetic construct
  source 1..20: mol_type = other RNA
ggatcaaagaggcaatgctt

SEQ ID NO: 2128 - RNA, 20 nt, synthetic construct
  source 1..20: mol_type = other RNA
ggatcaacctggaagaacaa

SEQ ID NO: 2129 - RNA, 20 nt, synthetic construct
  source 1..20: mol_type = other RNA
ggatcaagggactctggaca

SEQ ID NO: 2130 - RNA, 20 nt, synthetic construct
  source 1..20: mol_type = other RNA
ggatctctggtctttttcag

SEQ ID NO: 2131 - RNA, 20 nt, synthetic construct
  source 1..20: mol_type = other RNA
ggatcttccggcccacctgc

SEQ ID NO: 2132 - RNA, 20 nt, synthetic construct
  source 1..20: mol_type = other RNA
ggatgcaggtgggccggaag

SEQ ID NO: 2133 - RNA, 20 nt, synthetic construct
  source 1..20: mol_type = other RNA
ggatgtcagacgcagcccct

SEQ ID NO: 2134 - RNA, 20 nt, synthetic construct
  source 1..20: mol_type = other RNA
ggattcctaggtcgtgtttt

SEQ ID NO: 2135 - RNA, 20 nt, synthetic construct
  source 1..20: mol_type = other RNA
ggattgtgcagcaaatggct

SEQ ID NO: 2136 - RNA, 20 nt, synthetic construct
  source 1..20: mol_type = other RNA
ggatttccccatattgacca

SEQ ID NO: 2137 - RNA, 20 nt, synthetic construct
  source 1..20: mol_type = other RNA
ggatttcctagcaccgtggt

SEQ ID NO: 2138 - RNA, 20 nt, synthetic construct
  source 1..20: mol_type = other RNA
ggatttgagatcaccctggt

SEQ ID NO: 2139 - RNA, 20 nt, synthetic construct
  source 1..20: mol_type = other RNA
ggcaacagccccttgtggca

SEQ ID NO: 2140 - RNA, 20 nt, synthetic construct
  source 1..20: mol_type = other RNA
ggcaagacaagttcagtaac

SEQ ID NO: 2141 - RNA, 20 nt, synthetic construct
  source 1..20: mol_type = other RNA
ggcaagccagtcagcagtag

SEQ ID NO: 2142 - RNA, 20 nt, synthetic construct
  source 1..20: mol_type = other RNA
ggcaatgctttcgaaacgag

SEQ ID NO: 2143 - RNA, 20 nt, synthetic construct
  source 1..20: mol_type = other RNA
ggcagccctggcggagggat

SEQ ID NO: 2144 - RNA, 20 nt, synthetic construct
  source 1..20: mol_type = other RNA
ggcagcggctgctgcttggc

SEQ ID NO: 2145 - RNA, 20 nt, synthetic construct
  source 1..20: mol_type = other RNA
ggcaggggctgatttccaaa

SEQ ID NO: 2146 - RNA, 20 nt, synthetic construct
  source 1..20: mol_type = other RNA
ggcagtattccctttttaaa

SEQ ID NO: 2147 - RNA, 20 nt, synthetic construct
  source 1..20: mol_type = other RNA
ggcagtcgatcggaatcgtg

SEQ ID NO: 2148 - RNA, 20 nt, synthetic construct
  source 1..20: mol_type = other RNA
ggcatcttcactcctcgagt

SEQ ID NO: 2149 - RNA, 20 nt, synthetic construct
  source 1..20: mol_type = other RNA
ggcattttattccagcgtct

SEQ ID NO: 2150 - RNA, 20 nt, synthetic construct
  source 1..20: mol_type = other RNA
ggccaaatgagaaccggtgg

SEQ ID NO: 2151 - RNA, 20 nt, synthetic construct
  source 1..20: mol_type = other RNA
ggccactgaagcacgtgaga

SEQ ID NO: 2152 - RNA, 20 nt, synthetic construct
  source 1..20: mol_type = other RNA
ggccagccaaggcaagccag

SEQ ID NO: 2153 - RNA, 20 nt, synthetic construct
  source 1..20: mol_type = other RNA
ggccagtctccagcaggaga

SEQ ID NO: 2154 - RNA, 20 nt, synthetic construct
  source 1..20: mol_type = other RNA
ggccagttacttggttttat

SEQ ID NO: 2155 - RNA, 20 nt, synthetic construct
  source 1..20: mol_type = other RNA
ggccattacagttccctatt

SEQ ID NO: 2156 - RNA, 20 nt, synthetic construct
  source 1..20: mol_type = other RNA
ggcccaaactaatgttgaaa

SEQ ID NO: 2157 - RNA, 20 nt, synthetic construct
  source 1..20: mol_type = other RNA
ggcccacctgcatccctccg

SEQ ID NO: 2158 - RNA, 20 nt, synthetic construct
  source 1..20: mol_type = other RNA
ggcccaggtagtaagcagtg

SEQ ID NO: 2159 - RNA, 20 nt, synthetic construct
  source 1..20: mol_type = other RNA
ggccggaagatcccacgatt

SEQ ID NO: 2160 - RNA, 20 nt, synthetic construct
  source 1..20: mol_type = other RNA
ggcctagctgtagaatttca

SEQ ID NO: 2161 - RNA, 20 nt, synthetic construct
  source 1..20: mol_type = other RNA
ggcctgtccggtgggaacgg

SEQ ID NO: 2162 - RNA, 20 nt, synthetic construct
  source 1..20: mol_type = other RNA
ggccttggctatgaatgtca

SEQ ID NO: 2163 - RNA, 20 nt, synthetic construct
  source 1..20: mol_type = other RNA
ggcgacacagcgagactgtc

SEQ ID NO: 2164 - RNA, 20 nt, synthetic construct
  source 1..20: mol_type = other RNA
ggcgccactgcttactacct

SEQ ID NO: 2165 - RNA, 20 nt, synthetic construct
  source 1..20: mol_type = other RNA
ggcgccgagccttgcttgtc

SEQ ID NO: 2166 - RNA, 20 nt, synthetic construct
  source 1..20: mol_type = other RNA
ggcggagggatgcaggtggg

SEQ ID NO: 2167 - RNA, 20 nt, synthetic construct
  source 1..20: mol_type = other RNA
ggctaagctttcagggctct

SEQ ID NO: 2168 - RNA, 20 nt, synthetic construct
  source 1..20: mol_type = other RNA
ggctagcaagcagacggtgg

SEQ ID NO: 2169 - RNA, 20 nt, synthetic construct
  source 1..20: mol_type = other RNA
ggctatgaatgtcagaaagt

SEQ ID NO: 2170 - RNA, 20 nt, synthetic construct
  source 1..20: mol_type = other RNA
ggctatgagaaccccaccta

SEQ ID NO: 2171 - RNA, 20 nt, synthetic construct
  source 1..20: mol_type = other RNA
ggctcaggtctcccagcacc

SEQ ID NO: 2172 - RNA, 20 nt, synthetic construct
  source 1..20: mol_type = other RNA
ggctcattaaggtccttact

SEQ ID NO: 2173 - RNA, 20 nt, synthetic construct
  source 1..20: mol_type = other RNA
ggctcggcgccactgcttac

SEQ ID NO: 2174 - RNA, 20 nt, synthetic construct
  source 1..20: mol_type = other RNA
ggctctcgtttcgaaagcat

SEQ ID NO: 2175 - RNA, 20 nt, synthetic construct
  source 1..20: mol_type = other RNA
ggctgaagagttgacttaca

SEQ ID NO: 2176 - RNA, 20 nt, synthetic construct
  source 1..20: mol_type = other RNA
ggctgatttccaaaaacacg

SEQ ID NO: 2177 - RNA, 20 nt, synthetic construct
  source 1..20: mol_type = other RNA
ggctgcatttggtcctcagg

SEQ ID NO: 2178 - RNA, 20 nt, synthetic construct
  source 1..20: mol_type = other RNA
ggctgccgcgctccctgcca

SEQ ID NO: 2179 - RNA, 20 nt, synthetic construct
  source 1..20: mol_type = other RNA
ggctgcgtctgacatcctga

SEQ ID NO: 2180 - RNA, 20 nt, synthetic construct
  source 1..20: mol_type = other RNA
ggctgctgcttggcagtcga

SEQ ID NO: 2181 - RNA, 20 nt, synthetic construct
  source 1..20: mol_type = other RNA
ggctgctggctgcatttggt

SEQ ID NO: 2182 - RNA, 20 nt, synthetic construct
  source 1..20: mol_type = other RNA
ggctggatacctgtgtgtct

SEQ ID NO: 2183 - RNA, 20 nt, synthetic construct
  source 1..20: mol_type = other RNA
ggctggcccaggtagtaagc

SEQ ID NO: 2184 - RNA, 20 nt, synthetic construct
  source 1..20: mol_type = other RNA
ggctgggttgggggtgggaa

SEQ ID NO: 2185 - RNA, 20 nt, synthetic construct
  source 1..20: mol_type = other RNA
ggctgtcgttccggttatgt

SEQ ID NO: 2186 - RNA, 20 nt, synthetic construct
  source 1..20: mol_type = other RNA
ggctgttgccaactttcaac

SEQ ID NO: 2187 - RNA, 20 nt, synthetic construct
  source 1..20: mol_type = other RNA
ggcttgccttggctggccca

SEQ ID NO: 2188 - RNA, 20 nt, synthetic construct
  source 1..20: mol_type = other RNA
gggaaaggagcaacaggaaa

SEQ ID NO: 2189 - RNA, 20 nt, synthetic construct
  source 1..20: mol_type = other RNA
gggaaatcctatctctaata

SEQ ID NO: 2190 - RNA, 20 nt, synthetic construct
  source 1..20: mol_type = other RNA
gggaaatgtcgattttcaat

SEQ ID NO: 2191 - RNA, 20 nt, synthetic construct
  source 1..20: mol_type = other RNA
gggaaattagtgcagatgct

SEQ ID NO: 2192 - RNA, 20 nt, synthetic construct
  source 1..20: mol_type = other RNA
gggaacctgtggaattaata

SEQ ID NO: 2193 - RNA, 20 nt, synthetic construct
  source 1..20: mol_type = other RNA
gggaacgggctgctggctgc

SEQ ID NO: 2194 - RNA, 20 nt, synthetic construct
  source 1..20: mol_type = other RNA
gggaactgtaatggccactg

SEQ ID NO: 2195 - RNA, 20 nt, synthetic construct
  source 1..20: mol_type = other RNA
gggaagagacctgcacaggg

SEQ ID NO: 2196 - RNA, 20 nt, synthetic construct
  source 1..20: mol_type = other RNA
gggaatgtccagagtccctt

SEQ ID NO: 2197 - RNA, 20 nt, synthetic construct
  source 1..20: mol_type = other RNA
gggaccaggggatctctggt

SEQ ID NO: 2198 - RNA, 20 nt, synthetic construct
  source 1..20: mol_type = other RNA
gggactctggacattcccac

SEQ ID NO: 2199 - RNA, 20 nt, synthetic construct
  source 1..20: mol_type = other RNA
gggagacagaggttgcagtg

SEQ ID NO: 2200 - RNA, 20 nt, synthetic construct
  source 1..20: mol_type = other RNA
gggagacctgagccatttgc

SEQ ID NO: 2201 - RNA, 20 nt, synthetic construct
  source 1..20: mol_type = other RNA
gggatcaaagaggcaatgct

SEQ ID NO: 2202 - RNA, 20 nt, synthetic construct
  source 1..20: mol_type = other RNA
gggatcaagggactctggac

SEQ ID NO: 2203 - RNA, 20 nt, synthetic construct
  source 1..20: mol_type = other RNA
gggatctctggtctttttca

SEQ ID NO: 2204 - RNA, 20 nt, synthetic construct
  source 1..20: mol_type = other RNA
gggatcttccggcccacctg

SEQ ID NO: 2205 - RNA, 20 nt, synthetic construct
  source 1..20: mol_type = other RNA
gggatgcaggtgggccggaa

SEQ ID NO: 2206 - RNA, 20 nt, synthetic construct
  source 1..20: mol_type = other RNA
gggattgtgcagcaaatggc

SEQ ID NO: 2207 - RNA, 20 nt, synthetic construct
  source 1..20: mol_type = other RNA
gggccagccaaggcaagcca

SEQ ID NO: 2208 - RNA, 20 nt, synthetic construct
  source 1..20: mol_type = other RNA
gggccggaagatcccacgat

SEQ ID NO: 2209 - RNA, 20 nt, synthetic construct
  source 1..20: mol_type = other RNA
gggccttggctatgaatgtc

SEQ ID NO: 2210 - RNA, 20 nt, synthetic construct
  source 1..20: mol_type = other RNA
gggcgacacagcgagactgt

SEQ ID NO: 2211 - RNA, 20 nt, synthetic construct
  source 1..20: mol_type = other RNA
gggctaagctttcagggctc

SEQ ID NO: 2212 - RNA, 20 nt, synthetic construct
  source 1..20: mol_type = other RNA
gggctcattaaggtccttac

SEQ ID NO: 2213 - RNA, 20 nt, synthetic construct
  source 1..20: mol_type = other RNA
gggctctcgtttcgaaagca

SEQ ID NO: 2214 - RNA, 20 nt, synthetic construct
  source 1..20: mol_type = other RNA
gggctgatttccaaaaacac

SEQ ID NO: 2215 - RNA, 20 nt, synthetic construct
  source 1..20: mol_type = other RNA
gggctgcgtctgacatcctg

SEQ ID NO: 2216 - RNA, 20 nt, synthetic construct
  source 1..20: mol_type = other RNA
gggctgctggctgcatttgg

SEQ ID NO: 2217 - RNA, 20 nt, synthetic construct
  source 1..20: mol_type = other RNA
gggctgggttgggggtggga

SEQ ID NO: 2218 - RNA, 20 nt, synthetic construct
  source 1..20: mol_type = other RNA
gggctgttgccaactttcaa

SEQ ID NO: 2219 - RNA, 20 nt, synthetic construct
  source 1..20: mol_type = other RNA
ggggaaaggagcaacaggaa

SEQ ID NO: 2220 - RNA, 20 nt, synthetic construct
  source 1..20: mol_type = other RNA
ggggaaatcctatctctaat

SEQ ID NO: 2221 - RNA, 20 nt, synthetic construct
  source 1..20: mol_type = other RNA
ggggatcaaagaggcaatgc

SEQ ID NO: 2222 - RNA, 20 nt, synthetic construct
  source 1..20: mol_type = other RNA
ggggatcaagggactctgga

SEQ ID NO: 2223 - RNA, 20 nt, synthetic construct
  source 1..20: mol_type = other RNA
ggggatctctggtctttttc

SEQ ID NO: 2224 - RNA, 20 nt, synthetic construct
  source 1..20: mol_type = other RNA
ggggattgtgcagcaaatgg

SEQ ID NO: 2225 - RNA, 20 nt, synthetic construct
  source 1..20: mol_type = other RNA
ggggctgatttccaaaaaca

SEQ ID NO: 2226 - RNA, 20 nt, synthetic construct
  source 1..20: mol_type = other RNA
ggggctgcgtctgacatcct

SEQ ID NO: 2227 - RNA, 20 nt, synthetic construct
  source 1..20: mol_type = other RNA
ggggctgttgccaactttca

SEQ ID NO: 2228 - RNA, 20 nt, synthetic construct
  source 1..20: mol_type = other RNA
gggggaaaggagcaacagga

SEQ ID NO: 2229 - RNA, 20 nt, synthetic construct
  source 1..20: mol_type = other RNA
gggggtgggaacctgtggaa

SEQ ID NO: 2230 - RNA, 20 nt, synthetic construct
  source 1..20: mol_type = other RNA
ggggtgagcattggatcaac

SEQ ID NO: 2231 - RNA, 20 nt, synthetic construct
  source 1..20: mol_type = other RNA
ggggtggaatagggaactgt

SEQ ID NO: 2232 - RNA, 20 nt, synthetic construct
  source 1..20: mol_type = other RNA
ggggtgggaacctgtggaat

SEQ ID NO: 2233 - RNA, 20 nt, synthetic construct
  source 1..20: mol_type = other RNA
ggggttctcatagccatggt

SEQ ID NO: 2234 - RNA, 20 nt, synthetic construct
  source 1..20: mol_type = other RNA
ggggtttctgattaatttaa

SEQ ID NO: 2235 - RNA, 20 nt, synthetic construct
  source 1..20: mol_type = other RNA
gggtcattgtggtgtctggg

SEQ ID NO: 2236 - RNA, 20 nt, synthetic construct
  source 1..20: mol_type = other RNA
gggtctctcacgtgcttcag

SEQ ID NO: 2237 - RNA, 20 nt, synthetic construct
  source 1..20: mol_type = other RNA
gggtgaaaaatggtaatata

SEQ ID NO: 2238 - RNA, 20 nt, synthetic construct
  source 1..20: mol_type = other RNA
gggtgaaaactcttttctca

SEQ ID NO: 2239 - RNA, 20 nt, synthetic construct
  source 1..20: mol_type = other RNA
gggtgagcattggatcaacc

SEQ ID NO: 2240 - RNA, 20 nt, synthetic construct
  source 1..20: mol_type = other RNA
gggtgctgggagacctgagc

SEQ ID NO: 2241 - RNA, 20 nt, synthetic construct
  source 1..20: mol_type = other RNA
gggtggaatagggaactgta

SEQ ID NO: 2242 - RNA, 20 nt, synthetic construct
  source 1..20: mol_type = other RNA
gggtgggaacctgtggaatt

SEQ ID NO: 2243 - RNA, 20 nt, synthetic construct
  source 1..20: mol_type = other RNA
gggttctcatagccatggtt

SEQ ID NO: 2244 - RNA, 20 nt, synthetic construct
  source 1..20: mol_type = other RNA
gggttgggggtgggaacctg

SEQ ID NO: 2245 - RNA, 20 nt, synthetic construct
  source 1..20: mol_type = other RNA
gggtttctgattaatttaaa

SEQ ID NO: 2246 - RNA, 20 nt, synthetic construct
  source 1..20: mol_type = other RNA
ggtagtaagcagtggcgccg

SEQ ID NO: 2247 - RNA, 20 nt, synthetic construct
  source 1..20: mol_type = other RNA
ggtatccagccgtggaaaca

SEQ ID NO: 2248 - RNA, 20 nt, synthetic construct
  source 1..20: mol_type = other RNA
ggtatttgtaggtggggttc

SEQ ID NO: 2249 - RNA, 20 nt, synthetic construct
  source 1..20: mol_type = other RNA
ggtcaatatggggaaatcct

SEQ ID NO: 2250 - RNA, 20 nt, synthetic construct
  source 1..20: mol_type = other RNA
ggtcaggatgtcagacgcag

SEQ ID NO: 2251 - RNA, 20 nt, synthetic construct
  source 1..20: mol_type = other RNA
ggtcaggatttgagatcacc

SEQ ID NO: 2252 - RNA, 20 nt, synthetic construct
  source 1..20: mol_type = other RNA
ggtcattgtggtgtctggga

SEQ ID NO: 2253 - RNA, 20 nt, synthetic construct
  source 1..20: mol_type = other RNA
ggtcccaccgtctgcttgct

SEQ ID NO: 2254 - RNA, 20 nt, synthetic construct
  source 1..20: mol_type = other RNA
ggtcctcaggggattgtgca

SEQ ID NO: 2255 - RNA, 20 nt, synthetic construct
  source 1..20: mol_type = other RNA
ggtccttactgtatttatat

SEQ ID NO: 2256 - RNA, 20 nt, synthetic construct
  source 1..20: mol_type = other RNA
ggtcctttcacatcattttg

SEQ ID NO: 2257 - RNA, 20 nt, synthetic construct
  source 1..20: mol_type = other RNA
ggtcgtgtttttggaaatca

SEQ ID NO: 2258 - RNA, 20 nt, synthetic construct
  source 1..20: mol_type = other RNA
ggtctcccagcaccctgtgc

SEQ ID NO: 2259 - RNA, 20 nt, synthetic construct
  source 1..20: mol_type = other RNA
ggtctctcacgtgcttcagt

SEQ ID NO: 2260 - RNA, 20 nt, synthetic construct
  source 1..20: mol_type = other RNA
ggtctcttcccagacaccac

SEQ ID NO: 2261 - RNA, 20 nt, synthetic construct
  source 1..20: mol_type = other RNA
ggtcttagttatttgtgttt

SEQ ID NO: 2262 - RNA, 20 nt, synthetic construct
  source 1..20: mol_type = other RNA
ggtctttttcagttctgaaa

SEQ ID NO: 2263 - RNA, 20 nt, synthetic construct
  source 1..20: mol_type = other RNA
ggtgaaaaatggtaatataa

SEQ ID NO: 2264 - RNA, 20 nt, synthetic construct
  source 1..20: mol_type = other RNA
ggtgaaaactcttttctcag

SEQ ID NO: 2265 - RNA, 20 nt, synthetic construct
  source 1..20: mol_type = other RNA
ggtgaaacacaggagaaaga

SEQ ID NO: 2266 - RNA, 20 nt, synthetic construct
  source 1..20: mol_type = other RNA
ggtgacaagcaaggctcggc

SEQ ID NO: 2267 - RNA, 20 nt, synthetic construct
  source 1..20: mol_type = other RNA
ggtgacaggacttttatgga

SEQ ID NO: 2268 - RNA, 20 nt, synthetic construct
  source 1..20: mol_type = other RNA
ggtgacgctcttctggggtg

SEQ ID NO: 2269 - RNA, 20 nt, synthetic construct
  source 1..20: mol_type = other RNA
ggtgagcattggatcaacct

SEQ ID NO: 2270 - RNA, 20 nt, synthetic construct
  source 1..20: mol_type = other RNA
ggtgctaggaaatccagttg

SEQ ID NO: 2271 - RNA, 20 nt, synthetic construct
  source 1..20: mol_type = other RNA
ggtgctgggagacctgagcc

SEQ ID NO: 2272 - RNA, 20 nt, synthetic construct
  source 1..20: mol_type = other RNA
ggtggaatagggaactgtaa

SEQ ID NO: 2273 - RNA, 20 nt, synthetic construct
  source 1..20: mol_type = other RNA
ggtggcagggagcgcggcag

SEQ ID NO: 2274 - RNA, 20 nt, synthetic construct
  source 1..20: mol_type = other RNA
ggtgggaacctgtggaatta

SEQ ID NO: 2275 - RNA, 20 nt, synthetic construct
  source 1..20: mol_type = other RNA
ggtgggaacgggctgctggc

SEQ ID NO: 2276 - RNA, 20 nt, synthetic construct
  source 1..20: mol_type = other RNA
ggtgggaccaggggatctct

SEQ ID NO: 2277 - RNA, 20 nt, synthetic construct
  source 1..20: mol_type = other RNA
ggtgggccggaagatcccac

SEQ ID NO: 2278 - RNA, 20 nt, synthetic construct
  source 1..20: mol_type = other RNA
ggtggggttctcatagccat

SEQ ID NO: 2279 - RNA, 20 nt, synthetic construct
  source 1..20: mol_type = other RNA
ggtggtgaaacacaggagaa

SEQ ID NO: 2280 - RNA, 20 nt, synthetic construct
  source 1..20: mol_type = other RNA
ggtgtctgggaagagacctg

SEQ ID NO: 2281 - RNA, 20 nt, synthetic construct
  source 1..20: mol_type = other RNA
ggttactgaacttgtcttgc

SEQ ID NO: 2282 - RNA, 20 nt, synthetic construct
  source 1..20: mol_type = other RNA
ggttatgttgtgtaagtcaa

SEQ ID NO: 2283 - RNA, 20 nt, synthetic construct
  source 1..20: mol_type = other RNA
ggttcccacccccaacccag

SEQ ID NO: 2284 - RNA, 20 nt, synthetic construct
  source 1..20: mol_type = other RNA
ggttctcatagccatggttc

SEQ ID NO: 2285 - RNA, 20 nt, synthetic construct
  source 1..20: mol_type = other RNA
ggttctcatttggcctgtcc

SEQ ID NO: 2286 - RNA, 20 nt, synthetic construct
  source 1..20: mol_type = other RNA
ggttctgcatcttgttcagg

SEQ ID NO: 2287 - RNA, 20 nt, synthetic construct
  source 1..20: mol_type = other RNA
ggttgatccaatgctcaccc

SEQ ID NO: 2288 - RNA, 20 nt, synthetic construct
  source 1..20: mol_type = other RNA
ggttgggggtgggaacctgt

SEQ ID NO: 2289 - RNA, 20 nt, synthetic construct
  source 1..20: mol_type = other RNA
ggttttatctcctgctggag

SEQ ID NO: 2290 - RNA, 20 nt, synthetic construct
  source 1..20: mol_type = other RNA
ggttttgttcttccaggttg

SEQ ID NO: 2291 - RNA, 20 nt, synthetic construct
  source 1..20: mol_type = other RNA
ggttttttggagacagtctc

SEQ ID NO: 2292 - RNA, 20 nt, synthetic construct
  source 1..20: mol_type = other RNA
ggttttttggttttttggag

SEQ ID NO: 2293 - RNA, 20 nt, synthetic construct
  source 1..20: mol_type = other RNA
gtaaccagcagaagacagaa

SEQ ID NO: 2294 - RNA, 20 nt, synthetic construct
  source 1..20: mol_type = other RNA
gtaactgaactgataacagc

SEQ ID NO: 2295 - RNA, 20 nt, synthetic construct
  source 1..20: mol_type = other RNA
gtaactggccaggtgcagta

SEQ ID NO: 2296 - RNA, 20 nt, synthetic construct
  source 1..20: mol_type = other RNA
gtaagcagtggcgccgagcc

SEQ ID NO: 2297 - RNA, 20 nt, synthetic construct
  source 1..20: mol_type = other RNA
gtaaggaccttaatgagccc

SEQ ID NO: 2298 - RNA, 20 nt, synthetic construct
  source 1..20: mol_type = other RNA
gtaagtcaactcttcagcct

SEQ ID NO: 2299 - RNA, 20 nt, synthetic construct
  source 1..20: mol_type = other RNA
gtaatggccactgaagcacg

SEQ ID NO: 2300 - RNA, 20 nt, synthetic construct
  source 1..20: mol_type = other RNA
gtactactgtagaactgcaa

SEQ ID NO: 2301 - RNA, 20 nt, synthetic construct
  source 1..20: mol_type = other RNA
gtactcgaggagtgaagatg

SEQ ID NO: 2302 - RNA, 20 nt, synthetic construct
  source 1..20: mol_type = other RNA
gtactggacatgctgctgtt

SEQ ID NO: 2303 - RNA, 20 nt, synthetic construct
  source 1..20: mol_type = other RNA
gtactttatatagtcctaca

SEQ ID NO: 2304 - RNA, 20 nt, synthetic construct
  source 1..20: mol_type = other RNA
gtagaactgcaatttccatt

SEQ ID NO: 2305 - RNA, 20 nt, synthetic construct
  source 1..20: mol_type = other RNA
gtagaatttcagaactgaaa

SEQ ID NO: 2306 - RNA, 20 nt, synthetic construct
  source 1..20: mol_type = other RNA
gtagcataaaatgttcacat

SEQ ID NO: 2307 - RNA, 20 nt, synthetic construct
  source 1..20: mol_type = other RNA
gtaggactatataaagtact

SEQ ID NO: 2308 - RNA, 20 nt, synthetic construct
  source 1..20: mol_type = other RNA
gtaggctagcaagcagacgg

SEQ ID NO: 2309 - RNA, 20 nt, synthetic construct
  source 1..20: mol_type = other RNA
gtaggtggggttctcatagc

SEQ ID NO: 2310 - RNA, 20 nt, synthetic construct
  source 1..20: mol_type = other RNA
gtagtaagcagtggcgccga

SEQ ID NO: 2311 - RNA, 20 nt, synthetic construct
  source 1..20: mol_type = other RNA
gtagtactttatatagtcct

SEQ ID NO: 2312 - RNA, 20 nt, synthetic construct
  source 1..20: mol_type = other RNA
gtagtctcagctaggtggga

SEQ ID NO: 2313 - RNA, 20 nt, synthetic construct
  source 1..20: mol_type = other RNA
gtatacactaagctctctag

SEQ ID NO: 2314 - RNA, 20 nt, synthetic construct
  source 1..20: mol_type = other RNA
gtatccagccgtggaaacac

SEQ ID NO: 2315 - RNA, 20 nt, synthetic construct
  source 1..20: mol_type = other RNA
gtattccctttttaaatgag

SEQ ID NO: 2316 - RNA, 20 nt, synthetic construct
  source 1..20: mol_type = other RNA
gtattgtctgacacatgctc

SEQ ID NO: 2317 - RNA, 20 nt, synthetic construct
  source 1..20: mol_type = other RNA
gtatttatatttggggatca

SEQ ID NO: 2318 - RNA, 20 nt, synthetic construct
  source 1..20: mol_type = other RNA
gtatttgtaggtggggttct

SEQ ID NO: 2319 - RNA, 20 nt, synthetic construct
  source 1..20: mol_type = other RNA
gtatttttattagagatagg

SEQ ID NO: 2320 - RNA, 20 nt, synthetic construct
  source 1..20: mol_type = other RNA
gtcaactcttcagcctcatt

SEQ ID NO: 2321 - RNA, 20 nt, synthetic construct
  source 1..20: mol_type = other RNA
gtcaactggatttcctagca

SEQ ID NO: 2322 - RNA, 20 nt, synthetic construct
  source 1..20: mol_type = other RNA
gtcaatatggggaaatccta

SEQ ID NO: 2323 - RNA, 20 nt, synthetic construct
  source 1..20: mol_type = other RNA
gtcaccaaggacgttaaagg

SEQ ID NO: 2324 - RNA, 20 nt, synthetic construct
  source 1..20: mol_type = other RNA
gtcaccacggtgctaggaaa

SEQ ID NO: 2325 - RNA, 20 nt, synthetic construct
  source 1..20: mol_type = other RNA
gtcacctgaacaagatgcag

SEQ ID NO: 2326 - RNA, 20 nt, synthetic construct
  source 1..20: mol_type = other RNA
gtcagaaagtcatgtgaaca

SEQ ID NO: 2327 - RNA, 20 nt, synthetic construct
  source 1..20: mol_type = other RNA
gtcagacaatacaatggaag

SEQ ID NO: 2328 - RNA, 20 nt, synthetic construct
  source 1..20: mol_type = other RNA
gtcagacgcagcccctggca

SEQ ID NO: 2329 - RNA, 20 nt, synthetic construct
  source 1..20: mol_type = other RNA
gtcagcagtaggctagcaag

SEQ ID NO: 2330 - RNA, 20 nt, synthetic construct
  source 1..20: mol_type = other RNA
gtcaggatgtcagacgcagc

SEQ ID NO: 2331 - RNA, 20 nt, synthetic construct
  source 1..20: mol_type = other RNA
gtcaggatttgagatcaccc

SEQ ID NO: 2332 - RNA, 20 nt, synthetic construct
  source 1..20: mol_type = other RNA
gtcatcttccgtgagggcta

SEQ ID NO: 2333 - RNA, 20 nt, synthetic construct
  source 1..20: mol_type = other RNA
gtcatgtgaacattttatgc

SEQ ID NO: 2334 - RNA, 20 nt, synthetic construct
  source 1..20: mol_type = other RNA
gtcattgtggtgtctgggaa

SEQ ID NO: 2335 - RNA, 20 nt, synthetic construct
  source 1..20: mol_type = other RNA
gtccagagtcccttgatccc

SEQ ID NO: 2336 - RNA, 20 nt, synthetic construct
  source 1..20: mol_type = other RNA
gtccaggaggtcaggatgtc

SEQ ID NO: 2337 - RNA, 20 nt, synthetic construct
  source 1..20: mol_type = other RNA
gtccagtactcgaggagtga

SEQ ID NO: 2338 - RNA, 20 nt, synthetic construct
  source 1..20: mol_type = other RNA
gtccagtgtttccacggctg

SEQ ID NO: 2339 - RNA, 20 nt, synthetic construct
  source 1..20: mol_type = other RNA
gtcccaccgtctgcttgcta

SEQ ID NO: 2340 - RNA, 20 nt, synthetic construct
  source 1..20: mol_type = other RNA
gtcccttgatccccaaatat

SEQ ID NO: 2341 - RNA, 20 nt, synthetic construct
  source 1..20: mol_type = other RNA
gtccggtgggaacgggctgc

SEQ ID NO: 2342 - RNA, 20 nt, synthetic construct
  source 1..20: mol_type = other RNA
gtcctacagtccaggaggtc

SEQ ID NO: 2343 - RNA, 20 nt, synthetic construct
  source 1..20: mol_type = other RNA
gtcctcaggggattgtgcag

SEQ ID NO: 2344 - RNA, 20 nt, synthetic construct
  source 1..20: mol_type = other RNA
gtcctggcttttatttaaag

SEQ ID NO: 2345 - RNA, 20 nt, synthetic construct
  source 1..20: mol_type = other RNA
gtcctgtcaccaaggacgtt

SEQ ID NO: 2346 - RNA, 20 nt, synthetic construct
  source 1..20: mol_type = other RNA
gtccttactgtatttatatt

SEQ ID NO: 2347 - RNA, 20 nt, synthetic construct
  source 1..20: mol_type = other RNA
gtccttggtgacaggacttt

SEQ ID NO: 2348 - RNA, 20 nt, synthetic construct
  source 1..20: mol_type = other RNA
gtcctttcacatcattttgc

SEQ ID NO: 2349 - RNA, 20 nt, synthetic construct
  source 1..20: mol_type = other RNA
gtcgatcggaatcgtgggat

SEQ ID NO: 2350 - RNA, 20 nt, synthetic construct
  source 1..20: mol_type = other RNA
gtcgattttcaataatagac

SEQ ID NO: 2351 - RNA, 20 nt, synthetic construct
  source 1..20: mol_type = other RNA
gtcgtgtttttggaaatcag

SEQ ID NO: 2352 - RNA, 20 nt, synthetic construct
  source 1..20: mol_type = other RNA
gtcgttccggttatgttgtg

SEQ ID NO: 2353 - RNA, 20 nt, synthetic construct
  source 1..20: mol_type = other RNA
gtctattattgaaaatcgac

SEQ ID NO: 2354 - RNA, 20 nt, synthetic construct
  source 1..20: mol_type = other RNA
gtctcagctaggtgggaggc

SEQ ID NO: 2355 - RNA, 20 nt, synthetic construct
  source 1..20: mol_type = other RNA
gtctccaaaaaaccaaaaaa

SEQ ID NO: 2356 - RNA, 20 nt, synthetic construct
  source 1..20: mol_type = other RNA
gtctccagcaggagataaaa

SEQ ID NO: 2357 - RNA, 20 nt, synthetic construct
  source 1..20: mol_type = other RNA
gtctccataaaagtcctgtc

SEQ ID NO: 2358 - RNA, 20 nt, synthetic construct
  source 1..20: mol_type = other RNA
gtctcccagcaccctgtgca

SEQ ID NO: 2359 - RNA, 20 nt, synthetic construct
  source 1..20: mol_type = other RNA
gtctctcacgtgcttcagtg

SEQ ID NO: 2360 - RNA, 20 nt, synthetic construct
  source 1..20: mol_type = other RNA
gtctcttcccagacaccaca

SEQ ID NO: 2361 - RNA, 20 nt, synthetic construct
  source 1..20: mol_type = other RNA
gtctgacacatgctctcaat

SEQ ID NO: 2362 - RNA, 20 nt, synthetic construct
  source 1..20: mol_type = other RNA
gtctgacatcctgacctcct

SEQ ID NO: 2363 - RNA, 20 nt, synthetic construct
  source 1..20: mol_type = other RNA
gtctgcttcagcactttcta

SEQ ID NO: 2364 - RNA, 20 nt, synthetic construct
  source 1..20: mol_type = other RNA
gtctgcttgctagcctactg

SEQ ID NO: 2365 - RNA, 20 nt, synthetic construct
  source 1..20: mol_type = other RNA
gtctgggaagagacctgcac

SEQ ID NO: 2366 - RNA, 20 nt, synthetic construct
  source 1..20: mol_type = other RNA
gtcttagttatttgtgtttt

SEQ ID NO: 2367 - RNA, 20 nt, synthetic construct
  source 1..20: mol_type = other RNA
gtcttctagagagcttagtg

SEQ ID NO: 2368 - RNA, 20 nt, synthetic construct
  source 1..20: mol_type = other RNA
gtcttctgctggttactgaa

SEQ ID NO: 2369 - RNA, 20 nt, synthetic construct
  source 1..20: mol_type = other RNA
gtcttgccactcactcctta

SEQ ID NO: 2370 - RNA, 20 nt, synthetic construct
  source 1..20: mol_type = other RNA
gtctttttcagttctgaaat

SEQ ID NO: 2371 - RNA, 20 nt, synthetic construct
  source 1..20: mol_type = other RNA
gtgaaaaatggtaatataac

SEQ ID NO: 2372 - RNA, 20 nt, synthetic construct
  source 1..20: mol_type = other RNA
gtgaaaactcttttctcaga

SEQ ID NO: 2373 - RNA, 20 nt, synthetic construct
  source 1..20: mol_type = other RNA
gtgaaacacaggagaaagaa

SEQ ID NO: 2374 - RNA, 20 nt, synthetic construct
  source 1..20: mol_type = other RNA
gtgaaaggaccagtttcttg

SEQ ID NO: 2375 - RNA, 20 nt, synthetic construct
  source 1..20: mol_type = other RNA
gtgaacagtgggaatgtcca

SEQ ID NO: 2376 - RNA, 20 nt, synthetic construct
  source 1..20: mol_type = other RNA
gtgaacattttatgctacag

SEQ ID NO: 2377 - RNA, 20 nt, synthetic construct
  source 1..20: mol_type = other RNA
gtgaagatgcctattaattc

SEQ ID NO: 2378 - RNA, 20 nt, synthetic construct
  source 1..20: mol_type = other RNA
gtgaatgaggctgaagagtt

SEQ ID NO: 2379 - RNA, 20 nt, synthetic construct
  source 1..20: mol_type = other RNA
gtgacaagcaaggctcggcg

SEQ ID NO: 2380 - RNA, 20 nt, synthetic construct
  source 1..20: mol_type = other RNA
gtgacaggacttttatggag

SEQ ID NO: 2381 - RNA, 20 nt, synthetic construct
  source 1..20: mol_type = other RNA
gtgacgctcttctggggtga

SEQ ID NO: 2382 - RNA, 20 nt, synthetic construct
  source 1..20: mol_type = other RNA
gtgagagaccctcgcaaaat

SEQ ID NO: 2383 - RNA, 20 nt, synthetic construct
  source 1..20: mol_type = other RNA
gtgagcattggatcaacctg

SEQ ID NO: 2384 - RNA, 20 nt, synthetic construct
  source 1..20: mol_type = other RNA
gtgagggctaagctttcagg

SEQ ID NO: 2385 - RNA, 20 nt, synthetic construct
  source 1..20: mol_type = other RNA
gtgagtaactgaactgataa

SEQ ID NO: 2386 - RNA, 20 nt, synthetic construct
  source 1..20: mol_type = other RNA
gtgagtggcaagacaagttc

SEQ ID NO: 2387 - RNA, 20 nt, synthetic construct
  source 1..20: mol_type = other RNA
gtgcagatgctggtcttagt

SEQ ID NO: 2388 - RNA, 20 nt, synthetic construct
  source 1..20: mol_type = other RNA
gtgcagcaaatggctcaggt

SEQ ID NO: 2389 - RNA, 20 nt, synthetic construct
  source 1..20: mol_type = other RNA
gtgcaggtctcttcccagac

SEQ ID NO: 2390 - RNA, 20 nt, synthetic construct
  source 1..20: mol_type = other RNA
gtgccaccacgcccagctag

SEQ ID NO: 2391 - RNA, 20 nt, synthetic construct
  source 1..20: mol_type = other RNA
gtgcctcagcctcccaccta

SEQ ID NO: 2392 - RNA, 20 nt, synthetic construct
  source 1..20: mol_type = other RNA
gtgctaggaaatccagttga

SEQ ID NO: 2393 - RNA, 20 nt, synthetic construct
  source 1..20: mol_type = other RNA
gtgctgaagcagactgtttc

SEQ ID NO: 2394 - RNA, 20 nt, synthetic construct
  source 1..20: mol_type = other RNA
gtgctgggagacctgagcca

SEQ ID NO: 2395 - RNA, 20 nt, synthetic construct
  source 1..20: mol_type = other RNA
gtgcttcagtggccattaca

SEQ ID NO: 2396 - RNA, 20 nt, synthetic construct
  source 1..20: mol_type = other RNA
gtggaaacactggacttcaa

SEQ ID NO: 2397 - RNA, 20 nt, synthetic construct
  source 1..20: mol_type = other RNA
gtggaatagggaactgtaat

SEQ ID NO: 2398 - RNA, 20 nt, synthetic construct
  source 1..20: mol_type = other RNA
gtggaattaataggcatctt

SEQ ID NO: 2399 - RNA, 20 nt, synthetic construct
  source 1..20: mol_type = other RNA
gtggcaagacaagttcagta

SEQ ID NO: 2400 - RNA, 20 nt, synthetic construct
  source 1..20: mol_type = other RNA
gtggcagggagcgcggcagc

SEQ ID NO: 2401 - RNA, 20 nt, synthetic construct
  source 1..20: mol_type = other RNA
gtggcaggggctgatttcca

SEQ ID NO: 2402 - RNA, 20 nt, synthetic construct
  source 1..20: mol_type = other RNA
gtggccattacagttcccta

SEQ ID NO: 2403 - RNA, 20 nt, synthetic construct
  source 1..20: mol_type = other RNA
gtggcgccgagccttgcttg

SEQ ID NO: 2404 - RNA, 20 nt, synthetic construct
  source 1..20: mol_type = other RNA
gtgggaacctgtggaattaa

SEQ ID NO: 2405 - RNA, 20 nt, synthetic construct
  source 1..20: mol_type = other RNA
gtgggaacgggctgctggct

SEQ ID NO: 2406 - RNA, 20 nt, synthetic construct
  source 1..20: mol_type = other RNA
gtgggaatgtccagagtccc

SEQ ID NO: 2407 - RNA, 20 nt, synthetic construct
  source 1..20: mol_type = other RNA
gtgggaccaggggatctctg

SEQ ID NO: 2408 - RNA, 20 nt, synthetic construct
  source 1..20: mol_type = other RNA
gtgggatcttccggcccacc

SEQ ID NO: 2409 - RNA, 20 nt, synthetic construct
  source 1..20: mol_type = other RNA
gtgggccggaagatcccacg

SEQ ID NO: 2410 - RNA, 20 nt, synthetic construct
  source 1..20: mol_type = other RNA
gtgggctgggttgggggtgg

SEQ ID NO: 2411 - RNA, 20 nt, synthetic construct
  source 1..20: mol_type = other RNA
gtggggttctcatagccatg

SEQ ID NO: 2412 - RNA, 20 nt, synthetic construct
  source 1..20: mol_type = other RNA
gtggggtttctgattaattt

SEQ ID NO: 2413 - RNA, 20 nt, synthetic construct
  source 1..20: mol_type = other RNA
gtggtgaaacacaggagaaa

SEQ ID NO: 2414 - RNA, 20 nt, synthetic construct
  source 1..20: mol_type = other RNA
gtggtgacaagcaaggctcg

SEQ ID NO: 2415 - RNA, 20 nt, synthetic construct
  source 1..20: mol_type = other RNA
gtggtgtctgggaagagacc

SEQ ID NO: 2416 - RNA, 20 nt, synthetic construct
  source 1..20: mol_type = other RNA
gtgtaagtcaactcttcagc

SEQ ID NO: 2417 - RNA, 20 nt, synthetic construct
  source 1..20: mol_type = other RNA
gtgtcagacaatacaatgga

SEQ ID NO: 2418 - RNA, 20 nt, synthetic construct
  source 1..20: mol_type = other RNA
gtgtctccataaaagtcctg

SEQ ID NO: 2419 - RNA, 20 nt, synthetic construct
  source 1..20: mol_type = other RNA
gtgtctgggaagagacctgc

SEQ ID NO: 2420 - RNA, 20 nt, synthetic construct
  source 1..20: mol_type = other RNA
gtgtgtctccataaaagtcc

SEQ ID NO: 2421 - RNA, 20 nt, synthetic construct
  source 1..20: mol_type = other RNA
gtgtgtgccaccacgcccag

SEQ ID NO: 2422 - RNA, 20 nt, synthetic construct
  source 1..20: mol_type = other RNA
gtgttcctttttccaggtat

SEQ ID NO: 2423 - RNA, 20 nt, synthetic construct
  source 1..20: mol_type = other RNA
gtgtttcaccaccggttctc

SEQ ID NO: 2424 - RNA, 20 nt, synthetic construct
  source 1..20: mol_type = other RNA
gtgtttccacggctggatac

SEQ ID NO: 2425 - RNA, 20 nt, synthetic construct
  source 1..20: mol_type = other RNA
gtgtttttggaaatcagccc

SEQ ID NO: 2426 - RNA, 20 nt, synthetic construct
  source 1..20: mol_type = other RNA
gttaaaggcattttattcca

SEQ ID NO: 2427 - RNA, 20 nt, synthetic construct
  source 1..20: mol_type = other RNA
gttactcactggattcctag

SEQ ID NO: 2428 - RNA, 20 nt, synthetic construct
  source 1..20: mol_type = other RNA
gttactgaacttgtcttgcc

SEQ ID NO: 2429 - RNA, 20 nt, synthetic construct
  source 1..20: mol_type = other RNA
gttacttggttttatctcct

SEQ ID NO: 2430 - RNA, 20 nt, synthetic construct
  source 1..20: mol_type = other RNA
gttatattaccatttttcac

SEQ ID NO: 2431 - RNA, 20 nt, synthetic construct
  source 1..20: mol_type = other RNA
gttatcagttcagttactca

SEQ ID NO: 2432 - RNA, 20 nt, synthetic construct
  source 1..20: mol_type = other RNA
gttatgttgtgtaagtcaac

SEQ ID NO: 2433 - RNA, 20 nt, synthetic construct
  source 1..20: mol_type = other RNA
gttcacatgactttctgaca

SEQ ID NO: 2434 - RNA, 20 nt, synthetic construct
  source 1..20: mol_type = other RNA
gttcactaaggagtgagtgg

SEQ ID NO: 2435 - RNA, 20 nt, synthetic construct
  source 1..20: mol_type = other RNA
gttcaggtgacgctcttctg

SEQ ID NO: 2436 - RNA, 20 nt, synthetic construct
  source 1..20: mol_type = other RNA
gttcagtaaccagcagaaga

SEQ ID NO: 2437 - RNA, 20 nt, synthetic construct
  source 1..20: mol_type = other RNA
gttcagttactcactggatt

SEQ ID NO: 2438 - RNA, 20 nt, synthetic construct
  source 1..20: mol_type = other RNA
gttcccaccggacaggccaa

SEQ ID NO: 2439 - RNA, 20 nt, synthetic construct
  source 1..20: mol_type = other RNA
gttccctattccaccccatt

SEQ ID NO: 2440 - RNA, 20 nt, synthetic construct
  source 1..20: mol_type = other RNA
gttccggttatgttgtgtaa

SEQ ID NO: 2441 - RNA, 20 nt, synthetic construct
  source 1..20: mol_type = other RNA
gttcctttttccaggtattt

SEQ ID NO: 2442 - RNA, 20 nt, synthetic construct
  source 1..20: mol_type = other RNA
gttctacagtagtactttat

SEQ ID NO: 2443 - RNA, 20 nt, synthetic construct
  source 1..20: mol_type = other RNA
gttctcatagccatggttct

SEQ ID NO: 2444 - RNA, 20 nt, synthetic construct
  source 1..20: mol_type = other RNA
gttctcatttggcctgtccg

SEQ ID NO: 2445 - RNA, 20 nt, synthetic construct
  source 1..20: mol_type = other RNA
gttctgaaattctacagcta

SEQ ID NO: 2446 - RNA, 20 nt, synthetic construct
  source 1..20: mol_type = other RNA
gttctgcatcttgttcaggt

SEQ ID NO: 2447 - RNA, 20 nt, synthetic construct
  source 1..20: mol_type = other RNA
gttctgtcttctgctggtta

SEQ ID NO: 2448 - RNA, 20 nt, synthetic construct
  source 1..20: mol_type = other RNA
gttcttccaggttgatccaa

SEQ ID NO: 2449 - RNA, 20 nt, synthetic construct
  source 1..20: mol_type = other RNA
gttgaaagttggcaacagcc

SEQ ID NO: 2450 - RNA, 20 nt, synthetic construct
  source 1..20: mol_type = other RNA
gttgactgtcatcttccgtg

SEQ ID NO: 2451 - RNA, 20 nt, synthetic construct
  source 1..20: mol_type = other RNA
gttgacttacacaacataac

SEQ ID NO: 2452 - RNA, 20 nt, synthetic construct
  source 1..20: mol_type = other RNA
gttgatccaatgctcacccc

SEQ ID NO: 2453 - RNA, 20 nt, synthetic construct
  source 1..20: mol_type = other RNA
gttgccaactttcaacatta

SEQ ID NO: 2454 - RNA, 20 nt, synthetic construct
  source 1..20: mol_type = other RNA
gttgctcctttcccccatta

SEQ ID NO: 2455 - RNA, 20 nt, synthetic construct
  source 1..20: mol_type = other RNA
gttgctgagaaatggggtgg

SEQ ID NO: 2456 - RNA, 20 nt, synthetic construct
  source 1..20: mol_type = other RNA
gttggcaacagccccttgtg

SEQ ID NO: 2457 - RNA, 20 nt, synthetic construct
  source 1..20: mol_type = other RNA
gttgggggtgggaacctgtg

SEQ ID NO: 2458 - RNA, 20 nt, synthetic construct
  source 1..20: mol_type = other RNA
gttgtgtaagtcaactcttc

SEQ ID NO: 2459 - RNA, 20 nt, synthetic construct
  source 1..20: mol_type = other RNA
gtttcaccaccggttctcat

SEQ ID NO: 2460 - RNA, 20 nt, synthetic construct
  source 1..20: mol_type = other RNA
gtttccacggctggatacct

SEQ ID NO: 2461 - RNA, 20 nt, synthetic construct
  source 1..20: mol_type = other RNA
gtttcgaaagcattgcctct

SEQ ID NO: 2462 - RNA, 20 nt, synthetic construct
  source 1..20: mol_type = other RNA
gtttctgttctgtcttctgc

SEQ ID NO: 2463 - RNA, 20 nt, synthetic construct
  source 1..20: mol_type = other RNA
gtttcttgaagtccagtgtt

SEQ ID NO: 2464 - RNA, 20 nt, synthetic construct
  source 1..20: mol_type = other RNA
gtttgggccttggctatgaa

SEQ ID NO: 2465 - RNA, 20 nt, synthetic construct
  source 1..20: mol_type = other RNA
gtttgttttggttttttggt

SEQ ID NO: 2466 - RNA, 20 nt, synthetic construct
  source 1..20: mol_type = other RNA
gttttatctcctgctggaga

SEQ ID NO: 2467 - RNA, 20 nt, synthetic construct
  source 1..20: mol_type = other RNA
gttttcaccctctgtagcat

SEQ ID NO: 2468 - RNA, 20 nt, synthetic construct
  source 1..20: mol_type = other RNA
gttttggttttttggttttt

SEQ ID NO: 2469 - RNA, 20 nt, synthetic construct
  source 1..20: mol_type = other RNA
gttttgttcttccaggttga

SEQ ID NO: 2470 - RNA, 20 nt, synthetic construct
  source 1..20: mol_type = other RNA
gtttttggaaatcagcccct

SEQ ID NO: 2471 - RNA, 20 nt, synthetic construct
  source 1..20: mol_type = other RNA
gttttttggagacagtctcg

SEQ ID NO: 2472 - RNA, 20 nt, synthetic construct
  source 1..20: mol_type = other RNA
gttttttggttttttggaga

SEQ ID NO: 2473 - RNA, 20 nt, synthetic construct
  source 1..20: mol_type = other RNA
taaaaagggaatactgcctt

SEQ ID NO: 2474 - RNA, 20 nt, synthetic construct
  source 1..20: mol_type = other RNA
taaaaatacaaagactagct

SEQ ID NO: 2475 - RNA, 20 nt, synthetic construct
  source 1..20: mol_type = other RNA
taaaaccaagtaactggcca

SEQ ID NO: 2476 - RNA, 20 nt, synthetic construct
  source 1..20: mol_type = other RNA
taaaagaatggaaattgcag

SEQ ID NO: 2477 - RNA, 20 nt, synthetic construct
  source 1..20: mol_type = other RNA
taaaagccaggacagtgaat

SEQ ID NO: 2478 - RNA, 20 nt, synthetic construct
  source 1..20: mol_type = other RNA
taaaagtcctgtcaccaagg

SEQ ID NO: 2479 - RNA, 20 nt, synthetic construct
  source 1..20: mol_type = other RNA
taaaatgcctttaacgtcct

SEQ ID NO: 2480 - RNA, 20 nt, synthetic construct
  source 1..20: mol_type = other RNA
taaaatgttcacatgacttt

SEQ ID NO: 2481 - RNA, 20 nt, synthetic construct
  source 1..20: mol_type = other RNA
taaaggcattttattccagc

SEQ ID NO: 2482 - RNA, 20 nt, synthetic construct
  source 1..20: mol_type = other RNA
taaagtactactgtagaact

SEQ ID NO: 2483 - RNA, 20 nt, synthetic construct
  source 1..20: mol_type = other RNA
taaataaaagccaggacagt

SEQ ID NO: 2484 - RNA, 20 nt, synthetic construct
  source 1..20: mol_type = other RNA
taaatacagtaaggacctta

SEQ ID NO: 2485 - RNA, 20 nt, synthetic construct
  source 1..20: mol_type = other RNA
taaatctgcatctgctccag

SEQ ID NO: 2486 - RNA, 20 nt, synthetic construct
  source 1..20: mol_type = other RNA
taaatgagctttcaggaagt

SEQ ID NO: 2487 - RNA, 20 nt, synthetic construct
  source 1..20: mol_type = other RNA
taaatgggaaatgtcgattt

SEQ ID NO: 2488 - RNA, 20 nt, synthetic construct
  source 1..20: mol_type = other RNA
taaatgggtgaaaaatggta

SEQ ID NO: 2489 - RNA, 20 nt, synthetic construct
  source 1..20: mol_type = other RNA
taaattaatcagaaacccca

SEQ ID NO: 2490 - RNA, 20 nt, synthetic construct
  source 1..20: mol_type = other RNA
taaatttcctgttgctcctt

SEQ ID NO: 2491 - RNA, 20 nt, synthetic construct
  source 1..20: mol_type = other RNA
taacagcagcatgtccagta

SEQ ID NO: 2492 - RNA, 20 nt, synthetic construct
  source 1..20: mol_type = other RNA
taaccagcagaagacagaac

SEQ ID NO: 2493 - RNA, 20 nt, synthetic construct
  source 1..20: mol_type = other RNA
taaccggaacgacagcctgc

SEQ ID NO: 2494 - RNA, 20 nt, synthetic construct
  source 1..20: mol_type = other RNA
taacgtccttggtgacagga

SEQ ID NO: 2495 - RNA, 20 nt, synthetic construct
  source 1..20: mol_type = other RNA
taactaagaccagcatctgc

SEQ ID NO: 2496 - RNA, 20 nt, synthetic construct
  source 1..20: mol_type = other RNA
taactgaactgataacagca

SEQ ID NO: 2497 - RNA, 20 nt, synthetic construct
  source 1..20: mol_type = other RNA
taactggccaggtgcagtag

SEQ ID NO: 2498 - RNA, 20 nt, synthetic construct
  source 1..20: mol_type = other RNA
taagaccagcatctgcacta

SEQ ID NO: 2499 - RNA, 20 nt, synthetic construct
  source 1..20: mol_type = other RNA
taagcagtggcgccgagcct

SEQ ID NO: 2500 - RNA, 20 nt, synthetic construct
  source 1..20: mol_type = other RNA
taagctctctagaagacgct

SEQ ID NO: 2501 - RNA, 20 nt, synthetic construct
  source 1..20: mol_type = other RNA
taagctttcagggctctcgt

SEQ ID NO: 2502 - RNA, 20 nt, synthetic construct
  source 1..20: mol_type = other RNA
taaggaaataatctgagaaa

SEQ ID NO: 2503 - RNA, 20 nt, synthetic construct
  source 1..20: mol_type = other RNA
taaggaccttaatgagccct

SEQ ID NO: 2504 - RNA, 20 nt, synthetic construct
  source 1..20: mol_type = other RNA
taaggagtgagtggcaagac

SEQ ID NO: 2505 - RNA, 20 nt, synthetic construct
  source 1..20: mol_type = other RNA
taaggggatcaaagaggcaa

SEQ ID NO: 2506 - RNA, 20 nt, synthetic construct
  source 1..20: mol_type = other RNA
taaggtccttactgtattta

SEQ ID NO: 2507 - RNA, 20 nt, synthetic construct
  source 1..20: mol_type = other RNA
taagtcaactcttcagcctc

SEQ ID NO: 2508 - RNA, 20 nt, synthetic construct
  source 1..20: mol_type = other RNA
taataaatgggaaatgtcga

SEQ ID NO: 2509 - RNA, 20 nt, synthetic construct
  source 1..20: mol_type = other RNA
taatagacttatatgcaggc

SEQ ID NO: 2510 - RNA, 20 nt, synthetic construct
  source 1..20: mol_type = other RNA
taataggcatcttcactcct

SEQ ID NO: 2511 - RNA, 20 nt, synthetic construct
  source 1..20: mol_type = other RNA
taatcagaaaccccacttcc

SEQ ID NO: 2512 - RNA, 20 nt, synthetic construct
  source 1..20: mol_type = other RNA
taatctgagaaaagagtttt

SEQ ID NO: 2513 - RNA, 20 nt, synthetic construct
  source 1..20: mol_type = other RNA
taatgagccctgggaaatta

SEQ ID NO: 2514 - RNA, 20 nt, synthetic construct
  source 1..20: mol_type = other RNA
taatggccactgaagcacgt

SEQ ID NO: 2515 - RNA, 20 nt, synthetic construct
  source 1..20: mol_type = other RNA
taatgggggaaaggagcaac

SEQ ID NO: 2516 - RNA, 20 nt, synthetic construct
  source 1..20: mol_type = other RNA
taatgttgaaagttggcaac

SEQ ID NO: 2517 - RNA, 20 nt, synthetic construct
  source 1..20: mol_type = other RNA
taattccacaggttcccacc

SEQ ID NO: 2518 - RNA, 20 nt, synthetic construct
  source 1..20: mol_type = other RNA
taatttcccagggctcatta

SEQ ID NO: 2519 - RNA, 20 nt, synthetic construct
  source 1..20: mol_type = other RNA
tacaaagactagctgggcgt

SEQ ID NO: 2520 - RNA, 20 nt, synthetic construct
  source 1..20: mol_type = other RNA
tacaaatacctggagcagat

SEQ ID NO: 2521 - RNA, 20 nt, synthetic construct
  source 1..20: mol_type = other RNA
tacaatggaagtggggtttc

SEQ ID NO: 2522 - RNA, 20 nt, synthetic construct
  source 1..20: mol_type = other RNA
tacacaacataaccggaacg

SEQ ID NO: 2523 - RNA, 20 nt, synthetic construct
  source 1..20: mol_type = other RNA
tacactaagctctctagaag

SEQ ID NO: 2524 - RNA, 20 nt, synthetic construct
  source 1..20: mol_type = other RNA
tacagagggtgaaaactctt

SEQ ID NO: 2525 - RNA, 20 nt, synthetic construct
  source 1..20: mol_type = other RNA
tacagctaggccagtctcca

SEQ ID NO: 2526 - RNA, 20 nt, synthetic construct
  source 1..20: mol_type = other RNA
tacagtaaggaccttaatga

SEQ ID NO: 2527 - RNA, 20 nt, synthetic construct
  source 1..20: mol_type = other RNA
tacagtagtactttatatag

SEQ ID NO: 2528 - RNA, 20 nt, synthetic construct
  source 1..20: mol_type = other RNA
tacagtccaggaggtcagga

SEQ ID NO: 2529 - RNA, 20 nt, synthetic construct
  source 1..20: mol_type = other RNA
tacagttccctattccaccc

SEQ ID NO: 2530 - RNA, 20 nt, synthetic construct
  source 1..20: mol_type = other RNA
tacatcaaatatctgcaata

SEQ ID NO: 2531 - RNA, 20 nt, synthetic construct
  source 1..20: mol_type = other RNA
taccatttttcacccattta

SEQ ID NO: 2532 - RNA, 20 nt, synthetic construct
  source 1..20: mol_type = other RNA
tacctggaaaaaggaacact

SEQ ID NO: 2533 - RNA, 20 nt, synthetic construct
  source 1..20: mol_type = other RNA
tacctggagcagatgcagat

SEQ ID NO: 2534 - RNA, 20 nt, synthetic construct
  source 1..20: mol_type = other RNA
tacctgggccagccaaggca

SEQ ID NO: 2535 - RNA, 20 nt, synthetic construct
  source 1..20: mol_type = other RNA
tacctgtgtgtctccataaa

SEQ ID NO: 2536 - RNA, 20 nt, synthetic construct
  source 1..20: mol_type = other RNA
tactacctgggccagccaag

SEQ ID NO: 2537 - RNA, 20 nt, synthetic construct
  source 1..20: mol_type = other RNA
tactactgtagaactgcaat

SEQ ID NO: 2538 - RNA, 20 nt, synthetic construct
  source 1..20: mol_type = other RNA
tactcactggattcctaggt

SEQ ID NO: 2539 - RNA, 20 nt, synthetic construct
  source 1..20: mol_type = other RNA
tactcgaggagtgaagatgc

SEQ ID NO: 2540 - RNA, 20 nt, synthetic construct
  source 1..20: mol_type = other RNA
tactgaacttgtcttgccac

SEQ ID NO: 2541 - RNA, 20 nt, synthetic construct
  source 1..20: mol_type = other RNA
tactgcacctggccagttac

SEQ ID NO: 2542 - RNA, 20 nt, synthetic construct
  source 1..20: mol_type = other RNA
tactgctgactggcttgcct

SEQ ID NO: 2543 - RNA, 20 nt, synthetic construct
  source 1..20: mol_type = other RNA
tactggacatgctgctgtta

SEQ ID NO: 2544 - RNA, 20 nt, synthetic construct
  source 1..20: mol_type = other RNA
tactgtagaactgcaatttc

SEQ ID NO: 2545 - RNA, 20 nt, synthetic construct
  source 1..20: mol_type = other RNA
tactgtatttatatttgggg

SEQ ID NO: 2546 - RNA, 20 nt, synthetic construct
  source 1..20: mol_type = other RNA
tacttggttttatctcctgc

SEQ ID NO: 2547 - RNA, 20 nt, synthetic construct
  source 1..20: mol_type = other RNA
tactttatatagtcctacag

SEQ ID NO: 2548 - RNA, 20 nt, synthetic construct
  source 1..20: mol_type = other RNA
tagaaagtgctgaagcagac

SEQ ID NO: 2549 - RNA, 20 nt, synthetic construct
  source 1..20: mol_type = other RNA
tagaactgcaatttccattc

SEQ ID NO: 2550 - RNA, 20 nt, synthetic construct
  source 1..20: mol_type = other RNA
tagaagacgctggaataaaa

SEQ ID NO: 2551 - RNA, 20 nt, synthetic construct
  source 1..20: mol_type = other RNA
tagaatttcagaactgaaaa

SEQ ID NO: 2552 - RNA, 20 nt, synthetic construct
  source 1..20: mol_type = other RNA
tagacttatatgcaggctgt

SEQ ID NO: 2553 - RNA, 20 nt, synthetic construct
  source 1..20: mol_type = other RNA
tagagagcttagtgtataca

SEQ ID NO: 2554 - RNA, 20 nt, synthetic construct
  source 1..20: mol_type = other RNA
tagagataggatttccccat

SEQ ID NO: 2555 - RNA, 20 nt, synthetic construct
  source 1..20: mol_type = other RNA
tagcaagcagacggtgggac

SEQ ID NO: 2556 - RNA, 20 nt, synthetic construct
  source 1..20: mol_type = other RNA
tagcaccgtggtgacaagca

SEQ ID NO: 2557 - RNA, 20 nt, synthetic construct
  source 1..20: mol_type = other RNA
tagcataaaatgttcacatg

SEQ ID NO: 2558 - RNA, 20 nt, synthetic construct
  source 1..20: mol_type = other RNA
tagccaaggcccaaactaat

SEQ ID NO: 2559 - RNA, 20 nt, synthetic construct
  source 1..20: mol_type = other RNA
tagccatggttctgcatctt

SEQ ID NO: 2560 - RNA, 20 nt, synthetic construct
  source 1..20: mol_type = other RNA
tagccctcacggaagatgac

SEQ ID NO: 2561 - RNA, 20 nt, synthetic construct
  source 1..20: mol_type = other RNA
tagcctactgctgactggct

SEQ ID NO: 2562 - RNA, 20 nt, synthetic construct
  source 1..20: mol_type = other RNA
tagctgtagaatttcagaac

SEQ ID NO: 2563 - RNA, 20 nt, synthetic construct
  source 1..20: mol_type = other RNA
taggaaatccagttgactgt

SEQ ID NO: 2564 - RNA, 20 nt, synthetic construct
  source 1..20: mol_type = other RNA
taggaatccagtgagtaact

SEQ ID NO: 2565 - RNA, 20 nt, synthetic construct
  source 1..20: mol_type = other RNA
taggactatataaagtacta

SEQ ID NO: 2566 - RNA, 20 nt, synthetic construct
  source 1..20: mol_type = other RNA
taggatttccccatattgac

SEQ ID NO: 2567 - RNA, 20 nt, synthetic construct
  source 1..20: mol_type = other RNA
taggcatcttcactcctcga

SEQ ID NO: 2568 - RNA, 20 nt, synthetic construct
  source 1..20: mol_type = other RNA
taggccagtctccagcagga

SEQ ID NO: 2569 - RNA, 20 nt, synthetic construct
  source 1..20: mol_type = other RNA
taggctagcaagcagacggt

SEQ ID NO: 2570 - RNA, 20 nt, synthetic construct
  source 1..20: mol_type = other RNA
tagggaactgtaatggccac

SEQ ID NO: 2571 - RNA, 20 nt, synthetic construct
  source 1..20: mol_type = other RNA
taggtcgtgtttttggaaat

SEQ ID NO: 2572 - RNA, 20 nt, synthetic construct
  source 1..20: mol_type = other RNA
taggtggcagggagcgcggc

SEQ ID NO: 2573 - RNA, 20 nt, synthetic construct
  source 1..20: mol_type = other RNA
taggtggggttctcatagcc

SEQ ID NO: 2574 - RNA, 20 nt, synthetic construct
  source 1..20: mol_type = other RNA
tagtaagcagtggcgccgag

SEQ ID NO: 2575 - RNA, 20 nt, synthetic construct
  source 1..20: mol_type = other RNA
tagtactttatatagtccta

SEQ ID NO: 2576 - RNA, 20 nt, synthetic construct
  source 1..20: mol_type = other RNA
tagtcctacagtccaggagg

SEQ ID NO: 2577 - RNA, 20 nt, synthetic construct
  source 1..20: mol_type = other RNA
tagtgaacagtgggaatgtc

SEQ ID NO: 2578 - RNA, 20 nt, synthetic construct
  source 1..20: mol_type = other RNA
tagtgcagatgctggtctta

SEQ ID NO: 2579 - RNA, 20 nt, synthetic construct
  source 1..20: mol_type = other RNA
tagtgtatacagatgagggt

SEQ ID NO: 2580 - RNA, 20 nt, synthetic construct
  source 1..20: mol_type = other RNA
tagtgttcctttttccaggt

SEQ ID NO: 2581 - RNA, 20 nt, synthetic construct
  source 1..20: mol_type = other RNA
tagtttgggccttggctatg

SEQ ID NO: 2582 - RNA, 20 nt, synthetic construct
  source 1..20: mol_type = other RNA
tataaagtactactgtagaa

SEQ ID NO: 2583 - RNA, 20 nt, synthetic construct
  source 1..20: mol_type = other RNA
tataaatacagtaaggacct

SEQ ID NO: 2584 - RNA, 20 nt, synthetic construct
  source 1..20: mol_type = other RNA
tataataaatgggaaatgtc

SEQ ID NO: 2585 - RNA, 20 nt, synthetic construct
  source 1..20: mol_type = other RNA
tatacactaagctctctaga

SEQ ID NO: 2586 - RNA, 20 nt, synthetic construct
  source 1..20: mol_type = other RNA
tatagtcctacagtccagga

SEQ ID NO: 2587 - RNA, 20 nt, synthetic construct
  source 1..20: mol_type = other RNA
tatataaagtactactgtag

SEQ ID NO: 2588 - RNA, 20 nt, synthetic construct
  source 1..20: mol_type = other RNA
tatatagtcctacagtccag

SEQ ID NO: 2589 - RNA, 20 nt, synthetic construct
  source 1..20: mol_type = other RNA
tatatattgagagcatgtgt

SEQ ID NO: 2590 - RNA, 20 nt, synthetic construct
  source 1..20: mol_type = other RNA
tatatgcaggctgtcgttcc

SEQ ID NO: 2591 - RNA, 20 nt, synthetic construct
  source 1..20: mol_type = other RNA
tatattaccatttttcaccc

SEQ ID NO: 2592 - RNA, 20 nt, synthetic construct
  source 1..20: mol_type = other RNA
tatattgagagcatgtgtca

SEQ ID NO: 2593 - RNA, 20 nt, synthetic construct
  source 1..20: mol_type = other RNA
tatatttggggatcaaggga

SEQ ID NO: 2594 - RNA, 20 nt, synthetic construct
  source 1..20: mol_type = other RNA
tatcagttcagttactcact

SEQ ID NO: 2595 - RNA, 20 nt, synthetic construct
  source 1..20: mol_type = other RNA
tatccagccgtggaaacact

SEQ ID NO: 2596 - RNA, 20 nt, synthetic construct
  source 1..20: mol_type = other RNA
tatctcctgctggagactgg

SEQ ID NO: 2597 - RNA, 20 nt, synthetic construct
  source 1..20: mol_type = other RNA
tatctgcaatagatcatttt

SEQ ID NO: 2598 - RNA, 20 nt, synthetic construct
  source 1..20: mol_type = other RNA
tatgaatgtcagaaagtcat

SEQ ID NO: 2599 - RNA, 20 nt, synthetic construct
  source 1..20: mol_type = other RNA
tatgagaaccccacctacaa

SEQ ID NO: 2600 - RNA, 20 nt, synthetic construct
  source 1..20: mol_type = other RNA
tatgcaggctgtcgttccgg

SEQ ID NO: 2601 - RNA, 20 nt, synthetic construct
  source 1..20: mol_type = other RNA
tatgctacagagggtgaaaa

SEQ ID NO: 2602 - RNA, 20 nt, synthetic construct
  source 1..20: mol_type = other RNA
tatggagacacacaggtatc

SEQ ID NO: 2603 - RNA, 20 nt, synthetic construct
  source 1..20: mol_type = other RNA
tatggggaaatcctatctct

SEQ ID NO: 2604 - RNA, 20 nt, synthetic construct
  source 1..20: mol_type = other RNA
tatgttgtgtaagtcaactc

SEQ ID NO: 2605 - RNA, 20 nt, synthetic construct
  source 1..20: mol_type = other RNA
tattaattccacaggttccc

SEQ ID NO: 2606 - RNA, 20 nt, synthetic construct
  source 1..20: mol_type = other RNA
tattaccatttttcacccat

SEQ ID NO: 2607 - RNA, 20 nt, synthetic construct
  source 1..20: mol_type = other RNA
tattagagataggatttccc

SEQ ID NO: 2608 - RNA, 20 nt, synthetic construct
  source 1..20: mol_type = other RNA
tattatatattgagagcatg

SEQ ID NO: 2609 - RNA, 20 nt, synthetic construct
  source 1..20: mol_type = other RNA
tattccaccccatttctcag

SEQ ID NO: 2610 - RNA, 20 nt, synthetic construct
  source 1..20: mol_type = other RNA
tattccagcgtcttctagag

SEQ ID NO: 2611 - RNA, 20 nt, synthetic construct
  source 1..20: mol_type = other RNA
tattccctttttaaatgagc

SEQ ID NO: 2612 - RNA, 20 nt, synthetic construct
  source 1..20: mol_type = other RNA
tattgaaaatcgacatttcc

SEQ ID NO: 2613 - RNA, 20 nt, synthetic construct
  source 1..20: mol_type = other RNA
tattgaccagggtgatctca

SEQ ID NO: 2614 - RNA, 20 nt, synthetic construct
  source 1..20: mol_type = other RNA
tattgagagcatgtgtcaga

SEQ ID NO: 2615 - RNA, 20 nt, synthetic construct
  source 1..20: mol_type = other RNA
tattgcagatatttgatgta

SEQ ID NO: 2616 - RNA, 20 nt, synthetic construct
  source 1..20: mol_type = other RNA
tattgtctgacacatgctct

SEQ ID NO: 2617 - RNA, 20 nt, synthetic construct
  source 1..20: mol_type = other RNA
tatttatatttggggatcaa

SEQ ID NO: 2618 - RNA, 20 nt, synthetic construct
  source 1..20: mol_type = other RNA
tatttccttagtgttccttt

SEQ ID NO: 2619 - RNA, 20 nt, synthetic construct
  source 1..20: mol_type = other RNA
tatttggggatcaagggact

SEQ ID NO: 2620 - RNA, 20 nt, synthetic construct
  source 1..20: mol_type = other RNA
tatttgtaggtggggttctc

SEQ ID NO: 2621 - RNA, 20 nt, synthetic construct
  source 1..20: mol_type = other RNA
tattttctttctcctgtgtt

SEQ ID NO: 2622 - RNA, 20 nt, synthetic construct
  source 1..20: mol_type = other RNA
tcaaagaggcaatgctttcg

SEQ ID NO: 2623 - RNA, 20 nt, synthetic construct
  source 1..20: mol_type = other RNA
tcaaatatctgcaatagatc

SEQ ID NO: 2624 - RNA, 20 nt, synthetic construct
  source 1..20: mol_type = other RNA
tcaacattagtttgggcctt

SEQ ID NO: 2625 - RNA, 20 nt, synthetic construct
  source 1..20: mol_type = other RNA
tcaacctggaagaacaaaac

SEQ ID NO: 2626 - RNA, 20 nt, synthetic construct
  source 1..20: mol_type = other RNA
tcaactcttcagcctcattc

SEQ ID NO: 2627 - RNA, 20 nt, synthetic construct
  source 1..20: mol_type = other RNA
tcaactggatttcctagcac

SEQ ID NO: 2628 - RNA, 20 nt, synthetic construct
  source 1..20: mol_type = other RNA
tcaagaaactggtcctttca

SEQ ID NO: 2629 - RNA, 20 nt, synthetic construct
  source 1..20: mol_type = other RNA
tcaagggactctggacattc

SEQ ID NO: 2630 - RNA, 20 nt, synthetic construct
  source 1..20: mol_type = other RNA
tcaataatagacttatatgc

SEQ ID NO: 2631 - RNA, 20 nt, synthetic construct
  source 1..20: mol_type = other RNA
tcaatatggggaaatcctat

SEQ ID NO: 2632 - RNA, 20 nt, synthetic construct
  source 1..20: mol_type = other RNA
tcacatcattttgcgagggt

SEQ ID NO: 2633 - RNA, 20 nt, synthetic construct
  source 1..20: mol_type = other RNA
tcacatgactttctgacatt

SEQ ID NO: 2634 - RNA, 20 nt, synthetic construct
  source 1..20: mol_type = other RNA
tcaccaaggacgttaaaggc

SEQ ID NO: 2635 - RNA, 20 nt, synthetic construct
  source 1..20: mol_type = other RNA
tcaccaccggttctcatttg

SEQ ID NO: 2636 - RNA, 20 nt, synthetic construct
  source 1..20: mol_type = other RNA
tcaccacggtgctaggaaat

SEQ ID NO: 2637 - RNA, 20 nt, synthetic construct
  source 1..20: mol_type = other RNA
tcacccatttaaaagaatgg

SEQ ID NO: 2638 - RNA, 20 nt, synthetic construct
  source 1..20: mol_type = other RNA
tcaccccagaagagcgtcac

SEQ ID NO: 2639 - RNA, 20 nt, synthetic construct
  source 1..20: mol_type = other RNA
tcaccctctgtagcataaaa

SEQ ID NO: 2640 - RNA, 20 nt, synthetic construct
  source 1..20: mol_type = other RNA
tcaccctggtcaatatgggg

SEQ ID NO: 2641 - RNA, 20 nt, synthetic construct
  source 1..20: mol_type = other RNA
tcacctgaacaagatgcaga

SEQ ID NO: 2642 - RNA, 20 nt, synthetic construct
  source 1..20: mol_type = other RNA
tcacggaagatgacagtcaa

SEQ ID NO: 2643 - RNA, 20 nt, synthetic construct
  source 1..20: mol_type = other RNA
tcacgtgcttcagtggccat

SEQ ID NO: 2644 - RNA, 20 nt, synthetic construct
  source 1..20: mol_type = other RNA
tcactaaggagtgagtggca

SEQ ID NO: 2645 - RNA, 20 nt, synthetic construct
  source 1..20: mol_type = other RNA
tcactcctcgagtactggac

SEQ ID NO: 2646 - RNA, 20 nt, synthetic construct
  source 1..20: mol_type = other RNA
tcactccttagtgaacagtg

SEQ ID NO: 2647 - RNA, 20 nt, synthetic construct
  source 1..20: mol_type = other RNA
tcactggattcctaggtcgt

SEQ ID NO: 2648 - RNA, 20 nt, synthetic construct
  source 1..20: mol_type = other RNA
tcactgtcctggcttttatt

SEQ ID NO: 2649 - RNA, 20 nt, synthetic construct
  source 1..20: mol_type = other RNA
tcagaaaccccacttccatt

SEQ ID NO: 2650 - RNA, 20 nt, synthetic construct
  source 1..20: mol_type = other RNA
tcagaaagtcatgtgaacat

SEQ ID NO: 2651 - RNA, 20 nt, synthetic construct
  source 1..20: mol_type = other RNA
tcagaactgaaaaagaccag

SEQ ID NO: 2652 - RNA, 20 nt, synthetic construct
  source 1..20: mol_type = other RNA
tcagacaatacaatggaagt

SEQ ID NO: 2653 - RNA, 20 nt, synthetic construct
  source 1..20: mol_type = other RNA
tcagacgcagcccctggcag

SEQ ID NO: 2654 - RNA, 20 nt, synthetic construct
  source 1..20: mol_type = other RNA
tcagattatttccttagtgt

SEQ ID NO: 2655 - RNA, 20 nt, synthetic construct
  source 1..20: mol_type = other RNA
tcagcaacttcctgaaagct

SEQ ID NO: 2656 - RNA, 20 nt, synthetic construct
  source 1..20: mol_type = other RNA
tcagcactttctaaatttcc

SEQ ID NO: 2657 - RNA, 20 nt, synthetic construct
  source 1..20: mol_type = other RNA
tcagcagtaggctagcaagc

SEQ ID NO: 2658 - RNA, 20 nt, synthetic construct
  source 1..20: mol_type = other RNA
tcagcccctgccacaagggg

SEQ ID NO: 2659 - RNA, 20 nt, synthetic construct
  source 1..20: mol_type = other RNA
tcagcctcattcactgtcct

SEQ ID NO: 2660 - RNA, 20 nt, synthetic construct
  source 1..20: mol_type = other RNA
tcagcctcccacctagctga

SEQ ID NO: 2661 - RNA, 20 nt, synthetic construct
  source 1..20: mol_type = other RNA
tcagcgcactgcaacctctg

SEQ ID NO: 2662 - RNA, 20 nt, synthetic construct
  source 1..20: mol_type = other RNA
tcagctaggtgggaggctga

SEQ ID NO: 2663 - RNA, 20 nt, synthetic construct
  source 1..20: mol_type = other RNA
tcaggaagttgctgagaaat

SEQ ID NO: 2664 - RNA, 20 nt, synthetic construct
  source 1..20: mol_type = other RNA
tcaggatgtcagacgcagcc

SEQ ID NO: 2665 - RNA, 20 nt, synthetic construct
  source 1..20: mol_type = other RNA
tcaggatttgagatcaccct

SEQ ID NO: 2666 - RNA, 20 nt, synthetic construct
  source 1..20: mol_type = other RNA
tcagggctctcgtttcgaaa

SEQ ID NO: 2667 - RNA, 20 nt, synthetic construct
  source 1..20: mol_type = other RNA
tcaggggattgtgcagcaaa

SEQ ID NO: 2668 - RNA, 20 nt, synthetic construct
  source 1..20: mol_type = other RNA
tcaggtctcccagcaccctg

SEQ ID NO: 2669 - RNA, 20 nt, synthetic construct
  source 1..20: mol_type = other RNA
tcaggtgacgctcttctggg

SEQ ID NO: 2670 - RNA, 20 nt, synthetic construct
  source 1..20: mol_type = other RNA
tcaggttttgttcttccagg

SEQ ID NO: 2671 - RNA, 20 nt, synthetic construct
  source 1..20: mol_type = other RNA
tcagtaaccagcagaagaca

SEQ ID NO: 2672 - RNA, 20 nt, synthetic construct
  source 1..20: mol_type = other RNA
tcagtggccattacagttcc

SEQ ID NO: 2673 - RNA, 20 nt, synthetic construct
  source 1..20: mol_type = other RNA
tcagttactcactggattcc

SEQ ID NO: 2674 - RNA, 20 nt, synthetic construct
  source 1..20: mol_type = other RNA
tcagttcagttactcactgg

SEQ ID NO: 2675 - RNA, 20 nt, synthetic construct
  source 1..20: mol_type = other RNA
tcagttctgaaattctacag

SEQ ID NO: 2676 - RNA, 20 nt, synthetic construct
  source 1..20: mol_type = other RNA
tcatagccaaggcccaaact

SEQ ID NO: 2677 - RNA, 20 nt, synthetic construct
  source 1..20: mol_type = other RNA
tcatagccatggttctgcat

SEQ ID NO: 2678 - RNA, 20 nt, synthetic construct
  source 1..20: mol_type = other RNA
tcatctgtatacactaagct

SEQ ID NO: 2679 - RNA, 20 nt, synthetic construct
  source 1..20: mol_type = other RNA
tcatcttccgtgagggctaa

SEQ ID NO: 2680 - RNA, 20 nt, synthetic construct
  source 1..20: mol_type = other RNA
tcatgtgaacattttatgct

SEQ ID NO: 2681 - RNA, 20 nt, synthetic construct
  source 1..20: mol_type = other RNA
tcattaaggtccttactgta

SEQ ID NO: 2682 - RNA, 20 nt, synthetic construct
  source 1..20: mol_type = other RNA
tcattcactgtcctggcttt

SEQ ID NO: 2683 - RNA, 20 nt, synthetic construct
  source 1..20: mol_type = other RNA
tcattgtggtgtctgggaag

SEQ ID NO: 2684 - RNA, 20 nt, synthetic construct
  source 1..20: mol_type = other RNA
tcatttaaaaagggaatact

SEQ ID NO: 2685 - RNA, 20 nt, synthetic construct
  source 1..20: mol_type = other RNA
tcatttggcctgtccggtgg

SEQ ID NO: 2686 - RNA, 20 nt, synthetic construct
  source 1..20: mol_type = other RNA
tcattttgcgagggtctctc

SEQ ID NO: 2687 - RNA, 20 nt, synthetic construct
  source 1..20: mol_type = other RNA
tccaaaaaaccaaaaaacca

SEQ ID NO: 2688 - RNA, 20 nt, synthetic construct
  source 1..20: mol_type = other RNA
tccaaaaacacgacctagga

SEQ ID NO: 2689 - RNA, 20 nt, synthetic construct
  source 1..20: mol_type = other RNA
tccaatgctcaccccagaag

SEQ ID NO: 2690 - RNA, 20 nt, synthetic construct
  source 1..20: mol_type = other RNA
tccacaggttcccaccccca

SEQ ID NO: 2691 - RNA, 20 nt, synthetic construct
  source 1..20: mol_type = other RNA
tccaccccatttctcagcaa

SEQ ID NO: 2692 - RNA, 20 nt, synthetic construct
  source 1..20: mol_type = other RNA
tccacggctggatacctgtg

SEQ ID NO: 2693 - RNA, 20 nt, synthetic construct
  source 1..20: mol_type = other RNA
tccagagtcccttgatcccc

SEQ ID NO: 2694 - RNA, 20 nt, synthetic construct
  source 1..20: mol_type = other RNA
tccagcaggagataaaacca

SEQ ID NO: 2695 - RNA, 20 nt, synthetic construct
  source 1..20: mol_type = other RNA
tccagccgtggaaacactgg

SEQ ID NO: 2696 - RNA, 20 nt, synthetic construct
  source 1..20: mol_type = other RNA
tccagcgtcttctagagagc

SEQ ID NO: 2697 - RNA, 20 nt, synthetic construct
  source 1..20: mol_type = other RNA
tccaggaggtcaggatgtca

SEQ ID NO: 2698 - RNA, 20 nt, synthetic construct
  source 1..20: mol_type = other RNA
tccaggtatttgtaggtggg

SEQ ID NO: 2699 - RNA, 20 nt, synthetic construct
  source 1..20: mol_type = other RNA
tccaggttgatccaatgctc

SEQ ID NO: 2700 - RNA, 20 nt, synthetic construct
  source 1..20: mol_type = other RNA
tccagtactcgaggagtgaa

SEQ ID NO: 2701 - RNA, 20 nt, synthetic construct
  source 1..20: mol_type = other RNA
tccagtgagtaactgaactg

SEQ ID NO: 2702 - RNA, 20 nt, synthetic construct
  source 1..20: mol_type = other RNA
tccagtgtttccacggctgg

SEQ ID NO: 2703 - RNA, 20 nt, synthetic construct
  source 1..20: mol_type = other RNA
tccagttgactgtcatcttc

SEQ ID NO: 2704 - RNA, 20 nt, synthetic construct
  source 1..20: mol_type = other RNA
tccataaaagtcctgtcacc

SEQ ID NO: 2705 - RNA, 20 nt, synthetic construct
  source 1..20: mol_type = other RNA
tccattcttttaaatgggtg

SEQ ID NO: 2706 - RNA, 20 nt, synthetic construct
  source 1..20: mol_type = other RNA
tccattgtattgtctgacac

SEQ ID NO: 2707 - RNA, 20 nt, synthetic construct
  source 1..20: mol_type = other RNA
tcccaccggacaggccaaat

SEQ ID NO: 2708 - RNA, 20 nt, synthetic construct
  source 1..20: mol_type = other RNA
tcccaccgtctgcttgctag

SEQ ID NO: 2709 - RNA, 20 nt, synthetic construct
  source 1..20: mol_type = other RNA
tcccacctagctgagactac

SEQ ID NO: 2710 - RNA, 20 nt, synthetic construct
  source 1..20: mol_type = other RNA
tcccacgattccgatcgact

SEQ ID NO: 2711 - RNA, 20 nt, synthetic construct
  source 1..20: mol_type = other RNA
tcccactgttcactaaggag

SEQ ID NO: 2712 - RNA, 20 nt, synthetic construct
  source 1..20: mol_type = other RNA
tcccagacaccacaatgacc

SEQ ID NO: 2713 - RNA, 20 nt, synthetic construct
  source 1..20: mol_type = other RNA
tcccagcaccctgtgcaggt

SEQ ID NO: 2714 - RNA, 20 nt, synthetic construct
  source 1..20: mol_type = other RNA
tcccagggctcattaaggtc

SEQ ID NO: 2715 - RNA, 20 nt, synthetic construct
  source 1..20: mol_type = other RNA
tccccaaatataaatacagt

SEQ ID NO: 2716 - RNA, 20 nt, synthetic construct
  source 1..20: mol_type = other RNA
tccccatattgaccagggtg

SEQ ID NO: 2717 - RNA, 20 nt, synthetic construct
  source 1..20: mol_type = other RNA
tcccctgaggaccaaatgca

SEQ ID NO: 2718 - RNA, 20 nt, synthetic construct
  source 1..20: mol_type = other RNA
tcccctggtcccaccgtctg

SEQ ID NO: 2719 - RNA, 20 nt, synthetic construct
  source 1..20: mol_type = other RNA
tccccttattttctttctcc

SEQ ID NO: 2720 - RNA, 20 nt, synthetic construct
  source 1..20: mol_type = other RNA
tccctattccaccccatttc

SEQ ID NO: 2721 - RNA, 20 nt, synthetic construct
  source 1..20: mol_type = other RNA
tccctccgccagggctgccg

SEQ ID NO: 2722 - RNA, 20 nt, synthetic construct
  source 1..20: mol_type = other RNA
tccctgccacctaaatctgc

SEQ ID NO: 2723 - RNA, 20 nt, synthetic construct
  source 1..20: mol_type = other RNA
tcccttgatccccaaatata

SEQ ID NO: 2724 - RNA, 20 nt, synthetic construct
  source 1..20: mol_type = other RNA
tccctttttaaatgagcttt

SEQ ID NO: 2725 - RNA, 20 nt, synthetic construct
  source 1..20: mol_type = other RNA
tccgatcgactgccaagcag

SEQ ID NO: 2726 - RNA, 20 nt, synthetic construct
  source 1..20: mol_type = other RNA
tccgccagggctgccgcgct

SEQ ID NO: 2727 - RNA, 20 nt, synthetic construct
  source 1..20: mol_type = other RNA
tccggcccacctgcatccct

SEQ ID NO: 2728 - RNA, 20 nt, synthetic construct
  source 1..20: mol_type = other RNA
tccggtgggaacgggctgct

SEQ ID NO: 2729 - RNA, 20 nt, synthetic construct
  source 1..20: mol_type = other RNA
tccggttatgttgtgtaagt

SEQ ID NO: 2730 - RNA, 20 nt, synthetic construct
  source 1..20: mol_type = other RNA
tccgtgagggctaagctttc

SEQ ID NO: 2731 - RNA, 20 nt, synthetic construct
  source 1..20: mol_type = other RNA
tcctacagtccaggaggtca

SEQ ID NO: 2732 - RNA, 20 nt, synthetic construct
  source 1..20: mol_type = other RNA
tcctagcaccgtggtgacaa

SEQ ID NO: 2733 - RNA, 20 nt, synthetic construct
  source 1..20: mol_type = other RNA
tcctaggtcgtgtttttgga

SEQ ID NO: 2734 - RNA, 20 nt, synthetic construct
  source 1..20: mol_type = other RNA
tcctcaggggattgtgcagc

SEQ ID NO: 2735 - RNA, 20 nt, synthetic construct
  source 1..20: mol_type = other RNA
tcctcgagtactggacatgc

SEQ ID NO: 2736 - RNA, 20 nt, synthetic construct
  source 1..20: mol_type = other RNA
tcctgaaagctcatttaaaa

SEQ ID NO: 2737 - RNA, 20 nt, synthetic construct
  source 1..20: mol_type = other RNA
tcctgacctcctggactgta

SEQ ID NO: 2738 - RNA, 20 nt, synthetic construct
  source 1..20: mol_type = other RNA
tcctgctggagactggccta

SEQ ID NO: 2739 - RNA, 20 nt, synthetic construct
  source 1..20: mol_type = other RNA
tcctggactgtaggactata

SEQ ID NO: 2740 - RNA, 20 nt, synthetic construct
  source 1..20: mol_type = other RNA
tcctggcttttatttaaaga

SEQ ID NO: 2741 - RNA, 20 nt, synthetic construct
  source 1..20: mol_type = other RNA
tcctgtcaccaaggacgtta

SEQ ID NO: 2742 - RNA, 20 nt, synthetic construct
  source 1..20: mol_type = other RNA
tcctgtgtttcaccaccggt

SEQ ID NO: 2743 - RNA, 20 nt, synthetic construct
  source 1..20: mol_type = other RNA
tcctgttgctcctttccccc

SEQ ID NO: 2744 - RNA, 20 nt, synthetic construct
  source 1..20: mol_type = other RNA
tccttagtgaacagtgggaa

SEQ ID NO: 2745 - RNA, 20 nt, synthetic construct
  source 1..20: mol_type = other RNA
tccttagtgttcctttttcc

SEQ ID NO: 2746 - RNA, 20 nt, synthetic construct
  source 1..20: mol_type = other RNA
tccttggtgacaggactttt

SEQ ID NO: 2747 - RNA, 20 nt, synthetic construct
  source 1..20: mol_type = other RNA
tcctttcacatcattttgcg

SEQ ID NO: 2748 - RNA, 20 nt, synthetic construct
  source 1..20: mol_type = other RNA
tcctttcccccattaaaaaa

SEQ ID NO: 2749 - RNA, 20 nt, synthetic construct
  source 1..20: mol_type = other RNA
tcctttttccaggtattttt

SEQ ID NO: 2750 - RNA, 20 nt, synthetic construct
  source 1..20: mol_type = other RNA
tcgaaacgagagccctgaaa

SEQ ID NO: 2751 - RNA, 20 nt, synthetic construct
  source 1..20: mol_type = other RNA
tcgaaagcattgcctctttg

SEQ ID NO: 2752 - RNA, 20 nt, synthetic construct
  source 1..20: mol_type = other RNA
tcgacatttcccatttatta

SEQ ID NO: 2753 - RNA, 20 nt, synthetic construct
  source 1..20: mol_type = other RNA
tcgactgccaagcagcagcc

SEQ ID NO: 2754 - RNA, 20 nt, synthetic construct
  source 1..20: mol_type = other RNA
tcgaggagtgaagatgccta

SEQ ID NO: 2755 - RNA, 20 nt, synthetic construct
  source 1..20: mol_type = other RNA
tcgagtactggacatgctgc

SEQ ID NO: 2756 - RNA, 20 nt, synthetic construct
  source 1..20: mol_type = other RNA
tcgatcggaatcgtgggatc

SEQ ID NO: 2757 - RNA, 20 nt, synthetic construct
  source 1..20: mol_type = other RNA
tcgattttcaataatagact

SEQ ID NO: 2758 - RNA, 20 nt, synthetic construct
  source 1..20: mol_type = other RNA
tcgcaaaatgatgtgaaagg

SEQ ID NO: 2759 - RNA, 20 nt, synthetic construct
  source 1..20: mol_type = other RNA
tcggaatcgtgggatcttcc

SEQ ID NO: 2760 - RNA, 20 nt, synthetic construct
  source 1..20: mol_type = other RNA
tcggcgccactgcttactac

SEQ ID NO: 2761 - RNA, 20 nt, synthetic construct
  source 1..20: mol_type = other RNA
tcgtgggatcttccggccca

SEQ ID NO: 2762 - RNA, 20 nt, synthetic construct
  source 1..20: mol_type = other RNA
tcgtgtttttggaaatcagc

SEQ ID NO: 2763 - RNA, 20 nt, synthetic construct
  source 1..20: mol_type = other RNA
tcgttccggttatgttgtgt

SEQ ID NO: 2764 - RNA, 20 nt, synthetic construct
  source 1..20: mol_type = other RNA
tcgtttcgaaagcattgcct

SEQ ID NO: 2765 - RNA, 20 nt, synthetic construct
  source 1..20: mol_type = other RNA
tctaaatttcctgttgctcc

SEQ ID NO: 2766 - RNA, 20 nt, synthetic construct
  source 1..20: mol_type = other RNA
tctacagctaggccagtctc

SEQ ID NO: 2767 - RNA, 20 nt, synthetic construct
  source 1..20: mol_type = other RNA
tctacagtagtactttatat

SEQ ID NO: 2768 - RNA, 20 nt, synthetic construct
  source 1..20: mol_type = other RNA
tctagaagacgctggaataa

SEQ ID NO: 2769 - RNA, 20 nt, synthetic construct
  source 1..20: mol_type = other RNA
tctagagagcttagtgtata

SEQ ID NO: 2770 - RNA, 20 nt, synthetic construct
  source 1..20: mol_type = other RNA
tctattattgaaaatcgaca

SEQ ID NO: 2771 - RNA, 20 nt, synthetic construct
  source 1..20: mol_type = other RNA
tctattgcagatatttgatg

SEQ ID NO: 2772 - RNA, 20 nt, synthetic construct
  source 1..20: mol_type = other RNA
tctcacgtgcttcagtggcc

SEQ ID NO: 2773 - RNA, 20 nt, synthetic construct
  source 1..20: mol_type = other RNA
tctcagattatttccttagt

SEQ ID NO: 2774 - RNA, 20 nt, synthetic construct
  source 1..20: mol_type = other RNA
tctcagcaacttcctgaaag

SEQ ID NO: 2775 - RNA, 20 nt, synthetic construct
  source 1..20: mol_type = other RNA
tctcatagccatggttctgc

SEQ ID NO: 2776 - RNA, 20 nt, synthetic construct
  source 1..20: mol_type = other RNA
tctcatttggcctgtccggt

SEQ ID NO: 2777 - RNA, 20 nt, synthetic construct
  source 1..20: mol_type = other RNA
tctccaaaaaaccaaaaaac

SEQ ID NO: 2778 - RNA, 20 nt, synthetic construct
  source 1..20: mol_type = other RNA
tctccagcaggagataaaac

SEQ ID NO: 2779 - RNA, 20 nt, synthetic construct
  source 1..20: mol_type = other RNA
tctccataaaagtcctgtca

SEQ ID NO: 2780 - RNA, 20 nt, synthetic construct
  source 1..20: mol_type = other RNA
tctcccagcaccctgtgcag

SEQ ID NO: 2781 - RNA, 20 nt, synthetic construct
  source 1..20: mol_type = other RNA
tctcctgctggagactggcc

SEQ ID NO: 2782 - RNA, 20 nt, synthetic construct
  source 1..20: mol_type = other RNA
tctcctgtgtttcaccaccg

SEQ ID NO: 2783 - RNA, 20 nt, synthetic construct
  source 1..20: mol_type = other RNA
tctcgtttcgaaagcattgc

SEQ ID NO: 2784 - RNA, 20 nt, synthetic construct
  source 1..20: mol_type = other RNA
tctctagaagacgctggaat

SEQ ID NO: 2785 - RNA, 20 nt, synthetic construct
  source 1..20: mol_type = other RNA
tctctcacgtgcttcagtgg

SEQ ID NO: 2786 - RNA, 20 nt, synthetic construct
  source 1..20: mol_type = other RNA
tctctggtctttttcagttc

SEQ ID NO: 2787 - RNA, 20 nt, synthetic construct
  source 1..20: mol_type = other RNA
tctcttcccagacaccacaa

SEQ ID NO: 2788 - RNA, 20 nt, synthetic construct
  source 1..20: mol_type = other RNA
tctgaaattctacagctagg

SEQ ID NO: 2789 - RNA, 20 nt, synthetic construct
  source 1..20: mol_type = other RNA
tctgacacatgctctcaata

SEQ ID NO: 2790 - RNA, 20 nt, synthetic construct
  source 1..20: mol_type = other RNA
tctgacatcctgacctcctg

SEQ ID NO: 2791 - RNA, 20 nt, synthetic construct
  source 1..20: mol_type = other RNA
tctgacattcatagccaagg

SEQ ID NO: 2792 - RNA, 20 nt, synthetic construct
  source 1..20: mol_type = other RNA
tctgagaaaagagttttcac

SEQ ID NO: 2793 - RNA, 20 nt, synthetic construct
  source 1..20: mol_type = other RNA
tctgcaatagatcatttttt

SEQ ID NO: 2794 - RNA, 20 nt, synthetic construct
  source 1..20: mol_type = other RNA
tctgcactaatttcccaggg

SEQ ID NO: 2795 - RNA, 20 nt, synthetic construct
  source 1..20: mol_type = other RNA
tctgcatctgctccaggtat

SEQ ID NO: 2796 - RNA, 20 nt, synthetic construct
  source 1..20: mol_type = other RNA
tctgcatcttgttcaggtga

SEQ ID NO: 2797 - RNA, 20 nt, synthetic construct
  source 1..20: mol_type = other RNA
tctgctccaggtatttgtag

SEQ ID NO: 2798 - RNA, 20 nt, synthetic construct
  source 1..20: mol_type = other RNA
tctgctggttactgaacttg

SEQ ID NO: 2799 - RNA, 20 nt, synthetic construct
  source 1..20: mol_type = other RNA
tctgcttcagcactttctaa

SEQ ID NO: 2800 - RNA, 20 nt, synthetic construct
  source 1..20: mol_type = other RNA
tctgcttgctagcctactgc

SEQ ID NO: 2801 - RNA, 20 nt, synthetic construct
  source 1..20: mol_type = other RNA
tctggacattcccactgttc

SEQ ID NO: 2802 - RNA, 20 nt, synthetic construct
  source 1..20: mol_type = other RNA
tctgggaagagacctgcaca

SEQ ID NO: 2803 - RNA, 20 nt, synthetic construct
  source 1..20: mol_type = other RNA
tctggggtgagcattggatc

SEQ ID NO: 2804 - RNA, 20 nt, synthetic construct
  source 1..20: mol_type = other RNA
tctggtctttttcagttctg

SEQ ID NO: 2805 - RNA, 20 nt, synthetic construct
  source 1..20: mol_type = other RNA
tctgtagcataaaatgttca

SEQ ID NO: 2806 - RNA, 20 nt, synthetic construct
  source 1..20: mol_type = other RNA
tctgtatacactaagctctc

SEQ ID NO: 2807 - RNA, 20 nt, synthetic construct
  source 1..20: mol_type = other RNA
tctgtcttctgctggttact

SEQ ID NO: 2808 - RNA, 20 nt, synthetic construct
  source 1..20: mol_type = other RNA
tctgttctgtcttctgctgg

SEQ ID NO: 2809 - RNA, 20 nt, synthetic construct
  source 1..20: mol_type = other RNA
tcttcactcctcgagtactg

SEQ ID NO: 2810 - RNA, 20 nt, synthetic construct
  source 1..20: mol_type = other RNA
tcttcagcctcattcactgt

SEQ ID NO: 2811 - RNA, 20 nt, synthetic construct
  source 1..20: mol_type = other RNA
tcttccaggttgatccaatg

SEQ ID NO: 2812 - RNA, 20 nt, synthetic construct
  source 1..20: mol_type = other RNA
tcttcccagacaccacaatg

SEQ ID NO: 2813 - RNA, 20 nt, synthetic construct
  source 1..20: mol_type = other RNA
tcttccggcccacctgcatc

SEQ ID NO: 2814 - RNA, 20 nt, synthetic construct
  source 1..20: mol_type = other RNA
tcttccgtgagggctaagct

SEQ ID NO: 2815 - RNA, 20 nt, synthetic construct
  source 1..20: mol_type = other RNA
tcttctagagagcttagtgt

SEQ ID NO: 2816 - RNA, 20 nt, synthetic construct
  source 1..20: mol_type = other RNA
tcttctgctggttactgaac

SEQ ID NO: 2817 - RNA, 20 nt, synthetic construct
  source 1..20: mol_type = other RNA
tcttctggggtgagcattgg

SEQ ID NO: 2818 - RNA, 20 nt, synthetic construct
  source 1..20: mol_type = other RNA
tcttgaagtccagtgtttcc

SEQ ID NO: 2819 - RNA, 20 nt, synthetic construct
  source 1..20: mol_type = other RNA
tcttgccactcactccttag

SEQ ID NO: 2820 - RNA, 20 nt, synthetic construct
  source 1..20: mol_type = other RNA
tcttgttcaggtgacgctct

SEQ ID NO: 2821 - RNA, 20 nt, synthetic construct
  source 1..20: mol_type = other RNA
tctttaaataaaagccagga

SEQ ID NO: 2822 - RNA, 20 nt, synthetic construct
  source 1..20: mol_type = other RNA
tctttctcctgtgtttcacc

SEQ ID NO: 2823 - RNA, 20 nt, synthetic construct
  source 1..20: mol_type = other RNA
tctttgatccccttattttc

SEQ ID NO: 2824 - RNA, 20 nt, synthetic construct
  source 1..20: mol_type = other RNA
tcttttaaatgggtgaaaaa

SEQ ID NO: 2825 - RNA, 20 nt, synthetic construct
  source 1..20: mol_type = other RNA
tcttttctcagattatttcc

SEQ ID NO: 2826 - RNA, 20 nt, synthetic construct
  source 1..20: mol_type = other RNA
tctttttcagttctgaaatt

SEQ ID NO: 2827 - RNA, 20 nt, synthetic construct
  source 1..20: mol_type = other RNA
tgaaaaagaccagagatccc

SEQ ID NO: 2828 - RNA, 20 nt, synthetic construct
  source 1..20: mol_type = other RNA
tgaaaactcttttctcagat

SEQ ID NO: 2829 - RNA, 20 nt, synthetic construct
  source 1..20: mol_type = other RNA
tgaaaatcgacatttcccat

SEQ ID NO: 2830 - RNA, 20 nt, synthetic construct
  source 1..20: mol_type = other RNA
tgaaacacaggagaaagaaa

SEQ ID NO: 2831 - RNA, 20 nt, synthetic construct
  source 1..20: mol_type = other RNA
tgaaagctcatttaaaaagg

SEQ ID NO: 2832 - RNA, 20 nt, synthetic construct
  source 1..20: mol_type = other RNA
tgaaagcttagccctcacgg

SEQ ID NO: 2833 - RNA, 20 nt, synthetic construct
  source 1..20: mol_type = other RNA
tgaaaggaccagtttcttga

SEQ ID NO: 2834 - RNA, 20 nt, synthetic construct
  source 1..20: mol_type = other RNA
tgaaagttggcaacagcccc

SEQ ID NO: 2835 - RNA, 20 nt, synthetic construct
  source 1..20: mol_type = other RNA
tgaaattctacagctaggcc

SEQ ID NO: 2836 - RNA, 20 nt, synthetic construct
  source 1..20: mol_type = other RNA
tgaacaagatgcagaaccat

SEQ ID NO: 2837 - RNA, 20 nt, synthetic construct
  source 1..20: mol_type = other RNA
tgaacagtgggaatgtccag

SEQ ID NO: 2838 - RNA, 20 nt, synthetic construct
  source 1..20: mol_type = other RNA
tgaacattttatgctacaga

SEQ ID NO: 2839 - RNA, 20 nt, synthetic construct
  source 1..20: mol_type = other RNA
tgaactgataacagcagcat

SEQ ID NO: 2840 - RNA, 20 nt, synthetic construct
  source 1..20: mol_type = other RNA
tgaacttgtcttgccactca

SEQ ID NO: 2841 - RNA, 20 nt, synthetic construct
  source 1..20: mol_type = other RNA
tgaagagttgacttacacaa

SEQ ID NO: 2842 - RNA, 20 nt, synthetic construct
  source 1..20: mol_type = other RNA
tgaagatgcctattaattcc

SEQ ID NO: 2843 - RNA, 20 nt, synthetic construct
  source 1..20: mol_type = other RNA
tgaagcacgtgagagaccct

SEQ ID NO: 2844 - RNA, 20 nt, synthetic construct
  source 1..20: mol_type = other RNA
tgaagcagactgtttctgtt

SEQ ID NO: 2845 - RNA, 20 nt, synthetic construct
  source 1..20: mol_type = other RNA
tgaagtccagtgtttccacg

SEQ ID NO: 2846 - RNA, 20 nt, synthetic construct
  source 1..20: mol_type = other RNA
tgaatgaggctgaagagttg

SEQ ID NO: 2847 - RNA, 20 nt, synthetic construct
  source 1..20: mol_type = other RNA
tgaatgtcagaaagtcatgt

SEQ ID NO: 2848 - RNA, 20 nt, synthetic construct
  source 1..20: mol_type = other RNA
tgacaagcaaggctcggcgc

SEQ ID NO: 2849 - RNA, 20 nt, synthetic construct
  source 1..20: mol_type = other RNA
tgacacatgctctcaatata

SEQ ID NO: 2850 - RNA, 20 nt, synthetic construct
  source 1..20: mol_type = other RNA
tgacaggacttttatggaga

SEQ ID NO: 2851 - RNA, 20 nt, synthetic construct
  source 1..20: mol_type = other RNA
tgacagtcaactggatttcc

SEQ ID NO: 2852 - RNA, 20 nt, synthetic construct
  source 1..20: mol_type = other RNA
tgacatcctgacctcctgga

SEQ ID NO: 2853 - RNA, 20 nt, synthetic construct
  source 1..20: mol_type = other RNA
tgacattcatagccaaggcc

SEQ ID NO: 2854 - RNA, 20 nt, synthetic construct
  source 1..20: mol_type = other RNA
tgaccagggtgatctcaaat

SEQ ID NO: 2855 - RNA, 20 nt, synthetic construct
  source 1..20: mol_type = other RNA
tgaccctcaggttttgttct

SEQ ID NO: 2856 - RNA, 20 nt, synthetic construct
  source 1..20: mol_type = other RNA
tgacctcctggactgtagga

SEQ ID NO: 2857 - RNA, 20 nt, synthetic construct
  source 1..20: mol_type = other RNA
tgacgctcttctggggtgag

SEQ ID NO: 2858 - RNA, 20 nt, synthetic construct
  source 1..20: mol_type = other RNA
tgactggcttgccttggctg

SEQ ID NO: 2859 - RNA, 20 nt, synthetic construct
  source 1..20: mol_type = other RNA
tgactgtcatcttccgtgag

SEQ ID NO: 2860 - RNA, 20 nt, synthetic construct
  source 1..20: mol_type = other RNA
tgacttacacaacataaccg

SEQ ID NO: 2861 - RNA, 20 nt, synthetic construct
  source 1..20: mol_type = other RNA
tgactttctgacattcatag

SEQ ID NO: 2862 - RNA, 20 nt, synthetic construct
  source 1..20: mol_type = other RNA
tgagaaaagagttttcaccc

SEQ ID NO: 2863 - RNA, 20 nt, synthetic construct
  source 1..20: mol_type = other RNA
tgagaaatggggtggaatag

SEQ ID NO: 2864 - RNA, 20 nt, synthetic construct
  source 1..20: mol_type = other RNA
tgagaaccccacctacaaat

SEQ ID NO: 2865 - RNA, 20 nt, synthetic construct
  source 1..20: mol_type = other RNA
tgagaaccggtggtgaaaca

SEQ ID NO: 2866 - RNA, 20 nt, synthetic construct
  source 1..20: mol_type = other RNA
tgagagaccctcgcaaaatg

SEQ ID NO: 2867 - RNA, 20 nt, synthetic construct
  source 1..20: mol_type = other RNA
tgagagcatgtgtcagacaa

SEQ ID NO: 2868 - RNA, 20 nt, synthetic construct
  source 1..20: mol_type = other RNA
tgagatcaccctggtcaata

SEQ ID NO: 2869 - RNA, 20 nt, synthetic construct
  source 1..20: mol_type = other RNA
tgagcattggatcaacctgg

SEQ ID NO: 2870 - RNA, 20 nt, synthetic construct
  source 1..20: mol_type = other RNA
tgagccatttgctgcacaat

SEQ ID NO: 2871 - RNA, 20 nt, synthetic construct
  source 1..20: mol_type = other RNA
tgagccctgggaaattagtg

SEQ ID NO: 2872 - RNA, 20 nt, synthetic construct
  source 1..20: mol_type = other RNA
tgagctactgcacctggcca

SEQ ID NO: 2873 - RNA, 20 nt, synthetic construct
  source 1..20: mol_type = other RNA
tgagctttcaggaagttgct

SEQ ID NO: 2874 - RNA, 20 nt, synthetic construct
  source 1..20: mol_type = other RNA
tgaggaccaaatgcagccag

SEQ ID NO: 2875 - RNA, 20 nt, synthetic construct
  source 1..20: mol_type = other RNA
tgaggctgaagagttgactt

SEQ ID NO: 2876 - RNA, 20 nt, synthetic construct
  source 1..20: mol_type = other RNA
tgagggctaagctttcaggg

SEQ ID NO: 2877 - RNA, 20 nt, synthetic construct
  source 1..20: mol_type = other RNA
tgagggtcattgtggtgtct

SEQ ID NO: 2878 - RNA, 20 nt, synthetic construct
  source 1..20: mol_type = other RNA
tgagtaactgaactgataac

SEQ ID NO: 2879 - RNA, 20 nt, synthetic construct
  source 1..20: mol_type = other RNA
tgagtggcaagacaagttca

SEQ ID NO: 2880 - RNA, 20 nt, synthetic construct
  source 1..20: mol_type = other RNA
tgataacagcagcatgtcca

SEQ ID NO: 2881 - RNA, 20 nt, synthetic construct
  source 1..20: mol_type = other RNA
tgatccaatgctcaccccag

SEQ ID NO: 2882 - RNA, 20 nt, synthetic construct
  source 1..20: mol_type = other RNA
tgatccccaaatataaatac

SEQ ID NO: 2883 - RNA, 20 nt, synthetic construct
  source 1..20: mol_type = other RNA
tgatccccttattttctttc

SEQ ID NO: 2884 - RNA, 20 nt, synthetic construct
  source 1..20: mol_type = other RNA
tgatctattgcagatatttg

SEQ ID NO: 2885 - RNA, 20 nt, synthetic construct
  source 1..20: mol_type = other RNA
tgatgtgaaaggaccagttt

SEQ ID NO: 2886 - RNA, 20 nt, synthetic construct
  source 1..20: mol_type = other RNA
tgatttccaaaaacacgacc

SEQ ID NO: 2887 - RNA, 20 nt, synthetic construct
  source 1..20: mol_type = other RNA
tgcaatttccattcttttaa

SEQ ID NO: 2888 - RNA, 20 nt, synthetic construct
  source 1..20: mol_type = other RNA
tgcacaatcccctgaggacc

SEQ ID NO: 2889 - RNA, 20 nt, synthetic construct
  source 1..20: mol_type = other RNA
tgcacagggtgctgggagac

SEQ ID NO: 2890 - RNA, 20 nt, synthetic construct
  source 1..20: mol_type = other RNA
tgcacctggccagttacttg

SEQ ID NO: 2891 - RNA, 20 nt, synthetic construct
  source 1..20: mol_type = other RNA
tgcactaatttcccagggct

SEQ ID NO: 2892 - RNA, 20 nt, synthetic construct
  source 1..20: mol_type = other RNA
tgcagaaccatggctatgag

SEQ ID NO: 2893 - RNA, 20 nt, synthetic construct
  source 1..20: mol_type = other RNA
tgcagatatttgatgtagtt

SEQ ID NO: 2894 - RNA, 20 nt, synthetic construct
  source 1..20: mol_type = other RNA
tgcagatgctggtcttagtt

SEQ ID NO: 2895 - RNA, 20 nt, synthetic construct
  source 1..20: mol_type = other RNA
tgcagatttaggtggcaggg

SEQ ID NO: 2896 - RNA, 20 nt, synthetic construct
  source 1..20: mol_type = other RNA
tgcagcaaatggctcaggtc

SEQ ID NO: 2897 - RNA, 20 nt, synthetic construct
  source 1..20: mol_type = other RNA
tgcagccagcagcccgttcc

SEQ ID NO: 2898 - RNA, 20 nt, synthetic construct
  source 1..20: mol_type = other RNA
tgcaggctgtcgttccggtt

SEQ ID NO: 2899 - RNA, 20 nt, synthetic construct
  source 1..20: mol_type = other RNA
tgcaggtctcttcccagaca

SEQ ID NO: 2900 - RNA, 20 nt, synthetic construct
  source 1..20: mol_type = other RNA
tgcaggtgggccggaagatc

SEQ ID NO: 2901 - RNA, 20 nt, synthetic construct
  source 1..20: mol_type = other RNA
tgcagttctacagtagtact

SEQ ID NO: 2902 - RNA, 20 nt, synthetic construct
  source 1..20: mol_type = other RNA
tgcatataagtctattattg

SEQ ID NO: 2903 - RNA, 20 nt, synthetic construct
  source 1..20: mol_type = other RNA
tgcatccctccgccagggct

SEQ ID NO: 2904 - RNA, 20 nt, synthetic construct
  source 1..20: mol_type = other RNA
tgcatctgctccaggtattt

SEQ ID NO: 2905 - RNA, 20 nt, synthetic construct
  source 1..20: mol_type = other RNA
tgcatcttgttcaggtgacg

SEQ ID NO: 2906 - RNA, 20 nt, synthetic construct
  source 1..20: mol_type = other RNA
tgcatttggtcctcagggga

SEQ ID NO: 2907 - RNA, 20 nt, synthetic construct
  source 1..20: mol_type = other RNA
tgccaactttcaacattagt

SEQ ID NO: 2908 - RNA, 20 nt, synthetic construct
  source 1..20: mol_type = other RNA
tgccaagcagcagccgctgc

SEQ ID NO: 2909 - RNA, 20 nt, synthetic construct
  source 1..20: mol_type = other RNA
tgccacaaggggctgttgcc

SEQ ID NO: 2910 - RNA, 20 nt, synthetic construct
  source 1..20: mol_type = other RNA
tgccaccacgcccagctagt

SEQ ID NO: 2911 - RNA, 20 nt, synthetic construct
  source 1..20: mol_type = other RNA
tgccacctaaatctgcatct

SEQ ID NO: 2912 - RNA, 20 nt, synthetic construct
  source 1..20: mol_type = other RNA
tgccactcactccttagtga

SEQ ID NO: 2913 - RNA, 20 nt, synthetic construct
  source 1..20: mol_type = other RNA
tgccaggggctgcgtctgac

SEQ ID NO: 2914 - RNA, 20 nt, synthetic construct
  source 1..20: mol_type = other RNA
tgccgcgctccctgccacct

SEQ ID NO: 2915 - RNA, 20 nt, synthetic construct
  source 1..20: mol_type = other RNA
tgcctattaattccacaggt

SEQ ID NO: 2916 - RNA, 20 nt, synthetic construct
  source 1..20: mol_type = other RNA
tgcctctttgatccccttat

SEQ ID NO: 2917 - RNA, 20 nt, synthetic construct
  source 1..20: mol_type = other RNA
tgccttggctggcccaggta

SEQ ID NO: 2918 - RNA, 20 nt, synthetic construct
  source 1..20: mol_type = other RNA
tgcctttaacgtccttggtg

SEQ ID NO: 2919 - RNA, 20 nt, synthetic construct
  source 1..20: mol_type = other RNA
tgcgagggtctctcacgtgc

SEQ ID NO: 2920 - RNA, 20 nt, synthetic construct
  source 1..20: mol_type = other RNA
tgcgtctgacatcctgacct

SEQ ID NO: 2921 - RNA, 20 nt, synthetic construct
  source 1..20: mol_type = other RNA
tgctacagagggtgaaaact

SEQ ID NO: 2922 - RNA, 20 nt, synthetic construct
  source 1..20: mol_type = other RNA
tgctagcctactgctgactg

SEQ ID NO: 2923 - RNA, 20 nt, synthetic construct
  source 1..20: mol_type = other RNA
tgctaggaaatccagttgac

SEQ ID NO: 2924 - RNA, 20 nt, synthetic construct
  source 1..20: mol_type = other RNA
tgctcaccccagaagagcgt

SEQ ID NO: 2925 - RNA, 20 nt, synthetic construct
  source 1..20: mol_type = other RNA
tgctccaggtatttgtaggt

SEQ ID NO: 2926 - RNA, 20 nt, synthetic construct
  source 1..20: mol_type = other RNA
tgctcctttcccccattaaa

SEQ ID NO: 2927 - RNA, 20 nt, synthetic construct
  source 1..20: mol_type = other RNA
tgctgaagcagactgtttct

SEQ ID NO: 2928 - RNA, 20 nt, synthetic construct
  source 1..20: mol_type = other RNA
tgctgactggcttgccttgg

SEQ ID NO: 2929 - RNA, 20 nt, synthetic construct
  source 1..20: mol_type = other RNA
tgctgagaaatggggtggaa

SEQ ID NO: 2930 - RNA, 20 nt, synthetic construct
  source 1..20: mol_type = other RNA
tgctgcacaatcccctgagg

SEQ ID NO: 2931 - RNA, 20 nt, synthetic construct
  source 1..20: mol_type = other RNA
tgctgctgttatcagttcag

SEQ ID NO: 2932 - RNA, 20 nt, synthetic construct
  source 1..20: mol_type = other RNA
tgctgcttggcagtcgatcg

SEQ ID NO: 2933 - RNA, 20 nt, synthetic construct
  source 1..20: mol_type = other RNA
tgctggagactggcctagct

SEQ ID NO: 2934 - RNA, 20 nt, synthetic construct
  source 1..20: mol_type = other RNA
tgctggctgcatttggtcct

SEQ ID NO: 2935 - RNA, 20 nt, synthetic construct
  source 1..20: mol_type = other RNA
tgctgggagacctgagccat

SEQ ID NO: 2936 - RNA, 20 nt, synthetic construct
  source 1..20: mol_type = other RNA
tgctggtcttagttatttgt

SEQ ID NO: 2937 - RNA, 20 nt, synthetic construct
  source 1..20: mol_type = other RNA
tgctggttactgaacttgtc

SEQ ID NO: 2938 - RNA, 20 nt, synthetic construct
  source 1..20: mol_type = other RNA
tgctgttatcagttcagtta

SEQ ID NO: 2939 - RNA, 20 nt, synthetic construct
  source 1..20: mol_type = other RNA
tgcttactacctgggccagc

SEQ ID NO: 2940 - RNA, 20 nt, synthetic construct
  source 1..20: mol_type = other RNA
tgcttcagcactttctaaat

SEQ ID NO: 2941 - RNA, 20 nt, synthetic construct
  source 1..20: mol_type = other RNA
tgcttcagtggccattacag

SEQ ID NO: 2942 - RNA, 20 nt, synthetic construct
  source 1..20: mol_type = other RNA
tgcttgctagcctactgctg

SEQ ID NO: 2943 - RNA, 20 nt, synthetic construct
  source 1..20: mol_type = other RNA
tgcttggcagtcgatcggaa

SEQ ID NO: 2944 - RNA, 20 nt, synthetic construct
  source 1..20: mol_type = other RNA
tgcttgtcaccacggtgcta

SEQ ID NO: 2945 - RNA, 20 nt, synthetic construct
  source 1..20: mol_type = other RNA
tgctttcgaaacgagagccc

SEQ ID NO: 2946 - RNA, 20 nt, synthetic construct
  source 1..20: mol_type = other RNA
tggaaaaaggaacactaagg

SEQ ID NO: 2947 - RNA, 20 nt, synthetic construct
  source 1..20: mol_type = other RNA
tggaaacactggacttcaag

SEQ ID NO: 2948 - RNA, 20 nt, synthetic construct
  source 1..20: mol_type = other RNA
tggaaatcagcccctgccac

SEQ ID NO: 2949 - RNA, 20 nt, synthetic construct
  source 1..20: mol_type = other RNA
tggaaattgcagttctacag

SEQ ID NO: 2950 - RNA, 20 nt, synthetic construct
  source 1..20: mol_type = other RNA
tggaagaacaaaacctgagg

SEQ ID NO: 2951 - RNA, 20 nt, synthetic construct
  source 1..20: mol_type = other RNA
tggaagtggggtttctgatt

SEQ ID NO: 2952 - RNA, 20 nt, synthetic construct
  source 1..20: mol_type = other RNA
tggaataaaatgcctttaac

SEQ ID NO: 2953 - RNA, 20 nt, synthetic construct
  source 1..20: mol_type = other RNA
tggaatagggaactgtaatg

SEQ ID NO: 2954 - RNA, 20 nt, synthetic construct
  source 1..20: mol_type = other RNA
tggaattaataggcatcttc

SEQ ID NO: 2955 - RNA, 20 nt, synthetic construct
  source 1..20: mol_type = other RNA
tggacatgctgctgttatca

SEQ ID NO: 2956 - RNA, 20 nt, synthetic construct
  source 1..20: mol_type = other RNA
tggacattcccactgttcac

SEQ ID NO: 2957 - RNA, 20 nt, synthetic construct
  source 1..20: mol_type = other RNA
tggactgtaggactatataa

SEQ ID NO: 2958 - RNA, 20 nt, synthetic construct
  source 1..20: mol_type = other RNA
tggacttcaagaaactggtc

SEQ ID NO: 2959 - RNA, 20 nt, synthetic construct
  source 1..20: mol_type = other RNA
tggagacacacaggtatcca

SEQ ID NO: 2960 - RNA, 20 nt, synthetic construct
  source 1..20: mol_type = other RNA
tggagacagtctcgctgtgt

SEQ ID NO: 2961 - RNA, 20 nt, synthetic construct
  source 1..20: mol_type = other RNA
tggagactggcctagctgta

SEQ ID NO: 2962 - RNA, 20 nt, synthetic construct
  source 1..20: mol_type = other RNA
tggagcagatgcagatttag

SEQ ID NO: 2963 - RNA, 20 nt, synthetic construct
  source 1..20: mol_type = other RNA
tggatacctgtgtgtctcca

SEQ ID NO: 2964 - RNA, 20 nt, synthetic construct
  source 1..20: mol_type = other RNA
tggatcaacctggaagaaca

SEQ ID NO: 2965 - RNA, 20 nt, synthetic construct
  source 1..20: mol_type = other RNA
tggattcctaggtcgtgttt

SEQ ID NO: 2966 - RNA, 20 nt, synthetic construct
  source 1..20: mol_type = other RNA
tggatttcctagcaccgtgg

SEQ ID NO: 2967 - RNA, 20 nt, synthetic construct
  source 1..20: mol_type = other RNA
tggcaacagccccttgtggc

SEQ ID NO: 2968 - RNA, 20 nt, synthetic construct
  source 1..20: mol_type = other RNA
tggcaagacaagttcagtaa

SEQ ID NO: 2969 - RNA, 20 nt, synthetic construct
  source 1..20: mol_type = other RNA
tggcagcggctgctgcttgg

SEQ ID NO: 2970 - RNA, 20 nt, synthetic construct
  source 1..20: mol_type = other RNA
tggcagggagcgcggcagcc

SEQ ID NO: 2971 - RNA, 20 nt, synthetic construct
  source 1..20: mol_type = other RNA
tggcaggggctgatttccaa

SEQ ID NO: 2972 - RNA, 20 nt, synthetic construct
  source 1..20: mol_type = other RNA
tggcagtcgatcggaatcgt

SEQ ID NO: 2973 - RNA, 20 nt, synthetic construct
  source 1..20: mol_type = other RNA
tggccactgaagcacgtgag

SEQ ID NO: 2974 - RNA, 20 nt, synthetic construct
  source 1..20: mol_type = other RNA
tggccagttacttggtttta

SEQ ID NO: 2975 - RNA, 20 nt, synthetic construct
  source 1..20: mol_type = other RNA
tggccattacagttccctat

SEQ ID NO: 2976 - RNA, 20 nt, synthetic construct
  source 1..20: mol_type = other RNA
tggcccaggtagtaagcagt

SEQ ID NO: 2977 - RNA, 20 nt, synthetic construct
  source 1..20: mol_type = other RNA
tggcctagctgtagaatttc

SEQ ID NO: 2978 - RNA, 20 nt, synthetic construct
  source 1..20: mol_type = other RNA
tggcctgtccggtgggaacg

SEQ ID NO: 2979 - RNA, 20 nt, synthetic construct
  source 1..20: mol_type = other RNA
tggcgccgagccttgcttgt

SEQ ID NO: 2980 - RNA, 20 nt, synthetic construct
  source 1..20: mol_type = other RNA
tggcggagggatgcaggtgg

SEQ ID NO: 2981 - RNA, 20 nt, synthetic construct
  source 1..20: mol_type = other RNA
tggctatgaatgtcagaaag

SEQ ID NO: 2982 - RNA, 20 nt, synthetic construct
  source 1..20: mol_type = other RNA
tggctatgagaaccccacct

SEQ ID NO: 2983 - RNA, 20 nt, synthetic construct
  source 1..20: mol_type = other RNA
tggctcaggtctcccagcac

SEQ ID NO: 2984 - RNA, 20 nt, synthetic construct
  source 1..20: mol_type = other RNA
tggctgcatttggtcctcag

SEQ ID NO: 2985 - RNA, 20 nt, synthetic construct
  source 1..20: mol_type = other RNA
tggctggcccaggtagtaag

SEQ ID NO: 2986 - RNA, 20 nt, synthetic construct
  source 1..20: mol_type = other RNA
tggcttgccttggctggccc

SEQ ID NO: 2987 - RNA, 20 nt, synthetic construct
  source 1..20: mol_type = other RNA
tgggaaatgtcgattttcaa

SEQ ID NO: 2988 - RNA, 20 nt, synthetic construct
  source 1..20: mol_type = other RNA
tgggaaattagtgcagatgc

SEQ ID NO: 2989 - RNA, 20 nt, synthetic construct
  source 1..20: mol_type = other RNA
tgggaacctgtggaattaat

SEQ ID NO: 2990 - RNA, 20 nt, synthetic construct
  source 1..20: mol_type = other RNA
tgggaacgggctgctggctg

SEQ ID NO: 2991 - RNA, 20 nt, synthetic construct
  source 1..20: mol_type = other RNA
tgggaagagacctgcacagg

SEQ ID NO: 2992 - RNA, 20 nt, synthetic construct
  source 1..20: mol_type = other RNA
tgggaatgtccagagtccct

SEQ ID NO: 2993 - RNA, 20 nt, synthetic construct
  source 1..20: mol_type = other RNA
tgggaccaggggatctctgg

SEQ ID NO: 2994 - RNA, 20 nt, synthetic construct
  source 1..20: mol_type = other RNA
tgggagacctgagccatttg

SEQ ID NO: 2995 - RNA, 20 nt, synthetic construct
  source 1..20: mol_type = other RNA
tgggatcttccggcccacct

SEQ ID NO: 2996 - RNA, 20 nt, synthetic construct
  source 1..20: mol_type = other RNA
tgggccagccaaggcaagcc

SEQ ID NO: 2997 - RNA, 20 nt, synthetic construct
  source 1..20: mol_type = other RNA
tgggccggaagatcccacga

SEQ ID NO: 2998 - RNA, 20 nt, synthetic construct
  source 1..20: mol_type = other RNA
tgggccttggctatgaatgt

SEQ ID NO: 2999 - RNA, 20 nt, synthetic construct
  source 1..20: mol_type = other RNA
tgggcgacacagcgagactg

SEQ ID NO: 3000 - RNA, 20 nt, synthetic construct
  source 1..20: mol_type = other RNA
tgggctgggttgggggtggg

SEQ ID NO: 3001 - RNA, 20 nt, synthetic construct
  source 1..20: mol_type = other RNA
tggggaaatcctatctctaa

SEQ ID NO: 3002 - RNA, 20 nt, synthetic construct
  source 1..20: mol_type = other RNA
tggggatcaagggactctgg

SEQ ID NO: 3003 - RNA, 20 nt, synthetic construct
  source 1..20: mol_type = other RNA
tgggggaaaggagcaacagg

SEQ ID NO: 3004 - RNA, 20 nt, synthetic construct
  source 1..20: mol_type = other RNA
tgggggtgggaacctgtgga

SEQ ID NO: 3005 - RNA, 20 nt, synthetic construct
  source 1..20: mol_type = other RNA
tggggtgagcattggatcaa

SEQ ID NO: 3006 - RNA, 20 nt, synthetic construct
  source 1..20: mol_type = other RNA
tggggtggaatagggaactg

SEQ ID NO: 3007 - RNA, 20 nt, synthetic construct
  source 1..20: mol_type = other RNA
tggggttctcatagccatgg

SEQ ID NO: 3008 - RNA, 20 nt, synthetic construct
  source 1..20: mol_type = other RNA
tggggtttctgattaattta

SEQ ID NO: 3009 - RNA, 20 nt, synthetic construct
  source 1..20: mol_type = other RNA
tgggtgaaaaatggtaatat

SEQ ID NO: 3010 - RNA, 20 nt, synthetic construct
  source 1..20: mol_type = other RNA
tgggttgggggtgggaacct

SEQ ID NO: 3011 - RNA, 20 nt, synthetic construct
  source 1..20: mol_type = other RNA
tggtcaatatggggaaatcc

SEQ ID NO: 3012 - RNA, 20 nt, synthetic construct
  source 1..20: mol_type = other RNA
tggtcccaccgtctgcttgc

SEQ ID NO: 3013 - RNA, 20 nt, synthetic construct
  source 1..20: mol_type = other RNA
tggtcctcaggggattgtgc

SEQ ID NO: 3014 - RNA, 20 nt, synthetic construct
  source 1..20: mol_type = other RNA
tggtcctttcacatcatttt

SEQ ID NO: 3015 - RNA, 20 nt, synthetic construct
  source 1..20: mol_type = other RNA
tggtcttagttatttgtgtt

SEQ ID NO: 3016 - RNA, 20 nt, synthetic construct
  source 1..20: mol_type = other RNA
tggtctttttcagttctgaa

SEQ ID NO: 3017 - RNA, 20 nt, synthetic construct
  source 1..20: mol_type = other RNA
tggtgaaacacaggagaaag

SEQ ID NO: 3018 - RNA, 20 nt, synthetic construct
  source 1..20: mol_type = other RNA
tggtgacaagcaaggctcgg

SEQ ID NO: 3019 - RNA, 20 nt, synthetic construct
  source 1..20: mol_type = other RNA
tggtgacaggacttttatgg

SEQ ID NO: 3020 - RNA, 20 nt, synthetic construct
  source 1..20: mol_type = other RNA
tggtgtctgggaagagacct

SEQ ID NO: 3021 - RNA, 20 nt, synthetic construct
  source 1..20: mol_type = other RNA
tggttactgaacttgtcttg

SEQ ID NO: 3022 - RNA, 20 nt, synthetic construct
  source 1..20: mol_type = other RNA
tggttctgcatcttgttcag

SEQ ID NO: 3023 - RNA, 20 nt, synthetic construct
  source 1..20: mol_type = other RNA
tggttttatctcctgctgga

SEQ ID NO: 3024 - RNA, 20 nt, synthetic construct
  source 1..20: mol_type = other RNA
tggttttttggagacagtct

SEQ ID NO: 3025 - RNA, 20 nt, synthetic construct
  source 1..20: mol_type = other RNA
tggttttttggttttttgga

SEQ ID NO: 3026 - RNA, 20 nt, synthetic construct
  source 1..20: mol_type = other RNA
tgtaagtcaactcttcagcc

SEQ ID NO: 3027 - RNA, 20 nt, synthetic construct
  source 1..20: mol_type = other RNA
tgtaatggccactgaagcac

SEQ ID NO: 3028 - RNA, 20 nt, synthetic construct
  source 1..20: mol_type = other RNA
tgtagaactgcaatttccat

SEQ ID NO: 3029 - RNA, 20 nt, synthetic construct
  source 1..20: mol_type = other RNA
tgtagaatttcagaactgaa

SEQ ID NO: 3030 - RNA, 20 nt, synthetic construct
  source 1..20: mol_type = other RNA
tgtagcataaaatgttcaca

SEQ ID NO: 3031 - RNA, 20 nt, synthetic construct
  source 1..20: mol_type = other RNA
tgtaggactatataaagtac

SEQ ID NO: 3032 - RNA, 20 nt, synthetic construct
  source 1..20: mol_type = other RNA
tgtaggtggggttctcatag

SEQ ID NO: 3033 - RNA, 20 nt, synthetic construct
  source 1..20: mol_type = other RNA
tgtagtctcagctaggtggg

SEQ ID NO: 3034 - RNA, 20 nt, synthetic construct
  source 1..20: mol_type = other RNA
tgtatacactaagctctcta

SEQ ID NO: 3035 - RNA, 20 nt, synthetic construct
  source 1..20: mol_type = other RNA
tgtattgtctgacacatgct

SEQ ID NO: 3036 - RNA, 20 nt, synthetic construct
  source 1..20: mol_type = other RNA
tgtatttatatttggggatc

SEQ ID NO: 3037 - RNA, 20 nt, synthetic construct
  source 1..20: mol_type = other RNA
tgtcaccaaggacgttaaag

SEQ ID NO: 3038 - RNA, 20 nt, synthetic construct
  source 1..20: mol_type = other RNA
tgtcaccacggtgctaggaa

SEQ ID NO: 3039 - RNA, 20 nt, synthetic construct
  source 1..20: mol_type = other RNA
tgtcagaaagtcatgtgaac

SEQ ID NO: 3040 - RNA, 20 nt, synthetic construct
  source 1..20: mol_type = other RNA
tgtcagacaatacaatggaa

SEQ ID NO: 3041 - RNA, 20 nt, synthetic construct
  source 1..20: mol_type = other RNA
tgtcagacgcagcccctggc

SEQ ID NO: 3042 - RNA, 20 nt, synthetic construct
  source 1..20: mol_type = other RNA
tgtcatcttccgtgagggct

SEQ ID NO: 3043 - RNA, 20 nt, synthetic construct
  source 1..20: mol_type = other RNA
tgtccagagtcccttgatcc

SEQ ID NO: 3044 - RNA, 20 nt, synthetic construct
  source 1..20: mol_type = other RNA
tgtccagtactcgaggagtg

SEQ ID NO: 3045 - RNA, 20 nt, synthetic construct
  source 1..20: mol_type = other RNA
tgtccggtgggaacgggctg

SEQ ID NO: 3046 - RNA, 20 nt, synthetic construct
  source 1..20: mol_type = other RNA
tgtcctggcttttatttaaa

SEQ ID NO: 3047 - RNA, 20 nt, synthetic construct
  source 1..20: mol_type = other RNA
tgtcgattttcaataataga

SEQ ID NO: 3048 - RNA, 20 nt, synthetic construct
  source 1..20: mol_type = other RNA
tgtcgttccggttatgttgt

SEQ ID NO: 3049 - RNA, 20 nt, synthetic construct
  source 1..20: mol_type = other RNA
tgtctccaaaaaaccaaaaa

SEQ ID NO: 3050 - RNA, 20 nt, synthetic construct
  source 1..20: mol_type = other RNA
tgtctccataaaagtcctgt

SEQ ID NO: 3051 - RNA, 20 nt, synthetic construct
  source 1..20: mol_type = other RNA
tgtctcccgggttcaggtga

SEQ ID NO: 3052 - RNA, 20 nt, synthetic construct
  source 1..20: mol_type = other RNA
tgtctgacacatgctctcaa

SEQ ID NO: 3053 - RNA, 20 nt, synthetic construct
  source 1..20: mol_type = other RNA
tgtctgggaagagacctgca

SEQ ID NO: 3054 - RNA, 20 nt, synthetic construct
  source 1..20: mol_type = other RNA
tgtcttctgctggttactga

SEQ ID NO: 3055 - RNA, 20 nt, synthetic construct
  source 1..20: mol_type = other RNA
tgtcttgccactcactcctt

SEQ ID NO: 3056 - RNA, 20 nt, synthetic construct
  source 1..20: mol_type = other RNA
tgtgaaaggaccagtttctt

SEQ ID NO: 3057 - RNA, 20 nt, synthetic construct
  source 1..20: mol_type = other RNA
tgtgaacattttatgctaca

SEQ ID NO: 3058 - RNA, 20 nt, synthetic construct
  source 1..20: mol_type = other RNA
tgtgcagcaaatggctcagg

SEQ ID NO: 3059 - RNA, 20 nt, synthetic construct
  source 1..20: mol_type = other RNA
tgtgcaggtctcttcccaga

SEQ ID NO: 3060 - RNA, 20 nt, synthetic construct
  source 1..20: mol_type = other RNA
tgtgcctcagcctcccacct

SEQ ID NO: 3061 - RNA, 20 nt, synthetic construct
  source 1..20: mol_type = other RNA
tgtggaattaataggcatct

SEQ ID NO: 3062 - RNA, 20 nt, synthetic construct
  source 1..20: mol_type = other RNA
tgtggcaggggctgatttcc

SEQ ID NO: 3063 - RNA, 20 nt, synthetic construct
  source 1..20: mol_type = other RNA
tgtgggctgggttgggggtg

SEQ ID NO: 3064 - RNA, 20 nt, synthetic construct
  source 1..20: mol_type = other RNA
tgtggtgtctgggaagagac

SEQ ID NO: 3065 - RNA, 20 nt, synthetic construct
  source 1..20: mol_type = other RNA
tgtgtaagtcaactcttcag

SEQ ID NO: 3066 - RNA, 20 nt, synthetic construct
  source 1..20: mol_type = other RNA
tgtgtcagacaatacaatgg

SEQ ID NO: 3067 - RNA, 20 nt, synthetic construct
  source 1..20: mol_type = other RNA
tgtgtctccataaaagtcct

SEQ ID NO: 3068 - RNA, 20 nt, synthetic construct
  source 1..20: mol_type = other RNA
tgtgtgccaccacgcccagc

SEQ ID NO: 3069 - RNA, 20 nt, synthetic construct
  source 1..20: mol_type = other RNA
tgtgtgtctccataaaagtc

SEQ ID NO: 3070 - RNA, 20 nt, synthetic construct
  source 1..20: mol_type = other RNA
tgtgtttcaccaccggttct

SEQ ID NO: 3071 - RNA, 20 nt, synthetic construct
  source 1..20: mol_type = other RNA
tgttatcagttcagttactc

SEQ ID NO: 3072 - RNA, 20 nt, synthetic construct
  source 1..20: mol_type = other RNA
tgttcacatgactttctgac

SEQ ID NO: 3073 - RNA, 20 nt, synthetic construct
  source 1..20: mol_type = other RNA
tgttcactaaggagtgagtg

SEQ ID NO: 3074 - RNA, 20 nt, synthetic construct
  source 1..20: mol_type = other RNA
tgttcaggtgacgctcttct

SEQ ID NO: 3075 - RNA, 20 nt, synthetic construct
  source 1..20: mol_type = other RNA
tgttcctttttccaggtatt

SEQ ID NO: 3076 - RNA, 20 nt, synthetic construct
  source 1..20: mol_type = other RNA
tgttctgtcttctgctggtt

SEQ ID NO: 3077 - RNA, 20 nt, synthetic construct
  source 1..20: mol_type = other RNA
tgttcttccaggttgatcca

SEQ ID NO: 3078 - RNA, 20 nt, synthetic construct
  source 1..20: mol_type = other RNA
tgttgaaagttggcaacagc

SEQ ID NO: 3079 - RNA, 20 nt, synthetic construct
  source 1..20: mol_type = other RNA
tgttgccaactttcaacatt

SEQ ID NO: 3080 - RNA, 20 nt, synthetic construct
  source 1..20: mol_type = other RNA
tgttgctcctttcccccatt

SEQ ID NO: 3081 - RNA, 20 nt, synthetic construct
  source 1..20: mol_type = other RNA
tgttgtgtaagtcaactctt

SEQ ID NO: 3082 - RNA, 20 nt, synthetic construct
  source 1..20: mol_type = other RNA
tgtttcaccaccggttctca

SEQ ID NO: 3083 - RNA, 20 nt, synthetic construct
  source 1..20: mol_type = other RNA
tgtttccacggctggatacc

SEQ ID NO: 3084 - RNA, 20 nt, synthetic construct
  source 1..20: mol_type = other RNA
tgtttctgttctgtcttctg

SEQ ID NO: 3085 - RNA, 20 nt, synthetic construct
  source 1..20: mol_type = other RNA
tgttttggttttttggtttt

SEQ ID NO: 3086 - RNA, 20 nt, synthetic construct
  source 1..20: mol_type = other RNA
tgtttttggaaatcagcccc

SEQ ID NO: 3087 - RNA, 20 nt, synthetic construct
  source 1..20: mol_type = other RNA
ttaaaaagggaatactgcct

SEQ ID NO: 3088 - RNA, 20 nt, synthetic construct
  source 1..20: mol_type = other RNA
ttaaaagaatggaaattgca

SEQ ID NO: 3089 - RNA, 20 nt, synthetic construct
  source 1..20: mol_type = other RNA
ttaaaggcattttattccag

SEQ ID NO: 3090 - RNA, 20 nt, synthetic construct
  source 1..20: mol_type = other RNA
ttaaataaaagccaggacag

SEQ ID NO: 3091 - RNA, 20 nt, synthetic construct
  source 1..20: mol_type = other RNA
ttaaatgagctttcaggaag

SEQ ID NO: 3092 - RNA, 20 nt, synthetic construct
  source 1..20: mol_type = other RNA
ttaaatgggtgaaaaatggt

SEQ ID NO: 3093 - RNA, 20 nt, synthetic construct
  source 1..20: mol_type = other RNA
ttaaattaatcagaaacccc

SEQ ID NO: 3094 - RNA, 20 nt, synthetic construct
  source 1..20: mol_type = other RNA
ttaacgtccttggtgacagg

SEQ ID NO: 3095 - RNA, 20 nt, synthetic construct
  source 1..20: mol_type = other RNA
ttaaggtccttactgtattt

SEQ ID NO: 3096 - RNA, 20 nt, synthetic construct
  source 1..20: mol_type = other RNA
ttaataggcatcttcactcc

SEQ ID NO: 3097 - RNA, 20 nt, synthetic construct
  source 1..20: mol_type = other RNA
ttaatcagaaaccccacttc

SEQ ID NO: 3098 - RNA, 20 nt, synthetic construct
  source 1..20: mol_type = other RNA
ttaatgagccctgggaaatt

SEQ ID NO: 3099 - RNA, 20 nt, synthetic construct
  source 1..20: mol_type = other RNA
ttaatgggggaaaggagcaa

SEQ ID NO: 3100 - RNA, 20 nt, synthetic construct
  source 1..20: mol_type = other RNA
ttaattccacaggttcccac

SEQ ID NO: 3101 - RNA, 20 nt, synthetic construct
  source 1..20: mol_type = other RNA
ttacacaacataaccggaac

SEQ ID NO: 3102 - RNA, 20 nt, synthetic construct
  source 1..20: mol_type = other RNA
ttacagttccctattccacc

SEQ ID NO: 3103 - RNA, 20 nt, synthetic construct
  source 1..20: mol_type = other RNA
ttaccatttttcacccattt

SEQ ID NO: 3104 - RNA, 20 nt, synthetic construct
  source 1..20: mol_type = other RNA
ttactacctgggccagccaa

SEQ ID NO: 3105 - RNA, 20 nt, synthetic construct
  source 1..20: mol_type = other RNA
ttactcactggattcctagg

SEQ ID NO: 3106 - RNA, 20 nt, synthetic construct
  source 1..20: mol_type = other RNA
ttactgaacttgtcttgcca

SEQ ID NO: 3107 - RNA, 20 nt, synthetic construct
  source 1..20: mol_type = other RNA
ttactgtatttatatttggg

SEQ ID NO: 3108 - RNA, 20 nt, synthetic construct
  source 1..20: mol_type = other RNA
ttacttggttttatctcctg

SEQ ID NO: 3109 - RNA, 20 nt, synthetic construct
  source 1..20: mol_type = other RNA
ttagaaagtgctgaagcaga

SEQ ID NO: 3110 - RNA, 20 nt, synthetic construct
  source 1..20: mol_type = other RNA
ttagagataggatttcccca

SEQ ID NO: 3111 - RNA, 20 nt, synthetic construct
  source 1..20: mol_type = other RNA
ttagccctcacggaagatga

SEQ ID NO: 3112 - RNA, 20 nt, synthetic construct
  source 1..20: mol_type = other RNA
ttaggtggcagggagcgcgg

SEQ ID NO: 3113 - RNA, 20 nt, synthetic construct
  source 1..20: mol_type = other RNA
ttagtgaacagtgggaatgt

SEQ ID NO: 3114 - RNA, 20 nt, synthetic construct
  source 1..20: mol_type = other RNA
ttagtgcagatgctggtctt

SEQ ID NO: 3115 - RNA, 20 nt, synthetic construct
  source 1..20: mol_type = other RNA
ttagtgtatacagatgaggg

SEQ ID NO: 3116 - RNA, 20 nt, synthetic construct
  source 1..20: mol_type = other RNA
ttagtgttcctttttccagg

SEQ ID NO: 3117 - RNA, 20 nt, synthetic construct
  source 1..20: mol_type = other RNA
ttagtttgggccttggctat

SEQ ID NO: 3118 - RNA, 20 nt, synthetic construct
  source 1..20: mol_type = other RNA
ttatatagtcctacagtcca

SEQ ID NO: 3119 - RNA, 20 nt, synthetic construct
  source 1..20: mol_type = other RNA
ttatatattgagagcatgtg

SEQ ID NO: 3120 - RNA, 20 nt, synthetic construct
  source 1..20: mol_type = other RNA
ttatatgcaggctgtcgttc

SEQ ID NO: 3121 - RNA, 20 nt, synthetic construct
  source 1..20: mol_type = other RNA
ttatattaccatttttcacc

SEQ ID NO: 3122 - RNA, 20 nt, synthetic construct
  source 1..20: mol_type = other RNA
ttatatttggggatcaaggg

SEQ ID NO: 3123 - RNA, 20 nt, synthetic construct
  source 1..20: mol_type = other RNA
ttatcagttcagttactcac

SEQ ID NO: 3124 - RNA, 20 nt, synthetic construct
  source 1..20: mol_type = other RNA
ttatctcctgctggagactg

SEQ ID NO: 3125 - RNA, 20 nt, synthetic construct
  source 1..20: mol_type = other RNA
ttatgctacagagggtgaaa

SEQ ID NO: 3126 - RNA, 20 nt, synthetic construct
  source 1..20: mol_type = other RNA
ttatggagacacacaggtat

SEQ ID NO: 3127 - RNA, 20 nt, synthetic construct
  source 1..20: mol_type = other RNA
ttatgttgtgtaagtcaact

SEQ ID NO: 3128 - RNA, 20 nt, synthetic construct
  source 1..20: mol_type = other RNA
ttattagagataggatttcc

SEQ ID NO: 3129 - RNA, 20 nt, synthetic construct
  source 1..20: mol_type = other RNA
ttattccagcgtcttctaga

SEQ ID NO: 3130 - RNA, 20 nt, synthetic construct
  source 1..20: mol_type = other RNA
ttattgaaaatcgacatttc

SEQ ID NO: 3131 - RNA, 20 nt, synthetic construct
  source 1..20: mol_type = other RNA
ttatttccttagtgttcctt

SEQ ID NO: 3132 - RNA, 20 nt, synthetic construct
  source 1..20: mol_type = other RNA
ttattttctttctcctgtgt

SEQ ID NO: 3133 - RNA, 20 nt, synthetic construct
  source 1..20: mol_type = other RNA
ttcaacattagtttgggcct

SEQ ID NO: 3134 - RNA, 20 nt, synthetic construct
  source 1..20: mol_type = other RNA
ttcaagaaactggtcctttc

SEQ ID NO: 3135 - RNA, 20 nt, synthetic construct
  source 1..20: mol_type = other RNA
ttcacatcattttgcgaggg

SEQ ID NO: 3136 - RNA, 20 nt, synthetic construct
  source 1..20: mol_type = other RNA
ttcacatgactttctgacat

SEQ ID NO: 3137 - RNA, 20 nt, synthetic construct
  source 1..20: mol_type = other RNA
ttcaccaccggttctcattt

SEQ ID NO: 3138 - RNA, 20 nt, synthetic construct
  source 1..20: mol_type = other RNA
ttcacccatttaaaagaatg

SEQ ID NO: 3139 - RNA, 20 nt, synthetic construct
  source 1..20: mol_type = other RNA
ttcaccctctgtagcataaa

SEQ ID NO: 3140 - RNA, 20 nt, synthetic construct
  source 1..20: mol_type = other RNA
ttcactaaggagtgagtggc

SEQ ID NO: 3141 - RNA, 20 nt, synthetic construct
  source 1..20: mol_type = other RNA
ttcactcctcgagtactgga

SEQ ID NO: 3142 - RNA, 20 nt, synthetic construct
  source 1..20: mol_type = other RNA
ttcactgtcctggcttttat

SEQ ID NO: 3143 - RNA, 20 nt, synthetic construct
  source 1..20: mol_type = other RNA
ttcagaactgaaaaagacca

SEQ ID NO: 3144 - RNA, 20 nt, synthetic construct
  source 1..20: mol_type = other RNA
ttcagcactttctaaatttc

SEQ ID NO: 3145 - RNA, 20 nt, synthetic construct
  source 1..20: mol_type = other RNA
ttcagcctcattcactgtcc

SEQ ID NO: 3146 - RNA, 20 nt, synthetic construct
  source 1..20: mol_type = other RNA
ttcaggaagttgctgagaaa

SEQ ID NO: 3147 - RNA, 20 nt, synthetic construct
  source 1..20: mol_type = other RNA
ttcagggctctcgtttcgaa

SEQ ID NO: 3148 - RNA, 20 nt, synthetic construct
  source 1..20: mol_type = other RNA
ttcaggtgacgctcttctgg

SEQ ID NO: 3149 - RNA, 20 nt, synthetic construct
  source 1..20: mol_type = other RNA
ttcagtaaccagcagaagac

SEQ ID NO: 3150 - RNA, 20 nt, synthetic construct
  source 1..20: mol_type = other RNA
ttcagtggccattacagttc

SEQ ID NO: 3151 - RNA, 20 nt, synthetic construct
  source 1..20: mol_type = other RNA
ttcagttactcactggattc

SEQ ID NO: 3152 - RNA, 20 nt, synthetic construct
  source 1..20: mol_type = other RNA
ttcagttctgaaattctaca

SEQ ID NO: 3153 - RNA, 20 nt, synthetic construct
  source 1..20: mol_type = other RNA
ttcatagccaaggcccaaac

SEQ ID NO: 3154 - RNA, 20 nt, synthetic construct
  source 1..20: mol_type = other RNA
ttccaaaaacacgacctagg

SEQ ID NO: 3155 - RNA, 20 nt, synthetic construct
  source 1..20: mol_type = other RNA
ttccacaggttcccaccccc

SEQ ID NO: 3156 - RNA, 20 nt, synthetic construct
  source 1..20: mol_type = other RNA
ttccaccccatttctcagca

SEQ ID NO: 3157 - RNA, 20 nt, synthetic construct
  source 1..20: mol_type = other RNA
ttccacggctggatacctgt

SEQ ID NO: 3158 - RNA, 20 nt, synthetic construct
  source 1..20: mol_type = other RNA
ttccagcgtcttctagagag

SEQ ID NO: 3159 - RNA, 20 nt, synthetic construct
  source 1..20: mol_type = other RNA
ttccaggttgatccaatgct

SEQ ID NO: 3160 - RNA, 20 nt, synthetic construct
  source 1..20: mol_type = other RNA
ttccattcttttaaatgggt

SEQ ID NO: 3161 - RNA, 20 nt, synthetic construct
  source 1..20: mol_type = other RNA
ttccattgtattgtctgaca

SEQ ID NO: 3162 - RNA, 20 nt, synthetic construct
  source 1..20: mol_type = other RNA
ttcccaccggacaggccaaa

SEQ ID NO: 3163 - RNA, 20 nt, synthetic construct
  source 1..20: mol_type = other RNA
ttcccactgttcactaagga

SEQ ID NO: 3164 - RNA, 20 nt, synthetic construct
  source 1..20: mol_type = other RNA
ttcccagacaccacaatgac

SEQ ID NO: 3165 - RNA, 20 nt, synthetic construct
  source 1..20: mol_type = other RNA
ttcccagggctcattaaggt

SEQ ID NO: 3166 - RNA, 20 nt, synthetic construct
  source 1..20: mol_type = other RNA
ttccccatattgaccagggt

SEQ ID NO: 3167 - RNA, 20 nt, synthetic construct
  source 1..20: mol_type = other RNA
ttccctattccaccccattt

SEQ ID NO: 3168 - RNA, 20 nt, synthetic construct
  source 1..20: mol_type = other RNA
ttccctttttaaatgagctt

SEQ ID NO: 3169 - RNA, 20 nt, synthetic construct
  source 1..20: mol_type = other RNA
ttccgatcgactgccaagca

SEQ ID NO: 3170 - RNA, 20 nt, synthetic construct
  source 1..20: mol_type = other RNA
ttccggcccacctgcatccc

SEQ ID NO: 3171 - RNA, 20 nt, synthetic construct
  source 1..20: mol_type = other RNA
ttccggttatgttgtgtaag

SEQ ID NO: 3172 - RNA, 20 nt, synthetic construct
  source 1..20: mol_type = other RNA
ttccgtgagggctaagcttt

SEQ ID NO: 3173 - RNA, 20 nt, synthetic construct
  source 1..20: mol_type = other RNA
ttcctagcaccgtggtgaca

SEQ ID NO: 3174 - RNA, 20 nt, synthetic construct
  source 1..20: mol_type = other RNA
ttcctaggtcgtgtttttgg

SEQ ID NO: 3175 - RNA, 20 nt, synthetic construct
  source 1..20: mol_type = other RNA
ttcctgaaagctcatttaaa

SEQ ID NO: 3176 - RNA, 20 nt, synthetic construct
  source 1..20: mol_type = other RNA
ttcctgttgctcctttcccc

SEQ ID NO: 3177 - RNA, 20 nt, synthetic construct
  source 1..20: mol_type = other RNA
ttccttagtgttcctttttc

SEQ ID NO: 3178 - RNA, 20 nt, synthetic construct
  source 1..20: mol_type = other RNA
ttcctttttccaggtatttt

SEQ ID NO: 3179 - RNA, 20 nt, synthetic construct
  source 1..20: mol_type = other RNA
ttcgaaacgagagccctgaa

SEQ ID NO: 3180 - RNA, 20 nt, synthetic construct
  source 1..20: mol_type = other RNA
ttcgaaagcattgcctcttt

SEQ ID NO: 3181 - RNA, 20 nt, synthetic construct
  source 1..20: mol_type = other RNA
ttctaaatttcctgttgctc

SEQ ID NO: 3182 - RNA, 20 nt, synthetic construct
  source 1..20: mol_type = other RNA
ttctacagctaggccagtct

SEQ ID NO: 3183 - RNA, 20 nt, synthetic construct
  source 1..20: mol_type = other RNA
ttctacagtagtactttata

SEQ ID NO: 3184 - RNA, 20 nt, synthetic construct
  source 1..20: mol_type = other RNA
ttctagagagcttagtgtat

SEQ ID NO: 3185 - RNA, 20 nt, synthetic construct
  source 1..20: mol_type = other RNA
ttctcagattatttccttag

SEQ ID NO: 3186 - RNA, 20 nt, synthetic construct
  source 1..20: mol_type = other RNA
ttctcagcaacttcctgaaa

SEQ ID NO: 3187 - RNA, 20 nt, synthetic construct
  source 1..20: mol_type = other RNA
ttctcatagccatggttctg

SEQ ID NO: 3188 - RNA, 20 nt, synthetic construct
  source 1..20: mol_type = other RNA
ttctcatttggcctgtccgg

SEQ ID NO: 3189 - RNA, 20 nt, synthetic construct
  source 1..20: mol_type = other RNA
ttctcctgtgtttcaccacc

SEQ ID NO: 3190 - RNA, 20 nt, synthetic construct
  source 1..20: mol_type = other RNA
ttctgaaattctacagctag

SEQ ID NO: 3191 - RNA, 20 nt, synthetic construct
  source 1..20: mol_type = other RNA
ttctgacattcatagccaag

SEQ ID NO: 3192 - RNA, 20 nt, synthetic construct
  source 1..20: mol_type = other RNA
ttctgcatcttgttcaggtg

SEQ ID NO: 3193 - RNA, 20 nt, synthetic construct
  source 1..20: mol_type = other RNA
ttctgctggttactgaactt

SEQ ID NO: 3194 - RNA, 20 nt, synthetic construct
  source 1..20: mol_type = other RNA
ttctggggtgagcattggat

SEQ ID NO: 3195 - RNA, 20 nt, synthetic construct
  source 1..20: mol_type = other RNA
ttctgtcttctgctggttac

SEQ ID NO: 3196 - RNA, 20 nt, synthetic construct
  source 1..20: mol_type = other RNA
ttctgttctgtcttctgctg

SEQ ID NO: 3197 - RNA, 20 nt, synthetic construct
  source 1..20: mol_type = other RNA
ttcttccaggttgatccaat

SEQ ID NO: 3198 - RNA, 20 nt, synthetic construct
  source 1..20: mol_type = other RNA
ttcttgaagtccagtgtttc

SEQ ID NO: 3199 - RNA, 20 nt, synthetic construct
  source 1..20: mol_type = other RNA
ttctttaaataaaagccagg

SEQ ID NO: 3200 - RNA, 20 nt, synthetic construct
  source 1..20: mol_type = other RNA
ttctttctcctgtgtttcac

SEQ ID NO: 3201 - RNA, 20 nt, synthetic construct
  source 1..20: mol_type = other RNA
ttcttttaaatgggtgaaaa

SEQ ID NO: 3202 - RNA, 20 nt, synthetic construct
  source 1..20: mol_type = other RNA
ttgaaaatcgacatttccca

SEQ ID NO: 3203 - RNA, 20 nt, synthetic construct
  source 1..20: mol_type = other RNA
ttgaaagttggcaacagccc

SEQ ID NO: 3204 - RNA, 20 nt, synthetic construct
  source 1..20: mol_type = other RNA
ttgaagtccagtgtttccac

SEQ ID NO: 3205 - RNA, 20 nt, synthetic construct
  source 1..20: mol_type = other RNA
ttgaccagggtgatctcaaa

SEQ ID NO: 3206 - RNA, 20 nt, synthetic construct
  source 1..20: mol_type = other RNA
ttgactgtcatcttccgtga

SEQ ID NO: 3207 - RNA, 20 nt, synthetic construct
  source 1..20: mol_type = other RNA
ttgacttacacaacataacc

SEQ ID NO: 3208 - RNA, 20 nt, synthetic construct
  source 1..20: mol_type = other RNA
ttgagagcatgtgtcagaca

SEQ ID NO: 3209 - RNA, 20 nt, synthetic construct
  source 1..20: mol_type = other RNA
ttgagatcaccctggtcaat

SEQ ID NO: 3210 - RNA, 20 nt, synthetic construct
  source 1..20: mol_type = other RNA
ttgatccaatgctcacccca

SEQ ID NO: 3211 - RNA, 20 nt, synthetic construct
  source 1..20: mol_type = other RNA
ttgatccccaaatataaata

SEQ ID NO: 3212 - RNA, 20 nt, synthetic construct
  source 1..20: mol_type = other RNA
ttgatccccttattttcttt

SEQ ID NO: 3213 - RNA, 20 nt, synthetic construct
  source 1..20: mol_type = other RNA
ttgcagatatttgatgtagt

SEQ ID NO: 3214 - RNA, 20 nt, synthetic construct
  source 1..20: mol_type = other RNA
ttgcagttctacagtagtac

SEQ ID NO: 3215 - RNA, 20 nt, synthetic construct
  source 1..20: mol_type = other RNA
ttgccaactttcaacattag

SEQ ID NO: 3216 - RNA, 20 nt, synthetic construct
  source 1..20: mol_type = other RNA
ttgccactcactccttagtg

SEQ ID NO: 3217 - RNA, 20 nt, synthetic construct
  source 1..20: mol_type = other RNA
ttgcctctttgatcccctta

SEQ ID NO: 3218 - RNA, 20 nt, synthetic construct
  source 1..20: mol_type = other RNA
ttgccttggctggcccaggt

SEQ ID NO: 3219 - RNA, 20 nt, synthetic construct
  source 1..20: mol_type = other RNA
ttgcgagggtctctcacgtg

SEQ ID NO: 3220 - RNA, 20 nt, synthetic construct
  source 1..20: mol_type = other RNA
ttgctagcctactgctgact

SEQ ID NO: 3221 - RNA, 20 nt, synthetic construct
  source 1..20: mol_type = other RNA
ttgctcctttcccccattaa

SEQ ID NO: 3222 - RNA, 20 nt, synthetic construct
  source 1..20: mol_type = other RNA
ttgctgagaaatggggtgga

SEQ ID NO: 3223 - RNA, 20 nt, synthetic construct
  source 1..20: mol_type = other RNA
ttgctgcacaatcccctgag

SEQ ID NO: 3224 - RNA, 20 nt, synthetic construct
  source 1..20: mol_type = other RNA
ttgcttgtcaccacggtgct

SEQ ID NO: 3225 - RNA, 20 nt, synthetic construct
  source 1..20: mol_type = other RNA
ttggaaatcagcccctgcca

SEQ ID NO: 3226 - RNA, 20 nt, synthetic construct
  source 1..20: mol_type = other RNA
ttggagacagtctcgctgtg

SEQ ID NO: 3227 - RNA, 20 nt, synthetic construct
  source 1..20: mol_type = other RNA
ttggatcaacctggaagaac

SEQ ID NO: 3228 - RNA, 20 nt, synthetic construct
  source 1..20: mol_type = other RNA
ttggcaacagccccttgtgg

SEQ ID NO: 3229 - RNA, 20 nt, synthetic construct
  source 1..20: mol_type = other RNA
ttggcagtcgatcggaatcg

SEQ ID NO: 3230 - RNA, 20 nt, synthetic construct
  source 1..20: mol_type = other RNA
ttggcctgtccggtgggaac

SEQ ID NO: 3231 - RNA, 20 nt, synthetic construct
  source 1..20: mol_type = other RNA
ttggctatgaatgtcagaaa

SEQ ID NO: 3232 - RNA, 20 nt, synthetic construct
  source 1..20: mol_type = other RNA
ttggctggcccaggtagtaa

SEQ ID NO: 3233 - RNA, 20 nt, synthetic construct
  source 1..20: mol_type = other RNA
ttgggccttggctatgaatg

SEQ ID NO: 3234 - RNA, 20 nt, synthetic construct
  source 1..20: mol_type = other RNA
ttggggatcaagggactctg

SEQ ID NO: 3235 - RNA, 20 nt, synthetic construct
  source 1..20: mol_type = other RNA
ttgggggtgggaacctgtgg

SEQ ID NO: 3236 - RNA, 20 nt, synthetic construct
  source 1..20: mol_type = other RNA
ttggtcctcaggggattgtg

SEQ ID NO: 3237 - RNA, 20 nt, synthetic construct
  source 1..20: mol_type = other RNA
ttggtgacaggacttttatg

SEQ ID NO: 3238 - RNA, 20 nt, synthetic construct
  source 1..20: mol_type = other RNA
ttggttttatctcctgctgg

SEQ ID NO: 3239 - RNA, 20 nt, synthetic construct
  source 1..20: mol_type = other RNA
ttggttttttggagacagtc

SEQ ID NO: 3240 - RNA, 20 nt, synthetic construct
  source 1..20: mol_type = other RNA
ttggttttttggttttttgg

SEQ ID NO: 3241 - RNA, 20 nt, synthetic construct
  source 1..20: mol_type = other RNA
ttgtaggtggggttctcata

SEQ ID NO: 3242 - RNA, 20 nt, synthetic construct
  source 1..20: mol_type = other RNA
ttgtattgtctgacacatgc

SEQ ID NO: 3243 - RNA, 20 nt, synthetic construct
  source 1..20: mol_type = other RNA
ttgtcaccacggtgctagga

SEQ ID NO: 3244 - RNA, 20 nt, synthetic construct
  source 1..20: mol_type = other RNA
ttgtctgacacatgctctca

SEQ ID NO: 3245 - RNA, 20 nt, synthetic construct
  source 1..20: mol_type = other RNA
ttgtcttgccactcactcct

SEQ ID NO: 3246 - RNA, 20 nt, synthetic construct
  source 1..20: mol_type = other RNA
ttgtgcagcaaatggctcag

SEQ ID NO: 3247 - RNA, 20 nt, synthetic construct
  source 1..20: mol_type = other RNA
ttgtggcaggggctgatttc

SEQ ID NO: 3248 - RNA, 20 nt, synthetic construct
  source 1..20: mol_type = other RNA
ttgtggtgtctgggaagaga

SEQ ID NO: 3249 - RNA, 20 nt, synthetic construct
  source 1..20: mol_type = other RNA
ttgtgtaagtcaactcttca

SEQ ID NO: 3250 - RNA, 20 nt, synthetic construct
  source 1..20: mol_type = other RNA
ttgttcaggtgacgctcttc

SEQ ID NO: 3251 - RNA, 20 nt, synthetic construct
  source 1..20: mol_type = other RNA
ttgttcttccaggttgatcc

SEQ ID NO: 3252 - RNA, 20 nt, synthetic construct
  source 1..20: mol_type = other RNA
ttgttttggttttttggttt

SEQ ID NO: 3253 - RNA, 20 nt, synthetic construct
  source 1..20: mol_type = other RNA
tttaaaaagggaatactgcc

SEQ ID NO: 3254 - RNA, 20 nt, synthetic construct
  source 1..20: mol_type = other RNA
tttaaaagaatggaaattgc

SEQ ID NO: 3255 - RNA, 20 nt, synthetic construct
  source 1..20: mol_type = other RNA
tttaaataaaagccaggaca

SEQ ID NO: 3256 - RNA, 20 nt, synthetic construct
  source 1..20: mol_type = other RNA
tttaaatgagctttcaggaa

SEQ ID NO: 3257 - RNA, 20 nt, synthetic construct
  source 1..20: mol_type = other RNA
tttaaatgggtgaaaaatgg

SEQ ID NO: 3258 - RNA, 20 nt, synthetic construct
  source 1..20: mol_type = other RNA
tttaaattaatcagaaaccc

SEQ ID NO: 3259 - RNA, 20 nt, synthetic construct
  source 1..20: mol_type = other RNA
tttaacgtccttggtgacag

SEQ ID NO: 3260 - RNA, 20 nt, synthetic construct
  source 1..20: mol_type = other RNA
tttaatgggggaaaggagca

SEQ ID NO: 3261 - RNA, 20 nt, synthetic construct
  source 1..20: mol_type = other RNA
tttagaaagtgctgaagcag

SEQ ID NO: 3262 - RNA, 20 nt, synthetic construct
  source 1..20: mol_type = other RNA
tttaggtggcagggagcgcg

SEQ ID NO: 3263 - RNA, 20 nt, synthetic construct
  source 1..20: mol_type = other RNA
tttatatagtcctacagtcc

SEQ ID NO: 3264 - RNA, 20 nt, synthetic construct
  source 1..20: mol_type = other RNA
tttatatttggggatcaagg

SEQ ID NO: 3265 - RNA, 20 nt, synthetic construct
  source 1..20: mol_type = other RNA
tttatctcctgctggagact

SEQ ID NO: 3266 - RNA, 20 nt, synthetic construct
  source 1..20: mol_type = other RNA
tttatgctacagagggtgaa

SEQ ID NO: 3267 - RNA, 20 nt, synthetic construct
  source 1..20: mol_type = other RNA
tttatggagacacacaggta

SEQ ID NO: 3268 - RNA, 20 nt, synthetic construct
  source 1..20: mol_type = other RNA
tttattagagataggatttc

SEQ ID NO: 3269 - RNA, 20 nt, synthetic construct
  source 1..20: mol_type = other RNA
tttattccagcgtcttctag

SEQ ID NO: 3270 - RNA, 20 nt, synthetic construct
  source 1..20: mol_type = other RNA
tttcaacattagtttgggcc

SEQ ID NO: 3271 - RNA, 20 nt, synthetic construct
  source 1..20: mol_type = other RNA
tttcacatcattttgcgagg

SEQ ID NO: 3272 - RNA, 20 nt, synthetic construct
  source 1..20: mol_type = other RNA
tttcaccaccggttctcatt

SEQ ID NO: 3273 - RNA, 20 nt, synthetic construct
  source 1..20: mol_type = other RNA
tttcacccatttaaaagaat

SEQ ID NO: 3274 - RNA, 20 nt, synthetic construct
  source 1..20: mol_type = other RNA
tttcaccctctgtagcataa

SEQ ID NO: 3275 - RNA, 20 nt, synthetic construct
  source 1..20: mol_type = other RNA
tttcagaactgaaaaagacc

SEQ ID NO: 3276 - RNA, 20 nt, synthetic construct
  source 1..20: mol_type = other RNA
tttcaggaagttgctgagaa

SEQ ID NO: 3277 - RNA, 20 nt, synthetic construct
  source 1..20: mol_type = other RNA
tttcagggctctcgtttcga

SEQ ID NO: 3278 - RNA, 20 nt, synthetic construct
  source 1..20: mol_type = other RNA
tttcagttctgaaattctac

SEQ ID NO: 3279 - RNA, 20 nt, synthetic construct
  source 1..20: mol_type = other RNA
tttccaaaaacacgacctag

SEQ ID NO: 3280 - RNA, 20 nt, synthetic construct
  source 1..20: mol_type = other RNA
tttccacggctggatacctg

SEQ ID NO: 3281 - RNA, 20 nt, synthetic construct
  source 1..20: mol_type = other RNA
tttccattcttttaaatggg

SEQ ID NO: 3282 - RNA, 20 nt, synthetic construct
  source 1..20: mol_type = other RNA
tttcccagggctcattaagg

SEQ ID NO: 3283 - RNA, 20 nt, synthetic construct
  source 1..20: mol_type = other RNA
tttccccatattgaccaggg

SEQ ID NO: 3284 - RNA, 20 nt, synthetic construct
  source 1..20: mol_type = other RNA
tttcctagcaccgtggtgac

SEQ ID NO: 3285 - RNA, 20 nt, synthetic construct
  source 1..20: mol_type = other RNA
tttcctgttgctcctttccc

SEQ ID NO: 3286 - RNA, 20 nt, synthetic construct
  source 1..20: mol_type = other RNA
tttccttagtgttccttttt

SEQ ID NO: 3287 - RNA, 20 nt, synthetic construct
  source 1..20: mol_type = other RNA
tttcgaaacgagagccctga

SEQ ID NO: 3288 - RNA, 20 nt, synthetic construct
  source 1..20: mol_type = other RNA
tttcgaaagcattgcctctt

SEQ ID NO: 3289 - RNA, 20 nt, synthetic construct
  source 1..20: mol_type = other RNA
tttctaaatttcctgttgct

SEQ ID NO: 3290 - RNA, 20 nt, synthetic construct
  source 1..20: mol_type = other RNA
tttctcagattatttcctta

SEQ ID NO: 3291 - RNA, 20 nt, synthetic construct
  source 1..20: mol_type = other RNA
tttctcagcaacttcctgaa

SEQ ID NO: 3292 - RNA, 20 nt, synthetic construct
  source 1..20: mol_type = other RNA
tttctcctgtgtttcaccac

SEQ ID NO: 3293 - RNA, 20 nt, synthetic construct
  source 1..20: mol_type = other RNA
tttctgacattcatagccaa

SEQ ID NO: 3294 - RNA, 20 nt, synthetic construct
  source 1..20: mol_type = other RNA
tttctgttctgtcttctgct

SEQ ID NO: 3295 - RNA, 20 nt, synthetic construct
  source 1..20: mol_type = other RNA
tttcttgaagtccagtgttt

SEQ ID NO: 3296 - RNA, 20 nt, synthetic construct
  source 1..20: mol_type = other RNA
tttctttaaataaaagccag

SEQ ID NO: 3297 - RNA, 20 nt, synthetic construct
  source 1..20: mol_type = other RNA
tttctttctcctgtgtttca

SEQ ID NO: 3298 - RNA, 20 nt, synthetic construct
  source 1..20: mol_type = other RNA
tttgagatcaccctggtcaa

SEQ ID NO: 3299 - RNA, 20 nt, synthetic construct
  source 1..20: mol_type = other RNA
tttgatccccttattttctt

SEQ ID NO: 3300 - RNA, 20 nt, synthetic construct
  source 1..20: mol_type = other RNA
tttgcgagggtctctcacgt

SEQ ID NO: 3301 - RNA, 20 nt, synthetic construct
  source 1..20: mol_type = other RNA
tttgctgcacaatcccctga

SEQ ID NO: 3302 - RNA, 20 nt, synthetic construct
  source 1..20: mol_type = other RNA
tttggaaatcagcccctgcc

SEQ ID NO: 3303 - RNA, 20 nt, synthetic construct
  source 1..20: mol_type = other RNA
tttggagacagtctcgctgt

SEQ ID NO: 3304 - RNA, 20 nt, synthetic construct
  source 1..20: mol_type = other RNA
tttggcctgtccggtgggaa

SEQ ID NO: 3305 - RNA, 20 nt, synthetic construct
  source 1..20: mol_type = other RNA
tttgggccttggctatgaat

SEQ ID NO: 3306 - RNA, 20 nt, synthetic construct
  source 1..20: mol_type = other RNA
tttggggatcaagggactct

SEQ ID NO: 3307 - RNA, 20 nt, synthetic construct
  source 1..20: mol_type = other RNA
tttggtcctcaggggattgt

SEQ ID NO: 3308 - RNA, 20 nt, synthetic construct
  source 1..20: mol_type = other RNA
tttggttttttggagacagt

SEQ ID NO: 3309 - RNA, 20 nt, synthetic construct
  source 1..20: mol_type = other RNA
tttggttttttggttttttg

SEQ ID NO: 3310 - RNA, 20 nt, synthetic construct
  source 1..20: mol_type = other RNA
tttgtaggtggggttctcat

SEQ ID NO: 3311 - RNA, 20 nt, synthetic construct
  source 1..20: mol_type = other RNA
tttgttcttccaggttgatc

SEQ ID NO: 3312 - RNA, 20 nt, synthetic construct
  source 1..20: mol_type = other RNA
tttgttttggttttttggtt

SEQ ID NO: 3313 - RNA, 20 nt, synthetic construct
  source 1..20: mol_type = other RNA
ttttaaatgagctttcagga

SEQ ID NO: 3314 - RNA, 20 nt, synthetic construct
  source 1..20: mol_type = other RNA
ttttaaatgggtgaaaaatg

SEQ ID NO: 3315 - RNA, 20 nt, synthetic construct
  source 1..20: mol_type = other RNA
ttttaatgggggaaaggagc

SEQ ID NO: 3316 - RNA, 20 nt, synthetic construct
  source 1..20: mol_type = other RNA
ttttatctcctgctggagac

SEQ ID NO: 3317 - RNA, 20 nt, synthetic construct
  source 1..20: mol_type = other RNA
ttttatgctacagagggtga

SEQ ID NO: 3318 - RNA, 20 nt, synthetic construct
  source 1..20: mol_type = other RNA
ttttatggagacacacaggt

SEQ ID NO: 3319 - RNA, 20 nt, synthetic construct
  source 1..20: mol_type = other RNA
ttttattccagcgtcttcta

SEQ ID NO: 3320 - RNA, 20 nt, synthetic construct
  source 1..20: mol_type = other RNA
ttttcacccatttaaaagaa

SEQ ID NO: 3321 - RNA, 20 nt, synthetic construct
  source 1..20: mol_type = other RNA
ttttcaccctctgtagcata

SEQ ID NO: 3322 - RNA, 20 nt, synthetic construct
  source 1..20: mol_type = other RNA
ttttcagttctgaaattcta

SEQ ID NO: 3323 - RNA, 20 nt, synthetic construct
  source 1..20: mol_type = other RNA
ttttctcagattatttcctt

SEQ ID NO: 3324 - RNA, 20 nt, synthetic construct
  source 1..20: mol_type = other RNA
ttttctttctcctgtgtttc

SEQ ID NO: 3325 - RNA, 20 nt, synthetic construct
  source 1..20: mol_type = other RNA
ttttgcgagggtctctcacg

SEQ ID NO: 3326 - RNA, 20 nt, synthetic construct
  source 1..20: mol_type = other RNA
ttttggaaatcagcccctgc

SEQ ID NO: 3327 - RNA, 20 nt, synthetic construct
  source 1..20: mol_type = other RNA
ttttggagacagtctcgctg

SEQ ID NO: 3328 - RNA, 20 nt, synthetic construct
  source 1..20: mol_type = other RNA
ttttggttttttggagacag

SEQ ID NO: 3329 - RNA, 20 nt, synthetic construct
  source 1..20: mol_type = other RNA
ttttgttcttccaggttgat

SEQ ID NO: 3330 - RNA, 20 nt, synthetic construct
  source 1..20: mol_type = other RNA
tttttaaatgagctttcagg

SEQ ID NO: 3331 - RNA, 20 nt, synthetic construct
  source 1..20: mol_type = other RNA
tttttaatgggggaaaggag

SEQ ID NO: 3332 - RNA, 20 nt, synthetic construct
  source 1..20: mol_type = other RNA
tttttcacccatttaaaaga

SEQ ID NO: 3333 - RNA, 20 nt, synthetic construct
  source 1..20: mol_type = other RNA
tttttcagttctgaaattct

SEQ ID NO: 3334 - RNA, 20 nt, synthetic construct
  source 1..20: mol_type = other RNA
tttttggaaatcagcccctg

SEQ ID NO: 3335 - RNA, 20 nt, synthetic construct
  source 1..20: mol_type = other RNA
tttttggagacagtctcgct

SEQ ID NO: 3336 - RNA, 20 nt, synthetic construct
  source 1..20: mol_type = other RNA
tttttggttttttggagaca

SEQ ID NO: 3337 - RNA, 20 nt, synthetic construct
  source 1..20: mol_type = other RNA
ttttttaatgggggaaagga

SEQ ID NO: 3338 - RNA, 20 nt, synthetic construct
  source 1..20: mol_type = other RNA
ttttttggttttttggagac

SEQ ID NO: 3339 - RNA, 21 nt, synthetic construct
  source 1..21: mol_type = other RNA
aaaaaaggcagtattcccttt

SEQ ID NO: 3340 - RNA, 21 nt, synthetic construct
  source 1..21: mol_type = other RNA
aaaaaatacctggaaaaagga

SEQ ID NO: 3341 - RNA, 21 nt, synthetic construct
  source 1..21: mol_type = other RNA
aaaaacacgacctaggaatcc

SEQ ID NO: 3342 - RNA, 21 nt, synthetic construct
  source 1..21: mol_type = other RNA
aaaaagaccagagatcccctg

SEQ ID NO: 3343 - RNA, 21 nt, synthetic construct
  source 1..21: mol_type = other RNA
aaaaaggaacactaaggaaat

SEQ ID NO: 3344 - RNA, 21 nt, synthetic construct
  source 1..21: mol_type = other RNA
aaaaaggcagtattccctttt

SEQ ID NO: 3345 - RNA, 21 nt, synthetic construct
  source 1..21: mol_type = other RNA
aaaaagggaatactgcctttt

SEQ ID NO: 3346 - RNA, 21 nt, synthetic construct
  source 1..21: mol_type = other RNA
aaaaatacaaagactagctgg

SEQ ID NO: 3347 - RNA, 21 nt, synthetic construct
  source 1..21: mol_type = other RNA
aaaaatacctggaaaaaggaa

SEQ ID NO: 3348 - RNA, 21 nt, synthetic construct
  source 1..21: mol_type = other RNA
aaaacacaaataactaagacc

SEQ ID NO: 3349 - RNA, 21 nt, synthetic construct
  source 1..21: mol_type = other RNA
aaaacacgacctaggaatcca

SEQ ID NO: 3350 - RNA, 21 nt, synthetic construct
  source 1..21: mol_type = other RNA
aaaaccaagtaactggccagg

SEQ ID NO: 3351 - RNA, 21 nt, synthetic construct
  source 1..21: mol_type = other RNA
aaaacctgagggtcattgtgg

SEQ ID NO: 3352 - RNA, 21 nt, synthetic construct
  source 1..21: mol_type = other RNA
aaaactacatcaaatatctgc

SEQ ID NO: 3353 - RNA, 21 nt, synthetic construct
  source 1..21: mol_type = other RNA
aaaagaatggaaattgcagtt

SEQ ID NO: 3354 - RNA, 21 nt, synthetic construct
  source 1..21: mol_type = other RNA
aaaagaccagagatcccctgg

SEQ ID NO: 3355 - RNA, 21 nt, synthetic construct
  source 1..21: mol_type = other RNA
aaaagagttttcaccctctgt

SEQ ID NO: 3356 - RNA, 21 nt, synthetic construct
  source 1..21: mol_type = other RNA
aaaagccaggacagtgaatga

SEQ ID NO: 3357 - RNA, 21 nt, synthetic construct
  source 1..21: mol_type = other RNA
aaaaggaacactaaggaaata

SEQ ID NO: 3358 - RNA, 21 nt, synthetic construct
  source 1..21: mol_type = other RNA
aaaaggcagtattcccttttt

SEQ ID NO: 3359 - RNA, 21 nt, synthetic construct
  source 1..21: mol_type = other RNA
aaaagggaatactgccttttt

SEQ ID NO: 3360 - RNA, 21 nt, synthetic construct
  source 1..21: mol_type = other RNA
aaaagtcctgtcaccaaggac

SEQ ID NO: 3361 - RNA, 21 nt, synthetic construct
  source 1..21: mol_type = other RNA
aaaataaggggatcaaagagg

SEQ ID NO: 3362 - RNA, 21 nt, synthetic construct
  source 1..21: mol_type = other RNA
aaaatacaaagactagctggg

SEQ ID NO: 3363 - RNA, 21 nt, synthetic construct
  source 1..21: mol_type = other RNA
aaaatacctggaaaaaggaac

SEQ ID NO: 3364 - RNA, 21 nt, synthetic construct
  source 1..21: mol_type = other RNA
aaaatcgacatttcccattta

SEQ ID NO: 3365 - RNA, 21 nt, synthetic construct
  source 1..21: mol_type = other RNA
aaaatgatgtgaaaggaccag

SEQ ID NO: 3366 - RNA, 21 nt, synthetic construct
  source 1..21: mol_type = other RNA
aaaatgcctttaacgtccttg

SEQ ID NO: 3367 - RNA, 21 nt, synthetic construct
  source 1..21: mol_type = other RNA
aaaatgttcacatgactttct

SEQ ID NO: 3368 - RNA, 21 nt, synthetic construct
  source 1..21: mol_type = other RNA
aaacacaaataactaagacca

SEQ ID NO: 3369 - RNA, 21 nt, synthetic construct
  source 1..21: mol_type = other RNA
aaacacaggagaaagaaaata

SEQ ID NO: 3370 - RNA, 21 nt, synthetic construct
  source 1..21: mol_type = other RNA
aaacacgacctaggaatccag

SEQ ID NO: 3371 - RNA, 21 nt, synthetic construct
  source 1..21: mol_type = other RNA
aaacactggacttcaagaaac

SEQ ID NO: 3372 - RNA, 21 nt, synthetic construct
  source 1..21: mol_type = other RNA
aaacagtctgcttcagcactt

SEQ ID NO: 3373 - RNA, 21 nt, synthetic construct
  source 1..21: mol_type = other RNA
aaaccaagtaactggccaggt

SEQ ID NO: 3374 - RNA, 21 nt, synthetic construct
  source 1..21: mol_type = other RNA
aaaccccacttccattgtatt

SEQ ID NO: 3375 - RNA, 21 nt, synthetic construct
  source 1..21: mol_type = other RNA
aaacctgagggtcattgtggt

SEQ ID NO: 3376 - RNA, 21 nt, synthetic construct
  source 1..21: mol_type = other RNA
aaacgagagccctgaaagctt

SEQ ID NO: 3377 - RNA, 21 nt, synthetic construct
  source 1..21: mol_type = other RNA
aaactaatgttgaaagttggc

SEQ ID NO: 3378 - RNA, 21 nt, synthetic construct
  source 1..21: mol_type = other RNA
aaactacatcaaatatctgca

SEQ ID NO: 3379 - RNA, 21 nt, synthetic construct
  source 1..21: mol_type = other RNA
aaactggtcctttcacatcat

SEQ ID NO: 3380 - RNA, 21 nt, synthetic construct
  source 1..21: mol_type = other RNA
aaagaaaataaggggatcaaa

SEQ ID NO: 3381 - RNA, 21 nt, synthetic construct
  source 1..21: mol_type = other RNA
aaagaatggaaattgcagttc

SEQ ID NO: 3382 - RNA, 21 nt, synthetic construct
  source 1..21: mol_type = other RNA
aaagaccagagatcccctggt

SEQ ID NO: 3383 - RNA, 21 nt, synthetic construct
  source 1..21: mol_type = other RNA
aaagaggcaatgctttcgaaa

SEQ ID NO: 3384 - RNA, 21 nt, synthetic construct
  source 1..21: mol_type = other RNA
aaagagttttcaccctctgta

SEQ ID NO: 3385 - RNA, 21 nt, synthetic construct
  source 1..21: mol_type = other RNA
aaagcattgcctctttgatcc

SEQ ID NO: 3386 - RNA, 21 nt, synthetic construct
  source 1..21: mol_type = other RNA
aaagccaggacagtgaatgag

SEQ ID NO: 3387 - RNA, 21 nt, synthetic construct
  source 1..21: mol_type = other RNA
aaagctcatttaaaaagggaa

SEQ ID NO: 3388 - RNA, 21 nt, synthetic construct
  source 1..21: mol_type = other RNA
aaagcttagccctcacggaag

SEQ ID NO: 3389 - RNA, 21 nt, synthetic construct
  source 1..21: mol_type = other RNA
aaaggaacactaaggaaataa

SEQ ID NO: 3390 - RNA, 21 nt, synthetic construct
  source 1..21: mol_type = other RNA
aaaggaccagtttcttgaagt

SEQ ID NO: 3391 - RNA, 21 nt, synthetic construct
  source 1..21: mol_type = other RNA
aaaggagcaacaggaaattta

SEQ ID NO: 3392 - RNA, 21 nt, synthetic construct
  source 1..21: mol_type = other RNA
aaaggcagtattcccttttta

SEQ ID NO: 3393 - RNA, 21 nt, synthetic construct
  source 1..21: mol_type = other RNA
aaaggcattttattccagcgt

SEQ ID NO: 3394 - RNA, 21 nt, synthetic construct
  source 1..21: mol_type = other RNA
aaagggaatactgcctttttt

SEQ ID NO: 3395 - RNA, 21 nt, synthetic construct
  source 1..21: mol_type = other RNA
aaagtactactgtagaactgc

SEQ ID NO: 3396 - RNA, 21 nt, synthetic construct
  source 1..21: mol_type = other RNA
aaagtcctgtcaccaaggacg

SEQ ID NO: 3397 - RNA, 21 nt, synthetic construct
  source 1..21: mol_type = other RNA
aaagtgctgaagcagactgtt

SEQ ID NO: 3398 - RNA, 21 nt, synthetic construct
  source 1..21: mol_type = other RNA
aaagttggcaacagccccttg

SEQ ID NO: 3399 - RNA, 21 nt, synthetic construct
  source 1..21: mol_type = other RNA
aaataaaagccaggacagtga

SEQ ID NO: 3400 - RNA, 21 nt, synthetic construct
  source 1..21: mol_type = other RNA
aaataactaagaccagcatct

SEQ ID NO: 3401 - RNA, 21 nt, synthetic construct
  source 1..21: mol_type = other RNA
aaataaggggatcaaagaggc

SEQ ID NO: 3402 - RNA, 21 nt, synthetic construct
  source 1..21: mol_type = other RNA
aaatacaaagactagctgggc

SEQ ID NO: 3403 - RNA, 21 nt, synthetic construct
  source 1..21: mol_type = other RNA
aaatacagtaaggaccttaat

SEQ ID NO: 3404 - RNA, 21 nt, synthetic construct
  source 1..21: mol_type = other RNA
aaatacctggaaaaaggaaca

SEQ ID NO: 3405 - RNA, 21 nt, synthetic construct
  source 1..21: mol_type = other RNA
aaatacctggagcagatgcag

SEQ ID NO: 3406 - RNA, 21 nt, synthetic construct
  source 1..21: mol_type = other RNA
aaatcagcccctgccacaagg

SEQ ID NO: 3407 - RNA, 21 nt, synthetic construct
  source 1..21: mol_type = other RNA
aaatccagttgactgtcatct

SEQ ID NO: 3408 - RNA, 21 nt, synthetic construct
  source 1..21: mol_type = other RNA
aaatcgacatttcccatttat

SEQ ID NO: 3409 - RNA, 21 nt, synthetic construct
  source 1..21: mol_type = other RNA
aaatctgcatctgctccaggt

SEQ ID NO: 3410 - RNA, 21 nt, synthetic construct
  source 1..21: mol_type = other RNA
aaatgagaaccggtggtgaaa

SEQ ID NO: 3411 - RNA, 21 nt, synthetic construct
  source 1..21: mol_type = other RNA
aaatgagctttcaggaagttg

SEQ ID NO: 3412 - RNA, 21 nt, synthetic construct
  source 1..21: mol_type = other RNA
aaatgatgtgaaaggaccagt

SEQ ID NO: 3413 - RNA, 21 nt, synthetic construct
  source 1..21: mol_type = other RNA
aaatgcagccagcagcccgtt

SEQ ID NO: 3414 - RNA, 21 nt, synthetic construct
  source 1..21: mol_type = other RNA
aaatgcctttaacgtccttgg

SEQ ID NO: 3415 - RNA, 21 nt, synthetic construct
  source 1..21: mol_type = other RNA
aaatggctcaggtctcccagc

SEQ ID NO: 3416 - RNA, 21 nt, synthetic construct
  source 1..21: mol_type = other RNA
aaatgggaaatgtcgattttc

SEQ ID NO: 3417 - RNA, 21 nt, synthetic construct
  source 1..21: mol_type = other RNA
aaatggggtggaatagggaac

SEQ ID NO: 3418 - RNA, 21 nt, synthetic construct
  source 1..21: mol_type = other RNA
aaatgggtgaaaaatggtaat

SEQ ID NO: 3419 - RNA, 21 nt, synthetic construct
  source 1..21: mol_type = other RNA
aaatgttcacatgactttctg

SEQ ID NO: 3420 - RNA, 21 nt, synthetic construct
  source 1..21: mol_type = other RNA
aaattaatcagaaaccccact

SEQ ID NO: 3421 - RNA, 21 nt, synthetic construct
  source 1..21: mol_type = other RNA
aaattagtgcagatgctggtc

SEQ ID NO: 3422 - RNA, 21 nt, synthetic construct
  source 1..21: mol_type = other RNA
aaattctacagctaggccagt

SEQ ID NO: 3423 - RNA, 21 nt, synthetic construct
  source 1..21: mol_type = other RNA
aaattgcagttctacagtagt

SEQ ID NO: 3424 - RNA, 21 nt, synthetic construct
  source 1..21: mol_type = other RNA
aaatttagaaagtgctgaagc

SEQ ID NO: 3425 - RNA, 21 nt, synthetic construct
  source 1..21: mol_type = other RNA
aaatttcctgttgctcctttc

SEQ ID NO: 3426 - RNA, 21 nt, synthetic construct
  source 1..21: mol_type = other RNA
aacaaaacctgagggtcattg

SEQ ID NO: 3427 - RNA, 21 nt, synthetic construct
  source 1..21: mol_type = other RNA
aacaagatgcagaaccatggc

SEQ ID NO: 3428 - RNA, 21 nt, synthetic construct
  source 1..21: mol_type = other RNA
aacacaaataactaagaccag

SEQ ID NO: 3429 - RNA, 21 nt, synthetic construct
  source 1..21: mol_type = other RNA
aacacaggagaaagaaaataa

SEQ ID NO: 3430 - RNA, 21 nt, synthetic construct
  source 1..21: mol_type = other RNA
aacacgacctaggaatccagt

SEQ ID NO: 3431 - RNA, 21 nt, synthetic construct
  source 1..21: mol_type = other RNA
aacactaaggaaataatctga

SEQ ID NO: 3432 - RNA, 21 nt, synthetic construct
  source 1..21: mol_type = other RNA
aacactggacttcaagaaact

SEQ ID NO: 3433 - RNA, 21 nt, synthetic construct
  source 1..21: mol_type = other RNA
aacagaaacagtctgcttcag

SEQ ID NO: 3434 - RNA, 21 nt, synthetic construct
  source 1..21: mol_type = other RNA
aacagcagcatgtccagtact

SEQ ID NO: 3435 - RNA, 21 nt, synthetic construct
  source 1..21: mol_type = other RNA
aacagccccttgtggcagggg

SEQ ID NO: 3436 - RNA, 21 nt, synthetic construct
  source 1..21: mol_type = other RNA
aacaggaaatttagaaagtgc

SEQ ID NO: 3437 - RNA, 21 nt, synthetic construct
  source 1..21: mol_type = other RNA
aacagtctgcttcagcacttt

SEQ ID NO: 3438 - RNA, 21 nt, synthetic construct
  source 1..21: mol_type = other RNA
aacagtgggaatgtccagagt

SEQ ID NO: 3439 - RNA, 21 nt, synthetic construct
  source 1..21: mol_type = other RNA
aacataaccggaacgacagcc

SEQ ID NO: 3440 - RNA, 21 nt, synthetic construct
  source 1..21: mol_type = other RNA
aacattagtttgggccttggc

SEQ ID NO: 3441 - RNA, 21 nt, synthetic construct
  source 1..21: mol_type = other RNA
aacattttatgctacagaggg

SEQ ID NO: 3442 - RNA, 21 nt, synthetic construct
  source 1..21: mol_type = other RNA
aaccaaaaaaccaaaacaaac

SEQ ID NO: 3443 - RNA, 21 nt, synthetic construct
  source 1..21: mol_type = other RNA
aaccaagtaactggccaggtg

SEQ ID NO: 3444 - RNA, 21 nt, synthetic construct
  source 1..21: mol_type = other RNA
aaccagcagaagacagaacag

SEQ ID NO: 3445 - RNA, 21 nt, synthetic construct
  source 1..21: mol_type = other RNA
aaccatggctatgagaacccc

SEQ ID NO: 3446 - RNA, 21 nt, synthetic construct
  source 1..21: mol_type = other RNA
aaccccacctacaaatacctg

SEQ ID NO: 3447 - RNA, 21 nt, synthetic construct
  source 1..21: mol_type = other RNA
aaccccacttccattgtattg

SEQ ID NO: 3448 - RNA, 21 nt, synthetic construct
  source 1..21: mol_type = other RNA
aaccggaacgacagcctgcat

SEQ ID NO: 3449 - RNA, 21 nt, synthetic construct
  source 1..21: mol_type = other RNA
aaccggtggtgaaacacagga

SEQ ID NO: 3450 - RNA, 21 nt, synthetic construct
  source 1..21: mol_type = other RNA
aacctgagggtcattgtggtg

SEQ ID NO: 3451 - RNA, 21 nt, synthetic construct
  source 1..21: mol_type = other RNA
aacctggaagaacaaaacctg

SEQ ID NO: 3452 - RNA, 21 nt, synthetic construct
  source 1..21: mol_type = other RNA
aacctgtggaattaataggca

SEQ ID NO: 3453 - RNA, 21 nt, synthetic construct
  source 1..21: mol_type = other RNA
aacgacagcctgcatataagt

SEQ ID NO: 3454 - RNA, 21 nt, synthetic construct
  source 1..21: mol_type = other RNA
aacgagagccctgaaagctta

SEQ ID NO: 3455 - RNA, 21 nt, synthetic construct
  source 1..21: mol_type = other RNA
aacgggctgctggctgcattt

SEQ ID NO: 3456 - RNA, 21 nt, synthetic construct
  source 1..21: mol_type = other RNA
aacgtccttggtgacaggact

SEQ ID NO: 3457 - RNA, 21 nt, synthetic construct
  source 1..21: mol_type = other RNA
aactaagaccagcatctgcac

SEQ ID NO: 3458 - RNA, 21 nt, synthetic construct
  source 1..21: mol_type = other RNA
aactaatgttgaaagttggca

SEQ ID NO: 3459 - RNA, 21 nt, synthetic construct
  source 1..21: mol_type = other RNA
aactacatcaaatatctgcaa

SEQ ID NO: 3460 - RNA, 21 nt, synthetic construct
  source 1..21: mol_type = other RNA
aactcttcagcctcattcact

SEQ ID NO: 3461 - RNA, 21 nt, synthetic construct
  source 1..21: mol_type = other RNA
aactgaaaaagaccagagatc

SEQ ID NO: 3462 - RNA, 21 nt, synthetic construct
  source 1..21: mol_type = other RNA
aactgaactgataacagcagc

SEQ ID NO: 3463 - RNA, 21 nt, synthetic construct
  source 1..21: mol_type = other RNA
aactgataacagcagcatgtc

SEQ ID NO: 3464 - RNA, 21 nt, synthetic construct
  source 1..21: mol_type = other RNA
aactgcaatttccattctttt

SEQ ID NO: 3465 - RNA, 21 nt, synthetic construct
  source 1..21: mol_type = other RNA
aactggatttcctagcaccgt

SEQ ID NO: 3466 - RNA, 21 nt, synthetic construct
  source 1..21: mol_type = other RNA
aactggccaggtgcagtagct

SEQ ID NO: 3467 - RNA, 21 nt, synthetic construct
  source 1..21: mol_type = other RNA
aactggtcctttcacatcatt

SEQ ID NO: 3468 - RNA, 21 nt, synthetic construct
  source 1..21: mol_type = other RNA
aactgtaatggccactgaagc

SEQ ID NO: 3469 - RNA, 21 nt, synthetic construct
  source 1..21: mol_type = other RNA
aacttcctgaaagctcattta

SEQ ID NO: 3470 - RNA, 21 nt, synthetic construct
  source 1..21: mol_type = other RNA
aacttgtcttgccactcactc

SEQ ID NO: 3471 - RNA, 21 nt, synthetic construct
  source 1..21: mol_type = other RNA
aactttcaacattagtttggg

SEQ ID NO: 3472 - RNA, 21 nt, synthetic construct
  source 1..21: mol_type = other RNA
aagaaaataaggggatcaaag

SEQ ID NO: 3473 - RNA, 21 nt, synthetic construct
  source 1..21: mol_type = other RNA
aagaaactggtcctttcacat

SEQ ID NO: 3474 - RNA, 21 nt, synthetic construct
  source 1..21: mol_type = other RNA
aagaacaaaacctgagggtca

SEQ ID NO: 3475 - RNA, 21 nt, synthetic construct
  source 1..21: mol_type = other RNA
aagaatcacctgaacccggga

SEQ ID NO: 3476 - RNA, 21 nt, synthetic construct
  source 1..21: mol_type = other RNA
aagaatggaaattgcagttct

SEQ ID NO: 3477 - RNA, 21 nt, synthetic construct
  source 1..21: mol_type = other RNA
aagacaagttcagtaaccagc

SEQ ID NO: 3478 - RNA, 21 nt, synthetic construct
  source 1..21: mol_type = other RNA
aagacagaacagaaacagtct

SEQ ID NO: 3479 - RNA, 21 nt, synthetic construct
  source 1..21: mol_type = other RNA
aagaccagagatcccctggtc

SEQ ID NO: 3480 - RNA, 21 nt, synthetic construct
  source 1..21: mol_type = other RNA
aagaccagcatctgcactaat

SEQ ID NO: 3481 - RNA, 21 nt, synthetic construct
  source 1..21: mol_type = other RNA
aagacgctggaataaaatgcc

SEQ ID NO: 3482 - RNA, 21 nt, synthetic construct
  source 1..21: mol_type = other RNA
aagactagctgggcgtggtgg

SEQ ID NO: 3483 - RNA, 21 nt, synthetic construct
  source 1..21: mol_type = other RNA
aagagacctgcacagggtgct

SEQ ID NO: 3484 - RNA, 21 nt, synthetic construct
  source 1..21: mol_type = other RNA
aagagcgtcacctgaacaaga

SEQ ID NO: 3485 - RNA, 21 nt, synthetic construct
  source 1..21: mol_type = other RNA
aagaggcaatgctttcgaaac

SEQ ID NO: 3486 - RNA, 21 nt, synthetic construct
  source 1..21: mol_type = other RNA
aagagttgacttacacaacat

SEQ ID NO: 3487 - RNA, 21 nt, synthetic construct
  source 1..21: mol_type = other RNA
aagagttttcaccctctgtag

SEQ ID NO: 3488 - RNA, 21 nt, synthetic construct
  source 1..21: mol_type = other RNA
aagatcccacgattccgatcg

SEQ ID NO: 3489 - RNA, 21 nt, synthetic construct
  source 1..21: mol_type = other RNA
aagatgacagtcaactggatt

SEQ ID NO: 3490 - RNA, 21 nt, synthetic construct
  source 1..21: mol_type = other RNA
aagatgcagaaccatggctat

SEQ ID NO: 3491 - RNA, 21 nt, synthetic construct
  source 1..21: mol_type = other RNA
aagatgcctattaattccaca

SEQ ID NO: 3492 - RNA, 21 nt, synthetic construct
  source 1..21: mol_type = other RNA
aagcaaggctcggcgccactg

SEQ ID NO: 3493 - RNA, 21 nt, synthetic construct
  source 1..21: mol_type = other RNA
aagcacgtgagagaccctcgc

SEQ ID NO: 3494 - RNA, 21 nt, synthetic construct
  source 1..21: mol_type = other RNA
aagcagacggtgggaccaggg

SEQ ID NO: 3495 - RNA, 21 nt, synthetic construct
  source 1..21: mol_type = other RNA
aagcagactgtttctgttctg

SEQ ID NO: 3496 - RNA, 21 nt, synthetic construct
  source 1..21: mol_type = other RNA
aagcagcagccgctgccaggg

SEQ ID NO: 3497 - RNA, 21 nt, synthetic construct
  source 1..21: mol_type = other RNA
aagcagtggcgccgagccttg

SEQ ID NO: 3498 - RNA, 21 nt, synthetic construct
  source 1..21: mol_type = other RNA
aagcatgagctactgcacctg

SEQ ID NO: 3499 - RNA, 21 nt, synthetic construct
  source 1..21: mol_type = other RNA
aagcattgcctctttgatccc

SEQ ID NO: 3500 - RNA, 21 nt, synthetic construct
  source 1..21: mol_type = other RNA
aagccaggacagtgaatgagg

SEQ ID NO: 3501 - RNA, 21 nt, synthetic construct
  source 1..21: mol_type = other RNA
aagccagtcagcagtaggcta

SEQ ID NO: 3502 - RNA, 21 nt, synthetic construct
  source 1..21: mol_type = other RNA
aagctcatttaaaaagggaat

SEQ ID NO: 3503 - RNA, 21 nt, synthetic construct
  source 1..21: mol_type = other RNA
aagctctctagaagacgctgg

SEQ ID NO: 3504 - RNA, 21 nt, synthetic construct
  source 1..21: mol_type = other RNA
aagcttagccctcacggaaga

SEQ ID NO: 3505 - RNA, 21 nt, synthetic construct
  source 1..21: mol_type = other RNA
aagctttcagggctctcgttt

SEQ ID NO: 3506 - RNA, 21 nt, synthetic construct
  source 1..21: mol_type = other RNA
aaggaaataatctgagaaaag

SEQ ID NO: 3507 - RNA, 21 nt, synthetic construct
  source 1..21: mol_type = other RNA
aaggaacactaaggaaataat

SEQ ID NO: 3508 - RNA, 21 nt, synthetic construct
  source 1..21: mol_type = other RNA
aaggaccagtttcttgaagtc

SEQ ID NO: 3509 - RNA, 21 nt, synthetic construct
  source 1..21: mol_type = other RNA
aaggaccttaatgagccctgg

SEQ ID NO: 3510 - RNA, 21 nt, synthetic construct
  source 1..21: mol_type = other RNA
aaggacgttaaaggcatttta

SEQ ID NO: 3511 - RNA, 21 nt, synthetic construct
  source 1..21: mol_type = other RNA
aaggagcaacaggaaatttag

SEQ ID NO: 3512 - RNA, 21 nt, synthetic construct
  source 1..21: mol_type = other RNA
aaggagtgagtggcaagacaa

SEQ ID NO: 3513 - RNA, 21 nt, synthetic construct
  source 1..21: mol_type = other RNA
aaggcaagccagtcagcagta

SEQ ID NO: 3514 - RNA, 21 nt, synthetic construct
  source 1..21: mol_type = other RNA
aaggcagtattccctttttaa

SEQ ID NO: 3515 - RNA, 21 nt, synthetic construct
  source 1..21: mol_type = other RNA
aaggcattttattccagcgtc

SEQ ID NO: 3516 - RNA, 21 nt, synthetic construct
  source 1..21: mol_type = other RNA
aaggcccaaactaatgttgaa

SEQ ID NO: 3517 - RNA, 21 nt, synthetic construct
  source 1..21: mol_type = other RNA
aaggctcggcgccactgctta

SEQ ID NO: 3518 - RNA, 21 nt, synthetic construct
  source 1..21: mol_type = other RNA
aagggactctggacattccca

SEQ ID NO: 3519 - RNA, 21 nt, synthetic construct
  source 1..21: mol_type = other RNA
aaggggatcaaagaggcaatg

SEQ ID NO: 3520 - RNA, 21 nt, synthetic construct
  source 1..21: mol_type = other RNA
aaggggctgttgccaactttc

SEQ ID NO: 3521 - RNA, 21 nt, synthetic construct
  source 1..21: mol_type = other RNA
aaggtccttactgtatttata

SEQ ID NO: 3522 - RNA, 21 nt, synthetic construct
  source 1..21: mol_type = other RNA
aagtaactggccaggtgcagt

SEQ ID NO: 3523 - RNA, 21 nt, synthetic construct
  source 1..21: mol_type = other RNA
aagtactactgtagaactgca

SEQ ID NO: 3524 - RNA, 21 nt, synthetic construct
  source 1..21: mol_type = other RNA
aagtcaactcttcagcctcat

SEQ ID NO: 3525 - RNA, 21 nt, synthetic construct
  source 1..21: mol_type = other RNA
aagtcatgtgaacattttatg

SEQ ID NO: 3526 - RNA, 21 nt, synthetic construct
  source 1..21: mol_type = other RNA
aagtccagtgtttccacggct

SEQ ID NO: 3527 - RNA, 21 nt, synthetic construct
  source 1..21: mol_type = other RNA
aagtcctgtcaccaaggacgt

SEQ ID NO: 3528 - RNA, 21 nt, synthetic construct
  source 1..21: mol_type = other RNA
aagtgctgaagcagactgttt

SEQ ID NO: 3529 - RNA, 21 nt, synthetic construct
  source 1..21: mol_type = other RNA
aagtggggtttctgattaatt

SEQ ID NO: 3530 - RNA, 21 nt, synthetic construct
  source 1..21: mol_type = other RNA
aagttcagtaaccagcagaag

SEQ ID NO: 3531 - RNA, 21 nt, synthetic construct
  source 1..21: mol_type = other RNA
aagttgctgagaaatggggtg

SEQ ID NO: 3532 - RNA, 21 nt, synthetic construct
  source 1..21: mol_type = other RNA
aagttggcaacagccccttgt

SEQ ID NO: 3533 - RNA, 21 nt, synthetic construct
  source 1..21: mol_type = other RNA
aataaaagccaggacagtgaa

SEQ ID NO: 3534 - RNA, 21 nt, synthetic construct
  source 1..21: mol_type = other RNA
aataaaatgcctttaacgtcc

SEQ ID NO: 3535 - RNA, 21 nt, synthetic construct
  source 1..21: mol_type = other RNA
aataaatgggaaatgtcgatt

SEQ ID NO: 3536 - RNA, 21 nt, synthetic construct
  source 1..21: mol_type = other RNA
aataactaagaccagcatctg

SEQ ID NO: 3537 - RNA, 21 nt, synthetic construct
  source 1..21: mol_type = other RNA
aataaggggatcaaagaggca

SEQ ID NO: 3538 - RNA, 21 nt, synthetic construct
  source 1..21: mol_type = other RNA
aataatagacttatatgcagg

SEQ ID NO: 3539 - RNA, 21 nt, synthetic construct
  source 1..21: mol_type = other RNA
aatacaaagactagctgggcg

SEQ ID NO: 3540 - RNA, 21 nt, synthetic construct
  source 1..21: mol_type = other RNA
aatacaatggaagtggggttt

SEQ ID NO: 3541 - RNA, 21 nt, synthetic construct
  source 1..21: mol_type = other RNA
aatacagtaaggaccttaatg

SEQ ID NO: 3542 - RNA, 21 nt, synthetic construct
  source 1..21: mol_type = other RNA
aatacctggaaaaaggaacac

SEQ ID NO: 3543 - RNA, 21 nt, synthetic construct
  source 1..21: mol_type = other RNA
aatacctggagcagatgcaga

SEQ ID NO: 3544 - RNA, 21 nt, synthetic construct
  source 1..21: mol_type = other RNA
aatagacttatatgcaggctg

SEQ ID NO: 3545 - RNA, 21 nt, synthetic construct
  source 1..21: mol_type = other RNA
aataggcatcttcactcctcg

SEQ ID NO: 3546 - RNA, 21 nt, synthetic construct
  source 1..21: mol_type = other RNA
aatagggaactgtaatggcca

SEQ ID NO: 3547 - RNA, 21 nt, synthetic construct
  source 1..21: mol_type = other RNA
aatataaatacagtaaggacc

SEQ ID NO: 3548 - RNA, 21 nt, synthetic construct
  source 1..21: mol_type = other RNA
aatatggggaaatcctatctc

SEQ ID NO: 3549 - RNA, 21 nt, synthetic construct
  source 1..21: mol_type = other RNA
aatcagaaaccccacttccat

SEQ ID NO: 3550 - RNA, 21 nt, synthetic construct
  source 1..21: mol_type = other RNA
aatcagcccctgccacaaggg

SEQ ID NO: 3551 - RNA, 21 nt, synthetic construct
  source 1..21: mol_type = other RNA
aatccagtgagtaactgaact

SEQ ID NO: 3552 - RNA, 21 nt, synthetic construct
  source 1..21: mol_type = other RNA
aatccagttgactgtcatctt

SEQ ID NO: 3553 - RNA, 21 nt, synthetic construct
  source 1..21: mol_type = other RNA
aatcccctgaggaccaaatgc

SEQ ID NO: 3554 - RNA, 21 nt, synthetic construct
  source 1..21: mol_type = other RNA
aatcgacatttcccatttatt

SEQ ID NO: 3555 - RNA, 21 nt, synthetic construct
  source 1..21: mol_type = other RNA
aatcgtgggatcttccggccc

SEQ ID NO: 3556 - RNA, 21 nt, synthetic construct
  source 1..21: mol_type = other RNA
aatctgagaaaagagttttca

SEQ ID NO: 3557 - RNA, 21 nt, synthetic construct
  source 1..21: mol_type = other RNA
aatctgcatctgctccaggta

SEQ ID NO: 3558 - RNA, 21 nt, synthetic construct
  source 1..21: mol_type = other RNA
aatgaccctcaggttttgttc

SEQ ID NO: 3559 - RNA, 21 nt, synthetic construct
  source 1..21: mol_type = other RNA
aatgagaaccggtggtgaaac

SEQ ID NO: 3560 - RNA, 21 nt, synthetic construct
  source 1..21: mol_type = other RNA
aatgagccctgggaaattagt

SEQ ID NO: 3561 - RNA, 21 nt, synthetic construct
  source 1..21: mol_type = other RNA
aatgagctttcaggaagttgc

SEQ ID NO: 3562 - RNA, 21 nt, synthetic construct
  source 1..21: mol_type = other RNA
aatgaggctgaagagttgact

SEQ ID NO: 3563 - RNA, 21 nt, synthetic construct
  source 1..21: mol_type = other RNA
aatgatgtgaaaggaccagtt

SEQ ID NO: 3564 - RNA, 21 nt, synthetic construct
  source 1..21: mol_type = other RNA
aatgcagccagcagcccgttc

SEQ ID NO: 3565 - RNA, 21 nt, synthetic construct
  source 1..21: mol_type = other RNA
aatgcctttaacgtccttggt

SEQ ID NO: 3566 - RNA, 21 nt, synthetic construct
  source 1..21: mol_type = other RNA
aatgctcaccccagaagagcg

SEQ ID NO: 3567 - RNA, 21 nt, synthetic construct
  source 1..21: mol_type = other RNA
aatgctttcgaaacgagagcc

SEQ ID NO: 3568 - RNA, 21 nt, synthetic construct
  source 1..21: mol_type = other RNA
aatggaaattgcagttctaca

SEQ ID NO: 3569 - RNA, 21 nt, synthetic construct
  source 1..21: mol_type = other RNA
aatggaagtggggtttctgat

SEQ ID NO: 3570 - RNA, 21 nt, synthetic construct
  source 1..21: mol_type = other RNA
aatggccactgaagcacgtga

SEQ ID NO: 3571 - RNA, 21 nt, synthetic construct
  source 1..21: mol_type = other RNA
aatggctcaggtctcccagca

SEQ ID NO: 3572 - RNA, 21 nt, synthetic construct
  source 1..21: mol_type = other RNA
aatgggaaatgtcgattttca

SEQ ID NO: 3573 - RNA, 21 nt, synthetic construct
  source 1..21: mol_type = other RNA
aatgggggaaaggagcaacag

SEQ ID NO: 3574 - RNA, 21 nt, synthetic construct
  source 1..21: mol_type = other RNA
aatggggtggaatagggaact

SEQ ID NO: 3575 - RNA, 21 nt, synthetic construct
  source 1..21: mol_type = other RNA
aatgggtgaaaaatggtaata

SEQ ID NO: 3576 - RNA, 21 nt, synthetic construct
  source 1..21: mol_type = other RNA
aatgtcagaaagtcatgtgaa

SEQ ID NO: 3577 - RNA, 21 nt, synthetic construct
  source 1..21: mol_type = other RNA
aatgtccagagtcccttgatc

SEQ ID NO: 3578 - RNA, 21 nt, synthetic construct
  source 1..21: mol_type = other RNA
aatgttcacatgactttctga

SEQ ID NO: 3579 - RNA, 21 nt, synthetic construct
  source 1..21: mol_type = other RNA
aatgttgaaagttggcaacag

SEQ ID NO: 3580 - RNA, 21 nt, synthetic construct
  source 1..21: mol_type = other RNA
aattaataggcatcttcactc

SEQ ID NO: 3581 - RNA, 21 nt, synthetic construct
  source 1..21: mol_type = other RNA
aattaatcagaaaccccactt

SEQ ID NO: 3582 - RNA, 21 nt, synthetic construct
  source 1..21: mol_type = other RNA
aattagtgcagatgctggtct

SEQ ID NO: 3583 - RNA, 21 nt, synthetic construct
  source 1..21: mol_type = other RNA
aattccacaggttcccacccc

SEQ ID NO: 3584 - RNA, 21 nt, synthetic construct
  source 1..21: mol_type = other RNA
aattctacagctaggccagtc

SEQ ID NO: 3585 - RNA, 21 nt, synthetic construct
  source 1..21: mol_type = other RNA
aattgcagttctacagtagta

SEQ ID NO: 3586 - RNA, 21 nt, synthetic construct
  source 1..21: mol_type = other RNA
aatttagaaagtgctgaagca

SEQ ID NO: 3587 - RNA, 21 nt, synthetic construct
  source 1..21: mol_type = other RNA
aatttcagaactgaaaaagac

SEQ ID NO: 3588 - RNA, 21 nt, synthetic construct
  source 1..21: mol_type = other RNA
aatttcccagggctcattaag

SEQ ID NO: 3589 - RNA, 21 nt, synthetic construct
  source 1..21: mol_type = other RNA
aatttcctgttgctcctttcc

SEQ ID NO: 3590 - RNA, 21 nt, synthetic construct
  source 1..21: mol_type = other RNA
acaaaacctgagggtcattgt

SEQ ID NO: 3591 - RNA, 21 nt, synthetic construct
  source 1..21: mol_type = other RNA
acaaagactagctgggcgtgg

SEQ ID NO: 3592 - RNA, 21 nt, synthetic construct
  source 1..21: mol_type = other RNA
acaaataactaagaccagcat

SEQ ID NO: 3593 - RNA, 21 nt, synthetic construct
  source 1..21: mol_type = other RNA
acaaatacctggagcagatgc

SEQ ID NO: 3594 - RNA, 21 nt, synthetic construct
  source 1..21: mol_type = other RNA
acaacataaccggaacgacag

SEQ ID NO: 3595 - RNA, 21 nt, synthetic construct
  source 1..21: mol_type = other RNA
acaagaatcacctgaacccgg

SEQ ID NO: 3596 - RNA, 21 nt, synthetic construct
  source 1..21: mol_type = other RNA
acaagatgcagaaccatggct

SEQ ID NO: 3597 - RNA, 21 nt, synthetic construct
  source 1..21: mol_type = other RNA
acaagcaaggctcggcgccac

SEQ ID NO: 3598 - RNA, 21 nt, synthetic construct
  source 1..21: mol_type = other RNA
acaaggggctgttgccaactt

SEQ ID NO: 3599 - RNA, 21 nt, synthetic construct
  source 1..21: mol_type = other RNA
acaagttcagtaaccagcaga

SEQ ID NO: 3600 - RNA, 21 nt, synthetic construct
  source 1..21: mol_type = other RNA
acaatacaatggaagtggggt

SEQ ID NO: 3601 - RNA, 21 nt, synthetic construct
  source 1..21: mol_type = other RNA
acaatcccctgaggaccaaat

SEQ ID NO: 3602 - RNA, 21 nt, synthetic construct
  source 1..21: mol_type = other RNA
acaatgaccctcaggttttgt

SEQ ID NO: 3603 - RNA, 21 nt, synthetic construct
  source 1..21: mol_type = other RNA
acaatggaagtggggtttctg

SEQ ID NO: 3604 - RNA, 21 nt, synthetic construct
  source 1..21: mol_type = other RNA
acacaaataactaagaccagc

SEQ ID NO: 3605 - RNA, 21 nt, synthetic construct
  source 1..21: mol_type = other RNA
acacaacataaccggaacgac

SEQ ID NO: 3606 - RNA, 21 nt, synthetic construct
  source 1..21: mol_type = other RNA
acacacaggtatccagccgtg

SEQ ID NO: 3607 - RNA, 21 nt, synthetic construct
  source 1..21: mol_type = other RNA
acacacctgtagtctcagcta

SEQ ID NO: 3608 - RNA, 21 nt, synthetic construct
  source 1..21: mol_type = other RNA
acacagcgagactgtctccaa

SEQ ID NO: 3609 - RNA, 21 nt, synthetic construct
  source 1..21: mol_type = other RNA
acacaggagaaagaaaataag

SEQ ID NO: 3610 - RNA, 21 nt, synthetic construct
  source 1..21: mol_type = other RNA
acacaggtatccagccgtgga

SEQ ID NO: 3611 - RNA, 21 nt, synthetic construct
  source 1..21: mol_type = other RNA
acacatgctctcaatatataa

SEQ ID NO: 3612 - RNA, 21 nt, synthetic construct
  source 1..21: mol_type = other RNA
acaccacaatgaccctcaggt

SEQ ID NO: 3613 - RNA, 21 nt, synthetic construct
  source 1..21: mol_type = other RNA
acaccctcatctgtatacact

SEQ ID NO: 3614 - RNA, 21 nt, synthetic construct
  source 1..21: mol_type = other RNA
acacctgtagtctcagctagg

SEQ ID NO: 3615 - RNA, 21 nt, synthetic construct
  source 1..21: mol_type = other RNA
acacgacctaggaatccagtg

SEQ ID NO: 3616 - RNA, 21 nt, synthetic construct
  source 1..21: mol_type = other RNA
acactaagctctctagaagac

SEQ ID NO: 3617 - RNA, 21 nt, synthetic construct
  source 1..21: mol_type = other RNA
acactaaggaaataatctgag

SEQ ID NO: 3618 - RNA, 21 nt, synthetic construct
  source 1..21: mol_type = other RNA
acactggacttcaagaaactg

SEQ ID NO: 3619 - RNA, 21 nt, synthetic construct
  source 1..21: mol_type = other RNA
acagaaacagtctgcttcagc

SEQ ID NO: 3620 - RNA, 21 nt, synthetic construct
  source 1..21: mol_type = other RNA
acagaacagaaacagtctgct

SEQ ID NO: 3621 - RNA, 21 nt, synthetic construct
  source 1..21: mol_type = other RNA
acagagggtgaaaactctttt

SEQ ID NO: 3622 - RNA, 21 nt, synthetic construct
  source 1..21: mol_type = other RNA
acagaggttgcagtgcgctga

SEQ ID NO: 3623 - RNA, 21 nt, synthetic construct
  source 1..21: mol_type = other RNA
acagcagcatgtccagtactc

SEQ ID NO: 3624 - RNA, 21 nt, synthetic construct
  source 1..21: mol_type = other RNA
acagccccttgtggcaggggc

SEQ ID NO: 3625 - RNA, 21 nt, synthetic construct
  source 1..21: mol_type = other RNA
acagcctgcatataagtctat

SEQ ID NO: 3626 - RNA, 21 nt, synthetic construct
  source 1..21: mol_type = other RNA
acagcgagactgtctccaaaa

SEQ ID NO: 3627 - RNA, 21 nt, synthetic construct
  source 1..21: mol_type = other RNA
acagctaggccagtctccagc

SEQ ID NO: 3628 - RNA, 21 nt, synthetic construct
  source 1..21: mol_type = other RNA
acaggaaatttagaaagtgct

SEQ ID NO: 3629 - RNA, 21 nt, synthetic construct
  source 1..21: mol_type = other RNA
acaggacttttatggagacac

SEQ ID NO: 3630 - RNA, 21 nt, synthetic construct
  source 1..21: mol_type = other RNA
acaggagaaagaaaataaggg

SEQ ID NO: 3631 - RNA, 21 nt, synthetic construct
  source 1..21: mol_type = other RNA
acaggccaaatgagaaccggt

SEQ ID NO: 3632 - RNA, 21 nt, synthetic construct
  source 1..21: mol_type = other RNA
acagggtgctgggagacctga

SEQ ID NO: 3633 - RNA, 21 nt, synthetic construct
  source 1..21: mol_type = other RNA
acaggtatccagccgtggaaa

SEQ ID NO: 3634 - RNA, 21 nt, synthetic construct
  source 1..21: mol_type = other RNA
acaggttcccacccccaaccc

SEQ ID NO: 3635 - RNA, 21 nt, synthetic construct
  source 1..21: mol_type = other RNA
acagtaaggaccttaatgagc

SEQ ID NO: 3636 - RNA, 21 nt, synthetic construct
  source 1..21: mol_type = other RNA
acagtagtactttatatagtc

SEQ ID NO: 3637 - RNA, 21 nt, synthetic construct
  source 1..21: mol_type = other RNA
acagtcaactggatttcctag

SEQ ID NO: 3638 - RNA, 21 nt, synthetic construct
  source 1..21: mol_type = other RNA
acagtccaggaggtcaggatg

SEQ ID NO: 3639 - RNA, 21 nt, synthetic construct
  source 1..21: mol_type = other RNA
acagtctgcttcagcactttc

SEQ ID NO: 3640 - RNA, 21 nt, synthetic construct
  source 1..21: mol_type = other RNA
acagtgaatgaggctgaagag

SEQ ID NO: 3641 - RNA, 21 nt, synthetic construct
  source 1..21: mol_type = other RNA
acagtgggaatgtccagagtc

SEQ ID NO: 3642 - RNA, 21 nt, synthetic construct
  source 1..21: mol_type = other RNA
acagttccctattccacccca

SEQ ID NO: 3643 - RNA, 21 nt, synthetic construct
  source 1..21: mol_type = other RNA
acataaccggaacgacagcct

SEQ ID NO: 3644 - RNA, 21 nt, synthetic construct
  source 1..21: mol_type = other RNA
acatcaaatatctgcaataga

SEQ ID NO: 3645 - RNA, 21 nt, synthetic construct
  source 1..21: mol_type = other RNA
acatcattttgcgagggtctc

SEQ ID NO: 3646 - RNA, 21 nt, synthetic construct
  source 1..21: mol_type = other RNA
acatcctgacctcctggactg

SEQ ID NO: 3647 - RNA, 21 nt, synthetic construct
  source 1..21: mol_type = other RNA
acatgactttctgacattcat

SEQ ID NO: 3648 - RNA, 21 nt, synthetic construct
  source 1..21: mol_type = other RNA
acatgctgctgttatcagttc

SEQ ID NO: 3649 - RNA, 21 nt, synthetic construct
  source 1..21: mol_type = other RNA
acattagtttgggccttggct

SEQ ID NO: 3650 - RNA, 21 nt, synthetic construct
  source 1..21: mol_type = other RNA
acattcatagccaaggcccaa

SEQ ID NO: 3651 - RNA, 21 nt, synthetic construct
  source 1..21: mol_type = other RNA
acattcccactgttcactaag

SEQ ID NO: 3652 - RNA, 21 nt, synthetic construct
  source 1..21: mol_type = other RNA
acattttatgctacagagggt

SEQ ID NO: 3653 - RNA, 21 nt, synthetic construct
  source 1..21: mol_type = other RNA
accaaatgcagccagcagccc

SEQ ID NO: 3654 - RNA, 21 nt, synthetic construct
  source 1..21: mol_type = other RNA
accaaggacgttaaaggcatt

SEQ ID NO: 3655 - RNA, 21 nt, synthetic construct
  source 1..21: mol_type = other RNA
accaagtaactggccaggtgc

SEQ ID NO: 3656 - RNA, 21 nt, synthetic construct
  source 1..21: mol_type = other RNA
accacaatgaccctcaggttt

SEQ ID NO: 3657 - RNA, 21 nt, synthetic construct
  source 1..21: mol_type = other RNA
accaccggttctcatttggcc

SEQ ID NO: 3658 - RNA, 21 nt, synthetic construct
  source 1..21: mol_type = other RNA
accacgcccagctagtctttg

SEQ ID NO: 3659 - RNA, 21 nt, synthetic construct
  source 1..21: mol_type = other RNA
accacggtgctaggaaatcca

SEQ ID NO: 3660 - RNA, 21 nt, synthetic construct
  source 1..21: mol_type = other RNA
accagagatcccctggtccca

SEQ ID NO: 3661 - RNA, 21 nt, synthetic construct
  source 1..21: mol_type = other RNA
accagcagaagacagaacaga

SEQ ID NO: 3662 - RNA, 21 nt, synthetic construct
  source 1..21: mol_type = other RNA
accagcatctgcactaatttc

SEQ ID NO: 3663 - RNA, 21 nt, synthetic construct
  source 1..21: mol_type = other RNA
accaggggatctctggtcttt

SEQ ID NO: 3664 - RNA, 21 nt, synthetic construct
  source 1..21: mol_type = other RNA
accagggtgatctcaaatcct

SEQ ID NO: 3665 - RNA, 21 nt, synthetic construct
  source 1..21: mol_type = other RNA
accagtttcttgaagtccagt

SEQ ID NO: 3666 - RNA, 21 nt, synthetic construct
  source 1..21: mol_type = other RNA
accatggctatgagaacccca

SEQ ID NO: 3667 - RNA, 21 nt, synthetic construct
  source 1..21: mol_type = other RNA
accatttttcacccatttaaa

SEQ ID NO: 3668 - RNA, 21 nt, synthetic construct
  source 1..21: mol_type = other RNA
acccatttaaaagaatggaaa

SEQ ID NO: 3669 - RNA, 21 nt, synthetic construct
  source 1..21: mol_type = other RNA
accccacctacaaatacctgg

SEQ ID NO: 3670 - RNA, 21 nt, synthetic construct
  source 1..21: mol_type = other RNA
accccacttccattgtattgt

SEQ ID NO: 3671 - RNA, 21 nt, synthetic construct
  source 1..21: mol_type = other RNA
accccagaagagcgtcacctg

SEQ ID NO: 3672 - RNA, 21 nt, synthetic construct
  source 1..21: mol_type = other RNA
accccatttctcagcaacttc

SEQ ID NO: 3673 - RNA, 21 nt, synthetic construct
  source 1..21: mol_type = other RNA
accctcaggttttgttcttcc

SEQ ID NO: 3674 - RNA, 21 nt, synthetic construct
  source 1..21: mol_type = other RNA
accctcatctgtatacactaa

SEQ ID NO: 3675 - RNA, 21 nt, synthetic construct
  source 1..21: mol_type = other RNA
accctcgcaaaatgatgtgaa

SEQ ID NO: 3676 - RNA, 21 nt, synthetic construct
  source 1..21: mol_type = other RNA
accctctgtagcataaaatgt

SEQ ID NO: 3677 - RNA, 21 nt, synthetic construct
  source 1..21: mol_type = other RNA
accctggtcaatatggggaaa

SEQ ID NO: 3678 - RNA, 21 nt, synthetic construct
  source 1..21: mol_type = other RNA
accctgtgcaggtctcttccc

SEQ ID NO: 3679 - RNA, 21 nt, synthetic construct
  source 1..21: mol_type = other RNA
accggaacgacagcctgcata

SEQ ID NO: 3680 - RNA, 21 nt, synthetic construct
  source 1..21: mol_type = other RNA
accggacaggccaaatgagaa

SEQ ID NO: 3681 - RNA, 21 nt, synthetic construct
  source 1..21: mol_type = other RNA
accggtggtgaaacacaggag

SEQ ID NO: 3682 - RNA, 21 nt, synthetic construct
  source 1..21: mol_type = other RNA
accggttctcatttggcctgt

SEQ ID NO: 3683 - RNA, 21 nt, synthetic construct
  source 1..21: mol_type = other RNA
accgtctgcttgctagcctac

SEQ ID NO: 3684 - RNA, 21 nt, synthetic construct
  source 1..21: mol_type = other RNA
accgtggtgacaagcaaggct

SEQ ID NO: 3685 - RNA, 21 nt, synthetic construct
  source 1..21: mol_type = other RNA
acctaaatctgcatctgctcc

SEQ ID NO: 3686 - RNA, 21 nt, synthetic construct
  source 1..21: mol_type = other RNA
acctacaaatacctggagcag

SEQ ID NO: 3687 - RNA, 21 nt, synthetic construct
  source 1..21: mol_type = other RNA
acctagctgagactacaggtg

SEQ ID NO: 3688 - RNA, 21 nt, synthetic construct
  source 1..21: mol_type = other RNA
acctaggaatccagtgagtaa

SEQ ID NO: 3689 - RNA, 21 nt, synthetic construct
  source 1..21: mol_type = other RNA
acctcctggactgtaggacta

SEQ ID NO: 3690 - RNA, 21 nt, synthetic construct
  source 1..21: mol_type = other RNA
acctgaacaagatgcagaacc

SEQ ID NO: 3691 - RNA, 21 nt, synthetic construct
  source 1..21: mol_type = other RNA
acctgagccatttgctgcaca

SEQ ID NO: 3692 - RNA, 21 nt, synthetic construct
  source 1..21: mol_type = other RNA
acctgagggtcattgtggtgt

SEQ ID NO: 3693 - RNA, 21 nt, synthetic construct
  source 1..21: mol_type = other RNA
acctgcacagggtgctgggag

SEQ ID NO: 3694 - RNA, 21 nt, synthetic construct
  source 1..21: mol_type = other RNA
acctgcatccctccgccaggg

SEQ ID NO: 3695 - RNA, 21 nt, synthetic construct
  source 1..21: mol_type = other RNA
acctggaaaaaggaacactaa

SEQ ID NO: 3696 - RNA, 21 nt, synthetic construct
  source 1..21: mol_type = other RNA
acctggaagaacaaaacctga

SEQ ID NO: 3697 - RNA, 21 nt, synthetic construct
  source 1..21: mol_type = other RNA
acctggagcagatgcagattt

SEQ ID NO: 3698 - RNA, 21 nt, synthetic construct
  source 1..21: mol_type = other RNA
acctggccagttacttggttt

SEQ ID NO: 3699 - RNA, 21 nt, synthetic construct
  source 1..21: mol_type = other RNA
acctgggccagccaaggcaag

SEQ ID NO: 3700 - RNA, 21 nt, synthetic construct
  source 1..21: mol_type = other RNA
acctgtagtctcagctaggtg

SEQ ID NO: 3701 - RNA, 21 nt, synthetic construct
  source 1..21: mol_type = other RNA
acctgtggaattaataggcat

SEQ ID NO: 3702 - RNA, 21 nt, synthetic construct
  source 1..21: mol_type = other RNA
acctgtgtgtctccataaaag

SEQ ID NO: 3703 - RNA, 21 nt, synthetic construct
  source 1..21: mol_type = other RNA
accttaatgagccctgggaaa

SEQ ID NO: 3704 - RNA, 21 nt, synthetic construct
  source 1..21: mol_type = other RNA
acgacagcctgcatataagtc

SEQ ID NO: 3705 - RNA, 21 nt, synthetic construct
  source 1..21: mol_type = other RNA
acgacctaggaatccagtgag

SEQ ID NO: 3706 - RNA, 21 nt, synthetic construct
  source 1..21: mol_type = other RNA
acgagagccctgaaagcttag

SEQ ID NO: 3707 - RNA, 21 nt, synthetic construct
  source 1..21: mol_type = other RNA
acgattccgatcgactgccaa

SEQ ID NO: 3708 - RNA, 21 nt, synthetic construct
  source 1..21: mol_type = other RNA
acgcagcccctggcagcggct

SEQ ID NO: 3709 - RNA, 21 nt, synthetic construct
  source 1..21: mol_type = other RNA
acgcccagctagtctttgtat

SEQ ID NO: 3710 - RNA, 21 nt, synthetic construct
  source 1..21: mol_type = other RNA
acgctcttctggggtgagcat

SEQ ID NO: 3711 - RNA, 21 nt, synthetic construct
  source 1..21: mol_type = other RNA
acgctggaataaaatgccttt

SEQ ID NO: 3712 - RNA, 21 nt, synthetic construct
  source 1..21: mol_type = other RNA
acggaagatgacagtcaactg

SEQ ID NO: 3713 - RNA, 21 nt, synthetic construct
  source 1..21: mol_type = other RNA
acggctggatacctgtgtgtc

SEQ ID NO: 3714 - RNA, 21 nt, synthetic construct
  source 1..21: mol_type = other RNA
acgggctgctggctgcatttg

SEQ ID NO: 3715 - RNA, 21 nt, synthetic construct
  source 1..21: mol_type = other RNA
acggtgctaggaaatccagtt

SEQ ID NO: 3716 - RNA, 21 nt, synthetic construct
  source 1..21: mol_type = other RNA
acggtgggaccaggggatctc

SEQ ID NO: 3717 - RNA, 21 nt, synthetic construct
  source 1..21: mol_type = other RNA
acgtccttggtgacaggactt

SEQ ID NO: 3718 - RNA, 21 nt, synthetic construct
  source 1..21: mol_type = other RNA
acgtgagagaccctcgcaaaa

SEQ ID NO: 3719 - RNA, 21 nt, synthetic construct
  source 1..21: mol_type = other RNA
acgtgcttcagtggccattac

SEQ ID NO: 3720 - RNA, 21 nt, synthetic construct
  source 1..21: mol_type = other RNA
acgttaaaggcattttattcc

SEQ ID NO: 3721 - RNA, 21 nt, synthetic construct
  source 1..21: mol_type = other RNA
actaagaccagcatctgcact

SEQ ID NO: 3722 - RNA, 21 nt, synthetic construct
  source 1..21: mol_type = other RNA
actaagctctctagaagacgc

SEQ ID NO: 3723 - RNA, 21 nt, synthetic construct
  source 1..21: mol_type = other RNA
actaaggaaataatctgagaa

SEQ ID NO: 3724 - RNA, 21 nt, synthetic construct
  source 1..21: mol_type = other RNA
actaaggagtgagtggcaaga

SEQ ID NO: 3725 - RNA, 21 nt, synthetic construct
  source 1..21: mol_type = other RNA
actaatgttgaaagttggcaa

SEQ ID NO: 3726 - RNA, 21 nt, synthetic construct
  source 1..21: mol_type = other RNA
actaatttcccagggctcatt

SEQ ID NO: 3727 - RNA, 21 nt, synthetic construct
  source 1..21: mol_type = other RNA
actacatcaaatatctgcaat

SEQ ID NO: 3728 - RNA, 21 nt, synthetic construct
  source 1..21: mol_type = other RNA
actacctgggccagccaaggc

SEQ ID NO: 3729 - RNA, 21 nt, synthetic construct
  source 1..21: mol_type = other RNA
actactgtagaactgcaattt

SEQ ID NO: 3730 - RNA, 21 nt, synthetic construct
  source 1..21: mol_type = other RNA
actcactccttagtgaacagt

SEQ ID NO: 3731 - RNA, 21 nt, synthetic construct
  source 1..21: mol_type = other RNA
actcactggattcctaggtcg

SEQ ID NO: 3732 - RNA, 21 nt, synthetic construct
  source 1..21: mol_type = other RNA
actcctcgagtactggacatg

SEQ ID NO: 3733 - RNA, 21 nt, synthetic construct
  source 1..21: mol_type = other RNA
actccttagtgaacagtggga

SEQ ID NO: 3734 - RNA, 21 nt, synthetic construct
  source 1..21: mol_type = other RNA
actcgaggagtgaagatgcct

SEQ ID NO: 3735 - RNA, 21 nt, synthetic construct
  source 1..21: mol_type = other RNA
actctggacattcccactgtt

SEQ ID NO: 3736 - RNA, 21 nt, synthetic construct
  source 1..21: mol_type = other RNA
actcttcagcctcattcactg

SEQ ID NO: 3737 - RNA, 21 nt, synthetic construct
  source 1..21: mol_type = other RNA
actcttttctcagattatttc

SEQ ID NO: 3738 - RNA, 21 nt, synthetic construct
  source 1..21: mol_type = other RNA
actgaaaaagaccagagatcc

SEQ ID NO: 3739 - RNA, 21 nt, synthetic construct
  source 1..21: mol_type = other RNA
actgaactgataacagcagca

SEQ ID NO: 3740 - RNA, 21 nt, synthetic construct
  source 1..21: mol_type = other RNA
actgaacttgtcttgccactc

SEQ ID NO: 3741 - RNA, 21 nt, synthetic construct
  source 1..21: mol_type = other RNA
actgaagcacgtgagagaccc

SEQ ID NO: 3742 - RNA, 21 nt, synthetic construct
  source 1..21: mol_type = other RNA
actgataacagcagcatgtcc

SEQ ID NO: 3743 - RNA, 21 nt, synthetic construct
  source 1..21: mol_type = other RNA
actgcaatttccattctttta

SEQ ID NO: 3744 - RNA, 21 nt, synthetic construct
  source 1..21: mol_type = other RNA
actgcacctggccagttactt

SEQ ID NO: 3745 - RNA, 21 nt, synthetic construct
  source 1..21: mol_type = other RNA
actgccaagcagcagccgctg

SEQ ID NO: 3746 - RNA, 21 nt, synthetic construct
  source 1..21: mol_type = other RNA
actgctgactggcttgccttg

SEQ ID NO: 3747 - RNA, 21 nt, synthetic construct
  source 1..21: mol_type = other RNA
actgcttactacctgggccag

SEQ ID NO: 3748 - RNA, 21 nt, synthetic construct
  source 1..21: mol_type = other RNA
actggacatgctgctgttatc

SEQ ID NO: 3749 - RNA, 21 nt, synthetic construct
  source 1..21: mol_type = other RNA
actggacttcaagaaactggt

SEQ ID NO: 3750 - RNA, 21 nt, synthetic construct
  source 1..21: mol_type = other RNA
actggattcctaggtcgtgtt

SEQ ID NO: 3751 - RNA, 21 nt, synthetic construct
  source 1..21: mol_type = other RNA
actggatttcctagcaccgtg

SEQ ID NO: 3752 - RNA, 21 nt, synthetic construct
  source 1..21: mol_type = other RNA
actggccaggtgcagtagctc

SEQ ID NO: 3753 - RNA, 21 nt, synthetic construct
  source 1..21: mol_type = other RNA
actggcctagctgtagaattt

SEQ ID NO: 3754 - RNA, 21 nt, synthetic construct
  source 1..21: mol_type = other RNA
actggcttgccttggctggcc

SEQ ID NO: 3755 - RNA, 21 nt, synthetic construct
  source 1..21: mol_type = other RNA
actggtcctttcacatcattt

SEQ ID NO: 3756 - RNA, 21 nt, synthetic construct
  source 1..21: mol_type = other RNA
actgtaatggccactgaagca

SEQ ID NO: 3757 - RNA, 21 nt, synthetic construct
  source 1..21: mol_type = other RNA
actgtagaactgcaatttcca

SEQ ID NO: 3758 - RNA, 21 nt, synthetic construct
  source 1..21: mol_type = other RNA
actgtaggactatataaagta

SEQ ID NO: 3759 - RNA, 21 nt, synthetic construct
  source 1..21: mol_type = other RNA
actgtatttatatttggggat

SEQ ID NO: 3760 - RNA, 21 nt, synthetic construct
  source 1..21: mol_type = other RNA
actgtcatcttccgtgagggc

SEQ ID NO: 3761 - RNA, 21 nt, synthetic construct
  source 1..21: mol_type = other RNA
actgtcctggcttttatttaa

SEQ ID NO: 3762 - RNA, 21 nt, synthetic construct
  source 1..21: mol_type = other RNA
actgtctccaaaaaaccaaaa

SEQ ID NO: 3763 - RNA, 21 nt, synthetic construct
  source 1..21: mol_type = other RNA
actgttcactaaggagtgagt

SEQ ID NO: 3764 - RNA, 21 nt, synthetic construct
  source 1..21: mol_type = other RNA
actgtttctgttctgtcttct

SEQ ID NO: 3765 - RNA, 21 nt, synthetic construct
  source 1..21: mol_type = other RNA
acttacacaacataaccggaa

SEQ ID NO: 3766 - RNA, 21 nt, synthetic construct
  source 1..21: mol_type = other RNA
acttatatgcaggctgtcgtt

SEQ ID NO: 3767 - RNA, 21 nt, synthetic construct
  source 1..21: mol_type = other RNA
acttcaagaaactggtccttt

SEQ ID NO: 3768 - RNA, 21 nt, synthetic construct
  source 1..21: mol_type = other RNA
acttccattgtattgtctgac

SEQ ID NO: 3769 - RNA, 21 nt, synthetic construct
  source 1..21: mol_type = other RNA
acttcctgaaagctcatttaa

SEQ ID NO: 3770 - RNA, 21 nt, synthetic construct
  source 1..21: mol_type = other RNA
acttggttttatctcctgctg

SEQ ID NO: 3771 - RNA, 21 nt, synthetic construct
  source 1..21: mol_type = other RNA
acttgtcttgccactcactcc

SEQ ID NO: 3772 - RNA, 21 nt, synthetic construct
  source 1..21: mol_type = other RNA
actttatatagtcctacagtc

SEQ ID NO: 3773 - RNA, 21 nt, synthetic construct
  source 1..21: mol_type = other RNA
actttcaacattagtttgggc

SEQ ID NO: 3774 - RNA, 21 nt, synthetic construct
  source 1..21: mol_type = other RNA
actttctaaatttcctgttgc

SEQ ID NO: 3775 - RNA, 21 nt, synthetic construct
  source 1..21: mol_type = other RNA
actttctgacattcatagcca

SEQ ID NO: 3776 - RNA, 21 nt, synthetic construct
  source 1..21: mol_type = other RNA
acttttatggagacacacagg

SEQ ID NO: 3777 - RNA, 21 nt, synthetic construct
  source 1..21: mol_type = other RNA
agaaaagagttttcaccctct

SEQ ID NO: 3778 - RNA, 21 nt, synthetic construct
  source 1..21: mol_type = other RNA
agaaaataaggggatcaaaga

SEQ ID NO: 3779 - RNA, 21 nt, synthetic construct
  source 1..21: mol_type = other RNA
agaaacagtctgcttcagcac

SEQ ID NO: 3780 - RNA, 21 nt, synthetic construct
  source 1..21: mol_type = other RNA
agaaaccccacttccattgta

SEQ ID NO: 3781 - RNA, 21 nt, synthetic construct
  source 1..21: mol_type = other RNA
agaaactggtcctttcacatc

SEQ ID NO: 3782 - RNA, 21 nt, synthetic construct
  source 1..21: mol_type = other RNA
agaaagaaaataaggggatca

SEQ ID NO: 3783 - RNA, 21 nt, synthetic construct
  source 1..21: mol_type = other RNA
agaaagtcatgtgaacatttt

SEQ ID NO: 3784 - RNA, 21 nt, synthetic construct
  source 1..21: mol_type = other RNA
agaaagtgctgaagcagactg

SEQ ID NO: 3785 - RNA, 21 nt, synthetic construct
  source 1..21: mol_type = other RNA
agaaatggggtggaataggga

SEQ ID NO: 3786 - RNA, 21 nt, synthetic construct
  source 1..21: mol_type = other RNA
agaacaaaacctgagggtcat

SEQ ID NO: 3787 - RNA, 21 nt, synthetic construct
  source 1..21: mol_type = other RNA
agaacagaaacagtctgcttc

SEQ ID NO: 3788 - RNA, 21 nt, synthetic construct
  source 1..21: mol_type = other RNA
agaaccatggctatgagaacc

SEQ ID NO: 3789 - RNA, 21 nt, synthetic construct
  source 1..21: mol_type = other RNA
agaaccccacctacaaatacc

SEQ ID NO: 3790 - RNA, 21 nt, synthetic construct
  source 1..21: mol_type = other RNA
agaaccggtggtgaaacacag

SEQ ID NO: 3791 - RNA, 21 nt, synthetic construct
  source 1..21: mol_type = other RNA
agaactgaaaaagaccagaga

SEQ ID NO: 3792 - RNA, 21 nt, synthetic construct
  source 1..21: mol_type = other RNA
agaactgcaatttccattctt

SEQ ID NO: 3793 - RNA, 21 nt, synthetic construct
  source 1..21: mol_type = other RNA
agaagacagaacagaaacagt

SEQ ID NO: 3794 - RNA, 21 nt, synthetic construct
  source 1..21: mol_type = other RNA
agaagacgctggaataaaatg

SEQ ID NO: 3795 - RNA, 21 nt, synthetic construct
  source 1..21: mol_type = other RNA
agaagagcgtcacctgaacaa

SEQ ID NO: 3796 - RNA, 21 nt, synthetic construct
  source 1..21: mol_type = other RNA
agaatggaaattgcagttcta

SEQ ID NO: 3797 - RNA, 21 nt, synthetic construct
  source 1..21: mol_type = other RNA
agaatttcagaactgaaaaag

SEQ ID NO: 3798 - RNA, 21 nt, synthetic construct
  source 1..21: mol_type = other RNA
agacaagttcagtaaccagca

SEQ ID NO: 3799 - RNA, 21 nt, synthetic construct
  source 1..21: mol_type = other RNA
agacaatacaatggaagtggg

SEQ ID NO: 3800 - RNA, 21 nt, synthetic construct
  source 1..21: mol_type = other RNA
agacacacaggtatccagccg

SEQ ID NO: 3801 - RNA, 21 nt, synthetic construct
  source 1..21: mol_type = other RNA
agacaccacaatgaccctcag

SEQ ID NO: 3802 - RNA, 21 nt, synthetic construct
  source 1..21: mol_type = other RNA
agacagaacagaaacagtctg

SEQ ID NO: 3803 - RNA, 21 nt, synthetic construct
  source 1..21: mol_type = other RNA
agaccagagatcccctggtcc

SEQ ID NO: 3804 - RNA, 21 nt, synthetic construct
  source 1..21: mol_type = other RNA
agaccagcatctgcactaatt

SEQ ID NO: 3805 - RNA, 21 nt, synthetic construct
  source 1..21: mol_type = other RNA
agaccctcgcaaaatgatgtg

SEQ ID NO: 3806 - RNA, 21 nt, synthetic construct
  source 1..21: mol_type = other RNA
agacctgagccatttgctgca

SEQ ID NO: 3807 - RNA, 21 nt, synthetic construct
  source 1..21: mol_type = other RNA
agacctgcacagggtgctggg

SEQ ID NO: 3808 - RNA, 21 nt, synthetic construct
  source 1..21: mol_type = other RNA
agacgcagcccctggcagcgg

SEQ ID NO: 3809 - RNA, 21 nt, synthetic construct
  source 1..21: mol_type = other RNA
agacgctggaataaaatgcct

SEQ ID NO: 3810 - RNA, 21 nt, synthetic construct
  source 1..21: mol_type = other RNA
agacggtgggaccaggggatc

SEQ ID NO: 3811 - RNA, 21 nt, synthetic construct
  source 1..21: mol_type = other RNA
agactagctgggcgtggtggc

SEQ ID NO: 3812 - RNA, 21 nt, synthetic construct
  source 1..21: mol_type = other RNA
agactggcctagctgtagaat

SEQ ID NO: 3813 - RNA, 21 nt, synthetic construct
  source 1..21: mol_type = other RNA
agactgtctccaaaaaaccaa

SEQ ID NO: 3814 - RNA, 21 nt, synthetic construct
  source 1..21: mol_type = other RNA
agactgtttctgttctgtctt

SEQ ID NO: 3815 - RNA, 21 nt, synthetic construct
  source 1..21: mol_type = other RNA
agacttatatgcaggctgtcg

SEQ ID NO: 3816 - RNA, 21 nt, synthetic construct
  source 1..21: mol_type = other RNA
agagaccctcgcaaaatgatg

SEQ ID NO: 3817 - RNA, 21 nt, synthetic construct
  source 1..21: mol_type = other RNA
agagacctgcacagggtgctg

SEQ ID NO: 3818 - RNA, 21 nt, synthetic construct
  source 1..21: mol_type = other RNA
agagagcttagtgtatacaga

SEQ ID NO: 3819 - RNA, 21 nt, synthetic construct
  source 1..21: mol_type = other RNA
agagataggatttccccatat

SEQ ID NO: 3820 - RNA, 21 nt, synthetic construct
  source 1..21: mol_type = other RNA
agagatcccctggtcccaccg

SEQ ID NO: 3821 - RNA, 21 nt, synthetic construct
  source 1..21: mol_type = other RNA
agagcatgtgtcagacaatac

SEQ ID NO: 3822 - RNA, 21 nt, synthetic construct
  source 1..21: mol_type = other RNA
agagccctgaaagcttagccc

SEQ ID NO: 3823 - RNA, 21 nt, synthetic construct
  source 1..21: mol_type = other RNA
agagcgtcacctgaacaagat

SEQ ID NO: 3824 - RNA, 21 nt, synthetic construct
  source 1..21: mol_type = other RNA
agagcttagtgtatacagatg

SEQ ID NO: 3825 - RNA, 21 nt, synthetic construct
  source 1..21: mol_type = other RNA
agaggcaatgctttcgaaacg

SEQ ID NO: 3826 - RNA, 21 nt, synthetic construct
  source 1..21: mol_type = other RNA
agagggtgaaaactcttttct

SEQ ID NO: 3827 - RNA, 21 nt, synthetic construct
  source 1..21: mol_type = other RNA
agagtcccttgatccccaaat

SEQ ID NO: 3828 - RNA, 21 nt, synthetic construct
  source 1..21: mol_type = other RNA
agagttgacttacacaacata

SEQ ID NO: 3829 - RNA, 21 nt, synthetic construct
  source 1..21: mol_type = other RNA
agagttttcaccctctgtagc

SEQ ID NO: 3830 - RNA, 21 nt, synthetic construct
  source 1..21: mol_type = other RNA
agataaaaccaagtaactggc

SEQ ID NO: 3831 - RNA, 21 nt, synthetic construct
  source 1..21: mol_type = other RNA
agataggatttccccatattg

SEQ ID NO: 3832 - RNA, 21 nt, synthetic construct
  source 1..21: mol_type = other RNA
agatcaccctggtcaatatgg

SEQ ID NO: 3833 - RNA, 21 nt, synthetic construct
  source 1..21: mol_type = other RNA
agatcccacgattccgatcga

SEQ ID NO: 3834 - RNA, 21 nt, synthetic construct
  source 1..21: mol_type = other RNA
agatcccctggtcccaccgtc

SEQ ID NO: 3835 - RNA, 21 nt, synthetic construct
  source 1..21: mol_type = other RNA
agatgacagtcaactggattt

SEQ ID NO: 3836 - RNA, 21 nt, synthetic construct
  source 1..21: mol_type = other RNA
agatgcagaaccatggctatg

SEQ ID NO: 3837 - RNA, 21 nt, synthetic construct
  source 1..21: mol_type = other RNA
agatgcagatttaggtggcag

SEQ ID NO: 3838 - RNA, 21 nt, synthetic construct
  source 1..21: mol_type = other RNA
agatgcctattaattccacag

SEQ ID NO: 3839 - RNA, 21 nt, synthetic construct
  source 1..21: mol_type = other RNA
agatgctggtcttagttattt

SEQ ID NO: 3840 - RNA, 21 nt, synthetic construct
  source 1..21: mol_type = other RNA
agattatttccttagtgttcc

SEQ ID NO: 3841 - RNA, 21 nt, synthetic construct
  source 1..21: mol_type = other RNA
agatttaggtggcagggagcg

SEQ ID NO: 3842 - RNA, 21 nt, synthetic construct
  source 1..21: mol_type = other RNA
agcaaatggctcaggtctccc

SEQ ID NO: 3843 - RNA, 21 nt, synthetic construct
  source 1..21: mol_type = other RNA
agcaacaggaaatttagaaag

SEQ ID NO: 3844 - RNA, 21 nt, synthetic construct
  source 1..21: mol_type = other RNA
agcaacttcctgaaagctcat

SEQ ID NO: 3845 - RNA, 21 nt, synthetic construct
  source 1..21: mol_type = other RNA
agcaagcagacggtgggacca

SEQ ID NO: 3846 - RNA, 21 nt, synthetic construct
  source 1..21: mol_type = other RNA
agcaaggctcggcgccactgc

SEQ ID NO: 3847 - RNA, 21 nt, synthetic construct
  source 1..21: mol_type = other RNA
agcaccctgtgcaggtctctt

SEQ ID NO: 3848 - RNA, 21 nt, synthetic construct
  source 1..21: mol_type = other RNA
agcaccgtggtgacaagcaag

SEQ ID NO: 3849 - RNA, 21 nt, synthetic construct
  source 1..21: mol_type = other RNA
agcacgtgagagaccctcgca

SEQ ID NO: 3850 - RNA, 21 nt, synthetic construct
  source 1..21: mol_type = other RNA
agcactttctaaatttcctgt

SEQ ID NO: 3851 - RNA, 21 nt, synthetic construct
  source 1..21: mol_type = other RNA
agcagaagacagaacagaaac

SEQ ID NO: 3852 - RNA, 21 nt, synthetic construct
  source 1..21: mol_type = other RNA
agcagacggtgggaccagggg

SEQ ID NO: 3853 - RNA, 21 nt, synthetic construct
  source 1..21: mol_type = other RNA
agcagactgtttctgttctgt

SEQ ID NO: 3854 - RNA, 21 nt, synthetic construct
  source 1..21: mol_type = other RNA
agcagatgcagatttaggtgg

SEQ ID NO: 3855 - RNA, 21 nt, synthetic construct
  source 1..21: mol_type = other RNA
agcagcagccgctgccagggg

SEQ ID NO: 3856 - RNA, 21 nt, synthetic construct
  source 1..21: mol_type = other RNA
agcagcatgtccagtactcga

SEQ ID NO: 3857 - RNA, 21 nt, synthetic construct
  source 1..21: mol_type = other RNA
agcagcccgttcccaccggac

SEQ ID NO: 3858 - RNA, 21 nt, synthetic construct
  source 1..21: mol_type = other RNA
agcagccgctgccaggggctg

SEQ ID NO: 3859 - RNA, 21 nt, synthetic construct
  source 1..21: mol_type = other RNA
agcaggagataaaaccaagta

SEQ ID NO: 3860 - RNA, 21 nt, synthetic construct
  source 1..21: mol_type = other RNA
agcagtaggctagcaagcaga

SEQ ID NO: 3861 - RNA, 21 nt, synthetic construct
  source 1..21: mol_type = other RNA
agcagtggcgccgagccttgc

SEQ ID NO: 3862 - RNA, 21 nt, synthetic construct
  source 1..21: mol_type = other RNA
agcataaaatgttcacatgac

SEQ ID NO: 3863 - RNA, 21 nt, synthetic construct
  source 1..21: mol_type = other RNA
agcatctgcactaatttccca

SEQ ID NO: 3864 - RNA, 21 nt, synthetic construct
  source 1..21: mol_type = other RNA
agcatgagctactgcacctgg

SEQ ID NO: 3865 - RNA, 21 nt, synthetic construct
  source 1..21: mol_type = other RNA
agcatgtccagtactcgagga

SEQ ID NO: 3866 - RNA, 21 nt, synthetic construct
  source 1..21: mol_type = other RNA
agcatgtgtcagacaatacaa

SEQ ID NO: 3867 - RNA, 21 nt, synthetic construct
  source 1..21: mol_type = other RNA
agcattgcctctttgatcccc

SEQ ID NO: 3868 - RNA, 21 nt, synthetic construct
  source 1..21: mol_type = other RNA
agcattggatcaacctggaag

SEQ ID NO: 3869 - RNA, 21 nt, synthetic construct
  source 1..21: mol_type = other RNA
agccaaggcaagccagtcagc

SEQ ID NO: 3870 - RNA, 21 nt, synthetic construct
  source 1..21: mol_type = other RNA
agccaaggcccaaactaatgt

SEQ ID NO: 3871 - RNA, 21 nt, synthetic construct
  source 1..21: mol_type = other RNA
agccagcagcccgttcccacc

SEQ ID NO: 3872 - RNA, 21 nt, synthetic construct
  source 1..21: mol_type = other RNA
agccaggacagtgaatgaggc

SEQ ID NO: 3873 - RNA, 21 nt, synthetic construct
  source 1..21: mol_type = other RNA
agccagtcagcagtaggctag

SEQ ID NO: 3874 - RNA, 21 nt, synthetic construct
  source 1..21: mol_type = other RNA
agccatggttctgcatcttgt

SEQ ID NO: 3875 - RNA, 21 nt, synthetic construct
  source 1..21: mol_type = other RNA
agccatttgctgcacaatccc

SEQ ID NO: 3876 - RNA, 21 nt, synthetic construct
  source 1..21: mol_type = other RNA
agcccctgccacaaggggctg

SEQ ID NO: 3877 - RNA, 21 nt, synthetic construct
  source 1..21: mol_type = other RNA
agcccctggcagcggctgctg

SEQ ID NO: 3878 - RNA, 21 nt, synthetic construct
  source 1..21: mol_type = other RNA
agccccttgtggcaggggctg

SEQ ID NO: 3879 - RNA, 21 nt, synthetic construct
  source 1..21: mol_type = other RNA
agcccgttcccaccggacagg

SEQ ID NO: 3880 - RNA, 21 nt, synthetic construct
  source 1..21: mol_type = other RNA
agccctcacggaagatgacag

SEQ ID NO: 3881 - RNA, 21 nt, synthetic construct
  source 1..21: mol_type = other RNA
agccctgaaagcttagccctc

SEQ ID NO: 3882 - RNA, 21 nt, synthetic construct
  source 1..21: mol_type = other RNA
agccctggcggagggatgcag

SEQ ID NO: 3883 - RNA, 21 nt, synthetic construct
  source 1..21: mol_type = other RNA
agccctgggaaattagtgcag

SEQ ID NO: 3884 - RNA, 21 nt, synthetic construct
  source 1..21: mol_type = other RNA
agccgctgccaggggctgcgt

SEQ ID NO: 3885 - RNA, 21 nt, synthetic construct
  source 1..21: mol_type = other RNA
agccgtggaaacactggactt

SEQ ID NO: 3886 - RNA, 21 nt, synthetic construct
  source 1..21: mol_type = other RNA
agcctactgctgactggcttg

SEQ ID NO: 3887 - RNA, 21 nt, synthetic construct
  source 1..21: mol_type = other RNA
agcctcattcactgtcctggc

SEQ ID NO: 3888 - RNA, 21 nt, synthetic construct
  source 1..21: mol_type = other RNA
agcctcccacctagctgagac

SEQ ID NO: 3889 - RNA, 21 nt, synthetic construct
  source 1..21: mol_type = other RNA
agcctgcatataagtctatta

SEQ ID NO: 3890 - RNA, 21 nt, synthetic construct
  source 1..21: mol_type = other RNA
agccttgcttgtcaccacggt

SEQ ID NO: 3891 - RNA, 21 nt, synthetic construct
  source 1..21: mol_type = other RNA
agcgagactgtctccaaaaaa

SEQ ID NO: 3892 - RNA, 21 nt, synthetic construct
  source 1..21: mol_type = other RNA
agcgcactgcaacctctgtct

SEQ ID NO: 3893 - RNA, 21 nt, synthetic construct
  source 1..21: mol_type = other RNA
agcggctgctgcttggcagtc

SEQ ID NO: 3894 - RNA, 21 nt, synthetic construct
  source 1..21: mol_type = other RNA
agcgtcacctgaacaagatgc

SEQ ID NO: 3895 - RNA, 21 nt, synthetic construct
  source 1..21: mol_type = other RNA
agcgtcttctagagagcttag

SEQ ID NO: 3896 - RNA, 21 nt, synthetic construct
  source 1..21: mol_type = other RNA
agctactgcacctggccagtt

SEQ ID NO: 3897 - RNA, 21 nt, synthetic construct
  source 1..21: mol_type = other RNA
agctaggccagtctccagcag

SEQ ID NO: 3898 - RNA, 21 nt, synthetic construct
  source 1..21: mol_type = other RNA
agctcatttaaaaagggaata

SEQ ID NO: 3899 - RNA, 21 nt, synthetic construct
  source 1..21: mol_type = other RNA
agctctctagaagacgctgga

SEQ ID NO: 3900 - RNA, 21 nt, synthetic construct
  source 1..21: mol_type = other RNA
agctgtagaatttcagaactg

SEQ ID NO: 3901 - RNA, 21 nt, synthetic construct
  source 1..21: mol_type = other RNA
agcttagccctcacggaagat

SEQ ID NO: 3902 - RNA, 21 nt, synthetic construct
  source 1..21: mol_type = other RNA
agcttagtgtatacagatgag

SEQ ID NO: 3903 - RNA, 21 nt, synthetic construct
  source 1..21: mol_type = other RNA
agctttcaggaagttgctgag

SEQ ID NO: 3904 - RNA, 21 nt, synthetic construct
  source 1..21: mol_type = other RNA
agctttcagggctctcgtttc

SEQ ID NO: 3905 - RNA, 21 nt, synthetic construct
  source 1..21: mol_type = other RNA
aggaaataatctgagaaaaga

SEQ ID NO: 3906 - RNA, 21 nt, synthetic construct
  source 1..21: mol_type = other RNA
aggaaatccagttgactgtca

SEQ ID NO: 3907 - RNA, 21 nt, synthetic construct
  source 1..21: mol_type = other RNA
aggaaatttagaaagtgctga

SEQ ID NO: 3908 - RNA, 21 nt, synthetic construct
  source 1..21: mol_type = other RNA
aggaacactaaggaaataatc

SEQ ID NO: 3909 - RNA, 21 nt, synthetic construct
  source 1..21: mol_type = other RNA
aggaagttgctgagaaatggg

SEQ ID NO: 3910 - RNA, 21 nt, synthetic construct
  source 1..21: mol_type = other RNA
aggaatccagtgagtaactga

SEQ ID NO: 3911 - RNA, 21 nt, synthetic construct
  source 1..21: mol_type = other RNA
aggacagtgaatgaggctgaa

SEQ ID NO: 3912 - RNA, 21 nt, synthetic construct
  source 1..21: mol_type = other RNA
aggaccaaatgcagccagcag

SEQ ID NO: 3913 - RNA, 21 nt, synthetic construct
  source 1..21: mol_type = other RNA
aggaccagtttcttgaagtcc

SEQ ID NO: 3914 - RNA, 21 nt, synthetic construct
  source 1..21: mol_type = other RNA
aggaccttaatgagccctggg

SEQ ID NO: 3915 - RNA, 21 nt, synthetic construct
  source 1..21: mol_type = other RNA
aggacgttaaaggcattttat

SEQ ID NO: 3916 - RNA, 21 nt, synthetic construct
  source 1..21: mol_type = other RNA
aggactatataaagtactact

SEQ ID NO: 3917 - RNA, 21 nt, synthetic construct
  source 1..21: mol_type = other RNA
aggacttttatggagacacac

SEQ ID NO: 3918 - RNA, 21 nt, synthetic construct
  source 1..21: mol_type = other RNA
aggagaaagaaaataagggga

SEQ ID NO: 3919 - RNA, 21 nt, synthetic construct
  source 1..21: mol_type = other RNA
aggagataaaaccaagtaact

SEQ ID NO: 3920 - RNA, 21 nt, synthetic construct
  source 1..21: mol_type = other RNA
aggagcaacaggaaatttaga

SEQ ID NO: 3921 - RNA, 21 nt, synthetic construct
  source 1..21: mol_type = other RNA
aggaggtcaggatgtcagacg

SEQ ID NO: 3922 - RNA, 21 nt, synthetic construct
  source 1..21: mol_type = other RNA
aggagtgaagatgcctattaa

SEQ ID NO: 3923 - RNA, 21 nt, synthetic construct
  source 1..21: mol_type = other RNA
aggagtgagtggcaagacaag

SEQ ID NO: 3924 - RNA, 21 nt, synthetic construct
  source 1..21: mol_type = other RNA
aggatgtcagacgcagcccct

SEQ ID NO: 3925 - RNA, 21 nt, synthetic construct
  source 1..21: mol_type = other RNA
aggatttccccatattgacca

SEQ ID NO: 3926 - RNA, 21 nt, synthetic construct
  source 1..21: mol_type = other RNA
aggatttgagatcaccctggt

SEQ ID NO: 3927 - RNA, 21 nt, synthetic construct
  source 1..21: mol_type = other RNA
aggcaagccagtcagcagtag

SEQ ID NO: 3928 - RNA, 21 nt, synthetic construct
  source 1..21: mol_type = other RNA
aggcaatgctttcgaaacgag

SEQ ID NO: 3929 - RNA, 21 nt, synthetic construct
  source 1..21: mol_type = other RNA
aggcagtattccctttttaaa

SEQ ID NO: 3930 - RNA, 21 nt, synthetic construct
  source 1..21: mol_type = other RNA
aggcatcttcactcctcgagt

SEQ ID NO: 3931 - RNA, 21 nt, synthetic construct
  source 1..21: mol_type = other RNA
aggcattttattccagcgtct

SEQ ID NO: 3932 - RNA, 21 nt, synthetic construct
  source 1..21: mol_type = other RNA
aggccaaatgagaaccggtgg

SEQ ID NO: 3933 - RNA, 21 nt, synthetic construct
  source 1..21: mol_type = other RNA
aggccagtctccagcaggaga

SEQ ID NO: 3934 - RNA, 21 nt, synthetic construct
  source 1..21: mol_type = other RNA
aggcccaaactaatgttgaaa

SEQ ID NO: 3935 - RNA, 21 nt, synthetic construct
  source 1..21: mol_type = other RNA
aggctagcaagcagacggtgg

SEQ ID NO: 3936 - RNA, 21 nt, synthetic construct
  source 1..21: mol_type = other RNA
aggctcggcgccactgcttac

SEQ ID NO: 3937 - RNA, 21 nt, synthetic construct
  source 1..21: mol_type = other RNA
aggctgaagagttgacttaca

SEQ ID NO: 3938 - RNA, 21 nt, synthetic construct
  source 1..21: mol_type = other RNA
aggctgtcgttccggttatgt

SEQ ID NO: 3939 - RNA, 21 nt, synthetic construct
  source 1..21: mol_type = other RNA
agggaactgtaatggccactg

SEQ ID NO: 3940 - RNA, 21 nt, synthetic construct
  source 1..21: mol_type = other RNA
agggactctggacattcccac

SEQ ID NO: 3941 - RNA, 21 nt, synthetic construct
  source 1..21: mol_type = other RNA
agggatgcaggtgggccggaa

SEQ ID NO: 3942 - RNA, 21 nt, synthetic construct
  source 1..21: mol_type = other RNA
agggctaagctttcagggctc

SEQ ID NO: 3943 - RNA, 21 nt, synthetic construct
  source 1..21: mol_type = other RNA
agggctcattaaggtccttac

SEQ ID NO: 3944 - RNA, 21 nt, synthetic construct
  source 1..21: mol_type = other RNA
agggctctcgtttcgaaagca

SEQ ID NO: 3945 - RNA, 21 nt, synthetic construct
  source 1..21: mol_type = other RNA
aggggatcaaagaggcaatgc

SEQ ID NO: 3946 - RNA, 21 nt, synthetic construct
  source 1..21: mol_type = other RNA
aggggatctctggtctttttc

SEQ ID NO: 3947 - RNA, 21 nt, synthetic construct
  source 1..21: mol_type = other RNA
aggggattgtgcagcaaatgg

SEQ ID NO: 3948 - RNA, 21 nt, synthetic construct
  source 1..21: mol_type = other RNA
aggggctgatttccaaaaaca

SEQ ID NO: 3949 - RNA, 21 nt, synthetic construct
  source 1..21: mol_type = other RNA
aggggctgcgtctgacatcct

SEQ ID NO: 3950 - RNA, 21 nt, synthetic construct
  source 1..21: mol_type = other RNA
aggggctgttgccaactttca

SEQ ID NO: 3951 - RNA, 21 nt, synthetic construct
  source 1..21: mol_type = other RNA
agggtcattgtggtgtctggg

SEQ ID NO: 3952 - RNA, 21 nt, synthetic construct
  source 1..21: mol_type = other RNA
agggtctctcacgtgcttcag

SEQ ID NO: 3953 - RNA, 21 nt, synthetic construct
  source 1..21: mol_type = other RNA
agggtgaaaactcttttctca

SEQ ID NO: 3954 - RNA, 21 nt, synthetic construct
  source 1..21: mol_type = other RNA
agggtgctgggagacctgagc

SEQ ID NO: 3955 - RNA, 21 nt, synthetic construct
  source 1..21: mol_type = other RNA
aggtagtaagcagtggcgccg

SEQ ID NO: 3956 - RNA, 21 nt, synthetic construct
  source 1..21: mol_type = other RNA
aggtatccagccgtggaaaca

SEQ ID NO: 3957 - RNA, 21 nt, synthetic construct
  source 1..21: mol_type = other RNA
aggtatttgtaggtggggttc

SEQ ID NO: 3958 - RNA, 21 nt, synthetic construct
  source 1..21: mol_type = other RNA
aggtcaggatgtcagacgcag

SEQ ID NO: 3959 - RNA, 21 nt, synthetic construct
  source 1..21: mol_type = other RNA
aggtcaggatttgagatcacc

SEQ ID NO: 3960 - RNA, 21 nt, synthetic construct
  source 1..21: mol_type = other RNA
aggtccttactgtatttatat

SEQ ID NO: 3961 - RNA, 21 nt, synthetic construct
  source 1..21: mol_type = other RNA
aggtcgtgtttttggaaatca

SEQ ID NO: 3962 - RNA, 21 nt, synthetic construct
  source 1..21: mol_type = other RNA
aggtctcccagcaccctgtgc

SEQ ID NO: 3963 - RNA, 21 nt, synthetic construct
  source 1..21: mol_type = other RNA
aggtctcttcccagacaccac

SEQ ID NO: 3964 - RNA, 21 nt, synthetic construct
  source 1..21: mol_type = other RNA
aggtgacgctcttctggggtg

SEQ ID NO: 3965 - RNA, 21 nt, synthetic construct
  source 1..21: mol_type = other RNA
aggtggcagggagcgcggcag

SEQ ID NO: 3966 - RNA, 21 nt, synthetic construct
  source 1..21: mol_type = other RNA
aggtgggaggctgaggcacaa

SEQ ID NO: 3967 - RNA, 21 nt, synthetic construct
  source 1..21: mol_type = other RNA
aggtgggccggaagatcccac

SEQ ID NO: 3968 - RNA, 21 nt, synthetic construct
  source 1..21: mol_type = other RNA
aggtggggttctcatagccat

SEQ ID NO: 3969 - RNA, 21 nt, synthetic construct
  source 1..21: mol_type = other RNA
aggttcccacccccaacccag

SEQ ID NO: 3970 - RNA, 21 nt, synthetic construct
  source 1..21: mol_type = other RNA
aggttgatccaatgctcaccc

SEQ ID NO: 3971 - RNA, 21 nt, synthetic construct
  source 1..21: mol_type = other RNA
aggttttgttcttccaggttg

SEQ ID NO: 3972 - RNA, 21 nt, synthetic construct
  source 1..21: mol_type = other RNA
agtaaccagcagaagacagaa

SEQ ID NO: 3973 - RNA, 21 nt, synthetic construct
  source 1..21: mol_type = other RNA
agtaactgaactgataacagc

SEQ ID NO: 3974 - RNA, 21 nt, synthetic construct
  source 1..21: mol_type = other RNA
agtaactggccaggtgcagta

SEQ ID NO: 3975 - RNA, 21 nt, synthetic construct
  source 1..21: mol_type = other RNA
agtaagcagtggcgccgagcc

SEQ ID NO: 3976 - RNA, 21 nt, synthetic construct
  source 1..21: mol_type = other RNA
agtaaggaccttaatgagccc

SEQ ID NO: 3977 - RNA, 21 nt, synthetic construct
  source 1..21: mol_type = other RNA
agtactactgtagaactgcaa

SEQ ID NO: 3978 - RNA, 21 nt, synthetic construct
  source 1..21: mol_type = other RNA
agtactcgaggagtgaagatg

SEQ ID NO: 3979 - RNA, 21 nt, synthetic construct
  source 1..21: mol_type = other RNA
agtactggacatgctgctgtt

SEQ ID NO: 3980 - RNA, 21 nt, synthetic construct
  source 1..21: mol_type = other RNA
agtactttatatagtcctaca

SEQ ID NO: 3981 - RNA, 21 nt, synthetic construct
  source 1..21: mol_type = other RNA
agtaggctagcaagcagacgg

SEQ ID NO: 3982 - RNA, 21 nt, synthetic construct
  source 1..21: mol_type = other RNA
agtagtactttatatagtcct

SEQ ID NO: 3983 - RNA, 21 nt, synthetic construct
  source 1..21: mol_type = other RNA
agtattccctttttaaatgag

SEQ ID NO: 3984 - RNA, 21 nt, synthetic construct
  source 1..21: mol_type = other RNA
agtcaactcttcagcctcatt

SEQ ID NO: 3985 - RNA, 21 nt, synthetic construct
  source 1..21: mol_type = other RNA
agtcaactggatttcctagca

SEQ ID NO: 3986 - RNA, 21 nt, synthetic construct
  source 1..21: mol_type = other RNA
agtcagcagtaggctagcaag

SEQ ID NO: 3987 - RNA, 21 nt, synthetic construct
  source 1..21: mol_type = other RNA
agtcatgtgaacattttatgc

SEQ ID NO: 3988 - RNA, 21 nt, synthetic construct
  source 1..21: mol_type = other RNA
agtccaggaggtcaggatgtc

SEQ ID NO: 3989 - RNA, 21 nt, synthetic construct
  source 1..21: mol_type = other RNA
agtccagtgtttccacggctg

SEQ ID NO: 3990 - RNA, 21 nt, synthetic construct
  source 1..21: mol_type = other RNA
agtcccttgatccccaaatat

SEQ ID NO: 3991 - RNA, 21 nt, synthetic construct
  source 1..21: mol_type = other RNA
agtcctacagtccaggaggtc

SEQ ID NO: 3992 - RNA, 21 nt, synthetic construct
  source 1..21: mol_type = other RNA
agtcctgtcaccaaggacgtt

SEQ ID NO: 3993 - RNA, 21 nt, synthetic construct
  source 1..21: mol_type = other RNA
agtcgatcggaatcgtgggat

SEQ ID NO: 3994 - RNA, 21 nt, synthetic construct
  source 1..21: mol_type = other RNA
agtctattattgaaaatcgac

SEQ ID NO: 3995 - RNA, 21 nt, synthetic construct
  source 1..21: mol_type = other RNA
agtctcagctaggtgggaggc

SEQ ID NO: 3996 - RNA, 21 nt, synthetic construct
  source 1..21: mol_type = other RNA
agtctccagcaggagataaaa

SEQ ID NO: 3997 - RNA, 21 nt, synthetic construct
  source 1..21: mol_type = other RNA
agtctgcttcagcactttcta

SEQ ID NO: 3998 - RNA, 21 nt, synthetic construct
  source 1..21: mol_type = other RNA
agtgaacagtgggaatgtcca

SEQ ID NO: 3999 - RNA, 21 nt, synthetic construct
  source 1..21: mol_type = other RNA
agtgaagatgcctattaattc

SEQ ID NO: 4000 - RNA, 21 nt, synthetic construct
  source 1..21: mol_type = other RNA
agtgaatgaggctgaagagtt

SEQ ID NO: 4001 - RNA, 21 nt, synthetic construct
  source 1..21: mol_type = other RNA
agtgagtaactgaactgataa

SEQ ID NO: 4002 - RNA, 21 nt, synthetic construct
  source 1..21: mol_type = other RNA
agtgagtggcaagacaagttc

SEQ ID NO: 4003 - RNA, 21 nt, synthetic construct
  source 1..21: mol_type = other RNA
agtgcagatgctggtcttagt

SEQ ID NO: 4004 - RNA, 21 nt, synthetic construct
  source 1..21: mol_type = other RNA
agtgctgaagcagactgtttc

SEQ ID NO: 4005 - RNA, 21 nt, synthetic construct
  source 1..21: mol_type = other RNA
agtggcaagacaagttcagta

SEQ ID NO: 4006 - RNA, 21 nt, synthetic construct
  source 1..21: mol_type = other RNA
agtggccattacagttcccta

SEQ ID NO: 4007 - RNA, 21 nt, synthetic construct
  source 1..21: mol_type = other RNA
agtggcgccgagccttgcttg

SEQ ID NO: 4008 - RNA, 21 nt, synthetic construct
  source 1..21: mol_type = other RNA
agtgggaatgtccagagtccc

SEQ ID NO: 4009 - RNA, 21 nt, synthetic construct
  source 1..21: mol_type = other RNA
agtggggtttctgattaattt

SEQ ID NO: 4010 - RNA, 21 nt, synthetic construct
  source 1..21: mol_type = other RNA
agtgttcctttttccaggtat

SEQ ID NO: 4011 - RNA, 21 nt, synthetic construct
  source 1..21: mol_type = other RNA
agtgtttccacggctggatac

SEQ ID NO: 4012 - RNA, 21 nt, synthetic construct
  source 1..21: mol_type = other RNA
agttactcactggattcctag

SEQ ID NO: 4013 - RNA, 21 nt, synthetic construct
  source 1..21: mol_type = other RNA
agttacttggttttatctcct

SEQ ID NO: 4014 - RNA, 21 nt, synthetic construct
  source 1..21: mol_type = other RNA
agttcagtaaccagcagaaga

SEQ ID NO: 4015 - RNA, 21 nt, synthetic construct
  source 1..21: mol_type = other RNA
agttcagttactcactggatt

SEQ ID NO: 4016 - RNA, 21 nt, synthetic construct
  source 1..21: mol_type = other RNA
agttccctattccaccccatt

SEQ ID NO: 4017 - RNA, 21 nt, synthetic construct
  source 1..21: mol_type = other RNA
agttctacagtagtactttat

SEQ ID NO: 4018 - RNA, 21 nt, synthetic construct
  source 1..21: mol_type = other RNA
agttctgaaattctacagcta

SEQ ID NO: 4019 - RNA, 21 nt, synthetic construct
  source 1..21: mol_type = other RNA
agttgactgtcatcttccgtg

SEQ ID NO: 4020 - RNA, 21 nt, synthetic construct
  source 1..21: mol_type = other RNA
agttgacttacacaacataac

SEQ ID NO: 4021 - RNA, 21 nt, synthetic construct
  source 1..21: mol_type = other RNA
agttgctgagaaatggggtgg

SEQ ID NO: 4022 - RNA, 21 nt, synthetic construct
  source 1..21: mol_type = other RNA
agttggcaacagccccttgtg

SEQ ID NO: 4023 - RNA, 21 nt, synthetic construct
  source 1..21: mol_type = other RNA
agtttcttgaagtccagtgtt

SEQ ID NO: 4024 - RNA, 21 nt, synthetic construct
  source 1..21: mol_type = other RNA
agtttgggccttggctatgaa

SEQ ID NO: 4025 - RNA, 21 nt, synthetic construct
  source 1..21: mol_type = other RNA
agttttcaccctctgtagcat

SEQ ID NO: 4026 - RNA, 21 nt, synthetic construct
  source 1..21: mol_type = other RNA
ataaaaccaagtaactggcca

SEQ ID NO: 4027 - RNA, 21 nt, synthetic construct
  source 1..21: mol_type = other RNA
ataaaagccaggacagtgaat

SEQ ID NO: 4028 - RNA, 21 nt, synthetic construct
  source 1..21: mol_type = other RNA
ataaaagtcctgtcaccaagg

SEQ ID NO: 4029 - RNA, 21 nt, synthetic construct
  source 1..21: mol_type = other RNA
ataaaatgcctttaacgtcct

SEQ ID NO: 4030 - RNA, 21 nt, synthetic construct
  source 1..21: mol_type = other RNA
ataaagtactactgtagaact

SEQ ID NO: 4031 - RNA, 21 nt, synthetic construct
  source 1..21: mol_type = other RNA
ataaatacagtaaggacctta

SEQ ID NO: 4032 - RNA, 21 nt, synthetic construct
  source 1..21: mol_type = other RNA
ataaatgggaaatgtcgattt

SEQ ID NO: 4033 - RNA, 21 nt, synthetic construct
  source 1..21: mol_type = other RNA
ataacagcagcatgtccagta

SEQ ID NO: 4034 - RNA, 21 nt, synthetic construct
  source 1..21: mol_type = other RNA
ataaccggaacgacagcctgc

SEQ ID NO: 4035 - RNA, 21 nt, synthetic construct
  source 1..21: mol_type = other RNA
ataactaagaccagcatctgc

SEQ ID NO: 4036 - RNA, 21 nt, synthetic construct
  source 1..21: mol_type = other RNA
ataaggggatcaaagaggcaa

SEQ ID NO: 4037 - RNA, 21 nt, synthetic construct
  source 1..21: mol_type = other RNA
ataataaatgggaaatgtcga

SEQ ID NO: 4038 - RNA, 21 nt, synthetic construct
  source 1..21: mol_type = other RNA
ataatagacttatatgcaggc

SEQ ID NO: 4039 - RNA, 21 nt, synthetic construct
  source 1..21: mol_type = other RNA
atacaaagactagctgggcgt

SEQ ID NO: 4040 - RNA, 21 nt, synthetic construct
  source 1..21: mol_type = other RNA
atacaatggaagtggggtttc

SEQ ID NO: 4041 - RNA, 21 nt, synthetic construct
  source 1..21: mol_type = other RNA
atacactaagctctctagaag

SEQ ID NO: 4042 - RNA, 21 nt, synthetic construct
  source 1..21: mol_type = other RNA
atacagtaaggaccttaatga

SEQ ID NO: 4043 - RNA, 21 nt, synthetic construct
  source 1..21: mol_type = other RNA
atacctggaaaaaggaacact

SEQ ID NO: 4044 - RNA, 21 nt, synthetic construct
  source 1..21: mol_type = other RNA
atacctggagcagatgcagat

SEQ ID NO: 4045 - RNA, 21 nt, synthetic construct
  source 1..21: mol_type = other RNA
atacctgtgtgtctccataaa

SEQ ID NO: 4046 - RNA, 21 nt, synthetic construct
  source 1..21: mol_type = other RNA
atagacttatatgcaggctgt

SEQ ID NO: 4047 - RNA, 21 nt, synthetic construct
  source 1..21: mol_type = other RNA
atagccaaggcccaaactaat

SEQ ID NO: 4048 - RNA, 21 nt, synthetic construct
  source 1..21: mol_type = other RNA
atagccatggttctgcatctt

SEQ ID NO: 4049 - RNA, 21 nt, synthetic construct
  source 1..21: mol_type = other RNA
ataggatttccccatattgac

SEQ ID NO: 4050 - RNA, 21 nt, synthetic construct
  source 1..21: mol_type = other RNA
ataggcatcttcactcctcga

SEQ ID NO: 4051 - RNA, 21 nt, synthetic construct
  source 1..21: mol_type = other RNA
atagggaactgtaatggccac

SEQ ID NO: 4052 - RNA, 21 nt, synthetic construct
  source 1..21: mol_type = other RNA
atagtcctacagtccaggagg

SEQ ID NO: 4053 - RNA, 21 nt, synthetic construct
  source 1..21: mol_type = other RNA
atataaatacagtaaggacct

SEQ ID NO: 4054 - RNA, 21 nt, synthetic construct
  source 1..21: mol_type = other RNA
atatagtcctacagtccagga

SEQ ID NO: 4055 - RNA, 21 nt, synthetic construct
  source 1..21: mol_type = other RNA
atatattgagagcatgtgtca

SEQ ID NO: 4056 - RNA, 21 nt, synthetic construct
  source 1..21: mol_type = other RNA
atatgcaggctgtcgttccgg

SEQ ID NO: 4057 - RNA, 21 nt, synthetic construct
  source 1..21: mol_type = other RNA
atatggggaaatcctatctct

SEQ ID NO: 4058 - RNA, 21 nt, synthetic construct
  source 1..21: mol_type = other RNA
atattaccatttttcacccat

SEQ ID NO: 4059 - RNA, 21 nt, synthetic construct
  source 1..21: mol_type = other RNA
atattgaccagggtgatctca

SEQ ID NO: 4060 - RNA, 21 nt, synthetic construct
  source 1..21: mol_type = other RNA
atattgagagcatgtgtcaga

SEQ ID NO: 4061 - RNA, 21 nt, synthetic construct
  source 1..21: mol_type = other RNA
atatttggggatcaagggact

SEQ ID NO: 4062 - RNA, 21 nt, synthetic construct
  source 1..21: mol_type = other RNA
atcaaagaggcaatgctttcg

SEQ ID NO: 4063 - RNA, 21 nt, synthetic construct
  source 1..21: mol_type = other RNA
atcaaatatctgcaatagatc

SEQ ID NO: 4064 - RNA, 21 nt, synthetic construct
  source 1..21: mol_type = other RNA
atcaacctggaagaacaaaac

SEQ ID NO: 4065 - RNA, 21 nt, synthetic construct
  source 1..21: mol_type = other RNA
atcaagggactctggacattc

SEQ ID NO: 4066 - RNA, 21 nt, synthetic construct
  source 1..21: mol_type = other RNA
atcaccctggtcaatatgggg

SEQ ID NO: 4067 - RNA, 21 nt, synthetic construct
  source 1..21: mol_type = other RNA
atcagaaaccccacttccatt

SEQ ID NO: 4068 - RNA, 21 nt, synthetic construct
  source 1..21: mol_type = other RNA
atcagcccctgccacaagggg

SEQ ID NO: 4069 - RNA, 21 nt, synthetic construct
  source 1..21: mol_type = other RNA
atcagttcagttactcactgg

SEQ ID NO: 4070 - RNA, 21 nt, synthetic construct
  source 1..21: mol_type = other RNA
atcattttgcgagggtctctc

SEQ ID NO: 4071 - RNA, 21 nt, synthetic construct
  source 1..21: mol_type = other RNA
atccaatgctcaccccagaag

SEQ ID NO: 4072 - RNA, 21 nt, synthetic construct
  source 1..21: mol_type = other RNA
atccagccgtggaaacactgg

SEQ ID NO: 4073 - RNA, 21 nt, synthetic construct
  source 1..21: mol_type = other RNA
atccagtgagtaactgaactg

SEQ ID NO: 4074 - RNA, 21 nt, synthetic construct
  source 1..21: mol_type = other RNA
atccagttgactgtcatcttc

SEQ ID NO: 4075 - RNA, 21 nt, synthetic construct
  source 1..21: mol_type = other RNA
atcccacgattccgatcgact

SEQ ID NO: 4076 - RNA, 21 nt, synthetic construct
  source 1..21: mol_type = other RNA
atccccaaatataaatacagt

SEQ ID NO: 4077 - RNA, 21 nt, synthetic construct
  source 1..21: mol_type = other RNA
atcccctgaggaccaaatgca

SEQ ID NO: 4078 - RNA, 21 nt, synthetic construct
  source 1..21: mol_type = other RNA
atcccctggtcccaccgtctg

SEQ ID NO: 4079 - RNA, 21 nt, synthetic construct
  source 1..21: mol_type = other RNA
atccccttattttctttctcc

SEQ ID NO: 4080 - RNA, 21 nt, synthetic construct
  source 1..21: mol_type = other RNA
atccctccgccagggctgccg

SEQ ID NO: 4081 - RNA, 21 nt, synthetic construct
  source 1..21: mol_type = other RNA
atcctgacctcctggactgta

SEQ ID NO: 4082 - RNA, 21 nt, synthetic construct
  source 1..21: mol_type = other RNA
atcgacatttcccatttatta

SEQ ID NO: 4083 - RNA, 21 nt, synthetic construct
  source 1..21: mol_type = other RNA
atcgactgccaagcagcagcc

SEQ ID NO: 4084 - RNA, 21 nt, synthetic construct
  source 1..21: mol_type = other RNA
atcggaatcgtgggatcttcc

SEQ ID NO: 4085 - RNA, 21 nt, synthetic construct
  source 1..21: mol_type = other RNA
atcgtgggatcttccggccca

SEQ ID NO: 4086 - RNA, 21 nt, synthetic construct
  source 1..21: mol_type = other RNA
atctattgcagatatttgatg

SEQ ID NO: 4087 - RNA, 21 nt, synthetic construct
  source 1..21: mol_type = other RNA
atctcctgctggagactggcc

SEQ ID NO: 4088 - RNA, 21 nt, synthetic construct
  source 1..21: mol_type = other RNA
atctctggtctttttcagttc

SEQ ID NO: 4089 - RNA, 21 nt, synthetic construct
  source 1..21: mol_type = other RNA
atctgagaaaagagttttcac

SEQ ID NO: 4090 - RNA, 21 nt, synthetic construct
  source 1..21: mol_type = other RNA
atctgcactaatttcccaggg

SEQ ID NO: 4091 - RNA, 21 nt, synthetic construct
  source 1..21: mol_type = other RNA
atctgcatctgctccaggtat

SEQ ID NO: 4092 - RNA, 21 nt, synthetic construct
  source 1..21: mol_type = other RNA
atctgctccaggtatttgtag

SEQ ID NO: 4093 - RNA, 21 nt, synthetic construct
  source 1..21: mol_type = other RNA
atctgtatacactaagctctc

SEQ ID NO: 4094 - RNA, 21 nt, synthetic construct
  source 1..21: mol_type = other RNA
atcttcactcctcgagtactg

SEQ ID NO: 4095 - RNA, 21 nt, synthetic construct
  source 1..21: mol_type = other RNA
atcttccggcccacctgcatc

SEQ ID NO: 4096 - RNA, 21 nt, synthetic construct
  source 1..21: mol_type = other RNA
atcttccgtgagggctaagct

SEQ ID NO: 4097 - RNA, 21 nt, synthetic construct
  source 1..21: mol_type = other RNA
atcttgttcaggtgacgctct

SEQ ID NO: 4098 - RNA, 21 nt, synthetic construct
  source 1..21: mol_type = other RNA
atgaatgtcagaaagtcatgt

SEQ ID NO: 4099 - RNA, 21 nt, synthetic construct
  source 1..21: mol_type = other RNA
atgacagtcaactggatttcc

SEQ ID NO: 4100 - RNA, 21 nt, synthetic construct
  source 1..21: mol_type = other RNA
atgaccctcaggttttgttct

SEQ ID NO: 4101 - RNA, 21 nt, synthetic construct
  source 1..21: mol_type = other RNA
atgactttctgacattcatag

SEQ ID NO: 4102 - RNA, 21 nt, synthetic construct
  source 1..21: mol_type = other RNA
atgagaaccccacctacaaat

SEQ ID NO: 4103 - RNA, 21 nt, synthetic construct
  source 1..21: mol_type = other RNA
atgagaaccggtggtgaaaca

SEQ ID NO: 4104 - RNA, 21 nt, synthetic construct
  source 1..21: mol_type = other RNA
atgagccctgggaaattagtg

SEQ ID NO: 4105 - RNA, 21 nt, synthetic construct
  source 1..21: mol_type = other RNA
atgagctactgcacctggcca

SEQ ID NO: 4106 - RNA, 21 nt, synthetic construct
  source 1..21: mol_type = other RNA
atgagctttcaggaagttgct

SEQ ID NO: 4107 - RNA, 21 nt, synthetic construct
  source 1..21: mol_type = other RNA
atgaggctgaagagttgactt

SEQ ID NO: 4108 - RNA, 21 nt, synthetic construct
  source 1..21: mol_type = other RNA
atgatctattgcagatatttg

SEQ ID NO: 4109 - RNA, 21 nt, synthetic construct
  source 1..21: mol_type = other RNA
atgatgtgaaaggaccagttt

SEQ ID NO: 4110 - RNA, 21 nt, synthetic construct
  source 1..21: mol_type = other RNA
atgcagaaccatggctatgag

SEQ ID NO: 4111 - RNA, 21 nt, synthetic construct
  source 1..21: mol_type = other RNA
atgcagatttaggtggcaggg

SEQ ID NO: 4112 - RNA, 21 nt, synthetic construct
  source 1..21: mol_type = other RNA
atgcagccagcagcccgttcc

SEQ ID NO: 4113 - RNA, 21 nt, synthetic construct
  source 1..21: mol_type = other RNA
atgcaggctgtcgttccggtt

SEQ ID NO: 4114 - RNA, 21 nt, synthetic construct
  source 1..21: mol_type = other RNA
atgcaggtgggccggaagatc

SEQ ID NO: 4115 - RNA, 21 nt, synthetic construct
  source 1..21: mol_type = other RNA
atgcctattaattccacaggt

SEQ ID NO: 4116 - RNA, 21 nt, synthetic construct
  source 1..21: mol_type = other RNA
atgcctttaacgtccttggtg

SEQ ID NO: 4117 - RNA, 21 nt, synthetic construct
  source 1..21: mol_type = other RNA
atgctacagagggtgaaaact

SEQ ID NO: 4118 - RNA, 21 nt, synthetic construct
  source 1..21: mol_type = other RNA
atgctcaccccagaagagcgt

SEQ ID NO: 4119 - RNA, 21 nt, synthetic construct
  source 1..21: mol_type = other RNA
atgctgctgttatcagttcag

SEQ ID NO: 4120 - RNA, 21 nt, synthetic construct
  source 1..21: mol_type = other RNA
atgctggtcttagttatttgt

SEQ ID NO: 4121 - RNA, 21 nt, synthetic construct
  source 1..21: mol_type = other RNA
atgctttcgaaacgagagccc

SEQ ID NO: 4122 - RNA, 21 nt, synthetic construct
  source 1..21: mol_type = other RNA
atggaaattgcagttctacag

SEQ ID NO: 4123 - RNA, 21 nt, synthetic construct
  source 1..21: mol_type = other RNA
atggaagtggggtttctgatt

SEQ ID NO: 4124 - RNA, 21 nt, synthetic construct
  source 1..21: mol_type = other RNA
atggagacacacaggtatcca

SEQ ID NO: 4125 - RNA, 21 nt, synthetic construct
  source 1..21: mol_type = other RNA
atggccactgaagcacgtgag

SEQ ID NO: 4126 - RNA, 21 nt, synthetic construct
  source 1..21: mol_type = other RNA
atggctatgagaaccccacct

SEQ ID NO: 4127 - RNA, 21 nt, synthetic construct
  source 1..21: mol_type = other RNA
atggctcaggtctcccagcac

SEQ ID NO: 4128 - RNA, 21 nt, synthetic construct
  source 1..21: mol_type = other RNA
atgggaaatgtcgattttcaa

SEQ ID NO: 4129 - RNA, 21 nt, synthetic construct
  source 1..21: mol_type = other RNA
atggggaaatcctatctctaa

SEQ ID NO: 4130 - RNA, 21 nt, synthetic construct
  source 1..21: mol_type = other RNA
atgggggaaaggagcaacagg

SEQ ID NO: 4131 - RNA, 21 nt, synthetic construct
  source 1..21: mol_type = other RNA
atggggtggaatagggaactg

SEQ ID NO: 4132 - RNA, 21 nt, synthetic construct
  source 1..21: mol_type = other RNA
atgggtgaaaaatggtaatat

SEQ ID NO: 4133 - RNA, 21 nt, synthetic construct
  source 1..21: mol_type = other RNA
atggttctgcatcttgttcag

SEQ ID NO: 4134 - RNA, 21 nt, synthetic construct
  source 1..21: mol_type = other RNA
atgtcagaaagtcatgtgaac

SEQ ID NO: 4135 - RNA, 21 nt, synthetic construct
  source 1..21: mol_type = other RNA
atgtcagacgcagcccctggc

SEQ ID NO: 4136 - RNA, 21 nt, synthetic construct
  source 1..21: mol_type = other RNA
atgtccagagtcccttgatcc

SEQ ID NO: 4137 - RNA, 21 nt, synthetic construct
  source 1..21: mol_type = other RNA
atgtccagtactcgaggagtg

SEQ ID NO: 4138 - RNA, 21 nt, synthetic construct
  source 1..21: mol_type = other RNA
atgtgaaaggaccagtttctt

SEQ ID NO: 4139 - RNA, 21 nt, synthetic construct
  source 1..21: mol_type = other RNA
atgtgaacattttatgctaca

SEQ ID NO: 4140 - RNA, 21 nt, synthetic construct
  source 1..21: mol_type = other RNA
atgtgtcagacaatacaatgg

SEQ ID NO: 4141 - RNA, 21 nt, synthetic construct
  source 1..21: mol_type = other RNA
atgttcacatgactttctgac

SEQ ID NO: 4142 - RNA, 21 nt, synthetic construct
  source 1..21: mol_type = other RNA
atgttgaaagttggcaacagc

SEQ ID NO: 4143 - RNA, 21 nt, synthetic construct
  source 1..21: mol_type = other RNA
atgttgtgtaagtcaactctt

SEQ ID NO: 4144 - RNA, 21 nt, synthetic construct
  source 1..21: mol_type = other RNA
attaaggtccttactgtattt

SEQ ID NO: 4145 - RNA, 21 nt, synthetic construct
  source 1..21: mol_type = other RNA
attaataggcatcttcactcc

SEQ ID NO: 4146 - RNA, 21 nt, synthetic construct
  source 1..21: mol_type = other RNA
attaatcagaaaccccacttc

SEQ ID NO: 4147 - RNA, 21 nt, synthetic construct
  source 1..21: mol_type = other RNA
attaattccacaggttcccac

SEQ ID NO: 4148 - RNA, 21 nt, synthetic construct
  source 1..21: mol_type = other RNA
attacagttccctattccacc

SEQ ID NO: 4149 - RNA, 21 nt, synthetic construct
  source 1..21: mol_type = other RNA
attaccatttttcacccattt

SEQ ID NO: 4150 - RNA, 21 nt, synthetic construct
  source 1..21: mol_type = other RNA
attagagataggatttcccca

SEQ ID NO: 4151 - RNA, 21 nt, synthetic construct
  source 1..21: mol_type = other RNA
attagtgcagatgctggtctt

SEQ ID NO: 4152 - RNA, 21 nt, synthetic construct
  source 1..21: mol_type = other RNA
attagtttgggccttggctat

SEQ ID NO: 4153 - RNA, 21 nt, synthetic construct
  source 1..21: mol_type = other RNA
attatatattgagagcatgtg

SEQ ID NO: 4154 - RNA, 21 nt, synthetic construct
  source 1..21: mol_type = other RNA
attatttccttagtgttcctt

SEQ ID NO: 4155 - RNA, 21 nt, synthetic construct
  source 1..21: mol_type = other RNA
attcactgtcctggcttttat

SEQ ID NO: 4156 - RNA, 21 nt, synthetic construct
  source 1..21: mol_type = other RNA
attcatagccaaggcccaaac

SEQ ID NO: 4157 - RNA, 21 nt, synthetic construct
  source 1..21: mol_type = other RNA
attccacaggttcccaccccc

SEQ ID NO: 4158 - RNA, 21 nt, synthetic construct
  source 1..21: mol_type = other RNA
attccaccccatttctcagca

SEQ ID NO: 4159 - RNA, 21 nt, synthetic construct
  source 1..21: mol_type = other RNA
attccagcgtcttctagagag

SEQ ID NO: 4160 - RNA, 21 nt, synthetic construct
  source 1..21: mol_type = other RNA
attcccactgttcactaagga

SEQ ID NO: 4161 - RNA, 21 nt, synthetic construct
  source 1..21: mol_type = other RNA
attccctttttaaatgagctt

SEQ ID NO: 4162 - RNA, 21 nt, synthetic construct
  source 1..21: mol_type = other RNA
attccgatcgactgccaagca

SEQ ID NO: 4163 - RNA, 21 nt, synthetic construct
  source 1..21: mol_type = other RNA
attcctaggtcgtgtttttgg

SEQ ID NO: 4164 - RNA, 21 nt, synthetic construct
  source 1..21: mol_type = other RNA
attctacagctaggccagtct

SEQ ID NO: 4165 - RNA, 21 nt, synthetic construct
  source 1..21: mol_type = other RNA
attgaaaatcgacatttccca

SEQ ID NO: 4166 - RNA, 21 nt, synthetic construct
  source 1..21: mol_type = other RNA
attgaccagggtgatctcaaa

SEQ ID NO: 4167 - RNA, 21 nt, synthetic construct
  source 1..21: mol_type = other RNA
attgagagcatgtgtcagaca

SEQ ID NO: 4168 - RNA, 21 nt, synthetic construct
  source 1..21: mol_type = other RNA
attgcagatatttgatgtagt

SEQ ID NO: 4169 - RNA, 21 nt, synthetic construct
  source 1..21: mol_type = other RNA
attgcagttctacagtagtac

SEQ ID NO: 4170 - RNA, 21 nt, synthetic construct
  source 1..21: mol_type = other RNA
attgcctctttgatcccctta

SEQ ID NO: 4171 - RNA, 21 nt, synthetic construct
  source 1..21: mol_type = other RNA
attggatcaacctggaagaac

SEQ ID NO: 4172 - RNA, 21 nt, synthetic construct
  source 1..21: mol_type = other RNA
attgtattgtctgacacatgc

SEQ ID NO: 4173 - RNA, 21 nt, synthetic construct
  source 1..21: mol_type = other RNA
attgtctgacacatgctctca

SEQ ID NO: 4174 - RNA, 21 nt, synthetic construct
  source 1..21: mol_type = other RNA
attgtgcagcaaatggctcag

SEQ ID NO: 4175 - RNA, 21 nt, synthetic construct
  source 1..21: mol_type = other RNA
attgtggtgtctgggaagaga

SEQ ID NO: 4176 - RNA, 21 nt, synthetic construct
  source 1..21: mol_type = other RNA
atttaaaaagggaatactgcc

SEQ ID NO: 4177 - RNA, 21 nt, synthetic construct
  source 1..21: mol_type = other RNA
atttagaaagtgctgaagcag

SEQ ID NO: 4178 - RNA, 21 nt, synthetic construct
  source 1..21: mol_type = other RNA
atttaggtggcagggagcgcg

SEQ ID NO: 4179 - RNA, 21 nt, synthetic construct
  source 1..21: mol_type = other RNA
atttatatttggggatcaagg

SEQ ID NO: 4180 - RNA, 21 nt, synthetic construct
  source 1..21: mol_type = other RNA
atttcagaactgaaaaagacc

SEQ ID NO: 4181 - RNA, 21 nt, synthetic construct
  source 1..21: mol_type = other RNA
atttccaaaaacacgacctag

SEQ ID NO: 4182 - RNA, 21 nt, synthetic construct
  source 1..21: mol_type = other RNA
atttccattcttttaaatggg

SEQ ID NO: 4183 - RNA, 21 nt, synthetic construct
  source 1..21: mol_type = other RNA
atttcccagggctcattaagg

SEQ ID NO: 4184 - RNA, 21 nt, synthetic construct
  source 1..21: mol_type = other RNA
atttccccatattgaccaggg

SEQ ID NO: 4185 - RNA, 21 nt, synthetic construct
  source 1..21: mol_type = other RNA
atttcctagcaccgtggtgac

SEQ ID NO: 4186 - RNA, 21 nt, synthetic construct
  source 1..21: mol_type = other RNA
atttcctgttgctcctttccc

SEQ ID NO: 4187 - RNA, 21 nt, synthetic construct
  source 1..21: mol_type = other RNA
atttccttagtgttccttttt

SEQ ID NO: 4188 - RNA, 21 nt, synthetic construct
  source 1..21: mol_type = other RNA
atttctcagcaacttcctgaa

SEQ ID NO: 4189 - RNA, 21 nt, synthetic construct
  source 1..21: mol_type = other RNA
atttgagatcaccctggtcaa

SEQ ID NO: 4190 - RNA, 21 nt, synthetic construct
  source 1..21: mol_type = other RNA
atttgctgcacaatcccctga

SEQ ID NO: 4191 - RNA, 21 nt, synthetic construct
  source 1..21: mol_type = other RNA
atttggcctgtccggtgggaa

SEQ ID NO: 4192 - RNA, 21 nt, synthetic construct
  source 1..21: mol_type = other RNA
atttggggatcaagggactct

SEQ ID NO: 4193 - RNA, 21 nt, synthetic construct
  source 1..21: mol_type = other RNA
atttggtcctcaggggattgt

SEQ ID NO: 4194 - RNA, 21 nt, synthetic construct
  source 1..21: mol_type = other RNA
atttgtaggtggggttctcat

SEQ ID NO: 4195 - RNA, 21 nt, synthetic construct
  source 1..21: mol_type = other RNA
attttatgctacagagggtga

SEQ ID NO: 4196 - RNA, 21 nt, synthetic construct
  source 1..21: mol_type = other RNA
attttattccagcgtcttcta

SEQ ID NO: 4197 - RNA, 21 nt, synthetic construct
  source 1..21: mol_type = other RNA
attttctttctcctgtgtttc

SEQ ID NO: 4198 - RNA, 21 nt, synthetic construct
  source 1..21: mol_type = other RNA
attttgcgagggtctctcacg

SEQ ID NO: 4199 - RNA, 21 nt, synthetic construct
  source 1..21: mol_type = other RNA
caaaaacacgacctaggaatc

SEQ ID NO: 4200 - RNA, 21 nt, synthetic construct
  source 1..21: mol_type = other RNA
caaaacctgagggtcattgtg

SEQ ID NO: 4201 - RNA, 21 nt, synthetic construct
  source 1..21: mol_type = other RNA
caaaatgatgtgaaaggacca

SEQ ID NO: 4202 - RNA, 21 nt, synthetic construct
  source 1..21: mol_type = other RNA
caaactaatgttgaaagttgg

SEQ ID NO: 4203 - RNA, 21 nt, synthetic construct
  source 1..21: mol_type = other RNA
caaagactagctgggcgtggt

SEQ ID NO: 4204 - RNA, 21 nt, synthetic construct
  source 1..21: mol_type = other RNA
caaagaggcaatgctttcgaa

SEQ ID NO: 4205 - RNA, 21 nt, synthetic construct
  source 1..21: mol_type = other RNA
caaataactaagaccagcatc

SEQ ID NO: 4206 - RNA, 21 nt, synthetic construct
  source 1..21: mol_type = other RNA
caaatacctggagcagatgca

SEQ ID NO: 4207 - RNA, 21 nt, synthetic construct
  source 1..21: mol_type = other RNA
caaatatctgcaatagatcat

SEQ ID NO: 4208 - RNA, 21 nt, synthetic construct
  source 1..21: mol_type = other RNA
caaatgagaaccggtggtgaa

SEQ ID NO: 4209 - RNA, 21 nt, synthetic construct
  source 1..21: mol_type = other RNA
caaatgcagccagcagcccgt

SEQ ID NO: 4210 - RNA, 21 nt, synthetic construct
  source 1..21: mol_type = other RNA
caaatggctcaggtctcccag

SEQ ID NO: 4211 - RNA, 21 nt, synthetic construct
  source 1..21: mol_type = other RNA
caacagccccttgtggcaggg

SEQ ID NO: 4212 - RNA, 21 nt, synthetic construct
  source 1..21: mol_type = other RNA
caacaggaaatttagaaagtg

SEQ ID NO: 4213 - RNA, 21 nt, synthetic construct
  source 1..21: mol_type = other RNA
caacataaccggaacgacagc

SEQ ID NO: 4214 - RNA, 21 nt, synthetic construct
  source 1..21: mol_type = other RNA
caacattagtttgggccttgg

SEQ ID NO: 4215 - RNA, 21 nt, synthetic construct
  source 1..21: mol_type = other RNA
caacctggaagaacaaaacct

SEQ ID NO: 4216 - RNA, 21 nt, synthetic construct
  source 1..21: mol_type = other RNA
caactcttcagcctcattcac

SEQ ID NO: 4217 - RNA, 21 nt, synthetic construct
  source 1..21: mol_type = other RNA
caactggatttcctagcaccg

SEQ ID NO: 4218 - RNA, 21 nt, synthetic construct
  source 1..21: mol_type = other RNA
caacttcctgaaagctcattt

SEQ ID NO: 4219 - RNA, 21 nt, synthetic construct
  source 1..21: mol_type = other RNA
caactttcaacattagtttgg

SEQ ID NO: 4220 - RNA, 21 nt, synthetic construct
  source 1..21: mol_type = other RNA
caagaaactggtcctttcaca

SEQ ID NO: 4221 - RNA, 21 nt, synthetic construct
  source 1..21: mol_type = other RNA
caagaatcacctgaacccggg

SEQ ID NO: 4222 - RNA, 21 nt, synthetic construct
  source 1..21: mol_type = other RNA
caagacaagttcagtaaccag

SEQ ID NO: 4223 - RNA, 21 nt, synthetic construct
  source 1..21: mol_type = other RNA
caagatgcagaaccatggcta

SEQ ID NO: 4224 - RNA, 21 nt, synthetic construct
  source 1..21: mol_type = other RNA
caagcaaggctcggcgccact

SEQ ID NO: 4225 - RNA, 21 nt, synthetic construct
  source 1..21: mol_type = other RNA
caagcagacggtgggaccagg

SEQ ID NO: 4226 - RNA, 21 nt, synthetic construct
  source 1..21: mol_type = other RNA
caagcagcagccgctgccagg

SEQ ID NO: 4227 - RNA, 21 nt, synthetic construct
  source 1..21: mol_type = other RNA
caagccagtcagcagtaggct

SEQ ID NO: 4228 - RNA, 21 nt, synthetic construct
  source 1..21: mol_type = other RNA
caaggacgttaaaggcatttt

SEQ ID NO: 4229 - RNA, 21 nt, synthetic construct
  source 1..21: mol_type = other RNA
caaggcaagccagtcagcagt

SEQ ID NO: 4230 - RNA, 21 nt, synthetic construct
  source 1..21: mol_type = other RNA
caaggcccaaactaatgttga

SEQ ID NO: 4231 - RNA, 21 nt, synthetic construct
  source 1..21: mol_type = other RNA
caaggctcggcgccactgctt

SEQ ID NO: 4232 - RNA, 21 nt, synthetic construct
  source 1..21: mol_type = other RNA
caagggactctggacattccc

SEQ ID NO: 4233 - RNA, 21 nt, synthetic construct
  source 1..21: mol_type = other RNA
caaggggctgttgccaacttt

SEQ ID NO: 4234 - RNA, 21 nt, synthetic construct
  source 1..21: mol_type = other RNA
caagtaactggccaggtgcag

SEQ ID NO: 4235 - RNA, 21 nt, synthetic construct
  source 1..21: mol_type = other RNA
caagttcagtaaccagcagaa

SEQ ID NO: 4236 - RNA, 21 nt, synthetic construct
  source 1..21: mol_type = other RNA
caataatagacttatatgcag

SEQ ID NO: 4237 - RNA, 21 nt, synthetic construct
  source 1..21: mol_type = other RNA
caatacaatggaagtggggtt

SEQ ID NO: 4238 - RNA, 21 nt, synthetic construct
  source 1..21: mol_type = other RNA
caatatggggaaatcctatct

SEQ ID NO: 4239 - RNA, 21 nt, synthetic construct
  source 1..21: mol_type = other RNA
caatcccctgaggaccaaatg

SEQ ID NO: 4240 - RNA, 21 nt, synthetic construct
  source 1..21: mol_type = other RNA
caatgaccctcaggttttgtt

SEQ ID NO: 4241 - RNA, 21 nt, synthetic construct
  source 1..21: mol_type = other RNA
caatgctcaccccagaagagc

SEQ ID NO: 4242 - RNA, 21 nt, synthetic construct
  source 1..21: mol_type = other RNA
caatgctttcgaaacgagagc

SEQ ID NO: 4243 - RNA, 21 nt, synthetic construct
  source 1..21: mol_type = other RNA
caatggaagtggggtttctga

SEQ ID NO: 4244 - RNA, 21 nt, synthetic construct
  source 1..21: mol_type = other RNA
cacaaataactaagaccagca

SEQ ID NO: 4245 - RNA, 21 nt, synthetic construct
  source 1..21: mol_type = other RNA
cacaacataaccggaacgaca

SEQ ID NO: 4246 - RNA, 21 nt, synthetic construct
  source 1..21: mol_type = other RNA
cacaaggggctgttgccaact

SEQ ID NO: 4247 - RNA, 21 nt, synthetic construct
  source 1..21: mol_type = other RNA
cacaatcccctgaggaccaaa

SEQ ID NO: 4248 - RNA, 21 nt, synthetic construct
  source 1..21: mol_type = other RNA
cacaatgaccctcaggttttg

SEQ ID NO: 4249 - RNA, 21 nt, synthetic construct
  source 1..21: mol_type = other RNA
cacacacctgtagtctcagct

SEQ ID NO: 4250 - RNA, 21 nt, synthetic construct
  source 1..21: mol_type = other RNA
cacacaggtatccagccgtgg

SEQ ID NO: 4251 - RNA, 21 nt, synthetic construct
  source 1..21: mol_type = other RNA
cacacctgtagtctcagctag

SEQ ID NO: 4252 - RNA, 21 nt, synthetic construct
  source 1..21: mol_type = other RNA
cacagcgagactgtctccaaa

SEQ ID NO: 4253 - RNA, 21 nt, synthetic construct
  source 1..21: mol_type = other RNA
cacaggagaaagaaaataagg

SEQ ID NO: 4254 - RNA, 21 nt, synthetic construct
  source 1..21: mol_type = other RNA
cacagggtgctgggagacctg

SEQ ID NO: 4255 - RNA, 21 nt, synthetic construct
  source 1..21: mol_type = other RNA
cacaggtatccagccgtggaa

SEQ ID NO: 4256 - RNA, 21 nt, synthetic construct
  source 1..21: mol_type = other RNA
cacaggttcccacccccaacc

SEQ ID NO: 4257 - RNA, 21 nt, synthetic construct
  source 1..21: mol_type = other RNA
cacatcattttgcgagggtct

SEQ ID NO: 4258 - RNA, 21 nt, synthetic construct
  source 1..21: mol_type = other RNA
cacatgactttctgacattca

SEQ ID NO: 4259 - RNA, 21 nt, synthetic construct
  source 1..21: mol_type = other RNA
cacatgctctcaatatataat

SEQ ID NO: 4260 - RNA, 21 nt, synthetic construct
  source 1..21: mol_type = other RNA
caccaaggacgttaaaggcat

SEQ ID NO: 4261 - RNA, 21 nt, synthetic construct
  source 1..21: mol_type = other RNA
caccacaatgaccctcaggtt

SEQ ID NO: 4262 - RNA, 21 nt, synthetic construct
  source 1..21: mol_type = other RNA
caccaccggttctcatttggc

SEQ ID NO: 4263 - RNA, 21 nt, synthetic construct
  source 1..21: mol_type = other RNA
caccacgcccagctagtcttt

SEQ ID NO: 4264 - RNA, 21 nt, synthetic construct
  source 1..21: mol_type = other RNA
caccacggtgctaggaaatcc

SEQ ID NO: 4265 - RNA, 21 nt, synthetic construct
  source 1..21: mol_type = other RNA
cacccatttaaaagaatggaa

SEQ ID NO: 4266 - RNA, 21 nt, synthetic construct
  source 1..21: mol_type = other RNA
caccccagaagagcgtcacct

SEQ ID NO: 4267 - RNA, 21 nt, synthetic construct
  source 1..21: mol_type = other RNA
caccccatttctcagcaactt

SEQ ID NO: 4268 - RNA, 21 nt, synthetic construct
  source 1..21: mol_type = other RNA
caccctcatctgtatacacta

SEQ ID NO: 4269 - RNA, 21 nt, synthetic construct
  source 1..21: mol_type = other RNA
caccctctgtagcataaaatg

SEQ ID NO: 4270 - RNA, 21 nt, synthetic construct
  source 1..21: mol_type = other RNA
caccctggtcaatatggggaa

SEQ ID NO: 4271 - RNA, 21 nt, synthetic construct
  source 1..21: mol_type = other RNA
caccctgtgcaggtctcttcc

SEQ ID NO: 4272 - RNA, 21 nt, synthetic construct
  source 1..21: mol_type = other RNA
caccggacaggccaaatgaga

SEQ ID NO: 4273 - RNA, 21 nt, synthetic construct
  source 1..21: mol_type = other RNA
caccggttctcatttggcctg

SEQ ID NO: 4274 - RNA, 21 nt, synthetic construct
  source 1..21: mol_type = other RNA
caccgtctgcttgctagccta

SEQ ID NO: 4275 - RNA, 21 nt, synthetic construct
  source 1..21: mol_type = other RNA
caccgtggtgacaagcaaggc

SEQ ID NO: 4276 - RNA, 21 nt, synthetic construct
  source 1..21: mol_type = other RNA
cacctaaatctgcatctgctc

SEQ ID NO: 4277 - RNA, 21 nt, synthetic construct
  source 1..21: mol_type = other RNA
cacctacaaatacctggagca

SEQ ID NO: 4278 - RNA, 21 nt, synthetic construct
  source 1..21: mol_type = other RNA
cacctagctgagactacaggt

SEQ ID NO: 4279 - RNA, 21 nt, synthetic construct
  source 1..21: mol_type = other RNA
cacctgaacaagatgcagaac

SEQ ID NO: 4280 - RNA, 21 nt, synthetic construct
  source 1..21: mol_type = other RNA
cacctgcatccctccgccagg

SEQ ID NO: 4281 - RNA, 21 nt, synthetic construct
  source 1..21: mol_type = other RNA
cacctggccagttacttggtt

SEQ ID NO: 4282 - RNA, 21 nt, synthetic construct
  source 1..21: mol_type = other RNA
cacctgtagtctcagctaggt

SEQ ID NO: 4283 - RNA, 21 nt, synthetic construct
  source 1..21: mol_type = other RNA
cacgacctaggaatccagtga

SEQ ID NO: 4284 - RNA, 21 nt, synthetic construct
  source 1..21: mol_type = other RNA
cacgattccgatcgactgcca

SEQ ID NO: 4285 - RNA, 21 nt, synthetic construct
  source 1..21: mol_type = other RNA
cacgcccagctagtctttgta

SEQ ID NO: 4286 - RNA, 21 nt, synthetic construct
  source 1..21: mol_type = other RNA
cacggaagatgacagtcaact

SEQ ID NO: 4287 - RNA, 21 nt, synthetic construct
  source 1..21: mol_type = other RNA
cacggctggatacctgtgtgt

SEQ ID NO: 4288 - RNA, 21 nt, synthetic construct
  source 1..21: mol_type = other RNA
cacggtgctaggaaatccagt

SEQ ID NO: 4289 - RNA, 21 nt, synthetic construct
  source 1..21: mol_type = other RNA
cacgtgagagaccctcgcaaa

SEQ ID NO: 4290 - RNA, 21 nt, synthetic construct
  source 1..21: mol_type = other RNA
cacgtgcttcagtggccatta

SEQ ID NO: 4291 - RNA, 21 nt, synthetic construct
  source 1..21: mol_type = other RNA
cactaagctctctagaagacg

SEQ ID NO: 4292 - RNA, 21 nt, synthetic construct
  source 1..21: mol_type = other RNA
cactaaggaaataatctgaga

SEQ ID NO: 4293 - RNA, 21 nt, synthetic construct
  source 1..21: mol_type = other RNA
cactaaggagtgagtggcaag

SEQ ID NO: 4294 - RNA, 21 nt, synthetic construct
  source 1..21: mol_type = other RNA
cactaatttcccagggctcat

SEQ ID NO: 4295 - RNA, 21 nt, synthetic construct
  source 1..21: mol_type = other RNA
cactcactccttagtgaacag

SEQ ID NO: 4296 - RNA, 21 nt, synthetic construct
  source 1..21: mol_type = other RNA
cactcctcgagtactggacat

SEQ ID NO: 4297 - RNA, 21 nt, synthetic construct
  source 1..21: mol_type = other RNA
cactccttagtgaacagtggg

SEQ ID NO: 4298 - RNA, 21 nt, synthetic construct
  source 1..21: mol_type = other RNA
cactgaagcacgtgagagacc

SEQ ID NO: 4299 - RNA, 21 nt, synthetic construct
  source 1..21: mol_type = other RNA
cactgcttactacctgggcca

SEQ ID NO: 4300 - RNA, 21 nt, synthetic construct
  source 1..21: mol_type = other RNA
cactggacttcaagaaactgg

SEQ ID NO: 4301 - RNA, 21 nt, synthetic construct
  source 1..21: mol_type = other RNA
cactggattcctaggtcgtgt

SEQ ID NO: 4302 - RNA, 21 nt, synthetic construct
  source 1..21: mol_type = other RNA
cactgtcctggcttttattta

SEQ ID NO: 4303 - RNA, 21 nt, synthetic construct
  source 1..21: mol_type = other RNA
cactgttcactaaggagtgag

SEQ ID NO: 4304 - RNA, 21 nt, synthetic construct
  source 1..21: mol_type = other RNA
cacttccattgtattgtctga

SEQ ID NO: 4305 - RNA, 21 nt, synthetic construct
  source 1..21: mol_type = other RNA
cactttctaaatttcctgttg

SEQ ID NO: 4306 - RNA, 21 nt, synthetic construct
  source 1..21: mol_type = other RNA
cagaaacagtctgcttcagca

SEQ ID NO: 4307 - RNA, 21 nt, synthetic construct
  source 1..21: mol_type = other RNA
cagaaaccccacttccattgt

SEQ ID NO: 4308 - RNA, 21 nt, synthetic construct
  source 1..21: mol_type = other RNA
cagaaagtcatgtgaacattt

SEQ ID NO: 4309 - RNA, 21 nt, synthetic construct
  source 1..21: mol_type = other RNA
cagaacagaaacagtctgctt

SEQ ID NO: 4310 - RNA, 21 nt, synthetic construct
  source 1..21: mol_type = other RNA
cagaaccatggctatgagaac

SEQ ID NO: 4311 - RNA, 21 nt, synthetic construct
  source 1..21: mol_type = other RNA
cagaactgaaaaagaccagag

SEQ ID NO: 4312 - RNA, 21 nt, synthetic construct
  source 1..21: mol_type = other RNA
cagaagacagaacagaaacag

SEQ ID NO: 4313 - RNA, 21 nt, synthetic construct
  source 1..21: mol_type = other RNA
cagaagagcgtcacctgaaca

SEQ ID NO: 4314 - RNA, 21 nt, synthetic construct
  source 1..21: mol_type = other RNA
cagacaatacaatggaagtgg

SEQ ID NO: 4315 - RNA, 21 nt, synthetic construct
  source 1..21: mol_type = other RNA
cagacaccacaatgaccctca

SEQ ID NO: 4316 - RNA, 21 nt, synthetic construct
  source 1..21: mol_type = other RNA
cagacgcagcccctggcagcg

SEQ ID NO: 4317 - RNA, 21 nt, synthetic construct
  source 1..21: mol_type = other RNA
cagacggtgggaccaggggat

SEQ ID NO: 4318 - RNA, 21 nt, synthetic construct
  source 1..21: mol_type = other RNA
cagactgtttctgttctgtct

SEQ ID NO: 4319 - RNA, 21 nt, synthetic construct
  source 1..21: mol_type = other RNA
cagagatcccctggtcccacc

SEQ ID NO: 4320 - RNA, 21 nt, synthetic construct
  source 1..21: mol_type = other RNA
cagagggtgaaaactcttttc

SEQ ID NO: 4321 - RNA, 21 nt, synthetic construct
  source 1..21: mol_type = other RNA
cagagtcccttgatccccaaa

SEQ ID NO: 4322 - RNA, 21 nt, synthetic construct
  source 1..21: mol_type = other RNA
cagatatttgatgtagttttc

SEQ ID NO: 4323 - RNA, 21 nt, synthetic construct
  source 1..21: mol_type = other RNA
cagatgcagatttaggtggca

SEQ ID NO: 4324 - RNA, 21 nt, synthetic construct
  source 1..21: mol_type = other RNA
cagatgctggtcttagttatt

SEQ ID NO: 4325 - RNA, 21 nt, synthetic construct
  source 1..21: mol_type = other RNA
cagattatttccttagtgttc

SEQ ID NO: 4326 - RNA, 21 nt, synthetic construct
  source 1..21: mol_type = other RNA
cagatttaggtggcagggagc

SEQ ID NO: 4327 - RNA, 21 nt, synthetic construct
  source 1..21: mol_type = other RNA
cagcaaatggctcaggtctcc

SEQ ID NO: 4328 - RNA, 21 nt, synthetic construct
  source 1..21: mol_type = other RNA
cagcaacttcctgaaagctca

SEQ ID NO: 4329 - RNA, 21 nt, synthetic construct
  source 1..21: mol_type = other RNA
cagcaccctgtgcaggtctct

SEQ ID NO: 4330 - RNA, 21 nt, synthetic construct
  source 1..21: mol_type = other RNA
cagcactttctaaatttcctg

SEQ ID NO: 4331 - RNA, 21 nt, synthetic construct
  source 1..21: mol_type = other RNA
cagcagaagacagaacagaaa

SEQ ID NO: 4332 - RNA, 21 nt, synthetic construct
  source 1..21: mol_type = other RNA
cagcagcatgtccagtactcg

SEQ ID NO: 4333 - RNA, 21 nt, synthetic construct
  source 1..21: mol_type = other RNA
cagcagcccgttcccaccgga

SEQ ID NO: 4334 - RNA, 21 nt, synthetic construct
  source 1..21: mol_type = other RNA
cagcagccgctgccaggggct

SEQ ID NO: 4335 - RNA, 21 nt, synthetic construct
  source 1..21: mol_type = other RNA
cagcaggagataaaaccaagt

SEQ ID NO: 4336 - RNA, 21 nt, synthetic construct
  source 1..21: mol_type = other RNA
cagcagtaggctagcaagcag

SEQ ID NO: 4337 - RNA, 21 nt, synthetic construct
  source 1..21: mol_type = other RNA
cagcatctgcactaatttccc

SEQ ID NO: 4338 - RNA, 21 nt, synthetic construct
  source 1..21: mol_type = other RNA
cagcatgtccagtactcgagg

SEQ ID NO: 4339 - RNA, 21 nt, synthetic construct
  source 1..21: mol_type = other RNA
cagccaaggcaagccagtcag

SEQ ID NO: 4340 - RNA, 21 nt, synthetic construct
  source 1..21: mol_type = other RNA
cagccagcagcccgttcccac

SEQ ID NO: 4341 - RNA, 21 nt, synthetic construct
  source 1..21: mol_type = other RNA
cagcccctgccacaaggggct

SEQ ID NO: 4342 - RNA, 21 nt, synthetic construct
  source 1..21: mol_type = other RNA
cagcccctggcagcggctgct

SEQ ID NO: 4343 - RNA, 21 nt, synthetic construct
  source 1..21: mol_type = other RNA
cagccccttgtggcaggggct

SEQ ID NO: 4344 - RNA, 21 nt, synthetic construct
  source 1..21: mol_type = other RNA
cagcccgttcccaccggacag

SEQ ID NO: 4345 - RNA, 21 nt, synthetic construct
  source 1..21: mol_type = other RNA
cagccctggcggagggatgca

SEQ ID NO: 4346 - RNA, 21 nt, synthetic construct
  source 1..21: mol_type = other RNA
cagccgtggaaacactggact

SEQ ID NO: 4347 - RNA, 21 nt, synthetic construct
  source 1..21: mol_type = other RNA
cagcctcattcactgtcctgg

SEQ ID NO: 4348 - RNA, 21 nt, synthetic construct
  source 1..21: mol_type = other RNA
cagcctcccacctagctgaga

SEQ ID NO: 4349 - RNA, 21 nt, synthetic construct
  source 1..21: mol_type = other RNA
cagcctgcatataagtctatt

SEQ ID NO: 4350 - RNA, 21 nt, synthetic construct
  source 1..21: mol_type = other RNA
cagcgagactgtctccaaaaa

SEQ ID NO: 4351 - RNA, 21 nt, synthetic construct
  source 1..21: mol_type = other RNA
cagcgcactgcaacctctgtc

SEQ ID NO: 4352 - RNA, 21 nt, synthetic construct
  source 1..21: mol_type = other RNA
cagcggctgctgcttggcagt

SEQ ID NO: 4353 - RNA, 21 nt, synthetic construct
  source 1..21: mol_type = other RNA
cagcgtcttctagagagctta

SEQ ID NO: 4354 - RNA, 21 nt, synthetic construct
  source 1..21: mol_type = other RNA
cagctaggccagtctccagca

SEQ ID NO: 4355 - RNA, 21 nt, synthetic construct
  source 1..21: mol_type = other RNA
cagctagtctttgtattttta

SEQ ID NO: 4356 - RNA, 21 nt, synthetic construct
  source 1..21: mol_type = other RNA
caggaaatttagaaagtgctg

SEQ ID NO: 4357 - RNA, 21 nt, synthetic construct
  source 1..21: mol_type = other RNA
caggaagttgctgagaaatgg

SEQ ID NO: 4358 - RNA, 21 nt, synthetic construct
  source 1..21: mol_type = other RNA
caggacagtgaatgaggctga

SEQ ID NO: 4359 - RNA, 21 nt, synthetic construct
  source 1..21: mol_type = other RNA
caggacttttatggagacaca

SEQ ID NO: 4360 - RNA, 21 nt, synthetic construct
  source 1..21: mol_type = other RNA
caggagaaagaaaataagggg

SEQ ID NO: 4361 - RNA, 21 nt, synthetic construct
  source 1..21: mol_type = other RNA
caggagataaaaccaagtaac

SEQ ID NO: 4362 - RNA, 21 nt, synthetic construct
  source 1..21: mol_type = other RNA
caggaggtcaggatgtcagac

SEQ ID NO: 4363 - RNA, 21 nt, synthetic construct
  source 1..21: mol_type = other RNA
caggatgtcagacgcagcccc

SEQ ID NO: 4364 - RNA, 21 nt, synthetic construct
  source 1..21: mol_type = other RNA
caggatttgagatcaccctgg

SEQ ID NO: 4365 - RNA, 21 nt, synthetic construct
  source 1..21: mol_type = other RNA
caggccaaatgagaaccggtg

SEQ ID NO: 4366 - RNA, 21 nt, synthetic construct
  source 1..21: mol_type = other RNA
caggctgtcgttccggttatg

SEQ ID NO: 4367 - RNA, 21 nt, synthetic construct
  source 1..21: mol_type = other RNA
cagggctcattaaggtcctta

SEQ ID NO: 4368 - RNA, 21 nt, synthetic construct
  source 1..21: mol_type = other RNA
cagggctctcgtttcgaaagc

SEQ ID NO: 4369 - RNA, 21 nt, synthetic construct
  source 1..21: mol_type = other RNA
caggggatctctggtcttttt

SEQ ID NO: 4370 - RNA, 21 nt, synthetic construct
  source 1..21: mol_type = other RNA
caggggattgtgcagcaaatg

SEQ ID NO: 4371 - RNA, 21 nt, synthetic construct
  source 1..21: mol_type = other RNA
caggggctgatttccaaaaac

SEQ ID NO: 4372 - RNA, 21 nt, synthetic construct
  source 1..21: mol_type = other RNA
caggggctgcgtctgacatcc

SEQ ID NO: 4373 - RNA, 21 nt, synthetic construct
  source 1..21: mol_type = other RNA
cagggtgctgggagacctgag

SEQ ID NO: 4374 - RNA, 21 nt, synthetic construct
  source 1..21: mol_type = other RNA
caggtagtaagcagtggcgcc

SEQ ID NO: 4375 - RNA, 21 nt, synthetic construct
  source 1..21: mol_type = other RNA
caggtatccagccgtggaaac

SEQ ID NO: 4376 - RNA, 21 nt, synthetic construct
  source 1..21: mol_type = other RNA
caggtatttgtaggtggggtt

SEQ ID NO: 4377 - RNA, 21 nt, synthetic construct
  source 1..21: mol_type = other RNA
caggtctcccagcaccctgtg

SEQ ID NO: 4378 - RNA, 21 nt, synthetic construct
  source 1..21: mol_type = other RNA
caggtctcttcccagacacca

SEQ ID NO: 4379 - RNA, 21 nt, synthetic construct
  source 1..21: mol_type = other RNA
caggtgacgctcttctggggt

SEQ ID NO: 4380 - RNA, 21 nt, synthetic construct
  source 1..21: mol_type = other RNA
caggtgggccggaagatccca

SEQ ID NO: 4381 - RNA, 21 nt, synthetic construct
  source 1..21: mol_type = other RNA
caggttcccacccccaaccca

SEQ ID NO: 4382 - RNA, 21 nt, synthetic construct
  source 1..21: mol_type = other RNA
caggttgatccaatgctcacc

SEQ ID NO: 4383 - RNA, 21 nt, synthetic construct
  source 1..21: mol_type = other RNA
caggttttgttcttccaggtt

SEQ ID NO: 4384 - RNA, 21 nt, synthetic construct
  source 1..21: mol_type = other RNA
cagtaaccagcagaagacaga

SEQ ID NO: 4385 - RNA, 21 nt, synthetic construct
  source 1..21: mol_type = other RNA
cagtaaggaccttaatgagcc

SEQ ID NO: 4386 - RNA, 21 nt, synthetic construct
  source 1..21: mol_type = other RNA
cagtactcgaggagtgaagat

SEQ ID NO: 4387 - RNA, 21 nt, synthetic construct
  source 1..21: mol_type = other RNA
cagtaggctagcaagcagacg

SEQ ID NO: 4388 - RNA, 21 nt, synthetic construct
  source 1..21: mol_type = other RNA
cagtagtactttatatagtcc

SEQ ID NO: 4389 - RNA, 21 nt, synthetic construct
  source 1..21: mol_type = other RNA
cagtattccctttttaaatga

SEQ ID NO: 4390 - RNA, 21 nt, synthetic construct
  source 1..21: mol_type = other RNA
cagtcaactggatttcctagc

SEQ ID NO: 4391 - RNA, 21 nt, synthetic construct
  source 1..21: mol_type = other RNA
cagtcagcagtaggctagcaa

SEQ ID NO: 4392 - RNA, 21 nt, synthetic construct
  source 1..21: mol_type = other RNA
cagtccaggaggtcaggatgt

SEQ ID NO: 4393 - RNA, 21 nt, synthetic construct
  source 1..21: mol_type = other RNA
cagtcgatcggaatcgtggga

SEQ ID NO: 4394 - RNA, 21 nt, synthetic construct
  source 1..21: mol_type = other RNA
cagtctccagcaggagataaa

SEQ ID NO: 4395 - RNA, 21 nt, synthetic construct
  source 1..21: mol_type = other RNA
cagtctgcttcagcactttct

SEQ ID NO: 4396 - RNA, 21 nt, synthetic construct
  source 1..21: mol_type = other RNA
cagtgaatgaggctgaagagt

SEQ ID NO: 4397 - RNA, 21 nt, synthetic construct
  source 1..21: mol_type = other RNA
cagtgagtaactgaactgata

SEQ ID NO: 4398 - RNA, 21 nt, synthetic construct
  source 1..21: mol_type = other RNA
cagtggccattacagttccct

SEQ ID NO: 4399 - RNA, 21 nt, synthetic construct
  source 1..21: mol_type = other RNA
cagtggcgccgagccttgctt

SEQ ID NO: 4400 - RNA, 21 nt, synthetic construct
  source 1..21: mol_type = other RNA
cagtgggaatgtccagagtcc

SEQ ID NO: 4401 - RNA, 21 nt, synthetic construct
  source 1..21: mol_type = other RNA
cagtgtttccacggctggata

SEQ ID NO: 4402 - RNA, 21 nt, synthetic construct
  source 1..21: mol_type = other RNA
cagttactcactggattccta

SEQ ID NO: 4403 - RNA, 21 nt, synthetic construct
  source 1..21: mol_type = other RNA
cagttacttggttttatctcc

SEQ ID NO: 4404 - RNA, 21 nt, synthetic construct
  source 1..21: mol_type = other RNA
cagttcagttactcactggat

SEQ ID NO: 4405 - RNA, 21 nt, synthetic construct
  source 1..21: mol_type = other RNA
cagttccctattccaccccat

SEQ ID NO: 4406 - RNA, 21 nt, synthetic construct
  source 1..21: mol_type = other RNA
cagttctacagtagtacttta

SEQ ID NO: 4407 - RNA, 21 nt, synthetic construct
  source 1..21: mol_type = other RNA
cagttctgaaattctacagct

SEQ ID NO: 4408 - RNA, 21 nt, synthetic construct
  source 1..21: mol_type = other RNA
cagttgactgtcatcttccgt

SEQ ID NO: 4409 - RNA, 21 nt, synthetic construct
  source 1..21: mol_type = other RNA
cagtttcttgaagtccagtgt

SEQ ID NO: 4410 - RNA, 21 nt, synthetic construct
  source 1..21: mol_type = other RNA
cataaaagtcctgtcaccaag

SEQ ID NO: 4411 - RNA, 21 nt, synthetic construct
  source 1..21: mol_type = other RNA
cataaaatgttcacatgactt

SEQ ID NO: 4412 - RNA, 21 nt, synthetic construct
  source 1..21: mol_type = other RNA
cataaccggaacgacagcctg

SEQ ID NO: 4413 - RNA, 21 nt, synthetic construct
  source 1..21: mol_type = other RNA
catagccaaggcccaaactaa

SEQ ID NO: 4414 - RNA, 21 nt, synthetic construct
  source 1..21: mol_type = other RNA
catagccatggttctgcatct

SEQ ID NO: 4415 - RNA, 21 nt, synthetic construct
  source 1..21: mol_type = other RNA
catattgaccagggtgatctc

SEQ ID NO: 4416 - RNA, 21 nt, synthetic construct
  source 1..21: mol_type = other RNA
catcaaatatctgcaatagat

SEQ ID NO: 4417 - RNA, 21 nt, synthetic construct
  source 1..21: mol_type = other RNA
catcattttgcgagggtctct

SEQ ID NO: 4418 - RNA, 21 nt, synthetic construct
  source 1..21: mol_type = other RNA
catccctccgccagggctgcc

SEQ ID NO: 4419 - RNA, 21 nt, synthetic construct
  source 1..21: mol_type = other RNA
catcctgacctcctggactgt

SEQ ID NO: 4420 - RNA, 21 nt, synthetic construct
  source 1..21: mol_type = other RNA
catctgcactaatttcccagg

SEQ ID NO: 4421 - RNA, 21 nt, synthetic construct
  source 1..21: mol_type = other RNA
catctgctccaggtatttgta

SEQ ID NO: 4422 - RNA, 21 nt, synthetic construct
  source 1..21: mol_type = other RNA
catctgtatacactaagctct

SEQ ID NO: 4423 - RNA, 21 nt, synthetic construct
  source 1..21: mol_type = other RNA
catcttcactcctcgagtact

SEQ ID NO: 4424 - RNA, 21 nt, synthetic construct
  source 1..21: mol_type = other RNA
catcttccgtgagggctaagc

SEQ ID NO: 4425 - RNA, 21 nt, synthetic construct
  source 1..21: mol_type = other RNA
catcttgttcaggtgacgctc

SEQ ID NO: 4426 - RNA, 21 nt, synthetic construct
  source 1..21: mol_type = other RNA
catgactttctgacattcata

SEQ ID NO: 4427 - RNA, 21 nt, synthetic construct
  source 1..21: mol_type = other RNA
catgagctactgcacctggcc

SEQ ID NO: 4428 - RNA, 21 nt, synthetic construct
  source 1..21: mol_type = other RNA
catgctgctgttatcagttca

SEQ ID NO: 4429 - RNA, 21 nt, synthetic construct
  source 1..21: mol_type = other RNA
catggctatgagaaccccacc

SEQ ID NO: 4430 - RNA, 21 nt, synthetic construct
  source 1..21: mol_type = other RNA
catggttctgcatcttgttca

SEQ ID NO: 4431 - RNA, 21 nt, synthetic construct
  source 1..21: mol_type = other RNA
catgtccagtactcgaggagt

SEQ ID NO: 4432 - RNA, 21 nt, synthetic construct
  source 1..21: mol_type = other RNA
catgtgaacattttatgctac

SEQ ID NO: 4433 - RNA, 21 nt, synthetic construct
  source 1..21: mol_type = other RNA
catgtgtcagacaatacaatg

SEQ ID NO: 4434 - RNA, 21 nt, synthetic construct
  source 1..21: mol_type = other RNA
cattaaggtccttactgtatt

SEQ ID NO: 4435 - RNA, 21 nt, synthetic construct
  source 1..21: mol_type = other RNA
cattacagttccctattccac

SEQ ID NO: 4436 - RNA, 21 nt, synthetic construct
  source 1..21: mol_type = other RNA
cattagtttgggccttggcta

SEQ ID NO: 4437 - RNA, 21 nt, synthetic construct
  source 1..21: mol_type = other RNA
cattcactgtcctggctttta

SEQ ID NO: 4438 - RNA, 21 nt, synthetic construct
  source 1..21: mol_type = other RNA
cattcatagccaaggcccaaa

SEQ ID NO: 4439 - RNA, 21 nt, synthetic construct
  source 1..21: mol_type = other RNA
cattcccactgttcactaagg

SEQ ID NO: 4440 - RNA, 21 nt, synthetic construct
  source 1..21: mol_type = other RNA
cattcttttaaatgggtgaaa

SEQ ID NO: 4441 - RNA, 21 nt, synthetic construct
  source 1..21: mol_type = other RNA
cattgcctctttgatcccctt

SEQ ID NO: 4442 - RNA, 21 nt, synthetic construct
  source 1..21: mol_type = other RNA
cattggatcaacctggaagaa

SEQ ID NO: 4443 - RNA, 21 nt, synthetic construct
  source 1..21: mol_type = other RNA
cattgtattgtctgacacatg

SEQ ID NO: 4444 - RNA, 21 nt, synthetic construct
  source 1..21: mol_type = other RNA
cattgtggtgtctgggaagag

SEQ ID NO: 4445 - RNA, 21 nt, synthetic construct
  source 1..21: mol_type = other RNA
catttaaaaagggaatactgc

SEQ ID NO: 4446 - RNA, 21 nt, synthetic construct
  source 1..21: mol_type = other RNA
catttctcagcaacttcctga

SEQ ID NO: 4447 - RNA, 21 nt, synthetic construct
  source 1..21: mol_type = other RNA
catttgctgcacaatcccctg

SEQ ID NO: 4448 - RNA, 21 nt, synthetic construct
  source 1..21: mol_type = other RNA
catttggcctgtccggtggga

SEQ ID NO: 4449 - RNA, 21 nt, synthetic construct
  source 1..21: mol_type = other RNA
catttggtcctcaggggattg

SEQ ID NO: 4450 - RNA, 21 nt, synthetic construct
  source 1..21: mol_type = other RNA
cattttatgctacagagggtg

SEQ ID NO: 4451 - RNA, 21 nt, synthetic construct
  source 1..21: mol_type = other RNA
cattttattccagcgtcttct

SEQ ID NO: 4452 - RNA, 21 nt, synthetic construct
  source 1..21: mol_type = other RNA
cattttgcgagggtctctcac

SEQ ID NO: 4453 - RNA, 21 nt, synthetic construct
  source 1..21: mol_type = other RNA
catttttcacccatttaaaag

SEQ ID NO: 4454 - RNA, 21 nt, synthetic construct
  source 1..21: mol_type = other RNA
ccaaaaaaccaaaaaaccaaa

SEQ ID NO: 4455 - RNA, 21 nt, synthetic construct
  source 1..21: mol_type = other RNA
ccaaaaacacgacctaggaat

SEQ ID NO: 4456 - RNA, 21 nt, synthetic construct
  source 1..21: mol_type = other RNA
ccaaactaatgttgaaagttg

SEQ ID NO: 4457 - RNA, 21 nt, synthetic construct
  source 1..21: mol_type = other RNA
ccaaatataaatacagtaagg

SEQ ID NO: 4458 - RNA, 21 nt, synthetic construct
  source 1..21: mol_type = other RNA
ccaaatgagaaccggtggtga

SEQ ID NO: 4459 - RNA, 21 nt, synthetic construct
  source 1..21: mol_type = other RNA
ccaaatgcagccagcagcccg

SEQ ID NO: 4460 - RNA, 21 nt, synthetic construct
  source 1..21: mol_type = other RNA
ccaactttcaacattagtttg

SEQ ID NO: 4461 - RNA, 21 nt, synthetic construct
  source 1..21: mol_type = other RNA
ccaagcagcagccgctgccag

SEQ ID NO: 4462 - RNA, 21 nt, synthetic construct
  source 1..21: mol_type = other RNA
ccaaggacgttaaaggcattt

SEQ ID NO: 4463 - RNA, 21 nt, synthetic construct
  source 1..21: mol_type = other RNA
ccaaggcaagccagtcagcag

SEQ ID NO: 4464 - RNA, 21 nt, synthetic construct
  source 1..21: mol_type = other RNA
ccaaggcccaaactaatgttg

SEQ ID NO: 4465 - RNA, 21 nt, synthetic construct
  source 1..21: mol_type = other RNA
ccaagtaactggccaggtgca

SEQ ID NO: 4466 - RNA, 21 nt, synthetic construct
  source 1..21: mol_type = other RNA
ccaatgctcaccccagaagag

SEQ ID NO: 4467 - RNA, 21 nt, synthetic construct
  source 1..21: mol_type = other RNA
ccacaaggggctgttgccaac

SEQ ID NO: 4468 - RNA, 21 nt, synthetic construct
  source 1..21: mol_type = other RNA
ccacaatgaccctcaggtttt

SEQ ID NO: 4469 - RNA, 21 nt, synthetic construct
  source 1..21: mol_type = other RNA
ccacaggttcccacccccaac

SEQ ID NO: 4470 - RNA, 21 nt, synthetic construct
  source 1..21: mol_type = other RNA
ccaccacgcccagctagtctt

SEQ ID NO: 4471 - RNA, 21 nt, synthetic construct
  source 1..21: mol_type = other RNA
ccaccccatttctcagcaact

SEQ ID NO: 4472 - RNA, 21 nt, synthetic construct
  source 1..21: mol_type = other RNA
ccaccggacaggccaaatgag

SEQ ID NO: 4473 - RNA, 21 nt, synthetic construct
  source 1..21: mol_type = other RNA
ccaccggttctcatttggcct

SEQ ID NO: 4474 - RNA, 21 nt, synthetic construct
  source 1..21: mol_type = other RNA
ccaccgtctgcttgctagcct

SEQ ID NO: 4475 - RNA, 21 nt, synthetic construct
  source 1..21: mol_type = other RNA
ccacctaaatctgcatctgct

SEQ ID NO: 4476 - RNA, 21 nt, synthetic construct
  source 1..21: mol_type = other RNA
ccacctacaaatacctggagc

SEQ ID NO: 4477 - RNA, 21 nt, synthetic construct
  source 1..21: mol_type = other RNA
ccacctagctgagactacagg

SEQ ID NO: 4478 - RNA, 21 nt, synthetic construct
  source 1..21: mol_type = other RNA
ccacctgcatccctccgccag

SEQ ID NO: 4479 - RNA, 21 nt, synthetic construct
  source 1..21: mol_type = other RNA
ccacgattccgatcgactgcc

SEQ ID NO: 4480 - RNA, 21 nt, synthetic construct
  source 1..21: mol_type = other RNA
ccacgcccagctagtctttgt

SEQ ID NO: 4481 - RNA, 21 nt, synthetic construct
  source 1..21: mol_type = other RNA
ccacggctggatacctgtgtg

SEQ ID NO: 4482 - RNA, 21 nt, synthetic construct
  source 1..21: mol_type = other RNA
ccacggtgctaggaaatccag

SEQ ID NO: 4483 - RNA, 21 nt, synthetic construct
  source 1..21: mol_type = other RNA
ccactcactccttagtgaaca

SEQ ID NO: 4484 - RNA, 21 nt, synthetic construct
  source 1..21: mol_type = other RNA
ccactgaagcacgtgagagac

SEQ ID NO: 4485 - RNA, 21 nt, synthetic construct
  source 1..21: mol_type = other RNA
ccactgcttactacctgggcc

SEQ ID NO: 4486 - RNA, 21 nt, synthetic construct
  source 1..21: mol_type = other RNA
ccactgttcactaaggagtga

SEQ ID NO: 4487 - RNA, 21 nt, synthetic construct
  source 1..21: mol_type = other RNA
ccacttccattgtattgtctg

SEQ ID NO: 4488 - RNA, 21 nt, synthetic construct
  source 1..21: mol_type = other RNA
ccagaagagcgtcacctgaac

SEQ ID NO: 4489 - RNA, 21 nt, synthetic construct
  source 1..21: mol_type = other RNA
ccagacaccacaatgaccctc

SEQ ID NO: 4490 - RNA, 21 nt, synthetic construct
  source 1..21: mol_type = other RNA
ccagagatcccctggtcccac

SEQ ID NO: 4491 - RNA, 21 nt, synthetic construct
  source 1..21: mol_type = other RNA
ccagagtcccttgatccccaa

SEQ ID NO: 4492 - RNA, 21 nt, synthetic construct
  source 1..21: mol_type = other RNA
ccagcaccctgtgcaggtctc

SEQ ID NO: 4493 - RNA, 21 nt, synthetic construct
  source 1..21: mol_type = other RNA
ccagcagaagacagaacagaa

SEQ ID NO: 4494 - RNA, 21 nt, synthetic construct
  source 1..21: mol_type = other RNA
ccagcagcccgttcccaccgg

SEQ ID NO: 4495 - RNA, 21 nt, synthetic construct
  source 1..21: mol_type = other RNA
ccagcaggagataaaaccaag

SEQ ID NO: 4496 - RNA, 21 nt, synthetic construct
  source 1..21: mol_type = other RNA
ccagcatctgcactaatttcc

SEQ ID NO: 4497 - RNA, 21 nt, synthetic construct
  source 1..21: mol_type = other RNA
ccagccaaggcaagccagtca

SEQ ID NO: 4498 - RNA, 21 nt, synthetic construct
  source 1..21: mol_type = other RNA
ccagccgtggaaacactggac

SEQ ID NO: 4499 - RNA, 21 nt, synthetic construct
  source 1..21: mol_type = other RNA
ccagcgtcttctagagagctt

SEQ ID NO: 4500 - RNA, 21 nt, synthetic construct
  source 1..21: mol_type = other RNA
ccagctagtctttgtattttt

SEQ ID NO: 4501 - RNA, 21 nt, synthetic construct
  source 1..21: mol_type = other RNA
ccaggacagtgaatgaggctg

SEQ ID NO: 4502 - RNA, 21 nt, synthetic construct
  source 1..21: mol_type = other RNA
ccaggaggtcaggatgtcaga

SEQ ID NO: 4503 - RNA, 21 nt, synthetic construct
  source 1..21: mol_type = other RNA
ccagggctcattaaggtcctt

SEQ ID NO: 4504 - RNA, 21 nt, synthetic construct
  source 1..21: mol_type = other RNA
ccaggggatctctggtctttt

SEQ ID NO: 4505 - RNA, 21 nt, synthetic construct
  source 1..21: mol_type = other RNA
ccaggggctgcgtctgacatc

SEQ ID NO: 4506 - RNA, 21 nt, synthetic construct
  source 1..21: mol_type = other RNA
ccaggtagtaagcagtggcgc

SEQ ID NO: 4507 - RNA, 21 nt, synthetic construct
  source 1..21: mol_type = other RNA
ccaggtatttgtaggtggggt

SEQ ID NO: 4508 - RNA, 21 nt, synthetic construct
  source 1..21: mol_type = other RNA
ccaggttgatccaatgctcac

SEQ ID NO: 4509 - RNA, 21 nt, synthetic construct
  source 1..21: mol_type = other RNA
ccagtactcgaggagtgaaga

SEQ ID NO: 4510 - RNA, 21 nt, synthetic construct
  source 1..21: mol_type = other RNA
ccagtcagcagtaggctagca

SEQ ID NO: 4511 - RNA, 21 nt, synthetic construct
  source 1..21: mol_type = other RNA
ccagtctccagcaggagataa

SEQ ID NO: 4512 - RNA, 21 nt, synthetic construct
  source 1..21: mol_type = other RNA
ccagtgagtaactgaactgat

SEQ ID NO: 4513 - RNA, 21 nt, synthetic construct
  source 1..21: mol_type = other RNA
ccagtgtttccacggctggat

SEQ ID NO: 4514 - RNA, 21 nt, synthetic construct
  source 1..21: mol_type = other RNA
ccagttacttggttttatctc

SEQ ID NO: 4515 - RNA, 21 nt, synthetic construct
  source 1..21: mol_type = other RNA
ccagttgactgtcatcttccg

SEQ ID NO: 4516 - RNA, 21 nt, synthetic construct
  source 1..21: mol_type = other RNA
ccagtttcttgaagtccagtg

SEQ ID NO: 4517 - RNA, 21 nt, synthetic construct
  source 1..21: mol_type = other RNA
ccataaaagtcctgtcaccaa

SEQ ID NO: 4518 - RNA, 21 nt, synthetic construct
  source 1..21: mol_type = other RNA
ccatattgaccagggtgatct

SEQ ID NO: 4519 - RNA, 21 nt, synthetic construct
  source 1..21: mol_type = other RNA
ccatggctatgagaaccccac

SEQ ID NO: 4520 - RNA, 21 nt, synthetic construct
  source 1..21: mol_type = other RNA
ccatggttctgcatcttgttc

SEQ ID NO: 4521 - RNA, 21 nt, synthetic construct
  source 1..21: mol_type = other RNA
ccattacagttccctattcca

SEQ ID NO: 4522 - RNA, 21 nt, synthetic construct
  source 1..21: mol_type = other RNA
ccattcttttaaatgggtgaa

SEQ ID NO: 4523 - RNA, 21 nt, synthetic construct
  source 1..21: mol_type = other RNA
ccattgtattgtctgacacat

SEQ ID NO: 4524 - RNA, 21 nt, synthetic construct
  source 1..21: mol_type = other RNA
ccatttctcagcaacttcctg

SEQ ID NO: 4525 - RNA, 21 nt, synthetic construct
  source 1..21: mol_type = other RNA
ccatttgctgcacaatcccct

SEQ ID NO: 4526 - RNA, 21 nt, synthetic construct
  source 1..21: mol_type = other RNA
ccatttttcacccatttaaaa

SEQ ID NO: 4527 - RNA, 21 nt, synthetic construct
  source 1..21: mol_type = other RNA
cccaaactaatgttgaaagtt

SEQ ID NO: 4528 - RNA, 21 nt, synthetic construct
  source 1..21: mol_type = other RNA
cccaaatataaatacagtaag

SEQ ID NO: 4529 - RNA, 21 nt, synthetic construct
  source 1..21: mol_type = other RNA
cccaccggacaggccaaatga

SEQ ID NO: 4530 - RNA, 21 nt, synthetic construct
  source 1..21: mol_type = other RNA
cccaccgtctgcttgctagcc

SEQ ID NO: 4531 - RNA, 21 nt, synthetic construct
  source 1..21: mol_type = other RNA
cccacctacaaatacctggag

SEQ ID NO: 4532 - RNA, 21 nt, synthetic construct
  source 1..21: mol_type = other RNA
cccacctagctgagactacag

SEQ ID NO: 4533 - RNA, 21 nt, synthetic construct
  source 1..21: mol_type = other RNA
cccacctgcatccctccgcca

SEQ ID NO: 4534 - RNA, 21 nt, synthetic construct
  source 1..21: mol_type = other RNA
cccacgattccgatcgactgc

SEQ ID NO: 4535 - RNA, 21 nt, synthetic construct
  source 1..21: mol_type = other RNA
cccactgttcactaaggagtg

SEQ ID NO: 4536 - RNA, 21 nt, synthetic construct
  source 1..21: mol_type = other RNA
cccacttccattgtattgtct

SEQ ID NO: 4537 - RNA, 21 nt, synthetic construct
  source 1..21: mol_type = other RNA
cccagaagagcgtcacctgaa

SEQ ID NO: 4538 - RNA, 21 nt, synthetic construct
  source 1..21: mol_type = other RNA
cccagacaccacaatgaccct

SEQ ID NO: 4539 - RNA, 21 nt, synthetic construct
  source 1..21: mol_type = other RNA
cccagcaccctgtgcaggtct

SEQ ID NO: 4540 - RNA, 21 nt, synthetic construct
  source 1..21: mol_type = other RNA
cccagctagtctttgtatttt

SEQ ID NO: 4541 - RNA, 21 nt, synthetic construct
  source 1..21: mol_type = other RNA
cccagggctcattaaggtcct

SEQ ID NO: 4542 - RNA, 21 nt, synthetic construct
  source 1..21: mol_type = other RNA
cccaggtagtaagcagtggcg

SEQ ID NO: 4543 - RNA, 21 nt, synthetic construct
  source 1..21: mol_type = other RNA
cccatattgaccagggtgatc

SEQ ID NO: 4544 - RNA, 21 nt, synthetic construct
  source 1..21: mol_type = other RNA
cccatttaaaagaatggaaat

SEQ ID NO: 4545 - RNA, 21 nt, synthetic construct
  source 1..21: mol_type = other RNA
cccatttctcagcaacttcct

SEQ ID NO: 4546 - RNA, 21 nt, synthetic construct
  source 1..21: mol_type = other RNA
ccccaaatataaatacagtaa

SEQ ID NO: 4547 - RNA, 21 nt, synthetic construct
  source 1..21: mol_type = other RNA
ccccacctacaaatacctgga

SEQ ID NO: 4548 - RNA, 21 nt, synthetic construct
  source 1..21: mol_type = other RNA
ccccacttccattgtattgtc

SEQ ID NO: 4549 - RNA, 21 nt, synthetic construct
  source 1..21: mol_type = other RNA
ccccagaagagcgtcacctga

SEQ ID NO: 4550 - RNA, 21 nt, synthetic construct
  source 1..21: mol_type = other RNA
ccccatattgaccagggtgat

SEQ ID NO: 4551 - RNA, 21 nt, synthetic construct
  source 1..21: mol_type = other RNA
ccccatttctcagcaacttcc

SEQ ID NO: 4552 - RNA, 21 nt, synthetic construct
  source 1..21: mol_type = other RNA
cccctgaggaccaaatgcagc

SEQ ID NO: 4553 - RNA, 21 nt, synthetic construct
  source 1..21: mol_type = other RNA
cccctgccacaaggggctgtt

SEQ ID NO: 4554 - RNA, 21 nt, synthetic construct
  source 1..21: mol_type = other RNA
cccctggcagcggctgctgct

SEQ ID NO: 4555 - RNA, 21 nt, synthetic construct
  source 1..21: mol_type = other RNA
cccctggtcccaccgtctgct

SEQ ID NO: 4556 - RNA, 21 nt, synthetic construct
  source 1..21: mol_type = other RNA
ccccttattttctttctcctg

SEQ ID NO: 4557 - RNA, 21 nt, synthetic construct
  source 1..21: mol_type = other RNA
ccccttgtggcaggggctgat

SEQ ID NO: 4558 - RNA, 21 nt, synthetic construct
  source 1..21: mol_type = other RNA
cccgggagacagaggttgcag

SEQ ID NO: 4559 - RNA, 21 nt, synthetic construct
  source 1..21: mol_type = other RNA
cccgttcccaccggacaggcc

SEQ ID NO: 4560 - RNA, 21 nt, synthetic construct
  source 1..21: mol_type = other RNA
ccctattccaccccatttctc

SEQ ID NO: 4561 - RNA, 21 nt, synthetic construct
  source 1..21: mol_type = other RNA
ccctcacggaagatgacagtc

SEQ ID NO: 4562 - RNA, 21 nt, synthetic construct
  source 1..21: mol_type = other RNA
ccctcaggttttgttcttcca

SEQ ID NO: 4563 - RNA, 21 nt, synthetic construct
  source 1..21: mol_type = other RNA
ccctcatctgtatacactaag

SEQ ID NO: 4564 - RNA, 21 nt, synthetic construct
  source 1..21: mol_type = other RNA
ccctcgcaaaatgatgtgaaa

SEQ ID NO: 4565 - RNA, 21 nt, synthetic construct
  source 1..21: mol_type = other RNA
ccctctgtagcataaaatgtt

SEQ ID NO: 4566 - RNA, 21 nt, synthetic construct
  source 1..21: mol_type = other RNA
ccctgaaagcttagccctcac

SEQ ID NO: 4567 - RNA, 21 nt, synthetic construct
  source 1..21: mol_type = other RNA
ccctgaggaccaaatgcagcc

SEQ ID NO: 4568 - RNA, 21 nt, synthetic construct
  source 1..21: mol_type = other RNA
ccctgccacaaggggctgttg

SEQ ID NO: 4569 - RNA, 21 nt, synthetic construct
  source 1..21: mol_type = other RNA
ccctgccacctaaatctgcat

SEQ ID NO: 4570 - RNA, 21 nt, synthetic construct
  source 1..21: mol_type = other RNA
ccctggcagcggctgctgctt

SEQ ID NO: 4571 - RNA, 21 nt, synthetic construct
  source 1..21: mol_type = other RNA
ccctggcggagggatgcaggt

SEQ ID NO: 4572 - RNA, 21 nt, synthetic construct
  source 1..21: mol_type = other RNA
ccctgggaaattagtgcagat

SEQ ID NO: 4573 - RNA, 21 nt, synthetic construct
  source 1..21: mol_type = other RNA
ccctggtcaatatggggaaat

SEQ ID NO: 4574 - RNA, 21 nt, synthetic construct
  source 1..21: mol_type = other RNA
ccctggtcccaccgtctgctt

SEQ ID NO: 4575 - RNA, 21 nt, synthetic construct
  source 1..21: mol_type = other RNA
ccctgtgcaggtctcttccca

SEQ ID NO: 4576 - RNA, 21 nt, synthetic construct
  source 1..21: mol_type = other RNA
cccttattttctttctcctgt

SEQ ID NO: 4577 - RNA, 21 nt, synthetic construct
  source 1..21: mol_type = other RNA
cccttgatccccaaatataaa

SEQ ID NO: 4578 - RNA, 21 nt, synthetic construct
  source 1..21: mol_type = other RNA
cccttgtggcaggggctgatt

SEQ ID NO: 4579 - RNA, 21 nt, synthetic construct
  source 1..21: mol_type = other RNA
ccctttttaaatgagctttca

SEQ ID NO: 4580 - RNA, 21 nt, synthetic construct
  source 1..21: mol_type = other RNA
ccgagccttgcttgtcaccac

SEQ ID NO: 4581 - RNA, 21 nt, synthetic construct
  source 1..21: mol_type = other RNA
ccgatcgactgccaagcagca

SEQ ID NO: 4582 - RNA, 21 nt, synthetic construct
  source 1..21: mol_type = other RNA
ccgcgctccctgccacctaaa

SEQ ID NO: 4583 - RNA, 21 nt, synthetic construct
  source 1..21: mol_type = other RNA
ccgctgccaggggctgcgtct

SEQ ID NO: 4584 - RNA, 21 nt, synthetic construct
  source 1..21: mol_type = other RNA
ccggaacgacagcctgcatat

SEQ ID NO: 4585 - RNA, 21 nt, synthetic construct
  source 1..21: mol_type = other RNA
ccggaagatcccacgattccg

SEQ ID NO: 4586 - RNA, 21 nt, synthetic construct
  source 1..21: mol_type = other RNA
ccggacaggccaaatgagaac

SEQ ID NO: 4587 - RNA, 21 nt, synthetic construct
  source 1..21: mol_type = other RNA
ccggcccacctgcatccctcc

SEQ ID NO: 4588 - RNA, 21 nt, synthetic construct
  source 1..21: mol_type = other RNA
ccgggagacagaggttgcagt

SEQ ID NO: 4589 - RNA, 21 nt, synthetic construct
  source 1..21: mol_type = other RNA
ccggtgggaacgggctgctgg

SEQ ID NO: 4590 - RNA, 21 nt, synthetic construct
  source 1..21: mol_type = other RNA
ccggtggtgaaacacaggaga

SEQ ID NO: 4591 - RNA, 21 nt, synthetic construct
  source 1..21: mol_type = other RNA
ccggttatgttgtgtaagtca

SEQ ID NO: 4592 - RNA, 21 nt, synthetic construct
  source 1..21: mol_type = other RNA
ccggttctcatttggcctgtc

SEQ ID NO: 4593 - RNA, 21 nt, synthetic construct
  source 1..21: mol_type = other RNA
ccgtctgcttgctagcctact

SEQ ID NO: 4594 - RNA, 21 nt, synthetic construct
  source 1..21: mol_type = other RNA
ccgtgagggctaagctttcag

SEQ ID NO: 4595 - RNA, 21 nt, synthetic construct
  source 1..21: mol_type = other RNA
ccgtggaaacactggacttca

SEQ ID NO: 4596 - RNA, 21 nt, synthetic construct
  source 1..21: mol_type = other RNA
ccgtggtgacaagcaaggctc

SEQ ID NO: 4597 - RNA, 21 nt, synthetic construct
  source 1..21: mol_type = other RNA
ccgttcccaccggacaggcca

SEQ ID NO: 4598 - RNA, 21 nt, synthetic construct
  source 1..21: mol_type = other RNA
cctaaatctgcatctgctcca

SEQ ID NO: 4599 - RNA, 21 nt, synthetic construct
  source 1..21: mol_type = other RNA
cctacaaatacctggagcaga

SEQ ID NO: 4600 - RNA, 21 nt, synthetic construct
  source 1..21: mol_type = other RNA
cctacagtccaggaggtcagg

SEQ ID NO: 4601 - RNA, 21 nt, synthetic construct
  source 1..21: mol_type = other RNA
cctactgctgactggcttgcc

SEQ ID NO: 4602 - RNA, 21 nt, synthetic construct
  source 1..21: mol_type = other RNA
cctagcaccgtggtgacaagc

SEQ ID NO: 4603 - RNA, 21 nt, synthetic construct
  source 1..21: mol_type = other RNA
cctagctgtagaatttcagaa

SEQ ID NO: 4604 - RNA, 21 nt, synthetic construct
  source 1..21: mol_type = other RNA
cctaggaatccagtgagtaac

SEQ ID NO: 4605 - RNA, 21 nt, synthetic construct
  source 1..21: mol_type = other RNA
cctaggtcgtgtttttggaaa

SEQ ID NO: 4606 - RNA, 21 nt, synthetic construct
  source 1..21: mol_type = other RNA
cctattaattccacaggttcc

SEQ ID NO: 4607 - RNA, 21 nt, synthetic construct
  source 1..21: mol_type = other RNA
cctattccaccccatttctca

SEQ ID NO: 4608 - RNA, 21 nt, synthetic construct
  source 1..21: mol_type = other RNA
cctcacggaagatgacagtca

SEQ ID NO: 4609 - RNA, 21 nt, synthetic construct
  source 1..21: mol_type = other RNA
cctcaggggattgtgcagcaa

SEQ ID NO: 4610 - RNA, 21 nt, synthetic construct
  source 1..21: mol_type = other RNA
cctcaggttttgttcttccag

SEQ ID NO: 4611 - RNA, 21 nt, synthetic construct
  source 1..21: mol_type = other RNA
cctcatctgtatacactaagc

SEQ ID NO: 4612 - RNA, 21 nt, synthetic construct
  source 1..21: mol_type = other RNA
cctcattcactgtcctggctt

SEQ ID NO: 4613 - RNA, 21 nt, synthetic construct
  source 1..21: mol_type = other RNA
cctcccacctagctgagacta

SEQ ID NO: 4614 - RNA, 21 nt, synthetic construct
  source 1..21: mol_type = other RNA
cctcctggactgtaggactat

SEQ ID NO: 4615 - RNA, 21 nt, synthetic construct
  source 1..21: mol_type = other RNA
cctcgagtactggacatgctg

SEQ ID NO: 4616 - RNA, 21 nt, synthetic construct
  source 1..21: mol_type = other RNA
cctcgcaaaatgatgtgaaag

SEQ ID NO: 4617 - RNA, 21 nt, synthetic construct
  source 1..21: mol_type = other RNA
cctctgtagcataaaatgttc

SEQ ID NO: 4618 - RNA, 21 nt, synthetic construct
  source 1..21: mol_type = other RNA
cctctttgatccccttatttt

SEQ ID NO: 4619 - RNA, 21 nt, synthetic construct
  source 1..21: mol_type = other RNA
cctgaaagctcatttaaaaag

SEQ ID NO: 4620 - RNA, 21 nt, synthetic construct
  source 1..21: mol_type = other RNA
cctgaaagcttagccctcacg

SEQ ID NO: 4621 - RNA, 21 nt, synthetic construct
  source 1..21: mol_type = other RNA
cctgaacaagatgcagaacca

SEQ ID NO: 4622 - RNA, 21 nt, synthetic construct
  source 1..21: mol_type = other RNA
cctgacctcctggactgtagg

SEQ ID NO: 4623 - RNA, 21 nt, synthetic construct
  source 1..21: mol_type = other RNA
cctgagccatttgctgcacaa

SEQ ID NO: 4624 - RNA, 21 nt, synthetic construct
  source 1..21: mol_type = other RNA
cctgaggaccaaatgcagcca

SEQ ID NO: 4625 - RNA, 21 nt, synthetic construct
  source 1..21: mol_type = other RNA
cctgagggtcattgtggtgtc

SEQ ID NO: 4626 - RNA, 21 nt, synthetic construct
  source 1..21: mol_type = other RNA
cctgcacagggtgctgggaga

SEQ ID NO: 4627 - RNA, 21 nt, synthetic construct
  source 1..21: mol_type = other RNA
cctgcatataagtctattatt

SEQ ID NO: 4628 - RNA, 21 nt, synthetic construct
  source 1..21: mol_type = other RNA
cctgcatccctccgccagggc

SEQ ID NO: 4629 - RNA, 21 nt, synthetic construct
  source 1..21: mol_type = other RNA
cctgccacaaggggctgttgc

SEQ ID NO: 4630 - RNA, 21 nt, synthetic construct
  source 1..21: mol_type = other RNA
cctgccacctaaatctgcatc

SEQ ID NO: 4631 - RNA, 21 nt, synthetic construct
  source 1..21: mol_type = other RNA
cctgctggagactggcctagc

SEQ ID NO: 4632 - RNA, 21 nt, synthetic construct
  source 1..21: mol_type = other RNA
cctggaaaaaggaacactaag

SEQ ID NO: 4633 - RNA, 21 nt, synthetic construct
  source 1..21: mol_type = other RNA
cctggaagaacaaaacctgag

SEQ ID NO: 4634 - RNA, 21 nt, synthetic construct
  source 1..21: mol_type = other RNA
cctggactgtaggactatata

SEQ ID NO: 4635 - RNA, 21 nt, synthetic construct
  source 1..21: mol_type = other RNA
cctggagcagatgcagattta

SEQ ID NO: 4636 - RNA, 21 nt, synthetic construct
  source 1..21: mol_type = other RNA
cctggcagcggctgctgcttg

SEQ ID NO: 4637 - RNA, 21 nt, synthetic construct
  source 1..21: mol_type = other RNA
cctggccagttacttggtttt

SEQ ID NO: 4638 - RNA, 21 nt, synthetic construct
  source 1..21: mol_type = other RNA
cctggcggagggatgcaggtg

SEQ ID NO: 4639 - RNA, 21 nt, synthetic construct
  source 1..21: mol_type = other RNA
cctggcttttatttaaagaaa

SEQ ID NO: 4640 - RNA, 21 nt, synthetic construct
  source 1..21: mol_type = other RNA
cctgggaaattagtgcagatg

SEQ ID NO: 4641 - RNA, 21 nt, synthetic construct
  source 1..21: mol_type = other RNA
cctgggccagccaaggcaagc

SEQ ID NO: 4642 - RNA, 21 nt, synthetic construct
  source 1..21: mol_type = other RNA
cctgggcgacacagcgagact

SEQ ID NO: 4643 - RNA, 21 nt, synthetic construct
  source 1..21: mol_type = other RNA
cctggtcaatatggggaaatc

SEQ ID NO: 4644 - RNA, 21 nt, synthetic construct
  source 1..21: mol_type = other RNA
cctggtcccaccgtctgcttg

SEQ ID NO: 4645 - RNA, 21 nt, synthetic construct
  source 1..21: mol_type = other RNA
cctgtagtctcagctaggtgg

SEQ ID NO: 4646 - RNA, 21 nt, synthetic construct
  source 1..21: mol_type = other RNA
cctgtcaccaaggacgttaaa

SEQ ID NO: 4647 - RNA, 21 nt, synthetic construct
  source 1..21: mol_type = other RNA
cctgtccggtgggaacgggct

SEQ ID NO: 4648 - RNA, 21 nt, synthetic construct
  source 1..21: mol_type = other RNA
cctgtgcaggtctcttcccag

SEQ ID NO: 4649 - RNA, 21 nt, synthetic construct
  source 1..21: mol_type = other RNA
cctgtggaattaataggcatc

SEQ ID NO: 4650 - RNA, 21 nt, synthetic construct
  source 1..21: mol_type = other RNA
cctgtgtgtctccataaaagt

SEQ ID NO: 4651 - RNA, 21 nt, synthetic construct
  source 1..21: mol_type = other RNA
cctgtgtttcaccaccggttc

SEQ ID NO: 4652 - RNA, 21 nt, synthetic construct
  source 1..21: mol_type = other RNA
cctgttgctcctttcccccat

SEQ ID NO: 4653 - RNA, 21 nt, synthetic construct
  source 1..21: mol_type = other RNA
ccttaatgagccctgggaaat

SEQ ID NO: 4654 - RNA, 21 nt, synthetic construct
  source 1..21: mol_type = other RNA
ccttactgtatttatatttgg

SEQ ID NO: 4655 - RNA, 21 nt, synthetic construct
  source 1..21: mol_type = other RNA
ccttagtgaacagtgggaatg

SEQ ID NO: 4656 - RNA, 21 nt, synthetic construct
  source 1..21: mol_type = other RNA
ccttagtgttcctttttccag

SEQ ID NO: 4657 - RNA, 21 nt, synthetic construct
  source 1..21: mol_type = other RNA
ccttattttctttctcctgtg

SEQ ID NO: 4658 - RNA, 21 nt, synthetic construct
  source 1..21: mol_type = other RNA
ccttgatccccaaatataaat

SEQ ID NO: 4659 - RNA, 21 nt, synthetic construct
  source 1..21: mol_type = other RNA
ccttgcttgtcaccacggtgc

SEQ ID NO: 4660 - RNA, 21 nt, synthetic construct
  source 1..21: mol_type = other RNA
ccttggctatgaatgtcagaa

SEQ ID NO: 4661 - RNA, 21 nt, synthetic construct
  source 1..21: mol_type = other RNA
ccttggctggcccaggtagta

SEQ ID NO: 4662 - RNA, 21 nt, synthetic construct
  source 1..21: mol_type = other RNA
ccttggtgacaggacttttat

SEQ ID NO: 4663 - RNA, 21 nt, synthetic construct
  source 1..21: mol_type = other RNA
ccttgtggcaggggctgattt

SEQ ID NO: 4664 - RNA, 21 nt, synthetic construct
  source 1..21: mol_type = other RNA
cctttaacgtccttggtgaca

SEQ ID NO: 4665 - RNA, 21 nt, synthetic construct
  source 1..21: mol_type = other RNA
cctttcacatcattttgcgag

SEQ ID NO: 4666 - RNA, 21 nt, synthetic construct
  source 1..21: mol_type = other RNA
cctttttaaatgagctttcag

SEQ ID NO: 4667 - RNA, 21 nt, synthetic construct
  source 1..21: mol_type = other RNA
cgaaacgagagccctgaaagc

SEQ ID NO: 4668 - RNA, 21 nt, synthetic construct
  source 1..21: mol_type = other RNA
cgaaagcattgcctctttgat

SEQ ID NO: 4669 - RNA, 21 nt, synthetic construct
  source 1..21: mol_type = other RNA
cgacacagcgagactgtctcc

SEQ ID NO: 4670 - RNA, 21 nt, synthetic construct
  source 1..21: mol_type = other RNA
cgacagcctgcatataagtct

SEQ ID NO: 4671 - RNA, 21 nt, synthetic construct
  source 1..21: mol_type = other RNA
cgacatttcccatttattata

SEQ ID NO: 4672 - RNA, 21 nt, synthetic construct
  source 1..21: mol_type = other RNA
cgacctaggaatccagtgagt

SEQ ID NO: 4673 - RNA, 21 nt, synthetic construct
  source 1..21: mol_type = other RNA
cgactgccaagcagcagccgc

SEQ ID NO: 4674 - RNA, 21 nt, synthetic construct
  source 1..21: mol_type = other RNA
cgagactgtctccaaaaaacc

SEQ ID NO: 4675 - RNA, 21 nt, synthetic construct
  source 1..21: mol_type = other RNA
cgagagccctgaaagcttagc

SEQ ID NO: 4676 - RNA, 21 nt, synthetic construct
  source 1..21: mol_type = other RNA
cgagccttgcttgtcaccacg

SEQ ID NO: 4677 - RNA, 21 nt, synthetic construct
  source 1..21: mol_type = other RNA
cgaggagtgaagatgcctatt

SEQ ID NO: 4678 - RNA, 21 nt, synthetic construct
  source 1..21: mol_type = other RNA
cgagggtctctcacgtgcttc

SEQ ID NO: 4679 - RNA, 21 nt, synthetic construct
  source 1..21: mol_type = other RNA
cgagtactggacatgctgctg

SEQ ID NO: 4680 - RNA, 21 nt, synthetic construct
  source 1..21: mol_type = other RNA
cgatcgactgccaagcagcag

SEQ ID NO: 4681 - RNA, 21 nt, synthetic construct
  source 1..21: mol_type = other RNA
cgatcggaatcgtgggatctt

SEQ ID NO: 4682 - RNA, 21 nt, synthetic construct
  source 1..21: mol_type = other RNA
cgatctcagcgcactgcaacc

SEQ ID NO: 4683 - RNA, 21 nt, synthetic construct
  source 1..21: mol_type = other RNA
cgattccgatcgactgccaag

SEQ ID NO: 4684 - RNA, 21 nt, synthetic construct
  source 1..21: mol_type = other RNA
cgcaaaatgatgtgaaaggac

SEQ ID NO: 4685 - RNA, 21 nt, synthetic construct
  source 1..21: mol_type = other RNA
cgccactgcttactacctggg

SEQ ID NO: 4686 - RNA, 21 nt, synthetic construct
  source 1..21: mol_type = other RNA
cgcccagctagtctttgtatt

SEQ ID NO: 4687 - RNA, 21 nt, synthetic construct
  source 1..21: mol_type = other RNA
cgccgagccttgcttgtcacc

SEQ ID NO: 4688 - RNA, 21 nt, synthetic construct
  source 1..21: mol_type = other RNA
cgcgctccctgccacctaaat

SEQ ID NO: 4689 - RNA, 21 nt, synthetic construct
  source 1..21: mol_type = other RNA
cgctccctgccacctaaatct

SEQ ID NO: 4690 - RNA, 21 nt, synthetic construct
  source 1..21: mol_type = other RNA
cgctcttctggggtgagcatt

SEQ ID NO: 4691 - RNA, 21 nt, synthetic construct
  source 1..21: mol_type = other RNA
cgctgccaggggctgcgtctg

SEQ ID NO: 4692 - RNA, 21 nt, synthetic construct
  source 1..21: mol_type = other RNA
cgctggaataaaatgccttta

SEQ ID NO: 4693 - RNA, 21 nt, synthetic construct
  source 1..21: mol_type = other RNA
cggaacgacagcctgcatata

SEQ ID NO: 4694 - RNA, 21 nt, synthetic construct
  source 1..21: mol_type = other RNA
cggaagatcccacgattccga

SEQ ID NO: 4695 - RNA, 21 nt, synthetic construct
  source 1..21: mol_type = other RNA
cggaagatgacagtcaactgg

SEQ ID NO: 4696 - RNA, 21 nt, synthetic construct
  source 1..21: mol_type = other RNA
cggaatcgtgggatcttccgg

SEQ ID NO: 4697 - RNA, 21 nt, synthetic construct
  source 1..21: mol_type = other RNA
cggacaccctcatctgtatac

SEQ ID NO: 4698 - RNA, 21 nt, synthetic construct
  source 1..21: mol_type = other RNA
cggacaggccaaatgagaacc

SEQ ID NO: 4699 - RNA, 21 nt, synthetic construct
  source 1..21: mol_type = other RNA
cggagggatgcaggtgggccg

SEQ ID NO: 4700 - RNA, 21 nt, synthetic construct
  source 1..21: mol_type = other RNA
cggcagccctggcggagggat

SEQ ID NO: 4701 - RNA, 21 nt, synthetic construct
  source 1..21: mol_type = other RNA
cggcccacctgcatccctccg

SEQ ID NO: 4702 - RNA, 21 nt, synthetic construct
  source 1..21: mol_type = other RNA
cggcgccactgcttactacct

SEQ ID NO: 4703 - RNA, 21 nt, synthetic construct
  source 1..21: mol_type = other RNA
cggctgctgcttggcagtcga

SEQ ID NO: 4704 - RNA, 21 nt, synthetic construct
  source 1..21: mol_type = other RNA
cggctggatacctgtgtgtct

SEQ ID NO: 4705 - RNA, 21 nt, synthetic construct
  source 1..21: mol_type = other RNA
cgggagacagaggttgcagtg

SEQ ID NO: 4706 - RNA, 21 nt, synthetic construct
  source 1..21: mol_type = other RNA
cgggctgctggctgcatttgg

SEQ ID NO: 4707 - RNA, 21 nt, synthetic construct
  source 1..21: mol_type = other RNA
cggtgctaggaaatccagttg

SEQ ID NO: 4708 - RNA, 21 nt, synthetic construct
  source 1..21: mol_type = other RNA
cggtgggaacgggctgctggc

SEQ ID NO: 4709 - RNA, 21 nt, synthetic construct
  source 1..21: mol_type = other RNA
cggtgggaccaggggatctct

SEQ ID NO: 4710 - RNA, 21 nt, synthetic construct
  source 1..21: mol_type = other RNA
cggtggtgaaacacaggagaa

SEQ ID NO: 4711 - RNA, 21 nt, synthetic construct
  source 1..21: mol_type = other RNA
cggttatgttgtgtaagtcaa

SEQ ID NO: 4712 - RNA, 21 nt, synthetic construct
  source 1..21: mol_type = other RNA
cggttctcatttggcctgtcc

SEQ ID NO: 4713 - RNA, 21 nt, synthetic construct
  source 1..21: mol_type = other RNA
cgtcacctgaacaagatgcag

SEQ ID NO: 4714 - RNA, 21 nt, synthetic construct
  source 1..21: mol_type = other RNA
cgtccttggtgacaggacttt

SEQ ID NO: 4715 - RNA, 21 nt, synthetic construct
  source 1..21: mol_type = other RNA
cgtctgacatcctgacctcct

SEQ ID NO: 4716 - RNA, 21 nt, synthetic construct
  source 1..21: mol_type = other RNA
cgtctgcttgctagcctactg

SEQ ID NO: 4717 - RNA, 21 nt, synthetic construct
  source 1..21: mol_type = other RNA
cgtcttctagagagcttagtg

SEQ ID NO: 4718 - RNA, 21 nt, synthetic construct
  source 1..21: mol_type = other RNA
cgtgagagaccctcgcaaaat

SEQ ID NO: 4719 - RNA, 21 nt, synthetic construct
  source 1..21: mol_type = other RNA
cgtgagggctaagctttcagg

SEQ ID NO: 4720 - RNA, 21 nt, synthetic construct
  source 1..21: mol_type = other RNA
cgtgcttcagtggccattaca

SEQ ID NO: 4721 - RNA, 21 nt, synthetic construct
  source 1..21: mol_type = other RNA
cgtggaaacactggacttcaa

SEQ ID NO: 4722 - RNA, 21 nt, synthetic construct
  source 1..21: mol_type = other RNA
cgtgggatcttccggcccacc

SEQ ID NO: 4723 - RNA, 21 nt, synthetic construct
  source 1..21: mol_type = other RNA
cgtggtgacaagcaaggctcg

SEQ ID NO: 4724 - RNA, 21 nt, synthetic construct
  source 1..21: mol_type = other RNA
cgtgtttttggaaatcagccc

SEQ ID NO: 4725 - RNA, 21 nt, synthetic construct
  source 1..21: mol_type = other RNA
cgttaaaggcattttattcca

SEQ ID NO: 4726 - RNA, 21 nt, synthetic construct
  source 1..21: mol_type = other RNA
cgttcccaccggacaggccaa

SEQ ID NO: 4727 - RNA, 21 nt, synthetic construct
  source 1..21: mol_type = other RNA
cgttccggttatgttgtgtaa

SEQ ID NO: 4728 - RNA, 21 nt, synthetic construct
  source 1..21: mol_type = other RNA
cgtttcgaaagcattgcctct

SEQ ID NO: 4729 - RNA, 21 nt, synthetic construct
  source 1..21: mol_type = other RNA
ctaaatctgcatctgctccag

SEQ ID NO: 4730 - RNA, 21 nt, synthetic construct
  source 1..21: mol_type = other RNA
ctaaatttcctgttgctcctt

SEQ ID NO: 4731 - RNA, 21 nt, synthetic construct
  source 1..21: mol_type = other RNA
ctaagaccagcatctgcacta

SEQ ID NO: 4732 - RNA, 21 nt, synthetic construct
  source 1..21: mol_type = other RNA
ctaagctctctagaagacgct

SEQ ID NO: 4733 - RNA, 21 nt, synthetic construct
  source 1..21: mol_type = other RNA
ctaagctttcagggctctcgt

SEQ ID NO: 4734 - RNA, 21 nt, synthetic construct
  source 1..21: mol_type = other RNA
ctaaggaaataatctgagaaa

SEQ ID NO: 4735 - RNA, 21 nt, synthetic construct
  source 1..21: mol_type = other RNA
ctaaggagtgagtggcaagac

SEQ ID NO: 4736 - RNA, 21 nt, synthetic construct
  source 1..21: mol_type = other RNA
ctaatgttgaaagttggcaac

SEQ ID NO: 4737 - RNA, 21 nt, synthetic construct
  source 1..21: mol_type = other RNA
ctaatttcccagggctcatta

SEQ ID NO: 4738 - RNA, 21 nt, synthetic construct
  source 1..21: mol_type = other RNA
ctacaaatacctggagcagat

SEQ ID NO: 4739 - RNA, 21 nt, synthetic construct
  source 1..21: mol_type = other RNA
ctacagagggtgaaaactctt

SEQ ID NO: 4740 - RNA, 21 nt, synthetic construct
  source 1..21: mol_type = other RNA
ctacagctaggccagtctcca

SEQ ID NO: 4741 - RNA, 21 nt, synthetic construct
  source 1..21: mol_type = other RNA
ctacagtagtactttatatag

SEQ ID NO: 4742 - RNA, 21 nt, synthetic construct
  source 1..21: mol_type = other RNA
ctacagtccaggaggtcagga

SEQ ID NO: 4743 - RNA, 21 nt, synthetic construct
  source 1..21: mol_type = other RNA
ctacatcaaatatctgcaata

SEQ ID NO: 4744 - RNA, 21 nt, synthetic construct
  source 1..21: mol_type = other RNA
ctacctgggccagccaaggca

SEQ ID NO: 4745 - RNA, 21 nt, synthetic construct
  source 1..21: mol_type = other RNA
ctactgcacctggccagttac

SEQ ID NO: 4746 - RNA, 21 nt, synthetic construct
  source 1..21: mol_type = other RNA
ctactgctgactggcttgcct

SEQ ID NO: 4747 - RNA, 21 nt, synthetic construct
  source 1..21: mol_type = other RNA
ctactgtagaactgcaatttc

SEQ ID NO: 4748 - RNA, 21 nt, synthetic construct
  source 1..21: mol_type = other RNA
ctagaagacgctggaataaaa

SEQ ID NO: 4749 - RNA, 21 nt, synthetic construct
  source 1..21: mol_type = other RNA
ctagagagcttagtgtataca

SEQ ID NO: 4750 - RNA, 21 nt, synthetic construct
  source 1..21: mol_type = other RNA
ctagcaagcagacggtgggac

SEQ ID NO: 4751 - RNA, 21 nt, synthetic construct
  source 1..21: mol_type = other RNA
ctagcaccgtggtgacaagca

SEQ ID NO: 4752 - RNA, 21 nt, synthetic construct
  source 1..21: mol_type = other RNA
ctagcctactgctgactggct

SEQ ID NO: 4753 - RNA, 21 nt, synthetic construct
  source 1..21: mol_type = other RNA
ctagctgtagaatttcagaac

SEQ ID NO: 4754 - RNA, 21 nt, synthetic construct
  source 1..21: mol_type = other RNA
ctaggaaatccagttgactgt

SEQ ID NO: 4755 - RNA, 21 nt, synthetic construct
  source 1..21: mol_type = other RNA
ctaggaatccagtgagtaact

SEQ ID NO: 4756 - RNA, 21 nt, synthetic construct
  source 1..21: mol_type = other RNA
ctaggccagtctccagcagga

SEQ ID NO: 4757 - RNA, 21 nt, synthetic construct
  source 1..21: mol_type = other RNA
ctaggtcgtgtttttggaaat

SEQ ID NO: 4758 - RNA, 21 nt, synthetic construct
  source 1..21: mol_type = other RNA
ctatataaagtactactgtag

SEQ ID NO: 4759 - RNA, 21 nt, synthetic construct
  source 1..21: mol_type = other RNA
ctatgaatgtcagaaagtcat

SEQ ID NO: 4760 - RNA, 21 nt, synthetic construct
  source 1..21: mol_type = other RNA
ctatgagaaccccacctacaa

SEQ ID NO: 4761 - RNA, 21 nt, synthetic construct
  source 1..21: mol_type = other RNA
ctattaattccacaggttccc

SEQ ID NO: 4762 - RNA, 21 nt, synthetic construct
  source 1..21: mol_type = other RNA
ctattccaccccatttctcag

SEQ ID NO: 4763 - RNA, 21 nt, synthetic construct
  source 1..21: mol_type = other RNA
ctattgcagatatttgatgta

SEQ ID NO: 4764 - RNA, 21 nt, synthetic construct
  source 1..21: mol_type = other RNA
ctcaccccagaagagcgtcac

SEQ ID NO: 4765 - RNA, 21 nt, synthetic construct
  source 1..21: mol_type = other RNA
ctcacggaagatgacagtcaa

SEQ ID NO: 4766 - RNA, 21 nt, synthetic construct
  source 1..21: mol_type = other RNA
ctcacgtgcttcagtggccat

SEQ ID NO: 4767 - RNA, 21 nt, synthetic construct
  source 1..21: mol_type = other RNA
ctcactccttagtgaacagtg

SEQ ID NO: 4768 - RNA, 21 nt, synthetic construct
  source 1..21: mol_type = other RNA
ctcactggattcctaggtcgt

SEQ ID NO: 4769 - RNA, 21 nt, synthetic construct
  source 1..21: mol_type = other RNA
ctcagattatttccttagtgt

SEQ ID NO: 4770 - RNA, 21 nt, synthetic construct
  source 1..21: mol_type = other RNA
ctcagcaacttcctgaaagct

SEQ ID NO: 4771 - RNA, 21 nt, synthetic construct
  source 1..21: mol_type = other RNA
ctcagcctcccacctagctga

SEQ ID NO: 4772 - RNA, 21 nt, synthetic construct
  source 1..21: mol_type = other RNA
ctcagcgcactgcaacctctg

SEQ ID NO: 4773 - RNA, 21 nt, synthetic construct
  source 1..21: mol_type = other RNA
ctcagctaggtgggaggctga

SEQ ID NO: 4774 - RNA, 21 nt, synthetic construct
  source 1..21: mol_type = other RNA
ctcaggggattgtgcagcaaa

SEQ ID NO: 4775 - RNA, 21 nt, synthetic construct
  source 1..21: mol_type = other RNA
ctcaggtctcccagcaccctg

SEQ ID NO: 4776 - RNA, 21 nt, synthetic construct
  source 1..21: mol_type = other RNA
ctcaggttttgttcttccagg

SEQ ID NO: 4777 - RNA, 21 nt, synthetic construct
  source 1..21: mol_type = other RNA
ctcatagccatggttctgcat

SEQ ID NO: 4778 - RNA, 21 nt, synthetic construct
  source 1..21: mol_type = other RNA
ctcatctgtatacactaagct

SEQ ID NO: 4779 - RNA, 21 nt, synthetic construct
  source 1..21: mol_type = other RNA
ctcattaaggtccttactgta

SEQ ID NO: 4780 - RNA, 21 nt, synthetic construct
  source 1..21: mol_type = other RNA
ctcattcactgtcctggcttt

SEQ ID NO: 4781 - RNA, 21 nt, synthetic construct
  source 1..21: mol_type = other RNA
ctcatttaaaaagggaatact

SEQ ID NO: 4782 - RNA, 21 nt, synthetic construct
  source 1..21: mol_type = other RNA
ctcatttggcctgtccggtgg

SEQ ID NO: 4783 - RNA, 21 nt, synthetic construct
  source 1..21: mol_type = other RNA
ctccaaaaaaccaaaaaacca

SEQ ID NO: 4784 - RNA, 21 nt, synthetic construct
  source 1..21: mol_type = other RNA
ctccagcaggagataaaacca

SEQ ID NO: 4785 - RNA, 21 nt, synthetic construct
  source 1..21: mol_type = other RNA
ctccaggtatttgtaggtggg

SEQ ID NO: 4786 - RNA, 21 nt, synthetic construct
  source 1..21: mol_type = other RNA
ctccataaaagtcctgtcacc

SEQ ID NO: 4787 - RNA, 21 nt, synthetic construct
  source 1..21: mol_type = other RNA
ctcccacctagctgagactac

SEQ ID NO: 4788 - RNA, 21 nt, synthetic construct
  source 1..21: mol_type = other RNA
ctcccagcaccctgtgcaggt

SEQ ID NO: 4789 - RNA, 21 nt, synthetic construct
  source 1..21: mol_type = other RNA
ctccctgccacctaaatctgc

SEQ ID NO: 4790 - RNA, 21 nt, synthetic construct
  source 1..21: mol_type = other RNA
ctcctcgagtactggacatgc

SEQ ID NO: 4791 - RNA, 21 nt, synthetic construct
  source 1..21: mol_type = other RNA
ctcctgctggagactggccta

SEQ ID NO: 4792 - RNA, 21 nt, synthetic construct
  source 1..21: mol_type = other RNA
ctcctggactgtaggactata

SEQ ID NO: 4793 - RNA, 21 nt, synthetic construct
  source 1..21: mol_type = other RNA
ctcctgtgtttcaccaccggt

SEQ ID NO: 4794 - RNA, 21 nt, synthetic construct
  source 1..21: mol_type = other RNA
ctccttagtgaacagtgggaa

SEQ ID NO: 4795 - RNA, 21 nt, synthetic construct
  source 1..21: mol_type = other RNA
ctcctttcccccattaaaaaa

SEQ ID NO: 4796 - RNA, 21 nt, synthetic construct
  source 1..21: mol_type = other RNA
ctcgaggagtgaagatgccta

SEQ ID NO: 4797 - RNA, 21 nt, synthetic construct
  source 1..21: mol_type = other RNA
ctcgagtactggacatgctgc

SEQ ID NO: 4798 - RNA, 21 nt, synthetic construct
  source 1..21: mol_type = other RNA
ctcgcaaaatgatgtgaaagg

SEQ ID NO: 4799 - RNA, 21 nt, synthetic construct
  source 1..21: mol_type = other RNA
ctcggcgccactgcttactac

SEQ ID NO: 4800 - RNA, 21 nt, synthetic construct
  source 1..21: mol_type = other RNA
ctcgtttcgaaagcattgcct

SEQ ID NO: 4801 - RNA, 21 nt, synthetic construct
  source 1..21: mol_type = other RNA
ctctagaagacgctggaataa

SEQ ID NO: 4802 - RNA, 21 nt, synthetic construct
  source 1..21: mol_type = other RNA
ctctcacgtgcttcagtggcc

SEQ ID NO: 4803 - RNA, 21 nt, synthetic construct
  source 1..21: mol_type = other RNA
ctctcgtttcgaaagcattgc

SEQ ID NO: 4804 - RNA, 21 nt, synthetic construct
  source 1..21: mol_type = other RNA
ctctctagaagacgctggaat

SEQ ID NO: 4805 - RNA, 21 nt, synthetic construct
  source 1..21: mol_type = other RNA
ctctggacattcccactgttc

SEQ ID NO: 4806 - RNA, 21 nt, synthetic construct
  source 1..21: mol_type = other RNA
ctctggtctttttcagttctg

SEQ ID NO: 4807 - RNA, 21 nt, synthetic construct
  source 1..21: mol_type = other RNA
ctctgtagcataaaatgttca

SEQ ID NO: 4808 - RNA, 21 nt, synthetic construct
  source 1..21: mol_type = other RNA
ctcttcagcctcattcactgt

SEQ ID NO: 4809 - RNA, 21 nt, synthetic construct
  source 1..21: mol_type = other RNA
ctcttcccagacaccacaatg

SEQ ID NO: 4810 - RNA, 21 nt, synthetic construct
  source 1..21: mol_type = other RNA
ctcttctggggtgagcattgg

SEQ ID NO: 4811 - RNA, 21 nt, synthetic construct
  source 1..21: mol_type = other RNA
ctctttgatccccttattttc

SEQ ID NO: 4812 - RNA, 21 nt, synthetic construct
  source 1..21: mol_type = other RNA
ctcttttctcagattatttcc

SEQ ID NO: 4813 - RNA, 21 nt, synthetic construct
  source 1..21: mol_type = other RNA
ctgaaaaagaccagagatccc

SEQ ID NO: 4814 - RNA, 21 nt, synthetic construct
  source 1..21: mol_type = other RNA
ctgaaagctcatttaaaaagg

SEQ ID NO: 4815 - RNA, 21 nt, synthetic construct
  source 1..21: mol_type = other RNA
ctgaaagcttagccctcacgg

SEQ ID NO: 4816 - RNA, 21 nt, synthetic construct
  source 1..21: mol_type = other RNA
ctgaaattctacagctaggcc

SEQ ID NO: 4817 - RNA, 21 nt, synthetic construct
  source 1..21: mol_type = other RNA
ctgaacaagatgcagaaccat

SEQ ID NO: 4818 - RNA, 21 nt, synthetic construct
  source 1..21: mol_type = other RNA
ctgaactgataacagcagcat

SEQ ID NO: 4819 - RNA, 21 nt, synthetic construct
  source 1..21: mol_type = other RNA
ctgaacttgtcttgccactca

SEQ ID NO: 4820 - RNA, 21 nt, synthetic construct
  source 1..21: mol_type = other RNA
ctgaagagttgacttacacaa

SEQ ID NO: 4821 - RNA, 21 nt, synthetic construct
  source 1..21: mol_type = other RNA
ctgaagcacgtgagagaccct

SEQ ID NO: 4822 - RNA, 21 nt, synthetic construct
  source 1..21: mol_type = other RNA
ctgaagcagactgtttctgtt

SEQ ID NO: 4823 - RNA, 21 nt, synthetic construct
  source 1..21: mol_type = other RNA
ctgacacatgctctcaatata

SEQ ID NO: 4824 - RNA, 21 nt, synthetic construct
  source 1..21: mol_type = other RNA
ctgacatcctgacctcctgga

SEQ ID NO: 4825 - RNA, 21 nt, synthetic construct
  source 1..21: mol_type = other RNA
ctgacattcatagccaaggcc

SEQ ID NO: 4826 - RNA, 21 nt, synthetic construct
  source 1..21: mol_type = other RNA
ctgacctcctggactgtagga

SEQ ID NO: 4827 - RNA, 21 nt, synthetic construct
  source 1..21: mol_type = other RNA
ctgactggcttgccttggctg

SEQ ID NO: 4828 - RNA, 21 nt, synthetic construct
  source 1..21: mol_type = other RNA
ctgagaaaagagttttcaccc

SEQ ID NO: 4829 - RNA, 21 nt, synthetic construct
  source 1..21: mol_type = other RNA
ctgagaaatggggtggaatag

SEQ ID NO: 4830 - RNA, 21 nt, synthetic construct
  source 1..21: mol_type = other RNA
ctgagccatttgctgcacaat

SEQ ID NO: 4831 - RNA, 21 nt, synthetic construct
  source 1..21: mol_type = other RNA
ctgaggaccaaatgcagccag

SEQ ID NO: 4832 - RNA, 21 nt, synthetic construct
  source 1..21: mol_type = other RNA
ctgagggtcattgtggtgtct

SEQ ID NO: 4833 - RNA, 21 nt, synthetic construct
  source 1..21: mol_type = other RNA
ctgataacagcagcatgtcca

SEQ ID NO: 4834 - RNA, 21 nt, synthetic construct
  source 1..21: mol_type = other RNA
ctgatttccaaaaacacgacc

SEQ ID NO: 4835 - RNA, 21 nt, synthetic construct
  source 1..21: mol_type = other RNA
ctgcaatttccattcttttaa

SEQ ID NO: 4836 - RNA, 21 nt, synthetic construct
  source 1..21: mol_type = other RNA
ctgcacaatcccctgaggacc

SEQ ID NO: 4837 - RNA, 21 nt, synthetic construct
  source 1..21: mol_type = other RNA
ctgcacagggtgctgggagac

SEQ ID NO: 4838 - RNA, 21 nt, synthetic construct
  source 1..21: mol_type = other RNA
ctgcacctggccagttacttg

SEQ ID NO: 4839 - RNA, 21 nt, synthetic construct
  source 1..21: mol_type = other RNA
ctgcactaatttcccagggct

SEQ ID NO: 4840 - RNA, 21 nt, synthetic construct
  source 1..21: mol_type = other RNA
ctgcatataagtctattattg

SEQ ID NO: 4841 - RNA, 21 nt, synthetic construct
  source 1..21: mol_type = other RNA
ctgcatccctccgccagggct

SEQ ID NO: 4842 - RNA, 21 nt, synthetic construct
  source 1..21: mol_type = other RNA
ctgcatctgctccaggtattt

SEQ ID NO: 4843 - RNA, 21 nt, synthetic construct
  source 1..21: mol_type = other RNA
ctgcatcttgttcaggtgacg

SEQ ID NO: 4844 - RNA, 21 nt, synthetic construct
  source 1..21: mol_type = other RNA
ctgcatttggtcctcagggga

SEQ ID NO: 4845 - RNA, 21 nt, synthetic construct
  source 1..21: mol_type = other RNA
ctgccaagcagcagccgctgc

SEQ ID NO: 4846 - RNA, 21 nt, synthetic construct
  source 1..21: mol_type = other RNA
ctgccacaaggggctgttgcc

SEQ ID NO: 4847 - RNA, 21 nt, synthetic construct
  source 1..21: mol_type = other RNA
ctgccacctaaatctgcatct

SEQ ID NO: 4848 - RNA, 21 nt, synthetic construct
  source 1..21: mol_type = other RNA
ctgccaggggctgcgtctgac

SEQ ID NO: 4849 - RNA, 21 nt, synthetic construct
  source 1..21: mol_type = other RNA
ctgccgcgctccctgccacct

SEQ ID NO: 4850 - RNA, 21 nt, synthetic construct
  source 1..21: mol_type = other RNA
ctgcgtctgacatcctgacct

SEQ ID NO: 4851 - RNA, 21 nt, synthetic construct
  source 1..21: mol_type = other RNA
ctgctccaggtatttgtaggt

SEQ ID NO: 4852 - RNA, 21 nt, synthetic construct
  source 1..21: mol_type = other RNA
ctgctgactggcttgccttgg

SEQ ID NO: 4853 - RNA, 21 nt, synthetic construct
  source 1..21: mol_type = other RNA
ctgctgcttggcagtcgatcg

SEQ ID NO: 4854 - RNA, 21 nt, synthetic construct
  source 1..21: mol_type = other RNA
ctgctggagactggcctagct

SEQ ID NO: 4855 - RNA, 21 nt, synthetic construct
  source 1..21: mol_type = other RNA
ctgctggctgcatttggtcct

SEQ ID NO: 4856 - RNA, 21 nt, synthetic construct
  source 1..21: mol_type = other RNA
ctgctggttactgaacttgtc

SEQ ID NO: 4857 - RNA, 21 nt, synthetic construct
  source 1..21: mol_type = other RNA
ctgctgttatcagttcagtta

SEQ ID NO: 4858 - RNA, 21 nt, synthetic construct
  source 1..21: mol_type = other RNA
ctgcttactacctgggccagc

SEQ ID NO: 4859 - RNA, 21 nt, synthetic construct
  source 1..21: mol_type = other RNA
ctgcttcagcactttctaaat

SEQ ID NO: 4860 - RNA, 21 nt, synthetic construct
  source 1..21: mol_type = other RNA
ctgcttgctagcctactgctg

SEQ ID NO: 4861 - RNA, 21 nt, synthetic construct
  source 1..21: mol_type = other RNA
ctgcttggcagtcgatcggaa

SEQ ID NO: 4862 - RNA, 21 nt, synthetic construct
  source 1..21: mol_type = other RNA
ctggaaaaaggaacactaagg

SEQ ID NO: 4863 - RNA, 21 nt, synthetic construct
  source 1..21: mol_type = other RNA
ctggaagaacaaaacctgagg

SEQ ID NO: 4864 - RNA, 21 nt, synthetic construct
  source 1..21: mol_type = other RNA
ctggaataaaatgcctttaac

SEQ ID NO: 4865 - RNA, 21 nt, synthetic construct
  source 1..21: mol_type = other RNA
ctggacatgctgctgttatca

SEQ ID NO: 4866 - RNA, 21 nt, synthetic construct
  source 1..21: mol_type = other RNA
ctggacattcccactgttcac

SEQ ID NO: 4867 - RNA, 21 nt, synthetic construct
  source 1..21: mol_type = other RNA
ctggactgtaggactatataa

SEQ ID NO: 4868 - RNA, 21 nt, synthetic construct
  source 1..21: mol_type = other RNA
ctggacttcaagaaactggtc

SEQ ID NO: 4869 - RNA, 21 nt, synthetic construct
  source 1..21: mol_type = other RNA
ctggagactggcctagctgta

SEQ ID NO: 4870 - RNA, 21 nt, synthetic construct
  source 1..21: mol_type = other RNA
ctggagcagatgcagatttag

SEQ ID NO: 4871 - RNA, 21 nt, synthetic construct
  source 1..21: mol_type = other RNA
ctggatacctgtgtgtctcca

SEQ ID NO: 4872 - RNA, 21 nt, synthetic construct
  source 1..21: mol_type = other RNA
ctggattcctaggtcgtgttt

SEQ ID NO: 4873 - RNA, 21 nt, synthetic construct
  source 1..21: mol_type = other RNA
ctggatttcctagcaccgtgg

SEQ ID NO: 4874 - RNA, 21 nt, synthetic construct
  source 1..21: mol_type = other RNA
ctggcagcggctgctgcttgg

SEQ ID NO: 4875 - RNA, 21 nt, synthetic construct
  source 1..21: mol_type = other RNA
ctggccagttacttggtttta

SEQ ID NO: 4876 - RNA, 21 nt, synthetic construct
  source 1..21: mol_type = other RNA
ctggcccaggtagtaagcagt

SEQ ID NO: 4877 - RNA, 21 nt, synthetic construct
  source 1..21: mol_type = other RNA
ctggcctagctgtagaatttc

SEQ ID NO: 4878 - RNA, 21 nt, synthetic construct
  source 1..21: mol_type = other RNA
ctggcggagggatgcaggtgg

SEQ ID NO: 4879 - RNA, 21 nt, synthetic construct
  source 1..21: mol_type = other RNA
ctggctgcatttggtcctcag

SEQ ID NO: 4880 - RNA, 21 nt, synthetic construct
  source 1..21: mol_type = other RNA
ctggcttgccttggctggccc

SEQ ID NO: 4881 - RNA, 21 nt, synthetic construct
  source 1..21: mol_type = other RNA
ctgggaaattagtgcagatgc

SEQ ID NO: 4882 - RNA, 21 nt, synthetic construct
  source 1..21: mol_type = other RNA
ctgggaagagacctgcacagg

SEQ ID NO: 4883 - RNA, 21 nt, synthetic construct
  source 1..21: mol_type = other RNA
ctgggagacctgagccatttg

SEQ ID NO: 4884 - RNA, 21 nt, synthetic construct
  source 1..21: mol_type = other RNA
ctgggccagccaaggcaagcc

SEQ ID NO: 4885 - RNA, 21 nt, synthetic construct
  source 1..21: mol_type = other RNA
ctgggcgacacagcgagactg

SEQ ID NO: 4886 - RNA, 21 nt, synthetic construct
  source 1..21: mol_type = other RNA
ctggggtgagcattggatcaa

SEQ ID NO: 4887 - RNA, 21 nt, synthetic construct
  source 1..21: mol_type = other RNA
ctgggttgggggtgggaacct

SEQ ID NO: 4888 - RNA, 21 nt, synthetic construct
  source 1..21: mol_type = other RNA
ctggtcaatatggggaaatcc

SEQ ID NO: 4889 - RNA, 21 nt, synthetic construct
  source 1..21: mol_type = other RNA
ctggtcccaccgtctgcttgc

SEQ ID NO: 4890 - RNA, 21 nt, synthetic construct
  source 1..21: mol_type = other RNA
ctggtcctttcacatcatttt

SEQ ID NO: 4891 - RNA, 21 nt, synthetic construct
  source 1..21: mol_type = other RNA
ctggtcttagttatttgtgtt

SEQ ID NO: 4892 - RNA, 21 nt, synthetic construct
  source 1..21: mol_type = other RNA
ctggtctttttcagttctgaa

SEQ ID NO: 4893 - RNA, 21 nt, synthetic construct
  source 1..21: mol_type = other RNA
ctggttactgaacttgtcttg

SEQ ID NO: 4894 - RNA, 21 nt, synthetic construct
  source 1..21: mol_type = other RNA
ctgtaatggccactgaagcac

SEQ ID NO: 4895 - RNA, 21 nt, synthetic construct
  source 1..21: mol_type = other RNA
ctgtagaactgcaatttccat

SEQ ID NO: 4896 - RNA, 21 nt, synthetic construct
  source 1..21: mol_type = other RNA
ctgtagaatttcagaactgaa

SEQ ID NO: 4897 - RNA, 21 nt, synthetic construct
  source 1..21: mol_type = other RNA
ctgtagcataaaatgttcaca

SEQ ID NO: 4898 - RNA, 21 nt, synthetic construct
  source 1..21: mol_type = other RNA
ctgtaggactatataaagtac

SEQ ID NO: 4899 - RNA, 21 nt, synthetic construct
  source 1..21: mol_type = other RNA
ctgtagtctcagctaggtggg

SEQ ID NO: 4900 - RNA, 21 nt, synthetic construct
  source 1..21: mol_type = other RNA
ctgtatacactaagctctcta

SEQ ID NO: 4901 - RNA, 21 nt, synthetic construct
  source 1..21: mol_type = other RNA
ctgtatttatatttggggatc

SEQ ID NO: 4902 - RNA, 21 nt, synthetic construct
  source 1..21: mol_type = other RNA
ctgtcaccaaggacgttaaag

SEQ ID NO: 4903 - RNA, 21 nt, synthetic construct
  source 1..21: mol_type = other RNA
ctgtcatcttccgtgagggct

SEQ ID NO: 4904 - RNA, 21 nt, synthetic construct
  source 1..21: mol_type = other RNA
ctgtccggtgggaacgggctg

SEQ ID NO: 4905 - RNA, 21 nt, synthetic construct
  source 1..21: mol_type = other RNA
ctgtcctggcttttatttaaa

SEQ ID NO: 4906 - RNA, 21 nt, synthetic construct
  source 1..21: mol_type = other RNA
ctgtcgttccggttatgttgt

SEQ ID NO: 4907 - RNA, 21 nt, synthetic construct
  source 1..21: mol_type = other RNA
ctgtctccaaaaaaccaaaaa

SEQ ID NO: 4908 - RNA, 21 nt, synthetic construct
  source 1..21: mol_type = other RNA
ctgtctcccgggttcaggtga

SEQ ID NO: 4909 - RNA, 21 nt, synthetic construct
  source 1..21: mol_type = other RNA
ctgtcttctgctggttactga

SEQ ID NO: 4910 - RNA, 21 nt, synthetic construct
  source 1..21: mol_type = other RNA
ctgtgcaggtctcttcccaga

SEQ ID NO: 4911 - RNA, 21 nt, synthetic construct
  source 1..21: mol_type = other RNA
ctgtggaattaataggcatct

SEQ ID NO: 4912 - RNA, 21 nt, synthetic construct
  source 1..21: mol_type = other RNA
ctgtgtgtctccataaaagtc

SEQ ID NO: 4913 - RNA, 21 nt, synthetic construct
  source 1..21: mol_type = other RNA
ctgtgtttcaccaccggttct

SEQ ID NO: 4914 - RNA, 21 nt, synthetic construct
  source 1..21: mol_type = other RNA
ctgttatcagttcagttactc

SEQ ID NO: 4915 - RNA, 21 nt, synthetic construct
  source 1..21: mol_type = other RNA
ctgttcactaaggagtgagtg

SEQ ID NO: 4916 - RNA, 21 nt, synthetic construct
  source 1..21: mol_type = other RNA
ctgttctgtcttctgctggtt

SEQ ID NO: 4917 - RNA, 21 nt, synthetic construct
  source 1..21: mol_type = other RNA
ctgttgccaactttcaacatt

SEQ ID NO: 4918 - RNA, 21 nt, synthetic construct
  source 1..21: mol_type = other RNA
ctgttgctcctttcccccatt

SEQ ID NO: 4919 - RNA, 21 nt, synthetic construct
  source 1..21: mol_type = other RNA
ctgtttctgttctgtcttctg

SEQ ID NO: 4920 - RNA, 21 nt, synthetic construct
  source 1..21: mol_type = other RNA
cttaatgagccctgggaaatt

SEQ ID NO: 4921 - RNA, 21 nt, synthetic construct
  source 1..21: mol_type = other RNA
cttacacaacataaccggaac

SEQ ID NO: 4922 - RNA, 21 nt, synthetic construct
  source 1..21: mol_type = other RNA
cttactacctgggccagccaa

SEQ ID NO: 4923 - RNA, 21 nt, synthetic construct
  source 1..21: mol_type = other RNA
cttactgtatttatatttggg

SEQ ID NO: 4924 - RNA, 21 nt, synthetic construct
  source 1..21: mol_type = other RNA
cttagccctcacggaagatga

SEQ ID NO: 4925 - RNA, 21 nt, synthetic construct
  source 1..21: mol_type = other RNA
cttagtgaacagtgggaatgt

SEQ ID NO: 4926 - RNA, 21 nt, synthetic construct
  source 1..21: mol_type = other RNA
cttagtgtatacagatgaggg

SEQ ID NO: 4927 - RNA, 21 nt, synthetic construct
  source 1..21: mol_type = other RNA
cttagtgttcctttttccagg

SEQ ID NO: 4928 - RNA, 21 nt, synthetic construct
  source 1..21: mol_type = other RNA
cttatatgcaggctgtcgttc

SEQ ID NO: 4929 - RNA, 21 nt, synthetic construct
  source 1..21: mol_type = other RNA
cttattttctttctcctgtgt

SEQ ID NO: 4930 - RNA, 21 nt, synthetic construct
  source 1..21: mol_type = other RNA
cttcaagaaactggtcctttc

SEQ ID NO: 4931 - RNA, 21 nt, synthetic construct
  source 1..21: mol_type = other RNA
cttcactcctcgagtactgga

SEQ ID NO: 4932 - RNA, 21 nt, synthetic construct
  source 1..21: mol_type = other RNA
cttcagcactttctaaatttc

SEQ ID NO: 4933 - RNA, 21 nt, synthetic construct
  source 1..21: mol_type = other RNA
cttcagcctcattcactgtcc

SEQ ID NO: 4934 - RNA, 21 nt, synthetic construct
  source 1..21: mol_type = other RNA
cttcagtggccattacagttc

SEQ ID NO: 4935 - RNA, 21 nt, synthetic construct
  source 1..21: mol_type = other RNA
cttccaggttgatccaatgct

SEQ ID NO: 4936 - RNA, 21 nt, synthetic construct
  source 1..21: mol_type = other RNA
cttccattgtattgtctgaca

SEQ ID NO: 4937 - RNA, 21 nt, synthetic construct
  source 1..21: mol_type = other RNA
cttcccagacaccacaatgac

SEQ ID NO: 4938 - RNA, 21 nt, synthetic construct
  source 1..21: mol_type = other RNA
cttccggcccacctgcatccc

SEQ ID NO: 4939 - RNA, 21 nt, synthetic construct
  source 1..21: mol_type = other RNA
cttccgtgagggctaagcttt

SEQ ID NO: 4940 - RNA, 21 nt, synthetic construct
  source 1..21: mol_type = other RNA
cttcctgaaagctcatttaaa

SEQ ID NO: 4941 - RNA, 21 nt, synthetic construct
  source 1..21: mol_type = other RNA
cttctagagagcttagtgtat

SEQ ID NO: 4942 - RNA, 21 nt, synthetic construct
  source 1..21: mol_type = other RNA
cttctgctggttactgaactt

SEQ ID NO: 4943 - RNA, 21 nt, synthetic construct
  source 1..21: mol_type = other RNA
cttctggggtgagcattggat

SEQ ID NO: 4944 - RNA, 21 nt, synthetic construct
  source 1..21: mol_type = other RNA
cttgaagtccagtgtttccac

SEQ ID NO: 4945 - RNA, 21 nt, synthetic construct
  source 1..21: mol_type = other RNA
cttgatccccaaatataaata

SEQ ID NO: 4946 - RNA, 21 nt, synthetic construct
  source 1..21: mol_type = other RNA
cttgccactcactccttagtg

SEQ ID NO: 4947 - RNA, 21 nt, synthetic construct
  source 1..21: mol_type = other RNA
cttgccttggctggcccaggt

SEQ ID NO: 4948 - RNA, 21 nt, synthetic construct
  source 1..21: mol_type = other RNA
cttgctagcctactgctgact

SEQ ID NO: 4949 - RNA, 21 nt, synthetic construct
  source 1..21: mol_type = other RNA
cttgcttgtcaccacggtgct

SEQ ID NO: 4950 - RNA, 21 nt, synthetic construct
  source 1..21: mol_type = other RNA
cttggcagtcgatcggaatcg

SEQ ID NO: 4951 - RNA, 21 nt, synthetic construct
  source 1..21: mol_type = other RNA
cttggctatgaatgtcagaaa

SEQ ID NO: 4952 - RNA, 21 nt, synthetic construct
  source 1..21: mol_type = other RNA
cttggctggcccaggtagtaa

SEQ ID NO: 4953 - RNA, 21 nt, synthetic construct
  source 1..21: mol_type = other RNA
cttggtgacaggacttttatg

SEQ ID NO: 4954 - RNA, 21 nt, synthetic construct
  source 1..21: mol_type = other RNA
cttggttttatctcctgctgg

SEQ ID NO: 4955 - RNA, 21 nt, synthetic construct
  source 1..21: mol_type = other RNA
cttgtcaccacggtgctagga

SEQ ID NO: 4956 - RNA, 21 nt, synthetic construct
  source 1..21: mol_type = other RNA
cttgtcttgccactcactcct

SEQ ID NO: 4957 - RNA, 21 nt, synthetic construct
  source 1..21: mol_type = other RNA
cttgtggcaggggctgatttc

SEQ ID NO: 4958 - RNA, 21 nt, synthetic construct
  source 1..21: mol_type = other RNA
cttgttcaggtgacgctcttc

SEQ ID NO: 4959 - RNA, 21 nt, synthetic construct
  source 1..21: mol_type = other RNA
ctttaaataaaagccaggaca

SEQ ID NO: 4960 - RNA, 21 nt, synthetic construct
  source 1..21: mol_type = other RNA
ctttaacgtccttggtgacag

SEQ ID NO: 4961 - RNA, 21 nt, synthetic construct
  source 1..21: mol_type = other RNA
ctttatatagtcctacagtcc

SEQ ID NO: 4962 - RNA, 21 nt, synthetic construct
  source 1..21: mol_type = other RNA
ctttcaacattagtttgggcc

SEQ ID NO: 4963 - RNA, 21 nt, synthetic construct
  source 1..21: mol_type = other RNA
ctttcacatcattttgcgagg

SEQ ID NO: 4964 - RNA, 21 nt, synthetic construct
  source 1..21: mol_type = other RNA
ctttcaggaagttgctgagaa

SEQ ID NO: 4965 - RNA, 21 nt, synthetic construct
  source 1..21: mol_type = other RNA
ctttcagggctctcgtttcga

SEQ ID NO: 4966 - RNA, 21 nt, synthetic construct
  source 1..21: mol_type = other RNA
ctttcgaaacgagagccctga

SEQ ID NO: 4967 - RNA, 21 nt, synthetic construct
  source 1..21: mol_type = other RNA
ctttctaaatttcctgttgct

SEQ ID NO: 4968 - RNA, 21 nt, synthetic construct
  source 1..21: mol_type = other RNA
ctttctcctgtgtttcaccac

SEQ ID NO: 4969 - RNA, 21 nt, synthetic construct
  source 1..21: mol_type = other RNA
ctttctgacattcatagccaa

SEQ ID NO: 4970 - RNA, 21 nt, synthetic construct
  source 1..21: mol_type = other RNA
ctttgatccccttattttctt

SEQ ID NO: 4971 - RNA, 21 nt, synthetic construct
  source 1..21: mol_type = other RNA
cttttaaatgggtgaaaaatg

SEQ ID NO: 4972 - RNA, 21 nt, synthetic construct
  source 1..21: mol_type = other RNA
cttttatggagacacacaggt

SEQ ID NO: 4973 - RNA, 21 nt, synthetic construct
  source 1..21: mol_type = other RNA
cttttctcagattatttcctt

SEQ ID NO: 4974 - RNA, 21 nt, synthetic construct
  source 1..21: mol_type = other RNA
ctttttaaatgagctttcagg

SEQ ID NO: 4975 - RNA, 21 nt, synthetic construct
  source 1..21: mol_type = other RNA
ctttttcagttctgaaattct

SEQ ID NO: 4976 - RNA, 21 nt, synthetic construct
  source 1..21: mol_type = other RNA
gaaaaagaccagagatcccct

SEQ ID NO: 4977 - RNA, 21 nt, synthetic construct
  source 1..21: mol_type = other RNA
gaaaaaggaacactaaggaaa

SEQ ID NO: 4978 - RNA, 21 nt, synthetic construct
  source 1..21: mol_type = other RNA
gaaaactacatcaaatatctg

SEQ ID NO: 4979 - RNA, 21 nt, synthetic construct
  source 1..21: mol_type = other RNA
gaaaactcttttctcagatta

SEQ ID NO: 4980 - RNA, 21 nt, synthetic construct
  source 1..21: mol_type = other RNA
gaaaagagttttcaccctctg

SEQ ID NO: 4981 - RNA, 21 nt, synthetic construct
  source 1..21: mol_type = other RNA
gaaaataaggggatcaaagag

SEQ ID NO: 4982 - RNA, 21 nt, synthetic construct
  source 1..21: mol_type = other RNA
gaaaatcgacatttcccattt

SEQ ID NO: 4983 - RNA, 21 nt, synthetic construct
  source 1..21: mol_type = other RNA
gaaacacaggagaaagaaaat

SEQ ID NO: 4984 - RNA, 21 nt, synthetic construct
  source 1..21: mol_type = other RNA
gaaacactggacttcaagaaa

SEQ ID NO: 4985 - RNA, 21 nt, synthetic construct
  source 1..21: mol_type = other RNA
gaaacagtctgcttcagcact

SEQ ID NO: 4986 - RNA, 21 nt, synthetic construct
  source 1..21: mol_type = other RNA
gaaaccccacttccattgtat

SEQ ID NO: 4987 - RNA, 21 nt, synthetic construct
  source 1..21: mol_type = other RNA
gaaacgagagccctgaaagct

SEQ ID NO: 4988 - RNA, 21 nt, synthetic construct
  source 1..21: mol_type = other RNA
gaaactggtcctttcacatca

SEQ ID NO: 4989 - RNA, 21 nt, synthetic construct
  source 1..21: mol_type = other RNA
gaaagaaaataaggggatcaa

SEQ ID NO: 4990 - RNA, 21 nt, synthetic construct
  source 1..21: mol_type = other RNA
gaaagcattgcctctttgatc

SEQ ID NO: 4991 - RNA, 21 nt, synthetic construct
  source 1..21: mol_type = other RNA
gaaagctcatttaaaaaggga

SEQ ID NO: 4992 - RNA, 21 nt, synthetic construct
  source 1..21: mol_type = other RNA
gaaagcttagccctcacggaa

SEQ ID NO: 4993 - RNA, 21 nt, synthetic construct
  source 1..21: mol_type = other RNA
gaaaggaccagtttcttgaag

SEQ ID NO: 4994 - RNA, 21 nt, synthetic construct
  source 1..21: mol_type = other RNA
gaaaggagcaacaggaaattt

SEQ ID NO: 4995 - RNA, 21 nt, synthetic construct
  source 1..21: mol_type = other RNA
gaaagtcatgtgaacatttta

SEQ ID NO: 4996 - RNA, 21 nt, synthetic construct
  source 1..21: mol_type = other RNA
gaaagtgctgaagcagactgt

SEQ ID NO: 4997 - RNA, 21 nt, synthetic construct
  source 1..21: mol_type = other RNA
gaaagttggcaacagcccctt

SEQ ID NO: 4998 - RNA, 21 nt, synthetic construct
  source 1..21: mol_type = other RNA
gaaataatctgagaaaagagt

SEQ ID NO: 4999 - RNA, 21 nt, synthetic construct
  source 1..21: mol_type = other RNA
gaaatcagcccctgccacaag

SEQ ID NO: 5000 - RNA, 21 nt, synthetic construct
  source 1..21: mol_type = other RNA
gaaatccagttgactgtcatc

SEQ ID NO: 5001 - RNA, 21 nt, synthetic construct
  source 1..21: mol_type = other RNA
gaaatggggtggaatagggaa

SEQ ID NO: 5002 - RNA, 21 nt, synthetic construct
  source 1..21: mol_type = other RNA
gaaattagtgcagatgctggt

SEQ ID NO: 5003 - RNA, 21 nt, synthetic construct
  source 1..21: mol_type = other RNA
gaaattctacagctaggccag

SEQ ID NO: 5004 - RNA, 21 nt, synthetic construct
  source 1..21: mol_type = other RNA
gaaattgcagttctacagtag

SEQ ID NO: 5005 - RNA, 21 nt, synthetic construct
  source 1..21: mol_type = other RNA
gaaatttagaaagtgctgaag

SEQ ID NO: 5006 - RNA, 21 nt, synthetic construct
  source 1..21: mol_type = other RNA
gaacaaaacctgagggtcatt

SEQ ID NO: 5007 - RNA, 21 nt, synthetic construct
  source 1..21: mol_type = other RNA
gaacaagatgcagaaccatgg

SEQ ID NO: 5008 - RNA, 21 nt, synthetic construct
  source 1..21: mol_type = other RNA
gaacactaaggaaataatctg

SEQ ID NO: 5009 - RNA, 21 nt, synthetic construct
  source 1..21: mol_type = other RNA
gaacagaaacagtctgcttca

SEQ ID NO: 5010 - RNA, 21 nt, synthetic construct
  source 1..21: mol_type = other RNA
gaacagtgggaatgtccagag

SEQ ID NO: 5011 - RNA, 21 nt, synthetic construct
  source 1..21: mol_type = other RNA
gaacattttatgctacagagg

SEQ ID NO: 5012 - RNA, 21 nt, synthetic construct
  source 1..21: mol_type = other RNA
gaaccatggctatgagaaccc

SEQ ID NO: 5013 - RNA, 21 nt, synthetic construct
  source 1..21: mol_type = other RNA
gaaccccacctacaaatacct

SEQ ID NO: 5014 - RNA, 21 nt, synthetic construct
  source 1..21: mol_type = other RNA
gaaccggtggtgaaacacagg

SEQ ID NO: 5015 - RNA, 21 nt, synthetic construct
  source 1..21: mol_type = other RNA
gaacctgtggaattaataggc

SEQ ID NO: 5016 - RNA, 21 nt, synthetic construct
  source 1..21: mol_type = other RNA
gaacgacagcctgcatataag

SEQ ID NO: 5017 - RNA, 21 nt, synthetic construct
  source 1..21: mol_type = other RNA
gaacgggctgctggctgcatt

SEQ ID NO: 5018 - RNA, 21 nt, synthetic construct
  source 1..21: mol_type = other RNA
gaactgaaaaagaccagagat

SEQ ID NO: 5019 - RNA, 21 nt, synthetic construct
  source 1..21: mol_type = other RNA
gaactgataacagcagcatgt

SEQ ID NO: 5020 - RNA, 21 nt, synthetic construct
  source 1..21: mol_type = other RNA
gaactgcaatttccattcttt

SEQ ID NO: 5021 - RNA, 21 nt, synthetic construct
  source 1..21: mol_type = other RNA
gaactgtaatggccactgaag

SEQ ID NO: 5022 - RNA, 21 nt, synthetic construct
  source 1..21: mol_type = other RNA
gaacttgtcttgccactcact

SEQ ID NO: 5023 - RNA, 21 nt, synthetic construct
  source 1..21: mol_type = other RNA
gaagaacaaaacctgagggtc

SEQ ID NO: 5024 - RNA, 21 nt, synthetic construct
  source 1..21: mol_type = other RNA
gaagacagaacagaaacagtc

SEQ ID NO: 5025 - RNA, 21 nt, synthetic construct
  source 1..21: mol_type = other RNA
gaagacgctggaataaaatgc

SEQ ID NO: 5026 - RNA, 21 nt, synthetic construct
  source 1..21: mol_type = other RNA
gaagagacctgcacagggtgc

SEQ ID NO: 5027 - RNA, 21 nt, synthetic construct
  source 1..21: mol_type = other RNA
gaagagcgtcacctgaacaag

SEQ ID NO: 5028 - RNA, 21 nt, synthetic construct
  source 1..21: mol_type = other RNA
gaagagttgacttacacaaca

SEQ ID NO: 5029 - RNA, 21 nt, synthetic construct
  source 1..21: mol_type = other RNA
gaagatcccacgattccgatc

SEQ ID NO: 5030 - RNA, 21 nt, synthetic construct
  source 1..21: mol_type = other RNA
gaagatgacagtcaactggat

SEQ ID NO: 5031 - RNA, 21 nt, synthetic construct
  source 1..21: mol_type = other RNA
gaagatgcctattaattccac

SEQ ID NO: 5032 - RNA, 21 nt, synthetic construct
  source 1..21: mol_type = other RNA
gaagcacgtgagagaccctcg

SEQ ID NO: 5033 - RNA, 21 nt, synthetic construct
  source 1..21: mol_type = other RNA
gaagcagactgtttctgttct

SEQ ID NO: 5034 - RNA, 21 nt, synthetic construct
  source 1..21: mol_type = other RNA
gaagtccagtgtttccacggc

SEQ ID NO: 5035 - RNA, 21 nt, synthetic construct
  source 1..21: mol_type = other RNA
gaagtggggtttctgattaat

SEQ ID NO: 5036 - RNA, 21 nt, synthetic construct
  source 1..21: mol_type = other RNA
gaagttgctgagaaatggggt

SEQ ID NO: 5037 - RNA, 21 nt, synthetic construct
  source 1..21: mol_type = other RNA
gaataaaatgcctttaacgtc

SEQ ID NO: 5038 - RNA, 21 nt, synthetic construct
  source 1..21: mol_type = other RNA
gaatagggaactgtaatggcc

SEQ ID NO: 5039 - RNA, 21 nt, synthetic construct
  source 1..21: mol_type = other RNA
gaatccagtgagtaactgaac

SEQ ID NO: 5040 - RNA, 21 nt, synthetic construct
  source 1..21: mol_type = other RNA
gaatcgtgggatcttccggcc

SEQ ID NO: 5041 - RNA, 21 nt, synthetic construct
  source 1..21: mol_type = other RNA
gaatgaggctgaagagttgac

SEQ ID NO: 5042 - RNA, 21 nt, synthetic construct
  source 1..21: mol_type = other RNA
gaatggaaattgcagttctac

SEQ ID NO: 5043 - RNA, 21 nt, synthetic construct
  source 1..21: mol_type = other RNA
gaatgtcagaaagtcatgtga

SEQ ID NO: 5044 - RNA, 21 nt, synthetic construct
  source 1..21: mol_type = other RNA
gaatgtccagagtcccttgat

SEQ ID NO: 5045 - RNA, 21 nt, synthetic construct
  source 1..21: mol_type = other RNA
gaattaataggcatcttcact

SEQ ID NO: 5046 - RNA, 21 nt, synthetic construct
  source 1..21: mol_type = other RNA
gaatttcagaactgaaaaaga

SEQ ID NO: 5047 - RNA, 21 nt, synthetic construct
  source 1..21: mol_type = other RNA
gacaagcaaggctcggcgcca

SEQ ID NO: 5048 - RNA, 21 nt, synthetic construct
  source 1..21: mol_type = other RNA
gacaagttcagtaaccagcag

SEQ ID NO: 5049 - RNA, 21 nt, synthetic construct
  source 1..21: mol_type = other RNA
gacaatacaatggaagtgggg

SEQ ID NO: 5050 - RNA, 21 nt, synthetic construct
  source 1..21: mol_type = other RNA
gacacacaggtatccagccgt

SEQ ID NO: 5051 - RNA, 21 nt, synthetic construct
  source 1..21: mol_type = other RNA
gacacagcgagactgtctcca

SEQ ID NO: 5052 - RNA, 21 nt, synthetic construct
  source 1..21: mol_type = other RNA
gacacatgctctcaatatata

SEQ ID NO: 5053 - RNA, 21 nt, synthetic construct
  source 1..21: mol_type = other RNA
gacaccacaatgaccctcagg

SEQ ID NO: 5054 - RNA, 21 nt, synthetic construct
  source 1..21: mol_type = other RNA
gacaccctcatctgtatacac

SEQ ID NO: 5055 - RNA, 21 nt, synthetic construct
  source 1..21: mol_type = other RNA
gacagaacagaaacagtctgc

SEQ ID NO: 5056 - RNA, 21 nt, synthetic construct
  source 1..21: mol_type = other RNA
gacagaggttgcagtgcgctg

SEQ ID NO: 5057 - RNA, 21 nt, synthetic construct
  source 1..21: mol_type = other RNA
gacagcctgcatataagtcta

SEQ ID NO: 5058 - RNA, 21 nt, synthetic construct
  source 1..21: mol_type = other RNA
gacaggacttttatggagaca

SEQ ID NO: 5059 - RNA, 21 nt, synthetic construct
  source 1..21: mol_type = other RNA
gacaggccaaatgagaaccgg

SEQ ID NO: 5060 - RNA, 21 nt, synthetic construct
  source 1..21: mol_type = other RNA
gacagtcaactggatttccta

SEQ ID NO: 5061 - RNA, 21 nt, synthetic construct
  source 1..21: mol_type = other RNA
gacagtgaatgaggctgaaga

SEQ ID NO: 5062 - RNA, 21 nt, synthetic construct
  source 1..21: mol_type = other RNA
gacatcctgacctcctggact

SEQ ID NO: 5063 - RNA, 21 nt, synthetic construct
  source 1..21: mol_type = other RNA
gacatgctgctgttatcagtt

SEQ ID NO: 5064 - RNA, 21 nt, synthetic construct
  source 1..21: mol_type = other RNA
gacattcatagccaaggccca

SEQ ID NO: 5065 - RNA, 21 nt, synthetic construct
  source 1..21: mol_type = other RNA
gacattcccactgttcactaa

SEQ ID NO: 5066 - RNA, 21 nt, synthetic construct
  source 1..21: mol_type = other RNA
gaccaaatgcagccagcagcc

SEQ ID NO: 5067 - RNA, 21 nt, synthetic construct
  source 1..21: mol_type = other RNA
gaccagagatcccctggtccc

SEQ ID NO: 5068 - RNA, 21 nt, synthetic construct
  source 1..21: mol_type = other RNA
gaccagcatctgcactaattt

SEQ ID NO: 5069 - RNA, 21 nt, synthetic construct
  source 1..21: mol_type = other RNA
gaccaggggatctctggtctt

SEQ ID NO: 5070 - RNA, 21 nt, synthetic construct
  source 1..21: mol_type = other RNA
gaccagggtgatctcaaatcc

SEQ ID NO: 5071 - RNA, 21 nt, synthetic construct
  source 1..21: mol_type = other RNA
gaccagtttcttgaagtccag

SEQ ID NO: 5072 - RNA, 21 nt, synthetic construct
  source 1..21: mol_type = other RNA
gaccctcaggttttgttcttc

SEQ ID NO: 5073 - RNA, 21 nt, synthetic construct
  source 1..21: mol_type = other RNA
gaccctcgcaaaatgatgtga

SEQ ID NO: 5074 - RNA, 21 nt, synthetic construct
  source 1..21: mol_type = other RNA
gacctaggaatccagtgagta

SEQ ID NO: 5075 - RNA, 21 nt, synthetic construct
  source 1..21: mol_type = other RNA
gacctcctggactgtaggact

SEQ ID NO: 5076 - RNA, 21 nt, synthetic construct
  source 1..21: mol_type = other RNA
gacctgagccatttgctgcac

SEQ ID NO: 5077 - RNA, 21 nt, synthetic construct
  source 1..21: mol_type = other RNA
gacctgcacagggtgctggga

SEQ ID NO: 5078 - RNA, 21 nt, synthetic construct
  source 1..21: mol_type = other RNA
gaccttaatgagccctgggaa

SEQ ID NO: 5079 - RNA, 21 nt, synthetic construct
  source 1..21: mol_type = other RNA
gacgctcttctggggtgagca

SEQ ID NO: 5080 - RNA, 21 nt, synthetic construct
  source 1..21: mol_type = other RNA
gacgctggaataaaatgcctt

SEQ ID NO: 5081 - RNA, 21 nt, synthetic construct
  source 1..21: mol_type = other RNA
gacggtgggaccaggggatct

SEQ ID NO: 5082 - RNA, 21 nt, synthetic construct
  source 1..21: mol_type = other RNA
gacgttaaaggcattttattc

SEQ ID NO: 5083 - RNA, 21 nt, synthetic construct
  source 1..21: mol_type = other RNA
gactagctgggcgtggtggca

SEQ ID NO: 5084 - RNA, 21 nt, synthetic construct
  source 1..21: mol_type = other RNA
gactatataaagtactactgt

SEQ ID NO: 5085 - RNA, 21 nt, synthetic construct
  source 1..21: mol_type = other RNA
gactctggacattcccactgt

SEQ ID NO: 5086 - RNA, 21 nt, synthetic construct
  source 1..21: mol_type = other RNA
gactgccaagcagcagccgct

SEQ ID NO: 5087 - RNA, 21 nt, synthetic construct
  source 1..21: mol_type = other RNA
gactggcctagctgtagaatt

SEQ ID NO: 5088 - RNA, 21 nt, synthetic construct
  source 1..21: mol_type = other RNA
gactggcttgccttggctggc

SEQ ID NO: 5089 - RNA, 21 nt, synthetic construct
  source 1..21: mol_type = other RNA
gactgtaggactatataaagt

SEQ ID NO: 5090 - RNA, 21 nt, synthetic construct
  source 1..21: mol_type = other RNA
gactgtcatcttccgtgaggg

SEQ ID NO: 5091 - RNA, 21 nt, synthetic construct
  source 1..21: mol_type = other RNA
gactgtctccaaaaaaccaaa

SEQ ID NO: 5092 - RNA, 21 nt, synthetic construct
  source 1..21: mol_type = other RNA
gactgtttctgttctgtcttc

SEQ ID NO: 5093 - RNA, 21 nt, synthetic construct
  source 1..21: mol_type = other RNA
gacttacacaacataaccgga

SEQ ID NO: 5094 - RNA, 21 nt, synthetic construct
  source 1..21: mol_type = other RNA
gacttatatgcaggctgtcgt

SEQ ID NO: 5095 - RNA, 21 nt, synthetic construct
  source 1..21: mol_type = other RNA
gacttcaagaaactggtcctt

SEQ ID NO: 5096 - RNA, 21 nt, synthetic construct
  source 1..21: mol_type = other RNA
gactttctgacattcatagcc

SEQ ID NO: 5097 - RNA, 21 nt, synthetic construct
  source 1..21: mol_type = other RNA
gacttttatggagacacacag

SEQ ID NO: 5098 - RNA, 21 nt, synthetic construct
  source 1..21: mol_type = other RNA
gagaaaagagttttcaccctc

SEQ ID NO: 5099 - RNA, 21 nt, synthetic construct
  source 1..21: mol_type = other RNA
gagaaagaaaataaggggatc

SEQ ID NO: 5100 - RNA, 21 nt, synthetic construct
  source 1..21: mol_type = other RNA
gagaaatggggtggaataggg

SEQ ID NO: 5101 - RNA, 21 nt, synthetic construct
  source 1..21: mol_type = other RNA
gagaaccccacctacaaatac

SEQ ID NO: 5102 - RNA, 21 nt, synthetic construct
  source 1..21: mol_type = other RNA
gagaaccggtggtgaaacaca

SEQ ID NO: 5103 - RNA, 21 nt, synthetic construct
  source 1..21: mol_type = other RNA
gagacacacaggtatccagcc

SEQ ID NO: 5104 - RNA, 21 nt, synthetic construct
  source 1..21: mol_type = other RNA
gagaccctcgcaaaatgatgt

SEQ ID NO: 5105 - RNA, 21 nt, synthetic construct
  source 1..21: mol_type = other RNA
gagacctgagccatttgctgc

SEQ ID NO: 5106 - RNA, 21 nt, synthetic construct
  source 1..21: mol_type = other RNA
gagacctgcacagggtgctgg

SEQ ID NO: 5107 - RNA, 21 nt, synthetic construct
  source 1..21: mol_type = other RNA
gagactggcctagctgtagaa

SEQ ID NO: 5108 - RNA, 21 nt, synthetic construct
  source 1..21: mol_type = other RNA
gagactgtctccaaaaaacca

SEQ ID NO: 5109 - RNA, 21 nt, synthetic construct
  source 1..21: mol_type = other RNA
gagagaccctcgcaaaatgat

SEQ ID NO: 5110 - RNA, 21 nt, synthetic construct
  source 1..21: mol_type = other RNA
gagagcatgtgtcagacaata

SEQ ID NO: 5111 - RNA, 21 nt, synthetic construct
  source 1..21: mol_type = other RNA
gagagccctgaaagcttagcc

SEQ ID NO: 5112 - RNA, 21 nt, synthetic construct
  source 1..21: mol_type = other RNA
gagagcttagtgtatacagat

SEQ ID NO: 5113 - RNA, 21 nt, synthetic construct
  source 1..21: mol_type = other RNA
gagataaaaccaagtaactgg

SEQ ID NO: 5114 - RNA, 21 nt, synthetic construct
  source 1..21: mol_type = other RNA
gagataggatttccccatatt

SEQ ID NO: 5115 - RNA, 21 nt, synthetic construct
  source 1..21: mol_type = other RNA
gagatcaccctggtcaatatg

SEQ ID NO: 5116 - RNA, 21 nt, synthetic construct
  source 1..21: mol_type = other RNA
gagatcccctggtcccaccgt

SEQ ID NO: 5117 - RNA, 21 nt, synthetic construct
  source 1..21: mol_type = other RNA
gagcaacaggaaatttagaaa

SEQ ID NO: 5118 - RNA, 21 nt, synthetic construct
  source 1..21: mol_type = other RNA
gagcagatgcagatttaggtg

SEQ ID NO: 5119 - RNA, 21 nt, synthetic construct
  source 1..21: mol_type = other RNA
gagcatgtgtcagacaataca

SEQ ID NO: 5120 - RNA, 21 nt, synthetic construct
  source 1..21: mol_type = other RNA
gagcattggatcaacctggaa

SEQ ID NO: 5121 - RNA, 21 nt, synthetic construct
  source 1..21: mol_type = other RNA
gagccatttgctgcacaatcc

SEQ ID NO: 5122 - RNA, 21 nt, synthetic construct
  source 1..21: mol_type = other RNA
gagccctgaaagcttagccct

SEQ ID NO: 5123 - RNA, 21 nt, synthetic construct
  source 1..21: mol_type = other RNA
gagccctgggaaattagtgca

SEQ ID NO: 5124 - RNA, 21 nt, synthetic construct
  source 1..21: mol_type = other RNA
gagccttgcttgtcaccacgg

SEQ ID NO: 5125 - RNA, 21 nt, synthetic construct
  source 1..21: mol_type = other RNA
gagcgtcacctgaacaagatg

SEQ ID NO: 5126 - RNA, 21 nt, synthetic construct
  source 1..21: mol_type = other RNA
gagctactgcacctggccagt

SEQ ID NO: 5127 - RNA, 21 nt, synthetic construct
  source 1..21: mol_type = other RNA
gagcttagtgtatacagatga

SEQ ID NO: 5128 - RNA, 21 nt, synthetic construct
  source 1..21: mol_type = other RNA
gagctttcaggaagttgctga

SEQ ID NO: 5129 - RNA, 21 nt, synthetic construct
  source 1..21: mol_type = other RNA
gaggaccaaatgcagccagca

SEQ ID NO: 5130 - RNA, 21 nt, synthetic construct
  source 1..21: mol_type = other RNA
gaggagtgaagatgcctatta

SEQ ID NO: 5131 - RNA, 21 nt, synthetic construct
  source 1..21: mol_type = other RNA
gaggcaatgctttcgaaacga

SEQ ID NO: 5132 - RNA, 21 nt, synthetic construct
  source 1..21: mol_type = other RNA
gaggctgaagagttgacttac

SEQ ID NO: 5133 - RNA, 21 nt, synthetic construct
  source 1..21: mol_type = other RNA
gagggatgcaggtgggccgga

SEQ ID NO: 5134 - RNA, 21 nt, synthetic construct
  source 1..21: mol_type = other RNA
gagggctaagctttcagggct

SEQ ID NO: 5135 - RNA, 21 nt, synthetic construct
  source 1..21: mol_type = other RNA
gagggtcattgtggtgtctgg

SEQ ID NO: 5136 - RNA, 21 nt, synthetic construct
  source 1..21: mol_type = other RNA
gagggtctctcacgtgcttca

SEQ ID NO: 5137 - RNA, 21 nt, synthetic construct
  source 1..21: mol_type = other RNA
gagggtgaaaactcttttctc

SEQ ID NO: 5138 - RNA, 21 nt, synthetic construct
  source 1..21: mol_type = other RNA
gaggtcaggatgtcagacgca

SEQ ID NO: 5139 - RNA, 21 nt, synthetic construct
  source 1..21: mol_type = other RNA
gaggtcaggatttgagatcac

SEQ ID NO: 5140 - RNA, 21 nt, synthetic construct
  source 1..21: mol_type = other RNA
gagtaactgaactgataacag

SEQ ID NO: 5141 - RNA, 21 nt, synthetic construct
  source 1..21: mol_type = other RNA
gagtactggacatgctgctgt

SEQ ID NO: 5142 - RNA, 21 nt, synthetic construct
  source 1..21: mol_type = other RNA
gagtcccttgatccccaaata

SEQ ID NO: 5143 - RNA, 21 nt, synthetic construct
  source 1..21: mol_type = other RNA
gagtgaagatgcctattaatt

SEQ ID NO: 5144 - RNA, 21 nt, synthetic construct
  source 1..21: mol_type = other RNA
gagtgagtggcaagacaagtt

SEQ ID NO: 5145 - RNA, 21 nt, synthetic construct
  source 1..21: mol_type = other RNA
gagtggcaagacaagttcagt

SEQ ID NO: 5146 - RNA, 21 nt, synthetic construct
  source 1..21: mol_type = other RNA
gagttgacttacacaacataa

SEQ ID NO: 5147 - RNA, 21 nt, synthetic construct
  source 1..21: mol_type = other RNA
gagttttcaccctctgtagca

SEQ ID NO: 5148 - RNA, 21 nt, synthetic construct
  source 1..21: mol_type = other RNA
gataaaaccaagtaactggcc

SEQ ID NO: 5149 - RNA, 21 nt, synthetic construct
  source 1..21: mol_type = other RNA
gataacagcagcatgtccagt

SEQ ID NO: 5150 - RNA, 21 nt, synthetic construct
  source 1..21: mol_type = other RNA
gatacctgtgtgtctccataa

SEQ ID NO: 5151 - RNA, 21 nt, synthetic construct
  source 1..21: mol_type = other RNA
gataggatttccccatattga

SEQ ID NO: 5152 - RNA, 21 nt, synthetic construct
  source 1..21: mol_type = other RNA
gatcaaagaggcaatgctttc

SEQ ID NO: 5153 - RNA, 21 nt, synthetic construct
  source 1..21: mol_type = other RNA
gatcaacctggaagaacaaaa

SEQ ID NO: 5154 - RNA, 21 nt, synthetic construct
  source 1..21: mol_type = other RNA
gatcaagggactctggacatt

SEQ ID NO: 5155 - RNA, 21 nt, synthetic construct
  source 1..21: mol_type = other RNA
gatcaccctggtcaatatggg

SEQ ID NO: 5156 - RNA, 21 nt, synthetic construct
  source 1..21: mol_type = other RNA
gatccaatgctcaccccagaa

SEQ ID NO: 5157 - RNA, 21 nt, synthetic construct
  source 1..21: mol_type = other RNA
gatcccacgattccgatcgac

SEQ ID NO: 5158 - RNA, 21 nt, synthetic construct
  source 1..21: mol_type = other RNA
gatccccaaatataaatacag

SEQ ID NO: 5159 - RNA, 21 nt, synthetic construct
  source 1..21: mol_type = other RNA
gatcccctggtcccaccgtct

SEQ ID NO: 5160 - RNA, 21 nt, synthetic construct
  source 1..21: mol_type = other RNA
gatccccttattttctttctc

SEQ ID NO: 5161 - RNA, 21 nt, synthetic construct
  source 1..21: mol_type = other RNA
gatcgactgccaagcagcagc

SEQ ID NO: 5162 - RNA, 21 nt, synthetic construct
  source 1..21: mol_type = other RNA
gatcggaatcgtgggatcttc

SEQ ID NO: 5163 - RNA, 21 nt, synthetic construct
  source 1..21: mol_type = other RNA
gatctattgcagatatttgat

SEQ ID NO: 5164 - RNA, 21 nt, synthetic construct
  source 1..21: mol_type = other RNA
gatctctggtctttttcagtt

SEQ ID NO: 5165 - RNA, 21 nt, synthetic construct
  source 1..21: mol_type = other RNA
gatcttccggcccacctgcat

SEQ ID NO: 5166 - RNA, 21 nt, synthetic construct
  source 1..21: mol_type = other RNA
gatgacagtcaactggatttc

SEQ ID NO: 5167 - RNA, 21 nt, synthetic construct
  source 1..21: mol_type = other RNA
gatgcagaaccatggctatga

SEQ ID NO: 5168 - RNA, 21 nt, synthetic construct
  source 1..21: mol_type = other RNA
gatgcagatttaggtggcagg

SEQ ID NO: 5169 - RNA, 21 nt, synthetic construct
  source 1..21: mol_type = other RNA
gatgcaggtgggccggaagat

SEQ ID NO: 5170 - RNA, 21 nt, synthetic construct
  source 1..21: mol_type = other RNA
gatgcctattaattccacagg

SEQ ID NO: 5171 - RNA, 21 nt, synthetic construct
  source 1..21: mol_type = other RNA
gatgctggtcttagttatttg

SEQ ID NO: 5172 - RNA, 21 nt, synthetic construct
  source 1..21: mol_type = other RNA
gatgtcagacgcagcccctgg

SEQ ID NO: 5173 - RNA, 21 nt, synthetic construct
  source 1..21: mol_type = other RNA
gatgtgaaaggaccagtttct

SEQ ID NO: 5174 - RNA, 21 nt, synthetic construct
  source 1..21: mol_type = other RNA
gattatttccttagtgttcct

SEQ ID NO: 5175 - RNA, 21 nt, synthetic construct
  source 1..21: mol_type = other RNA
gattccgatcgactgccaagc

SEQ ID NO: 5176 - RNA, 21 nt, synthetic construct
  source 1..21: mol_type = other RNA
gattcctaggtcgtgtttttg

SEQ ID NO: 5177 - RNA, 21 nt, synthetic construct
  source 1..21: mol_type = other RNA
gattcttgtgcctcagcctcc

SEQ ID NO: 5178 - RNA, 21 nt, synthetic construct
  source 1..21: mol_type = other RNA
gattgtgcagcaaatggctca

SEQ ID NO: 5179 - RNA, 21 nt, synthetic construct
  source 1..21: mol_type = other RNA
gatttaggtggcagggagcgc

SEQ ID NO: 5180 - RNA, 21 nt, synthetic construct
  source 1..21: mol_type = other RNA
gatttccaaaaacacgaccta

SEQ ID NO: 5181 - RNA, 21 nt, synthetic construct
  source 1..21: mol_type = other RNA
gatttccccatattgaccagg

SEQ ID NO: 5182 - RNA, 21 nt, synthetic construct
  source 1..21: mol_type = other RNA
gatttcctagcaccgtggtga

SEQ ID NO: 5183 - RNA, 21 nt, synthetic construct
  source 1..21: mol_type = other RNA
gatttgagatcaccctggtca

SEQ ID NO: 5184 - RNA, 21 nt, synthetic construct
  source 1..21: mol_type = other RNA
gcaaaatgatgtgaaaggacc

SEQ ID NO: 5185 - RNA, 21 nt, synthetic construct
  source 1..21: mol_type = other RNA
gcaaatggctcaggtctccca

SEQ ID NO: 5186 - RNA, 21 nt, synthetic construct
  source 1..21: mol_type = other RNA
gcaacagccccttgtggcagg

SEQ ID NO: 5187 - RNA, 21 nt, synthetic construct
  source 1..21: mol_type = other RNA
gcaacaggaaatttagaaagt

SEQ ID NO: 5188 - RNA, 21 nt, synthetic construct
  source 1..21: mol_type = other RNA
gcaacttcctgaaagctcatt

SEQ ID NO: 5189 - RNA, 21 nt, synthetic construct
  source 1..21: mol_type = other RNA
gcaagacaagttcagtaacca

SEQ ID NO: 5190 - RNA, 21 nt, synthetic construct
  source 1..21: mol_type = other RNA
gcaagcagacggtgggaccag

SEQ ID NO: 5191 - RNA, 21 nt, synthetic construct
  source 1..21: mol_type = other RNA
gcaagccagtcagcagtaggc

SEQ ID NO: 5192 - RNA, 21 nt, synthetic construct
  source 1..21: mol_type = other RNA
gcaaggctcggcgccactgct

SEQ ID NO: 5193 - RNA, 21 nt, synthetic construct
  source 1..21: mol_type = other RNA
gcaatgctttcgaaacgagag

SEQ ID NO: 5194 - RNA, 21 nt, synthetic construct
  source 1..21: mol_type = other RNA
gcacaagaatcacctgaaccc

SEQ ID NO: 5195 - RNA, 21 nt, synthetic construct
  source 1..21: mol_type = other RNA
gcacaatcccctgaggaccaa

SEQ ID NO: 5196 - RNA, 21 nt, synthetic construct
  source 1..21: mol_type = other RNA
gcacacacctgtagtctcagc

SEQ ID NO: 5197 - RNA, 21 nt, synthetic construct
  source 1..21: mol_type = other RNA
gcacagggtgctgggagacct

SEQ ID NO: 5198 - RNA, 21 nt, synthetic construct
  source 1..21: mol_type = other RNA
gcaccctgtgcaggtctcttc

SEQ ID NO: 5199 - RNA, 21 nt, synthetic construct
  source 1..21: mol_type = other RNA
gcaccgtggtgacaagcaagg

SEQ ID NO: 5200 - RNA, 21 nt, synthetic construct
  source 1..21: mol_type = other RNA
gcacctggccagttacttggt

SEQ ID NO: 5201 - RNA, 21 nt, synthetic construct
  source 1..21: mol_type = other RNA
gcacgtgagagaccctcgcaa

SEQ ID NO: 5202 - RNA, 21 nt, synthetic construct
  source 1..21: mol_type = other RNA
gcactaatttcccagggctca

SEQ ID NO: 5203 - RNA, 21 nt, synthetic construct
  source 1..21: mol_type = other RNA
gcactttctaaatttcctgtt

SEQ ID NO: 5204 - RNA, 21 nt, synthetic construct
  source 1..21: mol_type = other RNA
gcagaaccatggctatgagaa

SEQ ID NO: 5205 - RNA, 21 nt, synthetic construct
  source 1..21: mol_type = other RNA
gcagaagacagaacagaaaca

SEQ ID NO: 5206 - RNA, 21 nt, synthetic construct
  source 1..21: mol_type = other RNA
gcagacggtgggaccagggga

SEQ ID NO: 5207 - RNA, 21 nt, synthetic construct
  source 1..21: mol_type = other RNA
gcagactgtttctgttctgtc

SEQ ID NO: 5208 - RNA, 21 nt, synthetic construct
  source 1..21: mol_type = other RNA
gcagatatttgatgtagtttt

SEQ ID NO: 5209 - RNA, 21 nt, synthetic construct
  source 1..21: mol_type = other RNA
gcagatgcagatttaggtggc

SEQ ID NO: 5210 - RNA, 21 nt, synthetic construct
  source 1..21: mol_type = other RNA
gcagatgctggtcttagttat

SEQ ID NO: 5211 - RNA, 21 nt, synthetic construct
  source 1..21: mol_type = other RNA
gcagatttaggtggcagggag

SEQ ID NO: 5212 - RNA, 21 nt, synthetic construct
  source 1..21: mol_type = other RNA
gcagcaaatggctcaggtctc

SEQ ID NO: 5213 - RNA, 21 nt, synthetic construct
  source 1..21: mol_type = other RNA
gcagcatgtccagtactcgag

SEQ ID NO: 5214 - RNA, 21 nt, synthetic construct
  source 1..21: mol_type = other RNA
gcagccagcagcccgttccca

SEQ ID NO: 5215 - RNA, 21 nt, synthetic construct
  source 1..21: mol_type = other RNA
gcagcccgttcccaccggaca

SEQ ID NO: 5216 - RNA, 21 nt, synthetic construct
  source 1..21: mol_type = other RNA
gcagccctggcggagggatgc

SEQ ID NO: 5217 - RNA, 21 nt, synthetic construct
  source 1..21: mol_type = other RNA
gcagcggctgctgcttggcag

SEQ ID NO: 5218 - RNA, 21 nt, synthetic construct
  source 1..21: mol_type = other RNA
gcaggagataaaaccaagtaa

SEQ ID NO: 5219 - RNA, 21 nt, synthetic construct
  source 1..21: mol_type = other RNA
gcaggctgtcgttccggttat

SEQ ID NO: 5220 - RNA, 21 nt, synthetic construct
  source 1..21: mol_type = other RNA
gcaggggctgatttccaaaaa

SEQ ID NO: 5221 - RNA, 21 nt, synthetic construct
  source 1..21: mol_type = other RNA
gcaggtctcttcccagacacc

SEQ ID NO: 5222 - RNA, 21 nt, synthetic construct
  source 1..21: mol_type = other RNA
gcaggtgggccggaagatccc

SEQ ID NO: 5223 - RNA, 21 nt, synthetic construct
  source 1..21: mol_type = other RNA
gcagtaggctagcaagcagac

SEQ ID NO: 5224 - RNA, 21 nt, synthetic construct
  source 1..21: mol_type = other RNA
gcagtattccctttttaaatg

SEQ ID NO: 5225 - RNA, 21 nt, synthetic construct
  source 1..21: mol_type = other RNA
gcagtcgatcggaatcgtggg

SEQ ID NO: 5226 - RNA, 21 nt, synthetic construct
  source 1..21: mol_type = other RNA
gcagtggcgccgagccttgct

SEQ ID NO: 5227 - RNA, 21 nt, synthetic construct
  source 1..21: mol_type = other RNA
gcagttctacagtagtacttt

SEQ ID NO: 5228 - RNA, 21 nt, synthetic construct
  source 1..21: mol_type = other RNA
gcataaaatgttcacatgact

SEQ ID NO: 5229 - RNA, 21 nt, synthetic construct
  source 1..21: mol_type = other RNA
gcatccctccgccagggctgc

SEQ ID NO: 5230 - RNA, 21 nt, synthetic construct
  source 1..21: mol_type = other RNA
gcatctgcactaatttcccag

SEQ ID NO: 5231 - RNA, 21 nt, synthetic construct
  source 1..21: mol_type = other RNA
gcatctgctccaggtatttgt

SEQ ID NO: 5232 - RNA, 21 nt, synthetic construct
  source 1..21: mol_type = other RNA
gcatcttcactcctcgagtac

SEQ ID NO: 5233 - RNA, 21 nt, synthetic construct
  source 1..21: mol_type = other RNA
gcatcttgttcaggtgacgct

SEQ ID NO: 5234 - RNA, 21 nt, synthetic construct
  source 1..21: mol_type = other RNA
gcatgagctactgcacctggc

SEQ ID NO: 5235 - RNA, 21 nt, synthetic construct
  source 1..21: mol_type = other RNA
gcatgtccagtactcgaggag

SEQ ID NO: 5236 - RNA, 21 nt, synthetic construct
  source 1..21: mol_type = other RNA
gcatgtgtcagacaatacaat

SEQ ID NO: 5237 - RNA, 21 nt, synthetic construct
  source 1..21: mol_type = other RNA
gcattgcctctttgatcccct

SEQ ID NO: 5238 - RNA, 21 nt, synthetic construct
  source 1..21: mol_type = other RNA
gcattggatcaacctggaaga

SEQ ID NO: 5239 - RNA, 21 nt, synthetic construct
  source 1..21: mol_type = other RNA
gcatttggtcctcaggggatt

SEQ ID NO: 5240 - RNA, 21 nt, synthetic construct
  source 1..21: mol_type = other RNA
gcattttattccagcgtcttc

SEQ ID NO: 5241 - RNA, 21 nt, synthetic construct
  source 1..21: mol_type = other RNA
gccaaatgagaaccggtggtg

SEQ ID NO: 5242 - RNA, 21 nt, synthetic construct
  source 1..21: mol_type = other RNA
gccaactttcaacattagttt

SEQ ID NO: 5243 - RNA, 21 nt, synthetic construct
  source 1..21: mol_type = other RNA
gccaagcagcagccgctgcca

SEQ ID NO: 5244 - RNA, 21 nt, synthetic construct
  source 1..21: mol_type = other RNA
gccaaggcaagccagtcagca

SEQ ID NO: 5245 - RNA, 21 nt, synthetic construct
  source 1..21: mol_type = other RNA
gccaaggcccaaactaatgtt

SEQ ID NO: 5246 - RNA, 21 nt, synthetic construct
  source 1..21: mol_type = other RNA
gccacaaggggctgttgccaa

SEQ ID NO: 5247 - RNA, 21 nt, synthetic construct
  source 1..21: mol_type = other RNA
gccaccacgcccagctagtct

SEQ ID NO: 5248 - RNA, 21 nt, synthetic construct
  source 1..21: mol_type = other RNA
gccacctaaatctgcatctgc

SEQ ID NO: 5249 - RNA, 21 nt, synthetic construct
  source 1..21: mol_type = other RNA
gccactcactccttagtgaac

SEQ ID NO: 5250 - RNA, 21 nt, synthetic construct
  source 1..21: mol_type = other RNA
gccactgaagcacgtgagaga

SEQ ID NO: 5251 - RNA, 21 nt, synthetic construct
  source 1..21: mol_type = other RNA
gccactgcttactacctgggc

SEQ ID NO: 5252 - RNA, 21 nt, synthetic construct
  source 1..21: mol_type = other RNA
gccagcagcccgttcccaccg

SEQ ID NO: 5253 - RNA, 21 nt, synthetic construct
  source 1..21: mol_type = other RNA
gccagccaaggcaagccagtc

SEQ ID NO: 5254 - RNA, 21 nt, synthetic construct
  source 1..21: mol_type = other RNA
gccaggacagtgaatgaggct

SEQ ID NO: 5255 - RNA, 21 nt, synthetic construct
  source 1..21: mol_type = other RNA
gccaggggctgcgtctgacat

SEQ ID NO: 5256 - RNA, 21 nt, synthetic construct
  source 1..21: mol_type = other RNA
gccagtcagcagtaggctagc

SEQ ID NO: 5257 - RNA, 21 nt, synthetic construct
  source 1..21: mol_type = other RNA
gccagtctccagcaggagata

SEQ ID NO: 5258 - RNA, 21 nt, synthetic construct
  source 1..21: mol_type = other RNA
gccagttacttggttttatct

SEQ ID NO: 5259 - RNA, 21 nt, synthetic construct
  source 1..21: mol_type = other RNA
gccatggttctgcatcttgtt

SEQ ID NO: 5260 - RNA, 21 nt, synthetic construct
  source 1..21: mol_type = other RNA
gccattacagttccctattcc

SEQ ID NO: 5261 - RNA, 21 nt, synthetic construct
  source 1..21: mol_type = other RNA
gccatttgctgcacaatcccc

SEQ ID NO: 5262 - RNA, 21 nt, synthetic construct
  source 1..21: mol_type = other RNA
gcccaaactaatgttgaaagt

SEQ ID NO: 5263 - RNA, 21 nt, synthetic construct
  source 1..21: mol_type = other RNA
gcccacctgcatccctccgcc

SEQ ID NO: 5264 - RNA, 21 nt, synthetic construct
  source 1..21: mol_type = other RNA
gcccagctagtctttgtattt

SEQ ID NO: 5265 - RNA, 21 nt, synthetic construct
  source 1..21: mol_type = other RNA
gcccaggtagtaagcagtggc

SEQ ID NO: 5266 - RNA, 21 nt, synthetic construct
  source 1..21: mol_type = other RNA
gcccctgccacaaggggctgt

SEQ ID NO: 5267 - RNA, 21 nt, synthetic construct
  source 1..21: mol_type = other RNA
gccccttgtggcaggggctga

SEQ ID NO: 5268 - RNA, 21 nt, synthetic construct
  source 1..21: mol_type = other RNA
gcccgttcccaccggacaggc

SEQ ID NO: 5269 - RNA, 21 nt, synthetic construct
  source 1..21: mol_type = other RNA
gccctcacggaagatgacagt

SEQ ID NO: 5270 - RNA, 21 nt, synthetic construct
  source 1..21: mol_type = other RNA
gccctgaaagcttagccctca

SEQ ID NO: 5271 - RNA, 21 nt, synthetic construct
  source 1..21: mol_type = other RNA
gccctggcggagggatgcagg

SEQ ID NO: 5272 - RNA, 21 nt, synthetic construct
  source 1..21: mol_type = other RNA
gccctgggaaattagtgcaga

SEQ ID NO: 5273 - RNA, 21 nt, synthetic construct
  source 1..21: mol_type = other RNA
gccgagccttgcttgtcacca

SEQ ID NO: 5274 - RNA, 21 nt, synthetic construct
  source 1..21: mol_type = other RNA
gccgcgctccctgccacctaa

SEQ ID NO: 5275 - RNA, 21 nt, synthetic construct
  source 1..21: mol_type = other RNA
gccggaagatcccacgattcc

SEQ ID NO: 5276 - RNA, 21 nt, synthetic construct
  source 1..21: mol_type = other RNA
gccgtggaaacactggacttc

SEQ ID NO: 5277 - RNA, 21 nt, synthetic construct
  source 1..21: mol_type = other RNA
gcctactgctgactggcttgc

SEQ ID NO: 5278 - RNA, 21 nt, synthetic construct
  source 1..21: mol_type = other RNA
gcctagctgtagaatttcaga

SEQ ID NO: 5279 - RNA, 21 nt, synthetic construct
  source 1..21: mol_type = other RNA
gcctattaattccacaggttc

SEQ ID NO: 5280 - RNA, 21 nt, synthetic construct
  source 1..21: mol_type = other RNA
gcctcagcctcccacctagct

SEQ ID NO: 5281 - RNA, 21 nt, synthetic construct
  source 1..21: mol_type = other RNA
gcctcattcactgtcctggct

SEQ ID NO: 5282 - RNA, 21 nt, synthetic construct
  source 1..21: mol_type = other RNA
gcctcccacctagctgagact

SEQ ID NO: 5283 - RNA, 21 nt, synthetic construct
  source 1..21: mol_type = other RNA
gcctctttgatccccttattt

SEQ ID NO: 5284 - RNA, 21 nt, synthetic construct
  source 1..21: mol_type = other RNA
gcctgcatataagtctattat

SEQ ID NO: 5285 - RNA, 21 nt, synthetic construct
  source 1..21: mol_type = other RNA
gcctgtccggtgggaacgggc

SEQ ID NO: 5286 - RNA, 21 nt, synthetic construct
  source 1..21: mol_type = other RNA
gccttgcttgtcaccacggtg

SEQ ID NO: 5287 - RNA, 21 nt, synthetic construct
  source 1..21: mol_type = other RNA
gccttggctatgaatgtcaga

SEQ ID NO: 5288 - RNA, 21 nt, synthetic construct
  source 1..21: mol_type = other RNA
gccttggctggcccaggtagt

SEQ ID NO: 5289 - RNA, 21 nt, synthetic construct
  source 1..21: mol_type = other RNA
gcctttaacgtccttggtgac

SEQ ID NO: 5290 - RNA, 21 nt, synthetic construct
  source 1..21: mol_type = other RNA
gcgacacagcgagactgtctc

SEQ ID NO: 5291 - RNA, 21 nt, synthetic construct
  source 1..21: mol_type = other RNA
gcgagactgtctccaaaaaac

SEQ ID NO: 5292 - RNA, 21 nt, synthetic construct
  source 1..21: mol_type = other RNA
gcgagggtctctcacgtgctt

SEQ ID NO: 5293 - RNA, 21 nt, synthetic construct
  source 1..21: mol_type = other RNA
gcgatctcagcgcactgcaac

SEQ ID NO: 5294 - RNA, 21 nt, synthetic construct
  source 1..21: mol_type = other RNA
gcgccactgcttactacctgg

SEQ ID NO: 5295 - RNA, 21 nt, synthetic construct
  source 1..21: mol_type = other RNA
gcgccgagccttgcttgtcac

SEQ ID NO: 5296 - RNA, 21 nt, synthetic construct
  source 1..21: mol_type = other RNA
gcgctccctgccacctaaatc

SEQ ID NO: 5297 - RNA, 21 nt, synthetic construct
  source 1..21: mol_type = other RNA
gcggacaccctcatctgtata

SEQ ID NO: 5298 - RNA, 21 nt, synthetic construct
  source 1..21: mol_type = other RNA
gcggagggatgcaggtgggcc

SEQ ID NO: 5299 - RNA, 21 nt, synthetic construct
  source 1..21: mol_type = other RNA
gcggctgctgcttggcagtcg

SEQ ID NO: 5300 - RNA, 21 nt, synthetic construct
  source 1..21: mol_type = other RNA
gcgtcacctgaacaagatgca

SEQ ID NO: 5301 - RNA, 21 nt, synthetic construct
  source 1..21: mol_type = other RNA
gcgtctgacatcctgacctcc

SEQ ID NO: 5302 - RNA, 21 nt, synthetic construct
  source 1..21: mol_type = other RNA
gcgtcttctagagagcttagt

SEQ ID NO: 5303 - RNA, 21 nt, synthetic construct
  source 1..21: mol_type = other RNA
gctaagctttcagggctctcg

SEQ ID NO: 5304 - RNA, 21 nt, synthetic construct
  source 1..21: mol_type = other RNA
gctacagagggtgaaaactct

SEQ ID NO: 5305 - RNA, 21 nt, synthetic construct
  source 1..21: mol_type = other RNA
gctactgcacctggccagtta

SEQ ID NO: 5306 - RNA, 21 nt, synthetic construct
  source 1..21: mol_type = other RNA
gctagcaagcagacggtggga

SEQ ID NO: 5307 - RNA, 21 nt, synthetic construct
  source 1..21: mol_type = other RNA
gctagcctactgctgactggc

SEQ ID NO: 5308 - RNA, 21 nt, synthetic construct
  source 1..21: mol_type = other RNA
gctaggaaatccagttgactg

SEQ ID NO: 5309 - RNA, 21 nt, synthetic construct
  source 1..21: mol_type = other RNA
gctaggccagtctccagcagg

SEQ ID NO: 5310 - RNA, 21 nt, synthetic construct
  source 1..21: mol_type = other RNA
gctatgaatgtcagaaagtca

SEQ ID NO: 5311 - RNA, 21 nt, synthetic construct
  source 1..21: mol_type = other RNA
gctatgagaaccccacctaca

SEQ ID NO: 5312 - RNA, 21 nt, synthetic construct
  source 1..21: mol_type = other RNA
gctcaccccagaagagcgtca

SEQ ID NO: 5313 - RNA, 21 nt, synthetic construct
  source 1..21: mol_type = other RNA
gctcaggtctcccagcaccct

SEQ ID NO: 5314 - RNA, 21 nt, synthetic construct
  source 1..21: mol_type = other RNA
gctcattaaggtccttactgt

SEQ ID NO: 5315 - RNA, 21 nt, synthetic construct
  source 1..21: mol_type = other RNA
gctcatttaaaaagggaatac

SEQ ID NO: 5316 - RNA, 21 nt, synthetic construct
  source 1..21: mol_type = other RNA
gctccaggtatttgtaggtgg

SEQ ID NO: 5317 - RNA, 21 nt, synthetic construct
  source 1..21: mol_type = other RNA
gctccctgccacctaaatctg

SEQ ID NO: 5318 - RNA, 21 nt, synthetic construct
  source 1..21: mol_type = other RNA
gctcctttcccccattaaaaa

SEQ ID NO: 5319 - RNA, 21 nt, synthetic construct
  source 1..21: mol_type = other RNA
gctcggcgccactgcttacta

SEQ ID NO: 5320 - RNA, 21 nt, synthetic construct
  source 1..21: mol_type = other RNA
gctctcgtttcgaaagcattg

SEQ ID NO: 5321 - RNA, 21 nt, synthetic construct
  source 1..21: mol_type = other RNA
gctctctagaagacgctggaa

SEQ ID NO: 5322 - RNA, 21 nt, synthetic construct
  source 1..21: mol_type = other RNA
gctcttctggggtgagcattg

SEQ ID NO: 5323 - RNA, 21 nt, synthetic construct
  source 1..21: mol_type = other RNA
gctgaagagttgacttacaca

SEQ ID NO: 5324 - RNA, 21 nt, synthetic construct
  source 1..21: mol_type = other RNA
gctgaagcagactgtttctgt

SEQ ID NO: 5325 - RNA, 21 nt, synthetic construct
  source 1..21: mol_type = other RNA
gctgactggcttgccttggct

SEQ ID NO: 5326 - RNA, 21 nt, synthetic construct
  source 1..21: mol_type = other RNA
gctgagaaatggggtggaata

SEQ ID NO: 5327 - RNA, 21 nt, synthetic construct
  source 1..21: mol_type = other RNA
gctgatttccaaaaacacgac

SEQ ID NO: 5328 - RNA, 21 nt, synthetic construct
  source 1..21: mol_type = other RNA
gctgcacaatcccctgaggac

SEQ ID NO: 5329 - RNA, 21 nt, synthetic construct
  source 1..21: mol_type = other RNA
gctgcatttggtcctcagggg

SEQ ID NO: 5330 - RNA, 21 nt, synthetic construct
  source 1..21: mol_type = other RNA
gctgccaggggctgcgtctga

SEQ ID NO: 5331 - RNA, 21 nt, synthetic construct
  source 1..21: mol_type = other RNA
gctgcgtctgacatcctgacc

SEQ ID NO: 5332 - RNA, 21 nt, synthetic construct
  source 1..21: mol_type = other RNA
gctgctgcttggcagtcgatc

SEQ ID NO: 5333 - RNA, 21 nt, synthetic construct
  source 1..21: mol_type = other RNA
gctgctggctgcatttggtcc

SEQ ID NO: 5334 - RNA, 21 nt, synthetic construct
  source 1..21: mol_type = other RNA
gctgctgttatcagttcagtt

SEQ ID NO: 5335 - RNA, 21 nt, synthetic construct
  source 1..21: mol_type = other RNA
gctgcttggcagtcgatcgga

SEQ ID NO: 5336 - RNA, 21 nt, synthetic construct
  source 1..21: mol_type = other RNA
gctggaataaaatgcctttaa

SEQ ID NO: 5337 - RNA, 21 nt, synthetic construct
  source 1..21: mol_type = other RNA
gctggagactggcctagctgt

SEQ ID NO: 5338 - RNA, 21 nt, synthetic construct
  source 1..21: mol_type = other RNA
gctggatacctgtgtgtctcc

SEQ ID NO: 5339 - RNA, 21 nt, synthetic construct
  source 1..21: mol_type = other RNA
gctggcccaggtagtaagcag

SEQ ID NO: 5340 - RNA, 21 nt, synthetic construct
  source 1..21: mol_type = other RNA
gctggctgcatttggtcctca

SEQ ID NO: 5341 - RNA, 21 nt, synthetic construct
  source 1..21: mol_type = other RNA
gctgggagacctgagccattt

SEQ ID NO: 5342 - RNA, 21 nt, synthetic construct
  source 1..21: mol_type = other RNA
gctgggttgggggtgggaacc

SEQ ID NO: 5343 - RNA, 21 nt, synthetic construct
  source 1..21: mol_type = other RNA
gctggtcttagttatttgtgt

SEQ ID NO: 5344 - RNA, 21 nt, synthetic construct
  source 1..21: mol_type = other RNA
gctggttactgaacttgtctt

SEQ ID NO: 5345 - RNA, 21 nt, synthetic construct
  source 1..21: mol_type = other RNA
gctgtagaatttcagaactga

SEQ ID NO: 5346 - RNA, 21 nt, synthetic construct
  source 1..21: mol_type = other RNA
gctgtcgttccggttatgttg

SEQ ID NO: 5347 - RNA, 21 nt, synthetic construct
  source 1..21: mol_type = other RNA
gctgttatcagttcagttact

SEQ ID NO: 5348 - RNA, 21 nt, synthetic construct
  source 1..21: mol_type = other RNA
gctgttgccaactttcaacat

SEQ ID NO: 5349 - RNA, 21 nt, synthetic construct
  source 1..21: mol_type = other RNA
gcttactacctgggccagcca

SEQ ID NO: 5350 - RNA, 21 nt, synthetic construct
  source 1..21: mol_type = other RNA
gcttagccctcacggaagatg

SEQ ID NO: 5351 - RNA, 21 nt, synthetic construct
  source 1..21: mol_type = other RNA
gcttagtgtatacagatgagg

SEQ ID NO: 5352 - RNA, 21 nt, synthetic construct
  source 1..21: mol_type = other RNA
gcttcagcactttctaaattt

SEQ ID NO: 5353 - RNA, 21 nt, synthetic construct
  source 1..21: mol_type = other RNA
gcttcagtggccattacagtt

SEQ ID NO: 5354 - RNA, 21 nt, synthetic construct
  source 1..21: mol_type = other RNA
gcttgccttggctggcccagg

SEQ ID NO: 5355 - RNA, 21 nt, synthetic construct
  source 1..21: mol_type = other RNA
gcttgctagcctactgctgac

SEQ ID NO: 5356 - RNA, 21 nt, synthetic construct
  source 1..21: mol_type = other RNA
gcttggcagtcgatcggaatc

SEQ ID NO: 5357 - RNA, 21 nt, synthetic construct
  source 1..21: mol_type = other RNA
gcttgtcaccacggtgctagg

SEQ ID NO: 5358 - RNA, 21 nt, synthetic construct
  source 1..21: mol_type = other RNA
gctttcaggaagttgctgaga

SEQ ID NO: 5359 - RNA, 21 nt, synthetic construct
  source 1..21: mol_type = other RNA
gctttcagggctctcgtttcg

SEQ ID NO: 5360 - RNA, 21 nt, synthetic construct
  source 1..21: mol_type = other RNA
gctttcgaaacgagagccctg

SEQ ID NO: 5361 - RNA, 21 nt, synthetic construct
  source 1..21: mol_type = other RNA
ggaaaaaggaacactaaggaa

SEQ ID NO: 5362 - RNA, 21 nt, synthetic construct
  source 1..21: mol_type = other RNA
ggaaacactggacttcaagaa

SEQ ID NO: 5363 - RNA, 21 nt, synthetic construct
  source 1..21: mol_type = other RNA
ggaaaggagcaacaggaaatt

SEQ ID NO: 5364 - RNA, 21 nt, synthetic construct
  source 1..21: mol_type = other RNA
ggaaataatctgagaaaagag

SEQ ID NO: 5365 - RNA, 21 nt, synthetic construct
  source 1..21: mol_type = other RNA
ggaaatcagcccctgccacaa

SEQ ID NO: 5366 - RNA, 21 nt, synthetic construct
  source 1..21: mol_type = other RNA
ggaaatccagttgactgtcat

SEQ ID NO: 5367 - RNA, 21 nt, synthetic construct
  source 1..21: mol_type = other RNA
ggaaatcctatctctaataaa

SEQ ID NO: 5368 - RNA, 21 nt, synthetic construct
  source 1..21: mol_type = other RNA
ggaaatgtcgattttcaataa

SEQ ID NO: 5369 - RNA, 21 nt, synthetic construct
  source 1..21: mol_type = other RNA
ggaaattagtgcagatgctgg

SEQ ID NO: 5370 - RNA, 21 nt, synthetic construct
  source 1..21: mol_type = other RNA
ggaaattgcagttctacagta

SEQ ID NO: 5371 - RNA, 21 nt, synthetic construct
  source 1..21: mol_type = other RNA
ggaaatttagaaagtgctgaa

SEQ ID NO: 5372 - RNA, 21 nt, synthetic construct
  source 1..21: mol_type = other RNA
ggaacactaaggaaataatct

SEQ ID NO: 5373 - RNA, 21 nt, synthetic construct
  source 1..21: mol_type = other RNA
ggaacctgtggaattaatagg

SEQ ID NO: 5374 - RNA, 21 nt, synthetic construct
  source 1..21: mol_type = other RNA
ggaacgacagcctgcatataa

SEQ ID NO: 5375 - RNA, 21 nt, synthetic construct
  source 1..21: mol_type = other RNA
ggaacgggctgctggctgcat

SEQ ID NO: 5376 - RNA, 21 nt, synthetic construct
  source 1..21: mol_type = other RNA
ggaactgtaatggccactgaa

SEQ ID NO: 5377 - RNA, 21 nt, synthetic construct
  source 1..21: mol_type = other RNA
ggaagaacaaaacctgagggt

SEQ ID NO: 5378 - RNA, 21 nt, synthetic construct
  source 1..21: mol_type = other RNA
ggaagagacctgcacagggtg

SEQ ID NO: 5379 - RNA, 21 nt, synthetic construct
  source 1..21: mol_type = other RNA
ggaagatcccacgattccgat

SEQ ID NO: 5380 - RNA, 21 nt, synthetic construct
  source 1..21: mol_type = other RNA
ggaagatgacagtcaactgga

SEQ ID NO: 5381 - RNA, 21 nt, synthetic construct
  source 1..21: mol_type = other RNA
ggaagtggggtttctgattaa

SEQ ID NO: 5382 - RNA, 21 nt, synthetic construct
  source 1..21: mol_type = other RNA
ggaagttgctgagaaatgggg

SEQ ID NO: 5383 - RNA, 21 nt, synthetic construct
  source 1..21: mol_type = other RNA
ggaataaaatgcctttaacgt

SEQ ID NO: 5384 - RNA, 21 nt, synthetic construct
  source 1..21: mol_type = other RNA
ggaatagggaactgtaatggc

SEQ ID NO: 5385 - RNA, 21 nt, synthetic construct
  source 1..21: mol_type = other RNA
ggaatccagtgagtaactgaa

SEQ ID NO: 5386 - RNA, 21 nt, synthetic construct
  source 1..21: mol_type = other RNA
ggaatcgtgggatcttccggc

SEQ ID NO: 5387 - RNA, 21 nt, synthetic construct
  source 1..21: mol_type = other RNA
ggaatgtccagagtcccttga

SEQ ID NO: 5388 - RNA, 21 nt, synthetic construct
  source 1..21: mol_type = other RNA
ggaattaataggcatcttcac

SEQ ID NO: 5389 - RNA, 21 nt, synthetic construct
  source 1..21: mol_type = other RNA
ggacaccctcatctgtataca

SEQ ID NO: 5390 - RNA, 21 nt, synthetic construct
  source 1..21: mol_type = other RNA
ggacaggccaaatgagaaccg

SEQ ID NO: 5391 - RNA, 21 nt, synthetic construct
  source 1..21: mol_type = other RNA
ggacagtgaatgaggctgaag

SEQ ID NO: 5392 - RNA, 21 nt, synthetic construct
  source 1..21: mol_type = other RNA
ggacatgctgctgttatcagt

SEQ ID NO: 5393 - RNA, 21 nt, synthetic construct
  source 1..21: mol_type = other RNA
ggacattcccactgttcacta

SEQ ID NO: 5394 - RNA, 21 nt, synthetic construct
  source 1..21: mol_type = other RNA
ggaccaaatgcagccagcagc

SEQ ID NO: 5395 - RNA, 21 nt, synthetic construct
  source 1..21: mol_type = other RNA
ggaccaggggatctctggtct

SEQ ID NO: 5396 - RNA, 21 nt, synthetic construct
  source 1..21: mol_type = other RNA
ggaccagtttcttgaagtcca

SEQ ID NO: 5397 - RNA, 21 nt, synthetic construct
  source 1..21: mol_type = other RNA
ggaccttaatgagccctggga

SEQ ID NO: 5398 - RNA, 21 nt, synthetic construct
  source 1..21: mol_type = other RNA
ggacgttaaaggcattttatt

SEQ ID NO: 5399 - RNA, 21 nt, synthetic construct
  source 1..21: mol_type = other RNA
ggactatataaagtactactg

SEQ ID NO: 5400 - RNA, 21 nt, synthetic construct
  source 1..21: mol_type = other RNA
ggactctggacattcccactg

SEQ ID NO: 5401 - RNA, 21 nt, synthetic construct
  source 1..21: mol_type = other RNA
ggactgtaggactatataaag

SEQ ID NO: 5402 - RNA, 21 nt, synthetic construct
  source 1..21: mol_type = other RNA
ggacttcaagaaactggtcct

SEQ ID NO: 5403 - RNA, 21 nt, synthetic construct
  source 1..21: mol_type = other RNA
ggacttttatggagacacaca

SEQ ID NO: 5404 - RNA, 21 nt, synthetic construct
  source 1..21: mol_type = other RNA
ggagaaagaaaataaggggat

SEQ ID NO: 5405 - RNA, 21 nt, synthetic construct
  source 1..21: mol_type = other RNA
ggagacacacaggtatccagc

SEQ ID NO: 5406 - RNA, 21 nt, synthetic construct
  source 1..21: mol_type = other RNA
ggagacagtctcgctgtgtcg

SEQ ID NO: 5407 - RNA, 21 nt, synthetic construct
  source 1..21: mol_type = other RNA
ggagacctgagccatttgctg

SEQ ID NO: 5408 - RNA, 21 nt, synthetic construct
  source 1..21: mol_type = other RNA
ggagactggcctagctgtaga

SEQ ID NO: 5409 - RNA, 21 nt, synthetic construct
  source 1..21: mol_type = other RNA
ggagataaaaccaagtaactg

SEQ ID NO: 5410 - RNA, 21 nt, synthetic construct
  source 1..21: mol_type = other RNA
ggagcaacaggaaatttagaa

SEQ ID NO: 5411 - RNA, 21 nt, synthetic construct
  source 1..21: mol_type = other RNA
ggagcagatgcagatttaggt

SEQ ID NO: 5412 - RNA, 21 nt, synthetic construct
  source 1..21: mol_type = other RNA
ggagggatgcaggtgggccgg

SEQ ID NO: 5413 - RNA, 21 nt, synthetic construct
  source 1..21: mol_type = other RNA
ggaggtcaggatgtcagacgc

SEQ ID NO: 5414 - RNA, 21 nt, synthetic construct
  source 1..21: mol_type = other RNA
ggagtgaagatgcctattaat

SEQ ID NO: 5415 - RNA, 21 nt, synthetic construct
  source 1..21: mol_type = other RNA
ggagtgagtggcaagacaagt

SEQ ID NO: 5416 - RNA, 21 nt, synthetic construct
  source 1..21: mol_type = other RNA
ggatacctgtgtgtctccata

SEQ ID NO: 5417 - RNA, 21 nt, synthetic construct
  source 1..21: mol_type = other RNA
ggatcaaagaggcaatgcttt

SEQ ID NO: 5418 - RNA, 21 nt, synthetic construct
  source 1..21: mol_type = other RNA
ggatcaacctggaagaacaaa

SEQ ID NO: 5419 - RNA, 21 nt, synthetic construct
  source 1..21: mol_type = other RNA
ggatcaagggactctggacat

SEQ ID NO: 5420 - RNA, 21 nt, synthetic construct
  source 1..21: mol_type = other RNA
ggatctctggtctttttcagt

SEQ ID NO: 5421 - RNA, 21 nt, synthetic construct
  source 1..21: mol_type = other RNA
ggatcttccggcccacctgca

SEQ ID NO: 5422 - RNA, 21 nt, synthetic construct
  source 1..21: mol_type = other RNA
ggatgcaggtgggccggaaga

SEQ ID NO: 5423 - RNA, 21 nt, synthetic construct
  source 1..21: mol_type = other RNA
ggatgtcagacgcagcccctg

SEQ ID NO: 5424 - RNA, 21 nt, synthetic construct
  source 1..21: mol_type = other RNA
ggattcctaggtcgtgttttt

SEQ ID NO: 5425 - RNA, 21 nt, synthetic construct
  source 1..21: mol_type = other RNA
ggattgtgcagcaaatggctc

SEQ ID NO: 5426 - RNA, 21 nt, synthetic construct
  source 1..21: mol_type = other RNA
ggatttccccatattgaccag

SEQ ID NO: 5427 - RNA, 21 nt, synthetic construct
  source 1..21: mol_type = other RNA
ggatttcctagcaccgtggtg

SEQ ID NO: 5428 - RNA, 21 nt, synthetic construct
  source 1..21: mol_type = other RNA
ggatttgagatcaccctggtc

SEQ ID NO: 5429 - RNA, 21 nt, synthetic construct
  source 1..21: mol_type = other RNA
ggcaacagccccttgtggcag

SEQ ID NO: 5430 - RNA, 21 nt, synthetic construct
  source 1..21: mol_type = other RNA
ggcaagacaagttcagtaacc

SEQ ID NO: 5431 - RNA, 21 nt, synthetic construct
  source 1..21: mol_type = other RNA
ggcaagccagtcagcagtagg

SEQ ID NO: 5432 - RNA, 21 nt, synthetic construct
  source 1..21: mol_type = other RNA
ggcaatgctttcgaaacgaga

SEQ ID NO: 5433 - RNA, 21 nt, synthetic construct
  source 1..21: mol_type = other RNA
ggcacacacctgtagtctcag

SEQ ID NO: 5434 - RNA, 21 nt, synthetic construct
  source 1..21: mol_type = other RNA
ggcagccctggcggagggatg

SEQ ID NO: 5435 - RNA, 21 nt, synthetic construct
  source 1..21: mol_type = other RNA
ggcagcggctgctgcttggca

SEQ ID NO: 5436 - RNA, 21 nt, synthetic construct
  source 1..21: mol_type = other RNA
ggcaggggctgatttccaaaa

SEQ ID NO: 5437 - RNA, 21 nt, synthetic construct
  source 1..21: mol_type = other RNA
ggcagtattccctttttaaat

SEQ ID NO: 5438 - RNA, 21 nt, synthetic construct
  source 1..21: mol_type = other RNA
ggcagtcgatcggaatcgtgg

SEQ ID NO: 5439 - RNA, 21 nt, synthetic construct
  source 1..21: mol_type = other RNA
ggcatcttcactcctcgagta

SEQ ID NO: 5440 - RNA, 21 nt, synthetic construct
  source 1..21: mol_type = other RNA
ggcattttattccagcgtctt

SEQ ID NO: 5441 - RNA, 21 nt, synthetic construct
  source 1..21: mol_type = other RNA
ggccaaatgagaaccggtggt

SEQ ID NO: 5442 - RNA, 21 nt, synthetic construct
  source 1..21: mol_type = other RNA
ggccactgaagcacgtgagag

SEQ ID NO: 5443 - RNA, 21 nt, synthetic construct
  source 1..21: mol_type = other RNA
ggccagccaaggcaagccagt

SEQ ID NO: 5444 - RNA, 21 nt, synthetic construct
  source 1..21: mol_type = other RNA
ggccagtctccagcaggagat

SEQ ID NO: 5445 - RNA, 21 nt, synthetic construct
  source 1..21: mol_type = other RNA
ggccagttacttggttttatc

SEQ ID NO: 5446 - RNA, 21 nt, synthetic construct
  source 1..21: mol_type = other RNA
ggccattacagttccctattc

SEQ ID NO: 5447 - RNA, 21 nt, synthetic construct
  source 1..21: mol_type = other RNA
ggcccaaactaatgttgaaag

SEQ ID NO: 5448 - RNA, 21 nt, synthetic construct
  source 1..21: mol_type = other RNA
ggcccacctgcatccctccgc

SEQ ID NO: 5449 - RNA, 21 nt, synthetic construct
  source 1..21: mol_type = other RNA
ggcccaggtagtaagcagtgg

SEQ ID NO: 5450 - RNA, 21 nt, synthetic construct
  source 1..21: mol_type = other RNA
ggccggaagatcccacgattc

SEQ ID NO: 5451 - RNA, 21 nt, synthetic construct
  source 1..21: mol_type = other RNA
ggcctagctgtagaatttcag

SEQ ID NO: 5452 - RNA, 21 nt, synthetic construct
  source 1..21: mol_type = other RNA
ggcctgtccggtgggaacggg

SEQ ID NO: 5453 - RNA, 21 nt, synthetic construct
  source 1..21: mol_type = other RNA
ggccttggctatgaatgtcag

SEQ ID NO: 5454 - RNA, 21 nt, synthetic construct
  source 1..21: mol_type = other RNA
ggcgacacagcgagactgtct

SEQ ID NO: 5455 - RNA, 21 nt, synthetic construct
  source 1..21: mol_type = other RNA
ggcgccactgcttactacctg

SEQ ID NO: 5456 - RNA, 21 nt, synthetic construct
  source 1..21: mol_type = other RNA
ggcgccgagccttgcttgtca

SEQ ID NO: 5457 - RNA, 21 nt, synthetic construct
  source 1..21: mol_type = other RNA
ggcggagggatgcaggtgggc

SEQ ID NO: 5458 - RNA, 21 nt, synthetic construct
  source 1..21: mol_type = other RNA
ggctaagctttcagggctctc

SEQ ID NO: 5459 - RNA, 21 nt, synthetic construct
  source 1..21: mol_type = other RNA
ggctagcaagcagacggtggg

SEQ ID NO: 5460 - RNA, 21 nt, synthetic construct
  source 1..21: mol_type = other RNA
ggctatgaatgtcagaaagtc

SEQ ID NO: 5461 - RNA, 21 nt, synthetic construct
  source 1..21: mol_type = other RNA
ggctatgagaaccccacctac

SEQ ID NO: 5462 - RNA, 21 nt, synthetic construct
  source 1..21: mol_type = other RNA
ggctcaggtctcccagcaccc

SEQ ID NO: 5463 - RNA, 21 nt, synthetic construct
  source 1..21: mol_type = other RNA
ggctcattaaggtccttactg

SEQ ID NO: 5464 - RNA, 21 nt, synthetic construct
  source 1..21: mol_type = other RNA
ggctcggcgccactgcttact

SEQ ID NO: 5465 - RNA, 21 nt, synthetic construct
  source 1..21: mol_type = other RNA
ggctctcgtttcgaaagcatt

SEQ ID NO: 5466 - RNA, 21 nt, synthetic construct
  source 1..21: mol_type = other RNA
ggctgaagagttgacttacac

SEQ ID NO: 5467 - RNA, 21 nt, synthetic construct
  source 1..21: mol_type = other RNA
ggctgatttccaaaaacacga

SEQ ID NO: 5468 - RNA, 21 nt, synthetic construct
  source 1..21: mol_type = other RNA
ggctgcatttggtcctcaggg

SEQ ID NO: 5469 - RNA, 21 nt, synthetic construct
  source 1..21: mol_type = other RNA
ggctgcgtctgacatcctgac

SEQ ID NO: 5470 - RNA, 21 nt, synthetic construct
  source 1..21: mol_type = other RNA
ggctgctgcttggcagtcgat

SEQ ID NO: 5471 - RNA, 21 nt, synthetic construct
  source 1..21: mol_type = other RNA
ggctgctggctgcatttggtc

SEQ ID NO: 5472 - RNA, 21 nt, synthetic construct
  source 1..21: mol_type = other RNA
ggctggatacctgtgtgtctc

SEQ ID NO: 5473 - RNA, 21 nt, synthetic construct
  source 1..21: mol_type = other RNA
ggctggcccaggtagtaagca

SEQ ID NO: 5474 - RNA, 21 nt, synthetic construct
  source 1..21: mol_type = other RNA
ggctgggttgggggtgggaac

SEQ ID NO: 5475 - RNA, 21 nt, synthetic construct
  source 1..21: mol_type = other RNA
ggctgtcgttccggttatgtt

SEQ ID NO: 5476 - RNA, 21 nt, synthetic construct
  source 1..21: mol_type = other RNA
ggctgttgccaactttcaaca

SEQ ID NO: 5477 - RNA, 21 nt, synthetic construct
  source 1..21: mol_type = other RNA
ggcttgccttggctggcccag

SEQ ID NO: 5478 - RNA, 21 nt, synthetic construct
  source 1..21: mol_type = other RNA
gggaaaggagcaacaggaaat

SEQ ID NO: 5479 - RNA, 21 nt, synthetic construct
  source 1..21: mol_type = other RNA
gggaaatcctatctctaataa

SEQ ID NO: 5480 - RNA, 21 nt, synthetic construct
  source 1..21: mol_type = other RNA
gggaaatgtcgattttcaata

SEQ ID NO: 5481 - RNA, 21 nt, synthetic construct
  source 1..21: mol_type = other RNA
gggaaattagtgcagatgctg

SEQ ID NO: 5482 - RNA, 21 nt, synthetic construct
  source 1..21: mol_type = other RNA
gggaacctgtggaattaatag

SEQ ID NO: 5483 - RNA, 21 nt, synthetic construct
  source 1..21: mol_type = other RNA
gggaacgggctgctggctgca

SEQ ID NO: 5484 - RNA, 21 nt, synthetic construct
  source 1..21: mol_type = other RNA
gggaactgtaatggccactga

SEQ ID NO: 5485 - RNA, 21 nt, synthetic construct
  source 1..21: mol_type = other RNA
gggaagagacctgcacagggt

SEQ ID NO: 5486 - RNA, 21 nt, synthetic construct
  source 1..21: mol_type = other RNA
gggaatgtccagagtcccttg

SEQ ID NO: 5487 - RNA, 21 nt, synthetic construct
  source 1..21: mol_type = other RNA
gggaccaggggatctctggtc

SEQ ID NO: 5488 - RNA, 21 nt, synthetic construct
  source 1..21: mol_type = other RNA
gggactctggacattcccact

SEQ ID NO: 5489 - RNA, 21 nt, synthetic construct
  source 1..21: mol_type = other RNA
gggagacagaggttgcagtgc

SEQ ID NO: 5490 - RNA, 21 nt, synthetic construct
  source 1..21: mol_type = other RNA
gggagacctgagccatttgct

SEQ ID NO: 5491 - RNA, 21 nt, synthetic construct
  source 1..21: mol_type = other RNA
gggatcaaagaggcaatgctt

SEQ ID NO: 5492 - RNA, 21 nt, synthetic construct
  source 1..21: mol_type = other RNA
gggatcaagggactctggaca

SEQ ID NO: 5493 - RNA, 21 nt, synthetic construct
  source 1..21: mol_type = other RNA
gggatctctggtctttttcag

SEQ ID NO: 5494 - RNA, 21 nt, synthetic construct
  source 1..21: mol_type = other RNA
gggatcttccggcccacctgc

SEQ ID NO: 5495 - RNA, 21 nt, synthetic construct
  source 1..21: mol_type = other RNA
gggatgcaggtgggccggaag

SEQ ID NO: 5496 - RNA, 21 nt, synthetic construct
  source 1..21: mol_type = other RNA
gggattgtgcagcaaatggct

SEQ ID NO: 5497 - RNA, 21 nt, synthetic construct
  source 1..21: mol_type = other RNA
gggccagccaaggcaagccag

SEQ ID NO: 5498 - RNA, 21 nt, synthetic construct
  source 1..21: mol_type = other RNA
gggccggaagatcccacgatt

SEQ ID NO: 5499 - RNA, 21 nt, synthetic construct
  source 1..21: mol_type = other RNA
gggccttggctatgaatgtca

SEQ ID NO: 5500 - RNA, 21 nt, synthetic construct
  source 1..21: mol_type = other RNA
gggcgacacagcgagactgtc

SEQ ID NO: 5501 - RNA, 21 nt, synthetic construct
  source 1..21: mol_type = other RNA
gggctaagctttcagggctct

SEQ ID NO: 5502 - RNA, 21 nt, synthetic construct
  source 1..21: mol_type = other RNA
gggctcattaaggtccttact

SEQ ID NO: 5503 - RNA, 21 nt, synthetic construct
  source 1..21: mol_type = other RNA
gggctctcgtttcgaaagcat

SEQ ID NO: 5504 - RNA, 21 nt, synthetic construct
  source 1..21: mol_type = other RNA
gggctgatttccaaaaacacg

SEQ ID NO: 5505 - RNA, 21 nt, synthetic construct
  source 1..21: mol_type = other RNA
gggctgcgtctgacatcctga

SEQ ID NO: 5506 - RNA, 21 nt, synthetic construct
  source 1..21: mol_type = other RNA
gggctgctggctgcatttggt

SEQ ID NO: 5507 - RNA, 21 nt, synthetic construct
  source 1..21: mol_type = other RNA
gggctgggttgggggtgggaa

SEQ ID NO: 5508 - RNA, 21 nt, synthetic construct
  source 1..21: mol_type = other RNA
gggctgttgccaactttcaac

SEQ ID NO: 5509 - RNA, 21 nt, synthetic construct
  source 1..21: mol_type = other RNA
ggggaaaggagcaacaggaaa

SEQ ID NO: 5510 - RNA, 21 nt, synthetic construct
  source 1..21: mol_type = other RNA
ggggaaatcctatctctaata

SEQ ID NO: 5511 - RNA, 21 nt, synthetic construct
  source 1..21: mol_type = other RNA
ggggatcaaagaggcaatgct

SEQ ID NO: 5512 - RNA, 21 nt, synthetic construct
  source 1..21: mol_type = other RNA
ggggatcaagggactctggac

SEQ ID NO: 5513 - RNA, 21 nt, synthetic construct
  source 1..21: mol_type = other RNA
ggggatctctggtctttttca

SEQ ID NO: 5514 - RNA, 21 nt, synthetic construct
  source 1..21: mol_type = other RNA
ggggattgtgcagcaaatggc

SEQ ID NO: 5515 - RNA, 21 nt, synthetic construct
  source 1..21: mol_type = other RNA
ggggctgatttccaaaaacac

SEQ ID NO: 5516 - RNA, 21 nt, synthetic construct
  source 1..21: mol_type = other RNA
ggggctgcgtctgacatcctg

SEQ ID NO: 5517 - RNA, 21 nt, synthetic construct
  source 1..21: mol_type = other RNA
ggggctgttgccaactttcaa

SEQ ID NO: 5518 - RNA, 21 nt, synthetic construct
  source 1..21: mol_type = other RNA
gggggaaaggagcaacaggaa

SEQ ID NO: 5519 - RNA, 21 nt, synthetic construct
  source 1..21: mol_type = other RNA
gggggtgggaacctgtggaat

SEQ ID NO: 5520 - RNA, 21 nt, synthetic construct
  source 1..21: mol_type = other RNA
ggggtgagcattggatcaacc

SEQ ID NO: 5521 - RNA, 21 nt, synthetic construct
  source 1..21: mol_type = other RNA
ggggtggaatagggaactgta

SEQ ID NO: 5522 - RNA, 21 nt, synthetic construct
  source 1..21: mol_type = other RNA
ggggtgggaacctgtggaatt

SEQ ID NO: 5523 - RNA, 21 nt, synthetic construct
  source 1..21: mol_type = other RNA
ggggttctcatagccatggtt

SEQ ID NO: 5524 - RNA, 21 nt, synthetic construct
  source 1..21: mol_type = other RNA
ggggtttctgattaatttaaa

SEQ ID NO: 5525 - RNA, 21 nt, synthetic construct
  source 1..21: mol_type = other RNA
gggtcattgtggtgtctggga

SEQ ID NO: 5526 - RNA, 21 nt, synthetic construct
  source 1..21: mol_type = other RNA
gggtctctcacgtgcttcagt

SEQ ID NO: 5527 - RNA, 21 nt, synthetic construct
  source 1..21: mol_type = other RNA
gggtgaaaaatggtaatataa

SEQ ID NO: 5528 - RNA, 21 nt, synthetic construct
  source 1..21: mol_type = other RNA
gggtgaaaactcttttctcag

SEQ ID NO: 5529 - RNA, 21 nt, synthetic construct
  source 1..21: mol_type = other RNA
gggtgagcattggatcaacct

SEQ ID NO: 5530 - RNA, 21 nt, synthetic construct
  source 1..21: mol_type = other RNA
gggtgctgggagacctgagcc

SEQ ID NO: 5531 - RNA, 21 nt, synthetic construct
  source 1..21: mol_type = other RNA
gggtggaatagggaactgtaa

SEQ ID NO: 5532 - RNA, 21 nt, synthetic construct
  source 1..21: mol_type = other RNA
gggtgggaacctgtggaatta

SEQ ID NO: 5533 - RNA, 21 nt, synthetic construct
  source 1..21: mol_type = other RNA
gggttctcatagccatggttc

SEQ ID NO: 5534 - RNA, 21 nt, synthetic construct
  source 1..21: mol_type = other RNA
gggttgggggtgggaacctgt

SEQ ID NO: 5535 - RNA, 21 nt, synthetic construct
  source 1..21: mol_type = other RNA
ggtagtaagcagtggcgccga

SEQ ID NO: 5536 - RNA, 21 nt, synthetic construct
  source 1..21: mol_type = other RNA
ggtatccagccgtggaaacac

SEQ ID NO: 5537 - RNA, 21 nt, synthetic construct
  source 1..21: mol_type = other RNA
ggtatttgtaggtggggttct

SEQ ID NO: 5538 - RNA, 21 nt, synthetic construct
  source 1..21: mol_type = other RNA
ggtcaatatggggaaatccta

SEQ ID NO: 5539 - RNA, 21 nt, synthetic construct
  source 1..21: mol_type = other RNA
ggtcaggatgtcagacgcagc

SEQ ID NO: 5540 - RNA, 21 nt, synthetic construct
  source 1..21: mol_type = other RNA
ggtcaggatttgagatcaccc

SEQ ID NO: 5541 - RNA, 21 nt, synthetic construct
  source 1..21: mol_type = other RNA
ggtcattgtggtgtctgggaa

SEQ ID NO: 5542 - RNA, 21 nt, synthetic construct
  source 1..21: mol_type = other RNA
ggtcccaccgtctgcttgcta

SEQ ID NO: 5543 - RNA, 21 nt, synthetic construct
  source 1..21: mol_type = other RNA
ggtcctcaggggattgtgcag

SEQ ID NO: 5544 - RNA, 21 nt, synthetic construct
  source 1..21: mol_type = other RNA
ggtccttactgtatttatatt

SEQ ID NO: 5545 - RNA, 21 nt, synthetic construct
  source 1..21: mol_type = other RNA
ggtcctttcacatcattttgc

SEQ ID NO: 5546 - RNA, 21 nt, synthetic construct
  source 1..21: mol_type = other RNA
ggtcgtgtttttggaaatcag

SEQ ID NO: 5547 - RNA, 21 nt, synthetic construct
  source 1..21: mol_type = other RNA
ggtctcccagcaccctgtgca

SEQ ID NO: 5548 - RNA, 21 nt, synthetic construct
  source 1..21: mol_type = other RNA
ggtctctcacgtgcttcagtg

SEQ ID NO: 5549 - RNA, 21 nt, synthetic construct
  source 1..21: mol_type = other RNA
ggtctcttcccagacaccaca

SEQ ID NO: 5550 - RNA, 21 nt, synthetic construct
  source 1..21: mol_type = other RNA
ggtcttagttatttgtgtttt

SEQ ID NO: 5551 - RNA, 21 nt, synthetic construct
  source 1..21: mol_type = other RNA
ggtctttttcagttctgaaat

SEQ ID NO: 5552 - RNA, 21 nt, synthetic construct
  source 1..21: mol_type = other RNA
ggtgaaaaatggtaatataac

SEQ ID NO: 5553 - RNA, 21 nt, synthetic construct
  source 1..21: mol_type = other RNA
ggtgaaaactcttttctcaga

SEQ ID NO: 5554 - RNA, 21 nt, synthetic construct
  source 1..21: mol_type = other RNA
ggtgaaacacaggagaaagaa

SEQ ID NO: 5555 - RNA, 21 nt, synthetic construct
  source 1..21: mol_type = other RNA
ggtgacaagcaaggctcggcg

SEQ ID NO: 5556 - RNA, 21 nt, synthetic construct
  source 1..21: mol_type = other RNA
ggtgacaggacttttatggag

SEQ ID NO: 5557 - RNA, 21 nt, synthetic construct
  source 1..21: mol_type = other RNA
ggtgacgctcttctggggtga

SEQ ID NO: 5558 - RNA, 21 nt, synthetic construct
  source 1..21: mol_type = other RNA
ggtgagcattggatcaacctg

SEQ ID NO: 5559 - RNA, 21 nt, synthetic construct
  source 1..21: mol_type = other RNA
ggtgctaggaaatccagttga

SEQ ID NO: 5560 - RNA, 21 nt, synthetic construct
  source 1..21: mol_type = other RNA
ggtgctgggagacctgagcca

SEQ ID NO: 5561 - RNA, 21 nt, synthetic construct
  source 1..21: mol_type = other RNA
ggtggaatagggaactgtaat

SEQ ID NO: 5562 - RNA, 21 nt, synthetic construct
  source 1..21: mol_type = other RNA
ggtgggaacctgtggaattaa

SEQ ID NO: 5563 - RNA, 21 nt, synthetic construct
  source 1..21: mol_type = other RNA
ggtgggaacgggctgctggct

SEQ ID NO: 5564 - RNA, 21 nt, synthetic construct
  source 1..21: mol_type = other RNA
ggtgggaccaggggatctctg

SEQ ID NO: 5565 - RNA, 21 nt, synthetic construct
  source 1..21: mol_type = other RNA
ggtgggccggaagatcccacg

SEQ ID NO: 5566 - RNA, 21 nt, synthetic construct
  source 1..21: mol_type = other RNA
ggtggggttctcatagccatg

SEQ ID NO: 5567 - RNA, 21 nt, synthetic construct
  source 1..21: mol_type = other RNA
ggtggtgaaacacaggagaaa

SEQ ID NO: 5568 - RNA, 21 nt, synthetic construct
  source 1..21: mol_type = other RNA
ggtgtctgggaagagacctgc

SEQ ID NO: 5569 - RNA, 21 nt, synthetic construct
  source 1..21: mol_type = other RNA
ggtgtgtgccaccacgcccag

SEQ ID NO: 5570 - RNA, 21 nt, synthetic construct
  source 1..21: mol_type = other RNA
ggttactgaacttgtcttgcc

SEQ ID NO: 5571 - RNA, 21 nt, synthetic construct
  source 1..21: mol_type = other RNA
ggttatgttgtgtaagtcaac

SEQ ID NO: 5572 - RNA, 21 nt, synthetic construct
  source 1..21: mol_type = other RNA
ggttctcatagccatggttct

SEQ ID NO: 5573 - RNA, 21 nt, synthetic construct
  source 1..21: mol_type = other RNA
ggttctcatttggcctgtccg

SEQ ID NO: 5574 - RNA, 21 nt, synthetic construct
  source 1..21: mol_type = other RNA
ggttctgcatcttgttcaggt

SEQ ID NO: 5575 - RNA, 21 nt, synthetic construct
  source 1..21: mol_type = other RNA
ggttgatccaatgctcacccc

SEQ ID NO: 5576 - RNA, 21 nt, synthetic construct
  source 1..21: mol_type = other RNA
ggttgggggtgggaacctgtg

SEQ ID NO: 5577 - RNA, 21 nt, synthetic construct
  source 1..21: mol_type = other RNA
ggttttatctcctgctggaga

SEQ ID NO: 5578 - RNA, 21 nt, synthetic construct
  source 1..21: mol_type = other RNA
ggttttgttcttccaggttga

SEQ ID NO: 5579 - RNA, 21 nt, synthetic construct
  source 1..21: mol_type = other RNA
ggttttttggagacagtctcg

SEQ ID NO: 5580 - RNA, 21 nt, synthetic construct
  source 1..21: mol_type = other RNA
ggttttttggttttttggaga

SEQ ID NO: 5581 - RNA, 21 nt, synthetic construct
  source 1..21: mol_type = other RNA
gtaaccagcagaagacagaac

SEQ ID NO: 5582 - RNA, 21 nt, synthetic construct
  source 1..21: mol_type = other RNA
gtaactgaactgataacagca

SEQ ID NO: 5583 - RNA, 21 nt, synthetic construct
  source 1..21: mol_type = other RNA
gtaactggccaggtgcagtag

SEQ ID NO: 5584 - RNA, 21 nt, synthetic construct
  source 1..21: mol_type = other RNA
gtaagcagtggcgccgagcct

SEQ ID NO: 5585 - RNA, 21 nt, synthetic construct
  source 1..21: mol_type = other RNA
gtaaggaccttaatgagccct

SEQ ID NO: 5586 - RNA, 21 nt, synthetic construct
  source 1..21: mol_type = other RNA
gtaagtcaactcttcagcctc

SEQ ID NO: 5587 - RNA, 21 nt, synthetic construct
  source 1..21: mol_type = other RNA
gtaatggccactgaagcacgt

SEQ ID NO: 5588 - RNA, 21 nt, synthetic construct
  source 1..21: mol_type = other RNA
gtactactgtagaactgcaat

SEQ ID NO: 5589 - RNA, 21 nt, synthetic construct
  source 1..21: mol_type = other RNA
gtactcgaggagtgaagatgc

SEQ ID NO: 5590 - RNA, 21 nt, synthetic construct
  source 1..21: mol_type = other RNA
gtactggacatgctgctgtta

SEQ ID NO: 5591 - RNA, 21 nt, synthetic construct
  source 1..21: mol_type = other RNA
gtactttatatagtcctacag

SEQ ID NO: 5592 - RNA, 21 nt, synthetic construct
  source 1..21: mol_type = other RNA
gtagaactgcaatttccattc

SEQ ID NO: 5593 - RNA, 21 nt, synthetic construct
  source 1..21: mol_type = other RNA
gtagaatttcagaactgaaaa

SEQ ID NO: 5594 - RNA, 21 nt, synthetic construct
  source 1..21: mol_type = other RNA
gtagcataaaatgttcacatg

SEQ ID NO: 5595 - RNA, 21 nt, synthetic construct
  source 1..21: mol_type = other RNA
gtaggactatataaagtacta

SEQ ID NO: 5596 - RNA, 21 nt, synthetic construct
  source 1..21: mol_type = other RNA
gtaggctagcaagcagacggt

SEQ ID NO: 5597 - RNA, 21 nt, synthetic construct
  source 1..21: mol_type = other RNA
gtaggtggggttctcatagcc

SEQ ID NO: 5598 - RNA, 21 nt, synthetic construct
  source 1..21: mol_type = other RNA
gtagtaagcagtggcgccgag

SEQ ID NO: 5599 - RNA, 21 nt, synthetic construct
  source 1..21: mol_type = other RNA
gtagtactttatatagtccta

SEQ ID NO: 5600 - RNA, 21 nt, synthetic construct
  source 1..21: mol_type = other RNA
gtagtctcagctaggtgggag

SEQ ID NO: 5601 - RNA, 21 nt, synthetic construct
  source 1..21: mol_type = other RNA
gtatacactaagctctctaga

SEQ ID NO: 5602 - RNA, 21 nt, synthetic construct
  source 1..21: mol_type = other RNA
gtatccagccgtggaaacact

SEQ ID NO: 5603 - RNA, 21 nt, synthetic construct
  source 1..21: mol_type = other RNA
gtattccctttttaaatgagc

SEQ ID NO: 5604 - RNA, 21 nt, synthetic construct
  source 1..21: mol_type = other RNA
gtattgtctgacacatgctct

SEQ ID NO: 5605 - RNA, 21 nt, synthetic construct
  source 1..21: mol_type = other RNA
gtatttatatttggggatcaa

SEQ ID NO: 5606 - RNA, 21 nt, synthetic construct
  source 1..21: mol_type = other RNA
gtatttgtaggtggggttctc

SEQ ID NO: 5607 - RNA, 21 nt, synthetic construct
  source 1..21: mol_type = other RNA
gtcaactcttcagcctcattc

SEQ ID NO: 5608 - RNA, 21 nt, synthetic construct
  source 1..21: mol_type = other RNA
gtcaactggatttcctagcac

SEQ ID NO: 5609 - RNA, 21 nt, synthetic construct
  source 1..21: mol_type = other RNA
gtcaatatggggaaatcctat

SEQ ID NO: 5610 - RNA, 21 nt, synthetic construct
  source 1..21: mol_type = other RNA
gtcaccaaggacgttaaaggc

SEQ ID NO: 5611 - RNA, 21 nt, synthetic construct
  source 1..21: mol_type = other RNA
gtcaccacggtgctaggaaat

SEQ ID NO: 5612 - RNA, 21 nt, synthetic construct
  source 1..21: mol_type = other RNA
gtcacctgaacaagatgcaga

SEQ ID NO: 5613 - RNA, 21 nt, synthetic construct
  source 1..21: mol_type = other RNA
gtcagaaagtcatgtgaacat

SEQ ID NO: 5614 - RNA, 21 nt, synthetic construct
  source 1..21: mol_type = other RNA
gtcagacaatacaatggaagt

SEQ ID NO: 5615 - RNA, 21 nt, synthetic construct
  source 1..21: mol_type = other RNA
gtcagacgcagcccctggcag

SEQ ID NO: 5616 - RNA, 21 nt, synthetic construct
  source 1..21: mol_type = other RNA
gtcagcagtaggctagcaagc

SEQ ID NO: 5617 - RNA, 21 nt, synthetic construct
  source 1..21: mol_type = other RNA
gtcaggatgtcagacgcagcc

SEQ ID NO: 5618 - RNA, 21 nt, synthetic construct
  source 1..21: mol_type = other RNA
gtcaggatttgagatcaccct

SEQ ID NO: 5619 - RNA, 21 nt, synthetic construct
  source 1..21: mol_type = other RNA
gtcatcttccgtgagggctaa

SEQ ID NO: 5620 - RNA, 21 nt, synthetic construct
  source 1..21: mol_type = other RNA
gtcatgtgaacattttatgct

SEQ ID NO: 5621 - RNA, 21 nt, synthetic construct
  source 1..21: mol_type = other RNA
gtcattgtggtgtctgggaag

SEQ ID NO: 5622 - RNA, 21 nt, synthetic construct
  source 1..21: mol_type = other RNA
gtccagagtcccttgatcccc

SEQ ID NO: 5623 - RNA, 21 nt, synthetic construct
  source 1..21: mol_type = other RNA
gtccaggaggtcaggatgtca

SEQ ID NO: 5624 - RNA, 21 nt, synthetic construct
  source 1..21: mol_type = other RNA
gtccagtactcgaggagtgaa

SEQ ID NO: 5625 - RNA, 21 nt, synthetic construct
  source 1..21: mol_type = other RNA
gtccagtgtttccacggctgg

SEQ ID NO: 5626 - RNA, 21 nt, synthetic construct
  source 1..21: mol_type = other RNA
gtcccaccgtctgcttgctag

SEQ ID NO: 5627 - RNA, 21 nt, synthetic construct
  source 1..21: mol_type = other RNA
gtcccttgatccccaaatata

SEQ ID NO: 5628 - RNA, 21 nt, synthetic construct
  source 1..21: mol_type = other RNA
gtccggtgggaacgggctgct

SEQ ID NO: 5629 - RNA, 21 nt, synthetic construct
  source 1..21: mol_type = other RNA
gtcctacagtccaggaggtca

SEQ ID NO: 5630 - RNA, 21 nt, synthetic construct
  source 1..21: mol_type = other RNA
gtcctcaggggattgtgcagc

SEQ ID NO: 5631 - RNA, 21 nt, synthetic construct
  source 1..21: mol_type = other RNA
gtcctggcttttatttaaaga

SEQ ID NO: 5632 - RNA, 21 nt, synthetic construct
  source 1..21: mol_type = other RNA
gtcctgtcaccaaggacgtta

SEQ ID NO: 5633 - RNA, 21 nt, synthetic construct
  source 1..21: mol_type = other RNA
gtccttggtgacaggactttt

SEQ ID NO: 5634 - RNA, 21 nt, synthetic construct
  source 1..21: mol_type = other RNA
gtcctttcacatcattttgcg

SEQ ID NO: 5635 - RNA, 21 nt, synthetic construct
  source 1..21: mol_type = other RNA
gtcgatcggaatcgtgggatc

SEQ ID NO: 5636 - RNA, 21 nt, synthetic construct
  source 1..21: mol_type = other RNA
gtcgattttcaataatagact

SEQ ID NO: 5637 - RNA, 21 nt, synthetic construct
  source 1..21: mol_type = other RNA
gtcgtgtttttggaaatcagc

SEQ ID NO: 5638 - RNA, 21 nt, synthetic construct
  source 1..21: mol_type = other RNA
gtcgttccggttatgttgtgt

SEQ ID NO: 5639 - RNA, 21 nt, synthetic construct
  source 1..21: mol_type = other RNA
gtctattattgaaaatcgaca

SEQ ID NO: 5640 - RNA, 21 nt, synthetic construct
  source 1..21: mol_type = other RNA
gtctcagctaggtgggaggct

SEQ ID NO: 5641 - RNA, 21 nt, synthetic construct
  source 1..21: mol_type = other RNA
gtctccaaaaaaccaaaaaac

SEQ ID NO: 5642 - RNA, 21 nt, synthetic construct
  source 1..21: mol_type = other RNA
gtctccagcaggagataaaac

SEQ ID NO: 5643 - RNA, 21 nt, synthetic construct
  source 1..21: mol_type = other RNA
gtctccataaaagtcctgtca

SEQ ID NO: 5644 - RNA, 21 nt, synthetic construct
  source 1..21: mol_type = other RNA
gtctcccagcaccctgtgcag

SEQ ID NO: 5645 - RNA, 21 nt, synthetic construct
  source 1..21: mol_type = other RNA
gtctctcacgtgcttcagtgg

SEQ ID NO: 5646 - RNA, 21 nt, synthetic construct
  source 1..21: mol_type = other RNA
gtctcttcccagacaccacaa

SEQ ID NO: 5647 - RNA, 21 nt, synthetic construct
  source 1..21: mol_type = other RNA
gtctgacacatgctctcaata

SEQ ID NO: 5648 - RNA, 21 nt, synthetic construct
  source 1..21: mol_type = other RNA
gtctgacatcctgacctcctg

SEQ ID NO: 5649 - RNA, 21 nt, synthetic construct
  source 1..21: mol_type = other RNA
gtctgcttcagcactttctaa

SEQ ID NO: 5650 - RNA, 21 nt, synthetic construct
  source 1..21: mol_type = other RNA
gtctgcttgctagcctactgc

SEQ ID NO: 5651 - RNA, 21 nt, synthetic construct
  source 1..21: mol_type = other RNA
gtctgggaagagacctgcaca

SEQ ID NO: 5652 - RNA, 21 nt, synthetic construct
  source 1..21: mol_type = other RNA
gtcttctagagagcttagtgt

SEQ ID NO: 5653 - RNA, 21 nt, synthetic construct
  source 1..21: mol_type = other RNA
gtcttctgctggttactgaac

SEQ ID NO: 5654 - RNA, 21 nt, synthetic construct
  source 1..21: mol_type = other RNA
gtcttgccactcactccttag

SEQ ID NO: 5655 - RNA, 21 nt, synthetic construct
  source 1..21: mol_type = other RNA
gtctttttcagttctgaaatt

SEQ ID NO: 5656 - RNA, 21 nt, synthetic construct
  source 1..21: mol_type = other RNA
gtgaaaactcttttctcagat

SEQ ID NO: 5657 - RNA, 21 nt, synthetic construct
  source 1..21: mol_type = other RNA
gtgaaacacaggagaaagaaa

SEQ ID NO: 5658 - RNA, 21 nt, synthetic construct
  source 1..21: mol_type = other RNA
gtgaaaggaccagtttcttga

SEQ ID NO: 5659 - RNA, 21 nt, synthetic construct
  source 1..21: mol_type = other RNA
gtgaacagtgggaatgtccag

SEQ ID NO: 5660 - RNA, 21 nt, synthetic construct
  source 1..21: mol_type = other RNA
gtgaacattttatgctacaga

SEQ ID NO: 5661 - RNA, 21 nt, synthetic construct
  source 1..21: mol_type = other RNA
gtgaagatgcctattaattcc

SEQ ID NO: 5662 - RNA, 21 nt, synthetic construct
  source 1..21: mol_type = other RNA
gtgaatgaggctgaagagttg

SEQ ID NO: 5663 - RNA, 21 nt, synthetic construct
  source 1..21: mol_type = other RNA
gtgacaagcaaggctcggcgc

SEQ ID NO: 5664 - RNA, 21 nt, synthetic construct
  source 1..21: mol_type = other RNA
gtgacaggacttttatggaga

SEQ ID NO: 5665 - RNA, 21 nt, synthetic construct
  source 1..21: mol_type = other RNA
gtgacgctcttctggggtgag

SEQ ID NO: 5666 - RNA, 21 nt, synthetic construct
  source 1..21: mol_type = other RNA
gtgagagaccctcgcaaaatg

SEQ ID NO: 5667 - RNA, 21 nt, synthetic construct
  source 1..21: mol_type = other RNA
gtgagcattggatcaacctgg

SEQ ID NO: 5668 - RNA, 21 nt, synthetic construct
  source 1..21: mol_type = other RNA
gtgagggctaagctttcaggg

SEQ ID NO: 5669 - RNA, 21 nt, synthetic construct
  source 1..21: mol_type = other RNA
gtgagtaactgaactgataac

SEQ ID NO: 5670 - RNA, 21 nt, synthetic construct
  source 1..21: mol_type = other RNA
gtgagtggcaagacaagttca

SEQ ID NO: 5671 - RNA, 21 nt, synthetic construct
  source 1..21: mol_type = other RNA
gtgcagatgctggtcttagtt

SEQ ID NO: 5672 - RNA, 21 nt, synthetic construct
  source 1..21: mol_type = other RNA
gtgcagcaaatggctcaggtc

SEQ ID NO: 5673 - RNA, 21 nt, synthetic construct
  source 1..21: mol_type = other RNA
gtgcaggtctcttcccagaca

SEQ ID NO: 5674 - RNA, 21 nt, synthetic construct
  source 1..21: mol_type = other RNA
gtgccaccacgcccagctagt

SEQ ID NO: 5675 - RNA, 21 nt, synthetic construct
  source 1..21: mol_type = other RNA
gtgcctcagcctcccacctag

SEQ ID NO: 5676 - RNA, 21 nt, synthetic construct
  source 1..21: mol_type = other RNA
gtgctaggaaatccagttgac

SEQ ID NO: 5677 - RNA, 21 nt, synthetic construct
  source 1..21: mol_type = other RNA
gtgctgaagcagactgtttct

SEQ ID NO: 5678 - RNA, 21 nt, synthetic construct
  source 1..21: mol_type = other RNA
gtgctgggagacctgagccat

SEQ ID NO: 5679 - RNA, 21 nt, synthetic construct
  source 1..21: mol_type = other RNA
gtgcttcagtggccattacag

SEQ ID NO: 5680 - RNA, 21 nt, synthetic construct
  source 1..21: mol_type = other RNA
gtggaaacactggacttcaag

SEQ ID NO: 5681 - RNA, 21 nt, synthetic construct
  source 1..21: mol_type = other RNA
gtggaatagggaactgtaatg

SEQ ID NO: 5682 - RNA, 21 nt, synthetic construct
  source 1..21: mol_type = other RNA
gtggaattaataggcatcttc

SEQ ID NO: 5683 - RNA, 21 nt, synthetic construct
  source 1..21: mol_type = other RNA
gtggcaagacaagttcagtaa

SEQ ID NO: 5684 - RNA, 21 nt, synthetic construct
  source 1..21: mol_type = other RNA
gtggcaggggctgatttccaa

SEQ ID NO: 5685 - RNA, 21 nt, synthetic construct
  source 1..21: mol_type = other RNA
gtggccattacagttccctat

SEQ ID NO: 5686 - RNA, 21 nt, synthetic construct
  source 1..21: mol_type = other RNA
gtggcgccgagccttgcttgt

SEQ ID NO: 5687 - RNA, 21 nt, synthetic construct
  source 1..21: mol_type = other RNA
gtgggaacctgtggaattaat

SEQ ID NO: 5688 - RNA, 21 nt, synthetic construct
  source 1..21: mol_type = other RNA
gtgggaacgggctgctggctg

SEQ ID NO: 5689 - RNA, 21 nt, synthetic construct
  source 1..21: mol_type = other RNA
gtgggaatgtccagagtccct

SEQ ID NO: 5690 - RNA, 21 nt, synthetic construct
  source 1..21: mol_type = other RNA
gtgggaccaggggatctctgg

SEQ ID NO: 5691 - RNA, 21 nt, synthetic construct
  source 1..21: mol_type = other RNA
gtgggatcttccggcccacct

SEQ ID NO: 5692 - RNA, 21 nt, synthetic construct
  source 1..21: mol_type = other RNA
gtgggccggaagatcccacga

SEQ ID NO: 5693 - RNA, 21 nt, synthetic construct
  source 1..21: mol_type = other RNA
gtgggctgggttgggggtggg

SEQ ID NO: 5694 - RNA, 21 nt, synthetic construct
  source 1..21: mol_type = other RNA
gtggggttctcatagccatgg

SEQ ID NO: 5695 - RNA, 21 nt, synthetic construct
  source 1..21: mol_type = other RNA
gtggggtttctgattaattta

SEQ ID NO: 5696 - RNA, 21 nt, synthetic construct
  source 1..21: mol_type = other RNA
gtggtgaaacacaggagaaag

SEQ ID NO: 5697 - RNA, 21 nt, synthetic construct
  source 1..21: mol_type = other RNA
gtggtgacaagcaaggctcgg

SEQ ID NO: 5698 - RNA, 21 nt, synthetic construct
  source 1..21: mol_type = other RNA
gtggtgtctgggaagagacct

SEQ ID NO: 5699 - RNA, 21 nt, synthetic construct
  source 1..21: mol_type = other RNA
gtgtaagtcaactcttcagcc

SEQ ID NO: 5700 - RNA, 21 nt, synthetic construct
  source 1..21: mol_type = other RNA
gtgtcagacaatacaatggaa

SEQ ID NO: 5701 - RNA, 21 nt, synthetic construct
  source 1..21: mol_type = other RNA
gtgtctccataaaagtcctgt

SEQ ID NO: 5702 - RNA, 21 nt, synthetic construct
  source 1..21: mol_type = other RNA
gtgtctgggaagagacctgca

SEQ ID NO: 5703 - RNA, 21 nt, synthetic construct
  source 1..21: mol_type = other RNA
gtgtgtctccataaaagtcct

SEQ ID NO: 5704 - RNA, 21 nt, synthetic construct
  source 1..21: mol_type = other RNA
gtgtgtgccaccacgcccagc

SEQ ID NO: 5705 - RNA, 21 nt, synthetic construct
  source 1..21: mol_type = other RNA
gtgttcctttttccaggtatt

SEQ ID NO: 5706 - RNA, 21 nt, synthetic construct
  source 1..21: mol_type = other RNA
gtgtttcaccaccggttctca

SEQ ID NO: 5707 - RNA, 21 nt, synthetic construct
  source 1..21: mol_type = other RNA
gtgtttccacggctggatacc

SEQ ID NO: 5708 - RNA, 21 nt, synthetic construct
  source 1..21: mol_type = other RNA
gtgtttttggaaatcagcccc

SEQ ID NO: 5709 - RNA, 21 nt, synthetic construct
  source 1..21: mol_type = other RNA
gttaaaggcattttattccag

SEQ ID NO: 5710 - RNA, 21 nt, synthetic construct
  source 1..21: mol_type = other RNA
gttactcactggattcctagg

SEQ ID NO: 5711 - RNA, 21 nt, synthetic construct
  source 1..21: mol_type = other RNA
gttactgaacttgtcttgcca

SEQ ID NO: 5712 - RNA, 21 nt, synthetic construct
  source 1..21: mol_type = other RNA
gttacttggttttatctcctg

SEQ ID NO: 5713 - RNA, 21 nt, synthetic construct
  source 1..21: mol_type = other RNA
gttatattaccatttttcacc

SEQ ID NO: 5714 - RNA, 21 nt, synthetic construct
  source 1..21: mol_type = other RNA
gttatcagttcagttactcac

SEQ ID NO: 5715 - RNA, 21 nt, synthetic construct
  source 1..21: mol_type = other RNA
gttatgttgtgtaagtcaact

SEQ ID NO: 5716 - RNA, 21 nt, synthetic construct
  source 1..21: mol_type = other RNA
gttcacatgactttctgacat

SEQ ID NO: 5717 - RNA, 21 nt, synthetic construct
  source 1..21: mol_type = other RNA
gttcactaaggagtgagtggc

SEQ ID NO: 5718 - RNA, 21 nt, synthetic construct
  source 1..21: mol_type = other RNA
gttcaggtgacgctcttctgg

SEQ ID NO: 5719 - RNA, 21 nt, synthetic construct
  source 1..21: mol_type = other RNA
gttcagtaaccagcagaagac

SEQ ID NO: 5720 - RNA, 21 nt, synthetic construct
  source 1..21: mol_type = other RNA
gttcagttactcactggattc

SEQ ID NO: 5721 - RNA, 21 nt, synthetic construct
  source 1..21: mol_type = other RNA
gttcccaccggacaggccaaa

SEQ ID NO: 5722 - RNA, 21 nt, synthetic construct
  source 1..21: mol_type = other RNA
gttccctattccaccccattt

SEQ ID NO: 5723 - RNA, 21 nt, synthetic construct
  source 1..21: mol_type = other RNA
gttccggttatgttgtgtaag

SEQ ID NO: 5724 - RNA, 21 nt, synthetic construct
  source 1..21: mol_type = other RNA
gttcctttttccaggtatttt

SEQ ID NO: 5725 - RNA, 21 nt, synthetic construct
  source 1..21: mol_type = other RNA
gttctacagtagtactttata

SEQ ID NO: 5726 - RNA, 21 nt, synthetic construct
  source 1..21: mol_type = other RNA
gttctcatagccatggttctg

SEQ ID NO: 5727 - RNA, 21 nt, synthetic construct
  source 1..21: mol_type = other RNA
gttctcatttggcctgtccgg

SEQ ID NO: 5728 - RNA, 21 nt, synthetic construct
  source 1..21: mol_type = other RNA
gttctgaaattctacagctag

SEQ ID NO: 5729 - RNA, 21 nt, synthetic construct
  source 1..21: mol_type = other RNA
gttctgcatcttgttcaggtg

SEQ ID NO: 5730 - RNA, 21 nt, synthetic construct
  source 1..21: mol_type = other RNA
gttctgtcttctgctggttac

SEQ ID NO: 5731 - RNA, 21 nt, synthetic construct
  source 1..21: mol_type = other RNA
gttcttccaggttgatccaat

SEQ ID NO: 5732 - RNA, 21 nt, synthetic construct
  source 1..21: mol_type = other RNA
gttgaaagttggcaacagccc

SEQ ID NO: 5733 - RNA, 21 nt, synthetic construct
  source 1..21: mol_type = other RNA
gttgactgtcatcttccgtga

SEQ ID NO: 5734 - RNA, 21 nt, synthetic construct
  source 1..21: mol_type = other RNA
gttgacttacacaacataacc

SEQ ID NO: 5735 - RNA, 21 nt, synthetic construct
  source 1..21: mol_type = other RNA
gttgatccaatgctcacccca

SEQ ID NO: 5736 - RNA, 21 nt, synthetic construct
  source 1..21: mol_type = other RNA
gttgccaactttcaacattag

SEQ ID NO: 5737 - RNA, 21 nt, synthetic construct
  source 1..21: mol_type = other RNA
gttgctcctttcccccattaa

SEQ ID NO: 5738 - RNA, 21 nt, synthetic construct
  source 1..21: mol_type = other RNA
gttgctgagaaatggggtgga

SEQ ID NO: 5739 - RNA, 21 nt, synthetic construct
  source 1..21: mol_type = other RNA
gttggcaacagccccttgtgg

SEQ ID NO: 5740 - RNA, 21 nt, synthetic construct
  source 1..21: mol_type = other RNA
gttgggggtgggaacctgtgg

SEQ ID NO: 5741 - RNA, 21 nt, synthetic construct
  source 1..21: mol_type = other RNA
gttgtgtaagtcaactcttca

SEQ ID NO: 5742 - RNA, 21 nt, synthetic construct
  source 1..21: mol_type = other RNA
gtttcaccaccggttctcatt

SEQ ID NO: 5743 - RNA, 21 nt, synthetic construct
  source 1..21: mol_type = other RNA
gtttccacggctggatacctg

SEQ ID NO: 5744 - RNA, 21 nt, synthetic construct
  source 1..21: mol_type = other RNA
gtttcgaaagcattgcctctt

SEQ ID NO: 5745 - RNA, 21 nt, synthetic construct
  source 1..21: mol_type = other RNA
gtttctgttctgtcttctgct

SEQ ID NO: 5746 - RNA, 21 nt, synthetic construct
  source 1..21: mol_type = other RNA
gtttcttgaagtccagtgttt

SEQ ID NO: 5747 - RNA, 21 nt, synthetic construct
  source 1..21: mol_type = other RNA
gtttgggccttggctatgaat

SEQ ID NO: 5748 - RNA, 21 nt, synthetic construct
  source 1..21: mol_type = other RNA
gtttgttttggttttttggtt

SEQ ID NO: 5749 - RNA, 21 nt, synthetic construct
  source 1..21: mol_type = other RNA
gttttatctcctgctggagac

SEQ ID NO: 5750 - RNA, 21 nt, synthetic construct
  source 1..21: mol_type = other RNA
gttttcaccctctgtagcata

SEQ ID NO: 5751 - RNA, 21 nt, synthetic construct
  source 1..21: mol_type = other RNA
gttttgttcttccaggttgat

SEQ ID NO: 5752 - RNA, 21 nt, synthetic construct
  source 1..21: mol_type = other RNA
gtttttggaaatcagcccctg

SEQ ID NO: 5753 - RNA, 21 nt, synthetic construct
  source 1..21: mol_type = other RNA
gttttttggagacagtctcgc

SEQ ID NO: 5754 - RNA, 21 nt, synthetic construct
  source 1..21: mol_type = other RNA
gttttttggttttttggagac

SEQ ID NO: 5755 - RNA, 21 nt, synthetic construct
  source 1..21: mol_type = other RNA
taaaaagggaatactgccttt

SEQ ID NO: 5756 - RNA, 21 nt, synthetic construct
  source 1..21: mol_type = other RNA
taaaaatacaaagactagctg

SEQ ID NO: 5757 - RNA, 21 nt, synthetic construct
  source 1..21: mol_type = other RNA
taaaaccaagtaactggccag

SEQ ID NO: 5758 - RNA, 21 nt, synthetic construct
  source 1..21: mol_type = other RNA
taaaagaatggaaattgcagt

SEQ ID NO: 5759 - RNA, 21 nt, synthetic construct
  source 1..21: mol_type = other RNA
taaaagccaggacagtgaatg

SEQ ID NO: 5760 - RNA, 21 nt, synthetic construct
  source 1..21: mol_type = other RNA
taaaagtcctgtcaccaagga

SEQ ID NO: 5761 - RNA, 21 nt, synthetic construct
  source 1..21: mol_type = other RNA
taaaatgcctttaacgtcctt

SEQ ID NO: 5762 - RNA, 21 nt, synthetic construct
  source 1..21: mol_type = other RNA
taaaatgttcacatgactttc

SEQ ID NO: 5763 - RNA, 21 nt, synthetic construct
  source 1..21: mol_type = other RNA
taaaggcattttattccagcg

SEQ ID NO: 5764 - RNA, 21 nt, synthetic construct
  source 1..21: mol_type = other RNA
taaagtactactgtagaactg

SEQ ID NO: 5765 - RNA, 21 nt, synthetic construct
  source 1..21: mol_type = other RNA
taaataaaagccaggacagtg

SEQ ID NO: 5766 - RNA, 21 nt, synthetic construct
  source 1..21: mol_type = other RNA
taaatacagtaaggaccttaa

SEQ ID NO: 5767 - RNA, 21 nt, synthetic construct
  source 1..21: mol_type = other RNA
taaatctgcatctgctccagg

SEQ ID NO: 5768 - RNA, 21 nt, synthetic construct
  source 1..21: mol_type = other RNA
taaatgagctttcaggaagtt

SEQ ID NO: 5769 - RNA, 21 nt, synthetic construct
  source 1..21: mol_type = other RNA
taaatgggaaatgtcgatttt

SEQ ID NO: 5770 - RNA, 21 nt, synthetic construct
  source 1..21: mol_type = other RNA
taaatgggtgaaaaatggtaa

SEQ ID NO: 5771 - RNA, 21 nt, synthetic construct
  source 1..21: mol_type = other RNA
taaattaatcagaaaccccac

SEQ ID NO: 5772 - RNA, 21 nt, synthetic construct
  source 1..21: mol_type = other RNA
taaatttcctgttgctccttt

SEQ ID NO: 5773 - RNA, 21 nt, synthetic construct
  source 1..21: mol_type = other RNA
taacagcagcatgtccagtac

SEQ ID NO: 5774 - RNA, 21 nt, synthetic construct
  source 1..21: mol_type = other RNA
taaccagcagaagacagaaca

SEQ ID NO: 5775 - RNA, 21 nt, synthetic construct
  source 1..21: mol_type = other RNA
taaccggaacgacagcctgca

SEQ ID NO: 5776 - RNA, 21 nt, synthetic construct
  source 1..21: mol_type = other RNA
taacgtccttggtgacaggac

SEQ ID NO: 5777 - RNA, 21 nt, synthetic construct
  source 1..21: mol_type = other RNA
taactaagaccagcatctgca

SEQ ID NO: 5778 - RNA, 21 nt, synthetic construct
  source 1..21: mol_type = other RNA
taactgaactgataacagcag

SEQ ID NO: 5779 - RNA, 21 nt, synthetic construct
  source 1..21: mol_type = other RNA
taactggccaggtgcagtagc

SEQ ID NO: 5780 - RNA, 21 nt, synthetic construct
  source 1..21: mol_type = other RNA
taagaccagcatctgcactaa

SEQ ID NO: 5781 - RNA, 21 nt, synthetic construct
  source 1..21: mol_type = other RNA
taagcagtggcgccgagcctt

SEQ ID NO: 5782 - RNA, 21 nt, synthetic construct
  source 1..21: mol_type = other RNA
taagctctctagaagacgctg

SEQ ID NO: 5783 - RNA, 21 nt, synthetic construct
  source 1..21: mol_type = other RNA
taagctttcagggctctcgtt

SEQ ID NO: 5784 - RNA, 21 nt, synthetic construct
  source 1..21: mol_type = other RNA
taaggaccttaatgagccctg

SEQ ID NO: 5785 - RNA, 21 nt, synthetic construct
  source 1..21: mol_type = other RNA
taaggagtgagtggcaagaca

SEQ ID NO: 5786 - RNA, 21 nt, synthetic construct
  source 1..21: mol_type = other RNA
taaggggatcaaagaggcaat

SEQ ID NO: 5787 - RNA, 21 nt, synthetic construct
  source 1..21: mol_type = other RNA
taaggtccttactgtatttat

SEQ ID NO: 5788 - RNA, 21 nt, synthetic construct
  source 1..21: mol_type = other RNA
taagtcaactcttcagcctca

SEQ ID NO: 5789 - RNA, 21 nt, synthetic construct
  source 1..21: mol_type = other RNA
taataaatgggaaatgtcgat

SEQ ID NO: 5790 - RNA, 21 nt, synthetic construct
  source 1..21: mol_type = other RNA
taatagacttatatgcaggct

SEQ ID NO: 5791 - RNA, 21 nt, synthetic construct
  source 1..21: mol_type = other RNA
taataggcatcttcactcctc

SEQ ID NO: 5792 - RNA, 21 nt, synthetic construct
  source 1..21: mol_type = other RNA
taatcagaaaccccacttcca

SEQ ID NO: 5793 - RNA, 21 nt, synthetic construct
  source 1..21: mol_type = other RNA
taatctgagaaaagagttttc

SEQ ID NO: 5794 - RNA, 21 nt, synthetic construct
  source 1..21: mol_type = other RNA
taatgagccctgggaaattag

SEQ ID NO: 5795 - RNA, 21 nt, synthetic construct
  source 1..21: mol_type = other RNA
taatggccactgaagcacgtg

SEQ ID NO: 5796 - RNA, 21 nt, synthetic construct
  source 1..21: mol_type = other RNA
taatgggggaaaggagcaaca

SEQ ID NO: 5797 - RNA, 21 nt, synthetic construct
  source 1..21: mol_type = other RNA
taatgttgaaagttggcaaca

SEQ ID NO: 5798 - RNA, 21 nt, synthetic construct
  source 1..21: mol_type = other RNA
taattccacaggttcccaccc

SEQ ID NO: 5799 - RNA, 21 nt, synthetic construct
  source 1..21: mol_type = other RNA
taatttcccagggctcattaa

SEQ ID NO: 5800 - RNA, 21 nt, synthetic construct
  source 1..21: mol_type = other RNA
tacaaagactagctgggcgtg

SEQ ID NO: 5801 - RNA, 21 nt, synthetic construct
  source 1..21: mol_type = other RNA
tacaaatacctggagcagatg

SEQ ID NO: 5802 - RNA, 21 nt, synthetic construct
  source 1..21: mol_type = other RNA
tacaatggaagtggggtttct

SEQ ID NO: 5803 - RNA, 21 nt, synthetic construct
  source 1..21: mol_type = other RNA
tacacaacataaccggaacga

SEQ ID NO: 5804 - RNA, 21 nt, synthetic construct
  source 1..21: mol_type = other RNA
tacactaagctctctagaaga

SEQ ID NO: 5805 - RNA, 21 nt, synthetic construct
  source 1..21: mol_type = other RNA
tacagagggtgaaaactcttt

SEQ ID NO: 5806 - RNA, 21 nt, synthetic construct
  source 1..21: mol_type = other RNA
tacagctaggccagtctccag

SEQ ID NO: 5807 - RNA, 21 nt, synthetic construct
  source 1..21: mol_type = other RNA
tacagtaaggaccttaatgag

SEQ ID NO: 5808 - RNA, 21 nt, synthetic construct
  source 1..21: mol_type = other RNA
tacagtccaggaggtcaggat

SEQ ID NO: 5809 - RNA, 21 nt, synthetic construct
  source 1..21: mol_type = other RNA
tacagttccctattccacccc

SEQ ID NO: 5810 - RNA, 21 nt, synthetic construct
  source 1..21: mol_type = other RNA
tacatcaaatatctgcaatag

SEQ ID NO: 5811 - RNA, 21 nt, synthetic construct
  source 1..21: mol_type = other RNA
taccatttttcacccatttaa

SEQ ID NO: 5812 - RNA, 21 nt, synthetic construct
  source 1..21: mol_type = other RNA
tacctggaaaaaggaacacta

SEQ ID NO: 5813 - RNA, 21 nt, synthetic construct
  source 1..21: mol_type = other RNA
tacctggagcagatgcagatt

SEQ ID NO: 5814 - RNA, 21 nt, synthetic construct
  source 1..21: mol_type = other RNA
tacctgggccagccaaggcaa

SEQ ID NO: 5815 - RNA, 21 nt, synthetic construct
  source 1..21: mol_type = other RNA
tacctgtgtgtctccataaaa

SEQ ID NO: 5816 - RNA, 21 nt, synthetic construct
  source 1..21: mol_type = other RNA
tactacctgggccagccaagg

SEQ ID NO: 5817 - RNA, 21 nt, synthetic construct
  source 1..21: mol_type = other RNA
tactactgtagaactgcaatt

SEQ ID NO: 5818 - RNA, 21 nt, synthetic construct
  source 1..21: mol_type = other RNA
tactcactggattcctaggtc

SEQ ID NO: 5819 - RNA, 21 nt, synthetic construct
  source 1..21: mol_type = other RNA
tactcgaggagtgaagatgcc

SEQ ID NO: 5820 - RNA, 21 nt, synthetic construct
  source 1..21: mol_type = other RNA
tactgaacttgtcttgccact

SEQ ID NO: 5821 - RNA, 21 nt, synthetic construct
  source 1..21: mol_type = other RNA
tactgcacctggccagttact

SEQ ID NO: 5822 - RNA, 21 nt, synthetic construct
  source 1..21: mol_type = other RNA
tactgctgactggcttgcctt

SEQ ID NO: 5823 - RNA, 21 nt, synthetic construct
  source 1..21: mol_type = other RNA
tactggacatgctgctgttat

SEQ ID NO: 5824 - RNA, 21 nt, synthetic construct
  source 1..21: mol_type = other RNA
tactgtagaactgcaatttcc

SEQ ID NO: 5825 - RNA, 21 nt, synthetic construct
  source 1..21: mol_type = other RNA
tactgtatttatatttgggga

SEQ ID NO: 5826 - RNA, 21 nt, synthetic construct
  source 1..21: mol_type = other RNA
tacttggttttatctcctgct

SEQ ID NO: 5827 - RNA, 21 nt, synthetic construct
  source 1..21: mol_type = other RNA
tactttatatagtcctacagt

SEQ ID NO: 5828 - RNA, 21 nt, synthetic construct
  source 1..21: mol_type = other RNA
tagaaagtgctgaagcagact

SEQ ID NO: 5829 - RNA, 21 nt, synthetic construct
  source 1..21: mol_type = other RNA
tagaactgcaatttccattct

SEQ ID NO: 5830 - RNA, 21 nt, synthetic construct
  source 1..21: mol_type = other RNA
tagaagacgctggaataaaat

SEQ ID NO: 5831 - RNA, 21 nt, synthetic construct
  source 1..21: mol_type = other RNA
tagacttatatgcaggctgtc

SEQ ID NO: 5832 - RNA, 21 nt, synthetic construct
  source 1..21: mol_type = other RNA
tagagagcttagtgtatacag

SEQ ID NO: 5833 - RNA, 21 nt, synthetic construct
  source 1..21: mol_type = other RNA
tagagataggatttccccata

SEQ ID NO: 5834 - RNA, 21 nt, synthetic construct
  source 1..21: mol_type = other RNA
tagcaagcagacggtgggacc

SEQ ID NO: 5835 - RNA, 21 nt, synthetic construct
  source 1..21: mol_type = other RNA
tagcaccgtggtgacaagcaa

SEQ ID NO: 5836 - RNA, 21 nt, synthetic construct
  source 1..21: mol_type = other RNA
tagcataaaatgttcacatga

SEQ ID NO: 5837 - RNA, 21 nt, synthetic construct
  source 1..21: mol_type = other RNA
tagccaaggcccaaactaatg

SEQ ID NO: 5838 - RNA, 21 nt, synthetic construct
  source 1..21: mol_type = other RNA
tagccatggttctgcatcttg

SEQ ID NO: 5839 - RNA, 21 nt, synthetic construct
  source 1..21: mol_type = other RNA
tagccctcacggaagatgaca

SEQ ID NO: 5840 - RNA, 21 nt, synthetic construct
  source 1..21: mol_type = other RNA
tagcctactgctgactggctt

SEQ ID NO: 5841 - RNA, 21 nt, synthetic construct
  source 1..21: mol_type = other RNA
tagctgtagaatttcagaact

SEQ ID NO: 5842 - RNA, 21 nt, synthetic construct
  source 1..21: mol_type = other RNA
taggaaatccagttgactgtc

SEQ ID NO: 5843 - RNA, 21 nt, synthetic construct
  source 1..21: mol_type = other RNA
taggaatccagtgagtaactg

SEQ ID NO: 5844 - RNA, 21 nt, synthetic construct
  source 1..21: mol_type = other RNA
taggactatataaagtactac

SEQ ID NO: 5845 - RNA, 21 nt, synthetic construct
  source 1..21: mol_type = other RNA
taggatttccccatattgacc

SEQ ID NO: 5846 - RNA, 21 nt, synthetic construct
  source 1..21: mol_type = other RNA
taggcatcttcactcctcgag

SEQ ID NO: 5847 - RNA, 21 nt, synthetic construct
  source 1..21: mol_type = other RNA
taggccagtctccagcaggag

SEQ ID NO: 5848 - RNA, 21 nt, synthetic construct
  source 1..21: mol_type = other RNA
taggctagcaagcagacggtg

SEQ ID NO: 5849 - RNA, 21 nt, synthetic construct
  source 1..21: mol_type = other RNA
tagggaactgtaatggccact

SEQ ID NO: 5850 - RNA, 21 nt, synthetic construct
  source 1..21: mol_type = other RNA
taggtcgtgtttttggaaatc

SEQ ID NO: 5851 - RNA, 21 nt, synthetic construct
  source 1..21: mol_type = other RNA
taggtggcagggagcgcggca

SEQ ID NO: 5852 - RNA, 21 nt, synthetic construct
  source 1..21: mol_type = other RNA
taggtgggaggctgaggcaca

SEQ ID NO: 5853 - RNA, 21 nt, synthetic construct
  source 1..21: mol_type = other RNA
taggtggggttctcatagcca

SEQ ID NO: 5854 - RNA, 21 nt, synthetic construct
  source 1..21: mol_type = other RNA
tagtaagcagtggcgccgagc

SEQ ID NO: 5855 - RNA, 21 nt, synthetic construct
  source 1..21: mol_type = other RNA
tagtactttatatagtcctac

SEQ ID NO: 5856 - RNA, 21 nt, synthetic construct
  source 1..21: mol_type = other RNA
tagtcctacagtccaggaggt

SEQ ID NO: 5857 - RNA, 21 nt, synthetic construct
  source 1..21: mol_type = other RNA
tagtgaacagtgggaatgtcc

SEQ ID NO: 5858 - RNA, 21 nt, synthetic construct
  source 1..21: mol_type = other RNA
tagtgcagatgctggtcttag

SEQ ID NO: 5859 - RNA, 21 nt, synthetic construct
  source 1..21: mol_type = other RNA
tagtgttcctttttccaggta

SEQ ID NO: 5860 - RNA, 21 nt, synthetic construct
  source 1..21: mol_type = other RNA
tagtttgggccttggctatga

SEQ ID NO: 5861 - RNA, 21 nt, synthetic construct
  source 1..21: mol_type = other RNA
tataaagtactactgtagaac

SEQ ID NO: 5862 - RNA, 21 nt, synthetic construct
  source 1..21: mol_type = other RNA
tataaatacagtaaggacctt

SEQ ID NO: 5863 - RNA, 21 nt, synthetic construct
  source 1..21: mol_type = other RNA
tataataaatgggaaatgtcg

SEQ ID NO: 5864 - RNA, 21 nt, synthetic construct
  source 1..21: mol_type = other RNA
tatacactaagctctctagaa

SEQ ID NO: 5865 - RNA, 21 nt, synthetic construct
  source 1..21: mol_type = other RNA
tatagtcctacagtccaggag

SEQ ID NO: 5866 - RNA, 21 nt, synthetic construct
  source 1..21: mol_type = other RNA
tatatagtcctacagtccagg

SEQ ID NO: 5867 - RNA, 21 nt, synthetic construct
  source 1..21: mol_type = other RNA
tatatattgagagcatgtgtc

SEQ ID NO: 5868 - RNA, 21 nt, synthetic construct
  source 1..21: mol_type = other RNA
tatatgcaggctgtcgttccg

SEQ ID NO: 5869 - RNA, 21 nt, synthetic construct
  source 1..21: mol_type = other RNA
tatattaccatttttcaccca

SEQ ID NO: 5870 - RNA, 21 nt, synthetic construct
  source 1..21: mol_type = other RNA
tatattgagagcatgtgtcag

SEQ ID NO: 5871 - RNA, 21 nt, synthetic construct
  source 1..21: mol_type = other RNA
tatatttggggatcaagggac

SEQ ID NO: 5872 - RNA, 21 nt, synthetic construct
  source 1..21: mol_type = other RNA
tatcagttcagttactcactg

SEQ ID NO: 5873 - RNA, 21 nt, synthetic construct
  source 1..21: mol_type = other RNA
tatccagccgtggaaacactg

SEQ ID NO: 5874 - RNA, 21 nt, synthetic construct
  source 1..21: mol_type = other RNA
tatctcctgctggagactggc

SEQ ID NO: 5875 - RNA, 21 nt, synthetic construct
  source 1..21: mol_type = other RNA
tatgaatgtcagaaagtcatg

SEQ ID NO: 5876 - RNA, 21 nt, synthetic construct
  source 1..21: mol_type = other RNA
tatgagaaccccacctacaaa

SEQ ID NO: 5877 - RNA, 21 nt, synthetic construct
  source 1..21: mol_type = other RNA
tatgcaggctgtcgttccggt

SEQ ID NO: 5878 - RNA, 21 nt, synthetic construct
  source 1..21: mol_type = other RNA
tatgctacagagggtgaaaac

SEQ ID NO: 5879 - RNA, 21 nt, synthetic construct
  source 1..21: mol_type = other RNA
tatggagacacacaggtatcc

SEQ ID NO: 5880 - RNA, 21 nt, synthetic construct
  source 1..21: mol_type = other RNA
tatggggaaatcctatctcta

SEQ ID NO: 5881 - RNA, 21 nt, synthetic construct
  source 1..21: mol_type = other RNA
tatgttgtgtaagtcaactct

SEQ ID NO: 5882 - RNA, 21 nt, synthetic construct
  source 1..21: mol_type = other RNA
tattaattccacaggttccca

SEQ ID NO: 5883 - RNA, 21 nt, synthetic construct
  source 1..21: mol_type = other RNA
tattaccatttttcacccatt

SEQ ID NO: 5884 - RNA, 21 nt, synthetic construct
  source 1..21: mol_type = other RNA
tattagagataggatttcccc

SEQ ID NO: 5885 - RNA, 21 nt, synthetic construct
  source 1..21: mol_type = other RNA
tattccaccccatttctcagc

SEQ ID NO: 5886 - RNA, 21 nt, synthetic construct
  source 1..21: mol_type = other RNA
tattccagcgtcttctagaga

SEQ ID NO: 5887 - RNA, 21 nt, synthetic construct
  source 1..21: mol_type = other RNA
tattccctttttaaatgagct

SEQ ID NO: 5888 - RNA, 21 nt, synthetic construct
  source 1..21: mol_type = other RNA
tattgaaaatcgacatttccc

SEQ ID NO: 5889 - RNA, 21 nt, synthetic construct
  source 1..21: mol_type = other RNA
tattgaccagggtgatctcaa

SEQ ID NO: 5890 - RNA, 21 nt, synthetic construct
  source 1..21: mol_type = other RNA
tattgagagcatgtgtcagac

SEQ ID NO: 5891 - RNA, 21 nt, synthetic construct
  source 1..21: mol_type = other RNA
tattgcagatatttgatgtag

SEQ ID NO: 5892 - RNA, 21 nt, synthetic construct
  source 1..21: mol_type = other RNA
tattgtctgacacatgctctc

SEQ ID NO: 5893 - RNA, 21 nt, synthetic construct
  source 1..21: mol_type = other RNA
tatttatatttggggatcaag

SEQ ID NO: 5894 - RNA, 21 nt, synthetic construct
  source 1..21: mol_type = other RNA
tatttccttagtgttcctttt

SEQ ID NO: 5895 - RNA, 21 nt, synthetic construct
  source 1..21: mol_type = other RNA
tatttggggatcaagggactc

SEQ ID NO: 5896 - RNA, 21 nt, synthetic construct
  source 1..21: mol_type = other RNA
tatttgtaggtggggttctca

SEQ ID NO: 5897 - RNA, 21 nt, synthetic construct
  source 1..21: mol_type = other RNA
tattttctttctcctgtgttt

SEQ ID NO: 5898 - RNA, 21 nt, synthetic construct
  source 1..21: mol_type = other RNA
tcaaagaggcaatgctttcga

SEQ ID NO: 5899 - RNA, 21 nt, synthetic construct
  source 1..21: mol_type = other RNA
tcaaatatctgcaatagatca

SEQ ID NO: 5900 - RNA, 21 nt, synthetic construct
  source 1..21: mol_type = other RNA
tcaacattagtttgggccttg

SEQ ID NO: 5901 - RNA, 21 nt, synthetic construct
  source 1..21: mol_type = other RNA
tcaacctggaagaacaaaacc

SEQ ID NO: 5902 - RNA, 21 nt, synthetic construct
  source 1..21: mol_type = other RNA
tcaactcttcagcctcattca

SEQ ID NO: 5903 - RNA, 21 nt, synthetic construct
  source 1..21: mol_type = other RNA
tcaactggatttcctagcacc

SEQ ID NO: 5904 - RNA, 21 nt, synthetic construct
  source 1..21: mol_type = other RNA
tcaagaaactggtcctttcac

SEQ ID NO: 5905 - RNA, 21 nt, synthetic construct
  source 1..21: mol_type = other RNA
tcaagggactctggacattcc

SEQ ID NO: 5906 - RNA, 21 nt, synthetic construct
  source 1..21: mol_type = other RNA
tcaatatggggaaatcctatc

SEQ ID NO: 5907 - RNA, 21 nt, synthetic construct
  source 1..21: mol_type = other RNA
tcacatcattttgcgagggtc

SEQ ID NO: 5908 - RNA, 21 nt, synthetic construct
  source 1..21: mol_type = other RNA
tcacatgactttctgacattc

SEQ ID NO: 5909 - RNA, 21 nt, synthetic construct
  source 1..21: mol_type = other RNA
tcaccaaggacgttaaaggca

SEQ ID NO: 5910 - RNA, 21 nt, synthetic construct
  source 1..21: mol_type = other RNA
tcaccaccggttctcatttgg

SEQ ID NO: 5911 - RNA, 21 nt, synthetic construct
  source 1..21: mol_type = other RNA
tcaccacggtgctaggaaatc

SEQ ID NO: 5912 - RNA, 21 nt, synthetic construct
  source 1..21: mol_type = other RNA
tcacccatttaaaagaatgga

SEQ ID NO: 5913 - RNA, 21 nt, synthetic construct
  source 1..21: mol_type = other RNA
tcaccccagaagagcgtcacc

SEQ ID NO: 5914 - RNA, 21 nt, synthetic construct
  source 1..21: mol_type = other RNA
tcaccctctgtagcataaaat

SEQ ID NO: 5915 - RNA, 21 nt, synthetic construct
  source 1..21: mol_type = other RNA
tcaccctggtcaatatgggga

SEQ ID NO: 5916 - RNA, 21 nt, synthetic construct
  source 1..21: mol_type = other RNA
tcacctgaacaagatgcagaa

SEQ ID NO: 5917 - RNA, 21 nt, synthetic construct
  source 1..21: mol_type = other RNA
tcacggaagatgacagtcaac

SEQ ID NO: 5918 - RNA, 21 nt, synthetic construct
  source 1..21: mol_type = other RNA
tcacgtgcttcagtggccatt

SEQ ID NO: 5919 - RNA, 21 nt, synthetic construct
  source 1..21: mol_type = other RNA
tcactaaggagtgagtggcaa

SEQ ID NO: 5920 - RNA, 21 nt, synthetic construct
  source 1..21: mol_type = other RNA
tcactcctcgagtactggaca

SEQ ID NO: 5921 - RNA, 21 nt, synthetic construct
  source 1..21: mol_type = other RNA
tcactccttagtgaacagtgg

SEQ ID NO: 5922 - RNA, 21 nt, synthetic construct
  source 1..21: mol_type = other RNA
tcactggattcctaggtcgtg

SEQ ID NO: 5923 - RNA, 21 nt, synthetic construct
  source 1..21: mol_type = other RNA
tcactgtcctggcttttattt

SEQ ID NO: 5924 - RNA, 21 nt, synthetic construct
  source 1..21: mol_type = other RNA
tcagaaaccccacttccattg

SEQ ID NO: 5925 - RNA, 21 nt, synthetic construct
  source 1..21: mol_type = other RNA
tcagaaagtcatgtgaacatt

SEQ ID NO: 5926 - RNA, 21 nt, synthetic construct
  source 1..21: mol_type = other RNA
tcagaactgaaaaagaccaga

SEQ ID NO: 5927 - RNA, 21 nt, synthetic construct
  source 1..21: mol_type = other RNA
tcagacaatacaatggaagtg

SEQ ID NO: 5928 - RNA, 21 nt, synthetic construct
  source 1..21: mol_type = other RNA
tcagacgcagcccctggcagc

SEQ ID NO: 5929 - RNA, 21 nt, synthetic construct
  source 1..21: mol_type = other RNA
tcagattatttccttagtgtt

SEQ ID NO: 5930 - RNA, 21 nt, synthetic construct
  source 1..21: mol_type = other RNA
tcagcaacttcctgaaagctc

SEQ ID NO: 5931 - RNA, 21 nt, synthetic construct
  source 1..21: mol_type = other RNA
tcagcactttctaaatttcct

SEQ ID NO: 5932 - RNA, 21 nt, synthetic construct
  source 1..21: mol_type = other RNA
tcagcagtaggctagcaagca

SEQ ID NO: 5933 - RNA, 21 nt, synthetic construct
  source 1..21: mol_type = other RNA
tcagcccctgccacaaggggc

SEQ ID NO: 5934 - RNA, 21 nt, synthetic construct
  source 1..21: mol_type = other RNA
tcagcctcattcactgtcctg

SEQ ID NO: 5935 - RNA, 21 nt, synthetic construct
  source 1..21: mol_type = other RNA
tcagcctcccacctagctgag

SEQ ID NO: 5936 - RNA, 21 nt, synthetic construct
  source 1..21: mol_type = other RNA
tcagcgcactgcaacctctgt

SEQ ID NO: 5937 - RNA, 21 nt, synthetic construct
  source 1..21: mol_type = other RNA
tcagctaggtgggaggctgag

SEQ ID NO: 5938 - RNA, 21 nt, synthetic construct
  source 1..21: mol_type = other RNA
tcaggaagttgctgagaaatg

SEQ ID NO: 5939 - RNA, 21 nt, synthetic construct
  source 1..21: mol_type = other RNA
tcaggatgtcagacgcagccc

SEQ ID NO: 5940 - RNA, 21 nt, synthetic construct
  source 1..21: mol_type = other RNA
tcaggatttgagatcaccctg

SEQ ID NO: 5941 - RNA, 21 nt, synthetic construct
  source 1..21: mol_type = other RNA
tcagggctctcgtttcgaaag

SEQ ID NO: 5942 - RNA, 21 nt, synthetic construct
  source 1..21: mol_type = other RNA
tcaggggattgtgcagcaaat

SEQ ID NO: 5943 - RNA, 21 nt, synthetic construct
  source 1..21: mol_type = other RNA
tcaggtctcccagcaccctgt

SEQ ID NO: 5944 - RNA, 21 nt, synthetic construct
  source 1..21: mol_type = other RNA
tcaggtgacgctcttctgggg

SEQ ID NO: 5945 - RNA, 21 nt, synthetic construct
  source 1..21: mol_type = other RNA
tcaggttttgttcttccaggt

SEQ ID NO: 5946 - RNA, 21 nt, synthetic construct
  source 1..21: mol_type = other RNA
tcagtaaccagcagaagacag

SEQ ID NO: 5947 - RNA, 21 nt, synthetic construct
  source 1..21: mol_type = other RNA
tcagtggccattacagttccc

SEQ ID NO: 5948 - RNA, 21 nt, synthetic construct
  source 1..21: mol_type = other RNA
tcagttactcactggattcct

SEQ ID NO: 5949 - RNA, 21 nt, synthetic construct
  source 1..21: mol_type = other RNA
tcagttcagttactcactgga

SEQ ID NO: 5950 - RNA, 21 nt, synthetic construct
  source 1..21: mol_type = other RNA
tcagttctgaaattctacagc

SEQ ID NO: 5951 - RNA, 21 nt, synthetic construct
  source 1..21: mol_type = other RNA
tcatagccaaggcccaaacta

SEQ ID NO: 5952 - RNA, 21 nt, synthetic construct
  source 1..21: mol_type = other RNA
tcatagccatggttctgcatc

SEQ ID NO: 5953 - RNA, 21 nt, synthetic construct
  source 1..21: mol_type = other RNA
tcatctgtatacactaagctc

SEQ ID NO: 5954 - RNA, 21 nt, synthetic construct
  source 1..21: mol_type = other RNA
tcatcttccgtgagggctaag

SEQ ID NO: 5955 - RNA, 21 nt, synthetic construct
  source 1..21: mol_type = other RNA
tcatgtgaacattttatgcta

SEQ ID NO: 5956 - RNA, 21 nt, synthetic construct
  source 1..21: mol_type = other RNA
tcattaaggtccttactgtat

SEQ ID NO: 5957 - RNA, 21 nt, synthetic construct
  source 1..21: mol_type = other RNA
tcattcactgtcctggctttt

SEQ ID NO: 5958 - RNA, 21 nt, synthetic construct
  source 1..21: mol_type = other RNA
tcattgtggtgtctgggaaga

SEQ ID NO: 5959 - RNA, 21 nt, synthetic construct
  source 1..21: mol_type = other RNA
tcatttaaaaagggaatactg

SEQ ID NO: 5960 - RNA, 21 nt, synthetic construct
  source 1..21: mol_type = other RNA
tcatttggcctgtccggtggg

SEQ ID NO: 5961 - RNA, 21 nt, synthetic construct
  source 1..21: mol_type = other RNA
tcattttgcgagggtctctca

SEQ ID NO: 5962 - RNA, 21 nt, synthetic construct
  source 1..21: mol_type = other RNA
tccaaaaaaccaaaaaaccaa

SEQ ID NO: 5963 - RNA, 21 nt, synthetic construct
  source 1..21: mol_type = other RNA
tccaaaaacacgacctaggaa

SEQ ID NO: 5964 - RNA, 21 nt, synthetic construct
  source 1..21: mol_type = other RNA
tccaatgctcaccccagaaga

SEQ ID NO: 5965 - RNA, 21 nt, synthetic construct
  source 1..21: mol_type = other RNA
tccacaggttcccacccccaa

SEQ ID NO: 5966 - RNA, 21 nt, synthetic construct
  source 1..21: mol_type = other RNA
tccaccccatttctcagcaac

SEQ ID NO: 5967 - RNA, 21 nt, synthetic construct
  source 1..21: mol_type = other RNA
tccacggctggatacctgtgt

SEQ ID NO: 5968 - RNA, 21 nt, synthetic construct
  source 1..21: mol_type = other RNA
tccagagtcccttgatcccca

SEQ ID NO: 5969 - RNA, 21 nt, synthetic construct
  source 1..21: mol_type = other RNA
tccagcaggagataaaaccaa

SEQ ID NO: 5970 - RNA, 21 nt, synthetic construct
  source 1..21: mol_type = other RNA
tccagccgtggaaacactgga

SEQ ID NO: 5971 - RNA, 21 nt, synthetic construct
  source 1..21: mol_type = other RNA
tccagcgtcttctagagagct

SEQ ID NO: 5972 - RNA, 21 nt, synthetic construct
  source 1..21: mol_type = other RNA
tccaggaggtcaggatgtcag

SEQ ID NO: 5973 - RNA, 21 nt, synthetic construct
  source 1..21: mol_type = other RNA
tccaggtatttgtaggtgggg

SEQ ID NO: 5974 - RNA, 21 nt, synthetic construct
  source 1..21: mol_type = other RNA
tccaggttgatccaatgctca

SEQ ID NO: 5975 - RNA, 21 nt, synthetic construct
  source 1..21: mol_type = other RNA
tccagtactcgaggagtgaag

SEQ ID NO: 5976 - RNA, 21 nt, synthetic construct
  source 1..21: mol_type = other RNA
tccagtgagtaactgaactga

SEQ ID NO: 5977 - RNA, 21 nt, synthetic construct
  source 1..21: mol_type = other RNA
tccagtgtttccacggctgga

SEQ ID NO: 5978 - RNA, 21 nt, synthetic construct
  source 1..21: mol_type = other RNA
tccagttgactgtcatcttcc

SEQ ID NO: 5979 - RNA, 21 nt, synthetic construct
  source 1..21: mol_type = other RNA
tccataaaagtcctgtcacca

SEQ ID NO: 5980 - RNA, 21 nt, synthetic construct
  source 1..21: mol_type = other RNA
tccattcttttaaatgggtga

SEQ ID NO: 5981 - RNA, 21 nt, synthetic construct
  source 1..21: mol_type = other RNA
tccattgtattgtctgacaca

SEQ ID NO: 5982 - RNA, 21 nt, synthetic construct
  source 1..21: mol_type = other RNA
tcccaccggacaggccaaatg

SEQ ID NO: 5983 - RNA, 21 nt, synthetic construct
  source 1..21: mol_type = other RNA
tcccaccgtctgcttgctagc

SEQ ID NO: 5984 - RNA, 21 nt, synthetic construct
  source 1..21: mol_type = other RNA
tcccacctagctgagactaca

SEQ ID NO: 5985 - RNA, 21 nt, synthetic construct
  source 1..21: mol_type = other RNA
tcccacgattccgatcgactg

SEQ ID NO: 5986 - RNA, 21 nt, synthetic construct
  source 1..21: mol_type = other RNA
tcccactgttcactaaggagt

SEQ ID NO: 5987 - RNA, 21 nt, synthetic construct
  source 1..21: mol_type = other RNA
tcccagacaccacaatgaccc

SEQ ID NO: 5988 - RNA, 21 nt, synthetic construct
  source 1..21: mol_type = other RNA
tcccagcaccctgtgcaggtc

SEQ ID NO: 5989 - RNA, 21 nt, synthetic construct
  source 1..21: mol_type = other RNA
tcccagggctcattaaggtcc

SEQ ID NO: 5990 - RNA, 21 nt, synthetic construct
  source 1..21: mol_type = other RNA
tccccaaatataaatacagta

SEQ ID NO: 5991 - RNA, 21 nt, synthetic construct
  source 1..21: mol_type = other RNA
tccccatattgaccagggtga

SEQ ID NO: 5992 - RNA, 21 nt, synthetic construct
  source 1..21: mol_type = other RNA
tcccctgaggaccaaatgcag

SEQ ID NO: 5993 - RNA, 21 nt, synthetic construct
  source 1..21: mol_type = other RNA
tcccctggtcccaccgtctgc

SEQ ID NO: 5994 - RNA, 21 nt, synthetic construct
  source 1..21: mol_type = other RNA
tccccttattttctttctcct

SEQ ID NO: 5995 - RNA, 21 nt, synthetic construct
  source 1..21: mol_type = other RNA
tccctattccaccccatttct

SEQ ID NO: 5996 - RNA, 21 nt, synthetic construct
  source 1..21: mol_type = other RNA
tccctgccacctaaatctgca

SEQ ID NO: 5997 - RNA, 21 nt, synthetic construct
  source 1..21: mol_type = other RNA
tcccttgatccccaaatataa

SEQ ID NO: 5998 - RNA, 21 nt, synthetic construct
  source 1..21: mol_type = other RNA
tccctttttaaatgagctttc

SEQ ID NO: 5999 - RNA, 21 nt, synthetic construct
  source 1..21: mol_type = other RNA
tccgatcgactgccaagcagc

SEQ ID NO: 6000 - RNA, 21 nt, synthetic construct
  source 1..21: mol_type = other RNA
tccggcccacctgcatccctc

SEQ ID NO: 6001 - RNA, 21 nt, synthetic construct
  source 1..21: mol_type = other RNA
tccggtgggaacgggctgctg

SEQ ID NO: 6002 - RNA, 21 nt, synthetic construct
  source 1..21: mol_type = other RNA
tccggttatgttgtgtaagtc

SEQ ID NO: 6003 - RNA, 21 nt, synthetic construct
  source 1..21: mol_type = other RNA
tccgtgagggctaagctttca

SEQ ID NO: 6004 - RNA, 21 nt, synthetic construct
  source 1..21: mol_type = other RNA
tcctacagtccaggaggtcag

SEQ ID NO: 6005 - RNA, 21 nt, synthetic construct
  source 1..21: mol_type = other RNA
tcctagcaccgtggtgacaag

SEQ ID NO: 6006 - RNA, 21 nt, synthetic construct
  source 1..21: mol_type = other RNA
tcctaggtcgtgtttttggaa

SEQ ID NO: 6007 - RNA, 21 nt, synthetic construct
  source 1..21: mol_type = other RNA
tcctcaggggattgtgcagca

SEQ ID NO: 6008 - RNA, 21 nt, synthetic construct
  source 1..21: mol_type = other RNA
tcctcgagtactggacatgct

SEQ ID NO: 6009 - RNA, 21 nt, synthetic construct
  source 1..21: mol_type = other RNA
tcctgaaagctcatttaaaaa

SEQ ID NO: 6010 - RNA, 21 nt, synthetic construct
  source 1..21: mol_type = other RNA
tcctgacctcctggactgtag

SEQ ID NO: 6011 - RNA, 21 nt, synthetic construct
  source 1..21: mol_type = other RNA
tcctgctggagactggcctag

SEQ ID NO: 6012 - RNA, 21 nt, synthetic construct
  source 1..21: mol_type = other RNA
tcctggactgtaggactatat

SEQ ID NO: 6013 - RNA, 21 nt, synthetic construct
  source 1..21: mol_type = other RNA
tcctggcttttatttaaagaa

SEQ ID NO: 6014 - RNA, 21 nt, synthetic construct
  source 1..21: mol_type = other RNA
tcctgtcaccaaggacgttaa

SEQ ID NO: 6015 - RNA, 21 nt, synthetic construct
  source 1..21: mol_type = other RNA
tcctgtgtttcaccaccggtt

SEQ ID NO: 6016 - RNA, 21 nt, synthetic construct
  source 1..21: mol_type = other RNA
tcctgttgctcctttccccca

SEQ ID NO: 6017 - RNA, 21 nt, synthetic construct
  source 1..21: mol_type = other RNA
tccttagtgaacagtgggaat

SEQ ID NO: 6018 - RNA, 21 nt, synthetic construct
  source 1..21: mol_type = other RNA
tccttagtgttcctttttcca

SEQ ID NO: 6019 - RNA, 21 nt, synthetic construct
  source 1..21: mol_type = other RNA
tccttggtgacaggactttta

SEQ ID NO: 6020 - RNA, 21 nt, synthetic construct
  source 1..21: mol_type = other RNA
tcctttcacatcattttgcga

SEQ ID NO: 6021 - RNA, 21 nt, synthetic construct
  source 1..21: mol_type = other RNA
tcctttttccaggtatttttt

SEQ ID NO: 6022 - RNA, 21 nt, synthetic construct
  source 1..21: mol_type = other RNA
tcgaaacgagagccctgaaag

SEQ ID NO: 6023 - RNA, 21 nt, synthetic construct
  source 1..21: mol_type = other RNA
tcgaaagcattgcctctttga

SEQ ID NO: 6024 - RNA, 21 nt, synthetic construct
  source 1..21: mol_type = other RNA
tcgacatttcccatttattat

SEQ ID NO: 6025 - RNA, 21 nt, synthetic construct
  source 1..21: mol_type = other RNA
tcgactgccaagcagcagccg

SEQ ID NO: 6026 - RNA, 21 nt, synthetic construct
  source 1..21: mol_type = other RNA
tcgaggagtgaagatgcctat

SEQ ID NO: 6027 - RNA, 21 nt, synthetic construct
  source 1..21: mol_type = other RNA
tcgagtactggacatgctgct

SEQ ID NO: 6028 - RNA, 21 nt, synthetic construct
  source 1..21: mol_type = other RNA
tcgatcggaatcgtgggatct

SEQ ID NO: 6029 - RNA, 21 nt, synthetic construct
  source 1..21: mol_type = other RNA
tcgcaaaatgatgtgaaagga

SEQ ID NO: 6030 - RNA, 21 nt, synthetic construct
  source 1..21: mol_type = other RNA
tcggaatcgtgggatcttccg

SEQ ID NO: 6031 - RNA, 21 nt, synthetic construct
  source 1..21: mol_type = other RNA
tcggcgccactgcttactacc

SEQ ID NO: 6032 - RNA, 21 nt, synthetic construct
  source 1..21: mol_type = other RNA
tcgtgggatcttccggcccac

SEQ ID NO: 6033 - RNA, 21 nt, synthetic construct
  source 1..21: mol_type = other RNA
tcgtgtttttggaaatcagcc

SEQ ID NO: 6034 - RNA, 21 nt, synthetic construct
  source 1..21: mol_type = other RNA
tcgttccggttatgttgtgta

SEQ ID NO: 6035 - RNA, 21 nt, synthetic construct
  source 1..21: mol_type = other RNA
tcgtttcgaaagcattgcctc

SEQ ID NO: 6036 - RNA, 21 nt, synthetic construct
  source 1..21: mol_type = other RNA
tctaaatttcctgttgctcct

SEQ ID NO: 6037 - RNA, 21 nt, synthetic construct
  source 1..21: mol_type = other RNA
tctacagctaggccagtctcc

SEQ ID NO: 6038 - RNA, 21 nt, synthetic construct
  source 1..21: mol_type = other RNA
tctagaagacgctggaataaa

SEQ ID NO: 6039 - RNA, 21 nt, synthetic construct
  source 1..21: mol_type = other RNA
tctagagagcttagtgtatac

SEQ ID NO: 6040 - RNA, 21 nt, synthetic construct
  source 1..21: mol_type = other RNA
tctattgcagatatttgatgt

SEQ ID NO: 6041 - RNA, 21 nt, synthetic construct
  source 1..21: mol_type = other RNA
tctcacgtgcttcagtggcca

SEQ ID NO: 6042 - RNA, 21 nt, synthetic construct
  source 1..21: mol_type = other RNA
tctcagattatttccttagtg

SEQ ID NO: 6043 - RNA, 21 nt, synthetic construct
  source 1..21: mol_type = other RNA
tctcagcaacttcctgaaagc

SEQ ID NO: 6044 - RNA, 21 nt, synthetic construct
  source 1..21: mol_type = other RNA
tctcagctaggtgggaggctg

SEQ ID NO: 6045 - RNA, 21 nt, synthetic construct
  source 1..21: mol_type = other RNA
tctcatagccatggttctgca

SEQ ID NO: 6046 - RNA, 21 nt, synthetic construct
  source 1..21: mol_type = other RNA
tctcatttggcctgtccggtg

SEQ ID NO: 6047 - RNA, 21 nt, synthetic construct
  source 1..21: mol_type = other RNA
tctccaaaaaaccaaaaaacc

SEQ ID NO: 6048 - RNA, 21 nt, synthetic construct
  source 1..21: mol_type = other RNA
tctccagcaggagataaaacc

SEQ ID NO: 6049 - RNA, 21 nt, synthetic construct
  source 1..21: mol_type = other RNA
tctccataaaagtcctgtcac

SEQ ID NO: 6050 - RNA, 21 nt, synthetic construct
  source 1..21: mol_type = other RNA
tctcccagcaccctgtgcagg

SEQ ID NO: 6051 - RNA, 21 nt, synthetic construct
  source 1..21: mol_type = other RNA
tctcccgggttcaggtgattc

SEQ ID NO: 6052 - RNA, 21 nt, synthetic construct
  source 1..21: mol_type = other RNA
tctcctgctggagactggcct

SEQ ID NO: 6053 - RNA, 21 nt, synthetic construct
  source 1..21: mol_type = other RNA
tctcctgtgtttcaccaccgg

SEQ ID NO: 6054 - RNA, 21 nt, synthetic construct
  source 1..21: mol_type = other RNA
tctcgtttcgaaagcattgcc

SEQ ID NO: 6055 - RNA, 21 nt, synthetic construct
  source 1..21: mol_type = other RNA
tctctagaagacgctggaata

SEQ ID NO: 6056 - RNA, 21 nt, synthetic construct
  source 1..21: mol_type = other RNA
tctctcacgtgcttcagtggc

SEQ ID NO: 6057 - RNA, 21 nt, synthetic construct
  source 1..21: mol_type = other RNA
tctctggtctttttcagttct

SEQ ID NO: 6058 - RNA, 21 nt, synthetic construct
  source 1..21: mol_type = other RNA
tctcttcccagacaccacaat

SEQ ID NO: 6059 - RNA, 21 nt, synthetic construct
  source 1..21: mol_type = other RNA
tctgaaattctacagctaggc

SEQ ID NO: 6060 - RNA, 21 nt, synthetic construct
  source 1..21: mol_type = other RNA
tctgacacatgctctcaatat

SEQ ID NO: 6061 - RNA, 21 nt, synthetic construct
  source 1..21: mol_type = other RNA
tctgacatcctgacctcctgg

SEQ ID NO: 6062 - RNA, 21 nt, synthetic construct
  source 1..21: mol_type = other RNA
tctgacattcatagccaaggc

SEQ ID NO: 6063 - RNA, 21 nt, synthetic construct
  source 1..21: mol_type = other RNA
tctgagaaaagagttttcacc

SEQ ID NO: 6064 - RNA, 21 nt, synthetic construct
  source 1..21: mol_type = other RNA
tctgcactaatttcccagggc

SEQ ID NO: 6065 - RNA, 21 nt, synthetic construct
  source 1..21: mol_type = other RNA
tctgcatctgctccaggtatt

SEQ ID NO: 6066 - RNA, 21 nt, synthetic construct
  source 1..21: mol_type = other RNA
tctgcatcttgttcaggtgac

SEQ ID NO: 6067 - RNA, 21 nt, synthetic construct
  source 1..21: mol_type = other RNA
tctgctccaggtatttgtagg

SEQ ID NO: 6068 - RNA, 21 nt, synthetic construct
  source 1..21: mol_type = other RNA
tctgctggttactgaacttgt

SEQ ID NO: 6069 - RNA, 21 nt, synthetic construct
  source 1..21: mol_type = other RNA
tctgcttcagcactttctaaa

SEQ ID NO: 6070 - RNA, 21 nt, synthetic construct
  source 1..21: mol_type = other RNA
tctgcttgctagcctactgct

SEQ ID NO: 6071 - RNA, 21 nt, synthetic construct
  source 1..21: mol_type = other RNA
tctggacattcccactgttca

SEQ ID NO: 6072 - RNA, 21 nt, synthetic construct
  source 1..21: mol_type = other RNA
tctgggaagagacctgcacag

SEQ ID NO: 6073 - RNA, 21 nt, synthetic construct
  source 1..21: mol_type = other RNA
tctggggtgagcattggatca

SEQ ID NO: 6074 - RNA, 21 nt, synthetic construct
  source 1..21: mol_type = other RNA
tctggtctttttcagttctga

SEQ ID NO: 6075 - RNA, 21 nt, synthetic construct
  source 1..21: mol_type = other RNA
tctgtagcataaaatgttcac

SEQ ID NO: 6076 - RNA, 21 nt, synthetic construct
  source 1..21: mol_type = other RNA
tctgtatacactaagctctct

SEQ ID NO: 6077 - RNA, 21 nt, synthetic construct
  source 1..21: mol_type = other RNA
tctgtctcccgggttcaggtg

SEQ ID NO: 6078 - RNA, 21 nt, synthetic construct
  source 1..21: mol_type = other RNA
tctgtcttctgctggttactg

SEQ ID NO: 6079 - RNA, 21 nt, synthetic construct
  source 1..21: mol_type = other RNA
tctgttctgtcttctgctggt

SEQ ID NO: 6080 - RNA, 21 nt, synthetic construct
  source 1..21: mol_type = other RNA
tcttcactcctcgagtactgg

SEQ ID NO: 6081 - RNA, 21 nt, synthetic construct
  source 1..21: mol_type = other RNA
tcttcagcctcattcactgtc

SEQ ID NO: 6082 - RNA, 21 nt, synthetic construct
  source 1..21: mol_type = other RNA
tcttccaggttgatccaatgc

SEQ ID NO: 6083 - RNA, 21 nt, synthetic construct
  source 1..21: mol_type = other RNA
tcttcccagacaccacaatga

SEQ ID NO: 6084 - RNA, 21 nt, synthetic construct
  source 1..21: mol_type = other RNA
tcttccggcccacctgcatcc

SEQ ID NO: 6085 - RNA, 21 nt, synthetic construct
  source 1..21: mol_type = other RNA
tcttccgtgagggctaagctt

SEQ ID NO: 6086 - RNA, 21 nt, synthetic construct
  source 1..21: mol_type = other RNA
tcttctagagagcttagtgta

SEQ ID NO: 6087 - RNA, 21 nt, synthetic construct
  source 1..21: mol_type = other RNA
tcttctgctggttactgaact

SEQ ID NO: 6088 - RNA, 21 nt, synthetic construct
  source 1..21: mol_type = other RNA
tcttctggggtgagcattgga

SEQ ID NO: 6089 - RNA, 21 nt, synthetic construct
  source 1..21: mol_type = other RNA
tcttgaagtccagtgtttcca

SEQ ID NO: 6090 - RNA, 21 nt, synthetic construct
  source 1..21: mol_type = other RNA
tcttgccactcactccttagt

SEQ ID NO: 6091 - RNA, 21 nt, synthetic construct
  source 1..21: mol_type = other RNA
tcttgttcaggtgacgctctt

SEQ ID NO: 6092 - RNA, 21 nt, synthetic construct
  source 1..21: mol_type = other RNA
tctttaaataaaagccaggac

SEQ ID NO: 6093 - RNA, 21 nt, synthetic construct
  source 1..21: mol_type = other RNA
tctttctcctgtgtttcacca

SEQ ID NO: 6094 - RNA, 21 nt, synthetic construct
  source 1..21: mol_type = other RNA
tctttgatccccttattttct

SEQ ID NO: 6095 - RNA, 21 nt, synthetic construct
  source 1..21: mol_type = other RNA
tcttttctcagattatttcct

SEQ ID NO: 6096 - RNA, 21 nt, synthetic construct
  source 1..21: mol_type = other RNA
tctttttcagttctgaaattc

SEQ ID NO: 6097 - RNA, 21 nt, synthetic construct
  source 1..21: mol_type = other RNA
tgaaaaagaccagagatcccc

SEQ ID NO: 6098 - RNA, 21 nt, synthetic construct
  source 1..21: mol_type = other RNA
tgaaaactcttttctcagatt

SEQ ID NO: 6099 - RNA, 21 nt, synthetic construct
  source 1..21: mol_type = other RNA
tgaaaatcgacatttcccatt

SEQ ID NO: 6100 - RNA, 21 nt, synthetic construct
  source 1..21: mol_type = other RNA
tgaaacacaggagaaagaaaa

SEQ ID NO: 6101 - RNA, 21 nt, synthetic construct
  source 1..21: mol_type = other RNA
tgaaagctcatttaaaaaggg

SEQ ID NO: 6102 - RNA, 21 nt, synthetic construct
  source 1..21: mol_type = other RNA
tgaaagcttagccctcacgga

SEQ ID NO: 6103 - RNA, 21 nt, synthetic construct
  source 1..21: mol_type = other RNA
tgaaaggaccagtttcttgaa

SEQ ID NO: 6104 - RNA, 21 nt, synthetic construct
  source 1..21: mol_type = other RNA
tgaaagttggcaacagcccct

SEQ ID NO: 6105 - RNA, 21 nt, synthetic construct
  source 1..21: mol_type = other RNA
tgaaattctacagctaggcca

SEQ ID NO: 6106 - RNA, 21 nt, synthetic construct
  source 1..21: mol_type = other RNA
tgaacaagatgcagaaccatg

SEQ ID NO: 6107 - RNA, 21 nt, synthetic construct
  source 1..21: mol_type = other RNA
tgaacagtgggaatgtccaga

SEQ ID NO: 6108 - RNA, 21 nt, synthetic construct
  source 1..21: mol_type = other RNA
tgaacattttatgctacagag

SEQ ID NO: 6109 - RNA, 21 nt, synthetic construct
  source 1..21: mol_type = other RNA
tgaactgataacagcagcatg

SEQ ID NO: 6110 - RNA, 21 nt, synthetic construct
  source 1..21: mol_type = other RNA
tgaacttgtcttgccactcac

SEQ ID NO: 6111 - RNA, 21 nt, synthetic construct
  source 1..21: mol_type = other RNA
tgaagagttgacttacacaac

SEQ ID NO: 6112 - RNA, 21 nt, synthetic construct
  source 1..21: mol_type = other RNA
tgaagatgcctattaattcca

SEQ ID NO: 6113 - RNA, 21 nt, synthetic construct
  source 1..21: mol_type = other RNA
tgaagcacgtgagagaccctc

SEQ ID NO: 6114 - RNA, 21 nt, synthetic construct
  source 1..21: mol_type = other RNA
tgaagcagactgtttctgttc

SEQ ID NO: 6115 - RNA, 21 nt, synthetic construct
  source 1..21: mol_type = other RNA
tgaagtccagtgtttccacgg

SEQ ID NO: 6116 - RNA, 21 nt, synthetic construct
  source 1..21: mol_type = other RNA
tgaatgaggctgaagagttga

SEQ ID NO: 6117 - RNA, 21 nt, synthetic construct
  source 1..21: mol_type = other RNA
tgaatgtcagaaagtcatgtg

SEQ ID NO: 6118 - RNA, 21 nt, synthetic construct
  source 1..21: mol_type = other RNA
tgacaagcaaggctcggcgcc

SEQ ID NO: 6119 - RNA, 21 nt, synthetic construct
  source 1..21: mol_type = other RNA
tgacacatgctctcaatatat

SEQ ID NO: 6120 - RNA, 21 nt, synthetic construct
  source 1..21: mol_type = other RNA
tgacaggacttttatggagac

SEQ ID NO: 6121 - RNA, 21 nt, synthetic construct
  source 1..21: mol_type = other RNA
tgacagtcaactggatttcct

SEQ ID NO: 6122 - RNA, 21 nt, synthetic construct
  source 1..21: mol_type = other RNA
tgacatcctgacctcctggac

SEQ ID NO: 6123 - RNA, 21 nt, synthetic construct
  source 1..21: mol_type = other RNA
tgacattcatagccaaggccc

SEQ ID NO: 6124 - RNA, 21 nt, synthetic construct
  source 1..21: mol_type = other RNA
tgaccagggtgatctcaaatc

SEQ ID NO: 6125 - RNA, 21 nt, synthetic construct
  source 1..21: mol_type = other RNA
tgaccctcaggttttgttctt

SEQ ID NO: 6126 - RNA, 21 nt, synthetic construct
  source 1..21: mol_type = other RNA
tgacctcctggactgtaggac

SEQ ID NO: 6127 - RNA, 21 nt, synthetic construct
  source 1..21: mol_type = other RNA
tgacgctcttctggggtgagc

SEQ ID NO: 6128 - RNA, 21 nt, synthetic construct
  source 1..21: mol_type = other RNA
tgactggcttgccttggctgg

SEQ ID NO: 6129 - RNA, 21 nt, synthetic construct
  source 1..21: mol_type = other RNA
tgactgtcatcttccgtgagg

SEQ ID NO: 6130 - RNA, 21 nt, synthetic construct
  source 1..21: mol_type = other RNA
tgacttacacaacataaccgg

SEQ ID NO: 6131 - RNA, 21 nt, synthetic construct
  source 1..21: mol_type = other RNA
tgactttctgacattcatagc

SEQ ID NO: 6132 - RNA, 21 nt, synthetic construct
  source 1..21: mol_type = other RNA
tgagaaaagagttttcaccct

SEQ ID NO: 6133 - RNA, 21 nt, synthetic construct
  source 1..21: mol_type = other RNA
tgagaaatggggtggaatagg

SEQ ID NO: 6134 - RNA, 21 nt, synthetic construct
  source 1..21: mol_type = other RNA
tgagaaccccacctacaaata

SEQ ID NO: 6135 - RNA, 21 nt, synthetic construct
  source 1..21: mol_type = other RNA
tgagaaccggtggtgaaacac

SEQ ID NO: 6136 - RNA, 21 nt, synthetic construct
  source 1..21: mol_type = other RNA
tgagagaccctcgcaaaatga

SEQ ID NO: 6137 - RNA, 21 nt, synthetic construct
  source 1..21: mol_type = other RNA
tgagagcatgtgtcagacaat

SEQ ID NO: 6138 - RNA, 21 nt, synthetic construct
  source 1..21: mol_type = other RNA
tgagatcaccctggtcaatat

SEQ ID NO: 6139 - RNA, 21 nt, synthetic construct
  source 1..21: mol_type = other RNA
tgagcattggatcaacctgga

SEQ ID NO: 6140 - RNA, 21 nt, synthetic construct
  source 1..21: mol_type = other RNA
tgagccatttgctgcacaatc

SEQ ID NO: 6141 - RNA, 21 nt, synthetic construct
  source 1..21: mol_type = other RNA
tgagccctgggaaattagtgc

SEQ ID NO: 6142 - RNA, 21 nt, synthetic construct
  source 1..21: mol_type = other RNA
tgagctactgcacctggccag

SEQ ID NO: 6143 - RNA, 21 nt, synthetic construct
  source 1..21: mol_type = other RNA
tgagctttcaggaagttgctg

SEQ ID NO: 6144 - RNA, 21 nt, synthetic construct
  source 1..21: mol_type = other RNA
tgaggaccaaatgcagccagc

SEQ ID NO: 6145 - RNA, 21 nt, synthetic construct
  source 1..21: mol_type = other RNA
tgaggctgaagagttgactta

SEQ ID NO: 6146 - RNA, 21 nt, synthetic construct
  source 1..21: mol_type = other RNA
tgagggctaagctttcagggc

SEQ ID NO: 6147 - RNA, 21 nt, synthetic construct
  source 1..21: mol_type = other RNA
tgagggtcattgtggtgtctg

SEQ ID NO: 6148 - RNA, 21 nt, synthetic construct
  source 1..21: mol_type = other RNA
tgagtaactgaactgataaca

SEQ ID NO: 6149 - RNA, 21 nt, synthetic construct
  source 1..21: mol_type = other RNA
tgagtggcaagacaagttcag

SEQ ID NO: 6150 - RNA, 21 nt, synthetic construct
  source 1..21: mol_type = other RNA
tgataacagcagcatgtccag

SEQ ID NO: 6151 - RNA, 21 nt, synthetic construct
  source 1..21: mol_type = other RNA
tgatccaatgctcaccccaga

SEQ ID NO: 6152 - RNA, 21 nt, synthetic construct
  source 1..21: mol_type = other RNA
tgatccccaaatataaataca

SEQ ID NO: 6153 - RNA, 21 nt, synthetic construct
  source 1..21: mol_type = other RNA
tgatccccttattttctttct

SEQ ID NO: 6154 - RNA, 21 nt, synthetic construct
  source 1..21: mol_type = other RNA
tgatctattgcagatatttga

SEQ ID NO: 6155 - RNA, 21 nt, synthetic construct
  source 1..21: mol_type = other RNA
tgatgtgaaaggaccagtttc

SEQ ID NO: 6156 - RNA, 21 nt, synthetic construct
  source 1..21: mol_type = other RNA
tgattcttgtgcctcagcctc

SEQ ID NO: 6157 - RNA, 21 nt, synthetic construct
  source 1..21: mol_type = other RNA
tgatttccaaaaacacgacct

SEQ ID NO: 6158 - RNA, 21 nt, synthetic construct
  source 1..21: mol_type = other RNA
tgcacaatcccctgaggacca

SEQ ID NO: 6159 - RNA, 21 nt, synthetic construct
  source 1..21: mol_type = other RNA
tgcacagggtgctgggagacc

SEQ ID NO: 6160 - RNA, 21 nt, synthetic construct
  source 1..21: mol_type = other RNA
tgcacctggccagttacttgg

SEQ ID NO: 6161 - RNA, 21 nt, synthetic construct
  source 1..21: mol_type = other RNA
tgcactaatttcccagggctc

SEQ ID NO: 6162 - RNA, 21 nt, synthetic construct
  source 1..21: mol_type = other RNA
tgcagaaccatggctatgaga

SEQ ID NO: 6163 - RNA, 21 nt, synthetic construct
  source 1..21: mol_type = other RNA
tgcagatatttgatgtagttt

SEQ ID NO: 6164 - RNA, 21 nt, synthetic construct
  source 1..21: mol_type = other RNA
tgcagatgctggtcttagtta

SEQ ID NO: 6165 - RNA, 21 nt, synthetic construct
  source 1..21: mol_type = other RNA
tgcagatttaggtggcaggga

SEQ ID NO: 6166 - RNA, 21 nt, synthetic construct
  source 1..21: mol_type = other RNA
tgcagcaaatggctcaggtct

SEQ ID NO: 6167 - RNA, 21 nt, synthetic construct
  source 1..21: mol_type = other RNA
tgcagccagcagcccgttccc

SEQ ID NO: 6168 - RNA, 21 nt, synthetic construct
  source 1..21: mol_type = other RNA
tgcaggctgtcgttccggtta

SEQ ID NO: 6169 - RNA, 21 nt, synthetic construct
  source 1..21: mol_type = other RNA
tgcaggtctcttcccagacac

SEQ ID NO: 6170 - RNA, 21 nt, synthetic construct
  source 1..21: mol_type = other RNA
tgcaggtgggccggaagatcc

SEQ ID NO: 6171 - RNA, 21 nt, synthetic construct
  source 1..21: mol_type = other RNA
tgcagttctacagtagtactt

SEQ ID NO: 6172 - RNA, 21 nt, synthetic construct
  source 1..21: mol_type = other RNA
tgcatccctccgccagggctg

SEQ ID NO: 6173 - RNA, 21 nt, synthetic construct
  source 1..21: mol_type = other RNA
tgcatctgctccaggtatttg

SEQ ID NO: 6174 - RNA, 21 nt, synthetic construct
  source 1..21: mol_type = other RNA
tgcatcttgttcaggtgacgc

SEQ ID NO: 6175 - RNA, 21 nt, synthetic construct
  source 1..21: mol_type = other RNA
tgcatttggtcctcaggggat

SEQ ID NO: 6176 - RNA, 21 nt, synthetic construct
  source 1..21: mol_type = other RNA
tgccaactttcaacattagtt

SEQ ID NO: 6177 - RNA, 21 nt, synthetic construct
  source 1..21: mol_type = other RNA
tgccaagcagcagccgctgcc

SEQ ID NO: 6178 - RNA, 21 nt, synthetic construct
  source 1..21: mol_type = other RNA
tgccacaaggggctgttgcca

SEQ ID NO: 6179 - RNA, 21 nt, synthetic construct
  source 1..21: mol_type = other RNA
tgccaccacgcccagctagtc

SEQ ID NO: 6180 - RNA, 21 nt, synthetic construct
  source 1..21: mol_type = other RNA
tgccacctaaatctgcatctg

SEQ ID NO: 6181 - RNA, 21 nt, synthetic construct
  source 1..21: mol_type = other RNA
tgccactcactccttagtgaa

SEQ ID NO: 6182 - RNA, 21 nt, synthetic construct
  source 1..21: mol_type = other RNA
tgccaggggctgcgtctgaca

SEQ ID NO: 6183 - RNA, 21 nt, synthetic construct
  source 1..21: mol_type = other RNA
tgccgcgctccctgccaccta

SEQ ID NO: 6184 - RNA, 21 nt, synthetic construct
  source 1..21: mol_type = other RNA
tgcctattaattccacaggtt

SEQ ID NO: 6185 - RNA, 21 nt, synthetic construct
  source 1..21: mol_type = other RNA
tgcctcagcctcccacctagc

SEQ ID NO: 6186 - RNA, 21 nt, synthetic construct
  source 1..21: mol_type = other RNA
tgcctctttgatccccttatt

SEQ ID NO: 6187 - RNA, 21 nt, synthetic construct
  source 1..21: mol_type = other RNA
tgccttggctggcccaggtag

SEQ ID NO: 6188 - RNA, 21 nt, synthetic construct
  source 1..21: mol_type = other RNA
tgcctttaacgtccttggtga

SEQ ID NO: 6189 - RNA, 21 nt, synthetic construct
  source 1..21: mol_type = other RNA
tgcgagggtctctcacgtgct

SEQ ID NO: 6190 - RNA, 21 nt, synthetic construct
  source 1..21: mol_type = other RNA
tgcgtctgacatcctgacctc

SEQ ID NO: 6191 - RNA, 21 nt, synthetic construct
  source 1..21: mol_type = other RNA
tgctacagagggtgaaaactc

SEQ ID NO: 6192 - RNA, 21 nt, synthetic construct
  source 1..21: mol_type = other RNA
tgctagcctactgctgactgg

SEQ ID NO: 6193 - RNA, 21 nt, synthetic construct
  source 1..21: mol_type = other RNA
tgctaggaaatccagttgact

SEQ ID NO: 6194 - RNA, 21 nt, synthetic construct
  source 1..21: mol_type = other RNA
tgctcaccccagaagagcgtc

SEQ ID NO: 6195 - RNA, 21 nt, synthetic construct
  source 1..21: mol_type = other RNA
tgctccaggtatttgtaggtg

SEQ ID NO: 6196 - RNA, 21 nt, synthetic construct
  source 1..21: mol_type = other RNA
tgctcctttcccccattaaaa

SEQ ID NO: 6197 - RNA, 21 nt, synthetic construct
  source 1..21: mol_type = other RNA
tgctgaagcagactgtttctg

SEQ ID NO: 6198 - RNA, 21 nt, synthetic construct
  source 1..21: mol_type = other RNA
tgctgactggcttgccttggc

SEQ ID NO: 6199 - RNA, 21 nt, synthetic construct
  source 1..21: mol_type = other RNA
tgctgagaaatggggtggaat

SEQ ID NO: 6200 - RNA, 21 nt, synthetic construct
  source 1..21: mol_type = other RNA
tgctgcacaatcccctgagga

SEQ ID NO: 6201 - RNA, 21 nt, synthetic construct
  source 1..21: mol_type = other RNA
tgctgctgttatcagttcagt

SEQ ID NO: 6202 - RNA, 21 nt, synthetic construct
  source 1..21: mol_type = other RNA
tgctgcttggcagtcgatcgg

SEQ ID NO: 6203 - RNA, 21 nt, synthetic construct
  source 1..21: mol_type = other RNA
tgctggagactggcctagctg

SEQ ID NO: 6204 - RNA, 21 nt, synthetic construct
  source 1..21: mol_type = other RNA
tgctggctgcatttggtcctc

SEQ ID NO: 6205 - RNA, 21 nt, synthetic construct
  source 1..21: mol_type = other RNA
tgctgggagacctgagccatt

SEQ ID NO: 6206 - RNA, 21 nt, synthetic construct
  source 1..21: mol_type = other RNA
tgctggtcttagttatttgtg

SEQ ID NO: 6207 - RNA, 21 nt, synthetic construct
  source 1..21: mol_type = other RNA
tgctggttactgaacttgtct

SEQ ID NO: 6208 - RNA, 21 nt, synthetic construct
  source 1..21: mol_type = other RNA
tgctgttatcagttcagttac

SEQ ID NO: 6209 - RNA, 21 nt, synthetic construct
  source 1..21: mol_type = other RNA
tgcttactacctgggccagcc

SEQ ID NO: 6210 - RNA, 21 nt, synthetic construct
  source 1..21: mol_type = other RNA
tgcttcagcactttctaaatt

SEQ ID NO: 6211 - RNA, 21 nt, synthetic construct
  source 1..21: mol_type = other RNA
tgcttcagtggccattacagt

SEQ ID NO: 6212 - RNA, 21 nt, synthetic construct
  source 1..21: mol_type = other RNA
tgcttgctagcctactgctga

SEQ ID NO: 6213 - RNA, 21 nt, synthetic construct
  source 1..21: mol_type = other RNA
tgcttggcagtcgatcggaat

SEQ ID NO: 6214 - RNA, 21 nt, synthetic construct
  source 1..21: mol_type = other RNA
tgcttgtcaccacggtgctag

SEQ ID NO: 6215 - RNA, 21 nt, synthetic construct
  source 1..21: mol_type = other RNA
tgctttcgaaacgagagccct

SEQ ID NO: 6216 - RNA, 21 nt, synthetic construct
  source 1..21: mol_type = other RNA
tggaaaaaggaacactaagga

SEQ ID NO: 6217 - RNA, 21 nt, synthetic construct
  source 1..21: mol_type = other RNA
tggaaacactggacttcaaga

SEQ ID NO: 6218 - RNA, 21 nt, synthetic construct
  source 1..21: mol_type = other RNA
tggaaatcagcccctgccaca

SEQ ID NO: 6219 - RNA, 21 nt, synthetic construct
  source 1..21: mol_type = other RNA
tggaaattgcagttctacagt

SEQ ID NO: 6220 - RNA, 21 nt, synthetic construct
  source 1..21: mol_type = other RNA
tggaagaacaaaacctgaggg

SEQ ID NO: 6221 - RNA, 21 nt, synthetic construct
  source 1..21: mol_type = other RNA
tggaagtggggtttctgatta

SEQ ID NO: 6222 - RNA, 21 nt, synthetic construct
  source 1..21: mol_type = other RNA
tggaataaaatgcctttaacg

SEQ ID NO: 6223 - RNA, 21 nt, synthetic construct
  source 1..21: mol_type = other RNA
tggaatagggaactgtaatgg

SEQ ID NO: 6224 - RNA, 21 nt, synthetic construct
  source 1..21: mol_type = other RNA
tggaattaataggcatcttca

SEQ ID NO: 6225 - RNA, 21 nt, synthetic construct
  source 1..21: mol_type = other RNA
tggacatgctgctgttatcag

SEQ ID NO: 6226 - RNA, 21 nt, synthetic construct
  source 1..21: mol_type = other RNA
tggacattcccactgttcact

SEQ ID NO: 6227 - RNA, 21 nt, synthetic construct
  source 1..21: mol_type = other RNA
tggactgtaggactatataaa

SEQ ID NO: 6228 - RNA, 21 nt, synthetic construct
  source 1..21: mol_type = other RNA
tggacttcaagaaactggtcc

SEQ ID NO: 6229 - RNA, 21 nt, synthetic construct
  source 1..21: mol_type = other RNA
tggagacacacaggtatccag

SEQ ID NO: 6230 - RNA, 21 nt, synthetic construct
  source 1..21: mol_type = other RNA
tggagacagtctcgctgtgtc

SEQ ID NO: 6231 - RNA, 21 nt, synthetic construct
  source 1..21: mol_type = other RNA
tggagactggcctagctgtag

SEQ ID NO: 6232 - RNA, 21 nt, synthetic construct
  source 1..21: mol_type = other RNA
tggagcagatgcagatttagg

SEQ ID NO: 6233 - RNA, 21 nt, synthetic construct
  source 1..21: mol_type = other RNA
tggatacctgtgtgtctccat

SEQ ID NO: 6234 - RNA, 21 nt, synthetic construct
  source 1..21: mol_type = other RNA
tggatcaacctggaagaacaa

SEQ ID NO: 6235 - RNA, 21 nt, synthetic construct
  source 1..21: mol_type = other RNA
tggattcctaggtcgtgtttt

SEQ ID NO: 6236 - RNA, 21 nt, synthetic construct
  source 1..21: mol_type = other RNA
tggatttcctagcaccgtggt

SEQ ID NO: 6237 - RNA, 21 nt, synthetic construct
  source 1..21: mol_type = other RNA
tggcaacagccccttgtggca

SEQ ID NO: 6238 - RNA, 21 nt, synthetic construct
  source 1..21: mol_type = other RNA
tggcaagacaagttcagtaac

SEQ ID NO: 6239 - RNA, 21 nt, synthetic construct
  source 1..21: mol_type = other RNA
tggcagcggctgctgcttggc

SEQ ID NO: 6240 - RNA, 21 nt, synthetic construct
  source 1..21: mol_type = other RNA
tggcaggggctgatttccaaa

SEQ ID NO: 6241 - RNA, 21 nt, synthetic construct
  source 1..21: mol_type = other RNA
tggcagtcgatcggaatcgtg

SEQ ID NO: 6242 - RNA, 21 nt, synthetic construct
  source 1..21: mol_type = other RNA
tggccactgaagcacgtgaga

SEQ ID NO: 6243 - RNA, 21 nt, synthetic construct
  source 1..21: mol_type = other RNA
tggccagttacttggttttat

SEQ ID NO: 6244 - RNA, 21 nt, synthetic construct
  source 1..21: mol_type = other RNA
tggccattacagttccctatt

SEQ ID NO: 6245 - RNA, 21 nt, synthetic construct
  source 1..21: mol_type = other RNA
tggcccaggtagtaagcagtg

SEQ ID NO: 6246 - RNA, 21 nt, synthetic construct
  source 1..21: mol_type = other RNA
tggcctagctgtagaatttca

SEQ ID NO: 6247 - RNA, 21 nt, synthetic construct
  source 1..21: mol_type = other RNA
tggcctgtccggtgggaacgg

SEQ ID NO: 6248 - RNA, 21 nt, synthetic construct
  source 1..21: mol_type = other RNA
tggcgccgagccttgcttgtc

SEQ ID NO: 6249 - RNA, 21 nt, synthetic construct
  source 1..21: mol_type = other RNA
tggcggagggatgcaggtggg

SEQ ID NO: 6250 - RNA, 21 nt, synthetic construct
  source 1..21: mol_type = other RNA
tggctatgaatgtcagaaagt

SEQ ID NO: 6251 - RNA, 21 nt, synthetic construct
  source 1..21: mol_type = other RNA
tggctatgagaaccccaccta

SEQ ID NO: 6252 - RNA, 21 nt, synthetic construct
  source 1..21: mol_type = other RNA
tggctcaggtctcccagcacc

SEQ ID NO: 6253 - RNA, 21 nt, synthetic construct
  source 1..21: mol_type = other RNA
tggctgcatttggtcctcagg

SEQ ID NO: 6254 - RNA, 21 nt, synthetic construct
  source 1..21: mol_type = other RNA
tggctggcccaggtagtaagc

SEQ ID NO: 6255 - RNA, 21 nt, synthetic construct
  source 1..21: mol_type = other RNA
tggcttgccttggctggccca

SEQ ID NO: 6256 - RNA, 21 nt, synthetic construct
  source 1..21: mol_type = other RNA
tgggaaatgtcgattttcaat

SEQ ID NO: 6257 - RNA, 21 nt, synthetic construct
  source 1..21: mol_type = other RNA
tgggaaattagtgcagatgct

SEQ ID NO: 6258 - RNA, 21 nt, synthetic construct
  source 1..21: mol_type = other RNA
tgggaacctgtggaattaata

SEQ ID NO: 6259 - RNA, 21 nt, synthetic construct
  source 1..21: mol_type = other RNA
tgggaacgggctgctggctgc

SEQ ID NO: 6260 - RNA, 21 nt, synthetic construct
  source 1..21: mol_type = other RNA
tgggaagagacctgcacaggg

SEQ ID NO: 6261 - RNA, 21 nt, synthetic construct
  source 1..21: mol_type = other RNA
tgggaatgtccagagtccctt

SEQ ID NO: 6262 - RNA, 21 nt, synthetic construct
  source 1..21: mol_type = other RNA
tgggaccaggggatctctggt

SEQ ID NO: 6263 - RNA, 21 nt, synthetic construct
  source 1..21: mol_type = other RNA
tgggagacctgagccatttgc

SEQ ID NO: 6264 - RNA, 21 nt, synthetic construct
  source 1..21: mol_type = other RNA
tgggatcttccggcccacctg

SEQ ID NO: 6265 - RNA, 21 nt, synthetic construct
  source 1..21: mol_type = other RNA
tgggccagccaaggcaagcca

SEQ ID NO: 6266 - RNA, 21 nt, synthetic construct
  source 1..21: mol_type = other RNA
tgggccggaagatcccacgat

SEQ ID NO: 6267 - RNA, 21 nt, synthetic construct
  source 1..21: mol_type = other RNA
tgggccttggctatgaatgtc

SEQ ID NO: 6268 - RNA, 21 nt, synthetic construct
  source 1..21: mol_type = other RNA
tgggcgacacagcgagactgt

SEQ ID NO: 6269 - RNA, 21 nt, synthetic construct
  source 1..21: mol_type = other RNA
tgggctgggttgggggtggga

SEQ ID NO: 6270 - RNA, 21 nt, synthetic construct
  source 1..21: mol_type = other RNA
tggggaaatcctatctctaat

SEQ ID NO: 6271 - RNA, 21 nt, synthetic construct
  source 1..21: mol_type = other RNA
tggggatcaagggactctgga

SEQ ID NO: 6272 - RNA, 21 nt, synthetic construct
  source 1..21: mol_type = other RNA
tgggggaaaggagcaacagga

SEQ ID NO: 6273 - RNA, 21 nt, synthetic construct
  source 1..21: mol_type = other RNA
tgggggtgggaacctgtggaa

SEQ ID NO: 6274 - RNA, 21 nt, synthetic construct
  source 1..21: mol_type = other RNA
tggggtgagcattggatcaac

SEQ ID NO: 6275 - RNA, 21 nt, synthetic construct
  source 1..21: mol_type = other RNA
tggggtggaatagggaactgt

SEQ ID NO: 6276 - RNA, 21 nt, synthetic construct
  source 1..21: mol_type = other RNA
tggggttctcatagccatggt

SEQ ID NO: 6277 - RNA, 21 nt, synthetic construct
  source 1..21: mol_type = other RNA
tggggtttctgattaatttaa

SEQ ID NO: 6278 - RNA, 21 nt, synthetic construct
  source 1..21: mol_type = other RNA
tgggtgaaaaatggtaatata

SEQ ID NO: 6279 - RNA, 21 nt, synthetic construct
  source 1..21: mol_type = other RNA
tgggttgggggtgggaacctg

SEQ ID NO: 6280 - RNA, 21 nt, synthetic construct
  source 1..21: mol_type = other RNA
tggtcaatatggggaaatcct

SEQ ID NO: 6281 - RNA, 21 nt, synthetic construct
  source 1..21: mol_type = other RNA
tggtcccaccgtctgcttgct

SEQ ID NO: 6282 - RNA, 21 nt, synthetic construct
  source 1..21: mol_type = other RNA
tggtcctcaggggattgtgca

SEQ ID NO: 6283 - RNA, 21 nt, synthetic construct
  source 1..21: mol_type = other RNA
tggtcctttcacatcattttg

SEQ ID NO: 6284 - RNA, 21 nt, synthetic construct
  source 1..21: mol_type = other RNA
tggtcttagttatttgtgttt

SEQ ID NO: 6285 - RNA, 21 nt, synthetic construct
  source 1..21: mol_type = other RNA
tggtctttttcagttctgaaa

SEQ ID NO: 6286 - RNA, 21 nt, synthetic construct
  source 1..21: mol_type = other RNA
tggtgaaacacaggagaaaga

SEQ ID NO: 6287 - RNA, 21 nt, synthetic construct
  source 1..21: mol_type = other RNA
tggtgacaagcaaggctcggc

SEQ ID NO: 6288 - RNA, 21 nt, synthetic construct
  source 1..21: mol_type = other RNA
tggtgacaggacttttatgga

SEQ ID NO: 6289 - RNA, 21 nt, synthetic construct
  source 1..21: mol_type = other RNA
tggtgtctgggaagagacctg

SEQ ID NO: 6290 - RNA, 21 nt, synthetic construct
  source 1..21: mol_type = other RNA
tggttactgaacttgtcttgc

SEQ ID NO: 6291 - RNA, 21 nt, synthetic construct
  source 1..21: mol_type = other RNA
tggttctgcatcttgttcagg

SEQ ID NO: 6292 - RNA, 21 nt, synthetic construct
  source 1..21: mol_type = other RNA
tggttttatctcctgctggag

SEQ ID NO: 6293 - RNA, 21 nt, synthetic construct
  source 1..21: mol_type = other RNA
tggttttttggagacagtctc

SEQ ID NO: 6294 - RNA, 21 nt, synthetic construct
  source 1..21: mol_type = other RNA
tggttttttggttttttggag

SEQ ID NO: 6295 - RNA, 21 nt, synthetic construct
  source 1..21: mol_type = other RNA
tgtaagtcaactcttcagcct

SEQ ID NO: 6296 - RNA, 21 nt, synthetic construct
  source 1..21: mol_type = other RNA
tgtaatggccactgaagcacg

SEQ ID NO: 6297 - RNA, 21 nt, synthetic construct
  source 1..21: mol_type = other RNA
tgtagaactgcaatttccatt

SEQ ID NO: 6298 - RNA, 21 nt, synthetic construct
  source 1..21: mol_type = other RNA
tgtagaatttcagaactgaaa

SEQ ID NO: 6299 - RNA, 21 nt, synthetic construct
  source 1..21: mol_type = other RNA
tgtagcataaaatgttcacat

SEQ ID NO: 6300 - RNA, 21 nt, synthetic construct
  source 1..21: mol_type = other RNA
tgtaggactatataaagtact

SEQ ID NO: 6301 - RNA, 21 nt, synthetic construct
  source 1..21: mol_type = other RNA
tgtaggtggggttctcatagc

SEQ ID NO: 6302 - RNA, 21 nt, synthetic construct
  source 1..21: mol_type = other RNA
tgtagtctcagctaggtggga

SEQ ID NO: 6303 - RNA, 21 nt, synthetic construct
  source 1..21: mol_type = other RNA
tgtatacactaagctctctag

SEQ ID NO: 6304 - RNA, 21 nt, synthetic construct
  source 1..21: mol_type = other RNA
tgtattgtctgacacatgctc

SEQ ID NO: 6305 - RNA, 21 nt, synthetic construct
  source 1..21: mol_type = other RNA
tgtatttatatttggggatca

SEQ ID NO: 6306 - RNA, 21 nt, synthetic construct
  source 1..21: mol_type = other RNA
tgtcaccaaggacgttaaagg

SEQ ID NO: 6307 - RNA, 21 nt, synthetic construct
  source 1..21: mol_type = other RNA
tgtcaccacggtgctaggaaa

SEQ ID NO: 6308 - RNA, 21 nt, synthetic construct
  source 1..21: mol_type = other RNA
tgtcagaaagtcatgtgaaca

SEQ ID NO: 6309 - RNA, 21 nt, synthetic construct
  source 1..21: mol_type = other RNA
tgtcagacaatacaatggaag

SEQ ID NO: 6310 - RNA, 21 nt, synthetic construct
  source 1..21: mol_type = other RNA
tgtcagacgcagcccctggca

SEQ ID NO: 6311 - RNA, 21 nt, synthetic construct
  source 1..21: mol_type = other RNA
tgtcatcttccgtgagggcta

SEQ ID NO: 6312 - RNA, 21 nt, synthetic construct
  source 1..21: mol_type = other RNA
tgtccagagtcccttgatccc

SEQ ID NO: 6313 - RNA, 21 nt, synthetic construct
  source 1..21: mol_type = other RNA
tgtccagtactcgaggagtga

SEQ ID NO: 6314 - RNA, 21 nt, synthetic construct
  source 1..21: mol_type = other RNA
tgtccggtgggaacgggctgc

SEQ ID NO: 6315 - RNA, 21 nt, synthetic construct
  source 1..21: mol_type = other RNA
tgtcctggcttttatttaaag

SEQ ID NO: 6316 - RNA, 21 nt, synthetic construct
  source 1..21: mol_type = other RNA
tgtcgattttcaataatagac

SEQ ID NO: 6317 - RNA, 21 nt, synthetic construct
  source 1..21: mol_type = other RNA
tgtcgttccggttatgttgtg

SEQ ID NO: 6318 - RNA, 21 nt, synthetic construct
  source 1..21: mol_type = other RNA
tgtctccaaaaaaccaaaaaa

SEQ ID NO: 6319 - RNA, 21 nt, synthetic construct
  source 1..21: mol_type = other RNA
tgtctccataaaagtcctgtc

SEQ ID NO: 6320 - RNA, 21 nt, synthetic construct
  source 1..21: mol_type = other RNA
tgtctcccgggttcaggtgat

SEQ ID NO: 6321 - RNA, 21 nt, synthetic construct
  source 1..21: mol_type = other RNA
tgtctgacacatgctctcaat

SEQ ID NO: 6322 - RNA, 21 nt, synthetic construct
  source 1..21: mol_type = other RNA
tgtctgggaagagacctgcac

SEQ ID NO: 6323 - RNA, 21 nt, synthetic construct
  source 1..21: mol_type = other RNA
tgtcttctgctggttactgaa

SEQ ID NO: 6324 - RNA, 21 nt, synthetic construct
  source 1..21: mol_type = other RNA
tgtcttgccactcactcctta

SEQ ID NO: 6325 - RNA, 21 nt, synthetic construct
  source 1..21: mol_type = other RNA
tgtgaaaggaccagtttcttg

SEQ ID NO: 6326 - RNA, 21 nt, synthetic construct
  source 1..21: mol_type = other RNA
tgtgaacattttatgctacag

SEQ ID NO: 6327 - RNA, 21 nt, synthetic construct
  source 1..21: mol_type = other RNA
tgtgcagcaaatggctcaggt

SEQ ID NO: 6328 - RNA, 21 nt, synthetic construct
  source 1..21: mol_type = other RNA
tgtgcaggtctcttcccagac

SEQ ID NO: 6329 - RNA, 21 nt, synthetic construct
  source 1..21: mol_type = other RNA
tgtgccaccacgcccagctag

SEQ ID NO: 6330 - RNA, 21 nt, synthetic construct
  source 1..21: mol_type = other RNA
tgtgcctcagcctcccaccta

SEQ ID NO: 6331 - RNA, 21 nt, synthetic construct
  source 1..21: mol_type = other RNA
tgtggaattaataggcatctt

SEQ ID NO: 6332 - RNA, 21 nt, synthetic construct
  source 1..21: mol_type = other RNA
tgtggcaggggctgatttcca

SEQ ID NO: 6333 - RNA, 21 nt, synthetic construct
  source 1..21: mol_type = other RNA
tgtgggctgggttgggggtgg

SEQ ID NO: 6334 - RNA, 21 nt, synthetic construct
  source 1..21: mol_type = other RNA
tgtggtgtctgggaagagacc

SEQ ID NO: 6335 - RNA, 21 nt, synthetic construct
  source 1..21: mol_type = other RNA
tgtgtaagtcaactcttcagc

SEQ ID NO: 6336 - RNA, 21 nt, synthetic construct
  source 1..21: mol_type = other RNA
tgtgtcagacaatacaatgga

SEQ ID NO: 6337 - RNA, 21 nt, synthetic construct
  source 1..21: mol_type = other RNA
tgtgtctccataaaagtcctg

SEQ ID NO: 6338 - RNA, 21 nt, synthetic construct
  source 1..21: mol_type = other RNA
tgtgtgccaccacgcccagct

SEQ ID NO: 6339 - RNA, 21 nt, synthetic construct
  source 1..21: mol_type = other RNA
tgtgtgtctccataaaagtcc

SEQ ID NO: 6340 - RNA, 21 nt, synthetic construct
  source 1..21: mol_type = other RNA
tgtgtttcaccaccggttctc

SEQ ID NO: 6341 - RNA, 21 nt, synthetic construct
  source 1..21: mol_type = other RNA
tgttatcagttcagttactca

SEQ ID NO: 6342 - RNA, 21 nt, synthetic construct
  source 1..21: mol_type = other RNA
tgttcacatgactttctgaca

SEQ ID NO: 6343 - RNA, 21 nt, synthetic construct
  source 1..21: mol_type = other RNA
tgttcactaaggagtgagtgg

SEQ ID NO: 6344 - RNA, 21 nt, synthetic construct
  source 1..21: mol_type = other RNA
tgttcaggtgacgctcttctg

SEQ ID NO: 6345 - RNA, 21 nt, synthetic construct
  source 1..21: mol_type = other RNA
tgttcctttttccaggtattt

SEQ ID NO: 6346 - RNA, 21 nt, synthetic construct
  source 1..21: mol_type = other RNA
tgttctgtcttctgctggtta

SEQ ID NO: 6347 - RNA, 21 nt, synthetic construct
  source 1..21: mol_type = other RNA
tgttcttccaggttgatccaa

SEQ ID NO: 6348 - RNA, 21 nt, synthetic construct
  source 1..21: mol_type = other RNA
tgttgaaagttggcaacagcc

SEQ ID NO: 6349 - RNA, 21 nt, synthetic construct
  source 1..21: mol_type = other RNA
tgttgccaactttcaacatta

SEQ ID NO: 6350 - RNA, 21 nt, synthetic construct
  source 1..21: mol_type = other RNA
tgttgctcctttcccccatta

SEQ ID NO: 6351 - RNA, 21 nt, synthetic construct
  source 1..21: mol_type = other RNA
tgttgtgtaagtcaactcttc

SEQ ID NO: 6352 - RNA, 21 nt, synthetic construct
  source 1..21: mol_type = other RNA
tgtttcaccaccggttctcat

SEQ ID NO: 6353 - RNA, 21 nt, synthetic construct
  source 1..21: mol_type = other RNA
tgtttccacggctggatacct

SEQ ID NO: 6354 - RNA, 21 nt, synthetic construct
  source 1..21: mol_type = other RNA
tgtttctgttctgtcttctgc

SEQ ID NO: 6355 - RNA, 21 nt, synthetic construct
  source 1..21: mol_type = other RNA
tgtttgttttggttttttggt

SEQ ID NO: 6356 - RNA, 21 nt, synthetic construct
  source 1..21: mol_type = other RNA
tgtttttggaaatcagcccct

SEQ ID NO: 6357 - RNA, 21 nt, synthetic construct
  source 1..21: mol_type = other RNA
ttaaaaagggaatactgcctt

SEQ ID NO: 6358 - RNA, 21 nt, synthetic construct
  source 1..21: mol_type = other RNA
ttaaaagaatggaaattgcag

SEQ ID NO: 6359 - RNA, 21 nt, synthetic construct
  source 1..21: mol_type = other RNA
ttaaaggcattttattccagc

SEQ ID NO: 6360 - RNA, 21 nt, synthetic construct
  source 1..21: mol_type = other RNA
ttaaataaaagccaggacagt

SEQ ID NO: 6361 - RNA, 21 nt, synthetic construct
  source 1..21: mol_type = other RNA
ttaaatgagctttcaggaagt

SEQ ID NO: 6362 - RNA, 21 nt, synthetic construct
  source 1..21: mol_type = other RNA
ttaaatgggtgaaaaatggta

SEQ ID NO: 6363 - RNA, 21 nt, synthetic construct
  source 1..21: mol_type = other RNA
ttaaattaatcagaaacccca

SEQ ID NO: 6364 - RNA, 21 nt, synthetic construct
  source 1..21: mol_type = other RNA
ttaacgtccttggtgacagga

SEQ ID NO: 6365 - RNA, 21 nt, synthetic construct
  source 1..21: mol_type = other RNA
ttaaggtccttactgtattta

SEQ ID NO: 6366 - RNA, 21 nt, synthetic construct
  source 1..21: mol_type = other RNA
ttaataggcatcttcactcct

SEQ ID NO: 6367 - RNA, 21 nt, synthetic construct
  source 1..21: mol_type = other RNA
ttaatcagaaaccccacttcc

SEQ ID NO: 6368 - RNA, 21 nt, synthetic construct
  source 1..21: mol_type = other RNA
ttaatgagccctgggaaatta

SEQ ID NO: 6369 - RNA, 21 nt, synthetic construct
  source 1..21: mol_type = other RNA
ttaatgggggaaaggagcaac

SEQ ID NO: 6370 - RNA, 21 nt, synthetic construct
  source 1..21: mol_type = other RNA
ttaattccacaggttcccacc

SEQ ID NO: 6371 - RNA, 21 nt, synthetic construct
  source 1..21: mol_type = other RNA
ttacacaacataaccggaacg

SEQ ID NO: 6372 - RNA, 21 nt, synthetic construct
  source 1..21: mol_type = other RNA
ttacagttccctattccaccc

SEQ ID NO: 6373 - RNA, 21 nt, synthetic construct
  source 1..21: mol_type = other RNA
ttaccatttttcacccattta

SEQ ID NO: 6374 - RNA, 21 nt, synthetic construct
  source 1..21: mol_type = other RNA
ttactacctgggccagccaag

SEQ ID NO: 6375 - RNA, 21 nt, synthetic construct
  source 1..21: mol_type = other RNA
ttactcactggattcctaggt

SEQ ID NO: 6376 - RNA, 21 nt, synthetic construct
  source 1..21: mol_type = other RNA
ttactgaacttgtcttgccac

SEQ ID NO: 6377 - RNA, 21 nt, synthetic construct
  source 1..21: mol_type = other RNA
ttactgtatttatatttgggg

SEQ ID NO: 6378 - RNA, 21 nt, synthetic construct
  source 1..21: mol_type = other RNA
ttacttggttttatctcctgc

SEQ ID NO: 6379 - RNA, 21 nt, synthetic construct
  source 1..21: mol_type = other RNA
ttagaaagtgctgaagcagac

SEQ ID NO: 6380 - RNA, 21 nt, synthetic construct
  source 1..21: mol_type = other RNA
ttagagataggatttccccat

SEQ ID NO: 6381 - RNA, 21 nt, synthetic construct
  source 1..21: mol_type = other RNA
ttagccctcacggaagatgac

SEQ ID NO: 6382 - RNA, 21 nt, synthetic construct
  source 1..21: mol_type = other RNA
ttaggtggcagggagcgcggc

SEQ ID NO: 6383 - RNA, 21 nt, synthetic construct
  source 1..21: mol_type = other RNA
ttagtgaacagtgggaatgtc

SEQ ID NO: 6384 - RNA, 21 nt, synthetic construct
  source 1..21: mol_type = other RNA
ttagtgcagatgctggtctta

SEQ ID NO: 6385 - RNA, 21 nt, synthetic construct
  source 1..21: mol_type = other RNA
ttagtgtatacagatgagggt

SEQ ID NO: 6386 - RNA, 21 nt, synthetic construct
  source 1..21: mol_type = other RNA
ttagtgttcctttttccaggt

SEQ ID NO: 6387 - RNA, 21 nt, synthetic construct
  source 1..21: mol_type = other RNA
ttagtttgggccttggctatg

SEQ ID NO: 6388 - RNA, 21 nt, synthetic construct
  source 1..21: mol_type = other RNA
ttatatagtcctacagtccag

SEQ ID NO: 6389 - RNA, 21 nt, synthetic construct
  source 1..21: mol_type = other RNA
ttatatattgagagcatgtgt

SEQ ID NO: 6390 - RNA, 21 nt, synthetic construct
  source 1..21: mol_type = other RNA
ttatatgcaggctgtcgttcc

SEQ ID NO: 6391 - RNA, 21 nt, synthetic construct
  source 1..21: mol_type = other RNA
ttatattaccatttttcaccc

SEQ ID NO: 6392 - RNA, 21 nt, synthetic construct
  source 1..21: mol_type = other RNA
ttatatttggggatcaaggga

SEQ ID NO: 6393 - RNA, 21 nt, synthetic construct
  source 1..21: mol_type = other RNA
ttatcagttcagttactcact

SEQ ID NO: 6394 - RNA, 21 nt, synthetic construct
  source 1..21: mol_type = other RNA
ttatctcctgctggagactgg

SEQ ID NO: 6395 - RNA, 21 nt, synthetic construct
  source 1..21: mol_type = other RNA
ttatgctacagagggtgaaaa

SEQ ID NO: 6396 - RNA, 21 nt, synthetic construct
  source 1..21: mol_type = other RNA
ttatggagacacacaggtatc

SEQ ID NO: 6397 - RNA, 21 nt, synthetic construct
  source 1..21: mol_type = other RNA
ttatgttgtgtaagtcaactc

SEQ ID NO: 6398 - RNA, 21 nt, synthetic construct
  source 1..21: mol_type = other RNA
ttattagagataggatttccc

SEQ ID NO: 6399 - RNA, 21 nt, synthetic construct
  source 1..21: mol_type = other RNA
ttattccagcgtcttctagag

SEQ ID NO: 6400 - RNA, 21 nt, synthetic construct
  source 1..21: mol_type = other RNA
ttattgaaaatcgacatttcc

SEQ ID NO: 6401 - RNA, 21 nt, synthetic construct
  source 1..21: mol_type = other RNA
ttatttccttagtgttccttt

SEQ ID NO: 6402 - RNA, 21 nt, synthetic construct
  source 1..21: mol_type = other RNA
ttattttctttctcctgtgtt

SEQ ID NO: 6403 - RNA, 21 nt, synthetic construct
  source 1..21: mol_type = other RNA
ttcaacattagtttgggcctt

SEQ ID NO: 6404 - RNA, 21 nt, synthetic construct
  source 1..21: mol_type = other RNA
ttcaagaaactggtcctttca

SEQ ID NO: 6405 - RNA, 21 nt, synthetic construct
  source 1..21: mol_type = other RNA
ttcacatcattttgcgagggt

SEQ ID NO: 6406 - RNA, 21 nt, synthetic construct
  source 1..21: mol_type = other RNA
ttcacatgactttctgacatt

SEQ ID NO: 6407 - RNA, 21 nt, synthetic construct
  source 1..21: mol_type = other RNA
ttcaccaccggttctcatttg

SEQ ID NO: 6408 - RNA, 21 nt, synthetic construct
  source 1..21: mol_type = other RNA
ttcacccatttaaaagaatgg

SEQ ID NO: 6409 - RNA, 21 nt, synthetic construct
  source 1..21: mol_type = other RNA
ttcaccctctgtagcataaaa

SEQ ID NO: 6410 - RNA, 21 nt, synthetic construct
  source 1..21: mol_type = other RNA
ttcactaaggagtgagtggca

SEQ ID NO: 6411 - RNA, 21 nt, synthetic construct
  source 1..21: mol_type = other RNA
ttcactcctcgagtactggac

SEQ ID NO: 6412 - RNA, 21 nt, synthetic construct
  source 1..21: mol_type = other RNA
ttcactgtcctggcttttatt

SEQ ID NO: 6413 - RNA, 21 nt, synthetic construct
  source 1..21: mol_type = other RNA
ttcagaactgaaaaagaccag

SEQ ID NO: 6414 - RNA, 21 nt, synthetic construct
  source 1..21: mol_type = other RNA
ttcagcactttctaaatttcc

SEQ ID NO: 6415 - RNA, 21 nt, synthetic construct
  source 1..21: mol_type = other RNA
ttcagcctcattcactgtcct

SEQ ID NO: 6416 - RNA, 21 nt, synthetic construct
  source 1..21: mol_type = other RNA
ttcaggaagttgctgagaaat

SEQ ID NO: 6417 - RNA, 21 nt, synthetic construct
  source 1..21: mol_type = other RNA
ttcagggctctcgtttcgaaa

SEQ ID NO: 6418 - RNA, 21 nt, synthetic construct
  source 1..21: mol_type = other RNA
ttcaggtgacgctcttctggg

SEQ ID NO: 6419 - RNA, 21 nt, synthetic construct
  source 1..21: mol_type = other RNA
ttcagtaaccagcagaagaca

SEQ ID NO: 6420 - RNA, 21 nt, synthetic construct
  source 1..21: mol_type = other RNA
ttcagtggccattacagttcc

SEQ ID NO: 6421 - RNA, 21 nt, synthetic construct
  source 1..21: mol_type = other RNA
ttcagttactcactggattcc

SEQ ID NO: 6422 - RNA, 21 nt, synthetic construct
  source 1..21: mol_type = other RNA
ttcagttctgaaattctacag

SEQ ID NO: 6423 - RNA, 21 nt, synthetic construct
  source 1..21: mol_type = other RNA
ttcatagccaaggcccaaact

SEQ ID NO: 6424 - RNA, 21 nt, synthetic construct
  source 1..21: mol_type = other RNA
ttccaaaaacacgacctagga

SEQ ID NO: 6425 - RNA, 21 nt, synthetic construct
  source 1..21: mol_type = other RNA
ttccacaggttcccaccccca

SEQ ID NO: 6426 - RNA, 21 nt, synthetic construct
  source 1..21: mol_type = other RNA
ttccaccccatttctcagcaa

SEQ ID NO: 6427 - RNA, 21 nt, synthetic construct
  source 1..21: mol_type = other RNA
ttccacggctggatacctgtg

SEQ ID NO: 6428 - RNA, 21 nt, synthetic construct
  source 1..21: mol_type = other RNA
ttccagcgtcttctagagagc

SEQ ID NO: 6429 - RNA, 21 nt, synthetic construct
  source 1..21: mol_type = other RNA
ttccaggttgatccaatgctc

SEQ ID NO: 6430 - RNA, 21 nt, synthetic construct
  source 1..21: mol_type = other RNA
ttccattcttttaaatgggtg

SEQ ID NO: 6431 - RNA, 21 nt, synthetic construct
  source 1..21: mol_type = other RNA
ttccattgtattgtctgacac

SEQ ID NO: 6432 - RNA, 21 nt, synthetic construct
  source 1..21: mol_type = other RNA
ttcccaccggacaggccaaat

SEQ ID NO: 6433 - RNA, 21 nt, synthetic construct
  source 1..21: mol_type = other RNA
ttcccactgttcactaaggag

SEQ ID NO: 6434 - RNA, 21 nt, synthetic construct
  source 1..21: mol_type = other RNA
ttcccagacaccacaatgacc

SEQ ID NO: 6435 - RNA, 21 nt, synthetic construct
  source 1..21: mol_type = other RNA
ttcccagggctcattaaggtc

SEQ ID NO: 6436 - RNA, 21 nt, synthetic construct
  source 1..21: mol_type = other RNA
ttccccatattgaccagggtg

SEQ ID NO: 6437 - RNA, 21 nt, synthetic construct
  source 1..21: mol_type = other RNA
ttccctattccaccccatttc

SEQ ID NO: 6438 - RNA, 21 nt, synthetic construct
  source 1..21: mol_type = other RNA
ttccctttttaaatgagcttt

SEQ ID NO: 6439 - RNA, 21 nt, synthetic construct
  source 1..21: mol_type = other RNA
ttccgatcgactgccaagcag

SEQ ID NO: 6440 - RNA, 21 nt, synthetic construct
  source 1..21: mol_type = other RNA
ttccggcccacctgcatccct

SEQ ID NO: 6441 - RNA, 21 nt, synthetic construct
  source 1..21: mol_type = other RNA
ttccggttatgttgtgtaagt

SEQ ID NO: 6442 - RNA, 21 nt, synthetic construct
  source 1..21: mol_type = other RNA
ttccgtgagggctaagctttc

SEQ ID NO: 6443 - RNA, 21 nt, synthetic construct
  source 1..21: mol_type = other RNA
ttcctagcaccgtggtgacaa

SEQ ID NO: 6444 - RNA, 21 nt, synthetic construct
  source 1..21: mol_type = other RNA
ttcctaggtcgtgtttttgga

SEQ ID NO: 6445 - RNA, 21 nt, synthetic construct
  source 1..21: mol_type = other RNA
ttcctgaaagctcatttaaaa

SEQ ID NO: 6446 - RNA, 21 nt, synthetic construct
  source 1..21: mol_type = other RNA
ttcctgttgctcctttccccc

SEQ ID NO: 6447 - RNA, 21 nt, synthetic construct
  source 1..21: mol_type = other RNA
ttccttagtgttcctttttcc

SEQ ID NO: 6448 - RNA, 21 nt, synthetic construct
  source 1..21: mol_type = other RNA
ttcctttttccaggtattttt

SEQ ID NO: 6449 - RNA, 21 nt, synthetic construct
  source 1..21: mol_type = other RNA
ttcgaaacgagagccctgaaa

SEQ ID NO: 6450 - RNA, 21 nt, synthetic construct
  source 1..21: mol_type = other RNA
ttcgaaagcattgcctctttg

SEQ ID NO: 6451 - RNA, 21 nt, synthetic construct
  source 1..21: mol_type = other RNA
ttctaaatttcctgttgctcc

SEQ ID NO: 6452 - RNA, 21 nt, synthetic construct
  source 1..21: mol_type = other RNA
ttctacagctaggccagtctc

SEQ ID NO: 6453 - RNA, 21 nt, synthetic construct
  source 1..21: mol_type = other RNA
ttctagagagcttagtgtata

SEQ ID NO: 6454 - RNA, 21 nt, synthetic construct
  source 1..21: mol_type = other RNA
ttctcagattatttccttagt

SEQ ID NO: 6455 - RNA, 21 nt, synthetic construct
  source 1..21: mol_type = other RNA
ttctcagcaacttcctgaaag

SEQ ID NO: 6456 - RNA, 21 nt, synthetic construct
  source 1..21: mol_type = other RNA
ttctcatagccatggttctgc

SEQ ID NO: 6457 - RNA, 21 nt, synthetic construct
  source 1..21: mol_type = other RNA
ttctcatttggcctgtccggt

SEQ ID NO: 6458 - RNA, 21 nt, synthetic construct
  source 1..21: mol_type = other RNA
ttctcctgtgtttcaccaccg

SEQ ID NO: 6459 - RNA, 21 nt, synthetic construct
  source 1..21: mol_type = other RNA
ttctgaaattctacagctagg

SEQ ID NO: 6460 - RNA, 21 nt, synthetic construct
  source 1..21: mol_type = other RNA
ttctgacattcatagccaagg

SEQ ID NO: 6461 - RNA, 21 nt, synthetic construct
  source 1..21: mol_type = other RNA
ttctgcatcttgttcaggtga

SEQ ID NO: 6462 - RNA, 21 nt, synthetic construct
  source 1..21: mol_type = other RNA
ttctgctggttactgaacttg

SEQ ID NO: 6463 - RNA, 21 nt, synthetic construct
  source 1..21: mol_type = other RNA
ttctggggtgagcattggatc

SEQ ID NO: 6464 - RNA, 21 nt, synthetic construct
  source 1..21: mol_type = other RNA
ttctgtcttctgctggttact

SEQ ID NO: 6465 - RNA, 21 nt, synthetic construct
  source 1..21: mol_type = other RNA
ttctgttctgtcttctgctgg

SEQ ID NO: 6466 - RNA, 21 nt, synthetic construct
  source 1..21: mol_type = other RNA
ttcttccaggttgatccaatg

SEQ ID NO: 6467 - RNA, 21 nt, synthetic construct
  source 1..21: mol_type = other RNA
ttcttgaagtccagtgtttcc

SEQ ID NO: 6468 - RNA, 21 nt, synthetic construct
  source 1..21: mol_type = other RNA
ttctttaaataaaagccagga

SEQ ID NO: 6469 - RNA, 21 nt, synthetic construct
  source 1..21: mol_type = other RNA
ttctttctcctgtgtttcacc

SEQ ID NO: 6470 - RNA, 21 nt, synthetic construct
  source 1..21: mol_type = other RNA
ttgaaaatcgacatttcccat

SEQ ID NO: 6471 - RNA, 21 nt, synthetic construct
  source 1..21: mol_type = other RNA
ttgaaagttggcaacagcccc

SEQ ID NO: 6472 - RNA, 21 nt, synthetic construct
  source 1..21: mol_type = other RNA
ttgaagtccagtgtttccacg

SEQ ID NO: 6473 - RNA, 21 nt, synthetic construct
  source 1..21: mol_type = other RNA
ttgaccagggtgatctcaaat

SEQ ID NO: 6474 - RNA, 21 nt, synthetic construct
  source 1..21: mol_type = other RNA
ttgactgtcatcttccgtgag

SEQ ID NO: 6475 - RNA, 21 nt, synthetic construct
  source 1..21: mol_type = other RNA
ttgacttacacaacataaccg

SEQ ID NO: 6476 - RNA, 21 nt, synthetic construct
  source 1..21: mol_type = other RNA
ttgagagcatgtgtcagacaa

SEQ ID NO: 6477 - RNA, 21 nt, synthetic construct
  source 1..21: mol_type = other RNA
ttgagatcaccctggtcaata

SEQ ID NO: 6478 - RNA, 21 nt, synthetic construct
  source 1..21: mol_type = other RNA
ttgatccaatgctcaccccag

SEQ ID NO: 6479 - RNA, 21 nt, synthetic construct
  source 1..21: mol_type = other RNA
ttgatccccaaatataaatac

SEQ ID NO: 6480 - RNA, 21 nt, synthetic construct
  source 1..21: mol_type = other RNA
ttgatccccttattttctttc

SEQ ID NO: 6481 - RNA, 21 nt, synthetic construct
  source 1..21: mol_type = other RNA
ttgcagatatttgatgtagtt

SEQ ID NO: 6482 - RNA, 21 nt, synthetic construct
  source 1..21: mol_type = other RNA
ttgcagttctacagtagtact

SEQ ID NO: 6483 - RNA, 21 nt, synthetic construct
  source 1..21: mol_type = other RNA
ttgccaactttcaacattagt

SEQ ID NO: 6484 - RNA, 21 nt, synthetic construct
  source 1..21: mol_type = other RNA
ttgccactcactccttagtga

SEQ ID NO: 6485 - RNA, 21 nt, synthetic construct
  source 1..21: mol_type = other RNA
ttgcctctttgatccccttat

SEQ ID NO: 6486 - RNA, 21 nt, synthetic construct
  source 1..21: mol_type = other RNA
ttgccttggctggcccaggta

SEQ ID NO: 6487 - RNA, 21 nt, synthetic construct
  source 1..21: mol_type = other RNA
ttgcgagggtctctcacgtgc

SEQ ID NO: 6488 - RNA, 21 nt, synthetic construct
  source 1..21: mol_type = other RNA
ttgctagcctactgctgactg

SEQ ID NO: 6489 - RNA, 21 nt, synthetic construct
  source 1..21: mol_type = other RNA
ttgctcctttcccccattaaa

SEQ ID NO: 6490 - RNA, 21 nt, synthetic construct
  source 1..21: mol_type = other RNA
ttgctgagaaatggggtggaa

SEQ ID NO: 6491 - RNA, 21 nt, synthetic construct
  source 1..21: mol_type = other RNA
ttgctgcacaatcccctgagg

SEQ ID NO: 6492 - RNA, 21 nt, synthetic construct
  source 1..21: mol_type = other RNA
ttgcttgtcaccacggtgcta

SEQ ID NO: 6493 - RNA, 21 nt, synthetic construct
  source 1..21: mol_type = other RNA
ttggaaatcagcccctgccac

SEQ ID NO: 6494 - RNA, 21 nt, synthetic construct
  source 1..21: mol_type = other RNA
ttggagacagtctcgctgtgt

SEQ ID NO: 6495 - RNA, 21 nt, synthetic construct
  source 1..21: mol_type = other RNA
ttggatcaacctggaagaaca

SEQ ID NO: 6496 - RNA, 21 nt, synthetic construct
  source 1..21: mol_type = other RNA
ttggcaacagccccttgtggc

SEQ ID NO: 6497 - RNA, 21 nt, synthetic construct
  source 1..21: mol_type = other RNA
ttggcagtcgatcggaatcgt

SEQ ID NO: 6498 - RNA, 21 nt, synthetic construct
  source 1..21: mol_type = other RNA
ttggcctgtccggtgggaacg

SEQ ID NO: 6499 - RNA, 21 nt, synthetic construct
  source 1..21: mol_type = other RNA
ttggctatgaatgtcagaaag

SEQ ID NO: 6500 - RNA, 21 nt, synthetic construct
  source 1..21: mol_type = other RNA
ttggctggcccaggtagtaag

SEQ ID NO: 6501 - RNA, 21 nt, synthetic construct
  source 1..21: mol_type = other RNA
ttgggccttggctatgaatgt

SEQ ID NO: 6502 - RNA, 21 nt, synthetic construct
  source 1..21: mol_type = other RNA
ttggggatcaagggactctgg

SEQ ID NO: 6503 - RNA, 21 nt, synthetic construct
  source 1..21: mol_type = other RNA
ttgggggtgggaacctgtgga

SEQ ID NO: 6504 - RNA, 21 nt, synthetic construct
  source 1..21: mol_type = other RNA
ttggtcctcaggggattgtgc

SEQ ID NO: 6505 - RNA, 21 nt, synthetic construct
  source 1..21: mol_type = other RNA
ttggtgacaggacttttatgg

SEQ ID NO: 6506 - RNA, 21 nt, synthetic construct
  source 1..21: mol_type = other RNA
ttggttttatctcctgctgga

SEQ ID NO: 6507 - RNA, 21 nt, synthetic construct
  source 1..21: mol_type = other RNA
ttggttttttggagacagtct

SEQ ID NO: 6508 - RNA, 21 nt, synthetic construct
  source 1..21: mol_type = other RNA
ttggttttttggttttttgga

SEQ ID NO: 6509 - RNA, 21 nt, synthetic construct
  source 1..21: mol_type = other RNA
ttgtaggtggggttctcatag

SEQ ID NO: 6510 - RNA, 21 nt, synthetic construct
  source 1..21: mol_type = other RNA
ttgtattgtctgacacatgct

SEQ ID NO: 6511 - RNA, 21 nt, synthetic construct
  source 1..21: mol_type = other RNA
ttgtcaccacggtgctaggaa

SEQ ID NO: 6512 - RNA, 21 nt, synthetic construct
  source 1..21: mol_type = other RNA
ttgtctgacacatgctctcaa

SEQ ID NO: 6513 - RNA, 21 nt, synthetic construct
  source 1..21: mol_type = other RNA
ttgtcttgccactcactcctt

SEQ ID NO: 6514 - RNA, 21 nt, synthetic construct
  source 1..21: mol_type = other RNA
ttgtgcagcaaatggctcagg

SEQ ID NO: 6515 - RNA, 21 nt, synthetic construct
  source 1..21: mol_type = other RNA
ttgtgcctcagcctcccacct

SEQ ID NO: 6516 - RNA, 21 nt, synthetic construct
  source 1..21: mol_type = other RNA
ttgtggcaggggctgatttcc

SEQ ID NO: 6517 - RNA, 21 nt, synthetic construct
  source 1..21: mol_type = other RNA
ttgtggtgtctgggaagagac

SEQ ID NO: 6518 - RNA, 21 nt, synthetic construct
  source 1..21: mol_type = other RNA
ttgtgtaagtcaactcttcag

SEQ ID NO: 6519 - RNA, 21 nt, synthetic construct
  source 1..21: mol_type = other RNA
ttgttcaggtgacgctcttct

SEQ ID NO: 6520 - RNA, 21 nt, synthetic construct
  source 1..21: mol_type = other RNA
ttgttcttccaggttgatcca

SEQ ID NO: 6521 - RNA, 21 nt, synthetic construct
  source 1..21: mol_type = other RNA
tttaaaaagggaatactgcct

SEQ ID NO: 6522 - RNA, 21 nt, synthetic construct
  source 1..21: mol_type = other RNA
tttaaataaaagccaggacag

SEQ ID NO: 6523 - RNA, 21 nt, synthetic construct
  source 1..21: mol_type = other RNA
tttaaatgagctttcaggaag

SEQ ID NO: 6524 - RNA, 21 nt, synthetic construct
  source 1..21: mol_type = other RNA
tttaaatgggtgaaaaatggt

SEQ ID NO: 6525 - RNA, 21 nt, synthetic construct
  source 1..21: mol_type = other RNA
tttaaattaatcagaaacccc

SEQ ID NO: 6526 - RNA, 21 nt, synthetic construct
  source 1..21: mol_type = other RNA
tttaacgtccttggtgacagg

SEQ ID NO: 6527 - RNA, 21 nt, synthetic construct
  source 1..21: mol_type = other RNA
tttaatgggggaaaggagcaa

SEQ ID NO: 6528 - RNA, 21 nt, synthetic construct
  source 1..21: mol_type = other RNA
tttagaaagtgctgaagcaga

SEQ ID NO: 6529 - RNA, 21 nt, synthetic construct
  source 1..21: mol_type = other RNA
tttaggtggcagggagcgcgg

SEQ ID NO: 6530 - RNA, 21 nt, synthetic construct
  source 1..21: mol_type = other RNA
tttatatagtcctacagtcca

SEQ ID NO: 6531 - RNA, 21 nt, synthetic construct
  source 1..21: mol_type = other RNA
tttatatttggggatcaaggg

SEQ ID NO: 6532 - RNA, 21 nt, synthetic construct
  source 1..21: mol_type = other RNA
tttatctcctgctggagactg

SEQ ID NO: 6533 - RNA, 21 nt, synthetic construct
  source 1..21: mol_type = other RNA
tttatgctacagagggtgaaa

SEQ ID NO: 6534 - RNA, 21 nt, synthetic construct
  source 1..21: mol_type = other RNA
tttatggagacacacaggtat

SEQ ID NO: 6535 - RNA, 21 nt, synthetic construct
  source 1..21: mol_type = other RNA
tttattagagataggatttcc

SEQ ID NO: 6536 - RNA, 21 nt, synthetic construct
  source 1..21: mol_type = other RNA
tttattccagcgtcttctaga

SEQ ID NO: 6537 - RNA, 21 nt, synthetic construct
  source 1..21: mol_type = other RNA
tttcaacattagtttgggcct

SEQ ID NO: 6538 - RNA, 21 nt, synthetic construct
  source 1..21: mol_type = other RNA
tttcacatcattttgcgaggg

SEQ ID NO: 6539 - RNA, 21 nt, synthetic construct
  source 1..21: mol_type = other RNA
tttcaccaccggttctcattt

SEQ ID NO: 6540 - RNA, 21 nt, synthetic construct
  source 1..21: mol_type = other RNA
tttcacccatttaaaagaatg

SEQ ID NO: 6541 - RNA, 21 nt, synthetic construct
  source 1..21: mol_type = other RNA
tttcaccctctgtagcataaa

SEQ ID NO: 6542 - RNA, 21 nt, synthetic construct
  source 1..21: mol_type = other RNA
tttcagaactgaaaaagacca

SEQ ID NO: 6543 - RNA, 21 nt, synthetic construct
  source 1..21: mol_type = other RNA
tttcaggaagttgctgagaaa

SEQ ID NO: 6544 - RNA, 21 nt, synthetic construct
  source 1..21: mol_type = other RNA
tttcagggctctcgtttcgaa

SEQ ID NO: 6545 - RNA, 21 nt, synthetic construct
  source 1..21: mol_type = other RNA
tttcagttctgaaattctaca

SEQ ID NO: 6546 - RNA, 21 nt, synthetic construct
  source 1..21: mol_type = other RNA
tttccaaaaacacgacctagg

SEQ ID NO: 6547 - RNA, 21 nt, synthetic construct
  source 1..21: mol_type = other RNA
tttccacggctggatacctgt

SEQ ID NO: 6548 - RNA, 21 nt, synthetic construct
  source 1..21: mol_type = other RNA
tttccattcttttaaatgggt

SEQ ID NO: 6549 - RNA, 21 nt, synthetic construct
  source 1..21: mol_type = other RNA
tttcccagggctcattaaggt

SEQ ID NO: 6550 - RNA, 21 nt, synthetic construct
  source 1..21: mol_type = other RNA
tttccccatattgaccagggt

SEQ ID NO: 6551 - RNA, 21 nt, synthetic construct
  source 1..21: mol_type = other RNA
tttcctagcaccgtggtgaca

SEQ ID NO: 6552 - RNA, 21 nt, synthetic construct
  source 1..21: mol_type = other RNA
tttcctgttgctcctttcccc

SEQ ID NO: 6553 - RNA, 21 nt, synthetic construct
  source 1..21: mol_type = other RNA
tttccttagtgttcctttttc

SEQ ID NO: 6554 - RNA, 21 nt, synthetic construct
  source 1..21: mol_type = other RNA
tttcgaaacgagagccctgaa

SEQ ID NO: 6555 - RNA, 21 nt, synthetic construct
  source 1..21: mol_type = other RNA
tttcgaaagcattgcctcttt

SEQ ID NO: 6556 - RNA, 21 nt, synthetic construct
  source 1..21: mol_type = other RNA
tttctaaatttcctgttgctc

SEQ ID NO: 6557 - RNA, 21 nt, synthetic construct
  source 1..21: mol_type = other RNA
tttctcagattatttccttag

SEQ ID NO: 6558 - RNA, 21 nt, synthetic construct
  source 1..21: mol_type = other RNA
tttctcagcaacttcctgaaa

SEQ ID NO: 6559 - RNA, 21 nt, synthetic construct
  source 1..21: mol_type = other RNA
tttctcctgtgtttcaccacc

SEQ ID NO: 6560 - RNA, 21 nt, synthetic construct
  source 1..21: mol_type = other RNA
tttctgacattcatagccaag

SEQ ID NO: 6561 - RNA, 21 nt, synthetic construct
  source 1..21: mol_type = other RNA
tttctgttctgtcttctgctg

SEQ ID NO: 6562 - RNA, 21 nt, synthetic construct
  source 1..21: mol_type = other RNA
tttcttgaagtccagtgtttc

SEQ ID NO: 6563 - RNA, 21 nt, synthetic construct
  source 1..21: mol_type = other RNA
tttctttaaataaaagccagg

SEQ ID NO: 6564 - RNA, 21 nt, synthetic construct
  source 1..21: mol_type = other RNA
tttctttctcctgtgtttcac

SEQ ID NO: 6565 - RNA, 21 nt, synthetic construct
  source 1..21: mol_type = other RNA
tttgagatcaccctggtcaat

SEQ ID NO: 6566 - RNA, 21 nt, synthetic construct
  source 1..21: mol_type = other RNA
tttgatccccttattttcttt

SEQ ID NO: 6567 - RNA, 21 nt, synthetic construct
  source 1..21: mol_type = other RNA
tttgcgagggtctctcacgtg

SEQ ID NO: 6568 - RNA, 21 nt, synthetic construct
  source 1..21: mol_type = other RNA
tttgctgcacaatcccctgag

SEQ ID NO: 6569 - RNA, 21 nt, synthetic construct
  source 1..21: mol_type = other RNA
tttggaaatcagcccctgcca

SEQ ID NO: 6570 - RNA, 21 nt, synthetic construct
  source 1..21: mol_type = other RNA
tttggagacagtctcgctgtg

SEQ ID NO: 6571 - RNA, 21 nt, synthetic construct
  source 1..21: mol_type = other RNA
tttggcctgtccggtgggaac

SEQ ID NO: 6572 - RNA, 21 nt, synthetic construct
  source 1..21: mol_type = other RNA
tttgggccttggctatgaatg

SEQ ID NO: 6573 - RNA, 21 nt, synthetic construct
  source 1..21: mol_type = other RNA
tttggggatcaagggactctg

SEQ ID NO: 6574 - RNA, 21 nt, synthetic construct
  source 1..21: mol_type = other RNA
tttggtcctcaggggattgtg

SEQ ID NO: 6575 - RNA, 21 nt, synthetic construct
  source 1..21: mol_type = other RNA
tttggttttttggagacagtc

SEQ ID NO: 6576 - RNA, 21 nt, synthetic construct
  source 1..21: mol_type = other RNA
tttggttttttggttttttgg

SEQ ID NO: 6577 - RNA, 21 nt, synthetic construct
  source 1..21: mol_type = other RNA
tttgtaggtggggttctcata

SEQ ID NO: 6578 - RNA, 21 nt, synthetic construct
  source 1..21: mol_type = other RNA
tttgttcttccaggttgatcc

SEQ ID NO: 6579 - RNA, 21 nt, synthetic construct
  source 1..21: mol_type = other RNA
ttttaaatgagctttcaggaa

SEQ ID NO: 6580 - RNA, 21 nt, synthetic construct
  source 1..21: mol_type = other RNA
ttttaaatgggtgaaaaatgg

SEQ ID NO: 6581 - RNA, 21 nt, synthetic construct
  source 1..21: mol_type = other RNA
ttttaatgggggaaaggagca

SEQ ID NO: 6582 - RNA, 21 nt, synthetic construct
  source 1..21: mol_type = other RNA
ttttatctcctgctggagact

SEQ ID NO: 6583 - RNA, 21 nt, synthetic construct
  source 1..21: mol_type = other RNA
ttttatgctacagagggtgaa

SEQ ID NO: 6584 - RNA, 21 nt, synthetic construct
  source 1..21: mol_type = other RNA
ttttatggagacacacaggta

SEQ ID NO: 6585 - RNA, 21 nt, synthetic construct
  source 1..21: mol_type = other RNA
ttttattccagcgtcttctag

SEQ ID NO: 6586 - RNA, 21 nt, synthetic construct
  source 1..21: mol_type = other RNA
ttttcaccctctgtagcataa

SEQ ID NO: 6587 - RNA, 21 nt, synthetic construct
  source 1..21: mol_type = other RNA
ttttcagttctgaaattctac

SEQ ID NO: 6588 - RNA, 21 nt, synthetic construct
  source 1..21: mol_type = other RNA
ttttctttctcctgtgtttca

SEQ ID NO: 6589 - RNA, 21 nt, synthetic construct
  source 1..21: mol_type = other RNA
ttttgcgagggtctctcacgt

SEQ ID NO: 6590 - RNA, 21 nt, synthetic construct
  source 1..21: mol_type = other RNA
ttttggaaatcagcccctgcc

SEQ ID NO: 6591 - RNA, 21 nt, synthetic construct
  source 1..21: mol_type = other RNA
ttttggagacagtctcgctgt

SEQ ID NO: 6592 - RNA, 21 nt, synthetic construct
  source 1..21: mol_type = other RNA
ttttggttttttggagacagt

SEQ ID NO: 6593 - RNA, 21 nt, synthetic construct
  source 1..21: mol_type = other RNA
ttttgttcttccaggttgatc

SEQ ID NO: 6594 - RNA, 21 nt, synthetic construct
  source 1..21: mol_type = other RNA
tttttaaatgagctttcagga

SEQ ID NO: 6595 - RNA, 21 nt, synthetic construct
  source 1..21: mol_type = other RNA
tttttaatgggggaaaggagc

SEQ ID NO: 6596 - RNA, 21 nt, synthetic construct
  source 1..21: mol_type = other RNA
tttttggaaatcagcccctgc

SEQ ID NO: 6597 - RNA, 21 nt, synthetic construct
  source 1..21: mol_type = other RNA
tttttggagacagtctcgctg

SEQ ID NO: 6598 - RNA, 21 nt, synthetic construct
  source 1..21: mol_type = other RNA
tttttggttttttggagacag

SEQ ID NO: 6599 - RNA, 21 nt, synthetic construct
  source 1..21: mol_type = other RNA
ttttttaatgggggaaaggag

SEQ ID NO: 6600 - RNA, 21 nt, synthetic construct
  source 1..21: mol_type = other RNA
ttttttggagacagtctcgct

SEQ ID NO: 6601 - RNA, 21 nt, synthetic construct
  source 1..21: mol_type = other RNA
ttttttggttttttggagaca

SEQ ID NO: 6602 - RNA, 22 nt, synthetic construct
  source 1..22: mol_type = other RNA
aaaaaaggcagtattccctttt

SEQ ID NO: 6603 - RNA, 22 nt, synthetic construct
  source 1..22: mol_type = other RNA
aaaaaatacctggaaaaaggaa

SEQ ID NO: 6604 - RNA, 22 nt, synthetic construct
  source 1..22: mol_type = other RNA
aaaaacacaaataactaagacc

SEQ ID NO: 6605 - RNA, 22 nt, synthetic construct
  source 1..22: mol_type = other RNA
aaaaacacgacctaggaatcca

SEQ ID NO: 6606 - RNA, 22 nt, synthetic construct
  source 1..22: mol_type = other RNA
aaaaagaccagagatcccctgg

SEQ ID NO: 6607 - RNA, 22 nt, synthetic construct
  source 1..22: mol_type = other RNA
aaaaaggaacactaaggaaata

SEQ ID NO: 6608 - RNA, 22 nt, synthetic construct
  source 1..22: mol_type = other RNA
aaaaaggcagtattcccttttt

SEQ ID NO: 6609 - RNA, 22 nt, synthetic construct
  source 1..22: mol_type = other RNA
aaaaagggaatactgccttttt

SEQ ID NO: 6610 - RNA, 22 nt, synthetic construct
  source 1..22: mol_type = other RNA
aaaaatacaaagactagctggg

SEQ ID NO: 6611 - RNA, 22 nt, synthetic construct
  source 1..22: mol_type = other RNA
aaaaatacctggaaaaaggaac

SEQ ID NO: 6612 - RNA, 22 nt, synthetic construct
  source 1..22: mol_type = other RNA
aaaacacaaataactaagacca

SEQ ID NO: 6613 - RNA, 22 nt, synthetic construct
  source 1..22: mol_type = other RNA
aaaacacgacctaggaatccag

SEQ ID NO: 6614 - RNA, 22 nt, synthetic construct
  source 1..22: mol_type = other RNA
aaaaccaagtaactggccaggt

SEQ ID NO: 6615 - RNA, 22 nt, synthetic construct
  source 1..22: mol_type = other RNA
aaaacctgagggtcattgtggt

SEQ ID NO: 6616 - RNA, 22 nt, synthetic construct
  source 1..22: mol_type = other RNA
aaaactacatcaaatatctgca

SEQ ID NO: 6617 - RNA, 22 nt, synthetic construct
  source 1..22: mol_type = other RNA
aaaagaatggaaattgcagttc

SEQ ID NO: 6618 - RNA, 22 nt, synthetic construct
  source 1..22: mol_type = other RNA
aaaagaccagagatcccctggt

SEQ ID NO: 6619 - RNA, 22 nt, synthetic construct
  source 1..22: mol_type = other RNA
aaaagagttttcaccctctgta

SEQ ID NO: 6620 - RNA, 22 nt, synthetic construct
  source 1..22: mol_type = other RNA
aaaagccaggacagtgaatgag

SEQ ID NO: 6621 - RNA, 22 nt, synthetic construct
  source 1..22: mol_type = other RNA
aaaaggaacactaaggaaataa

SEQ ID NO: 6622 - RNA, 22 nt, synthetic construct
  source 1..22: mol_type = other RNA
aaaaggcagtattcccttttta

SEQ ID NO: 6623 - RNA, 22 nt, synthetic construct
  source 1..22: mol_type = other RNA
aaaagggaatactgcctttttt

SEQ ID NO: 6624 - RNA, 22 nt, synthetic construct
  source 1..22: mol_type = other RNA
aaaagtcctgtcaccaaggacg

SEQ ID NO: 6625 - RNA, 22 nt, synthetic construct
  source 1..22: mol_type = other RNA
aaaataaggggatcaaagaggc

SEQ ID NO: 6626 - RNA, 22 nt, synthetic construct
  source 1..22: mol_type = other RNA
aaaatacaaagactagctgggc

SEQ ID NO: 6627 - RNA, 22 nt, synthetic construct
  source 1..22: mol_type = other RNA
aaaatacctggaaaaaggaaca

SEQ ID NO: 6628 - RNA, 22 nt, synthetic construct
  source 1..22: mol_type = other RNA
aaaatcgacatttcccatttat

SEQ ID NO: 6629 - RNA, 22 nt, synthetic construct
  source 1..22: mol_type = other RNA
aaaatgatgtgaaaggaccagt

SEQ ID NO: 6630 - RNA, 22 nt, synthetic construct
  source 1..22: mol_type = other RNA
aaaatgcctttaacgtccttgg

SEQ ID NO: 6631 - RNA, 22 nt, synthetic construct
  source 1..22: mol_type = other RNA
aaaatgttcacatgactttctg

SEQ ID NO: 6632 - RNA, 22 nt, synthetic construct
  source 1..22: mol_type = other RNA
aaacacaaataactaagaccag

SEQ ID NO: 6633 - RNA, 22 nt, synthetic construct
  source 1..22: mol_type = other RNA
aaacacaggagaaagaaaataa

SEQ ID NO: 6634 - RNA, 22 nt, synthetic construct
  source 1..22: mol_type = other RNA
aaacacgacctaggaatccagt

SEQ ID NO: 6635 - RNA, 22 nt, synthetic construct
  source 1..22: mol_type = other RNA
aaacactggacttcaagaaact

SEQ ID NO: 6636 - RNA, 22 nt, synthetic construct
  source 1..22: mol_type = other RNA
aaacagtctgcttcagcacttt

SEQ ID NO: 6637 - RNA, 22 nt, synthetic construct
  source 1..22: mol_type = other RNA
aaaccaaaaaaccaaaacaaac

SEQ ID NO: 6638 - RNA, 22 nt, synthetic construct
  source 1..22: mol_type = other RNA
aaaccaagtaactggccaggtg

SEQ ID NO: 6639 - RNA, 22 nt, synthetic construct
  source 1..22: mol_type = other RNA
aaaccccacttccattgtattg

SEQ ID NO: 6640 - RNA, 22 nt, synthetic construct
  source 1..22: mol_type = other RNA
aaacctgagggtcattgtggtg

SEQ ID NO: 6641 - RNA, 22 nt, synthetic construct
  source 1..22: mol_type = other RNA
aaacgagagccctgaaagctta

SEQ ID NO: 6642 - RNA, 22 nt, synthetic construct
  source 1..22: mol_type = other RNA
aaactaatgttgaaagttggca

SEQ ID NO: 6643 - RNA, 22 nt, synthetic construct
  source 1..22: mol_type = other RNA
aaactacatcaaatatctgcaa

SEQ ID NO: 6644 - RNA, 22 nt, synthetic construct
  source 1..22: mol_type = other RNA
aaactggtcctttcacatcatt

SEQ ID NO: 6645 - RNA, 22 nt, synthetic construct
  source 1..22: mol_type = other RNA
aaagaaaataaggggatcaaag

SEQ ID NO: 6646 - RNA, 22 nt, synthetic construct
  source 1..22: mol_type = other RNA
aaagaatggaaattgcagttct

SEQ ID NO: 6647 - RNA, 22 nt, synthetic construct
  source 1..22: mol_type = other RNA
aaagaccagagatcccctggtc

SEQ ID NO: 6648 - RNA, 22 nt, synthetic construct
  source 1..22: mol_type = other RNA
aaagactagctgggcgtggtgg

SEQ ID NO: 6649 - RNA, 22 nt, synthetic construct
  source 1..22: mol_type = other RNA
aaagaggcaatgctttcgaaac

SEQ ID NO: 6650 - RNA, 22 nt, synthetic construct
  source 1..22: mol_type = other RNA
aaagagttttcaccctctgtag

SEQ ID NO: 6651 - RNA, 22 nt, synthetic construct
  source 1..22: mol_type = other RNA
aaagcattgcctctttgatccc

SEQ ID NO: 6652 - RNA, 22 nt, synthetic construct
  source 1..22: mol_type = other RNA
aaagccaggacagtgaatgagg

SEQ ID NO: 6653 - RNA, 22 nt, synthetic construct
  source 1..22: mol_type = other RNA
aaagctcatttaaaaagggaat

SEQ ID NO: 6654 - RNA, 22 nt, synthetic construct
  source 1..22: mol_type = other RNA
aaagcttagccctcacggaaga

SEQ ID NO: 6655 - RNA, 22 nt, synthetic construct
  source 1..22: mol_type = other RNA
aaaggaacactaaggaaataat

SEQ ID NO: 6656 - RNA, 22 nt, synthetic construct
  source 1..22: mol_type = other RNA
aaaggaccagtttcttgaagtc

SEQ ID NO: 6657 - RNA, 22 nt, synthetic construct
  source 1..22: mol_type = other RNA
aaaggagcaacaggaaatttag

SEQ ID NO: 6658 - RNA, 22 nt, synthetic construct
  source 1..22: mol_type = other RNA
aaaggcagtattccctttttaa

SEQ ID NO: 6659 - RNA, 22 nt, synthetic construct
  source 1..22: mol_type = other RNA
aaaggcattttattccagcgtc

SEQ ID NO: 6660 - RNA, 22 nt, synthetic construct
  source 1..22: mol_type = other RNA
aaagtactactgtagaactgca

SEQ ID NO: 6661 - RNA, 22 nt, synthetic construct
  source 1..22: mol_type = other RNA
aaagtcatgtgaacattttatg

SEQ ID NO: 6662 - RNA, 22 nt, synthetic construct
  source 1..22: mol_type = other RNA
aaagtcctgtcaccaaggacgt

SEQ ID NO: 6663 - RNA, 22 nt, synthetic construct
  source 1..22: mol_type = other RNA
aaagtgctgaagcagactgttt

SEQ ID NO: 6664 - RNA, 22 nt, synthetic construct
  source 1..22: mol_type = other RNA
aaagttggcaacagccccttgt

SEQ ID NO: 6665 - RNA, 22 nt, synthetic construct
  source 1..22: mol_type = other RNA
aaataaaagccaggacagtgaa

SEQ ID NO: 6666 - RNA, 22 nt, synthetic construct
  source 1..22: mol_type = other RNA
aaataactaagaccagcatctg

SEQ ID NO: 6667 - RNA, 22 nt, synthetic construct
  source 1..22: mol_type = other RNA
aaataaggggatcaaagaggca

SEQ ID NO: 6668 - RNA, 22 nt, synthetic construct
  source 1..22: mol_type = other RNA
aaatacaaagactagctgggcg

SEQ ID NO: 6669 - RNA, 22 nt, synthetic construct
  source 1..22: mol_type = other RNA
aaatacagtaaggaccttaatg

SEQ ID NO: 6670 - RNA, 22 nt, synthetic construct
  source 1..22: mol_type = other RNA
aaatacctggaaaaaggaacac

SEQ ID NO: 6671 - RNA, 22 nt, synthetic construct
  source 1..22: mol_type = other RNA
aaatacctggagcagatgcaga

SEQ ID NO: 6672 - RNA, 22 nt, synthetic construct
  source 1..22: mol_type = other RNA
aaatataaatacagtaaggacc

SEQ ID NO: 6673 - RNA, 22 nt, synthetic construct
  source 1..22: mol_type = other RNA
aaatcagcccctgccacaaggg

SEQ ID NO: 6674 - RNA, 22 nt, synthetic construct
  source 1..22: mol_type = other RNA
aaatccagttgactgtcatctt

SEQ ID NO: 6675 - RNA, 22 nt, synthetic construct
  source 1..22: mol_type = other RNA
aaatcgacatttcccatttatt

SEQ ID NO: 6676 - RNA, 22 nt, synthetic construct
  source 1..22: mol_type = other RNA
aaatctgcatctgctccaggta

SEQ ID NO: 6677 - RNA, 22 nt, synthetic construct
  source 1..22: mol_type = other RNA
aaatgagaaccggtggtgaaac

SEQ ID NO: 6678 - RNA, 22 nt, synthetic construct
  source 1..22: mol_type = other RNA
aaatgagctttcaggaagttgc

SEQ ID NO: 6679 - RNA, 22 nt, synthetic construct
  source 1..22: mol_type = other RNA
aaatgatgtgaaaggaccagtt

SEQ ID NO: 6680 - RNA, 22 nt, synthetic construct
  source 1..22: mol_type = other RNA
aaatgcagccagcagcccgttc

SEQ ID NO: 6681 - RNA, 22 nt, synthetic construct
  source 1..22: mol_type = other RNA
aaatgcctttaacgtccttggt

SEQ ID NO: 6682 - RNA, 22 nt, synthetic construct
  source 1..22: mol_type = other RNA
aaatggctcaggtctcccagca

SEQ ID NO: 6683 - RNA, 22 nt, synthetic construct
  source 1..22: mol_type = other RNA
aaatgggaaatgtcgattttca

SEQ ID NO: 6684 - RNA, 22 nt, synthetic construct
  source 1..22: mol_type = other RNA
aaatggggtggaatagggaact

SEQ ID NO: 6685 - RNA, 22 nt, synthetic construct
  source 1..22: mol_type = other RNA
aaatgggtgaaaaatggtaata

SEQ ID NO: 6686 - RNA, 22 nt, synthetic construct
  source 1..22: mol_type = other RNA
aaatgttcacatgactttctga

SEQ ID NO: 6687 - RNA, 22 nt, synthetic construct
  source 1..22: mol_type = other RNA
aaattaatcagaaaccccactt

SEQ ID NO: 6688 - RNA, 22 nt, synthetic construct
  source 1..22: mol_type = other RNA
aaattagtgcagatgctggtct

SEQ ID NO: 6689 - RNA, 22 nt, synthetic construct
  source 1..22: mol_type = other RNA
aaattctacagctaggccagtc

SEQ ID NO: 6690 - RNA, 22 nt, synthetic construct
  source 1..22: mol_type = other RNA
aaattgcagttctacagtagta

SEQ ID NO: 6691 - RNA, 22 nt, synthetic construct
  source 1..22: mol_type = other RNA
aaatttagaaagtgctgaagca

SEQ ID NO: 6692 - RNA, 22 nt, synthetic construct
  source 1..22: mol_type = other RNA
aaatttcctgttgctcctttcc

SEQ ID NO: 6693 - RNA, 22 nt, synthetic construct
  source 1..22: mol_type = other RNA
aacaaaacctgagggtcattgt

SEQ ID NO: 6694 - RNA, 22 nt, synthetic construct
  source 1..22: mol_type = other RNA
aacaagatgcagaaccatggct

SEQ ID NO: 6695 - RNA, 22 nt, synthetic construct
  source 1..22: mol_type = other RNA
aacacaaataactaagaccagc

SEQ ID NO: 6696 - RNA, 22 nt, synthetic construct
  source 1..22: mol_type = other RNA
aacacaggagaaagaaaataag

SEQ ID NO: 6697 - RNA, 22 nt, synthetic construct
  source 1..22: mol_type = other RNA
aacacgacctaggaatccagtg

SEQ ID NO: 6698 - RNA, 22 nt, synthetic construct
  source 1..22: mol_type = other RNA
aacactaaggaaataatctgag

SEQ ID NO: 6699 - RNA, 22 nt, synthetic construct
  source 1..22: mol_type = other RNA
aacactggacttcaagaaactg

SEQ ID NO: 6700 - RNA, 22 nt, synthetic construct
  source 1..22: mol_type = other RNA
aacagaaacagtctgcttcagc

SEQ ID NO: 6701 - RNA, 22 nt, synthetic construct
  source 1..22: mol_type = other RNA
aacagcagcatgtccagtactc

SEQ ID NO: 6702 - RNA, 22 nt, synthetic construct
  source 1..22: mol_type = other RNA
aacagccccttgtggcaggggc

SEQ ID NO: 6703 - RNA, 22 nt, synthetic construct
  source 1..22: mol_type = other RNA
aacaggaaatttagaaagtgct

SEQ ID NO: 6704 - RNA, 22 nt, synthetic construct
  source 1..22: mol_type = other RNA
aacagtctgcttcagcactttc

SEQ ID NO: 6705 - RNA, 22 nt, synthetic construct
  source 1..22: mol_type = other RNA
aacagtgggaatgtccagagtc

SEQ ID NO: 6706 - RNA, 22 nt, synthetic construct
  source 1..22: mol_type = other RNA
aacataaccggaacgacagcct

SEQ ID NO: 6707 - RNA, 22 nt, synthetic construct
  source 1..22: mol_type = other RNA
aacattagtttgggccttggct

SEQ ID NO: 6708 - RNA, 22 nt, synthetic construct
  source 1..22: mol_type = other RNA
aacattttatgctacagagggt

SEQ ID NO: 6709 - RNA, 22 nt, synthetic construct
  source 1..22: mol_type = other RNA
aaccaaaaaaccaaaacaaaca

SEQ ID NO: 6710 - RNA, 22 nt, synthetic construct
  source 1..22: mol_type = other RNA
aaccaagtaactggccaggtgc

SEQ ID NO: 6711 - RNA, 22 nt, synthetic construct
  source 1..22: mol_type = other RNA
aaccagcagaagacagaacaga

SEQ ID NO: 6712 - RNA, 22 nt, synthetic construct
  source 1..22: mol_type = other RNA
aaccatggctatgagaacccca

SEQ ID NO: 6713 - RNA, 22 nt, synthetic construct
  source 1..22: mol_type = other RNA
aaccccacctacaaatacctgg

SEQ ID NO: 6714 - RNA, 22 nt, synthetic construct
  source 1..22: mol_type = other RNA
aaccccacttccattgtattgt

SEQ ID NO: 6715 - RNA, 22 nt, synthetic construct
  source 1..22: mol_type = other RNA
aaccggaacgacagcctgcata

SEQ ID NO: 6716 - RNA, 22 nt, synthetic construct
  source 1..22: mol_type = other RNA
aaccggtggtgaaacacaggag

SEQ ID NO: 6717 - RNA, 22 nt, synthetic construct
  source 1..22: mol_type = other RNA
aacctgagggtcattgtggtgt

SEQ ID NO: 6718 - RNA, 22 nt, synthetic construct
  source 1..22: mol_type = other RNA
aacctggaagaacaaaacctga

SEQ ID NO: 6719 - RNA, 22 nt, synthetic construct
  source 1..22: mol_type = other RNA
aacctgtggaattaataggcat

SEQ ID NO: 6720 - RNA, 22 nt, synthetic construct
  source 1..22: mol_type = other RNA
aacgacagcctgcatataagtc

SEQ ID NO: 6721 - RNA, 22 nt, synthetic construct
  source 1..22: mol_type = other RNA
aacgagagccctgaaagcttag

SEQ ID NO: 6722 - RNA, 22 nt, synthetic construct
  source 1..22: mol_type = other RNA
aacgggctgctggctgcatttg

SEQ ID NO: 6723 - RNA, 22 nt, synthetic construct
  source 1..22: mol_type = other RNA
aacgtccttggtgacaggactt

SEQ ID NO: 6724 - RNA, 22 nt, synthetic construct
  source 1..22: mol_type = other RNA
aactaagaccagcatctgcact

SEQ ID NO: 6725 - RNA, 22 nt, synthetic construct
  source 1..22: mol_type = other RNA
aactaatgttgaaagttggcaa

SEQ ID NO: 6726 - RNA, 22 nt, synthetic construct
  source 1..22: mol_type = other RNA
aactacatcaaatatctgcaat

SEQ ID NO: 6727 - RNA, 22 nt, synthetic construct
  source 1..22: mol_type = other RNA
aactcttcagcctcattcactg

SEQ ID NO: 6728 - RNA, 22 nt, synthetic construct
  source 1..22: mol_type = other RNA
aactcttttctcagattatttc

SEQ ID NO: 6729 - RNA, 22 nt, synthetic construct
  source 1..22: mol_type = other RNA
aactgaaaaagaccagagatcc

SEQ ID NO: 6730 - RNA, 22 nt, synthetic construct
  source 1..22: mol_type = other RNA
aactgaactgataacagcagca

SEQ ID NO: 6731 - RNA, 22 nt, synthetic construct
  source 1..22: mol_type = other RNA
aactgataacagcagcatgtcc

SEQ ID NO: 6732 - RNA, 22 nt, synthetic construct
  source 1..22: mol_type = other RNA
aactgcaatttccattctttta

SEQ ID NO: 6733 - RNA, 22 nt, synthetic construct
  source 1..22: mol_type = other RNA
aactggatttcctagcaccgtg

SEQ ID NO: 6734 - RNA, 22 nt, synthetic construct
  source 1..22: mol_type = other RNA
aactggccaggtgcagtagctc

SEQ ID NO: 6735 - RNA, 22 nt, synthetic construct
  source 1..22: mol_type = other RNA
aactggtcctttcacatcattt

SEQ ID NO: 6736 - RNA, 22 nt, synthetic construct
  source 1..22: mol_type = other RNA
aactgtaatggccactgaagca

SEQ ID NO: 6737 - RNA, 22 nt, synthetic construct
  source 1..22: mol_type = other RNA
aacttcctgaaagctcatttaa

SEQ ID NO: 6738 - RNA, 22 nt, synthetic construct
  source 1..22: mol_type = other RNA
aacttgtcttgccactcactcc

SEQ ID NO: 6739 - RNA, 22 nt, synthetic construct
  source 1..22: mol_type = other RNA
aactttcaacattagtttgggc

SEQ ID NO: 6740 - RNA, 22 nt, synthetic construct
  source 1..22: mol_type = other RNA
aagaaaataaggggatcaaaga

SEQ ID NO: 6741 - RNA, 22 nt, synthetic construct
  source 1..22: mol_type = other RNA
aagaaactggtcctttcacatc

SEQ ID NO: 6742 - RNA, 22 nt, synthetic construct
  source 1..22: mol_type = other RNA
aagaacaaaacctgagggtcat

SEQ ID NO: 6743 - RNA, 22 nt, synthetic construct
  source 1..22: mol_type = other RNA
aagaatcacctgaacccgggag

SEQ ID NO: 6744 - RNA, 22 nt, synthetic construct
  source 1..22: mol_type = other RNA
aagaatggaaattgcagttcta

SEQ ID NO: 6745 - RNA, 22 nt, synthetic construct
  source 1..22: mol_type = other RNA
aagacaagttcagtaaccagca

SEQ ID NO: 6746 - RNA, 22 nt, synthetic construct
  source 1..22: mol_type = other RNA
aagacagaacagaaacagtctg

SEQ ID NO: 6747 - RNA, 22 nt, synthetic construct
  source 1..22: mol_type = other RNA
aagaccagagatcccctggtcc

SEQ ID NO: 6748 - RNA, 22 nt, synthetic construct
  source 1..22: mol_type = other RNA
aagaccagcatctgcactaatt

SEQ ID NO: 6749 - RNA, 22 nt, synthetic construct
  source 1..22: mol_type = other RNA
aagacgctggaataaaatgcct

SEQ ID NO: 6750 - RNA, 22 nt, synthetic construct
  source 1..22: mol_type = other RNA
aagactagctgggcgtggtggc

SEQ ID NO: 6751 - RNA, 22 nt, synthetic construct
  source 1..22: mol_type = other RNA
aagagacctgcacagggtgctg

SEQ ID NO: 6752 - RNA, 22 nt, synthetic construct
  source 1..22: mol_type = other RNA
aagagcgtcacctgaacaagat

SEQ ID NO: 6753 - RNA, 22 nt, synthetic construct
  source 1..22: mol_type = other RNA
aagaggcaatgctttcgaaacg

SEQ ID NO: 6754 - RNA, 22 nt, synthetic construct
  source 1..22: mol_type = other RNA
aagagttgacttacacaacata

SEQ ID NO: 6755 - RNA, 22 nt, synthetic construct
  source 1..22: mol_type = other RNA
aagagttttcaccctctgtagc

SEQ ID NO: 6756 - RNA, 22 nt, synthetic construct
  source 1..22: mol_type = other RNA
aagatcccacgattccgatcga

SEQ ID NO: 6757 - RNA, 22 nt, synthetic construct
  source 1..22: mol_type = other RNA
aagatgacagtcaactggattt

SEQ ID NO: 6758 - RNA, 22 nt, synthetic construct
  source 1..22: mol_type = other RNA
aagatgcagaaccatggctatg

SEQ ID NO: 6759 - RNA, 22 nt, synthetic construct
  source 1..22: mol_type = other RNA
aagatgcctattaattccacag

SEQ ID NO: 6760 - RNA, 22 nt, synthetic construct
  source 1..22: mol_type = other RNA
aagcaaggctcggcgccactgc

SEQ ID NO: 6761 - RNA, 22 nt, synthetic construct
  source 1..22: mol_type = other RNA
aagcacgtgagagaccctcgca

SEQ ID NO: 6762 - RNA, 22 nt, synthetic construct
  source 1..22: mol_type = other RNA
aagcagacggtgggaccagggg

SEQ ID NO: 6763 - RNA, 22 nt, synthetic construct
  source 1..22: mol_type = other RNA
aagcagactgtttctgttctgt

SEQ ID NO: 6764 - RNA, 22 nt, synthetic construct
  source 1..22: mol_type = other RNA
aagcagcagccgctgccagggg

SEQ ID NO: 6765 - RNA, 22 nt, synthetic construct
  source 1..22: mol_type = other RNA
aagcagtggcgccgagccttgc

SEQ ID NO: 6766 - RNA, 22 nt, synthetic construct
  source 1..22: mol_type = other RNA
aagcatgagctactgcacctgg

SEQ ID NO: 6767 - RNA, 22 nt, synthetic construct
  source 1..22: mol_type = other RNA
aagcattgcctctttgatcccc

SEQ ID NO: 6768 - RNA, 22 nt, synthetic construct
  source 1..22: mol_type = other RNA
aagccaggacagtgaatgaggc

SEQ ID NO: 6769 - RNA, 22 nt, synthetic construct
  source 1..22: mol_type = other RNA
aagccagtcagcagtaggctag

SEQ ID NO: 6770 - RNA, 22 nt, synthetic construct
  source 1..22: mol_type = other RNA
aagctcatttaaaaagggaata

SEQ ID NO: 6771 - RNA, 22 nt, synthetic construct
  source 1..22: mol_type = other RNA
aagctctctagaagacgctgga

SEQ ID NO: 6772 - RNA, 22 nt, synthetic construct
  source 1..22: mol_type = other RNA
aagcttagccctcacggaagat

SEQ ID NO: 6773 - RNA, 22 nt, synthetic construct
  source 1..22: mol_type = other RNA
aagctttcagggctctcgtttc

SEQ ID NO: 6774 - RNA, 22 nt, synthetic construct
  source 1..22: mol_type = other RNA
aaggaaataatctgagaaaaga

SEQ ID NO: 6775 - RNA, 22 nt, synthetic construct
  source 1..22: mol_type = other RNA
aaggaacactaaggaaataatc

SEQ ID NO: 6776 - RNA, 22 nt, synthetic construct
  source 1..22: mol_type = other RNA
aaggaccagtttcttgaagtcc

SEQ ID NO: 6777 - RNA, 22 nt, synthetic construct
  source 1..22: mol_type = other RNA
aaggaccttaatgagccctggg

SEQ ID NO: 6778 - RNA, 22 nt, synthetic construct
  source 1..22: mol_type = other RNA
aaggacgttaaaggcattttat

SEQ ID NO: 6779 - RNA, 22 nt, synthetic construct
  source 1..22: mol_type = other RNA
aaggagcaacaggaaatttaga

SEQ ID NO: 6780 - RNA, 22 nt, synthetic construct
  source 1..22: mol_type = other RNA
aaggagtgagtggcaagacaag

SEQ ID NO: 6781 - RNA, 22 nt, synthetic construct
  source 1..22: mol_type = other RNA
aaggcaagccagtcagcagtag

SEQ ID NO: 6782 - RNA, 22 nt, synthetic construct
  source 1..22: mol_type = other RNA
aaggcagtattccctttttaaa

SEQ ID NO: 6783 - RNA, 22 nt, synthetic construct
  source 1..22: mol_type = other RNA
aaggcattttattccagcgtct

SEQ ID NO: 6784 - RNA, 22 nt, synthetic construct
  source 1..22: mol_type = other RNA
aaggcccaaactaatgttgaaa

SEQ ID NO: 6785 - RNA, 22 nt, synthetic construct
  source 1..22: mol_type = other RNA
aaggctcggcgccactgcttac

SEQ ID NO: 6786 - RNA, 22 nt, synthetic construct
  source 1..22: mol_type = other RNA
aagggactctggacattcccac

SEQ ID NO: 6787 - RNA, 22 nt, synthetic construct
  source 1..22: mol_type = other RNA
aaggggatcaaagaggcaatgc

SEQ ID NO: 6788 - RNA, 22 nt, synthetic construct
  source 1..22: mol_type = other RNA
aaggggctgttgccaactttca

SEQ ID NO: 6789 - RNA, 22 nt, synthetic construct
  source 1..22: mol_type = other RNA
aaggtccttactgtatttatat

SEQ ID NO: 6790 - RNA, 22 nt, synthetic construct
  source 1..22: mol_type = other RNA
aagtaactggccaggtgcagta

SEQ ID NO: 6791 - RNA, 22 nt, synthetic construct
  source 1..22: mol_type = other RNA
aagtactactgtagaactgcaa

SEQ ID NO: 6792 - RNA, 22 nt, synthetic construct
  source 1..22: mol_type = other RNA
aagtcaactcttcagcctcatt

SEQ ID NO: 6793 - RNA, 22 nt, synthetic construct
  source 1..22: mol_type = other RNA
aagtcatgtgaacattttatgc

SEQ ID NO: 6794 - RNA, 22 nt, synthetic construct
  source 1..22: mol_type = other RNA
aagtccagtgtttccacggctg

SEQ ID NO: 6795 - RNA, 22 nt, synthetic construct
  source 1..22: mol_type = other RNA
aagtcctgtcaccaaggacgtt

SEQ ID NO: 6796 - RNA, 22 nt, synthetic construct
  source 1..22: mol_type = other RNA
aagtctattattgaaaatcgac

SEQ ID NO: 6797 - RNA, 22 nt, synthetic construct
  source 1..22: mol_type = other RNA
aagtgctgaagcagactgtttc

SEQ ID NO: 6798 - RNA, 22 nt, synthetic construct
  source 1..22: mol_type = other RNA
aagtggggtttctgattaattt

SEQ ID NO: 6799 - RNA, 22 nt, synthetic construct
  source 1..22: mol_type = other RNA
aagttcagtaaccagcagaaga

SEQ ID NO: 6800 - RNA, 22 nt, synthetic construct
  source 1..22: mol_type = other RNA
aagttgctgagaaatggggtgg

SEQ ID NO: 6801 - RNA, 22 nt, synthetic construct
  source 1..22: mol_type = other RNA
aagttggcaacagccccttgtg

SEQ ID NO: 6802 - RNA, 22 nt, synthetic construct
  source 1..22: mol_type = other RNA
aataaaagccaggacagtgaat

SEQ ID NO: 6803 - RNA, 22 nt, synthetic construct
  source 1..22: mol_type = other RNA
aataaaatgcctttaacgtcct

SEQ ID NO: 6804 - RNA, 22 nt, synthetic construct
  source 1..22: mol_type = other RNA
aataaatgggaaatgtcgattt

SEQ ID NO: 6805 - RNA, 22 nt, synthetic construct
  source 1..22: mol_type = other RNA
aataactaagaccagcatctgc

SEQ ID NO: 6806 - RNA, 22 nt, synthetic construct
  source 1..22: mol_type = other RNA
aataaggggatcaaagaggcaa

SEQ ID NO: 6807 - RNA, 22 nt, synthetic construct
  source 1..22: mol_type = other RNA
aataatagacttatatgcaggc

SEQ ID NO: 6808 - RNA, 22 nt, synthetic construct
  source 1..22: mol_type = other RNA
aatacaaagactagctgggcgt

SEQ ID NO: 6809 - RNA, 22 nt, synthetic construct
  source 1..22: mol_type = other RNA
aatacaatggaagtggggtttc

SEQ ID NO: 6810 - RNA, 22 nt, synthetic construct
  source 1..22: mol_type = other RNA
aatacagtaaggaccttaatga

SEQ ID NO: 6811 - RNA, 22 nt, synthetic construct
  source 1..22: mol_type = other RNA
aatacctggaaaaaggaacact

SEQ ID NO: 6812 - RNA, 22 nt, synthetic construct
  source 1..22: mol_type = other RNA
aatacctggagcagatgcagat

SEQ ID NO: 6813 - RNA, 22 nt, synthetic construct
  source 1..22: mol_type = other RNA
aatagacttatatgcaggctgt

SEQ ID NO: 6814 - RNA, 22 nt, synthetic construct
  source 1..22: mol_type = other RNA
aataggcatcttcactcctcga

SEQ ID NO: 6815 - RNA, 22 nt, synthetic construct
  source 1..22: mol_type = other RNA
aatagggaactgtaatggccac

SEQ ID NO: 6816 - RNA, 22 nt, synthetic construct
  source 1..22: mol_type = other RNA
aatataaatacagtaaggacct

SEQ ID NO: 6817 - RNA, 22 nt, synthetic construct
  source 1..22: mol_type = other RNA
aatatggggaaatcctatctct

SEQ ID NO: 6818 - RNA, 22 nt, synthetic construct
  source 1..22: mol_type = other RNA
aatcagaaaccccacttccatt

SEQ ID NO: 6819 - RNA, 22 nt, synthetic construct
  source 1..22: mol_type = other RNA
aatcagcccctgccacaagggg

SEQ ID NO: 6820 - RNA, 22 nt, synthetic construct
  source 1..22: mol_type = other RNA
aatccagtgagtaactgaactg

SEQ ID NO: 6821 - RNA, 22 nt, synthetic construct
  source 1..22: mol_type = other RNA
aatccagttgactgtcatcttc

SEQ ID NO: 6822 - RNA, 22 nt, synthetic construct
  source 1..22: mol_type = other RNA
aatcccctgaggaccaaatgca

SEQ ID NO: 6823 - RNA, 22 nt, synthetic construct
  source 1..22: mol_type = other RNA
aatcgacatttcccatttatta

SEQ ID NO: 6824 - RNA, 22 nt, synthetic construct
  source 1..22: mol_type = other RNA
aatcgtgggatcttccggccca

SEQ ID NO: 6825 - RNA, 22 nt, synthetic construct
  source 1..22: mol_type = other RNA
aatctgagaaaagagttttcac

SEQ ID NO: 6826 - RNA, 22 nt, synthetic construct
  source 1..22: mol_type = other RNA
aatctgcatctgctccaggtat

SEQ ID NO: 6827 - RNA, 22 nt, synthetic construct
  source 1..22: mol_type = other RNA
aatgaccctcaggttttgttct

SEQ ID NO: 6828 - RNA, 22 nt, synthetic construct
  source 1..22: mol_type = other RNA
aatgagaaccggtggtgaaaca

SEQ ID NO: 6829 - RNA, 22 nt, synthetic construct
  source 1..22: mol_type = other RNA
aatgagccctgggaaattagtg

SEQ ID NO: 6830 - RNA, 22 nt, synthetic construct
  source 1..22: mol_type = other RNA
aatgagctttcaggaagttgct

SEQ ID NO: 6831 - RNA, 22 nt, synthetic construct
  source 1..22: mol_type = other RNA
aatgaggctgaagagttgactt

SEQ ID NO: 6832 - RNA, 22 nt, synthetic construct
  source 1..22: mol_type = other RNA
aatgatctattgcagatatttg

SEQ ID NO: 6833 - RNA, 22 nt, synthetic construct
  source 1..22: mol_type = other RNA
aatgatgtgaaaggaccagttt

SEQ ID NO: 6834 - RNA, 22 nt, synthetic construct
  source 1..22: mol_type = other RNA
aatgcagccagcagcccgttcc

SEQ ID NO: 6835 - RNA, 22 nt, synthetic construct
  source 1..22: mol_type = other RNA
aatgcctttaacgtccttggtg

SEQ ID NO: 6836 - RNA, 22 nt, synthetic construct
  source 1..22: mol_type = other RNA
aatgctcaccccagaagagcgt

SEQ ID NO: 6837 - RNA, 22 nt, synthetic construct
  source 1..22: mol_type = other RNA
aatgctttcgaaacgagagccc

SEQ ID NO: 6838 - RNA, 22 nt, synthetic construct
  source 1..22: mol_type = other RNA
aatggaaattgcagttctacag

SEQ ID NO: 6839 - RNA, 22 nt, synthetic construct
  source 1..22: mol_type = other RNA
aatggaagtggggtttctgatt

SEQ ID NO: 6840 - RNA, 22 nt, synthetic construct
  source 1..22: mol_type = other RNA
aatggccactgaagcacgtgag

SEQ ID NO: 6841 - RNA, 22 nt, synthetic construct
  source 1..22: mol_type = other RNA
aatggctcaggtctcccagcac

SEQ ID NO: 6842 - RNA, 22 nt, synthetic construct
  source 1..22: mol_type = other RNA
aatgggaaatgtcgattttcaa

SEQ ID NO: 6843 - RNA, 22 nt, synthetic construct
  source 1..22: mol_type = other RNA
aatgggggaaaggagcaacagg

SEQ ID NO: 6844 - RNA, 22 nt, synthetic construct
  source 1..22: mol_type = other RNA
aatggggtggaatagggaactg

SEQ ID NO: 6845 - RNA, 22 nt, synthetic construct
  source 1..22: mol_type = other RNA
aatgggtgaaaaatggtaatat

SEQ ID NO: 6846 - RNA, 22 nt, synthetic construct
  source 1..22: mol_type = other RNA
aatgtcagaaagtcatgtgaac

SEQ ID NO: 6847 - RNA, 22 nt, synthetic construct
  source 1..22: mol_type = other RNA
aatgtccagagtcccttgatcc

SEQ ID NO: 6848 - RNA, 22 nt, synthetic construct
  source 1..22: mol_type = other RNA
aatgttcacatgactttctgac

SEQ ID NO: 6849 - RNA, 22 nt, synthetic construct
  source 1..22: mol_type = other RNA
aatgttgaaagttggcaacagc

SEQ ID NO: 6850 - RNA, 22 nt, synthetic construct
  source 1..22: mol_type = other RNA
aattaataggcatcttcactcc

SEQ ID NO: 6851 - RNA, 22 nt, synthetic construct
  source 1..22: mol_type = other RNA
aattaatcagaaaccccacttc

SEQ ID NO: 6852 - RNA, 22 nt, synthetic construct
  source 1..22: mol_type = other RNA
aattagtgcagatgctggtctt

SEQ ID NO: 6853 - RNA, 22 nt, synthetic construct
  source 1..22: mol_type = other RNA
aattccacaggttcccaccccc

SEQ ID NO: 6854 - RNA, 22 nt, synthetic construct
  source 1..22: mol_type = other RNA
aattctacagctaggccagtct

SEQ ID NO: 6855 - RNA, 22 nt, synthetic construct
  source 1..22: mol_type = other RNA
aattgcagttctacagtagtac

SEQ ID NO: 6856 - RNA, 22 nt, synthetic construct
  source 1..22: mol_type = other RNA
aatttagaaagtgctgaagcag

SEQ ID NO: 6857 - RNA, 22 nt, synthetic construct
  source 1..22: mol_type = other RNA
aatttcagaactgaaaaagacc

SEQ ID NO: 6858 - RNA, 22 nt, synthetic construct
  source 1..22: mol_type = other RNA
aatttccattcttttaaatggg

SEQ ID NO: 6859 - RNA, 22 nt, synthetic construct
  source 1..22: mol_type = other RNA
aatttcccagggctcattaagg

SEQ ID NO: 6860 - RNA, 22 nt, synthetic construct
  source 1..22: mol_type = other RNA
aatttcctgttgctcctttccc

SEQ ID NO: 6861 - RNA, 22 nt, synthetic construct
  source 1..22: mol_type = other RNA
acaaaacctgagggtcattgtg

SEQ ID NO: 6862 - RNA, 22 nt, synthetic construct
  source 1..22: mol_type = other RNA
acaaagactagctgggcgtggt

SEQ ID NO: 6863 - RNA, 22 nt, synthetic construct
  source 1..22: mol_type = other RNA
acaaataactaagaccagcatc

SEQ ID NO: 6864 - RNA, 22 nt, synthetic construct
  source 1..22: mol_type = other RNA
acaaatacctggagcagatgca

SEQ ID NO: 6865 - RNA, 22 nt, synthetic construct
  source 1..22: mol_type = other RNA
acaacataaccggaacgacagc

SEQ ID NO: 6866 - RNA, 22 nt, synthetic construct
  source 1..22: mol_type = other RNA
acaagaatcacctgaacccggg

SEQ ID NO: 6867 - RNA, 22 nt, synthetic construct
  source 1..22: mol_type = other RNA
acaagatgcagaaccatggcta

SEQ ID NO: 6868 - RNA, 22 nt, synthetic construct
  source 1..22: mol_type = other RNA
acaagcaaggctcggcgccact

SEQ ID NO: 6869 - RNA, 22 nt, synthetic construct
  source 1..22: mol_type = other RNA
acaaggggctgttgccaacttt

SEQ ID NO: 6870 - RNA, 22 nt, synthetic construct
  source 1..22: mol_type = other RNA
acaagttcagtaaccagcagaa

SEQ ID NO: 6871 - RNA, 22 nt, synthetic construct
  source 1..22: mol_type = other RNA
acaatacaatggaagtggggtt

SEQ ID NO: 6872 - RNA, 22 nt, synthetic construct
  source 1..22: mol_type = other RNA
acaatcccctgaggaccaaatg

SEQ ID NO: 6873 - RNA, 22 nt, synthetic construct
  source 1..22: mol_type = other RNA
acaatgaccctcaggttttgtt

SEQ ID NO: 6874 - RNA, 22 nt, synthetic construct
  source 1..22: mol_type = other RNA
acaatggaagtggggtttctga

SEQ ID NO: 6875 - RNA, 22 nt, synthetic construct
  source 1..22: mol_type = other RNA
acacaaataactaagaccagca

SEQ ID NO: 6876 - RNA, 22 nt, synthetic construct
  source 1..22: mol_type = other RNA
acacaacataaccggaacgaca

SEQ ID NO: 6877 - RNA, 22 nt, synthetic construct
  source 1..22: mol_type = other RNA
acacacaggtatccagccgtgg

SEQ ID NO: 6878 - RNA, 22 nt, synthetic construct
  source 1..22: mol_type = other RNA
acacacctgtagtctcagctag

SEQ ID NO: 6879 - RNA, 22 nt, synthetic construct
  source 1..22: mol_type = other RNA
acacagcgagactgtctccaaa

SEQ ID NO: 6880 - RNA, 22 nt, synthetic construct
  source 1..22: mol_type = other RNA
acacaggagaaagaaaataagg

SEQ ID NO: 6881 - RNA, 22 nt, synthetic construct
  source 1..22: mol_type = other RNA
acacaggtatccagccgtggaa

SEQ ID NO: 6882 - RNA, 22 nt, synthetic construct
  source 1..22: mol_type = other RNA
acacatgctctcaatatataat

SEQ ID NO: 6883 - RNA, 22 nt, synthetic construct
  source 1..22: mol_type = other RNA
acaccacaatgaccctcaggtt

SEQ ID NO: 6884 - RNA, 22 nt, synthetic construct
  source 1..22: mol_type = other RNA
acaccctcatctgtatacacta

SEQ ID NO: 6885 - RNA, 22 nt, synthetic construct
  source 1..22: mol_type = other RNA
acacctgtagtctcagctaggt

SEQ ID NO: 6886 - RNA, 22 nt, synthetic construct
  source 1..22: mol_type = other RNA
acacgacctaggaatccagtga

SEQ ID NO: 6887 - RNA, 22 nt, synthetic construct
  source 1..22: mol_type = other RNA
acactaagctctctagaagacg

SEQ ID NO: 6888 - RNA, 22 nt, synthetic construct
  source 1..22: mol_type = other RNA
acactaaggaaataatctgaga

SEQ ID NO: 6889 - RNA, 22 nt, synthetic construct
  source 1..22: mol_type = other RNA
acactggacttcaagaaactgg

SEQ ID NO: 6890 - RNA, 22 nt, synthetic construct
  source 1..22: mol_type = other RNA
acagaaacagtctgcttcagca

SEQ ID NO: 6891 - RNA, 22 nt, synthetic construct
  source 1..22: mol_type = other RNA
acagaacagaaacagtctgctt

SEQ ID NO: 6892 - RNA, 22 nt, synthetic construct
  source 1..22: mol_type = other RNA
acagagggtgaaaactcttttc

SEQ ID NO: 6893 - RNA, 22 nt, synthetic construct
  source 1..22: mol_type = other RNA
acagaggttgcagtgcgctgag

SEQ ID NO: 6894 - RNA, 22 nt, synthetic construct
  source 1..22: mol_type = other RNA
acagcagcatgtccagtactcg

SEQ ID NO: 6895 - RNA, 22 nt, synthetic construct
  source 1..22: mol_type = other RNA
acagccccttgtggcaggggct

SEQ ID NO: 6896 - RNA, 22 nt, synthetic construct
  source 1..22: mol_type = other RNA
acagcctgcatataagtctatt

SEQ ID NO: 6897 - RNA, 22 nt, synthetic construct
  source 1..22: mol_type = other RNA
acagcgagactgtctccaaaaa

SEQ ID NO: 6898 - RNA, 22 nt, synthetic construct
  source 1..22: mol_type = other RNA
acagctaggccagtctccagca

SEQ ID NO: 6899 - RNA, 22 nt, synthetic construct
  source 1..22: mol_type = other RNA
acaggaaatttagaaagtgctg

SEQ ID NO: 6900 - RNA, 22 nt, synthetic construct
  source 1..22: mol_type = other RNA
acaggacttttatggagacaca

SEQ ID NO: 6901 - RNA, 22 nt, synthetic construct
  source 1..22: mol_type = other RNA
acaggagaaagaaaataagggg

SEQ ID NO: 6902 - RNA, 22 nt, synthetic construct
  source 1..22: mol_type = other RNA
acaggccaaatgagaaccggtg

SEQ ID NO: 6903 - RNA, 22 nt, synthetic construct
  source 1..22: mol_type = other RNA
acagggtgctgggagacctgag

SEQ ID NO: 6904 - RNA, 22 nt, synthetic construct
  source 1..22: mol_type = other RNA
acaggtatccagccgtggaaac

SEQ ID NO: 6905 - RNA, 22 nt, synthetic construct
  source 1..22: mol_type = other RNA
acaggttcccacccccaaccca

SEQ ID NO: 6906 - RNA, 22 nt, synthetic construct
  source 1..22: mol_type = other RNA
acagtaaggaccttaatgagcc

SEQ ID NO: 6907 - RNA, 22 nt, synthetic construct
  source 1..22: mol_type = other RNA
acagtagtactttatatagtcc

SEQ ID NO: 6908 - RNA, 22 nt, synthetic construct
  source 1..22: mol_type = other RNA
acagtcaactggatttcctagc

SEQ ID NO: 6909 - RNA, 22 nt, synthetic construct
  source 1..22: mol_type = other RNA
acagtccaggaggtcaggatgt

SEQ ID NO: 6910 - RNA, 22 nt, synthetic construct
  source 1..22: mol_type = other RNA
acagtctgcttcagcactttct

SEQ ID NO: 6911 - RNA, 22 nt, synthetic construct
  source 1..22: mol_type = other RNA
acagtgaatgaggctgaagagt

SEQ ID NO: 6912 - RNA, 22 nt, synthetic construct
  source 1..22: mol_type = other RNA
acagtgggaatgtccagagtcc

SEQ ID NO: 6913 - RNA, 22 nt, synthetic construct
  source 1..22: mol_type = other RNA
acagttccctattccaccccat

SEQ ID NO: 6914 - RNA, 22 nt, synthetic construct
  source 1..22: mol_type = other RNA
acataaccggaacgacagcctg

SEQ ID NO: 6915 - RNA, 22 nt, synthetic construct
  source 1..22: mol_type = other RNA
acatcaaatatctgcaatagat

SEQ ID NO: 6916 - RNA, 22 nt, synthetic construct
  source 1..22: mol_type = other RNA
acatcattttgcgagggtctct

SEQ ID NO: 6917 - RNA, 22 nt, synthetic construct
  source 1..22: mol_type = other RNA
acatcctgacctcctggactgt

SEQ ID NO: 6918 - RNA, 22 nt, synthetic construct
  source 1..22: mol_type = other RNA
acatgactttctgacattcata

SEQ ID NO: 6919 - RNA, 22 nt, synthetic construct
  source 1..22: mol_type = other RNA
acatgctgctgttatcagttca

SEQ ID NO: 6920 - RNA, 22 nt, synthetic construct
  source 1..22: mol_type = other RNA
acattagtttgggccttggcta

SEQ ID NO: 6921 - RNA, 22 nt, synthetic construct
  source 1..22: mol_type = other RNA
acattcatagccaaggcccaaa

SEQ ID NO: 6922 - RNA, 22 nt, synthetic construct
  source 1..22: mol_type = other RNA
acattcccactgttcactaagg

SEQ ID NO: 6923 - RNA, 22 nt, synthetic construct
  source 1..22: mol_type = other RNA
acattttatgctacagagggtg

SEQ ID NO: 6924 - RNA, 22 nt, synthetic construct
  source 1..22: mol_type = other RNA
accaaatgcagccagcagcccg

SEQ ID NO: 6925 - RNA, 22 nt, synthetic construct
  source 1..22: mol_type = other RNA
accaaggacgttaaaggcattt

SEQ ID NO: 6926 - RNA, 22 nt, synthetic construct
  source 1..22: mol_type = other RNA
accaagtaactggccaggtgca

SEQ ID NO: 6927 - RNA, 22 nt, synthetic construct
  source 1..22: mol_type = other RNA
accacaatgaccctcaggtttt

SEQ ID NO: 6928 - RNA, 22 nt, synthetic construct
  source 1..22: mol_type = other RNA
accaccggttctcatttggcct

SEQ ID NO: 6929 - RNA, 22 nt, synthetic construct
  source 1..22: mol_type = other RNA
accacgcccagctagtctttgt

SEQ ID NO: 6930 - RNA, 22 nt, synthetic construct
  source 1..22: mol_type = other RNA
accacggtgctaggaaatccag

SEQ ID NO: 6931 - RNA, 22 nt, synthetic construct
  source 1..22: mol_type = other RNA
accagagatcccctggtcccac

SEQ ID NO: 6932 - RNA, 22 nt, synthetic construct
  source 1..22: mol_type = other RNA
accagcagaagacagaacagaa

SEQ ID NO: 6933 - RNA, 22 nt, synthetic construct
  source 1..22: mol_type = other RNA
accagcatctgcactaatttcc

SEQ ID NO: 6934 - RNA, 22 nt, synthetic construct
  source 1..22: mol_type = other RNA
accaggggatctctggtctttt

SEQ ID NO: 6935 - RNA, 22 nt, synthetic construct
  source 1..22: mol_type = other RNA
accagggtgatctcaaatcctg

SEQ ID NO: 6936 - RNA, 22 nt, synthetic construct
  source 1..22: mol_type = other RNA
accagtttcttgaagtccagtg

SEQ ID NO: 6937 - RNA, 22 nt, synthetic construct
  source 1..22: mol_type = other RNA
accatggctatgagaaccccac

SEQ ID NO: 6938 - RNA, 22 nt, synthetic construct
  source 1..22: mol_type = other RNA
accatttttcacccatttaaaa

SEQ ID NO: 6939 - RNA, 22 nt, synthetic construct
  source 1..22: mol_type = other RNA
acccatttaaaagaatggaaat

SEQ ID NO: 6940 - RNA, 22 nt, synthetic construct
  source 1..22: mol_type = other RNA
accccacctacaaatacctgga

SEQ ID NO: 6941 - RNA, 22 nt, synthetic construct
  source 1..22: mol_type = other RNA
accccacttccattgtattgtc

SEQ ID NO: 6942 - RNA, 22 nt, synthetic construct
  source 1..22: mol_type = other RNA
accccagaagagcgtcacctga

SEQ ID NO: 6943 - RNA, 22 nt, synthetic construct
  source 1..22: mol_type = other RNA
accccatttctcagcaacttcc

SEQ ID NO: 6944 - RNA, 22 nt, synthetic construct
  source 1..22: mol_type = other RNA
acccgggagacagaggttgcag

SEQ ID NO: 6945 - RNA, 22 nt, synthetic construct
  source 1..22: mol_type = other RNA
accctcaggttttgttcttcca

SEQ ID NO: 6946 - RNA, 22 nt, synthetic construct
  source 1..22: mol_type = other RNA
accctcatctgtatacactaag

SEQ ID NO: 6947 - RNA, 22 nt, synthetic construct
  source 1..22: mol_type = other RNA
accctcgcaaaatgatgtgaaa

SEQ ID NO: 6948 - RNA, 22 nt, synthetic construct
  source 1..22: mol_type = other RNA
accctctgtagcataaaatgtt

SEQ ID NO: 6949 - RNA, 22 nt, synthetic construct
  source 1..22: mol_type = other RNA
accctggtcaatatggggaaat

SEQ ID NO: 6950 - RNA, 22 nt, synthetic construct
  source 1..22: mol_type = other RNA
accctgtgcaggtctcttccca

SEQ ID NO: 6951 - RNA, 22 nt, synthetic construct
  source 1..22: mol_type = other RNA
accggaacgacagcctgcatat

SEQ ID NO: 6952 - RNA, 22 nt, synthetic construct
  source 1..22: mol_type = other RNA
accggacaggccaaatgagaac

SEQ ID NO: 6953 - RNA, 22 nt, synthetic construct
  source 1..22: mol_type = other RNA
accggtggtgaaacacaggaga

SEQ ID NO: 6954 - RNA, 22 nt, synthetic construct
  source 1..22: mol_type = other RNA
accggttctcatttggcctgtc

SEQ ID NO: 6955 - RNA, 22 nt, synthetic construct
  source 1..22: mol_type = other RNA
accgtctgcttgctagcctact

SEQ ID NO: 6956 - RNA, 22 nt, synthetic construct
  source 1..22: mol_type = other RNA
accgtggtgacaagcaaggctc

SEQ ID NO: 6957 - RNA, 22 nt, synthetic construct
  source 1..22: mol_type = other RNA
acctaaatctgcatctgctcca

SEQ ID NO: 6958 - RNA, 22 nt, synthetic construct
  source 1..22: mol_type = other RNA
acctacaaatacctggagcaga

SEQ ID NO: 6959 - RNA, 22 nt, synthetic construct
  source 1..22: mol_type = other RNA
acctagctgagactacaggtgt

SEQ ID NO: 6960 - RNA, 22 nt, synthetic construct
  source 1..22: mol_type = other RNA
acctaggaatccagtgagtaac

SEQ ID NO: 6961 - RNA, 22 nt, synthetic construct
  source 1..22: mol_type = other RNA
acctcctggactgtaggactat

SEQ ID NO: 6962 - RNA, 22 nt, synthetic construct
  source 1..22: mol_type = other RNA
acctgaacaagatgcagaacca

SEQ ID NO: 6963 - RNA, 22 nt, synthetic construct
  source 1..22: mol_type = other RNA
acctgagccatttgctgcacaa

SEQ ID NO: 6964 - RNA, 22 nt, synthetic construct
  source 1..22: mol_type = other RNA
acctgagggtcattgtggtgtc

SEQ ID NO: 6965 - RNA, 22 nt, synthetic construct
  source 1..22: mol_type = other RNA
acctgcacagggtgctgggaga

SEQ ID NO: 6966 - RNA, 22 nt, synthetic construct
  source 1..22: mol_type = other RNA
acctgcatccctccgccagggc

SEQ ID NO: 6967 - RNA, 22 nt, synthetic construct
  source 1..22: mol_type = other RNA
acctggaaaaaggaacactaag

SEQ ID NO: 6968 - RNA, 22 nt, synthetic construct
  source 1..22: mol_type = other RNA
acctggaagaacaaaacctgag

SEQ ID NO: 6969 - RNA, 22 nt, synthetic construct
  source 1..22: mol_type = other RNA
acctggagcagatgcagattta

SEQ ID NO: 6970 - RNA, 22 nt, synthetic construct
  source 1..22: mol_type = other RNA
acctggccagttacttggtttt

SEQ ID NO: 6971 - RNA, 22 nt, synthetic construct
  source 1..22: mol_type = other RNA
acctgggccagccaaggcaagc

SEQ ID NO: 6972 - RNA, 22 nt, synthetic construct
  source 1..22: mol_type = other RNA
acctgtagtctcagctaggtgg

SEQ ID NO: 6973 - RNA, 22 nt, synthetic construct
  source 1..22: mol_type = other RNA
acctgtggaattaataggcatc

SEQ ID NO: 6974 - RNA, 22 nt, synthetic construct
  source 1..22: mol_type = other RNA
acctgtgtgtctccataaaagt

SEQ ID NO: 6975 - RNA, 22 nt, synthetic construct
  source 1..22: mol_type = other RNA
accttaatgagccctgggaaat

SEQ ID NO: 6976 - RNA, 22 nt, synthetic construct
  source 1..22: mol_type = other RNA
acgacagcctgcatataagtct

SEQ ID NO: 6977 - RNA, 22 nt, synthetic construct
  source 1..22: mol_type = other RNA
acgacctaggaatccagtgagt

SEQ ID NO: 6978 - RNA, 22 nt, synthetic construct
  source 1..22: mol_type = other RNA
acgagagccctgaaagcttagc

SEQ ID NO: 6979 - RNA, 22 nt, synthetic construct
  source 1..22: mol_type = other RNA
acgattccgatcgactgccaag

SEQ ID NO: 6980 - RNA, 22 nt, synthetic construct
  source 1..22: mol_type = other RNA
acgcagcccctggcagcggctg

SEQ ID NO: 6981 - RNA, 22 nt, synthetic construct
  source 1..22: mol_type = other RNA
acgcccagctagtctttgtatt

SEQ ID NO: 6982 - RNA, 22 nt, synthetic construct
  source 1..22: mol_type = other RNA
acgctcttctggggtgagcatt

SEQ ID NO: 6983 - RNA, 22 nt, synthetic construct
  source 1..22: mol_type = other RNA
acgctggaataaaatgccttta

SEQ ID NO: 6984 - RNA, 22 nt, synthetic construct
  source 1..22: mol_type = other RNA
acggaagatgacagtcaactgg

SEQ ID NO: 6985 - RNA, 22 nt, synthetic construct
  source 1..22: mol_type = other RNA
acggctggatacctgtgtgtct

SEQ ID NO: 6986 - RNA, 22 nt, synthetic construct
  source 1..22: mol_type = other RNA
acgggctgctggctgcatttgg

SEQ ID NO: 6987 - RNA, 22 nt, synthetic construct
  source 1..22: mol_type = other RNA
acggtgctaggaaatccagttg

SEQ ID NO: 6988 - RNA, 22 nt, synthetic construct
  source 1..22: mol_type = other RNA
acggtgggaccaggggatctct

SEQ ID NO: 6989 - RNA, 22 nt, synthetic construct
  source 1..22: mol_type = other RNA
acgtccttggtgacaggacttt

SEQ ID NO: 6990 - RNA, 22 nt, synthetic construct
  source 1..22: mol_type = other RNA
acgtgagagaccctcgcaaaat

SEQ ID NO: 6991 - RNA, 22 nt, synthetic construct
  source 1..22: mol_type = other RNA
acgtgcttcagtggccattaca

SEQ ID NO: 6992 - RNA, 22 nt, synthetic construct
  source 1..22: mol_type = other RNA
acgttaaaggcattttattcca

SEQ ID NO: 6993 - RNA, 22 nt, synthetic construct
  source 1..22: mol_type = other RNA
actaagaccagcatctgcacta

SEQ ID NO: 6994 - RNA, 22 nt, synthetic construct
  source 1..22: mol_type = other RNA
actaagctctctagaagacgct

SEQ ID NO: 6995 - RNA, 22 nt, synthetic construct
  source 1..22: mol_type = other RNA
actaaggaaataatctgagaaa

SEQ ID NO: 6996 - RNA, 22 nt, synthetic construct
  source 1..22: mol_type = other RNA
actaaggagtgagtggcaagac

SEQ ID NO: 6997 - RNA, 22 nt, synthetic construct
  source 1..22: mol_type = other RNA
actaatgttgaaagttggcaac

SEQ ID NO: 6998 - RNA, 22 nt, synthetic construct
  source 1..22: mol_type = other RNA
actaatttcccagggctcatta

SEQ ID NO: 6999 - RNA, 22 nt, synthetic construct
  source 1..22: mol_type = other RNA
actacatcaaatatctgcaata

SEQ ID NO: 7000 - RNA, 22 nt, synthetic construct
  source 1..22: mol_type = other RNA
actacctgggccagccaaggca

SEQ ID NO: 7001 - RNA, 22 nt, synthetic construct
  source 1..22: mol_type = other RNA
actactgtagaactgcaatttc

SEQ ID NO: 7002 - RNA, 22 nt, synthetic construct
  source 1..22: mol_type = other RNA
actatataaagtactactgtag

SEQ ID NO: 7003 - RNA, 22 nt, synthetic construct
  source 1..22: mol_type = other RNA
actcactccttagtgaacagtg

SEQ ID NO: 7004 - RNA, 22 nt, synthetic construct
  source 1..22: mol_type = other RNA
actcactggattcctaggtcgt

SEQ ID NO: 7005 - RNA, 22 nt, synthetic construct
  source 1..22: mol_type = other RNA
actcctcgagtactggacatgc

SEQ ID NO: 7006 - RNA, 22 nt, synthetic construct
  source 1..22: mol_type = other RNA
actccttagtgaacagtgggaa

SEQ ID NO: 7007 - RNA, 22 nt, synthetic construct
  source 1..22: mol_type = other RNA
actcgaggagtgaagatgccta

SEQ ID NO: 7008 - RNA, 22 nt, synthetic construct
  source 1..22: mol_type = other RNA
actctggacattcccactgttc

SEQ ID NO: 7009 - RNA, 22 nt, synthetic construct
  source 1..22: mol_type = other RNA
actcttcagcctcattcactgt

SEQ ID NO: 7010 - RNA, 22 nt, synthetic construct
  source 1..22: mol_type = other RNA
actcttttctcagattatttcc

SEQ ID NO: 7011 - RNA, 22 nt, synthetic construct
  source 1..22: mol_type = other RNA
actgaaaaagaccagagatccc

SEQ ID NO: 7012 - RNA, 22 nt, synthetic construct
  source 1..22: mol_type = other RNA
actgaactgataacagcagcat

SEQ ID NO: 7013 - RNA, 22 nt, synthetic construct
  source 1..22: mol_type = other RNA
actgaacttgtcttgccactca

SEQ ID NO: 7014 - RNA, 22 nt, synthetic construct
  source 1..22: mol_type = other RNA
actgaagcacgtgagagaccct

SEQ ID NO: 7015 - RNA, 22 nt, synthetic construct
  source 1..22: mol_type = other RNA
actgataacagcagcatgtcca

SEQ ID NO: 7016 - RNA, 22 nt, synthetic construct
  source 1..22: mol_type = other RNA
actgcaatttccattcttttaa

SEQ ID NO: 7017 - RNA, 22 nt, synthetic construct
  source 1..22: mol_type = other RNA
actgcacctggccagttacttg

SEQ ID NO: 7018 - RNA, 22 nt, synthetic construct
  source 1..22: mol_type = other RNA
actgccaagcagcagccgctgc

SEQ ID NO: 7019 - RNA, 22 nt, synthetic construct
  source 1..22: mol_type = other RNA
actgctgactggcttgccttgg

SEQ ID NO: 7020 - RNA, 22 nt, synthetic construct
  source 1..22: mol_type = other RNA
actgcttactacctgggccagc

SEQ ID NO: 7021 - RNA, 22 nt, synthetic construct
  source 1..22: mol_type = other RNA
actggacatgctgctgttatca

SEQ ID NO: 7022 - RNA, 22 nt, synthetic construct
  source 1..22: mol_type = other RNA
actggacttcaagaaactggtc

SEQ ID NO: 7023 - RNA, 22 nt, synthetic construct
  source 1..22: mol_type = other RNA
actggattcctaggtcgtgttt

SEQ ID NO: 7024 - RNA, 22 nt, synthetic construct
  source 1..22: mol_type = other RNA
actggatttcctagcaccgtgg

SEQ ID NO: 7025 - RNA, 22 nt, synthetic construct
  source 1..22: mol_type = other RNA
actggccaggtgcagtagctca

SEQ ID NO: 7026 - RNA, 22 nt, synthetic construct
  source 1..22: mol_type = other RNA
actggcctagctgtagaatttc

SEQ ID NO: 7027 - RNA, 22 nt, synthetic construct
  source 1..22: mol_type = other RNA
actggcttgccttggctggccc

SEQ ID NO: 7028 - RNA, 22 nt, synthetic construct
  source 1..22: mol_type = other RNA
actggtcctttcacatcatttt

SEQ ID NO: 7029 - RNA, 22 nt, synthetic construct
  source 1..22: mol_type = other RNA
actgtaatggccactgaagcac

SEQ ID NO: 7030 - RNA, 22 nt, synthetic construct
  source 1..22: mol_type = other RNA
actgtagaactgcaatttccat

SEQ ID NO: 7031 - RNA, 22 nt, synthetic construct
  source 1..22: mol_type = other RNA
actgtaggactatataaagtac

SEQ ID NO: 7032 - RNA, 22 nt, synthetic construct
  source 1..22: mol_type = other RNA
actgtatttatatttggggatc

SEQ ID NO: 7033 - RNA, 22 nt, synthetic construct
  source 1..22: mol_type = other RNA
actgtcatcttccgtgagggct

SEQ ID NO: 7034 - RNA, 22 nt, synthetic construct
  source 1..22: mol_type = other RNA
actgtcctggcttttatttaaa

SEQ ID NO: 7035 - RNA, 22 nt, synthetic construct
  source 1..22: mol_type = other RNA
actgtctccaaaaaaccaaaaa

SEQ ID NO: 7036 - RNA, 22 nt, synthetic construct
  source 1..22: mol_type = other RNA
actgttcactaaggagtgagtg

SEQ ID NO: 7037 - RNA, 22 nt, synthetic construct
  source 1..22: mol_type = other RNA
actgtttctgttctgtcttctg

SEQ ID NO: 7038 - RNA, 22 nt, synthetic construct
  source 1..22: mol_type = other RNA
acttacacaacataaccggaac

SEQ ID NO: 7039 - RNA, 22 nt, synthetic construct
  source 1..22: mol_type = other RNA
acttatatgcaggctgtcgttc

SEQ ID NO: 7040 - RNA, 22 nt, synthetic construct
  source 1..22: mol_type = other RNA
acttcaagaaactggtcctttc

SEQ ID NO: 7041 - RNA, 22 nt, synthetic construct
  source 1..22: mol_type = other RNA
acttccattgtattgtctgaca

SEQ ID NO: 7042 - RNA, 22 nt, synthetic construct
  source 1..22: mol_type = other RNA
acttcctgaaagctcatttaaa

SEQ ID NO: 7043 - RNA, 22 nt, synthetic construct
  source 1..22: mol_type = other RNA
acttggttttatctcctgctgg

SEQ ID NO: 7044 - RNA, 22 nt, synthetic construct
  source 1..22: mol_type = other RNA
acttgtcttgccactcactcct

SEQ ID NO: 7045 - RNA, 22 nt, synthetic construct
  source 1..22: mol_type = other RNA
actttatatagtcctacagtcc

SEQ ID NO: 7046 - RNA, 22 nt, synthetic construct
  source 1..22: mol_type = other RNA
actttcaacattagtttgggcc

SEQ ID NO: 7047 - RNA, 22 nt, synthetic construct
  source 1..22: mol_type = other RNA
actttctaaatttcctgttgct

SEQ ID NO: 7048 - RNA, 22 nt, synthetic construct
  source 1..22: mol_type = other RNA
actttctgacattcatagccaa

SEQ ID NO: 7049 - RNA, 22 nt, synthetic construct
  source 1..22: mol_type = other RNA
acttttatggagacacacaggt

SEQ ID NO: 7050 - RNA, 22 nt, synthetic construct
  source 1..22: mol_type = other RNA
agaaaactacatcaaatatctg

SEQ ID NO: 7051 - RNA, 22 nt, synthetic construct
  source 1..22: mol_type = other RNA
agaaaagagttttcaccctctg

SEQ ID NO: 7052 - RNA, 22 nt, synthetic construct
  source 1..22: mol_type = other RNA
agaaaataaggggatcaaagag

SEQ ID NO: 7053 - RNA, 22 nt, synthetic construct
  source 1..22: mol_type = other RNA
agaaacagtctgcttcagcact

SEQ ID NO: 7054 - RNA, 22 nt, synthetic construct
  source 1..22: mol_type = other RNA
agaaaccccacttccattgtat

SEQ ID NO: 7055 - RNA, 22 nt, synthetic construct
  source 1..22: mol_type = other RNA
agaaactggtcctttcacatca

SEQ ID NO: 7056 - RNA, 22 nt, synthetic construct
  source 1..22: mol_type = other RNA
agaaagaaaataaggggatcaa

SEQ ID NO: 7057 - RNA, 22 nt, synthetic construct
  source 1..22: mol_type = other RNA
agaaagtcatgtgaacatttta

SEQ ID NO: 7058 - RNA, 22 nt, synthetic construct
  source 1..22: mol_type = other RNA
agaaagtgctgaagcagactgt

SEQ ID NO: 7059 - RNA, 22 nt, synthetic construct
  source 1..22: mol_type = other RNA
agaaatggggtggaatagggaa

SEQ ID NO: 7060 - RNA, 22 nt, synthetic construct
  source 1..22: mol_type = other RNA
agaacaaaacctgagggtcatt

SEQ ID NO: 7061 - RNA, 22 nt, synthetic construct
  source 1..22: mol_type = other RNA
agaacagaaacagtctgcttca

SEQ ID NO: 7062 - RNA, 22 nt, synthetic construct
  source 1..22: mol_type = other RNA
agaaccatggctatgagaaccc

SEQ ID NO: 7063 - RNA, 22 nt, synthetic construct
  source 1..22: mol_type = other RNA
agaaccccacctacaaatacct

SEQ ID NO: 7064 - RNA, 22 nt, synthetic construct
  source 1..22: mol_type = other RNA
agaaccggtggtgaaacacagg

SEQ ID NO: 7065 - RNA, 22 nt, synthetic construct
  source 1..22: mol_type = other RNA
agaactgaaaaagaccagagat

SEQ ID NO: 7066 - RNA, 22 nt, synthetic construct
  source 1..22: mol_type = other RNA
agaactgcaatttccattcttt

SEQ ID NO: 7067 - RNA, 22 nt, synthetic construct
  source 1..22: mol_type = other RNA
agaagacagaacagaaacagtc

SEQ ID NO: 7068 - RNA, 22 nt, synthetic construct
  source 1..22: mol_type = other RNA
agaagacgctggaataaaatgc

SEQ ID NO: 7069 - RNA, 22 nt, synthetic construct
  source 1..22: mol_type = other RNA
agaagagcgtcacctgaacaag

SEQ ID NO: 7070 - RNA, 22 nt, synthetic construct
  source 1..22: mol_type = other RNA
agaatggaaattgcagttctac

SEQ ID NO: 7071 - RNA, 22 nt, synthetic construct
  source 1..22: mol_type = other RNA
agaatttcagaactgaaaaaga

SEQ ID NO: 7072 - RNA, 22 nt, synthetic construct
  source 1..22: mol_type = other RNA
agacaagttcagtaaccagcag

SEQ ID NO: 7073 - RNA, 22 nt, synthetic construct
  source 1..22: mol_type = other RNA
agacaatacaatggaagtgggg

SEQ ID NO: 7074 - RNA, 22 nt, synthetic construct
  source 1..22: mol_type = other RNA
agacacacaggtatccagccgt

SEQ ID NO: 7075 - RNA, 22 nt, synthetic construct
  source 1..22: mol_type = other RNA
agacaccacaatgaccctcagg

SEQ ID NO: 7076 - RNA, 22 nt, synthetic construct
  source 1..22: mol_type = other RNA
agacagaacagaaacagtctgc

SEQ ID NO: 7077 - RNA, 22 nt, synthetic construct
  source 1..22: mol_type = other RNA
agacagaggttgcagtgcgctg

SEQ ID NO: 7078 - RNA, 22 nt, synthetic construct
  source 1..22: mol_type = other RNA
agaccagagatcccctggtccc

SEQ ID NO: 7079 - RNA, 22 nt, synthetic construct
  source 1..22: mol_type = other RNA
agaccagcatctgcactaattt

SEQ ID NO: 7080 - RNA, 22 nt, synthetic construct
  source 1..22: mol_type = other RNA
agaccctcgcaaaatgatgtga

SEQ ID NO: 7081 - RNA, 22 nt, synthetic construct
  source 1..22: mol_type = other RNA
agacctgagccatttgctgcac

SEQ ID NO: 7082 - RNA, 22 nt, synthetic construct
  source 1..22: mol_type = other RNA
agacctgcacagggtgctggga

SEQ ID NO: 7083 - RNA, 22 nt, synthetic construct
  source 1..22: mol_type = other RNA
agacgcagcccctggcagcggc

SEQ ID NO: 7084 - RNA, 22 nt, synthetic construct
  source 1..22: mol_type = other RNA
agacgctggaataaaatgcctt

SEQ ID NO: 7085 - RNA, 22 nt, synthetic construct
  source 1..22: mol_type = other RNA
agacggtgggaccaggggatct

SEQ ID NO: 7086 - RNA, 22 nt, synthetic construct
  source 1..22: mol_type = other RNA
agactagctgggcgtggtggca

SEQ ID NO: 7087 - RNA, 22 nt, synthetic construct
  source 1..22: mol_type = other RNA
agactggcctagctgtagaatt

SEQ ID NO: 7088 - RNA, 22 nt, synthetic construct
  source 1..22: mol_type = other RNA
agactgtctccaaaaaaccaaa

SEQ ID NO: 7089 - RNA, 22 nt, synthetic construct
  source 1..22: mol_type = other RNA
agactgtttctgttctgtcttc

SEQ ID NO: 7090 - RNA, 22 nt, synthetic construct
  source 1..22: mol_type = other RNA
agacttatatgcaggctgtcgt

SEQ ID NO: 7091 - RNA, 22 nt, synthetic construct
  source 1..22: mol_type = other RNA
agagaccctcgcaaaatgatgt

SEQ ID NO: 7092 - RNA, 22 nt, synthetic construct
  source 1..22: mol_type = other RNA
agagacctgcacagggtgctgg

SEQ ID NO: 7093 - RNA, 22 nt, synthetic construct
  source 1..22: mol_type = other RNA
agagagcttagtgtatacagat

SEQ ID NO: 7094 - RNA, 22 nt, synthetic construct
  source 1..22: mol_type = other RNA
agagataggatttccccatatt

SEQ ID NO: 7095 - RNA, 22 nt, synthetic construct
  source 1..22: mol_type = other RNA
agagatcccctggtcccaccgt

SEQ ID NO: 7096 - RNA, 22 nt, synthetic construct
  source 1..22: mol_type = other RNA
agagcatgtgtcagacaataca

SEQ ID NO: 7097 - RNA, 22 nt, synthetic construct
  source 1..22: mol_type = other RNA
agagccctgaaagcttagccct

SEQ ID NO: 7098 - RNA, 22 nt, synthetic construct
  source 1..22: mol_type = other RNA
agagcgtcacctgaacaagatg

SEQ ID NO: 7099 - RNA, 22 nt, synthetic construct
  source 1..22: mol_type = other RNA
agagcttagtgtatacagatga

SEQ ID NO: 7100 - RNA, 22 nt, synthetic construct
  source 1..22: mol_type = other RNA
agaggcaatgctttcgaaacga

SEQ ID NO: 7101 - RNA, 22 nt, synthetic construct
  source 1..22: mol_type = other RNA
agagggtgaaaactcttttctc

SEQ ID NO: 7102 - RNA, 22 nt, synthetic construct
  source 1..22: mol_type = other RNA
agagtcccttgatccccaaata

SEQ ID NO: 7103 - RNA, 22 nt, synthetic construct
  source 1..22: mol_type = other RNA
agagttgacttacacaacataa

SEQ ID NO: 7104 - RNA, 22 nt, synthetic construct
  source 1..22: mol_type = other RNA
agagttttcaccctctgtagca

SEQ ID NO: 7105 - RNA, 22 nt, synthetic construct
  source 1..22: mol_type = other RNA
agataaaaccaagtaactggcc

SEQ ID NO: 7106 - RNA, 22 nt, synthetic construct
  source 1..22: mol_type = other RNA
agataggatttccccatattga

SEQ ID NO: 7107 - RNA, 22 nt, synthetic construct
  source 1..22: mol_type = other RNA
agatcaccctggtcaatatggg

SEQ ID NO: 7108 - RNA, 22 nt, synthetic construct
  source 1..22: mol_type = other RNA
agatcccacgattccgatcgac

SEQ ID NO: 7109 - RNA, 22 nt, synthetic construct
  source 1..22: mol_type = other RNA
agatcccctggtcccaccgtct

SEQ ID NO: 7110 - RNA, 22 nt, synthetic construct
  source 1..22: mol_type = other RNA
agatgacagtcaactggatttc

SEQ ID NO: 7111 - RNA, 22 nt, synthetic construct
  source 1..22: mol_type = other RNA
agatgcagaaccatggctatga

SEQ ID NO: 7112 - RNA, 22 nt, synthetic construct
  source 1..22: mol_type = other RNA
agatgcagatttaggtggcagg

SEQ ID NO: 7113 - RNA, 22 nt, synthetic construct
  source 1..22: mol_type = other RNA
agatgcctattaattccacagg

SEQ ID NO: 7114 - RNA, 22 nt, synthetic construct
  source 1..22: mol_type = other RNA
agatgctggtcttagttatttg

SEQ ID NO: 7115 - RNA, 22 nt, synthetic construct
  source 1..22: mol_type = other RNA
agattatttccttagtgttcct

SEQ ID NO: 7116 - RNA, 22 nt, synthetic construct
  source 1..22: mol_type = other RNA
agatttaggtggcagggagcgc

SEQ ID NO: 7117 - RNA, 22 nt, synthetic construct
  source 1..22: mol_type = other RNA
agcaaatggctcaggtctccca

SEQ ID NO: 7118 - RNA, 22 nt, synthetic construct
  source 1..22: mol_type = other RNA
agcaacaggaaatttagaaagt

SEQ ID NO: 7119 - RNA, 22 nt, synthetic construct
  source 1..22: mol_type = other RNA
agcaacttcctgaaagctcatt

SEQ ID NO: 7120 - RNA, 22 nt, synthetic construct
  source 1..22: mol_type = other RNA
agcaagcagacggtgggaccag

SEQ ID NO: 7121 - RNA, 22 nt, synthetic construct
  source 1..22: mol_type = other RNA
agcaaggctcggcgccactgct

SEQ ID NO: 7122 - RNA, 22 nt, synthetic construct
  source 1..22: mol_type = other RNA
agcaccctgtgcaggtctcttc

SEQ ID NO: 7123 - RNA, 22 nt, synthetic construct
  source 1..22: mol_type = other RNA
agcaccgtggtgacaagcaagg

SEQ ID NO: 7124 - RNA, 22 nt, synthetic construct
  source 1..22: mol_type = other RNA
agcacgtgagagaccctcgcaa

SEQ ID NO: 7125 - RNA, 22 nt, synthetic construct
  source 1..22: mol_type = other RNA
agcactttctaaatttcctgtt

SEQ ID NO: 7126 - RNA, 22 nt, synthetic construct
  source 1..22: mol_type = other RNA
agcagaagacagaacagaaaca

SEQ ID NO: 7127 - RNA, 22 nt, synthetic construct
  source 1..22: mol_type = other RNA
agcagacggtgggaccagggga

SEQ ID NO: 7128 - RNA, 22 nt, synthetic construct
  source 1..22: mol_type = other RNA
agcagactgtttctgttctgtc

SEQ ID NO: 7129 - RNA, 22 nt, synthetic construct
  source 1..22: mol_type = other RNA
agcagatgcagatttaggtggc

SEQ ID NO: 7130 - RNA, 22 nt, synthetic construct
  source 1..22: mol_type = other RNA
agcagcagccgctgccaggggc

SEQ ID NO: 7131 - RNA, 22 nt, synthetic construct
  source 1..22: mol_type = other RNA
agcagcatgtccagtactcgag

SEQ ID NO: 7132 - RNA, 22 nt, synthetic construct
  source 1..22: mol_type = other RNA
agcagcccgttcccaccggaca

SEQ ID NO: 7133 - RNA, 22 nt, synthetic construct
  source 1..22: mol_type = other RNA
agcagccgctgccaggggctgc

SEQ ID NO: 7134 - RNA, 22 nt, synthetic construct
  source 1..22: mol_type = other RNA
agcaggagataaaaccaagtaa

SEQ ID NO: 7135 - RNA, 22 nt, synthetic construct
  source 1..22: mol_type = other RNA
agcagtaggctagcaagcagac

SEQ ID NO: 7136 - RNA, 22 nt, synthetic construct
  source 1..22: mol_type = other RNA
agcagtggcgccgagccttgct

SEQ ID NO: 7137 - RNA, 22 nt, synthetic construct
  source 1..22: mol_type = other RNA
agcataaaatgttcacatgact

SEQ ID NO: 7138 - RNA, 22 nt, synthetic construct
  source 1..22: mol_type = other RNA
agcatctgcactaatttcccag

SEQ ID NO: 7139 - RNA, 22 nt, synthetic construct
  source 1..22: mol_type = other RNA
agcatgagctactgcacctggc

SEQ ID NO: 7140 - RNA, 22 nt, synthetic construct
  source 1..22: mol_type = other RNA
agcatgtccagtactcgaggag

SEQ ID NO: 7141 - RNA, 22 nt, synthetic construct
  source 1..22: mol_type = other RNA
agcatgtgtcagacaatacaat

SEQ ID NO: 7142 - RNA, 22 nt, synthetic construct
  source 1..22: mol_type = other RNA
agcattgcctctttgatcccct

SEQ ID NO: 7143 - RNA, 22 nt, synthetic construct
  source 1..22: mol_type = other RNA
agcattggatcaacctggaaga

SEQ ID NO: 7144 - RNA, 22 nt, synthetic construct
  source 1..22: mol_type = other RNA
agccaaggcaagccagtcagca

SEQ ID NO: 7145 - RNA, 22 nt, synthetic construct
  source 1..22: mol_type = other RNA
agccaaggcccaaactaatgtt

SEQ ID NO: 7146 - RNA, 22 nt, synthetic construct
  source 1..22: mol_type = other RNA
agccagcagcccgttcccaccg

SEQ ID NO: 7147 - RNA, 22 nt, synthetic construct
  source 1..22: mol_type = other RNA
agccaggacagtgaatgaggct

SEQ ID NO: 7148 - RNA, 22 nt, synthetic construct
  source 1..22: mol_type = other RNA
agccagtcagcagtaggctagc

SEQ ID NO: 7149 - RNA, 22 nt, synthetic construct
  source 1..22: mol_type = other RNA
agccatggttctgcatcttgtt

SEQ ID NO: 7150 - RNA, 22 nt, synthetic construct
  source 1..22: mol_type = other RNA
agccatttgctgcacaatcccc

SEQ ID NO: 7151 - RNA, 22 nt, synthetic construct
  source 1..22: mol_type = other RNA
agcccctgccacaaggggctgt

SEQ ID NO: 7152 - RNA, 22 nt, synthetic construct
  source 1..22: mol_type = other RNA
agcccctggcagcggctgctgc

SEQ ID NO: 7153 - RNA, 22 nt, synthetic construct
  source 1..22: mol_type = other RNA
agccccttgtggcaggggctga

SEQ ID NO: 7154 - RNA, 22 nt, synthetic construct
  source 1..22: mol_type = other RNA
agcccgttcccaccggacaggc

SEQ ID NO: 7155 - RNA, 22 nt, synthetic construct
  source 1..22: mol_type = other RNA
agccctcacggaagatgacagt

SEQ ID NO: 7156 - RNA, 22 nt, synthetic construct
  source 1..22: mol_type = other RNA
agccctgaaagcttagccctca

SEQ ID NO: 7157 - RNA, 22 nt, synthetic construct
  source 1..22: mol_type = other RNA
agccctggcggagggatgcagg

SEQ ID NO: 7158 - RNA, 22 nt, synthetic construct
  source 1..22: mol_type = other RNA
agccctgggaaattagtgcaga

SEQ ID NO: 7159 - RNA, 22 nt, synthetic construct
  source 1..22: mol_type = other RNA
agccgctgccaggggctgcgtc

SEQ ID NO: 7160 - RNA, 22 nt, synthetic construct
  source 1..22: mol_type = other RNA
agccgtggaaacactggacttc

SEQ ID NO: 7161 - RNA, 22 nt, synthetic construct
  source 1..22: mol_type = other RNA
agcctactgctgactggcttgc

SEQ ID NO: 7162 - RNA, 22 nt, synthetic construct
  source 1..22: mol_type = other RNA
agcctcattcactgtcctggct

SEQ ID NO: 7163 - RNA, 22 nt, synthetic construct
  source 1..22: mol_type = other RNA
agcctcccacctagctgagact

SEQ ID NO: 7164 - RNA, 22 nt, synthetic construct
  source 1..22: mol_type = other RNA
agcctgcatataagtctattat

SEQ ID NO: 7165 - RNA, 22 nt, synthetic construct
  source 1..22: mol_type = other RNA
agccttgcttgtcaccacggtg

SEQ ID NO: 7166 - RNA, 22 nt, synthetic construct
  source 1..22: mol_type = other RNA
agcgagactgtctccaaaaaac

SEQ ID NO: 7167 - RNA, 22 nt, synthetic construct
  source 1..22: mol_type = other RNA
agcgcactgcaacctctgtctc

SEQ ID NO: 7168 - RNA, 22 nt, synthetic construct
  source 1..22: mol_type = other RNA
agcggctgctgcttggcagtcg

SEQ ID NO: 7169 - RNA, 22 nt, synthetic construct
  source 1..22: mol_type = other RNA
agcgtcacctgaacaagatgca

SEQ ID NO: 7170 - RNA, 22 nt, synthetic construct
  source 1..22: mol_type = other RNA
agcgtcttctagagagcttagt

SEQ ID NO: 7171 - RNA, 22 nt, synthetic construct
  source 1..22: mol_type = other RNA
agctactgcacctggccagtta

SEQ ID NO: 7172 - RNA, 22 nt, synthetic construct
  source 1..22: mol_type = other RNA
agctaggccagtctccagcagg

SEQ ID NO: 7173 - RNA, 22 nt, synthetic construct
  source 1..22: mol_type = other RNA
agctcatttaaaaagggaatac

SEQ ID NO: 7174 - RNA, 22 nt, synthetic construct
  source 1..22: mol_type = other RNA
agctctctagaagacgctggaa

SEQ ID NO: 7175 - RNA, 22 nt, synthetic construct
  source 1..22: mol_type = other RNA
agctgtagaatttcagaactga

SEQ ID NO: 7176 - RNA, 22 nt, synthetic construct
  source 1..22: mol_type = other RNA
agcttagccctcacggaagatg

SEQ ID NO: 7177 - RNA, 22 nt, synthetic construct
  source 1..22: mol_type = other RNA
agcttagtgtatacagatgagg

SEQ ID NO: 7178 - RNA, 22 nt, synthetic construct
  source 1..22: mol_type = other RNA
agctttcaggaagttgctgaga

SEQ ID NO: 7179 - RNA, 22 nt, synthetic construct
  source 1..22: mol_type = other RNA
agctttcagggctctcgtttcg

SEQ ID NO: 7180 - RNA, 22 nt, synthetic construct
  source 1..22: mol_type = other RNA
aggaaataatctgagaaaagag

SEQ ID NO: 7181 - RNA, 22 nt, synthetic construct
  source 1..22: mol_type = other RNA
aggaaatccagttgactgtcat

SEQ ID NO: 7182 - RNA, 22 nt, synthetic construct
  source 1..22: mol_type = other RNA
aggaaatttagaaagtgctgaa

SEQ ID NO: 7183 - RNA, 22 nt, synthetic construct
  source 1..22: mol_type = other RNA
aggaacactaaggaaataatct

SEQ ID NO: 7184 - RNA, 22 nt, synthetic construct
  source 1..22: mol_type = other RNA
aggaagttgctgagaaatgggg

SEQ ID NO: 7185 - RNA, 22 nt, synthetic construct
  source 1..22: mol_type = other RNA
aggaatccagtgagtaactgaa

SEQ ID NO: 7186 - RNA, 22 nt, synthetic construct
  source 1..22: mol_type = other RNA
aggacagtgaatgaggctgaag

SEQ ID NO: 7187 - RNA, 22 nt, synthetic construct
  source 1..22: mol_type = other RNA
aggaccaaatgcagccagcagc

SEQ ID NO: 7188 - RNA, 22 nt, synthetic construct
  source 1..22: mol_type = other RNA
aggaccagtttcttgaagtcca

SEQ ID NO: 7189 - RNA, 22 nt, synthetic construct
  source 1..22: mol_type = other RNA
aggaccttaatgagccctggga

SEQ ID NO: 7190 - RNA, 22 nt, synthetic construct
  source 1..22: mol_type = other RNA
aggacgttaaaggcattttatt

SEQ ID NO: 7191 - RNA, 22 nt, synthetic construct
  source 1..22: mol_type = other RNA
aggactatataaagtactactg

SEQ ID NO: 7192 - RNA, 22 nt, synthetic construct
  source 1..22: mol_type = other RNA
aggacttttatggagacacaca

SEQ ID NO: 7193 - RNA, 22 nt, synthetic construct
  source 1..22: mol_type = other RNA
aggagaaagaaaataaggggat

SEQ ID NO: 7194 - RNA, 22 nt, synthetic construct
  source 1..22: mol_type = other RNA
aggagataaaaccaagtaactg

SEQ ID NO: 7195 - RNA, 22 nt, synthetic construct
  source 1..22: mol_type = other RNA
aggagcaacaggaaatttagaa

SEQ ID NO: 7196 - RNA, 22 nt, synthetic construct
  source 1..22: mol_type = other RNA
aggaggtcaggatgtcagacgc

SEQ ID NO: 7197 - RNA, 22 nt, synthetic construct
  source 1..22: mol_type = other RNA
aggagtgaagatgcctattaat

SEQ ID NO: 7198 - RNA, 22 nt, synthetic construct
  source 1..22: mol_type = other RNA
aggagtgagtggcaagacaagt

SEQ ID NO: 7199 - RNA, 22 nt, synthetic construct
  source 1..22: mol_type = other RNA
aggatgtcagacgcagcccctg

SEQ ID NO: 7200 - RNA, 22 nt, synthetic construct
  source 1..22: mol_type = other RNA
aggatttccccatattgaccag

SEQ ID NO: 7201 - RNA, 22 nt, synthetic construct
  source 1..22: mol_type = other RNA
aggatttgagatcaccctggtc

SEQ ID NO: 7202 - RNA, 22 nt, synthetic construct
  source 1..22: mol_type = other RNA
aggcaagccagtcagcagtagg

SEQ ID NO: 7203 - RNA, 22 nt, synthetic construct
  source 1..22: mol_type = other RNA
aggcaatgctttcgaaacgaga

SEQ ID NO: 7204 - RNA, 22 nt, synthetic construct
  source 1..22: mol_type = other RNA
aggcagtattccctttttaaat

SEQ ID NO: 7205 - RNA, 22 nt, synthetic construct
  source 1..22: mol_type = other RNA
aggcatcttcactcctcgagta

SEQ ID NO: 7206 - RNA, 22 nt, synthetic construct
  source 1..22: mol_type = other RNA
aggcattttattccagcgtctt

SEQ ID NO: 7207 - RNA, 22 nt, synthetic construct
  source 1..22: mol_type = other RNA
aggccaaatgagaaccggtggt

SEQ ID NO: 7208 - RNA, 22 nt, synthetic construct
  source 1..22: mol_type = other RNA
aggccagtctccagcaggagat

SEQ ID NO: 7209 - RNA, 22 nt, synthetic construct
  source 1..22: mol_type = other RNA
aggcccaaactaatgttgaaag

SEQ ID NO: 7210 - RNA, 22 nt, synthetic construct
  source 1..22: mol_type = other RNA
aggctagcaagcagacggtggg

SEQ ID NO: 7211 - RNA, 22 nt, synthetic construct
  source 1..22: mol_type = other RNA
aggctcggcgccactgcttact

SEQ ID NO: 7212 - RNA, 22 nt, synthetic construct
  source 1..22: mol_type = other RNA
aggctgaagagttgacttacac

SEQ ID NO: 7213 - RNA, 22 nt, synthetic construct
  source 1..22: mol_type = other RNA
aggctgtcgttccggttatgtt

SEQ ID NO: 7214 - RNA, 22 nt, synthetic construct
  source 1..22: mol_type = other RNA
agggaactgtaatggccactga

SEQ ID NO: 7215 - RNA, 22 nt, synthetic construct
  source 1..22: mol_type = other RNA
agggactctggacattcccact

SEQ ID NO: 7216 - RNA, 22 nt, synthetic construct
  source 1..22: mol_type = other RNA
agggatgcaggtgggccggaag

SEQ ID NO: 7217 - RNA, 22 nt, synthetic construct
  source 1..22: mol_type = other RNA
agggctaagctttcagggctct

SEQ ID NO: 7218 - RNA, 22 nt, synthetic construct
  source 1..22: mol_type = other RNA
agggctcattaaggtccttact

SEQ ID NO: 7219 - RNA, 22 nt, synthetic construct
  source 1..22: mol_type = other RNA
agggctctcgtttcgaaagcat

SEQ ID NO: 7220 - RNA, 22 nt, synthetic construct
  source 1..22: mol_type = other RNA
agggctgccgcgctccctgcca

SEQ ID NO: 7221 - RNA, 22 nt, synthetic construct
  source 1..22: mol_type = other RNA
aggggatcaaagaggcaatgct

SEQ ID NO: 7222 - RNA, 22 nt, synthetic construct
  source 1..22: mol_type = other RNA
aggggatctctggtctttttca

SEQ ID NO: 7223 - RNA, 22 nt, synthetic construct
  source 1..22: mol_type = other RNA
aggggattgtgcagcaaatggc

SEQ ID NO: 7224 - RNA, 22 nt, synthetic construct
  source 1..22: mol_type = other RNA
aggggctgatttccaaaaacac

SEQ ID NO: 7225 - RNA, 22 nt, synthetic construct
  source 1..22: mol_type = other RNA
aggggctgcgtctgacatcctg

SEQ ID NO: 7226 - RNA, 22 nt, synthetic construct
  source 1..22: mol_type = other RNA
aggggctgttgccaactttcaa

SEQ ID NO: 7227 - RNA, 22 nt, synthetic construct
  source 1..22: mol_type = other RNA
agggtcattgtggtgtctggga

SEQ ID NO: 7228 - RNA, 22 nt, synthetic construct
  source 1..22: mol_type = other RNA
agggtctctcacgtgcttcagt

SEQ ID NO: 7229 - RNA, 22 nt, synthetic construct
  source 1..22: mol_type = other RNA
agggtgaaaactcttttctcag

SEQ ID NO: 7230 - RNA, 22 nt, synthetic construct
  source 1..22: mol_type = other RNA
agggtgctgggagacctgagcc

SEQ ID NO: 7231 - RNA, 22 nt, synthetic construct
  source 1..22: mol_type = other RNA
aggtagtaagcagtggcgccga

SEQ ID NO: 7232 - RNA, 22 nt, synthetic construct
  source 1..22: mol_type = other RNA
aggtatccagccgtggaaacac

SEQ ID NO: 7233 - RNA, 22 nt, synthetic construct
  source 1..22: mol_type = other RNA
aggtatttgtaggtggggttct

SEQ ID NO: 7234 - RNA, 22 nt, synthetic construct
  source 1..22: mol_type = other RNA
aggtcaggatgtcagacgcagc

SEQ ID NO: 7235 - RNA, 22 nt, synthetic construct
  source 1..22: mol_type = other RNA
aggtcaggatttgagatcaccc

SEQ ID NO: 7236 - RNA, 22 nt, synthetic construct
  source 1..22: mol_type = other RNA
aggtccttactgtatttatatt

SEQ ID NO: 7237 - RNA, 22 nt, synthetic construct
  source 1..22: mol_type = other RNA
aggtcgtgtttttggaaatcag

SEQ ID NO: 7238 - RNA, 22 nt, synthetic construct
  source 1..22: mol_type = other RNA
aggtctcccagcaccctgtgca

SEQ ID NO: 7239 - RNA, 22 nt, synthetic construct
  source 1..22: mol_type = other RNA
aggtctcttcccagacaccaca

SEQ ID NO: 7240 - RNA, 22 nt, synthetic construct
  source 1..22: mol_type = other RNA
aggtgacgctcttctggggtga

SEQ ID NO: 7241 - RNA, 22 nt, synthetic construct
  source 1..22: mol_type = other RNA
aggtggcagggagcgcggcagc

SEQ ID NO: 7242 - RNA, 22 nt, synthetic construct
  source 1..22: mol_type = other RNA
aggtgggaggctgaggcacaag

SEQ ID NO: 7243 - RNA, 22 nt, synthetic construct
  source 1..22: mol_type = other RNA
aggtgggccggaagatcccacg

SEQ ID NO: 7244 - RNA, 22 nt, synthetic construct
  source 1..22: mol_type = other RNA
aggtggggttctcatagccatg

SEQ ID NO: 7245 - RNA, 22 nt, synthetic construct
  source 1..22: mol_type = other RNA
aggtgtgtgccaccacgcccag

SEQ ID NO: 7246 - RNA, 22 nt, synthetic construct
  source 1..22: mol_type = other RNA
aggttgatccaatgctcacccc

SEQ ID NO: 7247 - RNA, 22 nt, synthetic construct
  source 1..22: mol_type = other RNA
aggttttgttcttccaggttga

SEQ ID NO: 7248 - RNA, 22 nt, synthetic construct
  source 1..22: mol_type = other RNA
agtaaccagcagaagacagaac

SEQ ID NO: 7249 - RNA, 22 nt, synthetic construct
  source 1..22: mol_type = other RNA
agtaactgaactgataacagca

SEQ ID NO: 7250 - RNA, 22 nt, synthetic construct
  source 1..22: mol_type = other RNA
agtaactggccaggtgcagtag

SEQ ID NO: 7251 - RNA, 22 nt, synthetic construct
  source 1..22: mol_type = other RNA
agtaagcagtggcgccgagcct

SEQ ID NO: 7252 - RNA, 22 nt, synthetic construct
  source 1..22: mol_type = other RNA
agtaaggaccttaatgagccct

SEQ ID NO: 7253 - RNA, 22 nt, synthetic construct
  source 1..22: mol_type = other RNA
agtactactgtagaactgcaat

SEQ ID NO: 7254 - RNA, 22 nt, synthetic construct
  source 1..22: mol_type = other RNA
agtactcgaggagtgaagatgc

SEQ ID NO: 7255 - RNA, 22 nt, synthetic construct
  source 1..22: mol_type = other RNA
agtactggacatgctgctgtta

SEQ ID NO: 7256 - RNA, 22 nt, synthetic construct
  source 1..22: mol_type = other RNA
agtactttatatagtcctacag

SEQ ID NO: 7257 - RNA, 22 nt, synthetic construct
  source 1..22: mol_type = other RNA
agtaggctagcaagcagacggt

SEQ ID NO: 7258 - RNA, 22 nt, synthetic construct
  source 1..22: mol_type = other RNA
agtagtactttatatagtccta

SEQ ID NO: 7259 - RNA, 22 nt, synthetic construct
  source 1..22: mol_type = other RNA
agtattccctttttaaatgagc

SEQ ID NO: 7260 - RNA, 22 nt, synthetic construct
  source 1..22: mol_type = other RNA
agtcaactcttcagcctcattc

SEQ ID NO: 7261 - RNA, 22 nt, synthetic construct
  source 1..22: mol_type = other RNA
agtcaactggatttcctagcac

SEQ ID NO: 7262 - RNA, 22 nt, synthetic construct
  source 1..22: mol_type = other RNA
agtcagcagtaggctagcaagc

SEQ ID NO: 7263 - RNA, 22 nt, synthetic construct
  source 1..22: mol_type = other RNA
agtcatgtgaacattttatgct

SEQ ID NO: 7264 - RNA, 22 nt, synthetic construct
  source 1..22: mol_type = other RNA
agtccaggaggtcaggatgtca

SEQ ID NO: 7265 - RNA, 22 nt, synthetic construct
  source 1..22: mol_type = other RNA
agtccagtgtttccacggctgg

SEQ ID NO: 7266 - RNA, 22 nt, synthetic construct
  source 1..22: mol_type = other RNA
agtcccttgatccccaaatata

SEQ ID NO: 7267 - RNA, 22 nt, synthetic construct
  source 1..22: mol_type = other RNA
agtcctacagtccaggaggtca

SEQ ID NO: 7268 - RNA, 22 nt, synthetic construct
  source 1..22: mol_type = other RNA
agtcctgtcaccaaggacgtta

SEQ ID NO: 7269 - RNA, 22 nt, synthetic construct
  source 1..22: mol_type = other RNA
agtcgatcggaatcgtgggatc

SEQ ID NO: 7270 - RNA, 22 nt, synthetic construct
  source 1..22: mol_type = other RNA
agtctattattgaaaatcgaca

SEQ ID NO: 7271 - RNA, 22 nt, synthetic construct
  source 1..22: mol_type = other RNA
agtctcagctaggtgggaggct

SEQ ID NO: 7272 - RNA, 22 nt, synthetic construct
  source 1..22: mol_type = other RNA
agtctccagcaggagataaaac

SEQ ID NO: 7273 - RNA, 22 nt, synthetic construct
  source 1..22: mol_type = other RNA
agtctgcttcagcactttctaa

SEQ ID NO: 7274 - RNA, 22 nt, synthetic construct
  source 1..22: mol_type = other RNA
agtgaacagtgggaatgtccag

SEQ ID NO: 7275 - RNA, 22 nt, synthetic construct
  source 1..22: mol_type = other RNA
agtgaagatgcctattaattcc

SEQ ID NO: 7276 - RNA, 22 nt, synthetic construct
  source 1..22: mol_type = other RNA
agtgaatgaggctgaagagttg

SEQ ID NO: 7277 - RNA, 22 nt, synthetic construct
  source 1..22: mol_type = other RNA
agtgagtaactgaactgataac

SEQ ID NO: 7278 - RNA, 22 nt, synthetic construct
  source 1..22: mol_type = other RNA
agtgagtggcaagacaagttca

SEQ ID NO: 7279 - RNA, 22 nt, synthetic construct
  source 1..22: mol_type = other RNA
agtgcagatgctggtcttagtt

SEQ ID NO: 7280 - RNA, 22 nt, synthetic construct
  source 1..22: mol_type = other RNA
agtgctgaagcagactgtttct

SEQ ID NO: 7281 - RNA, 22 nt, synthetic construct
  source 1..22: mol_type = other RNA
agtggcaagacaagttcagtaa

SEQ ID NO: 7282 - RNA, 22 nt, synthetic construct
  source 1..22: mol_type = other RNA
agtggccattacagttccctat

SEQ ID NO: 7283 - RNA, 22 nt, synthetic construct
  source 1..22: mol_type = other RNA
agtggcgccgagccttgcttgt

SEQ ID NO: 7284 - RNA, 22 nt, synthetic construct
  source 1..22: mol_type = other RNA
agtgggaatgtccagagtccct

SEQ ID NO: 7285 - RNA, 22 nt, synthetic construct
  source 1..22: mol_type = other RNA
agtggggtttctgattaattta

SEQ ID NO: 7286 - RNA, 22 nt, synthetic construct
  source 1..22: mol_type = other RNA
agtgttcctttttccaggtatt

SEQ ID NO: 7287 - RNA, 22 nt, synthetic construct
  source 1..22: mol_type = other RNA
agtgtttccacggctggatacc

SEQ ID NO: 7288 - RNA, 22 nt, synthetic construct
  source 1..22: mol_type = other RNA
agttactcactggattcctagg

SEQ ID NO: 7289 - RNA, 22 nt, synthetic construct
  source 1..22: mol_type = other RNA
agttacttggttttatctcctg

SEQ ID NO: 7290 - RNA, 22 nt, synthetic construct
  source 1..22: mol_type = other RNA
agttcagtaaccagcagaagac

SEQ ID NO: 7291 - RNA, 22 nt, synthetic construct
  source 1..22: mol_type = other RNA
agttcagttactcactggattc

SEQ ID NO: 7292 - RNA, 22 nt, synthetic construct
  source 1..22: mol_type = other RNA
agttccctattccaccccattt

SEQ ID NO: 7293 - RNA, 22 nt, synthetic construct
  source 1..22: mol_type = other RNA
agttctacagtagtactttata

SEQ ID NO: 7294 - RNA, 22 nt, synthetic construct
  source 1..22: mol_type = other RNA
agttctgaaattctacagctag

SEQ ID NO: 7295 - RNA, 22 nt, synthetic construct
  source 1..22: mol_type = other RNA
agttgactgtcatcttccgtga

SEQ ID NO: 7296 - RNA, 22 nt, synthetic construct
  source 1..22: mol_type = other RNA
agttgacttacacaacataacc

SEQ ID NO: 7297 - RNA, 22 nt, synthetic construct
  source 1..22: mol_type = other RNA
agttgctgagaaatggggtgga

SEQ ID NO: 7298 - RNA, 22 nt, synthetic construct
  source 1..22: mol_type = other RNA
agttggcaacagccccttgtgg

SEQ ID NO: 7299 - RNA, 22 nt, synthetic construct
  source 1..22: mol_type = other RNA
agtttcttgaagtccagtgttt

SEQ ID NO: 7300 - RNA, 22 nt, synthetic construct
  source 1..22: mol_type = other RNA
agtttgggccttggctatgaat

SEQ ID NO: 7301 - RNA, 22 nt, synthetic construct
  source 1..22: mol_type = other RNA
agttttcaccctctgtagcata

SEQ ID NO: 7302 - RNA, 22 nt, synthetic construct
  source 1..22: mol_type = other RNA
ataaaaatacaaagactagctg

SEQ ID NO: 7303 - RNA, 22 nt, synthetic construct
  source 1..22: mol_type = other RNA
ataaaaccaagtaactggccag

SEQ ID NO: 7304 - RNA, 22 nt, synthetic construct
  source 1..22: mol_type = other RNA
ataaaagccaggacagtgaatg

SEQ ID NO: 7305 - RNA, 22 nt, synthetic construct
  source 1..22: mol_type = other RNA
ataaaagtcctgtcaccaagga

SEQ ID NO: 7306 - RNA, 22 nt, synthetic construct
  source 1..22: mol_type = other RNA
ataaaatgcctttaacgtcctt

SEQ ID NO: 7307 - RNA, 22 nt, synthetic construct
  source 1..22: mol_type = other RNA
ataaaatgttcacatgactttc

SEQ ID NO: 7308 - RNA, 22 nt, synthetic construct
  source 1..22: mol_type = other RNA
ataaagtactactgtagaactg

SEQ ID NO: 7309 - RNA, 22 nt, synthetic construct
  source 1..22: mol_type = other RNA
ataaatacagtaaggaccttaa

SEQ ID NO: 7310 - RNA, 22 nt, synthetic construct
  source 1..22: mol_type = other RNA
ataaatgggaaatgtcgatttt

SEQ ID NO: 7311 - RNA, 22 nt, synthetic construct
  source 1..22: mol_type = other RNA
ataacagcagcatgtccagtac

SEQ ID NO: 7312 - RNA, 22 nt, synthetic construct
  source 1..22: mol_type = other RNA
ataaccggaacgacagcctgca

SEQ ID NO: 7313 - RNA, 22 nt, synthetic construct
  source 1..22: mol_type = other RNA
ataactaagaccagcatctgca

SEQ ID NO: 7314 - RNA, 22 nt, synthetic construct
  source 1..22: mol_type = other RNA
ataaggggatcaaagaggcaat

SEQ ID NO: 7315 - RNA, 22 nt, synthetic construct
  source 1..22: mol_type = other RNA
ataataaatgggaaatgtcgat

SEQ ID NO: 7316 - RNA, 22 nt, synthetic construct
  source 1..22: mol_type = other RNA
ataatagacttatatgcaggct

SEQ ID NO: 7317 - RNA, 22 nt, synthetic construct
  source 1..22: mol_type = other RNA
ataatctgagaaaagagttttc

SEQ ID NO: 7318 - RNA, 22 nt, synthetic construct
  source 1..22: mol_type = other RNA
atacaaagactagctgggcgtg

SEQ ID NO: 7319 - RNA, 22 nt, synthetic construct
  source 1..22: mol_type = other RNA
atacaatggaagtggggtttct

SEQ ID NO: 7320 - RNA, 22 nt, synthetic construct
  source 1..22: mol_type = other RNA
atacactaagctctctagaaga

SEQ ID NO: 7321 - RNA, 22 nt, synthetic construct
  source 1..22: mol_type = other RNA
atacagtaaggaccttaatgag

SEQ ID NO: 7322 - RNA, 22 nt, synthetic construct
  source 1..22: mol_type = other RNA
atacctggaaaaaggaacacta

SEQ ID NO: 7323 - RNA, 22 nt, synthetic construct
  source 1..22: mol_type = other RNA
atacctggagcagatgcagatt

SEQ ID NO: 7324 - RNA, 22 nt, synthetic construct
  source 1..22: mol_type = other RNA
atacctgtgtgtctccataaaa

SEQ ID NO: 7325 - RNA, 22 nt, synthetic construct
  source 1..22: mol_type = other RNA
atagacttatatgcaggctgtc

SEQ ID NO: 7326 - RNA, 22 nt, synthetic construct
  source 1..22: mol_type = other RNA
atagccaaggcccaaactaatg

SEQ ID NO: 7327 - RNA, 22 nt, synthetic construct
  source 1..22: mol_type = other RNA
atagccatggttctgcatcttg

SEQ ID NO: 7328 - RNA, 22 nt, synthetic construct
  source 1..22: mol_type = other RNA
ataggatttccccatattgacc

SEQ ID NO: 7329 - RNA, 22 nt, synthetic construct
  source 1..22: mol_type = other RNA
ataggcatcttcactcctcgag

SEQ ID NO: 7330 - RNA, 22 nt, synthetic construct
  source 1..22: mol_type = other RNA
atagggaactgtaatggccact

SEQ ID NO: 7331 - RNA, 22 nt, synthetic construct
  source 1..22: mol_type = other RNA
atagtcctacagtccaggaggt

SEQ ID NO: 7332 - RNA, 22 nt, synthetic construct
  source 1..22: mol_type = other RNA
atataaagtactactgtagaac

SEQ ID NO: 7333 - RNA, 22 nt, synthetic construct
  source 1..22: mol_type = other RNA
atataaatacagtaaggacctt

SEQ ID NO: 7334 - RNA, 22 nt, synthetic construct
  source 1..22: mol_type = other RNA
atataataaatgggaaatgtcg

SEQ ID NO: 7335 - RNA, 22 nt, synthetic construct
  source 1..22: mol_type = other RNA
atatagtcctacagtccaggag

SEQ ID NO: 7336 - RNA, 22 nt, synthetic construct
  source 1..22: mol_type = other RNA
atatattgagagcatgtgtcag

SEQ ID NO: 7337 - RNA, 22 nt, synthetic construct
  source 1..22: mol_type = other RNA
atatgcaggctgtcgttccggt

SEQ ID NO: 7338 - RNA, 22 nt, synthetic construct
  source 1..22: mol_type = other RNA
atatggggaaatcctatctcta

SEQ ID NO: 7339 - RNA, 22 nt, synthetic construct
  source 1..22: mol_type = other RNA
atattaccatttttcacccatt

SEQ ID NO: 7340 - RNA, 22 nt, synthetic construct
  source 1..22: mol_type = other RNA
atattgaccagggtgatctcaa

SEQ ID NO: 7341 - RNA, 22 nt, synthetic construct
  source 1..22: mol_type = other RNA
atattgagagcatgtgtcagac

SEQ ID NO: 7342 - RNA, 22 nt, synthetic construct
  source 1..22: mol_type = other RNA
atatttggggatcaagggactc

SEQ ID NO: 7343 - RNA, 22 nt, synthetic construct
  source 1..22: mol_type = other RNA
atcaaagaggcaatgctttcga

SEQ ID NO: 7344 - RNA, 22 nt, synthetic construct
  source 1..22: mol_type = other RNA
atcaaatatctgcaatagatca

SEQ ID NO: 7345 - RNA, 22 nt, synthetic construct
  source 1..22: mol_type = other RNA
atcaacctggaagaacaaaacc

SEQ ID NO: 7346 - RNA, 22 nt, synthetic construct
  source 1..22: mol_type = other RNA
atcaagggactctggacattcc

SEQ ID NO: 7347 - RNA, 22 nt, synthetic construct
  source 1..22: mol_type = other RNA
atcaccctggtcaatatgggga

SEQ ID NO: 7348 - RNA, 22 nt, synthetic construct
  source 1..22: mol_type = other RNA
atcagaaaccccacttccattg

SEQ ID NO: 7349 - RNA, 22 nt, synthetic construct
  source 1..22: mol_type = other RNA
atcagcccctgccacaaggggc

SEQ ID NO: 7350 - RNA, 22 nt, synthetic construct
  source 1..22: mol_type = other RNA
atcagttcagttactcactgga

SEQ ID NO: 7351 - RNA, 22 nt, synthetic construct
  source 1..22: mol_type = other RNA
atcattttgcgagggtctctca

SEQ ID NO: 7352 - RNA, 22 nt, synthetic construct
  source 1..22: mol_type = other RNA
atccaatgctcaccccagaaga

SEQ ID NO: 7353 - RNA, 22 nt, synthetic construct
  source 1..22: mol_type = other RNA
atccagccgtggaaacactgga

SEQ ID NO: 7354 - RNA, 22 nt, synthetic construct
  source 1..22: mol_type = other RNA
atccagtgagtaactgaactga

SEQ ID NO: 7355 - RNA, 22 nt, synthetic construct
  source 1..22: mol_type = other RNA
atccagttgactgtcatcttcc

SEQ ID NO: 7356 - RNA, 22 nt, synthetic construct
  source 1..22: mol_type = other RNA
atcccacgattccgatcgactg

SEQ ID NO: 7357 - RNA, 22 nt, synthetic construct
  source 1..22: mol_type = other RNA
atccccaaatataaatacagta

SEQ ID NO: 7358 - RNA, 22 nt, synthetic construct
  source 1..22: mol_type = other RNA
atcccctgaggaccaaatgcag

SEQ ID NO: 7359 - RNA, 22 nt, synthetic construct
  source 1..22: mol_type = other RNA
atcccctggtcccaccgtctgc

SEQ ID NO: 7360 - RNA, 22 nt, synthetic construct
  source 1..22: mol_type = other RNA
atccccttattttctttctcct

SEQ ID NO: 7361 - RNA, 22 nt, synthetic construct
  source 1..22: mol_type = other RNA
atccctccgccagggctgccgc

SEQ ID NO: 7362 - RNA, 22 nt, synthetic construct
  source 1..22: mol_type = other RNA
atcctgacctcctggactgtag

SEQ ID NO: 7363 - RNA, 22 nt, synthetic construct
  source 1..22: mol_type = other RNA
atcgacatttcccatttattat

SEQ ID NO: 7364 - RNA, 22 nt, synthetic construct
  source 1..22: mol_type = other RNA
atcgactgccaagcagcagccg

SEQ ID NO: 7365 - RNA, 22 nt, synthetic construct
  source 1..22: mol_type = other RNA
atcggaatcgtgggatcttccg

SEQ ID NO: 7366 - RNA, 22 nt, synthetic construct
  source 1..22: mol_type = other RNA
atcgtgggatcttccggcccac

SEQ ID NO: 7367 - RNA, 22 nt, synthetic construct
  source 1..22: mol_type = other RNA
atctattgcagatatttgatgt

SEQ ID NO: 7368 - RNA, 22 nt, synthetic construct
  source 1..22: mol_type = other RNA
atctcaaatcctgacctcaagt

SEQ ID NO: 7369 - RNA, 22 nt, synthetic construct
  source 1..22: mol_type = other RNA
atctcctgctggagactggcct

SEQ ID NO: 7370 - RNA, 22 nt, synthetic construct
  source 1..22: mol_type = other RNA
atctctggtctttttcagttct

SEQ ID NO: 7371 - RNA, 22 nt, synthetic construct
  source 1..22: mol_type = other RNA
atctgagaaaagagttttcacc

SEQ ID NO: 7372 - RNA, 22 nt, synthetic construct
  source 1..22: mol_type = other RNA
atctgcactaatttcccagggc

SEQ ID NO: 7373 - RNA, 22 nt, synthetic construct
  source 1..22: mol_type = other RNA
atctgcatctgctccaggtatt

SEQ ID NO: 7374 - RNA, 22 nt, synthetic construct
  source 1..22: mol_type = other RNA
atctgctccaggtatttgtagg

SEQ ID NO: 7375 - RNA, 22 nt, synthetic construct
  source 1..22: mol_type = other RNA
atctgtatacactaagctctct

SEQ ID NO: 7376 - RNA, 22 nt, synthetic construct
  source 1..22: mol_type = other RNA
atcttcactcctcgagtactgg

SEQ ID NO: 7377 - RNA, 22 nt, synthetic construct
  source 1..22: mol_type = other RNA
atcttccggcccacctgcatcc

SEQ ID NO: 7378 - RNA, 22 nt, synthetic construct
  source 1..22: mol_type = other RNA
atcttccgtgagggctaagctt

SEQ ID NO: 7379 - RNA, 22 nt, synthetic construct
  source 1..22: mol_type = other RNA
atcttgttcaggtgacgctctt

SEQ ID NO: 7380 - RNA, 22 nt, synthetic construct
  source 1..22: mol_type = other RNA
atgaatgtcagaaagtcatgtg

SEQ ID NO: 7381 - RNA, 22 nt, synthetic construct
  source 1..22: mol_type = other RNA
atgacagtcaactggatttcct

SEQ ID NO: 7382 - RNA, 22 nt, synthetic construct
  source 1..22: mol_type = other RNA
atgaccctcaggttttgttctt

SEQ ID NO: 7383 - RNA, 22 nt, synthetic construct
  source 1..22: mol_type = other RNA
atgactttctgacattcatagc

SEQ ID NO: 7384 - RNA, 22 nt, synthetic construct
  source 1..22: mol_type = other RNA
atgagaaccccacctacaaata

SEQ ID NO: 7385 - RNA, 22 nt, synthetic construct
  source 1..22: mol_type = other RNA
atgagaaccggtggtgaaacac

SEQ ID NO: 7386 - RNA, 22 nt, synthetic construct
  source 1..22: mol_type = other RNA
atgagccctgggaaattagtgc

SEQ ID NO: 7387 - RNA, 22 nt, synthetic construct
  source 1..22: mol_type = other RNA
atgagctactgcacctggccag

SEQ ID NO: 7388 - RNA, 22 nt, synthetic construct
  source 1..22: mol_type = other RNA
atgagctttcaggaagttgctg

SEQ ID NO: 7389 - RNA, 22 nt, synthetic construct
  source 1..22: mol_type = other RNA
atgaggctgaagagttgactta

SEQ ID NO: 7390 - RNA, 22 nt, synthetic construct
  source 1..22: mol_type = other RNA
atgatctattgcagatatttga

SEQ ID NO: 7391 - RNA, 22 nt, synthetic construct
  source 1..22: mol_type = other RNA
atgatgtgaaaggaccagtttc

SEQ ID NO: 7392 - RNA, 22 nt, synthetic construct
  source 1..22: mol_type = other RNA
atgcagaaccatggctatgaga

SEQ ID NO: 7393 - RNA, 22 nt, synthetic construct
  source 1..22: mol_type = other RNA
atgcagatttaggtggcaggga

SEQ ID NO: 7394 - RNA, 22 nt, synthetic construct
  source 1..22: mol_type = other RNA
atgcagccagcagcccgttccc

SEQ ID NO: 7395 - RNA, 22 nt, synthetic construct
  source 1..22: mol_type = other RNA
atgcaggctgtcgttccggtta

SEQ ID NO: 7396 - RNA, 22 nt, synthetic construct
  source 1..22: mol_type = other RNA
atgcaggtgggccggaagatcc

SEQ ID NO: 7397 - RNA, 22 nt, synthetic construct
  source 1..22: mol_type = other RNA
atgcctattaattccacaggtt

SEQ ID NO: 7398 - RNA, 22 nt, synthetic construct
  source 1..22: mol_type = other RNA
atgcctttaacgtccttggtga

SEQ ID NO: 7399 - RNA, 22 nt, synthetic construct
  source 1..22: mol_type = other RNA
atgctacagagggtgaaaactc

SEQ ID NO: 7400 - RNA, 22 nt, synthetic construct
  source 1..22: mol_type = other RNA
atgctcaccccagaagagcgtc

SEQ ID NO: 7401 - RNA, 22 nt, synthetic construct
  source 1..22: mol_type = other RNA
atgctgctgttatcagttcagt

SEQ ID NO: 7402 - RNA, 22 nt, synthetic construct
  source 1..22: mol_type = other RNA
atgctggtcttagttatttgtg

SEQ ID NO: 7403 - RNA, 22 nt, synthetic construct
  source 1..22: mol_type = other RNA
atgctttcgaaacgagagccct

SEQ ID NO: 7404 - RNA, 22 nt, synthetic construct
  source 1..22: mol_type = other RNA
atggaaattgcagttctacagt

SEQ ID NO: 7405 - RNA, 22 nt, synthetic construct
  source 1..22: mol_type = other RNA
atggaagtggggtttctgatta

SEQ ID NO: 7406 - RNA, 22 nt, synthetic construct
  source 1..22: mol_type = other RNA
atggagacacacaggtatccag

SEQ ID NO: 7407 - RNA, 22 nt, synthetic construct
  source 1..22: mol_type = other RNA
atggccactgaagcacgtgaga

SEQ ID NO: 7408 - RNA, 22 nt, synthetic construct
  source 1..22: mol_type = other RNA
atggctatgagaaccccaccta

SEQ ID NO: 7409 - RNA, 22 nt, synthetic construct
  source 1..22: mol_type = other RNA
atggctcaggtctcccagcacc

SEQ ID NO: 7410 - RNA, 22 nt, synthetic construct
  source 1..22: mol_type = other RNA
atgggaaatgtcgattttcaat

SEQ ID NO: 7411 - RNA, 22 nt, synthetic construct
  source 1..22: mol_type = other RNA
atggggaaatcctatctctaat

SEQ ID NO: 7412 - RNA, 22 nt, synthetic construct
  source 1..22: mol_type = other RNA
atgggggaaaggagcaacagga

SEQ ID NO: 7413 - RNA, 22 nt, synthetic construct
  source 1..22: mol_type = other RNA
atggggtggaatagggaactgt

SEQ ID NO: 7414 - RNA, 22 nt, synthetic construct
  source 1..22: mol_type = other RNA
atgggtgaaaaatggtaatata

SEQ ID NO: 7415 - RNA, 22 nt, synthetic construct
  source 1..22: mol_type = other RNA
atggttctgcatcttgttcagg

SEQ ID NO: 7416 - RNA, 22 nt, synthetic construct
  source 1..22: mol_type = other RNA
atgtcagaaagtcatgtgaaca

SEQ ID NO: 7417 - RNA, 22 nt, synthetic construct
  source 1..22: mol_type = other RNA
atgtcagacgcagcccctggca

SEQ ID NO: 7418 - RNA, 22 nt, synthetic construct
  source 1..22: mol_type = other RNA
atgtccagagtcccttgatccc

SEQ ID NO: 7419 - RNA, 22 nt, synthetic construct
  source 1..22: mol_type = other RNA
atgtccagtactcgaggagtga

SEQ ID NO: 7420 - RNA, 22 nt, synthetic construct
  source 1..22: mol_type = other RNA
atgtcgattttcaataatagac

SEQ ID NO: 7421 - RNA, 22 nt, synthetic construct
  source 1..22: mol_type = other RNA
atgtgaaaggaccagtttcttg

SEQ ID NO: 7422 - RNA, 22 nt, synthetic construct
  source 1..22: mol_type = other RNA
atgtgaacattttatgctacag

SEQ ID NO: 7423 - RNA, 22 nt, synthetic construct
  source 1..22: mol_type = other RNA
atgtgtcagacaatacaatgga

SEQ ID NO: 7424 - RNA, 22 nt, synthetic construct
  source 1..22: mol_type = other RNA
atgttcacatgactttctgaca

SEQ ID NO: 7425 - RNA, 22 nt, synthetic construct
  source 1..22: mol_type = other RNA
atgttgaaagttggcaacagcc

SEQ ID NO: 7426 - RNA, 22 nt, synthetic construct
  source 1..22: mol_type = other RNA
atgttgtgtaagtcaactcttc

SEQ ID NO: 7427 - RNA, 22 nt, synthetic construct
  source 1..22: mol_type = other RNA
attaaggtccttactgtattta

SEQ ID NO: 7428 - RNA, 22 nt, synthetic construct
  source 1..22: mol_type = other RNA
attaataggcatcttcactcct

SEQ ID NO: 7429 - RNA, 22 nt, synthetic construct
  source 1..22: mol_type = other RNA
attaatcagaaaccccacttcc

SEQ ID NO: 7430 - RNA, 22 nt, synthetic construct
  source 1..22: mol_type = other RNA
attaattccacaggttcccacc

SEQ ID NO: 7431 - RNA, 22 nt, synthetic construct
  source 1..22: mol_type = other RNA
attacagttccctattccaccc

SEQ ID NO: 7432 - RNA, 22 nt, synthetic construct
  source 1..22: mol_type = other RNA
attaccatttttcacccattta

SEQ ID NO: 7433 - RNA, 22 nt, synthetic construct
  source 1..22: mol_type = other RNA
attagagataggatttccccat

SEQ ID NO: 7434 - RNA, 22 nt, synthetic construct
  source 1..22: mol_type = other RNA
attagtgcagatgctggtctta

SEQ ID NO: 7435 - RNA, 22 nt, synthetic construct
  source 1..22: mol_type = other RNA
attagtttgggccttggctatg

SEQ ID NO: 7436 - RNA, 22 nt, synthetic construct
  source 1..22: mol_type = other RNA
attatatattgagagcatgtgt

SEQ ID NO: 7437 - RNA, 22 nt, synthetic construct
  source 1..22: mol_type = other RNA
attattgaaaatcgacatttcc

SEQ ID NO: 7438 - RNA, 22 nt, synthetic construct
  source 1..22: mol_type = other RNA
attatttccttagtgttccttt

SEQ ID NO: 7439 - RNA, 22 nt, synthetic construct
  source 1..22: mol_type = other RNA
attcactgtcctggcttttatt

SEQ ID NO: 7440 - RNA, 22 nt, synthetic construct
  source 1..22: mol_type = other RNA
attcatagccaaggcccaaact

SEQ ID NO: 7441 - RNA, 22 nt, synthetic construct
  source 1..22: mol_type = other RNA
attccacaggttcccaccccca

SEQ ID NO: 7442 - RNA, 22 nt, synthetic construct
  source 1..22: mol_type = other RNA
attccaccccatttctcagcaa

SEQ ID NO: 7443 - RNA, 22 nt, synthetic construct
  source 1..22: mol_type = other RNA
attccagcgtcttctagagagc

SEQ ID NO: 7444 - RNA, 22 nt, synthetic construct
  source 1..22: mol_type = other RNA
attcccactgttcactaaggag

SEQ ID NO: 7445 - RNA, 22 nt, synthetic construct
  source 1..22: mol_type = other RNA
attccctttttaaatgagcttt

SEQ ID NO: 7446 - RNA, 22 nt, synthetic construct
  source 1..22: mol_type = other RNA
attccgatcgactgccaagcag

SEQ ID NO: 7447 - RNA, 22 nt, synthetic construct
  source 1..22: mol_type = other RNA
attcctaggtcgtgtttttgga

SEQ ID NO: 7448 - RNA, 22 nt, synthetic construct
  source 1..22: mol_type = other RNA
attctacagctaggccagtctc

SEQ ID NO: 7449 - RNA, 22 nt, synthetic construct
  source 1..22: mol_type = other RNA
attgaaaatcgacatttcccat

SEQ ID NO: 7450 - RNA, 22 nt, synthetic construct
  source 1..22: mol_type = other RNA
attgaccagggtgatctcaaat

SEQ ID NO: 7451 - RNA, 22 nt, synthetic construct
  source 1..22: mol_type = other RNA
attgagagcatgtgtcagacaa

SEQ ID NO: 7452 - RNA, 22 nt, synthetic construct
  source 1..22: mol_type = other RNA
attgcagatatttgatgtagtt

SEQ ID NO: 7453 - RNA, 22 nt, synthetic construct
  source 1..22: mol_type = other RNA
attgcagttctacagtagtact

SEQ ID NO: 7454 - RNA, 22 nt, synthetic construct
  source 1..22: mol_type = other RNA
attgcctctttgatccccttat

SEQ ID NO: 7455 - RNA, 22 nt, synthetic construct
  source 1..22: mol_type = other RNA
attggatcaacctggaagaaca

SEQ ID NO: 7456 - RNA, 22 nt, synthetic construct
  source 1..22: mol_type = other RNA
attgtattgtctgacacatgct

SEQ ID NO: 7457 - RNA, 22 nt, synthetic construct
  source 1..22: mol_type = other RNA
attgtctgacacatgctctcaa

SEQ ID NO: 7458 - RNA, 22 nt, synthetic construct
  source 1..22: mol_type = other RNA
attgtgcagcaaatggctcagg

SEQ ID NO: 7459 - RNA, 22 nt, synthetic construct
  source 1..22: mol_type = other RNA
attgtggtgtctgggaagagac

SEQ ID NO: 7460 - RNA, 22 nt, synthetic construct
  source 1..22: mol_type = other RNA
atttaaaaagggaatactgcct

SEQ ID NO: 7461 - RNA, 22 nt, synthetic construct
  source 1..22: mol_type = other RNA
atttagaaagtgctgaagcaga

SEQ ID NO: 7462 - RNA, 22 nt, synthetic construct
  source 1..22: mol_type = other RNA
atttaggtggcagggagcgcgg

SEQ ID NO: 7463 - RNA, 22 nt, synthetic construct
  source 1..22: mol_type = other RNA
atttatatttggggatcaaggg

SEQ ID NO: 7464 - RNA, 22 nt, synthetic construct
  source 1..22: mol_type = other RNA
atttcagaactgaaaaagacca

SEQ ID NO: 7465 - RNA, 22 nt, synthetic construct
  source 1..22: mol_type = other RNA
atttccaaaaacacgacctagg

SEQ ID NO: 7466 - RNA, 22 nt, synthetic construct
  source 1..22: mol_type = other RNA
atttccattcttttaaatgggt

SEQ ID NO: 7467 - RNA, 22 nt, synthetic construct
  source 1..22: mol_type = other RNA
atttcccagggctcattaaggt

SEQ ID NO: 7468 - RNA, 22 nt, synthetic construct
  source 1..22: mol_type = other RNA
atttccccatattgaccagggt

SEQ ID NO: 7469 - RNA, 22 nt, synthetic construct
  source 1..22: mol_type = other RNA
atttcctagcaccgtggtgaca

SEQ ID NO: 7470 - RNA, 22 nt, synthetic construct
  source 1..22: mol_type = other RNA
atttcctgttgctcctttcccc

SEQ ID NO: 7471 - RNA, 22 nt, synthetic construct
  source 1..22: mol_type = other RNA
atttccttagtgttcctttttc

SEQ ID NO: 7472 - RNA, 22 nt, synthetic construct
  source 1..22: mol_type = other RNA
atttctcagcaacttcctgaaa

SEQ ID NO: 7473 - RNA, 22 nt, synthetic construct
  source 1..22: mol_type = other RNA
atttgagatcaccctggtcaat

SEQ ID NO: 7474 - RNA, 22 nt, synthetic construct
  source 1..22: mol_type = other RNA
atttgctgcacaatcccctgag

SEQ ID NO: 7475 - RNA, 22 nt, synthetic construct
  source 1..22: mol_type = other RNA
atttggcctgtccggtgggaac

SEQ ID NO: 7476 - RNA, 22 nt, synthetic construct
  source 1..22: mol_type = other RNA
atttggggatcaagggactctg

SEQ ID NO: 7477 - RNA, 22 nt, synthetic construct
  source 1..22: mol_type = other RNA
atttggtcctcaggggattgtg

SEQ ID NO: 7478 - RNA, 22 nt, synthetic construct
  source 1..22: mol_type = other RNA
atttgtaggtggggttctcata

SEQ ID NO: 7479 - RNA, 22 nt, synthetic construct
  source 1..22: mol_type = other RNA
attttatgctacagagggtgaa

SEQ ID NO: 7480 - RNA, 22 nt, synthetic construct
  source 1..22: mol_type = other RNA
attttattccagcgtcttctag

SEQ ID NO: 7481 - RNA, 22 nt, synthetic construct
  source 1..22: mol_type = other RNA
attttctttctcctgtgtttca

SEQ ID NO: 7482 - RNA, 22 nt, synthetic construct
  source 1..22: mol_type = other RNA
attttgcgagggtctctcacgt

SEQ ID NO: 7483 - RNA, 22 nt, synthetic construct
  source 1..22: mol_type = other RNA
caaaaaaccaaaaaaccaaaac

SEQ ID NO: 7484 - RNA, 22 nt, synthetic construct
  source 1..22: mol_type = other RNA
caaaaacacgacctaggaatcc

SEQ ID NO: 7485 - RNA, 22 nt, synthetic construct
  source 1..22: mol_type = other RNA
caaaacctgagggtcattgtgg

SEQ ID NO: 7486 - RNA, 22 nt, synthetic construct
  source 1..22: mol_type = other RNA
caaaatgatgtgaaaggaccag

SEQ ID NO: 7487 - RNA, 22 nt, synthetic construct
  source 1..22: mol_type = other RNA
caaactaatgttgaaagttggc

SEQ ID NO: 7488 - RNA, 22 nt, synthetic construct
  source 1..22: mol_type = other RNA
caaagactagctgggcgtggtg

SEQ ID NO: 7489 - RNA, 22 nt, synthetic construct
  source 1..22: mol_type = other RNA
caaagaggcaatgctttcgaaa

SEQ ID NO: 7490 - RNA, 22 nt, synthetic construct
  source 1..22: mol_type = other RNA
caaataactaagaccagcatct

SEQ ID NO: 7491 - RNA, 22 nt, synthetic construct
  source 1..22: mol_type = other RNA
caaatacctggagcagatgcag

SEQ ID NO: 7492 - RNA, 22 nt, synthetic construct
  source 1..22: mol_type = other RNA
caaatataaatacagtaaggac

SEQ ID NO: 7493 - RNA, 22 nt, synthetic construct
  source 1..22: mol_type = other RNA
caaatatctgcaatagatcatt

SEQ ID NO: 7494 - RNA, 22 nt, synthetic construct
  source 1..22: mol_type = other RNA
caaatgagaaccggtggtgaaa

SEQ ID NO: 7495 - RNA, 22 nt, synthetic construct
  source 1..22: mol_type = other RNA
caaatgcagccagcagcccgtt

SEQ ID NO: 7496 - RNA, 22 nt, synthetic construct
  source 1..22: mol_type = other RNA
caaatggctcaggtctcccagc

SEQ ID NO: 7497 - RNA, 22 nt, synthetic construct
  source 1..22: mol_type = other RNA
caacagccccttgtggcagggg

SEQ ID NO: 7498 - RNA, 22 nt, synthetic construct
  source 1..22: mol_type = other RNA
caacaggaaatttagaaagtgc

SEQ ID NO: 7499 - RNA, 22 nt, synthetic construct
  source 1..22: mol_type = other RNA
caacataaccggaacgacagcc

SEQ ID NO: 7500 - RNA, 22 nt, synthetic construct
  source 1..22: mol_type = other RNA
caacattagtttgggccttggc

SEQ ID NO: 7501 - RNA, 22 nt, synthetic construct
  source 1..22: mol_type = other RNA
caacctggaagaacaaaacctg

SEQ ID NO: 7502 - RNA, 22 nt, synthetic construct
  source 1..22: mol_type = other RNA
caactcttcagcctcattcact

SEQ ID NO: 7503 - RNA, 22 nt, synthetic construct
  source 1..22: mol_type = other RNA
caactggatttcctagcaccgt

SEQ ID NO: 7504 - RNA, 22 nt, synthetic construct
  source 1..22: mol_type = other RNA
caacttcctgaaagctcattta

SEQ ID NO: 7505 - RNA, 22 nt, synthetic construct
  source 1..22: mol_type = other RNA
caactttcaacattagtttggg

SEQ ID NO: 7506 - RNA, 22 nt, synthetic construct
  source 1..22: mol_type = other RNA
caagaaactggtcctttcacat

SEQ ID NO: 7507 - RNA, 22 nt, synthetic construct
  source 1..22: mol_type = other RNA
caagaatcacctgaacccggga

SEQ ID NO: 7508 - RNA, 22 nt, synthetic construct
  source 1..22: mol_type = other RNA
caagacaagttcagtaaccagc

SEQ ID NO: 7509 - RNA, 22 nt, synthetic construct
  source 1..22: mol_type = other RNA
caagatgcagaaccatggctat

SEQ ID NO: 7510 - RNA, 22 nt, synthetic construct
  source 1..22: mol_type = other RNA
caagcaaggctcggcgccactg

SEQ ID NO: 7511 - RNA, 22 nt, synthetic construct
  source 1..22: mol_type = other RNA
caagcagacggtgggaccaggg

SEQ ID NO: 7512 - RNA, 22 nt, synthetic construct
  source 1..22: mol_type = other RNA
caagcagcagccgctgccaggg

SEQ ID NO: 7513 - RNA, 22 nt, synthetic construct
  source 1..22: mol_type = other RNA
caagcatgagctactgcacctg

SEQ ID NO: 7514 - RNA, 22 nt, synthetic construct
  source 1..22: mol_type = other RNA
caagccagtcagcagtaggcta

SEQ ID NO: 7515 - RNA, 22 nt, synthetic construct
  source 1..22: mol_type = other RNA
caaggacgttaaaggcatttta

SEQ ID NO: 7516 - RNA, 22 nt, synthetic construct
  source 1..22: mol_type = other RNA
caaggcaagccagtcagcagta

SEQ ID NO: 7517 - RNA, 22 nt, synthetic construct
  source 1..22: mol_type = other RNA
caaggcccaaactaatgttgaa

SEQ ID NO: 7518 - RNA, 22 nt, synthetic construct
  source 1..22: mol_type = other RNA
caaggctcggcgccactgctta

SEQ ID NO: 7519 - RNA, 22 nt, synthetic construct
  source 1..22: mol_type = other RNA
caagggactctggacattccca

SEQ ID NO: 7520 - RNA, 22 nt, synthetic construct
  source 1..22: mol_type = other RNA
caaggggctgttgccaactttc

SEQ ID NO: 7521 - RNA, 22 nt, synthetic construct
  source 1..22: mol_type = other RNA
caagtaactggccaggtgcagt

SEQ ID NO: 7522 - RNA, 22 nt, synthetic construct
  source 1..22: mol_type = other RNA
caagttcagtaaccagcagaag

SEQ ID NO: 7523 - RNA, 22 nt, synthetic construct
  source 1..22: mol_type = other RNA
caataatagacttatatgcagg

SEQ ID NO: 7524 - RNA, 22 nt, synthetic construct
  source 1..22: mol_type = other RNA
caatacaatggaagtggggttt

SEQ ID NO: 7525 - RNA, 22 nt, synthetic construct
  source 1..22: mol_type = other RNA
caatatggggaaatcctatctc

SEQ ID NO: 7526 - RNA, 22 nt, synthetic construct
  source 1..22: mol_type = other RNA
caatcccctgaggaccaaatgc

SEQ ID NO: 7527 - RNA, 22 nt, synthetic construct
  source 1..22: mol_type = other RNA
caatgaccctcaggttttgttc

SEQ ID NO: 7528 - RNA, 22 nt, synthetic construct
  source 1..22: mol_type = other RNA
caatgctcaccccagaagagcg

SEQ ID NO: 7529 - RNA, 22 nt, synthetic construct
  source 1..22: mol_type = other RNA
caatgctttcgaaacgagagcc

SEQ ID NO: 7530 - RNA, 22 nt, synthetic construct
  source 1..22: mol_type = other RNA
caatggaagtggggtttctgat

SEQ ID NO: 7531 - RNA, 22 nt, synthetic construct
  source 1..22: mol_type = other RNA
caatttccattcttttaaatgg

SEQ ID NO: 7532 - RNA, 22 nt, synthetic construct
  source 1..22: mol_type = other RNA
cacaaataactaagaccagcat

SEQ ID NO: 7533 - RNA, 22 nt, synthetic construct
  source 1..22: mol_type = other RNA
cacaacataaccggaacgacag

SEQ ID NO: 7534 - RNA, 22 nt, synthetic construct
  source 1..22: mol_type = other RNA
cacaagaatcacctgaacccgg

SEQ ID NO: 7535 - RNA, 22 nt, synthetic construct
  source 1..22: mol_type = other RNA
cacaaggggctgttgccaactt

SEQ ID NO: 7536 - RNA, 22 nt, synthetic construct
  source 1..22: mol_type = other RNA
cacaatcccctgaggaccaaat

SEQ ID NO: 7537 - RNA, 22 nt, synthetic construct
  source 1..22: mol_type = other RNA
cacaatgaccctcaggttttgt

SEQ ID NO: 7538 - RNA, 22 nt, synthetic construct
  source 1..22: mol_type = other RNA
cacacacctgtagtctcagcta

SEQ ID NO: 7539 - RNA, 22 nt, synthetic construct
  source 1..22: mol_type = other RNA
cacacaggtatccagccgtgga

SEQ ID NO: 7540 - RNA, 22 nt, synthetic construct
  source 1..22: mol_type = other RNA
cacacctgtagtctcagctagg

SEQ ID NO: 7541 - RNA, 22 nt, synthetic construct
  source 1..22: mol_type = other RNA
cacagcgagactgtctccaaaa

SEQ ID NO: 7542 - RNA, 22 nt, synthetic construct
  source 1..22: mol_type = other RNA
cacaggagaaagaaaataaggg

SEQ ID NO: 7543 - RNA, 22 nt, synthetic construct
  source 1..22: mol_type = other RNA
cacagggtgctgggagacctga

SEQ ID NO: 7544 - RNA, 22 nt, synthetic construct
  source 1..22: mol_type = other RNA
cacaggtatccagccgtggaaa

SEQ ID NO: 7545 - RNA, 22 nt, synthetic construct
  source 1..22: mol_type = other RNA
cacaggttcccacccccaaccc

SEQ ID NO: 7546 - RNA, 22 nt, synthetic construct
  source 1..22: mol_type = other RNA
cacatcattttgcgagggtctc

SEQ ID NO: 7547 - RNA, 22 nt, synthetic construct
  source 1..22: mol_type = other RNA
cacatgactttctgacattcat

SEQ ID NO: 7548 - RNA, 22 nt, synthetic construct
  source 1..22: mol_type = other RNA
cacatgctctcaatatataata

SEQ ID NO: 7549 - RNA, 22 nt, synthetic construct
  source 1..22: mol_type = other RNA
caccaaggacgttaaaggcatt

SEQ ID NO: 7550 - RNA, 22 nt, synthetic construct
  source 1..22: mol_type = other RNA
caccacaatgaccctcaggttt

SEQ ID NO: 7551 - RNA, 22 nt, synthetic construct
  source 1..22: mol_type = other RNA
caccaccggttctcatttggcc

SEQ ID NO: 7552 - RNA, 22 nt, synthetic construct
  source 1..22: mol_type = other RNA
caccacgcccagctagtctttg

SEQ ID NO: 7553 - RNA, 22 nt, synthetic construct
  source 1..22: mol_type = other RNA
caccacggtgctaggaaatcca

SEQ ID NO: 7554 - RNA, 22 nt, synthetic construct
  source 1..22: mol_type = other RNA
cacccatttaaaagaatggaaa

SEQ ID NO: 7555 - RNA, 22 nt, synthetic construct
  source 1..22: mol_type = other RNA
caccccagaagagcgtcacctg

SEQ ID NO: 7556 - RNA, 22 nt, synthetic construct
  source 1..22: mol_type = other RNA
caccccatttctcagcaacttc

SEQ ID NO: 7557 - RNA, 22 nt, synthetic construct
  source 1..22: mol_type = other RNA
caccctcatctgtatacactaa

SEQ ID NO: 7558 - RNA, 22 nt, synthetic construct
  source 1..22: mol_type = other RNA
caccctctgtagcataaaatgt

SEQ ID NO: 7559 - RNA, 22 nt, synthetic construct
  source 1..22: mol_type = other RNA
caccctggtcaatatggggaaa

SEQ ID NO: 7560 - RNA, 22 nt, synthetic construct
  source 1..22: mol_type = other RNA
caccctgtgcaggtctcttccc

SEQ ID NO: 7561 - RNA, 22 nt, synthetic construct
  source 1..22: mol_type = other RNA
caccggacaggccaaatgagaa

SEQ ID NO: 7562 - RNA, 22 nt, synthetic construct
  source 1..22: mol_type = other RNA
caccggttctcatttggcctgt

SEQ ID NO: 7563 - RNA, 22 nt, synthetic construct
  source 1..22: mol_type = other RNA
caccgtctgcttgctagcctac

SEQ ID NO: 7564 - RNA, 22 nt, synthetic construct
  source 1..22: mol_type = other RNA
caccgtggtgacaagcaaggct

SEQ ID NO: 7565 - RNA, 22 nt, synthetic construct
  source 1..22: mol_type = other RNA
cacctaaatctgcatctgctcc

SEQ ID NO: 7566 - RNA, 22 nt, synthetic construct
  source 1..22: mol_type = other RNA
cacctacaaatacctggagcag

SEQ ID NO: 7567 - RNA, 22 nt, synthetic construct
  source 1..22: mol_type = other RNA
cacctagctgagactacaggtg

SEQ ID NO: 7568 - RNA, 22 nt, synthetic construct
  source 1..22: mol_type = other RNA
cacctgaacaagatgcagaacc

SEQ ID NO: 7569 - RNA, 22 nt, synthetic construct
  source 1..22: mol_type = other RNA
cacctgcatccctccgccaggg

SEQ ID NO: 7570 - RNA, 22 nt, synthetic construct
  source 1..22: mol_type = other RNA
cacctggccagttacttggttt

SEQ ID NO: 7571 - RNA, 22 nt, synthetic construct
  source 1..22: mol_type = other RNA
cacctgtagtctcagctaggtg

SEQ ID NO: 7572 - RNA, 22 nt, synthetic construct
  source 1..22: mol_type = other RNA
cacgacctaggaatccagtgag

SEQ ID NO: 7573 - RNA, 22 nt, synthetic construct
  source 1..22: mol_type = other RNA
cacgattccgatcgactgccaa

SEQ ID NO: 7574 - RNA, 22 nt, synthetic construct
  source 1..22: mol_type = other RNA
cacgcccagctagtctttgtat

SEQ ID NO: 7575 - RNA, 22 nt, synthetic construct
  source 1..22: mol_type = other RNA
cacggaagatgacagtcaactg

SEQ ID NO: 7576 - RNA, 22 nt, synthetic construct
  source 1..22: mol_type = other RNA
cacggctggatacctgtgtgtc

SEQ ID NO: 7577 - RNA, 22 nt, synthetic construct
  source 1..22: mol_type = other RNA
cacggtgctaggaaatccagtt

SEQ ID NO: 7578 - RNA, 22 nt, synthetic construct
  source 1..22: mol_type = other RNA
cacgtgagagaccctcgcaaaa

SEQ ID NO: 7579 - RNA, 22 nt, synthetic construct
  source 1..22: mol_type = other RNA
cacgtgcttcagtggccattac

SEQ ID NO: 7580 - RNA, 22 nt, synthetic construct
  source 1..22: mol_type = other RNA
cactaagctctctagaagacgc

SEQ ID NO: 7581 - RNA, 22 nt, synthetic construct
  source 1..22: mol_type = other RNA
cactaaggaaataatctgagaa

SEQ ID NO: 7582 - RNA, 22 nt, synthetic construct
  source 1..22: mol_type = other RNA
cactaaggagtgagtggcaaga

SEQ ID NO: 7583 - RNA, 22 nt, synthetic construct
  source 1..22: mol_type = other RNA
cactaatttcccagggctcatt

SEQ ID NO: 7584 - RNA, 22 nt, synthetic construct
  source 1..22: mol_type = other RNA
cactcactccttagtgaacagt

SEQ ID NO: 7585 - RNA, 22 nt, synthetic construct
  source 1..22: mol_type = other RNA
cactcctcgagtactggacatg

SEQ ID NO: 7586 - RNA, 22 nt, synthetic construct
  source 1..22: mol_type = other RNA
cactccttagtgaacagtggga

SEQ ID NO: 7587 - RNA, 22 nt, synthetic construct
  source 1..22: mol_type = other RNA
cactgaagcacgtgagagaccc

SEQ ID NO: 7588 - RNA, 22 nt, synthetic construct
  source 1..22: mol_type = other RNA
cactgcttactacctgggccag

SEQ ID NO: 7589 - RNA, 22 nt, synthetic construct
  source 1..22: mol_type = other RNA
cactggacttcaagaaactggt

SEQ ID NO: 7590 - RNA, 22 nt, synthetic construct
  source 1..22: mol_type = other RNA
cactggattcctaggtcgtgtt

SEQ ID NO: 7591 - RNA, 22 nt, synthetic construct
  source 1..22: mol_type = other RNA
cactgtcctggcttttatttaa

SEQ ID NO: 7592 - RNA, 22 nt, synthetic construct
  source 1..22: mol_type = other RNA
cactgttcactaaggagtgagt

SEQ ID NO: 7593 - RNA, 22 nt, synthetic construct
  source 1..22: mol_type = other RNA
cacttccattgtattgtctgac

SEQ ID NO: 7594 - RNA, 22 nt, synthetic construct
  source 1..22: mol_type = other RNA
cactttctaaatttcctgttgc

SEQ ID NO: 7595 - RNA, 22 nt, synthetic construct
  source 1..22: mol_type = other RNA
cagaaacagtctgcttcagcac

SEQ ID NO: 7596 - RNA, 22 nt, synthetic construct
  source 1..22: mol_type = other RNA
cagaaaccccacttccattgta

SEQ ID NO: 7597 - RNA, 22 nt, synthetic construct
  source 1..22: mol_type = other RNA
cagaaagtcatgtgaacatttt

SEQ ID NO: 7598 - RNA, 22 nt, synthetic construct
  source 1..22: mol_type = other RNA
cagaacagaaacagtctgcttc

SEQ ID NO: 7599 - RNA, 22 nt, synthetic construct
  source 1..22: mol_type = other RNA
cagaaccatggctatgagaacc

SEQ ID NO: 7600 - RNA, 22 nt, synthetic construct
  source 1..22: mol_type = other RNA
cagaactgaaaaagaccagaga

SEQ ID NO: 7601 - RNA, 22 nt, synthetic construct
  source 1..22: mol_type = other RNA
cagaagacagaacagaaacagt

SEQ ID NO: 7602 - RNA, 22 nt, synthetic construct
  source 1..22: mol_type = other RNA
cagaagagcgtcacctgaacaa

SEQ ID NO: 7603 - RNA, 22 nt, synthetic construct
  source 1..22: mol_type = other RNA
cagacaatacaatggaagtggg

SEQ ID NO: 7604 - RNA, 22 nt, synthetic construct
  source 1..22: mol_type = other RNA
cagacaccacaatgaccctcag

SEQ ID NO: 7605 - RNA, 22 nt, synthetic construct
  source 1..22: mol_type = other RNA
cagacgcagcccctggcagcgg

SEQ ID NO: 7606 - RNA, 22 nt, synthetic construct
  source 1..22: mol_type = other RNA
cagacggtgggaccaggggatc

SEQ ID NO: 7607 - RNA, 22 nt, synthetic construct
  source 1..22: mol_type = other RNA
cagactgtttctgttctgtctt

SEQ ID NO: 7608 - RNA, 22 nt, synthetic construct
  source 1..22: mol_type = other RNA
cagagatcccctggtcccaccg

SEQ ID NO: 7609 - RNA, 22 nt, synthetic construct
  source 1..22: mol_type = other RNA
cagagggtgaaaactcttttct

SEQ ID NO: 7610 - RNA, 22 nt, synthetic construct
  source 1..22: mol_type = other RNA
cagagtcccttgatccccaaat

SEQ ID NO: 7611 - RNA, 22 nt, synthetic construct
  source 1..22: mol_type = other RNA
cagatatttgatgtagttttct

SEQ ID NO: 7612 - RNA, 22 nt, synthetic construct
  source 1..22: mol_type = other RNA
cagatgcagatttaggtggcag

SEQ ID NO: 7613 - RNA, 22 nt, synthetic construct
  source 1..22: mol_type = other RNA
cagatgctggtcttagttattt

SEQ ID NO: 7614 - RNA, 22 nt, synthetic construct
  source 1..22: mol_type = other RNA
cagattatttccttagtgttcc

SEQ ID NO: 7615 - RNA, 22 nt, synthetic construct
  source 1..22: mol_type = other RNA
cagatttaggtggcagggagcg

SEQ ID NO: 7616 - RNA, 22 nt, synthetic construct
  source 1..22: mol_type = other RNA
cagcaaatggctcaggtctccc

SEQ ID NO: 7617 - RNA, 22 nt, synthetic construct
  source 1..22: mol_type = other RNA
cagcaacttcctgaaagctcat

SEQ ID NO: 7618 - RNA, 22 nt, synthetic construct
  source 1..22: mol_type = other RNA
cagcaccctgtgcaggtctctt

SEQ ID NO: 7619 - RNA, 22 nt, synthetic construct
  source 1..22: mol_type = other RNA
cagcactttctaaatttcctgt

SEQ ID NO: 7620 - RNA, 22 nt, synthetic construct
  source 1..22: mol_type = other RNA
cagcagaagacagaacagaaac

SEQ ID NO: 7621 - RNA, 22 nt, synthetic construct
  source 1..22: mol_type = other RNA
cagcagcatgtccagtactcga

SEQ ID NO: 7622 - RNA, 22 nt, synthetic construct
  source 1..22: mol_type = other RNA
cagcagcccgttcccaccggac

SEQ ID NO: 7623 - RNA, 22 nt, synthetic construct
  source 1..22: mol_type = other RNA
cagcagccgctgccaggggctg

SEQ ID NO: 7624 - RNA, 22 nt, synthetic construct
  source 1..22: mol_type = other RNA
cagcaggagataaaaccaagta

SEQ ID NO: 7625 - RNA, 22 nt, synthetic construct
  source 1..22: mol_type = other RNA
cagcagtaggctagcaagcaga

SEQ ID NO: 7626 - RNA, 22 nt, synthetic construct
  source 1..22: mol_type = other RNA
cagcatctgcactaatttccca

SEQ ID NO: 7627 - RNA, 22 nt, synthetic construct
  source 1..22: mol_type = other RNA
cagcatgtccagtactcgagga

SEQ ID NO: 7628 - RNA, 22 nt, synthetic construct
  source 1..22: mol_type = other RNA
cagccaaggcaagccagtcagc

SEQ ID NO: 7629 - RNA, 22 nt, synthetic construct
  source 1..22: mol_type = other RNA
cagccagcagcccgttcccacc

SEQ ID NO: 7630 - RNA, 22 nt, synthetic construct
  source 1..22: mol_type = other RNA
cagcccctgccacaaggggctg

SEQ ID NO: 7631 - RNA, 22 nt, synthetic construct
  source 1..22: mol_type = other RNA
cagcccctggcagcggctgctg

SEQ ID NO: 7632 - RNA, 22 nt, synthetic construct
  source 1..22: mol_type = other RNA
cagccccttgtggcaggggctg

SEQ ID NO: 7633 - RNA, 22 nt, synthetic construct
  source 1..22: mol_type = other RNA
cagcccgttcccaccggacagg

SEQ ID NO: 7634 - RNA, 22 nt, synthetic construct
  source 1..22: mol_type = other RNA
cagccctggcggagggatgcag

SEQ ID NO: 7635 - RNA, 22 nt, synthetic construct
  source 1..22: mol_type = other RNA
cagccgctgccaggggctgcgt

SEQ ID NO: 7636 - RNA, 22 nt, synthetic construct
  source 1..22: mol_type = other RNA
cagccgtggaaacactggactt

SEQ ID NO: 7637 - RNA, 22 nt, synthetic construct
  source 1..22: mol_type = other RNA
cagcctcattcactgtcctggc

SEQ ID NO: 7638 - RNA, 22 nt, synthetic construct
  source 1..22: mol_type = other RNA
cagcctcccacctagctgagac

SEQ ID NO: 7639 - RNA, 22 nt, synthetic construct
  source 1..22: mol_type = other RNA
cagcctgcatataagtctatta

SEQ ID NO: 7640 - RNA, 22 nt, synthetic construct
  source 1..22: mol_type = other RNA
cagcgagactgtctccaaaaaa

SEQ ID NO: 7641 - RNA, 22 nt, synthetic construct
  source 1..22: mol_type = other RNA
cagcgcactgcaacctctgtct

SEQ ID NO: 7642 - RNA, 22 nt, synthetic construct
  source 1..22: mol_type = other RNA
cagcggctgctgcttggcagtc

SEQ ID NO: 7643 - RNA, 22 nt, synthetic construct
  source 1..22: mol_type = other RNA
cagcgtcttctagagagcttag

SEQ ID NO: 7644 - RNA, 22 nt, synthetic construct
  source 1..22: mol_type = other RNA
cagctaggccagtctccagcag

SEQ ID NO: 7645 - RNA, 22 nt, synthetic construct
  source 1..22: mol_type = other RNA
cagctagtctttgtatttttat

SEQ ID NO: 7646 - RNA, 22 nt, synthetic construct
  source 1..22: mol_type = other RNA
caggaaatttagaaagtgctga

SEQ ID NO: 7647 - RNA, 22 nt, synthetic construct
  source 1..22: mol_type = other RNA
caggaagttgctgagaaatggg

SEQ ID NO: 7648 - RNA, 22 nt, synthetic construct
  source 1..22: mol_type = other RNA
caggacagtgaatgaggctgaa

SEQ ID NO: 7649 - RNA, 22 nt, synthetic construct
  source 1..22: mol_type = other RNA
caggacttttatggagacacac

SEQ ID NO: 7650 - RNA, 22 nt, synthetic construct
  source 1..22: mol_type = other RNA
caggagaaagaaaataagggga

SEQ ID NO: 7651 - RNA, 22 nt, synthetic construct
  source 1..22: mol_type = other RNA
caggagataaaaccaagtaact

SEQ ID NO: 7652 - RNA, 22 nt, synthetic construct
  source 1..22: mol_type = other RNA
caggaggtcaggatgtcagacg

SEQ ID NO: 7653 - RNA, 22 nt, synthetic construct
  source 1..22: mol_type = other RNA
caggatgtcagacgcagcccct

SEQ ID NO: 7654 - RNA, 22 nt, synthetic construct
  source 1..22: mol_type = other RNA
caggatttgagatcaccctggt

SEQ ID NO: 7655 - RNA, 22 nt, synthetic construct
  source 1..22: mol_type = other RNA
caggccaaatgagaaccggtgg

SEQ ID NO: 7656 - RNA, 22 nt, synthetic construct
  source 1..22: mol_type = other RNA
caggctgtcgttccggttatgt

SEQ ID NO: 7657 - RNA, 22 nt, synthetic construct
  source 1..22: mol_type = other RNA
cagggctcattaaggtccttac

SEQ ID NO: 7658 - RNA, 22 nt, synthetic construct
  source 1..22: mol_type = other RNA
cagggctctcgtttcgaaagca

SEQ ID NO: 7659 - RNA, 22 nt, synthetic construct
  source 1..22: mol_type = other RNA
caggggatctctggtctttttc

SEQ ID NO: 7660 - RNA, 22 nt, synthetic construct
  source 1..22: mol_type = other RNA
caggggattgtgcagcaaatgg

SEQ ID NO: 7661 - RNA, 22 nt, synthetic construct
  source 1..22: mol_type = other RNA
caggggctgatttccaaaaaca

SEQ ID NO: 7662 - RNA, 22 nt, synthetic construct
  source 1..22: mol_type = other RNA
caggggctgcgtctgacatcct

SEQ ID NO: 7663 - RNA, 22 nt, synthetic construct
  source 1..22: mol_type = other RNA
cagggtgctgggagacctgagc

SEQ ID NO: 7664 - RNA, 22 nt, synthetic construct
  source 1..22: mol_type = other RNA
caggtagtaagcagtggcgccg

SEQ ID NO: 7665 - RNA, 22 nt, synthetic construct
  source 1..22: mol_type = other RNA
caggtatccagccgtggaaaca

SEQ ID NO: 7666 - RNA, 22 nt, synthetic construct
  source 1..22: mol_type = other RNA
caggtatttgtaggtggggttc

SEQ ID NO: 7667 - RNA, 22 nt, synthetic construct
  source 1..22: mol_type = other RNA
caggtctcccagcaccctgtgc

SEQ ID NO: 7668 - RNA, 22 nt, synthetic construct
  source 1..22: mol_type = other RNA
caggtctcttcccagacaccac

SEQ ID NO: 7669 - RNA, 22 nt, synthetic construct
  source 1..22: mol_type = other RNA
caggtgacgctcttctggggtg

SEQ ID NO: 7670 - RNA, 22 nt, synthetic construct
  source 1..22: mol_type = other RNA
caggtgggccggaagatcccac

SEQ ID NO: 7671 - RNA, 22 nt, synthetic construct
  source 1..22: mol_type = other RNA
caggttcccacccccaacccag

SEQ ID NO: 7672 - RNA, 22 nt, synthetic construct
  source 1..22: mol_type = other RNA
caggttgatccaatgctcaccc

SEQ ID NO: 7673 - RNA, 22 nt, synthetic construct
  source 1..22: mol_type = other RNA
caggttttgttcttccaggttg

SEQ ID NO: 7674 - RNA, 22 nt, synthetic construct
  source 1..22: mol_type = other RNA
cagtaaccagcagaagacagaa

SEQ ID NO: 7675 - RNA, 22 nt, synthetic construct
  source 1..22: mol_type = other RNA
cagtaaggaccttaatgagccc

SEQ ID NO: 7676 - RNA, 22 nt, synthetic construct
  source 1..22: mol_type = other RNA
cagtactcgaggagtgaagatg

SEQ ID NO: 7677 - RNA, 22 nt, synthetic construct
  source 1..22: mol_type = other RNA
cagtaggctagcaagcagacgg

SEQ ID NO: 7678 - RNA, 22 nt, synthetic construct
  source 1..22: mol_type = other RNA
cagtagtactttatatagtcct

SEQ ID NO: 7679 - RNA, 22 nt, synthetic construct
  source 1..22: mol_type = other RNA
cagtattccctttttaaatgag

SEQ ID NO: 7680 - RNA, 22 nt, synthetic construct
  source 1..22: mol_type = other RNA
cagtcaactggatttcctagca

SEQ ID NO: 7681 - RNA, 22 nt, synthetic construct
  source 1..22: mol_type = other RNA
cagtcagcagtaggctagcaag

SEQ ID NO: 7682 - RNA, 22 nt, synthetic construct
  source 1..22: mol_type = other RNA
cagtccaggaggtcaggatgtc

SEQ ID NO: 7683 - RNA, 22 nt, synthetic construct
  source 1..22: mol_type = other RNA
cagtcgatcggaatcgtgggat

SEQ ID NO: 7684 - RNA, 22 nt, synthetic construct
  source 1..22: mol_type = other RNA
cagtctccagcaggagataaaa

SEQ ID NO: 7685 - RNA, 22 nt, synthetic construct
  source 1..22: mol_type = other RNA
cagtctgcttcagcactttcta

SEQ ID NO: 7686 - RNA, 22 nt, synthetic construct
  source 1..22: mol_type = other RNA
cagtgaatgaggctgaagagtt

SEQ ID NO: 7687 - RNA, 22 nt, synthetic construct
  source 1..22: mol_type = other RNA
cagtgagtaactgaactgataa

SEQ ID NO: 7688 - RNA, 22 nt, synthetic construct
  source 1..22: mol_type = other RNA
cagtggccattacagttcccta

SEQ ID NO: 7689 - RNA, 22 nt, synthetic construct
  source 1..22: mol_type = other RNA
cagtggcgccgagccttgcttg

SEQ ID NO: 7690 - RNA, 22 nt, synthetic construct
  source 1..22: mol_type = other RNA
cagtgggaatgtccagagtccc

SEQ ID NO: 7691 - RNA, 22 nt, synthetic construct
  source 1..22: mol_type = other RNA
cagtgtttccacggctggatac

SEQ ID NO: 7692 - RNA, 22 nt, synthetic construct
  source 1..22: mol_type = other RNA
cagttactcactggattcctag

SEQ ID NO: 7693 - RNA, 22 nt, synthetic construct
  source 1..22: mol_type = other RNA
cagttacttggttttatctcct

SEQ ID NO: 7694 - RNA, 22 nt, synthetic construct
  source 1..22: mol_type = other RNA
cagttcagttactcactggatt

SEQ ID NO: 7695 - RNA, 22 nt, synthetic construct
  source 1..22: mol_type = other RNA
cagttccctattccaccccatt

SEQ ID NO: 7696 - RNA, 22 nt, synthetic construct
  source 1..22: mol_type = other RNA
cagttctacagtagtactttat

SEQ ID NO: 7697 - RNA, 22 nt, synthetic construct
  source 1..22: mol_type = other RNA
cagttctgaaattctacagcta

SEQ ID NO: 7698 - RNA, 22 nt, synthetic construct
  source 1..22: mol_type = other RNA
cagttgactgtcatcttccgtg

SEQ ID NO: 7699 - RNA, 22 nt, synthetic construct
  source 1..22: mol_type = other RNA
cagtttcttgaagtccagtgtt

SEQ ID NO: 7700 - RNA, 22 nt, synthetic construct
  source 1..22: mol_type = other RNA
cataaaagtcctgtcaccaagg

SEQ ID NO: 7701 - RNA, 22 nt, synthetic construct
  source 1..22: mol_type = other RNA
cataaaatgttcacatgacttt

SEQ ID NO: 7702 - RNA, 22 nt, synthetic construct
  source 1..22: mol_type = other RNA
cataaccggaacgacagcctgc

SEQ ID NO: 7703 - RNA, 22 nt, synthetic construct
  source 1..22: mol_type = other RNA
catagccaaggcccaaactaat

SEQ ID NO: 7704 - RNA, 22 nt, synthetic construct
  source 1..22: mol_type = other RNA
catagccatggttctgcatctt

SEQ ID NO: 7705 - RNA, 22 nt, synthetic construct
  source 1..22: mol_type = other RNA
catattgaccagggtgatctca

SEQ ID NO: 7706 - RNA, 22 nt, synthetic construct
  source 1..22: mol_type = other RNA
catcaaatatctgcaatagatc

SEQ ID NO: 7707 - RNA, 22 nt, synthetic construct
  source 1..22: mol_type = other RNA
catcattttgcgagggtctctc

SEQ ID NO: 7708 - RNA, 22 nt, synthetic construct
  source 1..22: mol_type = other RNA
catccctccgccagggctgccg

SEQ ID NO: 7709 - RNA, 22 nt, synthetic construct
  source 1..22: mol_type = other RNA
catcctgacctcctggactgta

SEQ ID NO: 7710 - RNA, 22 nt, synthetic construct
  source 1..22: mol_type = other RNA
catctgcactaatttcccaggg

SEQ ID NO: 7711 - RNA, 22 nt, synthetic construct
  source 1..22: mol_type = other RNA
catctgctccaggtatttgtag

SEQ ID NO: 7712 - RNA, 22 nt, synthetic construct
  source 1..22: mol_type = other RNA
catctgtatacactaagctctc

SEQ ID NO: 7713 - RNA, 22 nt, synthetic construct
  source 1..22: mol_type = other RNA
catcttcactcctcgagtactg

SEQ ID NO: 7714 - RNA, 22 nt, synthetic construct
  source 1..22: mol_type = other RNA
catcttccgtgagggctaagct

SEQ ID NO: 7715 - RNA, 22 nt, synthetic construct
  source 1..22: mol_type = other RNA
catcttgttcaggtgacgctct

SEQ ID NO: 7716 - RNA, 22 nt, synthetic construct
  source 1..22: mol_type = other RNA
catgactttctgacattcatag

SEQ ID NO: 7717 - RNA, 22 nt, synthetic construct
  source 1..22: mol_type = other RNA
catgagctactgcacctggcca

SEQ ID NO: 7718 - RNA, 22 nt, synthetic construct
  source 1..22: mol_type = other RNA
catgctgctgttatcagttcag

SEQ ID NO: 7719 - RNA, 22 nt, synthetic construct
  source 1..22: mol_type = other RNA
catggctatgagaaccccacct

SEQ ID NO: 7720 - RNA, 22 nt, synthetic construct
  source 1..22: mol_type = other RNA
catggttctgcatcttgttcag

SEQ ID NO: 7721 - RNA, 22 nt, synthetic construct
  source 1..22: mol_type = other RNA
catgtccagtactcgaggagtg

SEQ ID NO: 7722 - RNA, 22 nt, synthetic construct
  source 1..22: mol_type = other RNA
catgtgaacattttatgctaca

SEQ ID NO: 7723 - RNA, 22 nt, synthetic construct
  source 1..22: mol_type = other RNA
catgtgtcagacaatacaatgg

SEQ ID NO: 7724 - RNA, 22 nt, synthetic construct
  source 1..22: mol_type = other RNA
cattaaggtccttactgtattt

SEQ ID NO: 7725 - RNA, 22 nt, synthetic construct
  source 1..22: mol_type = other RNA
cattacagttccctattccacc

SEQ ID NO: 7726 - RNA, 22 nt, synthetic construct
  source 1..22: mol_type = other RNA
cattagtttgggccttggctat

SEQ ID NO: 7727 - RNA, 22 nt, synthetic construct
  source 1..22: mol_type = other RNA
cattcactgtcctggcttttat

SEQ ID NO: 7728 - RNA, 22 nt, synthetic construct
  source 1..22: mol_type = other RNA
cattcatagccaaggcccaaac

SEQ ID NO: 7729 - RNA, 22 nt, synthetic construct
  source 1..22: mol_type = other RNA
cattcccactgttcactaagga

SEQ ID NO: 7730 - RNA, 22 nt, synthetic construct
  source 1..22: mol_type = other RNA
cattcttttaaatgggtgaaaa

SEQ ID NO: 7731 - RNA, 22 nt, synthetic construct
  source 1..22: mol_type = other RNA
cattgcctctttgatcccctta

SEQ ID NO: 7732 - RNA, 22 nt, synthetic construct
  source 1..22: mol_type = other RNA
cattggatcaacctggaagaac

SEQ ID NO: 7733 - RNA, 22 nt, synthetic construct
  source 1..22: mol_type = other RNA
cattgtattgtctgacacatgc

SEQ ID NO: 7734 - RNA, 22 nt, synthetic construct
  source 1..22: mol_type = other RNA
cattgtggtgtctgggaagaga

SEQ ID NO: 7735 - RNA, 22 nt, synthetic construct
  source 1..22: mol_type = other RNA
catttaaaaagggaatactgcc

SEQ ID NO: 7736 - RNA, 22 nt, synthetic construct
  source 1..22: mol_type = other RNA
catttaaaagaatggaaattgc

SEQ ID NO: 7737 - RNA, 22 nt, synthetic construct
  source 1..22: mol_type = other RNA
catttctcagcaacttcctgaa

SEQ ID NO: 7738 - RNA, 22 nt, synthetic construct
  source 1..22: mol_type = other RNA
catttgctgcacaatcccctga

SEQ ID NO: 7739 - RNA, 22 nt, synthetic construct
  source 1..22: mol_type = other RNA
catttggcctgtccggtgggaa

SEQ ID NO: 7740 - RNA, 22 nt, synthetic construct
  source 1..22: mol_type = other RNA
catttggtcctcaggggattgt

SEQ ID NO: 7741 - RNA, 22 nt, synthetic construct
  source 1..22: mol_type = other RNA
cattttatgctacagagggtga

SEQ ID NO: 7742 - RNA, 22 nt, synthetic construct
  source 1..22: mol_type = other RNA
cattttattccagcgtcttcta

SEQ ID NO: 7743 - RNA, 22 nt, synthetic construct
  source 1..22: mol_type = other RNA
cattttgcgagggtctctcacg

SEQ ID NO: 7744 - RNA, 22 nt, synthetic construct
  source 1..22: mol_type = other RNA
catttttcacccatttaaaaga

SEQ ID NO: 7745 - RNA, 22 nt, synthetic construct
  source 1..22: mol_type = other RNA
ccaaaaaaccaaaaaaccaaaa

SEQ ID NO: 7746 - RNA, 22 nt, synthetic construct
  source 1..22: mol_type = other RNA
ccaaaaaaccaaaacaaacaaa

SEQ ID NO: 7747 - RNA, 22 nt, synthetic construct
  source 1..22: mol_type = other RNA
ccaaaaacacgacctaggaatc

SEQ ID NO: 7748 - RNA, 22 nt, synthetic construct
  source 1..22: mol_type = other RNA
ccaaactaatgttgaaagttgg

SEQ ID NO: 7749 - RNA, 22 nt, synthetic construct
  source 1..22: mol_type = other RNA
ccaaatataaatacagtaagga

SEQ ID NO: 7750 - RNA, 22 nt, synthetic construct
  source 1..22: mol_type = other RNA
ccaaatgagaaccggtggtgaa

SEQ ID NO: 7751 - RNA, 22 nt, synthetic construct
  source 1..22: mol_type = other RNA
ccaaatgcagccagcagcccgt

SEQ ID NO: 7752 - RNA, 22 nt, synthetic construct
  source 1..22: mol_type = other RNA
ccaactttcaacattagtttgg

SEQ ID NO: 7753 - RNA, 22 nt, synthetic construct
  source 1..22: mol_type = other RNA
ccaagcagcagccgctgccagg

SEQ ID NO: 7754 - RNA, 22 nt, synthetic construct
  source 1..22: mol_type = other RNA
ccaaggacgttaaaggcatttt

SEQ ID NO: 7755 - RNA, 22 nt, synthetic construct
  source 1..22: mol_type = other RNA
ccaaggcaagccagtcagcagt

SEQ ID NO: 7756 - RNA, 22 nt, synthetic construct
  source 1..22: mol_type = other RNA
ccaaggcccaaactaatgttga

SEQ ID NO: 7757 - RNA, 22 nt, synthetic construct
  source 1..22: mol_type = other RNA
ccaagtaactggccaggtgcag

SEQ ID NO: 7758 - RNA, 22 nt, synthetic construct
  source 1..22: mol_type = other RNA
ccaatgctcaccccagaagagc

SEQ ID NO: 7759 - RNA, 22 nt, synthetic construct
  source 1..22: mol_type = other RNA
ccacaaggggctgttgccaact

SEQ ID NO: 7760 - RNA, 22 nt, synthetic construct
  source 1..22: mol_type = other RNA
ccacaatgaccctcaggttttg

SEQ ID NO: 7761 - RNA, 22 nt, synthetic construct
  source 1..22: mol_type = other RNA
ccacaggttcccacccccaacc

SEQ ID NO: 7762 - RNA, 22 nt, synthetic construct
  source 1..22: mol_type = other RNA
ccaccacgcccagctagtcttt

SEQ ID NO: 7763 - RNA, 22 nt, synthetic construct
  source 1..22: mol_type = other RNA
ccaccccatttctcagcaactt

SEQ ID NO: 7764 - RNA, 22 nt, synthetic construct
  source 1..22: mol_type = other RNA
ccaccggacaggccaaatgaga

SEQ ID NO: 7765 - RNA, 22 nt, synthetic construct
  source 1..22: mol_type = other RNA
ccaccggttctcatttggcctg

SEQ ID NO: 7766 - RNA, 22 nt, synthetic construct
  source 1..22: mol_type = other RNA
ccaccgtctgcttgctagccta

SEQ ID NO: 7767 - RNA, 22 nt, synthetic construct
  source 1..22: mol_type = other RNA
ccacctaaatctgcatctgctc

SEQ ID NO: 7768 - RNA, 22 nt, synthetic construct
  source 1..22: mol_type = other RNA
ccacctacaaatacctggagca

SEQ ID NO: 7769 - RNA, 22 nt, synthetic construct
  source 1..22: mol_type = other RNA
ccacctagctgagactacaggt

SEQ ID NO: 7770 - RNA, 22 nt, synthetic construct
  source 1..22: mol_type = other RNA
ccacctgcatccctccgccagg

SEQ ID NO: 7771 - RNA, 22 nt, synthetic construct
  source 1..22: mol_type = other RNA
ccacgattccgatcgactgcca

SEQ ID NO: 7772 - RNA, 22 nt, synthetic construct
  source 1..22: mol_type = other RNA
ccacgcccagctagtctttgta

SEQ ID NO: 7773 - RNA, 22 nt, synthetic construct
  source 1..22: mol_type = other RNA
ccacggctggatacctgtgtgt

SEQ ID NO: 7774 - RNA, 22 nt, synthetic construct
  source 1..22: mol_type = other RNA
ccacggtgctaggaaatccagt

SEQ ID NO: 7775 - RNA, 22 nt, synthetic construct
  source 1..22: mol_type = other RNA
ccactcactccttagtgaacag

SEQ ID NO: 7776 - RNA, 22 nt, synthetic construct
  source 1..22: mol_type = other RNA
ccactgaagcacgtgagagacc

SEQ ID NO: 7777 - RNA, 22 nt, synthetic construct
  source 1..22: mol_type = other RNA
ccactgcttactacctgggcca

SEQ ID NO: 7778 - RNA, 22 nt, synthetic construct
  source 1..22: mol_type = other RNA
ccactgttcactaaggagtgag

SEQ ID NO: 7779 - RNA, 22 nt, synthetic construct
  source 1..22: mol_type = other RNA
ccacttccattgtattgtctga

SEQ ID NO: 7780 - RNA, 22 nt, synthetic construct
  source 1..22: mol_type = other RNA
ccagaagagcgtcacctgaaca

SEQ ID NO: 7781 - RNA, 22 nt, synthetic construct
  source 1..22: mol_type = other RNA
ccagacaccacaatgaccctca

SEQ ID NO: 7782 - RNA, 22 nt, synthetic construct
  source 1..22: mol_type = other RNA
ccagagatcccctggtcccacc

SEQ ID NO: 7783 - RNA, 22 nt, synthetic construct
  source 1..22: mol_type = other RNA
ccagagtcccttgatccccaaa

SEQ ID NO: 7784 - RNA, 22 nt, synthetic construct
  source 1..22: mol_type = other RNA
ccagcaccctgtgcaggtctct

SEQ ID NO: 7785 - RNA, 22 nt, synthetic construct
  source 1..22: mol_type = other RNA
ccagcagaagacagaacagaaa

SEQ ID NO: 7786 - RNA, 22 nt, synthetic construct
  source 1..22: mol_type = other RNA
ccagcagcccgttcccaccgga

SEQ ID NO: 7787 - RNA, 22 nt, synthetic construct
  source 1..22: mol_type = other RNA
ccagcaggagataaaaccaagt

SEQ ID NO: 7788 - RNA, 22 nt, synthetic construct
  source 1..22: mol_type = other RNA
ccagcatctgcactaatttccc

SEQ ID NO: 7789 - RNA, 22 nt, synthetic construct
  source 1..22: mol_type = other RNA
ccagccaaggcaagccagtcag

SEQ ID NO: 7790 - RNA, 22 nt, synthetic construct
  source 1..22: mol_type = other RNA
ccagccgtggaaacactggact

SEQ ID NO: 7791 - RNA, 22 nt, synthetic construct
  source 1..22: mol_type = other RNA
ccagcgtcttctagagagctta

SEQ ID NO: 7792 - RNA, 22 nt, synthetic construct
  source 1..22: mol_type = other RNA
ccagctagtctttgtattttta

SEQ ID NO: 7793 - RNA, 22 nt, synthetic construct
  source 1..22: mol_type = other RNA
ccaggacagtgaatgaggctga

SEQ ID NO: 7794 - RNA, 22 nt, synthetic construct
  source 1..22: mol_type = other RNA
ccaggaggtcaggatgtcagac

SEQ ID NO: 7795 - RNA, 22 nt, synthetic construct
  source 1..22: mol_type = other RNA
ccagggctcattaaggtcctta

SEQ ID NO: 7796 - RNA, 22 nt, synthetic construct
  source 1..22: mol_type = other RNA
ccaggggatctctggtcttttt

SEQ ID NO: 7797 - RNA, 22 nt, synthetic construct
  source 1..22: mol_type = other RNA
ccaggggctgcgtctgacatcc

SEQ ID NO: 7798 - RNA, 22 nt, synthetic construct
  source 1..22: mol_type = other RNA
ccaggtagtaagcagtggcgcc

SEQ ID NO: 7799 - RNA, 22 nt, synthetic construct
  source 1..22: mol_type = other RNA
ccaggtatttgtaggtggggtt

SEQ ID NO: 7800 - RNA, 22 nt, synthetic construct
  source 1..22: mol_type = other RNA
ccaggttgatccaatgctcacc

SEQ ID NO: 7801 - RNA, 22 nt, synthetic construct
  source 1..22: mol_type = other RNA
ccagtactcgaggagtgaagat

SEQ ID NO: 7802 - RNA, 22 nt, synthetic construct
  source 1..22: mol_type = other RNA
ccagtcagcagtaggctagcaa

SEQ ID NO: 7803 - RNA, 22 nt, synthetic construct
  source 1..22: mol_type = other RNA
ccagtctccagcaggagataaa

SEQ ID NO: 7804 - RNA, 22 nt, synthetic construct
  source 1..22: mol_type = other RNA
ccagtgagtaactgaactgata

SEQ ID NO: 7805 - RNA, 22 nt, synthetic construct
  source 1..22: mol_type = other RNA
ccagtgtttccacggctggata

SEQ ID NO: 7806 - RNA, 22 nt, synthetic construct
  source 1..22: mol_type = other RNA
ccagttacttggttttatctcc

SEQ ID NO: 7807 - RNA, 22 nt, synthetic construct
  source 1..22: mol_type = other RNA
ccagttgactgtcatcttccgt

SEQ ID NO: 7808 - RNA, 22 nt, synthetic construct
  source 1..22: mol_type = other RNA
ccagtttcttgaagtccagtgt

SEQ ID NO: 7809 - RNA, 22 nt, synthetic construct
  source 1..22: mol_type = other RNA
ccataaaagtcctgtcaccaag

SEQ ID NO: 7810 - RNA, 22 nt, synthetic construct
  source 1..22: mol_type = other RNA
ccatattgaccagggtgatctc

SEQ ID NO: 7811 - RNA, 22 nt, synthetic construct
  source 1..22: mol_type = other RNA
ccatggctatgagaaccccacc

SEQ ID NO: 7812 - RNA, 22 nt, synthetic construct
  source 1..22: mol_type = other RNA
ccatggttctgcatcttgttca

SEQ ID NO: 7813 - RNA, 22 nt, synthetic construct
  source 1..22: mol_type = other RNA
ccattacagttccctattccac

SEQ ID NO: 7814 - RNA, 22 nt, synthetic construct
  source 1..22: mol_type = other RNA
ccattcttttaaatgggtgaaa

SEQ ID NO: 7815 - RNA, 22 nt, synthetic construct
  source 1..22: mol_type = other RNA
ccattgtattgtctgacacatg

SEQ ID NO: 7816 - RNA, 22 nt, synthetic construct
  source 1..22: mol_type = other RNA
ccatttaaaagaatggaaattg

SEQ ID NO: 7817 - RNA, 22 nt, synthetic construct
  source 1..22: mol_type = other RNA
ccatttattatatattgagagc

SEQ ID NO: 7818 - RNA, 22 nt, synthetic construct
  source 1..22: mol_type = other RNA
ccatttctcagcaacttcctga

SEQ ID NO: 7819 - RNA, 22 nt, synthetic construct
  source 1..22: mol_type = other RNA
ccatttgctgcacaatcccctg

SEQ ID NO: 7820 - RNA, 22 nt, synthetic construct
  source 1..22: mol_type = other RNA
ccatttttcacccatttaaaag

SEQ ID NO: 7821 - RNA, 22 nt, synthetic construct
  source 1..22: mol_type = other RNA
cccaaactaatgttgaaagttg

SEQ ID NO: 7822 - RNA, 22 nt, synthetic construct
  source 1..22: mol_type = other RNA
cccaaatataaatacagtaagg

SEQ ID NO: 7823 - RNA, 22 nt, synthetic construct
  source 1..22: mol_type = other RNA
cccaccggacaggccaaatgag

SEQ ID NO: 7824 - RNA, 22 nt, synthetic construct
  source 1..22: mol_type = other RNA
cccaccgtctgcttgctagcct

SEQ ID NO: 7825 - RNA, 22 nt, synthetic construct
  source 1..22: mol_type = other RNA
cccacctacaaatacctggagc

SEQ ID NO: 7826 - RNA, 22 nt, synthetic construct
  source 1..22: mol_type = other RNA
cccacctagctgagactacagg

SEQ ID NO: 7827 - RNA, 22 nt, synthetic construct
  source 1..22: mol_type = other RNA
cccacctgcatccctccgccag

SEQ ID NO: 7828 - RNA, 22 nt, synthetic construct
  source 1..22: mol_type = other RNA
cccacgattccgatcgactgcc

SEQ ID NO: 7829 - RNA, 22 nt, synthetic construct
  source 1..22: mol_type = other RNA
cccactgttcactaaggagtga

SEQ ID NO: 7830 - RNA, 22 nt, synthetic construct
  source 1..22: mol_type = other RNA
cccacttccattgtattgtctg

SEQ ID NO: 7831 - RNA, 22 nt, synthetic construct
  source 1..22: mol_type = other RNA
cccagaagagcgtcacctgaac

SEQ ID NO: 7832 - RNA, 22 nt, synthetic construct
  source 1..22: mol_type = other RNA
cccagacaccacaatgaccctc

SEQ ID NO: 7833 - RNA, 22 nt, synthetic construct
  source 1..22: mol_type = other RNA
cccagcaccctgtgcaggtctc

SEQ ID NO: 7834 - RNA, 22 nt, synthetic construct
  source 1..22: mol_type = other RNA
cccagctagtctttgtattttt

SEQ ID NO: 7835 - RNA, 22 nt, synthetic construct
  source 1..22: mol_type = other RNA
cccagggctcattaaggtcctt

SEQ ID NO: 7836 - RNA, 22 nt, synthetic construct
  source 1..22: mol_type = other RNA
cccaggtagtaagcagtggcgc

SEQ ID NO: 7837 - RNA, 22 nt, synthetic construct
  source 1..22: mol_type = other RNA
cccatattgaccagggtgatct

SEQ ID NO: 7838 - RNA, 22 nt, synthetic construct
  source 1..22: mol_type = other RNA
cccatttaaaagaatggaaatt

SEQ ID NO: 7839 - RNA, 22 nt, synthetic construct
  source 1..22: mol_type = other RNA
cccatttattatatattgagag

SEQ ID NO: 7840 - RNA, 22 nt, synthetic construct
  source 1..22: mol_type = other RNA
cccatttctcagcaacttcctg

SEQ ID NO: 7841 - RNA, 22 nt, synthetic construct
  source 1..22: mol_type = other RNA
ccccaaatataaatacagtaag

SEQ ID NO: 7842 - RNA, 22 nt, synthetic construct
  source 1..22: mol_type = other RNA
ccccacctacaaatacctggag

SEQ ID NO: 7843 - RNA, 22 nt, synthetic construct
  source 1..22: mol_type = other RNA
ccccacttccattgtattgtct

SEQ ID NO: 7844 - RNA, 22 nt, synthetic construct
  source 1..22: mol_type = other RNA
ccccagaagagcgtcacctgaa

SEQ ID NO: 7845 - RNA, 22 nt, synthetic construct
  source 1..22: mol_type = other RNA
ccccatattgaccagggtgatc

SEQ ID NO: 7846 - RNA, 22 nt, synthetic construct
  source 1..22: mol_type = other RNA
ccccatttctcagcaacttcct

SEQ ID NO: 7847 - RNA, 22 nt, synthetic construct
  source 1..22: mol_type = other RNA
cccctgaggaccaaatgcagcc

SEQ ID NO: 7848 - RNA, 22 nt, synthetic construct
  source 1..22: mol_type = other RNA
cccctgccacaaggggctgttg

SEQ ID NO: 7849 - RNA, 22 nt, synthetic construct
  source 1..22: mol_type = other RNA
cccctggcagcggctgctgctt

SEQ ID NO: 7850 - RNA, 22 nt, synthetic construct
  source 1..22: mol_type = other RNA
cccctggtcccaccgtctgctt

SEQ ID NO: 7851 - RNA, 22 nt, synthetic construct
  source 1..22: mol_type = other RNA
ccccttattttctttctcctgt

SEQ ID NO: 7852 - RNA, 22 nt, synthetic construct
  source 1..22: mol_type = other RNA
ccccttgtggcaggggctgatt

SEQ ID NO: 7853 - RNA, 22 nt, synthetic construct
  source 1..22: mol_type = other RNA
cccgggagacagaggttgcagt

SEQ ID NO: 7854 - RNA, 22 nt, synthetic construct
  source 1..22: mol_type = other RNA
cccgttcccaccggacaggcca

SEQ ID NO: 7855 - RNA, 22 nt, synthetic construct
  source 1..22: mol_type = other RNA
ccctattccaccccatttctca

SEQ ID NO: 7856 - RNA, 22 nt, synthetic construct
  source 1..22: mol_type = other RNA
ccctcacggaagatgacagtca

SEQ ID NO: 7857 - RNA, 22 nt, synthetic construct
  source 1..22: mol_type = other RNA
ccctcaggttttgttcttccag

SEQ ID NO: 7858 - RNA, 22 nt, synthetic construct
  source 1..22: mol_type = other RNA
ccctcatctgtatacactaagc

SEQ ID NO: 7859 - RNA, 22 nt, synthetic construct
  source 1..22: mol_type = other RNA
ccctcgcaaaatgatgtgaaag

SEQ ID NO: 7860 - RNA, 22 nt, synthetic construct
  source 1..22: mol_type = other RNA
ccctctgtagcataaaatgttc

SEQ ID NO: 7861 - RNA, 22 nt, synthetic construct
  source 1..22: mol_type = other RNA
ccctgaaagcttagccctcacg

SEQ ID NO: 7862 - RNA, 22 nt, synthetic construct
  source 1..22: mol_type = other RNA
ccctgaggaccaaatgcagcca

SEQ ID NO: 7863 - RNA, 22 nt, synthetic construct
  source 1..22: mol_type = other RNA
ccctgccacaaggggctgttgc

SEQ ID NO: 7864 - RNA, 22 nt, synthetic construct
  source 1..22: mol_type = other RNA
ccctgccacctaaatctgcatc

SEQ ID NO: 7865 - RNA, 22 nt, synthetic construct
  source 1..22: mol_type = other RNA
ccctggcagcggctgctgcttg

SEQ ID NO: 7866 - RNA, 22 nt, synthetic construct
  source 1..22: mol_type = other RNA
ccctggcggagggatgcaggtg

SEQ ID NO: 7867 - RNA, 22 nt, synthetic construct
  source 1..22: mol_type = other RNA
ccctgggaaattagtgcagatg

SEQ ID NO: 7868 - RNA, 22 nt, synthetic construct
  source 1..22: mol_type = other RNA
ccctggtcaatatggggaaatc

SEQ ID NO: 7869 - RNA, 22 nt, synthetic construct
  source 1..22: mol_type = other RNA
ccctggtcccaccgtctgcttg

SEQ ID NO: 7870 - RNA, 22 nt, synthetic construct
  source 1..22: mol_type = other RNA
ccctgtgcaggtctcttcccag

SEQ ID NO: 7871 - RNA, 22 nt, synthetic construct
  source 1..22: mol_type = other RNA
cccttattttctttctcctgtg

SEQ ID NO: 7872 - RNA, 22 nt, synthetic construct
  source 1..22: mol_type = other RNA
cccttgatccccaaatataaat

SEQ ID NO: 7873 - RNA, 22 nt, synthetic construct
  source 1..22: mol_type = other RNA
cccttgtggcaggggctgattt

SEQ ID NO: 7874 - RNA, 22 nt, synthetic construct
  source 1..22: mol_type = other RNA
ccctttttaaatgagctttcag

SEQ ID NO: 7875 - RNA, 22 nt, synthetic construct
  source 1..22: mol_type = other RNA
ccgagccttgcttgtcaccacg

SEQ ID NO: 7876 - RNA, 22 nt, synthetic construct
  source 1..22: mol_type = other RNA
ccgatcgactgccaagcagcag

SEQ ID NO: 7877 - RNA, 22 nt, synthetic construct
  source 1..22: mol_type = other RNA
ccgcgctccctgccacctaaat

SEQ ID NO: 7878 - RNA, 22 nt, synthetic construct
  source 1..22: mol_type = other RNA
ccgctgccaggggctgcgtctg

SEQ ID NO: 7879 - RNA, 22 nt, synthetic construct
  source 1..22: mol_type = other RNA
ccggaacgacagcctgcatata

SEQ ID NO: 7880 - RNA, 22 nt, synthetic construct
  source 1..22: mol_type = other RNA
ccggaagatcccacgattccga

SEQ ID NO: 7881 - RNA, 22 nt, synthetic construct
  source 1..22: mol_type = other RNA
ccggacaggccaaatgagaacc

SEQ ID NO: 7882 - RNA, 22 nt, synthetic construct
  source 1..22: mol_type = other RNA
ccggcccacctgcatccctccg

SEQ ID NO: 7883 - RNA, 22 nt, synthetic construct
  source 1..22: mol_type = other RNA
ccgggagacagaggttgcagtg

SEQ ID NO: 7884 - RNA, 22 nt, synthetic construct
  source 1..22: mol_type = other RNA
ccggtgggaacgggctgctggc

SEQ ID NO: 7885 - RNA, 22 nt, synthetic construct
  source 1..22: mol_type = other RNA
ccggtggtgaaacacaggagaa

SEQ ID NO: 7886 - RNA, 22 nt, synthetic construct
  source 1..22: mol_type = other RNA
ccggttatgttgtgtaagtcaa

SEQ ID NO: 7887 - RNA, 22 nt, synthetic construct
  source 1..22: mol_type = other RNA
ccggttctcatttggcctgtcc

SEQ ID NO: 7888 - RNA, 22 nt, synthetic construct
  source 1..22: mol_type = other RNA
ccgtctgcttgctagcctactg

SEQ ID NO: 7889 - RNA, 22 nt, synthetic construct
  source 1..22: mol_type = other RNA
ccgtgagggctaagctttcagg

SEQ ID NO: 7890 - RNA, 22 nt, synthetic construct
  source 1..22: mol_type = other RNA
ccgtggaaacactggacttcaa

SEQ ID NO: 7891 - RNA, 22 nt, synthetic construct
  source 1..22: mol_type = other RNA
ccgtggtgacaagcaaggctcg

SEQ ID NO: 7892 - RNA, 22 nt, synthetic construct
  source 1..22: mol_type = other RNA
ccgttcccaccggacaggccaa

SEQ ID NO: 7893 - RNA, 22 nt, synthetic construct
  source 1..22: mol_type = other RNA
cctaaatctgcatctgctccag

SEQ ID NO: 7894 - RNA, 22 nt, synthetic construct
  source 1..22: mol_type = other RNA
cctacaaatacctggagcagat

SEQ ID NO: 7895 - RNA, 22 nt, synthetic construct
  source 1..22: mol_type = other RNA
cctacagtccaggaggtcagga

SEQ ID NO: 7896 - RNA, 22 nt, synthetic construct
  source 1..22: mol_type = other RNA
cctactgctgactggcttgcct

SEQ ID NO: 7897 - RNA, 22 nt, synthetic construct
  source 1..22: mol_type = other RNA
cctagcaccgtggtgacaagca

SEQ ID NO: 7898 - RNA, 22 nt, synthetic construct
  source 1..22: mol_type = other RNA
cctagctgtagaatttcagaac

SEQ ID NO: 7899 - RNA, 22 nt, synthetic construct
  source 1..22: mol_type = other RNA
cctaggaatccagtgagtaact

SEQ ID NO: 7900 - RNA, 22 nt, synthetic construct
  source 1..22: mol_type = other RNA
cctaggtcgtgtttttggaaat

SEQ ID NO: 7901 - RNA, 22 nt, synthetic construct
  source 1..22: mol_type = other RNA
cctattaattccacaggttccc

SEQ ID NO: 7902 - RNA, 22 nt, synthetic construct
  source 1..22: mol_type = other RNA
cctattccaccccatttctcag

SEQ ID NO: 7903 - RNA, 22 nt, synthetic construct
  source 1..22: mol_type = other RNA
cctcacggaagatgacagtcaa

SEQ ID NO: 7904 - RNA, 22 nt, synthetic construct
  source 1..22: mol_type = other RNA
cctcagcctcccacctagctga

SEQ ID NO: 7905 - RNA, 22 nt, synthetic construct
  source 1..22: mol_type = other RNA
cctcaggggattgtgcagcaaa

SEQ ID NO: 7906 - RNA, 22 nt, synthetic construct
  source 1..22: mol_type = other RNA
cctcaggttttgttcttccagg

SEQ ID NO: 7907 - RNA, 22 nt, synthetic construct
  source 1..22: mol_type = other RNA
cctcatctgtatacactaagct

SEQ ID NO: 7908 - RNA, 22 nt, synthetic construct
  source 1..22: mol_type = other RNA
cctcattcactgtcctggcttt

SEQ ID NO: 7909 - RNA, 22 nt, synthetic construct
  source 1..22: mol_type = other RNA
cctcccacctagctgagactac

SEQ ID NO: 7910 - RNA, 22 nt, synthetic construct
  source 1..22: mol_type = other RNA
cctcctggactgtaggactata

SEQ ID NO: 7911 - RNA, 22 nt, synthetic construct
  source 1..22: mol_type = other RNA
cctcgagtactggacatgctgc

SEQ ID NO: 7912 - RNA, 22 nt, synthetic construct
  source 1..22: mol_type = other RNA
cctcgcaaaatgatgtgaaagg

SEQ ID NO: 7913 - RNA, 22 nt, synthetic construct
  source 1..22: mol_type = other RNA
cctctgtagcataaaatgttca

SEQ ID NO: 7914 - RNA, 22 nt, synthetic construct
  source 1..22: mol_type = other RNA
cctctttgatccccttattttc

SEQ ID NO: 7915 - RNA, 22 nt, synthetic construct
  source 1..22: mol_type = other RNA
cctgaaagctcatttaaaaagg

SEQ ID NO: 7916 - RNA, 22 nt, synthetic construct
  source 1..22: mol_type = other RNA
cctgaaagcttagccctcacgg

SEQ ID NO: 7917 - RNA, 22 nt, synthetic construct
  source 1..22: mol_type = other RNA
cctgaacaagatgcagaaccat

SEQ ID NO: 7918 - RNA, 22 nt, synthetic construct
  source 1..22: mol_type = other RNA
cctgacctcctggactgtagga

SEQ ID NO: 7919 - RNA, 22 nt, synthetic construct
  source 1..22: mol_type = other RNA
cctgagccatttgctgcacaat

SEQ ID NO: 7920 - RNA, 22 nt, synthetic construct
  source 1..22: mol_type = other RNA
cctgaggaccaaatgcagccag

SEQ ID NO: 7921 - RNA, 22 nt, synthetic construct
  source 1..22: mol_type = other RNA
cctgagggtcattgtggtgtct

SEQ ID NO: 7922 - RNA, 22 nt, synthetic construct
  source 1..22: mol_type = other RNA
cctgcacagggtgctgggagac

SEQ ID NO: 7923 - RNA, 22 nt, synthetic construct
  source 1..22: mol_type = other RNA
cctgcatataagtctattattg

SEQ ID NO: 7924 - RNA, 22 nt, synthetic construct
  source 1..22: mol_type = other RNA
cctgcatccctccgccagggct

SEQ ID NO: 7925 - RNA, 22 nt, synthetic construct
  source 1..22: mol_type = other RNA
cctgccacaaggggctgttgcc

SEQ ID NO: 7926 - RNA, 22 nt, synthetic construct
  source 1..22: mol_type = other RNA
cctgccacctaaatctgcatct

SEQ ID NO: 7927 - RNA, 22 nt, synthetic construct
  source 1..22: mol_type = other RNA
cctgctggagactggcctagct

SEQ ID NO: 7928 - RNA, 22 nt, synthetic construct
  source 1..22: mol_type = other RNA
cctggaaaaaggaacactaagg

SEQ ID NO: 7929 - RNA, 22 nt, synthetic construct
  source 1..22: mol_type = other RNA
cctggaagaacaaaacctgagg

SEQ ID NO: 7930 - RNA, 22 nt, synthetic construct
  source 1..22: mol_type = other RNA
cctggactgtaggactatataa

SEQ ID NO: 7931 - RNA, 22 nt, synthetic construct
  source 1..22: mol_type = other RNA
cctggagcagatgcagatttag

SEQ ID NO: 7932 - RNA, 22 nt, synthetic construct
  source 1..22: mol_type = other RNA
cctggcagcggctgctgcttgg

SEQ ID NO: 7933 - RNA, 22 nt, synthetic construct
  source 1..22: mol_type = other RNA
cctggccagttacttggtttta

SEQ ID NO: 7934 - RNA, 22 nt, synthetic construct
  source 1..22: mol_type = other RNA
cctggcggagggatgcaggtgg

SEQ ID NO: 7935 - RNA, 22 nt, synthetic construct
  source 1..22: mol_type = other RNA
cctggcttttatttaaagaaaa

SEQ ID NO: 7936 - RNA, 22 nt, synthetic construct
  source 1..22: mol_type = other RNA
cctgggaaattagtgcagatgc

SEQ ID NO: 7937 - RNA, 22 nt, synthetic construct
  source 1..22: mol_type = other RNA
cctgggccagccaaggcaagcc

SEQ ID NO: 7938 - RNA, 22 nt, synthetic construct
  source 1..22: mol_type = other RNA
cctgggcgacacagcgagactg

SEQ ID NO: 7939 - RNA, 22 nt, synthetic construct
  source 1..22: mol_type = other RNA
cctggtcaatatggggaaatcc

SEQ ID NO: 7940 - RNA, 22 nt, synthetic construct
  source 1..22: mol_type = other RNA
cctggtcccaccgtctgcttgc

SEQ ID NO: 7941 - RNA, 22 nt, synthetic construct
  source 1..22: mol_type = other RNA
cctgtagtctcagctaggtggg

SEQ ID NO: 7942 - RNA, 22 nt, synthetic construct
  source 1..22: mol_type = other RNA
cctgtcaccaaggacgttaaag

SEQ ID NO: 7943 - RNA, 22 nt, synthetic construct
  source 1..22: mol_type = other RNA
cctgtccggtgggaacgggctg

SEQ ID NO: 7944 - RNA, 22 nt, synthetic construct
  source 1..22: mol_type = other RNA
cctgtgcaggtctcttcccaga

SEQ ID NO: 7945 - RNA, 22 nt, synthetic construct
  source 1..22: mol_type = other RNA
cctgtggaattaataggcatct

SEQ ID NO: 7946 - RNA, 22 nt, synthetic construct
  source 1..22: mol_type = other RNA
cctgtgtgtctccataaaagtc

SEQ ID NO: 7947 - RNA, 22 nt, synthetic construct
  source 1..22: mol_type = other RNA
cctgtgtttcaccaccggttct

SEQ ID NO: 7948 - RNA, 22 nt, synthetic construct
  source 1..22: mol_type = other RNA
cctgttgctcctttcccccatt

SEQ ID NO: 7949 - RNA, 22 nt, synthetic construct
  source 1..22: mol_type = other RNA
ccttaatgagccctgggaaatt

SEQ ID NO: 7950 - RNA, 22 nt, synthetic construct
  source 1..22: mol_type = other RNA
ccttactgtatttatatttggg

SEQ ID NO: 7951 - RNA, 22 nt, synthetic construct
  source 1..22: mol_type = other RNA
ccttagtgaacagtgggaatgt

SEQ ID NO: 7952 - RNA, 22 nt, synthetic construct
  source 1..22: mol_type = other RNA
ccttagtgttcctttttccagg

SEQ ID NO: 7953 - RNA, 22 nt, synthetic construct
  source 1..22: mol_type = other RNA
ccttattttctttctcctgtgt

SEQ ID NO: 7954 - RNA, 22 nt, synthetic construct
  source 1..22: mol_type = other RNA
ccttgatccccaaatataaata

SEQ ID NO: 7955 - RNA, 22 nt, synthetic construct
  source 1..22: mol_type = other RNA
ccttgcttgtcaccacggtgct

SEQ ID NO: 7956 - RNA, 22 nt, synthetic construct
  source 1..22: mol_type = other RNA
ccttggctatgaatgtcagaaa

SEQ ID NO: 7957 - RNA, 22 nt, synthetic construct
  source 1..22: mol_type = other RNA
ccttggctggcccaggtagtaa

SEQ ID NO: 7958 - RNA, 22 nt, synthetic construct
  source 1..22: mol_type = other RNA
ccttggtgacaggacttttatg

SEQ ID NO: 7959 - RNA, 22 nt, synthetic construct
  source 1..22: mol_type = other RNA
ccttgtggcaggggctgatttc

SEQ ID NO: 7960 - RNA, 22 nt, synthetic construct
  source 1..22: mol_type = other RNA
cctttaacgtccttggtgacag

SEQ ID NO: 7961 - RNA, 22 nt, synthetic construct
  source 1..22: mol_type = other RNA
cctttcacatcattttgcgagg

SEQ ID NO: 7962 - RNA, 22 nt, synthetic construct
  source 1..22: mol_type = other RNA
cctttttaaatgagctttcagg

SEQ ID NO: 7963 - RNA, 22 nt, synthetic construct
  source 1..22: mol_type = other RNA
cgaaacgagagccctgaaagct

SEQ ID NO: 7964 - RNA, 22 nt, synthetic construct
  source 1..22: mol_type = other RNA
cgaaagcattgcctctttgatc

SEQ ID NO: 7965 - RNA, 22 nt, synthetic construct
  source 1..22: mol_type = other RNA
cgacacagcgagactgtctcca

SEQ ID NO: 7966 - RNA, 22 nt, synthetic construct
  source 1..22: mol_type = other RNA
cgacagcctgcatataagtcta

SEQ ID NO: 7967 - RNA, 22 nt, synthetic construct
  source 1..22: mol_type = other RNA
cgacatttcccatttattatat

SEQ ID NO: 7968 - RNA, 22 nt, synthetic construct
  source 1..22: mol_type = other RNA
cgacctaggaatccagtgagta

SEQ ID NO: 7969 - RNA, 22 nt, synthetic construct
  source 1..22: mol_type = other RNA
cgactgccaagcagcagccgct

SEQ ID NO: 7970 - RNA, 22 nt, synthetic construct
  source 1..22: mol_type = other RNA
cgagactgtctccaaaaaacca

SEQ ID NO: 7971 - RNA, 22 nt, synthetic construct
  source 1..22: mol_type = other RNA
cgagagccctgaaagcttagcc

SEQ ID NO: 7972 - RNA, 22 nt, synthetic construct
  source 1..22: mol_type = other RNA
cgagccttgcttgtcaccacgg

SEQ ID NO: 7973 - RNA, 22 nt, synthetic construct
  source 1..22: mol_type = other RNA
cgaggagtgaagatgcctatta

SEQ ID NO: 7974 - RNA, 22 nt, synthetic construct
  source 1..22: mol_type = other RNA
cgagggtctctcacgtgcttca

SEQ ID NO: 7975 - RNA, 22 nt, synthetic construct
  source 1..22: mol_type = other RNA
cgagtactggacatgctgctgt

SEQ ID NO: 7976 - RNA, 22 nt, synthetic construct
  source 1..22: mol_type = other RNA
cgatcgactgccaagcagcagc

SEQ ID NO: 7977 - RNA, 22 nt, synthetic construct
  source 1..22: mol_type = other RNA
cgatcggaatcgtgggatcttc

SEQ ID NO: 7978 - RNA, 22 nt, synthetic construct
  source 1..22: mol_type = other RNA
cgatctcagcgcactgcaacct

SEQ ID NO: 7979 - RNA, 22 nt, synthetic construct
  source 1..22: mol_type = other RNA
cgattccgatcgactgccaagc

SEQ ID NO: 7980 - RNA, 22 nt, synthetic construct
  source 1..22: mol_type = other RNA
cgcaaaatgatgtgaaaggacc

SEQ ID NO: 7981 - RNA, 22 nt, synthetic construct
  source 1..22: mol_type = other RNA
cgccactgcttactacctgggc

SEQ ID NO: 7982 - RNA, 22 nt, synthetic construct
  source 1..22: mol_type = other RNA
cgcccagctagtctttgtattt

SEQ ID NO: 7983 - RNA, 22 nt, synthetic construct
  source 1..22: mol_type = other RNA
cgccgagccttgcttgtcacca

SEQ ID NO: 7984 - RNA, 22 nt, synthetic construct
  source 1..22: mol_type = other RNA
cgcgatctcagcgcactgcaac

SEQ ID NO: 7985 - RNA, 22 nt, synthetic construct
  source 1..22: mol_type = other RNA
cgcgctccctgccacctaaatc

SEQ ID NO: 7986 - RNA, 22 nt, synthetic construct
  source 1..22: mol_type = other RNA
cgctccctgccacctaaatctg

SEQ ID NO: 7987 - RNA, 22 nt, synthetic construct
  source 1..22: mol_type = other RNA
cgctcttctggggtgagcattg

SEQ ID NO: 7988 - RNA, 22 nt, synthetic construct
  source 1..22: mol_type = other RNA
cgctgccaggggctgcgtctga

SEQ ID NO: 7989 - RNA, 22 nt, synthetic construct
  source 1..22: mol_type = other RNA
cgctggaataaaatgcctttaa

SEQ ID NO: 7990 - RNA, 22 nt, synthetic construct
  source 1..22: mol_type = other RNA
cggaacgacagcctgcatataa

SEQ ID NO: 7991 - RNA, 22 nt, synthetic construct
  source 1..22: mol_type = other RNA
cggaagatcccacgattccgat

SEQ ID NO: 7992 - RNA, 22 nt, synthetic construct
  source 1..22: mol_type = other RNA
cggaagatgacagtcaactgga

SEQ ID NO: 7993 - RNA, 22 nt, synthetic construct
  source 1..22: mol_type = other RNA
cggaatcgtgggatcttccggc

SEQ ID NO: 7994 - RNA, 22 nt, synthetic construct
  source 1..22: mol_type = other RNA
cggacaccctcatctgtataca

SEQ ID NO: 7995 - RNA, 22 nt, synthetic construct
  source 1..22: mol_type = other RNA
cggacaggccaaatgagaaccg

SEQ ID NO: 7996 - RNA, 22 nt, synthetic construct
  source 1..22: mol_type = other RNA
cggagggatgcaggtgggccgg

SEQ ID NO: 7997 - RNA, 22 nt, synthetic construct
  source 1..22: mol_type = other RNA
cggcagccctggcggagggatg

SEQ ID NO: 7998 - RNA, 22 nt, synthetic construct
  source 1..22: mol_type = other RNA
cggcccacctgcatccctccgc

SEQ ID NO: 7999 - RNA, 22 nt, synthetic construct
  source 1..22: mol_type = other RNA
cggcgccactgcttactacctg

SEQ ID NO: 8000 - RNA, 22 nt, synthetic construct
  source 1..22: mol_type = other RNA
cggctgctgcttggcagtcgat

SEQ ID NO: 8001 - RNA, 22 nt, synthetic construct
  source 1..22: mol_type = other RNA
cggctggatacctgtgtgtctc

SEQ ID NO: 8002 - RNA, 22 nt, synthetic construct
  source 1..22: mol_type = other RNA
cgggagacagaggttgcagtgc

SEQ ID NO: 8003 - RNA, 22 nt, synthetic construct
  source 1..22: mol_type = other RNA
cgggctgctggctgcatttggt

SEQ ID NO: 8004 - RNA, 22 nt, synthetic construct
  source 1..22: mol_type = other RNA
cggtgctaggaaatccagttga

SEQ ID NO: 8005 - RNA, 22 nt, synthetic construct
  source 1..22: mol_type = other RNA
cggtgggaacgggctgctggct

SEQ ID NO: 8006 - RNA, 22 nt, synthetic construct
  source 1..22: mol_type = other RNA
cggtgggaccaggggatctctg

SEQ ID NO: 8007 - RNA, 22 nt, synthetic construct
  source 1..22: mol_type = other RNA
cggtggtgaaacacaggagaaa

SEQ ID NO: 8008 - RNA, 22 nt, synthetic construct
  source 1..22: mol_type = other RNA
cggttatgttgtgtaagtcaac

SEQ ID NO: 8009 - RNA, 22 nt, synthetic construct
  source 1..22: mol_type = other RNA
cggttctcatttggcctgtccg

SEQ ID NO: 8010 - RNA, 22 nt, synthetic construct
  source 1..22: mol_type = other RNA
cgtcacctgaacaagatgcaga

SEQ ID NO: 8011 - RNA, 22 nt, synthetic construct
  source 1..22: mol_type = other RNA
cgtccttggtgacaggactttt

SEQ ID NO: 8012 - RNA, 22 nt, synthetic construct
  source 1..22: mol_type = other RNA
cgtctgacatcctgacctcctg

SEQ ID NO: 8013 - RNA, 22 nt, synthetic construct
  source 1..22: mol_type = other RNA
cgtctgcttgctagcctactgc

SEQ ID NO: 8014 - RNA, 22 nt, synthetic construct
  source 1..22: mol_type = other RNA
cgtcttctagagagcttagtgt

SEQ ID NO: 8015 - RNA, 22 nt, synthetic construct
  source 1..22: mol_type = other RNA
cgtgagagaccctcgcaaaatg

SEQ ID NO: 8016 - RNA, 22 nt, synthetic construct
  source 1..22: mol_type = other RNA
cgtgagggctaagctttcaggg

SEQ ID NO: 8017 - RNA, 22 nt, synthetic construct
  source 1..22: mol_type = other RNA
cgtgcttcagtggccattacag

SEQ ID NO: 8018 - RNA, 22 nt, synthetic construct
  source 1..22: mol_type = other RNA
cgtggaaacactggacttcaag

SEQ ID NO: 8019 - RNA, 22 nt, synthetic construct
  source 1..22: mol_type = other RNA
cgtgggatcttccggcccacct

SEQ ID NO: 8020 - RNA, 22 nt, synthetic construct
  source 1..22: mol_type = other RNA
cgtggtgacaagcaaggctcgg

SEQ ID NO: 8021 - RNA, 22 nt, synthetic construct
  source 1..22: mol_type = other RNA
cgtgtttttggaaatcagcccc

SEQ ID NO: 8022 - RNA, 22 nt, synthetic construct
  source 1..22: mol_type = other RNA
cgttaaaggcattttattccag

SEQ ID NO: 8023 - RNA, 22 nt, synthetic construct
  source 1..22: mol_type = other RNA
cgttcccaccggacaggccaaa

SEQ ID NO: 8024 - RNA, 22 nt, synthetic construct
  source 1..22: mol_type = other RNA
cgttccggttatgttgtgtaag

SEQ ID NO: 8025 - RNA, 22 nt, synthetic construct
  source 1..22: mol_type = other RNA
cgtttcgaaagcattgcctctt

SEQ ID NO: 8026 - RNA, 22 nt, synthetic construct
  source 1..22: mol_type = other RNA
ctaaatctgcatctgctccagg

SEQ ID NO: 8027 - RNA, 22 nt, synthetic construct
  source 1..22: mol_type = other RNA
ctaaatttcctgttgctccttt

SEQ ID NO: 8028 - RNA, 22 nt, synthetic construct
  source 1..22: mol_type = other RNA
ctaagaccagcatctgcactaa

SEQ ID NO: 8029 - RNA, 22 nt, synthetic construct
  source 1..22: mol_type = other RNA
ctaagctctctagaagacgctg

SEQ ID NO: 8030 - RNA, 22 nt, synthetic construct
  source 1..22: mol_type = other RNA
ctaagctttcagggctctcgtt

SEQ ID NO: 8031 - RNA, 22 nt, synthetic construct
  source 1..22: mol_type = other RNA
ctaaggaaataatctgagaaaa

SEQ ID NO: 8032 - RNA, 22 nt, synthetic construct
  source 1..22: mol_type = other RNA
ctaaggagtgagtggcaagaca

SEQ ID NO: 8033 - RNA, 22 nt, synthetic construct
  source 1..22: mol_type = other RNA
ctaatgttgaaagttggcaaca

SEQ ID NO: 8034 - RNA, 22 nt, synthetic construct
  source 1..22: mol_type = other RNA
ctaatttcccagggctcattaa

SEQ ID NO: 8035 - RNA, 22 nt, synthetic construct
  source 1..22: mol_type = other RNA
ctacaaatacctggagcagatg

SEQ ID NO: 8036 - RNA, 22 nt, synthetic construct
  source 1..22: mol_type = other RNA
ctacagagggtgaaaactcttt

SEQ ID NO: 8037 - RNA, 22 nt, synthetic construct
  source 1..22: mol_type = other RNA
ctacagctaggccagtctccag

SEQ ID NO: 8038 - RNA, 22 nt, synthetic construct
  source 1..22: mol_type = other RNA
ctacagtagtactttatatagt

SEQ ID NO: 8039 - RNA, 22 nt, synthetic construct
  source 1..22: mol_type = other RNA
ctacagtccaggaggtcaggat

SEQ ID NO: 8040 - RNA, 22 nt, synthetic construct
  source 1..22: mol_type = other RNA
ctacatcaaatatctgcaatag

SEQ ID NO: 8041 - RNA, 22 nt, synthetic construct
  source 1..22: mol_type = other RNA
ctacctgggccagccaaggcaa

SEQ ID NO: 8042 - RNA, 22 nt, synthetic construct
  source 1..22: mol_type = other RNA
ctactgcacctggccagttact

SEQ ID NO: 8043 - RNA, 22 nt, synthetic construct
  source 1..22: mol_type = other RNA
ctactgctgactggcttgcctt

SEQ ID NO: 8044 - RNA, 22 nt, synthetic construct
  source 1..22: mol_type = other RNA
ctactgtagaactgcaatttcc

SEQ ID NO: 8045 - RNA, 22 nt, synthetic construct
  source 1..22: mol_type = other RNA
ctagaagacgctggaataaaat

SEQ ID NO: 8046 - RNA, 22 nt, synthetic construct
  source 1..22: mol_type = other RNA
ctagagagcttagtgtatacag

SEQ ID NO: 8047 - RNA, 22 nt, synthetic construct
  source 1..22: mol_type = other RNA
ctagcaagcagacggtgggacc

SEQ ID NO: 8048 - RNA, 22 nt, synthetic construct
  source 1..22: mol_type = other RNA
ctagcaccgtggtgacaagcaa

SEQ ID NO: 8049 - RNA, 22 nt, synthetic construct
  source 1..22: mol_type = other RNA
ctagcctactgctgactggctt

SEQ ID NO: 8050 - RNA, 22 nt, synthetic construct
  source 1..22: mol_type = other RNA
ctagctgtagaatttcagaact

SEQ ID NO: 8051 - RNA, 22 nt, synthetic construct
  source 1..22: mol_type = other RNA
ctaggaaatccagttgactgtc

SEQ ID NO: 8052 - RNA, 22 nt, synthetic construct
  source 1..22: mol_type = other RNA
ctaggaatccagtgagtaactg

SEQ ID NO: 8053 - RNA, 22 nt, synthetic construct
  source 1..22: mol_type = other RNA
ctaggccagtctccagcaggag

SEQ ID NO: 8054 - RNA, 22 nt, synthetic construct
  source 1..22: mol_type = other RNA
ctaggtcgtgtttttggaaatc

SEQ ID NO: 8055 - RNA, 22 nt, synthetic construct
  source 1..22: mol_type = other RNA
ctaggtgggaggctgaggcaca

SEQ ID NO: 8056 - RNA, 22 nt, synthetic construct
  source 1..22: mol_type = other RNA
ctatataaagtactactgtaga

SEQ ID NO: 8057 - RNA, 22 nt, synthetic construct
  source 1..22: mol_type = other RNA
ctatgaatgtcagaaagtcatg

SEQ ID NO: 8058 - RNA, 22 nt, synthetic construct
  source 1..22: mol_type = other RNA
ctatgagaaccccacctacaaa

SEQ ID NO: 8059 - RNA, 22 nt, synthetic construct
  source 1..22: mol_type = other RNA
ctattaattccacaggttccca

SEQ ID NO: 8060 - RNA, 22 nt, synthetic construct
  source 1..22: mol_type = other RNA
ctattccaccccatttctcagc

SEQ ID NO: 8061 - RNA, 22 nt, synthetic construct
  source 1..22: mol_type = other RNA
ctattgcagatatttgatgtag

SEQ ID NO: 8062 - RNA, 22 nt, synthetic construct
  source 1..22: mol_type = other RNA
ctcaccccagaagagcgtcacc

SEQ ID NO: 8063 - RNA, 22 nt, synthetic construct
  source 1..22: mol_type = other RNA
ctcacggaagatgacagtcaac

SEQ ID NO: 8064 - RNA, 22 nt, synthetic construct
  source 1..22: mol_type = other RNA
ctcacgtgcttcagtggccatt

SEQ ID NO: 8065 - RNA, 22 nt, synthetic construct
  source 1..22: mol_type = other RNA
ctcactccttagtgaacagtgg

SEQ ID NO: 8066 - RNA, 22 nt, synthetic construct
  source 1..22: mol_type = other RNA
ctcactggattcctaggtcgtg

SEQ ID NO: 8067 - RNA, 22 nt, synthetic construct
  source 1..22: mol_type = other RNA
ctcagattatttccttagtgtt

SEQ ID NO: 8068 - RNA, 22 nt, synthetic construct
  source 1..22: mol_type = other RNA
ctcagcaacttcctgaaagctc

SEQ ID NO: 8069 - RNA, 22 nt, synthetic construct
  source 1..22: mol_type = other RNA
ctcagcctcccacctagctgag

SEQ ID NO: 8070 - RNA, 22 nt, synthetic construct
  source 1..22: mol_type = other RNA
ctcagcgcactgcaacctctgt

SEQ ID NO: 8071 - RNA, 22 nt, synthetic construct
  source 1..22: mol_type = other RNA
ctcagctaggtgggaggctgag

SEQ ID NO: 8072 - RNA, 22 nt, synthetic construct
  source 1..22: mol_type = other RNA
ctcaggggattgtgcagcaaat

SEQ ID NO: 8073 - RNA, 22 nt, synthetic construct
  source 1..22: mol_type = other RNA
ctcaggtctcccagcaccctgt

SEQ ID NO: 8074 - RNA, 22 nt, synthetic construct
  source 1..22: mol_type = other RNA
ctcaggttttgttcttccaggt

SEQ ID NO: 8075 - RNA, 22 nt, synthetic construct
  source 1..22: mol_type = other RNA
ctcatagccatggttctgcatc

SEQ ID NO: 8076 - RNA, 22 nt, synthetic construct
  source 1..22: mol_type = other RNA
ctcatctgtatacactaagctc

SEQ ID NO: 8077 - RNA, 22 nt, synthetic construct
  source 1..22: mol_type = other RNA
ctcattaaggtccttactgtat

SEQ ID NO: 8078 - RNA, 22 nt, synthetic construct
  source 1..22: mol_type = other RNA
ctcattcactgtcctggctttt

SEQ ID NO: 8079 - RNA, 22 nt, synthetic construct
  source 1..22: mol_type = other RNA
ctcatttaaaaagggaatactg

SEQ ID NO: 8080 - RNA, 22 nt, synthetic construct
  source 1..22: mol_type = other RNA
ctcatttggcctgtccggtggg

SEQ ID NO: 8081 - RNA, 22 nt, synthetic construct
  source 1..22: mol_type = other RNA
ctccaaaaaaccaaaaaaccaa

SEQ ID NO: 8082 - RNA, 22 nt, synthetic construct
  source 1..22: mol_type = other RNA
ctccagcaggagataaaaccaa

SEQ ID NO: 8083 - RNA, 22 nt, synthetic construct
  source 1..22: mol_type = other RNA
ctccaggtatttgtaggtgggg

SEQ ID NO: 8084 - RNA, 22 nt, synthetic construct
  source 1..22: mol_type = other RNA
ctccataaaagtcctgtcacca

SEQ ID NO: 8085 - RNA, 22 nt, synthetic construct
  source 1..22: mol_type = other RNA
ctcccacctagctgagactaca

SEQ ID NO: 8086 - RNA, 22 nt, synthetic construct
  source 1..22: mol_type = other RNA
ctcccagcaccctgtgcaggtc

SEQ ID NO: 8087 - RNA, 22 nt, synthetic construct
  source 1..22: mol_type = other RNA
ctccctgccacctaaatctgca

SEQ ID NO: 8088 - RNA, 22 nt, synthetic construct
  source 1..22: mol_type = other RNA
ctcctcgagtactggacatgct

SEQ ID NO: 8089 - RNA, 22 nt, synthetic construct
  source 1..22: mol_type = other RNA
ctcctgctggagactggcctag

SEQ ID NO: 8090 - RNA, 22 nt, synthetic construct
  source 1..22: mol_type = other RNA
ctcctggactgtaggactatat

SEQ ID NO: 8091 - RNA, 22 nt, synthetic construct
  source 1..22: mol_type = other RNA
ctcctgtgtttcaccaccggtt

SEQ ID NO: 8092 - RNA, 22 nt, synthetic construct
  source 1..22: mol_type = other RNA
ctccttagtgaacagtgggaat

SEQ ID NO: 8093 - RNA, 22 nt, synthetic construct
  source 1..22: mol_type = other RNA
ctcgaggagtgaagatgcctat

SEQ ID NO: 8094 - RNA, 22 nt, synthetic construct
  source 1..22: mol_type = other RNA
ctcgagtactggacatgctgct

SEQ ID NO: 8095 - RNA, 22 nt, synthetic construct
  source 1..22: mol_type = other RNA
ctcgcaaaatgatgtgaaagga

SEQ ID NO: 8096 - RNA, 22 nt, synthetic construct
  source 1..22: mol_type = other RNA
ctcggcgccactgcttactacc

SEQ ID NO: 8097 - RNA, 22 nt, synthetic construct
  source 1..22: mol_type = other RNA
ctcgtttcgaaagcattgcctc

SEQ ID NO: 8098 - RNA, 22 nt, synthetic construct
  source 1..22: mol_type = other RNA
ctctagaagacgctggaataaa

SEQ ID NO: 8099 - RNA, 22 nt, synthetic construct
  source 1..22: mol_type = other RNA
ctctcaatatataataaatggg

SEQ ID NO: 8100 - RNA, 22 nt, synthetic construct
  source 1..22: mol_type = other RNA
ctctcacgtgcttcagtggcca

SEQ ID NO: 8101 - RNA, 22 nt, synthetic construct
  source 1..22: mol_type = other RNA
ctctcgtttcgaaagcattgcc

SEQ ID NO: 8102 - RNA, 22 nt, synthetic construct
  source 1..22: mol_type = other RNA
ctctctagaagacgctggaata

SEQ ID NO: 8103 - RNA, 22 nt, synthetic construct
  source 1..22: mol_type = other RNA
ctctggacattcccactgttca

SEQ ID NO: 8104 - RNA, 22 nt, synthetic construct
  source 1..22: mol_type = other RNA
ctctggtctttttcagttctga

SEQ ID NO: 8105 - RNA, 22 nt, synthetic construct
  source 1..22: mol_type = other RNA
ctctgtagcataaaatgttcac

SEQ ID NO: 8106 - RNA, 22 nt, synthetic construct
  source 1..22: mol_type = other RNA
ctctgtctcccgggttcaggtg

SEQ ID NO: 8107 - RNA, 22 nt, synthetic construct
  source 1..22: mol_type = other RNA
ctcttcagcctcattcactgtc

SEQ ID NO: 8108 - RNA, 22 nt, synthetic construct
  source 1..22: mol_type = other RNA
ctcttcccagacaccacaatga

SEQ ID NO: 8109 - RNA, 22 nt, synthetic construct
  source 1..22: mol_type = other RNA
ctcttctggggtgagcattgga

SEQ ID NO: 8110 - RNA, 22 nt, synthetic construct
  source 1..22: mol_type = other RNA
ctctttgatccccttattttct

SEQ ID NO: 8111 - RNA, 22 nt, synthetic construct
  source 1..22: mol_type = other RNA
ctcttttctcagattatttcct

SEQ ID NO: 8112 - RNA, 22 nt, synthetic construct
  source 1..22: mol_type = other RNA
ctgaaaaagaccagagatcccc

SEQ ID NO: 8113 - RNA, 22 nt, synthetic construct
  source 1..22: mol_type = other RNA
ctgaaagctcatttaaaaaggg

SEQ ID NO: 8114 - RNA, 22 nt, synthetic construct
  source 1..22: mol_type = other RNA
ctgaaagcttagccctcacgga

SEQ ID NO: 8115 - RNA, 22 nt, synthetic construct
  source 1..22: mol_type = other RNA
ctgaaattctacagctaggcca

SEQ ID NO: 8116 - RNA, 22 nt, synthetic construct
  source 1..22: mol_type = other RNA
ctgaacaagatgcagaaccatg

SEQ ID NO: 8117 - RNA, 22 nt, synthetic construct
  source 1..22: mol_type = other RNA
ctgaactgataacagcagcatg

SEQ ID NO: 8118 - RNA, 22 nt, synthetic construct
  source 1..22: mol_type = other RNA
ctgaacttgtcttgccactcac

SEQ ID NO: 8119 - RNA, 22 nt, synthetic construct
  source 1..22: mol_type = other RNA
ctgaagagttgacttacacaac

SEQ ID NO: 8120 - RNA, 22 nt, synthetic construct
  source 1..22: mol_type = other RNA
ctgaagcacgtgagagaccctc

SEQ ID NO: 8121 - RNA, 22 nt, synthetic construct
  source 1..22: mol_type = other RNA
ctgaagcagactgtttctgttc

SEQ ID NO: 8122 - RNA, 22 nt, synthetic construct
  source 1..22: mol_type = other RNA
ctgacacatgctctcaatatat

SEQ ID NO: 8123 - RNA, 22 nt, synthetic construct
  source 1..22: mol_type = other RNA
ctgacatcctgacctcctggac

SEQ ID NO: 8124 - RNA, 22 nt, synthetic construct
  source 1..22: mol_type = other RNA
ctgacattcatagccaaggccc

SEQ ID NO: 8125 - RNA, 22 nt, synthetic construct
  source 1..22: mol_type = other RNA
ctgacctcctggactgtaggac

SEQ ID NO: 8126 - RNA, 22 nt, synthetic construct
  source 1..22: mol_type = other RNA
ctgactggcttgccttggctgg

SEQ ID NO: 8127 - RNA, 22 nt, synthetic construct
  source 1..22: mol_type = other RNA
ctgagaaaagagttttcaccct

SEQ ID NO: 8128 - RNA, 22 nt, synthetic construct
  source 1..22: mol_type = other RNA
ctgagaaatggggtggaatagg

SEQ ID NO: 8129 - RNA, 22 nt, synthetic construct
  source 1..22: mol_type = other RNA
ctgagccatttgctgcacaatc

SEQ ID NO: 8130 - RNA, 22 nt, synthetic construct
  source 1..22: mol_type = other RNA
ctgaggaccaaatgcagccagc

SEQ ID NO: 8131 - RNA, 22 nt, synthetic construct
  source 1..22: mol_type = other RNA
ctgagggtcattgtggtgtctg

SEQ ID NO: 8132 - RNA, 22 nt, synthetic construct
  source 1..22: mol_type = other RNA
ctgataacagcagcatgtccag

SEQ ID NO: 8133 - RNA, 22 nt, synthetic construct
  source 1..22: mol_type = other RNA
ctgatttccaaaaacacgacct

SEQ ID NO: 8134 - RNA, 22 nt, synthetic construct
  source 1..22: mol_type = other RNA
ctgcaatttccattcttttaaa

SEQ ID NO: 8135 - RNA, 22 nt, synthetic construct
  source 1..22: mol_type = other RNA
ctgcacaatcccctgaggacca

SEQ ID NO: 8136 - RNA, 22 nt, synthetic construct
  source 1..22: mol_type = other RNA
ctgcacagggtgctgggagacc

SEQ ID NO: 8137 - RNA, 22 nt, synthetic construct
  source 1..22: mol_type = other RNA
ctgcacctggccagttacttgg

SEQ ID NO: 8138 - RNA, 22 nt, synthetic construct
  source 1..22: mol_type = other RNA
ctgcactaatttcccagggctc

SEQ ID NO: 8139 - RNA, 22 nt, synthetic construct
  source 1..22: mol_type = other RNA
ctgcatataagtctattattga

SEQ ID NO: 8140 - RNA, 22 nt, synthetic construct
  source 1..22: mol_type = other RNA
ctgcatccctccgccagggctg

SEQ ID NO: 8141 - RNA, 22 nt, synthetic construct
  source 1..22: mol_type = other RNA
ctgcatctgctccaggtatttg

SEQ ID NO: 8142 - RNA, 22 nt, synthetic construct
  source 1..22: mol_type = other RNA
ctgcatcttgttcaggtgacgc

SEQ ID NO: 8143 - RNA, 22 nt, synthetic construct
  source 1..22: mol_type = other RNA
ctgcatttggtcctcaggggat

SEQ ID NO: 8144 - RNA, 22 nt, synthetic construct
  source 1..22: mol_type = other RNA
ctgccaagcagcagccgctgcc

SEQ ID NO: 8145 - RNA, 22 nt, synthetic construct
  source 1..22: mol_type = other RNA
ctgccacaaggggctgttgcca

SEQ ID NO: 8146 - RNA, 22 nt, synthetic construct
  source 1..22: mol_type = other RNA
ctgccacctaaatctgcatctg

SEQ ID NO: 8147 - RNA, 22 nt, synthetic construct
  source 1..22: mol_type = other RNA
ctgccaggggctgcgtctgaca

SEQ ID NO: 8148 - RNA, 22 nt, synthetic construct
  source 1..22: mol_type = other RNA
ctgccgcgctccctgccaccta

SEQ ID NO: 8149 - RNA, 22 nt, synthetic construct
  source 1..22: mol_type = other RNA
ctgcgtctgacatcctgacctc

SEQ ID NO: 8150 - RNA, 22 nt, synthetic construct
  source 1..22: mol_type = other RNA
ctgctccaggtatttgtaggtg

SEQ ID NO: 8151 - RNA, 22 nt, synthetic construct
  source 1..22: mol_type = other RNA
ctgctgactggcttgccttggc

SEQ ID NO: 8152 - RNA, 22 nt, synthetic construct
  source 1..22: mol_type = other RNA
ctgctgcttggcagtcgatcgg

SEQ ID NO: 8153 - RNA, 22 nt, synthetic construct
  source 1..22: mol_type = other RNA
ctgctggagactggcctagctg

SEQ ID NO: 8154 - RNA, 22 nt, synthetic construct
  source 1..22: mol_type = other RNA
ctgctggctgcatttggtcctc

SEQ ID NO: 8155 - RNA, 22 nt, synthetic construct
  source 1..22: mol_type = other RNA
ctgctggttactgaacttgtct

SEQ ID NO: 8156 - RNA, 22 nt, synthetic construct
  source 1..22: mol_type = other RNA
ctgctgttatcagttcagttac

SEQ ID NO: 8157 - RNA, 22 nt, synthetic construct
  source 1..22: mol_type = other RNA
ctgcttactacctgggccagcc

SEQ ID NO: 8158 - RNA, 22 nt, synthetic construct
  source 1..22: mol_type = other RNA
ctgcttcagcactttctaaatt

SEQ ID NO: 8159 - RNA, 22 nt, synthetic construct
  source 1..22: mol_type = other RNA
ctgcttgctagcctactgctga

SEQ ID NO: 8160 - RNA, 22 nt, synthetic construct
  source 1..22: mol_type = other RNA
ctgcttggcagtcgatcggaat

SEQ ID NO: 8161 - RNA, 22 nt, synthetic construct
  source 1..22: mol_type = other RNA
ctggaaaaaggaacactaagga

SEQ ID NO: 8162 - RNA, 22 nt, synthetic construct
  source 1..22: mol_type = other RNA
ctggaagaacaaaacctgaggg

SEQ ID NO: 8163 - RNA, 22 nt, synthetic construct
  source 1..22: mol_type = other RNA
ctggaataaaatgcctttaacg

SEQ ID NO: 8164 - RNA, 22 nt, synthetic construct
  source 1..22: mol_type = other RNA
ctggacatgctgctgttatcag

SEQ ID NO: 8165 - RNA, 22 nt, synthetic construct
  source 1..22: mol_type = other RNA
ctggacattcccactgttcact

SEQ ID NO: 8166 - RNA, 22 nt, synthetic construct
  source 1..22: mol_type = other RNA
ctggactgtaggactatataaa

SEQ ID NO: 8167 - RNA, 22 nt, synthetic construct
  source 1..22: mol_type = other RNA
ctggacttcaagaaactggtcc

SEQ ID NO: 8168 - RNA, 22 nt, synthetic construct
  source 1..22: mol_type = other RNA
ctggagactggcctagctgtag

SEQ ID NO: 8169 - RNA, 22 nt, synthetic construct
  source 1..22: mol_type = other RNA
ctggagcagatgcagatttagg

SEQ ID NO: 8170 - RNA, 22 nt, synthetic construct
  source 1..22: mol_type = other RNA
ctggatacctgtgtgtctccat

SEQ ID NO: 8171 - RNA, 22 nt, synthetic construct
  source 1..22: mol_type = other RNA
ctggattcctaggtcgtgtttt

SEQ ID NO: 8172 - RNA, 22 nt, synthetic construct
  source 1..22: mol_type = other RNA
ctggatttcctagcaccgtggt

SEQ ID NO: 8173 - RNA, 22 nt, synthetic construct
  source 1..22: mol_type = other RNA
ctggcagcggctgctgcttggc

SEQ ID NO: 8174 - RNA, 22 nt, synthetic construct
  source 1..22: mol_type = other RNA
ctggccagttacttggttttat

SEQ ID NO: 8175 - RNA, 22 nt, synthetic construct
  source 1..22: mol_type = other RNA
ctggcccaggtagtaagcagtg

SEQ ID NO: 8176 - RNA, 22 nt, synthetic construct
  source 1..22: mol_type = other RNA
ctggcctagctgtagaatttca

SEQ ID NO: 8177 - RNA, 22 nt, synthetic construct
  source 1..22: mol_type = other RNA
ctggcggagggatgcaggtggg

SEQ ID NO: 8178 - RNA, 22 nt, synthetic construct
  source 1..22: mol_type = other RNA
ctggctgcatttggtcctcagg

SEQ ID NO: 8179 - RNA, 22 nt, synthetic construct
  source 1..22: mol_type = other RNA
ctggcttgccttggctggccca

SEQ ID NO: 8180 - RNA, 22 nt, synthetic construct
  source 1..22: mol_type = other RNA
ctgggaaattagtgcagatgct

SEQ ID NO: 8181 - RNA, 22 nt, synthetic construct
  source 1..22: mol_type = other RNA
ctgggaagagacctgcacaggg

SEQ ID NO: 8182 - RNA, 22 nt, synthetic construct
  source 1..22: mol_type = other RNA
ctgggagacctgagccatttgc

SEQ ID NO: 8183 - RNA, 22 nt, synthetic construct
  source 1..22: mol_type = other RNA
ctgggccagccaaggcaagcca

SEQ ID NO: 8184 - RNA, 22 nt, synthetic construct
  source 1..22: mol_type = other RNA
ctgggcgacacagcgagactgt

SEQ ID NO: 8185 - RNA, 22 nt, synthetic construct
  source 1..22: mol_type = other RNA
ctggggtgagcattggatcaac

SEQ ID NO: 8186 - RNA, 22 nt, synthetic construct
  source 1..22: mol_type = other RNA
ctgggttgggggtgggaacctg

SEQ ID NO: 8187 - RNA, 22 nt, synthetic construct
  source 1..22: mol_type = other RNA
ctggtcaatatggggaaatcct

SEQ ID NO: 8188 - RNA, 22 nt, synthetic construct
  source 1..22: mol_type = other RNA
ctggtcccaccgtctgcttgct

SEQ ID NO: 8189 - RNA, 22 nt, synthetic construct
  source 1..22: mol_type = other RNA
ctggtcctttcacatcattttg

SEQ ID NO: 8190 - RNA, 22 nt, synthetic construct
  source 1..22: mol_type = other RNA
ctggtcttagttatttgtgttt

SEQ ID NO: 8191 - RNA, 22 nt, synthetic construct
  source 1..22: mol_type = other RNA
ctggtctttttcagttctgaaa

SEQ ID NO: 8192 - RNA, 22 nt, synthetic construct
  source 1..22: mol_type = other RNA
ctggttactgaacttgtcttgc

SEQ ID NO: 8193 - RNA, 22 nt, synthetic construct
  source 1..22: mol_type = other RNA
ctgtaatggccactgaagcacg

SEQ ID NO: 8194 - RNA, 22 nt, synthetic construct
  source 1..22: mol_type = other RNA
ctgtagaactgcaatttccatt

SEQ ID NO: 8195 - RNA, 22 nt, synthetic construct
  source 1..22: mol_type = other RNA
ctgtagaatttcagaactgaaa

SEQ ID NO: 8196 - RNA, 22 nt, synthetic construct
  source 1..22: mol_type = other RNA
ctgtagcataaaatgttcacat

SEQ ID NO: 8197 - RNA, 22 nt, synthetic construct
  source 1..22: mol_type = other RNA
ctgtaggactatataaagtact

SEQ ID NO: 8198 - RNA, 22 nt, synthetic construct
  source 1..22: mol_type = other RNA
ctgtagtctcagctaggtggga

SEQ ID NO: 8199 - RNA, 22 nt, synthetic construct
  source 1..22: mol_type = other RNA
ctgtatacactaagctctctag

SEQ ID NO: 8200 - RNA, 22 nt, synthetic construct
  source 1..22: mol_type = other RNA
ctgtatttatatttggggatca

SEQ ID NO: 8201 - RNA, 22 nt, synthetic construct
  source 1..22: mol_type = other RNA
ctgtcaccaaggacgttaaagg

SEQ ID NO: 8202 - RNA, 22 nt, synthetic construct
  source 1..22: mol_type = other RNA
ctgtcatcttccgtgagggcta

SEQ ID NO: 8203 - RNA, 22 nt, synthetic construct
  source 1..22: mol_type = other RNA
ctgtccggtgggaacgggctgc

SEQ ID NO: 8204 - RNA, 22 nt, synthetic construct
  source 1..22: mol_type = other RNA
ctgtcctggcttttatttaaag

SEQ ID NO: 8205 - RNA, 22 nt, synthetic construct
  source 1..22: mol_type = other RNA
ctgtcgttccggttatgttgtg

SEQ ID NO: 8206 - RNA, 22 nt, synthetic construct
  source 1..22: mol_type = other RNA
ctgtctccaaaaaaccaaaaaa

SEQ ID NO: 8207 - RNA, 22 nt, synthetic construct
  source 1..22: mol_type = other RNA
ctgtctcccgggttcaggtgat

SEQ ID NO: 8208 - RNA, 22 nt, synthetic construct
  source 1..22: mol_type = other RNA
ctgtcttctgctggttactgaa

SEQ ID NO: 8209 - RNA, 22 nt, synthetic construct
  source 1..22: mol_type = other RNA
ctgtgcaggtctcttcccagac

SEQ ID NO: 8210 - RNA, 22 nt, synthetic construct
  source 1..22: mol_type = other RNA
ctgtggaattaataggcatctt

SEQ ID NO: 8211 - RNA, 22 nt, synthetic construct
  source 1..22: mol_type = other RNA
ctgtgtgtctccataaaagtcc

SEQ ID NO: 8212 - RNA, 22 nt, synthetic construct
  source 1..22: mol_type = other RNA
ctgtgtttcaccaccggttctc

SEQ ID NO: 8213 - RNA, 22 nt, synthetic construct
  source 1..22: mol_type = other RNA
ctgttatcagttcagttactca

SEQ ID NO: 8214 - RNA, 22 nt, synthetic construct
  source 1..22: mol_type = other RNA
ctgttcactaaggagtgagtgg

SEQ ID NO: 8215 - RNA, 22 nt, synthetic construct
  source 1..22: mol_type = other RNA
ctgttctgtcttctgctggtta

SEQ ID NO: 8216 - RNA, 22 nt, synthetic construct
  source 1..22: mol_type = other RNA
ctgttgccaactttcaacatta

SEQ ID NO: 8217 - RNA, 22 nt, synthetic construct
  source 1..22: mol_type = other RNA
ctgttgctcctttcccccatta

SEQ ID NO: 8218 - RNA, 22 nt, synthetic construct
  source 1..22: mol_type = other RNA
ctgtttctgttctgtcttctgc

SEQ ID NO: 8219 - RNA, 22 nt, synthetic construct
  source 1..22: mol_type = other RNA
cttaatgagccctgggaaatta

SEQ ID NO: 8220 - RNA, 22 nt, synthetic construct
  source 1..22: mol_type = other RNA
cttacacaacataaccggaacg

SEQ ID NO: 8221 - RNA, 22 nt, synthetic construct
  source 1..22: mol_type = other RNA
cttactacctgggccagccaag

SEQ ID NO: 8222 - RNA, 22 nt, synthetic construct
  source 1..22: mol_type = other RNA
cttactgtatttatatttgggg

SEQ ID NO: 8223 - RNA, 22 nt, synthetic construct
  source 1..22: mol_type = other RNA
cttagccctcacggaagatgac

SEQ ID NO: 8224 - RNA, 22 nt, synthetic construct
  source 1..22: mol_type = other RNA
cttagtgaacagtgggaatgtc

SEQ ID NO: 8225 - RNA, 22 nt, synthetic construct
  source 1..22: mol_type = other RNA
cttagtgtatacagatgagggt

SEQ ID NO: 8226 - RNA, 22 nt, synthetic construct
  source 1..22: mol_type = other RNA
cttagtgttcctttttccaggt

SEQ ID NO: 8227 - RNA, 22 nt, synthetic construct
  source 1..22: mol_type = other RNA
cttatatgcaggctgtcgttcc

SEQ ID NO: 8228 - RNA, 22 nt, synthetic construct
  source 1..22: mol_type = other RNA
cttattttctttctcctgtgtt

SEQ ID NO: 8229 - RNA, 22 nt, synthetic construct
  source 1..22: mol_type = other RNA
cttcaagaaactggtcctttca

SEQ ID NO: 8230 - RNA, 22 nt, synthetic construct
  source 1..22: mol_type = other RNA
cttcactcctcgagtactggac

SEQ ID NO: 8231 - RNA, 22 nt, synthetic construct
  source 1..22: mol_type = other RNA
cttcagcactttctaaatttcc

SEQ ID NO: 8232 - RNA, 22 nt, synthetic construct
  source 1..22: mol_type = other RNA
cttcagcctcattcactgtcct

SEQ ID NO: 8233 - RNA, 22 nt, synthetic construct
  source 1..22: mol_type = other RNA
cttcagtggccattacagttcc

SEQ ID NO: 8234 - RNA, 22 nt, synthetic construct
  source 1..22: mol_type = other RNA
cttccaggttgatccaatgctc

SEQ ID NO: 8235 - RNA, 22 nt, synthetic construct
  source 1..22: mol_type = other RNA
cttccattgtattgtctgacac

SEQ ID NO: 8236 - RNA, 22 nt, synthetic construct
  source 1..22: mol_type = other RNA
cttcccagacaccacaatgacc

SEQ ID NO: 8237 - RNA, 22 nt, synthetic construct
  source 1..22: mol_type = other RNA
cttccggcccacctgcatccct

SEQ ID NO: 8238 - RNA, 22 nt, synthetic construct
  source 1..22: mol_type = other RNA
cttccgtgagggctaagctttc

SEQ ID NO: 8239 - RNA, 22 nt, synthetic construct
  source 1..22: mol_type = other RNA
cttcctgaaagctcatttaaaa

SEQ ID NO: 8240 - RNA, 22 nt, synthetic construct
  source 1..22: mol_type = other RNA
cttctagagagcttagtgtata

SEQ ID NO: 8241 - RNA, 22 nt, synthetic construct
  source 1..22: mol_type = other RNA
cttctgctggttactgaacttg

SEQ ID NO: 8242 - RNA, 22 nt, synthetic construct
  source 1..22: mol_type = other RNA
cttctggggtgagcattggatc

SEQ ID NO: 8243 - RNA, 22 nt, synthetic construct
  source 1..22: mol_type = other RNA
cttgaagtccagtgtttccacg

SEQ ID NO: 8244 - RNA, 22 nt, synthetic construct
  source 1..22: mol_type = other RNA
cttgatccccaaatataaatac

SEQ ID NO: 8245 - RNA, 22 nt, synthetic construct
  source 1..22: mol_type = other RNA
cttgccactcactccttagtga

SEQ ID NO: 8246 - RNA, 22 nt, synthetic construct
  source 1..22: mol_type = other RNA
cttgccttggctggcccaggta

SEQ ID NO: 8247 - RNA, 22 nt, synthetic construct
  source 1..22: mol_type = other RNA
cttgctagcctactgctgactg

SEQ ID NO: 8248 - RNA, 22 nt, synthetic construct
  source 1..22: mol_type = other RNA
cttgcttgtcaccacggtgcta

SEQ ID NO: 8249 - RNA, 22 nt, synthetic construct
  source 1..22: mol_type = other RNA
cttggcagtcgatcggaatcgt

SEQ ID NO: 8250 - RNA, 22 nt, synthetic construct
  source 1..22: mol_type = other RNA
cttggctatgaatgtcagaaag

SEQ ID NO: 8251 - RNA, 22 nt, synthetic construct
  source 1..22: mol_type = other RNA
cttggctggcccaggtagtaag

SEQ ID NO: 8252 - RNA, 22 nt, synthetic construct
  source 1..22: mol_type = other RNA
cttggtgacaggacttttatgg

SEQ ID NO: 8253 - RNA, 22 nt, synthetic construct
  source 1..22: mol_type = other RNA
cttggttttatctcctgctgga

SEQ ID NO: 8254 - RNA, 22 nt, synthetic construct
  source 1..22: mol_type = other RNA
cttgtcaccacggtgctaggaa

SEQ ID NO: 8255 - RNA, 22 nt, synthetic construct
  source 1..22: mol_type = other RNA
cttgtcttgccactcactcctt

SEQ ID NO: 8256 - RNA, 22 nt, synthetic construct
  source 1..22: mol_type = other RNA
cttgtgcctcagcctcccacct

SEQ ID NO: 8257 - RNA, 22 nt, synthetic construct
  source 1..22: mol_type = other RNA
cttgtggcaggggctgatttcc

SEQ ID NO: 8258 - RNA, 22 nt, synthetic construct
  source 1..22: mol_type = other RNA
cttgttcaggtgacgctcttct

SEQ ID NO: 8259 - RNA, 22 nt, synthetic construct
  source 1..22: mol_type = other RNA
ctttaaataaaagccaggacag

SEQ ID NO: 8260 - RNA, 22 nt, synthetic construct
  source 1..22: mol_type = other RNA
ctttaacgtccttggtgacagg

SEQ ID NO: 8261 - RNA, 22 nt, synthetic construct
  source 1..22: mol_type = other RNA
ctttatatagtcctacagtcca

SEQ ID NO: 8262 - RNA, 22 nt, synthetic construct
  source 1..22: mol_type = other RNA
ctttcaacattagtttgggcct

SEQ ID NO: 8263 - RNA, 22 nt, synthetic construct
  source 1..22: mol_type = other RNA
ctttcacatcattttgcgaggg

SEQ ID NO: 8264 - RNA, 22 nt, synthetic construct
  source 1..22: mol_type = other RNA
ctttcaggaagttgctgagaaa

SEQ ID NO: 8265 - RNA, 22 nt, synthetic construct
  source 1..22: mol_type = other RNA
ctttcagggctctcgtttcgaa

SEQ ID NO: 8266 - RNA, 22 nt, synthetic construct
  source 1..22: mol_type = other RNA
ctttcgaaacgagagccctgaa

SEQ ID NO: 8267 - RNA, 22 nt, synthetic construct
  source 1..22: mol_type = other RNA
ctttctaaatttcctgttgctc

SEQ ID NO: 8268 - RNA, 22 nt, synthetic construct
  source 1..22: mol_type = other RNA
ctttctcctgtgtttcaccacc

SEQ ID NO: 8269 - RNA, 22 nt, synthetic construct
  source 1..22: mol_type = other RNA
ctttctgacattcatagccaag

SEQ ID NO: 8270 - RNA, 22 nt, synthetic construct
  source 1..22: mol_type = other RNA
ctttgatccccttattttcttt

SEQ ID NO: 8271 - RNA, 22 nt, synthetic construct
  source 1..22: mol_type = other RNA
cttttaaatgggtgaaaaatgg

SEQ ID NO: 8272 - RNA, 22 nt, synthetic construct
  source 1..22: mol_type = other RNA
cttttatggagacacacaggta

SEQ ID NO: 8273 - RNA, 22 nt, synthetic construct
  source 1..22: mol_type = other RNA
cttttctcagattatttcctta

SEQ ID NO: 8274 - RNA, 22 nt, synthetic construct
  source 1..22: mol_type = other RNA
ctttttaaatgagctttcagga

SEQ ID NO: 8275 - RNA, 22 nt, synthetic construct
  source 1..22: mol_type = other RNA
ctttttcagttctgaaattcta

SEQ ID NO: 8276 - RNA, 22 nt, synthetic construct
  source 1..22: mol_type = other RNA
gaaaaagaccagagatcccctg

SEQ ID NO: 8277 - RNA, 22 nt, synthetic construct
  source 1..22: mol_type = other RNA
gaaaaaggaacactaaggaaat

SEQ ID NO: 8278 - RNA, 22 nt, synthetic construct
  source 1..22: mol_type = other RNA
gaaaactacatcaaatatctgc

SEQ ID NO: 8279 - RNA, 22 nt, synthetic construct
  source 1..22: mol_type = other RNA
gaaaactcttttctcagattat

SEQ ID NO: 8280 - RNA, 22 nt, synthetic construct
  source 1..22: mol_type = other RNA
gaaaagagttttcaccctctgt

SEQ ID NO: 8281 - RNA, 22 nt, synthetic construct
  source 1..22: mol_type = other RNA
gaaaataaggggatcaaagagg

SEQ ID NO: 8282 - RNA, 22 nt, synthetic construct
  source 1..22: mol_type = other RNA
gaaaatcgacatttcccattta

SEQ ID NO: 8283 - RNA, 22 nt, synthetic construct
  source 1..22: mol_type = other RNA
gaaacacaggagaaagaaaata

SEQ ID NO: 8284 - RNA, 22 nt, synthetic construct
  source 1..22: mol_type = other RNA
gaaacactggacttcaagaaac

SEQ ID NO: 8285 - RNA, 22 nt, synthetic construct
  source 1..22: mol_type = other RNA
gaaacagtctgcttcagcactt

SEQ ID NO: 8286 - RNA, 22 nt, synthetic construct
  source 1..22: mol_type = other RNA
gaaaccccacttccattgtatt

SEQ ID NO: 8287 - RNA, 22 nt, synthetic construct
  source 1..22: mol_type = other RNA
gaaacgagagccctgaaagctt

SEQ ID NO: 8288 - RNA, 22 nt, synthetic construct
  source 1..22: mol_type = other RNA
gaaactggtcctttcacatcat

SEQ ID NO: 8289 - RNA, 22 nt, synthetic construct
  source 1..22: mol_type = other RNA
gaaagaaaataaggggatcaaa

SEQ ID NO: 8290 - RNA, 22 nt, synthetic construct
  source 1..22: mol_type = other RNA
gaaagcattgcctctttgatcc

SEQ ID NO: 8291 - RNA, 22 nt, synthetic construct
  source 1..22: mol_type = other RNA
gaaagctcatttaaaaagggaa

SEQ ID NO: 8292 - RNA, 22 nt, synthetic construct
  source 1..22: mol_type = other RNA
gaaagcttagccctcacggaag

SEQ ID NO: 8293 - RNA, 22 nt, synthetic construct
  source 1..22: mol_type = other RNA
gaaaggaccagtttcttgaagt

SEQ ID NO: 8294 - RNA, 22 nt, synthetic construct
  source 1..22: mol_type = other RNA
gaaaggagcaacaggaaattta

SEQ ID NO: 8295 - RNA, 22 nt, synthetic construct
  source 1..22: mol_type = other RNA
gaaagtcatgtgaacattttat

SEQ ID NO: 8296 - RNA, 22 nt, synthetic construct
  source 1..22: mol_type = other RNA
gaaagtgctgaagcagactgtt

SEQ ID NO: 8297 - RNA, 22 nt, synthetic construct
  source 1..22: mol_type = other RNA
gaaagttggcaacagccccttg

SEQ ID NO: 8298 - RNA, 22 nt, synthetic construct
  source 1..22: mol_type = other RNA
gaaataatctgagaaaagagtt

SEQ ID NO: 8299 - RNA, 22 nt, synthetic construct
  source 1..22: mol_type = other RNA
gaaatcagcccctgccacaagg

SEQ ID NO: 8300 - RNA, 22 nt, synthetic construct
  source 1..22: mol_type = other RNA
gaaatccagttgactgtcatct

SEQ ID NO: 8301 - RNA, 22 nt, synthetic construct
  source 1..22: mol_type = other RNA
gaaatggggtggaatagggaac

SEQ ID NO: 8302 - RNA, 22 nt, synthetic construct
  source 1..22: mol_type = other RNA
gaaattagtgcagatgctggtc

SEQ ID NO: 8303 - RNA, 22 nt, synthetic construct
  source 1..22: mol_type = other RNA
gaaattctacagctaggccagt

SEQ ID NO: 8304 - RNA, 22 nt, synthetic construct
  source 1..22: mol_type = other RNA
gaaattgcagttctacagtagt

SEQ ID NO: 8305 - RNA, 22 nt, synthetic construct
  source 1..22: mol_type = other RNA
gaaatttagaaagtgctgaagc

SEQ ID NO: 8306 - RNA, 22 nt, synthetic construct
  source 1..22: mol_type = other RNA
gaacaaaacctgagggtcattg

SEQ ID NO: 8307 - RNA, 22 nt, synthetic construct
  source 1..22: mol_type = other RNA
gaacaagatgcagaaccatggc

SEQ ID NO: 8308 - RNA, 22 nt, synthetic construct
  source 1..22: mol_type = other RNA
gaacactaaggaaataatctga

SEQ ID NO: 8309 - RNA, 22 nt, synthetic construct
  source 1..22: mol_type = other RNA
gaacagaaacagtctgcttcag

SEQ ID NO: 8310 - RNA, 22 nt, synthetic construct
  source 1..22: mol_type = other RNA
gaacagtgggaatgtccagagt

SEQ ID NO: 8311 - RNA, 22 nt, synthetic construct
  source 1..22: mol_type = other RNA
gaacattttatgctacagaggg

SEQ ID NO: 8312 - RNA, 22 nt, synthetic construct
  source 1..22: mol_type = other RNA
gaaccatggctatgagaacccc

SEQ ID NO: 8313 - RNA, 22 nt, synthetic construct
  source 1..22: mol_type = other RNA
gaaccccacctacaaatacctg

SEQ ID NO: 8314 - RNA, 22 nt, synthetic construct
  source 1..22: mol_type = other RNA
gaaccggtggtgaaacacagga

SEQ ID NO: 8315 - RNA, 22 nt, synthetic construct
  source 1..22: mol_type = other RNA
gaacctgtggaattaataggca

SEQ ID NO: 8316 - RNA, 22 nt, synthetic construct
  source 1..22: mol_type = other RNA
gaacgacagcctgcatataagt

SEQ ID NO: 8317 - RNA, 22 nt, synthetic construct
  source 1..22: mol_type = other RNA
gaacgggctgctggctgcattt

SEQ ID NO: 8318 - RNA, 22 nt, synthetic construct
  source 1..22: mol_type = other RNA
gaactgaaaaagaccagagatc

SEQ ID NO: 8319 - RNA, 22 nt, synthetic construct
  source 1..22: mol_type = other RNA
gaactgataacagcagcatgtc

SEQ ID NO: 8320 - RNA, 22 nt, synthetic construct
  source 1..22: mol_type = other RNA
gaactgcaatttccattctttt

SEQ ID NO: 8321 - RNA, 22 nt, synthetic construct
  source 1..22: mol_type = other RNA
gaactgtaatggccactgaagc

SEQ ID NO: 8322 - RNA, 22 nt, synthetic construct
  source 1..22: mol_type = other RNA
gaacttgtcttgccactcactc

SEQ ID NO: 8323 - RNA, 22 nt, synthetic construct
  source 1..22: mol_type = other RNA
gaagaacaaaacctgagggtca

SEQ ID NO: 8324 - RNA, 22 nt, synthetic construct
  source 1..22: mol_type = other RNA
gaagacagaacagaaacagtct

SEQ ID NO: 8325 - RNA, 22 nt, synthetic construct
  source 1..22: mol_type = other RNA
gaagacgctggaataaaatgcc

SEQ ID NO: 8326 - RNA, 22 nt, synthetic construct
  source 1..22: mol_type = other RNA
gaagagacctgcacagggtgct

SEQ ID NO: 8327 - RNA, 22 nt, synthetic construct
  source 1..22: mol_type = other RNA
gaagagcgtcacctgaacaaga

SEQ ID NO: 8328 - RNA, 22 nt, synthetic construct
  source 1..22: mol_type = other RNA
gaagagttgacttacacaacat

SEQ ID NO: 8329 - RNA, 22 nt, synthetic construct
  source 1..22: mol_type = other RNA
gaagatcccacgattccgatcg

SEQ ID NO: 8330 - RNA, 22 nt, synthetic construct
  source 1..22: mol_type = other RNA
gaagatgacagtcaactggatt

SEQ ID NO: 8331 - RNA, 22 nt, synthetic construct
  source 1..22: mol_type = other RNA
gaagatgcctattaattccaca

SEQ ID NO: 8332 - RNA, 22 nt, synthetic construct
  source 1..22: mol_type = other RNA
gaagcacgtgagagaccctcgc

SEQ ID NO: 8333 - RNA, 22 nt, synthetic construct
  source 1..22: mol_type = other RNA
gaagcagactgtttctgttctg

SEQ ID NO: 8334 - RNA, 22 nt, synthetic construct
  source 1..22: mol_type = other RNA
gaagtccagtgtttccacggct

SEQ ID NO: 8335 - RNA, 22 nt, synthetic construct
  source 1..22: mol_type = other RNA
gaagtggggtttctgattaatt

SEQ ID NO: 8336 - RNA, 22 nt, synthetic construct
  source 1..22: mol_type = other RNA
gaagttgctgagaaatggggtg

SEQ ID NO: 8337 - RNA, 22 nt, synthetic construct
  source 1..22: mol_type = other RNA
gaataaaatgcctttaacgtcc

SEQ ID NO: 8338 - RNA, 22 nt, synthetic construct
  source 1..22: mol_type = other RNA
gaatagggaactgtaatggcca

SEQ ID NO: 8339 - RNA, 22 nt, synthetic construct
  source 1..22: mol_type = other RNA
gaatccagtgagtaactgaact

SEQ ID NO: 8340 - RNA, 22 nt, synthetic construct
  source 1..22: mol_type = other RNA
gaatcgtgggatcttccggccc

SEQ ID NO: 8341 - RNA, 22 nt, synthetic construct
  source 1..22: mol_type = other RNA
gaatgaggctgaagagttgact

SEQ ID NO: 8342 - RNA, 22 nt, synthetic construct
  source 1..22: mol_type = other RNA
gaatggaaattgcagttctaca

SEQ ID NO: 8343 - RNA, 22 nt, synthetic construct
  source 1..22: mol_type = other RNA
gaatgtcagaaagtcatgtgaa

SEQ ID NO: 8344 - RNA, 22 nt, synthetic construct
  source 1..22: mol_type = other RNA
gaatgtccagagtcccttgatc

SEQ ID NO: 8345 - RNA, 22 nt, synthetic construct
  source 1..22: mol_type = other RNA
gaattaataggcatcttcactc

SEQ ID NO: 8346 - RNA, 22 nt, synthetic construct
  source 1..22: mol_type = other RNA
gaatttcagaactgaaaaagac

SEQ ID NO: 8347 - RNA, 22 nt, synthetic construct
  source 1..22: mol_type = other RNA
gacaagcaaggctcggcgccac

SEQ ID NO: 8348 - RNA, 22 nt, synthetic construct
  source 1..22: mol_type = other RNA
gacaagttcagtaaccagcaga

SEQ ID NO: 8349 - RNA, 22 nt, synthetic construct
  source 1..22: mol_type = other RNA
gacaatacaatggaagtggggt

SEQ ID NO: 8350 - RNA, 22 nt, synthetic construct
  source 1..22: mol_type = other RNA
gacacacaggtatccagccgtg

SEQ ID NO: 8351 - RNA, 22 nt, synthetic construct
  source 1..22: mol_type = other RNA
gacacagcgagactgtctccaa

SEQ ID NO: 8352 - RNA, 22 nt, synthetic construct
  source 1..22: mol_type = other RNA
gacacatgctctcaatatataa

SEQ ID NO: 8353 - RNA, 22 nt, synthetic construct
  source 1..22: mol_type = other RNA
gacaccacaatgaccctcaggt

SEQ ID NO: 8354 - RNA, 22 nt, synthetic construct
  source 1..22: mol_type = other RNA
gacaccctcatctgtatacact

SEQ ID NO: 8355 - RNA, 22 nt, synthetic construct
  source 1..22: mol_type = other RNA
gacagaacagaaacagtctgct

SEQ ID NO: 8356 - RNA, 22 nt, synthetic construct
  source 1..22: mol_type = other RNA
gacagaggttgcagtgcgctga

SEQ ID NO: 8357 - RNA, 22 nt, synthetic construct
  source 1..22: mol_type = other RNA
gacagcctgcatataagtctat

SEQ ID NO: 8358 - RNA, 22 nt, synthetic construct
  source 1..22: mol_type = other RNA
gacaggacttttatggagacac

SEQ ID NO: 8359 - RNA, 22 nt, synthetic construct
  source 1..22: mol_type = other RNA
gacaggccaaatgagaaccggt

SEQ ID NO: 8360 - RNA, 22 nt, synthetic construct
  source 1..22: mol_type = other RNA
gacagtcaactggatttcctag

SEQ ID NO: 8361 - RNA, 22 nt, synthetic construct
  source 1..22: mol_type = other RNA
gacagtgaatgaggctgaagag

SEQ ID NO: 8362 - RNA, 22 nt, synthetic construct
  source 1..22: mol_type = other RNA
gacatcctgacctcctggactg

SEQ ID NO: 8363 - RNA, 22 nt, synthetic construct
  source 1..22: mol_type = other RNA
gacatgctgctgttatcagttc

SEQ ID NO: 8364 - RNA, 22 nt, synthetic construct
  source 1..22: mol_type = other RNA
gacattcatagccaaggcccaa

SEQ ID NO: 8365 - RNA, 22 nt, synthetic construct
  source 1..22: mol_type = other RNA
gacattcccactgttcactaag

SEQ ID NO: 8366 - RNA, 22 nt, synthetic construct
  source 1..22: mol_type = other RNA
gaccaaatgcagccagcagccc

SEQ ID NO: 8367 - RNA, 22 nt, synthetic construct
  source 1..22: mol_type = other RNA
gaccagagatcccctggtccca

SEQ ID NO: 8368 - RNA, 22 nt, synthetic construct
  source 1..22: mol_type = other RNA
gaccagcatctgcactaatttc

SEQ ID NO: 8369 - RNA, 22 nt, synthetic construct
  source 1..22: mol_type = other RNA
gaccaggggatctctggtcttt

SEQ ID NO: 8370 - RNA, 22 nt, synthetic construct
  source 1..22: mol_type = other RNA
gaccagggtgatctcaaatcct

SEQ ID NO: 8371 - RNA, 22 nt, synthetic construct
  source 1..22: mol_type = other RNA
gaccagtttcttgaagtccagt

SEQ ID NO: 8372 - RNA, 22 nt, synthetic construct
  source 1..22: mol_type = other RNA
gaccctcaggttttgttcttcc

SEQ ID NO: 8373 - RNA, 22 nt, synthetic construct
  source 1..22: mol_type = other RNA
gaccctcgcaaaatgatgtgaa

SEQ ID NO: 8374 - RNA, 22 nt, synthetic construct
  source 1..22: mol_type = other RNA
gacctaggaatccagtgagtaa

SEQ ID NO: 8375 - RNA, 22 nt, synthetic construct
  source 1..22: mol_type = other RNA
gacctcctggactgtaggacta

SEQ ID NO: 8376 - RNA, 22 nt, synthetic construct
  source 1..22: mol_type = other RNA
gacctgagccatttgctgcaca

SEQ ID NO: 8377 - RNA, 22 nt, synthetic construct
  source 1..22: mol_type = other RNA
gacctgcacagggtgctgggag

SEQ ID NO: 8378 - RNA, 22 nt, synthetic construct
  source 1..22: mol_type = other RNA
gaccttaatgagccctgggaaa

SEQ ID NO: 8379 - RNA, 22 nt, synthetic construct
  source 1..22: mol_type = other RNA
gacgcagcccctggcagcggct

SEQ ID NO: 8380 - RNA, 22 nt, synthetic construct
  source 1..22: mol_type = other RNA
gacgctcttctggggtgagcat

SEQ ID NO: 8381 - RNA, 22 nt, synthetic construct
  source 1..22: mol_type = other RNA
gacgctggaataaaatgccttt

SEQ ID NO: 8382 - RNA, 22 nt, synthetic construct
  source 1..22: mol_type = other RNA
gacggtgggaccaggggatctc

SEQ ID NO: 8383 - RNA, 22 nt, synthetic construct
  source 1..22: mol_type = other RNA
gacgttaaaggcattttattcc

SEQ ID NO: 8384 - RNA, 22 nt, synthetic construct
  source 1..22: mol_type = other RNA
gactagctgggcgtggtggcac

SEQ ID NO: 8385 - RNA, 22 nt, synthetic construct
  source 1..22: mol_type = other RNA
gactatataaagtactactgta

SEQ ID NO: 8386 - RNA, 22 nt, synthetic construct
  source 1..22: mol_type = other RNA
gactctggacattcccactgtt

SEQ ID NO: 8387 - RNA, 22 nt, synthetic construct
  source 1..22: mol_type = other RNA
gactgccaagcagcagccgctg

SEQ ID NO: 8388 - RNA, 22 nt, synthetic construct
  source 1..22: mol_type = other RNA
gactggcctagctgtagaattt

SEQ ID NO: 8389 - RNA, 22 nt, synthetic construct
  source 1..22: mol_type = other RNA
gactggcttgccttggctggcc

SEQ ID NO: 8390 - RNA, 22 nt, synthetic construct
  source 1..22: mol_type = other RNA
gactgtaggactatataaagta

SEQ ID NO: 8391 - RNA, 22 nt, synthetic construct
  source 1..22: mol_type = other RNA
gactgtcatcttccgtgagggc

SEQ ID NO: 8392 - RNA, 22 nt, synthetic construct
  source 1..22: mol_type = other RNA
gactgtctccaaaaaaccaaaa

SEQ ID NO: 8393 - RNA, 22 nt, synthetic construct
  source 1..22: mol_type = other RNA
gactgtttctgttctgtcttct

SEQ ID NO: 8394 - RNA, 22 nt, synthetic construct
  source 1..22: mol_type = other RNA
gacttacacaacataaccggaa

SEQ ID NO: 8395 - RNA, 22 nt, synthetic construct
  source 1..22: mol_type = other RNA
gacttatatgcaggctgtcgtt

SEQ ID NO: 8396 - RNA, 22 nt, synthetic construct
  source 1..22: mol_type = other RNA
gacttcaagaaactggtccttt

SEQ ID NO: 8397 - RNA, 22 nt, synthetic construct
  source 1..22: mol_type = other RNA
gactttctgacattcatagcca

SEQ ID NO: 8398 - RNA, 22 nt, synthetic construct
  source 1..22: mol_type = other RNA
gacttttatggagacacacagg

SEQ ID NO: 8399 - RNA, 22 nt, synthetic construct
  source 1..22: mol_type = other RNA
gagaaaagagttttcaccctct

SEQ ID NO: 8400 - RNA, 22 nt, synthetic construct
  source 1..22: mol_type = other RNA
gagaaagaaaataaggggatca

SEQ ID NO: 8401 - RNA, 22 nt, synthetic construct
  source 1..22: mol_type = other RNA
gagaaatggggtggaataggga

SEQ ID NO: 8402 - RNA, 22 nt, synthetic construct
  source 1..22: mol_type = other RNA
gagaaccccacctacaaatacc

SEQ ID NO: 8403 - RNA, 22 nt, synthetic construct
  source 1..22: mol_type = other RNA
gagaaccggtggtgaaacacag

SEQ ID NO: 8404 - RNA, 22 nt, synthetic construct
  source 1..22: mol_type = other RNA
gagacacacaggtatccagccg

SEQ ID NO: 8405 - RNA, 22 nt, synthetic construct
  source 1..22: mol_type = other RNA
gagaccctcgcaaaatgatgtg

SEQ ID NO: 8406 - RNA, 22 nt, synthetic construct
  source 1..22: mol_type = other RNA
gagacctgagccatttgctgca

SEQ ID NO: 8407 - RNA, 22 nt, synthetic construct
  source 1..22: mol_type = other RNA
gagacctgcacagggtgctggg

SEQ ID NO: 8408 - RNA, 22 nt, synthetic construct
  source 1..22: mol_type = other RNA
gagactggcctagctgtagaat

SEQ ID NO: 8409 - RNA, 22 nt, synthetic construct
  source 1..22: mol_type = other RNA
gagactgtctccaaaaaaccaa

SEQ ID NO: 8410 - RNA, 22 nt, synthetic construct
  source 1..22: mol_type = other RNA
gagagaccctcgcaaaatgatg

SEQ ID NO: 8411 - RNA, 22 nt, synthetic construct
  source 1..22: mol_type = other RNA
gagagcatgtgtcagacaatac

SEQ ID NO: 8412 - RNA, 22 nt, synthetic construct
  source 1..22: mol_type = other RNA
gagagccctgaaagcttagccc

SEQ ID NO: 8413 - RNA, 22 nt, synthetic construct
  source 1..22: mol_type = other RNA
gagagcttagtgtatacagatg

SEQ ID NO: 8414 - RNA, 22 nt, synthetic construct
  source 1..22: mol_type = other RNA
gagataaaaccaagtaactggc

SEQ ID NO: 8415 - RNA, 22 nt, synthetic construct
  source 1..22: mol_type = other RNA
gagataggatttccccatattg

SEQ ID NO: 8416 - RNA, 22 nt, synthetic construct
  source 1..22: mol_type = other RNA
gagatcaccctggtcaatatgg

SEQ ID NO: 8417 - RNA, 22 nt, synthetic construct
  source 1..22: mol_type = other RNA
gagatcccctggtcccaccgtc

SEQ ID NO: 8418 - RNA, 22 nt, synthetic construct
  source 1..22: mol_type = other RNA
gagcaacaggaaatttagaaag

SEQ ID NO: 8419 - RNA, 22 nt, synthetic construct
  source 1..22: mol_type = other RNA
gagcagatgcagatttaggtgg

SEQ ID NO: 8420 - RNA, 22 nt, synthetic construct
  source 1..22: mol_type = other RNA
gagcatgtgtcagacaatacaa

SEQ ID NO: 8421 - RNA, 22 nt, synthetic construct
  source 1..22: mol_type = other RNA
gagcattggatcaacctggaag

SEQ ID NO: 8422 - RNA, 22 nt, synthetic construct
  source 1..22: mol_type = other RNA
gagccatttgctgcacaatccc

SEQ ID NO: 8423 - RNA, 22 nt, synthetic construct
  source 1..22: mol_type = other RNA
gagccctgaaagcttagccctc

SEQ ID NO: 8424 - RNA, 22 nt, synthetic construct
  source 1..22: mol_type = other RNA
gagccctgggaaattagtgcag

SEQ ID NO: 8425 - RNA, 22 nt, synthetic construct
  source 1..22: mol_type = other RNA
gagccttgcttgtcaccacggt

SEQ ID NO: 8426 - RNA, 22 nt, synthetic construct
  source 1..22: mol_type = other RNA
gagcgtcacctgaacaagatgc

SEQ ID NO: 8427 - RNA, 22 nt, synthetic construct
  source 1..22: mol_type = other RNA
gagctactgcacctggccagtt

SEQ ID NO: 8428 - RNA, 22 nt, synthetic construct
  source 1..22: mol_type = other RNA
gagcttagtgtatacagatgag

SEQ ID NO: 8429 - RNA, 22 nt, synthetic construct
  source 1..22: mol_type = other RNA
gagctttcaggaagttgctgag

SEQ ID NO: 8430 - RNA, 22 nt, synthetic construct
  source 1..22: mol_type = other RNA
gaggaccaaatgcagccagcag

SEQ ID NO: 8431 - RNA, 22 nt, synthetic construct
  source 1..22: mol_type = other RNA
gaggagtgaagatgcctattaa

SEQ ID NO: 8432 - RNA, 22 nt, synthetic construct
  source 1..22: mol_type = other RNA
gaggcaatgctttcgaaacgag

SEQ ID NO: 8433 - RNA, 22 nt, synthetic construct
  source 1..22: mol_type = other RNA
gaggctgaagagttgacttaca

SEQ ID NO: 8434 - RNA, 22 nt, synthetic construct
  source 1..22: mol_type = other RNA
gagggatgcaggtgggccggaa

SEQ ID NO: 8435 - RNA, 22 nt, synthetic construct
  source 1..22: mol_type = other RNA
gagggctaagctttcagggctc

SEQ ID NO: 8436 - RNA, 22 nt, synthetic construct
  source 1..22: mol_type = other RNA
gagggtcattgtggtgtctggg

SEQ ID NO: 8437 - RNA, 22 nt, synthetic construct
  source 1..22: mol_type = other RNA
gagggtctctcacgtgcttcag

SEQ ID NO: 8438 - RNA, 22 nt, synthetic construct
  source 1..22: mol_type = other RNA
gagggtgaaaactcttttctca

SEQ ID NO: 8439 - RNA, 22 nt, synthetic construct
  source 1..22: mol_type = other RNA
gaggtcaggatgtcagacgcag

SEQ ID NO: 8440 - RNA, 22 nt, synthetic construct
  source 1..22: mol_type = other RNA
gaggtcaggatttgagatcacc

SEQ ID NO: 8441 - RNA, 22 nt, synthetic construct
  source 1..22: mol_type = other RNA
gagtaactgaactgataacagc

SEQ ID NO: 8442 - RNA, 22 nt, synthetic construct
  source 1..22: mol_type = other RNA
gagtactggacatgctgctgtt

SEQ ID NO: 8443 - RNA, 22 nt, synthetic construct
  source 1..22: mol_type = other RNA
gagtcccttgatccccaaatat

SEQ ID NO: 8444 - RNA, 22 nt, synthetic construct
  source 1..22: mol_type = other RNA
gagtgaagatgcctattaattc

SEQ ID NO: 8445 - RNA, 22 nt, synthetic construct
  source 1..22: mol_type = other RNA
gagtgagtggcaagacaagttc

SEQ ID NO: 8446 - RNA, 22 nt, synthetic construct
  source 1..22: mol_type = other RNA
gagtggcaagacaagttcagta

SEQ ID NO: 8447 - RNA, 22 nt, synthetic construct
  source 1..22: mol_type = other RNA
gagttgacttacacaacataac

SEQ ID NO: 8448 - RNA, 22 nt, synthetic construct
  source 1..22: mol_type = other RNA
gagttttcaccctctgtagcat

SEQ ID NO: 8449 - RNA, 22 nt, synthetic construct
  source 1..22: mol_type = other RNA
gataaaaccaagtaactggcca

SEQ ID NO: 8450 - RNA, 22 nt, synthetic construct
  source 1..22: mol_type = other RNA
gataacagcagcatgtccagta

SEQ ID NO: 8451 - RNA, 22 nt, synthetic construct
  source 1..22: mol_type = other RNA
gatacctgtgtgtctccataaa

SEQ ID NO: 8452 - RNA, 22 nt, synthetic construct
  source 1..22: mol_type = other RNA
gataggatttccccatattgac

SEQ ID NO: 8453 - RNA, 22 nt, synthetic construct
  source 1..22: mol_type = other RNA
gatcaaagaggcaatgctttcg

SEQ ID NO: 8454 - RNA, 22 nt, synthetic construct
  source 1..22: mol_type = other RNA
gatcaacctggaagaacaaaac

SEQ ID NO: 8455 - RNA, 22 nt, synthetic construct
  source 1..22: mol_type = other RNA
gatcaagggactctggacattc

SEQ ID NO: 8456 - RNA, 22 nt, synthetic construct
  source 1..22: mol_type = other RNA
gatcaccctggtcaatatgggg

SEQ ID NO: 8457 - RNA, 22 nt, synthetic construct
  source 1..22: mol_type = other RNA
gatccaatgctcaccccagaag

SEQ ID NO: 8458 - RNA, 22 nt, synthetic construct
  source 1..22: mol_type = other RNA
gatcccacgattccgatcgact

SEQ ID NO: 8459 - RNA, 22 nt, synthetic construct
  source 1..22: mol_type = other RNA
gatccccaaatataaatacagt

SEQ ID NO: 8460 - RNA, 22 nt, synthetic construct
  source 1..22: mol_type = other RNA
gatcccctggtcccaccgtctg

SEQ ID NO: 8461 - RNA, 22 nt, synthetic construct
  source 1..22: mol_type = other RNA
gatccccttattttctttctcc

SEQ ID NO: 8462 - RNA, 22 nt, synthetic construct
  source 1..22: mol_type = other RNA
gatcgactgccaagcagcagcc

SEQ ID NO: 8463 - RNA, 22 nt, synthetic construct
  source 1..22: mol_type = other RNA
gatcggaatcgtgggatcttcc

SEQ ID NO: 8464 - RNA, 22 nt, synthetic construct
  source 1..22: mol_type = other RNA
gatctattgcagatatttgatg

SEQ ID NO: 8465 - RNA, 22 nt, synthetic construct
  source 1..22: mol_type = other RNA
gatctctggtctttttcagttc

SEQ ID NO: 8466 - RNA, 22 nt, synthetic construct
  source 1..22: mol_type = other RNA
gatcttccggcccacctgcatc

SEQ ID NO: 8467 - RNA, 22 nt, synthetic construct
  source 1..22: mol_type = other RNA
gatgacagtcaactggatttcc

SEQ ID NO: 8468 - RNA, 22 nt, synthetic construct
  source 1..22: mol_type = other RNA
gatgcagaaccatggctatgag

SEQ ID NO: 8469 - RNA, 22 nt, synthetic construct
  source 1..22: mol_type = other RNA
gatgcagatttaggtggcaggg

SEQ ID NO: 8470 - RNA, 22 nt, synthetic construct
  source 1..22: mol_type = other RNA
gatgcaggtgggccggaagatc

SEQ ID NO: 8471 - RNA, 22 nt, synthetic construct
  source 1..22: mol_type = other RNA
gatgcctattaattccacaggt

SEQ ID NO: 8472 - RNA, 22 nt, synthetic construct
  source 1..22: mol_type = other RNA
gatgctggtcttagttatttgt

SEQ ID NO: 8473 - RNA, 22 nt, synthetic construct
  source 1..22: mol_type = other RNA
gatgtcagacgcagcccctggc

SEQ ID NO: 8474 - RNA, 22 nt, synthetic construct
  source 1..22: mol_type = other RNA
gatgtgaaaggaccagtttctt

SEQ ID NO: 8475 - RNA, 22 nt, synthetic construct
  source 1..22: mol_type = other RNA
gattatttccttagtgttcctt

SEQ ID NO: 8476 - RNA, 22 nt, synthetic construct
  source 1..22: mol_type = other RNA
gattccgatcgactgccaagca

SEQ ID NO: 8477 - RNA, 22 nt, synthetic construct
  source 1..22: mol_type = other RNA
gattcctaggtcgtgtttttgg

SEQ ID NO: 8478 - RNA, 22 nt, synthetic construct
  source 1..22: mol_type = other RNA
gattcttgtgcctcagcctccc

SEQ ID NO: 8479 - RNA, 22 nt, synthetic construct
  source 1..22: mol_type = other RNA
gattgtgcagcaaatggctcag

SEQ ID NO: 8480 - RNA, 22 nt, synthetic construct
  source 1..22: mol_type = other RNA
gatttaggtggcagggagcgcg

SEQ ID NO: 8481 - RNA, 22 nt, synthetic construct
  source 1..22: mol_type = other RNA
gatttccaaaaacacgacctag

SEQ ID NO: 8482 - RNA, 22 nt, synthetic construct
  source 1..22: mol_type = other RNA
gatttccccatattgaccaggg

SEQ ID NO: 8483 - RNA, 22 nt, synthetic construct
  source 1..22: mol_type = other RNA
gatttcctagcaccgtggtgac

SEQ ID NO: 8484 - RNA, 22 nt, synthetic construct
  source 1..22: mol_type = other RNA
gatttgagatcaccctggtcaa

SEQ ID NO: 8485 - RNA, 22 nt, synthetic construct
  source 1..22: mol_type = other RNA
gcaaaatgatgtgaaaggacca

SEQ ID NO: 8486 - RNA, 22 nt, synthetic construct
  source 1..22: mol_type = other RNA
gcaaatggctcaggtctcccag

SEQ ID NO: 8487 - RNA, 22 nt, synthetic construct
  source 1..22: mol_type = other RNA
gcaacagccccttgtggcaggg

SEQ ID NO: 8488 - RNA, 22 nt, synthetic construct
  source 1..22: mol_type = other RNA
gcaacaggaaatttagaaagtg

SEQ ID NO: 8489 - RNA, 22 nt, synthetic construct
  source 1..22: mol_type = other RNA
gcaacttcctgaaagctcattt

SEQ ID NO: 8490 - RNA, 22 nt, synthetic construct
  source 1..22: mol_type = other RNA
gcaagacaagttcagtaaccag

SEQ ID NO: 8491 - RNA, 22 nt, synthetic construct
  source 1..22: mol_type = other RNA
gcaagcagacggtgggaccagg

SEQ ID NO: 8492 - RNA, 22 nt, synthetic construct
  source 1..22: mol_type = other RNA
gcaagccagtcagcagtaggct

SEQ ID NO: 8493 - RNA, 22 nt, synthetic construct
  source 1..22: mol_type = other RNA
gcaaggctcggcgccactgctt

SEQ ID NO: 8494 - RNA, 22 nt, synthetic construct
  source 1..22: mol_type = other RNA
gcaatgctttcgaaacgagagc

SEQ ID NO: 8495 - RNA, 22 nt, synthetic construct
  source 1..22: mol_type = other RNA
gcaatttccattcttttaaatg

SEQ ID NO: 8496 - RNA, 22 nt, synthetic construct
  source 1..22: mol_type = other RNA
gcacaagaatcacctgaacccg

SEQ ID NO: 8497 - RNA, 22 nt, synthetic construct
  source 1..22: mol_type = other RNA
gcacaatcccctgaggaccaaa

SEQ ID NO: 8498 - RNA, 22 nt, synthetic construct
  source 1..22: mol_type = other RNA
gcacacacctgtagtctcagct

SEQ ID NO: 8499 - RNA, 22 nt, synthetic construct
  source 1..22: mol_type = other RNA
gcacagggtgctgggagacctg

SEQ ID NO: 8500 - RNA, 22 nt, synthetic construct
  source 1..22: mol_type = other RNA
gcaccctgtgcaggtctcttcc

SEQ ID NO: 8501 - RNA, 22 nt, synthetic construct
  source 1..22: mol_type = other RNA
gcaccgtggtgacaagcaaggc

SEQ ID NO: 8502 - RNA, 22 nt, synthetic construct
  source 1..22: mol_type = other RNA
gcacctggccagttacttggtt

SEQ ID NO: 8503 - RNA, 22 nt, synthetic construct
  source 1..22: mol_type = other RNA
gcacgtgagagaccctcgcaaa

SEQ ID NO: 8504 - RNA, 22 nt, synthetic construct
  source 1..22: mol_type = other RNA
gcactaatttcccagggctcat

SEQ ID NO: 8505 - RNA, 22 nt, synthetic construct
  source 1..22: mol_type = other RNA
gcactttctaaatttcctgttg

SEQ ID NO: 8506 - RNA, 22 nt, synthetic construct
  source 1..22: mol_type = other RNA
gcagaaccatggctatgagaac

SEQ ID NO: 8507 - RNA, 22 nt, synthetic construct
  source 1..22: mol_type = other RNA
gcagaagacagaacagaaacag

SEQ ID NO: 8508 - RNA, 22 nt, synthetic construct
  source 1..22: mol_type = other RNA
gcagacggtgggaccaggggat

SEQ ID NO: 8509 - RNA, 22 nt, synthetic construct
  source 1..22: mol_type = other RNA
gcagactgtttctgttctgtct

SEQ ID NO: 8510 - RNA, 22 nt, synthetic construct
  source 1..22: mol_type = other RNA
gcagatatttgatgtagttttc

SEQ ID NO: 8511 - RNA, 22 nt, synthetic construct
  source 1..22: mol_type = other RNA
gcagatgcagatttaggtggca

SEQ ID NO: 8512 - RNA, 22 nt, synthetic construct
  source 1..22: mol_type = other RNA
gcagatgctggtcttagttatt

SEQ ID NO: 8513 - RNA, 22 nt, synthetic construct
  source 1..22: mol_type = other RNA
gcagatttaggtggcagggagc

SEQ ID NO: 8514 - RNA, 22 nt, synthetic construct
  source 1..22: mol_type = other RNA
gcagcaaatggctcaggtctcc

SEQ ID NO: 8515 - RNA, 22 nt, synthetic construct
  source 1..22: mol_type = other RNA
gcagcagccgctgccaggggct

SEQ ID NO: 8516 - RNA, 22 nt, synthetic construct
  source 1..22: mol_type = other RNA
gcagcatgtccagtactcgagg

SEQ ID NO: 8517 - RNA, 22 nt, synthetic construct
  source 1..22: mol_type = other RNA
gcagccagcagcccgttcccac

SEQ ID NO: 8518 - RNA, 22 nt, synthetic construct
  source 1..22: mol_type = other RNA
gcagcccctggcagcggctgct

SEQ ID NO: 8519 - RNA, 22 nt, synthetic construct
  source 1..22: mol_type = other RNA
gcagcccgttcccaccggacag

SEQ ID NO: 8520 - RNA, 22 nt, synthetic construct
  source 1..22: mol_type = other RNA
gcagccctggcggagggatgca

SEQ ID NO: 8521 - RNA, 22 nt, synthetic construct
  source 1..22: mol_type = other RNA
gcagcggctgctgcttggcagt

SEQ ID NO: 8522 - RNA, 22 nt, synthetic construct
  source 1..22: mol_type = other RNA
gcaggagataaaaccaagtaac

SEQ ID NO: 8523 - RNA, 22 nt, synthetic construct
  source 1..22: mol_type = other RNA
gcaggctgtcgttccggttatg

SEQ ID NO: 8524 - RNA, 22 nt, synthetic construct
  source 1..22: mol_type = other RNA
gcaggggctgatttccaaaaac

SEQ ID NO: 8525 - RNA, 22 nt, synthetic construct
  source 1..22: mol_type = other RNA
gcaggtctcttcccagacacca

SEQ ID NO: 8526 - RNA, 22 nt, synthetic construct
  source 1..22: mol_type = other RNA
gcaggtgggccggaagatccca

SEQ ID NO: 8527 - RNA, 22 nt, synthetic construct
  source 1..22: mol_type = other RNA
gcagtaggctagcaagcagacg

SEQ ID NO: 8528 - RNA, 22 nt, synthetic construct
  source 1..22: mol_type = other RNA
gcagtattccctttttaaatga

SEQ ID NO: 8529 - RNA, 22 nt, synthetic construct
  source 1..22: mol_type = other RNA
gcagtcgatcggaatcgtggga

SEQ ID NO: 8530 - RNA, 22 nt, synthetic construct
  source 1..22: mol_type = other RNA
gcagtggcgccgagccttgctt

SEQ ID NO: 8531 - RNA, 22 nt, synthetic construct
  source 1..22: mol_type = other RNA
gcagttctacagtagtacttta

SEQ ID NO: 8532 - RNA, 22 nt, synthetic construct
  source 1..22: mol_type = other RNA
gcataaaatgttcacatgactt

SEQ ID NO: 8533 - RNA, 22 nt, synthetic construct
  source 1..22: mol_type = other RNA
gcatccctccgccagggctgcc

SEQ ID NO: 8534 - RNA, 22 nt, synthetic construct
  source 1..22: mol_type = other RNA
gcatctgcactaatttcccagg

SEQ ID NO: 8535 - RNA, 22 nt, synthetic construct
  source 1..22: mol_type = other RNA
gcatctgctccaggtatttgta

SEQ ID NO: 8536 - RNA, 22 nt, synthetic construct
  source 1..22: mol_type = other RNA
gcatcttcactcctcgagtact

SEQ ID NO: 8537 - RNA, 22 nt, synthetic construct
  source 1..22: mol_type = other RNA
gcatcttgttcaggtgacgctc

SEQ ID NO: 8538 - RNA, 22 nt, synthetic construct
  source 1..22: mol_type = other RNA
gcatgagctactgcacctggcc

SEQ ID NO: 8539 - RNA, 22 nt, synthetic construct
  source 1..22: mol_type = other RNA
gcatgtccagtactcgaggagt

SEQ ID NO: 8540 - RNA, 22 nt, synthetic construct
  source 1..22: mol_type = other RNA
gcatgtgtcagacaatacaatg

SEQ ID NO: 8541 - RNA, 22 nt, synthetic construct
  source 1..22: mol_type = other RNA
gcattgcctctttgatcccctt

SEQ ID NO: 8542 - RNA, 22 nt, synthetic construct
  source 1..22: mol_type = other RNA
gcattggatcaacctggaagaa

SEQ ID NO: 8543 - RNA, 22 nt, synthetic construct
  source 1..22: mol_type = other RNA
gcatttggtcctcaggggattg

SEQ ID NO: 8544 - RNA, 22 nt, synthetic construct
  source 1..22: mol_type = other RNA
gcattttattccagcgtcttct

SEQ ID NO: 8545 - RNA, 22 nt, synthetic construct
  source 1..22: mol_type = other RNA
gccaaatgagaaccggtggtga

SEQ ID NO: 8546 - RNA, 22 nt, synthetic construct
  source 1..22: mol_type = other RNA
gccaactttcaacattagtttg

SEQ ID NO: 8547 - RNA, 22 nt, synthetic construct
  source 1..22: mol_type = other RNA
gccaagcagcagccgctgccag

SEQ ID NO: 8548 - RNA, 22 nt, synthetic construct
  source 1..22: mol_type = other RNA
gccaaggcaagccagtcagcag

SEQ ID NO: 8549 - RNA, 22 nt, synthetic construct
  source 1..22: mol_type = other RNA
gccaaggcccaaactaatgttg

SEQ ID NO: 8550 - RNA, 22 nt, synthetic construct
  source 1..22: mol_type = other RNA
gccacaaggggctgttgccaac

SEQ ID NO: 8551 - RNA, 22 nt, synthetic construct
  source 1..22: mol_type = other RNA
gccaccacgcccagctagtctt

SEQ ID NO: 8552 - RNA, 22 nt, synthetic construct
  source 1..22: mol_type = other RNA
gccacctaaatctgcatctgct

SEQ ID NO: 8553 - RNA, 22 nt, synthetic construct
  source 1..22: mol_type = other RNA
gccactcactccttagtgaaca

SEQ ID NO: 8554 - RNA, 22 nt, synthetic construct
  source 1..22: mol_type = other RNA
gccactgaagcacgtgagagac

SEQ ID NO: 8555 - RNA, 22 nt, synthetic construct
  source 1..22: mol_type = other RNA
gccactgcttactacctgggcc

SEQ ID NO: 8556 - RNA, 22 nt, synthetic construct
  source 1..22: mol_type = other RNA
gccagcagcccgttcccaccgg

SEQ ID NO: 8557 - RNA, 22 nt, synthetic construct
  source 1..22: mol_type = other RNA
gccagccaaggcaagccagtca

SEQ ID NO: 8558 - RNA, 22 nt, synthetic construct
  source 1..22: mol_type = other RNA
gccaggacagtgaatgaggctg

SEQ ID NO: 8559 - RNA, 22 nt, synthetic construct
  source 1..22: mol_type = other RNA
gccaggggctgcgtctgacatc

SEQ ID NO: 8560 - RNA, 22 nt, synthetic construct
  source 1..22: mol_type = other RNA
gccagtcagcagtaggctagca

SEQ ID NO: 8561 - RNA, 22 nt, synthetic construct
  source 1..22: mol_type = other RNA
gccagtctccagcaggagataa

SEQ ID NO: 8562 - RNA, 22 nt, synthetic construct
  source 1..22: mol_type = other RNA
gccagttacttggttttatctc

SEQ ID NO: 8563 - RNA, 22 nt, synthetic construct
  source 1..22: mol_type = other RNA
gccatggttctgcatcttgttc

SEQ ID NO: 8564 - RNA, 22 nt, synthetic construct
  source 1..22: mol_type = other RNA
gccattacagttccctattcca

SEQ ID NO: 8565 - RNA, 22 nt, synthetic construct
  source 1..22: mol_type = other RNA
gccatttgctgcacaatcccct

SEQ ID NO: 8566 - RNA, 22 nt, synthetic construct
  source 1..22: mol_type = other RNA
gcccaaactaatgttgaaagtt

SEQ ID NO: 8567 - RNA, 22 nt, synthetic construct
  source 1..22: mol_type = other RNA
gcccacctgcatccctccgcca

SEQ ID NO: 8568 - RNA, 22 nt, synthetic construct
  source 1..22: mol_type = other RNA
gcccagctagtctttgtatttt

SEQ ID NO: 8569 - RNA, 22 nt, synthetic construct
  source 1..22: mol_type = other RNA
gcccaggtagtaagcagtggcg

SEQ ID NO: 8570 - RNA, 22 nt, synthetic construct
  source 1..22: mol_type = other RNA
gcccctgccacaaggggctgtt

SEQ ID NO: 8571 - RNA, 22 nt, synthetic construct
  source 1..22: mol_type = other RNA
gcccctggcagcggctgctgct

SEQ ID NO: 8572 - RNA, 22 nt, synthetic construct
  source 1..22: mol_type = other RNA
gccccttgtggcaggggctgat

SEQ ID NO: 8573 - RNA, 22 nt, synthetic construct
  source 1..22: mol_type = other RNA
gcccgttcccaccggacaggcc

SEQ ID NO: 8574 - RNA, 22 nt, synthetic construct
  source 1..22: mol_type = other RNA
gccctcacggaagatgacagtc

SEQ ID NO: 8575 - RNA, 22 nt, synthetic construct
  source 1..22: mol_type = other RNA
gccctgaaagcttagccctcac

SEQ ID NO: 8576 - RNA, 22 nt, synthetic construct
  source 1..22: mol_type = other RNA
gccctggcggagggatgcaggt

SEQ ID NO: 8577 - RNA, 22 nt, synthetic construct
  source 1..22: mol_type = other RNA
gccctgggaaattagtgcagat

SEQ ID NO: 8578 - RNA, 22 nt, synthetic construct
  source 1..22: mol_type = other RNA
gccgagccttgcttgtcaccac

SEQ ID NO: 8579 - RNA, 22 nt, synthetic construct
  source 1..22: mol_type = other RNA
gccgcgctccctgccacctaaa

SEQ ID NO: 8580 - RNA, 22 nt, synthetic construct
  source 1..22: mol_type = other RNA
gccgctgccaggggctgcgtct

SEQ ID NO: 8581 - RNA, 22 nt, synthetic construct
  source 1..22: mol_type = other RNA
gccggaagatcccacgattccg

SEQ ID NO: 8582 - RNA, 22 nt, synthetic construct
  source 1..22: mol_type = other RNA
gccgtggaaacactggacttca

SEQ ID NO: 8583 - RNA, 22 nt, synthetic construct
  source 1..22: mol_type = other RNA
gcctactgctgactggcttgcc

SEQ ID NO: 8584 - RNA, 22 nt, synthetic construct
  source 1..22: mol_type = other RNA
gcctagctgtagaatttcagaa

SEQ ID NO: 8585 - RNA, 22 nt, synthetic construct
  source 1..22: mol_type = other RNA
gcctattaattccacaggttcc

SEQ ID NO: 8586 - RNA, 22 nt, synthetic construct
  source 1..22: mol_type = other RNA
gcctcagcctcccacctagctg

SEQ ID NO: 8587 - RNA, 22 nt, synthetic construct
  source 1..22: mol_type = other RNA
gcctcattcactgtcctggctt

SEQ ID NO: 8588 - RNA, 22 nt, synthetic construct
  source 1..22: mol_type = other RNA
gcctcccacctagctgagacta

SEQ ID NO: 8589 - RNA, 22 nt, synthetic construct
  source 1..22: mol_type = other RNA
gcctctttgatccccttatttt

SEQ ID NO: 8590 - RNA, 22 nt, synthetic construct
  source 1..22: mol_type = other RNA
gcctgcatataagtctattatt

SEQ ID NO: 8591 - RNA, 22 nt, synthetic construct
  source 1..22: mol_type = other RNA
gcctgggcgacacagcgagact

SEQ ID NO: 8592 - RNA, 22 nt, synthetic construct
  source 1..22: mol_type = other RNA
gcctgtccggtgggaacgggct

SEQ ID NO: 8593 - RNA, 22 nt, synthetic construct
  source 1..22: mol_type = other RNA
gccttgcttgtcaccacggtgc

SEQ ID NO: 8594 - RNA, 22 nt, synthetic construct
  source 1..22: mol_type = other RNA
gccttggctatgaatgtcagaa

SEQ ID NO: 8595 - RNA, 22 nt, synthetic construct
  source 1..22: mol_type = other RNA
gccttggctggcccaggtagta

SEQ ID NO: 8596 - RNA, 22 nt, synthetic construct
  source 1..22: mol_type = other RNA
gcctttaacgtccttggtgaca

SEQ ID NO: 8597 - RNA, 22 nt, synthetic construct
  source 1..22: mol_type = other RNA
gcgacacagcgagactgtctcc

SEQ ID NO: 8598 - RNA, 22 nt, synthetic construct
  source 1..22: mol_type = other RNA
gcgagactgtctccaaaaaacc

SEQ ID NO: 8599 - RNA, 22 nt, synthetic construct
  source 1..22: mol_type = other RNA
gcgagggtctctcacgtgcttc

SEQ ID NO: 8600 - RNA, 22 nt, synthetic construct
  source 1..22: mol_type = other RNA
gcgatctcagcgcactgcaacc

SEQ ID NO: 8601 - RNA, 22 nt, synthetic construct
  source 1..22: mol_type = other RNA
gcgccactgcttactacctggg

SEQ ID NO: 8602 - RNA, 22 nt, synthetic construct
  source 1..22: mol_type = other RNA
gcgccgagccttgcttgtcacc

SEQ ID NO: 8603 - RNA, 22 nt, synthetic construct
  source 1..22: mol_type = other RNA
gcgctccctgccacctaaatct

SEQ ID NO: 8604 - RNA, 22 nt, synthetic construct
  source 1..22: mol_type = other RNA
gcggacaccctcatctgtatac

SEQ ID NO: 8605 - RNA, 22 nt, synthetic construct
  source 1..22: mol_type = other RNA
gcggagggatgcaggtgggccg

SEQ ID NO: 8606 - RNA, 22 nt, synthetic construct
  source 1..22: mol_type = other RNA
gcggcagccctggcggagggat

SEQ ID NO: 8607 - RNA, 22 nt, synthetic construct
  source 1..22: mol_type = other RNA
gcggctgctgcttggcagtcga

SEQ ID NO: 8608 - RNA, 22 nt, synthetic construct
  source 1..22: mol_type = other RNA
gcgtcacctgaacaagatgcag

SEQ ID NO: 8609 - RNA, 22 nt, synthetic construct
  source 1..22: mol_type = other RNA
gcgtctgacatcctgacctcct

SEQ ID NO: 8610 - RNA, 22 nt, synthetic construct
  source 1..22: mol_type = other RNA
gcgtcttctagagagcttagtg

SEQ ID NO: 8611 - RNA, 22 nt, synthetic construct
  source 1..22: mol_type = other RNA
gctaagctttcagggctctcgt

SEQ ID NO: 8612 - RNA, 22 nt, synthetic construct
  source 1..22: mol_type = other RNA
gctacagagggtgaaaactctt

SEQ ID NO: 8613 - RNA, 22 nt, synthetic construct
  source 1..22: mol_type = other RNA
gctactgcacctggccagttac

SEQ ID NO: 8614 - RNA, 22 nt, synthetic construct
  source 1..22: mol_type = other RNA
gctagcaagcagacggtgggac

SEQ ID NO: 8615 - RNA, 22 nt, synthetic construct
  source 1..22: mol_type = other RNA
gctagcctactgctgactggct

SEQ ID NO: 8616 - RNA, 22 nt, synthetic construct
  source 1..22: mol_type = other RNA
gctaggaaatccagttgactgt

SEQ ID NO: 8617 - RNA, 22 nt, synthetic construct
  source 1..22: mol_type = other RNA
gctaggccagtctccagcagga

SEQ ID NO: 8618 - RNA, 22 nt, synthetic construct
  source 1..22: mol_type = other RNA
gctatgaatgtcagaaagtcat

SEQ ID NO: 8619 - RNA, 22 nt, synthetic construct
  source 1..22: mol_type = other RNA
gctatgagaaccccacctacaa

SEQ ID NO: 8620 - RNA, 22 nt, synthetic construct
  source 1..22: mol_type = other RNA
gctcaccccagaagagcgtcac

SEQ ID NO: 8621 - RNA, 22 nt, synthetic construct
  source 1..22: mol_type = other RNA
gctcaggtctcccagcaccctg

SEQ ID NO: 8622 - RNA, 22 nt, synthetic construct
  source 1..22: mol_type = other RNA
gctcattaaggtccttactgta

SEQ ID NO: 8623 - RNA, 22 nt, synthetic construct
  source 1..22: mol_type = other RNA
gctcatttaaaaagggaatact

SEQ ID NO: 8624 - RNA, 22 nt, synthetic construct
  source 1..22: mol_type = other RNA
gctccaggtatttgtaggtggg

SEQ ID NO: 8625 - RNA, 22 nt, synthetic construct
  source 1..22: mol_type = other RNA
gctccctgccacctaaatctgc

SEQ ID NO: 8626 - RNA, 22 nt, synthetic construct
  source 1..22: mol_type = other RNA
gctcctttcccccattaaaaaa

SEQ ID NO: 8627 - RNA, 22 nt, synthetic construct
  source 1..22: mol_type = other RNA
gctcggcgccactgcttactac

SEQ ID NO: 8628 - RNA, 22 nt, synthetic construct
  source 1..22: mol_type = other RNA
gctctcaatatataataaatgg

SEQ ID NO: 8629 - RNA, 22 nt, synthetic construct
  source 1..22: mol_type = other RNA
gctctcgtttcgaaagcattgc

SEQ ID NO: 8630 - RNA, 22 nt, synthetic construct
  source 1..22: mol_type = other RNA
gctctctagaagacgctggaat

SEQ ID NO: 8631 - RNA, 22 nt, synthetic construct
  source 1..22: mol_type = other RNA
gctcttctggggtgagcattgg

SEQ ID NO: 8632 - RNA, 22 nt, synthetic construct
  source 1..22: mol_type = other RNA
gctgaagagttgacttacacaa

SEQ ID NO: 8633 - RNA, 22 nt, synthetic construct
  source 1..22: mol_type = other RNA
gctgaagcagactgtttctgtt

SEQ ID NO: 8634 - RNA, 22 nt, synthetic construct
  source 1..22: mol_type = other RNA
gctgactggcttgccttggctg

SEQ ID NO: 8635 - RNA, 22 nt, synthetic construct
  source 1..22: mol_type = other RNA
gctgagaaatggggtggaatag

SEQ ID NO: 8636 - RNA, 22 nt, synthetic construct
  source 1..22: mol_type = other RNA
gctgatttccaaaaacacgacc

SEQ ID NO: 8637 - RNA, 22 nt, synthetic construct
  source 1..22: mol_type = other RNA
gctgcacaatcccctgaggacc

SEQ ID NO: 8638 - RNA, 22 nt, synthetic construct
  source 1..22: mol_type = other RNA
gctgcatttggtcctcagggga

SEQ ID NO: 8639 - RNA, 22 nt, synthetic construct
  source 1..22: mol_type = other RNA
gctgccaggggctgcgtctgac

SEQ ID NO: 8640 - RNA, 22 nt, synthetic construct
  source 1..22: mol_type = other RNA
gctgccgcgctccctgccacct

SEQ ID NO: 8641 - RNA, 22 nt, synthetic construct
  source 1..22: mol_type = other RNA
gctgcgtctgacatcctgacct

SEQ ID NO: 8642 - RNA, 22 nt, synthetic construct
  source 1..22: mol_type = other RNA
gctgctgcttggcagtcgatcg

SEQ ID NO: 8643 - RNA, 22 nt, synthetic construct
  source 1..22: mol_type = other RNA
gctgctggctgcatttggtcct

SEQ ID NO: 8644 - RNA, 22 nt, synthetic construct
  source 1..22: mol_type = other RNA
gctgctgttatcagttcagtta

SEQ ID NO: 8645 - RNA, 22 nt, synthetic construct
  source 1..22: mol_type = other RNA
gctgcttggcagtcgatcggaa

SEQ ID NO: 8646 - RNA, 22 nt, synthetic construct
  source 1..22: mol_type = other RNA
gctggaataaaatgcctttaac

SEQ ID NO: 8647 - RNA, 22 nt, synthetic construct
  source 1..22: mol_type = other RNA
gctggagactggcctagctgta

SEQ ID NO: 8648 - RNA, 22 nt, synthetic construct
  source 1..22: mol_type = other RNA
gctggatacctgtgtgtctcca

SEQ ID NO: 8649 - RNA, 22 nt, synthetic construct
  source 1..22: mol_type = other RNA
gctggcccaggtagtaagcagt

SEQ ID NO: 8650 - RNA, 22 nt, synthetic construct
  source 1..22: mol_type = other RNA
gctggctgcatttggtcctcag

SEQ ID NO: 8651 - RNA, 22 nt, synthetic construct
  source 1..22: mol_type = other RNA
gctgggagacctgagccatttg

SEQ ID NO: 8652 - RNA, 22 nt, synthetic construct
  source 1..22: mol_type = other RNA
gctgggttgggggtgggaacct

SEQ ID NO: 8653 - RNA, 22 nt, synthetic construct
  source 1..22: mol_type = other RNA
gctggtcttagttatttgtgtt

SEQ ID NO: 8654 - RNA, 22 nt, synthetic construct
  source 1..22: mol_type = other RNA
gctggttactgaacttgtcttg

SEQ ID NO: 8655 - RNA, 22 nt, synthetic construct
  source 1..22: mol_type = other RNA
gctgtagaatttcagaactgaa

SEQ ID NO: 8656 - RNA, 22 nt, synthetic construct
  source 1..22: mol_type = other RNA
gctgtcgttccggttatgttgt

SEQ ID NO: 8657 - RNA, 22 nt, synthetic construct
  source 1..22: mol_type = other RNA
gctgttatcagttcagttactc

SEQ ID NO: 8658 - RNA, 22 nt, synthetic construct
  source 1..22: mol_type = other RNA
gctgttgccaactttcaacatt

SEQ ID NO: 8659 - RNA, 22 nt, synthetic construct
  source 1..22: mol_type = other RNA
gcttactacctgggccagccaa

SEQ ID NO: 8660 - RNA, 22 nt, synthetic construct
  source 1..22: mol_type = other RNA
gcttagccctcacggaagatga

SEQ ID NO: 8661 - RNA, 22 nt, synthetic construct
  source 1..22: mol_type = other RNA
gcttagtgtatacagatgaggg

SEQ ID NO: 8662 - RNA, 22 nt, synthetic construct
  source 1..22: mol_type = other RNA
gcttcagcactttctaaatttc

SEQ ID NO: 8663 - RNA, 22 nt, synthetic construct
  source 1..22: mol_type = other RNA
gcttcagtggccattacagttc

SEQ ID NO: 8664 - RNA, 22 nt, synthetic construct
  source 1..22: mol_type = other RNA
gcttgccttggctggcccaggt

SEQ ID NO: 8665 - RNA, 22 nt, synthetic construct
  source 1..22: mol_type = other RNA
gcttgctagcctactgctgact

SEQ ID NO: 8666 - RNA, 22 nt, synthetic construct
  source 1..22: mol_type = other RNA
gcttggcagtcgatcggaatcg

SEQ ID NO: 8667 - RNA, 22 nt, synthetic construct
  source 1..22: mol_type = other RNA
gcttgtcaccacggtgctagga

SEQ ID NO: 8668 - RNA, 22 nt, synthetic construct
  source 1..22: mol_type = other RNA
gctttcaggaagttgctgagaa

SEQ ID NO: 8669 - RNA, 22 nt, synthetic construct
  source 1..22: mol_type = other RNA
gctttcagggctctcgtttcga

SEQ ID NO: 8670 - RNA, 22 nt, synthetic construct
  source 1..22: mol_type = other RNA
gctttcgaaacgagagccctga

SEQ ID NO: 8671 - RNA, 22 nt, synthetic construct
  source 1..22: mol_type = other RNA
ggaaaaaggaacactaaggaaa

SEQ ID NO: 8672 - RNA, 22 nt, synthetic construct
  source 1..22: mol_type = other RNA
ggaaacactggacttcaagaaa

SEQ ID NO: 8673 - RNA, 22 nt, synthetic construct
  source 1..22: mol_type = other RNA
ggaaaggagcaacaggaaattt

SEQ ID NO: 8674 - RNA, 22 nt, synthetic construct
  source 1..22: mol_type = other RNA
ggaaataatctgagaaaagagt

SEQ ID NO: 8675 - RNA, 22 nt, synthetic construct
  source 1..22: mol_type = other RNA
ggaaatcagcccctgccacaag

SEQ ID NO: 8676 - RNA, 22 nt, synthetic construct
  source 1..22: mol_type = other RNA
ggaaatccagttgactgtcatc

SEQ ID NO: 8677 - RNA, 22 nt, synthetic construct
  source 1..22: mol_type = other RNA
ggaaatcctatctctaataaaa

SEQ ID NO: 8678 - RNA, 22 nt, synthetic construct
  source 1..22: mol_type = other RNA
ggaaatgtcgattttcaataat

SEQ ID NO: 8679 - RNA, 22 nt, synthetic construct
  source 1..22: mol_type = other RNA
ggaaattagtgcagatgctggt

SEQ ID NO: 8680 - RNA, 22 nt, synthetic construct
  source 1..22: mol_type = other RNA
ggaaattgcagttctacagtag

SEQ ID NO: 8681 - RNA, 22 nt, synthetic construct
  source 1..22: mol_type = other RNA
ggaaatttagaaagtgctgaag

SEQ ID NO: 8682 - RNA, 22 nt, synthetic construct
  source 1..22: mol_type = other RNA
ggaacactaaggaaataatctg

SEQ ID NO: 8683 - RNA, 22 nt, synthetic construct
  source 1..22: mol_type = other RNA
ggaacctgtggaattaataggc

SEQ ID NO: 8684 - RNA, 22 nt, synthetic construct
  source 1..22: mol_type = other RNA
ggaacgacagcctgcatataag

SEQ ID NO: 8685 - RNA, 22 nt, synthetic construct
  source 1..22: mol_type = other RNA
ggaacgggctgctggctgcatt

SEQ ID NO: 8686 - RNA, 22 nt, synthetic construct
  source 1..22: mol_type = other RNA
ggaactgtaatggccactgaag

SEQ ID NO: 8687 - RNA, 22 nt, synthetic construct
  source 1..22: mol_type = other RNA
ggaagaacaaaacctgagggtc

SEQ ID NO: 8688 - RNA, 22 nt, synthetic construct
  source 1..22: mol_type = other RNA
ggaagagacctgcacagggtgc

SEQ ID NO: 8689 - RNA, 22 nt, synthetic construct
  source 1..22: mol_type = other RNA
ggaagatcccacgattccgatc

SEQ ID NO: 8690 - RNA, 22 nt, synthetic construct
  source 1..22: mol_type = other RNA
ggaagatgacagtcaactggat

SEQ ID NO: 8691 - RNA, 22 nt, synthetic construct
  source 1..22: mol_type = other RNA
ggaagtggggtttctgattaat

SEQ ID NO: 8692 - RNA, 22 nt, synthetic construct
  source 1..22: mol_type = other RNA
ggaagttgctgagaaatggggt

SEQ ID NO: 8693 - RNA, 22 nt, synthetic construct
  source 1..22: mol_type = other RNA
ggaataaaatgcctttaacgtc

SEQ ID NO: 8694 - RNA, 22 nt, synthetic construct
  source 1..22: mol_type = other RNA
ggaatagggaactgtaatggcc

SEQ ID NO: 8695 - RNA, 22 nt, synthetic construct
  source 1..22: mol_type = other RNA
ggaatccagtgagtaactgaac

SEQ ID NO: 8696 - RNA, 22 nt, synthetic construct
  source 1..22: mol_type = other RNA
ggaatcgtgggatcttccggcc

SEQ ID NO: 8697 - RNA, 22 nt, synthetic construct
  source 1..22: mol_type = other RNA
ggaatgtccagagtcccttgat

SEQ ID NO: 8698 - RNA, 22 nt, synthetic construct
  source 1..22: mol_type = other RNA
ggaattaataggcatcttcact

SEQ ID NO: 8699 - RNA, 22 nt, synthetic construct
  source 1..22: mol_type = other RNA
ggacaccctcatctgtatacac

SEQ ID NO: 8700 - RNA, 22 nt, synthetic construct
  source 1..22: mol_type = other RNA
ggacaggccaaatgagaaccgg

SEQ ID NO: 8701 - RNA, 22 nt, synthetic construct
  source 1..22: mol_type = other RNA
ggacagtgaatgaggctgaaga

SEQ ID NO: 8702 - RNA, 22 nt, synthetic construct
  source 1..22: mol_type = other RNA
ggacatgctgctgttatcagtt

SEQ ID NO: 8703 - RNA, 22 nt, synthetic construct
  source 1..22: mol_type = other RNA
ggacattcccactgttcactaa

SEQ ID NO: 8704 - RNA, 22 nt, synthetic construct
  source 1..22: mol_type = other RNA
ggaccaaatgcagccagcagcc

SEQ ID NO: 8705 - RNA, 22 nt, synthetic construct
  source 1..22: mol_type = other RNA
ggaccaggggatctctggtctt

SEQ ID NO: 8706 - RNA, 22 nt, synthetic construct
  source 1..22: mol_type = other RNA
ggaccagtttcttgaagtccag

SEQ ID NO: 8707 - RNA, 22 nt, synthetic construct
  source 1..22: mol_type = other RNA
ggaccttaatgagccctgggaa

SEQ ID NO: 8708 - RNA, 22 nt, synthetic construct
  source 1..22: mol_type = other RNA
ggacgttaaaggcattttattc

SEQ ID NO: 8709 - RNA, 22 nt, synthetic construct
  source 1..22: mol_type = other RNA
ggactatataaagtactactgt

SEQ ID NO: 8710 - RNA, 22 nt, synthetic construct
  source 1..22: mol_type = other RNA
ggactctggacattcccactgt

SEQ ID NO: 8711 - RNA, 22 nt, synthetic construct
  source 1..22: mol_type = other RNA
ggactgtaggactatataaagt

SEQ ID NO: 8712 - RNA, 22 nt, synthetic construct
  source 1..22: mol_type = other RNA
ggacttcaagaaactggtcctt

SEQ ID NO: 8713 - RNA, 22 nt, synthetic construct
  source 1..22: mol_type = other RNA
ggacttttatggagacacacag

SEQ ID NO: 8714 - RNA, 22 nt, synthetic construct
  source 1..22: mol_type = other RNA
ggagaaagaaaataaggggatc

SEQ ID NO: 8715 - RNA, 22 nt, synthetic construct
  source 1..22: mol_type = other RNA
ggagacacacaggtatccagcc

SEQ ID NO: 8716 - RNA, 22 nt, synthetic construct
  source 1..22: mol_type = other RNA
ggagacagtctcgctgtgtcgc

SEQ ID NO: 8717 - RNA, 22 nt, synthetic construct
  source 1..22: mol_type = other RNA
ggagacctgagccatttgctgc

SEQ ID NO: 8718 - RNA, 22 nt, synthetic construct
  source 1..22: mol_type = other RNA
ggagactggcctagctgtagaa

SEQ ID NO: 8719 - RNA, 22 nt, synthetic construct
  source 1..22: mol_type = other RNA
ggagataaaaccaagtaactgg

SEQ ID NO: 8720 - RNA, 22 nt, synthetic construct
  source 1..22: mol_type = other RNA
ggagcaacaggaaatttagaaa

SEQ ID NO: 8721 - RNA, 22 nt, synthetic construct
  source 1..22: mol_type = other RNA
ggagcagatgcagatttaggtg

SEQ ID NO: 8722 - RNA, 22 nt, synthetic construct
  source 1..22: mol_type = other RNA
ggagggatgcaggtgggccgga

SEQ ID NO: 8723 - RNA, 22 nt, synthetic construct
  source 1..22: mol_type = other RNA
ggaggtcaggatgtcagacgca

SEQ ID NO: 8724 - RNA, 22 nt, synthetic construct
  source 1..22: mol_type = other RNA
ggagtgaagatgcctattaatt

SEQ ID NO: 8725 - RNA, 22 nt, synthetic construct
  source 1..22: mol_type = other RNA
ggagtgagtggcaagacaagtt

SEQ ID NO: 8726 - RNA, 22 nt, synthetic construct
  source 1..22: mol_type = other RNA
ggatacctgtgtgtctccataa

SEQ ID NO: 8727 - RNA, 22 nt, synthetic construct
  source 1..22: mol_type = other RNA
ggatcaaagaggcaatgctttc

SEQ ID NO: 8728 - RNA, 22 nt, synthetic construct
  source 1..22: mol_type = other RNA
ggatcaacctggaagaacaaaa

SEQ ID NO: 8729 - RNA, 22 nt, synthetic construct
  source 1..22: mol_type = other RNA
ggatcaagggactctggacatt

SEQ ID NO: 8730 - RNA, 22 nt, synthetic construct
  source 1..22: mol_type = other RNA
ggatctctggtctttttcagtt

SEQ ID NO: 8731 - RNA, 22 nt, synthetic construct
  source 1..22: mol_type = other RNA
ggatcttccggcccacctgcat

SEQ ID NO: 8732 - RNA, 22 nt, synthetic construct
  source 1..22: mol_type = other RNA
ggatgcaggtgggccggaagat

SEQ ID NO: 8733 - RNA, 22 nt, synthetic construct
  source 1..22: mol_type = other RNA
ggatgtcagacgcagcccctgg

SEQ ID NO: 8734 - RNA, 22 nt, synthetic construct
  source 1..22: mol_type = other RNA
ggattcctaggtcgtgtttttg

SEQ ID NO: 8735 - RNA, 22 nt, synthetic construct
  source 1..22: mol_type = other RNA
ggattgtgcagcaaatggctca

SEQ ID NO: 8736 - RNA, 22 nt, synthetic construct
  source 1..22: mol_type = other RNA
ggatttccccatattgaccagg

SEQ ID NO: 8737 - RNA, 22 nt, synthetic construct
  source 1..22: mol_type = other RNA
ggatttcctagcaccgtggtga

SEQ ID NO: 8738 - RNA, 22 nt, synthetic construct
  source 1..22: mol_type = other RNA
ggatttgagatcaccctggtca

SEQ ID NO: 8739 - RNA, 22 nt, synthetic construct
  source 1..22: mol_type = other RNA
ggcaacagccccttgtggcagg

SEQ ID NO: 8740 - RNA, 22 nt, synthetic construct
  source 1..22: mol_type = other RNA
ggcaagacaagttcagtaacca

SEQ ID NO: 8741 - RNA, 22 nt, synthetic construct
  source 1..22: mol_type = other RNA
ggcaagccagtcagcagtaggc

SEQ ID NO: 8742 - RNA, 22 nt, synthetic construct
  source 1..22: mol_type = other RNA
ggcaatgctttcgaaacgagag

SEQ ID NO: 8743 - RNA, 22 nt, synthetic construct
  source 1..22: mol_type = other RNA
ggcacaagaatcacctgaaccc

SEQ ID NO: 8744 - RNA, 22 nt, synthetic construct
  source 1..22: mol_type = other RNA
ggcacacacctgtagtctcagc

SEQ ID NO: 8745 - RNA, 22 nt, synthetic construct
  source 1..22: mol_type = other RNA
ggcagccctggcggagggatgc

SEQ ID NO: 8746 - RNA, 22 nt, synthetic construct
  source 1..22: mol_type = other RNA
ggcagcggctgctgcttggcag

SEQ ID NO: 8747 - RNA, 22 nt, synthetic construct
  source 1..22: mol_type = other RNA
ggcaggggctgatttccaaaaa

SEQ ID NO: 8748 - RNA, 22 nt, synthetic construct
  source 1..22: mol_type = other RNA
ggcagtattccctttttaaatg

SEQ ID NO: 8749 - RNA, 22 nt, synthetic construct
  source 1..22: mol_type = other RNA
ggcagtcgatcggaatcgtggg

SEQ ID NO: 8750 - RNA, 22 nt, synthetic construct
  source 1..22: mol_type = other RNA
ggcatcttcactcctcgagtac

SEQ ID NO: 8751 - RNA, 22 nt, synthetic construct
  source 1..22: mol_type = other RNA
ggcattttattccagcgtcttc

SEQ ID NO: 8752 - RNA, 22 nt, synthetic construct
  source 1..22: mol_type = other RNA
ggccaaatgagaaccggtggtg

SEQ ID NO: 8753 - RNA, 22 nt, synthetic construct
  source 1..22: mol_type = other RNA
ggccactgaagcacgtgagaga

SEQ ID NO: 8754 - RNA, 22 nt, synthetic construct
  source 1..22: mol_type = other RNA
ggccagccaaggcaagccagtc

SEQ ID NO: 8755 - RNA, 22 nt, synthetic construct
  source 1..22: mol_type = other RNA
ggccagtctccagcaggagata

SEQ ID NO: 8756 - RNA, 22 nt, synthetic construct
  source 1..22: mol_type = other RNA
ggccagttacttggttttatct

SEQ ID NO: 8757 - RNA, 22 nt, synthetic construct
  source 1..22: mol_type = other RNA
ggccattacagttccctattcc

SEQ ID NO: 8758 - RNA, 22 nt, synthetic construct
  source 1..22: mol_type = other RNA
ggcccaaactaatgttgaaagt

SEQ ID NO: 8759 - RNA, 22 nt, synthetic construct
  source 1..22: mol_type = other RNA
ggcccacctgcatccctccgcc

SEQ ID NO: 8760 - RNA, 22 nt, synthetic construct
  source 1..22: mol_type = other RNA
ggcccaggtagtaagcagtggc

SEQ ID NO: 8761 - RNA, 22 nt, synthetic construct
  source 1..22: mol_type = other RNA
ggccggaagatcccacgattcc

SEQ ID NO: 8762 - RNA, 22 nt, synthetic construct
  source 1..22: mol_type = other RNA
ggcctagctgtagaatttcaga

SEQ ID NO: 8763 - RNA, 22 nt, synthetic construct
  source 1..22: mol_type = other RNA
ggcctgtccggtgggaacgggc

SEQ ID NO: 8764 - RNA, 22 nt, synthetic construct
  source 1..22: mol_type = other RNA
ggccttggctatgaatgtcaga

SEQ ID NO: 8765 - RNA, 22 nt, synthetic construct
  source 1..22: mol_type = other RNA
ggcgacacagcgagactgtctc

SEQ ID NO: 8766 - RNA, 22 nt, synthetic construct
  source 1..22: mol_type = other RNA
ggcgccactgcttactacctgg

SEQ ID NO: 8767 - RNA, 22 nt, synthetic construct
  source 1..22: mol_type = other RNA
ggcgccgagccttgcttgtcac

SEQ ID NO: 8768 - RNA, 22 nt, synthetic construct
  source 1..22: mol_type = other RNA
ggcggagggatgcaggtgggcc

SEQ ID NO: 8769 - RNA, 22 nt, synthetic construct
  source 1..22: mol_type = other RNA
ggctaagctttcagggctctcg

SEQ ID NO: 8770 - RNA, 22 nt, synthetic construct
  source 1..22: mol_type = other RNA
ggctagcaagcagacggtggga

SEQ ID NO: 8771 - RNA, 22 nt, synthetic construct
  source 1..22: mol_type = other RNA
ggctatgaatgtcagaaagtca

SEQ ID NO: 8772 - RNA, 22 nt, synthetic construct
  source 1..22: mol_type = other RNA
ggctatgagaaccccacctaca

SEQ ID NO: 8773 - RNA, 22 nt, synthetic construct
  source 1..22: mol_type = other RNA
ggctcaggtctcccagcaccct

SEQ ID NO: 8774 - RNA, 22 nt, synthetic construct
  source 1..22: mol_type = other RNA
ggctcattaaggtccttactgt

SEQ ID NO: 8775 - RNA, 22 nt, synthetic construct
  source 1..22: mol_type = other RNA
ggctcggcgccactgcttacta

SEQ ID NO: 8776 - RNA, 22 nt, synthetic construct
  source 1..22: mol_type = other RNA
ggctctcgtttcgaaagcattg

SEQ ID NO: 8777 - RNA, 22 nt, synthetic construct
  source 1..22: mol_type = other RNA
ggctgaagagttgacttacaca

SEQ ID NO: 8778 - RNA, 22 nt, synthetic construct
  source 1..22: mol_type = other RNA
ggctgatttccaaaaacacgac

SEQ ID NO: 8779 - RNA, 22 nt, synthetic construct
  source 1..22: mol_type = other RNA
ggctgcatttggtcctcagggg

SEQ ID NO: 8780 - RNA, 22 nt, synthetic construct
  source 1..22: mol_type = other RNA
ggctgcgtctgacatcctgacc

SEQ ID NO: 8781 - RNA, 22 nt, synthetic construct
  source 1..22: mol_type = other RNA
ggctgctgcttggcagtcgatc

SEQ ID NO: 8782 - RNA, 22 nt, synthetic construct
  source 1..22: mol_type = other RNA
ggctgctggctgcatttggtcc

SEQ ID NO: 8783 - RNA, 22 nt, synthetic construct
  source 1..22: mol_type = other RNA
ggctggatacctgtgtgtctcc

SEQ ID NO: 8784 - RNA, 22 nt, synthetic construct
  source 1..22: mol_type = other RNA
ggctggcccaggtagtaagcag

SEQ ID NO: 8785 - RNA, 22 nt, synthetic construct
  source 1..22: mol_type = other RNA
ggctgggttgggggtgggaacc

SEQ ID NO: 8786 - RNA, 22 nt, synthetic construct
  source 1..22: mol_type = other RNA
ggctgtcgttccggttatgttg

SEQ ID NO: 8787 - RNA, 22 nt, synthetic construct
  source 1..22: mol_type = other RNA
ggctgttgccaactttcaacat

SEQ ID NO: 8788 - RNA, 22 nt, synthetic construct
  source 1..22: mol_type = other RNA
ggcttgccttggctggcccagg

SEQ ID NO: 8789 - RNA, 22 nt, synthetic construct
  source 1..22: mol_type = other RNA
gggaaaggagcaacaggaaatt

SEQ ID NO: 8790 - RNA, 22 nt, synthetic construct
  source 1..22: mol_type = other RNA
gggaaatcctatctctaataaa

SEQ ID NO: 8791 - RNA, 22 nt, synthetic construct
  source 1..22: mol_type = other RNA
gggaaatgtcgattttcaataa

SEQ ID NO: 8792 - RNA, 22 nt, synthetic construct
  source 1..22: mol_type = other RNA
gggaaattagtgcagatgctgg

SEQ ID NO: 8793 - RNA, 22 nt, synthetic construct
  source 1..22: mol_type = other RNA
gggaacctgtggaattaatagg

SEQ ID NO: 8794 - RNA, 22 nt, synthetic construct
  source 1..22: mol_type = other RNA
gggaacgggctgctggctgcat

SEQ ID NO: 8795 - RNA, 22 nt, synthetic construct
  source 1..22: mol_type = other RNA
gggaactgtaatggccactgaa

SEQ ID NO: 8796 - RNA, 22 nt, synthetic construct
  source 1..22: mol_type = other RNA
gggaagagacctgcacagggtg

SEQ ID NO: 8797 - RNA, 22 nt, synthetic construct
  source 1..22: mol_type = other RNA
gggaatgtccagagtcccttga

SEQ ID NO: 8798 - RNA, 22 nt, synthetic construct
  source 1..22: mol_type = other RNA
gggaccaggggatctctggtct

SEQ ID NO: 8799 - RNA, 22 nt, synthetic construct
  source 1..22: mol_type = other RNA
gggactctggacattcccactg

SEQ ID NO: 8800 - RNA, 22 nt, synthetic construct
  source 1..22: mol_type = other RNA
gggagacagaggttgcagtgcg

SEQ ID NO: 8801 - RNA, 22 nt, synthetic construct
  source 1..22: mol_type = other RNA
gggagacctgagccatttgctg

SEQ ID NO: 8802 - RNA, 22 nt, synthetic construct
  source 1..22: mol_type = other RNA
gggatcaaagaggcaatgcttt

SEQ ID NO: 8803 - RNA, 22 nt, synthetic construct
  source 1..22: mol_type = other RNA
gggatcaagggactctggacat

SEQ ID NO: 8804 - RNA, 22 nt, synthetic construct
  source 1..22: mol_type = other RNA
gggatctctggtctttttcagt

SEQ ID NO: 8805 - RNA, 22 nt, synthetic construct
  source 1..22: mol_type = other RNA
gggatcttccggcccacctgca

SEQ ID NO: 8806 - RNA, 22 nt, synthetic construct
  source 1..22: mol_type = other RNA
gggatgcaggtgggccggaaga

SEQ ID NO: 8807 - RNA, 22 nt, synthetic construct
  source 1..22: mol_type = other RNA
gggattgtgcagcaaatggctc

SEQ ID NO: 8808 - RNA, 22 nt, synthetic construct
  source 1..22: mol_type = other RNA
gggccagccaaggcaagccagt

SEQ ID NO: 8809 - RNA, 22 nt, synthetic construct
  source 1..22: mol_type = other RNA
gggccggaagatcccacgattc

SEQ ID NO: 8810 - RNA, 22 nt, synthetic construct
  source 1..22: mol_type = other RNA
gggccttggctatgaatgtcag

SEQ ID NO: 8811 - RNA, 22 nt, synthetic construct
  source 1..22: mol_type = other RNA
gggcgacacagcgagactgtct

SEQ ID NO: 8812 - RNA, 22 nt, synthetic construct
  source 1..22: mol_type = other RNA
gggctaagctttcagggctctc

SEQ ID NO: 8813 - RNA, 22 nt, synthetic construct
  source 1..22: mol_type = other RNA
gggctcattaaggtccttactg

SEQ ID NO: 8814 - RNA, 22 nt, synthetic construct
  source 1..22: mol_type = other RNA
gggctctcgtttcgaaagcatt

SEQ ID NO: 8815 - RNA, 22 nt, synthetic construct
  source 1..22: mol_type = other RNA
gggctgatttccaaaaacacga

SEQ ID NO: 8816 - RNA, 22 nt, synthetic construct
  source 1..22: mol_type = other RNA
gggctgcgtctgacatcctgac

SEQ ID NO: 8817 - RNA, 22 nt, synthetic construct
  source 1..22: mol_type = other RNA
gggctgctggctgcatttggtc

SEQ ID NO: 8818 - RNA, 22 nt, synthetic construct
  source 1..22: mol_type = other RNA
gggctgggttgggggtgggaac

SEQ ID NO: 8819 - RNA, 22 nt, synthetic construct
  source 1..22: mol_type = other RNA
gggctgttgccaactttcaaca

SEQ ID NO: 8820 - RNA, 22 nt, synthetic construct
  source 1..22: mol_type = other RNA
ggggaaaggagcaacaggaaat

SEQ ID NO: 8821 - RNA, 22 nt, synthetic construct
  source 1..22: mol_type = other RNA
ggggaaatcctatctctaataa

SEQ ID NO: 8822 - RNA, 22 nt, synthetic construct
  source 1..22: mol_type = other RNA
ggggatcaaagaggcaatgctt

SEQ ID NO: 8823 - RNA, 22 nt, synthetic construct
  source 1..22: mol_type = other RNA
ggggatcaagggactctggaca

SEQ ID NO: 8824 - RNA, 22 nt, synthetic construct
  source 1..22: mol_type = other RNA
ggggatctctggtctttttcag

SEQ ID NO: 8825 - RNA, 22 nt, synthetic construct
  source 1..22: mol_type = other RNA
ggggattgtgcagcaaatggct

SEQ ID NO: 8826 - RNA, 22 nt, synthetic construct
  source 1..22: mol_type = other RNA
ggggctgatttccaaaaacacg

SEQ ID NO: 8827 - RNA, 22 nt, synthetic construct
  source 1..22: mol_type = other RNA
ggggctgcgtctgacatcctga

SEQ ID NO: 8828 - RNA, 22 nt, synthetic construct
  source 1..22: mol_type = other RNA
ggggctgttgccaactttcaac

SEQ ID NO: 8829 - RNA, 22 nt, synthetic construct
  source 1..22: mol_type = other RNA
gggggaaaggagcaacaggaaa

SEQ ID NO: 8830 - RNA, 22 nt, synthetic construct
  source 1..22: mol_type = other RNA
gggggtgggaacctgtggaatt

SEQ ID NO: 8831 - RNA, 22 nt, synthetic construct
  source 1..22: mol_type = other RNA
ggggtgagcattggatcaacct

SEQ ID NO: 8832 - RNA, 22 nt, synthetic construct
  source 1..22: mol_type = other RNA
ggggtggaatagggaactgtaa

SEQ ID NO: 8833 - RNA, 22 nt, synthetic construct
  source 1..22: mol_type = other RNA
ggggtgggaacctgtggaatta

SEQ ID NO: 8834 - RNA, 22 nt, synthetic construct
  source 1..22: mol_type = other RNA
ggggttctcatagccatggttc

SEQ ID NO: 8835 - RNA, 22 nt, synthetic construct
  source 1..22: mol_type = other RNA
ggggtttctgattaatttaaaa

SEQ ID NO: 8836 - RNA, 22 nt, synthetic construct
  source 1..22: mol_type = other RNA
gggtcattgtggtgtctgggaa

SEQ ID NO: 8837 - RNA, 22 nt, synthetic construct
  source 1..22: mol_type = other RNA
gggtctctcacgtgcttcagtg

SEQ ID NO: 8838 - RNA, 22 nt, synthetic construct
  source 1..22: mol_type = other RNA
gggtgaaaaatggtaatataac

SEQ ID NO: 8839 - RNA, 22 nt, synthetic construct
  source 1..22: mol_type = other RNA
gggtgaaaactcttttctcaga

SEQ ID NO: 8840 - RNA, 22 nt, synthetic construct
  source 1..22: mol_type = other RNA
gggtgagcattggatcaacctg

SEQ ID NO: 8841 - RNA, 22 nt, synthetic construct
  source 1..22: mol_type = other RNA
gggtgctgggagacctgagcca

SEQ ID NO: 8842 - RNA, 22 nt, synthetic construct
  source 1..22: mol_type = other RNA
gggtggaatagggaactgtaat

SEQ ID NO: 8843 - RNA, 22 nt, synthetic construct
  source 1..22: mol_type = other RNA
gggtgggaacctgtggaattaa

SEQ ID NO: 8844 - RNA, 22 nt, synthetic construct
  source 1..22: mol_type = other RNA
gggttctcatagccatggttct

SEQ ID NO: 8845 - RNA, 22 nt, synthetic construct
  source 1..22: mol_type = other RNA
gggttgggggtgggaacctgtg

SEQ ID NO: 8846 - RNA, 22 nt, synthetic construct
  source 1..22: mol_type = other RNA
ggtagtaagcagtggcgccgag

SEQ ID NO: 8847 - RNA, 22 nt, synthetic construct
  source 1..22: mol_type = other RNA
ggtatccagccgtggaaacact

SEQ ID NO: 8848 - RNA, 22 nt, synthetic construct
  source 1..22: mol_type = other RNA
ggtatttgtaggtggggttctc

SEQ ID NO: 8849 - RNA, 22 nt, synthetic construct
  source 1..22: mol_type = other RNA
ggtcaatatggggaaatcctat

SEQ ID NO: 8850 - RNA, 22 nt, synthetic construct
  source 1..22: mol_type = other RNA
ggtcaggatgtcagacgcagcc

SEQ ID NO: 8851 - RNA, 22 nt, synthetic construct
  source 1..22: mol_type = other RNA
ggtcaggatttgagatcaccct

SEQ ID NO: 8852 - RNA, 22 nt, synthetic construct
  source 1..22: mol_type = other RNA
ggtcattgtggtgtctgggaag

SEQ ID NO: 8853 - RNA, 22 nt, synthetic construct
  source 1..22: mol_type = other RNA
ggtcccaccgtctgcttgctag

SEQ ID NO: 8854 - RNA, 22 nt, synthetic construct
  source 1..22: mol_type = other RNA
ggtcctcaggggattgtgcagc

SEQ ID NO: 8855 - RNA, 22 nt, synthetic construct
  source 1..22: mol_type = other RNA
ggtccttactgtatttatattt

SEQ ID NO: 8856 - RNA, 22 nt, synthetic construct
  source 1..22: mol_type = other RNA
ggtcctttcacatcattttgcg

SEQ ID NO: 8857 - RNA, 22 nt, synthetic construct
  source 1..22: mol_type = other RNA
ggtcgtgtttttggaaatcagc

SEQ ID NO: 8858 - RNA, 22 nt, synthetic construct
  source 1..22: mol_type = other RNA
ggtctcccagcaccctgtgcag

SEQ ID NO: 8859 - RNA, 22 nt, synthetic construct
  source 1..22: mol_type = other RNA
ggtctctcacgtgcttcagtgg

SEQ ID NO: 8860 - RNA, 22 nt, synthetic construct
  source 1..22: mol_type = other RNA
ggtctcttcccagacaccacaa

SEQ ID NO: 8861 - RNA, 22 nt, synthetic construct
  source 1..22: mol_type = other RNA
ggtcttagttatttgtgttttt

SEQ ID NO: 8862 - RNA, 22 nt, synthetic construct
  source 1..22: mol_type = other RNA
ggtctttttcagttctgaaatt

SEQ ID NO: 8863 - RNA, 22 nt, synthetic construct
  source 1..22: mol_type = other RNA
ggtgaaaaatggtaatataaca

SEQ ID NO: 8864 - RNA, 22 nt, synthetic construct
  source 1..22: mol_type = other RNA
ggtgaaaactcttttctcagat

SEQ ID NO: 8865 - RNA, 22 nt, synthetic construct
  source 1..22: mol_type = other RNA
ggtgaaacacaggagaaagaaa

SEQ ID NO: 8866 - RNA, 22 nt, synthetic construct
  source 1..22: mol_type = other RNA
ggtgacaagcaaggctcggcgc

SEQ ID NO: 8867 - RNA, 22 nt, synthetic construct
  source 1..22: mol_type = other RNA
ggtgacaggacttttatggaga

SEQ ID NO: 8868 - RNA, 22 nt, synthetic construct
  source 1..22: mol_type = other RNA
ggtgacgctcttctggggtgag

SEQ ID NO: 8869 - RNA, 22 nt, synthetic construct
  source 1..22: mol_type = other RNA
ggtgagcattggatcaacctgg

SEQ ID NO: 8870 - RNA, 22 nt, synthetic construct
  source 1..22: mol_type = other RNA
ggtgattcttgtgcctcagcct

SEQ ID NO: 8871 - RNA, 22 nt, synthetic construct
  source 1..22: mol_type = other RNA
ggtgctaggaaatccagttgac

SEQ ID NO: 8872 - RNA, 22 nt, synthetic construct
  source 1..22: mol_type = other RNA
ggtgctgggagacctgagccat

SEQ ID NO: 8873 - RNA, 22 nt, synthetic construct
  source 1..22: mol_type = other RNA
ggtggaatagggaactgtaatg

SEQ ID NO: 8874 - RNA, 22 nt, synthetic construct
  source 1..22: mol_type = other RNA
ggtgggaacctgtggaattaat

SEQ ID NO: 8875 - RNA, 22 nt, synthetic construct
  source 1..22: mol_type = other RNA
ggtgggaacgggctgctggctg

SEQ ID NO: 8876 - RNA, 22 nt, synthetic construct
  source 1..22: mol_type = other RNA
ggtgggaccaggggatctctgg

SEQ ID NO: 8877 - RNA, 22 nt, synthetic construct
  source 1..22: mol_type = other RNA
ggtgggaggctgaggcacaaga

SEQ ID NO: 8878 - RNA, 22 nt, synthetic construct
  source 1..22: mol_type = other RNA
ggtgggccggaagatcccacga

SEQ ID NO: 8879 - RNA, 22 nt, synthetic construct
  source 1..22: mol_type = other RNA
ggtggggttctcatagccatgg

SEQ ID NO: 8880 - RNA, 22 nt, synthetic construct
  source 1..22: mol_type = other RNA
ggtggtgaaacacaggagaaag

SEQ ID NO: 8881 - RNA, 22 nt, synthetic construct
  source 1..22: mol_type = other RNA
ggtgtctgggaagagacctgca

SEQ ID NO: 8882 - RNA, 22 nt, synthetic construct
  source 1..22: mol_type = other RNA
ggtgtgtgccaccacgcccagc

SEQ ID NO: 8883 - RNA, 22 nt, synthetic construct
  source 1..22: mol_type = other RNA
ggttactgaacttgtcttgcca

SEQ ID NO: 8884 - RNA, 22 nt, synthetic construct
  source 1..22: mol_type = other RNA
ggttatgttgtgtaagtcaact

SEQ ID NO: 8885 - RNA, 22 nt, synthetic construct
  source 1..22: mol_type = other RNA
ggttctcatagccatggttctg

SEQ ID NO: 8886 - RNA, 22 nt, synthetic construct
  source 1..22: mol_type = other RNA
ggttctcatttggcctgtccgg

SEQ ID NO: 8887 - RNA, 22 nt, synthetic construct
  source 1..22: mol_type = other RNA
ggttctgcatcttgttcaggtg

SEQ ID NO: 8888 - RNA, 22 nt, synthetic construct
  source 1..22: mol_type = other RNA
ggttgatccaatgctcacccca

SEQ ID NO: 8889 - RNA, 22 nt, synthetic construct
  source 1..22: mol_type = other RNA
ggttgggggtgggaacctgtgg

SEQ ID NO: 8890 - RNA, 22 nt, synthetic construct
  source 1..22: mol_type = other RNA
ggttttatctcctgctggagac

SEQ ID NO: 8891 - RNA, 22 nt, synthetic construct
  source 1..22: mol_type = other RNA
ggttttgttcttccaggttgat

SEQ ID NO: 8892 - RNA, 22 nt, synthetic construct
  source 1..22: mol_type = other RNA
ggttttttggagacagtctcgc

SEQ ID NO: 8893 - RNA, 22 nt, synthetic construct
  source 1..22: mol_type = other RNA
ggttttttggttttttggagac

SEQ ID NO: 8894 - RNA, 22 nt, synthetic construct
  source 1..22: mol_type = other RNA
gtaaccagcagaagacagaaca

SEQ ID NO: 8895 - RNA, 22 nt, synthetic construct
  source 1..22: mol_type = other RNA
gtaactgaactgataacagcag

SEQ ID NO: 8896 - RNA, 22 nt, synthetic construct
  source 1..22: mol_type = other RNA
gtaactggccaggtgcagtagc

SEQ ID NO: 8897 - RNA, 22 nt, synthetic construct
  source 1..22: mol_type = other RNA
gtaagcagtggcgccgagcctt

SEQ ID NO: 8898 - RNA, 22 nt, synthetic construct
  source 1..22: mol_type = other RNA
gtaaggaccttaatgagccctg

SEQ ID NO: 8899 - RNA, 22 nt, synthetic construct
  source 1..22: mol_type = other RNA
gtaagtcaactcttcagcctca

SEQ ID NO: 8900 - RNA, 22 nt, synthetic construct
  source 1..22: mol_type = other RNA
gtaatggccactgaagcacgtg

SEQ ID NO: 8901 - RNA, 22 nt, synthetic construct
  source 1..22: mol_type = other RNA
gtactactgtagaactgcaatt

SEQ ID NO: 8902 - RNA, 22 nt, synthetic construct
  source 1..22: mol_type = other RNA
gtactcgaggagtgaagatgcc

SEQ ID NO: 8903 - RNA, 22 nt, synthetic construct
  source 1..22: mol_type = other RNA
gtactggacatgctgctgttat

SEQ ID NO: 8904 - RNA, 22 nt, synthetic construct
  source 1..22: mol_type = other RNA
gtactttatatagtcctacagt

SEQ ID NO: 8905 - RNA, 22 nt, synthetic construct
  source 1..22: mol_type = other RNA
gtagaactgcaatttccattct

SEQ ID NO: 8906 - RNA, 22 nt, synthetic construct
  source 1..22: mol_type = other RNA
gtagaatttcagaactgaaaaa

SEQ ID NO: 8907 - RNA, 22 nt, synthetic construct
  source 1..22: mol_type = other RNA
gtagcataaaatgttcacatga

SEQ ID NO: 8908 - RNA, 22 nt, synthetic construct
  source 1..22: mol_type = other RNA
gtaggactatataaagtactac

SEQ ID NO: 8909 - RNA, 22 nt, synthetic construct
  source 1..22: mol_type = other RNA
gtaggctagcaagcagacggtg

SEQ ID NO: 8910 - RNA, 22 nt, synthetic construct
  source 1..22: mol_type = other RNA
gtaggtggggttctcatagcca

SEQ ID NO: 8911 - RNA, 22 nt, synthetic construct
  source 1..22: mol_type = other RNA
gtagtaagcagtggcgccgagc

SEQ ID NO: 8912 - RNA, 22 nt, synthetic construct
  source 1..22: mol_type = other RNA
gtagtactttatatagtcctac

SEQ ID NO: 8913 - RNA, 22 nt, synthetic construct
  source 1..22: mol_type = other RNA
gtagtctcagctaggtgggagg

SEQ ID NO: 8914 - RNA, 22 nt, synthetic construct
  source 1..22: mol_type = other RNA
gtatacactaagctctctagaa

SEQ ID NO: 8915 - RNA, 22 nt, synthetic construct
  source 1..22: mol_type = other RNA
gtatccagccgtggaaacactg

SEQ ID NO: 8916 - RNA, 22 nt, synthetic construct
  source 1..22: mol_type = other RNA
gtattccctttttaaatgagct

SEQ ID NO: 8917 - RNA, 22 nt, synthetic construct
  source 1..22: mol_type = other RNA
gtattgtctgacacatgctctc

SEQ ID NO: 8918 - RNA, 22 nt, synthetic construct
  source 1..22: mol_type = other RNA
gtatttatatttggggatcaag

SEQ ID NO: 8919 - RNA, 22 nt, synthetic construct
  source 1..22: mol_type = other RNA
gtatttgtaggtggggttctca

SEQ ID NO: 8920 - RNA, 22 nt, synthetic construct
  source 1..22: mol_type = other RNA
gtcaactcttcagcctcattca

SEQ ID NO: 8921 - RNA, 22 nt, synthetic construct
  source 1..22: mol_type = other RNA
gtcaactggatttcctagcacc

SEQ ID NO: 8922 - RNA, 22 nt, synthetic construct
  source 1..22: mol_type = other RNA
gtcaatatggggaaatcctatc

SEQ ID NO: 8923 - RNA, 22 nt, synthetic construct
  source 1..22: mol_type = other RNA
gtcaccaaggacgttaaaggca

SEQ ID NO: 8924 - RNA, 22 nt, synthetic construct
  source 1..22: mol_type = other RNA
gtcaccacggtgctaggaaatc

SEQ ID NO: 8925 - RNA, 22 nt, synthetic construct
  source 1..22: mol_type = other RNA
gtcacctgaacaagatgcagaa

SEQ ID NO: 8926 - RNA, 22 nt, synthetic construct
  source 1..22: mol_type = other RNA
gtcagaaagtcatgtgaacatt

SEQ ID NO: 8927 - RNA, 22 nt, synthetic construct
  source 1..22: mol_type = other RNA
gtcagacaatacaatggaagtg

SEQ ID NO: 8928 - RNA, 22 nt, synthetic construct
  source 1..22: mol_type = other RNA
gtcagacgcagcccctggcagc

SEQ ID NO: 8929 - RNA, 22 nt, synthetic construct
  source 1..22: mol_type = other RNA
gtcagcagtaggctagcaagca

SEQ ID NO: 8930 - RNA, 22 nt, synthetic construct
  source 1..22: mol_type = other RNA
gtcaggatgtcagacgcagccc

SEQ ID NO: 8931 - RNA, 22 nt, synthetic construct
  source 1..22: mol_type = other RNA
gtcaggatttgagatcaccctg

SEQ ID NO: 8932 - RNA, 22 nt, synthetic construct
  source 1..22: mol_type = other RNA
gtcatcttccgtgagggctaag

SEQ ID NO: 8933 - RNA, 22 nt, synthetic construct
  source 1..22: mol_type = other RNA
gtcatgtgaacattttatgcta

SEQ ID NO: 8934 - RNA, 22 nt, synthetic construct
  source 1..22: mol_type = other RNA
gtcattgtggtgtctgggaaga

SEQ ID NO: 8935 - RNA, 22 nt, synthetic construct
  source 1..22: mol_type = other RNA
gtccagagtcccttgatcccca

SEQ ID NO: 8936 - RNA, 22 nt, synthetic construct
  source 1..22: mol_type = other RNA
gtccaggaggtcaggatgtcag

SEQ ID NO: 8937 - RNA, 22 nt, synthetic construct
  source 1..22: mol_type = other RNA
gtccagtactcgaggagtgaag

SEQ ID NO: 8938 - RNA, 22 nt, synthetic construct
  source 1..22: mol_type = other RNA
gtccagtgtttccacggctgga

SEQ ID NO: 8939 - RNA, 22 nt, synthetic construct
  source 1..22: mol_type = other RNA
gtcccaccgtctgcttgctagc

SEQ ID NO: 8940 - RNA, 22 nt, synthetic construct
  source 1..22: mol_type = other RNA
gtcccttgatccccaaatataa

SEQ ID NO: 8941 - RNA, 22 nt, synthetic construct
  source 1..22: mol_type = other RNA
gtccggtgggaacgggctgctg

SEQ ID NO: 8942 - RNA, 22 nt, synthetic construct
  source 1..22: mol_type = other RNA
gtcctacagtccaggaggtcag

SEQ ID NO: 8943 - RNA, 22 nt, synthetic construct
  source 1..22: mol_type = other RNA
gtcctcaggggattgtgcagca

SEQ ID NO: 8944 - RNA, 22 nt, synthetic construct
  source 1..22: mol_type = other RNA
gtcctggcttttatttaaagaa

SEQ ID NO: 8945 - RNA, 22 nt, synthetic construct
  source 1..22: mol_type = other RNA
gtcctgtcaccaaggacgttaa

SEQ ID NO: 8946 - RNA, 22 nt, synthetic construct
  source 1..22: mol_type = other RNA
gtccttactgtatttatatttg

SEQ ID NO: 8947 - RNA, 22 nt, synthetic construct
  source 1..22: mol_type = other RNA
gtccttggtgacaggactttta

SEQ ID NO: 8948 - RNA, 22 nt, synthetic construct
  source 1..22: mol_type = other RNA
gtcctttcacatcattttgcga

SEQ ID NO: 8949 - RNA, 22 nt, synthetic construct
  source 1..22: mol_type = other RNA
gtcgatcggaatcgtgggatct

SEQ ID NO: 8950 - RNA, 22 nt, synthetic construct
  source 1..22: mol_type = other RNA
gtcgattttcaataatagactt

SEQ ID NO: 8951 - RNA, 22 nt, synthetic construct
  source 1..22: mol_type = other RNA
gtcgtgtttttggaaatcagcc

SEQ ID NO: 8952 - RNA, 22 nt, synthetic construct
  source 1..22: mol_type = other RNA
gtcgttccggttatgttgtgta

SEQ ID NO: 8953 - RNA, 22 nt, synthetic construct
  source 1..22: mol_type = other RNA
gtctattattgaaaatcgacat

SEQ ID NO: 8954 - RNA, 22 nt, synthetic construct
  source 1..22: mol_type = other RNA
gtctcagctaggtgggaggctg

SEQ ID NO: 8955 - RNA, 22 nt, synthetic construct
  source 1..22: mol_type = other RNA
gtctccaaaaaaccaaaaaacc

SEQ ID NO: 8956 - RNA, 22 nt, synthetic construct
  source 1..22: mol_type = other RNA
gtctccagcaggagataaaacc

SEQ ID NO: 8957 - RNA, 22 nt, synthetic construct
  source 1..22: mol_type = other RNA
gtctccataaaagtcctgtcac

SEQ ID NO: 8958 - RNA, 22 nt, synthetic construct
  source 1..22: mol_type = other RNA
gtctcccagcaccctgtgcagg

SEQ ID NO: 8959 - RNA, 22 nt, synthetic construct
  source 1..22: mol_type = other RNA
gtctcccgggttcaggtgattc

SEQ ID NO: 8960 - RNA, 22 nt, synthetic construct
  source 1..22: mol_type = other RNA
gtctctcacgtgcttcagtggc

SEQ ID NO: 8961 - RNA, 22 nt, synthetic construct
  source 1..22: mol_type = other RNA
gtctcttcccagacaccacaat

SEQ ID NO: 8962 - RNA, 22 nt, synthetic construct
  source 1..22: mol_type = other RNA
gtctgacacatgctctcaatat

SEQ ID NO: 8963 - RNA, 22 nt, synthetic construct
  source 1..22: mol_type = other RNA
gtctgacatcctgacctcctgg

SEQ ID NO: 8964 - RNA, 22 nt, synthetic construct
  source 1..22: mol_type = other RNA
gtctgcttcagcactttctaaa

SEQ ID NO: 8965 - RNA, 22 nt, synthetic construct
  source 1..22: mol_type = other RNA
gtctgcttgctagcctactgct

SEQ ID NO: 8966 - RNA, 22 nt, synthetic construct
  source 1..22: mol_type = other RNA
gtctgggaagagacctgcacag

SEQ ID NO: 8967 - RNA, 22 nt, synthetic construct
  source 1..22: mol_type = other RNA
gtcttctagagagcttagtgta

SEQ ID NO: 8968 - RNA, 22 nt, synthetic construct
  source 1..22: mol_type = other RNA
gtcttctgctggttactgaact

SEQ ID NO: 8969 - RNA, 22 nt, synthetic construct
  source 1..22: mol_type = other RNA
gtcttgccactcactccttagt

SEQ ID NO: 8970 - RNA, 22 nt, synthetic construct
  source 1..22: mol_type = other RNA
gtctttttcagttctgaaattc

SEQ ID NO: 8971 - RNA, 22 nt, synthetic construct
  source 1..22: mol_type = other RNA
gtgaaaactcttttctcagatt

SEQ ID NO: 8972 - RNA, 22 nt, synthetic construct
  source 1..22: mol_type = other RNA
gtgaaacacaggagaaagaaaa

SEQ ID NO: 8973 - RNA, 22 nt, synthetic construct
  source 1..22: mol_type = other RNA
gtgaaaggaccagtttcttgaa

SEQ ID NO: 8974 - RNA, 22 nt, synthetic construct
  source 1..22: mol_type = other RNA
gtgaacagtgggaatgtccaga

SEQ ID NO: 8975 - RNA, 22 nt, synthetic construct
  source 1..22: mol_type = other RNA
gtgaacattttatgctacagag

SEQ ID NO: 8976 - RNA, 22 nt, synthetic construct
  source 1..22: mol_type = other RNA
gtgaagatgcctattaattcca

SEQ ID NO: 8977 - RNA, 22 nt, synthetic construct
  source 1..22: mol_type = other RNA
gtgaatgaggctgaagagttga

SEQ ID NO: 8978 - RNA, 22 nt, synthetic construct
  source 1..22: mol_type = other RNA
gtgacaagcaaggctcggcgcc

SEQ ID NO: 8979 - RNA, 22 nt, synthetic construct
  source 1..22: mol_type = other RNA
gtgacaggacttttatggagac

SEQ ID NO: 8980 - RNA, 22 nt, synthetic construct
  source 1..22: mol_type = other RNA
gtgacgctcttctggggtgagc

SEQ ID NO: 8981 - RNA, 22 nt, synthetic construct
  source 1..22: mol_type = other RNA
gtgagagaccctcgcaaaatga

SEQ ID NO: 8982 - RNA, 22 nt, synthetic construct
  source 1..22: mol_type = other RNA
gtgagcattggatcaacctgga

SEQ ID NO: 8983 - RNA, 22 nt, synthetic construct
  source 1..22: mol_type = other RNA
gtgagggctaagctttcagggc

SEQ ID NO: 8984 - RNA, 22 nt, synthetic construct
  source 1..22: mol_type = other RNA
gtgagtaactgaactgataaca

SEQ ID NO: 8985 - RNA, 22 nt, synthetic construct
  source 1..22: mol_type = other RNA
gtgagtggcaagacaagttcag

SEQ ID NO: 8986 - RNA, 22 nt, synthetic construct
  source 1..22: mol_type = other RNA
gtgattcttgtgcctcagcctc

SEQ ID NO: 8987 - RNA, 22 nt, synthetic construct
  source 1..22: mol_type = other RNA
gtgcagatgctggtcttagtta

SEQ ID NO: 8988 - RNA, 22 nt, synthetic construct
  source 1..22: mol_type = other RNA
gtgcagcaaatggctcaggtct

SEQ ID NO: 8989 - RNA, 22 nt, synthetic construct
  source 1..22: mol_type = other RNA
gtgcaggtctcttcccagacac

SEQ ID NO: 8990 - RNA, 22 nt, synthetic construct
  source 1..22: mol_type = other RNA
gtgccaccacgcccagctagtc

SEQ ID NO: 8991 - RNA, 22 nt, synthetic construct
  source 1..22: mol_type = other RNA
gtgcctcagcctcccacctagc

SEQ ID NO: 8992 - RNA, 22 nt, synthetic construct
  source 1..22: mol_type = other RNA
gtgctaggaaatccagttgact

SEQ ID NO: 8993 - RNA, 22 nt, synthetic construct
  source 1..22: mol_type = other RNA
gtgctgaagcagactgtttctg

SEQ ID NO: 8994 - RNA, 22 nt, synthetic construct
  source 1..22: mol_type = other RNA
gtgctgggagacctgagccatt

SEQ ID NO: 8995 - RNA, 22 nt, synthetic construct
  source 1..22: mol_type = other RNA
gtgcttcagtggccattacagt

SEQ ID NO: 8996 - RNA, 22 nt, synthetic construct
  source 1..22: mol_type = other RNA
gtggaaacactggacttcaaga

SEQ ID NO: 8997 - RNA, 22 nt, synthetic construct
  source 1..22: mol_type = other RNA
gtggaatagggaactgtaatgg

SEQ ID NO: 8998 - RNA, 22 nt, synthetic construct
  source 1..22: mol_type = other RNA
gtggaattaataggcatcttca

SEQ ID NO: 8999 - RNA, 22 nt, synthetic construct
  source 1..22: mol_type = other RNA
gtggcaagacaagttcagtaac

SEQ ID NO: 9000 - RNA, 22 nt, synthetic construct
  source 1..22: mol_type = other RNA
gtggcaggggctgatttccaaa

SEQ ID NO: 9001 - RNA, 22 nt, synthetic construct
  source 1..22: mol_type = other RNA
gtggccattacagttccctatt

SEQ ID NO: 9002 - RNA, 22 nt, synthetic construct
  source 1..22: mol_type = other RNA
gtggcgccgagccttgcttgtc

SEQ ID NO: 9003 - RNA, 22 nt, synthetic construct
  source 1..22: mol_type = other RNA
gtgggaacctgtggaattaata

SEQ ID NO: 9004 - RNA, 22 nt, synthetic construct
  source 1..22: mol_type = other RNA
gtgggaacgggctgctggctgc

SEQ ID NO: 9005 - RNA, 22 nt, synthetic construct
  source 1..22: mol_type = other RNA
gtgggaatgtccagagtccctt

SEQ ID NO: 9006 - RNA, 22 nt, synthetic construct
  source 1..22: mol_type = other RNA
gtgggaccaggggatctctggt

SEQ ID NO: 9007 - RNA, 22 nt, synthetic construct
  source 1..22: mol_type = other RNA
gtgggatcttccggcccacctg

SEQ ID NO: 9008 - RNA, 22 nt, synthetic construct
  source 1..22: mol_type = other RNA
gtgggccggaagatcccacgat

SEQ ID NO: 9009 - RNA, 22 nt, synthetic construct
  source 1..22: mol_type = other RNA
gtgggctgggttgggggtggga

SEQ ID NO: 9010 - RNA, 22 nt, synthetic construct
  source 1..22: mol_type = other RNA
gtggggttctcatagccatggt

SEQ ID NO: 9011 - RNA, 22 nt, synthetic construct
  source 1..22: mol_type = other RNA
gtggggtttctgattaatttaa

SEQ ID NO: 9012 - RNA, 22 nt, synthetic construct
  source 1..22: mol_type = other RNA
gtggtgaaacacaggagaaaga

SEQ ID NO: 9013 - RNA, 22 nt, synthetic construct
  source 1..22: mol_type = other RNA
gtggtgacaagcaaggctcggc

SEQ ID NO: 9014 - RNA, 22 nt, synthetic construct
  source 1..22: mol_type = other RNA
gtggtgtctgggaagagacctg

SEQ ID NO: 9015 - RNA, 22 nt, synthetic construct
  source 1..22: mol_type = other RNA
gtgtaagtcaactcttcagcct

SEQ ID NO: 9016 - RNA, 22 nt, synthetic construct
  source 1..22: mol_type = other RNA
gtgtcagacaatacaatggaag

SEQ ID NO: 9017 - RNA, 22 nt, synthetic construct
  source 1..22: mol_type = other RNA
gtgtctccataaaagtcctgtc

SEQ ID NO: 9018 - RNA, 22 nt, synthetic construct
  source 1..22: mol_type = other RNA
gtgtctgggaagagacctgcac

SEQ ID NO: 9019 - RNA, 22 nt, synthetic construct
  source 1..22: mol_type = other RNA
gtgtgccaccacgcccagctag

SEQ ID NO: 9020 - RNA, 22 nt, synthetic construct
  source 1..22: mol_type = other RNA
gtgtgtctccataaaagtcctg

SEQ ID NO: 9021 - RNA, 22 nt, synthetic construct
  source 1..22: mol_type = other RNA
gtgtgtgccaccacgcccagct

SEQ ID NO: 9022 - RNA, 22 nt, synthetic construct
  source 1..22: mol_type = other RNA
gtgttcctttttccaggtattt

SEQ ID NO: 9023 - RNA, 22 nt, synthetic construct
  source 1..22: mol_type = other RNA
gtgtttcaccaccggttctcat

SEQ ID NO: 9024 - RNA, 22 nt, synthetic construct
  source 1..22: mol_type = other RNA
gtgtttccacggctggatacct

SEQ ID NO: 9025 - RNA, 22 nt, synthetic construct
  source 1..22: mol_type = other RNA
gtgtttttggaaatcagcccct

SEQ ID NO: 9026 - RNA, 22 nt, synthetic construct
  source 1..22: mol_type = other RNA
gttaaaggcattttattccagc

SEQ ID NO: 9027 - RNA, 22 nt, synthetic construct
  source 1..22: mol_type = other RNA
gttactcactggattcctaggt

SEQ ID NO: 9028 - RNA, 22 nt, synthetic construct
  source 1..22: mol_type = other RNA
gttactgaacttgtcttgccac

SEQ ID NO: 9029 - RNA, 22 nt, synthetic construct
  source 1..22: mol_type = other RNA
gttacttggttttatctcctgc

SEQ ID NO: 9030 - RNA, 22 nt, synthetic construct
  source 1..22: mol_type = other RNA
gttatattaccatttttcaccc

SEQ ID NO: 9031 - RNA, 22 nt, synthetic construct
  source 1..22: mol_type = other RNA
gttatcagttcagttactcact

SEQ ID NO: 9032 - RNA, 22 nt, synthetic construct
  source 1..22: mol_type = other RNA
gttatgttgtgtaagtcaactc

SEQ ID NO: 9033 - RNA, 22 nt, synthetic construct
  source 1..22: mol_type = other RNA
gttcacatgactttctgacatt

SEQ ID NO: 9034 - RNA, 22 nt, synthetic construct
  source 1..22: mol_type = other RNA
gttcactaaggagtgagtggca

SEQ ID NO: 9035 - RNA, 22 nt, synthetic construct
  source 1..22: mol_type = other RNA
gttcaggtgacgctcttctggg

SEQ ID NO: 9036 - RNA, 22 nt, synthetic construct
  source 1..22: mol_type = other RNA
gttcagtaaccagcagaagaca

SEQ ID NO: 9037 - RNA, 22 nt, synthetic construct
  source 1..22: mol_type = other RNA
gttcagttactcactggattcc

SEQ ID NO: 9038 - RNA, 22 nt, synthetic construct
  source 1..22: mol_type = other RNA
gttcccaccggacaggccaaat

SEQ ID NO: 9039 - RNA, 22 nt, synthetic construct
  source 1..22: mol_type = other RNA
gttccctattccaccccatttc

SEQ ID NO: 9040 - RNA, 22 nt, synthetic construct
  source 1..22: mol_type = other RNA
gttccggttatgttgtgtaagt

SEQ ID NO: 9041 - RNA, 22 nt, synthetic construct
  source 1..22: mol_type = other RNA
gttcctttttccaggtattttt

SEQ ID NO: 9042 - RNA, 22 nt, synthetic construct
  source 1..22: mol_type = other RNA
gttctacagtagtactttatat

SEQ ID NO: 9043 - RNA, 22 nt, synthetic construct
  source 1..22: mol_type = other RNA
gttctcatagccatggttctgc

SEQ ID NO: 9044 - RNA, 22 nt, synthetic construct
  source 1..22: mol_type = other RNA
gttctcatttggcctgtccggt

SEQ ID NO: 9045 - RNA, 22 nt, synthetic construct
  source 1..22: mol_type = other RNA
gttctgaaattctacagctagg

SEQ ID NO: 9046 - RNA, 22 nt, synthetic construct
  source 1..22: mol_type = other RNA
gttctgcatcttgttcaggtga

SEQ ID NO: 9047 - RNA, 22 nt, synthetic construct
  source 1..22: mol_type = other RNA
gttctgtcttctgctggttact

SEQ ID NO: 9048 - RNA, 22 nt, synthetic construct
  source 1..22: mol_type = other RNA
gttcttccaggttgatccaatg

SEQ ID NO: 9049 - RNA, 22 nt, synthetic construct
  source 1..22: mol_type = other RNA
gttgaaagttggcaacagcccc

SEQ ID NO: 9050 - RNA, 22 nt, synthetic construct
  source 1..22: mol_type = other RNA
gttgactgtcatcttccgtgag

SEQ ID NO: 9051 - RNA, 22 nt, synthetic construct
  source 1..22: mol_type = other RNA
gttgacttacacaacataaccg

SEQ ID NO: 9052 - RNA, 22 nt, synthetic construct
  source 1..22: mol_type = other RNA
gttgatccaatgctcaccccag

SEQ ID NO: 9053 - RNA, 22 nt, synthetic construct
  source 1..22: mol_type = other RNA
gttgccaactttcaacattagt

SEQ ID NO: 9054 - RNA, 22 nt, synthetic construct
  source 1..22: mol_type = other RNA
gttgctcctttcccccattaaa

SEQ ID NO: 9055 - RNA, 22 nt, synthetic construct
  source 1..22: mol_type = other RNA
gttgctgagaaatggggtggaa

SEQ ID NO: 9056 - RNA, 22 nt, synthetic construct
  source 1..22: mol_type = other RNA
gttggcaacagccccttgtggc

SEQ ID NO: 9057 - RNA, 22 nt, synthetic construct
  source 1..22: mol_type = other RNA
gttgggggtgggaacctgtgga

SEQ ID NO: 9058 - RNA, 22 nt, synthetic construct
  source 1..22: mol_type = other RNA
gttgtgtaagtcaactcttcag

SEQ ID NO: 9059 - RNA, 22 nt, synthetic construct
  source 1..22: mol_type = other RNA
gtttcaccaccggttctcattt

SEQ ID NO: 9060 - RNA, 22 nt, synthetic construct
  source 1..22: mol_type = other RNA
gtttccacggctggatacctgt

SEQ ID NO: 9061 - RNA, 22 nt, synthetic construct
  source 1..22: mol_type = other RNA
gtttcgaaagcattgcctcttt

SEQ ID NO: 9062 - RNA, 22 nt, synthetic construct
  source 1..22: mol_type = other RNA
gtttctgttctgtcttctgctg

SEQ ID NO: 9063 - RNA, 22 nt, synthetic construct
  source 1..22: mol_type = other RNA
gtttcttgaagtccagtgtttc

SEQ ID NO: 9064 - RNA, 22 nt, synthetic construct
  source 1..22: mol_type = other RNA
gtttgggccttggctatgaatg

SEQ ID NO: 9065 - RNA, 22 nt, synthetic construct
  source 1..22: mol_type = other RNA
gtttgttttggttttttggttt

SEQ ID NO: 9066 - RNA, 22 nt, synthetic construct
  source 1..22: mol_type = other RNA
gttttatctcctgctggagact

SEQ ID NO: 9067 - RNA, 22 nt, synthetic construct
  source 1..22: mol_type = other RNA
gttttcaccctctgtagcataa

SEQ ID NO: 9068 - RNA, 22 nt, synthetic construct
  source 1..22: mol_type = other RNA
gttttggttttttggttttttg

SEQ ID NO: 9069 - RNA, 22 nt, synthetic construct
  source 1..22: mol_type = other RNA
gttttgttcttccaggttgatc

SEQ ID NO: 9070 - RNA, 22 nt, synthetic construct
  source 1..22: mol_type = other RNA
gtttttggaaatcagcccctgc

SEQ ID NO: 9071 - RNA, 22 nt, synthetic construct
  source 1..22: mol_type = other RNA
gttttttggagacagtctcgct

SEQ ID NO: 9072 - RNA, 22 nt, synthetic construct
  source 1..22: mol_type = other RNA
gttttttggttttttggagaca

SEQ ID NO: 9073 - RNA, 22 nt, synthetic construct
  source 1..22: mol_type = other RNA
taaaaagggaatactgcctttt

SEQ ID NO: 9074 - RNA, 22 nt, synthetic construct
  source 1..22: mol_type = other RNA
taaaaatacaaagactagctgg

SEQ ID NO: 9075 - RNA, 22 nt, synthetic construct
  source 1..22: mol_type = other RNA
taaaaccaagtaactggccagg

SEQ ID NO: 9076 - RNA, 22 nt, synthetic construct
  source 1..22: mol_type = other RNA
taaaagaatggaaattgcagtt

SEQ ID NO: 9077 - RNA, 22 nt, synthetic construct
  source 1..22: mol_type = other RNA
taaaagccaggacagtgaatga

SEQ ID NO: 9078 - RNA, 22 nt, synthetic construct
  source 1..22: mol_type = other RNA
taaaagtcctgtcaccaaggac

SEQ ID NO: 9079 - RNA, 22 nt, synthetic construct
  source 1..22: mol_type = other RNA
taaaatgcctttaacgtccttg

SEQ ID NO: 9080 - RNA, 22 nt, synthetic construct
  source 1..22: mol_type = other RNA
taaaatgttcacatgactttct

SEQ ID NO: 9081 - RNA, 22 nt, synthetic construct
  source 1..22: mol_type = other RNA
taaaggcattttattccagcgt

SEQ ID NO: 9082 - RNA, 22 nt, synthetic construct
  source 1..22: mol_type = other RNA
taaagtactactgtagaactgc

SEQ ID NO: 9083 - RNA, 22 nt, synthetic construct
  source 1..22: mol_type = other RNA
taaataaaagccaggacagtga

SEQ ID NO: 9084 - RNA, 22 nt, synthetic construct
  source 1..22: mol_type = other RNA
taaatacagtaaggaccttaat

SEQ ID NO: 9085 - RNA, 22 nt, synthetic construct
  source 1..22: mol_type = other RNA
taaatctgcatctgctccaggt

SEQ ID NO: 9086 - RNA, 22 nt, synthetic construct
  source 1..22: mol_type = other RNA
taaatgagctttcaggaagttg

SEQ ID NO: 9087 - RNA, 22 nt, synthetic construct
  source 1..22: mol_type = other RNA
taaatgggaaatgtcgattttc

SEQ ID NO: 9088 - RNA, 22 nt, synthetic construct
  source 1..22: mol_type = other RNA
taaatgggtgaaaaatggtaat

SEQ ID NO: 9089 - RNA, 22 nt, synthetic construct
  source 1..22: mol_type = other RNA
taaattaatcagaaaccccact

SEQ ID NO: 9090 - RNA, 22 nt, synthetic construct
  source 1..22: mol_type = other RNA
taaatttcctgttgctcctttc

SEQ ID NO: 9091 - RNA, 22 nt, synthetic construct
  source 1..22: mol_type = other RNA
taacagcagcatgtccagtact

SEQ ID NO: 9092 - RNA, 22 nt, synthetic construct
  source 1..22: mol_type = other RNA
taaccagcagaagacagaacag

SEQ ID NO: 9093 - RNA, 22 nt, synthetic construct
  source 1..22: mol_type = other RNA
taaccggaacgacagcctgcat

SEQ ID NO: 9094 - RNA, 22 nt, synthetic construct
  source 1..22: mol_type = other RNA
taacgtccttggtgacaggact

SEQ ID NO: 9095 - RNA, 22 nt, synthetic construct
  source 1..22: mol_type = other RNA
taactaagaccagcatctgcac

SEQ ID NO: 9096 - RNA, 22 nt, synthetic construct
  source 1..22: mol_type = other RNA
taactgaactgataacagcagc

SEQ ID NO: 9097 - RNA, 22 nt, synthetic construct
  source 1..22: mol_type = other RNA
taactggccaggtgcagtagct

SEQ ID NO: 9098 - RNA, 22 nt, synthetic construct
  source 1..22: mol_type = other RNA
taagaccagcatctgcactaat

SEQ ID NO: 9099 - RNA, 22 nt, synthetic construct
  source 1..22: mol_type = other RNA
taagcagtggcgccgagccttg

SEQ ID NO: 9100 - RNA, 22 nt, synthetic construct
  source 1..22: mol_type = other RNA
taagctctctagaagacgctgg

SEQ ID NO: 9101 - RNA, 22 nt, synthetic construct
  source 1..22: mol_type = other RNA
taagctttcagggctctcgttt

SEQ ID NO: 9102 - RNA, 22 nt, synthetic construct
  source 1..22: mol_type = other RNA
taaggaaataatctgagaaaag

SEQ ID NO: 9103 - RNA, 22 nt, synthetic construct
  source 1..22: mol_type = other RNA
taaggaccttaatgagccctgg

SEQ ID NO: 9104 - RNA, 22 nt, synthetic construct
  source 1..22: mol_type = other RNA
taaggagtgagtggcaagacaa

SEQ ID NO: 9105 - RNA, 22 nt, synthetic construct
  source 1..22: mol_type = other RNA
taaggggatcaaagaggcaatg

SEQ ID NO: 9106 - RNA, 22 nt, synthetic construct
  source 1..22: mol_type = other RNA
taaggtccttactgtatttata

SEQ ID NO: 9107 - RNA, 22 nt, synthetic construct
  source 1..22: mol_type = other RNA
taagtcaactcttcagcctcat

SEQ ID NO: 9108 - RNA, 22 nt, synthetic construct
  source 1..22: mol_type = other RNA
taataaatgggaaatgtcgatt

SEQ ID NO: 9109 - RNA, 22 nt, synthetic construct
  source 1..22: mol_type = other RNA
taatagacttatatgcaggctg

SEQ ID NO: 9110 - RNA, 22 nt, synthetic construct
  source 1..22: mol_type = other RNA
taataggcatcttcactcctcg

SEQ ID NO: 9111 - RNA, 22 nt, synthetic construct
  source 1..22: mol_type = other RNA
taatcagaaaccccacttccat

SEQ ID NO: 9112 - RNA, 22 nt, synthetic construct
  source 1..22: mol_type = other RNA
taatctgagaaaagagttttca

SEQ ID NO: 9113 - RNA, 22 nt, synthetic construct
  source 1..22: mol_type = other RNA
taatgagccctgggaaattagt

SEQ ID NO: 9114 - RNA, 22 nt, synthetic construct
  source 1..22: mol_type = other RNA
taatggccactgaagcacgtga

SEQ ID NO: 9115 - RNA, 22 nt, synthetic construct
  source 1..22: mol_type = other RNA
taatgggggaaaggagcaacag

SEQ ID NO: 9116 - RNA, 22 nt, synthetic construct
  source 1..22: mol_type = other RNA
taatgttgaaagttggcaacag

SEQ ID NO: 9117 - RNA, 22 nt, synthetic construct
  source 1..22: mol_type = other RNA
taattccacaggttcccacccc

SEQ ID NO: 9118 - RNA, 22 nt, synthetic construct
  source 1..22: mol_type = other RNA
taatttcccagggctcattaag

SEQ ID NO: 9119 - RNA, 22 nt, synthetic construct
  source 1..22: mol_type = other RNA
tacaaagactagctgggcgtgg

SEQ ID NO: 9120 - RNA, 22 nt, synthetic construct
  source 1..22: mol_type = other RNA
tacaaatacctggagcagatgc

SEQ ID NO: 9121 - RNA, 22 nt, synthetic construct
  source 1..22: mol_type = other RNA
tacaatggaagtggggtttctg

SEQ ID NO: 9122 - RNA, 22 nt, synthetic construct
  source 1..22: mol_type = other RNA
tacacaacataaccggaacgac

SEQ ID NO: 9123 - RNA, 22 nt, synthetic construct
  source 1..22: mol_type = other RNA
tacactaagctctctagaagac

SEQ ID NO: 9124 - RNA, 22 nt, synthetic construct
  source 1..22: mol_type = other RNA
tacagagggtgaaaactctttt

SEQ ID NO: 9125 - RNA, 22 nt, synthetic construct
  source 1..22: mol_type = other RNA
tacagctaggccagtctccagc

SEQ ID NO: 9126 - RNA, 22 nt, synthetic construct
  source 1..22: mol_type = other RNA
tacagtaaggaccttaatgagc

SEQ ID NO: 9127 - RNA, 22 nt, synthetic construct
  source 1..22: mol_type = other RNA
tacagtagtactttatatagtc

SEQ ID NO: 9128 - RNA, 22 nt, synthetic construct
  source 1..22: mol_type = other RNA
tacagtccaggaggtcaggatg

SEQ ID NO: 9129 - RNA, 22 nt, synthetic construct
  source 1..22: mol_type = other RNA
tacagttccctattccacccca

SEQ ID NO: 9130 - RNA, 22 nt, synthetic construct
  source 1..22: mol_type = other RNA
tacatcaaatatctgcaataga

SEQ ID NO: 9131 - RNA, 22 nt, synthetic construct
  source 1..22: mol_type = other RNA
taccatttttcacccatttaaa

SEQ ID NO: 9132 - RNA, 22 nt, synthetic construct
  source 1..22: mol_type = other RNA
tacctggaaaaaggaacactaa

SEQ ID NO: 9133 - RNA, 22 nt, synthetic construct
  source 1..22: mol_type = other RNA
tacctggagcagatgcagattt

SEQ ID NO: 9134 - RNA, 22 nt, synthetic construct
  source 1..22: mol_type = other RNA
tacctgggccagccaaggcaag

SEQ ID NO: 9135 - RNA, 22 nt, synthetic construct
  source 1..22: mol_type = other RNA
tacctgtgtgtctccataaaag

SEQ ID NO: 9136 - RNA, 22 nt, synthetic construct
  source 1..22: mol_type = other RNA
tactacctgggccagccaaggc

SEQ ID NO: 9137 - RNA, 22 nt, synthetic construct
  source 1..22: mol_type = other RNA
tactactgtagaactgcaattt

SEQ ID NO: 9138 - RNA, 22 nt, synthetic construct
  source 1..22: mol_type = other RNA
tactcactggattcctaggtcg

SEQ ID NO: 9139 - RNA, 22 nt, synthetic construct
  source 1..22: mol_type = other RNA
tactcgaggagtgaagatgcct

SEQ ID NO: 9140 - RNA, 22 nt, synthetic construct
  source 1..22: mol_type = other RNA
tactgaacttgtcttgccactc

SEQ ID NO: 9141 - RNA, 22 nt, synthetic construct
  source 1..22: mol_type = other RNA
tactgcacctggccagttactt

SEQ ID NO: 9142 - RNA, 22 nt, synthetic construct
  source 1..22: mol_type = other RNA
tactgctgactggcttgccttg

SEQ ID NO: 9143 - RNA, 22 nt, synthetic construct
  source 1..22: mol_type = other RNA
tactggacatgctgctgttatc

SEQ ID NO: 9144 - RNA, 22 nt, synthetic construct
  source 1..22: mol_type = other RNA
tactgtagaactgcaatttcca

SEQ ID NO: 9145 - RNA, 22 nt, synthetic construct
  source 1..22: mol_type = other RNA
tactgtatttatatttggggat

SEQ ID NO: 9146 - RNA, 22 nt, synthetic construct
  source 1..22: mol_type = other RNA
tacttggttttatctcctgctg

SEQ ID NO: 9147 - RNA, 22 nt, synthetic construct
  source 1..22: mol_type = other RNA
tactttatatagtcctacagtc

SEQ ID NO: 9148 - RNA, 22 nt, synthetic construct
  source 1..22: mol_type = other RNA
tagaaagtgctgaagcagactg

SEQ ID NO: 9149 - RNA, 22 nt, synthetic construct
  source 1..22: mol_type = other RNA
tagaactgcaatttccattctt

SEQ ID NO: 9150 - RNA, 22 nt, synthetic construct
  source 1..22: mol_type = other RNA
tagaagacgctggaataaaatg

SEQ ID NO: 9151 - RNA, 22 nt, synthetic construct
  source 1..22: mol_type = other RNA
tagaatttcagaactgaaaaag

SEQ ID NO: 9152 - RNA, 22 nt, synthetic construct
  source 1..22: mol_type = other RNA
tagacttatatgcaggctgtcg

SEQ ID NO: 9153 - RNA, 22 nt, synthetic construct
  source 1..22: mol_type = other RNA
tagagagcttagtgtatacaga

SEQ ID NO: 9154 - RNA, 22 nt, synthetic construct
  source 1..22: mol_type = other RNA
tagagataggatttccccatat

SEQ ID NO: 9155 - RNA, 22 nt, synthetic construct
  source 1..22: mol_type = other RNA
tagcaagcagacggtgggacca

SEQ ID NO: 9156 - RNA, 22 nt, synthetic construct
  source 1..22: mol_type = other RNA
tagcaccgtggtgacaagcaag

SEQ ID NO: 9157 - RNA, 22 nt, synthetic construct
  source 1..22: mol_type = other RNA
tagcataaaatgttcacatgac

SEQ ID NO: 9158 - RNA, 22 nt, synthetic construct
  source 1..22: mol_type = other RNA
tagccaaggcccaaactaatgt

SEQ ID NO: 9159 - RNA, 22 nt, synthetic construct
  source 1..22: mol_type = other RNA
tagccatggttctgcatcttgt

SEQ ID NO: 9160 - RNA, 22 nt, synthetic construct
  source 1..22: mol_type = other RNA
tagccctcacggaagatgacag

SEQ ID NO: 9161 - RNA, 22 nt, synthetic construct
  source 1..22: mol_type = other RNA
tagcctactgctgactggcttg

SEQ ID NO: 9162 - RNA, 22 nt, synthetic construct
  source 1..22: mol_type = other RNA
tagctgtagaatttcagaactg

SEQ ID NO: 9163 - RNA, 22 nt, synthetic construct
  source 1..22: mol_type = other RNA
taggaaatccagttgactgtca

SEQ ID NO: 9164 - RNA, 22 nt, synthetic construct
  source 1..22: mol_type = other RNA
taggaatccagtgagtaactga

SEQ ID NO: 9165 - RNA, 22 nt, synthetic construct
  source 1..22: mol_type = other RNA
taggactatataaagtactact

SEQ ID NO: 9166 - RNA, 22 nt, synthetic construct
  source 1..22: mol_type = other RNA
taggatttccccatattgacca

SEQ ID NO: 9167 - RNA, 22 nt, synthetic construct
  source 1..22: mol_type = other RNA
taggcatcttcactcctcgagt

SEQ ID NO: 9168 - RNA, 22 nt, synthetic construct
  source 1..22: mol_type = other RNA
taggccagtctccagcaggaga

SEQ ID NO: 9169 - RNA, 22 nt, synthetic construct
  source 1..22: mol_type = other RNA
taggctagcaagcagacggtgg

SEQ ID NO: 9170 - RNA, 22 nt, synthetic construct
  source 1..22: mol_type = other RNA
tagggaactgtaatggccactg

SEQ ID NO: 9171 - RNA, 22 nt, synthetic construct
  source 1..22: mol_type = other RNA
taggtcgtgtttttggaaatca

SEQ ID NO: 9172 - RNA, 22 nt, synthetic construct
  source 1..22: mol_type = other RNA
taggtggcagggagcgcggcag

SEQ ID NO: 9173 - RNA, 22 nt, synthetic construct
  source 1..22: mol_type = other RNA
taggtgggaggctgaggcacaa

SEQ ID NO: 9174 - RNA, 22 nt, synthetic construct
  source 1..22: mol_type = other RNA
taggtggggttctcatagccat

SEQ ID NO: 9175 - RNA, 22 nt, synthetic construct
  source 1..22: mol_type = other RNA
tagtaagcagtggcgccgagcc

SEQ ID NO: 9176 - RNA, 22 nt, synthetic construct
  source 1..22: mol_type = other RNA
tagtactttatatagtcctaca

SEQ ID NO: 9177 - RNA, 22 nt, synthetic construct
  source 1..22: mol_type = other RNA
tagtcctacagtccaggaggtc

SEQ ID NO: 9178 - RNA, 22 nt, synthetic construct
  source 1..22: mol_type = other RNA
tagtctcagctaggtgggaggc

SEQ ID NO: 9179 - RNA, 22 nt, synthetic construct
  source 1..22: mol_type = other RNA
tagtgaacagtgggaatgtcca

SEQ ID NO: 9180 - RNA, 22 nt, synthetic construct
  source 1..22: mol_type = other RNA
tagtgcagatgctggtcttagt

SEQ ID NO: 9181 - RNA, 22 nt, synthetic construct
  source 1..22: mol_type = other RNA
tagtgttcctttttccaggtat

SEQ ID NO: 9182 - RNA, 22 nt, synthetic construct
  source 1..22: mol_type = other RNA
tagtttgggccttggctatgaa

SEQ ID NO: 9183 - RNA, 22 nt, synthetic construct
  source 1..22: mol_type = other RNA
tataaagtactactgtagaact

SEQ ID NO: 9184 - RNA, 22 nt, synthetic construct
  source 1..22: mol_type = other RNA
tataaatacagtaaggacctta

SEQ ID NO: 9185 - RNA, 22 nt, synthetic construct
  source 1..22: mol_type = other RNA
tataataaatgggaaatgtcga

SEQ ID NO: 9186 - RNA, 22 nt, synthetic construct
  source 1..22: mol_type = other RNA
tatacactaagctctctagaag

SEQ ID NO: 9187 - RNA, 22 nt, synthetic construct
  source 1..22: mol_type = other RNA
tatagtcctacagtccaggagg

SEQ ID NO: 9188 - RNA, 22 nt, synthetic construct
  source 1..22: mol_type = other RNA
tatatagtcctacagtccagga

SEQ ID NO: 9189 - RNA, 22 nt, synthetic construct
  source 1..22: mol_type = other RNA
tatatattgagagcatgtgtca

SEQ ID NO: 9190 - RNA, 22 nt, synthetic construct
  source 1..22: mol_type = other RNA
tatatgcaggctgtcgttccgg

SEQ ID NO: 9191 - RNA, 22 nt, synthetic construct
  source 1..22: mol_type = other RNA
tatattaccatttttcacccat

SEQ ID NO: 9192 - RNA, 22 nt, synthetic construct
  source 1..22: mol_type = other RNA
tatattgagagcatgtgtcaga

SEQ ID NO: 9193 - RNA, 22 nt, synthetic construct
  source 1..22: mol_type = other RNA
tatatttggggatcaagggact

SEQ ID NO: 9194 - RNA, 22 nt, synthetic construct
  source 1..22: mol_type = other RNA
tatcagttcagttactcactgg

SEQ ID NO: 9195 - RNA, 22 nt, synthetic construct
  source 1..22: mol_type = other RNA
tatccagccgtggaaacactgg

SEQ ID NO: 9196 - RNA, 22 nt, synthetic construct
  source 1..22: mol_type = other RNA
tatctcctgctggagactggcc

SEQ ID NO: 9197 - RNA, 22 nt, synthetic construct
  source 1..22: mol_type = other RNA
tatgaatgtcagaaagtcatgt

SEQ ID NO: 9198 - RNA, 22 nt, synthetic construct
  source 1..22: mol_type = other RNA
tatgagaaccccacctacaaat

SEQ ID NO: 9199 - RNA, 22 nt, synthetic construct
  source 1..22: mol_type = other RNA
tatgcaggctgtcgttccggtt

SEQ ID NO: 9200 - RNA, 22 nt, synthetic construct
  source 1..22: mol_type = other RNA
tatgctacagagggtgaaaact

SEQ ID NO: 9201 - RNA, 22 nt, synthetic construct
  source 1..22: mol_type = other RNA
tatggagacacacaggtatcca

SEQ ID NO: 9202 - RNA, 22 nt, synthetic construct
  source 1..22: mol_type = other RNA
tatggggaaatcctatctctaa

SEQ ID NO: 9203 - RNA, 22 nt, synthetic construct
  source 1..22: mol_type = other RNA
tatgttgtgtaagtcaactctt

SEQ ID NO: 9204 - RNA, 22 nt, synthetic construct
  source 1..22: mol_type = other RNA
tattaattccacaggttcccac

SEQ ID NO: 9205 - RNA, 22 nt, synthetic construct
  source 1..22: mol_type = other RNA
tattaccatttttcacccattt

SEQ ID NO: 9206 - RNA, 22 nt, synthetic construct
  source 1..22: mol_type = other RNA
tattagagataggatttcccca

SEQ ID NO: 9207 - RNA, 22 nt, synthetic construct
  source 1..22: mol_type = other RNA
tattatatattgagagcatgtg

SEQ ID NO: 9208 - RNA, 22 nt, synthetic construct
  source 1..22: mol_type = other RNA
tattccaccccatttctcagca

SEQ ID NO: 9209 - RNA, 22 nt, synthetic construct
  source 1..22: mol_type = other RNA
tattccagcgtcttctagagag

SEQ ID NO: 9210 - RNA, 22 nt, synthetic construct
  source 1..22: mol_type = other RNA
tattccctttttaaatgagctt

SEQ ID NO: 9211 - RNA, 22 nt, synthetic construct
  source 1..22: mol_type = other RNA
tattgaaaatcgacatttccca

SEQ ID NO: 9212 - RNA, 22 nt, synthetic construct
  source 1..22: mol_type = other RNA
tattgaccagggtgatctcaaa

SEQ ID NO: 9213 - RNA, 22 nt, synthetic construct
  source 1..22: mol_type = other RNA
tattgagagcatgtgtcagaca

SEQ ID NO: 9214 - RNA, 22 nt, synthetic construct
  source 1..22: mol_type = other RNA
tattgcagatatttgatgtagt

SEQ ID NO: 9215 - RNA, 22 nt, synthetic construct
  source 1..22: mol_type = other RNA
tattgtctgacacatgctctca

SEQ ID NO: 9216 - RNA, 22 nt, synthetic construct
  source 1..22: mol_type = other RNA
tatttatatttggggatcaagg

SEQ ID NO: 9217 - RNA, 22 nt, synthetic construct
  source 1..22: mol_type = other RNA
tatttccttagtgttccttttt

SEQ ID NO: 9218 - RNA, 22 nt, synthetic construct
  source 1..22: mol_type = other RNA
tatttggggatcaagggactct

SEQ ID NO: 9219 - RNA, 22 nt, synthetic construct
  source 1..22: mol_type = other RNA
tatttgtaggtggggttctcat

SEQ ID NO: 9220 - RNA, 22 nt, synthetic construct
  source 1..22: mol_type = other RNA
tattttctttctcctgtgtttc

SEQ ID NO: 9221 - RNA, 22 nt, synthetic construct
  source 1..22: mol_type = other RNA
tcaaagaggcaatgctttcgaa

SEQ ID NO: 9222 - RNA, 22 nt, synthetic construct
  source 1..22: mol_type = other RNA
tcaaatatctgcaatagatcat

SEQ ID NO: 9223 - RNA, 22 nt, synthetic construct
  source 1..22: mol_type = other RNA
tcaacattagtttgggccttgg

SEQ ID NO: 9224 - RNA, 22 nt, synthetic construct
  source 1..22: mol_type = other RNA
tcaacctggaagaacaaaacct

SEQ ID NO: 9225 - RNA, 22 nt, synthetic construct
  source 1..22: mol_type = other RNA
tcaactcttcagcctcattcac

SEQ ID NO: 9226 - RNA, 22 nt, synthetic construct
  source 1..22: mol_type = other RNA
tcaactggatttcctagcaccg

SEQ ID NO: 9227 - RNA, 22 nt, synthetic construct
  source 1..22: mol_type = other RNA
tcaagaaactggtcctttcaca

SEQ ID NO: 9228 - RNA, 22 nt, synthetic construct
  source 1..22: mol_type = other RNA
tcaagggactctggacattccc

SEQ ID NO: 9229 - RNA, 22 nt, synthetic construct
  source 1..22: mol_type = other RNA
tcaataatagacttatatgcag

SEQ ID NO: 9230 - RNA, 22 nt, synthetic construct
  source 1..22: mol_type = other RNA
tcaatatggggaaatcctatct

SEQ ID NO: 9231 - RNA, 22 nt, synthetic construct
  source 1..22: mol_type = other RNA
tcacatcattttgcgagggtct

SEQ ID NO: 9232 - RNA, 22 nt, synthetic construct
  source 1..22: mol_type = other RNA
tcacatgactttctgacattca

SEQ ID NO: 9233 - RNA, 22 nt, synthetic construct
  source 1..22: mol_type = other RNA
tcaccaaggacgttaaaggcat

SEQ ID NO: 9234 - RNA, 22 nt, synthetic construct
  source 1..22: mol_type = other RNA
tcaccaccggttctcatttggc

SEQ ID NO: 9235 - RNA, 22 nt, synthetic construct
  source 1..22: mol_type = other RNA
tcaccacggtgctaggaaatcc

SEQ ID NO: 9236 - RNA, 22 nt, synthetic construct
  source 1..22: mol_type = other RNA
tcacccatttaaaagaatggaa

SEQ ID NO: 9237 - RNA, 22 nt, synthetic construct
  source 1..22: mol_type = other RNA
tcaccccagaagagcgtcacct

SEQ ID NO: 9238 - RNA, 22 nt, synthetic construct
  source 1..22: mol_type = other RNA
tcaccctctgtagcataaaatg

SEQ ID NO: 9239 - RNA, 22 nt, synthetic construct
  source 1..22: mol_type = other RNA
tcaccctggtcaatatggggaa

SEQ ID NO: 9240 - RNA, 22 nt, synthetic construct
  source 1..22: mol_type = other RNA
tcacctgaacaagatgcagaac

SEQ ID NO: 9241 - RNA, 22 nt, synthetic construct
  source 1..22: mol_type = other RNA
tcacggaagatgacagtcaact

SEQ ID NO: 9242 - RNA, 22 nt, synthetic construct
  source 1..22: mol_type = other RNA
tcacgtgcttcagtggccatta

SEQ ID NO: 9243 - RNA, 22 nt, synthetic construct
  source 1..22: mol_type = other RNA
tcactaaggagtgagtggcaag

SEQ ID NO: 9244 - RNA, 22 nt, synthetic construct
  source 1..22: mol_type = other RNA
tcactcctcgagtactggacat

SEQ ID NO: 9245 - RNA, 22 nt, synthetic construct
  source 1..22: mol_type = other RNA
tcactccttagtgaacagtggg

SEQ ID NO: 9246 - RNA, 22 nt, synthetic construct
  source 1..22: mol_type = other RNA
tcactggattcctaggtcgtgt

SEQ ID NO: 9247 - RNA, 22 nt, synthetic construct
  source 1..22: mol_type = other RNA
tcactgtcctggcttttattta

SEQ ID NO: 9248 - RNA, 22 nt, synthetic construct
  source 1..22: mol_type = other RNA
tcagaaaccccacttccattgt

SEQ ID NO: 9249 - RNA, 22 nt, synthetic construct
  source 1..22: mol_type = other RNA
tcagaaagtcatgtgaacattt

SEQ ID NO: 9250 - RNA, 22 nt, synthetic construct
  source 1..22: mol_type = other RNA
tcagaactgaaaaagaccagag

SEQ ID NO: 9251 - RNA, 22 nt, synthetic construct
  source 1..22: mol_type = other RNA
tcagacaatacaatggaagtgg

SEQ ID NO: 9252 - RNA, 22 nt, synthetic construct
  source 1..22: mol_type = other RNA
tcagacgcagcccctggcagcg

SEQ ID NO: 9253 - RNA, 22 nt, synthetic construct
  source 1..22: mol_type = other RNA
tcagattatttccttagtgttc

SEQ ID NO: 9254 - RNA, 22 nt, synthetic construct
  source 1..22: mol_type = other RNA
tcagcaacttcctgaaagctca

SEQ ID NO: 9255 - RNA, 22 nt, synthetic construct
  source 1..22: mol_type = other RNA
tcagcactttctaaatttcctg

SEQ ID NO: 9256 - RNA, 22 nt, synthetic construct
  source 1..22: mol_type = other RNA
tcagcagtaggctagcaagcag

SEQ ID NO: 9257 - RNA, 22 nt, synthetic construct
  source 1..22: mol_type = other RNA
tcagcccctgccacaaggggct

SEQ ID NO: 9258 - RNA, 22 nt, synthetic construct
  source 1..22: mol_type = other RNA
tcagcctcattcactgtcctgg

SEQ ID NO: 9259 - RNA, 22 nt, synthetic construct
  source 1..22: mol_type = other RNA
tcagcctcccacctagctgaga

SEQ ID NO: 9260 - RNA, 22 nt, synthetic construct
  source 1..22: mol_type = other RNA
tcagcgcactgcaacctctgtc

SEQ ID NO: 9261 - RNA, 22 nt, synthetic construct
  source 1..22: mol_type = other RNA
tcagctaggtgggaggctgagg

SEQ ID NO: 9262 - RNA, 22 nt, synthetic construct
  source 1..22: mol_type = other RNA
tcaggaagttgctgagaaatgg

SEQ ID NO: 9263 - RNA, 22 nt, synthetic construct
  source 1..22: mol_type = other RNA
tcaggatgtcagacgcagcccc

SEQ ID NO: 9264 - RNA, 22 nt, synthetic construct
  source 1..22: mol_type = other RNA
tcaggatttgagatcaccctgg

SEQ ID NO: 9265 - RNA, 22 nt, synthetic construct
  source 1..22: mol_type = other RNA
tcagggctctcgtttcgaaagc

SEQ ID NO: 9266 - RNA, 22 nt, synthetic construct
  source 1..22: mol_type = other RNA
tcaggggattgtgcagcaaatg

SEQ ID NO: 9267 - RNA, 22 nt, synthetic construct
  source 1..22: mol_type = other RNA
tcaggtctcccagcaccctgtg

SEQ ID NO: 9268 - RNA, 22 nt, synthetic construct
  source 1..22: mol_type = other RNA
tcaggtgacgctcttctggggt

SEQ ID NO: 9269 - RNA, 22 nt, synthetic construct
  source 1..22: mol_type = other RNA
tcaggttttgttcttccaggtt

SEQ ID NO: 9270 - RNA, 22 nt, synthetic construct
  source 1..22: mol_type = other RNA
tcagtaaccagcagaagacaga

SEQ ID NO: 9271 - RNA, 22 nt, synthetic construct
  source 1..22: mol_type = other RNA
tcagtggccattacagttccct

SEQ ID NO: 9272 - RNA, 22 nt, synthetic construct
  source 1..22: mol_type = other RNA
tcagttactcactggattccta

SEQ ID NO: 9273 - RNA, 22 nt, synthetic construct
  source 1..22: mol_type = other RNA
tcagttcagttactcactggat

SEQ ID NO: 9274 - RNA, 22 nt, synthetic construct
  source 1..22: mol_type = other RNA
tcagttctgaaattctacagct

SEQ ID NO: 9275 - RNA, 22 nt, synthetic construct
  source 1..22: mol_type = other RNA
tcatagccaaggcccaaactaa

SEQ ID NO: 9276 - RNA, 22 nt, synthetic construct
  source 1..22: mol_type = other RNA
tcatagccatggttctgcatct

SEQ ID NO: 9277 - RNA, 22 nt, synthetic construct
  source 1..22: mol_type = other RNA
tcatctgtatacactaagctct

SEQ ID NO: 9278 - RNA, 22 nt, synthetic construct
  source 1..22: mol_type = other RNA
tcatcttccgtgagggctaagc

SEQ ID NO: 9279 - RNA, 22 nt, synthetic construct
  source 1..22: mol_type = other RNA
tcatgtgaacattttatgctac

SEQ ID NO: 9280 - RNA, 22 nt, synthetic construct
  source 1..22: mol_type = other RNA
tcattaaggtccttactgtatt

SEQ ID NO: 9281 - RNA, 22 nt, synthetic construct
  source 1..22: mol_type = other RNA
tcattcactgtcctggctttta

SEQ ID NO: 9282 - RNA, 22 nt, synthetic construct
  source 1..22: mol_type = other RNA
tcattgtggtgtctgggaagag

SEQ ID NO: 9283 - RNA, 22 nt, synthetic construct
  source 1..22: mol_type = other RNA
tcatttaaaaagggaatactgc

SEQ ID NO: 9284 - RNA, 22 nt, synthetic construct
  source 1..22: mol_type = other RNA
tcatttggcctgtccggtggga

SEQ ID NO: 9285 - RNA, 22 nt, synthetic construct
  source 1..22: mol_type = other RNA
tcattttgcgagggtctctcac

SEQ ID NO: 9286 - RNA, 22 nt, synthetic construct
  source 1..22: mol_type = other RNA
tccaaaaaaccaaaaaaccaaa

SEQ ID NO: 9287 - RNA, 22 nt, synthetic construct
  source 1..22: mol_type = other RNA
tccaaaaacacgacctaggaat

SEQ ID NO: 9288 - RNA, 22 nt, synthetic construct
  source 1..22: mol_type = other RNA
tccaatgctcaccccagaagag

SEQ ID NO: 9289 - RNA, 22 nt, synthetic construct
  source 1..22: mol_type = other RNA
tccacaggttcccacccccaac

SEQ ID NO: 9290 - RNA, 22 nt, synthetic construct
  source 1..22: mol_type = other RNA
tccaccccatttctcagcaact

SEQ ID NO: 9291 - RNA, 22 nt, synthetic construct
  source 1..22: mol_type = other RNA
tccacggctggatacctgtgtg

SEQ ID NO: 9292 - RNA, 22 nt, synthetic construct
  source 1..22: mol_type = other RNA
tccagagtcccttgatccccaa

SEQ ID NO: 9293 - RNA, 22 nt, synthetic construct
  source 1..22: mol_type = other RNA
tccagcaggagataaaaccaag

SEQ ID NO: 9294 - RNA, 22 nt, synthetic construct
  source 1..22: mol_type = other RNA
tccagccgtggaaacactggac

SEQ ID NO: 9295 - RNA, 22 nt, synthetic construct
  source 1..22: mol_type = other RNA
tccagcgtcttctagagagctt

SEQ ID NO: 9296 - RNA, 22 nt, synthetic construct
  source 1..22: mol_type = other RNA
tccaggaggtcaggatgtcaga

SEQ ID NO: 9297 - RNA, 22 nt, synthetic construct
  source 1..22: mol_type = other RNA
tccaggtatttgtaggtggggt

SEQ ID NO: 9298 - RNA, 22 nt, synthetic construct
  source 1..22: mol_type = other RNA
tccaggttgatccaatgctcac

SEQ ID NO: 9299 - RNA, 22 nt, synthetic construct
  source 1..22: mol_type = other RNA
tccagtactcgaggagtgaaga

SEQ ID NO: 9300 - RNA, 22 nt, synthetic construct
  source 1..22: mol_type = other RNA
tccagtgagtaactgaactgat

SEQ ID NO: 9301 - RNA, 22 nt, synthetic construct
  source 1..22: mol_type = other RNA
tccagtgtttccacggctggat

SEQ ID NO: 9302 - RNA, 22 nt, synthetic construct
  source 1..22: mol_type = other RNA
tccagttgactgtcatcttccg

SEQ ID NO: 9303 - RNA, 22 nt, synthetic construct
  source 1..22: mol_type = other RNA
tccataaaagtcctgtcaccaa

SEQ ID NO: 9304 - RNA, 22 nt, synthetic construct
  source 1..22: mol_type = other RNA
tccattcttttaaatgggtgaa

SEQ ID NO: 9305 - RNA, 22 nt, synthetic construct
  source 1..22: mol_type = other RNA
tccattgtattgtctgacacat

SEQ ID NO: 9306 - RNA, 22 nt, synthetic construct
  source 1..22: mol_type = other RNA
tcccaccggacaggccaaatga

SEQ ID NO: 9307 - RNA, 22 nt, synthetic construct
  source 1..22: mol_type = other RNA
tcccaccgtctgcttgctagcc

SEQ ID NO: 9308 - RNA, 22 nt, synthetic construct
  source 1..22: mol_type = other RNA
tcccacctagctgagactacag

SEQ ID NO: 9309 - RNA, 22 nt, synthetic construct
  source 1..22: mol_type = other RNA
tcccacgattccgatcgactgc

SEQ ID NO: 9310 - RNA, 22 nt, synthetic construct
  source 1..22: mol_type = other RNA
tcccactgttcactaaggagtg

SEQ ID NO: 9311 - RNA, 22 nt, synthetic construct
  source 1..22: mol_type = other RNA
tcccagacaccacaatgaccct

SEQ ID NO: 9312 - RNA, 22 nt, synthetic construct
  source 1..22: mol_type = other RNA
tcccagcaccctgtgcaggtct

SEQ ID NO: 9313 - RNA, 22 nt, synthetic construct
  source 1..22: mol_type = other RNA
tcccagggctcattaaggtcct

SEQ ID NO: 9314 - RNA, 22 nt, synthetic construct
  source 1..22: mol_type = other RNA
tccccaaatataaatacagtaa

SEQ ID NO: 9315 - RNA, 22 nt, synthetic construct
  source 1..22: mol_type = other RNA
tccccatattgaccagggtgat

SEQ ID NO: 9316 - RNA, 22 nt, synthetic construct
  source 1..22: mol_type = other RNA
tcccctgaggaccaaatgcagc

SEQ ID NO: 9317 - RNA, 22 nt, synthetic construct
  source 1..22: mol_type = other RNA
tcccctggtcccaccgtctgct

SEQ ID NO: 9318 - RNA, 22 nt, synthetic construct
  source 1..22: mol_type = other RNA
tccccttattttctttctcctg

SEQ ID NO: 9319 - RNA, 22 nt, synthetic construct
  source 1..22: mol_type = other RNA
tccctattccaccccatttctc

SEQ ID NO: 9320 - RNA, 22 nt, synthetic construct
  source 1..22: mol_type = other RNA
tccctgccacctaaatctgcat

SEQ ID NO: 9321 - RNA, 22 nt, synthetic construct
  source 1..22: mol_type = other RNA
tcccttgatccccaaatataaa

SEQ ID NO: 9322 - RNA, 22 nt, synthetic construct
  source 1..22: mol_type = other RNA
tccctttttaaatgagctttca

SEQ ID NO: 9323 - RNA, 22 nt, synthetic construct
  source 1..22: mol_type = other RNA
tccgatcgactgccaagcagca

SEQ ID NO: 9324 - RNA, 22 nt, synthetic construct
  source 1..22: mol_type = other RNA
tccggcccacctgcatccctcc

SEQ ID NO: 9325 - RNA, 22 nt, synthetic construct
  source 1..22: mol_type = other RNA
tccggtgggaacgggctgctgg

SEQ ID NO: 9326 - RNA, 22 nt, synthetic construct
  source 1..22: mol_type = other RNA
tccggttatgttgtgtaagtca

SEQ ID NO: 9327 - RNA, 22 nt, synthetic construct
  source 1..22: mol_type = other RNA
tccgtgagggctaagctttcag

SEQ ID NO: 9328 - RNA, 22 nt, synthetic construct
  source 1..22: mol_type = other RNA
tcctacagtccaggaggtcagg

SEQ ID NO: 9329 - RNA, 22 nt, synthetic construct
  source 1..22: mol_type = other RNA
tcctagcaccgtggtgacaagc

SEQ ID NO: 9330 - RNA, 22 nt, synthetic construct
  source 1..22: mol_type = other RNA
tcctaggtcgtgtttttggaaa

SEQ ID NO: 9331 - RNA, 22 nt, synthetic construct
  source 1..22: mol_type = other RNA
tcctcaggggattgtgcagcaa

SEQ ID NO: 9332 - RNA, 22 nt, synthetic construct
  source 1..22: mol_type = other RNA
tcctcgagtactggacatgctg

SEQ ID NO: 9333 - RNA, 22 nt, synthetic construct
  source 1..22: mol_type = other RNA
tcctgaaagctcatttaaaaag

SEQ ID NO: 9334 - RNA, 22 nt, synthetic construct
  source 1..22: mol_type = other RNA
tcctgacctcctggactgtagg

SEQ ID NO: 9335 - RNA, 22 nt, synthetic construct
  source 1..22: mol_type = other RNA
tcctgctggagactggcctagc

SEQ ID NO: 9336 - RNA, 22 nt, synthetic construct
  source 1..22: mol_type = other RNA
tcctggactgtaggactatata

SEQ ID NO: 9337 - RNA, 22 nt, synthetic construct
  source 1..22: mol_type = other RNA
tcctggcttttatttaaagaaa

SEQ ID NO: 9338 - RNA, 22 nt, synthetic construct
  source 1..22: mol_type = other RNA
tcctgtcaccaaggacgttaaa

SEQ ID NO: 9339 - RNA, 22 nt, synthetic construct
  source 1..22: mol_type = other RNA
tcctgtgtttcaccaccggttc

SEQ ID NO: 9340 - RNA, 22 nt, synthetic construct
  source 1..22: mol_type = other RNA
tcctgttgctcctttcccccat

SEQ ID NO: 9341 - RNA, 22 nt, synthetic construct
  source 1..22: mol_type = other RNA
tccttactgtatttatatttgg

SEQ ID NO: 9342 - RNA, 22 nt, synthetic construct
  source 1..22: mol_type = other RNA
tccttagtgaacagtgggaatg

SEQ ID NO: 9343 - RNA, 22 nt, synthetic construct
  source 1..22: mol_type = other RNA
tccttagtgttcctttttccag

SEQ ID NO: 9344 - RNA, 22 nt, synthetic construct
  source 1..22: mol_type = other RNA
tccttggtgacaggacttttat

SEQ ID NO: 9345 - RNA, 22 nt, synthetic construct
  source 1..22: mol_type = other RNA
tcctttcacatcattttgcgag

SEQ ID NO: 9346 - RNA, 22 nt, synthetic construct
  source 1..22: mol_type = other RNA
tcgaaacgagagccctgaaagc

SEQ ID NO: 9347 - RNA, 22 nt, synthetic construct
  source 1..22: mol_type = other RNA
tcgaaagcattgcctctttgat

SEQ ID NO: 9348 - RNA, 22 nt, synthetic construct
  source 1..22: mol_type = other RNA
tcgacatttcccatttattata

SEQ ID NO: 9349 - RNA, 22 nt, synthetic construct
  source 1..22: mol_type = other RNA
tcgactgccaagcagcagccgc

SEQ ID NO: 9350 - RNA, 22 nt, synthetic construct
  source 1..22: mol_type = other RNA
tcgaggagtgaagatgcctatt

SEQ ID NO: 9351 - RNA, 22 nt, synthetic construct
  source 1..22: mol_type = other RNA
tcgagtactggacatgctgctg

SEQ ID NO: 9352 - RNA, 22 nt, synthetic construct
  source 1..22: mol_type = other RNA
tcgatcggaatcgtgggatctt

SEQ ID NO: 9353 - RNA, 22 nt, synthetic construct
  source 1..22: mol_type = other RNA
tcgcaaaatgatgtgaaaggac

SEQ ID NO: 9354 - RNA, 22 nt, synthetic construct
  source 1..22: mol_type = other RNA
tcggaatcgtgggatcttccgg

SEQ ID NO: 9355 - RNA, 22 nt, synthetic construct
  source 1..22: mol_type = other RNA
tcggcgccactgcttactacct

SEQ ID NO: 9356 - RNA, 22 nt, synthetic construct
  source 1..22: mol_type = other RNA
tcgtgggatcttccggcccacc

SEQ ID NO: 9357 - RNA, 22 nt, synthetic construct
  source 1..22: mol_type = other RNA
tcgtgtttttggaaatcagccc

SEQ ID NO: 9358 - RNA, 22 nt, synthetic construct
  source 1..22: mol_type = other RNA
tcgttccggttatgttgtgtaa

SEQ ID NO: 9359 - RNA, 22 nt, synthetic construct
  source 1..22: mol_type = other RNA
tcgtttcgaaagcattgcctct

SEQ ID NO: 9360 - RNA, 22 nt, synthetic construct
  source 1..22: mol_type = other RNA
tctaaatttcctgttgctcctt

SEQ ID NO: 9361 - RNA, 22 nt, synthetic construct
  source 1..22: mol_type = other RNA
tctacagctaggccagtctcca

SEQ ID NO: 9362 - RNA, 22 nt, synthetic construct
  source 1..22: mol_type = other RNA
tctacagtagtactttatatag

SEQ ID NO: 9363 - RNA, 22 nt, synthetic construct
  source 1..22: mol_type = other RNA
tctagaagacgctggaataaaa

SEQ ID NO: 9364 - RNA, 22 nt, synthetic construct
  source 1..22: mol_type = other RNA
tctagagagcttagtgtataca

SEQ ID NO: 9365 - RNA, 22 nt, synthetic construct
  source 1..22: mol_type = other RNA
tctattgcagatatttgatgta

SEQ ID NO: 9366 - RNA, 22 nt, synthetic construct
  source 1..22: mol_type = other RNA
tctcacgtgcttcagtggccat

SEQ ID NO: 9367 - RNA, 22 nt, synthetic construct
  source 1..22: mol_type = other RNA
tctcagattatttccttagtgt

SEQ ID NO: 9368 - RNA, 22 nt, synthetic construct
  source 1..22: mol_type = other RNA
tctcagcaacttcctgaaagct

SEQ ID NO: 9369 - RNA, 22 nt, synthetic construct
  source 1..22: mol_type = other RNA
tctcagcgcactgcaacctctg

SEQ ID NO: 9370 - RNA, 22 nt, synthetic construct
  source 1..22: mol_type = other RNA
tctcagctaggtgggaggctga

SEQ ID NO: 9371 - RNA, 22 nt, synthetic construct
  source 1..22: mol_type = other RNA
tctcatagccatggttctgcat

SEQ ID NO: 9372 - RNA, 22 nt, synthetic construct
  source 1..22: mol_type = other RNA
tctcatttggcctgtccggtgg

SEQ ID NO: 9373 - RNA, 22 nt, synthetic construct
  source 1..22: mol_type = other RNA
tctccaaaaaaccaaaaaacca

SEQ ID NO: 9374 - RNA, 22 nt, synthetic construct
  source 1..22: mol_type = other RNA
tctccagcaggagataaaacca

SEQ ID NO: 9375 - RNA, 22 nt, synthetic construct
  source 1..22: mol_type = other RNA
tctccataaaagtcctgtcacc

SEQ ID NO: 9376 - RNA, 22 nt, synthetic construct
  source 1..22: mol_type = other RNA
tctcccagcaccctgtgcaggt

SEQ ID NO: 9377 - RNA, 22 nt, synthetic construct
  source 1..22: mol_type = other RNA
tctcccgggttcaggtgattct

SEQ ID NO: 9378 - RNA, 22 nt, synthetic construct
  source 1..22: mol_type = other RNA
tctcctgctggagactggccta

SEQ ID NO: 9379 - RNA, 22 nt, synthetic construct
  source 1..22: mol_type = other RNA
tctcctgtgtttcaccaccggt

SEQ ID NO: 9380 - RNA, 22 nt, synthetic construct
  source 1..22: mol_type = other RNA
tctcgtttcgaaagcattgcct

SEQ ID NO: 9381 - RNA, 22 nt, synthetic construct
  source 1..22: mol_type = other RNA
tctctagaagacgctggaataa

SEQ ID NO: 9382 - RNA, 22 nt, synthetic construct
  source 1..22: mol_type = other RNA
tctctcacgtgcttcagtggcc

SEQ ID NO: 9383 - RNA, 22 nt, synthetic construct
  source 1..22: mol_type = other RNA
tctctggtctttttcagttctg

SEQ ID NO: 9384 - RNA, 22 nt, synthetic construct
  source 1..22: mol_type = other RNA
tctcttcccagacaccacaatg

SEQ ID NO: 9385 - RNA, 22 nt, synthetic construct
  source 1..22: mol_type = other RNA
tctgaaattctacagctaggcc

SEQ ID NO: 9386 - RNA, 22 nt, synthetic construct
  source 1..22: mol_type = other RNA
tctgacacatgctctcaatata

SEQ ID NO: 9387 - RNA, 22 nt, synthetic construct
  source 1..22: mol_type = other RNA
tctgacatcctgacctcctgga

SEQ ID NO: 9388 - RNA, 22 nt, synthetic construct
  source 1..22: mol_type = other RNA
tctgacattcatagccaaggcc

SEQ ID NO: 9389 - RNA, 22 nt, synthetic construct
  source 1..22: mol_type = other RNA
tctgagaaaagagttttcaccc

SEQ ID NO: 9390 - RNA, 22 nt, synthetic construct
  source 1..22: mol_type = other RNA
tctgcactaatttcccagggct

SEQ ID NO: 9391 - RNA, 22 nt, synthetic construct
  source 1..22: mol_type = other RNA
tctgcatctgctccaggtattt

SEQ ID NO: 9392 - RNA, 22 nt, synthetic construct
  source 1..22: mol_type = other RNA
tctgcatcttgttcaggtgacg

SEQ ID NO: 9393 - RNA, 22 nt, synthetic construct
  source 1..22: mol_type = other RNA
tctgctccaggtatttgtaggt

SEQ ID NO: 9394 - RNA, 22 nt, synthetic construct
  source 1..22: mol_type = other RNA
tctgctggttactgaacttgtc

SEQ ID NO: 9395 - RNA, 22 nt, synthetic construct
  source 1..22: mol_type = other RNA
tctgcttcagcactttctaaat

SEQ ID NO: 9396 - RNA, 22 nt, synthetic construct
  source 1..22: mol_type = other RNA
tctgcttgctagcctactgctg

SEQ ID NO: 9397 - RNA, 22 nt, synthetic construct
  source 1..22: mol_type = other RNA
tctggacattcccactgttcac

SEQ ID NO: 9398 - RNA, 22 nt, synthetic construct
  source 1..22: mol_type = other RNA
tctgggaagagacctgcacagg

SEQ ID NO: 9399 - RNA, 22 nt, synthetic construct
  source 1..22: mol_type = other RNA
tctggggtgagcattggatcaa

SEQ ID NO: 9400 - RNA, 22 nt, synthetic construct
  source 1..22: mol_type = other RNA
tctggtctttttcagttctgaa

SEQ ID NO: 9401 - RNA, 22 nt, synthetic construct
  source 1..22: mol_type = other RNA
tctgtagcataaaatgttcaca

SEQ ID NO: 9402 - RNA, 22 nt, synthetic construct
  source 1..22: mol_type = other RNA
tctgtatacactaagctctcta

SEQ ID NO: 9403 - RNA, 22 nt, synthetic construct
  source 1..22: mol_type = other RNA
tctgtctcccgggttcaggtga

SEQ ID NO: 9404 - RNA, 22 nt, synthetic construct
  source 1..22: mol_type = other RNA
tctgtcttctgctggttactga

SEQ ID NO: 9405 - RNA, 22 nt, synthetic construct
  source 1..22: mol_type = other RNA
tctgttctgtcttctgctggtt

SEQ ID NO: 9406 - RNA, 22 nt, synthetic construct
  source 1..22: mol_type = other RNA
tcttcactcctcgagtactgga

SEQ ID NO: 9407 - RNA, 22 nt, synthetic construct
  source 1..22: mol_type = other RNA
tcttcagcctcattcactgtcc

SEQ ID NO: 9408 - RNA, 22 nt, synthetic construct
  source 1..22: mol_type = other RNA
tcttccaggttgatccaatgct

SEQ ID NO: 9409 - RNA, 22 nt, synthetic construct
  source 1..22: mol_type = other RNA
tcttcccagacaccacaatgac

SEQ ID NO: 9410 - RNA, 22 nt, synthetic construct
  source 1..22: mol_type = other RNA
tcttccggcccacctgcatccc

SEQ ID NO: 9411 - RNA, 22 nt, synthetic construct
  source 1..22: mol_type = other RNA
tcttccgtgagggctaagcttt

SEQ ID NO: 9412 - RNA, 22 nt, synthetic construct
  source 1..22: mol_type = other RNA
tcttctagagagcttagtgtat

SEQ ID NO: 9413 - RNA, 22 nt, synthetic construct
  source 1..22: mol_type = other RNA
tcttctgctggttactgaactt

SEQ ID NO: 9414 - RNA, 22 nt, synthetic construct
  source 1..22: mol_type = other RNA
tcttctggggtgagcattggat

SEQ ID NO: 9415 - RNA, 22 nt, synthetic construct
  source 1..22: mol_type = other RNA
tcttgaagtccagtgtttccac

SEQ ID NO: 9416 - RNA, 22 nt, synthetic construct
  source 1..22: mol_type = other RNA
tcttgccactcactccttagtg

SEQ ID NO: 9417 - RNA, 22 nt, synthetic construct
  source 1..22: mol_type = other RNA
tcttgttcaggtgacgctcttc

SEQ ID NO: 9418 - RNA, 22 nt, synthetic construct
  source 1..22: mol_type = other RNA
tctttaaataaaagccaggaca

SEQ ID NO: 9419 - RNA, 22 nt, synthetic construct
  source 1..22: mol_type = other RNA
tctttctcctgtgtttcaccac

SEQ ID NO: 9420 - RNA, 22 nt, synthetic construct
  source 1..22: mol_type = other RNA
tctttgatccccttattttctt

SEQ ID NO: 9421 - RNA, 22 nt, synthetic construct
  source 1..22: mol_type = other RNA
tcttttaaatgggtgaaaaatg

SEQ ID NO: 9422 - RNA, 22 nt, synthetic construct
  source 1..22: mol_type = other RNA
tcttttctcagattatttcctt

SEQ ID NO: 9423 - RNA, 22 nt, synthetic construct
  source 1..22: mol_type = other RNA
tctttttcagttctgaaattct

SEQ ID NO: 9424 - RNA, 22 nt, synthetic construct
  source 1..22: mol_type = other RNA
tgaaaaagaccagagatcccct

SEQ ID NO: 9425 - RNA, 22 nt, synthetic construct
  source 1..22: mol_type = other RNA
tgaaaactcttttctcagatta

SEQ ID NO: 9426 - RNA, 22 nt, synthetic construct
  source 1..22: mol_type = other RNA
tgaaaatcgacatttcccattt

SEQ ID NO: 9427 - RNA, 22 nt, synthetic construct
  source 1..22: mol_type = other RNA
tgaaacacaggagaaagaaaat

SEQ ID NO: 9428 - RNA, 22 nt, synthetic construct
  source 1..22: mol_type = other RNA
tgaaagctcatttaaaaaggga

SEQ ID NO: 9429 - RNA, 22 nt, synthetic construct
  source 1..22: mol_type = other RNA
tgaaagcttagccctcacggaa

SEQ ID NO: 9430 - RNA, 22 nt, synthetic construct
  source 1..22: mol_type = other RNA
tgaaaggaccagtttcttgaag

SEQ ID NO: 9431 - RNA, 22 nt, synthetic construct
  source 1..22: mol_type = other RNA
tgaaagttggcaacagcccctt

SEQ ID NO: 9432 - RNA, 22 nt, synthetic construct
  source 1..22: mol_type = other RNA
tgaaattctacagctaggccag

SEQ ID NO: 9433 - RNA, 22 nt, synthetic construct
  source 1..22: mol_type = other RNA
tgaacaagatgcagaaccatgg

SEQ ID NO: 9434 - RNA, 22 nt, synthetic construct
  source 1..22: mol_type = other RNA
tgaacagtgggaatgtccagag

SEQ ID NO: 9435 - RNA, 22 nt, synthetic construct
  source 1..22: mol_type = other RNA
tgaacattttatgctacagagg

SEQ ID NO: 9436 - RNA, 22 nt, synthetic construct
  source 1..22: mol_type = other RNA
tgaactgataacagcagcatgt

SEQ ID NO: 9437 - RNA, 22 nt, synthetic construct
  source 1..22: mol_type = other RNA
tgaacttgtcttgccactcact

SEQ ID NO: 9438 - RNA, 22 nt, synthetic construct
  source 1..22: mol_type = other RNA
tgaagagttgacttacacaaca

SEQ ID NO: 9439 - RNA, 22 nt, synthetic construct
  source 1..22: mol_type = other RNA
tgaagatgcctattaattccac

SEQ ID NO: 9440 - RNA, 22 nt, synthetic construct
  source 1..22: mol_type = other RNA
tgaagcacgtgagagaccctcg

SEQ ID NO: 9441 - RNA, 22 nt, synthetic construct
  source 1..22: mol_type = other RNA
tgaagcagactgtttctgttct

SEQ ID NO: 9442 - RNA, 22 nt, synthetic construct
  source 1..22: mol_type = other RNA
tgaagtccagtgtttccacggc

SEQ ID NO: 9443 - RNA, 22 nt, synthetic construct
  source 1..22: mol_type = other RNA
tgaatgaggctgaagagttgac

SEQ ID NO: 9444 - RNA, 22 nt, synthetic construct
  source 1..22: mol_type = other RNA
tgaatgtcagaaagtcatgtga

SEQ ID NO: 9445 - RNA, 22 nt, synthetic construct
  source 1..22: mol_type = other RNA
tgacaagcaaggctcggcgcca

SEQ ID NO: 9446 - RNA, 22 nt, synthetic construct
  source 1..22: mol_type = other RNA
tgacacatgctctcaatatata

SEQ ID NO: 9447 - RNA, 22 nt, synthetic construct
  source 1..22: mol_type = other RNA
tgacaggacttttatggagaca

SEQ ID NO: 9448 - RNA, 22 nt, synthetic construct
  source 1..22: mol_type = other RNA
tgacagtcaactggatttccta

SEQ ID NO: 9449 - RNA, 22 nt, synthetic construct
  source 1..22: mol_type = other RNA
tgacatcctgacctcctggact

SEQ ID NO: 9450 - RNA, 22 nt, synthetic construct
  source 1..22: mol_type = other RNA
tgacattcatagccaaggccca

SEQ ID NO: 9451 - RNA, 22 nt, synthetic construct
  source 1..22: mol_type = other RNA
tgaccagggtgatctcaaatcc

SEQ ID NO: 9452 - RNA, 22 nt, synthetic construct
  source 1..22: mol_type = other RNA
tgaccctcaggttttgttcttc

SEQ ID NO: 9453 - RNA, 22 nt, synthetic construct
  source 1..22: mol_type = other RNA
tgacctcctggactgtaggact

SEQ ID NO: 9454 - RNA, 22 nt, synthetic construct
  source 1..22: mol_type = other RNA
tgacgctcttctggggtgagca

SEQ ID NO: 9455 - RNA, 22 nt, synthetic construct
  source 1..22: mol_type = other RNA
tgactggcttgccttggctggc

SEQ ID NO: 9456 - RNA, 22 nt, synthetic construct
  source 1..22: mol_type = other RNA
tgactgtcatcttccgtgaggg

SEQ ID NO: 9457 - RNA, 22 nt, synthetic construct
  source 1..22: mol_type = other RNA
tgacttacacaacataaccgga

SEQ ID NO: 9458 - RNA, 22 nt, synthetic construct
  source 1..22: mol_type = other RNA
tgactttctgacattcatagcc

SEQ ID NO: 9459 - RNA, 22 nt, synthetic construct
  source 1..22: mol_type = other RNA
tgagaaaagagttttcaccctc

SEQ ID NO: 9460 - RNA, 22 nt, synthetic construct
  source 1..22: mol_type = other RNA
tgagaaatggggtggaataggg

SEQ ID NO: 9461 - RNA, 22 nt, synthetic construct
  source 1..22: mol_type = other RNA
tgagaaccccacctacaaatac

SEQ ID NO: 9462 - RNA, 22 nt, synthetic construct
  source 1..22: mol_type = other RNA
tgagaaccggtggtgaaacaca

SEQ ID NO: 9463 - RNA, 22 nt, synthetic construct
  source 1..22: mol_type = other RNA
tgagagaccctcgcaaaatgat

SEQ ID NO: 9464 - RNA, 22 nt, synthetic construct
  source 1..22: mol_type = other RNA
tgagagcatgtgtcagacaata

SEQ ID NO: 9465 - RNA, 22 nt, synthetic construct
  source 1..22: mol_type = other RNA
tgagatcaccctggtcaatatg

SEQ ID NO: 9466 - RNA, 22 nt, synthetic construct
  source 1..22: mol_type = other RNA
tgagcattggatcaacctggaa

SEQ ID NO: 9467 - RNA, 22 nt, synthetic construct
  source 1..22: mol_type = other RNA
tgagccatttgctgcacaatcc

SEQ ID NO: 9468 - RNA, 22 nt, synthetic construct
  source 1..22: mol_type = other RNA
tgagccctgggaaattagtgca

SEQ ID NO: 9469 - RNA, 22 nt, synthetic construct
  source 1..22: mol_type = other RNA
tgagctactgcacctggccagt

SEQ ID NO: 9470 - RNA, 22 nt, synthetic construct
  source 1..22: mol_type = other RNA
tgagctttcaggaagttgctga

SEQ ID NO: 9471 - RNA, 22 nt, synthetic construct
  source 1..22: mol_type = other RNA
tgaggaccaaatgcagccagca

SEQ ID NO: 9472 - RNA, 22 nt, synthetic construct
  source 1..22: mol_type = other RNA
tgaggctgaagagttgacttac

SEQ ID NO: 9473 - RNA, 22 nt, synthetic construct
  source 1..22: mol_type = other RNA
tgagggctaagctttcagggct

SEQ ID NO: 9474 - RNA, 22 nt, synthetic construct
  source 1..22: mol_type = other RNA
tgagggtcattgtggtgtctgg

SEQ ID NO: 9475 - RNA, 22 nt, synthetic construct
  source 1..22: mol_type = other RNA
tgaggtcaggatttgagatcac

SEQ ID NO: 9476 - RNA, 22 nt, synthetic construct
  source 1..22: mol_type = other RNA
tgagtaactgaactgataacag

SEQ ID NO: 9477 - RNA, 22 nt, synthetic construct
  source 1..22: mol_type = other RNA
tgagtggcaagacaagttcagt

SEQ ID NO: 9478 - RNA, 22 nt, synthetic construct
  source 1..22: mol_type = other RNA
tgataacagcagcatgtccagt

SEQ ID NO: 9479 - RNA, 22 nt, synthetic construct
  source 1..22: mol_type = other RNA
tgatccaatgctcaccccagaa

SEQ ID NO: 9480 - RNA, 22 nt, synthetic construct
  source 1..22: mol_type = other RNA
tgatccccaaatataaatacag

SEQ ID NO: 9481 - RNA, 22 nt, synthetic construct
  source 1..22: mol_type = other RNA
tgatccccttattttctttctc

SEQ ID NO: 9482 - RNA, 22 nt, synthetic construct
  source 1..22: mol_type = other RNA
tgatctattgcagatatttgat

SEQ ID NO: 9483 - RNA, 22 nt, synthetic construct
  source 1..22: mol_type = other RNA
tgatgtgaaaggaccagtttct

SEQ ID NO: 9484 - RNA, 22 nt, synthetic construct
  source 1..22: mol_type = other RNA
tgattcttgtgcctcagcctcc

SEQ ID NO: 9485 - RNA, 22 nt, synthetic construct
  source 1..22: mol_type = other RNA
tgatttccaaaaacacgaccta

SEQ ID NO: 9486 - RNA, 22 nt, synthetic construct
  source 1..22: mol_type = other RNA
tgcacaatcccctgaggaccaa

SEQ ID NO: 9487 - RNA, 22 nt, synthetic construct
  source 1..22: mol_type = other RNA
tgcacagggtgctgggagacct

SEQ ID NO: 9488 - RNA, 22 nt, synthetic construct
  source 1..22: mol_type = other RNA
tgcacctggccagttacttggt

SEQ ID NO: 9489 - RNA, 22 nt, synthetic construct
  source 1..22: mol_type = other RNA
tgcactaatttcccagggctca

SEQ ID NO: 9490 - RNA, 22 nt, synthetic construct
  source 1..22: mol_type = other RNA
tgcagaaccatggctatgagaa

SEQ ID NO: 9491 - RNA, 22 nt, synthetic construct
  source 1..22: mol_type = other RNA
tgcagatatttgatgtagtttt

SEQ ID NO: 9492 - RNA, 22 nt, synthetic construct
  source 1..22: mol_type = other RNA
tgcagatgctggtcttagttat

SEQ ID NO: 9493 - RNA, 22 nt, synthetic construct
  source 1..22: mol_type = other RNA
tgcagatttaggtggcagggag

SEQ ID NO: 9494 - RNA, 22 nt, synthetic construct
  source 1..22: mol_type = other RNA
tgcagcaaatggctcaggtctc

SEQ ID NO: 9495 - RNA, 22 nt, synthetic construct
  source 1..22: mol_type = other RNA
tgcagccagcagcccgttccca

SEQ ID NO: 9496 - RNA, 22 nt, synthetic construct
  source 1..22: mol_type = other RNA
tgcaggctgtcgttccggttat

SEQ ID NO: 9497 - RNA, 22 nt, synthetic construct
  source 1..22: mol_type = other RNA
tgcaggtctcttcccagacacc

SEQ ID NO: 9498 - RNA, 22 nt, synthetic construct
  source 1..22: mol_type = other RNA
tgcaggtgggccggaagatccc

SEQ ID NO: 9499 - RNA, 22 nt, synthetic construct
  source 1..22: mol_type = other RNA
tgcagttctacagtagtacttt

SEQ ID NO: 9500 - RNA, 22 nt, synthetic construct
  source 1..22: mol_type = other RNA
tgcatccctccgccagggctgc

SEQ ID NO: 9501 - RNA, 22 nt, synthetic construct
  source 1..22: mol_type = other RNA
tgcatctgctccaggtatttgt

SEQ ID NO: 9502 - RNA, 22 nt, synthetic construct
  source 1..22: mol_type = other RNA
tgcatcttgttcaggtgacgct

SEQ ID NO: 9503 - RNA, 22 nt, synthetic construct
  source 1..22: mol_type = other RNA
tgcatttggtcctcaggggatt

SEQ ID NO: 9504 - RNA, 22 nt, synthetic construct
  source 1..22: mol_type = other RNA
tgccaactttcaacattagttt

SEQ ID NO: 9505 - RNA, 22 nt, synthetic construct
  source 1..22: mol_type = other RNA
tgccaagcagcagccgctgcca

SEQ ID NO: 9506 - RNA, 22 nt, synthetic construct
  source 1..22: mol_type = other RNA
tgccacaaggggctgttgccaa

SEQ ID NO: 9507 - RNA, 22 nt, synthetic construct
  source 1..22: mol_type = other RNA
tgccaccacgcccagctagtct

SEQ ID NO: 9508 - RNA, 22 nt, synthetic construct
  source 1..22: mol_type = other RNA
tgccacctaaatctgcatctgc

SEQ ID NO: 9509 - RNA, 22 nt, synthetic construct
  source 1..22: mol_type = other RNA
tgccactcactccttagtgaac

SEQ ID NO: 9510 - RNA, 22 nt, synthetic construct
  source 1..22: mol_type = other RNA
tgccaggggctgcgtctgacat

SEQ ID NO: 9511 - RNA, 22 nt, synthetic construct
  source 1..22: mol_type = other RNA
tgccgcgctccctgccacctaa

SEQ ID NO: 9512 - RNA, 22 nt, synthetic construct
  source 1..22: mol_type = other RNA
tgcctattaattccacaggttc

SEQ ID NO: 9513 - RNA, 22 nt, synthetic construct
  source 1..22: mol_type = other RNA
tgcctcagcctcccacctagct

SEQ ID NO: 9514 - RNA, 22 nt, synthetic construct
  source 1..22: mol_type = other RNA
tgcctctttgatccccttattt

SEQ ID NO: 9515 - RNA, 22 nt, synthetic construct
  source 1..22: mol_type = other RNA
tgccttggctggcccaggtagt

SEQ ID NO: 9516 - RNA, 22 nt, synthetic construct
  source 1..22: mol_type = other RNA
tgcctttaacgtccttggtgac

SEQ ID NO: 9517 - RNA, 22 nt, synthetic construct
  source 1..22: mol_type = other RNA
tgcgagggtctctcacgtgctt

SEQ ID NO: 9518 - RNA, 22 nt, synthetic construct
  source 1..22: mol_type = other RNA
tgcgtctgacatcctgacctcc

SEQ ID NO: 9519 - RNA, 22 nt, synthetic construct
  source 1..22: mol_type = other RNA
tgctacagagggtgaaaactct

SEQ ID NO: 9520 - RNA, 22 nt, synthetic construct
  source 1..22: mol_type = other RNA
tgctagcctactgctgactggc

SEQ ID NO: 9521 - RNA, 22 nt, synthetic construct
  source 1..22: mol_type = other RNA
tgctaggaaatccagttgactg

SEQ ID NO: 9522 - RNA, 22 nt, synthetic construct
  source 1..22: mol_type = other RNA
tgctcaccccagaagagcgtca

SEQ ID NO: 9523 - RNA, 22 nt, synthetic construct
  source 1..22: mol_type = other RNA
tgctccaggtatttgtaggtgg

SEQ ID NO: 9524 - RNA, 22 nt, synthetic construct
  source 1..22: mol_type = other RNA
tgctcctttcccccattaaaaa

SEQ ID NO: 9525 - RNA, 22 nt, synthetic construct
  source 1..22: mol_type = other RNA
tgctgaagcagactgtttctgt

SEQ ID NO: 9526 - RNA, 22 nt, synthetic construct
  source 1..22: mol_type = other RNA
tgctgactggcttgccttggct

SEQ ID NO: 9527 - RNA, 22 nt, synthetic construct
  source 1..22: mol_type = other RNA
tgctgagaaatggggtggaata

SEQ ID NO: 9528 - RNA, 22 nt, synthetic construct
  source 1..22: mol_type = other RNA
tgctgcacaatcccctgaggac

SEQ ID NO: 9529 - RNA, 22 nt, synthetic construct
  source 1..22: mol_type = other RNA
tgctgctgttatcagttcagtt

SEQ ID NO: 9530 - RNA, 22 nt, synthetic construct
  source 1..22: mol_type = other RNA
tgctgcttggcagtcgatcgga

SEQ ID NO: 9531 - RNA, 22 nt, synthetic construct
  source 1..22: mol_type = other RNA
tgctggagactggcctagctgt

SEQ ID NO: 9532 - RNA, 22 nt, synthetic construct
  source 1..22: mol_type = other RNA
tgctggctgcatttggtcctca

SEQ ID NO: 9533 - RNA, 22 nt, synthetic construct
  source 1..22: mol_type = other RNA
tgctgggagacctgagccattt

SEQ ID NO: 9534 - RNA, 22 nt, synthetic construct
  source 1..22: mol_type = other RNA
tgctggtcttagttatttgtgt

SEQ ID NO: 9535 - RNA, 22 nt, synthetic construct
  source 1..22: mol_type = other RNA
tgctggttactgaacttgtctt

SEQ ID NO: 9536 - RNA, 22 nt, synthetic construct
  source 1..22: mol_type = other RNA
tgctgttatcagttcagttact

SEQ ID NO: 9537 - RNA, 22 nt, synthetic construct
  source 1..22: mol_type = other RNA
tgcttactacctgggccagcca

SEQ ID NO: 9538 - RNA, 22 nt, synthetic construct
  source 1..22: mol_type = other RNA
tgcttcagcactttctaaattt

SEQ ID NO: 9539 - RNA, 22 nt, synthetic construct
  source 1..22: mol_type = other RNA
tgcttcagtggccattacagtt

SEQ ID NO: 9540 - RNA, 22 nt, synthetic construct
  source 1..22: mol_type = other RNA
tgcttgctagcctactgctgac

SEQ ID NO: 9541 - RNA, 22 nt, synthetic construct
  source 1..22: mol_type = other RNA
tgcttggcagtcgatcggaatc

SEQ ID NO: 9542 - RNA, 22 nt, synthetic construct
  source 1..22: mol_type = other RNA
tgcttgtcaccacggtgctagg

SEQ ID NO: 9543 - RNA, 22 nt, synthetic construct
  source 1..22: mol_type = other RNA
tgctttcgaaacgagagccctg

SEQ ID NO: 9544 - RNA, 22 nt, synthetic construct
  source 1..22: mol_type = other RNA
tggaaaaaggaacactaaggaa

SEQ ID NO: 9545 - RNA, 22 nt, synthetic construct
  source 1..22: mol_type = other RNA
tggaaacactggacttcaagaa

SEQ ID NO: 9546 - RNA, 22 nt, synthetic construct
  source 1..22: mol_type = other RNA
tggaaatcagcccctgccacaa

SEQ ID NO: 9547 - RNA, 22 nt, synthetic construct
  source 1..22: mol_type = other RNA
tggaaattgcagttctacagta

SEQ ID NO: 9548 - RNA, 22 nt, synthetic construct
  source 1..22: mol_type = other RNA
tggaagaacaaaacctgagggt

SEQ ID NO: 9549 - RNA, 22 nt, synthetic construct
  source 1..22: mol_type = other RNA
tggaagtggggtttctgattaa

SEQ ID NO: 9550 - RNA, 22 nt, synthetic construct
  source 1..22: mol_type = other RNA
tggaataaaatgcctttaacgt

SEQ ID NO: 9551 - RNA, 22 nt, synthetic construct
  source 1..22: mol_type = other RNA
tggaatagggaactgtaatggc

SEQ ID NO: 9552 - RNA, 22 nt, synthetic construct
  source 1..22: mol_type = other RNA
tggaattaataggcatcttcac

SEQ ID NO: 9553 - RNA, 22 nt, synthetic construct
  source 1..22: mol_type = other RNA
tggacatgctgctgttatcagt

SEQ ID NO: 9554 - RNA, 22 nt, synthetic construct
  source 1..22: mol_type = other RNA
tggacattcccactgttcacta

SEQ ID NO: 9555 - RNA, 22 nt, synthetic construct
  source 1..22: mol_type = other RNA
tggactgtaggactatataaag

SEQ ID NO: 9556 - RNA, 22 nt, synthetic construct
  source 1..22: mol_type = other RNA
tggacttcaagaaactggtcct

SEQ ID NO: 9557 - RNA, 22 nt, synthetic construct
  source 1..22: mol_type = other RNA
tggagacacacaggtatccagc

SEQ ID NO: 9558 - RNA, 22 nt, synthetic construct
  source 1..22: mol_type = other RNA
tggagacagtctcgctgtgtcg

SEQ ID NO: 9559 - RNA, 22 nt, synthetic construct
  source 1..22: mol_type = other RNA
tggagactggcctagctgtaga

SEQ ID NO: 9560 - RNA, 22 nt, synthetic construct
  source 1..22: mol_type = other RNA
tggagcagatgcagatttaggt

SEQ ID NO: 9561 - RNA, 22 nt, synthetic construct
  source 1..22: mol_type = other RNA
tggatacctgtgtgtctccata

SEQ ID NO: 9562 - RNA, 22 nt, synthetic construct
  source 1..22: mol_type = other RNA
tggatcaacctggaagaacaaa

SEQ ID NO: 9563 - RNA, 22 nt, synthetic construct
  source 1..22: mol_type = other RNA
tggatcacttgaggtcaggatt

SEQ ID NO: 9564 - RNA, 22 nt, synthetic construct
  source 1..22: mol_type = other RNA
tggattcctaggtcgtgttttt

SEQ ID NO: 9565 - RNA, 22 nt, synthetic construct
  source 1..22: mol_type = other RNA
tggatttcctagcaccgtggtg

SEQ ID NO: 9566 - RNA, 22 nt, synthetic construct
  source 1..22: mol_type = other RNA
tggcaacagccccttgtggcag

SEQ ID NO: 9567 - RNA, 22 nt, synthetic construct
  source 1..22: mol_type = other RNA
tggcaagacaagttcagtaacc

SEQ ID NO: 9568 - RNA, 22 nt, synthetic construct
  source 1..22: mol_type = other RNA
tggcacacacctgtagtctcag

SEQ ID NO: 9569 - RNA, 22 nt, synthetic construct
  source 1..22: mol_type = other RNA
tggcagcggctgctgcttggca

SEQ ID NO: 9570 - RNA, 22 nt, synthetic construct
  source 1..22: mol_type = other RNA
tggcagggagcgcggcagccct

SEQ ID NO: 9571 - RNA, 22 nt, synthetic construct
  source 1..22: mol_type = other RNA
tggcaggggctgatttccaaaa

SEQ ID NO: 9572 - RNA, 22 nt, synthetic construct
  source 1..22: mol_type = other RNA
tggcagtcgatcggaatcgtgg

SEQ ID NO: 9573 - RNA, 22 nt, synthetic construct
  source 1..22: mol_type = other RNA
tggccactgaagcacgtgagag

SEQ ID NO: 9574 - RNA, 22 nt, synthetic construct
  source 1..22: mol_type = other RNA
tggccagttacttggttttatc

SEQ ID NO: 9575 - RNA, 22 nt, synthetic construct
  source 1..22: mol_type = other RNA
tggccattacagttccctattc

SEQ ID NO: 9576 - RNA, 22 nt, synthetic construct
  source 1..22: mol_type = other RNA
tggcccaggtagtaagcagtgg

SEQ ID NO: 9577 - RNA, 22 nt, synthetic construct
  source 1..22: mol_type = other RNA
tggcctagctgtagaatttcag

SEQ ID NO: 9578 - RNA, 22 nt, synthetic construct
  source 1..22: mol_type = other RNA
tggcctgtccggtgggaacggg

SEQ ID NO: 9579 - RNA, 22 nt, synthetic construct
  source 1..22: mol_type = other RNA
tggcgccgagccttgcttgtca

SEQ ID NO: 9580 - RNA, 22 nt, synthetic construct
  source 1..22: mol_type = other RNA
tggcggagggatgcaggtgggc

SEQ ID NO: 9581 - RNA, 22 nt, synthetic construct
  source 1..22: mol_type = other RNA
tggctatgaatgtcagaaagtc

SEQ ID NO: 9582 - RNA, 22 nt, synthetic construct
  source 1..22: mol_type = other RNA
tggctatgagaaccccacctac

SEQ ID NO: 9583 - RNA, 22 nt, synthetic construct
  source 1..22: mol_type = other RNA
tggctcaggtctcccagcaccc

SEQ ID NO: 9584 - RNA, 22 nt, synthetic construct
  source 1..22: mol_type = other RNA
tggctgcatttggtcctcaggg

SEQ ID NO: 9585 - RNA, 22 nt, synthetic construct
  source 1..22: mol_type = other RNA
tggctggcccaggtagtaagca

SEQ ID NO: 9586 - RNA, 22 nt, synthetic construct
  source 1..22: mol_type = other RNA
tggcttgccttggctggcccag

SEQ ID NO: 9587 - RNA, 22 nt, synthetic construct
  source 1..22: mol_type = other RNA
tgggaaatgtcgattttcaata

SEQ ID NO: 9588 - RNA, 22 nt, synthetic construct
  source 1..22: mol_type = other RNA
tgggaaattagtgcagatgctg

SEQ ID NO: 9589 - RNA, 22 nt, synthetic construct
  source 1..22: mol_type = other RNA
tgggaacctgtggaattaatag

SEQ ID NO: 9590 - RNA, 22 nt, synthetic construct
  source 1..22: mol_type = other RNA
tgggaacgggctgctggctgca

SEQ ID NO: 9591 - RNA, 22 nt, synthetic construct
  source 1..22: mol_type = other RNA
tgggaagagacctgcacagggt

SEQ ID NO: 9592 - RNA, 22 nt, synthetic construct
  source 1..22: mol_type = other RNA
tgggaatgtccagagtcccttg

SEQ ID NO: 9593 - RNA, 22 nt, synthetic construct
  source 1..22: mol_type = other RNA
tgggaccaggggatctctggtc

SEQ ID NO: 9594 - RNA, 22 nt, synthetic construct
  source 1..22: mol_type = other RNA
tgggagacctgagccatttgct

SEQ ID NO: 9595 - RNA, 22 nt, synthetic construct
  source 1..22: mol_type = other RNA
tgggatcttccggcccacctgc

SEQ ID NO: 9596 - RNA, 22 nt, synthetic construct
  source 1..22: mol_type = other RNA
tgggccagccaaggcaagccag

SEQ ID NO: 9597 - RNA, 22 nt, synthetic construct
  source 1..22: mol_type = other RNA
tgggccggaagatcccacgatt

SEQ ID NO: 9598 - RNA, 22 nt, synthetic construct
  source 1..22: mol_type = other RNA
tgggccttggctatgaatgtca

SEQ ID NO: 9599 - RNA, 22 nt, synthetic construct
  source 1..22: mol_type = other RNA
tgggcgacacagcgagactgtc

SEQ ID NO: 9600 - RNA, 22 nt, synthetic construct
  source 1..22: mol_type = other RNA
tgggctgggttgggggtgggaa

SEQ ID NO: 9601 - RNA, 22 nt, synthetic construct
  source 1..22: mol_type = other RNA
tggggaaatcctatctctaata

SEQ ID NO: 9602 - RNA, 22 nt, synthetic construct
  source 1..22: mol_type = other RNA
tggggatcaagggactctggac

SEQ ID NO: 9603 - RNA, 22 nt, synthetic construct
  source 1..22: mol_type = other RNA
tgggggaaaggagcaacaggaa

SEQ ID NO: 9604 - RNA, 22 nt, synthetic construct
  source 1..22: mol_type = other RNA
tgggggtgggaacctgtggaat

SEQ ID NO: 9605 - RNA, 22 nt, synthetic construct
  source 1..22: mol_type = other RNA
tggggtgagcattggatcaacc

SEQ ID NO: 9606 - RNA, 22 nt, synthetic construct
  source 1..22: mol_type = other RNA
tggggtggaatagggaactgta

SEQ ID NO: 9607 - RNA, 22 nt, synthetic construct
  source 1..22: mol_type = other RNA
tggggttctcatagccatggtt

SEQ ID NO: 9608 - RNA, 22 nt, synthetic construct
  source 1..22: mol_type = other RNA
tggggtttctgattaatttaaa

SEQ ID NO: 9609 - RNA, 22 nt, synthetic construct
  source 1..22: mol_type = other RNA
tgggtgaaaaatggtaatataa

SEQ ID NO: 9610 - RNA, 22 nt, synthetic construct
  source 1..22: mol_type = other RNA
tgggttgggggtgggaacctgt

SEQ ID NO: 9611 - RNA, 22 nt, synthetic construct
  source 1..22: mol_type = other RNA
tggtcaatatggggaaatccta

SEQ ID NO: 9612 - RNA, 22 nt, synthetic construct
  source 1..22: mol_type = other RNA
tggtcccaccgtctgcttgcta

SEQ ID NO: 9613 - RNA, 22 nt, synthetic construct
  source 1..22: mol_type = other RNA
tggtcctcaggggattgtgcag

SEQ ID NO: 9614 - RNA, 22 nt, synthetic construct
  source 1..22: mol_type = other RNA
tggtcctttcacatcattttgc

SEQ ID NO: 9615 - RNA, 22 nt, synthetic construct
  source 1..22: mol_type = other RNA
tggtcttagttatttgtgtttt

SEQ ID NO: 9616 - RNA, 22 nt, synthetic construct
  source 1..22: mol_type = other RNA
tggtctttttcagttctgaaat

SEQ ID NO: 9617 - RNA, 22 nt, synthetic construct
  source 1..22: mol_type = other RNA
tggtgaaacacaggagaaagaa

SEQ ID NO: 9618 - RNA, 22 nt, synthetic construct
  source 1..22: mol_type = other RNA
tggtgacaagcaaggctcggcg

SEQ ID NO: 9619 - RNA, 22 nt, synthetic construct
  source 1..22: mol_type = other RNA
tggtgacaggacttttatggag

SEQ ID NO: 9620 - RNA, 22 nt, synthetic construct
  source 1..22: mol_type = other RNA
tggtgtctgggaagagacctgc

SEQ ID NO: 9621 - RNA, 22 nt, synthetic construct
  source 1..22: mol_type = other RNA
tggttactgaacttgtcttgcc

SEQ ID NO: 9622 - RNA, 22 nt, synthetic construct
  source 1..22: mol_type = other RNA
tggttctgcatcttgttcaggt

SEQ ID NO: 9623 - RNA, 22 nt, synthetic construct
  source 1..22: mol_type = other RNA
tggttttatctcctgctggaga

SEQ ID NO: 9624 - RNA, 22 nt, synthetic construct
  source 1..22: mol_type = other RNA
tggttttttggagacagtctcg

SEQ ID NO: 9625 - RNA, 22 nt, synthetic construct
  source 1..22: mol_type = other RNA
tggttttttggttttttggaga

SEQ ID NO: 9626 - RNA, 22 nt, synthetic construct
  source 1..22: mol_type = other RNA
tgtaagtcaactcttcagcctc

SEQ ID NO: 9627 - RNA, 22 nt, synthetic construct
  source 1..22: mol_type = other RNA
tgtaatggccactgaagcacgt

SEQ ID NO: 9628 - RNA, 22 nt, synthetic construct
  source 1..22: mol_type = other RNA
tgtagaactgcaatttccattc

SEQ ID NO: 9629 - RNA, 22 nt, synthetic construct
  source 1..22: mol_type = other RNA
tgtagaatttcagaactgaaaa

SEQ ID NO: 9630 - RNA, 22 nt, synthetic construct
  source 1..22: mol_type = other RNA
tgtagcataaaatgttcacatg

SEQ ID NO: 9631 - RNA, 22 nt, synthetic construct
  source 1..22: mol_type = other RNA
tgtaggactatataaagtacta

SEQ ID NO: 9632 - RNA, 22 nt, synthetic construct
  source 1..22: mol_type = other RNA
tgtaggtggggttctcatagcc

SEQ ID NO: 9633 - RNA, 22 nt, synthetic construct
  source 1..22: mol_type = other RNA
tgtagtctcagctaggtgggag

SEQ ID NO: 9634 - RNA, 22 nt, synthetic construct
  source 1..22: mol_type = other RNA
tgtatacactaagctctctaga

SEQ ID NO: 9635 - RNA, 22 nt, synthetic construct
  source 1..22: mol_type = other RNA
tgtattgtctgacacatgctct

SEQ ID NO: 9636 - RNA, 22 nt, synthetic construct
  source 1..22: mol_type = other RNA
tgtatttatatttggggatcaa

SEQ ID NO: 9637 - RNA, 22 nt, synthetic construct
  source 1..22: mol_type = other RNA
tgtcaccaaggacgttaaaggc

SEQ ID NO: 9638 - RNA, 22 nt, synthetic construct
  source 1..22: mol_type = other RNA
tgtcaccacggtgctaggaaat

SEQ ID NO: 9639 - RNA, 22 nt, synthetic construct
  source 1..22: mol_type = other RNA
tgtcagaaagtcatgtgaacat

SEQ ID NO: 9640 - RNA, 22 nt, synthetic construct
  source 1..22: mol_type = other RNA
tgtcagacaatacaatggaagt

SEQ ID NO: 9641 - RNA, 22 nt, synthetic construct
  source 1..22: mol_type = other RNA
tgtcagacgcagcccctggcag

SEQ ID NO: 9642 - RNA, 22 nt, synthetic construct
  source 1..22: mol_type = other RNA
tgtcatcttccgtgagggctaa

SEQ ID NO: 9643 - RNA, 22 nt, synthetic construct
  source 1..22: mol_type = other RNA
tgtccagagtcccttgatcccc

SEQ ID NO: 9644 - RNA, 22 nt, synthetic construct
  source 1..22: mol_type = other RNA
tgtccagtactcgaggagtgaa

SEQ ID NO: 9645 - RNA, 22 nt, synthetic construct
  source 1..22: mol_type = other RNA
tgtccggtgggaacgggctgct

SEQ ID NO: 9646 - RNA, 22 nt, synthetic construct
  source 1..22: mol_type = other RNA
tgtcctggcttttatttaaaga

SEQ ID NO: 9647 - RNA, 22 nt, synthetic construct
  source 1..22: mol_type = other RNA
tgtcgattttcaataatagact

SEQ ID NO: 9648 - RNA, 22 nt, synthetic construct
  source 1..22: mol_type = other RNA
tgtcgttccggttatgttgtgt

SEQ ID NO: 9649 - RNA, 22 nt, synthetic construct
  source 1..22: mol_type = other RNA
tgtctccaaaaaaccaaaaaac

SEQ ID NO: 9650 - RNA, 22 nt, synthetic construct
  source 1..22: mol_type = other RNA
tgtctccataaaagtcctgtca

SEQ ID NO: 9651 - RNA, 22 nt, synthetic construct
  source 1..22: mol_type = other RNA
tgtctcccgggttcaggtgatt

SEQ ID NO: 9652 - RNA, 22 nt, synthetic construct
  source 1..22: mol_type = other RNA
tgtctgacacatgctctcaata

SEQ ID NO: 9653 - RNA, 22 nt, synthetic construct
  source 1..22: mol_type = other RNA
tgtctgggaagagacctgcaca

SEQ ID NO: 9654 - RNA, 22 nt, synthetic construct
  source 1..22: mol_type = other RNA
tgtcttctgctggttactgaac

SEQ ID NO: 9655 - RNA, 22 nt, synthetic construct
  source 1..22: mol_type = other RNA
tgtcttgccactcactccttag

SEQ ID NO: 9656 - RNA, 22 nt, synthetic construct
  source 1..22: mol_type = other RNA
tgtgaaaggaccagtttcttga

SEQ ID NO: 9657 - RNA, 22 nt, synthetic construct
  source 1..22: mol_type = other RNA
tgtgaacattttatgctacaga

SEQ ID NO: 9658 - RNA, 22 nt, synthetic construct
  source 1..22: mol_type = other RNA
tgtgcagcaaatggctcaggtc

SEQ ID NO: 9659 - RNA, 22 nt, synthetic construct
  source 1..22: mol_type = other RNA
tgtgcaggtctcttcccagaca

SEQ ID NO: 9660 - RNA, 22 nt, synthetic construct
  source 1..22: mol_type = other RNA
tgtgccaccacgcccagctagt

SEQ ID NO: 9661 - RNA, 22 nt, synthetic construct
  source 1..22: mol_type = other RNA
tgtgcctcagcctcccacctag

SEQ ID NO: 9662 - RNA, 22 nt, synthetic construct
  source 1..22: mol_type = other RNA
tgtggaattaataggcatcttc

SEQ ID NO: 9663 - RNA, 22 nt, synthetic construct
  source 1..22: mol_type = other RNA
tgtggcaggggctgatttccaa

SEQ ID NO: 9664 - RNA, 22 nt, synthetic construct
  source 1..22: mol_type = other RNA
tgtgggctgggttgggggtggg

SEQ ID NO: 9665 - RNA, 22 nt, synthetic construct
  source 1..22: mol_type = other RNA
tgtggtgtctgggaagagacct

SEQ ID NO: 9666 - RNA, 22 nt, synthetic construct
  source 1..22: mol_type = other RNA
tgtgtaagtcaactcttcagcc

SEQ ID NO: 9667 - RNA, 22 nt, synthetic construct
  source 1..22: mol_type = other RNA
tgtgtcagacaatacaatggaa

SEQ ID NO: 9668 - RNA, 22 nt, synthetic construct
  source 1..22: mol_type = other RNA
tgtgtctccataaaagtcctgt

SEQ ID NO: 9669 - RNA, 22 nt, synthetic construct
  source 1..22: mol_type = other RNA
tgtgtgccaccacgcccagcta

SEQ ID NO: 9670 - RNA, 22 nt, synthetic construct
  source 1..22: mol_type = other RNA
tgtgtgtctccataaaagtcct

SEQ ID NO: 9671 - RNA, 22 nt, synthetic construct
  source 1..22: mol_type = other RNA
tgtgtttcaccaccggttctca

SEQ ID NO: 9672 - RNA, 22 nt, synthetic construct
  source 1..22: mol_type = other RNA
tgttatattaccatttttcacc

SEQ ID NO: 9673 - RNA, 22 nt, synthetic construct
  source 1..22: mol_type = other RNA
tgttatcagttcagttactcac

SEQ ID NO: 9674 - RNA, 22 nt, synthetic construct
  source 1..22: mol_type = other RNA
tgttcacatgactttctgacat

SEQ ID NO: 9675 - RNA, 22 nt, synthetic construct
  source 1..22: mol_type = other RNA
tgttcactaaggagtgagtggc

SEQ ID NO: 9676 - RNA, 22 nt, synthetic construct
  source 1..22: mol_type = other RNA
tgttcaggtgacgctcttctgg

SEQ ID NO: 9677 - RNA, 22 nt, synthetic construct
  source 1..22: mol_type = other RNA
tgttcctttttccaggtatttt

SEQ ID NO: 9678 - RNA, 22 nt, synthetic construct
  source 1..22: mol_type = other RNA
tgttctgtcttctgctggttac

SEQ ID NO: 9679 - RNA, 22 nt, synthetic construct
  source 1..22: mol_type = other RNA
tgttcttccaggttgatccaat

SEQ ID NO: 9680 - RNA, 22 nt, synthetic construct
  source 1..22: mol_type = other RNA
tgttgaaagttggcaacagccc

SEQ ID NO: 9681 - RNA, 22 nt, synthetic construct
  source 1..22: mol_type = other RNA
tgttgccaactttcaacattag

SEQ ID NO: 9682 - RNA, 22 nt, synthetic construct
  source 1..22: mol_type = other RNA
tgttgctcctttcccccattaa

SEQ ID NO: 9683 - RNA, 22 nt, synthetic construct
  source 1..22: mol_type = other RNA
tgttgtgtaagtcaactcttca

SEQ ID NO: 9684 - RNA, 22 nt, synthetic construct
  source 1..22: mol_type = other RNA
tgtttcaccaccggttctcatt

SEQ ID NO: 9685 - RNA, 22 nt, synthetic construct
  source 1..22: mol_type = other RNA
tgtttccacggctggatacctg

SEQ ID NO: 9686 - RNA, 22 nt, synthetic construct
  source 1..22: mol_type = other RNA
tgtttctgttctgtcttctgct

SEQ ID NO: 9687 - RNA, 22 nt, synthetic construct
  source 1..22: mol_type = other RNA
tgtttgttttggttttttggtt

SEQ ID NO: 9688 - RNA, 22 nt, synthetic construct
  source 1..22: mol_type = other RNA
tgtttttggaaatcagcccctg

SEQ ID NO: 9689 - RNA, 22 nt, synthetic construct
  source 1..22: mol_type = other RNA
ttaaaaagggaatactgccttt

SEQ ID NO: 9690 - RNA, 22 nt, synthetic construct
  source 1..22: mol_type = other RNA
ttaaaagaatggaaattgcagt

SEQ ID NO: 9691 - RNA, 22 nt, synthetic construct
  source 1..22: mol_type = other RNA
ttaaaggcattttattccagcg

SEQ ID NO: 9692 - RNA, 22 nt, synthetic construct
  source 1..22: mol_type = other RNA
ttaaataaaagccaggacagtg

SEQ ID NO: 9693 - RNA, 22 nt, synthetic construct
  source 1..22: mol_type = other RNA
ttaaatgagctttcaggaagtt

SEQ ID NO: 9694 - RNA, 22 nt, synthetic construct
  source 1..22: mol_type = other RNA
ttaaatgggtgaaaaatggtaa

SEQ ID NO: 9695 - RNA, 22 nt, synthetic construct
  source 1..22: mol_type = other RNA
ttaaattaatcagaaaccccac

SEQ ID NO: 9696 - RNA, 22 nt, synthetic construct
  source 1..22: mol_type = other RNA
ttaacgtccttggtgacaggac

SEQ ID NO: 9697 - RNA, 22 nt, synthetic construct
  source 1..22: mol_type = other RNA
ttaaggtccttactgtatttat

SEQ ID NO: 9698 - RNA, 22 nt, synthetic construct
  source 1..22: mol_type = other RNA
ttaataggcatcttcactcctc

SEQ ID NO: 9699 - RNA, 22 nt, synthetic construct
  source 1..22: mol_type = other RNA
ttaatcagaaaccccacttcca

SEQ ID NO: 9700 - RNA, 22 nt, synthetic construct
  source 1..22: mol_type = other RNA
ttaatgagccctgggaaattag

SEQ ID NO: 9701 - RNA, 22 nt, synthetic construct
  source 1..22: mol_type = other RNA
ttaatgggggaaaggagcaaca

SEQ ID NO: 9702 - RNA, 22 nt, synthetic construct
  source 1..22: mol_type = other RNA
ttaattccacaggttcccaccc

SEQ ID NO: 9703 - RNA, 22 nt, synthetic construct
  source 1..22: mol_type = other RNA
ttacacaacataaccggaacga

SEQ ID NO: 9704 - RNA, 22 nt, synthetic construct
  source 1..22: mol_type = other RNA
ttacagttccctattccacccc

SEQ ID NO: 9705 - RNA, 22 nt, synthetic construct
  source 1..22: mol_type = other RNA
ttaccatttttcacccatttaa

SEQ ID NO: 9706 - RNA, 22 nt, synthetic construct
  source 1..22: mol_type = other RNA
ttactacctgggccagccaagg

SEQ ID NO: 9707 - RNA, 22 nt, synthetic construct
  source 1..22: mol_type = other RNA
ttactcactggattcctaggtc

SEQ ID NO: 9708 - RNA, 22 nt, synthetic construct
  source 1..22: mol_type = other RNA
ttactgaacttgtcttgccact

SEQ ID NO: 9709 - RNA, 22 nt, synthetic construct
  source 1..22: mol_type = other RNA
ttactgtatttatatttgggga

SEQ ID NO: 9710 - RNA, 22 nt, synthetic construct
  source 1..22: mol_type = other RNA
ttacttggttttatctcctgct

SEQ ID NO: 9711 - RNA, 22 nt, synthetic construct
  source 1..22: mol_type = other RNA
ttagaaagtgctgaagcagact

SEQ ID NO: 9712 - RNA, 22 nt, synthetic construct
  source 1..22: mol_type = other RNA
ttagagataggatttccccata

SEQ ID NO: 9713 - RNA, 22 nt, synthetic construct
  source 1..22: mol_type = other RNA
ttagccctcacggaagatgaca

SEQ ID NO: 9714 - RNA, 22 nt, synthetic construct
  source 1..22: mol_type = other RNA
ttaggtggcagggagcgcggca

SEQ ID NO: 9715 - RNA, 22 nt, synthetic construct
  source 1..22: mol_type = other RNA
ttagtgaacagtgggaatgtcc

SEQ ID NO: 9716 - RNA, 22 nt, synthetic construct
  source 1..22: mol_type = other RNA
ttagtgcagatgctggtcttag

SEQ ID NO: 9717 - RNA, 22 nt, synthetic construct
  source 1..22: mol_type = other RNA
ttagtgttcctttttccaggta

SEQ ID NO: 9718 - RNA, 22 nt, synthetic construct
  source 1..22: mol_type = other RNA
ttagtttgggccttggctatga

SEQ ID NO: 9719 - RNA, 22 nt, synthetic construct
  source 1..22: mol_type = other RNA
ttatatagtcctacagtccagg

SEQ ID NO: 9720 - RNA, 22 nt, synthetic construct
  source 1..22: mol_type = other RNA
ttatatattgagagcatgtgtc

SEQ ID NO: 9721 - RNA, 22 nt, synthetic construct
  source 1..22: mol_type = other RNA
ttatatgcaggctgtcgttccg

SEQ ID NO: 9722 - RNA, 22 nt, synthetic construct
  source 1..22: mol_type = other RNA
ttatattaccatttttcaccca

SEQ ID NO: 9723 - RNA, 22 nt, synthetic construct
  source 1..22: mol_type = other RNA
ttatatttggggatcaagggac

SEQ ID NO: 9724 - RNA, 22 nt, synthetic construct
  source 1..22: mol_type = other RNA
ttatcagttcagttactcactg

SEQ ID NO: 9725 - RNA, 22 nt, synthetic construct
  source 1..22: mol_type = other RNA
ttatctcctgctggagactggc

SEQ ID NO: 9726 - RNA, 22 nt, synthetic construct
  source 1..22: mol_type = other RNA
ttatgctacagagggtgaaaac

SEQ ID NO: 9727 - RNA, 22 nt, synthetic construct
  source 1..22: mol_type = other RNA
ttatggagacacacaggtatcc

SEQ ID NO: 9728 - RNA, 22 nt, synthetic construct
  source 1..22: mol_type = other RNA
ttatgttgtgtaagtcaactct

SEQ ID NO: 9729 - RNA, 22 nt, synthetic construct
  source 1..22: mol_type = other RNA
ttattagagataggatttcccc

SEQ ID NO: 9730 - RNA, 22 nt, synthetic construct
  source 1..22: mol_type = other RNA
ttattccagcgtcttctagaga

SEQ ID NO: 9731 - RNA, 22 nt, synthetic construct
  source 1..22: mol_type = other RNA
ttattgaaaatcgacatttccc

SEQ ID NO: 9732 - RNA, 22 nt, synthetic construct
  source 1..22: mol_type = other RNA
ttatttccttagtgttcctttt

SEQ ID NO: 9733 - RNA, 22 nt, synthetic construct
  source 1..22: mol_type = other RNA
ttattttctttctcctgtgttt

SEQ ID NO: 9734 - RNA, 22 nt, synthetic construct
  source 1..22: mol_type = other RNA
ttcaacattagtttgggccttg

SEQ ID NO: 9735 - RNA, 22 nt, synthetic construct
  source 1..22: mol_type = other RNA
ttcaagaaactggtcctttcac

SEQ ID NO: 9736 - RNA, 22 nt, synthetic construct
  source 1..22: mol_type = other RNA
ttcacatcattttgcgagggtc

SEQ ID NO: 9737 - RNA, 22 nt, synthetic construct
  source 1..22: mol_type = other RNA
ttcacatgactttctgacattc

SEQ ID NO: 9738 - RNA, 22 nt, synthetic construct
  source 1..22: mol_type = other RNA
ttcaccaccggttctcatttgg

SEQ ID NO: 9739 - RNA, 22 nt, synthetic construct
  source 1..22: mol_type = other RNA
ttcacccatttaaaagaatgga

SEQ ID NO: 9740 - RNA, 22 nt, synthetic construct
  source 1..22: mol_type = other RNA
ttcaccctctgtagcataaaat

SEQ ID NO: 9741 - RNA, 22 nt, synthetic construct
  source 1..22: mol_type = other RNA
ttcactaaggagtgagtggcaa

SEQ ID NO: 9742 - RNA, 22 nt, synthetic construct
  source 1..22: mol_type = other RNA
ttcactcctcgagtactggaca

SEQ ID NO: 9743 - RNA, 22 nt, synthetic construct
  source 1..22: mol_type = other RNA
ttcactgtcctggcttttattt

SEQ ID NO: 9744 - RNA, 22 nt, synthetic construct
  source 1..22: mol_type = other RNA
ttcagaactgaaaaagaccaga

SEQ ID NO: 9745 - RNA, 22 nt, synthetic construct
  source 1..22: mol_type = other RNA
ttcagcactttctaaatttcct

SEQ ID NO: 9746 - RNA, 22 nt, synthetic construct
  source 1..22: mol_type = other RNA
ttcagcctcattcactgtcctg

SEQ ID NO: 9747 - RNA, 22 nt, synthetic construct
  source 1..22: mol_type = other RNA
ttcaggaagttgctgagaaatg

SEQ ID NO: 9748 - RNA, 22 nt, synthetic construct
  source 1..22: mol_type = other RNA
ttcagggctctcgtttcgaaag

SEQ ID NO: 9749 - RNA, 22 nt, synthetic construct
  source 1..22: mol_type = other RNA
ttcaggtgacgctcttctgggg

SEQ ID NO: 9750 - RNA, 22 nt, synthetic construct
  source 1..22: mol_type = other RNA
ttcagtaaccagcagaagacag

SEQ ID NO: 9751 - RNA, 22 nt, synthetic construct
  source 1..22: mol_type = other RNA
ttcagtggccattacagttccc

SEQ ID NO: 9752 - RNA, 22 nt, synthetic construct
  source 1..22: mol_type = other RNA
ttcagttactcactggattcct

SEQ ID NO: 9753 - RNA, 22 nt, synthetic construct
  source 1..22: mol_type = other RNA
ttcagttctgaaattctacagc

SEQ ID NO: 9754 - RNA, 22 nt, synthetic construct
  source 1..22: mol_type = other RNA
ttcatagccaaggcccaaacta

SEQ ID NO: 9755 - RNA, 22 nt, synthetic construct
  source 1..22: mol_type = other RNA
ttccaaaaacacgacctaggaa

SEQ ID NO: 9756 - RNA, 22 nt, synthetic construct
  source 1..22: mol_type = other RNA
ttccacaggttcccacccccaa

SEQ ID NO: 9757 - RNA, 22 nt, synthetic construct
  source 1..22: mol_type = other RNA
ttccaccccatttctcagcaac

SEQ ID NO: 9758 - RNA, 22 nt, synthetic construct
  source 1..22: mol_type = other RNA
ttccacggctggatacctgtgt

SEQ ID NO: 9759 - RNA, 22 nt, synthetic construct
  source 1..22: mol_type = other RNA
ttccagcgtcttctagagagct

SEQ ID NO: 9760 - RNA, 22 nt, synthetic construct
  source 1..22: mol_type = other RNA
ttccaggttgatccaatgctca

SEQ ID NO: 9761 - RNA, 22 nt, synthetic construct
  source 1..22: mol_type = other RNA
ttccattcttttaaatgggtga

SEQ ID NO: 9762 - RNA, 22 nt, synthetic construct
  source 1..22: mol_type = other RNA
ttccattgtattgtctgacaca

SEQ ID NO: 9763 - RNA, 22 nt, synthetic construct
  source 1..22: mol_type = other RNA
ttcccaccggacaggccaaatg

SEQ ID NO: 9764 - RNA, 22 nt, synthetic construct
  source 1..22: mol_type = other RNA
ttcccactgttcactaaggagt

SEQ ID NO: 9765 - RNA, 22 nt, synthetic construct
  source 1..22: mol_type = other RNA
ttcccagacaccacaatgaccc

SEQ ID NO: 9766 - RNA, 22 nt, synthetic construct
  source 1..22: mol_type = other RNA
ttcccagggctcattaaggtcc

SEQ ID NO: 9767 - RNA, 22 nt, synthetic construct
  source 1..22: mol_type = other RNA
ttccccatattgaccagggtga

SEQ ID NO: 9768 - RNA, 22 nt, synthetic construct
  source 1..22: mol_type = other RNA
ttccctattccaccccatttct

SEQ ID NO: 9769 - RNA, 22 nt, synthetic construct
  source 1..22: mol_type = other RNA
ttccctttttaaatgagctttc

SEQ ID NO: 9770 - RNA, 22 nt, synthetic construct
  source 1..22: mol_type = other RNA
ttccgatcgactgccaagcagc

SEQ ID NO: 9771 - RNA, 22 nt, synthetic construct
  source 1..22: mol_type = other RNA
ttccggcccacctgcatccctc

SEQ ID NO: 9772 - RNA, 22 nt, synthetic construct
  source 1..22: mol_type = other RNA
ttccggttatgttgtgtaagtc

SEQ ID NO: 9773 - RNA, 22 nt, synthetic construct
  source 1..22: mol_type = other RNA
ttccgtgagggctaagctttca

SEQ ID NO: 9774 - RNA, 22 nt, synthetic construct
  source 1..22: mol_type = other RNA
ttcctagcaccgtggtgacaag

SEQ ID NO: 9775 - RNA, 22 nt, synthetic construct
  source 1..22: mol_type = other RNA
ttcctaggtcgtgtttttggaa

SEQ ID NO: 9776 - RNA, 22 nt, synthetic construct
  source 1..22: mol_type = other RNA
ttcctgaaagctcatttaaaaa

SEQ ID NO: 9777 - RNA, 22 nt, synthetic construct
  source 1..22: mol_type = other RNA
ttcctgttgctcctttccccca

SEQ ID NO: 9778 - RNA, 22 nt, synthetic construct
  source 1..22: mol_type = other RNA
ttccttagtgttcctttttcca

SEQ ID NO: 9779 - RNA, 22 nt, synthetic construct
  source 1..22: mol_type = other RNA
ttcctttttccaggtatttttt

SEQ ID NO: 9780 - RNA, 22 nt, synthetic construct
  source 1..22: mol_type = other RNA
ttcgaaacgagagccctgaaag

SEQ ID NO: 9781 - RNA, 22 nt, synthetic construct
  source 1..22: mol_type = other RNA
ttcgaaagcattgcctctttga

SEQ ID NO: 9782 - RNA, 22 nt, synthetic construct
  source 1..22: mol_type = other RNA
ttctaaatttcctgttgctcct

SEQ ID NO: 9783 - RNA, 22 nt, synthetic construct
  source 1..22: mol_type = other RNA
ttctacagctaggccagtctcc

SEQ ID NO: 9784 - RNA, 22 nt, synthetic construct
  source 1..22: mol_type = other RNA
ttctagagagcttagtgtatac

SEQ ID NO: 9785 - RNA, 22 nt, synthetic construct
  source 1..22: mol_type = other RNA
ttctcagattatttccttagtg

SEQ ID NO: 9786 - RNA, 22 nt, synthetic construct
  source 1..22: mol_type = other RNA
ttctcagcaacttcctgaaagc

SEQ ID NO: 9787 - RNA, 22 nt, synthetic construct
  source 1..22: mol_type = other RNA
ttctcatagccatggttctgca

SEQ ID NO: 9788 - RNA, 22 nt, synthetic construct
  source 1..22: mol_type = other RNA
ttctcatttggcctgtccggtg

SEQ ID NO: 9789 - RNA, 22 nt, synthetic construct
  source 1..22: mol_type = other RNA
ttctcctgtgtttcaccaccgg

SEQ ID NO: 9790 - RNA, 22 nt, synthetic construct
  source 1..22: mol_type = other RNA
ttctgaaattctacagctaggc

SEQ ID NO: 9791 - RNA, 22 nt, synthetic construct
  source 1..22: mol_type = other RNA
ttctgacattcatagccaaggc

SEQ ID NO: 9792 - RNA, 22 nt, synthetic construct
  source 1..22: mol_type = other RNA
ttctgcatcttgttcaggtgac

SEQ ID NO: 9793 - RNA, 22 nt, synthetic construct
  source 1..22: mol_type = other RNA
ttctgctggttactgaacttgt

SEQ ID NO: 9794 - RNA, 22 nt, synthetic construct
  source 1..22: mol_type = other RNA
ttctggggtgagcattggatca

SEQ ID NO: 9795 - RNA, 22 nt, synthetic construct
  source 1..22: mol_type = other RNA
ttctgtcttctgctggttactg

SEQ ID NO: 9796 - RNA, 22 nt, synthetic construct
  source 1..22: mol_type = other RNA
ttctgttctgtcttctgctggt

SEQ ID NO: 9797 - RNA, 22 nt, synthetic construct
  source 1..22: mol_type = other RNA
ttcttccaggttgatccaatgc

SEQ ID NO: 9798 - RNA, 22 nt, synthetic construct
  source 1..22: mol_type = other RNA
ttcttgaagtccagtgtttcca

SEQ ID NO: 9799 - RNA, 22 nt, synthetic construct
  source 1..22: mol_type = other RNA
ttctttaaataaaagccaggac

SEQ ID NO: 9800 - RNA, 22 nt, synthetic construct
  source 1..22: mol_type = other RNA
ttctttctcctgtgtttcacca

SEQ ID NO: 9801 - RNA, 22 nt, synthetic construct
  source 1..22: mol_type = other RNA
ttgaaaatcgacatttcccatt

SEQ ID NO: 9802 - RNA, 22 nt, synthetic construct
  source 1..22: mol_type = other RNA
ttgaaagttggcaacagcccct

SEQ ID NO: 9803 - RNA, 22 nt, synthetic construct
  source 1..22: mol_type = other RNA
ttgaagtccagtgtttccacgg

SEQ ID NO: 9804 - RNA, 22 nt, synthetic construct
  source 1..22: mol_type = other RNA
ttgaccagggtgatctcaaatc

SEQ ID NO: 9805 - RNA, 22 nt, synthetic construct
  source 1..22: mol_type = other RNA
ttgactgtcatcttccgtgagg

SEQ ID NO: 9806 - RNA, 22 nt, synthetic construct
  source 1..22: mol_type = other RNA
ttgacttacacaacataaccgg

SEQ ID NO: 9807 - RNA, 22 nt, synthetic construct
  source 1..22: mol_type = other RNA
ttgagagcatgtgtcagacaat

SEQ ID NO: 9808 - RNA, 22 nt, synthetic construct
  source 1..22: mol_type = other RNA
ttgagatcaccctggtcaatat

SEQ ID NO: 9809 - RNA, 22 nt, synthetic construct
  source 1..22: mol_type = other RNA
ttgatccaatgctcaccccaga

SEQ ID NO: 9810 - RNA, 22 nt, synthetic construct
  source 1..22: mol_type = other RNA
ttgatccccaaatataaataca

SEQ ID NO: 9811 - RNA, 22 nt, synthetic construct
  source 1..22: mol_type = other RNA
ttgatccccttattttctttct

SEQ ID NO: 9812 - RNA, 22 nt, synthetic construct
  source 1..22: mol_type = other RNA
ttgcagatatttgatgtagttt

SEQ ID NO: 9813 - RNA, 22 nt, synthetic construct
  source 1..22: mol_type = other RNA
ttgcagttctacagtagtactt

SEQ ID NO: 9814 - RNA, 22 nt, synthetic construct
  source 1..22: mol_type = other RNA
ttgccaactttcaacattagtt

SEQ ID NO: 9815 - RNA, 22 nt, synthetic construct
  source 1..22: mol_type = other RNA
ttgccactcactccttagtgaa

SEQ ID NO: 9816 - RNA, 22 nt, synthetic construct
  source 1..22: mol_type = other RNA
ttgcctctttgatccccttatt

SEQ ID NO: 9817 - RNA, 22 nt, synthetic construct
  source 1..22: mol_type = other RNA
ttgccttggctggcccaggtag

SEQ ID NO: 9818 - RNA, 22 nt, synthetic construct
  source 1..22: mol_type = other RNA
ttgcgagggtctctcacgtgct

SEQ ID NO: 9819 - RNA, 22 nt, synthetic construct
  source 1..22: mol_type = other RNA
ttgctagcctactgctgactgg

SEQ ID NO: 9820 - RNA, 22 nt, synthetic construct
  source 1..22: mol_type = other RNA
ttgctcctttcccccattaaaa

SEQ ID NO: 9821 - RNA, 22 nt, synthetic construct
  source 1..22: mol_type = other RNA
ttgctgagaaatggggtggaat

SEQ ID NO: 9822 - RNA, 22 nt, synthetic construct
  source 1..22: mol_type = other RNA
ttgctgcacaatcccctgagga

SEQ ID NO: 9823 - RNA, 22 nt, synthetic construct
  source 1..22: mol_type = other RNA
ttgcttgtcaccacggtgctag

SEQ ID NO: 9824 - RNA, 22 nt, synthetic construct
  source 1..22: mol_type = other RNA
ttggaaatcagcccctgccaca

SEQ ID NO: 9825 - RNA, 22 nt, synthetic construct
  source 1..22: mol_type = other RNA
ttggagacagtctcgctgtgtc

SEQ ID NO: 9826 - RNA, 22 nt, synthetic construct
  source 1..22: mol_type = other RNA
ttggatcaacctggaagaacaa

SEQ ID NO: 9827 - RNA, 22 nt, synthetic construct
  source 1..22: mol_type = other RNA
ttggcaacagccccttgtggca

SEQ ID NO: 9828 - RNA, 22 nt, synthetic construct
  source 1..22: mol_type = other RNA
ttggcagtcgatcggaatcgtg

SEQ ID NO: 9829 - RNA, 22 nt, synthetic construct
  source 1..22: mol_type = other RNA
ttggcctgtccggtgggaacgg

SEQ ID NO: 9830 - RNA, 22 nt, synthetic construct
  source 1..22: mol_type = other RNA
ttggctatgaatgtcagaaagt

SEQ ID NO: 9831 - RNA, 22 nt, synthetic construct
  source 1..22: mol_type = other RNA
ttggctggcccaggtagtaagc

SEQ ID NO: 9832 - RNA, 22 nt, synthetic construct
  source 1..22: mol_type = other RNA
ttgggccttggctatgaatgtc

SEQ ID NO: 9833 - RNA, 22 nt, synthetic construct
  source 1..22: mol_type = other RNA
ttggggatcaagggactctgga

SEQ ID NO: 9834 - RNA, 22 nt, synthetic construct
  source 1..22: mol_type = other RNA
ttgggggtgggaacctgtggaa

SEQ ID NO: 9835 - RNA, 22 nt, synthetic construct
  source 1..22: mol_type = other RNA
ttggtcctcaggggattgtgca

SEQ ID NO: 9836 - RNA, 22 nt, synthetic construct
  source 1..22: mol_type = other RNA
ttggtgacaggacttttatgga

SEQ ID NO: 9837 - RNA, 22 nt, synthetic construct
  source 1..22: mol_type = other RNA
ttggttttatctcctgctggag

SEQ ID NO: 9838 - RNA, 22 nt, synthetic construct
  source 1..22: mol_type = other RNA
ttggttttttggagacagtctc

SEQ ID NO: 9839 - RNA, 22 nt, synthetic construct
  source 1..22: mol_type = other RNA
ttggttttttggttttttggag

SEQ ID NO: 9840 - RNA, 22 nt, synthetic construct
  source 1..22: mol_type = other RNA
ttgtaggtggggttctcatagc

SEQ ID NO: 9841 - RNA, 22 nt, synthetic construct
  source 1..22: mol_type = other RNA
ttgtattgtctgacacatgctc

SEQ ID NO: 9842 - RNA, 22 nt, synthetic construct
  source 1..22: mol_type = other RNA
ttgtcaccacggtgctaggaaa

SEQ ID NO: 9843 - RNA, 22 nt, synthetic construct
  source 1..22: mol_type = other RNA
ttgtctgacacatgctctcaat

SEQ ID NO: 9844 - RNA, 22 nt, synthetic construct
  source 1..22: mol_type = other RNA
ttgtcttgccactcactcctta

SEQ ID NO: 9845 - RNA, 22 nt, synthetic construct
  source 1..22: mol_type = other RNA
ttgtgcagcaaatggctcaggt

SEQ ID NO: 9846 - RNA, 22 nt, synthetic construct
  source 1..22: mol_type = other RNA
ttgtgcctcagcctcccaccta

SEQ ID NO: 9847 - RNA, 22 nt, synthetic construct
  source 1..22: mol_type = other RNA
ttgtggcaggggctgatttcca

SEQ ID NO: 9848 - RNA, 22 nt, synthetic construct
  source 1..22: mol_type = other RNA
ttgtggtgtctgggaagagacc

SEQ ID NO: 9849 - RNA, 22 nt, synthetic construct
  source 1..22: mol_type = other RNA
ttgtgtaagtcaactcttcagc

SEQ ID NO: 9850 - RNA, 22 nt, synthetic construct
  source 1..22: mol_type = other RNA
ttgttcaggtgacgctcttctg

SEQ ID NO: 9851 - RNA, 22 nt, synthetic construct
  source 1..22: mol_type = other RNA
ttgttcttccaggttgatccaa

SEQ ID NO: 9852 - RNA, 22 nt, synthetic construct
  source 1..22: mol_type = other RNA
ttgtttgttttggttttttggt

SEQ ID NO: 9853 - RNA, 22 nt, synthetic construct
  source 1..22: mol_type = other RNA
tttaaaaagggaatactgcctt

SEQ ID NO: 9854 - RNA, 22 nt, synthetic construct
  source 1..22: mol_type = other RNA
tttaaaagaatggaaattgcag

SEQ ID NO: 9855 - RNA, 22 nt, synthetic construct
  source 1..22: mol_type = other RNA
tttaaataaaagccaggacagt

SEQ ID NO: 9856 - RNA, 22 nt, synthetic construct
  source 1..22: mol_type = other RNA
tttaaatgagctttcaggaagt

SEQ ID NO: 9857 - RNA, 22 nt, synthetic construct
  source 1..22: mol_type = other RNA
tttaaatgggtgaaaaatggta

SEQ ID NO: 9858 - RNA, 22 nt, synthetic construct
  source 1..22: mol_type = other RNA
tttaaattaatcagaaacccca

SEQ ID NO: 9859 - RNA, 22 nt, synthetic construct
  source 1..22: mol_type = other RNA
tttaacgtccttggtgacagga

SEQ ID NO: 9860 - RNA, 22 nt, synthetic construct
  source 1..22: mol_type = other RNA
tttaatgggggaaaggagcaac

SEQ ID NO: 9861 - RNA, 22 nt, synthetic construct
  source 1..22: mol_type = other RNA
tttagaaagtgctgaagcagac

SEQ ID NO: 9862 - RNA, 22 nt, synthetic construct
  source 1..22: mol_type = other RNA
tttaggtggcagggagcgcggc

SEQ ID NO: 9863 - RNA, 22 nt, synthetic construct
  source 1..22: mol_type = other RNA
tttatatagtcctacagtccag

SEQ ID NO: 9864 - RNA, 22 nt, synthetic construct
  source 1..22: mol_type = other RNA
tttatatttggggatcaaggga

SEQ ID NO: 9865 - RNA, 22 nt, synthetic construct
  source 1..22: mol_type = other RNA
tttatctcctgctggagactgg

SEQ ID NO: 9866 - RNA, 22 nt, synthetic construct
  source 1..22: mol_type = other RNA
tttatgctacagagggtgaaaa

SEQ ID NO: 9867 - RNA, 22 nt, synthetic construct
  source 1..22: mol_type = other RNA
tttatggagacacacaggtatc

SEQ ID NO: 9868 - RNA, 22 nt, synthetic construct
  source 1..22: mol_type = other RNA
tttattagagataggatttccc

SEQ ID NO: 9869 - RNA, 22 nt, synthetic construct
  source 1..22: mol_type = other RNA
tttattccagcgtcttctagag

SEQ ID NO: 9870 - RNA, 22 nt, synthetic construct
  source 1..22: mol_type = other RNA
tttcaacattagtttgggcctt

SEQ ID NO: 9871 - RNA, 22 nt, synthetic construct
  source 1..22: mol_type = other RNA
tttcacatcattttgcgagggt

SEQ ID NO: 9872 - RNA, 22 nt, synthetic construct
  source 1..22: mol_type = other RNA
tttcaccaccggttctcatttg

SEQ ID NO: 9873 - RNA, 22 nt, synthetic construct
  source 1..22: mol_type = other RNA
tttcacccatttaaaagaatgg

SEQ ID NO: 9874 - RNA, 22 nt, synthetic construct
  source 1..22: mol_type = other RNA
tttcaccctctgtagcataaaa

SEQ ID NO: 9875 - RNA, 22 nt, synthetic construct
  source 1..22: mol_type = other RNA
tttcagaactgaaaaagaccag

SEQ ID NO: 9876 - RNA, 22 nt, synthetic construct
  source 1..22: mol_type = other RNA
tttcaggaagttgctgagaaat

SEQ ID NO: 9877 - RNA, 22 nt, synthetic construct
  source 1..22: mol_type = other RNA
tttcagggctctcgtttcgaaa

SEQ ID NO: 9878 - RNA, 22 nt, synthetic construct
  source 1..22: mol_type = other RNA
tttcagttctgaaattctacag

SEQ ID NO: 9879 - RNA, 22 nt, synthetic construct
  source 1..22: mol_type = other RNA
tttccaaaaacacgacctagga

SEQ ID NO: 9880 - RNA, 22 nt, synthetic construct
  source 1..22: mol_type = other RNA
tttccacggctggatacctgtg

SEQ ID NO: 9881 - RNA, 22 nt, synthetic construct
  source 1..22: mol_type = other RNA
tttccattcttttaaatgggtg

SEQ ID NO: 9882 - RNA, 22 nt, synthetic construct
  source 1..22: mol_type = other RNA
tttcccagggctcattaaggtc

SEQ ID NO: 9883 - RNA, 22 nt, synthetic construct
  source 1..22: mol_type = other RNA
tttccccatattgaccagggtg

SEQ ID NO: 9884 - RNA, 22 nt, synthetic construct
  source 1..22: mol_type = other RNA
tttcctagcaccgtggtgacaa

SEQ ID NO: 9885 - RNA, 22 nt, synthetic construct
  source 1..22: mol_type = other RNA
tttcctgttgctcctttccccc

SEQ ID NO: 9886 - RNA, 22 nt, synthetic construct
  source 1..22: mol_type = other RNA
tttccttagtgttcctttttcc

SEQ ID NO: 9887 - RNA, 22 nt, synthetic construct
  source 1..22: mol_type = other RNA
tttcgaaacgagagccctgaaa

SEQ ID NO: 9888 - RNA, 22 nt, synthetic construct
  source 1..22: mol_type = other RNA
tttcgaaagcattgcctctttg

SEQ ID NO: 9889 - RNA, 22 nt, synthetic construct
  source 1..22: mol_type = other RNA
tttctaaatttcctgttgctcc

SEQ ID NO: 9890 - RNA, 22 nt, synthetic construct
  source 1..22: mol_type = other RNA
tttctcagattatttccttagt

SEQ ID NO: 9891 - RNA, 22 nt, synthetic construct
  source 1..22: mol_type = other RNA
tttctcagcaacttcctgaaag

SEQ ID NO: 9892 - RNA, 22 nt, synthetic construct
  source 1..22: mol_type = other RNA
tttctcctgtgtttcaccaccg

SEQ ID NO: 9893 - RNA, 22 nt, synthetic construct
  source 1..22: mol_type = other RNA
tttctgacattcatagccaagg

SEQ ID NO: 9894 - RNA, 22 nt, synthetic construct
  source 1..22: mol_type = other RNA
tttctgttctgtcttctgctgg

SEQ ID NO: 9895 - RNA, 22 nt, synthetic construct
  source 1..22: mol_type = other RNA
tttcttgaagtccagtgtttcc

SEQ ID NO: 9896 - RNA, 22 nt, synthetic construct
  source 1..22: mol_type = other RNA
tttctttaaataaaagccagga

SEQ ID NO: 9897 - RNA, 22 nt, synthetic construct
  source 1..22: mol_type = other RNA
tttctttctcctgtgtttcacc

SEQ ID NO: 9898 - RNA, 22 nt, synthetic construct
  source 1..22: mol_type = other RNA
tttgagatcaccctggtcaata

SEQ ID NO: 9899 - RNA, 22 nt, synthetic construct
  source 1..22: mol_type = other RNA
tttgatccccttattttctttc

SEQ ID NO: 9900 - RNA, 22 nt, synthetic construct
  source 1..22: mol_type = other RNA
tttgcgagggtctctcacgtgc

SEQ ID NO: 9901 - RNA, 22 nt, synthetic construct
  source 1..22: mol_type = other RNA
tttgctgcacaatcccctgagg

SEQ ID NO: 9902 - RNA, 22 nt, synthetic construct
  source 1..22: mol_type = other RNA
tttggaaatcagcccctgccac

SEQ ID NO: 9903 - RNA, 22 nt, synthetic construct
  source 1..22: mol_type = other RNA
tttggagacagtctcgctgtgt

SEQ ID NO: 9904 - RNA, 22 nt, synthetic construct
  source 1..22: mol_type = other RNA
tttggcctgtccggtgggaacg

SEQ ID NO: 9905 - RNA, 22 nt, synthetic construct
  source 1..22: mol_type = other RNA
tttgggccttggctatgaatgt

SEQ ID NO: 9906 - RNA, 22 nt, synthetic construct
  source 1..22: mol_type = other RNA
tttggggatcaagggactctgg

SEQ ID NO: 9907 - RNA, 22 nt, synthetic construct
  source 1..22: mol_type = other RNA
tttggtcctcaggggattgtgc

SEQ ID NO: 9908 - RNA, 22 nt, synthetic construct
  source 1..22: mol_type = other RNA
tttggttttttggagacagtct

SEQ ID NO: 9909 - RNA, 22 nt, synthetic construct
  source 1..22: mol_type = other RNA
tttggttttttggttttttgga

SEQ ID NO: 9910 - RNA, 22 nt, synthetic construct
  source 1..22: mol_type = other RNA
tttgtaggtggggttctcatag

SEQ ID NO: 9911 - RNA, 22 nt, synthetic construct
  source 1..22: mol_type = other RNA
tttgttcttccaggttgatcca

SEQ ID NO: 9912 - RNA, 22 nt, synthetic construct
  source 1..22: mol_type = other RNA
ttttaaatgagctttcaggaag

SEQ ID NO: 9913 - RNA, 22 nt, synthetic construct
  source 1..22: mol_type = other RNA
ttttaaatgggtgaaaaatggt

SEQ ID NO: 9914 - RNA, 22 nt, synthetic construct
  source 1..22: mol_type = other RNA
ttttaaattaatcagaaacccc

SEQ ID NO: 9915 - RNA, 22 nt, synthetic construct
  source 1..22: mol_type = other RNA
ttttaatgggggaaaggagcaa

SEQ ID NO: 9916 - RNA, 22 nt, synthetic construct
  source 1..22: mol_type = other RNA
ttttatctcctgctggagactg

SEQ ID NO: 9917 - RNA, 22 nt, synthetic construct
  source 1..22: mol_type = other RNA
ttttatgctacagagggtgaaa

SEQ ID NO: 9918 - RNA, 22 nt, synthetic construct
  source 1..22: mol_type = other RNA
ttttatggagacacacaggtat

SEQ ID NO: 9919 - RNA, 22 nt, synthetic construct
  source 1..22: mol_type = other RNA
ttttattagagataggatttcc

SEQ ID NO: 9920 - RNA, 22 nt, synthetic construct
  source 1..22: mol_type = other RNA
ttttattccagcgtcttctaga

SEQ ID NO: 9921 - RNA, 22 nt, synthetic construct
  source 1..22: mol_type = other RNA
ttttcacccatttaaaagaatg

SEQ ID NO: 9922 - RNA, 22 nt, synthetic construct
  source 1..22: mol_type = other RNA
ttttcaccctctgtagcataaa

SEQ ID NO: 9923 - RNA, 22 nt, synthetic construct
  source 1..22: mol_type = other RNA
ttttcagttctgaaattctaca

SEQ ID NO: 9924 - RNA, 22 nt, synthetic construct
  source 1..22: mol_type = other RNA
ttttctcagattatttccttag

SEQ ID NO: 9925 - RNA, 22 nt, synthetic construct
  source 1..22: mol_type = other RNA
ttttctttaaataaaagccagg

SEQ ID NO: 9926 - RNA, 22 nt, synthetic construct
  source 1..22: mol_type = other RNA
ttttctttctcctgtgtttcac

SEQ ID NO: 9927 - RNA, 22 nt, synthetic construct
  source 1..22: mol_type = other RNA
ttttgcgagggtctctcacgtg

SEQ ID NO: 9928 - RNA, 22 nt, synthetic construct
  source 1..22: mol_type = other RNA
ttttggaaatcagcccctgcca

SEQ ID NO: 9929 - RNA, 22 nt, synthetic construct
  source 1..22: mol_type = other RNA
ttttggagacagtctcgctgtg

SEQ ID NO: 9930 - RNA, 22 nt, synthetic construct
  source 1..22: mol_type = other RNA
ttttggttttttggagacagtc

SEQ ID NO: 9931 - RNA, 22 nt, synthetic construct
  source 1..22: mol_type = other RNA
ttttggttttttggttttttgg

SEQ ID NO: 9932 - RNA, 22 nt, synthetic construct
  source 1..22: mol_type = other RNA
ttttgttcttccaggttgatcc

SEQ ID NO: 9933 - RNA, 22 nt, synthetic construct
  source 1..22: mol_type = other RNA
tttttaaatgagctttcaggaa

SEQ ID NO: 9934 - RNA, 22 nt, synthetic construct
  source 1..22: mol_type = other RNA
tttttaatgggggaaaggagca

SEQ ID NO: 9935 - RNA, 22 nt, synthetic construct
  source 1..22: mol_type = other RNA
tttttcagttctgaaattctac

SEQ ID NO: 9936 - RNA, 22 nt, synthetic construct
  source 1..22: mol_type = other RNA
tttttggaaatcagcccctgcc

SEQ ID NO: 9937 - RNA, 22 nt, synthetic construct
  source 1..22: mol_type = other RNA
tttttggagacagtctcgctgt

SEQ ID NO: 9938 - RNA, 22 nt, synthetic construct
  source 1..22: mol_type = other RNA
tttttggttttttggagacagt

SEQ ID NO: 9939 - RNA, 22 nt, synthetic construct
  source 1..22: mol_type = other RNA
ttttttaatgggggaaaggagc

SEQ ID NO: 9940 - RNA, 22 nt, synthetic construct
  source 1..22: mol_type = other RNA
ttttttggagacagtctcgctg

SEQ ID NO: 9941 - RNA, 22 nt, synthetic construct
  source 1..22: mol_type = other RNA
ttttttggttttttggagacag

SEQ ID NO: 9942 - RNA, 20 nt, synthetic construct
  source 1..20: mol_type = other RNA
aaaaaacaaaaaaccactgg

SEQ ID NO: 9943 - RNA, 20 nt, synthetic construct
  source 1..20: mol_type = other RNA
aaaaaacaaaacaaaaccct

SEQ ID NO: 9944 - RNA, 20 nt, synthetic construct
  source 1..20: mol_type = other RNA
aaaaaacacagggactgatg

SEQ ID NO: 9945 - RNA, 20 nt, synthetic construct
  source 1..20: mol_type = other RNA
aaaaaacacctaaagatatg

SEQ ID NO: 9946 - RNA, 20 nt, synthetic construct
  source 1..20: mol_type = other RNA
aaaaaacagaaatgaaatgg

SEQ ID NO: 9947 - RNA, 20 nt, synthetic construct
  source 1..20: mol_type = other RNA
aaaaaacagttgctattcaa

SEQ ID NO: 9948 - RNA, 20 nt, synthetic construct
  source 1..20: mol_type = other RNA
aaaaaaccacgcagaacagt

SEQ ID NO: 9949 - RNA, 20 nt, synthetic construct
  source 1..20: mol_type = other RNA
aaaaaaccactggatacgga

SEQ ID NO: 9950 - RNA, 20 nt, synthetic construct
  source 1..20: mol_type = other RNA
aaaaaacccagacctgcaca

SEQ ID NO: 9951 - RNA, 20 nt, synthetic construct
  source 1..20: mol_type = other RNA
aaaaaacgcggcacttggta

SEQ ID NO: 9952 - RNA, 20 nt, synthetic construct
  source 1..20: mol_type = other RNA
aaaaaacgggttatacacac

SEQ ID NO: 9953 - RNA, 20 nt, synthetic construct
  source 1..20: mol_type = other RNA
aaaaaactacgagtatcata

SEQ ID NO: 9954 - RNA, 20 nt, synthetic construct
  source 1..20: mol_type = other RNA
aaaaaactacttcgtgtgtg

SEQ ID NO: 9955 - RNA, 20 nt, synthetic construct
  source 1..20: mol_type = other RNA
aaaaaactcaacattcattc

SEQ ID NO: 9956 - RNA, 20 nt, synthetic construct
  source 1..20: mol_type = other RNA
aaaaaacttatgcaagatgg

SEQ ID NO: 9957 - RNA, 20 nt, synthetic construct
  source 1..20: mol_type = other RNA
aaaaaacttcccttagctct

SEQ ID NO: 9958 - RNA, 20 nt, synthetic construct
  source 1..20: mol_type = other RNA
aaaaaacttcgaactaagga

SEQ ID NO: 9959 - RNA, 20 nt, synthetic construct
  source 1..20: mol_type = other RNA
aaaaaagaacactataagcc

SEQ ID NO: 9960 - RNA, 20 nt, synthetic construct
  source 1..20: mol_type = other RNA
aaaaaagaaggccgtcccta

SEQ ID NO: 9961 - RNA, 20 nt, synthetic construct
  source 1..20: mol_type = other RNA
aaaaaagacagagctagaac

SEQ ID NO: 9962 - RNA, 20 nt, synthetic construct
  source 1..20: mol_type = other RNA
aaaaaagacgatattcctat

SEQ ID NO: 9963 - RNA, 20 nt, synthetic construct
  source 1..20: mol_type = other RNA
aaaaaagagaacttgcacat

SEQ ID NO: 9964 - RNA, 20 nt, synthetic construct
  source 1..20: mol_type = other RNA
aaaaaagatgtgtaccaaaa

SEQ ID NO: 9965 - RNA, 20 nt, synthetic construct
  source 1..20: mol_type = other RNA
aaaaaagatgttttcagttg

SEQ ID NO: 9966 - RNA, 20 nt, synthetic construct
  source 1..20: mol_type = other RNA
aaaaaagcaccagttatcac

SEQ ID NO: 9967 - RNA, 20 nt, synthetic construct
  source 1..20: mol_type = other RNA
aaaaaagcagacagaaagac

SEQ ID NO: 9968 - RNA, 20 nt, synthetic construct
  source 1..20: mol_type = other RNA
aaaaaagctatacacgttac

SEQ ID NO: 9969 - RNA, 20 nt, synthetic construct
  source 1..20: mol_type = other RNA
aaaaaagctcagtgtgtttt

SEQ ID NO: 9970 - RNA, 20 nt, synthetic construct
  source 1..20: mol_type = other RNA
aaaaaaggaatctgacctaa

SEQ ID NO: 9971 - RNA, 20 nt, synthetic construct
  source 1..20: mol_type = other RNA
aaaaaaggaatctgggccgg

SEQ ID NO: 9972 - RNA, 20 nt, synthetic construct
  source 1..20: mol_type = other RNA
aaaaaaggacacaaattatg

SEQ ID NO: 9973 - RNA, 20 nt, synthetic construct
  source 1..20: mol_type = other RNA
aaaaaaggaccatctgttaa

SEQ ID NO: 9974 - RNA, 20 nt, synthetic construct
  source 1..20: mol_type = other RNA
aaaaaagggtgggggcatca

SEQ ID NO: 9975 - RNA, 20 nt, synthetic construct
  source 1..20: mol_type = other RNA
aaaaaaggtgctgttgtatt

SEQ ID NO: 9976 - RNA, 20 nt, synthetic construct
  source 1..20: mol_type = other RNA
aaaaaaggtttttgaacaag

SEQ ID NO: 9977 - RNA, 20 nt, synthetic construct
  source 1..20: mol_type = other RNA
aaaaaagtcatgacctgctt

SEQ ID NO: 9978 - RNA, 20 nt, synthetic construct
  source 1..20: mol_type = other RNA
aaaaaagttttttcctttgc

SEQ ID NO: 9979 - RNA, 20 nt, synthetic construct
  source 1..20: mol_type = other RNA
aaaaaataaaggctttcgta

SEQ ID NO: 9980 - RNA, 20 nt, synthetic construct
  source 1..20: mol_type = other RNA
aaaaaataaagttccccatt

SEQ ID NO: 9981 - RNA, 20 nt, synthetic construct
  source 1..20: mol_type = other RNA
aaaaaatacatgtcatgttc

SEQ ID NO: 9982 - RNA, 20 nt, synthetic construct
  source 1..20: mol_type = other RNA
aaaaaataccaaaaaaggtg

SEQ ID NO: 9983 - RNA, 20 nt, synthetic construct
  source 1..20: mol_type = other RNA
aaaaaatacggccgggagtg

SEQ ID NO: 9984 - RNA, 20 nt, synthetic construct
  source 1..20: mol_type = other RNA
aaaaaatcaaaagaccaaga

SEQ ID NO: 9985 - RNA, 20 nt, synthetic construct
  source 1..20: mol_type = other RNA
aaaaaatcctgctgggctat

SEQ ID NO: 9986 - RNA, 20 nt, synthetic construct
  source 1..20: mol_type = other RNA
aaaaaatcttaaagatgcca

SEQ ID NO: 9987 - RNA, 20 nt, synthetic construct
  source 1..20: mol_type = other RNA
aaaaaatgcagtagtaaagc

SEQ ID NO: 9988 - RNA, 20 nt, synthetic construct
  source 1..20: mol_type = other RNA
aaaaaatgcgcgtccgcgac

SEQ ID NO: 9989 - RNA, 20 nt, synthetic construct
  source 1..20: mol_type = other RNA
aaaaaatgctttttctgcat

SEQ ID NO: 9990 - RNA, 20 nt, synthetic construct
  source 1..20: mol_type = other RNA
aaaaaatggtgcagccacta

SEQ ID NO: 9991 - RNA, 20 nt, synthetic construct
  source 1..20: mol_type = other RNA
aaaaaatgtaaattctgcca

SEQ ID NO: 9992 - RNA, 20 nt, synthetic construct
  source 1..20: mol_type = other RNA
aaaaaatgtggcatatcaca

SEQ ID NO: 9993 - RNA, 20 nt, synthetic construct
  source 1..20: mol_type = other RNA
aaaaaatgtggcatttctta

SEQ ID NO: 9994 - RNA, 20 nt, synthetic construct
  source 1..20: mol_type = other RNA
aaaaaatgttttaaggcagg

SEQ ID NO: 9995 - RNA, 20 nt, synthetic construct
  source 1..20: mol_type = other RNA
aaaaaattaaggaatgccta

SEQ ID NO: 9996 - RNA, 20 nt, synthetic construct
  source 1..20: mol_type = other RNA
aaaaaattaatgccccatgt

SEQ ID NO: 9997 - RNA, 20 nt, synthetic construct
  source 1..20: mol_type = other RNA
aaaaaattagccttttacac

SEQ ID NO: 9998 - RNA, 20 nt, synthetic construct
  source 1..20: mol_type = other RNA
aaaaaattctgttctcagta

SEQ ID NO: 9999 - RNA, 20 nt, synthetic construct
  source 1..20: mol_type = other RNA
aaaaaattgcaggtttactc

SEQ ID NO: 10000 - RNA, 20 nt, synthetic construct
  source 1..20: mol_type = other RNA
aaaaacaaaaaaccactgga

SEQ ID NO: 10001 - RNA, 20 nt, synthetic construct
  source 1..20: mol_type = other RNA
aaaaacaaaacaaaaccctg

SEQ ID NO: 10002 - RNA, 20 nt, synthetic construct
  source 1..20: mol_type = other RNA
aaaaacaaaagagtagattc

SEQ ID NO: 10003 - RNA, 20 nt, synthetic construct
  source 1..20: mol_type = other RNA
aaaaacaacactaaccaaca

SEQ ID NO: 10004 - RNA, 20 nt, synthetic construct
  source 1..20: mol_type = other RNA
aaaaacacactgagcttttt

SEQ ID NO: 10005 - RNA, 20 nt, synthetic construct
  source 1..20: mol_type = other RNA
aaaaacacagggactgatga

SEQ ID NO: 10006 - RNA, 20 nt, synthetic construct
  source 1..20: mol_type = other RNA
aaaaacaccaaaaaagcacc

SEQ ID NO: 10007 - RNA, 20 nt, synthetic construct
  source 1..20: mol_type = other RNA
aaaaacacctaaagatatgt

SEQ ID NO: 10008 - RNA, 20 nt, synthetic construct
  source 1..20: mol_type = other RNA
aaaaacacctcagttaaacc

SEQ ID NO: 10009 - RNA, 20 nt, synthetic construct
  source 1..20: mol_type = other RNA
aaaaacactgtattttgaac

SEQ ID NO: 10010 - RNA, 20 nt, synthetic construct
  source 1..20: mol_type = other RNA
aaaaacagaaatgaaatggc

SEQ ID NO: 10011 - RNA, 20 nt, synthetic construct
  source 1..20: mol_type = other RNA
aaaaacagaagacacaaaat

SEQ ID NO: 10012 - RNA, 20 nt, synthetic construct
  source 1..20: mol_type = other RNA
aaaaacagatcttggccgaa

SEQ ID NO: 10013 - RNA, 20 nt, synthetic construct
  source 1..20: mol_type = other RNA
aaaaacagcatatacatgac

SEQ ID NO: 10014 - RNA, 20 nt, synthetic construct
  source 1..20: mol_type = other RNA
aaaaacagttgctattcaac

SEQ ID NO: 10015 - RNA, 20 nt, synthetic construct
  source 1..20: mol_type = other RNA
aaaaacagtttccctctgag

SEQ ID NO: 10016 - RNA, 20 nt, synthetic construct
  source 1..20: mol_type = other RNA
aaaaacatatgcaggaccaa

SEQ ID NO: 10017 - RNA, 20 nt, synthetic construct
  source 1..20: mol_type = other RNA
aaaaacatccattactcgtg

SEQ ID NO: 10018 - RNA, 20 nt, synthetic construct
  source 1..20: mol_type = other RNA
aaaaacattggaggataata

SEQ ID NO: 10019 - RNA, 20 nt, synthetic construct
  source 1..20: mol_type = other RNA
aaaaaccaaacactggaaat

SEQ ID NO: 10020 - RNA, 20 nt, synthetic construct
  source 1..20: mol_type = other RNA
aaaaaccacatttcatagca

SEQ ID NO: 10021 - RNA, 20 nt, synthetic construct
  source 1..20: mol_type = other RNA
aaaaaccacgcagaacagtg

SEQ ID NO: 10022 - RNA, 20 nt, synthetic construct
  source 1..20: mol_type = other RNA
aaaaaccactggatacggaa

SEQ ID NO: 10023 - RNA, 20 nt, synthetic construct
  source 1..20: mol_type = other RNA
aaaaacccaactctttcttt

SEQ ID NO: 10024 - RNA, 20 nt, synthetic construct
  source 1..20: mol_type = other RNA
aaaaacccagacctgcacaa

SEQ ID NO: 10025 - RNA, 20 nt, synthetic construct
  source 1..20: mol_type = other RNA
aaaaacctaaacctgtgatt

SEQ ID NO: 10026 - RNA, 20 nt, synthetic construct
  source 1..20: mol_type = other RNA
aaaaacctcccaacaggctg

SEQ ID NO: 10027 - RNA, 20 nt, synthetic construct
  source 1..20: mol_type = other RNA
aaaaacctttttgggatctg

SEQ ID NO: 10028 - RNA, 20 nt, synthetic construct
  source 1..20: mol_type = other RNA
aaaaacgcggcacttggtaa

SEQ ID NO: 10029 - RNA, 20 nt, synthetic construct
  source 1..20: mol_type = other RNA
aaaaacggaggttgcagtaa

SEQ ID NO: 10030 - RNA, 20 nt, synthetic construct
  source 1..20: mol_type = other RNA
aaaaacgggttatacacaca

SEQ ID NO: 10031 - RNA, 20 nt, synthetic construct
  source 1..20: mol_type = other RNA
aaaaacgtgcaaactaccaa

SEQ ID NO: 10032 - RNA, 20 nt, synthetic construct
  source 1..20: mol_type = other RNA
aaaaactacgagtatcatat

SEQ ID NO: 10033 - RNA, 20 nt, synthetic construct
  source 1..20: mol_type = other RNA
aaaaactacttcgtgtgtgg

SEQ ID NO: 10034 - RNA, 20 nt, synthetic construct
  source 1..20: mol_type = other RNA
aaaaactcaacattcattca

SEQ ID NO: 10035 - RNA, 20 nt, synthetic construct
  source 1..20: mol_type = other RNA
aaaaactgaactacagtgtt

SEQ ID NO: 10036 - RNA, 20 nt, synthetic construct
  source 1..20: mol_type = other RNA
aaaaactgaagtaataaagc

SEQ ID NO: 10037 - RNA, 20 nt, synthetic construct
  source 1..20: mol_type = other RNA
aaaaactgagaccggatgag

SEQ ID NO: 10038 - RNA, 20 nt, synthetic construct
  source 1..20: mol_type = other RNA
aaaaactgcagcaattattt

SEQ ID NO: 10039 - RNA, 20 nt, synthetic construct
  source 1..20: mol_type = other RNA
aaaaactgtttggctgggag

SEQ ID NO: 10040 - RNA, 20 nt, synthetic construct
  source 1..20: mol_type = other RNA
aaaaacttaagtatctcagt

SEQ ID NO: 10041 - RNA, 20 nt, synthetic construct
  source 1..20: mol_type = other RNA
aaaaacttaagtatctcggt

SEQ ID NO: 10042 - RNA, 20 nt, synthetic construct
  source 1..20: mol_type = other RNA
aaaaacttatgcaagatggc

SEQ ID NO: 10043 - RNA, 20 nt, synthetic construct
  source 1..20: mol_type = other RNA
aaaaacttcccttagctctc

SEQ ID NO: 10044 - RNA, 20 nt, synthetic construct
  source 1..20: mol_type = other RNA
aaaaacttcgaactaaggaa

SEQ ID NO: 10045 - RNA, 20 nt, synthetic construct
  source 1..20: mol_type = other RNA
aaaaactttttgggcctttc

SEQ ID NO: 10046 - RNA, 20 nt, synthetic construct
  source 1..20: mol_type = other RNA
aaaaagaaaaagctcacctc

SEQ ID NO: 10047 - RNA, 20 nt, synthetic construct
  source 1..20: mol_type = other RNA
aaaaagaaaaagttgggctt

SEQ ID NO: 10048 - RNA, 20 nt, synthetic construct
  source 1..20: mol_type = other RNA
aaaaagaaaagacaagacta

SEQ ID NO: 10049 - RNA, 20 nt, synthetic construct
  source 1..20: mol_type = other RNA
aaaaagaaatctgcatccaa

SEQ ID NO: 10050 - RNA, 20 nt, synthetic construct
  source 1..20: mol_type = other RNA
aaaaagaacactataagcca

SEQ ID NO: 10051 - RNA, 20 nt, synthetic construct
  source 1..20: mol_type = other RNA
aaaaagaaggccgtccctat

SEQ ID NO: 10052 - RNA, 20 nt, synthetic construct
  source 1..20: mol_type = other RNA
aaaaagaataagctaatccc

SEQ ID NO: 10053 - RNA, 20 nt, synthetic construct
  source 1..20: mol_type = other RNA
aaaaagacaagtactgcatg

SEQ ID NO: 10054 - RNA, 20 nt, synthetic construct
  source 1..20: mol_type = other RNA
aaaaagacacaaaagagctg

SEQ ID NO: 10055 - RNA, 20 nt, synthetic construct
  source 1..20: mol_type = other RNA
aaaaagacagagctagaact

SEQ ID NO: 10056 - RNA, 20 nt, synthetic construct
  source 1..20: mol_type = other RNA
aaaaagacgatattcctatc

SEQ ID NO: 10057 - RNA, 20 nt, synthetic construct
  source 1..20: mol_type = other RNA
aaaaagagaaaaattacagg

SEQ ID NO: 10058 - RNA, 20 nt, synthetic construct
  source 1..20: mol_type = other RNA
aaaaagagaacacacaattt

SEQ ID NO: 10059 - RNA, 20 nt, synthetic construct
  source 1..20: mol_type = other RNA
aaaaagagaacttgcacata

SEQ ID NO: 10060 - RNA, 20 nt, synthetic construct
  source 1..20: mol_type = other RNA
aaaaagatcaaatgactatg

SEQ ID NO: 10061 - RNA, 20 nt, synthetic construct
  source 1..20: mol_type = other RNA
aaaaagatctgtggacttta

SEQ ID NO: 10062 - RNA, 20 nt, synthetic construct
  source 1..20: mol_type = other RNA
aaaaagatgtgtaccaaaag

SEQ ID NO: 10063 - RNA, 20 nt, synthetic construct
  source 1..20: mol_type = other RNA
aaaaagatgttttcagttgc

SEQ ID NO: 10064 - RNA, 20 nt, synthetic construct
  source 1..20: mol_type = other RNA
aaaaagcaacttgaaggcaa

SEQ ID NO: 10065 - RNA, 20 nt, synthetic construct
  source 1..20: mol_type = other RNA
aaaaagcaccagttatcacc

SEQ ID NO: 10066 - RNA, 20 nt, synthetic construct
  source 1..20: mol_type = other RNA
aaaaagcacctaccataaca

SEQ ID NO: 10067 - RNA, 20 nt, synthetic construct
  source 1..20: mol_type = other RNA
aaaaagcactatccacattt

SEQ ID NO: 10068 - RNA, 20 nt, synthetic construct
  source 1..20: mol_type = other RNA
aaaaagcagacagaaagaca

SEQ ID NO: 10069 - RNA, 20 nt, synthetic construct
  source 1..20: mol_type = other RNA
aaaaagcagagaaactggaa

SEQ ID NO: 10070 - RNA, 20 nt, synthetic construct
  source 1..20: mol_type = other RNA
aaaaagcagctacctgttga

SEQ ID NO: 10071 - RNA, 20 nt, synthetic construct
  source 1..20: mol_type = other RNA
aaaaagccatttatcagcac

SEQ ID NO: 10072 - RNA, 20 nt, synthetic construct
  source 1..20: mol_type = other RNA
aaaaagcctctctgatggaa

SEQ ID NO: 10073 - RNA, 20 nt, synthetic construct
  source 1..20: mol_type = other RNA
aaaaagcctctgtggaccat

SEQ ID NO: 10074 - RNA, 20 nt, synthetic construct
  source 1..20: mol_type = other RNA
aaaaagcctgcttcagccta

SEQ ID NO: 10075 - RNA, 20 nt, synthetic construct
  source 1..20: mol_type = other RNA
aaaaagcgttggagacagcc

SEQ ID NO: 10076 - RNA, 20 nt, synthetic construct
  source 1..20: mol_type = other RNA
aaaaagctatacacgttaca

SEQ ID NO: 10077 - RNA, 20 nt, synthetic construct
  source 1..20: mol_type = other RNA
aaaaagctcacctctggact

SEQ ID NO: 10078 - RNA, 20 nt, synthetic construct
  source 1..20: mol_type = other RNA
aaaaagctcagtgtgttttt

SEQ ID NO: 10079 - RNA, 20 nt, synthetic construct
  source 1..20: mol_type = other RNA
aaaaaggaaagtaactgttg

SEQ ID NO: 10080 - RNA, 20 nt, synthetic construct
  source 1..20: mol_type = other RNA
aaaaaggaatctgacctaag

SEQ ID NO: 10081 - RNA, 20 nt, synthetic construct
  source 1..20: mol_type = other RNA
aaaaaggaatctgggccggg

SEQ ID NO: 10082 - RNA, 20 nt, synthetic construct
  source 1..20: mol_type = other RNA
aaaaaggacacaaattatga

SEQ ID NO: 10083 - RNA, 20 nt, synthetic construct
  source 1..20: mol_type = other RNA
aaaaaggaccatctgttaaa

SEQ ID NO: 10084 - RNA, 20 nt, synthetic construct
  source 1..20: mol_type = other RNA
aaaaaggagggaaaatgttt

SEQ ID NO: 10085 - RNA, 20 nt, synthetic construct
  source 1..20: mol_type = other RNA
aaaaagggagtcagtagagg

SEQ ID NO: 10086 - RNA, 20 nt, synthetic construct
  source 1..20: mol_type = other RNA
aaaaagggtgggggcatcaa

SEQ ID NO: 10087 - RNA, 20 nt, synthetic construct
  source 1..20: mol_type = other RNA
aaaaaggtgctgttgtattt

SEQ ID NO: 10088 - RNA, 20 nt, synthetic construct
  source 1..20: mol_type = other RNA
aaaaaggttaagggaagagc

SEQ ID NO: 10089 - RNA, 20 nt, synthetic construct
  source 1..20: mol_type = other RNA
aaaaaggtttttgaacaaga

SEQ ID NO: 10090 - RNA, 20 nt, synthetic construct
  source 1..20: mol_type = other RNA
aaaaagtactggaaatggac

SEQ ID NO: 10091 - RNA, 20 nt, synthetic construct
  source 1..20: mol_type = other RNA
aaaaagtaggggtaaatctt

SEQ ID NO: 10092 - RNA, 20 nt, synthetic construct
  source 1..20: mol_type = other RNA
aaaaagtatcgtgagactat

SEQ ID NO: 10093 - RNA, 20 nt, synthetic construct
  source 1..20: mol_type = other RNA
aaaaagtcatgacctgcttt

SEQ ID NO: 10094 - RNA, 20 nt, synthetic construct
  source 1..20: mol_type = other RNA
aaaaagtgacttctggatgt

SEQ ID NO: 10095 - RNA, 20 nt, synthetic construct
  source 1..20: mol_type = other RNA
aaaaagtgataccataaagt

SEQ ID NO: 10096 - RNA, 20 nt, synthetic construct
  source 1..20: mol_type = other RNA
aaaaagtgcttctagtaact

SEQ ID NO: 10097 - RNA, 20 nt, synthetic construct
  source 1..20: mol_type = other RNA
aaaaagtgtgaccacattcc

SEQ ID NO: 10098 - RNA, 20 nt, synthetic construct
  source 1..20: mol_type = other RNA
aaaaagttgggcttggttgg

SEQ ID NO: 10099 - RNA, 20 nt, synthetic construct
  source 1..20: mol_type = other RNA
aaaaagttttttcctttgcc

SEQ ID NO: 10100 - RNA, 20 nt, synthetic construct
  source 1..20: mol_type = other RNA
aaaaataaagacttcacgat

SEQ ID NO: 10101 - RNA, 20 nt, synthetic construct
  source 1..20: mol_type = other RNA
aaaaataaaggctttcgtat

SEQ ID NO: 10102 - RNA, 20 nt, synthetic construct
  source 1..20: mol_type = other RNA
aaaaataaagttccccattg

SEQ ID NO: 10103 - RNA, 20 nt, synthetic construct
  source 1..20: mol_type = other RNA
aaaaataacgggccgggcgc

SEQ ID NO: 10104 - RNA, 20 nt, synthetic construct
  source 1..20: mol_type = other RNA
aaaaataatatgataccctc

SEQ ID NO: 10105 - RNA, 20 nt, synthetic construct
  source 1..20: mol_type = other RNA
aaaaatacagctccaaagaa

SEQ ID NO: 10106 - RNA, 20 nt, synthetic construct
  source 1..20: mol_type = other RNA
aaaaatacatgtcatgttcc

SEQ ID NO: 10107 - RNA, 20 nt, synthetic construct
  source 1..20: mol_type = other RNA
aaaaataccaaaaaaggtgc

SEQ ID NO: 10108 - RNA, 20 nt, synthetic construct
  source 1..20: mol_type = other RNA
aaaaatacgaaagtgctcta

SEQ ID NO: 10109 - RNA, 20 nt, synthetic construct
  source 1..20: mol_type = other RNA
aaaaatacggccgggagtgg

SEQ ID NO: 10110 - RNA, 20 nt, synthetic construct
  source 1..20: mol_type = other RNA
aaaaatactacaagagttcc

SEQ ID NO: 10111 - RNA, 20 nt, synthetic construct
  source 1..20: mol_type = other RNA
aaaaatactcaagggctttc

SEQ ID NO: 10112 - RNA, 20 nt, synthetic construct
  source 1..20: mol_type = other RNA
aaaaatacttaagagcatgt

SEQ ID NO: 10113 - RNA, 20 nt, synthetic construct
  source 1..20: mol_type = other RNA
aaaaatagaggatgggcatt

SEQ ID NO: 10114 - RNA, 20 nt, synthetic construct
  source 1..20: mol_type = other RNA
aaaaatatagaaggccagag

SEQ ID NO: 10115 - RNA, 20 nt, synthetic construct
  source 1..20: mol_type = other RNA
aaaaatcaaaagaccaagaa

SEQ ID NO: 10116 - RNA, 20 nt, synthetic construct
  source 1..20: mol_type = other RNA
aaaaatcaaagaaagagttg

SEQ ID NO: 10117 - RNA, 20 nt, synthetic construct
  source 1..20: mol_type = other RNA
aaaaatcaacccatgaaaat

SEQ ID NO: 10118 - RNA, 20 nt, synthetic construct
  source 1..20: mol_type = other RNA
aaaaatcagattaagcatag

SEQ ID NO: 10119 - RNA, 20 nt, synthetic construct
  source 1..20: mol_type = other RNA
aaaaatcctgctgggctatt

SEQ ID NO: 10120 - RNA, 20 nt, synthetic construct
  source 1..20: mol_type = other RNA
aaaaatcgtcctcttcgggt

SEQ ID NO: 10121 - RNA, 20 nt, synthetic construct
  source 1..20: mol_type = other RNA
aaaaatctaaccctcaatcc

SEQ ID NO: 10122 - RNA, 20 nt, synthetic construct
  source 1..20: mol_type = other RNA
aaaaatctctacagggaacc

SEQ ID NO: 10123 - RNA, 20 nt, synthetic construct
  source 1..20: mol_type = other RNA
aaaaatcttaaagatgccat

SEQ ID NO: 10124 - RNA, 20 nt, synthetic construct
  source 1..20: mol_type = other RNA
aaaaatgacacaacttacta

SEQ ID NO: 10125 - RNA, 20 nt, synthetic construct
  source 1..20: mol_type = other RNA
aaaaatgacaccaaaactac

SEQ ID NO: 10126 - RNA, 20 nt, synthetic construct
  source 1..20: mol_type = other RNA
aaaaatgagaaacctaagaa

SEQ ID NO: 10127 - RNA, 20 nt, synthetic construct
  source 1..20: mol_type = other RNA
aaaaatgcagtagtaaagca

SEQ ID NO: 10128 - RNA, 20 nt, synthetic construct
  source 1..20: mol_type = other RNA
aaaaatgcgcgtccgcgacc

SEQ ID NO: 10129 - RNA, 20 nt, synthetic construct
  source 1..20: mol_type = other RNA
aaaaatgctttttctgcatc

SEQ ID NO: 10130 - RNA, 20 nt, synthetic construct
  source 1..20: mol_type = other RNA
aaaaatggcacatactgcat

SEQ ID NO: 10131 - RNA, 20 nt, synthetic construct
  source 1..20: mol_type = other RNA
aaaaatggggatatccaaag

SEQ ID NO: 10132 - RNA, 20 nt, synthetic construct
  source 1..20: mol_type = other RNA
aaaaatggtcaacatgaaaa

SEQ ID NO: 10133 - RNA, 20 nt, synthetic construct
  source 1..20: mol_type = other RNA
aaaaatggtgcagccactat

SEQ ID NO: 10134 - RNA, 20 nt, synthetic construct
  source 1..20: mol_type = other RNA
aaaaatggttttatggtaac

SEQ ID NO: 10135 - RNA, 20 nt, synthetic construct
  source 1..20: mol_type = other RNA
aaaaatgtaaattctgccac

SEQ ID NO: 10136 - RNA, 20 nt, synthetic construct
  source 1..20: mol_type = other RNA
aaaaatgtcaattttccccc

SEQ ID NO: 10137 - RNA, 20 nt, synthetic construct
  source 1..20: mol_type = other RNA
aaaaatgtccgttgaagtct

SEQ ID NO: 10138 - RNA, 20 nt, synthetic construct
  source 1..20: mol_type = other RNA
aaaaatgtggcatatcacat

SEQ ID NO: 10139 - RNA, 20 nt, synthetic construct
  source 1..20: mol_type = other RNA
aaaaatgtggcatttcttac

SEQ ID NO: 10140 - RNA, 20 nt, synthetic construct
  source 1..20: mol_type = other RNA
aaaaatgtgtctagtgaatg

SEQ ID NO: 10141 - RNA, 20 nt, synthetic construct
  source 1..20: mol_type = other RNA
aaaaatgtttaattacccag

SEQ ID NO: 10142 - RNA, 20 nt, synthetic construct
  source 1..20: mol_type = other RNA
aaaaatgttttaaggcaggg

SEQ ID NO: 10143 - RNA, 20 nt, synthetic construct
  source 1..20: mol_type = other RNA
aaaaattaaggaatgcctat

SEQ ID NO: 10144 - RNA, 20 nt, synthetic construct
  source 1..20: mol_type = other RNA
aaaaattaatgccccatgtg

SEQ ID NO: 10145 - RNA, 20 nt, synthetic construct
  source 1..20: mol_type = other RNA
aaaaattacaactggtttct

SEQ ID NO: 10146 - RNA, 20 nt, synthetic construct
  source 1..20: mol_type = other RNA
aaaaattacaggtcaaactc

SEQ ID NO: 10147 - RNA, 20 nt, synthetic construct
  source 1..20: mol_type = other RNA
aaaaattagccttttacacc

SEQ ID NO: 10148 - RNA, 20 nt, synthetic construct
  source 1..20: mol_type = other RNA
aaaaattagctgggcgagat

SEQ ID NO: 10149 - RNA, 20 nt, synthetic construct
  source 1..20: mol_type = other RNA
aaaaattcactcctcattca

SEQ ID NO: 10150 - RNA, 20 nt, synthetic construct
  source 1..20: mol_type = other RNA
aaaaattccctcagcaaaag

SEQ ID NO: 10151 - RNA, 20 nt, synthetic construct
  source 1..20: mol_type = other RNA
aaaaattccgctctggtttt

SEQ ID NO: 10152 - RNA, 20 nt, synthetic construct
  source 1..20: mol_type = other RNA
aaaaattctgttctcagtat

SEQ ID NO: 10153 - RNA, 20 nt, synthetic construct
  source 1..20: mol_type = other RNA
aaaaattgcaggtttactcc

SEQ ID NO: 10154 - RNA, 20 nt, synthetic construct
  source 1..20: mol_type = other RNA
aaaaatttgacatgacaggt

SEQ ID NO: 10155 - RNA, 20 nt, synthetic construct
  source 1..20: mol_type = other RNA
aaaaattttcattctacctg

SEQ ID NO: 10156 - RNA, 20 nt, synthetic construct
  source 1..20: mol_type = other RNA
aaaaattttctcccaaggtt

SEQ ID NO: 10157 - RNA, 20 nt, synthetic construct
  source 1..20: mol_type = other RNA
aaaaattttgttcaggagtt

SEQ ID NO: 10158 - RNA, 20 nt, synthetic construct
  source 1..20: mol_type = other RNA
aaaacaaaaaacaaaccccc

SEQ ID NO: 10159 - RNA, 20 nt, synthetic construct
  source 1..20: mol_type = other RNA
aaaacaaaaaaccactggat

SEQ ID NO: 10160 - RNA, 20 nt, synthetic construct
  source 1..20: mol_type = other RNA
aaaacaaaacaaaaccctgt

SEQ ID NO: 10161 - RNA, 20 nt, synthetic construct
  source 1..20: mol_type = other RNA
aaaacaaaacaaagtctttg

SEQ ID NO: 10162 - RNA, 20 nt, synthetic construct
  source 1..20: mol_type = other RNA
aaaacaaaacacatggcatc

SEQ ID NO: 10163 - RNA, 20 nt, synthetic construct
  source 1..20: mol_type = other RNA
aaaacaaaaccctgttgggc

SEQ ID NO: 10164 - RNA, 20 nt, synthetic construct
  source 1..20: mol_type = other RNA
aaaacaaaagagtagattcc

SEQ ID NO: 10165 - RNA, 20 nt, synthetic construct
  source 1..20: mol_type = other RNA
aaaacaaacaaacagaaagg

SEQ ID NO: 10166 - RNA, 20 nt, synthetic construct
  source 1..20: mol_type = other RNA
aaaacaaagtctttgggtaa

SEQ ID NO: 10167 - RNA, 20 nt, synthetic construct
  source 1..20: mol_type = other RNA
aaaacaaatggaaccactgt

SEQ ID NO: 10168 - RNA, 20 nt, synthetic construct
  source 1..20: mol_type = other RNA
aaaacaaattcatgcaactg

SEQ ID NO: 10169 - RNA, 20 nt, synthetic construct
  source 1..20: mol_type = other RNA
aaaacaaattccctctacaa

SEQ ID NO: 10170 - RNA, 20 nt, synthetic construct
  source 1..20: mol_type = other RNA
aaaacaaattgcatcaactg

SEQ ID NO: 10171 - RNA, 20 nt, synthetic construct
  source 1..20: mol_type = other RNA
aaaacaacactaaccaacat

SEQ ID NO: 10172 - RNA, 20 nt, synthetic construct
  source 1..20: mol_type = other RNA
aaaacaagaagaaaaagcaa

SEQ ID NO: 10173 - RNA, 20 nt, synthetic construct
  source 1..20: mol_type = other RNA
aaaacaataagacaccgctc

SEQ ID NO: 10174 - RNA, 20 nt, synthetic construct
  source 1..20: mol_type = other RNA
aaaacaatagcccagcagga

SEQ ID NO: 10175 - RNA, 20 nt, synthetic construct
  source 1..20: mol_type = other RNA
aaaacaattacttgagagca

SEQ ID NO: 10176 - RNA, 20 nt, synthetic construct
  source 1..20: mol_type = other RNA
aaaacacaaactgcagaatg

SEQ ID NO: 10177 - RNA, 20 nt, synthetic construct
  source 1..20: mol_type = other RNA
aaaacacaacataccaaaac

SEQ ID NO: 10178 - RNA, 20 nt, synthetic construct
  source 1..20: mol_type = other RNA
aaaacacaaggacaggtcac

SEQ ID NO: 10179 - RNA, 20 nt, synthetic construct
  source 1..20: mol_type = other RNA
aaaacacacgggtacacatc

SEQ ID NO: 10180 - RNA, 20 nt, synthetic construct
  source 1..20: mol_type = other RNA
aaaacacactgagctttttt

SEQ ID NO: 10181 - RNA, 20 nt, synthetic construct
  source 1..20: mol_type = other RNA
aaaacacagggactgatgaa

SEQ ID NO: 10182 - RNA, 20 nt, synthetic construct
  source 1..20: mol_type = other RNA
aaaacacatggcatcggggc

SEQ ID NO: 10183 - RNA, 20 nt, synthetic construct
  source 1..20: mol_type = other RNA
aaaacacatgtcatgggccg

SEQ ID NO: 10184 - RNA, 20 nt, synthetic construct
  source 1..20: mol_type = other RNA
aaaacaccaaaaaagcacca

SEQ ID NO: 10185 - RNA, 20 nt, synthetic construct
  source 1..20: mol_type = other RNA
aaaacacccttgaaaatttc

SEQ ID NO: 10186 - RNA, 20 nt, synthetic construct
  source 1..20: mol_type = other RNA
aaaacacctaaagatatgtg

SEQ ID NO: 10187 - RNA, 20 nt, synthetic construct
  source 1..20: mol_type = other RNA
aaaacacctcagttaaaccc

SEQ ID NO: 10188 - RNA, 20 nt, synthetic construct
  source 1..20: mol_type = other RNA
aaaacactccagaatgaccg

SEQ ID NO: 10189 - RNA, 20 nt, synthetic construct
  source 1..20: mol_type = other RNA
aaaacactggaagtaattgg

SEQ ID NO: 10190 - RNA, 20 nt, synthetic construct
  source 1..20: mol_type = other RNA
aaaacactggcaaaaatcat

SEQ ID NO: 10191 - RNA, 20 nt, synthetic construct
  source 1..20: mol_type = other RNA
aaaacactgtattttgaaca

SEQ ID NO: 10192 - RNA, 20 nt, synthetic construct
  source 1..20: mol_type = other RNA
aaaacacttctgtgatcaga

SEQ ID NO: 10193 - RNA, 20 nt, synthetic construct
  source 1..20: mol_type = other RNA
aaaacagaaatgaaatggcc

SEQ ID NO: 10194 - RNA, 20 nt, synthetic construct
  source 1..20: mol_type = other RNA
aaaacagaagacacaaaatc

SEQ ID NO: 10195 - RNA, 20 nt, synthetic construct
  source 1..20: mol_type = other RNA
aaaacagacccttatgtcca

SEQ ID NO: 10196 - RNA, 20 nt, synthetic construct
  source 1..20: mol_type = other RNA
aaaacagataacctagattt

SEQ ID NO: 10197 - RNA, 20 nt, synthetic construct
  source 1..20: mol_type = other RNA
aaaacagatcttggccgaat

SEQ ID NO: 10198 - RNA, 20 nt, synthetic construct
  source 1..20: mol_type = other RNA
aaaacagcatatacatgaca

SEQ ID NO: 10199 - RNA, 20 nt, synthetic construct
  source 1..20: mol_type = other RNA
aaaacagctaggtgagtgag

SEQ ID NO: 10200 - RNA, 20 nt, synthetic construct
  source 1..20: mol_type = other RNA
aaaacagcttcttgttagaa

SEQ ID NO: 10201 - RNA, 20 nt, synthetic construct
  source 1..20: mol_type = other RNA
aaaacaggaagttgagaaag

SEQ ID NO: 10202 - RNA, 20 nt, synthetic construct
  source 1..20: mol_type = other RNA
aaaacagggttattaacata

SEQ ID NO: 10203 - RNA, 20 nt, synthetic construct
  source 1..20: mol_type = other RNA
aaaacagttgctattcaaca

SEQ ID NO: 10204 - RNA, 20 nt, synthetic construct
  source 1..20: mol_type = other RNA
aaaacagtttccctctgaga

SEQ ID NO: 10205 - RNA, 20 nt, synthetic construct
  source 1..20: mol_type = other RNA
aaaacatacatgagaaatgt

SEQ ID NO: 10206 - RNA, 20 nt, synthetic construct
  source 1..20: mol_type = other RNA
aaaacatatccttctacatc

SEQ ID NO: 10207 - RNA, 20 nt, synthetic construct
  source 1..20: mol_type = other RNA
aaaacatatgcaggaccaac

SEQ ID NO: 10208 - RNA, 20 nt, synthetic construct
  source 1..20: mol_type = other RNA
aaaacatatgtcagatggta

SEQ ID NO: 10209 - RNA, 20 nt, synthetic construct
  source 1..20: mol_type = other RNA
aaaacatcaaagtcccctgt

SEQ ID NO: 10210 - RNA, 20 nt, synthetic construct
  source 1..20: mol_type = other RNA
aaaacatcatctaatttccc

SEQ ID NO: 10211 - RNA, 20 nt, synthetic construct
  source 1..20: mol_type = other RNA
aaaacatccattactcgtgg

SEQ ID NO: 10212 - RNA, 20 nt, synthetic construct
  source 1..20: mol_type = other RNA
aaaacatctggaaggaaaca

SEQ ID NO: 10213 - RNA, 20 nt, synthetic construct
  source 1..20: mol_type = other RNA
aaaacatggatatttggccg

SEQ ID NO: 10214 - RNA, 20 nt, synthetic construct
  source 1..20: mol_type = other RNA
aaaacatggccagtatctcc

SEQ ID NO: 10215 - RNA, 20 nt, synthetic construct
  source 1..20: mol_type = other RNA
aaaacatggtccacagaggc

SEQ ID NO: 10216 - RNA, 20 nt, synthetic construct
  source 1..20: mol_type = other RNA
aaaacatgttgtgtagaaat

SEQ ID NO: 10217 - RNA, 20 nt, synthetic construct
  source 1..20: mol_type = other RNA
aaaacatgttttcaaatgct

SEQ ID NO: 10218 - RNA, 20 nt, synthetic construct
  source 1..20: mol_type = other RNA
aaaacatgttttgttgttgt

SEQ ID NO: 10219 - RNA, 20 nt, synthetic construct
  source 1..20: mol_type = other RNA
aaaacattctacagtattac

SEQ ID NO: 10220 - RNA, 20 nt, synthetic construct
  source 1..20: mol_type = other RNA
aaaacattggaggataatat

SEQ ID NO: 10221 - RNA, 20 nt, synthetic construct
  source 1..20: mol_type = other RNA
aaaacatttttcttagttcc

SEQ ID NO: 10222 - RNA, 20 nt, synthetic construct
  source 1..20: mol_type = other RNA
aaaaccaaacactggaaatc

SEQ ID NO: 10223 - RNA, 20 nt, synthetic construct
  source 1..20: mol_type = other RNA
aaaaccaaagaaaggggaag

SEQ ID NO: 10224 - RNA, 20 nt, synthetic construct
  source 1..20: mol_type = other RNA
aaaaccaaatgtggatagtg

SEQ ID NO: 10225 - RNA, 20 nt, synthetic construct
  source 1..20: mol_type = other RNA
aaaaccacaaacatgaataa

SEQ ID NO: 10226 - RNA, 20 nt, synthetic construct
  source 1..20: mol_type = other RNA
aaaaccacatttcatagcag

SEQ ID NO: 10227 - RNA, 20 nt, synthetic construct
  source 1..20: mol_type = other RNA
aaaaccacgcagaacagtgt

SEQ ID NO: 10228 - RNA, 20 nt, synthetic construct
  source 1..20: mol_type = other RNA
aaaaccactggatacggaaa

SEQ ID NO: 10229 - RNA, 20 nt, synthetic construct
  source 1..20: mol_type = other RNA
aaaaccagaaaagtgaaaca

SEQ ID NO: 10230 - RNA, 20 nt, synthetic construct
  source 1..20: mol_type = other RNA
aaaaccagagcggaattttt

SEQ ID NO: 10231 - RNA, 20 nt, synthetic construct
  source 1..20: mol_type = other RNA
aaaaccaggaggtttgcact

SEQ ID NO: 10232 - RNA, 20 nt, synthetic construct
  source 1..20: mol_type = other RNA
aaaaccatgtcatgtatatg

SEQ ID NO: 10233 - RNA, 20 nt, synthetic construct
  source 1..20: mol_type = other RNA
aaaaccatttttcagaaatg

SEQ ID NO: 10234 - RNA, 20 nt, synthetic construct
  source 1..20: mol_type = other RNA
aaaacccaactctttctttg

SEQ ID NO: 10235 - RNA, 20 nt, synthetic construct
  source 1..20: mol_type = other RNA
aaaacccagacctgcacaaa

SEQ ID NO: 10236 - RNA, 20 nt, synthetic construct
  source 1..20: mol_type = other RNA
aaaacccatgatctttggaa

SEQ ID NO: 10237 - RNA, 20 nt, synthetic construct
  source 1..20: mol_type = other RNA
aaaaccctgttgggctatta

SEQ ID NO: 10238 - RNA, 20 nt, synthetic construct
  source 1..20: mol_type = other RNA
aaaacccttcatcatttgta

SEQ ID NO: 10239 - RNA, 20 nt, synthetic construct
  source 1..20: mol_type = other RNA
aaaacccttgggatgcagca

SEQ ID NO: 10240 - RNA, 20 nt, synthetic construct
  source 1..20: mol_type = other RNA
aaaaccgacagcagataaga

SEQ ID NO: 10241 - RNA, 20 nt, synthetic construct
  source 1..20: mol_type = other RNA
aaaacctaaacctgtgattt

SEQ ID NO: 10242 - RNA, 20 nt, synthetic construct
  source 1..20: mol_type = other RNA
aaaacctcccaacaggctga

SEQ ID NO: 10243 - RNA, 20 nt, synthetic construct
  source 1..20: mol_type = other RNA
aaaacctgaaatggcttaag

SEQ ID NO: 10244 - RNA, 20 nt, synthetic construct
  source 1..20: mol_type = other RNA
aaaacctggaatgggttgga

SEQ ID NO: 10245 - RNA, 20 nt, synthetic construct
  source 1..20: mol_type = other RNA
aaaacctggtaataatgaaa

SEQ ID NO: 10246 - RNA, 20 nt, synthetic construct
  source 1..20: mol_type = other RNA
aaaacctggtatgagtgttt

SEQ ID NO: 10247 - RNA, 20 nt, synthetic construct
  source 1..20: mol_type = other RNA
aaaacctttttgggatctgt

SEQ ID NO: 10248 - RNA, 20 nt, synthetic construct
  source 1..20: mol_type = other RNA
aaaacgaggaaaagagaaca

SEQ ID NO: 10249 - RNA, 20 nt, synthetic construct
  source 1..20: mol_type = other RNA
aaaacgcggcacttggtaag

SEQ ID NO: 10250 - RNA, 20 nt, synthetic construct
  source 1..20: mol_type = other RNA
aaaacggaaactttatacct

SEQ ID NO: 10251 - RNA, 20 nt, synthetic construct
  source 1..20: mol_type = other RNA
aaaacggaggttgcagtaag

SEQ ID NO: 10252 - RNA, 20 nt, synthetic construct
  source 1..20: mol_type = other RNA
aaaacgggttatacacacat

SEQ ID NO: 10253 - RNA, 20 nt, synthetic construct
  source 1..20: mol_type = other RNA
aaaacgtgcaaactaccaag

SEQ ID NO: 10254 - RNA, 20 nt, synthetic construct
  source 1..20: mol_type = other RNA
aaaactaaggtcaagagaga

SEQ ID NO: 10255 - RNA, 20 nt, synthetic construct
  source 1..20: mol_type = other RNA
aaaactacatgtaaaaactg

SEQ ID NO: 10256 - RNA, 20 nt, synthetic construct
  source 1..20: mol_type = other RNA
aaaactacgagtatcatata

SEQ ID NO: 10257 - RNA, 20 nt, synthetic construct
  source 1..20: mol_type = other RNA
aaaactacttcgtgtgtgga

SEQ ID NO: 10258 - RNA, 20 nt, synthetic construct
  source 1..20: mol_type = other RNA
aaaactagagatgggaaagt

SEQ ID NO: 10259 - RNA, 20 nt, synthetic construct
  source 1..20: mol_type = other RNA
aaaactaggctgtcccaaat

SEQ ID NO: 10260 - RNA, 20 nt, synthetic construct
  source 1..20: mol_type = other RNA
aaaactcaacattcattcat

SEQ ID NO: 10261 - RNA, 20 nt, synthetic construct
  source 1..20: mol_type = other RNA
aaaactcaactgcctctaca

SEQ ID NO: 10262 - RNA, 20 nt, synthetic construct
  source 1..20: mol_type = other RNA
aaaactcacaaaaagtgtga

SEQ ID NO: 10263 - RNA, 20 nt, synthetic construct
  source 1..20: mol_type = other RNA
aaaactccaagtgtaaaaag

SEQ ID NO: 10264 - RNA, 20 nt, synthetic construct
  source 1..20: mol_type = other RNA
aaaactccccatgcaggaga

SEQ ID NO: 10265 - RNA, 20 nt, synthetic construct
  source 1..20: mol_type = other RNA
aaaactcctgaacaaaattt

SEQ ID NO: 10266 - RNA, 20 nt, synthetic construct
  source 1..20: mol_type = other RNA
aaaactctgtttccttacca

SEQ ID NO: 10267 - RNA, 20 nt, synthetic construct
  source 1..20: mol_type = other RNA
aaaactcttagcttagaaga

SEQ ID NO: 10268 - RNA, 20 nt, synthetic construct
  source 1..20: mol_type = other RNA
aaaactgaactacagtgttt

SEQ ID NO: 10269 - RNA, 20 nt, synthetic construct
  source 1..20: mol_type = other RNA
aaaactgaactcaaaatgga

SEQ ID NO: 10270 - RNA, 20 nt, synthetic construct
  source 1..20: mol_type = other RNA
aaaactgaagtaataaagca

SEQ ID NO: 10271 - RNA, 20 nt, synthetic construct
  source 1..20: mol_type = other RNA
aaaactgaagtttatcagtc

SEQ ID NO: 10272 - RNA, 20 nt, synthetic construct
  source 1..20: mol_type = other RNA
aaaactgaagtttatcgtat

SEQ ID NO: 10273 - RNA, 20 nt, synthetic construct
  source 1..20: mol_type = other RNA
aaaactgagaccggatgagg

SEQ ID NO: 10274 - RNA, 20 nt, synthetic construct
  source 1..20: mol_type = other RNA
aaaactgcagcaattatttg

SEQ ID NO: 10275 - RNA, 20 nt, synthetic construct
  source 1..20: mol_type = other RNA
aaaactgctgagtcttctac

SEQ ID NO: 10276 - RNA, 20 nt, synthetic construct
  source 1..20: mol_type = other RNA
aaaactggcaatcaaatggc

SEQ ID NO: 10277 - RNA, 20 nt, synthetic construct
  source 1..20: mol_type = other RNA
aaaactgggggctggacata

SEQ ID NO: 10278 - RNA, 20 nt, synthetic construct
  source 1..20: mol_type = other RNA
aaaactgtttggctgggagc

SEQ ID NO: 10279 - RNA, 20 nt, synthetic construct
  source 1..20: mol_type = other RNA
aaaacttaagtatctcagtc

SEQ ID NO: 10280 - RNA, 20 nt, synthetic construct
  source 1..20: mol_type = other RNA
aaaacttaagtatctcggtc

SEQ ID NO: 10281 - RNA, 20 nt, synthetic construct
  source 1..20: mol_type = other RNA
aaaacttaggaggctattaa

SEQ ID NO: 10282 - RNA, 20 nt, synthetic construct
  source 1..20: mol_type = other RNA
aaaacttatgcaagatggca

SEQ ID NO: 10283 - RNA, 20 nt, synthetic construct
  source 1..20: mol_type = other RNA
aaaacttcccttagctctca

SEQ ID NO: 10284 - RNA, 20 nt, synthetic construct
  source 1..20: mol_type = other RNA
aaaacttcgaactaaggaaa

SEQ ID NO: 10285 - RNA, 20 nt, synthetic construct
  source 1..20: mol_type = other RNA
aaaacttctctggagcaagc

SEQ ID NO: 10286 - RNA, 20 nt, synthetic construct
  source 1..20: mol_type = other RNA
aaaacttgagcagatcagta

SEQ ID NO: 10287 - RNA, 20 nt, synthetic construct
  source 1..20: mol_type = other RNA
aaaacttgtagaggaggagg

SEQ ID NO: 10288 - RNA, 20 nt, synthetic construct
  source 1..20: mol_type = other RNA
aaaactttaggtcagaatac

SEQ ID NO: 10289 - RNA, 20 nt, synthetic construct
  source 1..20: mol_type = other RNA
aaaactttttgggcctttct

SEQ ID NO: 10290 - RNA, 20 nt, synthetic construct
  source 1..20: mol_type = other RNA
aaaagaaaaagctcacctct

SEQ ID NO: 10291 - RNA, 20 nt, synthetic construct
  source 1..20: mol_type = other RNA
aaaagaaaaaggttaaggga

SEQ ID NO: 10292 - RNA, 20 nt, synthetic construct
  source 1..20: mol_type = other RNA
aaaagaaaaagttgggcttg

SEQ ID NO: 10293 - RNA, 20 nt, synthetic construct
  source 1..20: mol_type = other RNA
aaaagaaaagacaagactaa

SEQ ID NO: 10294 - RNA, 20 nt, synthetic construct
  source 1..20: mol_type = other RNA
aaaagaaaagtttcagtggt

SEQ ID NO: 10295 - RNA, 20 nt, synthetic construct
  source 1..20: mol_type = other RNA
aaaagaaaatggccaagagt

SEQ ID NO: 10296 - RNA, 20 nt, synthetic construct
  source 1..20: mol_type = other RNA
aaaagaaaattttctgagca

SEQ ID NO: 10297 - RNA, 20 nt, synthetic construct
  source 1..20: mol_type = other RNA
aaaagaaagaaaaactgaac

SEQ ID NO: 10298 - RNA, 20 nt, synthetic construct
  source 1..20: mol_type = other RNA
aaaagaaagctctcaattaa

SEQ ID NO: 10299 - RNA, 20 nt, synthetic construct
  source 1..20: mol_type = other RNA
aaaagaaagctgtggatgtt

SEQ ID NO: 10300 - RNA, 20 nt, synthetic construct
  source 1..20: mol_type = other RNA
aaaagaaatctgcatccaaa

SEQ ID NO: 10301 - RNA, 20 nt, synthetic construct
  source 1..20: mol_type = other RNA
aaaagaacaacatggtagac

SEQ ID NO: 10302 - RNA, 20 nt, synthetic construct
  source 1..20: mol_type = other RNA
aaaagaacacagtgttgaga

SEQ ID NO: 10303 - RNA, 20 nt, synthetic construct
  source 1..20: mol_type = other RNA
aaaagaacactataagccaa

SEQ ID NO: 10304 - RNA, 20 nt, synthetic construct
  source 1..20: mol_type = other RNA
aaaagaacaggacttttggt

SEQ ID NO: 10305 - RNA, 20 nt, synthetic construct
  source 1..20: mol_type = other RNA
aaaagaacctctggaaagga

SEQ ID NO: 10306 - RNA, 20 nt, synthetic construct
  source 1..20: mol_type = other RNA
aaaagaagatgcagttgctt

SEQ ID NO: 10307 - RNA, 20 nt, synthetic construct
  source 1..20: mol_type = other RNA
aaaagaaggccgtccctatt

SEQ ID NO: 10308 - RNA, 20 nt, synthetic construct
  source 1..20: mol_type = other RNA
aaaagaagttacggttccct

SEQ ID NO: 10309 - RNA, 20 nt, synthetic construct
  source 1..20: mol_type = other RNA
aaaagaataagctaatccca

SEQ ID NO: 10310 - RNA, 20 nt, synthetic construct
  source 1..20: mol_type = other RNA
aaaagacaagtactgcatga

SEQ ID NO: 10311 - RNA, 20 nt, synthetic construct
  source 1..20: mol_type = other RNA
aaaagacaatagctagtgtc

SEQ ID NO: 10312 - RNA, 20 nt, synthetic construct
  source 1..20: mol_type = other RNA
aaaagacacaaaagagctgg

SEQ ID NO: 10313 - RNA, 20 nt, synthetic construct
  source 1..20: mol_type = other RNA
aaaagacagagctagaacta

SEQ ID NO: 10314 - RNA, 20 nt, synthetic construct
  source 1..20: mol_type = other RNA
aaaagacatcactaagagtg

SEQ ID NO: 10315 - RNA, 20 nt, synthetic construct
  source 1..20: mol_type = other RNA
aaaagacatctttcctgtga

SEQ ID NO: 10316 - RNA, 20 nt, synthetic construct
  source 1..20: mol_type = other RNA
aaaagacattattcttacag

SEQ ID NO: 10317 - RNA, 20 nt, synthetic construct
  source 1..20: mol_type = other RNA
aaaagaccaagaattttcca

SEQ ID NO: 10318 - RNA, 20 nt, synthetic construct
  source 1..20: mol_type = other RNA
aaaagaccgcaagagttcca

SEQ ID NO: 10319 - RNA, 20 nt, synthetic construct
  source 1..20: mol_type = other RNA
aaaagacgatattcctatca

SEQ ID NO: 10320 - RNA, 20 nt, synthetic construct
  source 1..20: mol_type = other RNA
aaaagacttctcaaacagga

SEQ ID NO: 10321 - RNA, 20 nt, synthetic construct
  source 1..20: mol_type = other RNA
aaaagacttgaggtttactt

SEQ ID NO: 10322 - RNA, 20 nt, synthetic construct
  source 1..20: mol_type = other RNA
aaaagagaaaaattacaggt

SEQ ID NO: 10323 - RNA, 20 nt, synthetic construct
  source 1..20: mol_type = other RNA
aaaagagaacacacaatttg

SEQ ID NO: 10324 - RNA, 20 nt, synthetic construct
  source 1..20: mol_type = other RNA
aaaagagaacattggtttga

SEQ ID NO: 10325 - RNA, 20 nt, synthetic construct
  source 1..20: mol_type = other RNA
aaaagagaacttgcacataa

SEQ ID NO: 10326 - RNA, 20 nt, synthetic construct
  source 1..20: mol_type = other RNA
aaaagagatctagtgaagtc

SEQ ID NO: 10327 - RNA, 20 nt, synthetic construct
  source 1..20: mol_type = other RNA
aaaagagcacaccaagacat

SEQ ID NO: 10328 - RNA, 20 nt, synthetic construct
  source 1..20: mol_type = other RNA
aaaagagcgaagagggagaa

SEQ ID NO: 10329 - RNA, 20 nt, synthetic construct
  source 1..20: mol_type = other RNA
aaaagagctgggcccgcagt

SEQ ID NO: 10330 - RNA, 20 nt, synthetic construct
  source 1..20: mol_type = other RNA
aaaagagtagattccccctt

SEQ ID NO: 10331 - RNA, 20 nt, synthetic construct
  source 1..20: mol_type = other RNA
aaaagagtgaaatgatttca

SEQ ID NO: 10332 - RNA, 20 nt, synthetic construct
  source 1..20: mol_type = other RNA
aaaagagtgcacattccttc

SEQ ID NO: 10333 - RNA, 20 nt, synthetic construct
  source 1..20: mol_type = other RNA
aaaagataagtagaaggtca

SEQ ID NO: 10334 - RNA, 20 nt, synthetic construct
  source 1..20: mol_type = other RNA
aaaagatacacaagatctct

SEQ ID NO: 10335 - RNA, 20 nt, synthetic construct
  source 1..20: mol_type = other RNA
aaaagatacgaaaatcctat

SEQ ID NO: 10336 - RNA, 20 nt, synthetic construct
  source 1..20: mol_type = other RNA
aaaagatactcaacatcact

SEQ ID NO: 10337 - RNA, 20 nt, synthetic construct
  source 1..20: mol_type = other RNA
aaaagatatccacagtatgc

SEQ ID NO: 10338 - RNA, 20 nt, synthetic construct
  source 1..20: mol_type = other RNA
aaaagatcaaatgactatga

SEQ ID NO: 10339 - RNA, 20 nt, synthetic construct
  source 1..20: mol_type = other RNA
aaaagatcagtaaaattccc

SEQ ID NO: 10340 - RNA, 20 nt, synthetic construct
  source 1..20: mol_type = other RNA
aaaagatcatttcaaaccaa

SEQ ID NO: 10341 - RNA, 20 nt, synthetic construct
  source 1..20: mol_type = other RNA
aaaagatctgtggactttag

SEQ ID NO: 10342 - RNA, 20 nt, synthetic construct
  source 1..20: mol_type = other RNA
aaaagatgatgaacaaaggc

SEQ ID NO: 10343 - RNA, 20 nt, synthetic construct
  source 1..20: mol_type = other RNA
aaaagatgcagaaaaagcat

SEQ ID NO: 10344 - RNA, 20 nt, synthetic construct
  source 1..20: mol_type = other RNA
aaaagatgcattctgtcaca

SEQ ID NO: 10345 - RNA, 20 nt, synthetic construct
  source 1..20: mol_type = other RNA
aaaagatgctggtggagtat

SEQ ID NO: 10346 - RNA, 20 nt, synthetic construct
  source 1..20: mol_type = other RNA
aaaagatgtgtaccaaaagt

SEQ ID NO: 10347 - RNA, 20 nt, synthetic construct
  source 1..20: mol_type = other RNA
aaaagatgttttcagttgca

SEQ ID NO: 10348 - RNA, 20 nt, synthetic construct
  source 1..20: mol_type = other RNA
aaaagattaaatacagagca

SEQ ID NO: 10349 - RNA, 20 nt, synthetic construct
  source 1..20: mol_type = other RNA
aaaagcaaaattctaacaag

SEQ ID NO: 10350 - RNA, 20 nt, synthetic construct
  source 1..20: mol_type = other RNA
aaaagcaaatgtcatcttct

SEQ ID NO: 10351 - RNA, 20 nt, synthetic construct
  source 1..20: mol_type = other RNA
aaaagcaacctcatttgcag

SEQ ID NO: 10352 - RNA, 20 nt, synthetic construct
  source 1..20: mol_type = other RNA
aaaagcaacttgaaggcaat

SEQ ID NO: 10353 - RNA, 20 nt, synthetic construct
  source 1..20: mol_type = other RNA
aaaagcacaagcacagagtc

SEQ ID NO: 10354 - RNA, 20 nt, synthetic construct
  source 1..20: mol_type = other RNA
aaaagcacaggcatcggccg

SEQ ID NO: 10355 - RNA, 20 nt, synthetic construct
  source 1..20: mol_type = other RNA
aaaagcaccactgagaggga

SEQ ID NO: 10356 - RNA, 20 nt, synthetic construct
  source 1..20: mol_type = other RNA
aaaagcaccagttatcacca

SEQ ID NO: 10357 - RNA, 20 nt, synthetic construct
  source 1..20: mol_type = other RNA
aaaagcacctaccataacaa

SEQ ID NO: 10358 - RNA, 20 nt, synthetic construct
  source 1..20: mol_type = other RNA
aaaagcactatccacatttg

SEQ ID NO: 10359 - RNA, 20 nt, synthetic construct
  source 1..20: mol_type = other RNA
aaaagcagacagaaagacag

SEQ ID NO: 10360 - RNA, 20 nt, synthetic construct
  source 1..20: mol_type = other RNA
aaaagcagagaaactggaat

SEQ ID NO: 10361 - RNA, 20 nt, synthetic construct
  source 1..20: mol_type = other RNA
aaaagcagctacctgttgat

SEQ ID NO: 10362 - RNA, 20 nt, synthetic construct
  source 1..20: mol_type = other RNA
aaaagcaggccctgagaagt

SEQ ID NO: 10363 - RNA, 20 nt, synthetic construct
  source 1..20: mol_type = other RNA
aaaagccaagagcgaggcct

SEQ ID NO: 10364 - RNA, 20 nt, synthetic construct
  source 1..20: mol_type = other RNA
aaaagccatagtgtaaacta

SEQ ID NO: 10365 - RNA, 20 nt, synthetic construct
  source 1..20: mol_type = other RNA
aaaagccatttatcagcacc

SEQ ID NO: 10366 - RNA, 20 nt, synthetic construct
  source 1..20: mol_type = other RNA
aaaagcccaatctacaggtc

SEQ ID NO: 10367 - RNA, 20 nt, synthetic construct
  source 1..20: mol_type = other RNA
aaaagccccaaaccatcaag

SEQ ID NO: 10368 - RNA, 20 nt, synthetic construct
  source 1..20: mol_type = other RNA
aaaagcctcaaaatttagta

SEQ ID NO: 10369 - RNA, 20 nt, synthetic construct
  source 1..20: mol_type = other RNA
aaaagcctcaaacgaaccaa

SEQ ID NO: 10370 - RNA, 20 nt, synthetic construct
  source 1..20: mol_type = other RNA
aaaagcctcatttgaacttt

SEQ ID NO: 10371 - RNA, 20 nt, synthetic construct
  source 1..20: mol_type = other RNA
aaaagcctctctgatggaac

SEQ ID NO: 10372 - RNA, 20 nt, synthetic construct
  source 1..20: mol_type = other RNA
aaaagcctctgtggaccatg

SEQ ID NO: 10373 - RNA, 20 nt, synthetic construct
  source 1..20: mol_type = other RNA
aaaagcctgcttcagcctaa

SEQ ID NO: 10374 - RNA, 20 nt, synthetic construct
  source 1..20: mol_type = other RNA
aaaagcgtactgtgattaca

SEQ ID NO: 10375 - RNA, 20 nt, synthetic construct
  source 1..20: mol_type = other RNA
aaaagcgttggagacagcct

SEQ ID NO: 10376 - RNA, 20 nt, synthetic construct
  source 1..20: mol_type = other RNA
aaaagctaatctactttcta

SEQ ID NO: 10377 - RNA, 20 nt, synthetic construct
  source 1..20: mol_type = other RNA
aaaagctaccctcgagtaaa

SEQ ID NO: 10378 - RNA, 20 nt, synthetic construct
  source 1..20: mol_type = other RNA
aaaagctatacacgttacaa

SEQ ID NO: 10379 - RNA, 20 nt, synthetic construct
  source 1..20: mol_type = other RNA
aaaagctcaaaaatactcaa

SEQ ID NO: 10380 - RNA, 20 nt, synthetic construct
  source 1..20: mol_type = other RNA
aaaagctcacctctggactc

SEQ ID NO: 10381 - RNA, 20 nt, synthetic construct
  source 1..20: mol_type = other RNA
aaaagctcagtgtgtttttg

SEQ ID NO: 10382 - RNA, 20 nt, synthetic construct
  source 1..20: mol_type = other RNA
aaaagctccccggatgattc

SEQ ID NO: 10383 - RNA, 20 nt, synthetic construct
  source 1..20: mol_type = other RNA
aaaagctctaatagttcacc

SEQ ID NO: 10384 - RNA, 20 nt, synthetic construct
  source 1..20: mol_type = other RNA
aaaagctggagttatttgta

SEQ ID NO: 10385 - RNA, 20 nt, synthetic construct
  source 1..20: mol_type = other RNA
aaaagcttatgatcttggga

SEQ ID NO: 10386 - RNA, 20 nt, synthetic construct
  source 1..20: mol_type = other RNA
aaaagcttcccccctctctc

SEQ ID NO: 10387 - RNA, 20 nt, synthetic construct
  source 1..20: mol_type = other RNA
aaaaggaaagtaactgttgg

SEQ ID NO: 10388 - RNA, 20 nt, synthetic construct
  source 1..20: mol_type = other RNA
aaaaggaactaatttcatac

SEQ ID NO: 10389 - RNA, 20 nt, synthetic construct
  source 1..20: mol_type = other RNA
aaaaggaatataaacgtgtg

SEQ ID NO: 10390 - RNA, 20 nt, synthetic construct
  source 1..20: mol_type = other RNA
aaaaggaatctgacctaagc

SEQ ID NO: 10391 - RNA, 20 nt, synthetic construct
  source 1..20: mol_type = other RNA
aaaaggaatctgggccgggc

SEQ ID NO: 10392 - RNA, 20 nt, synthetic construct
  source 1..20: mol_type = other RNA
aaaaggaatggaattctgat

SEQ ID NO: 10393 - RNA, 20 nt, synthetic construct
  source 1..20: mol_type = other RNA
aaaaggacacaaattatgac

SEQ ID NO: 10394 - RNA, 20 nt, synthetic construct
  source 1..20: mol_type = other RNA
aaaaggacattagtggaaaa

SEQ ID NO: 10395 - RNA, 20 nt, synthetic construct
  source 1..20: mol_type = other RNA
aaaaggaccatctgttaaaa

SEQ ID NO: 10396 - RNA, 20 nt, synthetic construct
  source 1..20: mol_type = other RNA
aaaaggagatatacaggaag

SEQ ID NO: 10397 - RNA, 20 nt, synthetic construct
  source 1..20: mol_type = other RNA
aaaaggaggaactaattgat

SEQ ID NO: 10398 - RNA, 20 nt, synthetic construct
  source 1..20: mol_type = other RNA
aaaaggagggaaaatgttta

SEQ ID NO: 10399 - RNA, 20 nt, synthetic construct
  source 1..20: mol_type = other RNA
aaaaggatatgggccaaaga

SEQ ID NO: 10400 - RNA, 20 nt, synthetic construct
  source 1..20: mol_type = other RNA
aaaaggatttgtttgtgaag

SEQ ID NO: 10401 - RNA, 20 nt, synthetic construct
  source 1..20: mol_type = other RNA
aaaaggcaaaccacacagag

SEQ ID NO: 10402 - RNA, 20 nt, synthetic construct
  source 1..20: mol_type = other RNA
aaaaggccccttgaaagatc

SEQ ID NO: 10403 - RNA, 20 nt, synthetic construct
  source 1..20: mol_type = other RNA
aaaaggctaattttttctgt

SEQ ID NO: 10404 - RNA, 20 nt, synthetic construct
  source 1..20: mol_type = other RNA
aaaaggctgagacctcatct

SEQ ID NO: 10405 - RNA, 20 nt, synthetic construct
  source 1..20: mol_type = other RNA
aaaagggaaaacaattactt

SEQ ID NO: 10406 - RNA, 20 nt, synthetic construct
  source 1..20: mol_type = other RNA
aaaagggaaatatgaaccac

SEQ ID NO: 10407 - RNA, 20 nt, synthetic construct
  source 1..20: mol_type = other RNA
aaaagggagtcagtagaggc

SEQ ID NO: 10408 - RNA, 20 nt, synthetic construct
  source 1..20: mol_type = other RNA
aaaagggtgggggcatcaaa

SEQ ID NO: 10409 - RNA, 20 nt, synthetic construct
  source 1..20: mol_type = other RNA
aaaaggtagaagataatgtt

SEQ ID NO: 10410 - RNA, 20 nt, synthetic construct
  source 1..20: mol_type = other RNA
aaaaggtataaaggatgcac

SEQ ID NO: 10411 - RNA, 20 nt, synthetic construct
  source 1..20: mol_type = other RNA
aaaaggtgctgttgtatttt

SEQ ID NO: 10412 - RNA, 20 nt, synthetic construct
  source 1..20: mol_type = other RNA
aaaaggttaagggaagagct

SEQ ID NO: 10413 - RNA, 20 nt, synthetic construct
  source 1..20: mol_type = other RNA
aaaaggttgcttaattgagc

SEQ ID NO: 10414 - RNA, 20 nt, synthetic construct
  source 1..20: mol_type = other RNA
aaaaggtttccagtggcccc

SEQ ID NO: 10415 - RNA, 20 nt, synthetic construct
  source 1..20: mol_type = other RNA
aaaaggtttttgaacaagag

SEQ ID NO: 10416 - RNA, 20 nt, synthetic construct
  source 1..20: mol_type = other RNA
aaaagtaaatcagactgtat

SEQ ID NO: 10417 - RNA, 20 nt, synthetic construct
  source 1..20: mol_type = other RNA
aaaagtaaattcgcataacc

SEQ ID NO: 10418 - RNA, 20 nt, synthetic construct
  source 1..20: mol_type = other RNA
aaaagtacagataaccaata

SEQ ID NO: 10419 - RNA, 20 nt, synthetic construct
  source 1..20: mol_type = other RNA
aaaagtactggaaatggaca

SEQ ID NO: 10420 - RNA, 20 nt, synthetic construct
  source 1..20: mol_type = other RNA
aaaagtaggggtaaatcttt

SEQ ID NO: 10421 - RNA, 20 nt, synthetic construct
  source 1..20: mol_type = other RNA
aaaagtatcgtgagactatt

SEQ ID NO: 10422 - RNA, 20 nt, synthetic construct
  source 1..20: mol_type = other RNA
aaaagtatggttgaagaaag

SEQ ID NO: 10423 - RNA, 20 nt, synthetic construct
  source 1..20: mol_type = other RNA
aaaagtcagctaggcgtagt

SEQ ID NO: 10424 - RNA, 20 nt, synthetic construct
  source 1..20: mol_type = other RNA
aaaagtcagtaaaaaaggac

SEQ ID NO: 10425 - RNA, 20 nt, synthetic construct
  source 1..20: mol_type = other RNA
aaaagtcatgacctgctttc

SEQ ID NO: 10426 - RNA, 20 nt, synthetic construct
  source 1..20: mol_type = other RNA
aaaagtcattgaaactcaat

SEQ ID NO: 10427 - RNA, 20 nt, synthetic construct
  source 1..20: mol_type = other RNA
aaaagtcctgttcttttgta

SEQ ID NO: 10428 - RNA, 20 nt, synthetic construct
  source 1..20: mol_type = other RNA
aaaagtgaaaactaaggtca

SEQ ID NO: 10429 - RNA, 20 nt, synthetic construct
  source 1..20: mol_type = other RNA
aaaagtgaatatagctaaga

SEQ ID NO: 10430 - RNA, 20 nt, synthetic construct
  source 1..20: mol_type = other RNA
aaaagtgaatcactacagca

SEQ ID NO: 10431 - RNA, 20 nt, synthetic construct
  source 1..20: mol_type = other RNA
aaaagtgacttctggatgtg

SEQ ID NO: 10432 - RNA, 20 nt, synthetic construct
  source 1..20: mol_type = other RNA
aaaagtgataccataaagtc

SEQ ID NO: 10433 - RNA, 20 nt, synthetic construct
  source 1..20: mol_type = other RNA
aaaagtgctgcagtatgcat

SEQ ID NO: 10434 - RNA, 20 nt, synthetic construct
  source 1..20: mol_type = other RNA
aaaagtgctgttgaggctgg

SEQ ID NO: 10435 - RNA, 20 nt, synthetic construct
  source 1..20: mol_type = other RNA
aaaagtgcttctagtaactt

SEQ ID NO: 10436 - RNA, 20 nt, synthetic construct
  source 1..20: mol_type = other RNA
aaaagtgtgaccacattccc

SEQ ID NO: 10437 - RNA, 20 nt, synthetic construct
  source 1..20: mol_type = other RNA
aaaagtgttgactaccatct

SEQ ID NO: 10438 - RNA, 20 nt, synthetic construct
  source 1..20: mol_type = other RNA
aaaagtgtttgtcacataga

SEQ ID NO: 10439 - RNA, 20 nt, synthetic construct
  source 1..20: mol_type = other RNA
aaaagttaatattgtaggtg

SEQ ID NO: 10440 - RNA, 20 nt, synthetic construct
  source 1..20: mol_type = other RNA
aaaagttacaaggattgaat

SEQ ID NO: 10441 - RNA, 20 nt, synthetic construct
  source 1..20: mol_type = other RNA
aaaagttagctggcaaaatg

SEQ ID NO: 10442 - RNA, 20 nt, synthetic construct
  source 1..20: mol_type = other RNA
aaaagttccaagattttccc

SEQ ID NO: 10443 - RNA, 20 nt, synthetic construct
  source 1..20: mol_type = other RNA
aaaagttgcaaaaatactac

SEQ ID NO: 10444 - RNA, 20 nt, synthetic construct
  source 1..20: mol_type = other RNA
aaaagttgggcttggttgga

SEQ ID NO: 10445 - RNA, 20 nt, synthetic construct
  source 1..20: mol_type = other RNA
aaaagtttcagtggttaata

SEQ ID NO: 10446 - RNA, 20 nt, synthetic construct
  source 1..20: mol_type = other RNA
aaaagttttccaaccactga

SEQ ID NO: 10447 - RNA, 20 nt, synthetic construct
  source 1..20: mol_type = other RNA
aaaagttttttcctttgcct

SEQ ID NO: 10448 - RNA, 20 nt, synthetic construct
  source 1..20: mol_type = other RNA
aaaataaaaacctttttggg

SEQ ID NO: 10449 - RNA, 20 nt, synthetic construct
  source 1..20: mol_type = other RNA
aaaataaaaagtatcgtgag

SEQ ID NO: 10450 - RNA, 20 nt, synthetic construct
  source 1..20: mol_type = other RNA
aaaataaaattctgaccctt

SEQ ID NO: 10451 - RNA, 20 nt, synthetic construct
  source 1..20: mol_type = other RNA
aaaataaacattttccctcc

SEQ ID NO: 10452 - RNA, 20 nt, synthetic construct
  source 1..20: mol_type = other RNA
aaaataaaccaagtttggtt

SEQ ID NO: 10453 - RNA, 20 nt, synthetic construct
  source 1..20: mol_type = other RNA
aaaataaagacttcacgatg

SEQ ID NO: 10454 - RNA, 20 nt, synthetic construct
  source 1..20: mol_type = other RNA
aaaataaaggctttcgtatg

SEQ ID NO: 10455 - RNA, 20 nt, synthetic construct
  source 1..20: mol_type = other RNA
aaaataaagttccccattga

SEQ ID NO: 10456 - RNA, 20 nt, synthetic construct
  source 1..20: mol_type = other RNA
aaaataacacgcagaaccac

SEQ ID NO: 10457 - RNA, 20 nt, synthetic construct
  source 1..20: mol_type = other RNA
aaaataacgggccgggcgct

SEQ ID NO: 10458 - RNA, 20 nt, synthetic construct
  source 1..20: mol_type = other RNA
aaaataatacctaacagccg

SEQ ID NO: 10459 - RNA, 20 nt, synthetic construct
  source 1..20: mol_type = other RNA
aaaataatatgataccctca

SEQ ID NO: 10460 - RNA, 20 nt, synthetic construct
  source 1..20: mol_type = other RNA
aaaataatgttttccgtgtg

SEQ ID NO: 10461 - RNA, 20 nt, synthetic construct
  source 1..20: mol_type = other RNA
aaaatacaacagcacctttt

SEQ ID NO: 10462 - RNA, 20 nt, synthetic construct
  source 1..20: mol_type = other RNA
aaaatacagctccaaagaac

SEQ ID NO: 10463 - RNA, 20 nt, synthetic construct
  source 1..20: mol_type = other RNA
aaaatacagttttgaccaaa

SEQ ID NO: 10464 - RNA, 20 nt, synthetic construct
  source 1..20: mol_type = other RNA
aaaatacatgaggcctctcc

SEQ ID NO: 10465 - RNA, 20 nt, synthetic construct
  source 1..20: mol_type = other RNA
aaaatacatgtcatgttccc

SEQ ID NO: 10466 - RNA, 20 nt, synthetic construct
  source 1..20: mol_type = other RNA
aaaataccaaaaaaggtgct

SEQ ID NO: 10467 - RNA, 20 nt, synthetic construct
  source 1..20: mol_type = other RNA
aaaataccagaggttaaagc

SEQ ID NO: 10468 - RNA, 20 nt, synthetic construct
  source 1..20: mol_type = other RNA
aaaatacccacaagaaaaac

SEQ ID NO: 10469 - RNA, 20 nt, synthetic construct
  source 1..20: mol_type = other RNA
aaaatacgaaagtgctctac

SEQ ID NO: 10470 - RNA, 20 nt, synthetic construct
  source 1..20: mol_type = other RNA
aaaatacggccgggagtggt

SEQ ID NO: 10471 - RNA, 20 nt, synthetic construct
  source 1..20: mol_type = other RNA
aaaatactaacgatccttac

SEQ ID NO: 10472 - RNA, 20 nt, synthetic construct
  source 1..20: mol_type = other RNA
aaaatactacaagagttccc

SEQ ID NO: 10473 - RNA, 20 nt, synthetic construct
  source 1..20: mol_type = other RNA
aaaatactcaagggctttca

SEQ ID NO: 10474 - RNA, 20 nt, synthetic construct
  source 1..20: mol_type = other RNA
aaaatacttaagagcatgtt

SEQ ID NO: 10475 - RNA, 20 nt, synthetic construct
  source 1..20: mol_type = other RNA
aaaatagaggatgggcattc

SEQ ID NO: 10476 - RNA, 20 nt, synthetic construct
  source 1..20: mol_type = other RNA
aaaatagagttccatctgtt

SEQ ID NO: 10477 - RNA, 20 nt, synthetic construct
  source 1..20: mol_type = other RNA
aaaatagcaggattcttgtt

SEQ ID NO: 10478 - RNA, 20 nt, synthetic construct
  source 1..20: mol_type = other RNA
aaaataggaagtccatgaaa

SEQ ID NO: 10479 - RNA, 20 nt, synthetic construct
  source 1..20: mol_type = other RNA
aaaataggattaagacacta

SEQ ID NO: 10480 - RNA, 20 nt, synthetic construct
  source 1..20: mol_type = other RNA
aaaataggcagtcctctact

SEQ ID NO: 10481 - RNA, 20 nt, synthetic construct
  source 1..20: mol_type = other RNA
aaaataggcctaggtgtgat

SEQ ID NO: 10482 - RNA, 20 nt, synthetic construct
  source 1..20: mol_type = other RNA
aaaatagggacggccttctt

SEQ ID NO: 10483 - RNA, 20 nt, synthetic construct
  source 1..20: mol_type = other RNA
aaaatagtaactttctgctt

SEQ ID NO: 10484 - RNA, 20 nt, synthetic construct
  source 1..20: mol_type = other RNA
aaaatagtatgaaggttctt

SEQ ID NO: 10485 - RNA, 20 nt, synthetic construct
  source 1..20: mol_type = other RNA
aaaatagtcaagtaacagtt

SEQ ID NO: 10486 - RNA, 20 nt, synthetic construct
  source 1..20: mol_type = other RNA
aaaatatagaaggccagagg

SEQ ID NO: 10487 - RNA, 20 nt, synthetic construct
  source 1..20: mol_type = other RNA
aaaatatccctggggtttcc

SEQ ID NO: 10488 - RNA, 20 nt, synthetic construct
  source 1..20: mol_type = other RNA
aaaatatgaagcattaatgc

SEQ ID NO: 10489 - RNA, 20 nt, synthetic construct
  source 1..20: mol_type = other RNA
aaaatatgtaatgacctgga

SEQ ID NO: 10490 - RNA, 20 nt, synthetic construct
  source 1..20: mol_type = other RNA
aaaatatgtccttttgagtt

SEQ ID NO: 10491 - RNA, 20 nt, synthetic construct
  source 1..20: mol_type = other RNA
aaaatattgaagagggaaca

SEQ ID NO: 10492 - RNA, 20 nt, synthetic construct
  source 1..20: mol_type = other RNA
aaaatcaaaagaccaagaat

SEQ ID NO: 10493 - RNA, 20 nt, synthetic construct
  source 1..20: mol_type = other RNA
aaaatcaaagaaagagttgg

SEQ ID NO: 10494 - RNA, 20 nt, synthetic construct
  source 1..20: mol_type = other RNA
aaaatcaacattgcctccat

SEQ ID NO: 10495 - RNA, 20 nt, synthetic construct
  source 1..20: mol_type = other RNA
aaaatcaacccatgaaaatt

SEQ ID NO: 10496 - RNA, 20 nt, synthetic construct
  source 1..20: mol_type = other RNA
aaaatcaaggtgcgggatta

SEQ ID NO: 10497 - RNA, 20 nt, synthetic construct
  source 1..20: mol_type = other RNA
aaaatcactaattcaagtgt

SEQ ID NO: 10498 - RNA, 20 nt, synthetic construct
  source 1..20: mol_type = other RNA
aaaatcagatatgaaagagg

SEQ ID NO: 10499 - RNA, 20 nt, synthetic construct
  source 1..20: mol_type = other RNA
aaaatcagattaagcatagt

SEQ ID NO: 10500 - RNA, 20 nt, synthetic construct
  source 1..20: mol_type = other RNA
aaaatcagtgtgaaagtatt

SEQ ID NO: 10501 - RNA, 20 nt, synthetic construct
  source 1..20: mol_type = other RNA
aaaatcatacattttccaca

SEQ ID NO: 10502 - RNA, 20 nt, synthetic construct
  source 1..20: mol_type = other RNA
aaaatcatcacagtatgcac

SEQ ID NO: 10503 - RNA, 20 nt, synthetic construct
  source 1..20: mol_type = other RNA
aaaatcattgtagctatatc

SEQ ID NO: 10504 - RNA, 20 nt, synthetic construct
  source 1..20: mol_type = other RNA
aaaatcattgttcagggaag

SEQ ID NO: 10505 - RNA, 20 nt, synthetic construct
  source 1..20: mol_type = other RNA
aaaatcattttggcaaattg

SEQ ID NO: 10506 - RNA, 20 nt, synthetic construct
  source 1..20: mol_type = other RNA
aaaatccaaaagcctcaaaa

SEQ ID NO: 10507 - RNA, 20 nt, synthetic construct
  source 1..20: mol_type = other RNA
aaaatccaagaagacatgat

SEQ ID NO: 10508 - RNA, 20 nt, synthetic construct
  source 1..20: mol_type = other RNA
aaaatcctctgtagataaac

SEQ ID NO: 10509 - RNA, 20 nt, synthetic construct
  source 1..20: mol_type = other RNA
aaaatcctgctgggctattg

SEQ ID NO: 10510 - RNA, 20 nt, synthetic construct
  source 1..20: mol_type = other RNA
aaaatccttacttccagctc

SEQ ID NO: 10511 - RNA, 20 nt, synthetic construct
  source 1..20: mol_type = other RNA
aaaatcggaacaggctcaat

SEQ ID NO: 10512 - RNA, 20 nt, synthetic construct
  source 1..20: mol_type = other RNA
aaaatcgtcctcttcgggtg

SEQ ID NO: 10513 - RNA, 20 nt, synthetic construct
  source 1..20: mol_type = other RNA
aaaatctaaccctcaatccc

SEQ ID NO: 10514 - RNA, 20 nt, synthetic construct
  source 1..20: mol_type = other RNA
aaaatctaggttatctgttt

SEQ ID NO: 10515 - RNA, 20 nt, synthetic construct
  source 1..20: mol_type = other RNA
aaaatctctacagggaaccg

SEQ ID NO: 10516 - RNA, 20 nt, synthetic construct
  source 1..20: mol_type = other RNA
aaaatctctgacttcattct

SEQ ID NO: 10517 - RNA, 20 nt, synthetic construct
  source 1..20: mol_type = other RNA
aaaatctgacaatttgccaa

SEQ ID NO: 10518 - RNA, 20 nt, synthetic construct
  source 1..20: mol_type = other RNA
aaaatctgatgtgtatgtta

SEQ ID NO: 10519 - RNA, 20 nt, synthetic construct
  source 1..20: mol_type = other RNA
aaaatctgattcagtggttg

SEQ ID NO: 10520 - RNA, 20 nt, synthetic construct
  source 1..20: mol_type = other RNA
aaaatctgtatatgaaaagc

SEQ ID NO: 10521 - RNA, 20 nt, synthetic construct
  source 1..20: mol_type = other RNA
aaaatctgtatgagaagact

SEQ ID NO: 10522 - RNA, 20 nt, synthetic construct
  source 1..20: mol_type = other RNA
aaaatcttaaagatgccatt

SEQ ID NO: 10523 - RNA, 20 nt, synthetic construct
  source 1..20: mol_type = other RNA
aaaatcttattccccaggga

SEQ ID NO: 10524 - RNA, 20 nt, synthetic construct
  source 1..20: mol_type = other RNA
aaaatgaaaaattcactcct

SEQ ID NO: 10525 - RNA, 20 nt, synthetic construct
  source 1..20: mol_type = other RNA
aaaatgaaaatgttccctct

SEQ ID NO: 10526 - RNA, 20 nt, synthetic construct
  source 1..20: mol_type = other RNA
aaaatgaacctgctttctac

SEQ ID NO: 10527 - RNA, 20 nt, synthetic construct
  source 1..20: mol_type = other RNA
aaaatgacacaacttactac

SEQ ID NO: 10528 - RNA, 20 nt, synthetic construct
  source 1..20: mol_type = other RNA
aaaatgacaccaaaactaca

SEQ ID NO: 10529 - RNA, 20 nt, synthetic construct
  source 1..20: mol_type = other RNA
aaaatgagaaacctaagaaa

SEQ ID NO: 10530 - RNA, 20 nt, synthetic construct
  source 1..20: mol_type = other RNA
aaaatgagggtaaaatagtc

SEQ ID NO: 10531 - RNA, 20 nt, synthetic construct
  source 1..20: mol_type = other RNA
aaaatgatagcattatccca

SEQ ID NO: 10532 - RNA, 20 nt, synthetic construct
  source 1..20: mol_type = other RNA
aaaatgatggcaacaatcaa

SEQ ID NO: 10533 - RNA, 20 nt, synthetic construct
  source 1..20: mol_type = other RNA
aaaatgattttcacagggca

SEQ ID NO: 10534 - RNA, 20 nt, synthetic construct
  source 1..20: mol_type = other RNA
aaaatgcagtagtaaagcaa

SEQ ID NO: 10535 - RNA, 20 nt, synthetic construct
  source 1..20: mol_type = other RNA
aaaatgcccttatttaatgt

SEQ ID NO: 10536 - RNA, 20 nt, synthetic construct
  source 1..20: mol_type = other RNA
aaaatgcgcgtccgcgaccc

SEQ ID NO: 10537 - RNA, 20 nt, synthetic construct
  source 1..20: mol_type = other RNA
aaaatgctggaaattttcaa

SEQ ID NO: 10538 - RNA, 20 nt, synthetic construct
  source 1..20: mol_type = other RNA
aaaatgcttaacaagaatcc

SEQ ID NO: 10539 - RNA, 20 nt, synthetic construct
  source 1..20: mol_type = other RNA
aaaatgcttatgtcttgtgg

SEQ ID NO: 10540 - RNA, 20 nt, synthetic construct
  source 1..20: mol_type = other RNA
aaaatgctttttctgcatct

SEQ ID NO: 10541 - RNA, 20 nt, synthetic construct
  source 1..20: mol_type = other RNA
aaaatggaagactttatggt

SEQ ID NO: 10542 - RNA, 20 nt, synthetic construct
  source 1..20: mol_type = other RNA
aaaatggaagtgctgggcta

SEQ ID NO: 10543 - RNA, 20 nt, synthetic construct
  source 1..20: mol_type = other RNA
aaaatggaatattgttcagc

SEQ ID NO: 10544 - RNA, 20 nt, synthetic construct
  source 1..20: mol_type = other RNA
aaaatggagacatctgagac

SEQ ID NO: 10545 - RNA, 20 nt, synthetic construct
  source 1..20: mol_type = other RNA
aaaatggagacccatactca

SEQ ID NO: 10546 - RNA, 20 nt, synthetic construct
  source 1..20: mol_type = other RNA
aaaatggatcaaagacctaa

SEQ ID NO: 10547 - RNA, 20 nt, synthetic construct
  source 1..20: mol_type = other RNA
aaaatggcacatactgcata

SEQ ID NO: 10548 - RNA, 20 nt, synthetic construct
  source 1..20: mol_type = other RNA
aaaatggccaagagttgctg

SEQ ID NO: 10549 - RNA, 20 nt, synthetic construct
  source 1..20: mol_type = other RNA
aaaatgggccaaagacttca

SEQ ID NO: 10550 - RNA, 20 nt, synthetic construct
  source 1..20: mol_type = other RNA
aaaatggggatatccaaaga

SEQ ID NO: 10551 - RNA, 20 nt, synthetic construct
  source 1..20: mol_type = other RNA
aaaatggtcaacatgaaaag

SEQ ID NO: 10552 - RNA, 20 nt, synthetic construct
  source 1..20: mol_type = other RNA
aaaatggtttaggctgtctc

SEQ ID NO: 10553 - RNA, 20 nt, synthetic construct
  source 1..20: mol_type = other RNA
aaaatggttttatggtaact

SEQ ID NO: 10554 - RNA, 20 nt, synthetic construct
  source 1..20: mol_type = other RNA
aaaatgtaaattctgccaca

SEQ ID NO: 10555 - RNA, 20 nt, synthetic construct
  source 1..20: mol_type = other RNA
aaaatgtatgattttctagg

SEQ ID NO: 10556 - RNA, 20 nt, synthetic construct
  source 1..20: mol_type = other RNA
aaaatgtcaattttccccca

SEQ ID NO: 10557 - RNA, 20 nt, synthetic construct
  source 1..20: mol_type = other RNA
aaaatgtccgttgaagtctt

SEQ ID NO: 10558 - RNA, 20 nt, synthetic construct
  source 1..20: mol_type = other RNA
aaaatgtgacattagtggtg

SEQ ID NO: 10559 - RNA, 20 nt, synthetic construct
  source 1..20: mol_type = other RNA
aaaatgtgatggcatcattc

SEQ ID NO: 10560 - RNA, 20 nt, synthetic construct
  source 1..20: mol_type = other RNA
aaaatgtggatgcatgaggc

SEQ ID NO: 10561 - RNA, 20 nt, synthetic construct
  source 1..20: mol_type = other RNA
aaaatgtggcaaatttatgt

SEQ ID NO: 10562 - RNA, 20 nt, synthetic construct
  source 1..20: mol_type = other RNA
aaaatgtggcatatcacatt

SEQ ID NO: 10563 - RNA, 20 nt, synthetic construct
  source 1..20: mol_type = other RNA
aaaatgtggcatttcttaca

SEQ ID NO: 10564 - RNA, 20 nt, synthetic construct
  source 1..20: mol_type = other RNA
aaaatgtgtctagtgaatga

SEQ ID NO: 10565 - RNA, 20 nt, synthetic construct
  source 1..20: mol_type = other RNA
aaaatgttatacagcaaatc

SEQ ID NO: 10566 - RNA, 20 nt, synthetic construct
  source 1..20: mol_type = other RNA
aaaatgttcagatagaaaag

SEQ ID NO: 10567 - RNA, 20 nt, synthetic construct
  source 1..20: mol_type = other RNA
aaaatgttccctcttcaata

SEQ ID NO: 10568 - RNA, 20 nt, synthetic construct
  source 1..20: mol_type = other RNA
aaaatgttgccaatatctat

SEQ ID NO: 10569 - RNA, 20 nt, synthetic construct
  source 1..20: mol_type = other RNA
aaaatgtttaattacccagg

SEQ ID NO: 10570 - RNA, 20 nt, synthetic construct
  source 1..20: mol_type = other RNA
aaaatgtttagcggaatgac

SEQ ID NO: 10571 - RNA, 20 nt, synthetic construct
  source 1..20: mol_type = other RNA
aaaatgttttaaggcagggc

SEQ ID NO: 10572 - RNA, 20 nt, synthetic construct
  source 1..20: mol_type = other RNA
aaaattaagagaatggaaac

SEQ ID NO: 10573 - RNA, 20 nt, synthetic construct
  source 1..20: mol_type = other RNA
aaaattaaggaatgcctata

SEQ ID NO: 10574 - RNA, 20 nt, synthetic construct
  source 1..20: mol_type = other RNA
aaaattaatgccccatgtgt

SEQ ID NO: 10575 - RNA, 20 nt, synthetic construct
  source 1..20: mol_type = other RNA
aaaattacaactggtttctg

SEQ ID NO: 10576 - RNA, 20 nt, synthetic construct
  source 1..20: mol_type = other RNA
aaaattacaggtcaaactca

SEQ ID NO: 10577 - RNA, 20 nt, synthetic construct
  source 1..20: mol_type = other RNA
aaaattaccccattcactca

SEQ ID NO: 10578 - RNA, 20 nt, synthetic construct
  source 1..20: mol_type = other RNA
aaaattagccttttacaccc

SEQ ID NO: 10579 - RNA, 20 nt, synthetic construct
  source 1..20: mol_type = other RNA
aaaattagctgactttcatt

SEQ ID NO: 10580 - RNA, 20 nt, synthetic construct
  source 1..20: mol_type = other RNA
aaaattagctggatgtggtg

SEQ ID NO: 10581 - RNA, 20 nt, synthetic construct
  source 1..20: mol_type = other RNA
aaaattagctgggcgagatg

SEQ ID NO: 10582 - RNA, 20 nt, synthetic construct
  source 1..20: mol_type = other RNA
aaaattcaaacatgacagat

SEQ ID NO: 10583 - RNA, 20 nt, synthetic construct
  source 1..20: mol_type = other RNA
aaaattcaccaaacacctta

SEQ ID NO: 10584 - RNA, 20 nt, synthetic construct
  source 1..20: mol_type = other RNA
aaaattcactcctcattcac

SEQ ID NO: 10585 - RNA, 20 nt, synthetic construct
  source 1..20: mol_type = other RNA
aaaattccctcagcaaaagc

SEQ ID NO: 10586 - RNA, 20 nt, synthetic construct
  source 1..20: mol_type = other RNA
aaaattcccttcagtgtagt

SEQ ID NO: 10587 - RNA, 20 nt, synthetic construct
  source 1..20: mol_type = other RNA
aaaattccgctctggtttta

SEQ ID NO: 10588 - RNA, 20 nt, synthetic construct
  source 1..20: mol_type = other RNA
aaaattccttcccctttctt

SEQ ID NO: 10589 - RNA, 20 nt, synthetic construct
  source 1..20: mol_type = other RNA
aaaattccttcctttgatga

SEQ ID NO: 10590 - RNA, 20 nt, synthetic construct
  source 1..20: mol_type = other RNA
aaaattctaacaagaagctg

SEQ ID NO: 10591 - RNA, 20 nt, synthetic construct
  source 1..20: mol_type = other RNA
aaaattctgaccctttattc

SEQ ID NO: 10592 - RNA, 20 nt, synthetic construct
  source 1..20: mol_type = other RNA
aaaattctgatagcttgaca

SEQ ID NO: 10593 - RNA, 20 nt, synthetic construct
  source 1..20: mol_type = other RNA
aaaattctgttctcagtatc

SEQ ID NO: 10594 - RNA, 20 nt, synthetic construct
  source 1..20: mol_type = other RNA
aaaattcttccagcctggta

SEQ ID NO: 10595 - RNA, 20 nt, synthetic construct
  source 1..20: mol_type = other RNA
aaaattcttggtcttttgat

SEQ ID NO: 10596 - RNA, 20 nt, synthetic construct
  source 1..20: mol_type = other RNA
aaaattgcagagtgttcaaa

SEQ ID NO: 10597 - RNA, 20 nt, synthetic construct
  source 1..20: mol_type = other RNA
aaaattgcaggtttactcca

SEQ ID NO: 10598 - RNA, 20 nt, synthetic construct
  source 1..20: mol_type = other RNA
aaaattggcgtacatgtaga

SEQ ID NO: 10599 - RNA, 20 nt, synthetic construct
  source 1..20: mol_type = other RNA
aaaattgttcatgaaatccc

SEQ ID NO: 10600 - RNA, 20 nt, synthetic construct
  source 1..20: mol_type = other RNA
aaaatttagtaagggtaaac

SEQ ID NO: 10601 - RNA, 20 nt, synthetic construct
  source 1..20: mol_type = other RNA
aaaatttatgtacatgacct

SEQ ID NO: 10602 - RNA, 20 nt, synthetic construct
  source 1..20: mol_type = other RNA
aaaatttgacatgacaggtg

SEQ ID NO: 10603 - RNA, 20 nt, synthetic construct
  source 1..20: mol_type = other RNA
aaaattttaaatcagcacca

SEQ ID NO: 10604 - RNA, 20 nt, synthetic construct
  source 1..20: mol_type = other RNA
aaaattttcattctacctgg

SEQ ID NO: 10605 - RNA, 20 nt, synthetic construct
  source 1..20: mol_type = other RNA
aaaattttctcccaaggttg

SEQ ID NO: 10606 - RNA, 20 nt, synthetic construct
  source 1..20: mol_type = other RNA
aaaattttctgagcaactac

SEQ ID NO: 10607 - RNA, 20 nt, synthetic construct
  source 1..20: mol_type = other RNA
aaaattttcttttgtgggta

SEQ ID NO: 10608 - RNA, 20 nt, synthetic construct
  source 1..20: mol_type = other RNA
aaaattttgcttaaagttgg

SEQ ID NO: 10609 - RNA, 20 nt, synthetic construct
  source 1..20: mol_type = other RNA
aaaattttgttcaggagttt

SEQ ID NO: 10610 - RNA, 20 nt, synthetic construct
  source 1..20: mol_type = other RNA
aaaatttttgtctggaacac

SEQ ID NO: 10611 - RNA, 20 nt, synthetic construct
  source 1..20: mol_type = other RNA
aaacaaaaaacaaacccccc

SEQ ID NO: 10612 - RNA, 20 nt, synthetic construct
  source 1..20: mol_type = other RNA
aaacaaaaaaccactggata

SEQ ID NO: 10613 - RNA, 20 nt, synthetic construct
  source 1..20: mol_type = other RNA
aaacaaaacaaaaccctgtt

SEQ ID NO: 10614 - RNA, 20 nt, synthetic construct
  source 1..20: mol_type = other RNA
aaacaaaacaaagtctttgg

SEQ ID NO: 10615 - RNA, 20 nt, synthetic construct
  source 1..20: mol_type = other RNA
aaacaaaacacatggcatcg

SEQ ID NO: 10616 - RNA, 20 nt, synthetic construct
  source 1..20: mol_type = other RNA
aaacaaaaccctgttgggct

SEQ ID NO: 10617 - RNA, 20 nt, synthetic construct
  source 1..20: mol_type = other RNA
aaacaaaagagtagattccc

SEQ ID NO: 10618 - RNA, 20 nt, synthetic construct
  source 1..20: mol_type = other RNA
aaacaaacaaacagaaaggc

SEQ ID NO: 10619 - RNA, 20 nt, synthetic construct
  source 1..20: mol_type = other RNA
aaacaaacacactgggtaaa

SEQ ID NO: 10620 - RNA, 20 nt, synthetic construct
  source 1..20: mol_type = other RNA
aaacaaacagaaaggcccaa

SEQ ID NO: 10621 - RNA, 20 nt, synthetic construct
  source 1..20: mol_type = other RNA
aaacaaacattttttgcaga

SEQ ID NO: 10622 - RNA, 20 nt, synthetic construct
  source 1..20: mol_type = other RNA
aaacaaagagaacaatggaa

SEQ ID NO: 10623 - RNA, 20 nt, synthetic construct
  source 1..20: mol_type = other RNA
aaacaaagtctttgggtaat

SEQ ID NO: 10624 - RNA, 20 nt, synthetic construct
  source 1..20: mol_type = other RNA
aaacaaatcagatttcaggt

SEQ ID NO: 10625 - RNA, 20 nt, synthetic construct
  source 1..20: mol_type = other RNA
aaacaaatccttttcccagg

SEQ ID NO: 10626 - RNA, 20 nt, synthetic construct
  source 1..20: mol_type = other RNA
aaacaaatggaaccactgta

SEQ ID NO: 10627 - RNA, 20 nt, synthetic construct
  source 1..20: mol_type = other RNA
aaacaaattcatgcaactga

SEQ ID NO: 10628 - RNA, 20 nt, synthetic construct
  source 1..20: mol_type = other RNA
aaacaaattccctctacaaa

SEQ ID NO: 10629 - RNA, 20 nt, synthetic construct
  source 1..20: mol_type = other RNA
aaacaaattgcatcaactgc

SEQ ID NO: 10630 - RNA, 20 nt, synthetic construct
  source 1..20: mol_type = other RNA
aaacaacaacaacaaaatac

SEQ ID NO: 10631 - RNA, 20 nt, synthetic construct
  source 1..20: mol_type = other RNA
aaacaacaacaacaacaaaa

SEQ ID NO: 10632 - RNA, 20 nt, synthetic construct
  source 1..20: mol_type = other RNA
aaacaacactaaccaacatt

SEQ ID NO: 10633 - RNA, 20 nt, synthetic construct
  source 1..20: mol_type = other RNA
aaacaacctaaatgtccatc

SEQ ID NO: 10634 - RNA, 20 nt, synthetic construct
  source 1..20: mol_type = other RNA
aaacaactcaaacgtccatc

SEQ ID NO: 10635 - RNA, 20 nt, synthetic construct
  source 1..20: mol_type = other RNA
aaacaactgactctaaagtc

SEQ ID NO: 10636 - RNA, 20 nt, synthetic construct
  source 1..20: mol_type = other RNA
aaacaagaagaaaaagcaac

SEQ ID NO: 10637 - RNA, 20 nt, synthetic construct
  source 1..20: mol_type = other RNA
aaacaagactcaacatgtgt

SEQ ID NO: 10638 - RNA, 20 nt, synthetic construct
  source 1..20: mol_type = other RNA
aaacaagtcacaaaaagaca

SEQ ID NO: 10639 - RNA, 20 nt, synthetic construct
  source 1..20: mol_type = other RNA
aaacaataaatttctgttgc

SEQ ID NO: 10640 - RNA, 20 nt, synthetic construct
  source 1..20: mol_type = other RNA
aaacaataagacaccgctcc

SEQ ID NO: 10641 - RNA, 20 nt, synthetic construct
  source 1..20: mol_type = other RNA
aaacaatactttagacatgg

SEQ ID NO: 10642 - RNA, 20 nt, synthetic construct
  source 1..20: mol_type = other RNA
aaacaatagcccagcaggat

SEQ ID NO: 10643 - RNA, 20 nt, synthetic construct
  source 1..20: mol_type = other RNA
aaacaataggaatagtattc

SEQ ID NO: 10644 - RNA, 20 nt, synthetic construct
  source 1..20: mol_type = other RNA
aaacaatcgcaatccaaaat

SEQ ID NO: 10645 - RNA, 20 nt, synthetic construct
  source 1..20: mol_type = other RNA
aaacaatcttgaaaggggcc

SEQ ID NO: 10646 - RNA, 20 nt, synthetic construct
  source 1..20: mol_type = other RNA
aaacaatgctgctatgaaaa

SEQ ID NO: 10647 - RNA, 20 nt, synthetic construct
  source 1..20: mol_type = other RNA
aaacaattacttcatagatg

SEQ ID NO: 10648 - RNA, 20 nt, synthetic construct
  source 1..20: mol_type = other RNA
aaacaattacttgagagcag

SEQ ID NO: 10649 - RNA, 20 nt, synthetic construct
  source 1..20: mol_type = other RNA
aaacaattagcacctttatt

SEQ ID NO: 10650 - RNA, 20 nt, synthetic construct
  source 1..20: mol_type = other RNA
aaacacaaaacaaatggaac

SEQ ID NO: 10651 - RNA, 20 nt, synthetic construct
  source 1..20: mol_type = other RNA
aaacacaaactgcagaatga

SEQ ID NO: 10652 - RNA, 20 nt, synthetic construct
  source 1..20: mol_type = other RNA
aaacacaacataccaaaacc

SEQ ID NO: 10653 - RNA, 20 nt, synthetic construct
  source 1..20: mol_type = other RNA
aaacacaaggacaggtcaca

SEQ ID NO: 10654 - RNA, 20 nt, synthetic construct
  source 1..20: mol_type = other RNA
aaacacacaaaccaacaaca

SEQ ID NO: 10655 - RNA, 20 nt, synthetic construct
  source 1..20: mol_type = other RNA
aaacacacccttggtaaaca

SEQ ID NO: 10656 - RNA, 20 nt, synthetic construct
  source 1..20: mol_type = other RNA
aaacacacgggctgggcgcg

SEQ ID NO: 10657 - RNA, 20 nt, synthetic construct
  source 1..20: mol_type = other RNA
aaacacacgggtacacatcc

SEQ ID NO: 10658 - RNA, 20 nt, synthetic construct
  source 1..20: mol_type = other RNA
aaacacactcgtgtatgatt

SEQ ID NO: 10659 - RNA, 20 nt, synthetic construct
  source 1..20: mol_type = other RNA
aaacacactgggtaaacaag

SEQ ID NO: 10660 - RNA, 20 nt, synthetic construct
  source 1..20: mol_type = other RNA
aaacacagaacactaaaggg

SEQ ID NO: 10661 - RNA, 20 nt, synthetic construct
  source 1..20: mol_type = other RNA
aaacacaggactgtgtgtgt

SEQ ID NO: 10662 - RNA, 20 nt, synthetic construct
  source 1..20: mol_type = other RNA
aaacacagggactgatgaag

SEQ ID NO: 10663 - RNA, 20 nt, synthetic construct
  source 1..20: mol_type = other RNA
aaacacatggcatcggggcc

SEQ ID NO: 10664 - RNA, 20 nt, synthetic construct
  source 1..20: mol_type = other RNA
aaacacatgtcatgggccgg

SEQ ID NO: 10665 - RNA, 20 nt, synthetic construct
  source 1..20: mol_type = other RNA
aaacaccaaaaaagcaccag

SEQ ID NO: 10666 - RNA, 20 nt, synthetic construct
  source 1..20: mol_type = other RNA
aaacaccaacacaaagcctt

SEQ ID NO: 10667 - RNA, 20 nt, synthetic construct
  source 1..20: mol_type = other RNA
aaacacccttgaaaatttcc

SEQ ID NO: 10668 - RNA, 20 nt, synthetic construct
  source 1..20: mol_type = other RNA
aaacacctaaagatatgtgt

SEQ ID NO: 10669 - RNA, 20 nt, synthetic construct
  source 1..20: mol_type = other RNA
aaacacctcagttaaaccca

SEQ ID NO: 10670 - RNA, 20 nt, synthetic construct
  source 1..20: mol_type = other RNA
aaacaccttacactcaaaag

SEQ ID NO: 10671 - RNA, 20 nt, synthetic construct
  source 1..20: mol_type = other RNA
aaacactataaatcagtaag

SEQ ID NO: 10672 - RNA, 20 nt, synthetic construct
  source 1..20: mol_type = other RNA
aaacactcataccaggtttt

SEQ ID NO: 10673 - RNA, 20 nt, synthetic construct
  source 1..20: mol_type = other RNA
aaacactccagaatgaccga

SEQ ID NO: 10674 - RNA, 20 nt, synthetic construct
  source 1..20: mol_type = other RNA
aaacactgctcagaagcttt

SEQ ID NO: 10675 - RNA, 20 nt, synthetic construct
  source 1..20: mol_type = other RNA
aaacactggaaatcacaggt

SEQ ID NO: 10676 - RNA, 20 nt, synthetic construct
  source 1..20: mol_type = other RNA
aaacactggaagtaattggg

SEQ ID NO: 10677 - RNA, 20 nt, synthetic construct
  source 1..20: mol_type = other RNA
aaacactggcaaaaatcatc

SEQ ID NO: 10678 - RNA, 20 nt, synthetic construct
  source 1..20: mol_type = other RNA
aaacactgtagttcagtttt

SEQ ID NO: 10679 - RNA, 20 nt, synthetic construct
  source 1..20: mol_type = other RNA
aaacactgtattttgaacaa

SEQ ID NO: 10680 - RNA, 20 nt, synthetic construct
  source 1..20: mol_type = other RNA
aaacactgttctgcgtggtt

SEQ ID NO: 10681 - RNA, 20 nt, synthetic construct
  source 1..20: mol_type = other RNA
aaacacttagcatgttgctt

SEQ ID NO: 10682 - RNA, 20 nt, synthetic construct
  source 1..20: mol_type = other RNA
aaacacttctgtgatcagaa

SEQ ID NO: 10683 - RNA, 20 nt, synthetic construct
  source 1..20: mol_type = other RNA
aaacacttgaattagtgatt

SEQ ID NO: 10684 - RNA, 20 nt, synthetic construct
  source 1..20: mol_type = other RNA
aaacacttgtgtaactacca

SEQ ID NO: 10685 - RNA, 20 nt, synthetic construct
  source 1..20: mol_type = other RNA
aaacacttttcaaacactta

SEQ ID NO: 10686 - RNA, 20 nt, synthetic construct
  source 1..20: mol_type = other RNA
aaacagaaaaatccatctta

SEQ ID NO: 10687 - RNA, 20 nt, synthetic construct
  source 1..20: mol_type = other RNA
aaacagaaaccctgtaccca

SEQ ID NO: 10688 - RNA, 20 nt, synthetic construct
  source 1..20: mol_type = other RNA
aaacagaaaggcccaaaaag

SEQ ID NO: 10689 - RNA, 20 nt, synthetic construct
  source 1..20: mol_type = other RNA
aaacagaaatgaaatggccc

SEQ ID NO: 10690 - RNA, 20 nt, synthetic construct
  source 1..20: mol_type = other RNA
aaacagaagacacaaaatca

SEQ ID NO: 10691 - RNA, 20 nt, synthetic construct
  source 1..20: mol_type = other RNA
aaacagacccttatgtccag

SEQ ID NO: 10692 - RNA, 20 nt, synthetic construct
  source 1..20: mol_type = other RNA
aaacagactgagccagcaaa

SEQ ID NO: 10693 - RNA, 20 nt, synthetic construct
  source 1..20: mol_type = other RNA
aaacagagttttccaataag

SEQ ID NO: 10694 - RNA, 20 nt, synthetic construct
  source 1..20: mol_type = other RNA
aaacagataacctagatttt

SEQ ID NO: 10695 - RNA, 20 nt, synthetic construct
  source 1..20: mol_type = other RNA
aaacagatcttggccgaatg

SEQ ID NO: 10696 - RNA, 20 nt, synthetic construct
  source 1..20: mol_type = other RNA
aaacagcagtcttaaccatt

SEQ ID NO: 10697 - RNA, 20 nt, synthetic construct
  source 1..20: mol_type = other RNA
aaacagcatactgtggatat

SEQ ID NO: 10698 - RNA, 20 nt, synthetic construct
  source 1..20: mol_type = other RNA
aaacagcatatacatgacat

SEQ ID NO: 10699 - RNA, 20 nt, synthetic construct
  source 1..20: mol_type = other RNA
aaacagcctaattgtacacc

SEQ ID NO: 10700 - RNA, 20 nt, synthetic construct
  source 1..20: mol_type = other RNA
aaacagcgccacttaaaaaa

SEQ ID NO: 10701 - RNA, 20 nt, synthetic construct
  source 1..20: mol_type = other RNA
aaacagctaggtgagtgaga

SEQ ID NO: 10702 - RNA, 20 nt, synthetic construct
  source 1..20: mol_type = other RNA
aaacagcttcttgttagaat

SEQ ID NO: 10703 - RNA, 20 nt, synthetic construct
  source 1..20: mol_type = other RNA
aaacagcttgacattcttac

SEQ ID NO: 10704 - RNA, 20 nt, synthetic construct
  source 1..20: mol_type = other RNA
aaacaggaagttgagaaaga

SEQ ID NO: 10705 - RNA, 20 nt, synthetic construct
  source 1..20: mol_type = other RNA
aaacaggatacaaaaagcac

SEQ ID NO: 10706 - RNA, 20 nt, synthetic construct
  source 1..20: mol_type = other RNA
aaacaggattacaatgtaag

SEQ ID NO: 10707 - RNA, 20 nt, synthetic construct
  source 1..20: mol_type = other RNA
aaacagggttacagtatagg

SEQ ID NO: 10708 - RNA, 20 nt, synthetic construct
  source 1..20: mol_type = other RNA
aaacagggttattaacatac

SEQ ID NO: 10709 - RNA, 20 nt, synthetic construct
  source 1..20: mol_type = other RNA
aaacaggtgtaagagattaa

SEQ ID NO: 10710 - RNA, 20 nt, synthetic construct
  source 1..20: mol_type = other RNA
aaacagtaattagttacatg

SEQ ID NO: 10711 - RNA, 20 nt, synthetic construct
  source 1..20: mol_type = other RNA
aaacagtacagtagtaaaac

SEQ ID NO: 10712 - RNA, 20 nt, synthetic construct
  source 1..20: mol_type = other RNA
aaacagtgaccacagtttga

SEQ ID NO: 10713 - RNA, 20 nt, synthetic construct
  source 1..20: mol_type = other RNA
aaacagttgctattcaacag

SEQ ID NO: 10714 - RNA, 20 nt, synthetic construct
  source 1..20: mol_type = other RNA
aaacagtttccctctgagag

SEQ ID NO: 10715 - RNA, 20 nt, synthetic construct
  source 1..20: mol_type = other RNA
aaacagtttggcaatttctc

SEQ ID NO: 10716 - RNA, 20 nt, synthetic construct
  source 1..20: mol_type = other RNA
aaacagtttttacatgtagt

SEQ ID NO: 10717 - RNA, 20 nt, synthetic construct
  source 1..20: mol_type = other RNA
aaacatacatgagaaatgtt

SEQ ID NO: 10718 - RNA, 20 nt, synthetic construct
  source 1..20: mol_type = other RNA
aaacatacatgttcagttat

SEQ ID NO: 10719 - RNA, 20 nt, synthetic construct
  source 1..20: mol_type = other RNA
aaacataccccaaccctacc

SEQ ID NO: 10720 - RNA, 20 nt, synthetic construct
  source 1..20: mol_type = other RNA
aaacatatccttctacatcc

SEQ ID NO: 10721 - RNA, 20 nt, synthetic construct
  source 1..20: mol_type = other RNA
aaacatatgcaggaccaact

SEQ ID NO: 10722 - RNA, 20 nt, synthetic construct
  source 1..20: mol_type = other RNA
aaacatatgcatgttatttg

SEQ ID NO: 10723 - RNA, 20 nt, synthetic construct
  source 1..20: mol_type = other RNA
aaacatatgtcagatggtaa

SEQ ID NO: 10724 - RNA, 20 nt, synthetic construct
  source 1..20: mol_type = other RNA
aaacatcaaagtcccctgta

SEQ ID NO: 10725 - RNA, 20 nt, synthetic construct
  source 1..20: mol_type = other RNA
aaacatcatctaatttccca

SEQ ID NO: 10726 - RNA, 20 nt, synthetic construct
  source 1..20: mol_type = other RNA
aaacatccattactcgtggt

SEQ ID NO: 10727 - RNA, 20 nt, synthetic construct
  source 1..20: mol_type = other RNA
aaacatcccaagtgcccatt

SEQ ID NO: 10728 - RNA, 20 nt, synthetic construct
  source 1..20: mol_type = other RNA
aaacatctggaaggaaacac

SEQ ID NO: 10729 - RNA, 20 nt, synthetic construct
  source 1..20: mol_type = other RNA
aaacatgaacaagttacaaa

SEQ ID NO: 10730 - RNA, 20 nt, synthetic construct
  source 1..20: mol_type = other RNA
aaacatgaataaccaatgtc

SEQ ID NO: 10731 - RNA, 20 nt, synthetic construct
  source 1..20: mol_type = other RNA
aaacatgacagatcccaaaa

SEQ ID NO: 10732 - RNA, 20 nt, synthetic construct
  source 1..20: mol_type = other RNA
aaacatggatatttggccgg

SEQ ID NO: 10733 - RNA, 20 nt, synthetic construct
  source 1..20: mol_type = other RNA
aaacatggccagtatctcct

SEQ ID NO: 10734 - RNA, 20 nt, synthetic construct
  source 1..20: mol_type = other RNA
aaacatggcttagaaatgaa

SEQ ID NO: 10735 - RNA, 20 nt, synthetic construct
  source 1..20: mol_type = other RNA
aaacatggtaatttgtccat

SEQ ID NO: 10736 - RNA, 20 nt, synthetic construct
  source 1..20: mol_type = other RNA
aaacatggtccacagaggct

SEQ ID NO: 10737 - RNA, 20 nt, synthetic construct
  source 1..20: mol_type = other RNA
aaacatgtaaaacagaccct

SEQ ID NO: 10738 - RNA, 20 nt, synthetic construct
  source 1..20: mol_type = other RNA
aaacatgtgaggatttattt

SEQ ID NO: 10739 - RNA, 20 nt, synthetic construct
  source 1..20: mol_type = other RNA
aaacatgttgtgtagaaatg

SEQ ID NO: 10740 - RNA, 20 nt, synthetic construct
  source 1..20: mol_type = other RNA
aaacatgttttcaaatgcta

SEQ ID NO: 10741 - RNA, 20 nt, synthetic construct
  source 1..20: mol_type = other RNA
aaacattctacagtattaca

SEQ ID NO: 10742 - RNA, 20 nt, synthetic construct
  source 1..20: mol_type = other RNA
aaacattgaaggcagaatta

SEQ ID NO: 10743 - RNA, 20 nt, synthetic construct
  source 1..20: mol_type = other RNA
aaacattggaggataatatc

SEQ ID NO: 10744 - RNA, 20 nt, synthetic construct
  source 1..20: mol_type = other RNA
aaacatttatggaattgcca

SEQ ID NO: 10745 - RNA, 20 nt, synthetic construct
  source 1..20: mol_type = other RNA
aaacatttctgaaaaatggt

SEQ ID NO: 10746 - RNA, 20 nt, synthetic construct
  source 1..20: mol_type = other RNA
aaacattttattaggtgcac

SEQ ID NO: 10747 - RNA, 20 nt, synthetic construct
  source 1..20: mol_type = other RNA
aaacattttccctccttttt

SEQ ID NO: 10748 - RNA, 20 nt, synthetic construct
  source 1..20: mol_type = other RNA
aaacatttttcttagttcca

SEQ ID NO: 10749 - RNA, 20 nt, synthetic construct
  source 1..20: mol_type = other RNA
aaacattttttgcagagacg

SEQ ID NO: 10750 - RNA, 20 nt, synthetic construct
  source 1..20: mol_type = other RNA
aaaccaaaaaatgtggcata

SEQ ID NO: 10751 - RNA, 20 nt, synthetic construct
  source 1..20: mol_type = other RNA
aaaccaaacactggaaatca

SEQ ID NO: 10752 - RNA, 20 nt, synthetic construct
  source 1..20: mol_type = other RNA
aaaccaaagaaaggggaagg

SEQ ID NO: 10753 - RNA, 20 nt, synthetic construct
  source 1..20: mol_type = other RNA
aaaccaaatgcagaaaataa

SEQ ID NO: 10754 - RNA, 20 nt, synthetic construct
  source 1..20: mol_type = other RNA
aaaccaaatgtggatagtgc

SEQ ID NO: 10755 - RNA, 20 nt, synthetic construct
  source 1..20: mol_type = other RNA
aaaccaacaacaaaaaatct

SEQ ID NO: 10756 - RNA, 20 nt, synthetic construct
  source 1..20: mol_type = other RNA
aaaccaagagcatagacttt

SEQ ID NO: 10757 - RNA, 20 nt, synthetic construct
  source 1..20: mol_type = other RNA
aaaccaagcaagtaaaagaa

SEQ ID NO: 10758 - RNA, 20 nt, synthetic construct
  source 1..20: mol_type = other RNA
aaaccaagtttggttcattt

SEQ ID NO: 10759 - RNA, 20 nt, synthetic construct
  source 1..20: mol_type = other RNA
aaaccaatgttctcttttcc

SEQ ID NO: 10760 - RNA, 20 nt, synthetic construct
  source 1..20: mol_type = other RNA
aaaccacaaacatgaataac

SEQ ID NO: 10761 - RNA, 20 nt, synthetic construct
  source 1..20: mol_type = other RNA
aaaccacacagagaacagca

SEQ ID NO: 10762 - RNA, 20 nt, synthetic construct
  source 1..20: mol_type = other RNA
aaaccacagagcctaaaata

SEQ ID NO: 10763 - RNA, 20 nt, synthetic construct
  source 1..20: mol_type = other RNA
aaaccacatttcatagcaga

SEQ ID NO: 10764 - RNA, 20 nt, synthetic construct
  source 1..20: mol_type = other RNA
aaaccacctaactactaata

SEQ ID NO: 10765 - RNA, 20 nt, synthetic construct
  source 1..20: mol_type = other RNA
aaaccacgcagaacagtgtt

SEQ ID NO: 10766 - RNA, 20 nt, synthetic construct
  source 1..20: mol_type = other RNA
aaaccacgcagtttgttctg

SEQ ID NO: 10767 - RNA, 20 nt, synthetic construct
  source 1..20: mol_type = other RNA
aaaccactggatacggaaat

SEQ ID NO: 10768 - RNA, 20 nt, synthetic construct
  source 1..20: mol_type = other RNA
aaaccagaaaagtgaaacaa

SEQ ID NO: 10769 - RNA, 20 nt, synthetic construct
  source 1..20: mol_type = other RNA
aaaccagacatttctcatac

SEQ ID NO: 10770 - RNA, 20 nt, synthetic construct
  source 1..20: mol_type = other RNA
aaaccagagcggaattttta

SEQ ID NO: 10771 - RNA, 20 nt, synthetic construct
  source 1..20: mol_type = other RNA
aaaccaggaggtttgcactg

SEQ ID NO: 10772 - RNA, 20 nt, synthetic construct
  source 1..20: mol_type = other RNA
aaaccagtgctctcccccga

SEQ ID NO: 10773 - RNA, 20 nt, synthetic construct
  source 1..20: mol_type = other RNA
aaaccagtgggtcagctagt

SEQ ID NO: 10774 - RNA, 20 nt, synthetic construct
  source 1..20: mol_type = other RNA
aaaccatatacaaaactgaa

SEQ ID NO: 10775 - RNA, 20 nt, synthetic construct
  source 1..20: mol_type = other RNA
aaaccatatggttaatagtg

SEQ ID NO: 10776 - RNA, 20 nt, synthetic construct
  source 1..20: mol_type = other RNA
aaaccatcaagtgtgatccc

SEQ ID NO: 10777 - RNA, 20 nt, synthetic construct
  source 1..20: mol_type = other RNA
aaaccatcctttccttgtcc

SEQ ID NO: 10778 - RNA, 20 nt, synthetic construct
  source 1..20: mol_type = other RNA
aaaccatcgttcacactcgc

SEQ ID NO: 10779 - RNA, 20 nt, synthetic construct
  source 1..20: mol_type = other RNA
aaaccatgtcatgtatatgc

SEQ ID NO: 10780 - RNA, 20 nt, synthetic construct
  source 1..20: mol_type = other RNA
aaaccatgttcatgggaaga

SEQ ID NO: 10781 - RNA, 20 nt, synthetic construct
  source 1..20: mol_type = other RNA
aaaccatttaccccttaaat

SEQ ID NO: 10782 - RNA, 20 nt, synthetic construct
  source 1..20: mol_type = other RNA
aaaccattttcaatcttgga

SEQ ID NO: 10783 - RNA, 20 nt, synthetic construct
  source 1..20: mol_type = other RNA
aaaccatttttcagaaatgt

SEQ ID NO: 10784 - RNA, 20 nt, synthetic construct
  source 1..20: mol_type = other RNA
aaacccaaattaaaggatgt

SEQ ID NO: 10785 - RNA, 20 nt, synthetic construct
  source 1..20: mol_type = other RNA
aaacccaacaaacaattagc

SEQ ID NO: 10786 - RNA, 20 nt, synthetic construct
  source 1..20: mol_type = other RNA
aaacccaactctttctttga

SEQ ID NO: 10787 - RNA, 20 nt, synthetic construct
  source 1..20: mol_type = other RNA
aaacccagacctgcacaaag

SEQ ID NO: 10788 - RNA, 20 nt, synthetic construct
  source 1..20: mol_type = other RNA
aaacccatgatctttggaaa

SEQ ID NO: 10789 - RNA, 20 nt, synthetic construct
  source 1..20: mol_type = other RNA
aaacccatttcatgccatcc

SEQ ID NO: 10790 - RNA, 20 nt, synthetic construct
  source 1..20: mol_type = other RNA
aaaccccagggatattttcg

SEQ ID NO: 10791 - RNA, 20 nt, synthetic construct
  source 1..20: mol_type = other RNA
aaaccccgcatactgtgcag

SEQ ID NO: 10792 - RNA, 20 nt, synthetic construct
  source 1..20: mol_type = other RNA
aaacccgctctgggtgcgtt

SEQ ID NO: 10793 - RNA, 20 nt, synthetic construct
  source 1..20: mol_type = other RNA
aaaccctacacccatccacc

SEQ ID NO: 10794 - RNA, 20 nt, synthetic construct
  source 1..20: mol_type = other RNA
aaaccctcacgaaagcggtc

SEQ ID NO: 10795 - RNA, 20 nt, synthetic construct
  source 1..20: mol_type = other RNA
aaaccctgtacccattagac

SEQ ID NO: 10796 - RNA, 20 nt, synthetic construct
  source 1..20: mol_type = other RNA
aaaccctgttgggctattaa

SEQ ID NO: 10797 - RNA, 20 nt, synthetic construct
  source 1..20: mol_type = other RNA
aaacccttcatcatttgtat

SEQ ID NO: 10798 - RNA, 20 nt, synthetic construct
  source 1..20: mol_type = other RNA
aaacccttggctagactaag

SEQ ID NO: 10799 - RNA, 20 nt, synthetic construct
  source 1..20: mol_type = other RNA
aaacccttgggatgcagcaa

SEQ ID NO: 10800 - RNA, 20 nt, synthetic construct
  source 1..20: mol_type = other RNA
aaaccgacagcagataagat

SEQ ID NO: 10801 - RNA, 20 nt, synthetic construct
  source 1..20: mol_type = other RNA
aaacctaaacctgtgatttc

SEQ ID NO: 10802 - RNA, 20 nt, synthetic construct
  source 1..20: mol_type = other RNA
aaacctaagaaaggtctagt

SEQ ID NO: 10803 - RNA, 20 nt, synthetic construct
  source 1..20: mol_type = other RNA
aaacctcaagtcttttccta

SEQ ID NO: 10804 - RNA, 20 nt, synthetic construct
  source 1..20: mol_type = other RNA
aaacctcccaacaggctgag

SEQ ID NO: 10805 - RNA, 20 nt, synthetic construct
  source 1..20: mol_type = other RNA
aaacctcctggttttgatca

SEQ ID NO: 10806 - RNA, 20 nt, synthetic construct
  source 1..20: mol_type = other RNA
aaacctgaaatggcttaagg

SEQ ID NO: 10807 - RNA, 20 nt, synthetic construct
  source 1..20: mol_type = other RNA
aaacctgaggtctttaaaag

SEQ ID NO: 10808 - RNA, 20 nt, synthetic construct
  source 1..20: mol_type = other RNA
aaacctgccatggtgttaaa

SEQ ID NO: 10809 - RNA, 20 nt, synthetic construct
  source 1..20: mol_type = other RNA
aaacctgctacgaatgaact

SEQ ID NO: 10810 - RNA, 20 nt, synthetic construct
  source 1..20: mol_type = other RNA
aaacctggaatcctctacca

SEQ ID NO: 10811 - RNA, 20 nt, synthetic construct
  source 1..20: mol_type = other RNA
aaacctggaatgggttggag

SEQ ID NO: 10812 - RNA, 20 nt, synthetic construct
  source 1..20: mol_type = other RNA
aaacctggcaatactctcag

SEQ ID NO: 10813 - RNA, 20 nt, synthetic construct
  source 1..20: mol_type = other RNA
aaacctggtaataatgaaag

SEQ ID NO: 10814 - RNA, 20 nt, synthetic construct
  source 1..20: mol_type = other RNA
aaacctggtatgagtgtttc

SEQ ID NO: 10815 - RNA, 20 nt, synthetic construct
  source 1..20: mol_type = other RNA
aaacctgtgatttccagtgt

SEQ ID NO: 10816 - RNA, 20 nt, synthetic construct
  source 1..20: mol_type = other RNA
aaacctgttacatggttctg

SEQ ID NO: 10817 - RNA, 20 nt, synthetic construct
  source 1..20: mol_type = other RNA
aaaccttaaaagagtgaaat

SEQ ID NO: 10818 - RNA, 20 nt, synthetic construct
  source 1..20: mol_type = other RNA
aaaccttactgtaatattgt

SEQ ID NO: 10819 - RNA, 20 nt, synthetic construct
  source 1..20: mol_type = other RNA
aaaccttcttatttccttcc

SEQ ID NO: 10820 - RNA, 20 nt, synthetic construct
  source 1..20: mol_type = other RNA
aaaccttggtgtgcttctga

SEQ ID NO: 10821 - RNA, 20 nt, synthetic construct
  source 1..20: mol_type = other RNA
aaacctttaagttctccaag

SEQ ID NO: 10822 - RNA, 20 nt, synthetic construct
  source 1..20: mol_type = other RNA
aaacctttctcaaagcccac

SEQ ID NO: 10823 - RNA, 20 nt, synthetic construct
  source 1..20: mol_type = other RNA
aaaccttttgtagaccctgt

SEQ ID NO: 10824 - RNA, 20 nt, synthetic construct
  source 1..20: mol_type = other RNA
aaacctttttgggatctgtc

SEQ ID NO: 10825 - RNA, 20 nt, synthetic construct
  source 1..20: mol_type = other RNA
aaaccttttttaaggaaaag

SEQ ID NO: 10826 - RNA, 20 nt, synthetic construct
  source 1..20: mol_type = other RNA
aaacgaaccaattaccataa

SEQ ID NO: 10827 - RNA, 20 nt, synthetic construct
  source 1..20: mol_type = other RNA
aaacgacaccagaactacac

SEQ ID NO: 10828 - RNA, 20 nt, synthetic construct
  source 1..20: mol_type = other RNA
aaacgacagcaggaaaagct

SEQ ID NO: 10829 - RNA, 20 nt, synthetic construct
  source 1..20: mol_type = other RNA
aaacgaccttgctcattcat

SEQ ID NO: 10830 - RNA, 20 nt, synthetic construct
  source 1..20: mol_type = other RNA
aaacgaggaaaagagaacat

SEQ ID NO: 10831 - RNA, 20 nt, synthetic construct
  source 1..20: mol_type = other RNA
aaacgatgcattccagattg

SEQ ID NO: 10832 - RNA, 20 nt, synthetic construct
  source 1..20: mol_type = other RNA
aaacgcattgtgatgtctca

SEQ ID NO: 10833 - RNA, 20 nt, synthetic construct
  source 1..20: mol_type = other RNA
aaacgcggaatgaagcaggc

SEQ ID NO: 10834 - RNA, 20 nt, synthetic construct
  source 1..20: mol_type = other RNA
aaacgcggcacttggtaagc

SEQ ID NO: 10835 - RNA, 20 nt, synthetic construct
  source 1..20: mol_type = other RNA
aaacggaaactttatacctg

SEQ ID NO: 10836 - RNA, 20 nt, synthetic construct
  source 1..20: mol_type = other RNA
aaacgggttatacacacata

SEQ ID NO: 10837 - RNA, 20 nt, synthetic construct
  source 1..20: mol_type = other RNA
aaacgtcagagcagcactga

SEQ ID NO: 10838 - RNA, 20 nt, synthetic construct
  source 1..20: mol_type = other RNA
aaacgtccatcaacagcaga

SEQ ID NO: 10839 - RNA, 20 nt, synthetic construct
  source 1..20: mol_type = other RNA
aaacgtgcaaactaccaaga

SEQ ID NO: 10840 - RNA, 20 nt, synthetic construct
  source 1..20: mol_type = other RNA
aaacgtgcacacccagttat

SEQ ID NO: 10841 - RNA, 20 nt, synthetic construct
  source 1..20: mol_type = other RNA
aaacgtgctttccttattga

SEQ ID NO: 10842 - RNA, 20 nt, synthetic construct
  source 1..20: mol_type = other RNA
aaacgtgtgtgtaagcacac

SEQ ID NO: 10843 - RNA, 20 nt, synthetic construct
  source 1..20: mol_type = other RNA
aaacgttaactatttctctt

SEQ ID NO: 10844 - RNA, 20 nt, synthetic construct
  source 1..20: mol_type = other RNA
aaacgtttagatgaatgatt

SEQ ID NO: 10845 - RNA, 20 nt, synthetic construct
  source 1..20: mol_type = other RNA
aaacgtttggtgactgaatt

SEQ ID NO: 10846 - RNA, 20 nt, synthetic construct
  source 1..20: mol_type = other RNA
aaactaaatgtgagcattta

SEQ ID NO: 10847 - RNA, 20 nt, synthetic construct
  source 1..20: mol_type = other RNA
aaactaacaaagaacaggaa

SEQ ID NO: 10848 - RNA, 20 nt, synthetic construct
  source 1..20: mol_type = other RNA
aaactaactagaaaaccgac

SEQ ID NO: 10849 - RNA, 20 nt, synthetic construct
  source 1..20: mol_type = other RNA
aaactaaggtcaagagagat

SEQ ID NO: 10850 - RNA, 20 nt, synthetic construct
  source 1..20: mol_type = other RNA
aaactaagtggtattctatc

SEQ ID NO: 10851 - RNA, 20 nt, synthetic construct
  source 1..20: mol_type = other RNA
aaactacaattactgtacaa

SEQ ID NO: 10852 - RNA, 20 nt, synthetic construct
  source 1..20: mol_type = other RNA
aaactacaggcaacaaaaga

SEQ ID NO: 10853 - RNA, 20 nt, synthetic construct
  source 1..20: mol_type = other RNA
aaactacatgtaaaaactgt

SEQ ID NO: 10854 - RNA, 20 nt, synthetic construct
  source 1..20: mol_type = other RNA
aaactacctagaaaaacacc

SEQ ID NO: 10855 - RNA, 20 nt, synthetic construct
  source 1..20: mol_type = other RNA
aaactacgagtatcatataa

SEQ ID NO: 10856 - RNA, 20 nt, synthetic construct
  source 1..20: mol_type = other RNA
aaactactgatagcgaaagg

SEQ ID NO: 10857 - RNA, 20 nt, synthetic construct
  source 1..20: mol_type = other RNA
aaactacttcgtgtgtggag

SEQ ID NO: 10858 - RNA, 20 nt, synthetic construct
  source 1..20: mol_type = other RNA
aaactagaaaaagaataagc

SEQ ID NO: 10859 - RNA, 20 nt, synthetic construct
  source 1..20: mol_type = other RNA
aaactagaaaagataagtag

SEQ ID NO: 10860 - RNA, 20 nt, synthetic construct
  source 1..20: mol_type = other RNA
aaactagagatgggaaagta

SEQ ID NO: 10861 - RNA, 20 nt, synthetic construct
  source 1..20: mol_type = other RNA
aaactagattaccttgaagt

SEQ ID NO: 10862 - RNA, 20 nt, synthetic construct
  source 1..20: mol_type = other RNA
aaactaggctgtcccaaatg

SEQ ID NO: 10863 - RNA, 20 nt, synthetic construct
  source 1..20: mol_type = other RNA
aaactagtatcaacctgcag

SEQ ID NO: 10864 - RNA, 20 nt, synthetic construct
  source 1..20: mol_type = other RNA
aaactatacttcaatgctac

SEQ ID NO: 10865 - RNA, 20 nt, synthetic construct
  source 1..20: mol_type = other RNA
aaactatagacccaaagcaa

SEQ ID NO: 10866 - RNA, 20 nt, synthetic construct
  source 1..20: mol_type = other RNA
aaactatccaacatgccagc

SEQ ID NO: 10867 - RNA, 20 nt, synthetic construct
  source 1..20: mol_type = other RNA
aaactatgcttaatctgatt

SEQ ID NO: 10868 - RNA, 20 nt, synthetic construct
  source 1..20: mol_type = other RNA
aaactcaaaaggacatattt

SEQ ID NO: 10869 - RNA, 20 nt, synthetic construct
  source 1..20: mol_type = other RNA
aaactcaaacccaaattaaa

SEQ ID NO: 10870 - RNA, 20 nt, synthetic construct
  source 1..20: mol_type = other RNA
aaactcaacattcattcatg

SEQ ID NO: 10871 - RNA, 20 nt, synthetic construct
  source 1..20: mol_type = other RNA
aaactcaactgcctctacat

SEQ ID NO: 10872 - RNA, 20 nt, synthetic construct
  source 1..20: mol_type = other RNA
aaactcaagttccggttctc

SEQ ID NO: 10873 - RNA, 20 nt, synthetic construct
  source 1..20: mol_type = other RNA
aaactcaatgttggttagtg

SEQ ID NO: 10874 - RNA, 20 nt, synthetic construct
  source 1..20: mol_type = other RNA
aaactcacaaaaagtgtgac

SEQ ID NO: 10875 - RNA, 20 nt, synthetic construct
  source 1..20: mol_type = other RNA
aaactcacttattagcaaag

SEQ ID NO: 10876 - RNA, 20 nt, synthetic construct
  source 1..20: mol_type = other RNA
aaactcagatctgagagata

SEQ ID NO: 10877 - RNA, 20 nt, synthetic construct
  source 1..20: mol_type = other RNA
aaactcattatcccagacag

SEQ ID NO: 10878 - RNA, 20 nt, synthetic construct
  source 1..20: mol_type = other RNA
aaactccaaacctttaagtt

SEQ ID NO: 10879 - RNA, 20 nt, synthetic construct
  source 1..20: mol_type = other RNA
aaactccaagtctcatgcaa

SEQ ID NO: 10880 - RNA, 20 nt, synthetic construct
  source 1..20: mol_type = other RNA
aaactccaagtgtaaaaaga

SEQ ID NO: 10881 - RNA, 20 nt, synthetic construct
  source 1..20: mol_type = other RNA
aaactccccatgcaggagaa

SEQ ID NO: 10882 - RNA, 20 nt, synthetic construct
  source 1..20: mol_type = other RNA
aaactcctgaacaaaatttt

SEQ ID NO: 10883 - RNA, 20 nt, synthetic construct
  source 1..20: mol_type = other RNA
aaactctggctcagaaacaa

SEQ ID NO: 10884 - RNA, 20 nt, synthetic construct
  source 1..20: mol_type = other RNA
aaactctgtttccttaccag

SEQ ID NO: 10885 - RNA, 20 nt, synthetic construct
  source 1..20: mol_type = other RNA
aaactcttagcttagaagaa

SEQ ID NO: 10886 - RNA, 20 nt, synthetic construct
  source 1..20: mol_type = other RNA
aaactcttccttatccgata

SEQ ID NO: 10887 - RNA, 20 nt, synthetic construct
  source 1..20: mol_type = other RNA
aaactgaacatttatacagt

SEQ ID NO: 10888 - RNA, 20 nt, synthetic construct
  source 1..20: mol_type = other RNA
aaactgaacgaagtgaaaaa

SEQ ID NO: 10889 - RNA, 20 nt, synthetic construct
  source 1..20: mol_type = other RNA
aaactgaactacagtgttta

SEQ ID NO: 10890 - RNA, 20 nt, synthetic construct
  source 1..20: mol_type = other RNA
aaactgaactcaaaatggat

SEQ ID NO: 10891 - RNA, 20 nt, synthetic construct
  source 1..20: mol_type = other RNA
aaactgaagtaataaagcaa

SEQ ID NO: 10892 - RNA, 20 nt, synthetic construct
  source 1..20: mol_type = other RNA
aaactgaagtttatcagtct

SEQ ID NO: 10893 - RNA, 20 nt, synthetic construct
  source 1..20: mol_type = other RNA
aaactgaagtttatcgtatt

SEQ ID NO: 10894 - RNA, 20 nt, synthetic construct
  source 1..20: mol_type = other RNA
aaactgaatcagacaacaca

SEQ ID NO: 10895 - RNA, 20 nt, synthetic construct
  source 1..20: mol_type = other RNA
aaactgacaggactccacag

SEQ ID NO: 10896 - RNA, 20 nt, synthetic construct
  source 1..20: mol_type = other RNA
aaactgagaccggatgaggt

SEQ ID NO: 10897 - RNA, 20 nt, synthetic construct
  source 1..20: mol_type = other RNA
aaactgagcatcccagaggt

SEQ ID NO: 10898 - RNA, 20 nt, synthetic construct
  source 1..20: mol_type = other RNA
aaactgcagaatgacagaaa

SEQ ID NO: 10899 - RNA, 20 nt, synthetic construct
  source 1..20: mol_type = other RNA
aaactgcagcaattatttga

SEQ ID NO: 10900 - RNA, 20 nt, synthetic construct
  source 1..20: mol_type = other RNA
aaactgccaaaccctacacc

SEQ ID NO: 10901 - RNA, 20 nt, synthetic construct
  source 1..20: mol_type = other RNA
aaactgcgtggtttattcat

SEQ ID NO: 10902 - RNA, 20 nt, synthetic construct
  source 1..20: mol_type = other RNA
aaactgctgagtcttctact

SEQ ID NO: 10903 - RNA, 20 nt, synthetic construct
  source 1..20: mol_type = other RNA
aaactggaaggaaataagaa

SEQ ID NO: 10904 - RNA, 20 nt, synthetic construct
  source 1..20: mol_type = other RNA
aaactggaatcaatccagac

SEQ ID NO: 10905 - RNA, 20 nt, synthetic construct
  source 1..20: mol_type = other RNA
aaactggaattcatcaaagt

SEQ ID NO: 10906 - RNA, 20 nt, synthetic construct
  source 1..20: mol_type = other RNA
aaactggagtgcagtggtgc

SEQ ID NO: 10907 - RNA, 20 nt, synthetic construct
  source 1..20: mol_type = other RNA
aaactggatgaatacaaagg

SEQ ID NO: 10908 - RNA, 20 nt, synthetic construct
  source 1..20: mol_type = other RNA
aaactggcaatcaaatggcc

SEQ ID NO: 10909 - RNA, 20 nt, synthetic construct
  source 1..20: mol_type = other RNA
aaactgggggctggacataa

SEQ ID NO: 10910 - RNA, 20 nt, synthetic construct
  source 1..20: mol_type = other RNA
aaactggtgaactgggtgta

SEQ ID NO: 10911 - RNA, 20 nt, synthetic construct
  source 1..20: mol_type = other RNA
aaactggttttcctgatgga

SEQ ID NO: 10912 - RNA, 20 nt, synthetic construct
  source 1..20: mol_type = other RNA
aaactgtggtcactgtttgg

SEQ ID NO: 10913 - RNA, 20 nt, synthetic construct
  source 1..20: mol_type = other RNA
aaactgtgtgcttggagtca

SEQ ID NO: 10914 - RNA, 20 nt, synthetic construct
  source 1..20: mol_type = other RNA
aaactgttccccaagccaaa

SEQ ID NO: 10915 - RNA, 20 nt, synthetic construct
  source 1..20: mol_type = other RNA
aaactgttggaaaaatcgtc

SEQ ID NO: 10916 - RNA, 20 nt, synthetic construct
  source 1..20: mol_type = other RNA
aaactgtttggctgggagct

SEQ ID NO: 10917 - RNA, 20 nt, synthetic construct
  source 1..20: mol_type = other RNA
aaactgttttccacagtgac

SEQ ID NO: 10918 - RNA, 20 nt, synthetic construct
  source 1..20: mol_type = other RNA
aaacttaagtatctcagtca

SEQ ID NO: 10919 - RNA, 20 nt, synthetic construct
  source 1..20: mol_type = other RNA
aaacttaagtatctcggtca

SEQ ID NO: 10920 - RNA, 20 nt, synthetic construct
  source 1..20: mol_type = other RNA
aaacttaggaggctattaac

SEQ ID NO: 10921 - RNA, 20 nt, synthetic construct
  source 1..20: mol_type = other RNA
aaacttatgcaagatggcaa

SEQ ID NO: 10922 - RNA, 20 nt, synthetic construct
  source 1..20: mol_type = other RNA
aaacttatttccagggggta

SEQ ID NO: 10923 - RNA, 20 nt, synthetic construct
  source 1..20: mol_type = other RNA
aaacttcaaggtaatctagt

SEQ ID NO: 10924 - RNA, 20 nt, synthetic construct
  source 1..20: mol_type = other RNA
aaacttcagttttgagtggc

SEQ ID NO: 10925 - RNA, 20 nt, synthetic construct
  source 1..20: mol_type = other RNA
aaacttccaaccatcttctt

SEQ ID NO: 10926 - RNA, 20 nt, synthetic construct
  source 1..20: mol_type = other RNA
aaacttccagaaacttccaa

SEQ ID NO: 10927 - RNA, 20 nt, synthetic construct
  source 1..20: mol_type = other RNA
aaacttccctctcagtggtg

SEQ ID NO: 10928 - RNA, 20 nt, synthetic construct
  source 1..20: mol_type = other RNA
aaacttcccttagctctcat

SEQ ID NO: 10929 - RNA, 20 nt, synthetic construct
  source 1..20: mol_type = other RNA
aaacttcgaactaaggaaag

SEQ ID NO: 10930 - RNA, 20 nt, synthetic construct
  source 1..20: mol_type = other RNA
aaacttctctggagcaagca

SEQ ID NO: 10931 - RNA, 20 nt, synthetic construct
  source 1..20: mol_type = other RNA
aaacttcttctgttggagag

SEQ ID NO: 10932 - RNA, 20 nt, synthetic construct
  source 1..20: mol_type = other RNA
aaacttgaaccttcctcttc

SEQ ID NO: 10933 - RNA, 20 nt, synthetic construct
  source 1..20: mol_type = other RNA
aaacttgaatactcgtgtgt

SEQ ID NO: 10934 - RNA, 20 nt, synthetic construct
  source 1..20: mol_type = other RNA
aaacttgagcagatcagtaa

SEQ ID NO: 10935 - RNA, 20 nt, synthetic construct
  source 1..20: mol_type = other RNA
aaacttgccatcttgcataa

SEQ ID NO: 10936 - RNA, 20 nt, synthetic construct
  source 1..20: mol_type = other RNA
aaacttggattgtgtgtcga

SEQ ID NO: 10937 - RNA, 20 nt, synthetic construct
  source 1..20: mol_type = other RNA
aaacttggtctgggtgatat

SEQ ID NO: 10938 - RNA, 20 nt, synthetic construct
  source 1..20: mol_type = other RNA
aaacttggtttattttctgc

SEQ ID NO: 10939 - RNA, 20 nt, synthetic construct
  source 1..20: mol_type = other RNA
aaacttgtagaggaggaggg

SEQ ID NO: 10940 - RNA, 20 nt, synthetic construct
  source 1..20: mol_type = other RNA
aaactttaggtcagaataca

SEQ ID NO: 10941 - RNA, 20 nt, synthetic construct
  source 1..20: mol_type = other RNA
aaactttgagtagcacccta

SEQ ID NO: 10942 - RNA, 20 nt, synthetic construct
  source 1..20: mol_type = other RNA
aaactttgcattcctgaaat

SEQ ID NO: 10943 - RNA, 20 nt, synthetic construct
  source 1..20: mol_type = other RNA
aaactttttgggcctttctg

SEQ ID NO: 10944 - RNA, 20 nt, synthetic construct
  source 1..20: mol_type = other RNA
aaagaaaaactgaactacag

SEQ ID NO: 10945 - RNA, 20 nt, synthetic construct
  source 1..20: mol_type = other RNA
aaagaaaaagaaaagacaag

SEQ ID NO: 10946 - RNA, 20 nt, synthetic construct
  source 1..20: mol_type = other RNA
aaagaaaaagctcacctctg

SEQ ID NO: 10947 - RNA, 20 nt, synthetic construct
  source 1..20: mol_type = other RNA
aaagaaaaaggttaagggaa

SEQ ID NO: 10948 - RNA, 20 nt, synthetic construct
  source 1..20: mol_type = other RNA
aaagaaaaagttgggcttgg

SEQ ID NO: 10949 - RNA, 20 nt, synthetic construct
  source 1..20: mol_type = other RNA
aaagaaaagaaaagtttcag

SEQ ID NO: 10950 - RNA, 20 nt, synthetic construct
  source 1..20: mol_type = other RNA
aaagaaaagacaagactaaa

SEQ ID NO: 10951 - RNA, 20 nt, synthetic construct
  source 1..20: mol_type = other RNA
aaagaaaagtttcagtggtt

SEQ ID NO: 10952 - RNA, 20 nt, synthetic construct
  source 1..20: mol_type = other RNA
aaagaaaataatgttttccg

SEQ ID NO: 10953 - RNA, 20 nt, synthetic construct
  source 1..20: mol_type = other RNA
aaagaaaatccaaaagcctc

SEQ ID NO: 10954 - RNA, 20 nt, synthetic construct
  source 1..20: mol_type = other RNA
aaagaaaatggccaagagtt

SEQ ID NO: 10955 - RNA, 20 nt, synthetic construct
  source 1..20: mol_type = other RNA
aaagaaaattttctgagcaa

SEQ ID NO: 10956 - RNA, 20 nt, synthetic construct
  source 1..20: mol_type = other RNA
aaagaaactacctagaaaaa

SEQ ID NO: 10957 - RNA, 20 nt, synthetic construct
  source 1..20: mol_type = other RNA
aaagaaagaaaaactgaact

SEQ ID NO: 10958 - RNA, 20 nt, synthetic construct
  source 1..20: mol_type = other RNA
aaagaaagaaggccatttga

SEQ ID NO: 10959 - RNA, 20 nt, synthetic construct
  source 1..20: mol_type = other RNA
aaagaaagagttgggttttt

SEQ ID NO: 10960 - RNA, 20 nt, synthetic construct
  source 1..20: mol_type = other RNA
aaagaaagctctcaattaat

SEQ ID NO: 10961 - RNA, 20 nt, synthetic construct
  source 1..20: mol_type = other RNA
aaagaaagctgtggatgttg

SEQ ID NO: 10962 - RNA, 20 nt, synthetic construct
  source 1..20: mol_type = other RNA
aaagaaaggggaaggaattt

SEQ ID NO: 10963 - RNA, 20 nt, synthetic construct
  source 1..20: mol_type = other RNA
aaagaaaggtctctctctgt

SEQ ID NO: 10964 - RNA, 20 nt, synthetic construct
  source 1..20: mol_type = other RNA
aaagaaatagaactgtcaca

SEQ ID NO: 10965 - RNA, 20 nt, synthetic construct
  source 1..20: mol_type = other RNA
aaagaaatctgcatccaaaa

SEQ ID NO: 10966 - RNA, 20 nt, synthetic construct
  source 1..20: mol_type = other RNA
aaagaaattagaacatctgg

SEQ ID NO: 10967 - RNA, 20 nt, synthetic construct
  source 1..20: mol_type = other RNA
aaagaaattggacgggtggt

SEQ ID NO: 10968 - RNA, 20 nt, synthetic construct
  source 1..20: mol_type = other RNA
aaagaacaacatggtagacc

SEQ ID NO: 10969 - RNA, 20 nt, synthetic construct
  source 1..20: mol_type = other RNA
aaagaacacagtgttgagaa

SEQ ID NO: 10970 - RNA, 20 nt, synthetic construct
  source 1..20: mol_type = other RNA
aaagaacactataagccaat

SEQ ID NO: 10971 - RNA, 20 nt, synthetic construct
  source 1..20: mol_type = other RNA
aaagaacaggaagggagaga

SEQ ID NO: 10972 - RNA, 20 nt, synthetic construct
  source 1..20: mol_type = other RNA
aaagaacaggacttttggta

SEQ ID NO: 10973 - RNA, 20 nt, synthetic construct
  source 1..20: mol_type = other RNA
aaagaacaggagttaccata

SEQ ID NO: 10974 - RNA, 20 nt, synthetic construct
  source 1..20: mol_type = other RNA
aaagaacatgattgggtcaa

SEQ ID NO: 10975 - RNA, 20 nt, synthetic construct
  source 1..20: mol_type = other RNA
aaagaacctctggaaaggac

SEQ ID NO: 10976 - RNA, 20 nt, synthetic construct
  source 1..20: mol_type = other RNA
aaagaactccaacaattcaa

SEQ ID NO: 10977 - RNA, 20 nt, synthetic construct
  source 1..20: mol_type = other RNA
aaagaactgaaagcagggac

SEQ ID NO: 10978 - RNA, 20 nt, synthetic construct
  source 1..20: mol_type = other RNA
aaagaagaaatcaaatggga

SEQ ID NO: 10979 - RNA, 20 nt, synthetic construct
  source 1..20: mol_type = other RNA
aaagaagatgcagttgctta

SEQ ID NO: 10980 - RNA, 20 nt, synthetic construct
  source 1..20: mol_type = other RNA
aaagaaggaaaaaacaccta

SEQ ID NO: 10981 - RNA, 20 nt, synthetic construct
  source 1..20: mol_type = other RNA
aaagaaggccatttgattgc

SEQ ID NO: 10982 - RNA, 20 nt, synthetic construct
  source 1..20: mol_type = other RNA
aaagaaggccgtccctattt

SEQ ID NO: 10983 - RNA, 20 nt, synthetic construct
  source 1..20: mol_type = other RNA
aaagaagtaatttcttctga

SEQ ID NO: 10984 - RNA, 20 nt, synthetic construct
  source 1..20: mol_type = other RNA
aaagaagttacggttccctg

SEQ ID NO: 10985 - RNA, 20 nt, synthetic construct
  source 1..20: mol_type = other RNA
aaagaataagctaatcccaa

SEQ ID NO: 10986 - RNA, 20 nt, synthetic construct
  source 1..20: mol_type = other RNA
aaagaattcgttaatacttg

SEQ ID NO: 10987 - RNA, 20 nt, synthetic construct
  source 1..20: mol_type = other RNA
aaagacaagtactgcatgat

SEQ ID NO: 10988 - RNA, 20 nt, synthetic construct
  source 1..20: mol_type = other RNA
aaagacaagttcttacctca

SEQ ID NO: 10989 - RNA, 20 nt, synthetic construct
  source 1..20: mol_type = other RNA
aaagacaatagctagtgtct

SEQ ID NO: 10990 - RNA, 20 nt, synthetic construct
  source 1..20: mol_type = other RNA
aaagacacaaaagagctggg

SEQ ID NO: 10991 - RNA, 20 nt, synthetic construct
  source 1..20: mol_type = other RNA
aaagacagacatttggaata

SEQ ID NO: 10992 - RNA, 20 nt, synthetic construct
  source 1..20: mol_type = other RNA
aaagacagacctctattaaa

SEQ ID NO: 10993 - RNA, 20 nt, synthetic construct
  source 1..20: mol_type = other RNA
aaagacagagctagaactag

SEQ ID NO: 10994 - RNA, 20 nt, synthetic construct
  source 1..20: mol_type = other RNA
aaagacagatcttatggaat

SEQ ID NO: 10995 - RNA, 20 nt, synthetic construct
  source 1..20: mol_type = other RNA
aaagacagctactaaacaaa

SEQ ID NO: 10996 - RNA, 20 nt, synthetic construct
  source 1..20: mol_type = other RNA
aaagacagggagagagagag

SEQ ID NO: 10997 - RNA, 20 nt, synthetic construct
  source 1..20: mol_type = other RNA
aaagacaggtagacatgagt

SEQ ID NO: 10998 - RNA, 20 nt, synthetic construct
  source 1..20: mol_type = other RNA
aaagacatcactaagagtga

SEQ ID NO: 10999 - RNA, 20 nt, synthetic construct
  source 1..20: mol_type = other RNA
aaagacatcctgatttaggc

SEQ ID NO: 11000 - RNA, 20 nt, synthetic construct
  source 1..20: mol_type = other RNA
aaagacatctttcctgtgat

SEQ ID NO: 11001 - RNA, 20 nt, synthetic construct
  source 1..20: mol_type = other RNA
aaagacattattcttacagt

SEQ ID NO: 11002 - RNA, 20 nt, synthetic construct
  source 1..20: mol_type = other RNA
aaagacattgtcttacatag

SEQ ID NO: 11003 - RNA, 20 nt, synthetic construct
  source 1..20: mol_type = other RNA
aaagaccaagaattttccat

SEQ ID NO: 11004 - RNA, 20 nt, synthetic construct
  source 1..20: mol_type = other RNA
aaagaccaagagtgtggctt

SEQ ID NO: 11005 - RNA, 20 nt, synthetic construct
  source 1..20: mol_type = other RNA
aaagaccgcaagagttccaa

SEQ ID NO: 11006 - RNA, 20 nt, synthetic construct
  source 1..20: mol_type = other RNA
aaagaccggggactgcaaca

SEQ ID NO: 11007 - RNA, 20 nt, synthetic construct
  source 1..20: mol_type = other RNA
aaagacctaagcttaagagc

SEQ ID NO: 11008 - RNA, 20 nt, synthetic construct
  source 1..20: mol_type = other RNA
aaagacctcaggtttagaat

SEQ ID NO: 11009 - RNA, 20 nt, synthetic construct
  source 1..20: mol_type = other RNA
aaagacgatattcctatcag

SEQ ID NO: 11010 - RNA, 20 nt, synthetic construct
  source 1..20: mol_type = other RNA
aaagacgttcagataacaaa

SEQ ID NO: 11011 - RNA, 20 nt, synthetic construct
  source 1..20: mol_type = other RNA
aaagacttcaacggacattt

SEQ ID NO: 11012 - RNA, 20 nt, synthetic construct
  source 1..20: mol_type = other RNA
aaagacttcacgatgcttag

SEQ ID NO: 11013 - RNA, 20 nt, synthetic construct
  source 1..20: mol_type = other RNA
aaagacttcaggaacacctt

SEQ ID NO: 11014 - RNA, 20 nt, synthetic construct
  source 1..20: mol_type = other RNA
aaagacttctcaaacaggat

SEQ ID NO: 11015 - RNA, 20 nt, synthetic construct
  source 1..20: mol_type = other RNA
aaagacttgaggtttacttg

SEQ ID NO: 11016 - RNA, 20 nt, synthetic construct
  source 1..20: mol_type = other RNA
aaagagaaaaattacaggtc

SEQ ID NO: 11017 - RNA, 20 nt, synthetic construct
  source 1..20: mol_type = other RNA
aaagagaaagaagtaatttc

SEQ ID NO: 11018 - RNA, 20 nt, synthetic construct
  source 1..20: mol_type = other RNA
aaagagaaatagttaacgtt

SEQ ID NO: 11019 - RNA, 20 nt, synthetic construct
  source 1..20: mol_type = other RNA
aaagagaacaaaatacctgg

SEQ ID NO: 11020 - RNA, 20 nt, synthetic construct
  source 1..20: mol_type = other RNA
aaagagaacaatggaataga

SEQ ID NO: 11021 - RNA, 20 nt, synthetic construct
  source 1..20: mol_type = other RNA
aaagagaacacacaatttga

SEQ ID NO: 11022 - RNA, 20 nt, synthetic construct
  source 1..20: mol_type = other RNA
aaagagaacattggtttgaa

SEQ ID NO: 11023 - RNA, 20 nt, synthetic construct
  source 1..20: mol_type = other RNA
aaagagaacttgcacataat

SEQ ID NO: 11024 - RNA, 20 nt, synthetic construct
  source 1..20: mol_type = other RNA
aaagagaatagcagaaacac

SEQ ID NO: 11025 - RNA, 20 nt, synthetic construct
  source 1..20: mol_type = other RNA
aaagagaatcttaaaatacc

SEQ ID NO: 11026 - RNA, 20 nt, synthetic construct
  source 1..20: mol_type = other RNA
aaagagacctgattcttcca

SEQ ID NO: 11027 - RNA, 20 nt, synthetic construct
  source 1..20: mol_type = other RNA
aaagagagagacaagcacag

SEQ ID NO: 11028 - RNA, 20 nt, synthetic construct
  source 1..20: mol_type = other RNA
aaagagagaggggggaagct

SEQ ID NO: 11029 - RNA, 20 nt, synthetic construct
  source 1..20: mol_type = other RNA
aaagagagtaaaataaaagc

SEQ ID NO: 11030 - RNA, 20 nt, synthetic construct
  source 1..20: mol_type = other RNA
aaagagagtgacagctgagt

SEQ ID NO: 11031 - RNA, 20 nt, synthetic construct
  source 1..20: mol_type = other RNA
aaagagatctagtgaagtca

SEQ ID NO: 11032 - RNA, 20 nt, synthetic construct
  source 1..20: mol_type = other RNA
aaagagcacaccaagacatg

SEQ ID NO: 11033 - RNA, 20 nt, synthetic construct
  source 1..20: mol_type = other RNA
aaagagcaggtggaaggcct

SEQ ID NO: 11034 - RNA, 20 nt, synthetic construct
  source 1..20: mol_type = other RNA
aaagagccagcctgatgatg

SEQ ID NO: 11035 - RNA, 20 nt, synthetic construct
  source 1..20: mol_type = other RNA
aaagagcgaagagggagaag

SEQ ID NO: 11036 - RNA, 20 nt, synthetic construct
  source 1..20: mol_type = other RNA
aaagagctgggactacaggt

SEQ ID NO: 11037 - RNA, 20 nt, synthetic construct
  source 1..20: mol_type = other RNA
aaagagctgggcccgcagtg

SEQ ID NO: 11038 - RNA, 20 nt, synthetic construct
  source 1..20: mol_type = other RNA
aaagaggcaaaactcctgaa

SEQ ID NO: 11039 - RNA, 20 nt, synthetic construct
  source 1..20: mol_type = other RNA
aaagagggaagtactgagtc

SEQ ID NO: 11040 - RNA, 20 nt, synthetic construct
  source 1..20: mol_type = other RNA
aaagagtagattccccctta

SEQ ID NO: 11041 - RNA, 20 nt, synthetic construct
  source 1..20: mol_type = other RNA
aaagagtgaaatgatttcaa

SEQ ID NO: 11042 - RNA, 20 nt, synthetic construct
  source 1..20: mol_type = other RNA
aaagagtgcacattccttct

SEQ ID NO: 11043 - RNA, 20 nt, synthetic construct
  source 1..20: mol_type = other RNA
aaagagttgggtttttgaaa

SEQ ID NO: 11044 - RNA, 20 nt, synthetic construct
  source 1..20: mol_type = other RNA
aaagataaaggtaaggaaac

SEQ ID NO: 11045 - RNA, 20 nt, synthetic construct
  source 1..20: mol_type = other RNA
aaagataaatcagaaactga

SEQ ID NO: 11046 - RNA, 20 nt, synthetic construct
  source 1..20: mol_type = other RNA
aaagataaatccaacgaccg

SEQ ID NO: 11047 - RNA, 20 nt, synthetic construct
  source 1..20: mol_type = other RNA
aaagataagtagaaggtcaa

SEQ ID NO: 11048 - RNA, 20 nt, synthetic construct
  source 1..20: mol_type = other RNA
aaagatacacaagatctcta

SEQ ID NO: 11049 - RNA, 20 nt, synthetic construct
  source 1..20: mol_type = other RNA
aaagatacgaaaatcctata

SEQ ID NO: 11050 - RNA, 20 nt, synthetic construct
  source 1..20: mol_type = other RNA
aaagatactcaacatcacta

SEQ ID NO: 11051 - RNA, 20 nt, synthetic construct
  source 1..20: mol_type = other RNA
aaagatactcttaaagtttc

SEQ ID NO: 11052 - RNA, 20 nt, synthetic construct
  source 1..20: mol_type = other RNA
aaagatagactcttcagagg

SEQ ID NO: 11053 - RNA, 20 nt, synthetic construct
  source 1..20: mol_type = other RNA
aaagatagccccttatcagg

SEQ ID NO: 11054 - RNA, 20 nt, synthetic construct
  source 1..20: mol_type = other RNA
aaagatatccacagtatgct

SEQ ID NO: 11055 - RNA, 20 nt, synthetic construct
  source 1..20: mol_type = other RNA
aaagatatgggttattcacc

SEQ ID NO: 11056 - RNA, 20 nt, synthetic construct
  source 1..20: mol_type = other RNA
aaagatatgtgtaggaagga

SEQ ID NO: 11057 - RNA, 20 nt, synthetic construct
  source 1..20: mol_type = other RNA
aaagatattagctacaaaag

SEQ ID NO: 11058 - RNA, 20 nt, synthetic construct
  source 1..20: mol_type = other RNA
aaagatcaaatgactatgaa

SEQ ID NO: 11059 - RNA, 20 nt, synthetic construct
  source 1..20: mol_type = other RNA
aaagatcaagctcgccgtct

SEQ ID NO: 11060 - RNA, 20 nt, synthetic construct
  source 1..20: mol_type = other RNA
aaagatcagtaaaattccct

SEQ ID NO: 11061 - RNA, 20 nt, synthetic construct
  source 1..20: mol_type = other RNA
aaagatcatgggttttaata

SEQ ID NO: 11062 - RNA, 20 nt, synthetic construct
  source 1..20: mol_type = other RNA
aaagatcatttagtaagtgt

SEQ ID NO: 11063 - RNA, 20 nt, synthetic construct
  source 1..20: mol_type = other RNA
aaagatcatttcaaaccaat

SEQ ID NO: 11064 - RNA, 20 nt, synthetic construct
  source 1..20: mol_type = other RNA
aaagatcatttcacttgatt

SEQ ID NO: 11065 - RNA, 20 nt, synthetic construct
  source 1..20: mol_type = other RNA
aaagatctcaaacagcctaa

SEQ ID NO: 11066 - RNA, 20 nt, synthetic construct
  source 1..20: mol_type = other RNA
aaagatctgtggactttagg

SEQ ID NO: 11067 - RNA, 20 nt, synthetic construct
  source 1..20: mol_type = other RNA
aaagatgaagtatagaaagg

SEQ ID NO: 11068 - RNA, 20 nt, synthetic construct
  source 1..20: mol_type = other RNA
aaagatgatgaacaaaggca

SEQ ID NO: 11069 - RNA, 20 nt, synthetic construct
  source 1..20: mol_type = other RNA
aaagatgcagaaaaagcatt

SEQ ID NO: 11070 - RNA, 20 nt, synthetic construct
  source 1..20: mol_type = other RNA
aaagatgcattctgtcacat

SEQ ID NO: 11071 - RNA, 20 nt, synthetic construct
  source 1..20: mol_type = other RNA
aaagatgccacaaatggagt

SEQ ID NO: 11072 - RNA, 20 nt, synthetic construct
  source 1..20: mol_type = other RNA
aaagatgccatttataatag

SEQ ID NO: 11073 - RNA, 20 nt, synthetic construct
  source 1..20: mol_type = other RNA
aaagatgctggtggagtatt

SEQ ID NO: 11074 - RNA, 20 nt, synthetic construct
  source 1..20: mol_type = other RNA
aaagatgtcttttaacttgc

SEQ ID NO: 11075 - RNA, 20 nt, synthetic construct
  source 1..20: mol_type = other RNA
aaagatgtgtaccaaaagtc

SEQ ID NO: 11076 - RNA, 20 nt, synthetic construct
  source 1..20: mol_type = other RNA
aaagatgttttcagttgcat

SEQ ID NO: 11077 - RNA, 20 nt, synthetic construct
  source 1..20: mol_type = other RNA
aaagattaaatacagagcac

SEQ ID NO: 11078 - RNA, 20 nt, synthetic construct
  source 1..20: mol_type = other RNA
aaagattaatccttgtggtc

SEQ ID NO: 11079 - RNA, 20 nt, synthetic construct
  source 1..20: mol_type = other RNA
aaagattatgttccacatgt

SEQ ID NO: 11080 - RNA, 20 nt, synthetic construct
  source 1..20: mol_type = other RNA
aaagattcttgtcatgaatg

SEQ ID NO: 11081 - RNA, 20 nt, synthetic construct
  source 1..20: mol_type = other RNA
aaagatttacccctactttt

SEQ ID NO: 11082 - RNA, 20 nt, synthetic construct
  source 1..20: mol_type = other RNA
aaagatttactaaactgaac

SEQ ID NO: 11083 - RNA, 20 nt, synthetic construct
  source 1..20: mol_type = other RNA
aaagatttgccaatcaataa

SEQ ID NO: 11084 - RNA, 20 nt, synthetic construct
  source 1..20: mol_type = other RNA
aaagcaaaagcaaaattcta

SEQ ID NO: 11085 - RNA, 20 nt, synthetic construct
  source 1..20: mol_type = other RNA
aaagcaaaattctaacaaga

SEQ ID NO: 11086 - RNA, 20 nt, synthetic construct
  source 1..20: mol_type = other RNA
aaagcaaaccagacatttct

SEQ ID NO: 11087 - RNA, 20 nt, synthetic construct
  source 1..20: mol_type = other RNA
aaagcaaacgtgcacaccca

SEQ ID NO: 11088 - RNA, 20 nt, synthetic construct
  source 1..20: mol_type = other RNA
aaagcaaatgtcatcttctc

SEQ ID NO: 11089 - RNA, 20 nt, synthetic construct
  source 1..20: mol_type = other RNA
aaagcaaatgtgactagaag

SEQ ID NO: 11090 - RNA, 20 nt, synthetic construct
  source 1..20: mol_type = other RNA
aaagcaacaggaagaggcag

SEQ ID NO: 11091 - RNA, 20 nt, synthetic construct
  source 1..20: mol_type = other RNA
aaagcaacatgctaagtgtt

SEQ ID NO: 11092 - RNA, 20 nt, synthetic construct
  source 1..20: mol_type = other RNA
aaagcaacctcatttgcaga

SEQ ID NO: 11093 - RNA, 20 nt, synthetic construct
  source 1..20: mol_type = other RNA
aaagcaacttgaaggcaatg

SEQ ID NO: 11094 - RNA, 20 nt, synthetic construct
  source 1..20: mol_type = other RNA
aaagcaagccttggcaaggg

SEQ ID NO: 11095 - RNA, 20 nt, synthetic construct
  source 1..20: mol_type = other RNA
aaagcaagtatgagccacta

SEQ ID NO: 11096 - RNA, 20 nt, synthetic construct
  source 1..20: mol_type = other RNA
aaagcaagttaaaagacatc

SEQ ID NO: 11097 - RNA, 20 nt, synthetic construct
  source 1..20: mol_type = other RNA
aaagcaattattagttgtac

SEQ ID NO: 11098 - RNA, 20 nt, synthetic construct
  source 1..20: mol_type = other RNA
aaagcacaagcacagagtca

SEQ ID NO: 11099 - RNA, 20 nt, synthetic construct
  source 1..20: mol_type = other RNA
aaagcacaggcatcggccgg

SEQ ID NO: 11100 - RNA, 20 nt, synthetic construct
  source 1..20: mol_type = other RNA
aaagcacataaaaaaggaat

SEQ ID NO: 11101 - RNA, 20 nt, synthetic construct
  source 1..20: mol_type = other RNA
aaagcaccactgagagggaa

SEQ ID NO: 11102 - RNA, 20 nt, synthetic construct
  source 1..20: mol_type = other RNA
aaagcaccagggcctctgaa

SEQ ID NO: 11103 - RNA, 20 nt, synthetic construct
  source 1..20: mol_type = other RNA
aaagcaccagttatcaccat

SEQ ID NO: 11104 - RNA, 20 nt, synthetic construct
  source 1..20: mol_type = other RNA
aaagcacctaccataacaaa

SEQ ID NO: 11105 - RNA, 20 nt, synthetic construct
  source 1..20: mol_type = other RNA
aaagcacgtttgatctggtc

SEQ ID NO: 11106 - RNA, 20 nt, synthetic construct
  source 1..20: mol_type = other RNA
aaagcactatccacatttgg

SEQ ID NO: 11107 - RNA, 20 nt, synthetic construct
  source 1..20: mol_type = other RNA
aaagcagaaatacagaccga

SEQ ID NO: 11108 - RNA, 20 nt, synthetic construct
  source 1..20: mol_type = other RNA
aaagcagacagaaagacagg

SEQ ID NO: 11109 - RNA, 20 nt, synthetic construct
  source 1..20: mol_type = other RNA
aaagcagagaaactggaatc

SEQ ID NO: 11110 - RNA, 20 nt, synthetic construct
  source 1..20: mol_type = other RNA
aaagcagctacctgttgatt

SEQ ID NO: 11111 - RNA, 20 nt, synthetic construct
  source 1..20: mol_type = other RNA
aaagcaggccctgagaagtc

SEQ ID NO: 11112 - RNA, 20 nt, synthetic construct
  source 1..20: mol_type = other RNA
aaagcagggactcccatatc

SEQ ID NO: 11113 - RNA, 20 nt, synthetic construct
  source 1..20: mol_type = other RNA
aaagcagggaggggtcccca

SEQ ID NO: 11114 - RNA, 20 nt, synthetic construct
  source 1..20: mol_type = other RNA
aaagcaggtcatgacttttt

SEQ ID NO: 11115 - RNA, 20 nt, synthetic construct
  source 1..20: mol_type = other RNA
aaagcaggttcattttaata

SEQ ID NO: 11116 - RNA, 20 nt, synthetic construct
  source 1..20: mol_type = other RNA
aaagcaggttgcattaatgc

SEQ ID NO: 11117 - RNA, 20 nt, synthetic construct
  source 1..20: mol_type = other RNA
aaagcatatgaatctagaaa

SEQ ID NO: 11118 - RNA, 20 nt, synthetic construct
  source 1..20: mol_type = other RNA
aaagcatcagagctttgtta

SEQ ID NO: 11119 - RNA, 20 nt, synthetic construct
  source 1..20: mol_type = other RNA
aaagccaagagcgaggcctg

SEQ ID NO: 11120 - RNA, 20 nt, synthetic construct
  source 1..20: mol_type = other RNA
aaagccaatcttcccaatcc

SEQ ID NO: 11121 - RNA, 20 nt, synthetic construct
  source 1..20: mol_type = other RNA
aaagccacactcttggtctt

SEQ ID NO: 11122 - RNA, 20 nt, synthetic construct
  source 1..20: mol_type = other RNA
aaagccaggctttcccaggg

SEQ ID NO: 11123 - RNA, 20 nt, synthetic construct
  source 1..20: mol_type = other RNA
aaagccatagtgtaaactaa

SEQ ID NO: 11124 - RNA, 20 nt, synthetic construct
  source 1..20: mol_type = other RNA
aaagccatttatcagcacca

SEQ ID NO: 11125 - RNA, 20 nt, synthetic construct
  source 1..20: mol_type = other RNA
aaagcccaatctacaggtcg

SEQ ID NO: 11126 - RNA, 20 nt, synthetic construct
  source 1..20: mol_type = other RNA
aaagcccaccagcataagac

SEQ ID NO: 11127 - RNA, 20 nt, synthetic construct
  source 1..20: mol_type = other RNA
aaagcccagccgcggactcc

SEQ ID NO: 11128 - RNA, 20 nt, synthetic construct
  source 1..20: mol_type = other RNA
aaagccccaaaccatcaagt

SEQ ID NO: 11129 - RNA, 20 nt, synthetic construct
  source 1..20: mol_type = other RNA
aaagccccattgtacacata

SEQ ID NO: 11130 - RNA, 20 nt, synthetic construct
  source 1..20: mol_type = other RNA
aaagccctcaggaccaggca

SEQ ID NO: 11131 - RNA, 20 nt, synthetic construct
  source 1..20: mol_type = other RNA
aaagcccttgagtatttttg

SEQ ID NO: 11132 - RNA, 20 nt, synthetic construct
  source 1..20: mol_type = other RNA
aaagccggattcctttcaaa

SEQ ID NO: 11133 - RNA, 20 nt, synthetic construct
  source 1..20: mol_type = other RNA
aaagcctcaaaatttagtaa

SEQ ID NO: 11134 - RNA, 20 nt, synthetic construct
  source 1..20: mol_type = other RNA
aaagcctcaaacgaaccaat

SEQ ID NO: 11135 - RNA, 20 nt, synthetic construct
  source 1..20: mol_type = other RNA
aaagcctcatttgaactttc

SEQ ID NO: 11136 - RNA, 20 nt, synthetic construct
  source 1..20: mol_type = other RNA
aaagcctctcaacacttcag

SEQ ID NO: 11137 - RNA, 20 nt, synthetic construct
  source 1..20: mol_type = other RNA
aaagcctctctgatggaacg

SEQ ID NO: 11138 - RNA, 20 nt, synthetic construct
  source 1..20: mol_type = other RNA
aaagcctctgtggaccatgt

SEQ ID NO: 11139 - RNA, 20 nt, synthetic construct
  source 1..20: mol_type = other RNA
aaagcctcttcagaagagga

SEQ ID NO: 11140 - RNA, 20 nt, synthetic construct
  source 1..20: mol_type = other RNA
aaagcctgcttcagcctaag

SEQ ID NO: 11141 - RNA, 20 nt, synthetic construct
  source 1..20: mol_type = other RNA
aaagcctggctttagatggt

SEQ ID NO: 11142 - RNA, 20 nt, synthetic construct
  source 1..20: mol_type = other RNA
aaagcctgtgacagtatgtc

SEQ ID NO: 11143 - RNA, 20 nt, synthetic construct
  source 1..20: mol_type = other RNA
aaagcctgtggaggcagtac

SEQ ID NO: 11144 - RNA, 20 nt, synthetic construct
  source 1..20: mol_type = other RNA
aaagccttctctactctgcc

SEQ ID NO: 11145 - RNA, 20 nt, synthetic construct
  source 1..20: mol_type = other RNA
aaagcctttattttttcttc

SEQ ID NO: 11146 - RNA, 20 nt, synthetic construct
  source 1..20: mol_type = other RNA
aaagcgctactcagctgtca

SEQ ID NO: 11147 - RNA, 20 nt, synthetic construct
  source 1..20: mol_type = other RNA
aaagcggtcaacgcacccag

SEQ ID NO: 11148 - RNA, 20 nt, synthetic construct
  source 1..20: mol_type = other RNA
aaagcgtactgtgattacaa

SEQ ID NO: 11149 - RNA, 20 nt, synthetic construct
  source 1..20: mol_type = other RNA
aaagcgttggagacagccta

SEQ ID NO: 11150 - RNA, 20 nt, synthetic construct
  source 1..20: mol_type = other RNA
aaagctaatctactttctaa

SEQ ID NO: 11151 - RNA, 20 nt, synthetic construct
  source 1..20: mol_type = other RNA
aaagctaccctcgagtaaaa

SEQ ID NO: 11152 - RNA, 20 nt, synthetic construct
  source 1..20: mol_type = other RNA
aaagctaccctttcttgtta

SEQ ID NO: 11153 - RNA, 20 nt, synthetic construct
  source 1..20: mol_type = other RNA
aaagctagaagacctcaaat

SEQ ID NO: 11154 - RNA, 20 nt, synthetic construct
  source 1..20: mol_type = other RNA
aaagctatacacgttacaaa

SEQ ID NO: 11155 - RNA, 20 nt, synthetic construct
  source 1..20: mol_type = other RNA
aaagctcaaaaatactcaag

SEQ ID NO: 11156 - RNA, 20 nt, synthetic construct
  source 1..20: mol_type = other RNA
aaagctcacctctggactca

SEQ ID NO: 11157 - RNA, 20 nt, synthetic construct
  source 1..20: mol_type = other RNA
aaagctcaggaccagatgac

SEQ ID NO: 11158 - RNA, 20 nt, synthetic construct
  source 1..20: mol_type = other RNA
aaagctcagtgtgtttttgt

SEQ ID NO: 11159 - RNA, 20 nt, synthetic construct
  source 1..20: mol_type = other RNA
aaagctcccaatgcttgaag

SEQ ID NO: 11160 - RNA, 20 nt, synthetic construct
  source 1..20: mol_type = other RNA
aaagctccccggatgattct

SEQ ID NO: 11161 - RNA, 20 nt, synthetic construct
  source 1..20: mol_type = other RNA
aaagctctaataaaagctgg

SEQ ID NO: 11162 - RNA, 20 nt, synthetic construct
  source 1..20: mol_type = other RNA
aaagctctaatagttcacct

SEQ ID NO: 11163 - RNA, 20 nt, synthetic construct
  source 1..20: mol_type = other RNA
aaagctctatggcatttgag

SEQ ID NO: 11164 - RNA, 20 nt, synthetic construct
  source 1..20: mol_type = other RNA
aaagctctcaattaatgccc

SEQ ID NO: 11165 - RNA, 20 nt, synthetic construct
  source 1..20: mol_type = other RNA
aaagctctgatgctttctct

SEQ ID NO: 11166 - RNA, 20 nt, synthetic construct
  source 1..20: mol_type = other RNA
aaagctgaactcctttctta

SEQ ID NO: 11167 - RNA, 20 nt, synthetic construct
  source 1..20: mol_type = other RNA
aaagctggactcattccaat

SEQ ID NO: 11168 - RNA, 20 nt, synthetic construct
  source 1..20: mol_type = other RNA
aaagctggagttatttgtat

SEQ ID NO: 11169 - RNA, 20 nt, synthetic construct
  source 1..20: mol_type = other RNA
aaagctggcatgttggatag

SEQ ID NO: 11170 - RNA, 20 nt, synthetic construct
  source 1..20: mol_type = other RNA
aaagctgtggatgttggtga

SEQ ID NO: 11171 - RNA, 20 nt, synthetic construct
  source 1..20: mol_type = other RNA
aaagcttatgatcttgggaa

SEQ ID NO: 11172 - RNA, 20 nt, synthetic construct
  source 1..20: mol_type = other RNA
aaagcttcccccctctctct

SEQ ID NO: 11173 - RNA, 20 nt, synthetic construct
  source 1..20: mol_type = other RNA
aaagcttctgagcagtgttt

SEQ ID NO: 11174 - RNA, 20 nt, synthetic construct
  source 1..20: mol_type = other RNA
aaagctttaaactggatgaa

SEQ ID NO: 11175 - RNA, 20 nt, synthetic construct
  source 1..20: mol_type = other RNA
aaagctttgtgactgtgagg

SEQ ID NO: 11176 - RNA, 20 nt, synthetic construct
  source 1..20: mol_type = other RNA
aaaggaaaaatctaaccctc

SEQ ID NO: 11177 - RNA, 20 nt, synthetic construct
  source 1..20: mol_type = other RNA
aaaggaaaagagatctagtg

SEQ ID NO: 11178 - RNA, 20 nt, synthetic construct
  source 1..20: mol_type = other RNA
aaaggaaagtaactgttggc

SEQ ID NO: 11179 - RNA, 20 nt, synthetic construct
  source 1..20: mol_type = other RNA
aaaggaaatgagtgtatgca

SEQ ID NO: 11180 - RNA, 20 nt, synthetic construct
  source 1..20: mol_type = other RNA
aaaggaactaatttcataca

SEQ ID NO: 11181 - RNA, 20 nt, synthetic construct
  source 1..20: mol_type = other RNA
aaaggaaggaattttaggac

SEQ ID NO: 11182 - RNA, 20 nt, synthetic construct
  source 1..20: mol_type = other RNA
aaaggaatataaacgtgtgt

SEQ ID NO: 11183 - RNA, 20 nt, synthetic construct
  source 1..20: mol_type = other RNA
aaaggaatccggctttatga

SEQ ID NO: 11184 - RNA, 20 nt, synthetic construct
  source 1..20: mol_type = other RNA
aaaggaatctgacctaagct

SEQ ID NO: 11185 - RNA, 20 nt, synthetic construct
  source 1..20: mol_type = other RNA
aaaggaatctgggccgggcg

SEQ ID NO: 11186 - RNA, 20 nt, synthetic construct
  source 1..20: mol_type = other RNA
aaaggaatggaattctgatg

SEQ ID NO: 11187 - RNA, 20 nt, synthetic construct
  source 1..20: mol_type = other RNA
aaaggaattgtaatcacagt

SEQ ID NO: 11188 - RNA, 20 nt, synthetic construct
  source 1..20: mol_type = other RNA
aaaggacacaaattatgact

SEQ ID NO: 11189 - RNA, 20 nt, synthetic construct
  source 1..20: mol_type = other RNA
aaaggacactattgagagtg

SEQ ID NO: 11190 - RNA, 20 nt, synthetic construct
  source 1..20: mol_type = other RNA
aaaggacattagtggaaaaa

SEQ ID NO: 11191 - RNA, 20 nt, synthetic construct
  source 1..20: mol_type = other RNA
aaaggaccatctgttaaaag

SEQ ID NO: 11192 - RNA, 20 nt, synthetic construct
  source 1..20: mol_type = other RNA
aaaggactggaactcatttc

SEQ ID NO: 11193 - RNA, 20 nt, synthetic construct
  source 1..20: mol_type = other RNA
aaaggactgggatcctaagc

SEQ ID NO: 11194 - RNA, 20 nt, synthetic construct
  source 1..20: mol_type = other RNA
aaaggacttcagtccttacc

SEQ ID NO: 11195 - RNA, 20 nt, synthetic construct
  source 1..20: mol_type = other RNA
aaaggacttgatctaaaatg

SEQ ID NO: 11196 - RNA, 20 nt, synthetic construct
  source 1..20: mol_type = other RNA
aaaggagaccagttaggaag

SEQ ID NO: 11197 - RNA, 20 nt, synthetic construct
  source 1..20: mol_type = other RNA
aaaggagagaagagggggca

SEQ ID NO: 11198 - RNA, 20 nt, synthetic construct
  source 1..20: mol_type = other RNA
aaaggagatactggccatgt

SEQ ID NO: 11199 - RNA, 20 nt, synthetic construct
  source 1..20: mol_type = other RNA
aaaggagatatacaggaaga

SEQ ID NO: 11200 - RNA, 20 nt, synthetic construct
  source 1..20: mol_type = other RNA
aaaggaggaactaattgata

SEQ ID NO: 11201 - RNA, 20 nt, synthetic construct
  source 1..20: mol_type = other RNA
aaaggagggaaaatgtttat

SEQ ID NO: 11202 - RNA, 20 nt, synthetic construct
  source 1..20: mol_type = other RNA
aaaggagggactgaaaccag

SEQ ID NO: 11203 - RNA, 20 nt, synthetic construct
  source 1..20: mol_type = other RNA
aaaggagttcagctttaaag

SEQ ID NO: 11204 - RNA, 20 nt, synthetic construct
  source 1..20: mol_type = other RNA
aaaggatactgagaacagaa

SEQ ID NO: 11205 - RNA, 20 nt, synthetic construct
  source 1..20: mol_type = other RNA
aaaggatatgggccaaagac

SEQ ID NO: 11206 - RNA, 20 nt, synthetic construct
  source 1..20: mol_type = other RNA
aaaggatgaccttgacaata

SEQ ID NO: 11207 - RNA, 20 nt, synthetic construct
  source 1..20: mol_type = other RNA
aaaggatgcacaagacagat

SEQ ID NO: 11208 - RNA, 20 nt, synthetic construct
  source 1..20: mol_type = other RNA
aaaggatggtttgattgttc

SEQ ID NO: 11209 - RNA, 20 nt, synthetic construct
  source 1..20: mol_type = other RNA
aaaggatgtcaacaaaatac

SEQ ID NO: 11210 - RNA, 20 nt, synthetic construct
  source 1..20: mol_type = other RNA
aaaggatgtcaactgaggca

SEQ ID NO: 11211 - RNA, 20 nt, synthetic construct
  source 1..20: mol_type = other RNA
aaaggattagaaagtagatt

SEQ ID NO: 11212 - RNA, 20 nt, synthetic construct
  source 1..20: mol_type = other RNA
aaaggattcgggggagagca

SEQ ID NO: 11213 - RNA, 20 nt, synthetic construct
  source 1..20: mol_type = other RNA
aaaggattgggaagattggc

SEQ ID NO: 11214 - RNA, 20 nt, synthetic construct
  source 1..20: mol_type = other RNA
aaaggatttgtttgtgaaga

SEQ ID NO: 11215 - RNA, 20 nt, synthetic construct
  source 1..20: mol_type = other RNA
aaaggcaaaccacacagaga

SEQ ID NO: 11216 - RNA, 20 nt, synthetic construct
  source 1..20: mol_type = other RNA
aaaggcaaaggaaaaaactt

SEQ ID NO: 11217 - RNA, 20 nt, synthetic construct
  source 1..20: mol_type = other RNA
aaaggcaatgctctcttccc

SEQ ID NO: 11218 - RNA, 20 nt, synthetic construct
  source 1..20: mol_type = other RNA
aaaggcaggagcagtgtgaa

SEQ ID NO: 11219 - RNA, 20 nt, synthetic construct
  source 1..20: mol_type = other RNA
aaaggcatgaaattcttggg

SEQ ID NO: 11220 - RNA, 20 nt, synthetic construct
  source 1..20: mol_type = other RNA
aaaggcccaaaaagttttta

SEQ ID NO: 11221 - RNA, 20 nt, synthetic construct
  source 1..20: mol_type = other RNA
aaaggccccttgaaagatca

SEQ ID NO: 11222 - RNA, 20 nt, synthetic construct
  source 1..20: mol_type = other RNA
aaaggccctgatttaaagta

SEQ ID NO: 11223 - RNA, 20 nt, synthetic construct
  source 1..20: mol_type = other RNA
aaaggccgctcttgaccttg

SEQ ID NO: 11224 - RNA, 20 nt, synthetic construct
  source 1..20: mol_type = other RNA
aaaggcgaagcccgccgctc

SEQ ID NO: 11225 - RNA, 20 nt, synthetic construct
  source 1..20: mol_type = other RNA
aaaggcgaagcggcagggcc

SEQ ID NO: 11226 - RNA, 20 nt, synthetic construct
  source 1..20: mol_type = other RNA
aaaggcgtcggggctgctgg

SEQ ID NO: 11227 - RNA, 20 nt, synthetic construct
  source 1..20: mol_type = other RNA
aaaggctaattttttctgta

SEQ ID NO: 11228 - RNA, 20 nt, synthetic construct
  source 1..20: mol_type = other RNA
aaaggctgagacctcatctt

SEQ ID NO: 11229 - RNA, 20 nt, synthetic construct
  source 1..20: mol_type = other RNA
aaaggctggaaataatttcc

SEQ ID NO: 11230 - RNA, 20 nt, synthetic construct
  source 1..20: mol_type = other RNA
aaaggctttcgtatggaaga

SEQ ID NO: 11231 - RNA, 20 nt, synthetic construct
  source 1..20: mol_type = other RNA
aaagggaaaacaattacttg

SEQ ID NO: 11232 - RNA, 20 nt, synthetic construct
  source 1..20: mol_type = other RNA
aaagggaaatatgaaccaca

SEQ ID NO: 11233 - RNA, 20 nt, synthetic construct
  source 1..20: mol_type = other RNA
aaagggagtcagtagaggcc

SEQ ID NO: 11234 - RNA, 20 nt, synthetic construct
  source 1..20: mol_type = other RNA
aaagggataatgctatccag

SEQ ID NO: 11235 - RNA, 20 nt, synthetic construct
  source 1..20: mol_type = other RNA
aaagggattctggccaaatc

SEQ ID NO: 11236 - RNA, 20 nt, synthetic construct
  source 1..20: mol_type = other RNA
aaagggcctgttccaggcct

SEQ ID NO: 11237 - RNA, 20 nt, synthetic construct
  source 1..20: mol_type = other RNA
aaaggggaaggaattttcag

SEQ ID NO: 11238 - RNA, 20 nt, synthetic construct
  source 1..20: mol_type = other RNA
aaaggggatgggggacgacg

SEQ ID NO: 11239 - RNA, 20 nt, synthetic construct
  source 1..20: mol_type = other RNA
aaaggggatttcatgaacaa

SEQ ID NO: 11240 - RNA, 20 nt, synthetic construct
  source 1..20: mol_type = other RNA
aaaggggcattccgtggaag

SEQ ID NO: 11241 - RNA, 20 nt, synthetic construct
  source 1..20: mol_type = other RNA
aaaggggccaggtgtggagg

SEQ ID NO: 11242 - RNA, 20 nt, synthetic construct
  source 1..20: mol_type = other RNA
aaagggtaagaaaattgtac

SEQ ID NO: 11243 - RNA, 20 nt, synthetic construct
  source 1..20: mol_type = other RNA
aaagggtagagcactttcgt

SEQ ID NO: 11244 - RNA, 20 nt, synthetic construct
  source 1..20: mol_type = other RNA
aaagggtagctttgatgccc

SEQ ID NO: 11245 - RNA, 20 nt, synthetic construct
  source 1..20: mol_type = other RNA
aaagggtcactattaaccat

SEQ ID NO: 11246 - RNA, 20 nt, synthetic construct
  source 1..20: mol_type = other RNA
aaagggtcagaattttattt

SEQ ID NO: 11247 - RNA, 20 nt, synthetic construct
  source 1..20: mol_type = other RNA
aaagggtctggtatctacca

SEQ ID NO: 11248 - RNA, 20 nt, synthetic construct
  source 1..20: mol_type = other RNA
aaagggtgggggcatcaaag

SEQ ID NO: 11249 - RNA, 20 nt, synthetic construct
  source 1..20: mol_type = other RNA
aaagggtgtgtgaatggaaa

SEQ ID NO: 11250 - RNA, 20 nt, synthetic construct
  source 1..20: mol_type = other RNA
aaagggttcttggaaattag

SEQ ID NO: 11251 - RNA, 20 nt, synthetic construct
  source 1..20: mol_type = other RNA
aaaggtaaggaaaccccagg

SEQ ID NO: 11252 - RNA, 20 nt, synthetic construct
  source 1..20: mol_type = other RNA
aaaggtacgacgctcttgtt

SEQ ID NO: 11253 - RNA, 20 nt, synthetic construct
  source 1..20: mol_type = other RNA
aaaggtagaaacatcccaag

SEQ ID NO: 11254 - RNA, 20 nt, synthetic construct
  source 1..20: mol_type = other RNA
aaaggtagaagataatgtta

SEQ ID NO: 11255 - RNA, 20 nt, synthetic construct
  source 1..20: mol_type = other RNA
aaaggtataaaggatgcaca

SEQ ID NO: 11256 - RNA, 20 nt, synthetic construct
  source 1..20: mol_type = other RNA
aaaggtctagtgtgcatgtg

SEQ ID NO: 11257 - RNA, 20 nt, synthetic construct
  source 1..20: mol_type = other RNA
aaaggtctctctctgtcacc

SEQ ID NO: 11258 - RNA, 20 nt, synthetic construct
  source 1..20: mol_type = other RNA
aaaggtgctaattgtttgtt

SEQ ID NO: 11259 - RNA, 20 nt, synthetic construct
  source 1..20: mol_type = other RNA
aaaggtgctgttgtatttta

SEQ ID NO: 11260 - RNA, 20 nt, synthetic construct
  source 1..20: mol_type = other RNA
aaaggtgttaagccgttcca

SEQ ID NO: 11261 - RNA, 20 nt, synthetic construct
  source 1..20: mol_type = other RNA
aaaggttaagggaagagcta

SEQ ID NO: 11262 - RNA, 20 nt, synthetic construct
  source 1..20: mol_type = other RNA
aaaggttgaaaactcaactg

SEQ ID NO: 11263 - RNA, 20 nt, synthetic construct
  source 1..20: mol_type = other RNA
aaaggttgagacaagaccac

SEQ ID NO: 11264 - RNA, 20 nt, synthetic construct
  source 1..20: mol_type = other RNA
aaaggttgcttaattgagct

SEQ ID NO: 11265 - RNA, 20 nt, synthetic construct
  source 1..20: mol_type = other RNA
aaaggtttccagtggccccc

SEQ ID NO: 11266 - RNA, 20 nt, synthetic construct
  source 1..20: mol_type = other RNA
aaaggtttcttcactcttaa

SEQ ID NO: 11267 - RNA, 20 nt, synthetic construct
  source 1..20: mol_type = other RNA
aaaggtttggagtttgtagc

SEQ ID NO: 11268 - RNA, 20 nt, synthetic construct
  source 1..20: mol_type = other RNA
aaaggtttttgaacaagagc

SEQ ID NO: 11269 - RNA, 20 nt, synthetic construct
  source 1..20: mol_type = other RNA
aaagtaaaaagcactatcca

SEQ ID NO: 11270 - RNA, 20 nt, synthetic construct
  source 1..20: mol_type = other RNA
aaagtaaagatagcccctta

SEQ ID NO: 11271 - RNA, 20 nt, synthetic construct
  source 1..20: mol_type = other RNA
aaagtaaatcagactgtatt

SEQ ID NO: 11272 - RNA, 20 nt, synthetic construct
  source 1..20: mol_type = other RNA
aaagtaaattcgcataacca

SEQ ID NO: 11273 - RNA, 20 nt, synthetic construct
  source 1..20: mol_type = other RNA
aaagtaactgttggcaagga

SEQ ID NO: 11274 - RNA, 20 nt, synthetic construct
  source 1..20: mol_type = other RNA
aaagtaatcaagtgaaatga

SEQ ID NO: 11275 - RNA, 20 nt, synthetic construct
  source 1..20: mol_type = other RNA
aaagtaatgaaaattagctg

SEQ ID NO: 11276 - RNA, 20 nt, synthetic construct
  source 1..20: mol_type = other RNA
aaagtacagataaccaataa

SEQ ID NO: 11277 - RNA, 20 nt, synthetic construct
  source 1..20: mol_type = other RNA
aaagtactggaaatggacag

SEQ ID NO: 11278 - RNA, 20 nt, synthetic construct
  source 1..20: mol_type = other RNA
aaagtagaaggccctatgcc

SEQ ID NO: 11279 - RNA, 20 nt, synthetic construct
  source 1..20: mol_type = other RNA
aaagtagaggactgcctatt

SEQ ID NO: 11280 - RNA, 20 nt, synthetic construct
  source 1..20: mol_type = other RNA
aaagtagattagcttttacg

SEQ ID NO: 11281 - RNA, 20 nt, synthetic construct
  source 1..20: mol_type = other RNA
aaagtaggggtaaatctttg

SEQ ID NO: 11282 - RNA, 20 nt, synthetic construct
  source 1..20: mol_type = other RNA
aaagtaggttgagacttaga

SEQ ID NO: 11283 - RNA, 20 nt, synthetic construct
  source 1..20: mol_type = other RNA
aaagtataaatgaggtatca

SEQ ID NO: 11284 - RNA, 20 nt, synthetic construct
  source 1..20: mol_type = other RNA
aaagtatcgtgagactatta

SEQ ID NO: 11285 - RNA, 20 nt, synthetic construct
  source 1..20: mol_type = other RNA
aaagtatgagaaatgtctgg

SEQ ID NO: 11286 - RNA, 20 nt, synthetic construct
  source 1..20: mol_type = other RNA
aaagtatgcatagcagggtc

SEQ ID NO: 11287 - RNA, 20 nt, synthetic construct
  source 1..20: mol_type = other RNA
aaagtatggttgaagaaagt

SEQ ID NO: 11288 - RNA, 20 nt, synthetic construct
  source 1..20: mol_type = other RNA
aaagtattaaaagcacaagc

SEQ ID NO: 11289 - RNA, 20 nt, synthetic construct
  source 1..20: mol_type = other RNA
aaagtattcccaagatcata

SEQ ID NO: 11290 - RNA, 20 nt, synthetic construct
  source 1..20: mol_type = other RNA
aaagtcactgtggaaaacag

SEQ ID NO: 11291 - RNA, 20 nt, synthetic construct
  source 1..20: mol_type = other RNA
aaagtcagaggagcagttac

SEQ ID NO: 11292 - RNA, 20 nt, synthetic construct
  source 1..20: mol_type = other RNA
aaagtcagctaattttctaa

SEQ ID NO: 11293 - RNA, 20 nt, synthetic construct
  source 1..20: mol_type = other RNA
aaagtcagctaggcgtagta

SEQ ID NO: 11294 - RNA, 20 nt, synthetic construct
  source 1..20: mol_type = other RNA
aaagtcagtaaaaaaggacc

SEQ ID NO: 11295 - RNA, 20 nt, synthetic construct
  source 1..20: mol_type = other RNA
aaagtcatgacctgctttct

SEQ ID NO: 11296 - RNA, 20 nt, synthetic construct
  source 1..20: mol_type = other RNA
aaagtcattgaaactcaatg

SEQ ID NO: 11297 - RNA, 20 nt, synthetic construct
  source 1..20: mol_type = other RNA
aaagtccacagatctttttg

SEQ ID NO: 11298 - RNA, 20 nt, synthetic construct
  source 1..20: mol_type = other RNA
aaagtccccacatgactggc

SEQ ID NO: 11299 - RNA, 20 nt, synthetic construct
  source 1..20: mol_type = other RNA
aaagtcccctgtaattacat

SEQ ID NO: 11300 - RNA, 20 nt, synthetic construct
  source 1..20: mol_type = other RNA
aaagtcctgttcttttgtaa

SEQ ID NO: 11301 - RNA, 20 nt, synthetic construct
  source 1..20: mol_type = other RNA
aaagtctatgctcttggttt

SEQ ID NO: 11302 - RNA, 20 nt, synthetic construct
  source 1..20: mol_type = other RNA
aaagtctccctaaccaggcc

SEQ ID NO: 11303 - RNA, 20 nt, synthetic construct
  source 1..20: mol_type = other RNA
aaagtcttccattttagatc

SEQ ID NO: 11304 - RNA, 20 nt, synthetic construct
  source 1..20: mol_type = other RNA
aaagtcttgctggaagttgg

SEQ ID NO: 11305 - RNA, 20 nt, synthetic construct
  source 1..20: mol_type = other RNA
aaagtctttgggtaatttat

SEQ ID NO: 11306 - RNA, 20 nt, synthetic construct
  source 1..20: mol_type = other RNA
aaagtgaaaactaaggtcaa

SEQ ID NO: 11307 - RNA, 20 nt, synthetic construct
  source 1..20: mol_type = other RNA
aaagtgaaaggcaaaggaaa

SEQ ID NO: 11308 - RNA, 20 nt, synthetic construct
  source 1..20: mol_type = other RNA
aaagtgaagcccagagaggc

SEQ ID NO: 11309 - RNA, 20 nt, synthetic construct
  source 1..20: mol_type = other RNA
aaagtgaatatagctaagaa

SEQ ID NO: 11310 - RNA, 20 nt, synthetic construct
  source 1..20: mol_type = other RNA
aaagtgaatcactacagcat

SEQ ID NO: 11311 - RNA, 20 nt, synthetic construct
  source 1..20: mol_type = other RNA
aaagtgacagatgagaaata

SEQ ID NO: 11312 - RNA, 20 nt, synthetic construct
  source 1..20: mol_type = other RNA
aaagtgacttctggatgtgt

SEQ ID NO: 11313 - RNA, 20 nt, synthetic construct
  source 1..20: mol_type = other RNA
aaagtgagcagaaggaggaa

SEQ ID NO: 11314 - RNA, 20 nt, synthetic construct
  source 1..20: mol_type = other RNA
aaagtgataccataaagtca

SEQ ID NO: 11315 - RNA, 20 nt, synthetic construct
  source 1..20: mol_type = other RNA
aaagtgccagccacccttgc

SEQ ID NO: 11316 - RNA, 20 nt, synthetic construct
  source 1..20: mol_type = other RNA
aaagtgctctaccctttcca

SEQ ID NO: 11317 - RNA, 20 nt, synthetic construct
  source 1..20: mol_type = other RNA
aaagtgctgcagtatgcata

SEQ ID NO: 11318 - RNA, 20 nt, synthetic construct
  source 1..20: mol_type = other RNA
aaagtgctgttgaggctggg

SEQ ID NO: 11319 - RNA, 20 nt, synthetic construct
  source 1..20: mol_type = other RNA
aaagtgcttctagtaacttg

SEQ ID NO: 11320 - RNA, 20 nt, synthetic construct
  source 1..20: mol_type = other RNA
aaagtggactatgtaggcac

SEQ ID NO: 11321 - RNA, 20 nt, synthetic construct
  source 1..20: mol_type = other RNA
aaagtggagaattactaaaa

SEQ ID NO: 11322 - RNA, 20 nt, synthetic construct
  source 1..20: mol_type = other RNA
aaagtgtaaagtttctctct

SEQ ID NO: 11323 - RNA, 20 nt, synthetic construct
  source 1..20: mol_type = other RNA
aaagtgtgaccacattccca

SEQ ID NO: 11324 - RNA, 20 nt, synthetic construct
  source 1..20: mol_type = other RNA
aaagtgtgcttgggctccct

SEQ ID NO: 11325 - RNA, 20 nt, synthetic construct
  source 1..20: mol_type = other RNA
aaagtgttgactaccatctc

SEQ ID NO: 11326 - RNA, 20 nt, synthetic construct
  source 1..20: mol_type = other RNA
aaagtgtttgtcacatagaa

SEQ ID NO: 11327 - RNA, 20 nt, synthetic construct
  source 1..20: mol_type = other RNA
aaagttaaacttttgtgcat

SEQ ID NO: 11328 - RNA, 20 nt, synthetic construct
  source 1..20: mol_type = other RNA
aaagttaatagcctcctaag

SEQ ID NO: 11329 - RNA, 20 nt, synthetic construct
  source 1..20: mol_type = other RNA
aaagttaatattgtaggtgt

SEQ ID NO: 11330 - RNA, 20 nt, synthetic construct
  source 1..20: mol_type = other RNA
aaagttacaaggattgaatg

SEQ ID NO: 11331 - RNA, 20 nt, synthetic construct
  source 1..20: mol_type = other RNA
aaagttagaagtatcccaga

SEQ ID NO: 11332 - RNA, 20 nt, synthetic construct
  source 1..20: mol_type = other RNA
aaagttagctggcaaaatgg

SEQ ID NO: 11333 - RNA, 20 nt, synthetic construct
  source 1..20: mol_type = other RNA
aaagttagtgaagcagagag

SEQ ID NO: 11334 - RNA, 20 nt, synthetic construct
  source 1..20: mol_type = other RNA
aaagttagtgtctaatgggt

SEQ ID NO: 11335 - RNA, 20 nt, synthetic construct
  source 1..20: mol_type = other RNA
aaagttcaaatgaggctttt

SEQ ID NO: 11336 - RNA, 20 nt, synthetic construct
  source 1..20: mol_type = other RNA
aaagttcagaataccagaga

SEQ ID NO: 11337 - RNA, 20 nt, synthetic construct
  source 1..20: mol_type = other RNA
aaagttccaagattttccca

SEQ ID NO: 11338 - RNA, 20 nt, synthetic construct
  source 1..20: mol_type = other RNA
aaagttccccattgacaata

SEQ ID NO: 11339 - RNA, 20 nt, synthetic construct
  source 1..20: mol_type = other RNA
aaagttgaggttgaagacct

SEQ ID NO: 11340 - RNA, 20 nt, synthetic construct
  source 1..20: mol_type = other RNA
aaagttgcaaaaatactaca

SEQ ID NO: 11341 - RNA, 20 nt, synthetic construct
  source 1..20: mol_type = other RNA
aaagttgggcttggttggaa

SEQ ID NO: 11342 - RNA, 20 nt, synthetic construct
  source 1..20: mol_type = other RNA
aaagttggtcctgcatatgt

SEQ ID NO: 11343 - RNA, 20 nt, synthetic construct
  source 1..20: mol_type = other RNA
aaagtttcaaactgtggtca

SEQ ID NO: 11344 - RNA, 20 nt, synthetic construct
  source 1..20: mol_type = other RNA
aaagtttcagtggttaatat

SEQ ID NO: 11345 - RNA, 20 nt, synthetic construct
  source 1..20: mol_type = other RNA
aaagtttccgttttgcaaga

SEQ ID NO: 11346 - RNA, 20 nt, synthetic construct
  source 1..20: mol_type = other RNA
aaagtttcctacatactgca

SEQ ID NO: 11347 - RNA, 20 nt, synthetic construct
  source 1..20: mol_type = other RNA
aaagtttcctagaaaatcat

SEQ ID NO: 11348 - RNA, 20 nt, synthetic construct
  source 1..20: mol_type = other RNA
aaagtttctctctccctgcc

SEQ ID NO: 11349 - RNA, 20 nt, synthetic construct
  source 1..20: mol_type = other RNA
aaagttttccaaccactgaa

SEQ ID NO: 11350 - RNA, 20 nt, synthetic construct
  source 1..20: mol_type = other RNA
aaagttttgcagttggggac

SEQ ID NO: 11351 - RNA, 20 nt, synthetic construct
  source 1..20: mol_type = other RNA
aaagttttttcctttgcctt

SEQ ID NO: 11352 - RNA, 20 nt, synthetic construct
  source 1..20: mol_type = other RNA
aaataaaaacctttttggga

SEQ ID NO: 11353 - RNA, 20 nt, synthetic construct
  source 1..20: mol_type = other RNA
aaataaaaagtatcgtgaga

SEQ ID NO: 11354 - RNA, 20 nt, synthetic construct
  source 1..20: mol_type = other RNA
aaataaaacacaaggacagg

SEQ ID NO: 11355 - RNA, 20 nt, synthetic construct
  source 1..20: mol_type = other RNA
aaataaaacacatgtcatgg

SEQ ID NO: 11356 - RNA, 20 nt, synthetic construct
  source 1..20: mol_type = other RNA
aaataaaacatggccagtat

SEQ ID NO: 11357 - RNA, 20 nt, synthetic construct
  source 1..20: mol_type = other RNA
aaataaaacatgttgtgtag

SEQ ID NO: 11358 - RNA, 20 nt, synthetic construct
  source 1..20: mol_type = other RNA
aaataaaatgtctggccggg

SEQ ID NO: 11359 - RNA, 20 nt, synthetic construct
  source 1..20: mol_type = other RNA
aaataaaattctgacccttt

SEQ ID NO: 11360 - RNA, 20 nt, synthetic construct
  source 1..20: mol_type = other RNA
aaataaacattttccctcct

SEQ ID NO: 11361 - RNA, 20 nt, synthetic construct
  source 1..20: mol_type = other RNA
aaataaaccaagtttggttc

SEQ ID NO: 11362 - RNA, 20 nt, synthetic construct
  source 1..20: mol_type = other RNA
aaataaacgacaccagaact

SEQ ID NO: 11363 - RNA, 20 nt, synthetic construct
  source 1..20: mol_type = other RNA
aaataaagacttcacgatgc

SEQ ID NO: 11364 - RNA, 20 nt, synthetic construct
  source 1..20: mol_type = other RNA
aaataaaggctttcgtatgg

SEQ ID NO: 11365 - RNA, 20 nt, synthetic construct
  source 1..20: mol_type = other RNA
aaataaagttccccattgac

SEQ ID NO: 11366 - RNA, 20 nt, synthetic construct
  source 1..20: mol_type = other RNA
aaataaatcctcacatgttt

SEQ ID NO: 11367 - RNA, 20 nt, synthetic construct
  source 1..20: mol_type = other RNA
aaataaatctaagtctcaac

SEQ ID NO: 11368 - RNA, 20 nt, synthetic construct
  source 1..20: mol_type = other RNA
aaataacaccatagctgaag

SEQ ID NO: 11369 - RNA, 20 nt, synthetic construct
  source 1..20: mol_type = other RNA
aaataacacgcagaaccact

SEQ ID NO: 11370 - RNA, 20 nt, synthetic construct
  source 1..20: mol_type = other RNA
aaataacagaagaagaattc

SEQ ID NO: 11371 - RNA, 20 nt, synthetic construct
  source 1..20: mol_type = other RNA
aaataacatgcatatgtttg

SEQ ID NO: 11372 - RNA, 20 nt, synthetic construct
  source 1..20: mol_type = other RNA
aaataacgggccgggcgctg

SEQ ID NO: 11373 - RNA, 20 nt, synthetic construct
  source 1..20: mol_type = other RNA
aaataactccagcttttatt

SEQ ID NO: 11374 - RNA, 20 nt, synthetic construct
  source 1..20: mol_type = other RNA
aaataacttccatgagatta

SEQ ID NO: 11375 - RNA, 20 nt, synthetic construct
  source 1..20: mol_type = other RNA
aaataactttaatcaccagg

SEQ ID NO: 11376 - RNA, 20 nt, synthetic construct
  source 1..20: mol_type = other RNA
aaataagaaagatctcaaac

SEQ ID NO: 11377 - RNA, 20 nt, synthetic construct
  source 1..20: mol_type = other RNA
aaataagaagattgagtcag

SEQ ID NO: 11378 - RNA, 20 nt, synthetic construct
  source 1..20: mol_type = other RNA
aaataagaaggtttgtagag

SEQ ID NO: 11379 - RNA, 20 nt, synthetic construct
  source 1..20: mol_type = other RNA
aaataagggcattttcaagg

SEQ ID NO: 11380 - RNA, 20 nt, synthetic construct
  source 1..20: mol_type = other RNA
aaataaggtcacattcagag

SEQ ID NO: 11381 - RNA, 20 nt, synthetic construct
  source 1..20: mol_type = other RNA
aaataagtttcatggacttc

SEQ ID NO: 11382 - RNA, 20 nt, synthetic construct
  source 1..20: mol_type = other RNA
aaataatacctaacagccgg

SEQ ID NO: 11383 - RNA, 20 nt, synthetic construct
  source 1..20: mol_type = other RNA
aaataatagctatcctaatg

SEQ ID NO: 11384 - RNA, 20 nt, synthetic construct
  source 1..20: mol_type = other RNA
aaataatatgataccctcaa

SEQ ID NO: 11385 - RNA, 20 nt, synthetic construct
  source 1..20: mol_type = other RNA
aaataatcattgttaggtgc

SEQ ID NO: 11386 - RNA, 20 nt, synthetic construct
  source 1..20: mol_type = other RNA
aaataatcccgcaccttgat

SEQ ID NO: 11387 - RNA, 20 nt, synthetic construct
  source 1..20: mol_type = other RNA
aaataatgttttccgtgtga

SEQ ID NO: 11388 - RNA, 20 nt, synthetic construct
  source 1..20: mol_type = other RNA
aaataattgctgcagttttt

SEQ ID NO: 11389 - RNA, 20 nt, synthetic construct
  source 1..20: mol_type = other RNA
aaataatttacatagtgctc

SEQ ID NO: 11390 - RNA, 20 nt, synthetic construct
  source 1..20: mol_type = other RNA
aaataatttccctcagaatt

SEQ ID NO: 11391 - RNA, 20 nt, synthetic construct
  source 1..20: mol_type = other RNA
aaataatttggttatgcgaa

SEQ ID NO: 11392 - RNA, 20 nt, synthetic construct
  source 1..20: mol_type = other RNA
aaatacaaaaagtgatacca

SEQ ID NO: 11393 - RNA, 20 nt, synthetic construct
  source 1..20: mol_type = other RNA
aaatacaacagcaccttttt

SEQ ID NO: 11394 - RNA, 20 nt, synthetic construct
  source 1..20: mol_type = other RNA
aaatacaatgtgagccacat

SEQ ID NO: 11395 - RNA, 20 nt, synthetic construct
  source 1..20: mol_type = other RNA
aaatacacatgttgagtctt

SEQ ID NO: 11396 - RNA, 20 nt, synthetic construct
  source 1..20: mol_type = other RNA
aaatacaccaaactcaaaag

SEQ ID NO: 11397 - RNA, 20 nt, synthetic construct
  source 1..20: mol_type = other RNA
aaatacagaccgatggaaca

SEQ ID NO: 11398 - RNA, 20 nt, synthetic construct
  source 1..20: mol_type = other RNA
aaatacagagcacagactca

SEQ ID NO: 11399 - RNA, 20 nt, synthetic construct
  source 1..20: mol_type = other RNA
aaatacagctccaaagaaca

SEQ ID NO: 11400 - RNA, 20 nt, synthetic construct
  source 1..20: mol_type = other RNA
aaatacagttttgaccaaaa

SEQ ID NO: 11401 - RNA, 20 nt, synthetic construct
  source 1..20: mol_type = other RNA
aaatacatgaggcctctccc

SEQ ID NO: 11402 - RNA, 20 nt, synthetic construct
  source 1..20: mol_type = other RNA
aaatacatgtcatgttcccg

SEQ ID NO: 11403 - RNA, 20 nt, synthetic construct
  source 1..20: mol_type = other RNA
aaataccaaaaaaggtgctg

SEQ ID NO: 11404 - RNA, 20 nt, synthetic construct
  source 1..20: mol_type = other RNA
aaataccacctgaaatctga

SEQ ID NO: 11405 - RNA, 20 nt, synthetic construct
  source 1..20: mol_type = other RNA
aaataccagaggttaaagca

SEQ ID NO: 11406 - RNA, 20 nt, synthetic construct
  source 1..20: mol_type = other RNA
aaatacccacaagaaaaacc

SEQ ID NO: 11407 - RNA, 20 nt, synthetic construct
  source 1..20: mol_type = other RNA
aaatacctagttttccaatc

SEQ ID NO: 11408 - RNA, 20 nt, synthetic construct
  source 1..20: mol_type = other RNA
aaatacctctgaatgtgacc

SEQ ID NO: 11409 - RNA, 20 nt, synthetic construct
  source 1..20: mol_type = other RNA
aaatacctgcaggttgatac

SEQ ID NO: 11410 - RNA, 20 nt, synthetic construct
  source 1..20: mol_type = other RNA
aaatacgaaagtgctctacc

SEQ ID NO: 11411 - RNA, 20 nt, synthetic construct
  source 1..20: mol_type = other RNA
aaatacgataaacttcagtt

SEQ ID NO: 11412 - RNA, 20 nt, synthetic construct
  source 1..20: mol_type = other RNA
aaatacggccgggagtggtg

SEQ ID NO: 11413 - RNA, 20 nt, synthetic construct
  source 1..20: mol_type = other RNA
aaatacgtatatgaaaagcc

SEQ ID NO: 11414 - RNA, 20 nt, synthetic construct
  source 1..20: mol_type = other RNA
aaatacgtgtatactgggtg

SEQ ID NO: 11415 - RNA, 20 nt, synthetic construct
  source 1..20: mol_type = other RNA
aaatactaacgatccttact

SEQ ID NO: 11416 - RNA, 20 nt, synthetic construct
  source 1..20: mol_type = other RNA
aaatactacaagagttcccc

SEQ ID NO: 11417 - RNA, 20 nt, synthetic construct
  source 1..20: mol_type = other RNA
aaatactagcaaactgaatc

SEQ ID NO: 11418 - RNA, 20 nt, synthetic construct
  source 1..20: mol_type = other RNA
aaatactagtaggatgaatt

SEQ ID NO: 11419 - RNA, 20 nt, synthetic construct
  source 1..20: mol_type = other RNA
aaatactcaaactatgctta

SEQ ID NO: 11420 - RNA, 20 nt, synthetic construct
  source 1..20: mol_type = other RNA
aaatactcaagggctttcaa

SEQ ID NO: 11421 - RNA, 20 nt, synthetic construct
  source 1..20: mol_type = other RNA
aaatacttaagagcatgttg

SEQ ID NO: 11422 - RNA, 20 nt, synthetic construct
  source 1..20: mol_type = other RNA
aaatacttgaacattctgta

SEQ ID NO: 11423 - RNA, 20 nt, synthetic construct
  source 1..20: mol_type = other RNA
aaatacttggacaggggaca

SEQ ID NO: 11424 - RNA, 20 nt, synthetic construct
  source 1..20: mol_type = other RNA
aaatagaaaacttgagcaga

SEQ ID NO: 11425 - RNA, 20 nt, synthetic construct
  source 1..20: mol_type = other RNA
aaatagaactgtcacaattc

SEQ ID NO: 11426 - RNA, 20 nt, synthetic construct
  source 1..20: mol_type = other RNA
aaatagactcccaacttata

SEQ ID NO: 11427 - RNA, 20 nt, synthetic construct
  source 1..20: mol_type = other RNA
aaatagaggatgggcattcc

SEQ ID NO: 11428 - RNA, 20 nt, synthetic construct
  source 1..20: mol_type = other RNA
aaatagagttccatctgtta

SEQ ID NO: 11429 - RNA, 20 nt, synthetic construct
  source 1..20: mol_type = other RNA
aaatagataaactggaattc

SEQ ID NO: 11430 - RNA, 20 nt, synthetic construct
  source 1..20: mol_type = other RNA
aaatagataaggttgttctt

SEQ ID NO: 11431 - RNA, 20 nt, synthetic construct
  source 1..20: mol_type = other RNA
aaatagatgcctagaaagga

SEQ ID NO: 11432 - RNA, 20 nt, synthetic construct
  source 1..20: mol_type = other RNA
aaatagcaggattcttgtta

SEQ ID NO: 11433 - RNA, 20 nt, synthetic construct
  source 1..20: mol_type = other RNA
aaataggaagtccatgaaac

SEQ ID NO: 11434 - RNA, 20 nt, synthetic construct
  source 1..20: mol_type = other RNA
aaataggattaagacactac

SEQ ID NO: 11435 - RNA, 20 nt, synthetic construct
  source 1..20: mol_type = other RNA
aaataggcagtcctctactt

SEQ ID NO: 11436 - RNA, 20 nt, synthetic construct
  source 1..20: mol_type = other RNA
aaataggcctaggtgtgata

SEQ ID NO: 11437 - RNA, 20 nt, synthetic construct
  source 1..20: mol_type = other RNA
aaatagggacggccttcttt

SEQ ID NO: 11438 - RNA, 20 nt, synthetic construct
  source 1..20: mol_type = other RNA
aaatagggtgctactcaaag

SEQ ID NO: 11439 - RNA, 20 nt, synthetic construct
  source 1..20: mol_type = other RNA
aaataggtattcatgctgtg

SEQ ID NO: 11440 - RNA, 20 nt, synthetic construct
  source 1..20: mol_type = other RNA
aaatagtaactttctgctta

SEQ ID NO: 11441 - RNA, 20 nt, synthetic construct
  source 1..20: mol_type = other RNA
aaatagtagttgctcagaaa

SEQ ID NO: 11442 - RNA, 20 nt, synthetic construct
  source 1..20: mol_type = other RNA
aaatagtatgaaggttctta

SEQ ID NO: 11443 - RNA, 20 nt, synthetic construct
  source 1..20: mol_type = other RNA
aaatagtcaagtaacagttc

SEQ ID NO: 11444 - RNA, 20 nt, synthetic construct
  source 1..20: mol_type = other RNA
aaatagttggtcagaaaaat

SEQ ID NO: 11445 - RNA, 20 nt, synthetic construct
  source 1..20: mol_type = other RNA
aaatataaaaagcctctgtg

SEQ ID NO: 11446 - RNA, 20 nt, synthetic construct
  source 1..20: mol_type = other RNA
aaatataccttatgtgaaag

SEQ ID NO: 11447 - RNA, 20 nt, synthetic construct
  source 1..20: mol_type = other RNA
aaatatactgactagtggct

SEQ ID NO: 11448 - RNA, 20 nt, synthetic construct
  source 1..20: mol_type = other RNA
aaatatagaaggccagaggg

SEQ ID NO: 11449 - RNA, 20 nt, synthetic construct
  source 1..20: mol_type = other RNA
aaatatatacggaatgattc

SEQ ID NO: 11450 - RNA, 20 nt, synthetic construct
  source 1..20: mol_type = other RNA
aaatatatactgaagttctc

SEQ ID NO: 11451 - RNA, 20 nt, synthetic construct
  source 1..20: mol_type = other RNA
aaatatattctaaacctgag

SEQ ID NO: 11452 - RNA, 20 nt, synthetic construct
  source 1..20: mol_type = other RNA
aaatatccaatcactggcta

SEQ ID NO: 11453 - RNA, 20 nt, synthetic construct
  source 1..20: mol_type = other RNA
aaatatccctggggtttcct

SEQ ID NO: 11454 - RNA, 20 nt, synthetic construct
  source 1..20: mol_type = other RNA
aaatatccgaaagaactgaa

SEQ ID NO: 11455 - RNA, 20 nt, synthetic construct
  source 1..20: mol_type = other RNA
aaatatctccctcacagtcc

SEQ ID NO: 11456 - RNA, 20 nt, synthetic construct
  source 1..20: mol_type = other RNA
aaatatgaaccacactgaca

SEQ ID NO: 11457 - RNA, 20 nt, synthetic construct
  source 1..20: mol_type = other RNA
aaatatgaagcattaatgca

SEQ ID NO: 11458 - RNA, 20 nt, synthetic construct
  source 1..20: mol_type = other RNA
aaatatggtcactgctgatg

SEQ ID NO: 11459 - RNA, 20 nt, synthetic construct
  source 1..20: mol_type = other RNA
aaatatgtaatgacctggaa

SEQ ID NO: 11460 - RNA, 20 nt, synthetic construct
  source 1..20: mol_type = other RNA
aaatatgtccttttgagttt

SEQ ID NO: 11461 - RNA, 20 nt, synthetic construct
  source 1..20: mol_type = other RNA
aaatatgtggaaaatgtatg

SEQ ID NO: 11462 - RNA, 20 nt, synthetic construct
  source 1..20: mol_type = other RNA
aaatatgtgttacaactcta

SEQ ID NO: 11463 - RNA, 20 nt, synthetic construct
  source 1..20: mol_type = other RNA
aaatattccatttttctgac

SEQ ID NO: 11464 - RNA, 20 nt, synthetic construct
  source 1..20: mol_type = other RNA
aaatattgaagagggaacat

SEQ ID NO: 11465 - RNA, 20 nt, synthetic construct
  source 1..20: mol_type = other RNA
aaatatttaacaccatggca

SEQ ID NO: 11466 - RNA, 20 nt, synthetic construct
  source 1..20: mol_type = other RNA
aaatcaaaacaataagacac

SEQ ID NO: 11467 - RNA, 20 nt, synthetic construct
  source 1..20: mol_type = other RNA
aaatcaaaagaccaagaatt

SEQ ID NO: 11468 - RNA, 20 nt, synthetic construct
  source 1..20: mol_type = other RNA
aaatcaaagaaagagttggg

SEQ ID NO: 11469 - RNA, 20 nt, synthetic construct
  source 1..20: mol_type = other RNA
aaatcaaatgggaaattaga

SEQ ID NO: 11470 - RNA, 20 nt, synthetic construct
  source 1..20: mol_type = other RNA
aaatcaacagtgtactagtc

SEQ ID NO: 11471 - RNA, 20 nt, synthetic construct
  source 1..20: mol_type = other RNA
aaatcaacattgcctccata

SEQ ID NO: 11472 - RNA, 20 nt, synthetic construct
  source 1..20: mol_type = other RNA
aaatcaacccatgaaaattg

SEQ ID NO: 11473 - RNA, 20 nt, synthetic construct
  source 1..20: mol_type = other RNA
aaatcaaccccatcaacaag

SEQ ID NO: 11474 - RNA, 20 nt, synthetic construct
  source 1..20: mol_type = other RNA
aaatcaaggtacaatacact

SEQ ID NO: 11475 - RNA, 20 nt, synthetic construct
  source 1..20: mol_type = other RNA
aaatcaaggtgcgggattat

SEQ ID NO: 11476 - RNA, 20 nt, synthetic construct
  source 1..20: mol_type = other RNA
aaatcaatacttcatttcca

SEQ ID NO: 11477 - RNA, 20 nt, synthetic construct
  source 1..20: mol_type = other RNA
aaatcaatctgtttcctaat

SEQ ID NO: 11478 - RNA, 20 nt, synthetic construct
  source 1..20: mol_type = other RNA
aaatcacacaatcttgagac

SEQ ID NO: 11479 - RNA, 20 nt, synthetic construct
  source 1..20: mol_type = other RNA
aaatcacaggaaagatgtct

SEQ ID NO: 11480 - RNA, 20 nt, synthetic construct
  source 1..20: mol_type = other RNA
aaatcacaggtttaggtttt

SEQ ID NO: 11481 - RNA, 20 nt, synthetic construct
  source 1..20: mol_type = other RNA
aaatcactaattcaagtgtt

SEQ ID NO: 11482 - RNA, 20 nt, synthetic construct
  source 1..20: mol_type = other RNA
aaatcagaaaaggctgagac

SEQ ID NO: 11483 - RNA, 20 nt, synthetic construct
  source 1..20: mol_type = other RNA
aaatcagaaactgacaggac

SEQ ID NO: 11484 - RNA, 20 nt, synthetic construct
  source 1..20: mol_type = other RNA
aaatcagaacttgacaagta

SEQ ID NO: 11485 - RNA, 20 nt, synthetic construct
  source 1..20: mol_type = other RNA
aaatcagactgtattaccag

SEQ ID NO: 11486 - RNA, 20 nt, synthetic construct
  source 1..20: mol_type = other RNA
aaatcagatatgaaagagga

SEQ ID NO: 11487 - RNA, 20 nt, synthetic construct
  source 1..20: mol_type = other RNA
aaatcagattaagcatagtt

SEQ ID NO: 11488 - RNA, 20 nt, synthetic construct
  source 1..20: mol_type = other RNA
aaatcagatttcaggtggta

SEQ ID NO: 11489 - RNA, 20 nt, synthetic construct
  source 1..20: mol_type = other RNA
aaatcagcaccatctaacag

SEQ ID NO: 11490 - RNA, 20 nt, synthetic construct
  source 1..20: mol_type = other RNA
aaatcaggaagtatgagtct

SEQ ID NO: 11491 - RNA, 20 nt, synthetic construct
  source 1..20: mol_type = other RNA
aaatcaggatgtctttggga

SEQ ID NO: 11492 - RNA, 20 nt, synthetic construct
  source 1..20: mol_type = other RNA
aaatcagggcctttaatcac

SEQ ID NO: 11493 - RNA, 20 nt, synthetic construct
  source 1..20: mol_type = other RNA
aaatcagtaagaaaacagat

SEQ ID NO: 11494 - RNA, 20 nt, synthetic construct
  source 1..20: mol_type = other RNA
aaatcagtgaatatcatttg

SEQ ID NO: 11495 - RNA, 20 nt, synthetic construct
  source 1..20: mol_type = other RNA
aaatcagtgtgaaagtatta

SEQ ID NO: 11496 - RNA, 20 nt, synthetic construct
  source 1..20: mol_type = other RNA
aaatcatacacgagtgtgtt

SEQ ID NO: 11497 - RNA, 20 nt, synthetic construct
  source 1..20: mol_type = other RNA
aaatcatacattttccacat

SEQ ID NO: 11498 - RNA, 20 nt, synthetic construct
  source 1..20: mol_type = other RNA
aaatcatcacagtatgcaca

SEQ ID NO: 11499 - RNA, 20 nt, synthetic construct
  source 1..20: mol_type = other RNA
aaatcatgaaagtggagaat

SEQ ID NO: 11500 - RNA, 20 nt, synthetic construct
  source 1..20: mol_type = other RNA
aaatcatgatgtttggctcc

SEQ ID NO: 11501 - RNA, 20 nt, synthetic construct
  source 1..20: mol_type = other RNA
aaatcattcaggacactgga

SEQ ID NO: 11502 - RNA, 20 nt, synthetic construct
  source 1..20: mol_type = other RNA
aaatcattcatctaaacgtt

SEQ ID NO: 11503 - RNA, 20 nt, synthetic construct
  source 1..20: mol_type = other RNA
aaatcattgtagctatatcc

SEQ ID NO: 11504 - RNA, 20 nt, synthetic construct
  source 1..20: mol_type = other RNA
aaatcattgttcagggaagg

SEQ ID NO: 11505 - RNA, 20 nt, synthetic construct
  source 1..20: mol_type = other RNA
aaatcattttggcaaattgt

SEQ ID NO: 11506 - RNA, 20 nt, synthetic construct
  source 1..20: mol_type = other RNA
aaatccaaaagcctcaaaat

SEQ ID NO: 11507 - RNA, 20 nt, synthetic construct
  source 1..20: mol_type = other RNA
aaatccaaattcacagcatg

SEQ ID NO: 11508 - RNA, 20 nt, synthetic construct
  source 1..20: mol_type = other RNA
aaatccaacgaccggacgtg

SEQ ID NO: 11509 - RNA, 20 nt, synthetic construct
  source 1..20: mol_type = other RNA
aaatccaagaagacatgata

SEQ ID NO: 11510 - RNA, 20 nt, synthetic construct
  source 1..20: mol_type = other RNA
aaatccagataaattatagc

SEQ ID NO: 11511 - RNA, 20 nt, synthetic construct
  source 1..20: mol_type = other RNA
aaatccaggatggcatgaaa

SEQ ID NO: 11512 - RNA, 20 nt, synthetic construct
  source 1..20: mol_type = other RNA
aaatccagtcttcaggtctc

SEQ ID NO: 11513 - RNA, 20 nt, synthetic construct
  source 1..20: mol_type = other RNA
aaatcccacttgatccaggt

SEQ ID NO: 11514 - RNA, 20 nt, synthetic construct
  source 1..20: mol_type = other RNA
aaatcccatttgtaacatgt

SEQ ID NO: 11515 - RNA, 20 nt, synthetic construct
  source 1..20: mol_type = other RNA
aaatcccctttagtgttctg

SEQ ID NO: 11516 - RNA, 20 nt, synthetic construct
  source 1..20: mol_type = other RNA
aaatccctgatcaagttgct

SEQ ID NO: 11517 - RNA, 20 nt, synthetic construct
  source 1..20: mol_type = other RNA
aaatccgagacaagttctcc

SEQ ID NO: 11518 - RNA, 20 nt, synthetic construct
  source 1..20: mol_type = other RNA
aaatcctagccccaaatacc

SEQ ID NO: 11519 - RNA, 20 nt, synthetic construct
  source 1..20: mol_type = other RNA
aaatcctcacatgtttggtc

SEQ ID NO: 11520 - RNA, 20 nt, synthetic construct
  source 1..20: mol_type = other RNA
aaatcctctgtagataaacg

SEQ ID NO: 11521 - RNA, 20 nt, synthetic construct
  source 1..20: mol_type = other RNA
aaatcctgctgggctattgt

SEQ ID NO: 11522 - RNA, 20 nt, synthetic construct
  source 1..20: mol_type = other RNA
aaatccttacttccagctca

SEQ ID NO: 11523 - RNA, 20 nt, synthetic construct
  source 1..20: mol_type = other RNA
aaatccttttcccaggagct

SEQ ID NO: 11524 - RNA, 20 nt, synthetic construct
  source 1..20: mol_type = other RNA
aaatcggaacaggctcaata

SEQ ID NO: 11525 - RNA, 20 nt, synthetic construct
  source 1..20: mol_type = other RNA
aaatcggaactcctgtatgc

SEQ ID NO: 11526 - RNA, 20 nt, synthetic construct
  source 1..20: mol_type = other RNA
aaatcgggagtaacagacct

SEQ ID NO: 11527 - RNA, 20 nt, synthetic construct
  source 1..20: mol_type = other RNA
aaatcgtcctcttcgggtgt

SEQ ID NO: 11528 - RNA, 20 nt, synthetic construct
  source 1..20: mol_type = other RNA
aaatctaaagccaatcttcc

SEQ ID NO: 11529 - RNA, 20 nt, synthetic construct
  source 1..20: mol_type = other RNA
aaatctaaatgtagatcaag

SEQ ID NO: 11530 - RNA, 20 nt, synthetic construct
  source 1..20: mol_type = other RNA
aaatctaacaaaagatacac

SEQ ID NO: 11531 - RNA, 20 nt, synthetic construct
  source 1..20: mol_type = other RNA
aaatctaaccctcaatcccc

SEQ ID NO: 11532 - RNA, 20 nt, synthetic construct
  source 1..20: mol_type = other RNA
aaatctaagtctcaacctac

SEQ ID NO: 11533 - RNA, 20 nt, synthetic construct
  source 1..20: mol_type = other RNA
aaatctaataaaaagcctct

SEQ ID NO: 11534 - RNA, 20 nt, synthetic construct
  source 1..20: mol_type = other RNA
aaatctaccaaacattgaag

SEQ ID NO: 11535 - RNA, 20 nt, synthetic construct
  source 1..20: mol_type = other RNA
aaatctaggcatataataag

SEQ ID NO: 11536 - RNA, 20 nt, synthetic construct
  source 1..20: mol_type = other RNA
aaatctaggttatctgtttt

SEQ ID NO: 11537 - RNA, 20 nt, synthetic construct
  source 1..20: mol_type = other RNA
aaatctctacagggaaccgt

SEQ ID NO: 11538 - RNA, 20 nt, synthetic construct
  source 1..20: mol_type = other RNA
aaatctctagaacttatgca

SEQ ID NO: 11539 - RNA, 20 nt, synthetic construct
  source 1..20: mol_type = other RNA
aaatctctgacttcattctt

SEQ ID NO: 11540 - RNA, 20 nt, synthetic construct
  source 1..20: mol_type = other RNA
aaatctgacaatttgccaaa

SEQ ID NO: 11541 - RNA, 20 nt, synthetic construct
  source 1..20: mol_type = other RNA
aaatctgatgtgtatgttac

SEQ ID NO: 11542 - RNA, 20 nt, synthetic construct
  source 1..20: mol_type = other RNA
aaatctgattcagtggttgg

SEQ ID NO: 11543 - RNA, 20 nt, synthetic construct
  source 1..20: mol_type = other RNA
aaatctgatttgtttagtag

SEQ ID NO: 11544 - RNA, 20 nt, synthetic construct
  source 1..20: mol_type = other RNA
aaatctgcatccaaaaggga

SEQ ID NO: 11545 - RNA, 20 nt, synthetic construct
  source 1..20: mol_type = other RNA
aaatctggctgcagggcttc

SEQ ID NO: 11546 - RNA, 20 nt, synthetic construct
  source 1..20: mol_type = other RNA
aaatctgtatatgaaaagct

SEQ ID NO: 11547 - RNA, 20 nt, synthetic construct
  source 1..20: mol_type = other RNA
aaatctgtatgagaagactg

SEQ ID NO: 11548 - RNA, 20 nt, synthetic construct
  source 1..20: mol_type = other RNA
aaatcttaaagatgccattt

SEQ ID NO: 11549 - RNA, 20 nt, synthetic construct
  source 1..20: mol_type = other RNA
aaatcttattccccagggaa

SEQ ID NO: 11550 - RNA, 20 nt, synthetic construct
  source 1..20: mol_type = other RNA
aaatcttcaaaatctgatgt

SEQ ID NO: 11551 - RNA, 20 nt, synthetic construct
  source 1..20: mol_type = other RNA
aaatcttccagaaggagaaa

SEQ ID NO: 11552 - RNA, 20 nt, synthetic construct
  source 1..20: mol_type = other RNA
aaatcttgaagatggcaaac

SEQ ID NO: 11553 - RNA, 20 nt, synthetic construct
  source 1..20: mol_type = other RNA
aaatctttagtgttgcttgg

SEQ ID NO: 11554 - RNA, 20 nt, synthetic construct
  source 1..20: mol_type = other RNA
aaatctttggtgaaggttca

SEQ ID NO: 11555 - RNA, 20 nt, synthetic construct
  source 1..20: mol_type = other RNA
aaatctttgtacagtaattg

SEQ ID NO: 11556 - RNA, 20 nt, synthetic construct
  source 1..20: mol_type = other RNA
aaatgaaaaattcactcctc

SEQ ID NO: 11557 - RNA, 20 nt, synthetic construct
  source 1..20: mol_type = other RNA
aaatgaaaatgttccctctt

SEQ ID NO: 11558 - RNA, 20 nt, synthetic construct
  source 1..20: mol_type = other RNA
aaatgaaacacttgtgtaac

SEQ ID NO: 11559 - RNA, 20 nt, synthetic construct
  source 1..20: mol_type = other RNA
aaatgaaaggcgtcggggct

SEQ ID NO: 11560 - RNA, 20 nt, synthetic construct
  source 1..20: mol_type = other RNA
aaatgaaagtcagctaattt

SEQ ID NO: 11561 - RNA, 20 nt, synthetic construct
  source 1..20: mol_type = other RNA
aaatgaaatggcccttaact

SEQ ID NO: 11562 - RNA, 20 nt, synthetic construct
  source 1..20: mol_type = other RNA
aaatgaaatttgaggcccta

SEQ ID NO: 11563 - RNA, 20 nt, synthetic construct
  source 1..20: mol_type = other RNA
aaatgaacaggttcttcatc

SEQ ID NO: 11564 - RNA, 20 nt, synthetic construct
  source 1..20: mol_type = other RNA
aaatgaaccaaacttggttt

SEQ ID NO: 11565 - RNA, 20 nt, synthetic construct
  source 1..20: mol_type = other RNA
aaatgaacctgctttctact

SEQ ID NO: 11566 - RNA, 20 nt, synthetic construct
  source 1..20: mol_type = other RNA
aaatgaagaaaatccaagaa

SEQ ID NO: 11567 - RNA, 20 nt, synthetic construct
  source 1..20: mol_type = other RNA
aaatgaagatggcctccctc

SEQ ID NO: 11568 - RNA, 20 nt, synthetic construct
  source 1..20: mol_type = other RNA
aaatgaaggaaaaaacgggt

SEQ ID NO: 11569 - RNA, 20 nt, synthetic construct
  source 1..20: mol_type = other RNA
aaatgaagtattgatttgac

SEQ ID NO: 11570 - RNA, 20 nt, synthetic construct
  source 1..20: mol_type = other RNA
aaatgaatattcgttccagc

SEQ ID NO: 11571 - RNA, 20 nt, synthetic construct
  source 1..20: mol_type = other RNA
aaatgacaagtaaatgcaat

SEQ ID NO: 11572 - RNA, 20 nt, synthetic construct
  source 1..20: mol_type = other RNA
aaatgacacaacttactact

SEQ ID NO: 11573 - RNA, 20 nt, synthetic construct
  source 1..20: mol_type = other RNA
aaatgacaccaaaactacag

SEQ ID NO: 11574 - RNA, 20 nt, synthetic construct
  source 1..20: mol_type = other RNA
aaatgagaaacctaagaaag

SEQ ID NO: 11575 - RNA, 20 nt, synthetic construct
  source 1..20: mol_type = other RNA
aaatgagacacctacaatat

SEQ ID NO: 11576 - RNA, 20 nt, synthetic construct
  source 1..20: mol_type = other RNA
aaatgagccaggcatggtgg

SEQ ID NO: 11577 - RNA, 20 nt, synthetic construct
  source 1..20: mol_type = other RNA
aaatgaggcttttattggta

SEQ ID NO: 11578 - RNA, 20 nt, synthetic construct
  source 1..20: mol_type = other RNA
aaatgagggtaaaatagtca

SEQ ID NO: 11579 - RNA, 20 nt, synthetic construct
  source 1..20: mol_type = other RNA
aaatgaggtatcatttccaa

SEQ ID NO: 11580 - RNA, 20 nt, synthetic construct
  source 1..20: mol_type = other RNA
aaatgaggttgcttttactt

SEQ ID NO: 11581 - RNA, 20 nt, synthetic construct
  source 1..20: mol_type = other RNA
aaatgagtgagccacagcta

SEQ ID NO: 11582 - RNA, 20 nt, synthetic construct
  source 1..20: mol_type = other RNA
aaatgagtgtatgcagggaa

SEQ ID NO: 11583 - RNA, 20 nt, synthetic construct
  source 1..20: mol_type = other RNA
aaatgagttccagtcctttg

SEQ ID NO: 11584 - RNA, 20 nt, synthetic construct
  source 1..20: mol_type = other RNA
aaatgatacctcatttatac

SEQ ID NO: 11585 - RNA, 20 nt, synthetic construct
  source 1..20: mol_type = other RNA
aaatgatagcattatcccag

SEQ ID NO: 11586 - RNA, 20 nt, synthetic construct
  source 1..20: mol_type = other RNA
aaatgatctttcaaggggcc

SEQ ID NO: 11587 - RNA, 20 nt, synthetic construct
  source 1..20: mol_type = other RNA
aaatgatctttgaataaagg

SEQ ID NO: 11588 - RNA, 20 nt, synthetic construct
  source 1..20: mol_type = other RNA
aaatgatgaagggttttctg

SEQ ID NO: 11589 - RNA, 20 nt, synthetic construct
  source 1..20: mol_type = other RNA
aaatgatgagctactgcatg

SEQ ID NO: 11590 - RNA, 20 nt, synthetic construct
  source 1..20: mol_type = other RNA
aaatgatggcaacaatcaac

SEQ ID NO: 11591 - RNA, 20 nt, synthetic construct
  source 1..20: mol_type = other RNA
aaatgatttcaagtaacact

SEQ ID NO: 11592 - RNA, 20 nt, synthetic construct
  source 1..20: mol_type = other RNA
aaatgattttcacagggcag

SEQ ID NO: 11593 - RNA, 20 nt, synthetic construct
  source 1..20: mol_type = other RNA
aaatgcaatgcaggcgcctg

SEQ ID NO: 11594 - RNA, 20 nt, synthetic construct
  source 1..20: mol_type = other RNA
aaatgcaccaacacctgcag

SEQ ID NO: 11595 - RNA, 20 nt, synthetic construct
  source 1..20: mol_type = other RNA
aaatgcacttagcgctgatg

SEQ ID NO: 11596 - RNA, 20 nt, synthetic construct
  source 1..20: mol_type = other RNA
aaatgcagaaaataaaccaa

SEQ ID NO: 11597 - RNA, 20 nt, synthetic construct
  source 1..20: mol_type = other RNA
aaatgcagtagtaaagcaaa

SEQ ID NO: 11598 - RNA, 20 nt, synthetic construct
  source 1..20: mol_type = other RNA
aaatgcataaacgacagcag

SEQ ID NO: 11599 - RNA, 20 nt, synthetic construct
  source 1..20: mol_type = other RNA
aaatgccaatttgggatata

SEQ ID NO: 11600 - RNA, 20 nt, synthetic construct
  source 1..20: mol_type = other RNA
aaatgccacataaatcacag

SEQ ID NO: 11601 - RNA, 20 nt, synthetic construct
  source 1..20: mol_type = other RNA
aaatgccatagagctttaaa

SEQ ID NO: 11602 - RNA, 20 nt, synthetic construct
  source 1..20: mol_type = other RNA
aaatgcccttatttaatgtg

SEQ ID NO: 11603 - RNA, 20 nt, synthetic construct
  source 1..20: mol_type = other RNA
aaatgcgcgtccgcgacccg

SEQ ID NO: 11604 - RNA, 20 nt, synthetic construct
  source 1..20: mol_type = other RNA
aaatgctataaagaacatga

SEQ ID NO: 11605 - RNA, 20 nt, synthetic construct
  source 1..20: mol_type = other RNA
aaatgctcacatttagtttc

SEQ ID NO: 11606 - RNA, 20 nt, synthetic construct
  source 1..20: mol_type = other RNA
aaatgctcagtgggttcaat

SEQ ID NO: 11607 - RNA, 20 nt, synthetic construct
  source 1..20: mol_type = other RNA
aaatgctggaaattttcaag

SEQ ID NO: 11608 - RNA, 20 nt, synthetic construct
  source 1..20: mol_type = other RNA
aaatgctgtaactgacttca

SEQ ID NO: 11609 - RNA, 20 nt, synthetic construct
  source 1..20: mol_type = other RNA
aaatgcttaacaagaatcct

SEQ ID NO: 11610 - RNA, 20 nt, synthetic construct
  source 1..20: mol_type = other RNA
aaatgcttatgtcttgtggc

SEQ ID NO: 11611 - RNA, 20 nt, synthetic construct
  source 1..20: mol_type = other RNA
aaatggaaccactgtaggcc

SEQ ID NO: 11612 - RNA, 20 nt, synthetic construct
  source 1..20: mol_type = other RNA
aaatggaagactttatggta

SEQ ID NO: 11613 - RNA, 20 nt, synthetic construct
  source 1..20: mol_type = other RNA
aaatggaagtgctgggctag

SEQ ID NO: 11614 - RNA, 20 nt, synthetic construct
  source 1..20: mol_type = other RNA
aaatggacagcacattaaat

SEQ ID NO: 11615 - RNA, 20 nt, synthetic construct
  source 1..20: mol_type = other RNA
aaatggacagcggggatggt

SEQ ID NO: 11616 - RNA, 20 nt, synthetic construct
  source 1..20: mol_type = other RNA
aaatggagacatctgagaca

SEQ ID NO: 11617 - RNA, 20 nt, synthetic construct
  source 1..20: mol_type = other RNA
aaatggagacccatactcag

SEQ ID NO: 11618 - RNA, 20 nt, synthetic construct
  source 1..20: mol_type = other RNA
aaatggagggccagaggagg

SEQ ID NO: 11619 - RNA, 20 nt, synthetic construct
  source 1..20: mol_type = other RNA
aaatggagtgacttaagcaa

SEQ ID NO: 11620 - RNA, 20 nt, synthetic construct
  source 1..20: mol_type = other RNA
aaatggatcaaagacctaag

SEQ ID NO: 11621 - RNA, 20 nt, synthetic construct
  source 1..20: mol_type = other RNA
aaatggcacatactgcatat

SEQ ID NO: 11622 - RNA, 20 nt, synthetic construct
  source 1..20: mol_type = other RNA
aaatggcatctttaagattt

SEQ ID NO: 11623 - RNA, 20 nt, synthetic construct
  source 1..20: mol_type = other RNA
aaatggccaagagttgctga

SEQ ID NO: 11624 - RNA, 20 nt, synthetic construct
  source 1..20: mol_type = other RNA
aaatggcccttaacttcacc

SEQ ID NO: 11625 - RNA, 20 nt, synthetic construct
  source 1..20: mol_type = other RNA
aaatggccttctttctttca

SEQ ID NO: 11626 - RNA, 20 nt, synthetic construct
  source 1..20: mol_type = other RNA
aaatggcttaaggaaataaa

SEQ ID NO: 11627 - RNA, 20 nt, synthetic construct
  source 1..20: mol_type = other RNA
aaatggctttttacgatgaa

SEQ ID NO: 11628 - RNA, 20 nt, synthetic construct
  source 1..20: mol_type = other RNA
aaatgggaaattagatgatg

SEQ ID NO: 11629 - RNA, 20 nt, synthetic construct
  source 1..20: mol_type = other RNA
aaatgggagcatgcacacag

SEQ ID NO: 11630 - RNA, 20 nt, synthetic construct
  source 1..20: mol_type = other RNA
aaatgggccaaagacttcaa

SEQ ID NO: 11631 - RNA, 20 nt, synthetic construct
  source 1..20: mol_type = other RNA
aaatggggatatccaaagat

SEQ ID NO: 11632 - RNA, 20 nt, synthetic construct
  source 1..20: mol_type = other RNA
aaatgggtttaaaagagtgc

SEQ ID NO: 11633 - RNA, 20 nt, synthetic construct
  source 1..20: mol_type = other RNA
aaatggtaacagccaaataa

SEQ ID NO: 11634 - RNA, 20 nt, synthetic construct
  source 1..20: mol_type = other RNA
aaatggtagcttgggctaag

SEQ ID NO: 11635 - RNA, 20 nt, synthetic construct
  source 1..20: mol_type = other RNA
aaatggtcaacatgaaaaga

SEQ ID NO: 11636 - RNA, 20 nt, synthetic construct
  source 1..20: mol_type = other RNA
aaatggtgcaggccagatat

SEQ ID NO: 11637 - RNA, 20 nt, synthetic construct
  source 1..20: mol_type = other RNA
aaatggtgtgaagttgggct

SEQ ID NO: 11638 - RNA, 20 nt, synthetic construct
  source 1..20: mol_type = other RNA
aaatggtttaggctgtctcc

SEQ ID NO: 11639 - RNA, 20 nt, synthetic construct
  source 1..20: mol_type = other RNA
aaatggtttctccttctgca

SEQ ID NO: 11640 - RNA, 20 nt, synthetic construct
  source 1..20: mol_type = other RNA
aaatggttttatggtaactc

SEQ ID NO: 11641 - RNA, 20 nt, synthetic construct
  source 1..20: mol_type = other RNA
aaatgtaaaacatcaaagtc

SEQ ID NO: 11642 - RNA, 20 nt, synthetic construct
  source 1..20: mol_type = other RNA
aaatgtaaattcctaactca

SEQ ID NO: 11643 - RNA, 20 nt, synthetic construct
  source 1..20: mol_type = other RNA
aaatgtaaattctgccacat

SEQ ID NO: 11644 - RNA, 20 nt, synthetic construct
  source 1..20: mol_type = other RNA
aaatgtacaacattcatccc

SEQ ID NO: 11645 - RNA, 20 nt, synthetic construct
  source 1..20: mol_type = other RNA
aaatgtagatcaagtatttc

SEQ ID NO: 11646 - RNA, 20 nt, synthetic construct
  source 1..20: mol_type = other RNA
aaatgtatgattttctagga

SEQ ID NO: 11647 - RNA, 20 nt, synthetic construct
  source 1..20: mol_type = other RNA
aaatgtcaattttcccccaa

SEQ ID NO: 11648 - RNA, 20 nt, synthetic construct
  source 1..20: mol_type = other RNA
aaatgtcatcttctctctct

SEQ ID NO: 11649 - RNA, 20 nt, synthetic construct
  source 1..20: mol_type = other RNA
aaatgtccatcgagagatga

SEQ ID NO: 11650 - RNA, 20 nt, synthetic construct
  source 1..20: mol_type = other RNA
aaatgtccgttgaagtcttt

SEQ ID NO: 11651 - RNA, 20 nt, synthetic construct
  source 1..20: mol_type = other RNA
aaatgtctcattgtggatga

SEQ ID NO: 11652 - RNA, 20 nt, synthetic construct
  source 1..20: mol_type = other RNA
aaatgtctggtttgctttgg

SEQ ID NO: 11653 - RNA, 20 nt, synthetic construct
  source 1..20: mol_type = other RNA
aaatgtctgtctttatgcca

SEQ ID NO: 11654 - RNA, 20 nt, synthetic construct
  source 1..20: mol_type = other RNA
aaatgtcttaagaaggaaaa

SEQ ID NO: 11655 - RNA, 20 nt, synthetic construct
  source 1..20: mol_type = other RNA
aaatgtgaacagacagacat

SEQ ID NO: 11656 - RNA, 20 nt, synthetic construct
  source 1..20: mol_type = other RNA
aaatgtgaattagatggctt

SEQ ID NO: 11657 - RNA, 20 nt, synthetic construct
  source 1..20: mol_type = other RNA
aaatgtgacagaacaaactc

SEQ ID NO: 11658 - RNA, 20 nt, synthetic construct
  source 1..20: mol_type = other RNA
aaatgtgacattagtggtgg

SEQ ID NO: 11659 - RNA, 20 nt, synthetic construct
  source 1..20: mol_type = other RNA
aaatgtgactagaagaaatg

SEQ ID NO: 11660 - RNA, 20 nt, synthetic construct
  source 1..20: mol_type = other RNA
aaatgtgagcatttagcccc

SEQ ID NO: 11661 - RNA, 20 nt, synthetic construct
  source 1..20: mol_type = other RNA
aaatgtgatggcatcattca

SEQ ID NO: 11662 - RNA, 20 nt, synthetic construct
  source 1..20: mol_type = other RNA
aaatgtggaagcagaactaa

SEQ ID NO: 11663 - RNA, 20 nt, synthetic construct
  source 1..20: mol_type = other RNA
aaatgtggagataaagagca

SEQ ID NO: 11664 - RNA, 20 nt, synthetic construct
  source 1..20: mol_type = other RNA
aaatgtggatagtgcttttt

SEQ ID NO: 11665 - RNA, 20 nt, synthetic construct
  source 1..20: mol_type = other RNA
aaatgtggatgcatgaggca

SEQ ID NO: 11666 - RNA, 20 nt, synthetic construct
  source 1..20: mol_type = other RNA
aaatgtggcaaatttatgtg

SEQ ID NO: 11667 - RNA, 20 nt, synthetic construct
  source 1..20: mol_type = other RNA
aaatgtggcatatcacatta

SEQ ID NO: 11668 - RNA, 20 nt, synthetic construct
  source 1..20: mol_type = other RNA
aaatgtggcatttcttacac

SEQ ID NO: 11669 - RNA, 20 nt, synthetic construct
  source 1..20: mol_type = other RNA
aaatgtggtttttggttcac

SEQ ID NO: 11670 - RNA, 20 nt, synthetic construct
  source 1..20: mol_type = other RNA
aaatgtgtctagtgaatgag

SEQ ID NO: 11671 - RNA, 20 nt, synthetic construct
  source 1..20: mol_type = other RNA
aaatgttaacaattggtgaa

SEQ ID NO: 11672 - RNA, 20 nt, synthetic construct
  source 1..20: mol_type = other RNA
aaatgttaagcccaacttca

SEQ ID NO: 11673 - RNA, 20 nt, synthetic construct
  source 1..20: mol_type = other RNA
aaatgttatacagcaaatct

SEQ ID NO: 11674 - RNA, 20 nt, synthetic construct
  source 1..20: mol_type = other RNA
aaatgttcagatagaaaaga

SEQ ID NO: 11675 - RNA, 20 nt, synthetic construct
  source 1..20: mol_type = other RNA
aaatgttcagtttatgggtc

SEQ ID NO: 11676 - RNA, 20 nt, synthetic construct
  source 1..20: mol_type = other RNA
aaatgttccctcttcaatat

SEQ ID NO: 11677 - RNA, 20 nt, synthetic construct
  source 1..20: mol_type = other RNA
aaatgttgcagagactggat

SEQ ID NO: 11678 - RNA, 20 nt, synthetic construct
  source 1..20: mol_type = other RNA
aaatgttgccaatatctatc

SEQ ID NO: 11679 - RNA, 20 nt, synthetic construct
  source 1..20: mol_type = other RNA
aaatgtttaattacccaggc

SEQ ID NO: 11680 - RNA, 20 nt, synthetic construct
  source 1..20: mol_type = other RNA
aaatgtttagcggaatgact

SEQ ID NO: 11681 - RNA, 20 nt, synthetic construct
  source 1..20: mol_type = other RNA
aaatgtttgtttaattagcc

SEQ ID NO: 11682 - RNA, 20 nt, synthetic construct
  source 1..20: mol_type = other RNA
aaatgttttaaggcagggct

SEQ ID NO: 11683 - RNA, 20 nt, synthetic construct
  source 1..20: mol_type = other RNA
aaatgttttgcagagatgag

SEQ ID NO: 11684 - RNA, 20 nt, synthetic construct
  source 1..20: mol_type = other RNA
aaattaaaaactgagaccgg

SEQ ID NO: 11685 - RNA, 20 nt, synthetic construct
  source 1..20: mol_type = other RNA
aaattaaacacacccttggt

SEQ ID NO: 11686 - RNA, 20 nt, synthetic construct
  source 1..20: mol_type = other RNA
aaattaaaggatgtcaactg

SEQ ID NO: 11687 - RNA, 20 nt, synthetic construct
  source 1..20: mol_type = other RNA
aaattaaaggctggaaataa

SEQ ID NO: 11688 - RNA, 20 nt, synthetic construct
  source 1..20: mol_type = other RNA
aaattaagagaatggaaact

SEQ ID NO: 11689 - RNA, 20 nt, synthetic construct
  source 1..20: mol_type = other RNA
aaattaagcttcgacagtcc

SEQ ID NO: 11690 - RNA, 20 nt, synthetic construct
  source 1..20: mol_type = other RNA
aaattaaggaatgcctataa

SEQ ID NO: 11691 - RNA, 20 nt, synthetic construct
  source 1..20: mol_type = other RNA
aaattaatcagtctgtaagc

SEQ ID NO: 11692 - RNA, 20 nt, synthetic construct
  source 1..20: mol_type = other RNA
aaattaatgccccatgtgtt

SEQ ID NO: 11693 - RNA, 20 nt, synthetic construct
  source 1..20: mol_type = other RNA
aaattacaaaataggcagtc

SEQ ID NO: 11694 - RNA, 20 nt, synthetic construct
  source 1..20: mol_type = other RNA
aaattacaactggtttctgc

SEQ ID NO: 11695 - RNA, 20 nt, synthetic construct
  source 1..20: mol_type = other RNA
aaattacaggtcaaactcac

SEQ ID NO: 11696 - RNA, 20 nt, synthetic construct
  source 1..20: mol_type = other RNA
aaattaccatgtttccataa

SEQ ID NO: 11697 - RNA, 20 nt, synthetic construct
  source 1..20: mol_type = other RNA
aaattacccaaagactttgt

SEQ ID NO: 11698 - RNA, 20 nt, synthetic construct
  source 1..20: mol_type = other RNA
aaattaccccattcactcag

SEQ ID NO: 11699 - RNA, 20 nt, synthetic construct
  source 1..20: mol_type = other RNA
aaattactgtctgtgaaaat

SEQ ID NO: 11700 - RNA, 20 nt, synthetic construct
  source 1..20: mol_type = other RNA
aaattacttctttctctttc

SEQ ID NO: 11701 - RNA, 20 nt, synthetic construct
  source 1..20: mol_type = other RNA
aaattagaaatgtggaagca

SEQ ID NO: 11702 - RNA, 20 nt, synthetic construct
  source 1..20: mol_type = other RNA
aaattagaacatctggcagc

SEQ ID NO: 11703 - RNA, 20 nt, synthetic construct
  source 1..20: mol_type = other RNA
aaattagccttttacaccct

SEQ ID NO: 11704 - RNA, 20 nt, synthetic construct
  source 1..20: mol_type = other RNA
aaattagctaagtatgcaga

SEQ ID NO: 11705 - RNA, 20 nt, synthetic construct
  source 1..20: mol_type = other RNA
aaattagctgactttcattt

SEQ ID NO: 11706 - RNA, 20 nt, synthetic construct
  source 1..20: mol_type = other RNA
aaattagctggatgtggtgt

SEQ ID NO: 11707 - RNA, 20 nt, synthetic construct
  source 1..20: mol_type = other RNA
aaattagctgggcgagatgg

SEQ ID NO: 11708 - RNA, 20 nt, synthetic construct
  source 1..20: mol_type = other RNA
aaattagctttctcccagct

SEQ ID NO: 11709 - RNA, 20 nt, synthetic construct
  source 1..20: mol_type = other RNA
aaattagtcatagcagtggg

SEQ ID NO: 11710 - RNA, 20 nt, synthetic construct
  source 1..20: mol_type = other RNA
aaattagttccttttaaggg

SEQ ID NO: 11711 - RNA, 20 nt, synthetic construct
  source 1..20: mol_type = other RNA
aaattataagcttcctctgg

SEQ ID NO: 11712 - RNA, 20 nt, synthetic construct
  source 1..20: mol_type = other RNA
aaattatagctccaaaagcg

SEQ ID NO: 11713 - RNA, 20 nt, synthetic construct
  source 1..20: mol_type = other RNA
aaattatctgtgggttaaaa

SEQ ID NO: 11714 - RNA, 20 nt, synthetic construct
  source 1..20: mol_type = other RNA
aaattatgactgagatactt

SEQ ID NO: 11715 - RNA, 20 nt, synthetic construct
  source 1..20: mol_type = other RNA
aaattattagcttgctagta

SEQ ID NO: 11716 - RNA, 20 nt, synthetic construct
  source 1..20: mol_type = other RNA
aaattattgacaagacgtgt

SEQ ID NO: 11717 - RNA, 20 nt, synthetic construct
  source 1..20: mol_type = other RNA
aaattatttccagcctttaa

SEQ ID NO: 11718 - RNA, 20 nt, synthetic construct
  source 1..20: mol_type = other RNA
aaattattttcctccttctg

SEQ ID NO: 11719 - RNA, 20 nt, synthetic construct
  source 1..20: mol_type = other RNA
aaattcaaacatgacagatc

SEQ ID NO: 11720 - RNA, 20 nt, synthetic construct
  source 1..20: mol_type = other RNA
aaattcaacttggtaaaaag

SEQ ID NO: 11721 - RNA, 20 nt, synthetic construct
  source 1..20: mol_type = other RNA
aaattcacagaactgtcact

SEQ ID NO: 11722 - RNA, 20 nt, synthetic construct
  source 1..20: mol_type = other RNA
aaattcacagcatgaatacc

SEQ ID NO: 11723 - RNA, 20 nt, synthetic construct
  source 1..20: mol_type = other RNA
aaattcaccaaacaccttac

SEQ ID NO: 11724 - RNA, 20 nt, synthetic construct
  source 1..20: mol_type = other RNA
aaattcacgagactgttagg

SEQ ID NO: 11725 - RNA, 20 nt, synthetic construct
  source 1..20: mol_type = other RNA
aaattcactcctcattcaca

SEQ ID NO: 11726 - RNA, 20 nt, synthetic construct
  source 1..20: mol_type = other RNA
aaattcatagatcaccaggg

SEQ ID NO: 11727 - RNA, 20 nt, synthetic construct
  source 1..20: mol_type = other RNA
aaattcatatgaaatcacac

SEQ ID NO: 11728 - RNA, 20 nt, synthetic construct
  source 1..20: mol_type = other RNA
aaattcatgcaactgaaaac

SEQ ID NO: 11729 - RNA, 20 nt, synthetic construct
  source 1..20: mol_type = other RNA
aaattccctcagcaaaagca

SEQ ID NO: 11730 - RNA, 20 nt, synthetic construct
  source 1..20: mol_type = other RNA
aaattccctctacaaaagga

SEQ ID NO: 11731 - RNA, 20 nt, synthetic construct
  source 1..20: mol_type = other RNA
aaattcccttcagtgtagtc

SEQ ID NO: 11732 - RNA, 20 nt, synthetic construct
  source 1..20: mol_type = other RNA
aaattccgctctggttttaa

SEQ ID NO: 11733 - RNA, 20 nt, synthetic construct
  source 1..20: mol_type = other RNA
aaattcctaactcaagagtt

SEQ ID NO: 11734 - RNA, 20 nt, synthetic construct
  source 1..20: mol_type = other RNA
aaattccttcccctttcttt

SEQ ID NO: 11735 - RNA, 20 nt, synthetic construct
  source 1..20: mol_type = other RNA
aaattccttcctttgatgac

SEQ ID NO: 11736 - RNA, 20 nt, synthetic construct
  source 1..20: mol_type = other RNA
aaattcgcataaccaaatta

SEQ ID NO: 11737 - RNA, 20 nt, synthetic construct
  source 1..20: mol_type = other RNA
aaattctaacaagaagctgt

SEQ ID NO: 11738 - RNA, 20 nt, synthetic construct
  source 1..20: mol_type = other RNA
aaattctcaaatgaacaggt

SEQ ID NO: 11739 - RNA, 20 nt, synthetic construct
  source 1..20: mol_type = other RNA
aaattctcattagttatctc

SEQ ID NO: 11740 - RNA, 20 nt, synthetic construct
  source 1..20: mol_type = other RNA
aaattctgaccctttattca

SEQ ID NO: 11741 - RNA, 20 nt, synthetic construct
  source 1..20: mol_type = other RNA
aaattctgagggaaattatt

SEQ ID NO: 11742 - RNA, 20 nt, synthetic construct
  source 1..20: mol_type = other RNA
aaattctgatagcttgacaa

SEQ ID NO: 11743 - RNA, 20 nt, synthetic construct
  source 1..20: mol_type = other RNA
aaattctgccacattcaaca

SEQ ID NO: 11744 - RNA, 20 nt, synthetic construct
  source 1..20: mol_type = other RNA
aaattctgttctcagtatcc

SEQ ID NO: 11745 - RNA, 20 nt, synthetic construct
  source 1..20: mol_type = other RNA
aaattcttccagcctggtaa

SEQ ID NO: 11746 - RNA, 20 nt, synthetic construct
  source 1..20: mol_type = other RNA
aaattcttgggtgaataacc

SEQ ID NO: 11747 - RNA, 20 nt, synthetic construct
  source 1..20: mol_type = other RNA
aaattcttggtcttttgatt

SEQ ID NO: 11748 - RNA, 20 nt, synthetic construct
  source 1..20: mol_type = other RNA
aaattgaacagcctaaagtc

SEQ ID NO: 11749 - RNA, 20 nt, synthetic construct
  source 1..20: mol_type = other RNA
aaattgaccattccacgctg

SEQ ID NO: 11750 - RNA, 20 nt, synthetic construct
  source 1..20: mol_type = other RNA
aaattgacttcactagatct

SEQ ID NO: 11751 - RNA, 20 nt, synthetic construct
  source 1..20: mol_type = other RNA
aaattgcaaaaacagtttcc

SEQ ID NO: 11752 - RNA, 20 nt, synthetic construct
  source 1..20: mol_type = other RNA
aaattgcagagtgttcaaaa

SEQ ID NO: 11753 - RNA, 20 nt, synthetic construct
  source 1..20: mol_type = other RNA
aaattgcaggtttactccaa

SEQ ID NO: 11754 - RNA, 20 nt, synthetic construct
  source 1..20: mol_type = other RNA
aaattgcatcaactgcttcc

SEQ ID NO: 11755 - RNA, 20 nt, synthetic construct
  source 1..20: mol_type = other RNA
aaattggaacctttgtccac

SEQ ID NO: 11756 - RNA, 20 nt, synthetic construct
  source 1..20: mol_type = other RNA
aaattggacgggtggtaggg

SEQ ID NO: 11757 - RNA, 20 nt, synthetic construct
  source 1..20: mol_type = other RNA
aaattggcatttaaaagaac

SEQ ID NO: 11758 - RNA, 20 nt, synthetic construct
  source 1..20: mol_type = other RNA
aaattggcgtacatgtagat

SEQ ID NO: 11759 - RNA, 20 nt, synthetic construct
  source 1..20: mol_type = other RNA
aaattggtcctggaaaaaga

SEQ ID NO: 11760 - RNA, 20 nt, synthetic construct
  source 1..20: mol_type = other RNA
aaattgtcagaaaagatcag

SEQ ID NO: 11761 - RNA, 20 nt, synthetic construct
  source 1..20: mol_type = other RNA
aaattgtcagattttcttgt

SEQ ID NO: 11762 - RNA, 20 nt, synthetic construct
  source 1..20: mol_type = other RNA
aaattgtgtgttctcttttt

SEQ ID NO: 11763 - RNA, 20 nt, synthetic construct
  source 1..20: mol_type = other RNA
aaattgttcatgaaatcccc

SEQ ID NO: 11764 - RNA, 20 nt, synthetic construct
  source 1..20: mol_type = other RNA
aaatttaaagacgttcagat

SEQ ID NO: 11765 - RNA, 20 nt, synthetic construct
  source 1..20: mol_type = other RNA
aaatttaaagttagtgaagc

SEQ ID NO: 11766 - RNA, 20 nt, synthetic construct
  source 1..20: mol_type = other RNA
aaatttaacacacaacaatg

SEQ ID NO: 11767 - RNA, 20 nt, synthetic construct
  source 1..20: mol_type = other RNA
aaatttaagcacagaattac

SEQ ID NO: 11768 - RNA, 20 nt, synthetic construct
  source 1..20: mol_type = other RNA
aaatttaaggaccaggtatg

SEQ ID NO: 11769 - RNA, 20 nt, synthetic construct
  source 1..20: mol_type = other RNA
aaatttagcttctgaattga

SEQ ID NO: 11770 - RNA, 20 nt, synthetic construct
  source 1..20: mol_type = other RNA
aaatttagtaagggtaaaca

SEQ ID NO: 11771 - RNA, 20 nt, synthetic construct
  source 1..20: mol_type = other RNA
aaatttagtgtattgtacct

SEQ ID NO: 11772 - RNA, 20 nt, synthetic construct
  source 1..20: mol_type = other RNA
aaatttatgtacatgaccta

SEQ ID NO: 11773 - RNA, 20 nt, synthetic construct
  source 1..20: mol_type = other RNA
aaatttatgttcatgaacct

SEQ ID NO: 11774 - RNA, 20 nt, synthetic construct
  source 1..20: mol_type = other RNA
aaatttcattaggttgatgg

SEQ ID NO: 11775 - RNA, 20 nt, synthetic construct
  source 1..20: mol_type = other RNA
aaatttccagcattttatag

SEQ ID NO: 11776 - RNA, 20 nt, synthetic construct
  source 1..20: mol_type = other RNA
aaatttctaaaaacgtgcaa

SEQ ID NO: 11777 - RNA, 20 nt, synthetic construct
  source 1..20: mol_type = other RNA
aaatttctaaggttctgcta

SEQ ID NO: 11778 - RNA, 20 nt, synthetic construct
  source 1..20: mol_type = other RNA
aaatttctatagtcattccg

SEQ ID NO: 11779 - RNA, 20 nt, synthetic construct
  source 1..20: mol_type = other RNA
aaatttctgttgcttaagtc

SEQ ID NO: 11780 - RNA, 20 nt, synthetic construct
  source 1..20: mol_type = other RNA
aaatttgacatgacaggtga

SEQ ID NO: 11781 - RNA, 20 nt, synthetic construct
  source 1..20: mol_type = other RNA
aaatttgaggccctattcaa

SEQ ID NO: 11782 - RNA, 20 nt, synthetic construct
  source 1..20: mol_type = other RNA
aaatttgattgttagccaca

SEQ ID NO: 11783 - RNA, 20 nt, synthetic construct
  source 1..20: mol_type = other RNA
aaatttgccacattttacca

SEQ ID NO: 11784 - RNA, 20 nt, synthetic construct
  source 1..20: mol_type = other RNA
aaattttaaatcagcaccat

SEQ ID NO: 11785 - RNA, 20 nt, synthetic construct
  source 1..20: mol_type = other RNA
aaattttaagtgcacaatgc

SEQ ID NO: 11786 - RNA, 20 nt, synthetic construct
  source 1..20: mol_type = other RNA
aaattttatggttttttccc

SEQ ID NO: 11787 - RNA, 20 nt, synthetic construct
  source 1..20: mol_type = other RNA
aaattttcaagggtgttttc

SEQ ID NO: 11788 - RNA, 20 nt, synthetic construct
  source 1..20: mol_type = other RNA
aaattttcattctacctgga

SEQ ID NO: 11789 - RNA, 20 nt, synthetic construct
  source 1..20: mol_type = other RNA
aaattttctaggaaccatat

SEQ ID NO: 11790 - RNA, 20 nt, synthetic construct
  source 1..20: mol_type = other RNA
aaattttctcccaaggttgc

SEQ ID NO: 11791 - RNA, 20 nt, synthetic construct
  source 1..20: mol_type = other RNA
aaattttctgagcaactact

SEQ ID NO: 11792 - RNA, 20 nt, synthetic construct
  source 1..20: mol_type = other RNA
aaattttcttttgtgggtaa

SEQ ID NO: 11793 - RNA, 20 nt, synthetic construct
  source 1..20: mol_type = other RNA
aaattttgagacctcaggca

SEQ ID NO: 11794 - RNA, 20 nt, synthetic construct
  source 1..20: mol_type = other RNA
aaattttgaggcttttggat

SEQ ID NO: 11795 - RNA, 20 nt, synthetic construct
  source 1..20: mol_type = other RNA
aaattttgcttaaagttggt

SEQ ID NO: 11796 - RNA, 20 nt, synthetic construct
  source 1..20: mol_type = other RNA
aaattttgttcaggagtttt

SEQ ID NO: 11797 - RNA, 20 nt, synthetic construct
  source 1..20: mol_type = other RNA
aaatttttcacattcttcac

SEQ ID NO: 11798 - RNA, 20 nt, synthetic construct
  source 1..20: mol_type = other RNA
aaatttttgagaaattgcca

SEQ ID NO: 11799 - RNA, 20 nt, synthetic construct
  source 1..20: mol_type = other RNA
aaatttttgcaaaccaaatg

SEQ ID NO: 11800 - RNA, 20 nt, synthetic construct
  source 1..20: mol_type = other RNA
aaatttttgtctggaacaca

SEQ ID NO: 11801 - RNA, 20 nt, synthetic construct
  source 1..20: mol_type = other RNA
aacaaaaaaccactggatac

SEQ ID NO: 11802 - RNA, 20 nt, synthetic construct
  source 1..20: mol_type = other RNA
aacaaaaatacgaaagtgct

SEQ ID NO: 11803 - RNA, 20 nt, synthetic construct
  source 1..20: mol_type = other RNA
aacaaaaatacttaagagca

SEQ ID NO: 11804 - RNA, 20 nt, synthetic construct
  source 1..20: mol_type = other RNA
aacaaaacaaaaccctgttg

SEQ ID NO: 11805 - RNA, 20 nt, synthetic construct
  source 1..20: mol_type = other RNA
aacaaaacaaagtctttggg

SEQ ID NO: 11806 - RNA, 20 nt, synthetic construct
  source 1..20: mol_type = other RNA
aacaaaacaagaagaaaaag

SEQ ID NO: 11807 - RNA, 20 nt, synthetic construct
  source 1..20: mol_type = other RNA
aacaaaacaatctaattcga

SEQ ID NO: 11808 - RNA, 20 nt, synthetic construct
  source 1..20: mol_type = other RNA
aacaaaacacacgggtacac

SEQ ID NO: 11809 - RNA, 20 nt, synthetic construct
  source 1..20: mol_type = other RNA
aacaaaacacatggcatcgg

SEQ ID NO: 11810 - RNA, 20 nt, synthetic construct
  source 1..20: mol_type = other RNA
aacaaaaccctgttgggcta

SEQ ID NO: 11811 - RNA, 20 nt, synthetic construct
  source 1..20: mol_type = other RNA
aacaaaactaggctgtccca

SEQ ID NO: 11812 - RNA, 20 nt, synthetic construct
  source 1..20: mol_type = other RNA
aacaaaactgggggctggac

SEQ ID NO: 11813 - RNA, 20 nt, synthetic construct
  source 1..20: mol_type = other RNA
aacaaaagagtagattcccc

SEQ ID NO: 11814 - RNA, 20 nt, synthetic construct
  source 1..20: mol_type = other RNA
aacaaaagatacacaagatc

SEQ ID NO: 11815 - RNA, 20 nt, synthetic construct
  source 1..20: mol_type = other RNA
aacaaaaggtagaagataat

SEQ ID NO: 11816 - RNA, 20 nt, synthetic construct
  source 1..20: mol_type = other RNA
aacaaaatacccacaagaaa

SEQ ID NO: 11817 - RNA, 20 nt, synthetic construct
  source 1..20: mol_type = other RNA
aacaaaatacctgggaatcc

SEQ ID NO: 11818 - RNA, 20 nt, synthetic construct
  source 1..20: mol_type = other RNA
aacaaaataggattaagaca

SEQ ID NO: 11819 - RNA, 20 nt, synthetic construct
  source 1..20: mol_type = other RNA
aacaaaatttttgcaaacca

SEQ ID NO: 11820 - RNA, 20 nt, synthetic construct
  source 1..20: mol_type = other RNA
aacaaacaaacagaaaggcc

SEQ ID NO: 11821 - RNA, 20 nt, synthetic construct
  source 1..20: mol_type = other RNA
aacaaacaattagcaccttt

SEQ ID NO: 11822 - RNA, 20 nt, synthetic construct
  source 1..20: mol_type = other RNA
aacaaacacactgggtaaac

SEQ ID NO: 11823 - RNA, 20 nt, synthetic construct
  source 1..20: mol_type = other RNA
aacaaacagaaaggcccaaa

SEQ ID NO: 11824 - RNA, 20 nt, synthetic construct
  source 1..20: mol_type = other RNA
aacaaacattttttgcagag

SEQ ID NO: 11825 - RNA, 20 nt, synthetic construct
  source 1..20: mol_type = other RNA
aacaaacgcattgtgatgtc

SEQ ID NO: 11826 - RNA, 20 nt, synthetic construct
  source 1..20: mol_type = other RNA
aacaaactaactagaaaacc

SEQ ID NO: 11827 - RNA, 20 nt, synthetic construct
  source 1..20: mol_type = other RNA
aacaaactcaagttccggtt

SEQ ID NO: 11828 - RNA, 20 nt, synthetic construct
  source 1..20: mol_type = other RNA
aacaaactgcgtggtttatt

SEQ ID NO: 11829 - RNA, 20 nt, synthetic construct
  source 1..20: mol_type = other RNA
aacaaagaacaggaagggag

SEQ ID NO: 11830 - RNA, 20 nt, synthetic construct
  source 1..20: mol_type = other RNA
aacaaagagaacaatggaat

SEQ ID NO: 11831 - RNA, 20 nt, synthetic construct
  source 1..20: mol_type = other RNA
aacaaagatgccacaaatgg

SEQ ID NO: 11832 - RNA, 20 nt, synthetic construct
  source 1..20: mol_type = other RNA
aacaaagctctgatgctttc

SEQ ID NO: 11833 - RNA, 20 nt, synthetic construct
  source 1..20: mol_type = other RNA
aacaaaggcaggagcagtgt

SEQ ID NO: 11834 - RNA, 20 nt, synthetic construct
  source 1..20: mol_type = other RNA
aacaaaggcgaagcccgccg

SEQ ID NO: 11835 - RNA, 20 nt, synthetic construct
  source 1..20: mol_type = other RNA
aacaaagggcctgttccagg

SEQ ID NO: 11836 - RNA, 20 nt, synthetic construct
  source 1..20: mol_type = other RNA
aacaaagggttcttggaaat

SEQ ID NO: 11837 - RNA, 20 nt, synthetic construct
  source 1..20: mol_type = other RNA
aacaaaggttgaaaactcaa

SEQ ID NO: 11838 - RNA, 20 nt, synthetic construct
  source 1..20: mol_type = other RNA
aacaaagtctttgggtaatt

SEQ ID NO: 11839 - RNA, 20 nt, synthetic construct
  source 1..20: mol_type = other RNA
aacaaataacaccatagctg

SEQ ID NO: 11840 - RNA, 20 nt, synthetic construct
  source 1..20: mol_type = other RNA
aacaaataacagttcttaag

SEQ ID NO: 11841 - RNA, 20 nt, synthetic construct
  source 1..20: mol_type = other RNA
aacaaataagaagattgagt

SEQ ID NO: 11842 - RNA, 20 nt, synthetic construct
  source 1..20: mol_type = other RNA
aacaaatcagatttcaggtg

SEQ ID NO: 11843 - RNA, 20 nt, synthetic construct
  source 1..20: mol_type = other RNA
aacaaatccttttcccagga

SEQ ID NO: 11844 - RNA, 20 nt, synthetic construct
  source 1..20: mol_type = other RNA
aacaaatggaaccactgtag

SEQ ID NO: 11845 - RNA, 20 nt, synthetic construct
  source 1..20: mol_type = other RNA
aacaaatgttgcagagactg

SEQ ID NO: 11846 - RNA, 20 nt, synthetic construct
  source 1..20: mol_type = other RNA
aacaaattcatgcaactgaa

SEQ ID NO: 11847 - RNA, 20 nt, synthetic construct
  source 1..20: mol_type = other RNA
aacaaattccctctacaaaa

SEQ ID NO: 11848 - RNA, 20 nt, synthetic construct
  source 1..20: mol_type = other RNA
aacaaattgcatcaactgct

SEQ ID NO: 11849 - RNA, 20 nt, synthetic construct
  source 1..20: mol_type = other RNA
aacaacaaaacacacgggta

SEQ ID NO: 11850 - RNA, 20 nt, synthetic construct
  source 1..20: mol_type = other RNA
aacaacaaaacatgttttca

SEQ ID NO: 11851 - RNA, 20 nt, synthetic construct
  source 1..20: mol_type = other RNA
aacaacaaaatacccacaag

SEQ ID NO: 11852 - RNA, 20 nt, synthetic construct
  source 1..20: mol_type = other RNA
aacaacaacaaaacacacgg

SEQ ID NO: 11853 - RNA, 20 nt, synthetic construct
  source 1..20: mol_type = other RNA
aacaacaacaaaacatgttt

SEQ ID NO: 11854 - RNA, 20 nt, synthetic construct
  source 1..20: mol_type = other RNA
aacaacaacaaaatacccac

SEQ ID NO: 11855 - RNA, 20 nt, synthetic construct
  source 1..20: mol_type = other RNA
aacaacaacaacaaaacaca

SEQ ID NO: 11856 - RNA, 20 nt, synthetic construct
  source 1..20: mol_type = other RNA
aacaacaacaacaaaacatg

SEQ ID NO: 11857 - RNA, 20 nt, synthetic construct
  source 1..20: mol_type = other RNA
aacaacaacaacaaaatacc

SEQ ID NO: 11858 - RNA, 20 nt, synthetic construct
  source 1..20: mol_type = other RNA
aacaacaacaacaacaaaac

SEQ ID NO: 11859 - RNA, 20 nt, synthetic construct
  source 1..20: mol_type = other RNA
aacaacactaaccaacattg

SEQ ID NO: 11860 - RNA, 20 nt, synthetic construct
  source 1..20: mol_type = other RNA
aacaacatggtagaccatat

SEQ ID NO: 11861 - RNA, 20 nt, synthetic construct
  source 1..20: mol_type = other RNA
aacaaccataatgagtaaca

SEQ ID NO: 11862 - RNA, 20 nt, synthetic construct
  source 1..20: mol_type = other RNA
aacaacctaaatgtccatcg

SEQ ID NO: 11863 - RNA, 20 nt, synthetic construct
  source 1..20: mol_type = other RNA
aacaacgctgtggctaacaa

SEQ ID NO: 11864 - RNA, 20 nt, synthetic construct
  source 1..20: mol_type = other RNA
aacaactcaaacgtccatca

SEQ ID NO: 11865 - RNA, 20 nt, synthetic construct
  source 1..20: mol_type = other RNA
aacaactgactctaaagtct

SEQ ID NO: 11866 - RNA, 20 nt, synthetic construct
  source 1..20: mol_type = other RNA
aacaagaaaatctgacaatt

SEQ ID NO: 11867 - RNA, 20 nt, synthetic construct
  source 1..20: mol_type = other RNA
aacaagaaagggtagctttg

SEQ ID NO: 11868 - RNA, 20 nt, synthetic construct
  source 1..20: mol_type = other RNA
aacaagaagaaaaagcaact

SEQ ID NO: 11869 - RNA, 20 nt, synthetic construct
  source 1..20: mol_type = other RNA
aacaagaagctgttttggta

SEQ ID NO: 11870 - RNA, 20 nt, synthetic construct
  source 1..20: mol_type = other RNA
aacaagaatcctgctatttt

SEQ ID NO: 11871 - RNA, 20 nt, synthetic construct
  source 1..20: mol_type = other RNA
aacaagactcaacatgtgta

SEQ ID NO: 11872 - RNA, 20 nt, synthetic construct
  source 1..20: mol_type = other RNA
aacaagagaggacagttggc

SEQ ID NO: 11873 - RNA, 20 nt, synthetic construct
  source 1..20: mol_type = other RNA
aacaagagcgtcgtaccttt

SEQ ID NO: 11874 - RNA, 20 nt, synthetic construct
  source 1..20: mol_type = other RNA
aacaagggttggtgcttcct

SEQ ID NO: 11875 - RNA, 20 nt, synthetic construct
  source 1..20: mol_type = other RNA
aacaagtcacaaaaagacaa

SEQ ID NO: 11876 - RNA, 20 nt, synthetic construct
  source 1..20: mol_type = other RNA
aacaagttacaaacatatgc

SEQ ID NO: 11877 - RNA, 20 nt, synthetic construct
  source 1..20: mol_type = other RNA
aacaataaatttctgttgct

SEQ ID NO: 11878 - RNA, 20 nt, synthetic construct
  source 1..20: mol_type = other RNA
aacaataagacaccgctcca

SEQ ID NO: 11879 - RNA, 20 nt, synthetic construct
  source 1..20: mol_type = other RNA
aacaatactttagacatggg

SEQ ID NO: 11880 - RNA, 20 nt, synthetic construct
  source 1..20: mol_type = other RNA
aacaatagcaacaaaacaat

SEQ ID NO: 11881 - RNA, 20 nt, synthetic construct
  source 1..20: mol_type = other RNA
aacaatagcccagcaggatt

SEQ ID NO: 11882 - RNA, 20 nt, synthetic construct
  source 1..20: mol_type = other RNA
aacaataggaatagtattca

SEQ ID NO: 11883 - RNA, 20 nt, synthetic construct
  source 1..20: mol_type = other RNA
aacaatcaaaccatcctttc

SEQ ID NO: 11884 - RNA, 20 nt, synthetic construct
  source 1..20: mol_type = other RNA
aacaatcaaatttaacacac

SEQ ID NO: 11885 - RNA, 20 nt, synthetic construct
  source 1..20: mol_type = other RNA
aacaatcaacaggtagctgc

SEQ ID NO: 11886 - RNA, 20 nt, synthetic construct
  source 1..20: mol_type = other RNA
aacaatccttctaatcagta

SEQ ID NO: 11887 - RNA, 20 nt, synthetic construct
  source 1..20: mol_type = other RNA
aacaatcgcaatccaaaatc

SEQ ID NO: 11888 - RNA, 20 nt, synthetic construct
  source 1..20: mol_type = other RNA
aacaatctaattcgaaaatg

SEQ ID NO: 11889 - RNA, 20 nt, synthetic construct
  source 1..20: mol_type = other RNA
aacaatctacagattcaatg

SEQ ID NO: 11890 - RNA, 20 nt, synthetic construct
  source 1..20: mol_type = other RNA
aacaatcttgaaaggggcca

SEQ ID NO: 11891 - RNA, 20 nt, synthetic construct
  source 1..20: mol_type = other RNA
aacaatgctgctatgaaaat

SEQ ID NO: 11892 - RNA, 20 nt, synthetic construct
  source 1..20: mol_type = other RNA
aacaatggaatagaagggag

SEQ ID NO: 11893 - RNA, 20 nt, synthetic construct
  source 1..20: mol_type = other RNA
aacaattacttcatagatgt

SEQ ID NO: 11894 - RNA, 20 nt, synthetic construct
  source 1..20: mol_type = other RNA
aacaattacttgagagcaga

SEQ ID NO: 11895 - RNA, 20 nt, synthetic construct
  source 1..20: mol_type = other RNA
aacaattagcacctttatta

SEQ ID NO: 11896 - RNA, 20 nt, synthetic construct
  source 1..20: mol_type = other RNA
aacaattcaacaatagcaac

SEQ ID NO: 11897 - RNA, 20 nt, synthetic construct
  source 1..20: mol_type = other RNA
aacaattcaacagctactat

SEQ ID NO: 11898 - RNA, 20 nt, synthetic construct
  source 1..20: mol_type = other RNA
aacaattggtgaatctgagt

SEQ ID NO: 11899 - RNA, 20 nt, synthetic construct
  source 1..20: mol_type = other RNA
aacaattttctctcatgttg

SEQ ID NO: 11900 - RNA, 20 nt, synthetic construct
  source 1..20: mol_type = other RNA
aacaattttgaatgtgttga

SEQ ID NO: 11901 - RNA, 20 nt, synthetic construct
  source 1..20: mol_type = other RNA
aacacaaaacaaatggaacc

SEQ ID NO: 11902 - RNA, 20 nt, synthetic construct
  source 1..20: mol_type = other RNA
aacacaaactgcagaatgac

SEQ ID NO: 11903 - RNA, 20 nt, synthetic construct
  source 1..20: mol_type = other RNA
aacacaaagccttctctact

SEQ ID NO: 11904 - RNA, 20 nt, synthetic construct
  source 1..20: mol_type = other RNA
aacacaacataccaaaaccc

SEQ ID NO: 11905 - RNA, 20 nt, synthetic construct
  source 1..20: mol_type = other RNA
aacacaaggacaggtcacat

SEQ ID NO: 11906 - RNA, 20 nt, synthetic construct
  source 1..20: mol_type = other RNA
aacacacaaaccaacaacaa

SEQ ID NO: 11907 - RNA, 20 nt, synthetic construct
  source 1..20: mol_type = other RNA
aacacacaacaatgaattct

SEQ ID NO: 11908 - RNA, 20 nt, synthetic construct
  source 1..20: mol_type = other RNA
aacacacaatttgaggtagc

SEQ ID NO: 11909 - RNA, 20 nt, synthetic construct
  source 1..20: mol_type = other RNA
aacacacacctattcatagg

SEQ ID NO: 11910 - RNA, 20 nt, synthetic construct
  source 1..20: mol_type = other RNA
aacacacattagcctagacc

SEQ ID NO: 11911 - RNA, 20 nt, synthetic construct
  source 1..20: mol_type = other RNA
aacacacccttggtaaacag

SEQ ID NO: 11912 - RNA, 20 nt, synthetic construct
  source 1..20: mol_type = other RNA
aacacacgggctgggcgcga

SEQ ID NO: 11913 - RNA, 20 nt, synthetic construct
  source 1..20: mol_type = other RNA
aacacacgggtacacatcct

SEQ ID NO: 11914 - RNA, 20 nt, synthetic construct
  source 1..20: mol_type = other RNA
aacacactagccactgggtc

SEQ ID NO: 11915 - RNA, 20 nt, synthetic construct
  source 1..20: mol_type = other RNA
aacacactcgtgtatgattt

SEQ ID NO: 11916 - RNA, 20 nt, synthetic construct
  source 1..20: mol_type = other RNA
aacacactgctcttctattc

SEQ ID NO: 11917 - RNA, 20 nt, synthetic construct
  source 1..20: mol_type = other RNA
aacacactgggtaaacaaga

SEQ ID NO: 11918 - RNA, 20 nt, synthetic construct
  source 1..20: mol_type = other RNA
aacacagaacactaaagggg

SEQ ID NO: 11919 - RNA, 20 nt, synthetic construct
  source 1..20: mol_type = other RNA
aacacaggactgtgtgtgtc

SEQ ID NO: 11920 - RNA, 20 nt, synthetic construct
  source 1..20: mol_type = other RNA
aacacagggactgatgaaga

SEQ ID NO: 11921 - RNA, 20 nt, synthetic construct
  source 1..20: mol_type = other RNA
aacacagtgttgagaaagca

SEQ ID NO: 11922 - RNA, 20 nt, synthetic construct
  source 1..20: mol_type = other RNA
aacacagttctagttctaat

SEQ ID NO: 11923 - RNA, 20 nt, synthetic construct
  source 1..20: mol_type = other RNA
aacacatacaaaccaaaaaa

SEQ ID NO: 11924 - RNA, 20 nt, synthetic construct
  source 1..20: mol_type = other RNA
aacacatatttatcaacaca

SEQ ID NO: 11925 - RNA, 20 nt, synthetic construct
  source 1..20: mol_type = other RNA
aacacatcagcgctaagtgc

SEQ ID NO: 11926 - RNA, 20 nt, synthetic construct
  source 1..20: mol_type = other RNA
aacacatgcacactagacct

SEQ ID NO: 11927 - RNA, 20 nt, synthetic construct
  source 1..20: mol_type = other RNA
aacacatggcatcggggcct

SEQ ID NO: 11928 - RNA, 20 nt, synthetic construct
  source 1..20: mol_type = other RNA
aacacatggggcattaattt

SEQ ID NO: 11929 - RNA, 20 nt, synthetic construct
  source 1..20: mol_type = other RNA
aacacatgtcatgggccggg

SEQ ID NO: 11930 - RNA, 20 nt, synthetic construct
  source 1..20: mol_type = other RNA
aacacattcaaaattgttct

SEQ ID NO: 11931 - RNA, 20 nt, synthetic construct
  source 1..20: mol_type = other RNA
aacaccaaaaaagcaccagt

SEQ ID NO: 11932 - RNA, 20 nt, synthetic construct
  source 1..20: mol_type = other RNA
aacaccaacacaaagccttc

SEQ ID NO: 11933 - RNA, 20 nt, synthetic construct
  source 1..20: mol_type = other RNA
aacaccaagcaacactaaag

SEQ ID NO: 11934 - RNA, 20 nt, synthetic construct
  source 1..20: mol_type = other RNA
aacaccagatactcatgctt

SEQ ID NO: 11935 - RNA, 20 nt, synthetic construct
  source 1..20: mol_type = other RNA
aacaccagtaagattctgtc

SEQ ID NO: 11936 - RNA, 20 nt, synthetic construct
  source 1..20: mol_type = other RNA
aacaccatagctgaaggcac

SEQ ID NO: 11937 - RNA, 20 nt, synthetic construct
  source 1..20: mol_type = other RNA
aacaccatggcaggtttcaa

SEQ ID NO: 11938 - RNA, 20 nt, synthetic construct
  source 1..20: mol_type = other RNA
aacacccttgaaaatttcca

SEQ ID NO: 11939 - RNA, 20 nt, synthetic construct
  source 1..20: mol_type = other RNA
aacacctaaagatatgtgta

SEQ ID NO: 11940 - RNA, 20 nt, synthetic construct
  source 1..20: mol_type = other RNA
aacacctcagttaaacccaa

SEQ ID NO: 11941 - RNA, 20 nt, synthetic construct
  source 1..20: mol_type = other RNA
aacacctgcagtggcgtgtg

SEQ ID NO: 11942 - RNA, 20 nt, synthetic construct
  source 1..20: mol_type = other RNA
aacaccttacactcaaaagc

SEQ ID NO: 11943 - RNA, 20 nt, synthetic construct
  source 1..20: mol_type = other RNA
aacaccttgaacatgaacga

SEQ ID NO: 11944 - RNA, 20 nt, synthetic construct
  source 1..20: mol_type = other RNA
aacaccttgaactgggactt

SEQ ID NO: 11945 - RNA, 20 nt, synthetic construct
  source 1..20: mol_type = other RNA
aacaccttgggaggctgagg

SEQ ID NO: 11946 - RNA, 20 nt, synthetic construct
  source 1..20: mol_type = other RNA
aacacctttgtattcatcca

SEQ ID NO: 11947 - RNA, 20 nt, synthetic construct
  source 1..20: mol_type = other RNA
aacacgcagaaccactgagc

SEQ ID NO: 11948 - RNA, 20 nt, synthetic construct
  source 1..20: mol_type = other RNA
aacactaaagatttgccaat

SEQ ID NO: 11949 - RNA, 20 nt, synthetic construct
  source 1..20: mol_type = other RNA
aacactaaaggggatttcat

SEQ ID NO: 11950 - RNA, 20 nt, synthetic construct
  source 1..20: mol_type = other RNA
aacactaaccaacattgagt

SEQ ID NO: 11951 - RNA, 20 nt, synthetic construct
  source 1..20: mol_type = other RNA
aacactaagaagatggttgg

SEQ ID NO: 11952 - RNA, 20 nt, synthetic construct
  source 1..20: mol_type = other RNA
aacactaatccttctcatag

SEQ ID NO: 11953 - RNA, 20 nt, synthetic construct
  source 1..20: mol_type = other RNA
aacactataaatcagtaaga

SEQ ID NO: 11954 - RNA, 20 nt, synthetic construct
  source 1..20: mol_type = other RNA
aacactataagccaatatcc

SEQ ID NO: 11955 - RNA, 20 nt, synthetic construct
  source 1..20: mol_type = other RNA
aacactatgtgttgataaat

SEQ ID NO: 11956 - RNA, 20 nt, synthetic construct
  source 1..20: mol_type = other RNA
aacactcagaagtactactc

SEQ ID NO: 11957 - RNA, 20 nt, synthetic construct
  source 1..20: mol_type = other RNA
aacactcagatatcaatctg

SEQ ID NO: 11958 - RNA, 20 nt, synthetic construct
  source 1..20: mol_type = other RNA
aacactcataccaggttttg

SEQ ID NO: 11959 - RNA, 20 nt, synthetic construct
  source 1..20: mol_type = other RNA
aacactccagaatgaccgag

SEQ ID NO: 11960 - RNA, 20 nt, synthetic construct
  source 1..20: mol_type = other RNA
aacactctgcaattttaaat

SEQ ID NO: 11961 - RNA, 20 nt, synthetic construct
  source 1..20: mol_type = other RNA
aacactgctcagaagctttc

SEQ ID NO: 11962 - RNA, 20 nt, synthetic construct
  source 1..20: mol_type = other RNA
aacactggaaatcacaggtt

SEQ ID NO: 11963 - RNA, 20 nt, synthetic construct
  source 1..20: mol_type = other RNA
aacactggaagtaattggga

SEQ ID NO: 11964 - RNA, 20 nt, synthetic construct
  source 1..20: mol_type = other RNA
aacactggcaaaaatcatca

SEQ ID NO: 11965 - RNA, 20 nt, synthetic construct
  source 1..20: mol_type = other RNA
aacactgtagttcagttttt

SEQ ID NO: 11966 - RNA, 20 nt, synthetic construct
  source 1..20: mol_type = other RNA
aacactgtattttgaacaaa

SEQ ID NO: 11967 - RNA, 20 nt, synthetic construct
  source 1..20: mol_type = other RNA
aacactgtgttcttttcctt

SEQ ID NO: 11968 - RNA, 20 nt, synthetic construct
  source 1..20: mol_type = other RNA
aacactgttctgcgtggttt

SEQ ID NO: 11969 - RNA, 20 nt, synthetic construct
  source 1..20: mol_type = other RNA
aacacttaacatgagatcta

SEQ ID NO: 11970 - RNA, 20 nt, synthetic construct
  source 1..20: mol_type = other RNA
aacacttagcatgttgcttt

SEQ ID NO: 11971 - RNA, 20 nt, synthetic construct
  source 1..20: mol_type = other RNA
aacacttcagtggtaaggac

SEQ ID NO: 11972 - RNA, 20 nt, synthetic construct
  source 1..20: mol_type = other RNA
aacacttctgtgatcagaag

SEQ ID NO: 11973 - RNA, 20 nt, synthetic construct
  source 1..20: mol_type = other RNA
aacacttgaattagtgattt

SEQ ID NO: 11974 - RNA, 20 nt, synthetic construct
  source 1..20: mol_type = other RNA
aacacttgtgtaactaccac

SEQ ID NO: 11975 - RNA, 20 nt, synthetic construct
  source 1..20: mol_type = other RNA
aacacttttcaaacacttaa

SEQ ID NO: 11976 - RNA, 20 nt, synthetic construct
  source 1..20: mol_type = other RNA
aacacttttccagtcttctc

SEQ ID NO: 11977 - RNA, 20 nt, synthetic construct
  source 1..20: mol_type = other RNA
aacagaaaaatccatcttaa

SEQ ID NO: 11978 - RNA, 20 nt, synthetic construct
  source 1..20: mol_type = other RNA
aacagaaaccctgtacccat

SEQ ID NO: 11979 - RNA, 20 nt, synthetic construct
  source 1..20: mol_type = other RNA
aacagaaaggcccaaaaagt

SEQ ID NO: 11980 - RNA, 20 nt, synthetic construct
  source 1..20: mol_type = other RNA
aacagaaatgaaatggccct

SEQ ID NO: 11981 - RNA, 20 nt, synthetic construct
  source 1..20: mol_type = other RNA
aacagaagaagaattctata

SEQ ID NO: 11982 - RNA, 20 nt, synthetic construct
  source 1..20: mol_type = other RNA
aacagaagaagtttctagtt

SEQ ID NO: 11983 - RNA, 20 nt, synthetic construct
  source 1..20: mol_type = other RNA
aacagaagacacaaaatcag

SEQ ID NO: 11984 - RNA, 20 nt, synthetic construct
  source 1..20: mol_type = other RNA
aacagaagggtatatacaat

SEQ ID NO: 11985 - RNA, 20 nt, synthetic construct
  source 1..20: mol_type = other RNA
aacagaataaaaagtgactt

SEQ ID NO: 11986 - RNA, 20 nt, synthetic construct
  source 1..20: mol_type = other RNA
aacagaataaatgaaaacag

SEQ ID NO: 11987 - RNA, 20 nt, synthetic construct
  source 1..20: mol_type = other RNA
aacagaattaaacaatcttg

SEQ ID NO: 11988 - RNA, 20 nt, synthetic construct
  source 1..20: mol_type = other RNA
aacagacagacatgcatgca

SEQ ID NO: 11989 - RNA, 20 nt, synthetic construct
  source 1..20: mol_type = other RNA
aacagacccttatgtccagc

SEQ ID NO: 11990 - RNA, 20 nt, synthetic construct
  source 1..20: mol_type = other RNA
aacagacctctgaagagtct

SEQ ID NO: 11991 - RNA, 20 nt, synthetic construct
  source 1..20: mol_type = other RNA
aacagactgagccagcaaat

SEQ ID NO: 11992 - RNA, 20 nt, synthetic construct
  source 1..20: mol_type = other RNA
aacagagacagagaatctgt

SEQ ID NO: 11993 - RNA, 20 nt, synthetic construct
  source 1..20: mol_type = other RNA
aacagaggcatgcacggact

SEQ ID NO: 11994 - RNA, 20 nt, synthetic construct
  source 1..20: mol_type = other RNA
aacagagttttccaataagt

SEQ ID NO: 11995 - RNA, 20 nt, synthetic construct
  source 1..20: mol_type = other RNA
aacagataacctagatttta

SEQ ID NO: 11996 - RNA, 20 nt, synthetic construct
  source 1..20: mol_type = other RNA
aacagatcctcacatcagtt

SEQ ID NO: 11997 - RNA, 20 nt, synthetic construct
  source 1..20: mol_type = other RNA
aacagatctgagaagactaa

SEQ ID NO: 11998 - RNA, 20 nt, synthetic construct
  source 1..20: mol_type = other RNA
aacagatcttggccgaatgt

SEQ ID NO: 11999 - RNA, 20 nt, synthetic construct
  source 1..20: mol_type = other RNA
aacagatggaactctatttt

SEQ ID NO: 12000 - RNA, 20 nt, synthetic construct
  source 1..20: mol_type = other RNA
aacagatggtccttttttac

SEQ ID NO: 12001 - RNA, 20 nt, synthetic construct
  source 1..20: mol_type = other RNA
aacagattcacgcacaggga

SEQ ID NO: 12002 - RNA, 20 nt, synthetic construct
  source 1..20: mol_type = other RNA
aacagcaaggctcctgcaga

SEQ ID NO: 12003 - RNA, 20 nt, synthetic construct
  source 1..20: mol_type = other RNA
aacagcaccttttttggtat

SEQ ID NO: 12004 - RNA, 20 nt, synthetic construct
  source 1..20: mol_type = other RNA
aacagcacttttgtactact

SEQ ID NO: 12005 - RNA, 20 nt, synthetic construct
  source 1..20: mol_type = other RNA
aacagcagaacaaactgcgt

SEQ ID NO: 12006 - RNA, 20 nt, synthetic construct
  source 1..20: mol_type = other RNA
aacagcaggggaaggcttcg

SEQ ID NO: 12007 - RNA, 20 nt, synthetic construct
  source 1..20: mol_type = other RNA
aacagcagtcttaaccattg

SEQ ID NO: 12008 - RNA, 20 nt, synthetic construct
  source 1..20: mol_type = other RNA
aacagcatactgtggatatc

SEQ ID NO: 12009 - RNA, 20 nt, synthetic construct
  source 1..20: mol_type = other RNA
aacagcatatacatgacatg

SEQ ID NO: 12010 - RNA, 20 nt, synthetic construct
  source 1..20: mol_type = other RNA
aacagcattatcttaataac

SEQ ID NO: 12011 - RNA, 20 nt, synthetic construct
  source 1..20: mol_type = other RNA
aacagccaaagaaattggac

SEQ ID NO: 12012 - RNA, 20 nt, synthetic construct
  source 1..20: mol_type = other RNA
aacagccaaataaaacacaa

SEQ ID NO: 12013 - RNA, 20 nt, synthetic construct
  source 1..20: mol_type = other RNA
aacagcccctagcatgcagt

SEQ ID NO: 12014 - RNA, 20 nt, synthetic construct
  source 1..20: mol_type = other RNA
aacagccggcatatgtcact

SEQ ID NO: 12015 - RNA, 20 nt, synthetic construct
  source 1..20: mol_type = other RNA
aacagcctaaagtccacaga

SEQ ID NO: 12016 - RNA, 20 nt, synthetic construct
  source 1..20: mol_type = other RNA
aacagcctaagcaaatgtaa

SEQ ID NO: 12017 - RNA, 20 nt, synthetic construct
  source 1..20: mol_type = other RNA
aacagcctaattgtacacct

SEQ ID NO: 12018 - RNA, 20 nt, synthetic construct
  source 1..20: mol_type = other RNA
aacagcgccacttaaaaaat

SEQ ID NO: 12019 - RNA, 20 nt, synthetic construct
  source 1..20: mol_type = other RNA
aacagctactatgaatatac

SEQ ID NO: 12020 - RNA, 20 nt, synthetic construct
  source 1..20: mol_type = other RNA
aacagctaggtgagtgagat

SEQ ID NO: 12021 - RNA, 20 nt, synthetic construct
  source 1..20: mol_type = other RNA
aacagctcagaagctatagc

SEQ ID NO: 12022 - RNA, 20 nt, synthetic construct
  source 1..20: mol_type = other RNA
aacagcttcttgttagaatt

SEQ ID NO: 12023 - RNA, 20 nt, synthetic construct
  source 1..20: mol_type = other RNA
aacagcttgacattcttacc

SEQ ID NO: 12024 - RNA, 20 nt, synthetic construct
  source 1..20: mol_type = other RNA
aacaggaagaggcagctaag

SEQ ID NO: 12025 - RNA, 20 nt, synthetic construct
  source 1..20: mol_type = other RNA
aacaggaagggagagatgcc

SEQ ID NO: 12026 - RNA, 20 nt, synthetic construct
  source 1..20: mol_type = other RNA
aacaggaagttgagaaagag

SEQ ID NO: 12027 - RNA, 20 nt, synthetic construct
  source 1..20: mol_type = other RNA
aacaggacttttggtacaca

SEQ ID NO: 12028 - RNA, 20 nt, synthetic construct
  source 1..20: mol_type = other RNA
aacaggagttaccataaaac

SEQ ID NO: 12029 - RNA, 20 nt, synthetic construct
  source 1..20: mol_type = other RNA
aacaggatacaaaaagcacc

SEQ ID NO: 12030 - RNA, 20 nt, synthetic construct
  source 1..20: mol_type = other RNA
aacaggattacaatgtaagg

SEQ ID NO: 12031 - RNA, 20 nt, synthetic construct
  source 1..20: mol_type = other RNA
aacaggcaaccttgggagaa

SEQ ID NO: 12032 - RNA, 20 nt, synthetic construct
  source 1..20: mol_type = other RNA
aacaggccctttgttagtgc

SEQ ID NO: 12033 - RNA, 20 nt, synthetic construct
  source 1..20: mol_type = other RNA
aacaggcctgagccgtcggt

SEQ ID NO: 12034 - RNA, 20 nt, synthetic construct
  source 1..20: mol_type = other RNA
aacaggctcaatacctgaaa

SEQ ID NO: 12035 - RNA, 20 nt, synthetic construct
  source 1..20: mol_type = other RNA
aacaggctgagtgcggtggc

SEQ ID NO: 12036 - RNA, 20 nt, synthetic construct
  source 1..20: mol_type = other RNA
aacagggccactgagagctc

SEQ ID NO: 12037 - RNA, 20 nt, synthetic construct
  source 1..20: mol_type = other RNA
aacagggtaagattccgtct

SEQ ID NO: 12038 - RNA, 20 nt, synthetic construct
  source 1..20: mol_type = other RNA
aacagggtctacaaaaggtt

SEQ ID NO: 12039 - RNA, 20 nt, synthetic construct
  source 1..20: mol_type = other RNA
aacagggttacagtataggg

SEQ ID NO: 12040 - RNA, 20 nt, synthetic construct
  source 1..20: mol_type = other RNA
aacagggttattaacatacc

SEQ ID NO: 12041 - RNA, 20 nt, synthetic construct
  source 1..20: mol_type = other RNA
aacagggttttgttttgttt

SEQ ID NO: 12042 - RNA, 20 nt, synthetic construct
  source 1..20: mol_type = other RNA
aacaggtagctgctttttaa

SEQ ID NO: 12043 - RNA, 20 nt, synthetic construct
  source 1..20: mol_type = other RNA
aacaggtataaagtttccgt

SEQ ID NO: 12044 - RNA, 20 nt, synthetic construct
  source 1..20: mol_type = other RNA
aacaggtgtaagagattaat

SEQ ID NO: 12045 - RNA, 20 nt, synthetic construct
  source 1..20: mol_type = other RNA
aacaggttcttcatcagtcc

SEQ ID NO: 12046 - RNA, 20 nt, synthetic construct
  source 1..20: mol_type = other RNA
aacagtaaagtcactgtgga

SEQ ID NO: 12047 - RNA, 20 nt, synthetic construct
  source 1..20: mol_type = other RNA
aacagtaattagttacatga

SEQ ID NO: 12048 - RNA, 20 nt, synthetic construct
  source 1..20: mol_type = other RNA
aacagtacagtagtaaaacc

SEQ ID NO: 12049 - RNA, 20 nt, synthetic construct
  source 1..20: mol_type = other RNA
aacagtattgtcttctaacc

SEQ ID NO: 12050 - RNA, 20 nt, synthetic construct
  source 1..20: mol_type = other RNA
aacagtcattcaggtctatg

SEQ ID NO: 12051 - RNA, 20 nt, synthetic construct
  source 1..20: mol_type = other RNA
aacagtctcgtgaatttggt

SEQ ID NO: 12052 - RNA, 20 nt, synthetic construct
  source 1..20: mol_type = other RNA
aacagtgaccacagtttgaa

SEQ ID NO: 12053 - RNA, 20 nt, synthetic construct
  source 1..20: mol_type = other RNA
aacagtgctgtgccagtgca

SEQ ID NO: 12054 - RNA, 20 nt, synthetic construct
  source 1..20: mol_type = other RNA
aacagtggttaggaaaatac

SEQ ID NO: 12055 - RNA, 20 nt, synthetic construct
  source 1..20: mol_type = other RNA
aacagtgtactagtctccat

SEQ ID NO: 12056 - RNA, 20 nt, synthetic construct
  source 1..20: mol_type = other RNA
aacagtgtgagaccgtgtct

SEQ ID NO: 12057 - RNA, 20 nt, synthetic construct
  source 1..20: mol_type = other RNA
aacagtgtttacacacctga

SEQ ID NO: 12058 - RNA, 20 nt, synthetic construct
  source 1..20: mol_type = other RNA
aacagttactttcctttttc

SEQ ID NO: 12059 - RNA, 20 nt, synthetic construct
  source 1..20: mol_type = other RNA
aacagttcaatactactgca

SEQ ID NO: 12060 - RNA, 20 nt, synthetic construct
  source 1..20: mol_type = other RNA
aacagttcttaagttaaaac

SEQ ID NO: 12061 - RNA, 20 nt, synthetic construct
  source 1..20: mol_type = other RNA
aacagttgctattcaacagg

SEQ ID NO: 12062 - RNA, 20 nt, synthetic construct
  source 1..20: mol_type = other RNA
aacagtttacacgccttcgc

SEQ ID NO: 12063 - RNA, 20 nt, synthetic construct
  source 1..20: mol_type = other RNA
aacagtttagcaatccaagg

SEQ ID NO: 12064 - RNA, 20 nt, synthetic construct
  source 1..20: mol_type = other RNA
aacagtttccctctgagaga

SEQ ID NO: 12065 - RNA, 20 nt, synthetic construct
  source 1..20: mol_type = other RNA
aacagtttggcaatttctca

SEQ ID NO: 12066 - RNA, 20 nt, synthetic construct
  source 1..20: mol_type = other RNA
aacagtttttacatgtagtt

SEQ ID NO: 12067 - RNA, 20 nt, synthetic construct
  source 1..20: mol_type = other RNA
aacataaaagcgtactgtga

SEQ ID NO: 12068 - RNA, 20 nt, synthetic construct
  source 1..20: mol_type = other RNA
aacataaatagggtgctact

SEQ ID NO: 12069 - RNA, 20 nt, synthetic construct
  source 1..20: mol_type = other RNA
aacataatcaaattcacaga

SEQ ID NO: 12070 - RNA, 20 nt, synthetic construct
  source 1..20: mol_type = other RNA
aacataatctttggtgctga

SEQ ID NO: 12071 - RNA, 20 nt, synthetic construct
  source 1..20: mol_type = other RNA
aacatacacatcagattttg

SEQ ID NO: 12072 - RNA, 20 nt, synthetic construct
  source 1..20: mol_type = other RNA
aacatacatgagaaatgtta

SEQ ID NO: 12073 - RNA, 20 nt, synthetic construct
  source 1..20: mol_type = other RNA
aacatacatgttcagttata

SEQ ID NO: 12074 - RNA, 20 nt, synthetic construct
  source 1..20: mol_type = other RNA
aacataccaaaacccttggg

SEQ ID NO: 12075 - RNA, 20 nt, synthetic construct
  source 1..20: mol_type = other RNA
aacataccccaaccctacct

SEQ ID NO: 12076 - RNA, 20 nt, synthetic construct
  source 1..20: mol_type = other RNA
aacataccgacggctcaggc

SEQ ID NO: 12077 - RNA, 20 nt, synthetic construct
  source 1..20: mol_type = other RNA
aacatataatccaactgcag

SEQ ID NO: 12078 - RNA, 20 nt, synthetic construct
  source 1..20: mol_type = other RNA
aacatatccttctacatccc

SEQ ID NO: 12079 - RNA, 20 nt, synthetic construct
  source 1..20: mol_type = other RNA
aacatatgcaggaccaactt

SEQ ID NO: 12080 - RNA, 20 nt, synthetic construct
  source 1..20: mol_type = other RNA
aacatatgcatgttatttgg

SEQ ID NO: 12081 - RNA, 20 nt, synthetic construct
  source 1..20: mol_type = other RNA
aacatatgtcagatggtaaa

SEQ ID NO: 12082 - RNA, 20 nt, synthetic construct
  source 1..20: mol_type = other RNA
aacatcaaagtcccctgtaa

SEQ ID NO: 12083 - RNA, 20 nt, synthetic construct
  source 1..20: mol_type = other RNA
aacatcacccagctcgacca

SEQ ID NO: 12084 - RNA, 20 nt, synthetic construct
  source 1..20: mol_type = other RNA
aacatcactagctattagag

SEQ ID NO: 12085 - RNA, 20 nt, synthetic construct
  source 1..20: mol_type = other RNA
aacatcatctaatttcccat

SEQ ID NO: 12086 - RNA, 20 nt, synthetic construct
  source 1..20: mol_type = other RNA
aacatcatgatttaatagag

SEQ ID NO: 12087 - RNA, 20 nt, synthetic construct
  source 1..20: mol_type = other RNA
aacatccacagctttctttt

SEQ ID NO: 12088 - RNA, 20 nt, synthetic construct
  source 1..20: mol_type = other RNA
aacatccattactcgtggtt

SEQ ID NO: 12089 - RNA, 20 nt, synthetic construct
  source 1..20: mol_type = other RNA
aacatcccaagtgcccatta

SEQ ID NO: 12090 - RNA, 20 nt, synthetic construct
  source 1..20: mol_type = other RNA
aacatccctatgcaataact

SEQ ID NO: 12091 - RNA, 20 nt, synthetic construct
  source 1..20: mol_type = other RNA
aacatcgtaaaacctcatct

SEQ ID NO: 12092 - RNA, 20 nt, synthetic construct
  source 1..20: mol_type = other RNA
aacatctatgaagtaattgt

SEQ ID NO: 12093 - RNA, 20 nt, synthetic construct
  source 1..20: mol_type = other RNA
aacatctgcctcccgggtcc

SEQ ID NO: 12094 - RNA, 20 nt, synthetic construct
  source 1..20: mol_type = other RNA
aacatctggaaggaaacact

SEQ ID NO: 12095 - RNA, 20 nt, synthetic construct
  source 1..20: mol_type = other RNA
aacatctggcagcaggggct

SEQ ID NO: 12096 - RNA, 20 nt, synthetic construct
  source 1..20: mol_type = other RNA
aacatgaacaagttacaaac

SEQ ID NO: 12097 - RNA, 20 nt, synthetic construct
  source 1..20: mol_type = other RNA
aacatgaacgagaacaaaac

SEQ ID NO: 12098 - RNA, 20 nt, synthetic construct
  source 1..20: mol_type = other RNA
aacatgaactactcaaagaa

SEQ ID NO: 12099 - RNA, 20 nt, synthetic construct
  source 1..20: mol_type = other RNA
aacatgaataaccaatgtca

SEQ ID NO: 12100 - RNA, 20 nt, synthetic construct
  source 1..20: mol_type = other RNA
aacatgacagatcccaaaaa

SEQ ID NO: 12101 - RNA, 20 nt, synthetic construct
  source 1..20: mol_type = other RNA
aacatgagagaaaattgttc

SEQ ID NO: 12102 - RNA, 20 nt, synthetic construct
  source 1..20: mol_type = other RNA
aacatgattgggtcaacaaa

SEQ ID NO: 12103 - RNA, 20 nt, synthetic construct
  source 1..20: mol_type = other RNA
aacatgcatatgtttgtaac

SEQ ID NO: 12104 - RNA, 20 nt, synthetic construct
  source 1..20: mol_type = other RNA
aacatgccagctttggctga

SEQ ID NO: 12105 - RNA, 20 nt, synthetic construct
  source 1..20: mol_type = other RNA
aacatgctaagtgtttagga

SEQ ID NO: 12106 - RNA, 20 nt, synthetic construct
  source 1..20: mol_type = other RNA
aacatgctcttaagtatttt

SEQ ID NO: 12107 - RNA, 20 nt, synthetic construct
  source 1..20: mol_type = other RNA
aacatggatatttggccggg

SEQ ID NO: 12108 - RNA, 20 nt, synthetic construct
  source 1..20: mol_type = other RNA
aacatggcacatgtctacct

SEQ ID NO: 12109 - RNA, 20 nt, synthetic construct
  source 1..20: mol_type = other RNA
aacatggccagtatctcctt

SEQ ID NO: 12110 - RNA, 20 nt, synthetic construct
  source 1..20: mol_type = other RNA
aacatggcttagaaatgaag

SEQ ID NO: 12111 - RNA, 20 nt, synthetic construct
  source 1..20: mol_type = other RNA
aacatgggaatgcatatatc

SEQ ID NO: 12112 - RNA, 20 nt, synthetic construct
  source 1..20: mol_type = other RNA
aacatggtaatttgtccatc

SEQ ID NO: 12113 - RNA, 20 nt, synthetic construct
  source 1..20: mol_type = other RNA
aacatggtagaccatataat

SEQ ID NO: 12114 - RNA, 20 nt, synthetic construct
  source 1..20: mol_type = other RNA
aacatggtccacagaggctt

SEQ ID NO: 12115 - RNA, 20 nt, synthetic construct
  source 1..20: mol_type = other RNA
aacatggtttgatcccacta

SEQ ID NO: 12116 - RNA, 20 nt, synthetic construct
  source 1..20: mol_type = other RNA
aacatgtaaaacagaccctt

SEQ ID NO: 12117 - RNA, 20 nt, synthetic construct
  source 1..20: mol_type = other RNA
aacatgtatgtttctcattc

SEQ ID NO: 12118 - RNA, 20 nt, synthetic construct
  source 1..20: mol_type = other RNA
aacatgtcttggtgtgctct

SEQ ID NO: 12119 - RNA, 20 nt, synthetic construct
  source 1..20: mol_type = other RNA
aacatgtgaggatttatttc

SEQ ID NO: 12120 - RNA, 20 nt, synthetic construct
  source 1..20: mol_type = other RNA
aacatgtggaacataatctt

SEQ ID NO: 12121 - RNA, 20 nt, synthetic construct
  source 1..20: mol_type = other RNA
aacatgtgtatttagggagc

SEQ ID NO: 12122 - RNA, 20 nt, synthetic construct
  source 1..20: mol_type = other RNA
aacatgttagattaggaaac

SEQ ID NO: 12123 - RNA, 20 nt, synthetic construct
  source 1..20: mol_type = other RNA
aacatgttgtgtagaaatgt

SEQ ID NO: 12124 - RNA, 20 nt, synthetic construct
  source 1..20: mol_type = other RNA
aacatgttttcaaatgctat

SEQ ID NO: 12125 - RNA, 20 nt, synthetic construct
  source 1..20: mol_type = other RNA
aacattaaggaagaattaac

SEQ ID NO: 12126 - RNA, 20 nt, synthetic construct
  source 1..20: mol_type = other RNA
aacattaagggaaacagggt

SEQ ID NO: 12127 - RNA, 20 nt, synthetic construct
  source 1..20: mol_type = other RNA
aacattacaacagcaaggct

SEQ ID NO: 12128 - RNA, 20 nt, synthetic construct
  source 1..20: mol_type = other RNA
aacattaccaataaaagcct

SEQ ID NO: 12129 - RNA, 20 nt, synthetic construct
  source 1..20: mol_type = other RNA
aacattatatttcacaacga

SEQ ID NO: 12130 - RNA, 20 nt, synthetic construct
  source 1..20: mol_type = other RNA
aacattatcttctacctttt

SEQ ID NO: 12131 - RNA, 20 nt, synthetic construct
  source 1..20: mol_type = other RNA
aacattcatccctctaaata

SEQ ID NO: 12132 - RNA, 20 nt, synthetic construct
  source 1..20: mol_type = other RNA
aacattcattcatgacaaga

SEQ ID NO: 12133 - RNA, 20 nt, synthetic construct
  source 1..20: mol_type = other RNA
aacattctacagtattacac

SEQ ID NO: 12134 - RNA, 20 nt, synthetic construct
  source 1..20: mol_type = other RNA
aacattctgtagaagtaaat

SEQ ID NO: 12135 - RNA, 20 nt, synthetic construct
  source 1..20: mol_type = other RNA
aacattgaaggcagaattat

SEQ ID NO: 12136 - RNA, 20 nt, synthetic construct
  source 1..20: mol_type = other RNA
aacattgagtttcaatgact

SEQ ID NO: 12137 - RNA, 20 nt, synthetic construct
  source 1..20: mol_type = other RNA
aacattgatacaatacttgg

SEQ ID NO: 12138 - RNA, 20 nt, synthetic construct
  source 1..20: mol_type = other RNA
aacattgcctccatatggga

SEQ ID NO: 12139 - RNA, 20 nt, synthetic construct
  source 1..20: mol_type = other RNA
aacattggaggataatatct

SEQ ID NO: 12140 - RNA, 20 nt, synthetic construct
  source 1..20: mol_type = other RNA
aacattggtttgaaatgatc

SEQ ID NO: 12141 - RNA, 20 nt, synthetic construct
  source 1..20: mol_type = other RNA
aacattgtgcaaccatcccc

SEQ ID NO: 12142 - RNA, 20 nt, synthetic construct
  source 1..20: mol_type = other RNA
aacatttatacagttggaac

SEQ ID NO: 12143 - RNA, 20 nt, synthetic construct
  source 1..20: mol_type = other RNA
aacatttatggaattgccat

SEQ ID NO: 12144 - RNA, 20 nt, synthetic construct
  source 1..20: mol_type = other RNA
aacatttctcatgtatgttt

SEQ ID NO: 12145 - RNA, 20 nt, synthetic construct
  source 1..20: mol_type = other RNA
aacatttctgaaaaatggtt

SEQ ID NO: 12146 - RNA, 20 nt, synthetic construct
  source 1..20: mol_type = other RNA
aacatttcttctagtcacat

SEQ ID NO: 12147 - RNA, 20 nt, synthetic construct
  source 1..20: mol_type = other RNA
aacatttgaactcactggcc

SEQ ID NO: 12148 - RNA, 20 nt, synthetic construct
  source 1..20: mol_type = other RNA
aacatttgttgcatccccat

SEQ ID NO: 12149 - RNA, 20 nt, synthetic construct
  source 1..20: mol_type = other RNA
aacattttagctggggcagc

SEQ ID NO: 12150 - RNA, 20 nt, synthetic construct
  source 1..20: mol_type = other RNA
aacattttattaggtgcaca

SEQ ID NO: 12151 - RNA, 20 nt, synthetic construct
  source 1..20: mol_type = other RNA
aacattttccctccttttta

SEQ ID NO: 12152 - RNA, 20 nt, synthetic construct
  source 1..20: mol_type = other RNA
aacattttctctacagttaa

SEQ ID NO: 12153 - RNA, 20 nt, synthetic construct
  source 1..20: mol_type = other RNA
aacattttgagttattgcat

SEQ ID NO: 12154 - RNA, 20 nt, synthetic construct
  source 1..20: mol_type = other RNA
aacatttttcttagttccat

SEQ ID NO: 12155 - RNA, 20 nt, synthetic construct
  source 1..20: mol_type = other RNA
aacattttttgcagagacgg

SEQ ID NO: 12156 - RNA, 20 nt, synthetic construct
  source 1..20: mol_type = other RNA
aaccaaaaaatgtggcatat

SEQ ID NO: 12157 - RNA, 20 nt, synthetic construct
  source 1..20: mol_type = other RNA
aaccaaaaaccacatttcat

SEQ ID NO: 12158 - RNA, 20 nt, synthetic construct
  source 1..20: mol_type = other RNA
aaccaaacactggaaatcac

SEQ ID NO: 12159 - RNA, 20 nt, synthetic construct
  source 1..20: mol_type = other RNA
aaccaaacttggtttatttt

SEQ ID NO: 12160 - RNA, 20 nt, synthetic construct
  source 1..20: mol_type = other RNA
aaccaaagaaaggggaagga

SEQ ID NO: 12161 - RNA, 20 nt, synthetic construct
  source 1..20: mol_type = other RNA
aaccaaatgcagaaaataaa

SEQ ID NO: 12162 - RNA, 20 nt, synthetic construct
  source 1..20: mol_type = other RNA
aaccaaatgtggatagtgct

SEQ ID NO: 12163 - RNA, 20 nt, synthetic construct
  source 1..20: mol_type = other RNA
aaccaacaacaaaaaatctt

SEQ ID NO: 12164 - RNA, 20 nt, synthetic construct
  source 1..20: mol_type = other RNA
aaccaacattgagtttcaat

SEQ ID NO: 12165 - RNA, 20 nt, synthetic construct
  source 1..20: mol_type = other RNA
aaccaagaacaaccttatct

SEQ ID NO: 12166 - RNA, 20 nt, synthetic construct
  source 1..20: mol_type = other RNA
aaccaagagcatagacttta

SEQ ID NO: 12167 - RNA, 20 nt, synthetic construct
  source 1..20: mol_type = other RNA
aaccaagcaagtaaaagaag

SEQ ID NO: 12168 - RNA, 20 nt, synthetic construct
  source 1..20: mol_type = other RNA
aaccaagcccaactttttct

SEQ ID NO: 12169 - RNA, 20 nt, synthetic construct
  source 1..20: mol_type = other RNA
aaccaagtttggttcatttc

SEQ ID NO: 12170 - RNA, 20 nt, synthetic construct
  source 1..20: mol_type = other RNA
aaccaataagaagtgaaaaa

SEQ ID NO: 12171 - RNA, 20 nt, synthetic construct
  source 1..20: mol_type = other RNA
aaccaatcgcagggccattc

SEQ ID NO: 12172 - RNA, 20 nt, synthetic construct
  source 1..20: mol_type = other RNA
aaccaatgtcagagatctga

SEQ ID NO: 12173 - RNA, 20 nt, synthetic construct
  source 1..20: mol_type = other RNA
aaccaatgttctcttttcct

SEQ ID NO: 12174 - RNA, 20 nt, synthetic construct
  source 1..20: mol_type = other RNA
aaccaattaccataaagtct

SEQ ID NO: 12175 - RNA, 20 nt, synthetic construct
  source 1..20: mol_type = other RNA
aaccaattatgctgagtgaa

SEQ ID NO: 12176 - RNA, 20 nt, synthetic construct
  source 1..20: mol_type = other RNA
aaccacaaacatgaataacc

SEQ ID NO: 12177 - RNA, 20 nt, synthetic construct
  source 1..20: mol_type = other RNA
aaccacacagagaacagcat

SEQ ID NO: 12178 - RNA, 20 nt, synthetic construct
  source 1..20: mol_type = other RNA
aaccacactgacaggacaga

SEQ ID NO: 12179 - RNA, 20 nt, synthetic construct
  source 1..20: mol_type = other RNA
aaccacagagcctaaaatag

SEQ ID NO: 12180 - RNA, 20 nt, synthetic construct
  source 1..20: mol_type = other RNA
aaccacatgtggcttgtggc

SEQ ID NO: 12181 - RNA, 20 nt, synthetic construct
  source 1..20: mol_type = other RNA
aaccacatttcatagcagaa

SEQ ID NO: 12182 - RNA, 20 nt, synthetic construct
  source 1..20: mol_type = other RNA
aaccacctaactactaataa

SEQ ID NO: 12183 - RNA, 20 nt, synthetic construct
  source 1..20: mol_type = other RNA
aaccacctgggggagactgt

SEQ ID NO: 12184 - RNA, 20 nt, synthetic construct
  source 1..20: mol_type = other RNA
aaccacgagtaatggatgtt

SEQ ID NO: 12185 - RNA, 20 nt, synthetic construct
  source 1..20: mol_type = other RNA
aaccacgcagaacagtgttt

SEQ ID NO: 12186 - RNA, 20 nt, synthetic construct
  source 1..20: mol_type = other RNA
aaccacgcagtttgttctgc

SEQ ID NO: 12187 - RNA, 20 nt, synthetic construct
  source 1..20: mol_type = other RNA
aaccacgcatctggtctatc

SEQ ID NO: 12188 - RNA, 20 nt, synthetic construct
  source 1..20: mol_type = other RNA
aaccactaaggtcaacacat

SEQ ID NO: 12189 - RNA, 20 nt, synthetic construct
  source 1..20: mol_type = other RNA
aaccactgaaacttttcttt

SEQ ID NO: 12190 - RNA, 20 nt, synthetic construct
  source 1..20: mol_type = other RNA
aaccactgaatcagatttta

SEQ ID NO: 12191 - RNA, 20 nt, synthetic construct
  source 1..20: mol_type = other RNA
aaccactgagcacaatgcct

SEQ ID NO: 12192 - RNA, 20 nt, synthetic construct
  source 1..20: mol_type = other RNA
aaccactgatggaattctga

SEQ ID NO: 12193 - RNA, 20 nt, synthetic construct
  source 1..20: mol_type = other RNA
aaccactggatacggaaata

SEQ ID NO: 12194 - RNA, 20 nt, synthetic construct
  source 1..20: mol_type = other RNA
aaccactggggagtgtgccc

SEQ ID NO: 12195 - RNA, 20 nt, synthetic construct
  source 1..20: mol_type = other RNA
aaccactgtaggccccgatg

SEQ ID NO: 12196 - RNA, 20 nt, synthetic construct
  source 1..20: mol_type = other RNA
aaccactgttatctgggaac

SEQ ID NO: 12197 - RNA, 20 nt, synthetic construct
  source 1..20: mol_type = other RNA
aaccagaaaagtgaaacaat

SEQ ID NO: 12198 - RNA, 20 nt, synthetic construct
  source 1..20: mol_type = other RNA
aaccagacatttctcatact

SEQ ID NO: 12199 - RNA, 20 nt, synthetic construct
  source 1..20: mol_type = other RNA
aaccagagcggaatttttat

SEQ ID NO: 12200 - RNA, 20 nt, synthetic construct
  source 1..20: mol_type = other RNA
aaccaggaggtttgcactgg

SEQ ID NO: 12201 - RNA, 20 nt, synthetic construct
  source 1..20: mol_type = other RNA
aaccaggcccggggcagaga

SEQ ID NO: 12202 - RNA, 20 nt, synthetic construct
  source 1..20: mol_type = other RNA
aaccagtgctctcccccgaa

SEQ ID NO: 12203 - RNA, 20 nt, synthetic construct
  source 1..20: mol_type = other RNA
aaccagtgggtcagctagtg

SEQ ID NO: 12204 - RNA, 20 nt, synthetic construct
  source 1..20: mol_type = other RNA
aaccataatgagtaacatgt

SEQ ID NO: 12205 - RNA, 20 nt, synthetic construct
  source 1..20: mol_type = other RNA
aaccatacagtgccttcagc

SEQ ID NO: 12206 - RNA, 20 nt, synthetic construct
  source 1..20: mol_type = other RNA
aaccatacttttcaactgaa

SEQ ID NO: 12207 - RNA, 20 nt, synthetic construct
  source 1..20: mol_type = other RNA
aaccatatacaaaactgaac

SEQ ID NO: 12208 - RNA, 20 nt, synthetic construct
  source 1..20: mol_type = other RNA
aaccatatggttaatagtga

SEQ ID NO: 12209 - RNA, 20 nt, synthetic construct
  source 1..20: mol_type = other RNA
aaccatatggtttacaatgg

SEQ ID NO: 12210 - RNA, 20 nt, synthetic construct
  source 1..20: mol_type = other RNA
aaccatattagagtgaaaag

SEQ ID NO: 12211 - RNA, 20 nt, synthetic construct
  source 1..20: mol_type = other RNA
aaccatcaagtgtgatccca

SEQ ID NO: 12212 - RNA, 20 nt, synthetic construct
  source 1..20: mol_type = other RNA
aaccatccccgctgtccatt

SEQ ID NO: 12213 - RNA, 20 nt, synthetic construct
  source 1..20: mol_type = other RNA
aaccatcctttccttgtcct

SEQ ID NO: 12214 - RNA, 20 nt, synthetic construct
  source 1..20: mol_type = other RNA
aaccatcgttcacactcgca

SEQ ID NO: 12215 - RNA, 20 nt, synthetic construct
  source 1..20: mol_type = other RNA
aaccatcttcttagtgttcc

SEQ ID NO: 12216 - RNA, 20 nt, synthetic construct
  source 1..20: mol_type = other RNA
aaccatgtaacaggtttaat

SEQ ID NO: 12217 - RNA, 20 nt, synthetic construct
  source 1..20: mol_type = other RNA
aaccatgtcatgtatatgct

SEQ ID NO: 12218 - RNA, 20 nt, synthetic construct
  source 1..20: mol_type = other RNA
aaccatgttcatgggaagat

SEQ ID NO: 12219 - RNA, 20 nt, synthetic construct
  source 1..20: mol_type = other RNA
aaccattaacagctcagaag

SEQ ID NO: 12220 - RNA, 20 nt, synthetic construct
  source 1..20: mol_type = other RNA
aaccattactcttctactca

SEQ ID NO: 12221 - RNA, 20 nt, synthetic construct
  source 1..20: mol_type = other RNA
aaccattgagccaaagaaga

SEQ ID NO: 12222 - RNA, 20 nt, synthetic construct
  source 1..20: mol_type = other RNA
aaccattgtaaaccatatgg

SEQ ID NO: 12223 - RNA, 20 nt, synthetic construct
  source 1..20: mol_type = other RNA
aaccatttaccccttaaatt

SEQ ID NO: 12224 - RNA, 20 nt, synthetic construct
  source 1..20: mol_type = other RNA
aaccattttcaatcttggaa

SEQ ID NO: 12225 - RNA, 20 nt, synthetic construct
  source 1..20: mol_type = other RNA
aaccatttttcagaaatgtt

SEQ ID NO: 12226 - RNA, 20 nt, synthetic construct
  source 1..20: mol_type = other RNA
aacccaaattaaaggatgtc

SEQ ID NO: 12227 - RNA, 20 nt, synthetic construct
  source 1..20: mol_type = other RNA
aacccaacaaacaattagca

SEQ ID NO: 12228 - RNA, 20 nt, synthetic construct
  source 1..20: mol_type = other RNA
aacccaactctttctttgat

SEQ ID NO: 12229 - RNA, 20 nt, synthetic construct
  source 1..20: mol_type = other RNA
aacccacagataatttcttc

SEQ ID NO: 12230 - RNA, 20 nt, synthetic construct
  source 1..20: mol_type = other RNA
aacccaccaggaggcggagc

SEQ ID NO: 12231 - RNA, 20 nt, synthetic construct
  source 1..20: mol_type = other RNA
aacccactgagcatttatat

SEQ ID NO: 12232 - RNA, 20 nt, synthetic construct
  source 1..20: mol_type = other RNA
aacccagacctgcacaaagg

SEQ ID NO: 12233 - RNA, 20 nt, synthetic construct
  source 1..20: mol_type = other RNA
aacccaggaacagattcacg

SEQ ID NO: 12234 - RNA, 20 nt, synthetic construct
  source 1..20: mol_type = other RNA
aacccaggaggcaaaggttg

SEQ ID NO: 12235 - RNA, 20 nt, synthetic construct
  source 1..20: mol_type = other RNA
aacccagtgtctgctacagg

SEQ ID NO: 12236 - RNA, 20 nt, synthetic construct
  source 1..20: mol_type = other RNA
aacccatatctttgcttata

SEQ ID NO: 12237 - RNA, 20 nt, synthetic construct
  source 1..20: mol_type = other RNA
aacccatgaaaattgaatta

SEQ ID NO: 12238 - RNA, 20 nt, synthetic construct
  source 1..20: mol_type = other RNA
aacccatgatctttggaaat

SEQ ID NO: 12239 - RNA, 20 nt, synthetic construct
  source 1..20: mol_type = other RNA
aacccattccaggttttatc

SEQ ID NO: 12240 - RNA, 20 nt, synthetic construct
  source 1..20: mol_type = other RNA
aacccatttcatgccatcct

SEQ ID NO: 12241 - RNA, 20 nt, synthetic construct
  source 1..20: mol_type = other RNA
aaccccagaaggttaactaa

SEQ ID NO: 12242 - RNA, 20 nt, synthetic construct
  source 1..20: mol_type = other RNA
aaccccagagattgtcgttg

SEQ ID NO: 12243 - RNA, 20 nt, synthetic construct
  source 1..20: mol_type = other RNA
aaccccagggatattttcgt

SEQ ID NO: 12244 - RNA, 20 nt, synthetic construct
  source 1..20: mol_type = other RNA
aacccccggccctgccgctt

SEQ ID NO: 12245 - RNA, 20 nt, synthetic construct
  source 1..20: mol_type = other RNA
aaccccgcatactgtgcagt

SEQ ID NO: 12246 - RNA, 20 nt, synthetic construct
  source 1..20: mol_type = other RNA
aacccgaggtgcacaaggga

SEQ ID NO: 12247 - RNA, 20 nt, synthetic construct
  source 1..20: mol_type = other RNA
aacccgctctgggtgcgttg

SEQ ID NO: 12248 - RNA, 20 nt, synthetic construct
  source 1..20: mol_type = other RNA
aacccgttttttccttcatt

SEQ ID NO: 12249 - RNA, 20 nt, synthetic construct
  source 1..20: mol_type = other RNA
aaccctacacccatccaccc

SEQ ID NO: 12250 - RNA, 20 nt, synthetic construct
  source 1..20: mol_type = other RNA
aaccctacctagggtgtaaa

SEQ ID NO: 12251 - RNA, 20 nt, synthetic construct
  source 1..20: mol_type = other RNA
aaccctcaaatgccatagag

SEQ ID NO: 12252 - RNA, 20 nt, synthetic construct
  source 1..20: mol_type = other RNA
aaccctcaatccccatctgg

SEQ ID NO: 12253 - RNA, 20 nt, synthetic construct
  source 1..20: mol_type = other RNA
aaccctcacgaaagcggtca

SEQ ID NO: 12254 - RNA, 20 nt, synthetic construct
  source 1..20: mol_type = other RNA
aaccctcctcctctacaagt

SEQ ID NO: 12255 - RNA, 20 nt, synthetic construct
  source 1..20: mol_type = other RNA
aaccctcggcctctactgac

SEQ ID NO: 12256 - RNA, 20 nt, synthetic construct
  source 1..20: mol_type = other RNA
aaccctgtacccattagaca

SEQ ID NO: 12257 - RNA, 20 nt, synthetic construct
  source 1..20: mol_type = other RNA
aaccctgttgggctattaag

SEQ ID NO: 12258 - RNA, 20 nt, synthetic construct
  source 1..20: mol_type = other RNA
aaccctgtttcccttaatgt

SEQ ID NO: 12259 - RNA, 20 nt, synthetic construct
  source 1..20: mol_type = other RNA
aaccctgttttgtagattaa

SEQ ID NO: 12260 - RNA, 20 nt, synthetic construct
  source 1..20: mol_type = other RNA
aacccttcatcatttgtatt

SEQ ID NO: 12261 - RNA, 20 nt, synthetic construct
  source 1..20: mol_type = other RNA
aacccttggctagactaaga

SEQ ID NO: 12262 - RNA, 20 nt, synthetic construct
  source 1..20: mol_type = other RNA
aacccttgggatgcagcaaa

SEQ ID NO: 12263 - RNA, 20 nt, synthetic construct
  source 1..20: mol_type = other RNA
aacccttgttggacagctgg

SEQ ID NO: 12264 - RNA, 20 nt, synthetic construct
  source 1..20: mol_type = other RNA
aaccctttgttatctgaacg

SEQ ID NO: 12265 - RNA, 20 nt, synthetic construct
  source 1..20: mol_type = other RNA
aaccgacagcagataagatc

SEQ ID NO: 12266 - RNA, 20 nt, synthetic construct
  source 1..20: mol_type = other RNA
aaccgactgaaaggaaatga

SEQ ID NO: 12267 - RNA, 20 nt, synthetic construct
  source 1..20: mol_type = other RNA
aaccggaaaatgcttaacaa

SEQ ID NO: 12268 - RNA, 20 nt, synthetic construct
  source 1..20: mol_type = other RNA
aaccggaacttgagtttgtt

SEQ ID NO: 12269 - RNA, 20 nt, synthetic construct
  source 1..20: mol_type = other RNA
aaccgtaacttcttttctta

SEQ ID NO: 12270 - RNA, 20 nt, synthetic construct
  source 1..20: mol_type = other RNA
aacctaaacctgtgatttcc

SEQ ID NO: 12271 - RNA, 20 nt, synthetic construct
  source 1..20: mol_type = other RNA
aacctaaagttgaggttgaa

SEQ ID NO: 12272 - RNA, 20 nt, synthetic construct
  source 1..20: mol_type = other RNA
aacctaaatgtccatcgaga

SEQ ID NO: 12273 - RNA, 20 nt, synthetic construct
  source 1..20: mol_type = other RNA
aacctaacatgtcttggtgt

SEQ ID NO: 12274 - RNA, 20 nt, synthetic construct
  source 1..20: mol_type = other RNA
aacctaagaaaggtctagtg

SEQ ID NO: 12275 - RNA, 20 nt, synthetic construct
  source 1..20: mol_type = other RNA
aacctactttaaatcagggc

SEQ ID NO: 12276 - RNA, 20 nt, synthetic construct
  source 1..20: mol_type = other RNA
aacctataagacccagtggc

SEQ ID NO: 12277 - RNA, 20 nt, synthetic construct
  source 1..20: mol_type = other RNA
aacctattatttagagtttg

SEQ ID NO: 12278 - RNA, 20 nt, synthetic construct
  source 1..20: mol_type = other RNA
aacctcaaagtggaaacaac

SEQ ID NO: 12279 - RNA, 20 nt, synthetic construct
  source 1..20: mol_type = other RNA
aacctcaactttaggttacg

SEQ ID NO: 12280 - RNA, 20 nt, synthetic construct
  source 1..20: mol_type = other RNA
aacctcaagtcttttcctag

SEQ ID NO: 12281 - RNA, 20 nt, synthetic construct
  source 1..20: mol_type = other RNA
aacctcataagaactcctgg

SEQ ID NO: 12282 - RNA, 20 nt, synthetic construct
  source 1..20: mol_type = other RNA
aacctcatttgcagagcaaa

SEQ ID NO: 12283 - RNA, 20 nt, synthetic construct
  source 1..20: mol_type = other RNA
aacctcccaacaggctgagt

SEQ ID NO: 12284 - RNA, 20 nt, synthetic construct
  source 1..20: mol_type = other RNA
aacctccgtttttcaggttc

SEQ ID NO: 12285 - RNA, 20 nt, synthetic construct
  source 1..20: mol_type = other RNA
aacctcctggttttgatcat

SEQ ID NO: 12286 - RNA, 20 nt, synthetic construct
  source 1..20: mol_type = other RNA
aacctctggaaaggacttga

SEQ ID NO: 12287 - RNA, 20 nt, synthetic construct
  source 1..20: mol_type = other RNA
aacctctggtattttaagat

SEQ ID NO: 12288 - RNA, 20 nt, synthetic construct
  source 1..20: mol_type = other RNA
aacctcttgaagtcagttac

SEQ ID NO: 12289 - RNA, 20 nt, synthetic construct
  source 1..20: mol_type = other RNA
aacctgaaaaacggaggttg

SEQ ID NO: 12290 - RNA, 20 nt, synthetic construct
  source 1..20: mol_type = other RNA
aacctgaaatggcttaagga

SEQ ID NO: 12291 - RNA, 20 nt, synthetic construct
  source 1..20: mol_type = other RNA
aacctgaggtctttaaaaga

SEQ ID NO: 12292 - RNA, 20 nt, synthetic construct
  source 1..20: mol_type = other RNA
aacctgattagaggctgcac

SEQ ID NO: 12293 - RNA, 20 nt, synthetic construct
  source 1..20: mol_type = other RNA
aacctgcaggtatttctaaa

SEQ ID NO: 12294 - RNA, 20 nt, synthetic construct
  source 1..20: mol_type = other RNA
aacctgcatggtgtaaaata

SEQ ID NO: 12295 - RNA, 20 nt, synthetic construct
  source 1..20: mol_type = other RNA
aacctgccatggtgttaaat

SEQ ID NO: 12296 - RNA, 20 nt, synthetic construct
  source 1..20: mol_type = other RNA
aacctgctacgaatgaactc

SEQ ID NO: 12297 - RNA, 20 nt, synthetic construct
  source 1..20: mol_type = other RNA
aacctgctttcctcatgtcc

SEQ ID NO: 12298 - RNA, 20 nt, synthetic construct
  source 1..20: mol_type = other RNA
aacctgctttctactagtat

SEQ ID NO: 12299 - RNA, 20 nt, synthetic construct
  source 1..20: mol_type = other RNA
aacctggaatcctctaccaa

SEQ ID NO: 12300 - RNA, 20 nt, synthetic construct
  source 1..20: mol_type = other RNA
aacctggaatgggttggagg

SEQ ID NO: 12301 - RNA, 20 nt, synthetic construct
  source 1..20: mol_type = other RNA
aacctggcaatactctcaga

SEQ ID NO: 12302 - RNA, 20 nt, synthetic construct
  source 1..20: mol_type = other RNA
aacctggtaataatgaaagc

SEQ ID NO: 12303 - RNA, 20 nt, synthetic construct
  source 1..20: mol_type = other RNA
aacctggtatgagtgtttcc

SEQ ID NO: 12304 - RNA, 20 nt, synthetic construct
  source 1..20: mol_type = other RNA
aacctgtgatttccagtgtt

SEQ ID NO: 12305 - RNA, 20 nt, synthetic construct
  source 1..20: mol_type = other RNA
aacctgttacatggttctgt

SEQ ID NO: 12306 - RNA, 20 nt, synthetic construct
  source 1..20: mol_type = other RNA
aacctgttcatttgagaatt

SEQ ID NO: 12307 - RNA, 20 nt, synthetic construct
  source 1..20: mol_type = other RNA
aaccttaaaagagtgaaatg

SEQ ID NO: 12308 - RNA, 20 nt, synthetic construct
  source 1..20: mol_type = other RNA
aaccttactgtaatattgta

SEQ ID NO: 12309 - RNA, 20 nt, synthetic construct
  source 1..20: mol_type = other RNA
aaccttagaaatttaaggac

SEQ ID NO: 12310 - RNA, 20 nt, synthetic construct
  source 1..20: mol_type = other RNA
aaccttcaccaaagatttac

SEQ ID NO: 12311 - RNA, 20 nt, synthetic construct
  source 1..20: mol_type = other RNA
aaccttcatactattttcta

SEQ ID NO: 12312 - RNA, 20 nt, synthetic construct
  source 1..20: mol_type = other RNA
aaccttcctcttcctcatcc

SEQ ID NO: 12313 - RNA, 20 nt, synthetic construct
  source 1..20: mol_type = other RNA
aaccttctggggttcaaacc

SEQ ID NO: 12314 - RNA, 20 nt, synthetic construct
  source 1..20: mol_type = other RNA
aaccttcttatttccttcca

SEQ ID NO: 12315 - RNA, 20 nt, synthetic construct
  source 1..20: mol_type = other RNA
aaccttgaagtacttcagcg

SEQ ID NO: 12316 - RNA, 20 nt, synthetic construct
  source 1..20: mol_type = other RNA
aaccttgggagaaaattttt

SEQ ID NO: 12317 - RNA, 20 nt, synthetic construct
  source 1..20: mol_type = other RNA
aaccttggtgtgcttctgat

SEQ ID NO: 12318 - RNA, 20 nt, synthetic construct
  source 1..20: mol_type = other RNA
aacctttaagttctccaagt

SEQ ID NO: 12319 - RNA, 20 nt, synthetic construct
  source 1..20: mol_type = other RNA
aacctttctcaaagcccacc

SEQ ID NO: 12320 - RNA, 20 nt, synthetic construct
  source 1..20: mol_type = other RNA
aacctttgcctcctgggttc

SEQ ID NO: 12321 - RNA, 20 nt, synthetic construct
  source 1..20: mol_type = other RNA
aacctttgtccactgtcagt

SEQ ID NO: 12322 - RNA, 20 nt, synthetic construct
  source 1..20: mol_type = other RNA
aacctttgttgaaaacgagg

SEQ ID NO: 12323 - RNA, 20 nt, synthetic construct
  source 1..20: mol_type = other RNA
aaccttttaggtgccccact

SEQ ID NO: 12324 - RNA, 20 nt, synthetic construct
  source 1..20: mol_type = other RNA
aaccttttgtagaccctgtt

SEQ ID NO: 12325 - RNA, 20 nt, synthetic construct
  source 1..20: mol_type = other RNA
aacctttttcttttcacata

SEQ ID NO: 12326 - RNA, 20 nt, synthetic construct
  source 1..20: mol_type = other RNA
aacctttttgggatctgtca

SEQ ID NO: 12327 - RNA, 20 nt, synthetic construct
  source 1..20: mol_type = other RNA
aaccttttttaaggaaaagt

SEQ ID NO: 12328 - RNA, 20 nt, synthetic construct
  source 1..20: mol_type = other RNA
aacgaaccaattaccataaa

SEQ ID NO: 12329 - RNA, 20 nt, synthetic construct
  source 1..20: mol_type = other RNA
aacgaatgaaaacacaacat

SEQ ID NO: 12330 - RNA, 20 nt, synthetic construct
  source 1..20: mol_type = other RNA
aacgaattctttaaaactgc

SEQ ID NO: 12331 - RNA, 20 nt, synthetic construct
  source 1..20: mol_type = other RNA
aacgacaatctctggggtta

SEQ ID NO: 12332 - RNA, 20 nt, synthetic construct
  source 1..20: mol_type = other RNA
aacgacaccagaactacaca

SEQ ID NO: 12333 - RNA, 20 nt, synthetic construct
  source 1..20: mol_type = other RNA
aacgacagcaggaaaagcta

SEQ ID NO: 12334 - RNA, 20 nt, synthetic construct
  source 1..20: mol_type = other RNA
aacgaccggacgtggtggct

SEQ ID NO: 12335 - RNA, 20 nt, synthetic construct
  source 1..20: mol_type = other RNA
aacgaccttgctcattcatc

SEQ ID NO: 12336 - RNA, 20 nt, synthetic construct
  source 1..20: mol_type = other RNA
aacgagaacaaaacaagaag

SEQ ID NO: 12337 - RNA, 20 nt, synthetic construct
  source 1..20: mol_type = other RNA
aacgaggaaaagagaacatt

SEQ ID NO: 12338 - RNA, 20 nt, synthetic construct
  source 1..20: mol_type = other RNA
aacgatagtctcctatattg

SEQ ID NO: 12339 - RNA, 20 nt, synthetic construct
  source 1..20: mol_type = other RNA
aacgatccttactaccacca

SEQ ID NO: 12340 - RNA, 20 nt, synthetic construct
  source 1..20: mol_type = other RNA
aacgatgcattccagattga

SEQ ID NO: 12341 - RNA, 20 nt, synthetic construct
  source 1..20: mol_type = other RNA
aacgatggtttctgacaccc

SEQ ID NO: 12342 - RNA, 20 nt, synthetic construct
  source 1..20: mol_type = other RNA
aacgatttcttaaaaatgac

SEQ ID NO: 12343 - RNA, 20 nt, synthetic construct
  source 1..20: mol_type = other RNA
aacgcacccagagcgggttt

SEQ ID NO: 12344 - RNA, 20 nt, synthetic construct
  source 1..20: mol_type = other RNA
aacgcattgtgatgtctcag

SEQ ID NO: 12345 - RNA, 20 nt, synthetic construct
  source 1..20: mol_type = other RNA
aacgcggaatgaagcaggcc

SEQ ID NO: 12346 - RNA, 20 nt, synthetic construct
  source 1..20: mol_type = other RNA
aacgcggcacttggtaagct

SEQ ID NO: 12347 - RNA, 20 nt, synthetic construct
  source 1..20: mol_type = other RNA
aacgctaaattaaaggctgg

SEQ ID NO: 12348 - RNA, 20 nt, synthetic construct
  source 1..20: mol_type = other RNA
aacgctgtggctaacaatca

SEQ ID NO: 12349 - RNA, 20 nt, synthetic construct
  source 1..20: mol_type = other RNA
aacgctttttatggaaacat

SEQ ID NO: 12350 - RNA, 20 nt, synthetic construct
  source 1..20: mol_type = other RNA
aacggaaactttatacctgt

SEQ ID NO: 12351 - RNA, 20 nt, synthetic construct
  source 1..20: mol_type = other RNA
aacggaaatgagtgagccac

SEQ ID NO: 12352 - RNA, 20 nt, synthetic construct
  source 1..20: mol_type = other RNA
aacggacatttttccaaaga

SEQ ID NO: 12353 - RNA, 20 nt, synthetic construct
  source 1..20: mol_type = other RNA
aacggcttaacacctttgta

SEQ ID NO: 12354 - RNA, 20 nt, synthetic construct
  source 1..20: mol_type = other RNA
aacgggttatacacacataa

SEQ ID NO: 12355 - RNA, 20 nt, synthetic construct
  source 1..20: mol_type = other RNA
aacgtatctgggaaaaaata

SEQ ID NO: 12356 - RNA, 20 nt, synthetic construct
  source 1..20: mol_type = other RNA
aacgtatgaataaactaaca

SEQ ID NO: 12357 - RNA, 20 nt, synthetic construct
  source 1..20: mol_type = other RNA
aacgtcagagcagcactgat

SEQ ID NO: 12358 - RNA, 20 nt, synthetic construct
  source 1..20: mol_type = other RNA
aacgtccatcaacagcagaa

SEQ ID NO: 12359 - RNA, 20 nt, synthetic construct
  source 1..20: mol_type = other RNA
aacgtctttaaatttcaaac

SEQ ID NO: 12360 - RNA, 20 nt, synthetic construct
  source 1..20: mol_type = other RNA
aacgtgagctggaagtaagg

SEQ ID NO: 12361 - RNA, 20 nt, synthetic construct
  source 1..20: mol_type = other RNA
aacgtgcaaactaccaagac

SEQ ID NO: 12362 - RNA, 20 nt, synthetic construct
  source 1..20: mol_type = other RNA
aacgtgcacacccagttatc

SEQ ID NO: 12363 - RNA, 20 nt, synthetic construct
  source 1..20: mol_type = other RNA
aacgtgcttgctctgcggca

SEQ ID NO: 12364 - RNA, 20 nt, synthetic construct
  source 1..20: mol_type = other RNA
aacgtgctttccttattgag

SEQ ID NO: 12365 - RNA, 20 nt, synthetic construct
  source 1..20: mol_type = other RNA
aacgtgtgtgtaagcacaca

SEQ ID NO: 12366 - RNA, 20 nt, synthetic construct
  source 1..20: mol_type = other RNA
aacgttaactatttctcttt

SEQ ID NO: 12367 - RNA, 20 nt, synthetic construct
  source 1..20: mol_type = other RNA
aacgtttagatgaatgattt

SEQ ID NO: 12368 - RNA, 20 nt, synthetic construct
  source 1..20: mol_type = other RNA
aacgtttatctacagaggat

SEQ ID NO: 12369 - RNA, 20 nt, synthetic construct
  source 1..20: mol_type = other RNA
aacgtttggtgactgaattc

SEQ ID NO: 12370 - RNA, 20 nt, synthetic construct
  source 1..20: mol_type = other RNA
aactaaactattgtatgaac

SEQ ID NO: 12371 - RNA, 20 nt, synthetic construct
  source 1..20: mol_type = other RNA
aactaaactttgagtagcac

SEQ ID NO: 12372 - RNA, 20 nt, synthetic construct
  source 1..20: mol_type = other RNA
aactaaatgtgagcatttag

SEQ ID NO: 12373 - RNA, 20 nt, synthetic construct
  source 1..20: mol_type = other RNA
aactaacaaagaacaggaag

SEQ ID NO: 12374 - RNA, 20 nt, synthetic construct
  source 1..20: mol_type = other RNA
aactaactagaaaaccgaca

SEQ ID NO: 12375 - RNA, 20 nt, synthetic construct
  source 1..20: mol_type = other RNA
aactaagaccccagtagaaa

SEQ ID NO: 12376 - RNA, 20 nt, synthetic construct
  source 1..20: mol_type = other RNA
aactaaggaaagctcaggac

SEQ ID NO: 12377 - RNA, 20 nt, synthetic construct
  source 1..20: mol_type = other RNA
aactaaggtcaagagagatt

SEQ ID NO: 12378 - RNA, 20 nt, synthetic construct
  source 1..20: mol_type = other RNA
aactaagtggtattctatca

SEQ ID NO: 12379 - RNA, 20 nt, synthetic construct
  source 1..20: mol_type = other RNA
aactaagtgtgaagattaag

SEQ ID NO: 12380 - RNA, 20 nt, synthetic construct
  source 1..20: mol_type = other RNA
aactaataattgcttttgct

SEQ ID NO: 12381 - RNA, 20 nt, synthetic construct
  source 1..20: mol_type = other RNA
aactaatagccagtgcagca

SEQ ID NO: 12382 - RNA, 20 nt, synthetic construct
  source 1..20: mol_type = other RNA
aactaatcaaacatacccca

SEQ ID NO: 12383 - RNA, 20 nt, synthetic construct
  source 1..20: mol_type = other RNA
aactaatgagaatttcagaa

SEQ ID NO: 12384 - RNA, 20 nt, synthetic construct
  source 1..20: mol_type = other RNA
aactaattactgtttcttag

SEQ ID NO: 12385 - RNA, 20 nt, synthetic construct
  source 1..20: mol_type = other RNA
aactaatttcatacaagttg

SEQ ID NO: 12386 - RNA, 20 nt, synthetic construct
  source 1..20: mol_type = other RNA
aactacaattactgtacaaa

SEQ ID NO: 12387 - RNA, 20 nt, synthetic construct
  source 1..20: mol_type = other RNA
aactacacagacatgaacaa

SEQ ID NO: 12388 - RNA, 20 nt, synthetic construct
  source 1..20: mol_type = other RNA
aactacacatcagtgctgct

SEQ ID NO: 12389 - RNA, 20 nt, synthetic construct
  source 1..20: mol_type = other RNA
aactacacattccagaccag

SEQ ID NO: 12390 - RNA, 20 nt, synthetic construct
  source 1..20: mol_type = other RNA
aactacagacatgccacacc

SEQ ID NO: 12391 - RNA, 20 nt, synthetic construct
  source 1..20: mol_type = other RNA
aactacaggcaacaaaagaa

SEQ ID NO: 12392 - RNA, 20 nt, synthetic construct
  source 1..20: mol_type = other RNA
aactacagtgtttagggacg

SEQ ID NO: 12393 - RNA, 20 nt, synthetic construct
  source 1..20: mol_type = other RNA
aactacatgtaaaaactgtt

SEQ ID NO: 12394 - RNA, 20 nt, synthetic construct
  source 1..20: mol_type = other RNA
aactaccactgaggtcaaga

SEQ ID NO: 12395 - RNA, 20 nt, synthetic construct
  source 1..20: mol_type = other RNA
aactacctagaaaaacacca

SEQ ID NO: 12396 - RNA, 20 nt, synthetic construct
  source 1..20: mol_type = other RNA
aactacgagtatcatataaa

SEQ ID NO: 12397 - RNA, 20 nt, synthetic construct
  source 1..20: mol_type = other RNA
aactactatttcgcaaagca

SEQ ID NO: 12398 - RNA, 20 nt, synthetic construct
  source 1..20: mol_type = other RNA
aactactgatagcgaaaggt

SEQ ID NO: 12399 - RNA, 20 nt, synthetic construct
  source 1..20: mol_type = other RNA
aactacttcgtgtgtggagt

SEQ ID NO: 12400 - RNA, 20 nt, synthetic construct
  source 1..20: mol_type = other RNA
aactagaaaaagaataagct

SEQ ID NO: 12401 - RNA, 20 nt, synthetic construct
  source 1..20: mol_type = other RNA
aactagaaaaccgacagcag

SEQ ID NO: 12402 - RNA, 20 nt, synthetic construct
  source 1..20: mol_type = other RNA
aactagaaaagataagtaga

SEQ ID NO: 12403 - RNA, 20 nt, synthetic construct
  source 1..20: mol_type = other RNA
aactagaaacttcttctgtt

SEQ ID NO: 12404 - RNA, 20 nt, synthetic construct
  source 1..20: mol_type = other RNA
aactagaactgtgttacatt

SEQ ID NO: 12405 - RNA, 20 nt, synthetic construct
  source 1..20: mol_type = other RNA
aactagaatactccaccagc

SEQ ID NO: 12406 - RNA, 20 nt, synthetic construct
  source 1..20: mol_type = other RNA
aactagaattgactttaccc

SEQ ID NO: 12407 - RNA, 20 nt, synthetic construct
  source 1..20: mol_type = other RNA
aactagagaaagcatcagag

SEQ ID NO: 12408 - RNA, 20 nt, synthetic construct
  source 1..20: mol_type = other RNA
aactagagatgggaaagtat

SEQ ID NO: 12409 - RNA, 20 nt, synthetic construct
  source 1..20: mol_type = other RNA
aactagatgcctcgaaggcc

SEQ ID NO: 12410 - RNA, 20 nt, synthetic construct
  source 1..20: mol_type = other RNA
aactagattaccttgaagtt

SEQ ID NO: 12411 - RNA, 20 nt, synthetic construct
  source 1..20: mol_type = other RNA
aactaggctgtcccaaatgc

SEQ ID NO: 12412 - RNA, 20 nt, synthetic construct
  source 1..20: mol_type = other RNA
aactaggtatttgaaaaatg

SEQ ID NO: 12413 - RNA, 20 nt, synthetic construct
  source 1..20: mol_type = other RNA
aactagtaagtaaaatcgga

SEQ ID NO: 12414 - RNA, 20 nt, synthetic construct
  source 1..20: mol_type = other RNA
aactagtatcaacctgcagg

SEQ ID NO: 12415 - RNA, 20 nt, synthetic construct
  source 1..20: mol_type = other RNA
aactatacttcaatgctaca

SEQ ID NO: 12416 - RNA, 20 nt, synthetic construct
  source 1..20: mol_type = other RNA
aactatagacccaaagcaaa

SEQ ID NO: 12417 - RNA, 20 nt, synthetic construct
  source 1..20: mol_type = other RNA
aactataggagttcattcgt

SEQ ID NO: 12418 - RNA, 20 nt, synthetic construct
  source 1..20: mol_type = other RNA
aactatcaaaacacttctgt

SEQ ID NO: 12419 - RNA, 20 nt, synthetic construct
  source 1..20: mol_type = other RNA
aactatccaacatgccagct

SEQ ID NO: 12420 - RNA, 20 nt, synthetic construct
  source 1..20: mol_type = other RNA
aactatcctatgtggggaat

SEQ ID NO: 12421 - RNA, 20 nt, synthetic construct
  source 1..20: mol_type = other RNA
aactatgcttaatctgattt

SEQ ID NO: 12422 - RNA, 20 nt, synthetic construct
  source 1..20: mol_type = other RNA
aactatggacatgaggaaag

SEQ ID NO: 12423 - RNA, 20 nt, synthetic construct
  source 1..20: mol_type = other RNA
aactattccataagatctgt

SEQ ID NO: 12424 - RNA, 20 nt, synthetic construct
  source 1..20: mol_type = other RNA
aactatttctctttaaagct

SEQ ID NO: 12425 - RNA, 20 nt, synthetic construct
  source 1..20: mol_type = other RNA
aactcaaaaggacatatttt

SEQ ID NO: 12426 - RNA, 20 nt, synthetic construct
  source 1..20: mol_type = other RNA
aactcaaaagtgaatcacta

SEQ ID NO: 12427 - RNA, 20 nt, synthetic construct
  source 1..20: mol_type = other RNA
aactcaaaatgttcatacaa

SEQ ID NO: 12428 - RNA, 20 nt, synthetic construct
  source 1..20: mol_type = other RNA
aactcaaacccaaattaaag

SEQ ID NO: 12429 - RNA, 20 nt, synthetic construct
  source 1..20: mol_type = other RNA
aactcaaacgtccatcaaca

SEQ ID NO: 12430 - RNA, 20 nt, synthetic construct
  source 1..20: mol_type = other RNA
aactcaacattcattcatga

SEQ ID NO: 12431 - RNA, 20 nt, synthetic construct
  source 1..20: mol_type = other RNA
aactcaactgcctctacatc

SEQ ID NO: 12432 - RNA, 20 nt, synthetic construct
  source 1..20: mol_type = other RNA
aactcaagagttacttctgg

SEQ ID NO: 12433 - RNA, 20 nt, synthetic construct
  source 1..20: mol_type = other RNA
aactcaagttccggttctca

SEQ ID NO: 12434 - RNA, 20 nt, synthetic construct
  source 1..20: mol_type = other RNA
aactcaatgttggttagtgt

SEQ ID NO: 12435 - RNA, 20 nt, synthetic construct
  source 1..20: mol_type = other RNA
aactcacaaaaagtgtgacc

SEQ ID NO: 12436 - RNA, 20 nt, synthetic construct
  source 1..20: mol_type = other RNA
aactcactggccagcattac

SEQ ID NO: 12437 - RNA, 20 nt, synthetic construct
  source 1..20: mol_type = other RNA
aactcacttattagcaaaga

SEQ ID NO: 12438 - RNA, 20 nt, synthetic construct
  source 1..20: mol_type = other RNA
aactcagatctgagagatag

SEQ ID NO: 12439 - RNA, 20 nt, synthetic construct
  source 1..20: mol_type = other RNA
aactcatattagtctgtagc

SEQ ID NO: 12440 - RNA, 20 nt, synthetic construct
  source 1..20: mol_type = other RNA
aactcattatcccagacaga

SEQ ID NO: 12441 - RNA, 20 nt, synthetic construct
  source 1..20: mol_type = other RNA
aactcatttaaacgtcagag

SEQ ID NO: 12442 - RNA, 20 nt, synthetic construct
  source 1..20: mol_type = other RNA
aactcatttctgcttgaatg

SEQ ID NO: 12443 - RNA, 20 nt, synthetic construct
  source 1..20: mol_type = other RNA
aactccaaacctttaagttc

SEQ ID NO: 12444 - RNA, 20 nt, synthetic construct
  source 1..20: mol_type = other RNA
aactccaacaattcaacaat

SEQ ID NO: 12445 - RNA, 20 nt, synthetic construct
  source 1..20: mol_type = other RNA
aactccaagtctcatgcaat

SEQ ID NO: 12446 - RNA, 20 nt, synthetic construct
  source 1..20: mol_type = other RNA
aactccaagtgtaaaaagac

SEQ ID NO: 12447 - RNA, 20 nt, synthetic construct
  source 1..20: mol_type = other RNA
aactccacattgtcttaatt

SEQ ID NO: 12448 - RNA, 20 nt, synthetic construct
  source 1..20: mol_type = other RNA
aactccacctcagaaacaaa

SEQ ID NO: 12449 - RNA, 20 nt, synthetic construct
  source 1..20: mol_type = other RNA
aactccagcttttattagag

SEQ ID NO: 12450 - RNA, 20 nt, synthetic construct
  source 1..20: mol_type = other RNA
aactccaggggacatgctct

SEQ ID NO: 12451 - RNA, 20 nt, synthetic construct
  source 1..20: mol_type = other RNA
aactccatcttcacgtggcg

SEQ ID NO: 12452 - RNA, 20 nt, synthetic construct
  source 1..20: mol_type = other RNA
aactcccagaactcgaagcc

SEQ ID NO: 12453 - RNA, 20 nt, synthetic construct
  source 1..20: mol_type = other RNA
aactccccatgcaggagaaa

SEQ ID NO: 12454 - RNA, 20 nt, synthetic construct
  source 1..20: mol_type = other RNA
aactcctatagttaagtctg

SEQ ID NO: 12455 - RNA, 20 nt, synthetic construct
  source 1..20: mol_type = other RNA
aactcctgaacaaaattttt

SEQ ID NO: 12456 - RNA, 20 nt, synthetic construct
  source 1..20: mol_type = other RNA
aactcctgggctcatctaag

SEQ ID NO: 12457 - RNA, 20 nt, synthetic construct
  source 1..20: mol_type = other RNA
aactcctggtctcccagcat

SEQ ID NO: 12458 - RNA, 20 nt, synthetic construct
  source 1..20: mol_type = other RNA
aactcctgtatgccgctggt

SEQ ID NO: 12459 - RNA, 20 nt, synthetic construct
  source 1..20: mol_type = other RNA
aactcctgttctttggagct

SEQ ID NO: 12460 - RNA, 20 nt, synthetic construct
  source 1..20: mol_type = other RNA
aactcctttcttaccctcac

SEQ ID NO: 12461 - RNA, 20 nt, synthetic construct
  source 1..20: mol_type = other RNA
aactcgaagccttcccctgc

SEQ ID NO: 12462 - RNA, 20 nt, synthetic construct
  source 1..20: mol_type = other RNA
aactcgtaatgcgatgatca

SEQ ID NO: 12463 - RNA, 20 nt, synthetic construct
  source 1..20: mol_type = other RNA
aactcgtggcctcaagcagt

SEQ ID NO: 12464 - RNA, 20 nt, synthetic construct
  source 1..20: mol_type = other RNA
aactctaataacagcctaag

SEQ ID NO: 12465 - RNA, 20 nt, synthetic construct
  source 1..20: mol_type = other RNA
aactctattttcctaaaact

SEQ ID NO: 12466 - RNA, 20 nt, synthetic construct
  source 1..20: mol_type = other RNA
aactctcgacctcgtgatct

SEQ ID NO: 12467 - RNA, 20 nt, synthetic construct
  source 1..20: mol_type = other RNA
aactctgaccattgtgtgga

SEQ ID NO: 12468 - RNA, 20 nt, synthetic construct
  source 1..20: mol_type = other RNA
aactctggcaggtcacctag

SEQ ID NO: 12469 - RNA, 20 nt, synthetic construct
  source 1..20: mol_type = other RNA
aactctggctcagaaacaac

SEQ ID NO: 12470 - RNA, 20 nt, synthetic construct
  source 1..20: mol_type = other RNA
aactctgtcatggtgtgtct

SEQ ID NO: 12471 - RNA, 20 nt, synthetic construct
  source 1..20: mol_type = other RNA
aactctgtggagtcctgtca

SEQ ID NO: 12472 - RNA, 20 nt, synthetic construct
  source 1..20: mol_type = other RNA
aactctgtttccttaccagt

SEQ ID NO: 12473 - RNA, 20 nt, synthetic construct
  source 1..20: mol_type = other RNA
aactcttagcttagaagaag

SEQ ID NO: 12474 - RNA, 20 nt, synthetic construct
  source 1..20: mol_type = other RNA
aactcttccttatccgataa

SEQ ID NO: 12475 - RNA, 20 nt, synthetic construct
  source 1..20: mol_type = other RNA
aactcttctccaaggaaagt

SEQ ID NO: 12476 - RNA, 20 nt, synthetic construct
  source 1..20: mol_type = other RNA
aactcttgagttaggaattt

SEQ ID NO: 12477 - RNA, 20 nt, synthetic construct
  source 1..20: mol_type = other RNA
aactcttgcattagagcccc

SEQ ID NO: 12478 - RNA, 20 nt, synthetic construct
  source 1..20: mol_type = other RNA
aactcttgcggtcttttagc

SEQ ID NO: 12479 - RNA, 20 nt, synthetic construct
  source 1..20: mol_type = other RNA
aactcttggccattttcttt

SEQ ID NO: 12480 - RNA, 20 nt, synthetic construct
  source 1..20: mol_type = other RNA
aactcttgtagtatttttgc

SEQ ID NO: 12481 - RNA, 20 nt, synthetic construct
  source 1..20: mol_type = other RNA
aactgaaagcagggactccc

SEQ ID NO: 12482 - RNA, 20 nt, synthetic construct
  source 1..20: mol_type = other RNA
aactgaaatcgggagtaaca

SEQ ID NO: 12483 - RNA, 20 nt, synthetic construct
  source 1..20: mol_type = other RNA
aactgaacaacgctgtggct

SEQ ID NO: 12484 - RNA, 20 nt, synthetic construct
  source 1..20: mol_type = other RNA
aactgaacatgtatgtttct

SEQ ID NO: 12485 - RNA, 20 nt, synthetic construct
  source 1..20: mol_type = other RNA
aactgaacatttatacagtt

SEQ ID NO: 12486 - RNA, 20 nt, synthetic construct
  source 1..20: mol_type = other RNA
aactgaacgaagtgaaaaaa

SEQ ID NO: 12487 - RNA, 20 nt, synthetic construct
  source 1..20: mol_type = other RNA
aactgaactacagtgtttag

SEQ ID NO: 12488 - RNA, 20 nt, synthetic construct
  source 1..20: mol_type = other RNA
aactgaactcaaaatggatc

SEQ ID NO: 12489 - RNA, 20 nt, synthetic construct
  source 1..20: mol_type = other RNA
aactgaagcggggctgccac

SEQ ID NO: 12490 - RNA, 20 nt, synthetic construct
  source 1..20: mol_type = other RNA
aactgaagtaataaagcaag

SEQ ID NO: 12491 - RNA, 20 nt, synthetic construct
  source 1..20: mol_type = other RNA
aactgaagtttatcagtctc

SEQ ID NO: 12492 - RNA, 20 nt, synthetic construct
  source 1..20: mol_type = other RNA
aactgaagtttatcgtattt

SEQ ID NO: 12493 - RNA, 20 nt, synthetic construct
  source 1..20: mol_type = other RNA
aactgaatcagacaacacat

SEQ ID NO: 12494 - RNA, 20 nt, synthetic construct
  source 1..20: mol_type = other RNA
aactgacaggactccacaga

SEQ ID NO: 12495 - RNA, 20 nt, synthetic construct
  source 1..20: mol_type = other RNA
aactgactctaaagtctatg

SEQ ID NO: 12496 - RNA, 20 nt, synthetic construct
  source 1..20: mol_type = other RNA
aactgactgaaggattcctc

SEQ ID NO: 12497 - RNA, 20 nt, synthetic construct
  source 1..20: mol_type = other RNA
aactgacttacagaccttat

SEQ ID NO: 12498 - RNA, 20 nt, synthetic construct
  source 1..20: mol_type = other RNA
aactgacttcaagaggttaa

SEQ ID NO: 12499 - RNA, 20 nt, synthetic construct
  source 1..20: mol_type = other RNA
aactgagaagagctgtaaca

SEQ ID NO: 12500 - RNA, 20 nt, synthetic construct
  source 1..20: mol_type = other RNA
aactgagaccggatgaggtg

SEQ ID NO: 12501 - RNA, 20 nt, synthetic construct
  source 1..20: mol_type = other RNA
aactgagcatcccagaggta

SEQ ID NO: 12502 - RNA, 20 nt, synthetic construct
  source 1..20: mol_type = other RNA
aactgaggcagagtagagaa

SEQ ID NO: 12503 - RNA, 20 nt, synthetic construct
  source 1..20: mol_type = other RNA
aactgaggtgtttttcagcc

SEQ ID NO: 12504 - RNA, 20 nt, synthetic construct
  source 1..20: mol_type = other RNA
aactgatatgagggatgagg

SEQ ID NO: 12505 - RNA, 20 nt, synthetic construct
  source 1..20: mol_type = other RNA
aactgatgtgaggatctgtt

SEQ ID NO: 12506 - RNA, 20 nt, synthetic construct
  source 1..20: mol_type = other RNA
aactgcaaaactttcttcaa

SEQ ID NO: 12507 - RNA, 20 nt, synthetic construct
  source 1..20: mol_type = other RNA
aactgcagaatgacagaaaa

SEQ ID NO: 12508 - RNA, 20 nt, synthetic construct
  source 1..20: mol_type = other RNA
aactgcagaggtcaggaagg

SEQ ID NO: 12509 - RNA, 20 nt, synthetic construct
  source 1..20: mol_type = other RNA
aactgcagcaattatttgaa

SEQ ID NO: 12510 - RNA, 20 nt, synthetic construct
  source 1..20: mol_type = other RNA
aactgcagtctgtcctcgta

SEQ ID NO: 12511 - RNA, 20 nt, synthetic construct
  source 1..20: mol_type = other RNA
aactgcatcttcttttactt

SEQ ID NO: 12512 - RNA, 20 nt, synthetic construct
  source 1..20: mol_type = other RNA
aactgccaaaccctacaccc

SEQ ID NO: 12513 - RNA, 20 nt, synthetic construct
  source 1..20: mol_type = other RNA
aactgcctaagtaatgctgg

SEQ ID NO: 12514 - RNA, 20 nt, synthetic construct
  source 1..20: mol_type = other RNA
aactgcctctacatcacaga

SEQ ID NO: 12515 - RNA, 20 nt, synthetic construct
  source 1..20: mol_type = other RNA
aactgcctggacccgggagg

SEQ ID NO: 12516 - RNA, 20 nt, synthetic construct
  source 1..20: mol_type = other RNA
aactgcgtggtttattcata

SEQ ID NO: 12517 - RNA, 20 nt, synthetic construct
  source 1..20: mol_type = other RNA
aactgctaatggtccttgct

SEQ ID NO: 12518 - RNA, 20 nt, synthetic construct
  source 1..20: mol_type = other RNA
aactgctcataatagtctca

SEQ ID NO: 12519 - RNA, 20 nt, synthetic construct
  source 1..20: mol_type = other RNA
aactgctcctctgactttat

SEQ ID NO: 12520 - RNA, 20 nt, synthetic construct
  source 1..20: mol_type = other RNA
aactgctgacagattaaata

SEQ ID NO: 12521 - RNA, 20 nt, synthetic construct
  source 1..20: mol_type = other RNA
aactgctgagtcttctactg

SEQ ID NO: 12522 - RNA, 20 nt, synthetic construct
  source 1..20: mol_type = other RNA
aactgctggtctggaatgtg

SEQ ID NO: 12523 - RNA, 20 nt, synthetic construct
  source 1..20: mol_type = other RNA
aactgcttccctagcccagc

SEQ ID NO: 12524 - RNA, 20 nt, synthetic construct
  source 1..20: mol_type = other RNA
aactggaaggaaataagaag

SEQ ID NO: 12525 - RNA, 20 nt, synthetic construct
  source 1..20: mol_type = other RNA
aactggaatcaatccagaca

SEQ ID NO: 12526 - RNA, 20 nt, synthetic construct
  source 1..20: mol_type = other RNA
aactggaattcatcaaagtt

SEQ ID NO: 12527 - RNA, 20 nt, synthetic construct
  source 1..20: mol_type = other RNA
aactggagtgcagtggtgca

SEQ ID NO: 12528 - RNA, 20 nt, synthetic construct
  source 1..20: mol_type = other RNA
aactggatgaatacaaaggt

SEQ ID NO: 12529 - RNA, 20 nt, synthetic construct
  source 1..20: mol_type = other RNA
aactggcaatcaaatggcct

SEQ ID NO: 12530 - RNA, 20 nt, synthetic construct
  source 1..20: mol_type = other RNA
aactggcccctccatggaaa

SEQ ID NO: 12531 - RNA, 20 nt, synthetic construct
  source 1..20: mol_type = other RNA
aactgggacttctagcctcc

SEQ ID NO: 12532 - RNA, 20 nt, synthetic construct
  source 1..20: mol_type = other RNA
aactgggagaatggcaaggc

SEQ ID NO: 12533 - RNA, 20 nt, synthetic construct
  source 1..20: mol_type = other RNA
aactggggcttgaacccgag

SEQ ID NO: 12534 - RNA, 20 nt, synthetic construct
  source 1..20: mol_type = other RNA
aactgggggctggacataag

SEQ ID NO: 12535 - RNA, 20 nt, synthetic construct
  source 1..20: mol_type = other RNA
aactgggtgtagggggaaaa

SEQ ID NO: 12536 - RNA, 20 nt, synthetic construct
  source 1..20: mol_type = other RNA
aactgggtgtgcacgtttgc

SEQ ID NO: 12537 - RNA, 20 nt, synthetic construct
  source 1..20: mol_type = other RNA
aactggtccagatgaagcag

SEQ ID NO: 12538 - RNA, 20 nt, synthetic construct
  source 1..20: mol_type = other RNA
aactggtctcctttctatac

SEQ ID NO: 12539 - RNA, 20 nt, synthetic construct
  source 1..20: mol_type = other RNA
aactggtgaactgggtgtag

SEQ ID NO: 12540 - RNA, 20 nt, synthetic construct
  source 1..20: mol_type = other RNA
aactggtgcttttttggtgt

SEQ ID NO: 12541 - RNA, 20 nt, synthetic construct
  source 1..20: mol_type = other RNA
aactggtttctgcatactta

SEQ ID NO: 12542 - RNA, 20 nt, synthetic construct
  source 1..20: mol_type = other RNA
aactggttttcctgatggac

SEQ ID NO: 12543 - RNA, 20 nt, synthetic construct
  source 1..20: mol_type = other RNA
aactgtaaagtaatcaagtg

SEQ ID NO: 12544 - RNA, 20 nt, synthetic construct
  source 1..20: mol_type = other RNA
aactgtagagaaaatgttat

SEQ ID NO: 12545 - RNA, 20 nt, synthetic construct
  source 1..20: mol_type = other RNA
aactgtataaatgttcagtt

SEQ ID NO: 12546 - RNA, 20 nt, synthetic construct
  source 1..20: mol_type = other RNA
aactgtattgcaaactaagt

SEQ ID NO: 12547 - RNA, 20 nt, synthetic construct
  source 1..20: mol_type = other RNA
aactgtcacaattcacagaa

SEQ ID NO: 12548 - RNA, 20 nt, synthetic construct
  source 1..20: mol_type = other RNA
aactgtcactgacacaggct

SEQ ID NO: 12549 - RNA, 20 nt, synthetic construct
  source 1..20: mol_type = other RNA
aactgtcatcagcgtcctca

SEQ ID NO: 12550 - RNA, 20 nt, synthetic construct
  source 1..20: mol_type = other RNA
aactgtcctctcttgttgag

SEQ ID NO: 12551 - RNA, 20 nt, synthetic construct
  source 1..20: mol_type = other RNA
aactgtcctgaattctaaca

SEQ ID NO: 12552 - RNA, 20 nt, synthetic construct
  source 1..20: mol_type = other RNA
aactgtggtcactgtttgga

SEQ ID NO: 12553 - RNA, 20 nt, synthetic construct
  source 1..20: mol_type = other RNA
aactgtgtgcttggagtcac

SEQ ID NO: 12554 - RNA, 20 nt, synthetic construct
  source 1..20: mol_type = other RNA
aactgtgttacattgccttc

SEQ ID NO: 12555 - RNA, 20 nt, synthetic construct
  source 1..20: mol_type = other RNA
aactgttacttgactatttt

SEQ ID NO: 12556 - RNA, 20 nt, synthetic construct
  source 1..20: mol_type = other RNA
aactgttccccaagccaaat

SEQ ID NO: 12557 - RNA, 20 nt, synthetic construct
  source 1..20: mol_type = other RNA
aactgttggaaaaatcgtcc

SEQ ID NO: 12558 - RNA, 20 nt, synthetic construct
  source 1..20: mol_type = other RNA
aactgtttggctgggagctt

SEQ ID NO: 12559 - RNA, 20 nt, synthetic construct
  source 1..20: mol_type = other RNA
aactgttttccacagtgact

SEQ ID NO: 12560 - RNA, 20 nt, synthetic construct
  source 1..20: mol_type = other RNA
aactgttttttcctcccttc

SEQ ID NO: 12561 - RNA, 20 nt, synthetic construct
  source 1..20: mol_type = other RNA
aacttaaaggtttggagttt

SEQ ID NO: 12562 - RNA, 20 nt, synthetic construct
  source 1..20: mol_type = other RNA
aacttaagaactgttatttg

SEQ ID NO: 12563 - RNA, 20 nt, synthetic construct
  source 1..20: mol_type = other RNA
aacttaagtatctcagtcat

SEQ ID NO: 12564 - RNA, 20 nt, synthetic construct
  source 1..20: mol_type = other RNA
aacttaagtatctcggtcat

SEQ ID NO: 12565 - RNA, 20 nt, synthetic construct
  source 1..20: mol_type = other RNA
aacttacagtaagatcctgg

SEQ ID NO: 12566 - RNA, 20 nt, synthetic construct
  source 1..20: mol_type = other RNA
aacttagccttggtaaaatc

SEQ ID NO: 12567 - RNA, 20 nt, synthetic construct
  source 1..20: mol_type = other RNA
aacttaggaggctattaact

SEQ ID NO: 12568 - RNA, 20 nt, synthetic construct
  source 1..20: mol_type = other RNA
aacttatataaatgctcagt

SEQ ID NO: 12569 - RNA, 20 nt, synthetic construct
  source 1..20: mol_type = other RNA
aacttatgcaagatggcaag

SEQ ID NO: 12570 - RNA, 20 nt, synthetic construct
  source 1..20: mol_type = other RNA
aacttatgcatcttgcaaaa

SEQ ID NO: 12571 - RNA, 20 nt, synthetic construct
  source 1..20: mol_type = other RNA
aacttattggaaaactctgt

SEQ ID NO: 12572 - RNA, 20 nt, synthetic construct
  source 1..20: mol_type = other RNA
aacttatttccagggggtat

SEQ ID NO: 12573 - RNA, 20 nt, synthetic construct
  source 1..20: mol_type = other RNA
aacttcaaggtaatctagtt

SEQ ID NO: 12574 - RNA, 20 nt, synthetic construct
  source 1..20: mol_type = other RNA
aacttcacaccatttagatc

SEQ ID NO: 12575 - RNA, 20 nt, synthetic construct
  source 1..20: mol_type = other RNA
aacttcacctctacacaaaa

SEQ ID NO: 12576 - RNA, 20 nt, synthetic construct
  source 1..20: mol_type = other RNA
aacttcagttttgagtggca

SEQ ID NO: 12577 - RNA, 20 nt, synthetic construct
  source 1..20: mol_type = other RNA
aacttccaaccatcttctta

SEQ ID NO: 12578 - RNA, 20 nt, synthetic construct
  source 1..20: mol_type = other RNA
aacttccagaaacttccaac

SEQ ID NO: 12579 - RNA, 20 nt, synthetic construct
  source 1..20: mol_type = other RNA
aacttccagcaagactttat

SEQ ID NO: 12580 - RNA, 20 nt, synthetic construct
  source 1..20: mol_type = other RNA
aacttccatgagattacata

SEQ ID NO: 12581 - RNA, 20 nt, synthetic construct
  source 1..20: mol_type = other RNA
aacttcccagacagggaatg

SEQ ID NO: 12582 - RNA, 20 nt, synthetic construct
  source 1..20: mol_type = other RNA
aacttccctctcagtggtgc

SEQ ID NO: 12583 - RNA, 20 nt, synthetic construct
  source 1..20: mol_type = other RNA
aacttcccttagctctcatg

SEQ ID NO: 12584 - RNA, 20 nt, synthetic construct
  source 1..20: mol_type = other RNA
aacttcctgttttagtggct

SEQ ID NO: 12585 - RNA, 20 nt, synthetic construct
  source 1..20: mol_type = other RNA
aacttcgaactaaggaaagc

SEQ ID NO: 12586 - RNA, 20 nt, synthetic construct
  source 1..20: mol_type = other RNA
aacttctaatgcccattaaa

SEQ ID NO: 12587 - RNA, 20 nt, synthetic construct
  source 1..20: mol_type = other RNA
aacttctctggagcaagcat

SEQ ID NO: 12588 - RNA, 20 nt, synthetic construct
  source 1..20: mol_type = other RNA
aacttcttcaaaagacatca

SEQ ID NO: 12589 - RNA, 20 nt, synthetic construct
  source 1..20: mol_type = other RNA
aacttcttctgttggagaga

SEQ ID NO: 12590 - RNA, 20 nt, synthetic construct
  source 1..20: mol_type = other RNA
aacttgaaccttcctcttcc

SEQ ID NO: 12591 - RNA, 20 nt, synthetic construct
  source 1..20: mol_type = other RNA
aacttgaaggcaatgtaggg

SEQ ID NO: 12592 - RNA, 20 nt, synthetic construct
  source 1..20: mol_type = other RNA
aacttgaatactcgtgtgtc

SEQ ID NO: 12593 - RNA, 20 nt, synthetic construct
  source 1..20: mol_type = other RNA
aacttgaattcagatggccc

SEQ ID NO: 12594 - RNA, 20 nt, synthetic construct
  source 1..20: mol_type = other RNA
aacttgacaagtatattaca

SEQ ID NO: 12595 - RNA, 20 nt, synthetic construct
  source 1..20: mol_type = other RNA
aacttgagcagatcagtaac

SEQ ID NO: 12596 - RNA, 20 nt, synthetic construct
  source 1..20: mol_type = other RNA
aacttgagtttgttctgtca

SEQ ID NO: 12597 - RNA, 20 nt, synthetic construct
  source 1..20: mol_type = other RNA
aacttgatcagggatttggc

SEQ ID NO: 12598 - RNA, 20 nt, synthetic construct
  source 1..20: mol_type = other RNA
aacttgcagaagagtgaagc

SEQ ID NO: 12599 - RNA, 20 nt, synthetic construct
  source 1..20: mol_type = other RNA
aacttgccatcttgcataag

SEQ ID NO: 12600 - RNA, 20 nt, synthetic construct
  source 1..20: mol_type = other RNA
aacttgcttaggctgaagca

SEQ ID NO: 12601 - RNA, 20 nt, synthetic construct
  source 1..20: mol_type = other RNA
aacttgctttgaatttggaa

SEQ ID NO: 12602 - RNA, 20 nt, synthetic construct
  source 1..20: mol_type = other RNA
aacttggagaacttaaaggt

SEQ ID NO: 12603 - RNA, 20 nt, synthetic construct
  source 1..20: mol_type = other RNA
aacttggattgtgtgtcgag

SEQ ID NO: 12604 - RNA, 20 nt, synthetic construct
  source 1..20: mol_type = other RNA
aacttggtaaaaagtgcttc

SEQ ID NO: 12605 - RNA, 20 nt, synthetic construct
  source 1..20: mol_type = other RNA
aacttggtcgaaaacctgaa

SEQ ID NO: 12606 - RNA, 20 nt, synthetic construct
  source 1..20: mol_type = other RNA
aacttggtctgggtgatatc

SEQ ID NO: 12607 - RNA, 20 nt, synthetic construct
  source 1..20: mol_type = other RNA
aacttggtttattttctgca

SEQ ID NO: 12608 - RNA, 20 nt, synthetic construct
  source 1..20: mol_type = other RNA
aacttgtagaggaggagggt

SEQ ID NO: 12609 - RNA, 20 nt, synthetic construct
  source 1..20: mol_type = other RNA
aacttgtatgaaattagttc

SEQ ID NO: 12610 - RNA, 20 nt, synthetic construct
  source 1..20: mol_type = other RNA
aacttgtcacaaaatgtgga

SEQ ID NO: 12611 - RNA, 20 nt, synthetic construct
  source 1..20: mol_type = other RNA
aacttgtctcggatttaaga

SEQ ID NO: 12612 - RNA, 20 nt, synthetic construct
  source 1..20: mol_type = other RNA
aacttgtctttgtctattcc

SEQ ID NO: 12613 - RNA, 20 nt, synthetic construct
  source 1..20: mol_type = other RNA
aacttgttcatgtttacaga

SEQ ID NO: 12614 - RNA, 20 nt, synthetic construct
  source 1..20: mol_type = other RNA
aactttaaagctctatggca

SEQ ID NO: 12615 - RNA, 20 nt, synthetic construct
  source 1..20: mol_type = other RNA
aactttaaattttgagacct

SEQ ID NO: 12616 - RNA, 20 nt, synthetic construct
  source 1..20: mol_type = other RNA
aactttaatcaccaggcgcg

SEQ ID NO: 12617 - RNA, 20 nt, synthetic construct
  source 1..20: mol_type = other RNA
aactttagaacatataatcc

SEQ ID NO: 12618 - RNA, 20 nt, synthetic construct
  source 1..20: mol_type = other RNA
aactttaggtcagaatacaa

SEQ ID NO: 12619 - RNA, 20 nt, synthetic construct
  source 1..20: mol_type = other RNA
aactttaggttacgtactag

SEQ ID NO: 12620 - RNA, 20 nt, synthetic construct
  source 1..20: mol_type = other RNA
aactttcaacctaacatgtc

SEQ ID NO: 12621 - RNA, 20 nt, synthetic construct
  source 1..20: mol_type = other RNA
aactttccagaagtaactct

SEQ ID NO: 12622 - RNA, 20 nt, synthetic construct
  source 1..20: mol_type = other RNA
aactttcgaagtgggaagca

SEQ ID NO: 12623 - RNA, 20 nt, synthetic construct
  source 1..20: mol_type = other RNA
aactttctattcccctggat

SEQ ID NO: 12624 - RNA, 20 nt, synthetic construct
  source 1..20: mol_type = other RNA
aactttctgcttaaagcctc

SEQ ID NO: 12625 - RNA, 20 nt, synthetic construct
  source 1..20: mol_type = other RNA
aactttgaaatcagaacttg

SEQ ID NO: 12626 - RNA, 20 nt, synthetic construct
  source 1..20: mol_type = other RNA
aactttgagtagcaccctat

SEQ ID NO: 12627 - RNA, 20 nt, synthetic construct
  source 1..20: mol_type = other RNA
aactttgatgaattccagtt

SEQ ID NO: 12628 - RNA, 20 nt, synthetic construct
  source 1..20: mol_type = other RNA
aacttttaacccacagataa

SEQ ID NO: 12629 - RNA, 20 nt, synthetic construct
  source 1..20: mol_type = other RNA
aacttttagtaggtctcctt

SEQ ID NO: 12630 - RNA, 20 nt, synthetic construct
  source 1..20: mol_type = other RNA
aactttttgggcctttctgt

SEQ ID NO: 12631 - RNA, 20 nt, synthetic construct
  source 1..20: mol_type = other RNA
aagaaaaaataaaggctttc

SEQ ID NO: 12632 - RNA, 20 nt, synthetic construct
  source 1..20: mol_type = other RNA
aagaaaaacagaagacacaa

SEQ ID NO: 12633 - RNA, 20 nt, synthetic construct
  source 1..20: mol_type = other RNA
aagaaaaacctaaacctgtg

SEQ ID NO: 12634 - RNA, 20 nt, synthetic construct
  source 1..20: mol_type = other RNA
aagaaaaactgaactacagt

SEQ ID NO: 12635 - RNA, 20 nt, synthetic construct
  source 1..20: mol_type = other RNA
aagaaaaagaaaagacaaga

SEQ ID NO: 12636 - RNA, 20 nt, synthetic construct
  source 1..20: mol_type = other RNA
aagaaaaagcaacttgaagg

SEQ ID NO: 12637 - RNA, 20 nt, synthetic construct
  source 1..20: mol_type = other RNA
aagaaaaagcagagaaactg

SEQ ID NO: 12638 - RNA, 20 nt, synthetic construct
  source 1..20: mol_type = other RNA
aagaaaaagctcacctctgg

SEQ ID NO: 12639 - RNA, 20 nt, synthetic construct
  source 1..20: mol_type = other RNA
aagaaaaaggttaagggaag

SEQ ID NO: 12640 - RNA, 20 nt, synthetic construct
  source 1..20: mol_type = other RNA
aagaaaaagttgggcttggt

SEQ ID NO: 12641 - RNA, 20 nt, synthetic construct
  source 1..20: mol_type = other RNA
aagaaaaattccctcagcaa

SEQ ID NO: 12642 - RNA, 20 nt, synthetic construct
  source 1..20: mol_type = other RNA
aagaaaacaaattcatgcaa

SEQ ID NO: 12643 - RNA, 20 nt, synthetic construct
  source 1..20: mol_type = other RNA
aagaaaacactccagaatga

SEQ ID NO: 12644 - RNA, 20 nt, synthetic construct
  source 1..20: mol_type = other RNA
aagaaaacagataacctaga

SEQ ID NO: 12645 - RNA, 20 nt, synthetic construct
  source 1..20: mol_type = other RNA
aagaaaagaaaagtttcagt

SEQ ID NO: 12646 - RNA, 20 nt, synthetic construct
  source 1..20: mol_type = other RNA
aagaaaagaagttacggttc

SEQ ID NO: 12647 - RNA, 20 nt, synthetic construct
  source 1..20: mol_type = other RNA
aagaaaagacaagactaaaa

SEQ ID NO: 12648 - RNA, 20 nt, synthetic construct
  source 1..20: mol_type = other RNA
aagaaaagtttcagtggtta

SEQ ID NO: 12649 - RNA, 20 nt, synthetic construct
  source 1..20: mol_type = other RNA
aagaaaataaaattctgacc

SEQ ID NO: 12650 - RNA, 20 nt, synthetic construct
  source 1..20: mol_type = other RNA
aagaaaataatgttttccgt

SEQ ID NO: 12651 - RNA, 20 nt, synthetic construct
  source 1..20: mol_type = other RNA
aagaaaatcattgttcaggg

SEQ ID NO: 12652 - RNA, 20 nt, synthetic construct
  source 1..20: mol_type = other RNA
aagaaaatccaaaagcctca

SEQ ID NO: 12653 - RNA, 20 nt, synthetic construct
  source 1..20: mol_type = other RNA
aagaaaatccaagaagacat

SEQ ID NO: 12654 - RNA, 20 nt, synthetic construct
  source 1..20: mol_type = other RNA
aagaaaatctgacaatttgc

SEQ ID NO: 12655 - RNA, 20 nt, synthetic construct
  source 1..20: mol_type = other RNA
aagaaaatggccaagagttg

SEQ ID NO: 12656 - RNA, 20 nt, synthetic construct
  source 1..20: mol_type = other RNA
aagaaaatgtgacattagtg

SEQ ID NO: 12657 - RNA, 20 nt, synthetic construct
  source 1..20: mol_type = other RNA
aagaaaattttctgagcaac

SEQ ID NO: 12658 - RNA, 20 nt, synthetic construct
  source 1..20: mol_type = other RNA
aagaaacagtaattagttac

SEQ ID NO: 12659 - RNA, 20 nt, synthetic construct
  source 1..20: mol_type = other RNA
aagaaaccaagagcatagac

SEQ ID NO: 12660 - RNA, 20 nt, synthetic construct
  source 1..20: mol_type = other RNA
aagaaaccacagagcctaaa

SEQ ID NO: 12661 - RNA, 20 nt, synthetic construct
  source 1..20: mol_type = other RNA
aagaaacctttctcaaagcc

SEQ ID NO: 12662 - RNA, 20 nt, synthetic construct
  source 1..20: mol_type = other RNA
aagaaactacctagaaaaac

SEQ ID NO: 12663 - RNA, 20 nt, synthetic construct
  source 1..20: mol_type = other RNA
aagaaactagaaaagataag

SEQ ID NO: 12664 - RNA, 20 nt, synthetic construct
  source 1..20: mol_type = other RNA
aagaaagaaaaactgaacta

SEQ ID NO: 12665 - RNA, 20 nt, synthetic construct
  source 1..20: mol_type = other RNA
aagaaagaaggccatttgat

SEQ ID NO: 12666 - RNA, 20 nt, synthetic construct
  source 1..20: mol_type = other RNA
aagaaagagttgggtttttg

SEQ ID NO: 12667 - RNA, 20 nt, synthetic construct
  source 1..20: mol_type = other RNA
aagaaagataaatcagaaac

SEQ ID NO: 12668 - RNA, 20 nt, synthetic construct
  source 1..20: mol_type = other RNA
aagaaagatctcaaacagcc

SEQ ID NO: 12669 - RNA, 20 nt, synthetic construct
  source 1..20: mol_type = other RNA
aagaaagcaggtcatgactt

SEQ ID NO: 12670 - RNA, 20 nt, synthetic construct
  source 1..20: mol_type = other RNA
aagaaagctctcaattaatg

SEQ ID NO: 12671 - RNA, 20 nt, synthetic construct
  source 1..20: mol_type = other RNA
aagaaagctgtggatgttgg

SEQ ID NO: 12672 - RNA, 20 nt, synthetic construct
  source 1..20: mol_type = other RNA
aagaaaggacttcagtcctt

SEQ ID NO: 12673 - RNA, 20 nt, synthetic construct
  source 1..20: mol_type = other RNA
aagaaaggagttcagcttta

SEQ ID NO: 12674 - RNA, 20 nt, synthetic construct
  source 1..20: mol_type = other RNA
aagaaaggggaaggaatttt

SEQ ID NO: 12675 - RNA, 20 nt, synthetic construct
  source 1..20: mol_type = other RNA
aagaaagggtagctttgatg

SEQ ID NO: 12676 - RNA, 20 nt, synthetic construct
  source 1..20: mol_type = other RNA
aagaaagggtgtgtgaatgg

SEQ ID NO: 12677 - RNA, 20 nt, synthetic construct
  source 1..20: mol_type = other RNA
aagaaaggtctagtgtgcat

SEQ ID NO: 12678 - RNA, 20 nt, synthetic construct
  source 1..20: mol_type = other RNA
aagaaaggtctctctctgtc

SEQ ID NO: 12679 - RNA, 20 nt, synthetic construct
  source 1..20: mol_type = other RNA
aagaaagtaggaattaaaca

SEQ ID NO: 12680 - RNA, 20 nt, synthetic construct
  source 1..20: mol_type = other RNA
aagaaagttttgcagttggg

SEQ ID NO: 12681 - RNA, 20 nt, synthetic construct
  source 1..20: mol_type = other RNA
aagaaataaaacatggccag

SEQ ID NO: 12682 - RNA, 20 nt, synthetic construct
  source 1..20: mol_type = other RNA
aagaaataaaagttacaagg

SEQ ID NO: 12683 - RNA, 20 nt, synthetic construct
  source 1..20: mol_type = other RNA
aagaaataaacgacaccaga

SEQ ID NO: 12684 - RNA, 20 nt, synthetic construct
  source 1..20: mol_type = other RNA
aagaaatagaaaacttgagc

SEQ ID NO: 12685 - RNA, 20 nt, synthetic construct
  source 1..20: mol_type = other RNA
aagaaatagaactgtcacaa

SEQ ID NO: 12686 - RNA, 20 nt, synthetic construct
  source 1..20: mol_type = other RNA
aagaaatcaaatgggaaatt

SEQ ID NO: 12687 - RNA, 20 nt, synthetic construct
  source 1..20: mol_type = other RNA
aagaaatcgttgtgaaatat

SEQ ID NO: 12688 - RNA, 20 nt, synthetic construct
  source 1..20: mol_type = other RNA
aagaaatctgcatccaaaag

SEQ ID NO: 12689 - RNA, 20 nt, synthetic construct
  source 1..20: mol_type = other RNA
aagaaatgggtaaatttcta

SEQ ID NO: 12690 - RNA, 20 nt, synthetic construct
  source 1..20: mol_type = other RNA
aagaaatgttaacaattggt

SEQ ID NO: 12691 - RNA, 20 nt, synthetic construct
  source 1..20: mol_type = other RNA
aagaaattacttctttctct

SEQ ID NO: 12692 - RNA, 20 nt, synthetic construct
  source 1..20: mol_type = other RNA
aagaaattagaacatctggc

SEQ ID NO: 12693 - RNA, 20 nt, synthetic construct
  source 1..20: mol_type = other RNA
aagaaattatctgtgggtta

SEQ ID NO: 12694 - RNA, 20 nt, synthetic construct
  source 1..20: mol_type = other RNA
aagaaattggacgggtggta

SEQ ID NO: 12695 - RNA, 20 nt, synthetic construct
  source 1..20: mol_type = other RNA
aagaacaacatggtagacca

SEQ ID NO: 12696 - RNA, 20 nt, synthetic construct
  source 1..20: mol_type = other RNA
aagaacaaccttatctattt

SEQ ID NO: 12697 - RNA, 20 nt, synthetic construct
  source 1..20: mol_type = other RNA
aagaacacagtgttgagaaa

SEQ ID NO: 12698 - RNA, 20 nt, synthetic construct
  source 1..20: mol_type = other RNA
aagaacactataagccaata

SEQ ID NO: 12699 - RNA, 20 nt, synthetic construct
  source 1..20: mol_type = other RNA
aagaacacttaacatgagat

SEQ ID NO: 12700 - RNA, 20 nt, synthetic construct
  source 1..20: mol_type = other RNA
aagaacaggaagggagagat

SEQ ID NO: 12701 - RNA, 20 nt, synthetic construct
  source 1..20: mol_type = other RNA
aagaacaggacttttggtac

SEQ ID NO: 12702 - RNA, 20 nt, synthetic construct
  source 1..20: mol_type = other RNA
aagaacaggagttaccataa

SEQ ID NO: 12703 - RNA, 20 nt, synthetic construct
  source 1..20: mol_type = other RNA
aagaacatgattgggtcaac

SEQ ID NO: 12704 - RNA, 20 nt, synthetic construct
  source 1..20: mol_type = other RNA
aagaaccatacagtgccttc

SEQ ID NO: 12705 - RNA, 20 nt, synthetic construct
  source 1..20: mol_type = other RNA
aagaaccctttgttatctga

SEQ ID NO: 12706 - RNA, 20 nt, synthetic construct
  source 1..20: mol_type = other RNA
aagaaccgactgaaaggaaa

SEQ ID NO: 12707 - RNA, 20 nt, synthetic construct
  source 1..20: mol_type = other RNA
aagaacctctggaaaggact

SEQ ID NO: 12708 - RNA, 20 nt, synthetic construct
  source 1..20: mol_type = other RNA
aagaacctgttcatttgaga

SEQ ID NO: 12709 - RNA, 20 nt, synthetic construct
  source 1..20: mol_type = other RNA
aagaaccttcatactatttt

SEQ ID NO: 12710 - RNA, 20 nt, synthetic construct
  source 1..20: mol_type = other RNA
aagaactccaacaattcaac

SEQ ID NO: 12711 - RNA, 20 nt, synthetic construct
  source 1..20: mol_type = other RNA
aagaactcctggtctcccag

SEQ ID NO: 12712 - RNA, 20 nt, synthetic construct
  source 1..20: mol_type = other RNA
aagaactgaaagcagggact

SEQ ID NO: 12713 - RNA, 20 nt, synthetic construct
  source 1..20: mol_type = other RNA
aagaacttcttcaaaagaca

SEQ ID NO: 12714 - RNA, 20 nt, synthetic construct
  source 1..20: mol_type = other RNA
aagaacttgtctttgtctat

SEQ ID NO: 12715 - RNA, 20 nt, synthetic construct
  source 1..20: mol_type = other RNA
aagaagaaaaagcaacttga

SEQ ID NO: 12716 - RNA, 20 nt, synthetic construct
  source 1..20: mol_type = other RNA
aagaagaaatcaaatgggaa

SEQ ID NO: 12717 - RNA, 20 nt, synthetic construct
  source 1..20: mol_type = other RNA
aagaagaattctataggtag

SEQ ID NO: 12718 - RNA, 20 nt, synthetic construct
  source 1..20: mol_type = other RNA
aagaagacatgataaatacg

SEQ ID NO: 12719 - RNA, 20 nt, synthetic construct
  source 1..20: mol_type = other RNA
aagaagacttaggagaaaag

SEQ ID NO: 12720 - RNA, 20 nt, synthetic construct
  source 1..20: mol_type = other RNA
aagaagatgcagttgcttac

SEQ ID NO: 12721 - RNA, 20 nt, synthetic construct
  source 1..20: mol_type = other RNA
aagaagatggttggaagttt

SEQ ID NO: 12722 - RNA, 20 nt, synthetic construct
  source 1..20: mol_type = other RNA
aagaagattgagtcagtaat

SEQ ID NO: 12723 - RNA, 20 nt, synthetic construct
  source 1..20: mol_type = other RNA
aagaagctgttttggtaaaa

SEQ ID NO: 12724 - RNA, 20 nt, synthetic construct
  source 1..20: mol_type = other RNA
aagaaggaaaaaacacctaa

SEQ ID NO: 12725 - RNA, 20 nt, synthetic construct
  source 1..20: mol_type = other RNA
aagaaggaaaagaacacagt

SEQ ID NO: 12726 - RNA, 20 nt, synthetic construct
  source 1..20: mol_type = other RNA
aagaaggaatgtgcactctt

SEQ ID NO: 12727 - RNA, 20 nt, synthetic construct
  source 1..20: mol_type = other RNA
aagaaggccatttgattgcc

SEQ ID NO: 12728 - RNA, 20 nt, synthetic construct
  source 1..20: mol_type = other RNA
aagaaggccgtccctatttt

SEQ ID NO: 12729 - RNA, 20 nt, synthetic construct
  source 1..20: mol_type = other RNA
aagaaggctagcacagaggc

SEQ ID NO: 12730 - RNA, 20 nt, synthetic construct
  source 1..20: mol_type = other RNA
aagaagggaacactaagaag

SEQ ID NO: 12731 - RNA, 20 nt, synthetic construct
  source 1..20: mol_type = other RNA
aagaaggtatcatcggaaat

SEQ ID NO: 12732 - RNA, 20 nt, synthetic construct
  source 1..20: mol_type = other RNA
aagaaggtttgtagagcaag

SEQ ID NO: 12733 - RNA, 20 nt, synthetic construct
  source 1..20: mol_type = other RNA
aagaagtaatttcttctgaa

SEQ ID NO: 12734 - RNA, 20 nt, synthetic construct
  source 1..20: mol_type = other RNA
aagaagtgaaaaatgaccta

SEQ ID NO: 12735 - RNA, 20 nt, synthetic construct
  source 1..20: mol_type = other RNA
aagaagtgaaactgctggat

SEQ ID NO: 12736 - RNA, 20 nt, synthetic construct
  source 1..20: mol_type = other RNA
aagaagttacggttccctgt

SEQ ID NO: 12737 - RNA, 20 nt, synthetic construct
  source 1..20: mol_type = other RNA
aagaataaaattcaccaaac

SEQ ID NO: 12738 - RNA, 20 nt, synthetic construct
  source 1..20: mol_type = other RNA
aagaataactgtcctgaatt

SEQ ID NO: 12739 - RNA, 20 nt, synthetic construct
  source 1..20: mol_type = other RNA
aagaataagctaatcccaaa

SEQ ID NO: 12740 - RNA, 20 nt, synthetic construct
  source 1..20: mol_type = other RNA
aagaataccaaattcacgag

SEQ ID NO: 12741 - RNA, 20 nt, synthetic construct
  source 1..20: mol_type = other RNA
aagaatcaggtctctttgaa

SEQ ID NO: 12742 - RNA, 20 nt, synthetic construct
  source 1..20: mol_type = other RNA
aagaatcctgctattttatt

SEQ ID NO: 12743 - RNA, 20 nt, synthetic construct
  source 1..20: mol_type = other RNA
aagaatctttggcaaactta

SEQ ID NO: 12744 - RNA, 20 nt, synthetic construct
  source 1..20: mol_type = other RNA
aagaatgaagtcagagattt

SEQ ID NO: 12745 - RNA, 20 nt, synthetic construct
  source 1..20: mol_type = other RNA
aagaatgagaaacatacatg

SEQ ID NO: 12746 - RNA, 20 nt, synthetic construct
  source 1..20: mol_type = other RNA
aagaatgattatttgcggct

SEQ ID NO: 12747 - RNA, 20 nt, synthetic construct
  source 1..20: mol_type = other RNA
aagaatggtttaacacatac

SEQ ID NO: 12748 - RNA, 20 nt, synthetic construct
  source 1..20: mol_type = other RNA
aagaatgtcaagctgtttga

SEQ ID NO: 12749 - RNA, 20 nt, synthetic construct
  source 1..20: mol_type = other RNA
aagaatgtgaaaaatttgac

SEQ ID NO: 12750 - RNA, 20 nt, synthetic construct
  source 1..20: mol_type = other RNA
aagaattaaaaacattggag

SEQ ID NO: 12751 - RNA, 20 nt, synthetic construct
  source 1..20: mol_type = other RNA
aagaattaaactcattatcc

SEQ ID NO: 12752 - RNA, 20 nt, synthetic construct
  source 1..20: mol_type = other RNA
aagaattaacactaatcctt

SEQ ID NO: 12753 - RNA, 20 nt, synthetic construct
  source 1..20: mol_type = other RNA
aagaattattgtctgcaagc

SEQ ID NO: 12754 - RNA, 20 nt, synthetic construct
  source 1..20: mol_type = other RNA
aagaattcgttaatacttgt

SEQ ID NO: 12755 - RNA, 20 nt, synthetic construct
  source 1..20: mol_type = other RNA
aagaattctataggtagtac

SEQ ID NO: 12756 - RNA, 20 nt, synthetic construct
  source 1..20: mol_type = other RNA
aagaatttcatgcctttcag

SEQ ID NO: 12757 - RNA, 20 nt, synthetic construct
  source 1..20: mol_type = other RNA
aagaattttaagcctagaga

SEQ ID NO: 12758 - RNA, 20 nt, synthetic construct
  source 1..20: mol_type = other RNA
aagaattttccattcatgta

SEQ ID NO: 12759 - RNA, 20 nt, synthetic construct
  source 1..20: mol_type = other RNA
aagacaagcaaggaagggct

SEQ ID NO: 12760 - RNA, 20 nt, synthetic construct
  source 1..20: mol_type = other RNA
aagacaagtactgcatgatt

SEQ ID NO: 12761 - RNA, 20 nt, synthetic construct
  source 1..20: mol_type = other RNA
aagacaagttcttacctcaa

SEQ ID NO: 12762 - RNA, 20 nt, synthetic construct
  source 1..20: mol_type = other RNA
aagacaatactgttatgaca

SEQ ID NO: 12763 - RNA, 20 nt, synthetic construct
  source 1..20: mol_type = other RNA
aagacaatagctagtgtctt

SEQ ID NO: 12764 - RNA, 20 nt, synthetic construct
  source 1..20: mol_type = other RNA
aagacaatgtctttggctct

SEQ ID NO: 12765 - RNA, 20 nt, synthetic construct
  source 1..20: mol_type = other RNA
aagacaatgtggagttggtg

SEQ ID NO: 12766 - RNA, 20 nt, synthetic construct
  source 1..20: mol_type = other RNA
aagacacaaaagagctgggc

SEQ ID NO: 12767 - RNA, 20 nt, synthetic construct
  source 1..20: mol_type = other RNA
aagacacaaaatcagatatg

SEQ ID NO: 12768 - RNA, 20 nt, synthetic construct
  source 1..20: mol_type = other RNA
aagacacaaggaaggtcaaa

SEQ ID NO: 12769 - RNA, 20 nt, synthetic construct
  source 1..20: mol_type = other RNA
aagacaccgctccacgccca

SEQ ID NO: 12770 - RNA, 20 nt, synthetic construct
  source 1..20: mol_type = other RNA
aagacactagctattgtctt

SEQ ID NO: 12771 - RNA, 20 nt, synthetic construct
  source 1..20: mol_type = other RNA
aagacagacatttggaatag

SEQ ID NO: 12772 - RNA, 20 nt, synthetic construct
  source 1..20: mol_type = other RNA
aagacagacctctattaaat

SEQ ID NO: 12773 - RNA, 20 nt, synthetic construct
  source 1..20: mol_type = other RNA
aagacagagctagaactaga

SEQ ID NO: 12774 - RNA, 20 nt, synthetic construct
  source 1..20: mol_type = other RNA
aagacagagctccctctccc

SEQ ID NO: 12775 - RNA, 20 nt, synthetic construct
  source 1..20: mol_type = other RNA
aagacagatcttatggaata

SEQ ID NO: 12776 - RNA, 20 nt, synthetic construct
  source 1..20: mol_type = other RNA
aagacagatgtgcttaatct

SEQ ID NO: 12777 - RNA, 20 nt, synthetic construct
  source 1..20: mol_type = other RNA
aagacagctactaaacaaat

SEQ ID NO: 12778 - RNA, 20 nt, synthetic construct
  source 1..20: mol_type = other RNA
aagacaggaagaattattgt

SEQ ID NO: 12779 - RNA, 20 nt, synthetic construct
  source 1..20: mol_type = other RNA
aagacaggtagacatgagta

SEQ ID NO: 12780 - RNA, 20 nt, synthetic construct
  source 1..20: mol_type = other RNA
aagacataagcattttctaa

SEQ ID NO: 12781 - RNA, 20 nt, synthetic construct
  source 1..20: mol_type = other RNA
aagacatcactaagagtgaa

SEQ ID NO: 12782 - RNA, 20 nt, synthetic construct
  source 1..20: mol_type = other RNA
aagacatcctgatttaggcc

SEQ ID NO: 12783 - RNA, 20 nt, synthetic construct
  source 1..20: mol_type = other RNA
aagacatctttcctgtgatt

SEQ ID NO: 12784 - RNA, 20 nt, synthetic construct
  source 1..20: mol_type = other RNA
aagacatgataaatacgtat

SEQ ID NO: 12785 - RNA, 20 nt, synthetic construct
  source 1..20: mol_type = other RNA
aagacatgctgaggccccag

SEQ ID NO: 12786 - RNA, 20 nt, synthetic construct
  source 1..20: mol_type = other RNA
aagacatgttaggttgaaag

SEQ ID NO: 12787 - RNA, 20 nt, synthetic construct
  source 1..20: mol_type = other RNA
aagacattattcttacagtg

SEQ ID NO: 12788 - RNA, 20 nt, synthetic construct
  source 1..20: mol_type = other RNA
aagacattgtcttacatagg

SEQ ID NO: 12789 - RNA, 20 nt, synthetic construct
  source 1..20: mol_type = other RNA
aagacatttgggaatgtggt

SEQ ID NO: 12790 - RNA, 20 nt, synthetic construct
  source 1..20: mol_type = other RNA
aagaccaaaatggagaccca

SEQ ID NO: 12791 - RNA, 20 nt, synthetic construct
  source 1..20: mol_type = other RNA
aagaccaagaattttccatt

SEQ ID NO: 12792 - RNA, 20 nt, synthetic construct
  source 1..20: mol_type = other RNA
aagaccaagagtgtggcttt

SEQ ID NO: 12793 - RNA, 20 nt, synthetic construct
  source 1..20: mol_type = other RNA
aagaccacaaggattaatct

SEQ ID NO: 12794 - RNA, 20 nt, synthetic construct
  source 1..20: mol_type = other RNA
aagaccataatatatttcac

SEQ ID NO: 12795 - RNA, 20 nt, synthetic construct
  source 1..20: mol_type = other RNA
aagacccagtggctagtgtg

SEQ ID NO: 12796 - RNA, 20 nt, synthetic construct
  source 1..20: mol_type = other RNA
aagaccccagtagaaatctt

SEQ ID NO: 12797 - RNA, 20 nt, synthetic construct
  source 1..20: mol_type = other RNA
aagacccctcaggtgtcact

SEQ ID NO: 12798 - RNA, 20 nt, synthetic construct
  source 1..20: mol_type = other RNA
aagaccctgtctctaaaaaa

SEQ ID NO: 12799 - RNA, 20 nt, synthetic construct
  source 1..20: mol_type = other RNA
aagaccgcaagagttccaac

SEQ ID NO: 12800 - RNA, 20 nt, synthetic construct
  source 1..20: mol_type = other RNA
aagaccggggactgcaacag

SEQ ID NO: 12801 - RNA, 20 nt, synthetic construct
  source 1..20: mol_type = other RNA
aagacctaagcttaagagct

SEQ ID NO: 12802 - RNA, 20 nt, synthetic construct
  source 1..20: mol_type = other RNA
aagacctcaaattctgaggg

SEQ ID NO: 12803 - RNA, 20 nt, synthetic construct
  source 1..20: mol_type = other RNA
aagacctcaggtttagaata

SEQ ID NO: 12804 - RNA, 20 nt, synthetic construct
  source 1..20: mol_type = other RNA
aagacctgcagtctgcaggc

SEQ ID NO: 12805 - RNA, 20 nt, synthetic construct
  source 1..20: mol_type = other RNA
aagacgatattcctatcaga

SEQ ID NO: 12806 - RNA, 20 nt, synthetic construct
  source 1..20: mol_type = other RNA
aagacgtgtacataaaataa

SEQ ID NO: 12807 - RNA, 20 nt, synthetic construct
  source 1..20: mol_type = other RNA
aagacgttcagataacaaag

SEQ ID NO: 12808 - RNA, 20 nt, synthetic construct
  source 1..20: mol_type = other RNA
aagactaagcagaaatgaca

SEQ ID NO: 12809 - RNA, 20 nt, synthetic construct
  source 1..20: mol_type = other RNA
aagactacctaaaacaatct

SEQ ID NO: 12810 - RNA, 20 nt, synthetic construct
  source 1..20: mol_type = other RNA
aagactataaaactcttagc

SEQ ID NO: 12811 - RNA, 20 nt, synthetic construct
  source 1..20: mol_type = other RNA
aagactatcacgattctgac

SEQ ID NO: 12812 - RNA, 20 nt, synthetic construct
  source 1..20: mol_type = other RNA
aagactatgagaaggattag

SEQ ID NO: 12813 - RNA, 20 nt, synthetic construct
  source 1..20: mol_type = other RNA
aagactcaaatctcaaaaaa

SEQ ID NO: 12814 - RNA, 20 nt, synthetic construct
  source 1..20: mol_type = other RNA
aagactcaacatgtgtattt

SEQ ID NO: 12815 - RNA, 20 nt, synthetic construct
  source 1..20: mol_type = other RNA
aagactcagcagttttaaag

SEQ ID NO: 12816 - RNA, 20 nt, synthetic construct
  source 1..20: mol_type = other RNA
aagactgctgtttaccaagg

SEQ ID NO: 12817 - RNA, 20 nt, synthetic construct
  source 1..20: mol_type = other RNA
aagactggaaaagtgttgac

SEQ ID NO: 12818 - RNA, 20 nt, synthetic construct
  source 1..20: mol_type = other RNA
aagactggatttgattgggc

SEQ ID NO: 12819 - RNA, 20 nt, synthetic construct
  source 1..20: mol_type = other RNA
aagacttaggagaaaagctt

SEQ ID NO: 12820 - RNA, 20 nt, synthetic construct
  source 1..20: mol_type = other RNA
aagacttcaacggacatttt

SEQ ID NO: 12821 - RNA, 20 nt, synthetic construct
  source 1..20: mol_type = other RNA
aagacttcacgatgcttagg

SEQ ID NO: 12822 - RNA, 20 nt, synthetic construct
  source 1..20: mol_type = other RNA
aagacttcaggaacaccttg

SEQ ID NO: 12823 - RNA, 20 nt, synthetic construct
  source 1..20: mol_type = other RNA
aagacttctcaaacaggata

SEQ ID NO: 12824 - RNA, 20 nt, synthetic construct
  source 1..20: mol_type = other RNA
aagacttgaggtttacttgg

SEQ ID NO: 12825 - RNA, 20 nt, synthetic construct
  source 1..20: mol_type = other RNA
aagactttatggtaattggt

SEQ ID NO: 12826 - RNA, 20 nt, synthetic construct
  source 1..20: mol_type = other RNA
aagactttatgtggaaaaat

SEQ ID NO: 12827 - RNA, 20 nt, synthetic construct
  source 1..20: mol_type = other RNA
aagactttgttttgtttttc

SEQ ID NO: 12828 - RNA, 20 nt, synthetic construct
  source 1..20: mol_type = other RNA
aagagaaaaattacaggtca

SEQ ID NO: 12829 - RNA, 20 nt, synthetic construct
  source 1..20: mol_type = other RNA
aagagaaagaagtaatttct

SEQ ID NO: 12830 - RNA, 20 nt, synthetic construct
  source 1..20: mol_type = other RNA
aagagaaatagttaacgttt

SEQ ID NO: 12831 - RNA, 20 nt, synthetic construct
  source 1..20: mol_type = other RNA
aagagaacaaaatacctggg

SEQ ID NO: 12832 - RNA, 20 nt, synthetic construct
  source 1..20: mol_type = other RNA
aagagaacaatggaatagaa

SEQ ID NO: 12833 - RNA, 20 nt, synthetic construct
  source 1..20: mol_type = other RNA
aagagaacacacaatttgag

SEQ ID NO: 12834 - RNA, 20 nt, synthetic construct
  source 1..20: mol_type = other RNA
aagagaacattggtttgaaa

SEQ ID NO: 12835 - RNA, 20 nt, synthetic construct
  source 1..20: mol_type = other RNA
aagagaacttgcacataata

SEQ ID NO: 12836 - RNA, 20 nt, synthetic construct
  source 1..20: mol_type = other RNA
aagagaaggaagcaccaacc

SEQ ID NO: 12837 - RNA, 20 nt, synthetic construct
  source 1..20: mol_type = other RNA
aagagaatagcagaaacaca

SEQ ID NO: 12838 - RNA, 20 nt, synthetic construct
  source 1..20: mol_type = other RNA
aagagaatcttaaaatacca

SEQ ID NO: 12839 - RNA, 20 nt, synthetic construct
  source 1..20: mol_type = other RNA
aagagaatggaaacttgcca

SEQ ID NO: 12840 - RNA, 20 nt, synthetic construct
  source 1..20: mol_type = other RNA
aagagaatggctggaatggt

SEQ ID NO: 12841 - RNA, 20 nt, synthetic construct
  source 1..20: mol_type = other RNA
aagagaccacaggctctctt

SEQ ID NO: 12842 - RNA, 20 nt, synthetic construct
  source 1..20: mol_type = other RNA
aagagacctgattcttccac

SEQ ID NO: 12843 - RNA, 20 nt, synthetic construct
  source 1..20: mol_type = other RNA
aagagactatctcttcctcc

SEQ ID NO: 12844 - RNA, 20 nt, synthetic construct
  source 1..20: mol_type = other RNA
aagagactctcaagaaggta

SEQ ID NO: 12845 - RNA, 20 nt, synthetic construct
  source 1..20: mol_type = other RNA
aagagagaaggctgccagca

SEQ ID NO: 12846 - RNA, 20 nt, synthetic construct
  source 1..20: mol_type = other RNA
aagagagagacaagcacagg

SEQ ID NO: 12847 - RNA, 20 nt, synthetic construct
  source 1..20: mol_type = other RNA
aagagagaggggggaagctt

SEQ ID NO: 12848 - RNA, 20 nt, synthetic construct
  source 1..20: mol_type = other RNA
aagagagattaaataacttc

SEQ ID NO: 12849 - RNA, 20 nt, synthetic construct
  source 1..20: mol_type = other RNA
aagagagcaagactcaaatc

SEQ ID NO: 12850 - RNA, 20 nt, synthetic construct
  source 1..20: mol_type = other RNA
aagagagcaagtccccatct

SEQ ID NO: 12851 - RNA, 20 nt, synthetic construct
  source 1..20: mol_type = other RNA
aagagagcattgcctttatt

SEQ ID NO: 12852 - RNA, 20 nt, synthetic construct
  source 1..20: mol_type = other RNA
aagagagcctgtggtctctt

SEQ ID NO: 12853 - RNA, 20 nt, synthetic construct
  source 1..20: mol_type = other RNA
aagagaggaagtgaccctga

SEQ ID NO: 12854 - RNA, 20 nt, synthetic construct
  source 1..20: mol_type = other RNA
aagagaggaataaatggtag

SEQ ID NO: 12855 - RNA, 20 nt, synthetic construct
  source 1..20: mol_type = other RNA
aagagaggacagttggcctt

SEQ ID NO: 12856 - RNA, 20 nt, synthetic construct
  source 1..20: mol_type = other RNA
aagagagtaaaataaaagct

SEQ ID NO: 12857 - RNA, 20 nt, synthetic construct
  source 1..20: mol_type = other RNA
aagagagtgacagctgagta

SEQ ID NO: 12858 - RNA, 20 nt, synthetic construct
  source 1..20: mol_type = other RNA
aagagataactaatgagaat

SEQ ID NO: 12859 - RNA, 20 nt, synthetic construct
  source 1..20: mol_type = other RNA
aagagatagtctcttcctgt

SEQ ID NO: 12860 - RNA, 20 nt, synthetic construct
  source 1..20: mol_type = other RNA
aagagatctagtgaagtcaa

SEQ ID NO: 12861 - RNA, 20 nt, synthetic construct
  source 1..20: mol_type = other RNA
aagagattaattcagtcaac

SEQ ID NO: 12862 - RNA, 20 nt, synthetic construct
  source 1..20: mol_type = other RNA
aagagcacaccaagacatgt

SEQ ID NO: 12863 - RNA, 20 nt, synthetic construct
  source 1..20: mol_type = other RNA
aagagcactatgtaaattat

SEQ ID NO: 12864 - RNA, 20 nt, synthetic construct
  source 1..20: mol_type = other RNA
aagagcagaactccacctca

SEQ ID NO: 12865 - RNA, 20 nt, synthetic construct
  source 1..20: mol_type = other RNA
aagagcaggtggaaggcctg

SEQ ID NO: 12866 - RNA, 20 nt, synthetic construct
  source 1..20: mol_type = other RNA
aagagcagtgtgttctgcct

SEQ ID NO: 12867 - RNA, 20 nt, synthetic construct
  source 1..20: mol_type = other RNA
aagagcatagactttagagt

SEQ ID NO: 12868 - RNA, 20 nt, synthetic construct
  source 1..20: mol_type = other RNA
aagagcatgttgggccaact

SEQ ID NO: 12869 - RNA, 20 nt, synthetic construct
  source 1..20: mol_type = other RNA
aagagccaaagacattgtct

SEQ ID NO: 12870 - RNA, 20 nt, synthetic construct
  source 1..20: mol_type = other RNA
aagagccagcctgatgatga

SEQ ID NO: 12871 - RNA, 20 nt, synthetic construct
  source 1..20: mol_type = other RNA
aagagcgaagagggagaaga

SEQ ID NO: 12872 - RNA, 20 nt, synthetic construct
  source 1..20: mol_type = other RNA
aagagcgaggcctggaacag

SEQ ID NO: 12873 - RNA, 20 nt, synthetic construct
  source 1..20: mol_type = other RNA
aagagcgcttctatgtgaca

SEQ ID NO: 12874 - RNA, 20 nt, synthetic construct
  source 1..20: mol_type = other RNA
aagagcggcctttgcctctc

SEQ ID NO: 12875 - RNA, 20 nt, synthetic construct
  source 1..20: mol_type = other RNA
aagagcgtcgtacctttcgc

SEQ ID NO: 12876 - RNA, 20 nt, synthetic construct
  source 1..20: mol_type = other RNA
aagagctaagatgctattca

SEQ ID NO: 12877 - RNA, 20 nt, synthetic construct
  source 1..20: mol_type = other RNA
aagagctgggactacaggtg

SEQ ID NO: 12878 - RNA, 20 nt, synthetic construct
  source 1..20: mol_type = other RNA
aagagctgggcccgcagtgg

SEQ ID NO: 12879 - RNA, 20 nt, synthetic construct
  source 1..20: mol_type = other RNA
aagagctgtaacagaggcat

SEQ ID NO: 12880 - RNA, 20 nt, synthetic construct
  source 1..20: mol_type = other RNA
aagaggaaggttcaagtttg

SEQ ID NO: 12881 - RNA, 20 nt, synthetic construct
  source 1..20: mol_type = other RNA
aagaggacgatttttccaac

SEQ ID NO: 12882 - RNA, 20 nt, synthetic construct
  source 1..20: mol_type = other RNA
aagaggataaggggcagggt

SEQ ID NO: 12883 - RNA, 20 nt, synthetic construct
  source 1..20: mol_type = other RNA
aagaggcaaaactcctgaac

SEQ ID NO: 12884 - RNA, 20 nt, synthetic construct
  source 1..20: mol_type = other RNA
aagaggcagctaagcaccaa

SEQ ID NO: 12885 - RNA, 20 nt, synthetic construct
  source 1..20: mol_type = other RNA
aagaggccacaaagtcccca

SEQ ID NO: 12886 - RNA, 20 nt, synthetic construct
  source 1..20: mol_type = other RNA
aagaggctttctgtgtaata

SEQ ID NO: 12887 - RNA, 20 nt, synthetic construct
  source 1..20: mol_type = other RNA
aagagggaacattttcattt

SEQ ID NO: 12888 - RNA, 20 nt, synthetic construct
  source 1..20: mol_type = other RNA
aagagggaagtactgagtca

SEQ ID NO: 12889 - RNA, 20 nt, synthetic construct
  source 1..20: mol_type = other RNA
aagagggagaagaaataaac

SEQ ID NO: 12890 - RNA, 20 nt, synthetic construct
  source 1..20: mol_type = other RNA
aagagggggcataacatcta

SEQ ID NO: 12891 - RNA, 20 nt, synthetic construct
  source 1..20: mol_type = other RNA
aagaggtatcaccatctgat

SEQ ID NO: 12892 - RNA, 20 nt, synthetic construct
  source 1..20: mol_type = other RNA
aagaggttaaaaccacaaac

SEQ ID NO: 12893 - RNA, 20 nt, synthetic construct
  source 1..20: mol_type = other RNA
aagagtaatggttggccgag

SEQ ID NO: 12894 - RNA, 20 nt, synthetic construct
  source 1..20: mol_type = other RNA
aagagtagattcccccttat

SEQ ID NO: 12895 - RNA, 20 nt, synthetic construct
  source 1..20: mol_type = other RNA
aagagtatctttttcagcag

SEQ ID NO: 12896 - RNA, 20 nt, synthetic construct
  source 1..20: mol_type = other RNA
aagagtccccaactgcaaaa

SEQ ID NO: 12897 - RNA, 20 nt, synthetic construct
  source 1..20: mol_type = other RNA
aagagtctatctttgggaaa

SEQ ID NO: 12898 - RNA, 20 nt, synthetic construct
  source 1..20: mol_type = other RNA
aagagtctcatctgtcaaaa

SEQ ID NO: 12899 - RNA, 20 nt, synthetic construct
  source 1..20: mol_type = other RNA
aagagtctgcagaccaagaa

SEQ ID NO: 12900 - RNA, 20 nt, synthetic construct
  source 1..20: mol_type = other RNA
aagagtgaaaaggcaaacca

SEQ ID NO: 12901 - RNA, 20 nt, synthetic construct
  source 1..20: mol_type = other RNA
aagagtgaaatgatttcaag

SEQ ID NO: 12902 - RNA, 20 nt, synthetic construct
  source 1..20: mol_type = other RNA
aagagtgaagaaacctttct

SEQ ID NO: 12903 - RNA, 20 nt, synthetic construct
  source 1..20: mol_type = other RNA
aagagtgaagctggaccctt

SEQ ID NO: 12904 - RNA, 20 nt, synthetic construct
  source 1..20: mol_type = other RNA
aagagtgcacattccttctt

SEQ ID NO: 12905 - RNA, 20 nt, synthetic construct
  source 1..20: mol_type = other RNA
aagagtgggcaaaaaagtca

SEQ ID NO: 12906 - RNA, 20 nt, synthetic construct
  source 1..20: mol_type = other RNA
aagagtgtgctgactagtac

SEQ ID NO: 12907 - RNA, 20 nt, synthetic construct
  source 1..20: mol_type = other RNA
aagagtgtggctttaaggcg

SEQ ID NO: 12908 - RNA, 20 nt, synthetic construct
  source 1..20: mol_type = other RNA
aagagttaaaactcacaaaa

SEQ ID NO: 12909 - RNA, 20 nt, synthetic construct
  source 1..20: mol_type = other RNA
aagagttacttctggaaagt

SEQ ID NO: 12910 - RNA, 20 nt, synthetic construct
  source 1..20: mol_type = other RNA
aagagttccaactgtataaa

SEQ ID NO: 12911 - RNA, 20 nt, synthetic construct
  source 1..20: mol_type = other RNA
aagagttcccctatactgta

SEQ ID NO: 12912 - RNA, 20 nt, synthetic construct
  source 1..20: mol_type = other RNA
aagagttctgaaggctcagc

SEQ ID NO: 12913 - RNA, 20 nt, synthetic construct
  source 1..20: mol_type = other RNA
aagagttgctgacttcctgg

SEQ ID NO: 12914 - RNA, 20 nt, synthetic construct
  source 1..20: mol_type = other RNA
aagagttttatagtcttagc

SEQ ID NO: 12915 - RNA, 20 nt, synthetic construct
  source 1..20: mol_type = other RNA
aagataaaggtaaggaaacc

SEQ ID NO: 12916 - RNA, 20 nt, synthetic construct
  source 1..20: mol_type = other RNA
aagataaatcagaaactgac

SEQ ID NO: 12917 - RNA, 20 nt, synthetic construct
  source 1..20: mol_type = other RNA
aagataaatccaacgaccgg

SEQ ID NO: 12918 - RNA, 20 nt, synthetic construct
  source 1..20: mol_type = other RNA
aagataagtagaaggtcaat

SEQ ID NO: 12919 - RNA, 20 nt, synthetic construct
  source 1..20: mol_type = other RNA
aagataatgctgttctctgt

SEQ ID NO: 12920 - RNA, 20 nt, synthetic construct
  source 1..20: mol_type = other RNA
aagataatgttagaattcag

SEQ ID NO: 12921 - RNA, 20 nt, synthetic construct
  source 1..20: mol_type = other RNA
aagatacacaagatctctat

SEQ ID NO: 12922 - RNA, 20 nt, synthetic construct
  source 1..20: mol_type = other RNA
aagatacgaaaatcctatat

SEQ ID NO: 12923 - RNA, 20 nt, synthetic construct
  source 1..20: mol_type = other RNA
aagatactcaacatcactag

SEQ ID NO: 12924 - RNA, 20 nt, synthetic construct
  source 1..20: mol_type = other RNA
aagatactcttaaagtttca

SEQ ID NO: 12925 - RNA, 20 nt, synthetic construct
  source 1..20: mol_type = other RNA
aagatactgcactaaactag

SEQ ID NO: 12926 - RNA, 20 nt, synthetic construct
  source 1..20: mol_type = other RNA
aagatagactcttcagaggt

SEQ ID NO: 12927 - RNA, 20 nt, synthetic construct
  source 1..20: mol_type = other RNA
aagatagccccttatcagga

SEQ ID NO: 12928 - RNA, 20 nt, synthetic construct
  source 1..20: mol_type = other RNA
aagatagtactgaccatctc

SEQ ID NO: 12929 - RNA, 20 nt, synthetic construct
  source 1..20: mol_type = other RNA
aagatataaaaatggtcaac

SEQ ID NO: 12930 - RNA, 20 nt, synthetic construct
  source 1..20: mol_type = other RNA
aagatatccacagtatgctg

SEQ ID NO: 12931 - RNA, 20 nt, synthetic construct
  source 1..20: mol_type = other RNA
aagatatgggttattcaccc

SEQ ID NO: 12932 - RNA, 20 nt, synthetic construct
  source 1..20: mol_type = other RNA
aagatatgtgtaggaaggaa

SEQ ID NO: 12933 - RNA, 20 nt, synthetic construct
  source 1..20: mol_type = other RNA
aagatattagctacaaaagg

SEQ ID NO: 12934 - RNA, 20 nt, synthetic construct
  source 1..20: mol_type = other RNA
aagatcaaatgactatgaat

SEQ ID NO: 12935 - RNA, 20 nt, synthetic construct
  source 1..20: mol_type = other RNA
aagatcaagctcgccgtctc

SEQ ID NO: 12936 - RNA, 20 nt, synthetic construct
  source 1..20: mol_type = other RNA
aagatcagtaaaattccctt

SEQ ID NO: 12937 - RNA, 20 nt, synthetic construct
  source 1..20: mol_type = other RNA
aagatcatacacctggatca

SEQ ID NO: 12938 - RNA, 20 nt, synthetic construct
  source 1..20: mol_type = other RNA
aagatcatgggttttaatat

SEQ ID NO: 12939 - RNA, 20 nt, synthetic construct
  source 1..20: mol_type = other RNA
aagatcatttagtaagtgtg

SEQ ID NO: 12940 - RNA, 20 nt, synthetic construct
  source 1..20: mol_type = other RNA
aagatcatttcaaaccaatg

SEQ ID NO: 12941 - RNA, 20 nt, synthetic construct
  source 1..20: mol_type = other RNA
aagatcatttcacttgatta

SEQ ID NO: 12942 - RNA, 20 nt, synthetic construct
  source 1..20: mol_type = other RNA
aagatccaagtattgtatca

SEQ ID NO: 12943 - RNA, 20 nt, synthetic construct
  source 1..20: mol_type = other RNA
aagatcctggattgctagtg

SEQ ID NO: 12944 - RNA, 20 nt, synthetic construct
  source 1..20: mol_type = other RNA
aagatctcaaacagcctaat

SEQ ID NO: 12945 - RNA, 20 nt, synthetic construct
  source 1..20: mol_type = other RNA
aagatctcattttgaaaaac

SEQ ID NO: 12946 - RNA, 20 nt, synthetic construct
  source 1..20: mol_type = other RNA
aagatctctatgcagaaatc

SEQ ID NO: 12947 - RNA, 20 nt, synthetic construct
  source 1..20: mol_type = other RNA
aagatctgtctttggcccat

SEQ ID NO: 12948 - RNA, 20 nt, synthetic construct
  source 1..20: mol_type = other RNA
aagatctgtggactttaggc

SEQ ID NO: 12949 - RNA, 20 nt, synthetic construct
  source 1..20: mol_type = other RNA
aagatctgtttttcaaaatg

SEQ ID NO: 12950 - RNA, 20 nt, synthetic construct
  source 1..20: mol_type = other RNA
aagatgaagtatagaaagga

SEQ ID NO: 12951 - RNA, 20 nt, synthetic construct
  source 1..20: mol_type = other RNA
aagatgaatctgcaactatc

SEQ ID NO: 12952 - RNA, 20 nt, synthetic construct
  source 1..20: mol_type = other RNA
aagatgacatttgcttttcc

SEQ ID NO: 12953 - RNA, 20 nt, synthetic construct
  source 1..20: mol_type = other RNA
aagatgaggtctcagccttt

SEQ ID NO: 12954 - RNA, 20 nt, synthetic construct
  source 1..20: mol_type = other RNA
aagatgatctaaatggtgtg

SEQ ID NO: 12955 - RNA, 20 nt, synthetic construct
  source 1..20: mol_type = other RNA
aagatgatgaacaaaggcag

SEQ ID NO: 12956 - RNA, 20 nt, synthetic construct
  source 1..20: mol_type = other RNA
aagatgcagaaaaagcattt

SEQ ID NO: 12957 - RNA, 20 nt, synthetic construct
  source 1..20: mol_type = other RNA
aagatgcagttgcttactct

SEQ ID NO: 12958 - RNA, 20 nt, synthetic construct
  source 1..20: mol_type = other RNA
aagatgcataagttctagag

SEQ ID NO: 12959 - RNA, 20 nt, synthetic construct
  source 1..20: mol_type = other RNA
aagatgcataccaagcccgg

SEQ ID NO: 12960 - RNA, 20 nt, synthetic construct
  source 1..20: mol_type = other RNA
aagatgcattctgtcacata

SEQ ID NO: 12961 - RNA, 20 nt, synthetic construct
  source 1..20: mol_type = other RNA
aagatgccacaaatggagtg

SEQ ID NO: 12962 - RNA, 20 nt, synthetic construct
  source 1..20: mol_type = other RNA
aagatgccatttataatagc

SEQ ID NO: 12963 - RNA, 20 nt, synthetic construct
  source 1..20: mol_type = other RNA
aagatgctattcaagacaag

SEQ ID NO: 12964 - RNA, 20 nt, synthetic construct
  source 1..20: mol_type = other RNA
aagatgctccctctatggca

SEQ ID NO: 12965 - RNA, 20 nt, synthetic construct
  source 1..20: mol_type = other RNA
aagatgctgaacttgtcaca

SEQ ID NO: 12966 - RNA, 20 nt, synthetic construct
  source 1..20: mol_type = other RNA
aagatgctggtggagtattc

SEQ ID NO: 12967 - RNA, 20 nt, synthetic construct
  source 1..20: mol_type = other RNA
aagatggaaagtggactatg

SEQ ID NO: 12968 - RNA, 20 nt, synthetic construct
  source 1..20: mol_type = other RNA
aagatggagttacgctgcca

SEQ ID NO: 12969 - RNA, 20 nt, synthetic construct
  source 1..20: mol_type = other RNA
aagatggatttttctgtttc

SEQ ID NO: 12970 - RNA, 20 nt, synthetic construct
  source 1..20: mol_type = other RNA
aagatggcaaacagactgag

SEQ ID NO: 12971 - RNA, 20 nt, synthetic construct
  source 1..20: mol_type = other RNA
aagatggcaagtttccattc

SEQ ID NO: 12972 - RNA, 20 nt, synthetic construct
  source 1..20: mol_type = other RNA
aagatggcctccctcactaa

SEQ ID NO: 12973 - RNA, 20 nt, synthetic construct
  source 1..20: mol_type = other RNA
aagatgggacttcactagtg

SEQ ID NO: 12974 - RNA, 20 nt, synthetic construct
  source 1..20: mol_type = other RNA
aagatggttggaagtttctg

SEQ ID NO: 12975 - RNA, 20 nt, synthetic construct
  source 1..20: mol_type = other RNA
aagatgtcaacattaaggga

SEQ ID NO: 12976 - RNA, 20 nt, synthetic construct
  source 1..20: mol_type = other RNA
aagatgtcttttaacttgct

SEQ ID NO: 12977 - RNA, 20 nt, synthetic construct
  source 1..20: mol_type = other RNA
aagatgtgtaccaaaagtcc

SEQ ID NO: 12978 - RNA, 20 nt, synthetic construct
  source 1..20: mol_type = other RNA
aagatgttttcagttgcatg

SEQ ID NO: 12979 - RNA, 20 nt, synthetic construct
  source 1..20: mol_type = other RNA
aagattaaatacagagcaca

SEQ ID NO: 12980 - RNA, 20 nt, synthetic construct
  source 1..20: mol_type = other RNA
aagattaagcacatctgtct

SEQ ID NO: 12981 - RNA, 20 nt, synthetic construct
  source 1..20: mol_type = other RNA
aagattaatccttgtggtct

SEQ ID NO: 12982 - RNA, 20 nt, synthetic construct
  source 1..20: mol_type = other RNA
aagattaatcttgcaaaaca

SEQ ID NO: 12983 - RNA, 20 nt, synthetic construct
  source 1..20: mol_type = other RNA
aagattaatcttgtgaattg

SEQ ID NO: 12984 - RNA, 20 nt, synthetic construct
  source 1..20: mol_type = other RNA
aagattactggatacaaggt

SEQ ID NO: 12985 - RNA, 20 nt, synthetic construct
  source 1..20: mol_type = other RNA
aagattagaaaattagctga

SEQ ID NO: 12986 - RNA, 20 nt, synthetic construct
  source 1..20: mol_type = other RNA
aagattatgttccacatgtt

SEQ ID NO: 12987 - RNA, 20 nt, synthetic construct
  source 1..20: mol_type = other RNA
aagattcaacaaaactgggg

SEQ ID NO: 12988 - RNA, 20 nt, synthetic construct
  source 1..20: mol_type = other RNA
aagattccgtctcaaaaaat

SEQ ID NO: 12989 - RNA, 20 nt, synthetic construct
  source 1..20: mol_type = other RNA
aagattctctttagggaaga

SEQ ID NO: 12990 - RNA, 20 nt, synthetic construct
  source 1..20: mol_type = other RNA
aagattctgtctctacaaaa

SEQ ID NO: 12991 - RNA, 20 nt, synthetic construct
  source 1..20: mol_type = other RNA
aagattcttgtcatgaatga

SEQ ID NO: 12992 - RNA, 20 nt, synthetic construct
  source 1..20: mol_type = other RNA
aagattgaaaatggtttagg

SEQ ID NO: 12993 - RNA, 20 nt, synthetic construct
  source 1..20: mol_type = other RNA
aagattgagtcagtaatcaa

SEQ ID NO: 12994 - RNA, 20 nt, synthetic construct
  source 1..20: mol_type = other RNA
aagattggctttagatttat

SEQ ID NO: 12995 - RNA, 20 nt, synthetic construct
  source 1..20: mol_type = other RNA
aagattgtggtccagaaaaa

SEQ ID NO: 12996 - RNA, 20 nt, synthetic construct
  source 1..20: mol_type = other RNA
aagattgtgtgatttcatat

SEQ ID NO: 12997 - RNA, 20 nt, synthetic construct
  source 1..20: mol_type = other RNA
aagatttacccctacttttt

SEQ ID NO: 12998 - RNA, 20 nt, synthetic construct
  source 1..20: mol_type = other RNA
aagatttactaaactgaacg

SEQ ID NO: 12999 - RNA, 20 nt, synthetic construct
  source 1..20: mol_type = other RNA
aagatttcataggcatctct

SEQ ID NO: 13000 - RNA, 20 nt, synthetic construct
  source 1..20: mol_type = other RNA
aagatttctactggggtctt

SEQ ID NO: 13001 - RNA, 20 nt, synthetic construct
  source 1..20: mol_type = other RNA
aagatttgccaatcaataat

SEQ ID NO: 13002 - RNA, 20 nt, synthetic construct
  source 1..20: mol_type = other RNA
aagattttaggtcatttttc

SEQ ID NO: 13003 - RNA, 20 nt, synthetic construct
  source 1..20: mol_type = other RNA
aagattttcccaatctctgg

SEQ ID NO: 13004 - RNA, 20 nt, synthetic construct
  source 1..20: mol_type = other RNA
aagattttttgttgttggtt

SEQ ID NO: 13005 - RNA, 20 nt, synthetic construct
  source 1..20: mol_type = other RNA
aagcaaaacatatgtcagat

SEQ ID NO: 13006 - RNA, 20 nt, synthetic construct
  source 1..20: mol_type = other RNA
aagcaaaagcaaaattctaa

SEQ ID NO: 13007 - RNA, 20 nt, synthetic construct
  source 1..20: mol_type = other RNA
aagcaaaatggaagtgctgg

SEQ ID NO: 13008 - RNA, 20 nt, synthetic construct
  source 1..20: mol_type = other RNA
aagcaaaattctaacaagaa

SEQ ID NO: 13009 - RNA, 20 nt, synthetic construct
  source 1..20: mol_type = other RNA
aagcaaaattgacaaaccct

SEQ ID NO: 13010 - RNA, 20 nt, synthetic construct
  source 1..20: mol_type = other RNA
aagcaaaattttaaatcagc

SEQ ID NO: 13011 - RNA, 20 nt, synthetic construct
  source 1..20: mol_type = other RNA
aagcaaaccagacatttctc

SEQ ID NO: 13012 - RNA, 20 nt, synthetic construct
  source 1..20: mol_type = other RNA
aagcaaacgtgcacacccag

SEQ ID NO: 13013 - RNA, 20 nt, synthetic construct
  source 1..20: mol_type = other RNA
aagcaaagatatgggttatt

SEQ ID NO: 13014 - RNA, 20 nt, synthetic construct
  source 1..20: mol_type = other RNA
aagcaaaggattcgggggag

SEQ ID NO: 13015 - RNA, 20 nt, synthetic construct
  source 1..20: mol_type = other RNA
aagcaaatgtcatcttctct

SEQ ID NO: 13016 - RNA, 20 nt, synthetic construct
  source 1..20: mol_type = other RNA
aagcaaatgtgactagaaga

SEQ ID NO: 13017 - RNA, 20 nt, synthetic construct
  source 1..20: mol_type = other RNA
aagcaacaccagatactcat

SEQ ID NO: 13018 - RNA, 20 nt, synthetic construct
  source 1..20: mol_type = other RNA
aagcaacactaaagatttgc

SEQ ID NO: 13019 - RNA, 20 nt, synthetic construct
  source 1..20: mol_type = other RNA
aagcaacagaaatttattgt

SEQ ID NO: 13020 - RNA, 20 nt, synthetic construct
  source 1..20: mol_type = other RNA
aagcaacaggaagaggcagc

SEQ ID NO: 13021 - RNA, 20 nt, synthetic construct
  source 1..20: mol_type = other RNA
aagcaacatgctaagtgttt

SEQ ID NO: 13022 - RNA, 20 nt, synthetic construct
  source 1..20: mol_type = other RNA
aagcaacctcatttgcagag

SEQ ID NO: 13023 - RNA, 20 nt, synthetic construct
  source 1..20: mol_type = other RNA
aagcaaccttttaggtgccc

SEQ ID NO: 13024 - RNA, 20 nt, synthetic construct
  source 1..20: mol_type = other RNA
aagcaactgcatcttctttt

SEQ ID NO: 13025 - RNA, 20 nt, synthetic construct
  source 1..20: mol_type = other RNA
aagcaacttgaaggcaatgt

SEQ ID NO: 13026 - RNA, 20 nt, synthetic construct
  source 1..20: mol_type = other RNA
aagcaacttgatcagggatt

SEQ ID NO: 13027 - RNA, 20 nt, synthetic construct
  source 1..20: mol_type = other RNA
aagcaagccttggcaagggg

SEQ ID NO: 13028 - RNA, 20 nt, synthetic construct
  source 1..20: mol_type = other RNA
aagcaaggaagggcttgatc

SEQ ID NO: 13029 - RNA, 20 nt, synthetic construct
  source 1..20: mol_type = other RNA
aagcaagtaaaagaagatgc

SEQ ID NO: 13030 - RNA, 20 nt, synthetic construct
  source 1..20: mol_type = other RNA
aagcaagtatgagccactag

SEQ ID NO: 13031 - RNA, 20 nt, synthetic construct
  source 1..20: mol_type = other RNA
aagcaagtgtggtggtctca

SEQ ID NO: 13032 - RNA, 20 nt, synthetic construct
  source 1..20: mol_type = other RNA
aagcaagttaaaagacatct

SEQ ID NO: 13033 - RNA, 20 nt, synthetic construct
  source 1..20: mol_type = other RNA
aagcaagttacatgcttagc

SEQ ID NO: 13034 - RNA, 20 nt, synthetic construct
  source 1..20: mol_type = other RNA
aagcaatctgaaacgacctt

SEQ ID NO: 13035 - RNA, 20 nt, synthetic construct
  source 1..20: mol_type = other RNA
aagcaattattagttgtact

SEQ ID NO: 13036 - RNA, 20 nt, synthetic construct
  source 1..20: mol_type = other RNA
aagcacaaacctggcaatac

SEQ ID NO: 13037 - RNA, 20 nt, synthetic construct
  source 1..20: mol_type = other RNA
aagcacaaccactgatggaa

SEQ ID NO: 13038 - RNA, 20 nt, synthetic construct
  source 1..20: mol_type = other RNA
aagcacaagcacagagtcag

SEQ ID NO: 13039 - RNA, 20 nt, synthetic construct
  source 1..20: mol_type = other RNA
aagcacacagtttgagaagc

SEQ ID NO: 13040 - RNA, 20 nt, synthetic construct
  source 1..20: mol_type = other RNA
aagcacacatgaacctgcat

SEQ ID NO: 13041 - RNA, 20 nt, synthetic construct
  source 1..20: mol_type = other RNA
aagcacaccaaggtttctct

SEQ ID NO: 13042 - RNA, 20 nt, synthetic construct
  source 1..20: mol_type = other RNA
aagcacactttccttggaga

SEQ ID NO: 13043 - RNA, 20 nt, synthetic construct
  source 1..20: mol_type = other RNA
aagcacagaattactatatg

SEQ ID NO: 13044 - RNA, 20 nt, synthetic construct
  source 1..20: mol_type = other RNA
aagcacagactgtgccttga

SEQ ID NO: 13045 - RNA, 20 nt, synthetic construct
  source 1..20: mol_type = other RNA
aagcacagagtcagaaaatt

SEQ ID NO: 13046 - RNA, 20 nt, synthetic construct
  source 1..20: mol_type = other RNA
aagcacaggcatcggccggg

SEQ ID NO: 13047 - RNA, 20 nt, synthetic construct
  source 1..20: mol_type = other RNA
aagcacaggcatctctctaa

SEQ ID NO: 13048 - RNA, 20 nt, synthetic construct
  source 1..20: mol_type = other RNA
aagcacagtctctgcagagc

SEQ ID NO: 13049 - RNA, 20 nt, synthetic construct
  source 1..20: mol_type = other RNA
aagcacataaaaaaggaatc

SEQ ID NO: 13050 - RNA, 20 nt, synthetic construct
  source 1..20: mol_type = other RNA
aagcacatctgtcttgtgca

SEQ ID NO: 13051 - RNA, 20 nt, synthetic construct
  source 1..20: mol_type = other RNA
aagcacatggtgataactgg

SEQ ID NO: 13052 - RNA, 20 nt, synthetic construct
  source 1..20: mol_type = other RNA
aagcacattccttccgacct

SEQ ID NO: 13053 - RNA, 20 nt, synthetic construct
  source 1..20: mol_type = other RNA
aagcaccaacagatcctcac

SEQ ID NO: 13054 - RNA, 20 nt, synthetic construct
  source 1..20: mol_type = other RNA
aagcaccaacccttgttgga

SEQ ID NO: 13055 - RNA, 20 nt, synthetic construct
  source 1..20: mol_type = other RNA
aagcaccactagagtattac

SEQ ID NO: 13056 - RNA, 20 nt, synthetic construct
  source 1..20: mol_type = other RNA
aagcaccactgagagggaag

SEQ ID NO: 13057 - RNA, 20 nt, synthetic construct
  source 1..20: mol_type = other RNA
aagcaccacttcgagaaggg

SEQ ID NO: 13058 - RNA, 20 nt, synthetic construct
  source 1..20: mol_type = other RNA
aagcaccagggcctctgaag

SEQ ID NO: 13059 - RNA, 20 nt, synthetic construct
  source 1..20: mol_type = other RNA
aagcaccagttatcaccatg

SEQ ID NO: 13060 - RNA, 20 nt, synthetic construct
  source 1..20: mol_type = other RNA
aagcacctaccataacaaaa

SEQ ID NO: 13061 - RNA, 20 nt, synthetic construct
  source 1..20: mol_type = other RNA
aagcacctgtataaataaaa

SEQ ID NO: 13062 - RNA, 20 nt, synthetic construct
  source 1..20: mol_type = other RNA
aagcacgttagcatcaccat

SEQ ID NO: 13063 - RNA, 20 nt, synthetic construct
  source 1..20: mol_type = other RNA
aagcacgtttgatctggtca

SEQ ID NO: 13064 - RNA, 20 nt, synthetic construct
  source 1..20: mol_type = other RNA
aagcactatccacatttggt

SEQ ID NO: 13065 - RNA, 20 nt, synthetic construct
  source 1..20: mol_type = other RNA
aagcactgcgccaagcaggg

SEQ ID NO: 13066 - RNA, 20 nt, synthetic construct
  source 1..20: mol_type = other RNA
aagcactggtaaggaaacag

SEQ ID NO: 13067 - RNA, 20 nt, synthetic construct
  source 1..20: mol_type = other RNA
aagcactttttaccaagttg

SEQ ID NO: 13068 - RNA, 20 nt, synthetic construct
  source 1..20: mol_type = other RNA
aagcagaaaatcagtgtgaa

SEQ ID NO: 13069 - RNA, 20 nt, synthetic construct
  source 1..20: mol_type = other RNA
aagcagaaagttactatttt

SEQ ID NO: 13070 - RNA, 20 nt, synthetic construct
  source 1..20: mol_type = other RNA
aagcagaaatacagaccgat

SEQ ID NO: 13071 - RNA, 20 nt, synthetic construct
  source 1..20: mol_type = other RNA
aagcagaaatgacaagtaaa

SEQ ID NO: 13072 - RNA, 20 nt, synthetic construct
  source 1..20: mol_type = other RNA
aagcagaaatgagttccagt

SEQ ID NO: 13073 - RNA, 20 nt, synthetic construct
  source 1..20: mol_type = other RNA
aagcagaactaagaccccag

SEQ ID NO: 13074 - RNA, 20 nt, synthetic construct
  source 1..20: mol_type = other RNA
aagcagaatgtccatcagga

SEQ ID NO: 13075 - RNA, 20 nt, synthetic construct
  source 1..20: mol_type = other RNA
aagcagaattcaaaaacact

SEQ ID NO: 13076 - RNA, 20 nt, synthetic construct
  source 1..20: mol_type = other RNA
aagcagacagaaagacaggg

SEQ ID NO: 13077 - RNA, 20 nt, synthetic construct
  source 1..20: mol_type = other RNA
aagcagagaaactggaatca

SEQ ID NO: 13078 - RNA, 20 nt, synthetic construct
  source 1..20: mol_type = other RNA
aagcagagagagaagatgac

SEQ ID NO: 13079 - RNA, 20 nt, synthetic construct
  source 1..20: mol_type = other RNA
aagcagatctgctgtaagct

SEQ ID NO: 13080 - RNA, 20 nt, synthetic construct
  source 1..20: mol_type = other RNA
aagcagcaagggtggctggc

SEQ ID NO: 13081 - RNA, 20 nt, synthetic construct
  source 1..20: mol_type = other RNA
aagcagctacctgttgattg

SEQ ID NO: 13082 - RNA, 20 nt, synthetic construct
  source 1..20: mol_type = other RNA
aagcaggaactcatattagt

SEQ ID NO: 13083 - RNA, 20 nt, synthetic construct
  source 1..20: mol_type = other RNA
aagcaggccctgagaagtca

SEQ ID NO: 13084 - RNA, 20 nt, synthetic construct
  source 1..20: mol_type = other RNA
aagcaggccttcgaggcatc

SEQ ID NO: 13085 - RNA, 20 nt, synthetic construct
  source 1..20: mol_type = other RNA
aagcaggctttttacccgga

SEQ ID NO: 13086 - RNA, 20 nt, synthetic construct
  source 1..20: mol_type = other RNA
aagcagggaaatggagggcc

SEQ ID NO: 13087 - RNA, 20 nt, synthetic construct
  source 1..20: mol_type = other RNA
aagcagggacgggcggggga

SEQ ID NO: 13088 - RNA, 20 nt, synthetic construct
  source 1..20: mol_type = other RNA
aagcagggactcccatatct

SEQ ID NO: 13089 - RNA, 20 nt, synthetic construct
  source 1..20: mol_type = other RNA
aagcagggaggggtccccag

SEQ ID NO: 13090 - RNA, 20 nt, synthetic construct
  source 1..20: mol_type = other RNA
aagcaggtcatgactttttt

SEQ ID NO: 13091 - RNA, 20 nt, synthetic construct
  source 1..20: mol_type = other RNA
aagcaggttcattttaataa

SEQ ID NO: 13092 - RNA, 20 nt, synthetic construct
  source 1..20: mol_type = other RNA
aagcaggttgcattaatgct

SEQ ID NO: 13093 - RNA, 20 nt, synthetic construct
  source 1..20: mol_type = other RNA
aagcagtaaatatactgact

SEQ ID NO: 13094 - RNA, 20 nt, synthetic construct
  source 1..20: mol_type = other RNA
aagcagtcctgccttggcct

SEQ ID NO: 13095 - RNA, 20 nt, synthetic construct
  source 1..20: mol_type = other RNA
aagcagttgatgcaatttgt

SEQ ID NO: 13096 - RNA, 20 nt, synthetic construct
  source 1..20: mol_type = other RNA
aagcatagtttgagtatttc

SEQ ID NO: 13097 - RNA, 20 nt, synthetic construct
  source 1..20: mol_type = other RNA
aagcatatgaatctagaaag

SEQ ID NO: 13098 - RNA, 20 nt, synthetic construct
  source 1..20: mol_type = other RNA
aagcatcagagctttgttat

SEQ ID NO: 13099 - RNA, 20 nt, synthetic construct
  source 1..20: mol_type = other RNA
aagcatcccatatggaggca

SEQ ID NO: 13100 - RNA, 20 nt, synthetic construct
  source 1..20: mol_type = other RNA
aagcatcgtgaagtctttat

SEQ ID NO: 13101 - RNA, 20 nt, synthetic construct
  source 1..20: mol_type = other RNA
aagcatctgatacacttcta

SEQ ID NO: 13102 - RNA, 20 nt, synthetic construct
  source 1..20: mol_type = other RNA
aagcatgagatactacgcct

SEQ ID NO: 13103 - RNA, 20 nt, synthetic construct
  source 1..20: mol_type = other RNA
aagcatgagtatctggtgtt

SEQ ID NO: 13104 - RNA, 20 nt, synthetic construct
  source 1..20: mol_type = other RNA
aagcatggtggtaggtgtgt

SEQ ID NO: 13105 - RNA, 20 nt, synthetic construct
  source 1..20: mol_type = other RNA
aagcatgtaacttgcttagg

SEQ ID NO: 13106 - RNA, 20 nt, synthetic construct
  source 1..20: mol_type = other RNA
aagcatgtggccaggaggag

SEQ ID NO: 13107 - RNA, 20 nt, synthetic construct
  source 1..20: mol_type = other RNA
aagcattaatgcaacctgct

SEQ ID NO: 13108 - RNA, 20 nt, synthetic construct
  source 1..20: mol_type = other RNA
aagcattgggagctttcatt

SEQ ID NO: 13109 - RNA, 20 nt, synthetic construct
  source 1..20: mol_type = other RNA
aagcattttccggttgtata

SEQ ID NO: 13110 - RNA, 20 nt, synthetic construct
  source 1..20: mol_type = other RNA
aagcattttctaaattgaac

SEQ ID NO: 13111 - RNA, 20 nt, synthetic construct
  source 1..20: mol_type = other RNA
aagccaaattaataaaatgg

SEQ ID NO: 13112 - RNA, 20 nt, synthetic construct
  source 1..20: mol_type = other RNA
aagccaagagcgaggcctgg

SEQ ID NO: 13113 - RNA, 20 nt, synthetic construct
  source 1..20: mol_type = other RNA
aagccaatatccctgataat

SEQ ID NO: 13114 - RNA, 20 nt, synthetic construct
  source 1..20: mol_type = other RNA
aagccaatcttcccaatcct

SEQ ID NO: 13115 - RNA, 20 nt, synthetic construct
  source 1..20: mol_type = other RNA
aagccacacagtacaaggct

SEQ ID NO: 13116 - RNA, 20 nt, synthetic construct
  source 1..20: mol_type = other RNA
aagccacactcttggtcttt

SEQ ID NO: 13117 - RNA, 20 nt, synthetic construct
  source 1..20: mol_type = other RNA
aagccacagcgtggaatggt

SEQ ID NO: 13118 - RNA, 20 nt, synthetic construct
  source 1..20: mol_type = other RNA
aagccacatgtggttattga

SEQ ID NO: 13119 - RNA, 20 nt, synthetic construct
  source 1..20: mol_type = other RNA
aagccacattagccactctg

SEQ ID NO: 13120 - RNA, 20 nt, synthetic construct
  source 1..20: mol_type = other RNA
aagccaccgcactcagcctg

SEQ ID NO: 13121 - RNA, 20 nt, synthetic construct
  source 1..20: mol_type = other RNA
aagccactgcattcatccag

SEQ ID NO: 13122 - RNA, 20 nt, synthetic construct
  source 1..20: mol_type = other RNA
aagccagcacctaacaatga

SEQ ID NO: 13123 - RNA, 20 nt, synthetic construct
  source 1..20: mol_type = other RNA
aagccaggctttcccagggt

SEQ ID NO: 13124 - RNA, 20 nt, synthetic construct
  source 1..20: mol_type = other RNA
aagccagggtctgtctcacc

SEQ ID NO: 13125 - RNA, 20 nt, synthetic construct
  source 1..20: mol_type = other RNA
aagccagtcactaaaaatca

SEQ ID NO: 13126 - RNA, 20 nt, synthetic construct
  source 1..20: mol_type = other RNA
aagccagtccttgtgatcta

SEQ ID NO: 13127 - RNA, 20 nt, synthetic construct
  source 1..20: mol_type = other RNA
aagccatagtgtaaactaaa

SEQ ID NO: 13128 - RNA, 20 nt, synthetic construct
  source 1..20: mol_type = other RNA
aagccatcctccagccttaa

SEQ ID NO: 13129 - RNA, 20 nt, synthetic construct
  source 1..20: mol_type = other RNA
aagccatctaattcacattt

SEQ ID NO: 13130 - RNA, 20 nt, synthetic construct
  source 1..20: mol_type = other RNA
aagccatgtttctcctgcat

SEQ ID NO: 13131 - RNA, 20 nt, synthetic construct
  source 1..20: mol_type = other RNA
aagccatttatcagcaccaa

SEQ ID NO: 13132 - RNA, 20 nt, synthetic construct
  source 1..20: mol_type = other RNA
aagccatttcaggttttcga

SEQ ID NO: 13133 - RNA, 20 nt, synthetic construct
  source 1..20: mol_type = other RNA
aagcccaacctgattagagg

SEQ ID NO: 13134 - RNA, 20 nt, synthetic construct
  source 1..20: mol_type = other RNA
aagcccaacttcacaccatt

SEQ ID NO: 13135 - RNA, 20 nt, synthetic construct
  source 1..20: mol_type = other RNA
aagcccaactttttcttttt

SEQ ID NO: 13136 - RNA, 20 nt, synthetic construct
  source 1..20: mol_type = other RNA
aagcccaatctacaggtcgg

SEQ ID NO: 13137 - RNA, 20 nt, synthetic construct
  source 1..20: mol_type = other RNA
aagcccaccagcataagacc

SEQ ID NO: 13138 - RNA, 20 nt, synthetic construct
  source 1..20: mol_type = other RNA
aagcccagagaggctaggtg

SEQ ID NO: 13139 - RNA, 20 nt, synthetic construct
  source 1..20: mol_type = other RNA
aagcccagccgcggactccg

SEQ ID NO: 13140 - RNA, 20 nt, synthetic construct
  source 1..20: mol_type = other RNA
aagccccaaaccatcaagtg

SEQ ID NO: 13141 - RNA, 20 nt, synthetic construct
  source 1..20: mol_type = other RNA
aagccccagttctgcgcaat

SEQ ID NO: 13142 - RNA, 20 nt, synthetic construct
  source 1..20: mol_type = other RNA
aagccccattgtacacatat

SEQ ID NO: 13143 - RNA, 20 nt, synthetic construct
  source 1..20: mol_type = other RNA
aagcccgccgctcgcaggtg

SEQ ID NO: 13144 - RNA, 20 nt, synthetic construct
  source 1..20: mol_type = other RNA
aagccctcaggaccaggcag

SEQ ID NO: 13145 - RNA, 20 nt, synthetic construct
  source 1..20: mol_type = other RNA
aagccctctaagtcagcctg

SEQ ID NO: 13146 - RNA, 20 nt, synthetic construct
  source 1..20: mol_type = other RNA
aagccctgcagccagatttg

SEQ ID NO: 13147 - RNA, 20 nt, synthetic construct
  source 1..20: mol_type = other RNA
aagccctgccttaaaacatt

SEQ ID NO: 13148 - RNA, 20 nt, synthetic construct
  source 1..20: mol_type = other RNA
aagcccttccttgcttgtct

SEQ ID NO: 13149 - RNA, 20 nt, synthetic construct
  source 1..20: mol_type = other RNA
aagcccttgagtatttttga

SEQ ID NO: 13150 - RNA, 20 nt, synthetic construct
  source 1..20: mol_type = other RNA
aagccgcaaataatcattct

SEQ ID NO: 13151 - RNA, 20 nt, synthetic construct
  source 1..20: mol_type = other RNA
aagccggattcctttcaaag

SEQ ID NO: 13152 - RNA, 20 nt, synthetic construct
  source 1..20: mol_type = other RNA
aagccgttccatcagagagg

SEQ ID NO: 13153 - RNA, 20 nt, synthetic construct
  source 1..20: mol_type = other RNA
aagcctacctcccttcacaa

SEQ ID NO: 13154 - RNA, 20 nt, synthetic construct
  source 1..20: mol_type = other RNA
aagcctactgctctgtcctg

SEQ ID NO: 13155 - RNA, 20 nt, synthetic construct
  source 1..20: mol_type = other RNA
aagcctagagattaggcaga

SEQ ID NO: 13156 - RNA, 20 nt, synthetic construct
  source 1..20: mol_type = other RNA
aagcctatgtaagacaatgt

SEQ ID NO: 13157 - RNA, 20 nt, synthetic construct
  source 1..20: mol_type = other RNA
aagcctcaaaatttagtaag

SEQ ID NO: 13158 - RNA, 20 nt, synthetic construct
  source 1..20: mol_type = other RNA
aagcctcaaacgaaccaatt

SEQ ID NO: 13159 - RNA, 20 nt, synthetic construct
  source 1..20: mol_type = other RNA
aagcctcatttgaactttcc

SEQ ID NO: 13160 - RNA, 20 nt, synthetic construct
  source 1..20: mol_type = other RNA
aagcctctcaacacttcagt

SEQ ID NO: 13161 - RNA, 20 nt, synthetic construct
  source 1..20: mol_type = other RNA
aagcctctctgatggaacgg

SEQ ID NO: 13162 - RNA, 20 nt, synthetic construct
  source 1..20: mol_type = other RNA
aagcctctgtggaccatgtt

SEQ ID NO: 13163 - RNA, 20 nt, synthetic construct
  source 1..20: mol_type = other RNA
aagcctcttcagaagaggat

SEQ ID NO: 13164 - RNA, 20 nt, synthetic construct
  source 1..20: mol_type = other RNA
aagcctgataagctcccagc

SEQ ID NO: 13165 - RNA, 20 nt, synthetic construct
  source 1..20: mol_type = other RNA
aagcctgcttcagcctaagc

SEQ ID NO: 13166 - RNA, 20 nt, synthetic construct
  source 1..20: mol_type = other RNA
aagcctggctttagatggta

SEQ ID NO: 13167 - RNA, 20 nt, synthetic construct
  source 1..20: mol_type = other RNA
aagcctgtgacagtatgtca

SEQ ID NO: 13168 - RNA, 20 nt, synthetic construct
  source 1..20: mol_type = other RNA
aagcctgtggaggcagtacc

SEQ ID NO: 13169 - RNA, 20 nt, synthetic construct
  source 1..20: mol_type = other RNA
aagccttaaaagtgctgcag

SEQ ID NO: 13170 - RNA, 20 nt, synthetic construct
  source 1..20: mol_type = other RNA
aagccttcccctgctgttcc

SEQ ID NO: 13171 - RNA, 20 nt, synthetic construct
  source 1..20: mol_type = other RNA
aagccttctctactctgcct

SEQ ID NO: 13172 - RNA, 20 nt, synthetic construct
  source 1..20: mol_type = other RNA
aagccttgaaaatatactaa

SEQ ID NO: 13173 - RNA, 20 nt, synthetic construct
  source 1..20: mol_type = other RNA
aagccttggcaaggggaatg

SEQ ID NO: 13174 - RNA, 20 nt, synthetic construct
  source 1..20: mol_type = other RNA
aagcctttattttttcttcc

SEQ ID NO: 13175 - RNA, 20 nt, synthetic construct
  source 1..20: mol_type = other RNA
aagcgctactcagctgtcac

SEQ ID NO: 13176 - RNA, 20 nt, synthetic construct
  source 1..20: mol_type = other RNA
aagcgctcttcaagcattgg

SEQ ID NO: 13177 - RNA, 20 nt, synthetic construct
  source 1..20: mol_type = other RNA
aagcgctgaagtacttcaag

SEQ ID NO: 13178 - RNA, 20 nt, synthetic construct
  source 1..20: mol_type = other RNA
aagcggcagggccgggggtt

SEQ ID NO: 13179 - RNA, 20 nt, synthetic construct
  source 1..20: mol_type = other RNA
aagcggggctgccactactt

SEQ ID NO: 13180 - RNA, 20 nt, synthetic construct
  source 1..20: mol_type = other RNA
aagcggtcaacgcacccaga

SEQ ID NO: 13181 - RNA, 20 nt, synthetic construct
  source 1..20: mol_type = other RNA
aagcgtactgtgattacaat

SEQ ID NO: 13182 - RNA, 20 nt, synthetic construct
  source 1..20: mol_type = other RNA
aagcgttggagacagcctaa

SEQ ID NO: 13183 - RNA, 20 nt, synthetic construct
  source 1..20: mol_type = other RNA
aagctaaattttcataggaa

SEQ ID NO: 13184 - RNA, 20 nt, synthetic construct
  source 1..20: mol_type = other RNA
aagctaagagttttatagtc

SEQ ID NO: 13185 - RNA, 20 nt, synthetic construct
  source 1..20: mol_type = other RNA
aagctaatcaagccgcaaat

SEQ ID NO: 13186 - RNA, 20 nt, synthetic construct
  source 1..20: mol_type = other RNA
aagctaatcccaaagtgagc

SEQ ID NO: 13187 - RNA, 20 nt, synthetic construct
  source 1..20: mol_type = other RNA
aagctaatctactttctaat

SEQ ID NO: 13188 - RNA, 20 nt, synthetic construct
  source 1..20: mol_type = other RNA
aagctacagactaatatgag

SEQ ID NO: 13189 - RNA, 20 nt, synthetic construct
  source 1..20: mol_type = other RNA
aagctacagtaatcaaacag

SEQ ID NO: 13190 - RNA, 20 nt, synthetic construct
  source 1..20: mol_type = other RNA
aagctaccatttattcctct

SEQ ID NO: 13191 - RNA, 20 nt, synthetic construct
  source 1..20: mol_type = other RNA
aagctaccctcgagtaaaaa

SEQ ID NO: 13192 - RNA, 20 nt, synthetic construct
  source 1..20: mol_type = other RNA
aagctaccctttcttgttag

SEQ ID NO: 13193 - RNA, 20 nt, synthetic construct
  source 1..20: mol_type = other RNA
aagctactattccaggatca

SEQ ID NO: 13194 - RNA, 20 nt, synthetic construct
  source 1..20: mol_type = other RNA
aagctagaagacctcaaatt

SEQ ID NO: 13195 - RNA, 20 nt, synthetic construct
  source 1..20: mol_type = other RNA
aagctatacacgttacaaaa

SEQ ID NO: 13196 - RNA, 20 nt, synthetic construct
  source 1..20: mol_type = other RNA
aagctatagctgagaagtaa

SEQ ID NO: 13197 - RNA, 20 nt, synthetic construct
  source 1..20: mol_type = other RNA
aagctatcagaattttattc

SEQ ID NO: 13198 - RNA, 20 nt, synthetic construct
  source 1..20: mol_type = other RNA
aagctatggagcactgtgag

SEQ ID NO: 13199 - RNA, 20 nt, synthetic construct
  source 1..20: mol_type = other RNA
aagctcaaaaatactcaagg

SEQ ID NO: 13200 - RNA, 20 nt, synthetic construct
  source 1..20: mol_type = other RNA
aagctcacctctggactcag

SEQ ID NO: 13201 - RNA, 20 nt, synthetic construct
  source 1..20: mol_type = other RNA
aagctcaggaccagatgact

SEQ ID NO: 13202 - RNA, 20 nt, synthetic construct
  source 1..20: mol_type = other RNA
aagctcagtgtgtttttgta

SEQ ID NO: 13203 - RNA, 20 nt, synthetic construct
  source 1..20: mol_type = other RNA
aagctcccaatgcttgaaga

SEQ ID NO: 13204 - RNA, 20 nt, synthetic construct
  source 1..20: mol_type = other RNA
aagctcccagccaaacagtt

SEQ ID NO: 13205 - RNA, 20 nt, synthetic construct
  source 1..20: mol_type = other RNA
aagctccccggatgattcta

SEQ ID NO: 13206 - RNA, 20 nt, synthetic construct
  source 1..20: mol_type = other RNA
aagctccgcctcctggtggg

SEQ ID NO: 13207 - RNA, 20 nt, synthetic construct
  source 1..20: mol_type = other RNA
aagctcgccgtctccctcgg

SEQ ID NO: 13208 - RNA, 20 nt, synthetic construct
  source 1..20: mol_type = other RNA
aagctctaataaaagctgga

SEQ ID NO: 13209 - RNA, 20 nt, synthetic construct
  source 1..20: mol_type = other RNA
aagctctaatagttcacctc

SEQ ID NO: 13210 - RNA, 20 nt, synthetic construct
  source 1..20: mol_type = other RNA
aagctctagtgagctatgat

SEQ ID NO: 13211 - RNA, 20 nt, synthetic construct
  source 1..20: mol_type = other RNA
aagctctatggcatttgagg

SEQ ID NO: 13212 - RNA, 20 nt, synthetic construct
  source 1..20: mol_type = other RNA
aagctctcaattaatgccca

SEQ ID NO: 13213 - RNA, 20 nt, synthetic construct
  source 1..20: mol_type = other RNA
aagctctgatgctttctcta

SEQ ID NO: 13214 - RNA, 20 nt, synthetic construct
  source 1..20: mol_type = other RNA
aagctgaactcctttcttac

SEQ ID NO: 13215 - RNA, 20 nt, synthetic construct
  source 1..20: mol_type = other RNA
aagctgaactctgtggagtc

SEQ ID NO: 13216 - RNA, 20 nt, synthetic construct
  source 1..20: mol_type = other RNA
aagctgatcaaggaagcttc

SEQ ID NO: 13217 - RNA, 20 nt, synthetic construct
  source 1..20: mol_type = other RNA
aagctggacccttaccttaa

SEQ ID NO: 13218 - RNA, 20 nt, synthetic construct
  source 1..20: mol_type = other RNA
aagctggactcattccaatc

SEQ ID NO: 13219 - RNA, 20 nt, synthetic construct
  source 1..20: mol_type = other RNA
aagctggagttatttgtata

SEQ ID NO: 13220 - RNA, 20 nt, synthetic construct
  source 1..20: mol_type = other RNA
aagctggcatgttggatagt

SEQ ID NO: 13221 - RNA, 20 nt, synthetic construct
  source 1..20: mol_type = other RNA
aagctgggctagagccagga

SEQ ID NO: 13222 - RNA, 20 nt, synthetic construct
  source 1..20: mol_type = other RNA
aagctggtaatacagtctga

SEQ ID NO: 13223 - RNA, 20 nt, synthetic construct
  source 1..20: mol_type = other RNA
aagctgtccttctcgtgtga

SEQ ID NO: 13224 - RNA, 20 nt, synthetic construct
  source 1..20: mol_type = other RNA
aagctgtgagtccttccagt

SEQ ID NO: 13225 - RNA, 20 nt, synthetic construct
  source 1..20: mol_type = other RNA
aagctgtggatgttggtgag

SEQ ID NO: 13226 - RNA, 20 nt, synthetic construct
  source 1..20: mol_type = other RNA
aagctgtttgagctgaaagt

SEQ ID NO: 13227 - RNA, 20 nt, synthetic construct
  source 1..20: mol_type = other RNA
aagctgttttggtaaaatgt

SEQ ID NO: 13228 - RNA, 20 nt, synthetic construct
  source 1..20: mol_type = other RNA
aagcttaagagctaagacta

SEQ ID NO: 13229 - RNA, 20 nt, synthetic construct
  source 1..20: mol_type = other RNA
aagcttaatttagatgagag

SEQ ID NO: 13230 - RNA, 20 nt, synthetic construct
  source 1..20: mol_type = other RNA
aagcttaggtcagattcctt

SEQ ID NO: 13231 - RNA, 20 nt, synthetic construct
  source 1..20: mol_type = other RNA
aagcttaggtctttgatcca

SEQ ID NO: 13232 - RNA, 20 nt, synthetic construct
  source 1..20: mol_type = other RNA
aagcttataatttctgagag

SEQ ID NO: 13233 - RNA, 20 nt, synthetic construct
  source 1..20: mol_type = other RNA
aagcttatgatcttgggaat

SEQ ID NO: 13234 - RNA, 20 nt, synthetic construct
  source 1..20: mol_type = other RNA
aagcttattaaaatgaacct

SEQ ID NO: 13235 - RNA, 20 nt, synthetic construct
  source 1..20: mol_type = other RNA
aagcttcaaaccactatcta

SEQ ID NO: 13236 - RNA, 20 nt, synthetic construct
  source 1..20: mol_type = other RNA
aagcttcacttctctgctgc

SEQ ID NO: 13237 - RNA, 20 nt, synthetic construct
  source 1..20: mol_type = other RNA
aagcttcccccctctctctt

SEQ ID NO: 13238 - RNA, 20 nt, synthetic construct
  source 1..20: mol_type = other RNA
aagcttcctaaagagagtga

SEQ ID NO: 13239 - RNA, 20 nt, synthetic construct
  source 1..20: mol_type = other RNA
aagcttcctctggctgacct

SEQ ID NO: 13240 - RNA, 20 nt, synthetic construct
  source 1..20: mol_type = other RNA
aagcttccttgatcagcttc

SEQ ID NO: 13241 - RNA, 20 nt, synthetic construct
  source 1..20: mol_type = other RNA
aagcttcgaagcaaaacata

SEQ ID NO: 13242 - RNA, 20 nt, synthetic construct
  source 1..20: mol_type = other RNA
aagcttcgacagtcccttgc

SEQ ID NO: 13243 - RNA, 20 nt, synthetic construct
  source 1..20: mol_type = other RNA
aagcttctgagcagtgtttc

SEQ ID NO: 13244 - RNA, 20 nt, synthetic construct
  source 1..20: mol_type = other RNA
aagcttgggtaggaagctga

SEQ ID NO: 13245 - RNA, 20 nt, synthetic construct
  source 1..20: mol_type = other RNA
aagctttaaactggatgaat

SEQ ID NO: 13246 - RNA, 20 nt, synthetic construct
  source 1..20: mol_type = other RNA
aagctttcagacttaactat

SEQ ID NO: 13247 - RNA, 20 nt, synthetic construct
  source 1..20: mol_type = other RNA
aagctttgtgactgtgaggg

SEQ ID NO: 13248 - RNA, 20 nt, synthetic construct
  source 1..20: mol_type = other RNA
aagcttttcatatacagatt

SEQ ID NO: 13249 - RNA, 20 nt, synthetic construct
  source 1..20: mol_type = other RNA
aagcttttctcctaagtctt

SEQ ID NO: 13250 - RNA, 20 nt, synthetic construct
  source 1..20: mol_type = other RNA
aaggaaaaaacacctaaaga

SEQ ID NO: 13251 - RNA, 20 nt, synthetic construct
  source 1..20: mol_type = other RNA
aaggaaaaaacgggttatac

SEQ ID NO: 13252 - RNA, 20 nt, synthetic construct
  source 1..20: mol_type = other RNA
aaggaaaaatctaaccctca

SEQ ID NO: 13253 - RNA, 20 nt, synthetic construct
  source 1..20: mol_type = other RNA
aaggaaaagaacacagtgtt

SEQ ID NO: 13254 - RNA, 20 nt, synthetic construct
  source 1..20: mol_type = other RNA
aaggaaaagagatctagtga

SEQ ID NO: 13255 - RNA, 20 nt, synthetic construct
  source 1..20: mol_type = other RNA
aaggaaaagtcagtaaaaaa

SEQ ID NO: 13256 - RNA, 20 nt, synthetic construct
  source 1..20: mol_type = other RNA
aaggaaacactataaatcag

SEQ ID NO: 13257 - RNA, 20 nt, synthetic construct
  source 1..20: mol_type = other RNA
aaggaaacagagttttccaa

SEQ ID NO: 13258 - RNA, 20 nt, synthetic construct
  source 1..20: mol_type = other RNA
aaggaaaccccagggatatt

SEQ ID NO: 13259 - RNA, 20 nt, synthetic construct
  source 1..20: mol_type = other RNA
aaggaaagcacgtttgatct

SEQ ID NO: 13260 - RNA, 20 nt, synthetic construct
  source 1..20: mol_type = other RNA
aaggaaagctcaggaccaga

SEQ ID NO: 13261 - RNA, 20 nt, synthetic construct
  source 1..20: mol_type = other RNA
aaggaaaggagatactggcc

SEQ ID NO: 13262 - RNA, 20 nt, synthetic construct
  source 1..20: mol_type = other RNA
aaggaaaggatggtttgatt

SEQ ID NO: 13263 - RNA, 20 nt, synthetic construct
  source 1..20: mol_type = other RNA
aaggaaagtaactgttggca

SEQ ID NO: 13264 - RNA, 20 nt, synthetic construct
  source 1..20: mol_type = other RNA
aaggaaagtgtgcttgggct

SEQ ID NO: 13265 - RNA, 20 nt, synthetic construct
  source 1..20: mol_type = other RNA
aaggaaataagaaggtttgt

SEQ ID NO: 13266 - RNA, 20 nt, synthetic construct
  source 1..20: mol_type = other RNA
aaggaaatacaaaaagtgat

SEQ ID NO: 13267 - RNA, 20 nt, synthetic construct
  source 1..20: mol_type = other RNA
aaggaaatgagtgtatgcag

SEQ ID NO: 13268 - RNA, 20 nt, synthetic construct
  source 1..20: mol_type = other RNA
aaggaaatggacagcacatt

SEQ ID NO: 13269 - RNA, 20 nt, synthetic construct
  source 1..20: mol_type = other RNA
aaggaacacacacctattca

SEQ ID NO: 13270 - RNA, 20 nt, synthetic construct
  source 1..20: mol_type = other RNA
aaggaactaatttcatacaa

SEQ ID NO: 13271 - RNA, 20 nt, synthetic construct
  source 1..20: mol_type = other RNA
aaggaagagtttatattcta

SEQ ID NO: 13272 - RNA, 20 nt, synthetic construct
  source 1..20: mol_type = other RNA
aaggaagcaccaacccttgt

SEQ ID NO: 13273 - RNA, 20 nt, synthetic construct
  source 1..20: mol_type = other RNA
aaggaagcagaatgtccatc

SEQ ID NO: 13274 - RNA, 20 nt, synthetic construct
  source 1..20: mol_type = other RNA
aaggaagcttcctaaagaga

SEQ ID NO: 13275 - RNA, 20 nt, synthetic construct
  source 1..20: mol_type = other RNA
aaggaaggaaaggagatact

SEQ ID NO: 13276 - RNA, 20 nt, synthetic construct
  source 1..20: mol_type = other RNA
aaggaaggaattttaggaca

SEQ ID NO: 13277 - RNA, 20 nt, synthetic construct
  source 1..20: mol_type = other RNA
aaggaaggattggaatgagt

SEQ ID NO: 13278 - RNA, 20 nt, synthetic construct
  source 1..20: mol_type = other RNA
aaggaaggcagggtaggaag

SEQ ID NO: 13279 - RNA, 20 nt, synthetic construct
  source 1..20: mol_type = other RNA
aaggaagggcttgatctagt

SEQ ID NO: 13280 - RNA, 20 nt, synthetic construct
  source 1..20: mol_type = other RNA
aaggaaggtcaaatggtaac

SEQ ID NO: 13281 - RNA, 20 nt, synthetic construct
  source 1..20: mol_type = other RNA
aaggaatataaacgtgtgtg

SEQ ID NO: 13282 - RNA, 20 nt, synthetic construct
  source 1..20: mol_type = other RNA
aaggaatccggctttatgag

SEQ ID NO: 13283 - RNA, 20 nt, synthetic construct
  source 1..20: mol_type = other RNA
aaggaatctgacctaagctt

SEQ ID NO: 13284 - RNA, 20 nt, synthetic construct
  source 1..20: mol_type = other RNA
aaggaatctgggccgggcgc

SEQ ID NO: 13285 - RNA, 20 nt, synthetic construct
  source 1..20: mol_type = other RNA
aaggaatgcctataaaatgc

SEQ ID NO: 13286 - RNA, 20 nt, synthetic construct
  source 1..20: mol_type = other RNA
aaggaatggaattctgatgc

SEQ ID NO: 13287 - RNA, 20 nt, synthetic construct
  source 1..20: mol_type = other RNA
aaggaatgtgcactctttta

SEQ ID NO: 13288 - RNA, 20 nt, synthetic construct
  source 1..20: mol_type = other RNA
aaggaatgtgcttcctaaac

SEQ ID NO: 13289 - RNA, 20 nt, synthetic construct
  source 1..20: mol_type = other RNA
aaggaattgtaatcacagta

SEQ ID NO: 13290 - RNA, 20 nt, synthetic construct
  source 1..20: mol_type = other RNA
aaggaattttaggacaagga

SEQ ID NO: 13291 - RNA, 20 nt, synthetic construct
  source 1..20: mol_type = other RNA
aaggaattttcaggactcat

SEQ ID NO: 13292 - RNA, 20 nt, synthetic construct
  source 1..20: mol_type = other RNA
aaggacacaaattatgactg

SEQ ID NO: 13293 - RNA, 20 nt, synthetic construct
  source 1..20: mol_type = other RNA
aaggacactattgagagtga

SEQ ID NO: 13294 - RNA, 20 nt, synthetic construct
  source 1..20: mol_type = other RNA
aaggacagaaattcaacttg

SEQ ID NO: 13295 - RNA, 20 nt, synthetic construct
  source 1..20: mol_type = other RNA
aaggacagcttccacccaag

SEQ ID NO: 13296 - RNA, 20 nt, synthetic construct
  source 1..20: mol_type = other RNA
aaggacaggtcacattctgc

SEQ ID NO: 13297 - RNA, 20 nt, synthetic construct
  source 1..20: mol_type = other RNA
aaggacatccacaacattgt

SEQ ID NO: 13298 - RNA, 20 nt, synthetic construct
  source 1..20: mol_type = other RNA
aaggacattagtggaaaaac

SEQ ID NO: 13299 - RNA, 20 nt, synthetic construct
  source 1..20: mol_type = other RNA
aaggaccaggtatggcgact

SEQ ID NO: 13300 - RNA, 20 nt, synthetic construct
  source 1..20: mol_type = other RNA
aaggaccatctgttaaaaga

SEQ ID NO: 13301 - RNA, 20 nt, synthetic construct
  source 1..20: mol_type = other RNA
aaggaccattagcagttctg

SEQ ID NO: 13302 - RNA, 20 nt, synthetic construct
  source 1..20: mol_type = other RNA
aaggactcacagcttaccaa

SEQ ID NO: 13303 - RNA, 20 nt, synthetic construct
  source 1..20: mol_type = other RNA
aaggactgaagtcctttctt

SEQ ID NO: 13304 - RNA, 20 nt, synthetic construct
  source 1..20: mol_type = other RNA
aaggactggaactcatttct

SEQ ID NO: 13305 - RNA, 20 nt, synthetic construct
  source 1..20: mol_type = other RNA
aaggactggcttcagtgcca

SEQ ID NO: 13306 - RNA, 20 nt, synthetic construct
  source 1..20: mol_type = other RNA
aaggactgggatcctaagca

SEQ ID NO: 13307 - RNA, 20 nt, synthetic construct
  source 1..20: mol_type = other RNA
aaggacttcagtccttacca

SEQ ID NO: 13308 - RNA, 20 nt, synthetic construct
  source 1..20: mol_type = other RNA
aaggacttgatctaaaatgg

SEQ ID NO: 13309 - RNA, 20 nt, synthetic construct
  source 1..20: mol_type = other RNA
aaggagaaaacaaaaagaaa

SEQ ID NO: 13310 - RNA, 20 nt, synthetic construct
  source 1..20: mol_type = other RNA
aaggagaaaccatttacccc

SEQ ID NO: 13311 - RNA, 20 nt, synthetic construct
  source 1..20: mol_type = other RNA
aaggagaccagttaggaagc

SEQ ID NO: 13312 - RNA, 20 nt, synthetic construct
  source 1..20: mol_type = other RNA
aaggagacctactaaaagtt

SEQ ID NO: 13313 - RNA, 20 nt, synthetic construct
  source 1..20: mol_type = other RNA
aaggagagaaaaacaaaaca

SEQ ID NO: 13314 - RNA, 20 nt, synthetic construct
  source 1..20: mol_type = other RNA
aaggagagaagagggggcat

SEQ ID NO: 13315 - RNA, 20 nt, synthetic construct
  source 1..20: mol_type = other RNA
aaggagatactggccatgtt

SEQ ID NO: 13316 - RNA, 20 nt, synthetic construct
  source 1..20: mol_type = other RNA
aaggagatatacaggaagag

SEQ ID NO: 13317 - RNA, 20 nt, synthetic construct
  source 1..20: mol_type = other RNA
aaggagatggcacataccat

SEQ ID NO: 13318 - RNA, 20 nt, synthetic construct
  source 1..20: mol_type = other RNA
aaggagccaaacatcatgat

SEQ ID NO: 13319 - RNA, 20 nt, synthetic construct
  source 1..20: mol_type = other RNA
aaggaggaaaataatttgca

SEQ ID NO: 13320 - RNA, 20 nt, synthetic construct
  source 1..20: mol_type = other RNA
aaggaggaactaattgataa

SEQ ID NO: 13321 - RNA, 20 nt, synthetic construct
  source 1..20: mol_type = other RNA
aaggagggaaaatgtttatt

SEQ ID NO: 13322 - RNA, 20 nt, synthetic construct
  source 1..20: mol_type = other RNA
aaggagggactgaaaccagt

SEQ ID NO: 13323 - RNA, 20 nt, synthetic construct
  source 1..20: mol_type = other RNA
aaggagggaggattgtttga

SEQ ID NO: 13324 - RNA, 20 nt, synthetic construct
  source 1..20: mol_type = other RNA
aaggagtccagtcctgctaa

SEQ ID NO: 13325 - RNA, 20 nt, synthetic construct
  source 1..20: mol_type = other RNA
aaggagtctgcccatcctat

SEQ ID NO: 13326 - RNA, 20 nt, synthetic construct
  source 1..20: mol_type = other RNA
aaggagttcagctttaaaga

SEQ ID NO: 13327 - RNA, 20 nt, synthetic construct
  source 1..20: mol_type = other RNA
aaggataaacaaagagaaca

SEQ ID NO: 13328 - RNA, 20 nt, synthetic construct
  source 1..20: mol_type = other RNA
aaggatactgagaacagaat

SEQ ID NO: 13329 - RNA, 20 nt, synthetic construct
  source 1..20: mol_type = other RNA
aaggatatgggccaaagaca

SEQ ID NO: 13330 - RNA, 20 nt, synthetic construct
  source 1..20: mol_type = other RNA
aaggatatgttttctaaacc

SEQ ID NO: 13331 - RNA, 20 nt, synthetic construct
  source 1..20: mol_type = other RNA
aaggatcgttagtattttca

SEQ ID NO: 13332 - RNA, 20 nt, synthetic construct
  source 1..20: mol_type = other RNA
aaggatgaccttgacaataa

SEQ ID NO: 13333 - RNA, 20 nt, synthetic construct
  source 1..20: mol_type = other RNA
aaggatgcacaagacagatg

SEQ ID NO: 13334 - RNA, 20 nt, synthetic construct
  source 1..20: mol_type = other RNA
aaggatggccagtcatgtgg

SEQ ID NO: 13335 - RNA, 20 nt, synthetic construct
  source 1..20: mol_type = other RNA
aaggatggtttgattgttcc

SEQ ID NO: 13336 - RNA, 20 nt, synthetic construct
  source 1..20: mol_type = other RNA
aaggatgtcaacaaaatact

SEQ ID NO: 13337 - RNA, 20 nt, synthetic construct
  source 1..20: mol_type = other RNA
aaggatgtcaactgaggcag

SEQ ID NO: 13338 - RNA, 20 nt, synthetic construct
  source 1..20: mol_type = other RNA
aaggattaatctttctgaac

SEQ ID NO: 13339 - RNA, 20 nt, synthetic construct
  source 1..20: mol_type = other RNA
aaggattagaaagtagatta

SEQ ID NO: 13340 - RNA, 20 nt, synthetic construct
  source 1..20: mol_type = other RNA
aaggattatggctagaaact

SEQ ID NO: 13341 - RNA, 20 nt, synthetic construct
  source 1..20: mol_type = other RNA
aaggattcctccctggagag

SEQ ID NO: 13342 - RNA, 20 nt, synthetic construct
  source 1..20: mol_type = other RNA
aaggattcgggggagagcac

SEQ ID NO: 13343 - RNA, 20 nt, synthetic construct
  source 1..20: mol_type = other RNA
aaggattgaatggaaagaaa

SEQ ID NO: 13344 - RNA, 20 nt, synthetic construct
  source 1..20: mol_type = other RNA
aaggattgcctaacaccagt

SEQ ID NO: 13345 - RNA, 20 nt, synthetic construct
  source 1..20: mol_type = other RNA
aaggattggaatgagtccag

SEQ ID NO: 13346 - RNA, 20 nt, synthetic construct
  source 1..20: mol_type = other RNA
aaggattgggaagattggct

SEQ ID NO: 13347 - RNA, 20 nt, synthetic construct
  source 1..20: mol_type = other RNA
aaggattgttcatgtctgtg

SEQ ID NO: 13348 - RNA, 20 nt, synthetic construct
  source 1..20: mol_type = other RNA
aaggatttgtttgtgaagat

SEQ ID NO: 13349 - RNA, 20 nt, synthetic construct
  source 1..20: mol_type = other RNA
aaggattttctattcattac

SEQ ID NO: 13350 - RNA, 20 nt, synthetic construct
  source 1..20: mol_type = other RNA
aaggcaaaccacacagagaa

SEQ ID NO: 13351 - RNA, 20 nt, synthetic construct
  source 1..20: mol_type = other RNA
aaggcaaaggaaaaaacttt

SEQ ID NO: 13352 - RNA, 20 nt, synthetic construct
  source 1..20: mol_type = other RNA
aaggcaatgctctcttcccc

SEQ ID NO: 13353 - RNA, 20 nt, synthetic construct
  source 1..20: mol_type = other RNA
aaggcaatgtaacacagttc

SEQ ID NO: 13354 - RNA, 20 nt, synthetic construct
  source 1..20: mol_type = other RNA
aaggcaatgtagggaataga

SEQ ID NO: 13355 - RNA, 20 nt, synthetic construct
  source 1..20: mol_type = other RNA
aaggcacagtctgtgcttaa

SEQ ID NO: 13356 - RNA, 20 nt, synthetic construct
  source 1..20: mol_type = other RNA
aaggcactaacaaagggcct

SEQ ID NO: 13357 - RNA, 20 nt, synthetic construct
  source 1..20: mol_type = other RNA
aaggcactgtatggttctta

SEQ ID NO: 13358 - RNA, 20 nt, synthetic construct
  source 1..20: mol_type = other RNA
aaggcagaacacactgctct

SEQ ID NO: 13359 - RNA, 20 nt, synthetic construct
  source 1..20: mol_type = other RNA
aaggcagaattatagagggc

SEQ ID NO: 13360 - RNA, 20 nt, synthetic construct
  source 1..20: mol_type = other RNA
aaggcaggactgcttgaggc

SEQ ID NO: 13361 - RNA, 20 nt, synthetic construct
  source 1..20: mol_type = other RNA
aaggcaggagcagtgtgaat

SEQ ID NO: 13362 - RNA, 20 nt, synthetic construct
  source 1..20: mol_type = other RNA
aaggcaggaggcctcagaat

SEQ ID NO: 13363 - RNA, 20 nt, synthetic construct
  source 1..20: mol_type = other RNA
aaggcagggcttggtggccc

SEQ ID NO: 13364 - RNA, 20 nt, synthetic construct
  source 1..20: mol_type = other RNA
aaggcagggtaggaaggcgg

SEQ ID NO: 13365 - RNA, 20 nt, synthetic construct
  source 1..20: mol_type = other RNA
aaggcatagggccttctact

SEQ ID NO: 13366 - RNA, 20 nt, synthetic construct
  source 1..20: mol_type = other RNA
aaggcatgaaattcttgggt

SEQ ID NO: 13367 - RNA, 20 nt, synthetic construct
  source 1..20: mol_type = other RNA
aaggccaactgtcctctctt

SEQ ID NO: 13368 - RNA, 20 nt, synthetic construct
  source 1..20: mol_type = other RNA
aaggccagagggaatctagg

SEQ ID NO: 13369 - RNA, 20 nt, synthetic construct
  source 1..20: mol_type = other RNA
aaggccatttgattgccagt

SEQ ID NO: 13370 - RNA, 20 nt, synthetic construct
  source 1..20: mol_type = other RNA
aaggcccaaaaagtttttaa

SEQ ID NO: 13371 - RNA, 20 nt, synthetic construct
  source 1..20: mol_type = other RNA
aaggcccaccatgatgcagc

SEQ ID NO: 13372 - RNA, 20 nt, synthetic construct
  source 1..20: mol_type = other RNA
aaggccccttgaaagatcat

SEQ ID NO: 13373 - RNA, 20 nt, synthetic construct
  source 1..20: mol_type = other RNA
aaggccctatgccttcagta

SEQ ID NO: 13374 - RNA, 20 nt, synthetic construct
  source 1..20: mol_type = other RNA
aaggccctgattgagattag

SEQ ID NO: 13375 - RNA, 20 nt, synthetic construct
  source 1..20: mol_type = other RNA
aaggccctgatttaaagtag

SEQ ID NO: 13376 - RNA, 20 nt, synthetic construct
  source 1..20: mol_type = other RNA
aaggccgctcttgaccttgt

SEQ ID NO: 13377 - RNA, 20 nt, synthetic construct
  source 1..20: mol_type = other RNA
aaggccggggccgcgtccac

SEQ ID NO: 13378 - RNA, 20 nt, synthetic construct
  source 1..20: mol_type = other RNA
aaggccgtccctattttcta

SEQ ID NO: 13379 - RNA, 20 nt, synthetic construct
  source 1..20: mol_type = other RNA
aaggcctgatagctgtggaa

SEQ ID NO: 13380 - RNA, 20 nt, synthetic construct
  source 1..20: mol_type = other RNA
aaggcctgcttcattccgcg

SEQ ID NO: 13381 - RNA, 20 nt, synthetic construct
  source 1..20: mol_type = other RNA
aaggccttccacggaatgcc

SEQ ID NO: 13382 - RNA, 20 nt, synthetic construct
  source 1..20: mol_type = other RNA
aaggccttctcctccaaccc

SEQ ID NO: 13383 - RNA, 20 nt, synthetic construct
  source 1..20: mol_type = other RNA
aaggcgaaatgtgaacagac

SEQ ID NO: 13384 - RNA, 20 nt, synthetic construct
  source 1..20: mol_type = other RNA
aaggcgaagcccgccgctcg

SEQ ID NO: 13385 - RNA, 20 nt, synthetic construct
  source 1..20: mol_type = other RNA
aaggcgaagcggcagggccg

SEQ ID NO: 13386 - RNA, 20 nt, synthetic construct
  source 1..20: mol_type = other RNA
aaggcgcagacacaccatga

SEQ ID NO: 13387 - RNA, 20 nt, synthetic construct
  source 1..20: mol_type = other RNA
aaggcggaagttgcagtgag

SEQ ID NO: 13388 - RNA, 20 nt, synthetic construct
  source 1..20: mol_type = other RNA
aaggcggtggggacagctca

SEQ ID NO: 13389 - RNA, 20 nt, synthetic construct
  source 1..20: mol_type = other RNA
aaggcgtcggggctgctggg

SEQ ID NO: 13390 - RNA, 20 nt, synthetic construct
  source 1..20: mol_type = other RNA
aaggcgtgtaaactgttgga

SEQ ID NO: 13391 - RNA, 20 nt, synthetic construct
  source 1..20: mol_type = other RNA
aaggctaaaacatacatgag

SEQ ID NO: 13392 - RNA, 20 nt, synthetic construct
  source 1..20: mol_type = other RNA
aaggctaacagccaaagaaa

SEQ ID NO: 13393 - RNA, 20 nt, synthetic construct
  source 1..20: mol_type = other RNA
aaggctaagcatgtaacttg

SEQ ID NO: 13394 - RNA, 20 nt, synthetic construct
  source 1..20: mol_type = other RNA
aaggctaagttgagaaacta

SEQ ID NO: 13395 - RNA, 20 nt, synthetic construct
  source 1..20: mol_type = other RNA
aaggctaattttttctgtaa

SEQ ID NO: 13396 - RNA, 20 nt, synthetic construct
  source 1..20: mol_type = other RNA
aaggctagagctcacacgag

SEQ ID NO: 13397 - RNA, 20 nt, synthetic construct
  source 1..20: mol_type = other RNA
aaggctagcacagaggcaac

SEQ ID NO: 13398 - RNA, 20 nt, synthetic construct
  source 1..20: mol_type = other RNA
aaggctcagcccctcatcct

SEQ ID NO: 13399 - RNA, 20 nt, synthetic construct
  source 1..20: mol_type = other RNA
aaggctcctgcagacatgca

SEQ ID NO: 13400 - RNA, 20 nt, synthetic construct
  source 1..20: mol_type = other RNA
aaggctgagacctcatctta

SEQ ID NO: 13401 - RNA, 20 nt, synthetic construct
  source 1..20: mol_type = other RNA
aaggctgcaagcactggtaa

SEQ ID NO: 13402 - RNA, 20 nt, synthetic construct
  source 1..20: mol_type = other RNA
aaggctgccagcaccagata

SEQ ID NO: 13403 - RNA, 20 nt, synthetic construct
  source 1..20: mol_type = other RNA
aaggctgcccgctccggccc

SEQ ID NO: 13404 - RNA, 20 nt, synthetic construct
  source 1..20: mol_type = other RNA
aaggctggaaataatttccc

SEQ ID NO: 13405 - RNA, 20 nt, synthetic construct
  source 1..20: mol_type = other RNA
aaggctggagtgcagtggcg

SEQ ID NO: 13406 - RNA, 20 nt, synthetic construct
  source 1..20: mol_type = other RNA
aaggcttcgagttctgggag

SEQ ID NO: 13407 - RNA, 20 nt, synthetic construct
  source 1..20: mol_type = other RNA
aaggcttgctttggctagaa

SEQ ID NO: 13408 - RNA, 20 nt, synthetic construct
  source 1..20: mol_type = other RNA
aaggcttggaaaacaaattg

SEQ ID NO: 13409 - RNA, 20 nt, synthetic construct
  source 1..20: mol_type = other RNA
aaggcttgtgcatcagaatt

SEQ ID NO: 13410 - RNA, 20 nt, synthetic construct
  source 1..20: mol_type = other RNA
aaggctttcgtatggaagat

SEQ ID NO: 13411 - RNA, 20 nt, synthetic construct
  source 1..20: mol_type = other RNA
aaggctttgtgttggtgttt

SEQ ID NO: 13412 - RNA, 20 nt, synthetic construct
  source 1..20: mol_type = other RNA
aagggaaaacaattacttga

SEQ ID NO: 13413 - RNA, 20 nt, synthetic construct
  source 1..20: mol_type = other RNA
aagggaaacactcataccag

SEQ ID NO: 13414 - RNA, 20 nt, synthetic construct
  source 1..20: mol_type = other RNA
aagggaaacagggttacagt

SEQ ID NO: 13415 - RNA, 20 nt, synthetic construct
  source 1..20: mol_type = other RNA
aagggaaaggatgaccttga

SEQ ID NO: 13416 - RNA, 20 nt, synthetic construct
  source 1..20: mol_type = other RNA
aagggaaatatgaaccacac

SEQ ID NO: 13417 - RNA, 20 nt, synthetic construct
  source 1..20: mol_type = other RNA
aagggaacactaagaagatg

SEQ ID NO: 13418 - RNA, 20 nt, synthetic construct
  source 1..20: mol_type = other RNA
aagggaagagctaagatgct

SEQ ID NO: 13419 - RNA, 20 nt, synthetic construct
  source 1..20: mol_type = other RNA
aagggaagaggccacaaagt

SEQ ID NO: 13420 - RNA, 20 nt, synthetic construct
  source 1..20: mol_type = other RNA
aagggaagtaaagatcaagc

SEQ ID NO: 13421 - RNA, 20 nt, synthetic construct
  source 1..20: mol_type = other RNA
aagggaagttttttcaaaat

SEQ ID NO: 13422 - RNA, 20 nt, synthetic construct
  source 1..20: mol_type = other RNA
aagggaattttactgatctt

SEQ ID NO: 13423 - RNA, 20 nt, synthetic construct
  source 1..20: mol_type = other RNA
aagggactgtcgaagcttaa

SEQ ID NO: 13424 - RNA, 20 nt, synthetic construct
  source 1..20: mol_type = other RNA
aagggagaacccaggaacag

SEQ ID NO: 13425 - RNA, 20 nt, synthetic construct
  source 1..20: mol_type = other RNA
aagggagagatgcctatgaa

SEQ ID NO: 13426 - RNA, 20 nt, synthetic construct
  source 1..20: mol_type = other RNA
aagggagcccaagcacactt

SEQ ID NO: 13427 - RNA, 20 nt, synthetic construct
  source 1..20: mol_type = other RNA
aagggaggaaaaaacagttg

SEQ ID NO: 13428 - RNA, 20 nt, synthetic construct
  source 1..20: mol_type = other RNA
aagggaggtaggcttagatg

SEQ ID NO: 13429 - RNA, 20 nt, synthetic construct
  source 1..20: mol_type = other RNA
aagggagtcagtagaggccg

SEQ ID NO: 13430 - RNA, 20 nt, synthetic construct
  source 1..20: mol_type = other RNA
aagggataatgctatccaga

SEQ ID NO: 13431 - RNA, 20 nt, synthetic construct
  source 1..20: mol_type = other RNA
aagggattctggccaaatcc

SEQ ID NO: 13432 - RNA, 20 nt, synthetic construct
  source 1..20: mol_type = other RNA
aagggcattttcaaggtaga

SEQ ID NO: 13433 - RNA, 20 nt, synthetic construct
  source 1..20: mol_type = other RNA
aagggccatttcatttctgt

SEQ ID NO: 13434 - RNA, 20 nt, synthetic construct
  source 1..20: mol_type = other RNA
aagggcctgttccaggcctc

SEQ ID NO: 13435 - RNA, 20 nt, synthetic construct
  source 1..20: mol_type = other RNA
aagggcttgatctagtaaat

SEQ ID NO: 13436 - RNA, 20 nt, synthetic construct
  source 1..20: mol_type = other RNA
aagggctttcaatagtgggt

SEQ ID NO: 13437 - RNA, 20 nt, synthetic construct
  source 1..20: mol_type = other RNA
aaggggaaggaattttcagg

SEQ ID NO: 13438 - RNA, 20 nt, synthetic construct
  source 1..20: mol_type = other RNA
aaggggaatcatgcagtact

SEQ ID NO: 13439 - RNA, 20 nt, synthetic construct
  source 1..20: mol_type = other RNA
aaggggaatggtactgcctc

SEQ ID NO: 13440 - RNA, 20 nt, synthetic construct
  source 1..20: mol_type = other RNA
aaggggagaggcctcatgta

SEQ ID NO: 13441 - RNA, 20 nt, synthetic construct
  source 1..20: mol_type = other RNA
aaggggatgggggacgacgt

SEQ ID NO: 13442 - RNA, 20 nt, synthetic construct
  source 1..20: mol_type = other RNA
aaggggatttcatgaacaat

SEQ ID NO: 13443 - RNA, 20 nt, synthetic construct
  source 1..20: mol_type = other RNA
aaggggcagggtggagtcca

SEQ ID NO: 13444 - RNA, 20 nt, synthetic construct
  source 1..20: mol_type = other RNA
aaggggcattccgtggaagg

SEQ ID NO: 13445 - RNA, 20 nt, synthetic construct
  source 1..20: mol_type = other RNA
aaggggccaggtgtggaggc

SEQ ID NO: 13446 - RNA, 20 nt, synthetic construct
  source 1..20: mol_type = other RNA
aaggggccttttgtcaagct

SEQ ID NO: 13447 - RNA, 20 nt, synthetic construct
  source 1..20: mol_type = other RNA
aaggggctatctttactttc

SEQ ID NO: 13448 - RNA, 20 nt, synthetic construct
  source 1..20: mol_type = other RNA
aagggggaatctactctttt

SEQ ID NO: 13449 - RNA, 20 nt, synthetic construct
  source 1..20: mol_type = other RNA
aaggggtaaatggtttctcc

SEQ ID NO: 13450 - RNA, 20 nt, synthetic construct
  source 1..20: mol_type = other RNA
aagggtaaacagaattaaac

SEQ ID NO: 13451 - RNA, 20 nt, synthetic construct
  source 1..20: mol_type = other RNA
aagggtaagaaaattgtaca

SEQ ID NO: 13452 - RNA, 20 nt, synthetic construct
  source 1..20: mol_type = other RNA
aagggtacagaactgctaat

SEQ ID NO: 13453 - RNA, 20 nt, synthetic construct
  source 1..20: mol_type = other RNA
aagggtagagcactttcgta

SEQ ID NO: 13454 - RNA, 20 nt, synthetic construct
  source 1..20: mol_type = other RNA
aagggtagctttgatgcccc

SEQ ID NO: 13455 - RNA, 20 nt, synthetic construct
  source 1..20: mol_type = other RNA
aagggtatatacaatattac

SEQ ID NO: 13456 - RNA, 20 nt, synthetic construct
  source 1..20: mol_type = other RNA
aagggtcactattaaccata

SEQ ID NO: 13457 - RNA, 20 nt, synthetic construct
  source 1..20: mol_type = other RNA
aagggtcagaattttatttt

SEQ ID NO: 13458 - RNA, 20 nt, synthetic construct
  source 1..20: mol_type = other RNA
aagggtccagcttcactctt

SEQ ID NO: 13459 - RNA, 20 nt, synthetic construct
  source 1..20: mol_type = other RNA
aagggtctggtatctaccaa

SEQ ID NO: 13460 - RNA, 20 nt, synthetic construct
  source 1..20: mol_type = other RNA
aagggtctgttttacatgtt

SEQ ID NO: 13461 - RNA, 20 nt, synthetic construct
  source 1..20: mol_type = other RNA
aagggtgacagagccgagca

SEQ ID NO: 13462 - RNA, 20 nt, synthetic construct
  source 1..20: mol_type = other RNA
aagggtgataaaaaggaggg

SEQ ID NO: 13463 - RNA, 20 nt, synthetic construct
  source 1..20: mol_type = other RNA
aagggtggctggcactttcc

SEQ ID NO: 13464 - RNA, 20 nt, synthetic construct
  source 1..20: mol_type = other RNA
aagggtgggggcatcaaagc

SEQ ID NO: 13465 - RNA, 20 nt, synthetic construct
  source 1..20: mol_type = other RNA
aagggtggtgctggactgga

SEQ ID NO: 13466 - RNA, 20 nt, synthetic construct
  source 1..20: mol_type = other RNA
aagggtgtgtgaatggaaaa

SEQ ID NO: 13467 - RNA, 20 nt, synthetic construct
  source 1..20: mol_type = other RNA
aagggtgtgtttaatttcca

SEQ ID NO: 13468 - RNA, 20 nt, synthetic construct
  source 1..20: mol_type = other RNA
aagggtgttttcccccctaa

SEQ ID NO: 13469 - RNA, 20 nt, synthetic construct
  source 1..20: mol_type = other RNA
aagggttcttggaaattaga

SEQ ID NO: 13470 - RNA, 20 nt, synthetic construct
  source 1..20: mol_type = other RNA
aagggttggtgcttccttct

SEQ ID NO: 13471 - RNA, 20 nt, synthetic construct
  source 1..20: mol_type = other RNA
aagggttttctgtagaatat

SEQ ID NO: 13472 - RNA, 20 nt, synthetic construct
  source 1..20: mol_type = other RNA
aagggttttggtatgttgtg

SEQ ID NO: 13473 - RNA, 20 nt, synthetic construct
  source 1..20: mol_type = other RNA
aaggtaagaatgtcaagctg

SEQ ID NO: 13474 - RNA, 20 nt, synthetic construct
  source 1..20: mol_type = other RNA
aaggtaaggaaaccccaggg

SEQ ID NO: 13475 - RNA, 20 nt, synthetic construct
  source 1..20: mol_type = other RNA
aaggtaagggtccagcttca

SEQ ID NO: 13476 - RNA, 20 nt, synthetic construct
  source 1..20: mol_type = other RNA
aaggtaatctagtttatctc

SEQ ID NO: 13477 - RNA, 20 nt, synthetic construct
  source 1..20: mol_type = other RNA
aaggtaatgacaataataac

SEQ ID NO: 13478 - RNA, 20 nt, synthetic construct
  source 1..20: mol_type = other RNA
aaggtacaatacactaaatt

SEQ ID NO: 13479 - RNA, 20 nt, synthetic construct
  source 1..20: mol_type = other RNA
aaggtacaattacacatctc

SEQ ID NO: 13480 - RNA, 20 nt, synthetic construct
  source 1..20: mol_type = other RNA
aaggtacgacgctcttgttc

SEQ ID NO: 13481 - RNA, 20 nt, synthetic construct
  source 1..20: mol_type = other RNA
aaggtagaaacatcccaagt

SEQ ID NO: 13482 - RNA, 20 nt, synthetic construct
  source 1..20: mol_type = other RNA
aaggtagaagataatgttag

SEQ ID NO: 13483 - RNA, 20 nt, synthetic construct
  source 1..20: mol_type = other RNA
aaggtagaagtacaaacatt

SEQ ID NO: 13484 - RNA, 20 nt, synthetic construct
  source 1..20: mol_type = other RNA
aaggtaggagggtgtgatca

SEQ ID NO: 13485 - RNA, 20 nt, synthetic construct
  source 1..20: mol_type = other RNA
aaggtataaaggatgcacaa

SEQ ID NO: 13486 - RNA, 20 nt, synthetic construct
  source 1..20: mol_type = other RNA
aaggtatatttctgtaaaca

SEQ ID NO: 13487 - RNA, 20 nt, synthetic construct
  source 1..20: mol_type = other RNA
aaggtatcatcggaaatata

SEQ ID NO: 13488 - RNA, 20 nt, synthetic construct
  source 1..20: mol_type = other RNA
aaggtatctccccaaagata

SEQ ID NO: 13489 - RNA, 20 nt, synthetic construct
  source 1..20: mol_type = other RNA
aaggtcaaatggtaacagcc

SEQ ID NO: 13490 - RNA, 20 nt, synthetic construct
  source 1..20: mol_type = other RNA
aaggtcaacacatcagcgct

SEQ ID NO: 13491 - RNA, 20 nt, synthetic construct
  source 1..20: mol_type = other RNA
aaggtcaagagagattaaat

SEQ ID NO: 13492 - RNA, 20 nt, synthetic construct
  source 1..20: mol_type = other RNA
aaggtcaagagcggcctttg

SEQ ID NO: 13493 - RNA, 20 nt, synthetic construct
  source 1..20: mol_type = other RNA
aaggtcaatctaggaggtct

SEQ ID NO: 13494 - RNA, 20 nt, synthetic construct
  source 1..20: mol_type = other RNA
aaggtcaatctgaaaaatat

SEQ ID NO: 13495 - RNA, 20 nt, synthetic construct
  source 1..20: mol_type = other RNA
aaggtcacattcagaggtat

SEQ ID NO: 13496 - RNA, 20 nt, synthetic construct
  source 1..20: mol_type = other RNA
aaggtcagaagtttggaacc

SEQ ID NO: 13497 - RNA, 20 nt, synthetic construct
  source 1..20: mol_type = other RNA
aaggtcatcctttcccttct

SEQ ID NO: 13498 - RNA, 20 nt, synthetic construct
  source 1..20: mol_type = other RNA
aaggtcgtttcagattgctt

SEQ ID NO: 13499 - RNA, 20 nt, synthetic construct
  source 1..20: mol_type = other RNA
aaggtctagtgtgcatgtgt

SEQ ID NO: 13500 - RNA, 20 nt, synthetic construct
  source 1..20: mol_type = other RNA
aaggtctctctctgtcaccc

SEQ ID NO: 13501 - RNA, 20 nt, synthetic construct
  source 1..20: mol_type = other RNA
aaggtctgtaagtcagttaa

SEQ ID NO: 13502 - RNA, 20 nt, synthetic construct
  source 1..20: mol_type = other RNA
aaggtgagggactgagcagt

SEQ ID NO: 13503 - RNA, 20 nt, synthetic construct
  source 1..20: mol_type = other RNA
aaggtgcacgctgtgaatgt

SEQ ID NO: 13504 - RNA, 20 nt, synthetic construct
  source 1..20: mol_type = other RNA
aaggtgcccgcgaaggcgtg

SEQ ID NO: 13505 - RNA, 20 nt, synthetic construct
  source 1..20: mol_type = other RNA
aaggtgcctgccatagaggg

SEQ ID NO: 13506 - RNA, 20 nt, synthetic construct
  source 1..20: mol_type = other RNA
aaggtgcgggattatttgga

SEQ ID NO: 13507 - RNA, 20 nt, synthetic construct
  source 1..20: mol_type = other RNA
aaggtgctaattgtttgttg

SEQ ID NO: 13508 - RNA, 20 nt, synthetic construct
  source 1..20: mol_type = other RNA
aaggtgctgttgtattttac

SEQ ID NO: 13509 - RNA, 20 nt, synthetic construct
  source 1..20: mol_type = other RNA
aaggtggagtggtggataga

SEQ ID NO: 13510 - RNA, 20 nt, synthetic construct
  source 1..20: mol_type = other RNA
aaggtgttaagccgttccat

SEQ ID NO: 13511 - RNA, 20 nt, synthetic construct
  source 1..20: mol_type = other RNA
aaggtgttagcaggactgga

SEQ ID NO: 13512 - RNA, 20 nt, synthetic construct
  source 1..20: mol_type = other RNA
aaggtgttcctgaagtcttt

SEQ ID NO: 13513 - RNA, 20 nt, synthetic construct
  source 1..20: mol_type = other RNA
aaggtgtttggtgaatttta

SEQ ID NO: 13514 - RNA, 20 nt, synthetic construct
  source 1..20: mol_type = other RNA
aaggttaactaatagccagt

SEQ ID NO: 13515 - RNA, 20 nt, synthetic construct
  source 1..20: mol_type = other RNA
aaggttaagggaagagctaa

SEQ ID NO: 13516 - RNA, 20 nt, synthetic construct
  source 1..20: mol_type = other RNA
aaggttataatcagccgtga

SEQ ID NO: 13517 - RNA, 20 nt, synthetic construct
  source 1..20: mol_type = other RNA
aaggttcaagtttggctccc

SEQ ID NO: 13518 - RNA, 20 nt, synthetic construct
  source 1..20: mol_type = other RNA
aaggttcacaaattagaaca

SEQ ID NO: 13519 - RNA, 20 nt, synthetic construct
  source 1..20: mol_type = other RNA
aaggttcatgaacataaatt

SEQ ID NO: 13520 - RNA, 20 nt, synthetic construct
  source 1..20: mol_type = other RNA
aaggttctgctatgctgaaa

SEQ ID NO: 13521 - RNA, 20 nt, synthetic construct
  source 1..20: mol_type = other RNA
aaggttgaaaactcaactgc

SEQ ID NO: 13522 - RNA, 20 nt, synthetic construct
  source 1..20: mol_type = other RNA
aaggttgagacaagaccaca

SEQ ID NO: 13523 - RNA, 20 nt, synthetic construct
  source 1..20: mol_type = other RNA
aaggttgcttaattgagctg

SEQ ID NO: 13524 - RNA, 20 nt, synthetic construct
  source 1..20: mol_type = other RNA
aaggttgttcttggttaata

SEQ ID NO: 13525 - RNA, 20 nt, synthetic construct
  source 1..20: mol_type = other RNA
aaggtttagaaaacatatcc

SEQ ID NO: 13526 - RNA, 20 nt, synthetic construct
  source 1..20: mol_type = other RNA
aaggtttccagtggcccccc

SEQ ID NO: 13527 - RNA, 20 nt, synthetic construct
  source 1..20: mol_type = other RNA
aaggtttccctggggaataa

SEQ ID NO: 13528 - RNA, 20 nt, synthetic construct
  source 1..20: mol_type = other RNA
aaggtttctctccaaggtac

SEQ ID NO: 13529 - RNA, 20 nt, synthetic construct
  source 1..20: mol_type = other RNA
aaggtttcttcactcttaaa

SEQ ID NO: 13530 - RNA, 20 nt, synthetic construct
  source 1..20: mol_type = other RNA
aaggtttggagtttgtagct

SEQ ID NO: 13531 - RNA, 20 nt, synthetic construct
  source 1..20: mol_type = other RNA
aaggtttgtagagcaagcaa

SEQ ID NO: 13532 - RNA, 20 nt, synthetic construct
  source 1..20: mol_type = other RNA
aaggtttttaaaagatgcat

SEQ ID NO: 13533 - RNA, 20 nt, synthetic construct
  source 1..20: mol_type = other RNA
aaggtttttgaacaagagcg

SEQ ID NO: 13534 - RNA, 20 nt, synthetic construct
  source 1..20: mol_type = other RNA
aagtaaaaagcactatccac

SEQ ID NO: 13535 - RNA, 20 nt, synthetic construct
  source 1..20: mol_type = other RNA
aagtaaaagaagatgcagtt

SEQ ID NO: 13536 - RNA, 20 nt, synthetic construct
  source 1..20: mol_type = other RNA
aagtaaaagcaacctcattt

SEQ ID NO: 13537 - RNA, 20 nt, synthetic construct
  source 1..20: mol_type = other RNA
aagtaaaataaacaagtcac

SEQ ID NO: 13538 - RNA, 20 nt, synthetic construct
  source 1..20: mol_type = other RNA
aagtaaaatcggaacaggct

SEQ ID NO: 13539 - RNA, 20 nt, synthetic construct
  source 1..20: mol_type = other RNA
aagtaaacaactgactctaa

SEQ ID NO: 13540 - RNA, 20 nt, synthetic construct
  source 1..20: mol_type = other RNA
aagtaaacctcaagtctttt

SEQ ID NO: 13541 - RNA, 20 nt, synthetic construct
  source 1..20: mol_type = other RNA
aagtaaagatagccccttat

SEQ ID NO: 13542 - RNA, 20 nt, synthetic construct
  source 1..20: mol_type = other RNA
aagtaaagatcaagctcgcc

SEQ ID NO: 13543 - RNA, 20 nt, synthetic construct
  source 1..20: mol_type = other RNA
aagtaaatcagactgtatta

SEQ ID NO: 13544 - RNA, 20 nt, synthetic construct
  source 1..20: mol_type = other RNA
aagtaaatcccggccaggtg

SEQ ID NO: 13545 - RNA, 20 nt, synthetic construct
  source 1..20: mol_type = other RNA
aagtaaatgcaatgcaggcg

SEQ ID NO: 13546 - RNA, 20 nt, synthetic construct
  source 1..20: mol_type = other RNA
aagtaaattcgcataaccaa

SEQ ID NO: 13547 - RNA, 20 nt, synthetic construct
  source 1..20: mol_type = other RNA
aagtaacactcagaagtact

SEQ ID NO: 13548 - RNA, 20 nt, synthetic construct
  source 1..20: mol_type = other RNA
aagtaacagttcaatactac

SEQ ID NO: 13549 - RNA, 20 nt, synthetic construct
  source 1..20: mol_type = other RNA
aagtaacattacaacagcaa

SEQ ID NO: 13550 - RNA, 20 nt, synthetic construct
  source 1..20: mol_type = other RNA
aagtaactcttgagttagga

SEQ ID NO: 13551 - RNA, 20 nt, synthetic construct
  source 1..20: mol_type = other RNA
aagtaactgttggcaaggat

SEQ ID NO: 13552 - RNA, 20 nt, synthetic construct
  source 1..20: mol_type = other RNA
aagtaaggattttctattca

SEQ ID NO: 13553 - RNA, 20 nt, synthetic construct
  source 1..20: mol_type = other RNA
aagtaataaagcaagtatga

SEQ ID NO: 13554 - RNA, 20 nt, synthetic construct
  source 1..20: mol_type = other RNA
aagtaatcaagtgaaatgat

SEQ ID NO: 13555 - RNA, 20 nt, synthetic construct
  source 1..20: mol_type = other RNA
aagtaatgaaaattagctgg

SEQ ID NO: 13556 - RNA, 20 nt, synthetic construct
  source 1..20: mol_type = other RNA
aagtaatgctggccagtgag

SEQ ID NO: 13557 - RNA, 20 nt, synthetic construct
  source 1..20: mol_type = other RNA
aagtaattgggatctgataa

SEQ ID NO: 13558 - RNA, 20 nt, synthetic construct
  source 1..20: mol_type = other RNA
aagtaattgttttccctttt

SEQ ID NO: 13559 - RNA, 20 nt, synthetic construct
  source 1..20: mol_type = other RNA
aagtaatttcttctgaagaa

SEQ ID NO: 13560 - RNA, 20 nt, synthetic construct
  source 1..20: mol_type = other RNA
aagtacaaacattacagaaa

SEQ ID NO: 13561 - RNA, 20 nt, synthetic construct
  source 1..20: mol_type = other RNA
aagtacaactaataattgct

SEQ ID NO: 13562 - RNA, 20 nt, synthetic construct
  source 1..20: mol_type = other RNA
aagtacagataaccaataag

SEQ ID NO: 13563 - RNA, 20 nt, synthetic construct
  source 1..20: mol_type = other RNA
aagtacatgaaatactcaaa

SEQ ID NO: 13564 - RNA, 20 nt, synthetic construct
  source 1..20: mol_type = other RNA
aagtactgagtcaaaaccaa

SEQ ID NO: 13565 - RNA, 20 nt, synthetic construct
  source 1..20: mol_type = other RNA
aagtactgcatgattcccct

SEQ ID NO: 13566 - RNA, 20 nt, synthetic construct
  source 1..20: mol_type = other RNA
aagtactggaaatggacagc

SEQ ID NO: 13567 - RNA, 20 nt, synthetic construct
  source 1..20: mol_type = other RNA
aagtacttcaaggttcacaa

SEQ ID NO: 13568 - RNA, 20 nt, synthetic construct
  source 1..20: mol_type = other RNA
aagtacttcagcgcttgaac

SEQ ID NO: 13569 - RNA, 20 nt, synthetic construct
  source 1..20: mol_type = other RNA
aagtagaaggccctatgcct

SEQ ID NO: 13570 - RNA, 20 nt, synthetic construct
  source 1..20: mol_type = other RNA
aagtagaaggtcaatctagg

SEQ ID NO: 13571 - RNA, 20 nt, synthetic construct
  source 1..20: mol_type = other RNA
aagtagaggactgcctattt

SEQ ID NO: 13572 - RNA, 20 nt, synthetic construct
  source 1..20: mol_type = other RNA
aagtagattagcttttacga

SEQ ID NO: 13573 - RNA, 20 nt, synthetic construct
  source 1..20: mol_type = other RNA
aagtagcagggactacagtc

SEQ ID NO: 13574 - RNA, 20 nt, synthetic construct
  source 1..20: mol_type = other RNA
aagtagctaggaccataggc

SEQ ID NO: 13575 - RNA, 20 nt, synthetic construct
  source 1..20: mol_type = other RNA
aagtagctgggatcacaggc

SEQ ID NO: 13576 - RNA, 20 nt, synthetic construct
  source 1..20: mol_type = other RNA
aagtaggaattaaacatttc

SEQ ID NO: 13577 - RNA, 20 nt, synthetic construct
  source 1..20: mol_type = other RNA
aagtaggggtaaatctttgt

SEQ ID NO: 13578 - RNA, 20 nt, synthetic construct
  source 1..20: mol_type = other RNA
aagtaggttgagacttagat

SEQ ID NO: 13579 - RNA, 20 nt, synthetic construct
  source 1..20: mol_type = other RNA
aagtagtacaaaagtgctgt

SEQ ID NO: 13580 - RNA, 20 nt, synthetic construct
  source 1..20: mol_type = other RNA
aagtagtggcagccccgctt

SEQ ID NO: 13581 - RNA, 20 nt, synthetic construct
  source 1..20: mol_type = other RNA
aagtataaatgaggtatcat

SEQ ID NO: 13582 - RNA, 20 nt, synthetic construct
  source 1..20: mol_type = other RNA
aagtataagatgatgatatg

SEQ ID NO: 13583 - RNA, 20 nt, synthetic construct
  source 1..20: mol_type = other RNA
aagtatagaaaggagaccag

SEQ ID NO: 13584 - RNA, 20 nt, synthetic construct
  source 1..20: mol_type = other RNA
aagtatatatcatagagtac

SEQ ID NO: 13585 - RNA, 20 nt, synthetic construct
  source 1..20: mol_type = other RNA
aagtatcccagatggggatt

SEQ ID NO: 13586 - RNA, 20 nt, synthetic construct
  source 1..20: mol_type = other RNA
aagtatcgtgagactattat

SEQ ID NO: 13587 - RNA, 20 nt, synthetic construct
  source 1..20: mol_type = other RNA
aagtatctcagtcataattt

SEQ ID NO: 13588 - RNA, 20 nt, synthetic construct
  source 1..20: mol_type = other RNA
aagtatctccctgtgcgtga

SEQ ID NO: 13589 - RNA, 20 nt, synthetic construct
  source 1..20: mol_type = other RNA
aagtatctcggtcattctgg

SEQ ID NO: 13590 - RNA, 20 nt, synthetic construct
  source 1..20: mol_type = other RNA
aagtatgagaaatgtctggt

SEQ ID NO: 13591 - RNA, 20 nt, synthetic construct
  source 1..20: mol_type = other RNA
aagtatgagccactagtcag

SEQ ID NO: 13592 - RNA, 20 nt, synthetic construct
  source 1..20: mol_type = other RNA
aagtatgagtcttccgtctc

SEQ ID NO: 13593 - RNA, 20 nt, synthetic construct
  source 1..20: mol_type = other RNA
aagtatgcagaaaccagttg

SEQ ID NO: 13594 - RNA, 20 nt, synthetic construct
  source 1..20: mol_type = other RNA
aagtatgcatagcagggtca

SEQ ID NO: 13595 - RNA, 20 nt, synthetic construct
  source 1..20: mol_type = other RNA
aagtatggttgaagaaagta

SEQ ID NO: 13596 - RNA, 20 nt, synthetic construct
  source 1..20: mol_type = other RNA
aagtatgtaattacagggga

SEQ ID NO: 13597 - RNA, 20 nt, synthetic construct
  source 1..20: mol_type = other RNA
aagtattaaaagcacaagca

SEQ ID NO: 13598 - RNA, 20 nt, synthetic construct
  source 1..20: mol_type = other RNA
aagtattcccaagatcataa

SEQ ID NO: 13599 - RNA, 20 nt, synthetic construct
  source 1..20: mol_type = other RNA
aagtattgatttgaccatgg

SEQ ID NO: 13600 - RNA, 20 nt, synthetic construct
  source 1..20: mol_type = other RNA
aagtatttccacgggtaaaa

SEQ ID NO: 13601 - RNA, 20 nt, synthetic construct
  source 1..20: mol_type = other RNA
aagtatttctcatctgtcac

SEQ ID NO: 13602 - RNA, 20 nt, synthetic construct
  source 1..20: mol_type = other RNA
aagtcaaagcctgtggaggc

SEQ ID NO: 13603 - RNA, 20 nt, synthetic construct
  source 1..20: mol_type = other RNA
aagtcaagatgaatctgcaa

SEQ ID NO: 13604 - RNA, 20 nt, synthetic construct
  source 1..20: mol_type = other RNA
aagtcaatttcagatctctg

SEQ ID NO: 13605 - RNA, 20 nt, synthetic construct
  source 1..20: mol_type = other RNA
aagtcacaaaaagacaagta

SEQ ID NO: 13606 - RNA, 20 nt, synthetic construct
  source 1..20: mol_type = other RNA
aagtcacattctagtgatgg

SEQ ID NO: 13607 - RNA, 20 nt, synthetic construct
  source 1..20: mol_type = other RNA
aagtcactccatttgtggca

SEQ ID NO: 13608 - RNA, 20 nt, synthetic construct
  source 1..20: mol_type = other RNA
aagtcactgtggaaaacagt

SEQ ID NO: 13609 - RNA, 20 nt, synthetic construct
  source 1..20: mol_type = other RNA
aagtcactttttattctgtt

SEQ ID NO: 13610 - RNA, 20 nt, synthetic construct
  source 1..20: mol_type = other RNA
aagtcagaattcactgtgac

SEQ ID NO: 13611 - RNA, 20 nt, synthetic construct
  source 1..20: mol_type = other RNA
aagtcagactaagacactag

SEQ ID NO: 13612 - RNA, 20 nt, synthetic construct
  source 1..20: mol_type = other RNA
aagtcagagattttcccaaa

SEQ ID NO: 13613 - RNA, 20 nt, synthetic construct
  source 1..20: mol_type = other RNA
aagtcagaggagcagttact

SEQ ID NO: 13614 - RNA, 20 nt, synthetic construct
  source 1..20: mol_type = other RNA
aagtcagcaactcttggcca

SEQ ID NO: 13615 - RNA, 20 nt, synthetic construct
  source 1..20: mol_type = other RNA
aagtcagcacttctgatatc

SEQ ID NO: 13616 - RNA, 20 nt, synthetic construct
  source 1..20: mol_type = other RNA
aagtcagcctgggcacacgc

SEQ ID NO: 13617 - RNA, 20 nt, synthetic construct
  source 1..20: mol_type = other RNA
aagtcagctaattttctaat

SEQ ID NO: 13618 - RNA, 20 nt, synthetic construct
  source 1..20: mol_type = other RNA
aagtcagctaggcgtagtat

SEQ ID NO: 13619 - RNA, 20 nt, synthetic construct
  source 1..20: mol_type = other RNA
aagtcagtaaaaaaggacca

SEQ ID NO: 13620 - RNA, 20 nt, synthetic construct
  source 1..20: mol_type = other RNA
aagtcagttaacagtgctgt

SEQ ID NO: 13621 - RNA, 20 nt, synthetic construct
  source 1..20: mol_type = other RNA
aagtcagttacagcatttca

SEQ ID NO: 13622 - RNA, 20 nt, synthetic construct
  source 1..20: mol_type = other RNA
aagtcatcaaaggaaggaat

SEQ ID NO: 13623 - RNA, 20 nt, synthetic construct
  source 1..20: mol_type = other RNA
aagtcatctggtcctgagct

SEQ ID NO: 13624 - RNA, 20 nt, synthetic construct
  source 1..20: mol_type = other RNA
aagtcatgacctgctttctt

SEQ ID NO: 13625 - RNA, 20 nt, synthetic construct
  source 1..20: mol_type = other RNA
aagtcattgaaactcaatgt

SEQ ID NO: 13626 - RNA, 20 nt, synthetic construct
  source 1..20: mol_type = other RNA
aagtccacagatctttttgt

SEQ ID NO: 13627 - RNA, 20 nt, synthetic construct
  source 1..20: mol_type = other RNA
aagtccatgaaacttatttc

SEQ ID NO: 13628 - RNA, 20 nt, synthetic construct
  source 1..20: mol_type = other RNA
aagtcccagttcaaggtgtt

SEQ ID NO: 13629 - RNA, 20 nt, synthetic construct
  source 1..20: mol_type = other RNA
aagtcccatcttccatacga

SEQ ID NO: 13630 - RNA, 20 nt, synthetic construct
  source 1..20: mol_type = other RNA
aagtccccacatgactggcc

SEQ ID NO: 13631 - RNA, 20 nt, synthetic construct
  source 1..20: mol_type = other RNA
aagtccccatctccacaaaa

SEQ ID NO: 13632 - RNA, 20 nt, synthetic construct
  source 1..20: mol_type = other RNA
aagtcccctgtaattacata

SEQ ID NO: 13633 - RNA, 20 nt, synthetic construct
  source 1..20: mol_type = other RNA
aagtcccggaagctgggcta

SEQ ID NO: 13634 - RNA, 20 nt, synthetic construct
  source 1..20: mol_type = other RNA
aagtccctaacagtctcgtg

SEQ ID NO: 13635 - RNA, 20 nt, synthetic construct
  source 1..20: mol_type = other RNA
aagtccgtgcatgcctctgt

SEQ ID NO: 13636 - RNA, 20 nt, synthetic construct
  source 1..20: mol_type = other RNA
aagtcctcaatcatgtcaag

SEQ ID NO: 13637 - RNA, 20 nt, synthetic construct
  source 1..20: mol_type = other RNA
aagtcctgttcttttgtaat

SEQ ID NO: 13638 - RNA, 20 nt, synthetic construct
  source 1..20: mol_type = other RNA
aagtcctttccagaggttct

SEQ ID NO: 13639 - RNA, 20 nt, synthetic construct
  source 1..20: mol_type = other RNA
aagtcctttcttggtctgca

SEQ ID NO: 13640 - RNA, 20 nt, synthetic construct
  source 1..20: mol_type = other RNA
aagtctatgctcttggtttc

SEQ ID NO: 13641 - RNA, 20 nt, synthetic construct
  source 1..20: mol_type = other RNA
aagtctcaacctactttaaa

SEQ ID NO: 13642 - RNA, 20 nt, synthetic construct
  source 1..20: mol_type = other RNA
aagtctcatgcaattcccca

SEQ ID NO: 13643 - RNA, 20 nt, synthetic construct
  source 1..20: mol_type = other RNA
aagtctccctaaccaggccc

SEQ ID NO: 13644 - RNA, 20 nt, synthetic construct
  source 1..20: mol_type = other RNA
aagtctgaaagcttctgagc

SEQ ID NO: 13645 - RNA, 20 nt, synthetic construct
  source 1..20: mol_type = other RNA
aagtcttccattttagatca

SEQ ID NO: 13646 - RNA, 20 nt, synthetic construct
  source 1..20: mol_type = other RNA
aagtcttcttctaagctaag

SEQ ID NO: 13647 - RNA, 20 nt, synthetic construct
  source 1..20: mol_type = other RNA
aagtcttgctggaagttggc

SEQ ID NO: 13648 - RNA, 20 nt, synthetic construct
  source 1..20: mol_type = other RNA
aagtctttggcccattttcg

SEQ ID NO: 13649 - RNA, 20 nt, synthetic construct
  source 1..20: mol_type = other RNA
aagtctttgggtaatttatc

SEQ ID NO: 13650 - RNA, 20 nt, synthetic construct
  source 1..20: mol_type = other RNA
aagtctttggtgatcctaag

SEQ ID NO: 13651 - RNA, 20 nt, synthetic construct
  source 1..20: mol_type = other RNA
aagtcttttcctaccctgag

SEQ ID NO: 13652 - RNA, 20 nt, synthetic construct
  source 1..20: mol_type = other RNA
aagtcttttcctagactgcc

SEQ ID NO: 13653 - RNA, 20 nt, synthetic construct
  source 1..20: mol_type = other RNA
aagtgaaaaatgacctaaaa

SEQ ID NO: 13654 - RNA, 20 nt, synthetic construct
  source 1..20: mol_type = other RNA
aagtgaaaactaaggtcaag

SEQ ID NO: 13655 - RNA, 20 nt, synthetic construct
  source 1..20: mol_type = other RNA
aagtgaaactgctggatcat

SEQ ID NO: 13656 - RNA, 20 nt, synthetic construct
  source 1..20: mol_type = other RNA
aagtgaaaggcaaaggaaaa

SEQ ID NO: 13657 - RNA, 20 nt, synthetic construct
  source 1..20: mol_type = other RNA
aagtgaaatgatctttgaat

SEQ ID NO: 13658 - RNA, 20 nt, synthetic construct
  source 1..20: mol_type = other RNA
aagtgaaccaaaaaccacat

SEQ ID NO: 13659 - RNA, 20 nt, synthetic construct
  source 1..20: mol_type = other RNA
aagtgaagcccagagaggct

SEQ ID NO: 13660 - RNA, 20 nt, synthetic construct
  source 1..20: mol_type = other RNA
aagtgaagcttcaaaccact

SEQ ID NO: 13661 - RNA, 20 nt, synthetic construct
  source 1..20: mol_type = other RNA
aagtgaagtcaagatgaatc

SEQ ID NO: 13662 - RNA, 20 nt, synthetic construct
  source 1..20: mol_type = other RNA
aagtgaatatagctaagaaa

SEQ ID NO: 13663 - RNA, 20 nt, synthetic construct
  source 1..20: mol_type = other RNA
aagtgaatcactacagcata

SEQ ID NO: 13664 - RNA, 20 nt, synthetic construct
  source 1..20: mol_type = other RNA
aagtgacagatgagaaatac

SEQ ID NO: 13665 - RNA, 20 nt, synthetic construct
  source 1..20: mol_type = other RNA
aagtgaccctgagtccagag

SEQ ID NO: 13666 - RNA, 20 nt, synthetic construct
  source 1..20: mol_type = other RNA
aagtgactccaagcacacag

SEQ ID NO: 13667 - RNA, 20 nt, synthetic construct
  source 1..20: mol_type = other RNA
aagtgacttctggatgtgta

SEQ ID NO: 13668 - RNA, 20 nt, synthetic construct
  source 1..20: mol_type = other RNA
aagtgagcagaaggaggaaa

SEQ ID NO: 13669 - RNA, 20 nt, synthetic construct
  source 1..20: mol_type = other RNA
aagtgagtttgacctgtaat

SEQ ID NO: 13670 - RNA, 20 nt, synthetic construct
  source 1..20: mol_type = other RNA
aagtgataccataaagtcag

SEQ ID NO: 13671 - RNA, 20 nt, synthetic construct
  source 1..20: mol_type = other RNA
aagtgatgcaactcctgggc

SEQ ID NO: 13672 - RNA, 20 nt, synthetic construct
  source 1..20: mol_type = other RNA
aagtgcacaatgcagtattg

SEQ ID NO: 13673 - RNA, 20 nt, synthetic construct
  source 1..20: mol_type = other RNA
aagtgcatttcggctctgtg

SEQ ID NO: 13674 - RNA, 20 nt, synthetic construct
  source 1..20: mol_type = other RNA
aagtgccagccacccttgct

SEQ ID NO: 13675 - RNA, 20 nt, synthetic construct
  source 1..20: mol_type = other RNA
aagtgcccattaacagatga

SEQ ID NO: 13676 - RNA, 20 nt, synthetic construct
  source 1..20: mol_type = other RNA
aagtgccgcgttttttgtcc

SEQ ID NO: 13677 - RNA, 20 nt, synthetic construct
  source 1..20: mol_type = other RNA
aagtgctctaccctttccaa

SEQ ID NO: 13678 - RNA, 20 nt, synthetic construct
  source 1..20: mol_type = other RNA
aagtgctgcagtatgcatag

SEQ ID NO: 13679 - RNA, 20 nt, synthetic construct
  source 1..20: mol_type = other RNA
aagtgctgggctagggaagc

SEQ ID NO: 13680 - RNA, 20 nt, synthetic construct
  source 1..20: mol_type = other RNA
aagtgctgtgattgcaggtg

SEQ ID NO: 13681 - RNA, 20 nt, synthetic construct
  source 1..20: mol_type = other RNA
aagtgctgttgaggctgggc

SEQ ID NO: 13682 - RNA, 20 nt, synthetic construct
  source 1..20: mol_type = other RNA
aagtgcttctagtaacttgg

SEQ ID NO: 13683 - RNA, 20 nt, synthetic construct
  source 1..20: mol_type = other RNA
aagtggaatcattccgtata

SEQ ID NO: 13684 - RNA, 20 nt, synthetic construct
  source 1..20: mol_type = other RNA
aagtggactatgtaggcaca

SEQ ID NO: 13685 - RNA, 20 nt, synthetic construct
  source 1..20: mol_type = other RNA
aagtggagaattactaaaat

SEQ ID NO: 13686 - RNA, 20 nt, synthetic construct
  source 1..20: mol_type = other RNA
aagtggagcctgctctgcag

SEQ ID NO: 13687 - RNA, 20 nt, synthetic construct
  source 1..20: mol_type = other RNA
aagtggagtgcgagtgtgaa

SEQ ID NO: 13688 - RNA, 20 nt, synthetic construct
  source 1..20: mol_type = other RNA
aagtggcgctgtttgcctgc

SEQ ID NO: 13689 - RNA, 20 nt, synthetic construct
  source 1..20: mol_type = other RNA
aagtggctagacggaaaaac

SEQ ID NO: 13690 - RNA, 20 nt, synthetic construct
  source 1..20: mol_type = other RNA
aagtgggaagcaaaggattc

SEQ ID NO: 13691 - RNA, 20 nt, synthetic construct
  source 1..20: mol_type = other RNA
aagtgggaggaggtcatact

SEQ ID NO: 13692 - RNA, 20 nt, synthetic construct
  source 1..20: mol_type = other RNA
aagtgggtggatgggtgtag

SEQ ID NO: 13693 - RNA, 20 nt, synthetic construct
  source 1..20: mol_type = other RNA
aagtggtattctatcatcaa

SEQ ID NO: 13694 - RNA, 20 nt, synthetic construct
  source 1..20: mol_type = other RNA
aagtggtgcttgaactgctg

SEQ ID NO: 13695 - RNA, 20 nt, synthetic construct
  source 1..20: mol_type = other RNA
aagtgtaaagtttctctctc

SEQ ID NO: 13696 - RNA, 20 nt, synthetic construct
  source 1..20: mol_type = other RNA
aagtgtaacatacacatcag

SEQ ID NO: 13697 - RNA, 20 nt, synthetic construct
  source 1..20: mol_type = other RNA
aagtgtacaattcggtggca

SEQ ID NO: 13698 - RNA, 20 nt, synthetic construct
  source 1..20: mol_type = other RNA
aagtgtatcagatgcttcta

SEQ ID NO: 13699 - RNA, 20 nt, synthetic construct
  source 1..20: mol_type = other RNA
aagtgtattattctaaacac

SEQ ID NO: 13700 - RNA, 20 nt, synthetic construct
  source 1..20: mol_type = other RNA
aagtgtgaagattaagcaca

SEQ ID NO: 13701 - RNA, 20 nt, synthetic construct
  source 1..20: mol_type = other RNA
aagtgtgaccacattcccaa

SEQ ID NO: 13702 - RNA, 20 nt, synthetic construct
  source 1..20: mol_type = other RNA
aagtgtgagcaaaaatacag

SEQ ID NO: 13703 - RNA, 20 nt, synthetic construct
  source 1..20: mol_type = other RNA
aagtgtgcttgggctccctt

SEQ ID NO: 13704 - RNA, 20 nt, synthetic construct
  source 1..20: mol_type = other RNA
aagtgtggtggtctcaccct

SEQ ID NO: 13705 - RNA, 20 nt, synthetic construct
  source 1..20: mol_type = other RNA
aagtgttcttaccacaaaaa

SEQ ID NO: 13706 - RNA, 20 nt, synthetic construct
  source 1..20: mol_type = other RNA
aagtgttgactaccatctct

SEQ ID NO: 13707 - RNA, 20 nt, synthetic construct
  source 1..20: mol_type = other RNA
aagtgttgagaggctttaag

SEQ ID NO: 13708 - RNA, 20 nt, synthetic construct
  source 1..20: mol_type = other RNA
aagtgtttaggatataagag

SEQ ID NO: 13709 - RNA, 20 nt, synthetic construct
  source 1..20: mol_type = other RNA
aagtgtttgaaaagtgtttg

SEQ ID NO: 13710 - RNA, 20 nt, synthetic construct
  source 1..20: mol_type = other RNA
aagtgtttgtcacatagaag

SEQ ID NO: 13711 - RNA, 20 nt, synthetic construct
  source 1..20: mol_type = other RNA
aagtgttttgatagttgcag

SEQ ID NO: 13712 - RNA, 20 nt, synthetic construct
  source 1..20: mol_type = other RNA
aagttaaaacttgtagagga

SEQ ID NO: 13713 - RNA, 20 nt, synthetic construct
  source 1..20: mol_type = other RNA
aagttaaaagacatctttcc

SEQ ID NO: 13714 - RNA, 20 nt, synthetic construct
  source 1..20: mol_type = other RNA
aagttaaacttttgtgcatc

SEQ ID NO: 13715 - RNA, 20 nt, synthetic construct
  source 1..20: mol_type = other RNA
aagttaactgaaatcgggag

SEQ ID NO: 13716 - RNA, 20 nt, synthetic construct
  source 1..20: mol_type = other RNA
aagttaagggccatttcatt

SEQ ID NO: 13717 - RNA, 20 nt, synthetic construct
  source 1..20: mol_type = other RNA
aagttaatagcctcctaagt

SEQ ID NO: 13718 - RNA, 20 nt, synthetic construct
  source 1..20: mol_type = other RNA
aagttaatattgtaggtgtc

SEQ ID NO: 13719 - RNA, 20 nt, synthetic construct
  source 1..20: mol_type = other RNA
aagttacaaacatatgcatg

SEQ ID NO: 13720 - RNA, 20 nt, synthetic construct
  source 1..20: mol_type = other RNA
aagttacaaggattgaatgg

SEQ ID NO: 13721 - RNA, 20 nt, synthetic construct
  source 1..20: mol_type = other RNA
aagttacaataatatgcctc

SEQ ID NO: 13722 - RNA, 20 nt, synthetic construct
  source 1..20: mol_type = other RNA
aagttacatgcttagccttc

SEQ ID NO: 13723 - RNA, 20 nt, synthetic construct
  source 1..20: mol_type = other RNA
aagttacggttccctgtaga

SEQ ID NO: 13724 - RNA, 20 nt, synthetic construct
  source 1..20: mol_type = other RNA
aagttactagaagcactttt

SEQ ID NO: 13725 - RNA, 20 nt, synthetic construct
  source 1..20: mol_type = other RNA
aagttactgattagaaggat

SEQ ID NO: 13726 - RNA, 20 nt, synthetic construct
  source 1..20: mol_type = other RNA
aagttagaagtatcccagat

SEQ ID NO: 13727 - RNA, 20 nt, synthetic construct
  source 1..20: mol_type = other RNA
aagttagctggcaaaatgga

SEQ ID NO: 13728 - RNA, 20 nt, synthetic construct
  source 1..20: mol_type = other RNA
aagttagtgaagcagagaga

SEQ ID NO: 13729 - RNA, 20 nt, synthetic construct
  source 1..20: mol_type = other RNA
aagttagtgtctaatgggta

SEQ ID NO: 13730 - RNA, 20 nt, synthetic construct
  source 1..20: mol_type = other RNA
aagttatgtagctgggatgg

SEQ ID NO: 13731 - RNA, 20 nt, synthetic construct
  source 1..20: mol_type = other RNA
aagttatttaatctctcttg

SEQ ID NO: 13732 - RNA, 20 nt, synthetic construct
  source 1..20: mol_type = other RNA
aagttcaaagaaactaccta

SEQ ID NO: 13733 - RNA, 20 nt, synthetic construct
  source 1..20: mol_type = other RNA
aagttcaaatgaggctttta

SEQ ID NO: 13734 - RNA, 20 nt, synthetic construct
  source 1..20: mol_type = other RNA
aagttcaaggttataatcag

SEQ ID NO: 13735 - RNA, 20 nt, synthetic construct
  source 1..20: mol_type = other RNA
aagttcagaataccagagat

SEQ ID NO: 13736 - RNA, 20 nt, synthetic construct
  source 1..20: mol_type = other RNA
aagttcagcatcttcactga

SEQ ID NO: 13737 - RNA, 20 nt, synthetic construct
  source 1..20: mol_type = other RNA
aagttccaagattttcccaa

SEQ ID NO: 13738 - RNA, 20 nt, synthetic construct
  source 1..20: mol_type = other RNA
aagttccccattgacaatat

SEQ ID NO: 13739 - RNA, 20 nt, synthetic construct
  source 1..20: mol_type = other RNA
aagttccggttctcaggagc

SEQ ID NO: 13740 - RNA, 20 nt, synthetic construct
  source 1..20: mol_type = other RNA
aagttcctggactgtgatga

SEQ ID NO: 13741 - RNA, 20 nt, synthetic construct
  source 1..20: mol_type = other RNA
aagttctcaggggtaaaggg

SEQ ID NO: 13742 - RNA, 20 nt, synthetic construct
  source 1..20: mol_type = other RNA
aagttctccaagttattaca

SEQ ID NO: 13743 - RNA, 20 nt, synthetic construct
  source 1..20: mol_type = other RNA
aagttctcctgtgtgcatgc

SEQ ID NO: 13744 - RNA, 20 nt, synthetic construct
  source 1..20: mol_type = other RNA
aagttctgatttcaaagtta

SEQ ID NO: 13745 - RNA, 20 nt, synthetic construct
  source 1..20: mol_type = other RNA
aagttcttacctcaaaggag

SEQ ID NO: 13746 - RNA, 20 nt, synthetic construct
  source 1..20: mol_type = other RNA
aagttgaatttctgtccttg

SEQ ID NO: 13747 - RNA, 20 nt, synthetic construct
  source 1..20: mol_type = other RNA
aagttgacaaattaaatgac

SEQ ID NO: 13748 - RNA, 20 nt, synthetic construct
  source 1..20: mol_type = other RNA
aagttgagaaactatccaac

SEQ ID NO: 13749 - RNA, 20 nt, synthetic construct
  source 1..20: mol_type = other RNA
aagttgagaaagagggaagt

SEQ ID NO: 13750 - RNA, 20 nt, synthetic construct
  source 1..20: mol_type = other RNA
aagttgaggttgaagacctg

SEQ ID NO: 13751 - RNA, 20 nt, synthetic construct
  source 1..20: mol_type = other RNA
aagttgcaaaaatactacaa

SEQ ID NO: 13752 - RNA, 20 nt, synthetic construct
  source 1..20: mol_type = other RNA
aagttgcagtgagcccagag

SEQ ID NO: 13753 - RNA, 20 nt, synthetic construct
  source 1..20: mol_type = other RNA
aagttgcatacgtcgtcccc

SEQ ID NO: 13754 - RNA, 20 nt, synthetic construct
  source 1..20: mol_type = other RNA
aagttgctatccagtctctg

SEQ ID NO: 13755 - RNA, 20 nt, synthetic construct
  source 1..20: mol_type = other RNA
aagttgcttggcacagaatt

SEQ ID NO: 13756 - RNA, 20 nt, synthetic construct
  source 1..20: mol_type = other RNA
aagttgctttttcttcttgt

SEQ ID NO: 13757 - RNA, 20 nt, synthetic construct
  source 1..20: mol_type = other RNA
aagttggcccaacatgctct

SEQ ID NO: 13758 - RNA, 20 nt, synthetic construct
  source 1..20: mol_type = other RNA
aagttgggagtctatttctg

SEQ ID NO: 13759 - RNA, 20 nt, synthetic construct
  source 1..20: mol_type = other RNA
aagttgggcttaacatttga

SEQ ID NO: 13760 - RNA, 20 nt, synthetic construct
  source 1..20: mol_type = other RNA
aagttgggcttggttggaaa

SEQ ID NO: 13761 - RNA, 20 nt, synthetic construct
  source 1..20: mol_type = other RNA
aagttggtcctgcatatgtt

SEQ ID NO: 13762 - RNA, 20 nt, synthetic construct
  source 1..20: mol_type = other RNA
aagttgtggtgagccaagat

SEQ ID NO: 13763 - RNA, 20 nt, synthetic construct
  source 1..20: mol_type = other RNA
aagttgtgtcatttttgtat

SEQ ID NO: 13764 - RNA, 20 nt, synthetic construct
  source 1..20: mol_type = other RNA
aagtttaaccaattatgctg

SEQ ID NO: 13765 - RNA, 20 nt, synthetic construct
  source 1..20: mol_type = other RNA
aagtttatcagtctccaatc

SEQ ID NO: 13766 - RNA, 20 nt, synthetic construct
  source 1..20: mol_type = other RNA
aagtttcaaactgtggtcac

SEQ ID NO: 13767 - RNA, 20 nt, synthetic construct
  source 1..20: mol_type = other RNA
aagtttcaccctgcgaaggc

SEQ ID NO: 13768 - RNA, 20 nt, synthetic construct
  source 1..20: mol_type = other RNA
aagtttcagtggttaatata

SEQ ID NO: 13769 - RNA, 20 nt, synthetic construct
  source 1..20: mol_type = other RNA
aagtttcatggacttcctat

SEQ ID NO: 13770 - RNA, 20 nt, synthetic construct
  source 1..20: mol_type = other RNA
aagtttccattctcttaatt

SEQ ID NO: 13771 - RNA, 20 nt, synthetic construct
  source 1..20: mol_type = other RNA
aagtttccgttttgcaagat

SEQ ID NO: 13772 - RNA, 20 nt, synthetic construct
  source 1..20: mol_type = other RNA
aagtttcctacatactgcac

SEQ ID NO: 13773 - RNA, 20 nt, synthetic construct
  source 1..20: mol_type = other RNA
aagtttcctagaaaatcata

SEQ ID NO: 13774 - RNA, 20 nt, synthetic construct
  source 1..20: mol_type = other RNA
aagtttcctgcacatgcaca

SEQ ID NO: 13775 - RNA, 20 nt, synthetic construct
  source 1..20: mol_type = other RNA
aagtttctagccataatcct

SEQ ID NO: 13776 - RNA, 20 nt, synthetic construct
  source 1..20: mol_type = other RNA
aagtttctctctccctgccc

SEQ ID NO: 13777 - RNA, 20 nt, synthetic construct
  source 1..20: mol_type = other RNA
aagtttctggaagtttcctg

SEQ ID NO: 13778 - RNA, 20 nt, synthetic construct
  source 1..20: mol_type = other RNA
aagtttgccaaagattcttg

SEQ ID NO: 13779 - RNA, 20 nt, synthetic construct
  source 1..20: mol_type = other RNA
aagtttggaaccagcctggc

SEQ ID NO: 13780 - RNA, 20 nt, synthetic construct
  source 1..20: mol_type = other RNA
aagtttggctcccatgattc

SEQ ID NO: 13781 - RNA, 20 nt, synthetic construct
  source 1..20: mol_type = other RNA
aagtttggttcatttcagga

SEQ ID NO: 13782 - RNA, 20 nt, synthetic construct
  source 1..20: mol_type = other RNA
aagttttaacttaagaactg

SEQ ID NO: 13783 - RNA, 20 nt, synthetic construct
  source 1..20: mol_type = other RNA
aagttttccaaccactgaat

SEQ ID NO: 13784 - RNA, 20 nt, synthetic construct
  source 1..20: mol_type = other RNA
aagttttccaggaaaagcaa

SEQ ID NO: 13785 - RNA, 20 nt, synthetic construct
  source 1..20: mol_type = other RNA
aagttttgcagttggggact

SEQ ID NO: 13786 - RNA, 20 nt, synthetic construct
  source 1..20: mol_type = other RNA
aagttttgggggaagagagc

SEQ ID NO: 13787 - RNA, 20 nt, synthetic construct
  source 1..20: mol_type = other RNA
aagttttttcctttgccttt

SEQ ID NO: 13788 - RNA, 20 nt, synthetic construct
  source 1..20: mol_type = other RNA
aataaaaacatatgcaggac

SEQ ID NO: 13789 - RNA, 20 nt, synthetic construct
  source 1..20: mol_type = other RNA
aataaaaacctttttgggat

SEQ ID NO: 13790 - RNA, 20 nt, synthetic construct
  source 1..20: mol_type = other RNA
aataaaaagcctctctgatg

SEQ ID NO: 13791 - RNA, 20 nt, synthetic construct
  source 1..20: mol_type = other RNA
aataaaaagtatcgtgagac

SEQ ID NO: 13792 - RNA, 20 nt, synthetic construct
  source 1..20: mol_type = other RNA
aataaaaagtgacttctgga

SEQ ID NO: 13793 - RNA, 20 nt, synthetic construct
  source 1..20: mol_type = other RNA
aataaaacacaaggacaggt

SEQ ID NO: 13794 - RNA, 20 nt, synthetic construct
  source 1..20: mol_type = other RNA
aataaaacacatgtcatggg

SEQ ID NO: 13795 - RNA, 20 nt, synthetic construct
  source 1..20: mol_type = other RNA
aataaaacatggccagtatc

SEQ ID NO: 13796 - RNA, 20 nt, synthetic construct
  source 1..20: mol_type = other RNA
aataaaacatgttgtgtaga

SEQ ID NO: 13797 - RNA, 20 nt, synthetic construct
  source 1..20: mol_type = other RNA
aataaaagcctcatttgaac

SEQ ID NO: 13798 - RNA, 20 nt, synthetic construct
  source 1..20: mol_type = other RNA
aataaaagctctaatagttc

SEQ ID NO: 13799 - RNA, 20 nt, synthetic construct
  source 1..20: mol_type = other RNA
aataaaagctggagttattt

SEQ ID NO: 13800 - RNA, 20 nt, synthetic construct
  source 1..20: mol_type = other RNA
aataaaagcttatgatcttg

SEQ ID NO: 13801 - RNA, 20 nt, synthetic construct
  source 1..20: mol_type = other RNA
aataaaagttacaaggattg

SEQ ID NO: 13802 - RNA, 20 nt, synthetic construct
  source 1..20: mol_type = other RNA
aataaaatagcaggattctt

SEQ ID NO: 13803 - RNA, 20 nt, synthetic construct
  source 1..20: mol_type = other RNA
aataaaatctgtatgagaag

SEQ ID NO: 13804 - RNA, 20 nt, synthetic construct
  source 1..20: mol_type = other RNA
aataaaatgtctggccgggc

SEQ ID NO: 13805 - RNA, 20 nt, synthetic construct
  source 1..20: mol_type = other RNA
aataaaatgtttagcggaat

SEQ ID NO: 13806 - RNA, 20 nt, synthetic construct
  source 1..20: mol_type = other RNA
aataaaattcaccaaacacc

SEQ ID NO: 13807 - RNA, 20 nt, synthetic construct
  source 1..20: mol_type = other RNA
aataaaattctgacccttta

SEQ ID NO: 13808 - RNA, 20 nt, synthetic construct
  source 1..20: mol_type = other RNA
aataaaattctgatagcttg

SEQ ID NO: 13809 - RNA, 20 nt, synthetic construct
  source 1..20: mol_type = other RNA
aataaacaagtcacaaaaag

SEQ ID NO: 13810 - RNA, 20 nt, synthetic construct
  source 1..20: mol_type = other RNA
aataaacacttgaattagtg

SEQ ID NO: 13811 - RNA, 20 nt, synthetic construct
  source 1..20: mol_type = other RNA
aataaacattttccctcctt

SEQ ID NO: 13812 - RNA, 20 nt, synthetic construct
  source 1..20: mol_type = other RNA
aataaaccaagtttggttca

SEQ ID NO: 13813 - RNA, 20 nt, synthetic construct
  source 1..20: mol_type = other RNA
aataaaccacgcagtttgtt

SEQ ID NO: 13814 - RNA, 20 nt, synthetic construct
  source 1..20: mol_type = other RNA
aataaacgacaccagaacta

SEQ ID NO: 13815 - RNA, 20 nt, synthetic construct
  source 1..20: mol_type = other RNA
aataaacgcggaatgaagca

SEQ ID NO: 13816 - RNA, 20 nt, synthetic construct
  source 1..20: mol_type = other RNA
aataaactaacaaagaacag

SEQ ID NO: 13817 - RNA, 20 nt, synthetic construct
  source 1..20: mol_type = other RNA
aataaagacttcacgatgct

SEQ ID NO: 13818 - RNA, 20 nt, synthetic construct
  source 1..20: mol_type = other RNA
aataaagcaagtatgagcca

SEQ ID NO: 13819 - RNA, 20 nt, synthetic construct
  source 1..20: mol_type = other RNA
aataaaggcaatgctctctt

SEQ ID NO: 13820 - RNA, 20 nt, synthetic construct
  source 1..20: mol_type = other RNA
aataaaggctttcgtatgga

SEQ ID NO: 13821 - RNA, 20 nt, synthetic construct
  source 1..20: mol_type = other RNA
aataaagggtcagaatttta

SEQ ID NO: 13822 - RNA, 20 nt, synthetic construct
  source 1..20: mol_type = other RNA
aataaaggtgctaattgttt

SEQ ID NO: 13823 - RNA, 20 nt, synthetic construct
  source 1..20: mol_type = other RNA
aataaagttccccattgaca

SEQ ID NO: 13824 - RNA, 20 nt, synthetic construct
  source 1..20: mol_type = other RNA
aataaatactagtaggatga

SEQ ID NO: 13825 - RNA, 20 nt, synthetic construct
  source 1..20: mol_type = other RNA
aataaatcctcacatgtttg

SEQ ID NO: 13826 - RNA, 20 nt, synthetic construct
  source 1..20: mol_type = other RNA
aataaatctaagtctcaacc

SEQ ID NO: 13827 - RNA, 20 nt, synthetic construct
  source 1..20: mol_type = other RNA
aataaatgaatattcgttcc

SEQ ID NO: 13828 - RNA, 20 nt, synthetic construct
  source 1..20: mol_type = other RNA
aataaatgcataaacgacag

SEQ ID NO: 13829 - RNA, 20 nt, synthetic construct
  source 1..20: mol_type = other RNA
aataaatggtagcttgggct

SEQ ID NO: 13830 - RNA, 20 nt, synthetic construct
  source 1..20: mol_type = other RNA
aataaatggtgcaggccaga

SEQ ID NO: 13831 - RNA, 20 nt, synthetic construct
  source 1..20: mol_type = other RNA
aataacaaaaggtagaagat

SEQ ID NO: 13832 - RNA, 20 nt, synthetic construct
  source 1..20: mol_type = other RNA
aataacaccatagctgaagg

SEQ ID NO: 13833 - RNA, 20 nt, synthetic construct
  source 1..20: mol_type = other RNA
aataacacgcagaaccactg

SEQ ID NO: 13834 - RNA, 20 nt, synthetic construct
  source 1..20: mol_type = other RNA
aataacagaagaagaattct

SEQ ID NO: 13835 - RNA, 20 nt, synthetic construct
  source 1..20: mol_type = other RNA
aataacagcctaagcaaatg

SEQ ID NO: 13836 - RNA, 20 nt, synthetic construct
  source 1..20: mol_type = other RNA
aataacatgcatatgtttgt

SEQ ID NO: 13837 - RNA, 20 nt, synthetic construct
  source 1..20: mol_type = other RNA
aataaccaatgtcagagatc

SEQ ID NO: 13838 - RNA, 20 nt, synthetic construct
  source 1..20: mol_type = other RNA
aataacccatatctttgctt

SEQ ID NO: 13839 - RNA, 20 nt, synthetic construct
  source 1..20: mol_type = other RNA
aataaccctgttttgtagat

SEQ ID NO: 13840 - RNA, 20 nt, synthetic construct
  source 1..20: mol_type = other RNA
aataacctcaaagtggaaac

SEQ ID NO: 13841 - RNA, 20 nt, synthetic construct
  source 1..20: mol_type = other RNA
aataacctcataagaactcc

SEQ ID NO: 13842 - RNA, 20 nt, synthetic construct
  source 1..20: mol_type = other RNA
aataacgggccgggcgctgt

SEQ ID NO: 13843 - RNA, 20 nt, synthetic construct
  source 1..20: mol_type = other RNA
aataactaaactttgagtag

SEQ ID NO: 13844 - RNA, 20 nt, synthetic construct
  source 1..20: mol_type = other RNA
aataactacacatcagtgct

SEQ ID NO: 13845 - RNA, 20 nt, synthetic construct
  source 1..20: mol_type = other RNA
aataactagaaacttcttct

SEQ ID NO: 13846 - RNA, 20 nt, synthetic construct
  source 1..20: mol_type = other RNA
aataactccagcttttatta

SEQ ID NO: 13847 - RNA, 20 nt, synthetic construct
  source 1..20: mol_type = other RNA
aataactgcctaagtaatgc

SEQ ID NO: 13848 - RNA, 20 nt, synthetic construct
  source 1..20: mol_type = other RNA
aataactgtcctgaattcta

SEQ ID NO: 13849 - RNA, 20 nt, synthetic construct
  source 1..20: mol_type = other RNA
aataacttccatgagattac

SEQ ID NO: 13850 - RNA, 20 nt, synthetic construct
  source 1..20: mol_type = other RNA
aataacttggagaacttaaa

SEQ ID NO: 13851 - RNA, 20 nt, synthetic construct
  source 1..20: mol_type = other RNA
aataactttaatcaccaggc

SEQ ID NO: 13852 - RNA, 20 nt, synthetic construct
  source 1..20: mol_type = other RNA
aataagaaagatctcaaaca

SEQ ID NO: 13853 - RNA, 20 nt, synthetic construct
  source 1..20: mol_type = other RNA
aataagaagattgagtcagt

SEQ ID NO: 13854 - RNA, 20 nt, synthetic construct
  source 1..20: mol_type = other RNA
aataagaaggtttgtagagc

SEQ ID NO: 13855 - RNA, 20 nt, synthetic construct
  source 1..20: mol_type = other RNA
aataagaagtgaaaaatgac

SEQ ID NO: 13856 - RNA, 20 nt, synthetic construct
  source 1..20: mol_type = other RNA
aataagacaccgctccacgc

SEQ ID NO: 13857 - RNA, 20 nt, synthetic construct
  source 1..20: mol_type = other RNA
aataagatcatacacctgga

SEQ ID NO: 13858 - RNA, 20 nt, synthetic construct
  source 1..20: mol_type = other RNA
aataagcagaattcaaaaac

SEQ ID NO: 13859 - RNA, 20 nt, synthetic construct
  source 1..20: mol_type = other RNA
aataagctaatcccaaagtg

SEQ ID NO: 13860 - RNA, 20 nt, synthetic construct
  source 1..20: mol_type = other RNA
aataagcttcgaagcaaaac

SEQ ID NO: 13861 - RNA, 20 nt, synthetic construct
  source 1..20: mol_type = other RNA
aataaggaaagcacgtttga

SEQ ID NO: 13862 - RNA, 20 nt, synthetic construct
  source 1..20: mol_type = other RNA
aataagggcattttcaaggt

SEQ ID NO: 13863 - RNA, 20 nt, synthetic construct
  source 1..20: mol_type = other RNA
aataaggtcacattcagagg

SEQ ID NO: 13864 - RNA, 20 nt, synthetic construct
  source 1..20: mol_type = other RNA
aataaggtctgtaagtcagt

SEQ ID NO: 13865 - RNA, 20 nt, synthetic construct
  source 1..20: mol_type = other RNA
aataagtgagtttgacctgt

SEQ ID NO: 13866 - RNA, 20 nt, synthetic construct
  source 1..20: mol_type = other RNA
aataagttaactgaaatcgg

SEQ ID NO: 13867 - RNA, 20 nt, synthetic construct
  source 1..20: mol_type = other RNA
aataagtttcatggacttcc

SEQ ID NO: 13868 - RNA, 20 nt, synthetic construct
  source 1..20: mol_type = other RNA
aataataactacacatcagt

SEQ ID NO: 13869 - RNA, 20 nt, synthetic construct
  source 1..20: mol_type = other RNA
aataatacaaatgatgaagg

SEQ ID NO: 13870 - RNA, 20 nt, synthetic construct
  source 1..20: mol_type = other RNA
aataatacacttttcaggta

SEQ ID NO: 13871 - RNA, 20 nt, synthetic construct
  source 1..20: mol_type = other RNA
aataatacctaacagccggc

SEQ ID NO: 13872 - RNA, 20 nt, synthetic construct
  source 1..20: mol_type = other RNA
aataatagctatcctaatgg

SEQ ID NO: 13873 - RNA, 20 nt, synthetic construct
  source 1..20: mol_type = other RNA
aataatatgataccctcaaa

SEQ ID NO: 13874 - RNA, 20 nt, synthetic construct
  source 1..20: mol_type = other RNA
aataatatgcctcatgcatc

SEQ ID NO: 13875 - RNA, 20 nt, synthetic construct
  source 1..20: mol_type = other RNA
aataatcattgttaggtgct

SEQ ID NO: 13876 - RNA, 20 nt, synthetic construct
  source 1..20: mol_type = other RNA
aataatcccgcaccttgatt

SEQ ID NO: 13877 - RNA, 20 nt, synthetic construct
  source 1..20: mol_type = other RNA
aataatgaaagctcccaatg

SEQ ID NO: 13878 - RNA, 20 nt, synthetic construct
  source 1..20: mol_type = other RNA
aataatgcacatgggcatgg

SEQ ID NO: 13879 - RNA, 20 nt, synthetic construct
  source 1..20: mol_type = other RNA
aataatgttttccgtgtgac

SEQ ID NO: 13880 - RNA, 20 nt, synthetic construct
  source 1..20: mol_type = other RNA
aataattaagacaatgtgga

SEQ ID NO: 13881 - RNA, 20 nt, synthetic construct
  source 1..20: mol_type = other RNA
aataattctgtgccaagcaa

SEQ ID NO: 13882 - RNA, 20 nt, synthetic construct
  source 1..20: mol_type = other RNA
aataattcttcctgtcttgg

SEQ ID NO: 13883 - RNA, 20 nt, synthetic construct
  source 1..20: mol_type = other RNA
aataattgctgcagtttttc

SEQ ID NO: 13884 - RNA, 20 nt, synthetic construct
  source 1..20: mol_type = other RNA
aataattgcttttgctgagg

SEQ ID NO: 13885 - RNA, 20 nt, synthetic construct
  source 1..20: mol_type = other RNA
aataatttacatagtgctct

SEQ ID NO: 13886 - RNA, 20 nt, synthetic construct
  source 1..20: mol_type = other RNA
aataatttatcagatcccaa

SEQ ID NO: 13887 - RNA, 20 nt, synthetic construct
  source 1..20: mol_type = other RNA
aataatttccaggtcattac

SEQ ID NO: 13888 - RNA, 20 nt, synthetic construct
  source 1..20: mol_type = other RNA
aataatttccctcagaattt

SEQ ID NO: 13889 - RNA, 20 nt, synthetic construct
  source 1..20: mol_type = other RNA
aataatttggatgaacgcta

SEQ ID NO: 13890 - RNA, 20 nt, synthetic construct
  source 1..20: mol_type = other RNA
aataatttggcaaaaaatgc

SEQ ID NO: 13891 - RNA, 20 nt, synthetic construct
  source 1..20: mol_type = other RNA
aataatttggttatgcgaat

SEQ ID NO: 13892 - RNA, 20 nt, synthetic construct
  source 1..20: mol_type = other RNA
aatacaaaaagtgataccat

SEQ ID NO: 13893 - RNA, 20 nt, synthetic construct
  source 1..20: mol_type = other RNA
aatacaaaaatgacacaact

SEQ ID NO: 13894 - RNA, 20 nt, synthetic construct
  source 1..20: mol_type = other RNA
aatacaaaggtgttaagccg

SEQ ID NO: 13895 - RNA, 20 nt, synthetic construct
  source 1..20: mol_type = other RNA
aatacaaatgatgaagggtt

SEQ ID NO: 13896 - RNA, 20 nt, synthetic construct
  source 1..20: mol_type = other RNA
aatacaacagcacctttttt

SEQ ID NO: 13897 - RNA, 20 nt, synthetic construct
  source 1..20: mol_type = other RNA
aatacaatgtgagccacata

SEQ ID NO: 13898 - RNA, 20 nt, synthetic construct
  source 1..20: mol_type = other RNA
aatacacatgttgagtcttg

SEQ ID NO: 13899 - RNA, 20 nt, synthetic construct
  source 1..20: mol_type = other RNA
aatacaccaaactcaaaagg

SEQ ID NO: 13900 - RNA, 20 nt, synthetic construct
  source 1..20: mol_type = other RNA
aatacacgtggctgtcaaaa

SEQ ID NO: 13901 - RNA, 20 nt, synthetic construct
  source 1..20: mol_type = other RNA
aatacacttttcaggtattg

SEQ ID NO: 13902 - RNA, 20 nt, synthetic construct
  source 1..20: mol_type = other RNA
aatacagaccgatggaacag

SEQ ID NO: 13903 - RNA, 20 nt, synthetic construct
  source 1..20: mol_type = other RNA
aatacagagcacagactcaa

SEQ ID NO: 13904 - RNA, 20 nt, synthetic construct
  source 1..20: mol_type = other RNA
aatacagctccaaagaacag

SEQ ID NO: 13905 - RNA, 20 nt, synthetic construct
  source 1..20: mol_type = other RNA
aatacagtaaagccccattg

SEQ ID NO: 13906 - RNA, 20 nt, synthetic construct
  source 1..20: mol_type = other RNA
aatacagtctgatttacttt

SEQ ID NO: 13907 - RNA, 20 nt, synthetic construct
  source 1..20: mol_type = other RNA
aatacagtgtttttgaattc

SEQ ID NO: 13908 - RNA, 20 nt, synthetic construct
  source 1..20: mol_type = other RNA
aatacagttaacgtatgaat

SEQ ID NO: 13909 - RNA, 20 nt, synthetic construct
  source 1..20: mol_type = other RNA
aatacagttttgaccaaaac

SEQ ID NO: 13910 - RNA, 20 nt, synthetic construct
  source 1..20: mol_type = other RNA
aatacatgaggcctctcccc

SEQ ID NO: 13911 - RNA, 20 nt, synthetic construct
  source 1..20: mol_type = other RNA
aatacatgtcatgttcccgg

SEQ ID NO: 13912 - RNA, 20 nt, synthetic construct
  source 1..20: mol_type = other RNA
aataccaaaaaaggtgctgt

SEQ ID NO: 13913 - RNA, 20 nt, synthetic construct
  source 1..20: mol_type = other RNA
aataccaaattcacgagact

SEQ ID NO: 13914 - RNA, 20 nt, synthetic construct
  source 1..20: mol_type = other RNA
aataccacctgaaatctgat

SEQ ID NO: 13915 - RNA, 20 nt, synthetic construct
  source 1..20: mol_type = other RNA
aataccacttagtttgcaat

SEQ ID NO: 13916 - RNA, 20 nt, synthetic construct
  source 1..20: mol_type = other RNA
aataccagagattgggaaaa

SEQ ID NO: 13917 - RNA, 20 nt, synthetic construct
  source 1..20: mol_type = other RNA
aataccagaggttaaagcaa

SEQ ID NO: 13918 - RNA, 20 nt, synthetic construct
  source 1..20: mol_type = other RNA
aatacccacaagaaaaacct

SEQ ID NO: 13919 - RNA, 20 nt, synthetic construct
  source 1..20: mol_type = other RNA
aatacccctccctacctggc

SEQ ID NO: 13920 - RNA, 20 nt, synthetic construct
  source 1..20: mol_type = other RNA
aatacctaacagccggcata

SEQ ID NO: 13921 - RNA, 20 nt, synthetic construct
  source 1..20: mol_type = other RNA
aatacctagttttccaatcc

SEQ ID NO: 13922 - RNA, 20 nt, synthetic construct
  source 1..20: mol_type = other RNA
aatacctatttagagggatg

SEQ ID NO: 13923 - RNA, 20 nt, synthetic construct
  source 1..20: mol_type = other RNA
aatacctgaaaagtgtatta

SEQ ID NO: 13924 - RNA, 20 nt, synthetic construct
  source 1..20: mol_type = other RNA
aatacctgcaggttgatact

SEQ ID NO: 13925 - RNA, 20 nt, synthetic construct
  source 1..20: mol_type = other RNA
aatacgaaagtgctctaccc

SEQ ID NO: 13926 - RNA, 20 nt, synthetic construct
  source 1..20: mol_type = other RNA
aatacgataaacttcagttt

SEQ ID NO: 13927 - RNA, 20 nt, synthetic construct
  source 1..20: mol_type = other RNA
aatacggccgggagtggtgg

SEQ ID NO: 13928 - RNA, 20 nt, synthetic construct
  source 1..20: mol_type = other RNA
aatacgtatatgaaaagccc

SEQ ID NO: 13929 - RNA, 20 nt, synthetic construct
  source 1..20: mol_type = other RNA
aatacgtgtatactgggtgt

SEQ ID NO: 13930 - RNA, 20 nt, synthetic construct
  source 1..20: mol_type = other RNA
aatactaacgatccttacta

SEQ ID NO: 13931 - RNA, 20 nt, synthetic construct
  source 1..20: mol_type = other RNA
aatactacaagagttcccct

SEQ ID NO: 13932 - RNA, 20 nt, synthetic construct
  source 1..20: mol_type = other RNA
aatactactgcaaatatcca

SEQ ID NO: 13933 - RNA, 20 nt, synthetic construct
  source 1..20: mol_type = other RNA
aatactagcaaactgaatca

SEQ ID NO: 13934 - RNA, 20 nt, synthetic construct
  source 1..20: mol_type = other RNA
aatactagtaggatgaatta

SEQ ID NO: 13935 - RNA, 20 nt, synthetic construct
  source 1..20: mol_type = other RNA
aatactatgtatgtggctca

SEQ ID NO: 13936 - RNA, 20 nt, synthetic construct
  source 1..20: mol_type = other RNA
aatactcaaactatgcttaa

SEQ ID NO: 13937 - RNA, 20 nt, synthetic construct
  source 1..20: mol_type = other RNA
aatactcaagggctttcaat

SEQ ID NO: 13938 - RNA, 20 nt, synthetic construct
  source 1..20: mol_type = other RNA
aatactccaccagcatcttt

SEQ ID NO: 13939 - RNA, 20 nt, synthetic construct
  source 1..20: mol_type = other RNA
aatactcgtgtgtctcataa

SEQ ID NO: 13940 - RNA, 20 nt, synthetic construct
  source 1..20: mol_type = other RNA
aatactctagtggtgcttaa

SEQ ID NO: 13941 - RNA, 20 nt, synthetic construct
  source 1..20: mol_type = other RNA
aatactgcattgtgcactta

SEQ ID NO: 13942 - RNA, 20 nt, synthetic construct
  source 1..20: mol_type = other RNA
aatactgtagaatgtttttc

SEQ ID NO: 13943 - RNA, 20 nt, synthetic construct
  source 1..20: mol_type = other RNA
aatactgtctcagtcccaaa

SEQ ID NO: 13944 - RNA, 20 nt, synthetic construct
  source 1..20: mol_type = other RNA
aatactgttatgacaagact

SEQ ID NO: 13945 - RNA, 20 nt, synthetic construct
  source 1..20: mol_type = other RNA
aatacttaagagcatgttgg

SEQ ID NO: 13946 - RNA, 20 nt, synthetic construct
  source 1..20: mol_type = other RNA
aatacttaatagcccaacag

SEQ ID NO: 13947 - RNA, 20 nt, synthetic construct
  source 1..20: mol_type = other RNA
aatacttcatttccattgta

SEQ ID NO: 13948 - RNA, 20 nt, synthetic construct
  source 1..20: mol_type = other RNA
aatacttgaacattctgtag

SEQ ID NO: 13949 - RNA, 20 nt, synthetic construct
  source 1..20: mol_type = other RNA
aatacttgatctacatttag

SEQ ID NO: 13950 - RNA, 20 nt, synthetic construct
  source 1..20: mol_type = other RNA
aatacttggacaggggacat

SEQ ID NO: 13951 - RNA, 20 nt, synthetic construct
  source 1..20: mol_type = other RNA
aatacttggatcttatctgc

SEQ ID NO: 13952 - RNA, 20 nt, synthetic construct
  source 1..20: mol_type = other RNA
aatacttgtgtagcgggaaa

SEQ ID NO: 13953 - RNA, 20 nt, synthetic construct
  source 1..20: mol_type = other RNA
aatactttagacatgggcta

SEQ ID NO: 13954 - RNA, 20 nt, synthetic construct
  source 1..20: mol_type = other RNA
aatactttcacactgatttt

SEQ ID NO: 13955 - RNA, 20 nt, synthetic construct
  source 1..20: mol_type = other RNA
aatactttcccatctctagt

SEQ ID NO: 13956 - RNA, 20 nt, synthetic construct
  source 1..20: mol_type = other RNA
aatagaaaacttgagcagat

SEQ ID NO: 13957 - RNA, 20 nt, synthetic construct
  source 1..20: mol_type = other RNA
aatagaaaatccttacttcc

SEQ ID NO: 13958 - RNA, 20 nt, synthetic construct
  source 1..20: mol_type = other RNA
aatagaaagttagtgtctaa

SEQ ID NO: 13959 - RNA, 20 nt, synthetic construct
  source 1..20: mol_type = other RNA
aatagaactgtcacaattca

SEQ ID NO: 13960 - RNA, 20 nt, synthetic construct
  source 1..20: mol_type = other RNA
aatagaagagcagtgtgttc

SEQ ID NO: 13961 - RNA, 20 nt, synthetic construct
  source 1..20: mol_type = other RNA
aatagaagggagaacccagg

SEQ ID NO: 13962 - RNA, 20 nt, synthetic construct
  source 1..20: mol_type = other RNA
aatagacaaagacaagttct

SEQ ID NO: 13963 - RNA, 20 nt, synthetic construct
  source 1..20: mol_type = other RNA
aatagactcccaacttataa

SEQ ID NO: 13964 - RNA, 20 nt, synthetic construct
  source 1..20: mol_type = other RNA
aatagaggatgggcattcca

SEQ ID NO: 13965 - RNA, 20 nt, synthetic construct
  source 1..20: mol_type = other RNA
aatagaggtctgtctttcag

SEQ ID NO: 13966 - RNA, 20 nt, synthetic construct
  source 1..20: mol_type = other RNA
aatagagttccatctgttat

SEQ ID NO: 13967 - RNA, 20 nt, synthetic construct
  source 1..20: mol_type = other RNA
aatagataaactggaattca

SEQ ID NO: 13968 - RNA, 20 nt, synthetic construct
  source 1..20: mol_type = other RNA
aatagataaggttgttcttg

SEQ ID NO: 13969 - RNA, 20 nt, synthetic construct
  source 1..20: mol_type = other RNA
aatagataggtcatgtacat

SEQ ID NO: 13970 - RNA, 20 nt, synthetic construct
  source 1..20: mol_type = other RNA
aatagatgcctagaaaggaa

SEQ ID NO: 13971 - RNA, 20 nt, synthetic construct
  source 1..20: mol_type = other RNA
aatagcaacaaaacaatcta

SEQ ID NO: 13972 - RNA, 20 nt, synthetic construct
  source 1..20: mol_type = other RNA
aatagcaactgttttttcct

SEQ ID NO: 13973 - RNA, 20 nt, synthetic construct
  source 1..20: mol_type = other RNA
aatagcagaaacacaggact

SEQ ID NO: 13974 - RNA, 20 nt, synthetic construct
  source 1..20: mol_type = other RNA
aatagcaggattcttgttaa

SEQ ID NO: 13975 - RNA, 20 nt, synthetic construct
  source 1..20: mol_type = other RNA
aatagcagtgctgaaagcta

SEQ ID NO: 13976 - RNA, 20 nt, synthetic construct
  source 1..20: mol_type = other RNA
aatagcatcttagctcttcc

SEQ ID NO: 13977 - RNA, 20 nt, synthetic construct
  source 1..20: mol_type = other RNA
aatagccagtgcagcaagca

SEQ ID NO: 13978 - RNA, 20 nt, synthetic construct
  source 1..20: mol_type = other RNA
aatagcccaacagggttttg

SEQ ID NO: 13979 - RNA, 20 nt, synthetic construct
  source 1..20: mol_type = other RNA
aatagcccagcaggattttt

SEQ ID NO: 13980 - RNA, 20 nt, synthetic construct
  source 1..20: mol_type = other RNA
aatagcctcctaagttttgg

SEQ ID NO: 13981 - RNA, 20 nt, synthetic construct
  source 1..20: mol_type = other RNA
aatagctagtgatgttgagt

SEQ ID NO: 13982 - RNA, 20 nt, synthetic construct
  source 1..20: mol_type = other RNA
aatagctagtgtcttagtct

SEQ ID NO: 13983 - RNA, 20 nt, synthetic construct
  source 1..20: mol_type = other RNA
aatagctatcctaatgggcg

SEQ ID NO: 13984 - RNA, 20 nt, synthetic construct
  source 1..20: mol_type = other RNA
aataggaaagtgacagatga

SEQ ID NO: 13985 - RNA, 20 nt, synthetic construct
  source 1..20: mol_type = other RNA
aataggaagtccatgaaact

SEQ ID NO: 13986 - RNA, 20 nt, synthetic construct
  source 1..20: mol_type = other RNA
aataggaagtggctagacgg

SEQ ID NO: 13987 - RNA, 20 nt, synthetic construct
  source 1..20: mol_type = other RNA
aataggaatagtattcagga

SEQ ID NO: 13988 - RNA, 20 nt, synthetic construct
  source 1..20: mol_type = other RNA
aataggattaagacactaca

SEQ ID NO: 13989 - RNA, 20 nt, synthetic construct
  source 1..20: mol_type = other RNA
aataggcaaattcatagatc

SEQ ID NO: 13990 - RNA, 20 nt, synthetic construct
  source 1..20: mol_type = other RNA
aataggcagtcctctacttt

SEQ ID NO: 13991 - RNA, 20 nt, synthetic construct
  source 1..20: mol_type = other RNA
aataggcctaggtgtgataa

SEQ ID NO: 13992 - RNA, 20 nt, synthetic construct
  source 1..20: mol_type = other RNA
aatagggacggccttctttt

SEQ ID NO: 13993 - RNA, 20 nt, synthetic construct
  source 1..20: mol_type = other RNA
aatagggcctcaaatttcat

SEQ ID NO: 13994 - RNA, 20 nt, synthetic construct
  source 1..20: mol_type = other RNA
aatagggtgctactcaaagt

SEQ ID NO: 13995 - RNA, 20 nt, synthetic construct
  source 1..20: mol_type = other RNA
aataggtattcatgctgtga

SEQ ID NO: 13996 - RNA, 20 nt, synthetic construct
  source 1..20: mol_type = other RNA
aataggtgtgtgttccttcc

SEQ ID NO: 13997 - RNA, 20 nt, synthetic construct
  source 1..20: mol_type = other RNA
aatagtaactttctgcttaa

SEQ ID NO: 13998 - RNA, 20 nt, synthetic construct
  source 1..20: mol_type = other RNA
aatagtaataaaggcaatgc

SEQ ID NO: 13999 - RNA, 20 nt, synthetic construct
  source 1..20: mol_type = other RNA
aatagtagcttcaatgaggg

SEQ ID NO: 14000 - RNA, 20 nt, synthetic construct
  source 1..20: mol_type = other RNA
aatagtagttgctcagaaaa

SEQ ID NO: 14001 - RNA, 20 nt, synthetic construct
  source 1..20: mol_type = other RNA
aatagtatgaaggttcttaa

SEQ ID NO: 14002 - RNA, 20 nt, synthetic construct
  source 1..20: mol_type = other RNA
aatagtattcaggacagatt

SEQ ID NO: 14003 - RNA, 20 nt, synthetic construct
  source 1..20: mol_type = other RNA
aatagtcaagtaacagttca

SEQ ID NO: 14004 - RNA, 20 nt, synthetic construct
  source 1..20: mol_type = other RNA
aatagtctcacgatactttt

SEQ ID NO: 14005 - RNA, 20 nt, synthetic construct
  source 1..20: mol_type = other RNA
aatagtgaccctttgaagta

SEQ ID NO: 14006 - RNA, 20 nt, synthetic construct
  source 1..20: mol_type = other RNA
aatagtgggtagaagcagca

SEQ ID NO: 14007 - RNA, 20 nt, synthetic construct
  source 1..20: mol_type = other RNA
aatagttaacgtttatctac

SEQ ID NO: 14008 - RNA, 20 nt, synthetic construct
  source 1..20: mol_type = other RNA
aatagttcacctctccgggt

SEQ ID NO: 14009 - RNA, 20 nt, synthetic construct
  source 1..20: mol_type = other RNA
aatagttggtcagaaaaatg

SEQ ID NO: 14010 - RNA, 20 nt, synthetic construct
  source 1..20: mol_type = other RNA
aatataaaaagcctctgtgg

SEQ ID NO: 14011 - RNA, 20 nt, synthetic construct
  source 1..20: mol_type = other RNA
aatataaaaattccgctctg

SEQ ID NO: 14012 - RNA, 20 nt, synthetic construct
  source 1..20: mol_type = other RNA
aatataaacgtgtgtgtaag

SEQ ID NO: 14013 - RNA, 20 nt, synthetic construct
  source 1..20: mol_type = other RNA
aatataaactcttccttatc

SEQ ID NO: 14014 - RNA, 20 nt, synthetic construct
  source 1..20: mol_type = other RNA
aatatacctgtagaaaatag

SEQ ID NO: 14015 - RNA, 20 nt, synthetic construct
  source 1..20: mol_type = other RNA
aatataccttatgtgaaagt

SEQ ID NO: 14016 - RNA, 20 nt, synthetic construct
  source 1..20: mol_type = other RNA
aatatactgactagtggctc

SEQ ID NO: 14017 - RNA, 20 nt, synthetic construct
  source 1..20: mol_type = other RNA
aatatactggaaaactagag

SEQ ID NO: 14018 - RNA, 20 nt, synthetic construct
  source 1..20: mol_type = other RNA
aatatacttgtcaagttctg

SEQ ID NO: 14019 - RNA, 20 nt, synthetic construct
  source 1..20: mol_type = other RNA
aatatagaaggccagaggga

SEQ ID NO: 14020 - RNA, 20 nt, synthetic construct
  source 1..20: mol_type = other RNA
aatatagctaagaaacagta

SEQ ID NO: 14021 - RNA, 20 nt, synthetic construct
  source 1..20: mol_type = other RNA
aatataggagactatcgtta

SEQ ID NO: 14022 - RNA, 20 nt, synthetic construct
  source 1..20: mol_type = other RNA
aatatagtgggaccccgtct

SEQ ID NO: 14023 - RNA, 20 nt, synthetic construct
  source 1..20: mol_type = other RNA
aatatataaagaactccaac

SEQ ID NO: 14024 - RNA, 20 nt, synthetic construct
  source 1..20: mol_type = other RNA
aatatatacggaatgattcc

SEQ ID NO: 14025 - RNA, 20 nt, synthetic construct
  source 1..20: mol_type = other RNA
aatatatactgaagttctca

SEQ ID NO: 14026 - RNA, 20 nt, synthetic construct
  source 1..20: mol_type = other RNA
aatatatcacaacttgtatg

SEQ ID NO: 14027 - RNA, 20 nt, synthetic construct
  source 1..20: mol_type = other RNA
aatatattaaccactgaaac

SEQ ID NO: 14028 - RNA, 20 nt, synthetic construct
  source 1..20: mol_type = other RNA
aatatattctaaacctgagg

SEQ ID NO: 14029 - RNA, 20 nt, synthetic construct
  source 1..20: mol_type = other RNA
aatatcacactgtttgatta

SEQ ID NO: 14030 - RNA, 20 nt, synthetic construct
  source 1..20: mol_type = other RNA
aatatcatttgaatgatgcg

SEQ ID NO: 14031 - RNA, 20 nt, synthetic construct
  source 1..20: mol_type = other RNA
aatatccaagcacaaacctg

SEQ ID NO: 14032 - RNA, 20 nt, synthetic construct
  source 1..20: mol_type = other RNA
aatatccaatcactggctag

SEQ ID NO: 14033 - RNA, 20 nt, synthetic construct
  source 1..20: mol_type = other RNA
aatatccctgataatcacag

SEQ ID NO: 14034 - RNA, 20 nt, synthetic construct
  source 1..20: mol_type = other RNA
aatatccctggggtttcctt

SEQ ID NO: 14035 - RNA, 20 nt, synthetic construct
  source 1..20: mol_type = other RNA
aatatccgaaagaactgaaa

SEQ ID NO: 14036 - RNA, 20 nt, synthetic construct
  source 1..20: mol_type = other RNA
aatatctatcagggctgaaa

SEQ ID NO: 14037 - RNA, 20 nt, synthetic construct
  source 1..20: mol_type = other RNA
aatatctccctcacagtcca

SEQ ID NO: 14038 - RNA, 20 nt, synthetic construct
  source 1..20: mol_type = other RNA
aatatctggactgaaaagat

SEQ ID NO: 14039 - RNA, 20 nt, synthetic construct
  source 1..20: mol_type = other RNA
aatatctttggggagatacc

SEQ ID NO: 14040 - RNA, 20 nt, synthetic construct
  source 1..20: mol_type = other RNA
aatatgaaccacactgacag

SEQ ID NO: 14041 - RNA, 20 nt, synthetic construct
  source 1..20: mol_type = other RNA
aatatgaagcattaatgcaa

SEQ ID NO: 14042 - RNA, 20 nt, synthetic construct
  source 1..20: mol_type = other RNA
aatatgactggtgtccttct

SEQ ID NO: 14043 - RNA, 20 nt, synthetic construct
  source 1..20: mol_type = other RNA
aatatgagaattcattgttg

SEQ ID NO: 14044 - RNA, 20 nt, synthetic construct
  source 1..20: mol_type = other RNA
aatatgagttcctgcttccc

SEQ ID NO: 14045 - RNA, 20 nt, synthetic construct
  source 1..20: mol_type = other RNA
aatatgataccctcaaaaga

SEQ ID NO: 14046 - RNA, 20 nt, synthetic construct
  source 1..20: mol_type = other RNA
aatatgcagtatgtgccatt

SEQ ID NO: 14047 - RNA, 20 nt, synthetic construct
  source 1..20: mol_type = other RNA
aatatgcctcatgcatccac

SEQ ID NO: 14048 - RNA, 20 nt, synthetic construct
  source 1..20: mol_type = other RNA
aatatgctgtagtgattcac

SEQ ID NO: 14049 - RNA, 20 nt, synthetic construct
  source 1..20: mol_type = other RNA
aatatggtcactgctgatgt

SEQ ID NO: 14050 - RNA, 20 nt, synthetic construct
  source 1..20: mol_type = other RNA
aatatggttcctagaaaatt

SEQ ID NO: 14051 - RNA, 20 nt, synthetic construct
  source 1..20: mol_type = other RNA
aatatgtaatgacctggaaa

SEQ ID NO: 14052 - RNA, 20 nt, synthetic construct
  source 1..20: mol_type = other RNA
aatatgtactacctatagaa

SEQ ID NO: 14053 - RNA, 20 nt, synthetic construct
  source 1..20: mol_type = other RNA
aatatgtccttttgagtttg

SEQ ID NO: 14054 - RNA, 20 nt, synthetic construct
  source 1..20: mol_type = other RNA
aatatgtgaaaatactaacg

SEQ ID NO: 14055 - RNA, 20 nt, synthetic construct
  source 1..20: mol_type = other RNA
aatatgtggaaaatgtatga

SEQ ID NO: 14056 - RNA, 20 nt, synthetic construct
  source 1..20: mol_type = other RNA
aatatgtgtacaatggggct

SEQ ID NO: 14057 - RNA, 20 nt, synthetic construct
  source 1..20: mol_type = other RNA
aatatgtgttacaactctaa

SEQ ID NO: 14058 - RNA, 20 nt, synthetic construct
  source 1..20: mol_type = other RNA
aatattaaccaagaacaacc

SEQ ID NO: 14059 - RNA, 20 nt, synthetic construct
  source 1..20: mol_type = other RNA
aatattaagagtctcatctg

SEQ ID NO: 14060 - RNA, 20 nt, synthetic construct
  source 1..20: mol_type = other RNA
aatattacagtaaggtttcc

SEQ ID NO: 14061 - RNA, 20 nt, synthetic construct
  source 1..20: mol_type = other RNA
aatattactcagtctcgaaa

SEQ ID NO: 14062 - RNA, 20 nt, synthetic construct
  source 1..20: mol_type = other RNA
aatattataagttgggagtc

SEQ ID NO: 14063 - RNA, 20 nt, synthetic construct
  source 1..20: mol_type = other RNA
aatattccatttttctgacc

SEQ ID NO: 14064 - RNA, 20 nt, synthetic construct
  source 1..20: mol_type = other RNA
aatattcgttccagcagggt

SEQ ID NO: 14065 - RNA, 20 nt, synthetic construct
  source 1..20: mol_type = other RNA
aatattgaaacgatgcattc

SEQ ID NO: 14066 - RNA, 20 nt, synthetic construct
  source 1..20: mol_type = other RNA
aatattgaagagggaacatt

SEQ ID NO: 14067 - RNA, 20 nt, synthetic construct
  source 1..20: mol_type = other RNA
aatattgtaggtgtctcatt

SEQ ID NO: 14068 - RNA, 20 nt, synthetic construct
  source 1..20: mol_type = other RNA
aatattgtatatacccttct

SEQ ID NO: 14069 - RNA, 20 nt, synthetic construct
  source 1..20: mol_type = other RNA
aatattgttcagccttaaaa

SEQ ID NO: 14070 - RNA, 20 nt, synthetic construct
  source 1..20: mol_type = other RNA
aatatttaacaccatggcag

SEQ ID NO: 14071 - RNA, 20 nt, synthetic construct
  source 1..20: mol_type = other RNA
aatattttggaagactatga

SEQ ID NO: 14072 - RNA, 20 nt, synthetic construct
  source 1..20: mol_type = other RNA
aatcaaaaacctcccaacag

SEQ ID NO: 14073 - RNA, 20 nt, synthetic construct
  source 1..20: mol_type = other RNA
aatcaaaacaataagacacc

SEQ ID NO: 14074 - RNA, 20 nt, synthetic construct
  source 1..20: mol_type = other RNA
aatcaaaagaccaagaattt

SEQ ID NO: 14075 - RNA, 20 nt, synthetic construct
  source 1..20: mol_type = other RNA
aatcaaacagtgtgatattg

SEQ ID NO: 14076 - RNA, 20 nt, synthetic construct
  source 1..20: mol_type = other RNA
aatcaaacataccccaaccc

SEQ ID NO: 14077 - RNA, 20 nt, synthetic construct
  source 1..20: mol_type = other RNA
aatcaaaccatcctttcctt

SEQ ID NO: 14078 - RNA, 20 nt, synthetic construct
  source 1..20: mol_type = other RNA
aatcaaagaaagagttgggt

SEQ ID NO: 14079 - RNA, 20 nt, synthetic construct
  source 1..20: mol_type = other RNA
aatcaaatccagtcttcagg

SEQ ID NO: 14080 - RNA, 20 nt, synthetic construct
  source 1..20: mol_type = other RNA
aatcaaatggccttctttct

SEQ ID NO: 14081 - RNA, 20 nt, synthetic construct
  source 1..20: mol_type = other RNA
aatcaaatgggaaattagat

SEQ ID NO: 14082 - RNA, 20 nt, synthetic construct
  source 1..20: mol_type = other RNA
aatcaaattcacagaactgt

SEQ ID NO: 14083 - RNA, 20 nt, synthetic construct
  source 1..20: mol_type = other RNA
aatcaaatttaacacacaac

SEQ ID NO: 14084 - RNA, 20 nt, synthetic construct
  source 1..20: mol_type = other RNA
aatcaacacattcaaaattg

SEQ ID NO: 14085 - RNA, 20 nt, synthetic construct
  source 1..20: mol_type = other RNA
aatcaacaggtagctgcttt

SEQ ID NO: 14086 - RNA, 20 nt, synthetic construct
  source 1..20: mol_type = other RNA
aatcaacagtgtactagtct

SEQ ID NO: 14087 - RNA, 20 nt, synthetic construct
  source 1..20: mol_type = other RNA
aatcaacattgcctccatat

SEQ ID NO: 14088 - RNA, 20 nt, synthetic construct
  source 1..20: mol_type = other RNA
aatcaacccatgaaaattga

SEQ ID NO: 14089 - RNA, 20 nt, synthetic construct
  source 1..20: mol_type = other RNA
aatcaaccccatcaacaagt

SEQ ID NO: 14090 - RNA, 20 nt, synthetic construct
  source 1..20: mol_type = other RNA
aatcaactattccataagat

SEQ ID NO: 14091 - RNA, 20 nt, synthetic construct
  source 1..20: mol_type = other RNA
aatcaagccgcaaataatca

SEQ ID NO: 14092 - RNA, 20 nt, synthetic construct
  source 1..20: mol_type = other RNA
aatcaaggtacaatacacta

SEQ ID NO: 14093 - RNA, 20 nt, synthetic construct
  source 1..20: mol_type = other RNA
aatcaaggtgcgggattatt

SEQ ID NO: 14094 - RNA, 20 nt, synthetic construct
  source 1..20: mol_type = other RNA
aatcaagtatctccctgtgc

SEQ ID NO: 14095 - RNA, 20 nt, synthetic construct
  source 1..20: mol_type = other RNA
aatcaagtgaaatgatcttt

SEQ ID NO: 14096 - RNA, 20 nt, synthetic construct
  source 1..20: mol_type = other RNA
aatcaataattctgtgccaa

SEQ ID NO: 14097 - RNA, 20 nt, synthetic construct
  source 1..20: mol_type = other RNA
aatcaatacttcatttccat

SEQ ID NO: 14098 - RNA, 20 nt, synthetic construct
  source 1..20: mol_type = other RNA
aatcaatccagacagctaat

SEQ ID NO: 14099 - RNA, 20 nt, synthetic construct
  source 1..20: mol_type = other RNA
aatcaatctgtttcctaatc

SEQ ID NO: 14100 - RNA, 20 nt, synthetic construct
  source 1..20: mol_type = other RNA
aatcacacaatcttgagacg

SEQ ID NO: 14101 - RNA, 20 nt, synthetic construct
  source 1..20: mol_type = other RNA
aatcacagacgcaaaggatg

SEQ ID NO: 14102 - RNA, 20 nt, synthetic construct
  source 1..20: mol_type = other RNA
aatcacaggaaagatgtctt

SEQ ID NO: 14103 - RNA, 20 nt, synthetic construct
  source 1..20: mol_type = other RNA
aatcacaggtttaggttttt

SEQ ID NO: 14104 - RNA, 20 nt, synthetic construct
  source 1..20: mol_type = other RNA
aatcacagtacgcttttatg

SEQ ID NO: 14105 - RNA, 20 nt, synthetic construct
  source 1..20: mol_type = other RNA
aatcaccaggcgcggtggct

SEQ ID NO: 14106 - RNA, 20 nt, synthetic construct
  source 1..20: mol_type = other RNA
aatcacctcaaggcagaaca

SEQ ID NO: 14107 - RNA, 20 nt, synthetic construct
  source 1..20: mol_type = other RNA
aatcacctcaagtgatgcaa

SEQ ID NO: 14108 - RNA, 20 nt, synthetic construct
  source 1..20: mol_type = other RNA
aatcacggctgattataacc

SEQ ID NO: 14109 - RNA, 20 nt, synthetic construct
  source 1..20: mol_type = other RNA
aatcactaattcaagtgttt

SEQ ID NO: 14110 - RNA, 20 nt, synthetic construct
  source 1..20: mol_type = other RNA
aatcactacagcatattagc

SEQ ID NO: 14111 - RNA, 20 nt, synthetic construct
  source 1..20: mol_type = other RNA
aatcactggctagtaggcaa

SEQ ID NO: 14112 - RNA, 20 nt, synthetic construct
  source 1..20: mol_type = other RNA
aatcagaaaaggctgagacc

SEQ ID NO: 14113 - RNA, 20 nt, synthetic construct
  source 1..20: mol_type = other RNA
aatcagaaactgacaggact

SEQ ID NO: 14114 - RNA, 20 nt, synthetic construct
  source 1..20: mol_type = other RNA
aatcagaacttgacaagtat

SEQ ID NO: 14115 - RNA, 20 nt, synthetic construct
  source 1..20: mol_type = other RNA
aatcagacaacacattaata

SEQ ID NO: 14116 - RNA, 20 nt, synthetic construct
  source 1..20: mol_type = other RNA
aatcagactgtattaccagc

SEQ ID NO: 14117 - RNA, 20 nt, synthetic construct
  source 1..20: mol_type = other RNA
aatcagatatgaaagaggag

SEQ ID NO: 14118 - RNA, 20 nt, synthetic construct
  source 1..20: mol_type = other RNA
aatcagattaagcatagttt

SEQ ID NO: 14119 - RNA, 20 nt, synthetic construct
  source 1..20: mol_type = other RNA
aatcagatttcaggtggtat

SEQ ID NO: 14120 - RNA, 20 nt, synthetic construct
  source 1..20: mol_type = other RNA
aatcagcaccatctaacaga

SEQ ID NO: 14121 - RNA, 20 nt, synthetic construct
  source 1..20: mol_type = other RNA
aatcagccgtgattgcacca

SEQ ID NO: 14122 - RNA, 20 nt, synthetic construct
  source 1..20: mol_type = other RNA
aatcaggaagtatgagtctt

SEQ ID NO: 14123 - RNA, 20 nt, synthetic construct
  source 1..20: mol_type = other RNA
aatcaggatgtctttgggaa

SEQ ID NO: 14124 - RNA, 20 nt, synthetic construct
  source 1..20: mol_type = other RNA
aatcagggccttcccaaaga

SEQ ID NO: 14125 - RNA, 20 nt, synthetic construct
  source 1..20: mol_type = other RNA
aatcagggcctttaatcacc

SEQ ID NO: 14126 - RNA, 20 nt, synthetic construct
  source 1..20: mol_type = other RNA
aatcaggtctctttgaaagg

SEQ ID NO: 14127 - RNA, 20 nt, synthetic construct
  source 1..20: mol_type = other RNA
aatcaggttgggcttatcag

SEQ ID NO: 14128 - RNA, 20 nt, synthetic construct
  source 1..20: mol_type = other RNA
aatcagtaagaaaacagata

SEQ ID NO: 14129 - RNA, 20 nt, synthetic construct
  source 1..20: mol_type = other RNA
aatcagtctgtaagcacctg

SEQ ID NO: 14130 - RNA, 20 nt, synthetic construct
  source 1..20: mol_type = other RNA
aatcagtgaatatcatttga

SEQ ID NO: 14131 - RNA, 20 nt, synthetic construct
  source 1..20: mol_type = other RNA
aatcagtggccagtgaccag

SEQ ID NO: 14132 - RNA, 20 nt, synthetic construct
  source 1..20: mol_type = other RNA
aatcagtgtgaaagtattaa

SEQ ID NO: 14133 - RNA, 20 nt, synthetic construct
  source 1..20: mol_type = other RNA
aatcatacacgagtgtgttt

SEQ ID NO: 14134 - RNA, 20 nt, synthetic construct
  source 1..20: mol_type = other RNA
aatcatacattttccacata

SEQ ID NO: 14135 - RNA, 20 nt, synthetic construct
  source 1..20: mol_type = other RNA
aatcatagctcactagagct

SEQ ID NO: 14136 - RNA, 20 nt, synthetic construct
  source 1..20: mol_type = other RNA
aatcatcacagtatgcacaa

SEQ ID NO: 14137 - RNA, 20 nt, synthetic construct
  source 1..20: mol_type = other RNA
aatcatccggggagcttttg

SEQ ID NO: 14138 - RNA, 20 nt, synthetic construct
  source 1..20: mol_type = other RNA
aatcatctaggcatataaac

SEQ ID NO: 14139 - RNA, 20 nt, synthetic construct
  source 1..20: mol_type = other RNA
aatcatgaaagtggagaatt

SEQ ID NO: 14140 - RNA, 20 nt, synthetic construct
  source 1..20: mol_type = other RNA
aatcatgatgtttggctcct

SEQ ID NO: 14141 - RNA, 20 nt, synthetic construct
  source 1..20: mol_type = other RNA
aatcatgggagccaaacttg

SEQ ID NO: 14142 - RNA, 20 nt, synthetic construct
  source 1..20: mol_type = other RNA
aatcatgtcaagaatgaagt

SEQ ID NO: 14143 - RNA, 20 nt, synthetic construct
  source 1..20: mol_type = other RNA
aatcatgttctttatagcat

SEQ ID NO: 14144 - RNA, 20 nt, synthetic construct
  source 1..20: mol_type = other RNA
aatcattcaggacactggag

SEQ ID NO: 14145 - RNA, 20 nt, synthetic construct
  source 1..20: mol_type = other RNA
aatcattcatctaaacgttt

SEQ ID NO: 14146 - RNA, 20 nt, synthetic construct
  source 1..20: mol_type = other RNA
aatcattcttattgattcag

SEQ ID NO: 14147 - RNA, 20 nt, synthetic construct
  source 1..20: mol_type = other RNA
aatcattcttctaataggaa

SEQ ID NO: 14148 - RNA, 20 nt, synthetic construct
  source 1..20: mol_type = other RNA
aatcattgtagctatatccc

SEQ ID NO: 14149 - RNA, 20 nt, synthetic construct
  source 1..20: mol_type = other RNA
aatcattgttaggtgctggc

SEQ ID NO: 14150 - RNA, 20 nt, synthetic construct
  source 1..20: mol_type = other RNA
aatcattgttcagggaaggc

SEQ ID NO: 14151 - RNA, 20 nt, synthetic construct
  source 1..20: mol_type = other RNA
aatcatttcactcttttaag

SEQ ID NO: 14152 - RNA, 20 nt, synthetic construct
  source 1..20: mol_type = other RNA
aatcattttggcaaattgtc

SEQ ID NO: 14153 - RNA, 20 nt, synthetic construct
  source 1..20: mol_type = other RNA
aatccaaaagcctcaaaatt

SEQ ID NO: 14154 - RNA, 20 nt, synthetic construct
  source 1..20: mol_type = other RNA
aatccaaaatcctctgtaga

SEQ ID NO: 14155 - RNA, 20 nt, synthetic construct
  source 1..20: mol_type = other RNA
aatccaaattcacagcatga

SEQ ID NO: 14156 - RNA, 20 nt, synthetic construct
  source 1..20: mol_type = other RNA
aatccaacgaccggacgtgg

SEQ ID NO: 14157 - RNA, 20 nt, synthetic construct
  source 1..20: mol_type = other RNA
aatccaactgcagtctgtcc

SEQ ID NO: 14158 - RNA, 20 nt, synthetic construct
  source 1..20: mol_type = other RNA
aatccaagaagacatgataa

SEQ ID NO: 14159 - RNA, 20 nt, synthetic construct
  source 1..20: mol_type = other RNA
aatccaaggacagaaattca

SEQ ID NO: 14160 - RNA, 20 nt, synthetic construct
  source 1..20: mol_type = other RNA
aatccaagtttctagccata

SEQ ID NO: 14161 - RNA, 20 nt, synthetic construct
  source 1..20: mol_type = other RNA
aatccagacagctaatatgc

SEQ ID NO: 14162 - RNA, 20 nt, synthetic construct
  source 1..20: mol_type = other RNA
aatccagataaattatagct

SEQ ID NO: 14163 - RNA, 20 nt, synthetic construct
  source 1..20: mol_type = other RNA
aatccagatggacaaattac

SEQ ID NO: 14164 - RNA, 20 nt, synthetic construct
  source 1..20: mol_type = other RNA
aatccaggatcttactgtaa

SEQ ID NO: 14165 - RNA, 20 nt, synthetic construct
  source 1..20: mol_type = other RNA
aatccaggatggcatgaaat

SEQ ID NO: 14166 - RNA, 20 nt, synthetic construct
  source 1..20: mol_type = other RNA
aatccagtcttcaggtctct

SEQ ID NO: 14167 - RNA, 20 nt, synthetic construct
  source 1..20: mol_type = other RNA
aatccattgggtacataccg

SEQ ID NO: 14168 - RNA, 20 nt, synthetic construct
  source 1..20: mol_type = other RNA
aatcccaaagtgagcagaag

SEQ ID NO: 14169 - RNA, 20 nt, synthetic construct
  source 1..20: mol_type = other RNA
aatcccacttgatccaggtg

SEQ ID NO: 14170 - RNA, 20 nt, synthetic construct
  source 1..20: mol_type = other RNA
aatcccatttgtaacatgtt

SEQ ID NO: 14171 - RNA, 20 nt, synthetic construct
  source 1..20: mol_type = other RNA
aatccccaaataacatgcat

SEQ ID NO: 14172 - RNA, 20 nt, synthetic construct
  source 1..20: mol_type = other RNA
aatccccatctgggatactt

SEQ ID NO: 14173 - RNA, 20 nt, synthetic construct
  source 1..20: mol_type = other RNA
aatcccctttagtgttctgt

SEQ ID NO: 14174 - RNA, 20 nt, synthetic construct
  source 1..20: mol_type = other RNA
aatcccgcaccttgattttg

SEQ ID NO: 14175 - RNA, 20 nt, synthetic construct
  source 1..20: mol_type = other RNA
aatccctgatcaagttgctt

SEQ ID NO: 14176 - RNA, 20 nt, synthetic construct
  source 1..20: mol_type = other RNA
aatcccttccccacctttcc

SEQ ID NO: 14177 - RNA, 20 nt, synthetic construct
  source 1..20: mol_type = other RNA
aatccctttcgctaatctca

SEQ ID NO: 14178 - RNA, 20 nt, synthetic construct
  source 1..20: mol_type = other RNA
aatccgagacaagttctcct

SEQ ID NO: 14179 - RNA, 20 nt, synthetic construct
  source 1..20: mol_type = other RNA
aatccggctttatgagacac

SEQ ID NO: 14180 - RNA, 20 nt, synthetic construct
  source 1..20: mol_type = other RNA
aatccgggaacatgacatgt

SEQ ID NO: 14181 - RNA, 20 nt, synthetic construct
  source 1..20: mol_type = other RNA
aatcctagccccaaatacct

SEQ ID NO: 14182 - RNA, 20 nt, synthetic construct
  source 1..20: mol_type = other RNA
aatcctattttgttattagg

SEQ ID NO: 14183 - RNA, 20 nt, synthetic construct
  source 1..20: mol_type = other RNA
aatcctcacaacaggcctga

SEQ ID NO: 14184 - RNA, 20 nt, synthetic construct
  source 1..20: mol_type = other RNA
aatcctcacatgtttggtca

SEQ ID NO: 14185 - RNA, 20 nt, synthetic construct
  source 1..20: mol_type = other RNA
aatcctcagccccctcccta

SEQ ID NO: 14186 - RNA, 20 nt, synthetic construct
  source 1..20: mol_type = other RNA
aatcctctgtagataaacgt

SEQ ID NO: 14187 - RNA, 20 nt, synthetic construct
  source 1..20: mol_type = other RNA
aatcctgctattttattaga

SEQ ID NO: 14188 - RNA, 20 nt, synthetic construct
  source 1..20: mol_type = other RNA
aatcctgctgggctattgtt

SEQ ID NO: 14189 - RNA, 20 nt, synthetic construct
  source 1..20: mol_type = other RNA
aatcctgtttctctacatct

SEQ ID NO: 14190 - RNA, 20 nt, synthetic construct
  source 1..20: mol_type = other RNA
aatccttacttccagctcac

SEQ ID NO: 14191 - RNA, 20 nt, synthetic construct
  source 1..20: mol_type = other RNA
aatccttagattacaaaaga

SEQ ID NO: 14192 - RNA, 20 nt, synthetic construct
  source 1..20: mol_type = other RNA
aatccttcagtcagttctct

SEQ ID NO: 14193 - RNA, 20 nt, synthetic construct
  source 1..20: mol_type = other RNA
aatccttccttcatgtcccc

SEQ ID NO: 14194 - RNA, 20 nt, synthetic construct
  source 1..20: mol_type = other RNA
aatccttctaatcagtaact

SEQ ID NO: 14195 - RNA, 20 nt, synthetic construct
  source 1..20: mol_type = other RNA
aatccttctcatagtcttcc

SEQ ID NO: 14196 - RNA, 20 nt, synthetic construct
  source 1..20: mol_type = other RNA
aatccttgtggtcttaagag

SEQ ID NO: 14197 - RNA, 20 nt, synthetic construct
  source 1..20: mol_type = other RNA
aatcctttgcacacaccaaa

SEQ ID NO: 14198 - RNA, 20 nt, synthetic construct
  source 1..20: mol_type = other RNA
aatcctttgcttcccacttc

SEQ ID NO: 14199 - RNA, 20 nt, synthetic construct
  source 1..20: mol_type = other RNA
aatcctttgtgcaggtctgg

SEQ ID NO: 14200 - RNA, 20 nt, synthetic construct
  source 1..20: mol_type = other RNA
aatccttttcccaggagcta

SEQ ID NO: 14201 - RNA, 20 nt, synthetic construct
  source 1..20: mol_type = other RNA
aatcgaatcctcacaacagg

SEQ ID NO: 14202 - RNA, 20 nt, synthetic construct
  source 1..20: mol_type = other RNA
aatcgcaatccaaaatcctc

SEQ ID NO: 14203 - RNA, 20 nt, synthetic construct
  source 1..20: mol_type = other RNA
aatcgcagggccattctgct

SEQ ID NO: 14204 - RNA, 20 nt, synthetic construct
  source 1..20: mol_type = other RNA
aatcggaacaggctcaatac

SEQ ID NO: 14205 - RNA, 20 nt, synthetic construct
  source 1..20: mol_type = other RNA
aatcggaactcctgtatgcc

SEQ ID NO: 14206 - RNA, 20 nt, synthetic construct
  source 1..20: mol_type = other RNA
aatcgggagtaacagacctc

SEQ ID NO: 14207 - RNA, 20 nt, synthetic construct
  source 1..20: mol_type = other RNA
aatcgtcctcttcgggtgtc

SEQ ID NO: 14208 - RNA, 20 nt, synthetic construct
  source 1..20: mol_type = other RNA
aatcgtgatagtcttccaat

SEQ ID NO: 14209 - RNA, 20 nt, synthetic construct
  source 1..20: mol_type = other RNA
aatcgttgtgaaatataatg

SEQ ID NO: 14210 - RNA, 20 nt, synthetic construct
  source 1..20: mol_type = other RNA
aatctaaagccaatcttccc

SEQ ID NO: 14211 - RNA, 20 nt, synthetic construct
  source 1..20: mol_type = other RNA
aatctaaatgtagatcaagt

SEQ ID NO: 14212 - RNA, 20 nt, synthetic construct
  source 1..20: mol_type = other RNA
aatctaacaaaagatacaca

SEQ ID NO: 14213 - RNA, 20 nt, synthetic construct
  source 1..20: mol_type = other RNA
aatctaacatgttacaaatg

SEQ ID NO: 14214 - RNA, 20 nt, synthetic construct
  source 1..20: mol_type = other RNA
aatctaaccctcaatcccca

SEQ ID NO: 14215 - RNA, 20 nt, synthetic construct
  source 1..20: mol_type = other RNA
aatctaaccctcctcctcta

SEQ ID NO: 14216 - RNA, 20 nt, synthetic construct
  source 1..20: mol_type = other RNA
aatctaaggattatggctag

SEQ ID NO: 14217 - RNA, 20 nt, synthetic construct
  source 1..20: mol_type = other RNA
aatctaagtctcaacctact

SEQ ID NO: 14218 - RNA, 20 nt, synthetic construct
  source 1..20: mol_type = other RNA
aatctaataaaaagcctctc

SEQ ID NO: 14219 - RNA, 20 nt, synthetic construct
  source 1..20: mol_type = other RNA
aatctaattcgaaaatgggc

SEQ ID NO: 14220 - RNA, 20 nt, synthetic construct
  source 1..20: mol_type = other RNA
aatctacaaaacagggttat

SEQ ID NO: 14221 - RNA, 20 nt, synthetic construct
  source 1..20: mol_type = other RNA
aatctacaggtcggaaggaa

SEQ ID NO: 14222 - RNA, 20 nt, synthetic construct
  source 1..20: mol_type = other RNA
aatctaccaaacattgaagg

SEQ ID NO: 14223 - RNA, 20 nt, synthetic construct
  source 1..20: mol_type = other RNA
aatctactcttttgtttttg

SEQ ID NO: 14224 - RNA, 20 nt, synthetic construct
  source 1..20: mol_type = other RNA
aatctactttctaatccttt

SEQ ID NO: 14225 - RNA, 20 nt, synthetic construct
  source 1..20: mol_type = other RNA
aatctagaaagataaatcca

SEQ ID NO: 14226 - RNA, 20 nt, synthetic construct
  source 1..20: mol_type = other RNA
aatctaggaaacactgctca

SEQ ID NO: 14227 - RNA, 20 nt, synthetic construct
  source 1..20: mol_type = other RNA
aatctaggaggtctaagaga

SEQ ID NO: 14228 - RNA, 20 nt, synthetic construct
  source 1..20: mol_type = other RNA
aatctaggcatataataagc

SEQ ID NO: 14229 - RNA, 20 nt, synthetic construct
  source 1..20: mol_type = other RNA
aatctaggttatctgttttc

SEQ ID NO: 14230 - RNA, 20 nt, synthetic construct
  source 1..20: mol_type = other RNA
aatctcaatcagggccttcc

SEQ ID NO: 14231 - RNA, 20 nt, synthetic construct
  source 1..20: mol_type = other RNA
aatctcacacctgggtatac

SEQ ID NO: 14232 - RNA, 20 nt, synthetic construct
  source 1..20: mol_type = other RNA
aatctcagctcattacagtc

SEQ ID NO: 14233 - RNA, 20 nt, synthetic construct
  source 1..20: mol_type = other RNA
aatctcatccacaatgagac

SEQ ID NO: 14234 - RNA, 20 nt, synthetic construct
  source 1..20: mol_type = other RNA
aatctcatggaagttattta

SEQ ID NO: 14235 - RNA, 20 nt, synthetic construct
  source 1..20: mol_type = other RNA
aatctcctgagtagcaggga

SEQ ID NO: 14236 - RNA, 20 nt, synthetic construct
  source 1..20: mol_type = other RNA
aatctcctgatccacctgcc

SEQ ID NO: 14237 - RNA, 20 nt, synthetic construct
  source 1..20: mol_type = other RNA
aatctctacagggaaccgta

SEQ ID NO: 14238 - RNA, 20 nt, synthetic construct
  source 1..20: mol_type = other RNA
aatctctagaacttatgcat

SEQ ID NO: 14239 - RNA, 20 nt, synthetic construct
  source 1..20: mol_type = other RNA
aatctctaggcttaaaattc

SEQ ID NO: 14240 - RNA, 20 nt, synthetic construct
  source 1..20: mol_type = other RNA
aatctctctatccaccactc

SEQ ID NO: 14241 - RNA, 20 nt, synthetic construct
  source 1..20: mol_type = other RNA
aatctctcttgaccttagtt

SEQ ID NO: 14242 - RNA, 20 nt, synthetic construct
  source 1..20: mol_type = other RNA
aatctctgacttcattcttg

SEQ ID NO: 14243 - RNA, 20 nt, synthetic construct
  source 1..20: mol_type = other RNA
aatctctggggttagggcct

SEQ ID NO: 14244 - RNA, 20 nt, synthetic construct
  source 1..20: mol_type = other RNA
aatctctggtattctgaact

SEQ ID NO: 14245 - RNA, 20 nt, synthetic construct
  source 1..20: mol_type = other RNA
aatctcttacacctgtttaa

SEQ ID NO: 14246 - RNA, 20 nt, synthetic construct
  source 1..20: mol_type = other RNA
aatctgaaacgaccttgctc

SEQ ID NO: 14247 - RNA, 20 nt, synthetic construct
  source 1..20: mol_type = other RNA
aatctgacaatttgccaaaa

SEQ ID NO: 14248 - RNA, 20 nt, synthetic construct
  source 1..20: mol_type = other RNA
aatctgacctaagcttgggt

SEQ ID NO: 14249 - RNA, 20 nt, synthetic construct
  source 1..20: mol_type = other RNA
aatctgagtaaagggtaaga

SEQ ID NO: 14250 - RNA, 20 nt, synthetic construct
  source 1..20: mol_type = other RNA
aatctgatgtgtatgttaca

SEQ ID NO: 14251 - RNA, 20 nt, synthetic construct
  source 1..20: mol_type = other RNA
aatctgattcagtggttgga

SEQ ID NO: 14252 - RNA, 20 nt, synthetic construct
  source 1..20: mol_type = other RNA
aatctgatttgtttagtagc

SEQ ID NO: 14253 - RNA, 20 nt, synthetic construct
  source 1..20: mol_type = other RNA
aatctgattttaatctgtcc

SEQ ID NO: 14254 - RNA, 20 nt, synthetic construct
  source 1..20: mol_type = other RNA
aatctgatttttagtgactg

SEQ ID NO: 14255 - RNA, 20 nt, synthetic construct
  source 1..20: mol_type = other RNA
aatctgcaactatcaaaaca

SEQ ID NO: 14256 - RNA, 20 nt, synthetic construct
  source 1..20: mol_type = other RNA
aatctgcatccaaaagggaa

SEQ ID NO: 14257 - RNA, 20 nt, synthetic construct
  source 1..20: mol_type = other RNA
aatctggaatgcatcgtttc

SEQ ID NO: 14258 - RNA, 20 nt, synthetic construct
  source 1..20: mol_type = other RNA
aatctggatataacaaatca

SEQ ID NO: 14259 - RNA, 20 nt, synthetic construct
  source 1..20: mol_type = other RNA
aatctggctgcagggcttct

SEQ ID NO: 14260 - RNA, 20 nt, synthetic construct
  source 1..20: mol_type = other RNA
aatctgtagattgttttagg

SEQ ID NO: 14261 - RNA, 20 nt, synthetic construct
  source 1..20: mol_type = other RNA
aatctgtatatgaaaagctt

SEQ ID NO: 14262 - RNA, 20 nt, synthetic construct
  source 1..20: mol_type = other RNA
aatctgtatgagaagactgg

SEQ ID NO: 14263 - RNA, 20 nt, synthetic construct
  source 1..20: mol_type = other RNA
aatctgtcagcagttcagcc

SEQ ID NO: 14264 - RNA, 20 nt, synthetic construct
  source 1..20: mol_type = other RNA
aatctgtcctgaatactatt

SEQ ID NO: 14265 - RNA, 20 nt, synthetic construct
  source 1..20: mol_type = other RNA
aatctgttcctgggttctcc

SEQ ID NO: 14266 - RNA, 20 nt, synthetic construct
  source 1..20: mol_type = other RNA
aatctgtttcctaatctaac

SEQ ID NO: 14267 - RNA, 20 nt, synthetic construct
  source 1..20: mol_type = other RNA
aatcttaaaataccagaggt

SEQ ID NO: 14268 - RNA, 20 nt, synthetic construct
  source 1..20: mol_type = other RNA
aatcttaaagatgccattta

SEQ ID NO: 14269 - RNA, 20 nt, synthetic construct
  source 1..20: mol_type = other RNA
aatcttaacatttctcatgt

SEQ ID NO: 14270 - RNA, 20 nt, synthetic construct
  source 1..20: mol_type = other RNA
aatcttacccccatcacact

SEQ ID NO: 14271 - RNA, 20 nt, synthetic construct
  source 1..20: mol_type = other RNA
aatcttaccctgttgaccag

SEQ ID NO: 14272 - RNA, 20 nt, synthetic construct
  source 1..20: mol_type = other RNA
aatcttactggtgttaggca

SEQ ID NO: 14273 - RNA, 20 nt, synthetic construct
  source 1..20: mol_type = other RNA
aatcttattccccagggaaa

SEQ ID NO: 14274 - RNA, 20 nt, synthetic construct
  source 1..20: mol_type = other RNA
aatcttcaaaatctgatgtg

SEQ ID NO: 14275 - RNA, 20 nt, synthetic construct
  source 1..20: mol_type = other RNA
aatcttcacacttagttcaa

SEQ ID NO: 14276 - RNA, 20 nt, synthetic construct
  source 1..20: mol_type = other RNA
aatcttccagaaggagaaaa

SEQ ID NO: 14277 - RNA, 20 nt, synthetic construct
  source 1..20: mol_type = other RNA
aatcttcccaatcctttgtg

SEQ ID NO: 14278 - RNA, 20 nt, synthetic construct
  source 1..20: mol_type = other RNA
aatcttcttatttgttactg

SEQ ID NO: 14279 - RNA, 20 nt, synthetic construct
  source 1..20: mol_type = other RNA
aatcttgaaaggggccaggt

SEQ ID NO: 14280 - RNA, 20 nt, synthetic construct
  source 1..20: mol_type = other RNA
aatcttgaagatggcaaaca

SEQ ID NO: 14281 - RNA, 20 nt, synthetic construct
  source 1..20: mol_type = other RNA
aatcttgagacggaagactc

SEQ ID NO: 14282 - RNA, 20 nt, synthetic construct
  source 1..20: mol_type = other RNA
aatcttgcaaaacaatagcc

SEQ ID NO: 14283 - RNA, 20 nt, synthetic construct
  source 1..20: mol_type = other RNA
aatcttgctaaacatgtata

SEQ ID NO: 14284 - RNA, 20 nt, synthetic construct
  source 1..20: mol_type = other RNA
aatcttggaaatgatacctc

SEQ ID NO: 14285 - RNA, 20 nt, synthetic construct
  source 1..20: mol_type = other RNA
aatctttagtgttgcttggt

SEQ ID NO: 14286 - RNA, 20 nt, synthetic construct
  source 1..20: mol_type = other RNA
aatctttctgaactcaaaag

SEQ ID NO: 14287 - RNA, 20 nt, synthetic construct
  source 1..20: mol_type = other RNA
aatctttggcaaacttagaa

SEQ ID NO: 14288 - RNA, 20 nt, synthetic construct
  source 1..20: mol_type = other RNA
aatctttggtgaaggttcat

SEQ ID NO: 14289 - RNA, 20 nt, synthetic construct
  source 1..20: mol_type = other RNA
aatctttggtgctgataaat

SEQ ID NO: 14290 - RNA, 20 nt, synthetic construct
  source 1..20: mol_type = other RNA
aatctttgtacagtaattgt

SEQ ID NO: 14291 - RNA, 20 nt, synthetic construct
  source 1..20: mol_type = other RNA
aatgaaaaattcactcctca

SEQ ID NO: 14292 - RNA, 20 nt, synthetic construct
  source 1..20: mol_type = other RNA
aatgaaaatgttccctcttc

SEQ ID NO: 14293 - RNA, 20 nt, synthetic construct
  source 1..20: mol_type = other RNA
aatgaaaattagctggatgt

SEQ ID NO: 14294 - RNA, 20 nt, synthetic construct
  source 1..20: mol_type = other RNA
aatgaaaatttttgtctgga

SEQ ID NO: 14295 - RNA, 20 nt, synthetic construct
  source 1..20: mol_type = other RNA
aatgaaacacttgtgtaact

SEQ ID NO: 14296 - RNA, 20 nt, synthetic construct
  source 1..20: mol_type = other RNA
aatgaaagctcccaatgctt

SEQ ID NO: 14297 - RNA, 20 nt, synthetic construct
  source 1..20: mol_type = other RNA
aatgaaaggcgtcggggctg

SEQ ID NO: 14298 - RNA, 20 nt, synthetic construct
  source 1..20: mol_type = other RNA
aatgaaagtcagctaatttt

SEQ ID NO: 14299 - RNA, 20 nt, synthetic construct
  source 1..20: mol_type = other RNA
aatgaaatggcccttaactt

SEQ ID NO: 14300 - RNA, 20 nt, synthetic construct
  source 1..20: mol_type = other RNA
aatgaaatttgaggccctat

SEQ ID NO: 14301 - RNA, 20 nt, synthetic construct
  source 1..20: mol_type = other RNA
aatgaacaaaatgtggtata

SEQ ID NO: 14302 - RNA, 20 nt, synthetic construct
  source 1..20: mol_type = other RNA
aatgaacaggttcttcatca

SEQ ID NO: 14303 - RNA, 20 nt, synthetic construct
  source 1..20: mol_type = other RNA
aatgaaccaaacttggttta

SEQ ID NO: 14304 - RNA, 20 nt, synthetic construct
  source 1..20: mol_type = other RNA
aatgaacctgctttctacta

SEQ ID NO: 14305 - RNA, 20 nt, synthetic construct
  source 1..20: mol_type = other RNA
aatgaactcccagaactcga

SEQ ID NO: 14306 - RNA, 20 nt, synthetic construct
  source 1..20: mol_type = other RNA
aatgaactcctatagttaag

SEQ ID NO: 14307 - RNA, 20 nt, synthetic construct
  source 1..20: mol_type = other RNA
aatgaagaaaatccaagaag

SEQ ID NO: 14308 - RNA, 20 nt, synthetic construct
  source 1..20: mol_type = other RNA
aatgaagatggcctccctca

SEQ ID NO: 14309 - RNA, 20 nt, synthetic construct
  source 1..20: mol_type = other RNA
aatgaagcaggccttcgagg

SEQ ID NO: 14310 - RNA, 20 nt, synthetic construct
  source 1..20: mol_type = other RNA
aatgaaggaaaaaacgggtt

SEQ ID NO: 14311 - RNA, 20 nt, synthetic construct
  source 1..20: mol_type = other RNA
aatgaagtattgatttgacc

SEQ ID NO: 14312 - RNA, 20 nt, synthetic construct
  source 1..20: mol_type = other RNA
aatgaagtcagagattttcc

SEQ ID NO: 14313 - RNA, 20 nt, synthetic construct
  source 1..20: mol_type = other RNA
aatgaatagaaaatccttac

SEQ ID NO: 14314 - RNA, 20 nt, synthetic construct
  source 1..20: mol_type = other RNA
aatgaatatgtactacctat

SEQ ID NO: 14315 - RNA, 20 nt, synthetic construct
  source 1..20: mol_type = other RNA
aatgaatattcgttccagca

SEQ ID NO: 14316 - RNA, 20 nt, synthetic construct
  source 1..20: mol_type = other RNA
aatgaattagcaatgcgaat

SEQ ID NO: 14317 - RNA, 20 nt, synthetic construct
  source 1..20: mol_type = other RNA
aatgacaagtaaatgcaatg

SEQ ID NO: 14318 - RNA, 20 nt, synthetic construct
  source 1..20: mol_type = other RNA
aatgacaataataactacac

SEQ ID NO: 14319 - RNA, 20 nt, synthetic construct
  source 1..20: mol_type = other RNA
aatgacacaacttactacta

SEQ ID NO: 14320 - RNA, 20 nt, synthetic construct
  source 1..20: mol_type = other RNA
aatgacaccaaaactacagg

SEQ ID NO: 14321 - RNA, 20 nt, synthetic construct
  source 1..20: mol_type = other RNA
aatgacagaaaatatctaca

SEQ ID NO: 14322 - RNA, 20 nt, synthetic construct
  source 1..20: mol_type = other RNA
aatgaccgagatacttaagt

SEQ ID NO: 14323 - RNA, 20 nt, synthetic construct
  source 1..20: mol_type = other RNA
aatgacctaaaatcttattc

SEQ ID NO: 14324 - RNA, 20 nt, synthetic construct
  source 1..20: mol_type = other RNA
aatgacctggaaattattca

SEQ ID NO: 14325 - RNA, 20 nt, synthetic construct
  source 1..20: mol_type = other RNA
aatgactgttgcctctgtgc

SEQ ID NO: 14326 - RNA, 20 nt, synthetic construct
  source 1..20: mol_type = other RNA
aatgacttttatcaattcac

SEQ ID NO: 14327 - RNA, 20 nt, synthetic construct
  source 1..20: mol_type = other RNA
aatgagaaacatacatgttc

SEQ ID NO: 14328 - RNA, 20 nt, synthetic construct
  source 1..20: mol_type = other RNA
aatgagaaacctaagaaagg

SEQ ID NO: 14329 - RNA, 20 nt, synthetic construct
  source 1..20: mol_type = other RNA
aatgagaatttcagaaagag

SEQ ID NO: 14330 - RNA, 20 nt, synthetic construct
  source 1..20: mol_type = other RNA
aatgagacacctacaatatt

SEQ ID NO: 14331 - RNA, 20 nt, synthetic construct
  source 1..20: mol_type = other RNA
aatgagacatttgagggtgc

SEQ ID NO: 14332 - RNA, 20 nt, synthetic construct
  source 1..20: mol_type = other RNA
aatgagaccaaatgcataaa

SEQ ID NO: 14333 - RNA, 20 nt, synthetic construct
  source 1..20: mol_type = other RNA
aatgagataaactagattac

SEQ ID NO: 14334 - RNA, 20 nt, synthetic construct
  source 1..20: mol_type = other RNA
aatgagatagaccagatgcg

SEQ ID NO: 14335 - RNA, 20 nt, synthetic construct
  source 1..20: mol_type = other RNA
aatgagcaaggtcgtttcag

SEQ ID NO: 14336 - RNA, 20 nt, synthetic construct
  source 1..20: mol_type = other RNA
aatgagccaggcatggtggt

SEQ ID NO: 14337 - RNA, 20 nt, synthetic construct
  source 1..20: mol_type = other RNA
aatgaggagtgaatttttca

SEQ ID NO: 14338 - RNA, 20 nt, synthetic construct
  source 1..20: mol_type = other RNA
aatgaggcttttattggtaa

SEQ ID NO: 14339 - RNA, 20 nt, synthetic construct
  source 1..20: mol_type = other RNA
aatgagggcagagataactg

SEQ ID NO: 14340 - RNA, 20 nt, synthetic construct
  source 1..20: mol_type = other RNA
aatgagggtaaaatagtcaa

SEQ ID NO: 14341 - RNA, 20 nt, synthetic construct
  source 1..20: mol_type = other RNA
aatgaggtatcatttccaag

SEQ ID NO: 14342 - RNA, 20 nt, synthetic construct
  source 1..20: mol_type = other RNA
aatgaggttgcttttacttg

SEQ ID NO: 14343 - RNA, 20 nt, synthetic construct
  source 1..20: mol_type = other RNA
aatgagtaacatgtggaaca

SEQ ID NO: 14344 - RNA, 20 nt, synthetic construct
  source 1..20: mol_type = other RNA
aatgagtagtacttctgagt

SEQ ID NO: 14345 - RNA, 20 nt, synthetic construct
  source 1..20: mol_type = other RNA
aatgagtccagctttctaat

SEQ ID NO: 14346 - RNA, 20 nt, synthetic construct
  source 1..20: mol_type = other RNA
aatgagtctgacatactgtc

SEQ ID NO: 14347 - RNA, 20 nt, synthetic construct
  source 1..20: mol_type = other RNA
aatgagtgagccacagctac

SEQ ID NO: 14348 - RNA, 20 nt, synthetic construct
  source 1..20: mol_type = other RNA
aatgagtgtatgcagggaaa

SEQ ID NO: 14349 - RNA, 20 nt, synthetic construct
  source 1..20: mol_type = other RNA
aatgagttccagtcctttgt

SEQ ID NO: 14350 - RNA, 20 nt, synthetic construct
  source 1..20: mol_type = other RNA
aatgagtttaattcttttgc

SEQ ID NO: 14351 - RNA, 20 nt, synthetic construct
  source 1..20: mol_type = other RNA
aatgatacctcatttatact

SEQ ID NO: 14352 - RNA, 20 nt, synthetic construct
  source 1..20: mol_type = other RNA
aatgatagactggattaagg

SEQ ID NO: 14353 - RNA, 20 nt, synthetic construct
  source 1..20: mol_type = other RNA
aatgatagcattatcccaga

SEQ ID NO: 14354 - RNA, 20 nt, synthetic construct
  source 1..20: mol_type = other RNA
aatgataggtcactgcagtc

SEQ ID NO: 14355 - RNA, 20 nt, synthetic construct
  source 1..20: mol_type = other RNA
aatgatctttcaaggggcct

SEQ ID NO: 14356 - RNA, 20 nt, synthetic construct
  source 1..20: mol_type = other RNA
aatgatctttgaataaaggg

SEQ ID NO: 14357 - RNA, 20 nt, synthetic construct
  source 1..20: mol_type = other RNA
aatgatgaagggttttctgt

SEQ ID NO: 14358 - RNA, 20 nt, synthetic construct
  source 1..20: mol_type = other RNA
aatgatgactatgaaaagcc

SEQ ID NO: 14359 - RNA, 20 nt, synthetic construct
  source 1..20: mol_type = other RNA
aatgatgagctactgcatgc

SEQ ID NO: 14360 - RNA, 20 nt, synthetic construct
  source 1..20: mol_type = other RNA
aatgatgccatcacattttg

SEQ ID NO: 14361 - RNA, 20 nt, synthetic construct
  source 1..20: mol_type = other RNA
aatgatggcaacaatcaaca

SEQ ID NO: 14362 - RNA, 20 nt, synthetic construct
  source 1..20: mol_type = other RNA
aatgattatttgcggcttga

SEQ ID NO: 14363 - RNA, 20 nt, synthetic construct
  source 1..20: mol_type = other RNA
aatgattccacttatatgaa

SEQ ID NO: 14364 - RNA, 20 nt, synthetic construct
  source 1..20: mol_type = other RNA
aatgatttcaagtaacactc

SEQ ID NO: 14365 - RNA, 20 nt, synthetic construct
  source 1..20: mol_type = other RNA
aatgatttccctgcatacac

SEQ ID NO: 14366 - RNA, 20 nt, synthetic construct
  source 1..20: mol_type = other RNA
aatgattttcacagggcagg

SEQ ID NO: 14367 - RNA, 20 nt, synthetic construct
  source 1..20: mol_type = other RNA
aatgcaaagtttcctacata

SEQ ID NO: 14368 - RNA, 20 nt, synthetic construct
  source 1..20: mol_type = other RNA
aatgcaacctgctttcctca

SEQ ID NO: 14369 - RNA, 20 nt, synthetic construct
  source 1..20: mol_type = other RNA
aatgcaagagttaaaactca

SEQ ID NO: 14370 - RNA, 20 nt, synthetic construct
  source 1..20: mol_type = other RNA
aatgcaatacttaatagccc

SEQ ID NO: 14371 - RNA, 20 nt, synthetic construct
  source 1..20: mol_type = other RNA
aatgcaatgcaggcgcctgg

SEQ ID NO: 14372 - RNA, 20 nt, synthetic construct
  source 1..20: mol_type = other RNA
aatgcaatgcgtgtgaaacc

SEQ ID NO: 14373 - RNA, 20 nt, synthetic construct
  source 1..20: mol_type = other RNA
aatgcacatgggcatgggtc

SEQ ID NO: 14374 - RNA, 20 nt, synthetic construct
  source 1..20: mol_type = other RNA
aatgcaccaacacctgcagt

SEQ ID NO: 14375 - RNA, 20 nt, synthetic construct
  source 1..20: mol_type = other RNA
aatgcacgtgaagctacaga

SEQ ID NO: 14376 - RNA, 20 nt, synthetic construct
  source 1..20: mol_type = other RNA
aatgcacttagcgctgatgt

SEQ ID NO: 14377 - RNA, 20 nt, synthetic construct
  source 1..20: mol_type = other RNA
aatgcagaaaataaaccaag

SEQ ID NO: 14378 - RNA, 20 nt, synthetic construct
  source 1..20: mol_type = other RNA
aatgcaggcgcctggacagg

SEQ ID NO: 14379 - RNA, 20 nt, synthetic construct
  source 1..20: mol_type = other RNA
aatgcagtagtaaagcaaat

SEQ ID NO: 14380 - RNA, 20 nt, synthetic construct
  source 1..20: mol_type = other RNA
aatgcagtattgttaactgt

SEQ ID NO: 14381 - RNA, 20 nt, synthetic construct
  source 1..20: mol_type = other RNA
aatgcagtggcttcctaact

SEQ ID NO: 14382 - RNA, 20 nt, synthetic construct
  source 1..20: mol_type = other RNA
aatgcataaacgacagcagg

SEQ ID NO: 14383 - RNA, 20 nt, synthetic construct
  source 1..20: mol_type = other RNA
aatgcatatatctgtctggg

SEQ ID NO: 14384 - RNA, 20 nt, synthetic construct
  source 1..20: mol_type = other RNA
aatgcatccctcctctggcc

SEQ ID NO: 14385 - RNA, 20 nt, synthetic construct
  source 1..20: mol_type = other RNA
aatgcatcgtttcaatatta

SEQ ID NO: 14386 - RNA, 20 nt, synthetic construct
  source 1..20: mol_type = other RNA
aatgcatcttttaaaaacct

SEQ ID NO: 14387 - RNA, 20 nt, synthetic construct
  source 1..20: mol_type = other RNA
aatgcatgggaggtaatact

SEQ ID NO: 14388 - RNA, 20 nt, synthetic construct
  source 1..20: mol_type = other RNA
aatgccaatttgggatatag

SEQ ID NO: 14389 - RNA, 20 nt, synthetic construct
  source 1..20: mol_type = other RNA
aatgccacataaatcacagg

SEQ ID NO: 14390 - RNA, 20 nt, synthetic construct
  source 1..20: mol_type = other RNA
aatgccagggcgctcctctc

SEQ ID NO: 14391 - RNA, 20 nt, synthetic construct
  source 1..20: mol_type = other RNA
aatgccatagagctttaaag

SEQ ID NO: 14392 - RNA, 20 nt, synthetic construct
  source 1..20: mol_type = other RNA
aatgcccaatcaaatccagt

SEQ ID NO: 14393 - RNA, 20 nt, synthetic construct
  source 1..20: mol_type = other RNA
aatgcccatcctctattttt

SEQ ID NO: 14394 - RNA, 20 nt, synthetic construct
  source 1..20: mol_type = other RNA
aatgcccattaaaaccatga

SEQ ID NO: 14395 - RNA, 20 nt, synthetic construct
  source 1..20: mol_type = other RNA
aatgccccatgtgttggcac

SEQ ID NO: 14396 - RNA, 20 nt, synthetic construct
  source 1..20: mol_type = other RNA
aatgcccctgtagcagacac

SEQ ID NO: 14397 - RNA, 20 nt, synthetic construct
  source 1..20: mol_type = other RNA
aatgcccctttgagcagagt

SEQ ID NO: 14398 - RNA, 20 nt, synthetic construct
  source 1..20: mol_type = other RNA
aatgcccttatttaatgtgc

SEQ ID NO: 14399 - RNA, 20 nt, synthetic construct
  source 1..20: mol_type = other RNA
aatgcctataaaatgctgga

SEQ ID NO: 14400 - RNA, 20 nt, synthetic construct
  source 1..20: mol_type = other RNA
aatgcctcaaattagtcata

SEQ ID NO: 14401 - RNA, 20 nt, synthetic construct
  source 1..20: mol_type = other RNA
aatgcctgccgcagagcaag

SEQ ID NO: 14402 - RNA, 20 nt, synthetic construct
  source 1..20: mol_type = other RNA
aatgcgaatcatctaggcat

SEQ ID NO: 14403 - RNA, 20 nt, synthetic construct
  source 1..20: mol_type = other RNA
aatgcgatgatcaaaaccag

SEQ ID NO: 14404 - RNA, 20 nt, synthetic construct
  source 1..20: mol_type = other RNA
aatgcgcgtccgcgacccgg

SEQ ID NO: 14405 - RNA, 20 nt, synthetic construct
  source 1..20: mol_type = other RNA
aatgcgtgtgaaaccaagca

SEQ ID NO: 14406 - RNA, 20 nt, synthetic construct
  source 1..20: mol_type = other RNA
aatgcgtttgttagatctgg

SEQ ID NO: 14407 - RNA, 20 nt, synthetic construct
  source 1..20: mol_type = other RNA
aatgctataaagaacatgat

SEQ ID NO: 14408 - RNA, 20 nt, synthetic construct
  source 1..20: mol_type = other RNA
aatgctatcattttaaaggg

SEQ ID NO: 14409 - RNA, 20 nt, synthetic construct
  source 1..20: mol_type = other RNA
aatgctatccagaagagaat

SEQ ID NO: 14410 - RNA, 20 nt, synthetic construct
  source 1..20: mol_type = other RNA
aatgctcacatttagtttca

SEQ ID NO: 14411 - RNA, 20 nt, synthetic construct
  source 1..20: mol_type = other RNA
aatgctcagtgggttcaatt

SEQ ID NO: 14412 - RNA, 20 nt, synthetic construct
  source 1..20: mol_type = other RNA
aatgctcataattaaagaga

SEQ ID NO: 14413 - RNA, 20 nt, synthetic construct
  source 1..20: mol_type = other RNA
aatgctctcttcccccaaaa

SEQ ID NO: 14414 - RNA, 20 nt, synthetic construct
  source 1..20: mol_type = other RNA
aatgctgctatgaaaattgg

SEQ ID NO: 14415 - RNA, 20 nt, synthetic construct
  source 1..20: mol_type = other RNA
aatgctggaaattttcaagg

SEQ ID NO: 14416 - RNA, 20 nt, synthetic construct
  source 1..20: mol_type = other RNA
aatgctggccagtgagttca

SEQ ID NO: 14417 - RNA, 20 nt, synthetic construct
  source 1..20: mol_type = other RNA
aatgctggcttcatgggtgg

SEQ ID NO: 14418 - RNA, 20 nt, synthetic construct
  source 1..20: mol_type = other RNA
aatgctgtaactgacttcaa

SEQ ID NO: 14419 - RNA, 20 nt, synthetic construct
  source 1..20: mol_type = other RNA
aatgctgttctctgtgtggt

SEQ ID NO: 14420 - RNA, 20 nt, synthetic construct
  source 1..20: mol_type = other RNA
aatgcttaacaagaatcctg

SEQ ID NO: 14421 - RNA, 20 nt, synthetic construct
  source 1..20: mol_type = other RNA
aatgcttatgtcttgtggct

SEQ ID NO: 14422 - RNA, 20 nt, synthetic construct
  source 1..20: mol_type = other RNA
aatgcttcatattttgtggg

SEQ ID NO: 14423 - RNA, 20 nt, synthetic construct
  source 1..20: mol_type = other RNA
aatgcttgaagagcgcttct

SEQ ID NO: 14424 - RNA, 20 nt, synthetic construct
  source 1..20: mol_type = other RNA
aatgctttttctgcatcttt

SEQ ID NO: 14425 - RNA, 20 nt, synthetic construct
  source 1..20: mol_type = other RNA
aatggaaaatgtaaaacatc

SEQ ID NO: 14426 - RNA, 20 nt, synthetic construct
  source 1..20: mol_type = other RNA
aatggaaaattcaaacatga

SEQ ID NO: 14427 - RNA, 20 nt, synthetic construct
  source 1..20: mol_type = other RNA
aatggaaaattcttggtctt

SEQ ID NO: 14428 - RNA, 20 nt, synthetic construct
  source 1..20: mol_type = other RNA
aatggaaacttgccatcttg

SEQ ID NO: 14429 - RNA, 20 nt, synthetic construct
  source 1..20: mol_type = other RNA
aatggaaagaaatagaactg

SEQ ID NO: 14430 - RNA, 20 nt, synthetic construct
  source 1..20: mol_type = other RNA
aatggaaatgaagtattgat

SEQ ID NO: 14431 - RNA, 20 nt, synthetic construct
  source 1..20: mol_type = other RNA
aatggaaatgtaaattccta

SEQ ID NO: 14432 - RNA, 20 nt, synthetic construct
  source 1..20: mol_type = other RNA
aatggaaccactgtaggccc

SEQ ID NO: 14433 - RNA, 20 nt, synthetic construct
  source 1..20: mol_type = other RNA
aatggaactaagaaaaatgt

SEQ ID NO: 14434 - RNA, 20 nt, synthetic construct
  source 1..20: mol_type = other RNA
aatggaagactttatggtaa

SEQ ID NO: 14435 - RNA, 20 nt, synthetic construct
  source 1..20: mol_type = other RNA
aatggaagtgctgggctagg

SEQ ID NO: 14436 - RNA, 20 nt, synthetic construct
  source 1..20: mol_type = other RNA
aatggaatagaagggagaac

SEQ ID NO: 14437 - RNA, 20 nt, synthetic construct
  source 1..20: mol_type = other RNA
aatggaatattactcagtct

SEQ ID NO: 14438 - RNA, 20 nt, synthetic construct
  source 1..20: mol_type = other RNA
aatggaattctgatgcacaa

SEQ ID NO: 14439 - RNA, 20 nt, synthetic construct
  source 1..20: mol_type = other RNA
aatggacagcacattaaata

SEQ ID NO: 14440 - RNA, 20 nt, synthetic construct
  source 1..20: mol_type = other RNA
aatggacagcggggatggtt

SEQ ID NO: 14441 - RNA, 20 nt, synthetic construct
  source 1..20: mol_type = other RNA
aatggagacatctgagacat

SEQ ID NO: 14442 - RNA, 20 nt, synthetic construct
  source 1..20: mol_type = other RNA
aatggagacccatactcagc

SEQ ID NO: 14443 - RNA, 20 nt, synthetic construct
  source 1..20: mol_type = other RNA
aatggagggccagaggaggg

SEQ ID NO: 14444 - RNA, 20 nt, synthetic construct
  source 1..20: mol_type = other RNA
aatggagtactatgcagcaa

SEQ ID NO: 14445 - RNA, 20 nt, synthetic construct
  source 1..20: mol_type = other RNA
aatggagtgacttaagcaac

SEQ ID NO: 14446 - RNA, 20 nt, synthetic construct
  source 1..20: mol_type = other RNA
aatggataaggaaaatatga

SEQ ID NO: 14447 - RNA, 20 nt, synthetic construct
  source 1..20: mol_type = other RNA
aatggatcaaagacctaagc

SEQ ID NO: 14448 - RNA, 20 nt, synthetic construct
  source 1..20: mol_type = other RNA
aatggatcaaggcacagtct

SEQ ID NO: 14449 - RNA, 20 nt, synthetic construct
  source 1..20: mol_type = other RNA
aatggatgtttttagagaga

SEQ ID NO: 14450 - RNA, 20 nt, synthetic construct
  source 1..20: mol_type = other RNA
aatggcaaggctaacagcca

SEQ ID NO: 14451 - RNA, 20 nt, synthetic construct
  source 1..20: mol_type = other RNA
aatggcacatactgcatatt

SEQ ID NO: 14452 - RNA, 20 nt, synthetic construct
  source 1..20: mol_type = other RNA
aatggcatctttaagatttt

SEQ ID NO: 14453 - RNA, 20 nt, synthetic construct
  source 1..20: mol_type = other RNA
aatggcatgaacccaccagg

SEQ ID NO: 14454 - RNA, 20 nt, synthetic construct
  source 1..20: mol_type = other RNA
aatggccaagagttgctgac

SEQ ID NO: 14455 - RNA, 20 nt, synthetic construct
  source 1..20: mol_type = other RNA
aatggccctgcgattggttg

SEQ ID NO: 14456 - RNA, 20 nt, synthetic construct
  source 1..20: mol_type = other RNA
aatggcccttaacttcacct

SEQ ID NO: 14457 - RNA, 20 nt, synthetic construct
  source 1..20: mol_type = other RNA
aatggccttctttctttcaa

SEQ ID NO: 14458 - RNA, 20 nt, synthetic construct
  source 1..20: mol_type = other RNA
aatggctggaatggtgaaga

SEQ ID NO: 14459 - RNA, 20 nt, synthetic construct
  source 1..20: mol_type = other RNA
aatggcttaaggaaataaat

SEQ ID NO: 14460 - RNA, 20 nt, synthetic construct
  source 1..20: mol_type = other RNA
aatggctttttacgatgaaa

SEQ ID NO: 14461 - RNA, 20 nt, synthetic construct
  source 1..20: mol_type = other RNA
aatgggaaagacaggtagac

SEQ ID NO: 14462 - RNA, 20 nt, synthetic construct
  source 1..20: mol_type = other RNA
aatgggaaattagatgatgt

SEQ ID NO: 14463 - RNA, 20 nt, synthetic construct
  source 1..20: mol_type = other RNA
aatgggagcatgcacacagg

SEQ ID NO: 14464 - RNA, 20 nt, synthetic construct
  source 1..20: mol_type = other RNA
aatgggcacttgggatgttt

SEQ ID NO: 14465 - RNA, 20 nt, synthetic construct
  source 1..20: mol_type = other RNA
aatgggcattagaagttaaa

SEQ ID NO: 14466 - RNA, 20 nt, synthetic construct
  source 1..20: mol_type = other RNA
aatgggccaaagacttcaac

SEQ ID NO: 14467 - RNA, 20 nt, synthetic construct
  source 1..20: mol_type = other RNA
aatgggcgtggagcggtgtc

SEQ ID NO: 14468 - RNA, 20 nt, synthetic construct
  source 1..20: mol_type = other RNA
aatggggaaatagatgccta

SEQ ID NO: 14469 - RNA, 20 nt, synthetic construct
  source 1..20: mol_type = other RNA
aatggggaactttatttttt

SEQ ID NO: 14470 - RNA, 20 nt, synthetic construct
  source 1..20: mol_type = other RNA
aatggggagctagagggtaa

SEQ ID NO: 14471 - RNA, 20 nt, synthetic construct
  source 1..20: mol_type = other RNA
aatggggatatccaaagata

SEQ ID NO: 14472 - RNA, 20 nt, synthetic construct
  source 1..20: mol_type = other RNA
aatggggatgcaacaaatgt

SEQ ID NO: 14473 - RNA, 20 nt, synthetic construct
  source 1..20: mol_type = other RNA
aatggggcaatctcagctca

SEQ ID NO: 14474 - RNA, 20 nt, synthetic construct
  source 1..20: mol_type = other RNA
aatggggctttactgtatta

SEQ ID NO: 14475 - RNA, 20 nt, synthetic construct
  source 1..20: mol_type = other RNA
aatggggtaattttggggcc

SEQ ID NO: 14476 - RNA, 20 nt, synthetic construct
  source 1..20: mol_type = other RNA
aatgggtacagggtttctgt

SEQ ID NO: 14477 - RNA, 20 nt, synthetic construct
  source 1..20: mol_type = other RNA
aatgggttggaggagaaggc

SEQ ID NO: 14478 - RNA, 20 nt, synthetic construct
  source 1..20: mol_type = other RNA
aatgggtttaaaagagtgca

SEQ ID NO: 14479 - RNA, 20 nt, synthetic construct
  source 1..20: mol_type = other RNA
aatggtaacagccaaataaa

SEQ ID NO: 14480 - RNA, 20 nt, synthetic construct
  source 1..20: mol_type = other RNA
aatggtactgcctccacagg

SEQ ID NO: 14481 - RNA, 20 nt, synthetic construct
  source 1..20: mol_type = other RNA
aatggtagcttgggctaagg

SEQ ID NO: 14482 - RNA, 20 nt, synthetic construct
  source 1..20: mol_type = other RNA
aatggtcaacatgaaaagat

SEQ ID NO: 14483 - RNA, 20 nt, synthetic construct
  source 1..20: mol_type = other RNA
aatggtcaatttcatcgtaa

SEQ ID NO: 14484 - RNA, 20 nt, synthetic construct
  source 1..20: mol_type = other RNA
aatggtcagagttgtatctg

SEQ ID NO: 14485 - RNA, 20 nt, synthetic construct
  source 1..20: mol_type = other RNA
aatggtccttgctgaagaat

SEQ ID NO: 14486 - RNA, 20 nt, synthetic construct
  source 1..20: mol_type = other RNA
aatggtgaagaatgtgaaaa

SEQ ID NO: 14487 - RNA, 20 nt, synthetic construct
  source 1..20: mol_type = other RNA
aatggtgcagccactataga

SEQ ID NO: 14488 - RNA, 20 nt, synthetic construct
  source 1..20: mol_type = other RNA
aatggtgcaggccagatatc

SEQ ID NO: 14489 - RNA, 20 nt, synthetic construct
  source 1..20: mol_type = other RNA
aatggtgggatctctgggct

SEQ ID NO: 14490 - RNA, 20 nt, synthetic construct
  source 1..20: mol_type = other RNA
aatggtgtgaagttgggctt

SEQ ID NO: 14491 - RNA, 20 nt, synthetic construct
  source 1..20: mol_type = other RNA
aatggttaagactgctgttt

SEQ ID NO: 14492 - RNA, 20 nt, synthetic construct
  source 1..20: mol_type = other RNA
aatggttagactgcacataa

SEQ ID NO: 14493 - RNA, 20 nt, synthetic construct
  source 1..20: mol_type = other RNA
aatggttcataatatatcac

SEQ ID NO: 14494 - RNA, 20 nt, synthetic construct
  source 1..20: mol_type = other RNA
aatggttggccgaggccagt

SEQ ID NO: 14495 - RNA, 20 nt, synthetic construct
  source 1..20: mol_type = other RNA
aatggtttaacacatacaaa

SEQ ID NO: 14496 - RNA, 20 nt, synthetic construct
  source 1..20: mol_type = other RNA
aatggtttaggctgtctcca

SEQ ID NO: 14497 - RNA, 20 nt, synthetic construct
  source 1..20: mol_type = other RNA
aatggtttcataaaatgatg

SEQ ID NO: 14498 - RNA, 20 nt, synthetic construct
  source 1..20: mol_type = other RNA
aatggtttctccttctgcag

SEQ ID NO: 14499 - RNA, 20 nt, synthetic construct
  source 1..20: mol_type = other RNA
aatggttttatggtaactcc

SEQ ID NO: 14500 - RNA, 20 nt, synthetic construct
  source 1..20: mol_type = other RNA
aatgtaaaaatatagaaggc

SEQ ID NO: 14501 - RNA, 20 nt, synthetic construct
  source 1..20: mol_type = other RNA
aatgtaaaacatcaaagtcc

SEQ ID NO: 14502 - RNA, 20 nt, synthetic construct
  source 1..20: mol_type = other RNA
aatgtaaacagcatactgtg

SEQ ID NO: 14503 - RNA, 20 nt, synthetic construct
  source 1..20: mol_type = other RNA
aatgtaaattcctaactcaa

SEQ ID NO: 14504 - RNA, 20 nt, synthetic construct
  source 1..20: mol_type = other RNA
aatgtaaattctgccacatt

SEQ ID NO: 14505 - RNA, 20 nt, synthetic construct
  source 1..20: mol_type = other RNA
aatgtaacacagttctagtt

SEQ ID NO: 14506 - RNA, 20 nt, synthetic construct
  source 1..20: mol_type = other RNA
aatgtaaggtgcacgctgtg

SEQ ID NO: 14507 - RNA, 20 nt, synthetic construct
  source 1..20: mol_type = other RNA
aatgtacaacattcatccct

SEQ ID NO: 14508 - RNA, 20 nt, synthetic construct
  source 1..20: mol_type = other RNA
aatgtagatcaagtatttcc

SEQ ID NO: 14509 - RNA, 20 nt, synthetic construct
  source 1..20: mol_type = other RNA
aatgtagatcctgaggaagc

SEQ ID NO: 14510 - RNA, 20 nt, synthetic construct
  source 1..20: mol_type = other RNA
aatgtagggaatagacaaag

SEQ ID NO: 14511 - RNA, 20 nt, synthetic construct
  source 1..20: mol_type = other RNA
aatgtaggtgtctgatgtgt

SEQ ID NO: 14512 - RNA, 20 nt, synthetic construct
  source 1..20: mol_type = other RNA
aatgtatgattttctaggaa

SEQ ID NO: 14513 - RNA, 20 nt, synthetic construct
  source 1..20: mol_type = other RNA
aatgtcaagctgtttgagct

SEQ ID NO: 14514 - RNA, 20 nt, synthetic construct
  source 1..20: mol_type = other RNA
aatgtcaattttcccccaat

SEQ ID NO: 14515 - RNA, 20 nt, synthetic construct
  source 1..20: mol_type = other RNA
aatgtcacattttcttatct

SEQ ID NO: 14516 - RNA, 20 nt, synthetic construct
  source 1..20: mol_type = other RNA
aatgtcagagatctgaaatt

SEQ ID NO: 14517 - RNA, 20 nt, synthetic construct
  source 1..20: mol_type = other RNA
aatgtcatcttctctctctg

SEQ ID NO: 14518 - RNA, 20 nt, synthetic construct
  source 1..20: mol_type = other RNA
aatgtccagaggaggaagag

SEQ ID NO: 14519 - RNA, 20 nt, synthetic construct
  source 1..20: mol_type = other RNA
aatgtccatcaggaaaacca

SEQ ID NO: 14520 - RNA, 20 nt, synthetic construct
  source 1..20: mol_type = other RNA
aatgtccatcgagagatgaa

SEQ ID NO: 14521 - RNA, 20 nt, synthetic construct
  source 1..20: mol_type = other RNA
aatgtccgttgaagtctttg

SEQ ID NO: 14522 - RNA, 20 nt, synthetic construct
  source 1..20: mol_type = other RNA
aatgtccttttcctgttccg

SEQ ID NO: 14523 - RNA, 20 nt, synthetic construct
  source 1..20: mol_type = other RNA
aatgtctcattgtggatgag

SEQ ID NO: 14524 - RNA, 20 nt, synthetic construct
  source 1..20: mol_type = other RNA
aatgtctcctctttcatatc

SEQ ID NO: 14525 - RNA, 20 nt, synthetic construct
  source 1..20: mol_type = other RNA
aatgtctggtttgctttgga

SEQ ID NO: 14526 - RNA, 20 nt, synthetic construct
  source 1..20: mol_type = other RNA
aatgtctgtctttatgccaa

SEQ ID NO: 14527 - RNA, 20 nt, synthetic construct
  source 1..20: mol_type = other RNA
aatgtcttaagaaggaaaag

SEQ ID NO: 14528 - RNA, 20 nt, synthetic construct
  source 1..20: mol_type = other RNA
aatgtctttggctcttagaa

SEQ ID NO: 14529 - RNA, 20 nt, synthetic construct
  source 1..20: mol_type = other RNA
aatgtctttttacacttgga

SEQ ID NO: 14530 - RNA, 20 nt, synthetic construct
  source 1..20: mol_type = other RNA
aatgtgaaaaatttgacatg

SEQ ID NO: 14531 - RNA, 20 nt, synthetic construct
  source 1..20: mol_type = other RNA
aatgtgaacagacagacatg

SEQ ID NO: 14532 - RNA, 20 nt, synthetic construct
  source 1..20: mol_type = other RNA
aatgtgaattagatggctta

SEQ ID NO: 14533 - RNA, 20 nt, synthetic construct
  source 1..20: mol_type = other RNA
aatgtgacagaacaaactca

SEQ ID NO: 14534 - RNA, 20 nt, synthetic construct
  source 1..20: mol_type = other RNA
aatgtgacattagtggtggt

SEQ ID NO: 14535 - RNA, 20 nt, synthetic construct
  source 1..20: mol_type = other RNA
aatgtgacctgtccttgtgt

SEQ ID NO: 14536 - RNA, 20 nt, synthetic construct
  source 1..20: mol_type = other RNA
aatgtgactagaagaaatgt

SEQ ID NO: 14537 - RNA, 20 nt, synthetic construct
  source 1..20: mol_type = other RNA
aatgtgacttcgtcaagggg

SEQ ID NO: 14538 - RNA, 20 nt, synthetic construct
  source 1..20: mol_type = other RNA
aatgtgagcatttagccccc

SEQ ID NO: 14539 - RNA, 20 nt, synthetic construct
  source 1..20: mol_type = other RNA
aatgtgagccacatacatag

SEQ ID NO: 14540 - RNA, 20 nt, synthetic construct
  source 1..20: mol_type = other RNA
aatgtgaggtgaggacatgg

SEQ ID NO: 14541 - RNA, 20 nt, synthetic construct
  source 1..20: mol_type = other RNA
aatgtgatatgccacatttt

SEQ ID NO: 14542 - RNA, 20 nt, synthetic construct
  source 1..20: mol_type = other RNA
aatgtgatggcatcattcat

SEQ ID NO: 14543 - RNA, 20 nt, synthetic construct
  source 1..20: mol_type = other RNA
aatgtgcaaggagagaaaaa

SEQ ID NO: 14544 - RNA, 20 nt, synthetic construct
  source 1..20: mol_type = other RNA
aatgtgcacctccagtgtcc

SEQ ID NO: 14545 - RNA, 20 nt, synthetic construct
  source 1..20: mol_type = other RNA
aatgtgcactcttttaaacc

SEQ ID NO: 14546 - RNA, 20 nt, synthetic construct
  source 1..20: mol_type = other RNA
aatgtgcctacatagtccac

SEQ ID NO: 14547 - RNA, 20 nt, synthetic construct
  source 1..20: mol_type = other RNA
aatgtgctgtccatttcctt

SEQ ID NO: 14548 - RNA, 20 nt, synthetic construct
  source 1..20: mol_type = other RNA
aatgtgcttcctaaacctgc

SEQ ID NO: 14549 - RNA, 20 nt, synthetic construct
  source 1..20: mol_type = other RNA
aatgtggaagcagaactaag

SEQ ID NO: 14550 - RNA, 20 nt, synthetic construct
  source 1..20: mol_type = other RNA
aatgtggagataaagagcag

SEQ ID NO: 14551 - RNA, 20 nt, synthetic construct
  source 1..20: mol_type = other RNA
aatgtggagttggtgcaagg

SEQ ID NO: 14552 - RNA, 20 nt, synthetic construct
  source 1..20: mol_type = other RNA
aatgtggatagtgcttttta

SEQ ID NO: 14553 - RNA, 20 nt, synthetic construct
  source 1..20: mol_type = other RNA
aatgtggatgcatgaggcat

SEQ ID NO: 14554 - RNA, 20 nt, synthetic construct
  source 1..20: mol_type = other RNA
aatgtggcaaatttatgtga

SEQ ID NO: 14555 - RNA, 20 nt, synthetic construct
  source 1..20: mol_type = other RNA
aatgtggcagaatttacatt

SEQ ID NO: 14556 - RNA, 20 nt, synthetic construct
  source 1..20: mol_type = other RNA
aatgtggcatttcttacaca

SEQ ID NO: 14557 - RNA, 20 nt, synthetic construct
  source 1..20: mol_type = other RNA
aatgtggcttgcaaggccca

SEQ ID NO: 14558 - RNA, 20 nt, synthetic construct
  source 1..20: mol_type = other RNA
aatgtggtcacactttttgt

SEQ ID NO: 14559 - RNA, 20 nt, synthetic construct
  source 1..20: mol_type = other RNA
aatgtggtggtatgcactgt

SEQ ID NO: 14560 - RNA, 20 nt, synthetic construct
  source 1..20: mol_type = other RNA
aatgtggtttttggttcact

SEQ ID NO: 14561 - RNA, 20 nt, synthetic construct
  source 1..20: mol_type = other RNA
aatgtgtaagaaatgccaca

SEQ ID NO: 14562 - RNA, 20 nt, synthetic construct
  source 1..20: mol_type = other RNA
aatgtgtagttctggtgtcg

SEQ ID NO: 14563 - RNA, 20 nt, synthetic construct
  source 1..20: mol_type = other RNA
aatgtgtctagtgaatgaga

SEQ ID NO: 14564 - RNA, 20 nt, synthetic construct
  source 1..20: mol_type = other RNA
aatgtgtgaagaaggaatgt

SEQ ID NO: 14565 - RNA, 20 nt, synthetic construct
  source 1..20: mol_type = other RNA
aatgtgtgttccagacaaaa

SEQ ID NO: 14566 - RNA, 20 nt, synthetic construct
  source 1..20: mol_type = other RNA
aatgtgttgtctgattcagt

SEQ ID NO: 14567 - RNA, 20 nt, synthetic construct
  source 1..20: mol_type = other RNA
aatgttaacaattggtgaat

SEQ ID NO: 14568 - RNA, 20 nt, synthetic construct
  source 1..20: mol_type = other RNA
aatgttaagcccaacttcac

SEQ ID NO: 14569 - RNA, 20 nt, synthetic construct
  source 1..20: mol_type = other RNA
aatgttacttctcagctata

SEQ ID NO: 14570 - RNA, 20 nt, synthetic construct
  source 1..20: mol_type = other RNA
aatgttagaattcaggacag

SEQ ID NO: 14571 - RNA, 20 nt, synthetic construct
  source 1..20: mol_type = other RNA
aatgttatatttccgtatcc

SEQ ID NO: 14572 - RNA, 20 nt, synthetic construct
  source 1..20: mol_type = other RNA
aatgttatgaagcttttctc

SEQ ID NO: 14573 - RNA, 20 nt, synthetic construct
  source 1..20: mol_type = other RNA
aatgttcaagtatttccacg

SEQ ID NO: 14574 - RNA, 20 nt, synthetic construct
  source 1..20: mol_type = other RNA
aatgttcagatagaaaagac

SEQ ID NO: 14575 - RNA, 20 nt, synthetic construct
  source 1..20: mol_type = other RNA
aatgttcagtttatgggtca

SEQ ID NO: 14576 - RNA, 20 nt, synthetic construct
  source 1..20: mol_type = other RNA
aatgttccctcttcaatatt

SEQ ID NO: 14577 - RNA, 20 nt, synthetic construct
  source 1..20: mol_type = other RNA
aatgttctcttttcctcgtt

SEQ ID NO: 14578 - RNA, 20 nt, synthetic construct
  source 1..20: mol_type = other RNA
aatgttgacatcttgcataa

SEQ ID NO: 14579 - RNA, 20 nt, synthetic construct
  source 1..20: mol_type = other RNA
aatgttgattttgaggcaga

SEQ ID NO: 14580 - RNA, 20 nt, synthetic construct
  source 1..20: mol_type = other RNA
aatgttgcagagactggata

SEQ ID NO: 14581 - RNA, 20 nt, synthetic construct
  source 1..20: mol_type = other RNA
aatgttgccaatatctatca

SEQ ID NO: 14582 - RNA, 20 nt, synthetic construct
  source 1..20: mol_type = other RNA
aatgttggttagtgttgttt

SEQ ID NO: 14583 - RNA, 20 nt, synthetic construct
  source 1..20: mol_type = other RNA
aatgttgtggatgtccttaa

SEQ ID NO: 14584 - RNA, 20 nt, synthetic construct
  source 1..20: mol_type = other RNA
aatgtttaattacccaggca

SEQ ID NO: 14585 - RNA, 20 nt, synthetic construct
  source 1..20: mol_type = other RNA
aatgtttaattcctactttc

SEQ ID NO: 14586 - RNA, 20 nt, synthetic construct
  source 1..20: mol_type = other RNA
aatgtttagcggaatgacta

SEQ ID NO: 14587 - RNA, 20 nt, synthetic construct
  source 1..20: mol_type = other RNA
aatgtttgctaataatgatg

SEQ ID NO: 14588 - RNA, 20 nt, synthetic construct
  source 1..20: mol_type = other RNA
aatgtttggtagatttctgc

SEQ ID NO: 14589 - RNA, 20 nt, synthetic construct
  source 1..20: mol_type = other RNA
aatgtttgtacttctacctt

SEQ ID NO: 14590 - RNA, 20 nt, synthetic construct
  source 1..20: mol_type = other RNA
aatgtttgtttaattagccg

SEQ ID NO: 14591 - RNA, 20 nt, synthetic construct
  source 1..20: mol_type = other RNA
aatgttttaaggcagggctt

SEQ ID NO: 14592 - RNA, 20 nt, synthetic construct
  source 1..20: mol_type = other RNA
aatgttttatttagcccatg

SEQ ID NO: 14593 - RNA, 20 nt, synthetic construct
  source 1..20: mol_type = other RNA
aatgttttccgtgtgacaaa

SEQ ID NO: 14594 - RNA, 20 nt, synthetic construct
  source 1..20: mol_type = other RNA
aatgttttgcagagatgagg

SEQ ID NO: 14595 - RNA, 20 nt, synthetic construct
  source 1..20: mol_type = other RNA
aatgtttttccgtctagcca

SEQ ID NO: 14596 - RNA, 20 nt, synthetic construct
  source 1..20: mol_type = other RNA
aattaaaaacattggaggat

SEQ ID NO: 14597 - RNA, 20 nt, synthetic construct
  source 1..20: mol_type = other RNA
aattaaaaactgagaccgga

SEQ ID NO: 14598 - RNA, 20 nt, synthetic construct
  source 1..20: mol_type = other RNA
aattaaacaatcttgaaagg

SEQ ID NO: 14599 - RNA, 20 nt, synthetic construct
  source 1..20: mol_type = other RNA
aattaaacacacccttggta

SEQ ID NO: 14600 - RNA, 20 nt, synthetic construct
  source 1..20: mol_type = other RNA
aattaaactatagacccaaa

SEQ ID NO: 14601 - RNA, 20 nt, synthetic construct
  source 1..20: mol_type = other RNA
aattaaactcattatcccag

SEQ ID NO: 14602 - RNA, 20 nt, synthetic construct
  source 1..20: mol_type = other RNA
aattaaacttcaaggtaatc

SEQ ID NO: 14603 - RNA, 20 nt, synthetic construct
  source 1..20: mol_type = other RNA
aattaaaggatgtcaactga

SEQ ID NO: 14604 - RNA, 20 nt, synthetic construct
  source 1..20: mol_type = other RNA
aattaaaggctggaaataat

SEQ ID NO: 14605 - RNA, 20 nt, synthetic construct
  source 1..20: mol_type = other RNA
aattaacactaatccttctc

SEQ ID NO: 14606 - RNA, 20 nt, synthetic construct
  source 1..20: mol_type = other RNA
aattaacactatgtgttgat

SEQ ID NO: 14607 - RNA, 20 nt, synthetic construct
  source 1..20: mol_type = other RNA
aattaactccaggggacatg

SEQ ID NO: 14608 - RNA, 20 nt, synthetic construct
  source 1..20: mol_type = other RNA
aattaagacaatgtggagtt

SEQ ID NO: 14609 - RNA, 20 nt, synthetic construct
  source 1..20: mol_type = other RNA
aattaagagaatggaaactt

SEQ ID NO: 14610 - RNA, 20 nt, synthetic construct
  source 1..20: mol_type = other RNA
aattaagcaaccttttaggt

SEQ ID NO: 14611 - RNA, 20 nt, synthetic construct
  source 1..20: mol_type = other RNA
aattaagcaccactagagta

SEQ ID NO: 14612 - RNA, 20 nt, synthetic construct
  source 1..20: mol_type = other RNA
aattaagcttcgacagtccc

SEQ ID NO: 14613 - RNA, 20 nt, synthetic construct
  source 1..20: mol_type = other RNA
aattaaggaatgcctataaa

SEQ ID NO: 14614 - RNA, 20 nt, synthetic construct
  source 1..20: mol_type = other RNA
aattaatcagtctgtaagca

SEQ ID NO: 14615 - RNA, 20 nt, synthetic construct
  source 1..20: mol_type = other RNA
aattaatctcttacacctgt

SEQ ID NO: 14616 - RNA, 20 nt, synthetic construct
  source 1..20: mol_type = other RNA
aattaatgcccaatcaaatc

SEQ ID NO: 14617 - RNA, 20 nt, synthetic construct
  source 1..20: mol_type = other RNA
aattaatgccccatgtgttg

SEQ ID NO: 14618 - RNA, 20 nt, synthetic construct
  source 1..20: mol_type = other RNA
aattacaaaataggcagtcc

SEQ ID NO: 14619 - RNA, 20 nt, synthetic construct
  source 1..20: mol_type = other RNA
aattacaaatgaaagtcagc

SEQ ID NO: 14620 - RNA, 20 nt, synthetic construct
  source 1..20: mol_type = other RNA
aattacaactggtttctgca

SEQ ID NO: 14621 - RNA, 20 nt, synthetic construct
  source 1..20: mol_type = other RNA
aattacaataatgcacatgg

SEQ ID NO: 14622 - RNA, 20 nt, synthetic construct
  source 1..20: mol_type = other RNA
aattacaatggaaatgaagt

SEQ ID NO: 14623 - RNA, 20 nt, synthetic construct
  source 1..20: mol_type = other RNA
aattacacatctcccatacc

SEQ ID NO: 14624 - RNA, 20 nt, synthetic construct
  source 1..20: mol_type = other RNA
aattacaggcatgagtcgcc

SEQ ID NO: 14625 - RNA, 20 nt, synthetic construct
  source 1..20: mol_type = other RNA
aattacaggggactttgatg

SEQ ID NO: 14626 - RNA, 20 nt, synthetic construct
  source 1..20: mol_type = other RNA
aattacaggtcaaactcact

SEQ ID NO: 14627 - RNA, 20 nt, synthetic construct
  source 1..20: mol_type = other RNA
aattacatacttcaaagggt

SEQ ID NO: 14628 - RNA, 20 nt, synthetic construct
  source 1..20: mol_type = other RNA
aattaccataaagtcttcca

SEQ ID NO: 14629 - RNA, 20 nt, synthetic construct
  source 1..20: mol_type = other RNA
aattaccatgtttccataaa

SEQ ID NO: 14630 - RNA, 20 nt, synthetic construct
  source 1..20: mol_type = other RNA
aattacccaaagactttgtt

SEQ ID NO: 14631 - RNA, 20 nt, synthetic construct
  source 1..20: mol_type = other RNA
aattacccaggcatgatggc

SEQ ID NO: 14632 - RNA, 20 nt, synthetic construct
  source 1..20: mol_type = other RNA
aattaccccattcactcagc

SEQ ID NO: 14633 - RNA, 20 nt, synthetic construct
  source 1..20: mol_type = other RNA
aattactgacaatagccaag

SEQ ID NO: 14634 - RNA, 20 nt, synthetic construct
  source 1..20: mol_type = other RNA
aattactgtctgtgaaaata

SEQ ID NO: 14635 - RNA, 20 nt, synthetic construct
  source 1..20: mol_type = other RNA
aattactgtttcttagctat

SEQ ID NO: 14636 - RNA, 20 nt, synthetic construct
  source 1..20: mol_type = other RNA
aattacttccagtgttttag

SEQ ID NO: 14637 - RNA, 20 nt, synthetic construct
  source 1..20: mol_type = other RNA
aattacttctttctctttca

SEQ ID NO: 14638 - RNA, 20 nt, synthetic construct
  source 1..20: mol_type = other RNA
aattacttgagagcagagac

SEQ ID NO: 14639 - RNA, 20 nt, synthetic construct
  source 1..20: mol_type = other RNA
aattagaaactggtgaactg

SEQ ID NO: 14640 - RNA, 20 nt, synthetic construct
  source 1..20: mol_type = other RNA
aattagaaagctggactcat

SEQ ID NO: 14641 - RNA, 20 nt, synthetic construct
  source 1..20: mol_type = other RNA
aattagaaatgtggaagcag

SEQ ID NO: 14642 - RNA, 20 nt, synthetic construct
  source 1..20: mol_type = other RNA
aattagaacatctggcagca

SEQ ID NO: 14643 - RNA, 20 nt, synthetic construct
  source 1..20: mol_type = other RNA
aattagatgatgttttgaac

SEQ ID NO: 14644 - RNA, 20 nt, synthetic construct
  source 1..20: mol_type = other RNA
aattagatggcttaggatca

SEQ ID NO: 14645 - RNA, 20 nt, synthetic construct
  source 1..20: mol_type = other RNA
aattagattgttttgttgct

SEQ ID NO: 14646 - RNA, 20 nt, synthetic construct
  source 1..20: mol_type = other RNA
aattagcaatgcgaatcatc

SEQ ID NO: 14647 - RNA, 20 nt, synthetic construct
  source 1..20: mol_type = other RNA
aattagcacctttattaact

SEQ ID NO: 14648 - RNA, 20 nt, synthetic construct
  source 1..20: mol_type = other RNA
aattagccaagcatggtggt

SEQ ID NO: 14649 - RNA, 20 nt, synthetic construct
  source 1..20: mol_type = other RNA
aattagccgggtgtagtggt

SEQ ID NO: 14650 - RNA, 20 nt, synthetic construct
  source 1..20: mol_type = other RNA
aattagccttttacacccta

SEQ ID NO: 14651 - RNA, 20 nt, synthetic construct
  source 1..20: mol_type = other RNA
aattagctaagtatgcagaa

SEQ ID NO: 14652 - RNA, 20 nt, synthetic construct
  source 1..20: mol_type = other RNA
aattagctgactttcatttg

SEQ ID NO: 14653 - RNA, 20 nt, synthetic construct
  source 1..20: mol_type = other RNA
aattagctggatgtggtgtg

SEQ ID NO: 14654 - RNA, 20 nt, synthetic construct
  source 1..20: mol_type = other RNA
aattagctgggcgagatggc

SEQ ID NO: 14655 - RNA, 20 nt, synthetic construct
  source 1..20: mol_type = other RNA
aattagctttctcccagctg

SEQ ID NO: 14656 - RNA, 20 nt, synthetic construct
  source 1..20: mol_type = other RNA
aattaggctgtttgagatct

SEQ ID NO: 14657 - RNA, 20 nt, synthetic construct
  source 1..20: mol_type = other RNA
aattagtatacatgtttagc

SEQ ID NO: 14658 - RNA, 20 nt, synthetic construct
  source 1..20: mol_type = other RNA
aattagtcatagcagtggga

SEQ ID NO: 14659 - RNA, 20 nt, synthetic construct
  source 1..20: mol_type = other RNA
aattagtgattttaccaagg

SEQ ID NO: 14660 - RNA, 20 nt, synthetic construct
  source 1..20: mol_type = other RNA
aattagttacatgaggtcac

SEQ ID NO: 14661 - RNA, 20 nt, synthetic construct
  source 1..20: mol_type = other RNA
aattagttcctccttttgta

SEQ ID NO: 14662 - RNA, 20 nt, synthetic construct
  source 1..20: mol_type = other RNA
aattagttccttttaaggga

SEQ ID NO: 14663 - RNA, 20 nt, synthetic construct
  source 1..20: mol_type = other RNA
aattataagcttcctctggc

SEQ ID NO: 14664 - RNA, 20 nt, synthetic construct
  source 1..20: mol_type = other RNA
aattatagagggcctaaata

SEQ ID NO: 14665 - RNA, 20 nt, synthetic construct
  source 1..20: mol_type = other RNA
aattatagctccaaaagcga

SEQ ID NO: 14666 - RNA, 20 nt, synthetic construct
  source 1..20: mol_type = other RNA
aattatctgtgggttaaaag

SEQ ID NO: 14667 - RNA, 20 nt, synthetic construct
  source 1..20: mol_type = other RNA
aattatgactgagatactta

SEQ ID NO: 14668 - RNA, 20 nt, synthetic construct
  source 1..20: mol_type = other RNA
aattatgagcattccccaca

SEQ ID NO: 14669 - RNA, 20 nt, synthetic construct
  source 1..20: mol_type = other RNA
aattatgctaacatgaacta

SEQ ID NO: 14670 - RNA, 20 nt, synthetic construct
  source 1..20: mol_type = other RNA
aattatgctgagtgaatggg

SEQ ID NO: 14671 - RNA, 20 nt, synthetic construct
  source 1..20: mol_type = other RNA
aattattagcttgctagtag

SEQ ID NO: 14672 - RNA, 20 nt, synthetic construct
  source 1..20: mol_type = other RNA
aattattagttgtacttgac

SEQ ID NO: 14673 - RNA, 20 nt, synthetic construct
  source 1..20: mol_type = other RNA
aattattgacaagacgtgta

SEQ ID NO: 14674 - RNA, 20 nt, synthetic construct
  source 1..20: mol_type = other RNA
aattattgattggcaaatct

SEQ ID NO: 14675 - RNA, 20 nt, synthetic construct
  source 1..20: mol_type = other RNA
aattattgtctgcaagcaga

SEQ ID NO: 14676 - RNA, 20 nt, synthetic construct
  source 1..20: mol_type = other RNA
aattatttccagcctttaat

SEQ ID NO: 14677 - RNA, 20 nt, synthetic construct
  source 1..20: mol_type = other RNA
aattatttgaataaggtctg

SEQ ID NO: 14678 - RNA, 20 nt, synthetic construct
  source 1..20: mol_type = other RNA
aattatttgagagtaagttg

SEQ ID NO: 14679 - RNA, 20 nt, synthetic construct
  source 1..20: mol_type = other RNA
aattatttgtgcatactgtg

SEQ ID NO: 14680 - RNA, 20 nt, synthetic construct
  source 1..20: mol_type = other RNA
aattattttcctccttctgc

SEQ ID NO: 14681 - RNA, 20 nt, synthetic construct
  source 1..20: mol_type = other RNA
aattcaaacatgacagatcc

SEQ ID NO: 14682 - RNA, 20 nt, synthetic construct
  source 1..20: mol_type = other RNA
aattcaaagcaagttaaaag

SEQ ID NO: 14683 - RNA, 20 nt, synthetic construct
  source 1..20: mol_type = other RNA
aattcaacaatagcaacaaa

SEQ ID NO: 14684 - RNA, 20 nt, synthetic construct
  source 1..20: mol_type = other RNA
aattcaacagctactatgaa

SEQ ID NO: 14685 - RNA, 20 nt, synthetic construct
  source 1..20: mol_type = other RNA
aattcaacttggtaaaaagt

SEQ ID NO: 14686 - RNA, 20 nt, synthetic construct
  source 1..20: mol_type = other RNA
aattcaattttcatgggttg

SEQ ID NO: 14687 - RNA, 20 nt, synthetic construct
  source 1..20: mol_type = other RNA
aattcacaagattaatcttg

SEQ ID NO: 14688 - RNA, 20 nt, synthetic construct
  source 1..20: mol_type = other RNA
aattcacagaactgtcactg

SEQ ID NO: 14689 - RNA, 20 nt, synthetic construct
  source 1..20: mol_type = other RNA
aattcacagaatatactcag

SEQ ID NO: 14690 - RNA, 20 nt, synthetic construct
  source 1..20: mol_type = other RNA
aattcacagcatgaatacct

SEQ ID NO: 14691 - RNA, 20 nt, synthetic construct
  source 1..20: mol_type = other RNA
aattcacagtagaagactca

SEQ ID NO: 14692 - RNA, 20 nt, synthetic construct
  source 1..20: mol_type = other RNA
aattcacatttaagaaggga

SEQ ID NO: 14693 - RNA, 20 nt, synthetic construct
  source 1..20: mol_type = other RNA
aattcaccaaacaccttaca

SEQ ID NO: 14694 - RNA, 20 nt, synthetic construct
  source 1..20: mol_type = other RNA
aattcacgagactgttaggg

SEQ ID NO: 14695 - RNA, 20 nt, synthetic construct
  source 1..20: mol_type = other RNA
aattcactaatgcctcaaat

SEQ ID NO: 14696 - RNA, 20 nt, synthetic construct
  source 1..20: mol_type = other RNA
aattcactcctcattcacac

SEQ ID NO: 14697 - RNA, 20 nt, synthetic construct
  source 1..20: mol_type = other RNA
aattcactgtgactccaaag

SEQ ID NO: 14698 - RNA, 20 nt, synthetic construct
  source 1..20: mol_type = other RNA
aattcagaagctaaattttc

SEQ ID NO: 14699 - RNA, 20 nt, synthetic construct
  source 1..20: mol_type = other RNA
aattcagagtggctaatgtg

SEQ ID NO: 14700 - RNA, 20 nt, synthetic construct
  source 1..20: mol_type = other RNA
aattcagatggccccaaaat

SEQ ID NO: 14701 - RNA, 20 nt, synthetic construct
  source 1..20: mol_type = other RNA
aattcaggacagtcatcctc

SEQ ID NO: 14702 - RNA, 20 nt, synthetic construct
  source 1..20: mol_type = other RNA
aattcaggacagttattctt

SEQ ID NO: 14703 - RNA, 20 nt, synthetic construct
  source 1..20: mol_type = other RNA
aattcagtcaacaccaagca

SEQ ID NO: 14704 - RNA, 20 nt, synthetic construct
  source 1..20: mol_type = other RNA
aattcagtcaccaaacgttt

SEQ ID NO: 14705 - RNA, 20 nt, synthetic construct
  source 1..20: mol_type = other RNA
aattcatagatcaccagggg

SEQ ID NO: 14706 - RNA, 20 nt, synthetic construct
  source 1..20: mol_type = other RNA
aattcatatgaaatcacaca

SEQ ID NO: 14707 - RNA, 20 nt, synthetic construct
  source 1..20: mol_type = other RNA
aattcatcctactagtattt

SEQ ID NO: 14708 - RNA, 20 nt, synthetic construct
  source 1..20: mol_type = other RNA
aattcatgcaactgaaaaca

SEQ ID NO: 14709 - RNA, 20 nt, synthetic construct
  source 1..20: mol_type = other RNA
aattcattgtacatgaagtc

SEQ ID NO: 14710 - RNA, 20 nt, synthetic construct
  source 1..20: mol_type = other RNA
aattcattgttgtgtgttaa

SEQ ID NO: 14711 - RNA, 20 nt, synthetic construct
  source 1..20: mol_type = other RNA
aattccaaaagtgaatatag

SEQ ID NO: 14712 - RNA, 20 nt, synthetic construct
  source 1..20: mol_type = other RNA
aattccaaattagctttctc

SEQ ID NO: 14713 - RNA, 20 nt, synthetic construct
  source 1..20: mol_type = other RNA
aattccacaaccactgggga

SEQ ID NO: 14714 - RNA, 20 nt, synthetic construct
  source 1..20: mol_type = other RNA
aattccataaatgtttgcta

SEQ ID NO: 14715 - RNA, 20 nt, synthetic construct
  source 1..20: mol_type = other RNA
aattccatcagtggttgtgc

SEQ ID NO: 14716 - RNA, 20 nt, synthetic construct
  source 1..20: mol_type = other RNA
aattccattccttttcgaga

SEQ ID NO: 14717 - RNA, 20 nt, synthetic construct
  source 1..20: mol_type = other RNA
aattcccacaaaatatgaag

SEQ ID NO: 14718 - RNA, 20 nt, synthetic construct
  source 1..20: mol_type = other RNA
aattccccagcctcagcctc

SEQ ID NO: 14719 - RNA, 20 nt, synthetic construct
  source 1..20: mol_type = other RNA
aattccctcagcaaaagcaa

SEQ ID NO: 14720 - RNA, 20 nt, synthetic construct
  source 1..20: mol_type = other RNA
aattccctctacaaaaggag

SEQ ID NO: 14721 - RNA, 20 nt, synthetic construct
  source 1..20: mol_type = other RNA
aattcccttcagtgtagtca

SEQ ID NO: 14722 - RNA, 20 nt, synthetic construct
  source 1..20: mol_type = other RNA
aattccgctctggttttaaa

SEQ ID NO: 14723 - RNA, 20 nt, synthetic construct
  source 1..20: mol_type = other RNA
aattcctaactcaagagtta

SEQ ID NO: 14724 - RNA, 20 nt, synthetic construct
  source 1..20: mol_type = other RNA
aattcctactttcttcaacc

SEQ ID NO: 14725 - RNA, 20 nt, synthetic construct
  source 1..20: mol_type = other RNA
aattccttcccctttctttg

SEQ ID NO: 14726 - RNA, 20 nt, synthetic construct
  source 1..20: mol_type = other RNA
aattccttcctttgatgact

SEQ ID NO: 14727 - RNA, 20 nt, synthetic construct
  source 1..20: mol_type = other RNA
aattcctttctaggcatcta

SEQ ID NO: 14728 - RNA, 20 nt, synthetic construct
  source 1..20: mol_type = other RNA
aattcgaaaatgggccaaag

SEQ ID NO: 14729 - RNA, 20 nt, synthetic construct
  source 1..20: mol_type = other RNA
aattcgcataaccaaattat

SEQ ID NO: 14730 - RNA, 20 nt, synthetic construct
  source 1..20: mol_type = other RNA
aattcggtggcattaaggac

SEQ ID NO: 14731 - RNA, 20 nt, synthetic construct
  source 1..20: mol_type = other RNA
aattcgttaatacttgtgta

SEQ ID NO: 14732 - RNA, 20 nt, synthetic construct
  source 1..20: mol_type = other RNA
aattctaacaagaagctgtt

SEQ ID NO: 14733 - RNA, 20 nt, synthetic construct
  source 1..20: mol_type = other RNA
aattctaatgaactcccaga

SEQ ID NO: 14734 - RNA, 20 nt, synthetic construct
  source 1..20: mol_type = other RNA
aattctaattagaaactggt

SEQ ID NO: 14735 - RNA, 20 nt, synthetic construct
  source 1..20: mol_type = other RNA
aattctactaaacattaagg

SEQ ID NO: 14736 - RNA, 20 nt, synthetic construct
  source 1..20: mol_type = other RNA
aattctagttaataaaggtg

SEQ ID NO: 14737 - RNA, 20 nt, synthetic construct
  source 1..20: mol_type = other RNA
aattctataggtagtacata

SEQ ID NO: 14738 - RNA, 20 nt, synthetic construct
  source 1..20: mol_type = other RNA
aattctatctgaactttcga

SEQ ID NO: 14739 - RNA, 20 nt, synthetic construct
  source 1..20: mol_type = other RNA
aattctcaaatgaacaggtt

SEQ ID NO: 14740 - RNA, 20 nt, synthetic construct
  source 1..20: mol_type = other RNA
aattctcattagttatctct

SEQ ID NO: 14741 - RNA, 20 nt, synthetic construct
  source 1..20: mol_type = other RNA
aattctccactttcatgatt

SEQ ID NO: 14742 - RNA, 20 nt, synthetic construct
  source 1..20: mol_type = other RNA
aattctccctgaaattgtca

SEQ ID NO: 14743 - RNA, 20 nt, synthetic construct
  source 1..20: mol_type = other RNA
aattctctctcaactggccc

SEQ ID NO: 14744 - RNA, 20 nt, synthetic construct
  source 1..20: mol_type = other RNA
aattctctggaatagaagag

SEQ ID NO: 14745 - RNA, 20 nt, synthetic construct
  source 1..20: mol_type = other RNA
aattctgacaactgggagaa

SEQ ID NO: 14746 - RNA, 20 nt, synthetic construct
  source 1..20: mol_type = other RNA
aattctgacacccgaagagg

SEQ ID NO: 14747 - RNA, 20 nt, synthetic construct
  source 1..20: mol_type = other RNA
aattctgaccctttattcaa

SEQ ID NO: 14748 - RNA, 20 nt, synthetic construct
  source 1..20: mol_type = other RNA
aattctgacttagtgaggga

SEQ ID NO: 14749 - RNA, 20 nt, synthetic construct
  source 1..20: mol_type = other RNA
aattctgaggcctcctgcct

SEQ ID NO: 14750 - RNA, 20 nt, synthetic construct
  source 1..20: mol_type = other RNA
aattctgagggaaattattt

SEQ ID NO: 14751 - RNA, 20 nt, synthetic construct
  source 1..20: mol_type = other RNA
aattctgatagcttgacaaa

SEQ ID NO: 14752 - RNA, 20 nt, synthetic construct
  source 1..20: mol_type = other RNA
aattctgatgcacaagcctt

SEQ ID NO: 14753 - RNA, 20 nt, synthetic construct
  source 1..20: mol_type = other RNA
aattctgccacattcaacaa

SEQ ID NO: 14754 - RNA, 20 nt, synthetic construct
  source 1..20: mol_type = other RNA
aattctgccttcaatgtttg

SEQ ID NO: 14755 - RNA, 20 nt, synthetic construct
  source 1..20: mol_type = other RNA
aattctgcttattatatgcc

SEQ ID NO: 14756 - RNA, 20 nt, synthetic construct
  source 1..20: mol_type = other RNA
aattctgtgccaagcaactt

SEQ ID NO: 14757 - RNA, 20 nt, synthetic construct
  source 1..20: mol_type = other RNA
aattctgttctcagtatcct

SEQ ID NO: 14758 - RNA, 20 nt, synthetic construct
  source 1..20: mol_type = other RNA
aattctgtttacccttacta

SEQ ID NO: 14759 - RNA, 20 nt, synthetic construct
  source 1..20: mol_type = other RNA
aattcttaaactgccaaacc

SEQ ID NO: 14760 - RNA, 20 nt, synthetic construct
  source 1..20: mol_type = other RNA
aattcttccagcctggtaat

SEQ ID NO: 14761 - RNA, 20 nt, synthetic construct
  source 1..20: mol_type = other RNA
aattcttcctgtcttggacc

SEQ ID NO: 14762 - RNA, 20 nt, synthetic construct
  source 1..20: mol_type = other RNA
aattcttccttaatgtttag

SEQ ID NO: 14763 - RNA, 20 nt, synthetic construct
  source 1..20: mol_type = other RNA
aattcttgacctcaaatgat

SEQ ID NO: 14764 - RNA, 20 nt, synthetic construct
  source 1..20: mol_type = other RNA
aattcttgggtgaataaccc

SEQ ID NO: 14765 - RNA, 20 nt, synthetic construct
  source 1..20: mol_type = other RNA
aattcttggtcttttgattt

SEQ ID NO: 14766 - RNA, 20 nt, synthetic construct
  source 1..20: mol_type = other RNA
aattctttaaaactgctgag

SEQ ID NO: 14767 - RNA, 20 nt, synthetic construct
  source 1..20: mol_type = other RNA
aattcttttgctgtataccc

SEQ ID NO: 14768 - RNA, 20 nt, synthetic construct
  source 1..20: mol_type = other RNA
aattgaacagcctaaagtcc

SEQ ID NO: 14769 - RNA, 20 nt, synthetic construct
  source 1..20: mol_type = other RNA
aattgaacccactgagcatt

SEQ ID NO: 14770 - RNA, 20 nt, synthetic construct
  source 1..20: mol_type = other RNA
aattgaatggggatgcaaca

SEQ ID NO: 14771 - RNA, 20 nt, synthetic construct
  source 1..20: mol_type = other RNA
aattgaccaaacatgtgagg

SEQ ID NO: 14772 - RNA, 20 nt, synthetic construct
  source 1..20: mol_type = other RNA
aattgaccattccacgctgt

SEQ ID NO: 14773 - RNA, 20 nt, synthetic construct
  source 1..20: mol_type = other RNA
aattgacttcactagatctc

SEQ ID NO: 14774 - RNA, 20 nt, synthetic construct
  source 1..20: mol_type = other RNA
aattgactttaccctgctgg

SEQ ID NO: 14775 - RNA, 20 nt, synthetic construct
  source 1..20: mol_type = other RNA
aattgagagctttcttttaa

SEQ ID NO: 14776 - RNA, 20 nt, synthetic construct
  source 1..20: mol_type = other RNA
aattgagatgtactggaagt

SEQ ID NO: 14777 - RNA, 20 nt, synthetic construct
  source 1..20: mol_type = other RNA
aattgagctgtccccaccgc

SEQ ID NO: 14778 - RNA, 20 nt, synthetic construct
  source 1..20: mol_type = other RNA
aattgatctgccaggacaat

SEQ ID NO: 14779 - RNA, 20 nt, synthetic construct
  source 1..20: mol_type = other RNA
aattgatttgttatatccag

SEQ ID NO: 14780 - RNA, 20 nt, synthetic construct
  source 1..20: mol_type = other RNA
aattgcaaaaacagtttccc

SEQ ID NO: 14781 - RNA, 20 nt, synthetic construct
  source 1..20: mol_type = other RNA
aattgcactccagcctaggc

SEQ ID NO: 14782 - RNA, 20 nt, synthetic construct
  source 1..20: mol_type = other RNA
aattgcagagtgttcaaaag

SEQ ID NO: 14783 - RNA, 20 nt, synthetic construct
  source 1..20: mol_type = other RNA
aattgcagccagagagtgga

SEQ ID NO: 14784 - RNA, 20 nt, synthetic construct
  source 1..20: mol_type = other RNA
aattgcaggtttactccaag

SEQ ID NO: 14785 - RNA, 20 nt, synthetic construct
  source 1..20: mol_type = other RNA
aattgcatcaactgcttccc

SEQ ID NO: 14786 - RNA, 20 nt, synthetic construct
  source 1..20: mol_type = other RNA
aattgcatgagacttggagt

SEQ ID NO: 14787 - RNA, 20 nt, synthetic construct
  source 1..20: mol_type = other RNA
aattgccaaactgttttcca

SEQ ID NO: 14788 - RNA, 20 nt, synthetic construct
  source 1..20: mol_type = other RNA
aattgccatatgtagggcac

SEQ ID NO: 14789 - RNA, 20 nt, synthetic construct
  source 1..20: mol_type = other RNA
aattgcgcagaactggggct

SEQ ID NO: 14790 - RNA, 20 nt, synthetic construct
  source 1..20: mol_type = other RNA
aattgctgcagtttttccac

SEQ ID NO: 14791 - RNA, 20 nt, synthetic construct
  source 1..20: mol_type = other RNA
aattgcttttgctgagggaa

SEQ ID NO: 14792 - RNA, 20 nt, synthetic construct
  source 1..20: mol_type = other RNA
aattggaacctttgtccact

SEQ ID NO: 14793 - RNA, 20 nt, synthetic construct
  source 1..20: mol_type = other RNA
aattggaagactatcacgat

SEQ ID NO: 14794 - RNA, 20 nt, synthetic construct
  source 1..20: mol_type = other RNA
aattggacgggtggtaggga

SEQ ID NO: 14795 - RNA, 20 nt, synthetic construct
  source 1..20: mol_type = other RNA
aattggcatttaaaagaacc

SEQ ID NO: 14796 - RNA, 20 nt, synthetic construct
  source 1..20: mol_type = other RNA
aattggcgtacatgtagata

SEQ ID NO: 14797 - RNA, 20 nt, synthetic construct
  source 1..20: mol_type = other RNA
aattgggatctgataaatta

SEQ ID NO: 14798 - RNA, 20 nt, synthetic construct
  source 1..20: mol_type = other RNA
aattgggggaaaattgacat

SEQ ID NO: 14799 - RNA, 20 nt, synthetic construct
  source 1..20: mol_type = other RNA
aattggtagtcaatgcaatg

SEQ ID NO: 14800 - RNA, 20 nt, synthetic construct
  source 1..20: mol_type = other RNA
aattggtcctggaaaaagac

SEQ ID NO: 14801 - RNA, 20 nt, synthetic construct
  source 1..20: mol_type = other RNA
aattggtgaatctgagtaaa

SEQ ID NO: 14802 - RNA, 20 nt, synthetic construct
  source 1..20: mol_type = other RNA
aattggttaaacttggtctg

SEQ ID NO: 14803 - RNA, 20 nt, synthetic construct
  source 1..20: mol_type = other RNA
aattggttcgtttgaggctt

SEQ ID NO: 14804 - RNA, 20 nt, synthetic construct
  source 1..20: mol_type = other RNA
aattgtaatcacagtacgct

SEQ ID NO: 14805 - RNA, 20 nt, synthetic construct
  source 1..20: mol_type = other RNA
aattgtaatgtctcctcttt

SEQ ID NO: 14806 - RNA, 20 nt, synthetic construct
  source 1..20: mol_type = other RNA
aattgtacaattttcttacc

SEQ ID NO: 14807 - RNA, 20 nt, synthetic construct
  source 1..20: mol_type = other RNA
aattgtacacctcaaactag

SEQ ID NO: 14808 - RNA, 20 nt, synthetic construct
  source 1..20: mol_type = other RNA
aattgtaccttggagagaaa

SEQ ID NO: 14809 - RNA, 20 nt, synthetic construct
  source 1..20: mol_type = other RNA
aattgtagtttccatggagg

SEQ ID NO: 14810 - RNA, 20 nt, synthetic construct
  source 1..20: mol_type = other RNA
aattgtcagaaaagatcagt

SEQ ID NO: 14811 - RNA, 20 nt, synthetic construct
  source 1..20: mol_type = other RNA
aattgtcagattttcttgtt

SEQ ID NO: 14812 - RNA, 20 nt, synthetic construct
  source 1..20: mol_type = other RNA
aattgtcctggcagatcaat

SEQ ID NO: 14813 - RNA, 20 nt, synthetic construct
  source 1..20: mol_type = other RNA
aattgtgacagttctatttc

SEQ ID NO: 14814 - RNA, 20 nt, synthetic construct
  source 1..20: mol_type = other RNA
aattgtgtgttctctttttg

SEQ ID NO: 14815 - RNA, 20 nt, synthetic construct
  source 1..20: mol_type = other RNA
aattgttcatgaaatcccct

SEQ ID NO: 14816 - RNA, 20 nt, synthetic construct
  source 1..20: mol_type = other RNA
aattgttgcgcgtcaaaaga

SEQ ID NO: 14817 - RNA, 20 nt, synthetic construct
  source 1..20: mol_type = other RNA
aattgtttgttgggtttaac

SEQ ID NO: 14818 - RNA, 20 nt, synthetic construct
  source 1..20: mol_type = other RNA
aattgttttcccttttgtag

SEQ ID NO: 14819 - RNA, 20 nt, synthetic construct
  source 1..20: mol_type = other RNA
aatttaaagacgttcagata

SEQ ID NO: 14820 - RNA, 20 nt, synthetic construct
  source 1..20: mol_type = other RNA
aatttaaagttagtgaagca

SEQ ID NO: 14821 - RNA, 20 nt, synthetic construct
  source 1..20: mol_type = other RNA
aatttaacacacaacaatga

SEQ ID NO: 14822 - RNA, 20 nt, synthetic construct
  source 1..20: mol_type = other RNA
aatttaacttctaatgccca

SEQ ID NO: 14823 - RNA, 20 nt, synthetic construct
  source 1..20: mol_type = other RNA
aatttaagacacaaggaagg

SEQ ID NO: 14824 - RNA, 20 nt, synthetic construct
  source 1..20: mol_type = other RNA
aatttaagcacagaattact

SEQ ID NO: 14825 - RNA, 20 nt, synthetic construct
  source 1..20: mol_type = other RNA
aatttaaggaccaggtatgg

SEQ ID NO: 14826 - RNA, 20 nt, synthetic construct
  source 1..20: mol_type = other RNA
aatttaaggggtaaatggtt

SEQ ID NO: 14827 - RNA, 20 nt, synthetic construct
  source 1..20: mol_type = other RNA
aatttaattttctgactctg

SEQ ID NO: 14828 - RNA, 20 nt, synthetic construct
  source 1..20: mol_type = other RNA
aatttaattttgagagtgca

SEQ ID NO: 14829 - RNA, 20 nt, synthetic construct
  source 1..20: mol_type = other RNA
aatttacatagtgctcttct

SEQ ID NO: 14830 - RNA, 20 nt, synthetic construct
  source 1..20: mol_type = other RNA
aatttaccatctgacatatg

SEQ ID NO: 14831 - RNA, 20 nt, synthetic construct
  source 1..20: mol_type = other RNA
aatttacccacaaaagaaaa

SEQ ID NO: 14832 - RNA, 20 nt, synthetic construct
  source 1..20: mol_type = other RNA
aatttagaattctctctcaa

SEQ ID NO: 14833 - RNA, 20 nt, synthetic construct
  source 1..20: mol_type = other RNA
aatttagatctcatgttaag

SEQ ID NO: 14834 - RNA, 20 nt, synthetic construct
  source 1..20: mol_type = other RNA
aatttagatgagagtggcct

SEQ ID NO: 14835 - RNA, 20 nt, synthetic construct
  source 1..20: mol_type = other RNA
aatttagcgttcatccaaat

SEQ ID NO: 14836 - RNA, 20 nt, synthetic construct
  source 1..20: mol_type = other RNA
aatttagcttctgaattgag

SEQ ID NO: 14837 - RNA, 20 nt, synthetic construct
  source 1..20: mol_type = other RNA
aatttagtaagggtaaacag

SEQ ID NO: 14838 - RNA, 20 nt, synthetic construct
  source 1..20: mol_type = other RNA
aatttagtgtattgtacctt

SEQ ID NO: 14839 - RNA, 20 nt, synthetic construct
  source 1..20: mol_type = other RNA
aatttatatgatactcgtag

SEQ ID NO: 14840 - RNA, 20 nt, synthetic construct
  source 1..20: mol_type = other RNA
aatttatcagatcccaatta

SEQ ID NO: 14841 - RNA, 20 nt, synthetic construct
  source 1..20: mol_type = other RNA
aatttatctccataagtccc

SEQ ID NO: 14842 - RNA, 20 nt, synthetic construct
  source 1..20: mol_type = other RNA
aatttatctggatttttgtg

SEQ ID NO: 14843 - RNA, 20 nt, synthetic construct
  source 1..20: mol_type = other RNA
aatttatgtacatgacctat

SEQ ID NO: 14844 - RNA, 20 nt, synthetic construct
  source 1..20: mol_type = other RNA
aatttatgttcatgaacctt

SEQ ID NO: 14845 - RNA, 20 nt, synthetic construct
  source 1..20: mol_type = other RNA
aatttcacttgtttcttttc

SEQ ID NO: 14846 - RNA, 20 nt, synthetic construct
  source 1..20: mol_type = other RNA
aatttcagaaagagaatagc

SEQ ID NO: 14847 - RNA, 20 nt, synthetic construct
  source 1..20: mol_type = other RNA
aatttcagagagacctgaag

SEQ ID NO: 14848 - RNA, 20 nt, synthetic construct
  source 1..20: mol_type = other RNA
aatttcagatctctgacatt

SEQ ID NO: 14849 - RNA, 20 nt, synthetic construct
  source 1..20: mol_type = other RNA
aatttcagggagaattggta

SEQ ID NO: 14850 - RNA, 20 nt, synthetic construct
  source 1..20: mol_type = other RNA
aatttcaggtgtgtaaacac

SEQ ID NO: 14851 - RNA, 20 nt, synthetic construct
  source 1..20: mol_type = other RNA
aatttcatacaagttgtgat

SEQ ID NO: 14852 - RNA, 20 nt, synthetic construct
  source 1..20: mol_type = other RNA
aatttcatcgtaaaaagcca

SEQ ID NO: 14853 - RNA, 20 nt, synthetic construct
  source 1..20: mol_type = other RNA
aatttcatgcctttcagcat

SEQ ID NO: 14854 - RNA, 20 nt, synthetic construct
  source 1..20: mol_type = other RNA
aatttcattaggttgatggc

SEQ ID NO: 14855 - RNA, 20 nt, synthetic construct
  source 1..20: mol_type = other RNA
aatttcatttactgaaatcc

SEQ ID NO: 14856 - RNA, 20 nt, synthetic construct
  source 1..20: mol_type = other RNA
aatttccaagaaccctttgt

SEQ ID NO: 14857 - RNA, 20 nt, synthetic construct
  source 1..20: mol_type = other RNA
aatttccacccatgaagcca

SEQ ID NO: 14858 - RNA, 20 nt, synthetic construct
  source 1..20: mol_type = other RNA
aatttccagcattttatagg

SEQ ID NO: 14859 - RNA, 20 nt, synthetic construct
  source 1..20: mol_type = other RNA
aatttccaggtcattacata

SEQ ID NO: 14860 - RNA, 20 nt, synthetic construct
  source 1..20: mol_type = other RNA
aatttcccatttgatttctt

SEQ ID NO: 14861 - RNA, 20 nt, synthetic construct
  source 1..20: mol_type = other RNA
aatttccctcagaatttgag

SEQ ID NO: 14862 - RNA, 20 nt, synthetic construct
  source 1..20: mol_type = other RNA
aatttctaaaaacgtgcaaa

SEQ ID NO: 14863 - RNA, 20 nt, synthetic construct
  source 1..20: mol_type = other RNA
aatttctaaggttctgctat

SEQ ID NO: 14864 - RNA, 20 nt, synthetic construct
  source 1..20: mol_type = other RNA
aatttctatagtcattccgc

SEQ ID NO: 14865 - RNA, 20 nt, synthetic construct
  source 1..20: mol_type = other RNA
aatttctgagagtattgcca

SEQ ID NO: 14866 - RNA, 20 nt, synthetic construct
  source 1..20: mol_type = other RNA
aatttctgtccttggattgc

SEQ ID NO: 14867 - RNA, 20 nt, synthetic construct
  source 1..20: mol_type = other RNA
aatttctgttgcttaagtca

SEQ ID NO: 14868 - RNA, 20 nt, synthetic construct
  source 1..20: mol_type = other RNA
aatttctttaaaaccagagc

SEQ ID NO: 14869 - RNA, 20 nt, synthetic construct
  source 1..20: mol_type = other RNA
aatttctttggctgttagcc

SEQ ID NO: 14870 - RNA, 20 nt, synthetic construct
  source 1..20: mol_type = other RNA
aatttgacatgacaggtgag

SEQ ID NO: 14871 - RNA, 20 nt, synthetic construct
  source 1..20: mol_type = other RNA
aatttgaggcattagtgaat

SEQ ID NO: 14872 - RNA, 20 nt, synthetic construct
  source 1..20: mol_type = other RNA
aatttgaggccctattcaac

SEQ ID NO: 14873 - RNA, 20 nt, synthetic construct
  source 1..20: mol_type = other RNA
aatttgaggtagcacaacta

SEQ ID NO: 14874 - RNA, 20 nt, synthetic construct
  source 1..20: mol_type = other RNA
aatttgaggtctaggctaat

SEQ ID NO: 14875 - RNA, 20 nt, synthetic construct
  source 1..20: mol_type = other RNA
aatttgaggtcttctagctt

SEQ ID NO: 14876 - RNA, 20 nt, synthetic construct
  source 1..20: mol_type = other RNA
aatttgattgttagccacag

SEQ ID NO: 14877 - RNA, 20 nt, synthetic construct
  source 1..20: mol_type = other RNA
aatttgcaacagaataaatg

SEQ ID NO: 14878 - RNA, 20 nt, synthetic construct
  source 1..20: mol_type = other RNA
aatttgccaaaatgattttc

SEQ ID NO: 14879 - RNA, 20 nt, synthetic construct
  source 1..20: mol_type = other RNA
aatttgccacattttaccaa

SEQ ID NO: 14880 - RNA, 20 nt, synthetic construct
  source 1..20: mol_type = other RNA
aatttgcctattctggggct

SEQ ID NO: 14881 - RNA, 20 nt, synthetic construct
  source 1..20: mol_type = other RNA
aatttggaaagggtagagca

SEQ ID NO: 14882 - RNA, 20 nt, synthetic construct
  source 1..20: mol_type = other RNA
aatttggatgaacgctaaat

SEQ ID NO: 14883 - RNA, 20 nt, synthetic construct
  source 1..20: mol_type = other RNA
aatttggatttgagtaacta

SEQ ID NO: 14884 - RNA, 20 nt, synthetic construct
  source 1..20: mol_type = other RNA
aatttggcaaaaaatgcagt

SEQ ID NO: 14885 - RNA, 20 nt, synthetic construct
  source 1..20: mol_type = other RNA
aatttggcttggggaacagt

SEQ ID NO: 14886 - RNA, 20 nt, synthetic construct
  source 1..20: mol_type = other RNA
aatttgggatatagctacaa

SEQ ID NO: 14887 - RNA, 20 nt, synthetic construct
  source 1..20: mol_type = other RNA
aatttgggtttgagtttcca

SEQ ID NO: 14888 - RNA, 20 nt, synthetic construct
  source 1..20: mol_type = other RNA
aatttggtattcttatccct

SEQ ID NO: 14889 - RNA, 20 nt, synthetic construct
  source 1..20: mol_type = other RNA
aatttggttatgcgaattta

SEQ ID NO: 14890 - RNA, 20 nt, synthetic construct
  source 1..20: mol_type = other RNA
aatttgtcaacttttagtag

SEQ ID NO: 14891 - RNA, 20 nt, synthetic construct
  source 1..20: mol_type = other RNA
aatttgtccatctggattat

SEQ ID NO: 14892 - RNA, 20 nt, synthetic construct
  source 1..20: mol_type = other RNA
aatttgtgaaccttgaagta

SEQ ID NO: 14893 - RNA, 20 nt, synthetic construct
  source 1..20: mol_type = other RNA
aatttgttcaaaatacagtg

SEQ ID NO: 14894 - RNA, 20 nt, synthetic construct
  source 1..20: mol_type = other RNA
aatttgttttccaagcctta

SEQ ID NO: 14895 - RNA, 20 nt, synthetic construct
  source 1..20: mol_type = other RNA
aattttaaatcagcaccatc

SEQ ID NO: 14896 - RNA, 20 nt, synthetic construct
  source 1..20: mol_type = other RNA
aattttaagcctagagatta

SEQ ID NO: 14897 - RNA, 20 nt, synthetic construct
  source 1..20: mol_type = other RNA
aattttaagtgcacaatgca

SEQ ID NO: 14898 - RNA, 20 nt, synthetic construct
  source 1..20: mol_type = other RNA
aattttactgatcttttctg

SEQ ID NO: 14899 - RNA, 20 nt, synthetic construct
  source 1..20: mol_type = other RNA
aattttaggacaaggaaagg

SEQ ID NO: 14900 - RNA, 20 nt, synthetic construct
  source 1..20: mol_type = other RNA
aattttagtaattctccact

SEQ ID NO: 14901 - RNA, 20 nt, synthetic construct
  source 1..20: mol_type = other RNA
aattttatggttttttcccc

SEQ ID NO: 14902 - RNA, 20 nt, synthetic construct
  source 1..20: mol_type = other RNA
aattttcaagggtgttttcc

SEQ ID NO: 14903 - RNA, 20 nt, synthetic construct
  source 1..20: mol_type = other RNA
aattttcaggactcatgaga

SEQ ID NO: 14904 - RNA, 20 nt, synthetic construct
  source 1..20: mol_type = other RNA
aattttcatagcagcattgt

SEQ ID NO: 14905 - RNA, 20 nt, synthetic construct
  source 1..20: mol_type = other RNA
aattttcatgggttgatttt

SEQ ID NO: 14906 - RNA, 20 nt, synthetic construct
  source 1..20: mol_type = other RNA
aattttcattctacctggag

SEQ ID NO: 14907 - RNA, 20 nt, synthetic construct
  source 1..20: mol_type = other RNA
aattttccattcacacaccc

SEQ ID NO: 14908 - RNA, 20 nt, synthetic construct
  source 1..20: mol_type = other RNA
aattttccattcatgtaatg

SEQ ID NO: 14909 - RNA, 20 nt, synthetic construct
  source 1..20: mol_type = other RNA
aattttcccccaattaaact

SEQ ID NO: 14910 - RNA, 20 nt, synthetic construct
  source 1..20: mol_type = other RNA
aattttctaggaaccatatt

SEQ ID NO: 14911 - RNA, 20 nt, synthetic construct
  source 1..20: mol_type = other RNA
aattttctcccaaggttgcc

SEQ ID NO: 14912 - RNA, 20 nt, synthetic construct
  source 1..20: mol_type = other RNA
aattttctctcatgttgggt

SEQ ID NO: 14913 - RNA, 20 nt, synthetic construct
  source 1..20: mol_type = other RNA
aattttctgactctgtgctt

SEQ ID NO: 14914 - RNA, 20 nt, synthetic construct
  source 1..20: mol_type = other RNA
aattttctgagcaactacta

SEQ ID NO: 14915 - RNA, 20 nt, synthetic construct
  source 1..20: mol_type = other RNA
aattttcttaccctttactc

SEQ ID NO: 14916 - RNA, 20 nt, synthetic construct
  source 1..20: mol_type = other RNA
aattttcttttgtgggtaaa

SEQ ID NO: 14917 - RNA, 20 nt, synthetic construct
  source 1..20: mol_type = other RNA
aattttgaagaaagttttgc

SEQ ID NO: 14918 - RNA, 20 nt, synthetic construct
  source 1..20: mol_type = other RNA
aattttgagacctcaggcag

SEQ ID NO: 14919 - RNA, 20 nt, synthetic construct
  source 1..20: mol_type = other RNA
aattttgagagtgcagtatg

SEQ ID NO: 14920 - RNA, 20 nt, synthetic construct
  source 1..20: mol_type = other RNA
aattttgaggcttttggatt

SEQ ID NO: 14921 - RNA, 20 nt, synthetic construct
  source 1..20: mol_type = other RNA
aattttgcttaaagttggtc

SEQ ID NO: 14922 - RNA, 20 nt, synthetic construct
  source 1..20: mol_type = other RNA
aattttgcttttgctttggg

SEQ ID NO: 14923 - RNA, 20 nt, synthetic construct
  source 1..20: mol_type = other RNA
aattttggggccatctgaat

SEQ ID NO: 14924 - RNA, 20 nt, synthetic construct
  source 1..20: mol_type = other RNA
aattttgttcaggagttttg

SEQ ID NO: 14925 - RNA, 20 nt, synthetic construct
  source 1..20: mol_type = other RNA
aatttttaaaaagcagctac

SEQ ID NO: 14926 - RNA, 20 nt, synthetic construct
  source 1..20: mol_type = other RNA
aatttttaaaagagcgaaga

SEQ ID NO: 14927 - RNA, 20 nt, synthetic construct
  source 1..20: mol_type = other RNA
aatttttcacattcttcacc

SEQ ID NO: 14928 - RNA, 20 nt, synthetic construct
  source 1..20: mol_type = other RNA
aatttttcttacctaagcat

SEQ ID NO: 14929 - RNA, 20 nt, synthetic construct
  source 1..20: mol_type = other RNA
aatttttgagaaattgccaa

SEQ ID NO: 14930 - RNA, 20 nt, synthetic construct
  source 1..20: mol_type = other RNA
aatttttgcaaaccaaatgc

SEQ ID NO: 14931 - RNA, 20 nt, synthetic construct
  source 1..20: mol_type = other RNA
aatttttgtcaagtgactcc

SEQ ID NO: 14932 - RNA, 20 nt, synthetic construct
  source 1..20: mol_type = other RNA
aatttttgtctggaacacac

SEQ ID NO: 14933 - RNA, 20 nt, synthetic construct
  source 1..20: mol_type = other RNA
aattttttgagacggaatct

SEQ ID NO: 14934 - RNA, 20 nt, synthetic construct
  source 1..20: mol_type = other RNA
aattttttggcatacaactg

SEQ ID NO: 14935 - RNA, 20 nt, synthetic construct
  source 1..20: mol_type = other RNA
acaaaaaaccactggatacg

SEQ ID NO: 14936 - RNA, 20 nt, synthetic construct
  source 1..20: mol_type = other RNA
acaaaaaacgcggcacttgg

SEQ ID NO: 14937 - RNA, 20 nt, synthetic construct
  source 1..20: mol_type = other RNA
acaaaaaatcttaaagatgc

SEQ ID NO: 14938 - RNA, 20 nt, synthetic construct
  source 1..20: mol_type = other RNA
acaaaaacacactgagcttt

SEQ ID NO: 14939 - RNA, 20 nt, synthetic construct
  source 1..20: mol_type = other RNA
acaaaaagaaactagaaaag

SEQ ID NO: 14940 - RNA, 20 nt, synthetic construct
  source 1..20: mol_type = other RNA
acaaaaagatctgtggactt

SEQ ID NO: 14941 - RNA, 20 nt, synthetic construct
  source 1..20: mol_type = other RNA
acaaaaagcacctaccataa

SEQ ID NO: 14942 - RNA, 20 nt, synthetic construct
  source 1..20: mol_type = other RNA
acaaaaagtaggggtaaatc

SEQ ID NO: 14943 - RNA, 20 nt, synthetic construct
  source 1..20: mol_type = other RNA
acaaaaagtgataccataaa

SEQ ID NO: 14944 - RNA, 20 nt, synthetic construct
  source 1..20: mol_type = other RNA
acaaaaagtgtgaccacatt

SEQ ID NO: 14945 - RNA, 20 nt, synthetic construct
  source 1..20: mol_type = other RNA
acaaaaataatatgataccc

SEQ ID NO: 14946 - RNA, 20 nt, synthetic construct
  source 1..20: mol_type = other RNA
acaaaaatacgaaagtgctc

SEQ ID NO: 14947 - RNA, 20 nt, synthetic construct
  source 1..20: mol_type = other RNA
acaaaaatacttaagagcat

SEQ ID NO: 14948 - RNA, 20 nt, synthetic construct
  source 1..20: mol_type = other RNA
acaaaaatagaggatgggca

SEQ ID NO: 14949 - RNA, 20 nt, synthetic construct
  source 1..20: mol_type = other RNA
acaaaaatgacacaacttac

SEQ ID NO: 14950 - RNA, 20 nt, synthetic construct
  source 1..20: mol_type = other RNA
acaaaaattttcattctacc

SEQ ID NO: 14951 - RNA, 20 nt, synthetic construct
  source 1..20: mol_type = other RNA
acaaaacaaaaccctgttgg

SEQ ID NO: 14952 - RNA, 20 nt, synthetic construct
  source 1..20: mol_type = other RNA
acaaaacaaagtctttgggt

SEQ ID NO: 14953 - RNA, 20 nt, synthetic construct
  source 1..20: mol_type = other RNA
acaaaacaaatggaaccact

SEQ ID NO: 14954 - RNA, 20 nt, synthetic construct
  source 1..20: mol_type = other RNA
acaaaacaagaagaaaaagc

SEQ ID NO: 14955 - RNA, 20 nt, synthetic construct
  source 1..20: mol_type = other RNA
acaaaacaatctaattcgaa

SEQ ID NO: 14956 - RNA, 20 nt, synthetic construct
  source 1..20: mol_type = other RNA
acaaaacacacgggtacaca

SEQ ID NO: 14957 - RNA, 20 nt, synthetic construct
  source 1..20: mol_type = other RNA
acaaaacacatggcatcggg

SEQ ID NO: 14958 - RNA, 20 nt, synthetic construct
  source 1..20: mol_type = other RNA
acaaaacagggttattaaca

SEQ ID NO: 14959 - RNA, 20 nt, synthetic construct
  source 1..20: mol_type = other RNA
acaaaacatgttttcaaatg

SEQ ID NO: 14960 - RNA, 20 nt, synthetic construct
  source 1..20: mol_type = other RNA
acaaaaccctgttgggctat

SEQ ID NO: 14961 - RNA, 20 nt, synthetic construct
  source 1..20: mol_type = other RNA
acaaaactaggctgtcccaa

SEQ ID NO: 14962 - RNA, 20 nt, synthetic construct
  source 1..20: mol_type = other RNA
acaaaactgaactcaaaatg

SEQ ID NO: 14963 - RNA, 20 nt, synthetic construct
  source 1..20: mol_type = other RNA
acaaaactgggggctggaca

SEQ ID NO: 14964 - RNA, 20 nt, synthetic construct
  source 1..20: mol_type = other RNA
acaaaagaaaattttctgag

SEQ ID NO: 14965 - RNA, 20 nt, synthetic construct
  source 1..20: mol_type = other RNA
acaaaagaacaggacttttg

SEQ ID NO: 14966 - RNA, 20 nt, synthetic construct
  source 1..20: mol_type = other RNA
acaaaagagctgggcccgca

SEQ ID NO: 14967 - RNA, 20 nt, synthetic construct
  source 1..20: mol_type = other RNA
acaaaagagtagattccccc

SEQ ID NO: 14968 - RNA, 20 nt, synthetic construct
  source 1..20: mol_type = other RNA
acaaaagatacacaagatct

SEQ ID NO: 14969 - RNA, 20 nt, synthetic construct
  source 1..20: mol_type = other RNA
acaaaagatcatttcaaacc

SEQ ID NO: 14970 - RNA, 20 nt, synthetic construct
  source 1..20: mol_type = other RNA
acaaaaggaggaactaattg

SEQ ID NO: 14971 - RNA, 20 nt, synthetic construct
  source 1..20: mol_type = other RNA
acaaaaggccccttgaaaga

SEQ ID NO: 14972 - RNA, 20 nt, synthetic construct
  source 1..20: mol_type = other RNA
acaaaagggaaaacaattac

SEQ ID NO: 14973 - RNA, 20 nt, synthetic construct
  source 1..20: mol_type = other RNA
acaaaaggtagaagataatg

SEQ ID NO: 14974 - RNA, 20 nt, synthetic construct
  source 1..20: mol_type = other RNA
acaaaaggtttccagtggcc

SEQ ID NO: 14975 - RNA, 20 nt, synthetic construct
  source 1..20: mol_type = other RNA
acaaaagtgaaaactaaggt

SEQ ID NO: 14976 - RNA, 20 nt, synthetic construct
  source 1..20: mol_type = other RNA
acaaaagtgctgttgaggct

SEQ ID NO: 14977 - RNA, 20 nt, synthetic construct
  source 1..20: mol_type = other RNA
acaaaagtttaactttgatg

SEQ ID NO: 14978 - RNA, 20 nt, synthetic construct
  source 1..20: mol_type = other RNA
acaaaatacccacaagaaaa

SEQ ID NO: 14979 - RNA, 20 nt, synthetic construct
  source 1..20: mol_type = other RNA
acaaaatacctgggaatcca

SEQ ID NO: 14980 - RNA, 20 nt, synthetic construct
  source 1..20: mol_type = other RNA
acaaaataggattaagacac

SEQ ID NO: 14981 - RNA, 20 nt, synthetic construct
  source 1..20: mol_type = other RNA
acaaaataggcagtcctcta

SEQ ID NO: 14982 - RNA, 20 nt, synthetic construct
  source 1..20: mol_type = other RNA
acaaaatatattaaccactg

SEQ ID NO: 14983 - RNA, 20 nt, synthetic construct
  source 1..20: mol_type = other RNA
acaaaatatgtaatgacctg

SEQ ID NO: 14984 - RNA, 20 nt, synthetic construct
  source 1..20: mol_type = other RNA
acaaaatcagatatgaaaga

SEQ ID NO: 14985 - RNA, 20 nt, synthetic construct
  source 1..20: mol_type = other RNA
acaaaatgtggatgcatgag

SEQ ID NO: 14986 - RNA, 20 nt, synthetic construct
  source 1..20: mol_type = other RNA
acaaaatttttgcaaaccaa

SEQ ID NO: 14987 - RNA, 20 nt, synthetic construct
  source 1..20: mol_type = other RNA
acaaacaaacagaaaggccc

SEQ ID NO: 14988 - RNA, 20 nt, synthetic construct
  source 1..20: mol_type = other RNA
acaaacaaatccttttccca

SEQ ID NO: 14989 - RNA, 20 nt, synthetic construct
  source 1..20: mol_type = other RNA
acaaacaattagcaccttta

SEQ ID NO: 14990 - RNA, 20 nt, synthetic construct
  source 1..20: mol_type = other RNA
acaaacacaaaacaaatgga

SEQ ID NO: 14991 - RNA, 20 nt, synthetic construct
  source 1..20: mol_type = other RNA
acaaacacacaaaccaacaa

SEQ ID NO: 14992 - RNA, 20 nt, synthetic construct
  source 1..20: mol_type = other RNA
acaaacacactgggtaaaca

SEQ ID NO: 14993 - RNA, 20 nt, synthetic construct
  source 1..20: mol_type = other RNA
acaaacacttttcaaacact

SEQ ID NO: 14994 - RNA, 20 nt, synthetic construct
  source 1..20: mol_type = other RNA
acaaacagaaaggcccaaaa

SEQ ID NO: 14995 - RNA, 20 nt, synthetic construct
  source 1..20: mol_type = other RNA
acaaacatatgcatgttatt

SEQ ID NO: 14996 - RNA, 20 nt, synthetic construct
  source 1..20: mol_type = other RNA
acaaacatgaataaccaatg

SEQ ID NO: 14997 - RNA, 20 nt, synthetic construct
  source 1..20: mol_type = other RNA
acaaacattttttgcagaga

SEQ ID NO: 14998 - RNA, 20 nt, synthetic construct
  source 1..20: mol_type = other RNA
acaaaccaaaaaatgtggca

SEQ ID NO: 14999 - RNA, 20 nt, synthetic construct
  source 1..20: mol_type = other RNA
acaaaccaacaacaaaaaat

SEQ ID NO: 15000 - RNA, 20 nt, synthetic construct
  source 1..20: mol_type = other RNA
acaaacctggcaatactctc

SEQ ID NO: 15001 - RNA, 20 nt, synthetic construct
  source 1..20: mol_type = other RNA
acaaaccttcttatttcctt

SEQ ID NO: 15002 - RNA, 20 nt, synthetic construct
  source 1..20: mol_type = other RNA
acaaacgcattgtgatgtct

SEQ ID NO: 15003 - RNA, 20 nt, synthetic construct
  source 1..20: mol_type = other RNA
acaaactaactagaaaaccg

SEQ ID NO: 15004 - RNA, 20 nt, synthetic construct
  source 1..20: mol_type = other RNA
acaaactcaagttccggttc

SEQ ID NO: 15005 - RNA, 20 nt, synthetic construct
  source 1..20: mol_type = other RNA
acaaactccaaacctttaag

SEQ ID NO: 15006 - RNA, 20 nt, synthetic construct
  source 1..20: mol_type = other RNA
acaaactgcagaatgacaga

SEQ ID NO: 15007 - RNA, 20 nt, synthetic construct
  source 1..20: mol_type = other RNA
acaaactgcgtggtttattc

SEQ ID NO: 15008 - RNA, 20 nt, synthetic construct
  source 1..20: mol_type = other RNA
acaaagaacaggaagggaga

SEQ ID NO: 15009 - RNA, 20 nt, synthetic construct
  source 1..20: mol_type = other RNA
acaaagacaagttcttacct

SEQ ID NO: 15010 - RNA, 20 nt, synthetic construct
  source 1..20: mol_type = other RNA
acaaagagaacaatggaata

SEQ ID NO: 15011 - RNA, 20 nt, synthetic construct
  source 1..20: mol_type = other RNA
acaaagatgccacaaatgga

SEQ ID NO: 15012 - RNA, 20 nt, synthetic construct
  source 1..20: mol_type = other RNA
acaaagatttacccctactt

SEQ ID NO: 15013 - RNA, 20 nt, synthetic construct
  source 1..20: mol_type = other RNA
acaaagcataaaatatgtga

SEQ ID NO: 15014 - RNA, 20 nt, synthetic construct
  source 1..20: mol_type = other RNA
acaaagccctcaggaccagg

SEQ ID NO: 15015 - RNA, 20 nt, synthetic construct
  source 1..20: mol_type = other RNA
acaaagccttctctactctg

SEQ ID NO: 15016 - RNA, 20 nt, synthetic construct
  source 1..20: mol_type = other RNA
acaaagctctgatgctttct

SEQ ID NO: 15017 - RNA, 20 nt, synthetic construct
  source 1..20: mol_type = other RNA
acaaagctttaaactggatg

SEQ ID NO: 15018 - RNA, 20 nt, synthetic construct
  source 1..20: mol_type = other RNA
acaaaggactggaactcatt

SEQ ID NO: 15019 - RNA, 20 nt, synthetic construct
  source 1..20: mol_type = other RNA
acaaaggattgggaagattg

SEQ ID NO: 15020 - RNA, 20 nt, synthetic construct
  source 1..20: mol_type = other RNA
acaaaggcaggagcagtgtg

SEQ ID NO: 15021 - RNA, 20 nt, synthetic construct
  source 1..20: mol_type = other RNA
acaaaggcgaagcccgccgc

SEQ ID NO: 15022 - RNA, 20 nt, synthetic construct
  source 1..20: mol_type = other RNA
acaaagggcctgttccaggc

SEQ ID NO: 15023 - RNA, 20 nt, synthetic construct
  source 1..20: mol_type = other RNA
acaaagggttcttggaaatt

SEQ ID NO: 15024 - RNA, 20 nt, synthetic construct
  source 1..20: mol_type = other RNA
acaaaggtgttaagccgttc

SEQ ID NO: 15025 - RNA, 20 nt, synthetic construct
  source 1..20: mol_type = other RNA
acaaaggttgaaaactcaac

SEQ ID NO: 15026 - RNA, 20 nt, synthetic construct
  source 1..20: mol_type = other RNA
acaaaggttgcagtgagcag

SEQ ID NO: 15027 - RNA, 20 nt, synthetic construct
  source 1..20: mol_type = other RNA
acaaagtatatatcatagag

SEQ ID NO: 15028 - RNA, 20 nt, synthetic construct
  source 1..20: mol_type = other RNA
acaaagtatgagaaatgtct

SEQ ID NO: 15029 - RNA, 20 nt, synthetic construct
  source 1..20: mol_type = other RNA
acaaagtccccacatgactg

SEQ ID NO: 15030 - RNA, 20 nt, synthetic construct
  source 1..20: mol_type = other RNA
acaaagtctttgggtaattt

SEQ ID NO: 15031 - RNA, 20 nt, synthetic construct
  source 1..20: mol_type = other RNA
acaaataaaagcttatgatc

SEQ ID NO: 15032 - RNA, 20 nt, synthetic construct
  source 1..20: mol_type = other RNA
acaaataacaccatagctga

SEQ ID NO: 15033 - RNA, 20 nt, synthetic construct
  source 1..20: mol_type = other RNA
acaaataacagttcttaagt

SEQ ID NO: 15034 - RNA, 20 nt, synthetic construct
  source 1..20: mol_type = other RNA
acaaataactccagctttta

SEQ ID NO: 15035 - RNA, 20 nt, synthetic construct
  source 1..20: mol_type = other RNA
acaaataagaagattgagtc

SEQ ID NO: 15036 - RNA, 20 nt, synthetic construct
  source 1..20: mol_type = other RNA
acaaatcagatttcaggtgg

SEQ ID NO: 15037 - RNA, 20 nt, synthetic construct
  source 1..20: mol_type = other RNA
acaaatccttttcccaggag

SEQ ID NO: 15038 - RNA, 20 nt, synthetic construct
  source 1..20: mol_type = other RNA
acaaatgaaagtcagctaat

SEQ ID NO: 15039 - RNA, 20 nt, synthetic construct
  source 1..20: mol_type = other RNA
acaaatgatgaagggttttc

SEQ ID NO: 15040 - RNA, 20 nt, synthetic construct
  source 1..20: mol_type = other RNA
acaaatggaaccactgtagg

SEQ ID NO: 15041 - RNA, 20 nt, synthetic construct
  source 1..20: mol_type = other RNA
acaaatggagtgacttaagc

SEQ ID NO: 15042 - RNA, 20 nt, synthetic construct
  source 1..20: mol_type = other RNA
acaaatgttgcagagactgg

SEQ ID NO: 15043 - RNA, 20 nt, synthetic construct
  source 1..20: mol_type = other RNA
acaaattaccatgtttccat

SEQ ID NO: 15044 - RNA, 20 nt, synthetic construct
  source 1..20: mol_type = other RNA
acaaattatgactgagatac

SEQ ID NO: 15045 - RNA, 20 nt, synthetic construct
  source 1..20: mol_type = other RNA
acaaattcatgcaactgaaa

SEQ ID NO: 15046 - RNA, 20 nt, synthetic construct
  source 1..20: mol_type = other RNA
acaaattccctctacaaaag

SEQ ID NO: 15047 - RNA, 20 nt, synthetic construct
  source 1..20: mol_type = other RNA
acaaattgcatcaactgctt

SEQ ID NO: 15048 - RNA, 20 nt, synthetic construct
  source 1..20: mol_type = other RNA
acaaatttatgttcatgaac

SEQ ID NO: 15049 - RNA, 20 nt, synthetic construct
  source 1..20: mol_type = other RNA
acaaatttctatagtcattc

SEQ ID NO: 15050 - RNA, 20 nt, synthetic construct
  source 1..20: mol_type = other RNA
acaacaaaacacacgggtac

SEQ ID NO: 15051 - RNA, 20 nt, synthetic construct
  source 1..20: mol_type = other RNA
acaacaaaacatgttttcaa

SEQ ID NO: 15052 - RNA, 20 nt, synthetic construct
  source 1..20: mol_type = other RNA
acaacaaaatacccacaaga

SEQ ID NO: 15053 - RNA, 20 nt, synthetic construct
  source 1..20: mol_type = other RNA
acaacaacaaaacacacggg

SEQ ID NO: 15054 - RNA, 20 nt, synthetic construct
  source 1..20: mol_type = other RNA
acaacaacaaaacatgtttt

SEQ ID NO: 15055 - RNA, 20 nt, synthetic construct
  source 1..20: mol_type = other RNA
acaacaacaaaatacccaca

SEQ ID NO: 15056 - RNA, 20 nt, synthetic construct
  source 1..20: mol_type = other RNA
acaacaacaacaaaacacac

SEQ ID NO: 15057 - RNA, 20 nt, synthetic construct
  source 1..20: mol_type = other RNA
acaacaacaacaaaacatgt

SEQ ID NO: 15058 - RNA, 20 nt, synthetic construct
  source 1..20: mol_type = other RNA
acaacaacaacaaaataccc

SEQ ID NO: 15059 - RNA, 20 nt, synthetic construct
  source 1..20: mol_type = other RNA
acaacaacaacaacaaaaca

SEQ ID NO: 15060 - RNA, 20 nt, synthetic construct
  source 1..20: mol_type = other RNA
acaacaatgaattctcatat

SEQ ID NO: 15061 - RNA, 20 nt, synthetic construct
  source 1..20: mol_type = other RNA
acaacacatgcacactagac

SEQ ID NO: 15062 - RNA, 20 nt, synthetic construct
  source 1..20: mol_type = other RNA
acaacacattaataagatca

SEQ ID NO: 15063 - RNA, 20 nt, synthetic construct
  source 1..20: mol_type = other RNA
acaacactaaccaacattga

SEQ ID NO: 15064 - RNA, 20 nt, synthetic construct
  source 1..20: mol_type = other RNA
acaacactcagatatcaatc

SEQ ID NO: 15065 - RNA, 20 nt, synthetic construct
  source 1..20: mol_type = other RNA
acaacagcaaggctcctgca

SEQ ID NO: 15066 - RNA, 20 nt, synthetic construct
  source 1..20: mol_type = other RNA
acaacagcaccttttttggt

SEQ ID NO: 15067 - RNA, 20 nt, synthetic construct
  source 1..20: mol_type = other RNA
acaacaggcctgagccgtcg

SEQ ID NO: 15068 - RNA, 20 nt, synthetic construct
  source 1..20: mol_type = other RNA
acaacagtgtgagaccgtgt

SEQ ID NO: 15069 - RNA, 20 nt, synthetic construct
  source 1..20: mol_type = other RNA
acaacataccaaaacccttg

SEQ ID NO: 15070 - RNA, 20 nt, synthetic construct
  source 1..20: mol_type = other RNA
acaacatggtagaccatata

SEQ ID NO: 15071 - RNA, 20 nt, synthetic construct
  source 1..20: mol_type = other RNA
acaacatgttttatttctgt

SEQ ID NO: 15072 - RNA, 20 nt, synthetic construct
  source 1..20: mol_type = other RNA
acaacattcatccctctaaa

SEQ ID NO: 15073 - RNA, 20 nt, synthetic construct
  source 1..20: mol_type = other RNA
acaacattgtgcaaccatcc

SEQ ID NO: 15074 - RNA, 20 nt, synthetic construct
  source 1..20: mol_type = other RNA
acaaccactgatggaattct

SEQ ID NO: 15075 - RNA, 20 nt, synthetic construct
  source 1..20: mol_type = other RNA
acaaccactggggagtgtgc

SEQ ID NO: 15076 - RNA, 20 nt, synthetic construct
  source 1..20: mol_type = other RNA
acaaccataatgagtaacat

SEQ ID NO: 15077 - RNA, 20 nt, synthetic construct
  source 1..20: mol_type = other RNA
acaaccggaaaatgcttaac

SEQ ID NO: 15078 - RNA, 20 nt, synthetic construct
  source 1..20: mol_type = other RNA
acaacctaaatgtccatcga

SEQ ID NO: 15079 - RNA, 20 nt, synthetic construct
  source 1..20: mol_type = other RNA
acaacctgtctcaaaaataa

SEQ ID NO: 15080 - RNA, 20 nt, synthetic construct
  source 1..20: mol_type = other RNA
acaacgatttcttaaaaatg

SEQ ID NO: 15081 - RNA, 20 nt, synthetic construct
  source 1..20: mol_type = other RNA
acaacgctgtggctaacaat

SEQ ID NO: 15082 - RNA, 20 nt, synthetic construct
  source 1..20: mol_type = other RNA
acaactaataattgcttttg

SEQ ID NO: 15083 - RNA, 20 nt, synthetic construct
  source 1..20: mol_type = other RNA
acaactagtaagtaaaatcg

SEQ ID NO: 15084 - RNA, 20 nt, synthetic construct
  source 1..20: mol_type = other RNA
acaactcaaacgtccatcaa

SEQ ID NO: 15085 - RNA, 20 nt, synthetic construct
  source 1..20: mol_type = other RNA
acaactctaataacagccta

SEQ ID NO: 15086 - RNA, 20 nt, synthetic construct
  source 1..20: mol_type = other RNA
acaactctgaccattgtgtg

SEQ ID NO: 15087 - RNA, 20 nt, synthetic construct
  source 1..20: mol_type = other RNA
acaactgactctaaagtcta

SEQ ID NO: 15088 - RNA, 20 nt, synthetic construct
  source 1..20: mol_type = other RNA
acaactgctcataatagtct

SEQ ID NO: 15089 - RNA, 20 nt, synthetic construct
  source 1..20: mol_type = other RNA
acaactgggagaatggcaag

SEQ ID NO: 15090 - RNA, 20 nt, synthetic construct
  source 1..20: mol_type = other RNA
acaactggtttctgcatact

SEQ ID NO: 15091 - RNA, 20 nt, synthetic construct
  source 1..20: mol_type = other RNA
acaacttgtatgaaattagt

SEQ ID NO: 15092 - RNA, 20 nt, synthetic construct
  source 1..20: mol_type = other RNA
acaagaaaaacctaaacctg

SEQ ID NO: 15093 - RNA, 20 nt, synthetic construct
  source 1..20: mol_type = other RNA
acaagaaaatctgacaattt

SEQ ID NO: 15094 - RNA, 20 nt, synthetic construct
  source 1..20: mol_type = other RNA
acaagaaagggtagctttga

SEQ ID NO: 15095 - RNA, 20 nt, synthetic construct
  source 1..20: mol_type = other RNA
acaagaagaaaaagcaactt

SEQ ID NO: 15096 - RNA, 20 nt, synthetic construct
  source 1..20: mol_type = other RNA
acaagaagctgttttggtaa

SEQ ID NO: 15097 - RNA, 20 nt, synthetic construct
  source 1..20: mol_type = other RNA
acaagaatcctgctatttta

SEQ ID NO: 15098 - RNA, 20 nt, synthetic construct
  source 1..20: mol_type = other RNA
acaagaatctttggcaaact

SEQ ID NO: 15099 - RNA, 20 nt, synthetic construct
  source 1..20: mol_type = other RNA
acaagacagatgtgcttaat

SEQ ID NO: 15100 - RNA, 20 nt, synthetic construct
  source 1..20: mol_type = other RNA
acaagacataagcattttct

SEQ ID NO: 15101 - RNA, 20 nt, synthetic construct
  source 1..20: mol_type = other RNA
acaagacgtgtacataaaat

SEQ ID NO: 15102 - RNA, 20 nt, synthetic construct
  source 1..20: mol_type = other RNA
acaagactaaaaaattagac

SEQ ID NO: 15103 - RNA, 20 nt, synthetic construct
  source 1..20: mol_type = other RNA
acaagactacctaaaacaat

SEQ ID NO: 15104 - RNA, 20 nt, synthetic construct
  source 1..20: mol_type = other RNA
acaagactcaacatgtgtat

SEQ ID NO: 15105 - RNA, 20 nt, synthetic construct
  source 1..20: mol_type = other RNA
acaagagaggacagttggcc

SEQ ID NO: 15106 - RNA, 20 nt, synthetic construct
  source 1..20: mol_type = other RNA
acaagagcagaactccacct

SEQ ID NO: 15107 - RNA, 20 nt, synthetic construct
  source 1..20: mol_type = other RNA
acaagagcgtcgtacctttc

SEQ ID NO: 15108 - RNA, 20 nt, synthetic construct
  source 1..20: mol_type = other RNA
acaagagtctgcagaccaag

SEQ ID NO: 15109 - RNA, 20 nt, synthetic construct
  source 1..20: mol_type = other RNA
acaagagttcccctatactg

SEQ ID NO: 15110 - RNA, 20 nt, synthetic construct
  source 1..20: mol_type = other RNA
acaagatctctatgcagaaa

SEQ ID NO: 15111 - RNA, 20 nt, synthetic construct
  source 1..20: mol_type = other RNA
acaagattaatcttgcaaaa

SEQ ID NO: 15112 - RNA, 20 nt, synthetic construct
  source 1..20: mol_type = other RNA
acaagcaaggaagggcttga

SEQ ID NO: 15113 - RNA, 20 nt, synthetic construct
  source 1..20: mol_type = other RNA
acaagcacagagtcagaaaa

SEQ ID NO: 15114 - RNA, 20 nt, synthetic construct
  source 1..20: mol_type = other RNA
acaagcacaggcatctctct

SEQ ID NO: 15115 - RNA, 20 nt, synthetic construct
  source 1..20: mol_type = other RNA
acaagccacatgtggttatt

SEQ ID NO: 15116 - RNA, 20 nt, synthetic construct
  source 1..20: mol_type = other RNA
acaagccagggtctgtctca

SEQ ID NO: 15117 - RNA, 20 nt, synthetic construct
  source 1..20: mol_type = other RNA
acaagccttgaaaatatact

SEQ ID NO: 15118 - RNA, 20 nt, synthetic construct
  source 1..20: mol_type = other RNA
acaaggaaaggatggtttga

SEQ ID NO: 15119 - RNA, 20 nt, synthetic construct
  source 1..20: mol_type = other RNA
acaaggaaggtcaaatggta

SEQ ID NO: 15120 - RNA, 20 nt, synthetic construct
  source 1..20: mol_type = other RNA
acaaggacaggtcacattct

SEQ ID NO: 15121 - RNA, 20 nt, synthetic construct
  source 1..20: mol_type = other RNA
acaaggactggcttcagtgc

SEQ ID NO: 15122 - RNA, 20 nt, synthetic construct
  source 1..20: mol_type = other RNA
acaaggagacctactaaaag

SEQ ID NO: 15123 - RNA, 20 nt, synthetic construct
  source 1..20: mol_type = other RNA
acaaggattaatctttctga

SEQ ID NO: 15124 - RNA, 20 nt, synthetic construct
  source 1..20: mol_type = other RNA
acaaggattgaatggaaaga

SEQ ID NO: 15125 - RNA, 20 nt, synthetic construct
  source 1..20: mol_type = other RNA
acaaggctagagctcacacg

SEQ ID NO: 15126 - RNA, 20 nt, synthetic construct
  source 1..20: mol_type = other RNA
acaagggaagaggccacaaa

SEQ ID NO: 15127 - RNA, 20 nt, synthetic construct
  source 1..20: mol_type = other RNA
acaagggtgacagagccgag

SEQ ID NO: 15128 - RNA, 20 nt, synthetic construct
  source 1..20: mol_type = other RNA
acaagggttggtgcttcctt

SEQ ID NO: 15129 - RNA, 20 nt, synthetic construct
  source 1..20: mol_type = other RNA
acaaggtcaagagcggcctt

SEQ ID NO: 15130 - RNA, 20 nt, synthetic construct
  source 1..20: mol_type = other RNA
acaaggtcaatctgaaaaat

SEQ ID NO: 15131 - RNA, 20 nt, synthetic construct
  source 1..20: mol_type = other RNA
acaaggtcagaagtttggaa

SEQ ID NO: 15132 - RNA, 20 nt, synthetic construct
  source 1..20: mol_type = other RNA
acaagtaaatgcaatgcagg

SEQ ID NO: 15133 - RNA, 20 nt, synthetic construct
  source 1..20: mol_type = other RNA
acaagtacatgaaatactca

SEQ ID NO: 15134 - RNA, 20 nt, synthetic construct
  source 1..20: mol_type = other RNA
acaagtactgcatgattccc

SEQ ID NO: 15135 - RNA, 20 nt, synthetic construct
  source 1..20: mol_type = other RNA
acaagtagcagggactacag

SEQ ID NO: 15136 - RNA, 20 nt, synthetic construct
  source 1..20: mol_type = other RNA
acaagtagtacaaaagtgct

SEQ ID NO: 15137 - RNA, 20 nt, synthetic construct
  source 1..20: mol_type = other RNA
acaagtattaacgaattctt

SEQ ID NO: 15138 - RNA, 20 nt, synthetic construct
  source 1..20: mol_type = other RNA
acaagtcacaaaaagacaag

SEQ ID NO: 15139 - RNA, 20 nt, synthetic construct
  source 1..20: mol_type = other RNA
acaagtgggtggatgggtgt

SEQ ID NO: 15140 - RNA, 20 nt, synthetic construct
  source 1..20: mol_type = other RNA
acaagtgtttcatttacaaa

SEQ ID NO: 15141 - RNA, 20 nt, synthetic construct
  source 1..20: mol_type = other RNA
acaagttacaaacatatgca

SEQ ID NO: 15142 - RNA, 20 nt, synthetic construct
  source 1..20: mol_type = other RNA
acaagttcagcatcttcact

SEQ ID NO: 15143 - RNA, 20 nt, synthetic construct
  source 1..20: mol_type = other RNA
acaagttctcctgtgtgcat

SEQ ID NO: 15144 - RNA, 20 nt, synthetic construct
  source 1..20: mol_type = other RNA
acaagttcttacctcaaagg

SEQ ID NO: 15145 - RNA, 20 nt, synthetic construct
  source 1..20: mol_type = other RNA
acaagttgtgatatattatg

SEQ ID NO: 15146 - RNA, 20 nt, synthetic construct
  source 1..20: mol_type = other RNA
acaagttttaacttaagaac

SEQ ID NO: 15147 - RNA, 20 nt, synthetic construct
  source 1..20: mol_type = other RNA
acaataaatggtgcaggcca

SEQ ID NO: 15148 - RNA, 20 nt, synthetic construct
  source 1..20: mol_type = other RNA
acaataaatttctgttgctt

SEQ ID NO: 15149 - RNA, 20 nt, synthetic construct
  source 1..20: mol_type = other RNA
acaataagacaccgctccac

SEQ ID NO: 15150 - RNA, 20 nt, synthetic construct
  source 1..20: mol_type = other RNA
acaataataactacacatca

SEQ ID NO: 15151 - RNA, 20 nt, synthetic construct
  source 1..20: mol_type = other RNA
acaataatatgcctcatgca

SEQ ID NO: 15152 - RNA, 20 nt, synthetic construct
  source 1..20: mol_type = other RNA
acaataatgcacatgggcat

SEQ ID NO: 15153 - RNA, 20 nt, synthetic construct
  source 1..20: mol_type = other RNA
acaataattcttcctgtctt

SEQ ID NO: 15154 - RNA, 20 nt, synthetic construct
  source 1..20: mol_type = other RNA
acaatactgcattgtgcact

SEQ ID NO: 15155 - RNA, 20 nt, synthetic construct
  source 1..20: mol_type = other RNA
acaatactgtctcagtccca

SEQ ID NO: 15156 - RNA, 20 nt, synthetic construct
  source 1..20: mol_type = other RNA
acaatactgttatgacaaga

SEQ ID NO: 15157 - RNA, 20 nt, synthetic construct
  source 1..20: mol_type = other RNA
acaatacttggatcttatct

SEQ ID NO: 15158 - RNA, 20 nt, synthetic construct
  source 1..20: mol_type = other RNA
acaatactttagacatgggc

SEQ ID NO: 15159 - RNA, 20 nt, synthetic construct
  source 1..20: mol_type = other RNA
acaatagcaacaaaacaatc

SEQ ID NO: 15160 - RNA, 20 nt, synthetic construct
  source 1..20: mol_type = other RNA
acaatagcccagcaggattt

SEQ ID NO: 15161 - RNA, 20 nt, synthetic construct
  source 1..20: mol_type = other RNA
acaatagctagtgtcttagt

SEQ ID NO: 15162 - RNA, 20 nt, synthetic construct
  source 1..20: mol_type = other RNA
acaataggaatagtattcag

SEQ ID NO: 15163 - RNA, 20 nt, synthetic construct
  source 1..20: mol_type = other RNA
acaatagtttagttactcaa

SEQ ID NO: 15164 - RNA, 20 nt, synthetic construct
  source 1..20: mol_type = other RNA
acaatataggagactatcgt

SEQ ID NO: 15165 - RNA, 20 nt, synthetic construct
  source 1..20: mol_type = other RNA
acaatattacagtaaggttt

SEQ ID NO: 15166 - RNA, 20 nt, synthetic construct
  source 1..20: mol_type = other RNA
acaatcaaaccatcctttcc

SEQ ID NO: 15167 - RNA, 20 nt, synthetic construct
  source 1..20: mol_type = other RNA
acaatcaaatttaacacaca

SEQ ID NO: 15168 - RNA, 20 nt, synthetic construct
  source 1..20: mol_type = other RNA
acaatcaacaggtagctgct

SEQ ID NO: 15169 - RNA, 20 nt, synthetic construct
  source 1..20: mol_type = other RNA
acaatcatagctcactagag

SEQ ID NO: 15170 - RNA, 20 nt, synthetic construct
  source 1..20: mol_type = other RNA
acaatccaagtttctagcca

SEQ ID NO: 15171 - RNA, 20 nt, synthetic construct
  source 1..20: mol_type = other RNA
acaatccttctaatcagtaa

SEQ ID NO: 15172 - RNA, 20 nt, synthetic construct
  source 1..20: mol_type = other RNA
acaatcgcaatccaaaatcc

SEQ ID NO: 15173 - RNA, 20 nt, synthetic construct
  source 1..20: mol_type = other RNA
acaatctaattcgaaaatgg

SEQ ID NO: 15174 - RNA, 20 nt, synthetic construct
  source 1..20: mol_type = other RNA
acaatctacagattcaatgc

SEQ ID NO: 15175 - RNA, 20 nt, synthetic construct
  source 1..20: mol_type = other RNA
acaatctctggggttagggc

SEQ ID NO: 15176 - RNA, 20 nt, synthetic construct
  source 1..20: mol_type = other RNA
acaatcttacccccatcaca

SEQ ID NO: 15177 - RNA, 20 nt, synthetic construct
  source 1..20: mol_type = other RNA
acaatcttgaaaggggccag

SEQ ID NO: 15178 - RNA, 20 nt, synthetic construct
  source 1..20: mol_type = other RNA
acaatcttgagacggaagac

SEQ ID NO: 15179 - RNA, 20 nt, synthetic construct
  source 1..20: mol_type = other RNA
acaatgaatatgtactacct

SEQ ID NO: 15180 - RNA, 20 nt, synthetic construct
  source 1..20: mol_type = other RNA
acaatgaattagcaatgcga

SEQ ID NO: 15181 - RNA, 20 nt, synthetic construct
  source 1..20: mol_type = other RNA
acaatgagacatttgagggt

SEQ ID NO: 15182 - RNA, 20 nt, synthetic construct
  source 1..20: mol_type = other RNA
acaatgcagtattgttaact

SEQ ID NO: 15183 - RNA, 20 nt, synthetic construct
  source 1..20: mol_type = other RNA
acaatgccagggcgctcctc

SEQ ID NO: 15184 - RNA, 20 nt, synthetic construct
  source 1..20: mol_type = other RNA
acaatgcctgccgcagagca

SEQ ID NO: 15185 - RNA, 20 nt, synthetic construct
  source 1..20: mol_type = other RNA
acaatgcgtttgttagatct

SEQ ID NO: 15186 - RNA, 20 nt, synthetic construct
  source 1..20: mol_type = other RNA
acaatgctgctatgaaaatt

SEQ ID NO: 15187 - RNA, 20 nt, synthetic construct
  source 1..20: mol_type = other RNA
acaatggaaatgaagtattg

SEQ ID NO: 15188 - RNA, 20 nt, synthetic construct
  source 1..20: mol_type = other RNA
acaatggaatagaagggaga

SEQ ID NO: 15189 - RNA, 20 nt, synthetic construct
  source 1..20: mol_type = other RNA
acaatggaatattactcagt

SEQ ID NO: 15190 - RNA, 20 nt, synthetic construct
  source 1..20: mol_type = other RNA
acaatggggctttactgtat

SEQ ID NO: 15191 - RNA, 20 nt, synthetic construct
  source 1..20: mol_type = other RNA
acaatggtcagagttgtatc

SEQ ID NO: 15192 - RNA, 20 nt, synthetic construct
  source 1..20: mol_type = other RNA
acaatggttcataatatatc

SEQ ID NO: 15193 - RNA, 20 nt, synthetic construct
  source 1..20: mol_type = other RNA
acaatgtaaggtgcacgctg

SEQ ID NO: 15194 - RNA, 20 nt, synthetic construct
  source 1..20: mol_type = other RNA
acaatgtctttggctcttag

SEQ ID NO: 15195 - RNA, 20 nt, synthetic construct
  source 1..20: mol_type = other RNA
acaatgtgagccacatacat

SEQ ID NO: 15196 - RNA, 20 nt, synthetic construct
  source 1..20: mol_type = other RNA
acaatgtggagttggtgcaa

SEQ ID NO: 15197 - RNA, 20 nt, synthetic construct
  source 1..20: mol_type = other RNA
acaatgttgtggatgtcctt

SEQ ID NO: 15198 - RNA, 20 nt, synthetic construct
  source 1..20: mol_type = other RNA
acaattacacatctcccata

SEQ ID NO: 15199 - RNA, 20 nt, synthetic construct
  source 1..20: mol_type = other RNA
acaattactgtacaaagatt

SEQ ID NO: 15200 - RNA, 20 nt, synthetic construct
  source 1..20: mol_type = other RNA
acaattacttcatagatgtt

SEQ ID NO: 15201 - RNA, 20 nt, synthetic construct
  source 1..20: mol_type = other RNA
acaattacttgagagcagag

SEQ ID NO: 15202 - RNA, 20 nt, synthetic construct
  source 1..20: mol_type = other RNA
acaattagcacctttattaa

SEQ ID NO: 15203 - RNA, 20 nt, synthetic construct
  source 1..20: mol_type = other RNA
acaattaggctgtttgagat

SEQ ID NO: 15204 - RNA, 20 nt, synthetic construct
  source 1..20: mol_type = other RNA
acaattcaacaatagcaaca

SEQ ID NO: 15205 - RNA, 20 nt, synthetic construct
  source 1..20: mol_type = other RNA
acaattcaacagctactatg

SEQ ID NO: 15206 - RNA, 20 nt, synthetic construct
  source 1..20: mol_type = other RNA
acaattcacagaatatactc

SEQ ID NO: 15207 - RNA, 20 nt, synthetic construct
  source 1..20: mol_type = other RNA
acaattcctttctaggcatc

SEQ ID NO: 15208 - RNA, 20 nt, synthetic construct
  source 1..20: mol_type = other RNA
acaattcggtggcattaagg

SEQ ID NO: 15209 - RNA, 20 nt, synthetic construct
  source 1..20: mol_type = other RNA
acaattgaatggggatgcaa

SEQ ID NO: 15210 - RNA, 20 nt, synthetic construct
  source 1..20: mol_type = other RNA
acaattgataccatgaaaat

SEQ ID NO: 15211 - RNA, 20 nt, synthetic construct
  source 1..20: mol_type = other RNA
acaattgcactccagcctag

SEQ ID NO: 15212 - RNA, 20 nt, synthetic construct
  source 1..20: mol_type = other RNA
acaattggtgaatctgagta

SEQ ID NO: 15213 - RNA, 20 nt, synthetic construct
  source 1..20: mol_type = other RNA
acaatttcagggagaattgg

SEQ ID NO: 15214 - RNA, 20 nt, synthetic construct
  source 1..20: mol_type = other RNA
acaatttgaggtagcacaac

SEQ ID NO: 15215 - RNA, 20 nt, synthetic construct
  source 1..20: mol_type = other RNA
acaatttgccaaaatgattt

SEQ ID NO: 15216 - RNA, 20 nt, synthetic construct
  source 1..20: mol_type = other RNA
acaattttctctcatgttgg

SEQ ID NO: 15217 - RNA, 20 nt, synthetic construct
  source 1..20: mol_type = other RNA
acaattttcttaccctttac

SEQ ID NO: 15218 - RNA, 20 nt, synthetic construct
  source 1..20: mol_type = other RNA
acaattttgaatgtgttgat

SEQ ID NO: 15219 - RNA, 20 nt, synthetic construct
  source 1..20: mol_type = other RNA
acacaaaaagatctgtggac

SEQ ID NO: 15220 - RNA, 20 nt, synthetic construct
  source 1..20: mol_type = other RNA
acacaaaaatccagataaat

SEQ ID NO: 15221 - RNA, 20 nt, synthetic construct
  source 1..20: mol_type = other RNA
acacaaaacaaatggaacca

SEQ ID NO: 15222 - RNA, 20 nt, synthetic construct
  source 1..20: mol_type = other RNA
acacaaaagagctgggcccg

SEQ ID NO: 15223 - RNA, 20 nt, synthetic construct
  source 1..20: mol_type = other RNA
acacaaaatcagatatgaaa

SEQ ID NO: 15224 - RNA, 20 nt, synthetic construct
  source 1..20: mol_type = other RNA
acacaaaccaacaacaaaaa

SEQ ID NO: 15225 - RNA, 20 nt, synthetic construct
  source 1..20: mol_type = other RNA
acacaaactgcagaatgaca

SEQ ID NO: 15226 - RNA, 20 nt, synthetic construct
  source 1..20: mol_type = other RNA
acacaaagccttctctactc

SEQ ID NO: 15227 - RNA, 20 nt, synthetic construct
  source 1..20: mol_type = other RNA
acacaaaggactggaactca

SEQ ID NO: 15228 - RNA, 20 nt, synthetic construct
  source 1..20: mol_type = other RNA
acacaaattatgactgagat

SEQ ID NO: 15229 - RNA, 20 nt, synthetic construct
  source 1..20: mol_type = other RNA
acacaacaatgaattctcat

SEQ ID NO: 15230 - RNA, 20 nt, synthetic construct
  source 1..20: mol_type = other RNA
acacaacactcagatatcaa

SEQ ID NO: 15231 - RNA, 20 nt, synthetic construct
  source 1..20: mol_type = other RNA
acacaacataccaaaaccct

SEQ ID NO: 15232 - RNA, 20 nt, synthetic construct
  source 1..20: mol_type = other RNA
acacaacatgttttatttct

SEQ ID NO: 15233 - RNA, 20 nt, synthetic construct
  source 1..20: mol_type = other RNA
acacaacttactactaaaaa

SEQ ID NO: 15234 - RNA, 20 nt, synthetic construct
  source 1..20: mol_type = other RNA
acacaagatctctatgcaga

SEQ ID NO: 15235 - RNA, 20 nt, synthetic construct
  source 1..20: mol_type = other RNA
acacaaggaaggtcaaatgg

SEQ ID NO: 15236 - RNA, 20 nt, synthetic construct
  source 1..20: mol_type = other RNA
acacaaggacaggtcacatt

SEQ ID NO: 15237 - RNA, 20 nt, synthetic construct
  source 1..20: mol_type = other RNA
acacaagtattaacgaattc

SEQ ID NO: 15238 - RNA, 20 nt, synthetic construct
  source 1..20: mol_type = other RNA
acacaagtgtttcatttaca

SEQ ID NO: 15239 - RNA, 20 nt, synthetic construct
  source 1..20: mol_type = other RNA
acacaatccaagtttctagc

SEQ ID NO: 15240 - RNA, 20 nt, synthetic construct
  source 1..20: mol_type = other RNA
acacaatcttgagacggaag

SEQ ID NO: 15241 - RNA, 20 nt, synthetic construct
  source 1..20: mol_type = other RNA
acacaatggtcagagttgta

SEQ ID NO: 15242 - RNA, 20 nt, synthetic construct
  source 1..20: mol_type = other RNA
acacaatttgaggtagcaca

SEQ ID NO: 15243 - RNA, 20 nt, synthetic construct
  source 1..20: mol_type = other RNA
acacacaaaccaacaacaaa

SEQ ID NO: 15244 - RNA, 20 nt, synthetic construct
  source 1..20: mol_type = other RNA
acacacaacaatgaattctc

SEQ ID NO: 15245 - RNA, 20 nt, synthetic construct
  source 1..20: mol_type = other RNA
acacacaatccaagtttcta

SEQ ID NO: 15246 - RNA, 20 nt, synthetic construct
  source 1..20: mol_type = other RNA
acacacaatttgaggtagca

SEQ ID NO: 15247 - RNA, 20 nt, synthetic construct
  source 1..20: mol_type = other RNA
acacacacagtcctgtgttt

SEQ ID NO: 15248 - RNA, 20 nt, synthetic construct
  source 1..20: mol_type = other RNA
acacacacctaccaccatgc

SEQ ID NO: 15249 - RNA, 20 nt, synthetic construct
  source 1..20: mol_type = other RNA
acacacacctattcataggt

SEQ ID NO: 15250 - RNA, 20 nt, synthetic construct
  source 1..20: mol_type = other RNA
acacacacgtttatattcct

SEQ ID NO: 15251 - RNA, 20 nt, synthetic construct
  source 1..20: mol_type = other RNA
acacacagtcctgtgtttct

SEQ ID NO: 15252 - RNA, 20 nt, synthetic construct
  source 1..20: mol_type = other RNA
acacacataagggggaatct

SEQ ID NO: 15253 - RNA, 20 nt, synthetic construct
  source 1..20: mol_type = other RNA
acacacatcagacacctaca

SEQ ID NO: 15254 - RNA, 20 nt, synthetic construct
  source 1..20: mol_type = other RNA
acacacattagcctagacct

SEQ ID NO: 15255 - RNA, 20 nt, synthetic construct
  source 1..20: mol_type = other RNA
acacaccaaatcatgaaagt

SEQ ID NO: 15256 - RNA, 20 nt, synthetic construct
  source 1..20: mol_type = other RNA
acacaccactacacccggct

SEQ ID NO: 15257 - RNA, 20 nt, synthetic construct
  source 1..20: mol_type = other RNA
acacaccatgacagagttcc

SEQ ID NO: 15258 - RNA, 20 nt, synthetic construct
  source 1..20: mol_type = other RNA
acacacccttggtaaacagc

SEQ ID NO: 15259 - RNA, 20 nt, synthetic construct
  source 1..20: mol_type = other RNA
acacaccctttcttaggaag

SEQ ID NO: 15260 - RNA, 20 nt, synthetic construct
  source 1..20: mol_type = other RNA
acacacctaccaccatgctt

SEQ ID NO: 15261 - RNA, 20 nt, synthetic construct
  source 1..20: mol_type = other RNA
acacacctattcataggtaa

SEQ ID NO: 15262 - RNA, 20 nt, synthetic construct
  source 1..20: mol_type = other RNA
acacacctgaaattctcaaa

SEQ ID NO: 15263 - RNA, 20 nt, synthetic construct
  source 1..20: mol_type = other RNA
acacacgagtattcaagttt

SEQ ID NO: 15264 - RNA, 20 nt, synthetic construct
  source 1..20: mol_type = other RNA
acacacgggctgggcgcgat

SEQ ID NO: 15265 - RNA, 20 nt, synthetic construct
  source 1..20: mol_type = other RNA
acacacgggtacacatccta

SEQ ID NO: 15266 - RNA, 20 nt, synthetic construct
  source 1..20: mol_type = other RNA
acacacgtttatattccttt

SEQ ID NO: 15267 - RNA, 20 nt, synthetic construct
  source 1..20: mol_type = other RNA
acacactagccactgggtct

SEQ ID NO: 15268 - RNA, 20 nt, synthetic construct
  source 1..20: mol_type = other RNA
acacactagctgacccactg

SEQ ID NO: 15269 - RNA, 20 nt, synthetic construct
  source 1..20: mol_type = other RNA
acacactcgtgtatgatttc

SEQ ID NO: 15270 - RNA, 20 nt, synthetic construct
  source 1..20: mol_type = other RNA
acacactgaaacaatcgcaa

SEQ ID NO: 15271 - RNA, 20 nt, synthetic construct
  source 1..20: mol_type = other RNA
acacactgctcttctattcc

SEQ ID NO: 15272 - RNA, 20 nt, synthetic construct
  source 1..20: mol_type = other RNA
acacactgggtaaacaagac

SEQ ID NO: 15273 - RNA, 20 nt, synthetic construct
  source 1..20: mol_type = other RNA
acacagaaagcctcttcaga

SEQ ID NO: 15274 - RNA, 20 nt, synthetic construct
  source 1..20: mol_type = other RNA
acacagaacactaaagggga

SEQ ID NO: 15275 - RNA, 20 nt, synthetic construct
  source 1..20: mol_type = other RNA
acacagacatgaacaatcct

SEQ ID NO: 15276 - RNA, 20 nt, synthetic construct
  source 1..20: mol_type = other RNA
acacagagaacagcattatc

SEQ ID NO: 15277 - RNA, 20 nt, synthetic construct
  source 1..20: mol_type = other RNA
acacagagggagcgccacgt

SEQ ID NO: 15278 - RNA, 20 nt, synthetic construct
  source 1..20: mol_type = other RNA
acacaggactgtgtgtgtcc

SEQ ID NO: 15279 - RNA, 20 nt, synthetic construct
  source 1..20: mol_type = other RNA
acacaggagaacttgtctcg

SEQ ID NO: 15280 - RNA, 20 nt, synthetic construct
  source 1..20: mol_type = other RNA
acacaggctgaagggaggaa

SEQ ID NO: 15281 - RNA, 20 nt, synthetic construct
  source 1..20: mol_type = other RNA
acacagggaaaactacatgt

SEQ ID NO: 15282 - RNA, 20 nt, synthetic construct
  source 1..20: mol_type = other RNA
acacagggactgatgaagaa

SEQ ID NO: 15283 - RNA, 20 nt, synthetic construct
  source 1..20: mol_type = other RNA
acacaggtagacatgtgcca

SEQ ID NO: 15284 - RNA, 20 nt, synthetic construct
  source 1..20: mol_type = other RNA
acacagtacaaggctagagc

SEQ ID NO: 15285 - RNA, 20 nt, synthetic construct
  source 1..20: mol_type = other RNA
acacagtcctgtgtttctgc

SEQ ID NO: 15286 - RNA, 20 nt, synthetic construct
  source 1..20: mol_type = other RNA
acacagtgttgagaaagcac

SEQ ID NO: 15287 - RNA, 20 nt, synthetic construct
  source 1..20: mol_type = other RNA
acacagttctagttctaata

SEQ ID NO: 15288 - RNA, 20 nt, synthetic construct
  source 1..20: mol_type = other RNA
acacagtttgagaagccaca

SEQ ID NO: 15289 - RNA, 20 nt, synthetic construct
  source 1..20: mol_type = other RNA
acacataagggggaatctac

SEQ ID NO: 15290 - RNA, 20 nt, synthetic construct
  source 1..20: mol_type = other RNA
acacatacaaaccaaaaaat

SEQ ID NO: 15291 - RNA, 20 nt, synthetic construct
  source 1..20: mol_type = other RNA
acacatacacagggaaaact

SEQ ID NO: 15292 - RNA, 20 nt, synthetic construct
  source 1..20: mol_type = other RNA
acacatactgaaagacagac

SEQ ID NO: 15293 - RNA, 20 nt, synthetic construct
  source 1..20: mol_type = other RNA
acacatatctttaggtgttt

SEQ ID NO: 15294 - RNA, 20 nt, synthetic construct
  source 1..20: mol_type = other RNA
acacatatttatcaacacat

SEQ ID NO: 15295 - RNA, 20 nt, synthetic construct
  source 1..20: mol_type = other RNA
acacatcagacacctacatt

SEQ ID NO: 15296 - RNA, 20 nt, synthetic construct
  source 1..20: mol_type = other RNA
acacatcagattttgaagat

SEQ ID NO: 15297 - RNA, 20 nt, synthetic construct
  source 1..20: mol_type = other RNA
acacatcagcgctaagtgca

SEQ ID NO: 15298 - RNA, 20 nt, synthetic construct
  source 1..20: mol_type = other RNA
acacatcagtgctgctctga

SEQ ID NO: 15299 - RNA, 20 nt, synthetic construct
  source 1..20: mol_type = other RNA
acacatccacgcgtaagggt

SEQ ID NO: 15300 - RNA, 20 nt, synthetic construct
  source 1..20: mol_type = other RNA
acacatccagaagtcacttt

SEQ ID NO: 15301 - RNA, 20 nt, synthetic construct
  source 1..20: mol_type = other RNA
acacatcctaatacagtaaa

SEQ ID NO: 15302 - RNA, 20 nt, synthetic construct
  source 1..20: mol_type = other RNA
acacatctcccataccacct

SEQ ID NO: 15303 - RNA, 20 nt, synthetic construct
  source 1..20: mol_type = other RNA
acacatgaacctgcatggtg

SEQ ID NO: 15304 - RNA, 20 nt, synthetic construct
  source 1..20: mol_type = other RNA
acacatgcacactagacctt

SEQ ID NO: 15305 - RNA, 20 nt, synthetic construct
  source 1..20: mol_type = other RNA
acacatggcatcggggccta

SEQ ID NO: 15306 - RNA, 20 nt, synthetic construct
  source 1..20: mol_type = other RNA
acacatggggcattaatttt

SEQ ID NO: 15307 - RNA, 20 nt, synthetic construct
  source 1..20: mol_type = other RNA
acacatgtcagccacaagac

SEQ ID NO: 15308 - RNA, 20 nt, synthetic construct
  source 1..20: mol_type = other RNA
acacatgtcatgggccgggc

SEQ ID NO: 15309 - RNA, 20 nt, synthetic construct
  source 1..20: mol_type = other RNA
acacatgttgagtcttgttt

SEQ ID NO: 15310 - RNA, 20 nt, synthetic construct
  source 1..20: mol_type = other RNA
acacattaactatggacatg

SEQ ID NO: 15311 - RNA, 20 nt, synthetic construct
  source 1..20: mol_type = other RNA
acacattaataagatcatac

SEQ ID NO: 15312 - RNA, 20 nt, synthetic construct
  source 1..20: mol_type = other RNA
acacattagcctagacctca

SEQ ID NO: 15313 - RNA, 20 nt, synthetic construct
  source 1..20: mol_type = other RNA
acacattaggctctgggtca

SEQ ID NO: 15314 - RNA, 20 nt, synthetic construct
  source 1..20: mol_type = other RNA
acacattcaaaattgttcta

SEQ ID NO: 15315 - RNA, 20 nt, synthetic construct
  source 1..20: mol_type = other RNA
acacattccagaccagcagt

SEQ ID NO: 15316 - RNA, 20 nt, synthetic construct
  source 1..20: mol_type = other RNA
acacatttttgacagccacg

SEQ ID NO: 15317 - RNA, 20 nt, synthetic construct
  source 1..20: mol_type = other RNA
acaccaaaaaagcaccagtt

SEQ ID NO: 15318 - RNA, 20 nt, synthetic construct
  source 1..20: mol_type = other RNA
acaccaaaactacaggcaac

SEQ ID NO: 15319 - RNA, 20 nt, synthetic construct
  source 1..20: mol_type = other RNA
acaccaaactcaaaaggaca

SEQ ID NO: 15320 - RNA, 20 nt, synthetic construct
  source 1..20: mol_type = other RNA
acaccaaatcatgaaagtgg

SEQ ID NO: 15321 - RNA, 20 nt, synthetic construct
  source 1..20: mol_type = other RNA
acaccaacacaaagccttct

SEQ ID NO: 15322 - RNA, 20 nt, synthetic construct
  source 1..20: mol_type = other RNA
acaccaacatggcacatgtc

SEQ ID NO: 15323 - RNA, 20 nt, synthetic construct
  source 1..20: mol_type = other RNA
acaccaagacatgttaggtt

SEQ ID NO: 15324 - RNA, 20 nt, synthetic construct
  source 1..20: mol_type = other RNA
acaccaagcaacactaaaga

SEQ ID NO: 15325 - RNA, 20 nt, synthetic construct
  source 1..20: mol_type = other RNA
acaccaaggtttctctccaa

SEQ ID NO: 15326 - RNA, 20 nt, synthetic construct
  source 1..20: mol_type = other RNA
acaccacatccagctaattt

SEQ ID NO: 15327 - RNA, 20 nt, synthetic construct
  source 1..20: mol_type = other RNA
acaccactacacccggctaa

SEQ ID NO: 15328 - RNA, 20 nt, synthetic construct
  source 1..20: mol_type = other RNA
acaccagaactacacattcc

SEQ ID NO: 15329 - RNA, 20 nt, synthetic construct
  source 1..20: mol_type = other RNA
acaccagatactcatgcttg

SEQ ID NO: 15330 - RNA, 20 nt, synthetic construct
  source 1..20: mol_type = other RNA
acaccagtaagattctgtct

SEQ ID NO: 15331 - RNA, 20 nt, synthetic construct
  source 1..20: mol_type = other RNA
acaccatagctgaaggcact

SEQ ID NO: 15332 - RNA, 20 nt, synthetic construct
  source 1..20: mol_type = other RNA
acaccatgacagagttccac

SEQ ID NO: 15333 - RNA, 20 nt, synthetic construct
  source 1..20: mol_type = other RNA
acaccatgcaggttcatgtg

SEQ ID NO: 15334 - RNA, 20 nt, synthetic construct
  source 1..20: mol_type = other RNA
acaccatggcaggtttcaag

SEQ ID NO: 15335 - RNA, 20 nt, synthetic construct
  source 1..20: mol_type = other RNA
acaccatttagatcatctta

SEQ ID NO: 15336 - RNA, 20 nt, synthetic construct
  source 1..20: mol_type = other RNA
acacccagtatacacgtatt

SEQ ID NO: 15337 - RNA, 20 nt, synthetic construct
  source 1..20: mol_type = other RNA
acacccagttatctctgccc

SEQ ID NO: 15338 - RNA, 20 nt, synthetic construct
  source 1..20: mol_type = other RNA
acacccagttcaccagtttc

SEQ ID NO: 15339 - RNA, 20 nt, synthetic construct
  source 1..20: mol_type = other RNA
acacccatccacccacttgt

SEQ ID NO: 15340 - RNA, 20 nt, synthetic construct
  source 1..20: mol_type = other RNA
acacccgaagaggacgattt

SEQ ID NO: 15341 - RNA, 20 nt, synthetic construct
  source 1..20: mol_type = other RNA
acacccgacccactagtgaa

SEQ ID NO: 15342 - RNA, 20 nt, synthetic construct
  source 1..20: mol_type = other RNA
acacccggctaattaaacaa

SEQ ID NO: 15343 - RNA, 20 nt, synthetic construct
  source 1..20: mol_type = other RNA
acaccctaggtagggttggg

SEQ ID NO: 15344 - RNA, 20 nt, synthetic construct
  source 1..20: mol_type = other RNA
acaccctcctaccttccaaa

SEQ ID NO: 15345 - RNA, 20 nt, synthetic construct
  source 1..20: mol_type = other RNA
acaccctgggaaagcctggc

SEQ ID NO: 15346 - RNA, 20 nt, synthetic construct
  source 1..20: mol_type = other RNA
acacccttgaaaatttccag

SEQ ID NO: 15347 - RNA, 20 nt, synthetic construct
  source 1..20: mol_type = other RNA
acacccttggtaaacagcag

SEQ ID NO: 15348 - RNA, 20 nt, synthetic construct
  source 1..20: mol_type = other RNA
acaccctttcttaggaagct

SEQ ID NO: 15349 - RNA, 20 nt, synthetic construct
  source 1..20: mol_type = other RNA
acaccgctccacgcccatta

SEQ ID NO: 15350 - RNA, 20 nt, synthetic construct
  source 1..20: mol_type = other RNA
acaccgctgcattccagcct

SEQ ID NO: 15351 - RNA, 20 nt, synthetic construct
  source 1..20: mol_type = other RNA
acacctaaagatatgtgtag

SEQ ID NO: 15352 - RNA, 20 nt, synthetic construct
  source 1..20: mol_type = other RNA
acacctacaatattaacttt

SEQ ID NO: 15353 - RNA, 20 nt, synthetic construct
  source 1..20: mol_type = other RNA
acacctacattaatctcatc

SEQ ID NO: 15354 - RNA, 20 nt, synthetic construct
  source 1..20: mol_type = other RNA
acacctaccaccatgcttgg

SEQ ID NO: 15355 - RNA, 20 nt, synthetic construct
  source 1..20: mol_type = other RNA
acacctaggcctattttagg

SEQ ID NO: 15356 - RNA, 20 nt, synthetic construct
  source 1..20: mol_type = other RNA
acacctattcataggtaata

SEQ ID NO: 15357 - RNA, 20 nt, synthetic construct
  source 1..20: mol_type = other RNA
acacctcaaactagaaaaag

SEQ ID NO: 15358 - RNA, 20 nt, synthetic construct
  source 1..20: mol_type = other RNA
acacctcagttaaacccaac

SEQ ID NO: 15359 - RNA, 20 nt, synthetic construct
  source 1..20: mol_type = other RNA
acacctgaaattctcaaatg

SEQ ID NO: 15360 - RNA, 20 nt, synthetic construct
  source 1..20: mol_type = other RNA
acacctgaggggtcttatgc

SEQ ID NO: 15361 - RNA, 20 nt, synthetic construct
  source 1..20: mol_type = other RNA
acacctgcagtggcgtgtgc

SEQ ID NO: 15362 - RNA, 20 nt, synthetic construct
  source 1..20: mol_type = other RNA
acacctggatcaagtgggat

SEQ ID NO: 15363 - RNA, 20 nt, synthetic construct
  source 1..20: mol_type = other RNA
acacctggcccctttcaaga

SEQ ID NO: 15364 - RNA, 20 nt, synthetic construct
  source 1..20: mol_type = other RNA
acacctgggtatacagcaaa

SEQ ID NO: 15365 - RNA, 20 nt, synthetic construct
  source 1..20: mol_type = other RNA
acacctgtttaaaaagaaaa

SEQ ID NO: 15366 - RNA, 20 nt, synthetic construct
  source 1..20: mol_type = other RNA
acaccttacactcaaaagcc

SEQ ID NO: 15367 - RNA, 20 nt, synthetic construct
  source 1..20: mol_type = other RNA
acaccttgaacatgaacgag

SEQ ID NO: 15368 - RNA, 20 nt, synthetic construct
  source 1..20: mol_type = other RNA
acaccttgaactgggacttc

SEQ ID NO: 15369 - RNA, 20 nt, synthetic construct
  source 1..20: mol_type = other RNA
acaccttgggaggctgaggc

SEQ ID NO: 15370 - RNA, 20 nt, synthetic construct
  source 1..20: mol_type = other RNA
acacctttgtattcatccag

SEQ ID NO: 15371 - RNA, 20 nt, synthetic construct
  source 1..20: mol_type = other RNA
acacgaaaatatccctgggg

SEQ ID NO: 15372 - RNA, 20 nt, synthetic construct
  source 1..20: mol_type = other RNA
acacgagaaggacagcttcc

SEQ ID NO: 15373 - RNA, 20 nt, synthetic construct
  source 1..20: mol_type = other RNA
acacgagtattcaagtttca

SEQ ID NO: 15374 - RNA, 20 nt, synthetic construct
  source 1..20: mol_type = other RNA
acacgagtgtgtttcgcaaa

SEQ ID NO: 15375 - RNA, 20 nt, synthetic construct
  source 1..20: mol_type = other RNA
acacgcagaaccactgagca

SEQ ID NO: 15376 - RNA, 20 nt, synthetic construct
  source 1..20: mol_type = other RNA
acacgcattgcattgactac

SEQ ID NO: 15377 - RNA, 20 nt, synthetic construct
  source 1..20: mol_type = other RNA
acacgccactgcaggtgttg

SEQ ID NO: 15378 - RNA, 20 nt, synthetic construct
  source 1..20: mol_type = other RNA
acacgccttcgcgggcacct

SEQ ID NO: 15379 - RNA, 20 nt, synthetic construct
  source 1..20: mol_type = other RNA
acacgctggaagggagccca

SEQ ID NO: 15380 - RNA, 20 nt, synthetic construct
  source 1..20: mol_type = other RNA
acacggaaaacattattttc

SEQ ID NO: 15381 - RNA, 20 nt, synthetic construct
  source 1..20: mol_type = other RNA
acacgggctgggcgcgatgg

SEQ ID NO: 15382 - RNA, 20 nt, synthetic construct
  source 1..20: mol_type = other RNA
acacgggtacacatcctaat

SEQ ID NO: 15383 - RNA, 20 nt, synthetic construct
  source 1..20: mol_type = other RNA
acacggtctcacactgttgt

SEQ ID NO: 15384 - RNA, 20 nt, synthetic construct
  source 1..20: mol_type = other RNA
acacgtatttatattttggt

SEQ ID NO: 15385 - RNA, 20 nt, synthetic construct
  source 1..20: mol_type = other RNA
acacgtcttgtcaataattt

SEQ ID NO: 15386 - RNA, 20 nt, synthetic construct
  source 1..20: mol_type = other RNA
acacgtggctgtcaaaaatg

SEQ ID NO: 15387 - RNA, 20 nt, synthetic construct
  source 1..20: mol_type = other RNA
acacgttacaaaatatgtaa

SEQ ID NO: 15388 - RNA, 20 nt, synthetic construct
  source 1..20: mol_type = other RNA
acacgtttatattcctttta

SEQ ID NO: 15389 - RNA, 20 nt, synthetic construct
  source 1..20: mol_type = other RNA
acactaaagatttgccaatc

SEQ ID NO: 15390 - RNA, 20 nt, synthetic construct
  source 1..20: mol_type = other RNA
acactaaaggggatttcatg

SEQ ID NO: 15391 - RNA, 20 nt, synthetic construct
  source 1..20: mol_type = other RNA
acactaaccaacattgagtt

SEQ ID NO: 15392 - RNA, 20 nt, synthetic construct
  source 1..20: mol_type = other RNA
acactaactttctattcccc

SEQ ID NO: 15393 - RNA, 20 nt, synthetic construct
  source 1..20: mol_type = other RNA
acactaagaagatggttgga

SEQ ID NO: 15394 - RNA, 20 nt, synthetic construct
  source 1..20: mol_type = other RNA
acactaatccttctcatagt

SEQ ID NO: 15395 - RNA, 20 nt, synthetic construct
  source 1..20: mol_type = other RNA
acactagacctttcttaggt

SEQ ID NO: 15396 - RNA, 20 nt, synthetic construct
  source 1..20: mol_type = other RNA
acactagcaatccaggatct

SEQ ID NO: 15397 - RNA, 20 nt, synthetic construct
  source 1..20: mol_type = other RNA
acactagccactgggtctta

SEQ ID NO: 15398 - RNA, 20 nt, synthetic construct
  source 1..20: mol_type = other RNA
acactagctattgtcttttc

SEQ ID NO: 15399 - RNA, 20 nt, synthetic construct
  source 1..20: mol_type = other RNA
acactagctgacccactggt

SEQ ID NO: 15400 - RNA, 20 nt, synthetic construct
  source 1..20: mol_type = other RNA
acactagggactggcctcgg

SEQ ID NO: 15401 - RNA, 20 nt, synthetic construct
  source 1..20: mol_type = other RNA
acactagtcaccctacagac

SEQ ID NO: 15402 - RNA, 20 nt, synthetic construct
  source 1..20: mol_type = other RNA
acactataaatcagtaagaa

SEQ ID NO: 15403 - RNA, 20 nt, synthetic construct
  source 1..20: mol_type = other RNA
acactataacagatggaact

SEQ ID NO: 15404 - RNA, 20 nt, synthetic construct
  source 1..20: mol_type = other RNA
acactataagccaatatccc

SEQ ID NO: 15405 - RNA, 20 nt, synthetic construct
  source 1..20: mol_type = other RNA
acactatggcttttgagtgt

SEQ ID NO: 15406 - RNA, 20 nt, synthetic construct
  source 1..20: mol_type = other RNA
acactatgtgttgataaata

SEQ ID NO: 15407 - RNA, 20 nt, synthetic construct
  source 1..20: mol_type = other RNA
acactattgagagtgaaaac

SEQ ID NO: 15408 - RNA, 20 nt, synthetic construct
  source 1..20: mol_type = other RNA
acactcaaaagccatagtgt

SEQ ID NO: 15409 - RNA, 20 nt, synthetic construct
  source 1..20: mol_type = other RNA
acactcaatacacgtggctg

SEQ ID NO: 15410 - RNA, 20 nt, synthetic construct
  source 1..20: mol_type = other RNA
acactcagaagtactactca

SEQ ID NO: 15411 - RNA, 20 nt, synthetic construct
  source 1..20: mol_type = other RNA
acactcagatatcaatctgg

SEQ ID NO: 15412 - RNA, 20 nt, synthetic construct
  source 1..20: mol_type = other RNA
acactcataccaggttttgg

SEQ ID NO: 15413 - RNA, 20 nt, synthetic construct
  source 1..20: mol_type = other RNA
acactcatttcctttcagtc

SEQ ID NO: 15414 - RNA, 20 nt, synthetic construct
  source 1..20: mol_type = other RNA
acactccagaatgaccgaga

SEQ ID NO: 15415 - RNA, 20 nt, synthetic construct
  source 1..20: mol_type = other RNA
acactccagcatccctccag

SEQ ID NO: 15416 - RNA, 20 nt, synthetic construct
  source 1..20: mol_type = other RNA
acactccccagtggttgtgg

SEQ ID NO: 15417 - RNA, 20 nt, synthetic construct
  source 1..20: mol_type = other RNA
acactcgcactccacttccc

SEQ ID NO: 15418 - RNA, 20 nt, synthetic construct
  source 1..20: mol_type = other RNA
acactcgtgtatgatttcta

SEQ ID NO: 15419 - RNA, 20 nt, synthetic construct
  source 1..20: mol_type = other RNA
acactctgcaattttaaatg

SEQ ID NO: 15420 - RNA, 20 nt, synthetic construct
  source 1..20: mol_type = other RNA
acactcttaataactgccta

SEQ ID NO: 15421 - RNA, 20 nt, synthetic construct
  source 1..20: mol_type = other RNA
acactcttggtctttctccc

SEQ ID NO: 15422 - RNA, 20 nt, synthetic construct
  source 1..20: mol_type = other RNA
acactgaaacaatcgcaatc

SEQ ID NO: 15423 - RNA, 20 nt, synthetic construct
  source 1..20: mol_type = other RNA
acactgaagggaattttact

SEQ ID NO: 15424 - RNA, 20 nt, synthetic construct
  source 1..20: mol_type = other RNA
acactgacaggacagagcag

SEQ ID NO: 15425 - RNA, 20 nt, synthetic construct
  source 1..20: mol_type = other RNA
acactgattttctgcttctc

SEQ ID NO: 15426 - RNA, 20 nt, synthetic construct
  source 1..20: mol_type = other RNA
acactgcagatgaatgagca

SEQ ID NO: 15427 - RNA, 20 nt, synthetic construct
  source 1..20: mol_type = other RNA
acactgctcagaagctttca

SEQ ID NO: 15428 - RNA, 20 nt, synthetic construct
  source 1..20: mol_type = other RNA
acactgctcctgcctttgtt

SEQ ID NO: 15429 - RNA, 20 nt, synthetic construct
  source 1..20: mol_type = other RNA
acactgctcttctattccag

SEQ ID NO: 15430 - RNA, 20 nt, synthetic construct
  source 1..20: mol_type = other RNA
acactggaaatcacaggttt

SEQ ID NO: 15431 - RNA, 20 nt, synthetic construct
  source 1..20: mol_type = other RNA
acactggaagtaattgggat

SEQ ID NO: 15432 - RNA, 20 nt, synthetic construct
  source 1..20: mol_type = other RNA
acactggaggtgcacattcc

SEQ ID NO: 15433 - RNA, 20 nt, synthetic construct
  source 1..20: mol_type = other RNA
acactggcaaaaatcatcat

SEQ ID NO: 15434 - RNA, 20 nt, synthetic construct
  source 1..20: mol_type = other RNA
acactgggtaaacaagactc

SEQ ID NO: 15435 - RNA, 20 nt, synthetic construct
  source 1..20: mol_type = other RNA
acactgggttctcaccaaca

SEQ ID NO: 15436 - RNA, 20 nt, synthetic construct
  source 1..20: mol_type = other RNA
acactggtcactggccactg

SEQ ID NO: 15437 - RNA, 20 nt, synthetic construct
  source 1..20: mol_type = other RNA
acactgtagttcagtttttc

SEQ ID NO: 15438 - RNA, 20 nt, synthetic construct
  source 1..20: mol_type = other RNA
acactgtattttgaacaaat

SEQ ID NO: 15439 - RNA, 20 nt, synthetic construct
  source 1..20: mol_type = other RNA
acactgtgttcttttccttc

SEQ ID NO: 15440 - RNA, 20 nt, synthetic construct
  source 1..20: mol_type = other RNA
acactgttctgcgtggtttt

SEQ ID NO: 15441 - RNA, 20 nt, synthetic construct
  source 1..20: mol_type = other RNA
acactgttgatttagaaata

SEQ ID NO: 15442 - RNA, 20 nt, synthetic construct
  source 1..20: mol_type = other RNA
acactgttgtccaggccaga

SEQ ID NO: 15443 - RNA, 20 nt, synthetic construct
  source 1..20: mol_type = other RNA
acactgtttgattactgtag

SEQ ID NO: 15444 - RNA, 20 nt, synthetic construct
  source 1..20: mol_type = other RNA
acacttaacatgagatctaa

SEQ ID NO: 15445 - RNA, 20 nt, synthetic construct
  source 1..20: mol_type = other RNA
acacttactaaatgatcttt

SEQ ID NO: 15446 - RNA, 20 nt, synthetic construct
  source 1..20: mol_type = other RNA
acacttagcatgttgctttg

SEQ ID NO: 15447 - RNA, 20 nt, synthetic construct
  source 1..20: mol_type = other RNA
acacttagttcaagatgcat

SEQ ID NO: 15448 - RNA, 20 nt, synthetic construct
  source 1..20: mol_type = other RNA
acacttcagtggtaaggact

SEQ ID NO: 15449 - RNA, 20 nt, synthetic construct
  source 1..20: mol_type = other RNA
acacttccagtacatctcaa

SEQ ID NO: 15450 - RNA, 20 nt, synthetic construct
  source 1..20: mol_type = other RNA
acacttctatccagtgacac

SEQ ID NO: 15451 - RNA, 20 nt, synthetic construct
  source 1..20: mol_type = other RNA
acacttctgtgatcagaaga

SEQ ID NO: 15452 - RNA, 20 nt, synthetic construct
  source 1..20: mol_type = other RNA
acacttgaattagtgatttt

SEQ ID NO: 15453 - RNA, 20 nt, synthetic construct
  source 1..20: mol_type = other RNA
acacttgatggtttggggct

SEQ ID NO: 15454 - RNA, 20 nt, synthetic construct
  source 1..20: mol_type = other RNA
acacttgcttgggaacagca

SEQ ID NO: 15455 - RNA, 20 nt, synthetic construct
  source 1..20: mol_type = other RNA
acacttggagttttccccct

SEQ ID NO: 15456 - RNA, 20 nt, synthetic construct
  source 1..20: mol_type = other RNA
acacttgtgtaactaccact

SEQ ID NO: 15457 - RNA, 20 nt, synthetic construct
  source 1..20: mol_type = other RNA
acactttccttggagaagag

SEQ ID NO: 15458 - RNA, 20 nt, synthetic construct
  source 1..20: mol_type = other RNA
acacttttcaaacacttaac

SEQ ID NO: 15459 - RNA, 20 nt, synthetic construct
  source 1..20: mol_type = other RNA
acacttttcaggtattgagc

SEQ ID NO: 15460 - RNA, 20 nt, synthetic construct
  source 1..20: mol_type = other RNA
acacttttccagtcttctca

SEQ ID NO: 15461 - RNA, 20 nt, synthetic construct
  source 1..20: mol_type = other RNA
acactttttgtgagttttaa

SEQ ID NO: 15462 - RNA, 20 nt, synthetic construct
  source 1..20: mol_type = other RNA
acagaaaaaattagcctttt

SEQ ID NO: 15463 - RNA, 20 nt, synthetic construct
  source 1..20: mol_type = other RNA
acagaaaaatccatcttaaa

SEQ ID NO: 15464 - RNA, 20 nt, synthetic construct
  source 1..20: mol_type = other RNA
acagaaaacccttcatcatt

SEQ ID NO: 15465 - RNA, 20 nt, synthetic construct
  source 1..20: mol_type = other RNA
acagaaaatatctacaaatc

SEQ ID NO: 15466 - RNA, 20 nt, synthetic construct
  source 1..20: mol_type = other RNA
acagaaacagaaaaatccat

SEQ ID NO: 15467 - RNA, 20 nt, synthetic construct
  source 1..20: mol_type = other RNA
acagaaaccctgtacccatt

SEQ ID NO: 15468 - RNA, 20 nt, synthetic construct
  source 1..20: mol_type = other RNA
acagaaagcctcttcagaag

SEQ ID NO: 15469 - RNA, 20 nt, synthetic construct
  source 1..20: mol_type = other RNA
acagaaaggcccaaaaagtt

SEQ ID NO: 15470 - RNA, 20 nt, synthetic construct
  source 1..20: mol_type = other RNA
acagaaataaaacatgttgt

SEQ ID NO: 15471 - RNA, 20 nt, synthetic construct
  source 1..20: mol_type = other RNA
acagaaatataccttatgtg

SEQ ID NO: 15472 - RNA, 20 nt, synthetic construct
  source 1..20: mol_type = other RNA
acagaaatgaaatggccctt

SEQ ID NO: 15473 - RNA, 20 nt, synthetic construct
  source 1..20: mol_type = other RNA
acagaaattcaacttggtaa

SEQ ID NO: 15474 - RNA, 20 nt, synthetic construct
  source 1..20: mol_type = other RNA
acagaaatttattgtttcac

SEQ ID NO: 15475 - RNA, 20 nt, synthetic construct
  source 1..20: mol_type = other RNA
acagaacaaactcaagttcc

SEQ ID NO: 15476 - RNA, 20 nt, synthetic construct
  source 1..20: mol_type = other RNA
acagaacaaataacaccata

SEQ ID NO: 15477 - RNA, 20 nt, synthetic construct
  source 1..20: mol_type = other RNA
acagaacactaaaggggatt

SEQ ID NO: 15478 - RNA, 20 nt, synthetic construct
  source 1..20: mol_type = other RNA
acagaaccatgtaacaggtt

SEQ ID NO: 15479 - RNA, 20 nt, synthetic construct
  source 1..20: mol_type = other RNA
acagaactgctaatggtcct

SEQ ID NO: 15480 - RNA, 20 nt, synthetic construct
  source 1..20: mol_type = other RNA
acagaactgtcactgacaca

SEQ ID NO: 15481 - RNA, 20 nt, synthetic construct
  source 1..20: mol_type = other RNA
acagaagaagaattctatag

SEQ ID NO: 15482 - RNA, 20 nt, synthetic construct
  source 1..20: mol_type = other RNA
acagaagaagtttctagtta

SEQ ID NO: 15483 - RNA, 20 nt, synthetic construct
  source 1..20: mol_type = other RNA
acagaagaattaaaatctca

SEQ ID NO: 15484 - RNA, 20 nt, synthetic construct
  source 1..20: mol_type = other RNA
acagaagacacaaaatcaga

SEQ ID NO: 15485 - RNA, 20 nt, synthetic construct
  source 1..20: mol_type = other RNA
acagaagggtatatacaata

SEQ ID NO: 15486 - RNA, 20 nt, synthetic construct
  source 1..20: mol_type = other RNA
acagaagtgttttgatagtt

SEQ ID NO: 15487 - RNA, 20 nt, synthetic construct
  source 1..20: mol_type = other RNA
acagaataaaaagtgacttc

SEQ ID NO: 15488 - RNA, 20 nt, synthetic construct
  source 1..20: mol_type = other RNA
acagaataaatgaaaacaga

SEQ ID NO: 15489 - RNA, 20 nt, synthetic construct
  source 1..20: mol_type = other RNA
acagaatatactcagaaaaa

SEQ ID NO: 15490 - RNA, 20 nt, synthetic construct
  source 1..20: mol_type = other RNA
acagaatcttactggtgtta

SEQ ID NO: 15491 - RNA, 20 nt, synthetic construct
  source 1..20: mol_type = other RNA
acagaatgcatcttttaaaa

SEQ ID NO: 15492 - RNA, 20 nt, synthetic construct
  source 1..20: mol_type = other RNA
acagaatgttcaagtatttc

SEQ ID NO: 15493 - RNA, 20 nt, synthetic construct
  source 1..20: mol_type = other RNA
acagaattaaacaatcttga

SEQ ID NO: 15494 - RNA, 20 nt, synthetic construct
  source 1..20: mol_type = other RNA
acagaattattgattggcaa

SEQ ID NO: 15495 - RNA, 20 nt, synthetic construct
  source 1..20: mol_type = other RNA
acagacagacatgcatgcac

SEQ ID NO: 15496 - RNA, 20 nt, synthetic construct
  source 1..20: mol_type = other RNA
acagacagggaatggggagc

SEQ ID NO: 15497 - RNA, 20 nt, synthetic construct
  source 1..20: mol_type = other RNA
acagacagtaatttatacaa

SEQ ID NO: 15498 - RNA, 20 nt, synthetic construct
  source 1..20: mol_type = other RNA
acagacatgaacaatccttc

SEQ ID NO: 15499 - RNA, 20 nt, synthetic construct
  source 1..20: mol_type = other RNA
acagacatgcatgcacacag

SEQ ID NO: 15500 - RNA, 20 nt, synthetic construct
  source 1..20: mol_type = other RNA
acagacatgccacaccacat

SEQ ID NO: 15501 - RNA, 20 nt, synthetic construct
  source 1..20: mol_type = other RNA
acagacatttggaatagaga

SEQ ID NO: 15502 - RNA, 20 nt, synthetic construct
  source 1..20: mol_type = other RNA
acagaccctggcttgtgaca

SEQ ID NO: 15503 - RNA, 20 nt, synthetic construct
  source 1..20: mol_type = other RNA
acagacccttatgtccagcc

SEQ ID NO: 15504 - RNA, 20 nt, synthetic construct
  source 1..20: mol_type = other RNA
acagacctctattaaatcat

SEQ ID NO: 15505 - RNA, 20 nt, synthetic construct
  source 1..20: mol_type = other RNA
acagacctctgaagagtcta

SEQ ID NO: 15506 - RNA, 20 nt, synthetic construct
  source 1..20: mol_type = other RNA
acagaccttattcaaataat

SEQ ID NO: 15507 - RNA, 20 nt, synthetic construct
  source 1..20: mol_type = other RNA
acagacgcaaaggatgtcaa

SEQ ID NO: 15508 - RNA, 20 nt, synthetic construct
  source 1..20: mol_type = other RNA
acagactaatatgagttcct

SEQ ID NO: 15509 - RNA, 20 nt, synthetic construct
  source 1..20: mol_type = other RNA
acagactcaagcctgataag

SEQ ID NO: 15510 - RNA, 20 nt, synthetic construct
  source 1..20: mol_type = other RNA
acagactcaataaccacatg

SEQ ID NO: 15511 - RNA, 20 nt, synthetic construct
  source 1..20: mol_type = other RNA
acagactgagccagcaaatc

SEQ ID NO: 15512 - RNA, 20 nt, synthetic construct
  source 1..20: mol_type = other RNA
acagactgattaatttgagg

SEQ ID NO: 15513 - RNA, 20 nt, synthetic construct
  source 1..20: mol_type = other RNA
acagactgcagttggattat

SEQ ID NO: 15514 - RNA, 20 nt, synthetic construct
  source 1..20: mol_type = other RNA
acagactgtgccttgatcca

SEQ ID NO: 15515 - RNA, 20 nt, synthetic construct
  source 1..20: mol_type = other RNA
acagagaacagcattatctt

SEQ ID NO: 15516 - RNA, 20 nt, synthetic construct
  source 1..20: mol_type = other RNA
acagagacagagaatctgtc

SEQ ID NO: 15517 - RNA, 20 nt, synthetic construct
  source 1..20: mol_type = other RNA
acagagagagacctttcttt

SEQ ID NO: 15518 - RNA, 20 nt, synthetic construct
  source 1..20: mol_type = other RNA
acagagcaacaacctgtctc

SEQ ID NO: 15519 - RNA, 20 nt, synthetic construct
  source 1..20: mol_type = other RNA
acagagcacagactcaagcc

SEQ ID NO: 15520 - RNA, 20 nt, synthetic construct
  source 1..20: mol_type = other RNA
acagagcagtaggcttagat

SEQ ID NO: 15521 - RNA, 20 nt, synthetic construct
  source 1..20: mol_type = other RNA
acagagccgaaatgcactta

SEQ ID NO: 15522 - RNA, 20 nt, synthetic construct
  source 1..20: mol_type = other RNA
acagagccgagcagaaggga

SEQ ID NO: 15523 - RNA, 20 nt, synthetic construct
  source 1..20: mol_type = other RNA
acagagcctaaaataggcct

SEQ ID NO: 15524 - RNA, 20 nt, synthetic construct
  source 1..20: mol_type = other RNA
acagagctagaactagaata

SEQ ID NO: 15525 - RNA, 20 nt, synthetic construct
  source 1..20: mol_type = other RNA
acagagctccctctccctcc

SEQ ID NO: 15526 - RNA, 20 nt, synthetic construct
  source 1..20: mol_type = other RNA
acagaggattttggattgcg

SEQ ID NO: 15527 - RNA, 20 nt, synthetic construct
  source 1..20: mol_type = other RNA
acagaggcaacagtcattca

SEQ ID NO: 15528 - RNA, 20 nt, synthetic construct
  source 1..20: mol_type = other RNA
acagaggcatgcacggactt

SEQ ID NO: 15529 - RNA, 20 nt, synthetic construct
  source 1..20: mol_type = other RNA
acagaggctttttatatttc

SEQ ID NO: 15530 - RNA, 20 nt, synthetic construct
  source 1..20: mol_type = other RNA
acagagggagcgccacgtga

SEQ ID NO: 15531 - RNA, 20 nt, synthetic construct
  source 1..20: mol_type = other RNA
acagagtcagaaaattaaat

SEQ ID NO: 15532 - RNA, 20 nt, synthetic construct
  source 1..20: mol_type = other RNA
acagagtgaaactctggctc

SEQ ID NO: 15533 - RNA, 20 nt, synthetic construct
  source 1..20: mol_type = other RNA
acagagttcagcttacagtc

SEQ ID NO: 15534 - RNA, 20 nt, synthetic construct
  source 1..20: mol_type = other RNA
acagagttccacctccatca

SEQ ID NO: 15535 - RNA, 20 nt, synthetic construct
  source 1..20: mol_type = other RNA
acagagttttccaataagtt

SEQ ID NO: 15536 - RNA, 20 nt, synthetic construct
  source 1..20: mol_type = other RNA
acagataaccaataagaagt

SEQ ID NO: 15537 - RNA, 20 nt, synthetic construct
  source 1..20: mol_type = other RNA
acagataacctagattttaa

SEQ ID NO: 15538 - RNA, 20 nt, synthetic construct
  source 1..20: mol_type = other RNA
acagataatttcttcagaag

SEQ ID NO: 15539 - RNA, 20 nt, synthetic construct
  source 1..20: mol_type = other RNA
acagatacaactctgaccat

SEQ ID NO: 15540 - RNA, 20 nt, synthetic construct
  source 1..20: mol_type = other RNA
acagatatatgcattcccat

SEQ ID NO: 15541 - RNA, 20 nt, synthetic construct
  source 1..20: mol_type = other RNA
acagatatcacccagaccaa

SEQ ID NO: 15542 - RNA, 20 nt, synthetic construct
  source 1..20: mol_type = other RNA
acagatcccaaaaaggtttt

SEQ ID NO: 15543 - RNA, 20 nt, synthetic construct
  source 1..20: mol_type = other RNA
acagatcctcacatcagtta

SEQ ID NO: 15544 - RNA, 20 nt, synthetic construct
  source 1..20: mol_type = other RNA
acagatctgagaagactaag

SEQ ID NO: 15545 - RNA, 20 nt, synthetic construct
  source 1..20: mol_type = other RNA
acagatcttatggaatagtt

SEQ ID NO: 15546 - RNA, 20 nt, synthetic construct
  source 1..20: mol_type = other RNA
acagatcttggccgaatgtg

SEQ ID NO: 15547 - RNA, 20 nt, synthetic construct
  source 1..20: mol_type = other RNA
acagatctttttgtgtatat

SEQ ID NO: 15548 - RNA, 20 nt, synthetic construct
  source 1..20: mol_type = other RNA
acagatgagaaatacttgga

SEQ ID NO: 15549 - RNA, 20 nt, synthetic construct
  source 1..20: mol_type = other RNA
acagatgagactcttaatat

SEQ ID NO: 15550 - RNA, 20 nt, synthetic construct
  source 1..20: mol_type = other RNA
acagatggaactctattttc

SEQ ID NO: 15551 - RNA, 20 nt, synthetic construct
  source 1..20: mol_type = other RNA
acagatggtccttttttact

SEQ ID NO: 15552 - RNA, 20 nt, synthetic construct
  source 1..20: mol_type = other RNA
acagatgtgcttaatcttca

SEQ ID NO: 15553 - RNA, 20 nt, synthetic construct
  source 1..20: mol_type = other RNA
acagattaaataccacctga

SEQ ID NO: 15554 - RNA, 20 nt, synthetic construct
  source 1..20: mol_type = other RNA
acagattcaatgcaatactt

SEQ ID NO: 15555 - RNA, 20 nt, synthetic construct
  source 1..20: mol_type = other RNA
acagattcacgcacagggag

SEQ ID NO: 15556 - RNA, 20 nt, synthetic construct
  source 1..20: mol_type = other RNA
acagattctctgtctctgtt

SEQ ID NO: 15557 - RNA, 20 nt, synthetic construct
  source 1..20: mol_type = other RNA
acagattgatttatatgttg

SEQ ID NO: 15558 - RNA, 20 nt, synthetic construct
  source 1..20: mol_type = other RNA
acagatttttaaaatctagg

SEQ ID NO: 15559 - RNA, 20 nt, synthetic construct
  source 1..20: mol_type = other RNA
acagcaaaagaattaaactc

SEQ ID NO: 15560 - RNA, 20 nt, synthetic construct
  source 1..20: mol_type = other RNA
acagcaaataaacaaaatca

SEQ ID NO: 15561 - RNA, 20 nt, synthetic construct
  source 1..20: mol_type = other RNA
acagcaaatctctagaactt

SEQ ID NO: 15562 - RNA, 20 nt, synthetic construct
  source 1..20: mol_type = other RNA
acagcaaggctcctgcagac

SEQ ID NO: 15563 - RNA, 20 nt, synthetic construct
  source 1..20: mol_type = other RNA
acagcacattaaataagggc

SEQ ID NO: 15564 - RNA, 20 nt, synthetic construct
  source 1..20: mol_type = other RNA
acagcaccttttttggtatt

SEQ ID NO: 15565 - RNA, 20 nt, synthetic construct
  source 1..20: mol_type = other RNA
acagcactgttaactgactt

SEQ ID NO: 15566 - RNA, 20 nt, synthetic construct
  source 1..20: mol_type = other RNA
acagcacttttgtactactt

SEQ ID NO: 15567 - RNA, 20 nt, synthetic construct
  source 1..20: mol_type = other RNA
acagcagaacaaactgcgtg

SEQ ID NO: 15568 - RNA, 20 nt, synthetic construct
  source 1..20: mol_type = other RNA
acagcagataagatccaagt

SEQ ID NO: 15569 - RNA, 20 nt, synthetic construct
  source 1..20: mol_type = other RNA
acagcagatctgcttgcaga

SEQ ID NO: 15570 - RNA, 20 nt, synthetic construct
  source 1..20: mol_type = other RNA
acagcagctctagcaaacaa

SEQ ID NO: 15571 - RNA, 20 nt, synthetic construct
  source 1..20: mol_type = other RNA
acagcaggaaaagctaccct

SEQ ID NO: 15572 - RNA, 20 nt, synthetic construct
  source 1..20: mol_type = other RNA
acagcagggctcctccaagg

SEQ ID NO: 15573 - RNA, 20 nt, synthetic construct
  source 1..20: mol_type = other RNA
acagcaggggaaggcttcga

SEQ ID NO: 15574 - RNA, 20 nt, synthetic construct
  source 1..20: mol_type = other RNA
acagcagtcttaaccattga

SEQ ID NO: 15575 - RNA, 20 nt, synthetic construct
  source 1..20: mol_type = other RNA
acagcatactgtggatatct

SEQ ID NO: 15576 - RNA, 20 nt, synthetic construct
  source 1..20: mol_type = other RNA
acagcatatacatgacatgg

SEQ ID NO: 15577 - RNA, 20 nt, synthetic construct
  source 1..20: mol_type = other RNA
acagcatattagctgtctgg

SEQ ID NO: 15578 - RNA, 20 nt, synthetic construct
  source 1..20: mol_type = other RNA
acagcatccccagaaagaga

SEQ ID NO: 15579 - RNA, 20 nt, synthetic construct
  source 1..20: mol_type = other RNA
acagcatgaatacctattta

SEQ ID NO: 15580 - RNA, 20 nt, synthetic construct
  source 1..20: mol_type = other RNA
acagcattatcttaataacc

SEQ ID NO: 15581 - RNA, 20 nt, synthetic construct
  source 1..20: mol_type = other RNA
acagcatttcagccaaagct

SEQ ID NO: 15582 - RNA, 20 nt, synthetic construct
  source 1..20: mol_type = other RNA
acagccaaagaaattggacg

SEQ ID NO: 15583 - RNA, 20 nt, synthetic construct
  source 1..20: mol_type = other RNA
acagccaaataaaacacaag

SEQ ID NO: 15584 - RNA, 20 nt, synthetic construct
  source 1..20: mol_type = other RNA
acagccacgtgtattgagtg

SEQ ID NO: 15585 - RNA, 20 nt, synthetic construct
  source 1..20: mol_type = other RNA
acagccagtcagtgatggag

SEQ ID NO: 15586 - RNA, 20 nt, synthetic construct
  source 1..20: mol_type = other RNA
acagccatcaacctaatgaa

SEQ ID NO: 15587 - RNA, 20 nt, synthetic construct
  source 1..20: mol_type = other RNA
acagcccctagcatgcagta

SEQ ID NO: 15588 - RNA, 20 nt, synthetic construct
  source 1..20: mol_type = other RNA
acagccggcatatgtcactg

SEQ ID NO: 15589 - RNA, 20 nt, synthetic construct
  source 1..20: mol_type = other RNA
acagcctaaaccattttcaa

SEQ ID NO: 15590 - RNA, 20 nt, synthetic construct
  source 1..20: mol_type = other RNA
acagcctaaagtccacagat

SEQ ID NO: 15591 - RNA, 20 nt, synthetic construct
  source 1..20: mol_type = other RNA
acagcctaagcaaatgtaat

SEQ ID NO: 15592 - RNA, 20 nt, synthetic construct
  source 1..20: mol_type = other RNA
acagcctaattgtacacctc

SEQ ID NO: 15593 - RNA, 20 nt, synthetic construct
  source 1..20: mol_type = other RNA
acagcgccacttaaaaaatg

SEQ ID NO: 15594 - RNA, 20 nt, synthetic construct
  source 1..20: mol_type = other RNA
acagcgcccggcccgttatt

SEQ ID NO: 15595 - RNA, 20 nt, synthetic construct
  source 1..20: mol_type = other RNA
acagcggggatggttgcaca

SEQ ID NO: 15596 - RNA, 20 nt, synthetic construct
  source 1..20: mol_type = other RNA
acagcgtgcaccttacattg

SEQ ID NO: 15597 - RNA, 20 nt, synthetic construct
  source 1..20: mol_type = other RNA
acagcgtggaatggtcaatt

SEQ ID NO: 15598 - RNA, 20 nt, synthetic construct
  source 1..20: mol_type = other RNA
acagcgttgttcagttgaaa

SEQ ID NO: 15599 - RNA, 20 nt, synthetic construct
  source 1..20: mol_type = other RNA
acagctaatatgctgtagtg

SEQ ID NO: 15600 - RNA, 20 nt, synthetic construct
  source 1..20: mol_type = other RNA
acagctacactcaatacacg

SEQ ID NO: 15601 - RNA, 20 nt, synthetic construct
  source 1..20: mol_type = other RNA
acagctacggaggatgaggg

SEQ ID NO: 15602 - RNA, 20 nt, synthetic construct
  source 1..20: mol_type = other RNA
acagctactaaacaaatcag

SEQ ID NO: 15603 - RNA, 20 nt, synthetic construct
  source 1..20: mol_type = other RNA
acagctactatgaatatact

SEQ ID NO: 15604 - RNA, 20 nt, synthetic construct
  source 1..20: mol_type = other RNA
acagctaggtgagtgagatg

SEQ ID NO: 15605 - RNA, 20 nt, synthetic construct
  source 1..20: mol_type = other RNA
acagctatcaggccttccac

SEQ ID NO: 15606 - RNA, 20 nt, synthetic construct
  source 1..20: mol_type = other RNA
acagctcaattaagcaacct

SEQ ID NO: 15607 - RNA, 20 nt, synthetic construct
  source 1..20: mol_type = other RNA
acagctcagaagctatagct

SEQ ID NO: 15608 - RNA, 20 nt, synthetic construct
  source 1..20: mol_type = other RNA
acagctccaaagaacaggag

SEQ ID NO: 15609 - RNA, 20 nt, synthetic construct
  source 1..20: mol_type = other RNA
acagctctcatgagtcctga

SEQ ID NO: 15610 - RNA, 20 nt, synthetic construct
  source 1..20: mol_type = other RNA
acagctcttctcagttgcag

SEQ ID NO: 15611 - RNA, 20 nt, synthetic construct
  source 1..20: mol_type = other RNA
acagctgagtagcgctttaa

SEQ ID NO: 15612 - RNA, 20 nt, synthetic construct
  source 1..20: mol_type = other RNA
acagctgggagaaagctaat

SEQ ID NO: 15613 - RNA, 20 nt, synthetic construct
  source 1..20: mol_type = other RNA
acagcttaccaagtgccgcg

SEQ ID NO: 15614 - RNA, 20 nt, synthetic construct
  source 1..20: mol_type = other RNA
acagcttccacccaagtgga

SEQ ID NO: 15615 - RNA, 20 nt, synthetic construct
  source 1..20: mol_type = other RNA
acagcttcttgttagaattt

SEQ ID NO: 15616 - RNA, 20 nt, synthetic construct
  source 1..20: mol_type = other RNA
acagcttgacattcttacct

SEQ ID NO: 15617 - RNA, 20 nt, synthetic construct
  source 1..20: mol_type = other RNA
acagctttcttttccaacca

SEQ ID NO: 15618 - RNA, 20 nt, synthetic construct
  source 1..20: mol_type = other RNA
acaggaaagatgtcttttaa

SEQ ID NO: 15619 - RNA, 20 nt, synthetic construct
  source 1..20: mol_type = other RNA
acaggaagaattattgtctg

SEQ ID NO: 15620 - RNA, 20 nt, synthetic construct
  source 1..20: mol_type = other RNA
acaggaagagactatctctt

SEQ ID NO: 15621 - RNA, 20 nt, synthetic construct
  source 1..20: mol_type = other RNA
acaggaagaggcagctaagc

SEQ ID NO: 15622 - RNA, 20 nt, synthetic construct
  source 1..20: mol_type = other RNA
acaggaagggagagatgcct

SEQ ID NO: 15623 - RNA, 20 nt, synthetic construct
  source 1..20: mol_type = other RNA
acaggaagttgagaaagagg

SEQ ID NO: 15624 - RNA, 20 nt, synthetic construct
  source 1..20: mol_type = other RNA
acaggacagagcagtaggct

SEQ ID NO: 15625 - RNA, 20 nt, synthetic construct
  source 1..20: mol_type = other RNA
acaggactccacagagttca

SEQ ID NO: 15626 - RNA, 20 nt, synthetic construct
  source 1..20: mol_type = other RNA
acaggactgtgtgtgtccag

SEQ ID NO: 15627 - RNA, 20 nt, synthetic construct
  source 1..20: mol_type = other RNA
acaggacttttggtacacat

SEQ ID NO: 15628 - RNA, 20 nt, synthetic construct
  source 1..20: mol_type = other RNA
acaggagaacttgtctcgga

SEQ ID NO: 15629 - RNA, 20 nt, synthetic construct
  source 1..20: mol_type = other RNA
acaggagagcgacagctacg

SEQ ID NO: 15630 - RNA, 20 nt, synthetic construct
  source 1..20: mol_type = other RNA
acaggagttaccataaaacc

SEQ ID NO: 15631 - RNA, 20 nt, synthetic construct
  source 1..20: mol_type = other RNA
acaggagttccgatttctcg

SEQ ID NO: 15632 - RNA, 20 nt, synthetic construct
  source 1..20: mol_type = other RNA
acaggatacaaaaagcacct

SEQ ID NO: 15633 - RNA, 20 nt, synthetic construct
  source 1..20: mol_type = other RNA
acaggatatcagaagtgctg

SEQ ID NO: 15634 - RNA, 20 nt, synthetic construct
  source 1..20: mol_type = other RNA
acaggatccagatgtagaga

SEQ ID NO: 15635 - RNA, 20 nt, synthetic construct
  source 1..20: mol_type = other RNA
acaggatcccggaacaggaa

SEQ ID NO: 15636 - RNA, 20 nt, synthetic construct
  source 1..20: mol_type = other RNA
acaggattacaatgtaaggt

SEQ ID NO: 15637 - RNA, 20 nt, synthetic construct
  source 1..20: mol_type = other RNA
acaggcaaccttgggagaaa

SEQ ID NO: 15638 - RNA, 20 nt, synthetic construct
  source 1..20: mol_type = other RNA
acaggcatcggccgggcgtg

SEQ ID NO: 15639 - RNA, 20 nt, synthetic construct
  source 1..20: mol_type = other RNA
acaggcatctctctaaaaac

SEQ ID NO: 15640 - RNA, 20 nt, synthetic construct
  source 1..20: mol_type = other RNA
acaggcatgagccactgcgg

SEQ ID NO: 15641 - RNA, 20 nt, synthetic construct
  source 1..20: mol_type = other RNA
acaggcatgagtcgccatac

SEQ ID NO: 15642 - RNA, 20 nt, synthetic construct
  source 1..20: mol_type = other RNA
acaggcatgcgccatcacac

SEQ ID NO: 15643 - RNA, 20 nt, synthetic construct
  source 1..20: mol_type = other RNA
acaggccctttgttagtgcc

SEQ ID NO: 15644 - RNA, 20 nt, synthetic construct
  source 1..20: mol_type = other RNA
acaggcctgagccgtcggta

SEQ ID NO: 15645 - RNA, 20 nt, synthetic construct
  source 1..20: mol_type = other RNA
acaggcgcacgccatctcgc

SEQ ID NO: 15646 - RNA, 20 nt, synthetic construct
  source 1..20: mol_type = other RNA
acaggcgtgagccacctcat

SEQ ID NO: 15647 - RNA, 20 nt, synthetic construct
  source 1..20: mol_type = other RNA
acaggcgttgagccatcatg

SEQ ID NO: 15648 - RNA, 20 nt, synthetic construct
  source 1..20: mol_type = other RNA
acaggctcaatacctgaaaa

SEQ ID NO: 15649 - RNA, 20 nt, synthetic construct
  source 1..20: mol_type = other RNA
acaggctctcttcaccaact

SEQ ID NO: 15650 - RNA, 20 nt, synthetic construct
  source 1..20: mol_type = other RNA
acaggctgaagggaggaaaa

SEQ ID NO: 15651 - RNA, 20 nt, synthetic construct
  source 1..20: mol_type = other RNA
acaggctgagtgcggtggct

SEQ ID NO: 15652 - RNA, 20 nt, synthetic construct
  source 1..20: mol_type = other RNA
acaggctttcctacaataca

SEQ ID NO: 15653 - RNA, 20 nt, synthetic construct
  source 1..20: mol_type = other RNA
acaggctttgacttctcagg

SEQ ID NO: 15654 - RNA, 20 nt, synthetic construct
  source 1..20: mol_type = other RNA
acagggaaaactacatgtaa

SEQ ID NO: 15655 - RNA, 20 nt, synthetic construct
  source 1..20: mol_type = other RNA
acagggaaccgtaacttctt

SEQ ID NO: 15656 - RNA, 20 nt, synthetic construct
  source 1..20: mol_type = other RNA
acagggaatgcccctgtagc

SEQ ID NO: 15657 - RNA, 20 nt, synthetic construct
  source 1..20: mol_type = other RNA
acagggaatggggagctaga

SEQ ID NO: 15658 - RNA, 20 nt, synthetic construct
  source 1..20: mol_type = other RNA
acagggactgatgaagaacc

SEQ ID NO: 15659 - RNA, 20 nt, synthetic construct
  source 1..20: mol_type = other RNA
acagggagatacttgattac

SEQ ID NO: 15660 - RNA, 20 nt, synthetic construct
  source 1..20: mol_type = other RNA
acagggcagggagagagaaa

SEQ ID NO: 15661 - RNA, 20 nt, synthetic construct
  source 1..20: mol_type = other RNA
acagggccactgagagctca

SEQ ID NO: 15662 - RNA, 20 nt, synthetic construct
  source 1..20: mol_type = other RNA
acagggcccagcctcaacag

SEQ ID NO: 15663 - RNA, 20 nt, synthetic construct
  source 1..20: mol_type = other RNA
acaggggacatgaaggaagg

SEQ ID NO: 15664 - RNA, 20 nt, synthetic construct
  source 1..20: mol_type = other RNA
acaggggactttgatgtttt

SEQ ID NO: 15665 - RNA, 20 nt, synthetic construct
  source 1..20: mol_type = other RNA
acaggggcattccctgtctg

SEQ ID NO: 15666 - RNA, 20 nt, synthetic construct
  source 1..20: mol_type = other RNA
acagggtaagattccgtctc

SEQ ID NO: 15667 - RNA, 20 nt, synthetic construct
  source 1..20: mol_type = other RNA
acagggtctacaaaaggttt

SEQ ID NO: 15668 - RNA, 20 nt, synthetic construct
  source 1..20: mol_type = other RNA
acagggtctcactcttacca

SEQ ID NO: 15669 - RNA, 20 nt, synthetic construct
  source 1..20: mol_type = other RNA
acagggttacagtatagggg

SEQ ID NO: 15670 - RNA, 20 nt, synthetic construct
  source 1..20: mol_type = other RNA
acagggttattaacataccg

SEQ ID NO: 15671 - RNA, 20 nt, synthetic construct
  source 1..20: mol_type = other RNA
acagggtttctgtttggatg

SEQ ID NO: 15672 - RNA, 20 nt, synthetic construct
  source 1..20: mol_type = other RNA
acagggttttgttttgtttt

SEQ ID NO: 15673 - RNA, 20 nt, synthetic construct
  source 1..20: mol_type = other RNA
acaggtagacatgagtaaaa

SEQ ID NO: 15674 - RNA, 20 nt, synthetic construct
  source 1..20: mol_type = other RNA
acaggtagacatgtgccatg

SEQ ID NO: 15675 - RNA, 20 nt, synthetic construct
  source 1..20: mol_type = other RNA
acaggtagctgctttttaaa

SEQ ID NO: 15676 - RNA, 20 nt, synthetic construct
  source 1..20: mol_type = other RNA
acaggtataaagtttccgtt

SEQ ID NO: 15677 - RNA, 20 nt, synthetic construct
  source 1..20: mol_type = other RNA
acaggtcaaactcacttatt

SEQ ID NO: 15678 - RNA, 20 nt, synthetic construct
  source 1..20: mol_type = other RNA
acaggtcacattctgcctgc

SEQ ID NO: 15679 - RNA, 20 nt, synthetic construct
  source 1..20: mol_type = other RNA
acaggtcggaaggaatgtgc

SEQ ID NO: 15680 - RNA, 20 nt, synthetic construct
  source 1..20: mol_type = other RNA
acaggtgagtggactgtgag

SEQ ID NO: 15681 - RNA, 20 nt, synthetic construct
  source 1..20: mol_type = other RNA
acaggtgcttacagactgat

SEQ ID NO: 15682 - RNA, 20 nt, synthetic construct
  source 1..20: mol_type = other RNA
acaggtggtatgggagatgt

SEQ ID NO: 15683 - RNA, 20 nt, synthetic construct
  source 1..20: mol_type = other RNA
acaggtgtaagagattaatt

SEQ ID NO: 15684 - RNA, 20 nt, synthetic construct
  source 1..20: mol_type = other RNA
acaggtgtgaaccacgcatc

SEQ ID NO: 15685 - RNA, 20 nt, synthetic construct
  source 1..20: mol_type = other RNA
acaggttcttcatcagtccc

SEQ ID NO: 15686 - RNA, 20 nt, synthetic construct
  source 1..20: mol_type = other RNA
acaggtttaataaatactag

SEQ ID NO: 15687 - RNA, 20 nt, synthetic construct
  source 1..20: mol_type = other RNA
acaggtttaggtttttcttg

SEQ ID NO: 15688 - RNA, 20 nt, synthetic construct
  source 1..20: mol_type = other RNA
acagtaaagccccattgtac

SEQ ID NO: 15689 - RNA, 20 nt, synthetic construct
  source 1..20: mol_type = other RNA
acagtaaagtcactgtggaa

SEQ ID NO: 15690 - RNA, 20 nt, synthetic construct
  source 1..20: mol_type = other RNA
acagtaagatcctggattgc

SEQ ID NO: 15691 - RNA, 20 nt, synthetic construct
  source 1..20: mol_type = other RNA
acagtaaggtttccctgggg

SEQ ID NO: 15692 - RNA, 20 nt, synthetic construct
  source 1..20: mol_type = other RNA
acagtaatcaaacagtgtga

SEQ ID NO: 15693 - RNA, 20 nt, synthetic construct
  source 1..20: mol_type = other RNA
acagtaattagttacatgag

SEQ ID NO: 15694 - RNA, 20 nt, synthetic construct
  source 1..20: mol_type = other RNA
acagtaattgtagtttccat

SEQ ID NO: 15695 - RNA, 20 nt, synthetic construct
  source 1..20: mol_type = other RNA
acagtacaaggctagagctc

SEQ ID NO: 15696 - RNA, 20 nt, synthetic construct
  source 1..20: mol_type = other RNA
acagtacagtagtaaaacca

SEQ ID NO: 15697 - RNA, 20 nt, synthetic construct
  source 1..20: mol_type = other RNA
acagtacgcttttatgttat

SEQ ID NO: 15698 - RNA, 20 nt, synthetic construct
  source 1..20: mol_type = other RNA
acagtagaagactcagcagt

SEQ ID NO: 15699 - RNA, 20 nt, synthetic construct
  source 1..20: mol_type = other RNA
acagtagccaaaggtagaaa

SEQ ID NO: 15700 - RNA, 20 nt, synthetic construct
  source 1..20: mol_type = other RNA
acagtagtaaaaccaaatgt

SEQ ID NO: 15701 - RNA, 20 nt, synthetic construct
  source 1..20: mol_type = other RNA
acagtataggggaactcttg

SEQ ID NO: 15702 - RNA, 20 nt, synthetic construct
  source 1..20: mol_type = other RNA
acagtatgcacaaataatta

SEQ ID NO: 15703 - RNA, 20 nt, synthetic construct
  source 1..20: mol_type = other RNA
acagtatgcggggtttcagc

SEQ ID NO: 15704 - RNA, 20 nt, synthetic construct
  source 1..20: mol_type = other RNA
acagtatgctgtttacatta

SEQ ID NO: 15705 - RNA, 20 nt, synthetic construct
  source 1..20: mol_type = other RNA
acagtatgtcagactcattg

SEQ ID NO: 15706 - RNA, 20 nt, synthetic construct
  source 1..20: mol_type = other RNA
acagtattacacagaaagcc

SEQ ID NO: 15707 - RNA, 20 nt, synthetic construct
  source 1..20: mol_type = other RNA
acagtattgtcttctaaccc

SEQ ID NO: 15708 - RNA, 20 nt, synthetic construct
  source 1..20: mol_type = other RNA
acagtattgtgctgaaaccc

SEQ ID NO: 15709 - RNA, 20 nt, synthetic construct
  source 1..20: mol_type = other RNA
acagtcacaaagctttaaac

SEQ ID NO: 15710 - RNA, 20 nt, synthetic construct
  source 1..20: mol_type = other RNA
acagtcacacaccactacac

SEQ ID NO: 15711 - RNA, 20 nt, synthetic construct
  source 1..20: mol_type = other RNA
acagtcatcacagtccagga

SEQ ID NO: 15712 - RNA, 20 nt, synthetic construct
  source 1..20: mol_type = other RNA
acagtcatcctcaacaagag

SEQ ID NO: 15713 - RNA, 20 nt, synthetic construct
  source 1..20: mol_type = other RNA
acagtcattcaggtctatgt

SEQ ID NO: 15714 - RNA, 20 nt, synthetic construct
  source 1..20: mol_type = other RNA
acagtccactcacctgtcat

SEQ ID NO: 15715 - RNA, 20 nt, synthetic construct
  source 1..20: mol_type = other RNA
acagtccaggaacttacagt

SEQ ID NO: 15716 - RNA, 20 nt, synthetic construct
  source 1..20: mol_type = other RNA
acagtcccttgcctgacagc

SEQ ID NO: 15717 - RNA, 20 nt, synthetic construct
  source 1..20: mol_type = other RNA
acagtcctgtgtttctgcta

SEQ ID NO: 15718 - RNA, 20 nt, synthetic construct
  source 1..20: mol_type = other RNA
acagtctcccccaggtggtt

SEQ ID NO: 15719 - RNA, 20 nt, synthetic construct
  source 1..20: mol_type = other RNA
acagtctcgaccccctgggc

SEQ ID NO: 15720 - RNA, 20 nt, synthetic construct
  source 1..20: mol_type = other RNA
acagtctcgtgaatttggta

SEQ ID NO: 15721 - RNA, 20 nt, synthetic construct
  source 1..20: mol_type = other RNA
acagtctctgcagagcaggc

SEQ ID NO: 15722 - RNA, 20 nt, synthetic construct
  source 1..20: mol_type = other RNA
acagtctgatttacttttaa

SEQ ID NO: 15723 - RNA, 20 nt, synthetic construct
  source 1..20: mol_type = other RNA
acagtctgtgcttaaggaaa

SEQ ID NO: 15724 - RNA, 20 nt, synthetic construct
  source 1..20: mol_type = other RNA
acagtgaattctgacttagt

SEQ ID NO: 15725 - RNA, 20 nt, synthetic construct
  source 1..20: mol_type = other RNA
acagtgacatatgccggctg

SEQ ID NO: 15726 - RNA, 20 nt, synthetic construct
  source 1..20: mol_type = other RNA
acagtgaccacagtttgaaa

SEQ ID NO: 15727 - RNA, 20 nt, synthetic construct
  source 1..20: mol_type = other RNA
acagtgactttactgttctc

SEQ ID NO: 15728 - RNA, 20 nt, synthetic construct
  source 1..20: mol_type = other RNA
acagtgagcatgctgcaact

SEQ ID NO: 15729 - RNA, 20 nt, synthetic construct
  source 1..20: mol_type = other RNA
acagtgaggacgctgatgac

SEQ ID NO: 15730 - RNA, 20 nt, synthetic construct
  source 1..20: mol_type = other RNA
acagtgagtagaagagtaat

SEQ ID NO: 15731 - RNA, 20 nt, synthetic construct
  source 1..20: mol_type = other RNA
acagtgcataccaccacatt

SEQ ID NO: 15732 - RNA, 20 nt, synthetic construct
  source 1..20: mol_type = other RNA
acagtgccttcagctatggt

SEQ ID NO: 15733 - RNA, 20 nt, synthetic construct
  source 1..20: mol_type = other RNA
acagtgctccatagcttcct

SEQ ID NO: 15734 - RNA, 20 nt, synthetic construct
  source 1..20: mol_type = other RNA
acagtgctgtgccagtgcaa

SEQ ID NO: 15735 - RNA, 20 nt, synthetic construct
  source 1..20: mol_type = other RNA
acagtggcacgattttggct

SEQ ID NO: 15736 - RNA, 20 nt, synthetic construct
  source 1..20: mol_type = other RNA
acagtggttaggaaaataca

SEQ ID NO: 15737 - RNA, 20 nt, synthetic construct
  source 1..20: mol_type = other RNA
acagtggttccatttgtttt

SEQ ID NO: 15738 - RNA, 20 nt, synthetic construct
  source 1..20: mol_type = other RNA
acagtgtactagtctccata

SEQ ID NO: 15739 - RNA, 20 nt, synthetic construct
  source 1..20: mol_type = other RNA
acagtgttgagaaagcacat

SEQ ID NO: 15740 - RNA, 20 nt, synthetic construct
  source 1..20: mol_type = other RNA
acagtgtttacacacctgaa

SEQ ID NO: 15741 - RNA, 20 nt, synthetic construct
  source 1..20: mol_type = other RNA
acagtgtttagggacgaatg

SEQ ID NO: 15742 - RNA, 20 nt, synthetic construct
  source 1..20: mol_type = other RNA
acagtgtttttgaattctgc

SEQ ID NO: 15743 - RNA, 20 nt, synthetic construct
  source 1..20: mol_type = other RNA
acagttaacaatactgcatt

SEQ ID NO: 15744 - RNA, 20 nt, synthetic construct
  source 1..20: mol_type = other RNA
acagttaacgtatgaataaa

SEQ ID NO: 15745 - RNA, 20 nt, synthetic construct
  source 1..20: mol_type = other RNA
acagttactctaaaagaata

SEQ ID NO: 15746 - RNA, 20 nt, synthetic construct
  source 1..20: mol_type = other RNA
acagttactttcctttttca

SEQ ID NO: 15747 - RNA, 20 nt, synthetic construct
  source 1..20: mol_type = other RNA
acagttatgtcagtcaacac

SEQ ID NO: 15748 - RNA, 20 nt, synthetic construct
  source 1..20: mol_type = other RNA
acagttattcttcagcaagg

SEQ ID NO: 15749 - RNA, 20 nt, synthetic construct
  source 1..20: mol_type = other RNA
acagttcaatactactgcaa

SEQ ID NO: 15750 - RNA, 20 nt, synthetic construct
  source 1..20: mol_type = other RNA
acagttctagttctaataaa

SEQ ID NO: 15751 - RNA, 20 nt, synthetic construct
  source 1..20: mol_type = other RNA
acagttctatttctttccat

SEQ ID NO: 15752 - RNA, 20 nt, synthetic construct
  source 1..20: mol_type = other RNA
acagttctgtgaatttgatt

SEQ ID NO: 15753 - RNA, 20 nt, synthetic construct
  source 1..20: mol_type = other RNA
acagttcttaagttaaaact

SEQ ID NO: 15754 - RNA, 20 nt, synthetic construct
  source 1..20: mol_type = other RNA
acagttgctattcaacaggt

SEQ ID NO: 15755 - RNA, 20 nt, synthetic construct
  source 1..20: mol_type = other RNA
acagttggaactcttgcggt

SEQ ID NO: 15756 - RNA, 20 nt, synthetic construct
  source 1..20: mol_type = other RNA
acagttggccttgaggtgag

SEQ ID NO: 15757 - RNA, 20 nt, synthetic construct
  source 1..20: mol_type = other RNA
acagtttaaaagtaaattcg

SEQ ID NO: 15758 - RNA, 20 nt, synthetic construct
  source 1..20: mol_type = other RNA
acagtttacacgccttcgcg

SEQ ID NO: 15759 - RNA, 20 nt, synthetic construct
  source 1..20: mol_type = other RNA
acagtttagcaatccaagga

SEQ ID NO: 15760 - RNA, 20 nt, synthetic construct
  source 1..20: mol_type = other RNA
acagtttccctctgagagaa

SEQ ID NO: 15761 - RNA, 20 nt, synthetic construct
  source 1..20: mol_type = other RNA
acagtttgaaactttaagag

SEQ ID NO: 15762 - RNA, 20 nt, synthetic construct
  source 1..20: mol_type = other RNA
acagtttgagaagccacaca

SEQ ID NO: 15763 - RNA, 20 nt, synthetic construct
  source 1..20: mol_type = other RNA
acagtttggcaatttctcaa

SEQ ID NO: 15764 - RNA, 20 nt, synthetic construct
  source 1..20: mol_type = other RNA
acagttttgaccaaaacaaa

SEQ ID NO: 15765 - RNA, 20 nt, synthetic construct
  source 1..20: mol_type = other RNA
acagtttttacatgtagttt

SEQ ID NO: 15766 - RNA, 20 nt, synthetic construct
  source 1..20: mol_type = other RNA
acataaaaaaggaatctggg

SEQ ID NO: 15767 - RNA, 20 nt, synthetic construct
  source 1..20: mol_type = other RNA
acataaaagcgtactgtgat

SEQ ID NO: 15768 - RNA, 20 nt, synthetic construct
  source 1..20: mol_type = other RNA
acataaaaggatatgggcca

SEQ ID NO: 15769 - RNA, 20 nt, synthetic construct
  source 1..20: mol_type = other RNA
acataaagtcttgctggaag

SEQ ID NO: 15770 - RNA, 20 nt, synthetic construct
  source 1..20: mol_type = other RNA
acataaatagggtgctactc

SEQ ID NO: 15771 - RNA, 20 nt, synthetic construct
  source 1..20: mol_type = other RNA
acataaatcacaggaaagat

SEQ ID NO: 15772 - RNA, 20 nt, synthetic construct
  source 1..20: mol_type = other RNA
acataaatttgccacatttt

SEQ ID NO: 15773 - RNA, 20 nt, synthetic construct
  source 1..20: mol_type = other RNA
acataactgtaaagtaatca

SEQ ID NO: 15774 - RNA, 20 nt, synthetic construct
  source 1..20: mol_type = other RNA
acataacttcccagacaggg

SEQ ID NO: 15775 - RNA, 20 nt, synthetic construct
  source 1..20: mol_type = other RNA
acataagggggaatctactc

SEQ ID NO: 15776 - RNA, 20 nt, synthetic construct
  source 1..20: mol_type = other RNA
acataagggtctgttttaca

SEQ ID NO: 15777 - RNA, 20 nt, synthetic construct
  source 1..20: mol_type = other RNA
acataaggtatatttctgta

SEQ ID NO: 15778 - RNA, 20 nt, synthetic construct
  source 1..20: mol_type = other RNA
acataatcaaattcacagaa

SEQ ID NO: 15779 - RNA, 20 nt, synthetic construct
  source 1..20: mol_type = other RNA
acataatctttggtgctgat

SEQ ID NO: 15780 - RNA, 20 nt, synthetic construct
  source 1..20: mol_type = other RNA
acataattgaacccactgag

SEQ ID NO: 15781 - RNA, 20 nt, synthetic construct
  source 1..20: mol_type = other RNA
acatacaaaccaaaaaatgt

SEQ ID NO: 15782 - RNA, 20 nt, synthetic construct
  source 1..20: mol_type = other RNA
acatacacagggaaaactac

SEQ ID NO: 15783 - RNA, 20 nt, synthetic construct
  source 1..20: mol_type = other RNA
acatacacatcagattttga

SEQ ID NO: 15784 - RNA, 20 nt, synthetic construct
  source 1..20: mol_type = other RNA
acatacatgagaaatgttaa

SEQ ID NO: 15785 - RNA, 20 nt, synthetic construct
  source 1..20: mol_type = other RNA
acatacatgttcagttataa

SEQ ID NO: 15786 - RNA, 20 nt, synthetic construct
  source 1..20: mol_type = other RNA
acataccaaaacccttggga

SEQ ID NO: 15787 - RNA, 20 nt, synthetic construct
  source 1..20: mol_type = other RNA
acataccccaaccctaccta

SEQ ID NO: 15788 - RNA, 20 nt, synthetic construct
  source 1..20: mol_type = other RNA
acataccgacggctcaggcc

SEQ ID NO: 15789 - RNA, 20 nt, synthetic construct
  source 1..20: mol_type = other RNA
acatactgaaagacagacct

SEQ ID NO: 15790 - RNA, 20 nt, synthetic construct
  source 1..20: mol_type = other RNA
acatactgcactctcaaaat

SEQ ID NO: 15791 - RNA, 20 nt, synthetic construct
  source 1..20: mol_type = other RNA
acatactgcatattgaagcc

SEQ ID NO: 15792 - RNA, 20 nt, synthetic construct
  source 1..20: mol_type = other RNA
acatactgtcacaggctttc

SEQ ID NO: 15793 - RNA, 20 nt, synthetic construct
  source 1..20: mol_type = other RNA
acatacttcaaagggtcact

SEQ ID NO: 15794 - RNA, 20 nt, synthetic construct
  source 1..20: mol_type = other RNA
acatagaagcgctcttcaag

SEQ ID NO: 15795 - RNA, 20 nt, synthetic construct
  source 1..20: mol_type = other RNA
acatagacctgaatgactgt

SEQ ID NO: 15796 - RNA, 20 nt, synthetic construct
  source 1..20: mol_type = other RNA
acatagatgaaactaaatgt

SEQ ID NO: 15797 - RNA, 20 nt, synthetic construct
  source 1..20: mol_type = other RNA
acatagcaaggaagcagaat

SEQ ID NO: 15798 - RNA, 20 nt, synthetic construct
  source 1..20: mol_type = other RNA
acataggatagttaaacatg

SEQ ID NO: 15799 - RNA, 20 nt, synthetic construct
  source 1..20: mol_type = other RNA
acataggcttagtacagcca

SEQ ID NO: 15800 - RNA, 20 nt, synthetic construct
  source 1..20: mol_type = other RNA
acatagtccactttccatct

SEQ ID NO: 15801 - RNA, 20 nt, synthetic construct
  source 1..20: mol_type = other RNA
acatagtgctcttctgatca

SEQ ID NO: 15802 - RNA, 20 nt, synthetic construct
  source 1..20: mol_type = other RNA
acatataatccaactgcagt

SEQ ID NO: 15803 - RNA, 20 nt, synthetic construct
  source 1..20: mol_type = other RNA
acatatagaagtaaatcccg

SEQ ID NO: 15804 - RNA, 20 nt, synthetic construct
  source 1..20: mol_type = other RNA
acatatcagggatcacagat

SEQ ID NO: 15805 - RNA, 20 nt, synthetic construct
  source 1..20: mol_type = other RNA
acatatccttctacatcccc

SEQ ID NO: 15806 - RNA, 20 nt, synthetic construct
  source 1..20: mol_type = other RNA
acatatctaattaacatcca

SEQ ID NO: 15807 - RNA, 20 nt, synthetic construct
  source 1..20: mol_type = other RNA
acatatctttaggtgttttt

SEQ ID NO: 15808 - RNA, 20 nt, synthetic construct
  source 1..20: mol_type = other RNA
acatatgcaggaccaacttt

SEQ ID NO: 15809 - RNA, 20 nt, synthetic construct
  source 1..20: mol_type = other RNA
acatatgcatgttatttggg

SEQ ID NO: 15810 - RNA, 20 nt, synthetic construct
  source 1..20: mol_type = other RNA
acatatgccggctgttaggt

SEQ ID NO: 15811 - RNA, 20 nt, synthetic construct
  source 1..20: mol_type = other RNA
acatatggcaattccataaa

SEQ ID NO: 15812 - RNA, 20 nt, synthetic construct
  source 1..20: mol_type = other RNA
acatatgtcagatggtaaat

SEQ ID NO: 15813 - RNA, 20 nt, synthetic construct
  source 1..20: mol_type = other RNA
acatatgttttgcttcgaag

SEQ ID NO: 15814 - RNA, 20 nt, synthetic construct
  source 1..20: mol_type = other RNA
acatattgaataatttccag

SEQ ID NO: 15815 - RNA, 20 nt, synthetic construct
  source 1..20: mol_type = other RNA
acatatttatcaacacatag

SEQ ID NO: 15816 - RNA, 20 nt, synthetic construct
  source 1..20: mol_type = other RNA
acatatttatttccttaagc

SEQ ID NO: 15817 - RNA, 20 nt, synthetic construct
  source 1..20: mol_type = other RNA
acatattttaaaagtcagct

SEQ ID NO: 15818 - RNA, 20 nt, synthetic construct
  source 1..20: mol_type = other RNA
acatattttatgctttgtct

SEQ ID NO: 15819 - RNA, 20 nt, synthetic construct
  source 1..20: mol_type = other RNA
acatattttgtaacgtgtat

SEQ ID NO: 15820 - RNA, 20 nt, synthetic construct
  source 1..20: mol_type = other RNA
acatcaaagtcccctgtaat

SEQ ID NO: 15821 - RNA, 20 nt, synthetic construct
  source 1..20: mol_type = other RNA
acatcaagggtggtgctgga

SEQ ID NO: 15822 - RNA, 20 nt, synthetic construct
  source 1..20: mol_type = other RNA
acatcacaatgcgtttgtta

SEQ ID NO: 15823 - RNA, 20 nt, synthetic construct
  source 1..20: mol_type = other RNA
acatcacagacagggaatgg

SEQ ID NO: 15824 - RNA, 20 nt, synthetic construct
  source 1..20: mol_type = other RNA
acatcacccagctcgaccag

SEQ ID NO: 15825 - RNA, 20 nt, synthetic construct
  source 1..20: mol_type = other RNA
acatcactaagagtgaaaag

SEQ ID NO: 15826 - RNA, 20 nt, synthetic construct
  source 1..20: mol_type = other RNA
acatcactagctattagaga

SEQ ID NO: 15827 - RNA, 20 nt, synthetic construct
  source 1..20: mol_type = other RNA
acatcagacacctacattaa

SEQ ID NO: 15828 - RNA, 20 nt, synthetic construct
  source 1..20: mol_type = other RNA
acatcagattttgaagattt

SEQ ID NO: 15829 - RNA, 20 nt, synthetic construct
  source 1..20: mol_type = other RNA
acatcagcagtgaccatatt

SEQ ID NO: 15830 - RNA, 20 nt, synthetic construct
  source 1..20: mol_type = other RNA
acatcagcgctaagtgcatt

SEQ ID NO: 15831 - RNA, 20 nt, synthetic construct
  source 1..20: mol_type = other RNA
acatcagtgctgctctgacg

SEQ ID NO: 15832 - RNA, 20 nt, synthetic construct
  source 1..20: mol_type = other RNA
acatcagttaccaccaagaa

SEQ ID NO: 15833 - RNA, 20 nt, synthetic construct
  source 1..20: mol_type = other RNA
acatcatctaatttcccatt

SEQ ID NO: 15834 - RNA, 20 nt, synthetic construct
  source 1..20: mol_type = other RNA
acatcatgatttaatagagg

SEQ ID NO: 15835 - RNA, 20 nt, synthetic construct
  source 1..20: mol_type = other RNA
acatccacaacattgtgcaa

SEQ ID NO: 15836 - RNA, 20 nt, synthetic construct
  source 1..20: mol_type = other RNA
acatccacagctttcttttc

SEQ ID NO: 15837 - RNA, 20 nt, synthetic construct
  source 1..20: mol_type = other RNA
acatccacgcgtaagggtac

SEQ ID NO: 15838 - RNA, 20 nt, synthetic construct
  source 1..20: mol_type = other RNA
acatccagaagtcacttttt

SEQ ID NO: 15839 - RNA, 20 nt, synthetic construct
  source 1..20: mol_type = other RNA
acatccagctaattttcatt

SEQ ID NO: 15840 - RNA, 20 nt, synthetic construct
  source 1..20: mol_type = other RNA
acatccattactcgtggtta

SEQ ID NO: 15841 - RNA, 20 nt, synthetic construct
  source 1..20: mol_type = other RNA
acatcccaagtgcccattaa

SEQ ID NO: 15842 - RNA, 20 nt, synthetic construct
  source 1..20: mol_type = other RNA
acatccccccacccctgctc

SEQ ID NO: 15843 - RNA, 20 nt, synthetic construct
  source 1..20: mol_type = other RNA
acatccctatgcaataactc

SEQ ID NO: 15844 - RNA, 20 nt, synthetic construct
  source 1..20: mol_type = other RNA
acatcctaatacagtaaagc

SEQ ID NO: 15845 - RNA, 20 nt, synthetic construct
  source 1..20: mol_type = other RNA
acatcctgatttaggccact

SEQ ID NO: 15846 - RNA, 20 nt, synthetic construct
  source 1..20: mol_type = other RNA
acatccttgccaacagttac

SEQ ID NO: 15847 - RNA, 20 nt, synthetic construct
  source 1..20: mol_type = other RNA
acatcctttaatttgggttt

SEQ ID NO: 15848 - RNA, 20 nt, synthetic construct
  source 1..20: mol_type = other RNA
acatcctttgcgtctgtgat

SEQ ID NO: 15849 - RNA, 20 nt, synthetic construct
  source 1..20: mol_type = other RNA
acatcgtaaaacctcatctc

SEQ ID NO: 15850 - RNA, 20 nt, synthetic construct
  source 1..20: mol_type = other RNA
acatctatgaagtaattgtt

SEQ ID NO: 15851 - RNA, 20 nt, synthetic construct
  source 1..20: mol_type = other RNA
acatctcccataccacctgt

SEQ ID NO: 15852 - RNA, 20 nt, synthetic construct
  source 1..20: mol_type = other RNA
acatctgagacatcacaatg

SEQ ID NO: 15853 - RNA, 20 nt, synthetic construct
  source 1..20: mol_type = other RNA
acatctgcctcccgggtcca

SEQ ID NO: 15854 - RNA, 20 nt, synthetic construct
  source 1..20: mol_type = other RNA
acatctggaaggaaacacta

SEQ ID NO: 15855 - RNA, 20 nt, synthetic construct
  source 1..20: mol_type = other RNA
acatctggatcctgtctcag

SEQ ID NO: 15856 - RNA, 20 nt, synthetic construct
  source 1..20: mol_type = other RNA
acatctggcagcaggggcta

SEQ ID NO: 15857 - RNA, 20 nt, synthetic construct
  source 1..20: mol_type = other RNA
acatctgtcttgtgcatcct

SEQ ID NO: 15858 - RNA, 20 nt, synthetic construct
  source 1..20: mol_type = other RNA
acatcttgcataactcgtaa

SEQ ID NO: 15859 - RNA, 20 nt, synthetic construct
  source 1..20: mol_type = other RNA
acatctttcctgtgatttat

SEQ ID NO: 15860 - RNA, 20 nt, synthetic construct
  source 1..20: mol_type = other RNA
acatgaaatactcaaactat

SEQ ID NO: 15861 - RNA, 20 nt, synthetic construct
  source 1..20: mol_type = other RNA
acatgaacaagttacaaaca

SEQ ID NO: 15862 - RNA, 20 nt, synthetic construct
  source 1..20: mol_type = other RNA
acatgaacaatccttctaat

SEQ ID NO: 15863 - RNA, 20 nt, synthetic construct
  source 1..20: mol_type = other RNA
acatgaacctgcatggtgta

SEQ ID NO: 15864 - RNA, 20 nt, synthetic construct
  source 1..20: mol_type = other RNA
acatgaacgagaacaaaaca

SEQ ID NO: 15865 - RNA, 20 nt, synthetic construct
  source 1..20: mol_type = other RNA
acatgaactactcaaagaaa

SEQ ID NO: 15866 - RNA, 20 nt, synthetic construct
  source 1..20: mol_type = other RNA
acatgaaggaaggattggaa

SEQ ID NO: 15867 - RNA, 20 nt, synthetic construct
  source 1..20: mol_type = other RNA
acatgaagtcctcaatcatg

SEQ ID NO: 15868 - RNA, 20 nt, synthetic construct
  source 1..20: mol_type = other RNA
acatgaataaccaatgtcag

SEQ ID NO: 15869 - RNA, 20 nt, synthetic construct
  source 1..20: mol_type = other RNA
acatgaatggaaaattcttg

SEQ ID NO: 15870 - RNA, 20 nt, synthetic construct
  source 1..20: mol_type = other RNA
acatgacagatcccaaaaag

SEQ ID NO: 15871 - RNA, 20 nt, synthetic construct
  source 1..20: mol_type = other RNA
acatgacaggtgagtggact

SEQ ID NO: 15872 - RNA, 20 nt, synthetic construct
  source 1..20: mol_type = other RNA
acatgacatggttttcctac

SEQ ID NO: 15873 - RNA, 20 nt, synthetic construct
  source 1..20: mol_type = other RNA
acatgacctatctattaaca

SEQ ID NO: 15874 - RNA, 20 nt, synthetic construct
  source 1..20: mol_type = other RNA
acatgactggccatccttcc

SEQ ID NO: 15875 - RNA, 20 nt, synthetic construct
  source 1..20: mol_type = other RNA
acatgagaaatgttaagatt

SEQ ID NO: 15876 - RNA, 20 nt, synthetic construct
  source 1..20: mol_type = other RNA
acatgagagaaaattgttca

SEQ ID NO: 15877 - RNA, 20 nt, synthetic construct
  source 1..20: mol_type = other RNA
acatgagagctaagggaagt

SEQ ID NO: 15878 - RNA, 20 nt, synthetic construct
  source 1..20: mol_type = other RNA
acatgaggaaagcaggttgc

SEQ ID NO: 15879 - RNA, 20 nt, synthetic construct
  source 1..20: mol_type = other RNA
acatgaggcctctccccttg

SEQ ID NO: 15880 - RNA, 20 nt, synthetic construct
  source 1..20: mol_type = other RNA
acatgaggtcacccaagcca

SEQ ID NO: 15881 - RNA, 20 nt, synthetic construct
  source 1..20: mol_type = other RNA
acatgagtaaaaagaaatct

SEQ ID NO: 15882 - RNA, 20 nt, synthetic construct
  source 1..20: mol_type = other RNA
acatgataaatacgtatatg

SEQ ID NO: 15883 - RNA, 20 nt, synthetic construct
  source 1..20: mol_type = other RNA
acatgattgaggacttcatg

SEQ ID NO: 15884 - RNA, 20 nt, synthetic construct
  source 1..20: mol_type = other RNA
acatgattgggtcaacaaac

SEQ ID NO: 15885 - RNA, 20 nt, synthetic construct
  source 1..20: mol_type = other RNA
acatgcacaaggtcaagagc

SEQ ID NO: 15886 - RNA, 20 nt, synthetic construct
  source 1..20: mol_type = other RNA
acatgcacactagacctttc

SEQ ID NO: 15887 - RNA, 20 nt, synthetic construct
  source 1..20: mol_type = other RNA
acatgcacgagaaaagcaca

SEQ ID NO: 15888 - RNA, 20 nt, synthetic construct
  source 1..20: mol_type = other RNA
acatgcatatgtttgtaact

SEQ ID NO: 15889 - RNA, 20 nt, synthetic construct
  source 1..20: mol_type = other RNA
acatgcatgcacacagaggg

SEQ ID NO: 15890 - RNA, 20 nt, synthetic construct
  source 1..20: mol_type = other RNA
acatgccacaccacatccag

SEQ ID NO: 15891 - RNA, 20 nt, synthetic construct
  source 1..20: mol_type = other RNA
acatgccagctttggctgaa

SEQ ID NO: 15892 - RNA, 20 nt, synthetic construct
  source 1..20: mol_type = other RNA
acatgctaagtgtttaggat

SEQ ID NO: 15893 - RNA, 20 nt, synthetic construct
  source 1..20: mol_type = other RNA
acatgctctgataggataat

SEQ ID NO: 15894 - RNA, 20 nt, synthetic construct
  source 1..20: mol_type = other RNA
acatgctcttaagtattttt

SEQ ID NO: 15895 - RNA, 20 nt, synthetic construct
  source 1..20: mol_type = other RNA
acatgctgaggccccagggg

SEQ ID NO: 15896 - RNA, 20 nt, synthetic construct
  source 1..20: mol_type = other RNA
acatgcttagccttccagag

SEQ ID NO: 15897 - RNA, 20 nt, synthetic construct
  source 1..20: mol_type = other RNA
acatgcttccaaaagcaggc

SEQ ID NO: 15898 - RNA, 20 nt, synthetic construct
  source 1..20: mol_type = other RNA
acatggagacagtgagcatg

SEQ ID NO: 15899 - RNA, 20 nt, synthetic construct
  source 1..20: mol_type = other RNA
acatggatatttggccgggc

SEQ ID NO: 15900 - RNA, 20 nt, synthetic construct
  source 1..20: mol_type = other RNA
acatggcacatgtctacctg

SEQ ID NO: 15901 - RNA, 20 nt, synthetic construct
  source 1..20: mol_type = other RNA
acatggcatcggggcctaca

SEQ ID NO: 15902 - RNA, 20 nt, synthetic construct
  source 1..20: mol_type = other RNA
acatggccagtatctccttt

SEQ ID NO: 15903 - RNA, 20 nt, synthetic construct
  source 1..20: mol_type = other RNA
acatggcttagaaatgaaga

SEQ ID NO: 15904 - RNA, 20 nt, synthetic construct
  source 1..20: mol_type = other RNA
acatgggaatgcatatatct

SEQ ID NO: 15905 - RNA, 20 nt, synthetic construct
  source 1..20: mol_type = other RNA
acatgggcatgggtccaaga

SEQ ID NO: 15906 - RNA, 20 nt, synthetic construct
  source 1..20: mol_type = other RNA
acatgggctaaataaaacat

SEQ ID NO: 15907 - RNA, 20 nt, synthetic construct
  source 1..20: mol_type = other RNA
acatggggcattaatttttt

SEQ ID NO: 15908 - RNA, 20 nt, synthetic construct
  source 1..20: mol_type = other RNA
acatggtaatttgtccatct

SEQ ID NO: 15909 - RNA, 20 nt, synthetic construct
  source 1..20: mol_type = other RNA
acatggtagaccatataatc

SEQ ID NO: 15910 - RNA, 20 nt, synthetic construct
  source 1..20: mol_type = other RNA
acatggtccacagaggcttt

SEQ ID NO: 15911 - RNA, 20 nt, synthetic construct
  source 1..20: mol_type = other RNA
acatggtgataactggtgct

SEQ ID NO: 15912 - RNA, 20 nt, synthetic construct
  source 1..20: mol_type = other RNA
acatggttctgtgctagatg

SEQ ID NO: 15913 - RNA, 20 nt, synthetic construct
  source 1..20: mol_type = other RNA
acatggtttgatcccactag

SEQ ID NO: 15914 - RNA, 20 nt, synthetic construct
  source 1..20: mol_type = other RNA
acatggttttcctactaaca

SEQ ID NO: 15915 - RNA, 20 nt, synthetic construct
  source 1..20: mol_type = other RNA
acatgtaaaaactgtttggc

SEQ ID NO: 15916 - RNA, 20 nt, synthetic construct
  source 1..20: mol_type = other RNA
acatgtaaaacagaccctta

SEQ ID NO: 15917 - RNA, 20 nt, synthetic construct
  source 1..20: mol_type = other RNA
acatgtacgccaattttcat

SEQ ID NO: 15918 - RNA, 20 nt, synthetic construct
  source 1..20: mol_type = other RNA
acatgtagatatgggagtcc

SEQ ID NO: 15919 - RNA, 20 nt, synthetic construct
  source 1..20: mol_type = other RNA
acatgtagttttccctgtgt

SEQ ID NO: 15920 - RNA, 20 nt, synthetic construct
  source 1..20: mol_type = other RNA
acatgtatgtttctcattct

SEQ ID NO: 15921 - RNA, 20 nt, synthetic construct
  source 1..20: mol_type = other RNA
acatgtcagccacaagacat

SEQ ID NO: 15922 - RNA, 20 nt, synthetic construct
  source 1..20: mol_type = other RNA
acatgtcatgggccgggcgt

SEQ ID NO: 15923 - RNA, 20 nt, synthetic construct
  source 1..20: mol_type = other RNA
acatgtcatgttcccggatt

SEQ ID NO: 15924 - RNA, 20 nt, synthetic construct
  source 1..20: mol_type = other RNA
acatgtcttggtgtgctctt

SEQ ID NO: 15925 - RNA, 20 nt, synthetic construct
  source 1..20: mol_type = other RNA
acatgtgaggatttatttct

SEQ ID NO: 15926 - RNA, 20 nt, synthetic construct
  source 1..20: mol_type = other RNA
acatgtggaacataatcttt

SEQ ID NO: 15927 - RNA, 20 nt, synthetic construct
  source 1..20: mol_type = other RNA
acatgtggcttgtggctaca

SEQ ID NO: 15928 - RNA, 20 nt, synthetic construct
  source 1..20: mol_type = other RNA
acatgtggttattgagtctg

SEQ ID NO: 15929 - RNA, 20 nt, synthetic construct
  source 1..20: mol_type = other RNA
acatgtgtaaaacatctgga

SEQ ID NO: 15930 - RNA, 20 nt, synthetic construct
  source 1..20: mol_type = other RNA
acatgtgtatttagggagca

SEQ ID NO: 15931 - RNA, 20 nt, synthetic construct
  source 1..20: mol_type = other RNA
acatgtgttttatttaggcc

SEQ ID NO: 15932 - RNA, 20 nt, synthetic construct
  source 1..20: mol_type = other RNA
acatgttactcattatggtt

SEQ ID NO: 15933 - RNA, 20 nt, synthetic construct
  source 1..20: mol_type = other RNA
acatgttagattaggaaaca

SEQ ID NO: 15934 - RNA, 20 nt, synthetic construct
  source 1..20: mol_type = other RNA
acatgttaggttgaaagttc

SEQ ID NO: 15935 - RNA, 20 nt, synthetic construct
  source 1..20: mol_type = other RNA
acatgttcagttataaaaga

SEQ ID NO: 15936 - RNA, 20 nt, synthetic construct
  source 1..20: mol_type = other RNA
acatgttccctagaacttaa

SEQ ID NO: 15937 - RNA, 20 nt, synthetic construct
  source 1..20: mol_type = other RNA
acatgttgagtcttgtttac

SEQ ID NO: 15938 - RNA, 20 nt, synthetic construct
  source 1..20: mol_type = other RNA
acatgttgtgtagaaatgtg

SEQ ID NO: 15939 - RNA, 20 nt, synthetic construct
  source 1..20: mol_type = other RNA
acatgtttaactatcctatg

SEQ ID NO: 15940 - RNA, 20 nt, synthetic construct
  source 1..20: mol_type = other RNA
acatgtttagcaagattact

SEQ ID NO: 15941 - RNA, 20 nt, synthetic construct
  source 1..20: mol_type = other RNA
acatgtttggtcaattgatc

SEQ ID NO: 15942 - RNA, 20 nt, synthetic construct
  source 1..20: mol_type = other RNA
acatgttttatttctgtatc

SEQ ID NO: 15943 - RNA, 20 nt, synthetic construct
  source 1..20: mol_type = other RNA
acatgttttcaaatgctata

SEQ ID NO: 15944 - RNA, 20 nt, synthetic construct
  source 1..20: mol_type = other RNA
acattaaagacagctactaa

SEQ ID NO: 15945 - RNA, 20 nt, synthetic construct
  source 1..20: mol_type = other RNA
acattaaataagggcatttt

SEQ ID NO: 15946 - RNA, 20 nt, synthetic construct
  source 1..20: mol_type = other RNA
acattaactatggacatgag

SEQ ID NO: 15947 - RNA, 20 nt, synthetic construct
  source 1..20: mol_type = other RNA
acattaaggaagaattaaca

SEQ ID NO: 15948 - RNA, 20 nt, synthetic construct
  source 1..20: mol_type = other RNA
acattaagggaaacagggtt

SEQ ID NO: 15949 - RNA, 20 nt, synthetic construct
  source 1..20: mol_type = other RNA
acattaataagatcatacac

SEQ ID NO: 15950 - RNA, 20 nt, synthetic construct
  source 1..20: mol_type = other RNA
acattaatctcatccacaat

SEQ ID NO: 15951 - RNA, 20 nt, synthetic construct
  source 1..20: mol_type = other RNA
acattacaacagcaaggctc

SEQ ID NO: 15952 - RNA, 20 nt, synthetic construct
  source 1..20: mol_type = other RNA
acattacaattgataccatg

SEQ ID NO: 15953 - RNA, 20 nt, synthetic construct
  source 1..20: mol_type = other RNA
acattacagaaaaaattagc

SEQ ID NO: 15954 - RNA, 20 nt, synthetic construct
  source 1..20: mol_type = other RNA
acattaccaataaaagcctc

SEQ ID NO: 15955 - RNA, 20 nt, synthetic construct
  source 1..20: mol_type = other RNA
acattagaatcatccgggga

SEQ ID NO: 15956 - RNA, 20 nt, synthetic construct
  source 1..20: mol_type = other RNA
acattagagaagaatgagaa

SEQ ID NO: 15957 - RNA, 20 nt, synthetic construct
  source 1..20: mol_type = other RNA
acattagccactctgaattc

SEQ ID NO: 15958 - RNA, 20 nt, synthetic construct
  source 1..20: mol_type = other RNA
acattagcctagacctcaaa

SEQ ID NO: 15959 - RNA, 20 nt, synthetic construct
  source 1..20: mol_type = other RNA
acattaggctctgggtcaga

SEQ ID NO: 15960 - RNA, 20 nt, synthetic construct
  source 1..20: mol_type = other RNA
acattagtggaaaaactgca

SEQ ID NO: 15961 - RNA, 20 nt, synthetic construct
  source 1..20: mol_type = other RNA
acattagtggtggtagtaag

SEQ ID NO: 15962 - RNA, 20 nt, synthetic construct
  source 1..20: mol_type = other RNA
acattatatttcacaacgat

SEQ ID NO: 15963 - RNA, 20 nt, synthetic construct
  source 1..20: mol_type = other RNA
acattatcctatcagagcat

SEQ ID NO: 15964 - RNA, 20 nt, synthetic construct
  source 1..20: mol_type = other RNA
acattatcttctaccttttg

SEQ ID NO: 15965 - RNA, 20 nt, synthetic construct
  source 1..20: mol_type = other RNA
acattattcttacagtgaca

SEQ ID NO: 15966 - RNA, 20 nt, synthetic construct
  source 1..20: mol_type = other RNA
acattattttctttgagtag

SEQ ID NO: 15967 - RNA, 20 nt, synthetic construct
  source 1..20: mol_type = other RNA
acattcaaaattgttctaac

SEQ ID NO: 15968 - RNA, 20 nt, synthetic construct
  source 1..20: mol_type = other RNA
acattcaacaacatggatga

SEQ ID NO: 15969 - RNA, 20 nt, synthetic construct
  source 1..20: mol_type = other RNA
acattcaagcagaaatgagt

SEQ ID NO: 15970 - RNA, 20 nt, synthetic construct
  source 1..20: mol_type = other RNA
acattcacagcgtgcacctt

SEQ ID NO: 15971 - RNA, 20 nt, synthetic construct
  source 1..20: mol_type = other RNA
acattcagaggtatttgggg

SEQ ID NO: 15972 - RNA, 20 nt, synthetic construct
  source 1..20: mol_type = other RNA
acattcatccctctaaatag

SEQ ID NO: 15973 - RNA, 20 nt, synthetic construct
  source 1..20: mol_type = other RNA
acattcattcatgacaagaa

SEQ ID NO: 15974 - RNA, 20 nt, synthetic construct
  source 1..20: mol_type = other RNA
acattccaagagaggaataa

SEQ ID NO: 15975 - RNA, 20 nt, synthetic construct
  source 1..20: mol_type = other RNA
acattccagaccagcagttc

SEQ ID NO: 15976 - RNA, 20 nt, synthetic construct
  source 1..20: mol_type = other RNA
acattcccaaatgtcttaag

SEQ ID NO: 15977 - RNA, 20 nt, synthetic construct
  source 1..20: mol_type = other RNA
acattccttccgacctgtag

SEQ ID NO: 15978 - RNA, 20 nt, synthetic construct
  source 1..20: mol_type = other RNA
acattccttcttcacacatt

SEQ ID NO: 15979 - RNA, 20 nt, synthetic construct
  source 1..20: mol_type = other RNA
acattcggccaagatctgtt

SEQ ID NO: 15980 - RNA, 20 nt, synthetic construct
  source 1..20: mol_type = other RNA
acattctacagtattacaca

SEQ ID NO: 15981 - RNA, 20 nt, synthetic construct
  source 1..20: mol_type = other RNA
acattctagtgatgggagat

SEQ ID NO: 15982 - RNA, 20 nt, synthetic construct
  source 1..20: mol_type = other RNA
acattctgcctgcagactgc

SEQ ID NO: 15983 - RNA, 20 nt, synthetic construct
  source 1..20: mol_type = other RNA
acattctgcttccttgctat

SEQ ID NO: 15984 - RNA, 20 nt, synthetic construct
  source 1..20: mol_type = other RNA
acattctgtagaagtaaata

SEQ ID NO: 15985 - RNA, 20 nt, synthetic construct
  source 1..20: mol_type = other RNA
acattcttaccttctaaaat

SEQ ID NO: 15986 - RNA, 20 nt, synthetic construct
  source 1..20: mol_type = other RNA
acattcttcaccattccagc

SEQ ID NO: 15987 - RNA, 20 nt, synthetic construct
  source 1..20: mol_type = other RNA
acattgaaggcagaattata

SEQ ID NO: 15988 - RNA, 20 nt, synthetic construct
  source 1..20: mol_type = other RNA
acattgagtttcaatgactt

SEQ ID NO: 15989 - RNA, 20 nt, synthetic construct
  source 1..20: mol_type = other RNA
acattgatacaatacttgga

SEQ ID NO: 15990 - RNA, 20 nt, synthetic construct
  source 1..20: mol_type = other RNA
acattgcacagtctccccca

SEQ ID NO: 15991 - RNA, 20 nt, synthetic construct
  source 1..20: mol_type = other RNA
acattgcctccatatgggat

SEQ ID NO: 15992 - RNA, 20 nt, synthetic construct
  source 1..20: mol_type = other RNA
acattgccttcaagttgctt

SEQ ID NO: 15993 - RNA, 20 nt, synthetic construct
  source 1..20: mol_type = other RNA
acattgccttcgcagggtga

SEQ ID NO: 15994 - RNA, 20 nt, synthetic construct
  source 1..20: mol_type = other RNA
acattggaggataatatctg

SEQ ID NO: 15995 - RNA, 20 nt, synthetic construct
  source 1..20: mol_type = other RNA
acattggttattcatgtttg

SEQ ID NO: 15996 - RNA, 20 nt, synthetic construct
  source 1..20: mol_type = other RNA
acattggtttgaaatgatct

SEQ ID NO: 15997 - RNA, 20 nt, synthetic construct
  source 1..20: mol_type = other RNA
acattgtaatcctgtttctc

SEQ ID NO: 15998 - RNA, 20 nt, synthetic construct
  source 1..20: mol_type = other RNA
acattgtatttctgttagat

SEQ ID NO: 15999 - RNA, 20 nt, synthetic construct
  source 1..20: mol_type = other RNA
acattgtcttacataggctt

SEQ ID NO: 16000 - RNA, 20 nt, synthetic construct
  source 1..20: mol_type = other RNA
acattgtgcaaccatccccg

SEQ ID NO: 16001 - RNA, 20 nt, synthetic construct
  source 1..20: mol_type = other RNA
acatttaaaagaaaatggcc

SEQ ID NO: 16002 - RNA, 20 nt, synthetic construct
  source 1..20: mol_type = other RNA
acatttaaaatctgattcag

SEQ ID NO: 16003 - RNA, 20 nt, synthetic construct
  source 1..20: mol_type = other RNA
acatttaaaattgcagagtg

SEQ ID NO: 16004 - RNA, 20 nt, synthetic construct
  source 1..20: mol_type = other RNA
acatttaagaagggaacact

SEQ ID NO: 16005 - RNA, 20 nt, synthetic construct
  source 1..20: mol_type = other RNA
acatttagtttcatctatgt

SEQ ID NO: 16006 - RNA, 20 nt, synthetic construct
  source 1..20: mol_type = other RNA
acatttatacagttggaact

SEQ ID NO: 16007 - RNA, 20 nt, synthetic construct
  source 1..20: mol_type = other RNA
acatttatggaattgccata

SEQ ID NO: 16008 - RNA, 20 nt, synthetic construct
  source 1..20: mol_type = other RNA
acatttcatagcagaatggc

SEQ ID NO: 16009 - RNA, 20 nt, synthetic construct
  source 1..20: mol_type = other RNA
acatttccattcatattttc

SEQ ID NO: 16010 - RNA, 20 nt, synthetic construct
  source 1..20: mol_type = other RNA
acatttcgccttctcagaag

SEQ ID NO: 16011 - RNA, 20 nt, synthetic construct
  source 1..20: mol_type = other RNA
acatttctaatttccaagaa

SEQ ID NO: 16012 - RNA, 20 nt, synthetic construct
  source 1..20: mol_type = other RNA
acatttctacacaacatgtt

SEQ ID NO: 16013 - RNA, 20 nt, synthetic construct
  source 1..20: mol_type = other RNA
acatttctcatactttgtca

SEQ ID NO: 16014 - RNA, 20 nt, synthetic construct
  source 1..20: mol_type = other RNA
acatttctcatgtatgtttt

SEQ ID NO: 16015 - RNA, 20 nt, synthetic construct
  source 1..20: mol_type = other RNA
acatttctgaaaaatggttt

SEQ ID NO: 16016 - RNA, 20 nt, synthetic construct
  source 1..20: mol_type = other RNA
acatttcttctagtcacatt

SEQ ID NO: 16017 - RNA, 20 nt, synthetic construct
  source 1..20: mol_type = other RNA
acatttgaaagaaagaaggc

SEQ ID NO: 16018 - RNA, 20 nt, synthetic construct
  source 1..20: mol_type = other RNA
acatttgaactcactggcca

SEQ ID NO: 16019 - RNA, 20 nt, synthetic construct
  source 1..20: mol_type = other RNA
acatttgagggtgctgatca

SEQ ID NO: 16020 - RNA, 20 nt, synthetic construct
  source 1..20: mol_type = other RNA
acatttgcttaggctgttat

SEQ ID NO: 16021 - RNA, 20 nt, synthetic construct
  source 1..20: mol_type = other RNA
acatttgctttactactgca

SEQ ID NO: 16022 - RNA, 20 nt, synthetic construct
  source 1..20: mol_type = other RNA
acatttgcttttcctggaaa

SEQ ID NO: 16023 - RNA, 20 nt, synthetic construct
  source 1..20: mol_type = other RNA
acatttggaatagagagccc

SEQ ID NO: 16024 - RNA, 20 nt, synthetic construct
  source 1..20: mol_type = other RNA
acatttgggaatgtggtcac

SEQ ID NO: 16025 - RNA, 20 nt, synthetic construct
  source 1..20: mol_type = other RNA
acatttggttttactactgt

SEQ ID NO: 16026 - RNA, 20 nt, synthetic construct
  source 1..20: mol_type = other RNA
acatttgttgcatccccatt

SEQ ID NO: 16027 - RNA, 20 nt, synthetic construct
  source 1..20: mol_type = other RNA
acattttaccaaaacagctt

SEQ ID NO: 16028 - RNA, 20 nt, synthetic construct
  source 1..20: mol_type = other RNA
acattttaccatatacacaa

SEQ ID NO: 16029 - RNA, 20 nt, synthetic construct
  source 1..20: mol_type = other RNA
acattttagctggggcagca

SEQ ID NO: 16030 - RNA, 20 nt, synthetic construct
  source 1..20: mol_type = other RNA
acattttattaggtgcacac

SEQ ID NO: 16031 - RNA, 20 nt, synthetic construct
  source 1..20: mol_type = other RNA
acattttatttatacaggtg

SEQ ID NO: 16032 - RNA, 20 nt, synthetic construct
  source 1..20: mol_type = other RNA
acattttccctcctttttat

SEQ ID NO: 16033 - RNA, 20 nt, synthetic construct
  source 1..20: mol_type = other RNA
acattttctctacagttaac

SEQ ID NO: 16034 - RNA, 20 nt, synthetic construct
  source 1..20: mol_type = other RNA
acattttcttatctaggcga

SEQ ID NO: 16035 - RNA, 20 nt, synthetic construct
  source 1..20: mol_type = other RNA
acattttgaatcatgggagc

SEQ ID NO: 16036 - RNA, 20 nt, synthetic construct
  source 1..20: mol_type = other RNA
acattttgagttattgcata

SEQ ID NO: 16037 - RNA, 20 nt, synthetic construct
  source 1..20: mol_type = other RNA
acattttgtgacaagttcag

SEQ ID NO: 16038 - RNA, 20 nt, synthetic construct
  source 1..20: mol_type = other RNA
acattttgttcattcatctg

SEQ ID NO: 16039 - RNA, 20 nt, synthetic construct
  source 1..20: mol_type = other RNA
acatttttcaaatacctagt

SEQ ID NO: 16040 - RNA, 20 nt, synthetic construct
  source 1..20: mol_type = other RNA
acatttttcttagttccatt

SEQ ID NO: 16041 - RNA, 20 nt, synthetic construct
  source 1..20: mol_type = other RNA
acatttttgacagccacgtg

SEQ ID NO: 16042 - RNA, 20 nt, synthetic construct
  source 1..20: mol_type = other RNA
acattttttgcagagacggg

SEQ ID NO: 16043 - RNA, 20 nt, synthetic construct
  source 1..20: mol_type = other RNA
acattttttggtttgtatgt

SEQ ID NO: 16044 - RNA, 20 nt, synthetic construct
  source 1..20: mol_type = other RNA
accaaaaaactacgagtatc

SEQ ID NO: 16045 - RNA, 20 nt, synthetic construct
  source 1..20: mol_type = other RNA
accaaaaaagcaccagttat

SEQ ID NO: 16046 - RNA, 20 nt, synthetic construct
  source 1..20: mol_type = other RNA
accaaaaaaggtgctgttgt

SEQ ID NO: 16047 - RNA, 20 nt, synthetic construct
  source 1..20: mol_type = other RNA
accaaaaaatgtggcatatc

SEQ ID NO: 16048 - RNA, 20 nt, synthetic construct
  source 1..20: mol_type = other RNA
accaaaaaccacatttcata

SEQ ID NO: 16049 - RNA, 20 nt, synthetic construct
  source 1..20: mol_type = other RNA
accaaaacaaaaaacaaacc

SEQ ID NO: 16050 - RNA, 20 nt, synthetic construct
  source 1..20: mol_type = other RNA
accaaaacagcttcttgtta

SEQ ID NO: 16051 - RNA, 20 nt, synthetic construct
  source 1..20: mol_type = other RNA
accaaaacccttgggatgca

SEQ ID NO: 16052 - RNA, 20 nt, synthetic construct
  source 1..20: mol_type = other RNA
accaaaacctggtatgagtg

SEQ ID NO: 16053 - RNA, 20 nt, synthetic construct
  source 1..20: mol_type = other RNA
accaaaagtcctgttctttt

SEQ ID NO: 16054 - RNA, 20 nt, synthetic construct
  source 1..20: mol_type = other RNA
accaaaatataaatacgtgt

SEQ ID NO: 16055 - RNA, 20 nt, synthetic construct
  source 1..20: mol_type = other RNA
accaaaatggagacccatac

SEQ ID NO: 16056 - RNA, 20 nt, synthetic construct
  source 1..20: mol_type = other RNA
accaaacaccttacactcaa

SEQ ID NO: 16057 - RNA, 20 nt, synthetic construct
  source 1..20: mol_type = other RNA
accaaacactggaaatcaca

SEQ ID NO: 16058 - RNA, 20 nt, synthetic construct
  source 1..20: mol_type = other RNA
accaaacatgtgaggattta

SEQ ID NO: 16059 - RNA, 20 nt, synthetic construct
  source 1..20: mol_type = other RNA
accaaacattgaaggcagaa

SEQ ID NO: 16060 - RNA, 20 nt, synthetic construct
  source 1..20: mol_type = other RNA
accaaacgtttagatgaatg

SEQ ID NO: 16061 - RNA, 20 nt, synthetic construct
  source 1..20: mol_type = other RNA
accaaactcaaaaggacata

SEQ ID NO: 16062 - RNA, 20 nt, synthetic construct
  source 1..20: mol_type = other RNA
accaaacttggtttattttc

SEQ ID NO: 16063 - RNA, 20 nt, synthetic construct
  source 1..20: mol_type = other RNA
accaaagaaaggggaaggaa

SEQ ID NO: 16064 - RNA, 20 nt, synthetic construct
  source 1..20: mol_type = other RNA
accaaagacttcaggaacac

SEQ ID NO: 16065 - RNA, 20 nt, synthetic construct
  source 1..20: mol_type = other RNA
accaaagattatgttccaca

SEQ ID NO: 16066 - RNA, 20 nt, synthetic construct
  source 1..20: mol_type = other RNA
accaaagatttactaaactg

SEQ ID NO: 16067 - RNA, 20 nt, synthetic construct
  source 1..20: mol_type = other RNA
accaaagcagaaatacagac

SEQ ID NO: 16068 - RNA, 20 nt, synthetic construct
  source 1..20: mol_type = other RNA
accaaatcatgaaagtggag

SEQ ID NO: 16069 - RNA, 20 nt, synthetic construct
  source 1..20: mol_type = other RNA
accaaatgcagaaaataaac

SEQ ID NO: 16070 - RNA, 20 nt, synthetic construct
  source 1..20: mol_type = other RNA
accaaatgtggatagtgctt

SEQ ID NO: 16071 - RNA, 20 nt, synthetic construct
  source 1..20: mol_type = other RNA
accaaattcacgagactgtt

SEQ ID NO: 16072 - RNA, 20 nt, synthetic construct
  source 1..20: mol_type = other RNA
accaacaacaaaaaatctta

SEQ ID NO: 16073 - RNA, 20 nt, synthetic construct
  source 1..20: mol_type = other RNA
accaacacaaagccttctct

SEQ ID NO: 16074 - RNA, 20 nt, synthetic construct
  source 1..20: mol_type = other RNA
accaacacctgcagtggcgt

SEQ ID NO: 16075 - RNA, 20 nt, synthetic construct
  source 1..20: mol_type = other RNA
accaacagatcctcacatca

SEQ ID NO: 16076 - RNA, 20 nt, synthetic construct
  source 1..20: mol_type = other RNA
accaacatccacagctttct

SEQ ID NO: 16077 - RNA, 20 nt, synthetic construct
  source 1..20: mol_type = other RNA
accaacatggcacatgtcta

SEQ ID NO: 16078 - RNA, 20 nt, synthetic construct
  source 1..20: mol_type = other RNA
accaacattgagtttcaatg

SEQ ID NO: 16079 - RNA, 20 nt, synthetic construct
  source 1..20: mol_type = other RNA
accaacccttgttggacagc

SEQ ID NO: 16080 - RNA, 20 nt, synthetic construct
  source 1..20: mol_type = other RNA
accaactatttcactaaata

SEQ ID NO: 16081 - RNA, 20 nt, synthetic construct
  source 1..20: mol_type = other RNA
accaactccacattgtctta

SEQ ID NO: 16082 - RNA, 20 nt, synthetic construct
  source 1..20: mol_type = other RNA
accaactgaagcggggctgc

SEQ ID NO: 16083 - RNA, 20 nt, synthetic construct
  source 1..20: mol_type = other RNA
accaactttaagcaaaattt

SEQ ID NO: 16084 - RNA, 20 nt, synthetic construct
  source 1..20: mol_type = other RNA
accaagaaaaagcagagaaa

SEQ ID NO: 16085 - RNA, 20 nt, synthetic construct
  source 1..20: mol_type = other RNA
accaagaaaggacttcagtc

SEQ ID NO: 16086 - RNA, 20 nt, synthetic construct
  source 1..20: mol_type = other RNA
accaagaacaaccttatcta

SEQ ID NO: 16087 - RNA, 20 nt, synthetic construct
  source 1..20: mol_type = other RNA
accaagaattttccattcat

SEQ ID NO: 16088 - RNA, 20 nt, synthetic construct
  source 1..20: mol_type = other RNA
accaagacatgttaggttga

SEQ ID NO: 16089 - RNA, 20 nt, synthetic construct
  source 1..20: mol_type = other RNA
accaagagcatagactttag

SEQ ID NO: 16090 - RNA, 20 nt, synthetic construct
  source 1..20: mol_type = other RNA
accaagagtgtggctttaag

SEQ ID NO: 16091 - RNA, 20 nt, synthetic construct
  source 1..20: mol_type = other RNA
accaagcaacactaaagatt

SEQ ID NO: 16092 - RNA, 20 nt, synthetic construct
  source 1..20: mol_type = other RNA
accaagcaagtaaaagaaga

SEQ ID NO: 16093 - RNA, 20 nt, synthetic construct
  source 1..20: mol_type = other RNA
accaagcccaactttttctt

SEQ ID NO: 16094 - RNA, 20 nt, synthetic construct
  source 1..20: mol_type = other RNA
accaagcccggcacggtggc

SEQ ID NO: 16095 - RNA, 20 nt, synthetic construct
  source 1..20: mol_type = other RNA
accaagccctgccttaaaac

SEQ ID NO: 16096 - RNA, 20 nt, synthetic construct
  source 1..20: mol_type = other RNA
accaaggctaagttgagaaa

SEQ ID NO: 16097 - RNA, 20 nt, synthetic construct
  source 1..20: mol_type = other RNA
accaagggtgtgtttaattt

SEQ ID NO: 16098 - RNA, 20 nt, synthetic construct
  source 1..20: mol_type = other RNA
accaaggtttctctccaagg

SEQ ID NO: 16099 - RNA, 20 nt, synthetic construct
  source 1..20: mol_type = other RNA
accaagtgccgcgttttttg

SEQ ID NO: 16100 - RNA, 20 nt, synthetic construct
  source 1..20: mol_type = other RNA
accaagttactagaagcact

SEQ ID NO: 16101 - RNA, 20 nt, synthetic construct
  source 1..20: mol_type = other RNA
accaagttgaatttctgtcc

SEQ ID NO: 16102 - RNA, 20 nt, synthetic construct
  source 1..20: mol_type = other RNA
accaagtttaaccaattatg

SEQ ID NO: 16103 - RNA, 20 nt, synthetic construct
  source 1..20: mol_type = other RNA
accaagtttggttcatttca

SEQ ID NO: 16104 - RNA, 20 nt, synthetic construct
  source 1..20: mol_type = other RNA
accaataaaagcctcatttg

SEQ ID NO: 16105 - RNA, 20 nt, synthetic construct
  source 1..20: mol_type = other RNA
accaataagaagtgaaaaat

SEQ ID NO: 16106 - RNA, 20 nt, synthetic construct
  source 1..20: mol_type = other RNA
accaatcgcagggccattct

SEQ ID NO: 16107 - RNA, 20 nt, synthetic construct
  source 1..20: mol_type = other RNA
accaatgtcagagatctgaa

SEQ ID NO: 16108 - RNA, 20 nt, synthetic construct
  source 1..20: mol_type = other RNA
accaatgttctcttttcctc

SEQ ID NO: 16109 - RNA, 20 nt, synthetic construct
  source 1..20: mol_type = other RNA
accaattaccataaagtctt

SEQ ID NO: 16110 - RNA, 20 nt, synthetic construct
  source 1..20: mol_type = other RNA
accaattatgctgagtgaat

SEQ ID NO: 16111 - RNA, 20 nt, synthetic construct
  source 1..20: mol_type = other RNA
accaattctccctgaaattg

SEQ ID NO: 16112 - RNA, 20 nt, synthetic construct
  source 1..20: mol_type = other RNA
accaattgttaacatttctt

SEQ ID NO: 16113 - RNA, 20 nt, synthetic construct
  source 1..20: mol_type = other RNA
accaatttaccatctgacat

SEQ ID NO: 16114 - RNA, 20 nt, synthetic construct
  source 1..20: mol_type = other RNA
accacaaacatgaataacca

SEQ ID NO: 16115 - RNA, 20 nt, synthetic construct
  source 1..20: mol_type = other RNA
accacaaggattaatctttc

SEQ ID NO: 16116 - RNA, 20 nt, synthetic construct
  source 1..20: mol_type = other RNA
accacaatcttacccccatc

SEQ ID NO: 16117 - RNA, 20 nt, synthetic construct
  source 1..20: mol_type = other RNA
accacacagagaacagcatt

SEQ ID NO: 16118 - RNA, 20 nt, synthetic construct
  source 1..20: mol_type = other RNA
accacactgacaggacagag

SEQ ID NO: 16119 - RNA, 20 nt, synthetic construct
  source 1..20: mol_type = other RNA
accacacttgcttgggaaca

SEQ ID NO: 16120 - RNA, 20 nt, synthetic construct
  source 1..20: mol_type = other RNA
accacagagcctaaaatagg

SEQ ID NO: 16121 - RNA, 20 nt, synthetic construct
  source 1..20: mol_type = other RNA
accacaggctctcttcacca

SEQ ID NO: 16122 - RNA, 20 nt, synthetic construct
  source 1..20: mol_type = other RNA
accacagtttgaaactttaa

SEQ ID NO: 16123 - RNA, 20 nt, synthetic construct
  source 1..20: mol_type = other RNA
accacatccagctaattttc

SEQ ID NO: 16124 - RNA, 20 nt, synthetic construct
  source 1..20: mol_type = other RNA
accacatgtggcttgtggct

SEQ ID NO: 16125 - RNA, 20 nt, synthetic construct
  source 1..20: mol_type = other RNA
accacattcccaaatgtctt

SEQ ID NO: 16126 - RNA, 20 nt, synthetic construct
  source 1..20: mol_type = other RNA
accacattcggccaagatct

SEQ ID NO: 16127 - RNA, 20 nt, synthetic construct
  source 1..20: mol_type = other RNA
accacatttcatagcagaat

SEQ ID NO: 16128 - RNA, 20 nt, synthetic construct
  source 1..20: mol_type = other RNA
accacattttgttcattcat

SEQ ID NO: 16129 - RNA, 20 nt, synthetic construct
  source 1..20: mol_type = other RNA
accaccaagaaaaagcagag

SEQ ID NO: 16130 - RNA, 20 nt, synthetic construct
  source 1..20: mol_type = other RNA
accaccacacttgcttggga

SEQ ID NO: 16131 - RNA, 20 nt, synthetic construct
  source 1..20: mol_type = other RNA
accaccacattcggccaaga

SEQ ID NO: 16132 - RNA, 20 nt, synthetic construct
  source 1..20: mol_type = other RNA
accaccactaatgtcacatt

SEQ ID NO: 16133 - RNA, 20 nt, synthetic construct
  source 1..20: mol_type = other RNA
accacccgtccaatttcttt

SEQ ID NO: 16134 - RNA, 20 nt, synthetic construct
  source 1..20: mol_type = other RNA
accacccttgatgtcacaag

SEQ ID NO: 16135 - RNA, 20 nt, synthetic construct
  source 1..20: mol_type = other RNA
accacctaactactaataaa

SEQ ID NO: 16136 - RNA, 20 nt, synthetic construct
  source 1..20: mol_type = other RNA
accacctgaaatctgatttg

SEQ ID NO: 16137 - RNA, 20 nt, synthetic construct
  source 1..20: mol_type = other RNA
accacctgggggagactgtg

SEQ ID NO: 16138 - RNA, 20 nt, synthetic construct
  source 1..20: mol_type = other RNA
accacctgtcagaaacacca

SEQ ID NO: 16139 - RNA, 20 nt, synthetic construct
  source 1..20: mol_type = other RNA
accacgagtaatggatgttt

SEQ ID NO: 16140 - RNA, 20 nt, synthetic construct
  source 1..20: mol_type = other RNA
accacgcagaacagtgttta

SEQ ID NO: 16141 - RNA, 20 nt, synthetic construct
  source 1..20: mol_type = other RNA
accacgcagtttgttctgct

SEQ ID NO: 16142 - RNA, 20 nt, synthetic construct
  source 1..20: mol_type = other RNA
accacgcatctggtctatct

SEQ ID NO: 16143 - RNA, 20 nt, synthetic construct
  source 1..20: mol_type = other RNA
accacgtccggtcgttggat

SEQ ID NO: 16144 - RNA, 20 nt, synthetic construct
  source 1..20: mol_type = other RNA
accactaaggtcaacacatc

SEQ ID NO: 16145 - RNA, 20 nt, synthetic construct
  source 1..20: mol_type = other RNA
accactaatgtcacattttc

SEQ ID NO: 16146 - RNA, 20 nt, synthetic construct
  source 1..20: mol_type = other RNA
accactacacccggctaatt

SEQ ID NO: 16147 - RNA, 20 nt, synthetic construct
  source 1..20: mol_type = other RNA
accactagagtattacctat

SEQ ID NO: 16148 - RNA, 20 nt, synthetic construct
  source 1..20: mol_type = other RNA
accactagcaaactactgat

SEQ ID NO: 16149 - RNA, 20 nt, synthetic construct
  source 1..20: mol_type = other RNA
accactataatccagatgga

SEQ ID NO: 16150 - RNA, 20 nt, synthetic construct
  source 1..20: mol_type = other RNA
accactatctaataaaatag

SEQ ID NO: 16151 - RNA, 20 nt, synthetic construct
  source 1..20: mol_type = other RNA
accactccaccttagcccaa

SEQ ID NO: 16152 - RNA, 20 nt, synthetic construct
  source 1..20: mol_type = other RNA
accactcccggccgtatttt

SEQ ID NO: 16153 - RNA, 20 nt, synthetic construct
  source 1..20: mol_type = other RNA
accactgaaacttttctttt

SEQ ID NO: 16154 - RNA, 20 nt, synthetic construct
  source 1..20: mol_type = other RNA
accactgaagtgttgagagg

SEQ ID NO: 16155 - RNA, 20 nt, synthetic construct
  source 1..20: mol_type = other RNA
accactgaatcagattttaa

SEQ ID NO: 16156 - RNA, 20 nt, synthetic construct
  source 1..20: mol_type = other RNA
accactgagagggaagttta

SEQ ID NO: 16157 - RNA, 20 nt, synthetic construct
  source 1..20: mol_type = other RNA
accactgagcacaatgcctg

SEQ ID NO: 16158 - RNA, 20 nt, synthetic construct
  source 1..20: mol_type = other RNA
accactgaggtcaagaaata

SEQ ID NO: 16159 - RNA, 20 nt, synthetic construct
  source 1..20: mol_type = other RNA
accactgatggaattctgac

SEQ ID NO: 16160 - RNA, 20 nt, synthetic construct
  source 1..20: mol_type = other RNA
accactggatacggaaatat

SEQ ID NO: 16161 - RNA, 20 nt, synthetic construct
  source 1..20: mol_type = other RNA
accactggggagtgtgccca

SEQ ID NO: 16162 - RNA, 20 nt, synthetic construct
  source 1..20: mol_type = other RNA
accactgtaggccccgatgc

SEQ ID NO: 16163 - RNA, 20 nt, synthetic construct
  source 1..20: mol_type = other RNA
accactgttatctgggaaca

SEQ ID NO: 16164 - RNA, 20 nt, synthetic construct
  source 1..20: mol_type = other RNA
accacttagtttgcaataca

SEQ ID NO: 16165 - RNA, 20 nt, synthetic construct
  source 1..20: mol_type = other RNA
accacttcgagaagggaagt

SEQ ID NO: 16166 - RNA, 20 nt, synthetic construct
  source 1..20: mol_type = other RNA
accagaaaagtgaaacaata

SEQ ID NO: 16167 - RNA, 20 nt, synthetic construct
  source 1..20: mol_type = other RNA
accagaactacacattccag

SEQ ID NO: 16168 - RNA, 20 nt, synthetic construct
  source 1..20: mol_type = other RNA
accagacaaaaatagaggat

SEQ ID NO: 16169 - RNA, 20 nt, synthetic construct
  source 1..20: mol_type = other RNA
accagacatttctcatactt

SEQ ID NO: 16170 - RNA, 20 nt, synthetic construct
  source 1..20: mol_type = other RNA
accagaccctttatcggata

SEQ ID NO: 16171 - RNA, 20 nt, synthetic construct
  source 1..20: mol_type = other RNA
accagagattgggaaaatct

SEQ ID NO: 16172 - RNA, 20 nt, synthetic construct
  source 1..20: mol_type = other RNA
accagagcggaatttttata

SEQ ID NO: 16173 - RNA, 20 nt, synthetic construct
  source 1..20: mol_type = other RNA
accagaggttaaagcaacag

SEQ ID NO: 16174 - RNA, 20 nt, synthetic construct
  source 1..20: mol_type = other RNA
accagatactcaatcagtgg

SEQ ID NO: 16175 - RNA, 20 nt, synthetic construct
  source 1..20: mol_type = other RNA
accagatactcatgcttgct

SEQ ID NO: 16176 - RNA, 20 nt, synthetic construct
  source 1..20: mol_type = other RNA
accagatcaaacgtgctttc

SEQ ID NO: 16177 - RNA, 20 nt, synthetic construct
  source 1..20: mol_type = other RNA
accagatgcgtggttcacac

SEQ ID NO: 16178 - RNA, 20 nt, synthetic construct
  source 1..20: mol_type = other RNA
accagcagttcaagcaccac

SEQ ID NO: 16179 - RNA, 20 nt, synthetic construct
  source 1..20: mol_type = other RNA
accagcataagacccctcag

SEQ ID NO: 16180 - RNA, 20 nt, synthetic construct
  source 1..20: mol_type = other RNA
accagcatcttttgacgcgc

SEQ ID NO: 16181 - RNA, 20 nt, synthetic construct
  source 1..20: mol_type = other RNA
accagcggcatacaggagtt

SEQ ID NO: 16182 - RNA, 20 nt, synthetic construct
  source 1..20: mol_type = other RNA
accagcttacagcagatctg

SEQ ID NO: 16183 - RNA, 20 nt, synthetic construct
  source 1..20: mol_type = other RNA
accagcttgggcaagagagc

SEQ ID NO: 16184 - RNA, 20 nt, synthetic construct
  source 1..20: mol_type = other RNA
accaggaggtttgcactggc

SEQ ID NO: 16185 - RNA, 20 nt, synthetic construct
  source 1..20: mol_type = other RNA
accaggagttcttatgaggt

SEQ ID NO: 16186 - RNA, 20 nt, synthetic construct
  source 1..20: mol_type = other RNA
accaggcagtcctctcactc

SEQ ID NO: 16187 - RNA, 20 nt, synthetic construct
  source 1..20: mol_type = other RNA
accaggcccggggcagagaa

SEQ ID NO: 16188 - RNA, 20 nt, synthetic construct
  source 1..20: mol_type = other RNA
accaggctggaagaatttta

SEQ ID NO: 16189 - RNA, 20 nt, synthetic construct
  source 1..20: mol_type = other RNA
accaggctggaatgcagcgg

SEQ ID NO: 16190 - RNA, 20 nt, synthetic construct
  source 1..20: mol_type = other RNA
accagggaggcggaggttgc

SEQ ID NO: 16191 - RNA, 20 nt, synthetic construct
  source 1..20: mol_type = other RNA
accagggcctctgaagacat

SEQ ID NO: 16192 - RNA, 20 nt, synthetic construct
  source 1..20: mol_type = other RNA
accaggggaaggagtctgcc

SEQ ID NO: 16193 - RNA, 20 nt, synthetic construct
  source 1..20: mol_type = other RNA
accaggggctgggggatcca

SEQ ID NO: 16194 - RNA, 20 nt, synthetic construct
  source 1..20: mol_type = other RNA
accaggtatggcgactcatg

SEQ ID NO: 16195 - RNA, 20 nt, synthetic construct
  source 1..20: mol_type = other RNA
accaggtcagccagaggaag

SEQ ID NO: 16196 - RNA, 20 nt, synthetic construct
  source 1..20: mol_type = other RNA
accaggttttggtaatggga

SEQ ID NO: 16197 - RNA, 20 nt, synthetic construct
  source 1..20: mol_type = other RNA
accagtaagattctgtctct

SEQ ID NO: 16198 - RNA, 20 nt, synthetic construct
  source 1..20: mol_type = other RNA
accagtgctctcccccgaat

SEQ ID NO: 16199 - RNA, 20 nt, synthetic construct
  source 1..20: mol_type = other RNA
accagtgcttgcagccttcc

SEQ ID NO: 16200 - RNA, 20 nt, synthetic construct
  source 1..20: mol_type = other RNA
accagtgggtcagctagtgt

SEQ ID NO: 16201 - RNA, 20 nt, synthetic construct
  source 1..20: mol_type = other RNA
accagtgtgatgggggtaag

SEQ ID NO: 16202 - RNA, 20 nt, synthetic construct
  source 1..20: mol_type = other RNA
accagttactctctctgcct

SEQ ID NO: 16203 - RNA, 20 nt, synthetic construct
  source 1..20: mol_type = other RNA
accagttaggaagccactgc

SEQ ID NO: 16204 - RNA, 20 nt, synthetic construct
  source 1..20: mol_type = other RNA
accagttatcaccatgtgct

SEQ ID NO: 16205 - RNA, 20 nt, synthetic construct
  source 1..20: mol_type = other RNA
accagtttctaattagaatt

SEQ ID NO: 16206 - RNA, 20 nt, synthetic construct
  source 1..20: mol_type = other RNA
accataaaaccatttttcag

SEQ ID NO: 16207 - RNA, 20 nt, synthetic construct
  source 1..20: mol_type = other RNA
accataaagtcagaggagca

SEQ ID NO: 16208 - RNA, 20 nt, synthetic construct
  source 1..20: mol_type = other RNA
accataaagtcttccatttt

SEQ ID NO: 16209 - RNA, 20 nt, synthetic construct
  source 1..20: mol_type = other RNA
accataatgagtaacatgtg

SEQ ID NO: 16210 - RNA, 20 nt, synthetic construct
  source 1..20: mol_type = other RNA
accatacagtgccttcagct

SEQ ID NO: 16211 - RNA, 20 nt, synthetic construct
  source 1..20: mol_type = other RNA
accatacttttcaactgaac

SEQ ID NO: 16212 - RNA, 20 nt, synthetic construct
  source 1..20: mol_type = other RNA
accatagctgaaggcactgt

SEQ ID NO: 16213 - RNA, 20 nt, synthetic construct
  source 1..20: mol_type = other RNA
accataggcacgcgccccca

SEQ ID NO: 16214 - RNA, 20 nt, synthetic construct
  source 1..20: mol_type = other RNA
accatataatctaaccctcc

SEQ ID NO: 16215 - RNA, 20 nt, synthetic construct
  source 1..20: mol_type = other RNA
accatatacacaaaaagatc

SEQ ID NO: 16216 - RNA, 20 nt, synthetic construct
  source 1..20: mol_type = other RNA
accatatggttaatagtgac

SEQ ID NO: 16217 - RNA, 20 nt, synthetic construct
  source 1..20: mol_type = other RNA
accatatggtttacaatggt

SEQ ID NO: 16218 - RNA, 20 nt, synthetic construct
  source 1..20: mol_type = other RNA
accatattagagtgaaaaga

SEQ ID NO: 16219 - RNA, 20 nt, synthetic construct
  source 1..20: mol_type = other RNA
accatattggccaggctggt

SEQ ID NO: 16220 - RNA, 20 nt, synthetic construct
  source 1..20: mol_type = other RNA
accatcaagtgtgatcccaa

SEQ ID NO: 16221 - RNA, 20 nt, synthetic construct
  source 1..20: mol_type = other RNA
accatcagagtgaacaggca

SEQ ID NO: 16222 - RNA, 20 nt, synthetic construct
  source 1..20: mol_type = other RNA
accatcatcatcaggctggc

SEQ ID NO: 16223 - RNA, 20 nt, synthetic construct
  source 1..20: mol_type = other RNA
accatccccgctgtccattt

SEQ ID NO: 16224 - RNA, 20 nt, synthetic construct
  source 1..20: mol_type = other RNA
accatcctttccttgtccta

SEQ ID NO: 16225 - RNA, 20 nt, synthetic construct
  source 1..20: mol_type = other RNA
accatcgttcacactcgcac

SEQ ID NO: 16226 - RNA, 20 nt, synthetic construct
  source 1..20: mol_type = other RNA
accatctaaagccaggcttt

SEQ ID NO: 16227 - RNA, 20 nt, synthetic construct
  source 1..20: mol_type = other RNA
accatctaacagaaatacaa

SEQ ID NO: 16228 - RNA, 20 nt, synthetic construct
  source 1..20: mol_type = other RNA
accatctcagcacagagccg

SEQ ID NO: 16229 - RNA, 20 nt, synthetic construct
  source 1..20: mol_type = other RNA
accatctctccaacagaaga

SEQ ID NO: 16230 - RNA, 20 nt, synthetic construct
  source 1..20: mol_type = other RNA
accatctctctgcctcaaaa

SEQ ID NO: 16231 - RNA, 20 nt, synthetic construct
  source 1..20: mol_type = other RNA
accatctgacatatgttttg

SEQ ID NO: 16232 - RNA, 20 nt, synthetic construct
  source 1..20: mol_type = other RNA
accatctgataagcccaacc

SEQ ID NO: 16233 - RNA, 20 nt, synthetic construct
  source 1..20: mol_type = other RNA
accatctgttaaaagatacg

SEQ ID NO: 16234 - RNA, 20 nt, synthetic construct
  source 1..20: mol_type = other RNA
accatcttcttagtgttccc

SEQ ID NO: 16235 - RNA, 20 nt, synthetic construct
  source 1..20: mol_type = other RNA
accatgacagagttccacct

SEQ ID NO: 16236 - RNA, 20 nt, synthetic construct
  source 1..20: mol_type = other RNA
accatgatgcagcccctgcc

SEQ ID NO: 16237 - RNA, 20 nt, synthetic construct
  source 1..20: mol_type = other RNA
accatgcaggttcatgtgtg

SEQ ID NO: 16238 - RNA, 20 nt, synthetic construct
  source 1..20: mol_type = other RNA
accatggcaggtttcaagtg

SEQ ID NO: 16239 - RNA, 20 nt, synthetic construct
  source 1..20: mol_type = other RNA
accatgggacaagtgggtgg

SEQ ID NO: 16240 - RNA, 20 nt, synthetic construct
  source 1..20: mol_type = other RNA
accatgtaacaggtttaata

SEQ ID NO: 16241 - RNA, 20 nt, synthetic construct
  source 1..20: mol_type = other RNA
accatgtcatgtatatgctg

SEQ ID NO: 16242 - RNA, 20 nt, synthetic construct
  source 1..20: mol_type = other RNA
accatgtgcttatcaataaa

SEQ ID NO: 16243 - RNA, 20 nt, synthetic construct
  source 1..20: mol_type = other RNA
accatgttcatgggaagatg

SEQ ID NO: 16244 - RNA, 20 nt, synthetic construct
  source 1..20: mol_type = other RNA
accatgttgttcttttcaaa

SEQ ID NO: 16245 - RNA, 20 nt, synthetic construct
  source 1..20: mol_type = other RNA
accatgtttccataaaaagc

SEQ ID NO: 16246 - RNA, 20 nt, synthetic construct
  source 1..20: mol_type = other RNA
accatgttttaggagtcaac

SEQ ID NO: 16247 - RNA, 20 nt, synthetic construct
  source 1..20: mol_type = other RNA
accattaacagctcagaagc

SEQ ID NO: 16248 - RNA, 20 nt, synthetic construct
  source 1..20: mol_type = other RNA
accattactcttctactcac

SEQ ID NO: 16249 - RNA, 20 nt, synthetic construct
  source 1..20: mol_type = other RNA
accattagcagttctgtacc

SEQ ID NO: 16250 - RNA, 20 nt, synthetic construct
  source 1..20: mol_type = other RNA
accattccacgctgtggctt

SEQ ID NO: 16251 - RNA, 20 nt, synthetic construct
  source 1..20: mol_type = other RNA
accattccagccattctctt

SEQ ID NO: 16252 - RNA, 20 nt, synthetic construct
  source 1..20: mol_type = other RNA
accattccccttgccaaggc

SEQ ID NO: 16253 - RNA, 20 nt, synthetic construct
  source 1..20: mol_type = other RNA
accattgagccaaagaagaa

SEQ ID NO: 16254 - RNA, 20 nt, synthetic construct
  source 1..20: mol_type = other RNA
accattgtaaaccatatggt

SEQ ID NO: 16255 - RNA, 20 nt, synthetic construct
  source 1..20: mol_type = other RNA
accattgtgtggacacactg

SEQ ID NO: 16256 - RNA, 20 nt, synthetic construct
  source 1..20: mol_type = other RNA
accatttaccccttaaattc

SEQ ID NO: 16257 - RNA, 20 nt, synthetic construct
  source 1..20: mol_type = other RNA
accatttagatcatcttata

SEQ ID NO: 16258 - RNA, 20 nt, synthetic construct
  source 1..20: mol_type = other RNA
accatttattcctctcttgg

SEQ ID NO: 16259 - RNA, 20 nt, synthetic construct
  source 1..20: mol_type = other RNA
accatttattgtcaaggtca

SEQ ID NO: 16260 - RNA, 20 nt, synthetic construct
  source 1..20: mol_type = other RNA
accatttgaccttccttgtg

SEQ ID NO: 16261 - RNA, 20 nt, synthetic construct
  source 1..20: mol_type = other RNA
accattttaataacaaaagg

SEQ ID NO: 16262 - RNA, 20 nt, synthetic construct
  source 1..20: mol_type = other RNA
accattttcaatcttggaaa

SEQ ID NO: 16263 - RNA, 20 nt, synthetic construct
  source 1..20: mol_type = other RNA
accatttttatatctttgga

SEQ ID NO: 16264 - RNA, 20 nt, synthetic construct
  source 1..20: mol_type = other RNA
accatttttcagaaatgttt

SEQ ID NO: 16265 - RNA, 20 nt, synthetic construct
  source 1..20: mol_type = other RNA
accattttttcaccagcggc

SEQ ID NO: 16266 - RNA, 20 nt, synthetic construct
  source 1..20: mol_type = other RNA
acccaaagactttgttttgt

SEQ ID NO: 16267 - RNA, 20 nt, synthetic construct
  source 1..20: mol_type = other RNA
acccaaagcaaaagcaaaat

SEQ ID NO: 16268 - RNA, 20 nt, synthetic construct
  source 1..20: mol_type = other RNA
acccaaattaaaggatgtca

SEQ ID NO: 16269 - RNA, 20 nt, synthetic construct
  source 1..20: mol_type = other RNA
acccaacaaacaattagcac

SEQ ID NO: 16270 - RNA, 20 nt, synthetic construct
  source 1..20: mol_type = other RNA
acccaacatgagagaaaatt

SEQ ID NO: 16271 - RNA, 20 nt, synthetic construct
  source 1..20: mol_type = other RNA
acccaactctttctttgatt

SEQ ID NO: 16272 - RNA, 20 nt, synthetic construct
  source 1..20: mol_type = other RNA
acccaagaatttcatgcctt

SEQ ID NO: 16273 - RNA, 20 nt, synthetic construct
  source 1..20: mol_type = other RNA
acccaagccacagcgtggaa

SEQ ID NO: 16274 - RNA, 20 nt, synthetic construct
  source 1..20: mol_type = other RNA
acccaagcttaggtcagatt

SEQ ID NO: 16275 - RNA, 20 nt, synthetic construct
  source 1..20: mol_type = other RNA
acccaagtaaacaactgact

SEQ ID NO: 16276 - RNA, 20 nt, synthetic construct
  source 1..20: mol_type = other RNA
acccaagtggagcctgctct

SEQ ID NO: 16277 - RNA, 20 nt, synthetic construct
  source 1..20: mol_type = other RNA
acccaatcatgttctttata

SEQ ID NO: 16278 - RNA, 20 nt, synthetic construct
  source 1..20: mol_type = other RNA
acccacaaaagaaaattttc

SEQ ID NO: 16279 - RNA, 20 nt, synthetic construct
  source 1..20: mol_type = other RNA
acccacaagaaaaacctaaa

SEQ ID NO: 16280 - RNA, 20 nt, synthetic construct
  source 1..20: mol_type = other RNA
acccacagataatttcttca

SEQ ID NO: 16281 - RNA, 20 nt, synthetic construct
  source 1..20: mol_type = other RNA
acccaccaggaggcggagct

SEQ ID NO: 16282 - RNA, 20 nt, synthetic construct
  source 1..20: mol_type = other RNA
acccacgtggagtgcaatgg

SEQ ID NO: 16283 - RNA, 20 nt, synthetic construct
  source 1..20: mol_type = other RNA
acccactagtgaagtcccat

SEQ ID NO: 16284 - RNA, 20 nt, synthetic construct
  source 1..20: mol_type = other RNA
acccactattgaaagccctt

SEQ ID NO: 16285 - RNA, 20 nt, synthetic construct
  source 1..20: mol_type = other RNA
acccactgagcatttatata

SEQ ID NO: 16286 - RNA, 20 nt, synthetic construct
  source 1..20: mol_type = other RNA
acccactggtttcagtccct

SEQ ID NO: 16287 - RNA, 20 nt, synthetic construct
  source 1..20: mol_type = other RNA
acccacttgtcccatggtca

SEQ ID NO: 16288 - RNA, 20 nt, synthetic construct
  source 1..20: mol_type = other RNA
acccagaccaagtttaacca

SEQ ID NO: 16289 - RNA, 20 nt, synthetic construct
  source 1..20: mol_type = other RNA
acccagacctgcacaaagga

SEQ ID NO: 16290 - RNA, 20 nt, synthetic construct
  source 1..20: mol_type = other RNA
acccagagcctaatgtgtaa

SEQ ID NO: 16291 - RNA, 20 nt, synthetic construct
  source 1..20: mol_type = other RNA
acccagagcgggtttcctcg

SEQ ID NO: 16292 - RNA, 20 nt, synthetic construct
  source 1..20: mol_type = other RNA
acccagcactctgaatcacc

SEQ ID NO: 16293 - RNA, 20 nt, synthetic construct
  source 1..20: mol_type = other RNA
acccagcccccaacccgccc

SEQ ID NO: 16294 - RNA, 20 nt, synthetic construct
  source 1..20: mol_type = other RNA
acccagctcgaccaggggaa

SEQ ID NO: 16295 - RNA, 20 nt, synthetic construct
  source 1..20: mol_type = other RNA
acccaggaacagattcacgc

SEQ ID NO: 16296 - RNA, 20 nt, synthetic construct
  source 1..20: mol_type = other RNA
acccaggaggcaaaggttga

SEQ ID NO: 16297 - RNA, 20 nt, synthetic construct
  source 1..20: mol_type = other RNA
acccaggcatgatggctcaa

SEQ ID NO: 16298 - RNA, 20 nt, synthetic construct
  source 1..20: mol_type = other RNA
acccaggtgtgagattgata

SEQ ID NO: 16299 - RNA, 20 nt, synthetic construct
  source 1..20: mol_type = other RNA
acccagtatacacgtattta

SEQ ID NO: 16300 - RNA, 20 nt, synthetic construct
  source 1..20: mol_type = other RNA
acccagtggctagtgtgttg

SEQ ID NO: 16301 - RNA, 20 nt, synthetic construct
  source 1..20: mol_type = other RNA
acccagtgtctgctacaggg

SEQ ID NO: 16302 - RNA, 20 nt, synthetic construct
  source 1..20: mol_type = other RNA
acccagtgtgtttgtttgct

SEQ ID NO: 16303 - RNA, 20 nt, synthetic construct
  source 1..20: mol_type = other RNA
acccagttatctctgccctc

SEQ ID NO: 16304 - RNA, 20 nt, synthetic construct
  source 1..20: mol_type = other RNA
acccagttcaccagtttcta

SEQ ID NO: 16305 - RNA, 20 nt, synthetic construct
  source 1..20: mol_type = other RNA
acccataaactgaacattta

SEQ ID NO: 16306 - RNA, 20 nt, synthetic construct
  source 1..20: mol_type = other RNA
acccatactcagccccctcg

SEQ ID NO: 16307 - RNA, 20 nt, synthetic construct
  source 1..20: mol_type = other RNA
acccatatctttgcttataa

SEQ ID NO: 16308 - RNA, 20 nt, synthetic construct
  source 1..20: mol_type = other RNA
acccatccacccacttgtcc

SEQ ID NO: 16309 - RNA, 20 nt, synthetic construct
  source 1..20: mol_type = other RNA
acccatgaaaattgaattat

SEQ ID NO: 16310 - RNA, 20 nt, synthetic construct
  source 1..20: mol_type = other RNA
acccatgaagccagcattac

SEQ ID NO: 16311 - RNA, 20 nt, synthetic construct
  source 1..20: mol_type = other RNA
acccatgatctttggaaatg

SEQ ID NO: 16312 - RNA, 20 nt, synthetic construct
  source 1..20: mol_type = other RNA
acccatgcccatgtgcatta

SEQ ID NO: 16313 - RNA, 20 nt, synthetic construct
  source 1..20: mol_type = other RNA
acccattagacactaacttt

SEQ ID NO: 16314 - RNA, 20 nt, synthetic construct
  source 1..20: mol_type = other RNA
acccattccaggttttatct

SEQ ID NO: 16315 - RNA, 20 nt, synthetic construct
  source 1..20: mol_type = other RNA
acccatttcatgccatcctg

SEQ ID NO: 16316 - RNA, 20 nt, synthetic construct
  source 1..20: mol_type = other RNA
accccaaccctacctagggt

SEQ ID NO: 16317 - RNA, 20 nt, synthetic construct
  source 1..20: mol_type = other RNA
accccagaaggttaactaat

SEQ ID NO: 16318 - RNA, 20 nt, synthetic construct
  source 1..20: mol_type = other RNA
accccagagattgtcgttga

SEQ ID NO: 16319 - RNA, 20 nt, synthetic construct
  source 1..20: mol_type = other RNA
accccagggatattttcgtg

SEQ ID NO: 16320 - RNA, 20 nt, synthetic construct
  source 1..20: mol_type = other RNA
accccagtagaaatcttcca

SEQ ID NO: 16321 - RNA, 20 nt, synthetic construct
  source 1..20: mol_type = other RNA
accccatctctaccaaaata

SEQ ID NO: 16322 - RNA, 20 nt, synthetic construct
  source 1..20: mol_type = other RNA
accccattcactcagcataa

SEQ ID NO: 16323 - RNA, 20 nt, synthetic construct
  source 1..20: mol_type = other RNA
acccccatcacactggtcac

SEQ ID NO: 16324 - RNA, 20 nt, synthetic construct
  source 1..20: mol_type = other RNA
acccccggccctgccgcttc

SEQ ID NO: 16325 - RNA, 20 nt, synthetic construct
  source 1..20: mol_type = other RNA
accccctggaaataagtttc

SEQ ID NO: 16326 - RNA, 20 nt, synthetic construct
  source 1..20: mol_type = other RNA
accccctgggctcaagccat

SEQ ID NO: 16327 - RNA, 20 nt, synthetic construct
  source 1..20: mol_type = other RNA
accccgcatactgtgcagtg

SEQ ID NO: 16328 - RNA, 20 nt, synthetic construct
  source 1..20: mol_type = other RNA
accccgtacgctccctcgcg

SEQ ID NO: 16329 - RNA, 20 nt, synthetic construct
  source 1..20: mol_type = other RNA
accccgtctctgcaaaaaat

SEQ ID NO: 16330 - RNA, 20 nt, synthetic construct
  source 1..20: mol_type = other RNA
acccctactttttgtcacac

SEQ ID NO: 16331 - RNA, 20 nt, synthetic construct
  source 1..20: mol_type = other RNA
acccctcaggtgtcactgga

SEQ ID NO: 16332 - RNA, 20 nt, synthetic construct
  source 1..20: mol_type = other RNA
acccctccctacctggcagt

SEQ ID NO: 16333 - RNA, 20 nt, synthetic construct
  source 1..20: mol_type = other RNA
acccctccctgctttaaaac

SEQ ID NO: 16334 - RNA, 20 nt, synthetic construct
  source 1..20: mol_type = other RNA
acccctgagaacttcagtat

SEQ ID NO: 16335 - RNA, 20 nt, synthetic construct
  source 1..20: mol_type = other RNA
acccctgctctgcacgtact

SEQ ID NO: 16336 - RNA, 20 nt, synthetic construct
  source 1..20: mol_type = other RNA
accccttaaattccaaaagt

SEQ ID NO: 16337 - RNA, 20 nt, synthetic construct
  source 1..20: mol_type = other RNA
acccgaagaggacgattttt

SEQ ID NO: 16338 - RNA, 20 nt, synthetic construct
  source 1..20: mol_type = other RNA
acccgacccactagtgaagt

SEQ ID NO: 16339 - RNA, 20 nt, synthetic construct
  source 1..20: mol_type = other RNA
acccgaggtgcacaagggaa

SEQ ID NO: 16340 - RNA, 20 nt, synthetic construct
  source 1..20: mol_type = other RNA
acccgccgcagagccggacc

SEQ ID NO: 16341 - RNA, 20 nt, synthetic construct
  source 1..20: mol_type = other RNA
acccgctctgggtgcgttga

SEQ ID NO: 16342 - RNA, 20 nt, synthetic construct
  source 1..20: mol_type = other RNA
acccggagaggtgaactatt

SEQ ID NO: 16343 - RNA, 20 nt, synthetic construct
  source 1..20: mol_type = other RNA
acccggccccaggcggcaga

SEQ ID NO: 16344 - RNA, 20 nt, synthetic construct
  source 1..20: mol_type = other RNA
acccggctaattaaacaaac

SEQ ID NO: 16345 - RNA, 20 nt, synthetic construct
  source 1..20: mol_type = other RNA
acccgtccaatttctttggc

SEQ ID NO: 16346 - RNA, 20 nt, synthetic construct
  source 1..20: mol_type = other RNA
acccgtggaaatacttgaac

SEQ ID NO: 16347 - RNA, 20 nt, synthetic construct
  source 1..20: mol_type = other RNA
acccgtgtgttttgttgttg

SEQ ID NO: 16348 - RNA, 20 nt, synthetic construct
  source 1..20: mol_type = other RNA
acccgttttttccttcattt

SEQ ID NO: 16349 - RNA, 20 nt, synthetic construct
  source 1..20: mol_type = other RNA
accctaataacaaaatagga

SEQ ID NO: 16350 - RNA, 20 nt, synthetic construct
  source 1..20: mol_type = other RNA
accctacacccatccaccca

SEQ ID NO: 16351 - RNA, 20 nt, synthetic construct
  source 1..20: mol_type = other RNA
accctacagactcaataacc

SEQ ID NO: 16352 - RNA, 20 nt, synthetic construct
  source 1..20: mol_type = other RNA
accctacctagggtgtaaaa

SEQ ID NO: 16353 - RNA, 20 nt, synthetic construct
  source 1..20: mol_type = other RNA
accctaggtagggttggggt

SEQ ID NO: 16354 - RNA, 20 nt, synthetic construct
  source 1..20: mol_type = other RNA
accctatttatgttgcacaa

SEQ ID NO: 16355 - RNA, 20 nt, synthetic construct
  source 1..20: mol_type = other RNA
accctcaaaagatgcagaaa

SEQ ID NO: 16356 - RNA, 20 nt, synthetic construct
  source 1..20: mol_type = other RNA
accctcaaatgccatagagc

SEQ ID NO: 16357 - RNA, 20 nt, synthetic construct
  source 1..20: mol_type = other RNA
accctcaaatgtctcattgt

SEQ ID NO: 16358 - RNA, 20 nt, synthetic construct
  source 1..20: mol_type = other RNA
accctcaatccccatctggg

SEQ ID NO: 16359 - RNA, 20 nt, synthetic construct
  source 1..20: mol_type = other RNA
accctcacagtcacaaagct

SEQ ID NO: 16360 - RNA, 20 nt, synthetic construct
  source 1..20: mol_type = other RNA
accctcacgaaagcggtcaa

SEQ ID NO: 16361 - RNA, 20 nt, synthetic construct
  source 1..20: mol_type = other RNA
accctcaggactctgctcaa

SEQ ID NO: 16362 - RNA, 20 nt, synthetic construct
  source 1..20: mol_type = other RNA
accctcattttataagggtg

SEQ ID NO: 16363 - RNA, 20 nt, synthetic construct
  source 1..20: mol_type = other RNA
accctcctaccttccaaagt

SEQ ID NO: 16364 - RNA, 20 nt, synthetic construct
  source 1..20: mol_type = other RNA
accctcctcctcctggccac

SEQ ID NO: 16365 - RNA, 20 nt, synthetic construct
  source 1..20: mol_type = other RNA
accctcctcctctacaagtt

SEQ ID NO: 16366 - RNA, 20 nt, synthetic construct
  source 1..20: mol_type = other RNA
accctcgagtaaaaagaatg

SEQ ID NO: 16367 - RNA, 20 nt, synthetic construct
  source 1..20: mol_type = other RNA
accctcggcctctactgact

SEQ ID NO: 16368 - RNA, 20 nt, synthetic construct
  source 1..20: mol_type = other RNA
accctctagctccccattcc

SEQ ID NO: 16369 - RNA, 20 nt, synthetic construct
  source 1..20: mol_type = other RNA
accctctggaatgcccatcc

SEQ ID NO: 16370 - RNA, 20 nt, synthetic construct
  source 1..20: mol_type = other RNA
accctgagcatccccgctgc

SEQ ID NO: 16371 - RNA, 20 nt, synthetic construct
  source 1..20: mol_type = other RNA
accctgaggatataacgata

SEQ ID NO: 16372 - RNA, 20 nt, synthetic construct
  source 1..20: mol_type = other RNA
accctgagtccagaggtgag

SEQ ID NO: 16373 - RNA, 20 nt, synthetic construct
  source 1..20: mol_type = other RNA
accctgccccttatcctctt

SEQ ID NO: 16374 - RNA, 20 nt, synthetic construct
  source 1..20: mol_type = other RNA
accctgccttccttgggcac

SEQ ID NO: 16375 - RNA, 20 nt, synthetic construct
  source 1..20: mol_type = other RNA
accctgcgaaggcaatgtaa

SEQ ID NO: 16376 - RNA, 20 nt, synthetic construct
  source 1..20: mol_type = other RNA
accctgctatgcatactttg

SEQ ID NO: 16377 - RNA, 20 nt, synthetic construct
  source 1..20: mol_type = other RNA
accctgctccagtatgacct

SEQ ID NO: 16378 - RNA, 20 nt, synthetic construct
  source 1..20: mol_type = other RNA
accctgctggaacgaatatt

SEQ ID NO: 16379 - RNA, 20 nt, synthetic construct
  source 1..20: mol_type = other RNA
accctggcttgtgacatcaa

SEQ ID NO: 16380 - RNA, 20 nt, synthetic construct
  source 1..20: mol_type = other RNA
accctgggaaagcctggctt

SEQ ID NO: 16381 - RNA, 20 nt, synthetic construct
  source 1..20: mol_type = other RNA
accctgtacccattagacac

SEQ ID NO: 16382 - RNA, 20 nt, synthetic construct
  source 1..20: mol_type = other RNA
accctgtctctaaaaaatac

SEQ ID NO: 16383 - RNA, 20 nt, synthetic construct
  source 1..20: mol_type = other RNA
accctgttagtcccctagtg

SEQ ID NO: 16384 - RNA, 20 nt, synthetic construct
  source 1..20: mol_type = other RNA
accctgttgggctattaagt

SEQ ID NO: 16385 - RNA, 20 nt, synthetic construct
  source 1..20: mol_type = other RNA
accctgtttcccttaatgtt

SEQ ID NO: 16386 - RNA, 20 nt, synthetic construct
  source 1..20: mol_type = other RNA
accctgttttgtagattaaa

SEQ ID NO: 16387 - RNA, 20 nt, synthetic construct
  source 1..20: mol_type = other RNA
acccttaccttaaaccatat

SEQ ID NO: 16388 - RNA, 20 nt, synthetic construct
  source 1..20: mol_type = other RNA
acccttacgcgtggatgtgt

SEQ ID NO: 16389 - RNA, 20 nt, synthetic construct
  source 1..20: mol_type = other RNA
acccttactaaattttgagg

SEQ ID NO: 16390 - RNA, 20 nt, synthetic construct
  source 1..20: mol_type = other RNA
acccttataaaatgagggta

SEQ ID NO: 16391 - RNA, 20 nt, synthetic construct
  source 1..20: mol_type = other RNA
acccttatgtccagccccca

SEQ ID NO: 16392 - RNA, 20 nt, synthetic construct
  source 1..20: mol_type = other RNA
acccttcatcatttgtatta

SEQ ID NO: 16393 - RNA, 20 nt, synthetic construct
  source 1..20: mol_type = other RNA
acccttctgttaatagatag

SEQ ID NO: 16394 - RNA, 20 nt, synthetic construct
  source 1..20: mol_type = other RNA
acccttgaaaatttccagca

SEQ ID NO: 16395 - RNA, 20 nt, synthetic construct
  source 1..20: mol_type = other RNA
acccttgatgtcacaagcca

SEQ ID NO: 16396 - RNA, 20 nt, synthetic construct
  source 1..20: mol_type = other RNA
acccttgctgcttctaccca

SEQ ID NO: 16397 - RNA, 20 nt, synthetic construct
  source 1..20: mol_type = other RNA
acccttggctagactaagaa

SEQ ID NO: 16398 - RNA, 20 nt, synthetic construct
  source 1..20: mol_type = other RNA
acccttgggatgcagcaaaa

SEQ ID NO: 16399 - RNA, 20 nt, synthetic construct
  source 1..20: mol_type = other RNA
acccttggtaaacagcagtc

SEQ ID NO: 16400 - RNA, 20 nt, synthetic construct
  source 1..20: mol_type = other RNA
acccttgtaatcaagtatct

SEQ ID NO: 16401 - RNA, 20 nt, synthetic construct
  source 1..20: mol_type = other RNA
acccttgttggacagctggg

SEQ ID NO: 16402 - RNA, 20 nt, synthetic construct
  source 1..20: mol_type = other RNA
accctttactcagattcacc

SEQ ID NO: 16403 - RNA, 20 nt, synthetic construct
  source 1..20: mol_type = other RNA
accctttatcggataaggaa

SEQ ID NO: 16404 - RNA, 20 nt, synthetic construct
  source 1..20: mol_type = other RNA
accctttattcaaagatcat

SEQ ID NO: 16405 - RNA, 20 nt, synthetic construct
  source 1..20: mol_type = other RNA
accctttccaaattcaaagc

SEQ ID NO: 16406 - RNA, 20 nt, synthetic construct
  source 1..20: mol_type = other RNA
accctttcttaggaagctat

SEQ ID NO: 16407 - RNA, 20 nt, synthetic construct
  source 1..20: mol_type = other RNA
accctttcttgttagtagga

SEQ ID NO: 16408 - RNA, 20 nt, synthetic construct
  source 1..20: mol_type = other RNA
accctttgaagtatgtaatt

SEQ ID NO: 16409 - RNA, 20 nt, synthetic construct
  source 1..20: mol_type = other RNA
accctttgttatctgaacgt

SEQ ID NO: 16410 - RNA, 20 nt, synthetic construct
  source 1..20: mol_type = other RNA
accgacagcagataagatcc

SEQ ID NO: 16411 - RNA, 20 nt, synthetic construct
  source 1..20: mol_type = other RNA
accgacggctcaggcctgtt

SEQ ID NO: 16412 - RNA, 20 nt, synthetic construct
  source 1..20: mol_type = other RNA
accgactgaaaggaaatgag

SEQ ID NO: 16413 - RNA, 20 nt, synthetic construct
  source 1..20: mol_type = other RNA
accgagatacttaagttttt

SEQ ID NO: 16414 - RNA, 20 nt, synthetic construct
  source 1..20: mol_type = other RNA
accgaggaaacccgctctgg

SEQ ID NO: 16415 - RNA, 20 nt, synthetic construct
  source 1..20: mol_type = other RNA
accgagtaatgggatggctg

SEQ ID NO: 16416 - RNA, 20 nt, synthetic construct
  source 1..20: mol_type = other RNA
accgcaacatctgcctcccg

SEQ ID NO: 16417 - RNA, 20 nt, synthetic construct
  source 1..20: mol_type = other RNA
accgcaagagttccaactgt

SEQ ID NO: 16418 - RNA, 20 nt, synthetic construct
  source 1..20: mol_type = other RNA
accgcacctggccgggattt

SEQ ID NO: 16419 - RNA, 20 nt, synthetic construct
  source 1..20: mol_type = other RNA
accgcactcagcctgttggg

SEQ ID NO: 16420 - RNA, 20 nt, synthetic construct
  source 1..20: mol_type = other RNA
accgccttcctaccctgcct

SEQ ID NO: 16421 - RNA, 20 nt, synthetic construct
  source 1..20: mol_type = other RNA
accgcgcccggccaaatatc

SEQ ID NO: 16422 - RNA, 20 nt, synthetic construct
  source 1..20: mol_type = other RNA
accgcgcccggcccagattc

SEQ ID NO: 16423 - RNA, 20 nt, synthetic construct
  source 1..20: mol_type = other RNA
accgcgcccggccgagaaat

SEQ ID NO: 16424 - RNA, 20 nt, synthetic construct
  source 1..20: mol_type = other RNA
accgcgcctggtgattaaag

SEQ ID NO: 16425 - RNA, 20 nt, synthetic construct
  source 1..20: mol_type = other RNA
accgctccacgcccattagg

SEQ ID NO: 16426 - RNA, 20 nt, synthetic construct
  source 1..20: mol_type = other RNA
accgctttcgtgagggtttc

SEQ ID NO: 16427 - RNA, 20 nt, synthetic construct
  source 1..20: mol_type = other RNA
accggaaaatgcttaacaag

SEQ ID NO: 16428 - RNA, 20 nt, synthetic construct
  source 1..20: mol_type = other RNA
accggaacttgagtttgttc

SEQ ID NO: 16429 - RNA, 20 nt, synthetic construct
  source 1..20: mol_type = other RNA
accggatgaggtggctcacg

SEQ ID NO: 16430 - RNA, 20 nt, synthetic construct
  source 1..20: mol_type = other RNA
accggcatccgccaccacgc

SEQ ID NO: 16431 - RNA, 20 nt, synthetic construct
  source 1..20: mol_type = other RNA
accggggactgcaacagatc

SEQ ID NO: 16432 - RNA, 20 nt, synthetic construct
  source 1..20: mol_type = other RNA
accgtaacttcttttcttaa

SEQ ID NO: 16433 - RNA, 20 nt, synthetic construct
  source 1..20: mol_type = other RNA
accgtgacagaacaaataac

SEQ ID NO: 16434 - RNA, 20 nt, synthetic construct
  source 1..20: mol_type = other RNA
accgtgcaactagagaaagc

SEQ ID NO: 16435 - RNA, 20 nt, synthetic construct
  source 1..20: mol_type = other RNA
accgtgcccggccagacatt

SEQ ID NO: 16436 - RNA, 20 nt, synthetic construct
  source 1..20: mol_type = other RNA
accgtgccgggcttggtatg

SEQ ID NO: 16437 - RNA, 20 nt, synthetic construct
  source 1..20: mol_type = other RNA
accgtggggggagggagggg

SEQ ID NO: 16438 - RNA, 20 nt, synthetic construct
  source 1..20: mol_type = other RNA
acctaaaaagggagtcagta

SEQ ID NO: 16439 - RNA, 20 nt, synthetic construct
  source 1..20: mol_type = other RNA
acctaaaaggttgcttaatt

SEQ ID NO: 16440 - RNA, 20 nt, synthetic construct
  source 1..20: mol_type = other RNA
acctaaaatcttattcccca

SEQ ID NO: 16441 - RNA, 20 nt, synthetic construct
  source 1..20: mol_type = other RNA
acctaaacctgtgatttcca

SEQ ID NO: 16442 - RNA, 20 nt, synthetic construct
  source 1..20: mol_type = other RNA
acctaaagatatgtgtagga

SEQ ID NO: 16443 - RNA, 20 nt, synthetic construct
  source 1..20: mol_type = other RNA
acctaaagttgaggttgaag

SEQ ID NO: 16444 - RNA, 20 nt, synthetic construct
  source 1..20: mol_type = other RNA
acctaaagttttaagaaaag

SEQ ID NO: 16445 - RNA, 20 nt, synthetic construct
  source 1..20: mol_type = other RNA
acctaaatgtccatcgagag

SEQ ID NO: 16446 - RNA, 20 nt, synthetic construct
  source 1..20: mol_type = other RNA
acctaacaatgattatttcg

SEQ ID NO: 16447 - RNA, 20 nt, synthetic construct
  source 1..20: mol_type = other RNA
acctaacagccggcatatgt

SEQ ID NO: 16448 - RNA, 20 nt, synthetic construct
  source 1..20: mol_type = other RNA
acctaacatgtcttggtgtg

SEQ ID NO: 16449 - RNA, 20 nt, synthetic construct
  source 1..20: mol_type = other RNA
acctaactactaataaatgc

SEQ ID NO: 16450 - RNA, 20 nt, synthetic construct
  source 1..20: mol_type = other RNA
acctaagaaaggtctagtgt

SEQ ID NO: 16451 - RNA, 20 nt, synthetic construct
  source 1..20: mol_type = other RNA
acctaagcatcgtgaagtct

SEQ ID NO: 16452 - RNA, 20 nt, synthetic construct
  source 1..20: mol_type = other RNA
acctaagcttaagagctaag

SEQ ID NO: 16453 - RNA, 20 nt, synthetic construct
  source 1..20: mol_type = other RNA
acctaagcttgggtaggaag

SEQ ID NO: 16454 - RNA, 20 nt, synthetic construct
  source 1..20: mol_type = other RNA
acctaataaaatgtttagcg

SEQ ID NO: 16455 - RNA, 20 nt, synthetic construct
  source 1..20: mol_type = other RNA
acctacattaatctcatcca

SEQ ID NO: 16456 - RNA, 20 nt, synthetic construct
  source 1..20: mol_type = other RNA
acctactaaaagttgacaaa

SEQ ID NO: 16457 - RNA, 20 nt, synthetic construct
  source 1..20: mol_type = other RNA
acctactttaaatcagggcc

SEQ ID NO: 16458 - RNA, 20 nt, synthetic construct
  source 1..20: mol_type = other RNA
acctagaaaaacaccaaaaa

SEQ ID NO: 16459 - RNA, 20 nt, synthetic construct
  source 1..20: mol_type = other RNA
acctagattttaaaaatctg

SEQ ID NO: 16460 - RNA, 20 nt, synthetic construct
  source 1..20: mol_type = other RNA
acctagcctctctgggcttc

SEQ ID NO: 16461 - RNA, 20 nt, synthetic construct
  source 1..20: mol_type = other RNA
acctagctgttttcatgcga

SEQ ID NO: 16462 - RNA, 20 nt, synthetic construct
  source 1..20: mol_type = other RNA
acctaggcctattttaggct

SEQ ID NO: 16463 - RNA, 20 nt, synthetic construct
  source 1..20: mol_type = other RNA
acctagggtgtaaaaggcta

SEQ ID NO: 16464 - RNA, 20 nt, synthetic construct
  source 1..20: mol_type = other RNA
acctagtacgtaacctaaag

SEQ ID NO: 16465 - RNA, 20 nt, synthetic construct
  source 1..20: mol_type = other RNA
acctagttttccaatccggg

SEQ ID NO: 16466 - RNA, 20 nt, synthetic construct
  source 1..20: mol_type = other RNA
acctataagacccagtggct

SEQ ID NO: 16467 - RNA, 20 nt, synthetic construct
  source 1..20: mol_type = other RNA
acctatagaattcttcttct

SEQ ID NO: 16468 - RNA, 20 nt, synthetic construct
  source 1..20: mol_type = other RNA
acctatctattaacagaagg

SEQ ID NO: 16469 - RNA, 20 nt, synthetic construct
  source 1..20: mol_type = other RNA
acctatgaataggtgtgtgt

SEQ ID NO: 16470 - RNA, 20 nt, synthetic construct
  source 1..20: mol_type = other RNA
acctattatttagagtttgc

SEQ ID NO: 16471 - RNA, 20 nt, synthetic construct
  source 1..20: mol_type = other RNA
acctattcataggtaatact

SEQ ID NO: 16472 - RNA, 20 nt, synthetic construct
  source 1..20: mol_type = other RNA
acctatttagagggatgaat

SEQ ID NO: 16473 - RNA, 20 nt, synthetic construct
  source 1..20: mol_type = other RNA
acctcaaactagaaaaagaa

SEQ ID NO: 16474 - RNA, 20 nt, synthetic construct
  source 1..20: mol_type = other RNA
acctcaaaggagagaagagg

SEQ ID NO: 16475 - RNA, 20 nt, synthetic construct
  source 1..20: mol_type = other RNA
acctcaaagtggaaacaact

SEQ ID NO: 16476 - RNA, 20 nt, synthetic construct
  source 1..20: mol_type = other RNA
acctcaaattaatcagtctg

SEQ ID NO: 16477 - RNA, 20 nt, synthetic construct
  source 1..20: mol_type = other RNA
acctcaaattctgagggaaa

SEQ ID NO: 16478 - RNA, 20 nt, synthetic construct
  source 1..20: mol_type = other RNA
acctcaaattgtgtgttctc

SEQ ID NO: 16479 - RNA, 20 nt, synthetic construct
  source 1..20: mol_type = other RNA
acctcaactttaggttacgt

SEQ ID NO: 16480 - RNA, 20 nt, synthetic construct
  source 1..20: mol_type = other RNA
acctcaagcgatccagccgc

SEQ ID NO: 16481 - RNA, 20 nt, synthetic construct
  source 1..20: mol_type = other RNA
acctcaaggcagaacacact

SEQ ID NO: 16482 - RNA, 20 nt, synthetic construct
  source 1..20: mol_type = other RNA
acctcaaggccaactgtcct

SEQ ID NO: 16483 - RNA, 20 nt, synthetic construct
  source 1..20: mol_type = other RNA
acctcaagtcttttcctaga

SEQ ID NO: 16484 - RNA, 20 nt, synthetic construct
  source 1..20: mol_type = other RNA
acctcaagtgatgcaactcc

SEQ ID NO: 16485 - RNA, 20 nt, synthetic construct
  source 1..20: mol_type = other RNA
acctcacattcacagcgtgc

SEQ ID NO: 16486 - RNA, 20 nt, synthetic construct
  source 1..20: mol_type = other RNA
acctcagaaacaaacaaaaa

SEQ ID NO: 16487 - RNA, 20 nt, synthetic construct
  source 1..20: mol_type = other RNA
acctcagccccacaagtagc

SEQ ID NO: 16488 - RNA, 20 nt, synthetic construct
  source 1..20: mol_type = other RNA
acctcaggcagtctagtcca

SEQ ID NO: 16489 - RNA, 20 nt, synthetic construct
  source 1..20: mol_type = other RNA
acctcaggtttagaatatat

SEQ ID NO: 16490 - RNA, 20 nt, synthetic construct
  source 1..20: mol_type = other RNA
acctcagtggtagttacaca

SEQ ID NO: 16491 - RNA, 20 nt, synthetic construct
  source 1..20: mol_type = other RNA
acctcagttaaacccaacaa

SEQ ID NO: 16492 - RNA, 20 nt, synthetic construct
  source 1..20: mol_type = other RNA
acctcataagaactcctggt

SEQ ID NO: 16493 - RNA, 20 nt, synthetic construct
  source 1..20: mol_type = other RNA
acctcatccggtctcagttt

SEQ ID NO: 16494 - RNA, 20 nt, synthetic construct
  source 1..20: mol_type = other RNA
acctcatctctgcaaaacat

SEQ ID NO: 16495 - RNA, 20 nt, synthetic construct
  source 1..20: mol_type = other RNA
acctcatcttagccgggagg

SEQ ID NO: 16496 - RNA, 20 nt, synthetic construct
  source 1..20: mol_type = other RNA
acctcatgtaactaattact

SEQ ID NO: 16497 - RNA, 20 nt, synthetic construct
  source 1..20: mol_type = other RNA
acctcatttgcagagcaaac

SEQ ID NO: 16498 - RNA, 20 nt, synthetic construct
  source 1..20: mol_type = other RNA
acctccagcgctaagcactg

SEQ ID NO: 16499 - RNA, 20 nt, synthetic construct
  source 1..20: mol_type = other RNA
acctccagtgtcctgaatga

SEQ ID NO: 16500 - RNA, 20 nt, synthetic construct
  source 1..20: mol_type = other RNA
acctccatcactgactggct

SEQ ID NO: 16501 - RNA, 20 nt, synthetic construct
  source 1..20: mol_type = other RNA
acctcccaaaggactgggat

SEQ ID NO: 16502 - RNA, 20 nt, synthetic construct
  source 1..20: mol_type = other RNA
acctcccaacaggctgagtg

SEQ ID NO: 16503 - RNA, 20 nt, synthetic construct
  source 1..20: mol_type = other RNA
acctcccatgcattcgtccc

SEQ ID NO: 16504 - RNA, 20 nt, synthetic construct
  source 1..20: mol_type = other RNA
acctcccttcacaaagccct

SEQ ID NO: 16505 - RNA, 20 nt, synthetic construct
  source 1..20: mol_type = other RNA
acctccgtttttcaggttca

SEQ ID NO: 16506 - RNA, 20 nt, synthetic construct
  source 1..20: mol_type = other RNA
acctcctagattgaccttct

SEQ ID NO: 16507 - RNA, 20 nt, synthetic construct
  source 1..20: mol_type = other RNA
acctcctcccacttacatca

SEQ ID NO: 16508 - RNA, 20 nt, synthetic construct
  source 1..20: mol_type = other RNA
acctcctccggggacccagt

SEQ ID NO: 16509 - RNA, 20 nt, synthetic construct
  source 1..20: mol_type = other RNA
acctcctggttttgatcatc

SEQ ID NO: 16510 - RNA, 20 nt, synthetic construct
  source 1..20: mol_type = other RNA
acctcgaagcacaaccactg

SEQ ID NO: 16511 - RNA, 20 nt, synthetic construct
  source 1..20: mol_type = other RNA
acctcgggttcaagccccag

SEQ ID NO: 16512 - RNA, 20 nt, synthetic construct
  source 1..20: mol_type = other RNA
acctctacacaaaaatccag

SEQ ID NO: 16513 - RNA, 20 nt, synthetic construct
  source 1..20: mol_type = other RNA
acctctattaaatcatgatg

SEQ ID NO: 16514 - RNA, 20 nt, synthetic construct
  source 1..20: mol_type = other RNA
acctctccgggtaaaaagcc

SEQ ID NO: 16515 - RNA, 20 nt, synthetic construct
  source 1..20: mol_type = other RNA
acctctgaagagtctatctt

SEQ ID NO: 16516 - RNA, 20 nt, synthetic construct
  source 1..20: mol_type = other RNA
acctctgcagttagcatgcc

SEQ ID NO: 16517 - RNA, 20 nt, synthetic construct
  source 1..20: mol_type = other RNA
acctctggaaaggacttgat

SEQ ID NO: 16518 - RNA, 20 nt, synthetic construct
  source 1..20: mol_type = other RNA
acctctggactcagggtcac

SEQ ID NO: 16519 - RNA, 20 nt, synthetic construct
  source 1..20: mol_type = other RNA
acctctgggatgctcagttt

SEQ ID NO: 16520 - RNA, 20 nt, synthetic construct
  source 1..20: mol_type = other RNA
acctctggtattttaagatt

SEQ ID NO: 16521 - RNA, 20 nt, synthetic construct
  source 1..20: mol_type = other RNA
acctcttactaaaaagaaaa

SEQ ID NO: 16522 - RNA, 20 nt, synthetic construct
  source 1..20: mol_type = other RNA
acctcttgaagtcagttaca

SEQ ID NO: 16523 - RNA, 20 nt, synthetic construct
  source 1..20: mol_type = other RNA
acctgaaaaacggaggttgc

SEQ ID NO: 16524 - RNA, 20 nt, synthetic construct
  source 1..20: mol_type = other RNA
acctgaaaagtgtattattc

SEQ ID NO: 16525 - RNA, 20 nt, synthetic construct
  source 1..20: mol_type = other RNA
acctgaaatctgatttgttt

SEQ ID NO: 16526 - RNA, 20 nt, synthetic construct
  source 1..20: mol_type = other RNA
acctgaaatggcttaaggaa

SEQ ID NO: 16527 - RNA, 20 nt, synthetic construct
  source 1..20: mol_type = other RNA
acctgaaattctcaaatgaa

SEQ ID NO: 16528 - RNA, 20 nt, synthetic construct
  source 1..20: mol_type = other RNA
acctgaacccaggaggcaaa

SEQ ID NO: 16529 - RNA, 20 nt, synthetic construct
  source 1..20: mol_type = other RNA
acctgaagactggatttgat

SEQ ID NO: 16530 - RNA, 20 nt, synthetic construct
  source 1..20: mol_type = other RNA
acctgaatgactgttgcctc

SEQ ID NO: 16531 - RNA, 20 nt, synthetic construct
  source 1..20: mol_type = other RNA
acctgacaagtagtacaaaa

SEQ ID NO: 16532 - RNA, 20 nt, synthetic construct
  source 1..20: mol_type = other RNA
acctgacttcaaactatact

SEQ ID NO: 16533 - RNA, 20 nt, synthetic construct
  source 1..20: mol_type = other RNA
acctgaggggtcttatgctg

SEQ ID NO: 16534 - RNA, 20 nt, synthetic construct
  source 1..20: mol_type = other RNA
acctgaggtctttaaaagaa

SEQ ID NO: 16535 - RNA, 20 nt, synthetic construct
  source 1..20: mol_type = other RNA
acctgattagaggctgcacc

SEQ ID NO: 16536 - RNA, 20 nt, synthetic construct
  source 1..20: mol_type = other RNA
acctgattcttccactagtg

SEQ ID NO: 16537 - RNA, 20 nt, synthetic construct
  source 1..20: mol_type = other RNA
acctgcacaaaggattggga

SEQ ID NO: 16538 - RNA, 20 nt, synthetic construct
  source 1..20: mol_type = other RNA
acctgcaggtatttctaaat

SEQ ID NO: 16539 - RNA, 20 nt, synthetic construct
  source 1..20: mol_type = other RNA
acctgcaggttgatactagt

SEQ ID NO: 16540 - RNA, 20 nt, synthetic construct
  source 1..20: mol_type = other RNA
acctgcagtctgcaggcaga

SEQ ID NO: 16541 - RNA, 20 nt, synthetic construct
  source 1..20: mol_type = other RNA
acctgcagtggcgtgtgccc

SEQ ID NO: 16542 - RNA, 20 nt, synthetic construct
  source 1..20: mol_type = other RNA
acctgcatggtgtaaaatac

SEQ ID NO: 16543 - RNA, 20 nt, synthetic construct
  source 1..20: mol_type = other RNA
acctgccagagttggcacag

SEQ ID NO: 16544 - RNA, 20 nt, synthetic construct
  source 1..20: mol_type = other RNA
acctgccatggtgttaaata

SEQ ID NO: 16545 - RNA, 20 nt, synthetic construct
  source 1..20: mol_type = other RNA
acctgcgagcggcgggcttc

SEQ ID NO: 16546 - RNA, 20 nt, synthetic construct
  source 1..20: mol_type = other RNA
acctgctacgaatgaactcc

SEQ ID NO: 16547 - RNA, 20 nt, synthetic construct
  source 1..20: mol_type = other RNA
acctgctctttatctccaca

SEQ ID NO: 16548 - RNA, 20 nt, synthetic construct
  source 1..20: mol_type = other RNA
acctgctttcctcatgtcca

SEQ ID NO: 16549 - RNA, 20 nt, synthetic construct
  source 1..20: mol_type = other RNA
acctgctttctactagtata

SEQ ID NO: 16550 - RNA, 20 nt, synthetic construct
  source 1..20: mol_type = other RNA
acctgctttcttggggctct

SEQ ID NO: 16551 - RNA, 20 nt, synthetic construct
  source 1..20: mol_type = other RNA
acctggaaattattcaatat

SEQ ID NO: 16552 - RNA, 20 nt, synthetic construct
  source 1..20: mol_type = other RNA
acctggaatcctctaccaaa

SEQ ID NO: 16553 - RNA, 20 nt, synthetic construct
  source 1..20: mol_type = other RNA
acctggaatgggttggagga

SEQ ID NO: 16554 - RNA, 20 nt, synthetic construct
  source 1..20: mol_type = other RNA
acctggagcctgaggacact

SEQ ID NO: 16555 - RNA, 20 nt, synthetic construct
  source 1..20: mol_type = other RNA
acctggatcaagtgggattt

SEQ ID NO: 16556 - RNA, 20 nt, synthetic construct
  source 1..20: mol_type = other RNA
acctggcaacaaaggcgaag

SEQ ID NO: 16557 - RNA, 20 nt, synthetic construct
  source 1..20: mol_type = other RNA
acctggcaatactctcagaa

SEQ ID NO: 16558 - RNA, 20 nt, synthetic construct
  source 1..20: mol_type = other RNA
acctggcagtctaggaaaag

SEQ ID NO: 16559 - RNA, 20 nt, synthetic construct
  source 1..20: mol_type = other RNA
acctggcccctttcaagatt

SEQ ID NO: 16560 - RNA, 20 nt, synthetic construct
  source 1..20: mol_type = other RNA
acctggccgggatttacttc

SEQ ID NO: 16561 - RNA, 20 nt, synthetic construct
  source 1..20: mol_type = other RNA
acctggctaatttttaaatg

SEQ ID NO: 16562 - RNA, 20 nt, synthetic construct
  source 1..20: mol_type = other RNA
acctgggagaaagaccaaga

SEQ ID NO: 16563 - RNA, 20 nt, synthetic construct
  source 1..20: mol_type = other RNA
acctgggggagactgtgcaa

SEQ ID NO: 16564 - RNA, 20 nt, synthetic construct
  source 1..20: mol_type = other RNA
acctgggtatacagcaaaag

SEQ ID NO: 16565 - RNA, 20 nt, synthetic construct
  source 1..20: mol_type = other RNA
acctggtaataatgaaagct

SEQ ID NO: 16566 - RNA, 20 nt, synthetic construct
  source 1..20: mol_type = other RNA
acctggtactctatgatata

SEQ ID NO: 16567 - RNA, 20 nt, synthetic construct
  source 1..20: mol_type = other RNA
acctggtatgagtgtttccc

SEQ ID NO: 16568 - RNA, 20 nt, synthetic construct
  source 1..20: mol_type = other RNA
acctggtccttaaatttcta

SEQ ID NO: 16569 - RNA, 20 nt, synthetic construct
  source 1..20: mol_type = other RNA
acctgtaatttttctctttt

SEQ ID NO: 16570 - RNA, 20 nt, synthetic construct
  source 1..20: mol_type = other RNA
acctgtagaaaatagggacg

SEQ ID NO: 16571 - RNA, 20 nt, synthetic construct
  source 1..20: mol_type = other RNA
acctgtagattgggcttttc

SEQ ID NO: 16572 - RNA, 20 nt, synthetic construct
  source 1..20: mol_type = other RNA
acctgtataaataaaatgtc

SEQ ID NO: 16573 - RNA, 20 nt, synthetic construct
  source 1..20: mol_type = other RNA
acctgtcagaaacaccaaca

SEQ ID NO: 16574 - RNA, 20 nt, synthetic construct
  source 1..20: mol_type = other RNA
acctgtcatgtcaaattttt

SEQ ID NO: 16575 - RNA, 20 nt, synthetic construct
  source 1..20: mol_type = other RNA
acctgtccttgtgttttatt

SEQ ID NO: 16576 - RNA, 20 nt, synthetic construct
  source 1..20: mol_type = other RNA
acctgtctttcccattacca

SEQ ID NO: 16577 - RNA, 20 nt, synthetic construct
  source 1..20: mol_type = other RNA
acctgtgatttccagtgttt

SEQ ID NO: 16578 - RNA, 20 nt, synthetic construct
  source 1..20: mol_type = other RNA
acctgttacatggttctgtg

SEQ ID NO: 16579 - RNA, 20 nt, synthetic construct
  source 1..20: mol_type = other RNA
acctgttcatttgagaattt

SEQ ID NO: 16580 - RNA, 20 nt, synthetic construct
  source 1..20: mol_type = other RNA
acctgttgaatagcaactgt

SEQ ID NO: 16581 - RNA, 20 nt, synthetic construct
  source 1..20: mol_type = other RNA
acctgttgattgttgccatc

SEQ ID NO: 16582 - RNA, 20 nt, synthetic construct
  source 1..20: mol_type = other RNA
acctgtttaaaaagaaaaag

SEQ ID NO: 16583 - RNA, 20 nt, synthetic construct
  source 1..20: mol_type = other RNA
accttaaaagagtgaaatga

SEQ ID NO: 16584 - RNA, 20 nt, synthetic construct
  source 1..20: mol_type = other RNA
accttaaaccatatacaaaa

SEQ ID NO: 16585 - RNA, 20 nt, synthetic construct
  source 1..20: mol_type = other RNA
accttacactcaaaagccat

SEQ ID NO: 16586 - RNA, 20 nt, synthetic construct
  source 1..20: mol_type = other RNA
accttacattgtaatcctgt

SEQ ID NO: 16587 - RNA, 20 nt, synthetic construct
  source 1..20: mol_type = other RNA
accttactgtaatattgtat

SEQ ID NO: 16588 - RNA, 20 nt, synthetic construct
  source 1..20: mol_type = other RNA
accttagaaatttaaggacc

SEQ ID NO: 16589 - RNA, 20 nt, synthetic construct
  source 1..20: mol_type = other RNA
accttagcccaagctaccat

SEQ ID NO: 16590 - RNA, 20 nt, synthetic construct
  source 1..20: mol_type = other RNA
accttagtggttgacccata

SEQ ID NO: 16591 - RNA, 20 nt, synthetic construct
  source 1..20: mol_type = other RNA
accttagttttcacttttgt

SEQ ID NO: 16592 - RNA, 20 nt, synthetic construct
  source 1..20: mol_type = other RNA
accttatagatgacgaaagt

SEQ ID NO: 16593 - RNA, 20 nt, synthetic construct
  source 1..20: mol_type = other RNA
accttatgtgaaagtagagg

SEQ ID NO: 16594 - RNA, 20 nt, synthetic construct
  source 1..20: mol_type = other RNA
accttattcaaataattgct

SEQ ID NO: 16595 - RNA, 20 nt, synthetic construct
  source 1..20: mol_type = other RNA
accttcaccaaagatttact

SEQ ID NO: 16596 - RNA, 20 nt, synthetic construct
  source 1..20: mol_type = other RNA
accttcagaagccctgcagc

SEQ ID NO: 16597 - RNA, 20 nt, synthetic construct
  source 1..20: mol_type = other RNA
accttcatactattttctat

SEQ ID NO: 16598 - RNA, 20 nt, synthetic construct
  source 1..20: mol_type = other RNA
accttccaaagtatgcatag

SEQ ID NO: 16599 - RNA, 20 nt, synthetic construct
  source 1..20: mol_type = other RNA
accttccctactcactgaaa

SEQ ID NO: 16600 - RNA, 20 nt, synthetic construct
  source 1..20: mol_type = other RNA
accttcctcttcctcatccc

SEQ ID NO: 16601 - RNA, 20 nt, synthetic construct
  source 1..20: mol_type = other RNA
accttccttgtgtcttaaat

SEQ ID NO: 16602 - RNA, 20 nt, synthetic construct
  source 1..20: mol_type = other RNA
accttctaaaatcatcacag

SEQ ID NO: 16603 - RNA, 20 nt, synthetic construct
  source 1..20: mol_type = other RNA
accttctacttatcttttct

SEQ ID NO: 16604 - RNA, 20 nt, synthetic construct
  source 1..20: mol_type = other RNA
accttctgctgggcccactc

SEQ ID NO: 16605 - RNA, 20 nt, synthetic construct
  source 1..20: mol_type = other RNA
accttctggggttcaaacca

SEQ ID NO: 16606 - RNA, 20 nt, synthetic construct
  source 1..20: mol_type = other RNA
accttcttatttccttccag

SEQ ID NO: 16607 - RNA, 20 nt, synthetic construct
  source 1..20: mol_type = other RNA
accttcttgagagtctctta

SEQ ID NO: 16608 - RNA, 20 nt, synthetic construct
  source 1..20: mol_type = other RNA
accttgaaaatgcccttatt

SEQ ID NO: 16609 - RNA, 20 nt, synthetic construct
  source 1..20: mol_type = other RNA
accttgaaaggatactgaga

SEQ ID NO: 16610 - RNA, 20 nt, synthetic construct
  source 1..20: mol_type = other RNA
accttgaacatgaacgagaa

SEQ ID NO: 16611 - RNA, 20 nt, synthetic construct
  source 1..20: mol_type = other RNA
accttgaactgggacttcta

SEQ ID NO: 16612 - RNA, 20 nt, synthetic construct
  source 1..20: mol_type = other RNA
accttgaagtacttcagcgc

SEQ ID NO: 16613 - RNA, 20 nt, synthetic construct
  source 1..20: mol_type = other RNA
accttgacaataaatggtgc

SEQ ID NO: 16614 - RNA, 20 nt, synthetic construct
  source 1..20: mol_type = other RNA
accttgatttatggcctaag

SEQ ID NO: 16615 - RNA, 20 nt, synthetic construct
  source 1..20: mol_type = other RNA
accttgctcattcatctgca

SEQ ID NO: 16616 - RNA, 20 nt, synthetic construct
  source 1..20: mol_type = other RNA
accttggagagaaaccttgg

SEQ ID NO: 16617 - RNA, 20 nt, synthetic construct
  source 1..20: mol_type = other RNA
accttgggagaaaattttta

SEQ ID NO: 16618 - RNA, 20 nt, synthetic construct
  source 1..20: mol_type = other RNA
accttgggaggctgaggctg

SEQ ID NO: 16619 - RNA, 20 nt, synthetic construct
  source 1..20: mol_type = other RNA
accttggtgtgcttctgata

SEQ ID NO: 16620 - RNA, 20 nt, synthetic construct
  source 1..20: mol_type = other RNA
accttgtatccagtaatctt

SEQ ID NO: 16621 - RNA, 20 nt, synthetic construct
  source 1..20: mol_type = other RNA
accttgtgcatgtgcaggaa

SEQ ID NO: 16622 - RNA, 20 nt, synthetic construct
  source 1..20: mol_type = other RNA
acctttaagttctccaagtt

SEQ ID NO: 16623 - RNA, 20 nt, synthetic construct
  source 1..20: mol_type = other RNA
acctttatctttggatatcc

SEQ ID NO: 16624 - RNA, 20 nt, synthetic construct
  source 1..20: mol_type = other RNA
acctttattaactagaattg

SEQ ID NO: 16625 - RNA, 20 nt, synthetic construct
  source 1..20: mol_type = other RNA
acctttcctgcccctccact

SEQ ID NO: 16626 - RNA, 20 nt, synthetic construct
  source 1..20: mol_type = other RNA
acctttcgctatcagtagtt

SEQ ID NO: 16627 - RNA, 20 nt, synthetic construct
  source 1..20: mol_type = other RNA
acctttctcaaagcccacca

SEQ ID NO: 16628 - RNA, 20 nt, synthetic construct
  source 1..20: mol_type = other RNA
acctttcttaggtttctcat

SEQ ID NO: 16629 - RNA, 20 nt, synthetic construct
  source 1..20: mol_type = other RNA
acctttgcctcctgggttca

SEQ ID NO: 16630 - RNA, 20 nt, synthetic construct
  source 1..20: mol_type = other RNA
acctttggctactgtaaaca

SEQ ID NO: 16631 - RNA, 20 nt, synthetic construct
  source 1..20: mol_type = other RNA
acctttgtattcatccagtt

SEQ ID NO: 16632 - RNA, 20 nt, synthetic construct
  source 1..20: mol_type = other RNA
acctttgtccactgtcagtg

SEQ ID NO: 16633 - RNA, 20 nt, synthetic construct
  source 1..20: mol_type = other RNA
acctttgttgaaaacgagga

SEQ ID NO: 16634 - RNA, 20 nt, synthetic construct
  source 1..20: mol_type = other RNA
accttttaatgatttgtttg

SEQ ID NO: 16635 - RNA, 20 nt, synthetic construct
  source 1..20: mol_type = other RNA
accttttaggtgccccactc

SEQ ID NO: 16636 - RNA, 20 nt, synthetic construct
  source 1..20: mol_type = other RNA
accttttgtagaccctgtta

SEQ ID NO: 16637 - RNA, 20 nt, synthetic construct
  source 1..20: mol_type = other RNA
accttttgttattaaaatgg

SEQ ID NO: 16638 - RNA, 20 nt, synthetic construct
  source 1..20: mol_type = other RNA
acctttttcttttcacataa

SEQ ID NO: 16639 - RNA, 20 nt, synthetic construct
  source 1..20: mol_type = other RNA
acctttttgggatctgtcat

SEQ ID NO: 16640 - RNA, 20 nt, synthetic construct
  source 1..20: mol_type = other RNA
accttttttaaggaaaagtc

SEQ ID NO: 16641 - RNA, 20 nt, synthetic construct
  source 1..20: mol_type = other RNA
acgaaaatatccctggggtt

SEQ ID NO: 16642 - RNA, 20 nt, synthetic construct
  source 1..20: mol_type = other RNA
acgaaagcctttattttttc

SEQ ID NO: 16643 - RNA, 20 nt, synthetic construct
  source 1..20: mol_type = other RNA
acgaaagcggtcaacgcacc

SEQ ID NO: 16644 - RNA, 20 nt, synthetic construct
  source 1..20: mol_type = other RNA
acgaaagtgaagcccagaga

SEQ ID NO: 16645 - RNA, 20 nt, synthetic construct
  source 1..20: mol_type = other RNA
acgaaagtgctctacccttt

SEQ ID NO: 16646 - RNA, 20 nt, synthetic construct
  source 1..20: mol_type = other RNA
acgaaccaattaccataaag

SEQ ID NO: 16647 - RNA, 20 nt, synthetic construct
  source 1..20: mol_type = other RNA
acgaagctacagtaatcaaa

SEQ ID NO: 16648 - RNA, 20 nt, synthetic construct
  source 1..20: mol_type = other RNA
acgaagtcacattctagtga

SEQ ID NO: 16649 - RNA, 20 nt, synthetic construct
  source 1..20: mol_type = other RNA
acgaatgaaaacacaacata

SEQ ID NO: 16650 - RNA, 20 nt, synthetic construct
  source 1..20: mol_type = other RNA
acgaatgaactcctatagtt

SEQ ID NO: 16651 - RNA, 20 nt, synthetic construct
  source 1..20: mol_type = other RNA
acgaatgcatgggaggtaat

SEQ ID NO: 16652 - RNA, 20 nt, synthetic construct
  source 1..20: mol_type = other RNA
acgaattctttaaaactgct

SEQ ID NO: 16653 - RNA, 20 nt, synthetic construct
  source 1..20: mol_type = other RNA
acgacaatctctggggttag

SEQ ID NO: 16654 - RNA, 20 nt, synthetic construct
  source 1..20: mol_type = other RNA
acgacaccagaactacacat

SEQ ID NO: 16655 - RNA, 20 nt, synthetic construct
  source 1..20: mol_type = other RNA
acgacagcaggaaaagctac

SEQ ID NO: 16656 - RNA, 20 nt, synthetic construct
  source 1..20: mol_type = other RNA
acgaccggacgtggtggctc

SEQ ID NO: 16657 - RNA, 20 nt, synthetic construct
  source 1..20: mol_type = other RNA
acgaccttgctcattcatct

SEQ ID NO: 16658 - RNA, 20 nt, synthetic construct
  source 1..20: mol_type = other RNA
acgacgctcttgttcaaaaa

SEQ ID NO: 16659 - RNA, 20 nt, synthetic construct
  source 1..20: mol_type = other RNA
acgacgtatgcaacttactc

SEQ ID NO: 16660 - RNA, 20 nt, synthetic construct
  source 1..20: mol_type = other RNA
acgagaaaagcacaggcatc

SEQ ID NO: 16661 - RNA, 20 nt, synthetic construct
  source 1..20: mol_type = other RNA
acgagaacaaaacaagaaga

SEQ ID NO: 16662 - RNA, 20 nt, synthetic construct
  source 1..20: mol_type = other RNA
acgagaaggacagcttccac

SEQ ID NO: 16663 - RNA, 20 nt, synthetic construct
  source 1..20: mol_type = other RNA
acgagactgttagggactta

SEQ ID NO: 16664 - RNA, 20 nt, synthetic construct
  source 1..20: mol_type = other RNA
acgaggaaaagagaacattg

SEQ ID NO: 16665 - RNA, 20 nt, synthetic construct
  source 1..20: mol_type = other RNA
acgaggacagactgcagttg

SEQ ID NO: 16666 - RNA, 20 nt, synthetic construct
  source 1..20: mol_type = other RNA
acgagtaatggatgttttta

SEQ ID NO: 16667 - RNA, 20 nt, synthetic construct
  source 1..20: mol_type = other RNA
acgagtatcatataaattgc

SEQ ID NO: 16668 - RNA, 20 nt, synthetic construct
  source 1..20: mol_type = other RNA
acgagtattcaagtttcacc

SEQ ID NO: 16669 - RNA, 20 nt, synthetic construct
  source 1..20: mol_type = other RNA
acgagtgtgtttcgcaaagt

SEQ ID NO: 16670 - RNA, 20 nt, synthetic construct
  source 1..20: mol_type = other RNA
acgagttatgcaagatgtca

SEQ ID NO: 16671 - RNA, 20 nt, synthetic construct
  source 1..20: mol_type = other RNA
acgagttcaggaccagcttg

SEQ ID NO: 16672 - RNA, 20 nt, synthetic construct
  source 1..20: mol_type = other RNA
acgataaacttcagttttat

SEQ ID NO: 16673 - RNA, 20 nt, synthetic construct
  source 1..20: mol_type = other RNA
acgatagtctcctatattgt

SEQ ID NO: 16674 - RNA, 20 nt, synthetic construct
  source 1..20: mol_type = other RNA
acgatattcctatcagaagc

SEQ ID NO: 16675 - RNA, 20 nt, synthetic construct
  source 1..20: mol_type = other RNA
acgatccttactaccaccac

SEQ ID NO: 16676 - RNA, 20 nt, synthetic construct
  source 1..20: mol_type = other RNA
acgatgaaattgaccattcc

SEQ ID NO: 16677 - RNA, 20 nt, synthetic construct
  source 1..20: mol_type = other RNA
acgatgcattccagattgaa

SEQ ID NO: 16678 - RNA, 20 nt, synthetic construct
  source 1..20: mol_type = other RNA
acgatgcttaggtaagaaaa

SEQ ID NO: 16679 - RNA, 20 nt, synthetic construct
  source 1..20: mol_type = other RNA
acgatggtttctgacacccg

SEQ ID NO: 16680 - RNA, 20 nt, synthetic construct
  source 1..20: mol_type = other RNA
acgattctgacccagagcct

SEQ ID NO: 16681 - RNA, 20 nt, synthetic construct
  source 1..20: mol_type = other RNA
acgatttcttaaaaatgaca

SEQ ID NO: 16682 - RNA, 20 nt, synthetic construct
  source 1..20: mol_type = other RNA
acgatttttccaacagttta

SEQ ID NO: 16683 - RNA, 20 nt, synthetic construct
  source 1..20: mol_type = other RNA
acgcaaaggatgtcaacaaa

SEQ ID NO: 16684 - RNA, 20 nt, synthetic construct
  source 1..20: mol_type = other RNA
acgcacagggagatacttga

SEQ ID NO: 16685 - RNA, 20 nt, synthetic construct
  source 1..20: mol_type = other RNA
acgcacccagagcgggtttc

SEQ ID NO: 16686 - RNA, 20 nt, synthetic construct
  source 1..20: mol_type = other RNA
acgcagaacagtgtttacac

SEQ ID NO: 16687 - RNA, 20 nt, synthetic construct
  source 1..20: mol_type = other RNA
acgcagaaccactgagcaca

SEQ ID NO: 16688 - RNA, 20 nt, synthetic construct
  source 1..20: mol_type = other RNA
acgcaggcaaacagcgccac

SEQ ID NO: 16689 - RNA, 20 nt, synthetic construct
  source 1..20: mol_type = other RNA
acgcagtttgttctgctgtt

SEQ ID NO: 16690 - RNA, 20 nt, synthetic construct
  source 1..20: mol_type = other RNA
acgcatctggtctatctcat

SEQ ID NO: 16691 - RNA, 20 nt, synthetic construct
  source 1..20: mol_type = other RNA
acgcattgcattgactacca

SEQ ID NO: 16692 - RNA, 20 nt, synthetic construct
  source 1..20: mol_type = other RNA
acgcattgtgatgtctcaga

SEQ ID NO: 16693 - RNA, 20 nt, synthetic construct
  source 1..20: mol_type = other RNA
acgccaattttcatagcagc

SEQ ID NO: 16694 - RNA, 20 nt, synthetic construct
  source 1..20: mol_type = other RNA
acgccactgcaggtgttggt

SEQ ID NO: 16695 - RNA, 20 nt, synthetic construct
  source 1..20: mol_type = other RNA
acgccactgcattccgcctg

SEQ ID NO: 16696 - RNA, 20 nt, synthetic construct
  source 1..20: mol_type = other RNA
acgccatctcgcccagctaa

SEQ ID NO: 16697 - RNA, 20 nt, synthetic construct
  source 1..20: mol_type = other RNA
acgcccattaggatagctat

SEQ ID NO: 16698 - RNA, 20 nt, synthetic construct
  source 1..20: mol_type = other RNA
acgcccggcccatgacatgt

SEQ ID NO: 16699 - RNA, 20 nt, synthetic construct
  source 1..20: mol_type = other RNA
acgcccggccgatgcctgtg

SEQ ID NO: 16700 - RNA, 20 nt, synthetic construct
  source 1..20: mol_type = other RNA
acgcctagctgacttttaaa

SEQ ID NO: 16701 - RNA, 20 nt, synthetic construct
  source 1..20: mol_type = other RNA
acgccttcgcgggcaccttc

SEQ ID NO: 16702 - RNA, 20 nt, synthetic construct
  source 1..20: mol_type = other RNA
acgcctttcatttggcctct

SEQ ID NO: 16703 - RNA, 20 nt, synthetic construct
  source 1..20: mol_type = other RNA
acgcgcaacaattcaacagc

SEQ ID NO: 16704 - RNA, 20 nt, synthetic construct
  source 1..20: mol_type = other RNA
acgcgcattttttaagtggc

SEQ ID NO: 16705 - RNA, 20 nt, synthetic construct
  source 1..20: mol_type = other RNA
acgcggaatgaagcaggcct

SEQ ID NO: 16706 - RNA, 20 nt, synthetic construct
  source 1..20: mol_type = other RNA
acgcggcacttggtaagctg

SEQ ID NO: 16707 - RNA, 20 nt, synthetic construct
  source 1..20: mol_type = other RNA
acgcgggaggctgaggcagg

SEQ ID NO: 16708 - RNA, 20 nt, synthetic construct
  source 1..20: mol_type = other RNA
acgcgtaagggtacagaact

SEQ ID NO: 16709 - RNA, 20 nt, synthetic construct
  source 1..20: mol_type = other RNA
acgcgtggatgtgtgcacaa

SEQ ID NO: 16710 - RNA, 20 nt, synthetic construct
  source 1..20: mol_type = other RNA
acgctaaattaaaggctgga

SEQ ID NO: 16711 - RNA, 20 nt, synthetic construct
  source 1..20: mol_type = other RNA
acgctccctcgcgcggcacc

SEQ ID NO: 16712 - RNA, 20 nt, synthetic construct
  source 1..20: mol_type = other RNA
acgctcttgttcaaaaacct

SEQ ID NO: 16713 - RNA, 20 nt, synthetic construct
  source 1..20: mol_type = other RNA
acgctgatgacagttactct

SEQ ID NO: 16714 - RNA, 20 nt, synthetic construct
  source 1..20: mol_type = other RNA
acgctgccaaaagccaagag

SEQ ID NO: 16715 - RNA, 20 nt, synthetic construct
  source 1..20: mol_type = other RNA
acgctggaagggagcccaag

SEQ ID NO: 16716 - RNA, 20 nt, synthetic construct
  source 1..20: mol_type = other RNA
acgctgtgaatgtgaggtga

SEQ ID NO: 16717 - RNA, 20 nt, synthetic construct
  source 1..20: mol_type = other RNA
acgctgtggctaacaatcaa

SEQ ID NO: 16718 - RNA, 20 nt, synthetic construct
  source 1..20: mol_type = other RNA
acgctgtggcttgggtgacc

SEQ ID NO: 16719 - RNA, 20 nt, synthetic construct
  source 1..20: mol_type = other RNA
acgcttttatgttataatga

SEQ ID NO: 16720 - RNA, 20 nt, synthetic construct
  source 1..20: mol_type = other RNA
acgctttttatggaaacatg

SEQ ID NO: 16721 - RNA, 20 nt, synthetic construct
  source 1..20: mol_type = other RNA
acggaaaaacattctacagt

SEQ ID NO: 16722 - RNA, 20 nt, synthetic construct
  source 1..20: mol_type = other RNA
acggaaaacattattttctt

SEQ ID NO: 16723 - RNA, 20 nt, synthetic construct
  source 1..20: mol_type = other RNA
acggaaactttatacctgtt

SEQ ID NO: 16724 - RNA, 20 nt, synthetic construct
  source 1..20: mol_type = other RNA
acggaaatataacattacca

SEQ ID NO: 16725 - RNA, 20 nt, synthetic construct
  source 1..20: mol_type = other RNA
acggaaatgagtgagccaca

SEQ ID NO: 16726 - RNA, 20 nt, synthetic construct
  source 1..20: mol_type = other RNA
acggaagactcatacttcct

SEQ ID NO: 16727 - RNA, 20 nt, synthetic construct
  source 1..20: mol_type = other RNA
acggaatcttaccctgttga

SEQ ID NO: 16728 - RNA, 20 nt, synthetic construct
  source 1..20: mol_type = other RNA
acggaatgattccacttata

SEQ ID NO: 16729 - RNA, 20 nt, synthetic construct
  source 1..20: mol_type = other RNA
acggaatgcccctttgagca

SEQ ID NO: 16730 - RNA, 20 nt, synthetic construct
  source 1..20: mol_type = other RNA
acggacatttttccaaagat

SEQ ID NO: 16731 - RNA, 20 nt, synthetic construct
  source 1..20: mol_type = other RNA
acggacgcaggcaaacagcg

SEQ ID NO: 16732 - RNA, 20 nt, synthetic construct
  source 1..20: mol_type = other RNA
acggacttggcacaggagag

SEQ ID NO: 16733 - RNA, 20 nt, synthetic construct
  source 1..20: mol_type = other RNA
acggaggatgaggggctgag

SEQ ID NO: 16734 - RNA, 20 nt, synthetic construct
  source 1..20: mol_type = other RNA
acggcgagcttgatctttac

SEQ ID NO: 16735 - RNA, 20 nt, synthetic construct
  source 1..20: mol_type = other RNA
acggcgtttcgccatgttgg

SEQ ID NO: 16736 - RNA, 20 nt, synthetic construct
  source 1..20: mol_type = other RNA
acggctcaggcctgttgtga

SEQ ID NO: 16737 - RNA, 20 nt, synthetic construct
  source 1..20: mol_type = other RNA
acggctgattataaccttga

SEQ ID NO: 16738 - RNA, 20 nt, synthetic construct
  source 1..20: mol_type = other RNA
acggcttaacacctttgtat

SEQ ID NO: 16739 - RNA, 20 nt, synthetic construct
  source 1..20: mol_type = other RNA
acgggtaaaaataaatctaa

SEQ ID NO: 16740 - RNA, 20 nt, synthetic construct
  source 1..20: mol_type = other RNA
acgggtacacatcctaatac

SEQ ID NO: 16741 - RNA, 20 nt, synthetic construct
  source 1..20: mol_type = other RNA
acgggtggtagggagggggc

SEQ ID NO: 16742 - RNA, 20 nt, synthetic construct
  source 1..20: mol_type = other RNA
acgggttatacacacataag

SEQ ID NO: 16743 - RNA, 20 nt, synthetic construct
  source 1..20: mol_type = other RNA
acggtctcacactgttgtcc

SEQ ID NO: 16744 - RNA, 20 nt, synthetic construct
  source 1..20: mol_type = other RNA
acggtgaagaaccgactgaa

SEQ ID NO: 16745 - RNA, 20 nt, synthetic construct
  source 1..20: mol_type = other RNA
acggtgccctacatatggca

SEQ ID NO: 16746 - RNA, 20 nt, synthetic construct
  source 1..20: mol_type = other RNA
acggttccctgtagagattt

SEQ ID NO: 16747 - RNA, 20 nt, synthetic construct
  source 1..20: mol_type = other RNA
acgtaacctaaagttgaggt

SEQ ID NO: 16748 - RNA, 20 nt, synthetic construct
  source 1..20: mol_type = other RNA
acgtactaggtatcacagtg

SEQ ID NO: 16749 - RNA, 20 nt, synthetic construct
  source 1..20: mol_type = other RNA
acgtactagtcagcacactc

SEQ ID NO: 16750 - RNA, 20 nt, synthetic construct
  source 1..20: mol_type = other RNA
acgtatatgaaaagcccaat

SEQ ID NO: 16751 - RNA, 20 nt, synthetic construct
  source 1..20: mol_type = other RNA
acgtatctgggaaaaaataa

SEQ ID NO: 16752 - RNA, 20 nt, synthetic construct
  source 1..20: mol_type = other RNA
acgtatgaataaactaacaa

SEQ ID NO: 16753 - RNA, 20 nt, synthetic construct
  source 1..20: mol_type = other RNA
acgtatgcaacttactctca

SEQ ID NO: 16754 - RNA, 20 nt, synthetic construct
  source 1..20: mol_type = other RNA
acgtatttatattttggtag

SEQ ID NO: 16755 - RNA, 20 nt, synthetic construct
  source 1..20: mol_type = other RNA
acgtatttatcatgtcttct

SEQ ID NO: 16756 - RNA, 20 nt, synthetic construct
  source 1..20: mol_type = other RNA
acgtcaccgcaacctccgcc

SEQ ID NO: 16757 - RNA, 20 nt, synthetic construct
  source 1..20: mol_type = other RNA
acgtcagagcagcactgatg

SEQ ID NO: 16758 - RNA, 20 nt, synthetic construct
  source 1..20: mol_type = other RNA
acgtccatcaacagcagaac

SEQ ID NO: 16759 - RNA, 20 nt, synthetic construct
  source 1..20: mol_type = other RNA
acgtccggtcgttggattta

SEQ ID NO: 16760 - RNA, 20 nt, synthetic construct
  source 1..20: mol_type = other RNA
acgtcgtcccccatcccctt

SEQ ID NO: 16761 - RNA, 20 nt, synthetic construct
  source 1..20: mol_type = other RNA
acgtctgtggtctcagctcc

SEQ ID NO: 16762 - RNA, 20 nt, synthetic construct
  source 1..20: mol_type = other RNA
acgtcttgtcaataatttgg

SEQ ID NO: 16763 - RNA, 20 nt, synthetic construct
  source 1..20: mol_type = other RNA
acgtctttaaatttcaaaca

SEQ ID NO: 16764 - RNA, 20 nt, synthetic construct
  source 1..20: mol_type = other RNA
acgtgaagatggagttacgc

SEQ ID NO: 16765 - RNA, 20 nt, synthetic construct
  source 1..20: mol_type = other RNA
acgtgaagctacagactaat

SEQ ID NO: 16766 - RNA, 20 nt, synthetic construct
  source 1..20: mol_type = other RNA
acgtgagatcatgccactcc

SEQ ID NO: 16767 - RNA, 20 nt, synthetic construct
  source 1..20: mol_type = other RNA
acgtgagccaccgcacctgg

SEQ ID NO: 16768 - RNA, 20 nt, synthetic construct
  source 1..20: mol_type = other RNA
acgtgagctggaagtaagga

SEQ ID NO: 16769 - RNA, 20 nt, synthetic construct
  source 1..20: mol_type = other RNA
acgtgcaaactaccaagact

SEQ ID NO: 16770 - RNA, 20 nt, synthetic construct
  source 1..20: mol_type = other RNA
acgtgcacacccagttatct

SEQ ID NO: 16771 - RNA, 20 nt, synthetic construct
  source 1..20: mol_type = other RNA
acgtgcagagcaggggtggg

SEQ ID NO: 16772 - RNA, 20 nt, synthetic construct
  source 1..20: mol_type = other RNA
acgtgcattcatactgaagg

SEQ ID NO: 16773 - RNA, 20 nt, synthetic construct
  source 1..20: mol_type = other RNA
acgtgcttgctctgcggcag

SEQ ID NO: 16774 - RNA, 20 nt, synthetic construct
  source 1..20: mol_type = other RNA
acgtgctttccttattgaga

SEQ ID NO: 16775 - RNA, 20 nt, synthetic construct
  source 1..20: mol_type = other RNA
acgtggagtgcaatggggca

SEQ ID NO: 16776 - RNA, 20 nt, synthetic construct
  source 1..20: mol_type = other RNA
acgtggcgctccctctgtgt

SEQ ID NO: 16777 - RNA, 20 nt, synthetic construct
  source 1..20: mol_type = other RNA
acgtggctgtcaaaaatgtg

SEQ ID NO: 16778 - RNA, 20 nt, synthetic construct
  source 1..20: mol_type = other RNA
acgtgtatactgggtgtgat

SEQ ID NO: 16779 - RNA, 20 nt, synthetic construct
  source 1..20: mol_type = other RNA
acgtgtattgagtgtagctg

SEQ ID NO: 16780 - RNA, 20 nt, synthetic construct
  source 1..20: mol_type = other RNA
acgtgtgtgtaagcacacat

SEQ ID NO: 16781 - RNA, 20 nt, synthetic construct
  source 1..20: mol_type = other RNA
acgttaaaggaaaagagatc

SEQ ID NO: 16782 - RNA, 20 nt, synthetic construct
  source 1..20: mol_type = other RNA
acgttaactatttctcttta

SEQ ID NO: 16783 - RNA, 20 nt, synthetic construct
  source 1..20: mol_type = other RNA
acgttaactgtattgcaaac

SEQ ID NO: 16784 - RNA, 20 nt, synthetic construct
  source 1..20: mol_type = other RNA
acgttacaaaatatgtaatg

SEQ ID NO: 16785 - RNA, 20 nt, synthetic construct
  source 1..20: mol_type = other RNA
acgttaccctctggaatgcc

SEQ ID NO: 16786 - RNA, 20 nt, synthetic construct
  source 1..20: mol_type = other RNA
acgttagcatcaccatcatc

SEQ ID NO: 16787 - RNA, 20 nt, synthetic construct
  source 1..20: mol_type = other RNA
acgttcagataacaaagggt

SEQ ID NO: 16788 - RNA, 20 nt, synthetic construct
  source 1..20: mol_type = other RNA
acgtttagatgaatgattta

SEQ ID NO: 16789 - RNA, 20 nt, synthetic construct
  source 1..20: mol_type = other RNA
acgtttatctacagaggatt

SEQ ID NO: 16790 - RNA, 20 nt, synthetic construct
  source 1..20: mol_type = other RNA
acgtttgagttgtttccact

SEQ ID NO: 16791 - RNA, 20 nt, synthetic construct
  source 1..20: mol_type = other RNA
acgtttgatctggtcacaaa

SEQ ID NO: 16792 - RNA, 20 nt, synthetic construct
  source 1..20: mol_type = other RNA
acgtttgctttggagtgaga

SEQ ID NO: 16793 - RNA, 20 nt, synthetic construct
  source 1..20: mol_type = other RNA
acgtttggtgactgaattcc

SEQ ID NO: 16794 - RNA, 20 nt, synthetic construct
  source 1..20: mol_type = other RNA
acgtttttagaaatttaccc

SEQ ID NO: 16795 - RNA, 20 nt, synthetic construct
  source 1..20: mol_type = other RNA
actaaaaagaaaaagttggg

SEQ ID NO: 16796 - RNA, 20 nt, synthetic construct
  source 1..20: mol_type = other RNA
actaaaaatcagattaagca

SEQ ID NO: 16797 - RNA, 20 nt, synthetic construct
  source 1..20: mol_type = other RNA
actaaaacaggaagttgaga

SEQ ID NO: 16798 - RNA, 20 nt, synthetic construct
  source 1..20: mol_type = other RNA
actaaacaaatcagatttca

SEQ ID NO: 16799 - RNA, 20 nt, synthetic construct
  source 1..20: mol_type = other RNA
actaaacattaaggaagaat

SEQ ID NO: 16800 - RNA, 20 nt, synthetic construct
  source 1..20: mol_type = other RNA
actaaactagtatcaacctg

SEQ ID NO: 16801 - RNA, 20 nt, synthetic construct
  source 1..20: mol_type = other RNA
actaaactattgtatgaaca

SEQ ID NO: 16802 - RNA, 20 nt, synthetic construct
  source 1..20: mol_type = other RNA
actaaactgaacgaagtgaa

SEQ ID NO: 16803 - RNA, 20 nt, synthetic construct
  source 1..20: mol_type = other RNA
actaaactttgagtagcacc

SEQ ID NO: 16804 - RNA, 20 nt, synthetic construct
  source 1..20: mol_type = other RNA
actaaagatttgccaatcaa

SEQ ID NO: 16805 - RNA, 20 nt, synthetic construct
  source 1..20: mol_type = other RNA
actaaaggggatttcatgaa

SEQ ID NO: 16806 - RNA, 20 nt, synthetic construct
  source 1..20: mol_type = other RNA
actaaatacaccaaactcaa

SEQ ID NO: 16807 - RNA, 20 nt, synthetic construct
  source 1..20: mol_type = other RNA
actaaatgatctttcaaggg

SEQ ID NO: 16808 - RNA, 20 nt, synthetic construct
  source 1..20: mol_type = other RNA
actaaatgtgagcatttagc

SEQ ID NO: 16809 - RNA, 20 nt, synthetic construct
  source 1..20: mol_type = other RNA
actaaattttgaggcttttg

SEQ ID NO: 16810 - RNA, 20 nt, synthetic construct
  source 1..20: mol_type = other RNA
actaacaaagaacaggaagg

SEQ ID NO: 16811 - RNA, 20 nt, synthetic construct
  source 1..20: mol_type = other RNA
actaacaaagggcctgttcc

SEQ ID NO: 16812 - RNA, 20 nt, synthetic construct
  source 1..20: mol_type = other RNA
actaacaagaaagggtagct

SEQ ID NO: 16813 - RNA, 20 nt, synthetic construct
  source 1..20: mol_type = other RNA
actaacagggtctacaaaag

SEQ ID NO: 16814 - RNA, 20 nt, synthetic construct
  source 1..20: mol_type = other RNA
actaaccaacattgagtttc

SEQ ID NO: 16815 - RNA, 20 nt, synthetic construct
  source 1..20: mol_type = other RNA
actaacgatccttactacca

SEQ ID NO: 16816 - RNA, 20 nt, synthetic construct
  source 1..20: mol_type = other RNA
actaactagaaaaccgacag

SEQ ID NO: 16817 - RNA, 20 nt, synthetic construct
  source 1..20: mol_type = other RNA
actaactttctattcccctg

SEQ ID NO: 16818 - RNA, 20 nt, synthetic construct
  source 1..20: mol_type = other RNA
actaagaaaaacagaagaca

SEQ ID NO: 16819 - RNA, 20 nt, synthetic construct
  source 1..20: mol_type = other RNA
actaagaagatggttggaag

SEQ ID NO: 16820 - RNA, 20 nt, synthetic construct
  source 1..20: mol_type = other RNA
actaagaagtgaaactgctg

SEQ ID NO: 16821 - RNA, 20 nt, synthetic construct
  source 1..20: mol_type = other RNA
actaagacactagctattgt

SEQ ID NO: 16822 - RNA, 20 nt, synthetic construct
  source 1..20: mol_type = other RNA
actaagaccccagtagaaat

SEQ ID NO: 16823 - RNA, 20 nt, synthetic construct
  source 1..20: mol_type = other RNA
actaagagtgaaaaggcaaa

SEQ ID NO: 16824 - RNA, 20 nt, synthetic construct
  source 1..20: mol_type = other RNA
actaagcagaaatgacaagt

SEQ ID NO: 16825 - RNA, 20 nt, synthetic construct
  source 1..20: mol_type = other RNA
actaagcctatgtaagacaa

SEQ ID NO: 16826 - RNA, 20 nt, synthetic construct
  source 1..20: mol_type = other RNA
actaaggaaagctcaggacc

SEQ ID NO: 16827 - RNA, 20 nt, synthetic construct
  source 1..20: mol_type = other RNA
actaaggtcaacacatcagc

SEQ ID NO: 16828 - RNA, 20 nt, synthetic construct
  source 1..20: mol_type = other RNA
actaaggtcaagagagatta

SEQ ID NO: 16829 - RNA, 20 nt, synthetic construct
  source 1..20: mol_type = other RNA
actaagtcagaattcactgt

SEQ ID NO: 16830 - RNA, 20 nt, synthetic construct
  source 1..20: mol_type = other RNA
actaagtggtattctatcat

SEQ ID NO: 16831 - RNA, 20 nt, synthetic construct
  source 1..20: mol_type = other RNA
actaagtgtgaagattaagc

SEQ ID NO: 16832 - RNA, 20 nt, synthetic construct
  source 1..20: mol_type = other RNA
actaataaatgcataaacga

SEQ ID NO: 16833 - RNA, 20 nt, synthetic construct
  source 1..20: mol_type = other RNA
actaataattgcttttgctg

SEQ ID NO: 16834 - RNA, 20 nt, synthetic construct
  source 1..20: mol_type = other RNA
actaatagccagtgcagcaa

SEQ ID NO: 16835 - RNA, 20 nt, synthetic construct
  source 1..20: mol_type = other RNA
actaatatgagttcctgctt

SEQ ID NO: 16836 - RNA, 20 nt, synthetic construct
  source 1..20: mol_type = other RNA
actaatcaaacataccccaa

SEQ ID NO: 16837 - RNA, 20 nt, synthetic construct
  source 1..20: mol_type = other RNA
actaatccttctcatagtct

SEQ ID NO: 16838 - RNA, 20 nt, synthetic construct
  source 1..20: mol_type = other RNA
actaatgagaatttcagaaa

SEQ ID NO: 16839 - RNA, 20 nt, synthetic construct
  source 1..20: mol_type = other RNA
actaatgcctcaaattagtc

SEQ ID NO: 16840 - RNA, 20 nt, synthetic construct
  source 1..20: mol_type = other RNA
actaatgtcacattttctta

SEQ ID NO: 16841 - RNA, 20 nt, synthetic construct
  source 1..20: mol_type = other RNA
actaatgtccttttcctgtt

SEQ ID NO: 16842 - RNA, 20 nt, synthetic construct
  source 1..20: mol_type = other RNA
actaattactgtttcttagc

SEQ ID NO: 16843 - RNA, 20 nt, synthetic construct
  source 1..20: mol_type = other RNA
actaattgataaaactgaag

SEQ ID NO: 16844 - RNA, 20 nt, synthetic construct
  source 1..20: mol_type = other RNA
actaatttcatacaagttgt

SEQ ID NO: 16845 - RNA, 20 nt, synthetic construct
  source 1..20: mol_type = other RNA
actaatttgaggcattagtg

SEQ ID NO: 16846 - RNA, 20 nt, synthetic construct
  source 1..20: mol_type = other RNA
actacaaaagatcatttcaa

SEQ ID NO: 16847 - RNA, 20 nt, synthetic construct
  source 1..20: mol_type = other RNA
actacaagagttcccctata

SEQ ID NO: 16848 - RNA, 20 nt, synthetic construct
  source 1..20: mol_type = other RNA
actacaattactgtacaaag

SEQ ID NO: 16849 - RNA, 20 nt, synthetic construct
  source 1..20: mol_type = other RNA
actacacagacatgaacaat

SEQ ID NO: 16850 - RNA, 20 nt, synthetic construct
  source 1..20: mol_type = other RNA
actacacatacacagggaaa

SEQ ID NO: 16851 - RNA, 20 nt, synthetic construct
  source 1..20: mol_type = other RNA
actacacatcagtgctgctc

SEQ ID NO: 16852 - RNA, 20 nt, synthetic construct
  source 1..20: mol_type = other RNA
actacacattccagaccagc

SEQ ID NO: 16853 - RNA, 20 nt, synthetic construct
  source 1..20: mol_type = other RNA
actacacccggctaattaaa

SEQ ID NO: 16854 - RNA, 20 nt, synthetic construct
  source 1..20: mol_type = other RNA
actacactgaagggaatttt

SEQ ID NO: 16855 - RNA, 20 nt, synthetic construct
  source 1..20: mol_type = other RNA
actacagacatgccacacca

SEQ ID NO: 16856 - RNA, 20 nt, synthetic construct
  source 1..20: mol_type = other RNA
actacagcatattagctgtc

SEQ ID NO: 16857 - RNA, 20 nt, synthetic construct
  source 1..20: mol_type = other RNA
actacaggcaacaaaagaaa

SEQ ID NO: 16858 - RNA, 20 nt, synthetic construct
  source 1..20: mol_type = other RNA
actacaggtgtgaaccacgc

SEQ ID NO: 16859 - RNA, 20 nt, synthetic construct
  source 1..20: mol_type = other RNA
actacagtcacacaccacta

SEQ ID NO: 16860 - RNA, 20 nt, synthetic construct
  source 1..20: mol_type = other RNA
actacagtgtttagggacga

SEQ ID NO: 16861 - RNA, 20 nt, synthetic construct
  source 1..20: mol_type = other RNA
actacatgtaaaaactgttt

SEQ ID NO: 16862 - RNA, 20 nt, synthetic construct
  source 1..20: mol_type = other RNA
actaccaattctccctgaaa

SEQ ID NO: 16863 - RNA, 20 nt, synthetic construct
  source 1..20: mol_type = other RNA
actaccaccactaatgtcac

SEQ ID NO: 16864 - RNA, 20 nt, synthetic construct
  source 1..20: mol_type = other RNA
actaccactgaggtcaagaa

SEQ ID NO: 16865 - RNA, 20 nt, synthetic construct
  source 1..20: mol_type = other RNA
actaccatctctccaacaga

SEQ ID NO: 16866 - RNA, 20 nt, synthetic construct
  source 1..20: mol_type = other RNA
actacctagaaaaacaccaa

SEQ ID NO: 16867 - RNA, 20 nt, synthetic construct
  source 1..20: mol_type = other RNA
actacctatagaattcttct

SEQ ID NO: 16868 - RNA, 20 nt, synthetic construct
  source 1..20: mol_type = other RNA
actacgaagctacagtaatc

SEQ ID NO: 16869 - RNA, 20 nt, synthetic construct
  source 1..20: mol_type = other RNA
actacgagtatcatataaat

SEQ ID NO: 16870 - RNA, 20 nt, synthetic construct
  source 1..20: mol_type = other RNA
actacgcccggcccatgaca

SEQ ID NO: 16871 - RNA, 20 nt, synthetic construct
  source 1..20: mol_type = other RNA
actacgcctagctgactttt

SEQ ID NO: 16872 - RNA, 20 nt, synthetic construct
  source 1..20: mol_type = other RNA
actactatttcgcaaagcaa

SEQ ID NO: 16873 - RNA, 20 nt, synthetic construct
  source 1..20: mol_type = other RNA
actactcaaagaaaataatg

SEQ ID NO: 16874 - RNA, 20 nt, synthetic construct
  source 1..20: mol_type = other RNA
actactgacctgggagaaag

SEQ ID NO: 16875 - RNA, 20 nt, synthetic construct
  source 1..20: mol_type = other RNA
actactgatagcgaaaggta

SEQ ID NO: 16876 - RNA, 20 nt, synthetic construct
  source 1..20: mol_type = other RNA
actactgcaaatatccaatc

SEQ ID NO: 16877 - RNA, 20 nt, synthetic construct
  source 1..20: mol_type = other RNA
actactgcattttttgccaa

SEQ ID NO: 16878 - RNA, 20 nt, synthetic construct
  source 1..20: mol_type = other RNA
actactgtactgtttagcat

SEQ ID NO: 16879 - RNA, 20 nt, synthetic construct
  source 1..20: mol_type = other RNA
actacttagcccctgctgcc

SEQ ID NO: 16880 - RNA, 20 nt, synthetic construct
  source 1..20: mol_type = other RNA
actacttcgtgtgtggagtg

SEQ ID NO: 16881 - RNA, 20 nt, synthetic construct
  source 1..20: mol_type = other RNA
actacttgtcaggtgggcac

SEQ ID NO: 16882 - RNA, 20 nt, synthetic construct
  source 1..20: mol_type = other RNA
actagaaaaagaataagcta

SEQ ID NO: 16883 - RNA, 20 nt, synthetic construct
  source 1..20: mol_type = other RNA
actagaaaaccgacagcaga

SEQ ID NO: 16884 - RNA, 20 nt, synthetic construct
  source 1..20: mol_type = other RNA
actagaaaagataagtagaa

SEQ ID NO: 16885 - RNA, 20 nt, synthetic construct
  source 1..20: mol_type = other RNA
actagaaacttcttctgttg

SEQ ID NO: 16886 - RNA, 20 nt, synthetic construct
  source 1..20: mol_type = other RNA
actagaactgtgttacattg

SEQ ID NO: 16887 - RNA, 20 nt, synthetic construct
  source 1..20: mol_type = other RNA
actagaagaaatgttaacaa

SEQ ID NO: 16888 - RNA, 20 nt, synthetic construct
  source 1..20: mol_type = other RNA
actagaagcactttttacca

SEQ ID NO: 16889 - RNA, 20 nt, synthetic construct
  source 1..20: mol_type = other RNA
actagaatactccaccagca

SEQ ID NO: 16890 - RNA, 20 nt, synthetic construct
  source 1..20: mol_type = other RNA
actagaatgtgacttcgtca

SEQ ID NO: 16891 - RNA, 20 nt, synthetic construct
  source 1..20: mol_type = other RNA
actagaattgactttaccct

SEQ ID NO: 16892 - RNA, 20 nt, synthetic construct
  source 1..20: mol_type = other RNA
actagacacatttttgacag

SEQ ID NO: 16893 - RNA, 20 nt, synthetic construct
  source 1..20: mol_type = other RNA
actagacctttcttaggttt

SEQ ID NO: 16894 - RNA, 20 nt, synthetic construct
  source 1..20: mol_type = other RNA
actagactgcctgaggtctc

SEQ ID NO: 16895 - RNA, 20 nt, synthetic construct
  source 1..20: mol_type = other RNA
actagagaaagcatcagagc

SEQ ID NO: 16896 - RNA, 20 nt, synthetic construct
  source 1..20: mol_type = other RNA
actagagatgggaaagtatt

SEQ ID NO: 16897 - RNA, 20 nt, synthetic construct
  source 1..20: mol_type = other RNA
actagagcttcaacctcctg

SEQ ID NO: 16898 - RNA, 20 nt, synthetic construct
  source 1..20: mol_type = other RNA
actagagtattacctatgaa

SEQ ID NO: 16899 - RNA, 20 nt, synthetic construct
  source 1..20: mol_type = other RNA
actagatcaagcccttcctt

SEQ ID NO: 16900 - RNA, 20 nt, synthetic construct
  source 1..20: mol_type = other RNA
actagatctcttttccttta

SEQ ID NO: 16901 - RNA, 20 nt, synthetic construct
  source 1..20: mol_type = other RNA
actagatgcctcgaaggcct

SEQ ID NO: 16902 - RNA, 20 nt, synthetic construct
  source 1..20: mol_type = other RNA
actagattaccttgaagttt

SEQ ID NO: 16903 - RNA, 20 nt, synthetic construct
  source 1..20: mol_type = other RNA
actagcaaactactgatagc

SEQ ID NO: 16904 - RNA, 20 nt, synthetic construct
  source 1..20: mol_type = other RNA
actagcaaactgaatcagac

SEQ ID NO: 16905 - RNA, 20 nt, synthetic construct
  source 1..20: mol_type = other RNA
actagcaagctaataattta

SEQ ID NO: 16906 - RNA, 20 nt, synthetic construct
  source 1..20: mol_type = other RNA
actagcaatccaggatctta

SEQ ID NO: 16907 - RNA, 20 nt, synthetic construct
  source 1..20: mol_type = other RNA
actagccactgggtcttata

SEQ ID NO: 16908 - RNA, 20 nt, synthetic construct
  source 1..20: mol_type = other RNA
actagccagtgattggatat

SEQ ID NO: 16909 - RNA, 20 nt, synthetic construct
  source 1..20: mol_type = other RNA
actagctattagagaaatgc

SEQ ID NO: 16910 - RNA, 20 nt, synthetic construct
  source 1..20: mol_type = other RNA
actagctattgtcttttcta

SEQ ID NO: 16911 - RNA, 20 nt, synthetic construct
  source 1..20: mol_type = other RNA
actagctgacccactggttt

SEQ ID NO: 16912 - RNA, 20 nt, synthetic construct
  source 1..20: mol_type = other RNA
actaggctcctgagaaccgg

SEQ ID NO: 16913 - RNA, 20 nt, synthetic construct
  source 1..20: mol_type = other RNA
actaggctgtcccaaatgca

SEQ ID NO: 16914 - RNA, 20 nt, synthetic construct
  source 1..20: mol_type = other RNA
actagggactggcctcggcc

SEQ ID NO: 16915 - RNA, 20 nt, synthetic construct
  source 1..20: mol_type = other RNA
actaggggactaacagggtc

SEQ ID NO: 16916 - RNA, 20 nt, synthetic construct
  source 1..20: mol_type = other RNA
actaggtatcacagtgagga

SEQ ID NO: 16917 - RNA, 20 nt, synthetic construct
  source 1..20: mol_type = other RNA
actaggtatttgaaaaatgt

SEQ ID NO: 16918 - RNA, 20 nt, synthetic construct
  source 1..20: mol_type = other RNA
actagtaagtaaaatcggaa

SEQ ID NO: 16919 - RNA, 20 nt, synthetic construct
  source 1..20: mol_type = other RNA
actagtacactgttgattta

SEQ ID NO: 16920 - RNA, 20 nt, synthetic construct
  source 1..20: mol_type = other RNA
actagtacgtgcagagcagg

SEQ ID NO: 16921 - RNA, 20 nt, synthetic construct
  source 1..20: mol_type = other RNA
actagtagaaagcaggttca

SEQ ID NO: 16922 - RNA, 20 nt, synthetic construct
  source 1..20: mol_type = other RNA
actagtaggatgaattacaa

SEQ ID NO: 16923 - RNA, 20 nt, synthetic construct
  source 1..20: mol_type = other RNA
actagtataagagaaggaag

SEQ ID NO: 16924 - RNA, 20 nt, synthetic construct
  source 1..20: mol_type = other RNA
actagtatcaacctgcaggt

SEQ ID NO: 16925 - RNA, 20 nt, synthetic construct
  source 1..20: mol_type = other RNA
actagtatttattaaacctg

SEQ ID NO: 16926 - RNA, 20 nt, synthetic construct
  source 1..20: mol_type = other RNA
actagtcaccctacagactc

SEQ ID NO: 16927 - RNA, 20 nt, synthetic construct
  source 1..20: mol_type = other RNA
actagtcagcacactcttaa

SEQ ID NO: 16928 - RNA, 20 nt, synthetic construct
  source 1..20: mol_type = other RNA
actagtcagtatatttactg

SEQ ID NO: 16929 - RNA, 20 nt, synthetic construct
  source 1..20: mol_type = other RNA
actagtctccatacaaggag

SEQ ID NO: 16930 - RNA, 20 nt, synthetic construct
  source 1..20: mol_type = other RNA
actagtgaagtcccatcttc

SEQ ID NO: 16931 - RNA, 20 nt, synthetic construct
  source 1..20: mol_type = other RNA
actagtggaagaatcaggtc

SEQ ID NO: 16932 - RNA, 20 nt, synthetic construct
  source 1..20: mol_type = other RNA
actagtggctcatacttgct

SEQ ID NO: 16933 - RNA, 20 nt, synthetic construct
  source 1..20: mol_type = other RNA
actagtgggatcaaaccatg

SEQ ID NO: 16934 - RNA, 20 nt, synthetic construct
  source 1..20: mol_type = other RNA
actagtgggtcgggtgtcag

SEQ ID NO: 16935 - RNA, 20 nt, synthetic construct
  source 1..20: mol_type = other RNA
actagtgtgaatgaggagtg

SEQ ID NO: 16936 - RNA, 20 nt, synthetic construct
  source 1..20: mol_type = other RNA
actagttgtgctacctcaaa

SEQ ID NO: 16937 - RNA, 20 nt, synthetic construct
  source 1..20: mol_type = other RNA
actagtttagtgcagtatct

SEQ ID NO: 16938 - RNA, 20 nt, synthetic construct
  source 1..20: mol_type = other RNA
actataaaactcttagctta

SEQ ID NO: 16939 - RNA, 20 nt, synthetic construct
  source 1..20: mol_type = other RNA
actataacagatggaactct

SEQ ID NO: 16940 - RNA, 20 nt, synthetic construct
  source 1..20: mol_type = other RNA
actataagccaatatccctg

SEQ ID NO: 16941 - RNA, 20 nt, synthetic construct
  source 1..20: mol_type = other RNA
actataatccagatggacaa

SEQ ID NO: 16942 - RNA, 20 nt, synthetic construct
  source 1..20: mol_type = other RNA
actatacttcaatgctacag

SEQ ID NO: 16943 - RNA, 20 nt, synthetic construct
  source 1..20: mol_type = other RNA
actatagacccaaagcaaaa

SEQ ID NO: 16944 - RNA, 20 nt, synthetic construct
  source 1..20: mol_type = other RNA
actataggagttcattcgta

SEQ ID NO: 16945 - RNA, 20 nt, synthetic construct
  source 1..20: mol_type = other RNA
actatatgatccagcagttt

SEQ ID NO: 16946 - RNA, 20 nt, synthetic construct
  source 1..20: mol_type = other RNA
actatcaaaacacttctgtg

SEQ ID NO: 16947 - RNA, 20 nt, synthetic construct
  source 1..20: mol_type = other RNA
actatcacgattctgaccca

SEQ ID NO: 16948 - RNA, 20 nt, synthetic construct
  source 1..20: mol_type = other RNA
actatccaacatgccagctt

SEQ ID NO: 16949 - RNA, 20 nt, synthetic construct
  source 1..20: mol_type = other RNA
actatccacatttggtttta

SEQ ID NO: 16950 - RNA, 20 nt, synthetic construct
  source 1..20: mol_type = other RNA
actatcctatgtggggaatg

SEQ ID NO: 16951 - RNA, 20 nt, synthetic construct
  source 1..20: mol_type = other RNA
actatcgttatatcctcagg

SEQ ID NO: 16952 - RNA, 20 nt, synthetic construct
  source 1..20: mol_type = other RNA
actatctaataaaatagcag

SEQ ID NO: 16953 - RNA, 20 nt, synthetic construct
  source 1..20: mol_type = other RNA
actatctcttcctcctctgg

SEQ ID NO: 16954 - RNA, 20 nt, synthetic construct
  source 1..20: mol_type = other RNA
actatcttccctaaagagaa

SEQ ID NO: 16955 - RNA, 20 nt, synthetic construct
  source 1..20: mol_type = other RNA
actatgaaaagcctcaaacg

SEQ ID NO: 16956 - RNA, 20 nt, synthetic construct
  source 1..20: mol_type = other RNA
actatgaatatactggaaaa

SEQ ID NO: 16957 - RNA, 20 nt, synthetic construct
  source 1..20: mol_type = other RNA
actatgagaaggattagtgt

SEQ ID NO: 16958 - RNA, 20 nt, synthetic construct
  source 1..20: mol_type = other RNA
actatgcagcaacggaaatg

SEQ ID NO: 16959 - RNA, 20 nt, synthetic construct
  source 1..20: mol_type = other RNA
actatgcttaatctgatttt

SEQ ID NO: 16960 - RNA, 20 nt, synthetic construct
  source 1..20: mol_type = other RNA
actatggacatgaggaaagc

SEQ ID NO: 16961 - RNA, 20 nt, synthetic construct
  source 1..20: mol_type = other RNA
actatggcttttgagtgtaa

SEQ ID NO: 16962 - RNA, 20 nt, synthetic construct
  source 1..20: mol_type = other RNA
actatgtaggcacattcaag

SEQ ID NO: 16963 - RNA, 20 nt, synthetic construct
  source 1..20: mol_type = other RNA
actatgtatgtggctcacat

SEQ ID NO: 16964 - RNA, 20 nt, synthetic construct
  source 1..20: mol_type = other RNA
actatgtgttgataaatatg

SEQ ID NO: 16965 - RNA, 20 nt, synthetic construct
  source 1..20: mol_type = other RNA
actattaaccatatggttta

SEQ ID NO: 16966 - RNA, 20 nt, synthetic construct
  source 1..20: mol_type = other RNA
actattatgagcagttgtat

SEQ ID NO: 16967 - RNA, 20 nt, synthetic construct
  source 1..20: mol_type = other RNA
actattccaggatcaaatct

SEQ ID NO: 16968 - RNA, 20 nt, synthetic construct
  source 1..20: mol_type = other RNA
actattccataagatctgtc

SEQ ID NO: 16969 - RNA, 20 nt, synthetic construct
  source 1..20: mol_type = other RNA
actattgaaagcccttgagt

SEQ ID NO: 16970 - RNA, 20 nt, synthetic construct
  source 1..20: mol_type = other RNA
actattgagagtgaaaacac

SEQ ID NO: 16971 - RNA, 20 nt, synthetic construct
  source 1..20: mol_type = other RNA
actattgtatgaacattttg

SEQ ID NO: 16972 - RNA, 20 nt, synthetic construct
  source 1..20: mol_type = other RNA
actatttcgcaaagcaacat

SEQ ID NO: 16973 - RNA, 20 nt, synthetic construct
  source 1..20: mol_type = other RNA
actatttctctttaaagctg

SEQ ID NO: 16974 - RNA, 20 nt, synthetic construct
  source 1..20: mol_type = other RNA
actatttgtatcttcacaaa

SEQ ID NO: 16975 - RNA, 20 nt, synthetic construct
  source 1..20: mol_type = other RNA
actattttaccctcatttta

SEQ ID NO: 16976 - RNA, 20 nt, synthetic construct
  source 1..20: mol_type = other RNA
actattttcataacaaagct

SEQ ID NO: 16977 - RNA, 20 nt, synthetic construct
  source 1..20: mol_type = other RNA
actattttctatagtggctg

SEQ ID NO: 16978 - RNA, 20 nt, synthetic construct
  source 1..20: mol_type = other RNA
actcaaaactgaagtttatc

SEQ ID NO: 16979 - RNA, 20 nt, synthetic construct
  source 1..20: mol_type = other RNA
actcaaaagccatagtgtaa

SEQ ID NO: 16980 - RNA, 20 nt, synthetic construct
  source 1..20: mol_type = other RNA
actcaaaaggacatatttta

SEQ ID NO: 16981 - RNA, 20 nt, synthetic construct
  source 1..20: mol_type = other RNA
actcaaaagtgaatcactac

SEQ ID NO: 16982 - RNA, 20 nt, synthetic construct
  source 1..20: mol_type = other RNA
actcaaaatgttcatacaat

SEQ ID NO: 16983 - RNA, 20 nt, synthetic construct
  source 1..20: mol_type = other RNA
actcaaacccaaattaaagg

SEQ ID NO: 16984 - RNA, 20 nt, synthetic construct
  source 1..20: mol_type = other RNA
actcaaacgtccatcaacag

SEQ ID NO: 16985 - RNA, 20 nt, synthetic construct
  source 1..20: mol_type = other RNA
actcaaactatgcttaatct

SEQ ID NO: 16986 - RNA, 20 nt, synthetic construct
  source 1..20: mol_type = other RNA
actcaaatccaaattcacag

SEQ ID NO: 16987 - RNA, 20 nt, synthetic construct
  source 1..20: mol_type = other RNA
actcaacatcactagctatt

SEQ ID NO: 16988 - RNA, 20 nt, synthetic construct
  source 1..20: mol_type = other RNA
actcaacatgtgtatttagg

SEQ ID NO: 16989 - RNA, 20 nt, synthetic construct
  source 1..20: mol_type = other RNA
actcaacattcattcatgac

SEQ ID NO: 16990 - RNA, 20 nt, synthetic construct
  source 1..20: mol_type = other RNA
actcaacgacaatctctggg

SEQ ID NO: 16991 - RNA, 20 nt, synthetic construct
  source 1..20: mol_type = other RNA
actcaactgcctctacatca

SEQ ID NO: 16992 - RNA, 20 nt, synthetic construct
  source 1..20: mol_type = other RNA
actcaagagttacttctgga

SEQ ID NO: 16993 - RNA, 20 nt, synthetic construct
  source 1..20: mol_type = other RNA
actcaagcctgataagctcc

SEQ ID NO: 16994 - RNA, 20 nt, synthetic construct
  source 1..20: mol_type = other RNA
actcaagggctttcaatagt

SEQ ID NO: 16995 - RNA, 20 nt, synthetic construct
  source 1..20: mol_type = other RNA
actcaagttccggttctcag

SEQ ID NO: 16996 - RNA, 20 nt, synthetic construct
  source 1..20: mol_type = other RNA
actcaataaccacatgtggc

SEQ ID NO: 16997 - RNA, 20 nt, synthetic construct
  source 1..20: mol_type = other RNA
actcaatacacgtggctgtc

SEQ ID NO: 16998 - RNA, 20 nt, synthetic construct
  source 1..20: mol_type = other RNA
actcaatcagtggccagtga

SEQ ID NO: 16999 - RNA, 20 nt, synthetic construct
  source 1..20: mol_type = other RNA
actcaatcttcttatttgtt

SEQ ID NO: 17000 - RNA, 20 nt, synthetic construct
  source 1..20: mol_type = other RNA
actcaatgttggttagtgtt

SEQ ID NO: 17001 - RNA, 20 nt, synthetic construct
  source 1..20: mol_type = other RNA
actcacaaaaagtgtgacca

SEQ ID NO: 17002 - RNA, 20 nt, synthetic construct
  source 1..20: mol_type = other RNA
actcacagcttaccaagtgc

SEQ ID NO: 17003 - RNA, 20 nt, synthetic construct
  source 1..20: mol_type = other RNA
actcacctagctgttttcat

SEQ ID NO: 17004 - RNA, 20 nt, synthetic construct
  source 1..20: mol_type = other RNA
actcacctgtcatgtcaaat

SEQ ID NO: 17005 - RNA, 20 nt, synthetic construct
  source 1..20: mol_type = other RNA
actcactgaaaccctcacga

SEQ ID NO: 17006 - RNA, 20 nt, synthetic construct
  source 1..20: mol_type = other RNA
actcactggccagcattact

SEQ ID NO: 17007 - RNA, 20 nt, synthetic construct
  source 1..20: mol_type = other RNA
actcactggcctgagctctc

SEQ ID NO: 17008 - RNA, 20 nt, synthetic construct
  source 1..20: mol_type = other RNA
actcactgtactactgacct

SEQ ID NO: 17009 - RNA, 20 nt, synthetic construct
  source 1..20: mol_type = other RNA
actcacttattagcaaagag

SEQ ID NO: 17010 - RNA, 20 nt, synthetic construct
  source 1..20: mol_type = other RNA
actcagaagtactactcatt

SEQ ID NO: 17011 - RNA, 20 nt, synthetic construct
  source 1..20: mol_type = other RNA
actcagatatcaatctggat

SEQ ID NO: 17012 - RNA, 20 nt, synthetic construct
  source 1..20: mol_type = other RNA
actcagatctgagagataga

SEQ ID NO: 17013 - RNA, 20 nt, synthetic construct
  source 1..20: mol_type = other RNA
actcagattcaccaattgtt

SEQ ID NO: 17014 - RNA, 20 nt, synthetic construct
  source 1..20: mol_type = other RNA
actcagcagttttaaagaat

SEQ ID NO: 17015 - RNA, 20 nt, synthetic construct
  source 1..20: mol_type = other RNA
actcagcataattggttaaa

SEQ ID NO: 17016 - RNA, 20 nt, synthetic construct
  source 1..20: mol_type = other RNA
actcagccccctcgaagaga

SEQ ID NO: 17017 - RNA, 20 nt, synthetic construct
  source 1..20: mol_type = other RNA
actcagcctgttgggaggtt

SEQ ID NO: 17018 - RNA, 20 nt, synthetic construct
  source 1..20: mol_type = other RNA
actcagctgtcactctcttt

SEQ ID NO: 17019 - RNA, 20 nt, synthetic construct
  source 1..20: mol_type = other RNA
actcaggagattaaggctgg

SEQ ID NO: 17020 - RNA, 20 nt, synthetic construct
  source 1..20: mol_type = other RNA
actcagggtcacttcctctc

SEQ ID NO: 17021 - RNA, 20 nt, synthetic construct
  source 1..20: mol_type = other RNA
actcagtacttccctctttc

SEQ ID NO: 17022 - RNA, 20 nt, synthetic construct
  source 1..20: mol_type = other RNA
actcagtctcgaaaaggaat

SEQ ID NO: 17023 - RNA, 20 nt, synthetic construct
  source 1..20: mol_type = other RNA
actcataccaggttttggta

SEQ ID NO: 17024 - RNA, 20 nt, synthetic construct
  source 1..20: mol_type = other RNA
actcatattagtctgtagct

SEQ ID NO: 17025 - RNA, 20 nt, synthetic construct
  source 1..20: mol_type = other RNA
actcatgagagctgtgccga

SEQ ID NO: 17026 - RNA, 20 nt, synthetic construct
  source 1..20: mol_type = other RNA
actcatgcttgctccagaga

SEQ ID NO: 17027 - RNA, 20 nt, synthetic construct
  source 1..20: mol_type = other RNA
actcatgtctacctgtcttt

SEQ ID NO: 17028 - RNA, 20 nt, synthetic construct
  source 1..20: mol_type = other RNA
actcattatcccagacagat

SEQ ID NO: 17029 - RNA, 20 nt, synthetic construct
  source 1..20: mol_type = other RNA
actcattatggttgttggct

SEQ ID NO: 17030 - RNA, 20 nt, synthetic construct
  source 1..20: mol_type = other RNA
actcattccaatccttcctt

SEQ ID NO: 17031 - RNA, 20 nt, synthetic construct
  source 1..20: mol_type = other RNA
actcattgcctatagacagc

SEQ ID NO: 17032 - RNA, 20 nt, synthetic construct
  source 1..20: mol_type = other RNA
actcatttaaacgtcagagc

SEQ ID NO: 17033 - RNA, 20 nt, synthetic construct
  source 1..20: mol_type = other RNA
actcatttccgttgctgcat

SEQ ID NO: 17034 - RNA, 20 nt, synthetic construct
  source 1..20: mol_type = other RNA
actcatttcctttcagtcgg

SEQ ID NO: 17035 - RNA, 20 nt, synthetic construct
  source 1..20: mol_type = other RNA
actcatttctgcttgaatgt

SEQ ID NO: 17036 - RNA, 20 nt, synthetic construct
  source 1..20: mol_type = other RNA
actccaaacctttaagttct

SEQ ID NO: 17037 - RNA, 20 nt, synthetic construct
  source 1..20: mol_type = other RNA
actccaaagcaaaccagaca

SEQ ID NO: 17038 - RNA, 20 nt, synthetic construct
  source 1..20: mol_type = other RNA
actccaaagcaaacgtgcac

SEQ ID NO: 17039 - RNA, 20 nt, synthetic construct
  source 1..20: mol_type = other RNA
actccaacaattcaacaata

SEQ ID NO: 17040 - RNA, 20 nt, synthetic construct
  source 1..20: mol_type = other RNA
actccaactcaaaaaagaaa

SEQ ID NO: 17041 - RNA, 20 nt, synthetic construct
  source 1..20: mol_type = other RNA
actccaagaaggctagcaca

SEQ ID NO: 17042 - RNA, 20 nt, synthetic construct
  source 1..20: mol_type = other RNA
actccaagcacacagtttga

SEQ ID NO: 17043 - RNA, 20 nt, synthetic construct
  source 1..20: mol_type = other RNA
actccaagtctcatgcaatt

SEQ ID NO: 17044 - RNA, 20 nt, synthetic construct
  source 1..20: mol_type = other RNA
actccaagtgtaaaaagaca

SEQ ID NO: 17045 - RNA, 20 nt, synthetic construct
  source 1..20: mol_type = other RNA
actccacacacgaagtagtt

SEQ ID NO: 17046 - RNA, 20 nt, synthetic construct
  source 1..20: mol_type = other RNA
actccacagagttcagctta

SEQ ID NO: 17047 - RNA, 20 nt, synthetic construct
  source 1..20: mol_type = other RNA
actccacattgtcttaatta

SEQ ID NO: 17048 - RNA, 20 nt, synthetic construct
  source 1..20: mol_type = other RNA
actccaccagcatcttttga

SEQ ID NO: 17049 - RNA, 20 nt, synthetic construct
  source 1..20: mol_type = other RNA
actccaccctgccccttatc

SEQ ID NO: 17050 - RNA, 20 nt, synthetic construct
  source 1..20: mol_type = other RNA
actccacctcagaaacaaac

SEQ ID NO: 17051 - RNA, 20 nt, synthetic construct
  source 1..20: mol_type = other RNA
actccaccttagcccaagct

SEQ ID NO: 17052 - RNA, 20 nt, synthetic construct
  source 1..20: mol_type = other RNA
actccacgtgggtgacagag

SEQ ID NO: 17053 - RNA, 20 nt, synthetic construct
  source 1..20: mol_type = other RNA
actccacttcccactgctat

SEQ ID NO: 17054 - RNA, 20 nt, synthetic construct
  source 1..20: mol_type = other RNA
actccagaatgaccgagata

SEQ ID NO: 17055 - RNA, 20 nt, synthetic construct
  source 1..20: mol_type = other RNA
actccagcatccctccagtc

SEQ ID NO: 17056 - RNA, 20 nt, synthetic construct
  source 1..20: mol_type = other RNA
actccagccttggtaagagt

SEQ ID NO: 17057 - RNA, 20 nt, synthetic construct
  source 1..20: mol_type = other RNA
actccagcttttattagagc

SEQ ID NO: 17058 - RNA, 20 nt, synthetic construct
  source 1..20: mol_type = other RNA
actccaggggacatgctctg

SEQ ID NO: 17059 - RNA, 20 nt, synthetic construct
  source 1..20: mol_type = other RNA
actccatctcaagaaaacaa

SEQ ID NO: 17060 - RNA, 20 nt, synthetic construct
  source 1..20: mol_type = other RNA
actccatcttcacgtggcgc

SEQ ID NO: 17061 - RNA, 20 nt, synthetic construct
  source 1..20: mol_type = other RNA
actccattatatgaataaac

SEQ ID NO: 17062 - RNA, 20 nt, synthetic construct
  source 1..20: mol_type = other RNA
actccatttgtggcatcttt

SEQ ID NO: 17063 - RNA, 20 nt, synthetic construct
  source 1..20: mol_type = other RNA
actcccaacttataatatta

SEQ ID NO: 17064 - RNA, 20 nt, synthetic construct
  source 1..20: mol_type = other RNA
actcccagaactcgaagcct

SEQ ID NO: 17065 - RNA, 20 nt, synthetic construct
  source 1..20: mol_type = other RNA
actcccagcctcaaacaatc

SEQ ID NO: 17066 - RNA, 20 nt, synthetic construct
  source 1..20: mol_type = other RNA
actcccatatctacatgtac

SEQ ID NO: 17067 - RNA, 20 nt, synthetic construct
  source 1..20: mol_type = other RNA
actccccagtggttgtggaa

SEQ ID NO: 17068 - RNA, 20 nt, synthetic construct
  source 1..20: mol_type = other RNA
actccccatgcaggagaaac

SEQ ID NO: 17069 - RNA, 20 nt, synthetic construct
  source 1..20: mol_type = other RNA
actcccgatttcagttaact

SEQ ID NO: 17070 - RNA, 20 nt, synthetic construct
  source 1..20: mol_type = other RNA
actccctttttaggtaggga

SEQ ID NO: 17071 - RNA, 20 nt, synthetic construct
  source 1..20: mol_type = other RNA
actccggcgggagaggagcg

SEQ ID NO: 17072 - RNA, 20 nt, synthetic construct
  source 1..20: mol_type = other RNA
actcctaaaacatggtccac

SEQ ID NO: 17073 - RNA, 20 nt, synthetic construct
  source 1..20: mol_type = other RNA
actcctagatactcgggagg

SEQ ID NO: 17074 - RNA, 20 nt, synthetic construct
  source 1..20: mol_type = other RNA
actcctatagttaagtctga

SEQ ID NO: 17075 - RNA, 20 nt, synthetic construct
  source 1..20: mol_type = other RNA
actcctcattcacactagtc

SEQ ID NO: 17076 - RNA, 20 nt, synthetic construct
  source 1..20: mol_type = other RNA
actcctgaacaaaatttttg

SEQ ID NO: 17077 - RNA, 20 nt, synthetic construct
  source 1..20: mol_type = other RNA
actcctgacctcaagcgatc

SEQ ID NO: 17078 - RNA, 20 nt, synthetic construct
  source 1..20: mol_type = other RNA
actcctgagcaaggaaggaa

SEQ ID NO: 17079 - RNA, 20 nt, synthetic construct
  source 1..20: mol_type = other RNA
actcctgcactcaagcaatc

SEQ ID NO: 17080 - RNA, 20 nt, synthetic construct
  source 1..20: mol_type = other RNA
actcctgggctcatctaagc

SEQ ID NO: 17081 - RNA, 20 nt, synthetic construct
  source 1..20: mol_type = other RNA
actcctggtctcccagcatg

SEQ ID NO: 17082 - RNA, 20 nt, synthetic construct
  source 1..20: mol_type = other RNA
actcctgtatgccgctggtg

SEQ ID NO: 17083 - RNA, 20 nt, synthetic construct
  source 1..20: mol_type = other RNA
actcctgttctttggagctg

SEQ ID NO: 17084 - RNA, 20 nt, synthetic construct
  source 1..20: mol_type = other RNA
actccttcccctggtcgagc

SEQ ID NO: 17085 - RNA, 20 nt, synthetic construct
  source 1..20: mol_type = other RNA
actccttctgaaggcactaa

SEQ ID NO: 17086 - RNA, 20 nt, synthetic construct
  source 1..20: mol_type = other RNA
actcctttcttaccctcaca

SEQ ID NO: 17087 - RNA, 20 nt, synthetic construct
  source 1..20: mol_type = other RNA
actcgaagccttcccctgct

SEQ ID NO: 17088 - RNA, 20 nt, synthetic construct
  source 1..20: mol_type = other RNA
actcgagggtagcttttcct

SEQ ID NO: 17089 - RNA, 20 nt, synthetic construct
  source 1..20: mol_type = other RNA
actcgcactccacttcccac

SEQ ID NO: 17090 - RNA, 20 nt, synthetic construct
  source 1..20: mol_type = other RNA
actcggtatgtacccaatgg

SEQ ID NO: 17091 - RNA, 20 nt, synthetic construct
  source 1..20: mol_type = other RNA
actcggtctcaaaacaaaca

SEQ ID NO: 17092 - RNA, 20 nt, synthetic construct
  source 1..20: mol_type = other RNA
actcgtaatgcgatgatcaa

SEQ ID NO: 17093 - RNA, 20 nt, synthetic construct
  source 1..20: mol_type = other RNA
actcgtagttttttggtaga

SEQ ID NO: 17094 - RNA, 20 nt, synthetic construct
  source 1..20: mol_type = other RNA
actcgtggcctcaagcagtc

SEQ ID NO: 17095 - RNA, 20 nt, synthetic construct
  source 1..20: mol_type = other RNA
actcgtggttatagccataa

SEQ ID NO: 17096 - RNA, 20 nt, synthetic construct
  source 1..20: mol_type = other RNA
actcgtgtatgatttctagg

SEQ ID NO: 17097 - RNA, 20 nt, synthetic construct
  source 1..20: mol_type = other RNA
actcgtgtgtctcataaagc

SEQ ID NO: 17098 - RNA, 20 nt, synthetic construct
  source 1..20: mol_type = other RNA
actctaaactagttcaacca

SEQ ID NO: 17099 - RNA, 20 nt, synthetic construct
  source 1..20: mol_type = other RNA
actctaaagtctatgctctt

SEQ ID NO: 17100 - RNA, 20 nt, synthetic construct
  source 1..20: mol_type = other RNA
actctaataacagcctaagc

SEQ ID NO: 17101 - RNA, 20 nt, synthetic construct
  source 1..20: mol_type = other RNA
actctaatatggttcctaga

SEQ ID NO: 17102 - RNA, 20 nt, synthetic construct
  source 1..20: mol_type = other RNA
actctaatggggaaatagat

SEQ ID NO: 17103 - RNA, 20 nt, synthetic construct
  source 1..20: mol_type = other RNA
actctagtggtgcttaattc

SEQ ID NO: 17104 - RNA, 20 nt, synthetic construct
  source 1..20: mol_type = other RNA
actctatgatatatactttg

SEQ ID NO: 17105 - RNA, 20 nt, synthetic construct
  source 1..20: mol_type = other RNA
actctattttcctaaaactc

SEQ ID NO: 17106 - RNA, 20 nt, synthetic construct
  source 1..20: mol_type = other RNA
actctcaaataatttggcaa

SEQ ID NO: 17107 - RNA, 20 nt, synthetic construct
  source 1..20: mol_type = other RNA
actctcaagaaggtatcatc

SEQ ID NO: 17108 - RNA, 20 nt, synthetic construct
  source 1..20: mol_type = other RNA
actctcaatagtgtcctttg

SEQ ID NO: 17109 - RNA, 20 nt, synthetic construct
  source 1..20: mol_type = other RNA
actctcagaaattataagct

SEQ ID NO: 17110 - RNA, 20 nt, synthetic construct
  source 1..20: mol_type = other RNA
actctcatctaaattaagct

SEQ ID NO: 17111 - RNA, 20 nt, synthetic construct
  source 1..20: mol_type = other RNA
actctccccaagtaaacctc

SEQ ID NO: 17112 - RNA, 20 nt, synthetic construct
  source 1..20: mol_type = other RNA
actctcgacctcgtgatctg

SEQ ID NO: 17113 - RNA, 20 nt, synthetic construct
  source 1..20: mol_type = other RNA
actctctctgcctcggcaca

SEQ ID NO: 17114 - RNA, 20 nt, synthetic construct
  source 1..20: mol_type = other RNA
actctctggctgcaattgcg

SEQ ID NO: 17115 - RNA, 20 nt, synthetic construct
  source 1..20: mol_type = other RNA
actctctttaattatgagca

SEQ ID NO: 17116 - RNA, 20 nt, synthetic construct
  source 1..20: mol_type = other RNA
actctctttaggaagcttcc

SEQ ID NO: 17117 - RNA, 20 nt, synthetic construct
  source 1..20: mol_type = other RNA
actctgaatcacctcaaggc

SEQ ID NO: 17118 - RNA, 20 nt, synthetic construct
  source 1..20: mol_type = other RNA
actctgaattctctggaata

SEQ ID NO: 17119 - RNA, 20 nt, synthetic construct
  source 1..20: mol_type = other RNA
actctgaccattgtgtggac

SEQ ID NO: 17120 - RNA, 20 nt, synthetic construct
  source 1..20: mol_type = other RNA
actctgagacaggatccaga

SEQ ID NO: 17121 - RNA, 20 nt, synthetic construct
  source 1..20: mol_type = other RNA
actctgcaattttaaatgta

SEQ ID NO: 17122 - RNA, 20 nt, synthetic construct
  source 1..20: mol_type = other RNA
actctgcctcagttgacatc

SEQ ID NO: 17123 - RNA, 20 nt, synthetic construct
  source 1..20: mol_type = other RNA
actctgctcaaaggggcatt

SEQ ID NO: 17124 - RNA, 20 nt, synthetic construct
  source 1..20: mol_type = other RNA
actctggcaggtcacctagc

SEQ ID NO: 17125 - RNA, 20 nt, synthetic construct
  source 1..20: mol_type = other RNA
actctggcctggacaacagt

SEQ ID NO: 17126 - RNA, 20 nt, synthetic construct
  source 1..20: mol_type = other RNA
actctggctcagaaacaaca

SEQ ID NO: 17127 - RNA, 20 nt, synthetic construct
  source 1..20: mol_type = other RNA
actctgtcatggtgtgtctg

SEQ ID NO: 17128 - RNA, 20 nt, synthetic construct
  source 1..20: mol_type = other RNA
actctgtcgcccaggctgga

SEQ ID NO: 17129 - RNA, 20 nt, synthetic construct
  source 1..20: mol_type = other RNA
actctgtgcttgtgctttta

SEQ ID NO: 17130 - RNA, 20 nt, synthetic construct
  source 1..20: mol_type = other RNA
actctgtggagtcctgtcag

SEQ ID NO: 17131 - RNA, 20 nt, synthetic construct
  source 1..20: mol_type = other RNA
actctgtttccttaccagtg

SEQ ID NO: 17132 - RNA, 20 nt, synthetic construct
  source 1..20: mol_type = other RNA
actcttaaaaggagatatac

SEQ ID NO: 17133 - RNA, 20 nt, synthetic construct
  source 1..20: mol_type = other RNA
actcttaaagtttcaaactg

SEQ ID NO: 17134 - RNA, 20 nt, synthetic construct
  source 1..20: mol_type = other RNA
actcttaataactgcctaag

SEQ ID NO: 17135 - RNA, 20 nt, synthetic construct
  source 1..20: mol_type = other RNA
actcttaatattgaaacgat

SEQ ID NO: 17136 - RNA, 20 nt, synthetic construct
  source 1..20: mol_type = other RNA
actcttaccaaggctggagt

SEQ ID NO: 17137 - RNA, 20 nt, synthetic construct
  source 1..20: mol_type = other RNA
actcttagcttagaagaaga

SEQ ID NO: 17138 - RNA, 20 nt, synthetic construct
  source 1..20: mol_type = other RNA
actcttagtgatgtcttttg

SEQ ID NO: 17139 - RNA, 20 nt, synthetic construct
  source 1..20: mol_type = other RNA
actcttatatcctaaacact

SEQ ID NO: 17140 - RNA, 20 nt, synthetic construct
  source 1..20: mol_type = other RNA
actcttatggctataaccac

SEQ ID NO: 17141 - RNA, 20 nt, synthetic construct
  source 1..20: mol_type = other RNA
actcttcagaggtctgttac

SEQ ID NO: 17142 - RNA, 20 nt, synthetic construct
  source 1..20: mol_type = other RNA
actcttccttatccgataaa

SEQ ID NO: 17143 - RNA, 20 nt, synthetic construct
  source 1..20: mol_type = other RNA
actcttctactcactgtact

SEQ ID NO: 17144 - RNA, 20 nt, synthetic construct
  source 1..20: mol_type = other RNA
actcttctccaaggaaagtg

SEQ ID NO: 17145 - RNA, 20 nt, synthetic construct
  source 1..20: mol_type = other RNA
actcttctgcaagttgctat

SEQ ID NO: 17146 - RNA, 20 nt, synthetic construct
  source 1..20: mol_type = other RNA
actcttgagttaggaattta

SEQ ID NO: 17147 - RNA, 20 nt, synthetic construct
  source 1..20: mol_type = other RNA
actcttgcattagagcccca

SEQ ID NO: 17148 - RNA, 20 nt, synthetic construct
  source 1..20: mol_type = other RNA
actcttgcggtcttttagcc

SEQ ID NO: 17149 - RNA, 20 nt, synthetic construct
  source 1..20: mol_type = other RNA
actcttggccattttctttt

SEQ ID NO: 17150 - RNA, 20 nt, synthetic construct
  source 1..20: mol_type = other RNA
actcttggtctttctcccag

SEQ ID NO: 17151 - RNA, 20 nt, synthetic construct
  source 1..20: mol_type = other RNA
actcttgtagtatttttgca

SEQ ID NO: 17152 - RNA, 20 nt, synthetic construct
  source 1..20: mol_type = other RNA
actcttgtcccggcatgcct

SEQ ID NO: 17153 - RNA, 20 nt, synthetic construct
  source 1..20: mol_type = other RNA
actcttttaaacccatttca

SEQ ID NO: 17154 - RNA, 20 nt, synthetic construct
  source 1..20: mol_type = other RNA
actcttttaaggtttagaaa

SEQ ID NO: 17155 - RNA, 20 nt, synthetic construct
  source 1..20: mol_type = other RNA
actcttttgtttttgggggg

SEQ ID NO: 17156 - RNA, 20 nt, synthetic construct
  source 1..20: mol_type = other RNA
actgaaaagatacagaaata

SEQ ID NO: 17157 - RNA, 20 nt, synthetic construct
  source 1..20: mol_type = other RNA
actgaaacaatcgcaatcca

SEQ ID NO: 17158 - RNA, 20 nt, synthetic construct
  source 1..20: mol_type = other RNA
actgaaaccagtgctctccc

SEQ ID NO: 17159 - RNA, 20 nt, synthetic construct
  source 1..20: mol_type = other RNA
actgaaaccagtgggtcagc

SEQ ID NO: 17160 - RNA, 20 nt, synthetic construct
  source 1..20: mol_type = other RNA
actgaaaccctcacgaaagc

SEQ ID NO: 17161 - RNA, 20 nt, synthetic construct
  source 1..20: mol_type = other RNA
actgaaacttttcttttctt

SEQ ID NO: 17162 - RNA, 20 nt, synthetic construct
  source 1..20: mol_type = other RNA
actgaaagacagacctctat

SEQ ID NO: 17163 - RNA, 20 nt, synthetic construct
  source 1..20: mol_type = other RNA
actgaaagcagggactccca

SEQ ID NO: 17164 - RNA, 20 nt, synthetic construct
  source 1..20: mol_type = other RNA
actgaaaggaaatgagtgta

SEQ ID NO: 17165 - RNA, 20 nt, synthetic construct
  source 1..20: mol_type = other RNA
actgaaataatttggttatg

SEQ ID NO: 17166 - RNA, 20 nt, synthetic construct
  source 1..20: mol_type = other RNA
actgaaatcctagccccaaa

SEQ ID NO: 17167 - RNA, 20 nt, synthetic construct
  source 1..20: mol_type = other RNA
actgaaatcgggagtaacag

SEQ ID NO: 17168 - RNA, 20 nt, synthetic construct
  source 1..20: mol_type = other RNA
actgaacaacgctgtggcta

SEQ ID NO: 17169 - RNA, 20 nt, synthetic construct
  source 1..20: mol_type = other RNA
actgaacatgtatgtttctc

SEQ ID NO: 17170 - RNA, 20 nt, synthetic construct
  source 1..20: mol_type = other RNA
actgaacatttatacagttg

SEQ ID NO: 17171 - RNA, 20 nt, synthetic construct
  source 1..20: mol_type = other RNA
actgaactacagtgtttagg

SEQ ID NO: 17172 - RNA, 20 nt, synthetic construct
  source 1..20: mol_type = other RNA
actgaactcaaaatggatca

SEQ ID NO: 17173 - RNA, 20 nt, synthetic construct
  source 1..20: mol_type = other RNA
actgaagccagtccttgtga

SEQ ID NO: 17174 - RNA, 20 nt, synthetic construct
  source 1..20: mol_type = other RNA
actgaagcggggctgccact

SEQ ID NO: 17175 - RNA, 20 nt, synthetic construct
  source 1..20: mol_type = other RNA
actgaaggattcctccctgg

SEQ ID NO: 17176 - RNA, 20 nt, synthetic construct
  source 1..20: mol_type = other RNA
actgaaggcatagggccttc

SEQ ID NO: 17177 - RNA, 20 nt, synthetic construct
  source 1..20: mol_type = other RNA
actgaagggaattttactga

SEQ ID NO: 17178 - RNA, 20 nt, synthetic construct
  source 1..20: mol_type = other RNA
actgaagtaataaagcaagt

SEQ ID NO: 17179 - RNA, 20 nt, synthetic construct
  source 1..20: mol_type = other RNA
actgaagtcctttcttggtc

SEQ ID NO: 17180 - RNA, 20 nt, synthetic construct
  source 1..20: mol_type = other RNA
actgaagtgttgagaggctt

SEQ ID NO: 17181 - RNA, 20 nt, synthetic construct
  source 1..20: mol_type = other RNA
actgaagttctcaggggtaa

SEQ ID NO: 17182 - RNA, 20 nt, synthetic construct
  source 1..20: mol_type = other RNA
actgaagtttatcagtctcc

SEQ ID NO: 17183 - RNA, 20 nt, synthetic construct
  source 1..20: mol_type = other RNA
actgaagtttatcgtattta

SEQ ID NO: 17184 - RNA, 20 nt, synthetic construct
  source 1..20: mol_type = other RNA
actgaatcagacaacacatt

SEQ ID NO: 17185 - RNA, 20 nt, synthetic construct
  source 1..20: mol_type = other RNA
actgaatcagattttaaatg

SEQ ID NO: 17186 - RNA, 20 nt, synthetic construct
  source 1..20: mol_type = other RNA
actgaattaatctcttacac

SEQ ID NO: 17187 - RNA, 20 nt, synthetic construct
  source 1..20: mol_type = other RNA
actgaattcccacaaaatat

SEQ ID NO: 17188 - RNA, 20 nt, synthetic construct
  source 1..20: mol_type = other RNA
actgacaatagccaagacat

SEQ ID NO: 17189 - RNA, 20 nt, synthetic construct
  source 1..20: mol_type = other RNA
actgacacaggctgaaggga

SEQ ID NO: 17190 - RNA, 20 nt, synthetic construct
  source 1..20: mol_type = other RNA
actgacaggacagagcagta

SEQ ID NO: 17191 - RNA, 20 nt, synthetic construct
  source 1..20: mol_type = other RNA
actgacaggactccacagag

SEQ ID NO: 17192 - RNA, 20 nt, synthetic construct
  source 1..20: mol_type = other RNA
actgacagtggacaaaggtt

SEQ ID NO: 17193 - RNA, 20 nt, synthetic construct
  source 1..20: mol_type = other RNA
actgacataactgtaaagta

SEQ ID NO: 17194 - RNA, 20 nt, synthetic construct
  source 1..20: mol_type = other RNA
actgaccaacatggacaaac

SEQ ID NO: 17195 - RNA, 20 nt, synthetic construct
  source 1..20: mol_type = other RNA
actgaccatctcagcacaga

SEQ ID NO: 17196 - RNA, 20 nt, synthetic construct
  source 1..20: mol_type = other RNA
actgacctgggagaaagacc

SEQ ID NO: 17197 - RNA, 20 nt, synthetic construct
  source 1..20: mol_type = other RNA
actgactacacatacacagg

SEQ ID NO: 17198 - RNA, 20 nt, synthetic construct
  source 1..20: mol_type = other RNA
actgactagtggctcatact

SEQ ID NO: 17199 - RNA, 20 nt, synthetic construct
  source 1..20: mol_type = other RNA
actgactcaatcttcttatt

SEQ ID NO: 17200 - RNA, 20 nt, synthetic construct
  source 1..20: mol_type = other RNA
actgactccctttttaggta

SEQ ID NO: 17201 - RNA, 20 nt, synthetic construct
  source 1..20: mol_type = other RNA
actgactctaaagtctatgc

SEQ ID NO: 17202 - RNA, 20 nt, synthetic construct
  source 1..20: mol_type = other RNA
actgactgaaggattcctcc

SEQ ID NO: 17203 - RNA, 20 nt, synthetic construct
  source 1..20: mol_type = other RNA
actgactggctgtgccaact

SEQ ID NO: 17204 - RNA, 20 nt, synthetic construct
  source 1..20: mol_type = other RNA
actgacttacagaccttatt

SEQ ID NO: 17205 - RNA, 20 nt, synthetic construct
  source 1..20: mol_type = other RNA
actgacttcaagaggttaaa

SEQ ID NO: 17206 - RNA, 20 nt, synthetic construct
  source 1..20: mol_type = other RNA
actgacttttccttaaaaaa

SEQ ID NO: 17207 - RNA, 20 nt, synthetic construct
  source 1..20: mol_type = other RNA
actgagaagagctgtaacag

SEQ ID NO: 17208 - RNA, 20 nt, synthetic construct
  source 1..20: mol_type = other RNA
actgagacagtattgtgctg

SEQ ID NO: 17209 - RNA, 20 nt, synthetic construct
  source 1..20: mol_type = other RNA
actgagaccggatgaggtgg

SEQ ID NO: 17210 - RNA, 20 nt, synthetic construct
  source 1..20: mol_type = other RNA
actgagagctcaggccagtg

SEQ ID NO: 17211 - RNA, 20 nt, synthetic construct
  source 1..20: mol_type = other RNA
actgagatacttaagttttt

SEQ ID NO: 17212 - RNA, 20 nt, synthetic construct
  source 1..20: mol_type = other RNA
actgagcacaatgcctgccg

SEQ ID NO: 17213 - RNA, 20 nt, synthetic construct
  source 1..20: mol_type = other RNA
actgagcagtgaaagtctcc

SEQ ID NO: 17214 - RNA, 20 nt, synthetic construct
  source 1..20: mol_type = other RNA
actgagcatcccagaggtac

SEQ ID NO: 17215 - RNA, 20 nt, synthetic construct
  source 1..20: mol_type = other RNA
actgagcatttatataagtt

SEQ ID NO: 17216 - RNA, 20 nt, synthetic construct
  source 1..20: mol_type = other RNA
actgagccagcaaatcagaa

SEQ ID NO: 17217 - RNA, 20 nt, synthetic construct
  source 1..20: mol_type = other RNA
actgaggcagagtagagaag

SEQ ID NO: 17218 - RNA, 20 nt, synthetic construct
  source 1..20: mol_type = other RNA
actgaggtcaagaaataaaa

SEQ ID NO: 17219 - RNA, 20 nt, synthetic construct
  source 1..20: mol_type = other RNA
actgaggtgtttttcagccc

SEQ ID NO: 17220 - RNA, 20 nt, synthetic construct
  source 1..20: mol_type = other RNA
actgagtaatattccattgt

SEQ ID NO: 17221 - RNA, 20 nt, synthetic construct
  source 1..20: mol_type = other RNA
actgagtcaaaaccaaagaa

SEQ ID NO: 17222 - RNA, 20 nt, synthetic construct
  source 1..20: mol_type = other RNA
actgataaacttcagttttg

SEQ ID NO: 17223 - RNA, 20 nt, synthetic construct
  source 1..20: mol_type = other RNA
actgatagcgaaaggtacga

SEQ ID NO: 17224 - RNA, 20 nt, synthetic construct
  source 1..20: mol_type = other RNA
actgatatgagggatgagga

SEQ ID NO: 17225 - RNA, 20 nt, synthetic construct
  source 1..20: mol_type = other RNA
actgatctgctcaagttttc

SEQ ID NO: 17226 - RNA, 20 nt, synthetic construct
  source 1..20: mol_type = other RNA
actgatcttttctgacaatt

SEQ ID NO: 17227 - RNA, 20 nt, synthetic construct
  source 1..20: mol_type = other RNA
actgatgaagaacctgttca

SEQ ID NO: 17228 - RNA, 20 nt, synthetic construct
  source 1..20: mol_type = other RNA
actgatggaattctgacacc

SEQ ID NO: 17229 - RNA, 20 nt, synthetic construct
  source 1..20: mol_type = other RNA
actgatgtgaggatctgttg

SEQ ID NO: 17230 - RNA, 20 nt, synthetic construct
  source 1..20: mol_type = other RNA
actgatgtgtagttattatt

SEQ ID NO: 17231 - RNA, 20 nt, synthetic construct
  source 1..20: mol_type = other RNA
actgattaatttgaggtcta

SEQ ID NO: 17232 - RNA, 20 nt, synthetic construct
  source 1..20: mol_type = other RNA
actgattagaaggattgttc

SEQ ID NO: 17233 - RNA, 20 nt, synthetic construct
  source 1..20: mol_type = other RNA
actgattgagtatctggtgc

SEQ ID NO: 17234 - RNA, 20 nt, synthetic construct
  source 1..20: mol_type = other RNA
actgatttatagtgtttcct

SEQ ID NO: 17235 - RNA, 20 nt, synthetic construct
  source 1..20: mol_type = other RNA
actgattttctgcttctcaa

SEQ ID NO: 17236 - RNA, 20 nt, synthetic construct
  source 1..20: mol_type = other RNA
actgcaaaactttcttcaaa

SEQ ID NO: 17237 - RNA, 20 nt, synthetic construct
  source 1..20: mol_type = other RNA
actgcaaatatccaatcact

SEQ ID NO: 17238 - RNA, 20 nt, synthetic construct
  source 1..20: mol_type = other RNA
actgcaacagatctgagaag

SEQ ID NO: 17239 - RNA, 20 nt, synthetic construct
  source 1..20: mol_type = other RNA
actgcaacctccgtttttca

SEQ ID NO: 17240 - RNA, 20 nt, synthetic construct
  source 1..20: mol_type = other RNA
actgcaagctccgcctcctg

SEQ ID NO: 17241 - RNA, 20 nt, synthetic construct
  source 1..20: mol_type = other RNA
actgcacagtatgcggggtt

SEQ ID NO: 17242 - RNA, 20 nt, synthetic construct
  source 1..20: mol_type = other RNA
actgcacataaaaggatatg

SEQ ID NO: 17243 - RNA, 20 nt, synthetic construct
  source 1..20: mol_type = other RNA
actgcactaaactagtatca

SEQ ID NO: 17244 - RNA, 20 nt, synthetic construct
  source 1..20: mol_type = other RNA
actgcactccagccttggta

SEQ ID NO: 17245 - RNA, 20 nt, synthetic construct
  source 1..20: mol_type = other RNA
actgcactctcaaaattaaa

SEQ ID NO: 17246 - RNA, 20 nt, synthetic construct
  source 1..20: mol_type = other RNA
actgcagaatgacagaaaat

SEQ ID NO: 17247 - RNA, 20 nt, synthetic construct
  source 1..20: mol_type = other RNA
actgcagaattactgacaat

SEQ ID NO: 17248 - RNA, 20 nt, synthetic construct
  source 1..20: mol_type = other RNA
actgcagaggtcaggaaggc

SEQ ID NO: 17249 - RNA, 20 nt, synthetic construct
  source 1..20: mol_type = other RNA
actgcagatgaatgagcaag

SEQ ID NO: 17250 - RNA, 20 nt, synthetic construct
  source 1..20: mol_type = other RNA
actgcagcaattatttgaat

SEQ ID NO: 17251 - RNA, 20 nt, synthetic construct
  source 1..20: mol_type = other RNA
actgcaggtcttcaacctca

SEQ ID NO: 17252 - RNA, 20 nt, synthetic construct
  source 1..20: mol_type = other RNA
actgcaggtgttggtgcatt

SEQ ID NO: 17253 - RNA, 20 nt, synthetic construct
  source 1..20: mol_type = other RNA
actgcagtctgtcctcgtaa

SEQ ID NO: 17254 - RNA, 20 nt, synthetic construct
  source 1..20: mol_type = other RNA
actgcagtgacctatcattg

SEQ ID NO: 17255 - RNA, 20 nt, synthetic construct
  source 1..20: mol_type = other RNA
actgcagttggattatatgt

SEQ ID NO: 17256 - RNA, 20 nt, synthetic construct
  source 1..20: mol_type = other RNA
actgcatattgaagccagca

SEQ ID NO: 17257 - RNA, 20 nt, synthetic construct
  source 1..20: mol_type = other RNA
actgcatcttcttttacttg

SEQ ID NO: 17258 - RNA, 20 nt, synthetic construct
  source 1..20: mol_type = other RNA
actgcatgattccccttata

SEQ ID NO: 17259 - RNA, 20 nt, synthetic construct
  source 1..20: mol_type = other RNA
actgcatgctaggggctgtt

SEQ ID NO: 17260 - RNA, 20 nt, synthetic construct
  source 1..20: mol_type = other RNA
actgcattcatccaggcaaa

SEQ ID NO: 17261 - RNA, 20 nt, synthetic construct
  source 1..20: mol_type = other RNA
actgcattccgcctgggcga

SEQ ID NO: 17262 - RNA, 20 nt, synthetic construct
  source 1..20: mol_type = other RNA
actgcattgtgcacttaaaa

SEQ ID NO: 17263 - RNA, 20 nt, synthetic construct
  source 1..20: mol_type = other RNA
actgcattttttgccaaatt

SEQ ID NO: 17264 - RNA, 20 nt, synthetic construct
  source 1..20: mol_type = other RNA
actgccaaaccctacaccca

SEQ ID NO: 17265 - RNA, 20 nt, synthetic construct
  source 1..20: mol_type = other RNA
actgccaggtagggaggggt

SEQ ID NO: 17266 - RNA, 20 nt, synthetic construct
  source 1..20: mol_type = other RNA
actgcctaagtaatgctggc

SEQ ID NO: 17267 - RNA, 20 nt, synthetic construct
  source 1..20: mol_type = other RNA
actgcctattttgtaattta

SEQ ID NO: 17268 - RNA, 20 nt, synthetic construct
  source 1..20: mol_type = other RNA
actgcctccacaggctttga

SEQ ID NO: 17269 - RNA, 20 nt, synthetic construct
  source 1..20: mol_type = other RNA
actgcctctacatcacagac

SEQ ID NO: 17270 - RNA, 20 nt, synthetic construct
  source 1..20: mol_type = other RNA
actgcctgaggtctcaaaat

SEQ ID NO: 17271 - RNA, 20 nt, synthetic construct
  source 1..20: mol_type = other RNA
actgcctggacccgggaggc

SEQ ID NO: 17272 - RNA, 20 nt, synthetic construct
  source 1..20: mol_type = other RNA
actgcctggtcctgagggct

SEQ ID NO: 17273 - RNA, 20 nt, synthetic construct
  source 1..20: mol_type = other RNA
actgcgccaagcagggacgg

SEQ ID NO: 17274 - RNA, 20 nt, synthetic construct
  source 1..20: mol_type = other RNA
actgcgggcccagctctttt

SEQ ID NO: 17275 - RNA, 20 nt, synthetic construct
  source 1..20: mol_type = other RNA
actgcgtggtttattcatat

SEQ ID NO: 17276 - RNA, 20 nt, synthetic construct
  source 1..20: mol_type = other RNA
actgctaatggtccttgctg

SEQ ID NO: 17277 - RNA, 20 nt, synthetic construct
  source 1..20: mol_type = other RNA
actgctataaacttccctct

SEQ ID NO: 17278 - RNA, 20 nt, synthetic construct
  source 1..20: mol_type = other RNA
actgctatacaaccggaaaa

SEQ ID NO: 17279 - RNA, 20 nt, synthetic construct
  source 1..20: mol_type = other RNA
actgctatgactaatttgag

SEQ ID NO: 17280 - RNA, 20 nt, synthetic construct
  source 1..20: mol_type = other RNA
actgctattgataaatctaa

SEQ ID NO: 17281 - RNA, 20 nt, synthetic construct
  source 1..20: mol_type = other RNA
actgctcagaagctttcaga

SEQ ID NO: 17282 - RNA, 20 nt, synthetic construct
  source 1..20: mol_type = other RNA
actgctcagtccctcacctt

SEQ ID NO: 17283 - RNA, 20 nt, synthetic construct
  source 1..20: mol_type = other RNA
actgctcataatagtctcac

SEQ ID NO: 17284 - RNA, 20 nt, synthetic construct
  source 1..20: mol_type = other RNA
actgctcctctgactttatg

SEQ ID NO: 17285 - RNA, 20 nt, synthetic construct
  source 1..20: mol_type = other RNA
actgctcctgcctttgttca

SEQ ID NO: 17286 - RNA, 20 nt, synthetic construct
  source 1..20: mol_type = other RNA
actgctctgtcctgtcagtg

SEQ ID NO: 17287 - RNA, 20 nt, synthetic construct
  source 1..20: mol_type = other RNA
actgctcttctattccagag

SEQ ID NO: 17288 - RNA, 20 nt, synthetic construct
  source 1..20: mol_type = other RNA
actgctgacagattaaatac

SEQ ID NO: 17289 - RNA, 20 nt, synthetic construct
  source 1..20: mol_type = other RNA
actgctgagtcttctactgt

SEQ ID NO: 17290 - RNA, 20 nt, synthetic construct
  source 1..20: mol_type = other RNA
actgctgatgtaagtgggag

SEQ ID NO: 17291 - RNA, 20 nt, synthetic construct
  source 1..20: mol_type = other RNA
actgctggtctggaatgtgt

SEQ ID NO: 17292 - RNA, 20 nt, synthetic construct
  source 1..20: mol_type = other RNA
actgctgtttaccaagggtg

SEQ ID NO: 17293 - RNA, 20 nt, synthetic construct
  source 1..20: mol_type = other RNA
actgcttccctagcccagca

SEQ ID NO: 17294 - RNA, 20 nt, synthetic construct
  source 1..20: mol_type = other RNA
actgcttgaggccacgagtt

SEQ ID NO: 17295 - RNA, 20 nt, synthetic construct
  source 1..20: mol_type = other RNA
actgcttgctgcactggcta

SEQ ID NO: 17296 - RNA, 20 nt, synthetic construct
  source 1..20: mol_type = other RNA
actggaaaactagagatggg

SEQ ID NO: 17297 - RNA, 20 nt, synthetic construct
  source 1..20: mol_type = other RNA
actggaaaagtgttgactac

SEQ ID NO: 17298 - RNA, 20 nt, synthetic construct
  source 1..20: mol_type = other RNA
actggaaaccttttgtagac

SEQ ID NO: 17299 - RNA, 20 nt, synthetic construct
  source 1..20: mol_type = other RNA
actggaaatcacaggtttag

SEQ ID NO: 17300 - RNA, 20 nt, synthetic construct
  source 1..20: mol_type = other RNA
actggaaatggacagcgggg

SEQ ID NO: 17301 - RNA, 20 nt, synthetic construct
  source 1..20: mol_type = other RNA
actggaactcatttctgctt

SEQ ID NO: 17302 - RNA, 20 nt, synthetic construct
  source 1..20: mol_type = other RNA
actggaaggaaataagaagg

SEQ ID NO: 17303 - RNA, 20 nt, synthetic construct
  source 1..20: mol_type = other RNA
actggaaggactcacagctt

SEQ ID NO: 17304 - RNA, 20 nt, synthetic construct
  source 1..20: mol_type = other RNA
actggaagtaattgggatct

SEQ ID NO: 17305 - RNA, 20 nt, synthetic construct
  source 1..20: mol_type = other RNA
actggaagtgtaacatacac

SEQ ID NO: 17306 - RNA, 20 nt, synthetic construct
  source 1..20: mol_type = other RNA
actggaatcaatccagacag

SEQ ID NO: 17307 - RNA, 20 nt, synthetic construct
  source 1..20: mol_type = other RNA
actggaattcatcaaagtta

SEQ ID NO: 17308 - RNA, 20 nt, synthetic construct
  source 1..20: mol_type = other RNA
actggactccttctgaaggc

SEQ ID NO: 17309 - RNA, 20 nt, synthetic construct
  source 1..20: mol_type = other RNA
actggagaacagtaaagtca

SEQ ID NO: 17310 - RNA, 20 nt, synthetic construct
  source 1..20: mol_type = other RNA
actggagaattctactaaac

SEQ ID NO: 17311 - RNA, 20 nt, synthetic construct
  source 1..20: mol_type = other RNA
actggagggatgctggagtg

SEQ ID NO: 17312 - RNA, 20 nt, synthetic construct
  source 1..20: mol_type = other RNA
actggaggtgcacattccaa

SEQ ID NO: 17313 - RNA, 20 nt, synthetic construct
  source 1..20: mol_type = other RNA
actggagttcactggcacaa

SEQ ID NO: 17314 - RNA, 20 nt, synthetic construct
  source 1..20: mol_type = other RNA
actggatacaaggtcaatct

SEQ ID NO: 17315 - RNA, 20 nt, synthetic construct
  source 1..20: mol_type = other RNA
actggatacggaaatataac

SEQ ID NO: 17316 - RNA, 20 nt, synthetic construct
  source 1..20: mol_type = other RNA
actggatagaagtgtatcag

SEQ ID NO: 17317 - RNA, 20 nt, synthetic construct
  source 1..20: mol_type = other RNA
actggatagcaacttgcaga

SEQ ID NO: 17318 - RNA, 20 nt, synthetic construct
  source 1..20: mol_type = other RNA
actggatcctggagggctcc

SEQ ID NO: 17319 - RNA, 20 nt, synthetic construct
  source 1..20: mol_type = other RNA
actggatgaatacaaaggtg

SEQ ID NO: 17320 - RNA, 20 nt, synthetic construct
  source 1..20: mol_type = other RNA
actggattaaggagatggca

SEQ ID NO: 17321 - RNA, 20 nt, synthetic construct
  source 1..20: mol_type = other RNA
actggatttgattgggcatt

SEQ ID NO: 17322 - RNA, 20 nt, synthetic construct
  source 1..20: mol_type = other RNA
actggcaaaaatcatcatat

SEQ ID NO: 17323 - RNA, 20 nt, synthetic construct
  source 1..20: mol_type = other RNA
actggcaatcaaatggcctt

SEQ ID NO: 17324 - RNA, 20 nt, synthetic construct
  source 1..20: mol_type = other RNA
actggcacagcactgttaac

SEQ ID NO: 17325 - RNA, 20 nt, synthetic construct
  source 1..20: mol_type = other RNA
actggccactgattgagtat

SEQ ID NO: 17326 - RNA, 20 nt, synthetic construct
  source 1..20: mol_type = other RNA
actggccagcattacttagg

SEQ ID NO: 17327 - RNA, 20 nt, synthetic construct
  source 1..20: mol_type = other RNA
actggccatccttcccaaat

SEQ ID NO: 17328 - RNA, 20 nt, synthetic construct
  source 1..20: mol_type = other RNA
actggccatgttttatttct

SEQ ID NO: 17329 - RNA, 20 nt, synthetic construct
  source 1..20: mol_type = other RNA
actggcccctccatggaaac

SEQ ID NO: 17330 - RNA, 20 nt, synthetic construct
  source 1..20: mol_type = other RNA
actggcctcggccaaccatt

SEQ ID NO: 17331 - RNA, 20 nt, synthetic construct
  source 1..20: mol_type = other RNA
actggcctgagctctcagtg

SEQ ID NO: 17332 - RNA, 20 nt, synthetic construct
  source 1..20: mol_type = other RNA
actggctagtaggcaacatc

SEQ ID NO: 17333 - RNA, 20 nt, synthetic construct
  source 1..20: mol_type = other RNA
actggctattagttaacctt

SEQ ID NO: 17334 - RNA, 20 nt, synthetic construct
  source 1..20: mol_type = other RNA
actggctgtgccaactctgg

SEQ ID NO: 17335 - RNA, 20 nt, synthetic construct
  source 1..20: mol_type = other RNA
actggcttaatgcatataaa

SEQ ID NO: 17336 - RNA, 20 nt, synthetic construct
  source 1..20: mol_type = other RNA
actggcttcagtgccaacac

SEQ ID NO: 17337 - RNA, 20 nt, synthetic construct
  source 1..20: mol_type = other RNA
actgggacttctagcctcca

SEQ ID NO: 17338 - RNA, 20 nt, synthetic construct
  source 1..20: mol_type = other RNA
actgggagaatggcaaggct

SEQ ID NO: 17339 - RNA, 20 nt, synthetic construct
  source 1..20: mol_type = other RNA
actgggagccctccaggatc

SEQ ID NO: 17340 - RNA, 20 nt, synthetic construct
  source 1..20: mol_type = other RNA
actgggatcctaagcatgag

SEQ ID NO: 17341 - RNA, 20 nt, synthetic construct
  source 1..20: mol_type = other RNA
actgggcaacagagacagag

SEQ ID NO: 17342 - RNA, 20 nt, synthetic construct
  source 1..20: mol_type = other RNA
actggggagtgtgcccaagg

SEQ ID NO: 17343 - RNA, 20 nt, synthetic construct
  source 1..20: mol_type = other RNA
actggggcttgaacccgagg

SEQ ID NO: 17344 - RNA, 20 nt, synthetic construct
  source 1..20: mol_type = other RNA
actgggggctggacataagg

SEQ ID NO: 17345 - RNA, 20 nt, synthetic construct
  source 1..20: mol_type = other RNA
actggggtcttagttctgct

SEQ ID NO: 17346 - RNA, 20 nt, synthetic construct
  source 1..20: mol_type = other RNA
actgggtaaacaagactcaa

SEQ ID NO: 17347 - RNA, 20 nt, synthetic construct
  source 1..20: mol_type = other RNA
actgggtccccggaggaggt

SEQ ID NO: 17348 - RNA, 20 nt, synthetic construct
  source 1..20: mol_type = other RNA
actgggtcttataggttgaa

SEQ ID NO: 17349 - RNA, 20 nt, synthetic construct
  source 1..20: mol_type = other RNA
actgggtgtagggggaaaac

SEQ ID NO: 17350 - RNA, 20 nt, synthetic construct
  source 1..20: mol_type = other RNA
actgggtgtgatggcgcatg

SEQ ID NO: 17351 - RNA, 20 nt, synthetic construct
  source 1..20: mol_type = other RNA
actgggtgtgcacgtttgct

SEQ ID NO: 17352 - RNA, 20 nt, synthetic construct
  source 1..20: mol_type = other RNA
actgggttctcaccaacatc

SEQ ID NO: 17353 - RNA, 20 nt, synthetic construct
  source 1..20: mol_type = other RNA
actggtaaggaaacagagtt

SEQ ID NO: 17354 - RNA, 20 nt, synthetic construct
  source 1..20: mol_type = other RNA
actggtaccaaagcagaaat

SEQ ID NO: 17355 - RNA, 20 nt, synthetic construct
  source 1..20: mol_type = other RNA
actggtcactggccactgat

SEQ ID NO: 17356 - RNA, 20 nt, synthetic construct
  source 1..20: mol_type = other RNA
actggtccagatgaagcagg

SEQ ID NO: 17357 - RNA, 20 nt, synthetic construct
  source 1..20: mol_type = other RNA
actggtctcctttctatact

SEQ ID NO: 17358 - RNA, 20 nt, synthetic construct
  source 1..20: mol_type = other RNA
actggtgaactgggtgtagg

SEQ ID NO: 17359 - RNA, 20 nt, synthetic construct
  source 1..20: mol_type = other RNA
actggtgcttttttggtgtt

SEQ ID NO: 17360 - RNA, 20 nt, synthetic construct
  source 1..20: mol_type = other RNA
actggtgtccttctgagaag

SEQ ID NO: 17361 - RNA, 20 nt, synthetic construct
  source 1..20: mol_type = other RNA
actggtgttaggcaatcctt

SEQ ID NO: 17362 - RNA, 20 nt, synthetic construct
  source 1..20: mol_type = other RNA
actggtttcagtacacgaaa

SEQ ID NO: 17363 - RNA, 20 nt, synthetic construct
  source 1..20: mol_type = other RNA
actggtttcagtccctcctt

SEQ ID NO: 17364 - RNA, 20 nt, synthetic construct
  source 1..20: mol_type = other RNA
actggtttctgcatacttag

SEQ ID NO: 17365 - RNA, 20 nt, synthetic construct
  source 1..20: mol_type = other RNA
actggttttcctgatggaca

SEQ ID NO: 17366 - RNA, 20 nt, synthetic construct
  source 1..20: mol_type = other RNA
actgtaaaaattttctccca

SEQ ID NO: 17367 - RNA, 20 nt, synthetic construct
  source 1..20: mol_type = other RNA
actgtaaacaatgctgctat

SEQ ID NO: 17368 - RNA, 20 nt, synthetic construct
  source 1..20: mol_type = other RNA
actgtaaagtaatcaagtga

SEQ ID NO: 17369 - RNA, 20 nt, synthetic construct
  source 1..20: mol_type = other RNA
actgtaaccctgtttccctt

SEQ ID NO: 17370 - RNA, 20 nt, synthetic construct
  source 1..20: mol_type = other RNA
actgtaacctccacctccca

SEQ ID NO: 17371 - RNA, 20 nt, synthetic construct
  source 1..20: mol_type = other RNA
actgtaagaataatgtcttt

SEQ ID NO: 17372 - RNA, 20 nt, synthetic construct
  source 1..20: mol_type = other RNA
actgtaagctgaactctgtg

SEQ ID NO: 17373 - RNA, 20 nt, synthetic construct
  source 1..20: mol_type = other RNA
actgtaagttcctggactgt

SEQ ID NO: 17374 - RNA, 20 nt, synthetic construct
  source 1..20: mol_type = other RNA
actgtaatattgtatatacc

SEQ ID NO: 17375 - RNA, 20 nt, synthetic construct
  source 1..20: mol_type = other RNA
actgtaatgagctgagattg

SEQ ID NO: 17376 - RNA, 20 nt, synthetic construct
  source 1..20: mol_type = other RNA
actgtacaaagatttacccc

SEQ ID NO: 17377 - RNA, 20 nt, synthetic construct
  source 1..20: mol_type = other RNA
actgtacattttatgaaatc

SEQ ID NO: 17378 - RNA, 20 nt, synthetic construct
  source 1..20: mol_type = other RNA
actgtactactgacctggga

SEQ ID NO: 17379 - RNA, 20 nt, synthetic construct
  source 1..20: mol_type = other RNA
actgtactcctagatactcg

SEQ ID NO: 17380 - RNA, 20 nt, synthetic construct
  source 1..20: mol_type = other RNA
actgtactgtttagcatcta

SEQ ID NO: 17381 - RNA, 20 nt, synthetic construct
  source 1..20: mol_type = other RNA
actgtagaatgtttttccgt

SEQ ID NO: 17382 - RNA, 20 nt, synthetic construct
  source 1..20: mol_type = other RNA
actgtagagaaaatgttata

SEQ ID NO: 17383 - RNA, 20 nt, synthetic construct
  source 1..20: mol_type = other RNA
actgtaggccccgatgccat

SEQ ID NO: 17384 - RNA, 20 nt, synthetic construct
  source 1..20: mol_type = other RNA
actgtagtccctgctacttg

SEQ ID NO: 17385 - RNA, 20 nt, synthetic construct
  source 1..20: mol_type = other RNA
actgtagttcagtttttctt

SEQ ID NO: 17386 - RNA, 20 nt, synthetic construct
  source 1..20: mol_type = other RNA
actgtataaatgttcagttt

SEQ ID NO: 17387 - RNA, 20 nt, synthetic construct
  source 1..20: mol_type = other RNA
actgtatggttcttaagatg

SEQ ID NO: 17388 - RNA, 20 nt, synthetic construct
  source 1..20: mol_type = other RNA
actgtattaccagcttacag

SEQ ID NO: 17389 - RNA, 20 nt, synthetic construct
  source 1..20: mol_type = other RNA
actgtattaggatgtgtacc

SEQ ID NO: 17390 - RNA, 20 nt, synthetic construct
  source 1..20: mol_type = other RNA
actgtattgcaaactaagtg

SEQ ID NO: 17391 - RNA, 20 nt, synthetic construct
  source 1..20: mol_type = other RNA
actgtcacaattcacagaat

SEQ ID NO: 17392 - RNA, 20 nt, synthetic construct
  source 1..20: mol_type = other RNA
actgtcacaggctttcctac

SEQ ID NO: 17393 - RNA, 20 nt, synthetic construct
  source 1..20: mol_type = other RNA
actgtcactgacacaggctg

SEQ ID NO: 17394 - RNA, 20 nt, synthetic construct
  source 1..20: mol_type = other RNA
actgtcagtgggactggaga

SEQ ID NO: 17395 - RNA, 20 nt, synthetic construct
  source 1..20: mol_type = other RNA
actgtcatcagcgtcctcac

SEQ ID NO: 17396 - RNA, 20 nt, synthetic construct
  source 1..20: mol_type = other RNA
actgtccaaacagtgaccac

SEQ ID NO: 17397 - RNA, 20 nt, synthetic construct
  source 1..20: mol_type = other RNA
actgtcctctcttgttgagg

SEQ ID NO: 17398 - RNA, 20 nt, synthetic construct
  source 1..20: mol_type = other RNA
actgtcctgaattctaacat

SEQ ID NO: 17399 - RNA, 20 nt, synthetic construct
  source 1..20: mol_type = other RNA
actgtcctgaattctaatga

SEQ ID NO: 17400 - RNA, 20 nt, synthetic construct
  source 1..20: mol_type = other RNA
actgtcgaagcttaatttag

SEQ ID NO: 17401 - RNA, 20 nt, synthetic construct
  source 1..20: mol_type = other RNA
actgtctcagtcccaaatgg

SEQ ID NO: 17402 - RNA, 20 nt, synthetic construct
  source 1..20: mol_type = other RNA
actgtctccatgtcctcacc

SEQ ID NO: 17403 - RNA, 20 nt, synthetic construct
  source 1..20: mol_type = other RNA
actgtctgtgaaaataatac

SEQ ID NO: 17404 - RNA, 20 nt, synthetic construct
  source 1..20: mol_type = other RNA
actgtgaattcactaatgcc

SEQ ID NO: 17405 - RNA, 20 nt, synthetic construct
  source 1..20: mol_type = other RNA
actgtgactccaaagcaaac

SEQ ID NO: 17406 - RNA, 20 nt, synthetic construct
  source 1..20: mol_type = other RNA
actgtgagccactaaaacag

SEQ ID NO: 17407 - RNA, 20 nt, synthetic construct
  source 1..20: mol_type = other RNA
actgtgagggagatatttcg

SEQ ID NO: 17408 - RNA, 20 nt, synthetic construct
  source 1..20: mol_type = other RNA
actgtgagggtaagaaagga

SEQ ID NO: 17409 - RNA, 20 nt, synthetic construct
  source 1..20: mol_type = other RNA
actgtgatacctagtacgta

SEQ ID NO: 17410 - RNA, 20 nt, synthetic construct
  source 1..20: mol_type = other RNA
actgtgatgactgtaagctg

SEQ ID NO: 17411 - RNA, 20 nt, synthetic construct
  source 1..20: mol_type = other RNA
actgtgatgattttagaagg

SEQ ID NO: 17412 - RNA, 20 nt, synthetic construct
  source 1..20: mol_type = other RNA
actgtgattacaattccttt

SEQ ID NO: 17413 - RNA, 20 nt, synthetic construct
  source 1..20: mol_type = other RNA
actgtgcagtggatgactag

SEQ ID NO: 17414 - RNA, 20 nt, synthetic construct
  source 1..20: mol_type = other RNA
actgtgccttgatccattac

SEQ ID NO: 17415 - RNA, 20 nt, synthetic construct
  source 1..20: mol_type = other RNA
actgtgcttccacagctatc

SEQ ID NO: 17416 - RNA, 20 nt, synthetic construct
  source 1..20: mol_type = other RNA
actgtggatatcttttaaaa

SEQ ID NO: 17417 - RNA, 20 nt, synthetic construct
  source 1..20: mol_type = other RNA
actgtggtcactgtttggac

SEQ ID NO: 17418 - RNA, 20 nt, synthetic construct
  source 1..20: mol_type = other RNA
actgtgtgcttggagtcact

SEQ ID NO: 17419 - RNA, 20 nt, synthetic construct
  source 1..20: mol_type = other RNA
actgtgtggcttctcaaact

SEQ ID NO: 17420 - RNA, 20 nt, synthetic construct
  source 1..20: mol_type = other RNA
actgtgtgtgtccaggccaa

SEQ ID NO: 17421 - RNA, 20 nt, synthetic construct
  source 1..20: mol_type = other RNA
actgtgttacattgccttcg

SEQ ID NO: 17422 - RNA, 20 nt, synthetic construct
  source 1..20: mol_type = other RNA
actgtgttcttttccttctt

SEQ ID NO: 17423 - RNA, 20 nt, synthetic construct
  source 1..20: mol_type = other RNA
actgttaactgacttacaga

SEQ ID NO: 17424 - RNA, 20 nt, synthetic construct
  source 1..20: mol_type = other RNA
actgttacttgactatttta

SEQ ID NO: 17425 - RNA, 20 nt, synthetic construct
  source 1..20: mol_type = other RNA
actgttagggacttatggag

SEQ ID NO: 17426 - RNA, 20 nt, synthetic construct
  source 1..20: mol_type = other RNA
actgttatctgggaacagcc

SEQ ID NO: 17427 - RNA, 20 nt, synthetic construct
  source 1..20: mol_type = other RNA
actgttatgacaagactacc

SEQ ID NO: 17428 - RNA, 20 nt, synthetic construct
  source 1..20: mol_type = other RNA
actgttccccaagccaaatt

SEQ ID NO: 17429 - RNA, 20 nt, synthetic construct
  source 1..20: mol_type = other RNA
actgttctccagtcccactg

SEQ ID NO: 17430 - RNA, 20 nt, synthetic construct
  source 1..20: mol_type = other RNA
actgttctgcgtggtttttt

SEQ ID NO: 17431 - RNA, 20 nt, synthetic construct
  source 1..20: mol_type = other RNA
actgttgatttagaaatacc

SEQ ID NO: 17432 - RNA, 20 nt, synthetic construct
  source 1..20: mol_type = other RNA
actgttgcctctgtgctagc

SEQ ID NO: 17433 - RNA, 20 nt, synthetic construct
  source 1..20: mol_type = other RNA
actgttggaaaaatcgtcct

SEQ ID NO: 17434 - RNA, 20 nt, synthetic construct
  source 1..20: mol_type = other RNA
actgttgtccaggccagagt

SEQ ID NO: 17435 - RNA, 20 nt, synthetic construct
  source 1..20: mol_type = other RNA
actgtttagcatctagcaca

SEQ ID NO: 17436 - RNA, 20 nt, synthetic construct
  source 1..20: mol_type = other RNA
actgtttcttagctatattc

SEQ ID NO: 17437 - RNA, 20 nt, synthetic construct
  source 1..20: mol_type = other RNA
actgtttgattactgtagct

SEQ ID NO: 17438 - RNA, 20 nt, synthetic construct
  source 1..20: mol_type = other RNA
actgtttggacagtaaaaaa

SEQ ID NO: 17439 - RNA, 20 nt, synthetic construct
  source 1..20: mol_type = other RNA
actgtttggctgggagctta

SEQ ID NO: 17440 - RNA, 20 nt, synthetic construct
  source 1..20: mol_type = other RNA
actgttttccacagtgactt

SEQ ID NO: 17441 - RNA, 20 nt, synthetic construct
  source 1..20: mol_type = other RNA
actgttttttcctcccttca

SEQ ID NO: 17442 - RNA, 20 nt, synthetic construct
  source 1..20: mol_type = other RNA
acttaaaaaatgcgcgtccg

SEQ ID NO: 17443 - RNA, 20 nt, synthetic construct
  source 1..20: mol_type = other RNA
acttaaaggtttggagtttg

SEQ ID NO: 17444 - RNA, 20 nt, synthetic construct
  source 1..20: mol_type = other RNA
acttaacatgagatctaaat

SEQ ID NO: 17445 - RNA, 20 nt, synthetic construct
  source 1..20: mol_type = other RNA
acttaactataggagttcat

SEQ ID NO: 17446 - RNA, 20 nt, synthetic construct
  source 1..20: mol_type = other RNA
acttaagaactgttatttgt

SEQ ID NO: 17447 - RNA, 20 nt, synthetic construct
  source 1..20: mol_type = other RNA
acttaagagcatgttgggcc

SEQ ID NO: 17448 - RNA, 20 nt, synthetic construct
  source 1..20: mol_type = other RNA
acttaagcaacagaaattta

SEQ ID NO: 17449 - RNA, 20 nt, synthetic construct
  source 1..20: mol_type = other RNA
acttaagtatctcagtcata

SEQ ID NO: 17450 - RNA, 20 nt, synthetic construct
  source 1..20: mol_type = other RNA
acttaagtatctcggtcatt

SEQ ID NO: 17451 - RNA, 20 nt, synthetic construct
  source 1..20: mol_type = other RNA
acttaatagcccaacagggt

SEQ ID NO: 17452 - RNA, 20 nt, synthetic construct
  source 1..20: mol_type = other RNA
acttaatttacccacaaaag

SEQ ID NO: 17453 - RNA, 20 nt, synthetic construct
  source 1..20: mol_type = other RNA
acttacagaccttattcaaa

SEQ ID NO: 17454 - RNA, 20 nt, synthetic construct
  source 1..20: mol_type = other RNA
acttacagatatcacccaga

SEQ ID NO: 17455 - RNA, 20 nt, synthetic construct
  source 1..20: mol_type = other RNA
acttacagtaagatcctgga

SEQ ID NO: 17456 - RNA, 20 nt, synthetic construct
  source 1..20: mol_type = other RNA
acttacatcagcagtgacca

SEQ ID NO: 17457 - RNA, 20 nt, synthetic construct
  source 1..20: mol_type = other RNA
acttactaaatgatctttca

SEQ ID NO: 17458 - RNA, 20 nt, synthetic construct
  source 1..20: mol_type = other RNA
acttactagttgtgctacct

SEQ ID NO: 17459 - RNA, 20 nt, synthetic construct
  source 1..20: mol_type = other RNA
acttactctcaaataatttg

SEQ ID NO: 17460 - RNA, 20 nt, synthetic construct
  source 1..20: mol_type = other RNA
acttacttgagccccagaat

SEQ ID NO: 17461 - RNA, 20 nt, synthetic construct
  source 1..20: mol_type = other RNA
acttagaatataaactcttc

SEQ ID NO: 17462 - RNA, 20 nt, synthetic construct
  source 1..20: mol_type = other RNA
acttagagggcttcatgctg

SEQ ID NO: 17463 - RNA, 20 nt, synthetic construct
  source 1..20: mol_type = other RNA
acttagcatgttgctttgcg

SEQ ID NO: 17464 - RNA, 20 nt, synthetic construct
  source 1..20: mol_type = other RNA
acttagcccctgctgccaga

SEQ ID NO: 17465 - RNA, 20 nt, synthetic construct
  source 1..20: mol_type = other RNA
acttagccttggtaaaatca

SEQ ID NO: 17466 - RNA, 20 nt, synthetic construct
  source 1..20: mol_type = other RNA
acttagcgctgatgtgttga

SEQ ID NO: 17467 - RNA, 20 nt, synthetic construct
  source 1..20: mol_type = other RNA
acttagctaatttcagagag

SEQ ID NO: 17468 - RNA, 20 nt, synthetic construct
  source 1..20: mol_type = other RNA
acttaggagaaaagcttcat

SEQ ID NO: 17469 - RNA, 20 nt, synthetic construct
  source 1..20: mol_type = other RNA
acttaggaggctattaactt

SEQ ID NO: 17470 - RNA, 20 nt, synthetic construct
  source 1..20: mol_type = other RNA
acttaggcaaaggaaaaatc

SEQ ID NO: 17471 - RNA, 20 nt, synthetic construct
  source 1..20: mol_type = other RNA
acttaggcagttattaagag

SEQ ID NO: 17472 - RNA, 20 nt, synthetic construct
  source 1..20: mol_type = other RNA
acttagtgagggaggccatc

SEQ ID NO: 17473 - RNA, 20 nt, synthetic construct
  source 1..20: mol_type = other RNA
acttagttcaagatgcatac

SEQ ID NO: 17474 - RNA, 20 nt, synthetic construct
  source 1..20: mol_type = other RNA
acttagtttgcaatacagtt

SEQ ID NO: 17475 - RNA, 20 nt, synthetic construct
  source 1..20: mol_type = other RNA
acttatataaatgctcagtg

SEQ ID NO: 17476 - RNA, 20 nt, synthetic construct
  source 1..20: mol_type = other RNA
acttatcttttctagtttct

SEQ ID NO: 17477 - RNA, 20 nt, synthetic construct
  source 1..20: mol_type = other RNA
acttatgcaagatggcaagt

SEQ ID NO: 17478 - RNA, 20 nt, synthetic construct
  source 1..20: mol_type = other RNA
acttatgcatcttgcaaaac

SEQ ID NO: 17479 - RNA, 20 nt, synthetic construct
  source 1..20: mol_type = other RNA
acttatggagataaattacc

SEQ ID NO: 17480 - RNA, 20 nt, synthetic construct
  source 1..20: mol_type = other RNA
acttattagcaaagaggcaa

SEQ ID NO: 17481 - RNA, 20 nt, synthetic construct
  source 1..20: mol_type = other RNA
acttattggaaaactctgtt

SEQ ID NO: 17482 - RNA, 20 nt, synthetic construct
  source 1..20: mol_type = other RNA
acttatttccagggggtatg

SEQ ID NO: 17483 - RNA, 20 nt, synthetic construct
  source 1..20: mol_type = other RNA
acttcaaagggtcactatta

SEQ ID NO: 17484 - RNA, 20 nt, synthetic construct
  source 1..20: mol_type = other RNA
acttcaacggacatttttcc

SEQ ID NO: 17485 - RNA, 20 nt, synthetic construct
  source 1..20: mol_type = other RNA
acttcaagaggttaaaacca

SEQ ID NO: 17486 - RNA, 20 nt, synthetic construct
  source 1..20: mol_type = other RNA
acttcaaggtaatctagttt

SEQ ID NO: 17487 - RNA, 20 nt, synthetic construct
  source 1..20: mol_type = other RNA
acttcaaggttcacaaatta

SEQ ID NO: 17488 - RNA, 20 nt, synthetic construct
  source 1..20: mol_type = other RNA
acttcaatgctacagtaagc

SEQ ID NO: 17489 - RNA, 20 nt, synthetic construct
  source 1..20: mol_type = other RNA
acttcacaccatttagatca

SEQ ID NO: 17490 - RNA, 20 nt, synthetic construct
  source 1..20: mol_type = other RNA
acttcacctctacacaaaaa

SEQ ID NO: 17491 - RNA, 20 nt, synthetic construct
  source 1..20: mol_type = other RNA
acttcacgatgcttaggtaa

SEQ ID NO: 17492 - RNA, 20 nt, synthetic construct
  source 1..20: mol_type = other RNA
acttcactagatctcttttc

SEQ ID NO: 17493 - RNA, 20 nt, synthetic construct
  source 1..20: mol_type = other RNA
acttcactagtgggtcgggt

SEQ ID NO: 17494 - RNA, 20 nt, synthetic construct
  source 1..20: mol_type = other RNA
acttcactggagaattctac

SEQ ID NO: 17495 - RNA, 20 nt, synthetic construct
  source 1..20: mol_type = other RNA
acttcacttccaagtcccgg

SEQ ID NO: 17496 - RNA, 20 nt, synthetic construct
  source 1..20: mol_type = other RNA
acttcagcgcttgaacaaat

SEQ ID NO: 17497 - RNA, 20 nt, synthetic construct
  source 1..20: mol_type = other RNA
acttcaggaacaccttgaac

SEQ ID NO: 17498 - RNA, 20 nt, synthetic construct
  source 1..20: mol_type = other RNA
acttcagtccttaccactga

SEQ ID NO: 17499 - RNA, 20 nt, synthetic construct
  source 1..20: mol_type = other RNA
acttcagtggtaaggactga

SEQ ID NO: 17500 - RNA, 20 nt, synthetic construct
  source 1..20: mol_type = other RNA
acttcagttttatcaattag

SEQ ID NO: 17501 - RNA, 20 nt, synthetic construct
  source 1..20: mol_type = other RNA
acttcagttttgagtggcat

SEQ ID NO: 17502 - RNA, 20 nt, synthetic construct
  source 1..20: mol_type = other RNA
acttcatagatgttatgccc

SEQ ID NO: 17503 - RNA, 20 nt, synthetic construct
  source 1..20: mol_type = other RNA
acttcatctttcctgatcac

SEQ ID NO: 17504 - RNA, 20 nt, synthetic construct
  source 1..20: mol_type = other RNA
acttcatgtacaatgaatta

SEQ ID NO: 17505 - RNA, 20 nt, synthetic construct
  source 1..20: mol_type = other RNA
acttcattcttgacatgatt

SEQ ID NO: 17506 - RNA, 20 nt, synthetic construct
  source 1..20: mol_type = other RNA
acttcatttccattgtaatt

SEQ ID NO: 17507 - RNA, 20 nt, synthetic construct
  source 1..20: mol_type = other RNA
acttccaaccatcttcttag

SEQ ID NO: 17508 - RNA, 20 nt, synthetic construct
  source 1..20: mol_type = other RNA
acttccaagtcccggaagct

SEQ ID NO: 17509 - RNA, 20 nt, synthetic construct
  source 1..20: mol_type = other RNA
acttccagaaacttccaacc

SEQ ID NO: 17510 - RNA, 20 nt, synthetic construct
  source 1..20: mol_type = other RNA
acttccagcaagactttatg

SEQ ID NO: 17511 - RNA, 20 nt, synthetic construct
  source 1..20: mol_type = other RNA
acttccagctcacgttaccc

SEQ ID NO: 17512 - RNA, 20 nt, synthetic construct
  source 1..20: mol_type = other RNA
acttccagtacatctcaatt

SEQ ID NO: 17513 - RNA, 20 nt, synthetic construct
  source 1..20: mol_type = other RNA
acttccagtgttttaggggg

SEQ ID NO: 17514 - RNA, 20 nt, synthetic construct
  source 1..20: mol_type = other RNA
acttccatgagattacatag

SEQ ID NO: 17515 - RNA, 20 nt, synthetic construct
  source 1..20: mol_type = other RNA
acttccattttgcttaataa

SEQ ID NO: 17516 - RNA, 20 nt, synthetic construct
  source 1..20: mol_type = other RNA
acttcccactgctatgacta

SEQ ID NO: 17517 - RNA, 20 nt, synthetic construct
  source 1..20: mol_type = other RNA
acttcccagacagggaatgc

SEQ ID NO: 17518 - RNA, 20 nt, synthetic construct
  source 1..20: mol_type = other RNA
acttccctctcagtggtgct

SEQ ID NO: 17519 - RNA, 20 nt, synthetic construct
  source 1..20: mol_type = other RNA
acttccctctttctcaactt

SEQ ID NO: 17520 - RNA, 20 nt, synthetic construct
  source 1..20: mol_type = other RNA
acttcccttagctctcatgt

SEQ ID NO: 17521 - RNA, 20 nt, synthetic construct
  source 1..20: mol_type = other RNA
acttcccttctcgaagtggt

SEQ ID NO: 17522 - RNA, 20 nt, synthetic construct
  source 1..20: mol_type = other RNA
acttcctattagaagaatga

SEQ ID NO: 17523 - RNA, 20 nt, synthetic construct
  source 1..20: mol_type = other RNA
acttcctattttataatggg

SEQ ID NO: 17524 - RNA, 20 nt, synthetic construct
  source 1..20: mol_type = other RNA
acttcctctcttaaatccga

SEQ ID NO: 17525 - RNA, 20 nt, synthetic construct
  source 1..20: mol_type = other RNA
acttcctggctctagcccag

SEQ ID NO: 17526 - RNA, 20 nt, synthetic construct
  source 1..20: mol_type = other RNA
acttcctgttttagtggctc

SEQ ID NO: 17527 - RNA, 20 nt, synthetic construct
  source 1..20: mol_type = other RNA
acttcgaaagttcagataga

SEQ ID NO: 17528 - RNA, 20 nt, synthetic construct
  source 1..20: mol_type = other RNA
acttcgaactaaggaaagct

SEQ ID NO: 17529 - RNA, 20 nt, synthetic construct
  source 1..20: mol_type = other RNA
acttcgagaagggaagtaaa

SEQ ID NO: 17530 - RNA, 20 nt, synthetic construct
  source 1..20: mol_type = other RNA
acttcgtcaaggggagaggc

SEQ ID NO: 17531 - RNA, 20 nt, synthetic construct
  source 1..20: mol_type = other RNA
acttcgtgtgtggagtgggg

SEQ ID NO: 17532 - RNA, 20 nt, synthetic construct
  source 1..20: mol_type = other RNA
acttcgttcagtttagtaaa

SEQ ID NO: 17533 - RNA, 20 nt, synthetic construct
  source 1..20: mol_type = other RNA
acttctaactttagaacata

SEQ ID NO: 17534 - RNA, 20 nt, synthetic construct
  source 1..20: mol_type = other RNA
acttctaatgcccattaaaa

SEQ ID NO: 17535 - RNA, 20 nt, synthetic construct
  source 1..20: mol_type = other RNA
acttctacagaatgttcaag

SEQ ID NO: 17536 - RNA, 20 nt, synthetic construct
  source 1..20: mol_type = other RNA
acttctaccttgaaaatgcc

SEQ ID NO: 17537 - RNA, 20 nt, synthetic construct
  source 1..20: mol_type = other RNA
acttctagcctccagaaaac

SEQ ID NO: 17538 - RNA, 20 nt, synthetic construct
  source 1..20: mol_type = other RNA
acttctatccagtgacacct

SEQ ID NO: 17539 - RNA, 20 nt, synthetic construct
  source 1..20: mol_type = other RNA
acttctcaaacaggatacaa

SEQ ID NO: 17540 - RNA, 20 nt, synthetic construct
  source 1..20: mol_type = other RNA
acttctcagctatagcttct

SEQ ID NO: 17541 - RNA, 20 nt, synthetic construct
  source 1..20: mol_type = other RNA
acttctcagggcctgctttt

SEQ ID NO: 17542 - RNA, 20 nt, synthetic construct
  source 1..20: mol_type = other RNA
acttctctcagagggaaact

SEQ ID NO: 17543 - RNA, 20 nt, synthetic construct
  source 1..20: mol_type = other RNA
acttctctgctgctgaaaaa

SEQ ID NO: 17544 - RNA, 20 nt, synthetic construct
  source 1..20: mol_type = other RNA
acttctctggagcaagcatg

SEQ ID NO: 17545 - RNA, 20 nt, synthetic construct
  source 1..20: mol_type = other RNA
acttctgagtgttacttgaa

SEQ ID NO: 17546 - RNA, 20 nt, synthetic construct
  source 1..20: mol_type = other RNA
acttctgatatcctgtaaac

SEQ ID NO: 17547 - RNA, 20 nt, synthetic construct
  source 1..20: mol_type = other RNA
acttctggaaagttcaaatg

SEQ ID NO: 17548 - RNA, 20 nt, synthetic construct
  source 1..20: mol_type = other RNA
acttctggatgtgtatgatc

SEQ ID NO: 17549 - RNA, 20 nt, synthetic construct
  source 1..20: mol_type = other RNA
acttctgtgatcagaagagc

SEQ ID NO: 17550 - RNA, 20 nt, synthetic construct
  source 1..20: mol_type = other RNA
acttcttagtaaatatccga

SEQ ID NO: 17551 - RNA, 20 nt, synthetic construct
  source 1..20: mol_type = other RNA
acttcttattggttatctgt

SEQ ID NO: 17552 - RNA, 20 nt, synthetic construct
  source 1..20: mol_type = other RNA
acttcttcaaaagacatcac

SEQ ID NO: 17553 - RNA, 20 nt, synthetic construct
  source 1..20: mol_type = other RNA
acttcttctgttggagagat

SEQ ID NO: 17554 - RNA, 20 nt, synthetic construct
  source 1..20: mol_type = other RNA
acttctttctctttcagcca

SEQ ID NO: 17555 - RNA, 20 nt, synthetic construct
  source 1..20: mol_type = other RNA
acttgaaacctgccatggtg

SEQ ID NO: 17556 - RNA, 20 nt, synthetic construct
  source 1..20: mol_type = other RNA
acttgaaatcatttcactct

SEQ ID NO: 17557 - RNA, 20 nt, synthetic construct
  source 1..20: mol_type = other RNA
acttgaacattctgtagaag

SEQ ID NO: 17558 - RNA, 20 nt, synthetic construct
  source 1..20: mol_type = other RNA
acttgaaccttcctcttcct

SEQ ID NO: 17559 - RNA, 20 nt, synthetic construct
  source 1..20: mol_type = other RNA
acttgaaggcaatgtaggga

SEQ ID NO: 17560 - RNA, 20 nt, synthetic construct
  source 1..20: mol_type = other RNA
acttgaatactcgtgtgtct

SEQ ID NO: 17561 - RNA, 20 nt, synthetic construct
  source 1..20: mol_type = other RNA
acttgaattagtgattttac

SEQ ID NO: 17562 - RNA, 20 nt, synthetic construct
  source 1..20: mol_type = other RNA
acttgaattcagatggcccc

SEQ ID NO: 17563 - RNA, 20 nt, synthetic construct
  source 1..20: mol_type = other RNA
acttgacaagtatattacaa

SEQ ID NO: 17564 - RNA, 20 nt, synthetic construct
  source 1..20: mol_type = other RNA
acttgacacaaaggactgga

SEQ ID NO: 17565 - RNA, 20 nt, synthetic construct
  source 1..20: mol_type = other RNA
acttgactattttaccctca

SEQ ID NO: 17566 - RNA, 20 nt, synthetic construct
  source 1..20: mol_type = other RNA
acttgagagcagagacacac

SEQ ID NO: 17567 - RNA, 20 nt, synthetic construct
  source 1..20: mol_type = other RNA
acttgagcagatcagtaaca

SEQ ID NO: 17568 - RNA, 20 nt, synthetic construct
  source 1..20: mol_type = other RNA
acttgagccccagaataggc

SEQ ID NO: 17569 - RNA, 20 nt, synthetic construct
  source 1..20: mol_type = other RNA
acttgagcctggaagttcaa

SEQ ID NO: 17570 - RNA, 20 nt, synthetic construct
  source 1..20: mol_type = other RNA
acttgaggtgattaaaggcc

SEQ ID NO: 17571 - RNA, 20 nt, synthetic construct
  source 1..20: mol_type = other RNA
acttgaggtttacttgggga

SEQ ID NO: 17572 - RNA, 20 nt, synthetic construct
  source 1..20: mol_type = other RNA
acttgagtttgttctgtcac

SEQ ID NO: 17573 - RNA, 20 nt, synthetic construct
  source 1..20: mol_type = other RNA
acttgatcagggatttggcc

SEQ ID NO: 17574 - RNA, 20 nt, synthetic construct
  source 1..20: mol_type = other RNA
acttgatccaggtgtatgat

SEQ ID NO: 17575 - RNA, 20 nt, synthetic construct
  source 1..20: mol_type = other RNA
acttgatctaaaatggaaga

SEQ ID NO: 17576 - RNA, 20 nt, synthetic construct
  source 1..20: mol_type = other RNA
acttgatctacatttagatt

SEQ ID NO: 17577 - RNA, 20 nt, synthetic construct
  source 1..20: mol_type = other RNA
acttgatggtttggggcttt

SEQ ID NO: 17578 - RNA, 20 nt, synthetic construct
  source 1..20: mol_type = other RNA
acttgattacaagggtgaca

SEQ ID NO: 17579 - RNA, 20 nt, synthetic construct
  source 1..20: mol_type = other RNA
acttgattactttacagtta

SEQ ID NO: 17580 - RNA, 20 nt, synthetic construct
  source 1..20: mol_type = other RNA
acttgcagaagagtgaagct

SEQ ID NO: 17581 - RNA, 20 nt, synthetic construct
  source 1..20: mol_type = other RNA
acttgccatcttgcataagt

SEQ ID NO: 17582 - RNA, 20 nt, synthetic construct
  source 1..20: mol_type = other RNA
acttgctctcttgcccaagc

SEQ ID NO: 17583 - RNA, 20 nt, synthetic construct
  source 1..20: mol_type = other RNA
acttgcttaggctgaagcag

SEQ ID NO: 17584 - RNA, 20 nt, synthetic construct
  source 1..20: mol_type = other RNA
acttgcttgggaacagcagg

SEQ ID NO: 17585 - RNA, 20 nt, synthetic construct
  source 1..20: mol_type = other RNA
acttgcttggtttcacacgc

SEQ ID NO: 17586 - RNA, 20 nt, synthetic construct
  source 1..20: mol_type = other RNA
acttgctttattacttcagt

SEQ ID NO: 17587 - RNA, 20 nt, synthetic construct
  source 1..20: mol_type = other RNA
acttgctttgaatttggaaa

SEQ ID NO: 17588 - RNA, 20 nt, synthetic construct
  source 1..20: mol_type = other RNA
acttggaagtgaagtcaaga

SEQ ID NO: 17589 - RNA, 20 nt, synthetic construct
  source 1..20: mol_type = other RNA
acttggacaggggacatgaa

SEQ ID NO: 17590 - RNA, 20 nt, synthetic construct
  source 1..20: mol_type = other RNA
acttggagaacttaaaggtt

SEQ ID NO: 17591 - RNA, 20 nt, synthetic construct
  source 1..20: mol_type = other RNA
acttggagttttccccctac

SEQ ID NO: 17592 - RNA, 20 nt, synthetic construct
  source 1..20: mol_type = other RNA
acttggatcttatctgctgt

SEQ ID NO: 17593 - RNA, 20 nt, synthetic construct
  source 1..20: mol_type = other RNA
acttggattgtgtgtcgaga

SEQ ID NO: 17594 - RNA, 20 nt, synthetic construct
  source 1..20: mol_type = other RNA
acttggcacaggagagcgac

SEQ ID NO: 17595 - RNA, 20 nt, synthetic construct
  source 1..20: mol_type = other RNA
acttggctcctcccggctaa

SEQ ID NO: 17596 - RNA, 20 nt, synthetic construct
  source 1..20: mol_type = other RNA
acttgggatgtttctacctt

SEQ ID NO: 17597 - RNA, 20 nt, synthetic construct
  source 1..20: mol_type = other RNA
acttggggagagtgggccca

SEQ ID NO: 17598 - RNA, 20 nt, synthetic construct
  source 1..20: mol_type = other RNA
acttggggaggccaaggcag

SEQ ID NO: 17599 - RNA, 20 nt, synthetic construct
  source 1..20: mol_type = other RNA
acttgggtataaatgatgag

SEQ ID NO: 17600 - RNA, 20 nt, synthetic construct
  source 1..20: mol_type = other RNA
acttgggtggaagctgtcct

SEQ ID NO: 17601 - RNA, 20 nt, synthetic construct
  source 1..20: mol_type = other RNA
acttggtaaaaagtgcttct

SEQ ID NO: 17602 - RNA, 20 nt, synthetic construct
  source 1..20: mol_type = other RNA
acttggtaagctgtgagtcc

SEQ ID NO: 17603 - RNA, 20 nt, synthetic construct
  source 1..20: mol_type = other RNA
acttggtcgaaaacctgaaa

SEQ ID NO: 17604 - RNA, 20 nt, synthetic construct
  source 1..20: mol_type = other RNA
acttggtctgggtgatatct

SEQ ID NO: 17605 - RNA, 20 nt, synthetic construct
  source 1..20: mol_type = other RNA
acttggtttattttctgcat

SEQ ID NO: 17606 - RNA, 20 nt, synthetic construct
  source 1..20: mol_type = other RNA
acttgtagaggaggagggtt

SEQ ID NO: 17607 - RNA, 20 nt, synthetic construct
  source 1..20: mol_type = other RNA
acttgtatgaaattagttcc

SEQ ID NO: 17608 - RNA, 20 nt, synthetic construct
  source 1..20: mol_type = other RNA
acttgtcaagttctgatttc

SEQ ID NO: 17609 - RNA, 20 nt, synthetic construct
  source 1..20: mol_type = other RNA
acttgtcacaaaatgtggat

SEQ ID NO: 17610 - RNA, 20 nt, synthetic construct
  source 1..20: mol_type = other RNA
acttgtcaggtgggcactgg

SEQ ID NO: 17611 - RNA, 20 nt, synthetic construct
  source 1..20: mol_type = other RNA
acttgtcatttctgcttagt

SEQ ID NO: 17612 - RNA, 20 nt, synthetic construct
  source 1..20: mol_type = other RNA
acttgtcccatggtcaaatc

SEQ ID NO: 17613 - RNA, 20 nt, synthetic construct
  source 1..20: mol_type = other RNA
acttgtctcggatttaagag

SEQ ID NO: 17614 - RNA, 20 nt, synthetic construct
  source 1..20: mol_type = other RNA
acttgtctttgtctattccc

SEQ ID NO: 17615 - RNA, 20 nt, synthetic construct
  source 1..20: mol_type = other RNA
acttgtctttttgtgacttg

SEQ ID NO: 17616 - RNA, 20 nt, synthetic construct
  source 1..20: mol_type = other RNA
acttgtgtaactaccactga

SEQ ID NO: 17617 - RNA, 20 nt, synthetic construct
  source 1..20: mol_type = other RNA
acttgtgtagcgggaaaaaa

SEQ ID NO: 17618 - RNA, 20 nt, synthetic construct
  source 1..20: mol_type = other RNA
acttgttcatgtttacagaa

SEQ ID NO: 17619 - RNA, 20 nt, synthetic construct
  source 1..20: mol_type = other RNA
acttgtttcttttcactcta

SEQ ID NO: 17620 - RNA, 20 nt, synthetic construct
  source 1..20: mol_type = other RNA
actttaaagctctatggcat

SEQ ID NO: 17621 - RNA, 20 nt, synthetic construct
  source 1..20: mol_type = other RNA
actttaaatcagggccttta

SEQ ID NO: 17622 - RNA, 20 nt, synthetic construct
  source 1..20: mol_type = other RNA
actttaaattttgagacctc

SEQ ID NO: 17623 - RNA, 20 nt, synthetic construct
  source 1..20: mol_type = other RNA
actttaagagtatctttttc

SEQ ID NO: 17624 - RNA, 20 nt, synthetic construct
  source 1..20: mol_type = other RNA
actttaatcaccaggcgcgg

SEQ ID NO: 17625 - RNA, 20 nt, synthetic construct
  source 1..20: mol_type = other RNA
actttacagttatgtcagtc

SEQ ID NO: 17626 - RNA, 20 nt, synthetic construct
  source 1..20: mol_type = other RNA
actttaccctgctggaacga

SEQ ID NO: 17627 - RNA, 20 nt, synthetic construct
  source 1..20: mol_type = other RNA
actttactgttctccagtcc

SEQ ID NO: 17628 - RNA, 20 nt, synthetic construct
  source 1..20: mol_type = other RNA
actttagaacatataatcca

SEQ ID NO: 17629 - RNA, 20 nt, synthetic construct
  source 1..20: mol_type = other RNA
actttagacatgggctaaat

SEQ ID NO: 17630 - RNA, 20 nt, synthetic construct
  source 1..20: mol_type = other RNA
actttagagtcagttgttta

SEQ ID NO: 17631 - RNA, 20 nt, synthetic construct
  source 1..20: mol_type = other RNA
actttaggctgttcaattta

SEQ ID NO: 17632 - RNA, 20 nt, synthetic construct
  source 1..20: mol_type = other RNA
actttaggtcagaatacaaa

SEQ ID NO: 17633 - RNA, 20 nt, synthetic construct
  source 1..20: mol_type = other RNA
actttaggttacgtactagg

SEQ ID NO: 17634 - RNA, 20 nt, synthetic construct
  source 1..20: mol_type = other RNA
actttatacctgttgaatag

SEQ ID NO: 17635 - RNA, 20 nt, synthetic construct
  source 1..20: mol_type = other RNA
actttatggtaattggttcg

SEQ ID NO: 17636 - RNA, 20 nt, synthetic construct
  source 1..20: mol_type = other RNA
actttatggtatcacttttt

SEQ ID NO: 17637 - RNA, 20 nt, synthetic construct
  source 1..20: mol_type = other RNA
actttcaacctaacatgtct

SEQ ID NO: 17638 - RNA, 20 nt, synthetic construct
  source 1..20: mol_type = other RNA
actttcacactgattttctg

SEQ ID NO: 17639 - RNA, 20 nt, synthetic construct
  source 1..20: mol_type = other RNA
actttcacataaggtatatt

SEQ ID NO: 17640 - RNA, 20 nt, synthetic construct
  source 1..20: mol_type = other RNA
actttcactgctcagtccct

SEQ ID NO: 17641 - RNA, 20 nt, synthetic construct
  source 1..20: mol_type = other RNA
actttcagctcaaacagctt

SEQ ID NO: 17642 - RNA, 20 nt, synthetic construct
  source 1..20: mol_type = other RNA
actttcatgatttggtgtgt

SEQ ID NO: 17643 - RNA, 20 nt, synthetic construct
  source 1..20: mol_type = other RNA
actttcatttgtaattcatc

SEQ ID NO: 17644 - RNA, 20 nt, synthetic construct
  source 1..20: mol_type = other RNA
actttccagaagtaactctt

SEQ ID NO: 17645 - RNA, 20 nt, synthetic construct
  source 1..20: mol_type = other RNA
actttccatcttaggccata

SEQ ID NO: 17646 - RNA, 20 nt, synthetic construct
  source 1..20: mol_type = other RNA
actttcccatctctagtttt

SEQ ID NO: 17647 - RNA, 20 nt, synthetic construct
  source 1..20: mol_type = other RNA
actttcctattcacactgct

SEQ ID NO: 17648 - RNA, 20 nt, synthetic construct
  source 1..20: mol_type = other RNA
actttcctgataaggggcta

SEQ ID NO: 17649 - RNA, 20 nt, synthetic construct
  source 1..20: mol_type = other RNA
actttccttggagaagagtt

SEQ ID NO: 17650 - RNA, 20 nt, synthetic construct
  source 1..20: mol_type = other RNA
actttcgaagtgggaagcaa

SEQ ID NO: 17651 - RNA, 20 nt, synthetic construct
  source 1..20: mol_type = other RNA
actttcgtcatctataaggt

SEQ ID NO: 17652 - RNA, 20 nt, synthetic construct
  source 1..20: mol_type = other RNA
actttctaatcctttgcaca

SEQ ID NO: 17653 - RNA, 20 nt, synthetic construct
  source 1..20: mol_type = other RNA
actttctattcccctggatc

SEQ ID NO: 17654 - RNA, 20 nt, synthetic construct
  source 1..20: mol_type = other RNA
actttctgcttaaagcctct

SEQ ID NO: 17655 - RNA, 20 nt, synthetic construct
  source 1..20: mol_type = other RNA
actttcttcaaccatacttt

SEQ ID NO: 17656 - RNA, 20 nt, synthetic construct
  source 1..20: mol_type = other RNA
actttgaaatcagaacttga

SEQ ID NO: 17657 - RNA, 20 nt, synthetic construct
  source 1..20: mol_type = other RNA
actttgaatttaagacacaa

SEQ ID NO: 17658 - RNA, 20 nt, synthetic construct
  source 1..20: mol_type = other RNA
actttgaggttattaagata

SEQ ID NO: 17659 - RNA, 20 nt, synthetic construct
  source 1..20: mol_type = other RNA
actttgagtagcaccctatt

SEQ ID NO: 17660 - RNA, 20 nt, synthetic construct
  source 1..20: mol_type = other RNA
actttgatcatacacatcca

SEQ ID NO: 17661 - RNA, 20 nt, synthetic construct
  source 1..20: mol_type = other RNA
actttgatgaattccagttt

SEQ ID NO: 17662 - RNA, 20 nt, synthetic construct
  source 1..20: mol_type = other RNA
actttgcgaaacacactcgt

SEQ ID NO: 17663 - RNA, 20 nt, synthetic construct
  source 1..20: mol_type = other RNA
actttggaaggtaggagggt

SEQ ID NO: 17664 - RNA, 20 nt, synthetic construct
  source 1..20: mol_type = other RNA
actttgggattagcttattc

SEQ ID NO: 17665 - RNA, 20 nt, synthetic construct
  source 1..20: mol_type = other RNA
actttgtcaggcatgctaac

SEQ ID NO: 17666 - RNA, 20 nt, synthetic construct
  source 1..20: mol_type = other RNA
actttgtggcctcttccctt

SEQ ID NO: 17667 - RNA, 20 nt, synthetic construct
  source 1..20: mol_type = other RNA
actttgttgctcaggctgga

SEQ ID NO: 17668 - RNA, 20 nt, synthetic construct
  source 1..20: mol_type = other RNA
actttgttttgtttttctct

SEQ ID NO: 17669 - RNA, 20 nt, synthetic construct
  source 1..20: mol_type = other RNA
acttttaaagaaaggtctct

SEQ ID NO: 17670 - RNA, 20 nt, synthetic construct
  source 1..20: mol_type = other RNA
acttttaacccacagataat

SEQ ID NO: 17671 - RNA, 20 nt, synthetic construct
  source 1..20: mol_type = other RNA
acttttaaggcttggaaaac

SEQ ID NO: 17672 - RNA, 20 nt, synthetic construct
  source 1..20: mol_type = other RNA
acttttagtaggtctccttg

SEQ ID NO: 17673 - RNA, 20 nt, synthetic construct
  source 1..20: mol_type = other RNA
acttttagtttacactatgg

SEQ ID NO: 17674 - RNA, 20 nt, synthetic construct
  source 1..20: mol_type = other RNA
acttttatcaattcacaaga

SEQ ID NO: 17675 - RNA, 20 nt, synthetic construct
  source 1..20: mol_type = other RNA
acttttcaaacacttaacat

SEQ ID NO: 17676 - RNA, 20 nt, synthetic construct
  source 1..20: mol_type = other RNA
acttttcaactgaacaacgc

SEQ ID NO: 17677 - RNA, 20 nt, synthetic construct
  source 1..20: mol_type = other RNA
acttttcaggtattgagcct

SEQ ID NO: 17678 - RNA, 20 nt, synthetic construct
  source 1..20: mol_type = other RNA
acttttccagtcttctcata

SEQ ID NO: 17679 - RNA, 20 nt, synthetic construct
  source 1..20: mol_type = other RNA
acttttccttaaaaaaggtt

SEQ ID NO: 17680 - RNA, 20 nt, synthetic construct
  source 1..20: mol_type = other RNA
acttttctggttttctggag

SEQ ID NO: 17681 - RNA, 20 nt, synthetic construct
  source 1..20: mol_type = other RNA
acttttgagttcagaaagat

SEQ ID NO: 17682 - RNA, 20 nt, synthetic construct
  source 1..20: mol_type = other RNA
acttttggaatttaaggggt

SEQ ID NO: 17683 - RNA, 20 nt, synthetic construct
  source 1..20: mol_type = other RNA
acttttggtacacatctttt

SEQ ID NO: 17684 - RNA, 20 nt, synthetic construct
  source 1..20: mol_type = other RNA
acttttgtactacttgtcag

SEQ ID NO: 17685 - RNA, 20 nt, synthetic construct
  source 1..20: mol_type = other RNA
acttttgtgcaacataaata

SEQ ID NO: 17686 - RNA, 20 nt, synthetic construct
  source 1..20: mol_type = other RNA
actttttaccaagttgaatt

SEQ ID NO: 17687 - RNA, 20 nt, synthetic construct
  source 1..20: mol_type = other RNA
actttttattctgttctagc

SEQ ID NO: 17688 - RNA, 20 nt, synthetic construct
  source 1..20: mol_type = other RNA
actttttcatccaaacagaa

SEQ ID NO: 17689 - RNA, 20 nt, synthetic construct
  source 1..20: mol_type = other RNA
actttttgggcctttctgtt

SEQ ID NO: 17690 - RNA, 20 nt, synthetic construct
  source 1..20: mol_type = other RNA
actttttgtcacacggaaaa

SEQ ID NO: 17691 - RNA, 20 nt, synthetic construct
  source 1..20: mol_type = other RNA
actttttgtgagttttaact

SEQ ID NO: 17692 - RNA, 20 nt, synthetic construct
  source 1..20: mol_type = other RNA
acttttttgcccactcttat

SEQ ID NO: 17693 - RNA, 20 nt, synthetic construct
  source 1..20: mol_type = other RNA
acttttttgtagagacagaa

SEQ ID NO: 17694 - RNA, 20 nt, synthetic construct
  source 1..20: mol_type = other RNA
agaaaaaataaaggctttcg

SEQ ID NO: 17695 - RNA, 20 nt, synthetic construct
  source 1..20: mol_type = other RNA
agaaaaaattagccttttac

SEQ ID NO: 17696 - RNA, 20 nt, synthetic construct
  source 1..20: mol_type = other RNA
agaaaaacaaaacaaagtct

SEQ ID NO: 17697 - RNA, 20 nt, synthetic construct
  source 1..20: mol_type = other RNA
agaaaaacaccaaaaaagca

SEQ ID NO: 17698 - RNA, 20 nt, synthetic construct
  source 1..20: mol_type = other RNA
agaaaaacagaagacacaaa

SEQ ID NO: 17699 - RNA, 20 nt, synthetic construct
  source 1..20: mol_type = other RNA
agaaaaacctaaacctgtga

SEQ ID NO: 17700 - RNA, 20 nt, synthetic construct
  source 1..20: mol_type = other RNA
agaaaaactgaactacagtg

SEQ ID NO: 17701 - RNA, 20 nt, synthetic construct
  source 1..20: mol_type = other RNA
agaaaaagaaaagacaagac

SEQ ID NO: 17702 - RNA, 20 nt, synthetic construct
  source 1..20: mol_type = other RNA
agaaaaagaataagctaatc

SEQ ID NO: 17703 - RNA, 20 nt, synthetic construct
  source 1..20: mol_type = other RNA
agaaaaagcaacttgaaggc

SEQ ID NO: 17704 - RNA, 20 nt, synthetic construct
  source 1..20: mol_type = other RNA
agaaaaagcagagaaactgg

SEQ ID NO: 17705 - RNA, 20 nt, synthetic construct
  source 1..20: mol_type = other RNA
agaaaaagctcacctctgga

SEQ ID NO: 17706 - RNA, 20 nt, synthetic construct
  source 1..20: mol_type = other RNA
agaaaaaggttaagggaaga

SEQ ID NO: 17707 - RNA, 20 nt, synthetic construct
  source 1..20: mol_type = other RNA
agaaaaagttgggcttggtt

SEQ ID NO: 17708 - RNA, 20 nt, synthetic construct
  source 1..20: mol_type = other RNA
agaaaaatggggatatccaa

SEQ ID NO: 17709 - RNA, 20 nt, synthetic construct
  source 1..20: mol_type = other RNA
agaaaaattacaggtcaaac

SEQ ID NO: 17710 - RNA, 20 nt, synthetic construct
  source 1..20: mol_type = other RNA
agaaaaattccctcagcaaa

SEQ ID NO: 17711 - RNA, 20 nt, synthetic construct
  source 1..20: mol_type = other RNA
agaaaacaaaaagaaactag

SEQ ID NO: 17712 - RNA, 20 nt, synthetic construct
  source 1..20: mol_type = other RNA
agaaaacaaattcatgcaac

SEQ ID NO: 17713 - RNA, 20 nt, synthetic construct
  source 1..20: mol_type = other RNA
agaaaacactccagaatgac

SEQ ID NO: 17714 - RNA, 20 nt, synthetic construct
  source 1..20: mol_type = other RNA
agaaaacagataacctagat

SEQ ID NO: 17715 - RNA, 20 nt, synthetic construct
  source 1..20: mol_type = other RNA
agaaaacatatccttctaca

SEQ ID NO: 17716 - RNA, 20 nt, synthetic construct
  source 1..20: mol_type = other RNA
agaaaaccagaaaagtgaaa

SEQ ID NO: 17717 - RNA, 20 nt, synthetic construct
  source 1..20: mol_type = other RNA
agaaaacccttcatcatttg

SEQ ID NO: 17718 - RNA, 20 nt, synthetic construct
  source 1..20: mol_type = other RNA
agaaaaccgacagcagataa

SEQ ID NO: 17719 - RNA, 20 nt, synthetic construct
  source 1..20: mol_type = other RNA
agaaaactggcaatcaaatg

SEQ ID NO: 17720 - RNA, 20 nt, synthetic construct
  source 1..20: mol_type = other RNA
agaaaacttgagcagatcag

SEQ ID NO: 17721 - RNA, 20 nt, synthetic construct
  source 1..20: mol_type = other RNA
agaaaagaaaagtttcagtg

SEQ ID NO: 17722 - RNA, 20 nt, synthetic construct
  source 1..20: mol_type = other RNA
agaaaagaagttacggttcc

SEQ ID NO: 17723 - RNA, 20 nt, synthetic construct
  source 1..20: mol_type = other RNA
agaaaagacaagactaaaaa

SEQ ID NO: 17724 - RNA, 20 nt, synthetic construct
  source 1..20: mol_type = other RNA
agaaaagacaatagctagtg

SEQ ID NO: 17725 - RNA, 20 nt, synthetic construct
  source 1..20: mol_type = other RNA
agaaaagataagtagaaggt

SEQ ID NO: 17726 - RNA, 20 nt, synthetic construct
  source 1..20: mol_type = other RNA
agaaaagatcagtaaaattc

SEQ ID NO: 17727 - RNA, 20 nt, synthetic construct
  source 1..20: mol_type = other RNA
agaaaagcacaggcatcggc

SEQ ID NO: 17728 - RNA, 20 nt, synthetic construct
  source 1..20: mol_type = other RNA
agaaaagcttcataacatta

SEQ ID NO: 17729 - RNA, 20 nt, synthetic construct
  source 1..20: mol_type = other RNA
agaaaaggctgagacctcat

SEQ ID NO: 17730 - RNA, 20 nt, synthetic construct
  source 1..20: mol_type = other RNA
agaaaagtttcagtggttaa

SEQ ID NO: 17731 - RNA, 20 nt, synthetic construct
  source 1..20: mol_type = other RNA
agaaaataaaattctgaccc

SEQ ID NO: 17732 - RNA, 20 nt, synthetic construct
  source 1..20: mol_type = other RNA
agaaaataaaccaagtttgg

SEQ ID NO: 17733 - RNA, 20 nt, synthetic construct
  source 1..20: mol_type = other RNA
agaaaataatgttttccgtg

SEQ ID NO: 17734 - RNA, 20 nt, synthetic construct
  source 1..20: mol_type = other RNA
agaaaatacagttttgacca

SEQ ID NO: 17735 - RNA, 20 nt, synthetic construct
  source 1..20: mol_type = other RNA
agaaaatagggacggccttc

SEQ ID NO: 17736 - RNA, 20 nt, synthetic construct
  source 1..20: mol_type = other RNA
agaaaatagtatgaaggttc

SEQ ID NO: 17737 - RNA, 20 nt, synthetic construct
  source 1..20: mol_type = other RNA
agaaaatatctacaaatcac

SEQ ID NO: 17738 - RNA, 20 nt, synthetic construct
  source 1..20: mol_type = other RNA
agaaaatcagtgtgaaagta

SEQ ID NO: 17739 - RNA, 20 nt, synthetic construct
  source 1..20: mol_type = other RNA
agaaaatcatacattttcca

SEQ ID NO: 17740 - RNA, 20 nt, synthetic construct
  source 1..20: mol_type = other RNA
agaaaatcattgttcaggga

SEQ ID NO: 17741 - RNA, 20 nt, synthetic construct
  source 1..20: mol_type = other RNA
agaaaatccaaaagcctcaa

SEQ ID NO: 17742 - RNA, 20 nt, synthetic construct
  source 1..20: mol_type = other RNA
agaaaatccaagaagacatg

SEQ ID NO: 17743 - RNA, 20 nt, synthetic construct
  source 1..20: mol_type = other RNA
agaaaatccttacttccagc

SEQ ID NO: 17744 - RNA, 20 nt, synthetic construct
  source 1..20: mol_type = other RNA
agaaaatctgacaatttgcc

SEQ ID NO: 17745 - RNA, 20 nt, synthetic construct
  source 1..20: mol_type = other RNA
agaaaatgcttatgtcttgt

SEQ ID NO: 17746 - RNA, 20 nt, synthetic construct
  source 1..20: mol_type = other RNA
agaaaatggccaagagttgc

SEQ ID NO: 17747 - RNA, 20 nt, synthetic construct
  source 1..20: mol_type = other RNA
agaaaatgtgacattagtgg

SEQ ID NO: 17748 - RNA, 20 nt, synthetic construct
  source 1..20: mol_type = other RNA
agaaaatgttatacagcaaa

SEQ ID NO: 17749 - RNA, 20 nt, synthetic construct
  source 1..20: mol_type = other RNA
agaaaattagctgactttca

SEQ ID NO: 17750 - RNA, 20 nt, synthetic construct
  source 1..20: mol_type = other RNA
agaaaattgttcatgaaatc

SEQ ID NO: 17751 - RNA, 20 nt, synthetic construct
  source 1..20: mol_type = other RNA
agaaaattttctgagcaact

SEQ ID NO: 17752 - RNA, 20 nt, synthetic construct
  source 1..20: mol_type = other RNA
agaaaattttcttttgtggg

SEQ ID NO: 17753 - RNA, 20 nt, synthetic construct
  source 1..20: mol_type = other RNA
agaaacaacaacaacaaaat

SEQ ID NO: 17754 - RNA, 20 nt, synthetic construct
  source 1..20: mol_type = other RNA
agaaacacaggactgtgtgt

SEQ ID NO: 17755 - RNA, 20 nt, synthetic construct
  source 1..20: mol_type = other RNA
agaaacaccaacacaaagcc

SEQ ID NO: 17756 - RNA, 20 nt, synthetic construct
  source 1..20: mol_type = other RNA
agaaacagaaaaatccatct

SEQ ID NO: 17757 - RNA, 20 nt, synthetic construct
  source 1..20: mol_type = other RNA
agaaacaggattacaatgta

SEQ ID NO: 17758 - RNA, 20 nt, synthetic construct
  source 1..20: mol_type = other RNA
agaaacagtaattagttaca

SEQ ID NO: 17759 - RNA, 20 nt, synthetic construct
  source 1..20: mol_type = other RNA
agaaacatacatgttcagtt

SEQ ID NO: 17760 - RNA, 20 nt, synthetic construct
  source 1..20: mol_type = other RNA
agaaacatcccaagtgccca

SEQ ID NO: 17761 - RNA, 20 nt, synthetic construct
  source 1..20: mol_type = other RNA
agaaacatggcttagaaatg

SEQ ID NO: 17762 - RNA, 20 nt, synthetic construct
  source 1..20: mol_type = other RNA
agaaaccaagagcatagact

SEQ ID NO: 17763 - RNA, 20 nt, synthetic construct
  source 1..20: mol_type = other RNA
agaaaccacagagcctaaaa

SEQ ID NO: 17764 - RNA, 20 nt, synthetic construct
  source 1..20: mol_type = other RNA
agaaaccagttgtaattttt

SEQ ID NO: 17765 - RNA, 20 nt, synthetic construct
  source 1..20: mol_type = other RNA
agaaaccatcgttcacactc

SEQ ID NO: 17766 - RNA, 20 nt, synthetic construct
  source 1..20: mol_type = other RNA
agaaaccatttaccccttaa

SEQ ID NO: 17767 - RNA, 20 nt, synthetic construct
  source 1..20: mol_type = other RNA
agaaaccctgtacccattag

SEQ ID NO: 17768 - RNA, 20 nt, synthetic construct
  source 1..20: mol_type = other RNA
agaaacctaagaaaggtcta

SEQ ID NO: 17769 - RNA, 20 nt, synthetic construct
  source 1..20: mol_type = other RNA
agaaaccttggtgtgcttct

SEQ ID NO: 17770 - RNA, 20 nt, synthetic construct
  source 1..20: mol_type = other RNA
agaaacctttctcaaagccc

SEQ ID NO: 17771 - RNA, 20 nt, synthetic construct
  source 1..20: mol_type = other RNA
agaaactacctagaaaaaca

SEQ ID NO: 17772 - RNA, 20 nt, synthetic construct
  source 1..20: mol_type = other RNA
agaaactagaaaagataagt

SEQ ID NO: 17773 - RNA, 20 nt, synthetic construct
  source 1..20: mol_type = other RNA
agaaactatccaacatgcca

SEQ ID NO: 17774 - RNA, 20 nt, synthetic construct
  source 1..20: mol_type = other RNA
agaaactgacaggactccac

SEQ ID NO: 17775 - RNA, 20 nt, synthetic construct
  source 1..20: mol_type = other RNA
agaaactggaatcaatccag

SEQ ID NO: 17776 - RNA, 20 nt, synthetic construct
  source 1..20: mol_type = other RNA
agaaactggtgaactgggtg

SEQ ID NO: 17777 - RNA, 20 nt, synthetic construct
  source 1..20: mol_type = other RNA
agaaacttccaaccatcttc

SEQ ID NO: 17778 - RNA, 20 nt, synthetic construct
  source 1..20: mol_type = other RNA
agaaacttcttctgttggag

SEQ ID NO: 17779 - RNA, 20 nt, synthetic construct
  source 1..20: mol_type = other RNA
agaaacttggattgtgtgtc

SEQ ID NO: 17780 - RNA, 20 nt, synthetic construct
  source 1..20: mol_type = other RNA
agaaagaaaaactgaactac

SEQ ID NO: 17781 - RNA, 20 nt, synthetic construct
  source 1..20: mol_type = other RNA
agaaagaaaatccaaaagcc

SEQ ID NO: 17782 - RNA, 20 nt, synthetic construct
  source 1..20: mol_type = other RNA
agaaagaaggccatttgatt

SEQ ID NO: 17783 - RNA, 20 nt, synthetic construct
  source 1..20: mol_type = other RNA
agaaagaagtaatttcttct

SEQ ID NO: 17784 - RNA, 20 nt, synthetic construct
  source 1..20: mol_type = other RNA
agaaagaccaagagtgtggc

SEQ ID NO: 17785 - RNA, 20 nt, synthetic construct
  source 1..20: mol_type = other RNA
agaaagagaatagcagaaac

SEQ ID NO: 17786 - RNA, 20 nt, synthetic construct
  source 1..20: mol_type = other RNA
agaaagagagagacaagcac

SEQ ID NO: 17787 - RNA, 20 nt, synthetic construct
  source 1..20: mol_type = other RNA
agaaagagagaggggggaag

SEQ ID NO: 17788 - RNA, 20 nt, synthetic construct
  source 1..20: mol_type = other RNA
agaaagagggaagtactgag

SEQ ID NO: 17789 - RNA, 20 nt, synthetic construct
  source 1..20: mol_type = other RNA
agaaagagttgggtttttga

SEQ ID NO: 17790 - RNA, 20 nt, synthetic construct
  source 1..20: mol_type = other RNA
agaaagataaatcagaaact

SEQ ID NO: 17791 - RNA, 20 nt, synthetic construct
  source 1..20: mol_type = other RNA
agaaagataaatccaacgac

SEQ ID NO: 17792 - RNA, 20 nt, synthetic construct
  source 1..20: mol_type = other RNA
agaaagatctcaaacagcct

SEQ ID NO: 17793 - RNA, 20 nt, synthetic construct
  source 1..20: mol_type = other RNA
agaaagattaatccttgtgg

SEQ ID NO: 17794 - RNA, 20 nt, synthetic construct
  source 1..20: mol_type = other RNA
agaaagcacataaaaaagga

SEQ ID NO: 17795 - RNA, 20 nt, synthetic construct
  source 1..20: mol_type = other RNA
agaaagcaccagggcctctg

SEQ ID NO: 17796 - RNA, 20 nt, synthetic construct
  source 1..20: mol_type = other RNA
agaaagcaggtcatgacttt

SEQ ID NO: 17797 - RNA, 20 nt, synthetic construct
  source 1..20: mol_type = other RNA
agaaagcaggttcattttaa

SEQ ID NO: 17798 - RNA, 20 nt, synthetic construct
  source 1..20: mol_type = other RNA
agaaagcatcagagctttgt

SEQ ID NO: 17799 - RNA, 20 nt, synthetic construct
  source 1..20: mol_type = other RNA
agaaagcccagccgcggact

SEQ ID NO: 17800 - RNA, 20 nt, synthetic construct
  source 1..20: mol_type = other RNA
agaaagcctcttcagaagag

SEQ ID NO: 17801 - RNA, 20 nt, synthetic construct
  source 1..20: mol_type = other RNA
agaaagctaatttggaatta

SEQ ID NO: 17802 - RNA, 20 nt, synthetic construct
  source 1..20: mol_type = other RNA
agaaagctctcaattaatgc

SEQ ID NO: 17803 - RNA, 20 nt, synthetic construct
  source 1..20: mol_type = other RNA
agaaagctggactcattcca

SEQ ID NO: 17804 - RNA, 20 nt, synthetic construct
  source 1..20: mol_type = other RNA
agaaagctgtggatgttggt

SEQ ID NO: 17805 - RNA, 20 nt, synthetic construct
  source 1..20: mol_type = other RNA
agaaaggaattgtaatcaca

SEQ ID NO: 17806 - RNA, 20 nt, synthetic construct
  source 1..20: mol_type = other RNA
agaaaggacttcagtcctta

SEQ ID NO: 17807 - RNA, 20 nt, synthetic construct
  source 1..20: mol_type = other RNA
agaaaggagaccagttagga

SEQ ID NO: 17808 - RNA, 20 nt, synthetic construct
  source 1..20: mol_type = other RNA
agaaaggagggactgaaacc

SEQ ID NO: 17809 - RNA, 20 nt, synthetic construct
  source 1..20: mol_type = other RNA
agaaaggagttcagctttaa

SEQ ID NO: 17810 - RNA, 20 nt, synthetic construct
  source 1..20: mol_type = other RNA
agaaaggcccaaaaagtttt

SEQ ID NO: 17811 - RNA, 20 nt, synthetic construct
  source 1..20: mol_type = other RNA
agaaaggcgaagcggcaggg

SEQ ID NO: 17812 - RNA, 20 nt, synthetic construct
  source 1..20: mol_type = other RNA
agaaaggggaaggaattttc

SEQ ID NO: 17813 - RNA, 20 nt, synthetic construct
  source 1..20: mol_type = other RNA
agaaagggtagctttgatgc

SEQ ID NO: 17814 - RNA, 20 nt, synthetic construct
  source 1..20: mol_type = other RNA
agaaagggtgtgtgaatgga

SEQ ID NO: 17815 - RNA, 20 nt, synthetic construct
  source 1..20: mol_type = other RNA
agaaaggtctagtgtgcatg

SEQ ID NO: 17816 - RNA, 20 nt, synthetic construct
  source 1..20: mol_type = other RNA
agaaaggtctctctctgtca

SEQ ID NO: 17817 - RNA, 20 nt, synthetic construct
  source 1..20: mol_type = other RNA
agaaaggtttcttcactctt

SEQ ID NO: 17818 - RNA, 20 nt, synthetic construct
  source 1..20: mol_type = other RNA
agaaagtagattagctttta

SEQ ID NO: 17819 - RNA, 20 nt, synthetic construct
  source 1..20: mol_type = other RNA
agaaagtaggaattaaacat

SEQ ID NO: 17820 - RNA, 20 nt, synthetic construct
  source 1..20: mol_type = other RNA
agaaagttagtgtctaatgg

SEQ ID NO: 17821 - RNA, 20 nt, synthetic construct
  source 1..20: mol_type = other RNA
agaaagttttgcagttgggg

SEQ ID NO: 17822 - RNA, 20 nt, synthetic construct
  source 1..20: mol_type = other RNA
agaaataaaacatggccagt

SEQ ID NO: 17823 - RNA, 20 nt, synthetic construct
  source 1..20: mol_type = other RNA
agaaataaaacatgttgtgt

SEQ ID NO: 17824 - RNA, 20 nt, synthetic construct
  source 1..20: mol_type = other RNA
agaaataaaagttacaagga

SEQ ID NO: 17825 - RNA, 20 nt, synthetic construct
  source 1..20: mol_type = other RNA
agaaataaacgacaccagaa

SEQ ID NO: 17826 - RNA, 20 nt, synthetic construct
  source 1..20: mol_type = other RNA
agaaataaatcctcacatgt

SEQ ID NO: 17827 - RNA, 20 nt, synthetic construct
  source 1..20: mol_type = other RNA
agaaataactttaatcacca

SEQ ID NO: 17828 - RNA, 20 nt, synthetic construct
  source 1..20: mol_type = other RNA
agaaatacagaccgatggaa

SEQ ID NO: 17829 - RNA, 20 nt, synthetic construct
  source 1..20: mol_type = other RNA
agaaatacctgcaggttgat

SEQ ID NO: 17830 - RNA, 20 nt, synthetic construct
  source 1..20: mol_type = other RNA
agaaatacttggacagggga

SEQ ID NO: 17831 - RNA, 20 nt, synthetic construct
  source 1..20: mol_type = other RNA
agaaatagaaaacttgagca

SEQ ID NO: 17832 - RNA, 20 nt, synthetic construct
  source 1..20: mol_type = other RNA
agaaatagaactgtcacaat

SEQ ID NO: 17833 - RNA, 20 nt, synthetic construct
  source 1..20: mol_type = other RNA
agaaatagactcccaactta

SEQ ID NO: 17834 - RNA, 20 nt, synthetic construct
  source 1..20: mol_type = other RNA
agaaatagttaacgtttatc

SEQ ID NO: 17835 - RNA, 20 nt, synthetic construct
  source 1..20: mol_type = other RNA
agaaatataccttatgtgaa

SEQ ID NO: 17836 - RNA, 20 nt, synthetic construct
  source 1..20: mol_type = other RNA
agaaatcaaatgggaaatta

SEQ ID NO: 17837 - RNA, 20 nt, synthetic construct
  source 1..20: mol_type = other RNA
agaaatcatacacgagtgtg

SEQ ID NO: 17838 - RNA, 20 nt, synthetic construct
  source 1..20: mol_type = other RNA
agaaatcggaactcctgtat

SEQ ID NO: 17839 - RNA, 20 nt, synthetic construct
  source 1..20: mol_type = other RNA
agaaatcgttgtgaaatata

SEQ ID NO: 17840 - RNA, 20 nt, synthetic construct
  source 1..20: mol_type = other RNA
agaaatctaccaaacattga

SEQ ID NO: 17841 - RNA, 20 nt, synthetic construct
  source 1..20: mol_type = other RNA
agaaatctgcatccaaaagg

SEQ ID NO: 17842 - RNA, 20 nt, synthetic construct
  source 1..20: mol_type = other RNA
agaaatcttccagaaggaga

SEQ ID NO: 17843 - RNA, 20 nt, synthetic construct
  source 1..20: mol_type = other RNA
agaaatgaaatggcccttaa

SEQ ID NO: 17844 - RNA, 20 nt, synthetic construct
  source 1..20: mol_type = other RNA
agaaatgaagatggcctccc

SEQ ID NO: 17845 - RNA, 20 nt, synthetic construct
  source 1..20: mol_type = other RNA
agaaatgacaagtaaatgca

SEQ ID NO: 17846 - RNA, 20 nt, synthetic construct
  source 1..20: mol_type = other RNA
agaaatgagttccagtcctt

SEQ ID NO: 17847 - RNA, 20 nt, synthetic construct
  source 1..20: mol_type = other RNA
agaaatgcaaatcaaaacaa

SEQ ID NO: 17848 - RNA, 20 nt, synthetic construct
  source 1..20: mol_type = other RNA
agaaatgggtaaatttctaa

SEQ ID NO: 17849 - RNA, 20 nt, synthetic construct
  source 1..20: mol_type = other RNA
agaaatgtctggtttgcttt

SEQ ID NO: 17850 - RNA, 20 nt, synthetic construct
  source 1..20: mol_type = other RNA
agaaatgtggaagcagaact

SEQ ID NO: 17851 - RNA, 20 nt, synthetic construct
  source 1..20: mol_type = other RNA
agaaatgtggagataaagag

SEQ ID NO: 17852 - RNA, 20 nt, synthetic construct
  source 1..20: mol_type = other RNA
agaaatgttaacaattggtg

SEQ ID NO: 17853 - RNA, 20 nt, synthetic construct
  source 1..20: mol_type = other RNA
agaaatgttaagattcaaca

SEQ ID NO: 17854 - RNA, 20 nt, synthetic construct
  source 1..20: mol_type = other RNA
agaaatgtttaattcctact

SEQ ID NO: 17855 - RNA, 20 nt, synthetic construct
  source 1..20: mol_type = other RNA
agaaattacttctttctctt

SEQ ID NO: 17856 - RNA, 20 nt, synthetic construct
  source 1..20: mol_type = other RNA
agaaattagaacatctggca

SEQ ID NO: 17857 - RNA, 20 nt, synthetic construct
  source 1..20: mol_type = other RNA
agaaattataagcttcctct

SEQ ID NO: 17858 - RNA, 20 nt, synthetic construct
  source 1..20: mol_type = other RNA
agaaattatctgtgggttaa

SEQ ID NO: 17859 - RNA, 20 nt, synthetic construct
  source 1..20: mol_type = other RNA
agaaattcaacttggtaaaa

SEQ ID NO: 17860 - RNA, 20 nt, synthetic construct
  source 1..20: mol_type = other RNA
agaaattggaacctttgtcc

SEQ ID NO: 17861 - RNA, 20 nt, synthetic construct
  source 1..20: mol_type = other RNA
agaaattggacgggtggtag

SEQ ID NO: 17862 - RNA, 20 nt, synthetic construct
  source 1..20: mol_type = other RNA
agaaatttaaggaccaggta

SEQ ID NO: 17863 - RNA, 20 nt, synthetic construct
  source 1..20: mol_type = other RNA
agaacaaaacaagaagaaaa

SEQ ID NO: 17864 - RNA, 20 nt, synthetic construct
  source 1..20: mol_type = other RNA
agaacaaactcaagttccgg

SEQ ID NO: 17865 - RNA, 20 nt, synthetic construct
  source 1..20: mol_type = other RNA
agaacaaactgcgtggttta

SEQ ID NO: 17866 - RNA, 20 nt, synthetic construct
  source 1..20: mol_type = other RNA
agaacaaataacaccatagc

SEQ ID NO: 17867 - RNA, 20 nt, synthetic construct
  source 1..20: mol_type = other RNA
agaacaaatttatgttcatg

SEQ ID NO: 17868 - RNA, 20 nt, synthetic construct
  source 1..20: mol_type = other RNA
agaacaacatggtagaccat

SEQ ID NO: 17869 - RNA, 20 nt, synthetic construct
  source 1..20: mol_type = other RNA
agaacaaccttatctattta

SEQ ID NO: 17870 - RNA, 20 nt, synthetic construct
  source 1..20: mol_type = other RNA
agaacaatggaatagaaggg

SEQ ID NO: 17871 - RNA, 20 nt, synthetic construct
  source 1..20: mol_type = other RNA
agaacaattttgaatgtgtt

SEQ ID NO: 17872 - RNA, 20 nt, synthetic construct
  source 1..20: mol_type = other RNA
agaacacacaatttgaggta

SEQ ID NO: 17873 - RNA, 20 nt, synthetic construct
  source 1..20: mol_type = other RNA
agaacacactgctcttctat

SEQ ID NO: 17874 - RNA, 20 nt, synthetic construct
  source 1..20: mol_type = other RNA
agaacacagtgttgagaaag

SEQ ID NO: 17875 - RNA, 20 nt, synthetic construct
  source 1..20: mol_type = other RNA
agaacactaaaggggatttc

SEQ ID NO: 17876 - RNA, 20 nt, synthetic construct
  source 1..20: mol_type = other RNA
agaacactataagccaatat

SEQ ID NO: 17877 - RNA, 20 nt, synthetic construct
  source 1..20: mol_type = other RNA
agaacacttaacatgagatc

SEQ ID NO: 17878 - RNA, 20 nt, synthetic construct
  source 1..20: mol_type = other RNA
agaacagaataaaaagtgac

SEQ ID NO: 17879 - RNA, 20 nt, synthetic construct
  source 1..20: mol_type = other RNA
agaacagcattatcttaata

SEQ ID NO: 17880 - RNA, 20 nt, synthetic construct
  source 1..20: mol_type = other RNA
agaacaggaagggagagatg

SEQ ID NO: 17881 - RNA, 20 nt, synthetic construct
  source 1..20: mol_type = other RNA
agaacaggacttttggtaca

SEQ ID NO: 17882 - RNA, 20 nt, synthetic construct
  source 1..20: mol_type = other RNA
agaacaggagttaccataaa

SEQ ID NO: 17883 - RNA, 20 nt, synthetic construct
  source 1..20: mol_type = other RNA
agaacagtaaagtcactgtg

SEQ ID NO: 17884 - RNA, 20 nt, synthetic construct
  source 1..20: mol_type = other RNA
agaacagtgtttacacacct

SEQ ID NO: 17885 - RNA, 20 nt, synthetic construct
  source 1..20: mol_type = other RNA
agaacatataatccaactgc

SEQ ID NO: 17886 - RNA, 20 nt, synthetic construct
  source 1..20: mol_type = other RNA
agaacatctggcagcagggg

SEQ ID NO: 17887 - RNA, 20 nt, synthetic construct
  source 1..20: mol_type = other RNA
agaacatgattgggtcaaca

SEQ ID NO: 17888 - RNA, 20 nt, synthetic construct
  source 1..20: mol_type = other RNA
agaacattggtttgaaatga

SEQ ID NO: 17889 - RNA, 20 nt, synthetic construct
  source 1..20: mol_type = other RNA
agaaccacctgggggagact

SEQ ID NO: 17890 - RNA, 20 nt, synthetic construct
  source 1..20: mol_type = other RNA
agaaccactgagcacaatgc

SEQ ID NO: 17891 - RNA, 20 nt, synthetic construct
  source 1..20: mol_type = other RNA
agaaccatacagtgccttca

SEQ ID NO: 17892 - RNA, 20 nt, synthetic construct
  source 1..20: mol_type = other RNA
agaaccatgtaacaggttta

SEQ ID NO: 17893 - RNA, 20 nt, synthetic construct
  source 1..20: mol_type = other RNA
agaacccaggaacagattca

SEQ ID NO: 17894 - RNA, 20 nt, synthetic construct
  source 1..20: mol_type = other RNA
agaacccagtgtctgctaca

SEQ ID NO: 17895 - RNA, 20 nt, synthetic construct
  source 1..20: mol_type = other RNA
agaaccctttgttatctgaa

SEQ ID NO: 17896 - RNA, 20 nt, synthetic construct
  source 1..20: mol_type = other RNA
agaaccgactgaaaggaaat

SEQ ID NO: 17897 - RNA, 20 nt, synthetic construct
  source 1..20: mol_type = other RNA
agaaccggaacttgagtttg

SEQ ID NO: 17898 - RNA, 20 nt, synthetic construct
  source 1..20: mol_type = other RNA
agaacctctggaaaggactt

SEQ ID NO: 17899 - RNA, 20 nt, synthetic construct
  source 1..20: mol_type = other RNA
agaacctgttcatttgagaa

SEQ ID NO: 17900 - RNA, 20 nt, synthetic construct
  source 1..20: mol_type = other RNA
agaaccttagaaatttaagg

SEQ ID NO: 17901 - RNA, 20 nt, synthetic construct
  source 1..20: mol_type = other RNA
agaaccttcatactattttc

SEQ ID NO: 17902 - RNA, 20 nt, synthetic construct
  source 1..20: mol_type = other RNA
agaactaagaccccagtaga

SEQ ID NO: 17903 - RNA, 20 nt, synthetic construct
  source 1..20: mol_type = other RNA
agaactacacattccagacc

SEQ ID NO: 17904 - RNA, 20 nt, synthetic construct
  source 1..20: mol_type = other RNA
agaactagaactgtgttaca

SEQ ID NO: 17905 - RNA, 20 nt, synthetic construct
  source 1..20: mol_type = other RNA
agaactagaatactccacca

SEQ ID NO: 17906 - RNA, 20 nt, synthetic construct
  source 1..20: mol_type = other RNA
agaactccaacaattcaaca

SEQ ID NO: 17907 - RNA, 20 nt, synthetic construct
  source 1..20: mol_type = other RNA
agaactccacctcagaaaca

SEQ ID NO: 17908 - RNA, 20 nt, synthetic construct
  source 1..20: mol_type = other RNA
agaactcctggtctcccagc

SEQ ID NO: 17909 - RNA, 20 nt, synthetic construct
  source 1..20: mol_type = other RNA
agaactcgaagccttcccct

SEQ ID NO: 17910 - RNA, 20 nt, synthetic construct
  source 1..20: mol_type = other RNA
agaactcttctccaaggaaa

SEQ ID NO: 17911 - RNA, 20 nt, synthetic construct
  source 1..20: mol_type = other RNA
agaactgaaagcagggactc

SEQ ID NO: 17912 - RNA, 20 nt, synthetic construct
  source 1..20: mol_type = other RNA
agaactgactgaaggattcc

SEQ ID NO: 17913 - RNA, 20 nt, synthetic construct
  source 1..20: mol_type = other RNA
agaactgcctggacccggga

SEQ ID NO: 17914 - RNA, 20 nt, synthetic construct
  source 1..20: mol_type = other RNA
agaactgctaatggtccttg

SEQ ID NO: 17915 - RNA, 20 nt, synthetic construct
  source 1..20: mol_type = other RNA
agaactggggcttgaacccg

SEQ ID NO: 17916 - RNA, 20 nt, synthetic construct
  source 1..20: mol_type = other RNA
agaactgtcacaattcacag

SEQ ID NO: 17917 - RNA, 20 nt, synthetic construct
  source 1..20: mol_type = other RNA
agaactgtcactgacacagg

SEQ ID NO: 17918 - RNA, 20 nt, synthetic construct
  source 1..20: mol_type = other RNA
agaactgtgttacattgcct

SEQ ID NO: 17919 - RNA, 20 nt, synthetic construct
  source 1..20: mol_type = other RNA
agaacttaaaggtttggagt

SEQ ID NO: 17920 - RNA, 20 nt, synthetic construct
  source 1..20: mol_type = other RNA
agaacttatgcatcttgcaa

SEQ ID NO: 17921 - RNA, 20 nt, synthetic construct
  source 1..20: mol_type = other RNA
agaacttcttcaaaagacat

SEQ ID NO: 17922 - RNA, 20 nt, synthetic construct
  source 1..20: mol_type = other RNA
agaacttgacaagtatatta

SEQ ID NO: 17923 - RNA, 20 nt, synthetic construct
  source 1..20: mol_type = other RNA
agaacttgcacataatataa

SEQ ID NO: 17924 - RNA, 20 nt, synthetic construct
  source 1..20: mol_type = other RNA
agaacttgtctcggatttaa

SEQ ID NO: 17925 - RNA, 20 nt, synthetic construct
  source 1..20: mol_type = other RNA
agaacttgtctttgtctatt

SEQ ID NO: 17926 - RNA, 20 nt, synthetic construct
  source 1..20: mol_type = other RNA
agaagaaaaagcaacttgaa

SEQ ID NO: 17927 - RNA, 20 nt, synthetic construct
  source 1..20: mol_type = other RNA
agaagaaataaacgacacca

SEQ ID NO: 17928 - RNA, 20 nt, synthetic construct
  source 1..20: mol_type = other RNA
agaagaaatcaaatgggaaa

SEQ ID NO: 17929 - RNA, 20 nt, synthetic construct
  source 1..20: mol_type = other RNA
agaagaaatgggtaaatttc

SEQ ID NO: 17930 - RNA, 20 nt, synthetic construct
  source 1..20: mol_type = other RNA
agaagaaatgttaacaattg

SEQ ID NO: 17931 - RNA, 20 nt, synthetic construct
  source 1..20: mol_type = other RNA
agaagaaattacttctttct

SEQ ID NO: 17932 - RNA, 20 nt, synthetic construct
  source 1..20: mol_type = other RNA
agaagaagaattctataggt

SEQ ID NO: 17933 - RNA, 20 nt, synthetic construct
  source 1..20: mol_type = other RNA
agaagaagacttaggagaaa

SEQ ID NO: 17934 - RNA, 20 nt, synthetic construct
  source 1..20: mol_type = other RNA
agaagaagtttctagttatt

SEQ ID NO: 17935 - RNA, 20 nt, synthetic construct
  source 1..20: mol_type = other RNA
agaagaatgagaaacataca

SEQ ID NO: 17936 - RNA, 20 nt, synthetic construct
  source 1..20: mol_type = other RNA
agaagaatgattatttgcgg

SEQ ID NO: 17937 - RNA, 20 nt, synthetic construct
  source 1..20: mol_type = other RNA
agaagaattctataggtagt

SEQ ID NO: 17938 - RNA, 20 nt, synthetic construct
  source 1..20: mol_type = other RNA
agaagacaatactgttatga

SEQ ID NO: 17939 - RNA, 20 nt, synthetic construct
  source 1..20: mol_type = other RNA
agaagacacaaaatcagata

SEQ ID NO: 17940 - RNA, 20 nt, synthetic construct
  source 1..20: mol_type = other RNA
agaagacatgataaatacgt

SEQ ID NO: 17941 - RNA, 20 nt, synthetic construct
  source 1..20: mol_type = other RNA
agaagacctcaaattctgag

SEQ ID NO: 17942 - RNA, 20 nt, synthetic construct
  source 1..20: mol_type = other RNA
agaagactaagcagaaatga

SEQ ID NO: 17943 - RNA, 20 nt, synthetic construct
  source 1..20: mol_type = other RNA
agaagactcagcagttttaa

SEQ ID NO: 17944 - RNA, 20 nt, synthetic construct
  source 1..20: mol_type = other RNA
agaagactggaaaagtgttg

SEQ ID NO: 17945 - RNA, 20 nt, synthetic construct
  source 1..20: mol_type = other RNA
agaagacttaggagaaaagc

SEQ ID NO: 17946 - RNA, 20 nt, synthetic construct
  source 1..20: mol_type = other RNA
agaagagaatggctggaatg

SEQ ID NO: 17947 - RNA, 20 nt, synthetic construct
  source 1..20: mol_type = other RNA
agaagagcactatgtaaatt

SEQ ID NO: 17948 - RNA, 20 nt, synthetic construct
  source 1..20: mol_type = other RNA
agaagagcagtgtgttctgc

SEQ ID NO: 17949 - RNA, 20 nt, synthetic construct
  source 1..20: mol_type = other RNA
agaagagctgtaacagaggc

SEQ ID NO: 17950 - RNA, 20 nt, synthetic construct
  source 1..20: mol_type = other RNA
agaagaggataaggggcagg

SEQ ID NO: 17951 - RNA, 20 nt, synthetic construct
  source 1..20: mol_type = other RNA
agaagagggggcataacatc

SEQ ID NO: 17952 - RNA, 20 nt, synthetic construct
  source 1..20: mol_type = other RNA
agaagagtaatggttggccg

SEQ ID NO: 17953 - RNA, 20 nt, synthetic construct
  source 1..20: mol_type = other RNA
agaagagtgaagctggaccc

SEQ ID NO: 17954 - RNA, 20 nt, synthetic construct
  source 1..20: mol_type = other RNA
agaagagttctgaaggctca

SEQ ID NO: 17955 - RNA, 20 nt, synthetic construct
  source 1..20: mol_type = other RNA
agaagataatgttagaattc

SEQ ID NO: 17956 - RNA, 20 nt, synthetic construct
  source 1..20: mol_type = other RNA
agaagatgacatttgctttt

SEQ ID NO: 17957 - RNA, 20 nt, synthetic construct
  source 1..20: mol_type = other RNA
agaagatgcagttgcttact

SEQ ID NO: 17958 - RNA, 20 nt, synthetic construct
  source 1..20: mol_type = other RNA
agaagatggttggaagtttc

SEQ ID NO: 17959 - RNA, 20 nt, synthetic construct
  source 1..20: mol_type = other RNA
agaagattgagtcagtaatc

SEQ ID NO: 17960 - RNA, 20 nt, synthetic construct
  source 1..20: mol_type = other RNA
agaagcacaccaaggtttct

SEQ ID NO: 17961 - RNA, 20 nt, synthetic construct
  source 1..20: mol_type = other RNA
agaagcactttttaccaagt

SEQ ID NO: 17962 - RNA, 20 nt, synthetic construct
  source 1..20: mol_type = other RNA
agaagcagaaaatcagtgtg

SEQ ID NO: 17963 - RNA, 20 nt, synthetic construct
  source 1..20: mol_type = other RNA
agaagcagcaagggtggctg

SEQ ID NO: 17964 - RNA, 20 nt, synthetic construct
  source 1..20: mol_type = other RNA
agaagcatctgatacacttc

SEQ ID NO: 17965 - RNA, 20 nt, synthetic construct
  source 1..20: mol_type = other RNA
agaagccacacagtacaagg

SEQ ID NO: 17966 - RNA, 20 nt, synthetic construct
  source 1..20: mol_type = other RNA
agaagccctgcagccagatt

SEQ ID NO: 17967 - RNA, 20 nt, synthetic construct
  source 1..20: mol_type = other RNA
agaagcgctcttcaagcatt

SEQ ID NO: 17968 - RNA, 20 nt, synthetic construct
  source 1..20: mol_type = other RNA
agaagctaaattttcatagg

SEQ ID NO: 17969 - RNA, 20 nt, synthetic construct
  source 1..20: mol_type = other RNA
agaagctatagctgagaagt

SEQ ID NO: 17970 - RNA, 20 nt, synthetic construct
  source 1..20: mol_type = other RNA
agaagctgttttggtaaaat

SEQ ID NO: 17971 - RNA, 20 nt, synthetic construct
  source 1..20: mol_type = other RNA
agaagctttcagacttaact

SEQ ID NO: 17972 - RNA, 20 nt, synthetic construct
  source 1..20: mol_type = other RNA
agaaggaaaaaacacctaaa

SEQ ID NO: 17973 - RNA, 20 nt, synthetic construct
  source 1..20: mol_type = other RNA
agaaggaaaagaacacagtg

SEQ ID NO: 17974 - RNA, 20 nt, synthetic construct
  source 1..20: mol_type = other RNA
agaaggaagcaccaaccctt

SEQ ID NO: 17975 - RNA, 20 nt, synthetic construct
  source 1..20: mol_type = other RNA
agaaggaatgtgcactcttt

SEQ ID NO: 17976 - RNA, 20 nt, synthetic construct
  source 1..20: mol_type = other RNA
agaaggacagcttccaccca

SEQ ID NO: 17977 - RNA, 20 nt, synthetic construct
  source 1..20: mol_type = other RNA
agaaggagaaaacaaaaaga

SEQ ID NO: 17978 - RNA, 20 nt, synthetic construct
  source 1..20: mol_type = other RNA
agaaggagaaaccatttacc

SEQ ID NO: 17979 - RNA, 20 nt, synthetic construct
  source 1..20: mol_type = other RNA
agaaggaggaaaataatttg

SEQ ID NO: 17980 - RNA, 20 nt, synthetic construct
  source 1..20: mol_type = other RNA
agaaggagtccagtcctgct

SEQ ID NO: 17981 - RNA, 20 nt, synthetic construct
  source 1..20: mol_type = other RNA
agaaggatatgttttctaaa

SEQ ID NO: 17982 - RNA, 20 nt, synthetic construct
  source 1..20: mol_type = other RNA
agaaggattgttcatgtctg

SEQ ID NO: 17983 - RNA, 20 nt, synthetic construct
  source 1..20: mol_type = other RNA
agaaggccagagggaatcta

SEQ ID NO: 17984 - RNA, 20 nt, synthetic construct
  source 1..20: mol_type = other RNA
agaaggccatttgattgcca

SEQ ID NO: 17985 - RNA, 20 nt, synthetic construct
  source 1..20: mol_type = other RNA
agaaggccctatgccttcag

SEQ ID NO: 17986 - RNA, 20 nt, synthetic construct
  source 1..20: mol_type = other RNA
agaaggccgtccctattttc

SEQ ID NO: 17987 - RNA, 20 nt, synthetic construct
  source 1..20: mol_type = other RNA
agaaggccttccacggaatg

SEQ ID NO: 17988 - RNA, 20 nt, synthetic construct
  source 1..20: mol_type = other RNA
agaaggcgaaatgtgaacag

SEQ ID NO: 17989 - RNA, 20 nt, synthetic construct
  source 1..20: mol_type = other RNA
agaaggctagcacagaggca

SEQ ID NO: 17990 - RNA, 20 nt, synthetic construct
  source 1..20: mol_type = other RNA
agaaggctgccagcaccaga

SEQ ID NO: 17991 - RNA, 20 nt, synthetic construct
  source 1..20: mol_type = other RNA
agaaggctttgtgttggtgt

SEQ ID NO: 17992 - RNA, 20 nt, synthetic construct
  source 1..20: mol_type = other RNA
agaagggaaaggatgacctt

SEQ ID NO: 17993 - RNA, 20 nt, synthetic construct
  source 1..20: mol_type = other RNA
agaagggaacactaagaaga

SEQ ID NO: 17994 - RNA, 20 nt, synthetic construct
  source 1..20: mol_type = other RNA
agaagggaagtaaagatcaa

SEQ ID NO: 17995 - RNA, 20 nt, synthetic construct
  source 1..20: mol_type = other RNA
agaagggagaacccaggaac

SEQ ID NO: 17996 - RNA, 20 nt, synthetic construct
  source 1..20: mol_type = other RNA
agaagggtatatacaatatt

SEQ ID NO: 17997 - RNA, 20 nt, synthetic construct
  source 1..20: mol_type = other RNA
agaaggtaagaatgtcaagc

SEQ ID NO: 17998 - RNA, 20 nt, synthetic construct
  source 1..20: mol_type = other RNA
agaaggtatcatcggaaata

SEQ ID NO: 17999 - RNA, 20 nt, synthetic construct
  source 1..20: mol_type = other RNA
agaaggtcaatctaggaggt

SEQ ID NO: 18000 - RNA, 20 nt, synthetic construct
  source 1..20: mol_type = other RNA
agaaggtgagggactgagca

SEQ ID NO: 18001 - RNA, 20 nt, synthetic construct
  source 1..20: mol_type = other RNA
agaaggttaactaatagcca

SEQ ID NO: 18002 - RNA, 20 nt, synthetic construct
  source 1..20: mol_type = other RNA
agaaggtttgtagagcaagc

SEQ ID NO: 18003 - RNA, 20 nt, synthetic construct
  source 1..20: mol_type = other RNA
agaagtaaatcccggccagg

SEQ ID NO: 18004 - RNA, 20 nt, synthetic construct
  source 1..20: mol_type = other RNA
agaagtaacattacaacagc

SEQ ID NO: 18005 - RNA, 20 nt, synthetic construct
  source 1..20: mol_type = other RNA
agaagtaactcttgagttag

SEQ ID NO: 18006 - RNA, 20 nt, synthetic construct
  source 1..20: mol_type = other RNA
agaagtaatttcttctgaag

SEQ ID NO: 18007 - RNA, 20 nt, synthetic construct
  source 1..20: mol_type = other RNA
agaagtacaaacattacaga

SEQ ID NO: 18008 - RNA, 20 nt, synthetic construct
  source 1..20: mol_type = other RNA
agaagtactactcattaaat

SEQ ID NO: 18009 - RNA, 20 nt, synthetic construct
  source 1..20: mol_type = other RNA
agaagtatcccagatgggga

SEQ ID NO: 18010 - RNA, 20 nt, synthetic construct
  source 1..20: mol_type = other RNA
agaagtcaaagcctgtggag

SEQ ID NO: 18011 - RNA, 20 nt, synthetic construct
  source 1..20: mol_type = other RNA
agaagtcactttttattctg

SEQ ID NO: 18012 - RNA, 20 nt, synthetic construct
  source 1..20: mol_type = other RNA
agaagtcagactaagacact

SEQ ID NO: 18013 - RNA, 20 nt, synthetic construct
  source 1..20: mol_type = other RNA
agaagtcccagttcaaggtg

SEQ ID NO: 18014 - RNA, 20 nt, synthetic construct
  source 1..20: mol_type = other RNA
agaagtcttttcctaccctg

SEQ ID NO: 18015 - RNA, 20 nt, synthetic construct
  source 1..20: mol_type = other RNA
agaagtgaaaaatgacctaa

SEQ ID NO: 18016 - RNA, 20 nt, synthetic construct
  source 1..20: mol_type = other RNA
agaagtgaaactgctggatc

SEQ ID NO: 18017 - RNA, 20 nt, synthetic construct
  source 1..20: mol_type = other RNA
agaagtgaagcttcaaacca

SEQ ID NO: 18018 - RNA, 20 nt, synthetic construct
  source 1..20: mol_type = other RNA
agaagtgctgacttggcagc

SEQ ID NO: 18019 - RNA, 20 nt, synthetic construct
  source 1..20: mol_type = other RNA
agaagtgtatcagatgcttc

SEQ ID NO: 18020 - RNA, 20 nt, synthetic construct
  source 1..20: mol_type = other RNA
agaagtgttttgatagttgc

SEQ ID NO: 18021 - RNA, 20 nt, synthetic construct
  source 1..20: mol_type = other RNA
agaagttacggttccctgta

SEQ ID NO: 18022 - RNA, 20 nt, synthetic construct
  source 1..20: mol_type = other RNA
agaagttgtggtgagccaag

SEQ ID NO: 18023 - RNA, 20 nt, synthetic construct
  source 1..20: mol_type = other RNA
agaagtttggaaccagcctg

SEQ ID NO: 18024 - RNA, 20 nt, synthetic construct
  source 1..20: mol_type = other RNA
agaagttttccaggaaaagc

SEQ ID NO: 18025 - RNA, 20 nt, synthetic construct
  source 1..20: mol_type = other RNA
agaataaaaagtgacttctg

SEQ ID NO: 18026 - RNA, 20 nt, synthetic construct
  source 1..20: mol_type = other RNA
agaataaaattcaccaaaca

SEQ ID NO: 18027 - RNA, 20 nt, synthetic construct
  source 1..20: mol_type = other RNA
agaataactgtcctgaattc

SEQ ID NO: 18028 - RNA, 20 nt, synthetic construct
  source 1..20: mol_type = other RNA
agaataagctaatcccaaag

SEQ ID NO: 18029 - RNA, 20 nt, synthetic construct
  source 1..20: mol_type = other RNA
agaataatacacttttcagg

SEQ ID NO: 18030 - RNA, 20 nt, synthetic construct
  source 1..20: mol_type = other RNA
agaataatgtctttttacac

SEQ ID NO: 18031 - RNA, 20 nt, synthetic construct
  source 1..20: mol_type = other RNA
agaatacaaaaatgacacaa

SEQ ID NO: 18032 - RNA, 20 nt, synthetic construct
  source 1..20: mol_type = other RNA
agaataccaaattcacgaga

SEQ ID NO: 18033 - RNA, 20 nt, synthetic construct
  source 1..20: mol_type = other RNA
agaataccacttagtttgca

SEQ ID NO: 18034 - RNA, 20 nt, synthetic construct
  source 1..20: mol_type = other RNA
agaataccagagattgggaa

SEQ ID NO: 18035 - RNA, 20 nt, synthetic construct
  source 1..20: mol_type = other RNA
agaatactccaccagcatct

SEQ ID NO: 18036 - RNA, 20 nt, synthetic construct
  source 1..20: mol_type = other RNA
agaatagcagaaacacagga

SEQ ID NO: 18037 - RNA, 20 nt, synthetic construct
  source 1..20: mol_type = other RNA
agaataggcaaattcataga

SEQ ID NO: 18038 - RNA, 20 nt, synthetic construct
  source 1..20: mol_type = other RNA
agaatataaactcttcctta

SEQ ID NO: 18039 - RNA, 20 nt, synthetic construct
  source 1..20: mol_type = other RNA
agaatatccaagcacaaacc

SEQ ID NO: 18040 - RNA, 20 nt, synthetic construct
  source 1..20: mol_type = other RNA
agaatcaggtctctttgaaa

SEQ ID NO: 18041 - RNA, 20 nt, synthetic construct
  source 1..20: mol_type = other RNA
agaatcatccggggagcttt

SEQ ID NO: 18042 - RNA, 20 nt, synthetic construct
  source 1..20: mol_type = other RNA
agaatccccaaataacatgc

SEQ ID NO: 18043 - RNA, 20 nt, synthetic construct
  source 1..20: mol_type = other RNA
agaatccctttcgctaatct

SEQ ID NO: 18044 - RNA, 20 nt, synthetic construct
  source 1..20: mol_type = other RNA
agaatcctgctattttatta

SEQ ID NO: 18045 - RNA, 20 nt, synthetic construct
  source 1..20: mol_type = other RNA
agaatcgtgatagtcttcca

SEQ ID NO: 18046 - RNA, 20 nt, synthetic construct
  source 1..20: mol_type = other RNA
agaatctgggaggtggaggt

SEQ ID NO: 18047 - RNA, 20 nt, synthetic construct
  source 1..20: mol_type = other RNA
agaatcttaaaataccagag

SEQ ID NO: 18048 - RNA, 20 nt, synthetic construct
  source 1..20: mol_type = other RNA
agaatcttactggtgttagg

SEQ ID NO: 18049 - RNA, 20 nt, synthetic construct
  source 1..20: mol_type = other RNA
agaatctttggcaaacttag

SEQ ID NO: 18050 - RNA, 20 nt, synthetic construct
  source 1..20: mol_type = other RNA
agaatgaaaatttttgtctg

SEQ ID NO: 18051 - RNA, 20 nt, synthetic construct
  source 1..20: mol_type = other RNA
agaatgaagtcagagatttt

SEQ ID NO: 18052 - RNA, 20 nt, synthetic construct
  source 1..20: mol_type = other RNA
agaatgacagaaaatatcta

SEQ ID NO: 18053 - RNA, 20 nt, synthetic construct
  source 1..20: mol_type = other RNA
agaatgaccgagatacttaa

SEQ ID NO: 18054 - RNA, 20 nt, synthetic construct
  source 1..20: mol_type = other RNA
agaatgagaaacatacatgt

SEQ ID NO: 18055 - RNA, 20 nt, synthetic construct
  source 1..20: mol_type = other RNA
agaatgattatttgcggctt

SEQ ID NO: 18056 - RNA, 20 nt, synthetic construct
  source 1..20: mol_type = other RNA
agaatgcatccctcctctgg

SEQ ID NO: 18057 - RNA, 20 nt, synthetic construct
  source 1..20: mol_type = other RNA
agaatgcatcttttaaaaac

SEQ ID NO: 18058 - RNA, 20 nt, synthetic construct
  source 1..20: mol_type = other RNA
agaatggaaacttgccatct

SEQ ID NO: 18059 - RNA, 20 nt, synthetic construct
  source 1..20: mol_type = other RNA
agaatggcaaggctaacagc

SEQ ID NO: 18060 - RNA, 20 nt, synthetic construct
  source 1..20: mol_type = other RNA
agaatggcatgaacccacca

SEQ ID NO: 18061 - RNA, 20 nt, synthetic construct
  source 1..20: mol_type = other RNA
agaatggccctgcgattggt

SEQ ID NO: 18062 - RNA, 20 nt, synthetic construct
  source 1..20: mol_type = other RNA
agaatggctggaatggtgaa

SEQ ID NO: 18063 - RNA, 20 nt, synthetic construct
  source 1..20: mol_type = other RNA
agaatggtttaacacataca

SEQ ID NO: 18064 - RNA, 20 nt, synthetic construct
  source 1..20: mol_type = other RNA
agaatgtcaagctgtttgag

SEQ ID NO: 18065 - RNA, 20 nt, synthetic construct
  source 1..20: mol_type = other RNA
agaatgtccatcaggaaaac

SEQ ID NO: 18066 - RNA, 20 nt, synthetic construct
  source 1..20: mol_type = other RNA
agaatgtgaaaaatttgaca

SEQ ID NO: 18067 - RNA, 20 nt, synthetic construct
  source 1..20: mol_type = other RNA
agaatgtgacctgtccttgt

SEQ ID NO: 18068 - RNA, 20 nt, synthetic construct
  source 1..20: mol_type = other RNA
agaatgtgacttcgtcaagg

SEQ ID NO: 18069 - RNA, 20 nt, synthetic construct
  source 1..20: mol_type = other RNA
agaatgttcaagtatttcca

SEQ ID NO: 18070 - RNA, 20 nt, synthetic construct
  source 1..20: mol_type = other RNA
agaatgtttttccgtctagc

SEQ ID NO: 18071 - RNA, 20 nt, synthetic construct
  source 1..20: mol_type = other RNA
agaattaaaaacattggagg

SEQ ID NO: 18072 - RNA, 20 nt, synthetic construct
  source 1..20: mol_type = other RNA
agaattaaactcattatccc

SEQ ID NO: 18073 - RNA, 20 nt, synthetic construct
  source 1..20: mol_type = other RNA
agaattaacactaatccttc

SEQ ID NO: 18074 - RNA, 20 nt, synthetic construct
  source 1..20: mol_type = other RNA
agaattacaggcatgagtcg

SEQ ID NO: 18075 - RNA, 20 nt, synthetic construct
  source 1..20: mol_type = other RNA
agaattactgacaatagcca

SEQ ID NO: 18076 - RNA, 20 nt, synthetic construct
  source 1..20: mol_type = other RNA
agaattagaaagctggactc

SEQ ID NO: 18077 - RNA, 20 nt, synthetic construct
  source 1..20: mol_type = other RNA
agaattatagagggcctaaa

SEQ ID NO: 18078 - RNA, 20 nt, synthetic construct
  source 1..20: mol_type = other RNA
agaattattgattggcaaat

SEQ ID NO: 18079 - RNA, 20 nt, synthetic construct
  source 1..20: mol_type = other RNA
agaattattgtctgcaagca

SEQ ID NO: 18080 - RNA, 20 nt, synthetic construct
  source 1..20: mol_type = other RNA
agaattcaaaaacactgtat

SEQ ID NO: 18081 - RNA, 20 nt, synthetic construct
  source 1..20: mol_type = other RNA
agaattcactgtgactccaa

SEQ ID NO: 18082 - RNA, 20 nt, synthetic construct
  source 1..20: mol_type = other RNA
agaattcagagtggctaatg

SEQ ID NO: 18083 - RNA, 20 nt, synthetic construct
  source 1..20: mol_type = other RNA
agaattcaggacagtcatcc

SEQ ID NO: 18084 - RNA, 20 nt, synthetic construct
  source 1..20: mol_type = other RNA
agaattcaggacagttattc

SEQ ID NO: 18085 - RNA, 20 nt, synthetic construct
  source 1..20: mol_type = other RNA
agaattcattgttgtgtgtt

SEQ ID NO: 18086 - RNA, 20 nt, synthetic construct
  source 1..20: mol_type = other RNA
agaattccatcagtggttgt

SEQ ID NO: 18087 - RNA, 20 nt, synthetic construct
  source 1..20: mol_type = other RNA
agaattccattccttttcga

SEQ ID NO: 18088 - RNA, 20 nt, synthetic construct
  source 1..20: mol_type = other RNA
agaattcgttaatacttgtg

SEQ ID NO: 18089 - RNA, 20 nt, synthetic construct
  source 1..20: mol_type = other RNA
agaattctaaattgcctata

SEQ ID NO: 18090 - RNA, 20 nt, synthetic construct
  source 1..20: mol_type = other RNA
agaattctataggtagtaca

SEQ ID NO: 18091 - RNA, 20 nt, synthetic construct
  source 1..20: mol_type = other RNA
agaattctctctcaactggc

SEQ ID NO: 18092 - RNA, 20 nt, synthetic construct
  source 1..20: mol_type = other RNA
agaattcttcttctgttatt

SEQ ID NO: 18093 - RNA, 20 nt, synthetic construct
  source 1..20: mol_type = other RNA
agaattgactttaccctgct

SEQ ID NO: 18094 - RNA, 20 nt, synthetic construct
  source 1..20: mol_type = other RNA
agaattggtagtcaatgcaa

SEQ ID NO: 18095 - RNA, 20 nt, synthetic construct
  source 1..20: mol_type = other RNA
agaatttcagaaagagaata

SEQ ID NO: 18096 - RNA, 20 nt, synthetic construct
  source 1..20: mol_type = other RNA
agaatttcaggtgtgtaaac

SEQ ID NO: 18097 - RNA, 20 nt, synthetic construct
  source 1..20: mol_type = other RNA
agaatttcatgcctttcagc

SEQ ID NO: 18098 - RNA, 20 nt, synthetic construct
  source 1..20: mol_type = other RNA
agaatttgaggtcttctagc

SEQ ID NO: 18099 - RNA, 20 nt, synthetic construct
  source 1..20: mol_type = other RNA
agaattttaagcctagagat

SEQ ID NO: 18100 - RNA, 20 nt, synthetic construct
  source 1..20: mol_type = other RNA
agaattttccattcatgtaa

SEQ ID NO: 18101 - RNA, 20 nt, synthetic construct
  source 1..20: mol_type = other RNA
agaattttgcttttgctttg

SEQ ID NO: 18102 - RNA, 20 nt, synthetic construct
  source 1..20: mol_type = other RNA
agacaaaaatagaggatggg

SEQ ID NO: 18103 - RNA, 20 nt, synthetic construct
  source 1..20: mol_type = other RNA
agacaaagacaagttcttac

SEQ ID NO: 18104 - RNA, 20 nt, synthetic construct
  source 1..20: mol_type = other RNA
agacaaagcataaaatatgt

SEQ ID NO: 18105 - RNA, 20 nt, synthetic construct
  source 1..20: mol_type = other RNA
agacaaaggttgcagtgagc

SEQ ID NO: 18106 - RNA, 20 nt, synthetic construct
  source 1..20: mol_type = other RNA
agacaacacattaataagat

SEQ ID NO: 18107 - RNA, 20 nt, synthetic construct
  source 1..20: mol_type = other RNA
agacaagactaaaaaattag

SEQ ID NO: 18108 - RNA, 20 nt, synthetic construct
  source 1..20: mol_type = other RNA
agacaagcaaggaagggctt

SEQ ID NO: 18109 - RNA, 20 nt, synthetic construct
  source 1..20: mol_type = other RNA
agacaagcacaggcatctct

SEQ ID NO: 18110 - RNA, 20 nt, synthetic construct
  source 1..20: mol_type = other RNA
agacaagtactgcatgattc

SEQ ID NO: 18111 - RNA, 20 nt, synthetic construct
  source 1..20: mol_type = other RNA
agacaagttctcctgtgtgc

SEQ ID NO: 18112 - RNA, 20 nt, synthetic construct
  source 1..20: mol_type = other RNA
agacaagttcttacctcaaa

SEQ ID NO: 18113 - RNA, 20 nt, synthetic construct
  source 1..20: mol_type = other RNA
agacaataattcttcctgtc

SEQ ID NO: 18114 - RNA, 20 nt, synthetic construct
  source 1..20: mol_type = other RNA
agacaatactgttatgacaa

SEQ ID NO: 18115 - RNA, 20 nt, synthetic construct
  source 1..20: mol_type = other RNA
agacaatagctagtgtctta

SEQ ID NO: 18116 - RNA, 20 nt, synthetic construct
  source 1..20: mol_type = other RNA
agacaatgtctttggctctt

SEQ ID NO: 18117 - RNA, 20 nt, synthetic construct
  source 1..20: mol_type = other RNA
agacaatgtggagttggtgc

SEQ ID NO: 18118 - RNA, 20 nt, synthetic construct
  source 1..20: mol_type = other RNA
agacacaaaagagctgggcc

SEQ ID NO: 18119 - RNA, 20 nt, synthetic construct
  source 1..20: mol_type = other RNA
agacacaaaatcagatatga

SEQ ID NO: 18120 - RNA, 20 nt, synthetic construct
  source 1..20: mol_type = other RNA
agacacaaggaaggtcaaat

SEQ ID NO: 18121 - RNA, 20 nt, synthetic construct
  source 1..20: mol_type = other RNA
agacacacatcagacaccta

SEQ ID NO: 18122 - RNA, 20 nt, synthetic construct
  source 1..20: mol_type = other RNA
agacacaccatgacagagtt

SEQ ID NO: 18123 - RNA, 20 nt, synthetic construct
  source 1..20: mol_type = other RNA
agacacacgagtattcaagt

SEQ ID NO: 18124 - RNA, 20 nt, synthetic construct
  source 1..20: mol_type = other RNA
agacacactagctgacccac

SEQ ID NO: 18125 - RNA, 20 nt, synthetic construct
  source 1..20: mol_type = other RNA
agacacatactgaaagacag

SEQ ID NO: 18126 - RNA, 20 nt, synthetic construct
  source 1..20: mol_type = other RNA
agacacatttttgacagcca

SEQ ID NO: 18127 - RNA, 20 nt, synthetic construct
  source 1..20: mol_type = other RNA
agacaccgctccacgcccat

SEQ ID NO: 18128 - RNA, 20 nt, synthetic construct
  source 1..20: mol_type = other RNA
agacacctacaatattaact

SEQ ID NO: 18129 - RNA, 20 nt, synthetic construct
  source 1..20: mol_type = other RNA
agacacctacattaatctca

SEQ ID NO: 18130 - RNA, 20 nt, synthetic construct
  source 1..20: mol_type = other RNA
agacacggtctcacactgtt

SEQ ID NO: 18131 - RNA, 20 nt, synthetic construct
  source 1..20: mol_type = other RNA
agacactaactttctattcc

SEQ ID NO: 18132 - RNA, 20 nt, synthetic construct
  source 1..20: mol_type = other RNA
agacactagctattgtcttt

SEQ ID NO: 18133 - RNA, 20 nt, synthetic construct
  source 1..20: mol_type = other RNA
agacactagggactggcctc

SEQ ID NO: 18134 - RNA, 20 nt, synthetic construct
  source 1..20: mol_type = other RNA
agacactgggttctcaccaa

SEQ ID NO: 18135 - RNA, 20 nt, synthetic construct
  source 1..20: mol_type = other RNA
agacagaatcttactggtgt

SEQ ID NO: 18136 - RNA, 20 nt, synthetic construct
  source 1..20: mol_type = other RNA
agacagacatgcatgcacac

SEQ ID NO: 18137 - RNA, 20 nt, synthetic construct
  source 1..20: mol_type = other RNA
agacagacatttggaataga

SEQ ID NO: 18138 - RNA, 20 nt, synthetic construct
  source 1..20: mol_type = other RNA
agacagaccctggcttgtga

SEQ ID NO: 18139 - RNA, 20 nt, synthetic construct
  source 1..20: mol_type = other RNA
agacagacctctattaaatc

SEQ ID NO: 18140 - RNA, 20 nt, synthetic construct
  source 1..20: mol_type = other RNA
agacagagctagaactagaa

SEQ ID NO: 18141 - RNA, 20 nt, synthetic construct
  source 1..20: mol_type = other RNA
agacagagctccctctccct

SEQ ID NO: 18142 - RNA, 20 nt, synthetic construct
  source 1..20: mol_type = other RNA
agacagatatatgcattccc

SEQ ID NO: 18143 - RNA, 20 nt, synthetic construct
  source 1..20: mol_type = other RNA
agacagatcttatggaatag

SEQ ID NO: 18144 - RNA, 20 nt, synthetic construct
  source 1..20: mol_type = other RNA
agacagatgtgcttaatctt

SEQ ID NO: 18145 - RNA, 20 nt, synthetic construct
  source 1..20: mol_type = other RNA
agacagattctctgtctctg

SEQ ID NO: 18146 - RNA, 20 nt, synthetic construct
  source 1..20: mol_type = other RNA
agacagcatccccagaaaga

SEQ ID NO: 18147 - RNA, 20 nt, synthetic construct
  source 1..20: mol_type = other RNA
agacagcctaaaccattttc

SEQ ID NO: 18148 - RNA, 20 nt, synthetic construct
  source 1..20: mol_type = other RNA
agacagctaatatgctgtag

SEQ ID NO: 18149 - RNA, 20 nt, synthetic construct
  source 1..20: mol_type = other RNA
agacagctactaaacaaatc

SEQ ID NO: 18150 - RNA, 20 nt, synthetic construct
  source 1..20: mol_type = other RNA
agacaggaagaattattgtc

SEQ ID NO: 18151 - RNA, 20 nt, synthetic construct
  source 1..20: mol_type = other RNA
agacaggatccagatgtaga

SEQ ID NO: 18152 - RNA, 20 nt, synthetic construct
  source 1..20: mol_type = other RNA
agacagggaatgcccctgta

SEQ ID NO: 18153 - RNA, 20 nt, synthetic construct
  source 1..20: mol_type = other RNA
agacagggaatggggagcta

SEQ ID NO: 18154 - RNA, 20 nt, synthetic construct
  source 1..20: mol_type = other RNA
agacagggtctcactcttac

SEQ ID NO: 18155 - RNA, 20 nt, synthetic construct
  source 1..20: mol_type = other RNA
agacaggtagacatgagtaa

SEQ ID NO: 18156 - RNA, 20 nt, synthetic construct
  source 1..20: mol_type = other RNA
agacagtattgtgctgaaac

SEQ ID NO: 18157 - RNA, 20 nt, synthetic construct
  source 1..20: mol_type = other RNA
agacagtgagcatgctgcaa

SEQ ID NO: 18158 - RNA, 20 nt, synthetic construct
  source 1..20: mol_type = other RNA
agacataagcattttctaaa

SEQ ID NO: 18159 - RNA, 20 nt, synthetic construct
  source 1..20: mol_type = other RNA
agacatcacaatgcgtttgt

SEQ ID NO: 18160 - RNA, 20 nt, synthetic construct
  source 1..20: mol_type = other RNA
agacatcactaagagtgaaa

SEQ ID NO: 18161 - RNA, 20 nt, synthetic construct
  source 1..20: mol_type = other RNA
agacatcctgatttaggcca

SEQ ID NO: 18162 - RNA, 20 nt, synthetic construct
  source 1..20: mol_type = other RNA
agacatctgagacatcacaa

SEQ ID NO: 18163 - RNA, 20 nt, synthetic construct
  source 1..20: mol_type = other RNA
agacatctttcctgtgattt

SEQ ID NO: 18164 - RNA, 20 nt, synthetic construct
  source 1..20: mol_type = other RNA
agacatgaacaatccttcta

SEQ ID NO: 18165 - RNA, 20 nt, synthetic construct
  source 1..20: mol_type = other RNA
agacatgagtaaaaagaaat

SEQ ID NO: 18166 - RNA, 20 nt, synthetic construct
  source 1..20: mol_type = other RNA
agacatgataaatacgtata

SEQ ID NO: 18167 - RNA, 20 nt, synthetic construct
  source 1..20: mol_type = other RNA
agacatgcacgagaaaagca

SEQ ID NO: 18168 - RNA, 20 nt, synthetic construct
  source 1..20: mol_type = other RNA
agacatgcatgcacacagag

SEQ ID NO: 18169 - RNA, 20 nt, synthetic construct
  source 1..20: mol_type = other RNA
agacatgccacaccacatcc

SEQ ID NO: 18170 - RNA, 20 nt, synthetic construct
  source 1..20: mol_type = other RNA
agacatgctgaggccccagg

SEQ ID NO: 18171 - RNA, 20 nt, synthetic construct
  source 1..20: mol_type = other RNA
agacatgggctaaataaaac

SEQ ID NO: 18172 - RNA, 20 nt, synthetic construct
  source 1..20: mol_type = other RNA
agacatgttaggttgaaagt

SEQ ID NO: 18173 - RNA, 20 nt, synthetic construct
  source 1..20: mol_type = other RNA
agacattacaattgatacca

SEQ ID NO: 18174 - RNA, 20 nt, synthetic construct
  source 1..20: mol_type = other RNA
agacattattcttacagtga

SEQ ID NO: 18175 - RNA, 20 nt, synthetic construct
  source 1..20: mol_type = other RNA
agacattgtcttacataggc

SEQ ID NO: 18176 - RNA, 20 nt, synthetic construct
  source 1..20: mol_type = other RNA
agacatttctcatactttgt

SEQ ID NO: 18177 - RNA, 20 nt, synthetic construct
  source 1..20: mol_type = other RNA
agacatttgagggtgctgat

SEQ ID NO: 18178 - RNA, 20 nt, synthetic construct
  source 1..20: mol_type = other RNA
agacatttggaatagagagc

SEQ ID NO: 18179 - RNA, 20 nt, synthetic construct
  source 1..20: mol_type = other RNA
agacatttgggaatgtggtc

SEQ ID NO: 18180 - RNA, 20 nt, synthetic construct
  source 1..20: mol_type = other RNA
agacattttatttatacagg

SEQ ID NO: 18181 - RNA, 20 nt, synthetic construct
  source 1..20: mol_type = other RNA
agaccaaaatggagacccat

SEQ ID NO: 18182 - RNA, 20 nt, synthetic construct
  source 1..20: mol_type = other RNA
agaccaaatgcataaaaata

SEQ ID NO: 18183 - RNA, 20 nt, synthetic construct
  source 1..20: mol_type = other RNA
agaccaagaaaggacttcag

SEQ ID NO: 18184 - RNA, 20 nt, synthetic construct
  source 1..20: mol_type = other RNA
agaccaagaattttccattc

SEQ ID NO: 18185 - RNA, 20 nt, synthetic construct
  source 1..20: mol_type = other RNA
agaccaagagtgtggcttta

SEQ ID NO: 18186 - RNA, 20 nt, synthetic construct
  source 1..20: mol_type = other RNA
agaccaagtttaaccaatta

SEQ ID NO: 18187 - RNA, 20 nt, synthetic construct
  source 1..20: mol_type = other RNA
agaccacaaggattaatctt

SEQ ID NO: 18188 - RNA, 20 nt, synthetic construct
  source 1..20: mol_type = other RNA
agaccacagacgtgcagcac

SEQ ID NO: 18189 - RNA, 20 nt, synthetic construct
  source 1..20: mol_type = other RNA
agaccacaggctctcttcac

SEQ ID NO: 18190 - RNA, 20 nt, synthetic construct
  source 1..20: mol_type = other RNA
agaccaccacacttgcttgg

SEQ ID NO: 18191 - RNA, 20 nt, synthetic construct
  source 1..20: mol_type = other RNA
agaccagatgcgtggttcac

SEQ ID NO: 18192 - RNA, 20 nt, synthetic construct
  source 1..20: mol_type = other RNA
agaccagcagttcaagcacc

SEQ ID NO: 18193 - RNA, 20 nt, synthetic construct
  source 1..20: mol_type = other RNA
agaccaggagttcttatgag

SEQ ID NO: 18194 - RNA, 20 nt, synthetic construct
  source 1..20: mol_type = other RNA
agaccagttaggaagccact

SEQ ID NO: 18195 - RNA, 20 nt, synthetic construct
  source 1..20: mol_type = other RNA
agaccataatatatttcaca

SEQ ID NO: 18196 - RNA, 20 nt, synthetic construct
  source 1..20: mol_type = other RNA
agaccatataatctaaccct

SEQ ID NO: 18197 - RNA, 20 nt, synthetic construct
  source 1..20: mol_type = other RNA
agacccaaagcaaaagcaaa

SEQ ID NO: 18198 - RNA, 20 nt, synthetic construct
  source 1..20: mol_type = other RNA
agacccagtggctagtgtgt

SEQ ID NO: 18199 - RNA, 20 nt, synthetic construct
  source 1..20: mol_type = other RNA
agacccatactcagccccct

SEQ ID NO: 18200 - RNA, 20 nt, synthetic construct
  source 1..20: mol_type = other RNA
agaccccagtagaaatcttc

SEQ ID NO: 18201 - RNA, 20 nt, synthetic construct
  source 1..20: mol_type = other RNA
agaccccatctctaccaaaa

SEQ ID NO: 18202 - RNA, 20 nt, synthetic construct
  source 1..20: mol_type = other RNA
agacccctcaggtgtcactg

SEQ ID NO: 18203 - RNA, 20 nt, synthetic construct
  source 1..20: mol_type = other RNA
agacccgccgcagagccgga

SEQ ID NO: 18204 - RNA, 20 nt, synthetic construct
  source 1..20: mol_type = other RNA
agaccctggcttgtgacatc

SEQ ID NO: 18205 - RNA, 20 nt, synthetic construct
  source 1..20: mol_type = other RNA
agaccctgttagtcccctag

SEQ ID NO: 18206 - RNA, 20 nt, synthetic construct
  source 1..20: mol_type = other RNA
agacccttatgtccagcccc

SEQ ID NO: 18207 - RNA, 20 nt, synthetic construct
  source 1..20: mol_type = other RNA
agaccctttatcggataagg

SEQ ID NO: 18208 - RNA, 20 nt, synthetic construct
  source 1..20: mol_type = other RNA
agaccgaggaaacccgctct

SEQ ID NO: 18209 - RNA, 20 nt, synthetic construct
  source 1..20: mol_type = other RNA
agaccgcaagagttccaact

SEQ ID NO: 18210 - RNA, 20 nt, synthetic construct
  source 1..20: mol_type = other RNA
agaccggatgaggtggctca

SEQ ID NO: 18211 - RNA, 20 nt, synthetic construct
  source 1..20: mol_type = other RNA
agaccggggactgcaacaga

SEQ ID NO: 18212 - RNA, 20 nt, synthetic construct
  source 1..20: mol_type = other RNA
agaccgtggggggagggagg

SEQ ID NO: 18213 - RNA, 20 nt, synthetic construct
  source 1..20: mol_type = other RNA
agacctaagcttaagagcta

SEQ ID NO: 18214 - RNA, 20 nt, synthetic construct
  source 1..20: mol_type = other RNA
agacctactaaaagttgaca

SEQ ID NO: 18215 - RNA, 20 nt, synthetic construct
  source 1..20: mol_type = other RNA
agacctcaaattaatcagtc

SEQ ID NO: 18216 - RNA, 20 nt, synthetic construct
  source 1..20: mol_type = other RNA
agacctcaaattctgaggga

SEQ ID NO: 18217 - RNA, 20 nt, synthetic construct
  source 1..20: mol_type = other RNA
agacctcaggcagtctagtc

SEQ ID NO: 18218 - RNA, 20 nt, synthetic construct
  source 1..20: mol_type = other RNA
agacctcaggtttagaatat

SEQ ID NO: 18219 - RNA, 20 nt, synthetic construct
  source 1..20: mol_type = other RNA
agacctcatctctgcaaaac

SEQ ID NO: 18220 - RNA, 20 nt, synthetic construct
  source 1..20: mol_type = other RNA
agacctcatcttagccggga

SEQ ID NO: 18221 - RNA, 20 nt, synthetic construct
  source 1..20: mol_type = other RNA
agacctcctagattgacctt

SEQ ID NO: 18222 - RNA, 20 nt, synthetic construct
  source 1..20: mol_type = other RNA
agacctctattaaatcatga

SEQ ID NO: 18223 - RNA, 20 nt, synthetic construct
  source 1..20: mol_type = other RNA
agacctctgaagagtctatc

SEQ ID NO: 18224 - RNA, 20 nt, synthetic construct
  source 1..20: mol_type = other RNA
agacctgaagactggatttg

SEQ ID NO: 18225 - RNA, 20 nt, synthetic construct
  source 1..20: mol_type = other RNA
agacctgaatgactgttgcc

SEQ ID NO: 18226 - RNA, 20 nt, synthetic construct
  source 1..20: mol_type = other RNA
agacctgattcttccactag

SEQ ID NO: 18227 - RNA, 20 nt, synthetic construct
  source 1..20: mol_type = other RNA
agacctgcacaaaggattgg

SEQ ID NO: 18228 - RNA, 20 nt, synthetic construct
  source 1..20: mol_type = other RNA
agacctgcagtctgcaggca

SEQ ID NO: 18229 - RNA, 20 nt, synthetic construct
  source 1..20: mol_type = other RNA
agaccttattcaaataattg

SEQ ID NO: 18230 - RNA, 20 nt, synthetic construct
  source 1..20: mol_type = other RNA
agacctttcttaggtttctc

SEQ ID NO: 18231 - RNA, 20 nt, synthetic construct
  source 1..20: mol_type = other RNA
agacctttctttaaaagtaa

SEQ ID NO: 18232 - RNA, 20 nt, synthetic construct
  source 1..20: mol_type = other RNA
agacgatattcctatcagaa

SEQ ID NO: 18233 - RNA, 20 nt, synthetic construct
  source 1..20: mol_type = other RNA
agacgcaaaggatgtcaaca

SEQ ID NO: 18234 - RNA, 20 nt, synthetic construct
  source 1..20: mol_type = other RNA
agacggaaaaacattctaca

SEQ ID NO: 18235 - RNA, 20 nt, synthetic construct
  source 1..20: mol_type = other RNA
agacggaagactcatacttc

SEQ ID NO: 18236 - RNA, 20 nt, synthetic construct
  source 1..20: mol_type = other RNA
agacggaatcttaccctgtt

SEQ ID NO: 18237 - RNA, 20 nt, synthetic construct
  source 1..20: mol_type = other RNA
agacggcgagcttgatcttt

SEQ ID NO: 18238 - RNA, 20 nt, synthetic construct
  source 1..20: mol_type = other RNA
agacggcgtttcgccatgtt

SEQ ID NO: 18239 - RNA, 20 nt, synthetic construct
  source 1..20: mol_type = other RNA
agacgtgtacataaaataaa

SEQ ID NO: 18240 - RNA, 20 nt, synthetic construct
  source 1..20: mol_type = other RNA
agacgttcagataacaaagg

SEQ ID NO: 18241 - RNA, 20 nt, synthetic construct
  source 1..20: mol_type = other RNA
agactaagaaaaacagaaga

SEQ ID NO: 18242 - RNA, 20 nt, synthetic construct
  source 1..20: mol_type = other RNA
agactaagacactagctatt

SEQ ID NO: 18243 - RNA, 20 nt, synthetic construct
  source 1..20: mol_type = other RNA
agactaagcagaaatgacaa

SEQ ID NO: 18244 - RNA, 20 nt, synthetic construct
  source 1..20: mol_type = other RNA
agactaatatgagttcctgc

SEQ ID NO: 18245 - RNA, 20 nt, synthetic construct
  source 1..20: mol_type = other RNA
agactacctaaaacaatcta

SEQ ID NO: 18246 - RNA, 20 nt, synthetic construct
  source 1..20: mol_type = other RNA
agactagtacactgttgatt

SEQ ID NO: 18247 - RNA, 20 nt, synthetic construct
  source 1..20: mol_type = other RNA
agactataaaactcttagct

SEQ ID NO: 18248 - RNA, 20 nt, synthetic construct
  source 1..20: mol_type = other RNA
agactatcacgattctgacc

SEQ ID NO: 18249 - RNA, 20 nt, synthetic construct
  source 1..20: mol_type = other RNA
agactatcgttatatcctca

SEQ ID NO: 18250 - RNA, 20 nt, synthetic construct
  source 1..20: mol_type = other RNA
agactatctcttcctcctct

SEQ ID NO: 18251 - RNA, 20 nt, synthetic construct
  source 1..20: mol_type = other RNA
agactatgagaaggattagt

SEQ ID NO: 18252 - RNA, 20 nt, synthetic construct
  source 1..20: mol_type = other RNA
agactattatgagcagttgt

SEQ ID NO: 18253 - RNA, 20 nt, synthetic construct
  source 1..20: mol_type = other RNA
agactcaacatgtgtattta

SEQ ID NO: 18254 - RNA, 20 nt, synthetic construct
  source 1..20: mol_type = other RNA
agactcaagcctgataagct

SEQ ID NO: 18255 - RNA, 20 nt, synthetic construct
  source 1..20: mol_type = other RNA
agactcaataaccacatgtg

SEQ ID NO: 18256 - RNA, 20 nt, synthetic construct
  source 1..20: mol_type = other RNA
agactcagcagttttaaaga

SEQ ID NO: 18257 - RNA, 20 nt, synthetic construct
  source 1..20: mol_type = other RNA
agactcattgcctatagaca

SEQ ID NO: 18258 - RNA, 20 nt, synthetic construct
  source 1..20: mol_type = other RNA
agactccaactcaaaaaaga

SEQ ID NO: 18259 - RNA, 20 nt, synthetic construct
  source 1..20: mol_type = other RNA
agactccatctcaagaaaac

SEQ ID NO: 18260 - RNA, 20 nt, synthetic construct
  source 1..20: mol_type = other RNA
agactcccaacttataatat

SEQ ID NO: 18261 - RNA, 20 nt, synthetic construct
  source 1..20: mol_type = other RNA
agactccttcccctggtcga

SEQ ID NO: 18262 - RNA, 20 nt, synthetic construct
  source 1..20: mol_type = other RNA
agactctcaagaaggtatca

SEQ ID NO: 18263 - RNA, 20 nt, synthetic construct
  source 1..20: mol_type = other RNA
agactcttaatattgaaacg

SEQ ID NO: 18264 - RNA, 20 nt, synthetic construct
  source 1..20: mol_type = other RNA
agactcttcagaggtctgtt

SEQ ID NO: 18265 - RNA, 20 nt, synthetic construct
  source 1..20: mol_type = other RNA
agactcttgtcccggcatgc

SEQ ID NO: 18266 - RNA, 20 nt, synthetic construct
  source 1..20: mol_type = other RNA
agactgaccaacatggacaa

SEQ ID NO: 18267 - RNA, 20 nt, synthetic construct
  source 1..20: mol_type = other RNA
agactgagccagcaaatcag

SEQ ID NO: 18268 - RNA, 20 nt, synthetic construct
  source 1..20: mol_type = other RNA
agactgagtaatattccatt

SEQ ID NO: 18269 - RNA, 20 nt, synthetic construct
  source 1..20: mol_type = other RNA
agactgataaacttcagttt

SEQ ID NO: 18270 - RNA, 20 nt, synthetic construct
  source 1..20: mol_type = other RNA
agactgattaatttgaggtc

SEQ ID NO: 18271 - RNA, 20 nt, synthetic construct
  source 1..20: mol_type = other RNA
agactgcacataaaaggata

SEQ ID NO: 18272 - RNA, 20 nt, synthetic construct
  source 1..20: mol_type = other RNA
agactgcaggtcttcaacct

SEQ ID NO: 18273 - RNA, 20 nt, synthetic construct
  source 1..20: mol_type = other RNA
agactgcagtgacctatcat

SEQ ID NO: 18274 - RNA, 20 nt, synthetic construct
  source 1..20: mol_type = other RNA
agactgcagttggattatat

SEQ ID NO: 18275 - RNA, 20 nt, synthetic construct
  source 1..20: mol_type = other RNA
agactgccaggtagggaggg

SEQ ID NO: 18276 - RNA, 20 nt, synthetic construct
  source 1..20: mol_type = other RNA
agactgcctgaggtctcaaa

SEQ ID NO: 18277 - RNA, 20 nt, synthetic construct
  source 1..20: mol_type = other RNA
agactgctgtttaccaaggg

SEQ ID NO: 18278 - RNA, 20 nt, synthetic construct
  source 1..20: mol_type = other RNA
agactggaaaagtgttgact

SEQ ID NO: 18279 - RNA, 20 nt, synthetic construct
  source 1..20: mol_type = other RNA
agactggagttcactggcac

SEQ ID NO: 18280 - RNA, 20 nt, synthetic construct
  source 1..20: mol_type = other RNA
agactggatagcaacttgca

SEQ ID NO: 18281 - RNA, 20 nt, synthetic construct
  source 1..20: mol_type = other RNA
agactggatcctggagggct

SEQ ID NO: 18282 - RNA, 20 nt, synthetic construct
  source 1..20: mol_type = other RNA
agactggattaaggagatgg

SEQ ID NO: 18283 - RNA, 20 nt, synthetic construct
  source 1..20: mol_type = other RNA
agactggatttgattgggca

SEQ ID NO: 18284 - RNA, 20 nt, synthetic construct
  source 1..20: mol_type = other RNA
agactgggcaacagagacag

SEQ ID NO: 18285 - RNA, 20 nt, synthetic construct
  source 1..20: mol_type = other RNA
agactgtaaaaattttctcc

SEQ ID NO: 18286 - RNA, 20 nt, synthetic construct
  source 1..20: mol_type = other RNA
agactgtaatgagctgagat

SEQ ID NO: 18287 - RNA, 20 nt, synthetic construct
  source 1..20: mol_type = other RNA
agactgtattaccagcttac

SEQ ID NO: 18288 - RNA, 20 nt, synthetic construct
  source 1..20: mol_type = other RNA
agactgtgcaatgtgaaaaa

SEQ ID NO: 18289 - RNA, 20 nt, synthetic construct
  source 1..20: mol_type = other RNA
agactgtgccttgatccatt

SEQ ID NO: 18290 - RNA, 20 nt, synthetic construct
  source 1..20: mol_type = other RNA
agactgtgcttccacagcta

SEQ ID NO: 18291 - RNA, 20 nt, synthetic construct
  source 1..20: mol_type = other RNA
agactgttagggacttatgg

SEQ ID NO: 18292 - RNA, 20 nt, synthetic construct
  source 1..20: mol_type = other RNA
agacttaactataggagttc

SEQ ID NO: 18293 - RNA, 20 nt, synthetic construct
  source 1..20: mol_type = other RNA
agacttaggagaaaagcttc

SEQ ID NO: 18294 - RNA, 20 nt, synthetic construct
  source 1..20: mol_type = other RNA
agacttaggcaaaggaaaaa

SEQ ID NO: 18295 - RNA, 20 nt, synthetic construct
  source 1..20: mol_type = other RNA
agacttcaacggacattttt

SEQ ID NO: 18296 - RNA, 20 nt, synthetic construct
  source 1..20: mol_type = other RNA
agacttcacgatgcttaggt

SEQ ID NO: 18297 - RNA, 20 nt, synthetic construct
  source 1..20: mol_type = other RNA
agacttcaggaacaccttga

SEQ ID NO: 18298 - RNA, 20 nt, synthetic construct
  source 1..20: mol_type = other RNA
agacttctcaaacaggatac

SEQ ID NO: 18299 - RNA, 20 nt, synthetic construct
  source 1..20: mol_type = other RNA
agacttgaggtttacttggg

SEQ ID NO: 18300 - RNA, 20 nt, synthetic construct
  source 1..20: mol_type = other RNA
agactttagagtcagttgtt

SEQ ID NO: 18301 - RNA, 20 nt, synthetic construct
  source 1..20: mol_type = other RNA
agactttatggtaattggtt

SEQ ID NO: 18302 - RNA, 20 nt, synthetic construct
  source 1..20: mol_type = other RNA
agactttatgtggaaaaata

SEQ ID NO: 18303 - RNA, 20 nt, synthetic construct
  source 1..20: mol_type = other RNA
agactttcactgctcagtcc

SEQ ID NO: 18304 - RNA, 20 nt, synthetic construct
  source 1..20: mol_type = other RNA
agactttgttttgtttttct

SEQ ID NO: 18305 - RNA, 20 nt, synthetic construct
  source 1..20: mol_type = other RNA
agagaaaaacaaaacaaagt

SEQ ID NO: 18306 - RNA, 20 nt, synthetic construct
  source 1..20: mol_type = other RNA
agagaaaaattacaggtcaa

SEQ ID NO: 18307 - RNA, 20 nt, synthetic construct
  source 1..20: mol_type = other RNA
agagaaaatgttatacagca

SEQ ID NO: 18308 - RNA, 20 nt, synthetic construct
  source 1..20: mol_type = other RNA
agagaaaattgttcatgaaa

SEQ ID NO: 18309 - RNA, 20 nt, synthetic construct
  source 1..20: mol_type = other RNA
agagaaacaggattacaatg

SEQ ID NO: 18310 - RNA, 20 nt, synthetic construct
  source 1..20: mol_type = other RNA
agagaaaccttggtgtgctt

SEQ ID NO: 18311 - RNA, 20 nt, synthetic construct
  source 1..20: mol_type = other RNA
agagaaactggaatcaatcc

SEQ ID NO: 18312 - RNA, 20 nt, synthetic construct
  source 1..20: mol_type = other RNA
agagaaactttacactttaa

SEQ ID NO: 18313 - RNA, 20 nt, synthetic construct
  source 1..20: mol_type = other RNA
agagaaagaagtaatttctt

SEQ ID NO: 18314 - RNA, 20 nt, synthetic construct
  source 1..20: mol_type = other RNA
agagaaagagagagacaagc

SEQ ID NO: 18315 - RNA, 20 nt, synthetic construct
  source 1..20: mol_type = other RNA
agagaaagcatcagagcttt

SEQ ID NO: 18316 - RNA, 20 nt, synthetic construct
  source 1..20: mol_type = other RNA
agagaaatagttaacgttta

SEQ ID NO: 18317 - RNA, 20 nt, synthetic construct
  source 1..20: mol_type = other RNA
agagaacaaaatacctggga

SEQ ID NO: 18318 - RNA, 20 nt, synthetic construct
  source 1..20: mol_type = other RNA
agagaacaatggaatagaag

SEQ ID NO: 18319 - RNA, 20 nt, synthetic construct
  source 1..20: mol_type = other RNA
agagaacacacaatttgagg

SEQ ID NO: 18320 - RNA, 20 nt, synthetic construct
  source 1..20: mol_type = other RNA
agagaacagcattatcttaa

SEQ ID NO: 18321 - RNA, 20 nt, synthetic construct
  source 1..20: mol_type = other RNA
agagaacattggtttgaaat

SEQ ID NO: 18322 - RNA, 20 nt, synthetic construct
  source 1..20: mol_type = other RNA
agagaactgactgaaggatt

SEQ ID NO: 18323 - RNA, 20 nt, synthetic construct
  source 1..20: mol_type = other RNA
agagaacttgcacataatat

SEQ ID NO: 18324 - RNA, 20 nt, synthetic construct
  source 1..20: mol_type = other RNA
agagaagaatgagaaacata

SEQ ID NO: 18325 - RNA, 20 nt, synthetic construct
  source 1..20: mol_type = other RNA
agagaagagggggcataaca

SEQ ID NO: 18326 - RNA, 20 nt, synthetic construct
  source 1..20: mol_type = other RNA
agagaagatgacatttgctt

SEQ ID NO: 18327 - RNA, 20 nt, synthetic construct
  source 1..20: mol_type = other RNA
agagaaggaagcaccaaccc

SEQ ID NO: 18328 - RNA, 20 nt, synthetic construct
  source 1..20: mol_type = other RNA
agagaaggctgccagcacca

SEQ ID NO: 18329 - RNA, 20 nt, synthetic construct
  source 1..20: mol_type = other RNA
agagaaggctttgtgttggt

SEQ ID NO: 18330 - RNA, 20 nt, synthetic construct
  source 1..20: mol_type = other RNA
agagaagtcagactaagaca

SEQ ID NO: 18331 - RNA, 20 nt, synthetic construct
  source 1..20: mol_type = other RNA
agagaagtgaagcttcaaac

SEQ ID NO: 18332 - RNA, 20 nt, synthetic construct
  source 1..20: mol_type = other RNA
agagaagttttccaggaaaa

SEQ ID NO: 18333 - RNA, 20 nt, synthetic construct
  source 1..20: mol_type = other RNA
agagaatagcagaaacacag

SEQ ID NO: 18334 - RNA, 20 nt, synthetic construct
  source 1..20: mol_type = other RNA
agagaatcttaaaataccag

SEQ ID NO: 18335 - RNA, 20 nt, synthetic construct
  source 1..20: mol_type = other RNA
agagaatggaaacttgccat

SEQ ID NO: 18336 - RNA, 20 nt, synthetic construct
  source 1..20: mol_type = other RNA
agagaatggctggaatggtg

SEQ ID NO: 18337 - RNA, 20 nt, synthetic construct
  source 1..20: mol_type = other RNA
agagaattcagagtggctaa

SEQ ID NO: 18338 - RNA, 20 nt, synthetic construct
  source 1..20: mol_type = other RNA
agagaattctaaattgccta

SEQ ID NO: 18339 - RNA, 20 nt, synthetic construct
  source 1..20: mol_type = other RNA
agagacaaagcataaaatat

SEQ ID NO: 18340 - RNA, 20 nt, synthetic construct
  source 1..20: mol_type = other RNA
agagacaagcacaggcatct

SEQ ID NO: 18341 - RNA, 20 nt, synthetic construct
  source 1..20: mol_type = other RNA
agagacacacatcagacacc

SEQ ID NO: 18342 - RNA, 20 nt, synthetic construct
  source 1..20: mol_type = other RNA
agagacacatactgaaagac

SEQ ID NO: 18343 - RNA, 20 nt, synthetic construct
  source 1..20: mol_type = other RNA
agagacagaatcttactggt

SEQ ID NO: 18344 - RNA, 20 nt, synthetic construct
  source 1..20: mol_type = other RNA
agagacagagaatctgtctc

SEQ ID NO: 18345 - RNA, 20 nt, synthetic construct
  source 1..20: mol_type = other RNA
agagaccacaggctctcttc

SEQ ID NO: 18346 - RNA, 20 nt, synthetic construct
  source 1..20: mol_type = other RNA
agagacctgaagactggatt

SEQ ID NO: 18347 - RNA, 20 nt, synthetic construct
  source 1..20: mol_type = other RNA
agagacctgattcttccact

SEQ ID NO: 18348 - RNA, 20 nt, synthetic construct
  source 1..20: mol_type = other RNA
agagacctttctttaaaagt

SEQ ID NO: 18349 - RNA, 20 nt, synthetic construct
  source 1..20: mol_type = other RNA
agagactatctcttcctcct

SEQ ID NO: 18350 - RNA, 20 nt, synthetic construct
  source 1..20: mol_type = other RNA
agagactctcaagaaggtat

SEQ ID NO: 18351 - RNA, 20 nt, synthetic construct
  source 1..20: mol_type = other RNA
agagactggatagcaacttg

SEQ ID NO: 18352 - RNA, 20 nt, synthetic construct
  source 1..20: mol_type = other RNA
agagactggatcctggaggg

SEQ ID NO: 18353 - RNA, 20 nt, synthetic construct
  source 1..20: mol_type = other RNA
agagactgtgcttccacagc

SEQ ID NO: 18354 - RNA, 20 nt, synthetic construct
  source 1..20: mol_type = other RNA
agagagaaactttacacttt

SEQ ID NO: 18355 - RNA, 20 nt, synthetic construct
  source 1..20: mol_type = other RNA
agagagaaagagagagacaa

SEQ ID NO: 18356 - RNA, 20 nt, synthetic construct
  source 1..20: mol_type = other RNA
agagagaagatgacatttgc

SEQ ID NO: 18357 - RNA, 20 nt, synthetic construct
  source 1..20: mol_type = other RNA
agagagaaggctgccagcac

SEQ ID NO: 18358 - RNA, 20 nt, synthetic construct
  source 1..20: mol_type = other RNA
agagagaattctaaattgcc

SEQ ID NO: 18359 - RNA, 20 nt, synthetic construct
  source 1..20: mol_type = other RNA
agagagacaagcacaggcat

SEQ ID NO: 18360 - RNA, 20 nt, synthetic construct
  source 1..20: mol_type = other RNA
agagagacctgaagactgga

SEQ ID NO: 18361 - RNA, 20 nt, synthetic construct
  source 1..20: mol_type = other RNA
agagagacctttctttaaaa

SEQ ID NO: 18362 - RNA, 20 nt, synthetic construct
  source 1..20: mol_type = other RNA
agagagagaaagagagagac

SEQ ID NO: 18363 - RNA, 20 nt, synthetic construct
  source 1..20: mol_type = other RNA
agagagagaagatgacattt

SEQ ID NO: 18364 - RNA, 20 nt, synthetic construct
  source 1..20: mol_type = other RNA
agagagagacaagcacaggc

SEQ ID NO: 18365 - RNA, 20 nt, synthetic construct
  source 1..20: mol_type = other RNA
agagagagacctttctttaa

SEQ ID NO: 18366 - RNA, 20 nt, synthetic construct
  source 1..20: mol_type = other RNA
agagagagagaaagagagag

SEQ ID NO: 18367 - RNA, 20 nt, synthetic construct
  source 1..20: mol_type = other RNA
agagagaggggggaagcttt

SEQ ID NO: 18368 - RNA, 20 nt, synthetic construct
  source 1..20: mol_type = other RNA
agagagagtaactggtccag

SEQ ID NO: 18369 - RNA, 20 nt, synthetic construct
  source 1..20: mol_type = other RNA
agagagataaaacctggaat

SEQ ID NO: 18370 - RNA, 20 nt, synthetic construct
  source 1..20: mol_type = other RNA
agagagatgcctgtgcttgt

SEQ ID NO: 18371 - RNA, 20 nt, synthetic construct
  source 1..20: mol_type = other RNA
agagagatggtgggagaggc

SEQ ID NO: 18372 - RNA, 20 nt, synthetic construct
  source 1..20: mol_type = other RNA
agagagattaaataacttcc

SEQ ID NO: 18373 - RNA, 20 nt, synthetic construct
  source 1..20: mol_type = other RNA
agagagattcaagaaaccac

SEQ ID NO: 18374 - RNA, 20 nt, synthetic construct
  source 1..20: mol_type = other RNA
agagagcaagactcaaatct

SEQ ID NO: 18375 - RNA, 20 nt, synthetic construct
  source 1..20: mol_type = other RNA
agagagcaagtccccatctc

SEQ ID NO: 18376 - RNA, 20 nt, synthetic construct
  source 1..20: mol_type = other RNA
agagagcattgcctttatta

SEQ ID NO: 18377 - RNA, 20 nt, synthetic construct
  source 1..20: mol_type = other RNA
agagagcctgtggtctcttc

SEQ ID NO: 18378 - RNA, 20 nt, synthetic construct
  source 1..20: mol_type = other RNA
agagaggaagtgaccctgag

SEQ ID NO: 18379 - RNA, 20 nt, synthetic construct
  source 1..20: mol_type = other RNA
agagaggaataaatggtagc

SEQ ID NO: 18380 - RNA, 20 nt, synthetic construct
  source 1..20: mol_type = other RNA
agagaggacagttggccttg

SEQ ID NO: 18381 - RNA, 20 nt, synthetic construct
  source 1..20: mol_type = other RNA
agagaggctaggtgacctgc

SEQ ID NO: 18382 - RNA, 20 nt, synthetic construct
  source 1..20: mol_type = other RNA
agagaggctttttattagat

SEQ ID NO: 18383 - RNA, 20 nt, synthetic construct
  source 1..20: mol_type = other RNA
agagaggggggaagcttttc

SEQ ID NO: 18384 - RNA, 20 nt, synthetic construct
  source 1..20: mol_type = other RNA
agagagtaaaataaaagctc

SEQ ID NO: 18385 - RNA, 20 nt, synthetic construct
  source 1..20: mol_type = other RNA
agagagtaactggtccagat

SEQ ID NO: 18386 - RNA, 20 nt, synthetic construct
  source 1..20: mol_type = other RNA
agagagtgacagctgagtag

SEQ ID NO: 18387 - RNA, 20 nt, synthetic construct
  source 1..20: mol_type = other RNA
agagagtggaaagagccagc

SEQ ID NO: 18388 - RNA, 20 nt, synthetic construct
  source 1..20: mol_type = other RNA
agagataaaacctggaatgg

SEQ ID NO: 18389 - RNA, 20 nt, synthetic construct
  source 1..20: mol_type = other RNA
agagataactaatgagaatt

SEQ ID NO: 18390 - RNA, 20 nt, synthetic construct
  source 1..20: mol_type = other RNA
agagataactgggtgtgcac

SEQ ID NO: 18391 - RNA, 20 nt, synthetic construct
  source 1..20: mol_type = other RNA
agagatagaaagcaccaggg

SEQ ID NO: 18392 - RNA, 20 nt, synthetic construct
  source 1..20: mol_type = other RNA
agagatagtctcttcctgta

SEQ ID NO: 18393 - RNA, 20 nt, synthetic construct
  source 1..20: mol_type = other RNA
agagatctagtgaagtcaat

SEQ ID NO: 18394 - RNA, 20 nt, synthetic construct
  source 1..20: mol_type = other RNA
agagatctgaaattgacttc

SEQ ID NO: 18395 - RNA, 20 nt, synthetic construct
  source 1..20: mol_type = other RNA
agagatcttgtgtatctttt

SEQ ID NO: 18396 - RNA, 20 nt, synthetic construct
  source 1..20: mol_type = other RNA
agagatgaatggataaggaa

SEQ ID NO: 18397 - RNA, 20 nt, synthetic construct
  source 1..20: mol_type = other RNA
agagatgaggttttacgatg

SEQ ID NO: 18398 - RNA, 20 nt, synthetic construct
  source 1..20: mol_type = other RNA
agagatgcctatgaaatctt

SEQ ID NO: 18399 - RNA, 20 nt, synthetic construct
  source 1..20: mol_type = other RNA
agagatgcctgtgcttgtct

SEQ ID NO: 18400 - RNA, 20 nt, synthetic construct
  source 1..20: mol_type = other RNA
agagatgggaaagtattccc

SEQ ID NO: 18401 - RNA, 20 nt, synthetic construct
  source 1..20: mol_type = other RNA
agagatggtagtcaacactt

SEQ ID NO: 18402 - RNA, 20 nt, synthetic construct
  source 1..20: mol_type = other RNA
agagatggtgggagaggcat

SEQ ID NO: 18403 - RNA, 20 nt, synthetic construct
  source 1..20: mol_type = other RNA
agagattaaataacttccat

SEQ ID NO: 18404 - RNA, 20 nt, synthetic construct
  source 1..20: mol_type = other RNA
agagattaattcagtcaaca

SEQ ID NO: 18405 - RNA, 20 nt, synthetic construct
  source 1..20: mol_type = other RNA
agagattaggcagaaccacc

SEQ ID NO: 18406 - RNA, 20 nt, synthetic construct
  source 1..20: mol_type = other RNA
agagattcaagaaaccacag

SEQ ID NO: 18407 - RNA, 20 nt, synthetic construct
  source 1..20: mol_type = other RNA
agagattgggaaaatcttgg

SEQ ID NO: 18408 - RNA, 20 nt, synthetic construct
  source 1..20: mol_type = other RNA
agagattgtcgttgagtacc

SEQ ID NO: 18409 - RNA, 20 nt, synthetic construct
  source 1..20: mol_type = other RNA
agagatttgctgtataacat

SEQ ID NO: 18410 - RNA, 20 nt, synthetic construct
  source 1..20: mol_type = other RNA
agagattttcccaaagatag

SEQ ID NO: 18411 - RNA, 20 nt, synthetic construct
  source 1..20: mol_type = other RNA
agagcaaactcagatctgag

SEQ ID NO: 18412 - RNA, 20 nt, synthetic construct
  source 1..20: mol_type = other RNA
agagcaacaacctgtctcaa

SEQ ID NO: 18413 - RNA, 20 nt, synthetic construct
  source 1..20: mol_type = other RNA
agagcaagactcaaatctca

SEQ ID NO: 18414 - RNA, 20 nt, synthetic construct
  source 1..20: mol_type = other RNA
agagcaagcaacaccagata

SEQ ID NO: 18415 - RNA, 20 nt, synthetic construct
  source 1..20: mol_type = other RNA
agagcaagcacgttagcatc

SEQ ID NO: 18416 - RNA, 20 nt, synthetic construct
  source 1..20: mol_type = other RNA
agagcaagtccccatctcca

SEQ ID NO: 18417 - RNA, 20 nt, synthetic construct
  source 1..20: mol_type = other RNA
agagcacaccaagacatgtt

SEQ ID NO: 18418 - RNA, 20 nt, synthetic construct
  source 1..20: mol_type = other RNA
agagcacagactcaagcctg

SEQ ID NO: 18419 - RNA, 20 nt, synthetic construct
  source 1..20: mol_type = other RNA
agagcactatgtaaattatt

SEQ ID NO: 18420 - RNA, 20 nt, synthetic construct
  source 1..20: mol_type = other RNA
agagcactggtttcagtaca

SEQ ID NO: 18421 - RNA, 20 nt, synthetic construct
  source 1..20: mol_type = other RNA
agagcactttcgtatttttg

SEQ ID NO: 18422 - RNA, 20 nt, synthetic construct
  source 1..20: mol_type = other RNA
agagcagaactccacctcag

SEQ ID NO: 18423 - RNA, 20 nt, synthetic construct
  source 1..20: mol_type = other RNA
agagcagagacacacatcag

SEQ ID NO: 18424 - RNA, 20 nt, synthetic construct
  source 1..20: mol_type = other RNA
agagcagcactgatgtgtag

SEQ ID NO: 18425 - RNA, 20 nt, synthetic construct
  source 1..20: mol_type = other RNA
agagcaggctccacttgggt

SEQ ID NO: 18426 - RNA, 20 nt, synthetic construct
  source 1..20: mol_type = other RNA
agagcaggggtggggggatg

SEQ ID NO: 18427 - RNA, 20 nt, synthetic construct
  source 1..20: mol_type = other RNA
agagcaggtggaaggcctga

SEQ ID NO: 18428 - RNA, 20 nt, synthetic construct
  source 1..20: mol_type = other RNA
agagcagtaggcttagatag

SEQ ID NO: 18429 - RNA, 20 nt, synthetic construct
  source 1..20: mol_type = other RNA
agagcagtgtgttctgcctt

SEQ ID NO: 18430 - RNA, 20 nt, synthetic construct
  source 1..20: mol_type = other RNA
agagcatagactttagagtc

SEQ ID NO: 18431 - RNA, 20 nt, synthetic construct
  source 1..20: mol_type = other RNA
agagcatgtcccctggagtt

SEQ ID NO: 18432 - RNA, 20 nt, synthetic construct
  source 1..20: mol_type = other RNA
agagcatgttgggccaactt

SEQ ID NO: 18433 - RNA, 20 nt, synthetic construct
  source 1..20: mol_type = other RNA
agagcattgcctttattact

SEQ ID NO: 18434 - RNA, 20 nt, synthetic construct
  source 1..20: mol_type = other RNA
agagccaaagacattgtctt

SEQ ID NO: 18435 - RNA, 20 nt, synthetic construct
  source 1..20: mol_type = other RNA
agagccagcctgatgatgat

SEQ ID NO: 18436 - RNA, 20 nt, synthetic construct
  source 1..20: mol_type = other RNA
agagccaggaagtcagcaac

SEQ ID NO: 18437 - RNA, 20 nt, synthetic construct
  source 1..20: mol_type = other RNA
agagcccagaaataaatcct

SEQ ID NO: 18438 - RNA, 20 nt, synthetic construct
  source 1..20: mol_type = other RNA
agagccccaagaaagcaggt

SEQ ID NO: 18439 - RNA, 20 nt, synthetic construct
  source 1..20: mol_type = other RNA
agagccgaaatgcacttagc

SEQ ID NO: 18440 - RNA, 20 nt, synthetic construct
  source 1..20: mol_type = other RNA
agagccgagcagaagggaaa

SEQ ID NO: 18441 - RNA, 20 nt, synthetic construct
  source 1..20: mol_type = other RNA
agagcctaaaataggcctag

SEQ ID NO: 18442 - RNA, 20 nt, synthetic construct
  source 1..20: mol_type = other RNA
agagcctaatgtgtaagaaa

SEQ ID NO: 18443 - RNA, 20 nt, synthetic construct
  source 1..20: mol_type = other RNA
agagcctgtggtctcttcga

SEQ ID NO: 18444 - RNA, 20 nt, synthetic construct
  source 1..20: mol_type = other RNA
agagcgaagagggagaagaa

SEQ ID NO: 18445 - RNA, 20 nt, synthetic construct
  source 1..20: mol_type = other RNA
agagcgacagctacggagga

SEQ ID NO: 18446 - RNA, 20 nt, synthetic construct
  source 1..20: mol_type = other RNA
agagcgaggcctggaacagg

SEQ ID NO: 18447 - RNA, 20 nt, synthetic construct
  source 1..20: mol_type = other RNA
agagcgcttctatgtgacaa

SEQ ID NO: 18448 - RNA, 20 nt, synthetic construct
  source 1..20: mol_type = other RNA
agagcggaatttttatatta

SEQ ID NO: 18449 - RNA, 20 nt, synthetic construct
  source 1..20: mol_type = other RNA
agagcggcctttgcctctcc

SEQ ID NO: 18450 - RNA, 20 nt, synthetic construct
  source 1..20: mol_type = other RNA
agagcgggtttcctcggtct

SEQ ID NO: 18451 - RNA, 20 nt, synthetic construct
  source 1..20: mol_type = other RNA
agagcgtcgtacctttcgct

SEQ ID NO: 18452 - RNA, 20 nt, synthetic construct
  source 1..20: mol_type = other RNA
agagctaagactataaaact

SEQ ID NO: 18453 - RNA, 20 nt, synthetic construct
  source 1..20: mol_type = other RNA
agagctaagatgctattcaa

SEQ ID NO: 18454 - RNA, 20 nt, synthetic construct
  source 1..20: mol_type = other RNA
agagctaagggaagtttttt

SEQ ID NO: 18455 - RNA, 20 nt, synthetic construct
  source 1..20: mol_type = other RNA
agagctagaactagaatact

SEQ ID NO: 18456 - RNA, 20 nt, synthetic construct
  source 1..20: mol_type = other RNA
agagctcacacgagaaggac

SEQ ID NO: 18457 - RNA, 20 nt, synthetic construct
  source 1..20: mol_type = other RNA
agagctcaggccagtgagtg

SEQ ID NO: 18458 - RNA, 20 nt, synthetic construct
  source 1..20: mol_type = other RNA
agagctgctgtaacaaagat

SEQ ID NO: 18459 - RNA, 20 nt, synthetic construct
  source 1..20: mol_type = other RNA
agagctgggactacaggtgt

SEQ ID NO: 18460 - RNA, 20 nt, synthetic construct
  source 1..20: mol_type = other RNA
agagctgggcccgcagtggc

SEQ ID NO: 18461 - RNA, 20 nt, synthetic construct
  source 1..20: mol_type = other RNA
agagctgtaacagaggcatg

SEQ ID NO: 18462 - RNA, 20 nt, synthetic construct
  source 1..20: mol_type = other RNA
agagctgtgccgaggcagag

SEQ ID NO: 18463 - RNA, 20 nt, synthetic construct
  source 1..20: mol_type = other RNA
agagcttcaacctcctgggc

SEQ ID NO: 18464 - RNA, 20 nt, synthetic construct
  source 1..20: mol_type = other RNA
agagctttcttttaaagacc

SEQ ID NO: 18465 - RNA, 20 nt, synthetic construct
  source 1..20: mol_type = other RNA
agagctttgttatgaaaata

SEQ ID NO: 18466 - RNA, 20 nt, synthetic construct
  source 1..20: mol_type = other RNA
agagcttttattttactctc

SEQ ID NO: 18467 - RNA, 20 nt, synthetic construct
  source 1..20: mol_type = other RNA
agaggaagcttataatttct

SEQ ID NO: 18468 - RNA, 20 nt, synthetic construct
  source 1..20: mol_type = other RNA
agaggaaggttcaagtttgg

SEQ ID NO: 18469 - RNA, 20 nt, synthetic construct
  source 1..20: mol_type = other RNA
agaggaagtgaccctgagtc

SEQ ID NO: 18470 - RNA, 20 nt, synthetic construct
  source 1..20: mol_type = other RNA
agaggaataaatggtagctt

SEQ ID NO: 18471 - RNA, 20 nt, synthetic construct
  source 1..20: mol_type = other RNA
agaggacagttggccttgag

SEQ ID NO: 18472 - RNA, 20 nt, synthetic construct
  source 1..20: mol_type = other RNA
agaggacgatttttccaaca

SEQ ID NO: 18473 - RNA, 20 nt, synthetic construct
  source 1..20: mol_type = other RNA
agaggactgcctattttgta

SEQ ID NO: 18474 - RNA, 20 nt, synthetic construct
  source 1..20: mol_type = other RNA
agaggactgcctggtcctga

SEQ ID NO: 18475 - RNA, 20 nt, synthetic construct
  source 1..20: mol_type = other RNA
agaggagacattacaattga

SEQ ID NO: 18476 - RNA, 20 nt, synthetic construct
  source 1..20: mol_type = other RNA
agaggagcagttactcctga

SEQ ID NO: 18477 - RNA, 20 nt, synthetic construct
  source 1..20: mol_type = other RNA
agaggagcgccctggcattg

SEQ ID NO: 18478 - RNA, 20 nt, synthetic construct
  source 1..20: mol_type = other RNA
agaggaggaagagatagtct

SEQ ID NO: 18479 - RNA, 20 nt, synthetic construct
  source 1..20: mol_type = other RNA
agaggaggagggttagatta

SEQ ID NO: 18480 - RNA, 20 nt, synthetic construct
  source 1..20: mol_type = other RNA
agaggagggatgcattctag

SEQ ID NO: 18481 - RNA, 20 nt, synthetic construct
  source 1..20: mol_type = other RNA
agaggataaggggcagggtg

SEQ ID NO: 18482 - RNA, 20 nt, synthetic construct
  source 1..20: mol_type = other RNA
agaggatgggcattccagag

SEQ ID NO: 18483 - RNA, 20 nt, synthetic construct
  source 1..20: mol_type = other RNA
agaggattccaggtttacag

SEQ ID NO: 18484 - RNA, 20 nt, synthetic construct
  source 1..20: mol_type = other RNA
agaggattttggattgcgat

SEQ ID NO: 18485 - RNA, 20 nt, synthetic construct
  source 1..20: mol_type = other RNA
agaggcaaaactcctgaaca

SEQ ID NO: 18486 - RNA, 20 nt, synthetic construct
  source 1..20: mol_type = other RNA
agaggcaaaggccgctcttg

SEQ ID NO: 18487 - RNA, 20 nt, synthetic construct
  source 1..20: mol_type = other RNA
agaggcaacagtcattcagg

SEQ ID NO: 18488 - RNA, 20 nt, synthetic construct
  source 1..20: mol_type = other RNA
agaggcagctaagcaccaac

SEQ ID NO: 18489 - RNA, 20 nt, synthetic construct
  source 1..20: mol_type = other RNA
agaggcagttgagttttcaa

SEQ ID NO: 18490 - RNA, 20 nt, synthetic construct
  source 1..20: mol_type = other RNA
agaggcatgcacggacttgg

SEQ ID NO: 18491 - RNA, 20 nt, synthetic construct
  source 1..20: mol_type = other RNA
agaggcatgccgggacaaga

SEQ ID NO: 18492 - RNA, 20 nt, synthetic construct
  source 1..20: mol_type = other RNA
agaggccaaatgaaaggcgt

SEQ ID NO: 18493 - RNA, 20 nt, synthetic construct
  source 1..20: mol_type = other RNA
agaggccacaaagtccccac

SEQ ID NO: 18494 - RNA, 20 nt, synthetic construct
  source 1..20: mol_type = other RNA
agaggccctggtgctttcta

SEQ ID NO: 18495 - RNA, 20 nt, synthetic construct
  source 1..20: mol_type = other RNA
agaggccgagggttgaacat

SEQ ID NO: 18496 - RNA, 20 nt, synthetic construct
  source 1..20: mol_type = other RNA
agaggcctcatgtattttcc

SEQ ID NO: 18497 - RNA, 20 nt, synthetic construct
  source 1..20: mol_type = other RNA
agaggctaggtgacctgcca

SEQ ID NO: 18498 - RNA, 20 nt, synthetic construct
  source 1..20: mol_type = other RNA
agaggctgcaccctcctcct

SEQ ID NO: 18499 - RNA, 20 nt, synthetic construct
  source 1..20: mol_type = other RNA
agaggctgtattgtaggaaa

SEQ ID NO: 18500 - RNA, 20 nt, synthetic construct
  source 1..20: mol_type = other RNA
agaggctttaagcagaaagt

SEQ ID NO: 18501 - RNA, 20 nt, synthetic construct
  source 1..20: mol_type = other RNA
agaggctttctgtgtaatac

SEQ ID NO: 18502 - RNA, 20 nt, synthetic construct
  source 1..20: mol_type = other RNA
agaggctttttatatttccg

SEQ ID NO: 18503 - RNA, 20 nt, synthetic construct
  source 1..20: mol_type = other RNA
agaggctttttattagattt

SEQ ID NO: 18504 - RNA, 20 nt, synthetic construct
  source 1..20: mol_type = other RNA
agagggaaactgtttttgca

SEQ ID NO: 18505 - RNA, 20 nt, synthetic construct
  source 1..20: mol_type = other RNA
agagggaacattttcatttt

SEQ ID NO: 18506 - RNA, 20 nt, synthetic construct
  source 1..20: mol_type = other RNA
agagggaagtactgagtcaa

SEQ ID NO: 18507 - RNA, 20 nt, synthetic construct
  source 1..20: mol_type = other RNA
agagggaatctaggaaacac

SEQ ID NO: 18508 - RNA, 20 nt, synthetic construct
  source 1..20: mol_type = other RNA
agagggaatttgttttacca

SEQ ID NO: 18509 - RNA, 20 nt, synthetic construct
  source 1..20: mol_type = other RNA
agagggagaagaaataaacg

SEQ ID NO: 18510 - RNA, 20 nt, synthetic construct
  source 1..20: mol_type = other RNA
agagggagaccgtgggggga

SEQ ID NO: 18511 - RNA, 20 nt, synthetic construct
  source 1..20: mol_type = other RNA
agagggagcagcgggcggcc

SEQ ID NO: 18512 - RNA, 20 nt, synthetic construct
  source 1..20: mol_type = other RNA
agagggagcatcttcccatg

SEQ ID NO: 18513 - RNA, 20 nt, synthetic construct
  source 1..20: mol_type = other RNA
agagggagcgccacgtgaag

SEQ ID NO: 18514 - RNA, 20 nt, synthetic construct
  source 1..20: mol_type = other RNA
agagggagctctgtcttgat

SEQ ID NO: 18515 - RNA, 20 nt, synthetic construct
  source 1..20: mol_type = other RNA
agagggatgaatgttgtaca

SEQ ID NO: 18516 - RNA, 20 nt, synthetic construct
  source 1..20: mol_type = other RNA
agagggcctaaataaaacac

SEQ ID NO: 18517 - RNA, 20 nt, synthetic construct
  source 1..20: mol_type = other RNA
agagggcttcatgctgggag

SEQ ID NO: 18518 - RNA, 20 nt, synthetic construct
  source 1..20: mol_type = other RNA
agagggggcataacatctat

SEQ ID NO: 18519 - RNA, 20 nt, synthetic construct
  source 1..20: mol_type = other RNA
agaggggggaagcttttcat

SEQ ID NO: 18520 - RNA, 20 nt, synthetic construct
  source 1..20: mol_type = other RNA
agagggtaacgtgagctgga

SEQ ID NO: 18521 - RNA, 20 nt, synthetic construct
  source 1..20: mol_type = other RNA
agagggtaagaccaaaatgg

SEQ ID NO: 18522 - RNA, 20 nt, synthetic construct
  source 1..20: mol_type = other RNA
agaggtactcaacgacaatc

SEQ ID NO: 18523 - RNA, 20 nt, synthetic construct
  source 1..20: mol_type = other RNA
agaggtatcaccatctgata

SEQ ID NO: 18524 - RNA, 20 nt, synthetic construct
  source 1..20: mol_type = other RNA
agaggtatttggggctagga

SEQ ID NO: 18525 - RNA, 20 nt, synthetic construct
  source 1..20: mol_type = other RNA
agaggtcaggaaggcaggag

SEQ ID NO: 18526 - RNA, 20 nt, synthetic construct
  source 1..20: mol_type = other RNA
agaggtctgtctttcagtat

SEQ ID NO: 18527 - RNA, 20 nt, synthetic construct
  source 1..20: mol_type = other RNA
agaggtctgttactcccgat

SEQ ID NO: 18528 - RNA, 20 nt, synthetic construct
  source 1..20: mol_type = other RNA
agaggtgaactattagagct

SEQ ID NO: 18529 - RNA, 20 nt, synthetic construct
  source 1..20: mol_type = other RNA
agaggtgaagttaagggcca

SEQ ID NO: 18530 - RNA, 20 nt, synthetic construct
  source 1..20: mol_type = other RNA
agaggtgagctttttctttt

SEQ ID NO: 18531 - RNA, 20 nt, synthetic construct
  source 1..20: mol_type = other RNA
agaggttaaaaccacaaaca

SEQ ID NO: 18532 - RNA, 20 nt, synthetic construct
  source 1..20: mol_type = other RNA
agaggttaaagcaacaggaa

SEQ ID NO: 18533 - RNA, 20 nt, synthetic construct
  source 1..20: mol_type = other RNA
agaggttcttttaaatgcca

SEQ ID NO: 18534 - RNA, 20 nt, synthetic construct
  source 1..20: mol_type = other RNA
agaggttgcagtgaagccga

SEQ ID NO: 18535 - RNA, 20 nt, synthetic construct
  source 1..20: mol_type = other RNA
agagtaaaataaaagctcta

SEQ ID NO: 18536 - RNA, 20 nt, synthetic construct
  source 1..20: mol_type = other RNA
agagtaactggtccagatga

SEQ ID NO: 18537 - RNA, 20 nt, synthetic construct
  source 1..20: mol_type = other RNA
agagtaactgtcatcagcgt

SEQ ID NO: 18538 - RNA, 20 nt, synthetic construct
  source 1..20: mol_type = other RNA
agagtaagcaactgcatctt

SEQ ID NO: 18539 - RNA, 20 nt, synthetic construct
  source 1..20: mol_type = other RNA
agagtaagttgcatacgtcg

SEQ ID NO: 18540 - RNA, 20 nt, synthetic construct
  source 1..20: mol_type = other RNA
agagtaatggttggccgagg

SEQ ID NO: 18541 - RNA, 20 nt, synthetic construct
  source 1..20: mol_type = other RNA
agagtaccaggtcagccaga

SEQ ID NO: 18542 - RNA, 20 nt, synthetic construct
  source 1..20: mol_type = other RNA
agagtagagaaggctttgtg

SEQ ID NO: 18543 - RNA, 20 nt, synthetic construct
  source 1..20: mol_type = other RNA
agagtagattcccccttatg

SEQ ID NO: 18544 - RNA, 20 nt, synthetic construct
  source 1..20: mol_type = other RNA
agagtatatatgctccctaa

SEQ ID NO: 18545 - RNA, 20 nt, synthetic construct
  source 1..20: mol_type = other RNA
agagtatctttttcagcagc

SEQ ID NO: 18546 - RNA, 20 nt, synthetic construct
  source 1..20: mol_type = other RNA
agagtattacctatgaatag

SEQ ID NO: 18547 - RNA, 20 nt, synthetic construct
  source 1..20: mol_type = other RNA
agagtattgccaggtttgtg

SEQ ID NO: 18548 - RNA, 20 nt, synthetic construct
  source 1..20: mol_type = other RNA
agagtcagttgtttacttgg

SEQ ID NO: 18549 - RNA, 20 nt, synthetic construct
  source 1..20: mol_type = other RNA
agagtccccaactgcaaaac

SEQ ID NO: 18550 - RNA, 20 nt, synthetic construct
  source 1..20: mol_type = other RNA
agagtcctgagggtgagacc

SEQ ID NO: 18551 - RNA, 20 nt, synthetic construct
  source 1..20: mol_type = other RNA
agagtcgcttgaacctgaaa

SEQ ID NO: 18552 - RNA, 20 nt, synthetic construct
  source 1..20: mol_type = other RNA
agagtctatctttgggaaaa

SEQ ID NO: 18553 - RNA, 20 nt, synthetic construct
  source 1..20: mol_type = other RNA
agagtctcatctgtcaaaaa

SEQ ID NO: 18554 - RNA, 20 nt, synthetic construct
  source 1..20: mol_type = other RNA
agagtctcttaagaccacaa

SEQ ID NO: 18555 - RNA, 20 nt, synthetic construct
  source 1..20: mol_type = other RNA
agagtctgcagaccaagaaa

SEQ ID NO: 18556 - RNA, 20 nt, synthetic construct
  source 1..20: mol_type = other RNA
agagtgaaaacacaaactgc

SEQ ID NO: 18557 - RNA, 20 nt, synthetic construct
  source 1..20: mol_type = other RNA
agagtgaaaagaaacaagtg

SEQ ID NO: 18558 - RNA, 20 nt, synthetic construct
  source 1..20: mol_type = other RNA
agagtgaaaaggcaaaccac

SEQ ID NO: 18559 - RNA, 20 nt, synthetic construct
  source 1..20: mol_type = other RNA
agagtgaaactctggctcag

SEQ ID NO: 18560 - RNA, 20 nt, synthetic construct
  source 1..20: mol_type = other RNA
agagtgaaatgatttcaagt

SEQ ID NO: 18561 - RNA, 20 nt, synthetic construct
  source 1..20: mol_type = other RNA
agagtgaacaggcaaccttg

SEQ ID NO: 18562 - RNA, 20 nt, synthetic construct
  source 1..20: mol_type = other RNA
agagtgaagaaacctttctc

SEQ ID NO: 18563 - RNA, 20 nt, synthetic construct
  source 1..20: mol_type = other RNA
agagtgaagctggaccctta

SEQ ID NO: 18564 - RNA, 20 nt, synthetic construct
  source 1..20: mol_type = other RNA
agagtgacagctgagtagcg

SEQ ID NO: 18565 - RNA, 20 nt, synthetic construct
  source 1..20: mol_type = other RNA
agagtgcacattccttcttc

SEQ ID NO: 18566 - RNA, 20 nt, synthetic construct
  source 1..20: mol_type = other RNA
agagtgcagtatgtaggaaa

SEQ ID NO: 18567 - RNA, 20 nt, synthetic construct
  source 1..20: mol_type = other RNA
agagtgctgggtagagactg

SEQ ID NO: 18568 - RNA, 20 nt, synthetic construct
  source 1..20: mol_type = other RNA
agagtggaaagagccagcct

SEQ ID NO: 18569 - RNA, 20 nt, synthetic construct
  source 1..20: mol_type = other RNA
agagtggcctaaatcaggat

SEQ ID NO: 18570 - RNA, 20 nt, synthetic construct
  source 1..20: mol_type = other RNA
agagtggctaatgtggcttg

SEQ ID NO: 18571 - RNA, 20 nt, synthetic construct
  source 1..20: mol_type = other RNA
agagtgggcaaaaaagtcat

SEQ ID NO: 18572 - RNA, 20 nt, synthetic construct
  source 1..20: mol_type = other RNA
agagtgggcccagcagaagg

SEQ ID NO: 18573 - RNA, 20 nt, synthetic construct
  source 1..20: mol_type = other RNA
agagtgtgctgactagtacg

SEQ ID NO: 18574 - RNA, 20 nt, synthetic construct
  source 1..20: mol_type = other RNA
agagtgtggctttaaggcgc

SEQ ID NO: 18575 - RNA, 20 nt, synthetic construct
  source 1..20: mol_type = other RNA
agagtgttcaaaagccccaa

SEQ ID NO: 18576 - RNA, 20 nt, synthetic construct
  source 1..20: mol_type = other RNA
agagttaaaactcacaaaaa

SEQ ID NO: 18577 - RNA, 20 nt, synthetic construct
  source 1..20: mol_type = other RNA
agagttacttctggaaagtt

SEQ ID NO: 18578 - RNA, 20 nt, synthetic construct
  source 1..20: mol_type = other RNA
agagttcagcttacagtcat

SEQ ID NO: 18579 - RNA, 20 nt, synthetic construct
  source 1..20: mol_type = other RNA
agagttccaactgtataaat

SEQ ID NO: 18580 - RNA, 20 nt, synthetic construct
  source 1..20: mol_type = other RNA
agagttccacctccatcact

SEQ ID NO: 18581 - RNA, 20 nt, synthetic construct
  source 1..20: mol_type = other RNA
agagttccatctgttatagt

SEQ ID NO: 18582 - RNA, 20 nt, synthetic construct
  source 1..20: mol_type = other RNA
agagttcccctatactgtaa

SEQ ID NO: 18583 - RNA, 20 nt, synthetic construct
  source 1..20: mol_type = other RNA
agagttctgaaggctcagcc

SEQ ID NO: 18584 - RNA, 20 nt, synthetic construct
  source 1..20: mol_type = other RNA
agagttgctgacttcctggc

SEQ ID NO: 18585 - RNA, 20 nt, synthetic construct
  source 1..20: mol_type = other RNA
agagttggcacagccagtca

SEQ ID NO: 18586 - RNA, 20 nt, synthetic construct
  source 1..20: mol_type = other RNA
agagttgtaacacatattta

SEQ ID NO: 18587 - RNA, 20 nt, synthetic construct
  source 1..20: mol_type = other RNA
agagttgtatctgtgatccc

SEQ ID NO: 18588 - RNA, 20 nt, synthetic construct
  source 1..20: mol_type = other RNA
agagtttgcattacatgaat

SEQ ID NO: 18589 - RNA, 20 nt, synthetic construct
  source 1..20: mol_type = other RNA
agagttttatagtcttagct

SEQ ID NO: 18590 - RNA, 20 nt, synthetic construct
  source 1..20: mol_type = other RNA
agagttttccaataagttaa

SEQ ID NO: 18591 - RNA, 20 nt, synthetic construct
  source 1..20: mol_type = other RNA
agataaaacctggaatgggt

SEQ ID NO: 18592 - RNA, 20 nt, synthetic construct
  source 1..20: mol_type = other RNA
agataaacgttaactatttc

SEQ ID NO: 18593 - RNA, 20 nt, synthetic construct
  source 1..20: mol_type = other RNA
agataaactagattaccttg

SEQ ID NO: 18594 - RNA, 20 nt, synthetic construct
  source 1..20: mol_type = other RNA
agataaactggaattcatca

SEQ ID NO: 18595 - RNA, 20 nt, synthetic construct
  source 1..20: mol_type = other RNA
agataaagagcaggtggaag

SEQ ID NO: 18596 - RNA, 20 nt, synthetic construct
  source 1..20: mol_type = other RNA
agataaaggtaaggaaaccc

SEQ ID NO: 18597 - RNA, 20 nt, synthetic construct
  source 1..20: mol_type = other RNA
agataaatcagaaactgaca

SEQ ID NO: 18598 - RNA, 20 nt, synthetic construct
  source 1..20: mol_type = other RNA
agataaatccaacgaccgga

SEQ ID NO: 18599 - RNA, 20 nt, synthetic construct
  source 1..20: mol_type = other RNA
agataaattacccaaagact

SEQ ID NO: 18600 - RNA, 20 nt, synthetic construct
  source 1..20: mol_type = other RNA
agataaattatagctccaaa

SEQ ID NO: 18601 - RNA, 20 nt, synthetic construct
  source 1..20: mol_type = other RNA
agataacaaagggttcttgg

SEQ ID NO: 18602 - RNA, 20 nt, synthetic construct
  source 1..20: mol_type = other RNA
agataacagtggttaggaaa

SEQ ID NO: 18603 - RNA, 20 nt, synthetic construct
  source 1..20: mol_type = other RNA
agataaccaataagaagtga

SEQ ID NO: 18604 - RNA, 20 nt, synthetic construct
  source 1..20: mol_type = other RNA
agataactaatgagaatttc

SEQ ID NO: 18605 - RNA, 20 nt, synthetic construct
  source 1..20: mol_type = other RNA
agataactgggtgtgcacgt

SEQ ID NO: 18606 - RNA, 20 nt, synthetic construct
  source 1..20: mol_type = other RNA
agataagaaaatgtgacatt

SEQ ID NO: 18607 - RNA, 20 nt, synthetic construct
  source 1..20: mol_type = other RNA
agataagatccaagtattgt

SEQ ID NO: 18608 - RNA, 20 nt, synthetic construct
  source 1..20: mol_type = other RNA
agataagcaaaattgacaaa

SEQ ID NO: 18609 - RNA, 20 nt, synthetic construct
  source 1..20: mol_type = other RNA
agataaggttgttcttggtt

SEQ ID NO: 18610 - RNA, 20 nt, synthetic construct
  source 1..20: mol_type = other RNA
agataagtagaaggtcaatc

SEQ ID NO: 18611 - RNA, 20 nt, synthetic construct
  source 1..20: mol_type = other RNA
agataatgctgttctctgtg

SEQ ID NO: 18612 - RNA, 20 nt, synthetic construct
  source 1..20: mol_type = other RNA
agataatgttagaattcagg

SEQ ID NO: 18613 - RNA, 20 nt, synthetic construct
  source 1..20: mol_type = other RNA
agataatttcttcagaagaa

SEQ ID NO: 18614 - RNA, 20 nt, synthetic construct
  source 1..20: mol_type = other RNA
agatacaactctgaccattg

SEQ ID NO: 18615 - RNA, 20 nt, synthetic construct
  source 1..20: mol_type = other RNA
agatacacaagatctctatg

SEQ ID NO: 18616 - RNA, 20 nt, synthetic construct
  source 1..20: mol_type = other RNA
agatacagaaataaaacatg

SEQ ID NO: 18617 - RNA, 20 nt, synthetic construct
  source 1..20: mol_type = other RNA
agataccagaccctttatcg

SEQ ID NO: 18618 - RNA, 20 nt, synthetic construct
  source 1..20: mol_type = other RNA
agataccttgaaaggatact

SEQ ID NO: 18619 - RNA, 20 nt, synthetic construct
  source 1..20: mol_type = other RNA
agatacgaaaatcctatata

SEQ ID NO: 18620 - RNA, 20 nt, synthetic construct
  source 1..20: mol_type = other RNA
agatacgttaaaggaaaaga

SEQ ID NO: 18621 - RNA, 20 nt, synthetic construct
  source 1..20: mol_type = other RNA
agatactacgcctagctgac

SEQ ID NO: 18622 - RNA, 20 nt, synthetic construct
  source 1..20: mol_type = other RNA
agatactcaacatcactagc

SEQ ID NO: 18623 - RNA, 20 nt, synthetic construct
  source 1..20: mol_type = other RNA
agatactcaatcagtggcca

SEQ ID NO: 18624 - RNA, 20 nt, synthetic construct
  source 1..20: mol_type = other RNA
agatactcatgcttgctcca

SEQ ID NO: 18625 - RNA, 20 nt, synthetic construct
  source 1..20: mol_type = other RNA
agatactcttaaagtttcaa

SEQ ID NO: 18626 - RNA, 20 nt, synthetic construct
  source 1..20: mol_type = other RNA
agatactgcactaaactagt

SEQ ID NO: 18627 - RNA, 20 nt, synthetic construct
  source 1..20: mol_type = other RNA
agatactggccatgttttat

SEQ ID NO: 18628 - RNA, 20 nt, synthetic construct
  source 1..20: mol_type = other RNA
agatacttgattacaagggt

SEQ ID NO: 18629 - RNA, 20 nt, synthetic construct
  source 1..20: mol_type = other RNA
agatagaaaagacaatagct

SEQ ID NO: 18630 - RNA, 20 nt, synthetic construct
  source 1..20: mol_type = other RNA
agatagaaagcaccagggcc

SEQ ID NO: 18631 - RNA, 20 nt, synthetic construct
  source 1..20: mol_type = other RNA
agatagaccagatgcgtggt

SEQ ID NO: 18632 - RNA, 20 nt, synthetic construct
  source 1..20: mol_type = other RNA
agatagactcttcagaggtc

SEQ ID NO: 18633 - RNA, 20 nt, synthetic construct
  source 1..20: mol_type = other RNA
agatagccccttatcaggaa

SEQ ID NO: 18634 - RNA, 20 nt, synthetic construct
  source 1..20: mol_type = other RNA
agataggatgggcagactcc

SEQ ID NO: 18635 - RNA, 20 nt, synthetic construct
  source 1..20: mol_type = other RNA
agataggtcatgtacataaa

SEQ ID NO: 18636 - RNA, 20 nt, synthetic construct
  source 1..20: mol_type = other RNA
agatagtactgaccatctca

SEQ ID NO: 18637 - RNA, 20 nt, synthetic construct
  source 1..20: mol_type = other RNA
agatagtctcttcctgtata

SEQ ID NO: 18638 - RNA, 20 nt, synthetic construct
  source 1..20: mol_type = other RNA
agatagtggtttgaagcttc

SEQ ID NO: 18639 - RNA, 20 nt, synthetic construct
  source 1..20: mol_type = other RNA
agatataaaaatggtcaaca

SEQ ID NO: 18640 - RNA, 20 nt, synthetic construct
  source 1..20: mol_type = other RNA
agatatacaggaagagacta

SEQ ID NO: 18641 - RNA, 20 nt, synthetic construct
  source 1..20: mol_type = other RNA
agatatatgcattcccatgt

SEQ ID NO: 18642 - RNA, 20 nt, synthetic construct
  source 1..20: mol_type = other RNA
agatatcaatctggatataa

SEQ ID NO: 18643 - RNA, 20 nt, synthetic construct
  source 1..20: mol_type = other RNA
agatatcacccagaccaagt

SEQ ID NO: 18644 - RNA, 20 nt, synthetic construct
  source 1..20: mol_type = other RNA
agatatccacagtatgctgt

SEQ ID NO: 18645 - RNA, 20 nt, synthetic construct
  source 1..20: mol_type = other RNA
agatatccataaggaaaaaa

SEQ ID NO: 18646 - RNA, 20 nt, synthetic construct
  source 1..20: mol_type = other RNA
agatatcccatataagggga

SEQ ID NO: 18647 - RNA, 20 nt, synthetic construct
  source 1..20: mol_type = other RNA
agatatgaaagaggagacat

SEQ ID NO: 18648 - RNA, 20 nt, synthetic construct
  source 1..20: mol_type = other RNA
agatatgggagtccctgctt

SEQ ID NO: 18649 - RNA, 20 nt, synthetic construct
  source 1..20: mol_type = other RNA
agatatgggttattcaccca

SEQ ID NO: 18650 - RNA, 20 nt, synthetic construct
  source 1..20: mol_type = other RNA
agatatgtgatttgtagata

SEQ ID NO: 18651 - RNA, 20 nt, synthetic construct
  source 1..20: mol_type = other RNA
agatatgtgtaggaaggaac

SEQ ID NO: 18652 - RNA, 20 nt, synthetic construct
  source 1..20: mol_type = other RNA
agatattagctacaaaaggg

SEQ ID NO: 18653 - RNA, 20 nt, synthetic construct
  source 1..20: mol_type = other RNA
agatattatcctccaatgtt

SEQ ID NO: 18654 - RNA, 20 nt, synthetic construct
  source 1..20: mol_type = other RNA
agatattggcaacattttaa

SEQ ID NO: 18655 - RNA, 20 nt, synthetic construct
  source 1..20: mol_type = other RNA
agatatttcgcctagataag

SEQ ID NO: 18656 - RNA, 20 nt, synthetic construct
  source 1..20: mol_type = other RNA
agatattttctgtcattctg

SEQ ID NO: 18657 - RNA, 20 nt, synthetic construct
  source 1..20: mol_type = other RNA
agatcaaacgtgctttcctt

SEQ ID NO: 18658 - RNA, 20 nt, synthetic construct
  source 1..20: mol_type = other RNA
agatcaaatgactatgaata

SEQ ID NO: 18659 - RNA, 20 nt, synthetic construct
  source 1..20: mol_type = other RNA
agatcaagcccttccttgct

SEQ ID NO: 18660 - RNA, 20 nt, synthetic construct
  source 1..20: mol_type = other RNA
agatcaagctcgccgtctcc

SEQ ID NO: 18661 - RNA, 20 nt, synthetic construct
  source 1..20: mol_type = other RNA
agatcaagtatttcctatga

SEQ ID NO: 18662 - RNA, 20 nt, synthetic construct
  source 1..20: mol_type = other RNA
agatcaagtcctttccagag

SEQ ID NO: 18663 - RNA, 20 nt, synthetic construct
  source 1..20: mol_type = other RNA
agatcaattgaccaaacatg

SEQ ID NO: 18664 - RNA, 20 nt, synthetic construct
  source 1..20: mol_type = other RNA
agatcacaaggactggcttc

SEQ ID NO: 18665 - RNA, 20 nt, synthetic construct
  source 1..20: mol_type = other RNA
agatcacaaggtcagaagtt

SEQ ID NO: 18666 - RNA, 20 nt, synthetic construct
  source 1..20: mol_type = other RNA
agatcaccaggggctggggg

SEQ ID NO: 18667 - RNA, 20 nt, synthetic construct
  source 1..20: mol_type = other RNA
agatcacgaggtcgagagtt

SEQ ID NO: 18668 - RNA, 20 nt, synthetic construct
  source 1..20: mol_type = other RNA
agatcacgccactgcattcc

SEQ ID NO: 18669 - RNA, 20 nt, synthetic construct
  source 1..20: mol_type = other RNA
agatcagtaaaattcccttc

SEQ ID NO: 18670 - RNA, 20 nt, synthetic construct
  source 1..20: mol_type = other RNA
agatcagtaacaaataagaa

SEQ ID NO: 18671 - RNA, 20 nt, synthetic construct
  source 1..20: mol_type = other RNA
agatcataagcttttatttg

SEQ ID NO: 18672 - RNA, 20 nt, synthetic construct
  source 1..20: mol_type = other RNA
agatcatacacctggatcaa

SEQ ID NO: 18673 - RNA, 20 nt, synthetic construct
  source 1..20: mol_type = other RNA
agatcatatgataattctac

SEQ ID NO: 18674 - RNA, 20 nt, synthetic construct
  source 1..20: mol_type = other RNA
agatcatgggttttaatata

SEQ ID NO: 18675 - RNA, 20 nt, synthetic construct
  source 1..20: mol_type = other RNA
agatcatttagtaagtgtga

SEQ ID NO: 18676 - RNA, 20 nt, synthetic construct
  source 1..20: mol_type = other RNA
agatcatttcaaaccaatgt

SEQ ID NO: 18677 - RNA, 20 nt, synthetic construct
  source 1..20: mol_type = other RNA
agatcatttcacttgattac

SEQ ID NO: 18678 - RNA, 20 nt, synthetic construct
  source 1..20: mol_type = other RNA
agatccaagtattgtatcaa

SEQ ID NO: 18679 - RNA, 20 nt, synthetic construct
  source 1..20: mol_type = other RNA
agatcccaaaaaggttttta

SEQ ID NO: 18680 - RNA, 20 nt, synthetic construct
  source 1..20: mol_type = other RNA
agatcccaattacttccagt

SEQ ID NO: 18681 - RNA, 20 nt, synthetic construct
  source 1..20: mol_type = other RNA
agatcctcacatcagttacc

SEQ ID NO: 18682 - RNA, 20 nt, synthetic construct
  source 1..20: mol_type = other RNA
agatcctgaggaagctaatc

SEQ ID NO: 18683 - RNA, 20 nt, synthetic construct
  source 1..20: mol_type = other RNA
agatcctggattgctagtgt

SEQ ID NO: 18684 - RNA, 20 nt, synthetic construct
  source 1..20: mol_type = other RNA
agatctaaattttaagtgca

SEQ ID NO: 18685 - RNA, 20 nt, synthetic construct
  source 1..20: mol_type = other RNA
agatctaacaaacgcattgt

SEQ ID NO: 18686 - RNA, 20 nt, synthetic construct
  source 1..20: mol_type = other RNA
agatctagtgaagtcaattt

SEQ ID NO: 18687 - RNA, 20 nt, synthetic construct
  source 1..20: mol_type = other RNA
agatctcaaacagcctaatt

SEQ ID NO: 18688 - RNA, 20 nt, synthetic construct
  source 1..20: mol_type = other RNA
agatctcattttgaaaaaca

SEQ ID NO: 18689 - RNA, 20 nt, synthetic construct
  source 1..20: mol_type = other RNA
agatctctatgcagaaatct

SEQ ID NO: 18690 - RNA, 20 nt, synthetic construct
  source 1..20: mol_type = other RNA
agatctctgacattggttat

SEQ ID NO: 18691 - RNA, 20 nt, synthetic construct
  source 1..20: mol_type = other RNA
agatctcttttcctttaacg

SEQ ID NO: 18692 - RNA, 20 nt, synthetic construct
  source 1..20: mol_type = other RNA
agatctgaaattgacttcac

SEQ ID NO: 18693 - RNA, 20 nt, synthetic construct
  source 1..20: mol_type = other RNA
agatctgagaagactaagca

SEQ ID NO: 18694 - RNA, 20 nt, synthetic construct
  source 1..20: mol_type = other RNA
agatctgagagatagaaagc

SEQ ID NO: 18695 - RNA, 20 nt, synthetic construct
  source 1..20: mol_type = other RNA
agatctgagtttgctctgca

SEQ ID NO: 18696 - RNA, 20 nt, synthetic construct
  source 1..20: mol_type = other RNA
agatctgctgtaagctggta

SEQ ID NO: 18697 - RNA, 20 nt, synthetic construct
  source 1..20: mol_type = other RNA
agatctgcttgcagacaata

SEQ ID NO: 18698 - RNA, 20 nt, synthetic construct
  source 1..20: mol_type = other RNA
agatctgggataatgctatc

SEQ ID NO: 18699 - RNA, 20 nt, synthetic construct
  source 1..20: mol_type = other RNA
agatctgtctttggcccata

SEQ ID NO: 18700 - RNA, 20 nt, synthetic construct
  source 1..20: mol_type = other RNA
agatctgtggactttaggct

SEQ ID NO: 18701 - RNA, 20 nt, synthetic construct
  source 1..20: mol_type = other RNA
agatctgttgcagtccccgg

SEQ ID NO: 18702 - RNA, 20 nt, synthetic construct
  source 1..20: mol_type = other RNA
agatctgtttttcaaaatga

SEQ ID NO: 18703 - RNA, 20 nt, synthetic construct
  source 1..20: mol_type = other RNA
agatcttatggaatagttga

SEQ ID NO: 18704 - RNA, 20 nt, synthetic construct
  source 1..20: mol_type = other RNA
agatcttggccgaatgtggt

SEQ ID NO: 18705 - RNA, 20 nt, synthetic construct
  source 1..20: mol_type = other RNA
agatcttgtgtatcttttgt

SEQ ID NO: 18706 - RNA, 20 nt, synthetic construct
  source 1..20: mol_type = other RNA
agatctttttgtgtatatgg

SEQ ID NO: 18707 - RNA, 20 nt, synthetic construct
  source 1..20: mol_type = other RNA
agatgaaactaaatgtgagc

SEQ ID NO: 18708 - RNA, 20 nt, synthetic construct
  source 1..20: mol_type = other RNA
agatgaagcagggaaatgga

SEQ ID NO: 18709 - RNA, 20 nt, synthetic construct
  source 1..20: mol_type = other RNA
agatgaagtatagaaaggag

SEQ ID NO: 18710 - RNA, 20 nt, synthetic construct
  source 1..20: mol_type = other RNA
agatgaatctgcaactatca

SEQ ID NO: 18711 - RNA, 20 nt, synthetic construct
  source 1..20: mol_type = other RNA
agatgaatgagcaaggtcgt

SEQ ID NO: 18712 - RNA, 20 nt, synthetic construct
  source 1..20: mol_type = other RNA
agatgacagaaataatacaa

SEQ ID NO: 18713 - RNA, 20 nt, synthetic construct
  source 1..20: mol_type = other RNA
agatgacatttgcttttcct

SEQ ID NO: 18714 - RNA, 20 nt, synthetic construct
  source 1..20: mol_type = other RNA
agatgacgaaagtgaagccc

SEQ ID NO: 18715 - RNA, 20 nt, synthetic construct
  source 1..20: mol_type = other RNA
agatgacttcactggagaat

SEQ ID NO: 18716 - RNA, 20 nt, synthetic construct
  source 1..20: mol_type = other RNA
agatgagaaatacttggaca

SEQ ID NO: 18717 - RNA, 20 nt, synthetic construct
  source 1..20: mol_type = other RNA
agatgagactcttaatattg

SEQ ID NO: 18718 - RNA, 20 nt, synthetic construct
  source 1..20: mol_type = other RNA
agatgagagtggcctaaatc

SEQ ID NO: 18719 - RNA, 20 nt, synthetic construct
  source 1..20: mol_type = other RNA
agatgagcccaggagttgca

SEQ ID NO: 18720 - RNA, 20 nt, synthetic construct
  source 1..20: mol_type = other RNA
agatgaggtctcagcctttt

SEQ ID NO: 18721 - RNA, 20 nt, synthetic construct
  source 1..20: mol_type = other RNA
agatgaggttttacgatgtt

SEQ ID NO: 18722 - RNA, 20 nt, synthetic construct
  source 1..20: mol_type = other RNA
agatgatcctcccgccttgg

SEQ ID NO: 18723 - RNA, 20 nt, synthetic construct
  source 1..20: mol_type = other RNA
agatgatctaaatggtgtga

SEQ ID NO: 18724 - RNA, 20 nt, synthetic construct
  source 1..20: mol_type = other RNA
agatgatgaacaaaggcagg

SEQ ID NO: 18725 - RNA, 20 nt, synthetic construct
  source 1..20: mol_type = other RNA
agatgatgttttgaacgaat

SEQ ID NO: 18726 - RNA, 20 nt, synthetic construct
  source 1..20: mol_type = other RNA
agatgattcgcattgctaat

SEQ ID NO: 18727 - RNA, 20 nt, synthetic construct
  source 1..20: mol_type = other RNA
agatgcagaaaaagcatttt

SEQ ID NO: 18728 - RNA, 20 nt, synthetic construct
  source 1..20: mol_type = other RNA
agatgcagttgcttactcta

SEQ ID NO: 18729 - RNA, 20 nt, synthetic construct
  source 1..20: mol_type = other RNA
agatgcataagttctagaga

SEQ ID NO: 18730 - RNA, 20 nt, synthetic construct
  source 1..20: mol_type = other RNA
agatgcataccaagcccggc

SEQ ID NO: 18731 - RNA, 20 nt, synthetic construct
  source 1..20: mol_type = other RNA
agatgcattctgtcacatag

SEQ ID NO: 18732 - RNA, 20 nt, synthetic construct
  source 1..20: mol_type = other RNA
agatgccacaaatggagtga

SEQ ID NO: 18733 - RNA, 20 nt, synthetic construct
  source 1..20: mol_type = other RNA
agatgccatttataatagca

SEQ ID NO: 18734 - RNA, 20 nt, synthetic construct
  source 1..20: mol_type = other RNA
agatgcctagaaaggaattg

SEQ ID NO: 18735 - RNA, 20 nt, synthetic construct
  source 1..20: mol_type = other RNA
agatgcctatgaaatcttga

SEQ ID NO: 18736 - RNA, 20 nt, synthetic construct
  source 1..20: mol_type = other RNA
agatgcctcgaaggcctgct

SEQ ID NO: 18737 - RNA, 20 nt, synthetic construct
  source 1..20: mol_type = other RNA
agatgcctgtgcttgtctct

SEQ ID NO: 18738 - RNA, 20 nt, synthetic construct
  source 1..20: mol_type = other RNA
agatgcgtggttcacacctg

SEQ ID NO: 18739 - RNA, 20 nt, synthetic construct
  source 1..20: mol_type = other RNA
agatgctaaacagtacagta

SEQ ID NO: 18740 - RNA, 20 nt, synthetic construct
  source 1..20: mol_type = other RNA
agatgctattcaagacaagc

SEQ ID NO: 18741 - RNA, 20 nt, synthetic construct
  source 1..20: mol_type = other RNA
agatgctccctctatggcag

SEQ ID NO: 18742 - RNA, 20 nt, synthetic construct
  source 1..20: mol_type = other RNA
agatgctgaacttgtcacaa

SEQ ID NO: 18743 - RNA, 20 nt, synthetic construct
  source 1..20: mol_type = other RNA
agatgctggtggagtattct

SEQ ID NO: 18744 - RNA, 20 nt, synthetic construct
  source 1..20: mol_type = other RNA
agatgcttctagccaaagca

SEQ ID NO: 18745 - RNA, 20 nt, synthetic construct
  source 1..20: mol_type = other RNA
agatggaaagtggactatgt

SEQ ID NO: 18746 - RNA, 20 nt, synthetic construct
  source 1..20: mol_type = other RNA
agatggaactctattttcct

SEQ ID NO: 18747 - RNA, 20 nt, synthetic construct
  source 1..20: mol_type = other RNA
agatggacaaattaccatgt

SEQ ID NO: 18748 - RNA, 20 nt, synthetic construct
  source 1..20: mol_type = other RNA
agatggacactgcagatgaa

SEQ ID NO: 18749 - RNA, 20 nt, synthetic construct
  source 1..20: mol_type = other RNA
agatggagttacgctgccaa

SEQ ID NO: 18750 - RNA, 20 nt, synthetic construct
  source 1..20: mol_type = other RNA
agatggatttttctgtttct

SEQ ID NO: 18751 - RNA, 20 nt, synthetic construct
  source 1..20: mol_type = other RNA
agatggcaaacagactgagc

SEQ ID NO: 18752 - RNA, 20 nt, synthetic construct
  source 1..20: mol_type = other RNA
agatggcaagtttccattct

SEQ ID NO: 18753 - RNA, 20 nt, synthetic construct
  source 1..20: mol_type = other RNA
agatggcacataccatggaa

SEQ ID NO: 18754 - RNA, 20 nt, synthetic construct
  source 1..20: mol_type = other RNA
agatggccccaaaattaccc

SEQ ID NO: 18755 - RNA, 20 nt, synthetic construct
  source 1..20: mol_type = other RNA
agatggcctccctcactaag

SEQ ID NO: 18756 - RNA, 20 nt, synthetic construct
  source 1..20: mol_type = other RNA
agatggcgtgcgcctgtaat

SEQ ID NO: 18757 - RNA, 20 nt, synthetic construct
  source 1..20: mol_type = other RNA
agatggcttaggatcaccaa

SEQ ID NO: 18758 - RNA, 20 nt, synthetic construct
  source 1..20: mol_type = other RNA
agatgggaaagtattcccaa

SEQ ID NO: 18759 - RNA, 20 nt, synthetic construct
  source 1..20: mol_type = other RNA
agatgggaagaaaaaataaa

SEQ ID NO: 18760 - RNA, 20 nt, synthetic construct
  source 1..20: mol_type = other RNA
agatgggacttcactagtgg

SEQ ID NO: 18761 - RNA, 20 nt, synthetic construct
  source 1..20: mol_type = other RNA
agatggggacttgctctctt

SEQ ID NO: 18762 - RNA, 20 nt, synthetic construct
  source 1..20: mol_type = other RNA
agatggggattgagggttag

SEQ ID NO: 18763 - RNA, 20 nt, synthetic construct
  source 1..20: mol_type = other RNA
agatggggtctcattgtgtt

SEQ ID NO: 18764 - RNA, 20 nt, synthetic construct
  source 1..20: mol_type = other RNA
agatggtaaaacaaattccc

SEQ ID NO: 18765 - RNA, 20 nt, synthetic construct
  source 1..20: mol_type = other RNA
agatggtaaattggtcctgg

SEQ ID NO: 18766 - RNA, 20 nt, synthetic construct
  source 1..20: mol_type = other RNA
agatggtagtcaacactttt

SEQ ID NO: 18767 - RNA, 20 nt, synthetic construct
  source 1..20: mol_type = other RNA
agatggtcagtactatcttc

SEQ ID NO: 18768 - RNA, 20 nt, synthetic construct
  source 1..20: mol_type = other RNA
agatggtccttttttactga

SEQ ID NO: 18769 - RNA, 20 nt, synthetic construct
  source 1..20: mol_type = other RNA
agatggtgatacctcttact

SEQ ID NO: 18770 - RNA, 20 nt, synthetic construct
  source 1..20: mol_type = other RNA
agatggtgctgatttaaaat

SEQ ID NO: 18771 - RNA, 20 nt, synthetic construct
  source 1..20: mol_type = other RNA
agatggtgggagaggcatgc

SEQ ID NO: 18772 - RNA, 20 nt, synthetic construct
  source 1..20: mol_type = other RNA
agatggttggaagtttctgg

SEQ ID NO: 18773 - RNA, 20 nt, synthetic construct
  source 1..20: mol_type = other RNA
agatgtactggaagtgtaac

SEQ ID NO: 18774 - RNA, 20 nt, synthetic construct
  source 1..20: mol_type = other RNA
agatgtagagaaacaggatt

SEQ ID NO: 18775 - RNA, 20 nt, synthetic construct
  source 1..20: mol_type = other RNA
agatgtcaacattaagggaa

SEQ ID NO: 18776 - RNA, 20 nt, synthetic construct
  source 1..20: mol_type = other RNA
agatgtctccattttgccag

SEQ ID NO: 18777 - RNA, 20 nt, synthetic construct
  source 1..20: mol_type = other RNA
agatgtcttttaacttgctt

SEQ ID NO: 18778 - RNA, 20 nt, synthetic construct
  source 1..20: mol_type = other RNA
agatgtgagcccccacgccc

SEQ ID NO: 18779 - RNA, 20 nt, synthetic construct
  source 1..20: mol_type = other RNA
agatgtgcttaatcttcaca

SEQ ID NO: 18780 - RNA, 20 nt, synthetic construct
  source 1..20: mol_type = other RNA
agatgtgtaattgtaccttg

SEQ ID NO: 18781 - RNA, 20 nt, synthetic construct
  source 1..20: mol_type = other RNA
agatgtgtaccaaaagtcct

SEQ ID NO: 18782 - RNA, 20 nt, synthetic construct
  source 1..20: mol_type = other RNA
agatgttatgccccctcttc

SEQ ID NO: 18783 - RNA, 20 nt, synthetic construct
  source 1..20: mol_type = other RNA
agatgttgcggtgagcagag

SEQ ID NO: 18784 - RNA, 20 nt, synthetic construct
  source 1..20: mol_type = other RNA
agatgttttacacatgtcag

SEQ ID NO: 18785 - RNA, 20 nt, synthetic construct
  source 1..20: mol_type = other RNA
agatgttttcagttgcatga

SEQ ID NO: 18786 - RNA, 20 nt, synthetic construct
  source 1..20: mol_type = other RNA
agattaaataacttccatga

SEQ ID NO: 18787 - RNA, 20 nt, synthetic construct
  source 1..20: mol_type = other RNA
agattaaatacagagcacag

SEQ ID NO: 18788 - RNA, 20 nt, synthetic construct
  source 1..20: mol_type = other RNA
agattaaataccacctgaaa

SEQ ID NO: 18789 - RNA, 20 nt, synthetic construct
  source 1..20: mol_type = other RNA
agattaagcacatctgtctt

SEQ ID NO: 18790 - RNA, 20 nt, synthetic construct
  source 1..20: mol_type = other RNA
agattaagcatagtttgagt

SEQ ID NO: 18791 - RNA, 20 nt, synthetic construct
  source 1..20: mol_type = other RNA
agattaaggctggaggatgg

SEQ ID NO: 18792 - RNA, 20 nt, synthetic construct
  source 1..20: mol_type = other RNA
agattaatccttgtggtctt

SEQ ID NO: 18793 - RNA, 20 nt, synthetic construct
  source 1..20: mol_type = other RNA
agattaatcttgcaaaacaa

SEQ ID NO: 18794 - RNA, 20 nt, synthetic construct
  source 1..20: mol_type = other RNA
agattaatcttgtgaattga

SEQ ID NO: 18795 - RNA, 20 nt, synthetic construct
  source 1..20: mol_type = other RNA
agattaatgtaggtgtctga

SEQ ID NO: 18796 - RNA, 20 nt, synthetic construct
  source 1..20: mol_type = other RNA
agattaattcagtcaacacc

SEQ ID NO: 18797 - RNA, 20 nt, synthetic construct
  source 1..20: mol_type = other RNA
agattacaaaagaacaggac

SEQ ID NO: 18798 - RNA, 20 nt, synthetic construct
  source 1..20: mol_type = other RNA
agattacatagcaaggaagc

SEQ ID NO: 18799 - RNA, 20 nt, synthetic construct
  source 1..20: mol_type = other RNA
agattaccttgaagtttaat

SEQ ID NO: 18800 - RNA, 20 nt, synthetic construct
  source 1..20: mol_type = other RNA
agattactggatacaaggtc

SEQ ID NO: 18801 - RNA, 20 nt, synthetic construct
  source 1..20: mol_type = other RNA
agattagaaaattagctgac

SEQ ID NO: 18802 - RNA, 20 nt, synthetic construct
  source 1..20: mol_type = other RNA
agattagcgaaagggattct

SEQ ID NO: 18803 - RNA, 20 nt, synthetic construct
  source 1..20: mol_type = other RNA
agattagcttttacgaggac

SEQ ID NO: 18804 - RNA, 20 nt, synthetic construct
  source 1..20: mol_type = other RNA
agattaggaaacagattgat

SEQ ID NO: 18805 - RNA, 20 nt, synthetic construct
  source 1..20: mol_type = other RNA
agattaggcagaaccacctg

SEQ ID NO: 18806 - RNA, 20 nt, synthetic construct
  source 1..20: mol_type = other RNA
agattatatggtctaccatg

SEQ ID NO: 18807 - RNA, 20 nt, synthetic construct
  source 1..20: mol_type = other RNA
agattatgttccacatgtta

SEQ ID NO: 18808 - RNA, 20 nt, synthetic construct
  source 1..20: mol_type = other RNA
agattcaacaaaactggggg

SEQ ID NO: 18809 - RNA, 20 nt, synthetic construct
  source 1..20: mol_type = other RNA
agattcaagaaaccacagag

SEQ ID NO: 18810 - RNA, 20 nt, synthetic construct
  source 1..20: mol_type = other RNA
agattcaatgcaatacttaa

SEQ ID NO: 18811 - RNA, 20 nt, synthetic construct
  source 1..20: mol_type = other RNA
agattcaccaattgttaaca

SEQ ID NO: 18812 - RNA, 20 nt, synthetic construct
  source 1..20: mol_type = other RNA
agattcacgcacagggagat

SEQ ID NO: 18813 - RNA, 20 nt, synthetic construct
  source 1..20: mol_type = other RNA
agattcatatgctttgagct

SEQ ID NO: 18814 - RNA, 20 nt, synthetic construct
  source 1..20: mol_type = other RNA
agattcatcttgacttcact

SEQ ID NO: 18815 - RNA, 20 nt, synthetic construct
  source 1..20: mol_type = other RNA
agattcccccttatgtgtgt

SEQ ID NO: 18816 - RNA, 20 nt, synthetic construct
  source 1..20: mol_type = other RNA
agattccctctggccttcta

SEQ ID NO: 18817 - RNA, 20 nt, synthetic construct
  source 1..20: mol_type = other RNA
agattccgtctcaaaaaatt

SEQ ID NO: 18818 - RNA, 20 nt, synthetic construct
  source 1..20: mol_type = other RNA
agattccttttttatgtgct

SEQ ID NO: 18819 - RNA, 20 nt, synthetic construct
  source 1..20: mol_type = other RNA
agattctctgtctctgttgc

SEQ ID NO: 18820 - RNA, 20 nt, synthetic construct
  source 1..20: mol_type = other RNA
agattctctttagggaagat

SEQ ID NO: 18821 - RNA, 20 nt, synthetic construct
  source 1..20: mol_type = other RNA
agattctgtctctacaaaaa

SEQ ID NO: 18822 - RNA, 20 nt, synthetic construct
  source 1..20: mol_type = other RNA
agattcttgtcatgaatgaa

SEQ ID NO: 18823 - RNA, 20 nt, synthetic construct
  source 1..20: mol_type = other RNA
agattgaaaatggtttaggc

SEQ ID NO: 18824 - RNA, 20 nt, synthetic construct
  source 1..20: mol_type = other RNA
agattgaaatctaggcatat

SEQ ID NO: 18825 - RNA, 20 nt, synthetic construct
  source 1..20: mol_type = other RNA
agattgaccttctacttatc

SEQ ID NO: 18826 - RNA, 20 nt, synthetic construct
  source 1..20: mol_type = other RNA
agattgaccttgtatccagt

SEQ ID NO: 18827 - RNA, 20 nt, synthetic construct
  source 1..20: mol_type = other RNA
agattgatagatcatatgat

SEQ ID NO: 18828 - RNA, 20 nt, synthetic construct
  source 1..20: mol_type = other RNA
agattgatatctgagtgttg

SEQ ID NO: 18829 - RNA, 20 nt, synthetic construct
  source 1..20: mol_type = other RNA
agattgccccattgcactcc

SEQ ID NO: 18830 - RNA, 20 nt, synthetic construct
  source 1..20: mol_type = other RNA
agattgcttgagagagataa

SEQ ID NO: 18831 - RNA, 20 nt, synthetic construct
  source 1..20: mol_type = other RNA
agattggctttagatttatc

SEQ ID NO: 18832 - RNA, 20 nt, synthetic construct
  source 1..20: mol_type = other RNA
agattgggaaaatcttggaa

SEQ ID NO: 18833 - RNA, 20 nt, synthetic construct
  source 1..20: mol_type = other RNA
agattgggcttttcatatac

SEQ ID NO: 18834 - RNA, 20 nt, synthetic construct
  source 1..20: mol_type = other RNA
agattgtcgttgagtacctc

SEQ ID NO: 18835 - RNA, 20 nt, synthetic construct
  source 1..20: mol_type = other RNA
agattgtgccagtgaactcc

SEQ ID NO: 18836 - RNA, 20 nt, synthetic construct
  source 1..20: mol_type = other RNA
agattgtggtccagaaaaaa

SEQ ID NO: 18837 - RNA, 20 nt, synthetic construct
  source 1..20: mol_type = other RNA
agattgtgtgatttcatatg

SEQ ID NO: 18838 - RNA, 20 nt, synthetic construct
  source 1..20: mol_type = other RNA
agattgttttaggtagtctt

SEQ ID NO: 18839 - RNA, 20 nt, synthetic construct
  source 1..20: mol_type = other RNA
agattgttttgttgctattg

SEQ ID NO: 18840 - RNA, 20 nt, synthetic construct
  source 1..20: mol_type = other RNA
agatttacccctactttttg

SEQ ID NO: 18841 - RNA, 20 nt, synthetic construct
  source 1..20: mol_type = other RNA
agatttactaaactgaacga

SEQ ID NO: 18842 - RNA, 20 nt, synthetic construct
  source 1..20: mol_type = other RNA
agatttatcaatagcagtgc

SEQ ID NO: 18843 - RNA, 20 nt, synthetic construct
  source 1..20: mol_type = other RNA
agatttatttttacccgtgg

SEQ ID NO: 18844 - RNA, 20 nt, synthetic construct
  source 1..20: mol_type = other RNA
agatttcaatctggaatgca

SEQ ID NO: 18845 - RNA, 20 nt, synthetic construct
  source 1..20: mol_type = other RNA
agatttcaggtggtatttaa

SEQ ID NO: 18846 - RNA, 20 nt, synthetic construct
  source 1..20: mol_type = other RNA
agatttcataaaatgtacag

SEQ ID NO: 18847 - RNA, 20 nt, synthetic construct
  source 1..20: mol_type = other RNA
agatttcataggcatctctc

SEQ ID NO: 18848 - RNA, 20 nt, synthetic construct
  source 1..20: mol_type = other RNA
agatttctactggggtctta

SEQ ID NO: 18849 - RNA, 20 nt, synthetic construct
  source 1..20: mol_type = other RNA
agatttctgcatagagatct

SEQ ID NO: 18850 - RNA, 20 nt, synthetic construct
  source 1..20: mol_type = other RNA
agatttctttttactcatgt

SEQ ID NO: 18851 - RNA, 20 nt, synthetic construct
  source 1..20: mol_type = other RNA
agatttgagtcttgctctct

SEQ ID NO: 18852 - RNA, 20 nt, synthetic construct
  source 1..20: mol_type = other RNA
agatttgatcctggaatagt

SEQ ID NO: 18853 - RNA, 20 nt, synthetic construct
  source 1..20: mol_type = other RNA
agatttgccaatcaataatt

SEQ ID NO: 18854 - RNA, 20 nt, synthetic construct
  source 1..20: mol_type = other RNA
agatttgctgtataacattt

SEQ ID NO: 18855 - RNA, 20 nt, synthetic construct
  source 1..20: mol_type = other RNA
agattttaggtcatttttca

SEQ ID NO: 18856 - RNA, 20 nt, synthetic construct
  source 1..20: mol_type = other RNA
agattttcccaaagatagac

SEQ ID NO: 18857 - RNA, 20 nt, synthetic construct
  source 1..20: mol_type = other RNA
agattttcccaatctctggt

SEQ ID NO: 18858 - RNA, 20 nt, synthetic construct
  source 1..20: mol_type = other RNA
agattttcttgttataagca

SEQ ID NO: 18859 - RNA, 20 nt, synthetic construct
  source 1..20: mol_type = other RNA
agatttttcctttgcctaag

SEQ ID NO: 18860 - RNA, 20 nt, synthetic construct
  source 1..20: mol_type = other RNA
agattttttgttgttggttt

SEQ ID NO: 18861 - RNA, 20 nt, synthetic construct
  source 1..20: mol_type = other RNA
agcaaaaatacagctccaaa

SEQ ID NO: 18862 - RNA, 20 nt, synthetic construct
  source 1..20: mol_type = other RNA
agcaaaacatatgtcagatg

SEQ ID NO: 18863 - RNA, 20 nt, synthetic construct
  source 1..20: mol_type = other RNA
agcaaaagaattaaactcat

SEQ ID NO: 18864 - RNA, 20 nt, synthetic construct
  source 1..20: mol_type = other RNA
agcaaaagcaaaattctaac

SEQ ID NO: 18865 - RNA, 20 nt, synthetic construct
  source 1..20: mol_type = other RNA
agcaaaagcaattattagtt

SEQ ID NO: 18866 - RNA, 20 nt, synthetic construct
  source 1..20: mol_type = other RNA
agcaaaagcaccactgagag

SEQ ID NO: 18867 - RNA, 20 nt, synthetic construct
  source 1..20: mol_type = other RNA
agcaaaatggaagtgctggg

SEQ ID NO: 18868 - RNA, 20 nt, synthetic construct
  source 1..20: mol_type = other RNA
agcaaaattctaacaagaag

SEQ ID NO: 18869 - RNA, 20 nt, synthetic construct
  source 1..20: mol_type = other RNA
agcaaaattgacaaaccctt

SEQ ID NO: 18870 - RNA, 20 nt, synthetic construct
  source 1..20: mol_type = other RNA
agcaaaattttaaatcagca

SEQ ID NO: 18871 - RNA, 20 nt, synthetic construct
  source 1..20: mol_type = other RNA
agcaaacaaacacactgggt

SEQ ID NO: 18872 - RNA, 20 nt, synthetic construct
  source 1..20: mol_type = other RNA
agcaaacatttatggaattg

SEQ ID NO: 18873 - RNA, 20 nt, synthetic construct
  source 1..20: mol_type = other RNA
agcaaaccagacatttctca

SEQ ID NO: 18874 - RNA, 20 nt, synthetic construct
  source 1..20: mol_type = other RNA
agcaaacgtgcacacccagt

SEQ ID NO: 18875 - RNA, 20 nt, synthetic construct
  source 1..20: mol_type = other RNA
agcaaactactgatagcgaa

SEQ ID NO: 18876 - RNA, 20 nt, synthetic construct
  source 1..20: mol_type = other RNA
agcaaactcagatctgagag

SEQ ID NO: 18877 - RNA, 20 nt, synthetic construct
  source 1..20: mol_type = other RNA
agcaaactgaatcagacaac

SEQ ID NO: 18878 - RNA, 20 nt, synthetic construct
  source 1..20: mol_type = other RNA
agcaaagaggcaaaactcct

SEQ ID NO: 18879 - RNA, 20 nt, synthetic construct
  source 1..20: mol_type = other RNA
agcaaagatatgggttattc

SEQ ID NO: 18880 - RNA, 20 nt, synthetic construct
  source 1..20: mol_type = other RNA
agcaaagcaagaaaaagaaa

SEQ ID NO: 18881 - RNA, 20 nt, synthetic construct
  source 1..20: mol_type = other RNA
agcaaaggattcgggggaga

SEQ ID NO: 18882 - RNA, 20 nt, synthetic construct
  source 1..20: mol_type = other RNA
agcaaatcagaaaaggctga

SEQ ID NO: 18883 - RNA, 20 nt, synthetic construct
  source 1..20: mol_type = other RNA
agcaaatctctagaacttat

SEQ ID NO: 18884 - RNA, 20 nt, synthetic construct
  source 1..20: mol_type = other RNA
agcaaatgtcatcttctctc

SEQ ID NO: 18885 - RNA, 20 nt, synthetic construct
  source 1..20: mol_type = other RNA
agcaaatgtgactagaagaa

SEQ ID NO: 18886 - RNA, 20 nt, synthetic construct
  source 1..20: mol_type = other RNA
agcaacaaaacaatctaatt

SEQ ID NO: 18887 - RNA, 20 nt, synthetic construct
  source 1..20: mol_type = other RNA
agcaacaccagatactcatg

SEQ ID NO: 18888 - RNA, 20 nt, synthetic construct
  source 1..20: mol_type = other RNA
agcaacactaaagatttgcc

SEQ ID NO: 18889 - RNA, 20 nt, synthetic construct
  source 1..20: mol_type = other RNA
agcaacagaaatttattgtt

SEQ ID NO: 18890 - RNA, 20 nt, synthetic construct
  source 1..20: mol_type = other RNA
agcaacaggaagaggcagct

SEQ ID NO: 18891 - RNA, 20 nt, synthetic construct
  source 1..20: mol_type = other RNA
agcaacatgctaagtgttta

SEQ ID NO: 18892 - RNA, 20 nt, synthetic construct
  source 1..20: mol_type = other RNA
agcaacctcatttgcagagc

SEQ ID NO: 18893 - RNA, 20 nt, synthetic construct
  source 1..20: mol_type = other RNA
agcaaccttttaggtgcccc

SEQ ID NO: 18894 - RNA, 20 nt, synthetic construct
  source 1..20: mol_type = other RNA
agcaacggaaatgagtgagc

SEQ ID NO: 18895 - RNA, 20 nt, synthetic construct
  source 1..20: mol_type = other RNA
agcaactactatttcgcaaa

SEQ ID NO: 18896 - RNA, 20 nt, synthetic construct
  source 1..20: mol_type = other RNA
agcaactcttggccattttc

SEQ ID NO: 18897 - RNA, 20 nt, synthetic construct
  source 1..20: mol_type = other RNA
agcaactgcatcttctttta

SEQ ID NO: 18898 - RNA, 20 nt, synthetic construct
  source 1..20: mol_type = other RNA
agcaactgttttttcctccc

SEQ ID NO: 18899 - RNA, 20 nt, synthetic construct
  source 1..20: mol_type = other RNA
agcaacttgaaggcaatgta

SEQ ID NO: 18900 - RNA, 20 nt, synthetic construct
  source 1..20: mol_type = other RNA
agcaacttgatcagggattt

SEQ ID NO: 18901 - RNA, 20 nt, synthetic construct
  source 1..20: mol_type = other RNA
agcaacttgcagaagagtga

SEQ ID NO: 18902 - RNA, 20 nt, synthetic construct
  source 1..20: mol_type = other RNA
agcaagactcaaatctcaaa

SEQ ID NO: 18903 - RNA, 20 nt, synthetic construct
  source 1..20: mol_type = other RNA
agcaagactttatgtggaaa

SEQ ID NO: 18904 - RNA, 20 nt, synthetic construct
  source 1..20: mol_type = other RNA
agcaagattactggatacaa

SEQ ID NO: 18905 - RNA, 20 nt, synthetic construct
  source 1..20: mol_type = other RNA
agcaagcaacaccagatact

SEQ ID NO: 18906 - RNA, 20 nt, synthetic construct
  source 1..20: mol_type = other RNA
agcaagcacgttagcatcac

SEQ ID NO: 18907 - RNA, 20 nt, synthetic construct
  source 1..20: mol_type = other RNA
agcaagcagtaaatatactg

SEQ ID NO: 18908 - RNA, 20 nt, synthetic construct
  source 1..20: mol_type = other RNA
agcaagcatgagtatctggt

SEQ ID NO: 18909 - RNA, 20 nt, synthetic construct
  source 1..20: mol_type = other RNA
agcaagccttggcaagggga

SEQ ID NO: 18910 - RNA, 20 nt, synthetic construct
  source 1..20: mol_type = other RNA
agcaagctaataatttatca

SEQ ID NO: 18911 - RNA, 20 nt, synthetic construct
  source 1..20: mol_type = other RNA
agcaaggaagcagaatgtcc

SEQ ID NO: 18912 - RNA, 20 nt, synthetic construct
  source 1..20: mol_type = other RNA
agcaaggaaggaaaggagat

SEQ ID NO: 18913 - RNA, 20 nt, synthetic construct
  source 1..20: mol_type = other RNA
agcaaggaagggcttgatct

SEQ ID NO: 18914 - RNA, 20 nt, synthetic construct
  source 1..20: mol_type = other RNA
agcaaggaccattagcagtt

SEQ ID NO: 18915 - RNA, 20 nt, synthetic construct
  source 1..20: mol_type = other RNA
agcaaggctcctgcagacat

SEQ ID NO: 18916 - RNA, 20 nt, synthetic construct
  source 1..20: mol_type = other RNA
agcaagggtggctggcactt

SEQ ID NO: 18917 - RNA, 20 nt, synthetic construct
  source 1..20: mol_type = other RNA
agcaaggtcgtttcagattg

SEQ ID NO: 18918 - RNA, 20 nt, synthetic construct
  source 1..20: mol_type = other RNA
agcaagtaaaagaagatgca

SEQ ID NO: 18919 - RNA, 20 nt, synthetic construct
  source 1..20: mol_type = other RNA
agcaagtatgagccactagt

SEQ ID NO: 18920 - RNA, 20 nt, synthetic construct
  source 1..20: mol_type = other RNA
agcaagtccccatctccaca

SEQ ID NO: 18921 - RNA, 20 nt, synthetic construct
  source 1..20: mol_type = other RNA
agcaagtgtggtggtctcac

SEQ ID NO: 18922 - RNA, 20 nt, synthetic construct
  source 1..20: mol_type = other RNA
agcaagttaaaagacatctt

SEQ ID NO: 18923 - RNA, 20 nt, synthetic construct
  source 1..20: mol_type = other RNA
agcaagttacatgcttagcc

SEQ ID NO: 18924 - RNA, 20 nt, synthetic construct
  source 1..20: mol_type = other RNA
agcaatccaaggacagaaat

SEQ ID NO: 18925 - RNA, 20 nt, synthetic construct
  source 1..20: mol_type = other RNA
agcaatccaggatcttactg

SEQ ID NO: 18926 - RNA, 20 nt, synthetic construct
  source 1..20: mol_type = other RNA
agcaatctgaaacgaccttg

SEQ ID NO: 18927 - RNA, 20 nt, synthetic construct
  source 1..20: mol_type = other RNA
agcaatgcgaatcatctagg

SEQ ID NO: 18928 - RNA, 20 nt, synthetic construct
  source 1..20: mol_type = other RNA
agcaattattagttgtactt

SEQ ID NO: 18929 - RNA, 20 nt, synthetic construct
  source 1..20: mol_type = other RNA
agcaattatttgaataaggt

SEQ ID NO: 18930 - RNA, 20 nt, synthetic construct
  source 1..20: mol_type = other RNA
agcacaaacctggcaatact

SEQ ID NO: 18931 - RNA, 20 nt, synthetic construct
  source 1..20: mol_type = other RNA
agcacaaccactgatggaat

SEQ ID NO: 18932 - RNA, 20 nt, synthetic construct
  source 1..20: mol_type = other RNA
agcacaactagtaagtaaaa

SEQ ID NO: 18933 - RNA, 20 nt, synthetic construct
  source 1..20: mol_type = other RNA
agcacaagcacagagtcaga

SEQ ID NO: 18934 - RNA, 20 nt, synthetic construct
  source 1..20: mol_type = other RNA
agcacaatactgtctcagtc

SEQ ID NO: 18935 - RNA, 20 nt, synthetic construct
  source 1..20: mol_type = other RNA
agcacaatgcctgccgcaga

SEQ ID NO: 18936 - RNA, 20 nt, synthetic construct
  source 1..20: mol_type = other RNA
agcacacagtttgagaagcc

SEQ ID NO: 18937 - RNA, 20 nt, synthetic construct
  source 1..20: mol_type = other RNA
agcacacatgaacctgcatg

SEQ ID NO: 18938 - RNA, 20 nt, synthetic construct
  source 1..20: mol_type = other RNA
agcacaccaagacatgttag

SEQ ID NO: 18939 - RNA, 20 nt, synthetic construct
  source 1..20: mol_type = other RNA
agcacaccaaggtttctctc

SEQ ID NO: 18940 - RNA, 20 nt, synthetic construct
  source 1..20: mol_type = other RNA
agcacactcttaataactgc

SEQ ID NO: 18941 - RNA, 20 nt, synthetic construct
  source 1..20: mol_type = other RNA
agcacactttccttggagaa

SEQ ID NO: 18942 - RNA, 20 nt, synthetic construct
  source 1..20: mol_type = other RNA
agcacagaaccatgtaacag

SEQ ID NO: 18943 - RNA, 20 nt, synthetic construct
  source 1..20: mol_type = other RNA
agcacagaattactatatga

SEQ ID NO: 18944 - RNA, 20 nt, synthetic construct
  source 1..20: mol_type = other RNA
agcacagactcaagcctgat

SEQ ID NO: 18945 - RNA, 20 nt, synthetic construct
  source 1..20: mol_type = other RNA
agcacagactgtgccttgat

SEQ ID NO: 18946 - RNA, 20 nt, synthetic construct
  source 1..20: mol_type = other RNA
agcacagagccgaaatgcac

SEQ ID NO: 18947 - RNA, 20 nt, synthetic construct
  source 1..20: mol_type = other RNA
agcacagaggcaacagtcat

SEQ ID NO: 18948 - RNA, 20 nt, synthetic construct
  source 1..20: mol_type = other RNA
agcacagagtcagaaaatta

SEQ ID NO: 18949 - RNA, 20 nt, synthetic construct
  source 1..20: mol_type = other RNA
agcacaggcatcggccgggc

SEQ ID NO: 18950 - RNA, 20 nt, synthetic construct
  source 1..20: mol_type = other RNA
agcacaggcatctctctaaa

SEQ ID NO: 18951 - RNA, 20 nt, synthetic construct
  source 1..20: mol_type = other RNA
agcacagtctctgcagagca

SEQ ID NO: 18952 - RNA, 20 nt, synthetic construct
  source 1..20: mol_type = other RNA
agcacataaaaaaggaatct

SEQ ID NO: 18953 - RNA, 20 nt, synthetic construct
  source 1..20: mol_type = other RNA
agcacatctgtcttgtgcat

SEQ ID NO: 18954 - RNA, 20 nt, synthetic construct
  source 1..20: mol_type = other RNA
agcacatggtgataactggt

SEQ ID NO: 18955 - RNA, 20 nt, synthetic construct
  source 1..20: mol_type = other RNA
agcacattaaataagggcat

SEQ ID NO: 18956 - RNA, 20 nt, synthetic construct
  source 1..20: mol_type = other RNA
agcacattccttccgacctg

SEQ ID NO: 18957 - RNA, 20 nt, synthetic construct
  source 1..20: mol_type = other RNA
agcaccaaagattatgttcc

SEQ ID NO: 18958 - RNA, 20 nt, synthetic construct
  source 1..20: mol_type = other RNA
agcaccaacagatcctcaca

SEQ ID NO: 18959 - RNA, 20 nt, synthetic construct
  source 1..20: mol_type = other RNA
agcaccaacccttgttggac

SEQ ID NO: 18960 - RNA, 20 nt, synthetic construct
  source 1..20: mol_type = other RNA
agcaccacccttgatgtcac

SEQ ID NO: 18961 - RNA, 20 nt, synthetic construct
  source 1..20: mol_type = other RNA
agcaccactagagtattacc

SEQ ID NO: 18962 - RNA, 20 nt, synthetic construct
  source 1..20: mol_type = other RNA
agcaccactgagagggaagt

SEQ ID NO: 18963 - RNA, 20 nt, synthetic construct
  source 1..20: mol_type = other RNA
agcaccacttcgagaaggga

SEQ ID NO: 18964 - RNA, 20 nt, synthetic construct
  source 1..20: mol_type = other RNA
agcaccagatactcaatcag

SEQ ID NO: 18965 - RNA, 20 nt, synthetic construct
  source 1..20: mol_type = other RNA
agcaccagggcctctgaaga

SEQ ID NO: 18966 - RNA, 20 nt, synthetic construct
  source 1..20: mol_type = other RNA
agcaccagttatcaccatgt

SEQ ID NO: 18967 - RNA, 20 nt, synthetic construct
  source 1..20: mol_type = other RNA
agcaccatctaacagaaata

SEQ ID NO: 18968 - RNA, 20 nt, synthetic construct
  source 1..20: mol_type = other RNA
agcaccctatttatgttgca

SEQ ID NO: 18969 - RNA, 20 nt, synthetic construct
  source 1..20: mol_type = other RNA
agcaccctcaaatgtctcat

SEQ ID NO: 18970 - RNA, 20 nt, synthetic construct
  source 1..20: mol_type = other RNA
agcacctaacaatgattatt

SEQ ID NO: 18971 - RNA, 20 nt, synthetic construct
  source 1..20: mol_type = other RNA
agcacctaccataacaaaaa

SEQ ID NO: 18972 - RNA, 20 nt, synthetic construct
  source 1..20: mol_type = other RNA
agcacctgtataaataaaat

SEQ ID NO: 18973 - RNA, 20 nt, synthetic construct
  source 1..20: mol_type = other RNA
agcacctttattaactagaa

SEQ ID NO: 18974 - RNA, 20 nt, synthetic construct
  source 1..20: mol_type = other RNA
agcaccttttttggtatttt

SEQ ID NO: 18975 - RNA, 20 nt, synthetic construct
  source 1..20: mol_type = other RNA
agcacgttagcatcaccatc

SEQ ID NO: 18976 - RNA, 20 nt, synthetic construct
  source 1..20: mol_type = other RNA
agcacgtttgatctggtcac

SEQ ID NO: 18977 - RNA, 20 nt, synthetic construct
  source 1..20: mol_type = other RNA
agcactatccacatttggtt

SEQ ID NO: 18978 - RNA, 20 nt, synthetic construct
  source 1..20: mol_type = other RNA
agcactctgaatcacctcaa

SEQ ID NO: 18979 - RNA, 20 nt, synthetic construct
  source 1..20: mol_type = other RNA
agcactgatgtgtagttatt

SEQ ID NO: 18980 - RNA, 20 nt, synthetic construct
  source 1..20: mol_type = other RNA
agcactgcgccaagcaggga

SEQ ID NO: 18981 - RNA, 20 nt, synthetic construct
  source 1..20: mol_type = other RNA
agcactgctattgataaatc

SEQ ID NO: 18982 - RNA, 20 nt, synthetic construct
  source 1..20: mol_type = other RNA
agcactggtaaggaaacaga

SEQ ID NO: 18983 - RNA, 20 nt, synthetic construct
  source 1..20: mol_type = other RNA
agcactggtttcagtacacg

SEQ ID NO: 18984 - RNA, 20 nt, synthetic construct
  source 1..20: mol_type = other RNA
agcactgtgagccactaaaa

SEQ ID NO: 18985 - RNA, 20 nt, synthetic construct
  source 1..20: mol_type = other RNA
agcactgttaactgacttac

SEQ ID NO: 18986 - RNA, 20 nt, synthetic construct
  source 1..20: mol_type = other RNA
agcacttccattttgcttaa

SEQ ID NO: 18987 - RNA, 20 nt, synthetic construct
  source 1..20: mol_type = other RNA
agcacttctgatatcctgta

SEQ ID NO: 18988 - RNA, 20 nt, synthetic construct
  source 1..20: mol_type = other RNA
agcacttggggaggccaagg

SEQ ID NO: 18989 - RNA, 20 nt, synthetic construct
  source 1..20: mol_type = other RNA
agcactttcgtatttttgtt

SEQ ID NO: 18990 - RNA, 20 nt, synthetic construct
  source 1..20: mol_type = other RNA
agcacttttaaggcttggaa

SEQ ID NO: 18991 - RNA, 20 nt, synthetic construct
  source 1..20: mol_type = other RNA
agcacttttgtactacttgt

SEQ ID NO: 18992 - RNA, 20 nt, synthetic construct
  source 1..20: mol_type = other RNA
agcactttttaccaagttga

SEQ ID NO: 18993 - RNA, 20 nt, synthetic construct
  source 1..20: mol_type = other RNA
agcagaaaatcagtgtgaaa

SEQ ID NO: 18994 - RNA, 20 nt, synthetic construct
  source 1..20: mol_type = other RNA
agcagaaacacaggactgtg

SEQ ID NO: 18995 - RNA, 20 nt, synthetic construct
  source 1..20: mol_type = other RNA
agcagaaagttactattttc

SEQ ID NO: 18996 - RNA, 20 nt, synthetic construct
  source 1..20: mol_type = other RNA
agcagaaatacagaccgatg

SEQ ID NO: 18997 - RNA, 20 nt, synthetic construct
  source 1..20: mol_type = other RNA
agcagaaatgacaagtaaat

SEQ ID NO: 18998 - RNA, 20 nt, synthetic construct
  source 1..20: mol_type = other RNA
agcagaaatgagttccagtc

SEQ ID NO: 18999 - RNA, 20 nt, synthetic construct
  source 1..20: mol_type = other RNA
agcagaacaaactgcgtggt

SEQ ID NO: 19000 - RNA, 20 nt, synthetic construct
  source 1..20: mol_type = other RNA
agcagaaccttagaaattta

SEQ ID NO: 19001 - RNA, 20 nt, synthetic construct
  source 1..20: mol_type = other RNA
agcagaactaagaccccagt

SEQ ID NO: 19002 - RNA, 20 nt, synthetic construct
  source 1..20: mol_type = other RNA
agcagaactccacctcagaa

SEQ ID NO: 19003 - RNA, 20 nt, synthetic construct
  source 1..20: mol_type = other RNA
agcagaaggaggaaaataat

SEQ ID NO: 19004 - RNA, 20 nt, synthetic construct
  source 1..20: mol_type = other RNA
agcagaagggaaaggatgac

SEQ ID NO: 19005 - RNA, 20 nt, synthetic construct
  source 1..20: mol_type = other RNA
agcagaaggtgagggactga

SEQ ID NO: 19006 - RNA, 20 nt, synthetic construct
  source 1..20: mol_type = other RNA
agcagaatccccaaataaca

SEQ ID NO: 19007 - RNA, 20 nt, synthetic construct
  source 1..20: mol_type = other RNA
agcagaatggccctgcgatt

SEQ ID NO: 19008 - RNA, 20 nt, synthetic construct
  source 1..20: mol_type = other RNA
agcagaatgtccatcaggaa

SEQ ID NO: 19009 - RNA, 20 nt, synthetic construct
  source 1..20: mol_type = other RNA
agcagaattcaaaaacactg

SEQ ID NO: 19010 - RNA, 20 nt, synthetic construct
  source 1..20: mol_type = other RNA
agcagacactgggttctcac

SEQ ID NO: 19011 - RNA, 20 nt, synthetic construct
  source 1..20: mol_type = other RNA
agcagacagaaagacaggga

SEQ ID NO: 19012 - RNA, 20 nt, synthetic construct
  source 1..20: mol_type = other RNA
agcagagaaactggaatcaa

SEQ ID NO: 19013 - RNA, 20 nt, synthetic construct
  source 1..20: mol_type = other RNA
agcagagaagtgaagcttca

SEQ ID NO: 19014 - RNA, 20 nt, synthetic construct
  source 1..20: mol_type = other RNA
agcagagacacacatcagac

SEQ ID NO: 19015 - RNA, 20 nt, synthetic construct
  source 1..20: mol_type = other RNA
agcagagagagaagatgaca

SEQ ID NO: 19016 - RNA, 20 nt, synthetic construct
  source 1..20: mol_type = other RNA
agcagagtcctgagggtgag

SEQ ID NO: 19017 - RNA, 20 nt, synthetic construct
  source 1..20: mol_type = other RNA
agcagataagatccaagtat

SEQ ID NO: 19018 - RNA, 20 nt, synthetic construct
  source 1..20: mol_type = other RNA
agcagatcagtaacaaataa

SEQ ID NO: 19019 - RNA, 20 nt, synthetic construct
  source 1..20: mol_type = other RNA
agcagatctgctgtaagctg

SEQ ID NO: 19020 - RNA, 20 nt, synthetic construct
  source 1..20: mol_type = other RNA
agcagatctgcttgcagaca

SEQ ID NO: 19021 - RNA, 20 nt, synthetic construct
  source 1..20: mol_type = other RNA
agcagcaagggtggctggca

SEQ ID NO: 19022 - RNA, 20 nt, synthetic construct
  source 1..20: mol_type = other RNA
agcagcactgatgtgtagtt

SEQ ID NO: 19023 - RNA, 20 nt, synthetic construct
  source 1..20: mol_type = other RNA
agcagcagagaagtgaagct

SEQ ID NO: 19024 - RNA, 20 nt, synthetic construct
  source 1..20: mol_type = other RNA
agcagcattgtttacagtag

SEQ ID NO: 19025 - RNA, 20 nt, synthetic construct
  source 1..20: mol_type = other RNA
agcagccccgacgcctttca

SEQ ID NO: 19026 - RNA, 20 nt, synthetic construct
  source 1..20: mol_type = other RNA
agcagctacctgttgattgt

SEQ ID NO: 19027 - RNA, 20 nt, synthetic construct
  source 1..20: mol_type = other RNA
agcagctctagcaaacaaac

SEQ ID NO: 19028 - RNA, 20 nt, synthetic construct
  source 1..20: mol_type = other RNA
agcaggaaaagctaccctcg

SEQ ID NO: 19029 - RNA, 20 nt, synthetic construct
  source 1..20: mol_type = other RNA
agcaggaactcatattagtc

SEQ ID NO: 19030 - RNA, 20 nt, synthetic construct
  source 1..20: mol_type = other RNA
agcaggactggactccttct

SEQ ID NO: 19031 - RNA, 20 nt, synthetic construct
  source 1..20: mol_type = other RNA
agcaggattcttgttaagca

SEQ ID NO: 19032 - RNA, 20 nt, synthetic construct
  source 1..20: mol_type = other RNA
agcaggccctgagaagtcaa

SEQ ID NO: 19033 - RNA, 20 nt, synthetic construct
  source 1..20: mol_type = other RNA
agcaggccttcgaggcatct

SEQ ID NO: 19034 - RNA, 20 nt, synthetic construct
  source 1..20: mol_type = other RNA
agcaggctccacttgggtgg

SEQ ID NO: 19035 - RNA, 20 nt, synthetic construct
  source 1..20: mol_type = other RNA
agcaggctttttacccggag

SEQ ID NO: 19036 - RNA, 20 nt, synthetic construct
  source 1..20: mol_type = other RNA
agcagggaaatggagggcca

SEQ ID NO: 19037 - RNA, 20 nt, synthetic construct
  source 1..20: mol_type = other RNA
agcagggaccacaggcatgc

SEQ ID NO: 19038 - RNA, 20 nt, synthetic construct
  source 1..20: mol_type = other RNA
agcagggacgggcgggggag

SEQ ID NO: 19039 - RNA, 20 nt, synthetic construct
  source 1..20: mol_type = other RNA
agcagggactacagtcacac

SEQ ID NO: 19040 - RNA, 20 nt, synthetic construct
  source 1..20: mol_type = other RNA
agcagggactcccatatcta

SEQ ID NO: 19041 - RNA, 20 nt, synthetic construct
  source 1..20: mol_type = other RNA
agcagggaggggtccccagc

SEQ ID NO: 19042 - RNA, 20 nt, synthetic construct
  source 1..20: mol_type = other RNA
agcagggctcctccaaggct

SEQ ID NO: 19043 - RNA, 20 nt, synthetic construct
  source 1..20: mol_type = other RNA
agcaggggaaggcttcgagt

SEQ ID NO: 19044 - RNA, 20 nt, synthetic construct
  source 1..20: mol_type = other RNA
agcaggggctaagtagtggc

SEQ ID NO: 19045 - RNA, 20 nt, synthetic construct
  source 1..20: mol_type = other RNA
agcaggggtggggggatgta

SEQ ID NO: 19046 - RNA, 20 nt, synthetic construct
  source 1..20: mol_type = other RNA
agcagggtaaagtcaattct

SEQ ID NO: 19047 - RNA, 20 nt, synthetic construct
  source 1..20: mol_type = other RNA
agcagggtcatgcacacgct

SEQ ID NO: 19048 - RNA, 20 nt, synthetic construct
  source 1..20: mol_type = other RNA
agcagggtgggcccttaatc

SEQ ID NO: 19049 - RNA, 20 nt, synthetic construct
  source 1..20: mol_type = other RNA
agcaggtcatgacttttttg

SEQ ID NO: 19050 - RNA, 20 nt, synthetic construct
  source 1..20: mol_type = other RNA
agcaggtggaaggcctgata

SEQ ID NO: 19051 - RNA, 20 nt, synthetic construct
  source 1..20: mol_type = other RNA
agcaggttcattttaataag

SEQ ID NO: 19052 - RNA, 20 nt, synthetic construct
  source 1..20: mol_type = other RNA
agcaggttgcattaatgctt

SEQ ID NO: 19053 - RNA, 20 nt, synthetic construct
  source 1..20: mol_type = other RNA
agcaggtttaggaagcacat

SEQ ID NO: 19054 - RNA, 20 nt, synthetic construct
  source 1..20: mol_type = other RNA
agcagtaaaatgaaaaaacc

SEQ ID NO: 19055 - RNA, 20 nt, synthetic construct
  source 1..20: mol_type = other RNA
agcagtaaatatactgacta

SEQ ID NO: 19056 - RNA, 20 nt, synthetic construct
  source 1..20: mol_type = other RNA
agcagtaggcttagatagga

SEQ ID NO: 19057 - RNA, 20 nt, synthetic construct
  source 1..20: mol_type = other RNA
agcagtcctgccttggcctc

SEQ ID NO: 19058 - RNA, 20 nt, synthetic construct
  source 1..20: mol_type = other RNA
agcagtcttaaccattgagc

SEQ ID NO: 19059 - RNA, 20 nt, synthetic construct
  source 1..20: mol_type = other RNA
agcagtgaaagtctccctaa

SEQ ID NO: 19060 - RNA, 20 nt, synthetic construct
  source 1..20: mol_type = other RNA
agcagtgaccatatttccaa

SEQ ID NO: 19061 - RNA, 20 nt, synthetic construct
  source 1..20: mol_type = other RNA
agcagtgctgaaagctagaa

SEQ ID NO: 19062 - RNA, 20 nt, synthetic construct
  source 1..20: mol_type = other RNA
agcagtgggaagtggagtgc

SEQ ID NO: 19063 - RNA, 20 nt, synthetic construct
  source 1..20: mol_type = other RNA
agcagtgtgaataggaaagt

SEQ ID NO: 19064 - RNA, 20 nt, synthetic construct
  source 1..20: mol_type = other RNA
agcagtgtgttctgccttga

SEQ ID NO: 19065 - RNA, 20 nt, synthetic construct
  source 1..20: mol_type = other RNA
agcagtgtttcctagattcc

SEQ ID NO: 19066 - RNA, 20 nt, synthetic construct
  source 1..20: mol_type = other RNA
agcagttactcctgagcaag

SEQ ID NO: 19067 - RNA, 20 nt, synthetic construct
  source 1..20: mol_type = other RNA
agcagttcaagcaccacttc

SEQ ID NO: 19068 - RNA, 20 nt, synthetic construct
  source 1..20: mol_type = other RNA
agcagttcagcctgcagaag

SEQ ID NO: 19069 - RNA, 20 nt, synthetic construct
  source 1..20: mol_type = other RNA
agcagttctgtacccttacg

SEQ ID NO: 19070 - RNA, 20 nt, synthetic construct
  source 1..20: mol_type = other RNA
agcagttgatgcaatttgtt

SEQ ID NO: 19071 - RNA, 20 nt, synthetic construct
  source 1..20: mol_type = other RNA
agcagttgtatgccaaaaaa

SEQ ID NO: 19072 - RNA, 20 nt, synthetic construct
  source 1..20: mol_type = other RNA
agcagtttcacttcttagta

SEQ ID NO: 19073 - RNA, 20 nt, synthetic construct
  source 1..20: mol_type = other RNA
agcagttttaaagaattcgt

SEQ ID NO: 19074 - RNA, 20 nt, synthetic construct
  source 1..20: mol_type = other RNA
agcataaaaaagatcaaatg

SEQ ID NO: 19075 - RNA, 20 nt, synthetic construct
  source 1..20: mol_type = other RNA
agcataagacccctcaggtg

SEQ ID NO: 19076 - RNA, 20 nt, synthetic construct
  source 1..20: mol_type = other RNA
agcataattcgaaataatca

SEQ ID NO: 19077 - RNA, 20 nt, synthetic construct
  source 1..20: mol_type = other RNA
agcataattggttaaacttg

SEQ ID NO: 19078 - RNA, 20 nt, synthetic construct
  source 1..20: mol_type = other RNA
agcatactgtggatatcttt

SEQ ID NO: 19079 - RNA, 20 nt, synthetic construct
  source 1..20: mol_type = other RNA
agcatagactttagagtcag

SEQ ID NO: 19080 - RNA, 20 nt, synthetic construct
  source 1..20: mol_type = other RNA
agcatagcagaaccttagaa

SEQ ID NO: 19081 - RNA, 20 nt, synthetic construct
  source 1..20: mol_type = other RNA
agcatagcttgaaccaggga

SEQ ID NO: 19082 - RNA, 20 nt, synthetic construct
  source 1..20: mol_type = other RNA
agcatagtttgagtatttca

SEQ ID NO: 19083 - RNA, 20 nt, synthetic construct
  source 1..20: mol_type = other RNA
agcatatacatgacatggtt

SEQ ID NO: 19084 - RNA, 20 nt, synthetic construct
  source 1..20: mol_type = other RNA
agcatatatactctgagaca

SEQ ID NO: 19085 - RNA, 20 nt, synthetic construct
  source 1..20: mol_type = other RNA
agcatatgaatctagaaaga

SEQ ID NO: 19086 - RNA, 20 nt, synthetic construct
  source 1..20: mol_type = other RNA
agcatattagctgtctggat

SEQ ID NO: 19087 - RNA, 20 nt, synthetic construct
  source 1..20: mol_type = other RNA
agcatcaccatcatcatcag

SEQ ID NO: 19088 - RNA, 20 nt, synthetic construct
  source 1..20: mol_type = other RNA
agcatcagagctttgttatg

SEQ ID NO: 19089 - RNA, 20 nt, synthetic construct
  source 1..20: mol_type = other RNA
agcatccactaggggactaa

SEQ ID NO: 19090 - RNA, 20 nt, synthetic construct
  source 1..20: mol_type = other RNA
agcatcccagaggtactcaa

SEQ ID NO: 19091 - RNA, 20 nt, synthetic construct
  source 1..20: mol_type = other RNA
agcatcccatatggaggcaa

SEQ ID NO: 19092 - RNA, 20 nt, synthetic construct
  source 1..20: mol_type = other RNA
agcatccccagaaagagaga

SEQ ID NO: 19093 - RNA, 20 nt, synthetic construct
  source 1..20: mol_type = other RNA
agcatccccgctgcgagaaa

SEQ ID NO: 19094 - RNA, 20 nt, synthetic construct
  source 1..20: mol_type = other RNA
agcatccctccagtccagca

SEQ ID NO: 19095 - RNA, 20 nt, synthetic construct
  source 1..20: mol_type = other RNA
agcatccctgccgcgcgcga

SEQ ID NO: 19096 - RNA, 20 nt, synthetic construct
  source 1..20: mol_type = other RNA
agcatcgtgaagtctttatt

SEQ ID NO: 19097 - RNA, 20 nt, synthetic construct
  source 1..20: mol_type = other RNA
agcatctagcacagaaccat

SEQ ID NO: 19098 - RNA, 20 nt, synthetic construct
  source 1..20: mol_type = other RNA
agcatctgatacacttctat

SEQ ID NO: 19099 - RNA, 20 nt, synthetic construct
  source 1..20: mol_type = other RNA
agcatcttagctcttccctt

SEQ ID NO: 19100 - RNA, 20 nt, synthetic construct
  source 1..20: mol_type = other RNA
agcatcttcactgactacac

SEQ ID NO: 19101 - RNA, 20 nt, synthetic construct
  source 1..20: mol_type = other RNA
agcatcttcccatgaacatg

SEQ ID NO: 19102 - RNA, 20 nt, synthetic construct
  source 1..20: mol_type = other RNA
agcatcttttgacgcgcaac

SEQ ID NO: 19103 - RNA, 20 nt, synthetic construct
  source 1..20: mol_type = other RNA
agcatgaagccctctaagtc

SEQ ID NO: 19104 - RNA, 20 nt, synthetic construct
  source 1..20: mol_type = other RNA
agcatgaatacctatttaga

SEQ ID NO: 19105 - RNA, 20 nt, synthetic construct
  source 1..20: mol_type = other RNA
agcatgagatactacgccta

SEQ ID NO: 19106 - RNA, 20 nt, synthetic construct
  source 1..20: mol_type = other RNA
agcatgagtatctggtgttg

SEQ ID NO: 19107 - RNA, 20 nt, synthetic construct
  source 1..20: mol_type = other RNA
agcatgatttataatccatt

SEQ ID NO: 19108 - RNA, 20 nt, synthetic construct
  source 1..20: mol_type = other RNA
agcatgcacacaggagaact

SEQ ID NO: 19109 - RNA, 20 nt, synthetic construct
  source 1..20: mol_type = other RNA
agcatgcagtagctcatcat

SEQ ID NO: 19110 - RNA, 20 nt, synthetic construct
  source 1..20: mol_type = other RNA
agcatgcctgacaaagtatg

SEQ ID NO: 19111 - RNA, 20 nt, synthetic construct
  source 1..20: mol_type = other RNA
agcatgctcactgtctccat

SEQ ID NO: 19112 - RNA, 20 nt, synthetic construct
  source 1..20: mol_type = other RNA
agcatgctgcaactgagaag

SEQ ID NO: 19113 - RNA, 20 nt, synthetic construct
  source 1..20: mol_type = other RNA
agcatggtggtaggtgtgtg

SEQ ID NO: 19114 - RNA, 20 nt, synthetic construct
  source 1..20: mol_type = other RNA
agcatgtaacttgcttaggc

SEQ ID NO: 19115 - RNA, 20 nt, synthetic construct
  source 1..20: mol_type = other RNA
agcatgtcccctggagttaa

SEQ ID NO: 19116 - RNA, 20 nt, synthetic construct
  source 1..20: mol_type = other RNA
agcatgtcttcagaggccct

SEQ ID NO: 19117 - RNA, 20 nt, synthetic construct
  source 1..20: mol_type = other RNA
agcatgtggccaggaggagg

SEQ ID NO: 19118 - RNA, 20 nt, synthetic construct
  source 1..20: mol_type = other RNA
agcatgttgctttgcgaaat

SEQ ID NO: 19119 - RNA, 20 nt, synthetic construct
  source 1..20: mol_type = other RNA
agcatgttgggccaacttcc

SEQ ID NO: 19120 - RNA, 20 nt, synthetic construct
  source 1..20: mol_type = other RNA
agcattaatgcaacctgctt

SEQ ID NO: 19121 - RNA, 20 nt, synthetic construct
  source 1..20: mol_type = other RNA
agcattaccctaataacaaa

SEQ ID NO: 19122 - RNA, 20 nt, synthetic construct
  source 1..20: mol_type = other RNA
agcattacttaggcagttat

SEQ ID NO: 19123 - RNA, 20 nt, synthetic construct
  source 1..20: mol_type = other RNA
agcattatcccagatctaac

SEQ ID NO: 19124 - RNA, 20 nt, synthetic construct
  source 1..20: mol_type = other RNA
agcattatccctttaaaatg

SEQ ID NO: 19125 - RNA, 20 nt, synthetic construct
  source 1..20: mol_type = other RNA
agcattatcttaataacctc

SEQ ID NO: 19126 - RNA, 20 nt, synthetic construct
  source 1..20: mol_type = other RNA
agcattccccacataggata

SEQ ID NO: 19127 - RNA, 20 nt, synthetic construct
  source 1..20: mol_type = other RNA
agcattgaagtatagtttga

SEQ ID NO: 19128 - RNA, 20 nt, synthetic construct
  source 1..20: mol_type = other RNA
agcattgcctttattactat

SEQ ID NO: 19129 - RNA, 20 nt, synthetic construct
  source 1..20: mol_type = other RNA
agcattgggagctttcatta

SEQ ID NO: 19130 - RNA, 20 nt, synthetic construct
  source 1..20: mol_type = other RNA
agcattgtttacagtagcca

SEQ ID NO: 19131 - RNA, 20 nt, synthetic construct
  source 1..20: mol_type = other RNA
agcatttagccccctgaata

SEQ ID NO: 19132 - RNA, 20 nt, synthetic construct
  source 1..20: mol_type = other RNA
agcatttcagccaaagctgg

SEQ ID NO: 19133 - RNA, 20 nt, synthetic construct
  source 1..20: mol_type = other RNA
agcatttgaaaacatgtttt

SEQ ID NO: 19134 - RNA, 20 nt, synthetic construct
  source 1..20: mol_type = other RNA
agcattttataggcattcct

SEQ ID NO: 19135 - RNA, 20 nt, synthetic construct
  source 1..20: mol_type = other RNA
agcattttccggttgtatag

SEQ ID NO: 19136 - RNA, 20 nt, synthetic construct
  source 1..20: mol_type = other RNA
agcattttctaaattgaaca

SEQ ID NO: 19137 - RNA, 20 nt, synthetic construct
  source 1..20: mol_type = other RNA
agccaaacagtttttacatg

SEQ ID NO: 19138 - RNA, 20 nt, synthetic construct
  source 1..20: mol_type = other RNA
agccaaacatcatgatttaa

SEQ ID NO: 19139 - RNA, 20 nt, synthetic construct
  source 1..20: mol_type = other RNA
agccaaacttgaaccttcct

SEQ ID NO: 19140 - RNA, 20 nt, synthetic construct
  source 1..20: mol_type = other RNA
agccaaagaaattggacggg

SEQ ID NO: 19141 - RNA, 20 nt, synthetic construct
  source 1..20: mol_type = other RNA
agccaaagaagaaatcaaat

SEQ ID NO: 19142 - RNA, 20 nt, synthetic construct
  source 1..20: mol_type = other RNA
agccaaagacattgtcttac

SEQ ID NO: 19143 - RNA, 20 nt, synthetic construct
  source 1..20: mol_type = other RNA
agccaaagcaagccttggca

SEQ ID NO: 19144 - RNA, 20 nt, synthetic construct
  source 1..20: mol_type = other RNA
agccaaagctggcatgttgg

SEQ ID NO: 19145 - RNA, 20 nt, synthetic construct
  source 1..20: mol_type = other RNA
agccaaaggtagaaacatcc

SEQ ID NO: 19146 - RNA, 20 nt, synthetic construct
  source 1..20: mol_type = other RNA
agccaaataaaacacaagga

SEQ ID NO: 19147 - RNA, 20 nt, synthetic construct
  source 1..20: mol_type = other RNA
agccaaattaataaaatgga

SEQ ID NO: 19148 - RNA, 20 nt, synthetic construct
  source 1..20: mol_type = other RNA
agccaacaaccataatgagt

SEQ ID NO: 19149 - RNA, 20 nt, synthetic construct
  source 1..20: mol_type = other RNA
agccaagagcgaggcctgga

SEQ ID NO: 19150 - RNA, 20 nt, synthetic construct
  source 1..20: mol_type = other RNA
agccaagcatggtggtaggt

SEQ ID NO: 19151 - RNA, 20 nt, synthetic construct
  source 1..20: mol_type = other RNA
agccaagggtttgtcaattt

SEQ ID NO: 19152 - RNA, 20 nt, synthetic construct
  source 1..20: mol_type = other RNA
agccaagtaaaagcaacctc

SEQ ID NO: 19153 - RNA, 20 nt, synthetic construct
  source 1..20: mol_type = other RNA
agccaatatccctgataatc

SEQ ID NO: 19154 - RNA, 20 nt, synthetic construct
  source 1..20: mol_type = other RNA
agccaatcttcccaatcctt

SEQ ID NO: 19155 - RNA, 20 nt, synthetic construct
  source 1..20: mol_type = other RNA
agccacaagacataagcatt

SEQ ID NO: 19156 - RNA, 20 nt, synthetic construct
  source 1..20: mol_type = other RNA
agccacacagtacaaggcta

SEQ ID NO: 19157 - RNA, 20 nt, synthetic construct
  source 1..20: mol_type = other RNA
agccacactcttggtctttc

SEQ ID NO: 19158 - RNA, 20 nt, synthetic construct
  source 1..20: mol_type = other RNA
agccacagcgcccggcccgt

SEQ ID NO: 19159 - RNA, 20 nt, synthetic construct
  source 1..20: mol_type = other RNA
agccacagcgtggaatggtc

SEQ ID NO: 19160 - RNA, 20 nt, synthetic construct
  source 1..20: mol_type = other RNA
agccacagcgttgttcagtt

SEQ ID NO: 19161 - RNA, 20 nt, synthetic construct
  source 1..20: mol_type = other RNA
agccacagctacactcaata

SEQ ID NO: 19162 - RNA, 20 nt, synthetic construct
  source 1..20: mol_type = other RNA
agccacagggcccagcctca

SEQ ID NO: 19163 - RNA, 20 nt, synthetic construct
  source 1..20: mol_type = other RNA
agccacatacatagtattaa

SEQ ID NO: 19164 - RNA, 20 nt, synthetic construct
  source 1..20: mol_type = other RNA
agccacatgtggttattgag

SEQ ID NO: 19165 - RNA, 20 nt, synthetic construct
  source 1..20: mol_type = other RNA
agccacattagccactctga

SEQ ID NO: 19166 - RNA, 20 nt, synthetic construct
  source 1..20: mol_type = other RNA
agccaccacgtccggtcgtt

SEQ ID NO: 19167 - RNA, 20 nt, synthetic construct
  source 1..20: mol_type = other RNA
agccaccactcccggccgta

SEQ ID NO: 19168 - RNA, 20 nt, synthetic construct
  source 1..20: mol_type = other RNA
agccacccttgctgcttcta

SEQ ID NO: 19169 - RNA, 20 nt, synthetic construct
  source 1..20: mol_type = other RNA
agccaccgcacctggccggg

SEQ ID NO: 19170 - RNA, 20 nt, synthetic construct
  source 1..20: mol_type = other RNA
agccaccgcactcagcctgt

SEQ ID NO: 19171 - RNA, 20 nt, synthetic construct
  source 1..20: mol_type = other RNA
agccaccgcgcccggccaaa

SEQ ID NO: 19172 - RNA, 20 nt, synthetic construct
  source 1..20: mol_type = other RNA
agccaccgcgcctggtgatt

SEQ ID NO: 19173 - RNA, 20 nt, synthetic construct
  source 1..20: mol_type = other RNA
agccaccgtgccgggcttgg

SEQ ID NO: 19174 - RNA, 20 nt, synthetic construct
  source 1..20: mol_type = other RNA
agccacctcatccggtctca

SEQ ID NO: 19175 - RNA, 20 nt, synthetic construct
  source 1..20: mol_type = other RNA
agccacgtgtattgagtgta

SEQ ID NO: 19176 - RNA, 20 nt, synthetic construct
  source 1..20: mol_type = other RNA
agccactaaaacaggaagtt

SEQ ID NO: 19177 - RNA, 20 nt, synthetic construct
  source 1..20: mol_type = other RNA
agccactacgcccggcccat

SEQ ID NO: 19178 - RNA, 20 nt, synthetic construct
  source 1..20: mol_type = other RNA
agccactagtcagtatattt

SEQ ID NO: 19179 - RNA, 20 nt, synthetic construct
  source 1..20: mol_type = other RNA
agccactatagaaaatagta

SEQ ID NO: 19180 - RNA, 20 nt, synthetic construct
  source 1..20: mol_type = other RNA
agccactctgaattctctgg

SEQ ID NO: 19181 - RNA, 20 nt, synthetic construct
  source 1..20: mol_type = other RNA
agccactgcattcatccagg

SEQ ID NO: 19182 - RNA, 20 nt, synthetic construct
  source 1..20: mol_type = other RNA
agccactgcgggcccagctc

SEQ ID NO: 19183 - RNA, 20 nt, synthetic construct
  source 1..20: mol_type = other RNA
agccactgggtcttataggt

SEQ ID NO: 19184 - RNA, 20 nt, synthetic construct
  source 1..20: mol_type = other RNA
agccacttcctattagaaga

SEQ ID NO: 19185 - RNA, 20 nt, synthetic construct
  source 1..20: mol_type = other RNA
agccagagagtggaaagagc

SEQ ID NO: 19186 - RNA, 20 nt, synthetic construct
  source 1..20: mol_type = other RNA
agccagaggaagcttataat

SEQ ID NO: 19187 - RNA, 20 nt, synthetic construct
  source 1..20: mol_type = other RNA
agccagagtttcactctgtc

SEQ ID NO: 19188 - RNA, 20 nt, synthetic construct
  source 1..20: mol_type = other RNA
agccagatttgatcctggaa

SEQ ID NO: 19189 - RNA, 20 nt, synthetic construct
  source 1..20: mol_type = other RNA
agccagcaaatcagaaaagg

SEQ ID NO: 19190 - RNA, 20 nt, synthetic construct
  source 1..20: mol_type = other RNA
agccagcacctaacaatgat

SEQ ID NO: 19191 - RNA, 20 nt, synthetic construct
  source 1..20: mol_type = other RNA
agccagcattaccctaataa

SEQ ID NO: 19192 - RNA, 20 nt, synthetic construct
  source 1..20: mol_type = other RNA
agccagcctgatgatgatgg

SEQ ID NO: 19193 - RNA, 20 nt, synthetic construct
  source 1..20: mol_type = other RNA
agccaggaagtcagcaactc

SEQ ID NO: 19194 - RNA, 20 nt, synthetic construct
  source 1..20: mol_type = other RNA
agccaggcatgggggcgcgt

SEQ ID NO: 19195 - RNA, 20 nt, synthetic construct
  source 1..20: mol_type = other RNA
agccaggcgtggtggcggat

SEQ ID NO: 19196 - RNA, 20 nt, synthetic construct
  source 1..20: mol_type = other RNA
agccaggctttcccagggtg

SEQ ID NO: 19197 - RNA, 20 nt, synthetic construct
  source 1..20: mol_type = other RNA
agccagggtctgtctcacct

SEQ ID NO: 19198 - RNA, 20 nt, synthetic construct
  source 1..20: mol_type = other RNA
agccagtcactaaaaatcag

SEQ ID NO: 19199 - RNA, 20 nt, synthetic construct
  source 1..20: mol_type = other RNA
agccagtcagtgatggaggt

SEQ ID NO: 19200 - RNA, 20 nt, synthetic construct
  source 1..20: mol_type = other RNA
agccagtccttgtgatctat

SEQ ID NO: 19201 - RNA, 20 nt, synthetic construct
  source 1..20: mol_type = other RNA
agccagtgattggatatttg

SEQ ID NO: 19202 - RNA, 20 nt, synthetic construct
  source 1..20: mol_type = other RNA
agccagtgcagcaagcagta

SEQ ID NO: 19203 - RNA, 20 nt, synthetic construct
  source 1..20: mol_type = other RNA
agccataagagtccccaact

SEQ ID NO: 19204 - RNA, 20 nt, synthetic construct
  source 1..20: mol_type = other RNA
agccataatccttagattac

SEQ ID NO: 19205 - RNA, 20 nt, synthetic construct
  source 1..20: mol_type = other RNA
agccatagtgtaaactaaaa

SEQ ID NO: 19206 - RNA, 20 nt, synthetic construct
  source 1..20: mol_type = other RNA
agccatcaacctaatgaaat

SEQ ID NO: 19207 - RNA, 20 nt, synthetic construct
  source 1..20: mol_type = other RNA
agccatcatgcctgggtaat

SEQ ID NO: 19208 - RNA, 20 nt, synthetic construct
  source 1..20: mol_type = other RNA
agccatcccagctacataac

SEQ ID NO: 19209 - RNA, 20 nt, synthetic construct
  source 1..20: mol_type = other RNA
agccatcctccagccttaat

SEQ ID NO: 19210 - RNA, 20 nt, synthetic construct
  source 1..20: mol_type = other RNA
agccatcgcgcccagcccgt

SEQ ID NO: 19211 - RNA, 20 nt, synthetic construct
  source 1..20: mol_type = other RNA
agccatctaattcacattta

SEQ ID NO: 19212 - RNA, 20 nt, synthetic construct
  source 1..20: mol_type = other RNA
agccatggctcactgcggcc

SEQ ID NO: 19213 - RNA, 20 nt, synthetic construct
  source 1..20: mol_type = other RNA
agccatgtttctcctgcatg

SEQ ID NO: 19214 - RNA, 20 nt, synthetic construct
  source 1..20: mol_type = other RNA
agccattctcttctggatag

SEQ ID NO: 19215 - RNA, 20 nt, synthetic construct
  source 1..20: mol_type = other RNA
agccatttatcagcaccaaa

SEQ ID NO: 19216 - RNA, 20 nt, synthetic construct
  source 1..20: mol_type = other RNA
agccatttcaggttttcgac

SEQ ID NO: 19217 - RNA, 20 nt, synthetic construct
  source 1..20: mol_type = other RNA
agcccaacagggttttgttt

SEQ ID NO: 19218 - RNA, 20 nt, synthetic construct
  source 1..20: mol_type = other RNA
agcccaacctgattagaggc

SEQ ID NO: 19219 - RNA, 20 nt, synthetic construct
  source 1..20: mol_type = other RNA
agcccaacttcacaccattt

SEQ ID NO: 19220 - RNA, 20 nt, synthetic construct
  source 1..20: mol_type = other RNA
agcccaactttttcttttta

SEQ ID NO: 19221 - RNA, 20 nt, synthetic construct
  source 1..20: mol_type = other RNA
agcccaagcacactttcctt

SEQ ID NO: 19222 - RNA, 20 nt, synthetic construct
  source 1..20: mol_type = other RNA
agcccaagctaccatttatt

SEQ ID NO: 19223 - RNA, 20 nt, synthetic construct
  source 1..20: mol_type = other RNA
agcccaatctacaggtcgga

SEQ ID NO: 19224 - RNA, 20 nt, synthetic construct
  source 1..20: mol_type = other RNA
agcccaccaccatgcctggc

SEQ ID NO: 19225 - RNA, 20 nt, synthetic construct
  source 1..20: mol_type = other RNA
agcccaccagcataagaccc

SEQ ID NO: 19226 - RNA, 20 nt, synthetic construct
  source 1..20: mol_type = other RNA
agcccacttgttgatggggt

SEQ ID NO: 19227 - RNA, 20 nt, synthetic construct
  source 1..20: mol_type = other RNA
agcccagaaataaatcctca

SEQ ID NO: 19228 - RNA, 20 nt, synthetic construct
  source 1..20: mol_type = other RNA
agcccagagaggctaggtga

SEQ ID NO: 19229 - RNA, 20 nt, synthetic construct
  source 1..20: mol_type = other RNA
agcccagagatcccaccatt

SEQ ID NO: 19230 - RNA, 20 nt, synthetic construct
  source 1..20: mol_type = other RNA
agcccagcacttccattttg

SEQ ID NO: 19231 - RNA, 20 nt, synthetic construct
  source 1..20: mol_type = other RNA
agcccagccgcggactccgg

SEQ ID NO: 19232 - RNA, 20 nt, synthetic construct
  source 1..20: mol_type = other RNA
agcccagcttccgggacttg

SEQ ID NO: 19233 - RNA, 20 nt, synthetic construct
  source 1..20: mol_type = other RNA
agcccaggaggttgaagctc

SEQ ID NO: 19234 - RNA, 20 nt, synthetic construct
  source 1..20: mol_type = other RNA
agcccaggagttgcatcact

SEQ ID NO: 19235 - RNA, 20 nt, synthetic construct
  source 1..20: mol_type = other RNA
agcccagggggtcgagactg

SEQ ID NO: 19236 - RNA, 20 nt, synthetic construct
  source 1..20: mol_type = other RNA
agcccatgtctaaagtattg

SEQ ID NO: 19237 - RNA, 20 nt, synthetic construct
  source 1..20: mol_type = other RNA
agccccaaaccatcaagtgt

SEQ ID NO: 19238 - RNA, 20 nt, synthetic construct
  source 1..20: mol_type = other RNA
agccccaaatacctctgaat

SEQ ID NO: 19239 - RNA, 20 nt, synthetic construct
  source 1..20: mol_type = other RNA
agccccaagaaagcaggtca

SEQ ID NO: 19240 - RNA, 20 nt, synthetic construct
  source 1..20: mol_type = other RNA
agccccagaataggcaaatt

SEQ ID NO: 19241 - RNA, 20 nt, synthetic construct
  source 1..20: mol_type = other RNA
agccccagttctgcgcaatt

SEQ ID NO: 19242 - RNA, 20 nt, synthetic construct
  source 1..20: mol_type = other RNA
agccccattgtacacatatt

SEQ ID NO: 19243 - RNA, 20 nt, synthetic construct
  source 1..20: mol_type = other RNA
agcccccacgcccggccgat

SEQ ID NO: 19244 - RNA, 20 nt, synthetic construct
  source 1..20: mol_type = other RNA
agcccccagttttgttgaat

SEQ ID NO: 19245 - RNA, 20 nt, synthetic construct
  source 1..20: mol_type = other RNA
agccccctccctaccacccg

SEQ ID NO: 19246 - RNA, 20 nt, synthetic construct
  source 1..20: mol_type = other RNA
agccccctcgaagagaccac

SEQ ID NO: 19247 - RNA, 20 nt, synthetic construct
  source 1..20: mol_type = other RNA
agccccctgaatacccctcc

SEQ ID NO: 19248 - RNA, 20 nt, synthetic construct
  source 1..20: mol_type = other RNA
agccccctgagtagctgtga

SEQ ID NO: 19249 - RNA, 20 nt, synthetic construct
  source 1..20: mol_type = other RNA
agccccgacgcctttcattt

SEQ ID NO: 19250 - RNA, 20 nt, synthetic construct
  source 1..20: mol_type = other RNA
agccccgcttcagttggtga

SEQ ID NO: 19251 - RNA, 20 nt, synthetic construct
  source 1..20: mol_type = other RNA
agcccctagcatgcagtagc

SEQ ID NO: 19252 - RNA, 20 nt, synthetic construct
  source 1..20: mol_type = other RNA
agcccctcatcctccgtagc

SEQ ID NO: 19253 - RNA, 20 nt, synthetic construct
  source 1..20: mol_type = other RNA
agcccctgccacactccagc

SEQ ID NO: 19254 - RNA, 20 nt, synthetic construct
  source 1..20: mol_type = other RNA
agcccctgctgccagatgtt

SEQ ID NO: 19255 - RNA, 20 nt, synthetic construct
  source 1..20: mol_type = other RNA
agcccctggtgatctatgaa

SEQ ID NO: 19256 - RNA, 20 nt, synthetic construct
  source 1..20: mol_type = other RNA
agccccttatcaggaaagtg

SEQ ID NO: 19257 - RNA, 20 nt, synthetic construct
  source 1..20: mol_type = other RNA
agcccgacctccagcgctaa

SEQ ID NO: 19258 - RNA, 20 nt, synthetic construct
  source 1..20: mol_type = other RNA
agcccgccgctcgcaggtgg

SEQ ID NO: 19259 - RNA, 20 nt, synthetic construct
  source 1..20: mol_type = other RNA
agcccgtgtgtttagaataa

SEQ ID NO: 19260 - RNA, 20 nt, synthetic construct
  source 1..20: mol_type = other RNA
agccctcaggaccaggcagt

SEQ ID NO: 19261 - RNA, 20 nt, synthetic construct
  source 1..20: mol_type = other RNA
agccctccaggatccagtct

SEQ ID NO: 19262 - RNA, 20 nt, synthetic construct
  source 1..20: mol_type = other RNA
agccctctaagtcagcctgg

SEQ ID NO: 19263 - RNA, 20 nt, synthetic construct
  source 1..20: mol_type = other RNA
agccctgatagatattggca

SEQ ID NO: 19264 - RNA, 20 nt, synthetic construct
  source 1..20: mol_type = other RNA
agccctgcagccagatttga

SEQ ID NO: 19265 - RNA, 20 nt, synthetic construct
  source 1..20: mol_type = other RNA
agccctgccttaaaacattt

SEQ ID NO: 19266 - RNA, 20 nt, synthetic construct
  source 1..20: mol_type = other RNA
agccctgctgtggccgaggg

SEQ ID NO: 19267 - RNA, 20 nt, synthetic construct
  source 1..20: mol_type = other RNA
agcccttccttgcttgtctt

SEQ ID NO: 19268 - RNA, 20 nt, synthetic construct
  source 1..20: mol_type = other RNA
agcccttgagtatttttgag

SEQ ID NO: 19269 - RNA, 20 nt, synthetic construct
  source 1..20: mol_type = other RNA
agccgaaatgcacttagcgc

SEQ ID NO: 19270 - RNA, 20 nt, synthetic construct
  source 1..20: mol_type = other RNA
agccgagcagaagggaaagg

SEQ ID NO: 19271 - RNA, 20 nt, synthetic construct
  source 1..20: mol_type = other RNA
agccgcaaataatcattctt

SEQ ID NO: 19272 - RNA, 20 nt, synthetic construct
  source 1..20: mol_type = other RNA
agccgccgcagaggccaaat

SEQ ID NO: 19273 - RNA, 20 nt, synthetic construct
  source 1..20: mol_type = other RNA
agccgcggactccggcggga

SEQ ID NO: 19274 - RNA, 20 nt, synthetic construct
  source 1..20: mol_type = other RNA
agccggattcctttcaaaga

SEQ ID NO: 19275 - RNA, 20 nt, synthetic construct
  source 1..20: mol_type = other RNA
agccggcatatgtcactgta

SEQ ID NO: 19276 - RNA, 20 nt, synthetic construct
  source 1..20: mol_type = other RNA
agccgggaggagccaagtaa

SEQ ID NO: 19277 - RNA, 20 nt, synthetic construct
  source 1..20: mol_type = other RNA
agccgggtgtagtggtgtgt

SEQ ID NO: 19278 - RNA, 20 nt, synthetic construct
  source 1..20: mol_type = other RNA
agccgtcggtatgttaataa

SEQ ID NO: 19279 - RNA, 20 nt, synthetic construct
  source 1..20: mol_type = other RNA
agccgttccatcagagaggc

SEQ ID NO: 19280 - RNA, 20 nt, synthetic construct
  source 1..20: mol_type = other RNA
agcctaaaataggcctaggt

SEQ ID NO: 19281 - RNA, 20 nt, synthetic construct
  source 1..20: mol_type = other RNA
agcctaaaccattttcaatc

SEQ ID NO: 19282 - RNA, 20 nt, synthetic construct
  source 1..20: mol_type = other RNA
agcctaaagtccacagatct

SEQ ID NO: 19283 - RNA, 20 nt, synthetic construct
  source 1..20: mol_type = other RNA
agcctaagcaaatgtaatga

SEQ ID NO: 19284 - RNA, 20 nt, synthetic construct
  source 1..20: mol_type = other RNA
agcctaagcaagttacatgc

SEQ ID NO: 19285 - RNA, 20 nt, synthetic construct
  source 1..20: mol_type = other RNA
agcctaatgtgtaagaaatg

SEQ ID NO: 19286 - RNA, 20 nt, synthetic construct
  source 1..20: mol_type = other RNA
agcctaattgtacacctcaa

SEQ ID NO: 19287 - RNA, 20 nt, synthetic construct
  source 1..20: mol_type = other RNA
agcctacctcccttcacaaa

SEQ ID NO: 19288 - RNA, 20 nt, synthetic construct
  source 1..20: mol_type = other RNA
agcctactgctctgtcctgt

SEQ ID NO: 19289 - RNA, 20 nt, synthetic construct
  source 1..20: mol_type = other RNA
agcctagacctcaaattaat

SEQ ID NO: 19290 - RNA, 20 nt, synthetic construct
  source 1..20: mol_type = other RNA
agcctagagattaggcagaa

SEQ ID NO: 19291 - RNA, 20 nt, synthetic construct
  source 1..20: mol_type = other RNA
agcctaggcaagagagcaag

SEQ ID NO: 19292 - RNA, 20 nt, synthetic construct
  source 1..20: mol_type = other RNA
agcctagtcatccactgcac

SEQ ID NO: 19293 - RNA, 20 nt, synthetic construct
  source 1..20: mol_type = other RNA
agcctatgtaagacaatgtc

SEQ ID NO: 19294 - RNA, 20 nt, synthetic construct
  source 1..20: mol_type = other RNA
agcctcaaaatttagtaagg

SEQ ID NO: 19295 - RNA, 20 nt, synthetic construct
  source 1..20: mol_type = other RNA
agcctcaaacaatcctccct

SEQ ID NO: 19296 - RNA, 20 nt, synthetic construct
  source 1..20: mol_type = other RNA
agcctcaaacgaaccaatta

SEQ ID NO: 19297 - RNA, 20 nt, synthetic construct
  source 1..20: mol_type = other RNA
agcctcaacagcacttttgt

SEQ ID NO: 19298 - RNA, 20 nt, synthetic construct
  source 1..20: mol_type = other RNA
agcctcatttgaactttcca

SEQ ID NO: 19299 - RNA, 20 nt, synthetic construct
  source 1..20: mol_type = other RNA
agcctccacacctggcccct

SEQ ID NO: 19300 - RNA, 20 nt, synthetic construct
  source 1..20: mol_type = other RNA
agcctccagaaaaccagaaa

SEQ ID NO: 19301 - RNA, 20 nt, synthetic construct
  source 1..20: mol_type = other RNA
agcctcccgagtagttgtaa

SEQ ID NO: 19302 - RNA, 20 nt, synthetic construct
  source 1..20: mol_type = other RNA
agcctcctaagttttggggg

SEQ ID NO: 19303 - RNA, 20 nt, synthetic construct
  source 1..20: mol_type = other RNA
agcctctaatcaggttgggc

SEQ ID NO: 19304 - RNA, 20 nt, synthetic construct
  source 1..20: mol_type = other RNA
agcctctcaacacttcagtg

SEQ ID NO: 19305 - RNA, 20 nt, synthetic construct
  source 1..20: mol_type = other RNA
agcctctctgatggaacggc

SEQ ID NO: 19306 - RNA, 20 nt, synthetic construct
  source 1..20: mol_type = other RNA
agcctctctgggcttcactt

SEQ ID NO: 19307 - RNA, 20 nt, synthetic construct
  source 1..20: mol_type = other RNA
agcctctgtggaccatgttt

SEQ ID NO: 19308 - RNA, 20 nt, synthetic construct
  source 1..20: mol_type = other RNA
agcctcttcagaagaggata

SEQ ID NO: 19309 - RNA, 20 nt, synthetic construct
  source 1..20: mol_type = other RNA
agcctgaggacactagcaat

SEQ ID NO: 19310 - RNA, 20 nt, synthetic construct
  source 1..20: mol_type = other RNA
agcctgataagctcccagcc

SEQ ID NO: 19311 - RNA, 20 nt, synthetic construct
  source 1..20: mol_type = other RNA
agcctgatgatgatggtgat

SEQ ID NO: 19312 - RNA, 20 nt, synthetic construct
  source 1..20: mol_type = other RNA
agcctgcagaaggagaaacc

SEQ ID NO: 19313 - RNA, 20 nt, synthetic construct
  source 1..20: mol_type = other RNA
agcctgctctgcagagactg

SEQ ID NO: 19314 - RNA, 20 nt, synthetic construct
  source 1..20: mol_type = other RNA
agcctgcttcagcctaagca

SEQ ID NO: 19315 - RNA, 20 nt, synthetic construct
  source 1..20: mol_type = other RNA
agcctggaagttcaaggtta

SEQ ID NO: 19316 - RNA, 20 nt, synthetic construct
  source 1..20: mol_type = other RNA
agcctggccaacatcgtaaa

SEQ ID NO: 19317 - RNA, 20 nt, synthetic construct
  source 1..20: mol_type = other RNA
agcctggctttagatggtaa

SEQ ID NO: 19318 - RNA, 20 nt, synthetic construct
  source 1..20: mol_type = other RNA
agcctgggacagagcgagac

SEQ ID NO: 19319 - RNA, 20 nt, synthetic construct
  source 1..20: mol_type = other RNA
agcctgggcacacgccactg

SEQ ID NO: 19320 - RNA, 20 nt, synthetic construct
  source 1..20: mol_type = other RNA
agcctggtaatgaatagaaa

SEQ ID NO: 19321 - RNA, 20 nt, synthetic construct
  source 1..20: mol_type = other RNA
agcctggtcaacagggtaag

SEQ ID NO: 19322 - RNA, 20 nt, synthetic construct
  source 1..20: mol_type = other RNA
agcctgtgacagtatgtcag

SEQ ID NO: 19323 - RNA, 20 nt, synthetic construct
  source 1..20: mol_type = other RNA
agcctgtggaggcagtacca

SEQ ID NO: 19324 - RNA, 20 nt, synthetic construct
  source 1..20: mol_type = other RNA
agcctgtggtctcttcgagg

SEQ ID NO: 19325 - RNA, 20 nt, synthetic construct
  source 1..20: mol_type = other RNA
agcctgtgtcagtgacagtt

SEQ ID NO: 19326 - RNA, 20 nt, synthetic construct
  source 1..20: mol_type = other RNA
agcctgttccgattttactt

SEQ ID NO: 19327 - RNA, 20 nt, synthetic construct
  source 1..20: mol_type = other RNA
agccttaaaagtgctgcagt

SEQ ID NO: 19328 - RNA, 20 nt, synthetic construct
  source 1..20: mol_type = other RNA
agccttaatctcctgagtag

SEQ ID NO: 19329 - RNA, 20 nt, synthetic construct
  source 1..20: mol_type = other RNA
agccttcagaactcttctcc

SEQ ID NO: 19330 - RNA, 20 nt, synthetic construct
  source 1..20: mol_type = other RNA
agccttccagagacaaagca

SEQ ID NO: 19331 - RNA, 20 nt, synthetic construct
  source 1..20: mol_type = other RNA
agccttcccctgctgttccc

SEQ ID NO: 19332 - RNA, 20 nt, synthetic construct
  source 1..20: mol_type = other RNA
agccttccctgaacaatgat

SEQ ID NO: 19333 - RNA, 20 nt, synthetic construct
  source 1..20: mol_type = other RNA
agccttctctactctgcctc

SEQ ID NO: 19334 - RNA, 20 nt, synthetic construct
  source 1..20: mol_type = other RNA
agccttctctcttccaaata

SEQ ID NO: 19335 - RNA, 20 nt, synthetic construct
  source 1..20: mol_type = other RNA
agccttcttggagtaaacct

SEQ ID NO: 19336 - RNA, 20 nt, synthetic construct
  source 1..20: mol_type = other RNA
agccttgaaaatatactaaa

SEQ ID NO: 19337 - RNA, 20 nt, synthetic construct
  source 1..20: mol_type = other RNA
agccttgccattctcccagt

SEQ ID NO: 19338 - RNA, 20 nt, synthetic construct
  source 1..20: mol_type = other RNA
agccttgctgttgtaatgtt

SEQ ID NO: 19339 - RNA, 20 nt, synthetic construct
  source 1..20: mol_type = other RNA
agccttggaggagccctgct

SEQ ID NO: 19340 - RNA, 20 nt, synthetic construct
  source 1..20: mol_type = other RNA
agccttggcaaggggaatgg

SEQ ID NO: 19341 - RNA, 20 nt, synthetic construct
  source 1..20: mol_type = other RNA
agccttggtaaaatcactaa

SEQ ID NO: 19342 - RNA, 20 nt, synthetic construct
  source 1..20: mol_type = other RNA
agccttggtaagagtgagac

SEQ ID NO: 19343 - RNA, 20 nt, synthetic construct
  source 1..20: mol_type = other RNA
agccttgtactgtgtggctt

SEQ ID NO: 19344 - RNA, 20 nt, synthetic construct
  source 1..20: mol_type = other RNA
agcctttaatttagcgttca

SEQ ID NO: 19345 - RNA, 20 nt, synthetic construct
  source 1..20: mol_type = other RNA
agcctttattttttcttccc

SEQ ID NO: 19346 - RNA, 20 nt, synthetic construct
  source 1..20: mol_type = other RNA
agccttttacaccctaggta

SEQ ID NO: 19347 - RNA, 20 nt, synthetic construct
  source 1..20: mol_type = other RNA
agccttttctgatttgctgg

SEQ ID NO: 19348 - RNA, 20 nt, synthetic construct
  source 1..20: mol_type = other RNA
agcgaaagggattctggcca

SEQ ID NO: 19349 - RNA, 20 nt, synthetic construct
  source 1..20: mol_type = other RNA
agcgaaaggtacgacgctct

SEQ ID NO: 19350 - RNA, 20 nt, synthetic construct
  source 1..20: mol_type = other RNA
agcgaagagggagaagaaat

SEQ ID NO: 19351 - RNA, 20 nt, synthetic construct
  source 1..20: mol_type = other RNA
agcgacagctacggaggatg

SEQ ID NO: 19352 - RNA, 20 nt, synthetic construct
  source 1..20: mol_type = other RNA
agcgagacctcatctctgca

SEQ ID NO: 19353 - RNA, 20 nt, synthetic construct
  source 1..20: mol_type = other RNA
agcgaggcctggaacaggcc

SEQ ID NO: 19354 - RNA, 20 nt, synthetic construct
  source 1..20: mol_type = other RNA
agcgccacgtgaagatggag

SEQ ID NO: 19355 - RNA, 20 nt, synthetic construct
  source 1..20: mol_type = other RNA
agcgccacttaaaaaatgcg

SEQ ID NO: 19356 - RNA, 20 nt, synthetic construct
  source 1..20: mol_type = other RNA
agcgcccggcccgttatttt

SEQ ID NO: 19357 - RNA, 20 nt, synthetic construct
  source 1..20: mol_type = other RNA
agcgccctggcattgtcccg

SEQ ID NO: 19358 - RNA, 20 nt, synthetic construct
  source 1..20: mol_type = other RNA
agcgctaagcactgcgccaa

SEQ ID NO: 19359 - RNA, 20 nt, synthetic construct
  source 1..20: mol_type = other RNA
agcgctaagtgcatttcggc

SEQ ID NO: 19360 - RNA, 20 nt, synthetic construct
  source 1..20: mol_type = other RNA
agcgctactcagctgtcact

SEQ ID NO: 19361 - RNA, 20 nt, synthetic construct
  source 1..20: mol_type = other RNA
agcgctcttcaagcattggg

SEQ ID NO: 19362 - RNA, 20 nt, synthetic construct
  source 1..20: mol_type = other RNA
agcgctgaagtacttcaagg

SEQ ID NO: 19363 - RNA, 20 nt, synthetic construct
  source 1..20: mol_type = other RNA
agcgctgatgtgttgacctt

SEQ ID NO: 19364 - RNA, 20 nt, synthetic construct
  source 1..20: mol_type = other RNA
agcgctggaggtcgggctgc

SEQ ID NO: 19365 - RNA, 20 nt, synthetic construct
  source 1..20: mol_type = other RNA
agcgcttctatgtgacaaac

SEQ ID NO: 19366 - RNA, 20 nt, synthetic construct
  source 1..20: mol_type = other RNA
agcgcttgaacaaatatgaa

SEQ ID NO: 19367 - RNA, 20 nt, synthetic construct
  source 1..20: mol_type = other RNA
agcgctttaagcatcccata

SEQ ID NO: 19368 - RNA, 20 nt, synthetic construct
  source 1..20: mol_type = other RNA
agcggaatgactatagaaat

SEQ ID NO: 19369 - RNA, 20 nt, synthetic construct
  source 1..20: mol_type = other RNA
agcggcagggccgggggttg

SEQ ID NO: 19370 - RNA, 20 nt, synthetic construct
  source 1..20: mol_type = other RNA
agcggcatacaggagttccg

SEQ ID NO: 19371 - RNA, 20 nt, synthetic construct
  source 1..20: mol_type = other RNA
agcggcctttgcctctccag

SEQ ID NO: 19372 - RNA, 20 nt, synthetic construct
  source 1..20: mol_type = other RNA
agcggcgggcttcgcctttg

SEQ ID NO: 19373 - RNA, 20 nt, synthetic construct
  source 1..20: mol_type = other RNA
agcgggaaaaaataatatga

SEQ ID NO: 19374 - RNA, 20 nt, synthetic construct
  source 1..20: mol_type = other RNA
agcgggcagccttggaggag

SEQ ID NO: 19375 - RNA, 20 nt, synthetic construct
  source 1..20: mol_type = other RNA
agcggggatgctcagggtgc

SEQ ID NO: 19376 - RNA, 20 nt, synthetic construct
  source 1..20: mol_type = other RNA
agcggggatggttgcacaat

SEQ ID NO: 19377 - RNA, 20 nt, synthetic construct
  source 1..20: mol_type = other RNA
agcggggctgccactactta

SEQ ID NO: 19378 - RNA, 20 nt, synthetic construct
  source 1..20: mol_type = other RNA
agcgggtttcctcggtctac

SEQ ID NO: 19379 - RNA, 20 nt, synthetic construct
  source 1..20: mol_type = other RNA
agcggtcaacgcacccagag

SEQ ID NO: 19380 - RNA, 20 nt, synthetic construct
  source 1..20: mol_type = other RNA
agcggtgtcttattgttttg

SEQ ID NO: 19381 - RNA, 20 nt, synthetic construct
  source 1..20: mol_type = other RNA
agcgtaactccatcttcacg

SEQ ID NO: 19382 - RNA, 20 nt, synthetic construct
  source 1..20: mol_type = other RNA
agcgtacggggtccgcgcgg

SEQ ID NO: 19383 - RNA, 20 nt, synthetic construct
  source 1..20: mol_type = other RNA
agcgtactgtgattacaatt

SEQ ID NO: 19384 - RNA, 20 nt, synthetic construct
  source 1..20: mol_type = other RNA
agcgtcctcactgtgatacc

SEQ ID NO: 19385 - RNA, 20 nt, synthetic construct
  source 1..20: mol_type = other RNA
agcgtcgtacctttcgctat

SEQ ID NO: 19386 - RNA, 20 nt, synthetic construct
  source 1..20: mol_type = other RNA
agcgtgcaccttacattgta

SEQ ID NO: 19387 - RNA, 20 nt, synthetic construct
  source 1..20: mol_type = other RNA
agcgtggaatggtcaatttc

SEQ ID NO: 19388 - RNA, 20 nt, synthetic construct
  source 1..20: mol_type = other RNA
agcgtgggcaacacaatgag

SEQ ID NO: 19389 - RNA, 20 nt, synthetic construct
  source 1..20: mol_type = other RNA
agcgtgtgcatgaccctgct

SEQ ID NO: 19390 - RNA, 20 nt, synthetic construct
  source 1..20: mol_type = other RNA
agcgttcatccaaattattg

SEQ ID NO: 19391 - RNA, 20 nt, synthetic construct
  source 1..20: mol_type = other RNA
agcgttggagacagcctaaa

SEQ ID NO: 19392 - RNA, 20 nt, synthetic construct
  source 1..20: mol_type = other RNA
agcgttgttcagttgaaaag

SEQ ID NO: 19393 - RNA, 20 nt, synthetic construct
  source 1..20: mol_type = other RNA
agctaaaatgttcagataga

SEQ ID NO: 19394 - RNA, 20 nt, synthetic construct
  source 1..20: mol_type = other RNA
agctaaattttcataggaaa

SEQ ID NO: 19395 - RNA, 20 nt, synthetic construct
  source 1..20: mol_type = other RNA
agctaacttttaacccacag

SEQ ID NO: 19396 - RNA, 20 nt, synthetic construct
  source 1..20: mol_type = other RNA
agctaagaaacagtaattag

SEQ ID NO: 19397 - RNA, 20 nt, synthetic construct
  source 1..20: mol_type = other RNA
agctaagactataaaactct

SEQ ID NO: 19398 - RNA, 20 nt, synthetic construct
  source 1..20: mol_type = other RNA
agctaagagttttatagtct

SEQ ID NO: 19399 - RNA, 20 nt, synthetic construct
  source 1..20: mol_type = other RNA
agctaagatgctattcaaga

SEQ ID NO: 19400 - RNA, 20 nt, synthetic construct
  source 1..20: mol_type = other RNA
agctaagcaccaacagatcc

SEQ ID NO: 19401 - RNA, 20 nt, synthetic construct
  source 1..20: mol_type = other RNA
agctaagggaagttttttca

SEQ ID NO: 19402 - RNA, 20 nt, synthetic construct
  source 1..20: mol_type = other RNA
agctaagtatgcagaaacca

SEQ ID NO: 19403 - RNA, 20 nt, synthetic construct
  source 1..20: mol_type = other RNA
agctaataatttatcagatc

SEQ ID NO: 19404 - RNA, 20 nt, synthetic construct
  source 1..20: mol_type = other RNA
agctaatatctttggggaga

SEQ ID NO: 19405 - RNA, 20 nt, synthetic construct
  source 1..20: mol_type = other RNA
agctaatatgctgtagtgat

SEQ ID NO: 19406 - RNA, 20 nt, synthetic construct
  source 1..20: mol_type = other RNA
agctaatcaagccgcaaata

SEQ ID NO: 19407 - RNA, 20 nt, synthetic construct
  source 1..20: mol_type = other RNA
agctaatcccaaagtgagca

SEQ ID NO: 19408 - RNA, 20 nt, synthetic construct
  source 1..20: mol_type = other RNA
agctaatctactttctaatc

SEQ ID NO: 19409 - RNA, 20 nt, synthetic construct
  source 1..20: mol_type = other RNA
agctaatttcagagagacct

SEQ ID NO: 19410 - RNA, 20 nt, synthetic construct
  source 1..20: mol_type = other RNA
agctaattttctaatcttca

SEQ ID NO: 19411 - RNA, 20 nt, synthetic construct
  source 1..20: mol_type = other RNA
agctacaaaagggaaaacaa

SEQ ID NO: 19412 - RNA, 20 nt, synthetic construct
  source 1..20: mol_type = other RNA
agctacaaactccaaacctt

SEQ ID NO: 19413 - RNA, 20 nt, synthetic construct
  source 1..20: mol_type = other RNA
agctacactcaatacacgtg

SEQ ID NO: 19414 - RNA, 20 nt, synthetic construct
  source 1..20: mol_type = other RNA
agctacagactaatatgagt

SEQ ID NO: 19415 - RNA, 20 nt, synthetic construct
  source 1..20: mol_type = other RNA
agctacagtaatcaaacagt

SEQ ID NO: 19416 - RNA, 20 nt, synthetic construct
  source 1..20: mol_type = other RNA
agctacataacttcccagac

SEQ ID NO: 19417 - RNA, 20 nt, synthetic construct
  source 1..20: mol_type = other RNA
agctaccatttattcctctc

SEQ ID NO: 19418 - RNA, 20 nt, synthetic construct
  source 1..20: mol_type = other RNA
agctaccctcgagtaaaaag

SEQ ID NO: 19419 - RNA, 20 nt, synthetic construct
  source 1..20: mol_type = other RNA
agctaccctttcttgttagt

SEQ ID NO: 19420 - RNA, 20 nt, synthetic construct
  source 1..20: mol_type = other RNA
agctacctgttgattgttgc

SEQ ID NO: 19421 - RNA, 20 nt, synthetic construct
  source 1..20: mol_type = other RNA
agctacggaggatgaggggc

SEQ ID NO: 19422 - RNA, 20 nt, synthetic construct
  source 1..20: mol_type = other RNA
agctactaaacaaatcagat

SEQ ID NO: 19423 - RNA, 20 nt, synthetic construct
  source 1..20: mol_type = other RNA
agctactatgaatatactgg

SEQ ID NO: 19424 - RNA, 20 nt, synthetic construct
  source 1..20: mol_type = other RNA
agctactattccaggatcaa

SEQ ID NO: 19425 - RNA, 20 nt, synthetic construct
  source 1..20: mol_type = other RNA
agctactgcatgctaggggc

SEQ ID NO: 19426 - RNA, 20 nt, synthetic construct
  source 1..20: mol_type = other RNA
agctagaacagaataaaaag

SEQ ID NO: 19427 - RNA, 20 nt, synthetic construct
  source 1..20: mol_type = other RNA
agctagaactagaatactcc

SEQ ID NO: 19428 - RNA, 20 nt, synthetic construct
  source 1..20: mol_type = other RNA
agctagaagacctcaaattc

SEQ ID NO: 19429 - RNA, 20 nt, synthetic construct
  source 1..20: mol_type = other RNA
agctagagggtaagaccaaa

SEQ ID NO: 19430 - RNA, 20 nt, synthetic construct
  source 1..20: mol_type = other RNA
agctaggaccataggcacgc

SEQ ID NO: 19431 - RNA, 20 nt, synthetic construct
  source 1..20: mol_type = other RNA
agctaggcgtagtatctcat

SEQ ID NO: 19432 - RNA, 20 nt, synthetic construct
  source 1..20: mol_type = other RNA
agctaggtgagtgagatggg

SEQ ID NO: 19433 - RNA, 20 nt, synthetic construct
  source 1..20: mol_type = other RNA
agctagtgtcttagtctgac

SEQ ID NO: 19434 - RNA, 20 nt, synthetic construct
  source 1..20: mol_type = other RNA
agctagtgtgtctgactaca

SEQ ID NO: 19435 - RNA, 20 nt, synthetic construct
  source 1..20: mol_type = other RNA
agctataatttatctggatt

SEQ ID NO: 19436 - RNA, 20 nt, synthetic construct
  source 1..20: mol_type = other RNA
agctatacacgttacaaaat

SEQ ID NO: 19437 - RNA, 20 nt, synthetic construct
  source 1..20: mol_type = other RNA
agctatagctgagaagtaac

SEQ ID NO: 19438 - RNA, 20 nt, synthetic construct
  source 1..20: mol_type = other RNA
agctatagcttctgagctgt

SEQ ID NO: 19439 - RNA, 20 nt, synthetic construct
  source 1..20: mol_type = other RNA
agctatatcccaaattggca

SEQ ID NO: 19440 - RNA, 20 nt, synthetic construct
  source 1..20: mol_type = other RNA
agctatattcacttttggaa

SEQ ID NO: 19441 - RNA, 20 nt, synthetic construct
  source 1..20: mol_type = other RNA
agctatcagaattttattca

SEQ ID NO: 19442 - RNA, 20 nt, synthetic construct
  source 1..20: mol_type = other RNA
agctatcaggccttccacct

SEQ ID NO: 19443 - RNA, 20 nt, synthetic construct
  source 1..20: mol_type = other RNA
agctatcctaatgggcgtgg

SEQ ID NO: 19444 - RNA, 20 nt, synthetic construct
  source 1..20: mol_type = other RNA
agctatggagcactgtgagc

SEQ ID NO: 19445 - RNA, 20 nt, synthetic construct
  source 1..20: mol_type = other RNA
agctatggtgttatttgttc

SEQ ID NO: 19446 - RNA, 20 nt, synthetic construct
  source 1..20: mol_type = other RNA
agctattatttgaaaaagga

SEQ ID NO: 19447 - RNA, 20 nt, synthetic construct
  source 1..20: mol_type = other RNA
agctattgtcttttctatct

SEQ ID NO: 19448 - RNA, 20 nt, synthetic construct
  source 1..20: mol_type = other RNA
agctcaaaaatactcaaggg

SEQ ID NO: 19449 - RNA, 20 nt, synthetic construct
  source 1..20: mol_type = other RNA
agctcaaacagcttgacatt

SEQ ID NO: 19450 - RNA, 20 nt, synthetic construct
  source 1..20: mol_type = other RNA
agctcaaagcatatgaatct

SEQ ID NO: 19451 - RNA, 20 nt, synthetic construct
  source 1..20: mol_type = other RNA
agctcaattaagcaaccttt

SEQ ID NO: 19452 - RNA, 20 nt, synthetic construct
  source 1..20: mol_type = other RNA
agctcacacgagaaggacag

SEQ ID NO: 19453 - RNA, 20 nt, synthetic construct
  source 1..20: mol_type = other RNA
agctcacctctggactcagg

SEQ ID NO: 19454 - RNA, 20 nt, synthetic construct
  source 1..20: mol_type = other RNA
agctcacgttaccctctgga

SEQ ID NO: 19455 - RNA, 20 nt, synthetic construct
  source 1..20: mol_type = other RNA
agctcactagagcttcaacc

SEQ ID NO: 19456 - RNA, 20 nt, synthetic construct
  source 1..20: mol_type = other RNA
agctcagaagctatagctga

SEQ ID NO: 19457 - RNA, 20 nt, synthetic construct
  source 1..20: mol_type = other RNA
agctcaggaccagatgactt

SEQ ID NO: 19458 - RNA, 20 nt, synthetic construct
  source 1..20: mol_type = other RNA
agctcaggccagtgagtgat

SEQ ID NO: 19459 - RNA, 20 nt, synthetic construct
  source 1..20: mol_type = other RNA
agctcagtgtgtttttgtaa

SEQ ID NO: 19460 - RNA, 20 nt, synthetic construct
  source 1..20: mol_type = other RNA
agctcatcatttatacccaa

SEQ ID NO: 19461 - RNA, 20 nt, synthetic construct
  source 1..20: mol_type = other RNA
agctcattacagtctcgacc

SEQ ID NO: 19462 - RNA, 20 nt, synthetic construct
  source 1..20: mol_type = other RNA
agctccaaaagcgaaaggca

SEQ ID NO: 19463 - RNA, 20 nt, synthetic construct
  source 1..20: mol_type = other RNA
agctccaaagaacaggagtt

SEQ ID NO: 19464 - RNA, 20 nt, synthetic construct
  source 1..20: mol_type = other RNA
agctccagcctgggcgacag

SEQ ID NO: 19465 - RNA, 20 nt, synthetic construct
  source 1..20: mol_type = other RNA
agctcccaatgcttgaagag

SEQ ID NO: 19466 - RNA, 20 nt, synthetic construct
  source 1..20: mol_type = other RNA
agctcccagccaaacagttt

SEQ ID NO: 19467 - RNA, 20 nt, synthetic construct
  source 1..20: mol_type = other RNA
agctccccattccctgtctg

SEQ ID NO: 19468 - RNA, 20 nt, synthetic construct
  source 1..20: mol_type = other RNA
agctcccccggggctcgcag

SEQ ID NO: 19469 - RNA, 20 nt, synthetic construct
  source 1..20: mol_type = other RNA
agctccccggatgattctaa

SEQ ID NO: 19470 - RNA, 20 nt, synthetic construct
  source 1..20: mol_type = other RNA
agctccgcctcctggtgggt

SEQ ID NO: 19471 - RNA, 20 nt, synthetic construct
  source 1..20: mol_type = other RNA
agctcctcagaaggccaagg

SEQ ID NO: 19472 - RNA, 20 nt, synthetic construct
  source 1..20: mol_type = other RNA
agctcctgacctcagatatc

SEQ ID NO: 19473 - RNA, 20 nt, synthetic construct
  source 1..20: mol_type = other RNA
agctcctgggaaaaggattt

SEQ ID NO: 19474 - RNA, 20 nt, synthetic construct
  source 1..20: mol_type = other RNA
agctcgaccaggggaaggag

SEQ ID NO: 19475 - RNA, 20 nt, synthetic construct
  source 1..20: mol_type = other RNA
agctcgccgtctccctcggc

SEQ ID NO: 19476 - RNA, 20 nt, synthetic construct
  source 1..20: mol_type = other RNA
agctctaataaaagctggag

SEQ ID NO: 19477 - RNA, 20 nt, synthetic construct
  source 1..20: mol_type = other RNA
agctctaatagttcacctct

SEQ ID NO: 19478 - RNA, 20 nt, synthetic construct
  source 1..20: mol_type = other RNA
agctctagcaaacaaacaca

SEQ ID NO: 19479 - RNA, 20 nt, synthetic construct
  source 1..20: mol_type = other RNA
agctctagccttgtactgtg

SEQ ID NO: 19480 - RNA, 20 nt, synthetic construct
  source 1..20: mol_type = other RNA
agctctagtgagctatgatt

SEQ ID NO: 19481 - RNA, 20 nt, synthetic construct
  source 1..20: mol_type = other RNA
agctctatggcatttgaggg

SEQ ID NO: 19482 - RNA, 20 nt, synthetic construct
  source 1..20: mol_type = other RNA
agctctcaattaatgcccaa

SEQ ID NO: 19483 - RNA, 20 nt, synthetic construct
  source 1..20: mol_type = other RNA
agctctcagtggccctgttg

SEQ ID NO: 19484 - RNA, 20 nt, synthetic construct
  source 1..20: mol_type = other RNA
agctctcatgagtcctgaaa

SEQ ID NO: 19485 - RNA, 20 nt, synthetic construct
  source 1..20: mol_type = other RNA
agctctcatgtcagagacac

SEQ ID NO: 19486 - RNA, 20 nt, synthetic construct
  source 1..20: mol_type = other RNA
agctctgatgctttctctag

SEQ ID NO: 19487 - RNA, 20 nt, synthetic construct
  source 1..20: mol_type = other RNA
agctctgtcttgatgataga

SEQ ID NO: 19488 - RNA, 20 nt, synthetic construct
  source 1..20: mol_type = other RNA
agctcttaagcttaggtctt

SEQ ID NO: 19489 - RNA, 20 nt, synthetic construct
  source 1..20: mol_type = other RNA
agctcttcccttaacctttt

SEQ ID NO: 19490 - RNA, 20 nt, synthetic construct
  source 1..20: mol_type = other RNA
agctcttctcagttgcagca

SEQ ID NO: 19491 - RNA, 20 nt, synthetic construct
  source 1..20: mol_type = other RNA
agctcttttgtgtcttttta

SEQ ID NO: 19492 - RNA, 20 nt, synthetic construct
  source 1..20: mol_type = other RNA
agctgaaagtaaagatagcc

SEQ ID NO: 19493 - RNA, 20 nt, synthetic construct
  source 1..20: mol_type = other RNA
agctgaactcctttcttacc

SEQ ID NO: 19494 - RNA, 20 nt, synthetic construct
  source 1..20: mol_type = other RNA
agctgaactctgtggagtcc

SEQ ID NO: 19495 - RNA, 20 nt, synthetic construct
  source 1..20: mol_type = other RNA
agctgaaggcactgtatggt

SEQ ID NO: 19496 - RNA, 20 nt, synthetic construct
  source 1..20: mol_type = other RNA
agctgacccactggtttcag

SEQ ID NO: 19497 - RNA, 20 nt, synthetic construct
  source 1..20: mol_type = other RNA
agctgactttcatttgtaat

SEQ ID NO: 19498 - RNA, 20 nt, synthetic construct
  source 1..20: mol_type = other RNA
agctgacttttaaaatatgt

SEQ ID NO: 19499 - RNA, 20 nt, synthetic construct
  source 1..20: mol_type = other RNA
agctgagaagtaacattaca

SEQ ID NO: 19500 - RNA, 20 nt, synthetic construct
  source 1..20: mol_type = other RNA
agctgagaccacagacgtgc

SEQ ID NO: 19501 - RNA, 20 nt, synthetic construct
  source 1..20: mol_type = other RNA
agctgagtagcgctttaagc

SEQ ID NO: 19502 - RNA, 20 nt, synthetic construct
  source 1..20: mol_type = other RNA
agctgatcaaggaagcttcc

SEQ ID NO: 19503 - RNA, 20 nt, synthetic construct
  source 1..20: mol_type = other RNA
agctgcctcttcctgttgct

SEQ ID NO: 19504 - RNA, 20 nt, synthetic construct
  source 1..20: mol_type = other RNA
agctgctgtaacaaagatgc

SEQ ID NO: 19505 - RNA, 20 nt, synthetic construct
  source 1..20: mol_type = other RNA
agctggaagtaaggattttc

SEQ ID NO: 19506 - RNA, 20 nt, synthetic construct
  source 1..20: mol_type = other RNA
agctggacccttaccttaaa

SEQ ID NO: 19507 - RNA, 20 nt, synthetic construct
  source 1..20: mol_type = other RNA
agctggactcattccaatcc

SEQ ID NO: 19508 - RNA, 20 nt, synthetic construct
  source 1..20: mol_type = other RNA
agctggagttatttgtataa

SEQ ID NO: 19509 - RNA, 20 nt, synthetic construct
  source 1..20: mol_type = other RNA
agctggatgtggtgtggcat

SEQ ID NO: 19510 - RNA, 20 nt, synthetic construct
  source 1..20: mol_type = other RNA
agctggcaaaatggagacat

SEQ ID NO: 19511 - RNA, 20 nt, synthetic construct
  source 1..20: mol_type = other RNA
agctggcatgttggatagtt

SEQ ID NO: 19512 - RNA, 20 nt, synthetic construct
  source 1..20: mol_type = other RNA
agctgggactacaggtgtga

SEQ ID NO: 19513 - RNA, 20 nt, synthetic construct
  source 1..20: mol_type = other RNA
agctgggagaaagctaattt

SEQ ID NO: 19514 - RNA, 20 nt, synthetic construct
  source 1..20: mol_type = other RNA
agctgggatcacaggcgttg

SEQ ID NO: 19515 - RNA, 20 nt, synthetic construct
  source 1..20: mol_type = other RNA
agctgggatggctgaaagag

SEQ ID NO: 19516 - RNA, 20 nt, synthetic construct
  source 1..20: mol_type = other RNA
agctgggattacacacacct

SEQ ID NO: 19517 - RNA, 20 nt, synthetic construct
  source 1..20: mol_type = other RNA
agctgggcccgcagtggctc

SEQ ID NO: 19518 - RNA, 20 nt, synthetic construct
  source 1..20: mol_type = other RNA
agctgggcgagatggcgtgc

SEQ ID NO: 19519 - RNA, 20 nt, synthetic construct
  source 1..20: mol_type = other RNA
agctgggctagagccaggaa

SEQ ID NO: 19520 - RNA, 20 nt, synthetic construct
  source 1..20: mol_type = other RNA
agctggggcagcaaagcaag

SEQ ID NO: 19521 - RNA, 20 nt, synthetic construct
  source 1..20: mol_type = other RNA
agctgggtgatgttcaaccc

SEQ ID NO: 19522 - RNA, 20 nt, synthetic construct
  source 1..20: mol_type = other RNA
agctggtaatacagtctgat

SEQ ID NO: 19523 - RNA, 20 nt, synthetic construct
  source 1..20: mol_type = other RNA
agctgtaacagaggcatgca

SEQ ID NO: 19524 - RNA, 20 nt, synthetic construct
  source 1..20: mol_type = other RNA
agctgtatttttgctcacac

SEQ ID NO: 19525 - RNA, 20 nt, synthetic construct
  source 1..20: mol_type = other RNA
agctgtcactctctttagga

SEQ ID NO: 19526 - RNA, 20 nt, synthetic construct
  source 1..20: mol_type = other RNA
agctgtccaacaagggttgg

SEQ ID NO: 19527 - RNA, 20 nt, synthetic construct
  source 1..20: mol_type = other RNA
agctgtccccaccgccttcc

SEQ ID NO: 19528 - RNA, 20 nt, synthetic construct
  source 1..20: mol_type = other RNA
agctgtccttctcgtgtgag

SEQ ID NO: 19529 - RNA, 20 nt, synthetic construct
  source 1..20: mol_type = other RNA
agctgtcgctctcctgtgcc

SEQ ID NO: 19530 - RNA, 20 nt, synthetic construct
  source 1..20: mol_type = other RNA
agctgtctggattgattcca

SEQ ID NO: 19531 - RNA, 20 nt, synthetic construct
  source 1..20: mol_type = other RNA
agctgtctttaatgtaaaaa

SEQ ID NO: 19532 - RNA, 20 nt, synthetic construct
  source 1..20: mol_type = other RNA
agctgtgagtccttccagta

SEQ ID NO: 19533 - RNA, 20 nt, synthetic construct
  source 1..20: mol_type = other RNA
agctgtgattaccggcatcc

SEQ ID NO: 19534 - RNA, 20 nt, synthetic construct
  source 1..20: mol_type = other RNA
agctgtgccgaggcagagag

SEQ ID NO: 19535 - RNA, 20 nt, synthetic construct
  source 1..20: mol_type = other RNA
agctgtggaagcacagtctc

SEQ ID NO: 19536 - RNA, 20 nt, synthetic construct
  source 1..20: mol_type = other RNA
agctgtggatgttggtgaga

SEQ ID NO: 19537 - RNA, 20 nt, synthetic construct
  source 1..20: mol_type = other RNA
agctgtggctcactcatttc

SEQ ID NO: 19538 - RNA, 20 nt, synthetic construct
  source 1..20: mol_type = other RNA
agctgttaatggttagactg

SEQ ID NO: 19539 - RNA, 20 nt, synthetic construct
  source 1..20: mol_type = other RNA
agctgttgaattgttgcgcg

SEQ ID NO: 19540 - RNA, 20 nt, synthetic construct
  source 1..20: mol_type = other RNA
agctgtttgagctgaaagta

SEQ ID NO: 19541 - RNA, 20 nt, synthetic construct
  source 1..20: mol_type = other RNA
agctgttttcatgcgacata

SEQ ID NO: 19542 - RNA, 20 nt, synthetic construct
  source 1..20: mol_type = other RNA
agctgttttggtaaaatgtg

SEQ ID NO: 19543 - RNA, 20 nt, synthetic construct
  source 1..20: mol_type = other RNA
agcttaagagctaagactat

SEQ ID NO: 19544 - RNA, 20 nt, synthetic construct
  source 1..20: mol_type = other RNA
agcttaatttagatgagagt

SEQ ID NO: 19545 - RNA, 20 nt, synthetic construct
  source 1..20: mol_type = other RNA
agcttacagcagatctgctt

SEQ ID NO: 19546 - RNA, 20 nt, synthetic construct
  source 1..20: mol_type = other RNA
agcttacagtcatcacagtc

SEQ ID NO: 19547 - RNA, 20 nt, synthetic construct
  source 1..20: mol_type = other RNA
agcttaccaagtgccgcgtt

SEQ ID NO: 19548 - RNA, 20 nt, synthetic construct
  source 1..20: mol_type = other RNA
agcttagaagaagacttagg

SEQ ID NO: 19549 - RNA, 20 nt, synthetic construct
  source 1..20: mol_type = other RNA
agcttaggtcagattccttt

SEQ ID NO: 19550 - RNA, 20 nt, synthetic construct
  source 1..20: mol_type = other RNA
agcttaggtctttgatccat

SEQ ID NO: 19551 - RNA, 20 nt, synthetic construct
  source 1..20: mol_type = other RNA
agcttataatttctgagagt

SEQ ID NO: 19552 - RNA, 20 nt, synthetic construct
  source 1..20: mol_type = other RNA
agcttatcaggcttgagtct

SEQ ID NO: 19553 - RNA, 20 nt, synthetic construct
  source 1..20: mol_type = other RNA
agcttatgatcttgggaata

SEQ ID NO: 19554 - RNA, 20 nt, synthetic construct
  source 1..20: mol_type = other RNA
agcttattaaaatgaacctg

SEQ ID NO: 19555 - RNA, 20 nt, synthetic construct
  source 1..20: mol_type = other RNA
agcttattctttttctagtt

SEQ ID NO: 19556 - RNA, 20 nt, synthetic construct
  source 1..20: mol_type = other RNA
agcttcaaaccactatctaa

SEQ ID NO: 19557 - RNA, 20 nt, synthetic construct
  source 1..20: mol_type = other RNA
agcttcaatgagggcagaga

SEQ ID NO: 19558 - RNA, 20 nt, synthetic construct
  source 1..20: mol_type = other RNA
agcttcacgtgcattcatac

SEQ ID NO: 19559 - RNA, 20 nt, synthetic construct
  source 1..20: mol_type = other RNA
agcttcactcttctgcaagt

SEQ ID NO: 19560 - RNA, 20 nt, synthetic construct
  source 1..20: mol_type = other RNA
agcttcacttctctgctgct

SEQ ID NO: 19561 - RNA, 20 nt, synthetic construct
  source 1..20: mol_type = other RNA
agcttcatataagtggaatc

SEQ ID NO: 19562 - RNA, 20 nt, synthetic construct
  source 1..20: mol_type = other RNA
agcttccacccaagtggagc

SEQ ID NO: 19563 - RNA, 20 nt, synthetic construct
  source 1..20: mol_type = other RNA
agcttcccccctctctcttt

SEQ ID NO: 19564 - RNA, 20 nt, synthetic construct
  source 1..20: mol_type = other RNA
agcttccgggacttggaagt

SEQ ID NO: 19565 - RNA, 20 nt, synthetic construct
  source 1..20: mol_type = other RNA
agcttcctaaagagagtgac

SEQ ID NO: 19566 - RNA, 20 nt, synthetic construct
  source 1..20: mol_type = other RNA
agcttcctaagaaagggtgt

SEQ ID NO: 19567 - RNA, 20 nt, synthetic construct
  source 1..20: mol_type = other RNA
agcttcctacccaagcttag

SEQ ID NO: 19568 - RNA, 20 nt, synthetic construct
  source 1..20: mol_type = other RNA
agcttcctcaggatctacat

SEQ ID NO: 19569 - RNA, 20 nt, synthetic construct
  source 1..20: mol_type = other RNA
agcttcctctggctgacctg

SEQ ID NO: 19570 - RNA, 20 nt, synthetic construct
  source 1..20: mol_type = other RNA
agcttccttgatcagcttcc

SEQ ID NO: 19571 - RNA, 20 nt, synthetic construct
  source 1..20: mol_type = other RNA
agcttcgaagcaaaacatat

SEQ ID NO: 19572 - RNA, 20 nt, synthetic construct
  source 1..20: mol_type = other RNA
agcttcgacagtcccttgcc

SEQ ID NO: 19573 - RNA, 20 nt, synthetic construct
  source 1..20: mol_type = other RNA
agcttctgaattgagatgta

SEQ ID NO: 19574 - RNA, 20 nt, synthetic construct
  source 1..20: mol_type = other RNA
agcttctgagcagtgtttcc

SEQ ID NO: 19575 - RNA, 20 nt, synthetic construct
  source 1..20: mol_type = other RNA
agcttctgagctgttaatgg

SEQ ID NO: 19576 - RNA, 20 nt, synthetic construct
  source 1..20: mol_type = other RNA
agcttcttgttagaattttg

SEQ ID NO: 19577 - RNA, 20 nt, synthetic construct
  source 1..20: mol_type = other RNA
agcttgacaaaaggcccctt

SEQ ID NO: 19578 - RNA, 20 nt, synthetic construct
  source 1..20: mol_type = other RNA
agcttgacattcttaccttc

SEQ ID NO: 19579 - RNA, 20 nt, synthetic construct
  source 1..20: mol_type = other RNA
agcttgatctttacttccct

SEQ ID NO: 19580 - RNA, 20 nt, synthetic construct
  source 1..20: mol_type = other RNA
agcttgctagtagcagaatc

SEQ ID NO: 19581 - RNA, 20 nt, synthetic construct
  source 1..20: mol_type = other RNA
agcttggccaacatggcgaa

SEQ ID NO: 19582 - RNA, 20 nt, synthetic construct
  source 1..20: mol_type = other RNA
agcttgggcaagagagcaag

SEQ ID NO: 19583 - RNA, 20 nt, synthetic construct
  source 1..20: mol_type = other RNA
agcttgggctaaggtggagt

SEQ ID NO: 19584 - RNA, 20 nt, synthetic construct
  source 1..20: mol_type = other RNA
agcttgggtaggaagctgat

SEQ ID NO: 19585 - RNA, 20 nt, synthetic construct
  source 1..20: mol_type = other RNA
agctttaaactggatgaata

SEQ ID NO: 19586 - RNA, 20 nt, synthetic construct
  source 1..20: mol_type = other RNA
agctttaaagagaaatagtt

SEQ ID NO: 19587 - RNA, 20 nt, synthetic construct
  source 1..20: mol_type = other RNA
agctttcagacttaactata

SEQ ID NO: 19588 - RNA, 20 nt, synthetic construct
  source 1..20: mol_type = other RNA
agctttcagcactgctattg

SEQ ID NO: 19589 - RNA, 20 nt, synthetic construct
  source 1..20: mol_type = other RNA
agctttcattattaccaggt

SEQ ID NO: 19590 - RNA, 20 nt, synthetic construct
  source 1..20: mol_type = other RNA
agctttccttagttcgaagt

SEQ ID NO: 19591 - RNA, 20 nt, synthetic construct
  source 1..20: mol_type = other RNA
agctttctaattctgacaac

SEQ ID NO: 19592 - RNA, 20 nt, synthetic construct
  source 1..20: mol_type = other RNA
agctttctcccagctgtcca

SEQ ID NO: 19593 - RNA, 20 nt, synthetic construct
  source 1..20: mol_type = other RNA
agctttcttttaaagacctc

SEQ ID NO: 19594 - RNA, 20 nt, synthetic construct
  source 1..20: mol_type = other RNA
agctttcttttccaaccaag

SEQ ID NO: 19595 - RNA, 20 nt, synthetic construct
  source 1..20: mol_type = other RNA
agctttgatgcccccaccct

SEQ ID NO: 19596 - RNA, 20 nt, synthetic construct
  source 1..20: mol_type = other RNA
agctttggctgaaatgctgt

SEQ ID NO: 19597 - RNA, 20 nt, synthetic construct
  source 1..20: mol_type = other RNA
agctttgtgactgtgagggt

SEQ ID NO: 19598 - RNA, 20 nt, synthetic construct
  source 1..20: mol_type = other RNA
agctttgttatgaaaatagt

SEQ ID NO: 19599 - RNA, 20 nt, synthetic construct
  source 1..20: mol_type = other RNA
agcttttacgaggacagact

SEQ ID NO: 19600 - RNA, 20 nt, synthetic construct
  source 1..20: mol_type = other RNA
agcttttattagagctttaa

SEQ ID NO: 19601 - RNA, 20 nt, synthetic construct
  source 1..20: mol_type = other RNA
agcttttatttgtcataaac

SEQ ID NO: 19602 - RNA, 20 nt, synthetic construct
  source 1..20: mol_type = other RNA
agcttttattttactctctt

SEQ ID NO: 19603 - RNA, 20 nt, synthetic construct
  source 1..20: mol_type = other RNA
agcttttcatatacagattt

SEQ ID NO: 19604 - RNA, 20 nt, synthetic construct
  source 1..20: mol_type = other RNA
agcttttcctgctgtcgttt

SEQ ID NO: 19605 - RNA, 20 nt, synthetic construct
  source 1..20: mol_type = other RNA
agcttttctcctaagtcttc

SEQ ID NO: 19606 - RNA, 20 nt, synthetic construct
  source 1..20: mol_type = other RNA
agcttttgaaactgagcatc

SEQ ID NO: 19607 - RNA, 20 nt, synthetic construct
  source 1..20: mol_type = other RNA
agctttttctttttaaacag

SEQ ID NO: 19608 - RNA, 20 nt, synthetic construct
  source 1..20: mol_type = other RNA
aggaaaaaacacctaaagat

SEQ ID NO: 19609 - RNA, 20 nt, synthetic construct
  source 1..20: mol_type = other RNA
aggaaaaaacagttgctatt

SEQ ID NO: 19610 - RNA, 20 nt, synthetic construct
  source 1..20: mol_type = other RNA
aggaaaaaacgggttataca

SEQ ID NO: 19611 - RNA, 20 nt, synthetic construct
  source 1..20: mol_type = other RNA
aggaaaaatctaaccctcaa

SEQ ID NO: 19612 - RNA, 20 nt, synthetic construct
  source 1..20: mol_type = other RNA
aggaaaaccagtttagaaaa

SEQ ID NO: 19613 - RNA, 20 nt, synthetic construct
  source 1..20: mol_type = other RNA
aggaaaaccatgtcatgtat

SEQ ID NO: 19614 - RNA, 20 nt, synthetic construct
  source 1..20: mol_type = other RNA
aggaaaagaacacagtgttg

SEQ ID NO: 19615 - RNA, 20 nt, synthetic construct
  source 1..20: mol_type = other RNA
aggaaaagacttctcaaaca

SEQ ID NO: 19616 - RNA, 20 nt, synthetic construct
  source 1..20: mol_type = other RNA
aggaaaagacttgaggttta

SEQ ID NO: 19617 - RNA, 20 nt, synthetic construct
  source 1..20: mol_type = other RNA
aggaaaagagaacattggtt

SEQ ID NO: 19618 - RNA, 20 nt, synthetic construct
  source 1..20: mol_type = other RNA
aggaaaagagatctagtgaa

SEQ ID NO: 19619 - RNA, 20 nt, synthetic construct
  source 1..20: mol_type = other RNA
aggaaaagcaaatgtcatct

SEQ ID NO: 19620 - RNA, 20 nt, synthetic construct
  source 1..20: mol_type = other RNA
aggaaaagctaccctcgagt

SEQ ID NO: 19621 - RNA, 20 nt, synthetic construct
  source 1..20: mol_type = other RNA
aggaaaagtcagtaaaaaag

SEQ ID NO: 19622 - RNA, 20 nt, synthetic construct
  source 1..20: mol_type = other RNA
aggaaaataatttgcaacag

SEQ ID NO: 19623 - RNA, 20 nt, synthetic construct
  source 1..20: mol_type = other RNA
aggaaaatacatgaggcctc

SEQ ID NO: 19624 - RNA, 20 nt, synthetic construct
  source 1..20: mol_type = other RNA
aggaaaatagagttccatct

SEQ ID NO: 19625 - RNA, 20 nt, synthetic construct
  source 1..20: mol_type = other RNA
aggaaacactataaatcagt

SEQ ID NO: 19626 - RNA, 20 nt, synthetic construct
  source 1..20: mol_type = other RNA
aggaaacactgctcagaagc

SEQ ID NO: 19627 - RNA, 20 nt, synthetic construct
  source 1..20: mol_type = other RNA
aggaaacagagttttccaat

SEQ ID NO: 19628 - RNA, 20 nt, synthetic construct
  source 1..20: mol_type = other RNA
aggaaacagattgatttata

SEQ ID NO: 19629 - RNA, 20 nt, synthetic construct
  source 1..20: mol_type = other RNA
aggaaaccccagggatattt

SEQ ID NO: 19630 - RNA, 20 nt, synthetic construct
  source 1..20: mol_type = other RNA
aggaaacccgctctgggtgc

SEQ ID NO: 19631 - RNA, 20 nt, synthetic construct
  source 1..20: mol_type = other RNA
aggaaacttccagaaacttc

SEQ ID NO: 19632 - RNA, 20 nt, synthetic construct
  source 1..20: mol_type = other RNA
aggaaactttgcattcctga

SEQ ID NO: 19633 - RNA, 20 nt, synthetic construct
  source 1..20: mol_type = other RNA
aggaaagaccggggactgca

SEQ ID NO: 19634 - RNA, 20 nt, synthetic construct
  source 1..20: mol_type = other RNA
aggaaagatgaagtatagaa

SEQ ID NO: 19635 - RNA, 20 nt, synthetic construct
  source 1..20: mol_type = other RNA
aggaaagatgtcttttaact

SEQ ID NO: 19636 - RNA, 20 nt, synthetic construct
  source 1..20: mol_type = other RNA
aggaaagcacgtttgatctg

SEQ ID NO: 19637 - RNA, 20 nt, synthetic construct
  source 1..20: mol_type = other RNA
aggaaagcaggttgcattaa

SEQ ID NO: 19638 - RNA, 20 nt, synthetic construct
  source 1..20: mol_type = other RNA
aggaaagcctgtgacagtat

SEQ ID NO: 19639 - RNA, 20 nt, synthetic construct
  source 1..20: mol_type = other RNA
aggaaagctcaggaccagat

SEQ ID NO: 19640 - RNA, 20 nt, synthetic construct
  source 1..20: mol_type = other RNA
aggaaaggagatactggcca

SEQ ID NO: 19641 - RNA, 20 nt, synthetic construct
  source 1..20: mol_type = other RNA
aggaaaggatggtttgattg

SEQ ID NO: 19642 - RNA, 20 nt, synthetic construct
  source 1..20: mol_type = other RNA
aggaaaggtggggaagggat

SEQ ID NO: 19643 - RNA, 20 nt, synthetic construct
  source 1..20: mol_type = other RNA
aggaaagtaactgttggcaa

SEQ ID NO: 19644 - RNA, 20 nt, synthetic construct
  source 1..20: mol_type = other RNA
aggaaagtgacagatgagaa

SEQ ID NO: 19645 - RNA, 20 nt, synthetic construct
  source 1..20: mol_type = other RNA
aggaaagtgccagccaccct

SEQ ID NO: 19646 - RNA, 20 nt, synthetic construct
  source 1..20: mol_type = other RNA
aggaaagtgtgcttgggctc

SEQ ID NO: 19647 - RNA, 20 nt, synthetic construct
  source 1..20: mol_type = other RNA
aggaaataagaaggtttgta

SEQ ID NO: 19648 - RNA, 20 nt, synthetic construct
  source 1..20: mol_type = other RNA
aggaaatacaaaaagtgata

SEQ ID NO: 19649 - RNA, 20 nt, synthetic construct
  source 1..20: mol_type = other RNA
aggaaatacttgatctacat

SEQ ID NO: 19650 - RNA, 20 nt, synthetic construct
  source 1..20: mol_type = other RNA
aggaaatgagtgtatgcagg

SEQ ID NO: 19651 - RNA, 20 nt, synthetic construct
  source 1..20: mol_type = other RNA
aggaaatggacagcacatta

SEQ ID NO: 19652 - RNA, 20 nt, synthetic construct
  source 1..20: mol_type = other RNA
aggaacacacacctattcat

SEQ ID NO: 19653 - RNA, 20 nt, synthetic construct
  source 1..20: mol_type = other RNA
aggaacaccttgaacatgaa

SEQ ID NO: 19654 - RNA, 20 nt, synthetic construct
  source 1..20: mol_type = other RNA
aggaacagattcacgcacag

SEQ ID NO: 19655 - RNA, 20 nt, synthetic construct
  source 1..20: mol_type = other RNA
aggaaccatattagagtgaa

SEQ ID NO: 19656 - RNA, 20 nt, synthetic construct
  source 1..20: mol_type = other RNA
aggaactaattgataaaact

SEQ ID NO: 19657 - RNA, 20 nt, synthetic construct
  source 1..20: mol_type = other RNA
aggaactaatttcatacaag

SEQ ID NO: 19658 - RNA, 20 nt, synthetic construct
  source 1..20: mol_type = other RNA
aggaactcatattagtctgt

SEQ ID NO: 19659 - RNA, 20 nt, synthetic construct
  source 1..20: mol_type = other RNA
aggaacttacagtaagatcc

SEQ ID NO: 19660 - RNA, 20 nt, synthetic construct
  source 1..20: mol_type = other RNA
aggaagaattattgtctgca

SEQ ID NO: 19661 - RNA, 20 nt, synthetic construct
  source 1..20: mol_type = other RNA
aggaagagactatctcttcc

SEQ ID NO: 19662 - RNA, 20 nt, synthetic construct
  source 1..20: mol_type = other RNA
aggaagagatagtctcttcc

SEQ ID NO: 19663 - RNA, 20 nt, synthetic construct
  source 1..20: mol_type = other RNA
aggaagaggaaggttcaagt

SEQ ID NO: 19664 - RNA, 20 nt, synthetic construct
  source 1..20: mol_type = other RNA
aggaagaggcagctaagcac

SEQ ID NO: 19665 - RNA, 20 nt, synthetic construct
  source 1..20: mol_type = other RNA
aggaagagtttatattctaa

SEQ ID NO: 19666 - RNA, 20 nt, synthetic construct
  source 1..20: mol_type = other RNA
aggaagcacattccttccga

SEQ ID NO: 19667 - RNA, 20 nt, synthetic construct
  source 1..20: mol_type = other RNA
aggaagcaccaacccttgtt

SEQ ID NO: 19668 - RNA, 20 nt, synthetic construct
  source 1..20: mol_type = other RNA
aggaagcagaatgtccatca

SEQ ID NO: 19669 - RNA, 20 nt, synthetic construct
  source 1..20: mol_type = other RNA
aggaagccactgcattcatc

SEQ ID NO: 19670 - RNA, 20 nt, synthetic construct
  source 1..20: mol_type = other RNA
aggaagctaatcaagccgca

SEQ ID NO: 19671 - RNA, 20 nt, synthetic construct
  source 1..20: mol_type = other RNA
aggaagctatggagcactgt

SEQ ID NO: 19672 - RNA, 20 nt, synthetic construct
  source 1..20: mol_type = other RNA
aggaagctgatcaaggaagc

SEQ ID NO: 19673 - RNA, 20 nt, synthetic construct
  source 1..20: mol_type = other RNA
aggaagcttataatttctga

SEQ ID NO: 19674 - RNA, 20 nt, synthetic construct
  source 1..20: mol_type = other RNA
aggaagcttcctaaagagag

SEQ ID NO: 19675 - RNA, 20 nt, synthetic construct
  source 1..20: mol_type = other RNA
aggaagcttccttgatcagc

SEQ ID NO: 19676 - RNA, 20 nt, synthetic construct
  source 1..20: mol_type = other RNA
aggaaggaaaggagatactg

SEQ ID NO: 19677 - RNA, 20 nt, synthetic construct
  source 1..20: mol_type = other RNA
aggaaggaacacacacctat

SEQ ID NO: 19678 - RNA, 20 nt, synthetic construct
  source 1..20: mol_type = other RNA
aggaaggaattttaggacaa

SEQ ID NO: 19679 - RNA, 20 nt, synthetic construct
  source 1..20: mol_type = other RNA
aggaaggagaatcgcttaaa

SEQ ID NO: 19680 - RNA, 20 nt, synthetic construct
  source 1..20: mol_type = other RNA
aggaaggattggaatgagtc

SEQ ID NO: 19681 - RNA, 20 nt, synthetic construct
  source 1..20: mol_type = other RNA
aggaaggcaggaggcctcag

SEQ ID NO: 19682 - RNA, 20 nt, synthetic construct
  source 1..20: mol_type = other RNA
aggaaggcagggtaggaagg

SEQ ID NO: 19683 - RNA, 20 nt, synthetic construct
  source 1..20: mol_type = other RNA
aggaaggcggtggggacagc

SEQ ID NO: 19684 - RNA, 20 nt, synthetic construct
  source 1..20: mol_type = other RNA
aggaagggagagatgcctat

SEQ ID NO: 19685 - RNA, 20 nt, synthetic construct
  source 1..20: mol_type = other RNA
aggaagggcttgatctagta

SEQ ID NO: 19686 - RNA, 20 nt, synthetic construct
  source 1..20: mol_type = other RNA
aggaaggtcaaatggtaaca

SEQ ID NO: 19687 - RNA, 20 nt, synthetic construct
  source 1..20: mol_type = other RNA
aggaaggttcaagtttggct

SEQ ID NO: 19688 - RNA, 20 nt, synthetic construct
  source 1..20: mol_type = other RNA
aggaagtatgagtcttccgt

SEQ ID NO: 19689 - RNA, 20 nt, synthetic construct
  source 1..20: mol_type = other RNA
aggaagtcagcaactcttgg

SEQ ID NO: 19690 - RNA, 20 nt, synthetic construct
  source 1..20: mol_type = other RNA
aggaagtccatgaaacttat

SEQ ID NO: 19691 - RNA, 20 nt, synthetic construct
  source 1..20: mol_type = other RNA
aggaagtgaccctgagtcca

SEQ ID NO: 19692 - RNA, 20 nt, synthetic construct
  source 1..20: mol_type = other RNA
aggaagtggctagacggaaa

SEQ ID NO: 19693 - RNA, 20 nt, synthetic construct
  source 1..20: mol_type = other RNA
aggaagttgagaaagaggga

SEQ ID NO: 19694 - RNA, 20 nt, synthetic construct
  source 1..20: mol_type = other RNA
aggaataaatggtagcttgg

SEQ ID NO: 19695 - RNA, 20 nt, synthetic construct
  source 1..20: mol_type = other RNA
aggaatagtattcaggacag

SEQ ID NO: 19696 - RNA, 20 nt, synthetic construct
  source 1..20: mol_type = other RNA
aggaatataaacgtgtgtgt

SEQ ID NO: 19697 - RNA, 20 nt, synthetic construct
  source 1..20: mol_type = other RNA
aggaatccggctttatgaga

SEQ ID NO: 19698 - RNA, 20 nt, synthetic construct
  source 1..20: mol_type = other RNA
aggaatccttcagtcagttc

SEQ ID NO: 19699 - RNA, 20 nt, synthetic construct
  source 1..20: mol_type = other RNA
aggaatctgacctaagcttg

SEQ ID NO: 19700 - RNA, 20 nt, synthetic construct
  source 1..20: mol_type = other RNA
aggaatgcaaagtttcctac

SEQ ID NO: 19701 - RNA, 20 nt, synthetic construct
  source 1..20: mol_type = other RNA
aggaatgcctataaaatgct

SEQ ID NO: 19702 - RNA, 20 nt, synthetic construct
  source 1..20: mol_type = other RNA
aggaatggaattctgatgca

SEQ ID NO: 19703 - RNA, 20 nt, synthetic construct
  source 1..20: mol_type = other RNA
aggaatgtgcactcttttaa

SEQ ID NO: 19704 - RNA, 20 nt, synthetic construct
  source 1..20: mol_type = other RNA
aggaatgtgcttcctaaacc

SEQ ID NO: 19705 - RNA, 20 nt, synthetic construct
  source 1..20: mol_type = other RNA
aggaattaaacatttctgaa

SEQ ID NO: 19706 - RNA, 20 nt, synthetic construct
  source 1..20: mol_type = other RNA
aggaattgtaatcacagtac

SEQ ID NO: 19707 - RNA, 20 nt, synthetic construct
  source 1..20: mol_type = other RNA
aggaatttacatttccattc

SEQ ID NO: 19708 - RNA, 20 nt, synthetic construct
  source 1..20: mol_type = other RNA
aggaattttaggacaaggaa

SEQ ID NO: 19709 - RNA, 20 nt, synthetic construct
  source 1..20: mol_type = other RNA
aggaattttcaggactcatg

SEQ ID NO: 19710 - RNA, 20 nt, synthetic construct
  source 1..20: mol_type = other RNA
aggacaaggaaaggatggtt

SEQ ID NO: 19711 - RNA, 20 nt, synthetic construct
  source 1..20: mol_type = other RNA
aggacaattgaatggggatg

SEQ ID NO: 19712 - RNA, 20 nt, synthetic construct
  source 1..20: mol_type = other RNA
aggacacaaattatgactga

SEQ ID NO: 19713 - RNA, 20 nt, synthetic construct
  source 1..20: mol_type = other RNA
aggacactagcaatccagga

SEQ ID NO: 19714 - RNA, 20 nt, synthetic construct
  source 1..20: mol_type = other RNA
aggacactattgagagtgaa

SEQ ID NO: 19715 - RNA, 20 nt, synthetic construct
  source 1..20: mol_type = other RNA
aggacactggaggtgcacat

SEQ ID NO: 19716 - RNA, 20 nt, synthetic construct
  source 1..20: mol_type = other RNA
aggacagaaattcaacttgg

SEQ ID NO: 19717 - RNA, 20 nt, synthetic construct
  source 1..20: mol_type = other RNA
aggacagactgcagttggat

SEQ ID NO: 19718 - RNA, 20 nt, synthetic construct
  source 1..20: mol_type = other RNA
aggacagagcagtaggctta

SEQ ID NO: 19719 - RNA, 20 nt, synthetic construct
  source 1..20: mol_type = other RNA
aggacagattaaaatcagat

SEQ ID NO: 19720 - RNA, 20 nt, synthetic construct
  source 1..20: mol_type = other RNA
aggacagcttccacccaagt

SEQ ID NO: 19721 - RNA, 20 nt, synthetic construct
  source 1..20: mol_type = other RNA
aggacaggtcacattctgcc

SEQ ID NO: 19722 - RNA, 20 nt, synthetic construct
  source 1..20: mol_type = other RNA
aggacagtcatcctcaacaa

SEQ ID NO: 19723 - RNA, 20 nt, synthetic construct
  source 1..20: mol_type = other RNA
aggacagttattcttcagca

SEQ ID NO: 19724 - RNA, 20 nt, synthetic construct
  source 1..20: mol_type = other RNA
aggacagttggccttgaggt

SEQ ID NO: 19725 - RNA, 20 nt, synthetic construct
  source 1..20: mol_type = other RNA
aggacatattttatgatttc

SEQ ID NO: 19726 - RNA, 20 nt, synthetic construct
  source 1..20: mol_type = other RNA
aggacatccacaacattgtg

SEQ ID NO: 19727 - RNA, 20 nt, synthetic construct
  source 1..20: mol_type = other RNA
aggacatggagacagtgagc

SEQ ID NO: 19728 - RNA, 20 nt, synthetic construct
  source 1..20: mol_type = other RNA
aggacattagtggaaaaact

SEQ ID NO: 19729 - RNA, 20 nt, synthetic construct
  source 1..20: mol_type = other RNA
aggaccaactttaagcaaaa

SEQ ID NO: 19730 - RNA, 20 nt, synthetic construct
  source 1..20: mol_type = other RNA
aggaccaatttaccatctga

SEQ ID NO: 19731 - RNA, 20 nt, synthetic construct
  source 1..20: mol_type = other RNA
aggaccagcttgggcaagag

SEQ ID NO: 19732 - RNA, 20 nt, synthetic construct
  source 1..20: mol_type = other RNA
aggaccaggcagtcctctca

SEQ ID NO: 19733 - RNA, 20 nt, synthetic construct
  source 1..20: mol_type = other RNA
aggaccaggtatggcgactc

SEQ ID NO: 19734 - RNA, 20 nt, synthetic construct
  source 1..20: mol_type = other RNA
aggaccataggcacgcgccc

SEQ ID NO: 19735 - RNA, 20 nt, synthetic construct
  source 1..20: mol_type = other RNA
aggaccatctgttaaaagat

SEQ ID NO: 19736 - RNA, 20 nt, synthetic construct
  source 1..20: mol_type = other RNA
aggaccattagcagttctgt

SEQ ID NO: 19737 - RNA, 20 nt, synthetic construct
  source 1..20: mol_type = other RNA
aggacgatttttccaacagt

SEQ ID NO: 19738 - RNA, 20 nt, synthetic construct
  source 1..20: mol_type = other RNA
aggacgctgatgacagttac

SEQ ID NO: 19739 - RNA, 20 nt, synthetic construct
  source 1..20: mol_type = other RNA
aggactcacagcttaccaag

SEQ ID NO: 19740 - RNA, 20 nt, synthetic construct
  source 1..20: mol_type = other RNA
aggactcatgagagctgtgc

SEQ ID NO: 19741 - RNA, 20 nt, synthetic construct
  source 1..20: mol_type = other RNA
aggactccacagagttcagc

SEQ ID NO: 19742 - RNA, 20 nt, synthetic construct
  source 1..20: mol_type = other RNA
aggactctgctcaaaggggc

SEQ ID NO: 19743 - RNA, 20 nt, synthetic construct
  source 1..20: mol_type = other RNA
aggactgaagtcctttcttg

SEQ ID NO: 19744 - RNA, 20 nt, synthetic construct
  source 1..20: mol_type = other RNA
aggactgcctattttgtaat

SEQ ID NO: 19745 - RNA, 20 nt, synthetic construct
  source 1..20: mol_type = other RNA
aggactgcctggtcctgagg

SEQ ID NO: 19746 - RNA, 20 nt, synthetic construct
  source 1..20: mol_type = other RNA
aggactgcttgaggccacga

SEQ ID NO: 19747 - RNA, 20 nt, synthetic construct
  source 1..20: mol_type = other RNA
aggactggaactcatttctg

SEQ ID NO: 19748 - RNA, 20 nt, synthetic construct
  source 1..20: mol_type = other RNA
aggactggactccttctgaa

SEQ ID NO: 19749 - RNA, 20 nt, synthetic construct
  source 1..20: mol_type = other RNA
aggactggcttcagtgccaa

SEQ ID NO: 19750 - RNA, 20 nt, synthetic construct
  source 1..20: mol_type = other RNA
aggactgggatcctaagcat

SEQ ID NO: 19751 - RNA, 20 nt, synthetic construct
  source 1..20: mol_type = other RNA
aggactgtgtgtgtccaggc

SEQ ID NO: 19752 - RNA, 20 nt, synthetic construct
  source 1..20: mol_type = other RNA
aggacttcagtccttaccac

SEQ ID NO: 19753 - RNA, 20 nt, synthetic construct
  source 1..20: mol_type = other RNA
aggacttcatgtacaatgaa

SEQ ID NO: 19754 - RNA, 20 nt, synthetic construct
  source 1..20: mol_type = other RNA
aggacttgatctaaaatgga

SEQ ID NO: 19755 - RNA, 20 nt, synthetic construct
  source 1..20: mol_type = other RNA
aggacttttggtacacatct

SEQ ID NO: 19756 - RNA, 20 nt, synthetic construct
  source 1..20: mol_type = other RNA
aggagaaaacaaaaagaaac

SEQ ID NO: 19757 - RNA, 20 nt, synthetic construct
  source 1..20: mol_type = other RNA
aggagaaaagcttcataaca

SEQ ID NO: 19758 - RNA, 20 nt, synthetic construct
  source 1..20: mol_type = other RNA
aggagaaacatggcttagaa

SEQ ID NO: 19759 - RNA, 20 nt, synthetic construct
  source 1..20: mol_type = other RNA
aggagaaaccatttacccct

SEQ ID NO: 19760 - RNA, 20 nt, synthetic construct
  source 1..20: mol_type = other RNA
aggagaactgcctggacccg

SEQ ID NO: 19761 - RNA, 20 nt, synthetic construct
  source 1..20: mol_type = other RNA
aggagaacttgtctcggatt

SEQ ID NO: 19762 - RNA, 20 nt, synthetic construct
  source 1..20: mol_type = other RNA
aggagaaggccttccacgga

SEQ ID NO: 19763 - RNA, 20 nt, synthetic construct
  source 1..20: mol_type = other RNA
aggagaatctgggaggtgga

SEQ ID NO: 19764 - RNA, 20 nt, synthetic construct
  source 1..20: mol_type = other RNA
aggagaatggcatgaaccca

SEQ ID NO: 19765 - RNA, 20 nt, synthetic construct
  source 1..20: mol_type = other RNA
aggagacattacaattgata

SEQ ID NO: 19766 - RNA, 20 nt, synthetic construct
  source 1..20: mol_type = other RNA
aggagaccagttaggaagcc

SEQ ID NO: 19767 - RNA, 20 nt, synthetic construct
  source 1..20: mol_type = other RNA
aggagacctactaaaagttg

SEQ ID NO: 19768 - RNA, 20 nt, synthetic construct
  source 1..20: mol_type = other RNA
aggagactatcgttatatcc

SEQ ID NO: 19769 - RNA, 20 nt, synthetic construct
  source 1..20: mol_type = other RNA
aggagagaaaaacaaaacaa

SEQ ID NO: 19770 - RNA, 20 nt, synthetic construct
  source 1..20: mol_type = other RNA
aggagagaagagggggcata

SEQ ID NO: 19771 - RNA, 20 nt, synthetic construct
  source 1..20: mol_type = other RNA
aggagagcgacagctacgga

SEQ ID NO: 19772 - RNA, 20 nt, synthetic construct
  source 1..20: mol_type = other RNA
aggagagtcgcttgaacctg

SEQ ID NO: 19773 - RNA, 20 nt, synthetic construct
  source 1..20: mol_type = other RNA
aggagatactggccatgttt

SEQ ID NO: 19774 - RNA, 20 nt, synthetic construct
  source 1..20: mol_type = other RNA
aggagatatacaggaagaga

SEQ ID NO: 19775 - RNA, 20 nt, synthetic construct
  source 1..20: mol_type = other RNA
aggagatggcacataccatg

SEQ ID NO: 19776 - RNA, 20 nt, synthetic construct
  source 1..20: mol_type = other RNA
aggagattaaggctggagga

SEQ ID NO: 19777 - RNA, 20 nt, synthetic construct
  source 1..20: mol_type = other RNA
aggagcagtgtgaataggaa

SEQ ID NO: 19778 - RNA, 20 nt, synthetic construct
  source 1..20: mol_type = other RNA
aggagcagttactcctgagc

SEQ ID NO: 19779 - RNA, 20 nt, synthetic construct
  source 1..20: mol_type = other RNA
aggagcatagcttgaaccag

SEQ ID NO: 19780 - RNA, 20 nt, synthetic construct
  source 1..20: mol_type = other RNA
aggagccaaacatcatgatt

SEQ ID NO: 19781 - RNA, 20 nt, synthetic construct
  source 1..20: mol_type = other RNA
aggagccaagtaaaagcaac

SEQ ID NO: 19782 - RNA, 20 nt, synthetic construct
  source 1..20: mol_type = other RNA
aggagcccaccaccatgcct

SEQ ID NO: 19783 - RNA, 20 nt, synthetic construct
  source 1..20: mol_type = other RNA
aggagccctgctgtggccga

SEQ ID NO: 19784 - RNA, 20 nt, synthetic construct
  source 1..20: mol_type = other RNA
aggagcctagtcatccactg

SEQ ID NO: 19785 - RNA, 20 nt, synthetic construct
  source 1..20: mol_type = other RNA
aggagccttgctgttgtaat

SEQ ID NO: 19786 - RNA, 20 nt, synthetic construct
  source 1..20: mol_type = other RNA
aggagcgccctggcattgtc

SEQ ID NO: 19787 - RNA, 20 nt, synthetic construct
  source 1..20: mol_type = other RNA
aggagctagaacagaataaa

SEQ ID NO: 19788 - RNA, 20 nt, synthetic construct
  source 1..20: mol_type = other RNA
aggagctgagaccacagacg

SEQ ID NO: 19789 - RNA, 20 nt, synthetic construct
  source 1..20: mol_type = other RNA
aggaggaaaataatttgcaa

SEQ ID NO: 19790 - RNA, 20 nt, synthetic construct
  source 1..20: mol_type = other RNA
aggaggaactaattgataaa

SEQ ID NO: 19791 - RNA, 20 nt, synthetic construct
  source 1..20: mol_type = other RNA
aggaggaagagatagtctct

SEQ ID NO: 19792 - RNA, 20 nt, synthetic construct
  source 1..20: mol_type = other RNA
aggaggaggagggtgcagcc

SEQ ID NO: 19793 - RNA, 20 nt, synthetic construct
  source 1..20: mol_type = other RNA
aggaggagggtgcagcctct

SEQ ID NO: 19794 - RNA, 20 nt, synthetic construct
  source 1..20: mol_type = other RNA
aggaggagggttagattata

SEQ ID NO: 19795 - RNA, 20 nt, synthetic construct
  source 1..20: mol_type = other RNA
aggaggcaaaggttgagaca

SEQ ID NO: 19796 - RNA, 20 nt, synthetic construct
  source 1..20: mol_type = other RNA
aggaggcacctgaacccagg

SEQ ID NO: 19797 - RNA, 20 nt, synthetic construct
  source 1..20: mol_type = other RNA
aggaggcctcagaattaata

SEQ ID NO: 19798 - RNA, 20 nt, synthetic construct
  source 1..20: mol_type = other RNA
aggaggctattaactttgaa

SEQ ID NO: 19799 - RNA, 20 nt, synthetic construct
  source 1..20: mol_type = other RNA
aggaggctgaggcaggaggc

SEQ ID NO: 19800 - RNA, 20 nt, synthetic construct
  source 1..20: mol_type = other RNA
aggagggaaaatgtttattt

SEQ ID NO: 19801 - RNA, 20 nt, synthetic construct
  source 1..20: mol_type = other RNA
aggagggactgaaaccagtg

SEQ ID NO: 19802 - RNA, 20 nt, synthetic construct
  source 1..20: mol_type = other RNA
aggagggaggattgtttgag

SEQ ID NO: 19803 - RNA, 20 nt, synthetic construct
  source 1..20: mol_type = other RNA
aggagggatgcattctagaa

SEQ ID NO: 19804 - RNA, 20 nt, synthetic construct
  source 1..20: mol_type = other RNA
aggagggtgcagcctctaat

SEQ ID NO: 19805 - RNA, 20 nt, synthetic construct
  source 1..20: mol_type = other RNA
aggagggtgtgatcaggaaa

SEQ ID NO: 19806 - RNA, 20 nt, synthetic construct
  source 1..20: mol_type = other RNA
aggagggttagattatatgg

SEQ ID NO: 19807 - RNA, 20 nt, synthetic construct
  source 1..20: mol_type = other RNA
aggaggtcatactggagcag

SEQ ID NO: 19808 - RNA, 20 nt, synthetic construct
  source 1..20: mol_type = other RNA
aggaggtctaagagataact

SEQ ID NO: 19809 - RNA, 20 nt, synthetic construct
  source 1..20: mol_type = other RNA
aggaggttgaagctctagtg

SEQ ID NO: 19810 - RNA, 20 nt, synthetic construct
  source 1..20: mol_type = other RNA
aggaggtttgcactggcaca

SEQ ID NO: 19811 - RNA, 20 nt, synthetic construct
  source 1..20: mol_type = other RNA
aggagtaactgctcctctga

SEQ ID NO: 19812 - RNA, 20 nt, synthetic construct
  source 1..20: mol_type = other RNA
aggagtacagtgcataccac

SEQ ID NO: 19813 - RNA, 20 nt, synthetic construct
  source 1..20: mol_type = other RNA
aggagtcaactaatcaaaca

SEQ ID NO: 19814 - RNA, 20 nt, synthetic construct
  source 1..20: mol_type = other RNA
aggagtccagtcctgctaac

SEQ ID NO: 19815 - RNA, 20 nt, synthetic construct
  source 1..20: mol_type = other RNA
aggagtctgcccatcctatc

SEQ ID NO: 19816 - RNA, 20 nt, synthetic construct
  source 1..20: mol_type = other RNA
aggagtgaatttttcatttt

SEQ ID NO: 19817 - RNA, 20 nt, synthetic construct
  source 1..20: mol_type = other RNA
aggagttaccataaaaccat

SEQ ID NO: 19818 - RNA, 20 nt, synthetic construct
  source 1..20: mol_type = other RNA
aggagttcagctttaaagag

SEQ ID NO: 19819 - RNA, 20 nt, synthetic construct
  source 1..20: mol_type = other RNA
aggagttcattcgtagcagg

SEQ ID NO: 19820 - RNA, 20 nt, synthetic construct
  source 1..20: mol_type = other RNA
aggagttccgatttctcggc

SEQ ID NO: 19821 - RNA, 20 nt, synthetic construct
  source 1..20: mol_type = other RNA
aggagttcttatgaggttat

SEQ ID NO: 19822 - RNA, 20 nt, synthetic construct
  source 1..20: mol_type = other RNA
aggagttgcatcacttgagg

SEQ ID NO: 19823 - RNA, 20 nt, synthetic construct
  source 1..20: mol_type = other RNA
aggagtttgagactgcagtg

SEQ ID NO: 19824 - RNA, 20 nt, synthetic construct
  source 1..20: mol_type = other RNA
aggagttttgcctctttgct

SEQ ID NO: 19825 - RNA, 20 nt, synthetic construct
  source 1..20: mol_type = other RNA
aggataaacaaagagaacaa

SEQ ID NO: 19826 - RNA, 20 nt, synthetic construct
  source 1..20: mol_type = other RNA
aggataaggggcagggtgga

SEQ ID NO: 19827 - RNA, 20 nt, synthetic construct
  source 1..20: mol_type = other RNA
aggataatatctggactgaa

SEQ ID NO: 19828 - RNA, 20 nt, synthetic construct
  source 1..20: mol_type = other RNA
aggataatgtccagaggagg

SEQ ID NO: 19829 - RNA, 20 nt, synthetic construct
  source 1..20: mol_type = other RNA
aggatacaaaaagcacctac

SEQ ID NO: 19830 - RNA, 20 nt, synthetic construct
  source 1..20: mol_type = other RNA
aggatactgagaacagaatt

SEQ ID NO: 19831 - RNA, 20 nt, synthetic construct
  source 1..20: mol_type = other RNA
aggatagctattatttgaaa

SEQ ID NO: 19832 - RNA, 20 nt, synthetic construct
  source 1..20: mol_type = other RNA
aggatagttaaacatgtaaa

SEQ ID NO: 19833 - RNA, 20 nt, synthetic construct
  source 1..20: mol_type = other RNA
aggatataacgatagtctcc

SEQ ID NO: 19834 - RNA, 20 nt, synthetic construct
  source 1..20: mol_type = other RNA
aggatataagagtgggcaaa

SEQ ID NO: 19835 - RNA, 20 nt, synthetic construct
  source 1..20: mol_type = other RNA
aggatatcagaagtgctgac

SEQ ID NO: 19836 - RNA, 20 nt, synthetic construct
  source 1..20: mol_type = other RNA
aggatatgggccaaagacag

SEQ ID NO: 19837 - RNA, 20 nt, synthetic construct
  source 1..20: mol_type = other RNA
aggatatgttttctaaacct

SEQ ID NO: 19838 - RNA, 20 nt, synthetic construct
  source 1..20: mol_type = other RNA
aggatcaaatctggctgcag

SEQ ID NO: 19839 - RNA, 20 nt, synthetic construct
  source 1..20: mol_type = other RNA
aggatcaccaaagacttcag

SEQ ID NO: 19840 - RNA, 20 nt, synthetic construct
  source 1..20: mol_type = other RNA
aggatccagatgtagagaaa

SEQ ID NO: 19841 - RNA, 20 nt, synthetic construct
  source 1..20: mol_type = other RNA
aggatccagtctctacccag

SEQ ID NO: 19842 - RNA, 20 nt, synthetic construct
  source 1..20: mol_type = other RNA
aggatcccagtcctttggga

SEQ ID NO: 19843 - RNA, 20 nt, synthetic construct
  source 1..20: mol_type = other RNA
aggatcccggaacaggaaaa

SEQ ID NO: 19844 - RNA, 20 nt, synthetic construct
  source 1..20: mol_type = other RNA
aggatcgttagtattttcac

SEQ ID NO: 19845 - RNA, 20 nt, synthetic construct
  source 1..20: mol_type = other RNA
aggatctgttggtgcttagc

SEQ ID NO: 19846 - RNA, 20 nt, synthetic construct
  source 1..20: mol_type = other RNA
aggatcttactgtaagttcc

SEQ ID NO: 19847 - RNA, 20 nt, synthetic construct
  source 1..20: mol_type = other RNA
aggatgaattacaaatgaaa

SEQ ID NO: 19848 - RNA, 20 nt, synthetic construct
  source 1..20: mol_type = other RNA
aggatgaccttgacaataaa

SEQ ID NO: 19849 - RNA, 20 nt, synthetic construct
  source 1..20: mol_type = other RNA
aggatgactgtcctgaattc

SEQ ID NO: 19850 - RNA, 20 nt, synthetic construct
  source 1..20: mol_type = other RNA
aggatgaggggctgagcctt

SEQ ID NO: 19851 - RNA, 20 nt, synthetic construct
  source 1..20: mol_type = other RNA
aggatgcacaagacagatgt

SEQ ID NO: 19852 - RNA, 20 nt, synthetic construct
  source 1..20: mol_type = other RNA
aggatggcatgaaatgggtt

SEQ ID NO: 19853 - RNA, 20 nt, synthetic construct
  source 1..20: mol_type = other RNA
aggatggccagtcatgtggg

SEQ ID NO: 19854 - RNA, 20 nt, synthetic construct
  source 1..20: mol_type = other RNA
aggatggcttgagcccaggg

SEQ ID NO: 19855 - RNA, 20 nt, synthetic construct
  source 1..20: mol_type = other RNA
aggatgggcagactccttcc

SEQ ID NO: 19856 - RNA, 20 nt, synthetic construct
  source 1..20: mol_type = other RNA
aggatgggcattccagaggg

SEQ ID NO: 19857 - RNA, 20 nt, synthetic construct
  source 1..20: mol_type = other RNA
aggatggtttgattgttcca

SEQ ID NO: 19858 - RNA, 20 nt, synthetic construct
  source 1..20: mol_type = other RNA
aggatgtcaacaaaatacta

SEQ ID NO: 19859 - RNA, 20 nt, synthetic construct
  source 1..20: mol_type = other RNA
aggatgtcaactgaggcaga

SEQ ID NO: 19860 - RNA, 20 nt, synthetic construct
  source 1..20: mol_type = other RNA
aggatgtctttgggaaggcc

SEQ ID NO: 19861 - RNA, 20 nt, synthetic construct
  source 1..20: mol_type = other RNA
aggatgtgtacccgtgtgtt

SEQ ID NO: 19862 - RNA, 20 nt, synthetic construct
  source 1..20: mol_type = other RNA
aggattaagacactacaaaa

SEQ ID NO: 19863 - RNA, 20 nt, synthetic construct
  source 1..20: mol_type = other RNA
aggattaatctttctgaact

SEQ ID NO: 19864 - RNA, 20 nt, synthetic construct
  source 1..20: mol_type = other RNA
aggattacaatgtaaggtgc

SEQ ID NO: 19865 - RNA, 20 nt, synthetic construct
  source 1..20: mol_type = other RNA
aggattagaaagtagattag

SEQ ID NO: 19866 - RNA, 20 nt, synthetic construct
  source 1..20: mol_type = other RNA
aggattagtgttaattcttc

SEQ ID NO: 19867 - RNA, 20 nt, synthetic construct
  source 1..20: mol_type = other RNA
aggattatggctagaaactt

SEQ ID NO: 19868 - RNA, 20 nt, synthetic construct
  source 1..20: mol_type = other RNA
aggattccaggtttacagga

SEQ ID NO: 19869 - RNA, 20 nt, synthetic construct
  source 1..20: mol_type = other RNA
aggattcctccctggagagg

SEQ ID NO: 19870 - RNA, 20 nt, synthetic construct
  source 1..20: mol_type = other RNA
aggattcgattaaaataaca

SEQ ID NO: 19871 - RNA, 20 nt, synthetic construct
  source 1..20: mol_type = other RNA
aggattcgggggagagcact

SEQ ID NO: 19872 - RNA, 20 nt, synthetic construct
  source 1..20: mol_type = other RNA
aggattcttgttaagcattt

SEQ ID NO: 19873 - RNA, 20 nt, synthetic construct
  source 1..20: mol_type = other RNA
aggattgaatggaaagaaat

SEQ ID NO: 19874 - RNA, 20 nt, synthetic construct
  source 1..20: mol_type = other RNA
aggattgcctaacaccagta

SEQ ID NO: 19875 - RNA, 20 nt, synthetic construct
  source 1..20: mol_type = other RNA
aggattggaatgagtccagc

SEQ ID NO: 19876 - RNA, 20 nt, synthetic construct
  source 1..20: mol_type = other RNA
aggattggagactgataaac

SEQ ID NO: 19877 - RNA, 20 nt, synthetic construct
  source 1..20: mol_type = other RNA
aggattgggaagattggctt

SEQ ID NO: 19878 - RNA, 20 nt, synthetic construct
  source 1..20: mol_type = other RNA
aggattgttcatgtctgtgt

SEQ ID NO: 19879 - RNA, 20 nt, synthetic construct
  source 1..20: mol_type = other RNA
aggattgtttgaggctggga

SEQ ID NO: 19880 - RNA, 20 nt, synthetic construct
  source 1..20: mol_type = other RNA
aggatttcagtaaatgaaat

SEQ ID NO: 19881 - RNA, 20 nt, synthetic construct
  source 1..20: mol_type = other RNA
aggatttgtttgtgaagata

SEQ ID NO: 19882 - RNA, 20 nt, synthetic construct
  source 1..20: mol_type = other RNA
aggattttcgtatcttttaa

SEQ ID NO: 19883 - RNA, 20 nt, synthetic construct
  source 1..20: mol_type = other RNA
aggattttctattcattacc

SEQ ID NO: 19884 - RNA, 20 nt, synthetic construct
  source 1..20: mol_type = other RNA
aggattttggattgcgattg

SEQ ID NO: 19885 - RNA, 20 nt, synthetic construct
  source 1..20: mol_type = other RNA
aggcaaaactcctgaacaaa

SEQ ID NO: 19886 - RNA, 20 nt, synthetic construct
  source 1..20: mol_type = other RNA
aggcaaaagatgatgaacaa

SEQ ID NO: 19887 - RNA, 20 nt, synthetic construct
  source 1..20: mol_type = other RNA
aggcaaacagcgccacttaa

SEQ ID NO: 19888 - RNA, 20 nt, synthetic construct
  source 1..20: mol_type = other RNA
aggcaaaccacacagagaac

SEQ ID NO: 19889 - RNA, 20 nt, synthetic construct
  source 1..20: mol_type = other RNA
aggcaaaggaaaaaactttt

SEQ ID NO: 19890 - RNA, 20 nt, synthetic construct
  source 1..20: mol_type = other RNA
aggcaaaggaaaaatctaac

SEQ ID NO: 19891 - RNA, 20 nt, synthetic construct
  source 1..20: mol_type = other RNA
aggcaaaggccgctcttgac

SEQ ID NO: 19892 - RNA, 20 nt, synthetic construct
  source 1..20: mol_type = other RNA
aggcaaaggttgagacaaga

SEQ ID NO: 19893 - RNA, 20 nt, synthetic construct
  source 1..20: mol_type = other RNA
aggcaaattcatagatcacc

SEQ ID NO: 19894 - RNA, 20 nt, synthetic construct
  source 1..20: mol_type = other RNA
aggcaacagtcattcaggtc

SEQ ID NO: 19895 - RNA, 20 nt, synthetic construct
  source 1..20: mol_type = other RNA
aggcaacatccctatgcaat

SEQ ID NO: 19896 - RNA, 20 nt, synthetic construct
  source 1..20: mol_type = other RNA
aggcaaccttgggagaaaat

SEQ ID NO: 19897 - RNA, 20 nt, synthetic construct
  source 1..20: mol_type = other RNA
aggcaagagagcaagactca

SEQ ID NO: 19898 - RNA, 20 nt, synthetic construct
  source 1..20: mol_type = other RNA
aggcaagggactgtcgaagc

SEQ ID NO: 19899 - RNA, 20 nt, synthetic construct
  source 1..20: mol_type = other RNA
aggcaatccttccgcctcag

SEQ ID NO: 19900 - RNA, 20 nt, synthetic construct
  source 1..20: mol_type = other RNA
aggcaatgagtctgacatac

SEQ ID NO: 19901 - RNA, 20 nt, synthetic construct
  source 1..20: mol_type = other RNA
aggcaatgctctcttccccc

SEQ ID NO: 19902 - RNA, 20 nt, synthetic construct
  source 1..20: mol_type = other RNA
aggcaatgtaacacagttct

SEQ ID NO: 19903 - RNA, 20 nt, synthetic construct
  source 1..20: mol_type = other RNA
aggcaatgtagggaatagac

SEQ ID NO: 19904 - RNA, 20 nt, synthetic construct
  source 1..20: mol_type = other RNA
aggcaatgttgattttgagg

SEQ ID NO: 19905 - RNA, 20 nt, synthetic construct
  source 1..20: mol_type = other RNA
aggcaatttagaattctctc

SEQ ID NO: 19906 - RNA, 20 nt, synthetic construct
  source 1..20: mol_type = other RNA
aggcacagtctgtgcttaag

SEQ ID NO: 19907 - RNA, 20 nt, synthetic construct
  source 1..20: mol_type = other RNA
aggcacattcaagcagaaat

SEQ ID NO: 19908 - RNA, 20 nt, synthetic construct
  source 1..20: mol_type = other RNA
aggcacctgaacccaggagg

SEQ ID NO: 19909 - RNA, 20 nt, synthetic construct
  source 1..20: mol_type = other RNA
aggcaccttcagaagccctg

SEQ ID NO: 19910 - RNA, 20 nt, synthetic construct
  source 1..20: mol_type = other RNA
aggcactaacaaagggcctg

SEQ ID NO: 19911 - RNA, 20 nt, synthetic construct
  source 1..20: mol_type = other RNA
aggcactgtatggttcttaa

SEQ ID NO: 19912 - RNA, 20 nt, synthetic construct
  source 1..20: mol_type = other RNA
aggcagaacacactgctctt

SEQ ID NO: 19913 - RNA, 20 nt, synthetic construct
  source 1..20: mol_type = other RNA
aggcagaaccacctggggga

SEQ ID NO: 19914 - RNA, 20 nt, synthetic construct
  source 1..20: mol_type = other RNA
aggcagaatgtgacctgtcc

SEQ ID NO: 19915 - RNA, 20 nt, synthetic construct
  source 1..20: mol_type = other RNA
aggcagaattatagagggcc

SEQ ID NO: 19916 - RNA, 20 nt, synthetic construct
  source 1..20: mol_type = other RNA
aggcagagagagtaactggt

SEQ ID NO: 19917 - RNA, 20 nt, synthetic construct
  source 1..20: mol_type = other RNA
aggcagagagatggtgggag

SEQ ID NO: 19918 - RNA, 20 nt, synthetic construct
  source 1..20: mol_type = other RNA
aggcagagtagagaaggctt

SEQ ID NO: 19919 - RNA, 20 nt, synthetic construct
  source 1..20: mol_type = other RNA
aggcagatcacgaggtcgag

SEQ ID NO: 19920 - RNA, 20 nt, synthetic construct
  source 1..20: mol_type = other RNA
aggcagcccgacctccagcg

SEQ ID NO: 19921 - RNA, 20 nt, synthetic construct
  source 1..20: mol_type = other RNA
aggcagctaagcaccaacag

SEQ ID NO: 19922 - RNA, 20 nt, synthetic construct
  source 1..20: mol_type = other RNA
aggcaggactgcttgaggcc

SEQ ID NO: 19923 - RNA, 20 nt, synthetic construct
  source 1..20: mol_type = other RNA
aggcaggagaactgcctgga

SEQ ID NO: 19924 - RNA, 20 nt, synthetic construct
  source 1..20: mol_type = other RNA
aggcaggagagtcgcttgaa

SEQ ID NO: 19925 - RNA, 20 nt, synthetic construct
  source 1..20: mol_type = other RNA
aggcaggagcagtgtgaata

SEQ ID NO: 19926 - RNA, 20 nt, synthetic construct
  source 1..20: mol_type = other RNA
aggcaggagcatagcttgaa

SEQ ID NO: 19927 - RNA, 20 nt, synthetic construct
  source 1..20: mol_type = other RNA
aggcaggaggcacctgaacc

SEQ ID NO: 19928 - RNA, 20 nt, synthetic construct
  source 1..20: mol_type = other RNA
aggcaggaggcctcagaatt

SEQ ID NO: 19929 - RNA, 20 nt, synthetic construct
  source 1..20: mol_type = other RNA
aggcagggcttggtggccca

SEQ ID NO: 19930 - RNA, 20 nt, synthetic construct
  source 1..20: mol_type = other RNA
aggcagggtaggaaggcggt

SEQ ID NO: 19931 - RNA, 20 nt, synthetic construct
  source 1..20: mol_type = other RNA
aggcaggtggatatctgagg

SEQ ID NO: 19932 - RNA, 20 nt, synthetic construct
  source 1..20: mol_type = other RNA
aggcaggtggatcaggagat

SEQ ID NO: 19933 - RNA, 20 nt, synthetic construct
  source 1..20: mol_type = other RNA
aggcagtaccattccccttg

SEQ ID NO: 19934 - RNA, 20 nt, synthetic construct
  source 1..20: mol_type = other RNA
aggcagtcctctactttcac

SEQ ID NO: 19935 - RNA, 20 nt, synthetic construct
  source 1..20: mol_type = other RNA
aggcagtcctctcactccaa

SEQ ID NO: 19936 - RNA, 20 nt, synthetic construct
  source 1..20: mol_type = other RNA
aggcagtctagtccatgaag

SEQ ID NO: 19937 - RNA, 20 nt, synthetic construct
  source 1..20: mol_type = other RNA
aggcagttattaagagtgtg

SEQ ID NO: 19938 - RNA, 20 nt, synthetic construct
  source 1..20: mol_type = other RNA
aggcagttgagttttcaacc

SEQ ID NO: 19939 - RNA, 20 nt, synthetic construct
  source 1..20: mol_type = other RNA
aggcataagccaccgcactc

SEQ ID NO: 19940 - RNA, 20 nt, synthetic construct
  source 1..20: mol_type = other RNA
aggcatagggccttctactt

SEQ ID NO: 19941 - RNA, 20 nt, synthetic construct
  source 1..20: mol_type = other RNA
aggcatataaactggaagga

SEQ ID NO: 19942 - RNA, 20 nt, synthetic construct
  source 1..20: mol_type = other RNA
aggcatataataagcagaat

SEQ ID NO: 19943 - RNA, 20 nt, synthetic construct
  source 1..20: mol_type = other RNA
aggcatattattgtaacttg

SEQ ID NO: 19944 - RNA, 20 nt, synthetic construct
  source 1..20: mol_type = other RNA
aggcatcggccgggcgtggg

SEQ ID NO: 19945 - RNA, 20 nt, synthetic construct
  source 1..20: mol_type = other RNA
aggcatctagttaccactag

SEQ ID NO: 19946 - RNA, 20 nt, synthetic construct
  source 1..20: mol_type = other RNA
aggcatctatttccccatta

SEQ ID NO: 19947 - RNA, 20 nt, synthetic construct
  source 1..20: mol_type = other RNA
aggcatctctcccttcctgt

SEQ ID NO: 19948 - RNA, 20 nt, synthetic construct
  source 1..20: mol_type = other RNA
aggcatctctctaaaaacat

SEQ ID NO: 19949 - RNA, 20 nt, synthetic construct
  source 1..20: mol_type = other RNA
aggcatgaaattcttgggtg

SEQ ID NO: 19950 - RNA, 20 nt, synthetic construct
  source 1..20: mol_type = other RNA
aggcatgagccactgcgggc

SEQ ID NO: 19951 - RNA, 20 nt, synthetic construct
  source 1..20: mol_type = other RNA
aggcatgagtcgccatacct

SEQ ID NO: 19952 - RNA, 20 nt, synthetic construct
  source 1..20: mol_type = other RNA
aggcatgatggctcaacgcc

SEQ ID NO: 19953 - RNA, 20 nt, synthetic construct
  source 1..20: mol_type = other RNA
aggcatgcacggacttggca

SEQ ID NO: 19954 - RNA, 20 nt, synthetic construct
  source 1..20: mol_type = other RNA
aggcatgccgggacaagagt

SEQ ID NO: 19955 - RNA, 20 nt, synthetic construct
  source 1..20: mol_type = other RNA
aggcatgcgccatcacaccc

SEQ ID NO: 19956 - RNA, 20 nt, synthetic construct
  source 1..20: mol_type = other RNA
aggcatgctaactgcagagg

SEQ ID NO: 19957 - RNA, 20 nt, synthetic construct
  source 1..20: mol_type = other RNA
aggcatgggggcgcgtgcct

SEQ ID NO: 19958 - RNA, 20 nt, synthetic construct
  source 1..20: mol_type = other RNA
aggcattagtgaattcacag

SEQ ID NO: 19959 - RNA, 20 nt, synthetic construct
  source 1..20: mol_type = other RNA
aggcattgtgctcagtggtt

SEQ ID NO: 19960 - RNA, 20 nt, synthetic construct
  source 1..20: mol_type = other RNA
aggccaaatgaaaggcgtcg

SEQ ID NO: 19961 - RNA, 20 nt, synthetic construct
  source 1..20: mol_type = other RNA
aggccaacagggccactgag

SEQ ID NO: 19962 - RNA, 20 nt, synthetic construct
  source 1..20: mol_type = other RNA
aggccaactgtcctctcttg

SEQ ID NO: 19963 - RNA, 20 nt, synthetic construct
  source 1..20: mol_type = other RNA
aggccacaaagtccccacat

SEQ ID NO: 19964 - RNA, 20 nt, synthetic construct
  source 1..20: mol_type = other RNA
aggccactctcatctaaatt

SEQ ID NO: 19965 - RNA, 20 nt, synthetic construct
  source 1..20: mol_type = other RNA
aggccagagggaatctagga

SEQ ID NO: 19966 - RNA, 20 nt, synthetic construct
  source 1..20: mol_type = other RNA
aggccagatatccataagga

SEQ ID NO: 19967 - RNA, 20 nt, synthetic construct
  source 1..20: mol_type = other RNA
aggccagtccctagtgtctc

SEQ ID NO: 19968 - RNA, 20 nt, synthetic construct
  source 1..20: mol_type = other RNA
aggccagtgagtgatgaaaa

SEQ ID NO: 19969 - RNA, 20 nt, synthetic construct
  source 1..20: mol_type = other RNA
aggccataaatcaaggtaca

SEQ ID NO: 19970 - RNA, 20 nt, synthetic construct
  source 1..20: mol_type = other RNA
aggccatcttcatttctaag

SEQ ID NO: 19971 - RNA, 20 nt, synthetic construct
  source 1..20: mol_type = other RNA
aggccatttgattgccagtt

SEQ ID NO: 19972 - RNA, 20 nt, synthetic construct
  source 1..20: mol_type = other RNA
aggcccaaaaagtttttaaa

SEQ ID NO: 19973 - RNA, 20 nt, synthetic construct
  source 1..20: mol_type = other RNA
aggcccaccatgatgcagcc

SEQ ID NO: 19974 - RNA, 20 nt, synthetic construct
  source 1..20: mol_type = other RNA
aggccccaggggacatagat

SEQ ID NO: 19975 - RNA, 20 nt, synthetic construct
  source 1..20: mol_type = other RNA
aggccccgatgccatgtgtt

SEQ ID NO: 19976 - RNA, 20 nt, synthetic construct
  source 1..20: mol_type = other RNA
aggccccttgaaagatcatt

SEQ ID NO: 19977 - RNA, 20 nt, synthetic construct
  source 1..20: mol_type = other RNA
aggcccggggcagagaactg

SEQ ID NO: 19978 - RNA, 20 nt, synthetic construct
  source 1..20: mol_type = other RNA
aggccctaaccccagagatt

SEQ ID NO: 19979 - RNA, 20 nt, synthetic construct
  source 1..20: mol_type = other RNA
aggccctatgccttcagtat

SEQ ID NO: 19980 - RNA, 20 nt, synthetic construct
  source 1..20: mol_type = other RNA
aggccctattcaacctataa

SEQ ID NO: 19981 - RNA, 20 nt, synthetic construct
  source 1..20: mol_type = other RNA
aggccctctataattctgcc

SEQ ID NO: 19982 - RNA, 20 nt, synthetic construct
  source 1..20: mol_type = other RNA
aggccctgagaagtcaaagc

SEQ ID NO: 19983 - RNA, 20 nt, synthetic construct
  source 1..20: mol_type = other RNA
aggccctgattgagattagc

SEQ ID NO: 19984 - RNA, 20 nt, synthetic construct
  source 1..20: mol_type = other RNA
aggccctgatttaaagtagg

SEQ ID NO: 19985 - RNA, 20 nt, synthetic construct
  source 1..20: mol_type = other RNA
aggccctggtgctttctatc

SEQ ID NO: 19986 - RNA, 20 nt, synthetic construct
  source 1..20: mol_type = other RNA
aggccctttgttagtgcctt

SEQ ID NO: 19987 - RNA, 20 nt, synthetic construct
  source 1..20: mol_type = other RNA
aggccgagggttgaacatca

SEQ ID NO: 19988 - RNA, 20 nt, synthetic construct
  source 1..20: mol_type = other RNA
aggccgcagtgagccatggc

SEQ ID NO: 19989 - RNA, 20 nt, synthetic construct
  source 1..20: mol_type = other RNA
aggccgcccgctgctccctc

SEQ ID NO: 19990 - RNA, 20 nt, synthetic construct
  source 1..20: mol_type = other RNA
aggccgctcttgaccttgtg

SEQ ID NO: 19991 - RNA, 20 nt, synthetic construct
  source 1..20: mol_type = other RNA
aggccggaggattgcttgag

SEQ ID NO: 19992 - RNA, 20 nt, synthetic construct
  source 1..20: mol_type = other RNA
aggccgtccctattttctac

SEQ ID NO: 19993 - RNA, 20 nt, synthetic construct
  source 1..20: mol_type = other RNA
aggcctaggtgtgataactg

SEQ ID NO: 19994 - RNA, 20 nt, synthetic construct
  source 1..20: mol_type = other RNA
aggcctattttaggctctgt

SEQ ID NO: 19995 - RNA, 20 nt, synthetic construct
  source 1..20: mol_type = other RNA
aggcctcagaattaatataa

SEQ ID NO: 19996 - RNA, 20 nt, synthetic construct
  source 1..20: mol_type = other RNA
aggcctcatgtattttccta

SEQ ID NO: 19997 - RNA, 20 nt, synthetic construct
  source 1..20: mol_type = other RNA
aggcctcctgccttcctgac

SEQ ID NO: 19998 - RNA, 20 nt, synthetic construct
  source 1..20: mol_type = other RNA
aggcctcgctcttggctttt

SEQ ID NO: 19999 - RNA, 20 nt, synthetic construct
  source 1..20: mol_type = other RNA
aggcctctccccttgacgaa

SEQ ID NO: 20000 - RNA, 20 nt, synthetic construct
  source 1..20: mol_type = other RNA
aggcctgagccgtcggtatg

SEQ ID NO: 20001 - RNA, 20 nt, synthetic construct
  source 1..20: mol_type = other RNA
aggcctgatagctgtggaag

SEQ ID NO: 20002 - RNA, 20 nt, synthetic construct
  source 1..20: mol_type = other RNA
aggcctgcttcattccgcgt

SEQ ID NO: 20003 - RNA, 20 nt, synthetic construct
  source 1..20: mol_type = other RNA
aggcctggaacaggcccttt

SEQ ID NO: 20004 - RNA, 20 nt, synthetic construct
  source 1..20: mol_type = other RNA
aggcctgttgtgaggattcg

SEQ ID NO: 20005 - RNA, 20 nt, synthetic construct
  source 1..20: mol_type = other RNA
aggccttccacctgctcttt

SEQ ID NO: 20006 - RNA, 20 nt, synthetic construct
  source 1..20: mol_type = other RNA
aggccttccacggaatgccc

SEQ ID NO: 20007 - RNA, 20 nt, synthetic construct
  source 1..20: mol_type = other RNA
aggccttcgaggcatctagt

SEQ ID NO: 20008 - RNA, 20 nt, synthetic construct
  source 1..20: mol_type = other RNA
aggccttctcctccaaccca

SEQ ID NO: 20009 - RNA, 20 nt, synthetic construct
  source 1..20: mol_type = other RNA
aggcgaaatatctccctcac

SEQ ID NO: 20010 - RNA, 20 nt, synthetic construct
  source 1..20: mol_type = other RNA
aggcgaaatgtgaacagaca

SEQ ID NO: 20011 - RNA, 20 nt, synthetic construct
  source 1..20: mol_type = other RNA
aggcgaagcccgccgctcgc

SEQ ID NO: 20012 - RNA, 20 nt, synthetic construct
  source 1..20: mol_type = other RNA
aggcgaagcggcagggccgg

SEQ ID NO: 20013 - RNA, 20 nt, synthetic construct
  source 1..20: mol_type = other RNA
aggcgcacgccatctcgccc

SEQ ID NO: 20014 - RNA, 20 nt, synthetic construct
  source 1..20: mol_type = other RNA
aggcgcagacacaccatgac

SEQ ID NO: 20015 - RNA, 20 nt, synthetic construct
  source 1..20: mol_type = other RNA
aggcgcctgcattgcattta

SEQ ID NO: 20016 - RNA, 20 nt, synthetic construct
  source 1..20: mol_type = other RNA
aggcgcctggacaggatccc

SEQ ID NO: 20017 - RNA, 20 nt, synthetic construct
  source 1..20: mol_type = other RNA
aggcggaaggattgcctaac

SEQ ID NO: 20018 - RNA, 20 nt, synthetic construct
  source 1..20: mol_type = other RNA
aggcggaatgcagtggcgtg

SEQ ID NO: 20019 - RNA, 20 nt, synthetic construct
  source 1..20: mol_type = other RNA
aggcggaggttgcggtgacg

SEQ ID NO: 20020 - RNA, 20 nt, synthetic construct
  source 1..20: mol_type = other RNA
aggcggcagagggagcagcg

SEQ ID NO: 20021 - RNA, 20 nt, synthetic construct
  source 1..20: mol_type = other RNA
aggcggctggatcgcttgag

SEQ ID NO: 20022 - RNA, 20 nt, synthetic construct
  source 1..20: mol_type = other RNA
aggcggtggggacagctcaa

SEQ ID NO: 20023 - RNA, 20 nt, synthetic construct
  source 1..20: mol_type = other RNA
aggcgtagtatctcatgctt

SEQ ID NO: 20024 - RNA, 20 nt, synthetic construct
  source 1..20: mol_type = other RNA
aggcgtcggggctgctgggg

SEQ ID NO: 20025 - RNA, 20 nt, synthetic construct
  source 1..20: mol_type = other RNA
aggcgtgagccaccacgtcc

SEQ ID NO: 20026 - RNA, 20 nt, synthetic construct
  source 1..20: mol_type = other RNA
aggcgtgagccacctcatcc

SEQ ID NO: 20027 - RNA, 20 nt, synthetic construct
  source 1..20: mol_type = other RNA
aggcgtgagcctccacacct

SEQ ID NO: 20028 - RNA, 20 nt, synthetic construct
  source 1..20: mol_type = other RNA
aggcgtggtggcggatgccg

SEQ ID NO: 20029 - RNA, 20 nt, synthetic construct
  source 1..20: mol_type = other RNA
aggcgtgtaaactgttggaa

SEQ ID NO: 20030 - RNA, 20 nt, synthetic construct
  source 1..20: mol_type = other RNA
aggcgttgagccatcatgcc

SEQ ID NO: 20031 - RNA, 20 nt, synthetic construct
  source 1..20: mol_type = other RNA
aggctaaaacatacatgaga

SEQ ID NO: 20032 - RNA, 20 nt, synthetic construct
  source 1..20: mol_type = other RNA
aggctaacagccaaagaaat

SEQ ID NO: 20033 - RNA, 20 nt, synthetic construct
  source 1..20: mol_type = other RNA
aggctaagcatgtaacttgc

SEQ ID NO: 20034 - RNA, 20 nt, synthetic construct
  source 1..20: mol_type = other RNA
aggctaagttgagaaactat

SEQ ID NO: 20035 - RNA, 20 nt, synthetic construct
  source 1..20: mol_type = other RNA
aggctaatgtgtgttccaga

SEQ ID NO: 20036 - RNA, 20 nt, synthetic construct
  source 1..20: mol_type = other RNA
aggctaattttttctgtaat

SEQ ID NO: 20037 - RNA, 20 nt, synthetic construct
  source 1..20: mol_type = other RNA
aggctagaagtcccagttca

SEQ ID NO: 20038 - RNA, 20 nt, synthetic construct
  source 1..20: mol_type = other RNA
aggctagagctcacacgaga

SEQ ID NO: 20039 - RNA, 20 nt, synthetic construct
  source 1..20: mol_type = other RNA
aggctagcacagaggcaaca

SEQ ID NO: 20040 - RNA, 20 nt, synthetic construct
  source 1..20: mol_type = other RNA
aggctaggtgacctgccaga

SEQ ID NO: 20041 - RNA, 20 nt, synthetic construct
  source 1..20: mol_type = other RNA
aggctattaactttgaaatc

SEQ ID NO: 20042 - RNA, 20 nt, synthetic construct
  source 1..20: mol_type = other RNA
aggctcaatacctgaaaagt

SEQ ID NO: 20043 - RNA, 20 nt, synthetic construct
  source 1..20: mol_type = other RNA
aggctcagcccctcatcctc

SEQ ID NO: 20044 - RNA, 20 nt, synthetic construct
  source 1..20: mol_type = other RNA
aggctccacttgggtggaag

SEQ ID NO: 20045 - RNA, 20 nt, synthetic construct
  source 1..20: mol_type = other RNA
aggctccaggtagaatgaaa

SEQ ID NO: 20046 - RNA, 20 nt, synthetic construct
  source 1..20: mol_type = other RNA
aggctcctgagaaccggaac

SEQ ID NO: 20047 - RNA, 20 nt, synthetic construct
  source 1..20: mol_type = other RNA
aggctcctgcagacatgcac

SEQ ID NO: 20048 - RNA, 20 nt, synthetic construct
  source 1..20: mol_type = other RNA
aggctctcttcaccaactga

SEQ ID NO: 20049 - RNA, 20 nt, synthetic construct
  source 1..20: mol_type = other RNA
aggctctgggtcagaatcgt

SEQ ID NO: 20050 - RNA, 20 nt, synthetic construct
  source 1..20: mol_type = other RNA
aggctctgtggtttcttgaa

SEQ ID NO: 20051 - RNA, 20 nt, synthetic construct
  source 1..20: mol_type = other RNA
aggctgaactgctgacagat

SEQ ID NO: 20052 - RNA, 20 nt, synthetic construct
  source 1..20: mol_type = other RNA
aggctgaagcaggcttttta

SEQ ID NO: 20053 - RNA, 20 nt, synthetic construct
  source 1..20: mol_type = other RNA
aggctgaagggaggaaaaaa

SEQ ID NO: 20054 - RNA, 20 nt, synthetic construct
  source 1..20: mol_type = other RNA
aggctgacttagagggcttc

SEQ ID NO: 20055 - RNA, 20 nt, synthetic construct
  source 1..20: mol_type = other RNA
aggctgagacctcatcttag

SEQ ID NO: 20056 - RNA, 20 nt, synthetic construct
  source 1..20: mol_type = other RNA
aggctgaggcaggaggcacc

SEQ ID NO: 20057 - RNA, 20 nt, synthetic construct
  source 1..20: mol_type = other RNA
aggctgaggcggaaggattg

SEQ ID NO: 20058 - RNA, 20 nt, synthetic construct
  source 1..20: mol_type = other RNA
aggctgaggctggggaattg

SEQ ID NO: 20059 - RNA, 20 nt, synthetic construct
  source 1..20: mol_type = other RNA
aggctgcaagcactggtaag

SEQ ID NO: 20060 - RNA, 20 nt, synthetic construct
  source 1..20: mol_type = other RNA
aggctgcaccctcctcctcc

SEQ ID NO: 20061 - RNA, 20 nt, synthetic construct
  source 1..20: mol_type = other RNA
aggctgcagtgagctccagc

SEQ ID NO: 20062 - RNA, 20 nt, synthetic construct
  source 1..20: mol_type = other RNA
aggctgccagcaccagatac

SEQ ID NO: 20063 - RNA, 20 nt, synthetic construct
  source 1..20: mol_type = other RNA
aggctggaaataatttccct

SEQ ID NO: 20064 - RNA, 20 nt, synthetic construct
  source 1..20: mol_type = other RNA
aggctggaagaattttaagc

SEQ ID NO: 20065 - RNA, 20 nt, synthetic construct
  source 1..20: mol_type = other RNA
aggctggctctttccactct

SEQ ID NO: 20066 - RNA, 20 nt, synthetic construct
  source 1..20: mol_type = other RNA
aggctgggagtacaagacca

SEQ ID NO: 20067 - RNA, 20 nt, synthetic construct
  source 1..20: mol_type = other RNA
aggctggggaattgcatgag

SEQ ID NO: 20068 - RNA, 20 nt, synthetic construct
  source 1..20: mol_type = other RNA
aggctggtcttgtactccca

SEQ ID NO: 20069 - RNA, 20 nt, synthetic construct
  source 1..20: mol_type = other RNA
aggctggttccaaacttctg

SEQ ID NO: 20070 - RNA, 20 nt, synthetic construct
  source 1..20: mol_type = other RNA
aggctgtattgtaggaaagc

SEQ ID NO: 20071 - RNA, 20 nt, synthetic construct
  source 1..20: mol_type = other RNA
aggctgtcccaaatgcacca

SEQ ID NO: 20072 - RNA, 20 nt, synthetic construct
  source 1..20: mol_type = other RNA
aggctgtctccaacgctttt

SEQ ID NO: 20073 - RNA, 20 nt, synthetic construct
  source 1..20: mol_type = other RNA
aggctgttattagagttgta

SEQ ID NO: 20074 - RNA, 20 nt, synthetic construct
  source 1..20: mol_type = other RNA
aggctgttcaatttagaaaa

SEQ ID NO: 20075 - RNA, 20 nt, synthetic construct
  source 1..20: mol_type = other RNA
aggctgtttgagatctttct

SEQ ID NO: 20076 - RNA, 20 nt, synthetic construct
  source 1..20: mol_type = other RNA
aggcttaaaattcttccagc

SEQ ID NO: 20077 - RNA, 20 nt, synthetic construct
  source 1..20: mol_type = other RNA
aggcttagataggatgggca

SEQ ID NO: 20078 - RNA, 20 nt, synthetic construct
  source 1..20: mol_type = other RNA
aggcttagatgagcccagga

SEQ ID NO: 20079 - RNA, 20 nt, synthetic construct
  source 1..20: mol_type = other RNA
aggcttagtacagccatcaa

SEQ ID NO: 20080 - RNA, 20 nt, synthetic construct
  source 1..20: mol_type = other RNA
aggcttcgagttctgggagt

SEQ ID NO: 20081 - RNA, 20 nt, synthetic construct
  source 1..20: mol_type = other RNA
aggcttgagtctgtgctctg

SEQ ID NO: 20082 - RNA, 20 nt, synthetic construct
  source 1..20: mol_type = other RNA
aggcttgctttggctagaag

SEQ ID NO: 20083 - RNA, 20 nt, synthetic construct
  source 1..20: mol_type = other RNA
aggcttggaaaacaaattgc

SEQ ID NO: 20084 - RNA, 20 nt, synthetic construct
  source 1..20: mol_type = other RNA
aggcttgtgcatcagaattc

SEQ ID NO: 20085 - RNA, 20 nt, synthetic construct
  source 1..20: mol_type = other RNA
aggctttaagcagaaagtta

SEQ ID NO: 20086 - RNA, 20 nt, synthetic construct
  source 1..20: mol_type = other RNA
aggctttcccagggtgtagc

SEQ ID NO: 20087 - RNA, 20 nt, synthetic construct
  source 1..20: mol_type = other RNA
aggctttcgtatggaagatg

SEQ ID NO: 20088 - RNA, 20 nt, synthetic construct
  source 1..20: mol_type = other RNA
aggctttctgtgtaatactg

SEQ ID NO: 20089 - RNA, 20 nt, synthetic construct
  source 1..20: mol_type = other RNA
aggctttgacttctcagggc

SEQ ID NO: 20090 - RNA, 20 nt, synthetic construct
  source 1..20: mol_type = other RNA
aggctttgtgttggtgtttc

SEQ ID NO: 20091 - RNA, 20 nt, synthetic construct
  source 1..20: mol_type = other RNA
aggcttttattggtaatgtt

SEQ ID NO: 20092 - RNA, 20 nt, synthetic construct
  source 1..20: mol_type = other RNA
aggcttttcatagtcatcat

SEQ ID NO: 20093 - RNA, 20 nt, synthetic construct
  source 1..20: mol_type = other RNA
aggcttttggattttctttc

SEQ ID NO: 20094 - RNA, 20 nt, synthetic construct
  source 1..20: mol_type = other RNA
aggctttttacccggagagg

SEQ ID NO: 20095 - RNA, 20 nt, synthetic construct
  source 1..20: mol_type = other RNA
aggctttttatatttccgat

SEQ ID NO: 20096 - RNA, 20 nt, synthetic construct
  source 1..20: mol_type = other RNA
agggaaaacaattacttgag

SEQ ID NO: 20097 - RNA, 20 nt, synthetic construct
  source 1..20: mol_type = other RNA
agggaaaactacatgtaaaa

SEQ ID NO: 20098 - RNA, 20 nt, synthetic construct
  source 1..20: mol_type = other RNA
agggaaacactcataccagg

SEQ ID NO: 20099 - RNA, 20 nt, synthetic construct
  source 1..20: mol_type = other RNA
agggaaacagggttacagta

SEQ ID NO: 20100 - RNA, 20 nt, synthetic construct
  source 1..20: mol_type = other RNA
agggaaaccttactgtaata

SEQ ID NO: 20101 - RNA, 20 nt, synthetic construct
  source 1..20: mol_type = other RNA
agggaaactgtttttgcaat

SEQ ID NO: 20102 - RNA, 20 nt, synthetic construct
  source 1..20: mol_type = other RNA
agggaaaggatgaccttgac

SEQ ID NO: 20103 - RNA, 20 nt, synthetic construct
  source 1..20: mol_type = other RNA
agggaaatatgaaccacact

SEQ ID NO: 20104 - RNA, 20 nt, synthetic construct
  source 1..20: mol_type = other RNA
agggaaatcattcaggacac

SEQ ID NO: 20105 - RNA, 20 nt, synthetic construct
  source 1..20: mol_type = other RNA
agggaaatggagggccagag

SEQ ID NO: 20106 - RNA, 20 nt, synthetic construct
  source 1..20: mol_type = other RNA
agggaaattatttccagcct

SEQ ID NO: 20107 - RNA, 20 nt, synthetic construct
  source 1..20: mol_type = other RNA
agggaacactaagaagatgg

SEQ ID NO: 20108 - RNA, 20 nt, synthetic construct
  source 1..20: mol_type = other RNA
agggaacattttcattttaa

SEQ ID NO: 20109 - RNA, 20 nt, synthetic construct
  source 1..20: mol_type = other RNA
agggaaccgtaacttctttt

SEQ ID NO: 20110 - RNA, 20 nt, synthetic construct
  source 1..20: mol_type = other RNA
agggaagagctaagatgcta

SEQ ID NO: 20111 - RNA, 20 nt, synthetic construct
  source 1..20: mol_type = other RNA
agggaagaggccacaaagtc

SEQ ID NO: 20112 - RNA, 20 nt, synthetic construct
  source 1..20: mol_type = other RNA
agggaagatagtactgacca

SEQ ID NO: 20113 - RNA, 20 nt, synthetic construct
  source 1..20: mol_type = other RNA
agggaagcagttgatgcaat

SEQ ID NO: 20114 - RNA, 20 nt, synthetic construct
  source 1..20: mol_type = other RNA
agggaaggctgcaagcactg

SEQ ID NO: 20115 - RNA, 20 nt, synthetic construct
  source 1..20: mol_type = other RNA
agggaaggtgcccgcgaagg

SEQ ID NO: 20116 - RNA, 20 nt, synthetic construct
  source 1..20: mol_type = other RNA
agggaagtaaagatcaagct

SEQ ID NO: 20117 - RNA, 20 nt, synthetic construct
  source 1..20: mol_type = other RNA
agggaagtactgagtcaaaa

SEQ ID NO: 20118 - RNA, 20 nt, synthetic construct
  source 1..20: mol_type = other RNA
agggaagttttttcaaaata

SEQ ID NO: 20119 - RNA, 20 nt, synthetic construct
  source 1..20: mol_type = other RNA
agggaatagacaaagacaag

SEQ ID NO: 20120 - RNA, 20 nt, synthetic construct
  source 1..20: mol_type = other RNA
agggaatctaggaaacactg

SEQ ID NO: 20121 - RNA, 20 nt, synthetic construct
  source 1..20: mol_type = other RNA
agggaatgcccctgtagcag

SEQ ID NO: 20122 - RNA, 20 nt, synthetic construct
  source 1..20: mol_type = other RNA
agggaatggggagctagagg

SEQ ID NO: 20123 - RNA, 20 nt, synthetic construct
  source 1..20: mol_type = other RNA
agggaatttgttttaccatc

SEQ ID NO: 20124 - RNA, 20 nt, synthetic construct
  source 1..20: mol_type = other RNA
agggaattttactgatcttt

SEQ ID NO: 20125 - RNA, 20 nt, synthetic construct
  source 1..20: mol_type = other RNA
agggaatttttcttacctaa

SEQ ID NO: 20126 - RNA, 20 nt, synthetic construct
  source 1..20: mol_type = other RNA
agggaccacaggcatgcgcc

SEQ ID NO: 20127 - RNA, 20 nt, synthetic construct
  source 1..20: mol_type = other RNA
agggacgaatgcatgggagg

SEQ ID NO: 20128 - RNA, 20 nt, synthetic construct
  source 1..20: mol_type = other RNA
agggacggggttttgccatg

SEQ ID NO: 20129 - RNA, 20 nt, synthetic construct
  source 1..20: mol_type = other RNA
agggactacagtcacacacc

SEQ ID NO: 20130 - RNA, 20 nt, synthetic construct
  source 1..20: mol_type = other RNA
agggactcccatatctacat

SEQ ID NO: 20131 - RNA, 20 nt, synthetic construct
  source 1..20: mol_type = other RNA
agggactgaaaccagtgggt

SEQ ID NO: 20132 - RNA, 20 nt, synthetic construct
  source 1..20: mol_type = other RNA
agggactgagcagtgaaagt

SEQ ID NO: 20133 - RNA, 20 nt, synthetic construct
  source 1..20: mol_type = other RNA
agggactgatgaagaacctg

SEQ ID NO: 20134 - RNA, 20 nt, synthetic construct
  source 1..20: mol_type = other RNA
agggactggcctcggccaac

SEQ ID NO: 20135 - RNA, 20 nt, synthetic construct
  source 1..20: mol_type = other RNA
agggactgtcgaagcttaat

SEQ ID NO: 20136 - RNA, 20 nt, synthetic construct
  source 1..20: mol_type = other RNA
agggacttatggagataaat

SEQ ID NO: 20137 - RNA, 20 nt, synthetic construct
  source 1..20: mol_type = other RNA
agggagaacccaggaacaga

SEQ ID NO: 20138 - RNA, 20 nt, synthetic construct
  source 1..20: mol_type = other RNA
agggagaagaaataaacgac

SEQ ID NO: 20139 - RNA, 20 nt, synthetic construct
  source 1..20: mol_type = other RNA
agggagaattggtagtcaat

SEQ ID NO: 20140 - RNA, 20 nt, synthetic construct
  source 1..20: mol_type = other RNA
agggagaccgtggggggagg

SEQ ID NO: 20141 - RNA, 20 nt, synthetic construct
  source 1..20: mol_type = other RNA
agggagacggcgagcttgat

SEQ ID NO: 20142 - RNA, 20 nt, synthetic construct
  source 1..20: mol_type = other RNA
agggagactttcactgctca

SEQ ID NO: 20143 - RNA, 20 nt, synthetic construct
  source 1..20: mol_type = other RNA
agggagagagaaactttaca

SEQ ID NO: 20144 - RNA, 20 nt, synthetic construct
  source 1..20: mol_type = other RNA
agggagagatgcctatgaaa

SEQ ID NO: 20145 - RNA, 20 nt, synthetic construct
  source 1..20: mol_type = other RNA
agggagagggagctctgtct

SEQ ID NO: 20146 - RNA, 20 nt, synthetic construct
  source 1..20: mol_type = other RNA
agggagatacttgattacaa

SEQ ID NO: 20147 - RNA, 20 nt, synthetic construct
  source 1..20: mol_type = other RNA
agggagatatttcgcctaga

SEQ ID NO: 20148 - RNA, 20 nt, synthetic construct
  source 1..20: mol_type = other RNA
agggagcagcgggcggcctg

SEQ ID NO: 20149 - RNA, 20 nt, synthetic construct
  source 1..20: mol_type = other RNA
agggagcatatatactctga

SEQ ID NO: 20150 - RNA, 20 nt, synthetic construct
  source 1..20: mol_type = other RNA
agggagcatcttcccatgaa

SEQ ID NO: 20151 - RNA, 20 nt, synthetic construct
  source 1..20: mol_type = other RNA
agggagcccaagcacacttt

SEQ ID NO: 20152 - RNA, 20 nt, synthetic construct
  source 1..20: mol_type = other RNA
agggagcgccacgtgaagat

SEQ ID NO: 20153 - RNA, 20 nt, synthetic construct
  source 1..20: mol_type = other RNA
agggagcgtacggggtccgc

SEQ ID NO: 20154 - RNA, 20 nt, synthetic construct
  source 1..20: mol_type = other RNA
agggagctctgtcttgatga

SEQ ID NO: 20155 - RNA, 20 nt, synthetic construct
  source 1..20: mol_type = other RNA
agggaggaaaaaacagttgc

SEQ ID NO: 20156 - RNA, 20 nt, synthetic construct
  source 1..20: mol_type = other RNA
agggaggaatccttcagtca

SEQ ID NO: 20157 - RNA, 20 nt, synthetic construct
  source 1..20: mol_type = other RNA
agggaggattgtttgaggct

SEQ ID NO: 20158 - RNA, 20 nt, synthetic construct
  source 1..20: mol_type = other RNA
agggaggccatcttcatttc

SEQ ID NO: 20159 - RNA, 20 nt, synthetic construct
  source 1..20: mol_type = other RNA
agggaggcggaggttgcggt

SEQ ID NO: 20160 - RNA, 20 nt, synthetic construct
  source 1..20: mol_type = other RNA
agggagggggctgaggattg

SEQ ID NO: 20161 - RNA, 20 nt, synthetic construct
  source 1..20: mol_type = other RNA
agggaggggtattcaggggg

SEQ ID NO: 20162 - RNA, 20 nt, synthetic construct
  source 1..20: mol_type = other RNA
agggaggggtccccagcatc

SEQ ID NO: 20163 - RNA, 20 nt, synthetic construct
  source 1..20: mol_type = other RNA
agggaggtaggcttagatga

SEQ ID NO: 20164 - RNA, 20 nt, synthetic construct
  source 1..20: mol_type = other RNA
agggagtcagtagaggccga

SEQ ID NO: 20165 - RNA, 20 nt, synthetic construct
  source 1..20: mol_type = other RNA
agggataaatcccacttgat

SEQ ID NO: 20166 - RNA, 20 nt, synthetic construct
  source 1..20: mol_type = other RNA
agggataagaataccaaatt

SEQ ID NO: 20167 - RNA, 20 nt, synthetic construct
  source 1..20: mol_type = other RNA
agggataatgctatccagaa

SEQ ID NO: 20168 - RNA, 20 nt, synthetic construct
  source 1..20: mol_type = other RNA
agggatattggcttatagtg

SEQ ID NO: 20169 - RNA, 20 nt, synthetic construct
  source 1..20: mol_type = other RNA
agggatattttcgtgtactg

SEQ ID NO: 20170 - RNA, 20 nt, synthetic construct
  source 1..20: mol_type = other RNA
agggatcacagatacaactc

SEQ ID NO: 20171 - RNA, 20 nt, synthetic construct
  source 1..20: mol_type = other RNA
agggatgaatgttgtacatt

SEQ ID NO: 20172 - RNA, 20 nt, synthetic construct
  source 1..20: mol_type = other RNA
agggatgaggaagaggaagg

SEQ ID NO: 20173 - RNA, 20 nt, synthetic construct
  source 1..20: mol_type = other RNA
agggatgcattctagaaagg

SEQ ID NO: 20174 - RNA, 20 nt, synthetic construct
  source 1..20: mol_type = other RNA
agggatgctgcgagccccgg

SEQ ID NO: 20175 - RNA, 20 nt, synthetic construct
  source 1..20: mol_type = other RNA
agggatgctggagtgtggca

SEQ ID NO: 20176 - RNA, 20 nt, synthetic construct
  source 1..20: mol_type = other RNA
agggatgttgcctactagcc

SEQ ID NO: 20177 - RNA, 20 nt, synthetic construct
  source 1..20: mol_type = other RNA
agggattctggccaaatccc

SEQ ID NO: 20178 - RNA, 20 nt, synthetic construct
  source 1..20: mol_type = other RNA
agggatttggccagaatccc

SEQ ID NO: 20179 - RNA, 20 nt, synthetic construct
  source 1..20: mol_type = other RNA
agggcaccgtgacagaacaa

SEQ ID NO: 20180 - RNA, 20 nt, synthetic construct
  source 1..20: mol_type = other RNA
agggcagagataactgggtg

SEQ ID NO: 20181 - RNA, 20 nt, synthetic construct
  source 1..20: mol_type = other RNA
agggcagggagagagaaact

SEQ ID NO: 20182 - RNA, 20 nt, synthetic construct
  source 1..20: mol_type = other RNA
agggcattttcaaggtagaa

SEQ ID NO: 20183 - RNA, 20 nt, synthetic construct
  source 1..20: mol_type = other RNA
agggccactgagagctcagg

SEQ ID NO: 20184 - RNA, 20 nt, synthetic construct
  source 1..20: mol_type = other RNA
agggccagaggagggatgca

SEQ ID NO: 20185 - RNA, 20 nt, synthetic construct
  source 1..20: mol_type = other RNA
agggccattctgctatgaaa

SEQ ID NO: 20186 - RNA, 20 nt, synthetic construct
  source 1..20: mol_type = other RNA
agggccatttcatttctgtt

SEQ ID NO: 20187 - RNA, 20 nt, synthetic construct
  source 1..20: mol_type = other RNA
agggcccagcctcaacagca

SEQ ID NO: 20188 - RNA, 20 nt, synthetic construct
  source 1..20: mol_type = other RNA
agggccgggggttggggagg

SEQ ID NO: 20189 - RNA, 20 nt, synthetic construct
  source 1..20: mol_type = other RNA
agggcctaaataaaacacat

SEQ ID NO: 20190 - RNA, 20 nt, synthetic construct
  source 1..20: mol_type = other RNA
agggcctagaaatcatacac

SEQ ID NO: 20191 - RNA, 20 nt, synthetic construct
  source 1..20: mol_type = other RNA
agggcctcaaatttcattta

SEQ ID NO: 20192 - RNA, 20 nt, synthetic construct
  source 1..20: mol_type = other RNA
agggcctctgaagacatgct

SEQ ID NO: 20193 - RNA, 20 nt, synthetic construct
  source 1..20: mol_type = other RNA
agggcctgcttttggaagca

SEQ ID NO: 20194 - RNA, 20 nt, synthetic construct
  source 1..20: mol_type = other RNA
agggcctgttccaggcctcg

SEQ ID NO: 20195 - RNA, 20 nt, synthetic construct
  source 1..20: mol_type = other RNA
agggccttcccaaagacatc

SEQ ID NO: 20196 - RNA, 20 nt, synthetic construct
  source 1..20: mol_type = other RNA
agggccttctactttaataa

SEQ ID NO: 20197 - RNA, 20 nt, synthetic construct
  source 1..20: mol_type = other RNA
agggcctttaatcacctcaa

SEQ ID NO: 20198 - RNA, 20 nt, synthetic construct
  source 1..20: mol_type = other RNA
agggcgctcctctcccgccg

SEQ ID NO: 20199 - RNA, 20 nt, synthetic construct
  source 1..20: mol_type = other RNA
agggctcccagtgcccacct

SEQ ID NO: 20200 - RNA, 20 nt, synthetic construct
  source 1..20: mol_type = other RNA
agggctcctccaaggctgcc

SEQ ID NO: 20201 - RNA, 20 nt, synthetic construct
  source 1..20: mol_type = other RNA
agggctgaaaaacacctcag

SEQ ID NO: 20202 - RNA, 20 nt, synthetic construct
  source 1..20: mol_type = other RNA
agggcttcatgctgggagac

SEQ ID NO: 20203 - RNA, 20 nt, synthetic construct
  source 1..20: mol_type = other RNA
agggcttctgaaggtgcctg

SEQ ID NO: 20204 - RNA, 20 nt, synthetic construct
  source 1..20: mol_type = other RNA
agggcttgatctagtaaata

SEQ ID NO: 20205 - RNA, 20 nt, synthetic construct
  source 1..20: mol_type = other RNA
agggcttggtggcccacacc

SEQ ID NO: 20206 - RNA, 20 nt, synthetic construct
  source 1..20: mol_type = other RNA
agggctttcaatagtgggta

SEQ ID NO: 20207 - RNA, 20 nt, synthetic construct
  source 1..20: mol_type = other RNA
agggctttgtgaagggaggt

SEQ ID NO: 20208 - RNA, 20 nt, synthetic construct
  source 1..20: mol_type = other RNA
aggggaactcttgtagtatt

SEQ ID NO: 20209 - RNA, 20 nt, synthetic construct
  source 1..20: mol_type = other RNA
aggggaaggaattttcagga

SEQ ID NO: 20210 - RNA, 20 nt, synthetic construct
  source 1..20: mol_type = other RNA
aggggaaggagtctgcccat

SEQ ID NO: 20211 - RNA, 20 nt, synthetic construct
  source 1..20: mol_type = other RNA
aggggaaggcttcgagttct

SEQ ID NO: 20212 - RNA, 20 nt, synthetic construct
  source 1..20: mol_type = other RNA
aggggaatagaaagttagtg

SEQ ID NO: 20213 - RNA, 20 nt, synthetic construct
  source 1..20: mol_type = other RNA
aggggaatcatgcagtactt

SEQ ID NO: 20214 - RNA, 20 nt, synthetic construct
  source 1..20: mol_type = other RNA
aggggaatggtactgcctcc

SEQ ID NO: 20215 - RNA, 20 nt, synthetic construct
  source 1..20: mol_type = other RNA
aggggacatagatgaaacta

SEQ ID NO: 20216 - RNA, 20 nt, synthetic construct
  source 1..20: mol_type = other RNA
aggggacatgaaggaaggat

SEQ ID NO: 20217 - RNA, 20 nt, synthetic construct
  source 1..20: mol_type = other RNA
aggggacatgctctgatagg

SEQ ID NO: 20218 - RNA, 20 nt, synthetic construct
  source 1..20: mol_type = other RNA
aggggactaacagggtctac

SEQ ID NO: 20219 - RNA, 20 nt, synthetic construct
  source 1..20: mol_type = other RNA
aggggactttgatgttttac

SEQ ID NO: 20220 - RNA, 20 nt, synthetic construct
  source 1..20: mol_type = other RNA
aggggagaggcctcatgtat

SEQ ID NO: 20221 - RNA, 20 nt, synthetic construct
  source 1..20: mol_type = other RNA
aggggatgggggacgacgta

SEQ ID NO: 20222 - RNA, 20 nt, synthetic construct
  source 1..20: mol_type = other RNA
aggggatttcatgaacaatt

SEQ ID NO: 20223 - RNA, 20 nt, synthetic construct
  source 1..20: mol_type = other RNA
aggggcaggaaaggtgggga

SEQ ID NO: 20224 - RNA, 20 nt, synthetic construct
  source 1..20: mol_type = other RNA
aggggcagggtggagtccaa

SEQ ID NO: 20225 - RNA, 20 nt, synthetic construct
  source 1..20: mol_type = other RNA
aggggcattccctgtctggg

SEQ ID NO: 20226 - RNA, 20 nt, synthetic construct
  source 1..20: mol_type = other RNA
aggggcattccgtggaaggc

SEQ ID NO: 20227 - RNA, 20 nt, synthetic construct
  source 1..20: mol_type = other RNA
aggggccaggtgtggaggct

SEQ ID NO: 20228 - RNA, 20 nt, synthetic construct
  source 1..20: mol_type = other RNA
aggggccagttgagagagaa

SEQ ID NO: 20229 - RNA, 20 nt, synthetic construct
  source 1..20: mol_type = other RNA
aggggccttttgtcaagcta

SEQ ID NO: 20230 - RNA, 20 nt, synthetic construct
  source 1..20: mol_type = other RNA
aggggctaagtagtggcagc

SEQ ID NO: 20231 - RNA, 20 nt, synthetic construct
  source 1..20: mol_type = other RNA
aggggctatctttactttca

SEQ ID NO: 20232 - RNA, 20 nt, synthetic construct
  source 1..20: mol_type = other RNA
aggggctgagccttcagaac

SEQ ID NO: 20233 - RNA, 20 nt, synthetic construct
  source 1..20: mol_type = other RNA
aggggctgcatcatggtggg

SEQ ID NO: 20234 - RNA, 20 nt, synthetic construct
  source 1..20: mol_type = other RNA
aggggctgggggatccaggg

SEQ ID NO: 20235 - RNA, 20 nt, synthetic construct
  source 1..20: mol_type = other RNA
aggggctgttcccagataac

SEQ ID NO: 20236 - RNA, 20 nt, synthetic construct
  source 1..20: mol_type = other RNA
agggggaaaactccaagtgt

SEQ ID NO: 20237 - RNA, 20 nt, synthetic construct
  source 1..20: mol_type = other RNA
agggggaatctactcttttg

SEQ ID NO: 20238 - RNA, 20 nt, synthetic construct
  source 1..20: mol_type = other RNA
agggggagggagagggagct

SEQ ID NO: 20239 - RNA, 20 nt, synthetic construct
  source 1..20: mol_type = other RNA
agggggcataacatctatga

SEQ ID NO: 20240 - RNA, 20 nt, synthetic construct
  source 1..20: mol_type = other RNA
agggggctaaatgctcacat

SEQ ID NO: 20241 - RNA, 20 nt, synthetic construct
  source 1..20: mol_type = other RNA
agggggctgaggattggaga

SEQ ID NO: 20242 - RNA, 20 nt, synthetic construct
  source 1..20: mol_type = other RNA
agggggctgagtatgggtct

SEQ ID NO: 20243 - RNA, 20 nt, synthetic construct
  source 1..20: mol_type = other RNA
aggggggaaaaaaccataaa

SEQ ID NO: 20244 - RNA, 20 nt, synthetic construct
  source 1..20: mol_type = other RNA
aggggggaaaacacccttga

SEQ ID NO: 20245 - RNA, 20 nt, synthetic construct
  source 1..20: mol_type = other RNA
aggggggaagcttttcatat

SEQ ID NO: 20246 - RNA, 20 nt, synthetic construct
  source 1..20: mol_type = other RNA
aggggggccactggaaacct

SEQ ID NO: 20247 - RNA, 20 nt, synthetic construct
  source 1..20: mol_type = other RNA
agggggtatggagacactag

SEQ ID NO: 20248 - RNA, 20 nt, synthetic construct
  source 1..20: mol_type = other RNA
agggggtcgagactgtaatg

SEQ ID NO: 20249 - RNA, 20 nt, synthetic construct
  source 1..20: mol_type = other RNA
aggggtaaaggggatggggg

SEQ ID NO: 20250 - RNA, 20 nt, synthetic construct
  source 1..20: mol_type = other RNA
aggggtaaatctttgtacag

SEQ ID NO: 20251 - RNA, 20 nt, synthetic construct
  source 1..20: mol_type = other RNA
aggggtaaatggtttctcct

SEQ ID NO: 20252 - RNA, 20 nt, synthetic construct
  source 1..20: mol_type = other RNA
aggggtattcagggggctaa

SEQ ID NO: 20253 - RNA, 20 nt, synthetic construct
  source 1..20: mol_type = other RNA
aggggtccccagcatccact

SEQ ID NO: 20254 - RNA, 20 nt, synthetic construct
  source 1..20: mol_type = other RNA
aggggtcttatgctggtggg

SEQ ID NO: 20255 - RNA, 20 nt, synthetic construct
  source 1..20: mol_type = other RNA
aggggtggggggatgtagaa

SEQ ID NO: 20256 - RNA, 20 nt, synthetic construct
  source 1..20: mol_type = other RNA
agggtaaaatagtcaagtaa

SEQ ID NO: 20257 - RNA, 20 nt, synthetic construct
  source 1..20: mol_type = other RNA
agggtaaacagaattaaaca

SEQ ID NO: 20258 - RNA, 20 nt, synthetic construct
  source 1..20: mol_type = other RNA
agggtaaagtcaattctagt

SEQ ID NO: 20259 - RNA, 20 nt, synthetic construct
  source 1..20: mol_type = other RNA
agggtaacgtgagctggaag

SEQ ID NO: 20260 - RNA, 20 nt, synthetic construct
  source 1..20: mol_type = other RNA
agggtaagaaaattgtacaa

SEQ ID NO: 20261 - RNA, 20 nt, synthetic construct
  source 1..20: mol_type = other RNA
agggtaagaaaggagttcag

SEQ ID NO: 20262 - RNA, 20 nt, synthetic construct
  source 1..20: mol_type = other RNA
agggtaagaccaaaatggag

SEQ ID NO: 20263 - RNA, 20 nt, synthetic construct
  source 1..20: mol_type = other RNA
agggtaagattccgtctcaa

SEQ ID NO: 20264 - RNA, 20 nt, synthetic construct
  source 1..20: mol_type = other RNA
agggtaatgctggcttcatg

SEQ ID NO: 20265 - RNA, 20 nt, synthetic construct
  source 1..20: mol_type = other RNA
agggtacagaactgctaatg

SEQ ID NO: 20266 - RNA, 20 nt, synthetic construct
  source 1..20: mol_type = other RNA
agggtagagcactttcgtat

SEQ ID NO: 20267 - RNA, 20 nt, synthetic construct
  source 1..20: mol_type = other RNA
agggtagctttgatgccccc

SEQ ID NO: 20268 - RNA, 20 nt, synthetic construct
  source 1..20: mol_type = other RNA
agggtagcttttcctgctgt

SEQ ID NO: 20269 - RNA, 20 nt, synthetic construct
  source 1..20: mol_type = other RNA
agggtaggaaaagacttctc

SEQ ID NO: 20270 - RNA, 20 nt, synthetic construct
  source 1..20: mol_type = other RNA
agggtaggaaggcggtgggg

SEQ ID NO: 20271 - RNA, 20 nt, synthetic construct
  source 1..20: mol_type = other RNA
agggtatatacaatattaca

SEQ ID NO: 20272 - RNA, 20 nt, synthetic construct
  source 1..20: mol_type = other RNA
agggtatcatattatttttg

SEQ ID NO: 20273 - RNA, 20 nt, synthetic construct
  source 1..20: mol_type = other RNA
agggtcactattaaccatat

SEQ ID NO: 20274 - RNA, 20 nt, synthetic construct
  source 1..20: mol_type = other RNA
agggtcacttcctctcttaa

SEQ ID NO: 20275 - RNA, 20 nt, synthetic construct
  source 1..20: mol_type = other RNA
agggtcagaattttattttc

SEQ ID NO: 20276 - RNA, 20 nt, synthetic construct
  source 1..20: mol_type = other RNA
agggtcatgcacacgctgga

SEQ ID NO: 20277 - RNA, 20 nt, synthetic construct
  source 1..20: mol_type = other RNA
agggtccagcttcactcttc

SEQ ID NO: 20278 - RNA, 20 nt, synthetic construct
  source 1..20: mol_type = other RNA
agggtctacaaaaggtttcc

SEQ ID NO: 20279 - RNA, 20 nt, synthetic construct
  source 1..20: mol_type = other RNA
agggtctcactcttaccaag

SEQ ID NO: 20280 - RNA, 20 nt, synthetic construct
  source 1..20: mol_type = other RNA
agggtctggtatctaccaaa

SEQ ID NO: 20281 - RNA, 20 nt, synthetic construct
  source 1..20: mol_type = other RNA
agggtctgtctcacctcaag

SEQ ID NO: 20282 - RNA, 20 nt, synthetic construct
  source 1..20: mol_type = other RNA
agggtctgttttacatgttt

SEQ ID NO: 20283 - RNA, 20 nt, synthetic construct
  source 1..20: mol_type = other RNA
agggtcttgctctgtcaccc

SEQ ID NO: 20284 - RNA, 20 nt, synthetic construct
  source 1..20: mol_type = other RNA
agggtgaaacttgaatactc

SEQ ID NO: 20285 - RNA, 20 nt, synthetic construct
  source 1..20: mol_type = other RNA
agggtgacagagccgagcag

SEQ ID NO: 20286 - RNA, 20 nt, synthetic construct
  source 1..20: mol_type = other RNA
agggtgactagtgtgaatga

SEQ ID NO: 20287 - RNA, 20 nt, synthetic construct
  source 1..20: mol_type = other RNA
agggtgagaccaccacactt

SEQ ID NO: 20288 - RNA, 20 nt, synthetic construct
  source 1..20: mol_type = other RNA
agggtgataaaaaggaggga

SEQ ID NO: 20289 - RNA, 20 nt, synthetic construct
  source 1..20: mol_type = other RNA
agggtgcagcctctaatcag

SEQ ID NO: 20290 - RNA, 20 nt, synthetic construct
  source 1..20: mol_type = other RNA
agggtgcgacctcgaagcac

SEQ ID NO: 20291 - RNA, 20 nt, synthetic construct
  source 1..20: mol_type = other RNA
agggtgctactcaaagttta

SEQ ID NO: 20292 - RNA, 20 nt, synthetic construct
  source 1..20: mol_type = other RNA
agggtgctgatcaggaaaga

SEQ ID NO: 20293 - RNA, 20 nt, synthetic construct
  source 1..20: mol_type = other RNA
agggtggagtccaaccaatc

SEQ ID NO: 20294 - RNA, 20 nt, synthetic construct
  source 1..20: mol_type = other RNA
agggtggctggcactttcct

SEQ ID NO: 20295 - RNA, 20 nt, synthetic construct
  source 1..20: mol_type = other RNA
agggtgggggcatcaaagct

SEQ ID NO: 20296 - RNA, 20 nt, synthetic construct
  source 1..20: mol_type = other RNA
agggtggtgctggactggag

SEQ ID NO: 20297 - RNA, 20 nt, synthetic construct
  source 1..20: mol_type = other RNA
agggtgtaaaaggctaattt

SEQ ID NO: 20298 - RNA, 20 nt, synthetic construct
  source 1..20: mol_type = other RNA
agggtgtagccacaagccac

SEQ ID NO: 20299 - RNA, 20 nt, synthetic construct
  source 1..20: mol_type = other RNA
agggtgtgatcaggaaagat

SEQ ID NO: 20300 - RNA, 20 nt, synthetic construct
  source 1..20: mol_type = other RNA
agggtgtgtgaatggaaaat

SEQ ID NO: 20301 - RNA, 20 nt, synthetic construct
  source 1..20: mol_type = other RNA
agggtgtgtttaatttccac

SEQ ID NO: 20302 - RNA, 20 nt, synthetic construct
  source 1..20: mol_type = other RNA
agggtgttttcccccctaaa

SEQ ID NO: 20303 - RNA, 20 nt, synthetic construct
  source 1..20: mol_type = other RNA
agggttacagtataggggaa

SEQ ID NO: 20304 - RNA, 20 nt, synthetic construct
  source 1..20: mol_type = other RNA
agggttagaagacaatactg

SEQ ID NO: 20305 - RNA, 20 nt, synthetic construct
  source 1..20: mol_type = other RNA
agggttagattatatggtct

SEQ ID NO: 20306 - RNA, 20 nt, synthetic construct
  source 1..20: mol_type = other RNA
agggttagatttttcctttg

SEQ ID NO: 20307 - RNA, 20 nt, synthetic construct
  source 1..20: mol_type = other RNA
agggttattaacataccgac

SEQ ID NO: 20308 - RNA, 20 nt, synthetic construct
  source 1..20: mol_type = other RNA
agggttcttggaaattagaa

SEQ ID NO: 20309 - RNA, 20 nt, synthetic construct
  source 1..20: mol_type = other RNA
agggttgaacatcacccagc

SEQ ID NO: 20310 - RNA, 20 nt, synthetic construct
  source 1..20: mol_type = other RNA
agggttggggtatgtttgat

SEQ ID NO: 20311 - RNA, 20 nt, synthetic construct
  source 1..20: mol_type = other RNA
agggttggtgcttccttctc

SEQ ID NO: 20312 - RNA, 20 nt, synthetic construct
  source 1..20: mol_type = other RNA
agggtttcagtgagtaggga

SEQ ID NO: 20313 - RNA, 20 nt, synthetic construct
  source 1..20: mol_type = other RNA
agggtttctgtttggatgaa

SEQ ID NO: 20314 - RNA, 20 nt, synthetic construct
  source 1..20: mol_type = other RNA
agggtttggcagtttaagaa

SEQ ID NO: 20315 - RNA, 20 nt, synthetic construct
  source 1..20: mol_type = other RNA
agggttttctgtagaatatc

SEQ ID NO: 20316 - RNA, 20 nt, synthetic construct
  source 1..20: mol_type = other RNA
agggttttggtatgttgtgt

SEQ ID NO: 20317 - RNA, 20 nt, synthetic construct
  source 1..20: mol_type = other RNA
agggttttgttttgtttttt

SEQ ID NO: 20318 - RNA, 20 nt, synthetic construct
  source 1..20: mol_type = other RNA
aggtaagaaaaattccctca

SEQ ID NO: 20319 - RNA, 20 nt, synthetic construct
  source 1..20: mol_type = other RNA
aggtaagaacttgtctttgt

SEQ ID NO: 20320 - RNA, 20 nt, synthetic construct
  source 1..20: mol_type = other RNA
aggtaagaatgtcaagctgt

SEQ ID NO: 20321 - RNA, 20 nt, synthetic construct
  source 1..20: mol_type = other RNA
aggtaaggaaaccccaggga

SEQ ID NO: 20322 - RNA, 20 nt, synthetic construct
  source 1..20: mol_type = other RNA
aggtaagggtccagcttcac

SEQ ID NO: 20323 - RNA, 20 nt, synthetic construct
  source 1..20: mol_type = other RNA
aggtaatactataaggaaat

SEQ ID NO: 20324 - RNA, 20 nt, synthetic construct
  source 1..20: mol_type = other RNA
aggtaatactctagtggtgc

SEQ ID NO: 20325 - RNA, 20 nt, synthetic construct
  source 1..20: mol_type = other RNA
aggtaatctagtttatctca

SEQ ID NO: 20326 - RNA, 20 nt, synthetic construct
  source 1..20: mol_type = other RNA
aggtaatgacaataataact

SEQ ID NO: 20327 - RNA, 20 nt, synthetic construct
  source 1..20: mol_type = other RNA
aggtacaatacactaaattt

SEQ ID NO: 20328 - RNA, 20 nt, synthetic construct
  source 1..20: mol_type = other RNA
aggtacaattacacatctcc

SEQ ID NO: 20329 - RNA, 20 nt, synthetic construct
  source 1..20: mol_type = other RNA
aggtacgacgctcttgttca

SEQ ID NO: 20330 - RNA, 20 nt, synthetic construct
  source 1..20: mol_type = other RNA
aggtactcaacgacaatctc

SEQ ID NO: 20331 - RNA, 20 nt, synthetic construct
  source 1..20: mol_type = other RNA
aggtagaaacatcccaagtg

SEQ ID NO: 20332 - RNA, 20 nt, synthetic construct
  source 1..20: mol_type = other RNA
aggtagaagataatgttaga

SEQ ID NO: 20333 - RNA, 20 nt, synthetic construct
  source 1..20: mol_type = other RNA
aggtagaagtacaaacatta

SEQ ID NO: 20334 - RNA, 20 nt, synthetic construct
  source 1..20: mol_type = other RNA
aggtagaatgaaaatttttg

SEQ ID NO: 20335 - RNA, 20 nt, synthetic construct
  source 1..20: mol_type = other RNA
aggtagacatgagtaaaaag

SEQ ID NO: 20336 - RNA, 20 nt, synthetic construct
  source 1..20: mol_type = other RNA
aggtagacatgtgccatgtt

SEQ ID NO: 20337 - RNA, 20 nt, synthetic construct
  source 1..20: mol_type = other RNA
aggtagcacaactagtaagt

SEQ ID NO: 20338 - RNA, 20 nt, synthetic construct
  source 1..20: mol_type = other RNA
aggtagctgctttttaaaaa

SEQ ID NO: 20339 - RNA, 20 nt, synthetic construct
  source 1..20: mol_type = other RNA
aggtaggagggtgtgatcag

SEQ ID NO: 20340 - RNA, 20 nt, synthetic construct
  source 1..20: mol_type = other RNA
aggtaggcttagatgagccc

SEQ ID NO: 20341 - RNA, 20 nt, synthetic construct
  source 1..20: mol_type = other RNA
aggtagggaggggtattcag

SEQ ID NO: 20342 - RNA, 20 nt, synthetic construct
  source 1..20: mol_type = other RNA
aggtagggataagaatacca

SEQ ID NO: 20343 - RNA, 20 nt, synthetic construct
  source 1..20: mol_type = other RNA
aggtagggttggggtatgtt

SEQ ID NO: 20344 - RNA, 20 nt, synthetic construct
  source 1..20: mol_type = other RNA
aggtagtacatattcattgt

SEQ ID NO: 20345 - RNA, 20 nt, synthetic construct
  source 1..20: mol_type = other RNA
aggtagtcttgtcataacag

SEQ ID NO: 20346 - RNA, 20 nt, synthetic construct
  source 1..20: mol_type = other RNA
aggtagtttctttgaactta

SEQ ID NO: 20347 - RNA, 20 nt, synthetic construct
  source 1..20: mol_type = other RNA
aggtataaaggatgcacaag

SEQ ID NO: 20348 - RNA, 20 nt, synthetic construct
  source 1..20: mol_type = other RNA
aggtataaagtttccgtttt

SEQ ID NO: 20349 - RNA, 20 nt, synthetic construct
  source 1..20: mol_type = other RNA
aggtatatttctgtaaacat

SEQ ID NO: 20350 - RNA, 20 nt, synthetic construct
  source 1..20: mol_type = other RNA
aggtatcacagtgaggacgc

SEQ ID NO: 20351 - RNA, 20 nt, synthetic construct
  source 1..20: mol_type = other RNA
aggtatcaccatctgataag

SEQ ID NO: 20352 - RNA, 20 nt, synthetic construct
  source 1..20: mol_type = other RNA
aggtatcatcggaaatataa

SEQ ID NO: 20353 - RNA, 20 nt, synthetic construct
  source 1..20: mol_type = other RNA
aggtatcatttccaagattg

SEQ ID NO: 20354 - RNA, 20 nt, synthetic construct
  source 1..20: mol_type = other RNA
aggtatctccccaaagatat

SEQ ID NO: 20355 - RNA, 20 nt, synthetic construct
  source 1..20: mol_type = other RNA
aggtatggcgactcatgcct

SEQ ID NO: 20356 - RNA, 20 nt, synthetic construct
  source 1..20: mol_type = other RNA
aggtattattttcacagaca

SEQ ID NO: 20357 - RNA, 20 nt, synthetic construct
  source 1..20: mol_type = other RNA
aggtattcatgctgtgaatt

SEQ ID NO: 20358 - RNA, 20 nt, synthetic construct
  source 1..20: mol_type = other RNA
aggtattgagcctgttccga

SEQ ID NO: 20359 - RNA, 20 nt, synthetic construct
  source 1..20: mol_type = other RNA
aggtatttctaaatcaacag

SEQ ID NO: 20360 - RNA, 20 nt, synthetic construct
  source 1..20: mol_type = other RNA
aggtatttgaaaaatgtcaa

SEQ ID NO: 20361 - RNA, 20 nt, synthetic construct
  source 1..20: mol_type = other RNA
aggtatttggggctaggatt

SEQ ID NO: 20362 - RNA, 20 nt, synthetic construct
  source 1..20: mol_type = other RNA
aggtcaaactcacttattag

SEQ ID NO: 20363 - RNA, 20 nt, synthetic construct
  source 1..20: mol_type = other RNA
aggtcaaatggtaacagcca

SEQ ID NO: 20364 - RNA, 20 nt, synthetic construct
  source 1..20: mol_type = other RNA
aggtcaacacatcagcgcta

SEQ ID NO: 20365 - RNA, 20 nt, synthetic construct
  source 1..20: mol_type = other RNA
aggtcaagaaataaaacatg

SEQ ID NO: 20366 - RNA, 20 nt, synthetic construct
  source 1..20: mol_type = other RNA
aggtcaagagagattaaata

SEQ ID NO: 20367 - RNA, 20 nt, synthetic construct
  source 1..20: mol_type = other RNA
aggtcaagagcggcctttgc

SEQ ID NO: 20368 - RNA, 20 nt, synthetic construct
  source 1..20: mol_type = other RNA
aggtcaatctaggaggtcta

SEQ ID NO: 20369 - RNA, 20 nt, synthetic construct
  source 1..20: mol_type = other RNA
aggtcaatctgaaaaatatc

SEQ ID NO: 20370 - RNA, 20 nt, synthetic construct
  source 1..20: mol_type = other RNA
aggtcacattcagaggtatt

SEQ ID NO: 20371 - RNA, 20 nt, synthetic construct
  source 1..20: mol_type = other RNA
aggtcacattctgcctgcag

SEQ ID NO: 20372 - RNA, 20 nt, synthetic construct
  source 1..20: mol_type = other RNA
aggtcacccaagccacagcg

SEQ ID NO: 20373 - RNA, 20 nt, synthetic construct
  source 1..20: mol_type = other RNA
aggtcacctagcctctctgg

SEQ ID NO: 20374 - RNA, 20 nt, synthetic construct
  source 1..20: mol_type = other RNA
aggtcactgcagtctcaaac

SEQ ID NO: 20375 - RNA, 20 nt, synthetic construct
  source 1..20: mol_type = other RNA
aggtcagaagtttggaacca

SEQ ID NO: 20376 - RNA, 20 nt, synthetic construct
  source 1..20: mol_type = other RNA
aggtcagaatacaaaaatga

SEQ ID NO: 20377 - RNA, 20 nt, synthetic construct
  source 1..20: mol_type = other RNA
aggtcagccagaggaagctt

SEQ ID NO: 20378 - RNA, 20 nt, synthetic construct
  source 1..20: mol_type = other RNA
aggtcaggaaggcaggaggc

SEQ ID NO: 20379 - RNA, 20 nt, synthetic construct
  source 1..20: mol_type = other RNA
aggtcagtagtacagtgagt

SEQ ID NO: 20380 - RNA, 20 nt, synthetic construct
  source 1..20: mol_type = other RNA
aggtcatcctttcccttctg

SEQ ID NO: 20381 - RNA, 20 nt, synthetic construct
  source 1..20: mol_type = other RNA
aggtcatgacttttttgccc

SEQ ID NO: 20382 - RNA, 20 nt, synthetic construct
  source 1..20: mol_type = other RNA
aggtcatgtacataaatttt

SEQ ID NO: 20383 - RNA, 20 nt, synthetic construct
  source 1..20: mol_type = other RNA
aggtcattacatattttgta

SEQ ID NO: 20384 - RNA, 20 nt, synthetic construct
  source 1..20: mol_type = other RNA
aggtcatttttcacttctta

SEQ ID NO: 20385 - RNA, 20 nt, synthetic construct
  source 1..20: mol_type = other RNA
aggtcgcaccctgagcatcc

SEQ ID NO: 20386 - RNA, 20 nt, synthetic construct
  source 1..20: mol_type = other RNA
aggtcggaaggaatgtgctt

SEQ ID NO: 20387 - RNA, 20 nt, synthetic construct
  source 1..20: mol_type = other RNA
aggtcgggctgcctcagccg

SEQ ID NO: 20388 - RNA, 20 nt, synthetic construct
  source 1..20: mol_type = other RNA
aggtcgtttcagattgcttg

SEQ ID NO: 20389 - RNA, 20 nt, synthetic construct
  source 1..20: mol_type = other RNA
aggtctaagagataactaat

SEQ ID NO: 20390 - RNA, 20 nt, synthetic construct
  source 1..20: mol_type = other RNA
aggtctaggctaatgtgtgt

SEQ ID NO: 20391 - RNA, 20 nt, synthetic construct
  source 1..20: mol_type = other RNA
aggtctagtgtgcatgtgtt

SEQ ID NO: 20392 - RNA, 20 nt, synthetic construct
  source 1..20: mol_type = other RNA
aggtctatgtgacagaatgc

SEQ ID NO: 20393 - RNA, 20 nt, synthetic construct
  source 1..20: mol_type = other RNA
aggtctcaaaatttaaagtt

SEQ ID NO: 20394 - RNA, 20 nt, synthetic construct
  source 1..20: mol_type = other RNA
aggtctcagccttttctgat

SEQ ID NO: 20395 - RNA, 20 nt, synthetic construct
  source 1..20: mol_type = other RNA
aggtctccttgtatggagac

SEQ ID NO: 20396 - RNA, 20 nt, synthetic construct
  source 1..20: mol_type = other RNA
aggtctctctctgtcaccca

SEQ ID NO: 20397 - RNA, 20 nt, synthetic construct
  source 1..20: mol_type = other RNA
aggtctctctgaaattagct

SEQ ID NO: 20398 - RNA, 20 nt, synthetic construct
  source 1..20: mol_type = other RNA
aggtctctttgaaaggaatc

SEQ ID NO: 20399 - RNA, 20 nt, synthetic construct
  source 1..20: mol_type = other RNA
aggtctgtaagtcagttaac

SEQ ID NO: 20400 - RNA, 20 nt, synthetic construct
  source 1..20: mol_type = other RNA
aggtctgtctttcagtatgt

SEQ ID NO: 20401 - RNA, 20 nt, synthetic construct
  source 1..20: mol_type = other RNA
aggtctgttactcccgattt

SEQ ID NO: 20402 - RNA, 20 nt, synthetic construct
  source 1..20: mol_type = other RNA
aggtcttcaacctcaacttt

SEQ ID NO: 20403 - RNA, 20 nt, synthetic construct
  source 1..20: mol_type = other RNA
aggtcttctagctttcagca

SEQ ID NO: 20404 - RNA, 20 nt, synthetic construct
  source 1..20: mol_type = other RNA
aggtctttaaaagaaagctc

SEQ ID NO: 20405 - RNA, 20 nt, synthetic construct
  source 1..20: mol_type = other RNA
aggtctttgatccattttga

SEQ ID NO: 20406 - RNA, 20 nt, synthetic construct
  source 1..20: mol_type = other RNA
aggtgaactattagagcttt

SEQ ID NO: 20407 - RNA, 20 nt, synthetic construct
  source 1..20: mol_type = other RNA
aggtgaagttaagggccatt

SEQ ID NO: 20408 - RNA, 20 nt, synthetic construct
  source 1..20: mol_type = other RNA
aggtgacctgccagagttgg

SEQ ID NO: 20409 - RNA, 20 nt, synthetic construct
  source 1..20: mol_type = other RNA
aggtgagacagaccctggct

SEQ ID NO: 20410 - RNA, 20 nt, synthetic construct
  source 1..20: mol_type = other RNA
aggtgagctttttcttttta

SEQ ID NO: 20411 - RNA, 20 nt, synthetic construct
  source 1..20: mol_type = other RNA
aggtgaggacatggagacag

SEQ ID NO: 20412 - RNA, 20 nt, synthetic construct
  source 1..20: mol_type = other RNA
aggtgagggactgagcagtg

SEQ ID NO: 20413 - RNA, 20 nt, synthetic construct
  source 1..20: mol_type = other RNA
aggtgagtgagatgggaaga

SEQ ID NO: 20414 - RNA, 20 nt, synthetic construct
  source 1..20: mol_type = other RNA
aggtgagtggactgtgaggg

SEQ ID NO: 20415 - RNA, 20 nt, synthetic construct
  source 1..20: mol_type = other RNA
aggtgattaaaggccctgat

SEQ ID NO: 20416 - RNA, 20 nt, synthetic construct
  source 1..20: mol_type = other RNA
aggtgattcagagtgctggg

SEQ ID NO: 20417 - RNA, 20 nt, synthetic construct
  source 1..20: mol_type = other RNA
aggtgcacaagggaagaggc

SEQ ID NO: 20418 - RNA, 20 nt, synthetic construct
  source 1..20: mol_type = other RNA
aggtgcacacaacactcaga

SEQ ID NO: 20419 - RNA, 20 nt, synthetic construct
  source 1..20: mol_type = other RNA
aggtgcacattccaagagag

SEQ ID NO: 20420 - RNA, 20 nt, synthetic construct
  source 1..20: mol_type = other RNA
aggtgcacgctgtgaatgtg

SEQ ID NO: 20421 - RNA, 20 nt, synthetic construct
  source 1..20: mol_type = other RNA
aggtgccccactccacacac

SEQ ID NO: 20422 - RNA, 20 nt, synthetic construct
  source 1..20: mol_type = other RNA
aggtgcccgcgaaggcgtgt

SEQ ID NO: 20423 - RNA, 20 nt, synthetic construct
  source 1..20: mol_type = other RNA
aggtgcctcctgcctcagcc

SEQ ID NO: 20424 - RNA, 20 nt, synthetic construct
  source 1..20: mol_type = other RNA
aggtgcctgccatagaggga

SEQ ID NO: 20425 - RNA, 20 nt, synthetic construct
  source 1..20: mol_type = other RNA
aggtgcgggattatttggaa

SEQ ID NO: 20426 - RNA, 20 nt, synthetic construct
  source 1..20: mol_type = other RNA
aggtgctaattgtttgttgg

SEQ ID NO: 20427 - RNA, 20 nt, synthetic construct
  source 1..20: mol_type = other RNA
aggtgctggcttcaatatgc

SEQ ID NO: 20428 - RNA, 20 nt, synthetic construct
  source 1..20: mol_type = other RNA
aggtgctgttgtattttaca

SEQ ID NO: 20429 - RNA, 20 nt, synthetic construct
  source 1..20: mol_type = other RNA
aggtgcttacagactgatta

SEQ ID NO: 20430 - RNA, 20 nt, synthetic construct
  source 1..20: mol_type = other RNA
aggtgctttttgtatcctgt

SEQ ID NO: 20431 - RNA, 20 nt, synthetic construct
  source 1..20: mol_type = other RNA
aggtggaactctgtcatggt

SEQ ID NO: 20432 - RNA, 20 nt, synthetic construct
  source 1..20: mol_type = other RNA
aggtggaaggcctgatagct

SEQ ID NO: 20433 - RNA, 20 nt, synthetic construct
  source 1..20: mol_type = other RNA
aggtggagtggtggatagag

SEQ ID NO: 20434 - RNA, 20 nt, synthetic construct
  source 1..20: mol_type = other RNA
aggtggagttctgctcttgt

SEQ ID NO: 20435 - RNA, 20 nt, synthetic construct
  source 1..20: mol_type = other RNA
aggtggatatctgaggtcag

SEQ ID NO: 20436 - RNA, 20 nt, synthetic construct
  source 1..20: mol_type = other RNA
aggtggatcaggagattgag

SEQ ID NO: 20437 - RNA, 20 nt, synthetic construct
  source 1..20: mol_type = other RNA
aggtgggaggcccggagccg

SEQ ID NO: 20438 - RNA, 20 nt, synthetic construct
  source 1..20: mol_type = other RNA
aggtgggcactgggagccct

SEQ ID NO: 20439 - RNA, 20 nt, synthetic construct
  source 1..20: mol_type = other RNA
aggtggtatgggagatgtgt

SEQ ID NO: 20440 - RNA, 20 nt, synthetic construct
  source 1..20: mol_type = other RNA
aggtggtatttaatctgtca

SEQ ID NO: 20441 - RNA, 20 nt, synthetic construct
  source 1..20: mol_type = other RNA
aggtggttctgcctaatctc

SEQ ID NO: 20442 - RNA, 20 nt, synthetic construct
  source 1..20: mol_type = other RNA
aggtggtttgaaccccagaa

SEQ ID NO: 20443 - RNA, 20 nt, synthetic construct
  source 1..20: mol_type = other RNA
aggtgtaagagattaattca

SEQ ID NO: 20444 - RNA, 20 nt, synthetic construct
  source 1..20: mol_type = other RNA
aggtgtacaattaggctgtt

SEQ ID NO: 20445 - RNA, 20 nt, synthetic construct
  source 1..20: mol_type = other RNA
aggtgtatgatcttattaat

SEQ ID NO: 20446 - RNA, 20 nt, synthetic construct
  source 1..20: mol_type = other RNA
aggtgtcactggatagaagt

SEQ ID NO: 20447 - RNA, 20 nt, synthetic construct
  source 1..20: mol_type = other RNA
aggtgtctcatttaataact

SEQ ID NO: 20448 - RNA, 20 nt, synthetic construct
  source 1..20: mol_type = other RNA
aggtgtctgatgtgtgtctc

SEQ ID NO: 20449 - RNA, 20 nt, synthetic construct
  source 1..20: mol_type = other RNA
aggtgtgaaccacgcatctg

SEQ ID NO: 20450 - RNA, 20 nt, synthetic construct
  source 1..20: mol_type = other RNA
aggtgtgagattgatagatc

SEQ ID NO: 20451 - RNA, 20 nt, synthetic construct
  source 1..20: mol_type = other RNA
aggtgtgagccaccgtgccg

SEQ ID NO: 20452 - RNA, 20 nt, synthetic construct
  source 1..20: mol_type = other RNA
aggtgtgataactgatatga

SEQ ID NO: 20453 - RNA, 20 nt, synthetic construct
  source 1..20: mol_type = other RNA
aggtgtgggccaccaagccc

SEQ ID NO: 20454 - RNA, 20 nt, synthetic construct
  source 1..20: mol_type = other RNA
aggtgtgtaaacactgttct

SEQ ID NO: 20455 - RNA, 20 nt, synthetic construct
  source 1..20: mol_type = other RNA
aggtgtgtgtaatcccagct

SEQ ID NO: 20456 - RNA, 20 nt, synthetic construct
  source 1..20: mol_type = other RNA
aggtgtgtgttccttcctac

SEQ ID NO: 20457 - RNA, 20 nt, synthetic construct
  source 1..20: mol_type = other RNA
aggtgttaagccgttccatc

SEQ ID NO: 20458 - RNA, 20 nt, synthetic construct
  source 1..20: mol_type = other RNA
aggtgttagcaggactggac

SEQ ID NO: 20459 - RNA, 20 nt, synthetic construct
  source 1..20: mol_type = other RNA
aggtgttcctgaagtctttg

SEQ ID NO: 20460 - RNA, 20 nt, synthetic construct
  source 1..20: mol_type = other RNA
aggtgttggtgcatttggga

SEQ ID NO: 20461 - RNA, 20 nt, synthetic construct
  source 1..20: mol_type = other RNA
aggtgtttggtgaattttat

SEQ ID NO: 20462 - RNA, 20 nt, synthetic construct
  source 1..20: mol_type = other RNA
aggtgtttttcagccctgat

SEQ ID NO: 20463 - RNA, 20 nt, synthetic construct
  source 1..20: mol_type = other RNA
aggtgttttttccttctttg

SEQ ID NO: 20464 - RNA, 20 nt, synthetic construct
  source 1..20: mol_type = other RNA
aggttaaaaccacaaacatg

SEQ ID NO: 20465 - RNA, 20 nt, synthetic construct
  source 1..20: mol_type = other RNA
aggttaaagcaacaggaaga

SEQ ID NO: 20466 - RNA, 20 nt, synthetic construct
  source 1..20: mol_type = other RNA
aggttaactaatagccagtg

SEQ ID NO: 20467 - RNA, 20 nt, synthetic construct
  source 1..20: mol_type = other RNA
aggttaagggaagagctaag

SEQ ID NO: 20468 - RNA, 20 nt, synthetic construct
  source 1..20: mol_type = other RNA
aggttacgtactaggtatca

SEQ ID NO: 20469 - RNA, 20 nt, synthetic construct
  source 1..20: mol_type = other RNA
aggttataatcagccgtgat

SEQ ID NO: 20470 - RNA, 20 nt, synthetic construct
  source 1..20: mol_type = other RNA
aggttatctgttttcttact

SEQ ID NO: 20471 - RNA, 20 nt, synthetic construct
  source 1..20: mol_type = other RNA
aggttattaagataatgctg

SEQ ID NO: 20472 - RNA, 20 nt, synthetic construct
  source 1..20: mol_type = other RNA
aggttattcaaaacaaaaca

SEQ ID NO: 20473 - RNA, 20 nt, synthetic construct
  source 1..20: mol_type = other RNA
aggttcaagtttggctccca

SEQ ID NO: 20474 - RNA, 20 nt, synthetic construct
  source 1..20: mol_type = other RNA
aggttcacaaattagaacaa

SEQ ID NO: 20475 - RNA, 20 nt, synthetic construct
  source 1..20: mol_type = other RNA
aggttcatccatgttgttga

SEQ ID NO: 20476 - RNA, 20 nt, synthetic construct
  source 1..20: mol_type = other RNA
aggttcatgaacataaattt

SEQ ID NO: 20477 - RNA, 20 nt, synthetic construct
  source 1..20: mol_type = other RNA
aggttcatgtgtgcttacac

SEQ ID NO: 20478 - RNA, 20 nt, synthetic construct
  source 1..20: mol_type = other RNA
aggttcattttaataagctt

SEQ ID NO: 20479 - RNA, 20 nt, synthetic construct
  source 1..20: mol_type = other RNA
aggttctgctatgctgaaag

SEQ ID NO: 20480 - RNA, 20 nt, synthetic construct
  source 1..20: mol_type = other RNA
aggttcttcatcagtccctg

SEQ ID NO: 20481 - RNA, 20 nt, synthetic construct
  source 1..20: mol_type = other RNA
aggttcttttaaatgccaat

SEQ ID NO: 20482 - RNA, 20 nt, synthetic construct
  source 1..20: mol_type = other RNA
aggttgaaaactcaactgcc

SEQ ID NO: 20483 - RNA, 20 nt, synthetic construct
  source 1..20: mol_type = other RNA
aggttgaaagttcagaatac

SEQ ID NO: 20484 - RNA, 20 nt, synthetic construct
  source 1..20: mol_type = other RNA
aggttgaagacctgcagtct

SEQ ID NO: 20485 - RNA, 20 nt, synthetic construct
  source 1..20: mol_type = other RNA
aggttgaagctctagtgagc

SEQ ID NO: 20486 - RNA, 20 nt, synthetic construct
  source 1..20: mol_type = other RNA
aggttgaatagggcctcaaa

SEQ ID NO: 20487 - RNA, 20 nt, synthetic construct
  source 1..20: mol_type = other RNA
aggttgagacaagaccacac

SEQ ID NO: 20488 - RNA, 20 nt, synthetic construct
  source 1..20: mol_type = other RNA
aggttgagacttagatttat

SEQ ID NO: 20489 - RNA, 20 nt, synthetic construct
  source 1..20: mol_type = other RNA
aggttgaggctgcagtgagc

SEQ ID NO: 20490 - RNA, 20 nt, synthetic construct
  source 1..20: mol_type = other RNA
aggttgatactagtttagtg

SEQ ID NO: 20491 - RNA, 20 nt, synthetic construct
  source 1..20: mol_type = other RNA
aggttgatggctgtactaag

SEQ ID NO: 20492 - RNA, 20 nt, synthetic construct
  source 1..20: mol_type = other RNA
aggttgcattaatgcttcat

SEQ ID NO: 20493 - RNA, 20 nt, synthetic construct
  source 1..20: mol_type = other RNA
aggttgcggtgacgtgagat

SEQ ID NO: 20494 - RNA, 20 nt, synthetic construct
  source 1..20: mol_type = other RNA
aggttgcttaattgagctgt

SEQ ID NO: 20495 - RNA, 20 nt, synthetic construct
  source 1..20: mol_type = other RNA
aggttgcttttacttggctc

SEQ ID NO: 20496 - RNA, 20 nt, synthetic construct
  source 1..20: mol_type = other RNA
aggttgggcttatcagatgg

SEQ ID NO: 20497 - RNA, 20 nt, synthetic construct
  source 1..20: mol_type = other RNA
aggttgttcttggttaatat

SEQ ID NO: 20498 - RNA, 20 nt, synthetic construct
  source 1..20: mol_type = other RNA
aggtttacaggatatcagaa

SEQ ID NO: 20499 - RNA, 20 nt, synthetic construct
  source 1..20: mol_type = other RNA
aggtttactccaagaaggct

SEQ ID NO: 20500 - RNA, 20 nt, synthetic construct
  source 1..20: mol_type = other RNA
aggtttacttggggagagtg

SEQ ID NO: 20501 - RNA, 20 nt, synthetic construct
  source 1..20: mol_type = other RNA
aggtttagaaaacatatcct

SEQ ID NO: 20502 - RNA, 20 nt, synthetic construct
  source 1..20: mol_type = other RNA
aggtttaggaagcacattcc

SEQ ID NO: 20503 - RNA, 20 nt, synthetic construct
  source 1..20: mol_type = other RNA
aggtttaggtttttcttgtg

SEQ ID NO: 20504 - RNA, 20 nt, synthetic construct
  source 1..20: mol_type = other RNA
aggtttcaagtgaaccaaaa

SEQ ID NO: 20505 - RNA, 20 nt, synthetic construct
  source 1..20: mol_type = other RNA
aggtttccagtggcccccct

SEQ ID NO: 20506 - RNA, 20 nt, synthetic construct
  source 1..20: mol_type = other RNA
aggtttccctggggaataag

SEQ ID NO: 20507 - RNA, 20 nt, synthetic construct
  source 1..20: mol_type = other RNA
aggtttctcatttttcaggg

SEQ ID NO: 20508 - RNA, 20 nt, synthetic construct
  source 1..20: mol_type = other RNA
aggtttctctccaaggtaca

SEQ ID NO: 20509 - RNA, 20 nt, synthetic construct
  source 1..20: mol_type = other RNA
aggtttcttcactcttaaaa

SEQ ID NO: 20510 - RNA, 20 nt, synthetic construct
  source 1..20: mol_type = other RNA
aggtttgcactggcacagca

SEQ ID NO: 20511 - RNA, 20 nt, synthetic construct
  source 1..20: mol_type = other RNA
aggtttggagtttgtagctc

SEQ ID NO: 20512 - RNA, 20 nt, synthetic construct
  source 1..20: mol_type = other RNA
aggtttgtagagcaagcaac

SEQ ID NO: 20513 - RNA, 20 nt, synthetic construct
  source 1..20: mol_type = other RNA
aggtttgtgcttggatattc

SEQ ID NO: 20514 - RNA, 20 nt, synthetic construct
  source 1..20: mol_type = other RNA
aggttttacgatgttggcca

SEQ ID NO: 20515 - RNA, 20 nt, synthetic construct
  source 1..20: mol_type = other RNA
aggttttatctctctcaagc

SEQ ID NO: 20516 - RNA, 20 nt, synthetic construct
  source 1..20: mol_type = other RNA
aggttttcgaccaagttact

SEQ ID NO: 20517 - RNA, 20 nt, synthetic construct
  source 1..20: mol_type = other RNA
aggttttggtaatgggaaag

SEQ ID NO: 20518 - RNA, 20 nt, synthetic construct
  source 1..20: mol_type = other RNA
aggtttttaaaagatgcatt

SEQ ID NO: 20519 - RNA, 20 nt, synthetic construct
  source 1..20: mol_type = other RNA
aggtttttcttgtgggtatt

SEQ ID NO: 20520 - RNA, 20 nt, synthetic construct
  source 1..20: mol_type = other RNA
aggtttttgaacaagagcgt

SEQ ID NO: 20521 - RNA, 20 nt, synthetic construct
  source 1..20: mol_type = other RNA
aggtttttgattactgactc

SEQ ID NO: 20522 - RNA, 20 nt, synthetic construct
  source 1..20: mol_type = other RNA
aggttttttcattttactgc

SEQ ID NO: 20523 - RNA, 20 nt, synthetic construct
  source 1..20: mol_type = other RNA
agtaaaaaaggaccatctgt

SEQ ID NO: 20524 - RNA, 20 nt, synthetic construct
  source 1..20: mol_type = other RNA
agtaaaaagaaatctgcatc

SEQ ID NO: 20525 - RNA, 20 nt, synthetic construct
  source 1..20: mol_type = other RNA
agtaaaaagcactatccaca

SEQ ID NO: 20526 - RNA, 20 nt, synthetic construct
  source 1..20: mol_type = other RNA
agtaaaaccaaatgtggata

SEQ ID NO: 20527 - RNA, 20 nt, synthetic construct
  source 1..20: mol_type = other RNA
agtaaaagaagatgcagttg

SEQ ID NO: 20528 - RNA, 20 nt, synthetic construct
  source 1..20: mol_type = other RNA
agtaaaagcaacctcatttg

SEQ ID NO: 20529 - RNA, 20 nt, synthetic construct
  source 1..20: mol_type = other RNA
agtaaaataaacaagtcaca

SEQ ID NO: 20530 - RNA, 20 nt, synthetic construct
  source 1..20: mol_type = other RNA
agtaaaatcggaacaggctc

SEQ ID NO: 20531 - RNA, 20 nt, synthetic construct
  source 1..20: mol_type = other RNA
agtaaaattcccttcagtgt

SEQ ID NO: 20532 - RNA, 20 nt, synthetic construct
  source 1..20: mol_type = other RNA
agtaaacaactgactctaaa

SEQ ID NO: 20533 - RNA, 20 nt, synthetic construct
  source 1..20: mol_type = other RNA
agtaaacctcaagtcttttc

SEQ ID NO: 20534 - RNA, 20 nt, synthetic construct
  source 1..20: mol_type = other RNA
agtaaagatagccccttatc

SEQ ID NO: 20535 - RNA, 20 nt, synthetic construct
  source 1..20: mol_type = other RNA
agtaaagatcaagctcgccg

SEQ ID NO: 20536 - RNA, 20 nt, synthetic construct
  source 1..20: mol_type = other RNA
agtaaagcaaatgtgactag

SEQ ID NO: 20537 - RNA, 20 nt, synthetic construct
  source 1..20: mol_type = other RNA
agtaaagccccattgtacac

SEQ ID NO: 20538 - RNA, 20 nt, synthetic construct
  source 1..20: mol_type = other RNA
agtaaagggtaagaaaattg

SEQ ID NO: 20539 - RNA, 20 nt, synthetic construct
  source 1..20: mol_type = other RNA
agtaaagtcactgtggaaaa

SEQ ID NO: 20540 - RNA, 20 nt, synthetic construct
  source 1..20: mol_type = other RNA
agtaaatatactgactagtg

SEQ ID NO: 20541 - RNA, 20 nt, synthetic construct
  source 1..20: mol_type = other RNA
agtaaatatccgaaagaact

SEQ ID NO: 20542 - RNA, 20 nt, synthetic construct
  source 1..20: mol_type = other RNA
agtaaatatttaacaccatg

SEQ ID NO: 20543 - RNA, 20 nt, synthetic construct
  source 1..20: mol_type = other RNA
agtaaatcagactgtattac

SEQ ID NO: 20544 - RNA, 20 nt, synthetic construct
  source 1..20: mol_type = other RNA
agtaaatcccggccaggtgc

SEQ ID NO: 20545 - RNA, 20 nt, synthetic construct
  source 1..20: mol_type = other RNA
agtaaatctttggtgaaggt

SEQ ID NO: 20546 - RNA, 20 nt, synthetic construct
  source 1..20: mol_type = other RNA
agtaaatgaaatttgaggcc

SEQ ID NO: 20547 - RNA, 20 nt, synthetic construct
  source 1..20: mol_type = other RNA
agtaaatgcaatgcaggcgc

SEQ ID NO: 20548 - RNA, 20 nt, synthetic construct
  source 1..20: mol_type = other RNA
agtaaatgcctacattaaaa

SEQ ID NO: 20549 - RNA, 20 nt, synthetic construct
  source 1..20: mol_type = other RNA
agtaaattcgcataaccaaa

SEQ ID NO: 20550 - RNA, 20 nt, synthetic construct
  source 1..20: mol_type = other RNA
agtaacaaataagaagattg

SEQ ID NO: 20551 - RNA, 20 nt, synthetic construct
  source 1..20: mol_type = other RNA
agtaacactcagaagtacta

SEQ ID NO: 20552 - RNA, 20 nt, synthetic construct
  source 1..20: mol_type = other RNA
agtaacagacctctgaagag

SEQ ID NO: 20553 - RNA, 20 nt, synthetic construct
  source 1..20: mol_type = other RNA
agtaacagttcaatactact

SEQ ID NO: 20554 - RNA, 20 nt, synthetic construct
  source 1..20: mol_type = other RNA
agtaacatgtggaacataat

SEQ ID NO: 20555 - RNA, 20 nt, synthetic construct
  source 1..20: mol_type = other RNA
agtaacattacaacagcaag

SEQ ID NO: 20556 - RNA, 20 nt, synthetic construct
  source 1..20: mol_type = other RNA
agtaactaaactattgtatg

SEQ ID NO: 20557 - RNA, 20 nt, synthetic construct
  source 1..20: mol_type = other RNA
agtaactcttgagttaggaa

SEQ ID NO: 20558 - RNA, 20 nt, synthetic construct
  source 1..20: mol_type = other RNA
agtaactgctcctctgactt

SEQ ID NO: 20559 - RNA, 20 nt, synthetic construct
  source 1..20: mol_type = other RNA
agtaactggtccagatgaag

SEQ ID NO: 20560 - RNA, 20 nt, synthetic construct
  source 1..20: mol_type = other RNA
agtaactgtcatcagcgtcc

SEQ ID NO: 20561 - RNA, 20 nt, synthetic construct
  source 1..20: mol_type = other RNA
agtaactgttggcaaggatg

SEQ ID NO: 20562 - RNA, 20 nt, synthetic construct
  source 1..20: mol_type = other RNA
agtaacttggtcgaaaacct

SEQ ID NO: 20563 - RNA, 20 nt, synthetic construct
  source 1..20: mol_type = other RNA
agtaactttctgcttaaagc

SEQ ID NO: 20564 - RNA, 20 nt, synthetic construct
  source 1..20: mol_type = other RNA
agtaagaaaacagataacct

SEQ ID NO: 20565 - RNA, 20 nt, synthetic construct
  source 1..20: mol_type = other RNA
agtaagaggtatcaccatct

SEQ ID NO: 20566 - RNA, 20 nt, synthetic construct
  source 1..20: mol_type = other RNA
agtaagatcctggattgcta

SEQ ID NO: 20567 - RNA, 20 nt, synthetic construct
  source 1..20: mol_type = other RNA
agtaagattctgtctctaca

SEQ ID NO: 20568 - RNA, 20 nt, synthetic construct
  source 1..20: mol_type = other RNA
agtaagcaactgcatcttct

SEQ ID NO: 20569 - RNA, 20 nt, synthetic construct
  source 1..20: mol_type = other RNA
agtaaggatcgttagtattt

SEQ ID NO: 20570 - RNA, 20 nt, synthetic construct
  source 1..20: mol_type = other RNA
agtaaggattttctattcat

SEQ ID NO: 20571 - RNA, 20 nt, synthetic construct
  source 1..20: mol_type = other RNA
agtaagggtaaacagaatta

SEQ ID NO: 20572 - RNA, 20 nt, synthetic construct
  source 1..20: mol_type = other RNA
agtaaggtttccctggggaa

SEQ ID NO: 20573 - RNA, 20 nt, synthetic construct
  source 1..20: mol_type = other RNA
agtaagtaaaatcggaacag

SEQ ID NO: 20574 - RNA, 20 nt, synthetic construct
  source 1..20: mol_type = other RNA
agtaagtgtgagcaaaaata

SEQ ID NO: 20575 - RNA, 20 nt, synthetic construct
  source 1..20: mol_type = other RNA
agtaagttgcatacgtcgtc

SEQ ID NO: 20576 - RNA, 20 nt, synthetic construct
  source 1..20: mol_type = other RNA
agtaagttgtgtcatttttg

SEQ ID NO: 20577 - RNA, 20 nt, synthetic construct
  source 1..20: mol_type = other RNA
agtaataaagcaagtatgag

SEQ ID NO: 20578 - RNA, 20 nt, synthetic construct
  source 1..20: mol_type = other RNA
agtaataaaggcaatgctct

SEQ ID NO: 20579 - RNA, 20 nt, synthetic construct
  source 1..20: mol_type = other RNA
agtaatcaaacagtgtgata

SEQ ID NO: 20580 - RNA, 20 nt, synthetic construct
  source 1..20: mol_type = other RNA
agtaatcaagtgaaatgatc

SEQ ID NO: 20581 - RNA, 20 nt, synthetic construct
  source 1..20: mol_type = other RNA
agtaatcttgctaaacatgt

SEQ ID NO: 20582 - RNA, 20 nt, synthetic construct
  source 1..20: mol_type = other RNA
agtaatgaaaattagctgga

SEQ ID NO: 20583 - RNA, 20 nt, synthetic construct
  source 1..20: mol_type = other RNA
agtaatgctggccagtgagt

SEQ ID NO: 20584 - RNA, 20 nt, synthetic construct
  source 1..20: mol_type = other RNA
agtaatggatgtttttagag

SEQ ID NO: 20585 - RNA, 20 nt, synthetic construct
  source 1..20: mol_type = other RNA
agtaatggttggccgaggcc

SEQ ID NO: 20586 - RNA, 20 nt, synthetic construct
  source 1..20: mol_type = other RNA
agtaattagttacatgaggt

SEQ ID NO: 20587 - RNA, 20 nt, synthetic construct
  source 1..20: mol_type = other RNA
agtaattctccactttcatg

SEQ ID NO: 20588 - RNA, 20 nt, synthetic construct
  source 1..20: mol_type = other RNA
agtaattctgcagtgaacat

SEQ ID NO: 20589 - RNA, 20 nt, synthetic construct
  source 1..20: mol_type = other RNA
agtaattctgtgcttaaatt

SEQ ID NO: 20590 - RNA, 20 nt, synthetic construct
  source 1..20: mol_type = other RNA
agtaattgggatctgataaa

SEQ ID NO: 20591 - RNA, 20 nt, synthetic construct
  source 1..20: mol_type = other RNA
agtaattgtagtttccatgg

SEQ ID NO: 20592 - RNA, 20 nt, synthetic construct
  source 1..20: mol_type = other RNA
agtaattgttttcccttttg

SEQ ID NO: 20593 - RNA, 20 nt, synthetic construct
  source 1..20: mol_type = other RNA
agtaatttcttctgaagaaa

SEQ ID NO: 20594 - RNA, 20 nt, synthetic construct
  source 1..20: mol_type = other RNA
agtacaaaagtgctgttgag

SEQ ID NO: 20595 - RNA, 20 nt, synthetic construct
  source 1..20: mol_type = other RNA
agtacaaacattacagaaaa

SEQ ID NO: 20596 - RNA, 20 nt, synthetic construct
  source 1..20: mol_type = other RNA
agtacaactaataattgctt

SEQ ID NO: 20597 - RNA, 20 nt, synthetic construct
  source 1..20: mol_type = other RNA
agtacaaggctagagctcac

SEQ ID NO: 20598 - RNA, 20 nt, synthetic construct
  source 1..20: mol_type = other RNA
agtacacgaaaatatccctg

SEQ ID NO: 20599 - RNA, 20 nt, synthetic construct
  source 1..20: mol_type = other RNA
agtacactgttgatttagaa

SEQ ID NO: 20600 - RNA, 20 nt, synthetic construct
  source 1..20: mol_type = other RNA
agtacagataaccaataaga

SEQ ID NO: 20601 - RNA, 20 nt, synthetic construct
  source 1..20: mol_type = other RNA
agtacagccatcaacctaat

SEQ ID NO: 20602 - RNA, 20 nt, synthetic construct
  source 1..20: mol_type = other RNA
agtacagtagtaaaaccaaa

SEQ ID NO: 20603 - RNA, 20 nt, synthetic construct
  source 1..20: mol_type = other RNA
agtacagtgagtagaagagt

SEQ ID NO: 20604 - RNA, 20 nt, synthetic construct
  source 1..20: mol_type = other RNA
agtacagtgcataccaccac

SEQ ID NO: 20605 - RNA, 20 nt, synthetic construct
  source 1..20: mol_type = other RNA
agtacatattcattgtaaga

SEQ ID NO: 20606 - RNA, 20 nt, synthetic construct
  source 1..20: mol_type = other RNA
agtacatctcaattcagaag

SEQ ID NO: 20607 - RNA, 20 nt, synthetic construct
  source 1..20: mol_type = other RNA
agtacatgaaatactcaaac

SEQ ID NO: 20608 - RNA, 20 nt, synthetic construct
  source 1..20: mol_type = other RNA
agtaccaggtcagccagagg

SEQ ID NO: 20609 - RNA, 20 nt, synthetic construct
  source 1..20: mol_type = other RNA
agtaccattccccttgccaa

SEQ ID NO: 20610 - RNA, 20 nt, synthetic construct
  source 1..20: mol_type = other RNA
agtacctctgggatgctcag

SEQ ID NO: 20611 - RNA, 20 nt, synthetic construct
  source 1..20: mol_type = other RNA
agtacgcttttatgttataa

SEQ ID NO: 20612 - RNA, 20 nt, synthetic construct
  source 1..20: mol_type = other RNA
agtacgtaacctaaagttga

SEQ ID NO: 20613 - RNA, 20 nt, synthetic construct
  source 1..20: mol_type = other RNA
agtacgtgcagagcaggggt

SEQ ID NO: 20614 - RNA, 20 nt, synthetic construct
  source 1..20: mol_type = other RNA
agtactatcttccctaaaga

SEQ ID NO: 20615 - RNA, 20 nt, synthetic construct
  source 1..20: mol_type = other RNA
agtactatgcagcaacggaa

SEQ ID NO: 20616 - RNA, 20 nt, synthetic construct
  source 1..20: mol_type = other RNA
agtactccattatatgaata

SEQ ID NO: 20617 - RNA, 20 nt, synthetic construct
  source 1..20: mol_type = other RNA
agtactgaccatctcagcac

SEQ ID NO: 20618 - RNA, 20 nt, synthetic construct
  source 1..20: mol_type = other RNA
agtactgagtcaaaaccaaa

SEQ ID NO: 20619 - RNA, 20 nt, synthetic construct
  source 1..20: mol_type = other RNA
agtactgcatgattcccctt

SEQ ID NO: 20620 - RNA, 20 nt, synthetic construct
  source 1..20: mol_type = other RNA
agtactggaaatggacagcg

SEQ ID NO: 20621 - RNA, 20 nt, synthetic construct
  source 1..20: mol_type = other RNA
agtacttcaaggttcacaaa

SEQ ID NO: 20622 - RNA, 20 nt, synthetic construct
  source 1..20: mol_type = other RNA
agtacttcagcgcttgaaca

SEQ ID NO: 20623 - RNA, 20 nt, synthetic construct
  source 1..20: mol_type = other RNA
agtacttccctctttctcaa

SEQ ID NO: 20624 - RNA, 20 nt, synthetic construct
  source 1..20: mol_type = other RNA
agtacttctgagtgttactt

SEQ ID NO: 20625 - RNA, 20 nt, synthetic construct
  source 1..20: mol_type = other RNA
agtacttgtctttttgtgac

SEQ ID NO: 20626 - RNA, 20 nt, synthetic construct
  source 1..20: mol_type = other RNA
agtactttttcatccaaaca

SEQ ID NO: 20627 - RNA, 20 nt, synthetic construct
  source 1..20: mol_type = other RNA
agtagaaagcaggttcattt

SEQ ID NO: 20628 - RNA, 20 nt, synthetic construct
  source 1..20: mol_type = other RNA
agtagaaatcttccagaagg

SEQ ID NO: 20629 - RNA, 20 nt, synthetic construct
  source 1..20: mol_type = other RNA
agtagaagactcagcagttt

SEQ ID NO: 20630 - RNA, 20 nt, synthetic construct
  source 1..20: mol_type = other RNA
agtagaagagtaatggttgg

SEQ ID NO: 20631 - RNA, 20 nt, synthetic construct
  source 1..20: mol_type = other RNA
agtagaaggccctatgcctt

SEQ ID NO: 20632 - RNA, 20 nt, synthetic construct
  source 1..20: mol_type = other RNA
agtagaaggtcaatctagga

SEQ ID NO: 20633 - RNA, 20 nt, synthetic construct
  source 1..20: mol_type = other RNA
agtagaattatcatatgatc

SEQ ID NO: 20634 - RNA, 20 nt, synthetic construct
  source 1..20: mol_type = other RNA
agtagaattctccagtgaag

SEQ ID NO: 20635 - RNA, 20 nt, synthetic construct
  source 1..20: mol_type = other RNA
agtagagaaggctttgtgtt

SEQ ID NO: 20636 - RNA, 20 nt, synthetic construct
  source 1..20: mol_type = other RNA
agtagagatgaggttttacg

SEQ ID NO: 20637 - RNA, 20 nt, synthetic construct
  source 1..20: mol_type = other RNA
agtagaggactgcctatttt

SEQ ID NO: 20638 - RNA, 20 nt, synthetic construct
  source 1..20: mol_type = other RNA
agtagaggccgagggttgaa

SEQ ID NO: 20639 - RNA, 20 nt, synthetic construct
  source 1..20: mol_type = other RNA
agtagattagcttttacgag

SEQ ID NO: 20640 - RNA, 20 nt, synthetic construct
  source 1..20: mol_type = other RNA
agtagattcccccttatgtg

SEQ ID NO: 20641 - RNA, 20 nt, synthetic construct
  source 1..20: mol_type = other RNA
agtagcaccctatttatgtt

SEQ ID NO: 20642 - RNA, 20 nt, synthetic construct
  source 1..20: mol_type = other RNA
agtagcagaatccccaaata

SEQ ID NO: 20643 - RNA, 20 nt, synthetic construct
  source 1..20: mol_type = other RNA
agtagcagggactacagtca

SEQ ID NO: 20644 - RNA, 20 nt, synthetic construct
  source 1..20: mol_type = other RNA
agtagccaaaggtagaaaca

SEQ ID NO: 20645 - RNA, 20 nt, synthetic construct
  source 1..20: mol_type = other RNA
agtagcgctttaagcatccc

SEQ ID NO: 20646 - RNA, 20 nt, synthetic construct
  source 1..20: mol_type = other RNA
agtagctaggaccataggca

SEQ ID NO: 20647 - RNA, 20 nt, synthetic construct
  source 1..20: mol_type = other RNA
agtagctcatcatttatacc

SEQ ID NO: 20648 - RNA, 20 nt, synthetic construct
  source 1..20: mol_type = other RNA
agtagctgggatcacaggcg

SEQ ID NO: 20649 - RNA, 20 nt, synthetic construct
  source 1..20: mol_type = other RNA
agtagctgggattacacaca

SEQ ID NO: 20650 - RNA, 20 nt, synthetic construct
  source 1..20: mol_type = other RNA
agtagctgtctttaatgtaa

SEQ ID NO: 20651 - RNA, 20 nt, synthetic construct
  source 1..20: mol_type = other RNA
agtagctgtgattaccggca

SEQ ID NO: 20652 - RNA, 20 nt, synthetic construct
  source 1..20: mol_type = other RNA
agtagctgttgaattgttgc

SEQ ID NO: 20653 - RNA, 20 nt, synthetic construct
  source 1..20: mol_type = other RNA
agtagcttcaatgagggcag

SEQ ID NO: 20654 - RNA, 20 nt, synthetic construct
  source 1..20: mol_type = other RNA
agtaggaaaaccatgtcatg

SEQ ID NO: 20655 - RNA, 20 nt, synthetic construct
  source 1..20: mol_type = other RNA
agtaggaattaaacatttct

SEQ ID NO: 20656 - RNA, 20 nt, synthetic construct
  source 1..20: mol_type = other RNA
agtaggatgaattacaaatg

SEQ ID NO: 20657 - RNA, 20 nt, synthetic construct
  source 1..20: mol_type = other RNA
agtaggcaacatccctatgc

SEQ ID NO: 20658 - RNA, 20 nt, synthetic construct
  source 1..20: mol_type = other RNA
agtaggcttagataggatgg

SEQ ID NO: 20659 - RNA, 20 nt, synthetic construct
  source 1..20: mol_type = other RNA
agtagggaaggtgcccgcga

SEQ ID NO: 20660 - RNA, 20 nt, synthetic construct
  source 1..20: mol_type = other RNA
agtaggggtaaatctttgta

SEQ ID NO: 20661 - RNA, 20 nt, synthetic construct
  source 1..20: mol_type = other RNA
agtaggtctccttgtatgga

SEQ ID NO: 20662 - RNA, 20 nt, synthetic construct
  source 1..20: mol_type = other RNA
agtaggttgagacttagatt

SEQ ID NO: 20663 - RNA, 20 nt, synthetic construct
  source 1..20: mol_type = other RNA
agtagtaaaaccaaatgtgg

SEQ ID NO: 20664 - RNA, 20 nt, synthetic construct
  source 1..20: mol_type = other RNA
agtagtaaagcaaatgtgac

SEQ ID NO: 20665 - RNA, 20 nt, synthetic construct
  source 1..20: mol_type = other RNA
agtagtaagttgtgtcattt

SEQ ID NO: 20666 - RNA, 20 nt, synthetic construct
  source 1..20: mol_type = other RNA
agtagtacaaaagtgctgtt

SEQ ID NO: 20667 - RNA, 20 nt, synthetic construct
  source 1..20: mol_type = other RNA
agtagtacagtgagtagaag

SEQ ID NO: 20668 - RNA, 20 nt, synthetic construct
  source 1..20: mol_type = other RNA
agtagtacttctgagtgtta

SEQ ID NO: 20669 - RNA, 20 nt, synthetic construct
  source 1..20: mol_type = other RNA
agtagtattgaactgttact

SEQ ID NO: 20670 - RNA, 20 nt, synthetic construct
  source 1..20: mol_type = other RNA
agtagtggcagccccgcttc

SEQ ID NO: 20671 - RNA, 20 nt, synthetic construct
  source 1..20: mol_type = other RNA
agtagttaggtggtttgaac

SEQ ID NO: 20672 - RNA, 20 nt, synthetic construct
  source 1..20: mol_type = other RNA
agtagttcatgttagcataa

SEQ ID NO: 20673 - RNA, 20 nt, synthetic construct
  source 1..20: mol_type = other RNA
agtagttgctcagaaaattt

SEQ ID NO: 20674 - RNA, 20 nt, synthetic construct
  source 1..20: mol_type = other RNA
agtagttgtaactacagaca

SEQ ID NO: 20675 - RNA, 20 nt, synthetic construct
  source 1..20: mol_type = other RNA
agtagtttgctagtggtaac

SEQ ID NO: 20676 - RNA, 20 nt, synthetic construct
  source 1..20: mol_type = other RNA
agtataaatgaggtatcatt

SEQ ID NO: 20677 - RNA, 20 nt, synthetic construct
  source 1..20: mol_type = other RNA
agtataagagaaggaagcac

SEQ ID NO: 20678 - RNA, 20 nt, synthetic construct
  source 1..20: mol_type = other RNA
agtataagatgatgatatga

SEQ ID NO: 20679 - RNA, 20 nt, synthetic construct
  source 1..20: mol_type = other RNA
agtatacatgtttagcaaga

SEQ ID NO: 20680 - RNA, 20 nt, synthetic construct
  source 1..20: mol_type = other RNA
agtatagaaaggagaccagt

SEQ ID NO: 20681 - RNA, 20 nt, synthetic construct
  source 1..20: mol_type = other RNA
agtataggggaactcttgta

SEQ ID NO: 20682 - RNA, 20 nt, synthetic construct
  source 1..20: mol_type = other RNA
agtatatatcatagagtacc

SEQ ID NO: 20683 - RNA, 20 nt, synthetic construct
  source 1..20: mol_type = other RNA
agtatatatgctccctaaat

SEQ ID NO: 20684 - RNA, 20 nt, synthetic construct
  source 1..20: mol_type = other RNA
agtatatattttctaagagc

SEQ ID NO: 20685 - RNA, 20 nt, synthetic construct
  source 1..20: mol_type = other RNA
agtatattcatagtagctgt

SEQ ID NO: 20686 - RNA, 20 nt, synthetic construct
  source 1..20: mol_type = other RNA
agtatattctgtgaattgtg

SEQ ID NO: 20687 - RNA, 20 nt, synthetic construct
  source 1..20: mol_type = other RNA
agtatatttactgcttgctg

SEQ ID NO: 20688 - RNA, 20 nt, synthetic construct
  source 1..20: mol_type = other RNA
agtatattttcaaggcttgt

SEQ ID NO: 20689 - RNA, 20 nt, synthetic construct
  source 1..20: mol_type = other RNA
agtatcaacctgcaggtatt

SEQ ID NO: 20690 - RNA, 20 nt, synthetic construct
  source 1..20: mol_type = other RNA
agtatcccagatggggattg

SEQ ID NO: 20691 - RNA, 20 nt, synthetic construct
  source 1..20: mol_type = other RNA
agtatcctttcaaggtatct

SEQ ID NO: 20692 - RNA, 20 nt, synthetic construct
  source 1..20: mol_type = other RNA
agtatcgtgagactattatg

SEQ ID NO: 20693 - RNA, 20 nt, synthetic construct
  source 1..20: mol_type = other RNA
agtatctaggagtacagtgc

SEQ ID NO: 20694 - RNA, 20 nt, synthetic construct
  source 1..20: mol_type = other RNA
agtatctcagtcataatttg

SEQ ID NO: 20695 - RNA, 20 nt, synthetic construct
  source 1..20: mol_type = other RNA
agtatctcatgcttaggatc

SEQ ID NO: 20696 - RNA, 20 nt, synthetic construct
  source 1..20: mol_type = other RNA
agtatctccctgtgcgtgaa

SEQ ID NO: 20697 - RNA, 20 nt, synthetic construct
  source 1..20: mol_type = other RNA
agtatctcctttccttcctt

SEQ ID NO: 20698 - RNA, 20 nt, synthetic construct
  source 1..20: mol_type = other RNA
agtatctcggtcattctgga

SEQ ID NO: 20699 - RNA, 20 nt, synthetic construct
  source 1..20: mol_type = other RNA
agtatctggtgctggcagcc

SEQ ID NO: 20700 - RNA, 20 nt, synthetic construct
  source 1..20: mol_type = other RNA
agtatctggtgttgcttgct

SEQ ID NO: 20701 - RNA, 20 nt, synthetic construct
  source 1..20: mol_type = other RNA
agtatcttgaagaaaccaag

SEQ ID NO: 20702 - RNA, 20 nt, synthetic construct
  source 1..20: mol_type = other RNA
agtatcttttcatgttgacc

SEQ ID NO: 20703 - RNA, 20 nt, synthetic construct
  source 1..20: mol_type = other RNA
agtatctttttcagcagcag

SEQ ID NO: 20704 - RNA, 20 nt, synthetic construct
  source 1..20: mol_type = other RNA
agtatgaatgcacgtgaagc

SEQ ID NO: 20705 - RNA, 20 nt, synthetic construct
  source 1..20: mol_type = other RNA
agtatgacctcctcccactt

SEQ ID NO: 20706 - RNA, 20 nt, synthetic construct
  source 1..20: mol_type = other RNA
agtatgagaaatgtctggtt

SEQ ID NO: 20707 - RNA, 20 nt, synthetic construct
  source 1..20: mol_type = other RNA
agtatgagccactagtcagt

SEQ ID NO: 20708 - RNA, 20 nt, synthetic construct
  source 1..20: mol_type = other RNA
agtatgagtcttccgtctca

SEQ ID NO: 20709 - RNA, 20 nt, synthetic construct
  source 1..20: mol_type = other RNA
agtatgatgccactcaaaac

SEQ ID NO: 20710 - RNA, 20 nt, synthetic construct
  source 1..20: mol_type = other RNA
agtatgcacaaataattaac

SEQ ID NO: 20711 - RNA, 20 nt, synthetic construct
  source 1..20: mol_type = other RNA
agtatgcagaaaccagttgt

SEQ ID NO: 20712 - RNA, 20 nt, synthetic construct
  source 1..20: mol_type = other RNA
agtatgcatagatcacaagg

SEQ ID NO: 20713 - RNA, 20 nt, synthetic construct
  source 1..20: mol_type = other RNA
agtatgcatagcagggtcat

SEQ ID NO: 20714 - RNA, 20 nt, synthetic construct
  source 1..20: mol_type = other RNA
agtatgcggggtttcagcac

SEQ ID NO: 20715 - RNA, 20 nt, synthetic construct
  source 1..20: mol_type = other RNA
agtatgctgtttacattaga

SEQ ID NO: 20716 - RNA, 20 nt, synthetic construct
  source 1..20: mol_type = other RNA
agtatgggtctccattttgg

SEQ ID NO: 20717 - RNA, 20 nt, synthetic construct
  source 1..20: mol_type = other RNA
agtatggttgaagaaagtag

SEQ ID NO: 20718 - RNA, 20 nt, synthetic construct
  source 1..20: mol_type = other RNA
agtatgtaattacaggggac

SEQ ID NO: 20719 - RNA, 20 nt, synthetic construct
  source 1..20: mol_type = other RNA
agtatgtaggaaactttgca

SEQ ID NO: 20720 - RNA, 20 nt, synthetic construct
  source 1..20: mol_type = other RNA
agtatgtcagactcattgcc

SEQ ID NO: 20721 - RNA, 20 nt, synthetic construct
  source 1..20: mol_type = other RNA
agtatgtgccatttttataa

SEQ ID NO: 20722 - RNA, 20 nt, synthetic construct
  source 1..20: mol_type = other RNA
agtatgtgtctctgacatga

SEQ ID NO: 20723 - RNA, 20 nt, synthetic construct
  source 1..20: mol_type = other RNA
agtattaaaagcacaagcac

SEQ ID NO: 20724 - RNA, 20 nt, synthetic construct
  source 1..20: mol_type = other RNA
agtattacacagaaagcctc

SEQ ID NO: 20725 - RNA, 20 nt, synthetic construct
  source 1..20: mol_type = other RNA
agtattacctatgaataggt

SEQ ID NO: 20726 - RNA, 20 nt, synthetic construct
  source 1..20: mol_type = other RNA
agtattacctcccatgcatt

SEQ ID NO: 20727 - RNA, 20 nt, synthetic construct
  source 1..20: mol_type = other RNA
agtattcaagtttcaccctg

SEQ ID NO: 20728 - RNA, 20 nt, synthetic construct
  source 1..20: mol_type = other RNA
agtattcaggacagattaaa

SEQ ID NO: 20729 - RNA, 20 nt, synthetic construct
  source 1..20: mol_type = other RNA
agtattccatggtatgtgcc

SEQ ID NO: 20730 - RNA, 20 nt, synthetic construct
  source 1..20: mol_type = other RNA
agtattcccaagatcataag

SEQ ID NO: 20731 - RNA, 20 nt, synthetic construct
  source 1..20: mol_type = other RNA
agtattctagttctagctct

SEQ ID NO: 20732 - RNA, 20 nt, synthetic construct
  source 1..20: mol_type = other RNA
agtattgaactgttacttga

SEQ ID NO: 20733 - RNA, 20 nt, synthetic construct
  source 1..20: mol_type = other RNA
agtattgatttgaccatggg

SEQ ID NO: 20734 - RNA, 20 nt, synthetic construct
  source 1..20: mol_type = other RNA
agtattgcattgaatctgta

SEQ ID NO: 20735 - RNA, 20 nt, synthetic construct
  source 1..20: mol_type = other RNA
agtattgccaggtttgtgct

SEQ ID NO: 20736 - RNA, 20 nt, synthetic construct
  source 1..20: mol_type = other RNA
agtattgtcttctaaccctc

SEQ ID NO: 20737 - RNA, 20 nt, synthetic construct
  source 1..20: mol_type = other RNA
agtattgtgctgaaaccccg

SEQ ID NO: 20738 - RNA, 20 nt, synthetic construct
  source 1..20: mol_type = other RNA
agtattgttaactgtagaga

SEQ ID NO: 20739 - RNA, 20 nt, synthetic construct
  source 1..20: mol_type = other RNA
agtattgtttcaatttagtc

SEQ ID NO: 20740 - RNA, 20 nt, synthetic construct
  source 1..20: mol_type = other RNA
agtatttcatgtacttgtaa

SEQ ID NO: 20741 - RNA, 20 nt, synthetic construct
  source 1..20: mol_type = other RNA
agtatttccacgggtaaaaa

SEQ ID NO: 20742 - RNA, 20 nt, synthetic construct
  source 1..20: mol_type = other RNA
agtatttctcatctgtcact

SEQ ID NO: 20743 - RNA, 20 nt, synthetic construct
  source 1..20: mol_type = other RNA
agtattttgttgacatcctt

SEQ ID NO: 20744 - RNA, 20 nt, synthetic construct
  source 1..20: mol_type = other RNA
agtatttttgagcttttcaa

SEQ ID NO: 20745 - RNA, 20 nt, synthetic construct
  source 1..20: mol_type = other RNA
agtcaaaaccaaagaaaggg

SEQ ID NO: 20746 - RNA, 20 nt, synthetic construct
  source 1..20: mol_type = other RNA
agtcaaagcctgtggaggca

SEQ ID NO: 20747 - RNA, 20 nt, synthetic construct
  source 1..20: mol_type = other RNA
agtcaacacactagccactg

SEQ ID NO: 20748 - RNA, 20 nt, synthetic construct
  source 1..20: mol_type = other RNA
agtcaacaccaagcaacact

SEQ ID NO: 20749 - RNA, 20 nt, synthetic construct
  source 1..20: mol_type = other RNA
agtcaacacttttccagtct

SEQ ID NO: 20750 - RNA, 20 nt, synthetic construct
  source 1..20: mol_type = other RNA
agtcaactaatcaaacatac

SEQ ID NO: 20751 - RNA, 20 nt, synthetic construct
  source 1..20: mol_type = other RNA
agtcaagatgaatctgcaac

SEQ ID NO: 20752 - RNA, 20 nt, synthetic construct
  source 1..20: mol_type = other RNA
agtcaagtaacagttcaata

SEQ ID NO: 20753 - RNA, 20 nt, synthetic construct
  source 1..20: mol_type = other RNA
agtcaatacaaaaattgaga

SEQ ID NO: 20754 - RNA, 20 nt, synthetic construct
  source 1..20: mol_type = other RNA
agtcaatgcaatgcgtgtga

SEQ ID NO: 20755 - RNA, 20 nt, synthetic construct
  source 1..20: mol_type = other RNA
agtcaatttcagatctctga

SEQ ID NO: 20756 - RNA, 20 nt, synthetic construct
  source 1..20: mol_type = other RNA
agtcacaaaaagacaagtac

SEQ ID NO: 20757 - RNA, 20 nt, synthetic construct
  source 1..20: mol_type = other RNA
agtcacaaagctttaaactg

SEQ ID NO: 20758 - RNA, 20 nt, synthetic construct
  source 1..20: mol_type = other RNA
agtcacacaccactacaccc

SEQ ID NO: 20759 - RNA, 20 nt, synthetic construct
  source 1..20: mol_type = other RNA
agtcacagtgaattctgact

SEQ ID NO: 20760 - RNA, 20 nt, synthetic construct
  source 1..20: mol_type = other RNA
agtcacattctagtgatggg

SEQ ID NO: 20761 - RNA, 20 nt, synthetic construct
  source 1..20: mol_type = other RNA
agtcacatttgctttactac

SEQ ID NO: 20762 - RNA, 20 nt, synthetic construct
  source 1..20: mol_type = other RNA
agtcaccaaacgtttagatg

SEQ ID NO: 20763 - RNA, 20 nt, synthetic construct
  source 1..20: mol_type = other RNA
agtcaccctacagactcaat

SEQ ID NO: 20764 - RNA, 20 nt, synthetic construct
  source 1..20: mol_type = other RNA
agtcactaaaaatcagatta

SEQ ID NO: 20765 - RNA, 20 nt, synthetic construct
  source 1..20: mol_type = other RNA
agtcactccatttgtggcat

SEQ ID NO: 20766 - RNA, 20 nt, synthetic construct
  source 1..20: mol_type = other RNA
agtcactgtggaaaacagtt

SEQ ID NO: 20767 - RNA, 20 nt, synthetic construct
  source 1..20: mol_type = other RNA
agtcacttgacaaaaattaa

SEQ ID NO: 20768 - RNA, 20 nt, synthetic construct
  source 1..20: mol_type = other RNA
agtcactttttattctgttc

SEQ ID NO: 20769 - RNA, 20 nt, synthetic construct
  source 1..20: mol_type = other RNA
agtcagaattcactgtgact

SEQ ID NO: 20770 - RNA, 20 nt, synthetic construct
  source 1..20: mol_type = other RNA
agtcagacacactagctgac

SEQ ID NO: 20771 - RNA, 20 nt, synthetic construct
  source 1..20: mol_type = other RNA
agtcagactaagacactagc

SEQ ID NO: 20772 - RNA, 20 nt, synthetic construct
  source 1..20: mol_type = other RNA
agtcagagattttcccaaag

SEQ ID NO: 20773 - RNA, 20 nt, synthetic construct
  source 1..20: mol_type = other RNA
agtcagaggagcagttactc

SEQ ID NO: 20774 - RNA, 20 nt, synthetic construct
  source 1..20: mol_type = other RNA
agtcagcaactcttggccat

SEQ ID NO: 20775 - RNA, 20 nt, synthetic construct
  source 1..20: mol_type = other RNA
agtcagcacactcttaataa

SEQ ID NO: 20776 - RNA, 20 nt, synthetic construct
  source 1..20: mol_type = other RNA
agtcagcacttctgatatcc

SEQ ID NO: 20777 - RNA, 20 nt, synthetic construct
  source 1..20: mol_type = other RNA
agtcagcctgggcacacgcc

SEQ ID NO: 20778 - RNA, 20 nt, synthetic construct
  source 1..20: mol_type = other RNA
agtcagctaattttctaatc

SEQ ID NO: 20779 - RNA, 20 nt, synthetic construct
  source 1..20: mol_type = other RNA
agtcagctaggcgtagtatc

SEQ ID NO: 20780 - RNA, 20 nt, synthetic construct
  source 1..20: mol_type = other RNA
agtcagtaaaaaaggaccat

SEQ ID NO: 20781 - RNA, 20 nt, synthetic construct
  source 1..20: mol_type = other RNA
agtcagtagaggccgagggt

SEQ ID NO: 20782 - RNA, 20 nt, synthetic construct
  source 1..20: mol_type = other RNA
agtcagtatatttactgctt

SEQ ID NO: 20783 - RNA, 20 nt, synthetic construct
  source 1..20: mol_type = other RNA
agtcagtgaagatgctgaac

SEQ ID NO: 20784 - RNA, 20 nt, synthetic construct
  source 1..20: mol_type = other RNA
agtcagtgatggaggtggaa

SEQ ID NO: 20785 - RNA, 20 nt, synthetic construct
  source 1..20: mol_type = other RNA
agtcagttaacagtgctgtg

SEQ ID NO: 20786 - RNA, 20 nt, synthetic construct
  source 1..20: mol_type = other RNA
agtcagttacagcatttcag

SEQ ID NO: 20787 - RNA, 20 nt, synthetic construct
  source 1..20: mol_type = other RNA
agtcagttctctgccccggg

SEQ ID NO: 20788 - RNA, 20 nt, synthetic construct
  source 1..20: mol_type = other RNA
agtcagttgtttacttgggt

SEQ ID NO: 20789 - RNA, 20 nt, synthetic construct
  source 1..20: mol_type = other RNA
agtcataatttgtgtccttt

SEQ ID NO: 20790 - RNA, 20 nt, synthetic construct
  source 1..20: mol_type = other RNA
agtcatagcagtgggaagtg

SEQ ID NO: 20791 - RNA, 20 nt, synthetic construct
  source 1..20: mol_type = other RNA
agtcatcaaaggaaggaatt

SEQ ID NO: 20792 - RNA, 20 nt, synthetic construct
  source 1..20: mol_type = other RNA
agtcatcacagtccaggaac

SEQ ID NO: 20793 - RNA, 20 nt, synthetic construct
  source 1..20: mol_type = other RNA
agtcatcattattagcaaac

SEQ ID NO: 20794 - RNA, 20 nt, synthetic construct
  source 1..20: mol_type = other RNA
agtcatccactgcacagtat

SEQ ID NO: 20795 - RNA, 20 nt, synthetic construct
  source 1..20: mol_type = other RNA
agtcatcctcaacaagagag

SEQ ID NO: 20796 - RNA, 20 nt, synthetic construct
  source 1..20: mol_type = other RNA
agtcatctggtcctgagctt

SEQ ID NO: 20797 - RNA, 20 nt, synthetic construct
  source 1..20: mol_type = other RNA
agtcatgacctgctttcttg

SEQ ID NO: 20798 - RNA, 20 nt, synthetic construct
  source 1..20: mol_type = other RNA
agtcatgtggggactttgtg

SEQ ID NO: 20799 - RNA, 20 nt, synthetic construct
  source 1..20: mol_type = other RNA
agtcattcaggtctatgtga

SEQ ID NO: 20800 - RNA, 20 nt, synthetic construct
  source 1..20: mol_type = other RNA
agtcattccgctaaacattt

SEQ ID NO: 20801 - RNA, 20 nt, synthetic construct
  source 1..20: mol_type = other RNA
agtcattgaaactcaatgtt

SEQ ID NO: 20802 - RNA, 20 nt, synthetic construct
  source 1..20: mol_type = other RNA
agtcatttgagcccaggagg

SEQ ID NO: 20803 - RNA, 20 nt, synthetic construct
  source 1..20: mol_type = other RNA
agtccaaccaatcgcagggc

SEQ ID NO: 20804 - RNA, 20 nt, synthetic construct
  source 1..20: mol_type = other RNA
agtccacagatctttttgtg

SEQ ID NO: 20805 - RNA, 20 nt, synthetic construct
  source 1..20: mol_type = other RNA
agtccactcacctgtcatgt

SEQ ID NO: 20806 - RNA, 20 nt, synthetic construct
  source 1..20: mol_type = other RNA
agtccactttccatcttagg

SEQ ID NO: 20807 - RNA, 20 nt, synthetic construct
  source 1..20: mol_type = other RNA
agtccagaggtgagcttttt

SEQ ID NO: 20808 - RNA, 20 nt, synthetic construct
  source 1..20: mol_type = other RNA
agtccagatattatcctcca

SEQ ID NO: 20809 - RNA, 20 nt, synthetic construct
  source 1..20: mol_type = other RNA
agtccagcaccacccttgat

SEQ ID NO: 20810 - RNA, 20 nt, synthetic construct
  source 1..20: mol_type = other RNA
agtccagctttctaattctg

SEQ ID NO: 20811 - RNA, 20 nt, synthetic construct
  source 1..20: mol_type = other RNA
agtccaggaacttacagtaa

SEQ ID NO: 20812 - RNA, 20 nt, synthetic construct
  source 1..20: mol_type = other RNA
agtccagtcctgctaacacc

SEQ ID NO: 20813 - RNA, 20 nt, synthetic construct
  source 1..20: mol_type = other RNA
agtccatgaaacttatttcc

SEQ ID NO: 20814 - RNA, 20 nt, synthetic construct
  source 1..20: mol_type = other RNA
agtccatgaagaaaacactc

SEQ ID NO: 20815 - RNA, 20 nt, synthetic construct
  source 1..20: mol_type = other RNA
agtcccaaatgggagcatgc

SEQ ID NO: 20816 - RNA, 20 nt, synthetic construct
  source 1..20: mol_type = other RNA
agtcccactgacagtggaca

SEQ ID NO: 20817 - RNA, 20 nt, synthetic construct
  source 1..20: mol_type = other RNA
agtcccagttcaaggtgtta

SEQ ID NO: 20818 - RNA, 20 nt, synthetic construct
  source 1..20: mol_type = other RNA
agtcccatcttccatacgaa

SEQ ID NO: 20819 - RNA, 20 nt, synthetic construct
  source 1..20: mol_type = other RNA
agtccccaactgcaaaactt

SEQ ID NO: 20820 - RNA, 20 nt, synthetic construct
  source 1..20: mol_type = other RNA
agtccccacatgactggcca

SEQ ID NO: 20821 - RNA, 20 nt, synthetic construct
  source 1..20: mol_type = other RNA
agtccccatctccacaaaaa

SEQ ID NO: 20822 - RNA, 20 nt, synthetic construct
  source 1..20: mol_type = other RNA
agtccccggtctttcctgat

SEQ ID NO: 20823 - RNA, 20 nt, synthetic construct
  source 1..20: mol_type = other RNA
agtcccctagtggatgctgg

SEQ ID NO: 20824 - RNA, 20 nt, synthetic construct
  source 1..20: mol_type = other RNA
agtcccctgtaattacatac

SEQ ID NO: 20825 - RNA, 20 nt, synthetic construct
  source 1..20: mol_type = other RNA
agtcccggaagctgggctag

SEQ ID NO: 20826 - RNA, 20 nt, synthetic construct
  source 1..20: mol_type = other RNA
agtccctaacagtctcgtga

SEQ ID NO: 20827 - RNA, 20 nt, synthetic construct
  source 1..20: mol_type = other RNA
agtccctagtgtctccatac

SEQ ID NO: 20828 - RNA, 20 nt, synthetic construct
  source 1..20: mol_type = other RNA
agtccctcaccttctgctgg

SEQ ID NO: 20829 - RNA, 20 nt, synthetic construct
  source 1..20: mol_type = other RNA
agtccctcctttctagaatg

SEQ ID NO: 20830 - RNA, 20 nt, synthetic construct
  source 1..20: mol_type = other RNA
agtccctgctttcagttctt

SEQ ID NO: 20831 - RNA, 20 nt, synthetic construct
  source 1..20: mol_type = other RNA
agtcccttgcctgacagcaa

SEQ ID NO: 20832 - RNA, 20 nt, synthetic construct
  source 1..20: mol_type = other RNA
agtccgcggctgggctttct

SEQ ID NO: 20833 - RNA, 20 nt, synthetic construct
  source 1..20: mol_type = other RNA
agtccgtgcatgcctctgtt

SEQ ID NO: 20834 - RNA, 20 nt, synthetic construct
  source 1..20: mol_type = other RNA
agtcctcaatcatgtcaaga

SEQ ID NO: 20835 - RNA, 20 nt, synthetic construct
  source 1..20: mol_type = other RNA
agtcctctactttcacataa

SEQ ID NO: 20836 - RNA, 20 nt, synthetic construct
  source 1..20: mol_type = other RNA
agtcctctcactccaaagca

SEQ ID NO: 20837 - RNA, 20 nt, synthetic construct
  source 1..20: mol_type = other RNA
agtcctgaaaattccttccc

SEQ ID NO: 20838 - RNA, 20 nt, synthetic construct
  source 1..20: mol_type = other RNA
agtcctgagggtgagaccac

SEQ ID NO: 20839 - RNA, 20 nt, synthetic construct
  source 1..20: mol_type = other RNA
agtcctgccttggcctcccc

SEQ ID NO: 20840 - RNA, 20 nt, synthetic construct
  source 1..20: mol_type = other RNA
agtcctgctaacaccttgaa

SEQ ID NO: 20841 - RNA, 20 nt, synthetic construct
  source 1..20: mol_type = other RNA
agtcctgtcagtttctgatt

SEQ ID NO: 20842 - RNA, 20 nt, synthetic construct
  source 1..20: mol_type = other RNA
agtcctgtgtttctgctatt

SEQ ID NO: 20843 - RNA, 20 nt, synthetic construct
  source 1..20: mol_type = other RNA
agtcctgttcttttgtaatc

SEQ ID NO: 20844 - RNA, 20 nt, synthetic construct
  source 1..20: mol_type = other RNA
agtccttaccactgaagtgt

SEQ ID NO: 20845 - RNA, 20 nt, synthetic construct
  source 1..20: mol_type = other RNA
agtccttccagtatgatgcc

SEQ ID NO: 20846 - RNA, 20 nt, synthetic construct
  source 1..20: mol_type = other RNA
agtccttgtgatctatgcat

SEQ ID NO: 20847 - RNA, 20 nt, synthetic construct
  source 1..20: mol_type = other RNA
agtcctttccagaggttctt

SEQ ID NO: 20848 - RNA, 20 nt, synthetic construct
  source 1..20: mol_type = other RNA
agtcctttcttggtctgcag

SEQ ID NO: 20849 - RNA, 20 nt, synthetic construct
  source 1..20: mol_type = other RNA
agtcctttgggaggtcaagg

SEQ ID NO: 20850 - RNA, 20 nt, synthetic construct
  source 1..20: mol_type = other RNA
agtcctttgtgtcaagtaca

SEQ ID NO: 20851 - RNA, 20 nt, synthetic construct
  source 1..20: mol_type = other RNA
agtcgccatacctggtcctt

SEQ ID NO: 20852 - RNA, 20 nt, synthetic construct
  source 1..20: mol_type = other RNA
agtcgcttgaacctgaaaaa

SEQ ID NO: 20853 - RNA, 20 nt, synthetic construct
  source 1..20: mol_type = other RNA
agtcggttcttcaccgtgca

SEQ ID NO: 20854 - RNA, 20 nt, synthetic construct
  source 1..20: mol_type = other RNA
agtctaaccattaacagctc

SEQ ID NO: 20855 - RNA, 20 nt, synthetic construct
  source 1..20: mol_type = other RNA
agtctaggaaaagacttgag

SEQ ID NO: 20856 - RNA, 20 nt, synthetic construct
  source 1..20: mol_type = other RNA
agtctagtccatgaagaaaa

SEQ ID NO: 20857 - RNA, 20 nt, synthetic construct
  source 1..20: mol_type = other RNA
agtctatctttgggaaaatc

SEQ ID NO: 20858 - RNA, 20 nt, synthetic construct
  source 1..20: mol_type = other RNA
agtctatgctcttggtttct

SEQ ID NO: 20859 - RNA, 20 nt, synthetic construct
  source 1..20: mol_type = other RNA
agtctatttctgaacaaata

SEQ ID NO: 20860 - RNA, 20 nt, synthetic construct
  source 1..20: mol_type = other RNA
agtctcaacctactttaaat

SEQ ID NO: 20861 - RNA, 20 nt, synthetic construct
  source 1..20: mol_type = other RNA
agtctcacgatactttttat

SEQ ID NO: 20862 - RNA, 20 nt, synthetic construct
  source 1..20: mol_type = other RNA
agtctcatctgtcaaaaaga

SEQ ID NO: 20863 - RNA, 20 nt, synthetic construct
  source 1..20: mol_type = other RNA
agtctcatgcaattccccag

SEQ ID NO: 20864 - RNA, 20 nt, synthetic construct
  source 1..20: mol_type = other RNA
agtctccaatcctcagcccc

SEQ ID NO: 20865 - RNA, 20 nt, synthetic construct
  source 1..20: mol_type = other RNA
agtctccatacaaggagacc

SEQ ID NO: 20866 - RNA, 20 nt, synthetic construct
  source 1..20: mol_type = other RNA
agtctcccccaggtggttct

SEQ ID NO: 20867 - RNA, 20 nt, synthetic construct
  source 1..20: mol_type = other RNA
agtctccctaaccaggcccg

SEQ ID NO: 20868 - RNA, 20 nt, synthetic construct
  source 1..20: mol_type = other RNA
agtctcctatattgtcaatg

SEQ ID NO: 20869 - RNA, 20 nt, synthetic construct
  source 1..20: mol_type = other RNA
agtctcgaaaaggaatggaa

SEQ ID NO: 20870 - RNA, 20 nt, synthetic construct
  source 1..20: mol_type = other RNA
agtctcgaccccctgggctc

SEQ ID NO: 20871 - RNA, 20 nt, synthetic construct
  source 1..20: mol_type = other RNA
agtctcgtgaatttggtatt

SEQ ID NO: 20872 - RNA, 20 nt, synthetic construct
  source 1..20: mol_type = other RNA
agtctctacccagcactctg

SEQ ID NO: 20873 - RNA, 20 nt, synthetic construct
  source 1..20: mol_type = other RNA
agtctctgcaacatttgttg

SEQ ID NO: 20874 - RNA, 20 nt, synthetic construct
  source 1..20: mol_type = other RNA
agtctctgcagagcaggctc

SEQ ID NO: 20875 - RNA, 20 nt, synthetic construct
  source 1..20: mol_type = other RNA
agtctctgctcactgcaacc

SEQ ID NO: 20876 - RNA, 20 nt, synthetic construct
  source 1..20: mol_type = other RNA
agtctcttaagaccacaagg

SEQ ID NO: 20877 - RNA, 20 nt, synthetic construct
  source 1..20: mol_type = other RNA
agtctcttcctgtatatctc

SEQ ID NO: 20878 - RNA, 20 nt, synthetic construct
  source 1..20: mol_type = other RNA
agtctgaaagcttctgagca

SEQ ID NO: 20879 - RNA, 20 nt, synthetic construct
  source 1..20: mol_type = other RNA
agtctgacatactgtcacag

SEQ ID NO: 20880 - RNA, 20 nt, synthetic construct
  source 1..20: mol_type = other RNA
agtctgacttctctcagagg

SEQ ID NO: 20881 - RNA, 20 nt, synthetic construct
  source 1..20: mol_type = other RNA
agtctgcagaccaagaaagg

SEQ ID NO: 20882 - RNA, 20 nt, synthetic construct
  source 1..20: mol_type = other RNA
agtctgcaggcagaatgtga

SEQ ID NO: 20883 - RNA, 20 nt, synthetic construct
  source 1..20: mol_type = other RNA
agtctgcccatcctatctaa

SEQ ID NO: 20884 - RNA, 20 nt, synthetic construct
  source 1..20: mol_type = other RNA
agtctgtaagcacctgtata

SEQ ID NO: 20885 - RNA, 20 nt, synthetic construct
  source 1..20: mol_type = other RNA
agtctgtagcttcacgtgca

SEQ ID NO: 20886 - RNA, 20 nt, synthetic construct
  source 1..20: mol_type = other RNA
agtctgtagggtgactagtg

SEQ ID NO: 20887 - RNA, 20 nt, synthetic construct
  source 1..20: mol_type = other RNA
agtctgtcctcgtaaaagct

SEQ ID NO: 20888 - RNA, 20 nt, synthetic construct
  source 1..20: mol_type = other RNA
agtctgtgctctgtatttaa

SEQ ID NO: 20889 - RNA, 20 nt, synthetic construct
  source 1..20: mol_type = other RNA
agtctgtgcttaaggaaatg

SEQ ID NO: 20890 - RNA, 20 nt, synthetic construct
  source 1..20: mol_type = other RNA
agtctgtttgccatcttcaa

SEQ ID NO: 20891 - RNA, 20 nt, synthetic construct
  source 1..20: mol_type = other RNA
agtcttaaccattgagccaa

SEQ ID NO: 20892 - RNA, 20 nt, synthetic construct
  source 1..20: mol_type = other RNA
agtcttagctcttaagctta

SEQ ID NO: 20893 - RNA, 20 nt, synthetic construct
  source 1..20: mol_type = other RNA
agtcttcaggtctctctgaa

SEQ ID NO: 20894 - RNA, 20 nt, synthetic construct
  source 1..20: mol_type = other RNA
agtcttccaaaatattgaag

SEQ ID NO: 20895 - RNA, 20 nt, synthetic construct
  source 1..20: mol_type = other RNA
agtcttccaattgcagaaaa

SEQ ID NO: 20896 - RNA, 20 nt, synthetic construct
  source 1..20: mol_type = other RNA
agtcttccattttagatcaa

SEQ ID NO: 20897 - RNA, 20 nt, synthetic construct
  source 1..20: mol_type = other RNA
agtcttccgtctcaagattg

SEQ ID NO: 20898 - RNA, 20 nt, synthetic construct
  source 1..20: mol_type = other RNA
agtcttctactgtgaattca

SEQ ID NO: 20899 - RNA, 20 nt, synthetic construct
  source 1..20: mol_type = other RNA
agtcttctcagatctgttgc

SEQ ID NO: 20900 - RNA, 20 nt, synthetic construct
  source 1..20: mol_type = other RNA
agtcttctcatacagatttt

SEQ ID NO: 20901 - RNA, 20 nt, synthetic construct
  source 1..20: mol_type = other RNA
agtcttcttctaagctaaga

SEQ ID NO: 20902 - RNA, 20 nt, synthetic construct
  source 1..20: mol_type = other RNA
agtcttgctggaagttggcc

SEQ ID NO: 20903 - RNA, 20 nt, synthetic construct
  source 1..20: mol_type = other RNA
agtcttggtagtttgcacgt

SEQ ID NO: 20904 - RNA, 20 nt, synthetic construct
  source 1..20: mol_type = other RNA
agtcttgtcataacagtatt

SEQ ID NO: 20905 - RNA, 20 nt, synthetic construct
  source 1..20: mol_type = other RNA
agtcttgtttacccagtgtg

SEQ ID NO: 20906 - RNA, 20 nt, synthetic construct
  source 1..20: mol_type = other RNA
agtctttggcccattttcga

SEQ ID NO: 20907 - RNA, 20 nt, synthetic construct
  source 1..20: mol_type = other RNA
agtctttgggtaatttatct

SEQ ID NO: 20908 - RNA, 20 nt, synthetic construct
  source 1..20: mol_type = other RNA
agtctttggtgatcctaagc

SEQ ID NO: 20909 - RNA, 20 nt, synthetic construct
  source 1..20: mol_type = other RNA
agtcttttcctaccctgagg

SEQ ID NO: 20910 - RNA, 20 nt, synthetic construct
  source 1..20: mol_type = other RNA
agtcttttcctagactgcca

SEQ ID NO: 20911 - RNA, 20 nt, synthetic construct
  source 1..20: mol_type = other RNA
agtgaaaaatgacctaaaat

SEQ ID NO: 20912 - RNA, 20 nt, synthetic construct
  source 1..20: mol_type = other RNA
agtgaaaacacaaactgcag

SEQ ID NO: 20913 - RNA, 20 nt, synthetic construct
  source 1..20: mol_type = other RNA
agtgaaaactaaggtcaaga

SEQ ID NO: 20914 - RNA, 20 nt, synthetic construct
  source 1..20: mol_type = other RNA
agtgaaaagaaacaagtgaa

SEQ ID NO: 20915 - RNA, 20 nt, synthetic construct
  source 1..20: mol_type = other RNA
agtgaaaaggcaaaccacac

SEQ ID NO: 20916 - RNA, 20 nt, synthetic construct
  source 1..20: mol_type = other RNA
agtgaaacaataaatttctg

SEQ ID NO: 20917 - RNA, 20 nt, synthetic construct
  source 1..20: mol_type = other RNA
agtgaaactctggctcagaa

SEQ ID NO: 20918 - RNA, 20 nt, synthetic construct
  source 1..20: mol_type = other RNA
agtgaaaggcaaaggaaaaa

SEQ ID NO: 20919 - RNA, 20 nt, synthetic construct
  source 1..20: mol_type = other RNA
agtgaaagtctccctaacca

SEQ ID NO: 20920 - RNA, 20 nt, synthetic construct
  source 1..20: mol_type = other RNA
agtgaaatagttggtcagaa

SEQ ID NO: 20921 - RNA, 20 nt, synthetic construct
  source 1..20: mol_type = other RNA
agtgaaatgatctttgaata

SEQ ID NO: 20922 - RNA, 20 nt, synthetic construct
  source 1..20: mol_type = other RNA
agtgaaatgatttcaagtaa

SEQ ID NO: 20923 - RNA, 20 nt, synthetic construct
  source 1..20: mol_type = other RNA
agtgaacaggcaaccttggg

SEQ ID NO: 20924 - RNA, 20 nt, synthetic construct
  source 1..20: mol_type = other RNA
agtgaacatgggaatgcata

SEQ ID NO: 20925 - RNA, 20 nt, synthetic construct
  source 1..20: mol_type = other RNA
agtgaaccaaaaaccacatt

SEQ ID NO: 20926 - RNA, 20 nt, synthetic construct
  source 1..20: mol_type = other RNA
agtgaactccagtctgggca

SEQ ID NO: 20927 - RNA, 20 nt, synthetic construct
  source 1..20: mol_type = other RNA
agtgaagaaacctttctcaa

SEQ ID NO: 20928 - RNA, 20 nt, synthetic construct
  source 1..20: mol_type = other RNA
agtgaagatgctgaacttgt

SEQ ID NO: 20929 - RNA, 20 nt, synthetic construct
  source 1..20: mol_type = other RNA
agtgaagcagagagagaaga

SEQ ID NO: 20930 - RNA, 20 nt, synthetic construct
  source 1..20: mol_type = other RNA
agtgaagcccagagaggcta

SEQ ID NO: 20931 - RNA, 20 nt, synthetic construct
  source 1..20: mol_type = other RNA
agtgaagctggacccttacc

SEQ ID NO: 20932 - RNA, 20 nt, synthetic construct
  source 1..20: mol_type = other RNA
agtgaagcttcaaaccacta

SEQ ID NO: 20933 - RNA, 20 nt, synthetic construct
  source 1..20: mol_type = other RNA
agtgaagtcaagatgaatct

SEQ ID NO: 20934 - RNA, 20 nt, synthetic construct
  source 1..20: mol_type = other RNA
agtgaagtcaatttcagatc

SEQ ID NO: 20935 - RNA, 20 nt, synthetic construct
  source 1..20: mol_type = other RNA
agtgaagtcatctggtcctg

SEQ ID NO: 20936 - RNA, 20 nt, synthetic construct
  source 1..20: mol_type = other RNA
agtgaagtcccatcttccat

SEQ ID NO: 20937 - RNA, 20 nt, synthetic construct
  source 1..20: mol_type = other RNA
agtgaatatagctaagaaac

SEQ ID NO: 20938 - RNA, 20 nt, synthetic construct
  source 1..20: mol_type = other RNA
agtgaatatcatttgaatga

SEQ ID NO: 20939 - RNA, 20 nt, synthetic construct
  source 1..20: mol_type = other RNA
agtgaatcactacagcatat

SEQ ID NO: 20940 - RNA, 20 nt, synthetic construct
  source 1..20: mol_type = other RNA
agtgaatgagaccaaatgca

SEQ ID NO: 20941 - RNA, 20 nt, synthetic construct
  source 1..20: mol_type = other RNA
agtgaatggggtaattttgg

SEQ ID NO: 20942 - RNA, 20 nt, synthetic construct
  source 1..20: mol_type = other RNA
agtgaattcacagtagaaga

SEQ ID NO: 20943 - RNA, 20 nt, synthetic construct
  source 1..20: mol_type = other RNA
agtgaattctgacttagtga

SEQ ID NO: 20944 - RNA, 20 nt, synthetic construct
  source 1..20: mol_type = other RNA
agtgacacctgaggggtctt

SEQ ID NO: 20945 - RNA, 20 nt, synthetic construct
  source 1..20: mol_type = other RNA
agtgacagatgagaaatact

SEQ ID NO: 20946 - RNA, 20 nt, synthetic construct
  source 1..20: mol_type = other RNA
agtgacagctgagtagcgct

SEQ ID NO: 20947 - RNA, 20 nt, synthetic construct
  source 1..20: mol_type = other RNA
agtgacagttctgtgaattt

SEQ ID NO: 20948 - RNA, 20 nt, synthetic construct
  source 1..20: mol_type = other RNA
agtgacatatgccggctgtt

SEQ ID NO: 20949 - RNA, 20 nt, synthetic construct
  source 1..20: mol_type = other RNA
agtgaccacagtttgaaact

SEQ ID NO: 20950 - RNA, 20 nt, synthetic construct
  source 1..20: mol_type = other RNA
agtgaccagtgtgatggggg

SEQ ID NO: 20951 - RNA, 20 nt, synthetic construct
  source 1..20: mol_type = other RNA
agtgaccctgagtccagagg

SEQ ID NO: 20952 - RNA, 20 nt, synthetic construct
  source 1..20: mol_type = other RNA
agtgaccctttgaagtatgt

SEQ ID NO: 20953 - RNA, 20 nt, synthetic construct
  source 1..20: mol_type = other RNA
agtgactccaagcacacagt

SEQ ID NO: 20954 - RNA, 20 nt, synthetic construct
  source 1..20: mol_type = other RNA
agtgactggcttaatgcata

SEQ ID NO: 20955 - RNA, 20 nt, synthetic construct
  source 1..20: mol_type = other RNA
agtgacttctggatgtgtat

SEQ ID NO: 20956 - RNA, 20 nt, synthetic construct
  source 1..20: mol_type = other RNA
agtgactttactgttctcca

SEQ ID NO: 20957 - RNA, 20 nt, synthetic construct
  source 1..20: mol_type = other RNA
agtgagaggactgcctggtc

SEQ ID NO: 20958 - RNA, 20 nt, synthetic construct
  source 1..20: mol_type = other RNA
agtgagatgggaagaaaaaa

SEQ ID NO: 20959 - RNA, 20 nt, synthetic construct
  source 1..20: mol_type = other RNA
agtgagcagaaggaggaaaa

SEQ ID NO: 20960 - RNA, 20 nt, synthetic construct
  source 1..20: mol_type = other RNA
agtgagcatgctgcaactga

SEQ ID NO: 20961 - RNA, 20 nt, synthetic construct
  source 1..20: mol_type = other RNA
agtgagccacagctacactc

SEQ ID NO: 20962 - RNA, 20 nt, synthetic construct
  source 1..20: mol_type = other RNA
agtgagcccagagatcccac

SEQ ID NO: 20963 - RNA, 20 nt, synthetic construct
  source 1..20: mol_type = other RNA
agtgaggacgctgatgacag

SEQ ID NO: 20964 - RNA, 20 nt, synthetic construct
  source 1..20: mol_type = other RNA
agtgagggaggccatcttca

SEQ ID NO: 20965 - RNA, 20 nt, synthetic construct
  source 1..20: mol_type = other RNA
agtgagtagaagagtaatgg

SEQ ID NO: 20966 - RNA, 20 nt, synthetic construct
  source 1..20: mol_type = other RNA
agtgagtagggaaggtgccc

SEQ ID NO: 20967 - RNA, 20 nt, synthetic construct
  source 1..20: mol_type = other RNA
agtgagtgatgaaaagagca

SEQ ID NO: 20968 - RNA, 20 nt, synthetic construct
  source 1..20: mol_type = other RNA
agtgagttcaaatgttaagc

SEQ ID NO: 20969 - RNA, 20 nt, synthetic construct
  source 1..20: mol_type = other RNA
agtgagtttgacctgtaatt

SEQ ID NO: 20970 - RNA, 20 nt, synthetic construct
  source 1..20: mol_type = other RNA
agtgataccataaagtcaga

SEQ ID NO: 20971 - RNA, 20 nt, synthetic construct
  source 1..20: mol_type = other RNA
agtgatgaaaagagcacacc

SEQ ID NO: 20972 - RNA, 20 nt, synthetic construct
  source 1..20: mol_type = other RNA
agtgatgcaactcctgggct

SEQ ID NO: 20973 - RNA, 20 nt, synthetic construct
  source 1..20: mol_type = other RNA
agtgatggaggtggaactct

SEQ ID NO: 20974 - RNA, 20 nt, synthetic construct
  source 1..20: mol_type = other RNA
agtgatgggagatggacact

SEQ ID NO: 20975 - RNA, 20 nt, synthetic construct
  source 1..20: mol_type = other RNA
agtgatgtcttttgaagaag

SEQ ID NO: 20976 - RNA, 20 nt, synthetic construct
  source 1..20: mol_type = other RNA
agtgattcacttttgagttc

SEQ ID NO: 20977 - RNA, 20 nt, synthetic construct
  source 1..20: mol_type = other RNA
agtgattggatatttgcagt

SEQ ID NO: 20978 - RNA, 20 nt, synthetic construct
  source 1..20: mol_type = other RNA
agtgattttaccaaggctaa

SEQ ID NO: 20979 - RNA, 20 nt, synthetic construct
  source 1..20: mol_type = other RNA
agtgcaaacctcctggtttt

SEQ ID NO: 20980 - RNA, 20 nt, synthetic construct
  source 1..20: mol_type = other RNA
agtgcaatggtgggatctct

SEQ ID NO: 20981 - RNA, 20 nt, synthetic construct
  source 1..20: mol_type = other RNA
agtgcacaatgcagtattgt

SEQ ID NO: 20982 - RNA, 20 nt, synthetic construct
  source 1..20: mol_type = other RNA
agtgcacattccttcttcac

SEQ ID NO: 20983 - RNA, 20 nt, synthetic construct
  source 1..20: mol_type = other RNA
agtgcagcaagcagtaaata

SEQ ID NO: 20984 - RNA, 20 nt, synthetic construct
  source 1..20: mol_type = other RNA
agtgcagtatcttgaagaaa

SEQ ID NO: 20985 - RNA, 20 nt, synthetic construct
  source 1..20: mol_type = other RNA
agtgcagtatgtaggaaact

SEQ ID NO: 20986 - RNA, 20 nt, synthetic construct
  source 1..20: mol_type = other RNA
agtgcagtggtgtggtcttg

SEQ ID NO: 20987 - RNA, 20 nt, synthetic construct
  source 1..20: mol_type = other RNA
agtgcataccaccacattcg

SEQ ID NO: 20988 - RNA, 20 nt, synthetic construct
  source 1..20: mol_type = other RNA
agtgcatttcggctctgtgc

SEQ ID NO: 20989 - RNA, 20 nt, synthetic construct
  source 1..20: mol_type = other RNA
agtgccaacacatggggcat

SEQ ID NO: 20990 - RNA, 20 nt, synthetic construct
  source 1..20: mol_type = other RNA
agtgccagccacccttgctg

SEQ ID NO: 20991 - RNA, 20 nt, synthetic construct
  source 1..20: mol_type = other RNA
agtgcccacctgacaagtag

SEQ ID NO: 20992 - RNA, 20 nt, synthetic construct
  source 1..20: mol_type = other RNA
agtgcccattaacagatgaa

SEQ ID NO: 20993 - RNA, 20 nt, synthetic construct
  source 1..20: mol_type = other RNA
agtgccgcgttttttgtcca

SEQ ID NO: 20994 - RNA, 20 nt, synthetic construct
  source 1..20: mol_type = other RNA
agtgccttcagaaggagtcc

SEQ ID NO: 20995 - RNA, 20 nt, synthetic construct
  source 1..20: mol_type = other RNA
agtgccttcagctatggtgt

SEQ ID NO: 20996 - RNA, 20 nt, synthetic construct
  source 1..20: mol_type = other RNA
agtgcgagtgtgaacgatgg

SEQ ID NO: 20997 - RNA, 20 nt, synthetic construct
  source 1..20: mol_type = other RNA
agtgctccatagcttcctaa

SEQ ID NO: 20998 - RNA, 20 nt, synthetic construct
  source 1..20: mol_type = other RNA
agtgctctaccctttccaaa

SEQ ID NO: 20999 - RNA, 20 nt, synthetic construct
  source 1..20: mol_type = other RNA
agtgctctcccccgaatcct

SEQ ID NO: 21000 - RNA, 20 nt, synthetic construct
  source 1..20: mol_type = other RNA
agtgctcttctgatcacaga

SEQ ID NO: 21001 - RNA, 20 nt, synthetic construct
  source 1..20: mol_type = other RNA
agtgctgaaagctagaagac

SEQ ID NO: 21002 - RNA, 20 nt, synthetic construct
  source 1..20: mol_type = other RNA
agtgctgcagtatgcataga

SEQ ID NO: 21003 - RNA, 20 nt, synthetic construct
  source 1..20: mol_type = other RNA
agtgctgctctgacgtttaa

SEQ ID NO: 21004 - RNA, 20 nt, synthetic construct
  source 1..20: mol_type = other RNA
agtgctgggctagggaagca

SEQ ID NO: 21005 - RNA, 20 nt, synthetic construct
  source 1..20: mol_type = other RNA
agtgctgggtagagactgga

SEQ ID NO: 21006 - RNA, 20 nt, synthetic construct
  source 1..20: mol_type = other RNA
agtgctgtgattgcaggtgt

SEQ ID NO: 21007 - RNA, 20 nt, synthetic construct
  source 1..20: mol_type = other RNA
agtgctgtgccagtgcaaac

SEQ ID NO: 21008 - RNA, 20 nt, synthetic construct
  source 1..20: mol_type = other RNA
agtgctgttgaggctgggcc

SEQ ID NO: 21009 - RNA, 20 nt, synthetic construct
  source 1..20: mol_type = other RNA
agtgcttagcgctggaggtc

SEQ ID NO: 21010 - RNA, 20 nt, synthetic construct
  source 1..20: mol_type = other RNA
agtgcttctagtaacttggt

SEQ ID NO: 21011 - RNA, 20 nt, synthetic construct
  source 1..20: mol_type = other RNA
agtgcttgcagccttccctg

SEQ ID NO: 21012 - RNA, 20 nt, synthetic construct
  source 1..20: mol_type = other RNA
agtgctttttactttgcgaa

SEQ ID NO: 21013 - RNA, 20 nt, synthetic construct
  source 1..20: mol_type = other RNA
agtggaaaaactgcagcaat

SEQ ID NO: 21014 - RNA, 20 nt, synthetic construct
  source 1..20: mol_type = other RNA
agtggaaagagccagcctga

SEQ ID NO: 21015 - RNA, 20 nt, synthetic construct
  source 1..20: mol_type = other RNA
agtggaagaatcaggtctct

SEQ ID NO: 21016 - RNA, 20 nt, synthetic construct
  source 1..20: mol_type = other RNA
agtggaatcattccgtatat

SEQ ID NO: 21017 - RNA, 20 nt, synthetic construct
  source 1..20: mol_type = other RNA
agtggactatgtaggcacat

SEQ ID NO: 21018 - RNA, 20 nt, synthetic construct
  source 1..20: mol_type = other RNA
agtggactgtgagggagata

SEQ ID NO: 21019 - RNA, 20 nt, synthetic construct
  source 1..20: mol_type = other RNA
agtggagaattactaaaatt

SEQ ID NO: 21020 - RNA, 20 nt, synthetic construct
  source 1..20: mol_type = other RNA
agtggagcctgctctgcaga

SEQ ID NO: 21021 - RNA, 20 nt, synthetic construct
  source 1..20: mol_type = other RNA
agtggaggggcaggaaaggt

SEQ ID NO: 21022 - RNA, 20 nt, synthetic construct
  source 1..20: mol_type = other RNA
agtggagtgcgagtgtgaac

SEQ ID NO: 21023 - RNA, 20 nt, synthetic construct
  source 1..20: mol_type = other RNA
agtggagtggcatgatctca

SEQ ID NO: 21024 - RNA, 20 nt, synthetic construct
  source 1..20: mol_type = other RNA
agtggatcatttgaggtcaa

SEQ ID NO: 21025 - RNA, 20 nt, synthetic construct
  source 1..20: mol_type = other RNA
agtggatgactaggctcctg

SEQ ID NO: 21026 - RNA, 20 nt, synthetic construct
  source 1..20: mol_type = other RNA
agtggatgctggggacccct

SEQ ID NO: 21027 - RNA, 20 nt, synthetic construct
  source 1..20: mol_type = other RNA
agtggcagccccgcttcagt

SEQ ID NO: 21028 - RNA, 20 nt, synthetic construct
  source 1..20: mol_type = other RNA
agtggcatcatactggaagg

SEQ ID NO: 21029 - RNA, 20 nt, synthetic construct
  source 1..20: mol_type = other RNA
agtggcatgatctcacgtca

SEQ ID NO: 21030 - RNA, 20 nt, synthetic construct
  source 1..20: mol_type = other RNA
agtggccagtgaccagtgtg

SEQ ID NO: 21031 - RNA, 20 nt, synthetic construct
  source 1..20: mol_type = other RNA
agtggcccccctgaaaaatg

SEQ ID NO: 21032 - RNA, 20 nt, synthetic construct
  source 1..20: mol_type = other RNA
agtggccctgttggcctgga

SEQ ID NO: 21033 - RNA, 20 nt, synthetic construct
  source 1..20: mol_type = other RNA
agtggcctaaatcaggatgt

SEQ ID NO: 21034 - RNA, 20 nt, synthetic construct
  source 1..20: mol_type = other RNA
agtggcgcagccatggctca

SEQ ID NO: 21035 - RNA, 20 nt, synthetic construct
  source 1..20: mol_type = other RNA
agtggcgctgtttgcctgcg

SEQ ID NO: 21036 - RNA, 20 nt, synthetic construct
  source 1..20: mol_type = other RNA
agtggcgtgtgcccaggctg

SEQ ID NO: 21037 - RNA, 20 nt, synthetic construct
  source 1..20: mol_type = other RNA
agtggctaatgtggcttgca

SEQ ID NO: 21038 - RNA, 20 nt, synthetic construct
  source 1..20: mol_type = other RNA
agtggctagacggaaaaaca

SEQ ID NO: 21039 - RNA, 20 nt, synthetic construct
  source 1..20: mol_type = other RNA
agtggctagtgtgttgactg

SEQ ID NO: 21040 - RNA, 20 nt, synthetic construct
  source 1..20: mol_type = other RNA
agtggctcacagtgctccat

SEQ ID NO: 21041 - RNA, 20 nt, synthetic construct
  source 1..20: mol_type = other RNA
agtggctcatacttgcttta

SEQ ID NO: 21042 - RNA, 20 nt, synthetic construct
  source 1..20: mol_type = other RNA
agtggctgcaccattttttc

SEQ ID NO: 21043 - RNA, 20 nt, synthetic construct
  source 1..20: mol_type = other RNA
agtggcttcctaactggtct

SEQ ID NO: 21044 - RNA, 20 nt, synthetic construct
  source 1..20: mol_type = other RNA
agtgggaagcaaaggattcg

SEQ ID NO: 21045 - RNA, 20 nt, synthetic construct
  source 1..20: mol_type = other RNA
agtgggaagtggagtgcgag

SEQ ID NO: 21046 - RNA, 20 nt, synthetic construct
  source 1..20: mol_type = other RNA
agtgggactggagaacagta

SEQ ID NO: 21047 - RNA, 20 nt, synthetic construct
  source 1..20: mol_type = other RNA
agtgggaggaggtcatactg

SEQ ID NO: 21048 - RNA, 20 nt, synthetic construct
  source 1..20: mol_type = other RNA
agtgggatcaaaccatgttc

SEQ ID NO: 21049 - RNA, 20 nt, synthetic construct
  source 1..20: mol_type = other RNA
agtgggcaaaaaagtcatga

SEQ ID NO: 21050 - RNA, 20 nt, synthetic construct
  source 1..20: mol_type = other RNA
agtgggcccagcagaaggtg

SEQ ID NO: 21051 - RNA, 20 nt, synthetic construct
  source 1..20: mol_type = other RNA
agtggggcacctaaaaggtt

SEQ ID NO: 21052 - RNA, 20 nt, synthetic construct
  source 1..20: mol_type = other RNA
agtgggtagaagcagcaagg

SEQ ID NO: 21053 - RNA, 20 nt, synthetic construct
  source 1..20: mol_type = other RNA
agtgggtcagctagtgtgtc

SEQ ID NO: 21054 - RNA, 20 nt, synthetic construct
  source 1..20: mol_type = other RNA
agtgggtcgggtgtcagaaa

SEQ ID NO: 21055 - RNA, 20 nt, synthetic construct
  source 1..20: mol_type = other RNA
agtgggtggatgggtgtagg

SEQ ID NO: 21056 - RNA, 20 nt, synthetic construct
  source 1..20: mol_type = other RNA
agtgggttcaattatgtgga

SEQ ID NO: 21057 - RNA, 20 nt, synthetic construct
  source 1..20: mol_type = other RNA
agtggtaactagatgcctcg

SEQ ID NO: 21058 - RNA, 20 nt, synthetic construct
  source 1..20: mol_type = other RNA
agtggtaaggactgaagtcc

SEQ ID NO: 21059 - RNA, 20 nt, synthetic construct
  source 1..20: mol_type = other RNA
agtggtaaggagccaaacat

SEQ ID NO: 21060 - RNA, 20 nt, synthetic construct
  source 1..20: mol_type = other RNA
agtggtagttacacaagtgt

SEQ ID NO: 21061 - RNA, 20 nt, synthetic construct
  source 1..20: mol_type = other RNA
agtggtattctatcatcaag

SEQ ID NO: 21062 - RNA, 20 nt, synthetic construct
  source 1..20: mol_type = other RNA
agtggtgcaatcacggctga

SEQ ID NO: 21063 - RNA, 20 nt, synthetic construct
  source 1..20: mol_type = other RNA
agtggtgcttaattcaaaca

SEQ ID NO: 21064 - RNA, 20 nt, synthetic construct
  source 1..20: mol_type = other RNA
agtggtgcttgaactgctgg

SEQ ID NO: 21065 - RNA, 20 nt, synthetic construct
  source 1..20: mol_type = other RNA
agtggtgcttttgctgcatc

SEQ ID NO: 21066 - RNA, 20 nt, synthetic construct
  source 1..20: mol_type = other RNA
agtggtggatagagagattc

SEQ ID NO: 21067 - RNA, 20 nt, synthetic construct
  source 1..20: mol_type = other RNA
agtggtggtagtaaggatcg

SEQ ID NO: 21068 - RNA, 20 nt, synthetic construct
  source 1..20: mol_type = other RNA
agtggtgtggtcttgtctca

SEQ ID NO: 21069 - RNA, 20 nt, synthetic construct
  source 1..20: mol_type = other RNA
agtggtgtgtgactgtagtc

SEQ ID NO: 21070 - RNA, 20 nt, synthetic construct
  source 1..20: mol_type = other RNA
agtggttaggaaaatacatg

SEQ ID NO: 21071 - RNA, 20 nt, synthetic construct
  source 1..20: mol_type = other RNA
agtggttccatttgttttgt

SEQ ID NO: 21072 - RNA, 20 nt, synthetic construct
  source 1..20: mol_type = other RNA
agtggttctgcgtgttattt

SEQ ID NO: 21073 - RNA, 20 nt, synthetic construct
  source 1..20: mol_type = other RNA
agtggttgacccataaactg

SEQ ID NO: 21074 - RNA, 20 nt, synthetic construct
  source 1..20: mol_type = other RNA
agtggttggaaaacttttaa

SEQ ID NO: 21075 - RNA, 20 nt, synthetic construct
  source 1..20: mol_type = other RNA
agtggttgtgcttcgaggtc

SEQ ID NO: 21076 - RNA, 20 nt, synthetic construct
  source 1..20: mol_type = other RNA
agtggttgtggaattaactc

SEQ ID NO: 21077 - RNA, 20 nt, synthetic construct
  source 1..20: mol_type = other RNA
agtggtttgaagcttcactt

SEQ ID NO: 21078 - RNA, 20 nt, synthetic construct
  source 1..20: mol_type = other RNA
agtgtaaaaagacattattc

SEQ ID NO: 21079 - RNA, 20 nt, synthetic construct
  source 1..20: mol_type = other RNA
agtgtaaagtttctctctcc

SEQ ID NO: 21080 - RNA, 20 nt, synthetic construct
  source 1..20: mol_type = other RNA
agtgtaacatacacatcaga

SEQ ID NO: 21081 - RNA, 20 nt, synthetic construct
  source 1..20: mol_type = other RNA
agtgtaaggtgtttggtgaa

SEQ ID NO: 21082 - RNA, 20 nt, synthetic construct
  source 1..20: mol_type = other RNA
agtgtacaattcggtggcat

SEQ ID NO: 21083 - RNA, 20 nt, synthetic construct
  source 1..20: mol_type = other RNA
agtgtactagtctccataca

SEQ ID NO: 21084 - RNA, 20 nt, synthetic construct
  source 1..20: mol_type = other RNA
agtgtagctgtggctcactc

SEQ ID NO: 21085 - RNA, 20 nt, synthetic construct
  source 1..20: mol_type = other RNA
agtgtagtcagacacactag

SEQ ID NO: 21086 - RNA, 20 nt, synthetic construct
  source 1..20: mol_type = other RNA
agtgtatcagatgcttctag

SEQ ID NO: 21087 - RNA, 20 nt, synthetic construct
  source 1..20: mol_type = other RNA
agtgtatgcagggaaatcat

SEQ ID NO: 21088 - RNA, 20 nt, synthetic construct
  source 1..20: mol_type = other RNA
agtgtattattctaaacaca

SEQ ID NO: 21089 - RNA, 20 nt, synthetic construct
  source 1..20: mol_type = other RNA
agtgtattgtaccttgattt

SEQ ID NO: 21090 - RNA, 20 nt, synthetic construct
  source 1..20: mol_type = other RNA
agtgtccatctcccatcact

SEQ ID NO: 21091 - RNA, 20 nt, synthetic construct
  source 1..20: mol_type = other RNA
agtgtcctcaggctccaggt

SEQ ID NO: 21092 - RNA, 20 nt, synthetic construct
  source 1..20: mol_type = other RNA
agtgtcctgaatgatttccc

SEQ ID NO: 21093 - RNA, 20 nt, synthetic construct
  source 1..20: mol_type = other RNA
agtgtctaatgggtacaggg

SEQ ID NO: 21094 - RNA, 20 nt, synthetic construct
  source 1..20: mol_type = other RNA
agtgtctcagcctcccaagt

SEQ ID NO: 21095 - RNA, 20 nt, synthetic construct
  source 1..20: mol_type = other RNA
agtgtctccataccccctgg

SEQ ID NO: 21096 - RNA, 20 nt, synthetic construct
  source 1..20: mol_type = other RNA
agtgtctgctacaggggcat

SEQ ID NO: 21097 - RNA, 20 nt, synthetic construct
  source 1..20: mol_type = other RNA
agtgtcttaatcctattttg

SEQ ID NO: 21098 - RNA, 20 nt, synthetic construct
  source 1..20: mol_type = other RNA
agtgtcttagtctgacttct

SEQ ID NO: 21099 - RNA, 20 nt, synthetic construct
  source 1..20: mol_type = other RNA
agtgtgaaagtattaaaagc

SEQ ID NO: 21100 - RNA, 20 nt, synthetic construct
  source 1..20: mol_type = other RNA
agtgtgaacgatggtttctg

SEQ ID NO: 21101 - RNA, 20 nt, synthetic construct
  source 1..20: mol_type = other RNA
agtgtgaagattaagcacat

SEQ ID NO: 21102 - RNA, 20 nt, synthetic construct
  source 1..20: mol_type = other RNA
agtgtgaataggaaagtgac

SEQ ID NO: 21103 - RNA, 20 nt, synthetic construct
  source 1..20: mol_type = other RNA
agtgtgaatgaggagtgaat

SEQ ID NO: 21104 - RNA, 20 nt, synthetic construct
  source 1..20: mol_type = other RNA
agtgtgaccacattcccaaa

SEQ ID NO: 21105 - RNA, 20 nt, synthetic construct
  source 1..20: mol_type = other RNA
agtgtgagcaaaaatacagc

SEQ ID NO: 21106 - RNA, 20 nt, synthetic construct
  source 1..20: mol_type = other RNA
agtgtgatgggggtaagatt

SEQ ID NO: 21107 - RNA, 20 nt, synthetic construct
  source 1..20: mol_type = other RNA
agtgtgcatgtgttgtgcac

SEQ ID NO: 21108 - RNA, 20 nt, synthetic construct
  source 1..20: mol_type = other RNA
agtgtgcccaaggaaggcag

SEQ ID NO: 21109 - RNA, 20 nt, synthetic construct
  source 1..20: mol_type = other RNA
agtgtgctgactagtacgtg

SEQ ID NO: 21110 - RNA, 20 nt, synthetic construct
  source 1..20: mol_type = other RNA
agtgtgcttgggctcccttc

SEQ ID NO: 21111 - RNA, 20 nt, synthetic construct
  source 1..20: mol_type = other RNA
agtgtggcaggggctgcatc

SEQ ID NO: 21112 - RNA, 20 nt, synthetic construct
  source 1..20: mol_type = other RNA
agtgtggctttaaggcgcag

SEQ ID NO: 21113 - RNA, 20 nt, synthetic construct
  source 1..20: mol_type = other RNA
agtgtggtggtctcaccctc

SEQ ID NO: 21114 - RNA, 20 nt, synthetic construct
  source 1..20: mol_type = other RNA
agtgtggttcatatttccct

SEQ ID NO: 21115 - RNA, 20 nt, synthetic construct
  source 1..20: mol_type = other RNA
agtgtgtccacacaatggtc

SEQ ID NO: 21116 - RNA, 20 nt, synthetic construct
  source 1..20: mol_type = other RNA
agtgtgtctgactacactga

SEQ ID NO: 21117 - RNA, 20 nt, synthetic construct
  source 1..20: mol_type = other RNA
agtgtgttctgccttgaggt

SEQ ID NO: 21118 - RNA, 20 nt, synthetic construct
  source 1..20: mol_type = other RNA
agtgtgttgactgacataac

SEQ ID NO: 21119 - RNA, 20 nt, synthetic construct
  source 1..20: mol_type = other RNA
agtgtgtttcgcaaagtaaa

SEQ ID NO: 21120 - RNA, 20 nt, synthetic construct
  source 1..20: mol_type = other RNA
agtgtgtttgtttgctagag

SEQ ID NO: 21121 - RNA, 20 nt, synthetic construct
  source 1..20: mol_type = other RNA
agtgtgtttttgtaaatgaa

SEQ ID NO: 21122 - RNA, 20 nt, synthetic construct
  source 1..20: mol_type = other RNA
agtgttaattatttgtgcat

SEQ ID NO: 21123 - RNA, 20 nt, synthetic construct
  source 1..20: mol_type = other RNA
agtgttaattcttccttaat

SEQ ID NO: 21124 - RNA, 20 nt, synthetic construct
  source 1..20: mol_type = other RNA
agtgttacttgaaatcattt

SEQ ID NO: 21125 - RNA, 20 nt, synthetic construct
  source 1..20: mol_type = other RNA
agtgttagaattacaggcat

SEQ ID NO: 21126 - RNA, 20 nt, synthetic construct
  source 1..20: mol_type = other RNA
agtgttcaaaagccccaaac

SEQ ID NO: 21127 - RNA, 20 nt, synthetic construct
  source 1..20: mol_type = other RNA
agtgttcccttcttaaatgt

SEQ ID NO: 21128 - RNA, 20 nt, synthetic construct
  source 1..20: mol_type = other RNA
agtgttctgtgtttatgaat

SEQ ID NO: 21129 - RNA, 20 nt, synthetic construct
  source 1..20: mol_type = other RNA
agtgttcttaccacaaaaaa

SEQ ID NO: 21130 - RNA, 20 nt, synthetic construct
  source 1..20: mol_type = other RNA
agtgttgactaccatctctc

SEQ ID NO: 21131 - RNA, 20 nt, synthetic construct
  source 1..20: mol_type = other RNA
agtgttgagaaagcacataa

SEQ ID NO: 21132 - RNA, 20 nt, synthetic construct
  source 1..20: mol_type = other RNA
agtgttgagaggctttaagc

SEQ ID NO: 21133 - RNA, 20 nt, synthetic construct
  source 1..20: mol_type = other RNA
agtgttgcttggtgttgact

SEQ ID NO: 21134 - RNA, 20 nt, synthetic construct
  source 1..20: mol_type = other RNA
agtgttgtgtgcacctaata

SEQ ID NO: 21135 - RNA, 20 nt, synthetic construct
  source 1..20: mol_type = other RNA
agtgtttacacacctgaaat

SEQ ID NO: 21136 - RNA, 20 nt, synthetic construct
  source 1..20: mol_type = other RNA
agtgtttaggatataagagt

SEQ ID NO: 21137 - RNA, 20 nt, synthetic construct
  source 1..20: mol_type = other RNA
agtgtttagggacgaatgca

SEQ ID NO: 21138 - RNA, 20 nt, synthetic construct
  source 1..20: mol_type = other RNA
agtgtttcatttacaaaaac

SEQ ID NO: 21139 - RNA, 20 nt, synthetic construct
  source 1..20: mol_type = other RNA
agtgtttcccttaaaaggaa

SEQ ID NO: 21140 - RNA, 20 nt, synthetic construct
  source 1..20: mol_type = other RNA
agtgtttcctagattccctc

SEQ ID NO: 21141 - RNA, 20 nt, synthetic construct
  source 1..20: mol_type = other RNA
agtgtttccttccagatgtt

SEQ ID NO: 21142 - RNA, 20 nt, synthetic construct
  source 1..20: mol_type = other RNA
agtgtttgaaaagtgtttgt

SEQ ID NO: 21143 - RNA, 20 nt, synthetic construct
  source 1..20: mol_type = other RNA
agtgtttggtttttatggaa

SEQ ID NO: 21144 - RNA, 20 nt, synthetic construct
  source 1..20: mol_type = other RNA
agtgtttgtcacatagaagc

SEQ ID NO: 21145 - RNA, 20 nt, synthetic construct
  source 1..20: mol_type = other RNA
agtgttttaaagcagggagg

SEQ ID NO: 21146 - RNA, 20 nt, synthetic construct
  source 1..20: mol_type = other RNA
agtgttttaggggggaaaac

SEQ ID NO: 21147 - RNA, 20 nt, synthetic construct
  source 1..20: mol_type = other RNA
agtgttttcttcatggacta

SEQ ID NO: 21148 - RNA, 20 nt, synthetic construct
  source 1..20: mol_type = other RNA
agtgttttgatagttgcaga

SEQ ID NO: 21149 - RNA, 20 nt, synthetic construct
  source 1..20: mol_type = other RNA
agtgtttttgaattctgctt

SEQ ID NO: 21150 - RNA, 20 nt, synthetic construct
  source 1..20: mol_type = other RNA
agttaaaactcacaaaaagt

SEQ ID NO: 21151 - RNA, 20 nt, synthetic construct
  source 1..20: mol_type = other RNA
agttaaaacttgtagaggag

SEQ ID NO: 21152 - RNA, 20 nt, synthetic construct
  source 1..20: mol_type = other RNA
agttaaaagacatctttcct

SEQ ID NO: 21153 - RNA, 20 nt, synthetic construct
  source 1..20: mol_type = other RNA
agttaaaagttttccaacca

SEQ ID NO: 21154 - RNA, 20 nt, synthetic construct
  source 1..20: mol_type = other RNA
agttaaaatgaaaatgttcc

SEQ ID NO: 21155 - RNA, 20 nt, synthetic construct
  source 1..20: mol_type = other RNA
agttaaacatgtaaaacaga

SEQ ID NO: 21156 - RNA, 20 nt, synthetic construct
  source 1..20: mol_type = other RNA
agttaaacccaacaaacaat

SEQ ID NO: 21157 - RNA, 20 nt, synthetic construct
  source 1..20: mol_type = other RNA
agttaaacttttgtgcatca

SEQ ID NO: 21158 - RNA, 20 nt, synthetic construct
  source 1..20: mol_type = other RNA
agttaacaatactgcattgt

SEQ ID NO: 21159 - RNA, 20 nt, synthetic construct
  source 1..20: mol_type = other RNA
agttaacagtgctgtgccag

SEQ ID NO: 21160 - RNA, 20 nt, synthetic construct
  source 1..20: mol_type = other RNA
agttaaccttctggggttca

SEQ ID NO: 21161 - RNA, 20 nt, synthetic construct
  source 1..20: mol_type = other RNA
agttaacgtatgaataaact

SEQ ID NO: 21162 - RNA, 20 nt, synthetic construct
  source 1..20: mol_type = other RNA
agttaacgtttatctacaga

SEQ ID NO: 21163 - RNA, 20 nt, synthetic construct
  source 1..20: mol_type = other RNA
agttaactgaaatcgggagt

SEQ ID NO: 21164 - RNA, 20 nt, synthetic construct
  source 1..20: mol_type = other RNA
agttaacttattggaaaact

SEQ ID NO: 21165 - RNA, 20 nt, synthetic construct
  source 1..20: mol_type = other RNA
agttaagggccatttcattt

SEQ ID NO: 21166 - RNA, 20 nt, synthetic construct
  source 1..20: mol_type = other RNA
agttaagtctgaaagcttct

SEQ ID NO: 21167 - RNA, 20 nt, synthetic construct
  source 1..20: mol_type = other RNA
agttaataaaggtgctaatt

SEQ ID NO: 21168 - RNA, 20 nt, synthetic construct
  source 1..20: mol_type = other RNA
agttaatagcctcctaagtt

SEQ ID NO: 21169 - RNA, 20 nt, synthetic construct
  source 1..20: mol_type = other RNA
agttaatattgtaggtgtct

SEQ ID NO: 21170 - RNA, 20 nt, synthetic construct
  source 1..20: mol_type = other RNA
agttaatgtgtgaagaagga

SEQ ID NO: 21171 - RNA, 20 nt, synthetic construct
  source 1..20: mol_type = other RNA
agttaattccacaaccactg

SEQ ID NO: 21172 - RNA, 20 nt, synthetic construct
  source 1..20: mol_type = other RNA
agttacaaacatatgcatgt

SEQ ID NO: 21173 - RNA, 20 nt, synthetic construct
  source 1..20: mol_type = other RNA
agttacaactactcgggagg

SEQ ID NO: 21174 - RNA, 20 nt, synthetic construct
  source 1..20: mol_type = other RNA
agttacaaggattgaatgga

SEQ ID NO: 21175 - RNA, 20 nt, synthetic construct
  source 1..20: mol_type = other RNA
agttacaataatatgcctca

SEQ ID NO: 21176 - RNA, 20 nt, synthetic construct
  source 1..20: mol_type = other RNA
agttacacaagtgtttcatt

SEQ ID NO: 21177 - RNA, 20 nt, synthetic construct
  source 1..20: mol_type = other RNA
agttacagcatttcagccaa

SEQ ID NO: 21178 - RNA, 20 nt, synthetic construct
  source 1..20: mol_type = other RNA
agttacatgaggtcacccaa

SEQ ID NO: 21179 - RNA, 20 nt, synthetic construct
  source 1..20: mol_type = other RNA
agttacatgcttagccttcc

SEQ ID NO: 21180 - RNA, 20 nt, synthetic construct
  source 1..20: mol_type = other RNA
agttaccaccaagaaaaagc

SEQ ID NO: 21181 - RNA, 20 nt, synthetic construct
  source 1..20: mol_type = other RNA
agttaccactagcaaactac

SEQ ID NO: 21182 - RNA, 20 nt, synthetic construct
  source 1..20: mol_type = other RNA
agttaccataaaaccatttt

SEQ ID NO: 21183 - RNA, 20 nt, synthetic construct
  source 1..20: mol_type = other RNA
agttacgctgccaaaagcca

SEQ ID NO: 21184 - RNA, 20 nt, synthetic construct
  source 1..20: mol_type = other RNA
agttacggttccctgtagag

SEQ ID NO: 21185 - RNA, 20 nt, synthetic construct
  source 1..20: mol_type = other RNA
agttactagaagcacttttt

SEQ ID NO: 21186 - RNA, 20 nt, synthetic construct
  source 1..20: mol_type = other RNA
agttactcaaatccaaattc

SEQ ID NO: 21187 - RNA, 20 nt, synthetic construct
  source 1..20: mol_type = other RNA
agttactcctgagcaaggaa

SEQ ID NO: 21188 - RNA, 20 nt, synthetic construct
  source 1..20: mol_type = other RNA
agttactctctctgcctcgg

SEQ ID NO: 21189 - RNA, 20 nt, synthetic construct
  source 1..20: mol_type = other RNA
agttactgattagaaggatt

SEQ ID NO: 21190 - RNA, 20 nt, synthetic construct
  source 1..20: mol_type = other RNA
agttacttctggaaagttca

SEQ ID NO: 21191 - RNA, 20 nt, synthetic construct
  source 1..20: mol_type = other RNA
agttactttcctttttcaaa

SEQ ID NO: 21192 - RNA, 20 nt, synthetic construct
  source 1..20: mol_type = other RNA
agttagaagtatcccagatg

SEQ ID NO: 21193 - RNA, 20 nt, synthetic construct
  source 1..20: mol_type = other RNA
agttagcatgcctgacaaag

SEQ ID NO: 21194 - RNA, 20 nt, synthetic construct
  source 1..20: mol_type = other RNA
agttagctggcaaaatggag

SEQ ID NO: 21195 - RNA, 20 nt, synthetic construct
  source 1..20: mol_type = other RNA
agttaggaagccactgcatt

SEQ ID NO: 21196 - RNA, 20 nt, synthetic construct
  source 1..20: mol_type = other RNA
agttaggaatttacatttcc

SEQ ID NO: 21197 - RNA, 20 nt, synthetic construct
  source 1..20: mol_type = other RNA
agttaggtggtttgaacccc

SEQ ID NO: 21198 - RNA, 20 nt, synthetic construct
  source 1..20: mol_type = other RNA
agttagtgaagcagagagag

SEQ ID NO: 21199 - RNA, 20 nt, synthetic construct
  source 1..20: mol_type = other RNA
agttagtgtctaatgggtac

SEQ ID NO: 21200 - RNA, 20 nt, synthetic construct
  source 1..20: mol_type = other RNA
agttagtttgttgacccaat

SEQ ID NO: 21201 - RNA, 20 nt, synthetic construct
  source 1..20: mol_type = other RNA
agttatcacacctaggccta

SEQ ID NO: 21202 - RNA, 20 nt, synthetic construct
  source 1..20: mol_type = other RNA
agttatcaccatgtgcttat

SEQ ID NO: 21203 - RNA, 20 nt, synthetic construct
  source 1..20: mol_type = other RNA
agttatctctgccctcattg

SEQ ID NO: 21204 - RNA, 20 nt, synthetic construct
  source 1..20: mol_type = other RNA
agttatctcttagacctcct

SEQ ID NO: 21205 - RNA, 20 nt, synthetic construct
  source 1..20: mol_type = other RNA
agttatgataaaaataacgg

SEQ ID NO: 21206 - RNA, 20 nt, synthetic construct
  source 1..20: mol_type = other RNA
agttatgcaagatgtcaaca

SEQ ID NO: 21207 - RNA, 20 nt, synthetic construct
  source 1..20: mol_type = other RNA
agttatgtagctgggatggc

SEQ ID NO: 21208 - RNA, 20 nt, synthetic construct
  source 1..20: mol_type = other RNA
agttatgtcagtcaacacac

SEQ ID NO: 21209 - RNA, 20 nt, synthetic construct
  source 1..20: mol_type = other RNA
agttattaaatgagacacct

SEQ ID NO: 21210 - RNA, 20 nt, synthetic construct
  source 1..20: mol_type = other RNA
agttattaagagtgtgctga

SEQ ID NO: 21211 - RNA, 20 nt, synthetic construct
  source 1..20: mol_type = other RNA
agttattattgtcattacct

SEQ ID NO: 21212 - RNA, 20 nt, synthetic construct
  source 1..20: mol_type = other RNA
agttattcttcagcaaggac

SEQ ID NO: 21213 - RNA, 20 nt, synthetic construct
  source 1..20: mol_type = other RNA
agttattgcatagggatgtt

SEQ ID NO: 21214 - RNA, 20 nt, synthetic construct
  source 1..20: mol_type = other RNA
agttatttaatctctcttga

SEQ ID NO: 21215 - RNA, 20 nt, synthetic construct
  source 1..20: mol_type = other RNA
agttcaaagaaactacctag

SEQ ID NO: 21216 - RNA, 20 nt, synthetic construct
  source 1..20: mol_type = other RNA
agttcaaatgaggcttttat

SEQ ID NO: 21217 - RNA, 20 nt, synthetic construct
  source 1..20: mol_type = other RNA
agttcaaatgttaagcccaa

SEQ ID NO: 21218 - RNA, 20 nt, synthetic construct
  source 1..20: mol_type = other RNA
agttcaagatgcataccaag

SEQ ID NO: 21219 - RNA, 20 nt, synthetic construct
  source 1..20: mol_type = other RNA
agttcaagcaccacttcgag

SEQ ID NO: 21220 - RNA, 20 nt, synthetic construct
  source 1..20: mol_type = other RNA
agttcaaggtgttagcagga

SEQ ID NO: 21221 - RNA, 20 nt, synthetic construct
  source 1..20: mol_type = other RNA
agttcaaggttataatcagc

SEQ ID NO: 21222 - RNA, 20 nt, synthetic construct
  source 1..20: mol_type = other RNA
agttcaatactactgcaaat

SEQ ID NO: 21223 - RNA, 20 nt, synthetic construct
  source 1..20: mol_type = other RNA
agttcaccagtttctaatta

SEQ ID NO: 21224 - RNA, 20 nt, synthetic construct
  source 1..20: mol_type = other RNA
agttcacctctccgggtaaa

SEQ ID NO: 21225 - RNA, 20 nt, synthetic construct
  source 1..20: mol_type = other RNA
agttcagaaagattaatcct

SEQ ID NO: 21226 - RNA, 20 nt, synthetic construct
  source 1..20: mol_type = other RNA
agttcagaataccagagatt

SEQ ID NO: 21227 - RNA, 20 nt, synthetic construct
  source 1..20: mol_type = other RNA
agttcagatagaattaaatg

SEQ ID NO: 21228 - RNA, 20 nt, synthetic construct
  source 1..20: mol_type = other RNA
agttcagcatcttcactgac

SEQ ID NO: 21229 - RNA, 20 nt, synthetic construct
  source 1..20: mol_type = other RNA
agttcagcctgcagaaggag

SEQ ID NO: 21230 - RNA, 20 nt, synthetic construct
  source 1..20: mol_type = other RNA
agttcagcttacagtcatca

SEQ ID NO: 21231 - RNA, 20 nt, synthetic construct
  source 1..20: mol_type = other RNA
agttcagctttaaagagaaa

SEQ ID NO: 21232 - RNA, 20 nt, synthetic construct
  source 1..20: mol_type = other RNA
agttcaggaccagcttgggc

SEQ ID NO: 21233 - RNA, 20 nt, synthetic construct
  source 1..20: mol_type = other RNA
agttcagtggtgcaatcacg

SEQ ID NO: 21234 - RNA, 20 nt, synthetic construct
  source 1..20: mol_type = other RNA
agttcagttttgtatatggt

SEQ ID NO: 21235 - RNA, 20 nt, synthetic construct
  source 1..20: mol_type = other RNA
agttcagtttttctttcttt

SEQ ID NO: 21236 - RNA, 20 nt, synthetic construct
  source 1..20: mol_type = other RNA
agttcatcagcataaataaa

SEQ ID NO: 21237 - RNA, 20 nt, synthetic construct
  source 1..20: mol_type = other RNA
agttcatgttagcataattc

SEQ ID NO: 21238 - RNA, 20 nt, synthetic construct
  source 1..20: mol_type = other RNA
agttcattagaattcaggac

SEQ ID NO: 21239 - RNA, 20 nt, synthetic construct
  source 1..20: mol_type = other RNA
agttcattcgtagcaggttt

SEQ ID NO: 21240 - RNA, 20 nt, synthetic construct
  source 1..20: mol_type = other RNA
agttccaactgtataaatgt

SEQ ID NO: 21241 - RNA, 20 nt, synthetic construct
  source 1..20: mol_type = other RNA
agttccaagattttcccaat

SEQ ID NO: 21242 - RNA, 20 nt, synthetic construct
  source 1..20: mol_type = other RNA
agttccacctccatcactga

SEQ ID NO: 21243 - RNA, 20 nt, synthetic construct
  source 1..20: mol_type = other RNA
agttccagtcctttgtgtca

SEQ ID NO: 21244 - RNA, 20 nt, synthetic construct
  source 1..20: mol_type = other RNA
agttccatctgttatagtgt

SEQ ID NO: 21245 - RNA, 20 nt, synthetic construct
  source 1..20: mol_type = other RNA
agttccattattccataaaa

SEQ ID NO: 21246 - RNA, 20 nt, synthetic construct
  source 1..20: mol_type = other RNA
agttccccattgacaatata

SEQ ID NO: 21247 - RNA, 20 nt, synthetic construct
  source 1..20: mol_type = other RNA
agttcccctatactgtaacc

SEQ ID NO: 21248 - RNA, 20 nt, synthetic construct
  source 1..20: mol_type = other RNA
agttccgatttctcggccgg

SEQ ID NO: 21249 - RNA, 20 nt, synthetic construct
  source 1..20: mol_type = other RNA
agttccggttctcaggagcc

SEQ ID NO: 21250 - RNA, 20 nt, synthetic construct
  source 1..20: mol_type = other RNA
agttcctccttttgtagagg

SEQ ID NO: 21251 - RNA, 20 nt, synthetic construct
  source 1..20: mol_type = other RNA
agttcctgcttcccccaaag

SEQ ID NO: 21252 - RNA, 20 nt, synthetic construct
  source 1..20: mol_type = other RNA
agttcctggactgtgatgac

SEQ ID NO: 21253 - RNA, 20 nt, synthetic construct
  source 1..20: mol_type = other RNA
agttccttttaagggaaaca

SEQ ID NO: 21254 - RNA, 20 nt, synthetic construct
  source 1..20: mol_type = other RNA
agttctaataaacgcggaat

SEQ ID NO: 21255 - RNA, 20 nt, synthetic construct
  source 1..20: mol_type = other RNA
agttctagctctgtcttttt

SEQ ID NO: 21256 - RNA, 20 nt, synthetic construct
  source 1..20: mol_type = other RNA
agttctagttctaataaacg

SEQ ID NO: 21257 - RNA, 20 nt, synthetic construct
  source 1..20: mol_type = other RNA
agttctatttctttccattc

SEQ ID NO: 21258 - RNA, 20 nt, synthetic construct
  source 1..20: mol_type = other RNA
agttctcaggggtaaagggg

SEQ ID NO: 21259 - RNA, 20 nt, synthetic construct
  source 1..20: mol_type = other RNA
agttctccaagttattacaa

SEQ ID NO: 21260 - RNA, 20 nt, synthetic construct
  source 1..20: mol_type = other RNA
agttctcctgtgtgcatgct

SEQ ID NO: 21261 - RNA, 20 nt, synthetic construct
  source 1..20: mol_type = other RNA
agttctctgccccgggcctg

SEQ ID NO: 21262 - RNA, 20 nt, synthetic construct
  source 1..20: mol_type = other RNA
agttctgaaggctcagcccc

SEQ ID NO: 21263 - RNA, 20 nt, synthetic construct
  source 1..20: mol_type = other RNA
agttctgatttcaaagttaa

SEQ ID NO: 21264 - RNA, 20 nt, synthetic construct
  source 1..20: mol_type = other RNA
agttctgcgcaattgcagcc

SEQ ID NO: 21265 - RNA, 20 nt, synthetic construct
  source 1..20: mol_type = other RNA
agttctgcttccacatttct

SEQ ID NO: 21266 - RNA, 20 nt, synthetic construct
  source 1..20: mol_type = other RNA
agttctgggagttcattaga

SEQ ID NO: 21267 - RNA, 20 nt, synthetic construct
  source 1..20: mol_type = other RNA
agttctggtgtcgtttattt

SEQ ID NO: 21268 - RNA, 20 nt, synthetic construct
  source 1..20: mol_type = other RNA
agttctgtacccttacgcgt

SEQ ID NO: 21269 - RNA, 20 nt, synthetic construct
  source 1..20: mol_type = other RNA
agttctgtgaatttgattat

SEQ ID NO: 21270 - RNA, 20 nt, synthetic construct
  source 1..20: mol_type = other RNA
agttcttaagttaaaacttg

SEQ ID NO: 21271 - RNA, 20 nt, synthetic construct
  source 1..20: mol_type = other RNA
agttcttacctcaaaggaga

SEQ ID NO: 21272 - RNA, 20 nt, synthetic construct
  source 1..20: mol_type = other RNA
agttcttatgaggttattca

SEQ ID NO: 21273 - RNA, 20 nt, synthetic construct
  source 1..20: mol_type = other RNA
agttctttcggatatttact

SEQ ID NO: 21274 - RNA, 20 nt, synthetic construct
  source 1..20: mol_type = other RNA
agttgaaaagtatggttgaa

SEQ ID NO: 21275 - RNA, 20 nt, synthetic construct
  source 1..20: mol_type = other RNA
agttgaatttctgtccttgg

SEQ ID NO: 21276 - RNA, 20 nt, synthetic construct
  source 1..20: mol_type = other RNA
agttgacaaattaaatgaca

SEQ ID NO: 21277 - RNA, 20 nt, synthetic construct
  source 1..20: mol_type = other RNA
agttgacatcctttaatttg

SEQ ID NO: 21278 - RNA, 20 nt, synthetic construct
  source 1..20: mol_type = other RNA
agttgactcctaaaacatgg

SEQ ID NO: 21279 - RNA, 20 nt, synthetic construct
  source 1..20: mol_type = other RNA
agttgagaaactatccaaca

SEQ ID NO: 21280 - RNA, 20 nt, synthetic construct
  source 1..20: mol_type = other RNA
agttgagaaagagggaagta

SEQ ID NO: 21281 - RNA, 20 nt, synthetic construct
  source 1..20: mol_type = other RNA
agttgagagagaattctaaa

SEQ ID NO: 21282 - RNA, 20 nt, synthetic construct
  source 1..20: mol_type = other RNA
agttgaggttgaagacctgc

SEQ ID NO: 21283 - RNA, 20 nt, synthetic construct
  source 1..20: mol_type = other RNA
agttgagttttcaacctttg

SEQ ID NO: 21284 - RNA, 20 nt, synthetic construct
  source 1..20: mol_type = other RNA
agttgatgcaatttgttttc

SEQ ID NO: 21285 - RNA, 20 nt, synthetic construct
  source 1..20: mol_type = other RNA
agttgattatttttacccaa

SEQ ID NO: 21286 - RNA, 20 nt, synthetic construct
  source 1..20: mol_type = other RNA
agttgcaaaaatactacaag

SEQ ID NO: 21287 - RNA, 20 nt, synthetic construct
  source 1..20: mol_type = other RNA
agttgcacggtgaagaaccg

SEQ ID NO: 21288 - RNA, 20 nt, synthetic construct
  source 1..20: mol_type = other RNA
agttgcagattcatcttgac

SEQ ID NO: 21289 - RNA, 20 nt, synthetic construct
  source 1..20: mol_type = other RNA
agttgcagcatgctcactgt

SEQ ID NO: 21290 - RNA, 20 nt, synthetic construct
  source 1..20: mol_type = other RNA
agttgcagtgagcccagaga

SEQ ID NO: 21291 - RNA, 20 nt, synthetic construct
  source 1..20: mol_type = other RNA
agttgcatacgtcgtccccc

SEQ ID NO: 21292 - RNA, 20 nt, synthetic construct
  source 1..20: mol_type = other RNA
agttgcatcacttgaggtga

SEQ ID NO: 21293 - RNA, 20 nt, synthetic construct
  source 1..20: mol_type = other RNA
agttgcatgaatttgttttc

SEQ ID NO: 21294 - RNA, 20 nt, synthetic construct
  source 1..20: mol_type = other RNA
agttgctatccagtctctgc

SEQ ID NO: 21295 - RNA, 20 nt, synthetic construct
  source 1..20: mol_type = other RNA
agttgctcagaaaattttct

SEQ ID NO: 21296 - RNA, 20 nt, synthetic construct
  source 1..20: mol_type = other RNA
agttgctgacttcctggctc

SEQ ID NO: 21297 - RNA, 20 nt, synthetic construct
  source 1..20: mol_type = other RNA
agttgcttactctaatgggg

SEQ ID NO: 21298 - RNA, 20 nt, synthetic construct
  source 1..20: mol_type = other RNA
agttgcttggcacagaatta

SEQ ID NO: 21299 - RNA, 20 nt, synthetic construct
  source 1..20: mol_type = other RNA
agttgctttttcttcttgtt

SEQ ID NO: 21300 - RNA, 20 nt, synthetic construct
  source 1..20: mol_type = other RNA
agttggaactcttgcggtct

SEQ ID NO: 21301 - RNA, 20 nt, synthetic construct
  source 1..20: mol_type = other RNA
agttggattatatgttctaa

SEQ ID NO: 21302 - RNA, 20 nt, synthetic construct
  source 1..20: mol_type = other RNA
agttggcacagccagtcagt

SEQ ID NO: 21303 - RNA, 20 nt, synthetic construct
  source 1..20: mol_type = other RNA
agttggcccaacatgctctt

SEQ ID NO: 21304 - RNA, 20 nt, synthetic construct
  source 1..20: mol_type = other RNA
agttggccttgaggtgagac

SEQ ID NO: 21305 - RNA, 20 nt, synthetic construct
  source 1..20: mol_type = other RNA
agttgggagtctatttctga

SEQ ID NO: 21306 - RNA, 20 nt, synthetic construct
  source 1..20: mol_type = other RNA
agttgggcttaacatttgaa

SEQ ID NO: 21307 - RNA, 20 nt, synthetic construct
  source 1..20: mol_type = other RNA
agttgggcttggttggaaaa

SEQ ID NO: 21308 - RNA, 20 nt, synthetic construct
  source 1..20: mol_type = other RNA
agttggggactcttatggct

SEQ ID NO: 21309 - RNA, 20 nt, synthetic construct
  source 1..20: mol_type = other RNA
agttggtcagaaaaatggaa

SEQ ID NO: 21310 - RNA, 20 nt, synthetic construct
  source 1..20: mol_type = other RNA
agttggtcctgcatatgttt

SEQ ID NO: 21311 - RNA, 20 nt, synthetic construct
  source 1..20: mol_type = other RNA
agttggtgaagagagcctgt

SEQ ID NO: 21312 - RNA, 20 nt, synthetic construct
  source 1..20: mol_type = other RNA
agttggtgcaaggataaaca

SEQ ID NO: 21313 - RNA, 20 nt, synthetic construct
  source 1..20: mol_type = other RNA
agttgtaacacatatttatc

SEQ ID NO: 21314 - RNA, 20 nt, synthetic construct
  source 1..20: mol_type = other RNA
agttgtaactacagacatgc

SEQ ID NO: 21315 - RNA, 20 nt, synthetic construct
  source 1..20: mol_type = other RNA
agttgtacttgacacaaagg

SEQ ID NO: 21316 - RNA, 20 nt, synthetic construct
  source 1..20: mol_type = other RNA
agttgtatctgtgatccctg

SEQ ID NO: 21317 - RNA, 20 nt, synthetic construct
  source 1..20: mol_type = other RNA
agttgtatgccaaaaaattg

SEQ ID NO: 21318 - RNA, 20 nt, synthetic construct
  source 1..20: mol_type = other RNA
agttgtcagaattagaaagc

SEQ ID NO: 21319 - RNA, 20 nt, synthetic construct
  source 1..20: mol_type = other RNA
agttgtgatatattatgaac

SEQ ID NO: 21320 - RNA, 20 nt, synthetic construct
  source 1..20: mol_type = other RNA
agttgtgctacctcaaattg

SEQ ID NO: 21321 - RNA, 20 nt, synthetic construct
  source 1..20: mol_type = other RNA
agttgtggtgagccaagatc

SEQ ID NO: 21322 - RNA, 20 nt, synthetic construct
  source 1..20: mol_type = other RNA
agttgtgtcatttttgtatt

SEQ ID NO: 21323 - RNA, 20 nt, synthetic construct
  source 1..20: mol_type = other RNA
agttgtttacttgggtataa

SEQ ID NO: 21324 - RNA, 20 nt, synthetic construct
  source 1..20: mol_type = other RNA
agttgtttccactttgaggt

SEQ ID NO: 21325 - RNA, 20 nt, synthetic construct
  source 1..20: mol_type = other RNA
agtttaaaagtaaattcgca

SEQ ID NO: 21326 - RNA, 20 nt, synthetic construct
  source 1..20: mol_type = other RNA
agtttaaagctttgtgactg

SEQ ID NO: 21327 - RNA, 20 nt, synthetic construct
  source 1..20: mol_type = other RNA
agtttaaccaattatgctga

SEQ ID NO: 21328 - RNA, 20 nt, synthetic construct
  source 1..20: mol_type = other RNA
agtttaactttgatgaattc

SEQ ID NO: 21329 - RNA, 20 nt, synthetic construct
  source 1..20: mol_type = other RNA
agtttaattcttttgctgta

SEQ ID NO: 21330 - RNA, 20 nt, synthetic construct
  source 1..20: mol_type = other RNA
agtttaattgggggaaaatt

SEQ ID NO: 21331 - RNA, 20 nt, synthetic construct
  source 1..20: mol_type = other RNA
agtttacacgccttcgcggg

SEQ ID NO: 21332 - RNA, 20 nt, synthetic construct
  source 1..20: mol_type = other RNA
agtttacactatggcttttg

SEQ ID NO: 21333 - RNA, 20 nt, synthetic construct
  source 1..20: mol_type = other RNA
agtttagcaatccaaggaca

SEQ ID NO: 21334 - RNA, 20 nt, synthetic construct
  source 1..20: mol_type = other RNA
agtttagtaaatctttggtg

SEQ ID NO: 21335 - RNA, 20 nt, synthetic construct
  source 1..20: mol_type = other RNA
agtttagtgcagtatcttga

SEQ ID NO: 21336 - RNA, 20 nt, synthetic construct
  source 1..20: mol_type = other RNA
agtttagttactcaaatcca

SEQ ID NO: 21337 - RNA, 20 nt, synthetic construct
  source 1..20: mol_type = other RNA
agtttatatgcctagatgat

SEQ ID NO: 21338 - RNA, 20 nt, synthetic construct
  source 1..20: mol_type = other RNA
agtttatattctaagtttgc

SEQ ID NO: 21339 - RNA, 20 nt, synthetic construct
  source 1..20: mol_type = other RNA
agtttatcagtctccaatcc

SEQ ID NO: 21340 - RNA, 20 nt, synthetic construct
  source 1..20: mol_type = other RNA
agtttatgggtcaaccacta

SEQ ID NO: 21341 - RNA, 20 nt, synthetic construct
  source 1..20: mol_type = other RNA
agtttattcatacgttaact

SEQ ID NO: 21342 - RNA, 20 nt, synthetic construct
  source 1..20: mol_type = other RNA
agtttcaaaagctccccgga

SEQ ID NO: 21343 - RNA, 20 nt, synthetic construct
  source 1..20: mol_type = other RNA
agtttcaaactgtggtcact

SEQ ID NO: 21344 - RNA, 20 nt, synthetic construct
  source 1..20: mol_type = other RNA
agtttcaatgacttttatca

SEQ ID NO: 21345 - RNA, 20 nt, synthetic construct
  source 1..20: mol_type = other RNA
agtttcaccctgcgaaggca

SEQ ID NO: 21346 - RNA, 20 nt, synthetic construct
  source 1..20: mol_type = other RNA
agtttcacttcttagtaaat

SEQ ID NO: 21347 - RNA, 20 nt, synthetic construct
  source 1..20: mol_type = other RNA
agtttcagtggttaatatat

SEQ ID NO: 21348 - RNA, 20 nt, synthetic construct
  source 1..20: mol_type = other RNA
agtttcatctatgtcccctg

SEQ ID NO: 21349 - RNA, 20 nt, synthetic construct
  source 1..20: mol_type = other RNA
agtttcatggacttcctatt

SEQ ID NO: 21350 - RNA, 20 nt, synthetic construct
  source 1..20: mol_type = other RNA
agtttccagaaaactggcaa

SEQ ID NO: 21351 - RNA, 20 nt, synthetic construct
  source 1..20: mol_type = other RNA
agtttccatggaggggccag

SEQ ID NO: 21352 - RNA, 20 nt, synthetic construct
  source 1..20: mol_type = other RNA
agtttccattctcttaattt

SEQ ID NO: 21353 - RNA, 20 nt, synthetic construct
  source 1..20: mol_type = other RNA
agtttccctctgagagaagt

SEQ ID NO: 21354 - RNA, 20 nt, synthetic construct
  source 1..20: mol_type = other RNA
agtttccgttttgcaagatg

SEQ ID NO: 21355 - RNA, 20 nt, synthetic construct
  source 1..20: mol_type = other RNA
agtttcctacatactgcact

SEQ ID NO: 21356 - RNA, 20 nt, synthetic construct
  source 1..20: mol_type = other RNA
agtttcctagaaaatcatac

SEQ ID NO: 21357 - RNA, 20 nt, synthetic construct
  source 1..20: mol_type = other RNA
agtttcctgcacatgcacaa

SEQ ID NO: 21358 - RNA, 20 nt, synthetic construct
  source 1..20: mol_type = other RNA
agtttctagccataatcctt

SEQ ID NO: 21359 - RNA, 20 nt, synthetic construct
  source 1..20: mol_type = other RNA
agtttctcaacttagccttg

SEQ ID NO: 21360 - RNA, 20 nt, synthetic construct
  source 1..20: mol_type = other RNA
agtttctctctccctgccct

SEQ ID NO: 21361 - RNA, 20 nt, synthetic construct
  source 1..20: mol_type = other RNA
agtttctctgctttttcttg

SEQ ID NO: 21362 - RNA, 20 nt, synthetic construct
  source 1..20: mol_type = other RNA
agtttctgatttatctttct

SEQ ID NO: 21363 - RNA, 20 nt, synthetic construct
  source 1..20: mol_type = other RNA
agtttctggaagtttcctgc

SEQ ID NO: 21364 - RNA, 20 nt, synthetic construct
  source 1..20: mol_type = other RNA
agtttctttttgttttctcc

SEQ ID NO: 21365 - RNA, 20 nt, synthetic construct
  source 1..20: mol_type = other RNA
agtttgaaactttaagagta

SEQ ID NO: 21366 - RNA, 20 nt, synthetic construct
  source 1..20: mol_type = other RNA
agtttgacctgtaatttttc

SEQ ID NO: 21367 - RNA, 20 nt, synthetic construct
  source 1..20: mol_type = other RNA
agtttgagaagccacacagt

SEQ ID NO: 21368 - RNA, 20 nt, synthetic construct
  source 1..20: mol_type = other RNA
agtttgagactgcagtgacc

SEQ ID NO: 21369 - RNA, 20 nt, synthetic construct
  source 1..20: mol_type = other RNA
agtttgaggccgcagtgagc

SEQ ID NO: 21370 - RNA, 20 nt, synthetic construct
  source 1..20: mol_type = other RNA
agtttgaggtgtacaattag

SEQ ID NO: 21371 - RNA, 20 nt, synthetic construct
  source 1..20: mol_type = other RNA
agtttgagtatttcatgtac

SEQ ID NO: 21372 - RNA, 20 nt, synthetic construct
  source 1..20: mol_type = other RNA
agtttgcaatacagttaacg

SEQ ID NO: 21373 - RNA, 20 nt, synthetic construct
  source 1..20: mol_type = other RNA
agtttgcacgtttttagaaa

SEQ ID NO: 21374 - RNA, 20 nt, synthetic construct
  source 1..20: mol_type = other RNA
agtttgcattacatgaatgg

SEQ ID NO: 21375 - RNA, 20 nt, synthetic construct
  source 1..20: mol_type = other RNA
agtttgccaaagattcttgt

SEQ ID NO: 21376 - RNA, 20 nt, synthetic construct
  source 1..20: mol_type = other RNA
agtttgctagtattttgttg

SEQ ID NO: 21377 - RNA, 20 nt, synthetic construct
  source 1..20: mol_type = other RNA
agtttgctagtggtaactag

SEQ ID NO: 21378 - RNA, 20 nt, synthetic construct
  source 1..20: mol_type = other RNA
agtttgctctgcaaatgagg

SEQ ID NO: 21379 - RNA, 20 nt, synthetic construct
  source 1..20: mol_type = other RNA
agtttggaaccagcctggcc

SEQ ID NO: 21380 - RNA, 20 nt, synthetic construct
  source 1..20: mol_type = other RNA
agtttggcaatttctcaaaa

SEQ ID NO: 21381 - RNA, 20 nt, synthetic construct
  source 1..20: mol_type = other RNA
agtttggctcccatgattca

SEQ ID NO: 21382 - RNA, 20 nt, synthetic construct
  source 1..20: mol_type = other RNA
agtttgggtgacagagagag

SEQ ID NO: 21383 - RNA, 20 nt, synthetic construct
  source 1..20: mol_type = other RNA
agtttggtgtatttagtata

SEQ ID NO: 21384 - RNA, 20 nt, synthetic construct
  source 1..20: mol_type = other RNA
agtttggttcatttcaggaa

SEQ ID NO: 21385 - RNA, 20 nt, synthetic construct
  source 1..20: mol_type = other RNA
agtttgtagctcaaagcata

SEQ ID NO: 21386 - RNA, 20 nt, synthetic construct
  source 1..20: mol_type = other RNA
agtttgtgttttcactctca

SEQ ID NO: 21387 - RNA, 20 nt, synthetic construct
  source 1..20: mol_type = other RNA
agtttgttctgctgttgatg

SEQ ID NO: 21388 - RNA, 20 nt, synthetic construct
  source 1..20: mol_type = other RNA
agtttgttctgtcacatttg

SEQ ID NO: 21389 - RNA, 20 nt, synthetic construct
  source 1..20: mol_type = other RNA
agtttgttgacccaatcatg

SEQ ID NO: 21390 - RNA, 20 nt, synthetic construct
  source 1..20: mol_type = other RNA
agttttaactcttgcattag

SEQ ID NO: 21391 - RNA, 20 nt, synthetic construct
  source 1..20: mol_type = other RNA
agttttaacttaagaactgt

SEQ ID NO: 21392 - RNA, 20 nt, synthetic construct
  source 1..20: mol_type = other RNA
agttttaggaaaatagagtt

SEQ ID NO: 21393 - RNA, 20 nt, synthetic construct
  source 1..20: mol_type = other RNA
agttttatagtcttagctct

SEQ ID NO: 21394 - RNA, 20 nt, synthetic construct
  source 1..20: mol_type = other RNA
agttttatcaattagttcct

SEQ ID NO: 21395 - RNA, 20 nt, synthetic construct
  source 1..20: mol_type = other RNA
agttttcaacctttgttgaa

SEQ ID NO: 21396 - RNA, 20 nt, synthetic construct
  source 1..20: mol_type = other RNA
agttttcacttttgtgcaac

SEQ ID NO: 21397 - RNA, 20 nt, synthetic construct
  source 1..20: mol_type = other RNA
agttttccaaccactgaatc

SEQ ID NO: 21398 - RNA, 20 nt, synthetic construct
  source 1..20: mol_type = other RNA
agttttccaataagttaact

SEQ ID NO: 21399 - RNA, 20 nt, synthetic construct
  source 1..20: mol_type = other RNA
agttttccaatccgggaaca

SEQ ID NO: 21400 - RNA, 20 nt, synthetic construct
  source 1..20: mol_type = other RNA
agttttccaggaaaagcaaa

SEQ ID NO: 21401 - RNA, 20 nt, synthetic construct
  source 1..20: mol_type = other RNA
agttttccagtatattcata

SEQ ID NO: 21402 - RNA, 20 nt, synthetic construct
  source 1..20: mol_type = other RNA
agttttccccctacacccag

SEQ ID NO: 21403 - RNA, 20 nt, synthetic construct
  source 1..20: mol_type = other RNA
agttttccctgtgtatgtgt

SEQ ID NO: 21404 - RNA, 20 nt, synthetic construct
  source 1..20: mol_type = other RNA
agttttctggaaactcaaac

SEQ ID NO: 21405 - RNA, 20 nt, synthetic construct
  source 1..20: mol_type = other RNA
agttttgaccaaaacaaaaa

SEQ ID NO: 21406 - RNA, 20 nt, synthetic construct
  source 1..20: mol_type = other RNA
agttttgagtggcatcatac

SEQ ID NO: 21407 - RNA, 20 nt, synthetic construct
  source 1..20: mol_type = other RNA
agttttgcagttggggactc

SEQ ID NO: 21408 - RNA, 20 nt, synthetic construct
  source 1..20: mol_type = other RNA
agttttgcctctttgctaat

SEQ ID NO: 21409 - RNA, 20 nt, synthetic construct
  source 1..20: mol_type = other RNA
agttttgggggaagagagca

SEQ ID NO: 21410 - RNA, 20 nt, synthetic construct
  source 1..20: mol_type = other RNA
agttttggtgtcatttttaa

SEQ ID NO: 21411 - RNA, 20 nt, synthetic construct
  source 1..20: mol_type = other RNA
agttttgtatatggtttaag

SEQ ID NO: 21412 - RNA, 20 nt, synthetic construct
  source 1..20: mol_type = other RNA
agttttgttgaatcttaaca

SEQ ID NO: 21413 - RNA, 20 nt, synthetic construct
  source 1..20: mol_type = other RNA
agtttttacatgtagttttc

SEQ ID NO: 21414 - RNA, 20 nt, synthetic construct
  source 1..20: mol_type = other RNA
agttttttcctttgcctttc

SEQ ID NO: 21415 - RNA, 20 nt, synthetic construct
  source 1..20: mol_type = other RNA
agttttttggtagataccag

SEQ ID NO: 21416 - RNA, 20 nt, synthetic construct
  source 1..20: mol_type = other RNA
ataaaaaaggaatctgggcc

SEQ ID NO: 21417 - RNA, 20 nt, synthetic construct
  source 1..20: mol_type = other RNA
ataaaaacatatgcaggacc

SEQ ID NO: 21418 - RNA, 20 nt, synthetic construct
  source 1..20: mol_type = other RNA
ataaaaaccaaacactggaa

SEQ ID NO: 21419 - RNA, 20 nt, synthetic construct
  source 1..20: mol_type = other RNA
ataaaaacctttttgggatc

SEQ ID NO: 21420 - RNA, 20 nt, synthetic construct
  source 1..20: mol_type = other RNA
ataaaaagacacaaaagagc

SEQ ID NO: 21421 - RNA, 20 nt, synthetic construct
  source 1..20: mol_type = other RNA
ataaaaagcctctctgatgg

SEQ ID NO: 21422 - RNA, 20 nt, synthetic construct
  source 1..20: mol_type = other RNA
ataaaaagcctctgtggacc

SEQ ID NO: 21423 - RNA, 20 nt, synthetic construct
  source 1..20: mol_type = other RNA
ataaaaagcgttggagacag

SEQ ID NO: 21424 - RNA, 20 nt, synthetic construct
  source 1..20: mol_type = other RNA
ataaaaaggagggaaaatgt

SEQ ID NO: 21425 - RNA, 20 nt, synthetic construct
  source 1..20: mol_type = other RNA
ataaaaagtatcgtgagact

SEQ ID NO: 21426 - RNA, 20 nt, synthetic construct
  source 1..20: mol_type = other RNA
ataaaaagtgacttctggat

SEQ ID NO: 21427 - RNA, 20 nt, synthetic construct
  source 1..20: mol_type = other RNA
ataaaaataaagacttcacg

SEQ ID NO: 21428 - RNA, 20 nt, synthetic construct
  source 1..20: mol_type = other RNA
ataaaaataacgggccgggc

SEQ ID NO: 21429 - RNA, 20 nt, synthetic construct
  source 1..20: mol_type = other RNA
ataaaaatctctacagggaa

SEQ ID NO: 21430 - RNA, 20 nt, synthetic construct
  source 1..20: mol_type = other RNA
ataaaaatggcacatactgc

SEQ ID NO: 21431 - RNA, 20 nt, synthetic construct
  source 1..20: mol_type = other RNA
ataaaaatggtcaacatgaa

SEQ ID NO: 21432 - RNA, 20 nt, synthetic construct
  source 1..20: mol_type = other RNA
ataaaaattccgctctggtt

SEQ ID NO: 21433 - RNA, 20 nt, synthetic construct
  source 1..20: mol_type = other RNA
ataaaacacaaggacaggtc

SEQ ID NO: 21434 - RNA, 20 nt, synthetic construct
  source 1..20: mol_type = other RNA
ataaaacacatgtcatgggc

SEQ ID NO: 21435 - RNA, 20 nt, synthetic construct
  source 1..20: mol_type = other RNA
ataaaacatggccagtatct

SEQ ID NO: 21436 - RNA, 20 nt, synthetic construct
  source 1..20: mol_type = other RNA
ataaaacatgttgtgtagaa

SEQ ID NO: 21437 - RNA, 20 nt, synthetic construct
  source 1..20: mol_type = other RNA
ataaaacctggaatgggttg

SEQ ID NO: 21438 - RNA, 20 nt, synthetic construct
  source 1..20: mol_type = other RNA
ataaaactcttagcttagaa

SEQ ID NO: 21439 - RNA, 20 nt, synthetic construct
  source 1..20: mol_type = other RNA
ataaaactgaagtttatcgt

SEQ ID NO: 21440 - RNA, 20 nt, synthetic construct
  source 1..20: mol_type = other RNA
ataaaagcctcatttgaact

SEQ ID NO: 21441 - RNA, 20 nt, synthetic construct
  source 1..20: mol_type = other RNA
ataaaagcgtactgtgatta

SEQ ID NO: 21442 - RNA, 20 nt, synthetic construct
  source 1..20: mol_type = other RNA
ataaaagctctaatagttca

SEQ ID NO: 21443 - RNA, 20 nt, synthetic construct
  source 1..20: mol_type = other RNA
ataaaagctggagttatttg

SEQ ID NO: 21444 - RNA, 20 nt, synthetic construct
  source 1..20: mol_type = other RNA
ataaaagcttatgatcttgg

SEQ ID NO: 21445 - RNA, 20 nt, synthetic construct
  source 1..20: mol_type = other RNA
ataaaaggaatataaacgtg

SEQ ID NO: 21446 - RNA, 20 nt, synthetic construct
  source 1..20: mol_type = other RNA
ataaaaggatatgggccaaa

SEQ ID NO: 21447 - RNA, 20 nt, synthetic construct
  source 1..20: mol_type = other RNA
ataaaagtcattgaaactca

SEQ ID NO: 21448 - RNA, 20 nt, synthetic construct
  source 1..20: mol_type = other RNA
ataaaagttacaaggattga

SEQ ID NO: 21449 - RNA, 20 nt, synthetic construct
  source 1..20: mol_type = other RNA
ataaaagttccaagattttc

SEQ ID NO: 21450 - RNA, 20 nt, synthetic construct
  source 1..20: mol_type = other RNA
ataaaatagcaggattcttg

SEQ ID NO: 21451 - RNA, 20 nt, synthetic construct
  source 1..20: mol_type = other RNA
ataaaataggaagtccatga

SEQ ID NO: 21452 - RNA, 20 nt, synthetic construct
  source 1..20: mol_type = other RNA
ataaaatatgtccttttgag

SEQ ID NO: 21453 - RNA, 20 nt, synthetic construct
  source 1..20: mol_type = other RNA
ataaaatctgtatgagaaga

SEQ ID NO: 21454 - RNA, 20 nt, synthetic construct
  source 1..20: mol_type = other RNA
ataaaatgagggtaaaatag

SEQ ID NO: 21455 - RNA, 20 nt, synthetic construct
  source 1..20: mol_type = other RNA
ataaaatgatggcaacaatc

SEQ ID NO: 21456 - RNA, 20 nt, synthetic construct
  source 1..20: mol_type = other RNA
ataaaatgctggaaattttc

SEQ ID NO: 21457 - RNA, 20 nt, synthetic construct
  source 1..20: mol_type = other RNA
ataaaatgtctggccgggca

SEQ ID NO: 21458 - RNA, 20 nt, synthetic construct
  source 1..20: mol_type = other RNA
ataaaatgtttagcggaatg

SEQ ID NO: 21459 - RNA, 20 nt, synthetic construct
  source 1..20: mol_type = other RNA
ataaaattcaccaaacacct

SEQ ID NO: 21460 - RNA, 20 nt, synthetic construct
  source 1..20: mol_type = other RNA
ataaaattctgaccctttat

SEQ ID NO: 21461 - RNA, 20 nt, synthetic construct
  source 1..20: mol_type = other RNA
ataaaattctgatagcttga

SEQ ID NO: 21462 - RNA, 20 nt, synthetic construct
  source 1..20: mol_type = other RNA
ataaacaaagagaacaatgg

SEQ ID NO: 21463 - RNA, 20 nt, synthetic construct
  source 1..20: mol_type = other RNA
ataaacaagtcacaaaaaga

SEQ ID NO: 21464 - RNA, 20 nt, synthetic construct
  source 1..20: mol_type = other RNA
ataaacacagaacactaaag

SEQ ID NO: 21465 - RNA, 20 nt, synthetic construct
  source 1..20: mol_type = other RNA
ataaacacttgaattagtga

SEQ ID NO: 21466 - RNA, 20 nt, synthetic construct
  source 1..20: mol_type = other RNA
ataaacattttccctccttt

SEQ ID NO: 21467 - RNA, 20 nt, synthetic construct
  source 1..20: mol_type = other RNA
ataaaccaagtttggttcat

SEQ ID NO: 21468 - RNA, 20 nt, synthetic construct
  source 1..20: mol_type = other RNA
ataaaccacgcagtttgttc

SEQ ID NO: 21469 - RNA, 20 nt, synthetic construct
  source 1..20: mol_type = other RNA
ataaacgacaccagaactac

SEQ ID NO: 21470 - RNA, 20 nt, synthetic construct
  source 1..20: mol_type = other RNA
ataaacgacagcaggaaaag

SEQ ID NO: 21471 - RNA, 20 nt, synthetic construct
  source 1..20: mol_type = other RNA
ataaacgcggaatgaagcag

SEQ ID NO: 21472 - RNA, 20 nt, synthetic construct
  source 1..20: mol_type = other RNA
ataaacgtgtgtgtaagcac

SEQ ID NO: 21473 - RNA, 20 nt, synthetic construct
  source 1..20: mol_type = other RNA
ataaacgttaactatttctc

SEQ ID NO: 21474 - RNA, 20 nt, synthetic construct
  source 1..20: mol_type = other RNA
ataaactaacaaagaacagg

SEQ ID NO: 21475 - RNA, 20 nt, synthetic construct
  source 1..20: mol_type = other RNA
ataaactagattaccttgaa

SEQ ID NO: 21476 - RNA, 20 nt, synthetic construct
  source 1..20: mol_type = other RNA
ataaactcttccttatccga

SEQ ID NO: 21477 - RNA, 20 nt, synthetic construct
  source 1..20: mol_type = other RNA
ataaactggaaggaaataag

SEQ ID NO: 21478 - RNA, 20 nt, synthetic construct
  source 1..20: mol_type = other RNA
ataaactggaattcatcaaa

SEQ ID NO: 21479 - RNA, 20 nt, synthetic construct
  source 1..20: mol_type = other RNA
ataaacttcagttttgagtg

SEQ ID NO: 21480 - RNA, 20 nt, synthetic construct
  source 1..20: mol_type = other RNA
ataaacttccctctcagtgg

SEQ ID NO: 21481 - RNA, 20 nt, synthetic construct
  source 1..20: mol_type = other RNA
ataaagaacatgattgggtc

SEQ ID NO: 21482 - RNA, 20 nt, synthetic construct
  source 1..20: mol_type = other RNA
ataaagaactccaacaattc

SEQ ID NO: 21483 - RNA, 20 nt, synthetic construct
  source 1..20: mol_type = other RNA
ataaagacagacatttggaa

SEQ ID NO: 21484 - RNA, 20 nt, synthetic construct
  source 1..20: mol_type = other RNA
ataaagacttcacgatgctt

SEQ ID NO: 21485 - RNA, 20 nt, synthetic construct
  source 1..20: mol_type = other RNA
ataaagagcaggtggaaggc

SEQ ID NO: 21486 - RNA, 20 nt, synthetic construct
  source 1..20: mol_type = other RNA
ataaagcaagtatgagccac

SEQ ID NO: 21487 - RNA, 20 nt, synthetic construct
  source 1..20: mol_type = other RNA
ataaagccggattcctttca

SEQ ID NO: 21488 - RNA, 20 nt, synthetic construct
  source 1..20: mol_type = other RNA
ataaaggatgcacaagacag

SEQ ID NO: 21489 - RNA, 20 nt, synthetic construct
  source 1..20: mol_type = other RNA
ataaaggcaatgctctcttc

SEQ ID NO: 21490 - RNA, 20 nt, synthetic construct
  source 1..20: mol_type = other RNA
ataaaggctttcgtatggaa

SEQ ID NO: 21491 - RNA, 20 nt, synthetic construct
  source 1..20: mol_type = other RNA
ataaagggtcagaattttat

SEQ ID NO: 21492 - RNA, 20 nt, synthetic construct
  source 1..20: mol_type = other RNA
ataaagggtctggtatctac

SEQ ID NO: 21493 - RNA, 20 nt, synthetic construct
  source 1..20: mol_type = other RNA
ataaaggtaaggaaacccca

SEQ ID NO: 21494 - RNA, 20 nt, synthetic construct
  source 1..20: mol_type = other RNA
ataaaggtgctaattgtttg

SEQ ID NO: 21495 - RNA, 20 nt, synthetic construct
  source 1..20: mol_type = other RNA
ataaagtcagaggagcagtt

SEQ ID NO: 21496 - RNA, 20 nt, synthetic construct
  source 1..20: mol_type = other RNA
ataaagtcttccattttaga

SEQ ID NO: 21497 - RNA, 20 nt, synthetic construct
  source 1..20: mol_type = other RNA
ataaagtcttgctggaagtt

SEQ ID NO: 21498 - RNA, 20 nt, synthetic construct
  source 1..20: mol_type = other RNA
ataaagttccccattgacaa

SEQ ID NO: 21499 - RNA, 20 nt, synthetic construct
  source 1..20: mol_type = other RNA
ataaagtttccgttttgcaa

SEQ ID NO: 21500 - RNA, 20 nt, synthetic construct
  source 1..20: mol_type = other RNA
ataaataaaatgtctggccg

SEQ ID NO: 21501 - RNA, 20 nt, synthetic construct
  source 1..20: mol_type = other RNA
ataaatacgataaacttcag

SEQ ID NO: 21502 - RNA, 20 nt, synthetic construct
  source 1..20: mol_type = other RNA
ataaatacgtgtatactggg

SEQ ID NO: 21503 - RNA, 20 nt, synthetic construct
  source 1..20: mol_type = other RNA
ataaatactagtaggatgaa

SEQ ID NO: 21504 - RNA, 20 nt, synthetic construct
  source 1..20: mol_type = other RNA
ataaatagggtgctactcaa

SEQ ID NO: 21505 - RNA, 20 nt, synthetic construct
  source 1..20: mol_type = other RNA
ataaatatgtgttacaactc

SEQ ID NO: 21506 - RNA, 20 nt, synthetic construct
  source 1..20: mol_type = other RNA
ataaatcaaggtacaataca

SEQ ID NO: 21507 - RNA, 20 nt, synthetic construct
  source 1..20: mol_type = other RNA
ataaatcaatctgtttccta

SEQ ID NO: 21508 - RNA, 20 nt, synthetic construct
  source 1..20: mol_type = other RNA
ataaatcacaggaaagatgt

SEQ ID NO: 21509 - RNA, 20 nt, synthetic construct
  source 1..20: mol_type = other RNA
ataaatcagaaactgacagg

SEQ ID NO: 21510 - RNA, 20 nt, synthetic construct
  source 1..20: mol_type = other RNA
ataaatcagtaagaaaacag

SEQ ID NO: 21511 - RNA, 20 nt, synthetic construct
  source 1..20: mol_type = other RNA
ataaatccaacgaccggacg

SEQ ID NO: 21512 - RNA, 20 nt, synthetic construct
  source 1..20: mol_type = other RNA
ataaatcccacttgatccag

SEQ ID NO: 21513 - RNA, 20 nt, synthetic construct
  source 1..20: mol_type = other RNA
ataaatcctcacatgtttgg

SEQ ID NO: 21514 - RNA, 20 nt, synthetic construct
  source 1..20: mol_type = other RNA
ataaatctaaagccaatctt

SEQ ID NO: 21515 - RNA, 20 nt, synthetic construct
  source 1..20: mol_type = other RNA
ataaatctaagtctcaacct

SEQ ID NO: 21516 - RNA, 20 nt, synthetic construct
  source 1..20: mol_type = other RNA
ataaatgaatattcgttcca

SEQ ID NO: 21517 - RNA, 20 nt, synthetic construct
  source 1..20: mol_type = other RNA
ataaatgaggtatcatttcc

SEQ ID NO: 21518 - RNA, 20 nt, synthetic construct
  source 1..20: mol_type = other RNA
ataaatgatgagctactgca

SEQ ID NO: 21519 - RNA, 20 nt, synthetic construct
  source 1..20: mol_type = other RNA
ataaatgcataaacgacagc

SEQ ID NO: 21520 - RNA, 20 nt, synthetic construct
  source 1..20: mol_type = other RNA
ataaatgctcagtgggttca

SEQ ID NO: 21521 - RNA, 20 nt, synthetic construct
  source 1..20: mol_type = other RNA
ataaatggcatctttaagat

SEQ ID NO: 21522 - RNA, 20 nt, synthetic construct
  source 1..20: mol_type = other RNA
ataaatggctttttacgatg

SEQ ID NO: 21523 - RNA, 20 nt, synthetic construct
  source 1..20: mol_type = other RNA
ataaatggtagcttgggcta

SEQ ID NO: 21524 - RNA, 20 nt, synthetic construct
  source 1..20: mol_type = other RNA
ataaatggtgcaggccagat

SEQ ID NO: 21525 - RNA, 20 nt, synthetic construct
  source 1..20: mol_type = other RNA
ataaatgttcagtttatggg

SEQ ID NO: 21526 - RNA, 20 nt, synthetic construct
  source 1..20: mol_type = other RNA
ataaattacaaaataggcag

SEQ ID NO: 21527 - RNA, 20 nt, synthetic construct
  source 1..20: mol_type = other RNA
ataaattacccaaagacttt

SEQ ID NO: 21528 - RNA, 20 nt, synthetic construct
  source 1..20: mol_type = other RNA
ataaattactgtctgtgaaa

SEQ ID NO: 21529 - RNA, 20 nt, synthetic construct
  source 1..20: mol_type = other RNA
ataaattatagctccaaaag

SEQ ID NO: 21530 - RNA, 20 nt, synthetic construct
  source 1..20: mol_type = other RNA
ataaattattagcttgctag

SEQ ID NO: 21531 - RNA, 20 nt, synthetic construct
  source 1..20: mol_type = other RNA
ataaatttgccacattttac

SEQ ID NO: 21532 - RNA, 20 nt, synthetic construct
  source 1..20: mol_type = other RNA
ataacaaaaatacgaaagtg

SEQ ID NO: 21533 - RNA, 20 nt, synthetic construct
  source 1..20: mol_type = other RNA
ataacaaaaggtagaagata

SEQ ID NO: 21534 - RNA, 20 nt, synthetic construct
  source 1..20: mol_type = other RNA
ataacaaagctctgatgctt

SEQ ID NO: 21535 - RNA, 20 nt, synthetic construct
  source 1..20: mol_type = other RNA
ataacaaagggttcttggaa

SEQ ID NO: 21536 - RNA, 20 nt, synthetic construct
  source 1..20: mol_type = other RNA
ataacaagaaaatctgacaa

SEQ ID NO: 21537 - RNA, 20 nt, synthetic construct
  source 1..20: mol_type = other RNA
ataacaccatagctgaaggc

SEQ ID NO: 21538 - RNA, 20 nt, synthetic construct
  source 1..20: mol_type = other RNA
ataacacgcagaaccactga

SEQ ID NO: 21539 - RNA, 20 nt, synthetic construct
  source 1..20: mol_type = other RNA
ataacagaagaagaattcta

SEQ ID NO: 21540 - RNA, 20 nt, synthetic construct
  source 1..20: mol_type = other RNA
ataacagatggaactctatt

SEQ ID NO: 21541 - RNA, 20 nt, synthetic construct
  source 1..20: mol_type = other RNA
ataacagcctaagcaaatgt

SEQ ID NO: 21542 - RNA, 20 nt, synthetic construct
  source 1..20: mol_type = other RNA
ataacagtattgtcttctaa

SEQ ID NO: 21543 - RNA, 20 nt, synthetic construct
  source 1..20: mol_type = other RNA
ataacagtggttaggaaaat

SEQ ID NO: 21544 - RNA, 20 nt, synthetic construct
  source 1..20: mol_type = other RNA
ataacataaaagcgtactgt

SEQ ID NO: 21545 - RNA, 20 nt, synthetic construct
  source 1..20: mol_type = other RNA
ataacatgcatatgtttgta

SEQ ID NO: 21546 - RNA, 20 nt, synthetic construct
  source 1..20: mol_type = other RNA
ataacattaccaataaaagc

SEQ ID NO: 21547 - RNA, 20 nt, synthetic construct
  source 1..20: mol_type = other RNA
ataacattttctctacagtt

SEQ ID NO: 21548 - RNA, 20 nt, synthetic construct
  source 1..20: mol_type = other RNA
ataaccaataagaagtgaaa

SEQ ID NO: 21549 - RNA, 20 nt, synthetic construct
  source 1..20: mol_type = other RNA
ataaccaatgtcagagatct

SEQ ID NO: 21550 - RNA, 20 nt, synthetic construct
  source 1..20: mol_type = other RNA
ataaccacatgtggcttgtg

SEQ ID NO: 21551 - RNA, 20 nt, synthetic construct
  source 1..20: mol_type = other RNA
ataaccacgagtaatggatg

SEQ ID NO: 21552 - RNA, 20 nt, synthetic construct
  source 1..20: mol_type = other RNA
ataacccatatctttgctta

SEQ ID NO: 21553 - RNA, 20 nt, synthetic construct
  source 1..20: mol_type = other RNA
ataacccgttttttccttca

SEQ ID NO: 21554 - RNA, 20 nt, synthetic construct
  source 1..20: mol_type = other RNA
ataaccctgttttgtagatt

SEQ ID NO: 21555 - RNA, 20 nt, synthetic construct
  source 1..20: mol_type = other RNA
ataacctcaaagtggaaaca

SEQ ID NO: 21556 - RNA, 20 nt, synthetic construct
  source 1..20: mol_type = other RNA
ataacctcataagaactcct

SEQ ID NO: 21557 - RNA, 20 nt, synthetic construct
  source 1..20: mol_type = other RNA
ataaccttgaacttccaggc

SEQ ID NO: 21558 - RNA, 20 nt, synthetic construct
  source 1..20: mol_type = other RNA
ataacgatagtctcctatat

SEQ ID NO: 21559 - RNA, 20 nt, synthetic construct
  source 1..20: mol_type = other RNA
ataacgggccgggcgctgtg

SEQ ID NO: 21560 - RNA, 20 nt, synthetic construct
  source 1..20: mol_type = other RNA
ataactaaactttgagtagc

SEQ ID NO: 21561 - RNA, 20 nt, synthetic construct
  source 1..20: mol_type = other RNA
ataactaatgagaatttcag

SEQ ID NO: 21562 - RNA, 20 nt, synthetic construct
  source 1..20: mol_type = other RNA
ataactacacatcagtgctg

SEQ ID NO: 21563 - RNA, 20 nt, synthetic construct
  source 1..20: mol_type = other RNA
ataactagaaacttcttctg

SEQ ID NO: 21564 - RNA, 20 nt, synthetic construct
  source 1..20: mol_type = other RNA
ataactcaaaatgttcatac

SEQ ID NO: 21565 - RNA, 20 nt, synthetic construct
  source 1..20: mol_type = other RNA
ataactccagcttttattag

SEQ ID NO: 21566 - RNA, 20 nt, synthetic construct
  source 1..20: mol_type = other RNA
ataactcgtaatgcgatgat

SEQ ID NO: 21567 - RNA, 20 nt, synthetic construct
  source 1..20: mol_type = other RNA
ataactgaacatgtatgttt

SEQ ID NO: 21568 - RNA, 20 nt, synthetic construct
  source 1..20: mol_type = other RNA
ataactgatatgagggatga

SEQ ID NO: 21569 - RNA, 20 nt, synthetic construct
  source 1..20: mol_type = other RNA
ataactgcctaagtaatgct

SEQ ID NO: 21570 - RNA, 20 nt, synthetic construct
  source 1..20: mol_type = other RNA
ataactgggtgtgcacgttt

SEQ ID NO: 21571 - RNA, 20 nt, synthetic construct
  source 1..20: mol_type = other RNA
ataactggtgcttttttggt

SEQ ID NO: 21572 - RNA, 20 nt, synthetic construct
  source 1..20: mol_type = other RNA
ataactgtaaagtaatcaag

SEQ ID NO: 21573 - RNA, 20 nt, synthetic construct
  source 1..20: mol_type = other RNA
ataactgtcctgaattctaa

SEQ ID NO: 21574 - RNA, 20 nt, synthetic construct
  source 1..20: mol_type = other RNA
ataacttccatgagattaca

SEQ ID NO: 21575 - RNA, 20 nt, synthetic construct
  source 1..20: mol_type = other RNA
ataacttcccagacagggaa

SEQ ID NO: 21576 - RNA, 20 nt, synthetic construct
  source 1..20: mol_type = other RNA
ataacttggagaacttaaag

SEQ ID NO: 21577 - RNA, 20 nt, synthetic construct
  source 1..20: mol_type = other RNA
ataactttaatcaccaggcg

SEQ ID NO: 21578 - RNA, 20 nt, synthetic construct
  source 1..20: mol_type = other RNA
ataagaaaacaaattcatgc

SEQ ID NO: 21579 - RNA, 20 nt, synthetic construct
  source 1..20: mol_type = other RNA
ataagaaaatgtgacattag

SEQ ID NO: 21580 - RNA, 20 nt, synthetic construct
  source 1..20: mol_type = other RNA
ataagaaagatctcaaacag

SEQ ID NO: 21581 - RNA, 20 nt, synthetic construct
  source 1..20: mol_type = other RNA
ataagaactcctggtctccc

SEQ ID NO: 21582 - RNA, 20 nt, synthetic construct
  source 1..20: mol_type = other RNA
ataagaagattgagtcagta

SEQ ID NO: 21583 - RNA, 20 nt, synthetic construct
  source 1..20: mol_type = other RNA
ataagaaggtttgtagagca

SEQ ID NO: 21584 - RNA, 20 nt, synthetic construct
  source 1..20: mol_type = other RNA
ataagaagtgaaaaatgacc

SEQ ID NO: 21585 - RNA, 20 nt, synthetic construct
  source 1..20: mol_type = other RNA
ataagaataccaaattcacg

SEQ ID NO: 21586 - RNA, 20 nt, synthetic construct
  source 1..20: mol_type = other RNA
ataagacaccgctccacgcc

SEQ ID NO: 21587 - RNA, 20 nt, synthetic construct
  source 1..20: mol_type = other RNA
ataagacccagtggctagtg

SEQ ID NO: 21588 - RNA, 20 nt, synthetic construct
  source 1..20: mol_type = other RNA
ataagacccctcaggtgtca

SEQ ID NO: 21589 - RNA, 20 nt, synthetic construct
  source 1..20: mol_type = other RNA
ataagagaaggaagcaccaa

SEQ ID NO: 21590 - RNA, 20 nt, synthetic construct
  source 1..20: mol_type = other RNA
ataagagtccccaactgcaa

SEQ ID NO: 21591 - RNA, 20 nt, synthetic construct
  source 1..20: mol_type = other RNA
ataagagtgggcaaaaaagt

SEQ ID NO: 21592 - RNA, 20 nt, synthetic construct
  source 1..20: mol_type = other RNA
ataagatcatacacctggat

SEQ ID NO: 21593 - RNA, 20 nt, synthetic construct
  source 1..20: mol_type = other RNA
ataagatccaagtattgtat

SEQ ID NO: 21594 - RNA, 20 nt, synthetic construct
  source 1..20: mol_type = other RNA
ataagatctgtctttggccc

SEQ ID NO: 21595 - RNA, 20 nt, synthetic construct
  source 1..20: mol_type = other RNA
ataagatgatctaaatggtg

SEQ ID NO: 21596 - RNA, 20 nt, synthetic construct
  source 1..20: mol_type = other RNA
ataagcaaaattgacaaacc

SEQ ID NO: 21597 - RNA, 20 nt, synthetic construct
  source 1..20: mol_type = other RNA
ataagcaaagatatgggtta

SEQ ID NO: 21598 - RNA, 20 nt, synthetic construct
  source 1..20: mol_type = other RNA
ataagcacatggtgataact

SEQ ID NO: 21599 - RNA, 20 nt, synthetic construct
  source 1..20: mol_type = other RNA
ataagcagaattcaaaaaca

SEQ ID NO: 21600 - RNA, 20 nt, synthetic construct
  source 1..20: mol_type = other RNA
ataagccaatatccctgata

SEQ ID NO: 21601 - RNA, 20 nt, synthetic construct
  source 1..20: mol_type = other RNA
ataagccaccgcactcagcc

SEQ ID NO: 21602 - RNA, 20 nt, synthetic construct
  source 1..20: mol_type = other RNA
ataagcccaacctgattaga

SEQ ID NO: 21603 - RNA, 20 nt, synthetic construct
  source 1..20: mol_type = other RNA
ataagctaatcccaaagtga

SEQ ID NO: 21604 - RNA, 20 nt, synthetic construct
  source 1..20: mol_type = other RNA
ataagctcccagccaaacag

SEQ ID NO: 21605 - RNA, 20 nt, synthetic construct
  source 1..20: mol_type = other RNA
ataagcttcctctggctgac

SEQ ID NO: 21606 - RNA, 20 nt, synthetic construct
  source 1..20: mol_type = other RNA
ataagcttcgaagcaaaaca

SEQ ID NO: 21607 - RNA, 20 nt, synthetic construct
  source 1..20: mol_type = other RNA
ataaggaaagcacgtttgat

SEQ ID NO: 21608 - RNA, 20 nt, synthetic construct
  source 1..20: mol_type = other RNA
ataaggaaatacaaaaagtg

SEQ ID NO: 21609 - RNA, 20 nt, synthetic construct
  source 1..20: mol_type = other RNA
ataaggaagagtttatattc

SEQ ID NO: 21610 - RNA, 20 nt, synthetic construct
  source 1..20: mol_type = other RNA
ataagggcattttcaaggta

SEQ ID NO: 21611 - RNA, 20 nt, synthetic construct
  source 1..20: mol_type = other RNA
ataaggggaatcatgcagta

SEQ ID NO: 21612 - RNA, 20 nt, synthetic construct
  source 1..20: mol_type = other RNA
ataaggggcagggtggagtc

SEQ ID NO: 21613 - RNA, 20 nt, synthetic construct
  source 1..20: mol_type = other RNA
ataaggggctatctttactt

SEQ ID NO: 21614 - RNA, 20 nt, synthetic construct
  source 1..20: mol_type = other RNA
ataagggggaatctactctt

SEQ ID NO: 21615 - RNA, 20 nt, synthetic construct
  source 1..20: mol_type = other RNA
ataagggtctgttttacatg

SEQ ID NO: 21616 - RNA, 20 nt, synthetic construct
  source 1..20: mol_type = other RNA
ataagggtgataaaaaggag

SEQ ID NO: 21617 - RNA, 20 nt, synthetic construct
  source 1..20: mol_type = other RNA
ataaggtcacattcagaggt

SEQ ID NO: 21618 - RNA, 20 nt, synthetic construct
  source 1..20: mol_type = other RNA
ataaggtctgtaagtcagtt

SEQ ID NO: 21619 - RNA, 20 nt, synthetic construct
  source 1..20: mol_type = other RNA
ataaggttgttcttggttaa

SEQ ID NO: 21620 - RNA, 20 nt, synthetic construct
  source 1..20: mol_type = other RNA
ataagtagaaggtcaatcta

SEQ ID NO: 21621 - RNA, 20 nt, synthetic construct
  source 1..20: mol_type = other RNA
ataagtccctaacagtctcg

SEQ ID NO: 21622 - RNA, 20 nt, synthetic construct
  source 1..20: mol_type = other RNA
ataagtgagtttgacctgta

SEQ ID NO: 21623 - RNA, 20 nt, synthetic construct
  source 1..20: mol_type = other RNA
ataagtggaatcattccgta

SEQ ID NO: 21624 - RNA, 20 nt, synthetic construct
  source 1..20: mol_type = other RNA
ataagttaactgaaatcggg

SEQ ID NO: 21625 - RNA, 20 nt, synthetic construct
  source 1..20: mol_type = other RNA
ataagttcaaagaaactacc

SEQ ID NO: 21626 - RNA, 20 nt, synthetic construct
  source 1..20: mol_type = other RNA
ataagttctagagatttgct

SEQ ID NO: 21627 - RNA, 20 nt, synthetic construct
  source 1..20: mol_type = other RNA
ataagttgggagtctatttc

SEQ ID NO: 21628 - RNA, 20 nt, synthetic construct
  source 1..20: mol_type = other RNA
ataagtttcatggacttcct

SEQ ID NO: 21629 - RNA, 20 nt, synthetic construct
  source 1..20: mol_type = other RNA
ataataactacacatcagtg

SEQ ID NO: 21630 - RNA, 20 nt, synthetic construct
  source 1..20: mol_type = other RNA
ataatacaaatgatgaaggg

SEQ ID NO: 21631 - RNA, 20 nt, synthetic construct
  source 1..20: mol_type = other RNA
ataatacacttttcaggtat

SEQ ID NO: 21632 - RNA, 20 nt, synthetic construct
  source 1..20: mol_type = other RNA
ataatacctaacagccggca

SEQ ID NO: 21633 - RNA, 20 nt, synthetic construct
  source 1..20: mol_type = other RNA
ataatagctatcctaatggg

SEQ ID NO: 21634 - RNA, 20 nt, synthetic construct
  source 1..20: mol_type = other RNA
ataatagtctcacgatactt

SEQ ID NO: 21635 - RNA, 20 nt, synthetic construct
  source 1..20: mol_type = other RNA
ataatatctggactgaaaag

SEQ ID NO: 21636 - RNA, 20 nt, synthetic construct
  source 1..20: mol_type = other RNA
ataatatgataccctcaaaa

SEQ ID NO: 21637 - RNA, 20 nt, synthetic construct
  source 1..20: mol_type = other RNA
ataatatgcctcatgcatcc

SEQ ID NO: 21638 - RNA, 20 nt, synthetic construct
  source 1..20: mol_type = other RNA
ataatcaaattcacagaact

SEQ ID NO: 21639 - RNA, 20 nt, synthetic construct
  source 1..20: mol_type = other RNA
ataatcaactattccataag

SEQ ID NO: 21640 - RNA, 20 nt, synthetic construct
  source 1..20: mol_type = other RNA
ataatcacagacgcaaagga

SEQ ID NO: 21641 - RNA, 20 nt, synthetic construct
  source 1..20: mol_type = other RNA
ataatcagccgtgattgcac

SEQ ID NO: 21642 - RNA, 20 nt, synthetic construct
  source 1..20: mol_type = other RNA
ataatcattcttctaatagg

SEQ ID NO: 21643 - RNA, 20 nt, synthetic construct
  source 1..20: mol_type = other RNA
ataatcattgttaggtgctg

SEQ ID NO: 21644 - RNA, 20 nt, synthetic construct
  source 1..20: mol_type = other RNA
ataatccaactgcagtctgt

SEQ ID NO: 21645 - RNA, 20 nt, synthetic construct
  source 1..20: mol_type = other RNA
ataatccagatggacaaatt

SEQ ID NO: 21646 - RNA, 20 nt, synthetic construct
  source 1..20: mol_type = other RNA
ataatccattgggtacatac

SEQ ID NO: 21647 - RNA, 20 nt, synthetic construct
  source 1..20: mol_type = other RNA
ataatcccgcaccttgattt

SEQ ID NO: 21648 - RNA, 20 nt, synthetic construct
  source 1..20: mol_type = other RNA
ataatctaaccctcctcctc

SEQ ID NO: 21649 - RNA, 20 nt, synthetic construct
  source 1..20: mol_type = other RNA
ataatctttggtgctgataa

SEQ ID NO: 21650 - RNA, 20 nt, synthetic construct
  source 1..20: mol_type = other RNA
ataatgaaagctcccaatgc

SEQ ID NO: 21651 - RNA, 20 nt, synthetic construct
  source 1..20: mol_type = other RNA
ataatgagatagaccagatg

SEQ ID NO: 21652 - RNA, 20 nt, synthetic construct
  source 1..20: mol_type = other RNA
ataatgagtaacatgtggaa

SEQ ID NO: 21653 - RNA, 20 nt, synthetic construct
  source 1..20: mol_type = other RNA
ataatgatgactatgaaaag

SEQ ID NO: 21654 - RNA, 20 nt, synthetic construct
  source 1..20: mol_type = other RNA
ataatgcacatgggcatggg

SEQ ID NO: 21655 - RNA, 20 nt, synthetic construct
  source 1..20: mol_type = other RNA
ataatgctatccagaagaga

SEQ ID NO: 21656 - RNA, 20 nt, synthetic construct
  source 1..20: mol_type = other RNA
ataatgctgttctctgtgtg

SEQ ID NO: 21657 - RNA, 20 nt, synthetic construct
  source 1..20: mol_type = other RNA
ataatggagtactatgcagc

SEQ ID NO: 21658 - RNA, 20 nt, synthetic construct
  source 1..20: mol_type = other RNA
ataatgggcaatcagaaaaa

SEQ ID NO: 21659 - RNA, 20 nt, synthetic construct
  source 1..20: mol_type = other RNA
ataatgtccagaggaggaag

SEQ ID NO: 21660 - RNA, 20 nt, synthetic construct
  source 1..20: mol_type = other RNA
ataatgtctttttacacttg

SEQ ID NO: 21661 - RNA, 20 nt, synthetic construct
  source 1..20: mol_type = other RNA
ataatgttagaattcaggac

SEQ ID NO: 21662 - RNA, 20 nt, synthetic construct
  source 1..20: mol_type = other RNA
ataatgttatgaagcttttc

SEQ ID NO: 21663 - RNA, 20 nt, synthetic construct
  source 1..20: mol_type = other RNA
ataatgttttccgtgtgaca

SEQ ID NO: 21664 - RNA, 20 nt, synthetic construct
  source 1..20: mol_type = other RNA
ataattaacactatgtgttg

SEQ ID NO: 21665 - RNA, 20 nt, synthetic construct
  source 1..20: mol_type = other RNA
ataattaagacaatgtggag

SEQ ID NO: 21666 - RNA, 20 nt, synthetic construct
  source 1..20: mol_type = other RNA
ataattcaattttcatgggt

SEQ ID NO: 21667 - RNA, 20 nt, synthetic construct
  source 1..20: mol_type = other RNA
ataattctgccttcaatgtt

SEQ ID NO: 21668 - RNA, 20 nt, synthetic construct
  source 1..20: mol_type = other RNA
ataattctgtgccaagcaac

SEQ ID NO: 21669 - RNA, 20 nt, synthetic construct
  source 1..20: mol_type = other RNA
ataattcttcctgtcttgga

SEQ ID NO: 21670 - RNA, 20 nt, synthetic construct
  source 1..20: mol_type = other RNA
ataattgaacccactgagca

SEQ ID NO: 21671 - RNA, 20 nt, synthetic construct
  source 1..20: mol_type = other RNA
ataattgctgcagtttttcc

SEQ ID NO: 21672 - RNA, 20 nt, synthetic construct
  source 1..20: mol_type = other RNA
ataattgcttttgctgaggg

SEQ ID NO: 21673 - RNA, 20 nt, synthetic construct
  source 1..20: mol_type = other RNA
ataattggttaaacttggtc

SEQ ID NO: 21674 - RNA, 20 nt, synthetic construct
  source 1..20: mol_type = other RNA
ataatttacatagtgctctt

SEQ ID NO: 21675 - RNA, 20 nt, synthetic construct
  source 1..20: mol_type = other RNA
ataatttatcagatcccaat

SEQ ID NO: 21676 - RNA, 20 nt, synthetic construct
  source 1..20: mol_type = other RNA
ataatttccaggtcattaca

SEQ ID NO: 21677 - RNA, 20 nt, synthetic construct
  source 1..20: mol_type = other RNA
ataatttccctcagaatttg

SEQ ID NO: 21678 - RNA, 20 nt, synthetic construct
  source 1..20: mol_type = other RNA
ataatttctgagagtattgc

SEQ ID NO: 21679 - RNA, 20 nt, synthetic construct
  source 1..20: mol_type = other RNA
ataatttggatgaacgctaa

SEQ ID NO: 21680 - RNA, 20 nt, synthetic construct
  source 1..20: mol_type = other RNA
ataatttggcaaaaaatgca

SEQ ID NO: 21681 - RNA, 20 nt, synthetic construct
  source 1..20: mol_type = other RNA
ataatttggttatgcgaatt

SEQ ID NO: 21682 - RNA, 20 nt, synthetic construct
  source 1..20: mol_type = other RNA
ataattttttgagacggaat

SEQ ID NO: 21683 - RNA, 20 nt, synthetic construct
  source 1..20: mol_type = other RNA
atacaaaaagcacctaccat

SEQ ID NO: 21684 - RNA, 20 nt, synthetic construct
  source 1..20: mol_type = other RNA
atacaaaaagtgataccata

SEQ ID NO: 21685 - RNA, 20 nt, synthetic construct
  source 1..20: mol_type = other RNA
atacaaaaatgacacaactt

SEQ ID NO: 21686 - RNA, 20 nt, synthetic construct
  source 1..20: mol_type = other RNA
atacaaaccaaaaaatgtgg

SEQ ID NO: 21687 - RNA, 20 nt, synthetic construct
  source 1..20: mol_type = other RNA
atacaaaggtgttaagccgt

SEQ ID NO: 21688 - RNA, 20 nt, synthetic construct
  source 1..20: mol_type = other RNA
atacaaataactccagcttt

SEQ ID NO: 21689 - RNA, 20 nt, synthetic construct
  source 1..20: mol_type = other RNA
atacaaatgatgaagggttt

SEQ ID NO: 21690 - RNA, 20 nt, synthetic construct
  source 1..20: mol_type = other RNA
atacaacagcaccttttttg

SEQ ID NO: 21691 - RNA, 20 nt, synthetic construct
  source 1..20: mol_type = other RNA
atacaaccggaaaatgctta

SEQ ID NO: 21692 - RNA, 20 nt, synthetic construct
  source 1..20: mol_type = other RNA
atacaactctgaccattgtg

SEQ ID NO: 21693 - RNA, 20 nt, synthetic construct
  source 1..20: mol_type = other RNA
atacaactgctcataatagt

SEQ ID NO: 21694 - RNA, 20 nt, synthetic construct
  source 1..20: mol_type = other RNA
atacaaggagacctactaaa

SEQ ID NO: 21695 - RNA, 20 nt, synthetic construct
  source 1..20: mol_type = other RNA
atacaaggtcaatctgaaaa

SEQ ID NO: 21696 - RNA, 20 nt, synthetic construct
  source 1..20: mol_type = other RNA
atacaatacttggatcttat

SEQ ID NO: 21697 - RNA, 20 nt, synthetic construct
  source 1..20: mol_type = other RNA
atacaatagtttagttactc

SEQ ID NO: 21698 - RNA, 20 nt, synthetic construct
  source 1..20: mol_type = other RNA
atacaatattacagtaaggt

SEQ ID NO: 21699 - RNA, 20 nt, synthetic construct
  source 1..20: mol_type = other RNA
atacaatgtgagccacatac

SEQ ID NO: 21700 - RNA, 20 nt, synthetic construct
  source 1..20: mol_type = other RNA
atacacaaaaagatctgtgg

SEQ ID NO: 21701 - RNA, 20 nt, synthetic construct
  source 1..20: mol_type = other RNA
atacacaagatctctatgca

SEQ ID NO: 21702 - RNA, 20 nt, synthetic construct
  source 1..20: mol_type = other RNA
atacacacataagggggaat

SEQ ID NO: 21703 - RNA, 20 nt, synthetic construct
  source 1..20: mol_type = other RNA
atacacagggaaaactacat

SEQ ID NO: 21704 - RNA, 20 nt, synthetic construct
  source 1..20: mol_type = other RNA
atacacatccagaagtcact

SEQ ID NO: 21705 - RNA, 20 nt, synthetic construct
  source 1..20: mol_type = other RNA
atacacatgttgagtcttgt

SEQ ID NO: 21706 - RNA, 20 nt, synthetic construct
  source 1..20: mol_type = other RNA
atacaccaaactcaaaagga

SEQ ID NO: 21707 - RNA, 20 nt, synthetic construct
  source 1..20: mol_type = other RNA
atacacctggatcaagtggg

SEQ ID NO: 21708 - RNA, 20 nt, synthetic construct
  source 1..20: mol_type = other RNA
atacacgagtgtgtttcgca

SEQ ID NO: 21709 - RNA, 20 nt, synthetic construct
  source 1..20: mol_type = other RNA
atacacgtggctgtcaaaaa

SEQ ID NO: 21710 - RNA, 20 nt, synthetic construct
  source 1..20: mol_type = other RNA
atacacgttacaaaatatgt

SEQ ID NO: 21711 - RNA, 20 nt, synthetic construct
  source 1..20: mol_type = other RNA
atacactcatttcctttcag

SEQ ID NO: 21712 - RNA, 20 nt, synthetic construct
  source 1..20: mol_type = other RNA
atacacttctatccagtgac

SEQ ID NO: 21713 - RNA, 20 nt, synthetic construct
  source 1..20: mol_type = other RNA
atacacttttcaggtattga

SEQ ID NO: 21714 - RNA, 20 nt, synthetic construct
  source 1..20: mol_type = other RNA
atacagagcacagactcaag

SEQ ID NO: 21715 - RNA, 20 nt, synthetic construct
  source 1..20: mol_type = other RNA
atacagcaaaagaattaaac

SEQ ID NO: 21716 - RNA, 20 nt, synthetic construct
  source 1..20: mol_type = other RNA
atacagcaaatctctagaac

SEQ ID NO: 21717 - RNA, 20 nt, synthetic construct
  source 1..20: mol_type = other RNA
atacagctccaaagaacagg

SEQ ID NO: 21718 - RNA, 20 nt, synthetic construct
  source 1..20: mol_type = other RNA
atacaggaagagactatctc

SEQ ID NO: 21719 - RNA, 20 nt, synthetic construct
  source 1..20: mol_type = other RNA
atacaggagttccgatttct

SEQ ID NO: 21720 - RNA, 20 nt, synthetic construct
  source 1..20: mol_type = other RNA
atacaggtgcttacagactg

SEQ ID NO: 21721 - RNA, 20 nt, synthetic construct
  source 1..20: mol_type = other RNA
atacagtaaagccccattgt

SEQ ID NO: 21722 - RNA, 20 nt, synthetic construct
  source 1..20: mol_type = other RNA
atacagtctgatttactttt

SEQ ID NO: 21723 - RNA, 20 nt, synthetic construct
  source 1..20: mol_type = other RNA
atacagtgccttcagctatg

SEQ ID NO: 21724 - RNA, 20 nt, synthetic construct
  source 1..20: mol_type = other RNA
atacagtgtttttgaattct

SEQ ID NO: 21725 - RNA, 20 nt, synthetic construct
  source 1..20: mol_type = other RNA
atacagttaacgtatgaata

SEQ ID NO: 21726 - RNA, 20 nt, synthetic construct
  source 1..20: mol_type = other RNA
atacagttggaactcttgcg

SEQ ID NO: 21727 - RNA, 20 nt, synthetic construct
  source 1..20: mol_type = other RNA
atacagttttgaccaaaaca

SEQ ID NO: 21728 - RNA, 20 nt, synthetic construct
  source 1..20: mol_type = other RNA
atacatgacatggttttcct

SEQ ID NO: 21729 - RNA, 20 nt, synthetic construct
  source 1..20: mol_type = other RNA
atacatgagaaatgttaaga

SEQ ID NO: 21730 - RNA, 20 nt, synthetic construct
  source 1..20: mol_type = other RNA
atacatgaggcctctcccct

SEQ ID NO: 21731 - RNA, 20 nt, synthetic construct
  source 1..20: mol_type = other RNA
atacatgtcatgttcccgga

SEQ ID NO: 21732 - RNA, 20 nt, synthetic construct
  source 1..20: mol_type = other RNA
atacatgtttagcaagatta

SEQ ID NO: 21733 - RNA, 20 nt, synthetic construct
  source 1..20: mol_type = other RNA
ataccaaaaaaggtgctgtt

SEQ ID NO: 21734 - RNA, 20 nt, synthetic construct
  source 1..20: mol_type = other RNA
ataccaaaacccttgggatg

SEQ ID NO: 21735 - RNA, 20 nt, synthetic construct
  source 1..20: mol_type = other RNA
ataccaaattcacgagactg

SEQ ID NO: 21736 - RNA, 20 nt, synthetic construct
  source 1..20: mol_type = other RNA
ataccaagcccggcacggtg

SEQ ID NO: 21737 - RNA, 20 nt, synthetic construct
  source 1..20: mol_type = other RNA
ataccaccacattcggccaa

SEQ ID NO: 21738 - RNA, 20 nt, synthetic construct
  source 1..20: mol_type = other RNA
ataccacctgaaatctgatt

SEQ ID NO: 21739 - RNA, 20 nt, synthetic construct
  source 1..20: mol_type = other RNA
ataccacctgtcagaaacac

SEQ ID NO: 21740 - RNA, 20 nt, synthetic construct
  source 1..20: mol_type = other RNA
ataccacttagtttgcaata

SEQ ID NO: 21741 - RNA, 20 nt, synthetic construct
  source 1..20: mol_type = other RNA
ataccagaccctttatcgga

SEQ ID NO: 21742 - RNA, 20 nt, synthetic construct
  source 1..20: mol_type = other RNA
ataccagagattgggaaaat

SEQ ID NO: 21743 - RNA, 20 nt, synthetic construct
  source 1..20: mol_type = other RNA
ataccagaggttaaagcaac

SEQ ID NO: 21744 - RNA, 20 nt, synthetic construct
  source 1..20: mol_type = other RNA
ataccaggttttggtaatgg

SEQ ID NO: 21745 - RNA, 20 nt, synthetic construct
  source 1..20: mol_type = other RNA
ataccataaagtcagaggag

SEQ ID NO: 21746 - RNA, 20 nt, synthetic construct
  source 1..20: mol_type = other RNA
atacccaagtaaacaactga

SEQ ID NO: 21747 - RNA, 20 nt, synthetic construct
  source 1..20: mol_type = other RNA
atacccacaagaaaaaccta

SEQ ID NO: 21748 - RNA, 20 nt, synthetic construct
  source 1..20: mol_type = other RNA
atacccaggtgtgagattga

SEQ ID NO: 21749 - RNA, 20 nt, synthetic construct
  source 1..20: mol_type = other RNA
ataccccaaccctacctagg

SEQ ID NO: 21750 - RNA, 20 nt, synthetic construct
  source 1..20: mol_type = other RNA
ataccccctggaaataagtt

SEQ ID NO: 21751 - RNA, 20 nt, synthetic construct
  source 1..20: mol_type = other RNA
atacccctccctacctggca

SEQ ID NO: 21752 - RNA, 20 nt, synthetic construct
  source 1..20: mol_type = other RNA
ataccctcaaaagatgcaga

SEQ ID NO: 21753 - RNA, 20 nt, synthetic construct
  source 1..20: mol_type = other RNA
atacccttctgttaatagat

SEQ ID NO: 21754 - RNA, 20 nt, synthetic construct
  source 1..20: mol_type = other RNA
ataccgacggctcaggcctg

SEQ ID NO: 21755 - RNA, 20 nt, synthetic construct
  source 1..20: mol_type = other RNA
ataccgagtaatgggatggc

SEQ ID NO: 21756 - RNA, 20 nt, synthetic construct
  source 1..20: mol_type = other RNA
atacctaacagccggcatat

SEQ ID NO: 21757 - RNA, 20 nt, synthetic construct
  source 1..20: mol_type = other RNA
atacctagtacgtaacctaa

SEQ ID NO: 21758 - RNA, 20 nt, synthetic construct
  source 1..20: mol_type = other RNA
atacctagttttccaatccg

SEQ ID NO: 21759 - RNA, 20 nt, synthetic construct
  source 1..20: mol_type = other RNA
atacctatttagagggatga

SEQ ID NO: 21760 - RNA, 20 nt, synthetic construct
  source 1..20: mol_type = other RNA
atacctcttactaaaaagaa

SEQ ID NO: 21761 - RNA, 20 nt, synthetic construct
  source 1..20: mol_type = other RNA
atacctgaaaagtgtattat

SEQ ID NO: 21762 - RNA, 20 nt, synthetic construct
  source 1..20: mol_type = other RNA
atacctgcaggttgatacta

SEQ ID NO: 21763 - RNA, 20 nt, synthetic construct
  source 1..20: mol_type = other RNA
atacctggtccttaaatttc

SEQ ID NO: 21764 - RNA, 20 nt, synthetic construct
  source 1..20: mol_type = other RNA
atacctgtagaaaataggga

SEQ ID NO: 21765 - RNA, 20 nt, synthetic construct
  source 1..20: mol_type = other RNA
atacctgttgaatagcaact

SEQ ID NO: 21766 - RNA, 20 nt, synthetic construct
  source 1..20: mol_type = other RNA
ataccttatgtgaaagtaga

SEQ ID NO: 21767 - RNA, 20 nt, synthetic construct
  source 1..20: mol_type = other RNA
ataccttcttgagagtctct

SEQ ID NO: 21768 - RNA, 20 nt, synthetic construct
  source 1..20: mol_type = other RNA
ataccttgaaaggatactga

SEQ ID NO: 21769 - RNA, 20 nt, synthetic construct
  source 1..20: mol_type = other RNA
atacgaaagcctttattttt

SEQ ID NO: 21770 - RNA, 20 nt, synthetic construct
  source 1..20: mol_type = other RNA
atacgaaagtgctctaccct

SEQ ID NO: 21771 - RNA, 20 nt, synthetic construct
  source 1..20: mol_type = other RNA
atacgataaacttcagtttt

SEQ ID NO: 21772 - RNA, 20 nt, synthetic construct
  source 1..20: mol_type = other RNA
atacggaaatataacattac

SEQ ID NO: 21773 - RNA, 20 nt, synthetic construct
  source 1..20: mol_type = other RNA
atacggaatgattccactta

SEQ ID NO: 21774 - RNA, 20 nt, synthetic construct
  source 1..20: mol_type = other RNA
atacggagtctcgctctgtc

SEQ ID NO: 21775 - RNA, 20 nt, synthetic construct
  source 1..20: mol_type = other RNA
atacgtatatgaaaagccca

SEQ ID NO: 21776 - RNA, 20 nt, synthetic construct
  source 1..20: mol_type = other RNA
atacgtatttatcatgtctt

SEQ ID NO: 21777 - RNA, 20 nt, synthetic construct
  source 1..20: mol_type = other RNA
atacgtcgtcccccatcccc

SEQ ID NO: 21778 - RNA, 20 nt, synthetic construct
  source 1..20: mol_type = other RNA
atacgtgtatactgggtgtg

SEQ ID NO: 21779 - RNA, 20 nt, synthetic construct
  source 1..20: mol_type = other RNA
atacgttaaaggaaaagaga

SEQ ID NO: 21780 - RNA, 20 nt, synthetic construct
  source 1..20: mol_type = other RNA
atacgttaactgtattgcaa

SEQ ID NO: 21781 - RNA, 20 nt, synthetic construct
  source 1..20: mol_type = other RNA
atactaaatacaccaaactc

SEQ ID NO: 21782 - RNA, 20 nt, synthetic construct
  source 1..20: mol_type = other RNA
atactaacgatccttactac

SEQ ID NO: 21783 - RNA, 20 nt, synthetic construct
  source 1..20: mol_type = other RNA
atactacaagagttccccta

SEQ ID NO: 21784 - RNA, 20 nt, synthetic construct
  source 1..20: mol_type = other RNA
atactacgcctagctgactt

SEQ ID NO: 21785 - RNA, 20 nt, synthetic construct
  source 1..20: mol_type = other RNA
atactactgcaaatatccaa

SEQ ID NO: 21786 - RNA, 20 nt, synthetic construct
  source 1..20: mol_type = other RNA
atactagcaaactgaatcag

SEQ ID NO: 21787 - RNA, 20 nt, synthetic construct
  source 1..20: mol_type = other RNA
atactagtagaaagcaggtt

SEQ ID NO: 21788 - RNA, 20 nt, synthetic construct
  source 1..20: mol_type = other RNA
atactagtaggatgaattac

SEQ ID NO: 21789 - RNA, 20 nt, synthetic construct
  source 1..20: mol_type = other RNA
atactagtttagtgcagtat

SEQ ID NO: 21790 - RNA, 20 nt, synthetic construct
  source 1..20: mol_type = other RNA
atactatgtatgtggctcac

SEQ ID NO: 21791 - RNA, 20 nt, synthetic construct
  source 1..20: mol_type = other RNA
atactattttctatagtggc

SEQ ID NO: 21792 - RNA, 20 nt, synthetic construct
  source 1..20: mol_type = other RNA
atactcaaactatgcttaat

SEQ ID NO: 21793 - RNA, 20 nt, synthetic construct
  source 1..20: mol_type = other RNA
atactcaacatcactagcta

SEQ ID NO: 21794 - RNA, 20 nt, synthetic construct
  source 1..20: mol_type = other RNA
atactcaagggctttcaata

SEQ ID NO: 21795 - RNA, 20 nt, synthetic construct
  source 1..20: mol_type = other RNA
atactcaatcagtggccagt

SEQ ID NO: 21796 - RNA, 20 nt, synthetic construct
  source 1..20: mol_type = other RNA
atactcagccccctcgaaga

SEQ ID NO: 21797 - RNA, 20 nt, synthetic construct
  source 1..20: mol_type = other RNA
atactcatgcttgctccaga

SEQ ID NO: 21798 - RNA, 20 nt, synthetic construct
  source 1..20: mol_type = other RNA
atactccaccagcatctttt

SEQ ID NO: 21799 - RNA, 20 nt, synthetic construct
  source 1..20: mol_type = other RNA
atactcgtagttttttggta

SEQ ID NO: 21800 - RNA, 20 nt, synthetic construct
  source 1..20: mol_type = other RNA
atactcgtgtgtctcataaa

SEQ ID NO: 21801 - RNA, 20 nt, synthetic construct
  source 1..20: mol_type = other RNA
atactctagtggtgcttaat

SEQ ID NO: 21802 - RNA, 20 nt, synthetic construct
  source 1..20: mol_type = other RNA
atactctcagaaattataag

SEQ ID NO: 21803 - RNA, 20 nt, synthetic construct
  source 1..20: mol_type = other RNA
atactctgagacaggatcca

SEQ ID NO: 21804 - RNA, 20 nt, synthetic construct
  source 1..20: mol_type = other RNA
atactcttaaagtttcaaac

SEQ ID NO: 21805 - RNA, 20 nt, synthetic construct
  source 1..20: mol_type = other RNA
atactgaaagacagacctct

SEQ ID NO: 21806 - RNA, 20 nt, synthetic construct
  source 1..20: mol_type = other RNA
atactgaaggcatagggcct

SEQ ID NO: 21807 - RNA, 20 nt, synthetic construct
  source 1..20: mol_type = other RNA
atactgaagttctcaggggt

SEQ ID NO: 21808 - RNA, 20 nt, synthetic construct
  source 1..20: mol_type = other RNA
atactgactagtggctcata

SEQ ID NO: 21809 - RNA, 20 nt, synthetic construct
  source 1..20: mol_type = other RNA
atactgagaacagaattttt

SEQ ID NO: 21810 - RNA, 20 nt, synthetic construct
  source 1..20: mol_type = other RNA
atactgcactaaactagtat

SEQ ID NO: 21811 - RNA, 20 nt, synthetic construct
  source 1..20: mol_type = other RNA
atactgcactctcaaaatta

SEQ ID NO: 21812 - RNA, 20 nt, synthetic construct
  source 1..20: mol_type = other RNA
atactgcagcacttttaagg

SEQ ID NO: 21813 - RNA, 20 nt, synthetic construct
  source 1..20: mol_type = other RNA
atactgcatattgaagccag

SEQ ID NO: 21814 - RNA, 20 nt, synthetic construct
  source 1..20: mol_type = other RNA
atactgcattgtgcacttaa

SEQ ID NO: 21815 - RNA, 20 nt, synthetic construct
  source 1..20: mol_type = other RNA
atactggaaaactagagatg

SEQ ID NO: 21816 - RNA, 20 nt, synthetic construct
  source 1..20: mol_type = other RNA
atactggaaggactcacagc

SEQ ID NO: 21817 - RNA, 20 nt, synthetic construct
  source 1..20: mol_type = other RNA
atactggccatgttttattt

SEQ ID NO: 21818 - RNA, 20 nt, synthetic construct
  source 1..20: mol_type = other RNA
atactgggtgtgatggcgca

SEQ ID NO: 21819 - RNA, 20 nt, synthetic construct
  source 1..20: mol_type = other RNA
atactgtaaccctgtttccc

SEQ ID NO: 21820 - RNA, 20 nt, synthetic construct
  source 1..20: mol_type = other RNA
atactgtagaatgtttttcc

SEQ ID NO: 21821 - RNA, 20 nt, synthetic construct
  source 1..20: mol_type = other RNA
atactgtcacaggctttcct

SEQ ID NO: 21822 - RNA, 20 nt, synthetic construct
  source 1..20: mol_type = other RNA
atactgtctcagtcccaaat

SEQ ID NO: 21823 - RNA, 20 nt, synthetic construct
  source 1..20: mol_type = other RNA
atactgtgatgattttagaa

SEQ ID NO: 21824 - RNA, 20 nt, synthetic construct
  source 1..20: mol_type = other RNA
atactgtgcagtggatgact

SEQ ID NO: 21825 - RNA, 20 nt, synthetic construct
  source 1..20: mol_type = other RNA
atactgtggatatcttttaa

SEQ ID NO: 21826 - RNA, 20 nt, synthetic construct
  source 1..20: mol_type = other RNA
atactgttatgacaagacta

SEQ ID NO: 21827 - RNA, 20 nt, synthetic construct
  source 1..20: mol_type = other RNA
atacttaagagcatgttggg

SEQ ID NO: 21828 - RNA, 20 nt, synthetic construct
  source 1..20: mol_type = other RNA
atacttaatagcccaacagg

SEQ ID NO: 21829 - RNA, 20 nt, synthetic construct
  source 1..20: mol_type = other RNA
atacttagctaatttcagag

SEQ ID NO: 21830 - RNA, 20 nt, synthetic construct
  source 1..20: mol_type = other RNA
atacttcaaagggtcactat

SEQ ID NO: 21831 - RNA, 20 nt, synthetic construct
  source 1..20: mol_type = other RNA
atacttcaatgctacagtaa

SEQ ID NO: 21832 - RNA, 20 nt, synthetic construct
  source 1..20: mol_type = other RNA
atacttcatctttcctgatc

SEQ ID NO: 21833 - RNA, 20 nt, synthetic construct
  source 1..20: mol_type = other RNA
atacttcatttccattgtaa

SEQ ID NO: 21834 - RNA, 20 nt, synthetic construct
  source 1..20: mol_type = other RNA
atacttctaactttagaaca

SEQ ID NO: 21835 - RNA, 20 nt, synthetic construct
  source 1..20: mol_type = other RNA
atacttgaacattctgtaga

SEQ ID NO: 21836 - RNA, 20 nt, synthetic construct
  source 1..20: mol_type = other RNA
atacttgatctacatttaga

SEQ ID NO: 21837 - RNA, 20 nt, synthetic construct
  source 1..20: mol_type = other RNA
atacttgattacaagggtga

SEQ ID NO: 21838 - RNA, 20 nt, synthetic construct
  source 1..20: mol_type = other RNA
atacttgctttattacttca

SEQ ID NO: 21839 - RNA, 20 nt, synthetic construct
  source 1..20: mol_type = other RNA
atacttggacaggggacatg

SEQ ID NO: 21840 - RNA, 20 nt, synthetic construct
  source 1..20: mol_type = other RNA
atacttggatcttatctgct

SEQ ID NO: 21841 - RNA, 20 nt, synthetic construct
  source 1..20: mol_type = other RNA
atacttgtcaagttctgatt

SEQ ID NO: 21842 - RNA, 20 nt, synthetic construct
  source 1..20: mol_type = other RNA
atacttgtgtagcgggaaaa

SEQ ID NO: 21843 - RNA, 20 nt, synthetic construct
  source 1..20: mol_type = other RNA
atactttagacatgggctaa

SEQ ID NO: 21844 - RNA, 20 nt, synthetic construct
  source 1..20: mol_type = other RNA
atactttcacactgattttc

SEQ ID NO: 21845 - RNA, 20 nt, synthetic construct
  source 1..20: mol_type = other RNA
atactttcccatctctagtt

SEQ ID NO: 21846 - RNA, 20 nt, synthetic construct
  source 1..20: mol_type = other RNA
atactttggaaggtaggagg

SEQ ID NO: 21847 - RNA, 20 nt, synthetic construct
  source 1..20: mol_type = other RNA
atactttgtcaggcatgcta

SEQ ID NO: 21848 - RNA, 20 nt, synthetic construct
  source 1..20: mol_type = other RNA
atacttttcaactgaacaac

SEQ ID NO: 21849 - RNA, 20 nt, synthetic construct
  source 1..20: mol_type = other RNA
atagaaaacttgagcagatc

SEQ ID NO: 21850 - RNA, 20 nt, synthetic construct
  source 1..20: mol_type = other RNA
atagaaaagacaatagctag

SEQ ID NO: 21851 - RNA, 20 nt, synthetic construct
  source 1..20: mol_type = other RNA
atagaaaatagtatgaaggt

SEQ ID NO: 21852 - RNA, 20 nt, synthetic construct
  source 1..20: mol_type = other RNA
atagaaaatccttacttcca

SEQ ID NO: 21853 - RNA, 20 nt, synthetic construct
  source 1..20: mol_type = other RNA
atagaaagcaccagggcctc

SEQ ID NO: 21854 - RNA, 20 nt, synthetic construct
  source 1..20: mol_type = other RNA
atagaaaggagaccagttag

SEQ ID NO: 21855 - RNA, 20 nt, synthetic construct
  source 1..20: mol_type = other RNA
atagaaagttagtgtctaat

SEQ ID NO: 21856 - RNA, 20 nt, synthetic construct
  source 1..20: mol_type = other RNA
atagaactgtcacaattcac

SEQ ID NO: 21857 - RNA, 20 nt, synthetic construct
  source 1..20: mol_type = other RNA
atagaagagcagtgtgttct

SEQ ID NO: 21858 - RNA, 20 nt, synthetic construct
  source 1..20: mol_type = other RNA
atagaagcgctcttcaagca

SEQ ID NO: 21859 - RNA, 20 nt, synthetic construct
  source 1..20: mol_type = other RNA
atagaaggccagagggaatc

SEQ ID NO: 21860 - RNA, 20 nt, synthetic construct
  source 1..20: mol_type = other RNA
atagaagggagaacccagga

SEQ ID NO: 21861 - RNA, 20 nt, synthetic construct
  source 1..20: mol_type = other RNA
atagaagtaaatcccggcca

SEQ ID NO: 21862 - RNA, 20 nt, synthetic construct
  source 1..20: mol_type = other RNA
atagaagtgtatcagatgct

SEQ ID NO: 21863 - RNA, 20 nt, synthetic construct
  source 1..20: mol_type = other RNA
atagaataccacttagtttg

SEQ ID NO: 21864 - RNA, 20 nt, synthetic construct
  source 1..20: mol_type = other RNA
atagaattcttcttctgtta

SEQ ID NO: 21865 - RNA, 20 nt, synthetic construct
  source 1..20: mol_type = other RNA
atagacaaagacaagttctt

SEQ ID NO: 21866 - RNA, 20 nt, synthetic construct
  source 1..20: mol_type = other RNA
atagacagcatccccagaaa

SEQ ID NO: 21867 - RNA, 20 nt, synthetic construct
  source 1..20: mol_type = other RNA
atagaccagatgcgtggttc

SEQ ID NO: 21868 - RNA, 20 nt, synthetic construct
  source 1..20: mol_type = other RNA
atagacccaaagcaaaagca

SEQ ID NO: 21869 - RNA, 20 nt, synthetic construct
  source 1..20: mol_type = other RNA
atagacctgaatgactgttg

SEQ ID NO: 21870 - RNA, 20 nt, synthetic construct
  source 1..20: mol_type = other RNA
atagactcccaacttataat

SEQ ID NO: 21871 - RNA, 20 nt, synthetic construct
  source 1..20: mol_type = other RNA
atagactcttcagaggtctg

SEQ ID NO: 21872 - RNA, 20 nt, synthetic construct
  source 1..20: mol_type = other RNA
atagactggattaaggagat

SEQ ID NO: 21873 - RNA, 20 nt, synthetic construct
  source 1..20: mol_type = other RNA
atagactttagagtcagttg

SEQ ID NO: 21874 - RNA, 20 nt, synthetic construct
  source 1..20: mol_type = other RNA
atagagagattcaagaaacc

SEQ ID NO: 21875 - RNA, 20 nt, synthetic construct
  source 1..20: mol_type = other RNA
atagagatcttgtgtatctt

SEQ ID NO: 21876 - RNA, 20 nt, synthetic construct
  source 1..20: mol_type = other RNA
atagaggatgggcattccag

SEQ ID NO: 21877 - RNA, 20 nt, synthetic construct
  source 1..20: mol_type = other RNA
atagagggagcatcttccca

SEQ ID NO: 21878 - RNA, 20 nt, synthetic construct
  source 1..20: mol_type = other RNA
atagagggcctaaataaaac

SEQ ID NO: 21879 - RNA, 20 nt, synthetic construct
  source 1..20: mol_type = other RNA
atagaggtctgtctttcagt

SEQ ID NO: 21880 - RNA, 20 nt, synthetic construct
  source 1..20: mol_type = other RNA
atagagtaccaggtcagcca

SEQ ID NO: 21881 - RNA, 20 nt, synthetic construct
  source 1..20: mol_type = other RNA
atagagttccatctgttata

SEQ ID NO: 21882 - RNA, 20 nt, synthetic construct
  source 1..20: mol_type = other RNA
atagataaactggaattcat

SEQ ID NO: 21883 - RNA, 20 nt, synthetic construct
  source 1..20: mol_type = other RNA
atagataaggttgttcttgg

SEQ ID NO: 21884 - RNA, 20 nt, synthetic construct
  source 1..20: mol_type = other RNA
atagataggtcatgtacata

SEQ ID NO: 21885 - RNA, 20 nt, synthetic construct
  source 1..20: mol_type = other RNA
atagatattggcaacatttt

SEQ ID NO: 21886 - RNA, 20 nt, synthetic construct
  source 1..20: mol_type = other RNA
atagatcacaaggactggct

SEQ ID NO: 21887 - RNA, 20 nt, synthetic construct
  source 1..20: mol_type = other RNA
atagatcaccaggggctggg

SEQ ID NO: 21888 - RNA, 20 nt, synthetic construct
  source 1..20: mol_type = other RNA
atagatgaaactaaatgtga

SEQ ID NO: 21889 - RNA, 20 nt, synthetic construct
  source 1..20: mol_type = other RNA
atagatgacgaaagtgaagc

SEQ ID NO: 21890 - RNA, 20 nt, synthetic construct
  source 1..20: mol_type = other RNA
atagatgcctagaaaggaat

SEQ ID NO: 21891 - RNA, 20 nt, synthetic construct
  source 1..20: mol_type = other RNA
atagatgttatgccccctct

SEQ ID NO: 21892 - RNA, 20 nt, synthetic construct
  source 1..20: mol_type = other RNA
atagcaacaaaacaatctaa

SEQ ID NO: 21893 - RNA, 20 nt, synthetic construct
  source 1..20: mol_type = other RNA
atagcaactgttttttcctc

SEQ ID NO: 21894 - RNA, 20 nt, synthetic construct
  source 1..20: mol_type = other RNA
atagcaacttgcagaagagt

SEQ ID NO: 21895 - RNA, 20 nt, synthetic construct
  source 1..20: mol_type = other RNA
atagcaaggaagcagaatgt

SEQ ID NO: 21896 - RNA, 20 nt, synthetic construct
  source 1..20: mol_type = other RNA
atagcagaaacacaggactg

SEQ ID NO: 21897 - RNA, 20 nt, synthetic construct
  source 1..20: mol_type = other RNA
atagcagaaccttagaaatt

SEQ ID NO: 21898 - RNA, 20 nt, synthetic construct
  source 1..20: mol_type = other RNA
atagcagaatggccctgcga

SEQ ID NO: 21899 - RNA, 20 nt, synthetic construct
  source 1..20: mol_type = other RNA
atagcagcattgtttacagt

SEQ ID NO: 21900 - RNA, 20 nt, synthetic construct
  source 1..20: mol_type = other RNA
atagcaggattcttgttaag

SEQ ID NO: 21901 - RNA, 20 nt, synthetic construct
  source 1..20: mol_type = other RNA
atagcagggtcatgcacacg

SEQ ID NO: 21902 - RNA, 20 nt, synthetic construct
  source 1..20: mol_type = other RNA
atagcagtgctgaaagctag

SEQ ID NO: 21903 - RNA, 20 nt, synthetic construct
  source 1..20: mol_type = other RNA
atagcagtgggaagtggagt

SEQ ID NO: 21904 - RNA, 20 nt, synthetic construct
  source 1..20: mol_type = other RNA
atagcatcttagctcttccc

SEQ ID NO: 21905 - RNA, 20 nt, synthetic construct
  source 1..20: mol_type = other RNA
atagcattatcccagatcta

SEQ ID NO: 21906 - RNA, 20 nt, synthetic construct
  source 1..20: mol_type = other RNA
atagcattatccctttaaaa

SEQ ID NO: 21907 - RNA, 20 nt, synthetic construct
  source 1..20: mol_type = other RNA
atagcatttgaaaacatgtt

SEQ ID NO: 21908 - RNA, 20 nt, synthetic construct
  source 1..20: mol_type = other RNA
atagccagtgcagcaagcag

SEQ ID NO: 21909 - RNA, 20 nt, synthetic construct
  source 1..20: mol_type = other RNA
atagccataagagtccccaa

SEQ ID NO: 21910 - RNA, 20 nt, synthetic construct
  source 1..20: mol_type = other RNA
atagcccaacagggttttgt

SEQ ID NO: 21911 - RNA, 20 nt, synthetic construct
  source 1..20: mol_type = other RNA
atagcccagcaggatttttt

SEQ ID NO: 21912 - RNA, 20 nt, synthetic construct
  source 1..20: mol_type = other RNA
atagccccttatcaggaaag

SEQ ID NO: 21913 - RNA, 20 nt, synthetic construct
  source 1..20: mol_type = other RNA
atagcctcctaagttttggg

SEQ ID NO: 21914 - RNA, 20 nt, synthetic construct
  source 1..20: mol_type = other RNA
atagcgaaaggtacgacgct

SEQ ID NO: 21915 - RNA, 20 nt, synthetic construct
  source 1..20: mol_type = other RNA
atagcgagacctcatctctg

SEQ ID NO: 21916 - RNA, 20 nt, synthetic construct
  source 1..20: mol_type = other RNA
atagctaagaaacagtaatt

SEQ ID NO: 21917 - RNA, 20 nt, synthetic construct
  source 1..20: mol_type = other RNA
atagctagtgatgttgagta

SEQ ID NO: 21918 - RNA, 20 nt, synthetic construct
  source 1..20: mol_type = other RNA
atagctagtgtcttagtctg

SEQ ID NO: 21919 - RNA, 20 nt, synthetic construct
  source 1..20: mol_type = other RNA
atagctatcctaatgggcgt

SEQ ID NO: 21920 - RNA, 20 nt, synthetic construct
  source 1..20: mol_type = other RNA
atagctcactagagcttcaa

SEQ ID NO: 21921 - RNA, 20 nt, synthetic construct
  source 1..20: mol_type = other RNA
atagctccaaaagcgaaagg

SEQ ID NO: 21922 - RNA, 20 nt, synthetic construct
  source 1..20: mol_type = other RNA
atagctgaaggcactgtatg

SEQ ID NO: 21923 - RNA, 20 nt, synthetic construct
  source 1..20: mol_type = other RNA
atagctgagaagtaacatta

SEQ ID NO: 21924 - RNA, 20 nt, synthetic construct
  source 1..20: mol_type = other RNA
atagctgtggaagcacagtc

SEQ ID NO: 21925 - RNA, 20 nt, synthetic construct
  source 1..20: mol_type = other RNA
atagcttcctaagaaagggt

SEQ ID NO: 21926 - RNA, 20 nt, synthetic construct
  source 1..20: mol_type = other RNA
atagcttctgagctgttaat

SEQ ID NO: 21927 - RNA, 20 nt, synthetic construct
  source 1..20: mol_type = other RNA
atagcttgacaaaaggcccc

SEQ ID NO: 21928 - RNA, 20 nt, synthetic construct
  source 1..20: mol_type = other RNA
ataggaaagtgacagatgag

SEQ ID NO: 21929 - RNA, 20 nt, synthetic construct
  source 1..20: mol_type = other RNA
ataggaaatacttgatctac

SEQ ID NO: 21930 - RNA, 20 nt, synthetic construct
  source 1..20: mol_type = other RNA
ataggaagtccatgaaactt

SEQ ID NO: 21931 - RNA, 20 nt, synthetic construct
  source 1..20: mol_type = other RNA
ataggaagtggctagacgga

SEQ ID NO: 21932 - RNA, 20 nt, synthetic construct
  source 1..20: mol_type = other RNA
ataggaatagtattcaggac

SEQ ID NO: 21933 - RNA, 20 nt, synthetic construct
  source 1..20: mol_type = other RNA
ataggaatatcgtctttttt

SEQ ID NO: 21934 - RNA, 20 nt, synthetic construct
  source 1..20: mol_type = other RNA
ataggagactatcgttatat

SEQ ID NO: 21935 - RNA, 20 nt, synthetic construct
  source 1..20: mol_type = other RNA
ataggagttcattcgtagca

SEQ ID NO: 21936 - RNA, 20 nt, synthetic construct
  source 1..20: mol_type = other RNA
ataggataatgtccagagga

SEQ ID NO: 21937 - RNA, 20 nt, synthetic construct
  source 1..20: mol_type = other RNA
ataggatagttaaacatgta

SEQ ID NO: 21938 - RNA, 20 nt, synthetic construct
  source 1..20: mol_type = other RNA
ataggatgggcagactcctt

SEQ ID NO: 21939 - RNA, 20 nt, synthetic construct
  source 1..20: mol_type = other RNA
ataggattaagacactacaa

SEQ ID NO: 21940 - RNA, 20 nt, synthetic construct
  source 1..20: mol_type = other RNA
ataggattttcgtatctttt

SEQ ID NO: 21941 - RNA, 20 nt, synthetic construct
  source 1..20: mol_type = other RNA
ataggcaaattcatagatca

SEQ ID NO: 21942 - RNA, 20 nt, synthetic construct
  source 1..20: mol_type = other RNA
ataggcaatgagtctgacat

SEQ ID NO: 21943 - RNA, 20 nt, synthetic construct
  source 1..20: mol_type = other RNA
ataggcaatttagaattctc

SEQ ID NO: 21944 - RNA, 20 nt, synthetic construct
  source 1..20: mol_type = other RNA
ataggcacgcgcccccatgc

SEQ ID NO: 21945 - RNA, 20 nt, synthetic construct
  source 1..20: mol_type = other RNA
ataggcagtcctctactttc

SEQ ID NO: 21946 - RNA, 20 nt, synthetic construct
  source 1..20: mol_type = other RNA
ataggcatctctcccttcct

SEQ ID NO: 21947 - RNA, 20 nt, synthetic construct
  source 1..20: mol_type = other RNA
ataggcattccttaattttt

SEQ ID NO: 21948 - RNA, 20 nt, synthetic construct
  source 1..20: mol_type = other RNA
ataggcctaggtgtgataac

SEQ ID NO: 21949 - RNA, 20 nt, synthetic construct
  source 1..20: mol_type = other RNA
ataggcttagtacagccatc

SEQ ID NO: 21950 - RNA, 20 nt, synthetic construct
  source 1..20: mol_type = other RNA
atagggacggccttcttttt

SEQ ID NO: 21951 - RNA, 20 nt, synthetic construct
  source 1..20: mol_type = other RNA
atagggatgttgcctactag

SEQ ID NO: 21952 - RNA, 20 nt, synthetic construct
  source 1..20: mol_type = other RNA
atagggcctcaaatttcatt

SEQ ID NO: 21953 - RNA, 20 nt, synthetic construct
  source 1..20: mol_type = other RNA
atagggccttctactttaat

SEQ ID NO: 21954 - RNA, 20 nt, synthetic construct
  source 1..20: mol_type = other RNA
ataggggaactcttgtagta

SEQ ID NO: 21955 - RNA, 20 nt, synthetic construct
  source 1..20: mol_type = other RNA
atagggtgctactcaaagtt

SEQ ID NO: 21956 - RNA, 20 nt, synthetic construct
  source 1..20: mol_type = other RNA
ataggtaatactctagtggt

SEQ ID NO: 21957 - RNA, 20 nt, synthetic construct
  source 1..20: mol_type = other RNA
ataggtagtacatattcatt

SEQ ID NO: 21958 - RNA, 20 nt, synthetic construct
  source 1..20: mol_type = other RNA
ataggtattcatgctgtgaa

SEQ ID NO: 21959 - RNA, 20 nt, synthetic construct
  source 1..20: mol_type = other RNA
ataggtcactgcagtctcaa

SEQ ID NO: 21960 - RNA, 20 nt, synthetic construct
  source 1..20: mol_type = other RNA
ataggtcatgtacataaatt

SEQ ID NO: 21961 - RNA, 20 nt, synthetic construct
  source 1..20: mol_type = other RNA
ataggtgtgtgttccttcct

SEQ ID NO: 21962 - RNA, 20 nt, synthetic construct
  source 1..20: mol_type = other RNA
ataggttgaatagggcctca

SEQ ID NO: 21963 - RNA, 20 nt, synthetic construct
  source 1..20: mol_type = other RNA
atagtaactttctgcttaaa

SEQ ID NO: 21964 - RNA, 20 nt, synthetic construct
  source 1..20: mol_type = other RNA
atagtaataaaggcaatgct

SEQ ID NO: 21965 - RNA, 20 nt, synthetic construct
  source 1..20: mol_type = other RNA
atagtaattctgtgcttaaa

SEQ ID NO: 21966 - RNA, 20 nt, synthetic construct
  source 1..20: mol_type = other RNA
atagtactccattatatgaa

SEQ ID NO: 21967 - RNA, 20 nt, synthetic construct
  source 1..20: mol_type = other RNA
atagtactgaccatctcagc

SEQ ID NO: 21968 - RNA, 20 nt, synthetic construct
  source 1..20: mol_type = other RNA
atagtagctgttgaattgtt

SEQ ID NO: 21969 - RNA, 20 nt, synthetic construct
  source 1..20: mol_type = other RNA
atagtagcttcaatgagggc

SEQ ID NO: 21970 - RNA, 20 nt, synthetic construct
  source 1..20: mol_type = other RNA
atagtagttgctcagaaaat

SEQ ID NO: 21971 - RNA, 20 nt, synthetic construct
  source 1..20: mol_type = other RNA
atagtatgaaggttcttaaa

SEQ ID NO: 21972 - RNA, 20 nt, synthetic construct
  source 1..20: mol_type = other RNA
atagtattacctcccatgca

SEQ ID NO: 21973 - RNA, 20 nt, synthetic construct
  source 1..20: mol_type = other RNA
atagtattcaggacagatta

SEQ ID NO: 21974 - RNA, 20 nt, synthetic construct
  source 1..20: mol_type = other RNA
atagtattccatggtatgtg

SEQ ID NO: 21975 - RNA, 20 nt, synthetic construct
  source 1..20: mol_type = other RNA
atagtcaagtaacagttcaa

SEQ ID NO: 21976 - RNA, 20 nt, synthetic construct
  source 1..20: mol_type = other RNA
atagtcatcattattagcaa

SEQ ID NO: 21977 - RNA, 20 nt, synthetic construct
  source 1..20: mol_type = other RNA
atagtcattccgctaaacat

SEQ ID NO: 21978 - RNA, 20 nt, synthetic construct
  source 1..20: mol_type = other RNA
atagtccactttccatctta

SEQ ID NO: 21979 - RNA, 20 nt, synthetic construct
  source 1..20: mol_type = other RNA
atagtctcacgatacttttt

SEQ ID NO: 21980 - RNA, 20 nt, synthetic construct
  source 1..20: mol_type = other RNA
atagtctcctatattgtcaa

SEQ ID NO: 21981 - RNA, 20 nt, synthetic construct
  source 1..20: mol_type = other RNA
atagtctcttcctgtatatc

SEQ ID NO: 21982 - RNA, 20 nt, synthetic construct
  source 1..20: mol_type = other RNA
atagtcttagctcttaagct

SEQ ID NO: 21983 - RNA, 20 nt, synthetic construct
  source 1..20: mol_type = other RNA
atagtcttccaaaatattga

SEQ ID NO: 21984 - RNA, 20 nt, synthetic construct
  source 1..20: mol_type = other RNA
atagtcttccaattgcagaa

SEQ ID NO: 21985 - RNA, 20 nt, synthetic construct
  source 1..20: mol_type = other RNA
atagtgaccctttgaagtat

SEQ ID NO: 21986 - RNA, 20 nt, synthetic construct
  source 1..20: mol_type = other RNA
atagtgctcttctgatcaca

SEQ ID NO: 21987 - RNA, 20 nt, synthetic construct
  source 1..20: mol_type = other RNA
atagtgctttttactttgcg

SEQ ID NO: 21988 - RNA, 20 nt, synthetic construct
  source 1..20: mol_type = other RNA
atagtggctgcaccattttt

SEQ ID NO: 21989 - RNA, 20 nt, synthetic construct
  source 1..20: mol_type = other RNA
atagtgggaccccgtctctg

SEQ ID NO: 21990 - RNA, 20 nt, synthetic construct
  source 1..20: mol_type = other RNA
atagtgggtagaagcagcaa

SEQ ID NO: 21991 - RNA, 20 nt, synthetic construct
  source 1..20: mol_type = other RNA
atagtggtaaggagccaaac

SEQ ID NO: 21992 - RNA, 20 nt, synthetic construct
  source 1..20: mol_type = other RNA
atagtggtttgaagcttcac

SEQ ID NO: 21993 - RNA, 20 nt, synthetic construct
  source 1..20: mol_type = other RNA
atagtgttaattatttgtgc

SEQ ID NO: 21994 - RNA, 20 nt, synthetic construct
  source 1..20: mol_type = other RNA
atagtgtttccttccagatg

SEQ ID NO: 21995 - RNA, 20 nt, synthetic construct
  source 1..20: mol_type = other RNA
atagttaacgtttatctaca

SEQ ID NO: 21996 - RNA, 20 nt, synthetic construct
  source 1..20: mol_type = other RNA
atagttaagtctgaaagctt

SEQ ID NO: 21997 - RNA, 20 nt, synthetic construct
  source 1..20: mol_type = other RNA
atagttaatgtgtgaagaag

SEQ ID NO: 21998 - RNA, 20 nt, synthetic construct
  source 1..20: mol_type = other RNA
atagttcacctctccgggta

SEQ ID NO: 21999 - RNA, 20 nt, synthetic construct
  source 1..20: mol_type = other RNA
atagttgattatttttaccc

SEQ ID NO: 22000 - RNA, 20 nt, synthetic construct
  source 1..20: mol_type = other RNA
atagttgcagattcatcttg

SEQ ID NO: 22001 - RNA, 20 nt, synthetic construct
  source 1..20: mol_type = other RNA
atagttggtcagaaaaatgg

SEQ ID NO: 22002 - RNA, 20 nt, synthetic construct
  source 1..20: mol_type = other RNA
atagtttaattgggggaaaa

SEQ ID NO: 22003 - RNA, 20 nt, synthetic construct
  source 1..20: mol_type = other RNA
atagtttagttactcaaatc

SEQ ID NO: 22004 - RNA, 20 nt, synthetic construct
  source 1..20: mol_type = other RNA
atagtttctcaacttagcct

SEQ ID NO: 22005 - RNA, 20 nt, synthetic construct
  source 1..20: mol_type = other RNA
atagtttgagtatttcatgt

SEQ ID NO: 22006 - RNA, 20 nt, synthetic construct
  source 1..20: mol_type = other RNA
atataaaaagcctctgtgga

SEQ ID NO: 22007 - RNA, 20 nt, synthetic construct
  source 1..20: mol_type = other RNA
atataaaaatggtcaacatg

SEQ ID NO: 22008 - RNA, 20 nt, synthetic construct
  source 1..20: mol_type = other RNA
atataaaaattccgctctgg

SEQ ID NO: 22009 - RNA, 20 nt, synthetic construct
  source 1..20: mol_type = other RNA
atataaacgtgtgtgtaagc

SEQ ID NO: 22010 - RNA, 20 nt, synthetic construct
  source 1..20: mol_type = other RNA
atataaactcttccttatcc

SEQ ID NO: 22011 - RNA, 20 nt, synthetic construct
  source 1..20: mol_type = other RNA
atataaactggaaggaaata

SEQ ID NO: 22012 - RNA, 20 nt, synthetic construct
  source 1..20: mol_type = other RNA
atataaagaactccaacaat

SEQ ID NO: 22013 - RNA, 20 nt, synthetic construct
  source 1..20: mol_type = other RNA
atataaatacgtgtatactg

SEQ ID NO: 22014 - RNA, 20 nt, synthetic construct
  source 1..20: mol_type = other RNA
atataaatcaatctgtttcc

SEQ ID NO: 22015 - RNA, 20 nt, synthetic construct
  source 1..20: mol_type = other RNA
atataaatgctcagtgggtt

SEQ ID NO: 22016 - RNA, 20 nt, synthetic construct
  source 1..20: mol_type = other RNA
atataacgatagtctcctat

SEQ ID NO: 22017 - RNA, 20 nt, synthetic construct
  source 1..20: mol_type = other RNA
atataagagtgggcaaaaaa

SEQ ID NO: 22018 - RNA, 20 nt, synthetic construct
  source 1..20: mol_type = other RNA
atataagatgatctaaatgg

SEQ ID NO: 22019 - RNA, 20 nt, synthetic construct
  source 1..20: mol_type = other RNA
atataaggggaatcatgcag

SEQ ID NO: 22020 - RNA, 20 nt, synthetic construct
  source 1..20: mol_type = other RNA
atataagtggaatcattccg

SEQ ID NO: 22021 - RNA, 20 nt, synthetic construct
  source 1..20: mol_type = other RNA
atataatccaactgcagtct

SEQ ID NO: 22022 - RNA, 20 nt, synthetic construct
  source 1..20: mol_type = other RNA
atataatctaaccctcctcc

SEQ ID NO: 22023 - RNA, 20 nt, synthetic construct
  source 1..20: mol_type = other RNA
atataatggagtactatgca

SEQ ID NO: 22024 - RNA, 20 nt, synthetic construct
  source 1..20: mol_type = other RNA
atatacacaaaaagatctgt

SEQ ID NO: 22025 - RNA, 20 nt, synthetic construct
  source 1..20: mol_type = other RNA
atatacaggaagagactatc

SEQ ID NO: 22026 - RNA, 20 nt, synthetic construct
  source 1..20: mol_type = other RNA
atatacatgacatggttttc

SEQ ID NO: 22027 - RNA, 20 nt, synthetic construct
  source 1..20: mol_type = other RNA
atatacccttctgttaatag

SEQ ID NO: 22028 - RNA, 20 nt, synthetic construct
  source 1..20: mol_type = other RNA
atatacctgtagaaaatagg

SEQ ID NO: 22029 - RNA, 20 nt, synthetic construct
  source 1..20: mol_type = other RNA
atataccttatgtgaaagta

SEQ ID NO: 22030 - RNA, 20 nt, synthetic construct
  source 1..20: mol_type = other RNA
atatacggaatgattccact

SEQ ID NO: 22031 - RNA, 20 nt, synthetic construct
  source 1..20: mol_type = other RNA
atatacgtatttatcatgtc

SEQ ID NO: 22032 - RNA, 20 nt, synthetic construct
  source 1..20: mol_type = other RNA
atatactaaatacaccaaac

SEQ ID NO: 22033 - RNA, 20 nt, synthetic construct
  source 1..20: mol_type = other RNA
atatactctgagacaggatc

SEQ ID NO: 22034 - RNA, 20 nt, synthetic construct
  source 1..20: mol_type = other RNA
atatactgaagttctcaggg

SEQ ID NO: 22035 - RNA, 20 nt, synthetic construct
  source 1..20: mol_type = other RNA
atatactgactagtggctca

SEQ ID NO: 22036 - RNA, 20 nt, synthetic construct
  source 1..20: mol_type = other RNA
atatactggaaaactagaga

SEQ ID NO: 22037 - RNA, 20 nt, synthetic construct
  source 1..20: mol_type = other RNA
atatacttgtcaagttctga

SEQ ID NO: 22038 - RNA, 20 nt, synthetic construct
  source 1..20: mol_type = other RNA
atatagaaggccagagggaa

SEQ ID NO: 22039 - RNA, 20 nt, synthetic construct
  source 1..20: mol_type = other RNA
atatagaagtaaatcccggc

SEQ ID NO: 22040 - RNA, 20 nt, synthetic construct
  source 1..20: mol_type = other RNA
atatagctaagaaacagtaa

SEQ ID NO: 22041 - RNA, 20 nt, synthetic construct
  source 1..20: mol_type = other RNA
atataggagactatcgttat

SEQ ID NO: 22042 - RNA, 20 nt, synthetic construct
  source 1..20: mol_type = other RNA
atataggattttcgtatctt

SEQ ID NO: 22043 - RNA, 20 nt, synthetic construct
  source 1..20: mol_type = other RNA
atatagtaattctgtgctta

SEQ ID NO: 22044 - RNA, 20 nt, synthetic construct
  source 1..20: mol_type = other RNA
atatagtgggaccccgtctc

SEQ ID NO: 22045 - RNA, 20 nt, synthetic construct
  source 1..20: mol_type = other RNA
atatataaagaactccaaca

SEQ ID NO: 22046 - RNA, 20 nt, synthetic construct
  source 1..20: mol_type = other RNA
atatataccacattttgttc

SEQ ID NO: 22047 - RNA, 20 nt, synthetic construct
  source 1..20: mol_type = other RNA
atatatacggaatgattcca

SEQ ID NO: 22048 - RNA, 20 nt, synthetic construct
  source 1..20: mol_type = other RNA
atatatactctgagacagga

SEQ ID NO: 22049 - RNA, 20 nt, synthetic construct
  source 1..20: mol_type = other RNA
atatatactgaagttctcag

SEQ ID NO: 22050 - RNA, 20 nt, synthetic construct
  source 1..20: mol_type = other RNA
atatataggattttcgtatc

SEQ ID NO: 22051 - RNA, 20 nt, synthetic construct
  source 1..20: mol_type = other RNA
atatatcacaacttgtatga

SEQ ID NO: 22052 - RNA, 20 nt, synthetic construct
  source 1..20: mol_type = other RNA
atatatcatagagtaccagg

SEQ ID NO: 22053 - RNA, 20 nt, synthetic construct
  source 1..20: mol_type = other RNA
atatatctgtctgggataat

SEQ ID NO: 22054 - RNA, 20 nt, synthetic construct
  source 1..20: mol_type = other RNA
atatatgatgatttttgcca

SEQ ID NO: 22055 - RNA, 20 nt, synthetic construct
  source 1..20: mol_type = other RNA
atatatgcattcccatgttc

SEQ ID NO: 22056 - RNA, 20 nt, synthetic construct
  source 1..20: mol_type = other RNA
atatatgctccctaaataca

SEQ ID NO: 22057 - RNA, 20 nt, synthetic construct
  source 1..20: mol_type = other RNA
atatattaaccactgaaact

SEQ ID NO: 22058 - RNA, 20 nt, synthetic construct
  source 1..20: mol_type = other RNA
atatattatggtctttttcc

SEQ ID NO: 22059 - RNA, 20 nt, synthetic construct
  source 1..20: mol_type = other RNA
atatattctaaacctgaggt

SEQ ID NO: 22060 - RNA, 20 nt, synthetic construct
  source 1..20: mol_type = other RNA
atatattttctaagagccaa

SEQ ID NO: 22061 - RNA, 20 nt, synthetic construct
  source 1..20: mol_type = other RNA
atatcaatctggatataaca

SEQ ID NO: 22062 - RNA, 20 nt, synthetic construct
  source 1..20: mol_type = other RNA
atatcacaacttgtatgaaa

SEQ ID NO: 22063 - RNA, 20 nt, synthetic construct
  source 1..20: mol_type = other RNA
atatcacactgtttgattac

SEQ ID NO: 22064 - RNA, 20 nt, synthetic construct
  source 1..20: mol_type = other RNA
atatcacccagaccaagttt

SEQ ID NO: 22065 - RNA, 20 nt, synthetic construct
  source 1..20: mol_type = other RNA
atatcagaagtgctgacttg

SEQ ID NO: 22066 - RNA, 20 nt, synthetic construct
  source 1..20: mol_type = other RNA
atatcagggatcacagatac

SEQ ID NO: 22067 - RNA, 20 nt, synthetic construct
  source 1..20: mol_type = other RNA
atatcagttatcacacctag

SEQ ID NO: 22068 - RNA, 20 nt, synthetic construct
  source 1..20: mol_type = other RNA
atatcatagagtaccaggtc

SEQ ID NO: 22069 - RNA, 20 nt, synthetic construct
  source 1..20: mol_type = other RNA
atatcatattttccttatcc

SEQ ID NO: 22070 - RNA, 20 nt, synthetic construct
  source 1..20: mol_type = other RNA
atatcatcatcttatacttg

SEQ ID NO: 22071 - RNA, 20 nt, synthetic construct
  source 1..20: mol_type = other RNA
atatcatcttaagaaccata

SEQ ID NO: 22072 - RNA, 20 nt, synthetic construct
  source 1..20: mol_type = other RNA
atatcatttgaatgatgcga

SEQ ID NO: 22073 - RNA, 20 nt, synthetic construct
  source 1..20: mol_type = other RNA
atatccaaagataaaggtaa

SEQ ID NO: 22074 - RNA, 20 nt, synthetic construct
  source 1..20: mol_type = other RNA
atatccaagcacaaacctgg

SEQ ID NO: 22075 - RNA, 20 nt, synthetic construct
  source 1..20: mol_type = other RNA
atatccaatcactggctagt

SEQ ID NO: 22076 - RNA, 20 nt, synthetic construct
  source 1..20: mol_type = other RNA
atatccacagtatgctgttt

SEQ ID NO: 22077 - RNA, 20 nt, synthetic construct
  source 1..20: mol_type = other RNA
atatccagattgatatctga

SEQ ID NO: 22078 - RNA, 20 nt, synthetic construct
  source 1..20: mol_type = other RNA
atatcccaaattggcattta

SEQ ID NO: 22079 - RNA, 20 nt, synthetic construct
  source 1..20: mol_type = other RNA
atatcccatataaggggaat

SEQ ID NO: 22080 - RNA, 20 nt, synthetic construct
  source 1..20: mol_type = other RNA
atatccccatttttctcgac

SEQ ID NO: 22081 - RNA, 20 nt, synthetic construct
  source 1..20: mol_type = other RNA
atatccctgataatcacaga

SEQ ID NO: 22082 - RNA, 20 nt, synthetic construct
  source 1..20: mol_type = other RNA
atatccctggggtttcctta

SEQ ID NO: 22083 - RNA, 20 nt, synthetic construct
  source 1..20: mol_type = other RNA
atatccgaaagaactgaaag

SEQ ID NO: 22084 - RNA, 20 nt, synthetic construct
  source 1..20: mol_type = other RNA
atatcctaaacacttagcat

SEQ ID NO: 22085 - RNA, 20 nt, synthetic construct
  source 1..20: mol_type = other RNA
atatcctcagggtaggaaaa

SEQ ID NO: 22086 - RNA, 20 nt, synthetic construct
  source 1..20: mol_type = other RNA
atatcctgtaaacctggaat

SEQ ID NO: 22087 - RNA, 20 nt, synthetic construct
  source 1..20: mol_type = other RNA
atatccttctacatcccccc

SEQ ID NO: 22088 - RNA, 20 nt, synthetic construct
  source 1..20: mol_type = other RNA
atatccttttatgtgcagtc

SEQ ID NO: 22089 - RNA, 20 nt, synthetic construct
  source 1..20: mol_type = other RNA
atatctaattaacatccaga

SEQ ID NO: 22090 - RNA, 20 nt, synthetic construct
  source 1..20: mol_type = other RNA
atatctacaaatcacatatc

SEQ ID NO: 22091 - RNA, 20 nt, synthetic construct
  source 1..20: mol_type = other RNA
atatctacatgtacgccaat

SEQ ID NO: 22092 - RNA, 20 nt, synthetic construct
  source 1..20: mol_type = other RNA
atatctatcagggctgaaaa

SEQ ID NO: 22093 - RNA, 20 nt, synthetic construct
  source 1..20: mol_type = other RNA
atatctccctcacagtccac

SEQ ID NO: 22094 - RNA, 20 nt, synthetic construct
  source 1..20: mol_type = other RNA
atatctccttttaagagtga

SEQ ID NO: 22095 - RNA, 20 nt, synthetic construct
  source 1..20: mol_type = other RNA
atatctgaggtcaggagctc

SEQ ID NO: 22096 - RNA, 20 nt, synthetic construct
  source 1..20: mol_type = other RNA
atatctgagtgttgtgtgca

SEQ ID NO: 22097 - RNA, 20 nt, synthetic construct
  source 1..20: mol_type = other RNA
atatctgattttgtgtcttc

SEQ ID NO: 22098 - RNA, 20 nt, synthetic construct
  source 1..20: mol_type = other RNA
atatctggactgaaaagata

SEQ ID NO: 22099 - RNA, 20 nt, synthetic construct
  source 1..20: mol_type = other RNA
atatctggcctgcaccattt

SEQ ID NO: 22100 - RNA, 20 nt, synthetic construct
  source 1..20: mol_type = other RNA
atatctgtaagtcatcaaag

SEQ ID NO: 22101 - RNA, 20 nt, synthetic construct
  source 1..20: mol_type = other RNA
atatctgtctgggataatga

SEQ ID NO: 22102 - RNA, 20 nt, synthetic construct
  source 1..20: mol_type = other RNA
atatctttaggtgttttttc

SEQ ID NO: 22103 - RNA, 20 nt, synthetic construct
  source 1..20: mol_type = other RNA
atatctttgcttataacaag

SEQ ID NO: 22104 - RNA, 20 nt, synthetic construct
  source 1..20: mol_type = other RNA
atatctttggaaaaatgtcc

SEQ ID NO: 22105 - RNA, 20 nt, synthetic construct
  source 1..20: mol_type = other RNA
atatctttggggagatacct

SEQ ID NO: 22106 - RNA, 20 nt, synthetic construct
  source 1..20: mol_type = other RNA
atatgaaaagcccaatctac

SEQ ID NO: 22107 - RNA, 20 nt, synthetic construct
  source 1..20: mol_type = other RNA
atatgaaaagcttcccccct

SEQ ID NO: 22108 - RNA, 20 nt, synthetic construct
  source 1..20: mol_type = other RNA
atatgaaagaggagacatta

SEQ ID NO: 22109 - RNA, 20 nt, synthetic construct
  source 1..20: mol_type = other RNA
atatgaaatcacacaatctt

SEQ ID NO: 22110 - RNA, 20 nt, synthetic construct
  source 1..20: mol_type = other RNA
atatgaaccacactgacagg

SEQ ID NO: 22111 - RNA, 20 nt, synthetic construct
  source 1..20: mol_type = other RNA
atatgaagcattaatgcaac

SEQ ID NO: 22112 - RNA, 20 nt, synthetic construct
  source 1..20: mol_type = other RNA
atatgaataaaccacgcagt

SEQ ID NO: 22113 - RNA, 20 nt, synthetic construct
  source 1..20: mol_type = other RNA
atatgactggtgtccttctg

SEQ ID NO: 22114 - RNA, 20 nt, synthetic construct
  source 1..20: mol_type = other RNA
atatgagaattcattgttgt

SEQ ID NO: 22115 - RNA, 20 nt, synthetic construct
  source 1..20: mol_type = other RNA
atatgagggatgaggaagag

SEQ ID NO: 22116 - RNA, 20 nt, synthetic construct
  source 1..20: mol_type = other RNA
atatgagttcctgcttcccc

SEQ ID NO: 22117 - RNA, 20 nt, synthetic construct
  source 1..20: mol_type = other RNA
atatgataccctcaaaagat

SEQ ID NO: 22118 - RNA, 20 nt, synthetic construct
  source 1..20: mol_type = other RNA
atatgatactcgtagttttt

SEQ ID NO: 22119 - RNA, 20 nt, synthetic construct
  source 1..20: mol_type = other RNA
atatgatccagcagtttcac

SEQ ID NO: 22120 - RNA, 20 nt, synthetic construct
  source 1..20: mol_type = other RNA
atatgatctatcaatctcac

SEQ ID NO: 22121 - RNA, 20 nt, synthetic construct
  source 1..20: mol_type = other RNA
atatgatgatttttgccagt

SEQ ID NO: 22122 - RNA, 20 nt, synthetic construct
  source 1..20: mol_type = other RNA
atatgcacaatggaatatta

SEQ ID NO: 22123 - RNA, 20 nt, synthetic construct
  source 1..20: mol_type = other RNA
atatgcaggaccaactttaa

SEQ ID NO: 22124 - RNA, 20 nt, synthetic construct
  source 1..20: mol_type = other RNA
atatgcagtatgtgccattt

SEQ ID NO: 22125 - RNA, 20 nt, synthetic construct
  source 1..20: mol_type = other RNA
atatgcatgttatttgggga

SEQ ID NO: 22126 - RNA, 20 nt, synthetic construct
  source 1..20: mol_type = other RNA
atatgcattaagccagtcac

SEQ ID NO: 22127 - RNA, 20 nt, synthetic construct
  source 1..20: mol_type = other RNA
atatgcattcccatgttcac

SEQ ID NO: 22128 - RNA, 20 nt, synthetic construct
  source 1..20: mol_type = other RNA
atatgccacattttttggtt

SEQ ID NO: 22129 - RNA, 20 nt, synthetic construct
  source 1..20: mol_type = other RNA
atatgccggctgttaggtat

SEQ ID NO: 22130 - RNA, 20 nt, synthetic construct
  source 1..20: mol_type = other RNA
atatgcctagatgattcgca

SEQ ID NO: 22131 - RNA, 20 nt, synthetic construct
  source 1..20: mol_type = other RNA
atatgcctagatttcaatct

SEQ ID NO: 22132 - RNA, 20 nt, synthetic construct
  source 1..20: mol_type = other RNA
atatgcctcatgcatccaca

SEQ ID NO: 22133 - RNA, 20 nt, synthetic construct
  source 1..20: mol_type = other RNA
atatgctccctaaatacaca

SEQ ID NO: 22134 - RNA, 20 nt, synthetic construct
  source 1..20: mol_type = other RNA
atatgctgtagtgattcact

SEQ ID NO: 22135 - RNA, 20 nt, synthetic construct
  source 1..20: mol_type = other RNA
atatgctgtttttgaaaaga

SEQ ID NO: 22136 - RNA, 20 nt, synthetic construct
  source 1..20: mol_type = other RNA
atatgctttgagctacaaac

SEQ ID NO: 22137 - RNA, 20 nt, synthetic construct
  source 1..20: mol_type = other RNA
atatggaggcaatgttgatt

SEQ ID NO: 22138 - RNA, 20 nt, synthetic construct
  source 1..20: mol_type = other RNA
atatggcaattccataaatg

SEQ ID NO: 22139 - RNA, 20 nt, synthetic construct
  source 1..20: mol_type = other RNA
atatgggagtccctgctttc

SEQ ID NO: 22140 - RNA, 20 nt, synthetic construct
  source 1..20: mol_type = other RNA
atatgggatatctaacataa

SEQ ID NO: 22141 - RNA, 20 nt, synthetic construct
  source 1..20: mol_type = other RNA
atatgggatgcttaaagcgc

SEQ ID NO: 22142 - RNA, 20 nt, synthetic construct
  source 1..20: mol_type = other RNA
atatgggccaaagacagatc

SEQ ID NO: 22143 - RNA, 20 nt, synthetic construct
  source 1..20: mol_type = other RNA
atatgggttattcacccaag

SEQ ID NO: 22144 - RNA, 20 nt, synthetic construct
  source 1..20: mol_type = other RNA
atatggtcactgctgatgta

SEQ ID NO: 22145 - RNA, 20 nt, synthetic construct
  source 1..20: mol_type = other RNA
atatggtctaccatgttgtt

SEQ ID NO: 22146 - RNA, 20 nt, synthetic construct
  source 1..20: mol_type = other RNA
atatggttaatagtgaccct

SEQ ID NO: 22147 - RNA, 20 nt, synthetic construct
  source 1..20: mol_type = other RNA
atatggttcctagaaaattt

SEQ ID NO: 22148 - RNA, 20 nt, synthetic construct
  source 1..20: mol_type = other RNA
atatggtttaaggtaagggt

SEQ ID NO: 22149 - RNA, 20 nt, synthetic construct
  source 1..20: mol_type = other RNA
atatggtttacaatggttca

SEQ ID NO: 22150 - RNA, 20 nt, synthetic construct
  source 1..20: mol_type = other RNA
atatgtaatgacctggaaat

SEQ ID NO: 22151 - RNA, 20 nt, synthetic construct
  source 1..20: mol_type = other RNA
atatgtactacctatagaat

SEQ ID NO: 22152 - RNA, 20 nt, synthetic construct
  source 1..20: mol_type = other RNA
atatgtagggcaccgtgaca

SEQ ID NO: 22153 - RNA, 20 nt, synthetic construct
  source 1..20: mol_type = other RNA
atatgtcactgtaagaataa

SEQ ID NO: 22154 - RNA, 20 nt, synthetic construct
  source 1..20: mol_type = other RNA
atatgtcagatggtaaattg

SEQ ID NO: 22155 - RNA, 20 nt, synthetic construct
  source 1..20: mol_type = other RNA
atatgtccttttgagtttgg

SEQ ID NO: 22156 - RNA, 20 nt, synthetic construct
  source 1..20: mol_type = other RNA
atatgtcgcatgaaaacagc

SEQ ID NO: 22157 - RNA, 20 nt, synthetic construct
  source 1..20: mol_type = other RNA
atatgtgaaaatactaacga

SEQ ID NO: 22158 - RNA, 20 nt, synthetic construct
  source 1..20: mol_type = other RNA
atatgtggaaaatgtatgat

SEQ ID NO: 22159 - RNA, 20 nt, synthetic construct
  source 1..20: mol_type = other RNA
atatgtgtacaatggggctt

SEQ ID NO: 22160 - RNA, 20 nt, synthetic construct
  source 1..20: mol_type = other RNA
atatgtgtaggaaggaacac

SEQ ID NO: 22161 - RNA, 20 nt, synthetic construct
  source 1..20: mol_type = other RNA
atatgtgttacaactctaat

SEQ ID NO: 22162 - RNA, 20 nt, synthetic construct
  source 1..20: mol_type = other RNA
atatgttcctatatttttcc

SEQ ID NO: 22163 - RNA, 20 nt, synthetic construct
  source 1..20: mol_type = other RNA
atatgttctaaagttagaag

SEQ ID NO: 22164 - RNA, 20 nt, synthetic construct
  source 1..20: mol_type = other RNA
atatgttgatgtaatggatc

SEQ ID NO: 22165 - RNA, 20 nt, synthetic construct
  source 1..20: mol_type = other RNA
atatgtttgtaacttgttca

SEQ ID NO: 22166 - RNA, 20 nt, synthetic construct
  source 1..20: mol_type = other RNA
atatgttttgcttcgaagct

SEQ ID NO: 22167 - RNA, 20 nt, synthetic construct
  source 1..20: mol_type = other RNA
atattaaaacccatgatctt

SEQ ID NO: 22168 - RNA, 20 nt, synthetic construct
  source 1..20: mol_type = other RNA
atattaaccaagaacaacct

SEQ ID NO: 22169 - RNA, 20 nt, synthetic construct
  source 1..20: mol_type = other RNA
atattaaccactgaaacttt

SEQ ID NO: 22170 - RNA, 20 nt, synthetic construct
  source 1..20: mol_type = other RNA
atattaagagtctcatctgt

SEQ ID NO: 22171 - RNA, 20 nt, synthetic construct
  source 1..20: mol_type = other RNA
atattaattctgaggcctcc

SEQ ID NO: 22172 - RNA, 20 nt, synthetic construct
  source 1..20: mol_type = other RNA
atattacagtaaggtttccc

SEQ ID NO: 22173 - RNA, 20 nt, synthetic construct
  source 1..20: mol_type = other RNA
atattactcagtctcgaaaa

SEQ ID NO: 22174 - RNA, 20 nt, synthetic construct
  source 1..20: mol_type = other RNA
atattagagtgaaaagaaac

SEQ ID NO: 22175 - RNA, 20 nt, synthetic construct
  source 1..20: mol_type = other RNA
atattagctacaaaagggaa

SEQ ID NO: 22176 - RNA, 20 nt, synthetic construct
  source 1..20: mol_type = other RNA
atattagctgtctggattga

SEQ ID NO: 22177 - RNA, 20 nt, synthetic construct
  source 1..20: mol_type = other RNA
atattagtctgtagcttcac

SEQ ID NO: 22178 - RNA, 20 nt, synthetic construct
  source 1..20: mol_type = other RNA
atattataagttgggagtct

SEQ ID NO: 22179 - RNA, 20 nt, synthetic construct
  source 1..20: mol_type = other RNA
atattatcctccaatgtttt

SEQ ID NO: 22180 - RNA, 20 nt, synthetic construct
  source 1..20: mol_type = other RNA
atattatggtctttttccag

SEQ ID NO: 22181 - RNA, 20 nt, synthetic construct
  source 1..20: mol_type = other RNA
atattatgtgcaagttctct

SEQ ID NO: 22182 - RNA, 20 nt, synthetic construct
  source 1..20: mol_type = other RNA
atattattttttcccgctac

SEQ ID NO: 22183 - RNA, 20 nt, synthetic construct
  source 1..20: mol_type = other RNA
atattcatagtagctgttga

SEQ ID NO: 22184 - RNA, 20 nt, synthetic construct
  source 1..20: mol_type = other RNA
atattcatttccaaagatca

SEQ ID NO: 22185 - RNA, 20 nt, synthetic construct
  source 1..20: mol_type = other RNA
atattccatttttctgacca

SEQ ID NO: 22186 - RNA, 20 nt, synthetic construct
  source 1..20: mol_type = other RNA
atattcctatcagaagcaca

SEQ ID NO: 22187 - RNA, 20 nt, synthetic construct
  source 1..20: mol_type = other RNA
atattcgttccagcagggta

SEQ ID NO: 22188 - RNA, 20 nt, synthetic construct
  source 1..20: mol_type = other RNA
atattctaaacctgaggtct

SEQ ID NO: 22189 - RNA, 20 nt, synthetic construct
  source 1..20: mol_type = other RNA
atattctaagtttgccaaag

SEQ ID NO: 22190 - RNA, 20 nt, synthetic construct
  source 1..20: mol_type = other RNA
atattctacagaaaaccctt

SEQ ID NO: 22191 - RNA, 20 nt, synthetic construct
  source 1..20: mol_type = other RNA
atattctggatgttaattag

SEQ ID NO: 22192 - RNA, 20 nt, synthetic construct
  source 1..20: mol_type = other RNA
atattctgtgaattgtgaca

SEQ ID NO: 22193 - RNA, 20 nt, synthetic construct
  source 1..20: mol_type = other RNA
atattgaaacgatgcattcc

SEQ ID NO: 22194 - RNA, 20 nt, synthetic construct
  source 1..20: mol_type = other RNA
atattgaagagggaacattt

SEQ ID NO: 22195 - RNA, 20 nt, synthetic construct
  source 1..20: mol_type = other RNA
atattgaagccagcacctaa

SEQ ID NO: 22196 - RNA, 20 nt, synthetic construct
  source 1..20: mol_type = other RNA
atattgaataatttccaggt

SEQ ID NO: 22197 - RNA, 20 nt, synthetic construct
  source 1..20: mol_type = other RNA
atattggattaagggcccac

SEQ ID NO: 22198 - RNA, 20 nt, synthetic construct
  source 1..20: mol_type = other RNA
atattggcataaagacagac

SEQ ID NO: 22199 - RNA, 20 nt, synthetic construct
  source 1..20: mol_type = other RNA
atattggccaggctggttcc

SEQ ID NO: 22200 - RNA, 20 nt, synthetic construct
  source 1..20: mol_type = other RNA
atattggcttatagtgttct

SEQ ID NO: 22201 - RNA, 20 nt, synthetic construct
  source 1..20: mol_type = other RNA
atattgtaggtgtctcattt

SEQ ID NO: 22202 - RNA, 20 nt, synthetic construct
  source 1..20: mol_type = other RNA
atattgtatatacccttctg

SEQ ID NO: 22203 - RNA, 20 nt, synthetic construct
  source 1..20: mol_type = other RNA
atattgtcaatggggaactt

SEQ ID NO: 22204 - RNA, 20 nt, synthetic construct
  source 1..20: mol_type = other RNA
atattgttcagccttaaaaa

SEQ ID NO: 22205 - RNA, 20 nt, synthetic construct
  source 1..20: mol_type = other RNA
atatttaacaccatggcagg

SEQ ID NO: 22206 - RNA, 20 nt, synthetic construct
  source 1..20: mol_type = other RNA
atatttactagatcaagccc

SEQ ID NO: 22207 - RNA, 20 nt, synthetic construct
  source 1..20: mol_type = other RNA
atatttactgcttgctgcac

SEQ ID NO: 22208 - RNA, 20 nt, synthetic construct
  source 1..20: mol_type = other RNA
atatttacttctacagaatg

SEQ ID NO: 22209 - RNA, 20 nt, synthetic construct
  source 1..20: mol_type = other RNA
atatttatcaacacatagtg

SEQ ID NO: 22210 - RNA, 20 nt, synthetic construct
  source 1..20: mol_type = other RNA
atatttatttccttaagcca

SEQ ID NO: 22211 - RNA, 20 nt, synthetic construct
  source 1..20: mol_type = other RNA
atatttcacaacgatttctt

SEQ ID NO: 22212 - RNA, 20 nt, synthetic construct
  source 1..20: mol_type = other RNA
atatttccaaataaggtcac

SEQ ID NO: 22213 - RNA, 20 nt, synthetic construct
  source 1..20: mol_type = other RNA
atatttcccttttggatgca

SEQ ID NO: 22214 - RNA, 20 nt, synthetic construct
  source 1..20: mol_type = other RNA
atatttccgatgataccttc

SEQ ID NO: 22215 - RNA, 20 nt, synthetic construct
  source 1..20: mol_type = other RNA
atatttccgtatccagtggt

SEQ ID NO: 22216 - RNA, 20 nt, synthetic construct
  source 1..20: mol_type = other RNA
atatttcgcctagataagaa

SEQ ID NO: 22217 - RNA, 20 nt, synthetic construct
  source 1..20: mol_type = other RNA
atatttctgtaaacatgaac

SEQ ID NO: 22218 - RNA, 20 nt, synthetic construct
  source 1..20: mol_type = other RNA
atatttgcagtagtattgaa

SEQ ID NO: 22219 - RNA, 20 nt, synthetic construct
  source 1..20: mol_type = other RNA
atatttgttcaagcgctgaa

SEQ ID NO: 22220 - RNA, 20 nt, synthetic construct
  source 1..20: mol_type = other RNA
atatttgttcagaaatagac

SEQ ID NO: 22221 - RNA, 20 nt, synthetic construct
  source 1..20: mol_type = other RNA
atattttaaaagtcagctag

SEQ ID NO: 22222 - RNA, 20 nt, synthetic construct
  source 1..20: mol_type = other RNA
atattttaagttctagggaa

SEQ ID NO: 22223 - RNA, 20 nt, synthetic construct
  source 1..20: mol_type = other RNA
atattttatgctttgtctct

SEQ ID NO: 22224 - RNA, 20 nt, synthetic construct
  source 1..20: mol_type = other RNA
atattttcaaggcttgtgca

SEQ ID NO: 22225 - RNA, 20 nt, synthetic construct
  source 1..20: mol_type = other RNA
atattttccttatccattca

SEQ ID NO: 22226 - RNA, 20 nt, synthetic construct
  source 1..20: mol_type = other RNA
atattttcgtgtactgaaac

SEQ ID NO: 22227 - RNA, 20 nt, synthetic construct
  source 1..20: mol_type = other RNA
atattttctaagagccaaag

SEQ ID NO: 22228 - RNA, 20 nt, synthetic construct
  source 1..20: mol_type = other RNA
atattttctgtcattctgca

SEQ ID NO: 22229 - RNA, 20 nt, synthetic construct
  source 1..20: mol_type = other RNA
atattttgaaaaaacttccc

SEQ ID NO: 22230 - RNA, 20 nt, synthetic construct
  source 1..20: mol_type = other RNA
atattttggaagactatgag

SEQ ID NO: 22231 - RNA, 20 nt, synthetic construct
  source 1..20: mol_type = other RNA
atattttggtagagatgggg

SEQ ID NO: 22232 - RNA, 20 nt, synthetic construct
  source 1..20: mol_type = other RNA
atattttgtaacgtgtatag

SEQ ID NO: 22233 - RNA, 20 nt, synthetic construct
  source 1..20: mol_type = other RNA
atattttgtgggaattcagt

SEQ ID NO: 22234 - RNA, 20 nt, synthetic construct
  source 1..20: mol_type = other RNA
atatttttatgcatttggtc

SEQ ID NO: 22235 - RNA, 20 nt, synthetic construct
  source 1..20: mol_type = other RNA
atatttttcagattgacctt

SEQ ID NO: 22236 - RNA, 20 nt, synthetic construct
  source 1..20: mol_type = other RNA
atatttttccacataaagtc

SEQ ID NO: 22237 - RNA, 20 nt, synthetic construct
  source 1..20: mol_type = other RNA
atcaaaaacctcccaacagg

SEQ ID NO: 22238 - RNA, 20 nt, synthetic construct
  source 1..20: mol_type = other RNA
atcaaaacaataagacaccg

SEQ ID NO: 22239 - RNA, 20 nt, synthetic construct
  source 1..20: mol_type = other RNA
atcaaaacacttctgtgatc

SEQ ID NO: 22240 - RNA, 20 nt, synthetic construct
  source 1..20: mol_type = other RNA
atcaaaaccaggaggtttgc

SEQ ID NO: 22241 - RNA, 20 nt, synthetic construct
  source 1..20: mol_type = other RNA
atcaaaagaccaagaatttt

SEQ ID NO: 22242 - RNA, 20 nt, synthetic construct
  source 1..20: mol_type = other RNA
atcaaaatcaaggtgcggga

SEQ ID NO: 22243 - RNA, 20 nt, synthetic construct
  source 1..20: mol_type = other RNA
atcaaacagtgtgatattgg

SEQ ID NO: 22244 - RNA, 20 nt, synthetic construct
  source 1..20: mol_type = other RNA
atcaaacataccccaaccct

SEQ ID NO: 22245 - RNA, 20 nt, synthetic construct
  source 1..20: mol_type = other RNA
atcaaaccatcctttccttg

SEQ ID NO: 22246 - RNA, 20 nt, synthetic construct
  source 1..20: mol_type = other RNA
atcaaaccatgttcatggga

SEQ ID NO: 22247 - RNA, 20 nt, synthetic construct
  source 1..20: mol_type = other RNA
atcaaacgtgctttccttat

SEQ ID NO: 22248 - RNA, 20 nt, synthetic construct
  source 1..20: mol_type = other RNA
atcaaagaaagagttgggtt

SEQ ID NO: 22249 - RNA, 20 nt, synthetic construct
  source 1..20: mol_type = other RNA
atcaaagctaccctttcttg

SEQ ID NO: 22250 - RNA, 20 nt, synthetic construct
  source 1..20: mol_type = other RNA
atcaaaggaaggaattttag

SEQ ID NO: 22251 - RNA, 20 nt, synthetic construct
  source 1..20: mol_type = other RNA
atcaaagtcccctgtaatta

SEQ ID NO: 22252 - RNA, 20 nt, synthetic construct
  source 1..20: mol_type = other RNA
atcaaagtgaaaggcaaagg

SEQ ID NO: 22253 - RNA, 20 nt, synthetic construct
  source 1..20: mol_type = other RNA
atcaaagttaaacttttgtg

SEQ ID NO: 22254 - RNA, 20 nt, synthetic construct
  source 1..20: mol_type = other RNA
atcaaatccagtcttcaggt

SEQ ID NO: 22255 - RNA, 20 nt, synthetic construct
  source 1..20: mol_type = other RNA
atcaaatctggctgcagggc

SEQ ID NO: 22256 - RNA, 20 nt, synthetic construct
  source 1..20: mol_type = other RNA
atcaaatggccttctttctt

SEQ ID NO: 22257 - RNA, 20 nt, synthetic construct
  source 1..20: mol_type = other RNA
atcaaatgggaaattagatg

SEQ ID NO: 22258 - RNA, 20 nt, synthetic construct
  source 1..20: mol_type = other RNA
atcaaattcacagaactgtc

SEQ ID NO: 22259 - RNA, 20 nt, synthetic construct
  source 1..20: mol_type = other RNA
atcaaatttaacacacaaca

SEQ ID NO: 22260 - RNA, 20 nt, synthetic construct
  source 1..20: mol_type = other RNA
atcaacacatagtgttaatt

SEQ ID NO: 22261 - RNA, 20 nt, synthetic construct
  source 1..20: mol_type = other RNA
atcaacacattcaaaattgt

SEQ ID NO: 22262 - RNA, 20 nt, synthetic construct
  source 1..20: mol_type = other RNA
atcaacagcagaacaaactg

SEQ ID NO: 22263 - RNA, 20 nt, synthetic construct
  source 1..20: mol_type = other RNA
atcaacaggtagctgctttt

SEQ ID NO: 22264 - RNA, 20 nt, synthetic construct
  source 1..20: mol_type = other RNA
atcaacagtgtactagtctc

SEQ ID NO: 22265 - RNA, 20 nt, synthetic construct
  source 1..20: mol_type = other RNA
atcaacattgcctccatatg

SEQ ID NO: 22266 - RNA, 20 nt, synthetic construct
  source 1..20: mol_type = other RNA
atcaacccatgaaaattgaa

SEQ ID NO: 22267 - RNA, 20 nt, synthetic construct
  source 1..20: mol_type = other RNA
atcaaccccatcaacaagtg

SEQ ID NO: 22268 - RNA, 20 nt, synthetic construct
  source 1..20: mol_type = other RNA
atcaacctgcaggtatttct

SEQ ID NO: 22269 - RNA, 20 nt, synthetic construct
  source 1..20: mol_type = other RNA
atcaactattccataagatc

SEQ ID NO: 22270 - RNA, 20 nt, synthetic construct
  source 1..20: mol_type = other RNA
atcaactgcttccctagccc

SEQ ID NO: 22271 - RNA, 20 nt, synthetic construct
  source 1..20: mol_type = other RNA
atcaagacagagctccctct

SEQ ID NO: 22272 - RNA, 20 nt, synthetic construct
  source 1..20: mol_type = other RNA
atcaagcccttccttgcttg

SEQ ID NO: 22273 - RNA, 20 nt, synthetic construct
  source 1..20: mol_type = other RNA
atcaagccgcaaataatcat

SEQ ID NO: 22274 - RNA, 20 nt, synthetic construct
  source 1..20: mol_type = other RNA
atcaagctcgccgtctccct

SEQ ID NO: 22275 - RNA, 20 nt, synthetic construct
  source 1..20: mol_type = other RNA
atcaaggaagcttcctaaag

SEQ ID NO: 22276 - RNA, 20 nt, synthetic construct
  source 1..20: mol_type = other RNA
atcaaggcacagtctgtgct

SEQ ID NO: 22277 - RNA, 20 nt, synthetic construct
  source 1..20: mol_type = other RNA
atcaagggtggtgctggact

SEQ ID NO: 22278 - RNA, 20 nt, synthetic construct
  source 1..20: mol_type = other RNA
atcaaggtacaatacactaa

SEQ ID NO: 22279 - RNA, 20 nt, synthetic construct
  source 1..20: mol_type = other RNA
atcaaggtgcgggattattt

SEQ ID NO: 22280 - RNA, 20 nt, synthetic construct
  source 1..20: mol_type = other RNA
atcaagtatctccctgtgcg

SEQ ID NO: 22281 - RNA, 20 nt, synthetic construct
  source 1..20: mol_type = other RNA
atcaagtatttcctatgaaa

SEQ ID NO: 22282 - RNA, 20 nt, synthetic construct
  source 1..20: mol_type = other RNA
atcaagtcctttccagaggt

SEQ ID NO: 22283 - RNA, 20 nt, synthetic construct
  source 1..20: mol_type = other RNA
atcaagtgaaatgatctttg

SEQ ID NO: 22284 - RNA, 20 nt, synthetic construct
  source 1..20: mol_type = other RNA
atcaagtgtgatcccaaaaa

SEQ ID NO: 22285 - RNA, 20 nt, synthetic construct
  source 1..20: mol_type = other RNA
atcaagttgcttggcacaga

SEQ ID NO: 22286 - RNA, 20 nt, synthetic construct
  source 1..20: mol_type = other RNA
atcaataattctgtgccaag

SEQ ID NO: 22287 - RNA, 20 nt, synthetic construct
  source 1..20: mol_type = other RNA
atcaatacttcatttccatt

SEQ ID NO: 22288 - RNA, 20 nt, synthetic construct
  source 1..20: mol_type = other RNA
atcaatagcagtgctgaaag

SEQ ID NO: 22289 - RNA, 20 nt, synthetic construct
  source 1..20: mol_type = other RNA
atcaatccagacagctaata

SEQ ID NO: 22290 - RNA, 20 nt, synthetic construct
  source 1..20: mol_type = other RNA
atcaatctcacacctgggta

SEQ ID NO: 22291 - RNA, 20 nt, synthetic construct
  source 1..20: mol_type = other RNA
atcaatctggatataacaaa

SEQ ID NO: 22292 - RNA, 20 nt, synthetic construct
  source 1..20: mol_type = other RNA
atcaatctgtttcctaatct

SEQ ID NO: 22293 - RNA, 20 nt, synthetic construct
  source 1..20: mol_type = other RNA
atcaatgatagactggatta

SEQ ID NO: 22294 - RNA, 20 nt, synthetic construct
  source 1..20: mol_type = other RNA
atcaatggaaaatgtaaaac

SEQ ID NO: 22295 - RNA, 20 nt, synthetic construct
  source 1..20: mol_type = other RNA
atcaattagttcctcctttt

SEQ ID NO: 22296 - RNA, 20 nt, synthetic construct
  source 1..20: mol_type = other RNA
atcaattcacaagattaatc

SEQ ID NO: 22297 - RNA, 20 nt, synthetic construct
  source 1..20: mol_type = other RNA
atcaattgaccaaacatgtg

SEQ ID NO: 22298 - RNA, 20 nt, synthetic construct
  source 1..20: mol_type = other RNA
atcaatttaacttctaatgc

SEQ ID NO: 22299 - RNA, 20 nt, synthetic construct
  source 1..20: mol_type = other RNA
atcacaacttgtatgaaatt

SEQ ID NO: 22300 - RNA, 20 nt, synthetic construct
  source 1..20: mol_type = other RNA
atcacaaggactggcttcag

SEQ ID NO: 22301 - RNA, 20 nt, synthetic construct
  source 1..20: mol_type = other RNA
atcacaaggtcagaagtttg

SEQ ID NO: 22302 - RNA, 20 nt, synthetic construct
  source 1..20: mol_type = other RNA
atcacaatgcgtttgttaga

SEQ ID NO: 22303 - RNA, 20 nt, synthetic construct
  source 1..20: mol_type = other RNA
atcacacaatcttgagacgg

SEQ ID NO: 22304 - RNA, 20 nt, synthetic construct
  source 1..20: mol_type = other RNA
atcacacccagtatacacgt

SEQ ID NO: 22305 - RNA, 20 nt, synthetic construct
  source 1..20: mol_type = other RNA
atcacaccctcctaccttcc

SEQ ID NO: 22306 - RNA, 20 nt, synthetic construct
  source 1..20: mol_type = other RNA
atcacaccgctgcattccag

SEQ ID NO: 22307 - RNA, 20 nt, synthetic construct
  source 1..20: mol_type = other RNA
atcacacctaggcctatttt

SEQ ID NO: 22308 - RNA, 20 nt, synthetic construct
  source 1..20: mol_type = other RNA
atcacactggtcactggcca

SEQ ID NO: 22309 - RNA, 20 nt, synthetic construct
  source 1..20: mol_type = other RNA
atcacactgtttgattactg

SEQ ID NO: 22310 - RNA, 20 nt, synthetic construct
  source 1..20: mol_type = other RNA
atcacacttgatggtttggg

SEQ ID NO: 22311 - RNA, 20 nt, synthetic construct
  source 1..20: mol_type = other RNA
atcacagaagtgttttgata

SEQ ID NO: 22312 - RNA, 20 nt, synthetic construct
  source 1..20: mol_type = other RNA
atcacagacagggaatgggg

SEQ ID NO: 22313 - RNA, 20 nt, synthetic construct
  source 1..20: mol_type = other RNA
atcacagacgcaaaggatgt

SEQ ID NO: 22314 - RNA, 20 nt, synthetic construct
  source 1..20: mol_type = other RNA
atcacagatacaactctgac

SEQ ID NO: 22315 - RNA, 20 nt, synthetic construct
  source 1..20: mol_type = other RNA
atcacaggaaagatgtcttt

SEQ ID NO: 22316 - RNA, 20 nt, synthetic construct
  source 1..20: mol_type = other RNA
atcacaggcgttgagccatc

SEQ ID NO: 22317 - RNA, 20 nt, synthetic construct
  source 1..20: mol_type = other RNA
atcacaggtttaggtttttc

SEQ ID NO: 22318 - RNA, 20 nt, synthetic construct
  source 1..20: mol_type = other RNA
atcacagtacgcttttatgt

SEQ ID NO: 22319 - RNA, 20 nt, synthetic construct
  source 1..20: mol_type = other RNA
atcacagtatgcacaaataa

SEQ ID NO: 22320 - RNA, 20 nt, synthetic construct
  source 1..20: mol_type = other RNA
atcacagtccaggaacttac

SEQ ID NO: 22321 - RNA, 20 nt, synthetic construct
  source 1..20: mol_type = other RNA
atcacagtgaggacgctgat

SEQ ID NO: 22322 - RNA, 20 nt, synthetic construct
  source 1..20: mol_type = other RNA
atcacattttgaatcatggg

SEQ ID NO: 22323 - RNA, 20 nt, synthetic construct
  source 1..20: mol_type = other RNA
atcaccaaagacttcaggaa

SEQ ID NO: 22324 - RNA, 20 nt, synthetic construct
  source 1..20: mol_type = other RNA
atcaccaggggctgggggat

SEQ ID NO: 22325 - RNA, 20 nt, synthetic construct
  source 1..20: mol_type = other RNA
atcaccatcatcatcaggct

SEQ ID NO: 22326 - RNA, 20 nt, synthetic construct
  source 1..20: mol_type = other RNA
atcaccatctgataagccca

SEQ ID NO: 22327 - RNA, 20 nt, synthetic construct
  source 1..20: mol_type = other RNA
atcaccatgtgcttatcaat

SEQ ID NO: 22328 - RNA, 20 nt, synthetic construct
  source 1..20: mol_type = other RNA
atcacccagaccaagtttaa

SEQ ID NO: 22329 - RNA, 20 nt, synthetic construct
  source 1..20: mol_type = other RNA
atcacccagctcgaccaggg

SEQ ID NO: 22330 - RNA, 20 nt, synthetic construct
  source 1..20: mol_type = other RNA
atcacccttataaaatgagg

SEQ ID NO: 22331 - RNA, 20 nt, synthetic construct
  source 1..20: mol_type = other RNA
atcacctcaaggcagaacac

SEQ ID NO: 22332 - RNA, 20 nt, synthetic construct
  source 1..20: mol_type = other RNA
atcacctcaagtgatgcaac

SEQ ID NO: 22333 - RNA, 20 nt, synthetic construct
  source 1..20: mol_type = other RNA
atcacgattctgacccagag

SEQ ID NO: 22334 - RNA, 20 nt, synthetic construct
  source 1..20: mol_type = other RNA
atcacgccactgcattccgc

SEQ ID NO: 22335 - RNA, 20 nt, synthetic construct
  source 1..20: mol_type = other RNA
atcacggctgattataacct

SEQ ID NO: 22336 - RNA, 20 nt, synthetic construct
  source 1..20: mol_type = other RNA
atcactaagagtgaaaaggc

SEQ ID NO: 22337 - RNA, 20 nt, synthetic construct
  source 1..20: mol_type = other RNA
atcactaattcaagtgttta

SEQ ID NO: 22338 - RNA, 20 nt, synthetic construct
  source 1..20: mol_type = other RNA
atcactacagcatattagct

SEQ ID NO: 22339 - RNA, 20 nt, synthetic construct
  source 1..20: mol_type = other RNA
atcactagaatgtgacttcg

SEQ ID NO: 22340 - RNA, 20 nt, synthetic construct
  source 1..20: mol_type = other RNA
atcactagctattagagaaa

SEQ ID NO: 22341 - RNA, 20 nt, synthetic construct
  source 1..20: mol_type = other RNA
atcactcactggcctgagct

SEQ ID NO: 22342 - RNA, 20 nt, synthetic construct
  source 1..20: mol_type = other RNA
atcactgactggctgtgcca

SEQ ID NO: 22343 - RNA, 20 nt, synthetic construct
  source 1..20: mol_type = other RNA
atcactggctagtaggcaac

SEQ ID NO: 22344 - RNA, 20 nt, synthetic construct
  source 1..20: mol_type = other RNA
atcacttgaggtgattaaag

SEQ ID NO: 22345 - RNA, 20 nt, synthetic construct
  source 1..20: mol_type = other RNA
atcactttttgtatttcctt

SEQ ID NO: 22346 - RNA, 20 nt, synthetic construct
  source 1..20: mol_type = other RNA
atcagaaaaggctgagacct

SEQ ID NO: 22347 - RNA, 20 nt, synthetic construct
  source 1..20: mol_type = other RNA
atcagaaactgacaggactc

SEQ ID NO: 22348 - RNA, 20 nt, synthetic construct
  source 1..20: mol_type = other RNA
atcagaacttgacaagtata

SEQ ID NO: 22349 - RNA, 20 nt, synthetic construct
  source 1..20: mol_type = other RNA
atcagaagagcactatgtaa

SEQ ID NO: 22350 - RNA, 20 nt, synthetic construct
  source 1..20: mol_type = other RNA
atcagaagcacaccaaggtt

SEQ ID NO: 22351 - RNA, 20 nt, synthetic construct
  source 1..20: mol_type = other RNA
atcagaagtgctgacttggc

SEQ ID NO: 22352 - RNA, 20 nt, synthetic construct
  source 1..20: mol_type = other RNA
atcagaattccattcctttt

SEQ ID NO: 22353 - RNA, 20 nt, synthetic construct
  source 1..20: mol_type = other RNA
atcagacaacacattaataa

SEQ ID NO: 22354 - RNA, 20 nt, synthetic construct
  source 1..20: mol_type = other RNA
atcagacacctacattaatc

SEQ ID NO: 22355 - RNA, 20 nt, synthetic construct
  source 1..20: mol_type = other RNA
atcagactgtattaccagct

SEQ ID NO: 22356 - RNA, 20 nt, synthetic construct
  source 1..20: mol_type = other RNA
atcagagaggctttttatta

SEQ ID NO: 22357 - RNA, 20 nt, synthetic construct
  source 1..20: mol_type = other RNA
atcagagcatgtcccctgga

SEQ ID NO: 22358 - RNA, 20 nt, synthetic construct
  source 1..20: mol_type = other RNA
atcagagctttgttatgaaa

SEQ ID NO: 22359 - RNA, 20 nt, synthetic construct
  source 1..20: mol_type = other RNA
atcagagtgaacaggcaacc

SEQ ID NO: 22360 - RNA, 20 nt, synthetic construct
  source 1..20: mol_type = other RNA
atcagatatgaaagaggaga

SEQ ID NO: 22361 - RNA, 20 nt, synthetic construct
  source 1..20: mol_type = other RNA
atcagatcccaattacttcc

SEQ ID NO: 22362 - RNA, 20 nt, synthetic construct
  source 1..20: mol_type = other RNA
atcagatgcttctagccaaa

SEQ ID NO: 22363 - RNA, 20 nt, synthetic construct
  source 1..20: mol_type = other RNA
atcagatggtgatacctctt

SEQ ID NO: 22364 - RNA, 20 nt, synthetic construct
  source 1..20: mol_type = other RNA
atcagattaagcatagtttg

SEQ ID NO: 22365 - RNA, 20 nt, synthetic construct
  source 1..20: mol_type = other RNA
atcagatttcaggtggtatt

SEQ ID NO: 22366 - RNA, 20 nt, synthetic construct
  source 1..20: mol_type = other RNA
atcagcaccaaagattatgt

SEQ ID NO: 22367 - RNA, 20 nt, synthetic construct
  source 1..20: mol_type = other RNA
atcagcaccatctaacagaa

SEQ ID NO: 22368 - RNA, 20 nt, synthetic construct
  source 1..20: mol_type = other RNA
atcagcaccctcaaatgtct

SEQ ID NO: 22369 - RNA, 20 nt, synthetic construct
  source 1..20: mol_type = other RNA
atcagcagtgaccatatttc

SEQ ID NO: 22370 - RNA, 20 nt, synthetic construct
  source 1..20: mol_type = other RNA
atcagccgtgattgcaccac

SEQ ID NO: 22371 - RNA, 20 nt, synthetic construct
  source 1..20: mol_type = other RNA
atcagcgctaagtgcatttc

SEQ ID NO: 22372 - RNA, 20 nt, synthetic construct
  source 1..20: mol_type = other RNA
atcagcgtcctcactgtgat

SEQ ID NO: 22373 - RNA, 20 nt, synthetic construct
  source 1..20: mol_type = other RNA
atcagcttcctacccaagct

SEQ ID NO: 22374 - RNA, 20 nt, synthetic construct
  source 1..20: mol_type = other RNA
atcaggaaaaccagtttaga

SEQ ID NO: 22375 - RNA, 20 nt, synthetic construct
  source 1..20: mol_type = other RNA
atcaggaaagaccggggact

SEQ ID NO: 22376 - RNA, 20 nt, synthetic construct
  source 1..20: mol_type = other RNA
atcaggaaagatgaagtata

SEQ ID NO: 22377 - RNA, 20 nt, synthetic construct
  source 1..20: mol_type = other RNA
atcaggaaagtgccagccac

SEQ ID NO: 22378 - RNA, 20 nt, synthetic construct
  source 1..20: mol_type = other RNA
atcaggaagtatgagtcttc

SEQ ID NO: 22379 - RNA, 20 nt, synthetic construct
  source 1..20: mol_type = other RNA
atcaggatgtctttgggaag

SEQ ID NO: 22380 - RNA, 20 nt, synthetic construct
  source 1..20: mol_type = other RNA
atcaggccttccacctgctc

SEQ ID NO: 22381 - RNA, 20 nt, synthetic construct
  source 1..20: mol_type = other RNA
atcaggctggctctttccac

SEQ ID NO: 22382 - RNA, 20 nt, synthetic construct
  source 1..20: mol_type = other RNA
atcaggcttgagtctgtgct

SEQ ID NO: 22383 - RNA, 20 nt, synthetic construct
  source 1..20: mol_type = other RNA
atcagggatattggcttata

SEQ ID NO: 22384 - RNA, 20 nt, synthetic construct
  source 1..20: mol_type = other RNA
atcagggatcacagatacaa

SEQ ID NO: 22385 - RNA, 20 nt, synthetic construct
  source 1..20: mol_type = other RNA
atcagggatttggccagaat

SEQ ID NO: 22386 - RNA, 20 nt, synthetic construct
  source 1..20: mol_type = other RNA
atcagggccttcccaaagac

SEQ ID NO: 22387 - RNA, 20 nt, synthetic construct
  source 1..20: mol_type = other RNA
atcagggcctttaatcacct

SEQ ID NO: 22388 - RNA, 20 nt, synthetic construct
  source 1..20: mol_type = other RNA
atcagggctgaaaaacacct

SEQ ID NO: 22389 - RNA, 20 nt, synthetic construct
  source 1..20: mol_type = other RNA
atcaggtctctttgaaagga

SEQ ID NO: 22390 - RNA, 20 nt, synthetic construct
  source 1..20: mol_type = other RNA
atcaggttgggcttatcaga

SEQ ID NO: 22391 - RNA, 20 nt, synthetic construct
  source 1..20: mol_type = other RNA
atcagtaaaattcccttcag

SEQ ID NO: 22392 - RNA, 20 nt, synthetic construct
  source 1..20: mol_type = other RNA
atcagtaacaaataagaaga

SEQ ID NO: 22393 - RNA, 20 nt, synthetic construct
  source 1..20: mol_type = other RNA
atcagtaagaaaacagataa

SEQ ID NO: 22394 - RNA, 20 nt, synthetic construct
  source 1..20: mol_type = other RNA
atcagtagtttgctagtggt

SEQ ID NO: 22395 - RNA, 20 nt, synthetic construct
  source 1..20: mol_type = other RNA
atcagtctccaatcctcagc

SEQ ID NO: 22396 - RNA, 20 nt, synthetic construct
  source 1..20: mol_type = other RNA
atcagtctgtaagcacctgt

SEQ ID NO: 22397 - RNA, 20 nt, synthetic construct
  source 1..20: mol_type = other RNA
atcagtgaatatcatttgaa

SEQ ID NO: 22398 - RNA, 20 nt, synthetic construct
  source 1..20: mol_type = other RNA
atcagtgctgctctgacgtt

SEQ ID NO: 22399 - RNA, 20 nt, synthetic construct
  source 1..20: mol_type = other RNA
atcagtggccagtgaccagt

SEQ ID NO: 22400 - RNA, 20 nt, synthetic construct
  source 1..20: mol_type = other RNA
atcagtggttgtgcttcgag

SEQ ID NO: 22401 - RNA, 20 nt, synthetic construct
  source 1..20: mol_type = other RNA
atcagtgtgaaagtattaaa

SEQ ID NO: 22402 - RNA, 20 nt, synthetic construct
  source 1..20: mol_type = other RNA
atcagttaccaccaagaaaa

SEQ ID NO: 22403 - RNA, 20 nt, synthetic construct
  source 1..20: mol_type = other RNA
atcagttatcacacctaggc

SEQ ID NO: 22404 - RNA, 20 nt, synthetic construct
  source 1..20: mol_type = other RNA
atcataagcttttatttgtc

SEQ ID NO: 22405 - RNA, 20 nt, synthetic construct
  source 1..20: mol_type = other RNA
atcatacacatccagaagtc

SEQ ID NO: 22406 - RNA, 20 nt, synthetic construct
  source 1..20: mol_type = other RNA
atcatacacctggatcaagt

SEQ ID NO: 22407 - RNA, 20 nt, synthetic construct
  source 1..20: mol_type = other RNA
atcatacacgagtgtgtttc

SEQ ID NO: 22408 - RNA, 20 nt, synthetic construct
  source 1..20: mol_type = other RNA
atcatacattttccacatat

SEQ ID NO: 22409 - RNA, 20 nt, synthetic construct
  source 1..20: mol_type = other RNA
atcatactggaaggactcac

SEQ ID NO: 22410 - RNA, 20 nt, synthetic construct
  source 1..20: mol_type = other RNA
atcatagagtaccaggtcag

SEQ ID NO: 22411 - RNA, 20 nt, synthetic construct
  source 1..20: mol_type = other RNA
atcatagctcactagagctt

SEQ ID NO: 22412 - RNA, 20 nt, synthetic construct
  source 1..20: mol_type = other RNA
atcatatagtaattctgtgc

SEQ ID NO: 22413 - RNA, 20 nt, synthetic construct
  source 1..20: mol_type = other RNA
atcatatgatctatcaatct

SEQ ID NO: 22414 - RNA, 20 nt, synthetic construct
  source 1..20: mol_type = other RNA
atcatcaagacagagctccc

SEQ ID NO: 22415 - RNA, 20 nt, synthetic construct
  source 1..20: mol_type = other RNA
atcatcacagtatgcacaaa

SEQ ID NO: 22416 - RNA, 20 nt, synthetic construct
  source 1..20: mol_type = other RNA
atcatcaggctggctctttc

SEQ ID NO: 22417 - RNA, 20 nt, synthetic construct
  source 1..20: mol_type = other RNA
atcatcatcaggctggctct

SEQ ID NO: 22418 - RNA, 20 nt, synthetic construct
  source 1..20: mol_type = other RNA
atcatcatcttatacttggc

SEQ ID NO: 22419 - RNA, 20 nt, synthetic construct
  source 1..20: mol_type = other RNA
atcatccggggagcttttga

SEQ ID NO: 22420 - RNA, 20 nt, synthetic construct
  source 1..20: mol_type = other RNA
atcatcgcattacgagttat

SEQ ID NO: 22421 - RNA, 20 nt, synthetic construct
  source 1..20: mol_type = other RNA
atcatcggaaatataaaaag

SEQ ID NO: 22422 - RNA, 20 nt, synthetic construct
  source 1..20: mol_type = other RNA
atcatctaatttcccatttg

SEQ ID NO: 22423 - RNA, 20 nt, synthetic construct
  source 1..20: mol_type = other RNA
atcatctaggcatataaact

SEQ ID NO: 22424 - RNA, 20 nt, synthetic construct
  source 1..20: mol_type = other RNA
atcatcttaagaaccataca

SEQ ID NO: 22425 - RNA, 20 nt, synthetic construct
  source 1..20: mol_type = other RNA
atcatcttatacttggcaaa

SEQ ID NO: 22426 - RNA, 20 nt, synthetic construct
  source 1..20: mol_type = other RNA
atcatcttttgcctggatga

SEQ ID NO: 22427 - RNA, 20 nt, synthetic construct
  source 1..20: mol_type = other RNA
atcatgaaagtggagaatta

SEQ ID NO: 22428 - RNA, 20 nt, synthetic construct
  source 1..20: mol_type = other RNA
atcatgatgtttggctcctt

SEQ ID NO: 22429 - RNA, 20 nt, synthetic construct
  source 1..20: mol_type = other RNA
atcatgatttaatagaggtc

SEQ ID NO: 22430 - RNA, 20 nt, synthetic construct
  source 1..20: mol_type = other RNA
atcatgcagtacttgtcttt

SEQ ID NO: 22431 - RNA, 20 nt, synthetic construct
  source 1..20: mol_type = other RNA
atcatgcctgggtaattaaa

SEQ ID NO: 22432 - RNA, 20 nt, synthetic construct
  source 1..20: mol_type = other RNA
atcatgggagccaaacttga

SEQ ID NO: 22433 - RNA, 20 nt, synthetic construct
  source 1..20: mol_type = other RNA
atcatggtgggccttgcaag

SEQ ID NO: 22434 - RNA, 20 nt, synthetic construct
  source 1..20: mol_type = other RNA
atcatgtcaagaatgaagtc

SEQ ID NO: 22435 - RNA, 20 nt, synthetic construct
  source 1..20: mol_type = other RNA
atcatgtcttcttggatttt

SEQ ID NO: 22436 - RNA, 20 nt, synthetic construct
  source 1..20: mol_type = other RNA
atcatgttctttatagcatt

SEQ ID NO: 22437 - RNA, 20 nt, synthetic construct
  source 1..20: mol_type = other RNA
atcattaaaaggtataaagg

SEQ ID NO: 22438 - RNA, 20 nt, synthetic construct
  source 1..20: mol_type = other RNA
atcattcaaatgatattcac

SEQ ID NO: 22439 - RNA, 20 nt, synthetic construct
  source 1..20: mol_type = other RNA
atcattcaggacactggagg

SEQ ID NO: 22440 - RNA, 20 nt, synthetic construct
  source 1..20: mol_type = other RNA
atcattcataaacacagaac

SEQ ID NO: 22441 - RNA, 20 nt, synthetic construct
  source 1..20: mol_type = other RNA
atcattcatctaaacgtttg

SEQ ID NO: 22442 - RNA, 20 nt, synthetic construct
  source 1..20: mol_type = other RNA
atcattcttattgattcaga

SEQ ID NO: 22443 - RNA, 20 nt, synthetic construct
  source 1..20: mol_type = other RNA
atcattcttctaataggaag

SEQ ID NO: 22444 - RNA, 20 nt, synthetic construct
  source 1..20: mol_type = other RNA
atcattgcaccactgcactc

SEQ ID NO: 22445 - RNA, 20 nt, synthetic construct
  source 1..20: mol_type = other RNA
atcattgtagctatatccca

SEQ ID NO: 22446 - RNA, 20 nt, synthetic construct
  source 1..20: mol_type = other RNA
atcattgttaggtgctggct

SEQ ID NO: 22447 - RNA, 20 nt, synthetic construct
  source 1..20: mol_type = other RNA
atcattgttcagggaaggct

SEQ ID NO: 22448 - RNA, 20 nt, synthetic construct
  source 1..20: mol_type = other RNA
atcatttagtaagtgtgagc

SEQ ID NO: 22449 - RNA, 20 nt, synthetic construct
  source 1..20: mol_type = other RNA
atcatttatacccaagtaaa

SEQ ID NO: 22450 - RNA, 20 nt, synthetic construct
  source 1..20: mol_type = other RNA
atcatttcaaaccaatgttc

SEQ ID NO: 22451 - RNA, 20 nt, synthetic construct
  source 1..20: mol_type = other RNA
atcatttcactcttttaagg

SEQ ID NO: 22452 - RNA, 20 nt, synthetic construct
  source 1..20: mol_type = other RNA
atcatttcacttgattactt

SEQ ID NO: 22453 - RNA, 20 nt, synthetic construct
  source 1..20: mol_type = other RNA
atcatttccaagattgaaaa

SEQ ID NO: 22454 - RNA, 20 nt, synthetic construct
  source 1..20: mol_type = other RNA
atcatttgaatgatgcgaaa

SEQ ID NO: 22455 - RNA, 20 nt, synthetic construct
  source 1..20: mol_type = other RNA
atcattttaaagggataatg

SEQ ID NO: 22456 - RNA, 20 nt, synthetic construct
  source 1..20: mol_type = other RNA
atcattttggcaaattgtca

SEQ ID NO: 22457 - RNA, 20 nt, synthetic construct
  source 1..20: mol_type = other RNA
atccaaaagcctcaaaattt

SEQ ID NO: 22458 - RNA, 20 nt, synthetic construct
  source 1..20: mol_type = other RNA
atccaaaagggaaatatgaa

SEQ ID NO: 22459 - RNA, 20 nt, synthetic construct
  source 1..20: mol_type = other RNA
atccaaaatcctctgtagat

SEQ ID NO: 22460 - RNA, 20 nt, synthetic construct
  source 1..20: mol_type = other RNA
atccaaacagaaaccctgta

SEQ ID NO: 22461 - RNA, 20 nt, synthetic construct
  source 1..20: mol_type = other RNA
atccaaagataaaggtaagg

SEQ ID NO: 22462 - RNA, 20 nt, synthetic construct
  source 1..20: mol_type = other RNA
atccaaattattgacaagac

SEQ ID NO: 22463 - RNA, 20 nt, synthetic construct
  source 1..20: mol_type = other RNA
atccaaattcacagcatgaa

SEQ ID NO: 22464 - RNA, 20 nt, synthetic construct
  source 1..20: mol_type = other RNA
atccaacatgccagctttgg

SEQ ID NO: 22465 - RNA, 20 nt, synthetic construct
  source 1..20: mol_type = other RNA
atccaacgaccggacgtggt

SEQ ID NO: 22466 - RNA, 20 nt, synthetic construct
  source 1..20: mol_type = other RNA
atccaactgcagtctgtcct

SEQ ID NO: 22467 - RNA, 20 nt, synthetic construct
  source 1..20: mol_type = other RNA
atccaagaagacatgataaa

SEQ ID NO: 22468 - RNA, 20 nt, synthetic construct
  source 1..20: mol_type = other RNA
atccaagcacaaacctggca

SEQ ID NO: 22469 - RNA, 20 nt, synthetic construct
  source 1..20: mol_type = other RNA
atccaaggacagaaattcaa

SEQ ID NO: 22470 - RNA, 20 nt, synthetic construct
  source 1..20: mol_type = other RNA
atccaagtattgtatcaatg

SEQ ID NO: 22471 - RNA, 20 nt, synthetic construct
  source 1..20: mol_type = other RNA
atccaagtttctagccataa

SEQ ID NO: 22472 - RNA, 20 nt, synthetic construct
  source 1..20: mol_type = other RNA
atccaatcactggctagtag

SEQ ID NO: 22473 - RNA, 20 nt, synthetic construct
  source 1..20: mol_type = other RNA
atccaattttttggcataca

SEQ ID NO: 22474 - RNA, 20 nt, synthetic construct
  source 1..20: mol_type = other RNA
atccacaacattgtgcaacc

SEQ ID NO: 22475 - RNA, 20 nt, synthetic construct
  source 1..20: mol_type = other RNA
atccacaatgagacatttga

SEQ ID NO: 22476 - RNA, 20 nt, synthetic construct
  source 1..20: mol_type = other RNA
atccacagctttcttttcca

SEQ ID NO: 22477 - RNA, 20 nt, synthetic construct
  source 1..20: mol_type = other RNA
atccacagtatgctgtttac

SEQ ID NO: 22478 - RNA, 20 nt, synthetic construct
  source 1..20: mol_type = other RNA
atccacatttggttttacta

SEQ ID NO: 22479 - RNA, 20 nt, synthetic construct
  source 1..20: mol_type = other RNA
atccacattttgtgacaagt

SEQ ID NO: 22480 - RNA, 20 nt, synthetic construct
  source 1..20: mol_type = other RNA
atccaccactccaccttagc

SEQ ID NO: 22481 - RNA, 20 nt, synthetic construct
  source 1..20: mol_type = other RNA
atccacccacttgtcccatg

SEQ ID NO: 22482 - RNA, 20 nt, synthetic construct
  source 1..20: mol_type = other RNA
atccacgcgtaagggtacag

SEQ ID NO: 22483 - RNA, 20 nt, synthetic construct
  source 1..20: mol_type = other RNA
atccactaggggactaacag

SEQ ID NO: 22484 - RNA, 20 nt, synthetic construct
  source 1..20: mol_type = other RNA
atccactgcacagtatgcgg

SEQ ID NO: 22485 - RNA, 20 nt, synthetic construct
  source 1..20: mol_type = other RNA
atccagaagagaatggctgg

SEQ ID NO: 22486 - RNA, 20 nt, synthetic construct
  source 1..20: mol_type = other RNA
atccagaagtcactttttat

SEQ ID NO: 22487 - RNA, 20 nt, synthetic construct
  source 1..20: mol_type = other RNA
atccagacagctaatatgct

SEQ ID NO: 22488 - RNA, 20 nt, synthetic construct
  source 1..20: mol_type = other RNA
atccagataaattatagctc

SEQ ID NO: 22489 - RNA, 20 nt, synthetic construct
  source 1..20: mol_type = other RNA
atccagatggacaaattacc

SEQ ID NO: 22490 - RNA, 20 nt, synthetic construct
  source 1..20: mol_type = other RNA
atccagatgtagagaaacag

SEQ ID NO: 22491 - RNA, 20 nt, synthetic construct
  source 1..20: mol_type = other RNA
atccagattgatatctgagt

SEQ ID NO: 22492 - RNA, 20 nt, synthetic construct
  source 1..20: mol_type = other RNA
atccagcagtttcacttctt

SEQ ID NO: 22493 - RNA, 20 nt, synthetic construct
  source 1..20: mol_type = other RNA
atccagctaattttcattac

SEQ ID NO: 22494 - RNA, 20 nt, synthetic construct
  source 1..20: mol_type = other RNA
atccaggatcttactgtaag

SEQ ID NO: 22495 - RNA, 20 nt, synthetic construct
  source 1..20: mol_type = other RNA
atccaggatggcatgaaatg

SEQ ID NO: 22496 - RNA, 20 nt, synthetic construct
  source 1..20: mol_type = other RNA
atccaggcaaaagatgatga

SEQ ID NO: 22497 - RNA, 20 nt, synthetic construct
  source 1..20: mol_type = other RNA
atccaggggaatagaaagtt

SEQ ID NO: 22498 - RNA, 20 nt, synthetic construct
  source 1..20: mol_type = other RNA
atccaggtgtatgatcttat

SEQ ID NO: 22499 - RNA, 20 nt, synthetic construct
  source 1..20: mol_type = other RNA
atccagtaatcttgctaaac

SEQ ID NO: 22500 - RNA, 20 nt, synthetic construct
  source 1..20: mol_type = other RNA
atccagtctctacccagcac

SEQ ID NO: 22501 - RNA, 20 nt, synthetic construct
  source 1..20: mol_type = other RNA
atccagtctctgcaacattt

SEQ ID NO: 22502 - RNA, 20 nt, synthetic construct
  source 1..20: mol_type = other RNA
atccagtcttcaggtctctc

SEQ ID NO: 22503 - RNA, 20 nt, synthetic construct
  source 1..20: mol_type = other RNA
atccagtgacacctgagggg

SEQ ID NO: 22504 - RNA, 20 nt, synthetic construct
  source 1..20: mol_type = other RNA
atccagtggttttttgtttt

SEQ ID NO: 22505 - RNA, 20 nt, synthetic construct
  source 1..20: mol_type = other RNA
atccagtttaaagctttgtg

SEQ ID NO: 22506 - RNA, 20 nt, synthetic construct
  source 1..20: mol_type = other RNA
atccatgttgttgaatgtgg

SEQ ID NO: 22507 - RNA, 20 nt, synthetic construct
  source 1..20: mol_type = other RNA
atccattacatcaacatata

SEQ ID NO: 22508 - RNA, 20 nt, synthetic construct
  source 1..20: mol_type = other RNA
atccattactcgtggttata

SEQ ID NO: 22509 - RNA, 20 nt, synthetic construct
  source 1..20: mol_type = other RNA
atccattcatctctcgatgg

SEQ ID NO: 22510 - RNA, 20 nt, synthetic construct
  source 1..20: mol_type = other RNA
atccattgggtacataccga

SEQ ID NO: 22511 - RNA, 20 nt, synthetic construct
  source 1..20: mol_type = other RNA
atcccaaaaaggtttttatt

SEQ ID NO: 22512 - RNA, 20 nt, synthetic construct
  source 1..20: mol_type = other RNA
atcccaaagtgagcagaagg

SEQ ID NO: 22513 - RNA, 20 nt, synthetic construct
  source 1..20: mol_type = other RNA
atcccaaattggcatttaaa

SEQ ID NO: 22514 - RNA, 20 nt, synthetic construct
  source 1..20: mol_type = other RNA
atcccaagggttttggtatg

SEQ ID NO: 22515 - RNA, 20 nt, synthetic construct
  source 1..20: mol_type = other RNA
atcccaagtgcccattaaca

SEQ ID NO: 22516 - RNA, 20 nt, synthetic construct
  source 1..20: mol_type = other RNA
atcccaattacttccagtgt

SEQ ID NO: 22517 - RNA, 20 nt, synthetic construct
  source 1..20: mol_type = other RNA
atcccactagtggaagaatc

SEQ ID NO: 22518 - RNA, 20 nt, synthetic construct
  source 1..20: mol_type = other RNA
atcccacttgatccaggtgt

SEQ ID NO: 22519 - RNA, 20 nt, synthetic construct
  source 1..20: mol_type = other RNA
atcccagacagatatatgca

SEQ ID NO: 22520 - RNA, 20 nt, synthetic construct
  source 1..20: mol_type = other RNA
atcccagaggtactcaacga

SEQ ID NO: 22521 - RNA, 20 nt, synthetic construct
  source 1..20: mol_type = other RNA
atcccagatctaacaaacgc

SEQ ID NO: 22522 - RNA, 20 nt, synthetic construct
  source 1..20: mol_type = other RNA
atcccagatggggattgagg

SEQ ID NO: 22523 - RNA, 20 nt, synthetic construct
  source 1..20: mol_type = other RNA
atcccagctacataacttcc

SEQ ID NO: 22524 - RNA, 20 nt, synthetic construct
  source 1..20: mol_type = other RNA
atcccagtcctttgggaggt

SEQ ID NO: 22525 - RNA, 20 nt, synthetic construct
  source 1..20: mol_type = other RNA
atcccatataaggggaatca

SEQ ID NO: 22526 - RNA, 20 nt, synthetic construct
  source 1..20: mol_type = other RNA
atcccatatggaggcaatgt

SEQ ID NO: 22527 - RNA, 20 nt, synthetic construct
  source 1..20: mol_type = other RNA
atcccattactcggtatgta

SEQ ID NO: 22528 - RNA, 20 nt, synthetic construct
  source 1..20: mol_type = other RNA
atcccatttgtaacatgtta

SEQ ID NO: 22529 - RNA, 20 nt, synthetic construct
  source 1..20: mol_type = other RNA
atccccaaataacatgcata

SEQ ID NO: 22530 - RNA, 20 nt, synthetic construct
  source 1..20: mol_type = other RNA
atccccagaaagagagaggg

SEQ ID NO: 22531 - RNA, 20 nt, synthetic construct
  source 1..20: mol_type = other RNA
atccccatctgggatacttc

SEQ ID NO: 22532 - RNA, 20 nt, synthetic construct
  source 1..20: mol_type = other RNA
atccccattcaattgtcctg

SEQ ID NO: 22533 - RNA, 20 nt, synthetic construct
  source 1..20: mol_type = other RNA
atccccatttttctcgacac

SEQ ID NO: 22534 - RNA, 20 nt, synthetic construct
  source 1..20: mol_type = other RNA
atcccccagcccctggtgat

SEQ ID NO: 22535 - RNA, 20 nt, synthetic construct
  source 1..20: mol_type = other RNA
atccccccacccctgctctg

SEQ ID NO: 22536 - RNA, 20 nt, synthetic construct
  source 1..20: mol_type = other RNA
atccccgctgcgagaaaggc

SEQ ID NO: 22537 - RNA, 20 nt, synthetic construct
  source 1..20: mol_type = other RNA
atccccgctgtccatttcca

SEQ ID NO: 22538 - RNA, 20 nt, synthetic construct
  source 1..20: mol_type = other RNA
atcccctttacccctgagaa

SEQ ID NO: 22539 - RNA, 20 nt, synthetic construct
  source 1..20: mol_type = other RNA
atcccctttagtgttctgtg

SEQ ID NO: 22540 - RNA, 20 nt, synthetic construct
  source 1..20: mol_type = other RNA
atcccgcaccttgattttga

SEQ ID NO: 22541 - RNA, 20 nt, synthetic construct
  source 1..20: mol_type = other RNA
atcccggaacaggaaaagga

SEQ ID NO: 22542 - RNA, 20 nt, synthetic construct
  source 1..20: mol_type = other RNA
atccctacctaaaaagggag

SEQ ID NO: 22543 - RNA, 20 nt, synthetic construct
  source 1..20: mol_type = other RNA
atccctatgcaataactcaa

SEQ ID NO: 22544 - RNA, 20 nt, synthetic construct
  source 1..20: mol_type = other RNA
atccctcatatcagttatca

SEQ ID NO: 22545 - RNA, 20 nt, synthetic construct
  source 1..20: mol_type = other RNA
atccctccagtccagcacca

SEQ ID NO: 22546 - RNA, 20 nt, synthetic construct
  source 1..20: mol_type = other RNA
atccctcctctggccctcca

SEQ ID NO: 22547 - RNA, 20 nt, synthetic construct
  source 1..20: mol_type = other RNA
atccctctaaataggtattc

SEQ ID NO: 22548 - RNA, 20 nt, synthetic construct
  source 1..20: mol_type = other RNA
atccctgataatcacagacg

SEQ ID NO: 22549 - RNA, 20 nt, synthetic construct
  source 1..20: mol_type = other RNA
atccctgatatgtcgcatga

SEQ ID NO: 22550 - RNA, 20 nt, synthetic construct
  source 1..20: mol_type = other RNA
atccctgatcaagttgcttg

SEQ ID NO: 22551 - RNA, 20 nt, synthetic construct
  source 1..20: mol_type = other RNA
atccctgccgcgcgcgaagg

SEQ ID NO: 22552 - RNA, 20 nt, synthetic construct
  source 1..20: mol_type = other RNA
atccctggggtttccttacc

SEQ ID NO: 22553 - RNA, 20 nt, synthetic construct
  source 1..20: mol_type = other RNA
atcccttccccacctttcct

SEQ ID NO: 22554 - RNA, 20 nt, synthetic construct
  source 1..20: mol_type = other RNA
atccctttaaaatgatagca

SEQ ID NO: 22555 - RNA, 20 nt, synthetic construct
  source 1..20: mol_type = other RNA
atccctttcgctaatctcaa

SEQ ID NO: 22556 - RNA, 20 nt, synthetic construct
  source 1..20: mol_type = other RNA
atccgaaagaactgaaagca

SEQ ID NO: 22557 - RNA, 20 nt, synthetic construct
  source 1..20: mol_type = other RNA
atccgagacaagttctcctg

SEQ ID NO: 22558 - RNA, 20 nt, synthetic construct
  source 1..20: mol_type = other RNA
atccgataaagggtctggta

SEQ ID NO: 22559 - RNA, 20 nt, synthetic construct
  source 1..20: mol_type = other RNA
atccgccaccacgcctggct

SEQ ID NO: 22560 - RNA, 20 nt, synthetic construct
  source 1..20: mol_type = other RNA
atccggctttatgagacaca

SEQ ID NO: 22561 - RNA, 20 nt, synthetic construct
  source 1..20: mol_type = other RNA
atccgggaacatgacatgta

SEQ ID NO: 22562 - RNA, 20 nt, synthetic construct
  source 1..20: mol_type = other RNA
atccgggagggaggtagggg

SEQ ID NO: 22563 - RNA, 20 nt, synthetic construct
  source 1..20: mol_type = other RNA
atccggggagcttttgaaac

SEQ ID NO: 22564 - RNA, 20 nt, synthetic construct
  source 1..20: mol_type = other RNA
atccggtctcagtttttaat

SEQ ID NO: 22565 - RNA, 20 nt, synthetic construct
  source 1..20: mol_type = other RNA
atcctaaacacttagcatgt

SEQ ID NO: 22566 - RNA, 20 nt, synthetic construct
  source 1..20: mol_type = other RNA
atcctaagcatgagatacta

SEQ ID NO: 22567 - RNA, 20 nt, synthetic construct
  source 1..20: mol_type = other RNA
atcctaagccatctaattca

SEQ ID NO: 22568 - RNA, 20 nt, synthetic construct
  source 1..20: mol_type = other RNA
atcctaatacagtaaagccc

SEQ ID NO: 22569 - RNA, 20 nt, synthetic construct
  source 1..20: mol_type = other RNA
atcctaatgggcgtggagcg

SEQ ID NO: 22570 - RNA, 20 nt, synthetic construct
  source 1..20: mol_type = other RNA
atcctagccccaaatacctc

SEQ ID NO: 22571 - RNA, 20 nt, synthetic construct
  source 1..20: mol_type = other RNA
atcctatcagagcatgtccc

SEQ ID NO: 22572 - RNA, 20 nt, synthetic construct
  source 1..20: mol_type = other RNA
atcctatctaagcctactgc

SEQ ID NO: 22573 - RNA, 20 nt, synthetic construct
  source 1..20: mol_type = other RNA
atcctatgtggggaatgctc

SEQ ID NO: 22574 - RNA, 20 nt, synthetic construct
  source 1..20: mol_type = other RNA
atcctattttgttattaggg

SEQ ID NO: 22575 - RNA, 20 nt, synthetic construct
  source 1..20: mol_type = other RNA
atcctcaacaagagaggaca

SEQ ID NO: 22576 - RNA, 20 nt, synthetic construct
  source 1..20: mol_type = other RNA
atcctcacaacaggcctgag

SEQ ID NO: 22577 - RNA, 20 nt, synthetic construct
  source 1..20: mol_type = other RNA
atcctcacatcagttaccac

SEQ ID NO: 22578 - RNA, 20 nt, synthetic construct
  source 1..20: mol_type = other RNA
atcctcacatgtttggtcaa

SEQ ID NO: 22579 - RNA, 20 nt, synthetic construct
  source 1..20: mol_type = other RNA
atcctcagccccctccctac

SEQ ID NO: 22580 - RNA, 20 nt, synthetic construct
  source 1..20: mol_type = other RNA
atcctcagggtaggaaaaga

SEQ ID NO: 22581 - RNA, 20 nt, synthetic construct
  source 1..20: mol_type = other RNA
atcctccaatgtttttaatt

SEQ ID NO: 22582 - RNA, 20 nt, synthetic construct
  source 1..20: mol_type = other RNA
atcctccagccttaatctcc

SEQ ID NO: 22583 - RNA, 20 nt, synthetic construct
  source 1..20: mol_type = other RNA
atcctccgtagctgtcgctc

SEQ ID NO: 22584 - RNA, 20 nt, synthetic construct
  source 1..20: mol_type = other RNA
atcctcctgccttggccttc

SEQ ID NO: 22585 - RNA, 20 nt, synthetic construct
  source 1..20: mol_type = other RNA
atcctctatttttgtctggt

SEQ ID NO: 22586 - RNA, 20 nt, synthetic construct
  source 1..20: mol_type = other RNA
atcctctgtagataaacgtt

SEQ ID NO: 22587 - RNA, 20 nt, synthetic construct
  source 1..20: mol_type = other RNA
atcctcttctgaagaggctt

SEQ ID NO: 22588 - RNA, 20 nt, synthetic construct
  source 1..20: mol_type = other RNA
atcctgagacttaggcaaag

SEQ ID NO: 22589 - RNA, 20 nt, synthetic construct
  source 1..20: mol_type = other RNA
atcctgaggaagctaatcaa

SEQ ID NO: 22590 - RNA, 20 nt, synthetic construct
  source 1..20: mol_type = other RNA
atcctgatttaggccactct

SEQ ID NO: 22591 - RNA, 20 nt, synthetic construct
  source 1..20: mol_type = other RNA
atcctgctattttattagat

SEQ ID NO: 22592 - RNA, 20 nt, synthetic construct
  source 1..20: mol_type = other RNA
atcctgctgggctattgttt

SEQ ID NO: 22593 - RNA, 20 nt, synthetic construct
  source 1..20: mol_type = other RNA
atcctggaatagtagcttca

SEQ ID NO: 22594 - RNA, 20 nt, synthetic construct
  source 1..20: mol_type = other RNA
atcctggagggctcccagtg

SEQ ID NO: 22595 - RNA, 20 nt, synthetic construct
  source 1..20: mol_type = other RNA
atcctggattgctagtgtcc

SEQ ID NO: 22596 - RNA, 20 nt, synthetic construct
  source 1..20: mol_type = other RNA
atcctggatttgggaaggat

SEQ ID NO: 22597 - RNA, 20 nt, synthetic construct
  source 1..20: mol_type = other RNA
atcctgtaaacctggaatcc

SEQ ID NO: 22598 - RNA, 20 nt, synthetic construct
  source 1..20: mol_type = other RNA
atcctgtccaggcgcctgca

SEQ ID NO: 22599 - RNA, 20 nt, synthetic construct
  source 1..20: mol_type = other RNA
atcctgtctcagagtatata

SEQ ID NO: 22600 - RNA, 20 nt, synthetic construct
  source 1..20: mol_type = other RNA
atcctgtttctctacatctg

SEQ ID NO: 22601 - RNA, 20 nt, synthetic construct
  source 1..20: mol_type = other RNA
atcctgtttgagaagtcttt

SEQ ID NO: 22602 - RNA, 20 nt, synthetic construct
  source 1..20: mol_type = other RNA
atccttactaccaccactaa

SEQ ID NO: 22603 - RNA, 20 nt, synthetic construct
  source 1..20: mol_type = other RNA
atccttacttccagctcacg

SEQ ID NO: 22604 - RNA, 20 nt, synthetic construct
  source 1..20: mol_type = other RNA
atccttagattacaaaagaa

SEQ ID NO: 22605 - RNA, 20 nt, synthetic construct
  source 1..20: mol_type = other RNA
atccttcagtcagttctctg

SEQ ID NO: 22606 - RNA, 20 nt, synthetic construct
  source 1..20: mol_type = other RNA
atccttcccaaatccaggat

SEQ ID NO: 22607 - RNA, 20 nt, synthetic construct
  source 1..20: mol_type = other RNA
atccttccttcatgtcccct

SEQ ID NO: 22608 - RNA, 20 nt, synthetic construct
  source 1..20: mol_type = other RNA
atccttctaatcagtaactt

SEQ ID NO: 22609 - RNA, 20 nt, synthetic construct
  source 1..20: mol_type = other RNA
atccttctacatccccccac

SEQ ID NO: 22610 - RNA, 20 nt, synthetic construct
  source 1..20: mol_type = other RNA
atccttctcatagtcttcca

SEQ ID NO: 22611 - RNA, 20 nt, synthetic construct
  source 1..20: mol_type = other RNA
atccttctgccttgacctcc

SEQ ID NO: 22612 - RNA, 20 nt, synthetic construct
  source 1..20: mol_type = other RNA
atccttgcaccaactccaca

SEQ ID NO: 22613 - RNA, 20 nt, synthetic construct
  source 1..20: mol_type = other RNA
atccttgccaacagttactt

SEQ ID NO: 22614 - RNA, 20 nt, synthetic construct
  source 1..20: mol_type = other RNA
atccttgtaacttttatttc

SEQ ID NO: 22615 - RNA, 20 nt, synthetic construct
  source 1..20: mol_type = other RNA
atccttgtggtcttaagaga

SEQ ID NO: 22616 - RNA, 20 nt, synthetic construct
  source 1..20: mol_type = other RNA
atcctttaatttgggtttga

SEQ ID NO: 22617 - RNA, 20 nt, synthetic construct
  source 1..20: mol_type = other RNA
atcctttataccttttaatg

SEQ ID NO: 22618 - RNA, 20 nt, synthetic construct
  source 1..20: mol_type = other RNA
atcctttcaaggtatctccc

SEQ ID NO: 22619 - RNA, 20 nt, synthetic construct
  source 1..20: mol_type = other RNA
atcctttcccttctgctcgg

SEQ ID NO: 22620 - RNA, 20 nt, synthetic construct
  source 1..20: mol_type = other RNA
atcctttccttgtcctaaaa

SEQ ID NO: 22621 - RNA, 20 nt, synthetic construct
  source 1..20: mol_type = other RNA
atcctttgcacacaccaaat

SEQ ID NO: 22622 - RNA, 20 nt, synthetic construct
  source 1..20: mol_type = other RNA
atcctttgcgtctgtgatta

SEQ ID NO: 22623 - RNA, 20 nt, synthetic construct
  source 1..20: mol_type = other RNA
atcctttgcttcccacttcg

SEQ ID NO: 22624 - RNA, 20 nt, synthetic construct
  source 1..20: mol_type = other RNA
atcctttgtgcaggtctggg

SEQ ID NO: 22625 - RNA, 20 nt, synthetic construct
  source 1..20: mol_type = other RNA
atccttttatgtgcagtcta

SEQ ID NO: 22626 - RNA, 20 nt, synthetic construct
  source 1..20: mol_type = other RNA
atccttttcccaggagctag

SEQ ID NO: 22627 - RNA, 20 nt, synthetic construct
  source 1..20: mol_type = other RNA
atcgaatcctcacaacaggc

SEQ ID NO: 22628 - RNA, 20 nt, synthetic construct
  source 1..20: mol_type = other RNA
atcgagagatgaatggataa

SEQ ID NO: 22629 - RNA, 20 nt, synthetic construct
  source 1..20: mol_type = other RNA
atcgcaatccaaaatcctct

SEQ ID NO: 22630 - RNA, 20 nt, synthetic construct
  source 1..20: mol_type = other RNA
atcgcagggccattctgcta

SEQ ID NO: 22631 - RNA, 20 nt, synthetic construct
  source 1..20: mol_type = other RNA
atcgcattacgagttatgca

SEQ ID NO: 22632 - RNA, 20 nt, synthetic construct
  source 1..20: mol_type = other RNA
atcgcgcccagcccgtgtgt

SEQ ID NO: 22633 - RNA, 20 nt, synthetic construct
  source 1..20: mol_type = other RNA
atcggaaatataaaaagcct

SEQ ID NO: 22634 - RNA, 20 nt, synthetic construct
  source 1..20: mol_type = other RNA
atcggaacaggctcaatacc

SEQ ID NO: 22635 - RNA, 20 nt, synthetic construct
  source 1..20: mol_type = other RNA
atcggaactcctgtatgccg

SEQ ID NO: 22636 - RNA, 20 nt, synthetic construct
  source 1..20: mol_type = other RNA
atcggataaggaagagttta

SEQ ID NO: 22637 - RNA, 20 nt, synthetic construct
  source 1..20: mol_type = other RNA
atcggccgggcgtgggggct

SEQ ID NO: 22638 - RNA, 20 nt, synthetic construct
  source 1..20: mol_type = other RNA
atcgggagtaacagacctct

SEQ ID NO: 22639 - RNA, 20 nt, synthetic construct
  source 1..20: mol_type = other RNA
atcggggcctacagtggttc

SEQ ID NO: 22640 - RNA, 20 nt, synthetic construct
  source 1..20: mol_type = other RNA
atcggtctgtatttctgctt

SEQ ID NO: 22641 - RNA, 20 nt, synthetic construct
  source 1..20: mol_type = other RNA
atcgtaaaaagccatttatc

SEQ ID NO: 22642 - RNA, 20 nt, synthetic construct
  source 1..20: mol_type = other RNA
atcgtaaaacctcatctcta

SEQ ID NO: 22643 - RNA, 20 nt, synthetic construct
  source 1..20: mol_type = other RNA
atcgtcctcttcgggtgtca

SEQ ID NO: 22644 - RNA, 20 nt, synthetic construct
  source 1..20: mol_type = other RNA
atcgtgaagtctttattttt

SEQ ID NO: 22645 - RNA, 20 nt, synthetic construct
  source 1..20: mol_type = other RNA
atcgtgagactattatgagc

SEQ ID NO: 22646 - RNA, 20 nt, synthetic construct
  source 1..20: mol_type = other RNA
atcgtgatagtcttccaatt

SEQ ID NO: 22647 - RNA, 20 nt, synthetic construct
  source 1..20: mol_type = other RNA
atcgttagtattttcacata

SEQ ID NO: 22648 - RNA, 20 nt, synthetic construct
  source 1..20: mol_type = other RNA
atcgttatatcctcagggta

SEQ ID NO: 22649 - RNA, 20 nt, synthetic construct
  source 1..20: mol_type = other RNA
atcgttcacactcgcactcc

SEQ ID NO: 22650 - RNA, 20 nt, synthetic construct
  source 1..20: mol_type = other RNA
atcgttgtgaaatataatgt

SEQ ID NO: 22651 - RNA, 20 nt, synthetic construct
  source 1..20: mol_type = other RNA
atcgtttcaatattaagagt

SEQ ID NO: 22652 - RNA, 20 nt, synthetic construct
  source 1..20: mol_type = other RNA
atctaaaatggaagacttta

SEQ ID NO: 22653 - RNA, 20 nt, synthetic construct
  source 1..20: mol_type = other RNA
atctaaacgtttggtgactg

SEQ ID NO: 22654 - RNA, 20 nt, synthetic construct
  source 1..20: mol_type = other RNA
atctaaagccaatcttccca

SEQ ID NO: 22655 - RNA, 20 nt, synthetic construct
  source 1..20: mol_type = other RNA
atctaaagccaggctttccc

SEQ ID NO: 22656 - RNA, 20 nt, synthetic construct
  source 1..20: mol_type = other RNA
atctaaatggtgtgaagttg

SEQ ID NO: 22657 - RNA, 20 nt, synthetic construct
  source 1..20: mol_type = other RNA
atctaaatgtagatcaagta

SEQ ID NO: 22658 - RNA, 20 nt, synthetic construct
  source 1..20: mol_type = other RNA
atctaaattaagcttcgaca

SEQ ID NO: 22659 - RNA, 20 nt, synthetic construct
  source 1..20: mol_type = other RNA
atctaaattttaagtgcaca

SEQ ID NO: 22660 - RNA, 20 nt, synthetic construct
  source 1..20: mol_type = other RNA
atctaacaaaagatacacaa

SEQ ID NO: 22661 - RNA, 20 nt, synthetic construct
  source 1..20: mol_type = other RNA
atctaacaaacgcattgtga

SEQ ID NO: 22662 - RNA, 20 nt, synthetic construct
  source 1..20: mol_type = other RNA
atctaacagaaatacaatgt

SEQ ID NO: 22663 - RNA, 20 nt, synthetic construct
  source 1..20: mol_type = other RNA
atctaaccctcaatccccat

SEQ ID NO: 22664 - RNA, 20 nt, synthetic construct
  source 1..20: mol_type = other RNA
atctaaccctcctcctctac

SEQ ID NO: 22665 - RNA, 20 nt, synthetic construct
  source 1..20: mol_type = other RNA
atctaagcctacctcccttc

SEQ ID NO: 22666 - RNA, 20 nt, synthetic construct
  source 1..20: mol_type = other RNA
atctaagcctactgctctgt

SEQ ID NO: 22667 - RNA, 20 nt, synthetic construct
  source 1..20: mol_type = other RNA
atctaaggattatggctaga

SEQ ID NO: 22668 - RNA, 20 nt, synthetic construct
  source 1..20: mol_type = other RNA
atctaagtctcaacctactt

SEQ ID NO: 22669 - RNA, 20 nt, synthetic construct
  source 1..20: mol_type = other RNA
atctaataaaaagcctctct

SEQ ID NO: 22670 - RNA, 20 nt, synthetic construct
  source 1..20: mol_type = other RNA
atctaataaaatagcaggat

SEQ ID NO: 22671 - RNA, 20 nt, synthetic construct
  source 1..20: mol_type = other RNA
atctaattaacatccagaat

SEQ ID NO: 22672 - RNA, 20 nt, synthetic construct
  source 1..20: mol_type = other RNA
atctaattcgaaaatgggcc

SEQ ID NO: 22673 - RNA, 20 nt, synthetic construct
  source 1..20: mol_type = other RNA
atctaatttcccatttgatt

SEQ ID NO: 22674 - RNA, 20 nt, synthetic construct
  source 1..20: mol_type = other RNA
atctacaaaacagggttatt

SEQ ID NO: 22675 - RNA, 20 nt, synthetic construct
  source 1..20: mol_type = other RNA
atctacaaatcacatatcta

SEQ ID NO: 22676 - RNA, 20 nt, synthetic construct
  source 1..20: mol_type = other RNA
atctacagaggattttggat

SEQ ID NO: 22677 - RNA, 20 nt, synthetic construct
  source 1..20: mol_type = other RNA
atctacagattcaatgcaat

SEQ ID NO: 22678 - RNA, 20 nt, synthetic construct
  source 1..20: mol_type = other RNA
atctacaggtcggaaggaat

SEQ ID NO: 22679 - RNA, 20 nt, synthetic construct
  source 1..20: mol_type = other RNA
atctacatgtacgccaattt

SEQ ID NO: 22680 - RNA, 20 nt, synthetic construct
  source 1..20: mol_type = other RNA
atctaccaaaaaactacgag

SEQ ID NO: 22681 - RNA, 20 nt, synthetic construct
  source 1..20: mol_type = other RNA
atctaccaaacattgaaggc

SEQ ID NO: 22682 - RNA, 20 nt, synthetic construct
  source 1..20: mol_type = other RNA
atctactcttttgtttttgg

SEQ ID NO: 22683 - RNA, 20 nt, synthetic construct
  source 1..20: mol_type = other RNA
atctactttctaatcctttg

SEQ ID NO: 22684 - RNA, 20 nt, synthetic construct
  source 1..20: mol_type = other RNA
atctagaaagataaatccaa

SEQ ID NO: 22685 - RNA, 20 nt, synthetic construct
  source 1..20: mol_type = other RNA
atctagcacagaaccatgta

SEQ ID NO: 22686 - RNA, 20 nt, synthetic construct
  source 1..20: mol_type = other RNA
atctaggaaacactgctcag

SEQ ID NO: 22687 - RNA, 20 nt, synthetic construct
  source 1..20: mol_type = other RNA
atctaggaggtctaagagat

SEQ ID NO: 22688 - RNA, 20 nt, synthetic construct
  source 1..20: mol_type = other RNA
atctaggagtacagtgcata

SEQ ID NO: 22689 - RNA, 20 nt, synthetic construct
  source 1..20: mol_type = other RNA
atctaggcatataaactgga

SEQ ID NO: 22690 - RNA, 20 nt, synthetic construct
  source 1..20: mol_type = other RNA
atctaggcatataataagca

SEQ ID NO: 22691 - RNA, 20 nt, synthetic construct
  source 1..20: mol_type = other RNA
atctaggcgaaatatctccc

SEQ ID NO: 22692 - RNA, 20 nt, synthetic construct
  source 1..20: mol_type = other RNA
atctaggttatctgttttct

SEQ ID NO: 22693 - RNA, 20 nt, synthetic construct
  source 1..20: mol_type = other RNA
atctagtgaagtcaatttca

SEQ ID NO: 22694 - RNA, 20 nt, synthetic construct
  source 1..20: mol_type = other RNA
atctagttaccactagcaaa

SEQ ID NO: 22695 - RNA, 20 nt, synthetic construct
  source 1..20: mol_type = other RNA
atctataaggtaatgacaat

SEQ ID NO: 22696 - RNA, 20 nt, synthetic construct
  source 1..20: mol_type = other RNA
atctatcaatctcacacctg

SEQ ID NO: 22697 - RNA, 20 nt, synthetic construct
  source 1..20: mol_type = other RNA
atctatcagggctgaaaaac

SEQ ID NO: 22698 - RNA, 20 nt, synthetic construct
  source 1..20: mol_type = other RNA
atctatgaagtaattgtttg

SEQ ID NO: 22699 - RNA, 20 nt, synthetic construct
  source 1..20: mol_type = other RNA
atctatgaatttgcctattc

SEQ ID NO: 22700 - RNA, 20 nt, synthetic construct
  source 1..20: mol_type = other RNA
atctatgcatactgcagcac

SEQ ID NO: 22701 - RNA, 20 nt, synthetic construct
  source 1..20: mol_type = other RNA
atctatgtcccctggggcct

SEQ ID NO: 22702 - RNA, 20 nt, synthetic construct
  source 1..20: mol_type = other RNA
atctattaacagaagggtat

SEQ ID NO: 22703 - RNA, 20 nt, synthetic construct
  source 1..20: mol_type = other RNA
atctatttccccattagagt

SEQ ID NO: 22704 - RNA, 20 nt, synthetic construct
  source 1..20: mol_type = other RNA
atctcaaacagcctaattgt

SEQ ID NO: 22705 - RNA, 20 nt, synthetic construct
  source 1..20: mol_type = other RNA
atctcaagaaaacaagaata

SEQ ID NO: 22706 - RNA, 20 nt, synthetic construct
  source 1..20: mol_type = other RNA
atctcaatcagggccttccc

SEQ ID NO: 22707 - RNA, 20 nt, synthetic construct
  source 1..20: mol_type = other RNA
atctcaatttttgtattgac

SEQ ID NO: 22708 - RNA, 20 nt, synthetic construct
  source 1..20: mol_type = other RNA
atctcacacctgggtataca

SEQ ID NO: 22709 - RNA, 20 nt, synthetic construct
  source 1..20: mol_type = other RNA
atctcacgtcaccgcaacct

SEQ ID NO: 22710 - RNA, 20 nt, synthetic construct
  source 1..20: mol_type = other RNA
atctcactcacctagctgtt

SEQ ID NO: 22711 - RNA, 20 nt, synthetic construct
  source 1..20: mol_type = other RNA
atctcagcacagagccgaaa

SEQ ID NO: 22712 - RNA, 20 nt, synthetic construct
  source 1..20: mol_type = other RNA
atctcagctcattacagtct

SEQ ID NO: 22713 - RNA, 20 nt, synthetic construct
  source 1..20: mol_type = other RNA
atctcagtcataatttgtgt

SEQ ID NO: 22714 - RNA, 20 nt, synthetic construct
  source 1..20: mol_type = other RNA
atctcatccacaatgagaca

SEQ ID NO: 22715 - RNA, 20 nt, synthetic construct
  source 1..20: mol_type = other RNA
atctcatgcttaggatccca

SEQ ID NO: 22716 - RNA, 20 nt, synthetic construct
  source 1..20: mol_type = other RNA
atctcatggaagttatttaa

SEQ ID NO: 22717 - RNA, 20 nt, synthetic construct
  source 1..20: mol_type = other RNA
atctcattaaaaatcaaccc

SEQ ID NO: 22718 - RNA, 20 nt, synthetic construct
  source 1..20: mol_type = other RNA
atctcattttgaaaaacaga

SEQ ID NO: 22719 - RNA, 20 nt, synthetic construct
  source 1..20: mol_type = other RNA
atctccacatttctacacaa

SEQ ID NO: 22720 - RNA, 20 nt, synthetic construct
  source 1..20: mol_type = other RNA
atctccataagtccctaaca

SEQ ID NO: 22721 - RNA, 20 nt, synthetic construct
  source 1..20: mol_type = other RNA
atctcccataccacctgtca

SEQ ID NO: 22722 - RNA, 20 nt, synthetic construct
  source 1..20: mol_type = other RNA
atctcccatcactagaatgt

SEQ ID NO: 22723 - RNA, 20 nt, synthetic construct
  source 1..20: mol_type = other RNA
atctccccaaagatattagc

SEQ ID NO: 22724 - RNA, 20 nt, synthetic construct
  source 1..20: mol_type = other RNA
atctccctcacagtccactc

SEQ ID NO: 22725 - RNA, 20 nt, synthetic construct
  source 1..20: mol_type = other RNA
atctccctgtgcgtgaatct

SEQ ID NO: 22726 - RNA, 20 nt, synthetic construct
  source 1..20: mol_type = other RNA
atctcctgagtagcagggac

SEQ ID NO: 22727 - RNA, 20 nt, synthetic construct
  source 1..20: mol_type = other RNA
atctccttaatccagtctat

SEQ ID NO: 22728 - RNA, 20 nt, synthetic construct
  source 1..20: mol_type = other RNA
atctcctttccttccttgct

SEQ ID NO: 22729 - RNA, 20 nt, synthetic construct
  source 1..20: mol_type = other RNA
atctccttttaagagtgaag

SEQ ID NO: 22730 - RNA, 20 nt, synthetic construct
  source 1..20: mol_type = other RNA
atctcggtcattctggagtg

SEQ ID NO: 22731 - RNA, 20 nt, synthetic construct
  source 1..20: mol_type = other RNA
atctctacagggaaccgtaa

SEQ ID NO: 22732 - RNA, 20 nt, synthetic construct
  source 1..20: mol_type = other RNA
atctctagaacttatgcatc

SEQ ID NO: 22733 - RNA, 20 nt, synthetic construct
  source 1..20: mol_type = other RNA
atctctaggcttaaaattct

SEQ ID NO: 22734 - RNA, 20 nt, synthetic construct
  source 1..20: mol_type = other RNA
atctctagttttccagtata

SEQ ID NO: 22735 - RNA, 20 nt, synthetic construct
  source 1..20: mol_type = other RNA
atctctatgcagaaatctac

SEQ ID NO: 22736 - RNA, 20 nt, synthetic construct
  source 1..20: mol_type = other RNA
atctctcagatctgagtttg

SEQ ID NO: 22737 - RNA, 20 nt, synthetic construct
  source 1..20: mol_type = other RNA
atctctccaacagaagaagt

SEQ ID NO: 22738 - RNA, 20 nt, synthetic construct
  source 1..20: mol_type = other RNA
atctctcccttcctgttctt

SEQ ID NO: 22739 - RNA, 20 nt, synthetic construct
  source 1..20: mol_type = other RNA
atctctcgatggacatttag

SEQ ID NO: 22740 - RNA, 20 nt, synthetic construct
  source 1..20: mol_type = other RNA
atctctctaaaaacatccat

SEQ ID NO: 22741 - RNA, 20 nt, synthetic construct
  source 1..20: mol_type = other RNA
atctctctatccaccactcc

SEQ ID NO: 22742 - RNA, 20 nt, synthetic construct
  source 1..20: mol_type = other RNA
atctctctcaagcaatctga

SEQ ID NO: 22743 - RNA, 20 nt, synthetic construct
  source 1..20: mol_type = other RNA
atctctctgcctcaaaatca

SEQ ID NO: 22744 - RNA, 20 nt, synthetic construct
  source 1..20: mol_type = other RNA
atctctcttgaccttagttt

SEQ ID NO: 22745 - RNA, 20 nt, synthetic construct
  source 1..20: mol_type = other RNA
atctctgacattggttattc

SEQ ID NO: 22746 - RNA, 20 nt, synthetic construct
  source 1..20: mol_type = other RNA
atctctgacttcattcttga

SEQ ID NO: 22747 - RNA, 20 nt, synthetic construct
  source 1..20: mol_type = other RNA
atctctgcaaaacatttaaa

SEQ ID NO: 22748 - RNA, 20 nt, synthetic construct
  source 1..20: mol_type = other RNA
atctctgccctcattgaagc

SEQ ID NO: 22749 - RNA, 20 nt, synthetic construct
  source 1..20: mol_type = other RNA
atctctgggctcactgcaac

SEQ ID NO: 22750 - RNA, 20 nt, synthetic construct
  source 1..20: mol_type = other RNA
atctctggggttagggccta

SEQ ID NO: 22751 - RNA, 20 nt, synthetic construct
  source 1..20: mol_type = other RNA
atctctggtattctgaactt

SEQ ID NO: 22752 - RNA, 20 nt, synthetic construct
  source 1..20: mol_type = other RNA
atctcttacacctgtttaaa

SEQ ID NO: 22753 - RNA, 20 nt, synthetic construct
  source 1..20: mol_type = other RNA
atctcttagacctcctagat

SEQ ID NO: 22754 - RNA, 20 nt, synthetic construct
  source 1..20: mol_type = other RNA
atctcttcctcctctggaca

SEQ ID NO: 22755 - RNA, 20 nt, synthetic construct
  source 1..20: mol_type = other RNA
atctcttttcctttaacgta

SEQ ID NO: 22756 - RNA, 20 nt, synthetic construct
  source 1..20: mol_type = other RNA
atctgaaacgaccttgctca

SEQ ID NO: 22757 - RNA, 20 nt, synthetic construct
  source 1..20: mol_type = other RNA
atctgaaattgacttcacta

SEQ ID NO: 22758 - RNA, 20 nt, synthetic construct
  source 1..20: mol_type = other RNA
atctgaacattttagctggg

SEQ ID NO: 22759 - RNA, 20 nt, synthetic construct
  source 1..20: mol_type = other RNA
atctgaacgtctttaaattt

SEQ ID NO: 22760 - RNA, 20 nt, synthetic construct
  source 1..20: mol_type = other RNA
atctgaactttcgaagtggg

SEQ ID NO: 22761 - RNA, 20 nt, synthetic construct
  source 1..20: mol_type = other RNA
atctgaatcaataagaatga

SEQ ID NO: 22762 - RNA, 20 nt, synthetic construct
  source 1..20: mol_type = other RNA
atctgaattcaagttacaat

SEQ ID NO: 22763 - RNA, 20 nt, synthetic construct
  source 1..20: mol_type = other RNA
atctgacaatttgccaaaat

SEQ ID NO: 22764 - RNA, 20 nt, synthetic construct
  source 1..20: mol_type = other RNA
atctgacatatgttttgctt

SEQ ID NO: 22765 - RNA, 20 nt, synthetic construct
  source 1..20: mol_type = other RNA
atctgacctaagcttgggta

SEQ ID NO: 22766 - RNA, 20 nt, synthetic construct
  source 1..20: mol_type = other RNA
atctgagaagactaagcaga

SEQ ID NO: 22767 - RNA, 20 nt, synthetic construct
  source 1..20: mol_type = other RNA
atctgagacatcacaatgcg

SEQ ID NO: 22768 - RNA, 20 nt, synthetic construct
  source 1..20: mol_type = other RNA
atctgagagatagaaagcac

SEQ ID NO: 22769 - RNA, 20 nt, synthetic construct
  source 1..20: mol_type = other RNA
atctgagtaaagggtaagaa

SEQ ID NO: 22770 - RNA, 20 nt, synthetic construct
  source 1..20: mol_type = other RNA
atctgagtgttgtgtgcacc

SEQ ID NO: 22771 - RNA, 20 nt, synthetic construct
  source 1..20: mol_type = other RNA
atctgagtttgctctgcaaa

SEQ ID NO: 22772 - RNA, 20 nt, synthetic construct
  source 1..20: mol_type = other RNA
atctgataagcccaacctga

SEQ ID NO: 22773 - RNA, 20 nt, synthetic construct
  source 1..20: mol_type = other RNA
atctgatacacttctatcca

SEQ ID NO: 22774 - RNA, 20 nt, synthetic construct
  source 1..20: mol_type = other RNA
atctgatgtgtatgttacac

SEQ ID NO: 22775 - RNA, 20 nt, synthetic construct
  source 1..20: mol_type = other RNA
atctgattcagtggttggaa

SEQ ID NO: 22776 - RNA, 20 nt, synthetic construct
  source 1..20: mol_type = other RNA
atctgatttgtttagtagct

SEQ ID NO: 22777 - RNA, 20 nt, synthetic construct
  source 1..20: mol_type = other RNA
atctgattttaatctgtcct

SEQ ID NO: 22778 - RNA, 20 nt, synthetic construct
  source 1..20: mol_type = other RNA
atctgattttgtgtcttctg

SEQ ID NO: 22779 - RNA, 20 nt, synthetic construct
  source 1..20: mol_type = other RNA
atctgatttttagtgactgg

SEQ ID NO: 22780 - RNA, 20 nt, synthetic construct
  source 1..20: mol_type = other RNA
atctgcaactatcaaaacac

SEQ ID NO: 22781 - RNA, 20 nt, synthetic construct
  source 1..20: mol_type = other RNA
atctgcagtgtccatctccc

SEQ ID NO: 22782 - RNA, 20 nt, synthetic construct
  source 1..20: mol_type = other RNA
atctgcatccaaaagggaaa

SEQ ID NO: 22783 - RNA, 20 nt, synthetic construct
  source 1..20: mol_type = other RNA
atctgccaggacaattgaat

SEQ ID NO: 22784 - RNA, 20 nt, synthetic construct
  source 1..20: mol_type = other RNA
atctgcctcccgggtccagg

SEQ ID NO: 22785 - RNA, 20 nt, synthetic construct
  source 1..20: mol_type = other RNA
atctgctgtaagctggtaat

SEQ ID NO: 22786 - RNA, 20 nt, synthetic construct
  source 1..20: mol_type = other RNA
atctgctgtcggttttctag

SEQ ID NO: 22787 - RNA, 20 nt, synthetic construct
  source 1..20: mol_type = other RNA
atctgcttgcagacaataat

SEQ ID NO: 22788 - RNA, 20 nt, synthetic construct
  source 1..20: mol_type = other RNA
atctggaaggaaacactata

SEQ ID NO: 22789 - RNA, 20 nt, synthetic construct
  source 1..20: mol_type = other RNA
atctggaatgcatcgtttca

SEQ ID NO: 22790 - RNA, 20 nt, synthetic construct
  source 1..20: mol_type = other RNA
atctggaccagttactctct

SEQ ID NO: 22791 - RNA, 20 nt, synthetic construct
  source 1..20: mol_type = other RNA
atctggactgaaaagataca

SEQ ID NO: 22792 - RNA, 20 nt, synthetic construct
  source 1..20: mol_type = other RNA
atctggatataacaaatcaa

SEQ ID NO: 22793 - RNA, 20 nt, synthetic construct
  source 1..20: mol_type = other RNA
atctggatcctgtctcagag

SEQ ID NO: 22794 - RNA, 20 nt, synthetic construct
  source 1..20: mol_type = other RNA
atctggattatagtggtaag

SEQ ID NO: 22795 - RNA, 20 nt, synthetic construct
  source 1..20: mol_type = other RNA
atctggatttttgtgtagag

SEQ ID NO: 22796 - RNA, 20 nt, synthetic construct
  source 1..20: mol_type = other RNA
atctggcagcaggggctaag

SEQ ID NO: 22797 - RNA, 20 nt, synthetic construct
  source 1..20: mol_type = other RNA
atctggcctgcaccatttat

SEQ ID NO: 22798 - RNA, 20 nt, synthetic construct
  source 1..20: mol_type = other RNA
atctggctgcagggcttctg

SEQ ID NO: 22799 - RNA, 20 nt, synthetic construct
  source 1..20: mol_type = other RNA
atctgggaaaaaataagaaa

SEQ ID NO: 22800 - RNA, 20 nt, synthetic construct
  source 1..20: mol_type = other RNA
atctgggaacagcccctagc

SEQ ID NO: 22801 - RNA, 20 nt, synthetic construct
  source 1..20: mol_type = other RNA
atctgggataatgctatcat

SEQ ID NO: 22802 - RNA, 20 nt, synthetic construct
  source 1..20: mol_type = other RNA
atctgggatacttctaactt

SEQ ID NO: 22803 - RNA, 20 nt, synthetic construct
  source 1..20: mol_type = other RNA
atctggtcacaaacacaaaa

SEQ ID NO: 22804 - RNA, 20 nt, synthetic construct
  source 1..20: mol_type = other RNA
atctggtcctgagctttcct

SEQ ID NO: 22805 - RNA, 20 nt, synthetic construct
  source 1..20: mol_type = other RNA
atctggtctatctcattata

SEQ ID NO: 22806 - RNA, 20 nt, synthetic construct
  source 1..20: mol_type = other RNA
atctggtgctggcagccttc

SEQ ID NO: 22807 - RNA, 20 nt, synthetic construct
  source 1..20: mol_type = other RNA
atctggtgttgcttgctcta

SEQ ID NO: 22808 - RNA, 20 nt, synthetic construct
  source 1..20: mol_type = other RNA
atctgtaagtcatcaaagga

SEQ ID NO: 22809 - RNA, 20 nt, synthetic construct
  source 1..20: mol_type = other RNA
atctgtagattgttttaggt

SEQ ID NO: 22810 - RNA, 20 nt, synthetic construct
  source 1..20: mol_type = other RNA
atctgtatatgaaaagcttc

SEQ ID NO: 22811 - RNA, 20 nt, synthetic construct
  source 1..20: mol_type = other RNA
atctgtatgagaagactgga

SEQ ID NO: 22812 - RNA, 20 nt, synthetic construct
  source 1..20: mol_type = other RNA
atctgtcaaaaagagaacac

SEQ ID NO: 22813 - RNA, 20 nt, synthetic construct
  source 1..20: mol_type = other RNA
atctgtcactttcctattca

SEQ ID NO: 22814 - RNA, 20 nt, synthetic construct
  source 1..20: mol_type = other RNA
atctgtcagcagttcagcct

SEQ ID NO: 22815 - RNA, 20 nt, synthetic construct
  source 1..20: mol_type = other RNA
atctgtcatgtttgaatttt

SEQ ID NO: 22816 - RNA, 20 nt, synthetic construct
  source 1..20: mol_type = other RNA
atctgtcctgaatactattc

SEQ ID NO: 22817 - RNA, 20 nt, synthetic construct
  source 1..20: mol_type = other RNA
atctgtctgggataatgagt

SEQ ID NO: 22818 - RNA, 20 nt, synthetic construct
  source 1..20: mol_type = other RNA
atctgtcttgtgcatccttt

SEQ ID NO: 22819 - RNA, 20 nt, synthetic construct
  source 1..20: mol_type = other RNA
atctgtctttggcccatatc

SEQ ID NO: 22820 - RNA, 20 nt, synthetic construct
  source 1..20: mol_type = other RNA
atctgtgatccctgatatgt

SEQ ID NO: 22821 - RNA, 20 nt, synthetic construct
  source 1..20: mol_type = other RNA
atctgtggactttaggctgt

SEQ ID NO: 22822 - RNA, 20 nt, synthetic construct
  source 1..20: mol_type = other RNA
atctgtgggttaaaagttag

SEQ ID NO: 22823 - RNA, 20 nt, synthetic construct
  source 1..20: mol_type = other RNA
atctgttaaaagatacgaaa

SEQ ID NO: 22824 - RNA, 20 nt, synthetic construct
  source 1..20: mol_type = other RNA
atctgttaatgggcacttgg

SEQ ID NO: 22825 - RNA, 20 nt, synthetic construct
  source 1..20: mol_type = other RNA
atctgttatagtgtgaaaaa

SEQ ID NO: 22826 - RNA, 20 nt, synthetic construct
  source 1..20: mol_type = other RNA
atctgttcctgggttctccc

SEQ ID NO: 22827 - RNA, 20 nt, synthetic construct
  source 1..20: mol_type = other RNA
atctgttgcagtccccggtc

SEQ ID NO: 22828 - RNA, 20 nt, synthetic construct
  source 1..20: mol_type = other RNA
atctgttggtgcttagctgc

SEQ ID NO: 22829 - RNA, 20 nt, synthetic construct
  source 1..20: mol_type = other RNA
atctgtttcctaatctaaca

SEQ ID NO: 22830 - RNA, 20 nt, synthetic construct
  source 1..20: mol_type = other RNA
atctgttttcttactgattt

SEQ ID NO: 22831 - RNA, 20 nt, synthetic construct
  source 1..20: mol_type = other RNA
atctgtttttcaaaatgaga

SEQ ID NO: 22832 - RNA, 20 nt, synthetic construct
  source 1..20: mol_type = other RNA
atcttaaaataccagaggtt

SEQ ID NO: 22833 - RNA, 20 nt, synthetic construct
  source 1..20: mol_type = other RNA
atcttaaagatgccatttat

SEQ ID NO: 22834 - RNA, 20 nt, synthetic construct
  source 1..20: mol_type = other RNA
atcttaacatttctcatgta

SEQ ID NO: 22835 - RNA, 20 nt, synthetic construct
  source 1..20: mol_type = other RNA
atcttaagaaccatacagtg

SEQ ID NO: 22836 - RNA, 20 nt, synthetic construct
  source 1..20: mol_type = other RNA
atcttaataacctcaaagtg

SEQ ID NO: 22837 - RNA, 20 nt, synthetic construct
  source 1..20: mol_type = other RNA
atcttacccccatcacactg

SEQ ID NO: 22838 - RNA, 20 nt, synthetic construct
  source 1..20: mol_type = other RNA
atcttaccctgttgaccagg

SEQ ID NO: 22839 - RNA, 20 nt, synthetic construct
  source 1..20: mol_type = other RNA
atcttactggtgttaggcaa

SEQ ID NO: 22840 - RNA, 20 nt, synthetic construct
  source 1..20: mol_type = other RNA
atcttactgtaagttcctgg

SEQ ID NO: 22841 - RNA, 20 nt, synthetic construct
  source 1..20: mol_type = other RNA
atcttagccgggaggagcca

SEQ ID NO: 22842 - RNA, 20 nt, synthetic construct
  source 1..20: mol_type = other RNA
atcttagctcttcccttaac

SEQ ID NO: 22843 - RNA, 20 nt, synthetic construct
  source 1..20: mol_type = other RNA
atcttaggccataaatcaag

SEQ ID NO: 22844 - RNA, 20 nt, synthetic construct
  source 1..20: mol_type = other RNA
atcttatacttggcaaaaaa

SEQ ID NO: 22845 - RNA, 20 nt, synthetic construct
  source 1..20: mol_type = other RNA
atcttatattaattctgagg

SEQ ID NO: 22846 - RNA, 20 nt, synthetic construct
  source 1..20: mol_type = other RNA
atcttatctgctgtcggttt

SEQ ID NO: 22847 - RNA, 20 nt, synthetic construct
  source 1..20: mol_type = other RNA
atcttatggaatagttgatt

SEQ ID NO: 22848 - RNA, 20 nt, synthetic construct
  source 1..20: mol_type = other RNA
atcttattaatgtgttgtct

SEQ ID NO: 22849 - RNA, 20 nt, synthetic construct
  source 1..20: mol_type = other RNA
atcttattccccagggaaac

SEQ ID NO: 22850 - RNA, 20 nt, synthetic construct
  source 1..20: mol_type = other RNA
atcttcaaaatctgatgtgt

SEQ ID NO: 22851 - RNA, 20 nt, synthetic construct
  source 1..20: mol_type = other RNA
atcttcaagatttcataggc

SEQ ID NO: 22852 - RNA, 20 nt, synthetic construct
  source 1..20: mol_type = other RNA
atcttcacaaacaaatcctt

SEQ ID NO: 22853 - RNA, 20 nt, synthetic construct
  source 1..20: mol_type = other RNA
atcttcacacttagttcaag

SEQ ID NO: 22854 - RNA, 20 nt, synthetic construct
  source 1..20: mol_type = other RNA
atcttcacgtggcgctccct

SEQ ID NO: 22855 - RNA, 20 nt, synthetic construct
  source 1..20: mol_type = other RNA
atcttcactgactacacata

SEQ ID NO: 22856 - RNA, 20 nt, synthetic construct
  source 1..20: mol_type = other RNA
atcttcatttctaagccatg

SEQ ID NO: 22857 - RNA, 20 nt, synthetic construct
  source 1..20: mol_type = other RNA
atcttccagaaggagaaaac

SEQ ID NO: 22858 - RNA, 20 nt, synthetic construct
  source 1..20: mol_type = other RNA
atcttccatacgaaagcctt

SEQ ID NO: 22859 - RNA, 20 nt, synthetic construct
  source 1..20: mol_type = other RNA
atcttcccaatcctttgtgc

SEQ ID NO: 22860 - RNA, 20 nt, synthetic construct
  source 1..20: mol_type = other RNA
atcttcccatgaacatggtt

SEQ ID NO: 22861 - RNA, 20 nt, synthetic construct
  source 1..20: mol_type = other RNA
atcttccctaaagagaatct

SEQ ID NO: 22862 - RNA, 20 nt, synthetic construct
  source 1..20: mol_type = other RNA
atcttctaccttttgttatt

SEQ ID NO: 22863 - RNA, 20 nt, synthetic construct
  source 1..20: mol_type = other RNA
atcttctctctctgcttcac

SEQ ID NO: 22864 - RNA, 20 nt, synthetic construct
  source 1..20: mol_type = other RNA
atcttcttagtgttcccttc

SEQ ID NO: 22865 - RNA, 20 nt, synthetic construct
  source 1..20: mol_type = other RNA
atcttcttatttgttactga

SEQ ID NO: 22866 - RNA, 20 nt, synthetic construct
  source 1..20: mol_type = other RNA
atcttcttttacttgcttgg

SEQ ID NO: 22867 - RNA, 20 nt, synthetic construct
  source 1..20: mol_type = other RNA
atcttgaaaggggccaggtg

SEQ ID NO: 22868 - RNA, 20 nt, synthetic construct
  source 1..20: mol_type = other RNA
atcttgaactaagtgtgaag

SEQ ID NO: 22869 - RNA, 20 nt, synthetic construct
  source 1..20: mol_type = other RNA
atcttgaagaaaccaagagc

SEQ ID NO: 22870 - RNA, 20 nt, synthetic construct
  source 1..20: mol_type = other RNA
atcttgaagatggcaaacag

SEQ ID NO: 22871 - RNA, 20 nt, synthetic construct
  source 1..20: mol_type = other RNA
atcttgacttcacttccaag

SEQ ID NO: 22872 - RNA, 20 nt, synthetic construct
  source 1..20: mol_type = other RNA
atcttgagacggaagactca

SEQ ID NO: 22873 - RNA, 20 nt, synthetic construct
  source 1..20: mol_type = other RNA
atcttgcaaaacaatagccc

SEQ ID NO: 22874 - RNA, 20 nt, synthetic construct
  source 1..20: mol_type = other RNA
atcttgcaaaacggaaactt

SEQ ID NO: 22875 - RNA, 20 nt, synthetic construct
  source 1..20: mol_type = other RNA
atcttgcataactcgtaatg

SEQ ID NO: 22876 - RNA, 20 nt, synthetic construct
  source 1..20: mol_type = other RNA
atcttgctaaacatgtatac

SEQ ID NO: 22877 - RNA, 20 nt, synthetic construct
  source 1..20: mol_type = other RNA
atcttggaaatgatacctca

SEQ ID NO: 22878 - RNA, 20 nt, synthetic construct
  source 1..20: mol_type = other RNA
atcttggccgaatgtggtgg

SEQ ID NO: 22879 - RNA, 20 nt, synthetic construct
  source 1..20: mol_type = other RNA
atcttgggaatactttccca

SEQ ID NO: 22880 - RNA, 20 nt, synthetic construct
  source 1..20: mol_type = other RNA
atcttgtgaattgataaaag

SEQ ID NO: 22881 - RNA, 20 nt, synthetic construct
  source 1..20: mol_type = other RNA
atcttgtgtatcttttgtta

SEQ ID NO: 22882 - RNA, 20 nt, synthetic construct
  source 1..20: mol_type = other RNA
atctttacttcccttctcga

SEQ ID NO: 22883 - RNA, 20 nt, synthetic construct
  source 1..20: mol_type = other RNA
atctttactttcagctcaaa

SEQ ID NO: 22884 - RNA, 20 nt, synthetic construct
  source 1..20: mol_type = other RNA
atctttaggtgttttttcct

SEQ ID NO: 22885 - RNA, 20 nt, synthetic construct
  source 1..20: mol_type = other RNA
atctttagtgttgcttggtg

SEQ ID NO: 22886 - RNA, 20 nt, synthetic construct
  source 1..20: mol_type = other RNA
atctttcaaggggccttttg

SEQ ID NO: 22887 - RNA, 20 nt, synthetic construct
  source 1..20: mol_type = other RNA
atctttcctgatcacaccct

SEQ ID NO: 22888 - RNA, 20 nt, synthetic construct
  source 1..20: mol_type = other RNA
atctttcctgtgatttatgt

SEQ ID NO: 22889 - RNA, 20 nt, synthetic construct
  source 1..20: mol_type = other RNA
atctttctagattcatatgc

SEQ ID NO: 22890 - RNA, 20 nt, synthetic construct
  source 1..20: mol_type = other RNA
atctttctgaactcaaaagt

SEQ ID NO: 22891 - RNA, 20 nt, synthetic construct
  source 1..20: mol_type = other RNA
atctttgaataaagggtcag

SEQ ID NO: 22892 - RNA, 20 nt, synthetic construct
  source 1..20: mol_type = other RNA
atctttgcttataacaagaa

SEQ ID NO: 22893 - RNA, 20 nt, synthetic construct
  source 1..20: mol_type = other RNA
atctttggaaaaatgtccgt

SEQ ID NO: 22894 - RNA, 20 nt, synthetic construct
  source 1..20: mol_type = other RNA
atctttggatatccccattt

SEQ ID NO: 22895 - RNA, 20 nt, synthetic construct
  source 1..20: mol_type = other RNA
atctttggcaaacttagaat

SEQ ID NO: 22896 - RNA, 20 nt, synthetic construct
  source 1..20: mol_type = other RNA
atctttgggaaaatctctga

SEQ ID NO: 22897 - RNA, 20 nt, synthetic construct
  source 1..20: mol_type = other RNA
atctttggggagataccttg

SEQ ID NO: 22898 - RNA, 20 nt, synthetic construct
  source 1..20: mol_type = other RNA
atctttggtgaaggttcatg

SEQ ID NO: 22899 - RNA, 20 nt, synthetic construct
  source 1..20: mol_type = other RNA
atctttggtgctgataaatg

SEQ ID NO: 22900 - RNA, 20 nt, synthetic construct
  source 1..20: mol_type = other RNA
atctttgtacagtaattgta

SEQ ID NO: 22901 - RNA, 20 nt, synthetic construct
  source 1..20: mol_type = other RNA
atctttgttacagcagctct

SEQ ID NO: 22902 - RNA, 20 nt, synthetic construct
  source 1..20: mol_type = other RNA
atcttttaacagatggtcct

SEQ ID NO: 22903 - RNA, 20 nt, synthetic construct
  source 1..20: mol_type = other RNA
atcttttcaaaaacccaact

SEQ ID NO: 22904 - RNA, 20 nt, synthetic construct
  source 1..20: mol_type = other RNA
atcttttcagtccagatatt

SEQ ID NO: 22905 - RNA, 20 nt, synthetic construct
  source 1..20: mol_type = other RNA
atcttttcatgttgaccatt

SEQ ID NO: 22906 - RNA, 20 nt, synthetic construct
  source 1..20: mol_type = other RNA
atcttttctgacaatttcag

SEQ ID NO: 22907 - RNA, 20 nt, synthetic construct
  source 1..20: mol_type = other RNA
atcttttgacgcgcaacaat

SEQ ID NO: 22908 - RNA, 20 nt, synthetic construct
  source 1..20: mol_type = other RNA
atcttttgagggtatcatat

SEQ ID NO: 22909 - RNA, 20 nt, synthetic construct
  source 1..20: mol_type = other RNA
atcttttgcctggatgaatg

SEQ ID NO: 22910 - RNA, 20 nt, synthetic construct
  source 1..20: mol_type = other RNA
atctttttcagcagcagaga

SEQ ID NO: 22911 - RNA, 20 nt, synthetic construct
  source 1..20: mol_type = other RNA
atctttttgtgtatatggta

SEQ ID NO: 22912 - RNA, 20 nt, synthetic construct
  source 1..20: mol_type = other RNA
atgaaaaagtactggaaatg

SEQ ID NO: 22913 - RNA, 20 nt, synthetic construct
  source 1..20: mol_type = other RNA
atgaaaaattcactcctcat

SEQ ID NO: 22914 - RNA, 20 nt, synthetic construct
  source 1..20: mol_type = other RNA
atgaaaacacaacataccaa

SEQ ID NO: 22915 - RNA, 20 nt, synthetic construct
  source 1..20: mol_type = other RNA
atgaaaacagctaggtgagt

SEQ ID NO: 22916 - RNA, 20 nt, synthetic construct
  source 1..20: mol_type = other RNA
atgaaaagagcacaccaaga

SEQ ID NO: 22917 - RNA, 20 nt, synthetic construct
  source 1..20: mol_type = other RNA
atgaaaagcccaatctacag

SEQ ID NO: 22918 - RNA, 20 nt, synthetic construct
  source 1..20: mol_type = other RNA
atgaaaagcctcaaacgaac

SEQ ID NO: 22919 - RNA, 20 nt, synthetic construct
  source 1..20: mol_type = other RNA
atgaaaagcttcccccctct

SEQ ID NO: 22920 - RNA, 20 nt, synthetic construct
  source 1..20: mol_type = other RNA
atgaaaatagtaactttctg

SEQ ID NO: 22921 - RNA, 20 nt, synthetic construct
  source 1..20: mol_type = other RNA
atgaaaatgttccctcttca

SEQ ID NO: 22922 - RNA, 20 nt, synthetic construct
  source 1..20: mol_type = other RNA
atgaaaattagctggatgtg

SEQ ID NO: 22923 - RNA, 20 nt, synthetic construct
  source 1..20: mol_type = other RNA
atgaaaattgaattataggc

SEQ ID NO: 22924 - RNA, 20 nt, synthetic construct
  source 1..20: mol_type = other RNA
atgaaaattggcgtacatgt

SEQ ID NO: 22925 - RNA, 20 nt, synthetic construct
  source 1..20: mol_type = other RNA
atgaaaatttttgtctggaa

SEQ ID NO: 22926 - RNA, 20 nt, synthetic construct
  source 1..20: mol_type = other RNA
atgaaacacttgtgtaacta

SEQ ID NO: 22927 - RNA, 20 nt, synthetic construct
  source 1..20: mol_type = other RNA
atgaaactaaatgtgagcat

SEQ ID NO: 22928 - RNA, 20 nt, synthetic construct
  source 1..20: mol_type = other RNA
atgaaacttatttccagggg

SEQ ID NO: 22929 - RNA, 20 nt, synthetic construct
  source 1..20: mol_type = other RNA
atgaaagctcccaatgcttg

SEQ ID NO: 22930 - RNA, 20 nt, synthetic construct
  source 1..20: mol_type = other RNA
atgaaaggcgtcggggctgc

SEQ ID NO: 22931 - RNA, 20 nt, synthetic construct
  source 1..20: mol_type = other RNA
atgaaagtcagctaattttc

SEQ ID NO: 22932 - RNA, 20 nt, synthetic construct
  source 1..20: mol_type = other RNA
atgaaagtggagaattacta

SEQ ID NO: 22933 - RNA, 20 nt, synthetic construct
  source 1..20: mol_type = other RNA
atgaaatactcaaactatgc

SEQ ID NO: 22934 - RNA, 20 nt, synthetic construct
  source 1..20: mol_type = other RNA
atgaaatcacacaatcttga

SEQ ID NO: 22935 - RNA, 20 nt, synthetic construct
  source 1..20: mol_type = other RNA
atgaaatcccctttagtgtt

SEQ ID NO: 22936 - RNA, 20 nt, synthetic construct
  source 1..20: mol_type = other RNA
atgaaatctaaatgtagatc

SEQ ID NO: 22937 - RNA, 20 nt, synthetic construct
  source 1..20: mol_type = other RNA
atgaaatcttgaagatggca

SEQ ID NO: 22938 - RNA, 20 nt, synthetic construct
  source 1..20: mol_type = other RNA
atgaaatggcccttaacttc

SEQ ID NO: 22939 - RNA, 20 nt, synthetic construct
  source 1..20: mol_type = other RNA
atgaaatgggtttaaaagag

SEQ ID NO: 22940 - RNA, 20 nt, synthetic construct
  source 1..20: mol_type = other RNA
atgaaatgtggtttttggtt

SEQ ID NO: 22941 - RNA, 20 nt, synthetic construct
  source 1..20: mol_type = other RNA
atgaaattcttgggtgaata

SEQ ID NO: 22942 - RNA, 20 nt, synthetic construct
  source 1..20: mol_type = other RNA
atgaaattgaccattccacg

SEQ ID NO: 22943 - RNA, 20 nt, synthetic construct
  source 1..20: mol_type = other RNA
atgaaatttgaggccctatt

SEQ ID NO: 22944 - RNA, 20 nt, synthetic construct
  source 1..20: mol_type = other RNA
atgaacaaaatgtggtatat

SEQ ID NO: 22945 - RNA, 20 nt, synthetic construct
  source 1..20: mol_type = other RNA
atgaacaaaggcaggagcag

SEQ ID NO: 22946 - RNA, 20 nt, synthetic construct
  source 1..20: mol_type = other RNA
atgaacaagttacaaacata

SEQ ID NO: 22947 - RNA, 20 nt, synthetic construct
  source 1..20: mol_type = other RNA
atgaacaatccttctaatca

SEQ ID NO: 22948 - RNA, 20 nt, synthetic construct
  source 1..20: mol_type = other RNA
atgaacaattttctctcatg

SEQ ID NO: 22949 - RNA, 20 nt, synthetic construct
  source 1..20: mol_type = other RNA
atgaacaggttcttcatcag

SEQ ID NO: 22950 - RNA, 20 nt, synthetic construct
  source 1..20: mol_type = other RNA
atgaacatggtttgatccca

SEQ ID NO: 22951 - RNA, 20 nt, synthetic construct
  source 1..20: mol_type = other RNA
atgaacattttgagttattg

SEQ ID NO: 22952 - RNA, 20 nt, synthetic construct
  source 1..20: mol_type = other RNA
atgaaccaaacttggtttat

SEQ ID NO: 22953 - RNA, 20 nt, synthetic construct
  source 1..20: mol_type = other RNA
atgaaccacactgacaggac

SEQ ID NO: 22954 - RNA, 20 nt, synthetic construct
  source 1..20: mol_type = other RNA
atgaaccattgtaaaccata

SEQ ID NO: 22955 - RNA, 20 nt, synthetic construct
  source 1..20: mol_type = other RNA
atgaacccaccaggaggcgg

SEQ ID NO: 22956 - RNA, 20 nt, synthetic construct
  source 1..20: mol_type = other RNA
atgaacctgcatggtgtaaa

SEQ ID NO: 22957 - RNA, 20 nt, synthetic construct
  source 1..20: mol_type = other RNA
atgaacctgctttctactag

SEQ ID NO: 22958 - RNA, 20 nt, synthetic construct
  source 1..20: mol_type = other RNA
atgaaccttcaccaaagatt

SEQ ID NO: 22959 - RNA, 20 nt, synthetic construct
  source 1..20: mol_type = other RNA
atgaacgagaacaaaacaag

SEQ ID NO: 22960 - RNA, 20 nt, synthetic construct
  source 1..20: mol_type = other RNA
atgaacgctaaattaaaggc

SEQ ID NO: 22961 - RNA, 20 nt, synthetic construct
  source 1..20: mol_type = other RNA
atgaactacacagacatgaa

SEQ ID NO: 22962 - RNA, 20 nt, synthetic construct
  source 1..20: mol_type = other RNA
atgaactactcaaagaaaat

SEQ ID NO: 22963 - RNA, 20 nt, synthetic construct
  source 1..20: mol_type = other RNA
atgaactcccagaactcgaa

SEQ ID NO: 22964 - RNA, 20 nt, synthetic construct
  source 1..20: mol_type = other RNA
atgaactcctatagttaagt

SEQ ID NO: 22965 - RNA, 20 nt, synthetic construct
  source 1..20: mol_type = other RNA
atgaagaaaacactccagaa

SEQ ID NO: 22966 - RNA, 20 nt, synthetic construct
  source 1..20: mol_type = other RNA
atgaagaaaatccaagaaga

SEQ ID NO: 22967 - RNA, 20 nt, synthetic construct
  source 1..20: mol_type = other RNA
atgaagaacctgttcatttg

SEQ ID NO: 22968 - RNA, 20 nt, synthetic construct
  source 1..20: mol_type = other RNA
atgaagatggcctccctcac

SEQ ID NO: 22969 - RNA, 20 nt, synthetic construct
  source 1..20: mol_type = other RNA
atgaagattagaaaattagc

SEQ ID NO: 22970 - RNA, 20 nt, synthetic construct
  source 1..20: mol_type = other RNA
atgaagcaggccttcgaggc

SEQ ID NO: 22971 - RNA, 20 nt, synthetic construct
  source 1..20: mol_type = other RNA
atgaagcagggaaatggagg

SEQ ID NO: 22972 - RNA, 20 nt, synthetic construct
  source 1..20: mol_type = other RNA
atgaagcattaatgcaacct

SEQ ID NO: 22973 - RNA, 20 nt, synthetic construct
  source 1..20: mol_type = other RNA
atgaagccctctaagtcagc

SEQ ID NO: 22974 - RNA, 20 nt, synthetic construct
  source 1..20: mol_type = other RNA
atgaagcttttctcctaagt

SEQ ID NO: 22975 - RNA, 20 nt, synthetic construct
  source 1..20: mol_type = other RNA
atgaaggaaaaaacgggtta

SEQ ID NO: 22976 - RNA, 20 nt, synthetic construct
  source 1..20: mol_type = other RNA
atgaaggaaggattggaatg

SEQ ID NO: 22977 - RNA, 20 nt, synthetic construct
  source 1..20: mol_type = other RNA
atgaagggttttctgtagaa

SEQ ID NO: 22978 - RNA, 20 nt, synthetic construct
  source 1..20: mol_type = other RNA
atgaagtatagaaaggagac

SEQ ID NO: 22979 - RNA, 20 nt, synthetic construct
  source 1..20: mol_type = other RNA
atgaagtattgatttgacca

SEQ ID NO: 22980 - RNA, 20 nt, synthetic construct
  source 1..20: mol_type = other RNA
atgaagtcagagattttccc

SEQ ID NO: 22981 - RNA, 20 nt, synthetic construct
  source 1..20: mol_type = other RNA
atgaagtcctcaatcatgtc

SEQ ID NO: 22982 - RNA, 20 nt, synthetic construct
  source 1..20: mol_type = other RNA
atgaataaaattctgatagc

SEQ ID NO: 22983 - RNA, 20 nt, synthetic construct
  source 1..20: mol_type = other RNA
atgaataaaccacgcagttt

SEQ ID NO: 22984 - RNA, 20 nt, synthetic construct
  source 1..20: mol_type = other RNA
atgaataaccaatgtcagag

SEQ ID NO: 22985 - RNA, 20 nt, synthetic construct
  source 1..20: mol_type = other RNA
atgaatacaaaggtgttaag

SEQ ID NO: 22986 - RNA, 20 nt, synthetic construct
  source 1..20: mol_type = other RNA
atgaatacctatttagaggg

SEQ ID NO: 22987 - RNA, 20 nt, synthetic construct
  source 1..20: mol_type = other RNA
atgaatagaaaatccttact

SEQ ID NO: 22988 - RNA, 20 nt, synthetic construct
  source 1..20: mol_type = other RNA
atgaataggtgtgtgttcct

SEQ ID NO: 22989 - RNA, 20 nt, synthetic construct
  source 1..20: mol_type = other RNA
atgaatatactggaaaacta

SEQ ID NO: 22990 - RNA, 20 nt, synthetic construct
  source 1..20: mol_type = other RNA
atgaatatgtactacctata

SEQ ID NO: 22991 - RNA, 20 nt, synthetic construct
  source 1..20: mol_type = other RNA
atgaatattcgttccagcag

SEQ ID NO: 22992 - RNA, 20 nt, synthetic construct
  source 1..20: mol_type = other RNA
atgaatctgcaactatcaaa

SEQ ID NO: 22993 - RNA, 20 nt, synthetic construct
  source 1..20: mol_type = other RNA
atgaatgaacaaaatgtggt

SEQ ID NO: 22994 - RNA, 20 nt, synthetic construct
  source 1..20: mol_type = other RNA
atgaatgaatgttgagtttt

SEQ ID NO: 22995 - RNA, 20 nt, synthetic construct
  source 1..20: mol_type = other RNA
atgaatgagcaaggtcgttt

SEQ ID NO: 22996 - RNA, 20 nt, synthetic construct
  source 1..20: mol_type = other RNA
atgaatgatgccatcacatt

SEQ ID NO: 22997 - RNA, 20 nt, synthetic construct
  source 1..20: mol_type = other RNA
atgaatgcacgtgaagctac

SEQ ID NO: 22998 - RNA, 20 nt, synthetic construct
  source 1..20: mol_type = other RNA
atgaatgcagtggcttccta

SEQ ID NO: 22999 - RNA, 20 nt, synthetic construct
  source 1..20: mol_type = other RNA
atgaatggaaaattcttggt

SEQ ID NO: 23000 - RNA, 20 nt, synthetic construct
  source 1..20: mol_type = other RNA
atgaatggaaatgtaaattc

SEQ ID NO: 23001 - RNA, 20 nt, synthetic construct
  source 1..20: mol_type = other RNA
atgaatggataaggaaaata

SEQ ID NO: 23002 - RNA, 20 nt, synthetic construct
  source 1..20: mol_type = other RNA
atgaattacaaatgaaagtc

SEQ ID NO: 23003 - RNA, 20 nt, synthetic construct
  source 1..20: mol_type = other RNA
atgaattagcaatgcgaatc

SEQ ID NO: 23004 - RNA, 20 nt, synthetic construct
  source 1..20: mol_type = other RNA
atgaattccagtttatctat

SEQ ID NO: 23005 - RNA, 20 nt, synthetic construct
  source 1..20: mol_type = other RNA
atgaatttgcctattctggg

SEQ ID NO: 23006 - RNA, 20 nt, synthetic construct
  source 1..20: mol_type = other RNA
atgacaaataaaagcttatg

SEQ ID NO: 23007 - RNA, 20 nt, synthetic construct
  source 1..20: mol_type = other RNA
atgacaagaatctttggcaa

SEQ ID NO: 23008 - RNA, 20 nt, synthetic construct
  source 1..20: mol_type = other RNA
atgacaagactacctaaaac

SEQ ID NO: 23009 - RNA, 20 nt, synthetic construct
  source 1..20: mol_type = other RNA
atgacaagtaaatgcaatgc

SEQ ID NO: 23010 - RNA, 20 nt, synthetic construct
  source 1..20: mol_type = other RNA
atgacaataataactacaca

SEQ ID NO: 23011 - RNA, 20 nt, synthetic construct
  source 1..20: mol_type = other RNA
atgacacaacttactactaa

SEQ ID NO: 23012 - RNA, 20 nt, synthetic construct
  source 1..20: mol_type = other RNA
atgacaccaaaactacaggc

SEQ ID NO: 23013 - RNA, 20 nt, synthetic construct
  source 1..20: mol_type = other RNA
atgacagaaaatatctacaa

SEQ ID NO: 23014 - RNA, 20 nt, synthetic construct
  source 1..20: mol_type = other RNA
atgacagagttccacctcca

SEQ ID NO: 23015 - RNA, 20 nt, synthetic construct
  source 1..20: mol_type = other RNA
atgacagatcccaaaaaggt

SEQ ID NO: 23016 - RNA, 20 nt, synthetic construct
  source 1..20: mol_type = other RNA
atgacaggtgagtggactgt

SEQ ID NO: 23017 - RNA, 20 nt, synthetic construct
  source 1..20: mol_type = other RNA
atgacagttactctaaaaga

SEQ ID NO: 23018 - RNA, 20 nt, synthetic construct
  source 1..20: mol_type = other RNA
atgacatggttttcctacta

SEQ ID NO: 23019 - RNA, 20 nt, synthetic construct
  source 1..20: mol_type = other RNA
atgacatgtgttttatttag

SEQ ID NO: 23020 - RNA, 20 nt, synthetic construct
  source 1..20: mol_type = other RNA
atgacatttgcttttcctgg

SEQ ID NO: 23021 - RNA, 20 nt, synthetic construct
  source 1..20: mol_type = other RNA
atgaccctgctatgcatact

SEQ ID NO: 23022 - RNA, 20 nt, synthetic construct
  source 1..20: mol_type = other RNA
atgaccgagatacttaagtt

SEQ ID NO: 23023 - RNA, 20 nt, synthetic construct
  source 1..20: mol_type = other RNA
atgacctaaaatcttattcc

SEQ ID NO: 23024 - RNA, 20 nt, synthetic construct
  source 1..20: mol_type = other RNA
atgacctatctattaacaga

SEQ ID NO: 23025 - RNA, 20 nt, synthetic construct
  source 1..20: mol_type = other RNA
atgacctcctcccacttaca

SEQ ID NO: 23026 - RNA, 20 nt, synthetic construct
  source 1..20: mol_type = other RNA
atgacctgctttcttggggc

SEQ ID NO: 23027 - RNA, 20 nt, synthetic construct
  source 1..20: mol_type = other RNA
atgacctggaaattattcaa

SEQ ID NO: 23028 - RNA, 20 nt, synthetic construct
  source 1..20: mol_type = other RNA
atgaccttgacaataaatgg

SEQ ID NO: 23029 - RNA, 20 nt, synthetic construct
  source 1..20: mol_type = other RNA
atgacgaaagtgaagcccag

SEQ ID NO: 23030 - RNA, 20 nt, synthetic construct
  source 1..20: mol_type = other RNA
atgactaatttgaggcatta

SEQ ID NO: 23031 - RNA, 20 nt, synthetic construct
  source 1..20: mol_type = other RNA
atgactaggctcctgagaac

SEQ ID NO: 23032 - RNA, 20 nt, synthetic construct
  source 1..20: mol_type = other RNA
atgactatgaaaagcctcaa

SEQ ID NO: 23033 - RNA, 20 nt, synthetic construct
  source 1..20: mol_type = other RNA
atgactgagatacttaagtt

SEQ ID NO: 23034 - RNA, 20 nt, synthetic construct
  source 1..20: mol_type = other RNA
atgactggccatccttccca

SEQ ID NO: 23035 - RNA, 20 nt, synthetic construct
  source 1..20: mol_type = other RNA
atgactggtgtccttctgag

SEQ ID NO: 23036 - RNA, 20 nt, synthetic construct
  source 1..20: mol_type = other RNA
atgactgtaagctgaactct

SEQ ID NO: 23037 - RNA, 20 nt, synthetic construct
  source 1..20: mol_type = other RNA
atgactgtcctgaattctaa

SEQ ID NO: 23038 - RNA, 20 nt, synthetic construct
  source 1..20: mol_type = other RNA
atgactgttgcctctgtgct

SEQ ID NO: 23039 - RNA, 20 nt, synthetic construct
  source 1..20: mol_type = other RNA
atgacttacagatatcaccc

SEQ ID NO: 23040 - RNA, 20 nt, synthetic construct
  source 1..20: mol_type = other RNA
atgacttcactggagaattc

SEQ ID NO: 23041 - RNA, 20 nt, synthetic construct
  source 1..20: mol_type = other RNA
atgacttttatcaattcaca

SEQ ID NO: 23042 - RNA, 20 nt, synthetic construct
  source 1..20: mol_type = other RNA
atgacttttttgcccactct

SEQ ID NO: 23043 - RNA, 20 nt, synthetic construct
  source 1..20: mol_type = other RNA
atgagaaacatacatgttca

SEQ ID NO: 23044 - RNA, 20 nt, synthetic construct
  source 1..20: mol_type = other RNA
atgagaaacctaagaaaggt

SEQ ID NO: 23045 - RNA, 20 nt, synthetic construct
  source 1..20: mol_type = other RNA
atgagaaatacttggacagg

SEQ ID NO: 23046 - RNA, 20 nt, synthetic construct
  source 1..20: mol_type = other RNA
atgagaaatgtctggtttgc

SEQ ID NO: 23047 - RNA, 20 nt, synthetic construct
  source 1..20: mol_type = other RNA
atgagaaatgttaagattca

SEQ ID NO: 23048 - RNA, 20 nt, synthetic construct
  source 1..20: mol_type = other RNA
atgagaagactggaaaagtg

SEQ ID NO: 23049 - RNA, 20 nt, synthetic construct
  source 1..20: mol_type = other RNA
atgagaaggattagtgttaa

SEQ ID NO: 23050 - RNA, 20 nt, synthetic construct
  source 1..20: mol_type = other RNA
atgagaattcattgttgtgt

SEQ ID NO: 23051 - RNA, 20 nt, synthetic construct
  source 1..20: mol_type = other RNA
atgagaatttcagaaagaga

SEQ ID NO: 23052 - RNA, 20 nt, synthetic construct
  source 1..20: mol_type = other RNA
atgagacacacgagtattca

SEQ ID NO: 23053 - RNA, 20 nt, synthetic construct
  source 1..20: mol_type = other RNA
atgagacacctacaatatta

SEQ ID NO: 23054 - RNA, 20 nt, synthetic construct
  source 1..20: mol_type = other RNA
atgagacatttgagggtgct

SEQ ID NO: 23055 - RNA, 20 nt, synthetic construct
  source 1..20: mol_type = other RNA
atgagaccaaatgcataaaa

SEQ ID NO: 23056 - RNA, 20 nt, synthetic construct
  source 1..20: mol_type = other RNA
atgagaccccatctctacca

SEQ ID NO: 23057 - RNA, 20 nt, synthetic construct
  source 1..20: mol_type = other RNA
atgagactcttaatattgaa

SEQ ID NO: 23058 - RNA, 20 nt, synthetic construct
  source 1..20: mol_type = other RNA
atgagacttggagtttgaga

SEQ ID NO: 23059 - RNA, 20 nt, synthetic construct
  source 1..20: mol_type = other RNA
atgagagaaaattgttcatg

SEQ ID NO: 23060 - RNA, 20 nt, synthetic construct
  source 1..20: mol_type = other RNA
atgagagctaagggaagttt

SEQ ID NO: 23061 - RNA, 20 nt, synthetic construct
  source 1..20: mol_type = other RNA
atgagagctgtgccgaggca

SEQ ID NO: 23062 - RNA, 20 nt, synthetic construct
  source 1..20: mol_type = other RNA
atgagagtggcctaaatcag

SEQ ID NO: 23063 - RNA, 20 nt, synthetic construct
  source 1..20: mol_type = other RNA
atgagataaactagattacc

SEQ ID NO: 23064 - RNA, 20 nt, synthetic construct
  source 1..20: mol_type = other RNA
atgagatactacgcctagct

SEQ ID NO: 23065 - RNA, 20 nt, synthetic construct
  source 1..20: mol_type = other RNA
atgagatagaccagatgcgt

SEQ ID NO: 23066 - RNA, 20 nt, synthetic construct
  source 1..20: mol_type = other RNA
atgagattaatgtaggtgtc

SEQ ID NO: 23067 - RNA, 20 nt, synthetic construct
  source 1..20: mol_type = other RNA
atgagattacatagcaagga

SEQ ID NO: 23068 - RNA, 20 nt, synthetic construct
  source 1..20: mol_type = other RNA
atgagcaaggtcgtttcaga

SEQ ID NO: 23069 - RNA, 20 nt, synthetic construct
  source 1..20: mol_type = other RNA
atgagcagttgtatgccaaa

SEQ ID NO: 23070 - RNA, 20 nt, synthetic construct
  source 1..20: mol_type = other RNA
atgagcattccccacatagg

SEQ ID NO: 23071 - RNA, 20 nt, synthetic construct
  source 1..20: mol_type = other RNA
atgagccacagggcccagcc

SEQ ID NO: 23072 - RNA, 20 nt, synthetic construct
  source 1..20: mol_type = other RNA
atgagccactagtcagtata

SEQ ID NO: 23073 - RNA, 20 nt, synthetic construct
  source 1..20: mol_type = other RNA
atgagccactgcgggcccag

SEQ ID NO: 23074 - RNA, 20 nt, synthetic construct
  source 1..20: mol_type = other RNA
atgagccaggcatggtggtg

SEQ ID NO: 23075 - RNA, 20 nt, synthetic construct
  source 1..20: mol_type = other RNA
atgagcccaggagttgcatc

SEQ ID NO: 23076 - RNA, 20 nt, synthetic construct
  source 1..20: mol_type = other RNA
atgagctactgcatgctagg

SEQ ID NO: 23077 - RNA, 20 nt, synthetic construct
  source 1..20: mol_type = other RNA
atgaggaaagcaggttgcat

SEQ ID NO: 23078 - RNA, 20 nt, synthetic construct
  source 1..20: mol_type = other RNA
atgaggaagaggaaggttca

SEQ ID NO: 23079 - RNA, 20 nt, synthetic construct
  source 1..20: mol_type = other RNA
atgaggagtgaatttttcat

SEQ ID NO: 23080 - RNA, 20 nt, synthetic construct
  source 1..20: mol_type = other RNA
atgaggcatattattgtaac

SEQ ID NO: 23081 - RNA, 20 nt, synthetic construct
  source 1..20: mol_type = other RNA
atgaggcctctccccttgac

SEQ ID NO: 23082 - RNA, 20 nt, synthetic construct
  source 1..20: mol_type = other RNA
atgaggcttttattggtaat

SEQ ID NO: 23083 - RNA, 20 nt, synthetic construct
  source 1..20: mol_type = other RNA
atgagggatgaggaagagga

SEQ ID NO: 23084 - RNA, 20 nt, synthetic construct
  source 1..20: mol_type = other RNA
atgagggcagagataactgg

SEQ ID NO: 23085 - RNA, 20 nt, synthetic construct
  source 1..20: mol_type = other RNA
atgaggggctgagccttcag

SEQ ID NO: 23086 - RNA, 20 nt, synthetic construct
  source 1..20: mol_type = other RNA
atgagggtaaaatagtcaag

SEQ ID NO: 23087 - RNA, 20 nt, synthetic construct
  source 1..20: mol_type = other RNA
atgaggtatcatttccaaga

SEQ ID NO: 23088 - RNA, 20 nt, synthetic construct
  source 1..20: mol_type = other RNA
atgaggtcacccaagccaca

SEQ ID NO: 23089 - RNA, 20 nt, synthetic construct
  source 1..20: mol_type = other RNA
atgaggtctcagccttttct

SEQ ID NO: 23090 - RNA, 20 nt, synthetic construct
  source 1..20: mol_type = other RNA
atgaggttattcaaaacaaa

SEQ ID NO: 23091 - RNA, 20 nt, synthetic construct
  source 1..20: mol_type = other RNA
atgaggttgcttttacttgg

SEQ ID NO: 23092 - RNA, 20 nt, synthetic construct
  source 1..20: mol_type = other RNA
atgaggttttacgatgttgg

SEQ ID NO: 23093 - RNA, 20 nt, synthetic construct
  source 1..20: mol_type = other RNA
atgagtaaaaagaaatctgc

SEQ ID NO: 23094 - RNA, 20 nt, synthetic construct
  source 1..20: mol_type = other RNA
atgagtaacatgtggaacat

SEQ ID NO: 23095 - RNA, 20 nt, synthetic construct
  source 1..20: mol_type = other RNA
atgagtagtacttctgagtg

SEQ ID NO: 23096 - RNA, 20 nt, synthetic construct
  source 1..20: mol_type = other RNA
atgagtatctggtgttgctt

SEQ ID NO: 23097 - RNA, 20 nt, synthetic construct
  source 1..20: mol_type = other RNA
atgagtccagctttctaatt

SEQ ID NO: 23098 - RNA, 20 nt, synthetic construct
  source 1..20: mol_type = other RNA
atgagtcctgaaaattcctt

SEQ ID NO: 23099 - RNA, 20 nt, synthetic construct
  source 1..20: mol_type = other RNA
atgagtcgccatacctggtc

SEQ ID NO: 23100 - RNA, 20 nt, synthetic construct
  source 1..20: mol_type = other RNA
atgagtctgacatactgtca

SEQ ID NO: 23101 - RNA, 20 nt, synthetic construct
  source 1..20: mol_type = other RNA
atgagtcttccgtctcaaga

SEQ ID NO: 23102 - RNA, 20 nt, synthetic construct
  source 1..20: mol_type = other RNA
atgagtgagccacagctaca

SEQ ID NO: 23103 - RNA, 20 nt, synthetic construct
  source 1..20: mol_type = other RNA
atgagtgtatgcagggaaat

SEQ ID NO: 23104 - RNA, 20 nt, synthetic construct
  source 1..20: mol_type = other RNA
atgagtgtttcccttaaaag

SEQ ID NO: 23105 - RNA, 20 nt, synthetic construct
  source 1..20: mol_type = other RNA
atgagttccagtcctttgtg

SEQ ID NO: 23106 - RNA, 20 nt, synthetic construct
  source 1..20: mol_type = other RNA
atgagttcctgcttccccca

SEQ ID NO: 23107 - RNA, 20 nt, synthetic construct
  source 1..20: mol_type = other RNA
atgagtttaattcttttgct

SEQ ID NO: 23108 - RNA, 20 nt, synthetic construct
  source 1..20: mol_type = other RNA
atgataaaaataacgggccg

SEQ ID NO: 23109 - RNA, 20 nt, synthetic construct
  source 1..20: mol_type = other RNA
atgataccctcaaaagatgc

SEQ ID NO: 23110 - RNA, 20 nt, synthetic construct
  source 1..20: mol_type = other RNA
atgatacctcatttatactt

SEQ ID NO: 23111 - RNA, 20 nt, synthetic construct
  source 1..20: mol_type = other RNA
atgataccttcttgagagtc

SEQ ID NO: 23112 - RNA, 20 nt, synthetic construct
  source 1..20: mol_type = other RNA
atgatactcgtagttttttg

SEQ ID NO: 23113 - RNA, 20 nt, synthetic construct
  source 1..20: mol_type = other RNA
atgatagaataccacttagt

SEQ ID NO: 23114 - RNA, 20 nt, synthetic construct
  source 1..20: mol_type = other RNA
atgatagactggattaagga

SEQ ID NO: 23115 - RNA, 20 nt, synthetic construct
  source 1..20: mol_type = other RNA
atgatagcattatcccagat

SEQ ID NO: 23116 - RNA, 20 nt, synthetic construct
  source 1..20: mol_type = other RNA
atgataggtcactgcagtct

SEQ ID NO: 23117 - RNA, 20 nt, synthetic construct
  source 1..20: mol_type = other RNA
atgatcaaaaccaggaggtt

SEQ ID NO: 23118 - RNA, 20 nt, synthetic construct
  source 1..20: mol_type = other RNA
atgatcaaagtgaaaggcaa

SEQ ID NO: 23119 - RNA, 20 nt, synthetic construct
  source 1..20: mol_type = other RNA
atgatccagcagtttcactt

SEQ ID NO: 23120 - RNA, 20 nt, synthetic construct
  source 1..20: mol_type = other RNA
atgatctaaatggtgtgaag

SEQ ID NO: 23121 - RNA, 20 nt, synthetic construct
  source 1..20: mol_type = other RNA
atgatctatcaatctcacac

SEQ ID NO: 23122 - RNA, 20 nt, synthetic construct
  source 1..20: mol_type = other RNA
atgatctcacgtcaccgcaa

SEQ ID NO: 23123 - RNA, 20 nt, synthetic construct
  source 1..20: mol_type = other RNA
atgatcttattaatgtgttg

SEQ ID NO: 23124 - RNA, 20 nt, synthetic construct
  source 1..20: mol_type = other RNA
atgatcttgggaatactttc

SEQ ID NO: 23125 - RNA, 20 nt, synthetic construct
  source 1..20: mol_type = other RNA
atgatctttcaaggggcctt

SEQ ID NO: 23126 - RNA, 20 nt, synthetic construct
  source 1..20: mol_type = other RNA
atgatctttgaataaagggt

SEQ ID NO: 23127 - RNA, 20 nt, synthetic construct
  source 1..20: mol_type = other RNA
atgatctttggaaatgaata

SEQ ID NO: 23128 - RNA, 20 nt, synthetic construct
  source 1..20: mol_type = other RNA
atgatgaacaaaggcaggag

SEQ ID NO: 23129 - RNA, 20 nt, synthetic construct
  source 1..20: mol_type = other RNA
atgatgaagggttttctgta

SEQ ID NO: 23130 - RNA, 20 nt, synthetic construct
  source 1..20: mol_type = other RNA
atgatgactatgaaaagcct

SEQ ID NO: 23131 - RNA, 20 nt, synthetic construct
  source 1..20: mol_type = other RNA
atgatgagctactgcatgct

SEQ ID NO: 23132 - RNA, 20 nt, synthetic construct
  source 1..20: mol_type = other RNA
atgatgatggtgatgctaac

SEQ ID NO: 23133 - RNA, 20 nt, synthetic construct
  source 1..20: mol_type = other RNA
atgatgatttttgccagtgt

SEQ ID NO: 23134 - RNA, 20 nt, synthetic construct
  source 1..20: mol_type = other RNA
atgatgcagcccctgccaca

SEQ ID NO: 23135 - RNA, 20 nt, synthetic construct
  source 1..20: mol_type = other RNA
atgatgccactcaaaactga

SEQ ID NO: 23136 - RNA, 20 nt, synthetic construct
  source 1..20: mol_type = other RNA
atgatgccatcacattttga

SEQ ID NO: 23137 - RNA, 20 nt, synthetic construct
  source 1..20: mol_type = other RNA
atgatggcaacaatcaacag

SEQ ID NO: 23138 - RNA, 20 nt, synthetic construct
  source 1..20: mol_type = other RNA
atgatggctcaacgcctgtg

SEQ ID NO: 23139 - RNA, 20 nt, synthetic construct
  source 1..20: mol_type = other RNA
atgatggtgatgctaacgtg

SEQ ID NO: 23140 - RNA, 20 nt, synthetic construct
  source 1..20: mol_type = other RNA
atgatgtttggctccttacc

SEQ ID NO: 23141 - RNA, 20 nt, synthetic construct
  source 1..20: mol_type = other RNA
atgatgttttgaacgaatga

SEQ ID NO: 23142 - RNA, 20 nt, synthetic construct
  source 1..20: mol_type = other RNA
atgattatttcgaattatgc

SEQ ID NO: 23143 - RNA, 20 nt, synthetic construct
  source 1..20: mol_type = other RNA
atgattatttgcggcttgat

SEQ ID NO: 23144 - RNA, 20 nt, synthetic construct
  source 1..20: mol_type = other RNA
atgattcaaaatgtgatggc

SEQ ID NO: 23145 - RNA, 20 nt, synthetic construct
  source 1..20: mol_type = other RNA
atgattcagtcttggtagtt

SEQ ID NO: 23146 - RNA, 20 nt, synthetic construct
  source 1..20: mol_type = other RNA
atgattccacttatatgaag

SEQ ID NO: 23147 - RNA, 20 nt, synthetic construct
  source 1..20: mol_type = other RNA
atgattccccttatatggga

SEQ ID NO: 23148 - RNA, 20 nt, synthetic construct
  source 1..20: mol_type = other RNA
atgattcgcattgctaattc

SEQ ID NO: 23149 - RNA, 20 nt, synthetic construct
  source 1..20: mol_type = other RNA
atgattctaatgtgcaagga

SEQ ID NO: 23150 - RNA, 20 nt, synthetic construct
  source 1..20: mol_type = other RNA
atgattgaggacttcatgta

SEQ ID NO: 23151 - RNA, 20 nt, synthetic construct
  source 1..20: mol_type = other RNA
atgattgggtcaacaaacta

SEQ ID NO: 23152 - RNA, 20 nt, synthetic construct
  source 1..20: mol_type = other RNA
atgatttaatagaggtctgt

SEQ ID NO: 23153 - RNA, 20 nt, synthetic construct
  source 1..20: mol_type = other RNA
atgatttataatccattggg

SEQ ID NO: 23154 - RNA, 20 nt, synthetic construct
  source 1..20: mol_type = other RNA
atgatttcaagtaacactca

SEQ ID NO: 23155 - RNA, 20 nt, synthetic construct
  source 1..20: mol_type = other RNA
atgatttcacttacttgagc

SEQ ID NO: 23156 - RNA, 20 nt, synthetic construct
  source 1..20: mol_type = other RNA
atgatttccctgcatacact

SEQ ID NO: 23157 - RNA, 20 nt, synthetic construct
  source 1..20: mol_type = other RNA
atgatttctaggccctaacc

SEQ ID NO: 23158 - RNA, 20 nt, synthetic construct
  source 1..20: mol_type = other RNA
atgatttggtgtgtgcaaag

SEQ ID NO: 23159 - RNA, 20 nt, synthetic construct
  source 1..20: mol_type = other RNA
atgatttgtttgaattaagc

SEQ ID NO: 23160 - RNA, 20 nt, synthetic construct
  source 1..20: mol_type = other RNA
atgattttagaaggtaagaa

SEQ ID NO: 23161 - RNA, 20 nt, synthetic construct
  source 1..20: mol_type = other RNA
atgattttcacagggcaggg

SEQ ID NO: 23162 - RNA, 20 nt, synthetic construct
  source 1..20: mol_type = other RNA
atgattttctaggaaacttt

SEQ ID NO: 23163 - RNA, 20 nt, synthetic construct
  source 1..20: mol_type = other RNA
atgatttttgccagtgtttt

SEQ ID NO: 23164 - RNA, 20 nt, synthetic construct
  source 1..20: mol_type = other RNA
atgcaaactctaaataatag

SEQ ID NO: 23165 - RNA, 20 nt, synthetic construct
  source 1..20: mol_type = other RNA
atgcaaagtttcctacatac

SEQ ID NO: 23166 - RNA, 20 nt, synthetic construct
  source 1..20: mol_type = other RNA
atgcaaatcaaaacaataag

SEQ ID NO: 23167 - RNA, 20 nt, synthetic construct
  source 1..20: mol_type = other RNA
atgcaacaaatgttgcagag

SEQ ID NO: 23168 - RNA, 20 nt, synthetic construct
  source 1..20: mol_type = other RNA
atgcaacctgctttcctcat

SEQ ID NO: 23169 - RNA, 20 nt, synthetic construct
  source 1..20: mol_type = other RNA
atgcaactcctgggctcatc

SEQ ID NO: 23170 - RNA, 20 nt, synthetic construct
  source 1..20: mol_type = other RNA
atgcaactgaaaacatcttt

SEQ ID NO: 23171 - RNA, 20 nt, synthetic construct
  source 1..20: mol_type = other RNA
atgcaacttactctcaaata

SEQ ID NO: 23172 - RNA, 20 nt, synthetic construct
  source 1..20: mol_type = other RNA
atgcaagaatggtttaacac

SEQ ID NO: 23173 - RNA, 20 nt, synthetic construct
  source 1..20: mol_type = other RNA
atgcaagagttaaaactcac

SEQ ID NO: 23174 - RNA, 20 nt, synthetic construct
  source 1..20: mol_type = other RNA
atgcaagatggcaagtttcc

SEQ ID NO: 23175 - RNA, 20 nt, synthetic construct
  source 1..20: mol_type = other RNA
atgcaagatgtcaacattaa

SEQ ID NO: 23176 - RNA, 20 nt, synthetic construct
  source 1..20: mol_type = other RNA
atgcaataactcaaaatgtt

SEQ ID NO: 23177 - RNA, 20 nt, synthetic construct
  source 1..20: mol_type = other RNA
atgcaatacttaatagccca

SEQ ID NO: 23178 - RNA, 20 nt, synthetic construct
  source 1..20: mol_type = other RNA
atgcaatgcaggcgcctgga

SEQ ID NO: 23179 - RNA, 20 nt, synthetic construct
  source 1..20: mol_type = other RNA
atgcaatgcgtgtgaaacca

SEQ ID NO: 23180 - RNA, 20 nt, synthetic construct
  source 1..20: mol_type = other RNA
atgcaattccccagcctcag

SEQ ID NO: 23181 - RNA, 20 nt, synthetic construct
  source 1..20: mol_type = other RNA
atgcaatttgttttccaagc

SEQ ID NO: 23182 - RNA, 20 nt, synthetic construct
  source 1..20: mol_type = other RNA
atgcacaaaagtttaacttt

SEQ ID NO: 23183 - RNA, 20 nt, synthetic construct
  source 1..20: mol_type = other RNA
atgcacaaataattaacact

SEQ ID NO: 23184 - RNA, 20 nt, synthetic construct
  source 1..20: mol_type = other RNA
atgcacaagacagatgtgct

SEQ ID NO: 23185 - RNA, 20 nt, synthetic construct
  source 1..20: mol_type = other RNA
atgcacaagccttgaaaata

SEQ ID NO: 23186 - RNA, 20 nt, synthetic construct
  source 1..20: mol_type = other RNA
atgcacaaggtcaagagcgg

SEQ ID NO: 23187 - RNA, 20 nt, synthetic construct
  source 1..20: mol_type = other RNA
atgcacaatggaatattact

SEQ ID NO: 23188 - RNA, 20 nt, synthetic construct
  source 1..20: mol_type = other RNA
atgcacacagagggagcgcc

SEQ ID NO: 23189 - RNA, 20 nt, synthetic construct
  source 1..20: mol_type = other RNA
atgcacacaggagaacttgt

SEQ ID NO: 23190 - RNA, 20 nt, synthetic construct
  source 1..20: mol_type = other RNA
atgcacacgctggaagggag

SEQ ID NO: 23191 - RNA, 20 nt, synthetic construct
  source 1..20: mol_type = other RNA
atgcacactagacctttctt

SEQ ID NO: 23192 - RNA, 20 nt, synthetic construct
  source 1..20: mol_type = other RNA
atgcacatgggcatgggtcc

SEQ ID NO: 23193 - RNA, 20 nt, synthetic construct
  source 1..20: mol_type = other RNA
atgcaccaacacctgcagtg

SEQ ID NO: 23194 - RNA, 20 nt, synthetic construct
  source 1..20: mol_type = other RNA
atgcacgagaaaagcacagg

SEQ ID NO: 23195 - RNA, 20 nt, synthetic construct
  source 1..20: mol_type = other RNA
atgcacggacttggcacagg

SEQ ID NO: 23196 - RNA, 20 nt, synthetic construct
  source 1..20: mol_type = other RNA
atgcacgtgaagctacagac

SEQ ID NO: 23197 - RNA, 20 nt, synthetic construct
  source 1..20: mol_type = other RNA
atgcactgtactcctagata

SEQ ID NO: 23198 - RNA, 20 nt, synthetic construct
  source 1..20: mol_type = other RNA
atgcacttagcgctgatgtg

SEQ ID NO: 23199 - RNA, 20 nt, synthetic construct
  source 1..20: mol_type = other RNA
atgcagaaaaagcatttttt

SEQ ID NO: 23200 - RNA, 20 nt, synthetic construct
  source 1..20: mol_type = other RNA
atgcagaaaataaaccaagt

SEQ ID NO: 23201 - RNA, 20 nt, synthetic construct
  source 1..20: mol_type = other RNA
atgcagaaaccagttgtaat

SEQ ID NO: 23202 - RNA, 20 nt, synthetic construct
  source 1..20: mol_type = other RNA
atgcagaaatctaccaaaca

SEQ ID NO: 23203 - RNA, 20 nt, synthetic construct
  source 1..20: mol_type = other RNA
atgcagatttctttttactc

SEQ ID NO: 23204 - RNA, 20 nt, synthetic construct
  source 1..20: mol_type = other RNA
atgcagcaaaagcaccactg

SEQ ID NO: 23205 - RNA, 20 nt, synthetic construct
  source 1..20: mol_type = other RNA
atgcagcaacggaaatgagt

SEQ ID NO: 23206 - RNA, 20 nt, synthetic construct
  source 1..20: mol_type = other RNA
atgcagcccctgccacactc

SEQ ID NO: 23207 - RNA, 20 nt, synthetic construct
  source 1..20: mol_type = other RNA
atgcaggaccaactttaagc

SEQ ID NO: 23208 - RNA, 20 nt, synthetic construct
  source 1..20: mol_type = other RNA
atgcaggagaaacatggctt

SEQ ID NO: 23209 - RNA, 20 nt, synthetic construct
  source 1..20: mol_type = other RNA
atgcaggcgcctggacagga

SEQ ID NO: 23210 - RNA, 20 nt, synthetic construct
  source 1..20: mol_type = other RNA
atgcagggaaatcattcagg

SEQ ID NO: 23211 - RNA, 20 nt, synthetic construct
  source 1..20: mol_type = other RNA
atgcaggttcatgtgtgctt

SEQ ID NO: 23212 - RNA, 20 nt, synthetic construct
  source 1..20: mol_type = other RNA
atgcagtacttgtctttttg

SEQ ID NO: 23213 - RNA, 20 nt, synthetic construct
  source 1..20: mol_type = other RNA
atgcagtagctcatcattta

SEQ ID NO: 23214 - RNA, 20 nt, synthetic construct
  source 1..20: mol_type = other RNA
atgcagtagtaaagcaaatg

SEQ ID NO: 23215 - RNA, 20 nt, synthetic construct
  source 1..20: mol_type = other RNA
atgcagtatgtgccattttt

SEQ ID NO: 23216 - RNA, 20 nt, synthetic construct
  source 1..20: mol_type = other RNA
atgcagtattgttaactgta

SEQ ID NO: 23217 - RNA, 20 nt, synthetic construct
  source 1..20: mol_type = other RNA
atgcagtggcttcctaactg

SEQ ID NO: 23218 - RNA, 20 nt, synthetic construct
  source 1..20: mol_type = other RNA
atgcagttgcttactctaat

SEQ ID NO: 23219 - RNA, 20 nt, synthetic construct
  source 1..20: mol_type = other RNA
atgcataaaaatatatacgg

SEQ ID NO: 23220 - RNA, 20 nt, synthetic construct
  source 1..20: mol_type = other RNA
atgcataaacgacagcagga

SEQ ID NO: 23221 - RNA, 20 nt, synthetic construct
  source 1..20: mol_type = other RNA
atgcataagttctagagatt

SEQ ID NO: 23222 - RNA, 20 nt, synthetic construct
  source 1..20: mol_type = other RNA
atgcataccaagcccggcac

SEQ ID NO: 23223 - RNA, 20 nt, synthetic construct
  source 1..20: mol_type = other RNA
atgcatactgcagcactttt

SEQ ID NO: 23224 - RNA, 20 nt, synthetic construct
  source 1..20: mol_type = other RNA
atgcatactttggaaggtag

SEQ ID NO: 23225 - RNA, 20 nt, synthetic construct
  source 1..20: mol_type = other RNA
atgcatagatcacaaggact

SEQ ID NO: 23226 - RNA, 20 nt, synthetic construct
  source 1..20: mol_type = other RNA
atgcatagcagggtcatgca

SEQ ID NO: 23227 - RNA, 20 nt, synthetic construct
  source 1..20: mol_type = other RNA
atgcatatatctgtctggga

SEQ ID NO: 23228 - RNA, 20 nt, synthetic construct
  source 1..20: mol_type = other RNA
atgcatatgtttgtaacttg

SEQ ID NO: 23229 - RNA, 20 nt, synthetic construct
  source 1..20: mol_type = other RNA
atgcatccacattttgtgac

SEQ ID NO: 23230 - RNA, 20 nt, synthetic construct
  source 1..20: mol_type = other RNA
atgcatccctcctctggccc

SEQ ID NO: 23231 - RNA, 20 nt, synthetic construct
  source 1..20: mol_type = other RNA
atgcatcgtttcaatattaa

SEQ ID NO: 23232 - RNA, 20 nt, synthetic construct
  source 1..20: mol_type = other RNA
atgcatcttgaactaagtgt

SEQ ID NO: 23233 - RNA, 20 nt, synthetic construct
  source 1..20: mol_type = other RNA
atgcatcttgcaaaacggaa

SEQ ID NO: 23234 - RNA, 20 nt, synthetic construct
  source 1..20: mol_type = other RNA
atgcatcttttaaaaacctt

SEQ ID NO: 23235 - RNA, 20 nt, synthetic construct
  source 1..20: mol_type = other RNA
atgcatgaggcatattattg

SEQ ID NO: 23236 - RNA, 20 nt, synthetic construct
  source 1..20: mol_type = other RNA
atgcatgcacacagagggag

SEQ ID NO: 23237 - RNA, 20 nt, synthetic construct
  source 1..20: mol_type = other RNA
atgcatgggaggtaatacta

SEQ ID NO: 23238 - RNA, 20 nt, synthetic construct
  source 1..20: mol_type = other RNA
atgcatgtctgtctgttcac

SEQ ID NO: 23239 - RNA, 20 nt, synthetic construct
  source 1..20: mol_type = other RNA
atgcatgttatttggggatt

SEQ ID NO: 23240 - RNA, 20 nt, synthetic construct
  source 1..20: mol_type = other RNA
atgcattaagccagtcacta

SEQ ID NO: 23241 - RNA, 20 nt, synthetic construct
  source 1..20: mol_type = other RNA
atgcattccagattgaaatc

SEQ ID NO: 23242 - RNA, 20 nt, synthetic construct
  source 1..20: mol_type = other RNA
atgcattcccatgttcactg

SEQ ID NO: 23243 - RNA, 20 nt, synthetic construct
  source 1..20: mol_type = other RNA
atgcattcgtccctaaacac

SEQ ID NO: 23244 - RNA, 20 nt, synthetic construct
  source 1..20: mol_type = other RNA
atgcattctagaaaggaggg

SEQ ID NO: 23245 - RNA, 20 nt, synthetic construct
  source 1..20: mol_type = other RNA
atgcattctgtcacatagac

SEQ ID NO: 23246 - RNA, 20 nt, synthetic construct
  source 1..20: mol_type = other RNA
atgcatttattagtagttag

SEQ ID NO: 23247 - RNA, 20 nt, synthetic construct
  source 1..20: mol_type = other RNA
atgcatttggtctcattcac

SEQ ID NO: 23248 - RNA, 20 nt, synthetic construct
  source 1..20: mol_type = other RNA
atgccaatatcacactgttt

SEQ ID NO: 23249 - RNA, 20 nt, synthetic construct
  source 1..20: mol_type = other RNA
atgccaatttgggatatagc

SEQ ID NO: 23250 - RNA, 20 nt, synthetic construct
  source 1..20: mol_type = other RNA
atgccacaaatggagtgact

SEQ ID NO: 23251 - RNA, 20 nt, synthetic construct
  source 1..20: mol_type = other RNA
atgccacaccacatccagct

SEQ ID NO: 23252 - RNA, 20 nt, synthetic construct
  source 1..20: mol_type = other RNA
atgccacataaatcacagga

SEQ ID NO: 23253 - RNA, 20 nt, synthetic construct
  source 1..20: mol_type = other RNA
atgccacattttttggtttg

SEQ ID NO: 23254 - RNA, 20 nt, synthetic construct
  source 1..20: mol_type = other RNA
atgccactcaaaactgaagt

SEQ ID NO: 23255 - RNA, 20 nt, synthetic construct
  source 1..20: mol_type = other RNA
atgccagctttggctgaaat

SEQ ID NO: 23256 - RNA, 20 nt, synthetic construct
  source 1..20: mol_type = other RNA
atgccagggcgctcctctcc

SEQ ID NO: 23257 - RNA, 20 nt, synthetic construct
  source 1..20: mol_type = other RNA
atgccatagagctttaaagt

SEQ ID NO: 23258 - RNA, 20 nt, synthetic construct
  source 1..20: mol_type = other RNA
atgccatcacattttgaatc

SEQ ID NO: 23259 - RNA, 20 nt, synthetic construct
  source 1..20: mol_type = other RNA
atgccatcctggatttggga

SEQ ID NO: 23260 - RNA, 20 nt, synthetic construct
  source 1..20: mol_type = other RNA
atgccatgtgttttgttttg

SEQ ID NO: 23261 - RNA, 20 nt, synthetic construct
  source 1..20: mol_type = other RNA
atgccatttataatagcata

SEQ ID NO: 23262 - RNA, 20 nt, synthetic construct
  source 1..20: mol_type = other RNA
atgcccaatcaaatccagtc

SEQ ID NO: 23263 - RNA, 20 nt, synthetic construct
  source 1..20: mol_type = other RNA
atgcccatcctctatttttg

SEQ ID NO: 23264 - RNA, 20 nt, synthetic construct
  source 1..20: mol_type = other RNA
atgcccatgtgcattattgt

SEQ ID NO: 23265 - RNA, 20 nt, synthetic construct
  source 1..20: mol_type = other RNA
atgcccattaaaaccatgaa

SEQ ID NO: 23266 - RNA, 20 nt, synthetic construct
  source 1..20: mol_type = other RNA
atgccccatgtgttggcact

SEQ ID NO: 23267 - RNA, 20 nt, synthetic construct
  source 1..20: mol_type = other RNA
atgccccctcttctctcctt

SEQ ID NO: 23268 - RNA, 20 nt, synthetic construct
  source 1..20: mol_type = other RNA
atgcccctgtagcagacact

SEQ ID NO: 23269 - RNA, 20 nt, synthetic construct
  source 1..20: mol_type = other RNA
atgcccctttgagcagagtc

SEQ ID NO: 23270 - RNA, 20 nt, synthetic construct
  source 1..20: mol_type = other RNA
atgcccttatttaatgtgct

SEQ ID NO: 23271 - RNA, 20 nt, synthetic construct
  source 1..20: mol_type = other RNA
atgccgctggtgaaaaaatg

SEQ ID NO: 23272 - RNA, 20 nt, synthetic construct
  source 1..20: mol_type = other RNA
atgccggctgttaggtatta

SEQ ID NO: 23273 - RNA, 20 nt, synthetic construct
  source 1..20: mol_type = other RNA
atgccgggacaagagtctgc

SEQ ID NO: 23274 - RNA, 20 nt, synthetic construct
  source 1..20: mol_type = other RNA
atgccggtaatcacagctac

SEQ ID NO: 23275 - RNA, 20 nt, synthetic construct
  source 1..20: mol_type = other RNA
atgcctagaaaggaattgta

SEQ ID NO: 23276 - RNA, 20 nt, synthetic construct
  source 1..20: mol_type = other RNA
atgcctagatgattcgcatt

SEQ ID NO: 23277 - RNA, 20 nt, synthetic construct
  source 1..20: mol_type = other RNA
atgcctagatttcaatctgg

SEQ ID NO: 23278 - RNA, 20 nt, synthetic construct
  source 1..20: mol_type = other RNA
atgcctataaaatgctggaa

SEQ ID NO: 23279 - RNA, 20 nt, synthetic construct
  source 1..20: mol_type = other RNA
atgcctatgaaatcttgaag

SEQ ID NO: 23280 - RNA, 20 nt, synthetic construct
  source 1..20: mol_type = other RNA
atgcctcaaattagtcatag

SEQ ID NO: 23281 - RNA, 20 nt, synthetic construct
  source 1..20: mol_type = other RNA
atgcctcatgcatccacatt

SEQ ID NO: 23282 - RNA, 20 nt, synthetic construct
  source 1..20: mol_type = other RNA
atgcctcgaaggcctgcttc

SEQ ID NO: 23283 - RNA, 20 nt, synthetic construct
  source 1..20: mol_type = other RNA
atgcctctcccaccatctct

SEQ ID NO: 23284 - RNA, 20 nt, synthetic construct
  source 1..20: mol_type = other RNA
atgcctctgttacagctctt

SEQ ID NO: 23285 - RNA, 20 nt, synthetic construct
  source 1..20: mol_type = other RNA
atgcctgacaaagtatgaga

SEQ ID NO: 23286 - RNA, 20 nt, synthetic construct
  source 1..20: mol_type = other RNA
atgcctgccgcagagcaagc

SEQ ID NO: 23287 - RNA, 20 nt, synthetic construct
  source 1..20: mol_type = other RNA
atgcctgggtaattaaacat

SEQ ID NO: 23288 - RNA, 20 nt, synthetic construct
  source 1..20: mol_type = other RNA
atgcctgtgcttgtctctct

SEQ ID NO: 23289 - RNA, 20 nt, synthetic construct
  source 1..20: mol_type = other RNA
atgcctgtgcttttctcgtg

SEQ ID NO: 23290 - RNA, 20 nt, synthetic construct
  source 1..20: mol_type = other RNA
atgccttcagtatgaatgca

SEQ ID NO: 23291 - RNA, 20 nt, synthetic construct
  source 1..20: mol_type = other RNA
atgcctttcagcatagcaga

SEQ ID NO: 23292 - RNA, 20 nt, synthetic construct
  source 1..20: mol_type = other RNA
atgcgaatcatctaggcata

SEQ ID NO: 23293 - RNA, 20 nt, synthetic construct
  source 1..20: mol_type = other RNA
atgcgaatttacttttaaac

SEQ ID NO: 23294 - RNA, 20 nt, synthetic construct
  source 1..20: mol_type = other RNA
atgcgacatatcagggatca

SEQ ID NO: 23295 - RNA, 20 nt, synthetic construct
  source 1..20: mol_type = other RNA
atgcgatgatcaaaaccagg

SEQ ID NO: 23296 - RNA, 20 nt, synthetic construct
  source 1..20: mol_type = other RNA
atgcgccatcacacccagta

SEQ ID NO: 23297 - RNA, 20 nt, synthetic construct
  source 1..20: mol_type = other RNA
atgcgcgtccgcgacccggc

SEQ ID NO: 23298 - RNA, 20 nt, synthetic construct
  source 1..20: mol_type = other RNA
atgcggggtttcagcacaat

SEQ ID NO: 23299 - RNA, 20 nt, synthetic construct
  source 1..20: mol_type = other RNA
atgcgtggttcacacctgta

SEQ ID NO: 23300 - RNA, 20 nt, synthetic construct
  source 1..20: mol_type = other RNA
atgcgtgtgaaaccaagcaa

SEQ ID NO: 23301 - RNA, 20 nt, synthetic construct
  source 1..20: mol_type = other RNA
atgcgtttgttagatctggg

SEQ ID NO: 23302 - RNA, 20 nt, synthetic construct
  source 1..20: mol_type = other RNA
atgctaaacagtacagtagt

SEQ ID NO: 23303 - RNA, 20 nt, synthetic construct
  source 1..20: mol_type = other RNA
atgctaacatgaactactca

SEQ ID NO: 23304 - RNA, 20 nt, synthetic construct
  source 1..20: mol_type = other RNA
atgctaacgtgcttgctctg

SEQ ID NO: 23305 - RNA, 20 nt, synthetic construct
  source 1..20: mol_type = other RNA
atgctaactgcagaggtcag

SEQ ID NO: 23306 - RNA, 20 nt, synthetic construct
  source 1..20: mol_type = other RNA
atgctaagtgtttaggatat

SEQ ID NO: 23307 - RNA, 20 nt, synthetic construct
  source 1..20: mol_type = other RNA
atgctaggggctgttcccag

SEQ ID NO: 23308 - RNA, 20 nt, synthetic construct
  source 1..20: mol_type = other RNA
atgctataaagaacatgatt

SEQ ID NO: 23309 - RNA, 20 nt, synthetic construct
  source 1..20: mol_type = other RNA
atgctatcattttaaaggga

SEQ ID NO: 23310 - RNA, 20 nt, synthetic construct
  source 1..20: mol_type = other RNA
atgctatccagaagagaatg

SEQ ID NO: 23311 - RNA, 20 nt, synthetic construct
  source 1..20: mol_type = other RNA
atgctattataaatggcatc

SEQ ID NO: 23312 - RNA, 20 nt, synthetic construct
  source 1..20: mol_type = other RNA
atgctattcaagacaagcaa

SEQ ID NO: 23313 - RNA, 20 nt, synthetic construct
  source 1..20: mol_type = other RNA
atgctcacatttagtttcat

SEQ ID NO: 23314 - RNA, 20 nt, synthetic construct
  source 1..20: mol_type = other RNA
atgctcactgtctccatgtc

SEQ ID NO: 23315 - RNA, 20 nt, synthetic construct
  source 1..20: mol_type = other RNA
atgctcagggtgcgacctcg

SEQ ID NO: 23316 - RNA, 20 nt, synthetic construct
  source 1..20: mol_type = other RNA
atgctcagtgggttcaatta

SEQ ID NO: 23317 - RNA, 20 nt, synthetic construct
  source 1..20: mol_type = other RNA
atgctcagtttcaaaagctc

SEQ ID NO: 23318 - RNA, 20 nt, synthetic construct
  source 1..20: mol_type = other RNA
atgctcataattaaagagag

SEQ ID NO: 23319 - RNA, 20 nt, synthetic construct
  source 1..20: mol_type = other RNA
atgctcccatttgggactga

SEQ ID NO: 23320 - RNA, 20 nt, synthetic construct
  source 1..20: mol_type = other RNA
atgctccctaaatacacatg

SEQ ID NO: 23321 - RNA, 20 nt, synthetic construct
  source 1..20: mol_type = other RNA
atgctccctctatggcaggc

SEQ ID NO: 23322 - RNA, 20 nt, synthetic construct
  source 1..20: mol_type = other RNA
atgctctcttcccccaaaac

SEQ ID NO: 23323 - RNA, 20 nt, synthetic construct
  source 1..20: mol_type = other RNA
atgctctgataggataatgt

SEQ ID NO: 23324 - RNA, 20 nt, synthetic construct
  source 1..20: mol_type = other RNA
atgctcttaagtatttttgt

SEQ ID NO: 23325 - RNA, 20 nt, synthetic construct
  source 1..20: mol_type = other RNA
atgctcttggtttcttcaag

SEQ ID NO: 23326 - RNA, 20 nt, synthetic construct
  source 1..20: mol_type = other RNA
atgctgaaaggcatgaaatt

SEQ ID NO: 23327 - RNA, 20 nt, synthetic construct
  source 1..20: mol_type = other RNA
atgctgaacttgtcacaaaa

SEQ ID NO: 23328 - RNA, 20 nt, synthetic construct
  source 1..20: mol_type = other RNA
atgctgaggccccaggggac

SEQ ID NO: 23329 - RNA, 20 nt, synthetic construct
  source 1..20: mol_type = other RNA
atgctgagtgaatggggtaa

SEQ ID NO: 23330 - RNA, 20 nt, synthetic construct
  source 1..20: mol_type = other RNA
atgctgatgaactacacaga

SEQ ID NO: 23331 - RNA, 20 nt, synthetic construct
  source 1..20: mol_type = other RNA
atgctgcaactgagaagagc

SEQ ID NO: 23332 - RNA, 20 nt, synthetic construct
  source 1..20: mol_type = other RNA
atgctgcgagccccggggga

SEQ ID NO: 23333 - RNA, 20 nt, synthetic construct
  source 1..20: mol_type = other RNA
atgctgctatgaaaattggc

SEQ ID NO: 23334 - RNA, 20 nt, synthetic construct
  source 1..20: mol_type = other RNA
atgctggaaattttcaaggg

SEQ ID NO: 23335 - RNA, 20 nt, synthetic construct
  source 1..20: mol_type = other RNA
atgctggagtgtggcagggg

SEQ ID NO: 23336 - RNA, 20 nt, synthetic construct
  source 1..20: mol_type = other RNA
atgctggccagtgagttcaa

SEQ ID NO: 23337 - RNA, 20 nt, synthetic construct
  source 1..20: mol_type = other RNA
atgctggcttcatgggtgga

SEQ ID NO: 23338 - RNA, 20 nt, synthetic construct
  source 1..20: mol_type = other RNA
atgctgggagaccaggagtt

SEQ ID NO: 23339 - RNA, 20 nt, synthetic construct
  source 1..20: mol_type = other RNA
atgctggggacccctccctg

SEQ ID NO: 23340 - RNA, 20 nt, synthetic construct
  source 1..20: mol_type = other RNA
atgctggtggagtattctag

SEQ ID NO: 23341 - RNA, 20 nt, synthetic construct
  source 1..20: mol_type = other RNA
atgctggtgggctttgagaa

SEQ ID NO: 23342 - RNA, 20 nt, synthetic construct
  source 1..20: mol_type = other RNA
atgctgtaactgacttcaag

SEQ ID NO: 23343 - RNA, 20 nt, synthetic construct
  source 1..20: mol_type = other RNA
atgctgtagtgattcacttt

SEQ ID NO: 23344 - RNA, 20 nt, synthetic construct
  source 1..20: mol_type = other RNA
atgctgtctataggcaatga

SEQ ID NO: 23345 - RNA, 20 nt, synthetic construct
  source 1..20: mol_type = other RNA
atgctgtgaatttggatttg

SEQ ID NO: 23346 - RNA, 20 nt, synthetic construct
  source 1..20: mol_type = other RNA
atgctgttctctgtgtggtt

SEQ ID NO: 23347 - RNA, 20 nt, synthetic construct
  source 1..20: mol_type = other RNA
atgctgtttacattagagaa

SEQ ID NO: 23348 - RNA, 20 nt, synthetic construct
  source 1..20: mol_type = other RNA
atgctgtttttgaaaagaac

SEQ ID NO: 23349 - RNA, 20 nt, synthetic construct
  source 1..20: mol_type = other RNA
atgcttaaagcgctactcag

SEQ ID NO: 23350 - RNA, 20 nt, synthetic construct
  source 1..20: mol_type = other RNA
atgcttaacaagaatcctgc

SEQ ID NO: 23351 - RNA, 20 nt, synthetic construct
  source 1..20: mol_type = other RNA
atgcttaatctgatttttag

SEQ ID NO: 23352 - RNA, 20 nt, synthetic construct
  source 1..20: mol_type = other RNA
atgcttagccttccagagac

SEQ ID NO: 23353 - RNA, 20 nt, synthetic construct
  source 1..20: mol_type = other RNA
atgcttaggatcccagtcct

SEQ ID NO: 23354 - RNA, 20 nt, synthetic construct
  source 1..20: mol_type = other RNA
atgcttaggtaagaaaaatt

SEQ ID NO: 23355 - RNA, 20 nt, synthetic construct
  source 1..20: mol_type = other RNA
atgcttatgtcttgtggctg

SEQ ID NO: 23356 - RNA, 20 nt, synthetic construct
  source 1..20: mol_type = other RNA
atgcttcatattttgtggga

SEQ ID NO: 23357 - RNA, 20 nt, synthetic construct
  source 1..20: mol_type = other RNA
atgcttccaaaagcaggccc

SEQ ID NO: 23358 - RNA, 20 nt, synthetic construct
  source 1..20: mol_type = other RNA
atgcttctagccaaagcaag

SEQ ID NO: 23359 - RNA, 20 nt, synthetic construct
  source 1..20: mol_type = other RNA
atgcttgaagagcgcttcta

SEQ ID NO: 23360 - RNA, 20 nt, synthetic construct
  source 1..20: mol_type = other RNA
atgcttgctccagagaagtt

SEQ ID NO: 23361 - RNA, 20 nt, synthetic construct
  source 1..20: mol_type = other RNA
atgctttctctagttgcacg

SEQ ID NO: 23362 - RNA, 20 nt, synthetic construct
  source 1..20: mol_type = other RNA
atgctttgagctacaaactc

SEQ ID NO: 23363 - RNA, 20 nt, synthetic construct
  source 1..20: mol_type = other RNA
atgctttgtctctggaaggc

SEQ ID NO: 23364 - RNA, 20 nt, synthetic construct
  source 1..20: mol_type = other RNA
atgctttttctgcatctttt

SEQ ID NO: 23365 - RNA, 20 nt, synthetic construct
  source 1..20: mol_type = other RNA
atggaaaatgtaaaacatca

SEQ ID NO: 23366 - RNA, 20 nt, synthetic construct
  source 1..20: mol_type = other RNA
atggaaaattcaaacatgac

SEQ ID NO: 23367 - RNA, 20 nt, synthetic construct
  source 1..20: mol_type = other RNA
atggaaaattcttggtcttt

SEQ ID NO: 23368 - RNA, 20 nt, synthetic construct
  source 1..20: mol_type = other RNA
atggaaacaacctaaatgtc

SEQ ID NO: 23369 - RNA, 20 nt, synthetic construct
  source 1..20: mol_type = other RNA
atggaaacatggtaatttgt

SEQ ID NO: 23370 - RNA, 20 nt, synthetic construct
  source 1..20: mol_type = other RNA
atggaaactacaattactgt

SEQ ID NO: 23371 - RNA, 20 nt, synthetic construct
  source 1..20: mol_type = other RNA
atggaaacttgccatcttgc

SEQ ID NO: 23372 - RNA, 20 nt, synthetic construct
  source 1..20: mol_type = other RNA
atggaaagaaatagaactgt

SEQ ID NO: 23373 - RNA, 20 nt, synthetic construct
  source 1..20: mol_type = other RNA
atggaaagtggactatgtag

SEQ ID NO: 23374 - RNA, 20 nt, synthetic construct
  source 1..20: mol_type = other RNA
atggaaatgaagtattgatt

SEQ ID NO: 23375 - RNA, 20 nt, synthetic construct
  source 1..20: mol_type = other RNA
atggaaatgtaaattcctaa

SEQ ID NO: 23376 - RNA, 20 nt, synthetic construct
  source 1..20: mol_type = other RNA
atggaaccactgtaggcccc

SEQ ID NO: 23377 - RNA, 20 nt, synthetic construct
  source 1..20: mol_type = other RNA
atggaacggcttaacacctt

SEQ ID NO: 23378 - RNA, 20 nt, synthetic construct
  source 1..20: mol_type = other RNA
atggaactaagaaaaatgtt

SEQ ID NO: 23379 - RNA, 20 nt, synthetic construct
  source 1..20: mol_type = other RNA
atggaactctattttcctaa

SEQ ID NO: 23380 - RNA, 20 nt, synthetic construct
  source 1..20: mol_type = other RNA
atggaagactttatggtaat

SEQ ID NO: 23381 - RNA, 20 nt, synthetic construct
  source 1..20: mol_type = other RNA
atggaagatgggacttcact

SEQ ID NO: 23382 - RNA, 20 nt, synthetic construct
  source 1..20: mol_type = other RNA
atggaagtgctgggctaggg

SEQ ID NO: 23383 - RNA, 20 nt, synthetic construct
  source 1..20: mol_type = other RNA
atggaagttatttaatctct

SEQ ID NO: 23384 - RNA, 20 nt, synthetic construct
  source 1..20: mol_type = other RNA
atggaataatggaactaaga

SEQ ID NO: 23385 - RNA, 20 nt, synthetic construct
  source 1..20: mol_type = other RNA
atggaatagaagggagaacc

SEQ ID NO: 23386 - RNA, 20 nt, synthetic construct
  source 1..20: mol_type = other RNA
atggaatattactcagtctc

SEQ ID NO: 23387 - RNA, 20 nt, synthetic construct
  source 1..20: mol_type = other RNA
atggaattctgacacccgaa

SEQ ID NO: 23388 - RNA, 20 nt, synthetic construct
  source 1..20: mol_type = other RNA
atggaattctgatgcacaag

SEQ ID NO: 23389 - RNA, 20 nt, synthetic construct
  source 1..20: mol_type = other RNA
atggaattgccatatgtagg

SEQ ID NO: 23390 - RNA, 20 nt, synthetic construct
  source 1..20: mol_type = other RNA
atggacaaattaccatgttt

SEQ ID NO: 23391 - RNA, 20 nt, synthetic construct
  source 1..20: mol_type = other RNA
atggacactgcagatgaatg

SEQ ID NO: 23392 - RNA, 20 nt, synthetic construct
  source 1..20: mol_type = other RNA
atggacagcacattaaataa

SEQ ID NO: 23393 - RNA, 20 nt, synthetic construct
  source 1..20: mol_type = other RNA
atggacagcggggatggttg

SEQ ID NO: 23394 - RNA, 20 nt, synthetic construct
  source 1..20: mol_type = other RNA
atggacatgaggaaagcagg

SEQ ID NO: 23395 - RNA, 20 nt, synthetic construct
  source 1..20: mol_type = other RNA
atggacattctgcttccttg

SEQ ID NO: 23396 - RNA, 20 nt, synthetic construct
  source 1..20: mol_type = other RNA
atggactagactgcctgagg

SEQ ID NO: 23397 - RNA, 20 nt, synthetic construct
  source 1..20: mol_type = other RNA
atggacttcctattttataa

SEQ ID NO: 23398 - RNA, 20 nt, synthetic construct
  source 1..20: mol_type = other RNA
atggagacactagggactgg

SEQ ID NO: 23399 - RNA, 20 nt, synthetic construct
  source 1..20: mol_type = other RNA
atggagacagtgagcatgct

SEQ ID NO: 23400 - RNA, 20 nt, synthetic construct
  source 1..20: mol_type = other RNA
atggagacatctgagacatc

SEQ ID NO: 23401 - RNA, 20 nt, synthetic construct
  source 1..20: mol_type = other RNA
atggagacccatactcagcc

SEQ ID NO: 23402 - RNA, 20 nt, synthetic construct
  source 1..20: mol_type = other RNA
atggagactagtacactgtt

SEQ ID NO: 23403 - RNA, 20 nt, synthetic construct
  source 1..20: mol_type = other RNA
atggagataaattacccaaa

SEQ ID NO: 23404 - RNA, 20 nt, synthetic construct
  source 1..20: mol_type = other RNA
atggagcactgtgagccact

SEQ ID NO: 23405 - RNA, 20 nt, synthetic construct
  source 1..20: mol_type = other RNA
atggaggcaatgttgatttt

SEQ ID NO: 23406 - RNA, 20 nt, synthetic construct
  source 1..20: mol_type = other RNA
atggagggccagaggaggga

SEQ ID NO: 23407 - RNA, 20 nt, synthetic construct
  source 1..20: mol_type = other RNA
atggaggggccagttgagag

SEQ ID NO: 23408 - RNA, 20 nt, synthetic construct
  source 1..20: mol_type = other RNA
atggaggtggaactctgtca

SEQ ID NO: 23409 - RNA, 20 nt, synthetic construct
  source 1..20: mol_type = other RNA
atggagtactatgcagcaac

SEQ ID NO: 23410 - RNA, 20 nt, synthetic construct
  source 1..20: mol_type = other RNA
atggagtgacttaagcaaca

SEQ ID NO: 23411 - RNA, 20 nt, synthetic construct
  source 1..20: mol_type = other RNA
atggagttacgctgccaaaa

SEQ ID NO: 23412 - RNA, 20 nt, synthetic construct
  source 1..20: mol_type = other RNA
atggataaggaaaatatgat

SEQ ID NO: 23413 - RNA, 20 nt, synthetic construct
  source 1..20: mol_type = other RNA
atggatatctggcctgcacc

SEQ ID NO: 23414 - RNA, 20 nt, synthetic construct
  source 1..20: mol_type = other RNA
atggatatttggccgggcgc

SEQ ID NO: 23415 - RNA, 20 nt, synthetic construct
  source 1..20: mol_type = other RNA
atggatcaaagacctaagct

SEQ ID NO: 23416 - RNA, 20 nt, synthetic construct
  source 1..20: mol_type = other RNA
atggatcaaggcacagtctg

SEQ ID NO: 23417 - RNA, 20 nt, synthetic construct
  source 1..20: mol_type = other RNA
atggatgtttttagagagat

SEQ ID NO: 23418 - RNA, 20 nt, synthetic construct
  source 1..20: mol_type = other RNA
atggatttttctgtttctgt

SEQ ID NO: 23419 - RNA, 20 nt, synthetic construct
  source 1..20: mol_type = other RNA
atggcaaacagactgagcca

SEQ ID NO: 23420 - RNA, 20 nt, synthetic construct
  source 1..20: mol_type = other RNA
atggcaacaatcaacaggta

SEQ ID NO: 23421 - RNA, 20 nt, synthetic construct
  source 1..20: mol_type = other RNA
atggcaaggctaacagccaa

SEQ ID NO: 23422 - RNA, 20 nt, synthetic construct
  source 1..20: mol_type = other RNA
atggcaagtttccattctct

SEQ ID NO: 23423 - RNA, 20 nt, synthetic construct
  source 1..20: mol_type = other RNA
atggcaattccataaatgtt

SEQ ID NO: 23424 - RNA, 20 nt, synthetic construct
  source 1..20: mol_type = other RNA
atggcacatactgcatattg

SEQ ID NO: 23425 - RNA, 20 nt, synthetic construct
  source 1..20: mol_type = other RNA
atggcaggcaccttcagaag

SEQ ID NO: 23426 - RNA, 20 nt, synthetic construct
  source 1..20: mol_type = other RNA
atggcaggtttcaagtgaac

SEQ ID NO: 23427 - RNA, 20 nt, synthetic construct
  source 1..20: mol_type = other RNA
atggcatcattcataaacac

SEQ ID NO: 23428 - RNA, 20 nt, synthetic construct
  source 1..20: mol_type = other RNA
atggcatcggggcctacagt

SEQ ID NO: 23429 - RNA, 20 nt, synthetic construct
  source 1..20: mol_type = other RNA
atggcatctttaagattttt

SEQ ID NO: 23430 - RNA, 20 nt, synthetic construct
  source 1..20: mol_type = other RNA
atggcatgaaatgggtttaa

SEQ ID NO: 23431 - RNA, 20 nt, synthetic construct
  source 1..20: mol_type = other RNA
atggcatgaacccaccagga

SEQ ID NO: 23432 - RNA, 20 nt, synthetic construct
  source 1..20: mol_type = other RNA
atggcatttgagggttagaa

SEQ ID NO: 23433 - RNA, 20 nt, synthetic construct
  source 1..20: mol_type = other RNA
atggccaagagttgctgact

SEQ ID NO: 23434 - RNA, 20 nt, synthetic construct
  source 1..20: mol_type = other RNA
atggccagtatctcctttcc

SEQ ID NO: 23435 - RNA, 20 nt, synthetic construct
  source 1..20: mol_type = other RNA
atggccagtcatgtggggac

SEQ ID NO: 23436 - RNA, 20 nt, synthetic construct
  source 1..20: mol_type = other RNA
atggccccaaaattacccca

SEQ ID NO: 23437 - RNA, 20 nt, synthetic construct
  source 1..20: mol_type = other RNA
atggccctgcgattggttgg

SEQ ID NO: 23438 - RNA, 20 nt, synthetic construct
  source 1..20: mol_type = other RNA
atggcccttaacttcacctc

SEQ ID NO: 23439 - RNA, 20 nt, synthetic construct
  source 1..20: mol_type = other RNA
atggcctaagatggaaagtg

SEQ ID NO: 23440 - RNA, 20 nt, synthetic construct
  source 1..20: mol_type = other RNA
atggcctccctcactaagtc

SEQ ID NO: 23441 - RNA, 20 nt, synthetic construct
  source 1..20: mol_type = other RNA
atggccttctttctttcaaa

SEQ ID NO: 23442 - RNA, 20 nt, synthetic construct
  source 1..20: mol_type = other RNA
atggcgactcatgcctgtaa

SEQ ID NO: 23443 - RNA, 20 nt, synthetic construct
  source 1..20: mol_type = other RNA
atggcggctttgtggagtgg

SEQ ID NO: 23444 - RNA, 20 nt, synthetic construct
  source 1..20: mol_type = other RNA
atggctagaaacttggattg

SEQ ID NO: 23445 - RNA, 20 nt, synthetic construct
  source 1..20: mol_type = other RNA
atggctataaccacgagtaa

SEQ ID NO: 23446 - RNA, 20 nt, synthetic construct
  source 1..20: mol_type = other RNA
atggctcaacgcctgtgatc

SEQ ID NO: 23447 - RNA, 20 nt, synthetic construct
  source 1..20: mol_type = other RNA
atggctgaaagagaaagaag

SEQ ID NO: 23448 - RNA, 20 nt, synthetic construct
  source 1..20: mol_type = other RNA
atggctggaatggtgaagaa

SEQ ID NO: 23449 - RNA, 20 nt, synthetic construct
  source 1..20: mol_type = other RNA
atggctgtactaagcctatg

SEQ ID NO: 23450 - RNA, 20 nt, synthetic construct
  source 1..20: mol_type = other RNA
atggcttaaggaaataaata

SEQ ID NO: 23451 - RNA, 20 nt, synthetic construct
  source 1..20: mol_type = other RNA
atggcttagaaatgaagatg

SEQ ID NO: 23452 - RNA, 20 nt, synthetic construct
  source 1..20: mol_type = other RNA
atggcttaggatcaccaaag

SEQ ID NO: 23453 - RNA, 20 nt, synthetic construct
  source 1..20: mol_type = other RNA
atggcttgagcccagggggt

SEQ ID NO: 23454 - RNA, 20 nt, synthetic construct
  source 1..20: mol_type = other RNA
atggcttttgagtgtaaggt

SEQ ID NO: 23455 - RNA, 20 nt, synthetic construct
  source 1..20: mol_type = other RNA
atggctttttacgatgaaat

SEQ ID NO: 23456 - RNA, 20 nt, synthetic construct
  source 1..20: mol_type = other RNA
atgggaaagacaggtagaca

SEQ ID NO: 23457 - RNA, 20 nt, synthetic construct
  source 1..20: mol_type = other RNA
atgggaaagtattcccaaga

SEQ ID NO: 23458 - RNA, 20 nt, synthetic construct
  source 1..20: mol_type = other RNA
atgggaaattagatgatgtt

SEQ ID NO: 23459 - RNA, 20 nt, synthetic construct
  source 1..20: mol_type = other RNA
atgggaagaaaaaataaagg

SEQ ID NO: 23460 - RNA, 20 nt, synthetic construct
  source 1..20: mol_type = other RNA
atgggaagatgctccctcta

SEQ ID NO: 23461 - RNA, 20 nt, synthetic construct
  source 1..20: mol_type = other RNA
atgggaatgcatatatctgt

SEQ ID NO: 23462 - RNA, 20 nt, synthetic construct
  source 1..20: mol_type = other RNA
atgggacaagtgggtggatg

SEQ ID NO: 23463 - RNA, 20 nt, synthetic construct
  source 1..20: mol_type = other RNA
atgggacttcactagtgggt

SEQ ID NO: 23464 - RNA, 20 nt, synthetic construct
  source 1..20: mol_type = other RNA
atgggagatggacactgcag

SEQ ID NO: 23465 - RNA, 20 nt, synthetic construct
  source 1..20: mol_type = other RNA
atgggagatgtgtaattgta

SEQ ID NO: 23466 - RNA, 20 nt, synthetic construct
  source 1..20: mol_type = other RNA
atgggagcatgcacacagga

SEQ ID NO: 23467 - RNA, 20 nt, synthetic construct
  source 1..20: mol_type = other RNA
atgggagccaaacttgaacc

SEQ ID NO: 23468 - RNA, 20 nt, synthetic construct
  source 1..20: mol_type = other RNA
atgggaggtaatactataag

SEQ ID NO: 23469 - RNA, 20 nt, synthetic construct
  source 1..20: mol_type = other RNA
atgggagtccctgctttcag

SEQ ID NO: 23470 - RNA, 20 nt, synthetic construct
  source 1..20: mol_type = other RNA
atgggatatctaacataatc

SEQ ID NO: 23471 - RNA, 20 nt, synthetic construct
  source 1..20: mol_type = other RNA
atgggatgcttaaagcgcta

SEQ ID NO: 23472 - RNA, 20 nt, synthetic construct
  source 1..20: mol_type = other RNA
atgggcacttgggatgtttc

SEQ ID NO: 23473 - RNA, 20 nt, synthetic construct
  source 1..20: mol_type = other RNA
atgggcagactccttcccct

SEQ ID NO: 23474 - RNA, 20 nt, synthetic construct
  source 1..20: mol_type = other RNA
atgggcatgggtccaagaca

SEQ ID NO: 23475 - RNA, 20 nt, synthetic construct
  source 1..20: mol_type = other RNA
atgggcattagaagttaaat

SEQ ID NO: 23476 - RNA, 20 nt, synthetic construct
  source 1..20: mol_type = other RNA
atgggcattccagagggtaa

SEQ ID NO: 23477 - RNA, 20 nt, synthetic construct
  source 1..20: mol_type = other RNA
atgggccaaagacagatctt

SEQ ID NO: 23478 - RNA, 20 nt, synthetic construct
  source 1..20: mol_type = other RNA
atgggccaaagacttcaacg

SEQ ID NO: 23479 - RNA, 20 nt, synthetic construct
  source 1..20: mol_type = other RNA
atgggcgtggagcggtgtct

SEQ ID NO: 23480 - RNA, 20 nt, synthetic construct
  source 1..20: mol_type = other RNA
atgggctaaataaaacatta

SEQ ID NO: 23481 - RNA, 20 nt, synthetic construct
  source 1..20: mol_type = other RNA
atggggaaatagatgcctag

SEQ ID NO: 23482 - RNA, 20 nt, synthetic construct
  source 1..20: mol_type = other RNA
atggggacttgctctcttgc

SEQ ID NO: 23483 - RNA, 20 nt, synthetic construct
  source 1..20: mol_type = other RNA
atggggagctagagggtaag

SEQ ID NO: 23484 - RNA, 20 nt, synthetic construct
  source 1..20: mol_type = other RNA
atggggagttttaggaaaat

SEQ ID NO: 23485 - RNA, 20 nt, synthetic construct
  source 1..20: mol_type = other RNA
atggggatatccaaagataa

SEQ ID NO: 23486 - RNA, 20 nt, synthetic construct
  source 1..20: mol_type = other RNA
atggggatgcaacaaatgtt

SEQ ID NO: 23487 - RNA, 20 nt, synthetic construct
  source 1..20: mol_type = other RNA
atggggattgagggttagat

SEQ ID NO: 23488 - RNA, 20 nt, synthetic construct
  source 1..20: mol_type = other RNA
atggggcaatctcagctcat

SEQ ID NO: 23489 - RNA, 20 nt, synthetic construct
  source 1..20: mol_type = other RNA
atggggctttactgtattag

SEQ ID NO: 23490 - RNA, 20 nt, synthetic construct
  source 1..20: mol_type = other RNA
atgggggacgacgtatgcaa

SEQ ID NO: 23491 - RNA, 20 nt, synthetic construct
  source 1..20: mol_type = other RNA
atgggggcgcgtgcctatgg

SEQ ID NO: 23492 - RNA, 20 nt, synthetic construct
  source 1..20: mol_type = other RNA
atgggggtaagattgtggtc

SEQ ID NO: 23493 - RNA, 20 nt, synthetic construct
  source 1..20: mol_type = other RNA
atggggtaattttggggcca

SEQ ID NO: 23494 - RNA, 20 nt, synthetic construct
  source 1..20: mol_type = other RNA
atggggtctcattgtgttgc

SEQ ID NO: 23495 - RNA, 20 nt, synthetic construct
  source 1..20: mol_type = other RNA
atggggtttgtccatgttgg

SEQ ID NO: 23496 - RNA, 20 nt, synthetic construct
  source 1..20: mol_type = other RNA
atgggtaaatttctaaaaac

SEQ ID NO: 23497 - RNA, 20 nt, synthetic construct
  source 1..20: mol_type = other RNA
atgggtacagggtttctgtt

SEQ ID NO: 23498 - RNA, 20 nt, synthetic construct
  source 1..20: mol_type = other RNA
atgggtcaaccactaaggtc

SEQ ID NO: 23499 - RNA, 20 nt, synthetic construct
  source 1..20: mol_type = other RNA
atgggtccaagacaggaaga

SEQ ID NO: 23500 - RNA, 20 nt, synthetic construct
  source 1..20: mol_type = other RNA
atgggtctccattttggtct

SEQ ID NO: 23501 - RNA, 20 nt, synthetic construct
  source 1..20: mol_type = other RNA
atgggtggaaattaaacaca

SEQ ID NO: 23502 - RNA, 20 nt, synthetic construct
  source 1..20: mol_type = other RNA
atgggtgtagggtttggcag

SEQ ID NO: 23503 - RNA, 20 nt, synthetic construct
  source 1..20: mol_type = other RNA
atgggttattcacccaagaa

SEQ ID NO: 23504 - RNA, 20 nt, synthetic construct
  source 1..20: mol_type = other RNA
atgggttgatttttaatgag

SEQ ID NO: 23505 - RNA, 20 nt, synthetic construct
  source 1..20: mol_type = other RNA
atgggttggaggagaaggcc

SEQ ID NO: 23506 - RNA, 20 nt, synthetic construct
  source 1..20: mol_type = other RNA
atgggtttaaaagagtgcac

SEQ ID NO: 23507 - RNA, 20 nt, synthetic construct
  source 1..20: mol_type = other RNA
atggtaaaacaaattccctc

SEQ ID NO: 23508 - RNA, 20 nt, synthetic construct
  source 1..20: mol_type = other RNA
atggtaaaatgtacataaca

SEQ ID NO: 23509 - RNA, 20 nt, synthetic construct
  source 1..20: mol_type = other RNA
atggtaaattggtcctggaa

SEQ ID NO: 23510 - RNA, 20 nt, synthetic construct
  source 1..20: mol_type = other RNA
atggtaacagccaaataaaa

SEQ ID NO: 23511 - RNA, 20 nt, synthetic construct
  source 1..20: mol_type = other RNA
atggtaactcctgttctttg

SEQ ID NO: 23512 - RNA, 20 nt, synthetic construct
  source 1..20: mol_type = other RNA
atggtaattggttcgtttga

SEQ ID NO: 23513 - RNA, 20 nt, synthetic construct
  source 1..20: mol_type = other RNA
atggtaatttgtccatctgg

SEQ ID NO: 23514 - RNA, 20 nt, synthetic construct
  source 1..20: mol_type = other RNA
atggtactgcctccacaggc

SEQ ID NO: 23515 - RNA, 20 nt, synthetic construct
  source 1..20: mol_type = other RNA
atggtagaccatataatcta

SEQ ID NO: 23516 - RNA, 20 nt, synthetic construct
  source 1..20: mol_type = other RNA
atggtagcttgggctaaggt

SEQ ID NO: 23517 - RNA, 20 nt, synthetic construct
  source 1..20: mol_type = other RNA
atggtaggtgctttttgtat

SEQ ID NO: 23518 - RNA, 20 nt, synthetic construct
  source 1..20: mol_type = other RNA
atggtagtcaacacttttcc

SEQ ID NO: 23519 - RNA, 20 nt, synthetic construct
  source 1..20: mol_type = other RNA
atggtatcaattgtaatgtc

SEQ ID NO: 23520 - RNA, 20 nt, synthetic construct
  source 1..20: mol_type = other RNA
atggtatcactttttgtatt

SEQ ID NO: 23521 - RNA, 20 nt, synthetic construct
  source 1..20: mol_type = other RNA
atggtatgtgccatctcctt

SEQ ID NO: 23522 - RNA, 20 nt, synthetic construct
  source 1..20: mol_type = other RNA
atggtcaaatcaatacttca

SEQ ID NO: 23523 - RNA, 20 nt, synthetic construct
  source 1..20: mol_type = other RNA
atggtcaacatgaaaagata

SEQ ID NO: 23524 - RNA, 20 nt, synthetic construct
  source 1..20: mol_type = other RNA
atggtcaatttcatcgtaaa

SEQ ID NO: 23525 - RNA, 20 nt, synthetic construct
  source 1..20: mol_type = other RNA
atggtcactgctgatgtaag

SEQ ID NO: 23526 - RNA, 20 nt, synthetic construct
  source 1..20: mol_type = other RNA
atggtcagagttgtatctgt

SEQ ID NO: 23527 - RNA, 20 nt, synthetic construct
  source 1..20: mol_type = other RNA
atggtcagtactatcttccc

SEQ ID NO: 23528 - RNA, 20 nt, synthetic construct
  source 1..20: mol_type = other RNA
atggtccacagaggcttttt

SEQ ID NO: 23529 - RNA, 20 nt, synthetic construct
  source 1..20: mol_type = other RNA
atggtccttgctgaagaata

SEQ ID NO: 23530 - RNA, 20 nt, synthetic construct
  source 1..20: mol_type = other RNA
atggtccttttttactgact

SEQ ID NO: 23531 - RNA, 20 nt, synthetic construct
  source 1..20: mol_type = other RNA
atggtctaccatgttgttct

SEQ ID NO: 23532 - RNA, 20 nt, synthetic construct
  source 1..20: mol_type = other RNA
atggtctcaatctcctgatc

SEQ ID NO: 23533 - RNA, 20 nt, synthetic construct
  source 1..20: mol_type = other RNA
atggtctttttccaggacca

SEQ ID NO: 23534 - RNA, 20 nt, synthetic construct
  source 1..20: mol_type = other RNA
atggtgaagaatgtgaaaaa

SEQ ID NO: 23535 - RNA, 20 nt, synthetic construct
  source 1..20: mol_type = other RNA
atggtgataactggtgcttt

SEQ ID NO: 23536 - RNA, 20 nt, synthetic construct
  source 1..20: mol_type = other RNA
atggtgatacctcttactaa

SEQ ID NO: 23537 - RNA, 20 nt, synthetic construct
  source 1..20: mol_type = other RNA
atggtgatgctaacgtgctt

SEQ ID NO: 23538 - RNA, 20 nt, synthetic construct
  source 1..20: mol_type = other RNA
atggtgcagccactatagaa

SEQ ID NO: 23539 - RNA, 20 nt, synthetic construct
  source 1..20: mol_type = other RNA
atggtgcaggccagatatcc

SEQ ID NO: 23540 - RNA, 20 nt, synthetic construct
  source 1..20: mol_type = other RNA
atggtgctgatttaaaattt

SEQ ID NO: 23541 - RNA, 20 nt, synthetic construct
  source 1..20: mol_type = other RNA
atggtgggagaggcatgccg

SEQ ID NO: 23542 - RNA, 20 nt, synthetic construct
  source 1..20: mol_type = other RNA
atggtgggatctctgggctc

SEQ ID NO: 23543 - RNA, 20 nt, synthetic construct
  source 1..20: mol_type = other RNA
atggtgggccttgcaagcca

SEQ ID NO: 23544 - RNA, 20 nt, synthetic construct
  source 1..20: mol_type = other RNA
atggtggtaggtgtgtgtaa

SEQ ID NO: 23545 - RNA, 20 nt, synthetic construct
  source 1..20: mol_type = other RNA
atggtgtaaaatacaacagc

SEQ ID NO: 23546 - RNA, 20 nt, synthetic construct
  source 1..20: mol_type = other RNA
atggtgtgaagttgggctta

SEQ ID NO: 23547 - RNA, 20 nt, synthetic construct
  source 1..20: mol_type = other RNA
atggtgtgtctgcgccttaa

SEQ ID NO: 23548 - RNA, 20 nt, synthetic construct
  source 1..20: mol_type = other RNA
atggtgttatttgttctgtc

SEQ ID NO: 23549 - RNA, 20 nt, synthetic construct
  source 1..20: mol_type = other RNA
atggttaagactgctgttta

SEQ ID NO: 23550 - RNA, 20 nt, synthetic construct
  source 1..20: mol_type = other RNA
atggttaatagtgacccttt

SEQ ID NO: 23551 - RNA, 20 nt, synthetic construct
  source 1..20: mol_type = other RNA
atggttagactgcacataaa

SEQ ID NO: 23552 - RNA, 20 nt, synthetic construct
  source 1..20: mol_type = other RNA
atggttcataatatatcaca

SEQ ID NO: 23553 - RNA, 20 nt, synthetic construct
  source 1..20: mol_type = other RNA
atggttcctagaaaatttaa

SEQ ID NO: 23554 - RNA, 20 nt, synthetic construct
  source 1..20: mol_type = other RNA
atggttctgtgctagatgct

SEQ ID NO: 23555 - RNA, 20 nt, synthetic construct
  source 1..20: mol_type = other RNA
atggttcttaagatgatata

SEQ ID NO: 23556 - RNA, 20 nt, synthetic construct
  source 1..20: mol_type = other RNA
atggttgaagaaagtaggaa

SEQ ID NO: 23557 - RNA, 20 nt, synthetic construct
  source 1..20: mol_type = other RNA
atggttgcacaatgttgtgg

SEQ ID NO: 23558 - RNA, 20 nt, synthetic construct
  source 1..20: mol_type = other RNA
atggttggaagtttctggaa

SEQ ID NO: 23559 - RNA, 20 nt, synthetic construct
  source 1..20: mol_type = other RNA
atggttggccgaggccagtc

SEQ ID NO: 23560 - RNA, 20 nt, synthetic construct
  source 1..20: mol_type = other RNA
atggttgttggctaaaagac

SEQ ID NO: 23561 - RNA, 20 nt, synthetic construct
  source 1..20: mol_type = other RNA
atggtttaacacatacaaac

SEQ ID NO: 23562 - RNA, 20 nt, synthetic construct
  source 1..20: mol_type = other RNA
atggtttaaggtaagggtcc

SEQ ID NO: 23563 - RNA, 20 nt, synthetic construct
  source 1..20: mol_type = other RNA
atggtttacaatggttcata

SEQ ID NO: 23564 - RNA, 20 nt, synthetic construct
  source 1..20: mol_type = other RNA
atggtttaggctgtctccaa

SEQ ID NO: 23565 - RNA, 20 nt, synthetic construct
  source 1..20: mol_type = other RNA
atggtttcataaaatgatgg

SEQ ID NO: 23566 - RNA, 20 nt, synthetic construct
  source 1..20: mol_type = other RNA
atggtttctccttctgcagg

SEQ ID NO: 23567 - RNA, 20 nt, synthetic construct
  source 1..20: mol_type = other RNA
atggtttctgacacccgacc

SEQ ID NO: 23568 - RNA, 20 nt, synthetic construct
  source 1..20: mol_type = other RNA
atggtttgatcccactagtg

SEQ ID NO: 23569 - RNA, 20 nt, synthetic construct
  source 1..20: mol_type = other RNA
atggtttgattgttccaggg

SEQ ID NO: 23570 - RNA, 20 nt, synthetic construct
  source 1..20: mol_type = other RNA
atggtttggggcttttgaac

SEQ ID NO: 23571 - RNA, 20 nt, synthetic construct
  source 1..20: mol_type = other RNA
atggttttaatgggcattag

SEQ ID NO: 23572 - RNA, 20 nt, synthetic construct
  source 1..20: mol_type = other RNA
atggttttatggtaactcct

SEQ ID NO: 23573 - RNA, 20 nt, synthetic construct
  source 1..20: mol_type = other RNA
atggttttcctactaacaag

SEQ ID NO: 23574 - RNA, 20 nt, synthetic construct
  source 1..20: mol_type = other RNA
atggttttttcccccctgga

SEQ ID NO: 23575 - RNA, 20 nt, synthetic construct
  source 1..20: mol_type = other RNA
atgtaaaaactgtttggctg

SEQ ID NO: 23576 - RNA, 20 nt, synthetic construct
  source 1..20: mol_type = other RNA
atgtaaaaatatagaaggcc

SEQ ID NO: 23577 - RNA, 20 nt, synthetic construct
  source 1..20: mol_type = other RNA
atgtaaaacagacccttatg

SEQ ID NO: 23578 - RNA, 20 nt, synthetic construct
  source 1..20: mol_type = other RNA
atgtaaaacatcaaagtccc

SEQ ID NO: 23579 - RNA, 20 nt, synthetic construct
  source 1..20: mol_type = other RNA
atgtaaacagcatactgtgg

SEQ ID NO: 23580 - RNA, 20 nt, synthetic construct
  source 1..20: mol_type = other RNA
atgtaaattcctaactcaag

SEQ ID NO: 23581 - RNA, 20 nt, synthetic construct
  source 1..20: mol_type = other RNA
atgtaaattctgccacattc

SEQ ID NO: 23582 - RNA, 20 nt, synthetic construct
  source 1..20: mol_type = other RNA
atgtaacacagttctagttc

SEQ ID NO: 23583 - RNA, 20 nt, synthetic construct
  source 1..20: mol_type = other RNA
atgtaactaattactgtttc

SEQ ID NO: 23584 - RNA, 20 nt, synthetic construct
  source 1..20: mol_type = other RNA
atgtaacttgcttaggctga

SEQ ID NO: 23585 - RNA, 20 nt, synthetic construct
  source 1..20: mol_type = other RNA
atgtaagacaatgtctttgg

SEQ ID NO: 23586 - RNA, 20 nt, synthetic construct
  source 1..20: mol_type = other RNA
atgtaaggtgcacgctgtga

SEQ ID NO: 23587 - RNA, 20 nt, synthetic construct
  source 1..20: mol_type = other RNA
atgtaagtgggaggaggtca

SEQ ID NO: 23588 - RNA, 20 nt, synthetic construct
  source 1..20: mol_type = other RNA
atgtaatctcatggaagtta

SEQ ID NO: 23589 - RNA, 20 nt, synthetic construct
  source 1..20: mol_type = other RNA
atgtaatgacctggaaatta

SEQ ID NO: 23590 - RNA, 20 nt, synthetic construct
  source 1..20: mol_type = other RNA
atgtaatgcaaactctaaat

SEQ ID NO: 23591 - RNA, 20 nt, synthetic construct
  source 1..20: mol_type = other RNA
atgtaatggatcaaggcaca

SEQ ID NO: 23592 - RNA, 20 nt, synthetic construct
  source 1..20: mol_type = other RNA
atgtaattacaggggacttt

SEQ ID NO: 23593 - RNA, 20 nt, synthetic construct
  source 1..20: mol_type = other RNA
atgtacaacattcatccctc

SEQ ID NO: 23594 - RNA, 20 nt, synthetic construct
  source 1..20: mol_type = other RNA
atgtacaatgaattagcaat

SEQ ID NO: 23595 - RNA, 20 nt, synthetic construct
  source 1..20: mol_type = other RNA
atgtacacgtcttgtcaata

SEQ ID NO: 23596 - RNA, 20 nt, synthetic construct
  source 1..20: mol_type = other RNA
atgtacatgacctatctatt

SEQ ID NO: 23597 - RNA, 20 nt, synthetic construct
  source 1..20: mol_type = other RNA
atgtacattttaccatatac

SEQ ID NO: 23598 - RNA, 20 nt, synthetic construct
  source 1..20: mol_type = other RNA
atgtacccaatggattataa

SEQ ID NO: 23599 - RNA, 20 nt, synthetic construct
  source 1..20: mol_type = other RNA
atgtacgccaattttcatag

SEQ ID NO: 23600 - RNA, 20 nt, synthetic construct
  source 1..20: mol_type = other RNA
atgtactacctatagaattc

SEQ ID NO: 23601 - RNA, 20 nt, synthetic construct
  source 1..20: mol_type = other RNA
atgtactggaagtgtaacat

SEQ ID NO: 23602 - RNA, 20 nt, synthetic construct
  source 1..20: mol_type = other RNA
atgtagaaggatatgttttc

SEQ ID NO: 23603 - RNA, 20 nt, synthetic construct
  source 1..20: mol_type = other RNA
atgtagagaaacaggattac

SEQ ID NO: 23604 - RNA, 20 nt, synthetic construct
  source 1..20: mol_type = other RNA
atgtagaggcagttgagttt

SEQ ID NO: 23605 - RNA, 20 nt, synthetic construct
  source 1..20: mol_type = other RNA
atgtagatatgggagtccct

SEQ ID NO: 23606 - RNA, 20 nt, synthetic construct
  source 1..20: mol_type = other RNA
atgtagatcaagtatttcct

SEQ ID NO: 23607 - RNA, 20 nt, synthetic construct
  source 1..20: mol_type = other RNA
atgtagatcctgaggaagct

SEQ ID NO: 23608 - RNA, 20 nt, synthetic construct
  source 1..20: mol_type = other RNA
atgtagctgggatggctgaa

SEQ ID NO: 23609 - RNA, 20 nt, synthetic construct
  source 1..20: mol_type = other RNA
atgtaggaaactttgcattc

SEQ ID NO: 23610 - RNA, 20 nt, synthetic construct
  source 1..20: mol_type = other RNA
atgtaggcacattcaagcag

SEQ ID NO: 23611 - RNA, 20 nt, synthetic construct
  source 1..20: mol_type = other RNA
atgtagggaatagacaaaga

SEQ ID NO: 23612 - RNA, 20 nt, synthetic construct
  source 1..20: mol_type = other RNA
atgtagggcaccgtgacaga

SEQ ID NO: 23613 - RNA, 20 nt, synthetic construct
  source 1..20: mol_type = other RNA
atgtaggtgtctgatgtgtg

SEQ ID NO: 23614 - RNA, 20 nt, synthetic construct
  source 1..20: mol_type = other RNA
atgtagttttccctgtgtat

SEQ ID NO: 23615 - RNA, 20 nt, synthetic construct
  source 1..20: mol_type = other RNA
atgtatatgctgtttttgaa

SEQ ID NO: 23616 - RNA, 20 nt, synthetic construct
  source 1..20: mol_type = other RNA
atgtatgattttctaggaaa

SEQ ID NO: 23617 - RNA, 20 nt, synthetic construct
  source 1..20: mol_type = other RNA
atgtatgtttctcattcttc

SEQ ID NO: 23618 - RNA, 20 nt, synthetic construct
  source 1..20: mol_type = other RNA
atgtatgttttagccttaaa

SEQ ID NO: 23619 - RNA, 20 nt, synthetic construct
  source 1..20: mol_type = other RNA
atgtattttcctaaccactg

SEQ ID NO: 23620 - RNA, 20 nt, synthetic construct
  source 1..20: mol_type = other RNA
atgtcaaatttttcacattc

SEQ ID NO: 23621 - RNA, 20 nt, synthetic construct
  source 1..20: mol_type = other RNA
atgtcaacaaaatactagca

SEQ ID NO: 23622 - RNA, 20 nt, synthetic construct
  source 1..20: mol_type = other RNA
atgtcaacattaagggaaac

SEQ ID NO: 23623 - RNA, 20 nt, synthetic construct
  source 1..20: mol_type = other RNA
atgtcaactgaggcagagta

SEQ ID NO: 23624 - RNA, 20 nt, synthetic construct
  source 1..20: mol_type = other RNA
atgtcaagaatgaagtcaga

SEQ ID NO: 23625 - RNA, 20 nt, synthetic construct
  source 1..20: mol_type = other RNA
atgtcaagctgtttgagctg

SEQ ID NO: 23626 - RNA, 20 nt, synthetic construct
  source 1..20: mol_type = other RNA
atgtcaattttcccccaatt

SEQ ID NO: 23627 - RNA, 20 nt, synthetic construct
  source 1..20: mol_type = other RNA
atgtcacaagccagggtctg

SEQ ID NO: 23628 - RNA, 20 nt, synthetic construct
  source 1..20: mol_type = other RNA
atgtcacattttcttatcta

SEQ ID NO: 23629 - RNA, 20 nt, synthetic construct
  source 1..20: mol_type = other RNA
atgtcactgtaagaataatg

SEQ ID NO: 23630 - RNA, 20 nt, synthetic construct
  source 1..20: mol_type = other RNA
atgtcagactcattgcctat

SEQ ID NO: 23631 - RNA, 20 nt, synthetic construct
  source 1..20: mol_type = other RNA
atgtcagagacacatactga

SEQ ID NO: 23632 - RNA, 20 nt, synthetic construct
  source 1..20: mol_type = other RNA
atgtcagagatctgaaattg

SEQ ID NO: 23633 - RNA, 20 nt, synthetic construct
  source 1..20: mol_type = other RNA
atgtcagatggtaaattggt

SEQ ID NO: 23634 - RNA, 20 nt, synthetic construct
  source 1..20: mol_type = other RNA
atgtcagccacaagacataa

SEQ ID NO: 23635 - RNA, 20 nt, synthetic construct
  source 1..20: mol_type = other RNA
atgtcagtcaacacactagc

SEQ ID NO: 23636 - RNA, 20 nt, synthetic construct
  source 1..20: mol_type = other RNA
atgtcatcttctctctctgc

SEQ ID NO: 23637 - RNA, 20 nt, synthetic construct
  source 1..20: mol_type = other RNA
atgtcatgggccgggcgtag

SEQ ID NO: 23638 - RNA, 20 nt, synthetic construct
  source 1..20: mol_type = other RNA
atgtcatgtatatgctgttt

SEQ ID NO: 23639 - RNA, 20 nt, synthetic construct
  source 1..20: mol_type = other RNA
atgtcatgttcccggattgg

SEQ ID NO: 23640 - RNA, 20 nt, synthetic construct
  source 1..20: mol_type = other RNA
atgtccagaggaggaagaga

SEQ ID NO: 23641 - RNA, 20 nt, synthetic construct
  source 1..20: mol_type = other RNA
atgtccagcccccagttttg

SEQ ID NO: 23642 - RNA, 20 nt, synthetic construct
  source 1..20: mol_type = other RNA
atgtccatagttaatgtgtg

SEQ ID NO: 23643 - RNA, 20 nt, synthetic construct
  source 1..20: mol_type = other RNA
atgtccatcaggaaaaccag

SEQ ID NO: 23644 - RNA, 20 nt, synthetic construct
  source 1..20: mol_type = other RNA
atgtccatcgagagatgaat

SEQ ID NO: 23645 - RNA, 20 nt, synthetic construct
  source 1..20: mol_type = other RNA
atgtcccctggagttaattc

SEQ ID NO: 23646 - RNA, 20 nt, synthetic construct
  source 1..20: mol_type = other RNA
atgtcccctggggcctcagc

SEQ ID NO: 23647 - RNA, 20 nt, synthetic construct
  source 1..20: mol_type = other RNA
atgtcccctgtccaagtatt

SEQ ID NO: 23648 - RNA, 20 nt, synthetic construct
  source 1..20: mol_type = other RNA
atgtccgttgaagtctttgg

SEQ ID NO: 23649 - RNA, 20 nt, synthetic construct
  source 1..20: mol_type = other RNA
atgtcctcacctcacattca

SEQ ID NO: 23650 - RNA, 20 nt, synthetic construct
  source 1..20: mol_type = other RNA
atgtccttaatgccaccgaa

SEQ ID NO: 23651 - RNA, 20 nt, synthetic construct
  source 1..20: mol_type = other RNA
atgtccttttcctgttccgg

SEQ ID NO: 23652 - RNA, 20 nt, synthetic construct
  source 1..20: mol_type = other RNA
atgtccttttgagtttggtg

SEQ ID NO: 23653 - RNA, 20 nt, synthetic construct
  source 1..20: mol_type = other RNA
atgtcgcatgaaaacagcta

SEQ ID NO: 23654 - RNA, 20 nt, synthetic construct
  source 1..20: mol_type = other RNA
atgtctaaagtattgtttca

SEQ ID NO: 23655 - RNA, 20 nt, synthetic construct
  source 1..20: mol_type = other RNA
atgtctacctgtctttccca

SEQ ID NO: 23656 - RNA, 20 nt, synthetic construct
  source 1..20: mol_type = other RNA
atgtctcagatgtctccatt

SEQ ID NO: 23657 - RNA, 20 nt, synthetic construct
  source 1..20: mol_type = other RNA
atgtctcattgtggatgaga

SEQ ID NO: 23658 - RNA, 20 nt, synthetic construct
  source 1..20: mol_type = other RNA
atgtctccattttgccagct

SEQ ID NO: 23659 - RNA, 20 nt, synthetic construct
  source 1..20: mol_type = other RNA
atgtctcctctttcatatct

SEQ ID NO: 23660 - RNA, 20 nt, synthetic construct
  source 1..20: mol_type = other RNA
atgtctgcaggagccttgct

SEQ ID NO: 23661 - RNA, 20 nt, synthetic construct
  source 1..20: mol_type = other RNA
atgtctggtttgctttggag

SEQ ID NO: 23662 - RNA, 20 nt, synthetic construct
  source 1..20: mol_type = other RNA
atgtctgtagttacaactac

SEQ ID NO: 23663 - RNA, 20 nt, synthetic construct
  source 1..20: mol_type = other RNA
atgtctgtctgttcacattt

SEQ ID NO: 23664 - RNA, 20 nt, synthetic construct
  source 1..20: mol_type = other RNA
atgtctgtgtagttcatcag

SEQ ID NO: 23665 - RNA, 20 nt, synthetic construct
  source 1..20: mol_type = other RNA
atgtcttaagaaggaaaaga

SEQ ID NO: 23666 - RNA, 20 nt, synthetic construct
  source 1..20: mol_type = other RNA
atgtcttcagaggccctggt

SEQ ID NO: 23667 - RNA, 20 nt, synthetic construct
  source 1..20: mol_type = other RNA
atgtcttcttggattttctt

SEQ ID NO: 23668 - RNA, 20 nt, synthetic construct
  source 1..20: mol_type = other RNA
atgtcttggctattgtcagt

SEQ ID NO: 23669 - RNA, 20 nt, synthetic construct
  source 1..20: mol_type = other RNA
atgtcttggtgtgctctttt

SEQ ID NO: 23670 - RNA, 20 nt, synthetic construct
  source 1..20: mol_type = other RNA
atgtcttgtggctgacatgt

SEQ ID NO: 23671 - RNA, 20 nt, synthetic construct
  source 1..20: mol_type = other RNA
atgtctttggctcttagaaa

SEQ ID NO: 23672 - RNA, 20 nt, synthetic construct
  source 1..20: mol_type = other RNA
atgtctttgggaaggccctg

SEQ ID NO: 23673 - RNA, 20 nt, synthetic construct
  source 1..20: mol_type = other RNA
atgtcttttaacttgctttg

SEQ ID NO: 23674 - RNA, 20 nt, synthetic construct
  source 1..20: mol_type = other RNA
atgtcttttgaagaagttct

SEQ ID NO: 23675 - RNA, 20 nt, synthetic construct
  source 1..20: mol_type = other RNA
atgtctttttacacttggag

SEQ ID NO: 23676 - RNA, 20 nt, synthetic construct
  source 1..20: mol_type = other RNA
atgtgaaaaatttgacatga

SEQ ID NO: 23677 - RNA, 20 nt, synthetic construct
  source 1..20: mol_type = other RNA
atgtgaaaagaaaaaggtta

SEQ ID NO: 23678 - RNA, 20 nt, synthetic construct
  source 1..20: mol_type = other RNA
atgtgaaaatactaacgatc

SEQ ID NO: 23679 - RNA, 20 nt, synthetic construct
  source 1..20: mol_type = other RNA
atgtgaaagtagaggactgc

SEQ ID NO: 23680 - RNA, 20 nt, synthetic construct
  source 1..20: mol_type = other RNA
atgtgaacagacagacatgc

SEQ ID NO: 23681 - RNA, 20 nt, synthetic construct
  source 1..20: mol_type = other RNA
atgtgaattagatggcttag

SEQ ID NO: 23682 - RNA, 20 nt, synthetic construct
  source 1..20: mol_type = other RNA
atgtgacaaacacttttcaa

SEQ ID NO: 23683 - RNA, 20 nt, synthetic construct
  source 1..20: mol_type = other RNA
atgtgacagaacaaactcaa

SEQ ID NO: 23684 - RNA, 20 nt, synthetic construct
  source 1..20: mol_type = other RNA
atgtgacagaatgcatcttt

SEQ ID NO: 23685 - RNA, 20 nt, synthetic construct
  source 1..20: mol_type = other RNA
atgtgacattagtggtggta

SEQ ID NO: 23686 - RNA, 20 nt, synthetic construct
  source 1..20: mol_type = other RNA
atgtgacctgtccttgtgtt

SEQ ID NO: 23687 - RNA, 20 nt, synthetic construct
  source 1..20: mol_type = other RNA
atgtgactagaagaaatgtt

SEQ ID NO: 23688 - RNA, 20 nt, synthetic construct
  source 1..20: mol_type = other RNA
atgtgacttcgtcaagggga

SEQ ID NO: 23689 - RNA, 20 nt, synthetic construct
  source 1..20: mol_type = other RNA
atgtgagcatttagccccct

SEQ ID NO: 23690 - RNA, 20 nt, synthetic construct
  source 1..20: mol_type = other RNA
atgtgagccacatacatagt

SEQ ID NO: 23691 - RNA, 20 nt, synthetic construct
  source 1..20: mol_type = other RNA
atgtgagcccccacgcccgg

SEQ ID NO: 23692 - RNA, 20 nt, synthetic construct
  source 1..20: mol_type = other RNA
atgtgaggatctgttggtgc

SEQ ID NO: 23693 - RNA, 20 nt, synthetic construct
  source 1..20: mol_type = other RNA
atgtgaggtgaggacatgga

SEQ ID NO: 23694 - RNA, 20 nt, synthetic construct
  source 1..20: mol_type = other RNA
atgtgatatgccacattttt

SEQ ID NO: 23695 - RNA, 20 nt, synthetic construct
  source 1..20: mol_type = other RNA
atgtgatggcatcattcata

SEQ ID NO: 23696 - RNA, 20 nt, synthetic construct
  source 1..20: mol_type = other RNA
atgtgcaaggagagaaaaac

SEQ ID NO: 23697 - RNA, 20 nt, synthetic construct
  source 1..20: mol_type = other RNA
atgtgcaagttctctttttt

SEQ ID NO: 23698 - RNA, 20 nt, synthetic construct
  source 1..20: mol_type = other RNA
atgtgcacctccagtgtcct

SEQ ID NO: 23699 - RNA, 20 nt, synthetic construct
  source 1..20: mol_type = other RNA
atgtgcactcttttaaaccc

SEQ ID NO: 23700 - RNA, 20 nt, synthetic construct
  source 1..20: mol_type = other RNA
atgtgcaggaaacttccaga

SEQ ID NO: 23701 - RNA, 20 nt, synthetic construct
  source 1..20: mol_type = other RNA
atgtgcagtctaaccattaa

SEQ ID NO: 23702 - RNA, 20 nt, synthetic construct
  source 1..20: mol_type = other RNA
atgtgccatctccttaatcc

SEQ ID NO: 23703 - RNA, 20 nt, synthetic construct
  source 1..20: mol_type = other RNA
atgtgcctacatagtccact

SEQ ID NO: 23704 - RNA, 20 nt, synthetic construct
  source 1..20: mol_type = other RNA
atgtgctgtccatttcctta

SEQ ID NO: 23705 - RNA, 20 nt, synthetic construct
  source 1..20: mol_type = other RNA
atgtgcttaatcttcacact

SEQ ID NO: 23706 - RNA, 20 nt, synthetic construct
  source 1..20: mol_type = other RNA
atgtgcttcctaaacctgct

SEQ ID NO: 23707 - RNA, 20 nt, synthetic construct
  source 1..20: mol_type = other RNA
atgtgctttctcaacactgt

SEQ ID NO: 23708 - RNA, 20 nt, synthetic construct
  source 1..20: mol_type = other RNA
atgtggaaaaatataggaac

SEQ ID NO: 23709 - RNA, 20 nt, synthetic construct
  source 1..20: mol_type = other RNA
atgtggaaaatgtatgattt

SEQ ID NO: 23710 - RNA, 20 nt, synthetic construct
  source 1..20: mol_type = other RNA
atgtggaacataatctttgg

SEQ ID NO: 23711 - RNA, 20 nt, synthetic construct
  source 1..20: mol_type = other RNA
atgtggaagcagaactaaga

SEQ ID NO: 23712 - RNA, 20 nt, synthetic construct
  source 1..20: mol_type = other RNA
atgtggagataaagagcagg

SEQ ID NO: 23713 - RNA, 20 nt, synthetic construct
  source 1..20: mol_type = other RNA
atgtggagttggtgcaagga

SEQ ID NO: 23714 - RNA, 20 nt, synthetic construct
  source 1..20: mol_type = other RNA
atgtggatagtgctttttac

SEQ ID NO: 23715 - RNA, 20 nt, synthetic construct
  source 1..20: mol_type = other RNA
atgtggatgcatgaggcata

SEQ ID NO: 23716 - RNA, 20 nt, synthetic construct
  source 1..20: mol_type = other RNA
atgtggcaaatttatgtgaa

SEQ ID NO: 23717 - RNA, 20 nt, synthetic construct
  source 1..20: mol_type = other RNA
atgtggcagaatttacattt

SEQ ID NO: 23718 - RNA, 20 nt, synthetic construct
  source 1..20: mol_type = other RNA
atgtggcatttcttacacat

SEQ ID NO: 23719 - RNA, 20 nt, synthetic construct
  source 1..20: mol_type = other RNA
atgtggccaggaggaggagg

SEQ ID NO: 23720 - RNA, 20 nt, synthetic construct
  source 1..20: mol_type = other RNA
atgtggcttgcaaggcccac

SEQ ID NO: 23721 - RNA, 20 nt, synthetic construct
  source 1..20: mol_type = other RNA
atgtggcttgtggctacacc

SEQ ID NO: 23722 - RNA, 20 nt, synthetic construct
  source 1..20: mol_type = other RNA
atgtggggaatgctcataat

SEQ ID NO: 23723 - RNA, 20 nt, synthetic construct
  source 1..20: mol_type = other RNA
atgtggggactttgtggcct

SEQ ID NO: 23724 - RNA, 20 nt, synthetic construct
  source 1..20: mol_type = other RNA
atgtggtcacactttttgtg

SEQ ID NO: 23725 - RNA, 20 nt, synthetic construct
  source 1..20: mol_type = other RNA
atgtggtggtatgcactgta

SEQ ID NO: 23726 - RNA, 20 nt, synthetic construct
  source 1..20: mol_type = other RNA
atgtggtgtggcatgtctgt

SEQ ID NO: 23727 - RNA, 20 nt, synthetic construct
  source 1..20: mol_type = other RNA
atgtggttattgagtctgta

SEQ ID NO: 23728 - RNA, 20 nt, synthetic construct
  source 1..20: mol_type = other RNA
atgtggtttttggttcactt

SEQ ID NO: 23729 - RNA, 20 nt, synthetic construct
  source 1..20: mol_type = other RNA
atgtgtaaaacatctggaag

SEQ ID NO: 23730 - RNA, 20 nt, synthetic construct
  source 1..20: mol_type = other RNA
atgtgtaagaaatgccacat

SEQ ID NO: 23731 - RNA, 20 nt, synthetic construct
  source 1..20: mol_type = other RNA
atgtgtaattgtaccttgga

SEQ ID NO: 23732 - RNA, 20 nt, synthetic construct
  source 1..20: mol_type = other RNA
atgtgtacaatggggcttta

SEQ ID NO: 23733 - RNA, 20 nt, synthetic construct
  source 1..20: mol_type = other RNA
atgtgtaccaaaagtcctgt

SEQ ID NO: 23734 - RNA, 20 nt, synthetic construct
  source 1..20: mol_type = other RNA
atgtgtacccgtgtgttttg

SEQ ID NO: 23735 - RNA, 20 nt, synthetic construct
  source 1..20: mol_type = other RNA
atgtgtaggaaggaacacac

SEQ ID NO: 23736 - RNA, 20 nt, synthetic construct
  source 1..20: mol_type = other RNA
atgtgtagtcagtgaagatg

SEQ ID NO: 23737 - RNA, 20 nt, synthetic construct
  source 1..20: mol_type = other RNA
atgtgtagttattattgtca

SEQ ID NO: 23738 - RNA, 20 nt, synthetic construct
  source 1..20: mol_type = other RNA
atgtgtagttctggtgtcgt

SEQ ID NO: 23739 - RNA, 20 nt, synthetic construct
  source 1..20: mol_type = other RNA
atgtgtatgatcaaagtgaa

SEQ ID NO: 23740 - RNA, 20 nt, synthetic construct
  source 1..20: mol_type = other RNA
atgtgtatgttacacttcca

SEQ ID NO: 23741 - RNA, 20 nt, synthetic construct
  source 1..20: mol_type = other RNA
atgtgtatttagggagcata

SEQ ID NO: 23742 - RNA, 20 nt, synthetic construct
  source 1..20: mol_type = other RNA
atgtgtctagtgaatgagac

SEQ ID NO: 23743 - RNA, 20 nt, synthetic construct
  source 1..20: mol_type = other RNA
atgtgtctctgacatgagag

SEQ ID NO: 23744 - RNA, 20 nt, synthetic construct
  source 1..20: mol_type = other RNA
atgtgtgaagaaggaatgtg

SEQ ID NO: 23745 - RNA, 20 nt, synthetic construct
  source 1..20: mol_type = other RNA
atgtgtgcacaacacatgca

SEQ ID NO: 23746 - RNA, 20 nt, synthetic construct
  source 1..20: mol_type = other RNA
atgtgtgcttacacacacgt

SEQ ID NO: 23747 - RNA, 20 nt, synthetic construct
  source 1..20: mol_type = other RNA
atgtgtgtataacccgtttt

SEQ ID NO: 23748 - RNA, 20 nt, synthetic construct
  source 1..20: mol_type = other RNA
atgtgtgtctctgctctcaa

SEQ ID NO: 23749 - RNA, 20 nt, synthetic construct
  source 1..20: mol_type = other RNA
atgtgtgttccagacaaaaa

SEQ ID NO: 23750 - RNA, 20 nt, synthetic construct
  source 1..20: mol_type = other RNA
atgtgttaaaccattcttgc

SEQ ID NO: 23751 - RNA, 20 nt, synthetic construct
  source 1..20: mol_type = other RNA
atgtgttacaactctaataa

SEQ ID NO: 23752 - RNA, 20 nt, synthetic construct
  source 1..20: mol_type = other RNA
atgtgttgaccttagtggtt

SEQ ID NO: 23753 - RNA, 20 nt, synthetic construct
  source 1..20: mol_type = other RNA
atgtgttgataaatatgtgt

SEQ ID NO: 23754 - RNA, 20 nt, synthetic construct
  source 1..20: mol_type = other RNA
atgtgttggcactgaagcca

SEQ ID NO: 23755 - RNA, 20 nt, synthetic construct
  source 1..20: mol_type = other RNA
atgtgttgtctgattcagtt

SEQ ID NO: 23756 - RNA, 20 nt, synthetic construct
  source 1..20: mol_type = other RNA
atgtgttgtgcacacatcca

SEQ ID NO: 23757 - RNA, 20 nt, synthetic construct
  source 1..20: mol_type = other RNA
atgtgttttatttaggccct

SEQ ID NO: 23758 - RNA, 20 nt, synthetic construct
  source 1..20: mol_type = other RNA
atgttaacaattggtgaatc

SEQ ID NO: 23759 - RNA, 20 nt, synthetic construct
  source 1..20: mol_type = other RNA
atgttaagattcaacaaaac

SEQ ID NO: 23760 - RNA, 20 nt, synthetic construct
  source 1..20: mol_type = other RNA
atgttaagcccaacttcaca

SEQ ID NO: 23761 - RNA, 20 nt, synthetic construct
  source 1..20: mol_type = other RNA
atgttaagtgtttgaaaagt

SEQ ID NO: 23762 - RNA, 20 nt, synthetic construct
  source 1..20: mol_type = other RNA
atgttaataaccctgttttg

SEQ ID NO: 23763 - RNA, 20 nt, synthetic construct
  source 1..20: mol_type = other RNA
atgttacacttccagtacat

SEQ ID NO: 23764 - RNA, 20 nt, synthetic construct
  source 1..20: mol_type = other RNA
atgttactcattatggttgt

SEQ ID NO: 23765 - RNA, 20 nt, synthetic construct
  source 1..20: mol_type = other RNA
atgttacttctcagctatag

SEQ ID NO: 23766 - RNA, 20 nt, synthetic construct
  source 1..20: mol_type = other RNA
atgttagaattcaggacagt

SEQ ID NO: 23767 - RNA, 20 nt, synthetic construct
  source 1..20: mol_type = other RNA
atgttagatatcccatataa

SEQ ID NO: 23768 - RNA, 20 nt, synthetic construct
  source 1..20: mol_type = other RNA
atgttagattaggaaacaga

SEQ ID NO: 23769 - RNA, 20 nt, synthetic construct
  source 1..20: mol_type = other RNA
atgttagcataattcgaaat

SEQ ID NO: 23770 - RNA, 20 nt, synthetic construct
  source 1..20: mol_type = other RNA
atgttaggttgaaagttcag

SEQ ID NO: 23771 - RNA, 20 nt, synthetic construct
  source 1..20: mol_type = other RNA
atgttataatgagatagacc

SEQ ID NO: 23772 - RNA, 20 nt, synthetic construct
  source 1..20: mol_type = other RNA
atgttatatttccgtatcca

SEQ ID NO: 23773 - RNA, 20 nt, synthetic construct
  source 1..20: mol_type = other RNA
atgttatgaagcttttctcc

SEQ ID NO: 23774 - RNA, 20 nt, synthetic construct
  source 1..20: mol_type = other RNA
atgttatgccccctcttctc

SEQ ID NO: 23775 - RNA, 20 nt, synthetic construct
  source 1..20: mol_type = other RNA
atgttatttggggattctgc

SEQ ID NO: 23776 - RNA, 20 nt, synthetic construct
  source 1..20: mol_type = other RNA
atgttcaaccctcggcctct

SEQ ID NO: 23777 - RNA, 20 nt, synthetic construct
  source 1..20: mol_type = other RNA
atgttcaaggtgttcctgaa

SEQ ID NO: 23778 - RNA, 20 nt, synthetic construct
  source 1..20: mol_type = other RNA
atgttcaagtatttccacgg

SEQ ID NO: 23779 - RNA, 20 nt, synthetic construct
  source 1..20: mol_type = other RNA
atgttcactgcagaattact

SEQ ID NO: 23780 - RNA, 20 nt, synthetic construct
  source 1..20: mol_type = other RNA
atgttcagatagaaaagaca

SEQ ID NO: 23781 - RNA, 20 nt, synthetic construct
  source 1..20: mol_type = other RNA
atgttcagtttatgggtcaa

SEQ ID NO: 23782 - RNA, 20 nt, synthetic construct
  source 1..20: mol_type = other RNA
atgttcatacaatagtttag

SEQ ID NO: 23783 - RNA, 20 nt, synthetic construct
  source 1..20: mol_type = other RNA
atgttcatgaaccttcacca

SEQ ID NO: 23784 - RNA, 20 nt, synthetic construct
  source 1..20: mol_type = other RNA
atgttcatgggaagatgctc

SEQ ID NO: 23785 - RNA, 20 nt, synthetic construct
  source 1..20: mol_type = other RNA
atgttccacatgttactcat

SEQ ID NO: 23786 - RNA, 20 nt, synthetic construct
  source 1..20: mol_type = other RNA
atgttcccggattggaaaac

SEQ ID NO: 23787 - RNA, 20 nt, synthetic construct
  source 1..20: mol_type = other RNA
atgttccctagaacttaaaa

SEQ ID NO: 23788 - RNA, 20 nt, synthetic construct
  source 1..20: mol_type = other RNA
atgttccctcttcaatattt

SEQ ID NO: 23789 - RNA, 20 nt, synthetic construct
  source 1..20: mol_type = other RNA
atgttcctatatttttccac

SEQ ID NO: 23790 - RNA, 20 nt, synthetic construct
  source 1..20: mol_type = other RNA
atgttctaaagttagaagta

SEQ ID NO: 23791 - RNA, 20 nt, synthetic construct
  source 1..20: mol_type = other RNA
atgttctcttttcctcgttt

SEQ ID NO: 23792 - RNA, 20 nt, synthetic construct
  source 1..20: mol_type = other RNA
atgttctttatagcatttga

SEQ ID NO: 23793 - RNA, 20 nt, synthetic construct
  source 1..20: mol_type = other RNA
atgttgacatcttgcataac

SEQ ID NO: 23794 - RNA, 20 nt, synthetic construct
  source 1..20: mol_type = other RNA
atgttgaccatttttatatc

SEQ ID NO: 23795 - RNA, 20 nt, synthetic construct
  source 1..20: mol_type = other RNA
atgttgagtatcttttcatg

SEQ ID NO: 23796 - RNA, 20 nt, synthetic construct
  source 1..20: mol_type = other RNA
atgttgagtcttgtttaccc

SEQ ID NO: 23797 - RNA, 20 nt, synthetic construct
  source 1..20: mol_type = other RNA
atgttgatgtaatggatcaa

SEQ ID NO: 23798 - RNA, 20 nt, synthetic construct
  source 1..20: mol_type = other RNA
atgttgattttgaggcagag

SEQ ID NO: 23799 - RNA, 20 nt, synthetic construct
  source 1..20: mol_type = other RNA
atgttgcacaaaagtgaaaa

SEQ ID NO: 23800 - RNA, 20 nt, synthetic construct
  source 1..20: mol_type = other RNA
atgttgcagagactggatag

SEQ ID NO: 23801 - RNA, 20 nt, synthetic construct
  source 1..20: mol_type = other RNA
atgttgccaatatctatcag

SEQ ID NO: 23802 - RNA, 20 nt, synthetic construct
  source 1..20: mol_type = other RNA
atgttgcctactagccagtg

SEQ ID NO: 23803 - RNA, 20 nt, synthetic construct
  source 1..20: mol_type = other RNA
atgttgcggtgagcagagat

SEQ ID NO: 23804 - RNA, 20 nt, synthetic construct
  source 1..20: mol_type = other RNA
atgttgctttgcgaaatagt

SEQ ID NO: 23805 - RNA, 20 nt, synthetic construct
  source 1..20: mol_type = other RNA
atgttggatagtttctcaac

SEQ ID NO: 23806 - RNA, 20 nt, synthetic construct
  source 1..20: mol_type = other RNA
atgttgggccaacttccagc

SEQ ID NO: 23807 - RNA, 20 nt, synthetic construct
  source 1..20: mol_type = other RNA
atgttgggtaaaaataatca

SEQ ID NO: 23808 - RNA, 20 nt, synthetic construct
  source 1..20: mol_type = other RNA
atgttggtgagaacccagtg

SEQ ID NO: 23809 - RNA, 20 nt, synthetic construct
  source 1..20: mol_type = other RNA
atgttggttagtgttgtttt

SEQ ID NO: 23810 - RNA, 20 nt, synthetic construct
  source 1..20: mol_type = other RNA
atgttgtggatgtccttaat

SEQ ID NO: 23811 - RNA, 20 nt, synthetic construct
  source 1..20: mol_type = other RNA
atgttgtgtagaaatgtgga

SEQ ID NO: 23812 - RNA, 20 nt, synthetic construct
  source 1..20: mol_type = other RNA
atgttgtgttttcattcgtt

SEQ ID NO: 23813 - RNA, 20 nt, synthetic construct
  source 1..20: mol_type = other RNA
atgttgttcttttcaaaaac

SEQ ID NO: 23814 - RNA, 20 nt, synthetic construct
  source 1..20: mol_type = other RNA
atgttgttgaatgtggcaga

SEQ ID NO: 23815 - RNA, 20 nt, synthetic construct
  source 1..20: mol_type = other RNA
atgtttaactatcctatgtg

SEQ ID NO: 23816 - RNA, 20 nt, synthetic construct
  source 1..20: mol_type = other RNA
atgtttaattacccaggcat

SEQ ID NO: 23817 - RNA, 20 nt, synthetic construct
  source 1..20: mol_type = other RNA
atgtttaattcctactttct

SEQ ID NO: 23818 - RNA, 20 nt, synthetic construct
  source 1..20: mol_type = other RNA
atgtttacagaaatatacct

SEQ ID NO: 23819 - RNA, 20 nt, synthetic construct
  source 1..20: mol_type = other RNA
atgtttagcaagattactgg

SEQ ID NO: 23820 - RNA, 20 nt, synthetic construct
  source 1..20: mol_type = other RNA
atgtttagcggaatgactat

SEQ ID NO: 23821 - RNA, 20 nt, synthetic construct
  source 1..20: mol_type = other RNA
atgtttccataaaaagcgtt

SEQ ID NO: 23822 - RNA, 20 nt, synthetic construct
  source 1..20: mol_type = other RNA
atgtttctacctttggctac

SEQ ID NO: 23823 - RNA, 20 nt, synthetic construct
  source 1..20: mol_type = other RNA
atgtttctcattcttctcta

SEQ ID NO: 23824 - RNA, 20 nt, synthetic construct
  source 1..20: mol_type = other RNA
atgtttctcctgcatgggga

SEQ ID NO: 23825 - RNA, 20 nt, synthetic construct
  source 1..20: mol_type = other RNA
atgtttgaattttccattca

SEQ ID NO: 23826 - RNA, 20 nt, synthetic construct
  source 1..20: mol_type = other RNA
atgtttgattagttgactcc

SEQ ID NO: 23827 - RNA, 20 nt, synthetic construct
  source 1..20: mol_type = other RNA
atgtttgctaataatgatga

SEQ ID NO: 23828 - RNA, 20 nt, synthetic construct
  source 1..20: mol_type = other RNA
atgtttggctccttaccact

SEQ ID NO: 23829 - RNA, 20 nt, synthetic construct
  source 1..20: mol_type = other RNA
atgtttggtagatttctgca

SEQ ID NO: 23830 - RNA, 20 nt, synthetic construct
  source 1..20: mol_type = other RNA
atgtttggtcaattgatctg

SEQ ID NO: 23831 - RNA, 20 nt, synthetic construct
  source 1..20: mol_type = other RNA
atgtttgtaacttgttcatg

SEQ ID NO: 23832 - RNA, 20 nt, synthetic construct
  source 1..20: mol_type = other RNA
atgtttgtacttctaccttg

SEQ ID NO: 23833 - RNA, 20 nt, synthetic construct
  source 1..20: mol_type = other RNA
atgtttgtggttttaacctc

SEQ ID NO: 23834 - RNA, 20 nt, synthetic construct
  source 1..20: mol_type = other RNA
atgtttgtttaattagccgg

SEQ ID NO: 23835 - RNA, 20 nt, synthetic construct
  source 1..20: mol_type = other RNA
atgttttaaggcagggcttg

SEQ ID NO: 23836 - RNA, 20 nt, synthetic construct
  source 1..20: mol_type = other RNA
atgttttacacatgtcagcc

SEQ ID NO: 23837 - RNA, 20 nt, synthetic construct
  source 1..20: mol_type = other RNA
atgttttacattttccattg

SEQ ID NO: 23838 - RNA, 20 nt, synthetic construct
  source 1..20: mol_type = other RNA
atgttttaggagtcaactaa

SEQ ID NO: 23839 - RNA, 20 nt, synthetic construct
  source 1..20: mol_type = other RNA
atgttttatttagcccatgt

SEQ ID NO: 23840 - RNA, 20 nt, synthetic construct
  source 1..20: mol_type = other RNA
atgttttatttcttgacctc

SEQ ID NO: 23841 - RNA, 20 nt, synthetic construct
  source 1..20: mol_type = other RNA
atgttttcagttgcatgaat

SEQ ID NO: 23842 - RNA, 20 nt, synthetic construct
  source 1..20: mol_type = other RNA
atgttttccgtgtgacaaaa

SEQ ID NO: 23843 - RNA, 20 nt, synthetic construct
  source 1..20: mol_type = other RNA
atgttttgaacgaatgaaaa

SEQ ID NO: 23844 - RNA, 20 nt, synthetic construct
  source 1..20: mol_type = other RNA
atgttttgcagagatgaggt

SEQ ID NO: 23845 - RNA, 20 nt, synthetic construct
  source 1..20: mol_type = other RNA
atgttttgcttcgaagctta

SEQ ID NO: 23846 - RNA, 20 nt, synthetic construct
  source 1..20: mol_type = other RNA
atgtttttagagagatgcct

SEQ ID NO: 23847 - RNA, 20 nt, synthetic construct
  source 1..20: mol_type = other RNA
atgtttttccgtctagccac

SEQ ID NO: 23848 - RNA, 20 nt, synthetic construct
  source 1..20: mol_type = other RNA
attaaaaacattggaggata

SEQ ID NO: 23849 - RNA, 20 nt, synthetic construct
  source 1..20: mol_type = other RNA
attaaaaactgagaccggat

SEQ ID NO: 23850 - RNA, 20 nt, synthetic construct
  source 1..20: mol_type = other RNA
attaaaaatcaacccatgaa

SEQ ID NO: 23851 - RNA, 20 nt, synthetic construct
  source 1..20: mol_type = other RNA
attaaaacatggatatttgg

SEQ ID NO: 23852 - RNA, 20 nt, synthetic construct
  source 1..20: mol_type = other RNA
attaaaacccatgatctttg

SEQ ID NO: 23853 - RNA, 20 nt, synthetic construct
  source 1..20: mol_type = other RNA
attaaaacctggtaataatg

SEQ ID NO: 23854 - RNA, 20 nt, synthetic construct
  source 1..20: mol_type = other RNA
attaaaagcacaagcacaga

SEQ ID NO: 23855 - RNA, 20 nt, synthetic construct
  source 1..20: mol_type = other RNA
attaaaaggtataaaggatg

SEQ ID NO: 23856 - RNA, 20 nt, synthetic construct
  source 1..20: mol_type = other RNA
attaaaataacacgcagaac

SEQ ID NO: 23857 - RNA, 20 nt, synthetic construct
  source 1..20: mol_type = other RNA
attaaaatgaacctgctttc

SEQ ID NO: 23858 - RNA, 20 nt, synthetic construct
  source 1..20: mol_type = other RNA
attaaaatgttgccaatatc

SEQ ID NO: 23859 - RNA, 20 nt, synthetic construct
  source 1..20: mol_type = other RNA
attaaacaatcttgaaaggg

SEQ ID NO: 23860 - RNA, 20 nt, synthetic construct
  source 1..20: mol_type = other RNA
attaaacacacccttggtaa

SEQ ID NO: 23861 - RNA, 20 nt, synthetic construct
  source 1..20: mol_type = other RNA
attaaacctgttacatggtt

SEQ ID NO: 23862 - RNA, 20 nt, synthetic construct
  source 1..20: mol_type = other RNA
attaaactatagacccaaag

SEQ ID NO: 23863 - RNA, 20 nt, synthetic construct
  source 1..20: mol_type = other RNA
attaaactcattatcccaga

SEQ ID NO: 23864 - RNA, 20 nt, synthetic construct
  source 1..20: mol_type = other RNA
attaaacttcaaggtaatct

SEQ ID NO: 23865 - RNA, 20 nt, synthetic construct
  source 1..20: mol_type = other RNA
attaaagacagctactaaac

SEQ ID NO: 23866 - RNA, 20 nt, synthetic construct
  source 1..20: mol_type = other RNA
attaaaggatgtcaactgag

SEQ ID NO: 23867 - RNA, 20 nt, synthetic construct
  source 1..20: mol_type = other RNA
attaaaggccctgatttaaa

SEQ ID NO: 23868 - RNA, 20 nt, synthetic construct
  source 1..20: mol_type = other RNA
attaaaggctggaaataatt

SEQ ID NO: 23869 - RNA, 20 nt, synthetic construct
  source 1..20: mol_type = other RNA
attaaagtagaaggccctat

SEQ ID NO: 23870 - RNA, 20 nt, synthetic construct
  source 1..20: mol_type = other RNA
attaaataacttccatgaga

SEQ ID NO: 23871 - RNA, 20 nt, synthetic construct
  source 1..20: mol_type = other RNA
attaaataagggcattttca

SEQ ID NO: 23872 - RNA, 20 nt, synthetic construct
  source 1..20: mol_type = other RNA
attaaatacagagcacagac

SEQ ID NO: 23873 - RNA, 20 nt, synthetic construct
  source 1..20: mol_type = other RNA
attaaataccacctgaaatc

SEQ ID NO: 23874 - RNA, 20 nt, synthetic construct
  source 1..20: mol_type = other RNA
attaaatcatgatgtttggc

SEQ ID NO: 23875 - RNA, 20 nt, synthetic construct
  source 1..20: mol_type = other RNA
attaaatgagacacctacaa

SEQ ID NO: 23876 - RNA, 20 nt, synthetic construct
  source 1..20: mol_type = other RNA
attaaattttctaggaacca

SEQ ID NO: 23877 - RNA, 20 nt, synthetic construct
  source 1..20: mol_type = other RNA
attaacactaatccttctca

SEQ ID NO: 23878 - RNA, 20 nt, synthetic construct
  source 1..20: mol_type = other RNA
attaacactatgtgttgata

SEQ ID NO: 23879 - RNA, 20 nt, synthetic construct
  source 1..20: mol_type = other RNA
attaacagaagggtatatac

SEQ ID NO: 23880 - RNA, 20 nt, synthetic construct
  source 1..20: mol_type = other RNA
attaacagatgaatgaacaa

SEQ ID NO: 23881 - RNA, 20 nt, synthetic construct
  source 1..20: mol_type = other RNA
attaacagctcagaagctat

SEQ ID NO: 23882 - RNA, 20 nt, synthetic construct
  source 1..20: mol_type = other RNA
attaacataccgacggctca

SEQ ID NO: 23883 - RNA, 20 nt, synthetic construct
  source 1..20: mol_type = other RNA
attaaccaagaacaacctta

SEQ ID NO: 23884 - RNA, 20 nt, synthetic construct
  source 1..20: mol_type = other RNA
attaaccactgaaacttttc

SEQ ID NO: 23885 - RNA, 20 nt, synthetic construct
  source 1..20: mol_type = other RNA
attaaccatatggtttacaa

SEQ ID NO: 23886 - RNA, 20 nt, synthetic construct
  source 1..20: mol_type = other RNA
attaactatggacatgagga

SEQ ID NO: 23887 - RNA, 20 nt, synthetic construct
  source 1..20: mol_type = other RNA
attaactcatttaaacgtca

SEQ ID NO: 23888 - RNA, 20 nt, synthetic construct
  source 1..20: mol_type = other RNA
attaactccaggggacatgc

SEQ ID NO: 23889 - RNA, 20 nt, synthetic construct
  source 1..20: mol_type = other RNA
attaactttaaagctctatg

SEQ ID NO: 23890 - RNA, 20 nt, synthetic construct
  source 1..20: mol_type = other RNA
attaactttgaaatcagaac

SEQ ID NO: 23891 - RNA, 20 nt, synthetic construct
  source 1..20: mol_type = other RNA
attaagaacttcttcaaaag

SEQ ID NO: 23892 - RNA, 20 nt, synthetic construct
  source 1..20: mol_type = other RNA
attaagacaatgtggagttg

SEQ ID NO: 23893 - RNA, 20 nt, synthetic construct
  source 1..20: mol_type = other RNA
attaagagaatggaaacttg

SEQ ID NO: 23894 - RNA, 20 nt, synthetic construct
  source 1..20: mol_type = other RNA
attaagagtctcatctgtca

SEQ ID NO: 23895 - RNA, 20 nt, synthetic construct
  source 1..20: mol_type = other RNA
attaagagtgtgctgactag

SEQ ID NO: 23896 - RNA, 20 nt, synthetic construct
  source 1..20: mol_type = other RNA
attaagataatgctgttctc

SEQ ID NO: 23897 - RNA, 20 nt, synthetic construct
  source 1..20: mol_type = other RNA
attaagcaaaatggaagtgc

SEQ ID NO: 23898 - RNA, 20 nt, synthetic construct
  source 1..20: mol_type = other RNA
attaagcaaccttttaggtg

SEQ ID NO: 23899 - RNA, 20 nt, synthetic construct
  source 1..20: mol_type = other RNA
attaagcacatctgtcttgt

SEQ ID NO: 23900 - RNA, 20 nt, synthetic construct
  source 1..20: mol_type = other RNA
attaagcaccactagagtat

SEQ ID NO: 23901 - RNA, 20 nt, synthetic construct
  source 1..20: mol_type = other RNA
attaagcatagtttgagtat

SEQ ID NO: 23902 - RNA, 20 nt, synthetic construct
  source 1..20: mol_type = other RNA
attaagccagtcactaaaaa

SEQ ID NO: 23903 - RNA, 20 nt, synthetic construct
  source 1..20: mol_type = other RNA
attaagcttcgacagtccct

SEQ ID NO: 23904 - RNA, 20 nt, synthetic construct
  source 1..20: mol_type = other RNA
attaaggaagaattaacact

SEQ ID NO: 23905 - RNA, 20 nt, synthetic construct
  source 1..20: mol_type = other RNA
attaaggaatgcctataaaa

SEQ ID NO: 23906 - RNA, 20 nt, synthetic construct
  source 1..20: mol_type = other RNA
attaaggacatccacaacat

SEQ ID NO: 23907 - RNA, 20 nt, synthetic construct
  source 1..20: mol_type = other RNA
attaaggagatggcacatac

SEQ ID NO: 23908 - RNA, 20 nt, synthetic construct
  source 1..20: mol_type = other RNA
attaaggctggaggatggct

SEQ ID NO: 23909 - RNA, 20 nt, synthetic construct
  source 1..20: mol_type = other RNA
attaagggaaacagggttac

SEQ ID NO: 23910 - RNA, 20 nt, synthetic construct
  source 1..20: mol_type = other RNA
attaagtattgcattgaatc

SEQ ID NO: 23911 - RNA, 20 nt, synthetic construct
  source 1..20: mol_type = other RNA
attaataagatcatacacct

SEQ ID NO: 23912 - RNA, 20 nt, synthetic construct
  source 1..20: mol_type = other RNA
attaatcagtctgtaagcac

SEQ ID NO: 23913 - RNA, 20 nt, synthetic construct
  source 1..20: mol_type = other RNA
attaatccttgtggtcttaa

SEQ ID NO: 23914 - RNA, 20 nt, synthetic construct
  source 1..20: mol_type = other RNA
attaatctcatccacaatga

SEQ ID NO: 23915 - RNA, 20 nt, synthetic construct
  source 1..20: mol_type = other RNA
attaatctcttacacctgtt

SEQ ID NO: 23916 - RNA, 20 nt, synthetic construct
  source 1..20: mol_type = other RNA
attaatctttctgaactcaa

SEQ ID NO: 23917 - RNA, 20 nt, synthetic construct
  source 1..20: mol_type = other RNA
attaatgcaacctgctttcc

SEQ ID NO: 23918 - RNA, 20 nt, synthetic construct
  source 1..20: mol_type = other RNA
attaatgcccaatcaaatcc

SEQ ID NO: 23919 - RNA, 20 nt, synthetic construct
  source 1..20: mol_type = other RNA
attaatgccccatgtgttgg

SEQ ID NO: 23920 - RNA, 20 nt, synthetic construct
  source 1..20: mol_type = other RNA
attaatgtaggtgtctgatg

SEQ ID NO: 23921 - RNA, 20 nt, synthetic construct
  source 1..20: mol_type = other RNA
attaatgtgttgtctgattc

SEQ ID NO: 23922 - RNA, 20 nt, synthetic construct
  source 1..20: mol_type = other RNA
attaattcagtcaacaccaa

SEQ ID NO: 23923 - RNA, 20 nt, synthetic construct
  source 1..20: mol_type = other RNA
attaattctgaggcctcctg

SEQ ID NO: 23924 - RNA, 20 nt, synthetic construct
  source 1..20: mol_type = other RNA
attaattgagagctttcttt

SEQ ID NO: 23925 - RNA, 20 nt, synthetic construct
  source 1..20: mol_type = other RNA
attaatttgaggtctaggct

SEQ ID NO: 23926 - RNA, 20 nt, synthetic construct
  source 1..20: mol_type = other RNA
attaatttggcttggggaac

SEQ ID NO: 23927 - RNA, 20 nt, synthetic construct
  source 1..20: mol_type = other RNA
attacaaaagaacaggactt

SEQ ID NO: 23928 - RNA, 20 nt, synthetic construct
  source 1..20: mol_type = other RNA
attacaaaataggcagtcct

SEQ ID NO: 23929 - RNA, 20 nt, synthetic construct
  source 1..20: mol_type = other RNA
attacaaatgaaagtcagct

SEQ ID NO: 23930 - RNA, 20 nt, synthetic construct
  source 1..20: mol_type = other RNA
attacaacagcaaggctcct

SEQ ID NO: 23931 - RNA, 20 nt, synthetic construct
  source 1..20: mol_type = other RNA
attacaactggtttctgcat

SEQ ID NO: 23932 - RNA, 20 nt, synthetic construct
  source 1..20: mol_type = other RNA
attacaagggtgacagagcc

SEQ ID NO: 23933 - RNA, 20 nt, synthetic construct
  source 1..20: mol_type = other RNA
attacaataatgcacatggg

SEQ ID NO: 23934 - RNA, 20 nt, synthetic construct
  source 1..20: mol_type = other RNA
attacaatggaaatgaagta

SEQ ID NO: 23935 - RNA, 20 nt, synthetic construct
  source 1..20: mol_type = other RNA
attacaatgtaaggtgcacg

SEQ ID NO: 23936 - RNA, 20 nt, synthetic construct
  source 1..20: mol_type = other RNA
attacaattcctttctaggc

SEQ ID NO: 23937 - RNA, 20 nt, synthetic construct
  source 1..20: mol_type = other RNA
attacaattgataccatgaa

SEQ ID NO: 23938 - RNA, 20 nt, synthetic construct
  source 1..20: mol_type = other RNA
attacacacacctaccacca

SEQ ID NO: 23939 - RNA, 20 nt, synthetic construct
  source 1..20: mol_type = other RNA
attacacagaaagcctcttc

SEQ ID NO: 23940 - RNA, 20 nt, synthetic construct
  source 1..20: mol_type = other RNA
attacacatctcccatacca

SEQ ID NO: 23941 - RNA, 20 nt, synthetic construct
  source 1..20: mol_type = other RNA
attacagaaaaaattagcct

SEQ ID NO: 23942 - RNA, 20 nt, synthetic construct
  source 1..20: mol_type = other RNA
attacaggcatgagccactg

SEQ ID NO: 23943 - RNA, 20 nt, synthetic construct
  source 1..20: mol_type = other RNA
attacaggcatgagtcgcca

SEQ ID NO: 23944 - RNA, 20 nt, synthetic construct
  source 1..20: mol_type = other RNA
attacaggcgcacgccatct

SEQ ID NO: 23945 - RNA, 20 nt, synthetic construct
  source 1..20: mol_type = other RNA
attacaggggactttgatgt

SEQ ID NO: 23946 - RNA, 20 nt, synthetic construct
  source 1..20: mol_type = other RNA
attacaggtcaaactcactt

SEQ ID NO: 23947 - RNA, 20 nt, synthetic construct
  source 1..20: mol_type = other RNA
attacagtaaggtttccctg

SEQ ID NO: 23948 - RNA, 20 nt, synthetic construct
  source 1..20: mol_type = other RNA
attacagtctcgaccccctg

SEQ ID NO: 23949 - RNA, 20 nt, synthetic construct
  source 1..20: mol_type = other RNA
attacatacttcaaagggtc

SEQ ID NO: 23950 - RNA, 20 nt, synthetic construct
  source 1..20: mol_type = other RNA
attacatagcaaggaagcag

SEQ ID NO: 23951 - RNA, 20 nt, synthetic construct
  source 1..20: mol_type = other RNA
attacatattttgtaacgtg

SEQ ID NO: 23952 - RNA, 20 nt, synthetic construct
  source 1..20: mol_type = other RNA
attacatgaatggaaaattc

SEQ ID NO: 23953 - RNA, 20 nt, synthetic construct
  source 1..20: mol_type = other RNA
attacatttgcttaggctgt

SEQ ID NO: 23954 - RNA, 20 nt, synthetic construct
  source 1..20: mol_type = other RNA
attaccaaaacctggtatga

SEQ ID NO: 23955 - RNA, 20 nt, synthetic construct
  source 1..20: mol_type = other RNA
attaccaataaaagcctcat

SEQ ID NO: 23956 - RNA, 20 nt, synthetic construct
  source 1..20: mol_type = other RNA
attaccagcttacagcagat

SEQ ID NO: 23957 - RNA, 20 nt, synthetic construct
  source 1..20: mol_type = other RNA
attaccaggctggaagaatt

SEQ ID NO: 23958 - RNA, 20 nt, synthetic construct
  source 1..20: mol_type = other RNA
attaccataaagtcttccat

SEQ ID NO: 23959 - RNA, 20 nt, synthetic construct
  source 1..20: mol_type = other RNA
attaccatgtttccataaaa

SEQ ID NO: 23960 - RNA, 20 nt, synthetic construct
  source 1..20: mol_type = other RNA
attacccaaagactttgttt

SEQ ID NO: 23961 - RNA, 20 nt, synthetic construct
  source 1..20: mol_type = other RNA
attacccaggcatgatggct

SEQ ID NO: 23962 - RNA, 20 nt, synthetic construct
  source 1..20: mol_type = other RNA
attaccccattcactcagca

SEQ ID NO: 23963 - RNA, 20 nt, synthetic construct
  source 1..20: mol_type = other RNA
attaccggcatccgccacca

SEQ ID NO: 23964 - RNA, 20 nt, synthetic construct
  source 1..20: mol_type = other RNA
attacctatgaataggtgtg

SEQ ID NO: 23965 - RNA, 20 nt, synthetic construct
  source 1..20: mol_type = other RNA
attacctcccatgcattcgt

SEQ ID NO: 23966 - RNA, 20 nt, synthetic construct
  source 1..20: mol_type = other RNA
attaccttatagatgacgaa

SEQ ID NO: 23967 - RNA, 20 nt, synthetic construct
  source 1..20: mol_type = other RNA
attacgagttatgcaagatg

SEQ ID NO: 23968 - RNA, 20 nt, synthetic construct
  source 1..20: mol_type = other RNA
attactcagtctcgaaaagg

SEQ ID NO: 23969 - RNA, 20 nt, synthetic construct
  source 1..20: mol_type = other RNA
attactcggtatgtacccaa

SEQ ID NO: 23970 - RNA, 20 nt, synthetic construct
  source 1..20: mol_type = other RNA
attactcgtggttatagcca

SEQ ID NO: 23971 - RNA, 20 nt, synthetic construct
  source 1..20: mol_type = other RNA
attactcttctactcactgt

SEQ ID NO: 23972 - RNA, 20 nt, synthetic construct
  source 1..20: mol_type = other RNA
attactgacaatagccaaga

SEQ ID NO: 23973 - RNA, 20 nt, synthetic construct
  source 1..20: mol_type = other RNA
attactgactcaatcttctt

SEQ ID NO: 23974 - RNA, 20 nt, synthetic construct
  source 1..20: mol_type = other RNA
attactggatacaaggtcaa

SEQ ID NO: 23975 - RNA, 20 nt, synthetic construct
  source 1..20: mol_type = other RNA
attactgtacaaagatttac

SEQ ID NO: 23976 - RNA, 20 nt, synthetic construct
  source 1..20: mol_type = other RNA
attactgtctgtgaaaataa

SEQ ID NO: 23977 - RNA, 20 nt, synthetic construct
  source 1..20: mol_type = other RNA
attactgtttcttagctata

SEQ ID NO: 23978 - RNA, 20 nt, synthetic construct
  source 1..20: mol_type = other RNA
attacttaggcagttattaa

SEQ ID NO: 23979 - RNA, 20 nt, synthetic construct
  source 1..20: mol_type = other RNA
attacttcatagatgttatg

SEQ ID NO: 23980 - RNA, 20 nt, synthetic construct
  source 1..20: mol_type = other RNA
attacttccagtgttttagg

SEQ ID NO: 23981 - RNA, 20 nt, synthetic construct
  source 1..20: mol_type = other RNA
attacttctttctctttcag

SEQ ID NO: 23982 - RNA, 20 nt, synthetic construct
  source 1..20: mol_type = other RNA
attacttgagagcagagaca

SEQ ID NO: 23983 - RNA, 20 nt, synthetic construct
  source 1..20: mol_type = other RNA
attactttacagttatgtca

SEQ ID NO: 23984 - RNA, 20 nt, synthetic construct
  source 1..20: mol_type = other RNA
attacttttaaagaaaggtc

SEQ ID NO: 23985 - RNA, 20 nt, synthetic construct
  source 1..20: mol_type = other RNA
attacttttttgtagagaca

SEQ ID NO: 23986 - RNA, 20 nt, synthetic construct
  source 1..20: mol_type = other RNA
attagaaaattagctgactt

SEQ ID NO: 23987 - RNA, 20 nt, synthetic construct
  source 1..20: mol_type = other RNA
attagaaactggtgaactgg

SEQ ID NO: 23988 - RNA, 20 nt, synthetic construct
  source 1..20: mol_type = other RNA
attagaaagctggactcatt

SEQ ID NO: 23989 - RNA, 20 nt, synthetic construct
  source 1..20: mol_type = other RNA
attagaaagtagattagctt

SEQ ID NO: 23990 - RNA, 20 nt, synthetic construct
  source 1..20: mol_type = other RNA
attagaaatgtggaagcaga

SEQ ID NO: 23991 - RNA, 20 nt, synthetic construct
  source 1..20: mol_type = other RNA
attagaacatctggcagcag

SEQ ID NO: 23992 - RNA, 20 nt, synthetic construct
  source 1..20: mol_type = other RNA
attagaactagaactgtgtt

SEQ ID NO: 23993 - RNA, 20 nt, synthetic construct
  source 1..20: mol_type = other RNA
attagaaggattgttcatgt

SEQ ID NO: 23994 - RNA, 20 nt, synthetic construct
  source 1..20: mol_type = other RNA
attagaatcatccggggagc

SEQ ID NO: 23995 - RNA, 20 nt, synthetic construct
  source 1..20: mol_type = other RNA
attagaattcaggacagtca

SEQ ID NO: 23996 - RNA, 20 nt, synthetic construct
  source 1..20: mol_type = other RNA
attagacactaactttctat

SEQ ID NO: 23997 - RNA, 20 nt, synthetic construct
  source 1..20: mol_type = other RNA
attagagaagaatgagaaac

SEQ ID NO: 23998 - RNA, 20 nt, synthetic construct
  source 1..20: mol_type = other RNA
attagagccccaagaaagca

SEQ ID NO: 23999 - RNA, 20 nt, synthetic construct
  source 1..20: mol_type = other RNA
attagaggctgcaccctcct

SEQ ID NO: 24000 - RNA, 20 nt, synthetic construct
  source 1..20: mol_type = other RNA
attagagtaagcaactgcat

SEQ ID NO: 24001 - RNA, 20 nt, synthetic construct
  source 1..20: mol_type = other RNA
attagagtgaaaagaaacaa

SEQ ID NO: 24002 - RNA, 20 nt, synthetic construct
  source 1..20: mol_type = other RNA
attagagttgtaacacatat

SEQ ID NO: 24003 - RNA, 20 nt, synthetic construct
  source 1..20: mol_type = other RNA
attagatagtggtttgaagc

SEQ ID NO: 24004 - RNA, 20 nt, synthetic construct
  source 1..20: mol_type = other RNA
attagatatgtgatttgtag

SEQ ID NO: 24005 - RNA, 20 nt, synthetic construct
  source 1..20: mol_type = other RNA
attagatgatgttttgaacg

SEQ ID NO: 24006 - RNA, 20 nt, synthetic construct
  source 1..20: mol_type = other RNA
attagatggcttaggatcac

SEQ ID NO: 24007 - RNA, 20 nt, synthetic construct
  source 1..20: mol_type = other RNA
attagattgttttgttgcta

SEQ ID NO: 24008 - RNA, 20 nt, synthetic construct
  source 1..20: mol_type = other RNA
attagatttatttttacccg

SEQ ID NO: 24009 - RNA, 20 nt, synthetic construct
  source 1..20: mol_type = other RNA
attagcaaacatttatggaa

SEQ ID NO: 24010 - RNA, 20 nt, synthetic construct
  source 1..20: mol_type = other RNA
attagcaaagaggcaaaact

SEQ ID NO: 24011 - RNA, 20 nt, synthetic construct
  source 1..20: mol_type = other RNA
attagcaatgcgaatcatct

SEQ ID NO: 24012 - RNA, 20 nt, synthetic construct
  source 1..20: mol_type = other RNA
attagcacctttattaacta

SEQ ID NO: 24013 - RNA, 20 nt, synthetic construct
  source 1..20: mol_type = other RNA
attagcagttctgtaccctt

SEQ ID NO: 24014 - RNA, 20 nt, synthetic construct
  source 1..20: mol_type = other RNA
attagccaagcatggtggta

SEQ ID NO: 24015 - RNA, 20 nt, synthetic construct
  source 1..20: mol_type = other RNA
attagccactctgaattctc

SEQ ID NO: 24016 - RNA, 20 nt, synthetic construct
  source 1..20: mol_type = other RNA
attagccgggtgtagtggtg

SEQ ID NO: 24017 - RNA, 20 nt, synthetic construct
  source 1..20: mol_type = other RNA
attagcctagacctcaaatt

SEQ ID NO: 24018 - RNA, 20 nt, synthetic construct
  source 1..20: mol_type = other RNA
attagccttttacaccctag

SEQ ID NO: 24019 - RNA, 20 nt, synthetic construct
  source 1..20: mol_type = other RNA
attagcgaaagggattctgg

SEQ ID NO: 24020 - RNA, 20 nt, synthetic construct
  source 1..20: mol_type = other RNA
attagctaagtatgcagaaa

SEQ ID NO: 24021 - RNA, 20 nt, synthetic construct
  source 1..20: mol_type = other RNA
attagctacaaaagggaaaa

SEQ ID NO: 24022 - RNA, 20 nt, synthetic construct
  source 1..20: mol_type = other RNA
attagctgactttcatttgt

SEQ ID NO: 24023 - RNA, 20 nt, synthetic construct
  source 1..20: mol_type = other RNA
attagctggatgtggtgtgg

SEQ ID NO: 24024 - RNA, 20 nt, synthetic construct
  source 1..20: mol_type = other RNA
attagctgggcgagatggcg

SEQ ID NO: 24025 - RNA, 20 nt, synthetic construct
  source 1..20: mol_type = other RNA
attagctgtctggattgatt

SEQ ID NO: 24026 - RNA, 20 nt, synthetic construct
  source 1..20: mol_type = other RNA
attagcttcctcaggatcta

SEQ ID NO: 24027 - RNA, 20 nt, synthetic construct
  source 1..20: mol_type = other RNA
attagcttgctagtagcaga

SEQ ID NO: 24028 - RNA, 20 nt, synthetic construct
  source 1..20: mol_type = other RNA
attagctttctcccagctgt

SEQ ID NO: 24029 - RNA, 20 nt, synthetic construct
  source 1..20: mol_type = other RNA
attagcttttacgaggacag

SEQ ID NO: 24030 - RNA, 20 nt, synthetic construct
  source 1..20: mol_type = other RNA
attaggaaacagattgattt

SEQ ID NO: 24031 - RNA, 20 nt, synthetic construct
  source 1..20: mol_type = other RNA
attaggatagctattatttg

SEQ ID NO: 24032 - RNA, 20 nt, synthetic construct
  source 1..20: mol_type = other RNA
attaggatgtgtacccgtgt

SEQ ID NO: 24033 - RNA, 20 nt, synthetic construct
  source 1..20: mol_type = other RNA
attaggcagaaccacctggg

SEQ ID NO: 24034 - RNA, 20 nt, synthetic construct
  source 1..20: mol_type = other RNA
attaggctctgggtcagaat

SEQ ID NO: 24035 - RNA, 20 nt, synthetic construct
  source 1..20: mol_type = other RNA
attaggctgtttgagatctt

SEQ ID NO: 24036 - RNA, 20 nt, synthetic construct
  source 1..20: mol_type = other RNA
attagggtaatgctggcttc

SEQ ID NO: 24037 - RNA, 20 nt, synthetic construct
  source 1..20: mol_type = other RNA
attaggtgcacacaacactc

SEQ ID NO: 24038 - RNA, 20 nt, synthetic construct
  source 1..20: mol_type = other RNA
attaggttgatggctgtact

SEQ ID NO: 24039 - RNA, 20 nt, synthetic construct
  source 1..20: mol_type = other RNA
attagtagttaggtggtttg

SEQ ID NO: 24040 - RNA, 20 nt, synthetic construct
  source 1..20: mol_type = other RNA
attagtatacatgtttagca

SEQ ID NO: 24041 - RNA, 20 nt, synthetic construct
  source 1..20: mol_type = other RNA
attagtcatagcagtgggaa

SEQ ID NO: 24042 - RNA, 20 nt, synthetic construct
  source 1..20: mol_type = other RNA
attagtctgtagcttcacgt

SEQ ID NO: 24043 - RNA, 20 nt, synthetic construct
  source 1..20: mol_type = other RNA
attagtgaattcacagtaga

SEQ ID NO: 24044 - RNA, 20 nt, synthetic construct
  source 1..20: mol_type = other RNA
attagtgattttaccaaggc

SEQ ID NO: 24045 - RNA, 20 nt, synthetic construct
  source 1..20: mol_type = other RNA
attagtggaaaaactgcagc

SEQ ID NO: 24046 - RNA, 20 nt, synthetic construct
  source 1..20: mol_type = other RNA
attagtggtggtagtaagga

SEQ ID NO: 24047 - RNA, 20 nt, synthetic construct
  source 1..20: mol_type = other RNA
attagtgttaattcttcctt

SEQ ID NO: 24048 - RNA, 20 nt, synthetic construct
  source 1..20: mol_type = other RNA
attagttaaccttctggggt

SEQ ID NO: 24049 - RNA, 20 nt, synthetic construct
  source 1..20: mol_type = other RNA
attagttacatgaggtcacc

SEQ ID NO: 24050 - RNA, 20 nt, synthetic construct
  source 1..20: mol_type = other RNA
attagttatctcttagacct

SEQ ID NO: 24051 - RNA, 20 nt, synthetic construct
  source 1..20: mol_type = other RNA
attagttcctccttttgtag

SEQ ID NO: 24052 - RNA, 20 nt, synthetic construct
  source 1..20: mol_type = other RNA
attagttccttttaagggaa

SEQ ID NO: 24053 - RNA, 20 nt, synthetic construct
  source 1..20: mol_type = other RNA
attagttgactcctaaaaca

SEQ ID NO: 24054 - RNA, 20 nt, synthetic construct
  source 1..20: mol_type = other RNA
attagttgtacttgacacaa

SEQ ID NO: 24055 - RNA, 20 nt, synthetic construct
  source 1..20: mol_type = other RNA
attataaaataggaagtcca

SEQ ID NO: 24056 - RNA, 20 nt, synthetic construct
  source 1..20: mol_type = other RNA
attataacataaaagcgtac

SEQ ID NO: 24057 - RNA, 20 nt, synthetic construct
  source 1..20: mol_type = other RNA
attataaccttgaacttcca

SEQ ID NO: 24058 - RNA, 20 nt, synthetic construct
  source 1..20: mol_type = other RNA
attataagcttcctctggct

SEQ ID NO: 24059 - RNA, 20 nt, synthetic construct
  source 1..20: mol_type = other RNA
attataagttgggagtctat

SEQ ID NO: 24060 - RNA, 20 nt, synthetic construct
  source 1..20: mol_type = other RNA
attataattttttgagacgg

SEQ ID NO: 24061 - RNA, 20 nt, synthetic construct
  source 1..20: mol_type = other RNA
attatagagggcctaaataa

SEQ ID NO: 24062 - RNA, 20 nt, synthetic construct
  source 1..20: mol_type = other RNA
attatagctccaaaagcgaa

SEQ ID NO: 24063 - RNA, 20 nt, synthetic construct
  source 1..20: mol_type = other RNA
attatagtggtaaggagcca

SEQ ID NO: 24064 - RNA, 20 nt, synthetic construct
  source 1..20: mol_type = other RNA
attatatcatcttaagaacc

SEQ ID NO: 24065 - RNA, 20 nt, synthetic construct
  source 1..20: mol_type = other RNA
attatatgaataaaccacgc

SEQ ID NO: 24066 - RNA, 20 nt, synthetic construct
  source 1..20: mol_type = other RNA
attatatgcctagatttcaa

SEQ ID NO: 24067 - RNA, 20 nt, synthetic construct
  source 1..20: mol_type = other RNA
attatatggtctaccatgtt

SEQ ID NO: 24068 - RNA, 20 nt, synthetic construct
  source 1..20: mol_type = other RNA
attatcagggatattggctt

SEQ ID NO: 24069 - RNA, 20 nt, synthetic construct
  source 1..20: mol_type = other RNA
attatcccagacagatatat

SEQ ID NO: 24070 - RNA, 20 nt, synthetic construct
  source 1..20: mol_type = other RNA
attatcccagatctaacaaa

SEQ ID NO: 24071 - RNA, 20 nt, synthetic construct
  source 1..20: mol_type = other RNA
attatcctatcagagcatgt

SEQ ID NO: 24072 - RNA, 20 nt, synthetic construct
  source 1..20: mol_type = other RNA
attatcctccaatgttttta

SEQ ID NO: 24073 - RNA, 20 nt, synthetic construct
  source 1..20: mol_type = other RNA
attatctgtgggttaaaagt

SEQ ID NO: 24074 - RNA, 20 nt, synthetic construct
  source 1..20: mol_type = other RNA
attatcttctaccttttgtt

SEQ ID NO: 24075 - RNA, 20 nt, synthetic construct
  source 1..20: mol_type = other RNA
attatgaaccattgtaaacc

SEQ ID NO: 24076 - RNA, 20 nt, synthetic construct
  source 1..20: mol_type = other RNA
attatgactgagatacttaa

SEQ ID NO: 24077 - RNA, 20 nt, synthetic construct
  source 1..20: mol_type = other RNA
attatgagcagttgtatgcc

SEQ ID NO: 24078 - RNA, 20 nt, synthetic construct
  source 1..20: mol_type = other RNA
attatgagcattccccacat

SEQ ID NO: 24079 - RNA, 20 nt, synthetic construct
  source 1..20: mol_type = other RNA
attatgctaacatgaactac

SEQ ID NO: 24080 - RNA, 20 nt, synthetic construct
  source 1..20: mol_type = other RNA
attatgctgagtgaatgggg

SEQ ID NO: 24081 - RNA, 20 nt, synthetic construct
  source 1..20: mol_type = other RNA
attatggctagaaacttgga

SEQ ID NO: 24082 - RNA, 20 nt, synthetic construct
  source 1..20: mol_type = other RNA
attatggtctttttccagga

SEQ ID NO: 24083 - RNA, 20 nt, synthetic construct
  source 1..20: mol_type = other RNA
attatggttgttggctaaaa

SEQ ID NO: 24084 - RNA, 20 nt, synthetic construct
  source 1..20: mol_type = other RNA
attatgtgcaagttctcttt

SEQ ID NO: 24085 - RNA, 20 nt, synthetic construct
  source 1..20: mol_type = other RNA
attatgttagatatcccata

SEQ ID NO: 24086 - RNA, 20 nt, synthetic construct
  source 1..20: mol_type = other RNA
attatgttccacatgttact

SEQ ID NO: 24087 - RNA, 20 nt, synthetic construct
  source 1..20: mol_type = other RNA
attattaagcaaaatggaag

SEQ ID NO: 24088 - RNA, 20 nt, synthetic construct
  source 1..20: mol_type = other RNA
attattagcttgctagtagc

SEQ ID NO: 24089 - RNA, 20 nt, synthetic construct
  source 1..20: mol_type = other RNA
attattagttgtacttgaca

SEQ ID NO: 24090 - RNA, 20 nt, synthetic construct
  source 1..20: mol_type = other RNA
attattctaaacacacgggc

SEQ ID NO: 24091 - RNA, 20 nt, synthetic construct
  source 1..20: mol_type = other RNA
attattcttacagtgacata

SEQ ID NO: 24092 - RNA, 20 nt, synthetic construct
  source 1..20: mol_type = other RNA
attattgacaagacgtgtac

SEQ ID NO: 24093 - RNA, 20 nt, synthetic construct
  source 1..20: mol_type = other RNA
attattgattggcaaatctt

SEQ ID NO: 24094 - RNA, 20 nt, synthetic construct
  source 1..20: mol_type = other RNA
attattgtctgcaagcagat

SEQ ID NO: 24095 - RNA, 20 nt, synthetic construct
  source 1..20: mol_type = other RNA
attatttccagcctttaatt

SEQ ID NO: 24096 - RNA, 20 nt, synthetic construct
  source 1..20: mol_type = other RNA
attatttctgtcatctgaat

SEQ ID NO: 24097 - RNA, 20 nt, synthetic construct
  source 1..20: mol_type = other RNA
attatttgaataaggtctgt

SEQ ID NO: 24098 - RNA, 20 nt, synthetic construct
  source 1..20: mol_type = other RNA
attatttgagagtaagttgc

SEQ ID NO: 24099 - RNA, 20 nt, synthetic construct
  source 1..20: mol_type = other RNA
attatttgcggcttgattag

SEQ ID NO: 24100 - RNA, 20 nt, synthetic construct
  source 1..20: mol_type = other RNA
attatttggaagagagaagg

SEQ ID NO: 24101 - RNA, 20 nt, synthetic construct
  source 1..20: mol_type = other RNA
attatttgtgcatactgtga

SEQ ID NO: 24102 - RNA, 20 nt, synthetic construct
  source 1..20: mol_type = other RNA
attattttcacagacagtaa

SEQ ID NO: 24103 - RNA, 20 nt, synthetic construct
  source 1..20: mol_type = other RNA
attattttcctccttctgct

SEQ ID NO: 24104 - RNA, 20 nt, synthetic construct
  source 1..20: mol_type = other RNA
attatttttacccaacatga

SEQ ID NO: 24105 - RNA, 20 nt, synthetic construct
  source 1..20: mol_type = other RNA
attattttttcccgctacac

SEQ ID NO: 24106 - RNA, 20 nt, synthetic construct
  source 1..20: mol_type = other RNA
attcaaaacaaaacacatgg

SEQ ID NO: 24107 - RNA, 20 nt, synthetic construct
  source 1..20: mol_type = other RNA
attcaaaatgtgatggcatc

SEQ ID NO: 24108 - RNA, 20 nt, synthetic construct
  source 1..20: mol_type = other RNA
attcaaacatgacagatccc

SEQ ID NO: 24109 - RNA, 20 nt, synthetic construct
  source 1..20: mol_type = other RNA
attcaaagatcatttcactt

SEQ ID NO: 24110 - RNA, 20 nt, synthetic construct
  source 1..20: mol_type = other RNA
attcaaagcaagttaaaaga

SEQ ID NO: 24111 - RNA, 20 nt, synthetic construct
  source 1..20: mol_type = other RNA
attcaaataattgctgcagt

SEQ ID NO: 24112 - RNA, 20 nt, synthetic construct
  source 1..20: mol_type = other RNA
attcaaatgatattcactga

SEQ ID NO: 24113 - RNA, 20 nt, synthetic construct
  source 1..20: mol_type = other RNA
attcaacaaaactgggggct

SEQ ID NO: 24114 - RNA, 20 nt, synthetic construct
  source 1..20: mol_type = other RNA
attcaacaacatggatgaac

SEQ ID NO: 24115 - RNA, 20 nt, synthetic construct
  source 1..20: mol_type = other RNA
attcaacaatagcaacaaaa

SEQ ID NO: 24116 - RNA, 20 nt, synthetic construct
  source 1..20: mol_type = other RNA
attcaacagctactatgaat

SEQ ID NO: 24117 - RNA, 20 nt, synthetic construct
  source 1..20: mol_type = other RNA
attcaacaggtataaagttt

SEQ ID NO: 24118 - RNA, 20 nt, synthetic construct
  source 1..20: mol_type = other RNA
attcaacctataagacccag

SEQ ID NO: 24119 - RNA, 20 nt, synthetic construct
  source 1..20: mol_type = other RNA
attcaacttggtaaaaagtg

SEQ ID NO: 24120 - RNA, 20 nt, synthetic construct
  source 1..20: mol_type = other RNA
attcaagaaaccacagagcc

SEQ ID NO: 24121 - RNA, 20 nt, synthetic construct
  source 1..20: mol_type = other RNA
attcaagacaagcaaggaag

SEQ ID NO: 24122 - RNA, 20 nt, synthetic construct
  source 1..20: mol_type = other RNA
attcaagcagaaatgagttc

SEQ ID NO: 24123 - RNA, 20 nt, synthetic construct
  source 1..20: mol_type = other RNA
attcaagtgtttatttagtg

SEQ ID NO: 24124 - RNA, 20 nt, synthetic construct
  source 1..20: mol_type = other RNA
attcaagtttcaccctgcga

SEQ ID NO: 24125 - RNA, 20 nt, synthetic construct
  source 1..20: mol_type = other RNA
attcaatccttgtaactttt

SEQ ID NO: 24126 - RNA, 20 nt, synthetic construct
  source 1..20: mol_type = other RNA
attcaattgtcctggcagat

SEQ ID NO: 24127 - RNA, 20 nt, synthetic construct
  source 1..20: mol_type = other RNA
attcaattttcatgggttga

SEQ ID NO: 24128 - RNA, 20 nt, synthetic construct
  source 1..20: mol_type = other RNA
attcacaagattaatcttgc

SEQ ID NO: 24129 - RNA, 20 nt, synthetic construct
  source 1..20: mol_type = other RNA
attcacacaccctttcttag

SEQ ID NO: 24130 - RNA, 20 nt, synthetic construct
  source 1..20: mol_type = other RNA
attcacactagtcaccctac

SEQ ID NO: 24131 - RNA, 20 nt, synthetic construct
  source 1..20: mol_type = other RNA
attcacactgctcctgcctt

SEQ ID NO: 24132 - RNA, 20 nt, synthetic construct
  source 1..20: mol_type = other RNA
attcacagaactgtcactga

SEQ ID NO: 24133 - RNA, 20 nt, synthetic construct
  source 1..20: mol_type = other RNA
attcacagaatatactcaga

SEQ ID NO: 24134 - RNA, 20 nt, synthetic construct
  source 1..20: mol_type = other RNA
attcacagcatgaataccta

SEQ ID NO: 24135 - RNA, 20 nt, synthetic construct
  source 1..20: mol_type = other RNA
attcacagcgtgcaccttac

SEQ ID NO: 24136 - RNA, 20 nt, synthetic construct
  source 1..20: mol_type = other RNA
attcacagtagaagactcag

SEQ ID NO: 24137 - RNA, 20 nt, synthetic construct
  source 1..20: mol_type = other RNA
attcacatttaagaagggaa

SEQ ID NO: 24138 - RNA, 20 nt, synthetic construct
  source 1..20: mol_type = other RNA
attcaccaaacaccttacac

SEQ ID NO: 24139 - RNA, 20 nt, synthetic construct
  source 1..20: mol_type = other RNA
attcaccaattgttaacatt

SEQ ID NO: 24140 - RNA, 20 nt, synthetic construct
  source 1..20: mol_type = other RNA
attcacccaagaatttcatg

SEQ ID NO: 24141 - RNA, 20 nt, synthetic construct
  source 1..20: mol_type = other RNA
attcacgagactgttaggga

SEQ ID NO: 24142 - RNA, 20 nt, synthetic construct
  source 1..20: mol_type = other RNA
attcacgcacagggagatac

SEQ ID NO: 24143 - RNA, 20 nt, synthetic construct
  source 1..20: mol_type = other RNA
attcactaatgcctcaaatt

SEQ ID NO: 24144 - RNA, 20 nt, synthetic construct
  source 1..20: mol_type = other RNA
attcactagacacatttttg

SEQ ID NO: 24145 - RNA, 20 nt, synthetic construct
  source 1..20: mol_type = other RNA
attcactcagcataattggt

SEQ ID NO: 24146 - RNA, 20 nt, synthetic construct
  source 1..20: mol_type = other RNA
attcactcctcattcacact

SEQ ID NO: 24147 - RNA, 20 nt, synthetic construct
  source 1..20: mol_type = other RNA
attcactgtgactccaaagc

SEQ ID NO: 24148 - RNA, 20 nt, synthetic construct
  source 1..20: mol_type = other RNA
attcacttttgagttcagaa

SEQ ID NO: 24149 - RNA, 20 nt, synthetic construct
  source 1..20: mol_type = other RNA
attcacttttggaatttaag

SEQ ID NO: 24150 - RNA, 20 nt, synthetic construct
  source 1..20: mol_type = other RNA
attcagaagctaaattttca

SEQ ID NO: 24151 - RNA, 20 nt, synthetic construct
  source 1..20: mol_type = other RNA
attcagaggtatttggggct

SEQ ID NO: 24152 - RNA, 20 nt, synthetic construct
  source 1..20: mol_type = other RNA
attcagagtgctgggtagag

SEQ ID NO: 24153 - RNA, 20 nt, synthetic construct
  source 1..20: mol_type = other RNA
attcagagtggctaatgtgg

SEQ ID NO: 24154 - RNA, 20 nt, synthetic construct
  source 1..20: mol_type = other RNA
attcagatgacagaaataat

SEQ ID NO: 24155 - RNA, 20 nt, synthetic construct
  source 1..20: mol_type = other RNA
attcagatggccccaaaatt

SEQ ID NO: 24156 - RNA, 20 nt, synthetic construct
  source 1..20: mol_type = other RNA
attcaggacactggaggtgc

SEQ ID NO: 24157 - RNA, 20 nt, synthetic construct
  source 1..20: mol_type = other RNA
attcaggacagattaaaatc

SEQ ID NO: 24158 - RNA, 20 nt, synthetic construct
  source 1..20: mol_type = other RNA
attcaggacagtcatcctca

SEQ ID NO: 24159 - RNA, 20 nt, synthetic construct
  source 1..20: mol_type = other RNA
attcaggacagttattcttc

SEQ ID NO: 24160 - RNA, 20 nt, synthetic construct
  source 1..20: mol_type = other RNA
attcagggggctaaatgctc

SEQ ID NO: 24161 - RNA, 20 nt, synthetic construct
  source 1..20: mol_type = other RNA
attcaggtctatgtgacaga

SEQ ID NO: 24162 - RNA, 20 nt, synthetic construct
  source 1..20: mol_type = other RNA
attcagtcaacaccaagcaa

SEQ ID NO: 24163 - RNA, 20 nt, synthetic construct
  source 1..20: mol_type = other RNA
attcagtcaccaaacgttta

SEQ ID NO: 24164 - RNA, 20 nt, synthetic construct
  source 1..20: mol_type = other RNA
attcagtcttggtagtttgc

SEQ ID NO: 24165 - RNA, 20 nt, synthetic construct
  source 1..20: mol_type = other RNA
attcagtggttggaaaactt

SEQ ID NO: 24166 - RNA, 20 nt, synthetic construct
  source 1..20: mol_type = other RNA
attcataaacacagaacact

SEQ ID NO: 24167 - RNA, 20 nt, synthetic construct
  source 1..20: mol_type = other RNA
attcatacgttaactgtatt

SEQ ID NO: 24168 - RNA, 20 nt, synthetic construct
  source 1..20: mol_type = other RNA
attcatactgaaggcatagg

SEQ ID NO: 24169 - RNA, 20 nt, synthetic construct
  source 1..20: mol_type = other RNA
attcatagatcaccaggggc

SEQ ID NO: 24170 - RNA, 20 nt, synthetic construct
  source 1..20: mol_type = other RNA
attcataggtaatactctag

SEQ ID NO: 24171 - RNA, 20 nt, synthetic construct
  source 1..20: mol_type = other RNA
attcatagtagctgttgaat

SEQ ID NO: 24172 - RNA, 20 nt, synthetic construct
  source 1..20: mol_type = other RNA
attcatagtcatttgatctt

SEQ ID NO: 24173 - RNA, 20 nt, synthetic construct
  source 1..20: mol_type = other RNA
attcatataatggagtacta

SEQ ID NO: 24174 - RNA, 20 nt, synthetic construct
  source 1..20: mol_type = other RNA
attcatatgaaatcacacaa

SEQ ID NO: 24175 - RNA, 20 nt, synthetic construct
  source 1..20: mol_type = other RNA
attcatatgctttgagctac

SEQ ID NO: 24176 - RNA, 20 nt, synthetic construct
  source 1..20: mol_type = other RNA
attcatatttgttcaagcgc

SEQ ID NO: 24177 - RNA, 20 nt, synthetic construct
  source 1..20: mol_type = other RNA
attcatccaggcaaaagatg

SEQ ID NO: 24178 - RNA, 20 nt, synthetic construct
  source 1..20: mol_type = other RNA
attcatccagtttaaagctt

SEQ ID NO: 24179 - RNA, 20 nt, synthetic construct
  source 1..20: mol_type = other RNA
attcatccctctaaataggt

SEQ ID NO: 24180 - RNA, 20 nt, synthetic construct
  source 1..20: mol_type = other RNA
attcatcctactagtattta

SEQ ID NO: 24181 - RNA, 20 nt, synthetic construct
  source 1..20: mol_type = other RNA
attcatctaaacgtttggtg

SEQ ID NO: 24182 - RNA, 20 nt, synthetic construct
  source 1..20: mol_type = other RNA
attcatctctcgatggacat

SEQ ID NO: 24183 - RNA, 20 nt, synthetic construct
  source 1..20: mol_type = other RNA
attcatctgcagtgtccatc

SEQ ID NO: 24184 - RNA, 20 nt, synthetic construct
  source 1..20: mol_type = other RNA
attcatctgttaatgggcac

SEQ ID NO: 24185 - RNA, 20 nt, synthetic construct
  source 1..20: mol_type = other RNA
attcatcttgacttcacttc

SEQ ID NO: 24186 - RNA, 20 nt, synthetic construct
  source 1..20: mol_type = other RNA
attcatgacaagaatctttg

SEQ ID NO: 24187 - RNA, 20 nt, synthetic construct
  source 1..20: mol_type = other RNA
attcatgcaactgaaaacat

SEQ ID NO: 24188 - RNA, 20 nt, synthetic construct
  source 1..20: mol_type = other RNA
attcatgctgtgaatttgga

SEQ ID NO: 24189 - RNA, 20 nt, synthetic construct
  source 1..20: mol_type = other RNA
attcatgtaatgcaaactct

SEQ ID NO: 24190 - RNA, 20 nt, synthetic construct
  source 1..20: mol_type = other RNA
attcatgtttgtggttttaa

SEQ ID NO: 24191 - RNA, 20 nt, synthetic construct
  source 1..20: mol_type = other RNA
attcattaccaggctggaag

SEQ ID NO: 24192 - RNA, 20 nt, synthetic construct
  source 1..20: mol_type = other RNA
attcattcatgacaagaatc

SEQ ID NO: 24193 - RNA, 20 nt, synthetic construct
  source 1..20: mol_type = other RNA
attcattctttttactcgag

SEQ ID NO: 24194 - RNA, 20 nt, synthetic construct
  source 1..20: mol_type = other RNA
attcattgtacatgaagtcc

SEQ ID NO: 24195 - RNA, 20 nt, synthetic construct
  source 1..20: mol_type = other RNA
attcattgttgtgtgttaaa

SEQ ID NO: 24196 - RNA, 20 nt, synthetic construct
  source 1..20: mol_type = other RNA
attcatttccaaagatcatg

SEQ ID NO: 24197 - RNA, 20 nt, synthetic construct
  source 1..20: mol_type = other RNA
attccaaaagtgaatatagc

SEQ ID NO: 24198 - RNA, 20 nt, synthetic construct
  source 1..20: mol_type = other RNA
attccaaatgtctgtcttta

SEQ ID NO: 24199 - RNA, 20 nt, synthetic construct
  source 1..20: mol_type = other RNA
attccaaattagctttctcc

SEQ ID NO: 24200 - RNA, 20 nt, synthetic construct
  source 1..20: mol_type = other RNA
attccaagagaggaataaat

SEQ ID NO: 24201 - RNA, 20 nt, synthetic construct
  source 1..20: mol_type = other RNA
attccaatccttccttcatg

SEQ ID NO: 24202 - RNA, 20 nt, synthetic construct
  source 1..20: mol_type = other RNA
attccacaaccactggggag

SEQ ID NO: 24203 - RNA, 20 nt, synthetic construct
  source 1..20: mol_type = other RNA
attccacgctgtggcttggg

SEQ ID NO: 24204 - RNA, 20 nt, synthetic construct
  source 1..20: mol_type = other RNA
attccacttatatgaagcta

SEQ ID NO: 24205 - RNA, 20 nt, synthetic construct
  source 1..20: mol_type = other RNA
attccagaccagcagttcaa

SEQ ID NO: 24206 - RNA, 20 nt, synthetic construct
  source 1..20: mol_type = other RNA
attccagagaattcagagtg

SEQ ID NO: 24207 - RNA, 20 nt, synthetic construct
  source 1..20: mol_type = other RNA
attccagagggtaacgtgag

SEQ ID NO: 24208 - RNA, 20 nt, synthetic construct
  source 1..20: mol_type = other RNA
attccagattgaaatctagg

SEQ ID NO: 24209 - RNA, 20 nt, synthetic construct
  source 1..20: mol_type = other RNA
attccagccattctcttctg

SEQ ID NO: 24210 - RNA, 20 nt, synthetic construct
  source 1..20: mol_type = other RNA
attccaggatcaaatctggc

SEQ ID NO: 24211 - RNA, 20 nt, synthetic construct
  source 1..20: mol_type = other RNA
attccaggtttacaggatat

SEQ ID NO: 24212 - RNA, 20 nt, synthetic construct
  source 1..20: mol_type = other RNA
attccaggttttatctctct

SEQ ID NO: 24213 - RNA, 20 nt, synthetic construct
  source 1..20: mol_type = other RNA
attccagtttctctgctttt

SEQ ID NO: 24214 - RNA, 20 nt, synthetic construct
  source 1..20: mol_type = other RNA
attccataaaaaccaaacac

SEQ ID NO: 24215 - RNA, 20 nt, synthetic construct
  source 1..20: mol_type = other RNA
attccataaatgtttgctaa

SEQ ID NO: 24216 - RNA, 20 nt, synthetic construct
  source 1..20: mol_type = other RNA
attccataagatctgtcttt

SEQ ID NO: 24217 - RNA, 20 nt, synthetic construct
  source 1..20: mol_type = other RNA
attccatcagtggttgtgct

SEQ ID NO: 24218 - RNA, 20 nt, synthetic construct
  source 1..20: mol_type = other RNA
attccatggtatgtgccatc

SEQ ID NO: 24219 - RNA, 20 nt, synthetic construct
  source 1..20: mol_type = other RNA
attccattccttttcgagac

SEQ ID NO: 24220 - RNA, 20 nt, synthetic construct
  source 1..20: mol_type = other RNA
attccattgttctctttgtt

SEQ ID NO: 24221 - RNA, 20 nt, synthetic construct
  source 1..20: mol_type = other RNA
attccatttttctgaccaac

SEQ ID NO: 24222 - RNA, 20 nt, synthetic construct
  source 1..20: mol_type = other RNA
attcccaaatgtcttaagaa

SEQ ID NO: 24223 - RNA, 20 nt, synthetic construct
  source 1..20: mol_type = other RNA
attcccaagatcataagctt

SEQ ID NO: 24224 - RNA, 20 nt, synthetic construct
  source 1..20: mol_type = other RNA
attcccacaaaatatgaagc

SEQ ID NO: 24225 - RNA, 20 nt, synthetic construct
  source 1..20: mol_type = other RNA
attcccaggtattttgttct

SEQ ID NO: 24226 - RNA, 20 nt, synthetic construct
  source 1..20: mol_type = other RNA
attcccatgttcactgcaga

SEQ ID NO: 24227 - RNA, 20 nt, synthetic construct
  source 1..20: mol_type = other RNA
attccccacataggatagtt

SEQ ID NO: 24228 - RNA, 20 nt, synthetic construct
  source 1..20: mol_type = other RNA
attccccagcctcagcctcc

SEQ ID NO: 24229 - RNA, 20 nt, synthetic construct
  source 1..20: mol_type = other RNA
attccccagggaaaccttac

SEQ ID NO: 24230 - RNA, 20 nt, synthetic construct
  source 1..20: mol_type = other RNA
attcccccttatgtgtgtat

SEQ ID NO: 24231 - RNA, 20 nt, synthetic construct
  source 1..20: mol_type = other RNA
attcccctggatcccccagc

SEQ ID NO: 24232 - RNA, 20 nt, synthetic construct
  source 1..20: mol_type = other RNA
attccccttatatgggatat

SEQ ID NO: 24233 - RNA, 20 nt, synthetic construct
  source 1..20: mol_type = other RNA
attccccttgccaaggcttg

SEQ ID NO: 24234 - RNA, 20 nt, synthetic construct
  source 1..20: mol_type = other RNA
attccctacattgccttcaa

SEQ ID NO: 24235 - RNA, 20 nt, synthetic construct
  source 1..20: mol_type = other RNA
attccctcagcaaaagcaat

SEQ ID NO: 24236 - RNA, 20 nt, synthetic construct
  source 1..20: mol_type = other RNA
attccctctacaaaaggagg

SEQ ID NO: 24237 - RNA, 20 nt, synthetic construct
  source 1..20: mol_type = other RNA
attccctctggccttctata

SEQ ID NO: 24238 - RNA, 20 nt, synthetic construct
  source 1..20: mol_type = other RNA
attccctgtctgggaagtta

SEQ ID NO: 24239 - RNA, 20 nt, synthetic construct
  source 1..20: mol_type = other RNA
attccctgtctgtgatgtag

SEQ ID NO: 24240 - RNA, 20 nt, synthetic construct
  source 1..20: mol_type = other RNA
attcccttcagtgtagtcag

SEQ ID NO: 24241 - RNA, 20 nt, synthetic construct
  source 1..20: mol_type = other RNA
attccgcctgggcgacagag

SEQ ID NO: 24242 - RNA, 20 nt, synthetic construct
  source 1..20: mol_type = other RNA
attccgcgtttattagaact

SEQ ID NO: 24243 - RNA, 20 nt, synthetic construct
  source 1..20: mol_type = other RNA
attccgctaaacattttatt

SEQ ID NO: 24244 - RNA, 20 nt, synthetic construct
  source 1..20: mol_type = other RNA
attccgctctggttttaaag

SEQ ID NO: 24245 - RNA, 20 nt, synthetic construct
  source 1..20: mol_type = other RNA
attccgtctcaaaaaattat

SEQ ID NO: 24246 - RNA, 20 nt, synthetic construct
  source 1..20: mol_type = other RNA
attccgtggaaggccttctc

SEQ ID NO: 24247 - RNA, 20 nt, synthetic construct
  source 1..20: mol_type = other RNA
attcctaactcaagagttac

SEQ ID NO: 24248 - RNA, 20 nt, synthetic construct
  source 1..20: mol_type = other RNA
attcctactttcttcaacca

SEQ ID NO: 24249 - RNA, 20 nt, synthetic construct
  source 1..20: mol_type = other RNA
attcctatcagaagcacacc

SEQ ID NO: 24250 - RNA, 20 nt, synthetic construct
  source 1..20: mol_type = other RNA
attcctccctggagaggcaa

SEQ ID NO: 24251 - RNA, 20 nt, synthetic construct
  source 1..20: mol_type = other RNA
attcctctcttggaatgtgc

SEQ ID NO: 24252 - RNA, 20 nt, synthetic construct
  source 1..20: mol_type = other RNA
attcctgaaatgaaccaaac

SEQ ID NO: 24253 - RNA, 20 nt, synthetic construct
  source 1..20: mol_type = other RNA
attccttcccctttctttgg

SEQ ID NO: 24254 - RNA, 20 nt, synthetic construct
  source 1..20: mol_type = other RNA
attccttccgacctgtagat

SEQ ID NO: 24255 - RNA, 20 nt, synthetic construct
  source 1..20: mol_type = other RNA
attccttcctttgatgactt

SEQ ID NO: 24256 - RNA, 20 nt, synthetic construct
  source 1..20: mol_type = other RNA
attccttcttcacacattaa

SEQ ID NO: 24257 - RNA, 20 nt, synthetic construct
  source 1..20: mol_type = other RNA
attcctttcaaagagacctg

SEQ ID NO: 24258 - RNA, 20 nt, synthetic construct
  source 1..20: mol_type = other RNA
attcctttctaggcatctat

SEQ ID NO: 24259 - RNA, 20 nt, synthetic construct
  source 1..20: mol_type = other RNA
attccttttcgagactgagt

SEQ ID NO: 24260 - RNA, 20 nt, synthetic construct
  source 1..20: mol_type = other RNA
attccttttttatgtgcttt

SEQ ID NO: 24261 - RNA, 20 nt, synthetic construct
  source 1..20: mol_type = other RNA
attcgaaaatgggccaaaga

SEQ ID NO: 24262 - RNA, 20 nt, synthetic construct
  source 1..20: mol_type = other RNA
attcgattaaaataacacgc

SEQ ID NO: 24263 - RNA, 20 nt, synthetic construct
  source 1..20: mol_type = other RNA
attcgcataaccaaattatt

SEQ ID NO: 24264 - RNA, 20 nt, synthetic construct
  source 1..20: mol_type = other RNA
attcgcattgctaattcatt

SEQ ID NO: 24265 - RNA, 20 nt, synthetic construct
  source 1..20: mol_type = other RNA
attcggccaagatctgtttt

SEQ ID NO: 24266 - RNA, 20 nt, synthetic construct
  source 1..20: mol_type = other RNA
attcgggggagagcactggt

SEQ ID NO: 24267 - RNA, 20 nt, synthetic construct
  source 1..20: mol_type = other RNA
attcggtggcattaaggaca

SEQ ID NO: 24268 - RNA, 20 nt, synthetic construct
  source 1..20: mol_type = other RNA
attcgtagcaggtttaggaa

SEQ ID NO: 24269 - RNA, 20 nt, synthetic construct
  source 1..20: mol_type = other RNA
attcgtccctaaacactgta

SEQ ID NO: 24270 - RNA, 20 nt, synthetic construct
  source 1..20: mol_type = other RNA
attcgttaatacttgtgtag

SEQ ID NO: 24271 - RNA, 20 nt, synthetic construct
  source 1..20: mol_type = other RNA
attcgttcaaaacatcatct

SEQ ID NO: 24272 - RNA, 20 nt, synthetic construct
  source 1..20: mol_type = other RNA
attcgttccagcagggtaaa

SEQ ID NO: 24273 - RNA, 20 nt, synthetic construct
  source 1..20: mol_type = other RNA
attctaaacacacgggctgg

SEQ ID NO: 24274 - RNA, 20 nt, synthetic construct
  source 1..20: mol_type = other RNA
attctaaacctgaggtcttt

SEQ ID NO: 24275 - RNA, 20 nt, synthetic construct
  source 1..20: mol_type = other RNA
attctaacaagaagctgttt

SEQ ID NO: 24276 - RNA, 20 nt, synthetic construct
  source 1..20: mol_type = other RNA
attctaacattatcttctac

SEQ ID NO: 24277 - RNA, 20 nt, synthetic construct
  source 1..20: mol_type = other RNA
attctaagtttgccaaagat

SEQ ID NO: 24278 - RNA, 20 nt, synthetic construct
  source 1..20: mol_type = other RNA
attctaatgaactcccagaa

SEQ ID NO: 24279 - RNA, 20 nt, synthetic construct
  source 1..20: mol_type = other RNA
attctaatgtgcaaggagag

SEQ ID NO: 24280 - RNA, 20 nt, synthetic construct
  source 1..20: mol_type = other RNA
attctaattagaaactggtg

SEQ ID NO: 24281 - RNA, 20 nt, synthetic construct
  source 1..20: mol_type = other RNA
attctacagaaaacccttca

SEQ ID NO: 24282 - RNA, 20 nt, synthetic construct
  source 1..20: mol_type = other RNA
attctacagtattacacaga

SEQ ID NO: 24283 - RNA, 20 nt, synthetic construct
  source 1..20: mol_type = other RNA
attctacctggagcctgagg

SEQ ID NO: 24284 - RNA, 20 nt, synthetic construct
  source 1..20: mol_type = other RNA
attctactaaacattaagga

SEQ ID NO: 24285 - RNA, 20 nt, synthetic construct
  source 1..20: mol_type = other RNA
attctagaaaggagggactg

SEQ ID NO: 24286 - RNA, 20 nt, synthetic construct
  source 1..20: mol_type = other RNA
attctagtgatgggagatgg

SEQ ID NO: 24287 - RNA, 20 nt, synthetic construct
  source 1..20: mol_type = other RNA
attctagttaataaaggtgc

SEQ ID NO: 24288 - RNA, 20 nt, synthetic construct
  source 1..20: mol_type = other RNA
attctagttctagctctgtc

SEQ ID NO: 24289 - RNA, 20 nt, synthetic construct
  source 1..20: mol_type = other RNA
attctataggtagtacatat

SEQ ID NO: 24290 - RNA, 20 nt, synthetic construct
  source 1..20: mol_type = other RNA
attctatcatcaagacagag

SEQ ID NO: 24291 - RNA, 20 nt, synthetic construct
  source 1..20: mol_type = other RNA
attctatctgaactttcgaa

SEQ ID NO: 24292 - RNA, 20 nt, synthetic construct
  source 1..20: mol_type = other RNA
attctatttttctgcaattg

SEQ ID NO: 24293 - RNA, 20 nt, synthetic construct
  source 1..20: mol_type = other RNA
attctcaaatgaacaggttc

SEQ ID NO: 24294 - RNA, 20 nt, synthetic construct
  source 1..20: mol_type = other RNA
attctcattagttatctctt

SEQ ID NO: 24295 - RNA, 20 nt, synthetic construct
  source 1..20: mol_type = other RNA
attctccactttcatgattt

SEQ ID NO: 24296 - RNA, 20 nt, synthetic construct
  source 1..20: mol_type = other RNA
attctcccagttgtcagaat

SEQ ID NO: 24297 - RNA, 20 nt, synthetic construct
  source 1..20: mol_type = other RNA
attctccctgaaattgtcag

SEQ ID NO: 24298 - RNA, 20 nt, synthetic construct
  source 1..20: mol_type = other RNA
attctctctcaactggcccc

SEQ ID NO: 24299 - RNA, 20 nt, synthetic construct
  source 1..20: mol_type = other RNA
attctctggaatagaagagc

SEQ ID NO: 24300 - RNA, 20 nt, synthetic construct
  source 1..20: mol_type = other RNA
attctctgtctctgttgccc

SEQ ID NO: 24301 - RNA, 20 nt, synthetic construct
  source 1..20: mol_type = other RNA
attctcttctggatagcatt

SEQ ID NO: 24302 - RNA, 20 nt, synthetic construct
  source 1..20: mol_type = other RNA
attctctttagggaagatag

SEQ ID NO: 24303 - RNA, 20 nt, synthetic construct
  source 1..20: mol_type = other RNA
attctctttctgaaattctc

SEQ ID NO: 24304 - RNA, 20 nt, synthetic construct
  source 1..20: mol_type = other RNA
attctgaactttcaacctaa

SEQ ID NO: 24305 - RNA, 20 nt, synthetic construct
  source 1..20: mol_type = other RNA
attctgacaactgggagaat

SEQ ID NO: 24306 - RNA, 20 nt, synthetic construct
  source 1..20: mol_type = other RNA
attctgacacccgaagagga

SEQ ID NO: 24307 - RNA, 20 nt, synthetic construct
  source 1..20: mol_type = other RNA
attctgacccagagcctaat

SEQ ID NO: 24308 - RNA, 20 nt, synthetic construct
  source 1..20: mol_type = other RNA
attctgaccctttattcaaa

SEQ ID NO: 24309 - RNA, 20 nt, synthetic construct
  source 1..20: mol_type = other RNA
attctgacctaaagttttaa

SEQ ID NO: 24310 - RNA, 20 nt, synthetic construct
  source 1..20: mol_type = other RNA
attctgacttagtgagggag

SEQ ID NO: 24311 - RNA, 20 nt, synthetic construct
  source 1..20: mol_type = other RNA
attctgaggcctcctgcctt

SEQ ID NO: 24312 - RNA, 20 nt, synthetic construct
  source 1..20: mol_type = other RNA
attctgagggaaattatttc

SEQ ID NO: 24313 - RNA, 20 nt, synthetic construct
  source 1..20: mol_type = other RNA
attctgatagcttgacaaaa

SEQ ID NO: 24314 - RNA, 20 nt, synthetic construct
  source 1..20: mol_type = other RNA
attctgatgcacaagccttg

SEQ ID NO: 24315 - RNA, 20 nt, synthetic construct
  source 1..20: mol_type = other RNA
attctgcagtgaacatggga

SEQ ID NO: 24316 - RNA, 20 nt, synthetic construct
  source 1..20: mol_type = other RNA
attctgcagtttgtgttttc

SEQ ID NO: 24317 - RNA, 20 nt, synthetic construct
  source 1..20: mol_type = other RNA
attctgccacattcaacaac

SEQ ID NO: 24318 - RNA, 20 nt, synthetic construct
  source 1..20: mol_type = other RNA
attctgcctgcagactgcag

SEQ ID NO: 24319 - RNA, 20 nt, synthetic construct
  source 1..20: mol_type = other RNA
attctgccttcaatgtttgg

SEQ ID NO: 24320 - RNA, 20 nt, synthetic construct
  source 1..20: mol_type = other RNA
attctgctactagcaagcta

SEQ ID NO: 24321 - RNA, 20 nt, synthetic construct
  source 1..20: mol_type = other RNA
attctgctatgaaatgtggt

SEQ ID NO: 24322 - RNA, 20 nt, synthetic construct
  source 1..20: mol_type = other RNA
attctgcttattatatgcct

SEQ ID NO: 24323 - RNA, 20 nt, synthetic construct
  source 1..20: mol_type = other RNA
attctgcttccttgctatgt

SEQ ID NO: 24324 - RNA, 20 nt, synthetic construct
  source 1..20: mol_type = other RNA
attctggagtgttttcttca

SEQ ID NO: 24325 - RNA, 20 nt, synthetic construct
  source 1..20: mol_type = other RNA
attctggatgttaattagat

SEQ ID NO: 24326 - RNA, 20 nt, synthetic construct
  source 1..20: mol_type = other RNA
attctggccaaatccctgat

SEQ ID NO: 24327 - RNA, 20 nt, synthetic construct
  source 1..20: mol_type = other RNA
attctggggctcaagtaagt

SEQ ID NO: 24328 - RNA, 20 nt, synthetic construct
  source 1..20: mol_type = other RNA
attctgtcacatagacctga

SEQ ID NO: 24329 - RNA, 20 nt, synthetic construct
  source 1..20: mol_type = other RNA
attctgtctctacaaaaaag

SEQ ID NO: 24330 - RNA, 20 nt, synthetic construct
  source 1..20: mol_type = other RNA
attctgtgaattgtgacagt

SEQ ID NO: 24331 - RNA, 20 nt, synthetic construct
  source 1..20: mol_type = other RNA
attctgtgccaagcaacttg

SEQ ID NO: 24332 - RNA, 20 nt, synthetic construct
  source 1..20: mol_type = other RNA
attctgtgcttaaatttttg

SEQ ID NO: 24333 - RNA, 20 nt, synthetic construct
  source 1..20: mol_type = other RNA
attctgttctagctcctggg

SEQ ID NO: 24334 - RNA, 20 nt, synthetic construct
  source 1..20: mol_type = other RNA
attctgttctcagtatcctt

SEQ ID NO: 24335 - RNA, 20 nt, synthetic construct
  source 1..20: mol_type = other RNA
attctgtttacccttactaa

SEQ ID NO: 24336 - RNA, 20 nt, synthetic construct
  source 1..20: mol_type = other RNA
attcttaaactgccaaaccc

SEQ ID NO: 24337 - RNA, 20 nt, synthetic construct
  source 1..20: mol_type = other RNA
attcttacagtgacatatgc

SEQ ID NO: 24338 - RNA, 20 nt, synthetic construct
  source 1..20: mol_type = other RNA
attcttaccttctaaaatca

SEQ ID NO: 24339 - RNA, 20 nt, synthetic construct
  source 1..20: mol_type = other RNA
attcttatccctacctaaaa

SEQ ID NO: 24340 - RNA, 20 nt, synthetic construct
  source 1..20: mol_type = other RNA
attcttattgattcagatga

SEQ ID NO: 24341 - RNA, 20 nt, synthetic construct
  source 1..20: mol_type = other RNA
attcttcaccattccagcca

SEQ ID NO: 24342 - RNA, 20 nt, synthetic construct
  source 1..20: mol_type = other RNA
attcttcagcaaggaccatt

SEQ ID NO: 24343 - RNA, 20 nt, synthetic construct
  source 1..20: mol_type = other RNA
attcttccactagtgggatc

SEQ ID NO: 24344 - RNA, 20 nt, synthetic construct
  source 1..20: mol_type = other RNA
attcttccagcctggtaatg

SEQ ID NO: 24345 - RNA, 20 nt, synthetic construct
  source 1..20: mol_type = other RNA
attcttcctgtcttggaccc

SEQ ID NO: 24346 - RNA, 20 nt, synthetic construct
  source 1..20: mol_type = other RNA
attcttccttaatgtttagt

SEQ ID NO: 24347 - RNA, 20 nt, synthetic construct
  source 1..20: mol_type = other RNA
attcttctaataggaagtgg

SEQ ID NO: 24348 - RNA, 20 nt, synthetic construct
  source 1..20: mol_type = other RNA
attcttctctaatgtaaaca

SEQ ID NO: 24349 - RNA, 20 nt, synthetic construct
  source 1..20: mol_type = other RNA
attcttctgtaatattaacc

SEQ ID NO: 24350 - RNA, 20 nt, synthetic construct
  source 1..20: mol_type = other RNA
attcttgacatgattgagga

SEQ ID NO: 24351 - RNA, 20 nt, synthetic construct
  source 1..20: mol_type = other RNA
attcttgacctcaaatgatc

SEQ ID NO: 24352 - RNA, 20 nt, synthetic construct
  source 1..20: mol_type = other RNA
attcttgggtgaataaccca

SEQ ID NO: 24353 - RNA, 20 nt, synthetic construct
  source 1..20: mol_type = other RNA
attcttggtcttttgatttt

SEQ ID NO: 24354 - RNA, 20 nt, synthetic construct
  source 1..20: mol_type = other RNA
attcttgtcatgaatgaatg

SEQ ID NO: 24355 - RNA, 20 nt, synthetic construct
  source 1..20: mol_type = other RNA
attcttgttaagcattttcc

SEQ ID NO: 24356 - RNA, 20 nt, synthetic construct
  source 1..20: mol_type = other RNA
attcttgttttcttgagatg

SEQ ID NO: 24357 - RNA, 20 nt, synthetic construct
  source 1..20: mol_type = other RNA
attctttaaaactgctgagt

SEQ ID NO: 24358 - RNA, 20 nt, synthetic construct
  source 1..20: mol_type = other RNA
attcttttagagtaactgtc

SEQ ID NO: 24359 - RNA, 20 nt, synthetic construct
  source 1..20: mol_type = other RNA
attcttttgctgtataccca

SEQ ID NO: 24360 - RNA, 20 nt, synthetic construct
  source 1..20: mol_type = other RNA
attctttttactcgagggta

SEQ ID NO: 24361 - RNA, 20 nt, synthetic construct
  source 1..20: mol_type = other RNA
attctttttctagtttgagg

SEQ ID NO: 24362 - RNA, 20 nt, synthetic construct
  source 1..20: mol_type = other RNA
attgaaaatggtttaggctg

SEQ ID NO: 24363 - RNA, 20 nt, synthetic construct
  source 1..20: mol_type = other RNA
attgaaacaatactttagac

SEQ ID NO: 24364 - RNA, 20 nt, synthetic construct
  source 1..20: mol_type = other RNA
attgaaacgatgcattccag

SEQ ID NO: 24365 - RNA, 20 nt, synthetic construct
  source 1..20: mol_type = other RNA
attgaaactcaatgttggtt

SEQ ID NO: 24366 - RNA, 20 nt, synthetic construct
  source 1..20: mol_type = other RNA
attgaaagcccttgagtatt

SEQ ID NO: 24367 - RNA, 20 nt, synthetic construct
  source 1..20: mol_type = other RNA
attgaaatctaggcatataa

SEQ ID NO: 24368 - RNA, 20 nt, synthetic construct
  source 1..20: mol_type = other RNA
attgaacagcctaaagtcca

SEQ ID NO: 24369 - RNA, 20 nt, synthetic construct
  source 1..20: mol_type = other RNA
attgaacccactgagcattt

SEQ ID NO: 24370 - RNA, 20 nt, synthetic construct
  source 1..20: mol_type = other RNA
attgaactgttacttgacta

SEQ ID NO: 24371 - RNA, 20 nt, synthetic construct
  source 1..20: mol_type = other RNA
attgaagagggaacattttc

SEQ ID NO: 24372 - RNA, 20 nt, synthetic construct
  source 1..20: mol_type = other RNA
attgaagccagcacctaaca

SEQ ID NO: 24373 - RNA, 20 nt, synthetic construct
  source 1..20: mol_type = other RNA
attgaagctactattccagg

SEQ ID NO: 24374 - RNA, 20 nt, synthetic construct
  source 1..20: mol_type = other RNA
attgaaggcagaattataga

SEQ ID NO: 24375 - RNA, 20 nt, synthetic construct
  source 1..20: mol_type = other RNA
attgaagtatagtttgaagt

SEQ ID NO: 24376 - RNA, 20 nt, synthetic construct
  source 1..20: mol_type = other RNA
attgaataatttccaggtca

SEQ ID NO: 24377 - RNA, 20 nt, synthetic construct
  source 1..20: mol_type = other RNA
attgaatggaaagaaataga

SEQ ID NO: 24378 - RNA, 20 nt, synthetic construct
  source 1..20: mol_type = other RNA
attgaatggggatgcaacaa

SEQ ID NO: 24379 - RNA, 20 nt, synthetic construct
  source 1..20: mol_type = other RNA
attgacaagacgtgtacata

SEQ ID NO: 24380 - RNA, 20 nt, synthetic construct
  source 1..20: mol_type = other RNA
attgacaatataggagacta

SEQ ID NO: 24381 - RNA, 20 nt, synthetic construct
  source 1..20: mol_type = other RNA
attgacatttttcaaatacc

SEQ ID NO: 24382 - RNA, 20 nt, synthetic construct
  source 1..20: mol_type = other RNA
attgaccaaacatgtgagga

SEQ ID NO: 24383 - RNA, 20 nt, synthetic construct
  source 1..20: mol_type = other RNA
attgaccattccacgctgtg

SEQ ID NO: 24384 - RNA, 20 nt, synthetic construct
  source 1..20: mol_type = other RNA
attgaccttctacttatctt

SEQ ID NO: 24385 - RNA, 20 nt, synthetic construct
  source 1..20: mol_type = other RNA
attgaccttgtatccagtaa

SEQ ID NO: 24386 - RNA, 20 nt, synthetic construct
  source 1..20: mol_type = other RNA
attgactaccaattctccct

SEQ ID NO: 24387 - RNA, 20 nt, synthetic construct
  source 1..20: mol_type = other RNA
attgacttcactagatctct

SEQ ID NO: 24388 - RNA, 20 nt, synthetic construct
  source 1..20: mol_type = other RNA
attgactttaccctgctgga

SEQ ID NO: 24389 - RNA, 20 nt, synthetic construct
  source 1..20: mol_type = other RNA
attgagaagcagaaaatcag

SEQ ID NO: 24390 - RNA, 20 nt, synthetic construct
  source 1..20: mol_type = other RNA
attgagagctttcttttaaa

SEQ ID NO: 24391 - RNA, 20 nt, synthetic construct
  source 1..20: mol_type = other RNA
attgagagtgaaaacacaaa

SEQ ID NO: 24392 - RNA, 20 nt, synthetic construct
  source 1..20: mol_type = other RNA
attgagatgtactggaagtg

SEQ ID NO: 24393 - RNA, 20 nt, synthetic construct
  source 1..20: mol_type = other RNA
attgagattagcgaaaggga

SEQ ID NO: 24394 - RNA, 20 nt, synthetic construct
  source 1..20: mol_type = other RNA
attgagccaaagaagaaatc

SEQ ID NO: 24395 - RNA, 20 nt, synthetic construct
  source 1..20: mol_type = other RNA
attgagcctgttccgatttt

SEQ ID NO: 24396 - RNA, 20 nt, synthetic construct
  source 1..20: mol_type = other RNA
attgagctgtccccaccgcc

SEQ ID NO: 24397 - RNA, 20 nt, synthetic construct
  source 1..20: mol_type = other RNA
attgaggacttcatgtacaa

SEQ ID NO: 24398 - RNA, 20 nt, synthetic construct
  source 1..20: mol_type = other RNA
attgagggttagatttttcc

SEQ ID NO: 24399 - RNA, 20 nt, synthetic construct
  source 1..20: mol_type = other RNA
attgagtatctggtgctggc

SEQ ID NO: 24400 - RNA, 20 nt, synthetic construct
  source 1..20: mol_type = other RNA
attgagtctgtagggtgact

SEQ ID NO: 24401 - RNA, 20 nt, synthetic construct
  source 1..20: mol_type = other RNA
attgagtgtagctgtggctc

SEQ ID NO: 24402 - RNA, 20 nt, synthetic construct
  source 1..20: mol_type = other RNA
attgagtttcaatgactttt

SEQ ID NO: 24403 - RNA, 20 nt, synthetic construct
  source 1..20: mol_type = other RNA
attgataaatctaaagccaa

SEQ ID NO: 24404 - RNA, 20 nt, synthetic construct
  source 1..20: mol_type = other RNA
attgataagcacatggtgat

SEQ ID NO: 24405 - RNA, 20 nt, synthetic construct
  source 1..20: mol_type = other RNA
attgatacaatacttggatc

SEQ ID NO: 24406 - RNA, 20 nt, synthetic construct
  source 1..20: mol_type = other RNA
attgatatctgagtgttgtg

SEQ ID NO: 24407 - RNA, 20 nt, synthetic construct
  source 1..20: mol_type = other RNA
attgatctgccaggacaatt

SEQ ID NO: 24408 - RNA, 20 nt, synthetic construct
  source 1..20: mol_type = other RNA
attgattcagatgacagaaa

SEQ ID NO: 24409 - RNA, 20 nt, synthetic construct
  source 1..20: mol_type = other RNA
attgattccagtttctctgc

SEQ ID NO: 24410 - RNA, 20 nt, synthetic construct
  source 1..20: mol_type = other RNA
attgattggcaaatctttag

SEQ ID NO: 24411 - RNA, 20 nt, synthetic construct
  source 1..20: mol_type = other RNA
attgatttgaccatgggaca

SEQ ID NO: 24412 - RNA, 20 nt, synthetic construct
  source 1..20: mol_type = other RNA
attgatttgttatatccaga

SEQ ID NO: 24413 - RNA, 20 nt, synthetic construct
  source 1..20: mol_type = other RNA
attgattttgtatcctgaga

SEQ ID NO: 24414 - RNA, 20 nt, synthetic construct
  source 1..20: mol_type = other RNA
attgcaaaaacagtttccct

SEQ ID NO: 24415 - RNA, 20 nt, synthetic construct
  source 1..20: mol_type = other RNA
attgcaaactaagtggtatt

SEQ ID NO: 24416 - RNA, 20 nt, synthetic construct
  source 1..20: mol_type = other RNA
attgcacagtctcccccagg

SEQ ID NO: 24417 - RNA, 20 nt, synthetic construct
  source 1..20: mol_type = other RNA
attgcactccacgtgggtga

SEQ ID NO: 24418 - RNA, 20 nt, synthetic construct
  source 1..20: mol_type = other RNA
attgcagagtgttcaaaagc

SEQ ID NO: 24419 - RNA, 20 nt, synthetic construct
  source 1..20: mol_type = other RNA
attgcagccagagagtggaa

SEQ ID NO: 24420 - RNA, 20 nt, synthetic construct
  source 1..20: mol_type = other RNA
attgcaggtgtgggccacca

SEQ ID NO: 24421 - RNA, 20 nt, synthetic construct
  source 1..20: mol_type = other RNA
attgcaggtttactccaaga

SEQ ID NO: 24422 - RNA, 20 nt, synthetic construct
  source 1..20: mol_type = other RNA
attgcatagggatgttgcct

SEQ ID NO: 24423 - RNA, 20 nt, synthetic construct
  source 1..20: mol_type = other RNA
attgcatcaactgcttccct

SEQ ID NO: 24424 - RNA, 20 nt, synthetic construct
  source 1..20: mol_type = other RNA
attgcatgagacttggagtt

SEQ ID NO: 24425 - RNA, 20 nt, synthetic construct
  source 1..20: mol_type = other RNA
attgcattgactaccaattc

SEQ ID NO: 24426 - RNA, 20 nt, synthetic construct
  source 1..20: mol_type = other RNA
attgcatttacttgtcattt

SEQ ID NO: 24427 - RNA, 20 nt, synthetic construct
  source 1..20: mol_type = other RNA
attgccaaactgttttccac

SEQ ID NO: 24428 - RNA, 20 nt, synthetic construct
  source 1..20: mol_type = other RNA
attgccaggtttgtgcttgg

SEQ ID NO: 24429 - RNA, 20 nt, synthetic construct
  source 1..20: mol_type = other RNA
attgccagttttctggaaac

SEQ ID NO: 24430 - RNA, 20 nt, synthetic construct
  source 1..20: mol_type = other RNA
attgccatatgtagggcacc

SEQ ID NO: 24431 - RNA, 20 nt, synthetic construct
  source 1..20: mol_type = other RNA
attgcccaggctggtcttgt

SEQ ID NO: 24432 - RNA, 20 nt, synthetic construct
  source 1..20: mol_type = other RNA
attgcccattataaaatagg

SEQ ID NO: 24433 - RNA, 20 nt, synthetic construct
  source 1..20: mol_type = other RNA
attgccccattgcactccac

SEQ ID NO: 24434 - RNA, 20 nt, synthetic construct
  source 1..20: mol_type = other RNA
attgcctaacaccagtaaga

SEQ ID NO: 24435 - RNA, 20 nt, synthetic construct
  source 1..20: mol_type = other RNA
attgcctatagacagcatcc

SEQ ID NO: 24436 - RNA, 20 nt, synthetic construct
  source 1..20: mol_type = other RNA
attgcctccatatgggatgc

SEQ ID NO: 24437 - RNA, 20 nt, synthetic construct
  source 1..20: mol_type = other RNA
attgccttcaagttgctttt

SEQ ID NO: 24438 - RNA, 20 nt, synthetic construct
  source 1..20: mol_type = other RNA
attgccttcgcagggtgaaa

SEQ ID NO: 24439 - RNA, 20 nt, synthetic construct
  source 1..20: mol_type = other RNA
attgcgattgtttcagtgtg

SEQ ID NO: 24440 - RNA, 20 nt, synthetic construct
  source 1..20: mol_type = other RNA
attgcgcagaactggggctt

SEQ ID NO: 24441 - RNA, 20 nt, synthetic construct
  source 1..20: mol_type = other RNA
attgctaaactgttccccaa

SEQ ID NO: 24442 - RNA, 20 nt, synthetic construct
  source 1..20: mol_type = other RNA
attgctaattcattgtacat

SEQ ID NO: 24443 - RNA, 20 nt, synthetic construct
  source 1..20: mol_type = other RNA
attgctagtgtcctcaggct

SEQ ID NO: 24444 - RNA, 20 nt, synthetic construct
  source 1..20: mol_type = other RNA
attgctgcagtttttccact

SEQ ID NO: 24445 - RNA, 20 nt, synthetic construct
  source 1..20: mol_type = other RNA
attgcttgagagagataaaa

SEQ ID NO: 24446 - RNA, 20 nt, synthetic construct
  source 1..20: mol_type = other RNA
attgcttttgctgagggaat

SEQ ID NO: 24447 - RNA, 20 nt, synthetic construct
  source 1..20: mol_type = other RNA
attggaaaactaggtatttg

SEQ ID NO: 24448 - RNA, 20 nt, synthetic construct
  source 1..20: mol_type = other RNA
attggaaaactctgtttcct

SEQ ID NO: 24449 - RNA, 20 nt, synthetic construct
  source 1..20: mol_type = other RNA
attggaacctttgtccactg

SEQ ID NO: 24450 - RNA, 20 nt, synthetic construct
  source 1..20: mol_type = other RNA
attggaagactatcacgatt

SEQ ID NO: 24451 - RNA, 20 nt, synthetic construct
  source 1..20: mol_type = other RNA
attggaatgagtccagcttt

SEQ ID NO: 24452 - RNA, 20 nt, synthetic construct
  source 1..20: mol_type = other RNA
attggacgggtggtagggag

SEQ ID NO: 24453 - RNA, 20 nt, synthetic construct
  source 1..20: mol_type = other RNA
attggagactgataaacttc

SEQ ID NO: 24454 - RNA, 20 nt, synthetic construct
  source 1..20: mol_type = other RNA
attggaggataatatctgga

SEQ ID NO: 24455 - RNA, 20 nt, synthetic construct
  source 1..20: mol_type = other RNA
attggatatttgcagtagta

SEQ ID NO: 24456 - RNA, 20 nt, synthetic construct
  source 1..20: mol_type = other RNA
attggattaagggcccaccc

SEQ ID NO: 24457 - RNA, 20 nt, synthetic construct
  source 1..20: mol_type = other RNA
attggcaaatctttagtgtt

SEQ ID NO: 24458 - RNA, 20 nt, synthetic construct
  source 1..20: mol_type = other RNA
attggcaacattttaattcc

SEQ ID NO: 24459 - RNA, 20 nt, synthetic construct
  source 1..20: mol_type = other RNA
attggcataaagacagacat

SEQ ID NO: 24460 - RNA, 20 nt, synthetic construct
  source 1..20: mol_type = other RNA
attggcatttaaaagaacct

SEQ ID NO: 24461 - RNA, 20 nt, synthetic construct
  source 1..20: mol_type = other RNA
attggccaggctggttccaa

SEQ ID NO: 24462 - RNA, 20 nt, synthetic construct
  source 1..20: mol_type = other RNA
attggcgtacatgtagatat

SEQ ID NO: 24463 - RNA, 20 nt, synthetic construct
  source 1..20: mol_type = other RNA
attggcttatagtgttcttt

SEQ ID NO: 24464 - RNA, 20 nt, synthetic construct
  source 1..20: mol_type = other RNA
attggctttagatttatcaa

SEQ ID NO: 24465 - RNA, 20 nt, synthetic construct
  source 1..20: mol_type = other RNA
attgggaaaatcttggaact

SEQ ID NO: 24466 - RNA, 20 nt, synthetic construct
  source 1..20: mol_type = other RNA
attgggaagattggctttag

SEQ ID NO: 24467 - RNA, 20 nt, synthetic construct
  source 1..20: mol_type = other RNA
attgggagctttcattatta

SEQ ID NO: 24468 - RNA, 20 nt, synthetic construct
  source 1..20: mol_type = other RNA
attgggatctgataaattat

SEQ ID NO: 24469 - RNA, 20 nt, synthetic construct
  source 1..20: mol_type = other RNA
attgggcattaattgagagc

SEQ ID NO: 24470 - RNA, 20 nt, synthetic construct
  source 1..20: mol_type = other RNA
attgggcttttcatatacgt

SEQ ID NO: 24471 - RNA, 20 nt, synthetic construct
  source 1..20: mol_type = other RNA
attgggggaaaattgacatt

SEQ ID NO: 24472 - RNA, 20 nt, synthetic construct
  source 1..20: mol_type = other RNA
attgggtacataccgagtaa

SEQ ID NO: 24473 - RNA, 20 nt, synthetic construct
  source 1..20: mol_type = other RNA
attgggtcaacaaactaact

SEQ ID NO: 24474 - RNA, 20 nt, synthetic construct
  source 1..20: mol_type = other RNA
attggtaatgttatatttcc

SEQ ID NO: 24475 - RNA, 20 nt, synthetic construct
  source 1..20: mol_type = other RNA
attggtagtcaatgcaatgc

SEQ ID NO: 24476 - RNA, 20 nt, synthetic construct
  source 1..20: mol_type = other RNA
attggtcctggaaaaagacc

SEQ ID NO: 24477 - RNA, 20 nt, synthetic construct
  source 1..20: mol_type = other RNA
attggtgaatctgagtaaag

SEQ ID NO: 24478 - RNA, 20 nt, synthetic construct
  source 1..20: mol_type = other RNA
attggttaaacttggtctgg

SEQ ID NO: 24479 - RNA, 20 nt, synthetic construct
  source 1..20: mol_type = other RNA
attggttatctgtactttta

SEQ ID NO: 24480 - RNA, 20 nt, synthetic construct
  source 1..20: mol_type = other RNA
attggttattcatgtttgtg

SEQ ID NO: 24481 - RNA, 20 nt, synthetic construct
  source 1..20: mol_type = other RNA
attggttcgtttgaggcttt

SEQ ID NO: 24482 - RNA, 20 nt, synthetic construct
  source 1..20: mol_type = other RNA
attggttggactccaccctg

SEQ ID NO: 24483 - RNA, 20 nt, synthetic construct
  source 1..20: mol_type = other RNA
attggtttgaaatgatcttt

SEQ ID NO: 24484 - RNA, 20 nt, synthetic construct
  source 1..20: mol_type = other RNA
attgtaaaccatatggttaa

SEQ ID NO: 24485 - RNA, 20 nt, synthetic construct
  source 1..20: mol_type = other RNA
attgtaacttgaattcagat

SEQ ID NO: 24486 - RNA, 20 nt, synthetic construct
  source 1..20: mol_type = other RNA
attgtaatcacagtacgctt

SEQ ID NO: 24487 - RNA, 20 nt, synthetic construct
  source 1..20: mol_type = other RNA
attgtaatcctgtttctcta

SEQ ID NO: 24488 - RNA, 20 nt, synthetic construct
  source 1..20: mol_type = other RNA
attgtaatgtctcctctttc

SEQ ID NO: 24489 - RNA, 20 nt, synthetic construct
  source 1..20: mol_type = other RNA
attgtacaattttcttaccc

SEQ ID NO: 24490 - RNA, 20 nt, synthetic construct
  source 1..20: mol_type = other RNA
attgtacacctcaaactaga

SEQ ID NO: 24491 - RNA, 20 nt, synthetic construct
  source 1..20: mol_type = other RNA
attgtacatgaagtcctcaa

SEQ ID NO: 24492 - RNA, 20 nt, synthetic construct
  source 1..20: mol_type = other RNA
attgtaccttgatttatggc

SEQ ID NO: 24493 - RNA, 20 nt, synthetic construct
  source 1..20: mol_type = other RNA
attgtaccttggagagaaac

SEQ ID NO: 24494 - RNA, 20 nt, synthetic construct
  source 1..20: mol_type = other RNA
attgtagctatatcccaaat

SEQ ID NO: 24495 - RNA, 20 nt, synthetic construct
  source 1..20: mol_type = other RNA
attgtaggaaagcctgtgac

SEQ ID NO: 24496 - RNA, 20 nt, synthetic construct
  source 1..20: mol_type = other RNA
attgtaggtgtctcatttaa

SEQ ID NO: 24497 - RNA, 20 nt, synthetic construct
  source 1..20: mol_type = other RNA
attgtagtttccatggaggg

SEQ ID NO: 24498 - RNA, 20 nt, synthetic construct
  source 1..20: mol_type = other RNA
attgtatatacccttctgtt

SEQ ID NO: 24499 - RNA, 20 nt, synthetic construct
  source 1..20: mol_type = other RNA
attgtatgaacattttgagt

SEQ ID NO: 24500 - RNA, 20 nt, synthetic construct
  source 1..20: mol_type = other RNA
attgtatttctgttagatgg

SEQ ID NO: 24501 - RNA, 20 nt, synthetic construct
  source 1..20: mol_type = other RNA
attgtatttttcacaaacac

SEQ ID NO: 24502 - RNA, 20 nt, synthetic construct
  source 1..20: mol_type = other RNA
attgtcaaggtcatcctttc

SEQ ID NO: 24503 - RNA, 20 nt, synthetic construct
  source 1..20: mol_type = other RNA
attgtcaatggggaacttta

SEQ ID NO: 24504 - RNA, 20 nt, synthetic construct
  source 1..20: mol_type = other RNA
attgtcagaaaagatcagta

SEQ ID NO: 24505 - RNA, 20 nt, synthetic construct
  source 1..20: mol_type = other RNA
attgtcagattttcttgtta

SEQ ID NO: 24506 - RNA, 20 nt, synthetic construct
  source 1..20: mol_type = other RNA
attgtcagtaattctgcagt

SEQ ID NO: 24507 - RNA, 20 nt, synthetic construct
  source 1..20: mol_type = other RNA
attgtcattaccttatagat

SEQ ID NO: 24508 - RNA, 20 nt, synthetic construct
  source 1..20: mol_type = other RNA
attgtcccgggggagggcgg

SEQ ID NO: 24509 - RNA, 20 nt, synthetic construct
  source 1..20: mol_type = other RNA
attgtcctggcagatcaatt

SEQ ID NO: 24510 - RNA, 20 nt, synthetic construct
  source 1..20: mol_type = other RNA
attgtcgttgagtacctctg

SEQ ID NO: 24511 - RNA, 20 nt, synthetic construct
  source 1..20: mol_type = other RNA
attgtctgcaagcagatctg

SEQ ID NO: 24512 - RNA, 20 nt, synthetic construct
  source 1..20: mol_type = other RNA
attgtcttacataggcttag

SEQ ID NO: 24513 - RNA, 20 nt, synthetic construct
  source 1..20: mol_type = other RNA
attgtcttctaaccctcaaa

SEQ ID NO: 24514 - RNA, 20 nt, synthetic construct
  source 1..20: mol_type = other RNA
attgtcttttctatctgaac

SEQ ID NO: 24515 - RNA, 20 nt, synthetic construct
  source 1..20: mol_type = other RNA
attgtgacagttctatttct

SEQ ID NO: 24516 - RNA, 20 nt, synthetic construct
  source 1..20: mol_type = other RNA
attgtgatgtctcagatgtc

SEQ ID NO: 24517 - RNA, 20 nt, synthetic construct
  source 1..20: mol_type = other RNA
attgtgcaaccatccccgct

SEQ ID NO: 24518 - RNA, 20 nt, synthetic construct
  source 1..20: mol_type = other RNA
attgtgcacttaaaatttag

SEQ ID NO: 24519 - RNA, 20 nt, synthetic construct
  source 1..20: mol_type = other RNA
attgtgccagtgaactccag

SEQ ID NO: 24520 - RNA, 20 nt, synthetic construct
  source 1..20: mol_type = other RNA
attgtgctcagtggttctgc

SEQ ID NO: 24521 - RNA, 20 nt, synthetic construct
  source 1..20: mol_type = other RNA
attgtgctgaaaccccgcat

SEQ ID NO: 24522 - RNA, 20 nt, synthetic construct
  source 1..20: mol_type = other RNA
attgtggatgagattaatgt

SEQ ID NO: 24523 - RNA, 20 nt, synthetic construct
  source 1..20: mol_type = other RNA
attgtgtgatttcatatgaa

SEQ ID NO: 24524 - RNA, 20 nt, synthetic construct
  source 1..20: mol_type = other RNA
attgtgtggacacactgaaa

SEQ ID NO: 24525 - RNA, 20 nt, synthetic construct
  source 1..20: mol_type = other RNA
attgtgtgtcgagaaaaatg

SEQ ID NO: 24526 - RNA, 20 nt, synthetic construct
  source 1..20: mol_type = other RNA
attgtgtgttctctttttga

SEQ ID NO: 24527 - RNA, 20 nt, synthetic construct
  source 1..20: mol_type = other RNA
attgtgttgcccacgctggt

SEQ ID NO: 24528 - RNA, 20 nt, synthetic construct
  source 1..20: mol_type = other RNA
attgttaacatttcttctag

SEQ ID NO: 24529 - RNA, 20 nt, synthetic construct
  source 1..20: mol_type = other RNA
attgttaactgtagagaaaa

SEQ ID NO: 24530 - RNA, 20 nt, synthetic construct
  source 1..20: mol_type = other RNA
attgttagccacagcgttgt

SEQ ID NO: 24531 - RNA, 20 nt, synthetic construct
  source 1..20: mol_type = other RNA
attgttaggtgctggcttca

SEQ ID NO: 24532 - RNA, 20 nt, synthetic construct
  source 1..20: mol_type = other RNA
attgttcagggaaggctgca

SEQ ID NO: 24533 - RNA, 20 nt, synthetic construct
  source 1..20: mol_type = other RNA
attgttcatgaaatcccctt

SEQ ID NO: 24534 - RNA, 20 nt, synthetic construct
  source 1..20: mol_type = other RNA
attgttcatgtctgtgtagt

SEQ ID NO: 24535 - RNA, 20 nt, synthetic construct
  source 1..20: mol_type = other RNA
attgttccaggggggaaaaa

SEQ ID NO: 24536 - RNA, 20 nt, synthetic construct
  source 1..20: mol_type = other RNA
attgttctctttgtttatcc

SEQ ID NO: 24537 - RNA, 20 nt, synthetic construct
  source 1..20: mol_type = other RNA
attgttgaattgttggagtt

SEQ ID NO: 24538 - RNA, 20 nt, synthetic construct
  source 1..20: mol_type = other RNA
attgttgccatcattttatg

SEQ ID NO: 24539 - RNA, 20 nt, synthetic construct
  source 1..20: mol_type = other RNA
attgttgcgcgtcaaaagat

SEQ ID NO: 24540 - RNA, 20 nt, synthetic construct
  source 1..20: mol_type = other RNA
attgttgtgtgttaaatttg

SEQ ID NO: 24541 - RNA, 20 nt, synthetic construct
  source 1..20: mol_type = other RNA
attgtttaattctgtttacc

SEQ ID NO: 24542 - RNA, 20 nt, synthetic construct
  source 1..20: mol_type = other RNA
attgtttacagtagccaaag

SEQ ID NO: 24543 - RNA, 20 nt, synthetic construct
  source 1..20: mol_type = other RNA
attgtttcacttttctggtt

SEQ ID NO: 24544 - RNA, 20 nt, synthetic construct
  source 1..20: mol_type = other RNA
attgtttcagtgtgtccaca

SEQ ID NO: 24545 - RNA, 20 nt, synthetic construct
  source 1..20: mol_type = other RNA
attgtttgaggctgggagta

SEQ ID NO: 24546 - RNA, 20 nt, synthetic construct
  source 1..20: mol_type = other RNA
attgtttgttgggtttaact

SEQ ID NO: 24547 - RNA, 20 nt, synthetic construct
  source 1..20: mol_type = other RNA
attgttttaggtagtcttgt

SEQ ID NO: 24548 - RNA, 20 nt, synthetic construct
  source 1..20: mol_type = other RNA
attgttttcccttttgtagc

SEQ ID NO: 24549 - RNA, 20 nt, synthetic construct
  source 1..20: mol_type = other RNA
attgttttgcaagattaatc

SEQ ID NO: 24550 - RNA, 20 nt, synthetic construct
  source 1..20: mol_type = other RNA
attgttttgttgctattgtt

SEQ ID NO: 24551 - RNA, 20 nt, synthetic construct
  source 1..20: mol_type = other RNA
atttaaaagaaaatggccaa

SEQ ID NO: 24552 - RNA, 20 nt, synthetic construct
  source 1..20: mol_type = other RNA
atttaaaagaacctctggaa

SEQ ID NO: 24553 - RNA, 20 nt, synthetic construct
  source 1..20: mol_type = other RNA
atttaaaagtacagataacc

SEQ ID NO: 24554 - RNA, 20 nt, synthetic construct
  source 1..20: mol_type = other RNA
atttaaaatctgattcagtg

SEQ ID NO: 24555 - RNA, 20 nt, synthetic construct
  source 1..20: mol_type = other RNA
atttaaaattgcagagtgtt

SEQ ID NO: 24556 - RNA, 20 nt, synthetic construct
  source 1..20: mol_type = other RNA
atttaaacgtcagagcagca

SEQ ID NO: 24557 - RNA, 20 nt, synthetic construct
  source 1..20: mol_type = other RNA
atttaaagacgttcagataa

SEQ ID NO: 24558 - RNA, 20 nt, synthetic construct
  source 1..20: mol_type = other RNA
atttaaagtaggttgagact

SEQ ID NO: 24559 - RNA, 20 nt, synthetic construct
  source 1..20: mol_type = other RNA
atttaaagttagtgaagcag

SEQ ID NO: 24560 - RNA, 20 nt, synthetic construct
  source 1..20: mol_type = other RNA
atttaaatgccacataaatc

SEQ ID NO: 24561 - RNA, 20 nt, synthetic construct
  source 1..20: mol_type = other RNA
atttaacacacaacaatgaa

SEQ ID NO: 24562 - RNA, 20 nt, synthetic construct
  source 1..20: mol_type = other RNA
atttaacaccatggcaggtt

SEQ ID NO: 24563 - RNA, 20 nt, synthetic construct
  source 1..20: mol_type = other RNA
atttaacttctaatgcccat

SEQ ID NO: 24564 - RNA, 20 nt, synthetic construct
  source 1..20: mol_type = other RNA
atttaagaagggaacactaa

SEQ ID NO: 24565 - RNA, 20 nt, synthetic construct
  source 1..20: mol_type = other RNA
atttaagacacaaggaaggt

SEQ ID NO: 24566 - RNA, 20 nt, synthetic construct
  source 1..20: mol_type = other RNA
atttaagagaggaagtgacc

SEQ ID NO: 24567 - RNA, 20 nt, synthetic construct
  source 1..20: mol_type = other RNA
atttaagcacagaattacta

SEQ ID NO: 24568 - RNA, 20 nt, synthetic construct
  source 1..20: mol_type = other RNA
atttaaggaccaggtatggc

SEQ ID NO: 24569 - RNA, 20 nt, synthetic construct
  source 1..20: mol_type = other RNA
atttaaggggtaaatggttt

SEQ ID NO: 24570 - RNA, 20 nt, synthetic construct
  source 1..20: mol_type = other RNA
atttaatactatgtatgtgg

SEQ ID NO: 24571 - RNA, 20 nt, synthetic construct
  source 1..20: mol_type = other RNA
atttaatagaggtctgtctt

SEQ ID NO: 24572 - RNA, 20 nt, synthetic construct
  source 1..20: mol_type = other RNA
atttaatatgtgtacaatgg

SEQ ID NO: 24573 - RNA, 20 nt, synthetic construct
  source 1..20: mol_type = other RNA
atttaatctctcttgacctt

SEQ ID NO: 24574 - RNA, 20 nt, synthetic construct
  source 1..20: mol_type = other RNA
atttaatctgtcagcagttc

SEQ ID NO: 24575 - RNA, 20 nt, synthetic construct
  source 1..20: mol_type = other RNA
atttaatgagtagtacttct

SEQ ID NO: 24576 - RNA, 20 nt, synthetic construct
  source 1..20: mol_type = other RNA
atttaatgtgctgtccattt

SEQ ID NO: 24577 - RNA, 20 nt, synthetic construct
  source 1..20: mol_type = other RNA
atttaattttctgactctgt

SEQ ID NO: 24578 - RNA, 20 nt, synthetic construct
  source 1..20: mol_type = other RNA
atttaattttgagagtgcag

SEQ ID NO: 24579 - RNA, 20 nt, synthetic construct
  source 1..20: mol_type = other RNA
atttacaaaaacacactgag

SEQ ID NO: 24580 - RNA, 20 nt, synthetic construct
  source 1..20: mol_type = other RNA
atttacatagtgctcttctg

SEQ ID NO: 24581 - RNA, 20 nt, synthetic construct
  source 1..20: mol_type = other RNA
atttaccatctgacatatgt

SEQ ID NO: 24582 - RNA, 20 nt, synthetic construct
  source 1..20: mol_type = other RNA
atttacccacaaaagaaaat

SEQ ID NO: 24583 - RNA, 20 nt, synthetic construct
  source 1..20: mol_type = other RNA
atttacccctactttttgtc

SEQ ID NO: 24584 - RNA, 20 nt, synthetic construct
  source 1..20: mol_type = other RNA
atttaccccttaaattccaa

SEQ ID NO: 24585 - RNA, 20 nt, synthetic construct
  source 1..20: mol_type = other RNA
atttactaaactgaacgaag

SEQ ID NO: 24586 - RNA, 20 nt, synthetic construct
  source 1..20: mol_type = other RNA
atttactaagaagtgaaact

SEQ ID NO: 24587 - RNA, 20 nt, synthetic construct
  source 1..20: mol_type = other RNA
atttactagatcaagccctt

SEQ ID NO: 24588 - RNA, 20 nt, synthetic construct
  source 1..20: mol_type = other RNA
atttactgaaatcctagccc

SEQ ID NO: 24589 - RNA, 20 nt, synthetic construct
  source 1..20: mol_type = other RNA
atttactgcttgctgcactg

SEQ ID NO: 24590 - RNA, 20 nt, synthetic construct
  source 1..20: mol_type = other RNA
atttacttctacagaatgtt

SEQ ID NO: 24591 - RNA, 20 nt, synthetic construct
  source 1..20: mol_type = other RNA
atttacttgtcatttctgct

SEQ ID NO: 24592 - RNA, 20 nt, synthetic construct
  source 1..20: mol_type = other RNA
atttagaaaatgcttatgtc

SEQ ID NO: 24593 - RNA, 20 nt, synthetic construct
  source 1..20: mol_type = other RNA
atttagaaatacctgcaggt

SEQ ID NO: 24594 - RNA, 20 nt, synthetic construct
  source 1..20: mol_type = other RNA
atttagaattctctctcaac

SEQ ID NO: 24595 - RNA, 20 nt, synthetic construct
  source 1..20: mol_type = other RNA
atttagagggatgaatgttg

SEQ ID NO: 24596 - RNA, 20 nt, synthetic construct
  source 1..20: mol_type = other RNA
atttagagtttgcattacat

SEQ ID NO: 24597 - RNA, 20 nt, synthetic construct
  source 1..20: mol_type = other RNA
atttagatctcatgttaagt

SEQ ID NO: 24598 - RNA, 20 nt, synthetic construct
  source 1..20: mol_type = other RNA
atttagatgagagtggccta

SEQ ID NO: 24599 - RNA, 20 nt, synthetic construct
  source 1..20: mol_type = other RNA
atttagcccatgtctaaagt

SEQ ID NO: 24600 - RNA, 20 nt, synthetic construct
  source 1..20: mol_type = other RNA
atttagccccctgaataccc

SEQ ID NO: 24601 - RNA, 20 nt, synthetic construct
  source 1..20: mol_type = other RNA
atttagcgttcatccaaatt

SEQ ID NO: 24602 - RNA, 20 nt, synthetic construct
  source 1..20: mol_type = other RNA
atttagcttctgaattgaga

SEQ ID NO: 24603 - RNA, 20 nt, synthetic construct
  source 1..20: mol_type = other RNA
atttaggccactctcatcta

SEQ ID NO: 24604 - RNA, 20 nt, synthetic construct
  source 1..20: mol_type = other RNA
atttaggccctctataattc

SEQ ID NO: 24605 - RNA, 20 nt, synthetic construct
  source 1..20: mol_type = other RNA
atttagggagcatatatact

SEQ ID NO: 24606 - RNA, 20 nt, synthetic construct
  source 1..20: mol_type = other RNA
atttagtaagggtaaacaga

SEQ ID NO: 24607 - RNA, 20 nt, synthetic construct
  source 1..20: mol_type = other RNA
atttagtaagtgtgagcaaa

SEQ ID NO: 24608 - RNA, 20 nt, synthetic construct
  source 1..20: mol_type = other RNA
atttagtatattttcaaggc

SEQ ID NO: 24609 - RNA, 20 nt, synthetic construct
  source 1..20: mol_type = other RNA
atttagtgaaatagttggtc

SEQ ID NO: 24610 - RNA, 20 nt, synthetic construct
  source 1..20: mol_type = other RNA
atttagtgtattgtaccttg

SEQ ID NO: 24611 - RNA, 20 nt, synthetic construct
  source 1..20: mol_type = other RNA
atttagtttcatctatgtcc

SEQ ID NO: 24612 - RNA, 20 nt, synthetic construct
  source 1..20: mol_type = other RNA
atttataatccattgggtac

SEQ ID NO: 24613 - RNA, 20 nt, synthetic construct
  source 1..20: mol_type = other RNA
atttatacaaataactccag

SEQ ID NO: 24614 - RNA, 20 nt, synthetic construct
  source 1..20: mol_type = other RNA
atttatacaggtgcttacag

SEQ ID NO: 24615 - RNA, 20 nt, synthetic construct
  source 1..20: mol_type = other RNA
atttatacagttggaactct

SEQ ID NO: 24616 - RNA, 20 nt, synthetic construct
  source 1..20: mol_type = other RNA
atttatacccaagtaaacaa

SEQ ID NO: 24617 - RNA, 20 nt, synthetic construct
  source 1..20: mol_type = other RNA
atttatagtgtttccttcca

SEQ ID NO: 24618 - RNA, 20 nt, synthetic construct
  source 1..20: mol_type = other RNA
atttatatgatactcgtagt

SEQ ID NO: 24619 - RNA, 20 nt, synthetic construct
  source 1..20: mol_type = other RNA
atttatcaacacatagtgtt

SEQ ID NO: 24620 - RNA, 20 nt, synthetic construct
  source 1..20: mol_type = other RNA
atttatcaatagcagtgctg

SEQ ID NO: 24621 - RNA, 20 nt, synthetic construct
  source 1..20: mol_type = other RNA
atttatcagatcccaattac

SEQ ID NO: 24622 - RNA, 20 nt, synthetic construct
  source 1..20: mol_type = other RNA
atttatcagcaccaaagatt

SEQ ID NO: 24623 - RNA, 20 nt, synthetic construct
  source 1..20: mol_type = other RNA
atttatcatgtcttcttgga

SEQ ID NO: 24624 - RNA, 20 nt, synthetic construct
  source 1..20: mol_type = other RNA
atttatctccataagtccct

SEQ ID NO: 24625 - RNA, 20 nt, synthetic construct
  source 1..20: mol_type = other RNA
atttatctggatttttgtgt

SEQ ID NO: 24626 - RNA, 20 nt, synthetic construct
  source 1..20: mol_type = other RNA
atttatgctgatgaactaca

SEQ ID NO: 24627 - RNA, 20 nt, synthetic construct
  source 1..20: mol_type = other RNA
atttatggaattgccatatg

SEQ ID NO: 24628 - RNA, 20 nt, synthetic construct
  source 1..20: mol_type = other RNA
atttatggcctaagatggaa

SEQ ID NO: 24629 - RNA, 20 nt, synthetic construct
  source 1..20: mol_type = other RNA
atttatgtacatgacctatc

SEQ ID NO: 24630 - RNA, 20 nt, synthetic construct
  source 1..20: mol_type = other RNA
atttatgttcatgaaccttc

SEQ ID NO: 24631 - RNA, 20 nt, synthetic construct
  source 1..20: mol_type = other RNA
atttatgttgcacaaaagtg

SEQ ID NO: 24632 - RNA, 20 nt, synthetic construct
  source 1..20: mol_type = other RNA
atttattaaagtagaaggcc

SEQ ID NO: 24633 - RNA, 20 nt, synthetic construct
  source 1..20: mol_type = other RNA
atttattagtagttaggtgg

SEQ ID NO: 24634 - RNA, 20 nt, synthetic construct
  source 1..20: mol_type = other RNA
atttattcctctcttggaat

SEQ ID NO: 24635 - RNA, 20 nt, synthetic construct
  source 1..20: mol_type = other RNA
atttattgtcaaggtcatcc

SEQ ID NO: 24636 - RNA, 20 nt, synthetic construct
  source 1..20: mol_type = other RNA
atttatttatgctgatgaac

SEQ ID NO: 24637 - RNA, 20 nt, synthetic construct
  source 1..20: mol_type = other RNA
atttatttccttaagccatt

SEQ ID NO: 24638 - RNA, 20 nt, synthetic construct
  source 1..20: mol_type = other RNA
atttatttctgggctctcta

SEQ ID NO: 24639 - RNA, 20 nt, synthetic construct
  source 1..20: mol_type = other RNA
atttatttttacccgtggaa

SEQ ID NO: 24640 - RNA, 20 nt, synthetic construct
  source 1..20: mol_type = other RNA
atttcaaaccaatgttctct

SEQ ID NO: 24641 - RNA, 20 nt, synthetic construct
  source 1..20: mol_type = other RNA
atttcaaagttaatagcctc

SEQ ID NO: 24642 - RNA, 20 nt, synthetic construct
  source 1..20: mol_type = other RNA
atttcaagtaacactcagaa

SEQ ID NO: 24643 - RNA, 20 nt, synthetic construct
  source 1..20: mol_type = other RNA
atttcaatctggaatgcatc

SEQ ID NO: 24644 - RNA, 20 nt, synthetic construct
  source 1..20: mol_type = other RNA
atttcacaacgatttcttaa

SEQ ID NO: 24645 - RNA, 20 nt, synthetic construct
  source 1..20: mol_type = other RNA
atttcactcttttaaggttt

SEQ ID NO: 24646 - RNA, 20 nt, synthetic construct
  source 1..20: mol_type = other RNA
atttcacttacttgagcccc

SEQ ID NO: 24647 - RNA, 20 nt, synthetic construct
  source 1..20: mol_type = other RNA
atttcacttgattactttac

SEQ ID NO: 24648 - RNA, 20 nt, synthetic construct
  source 1..20: mol_type = other RNA
atttcacttgtttcttttca

SEQ ID NO: 24649 - RNA, 20 nt, synthetic construct
  source 1..20: mol_type = other RNA
atttcagaaagagaatagca

SEQ ID NO: 24650 - RNA, 20 nt, synthetic construct
  source 1..20: mol_type = other RNA
atttcagagagacctgaaga

SEQ ID NO: 24651 - RNA, 20 nt, synthetic construct
  source 1..20: mol_type = other RNA
atttcagatctctgacattg

SEQ ID NO: 24652 - RNA, 20 nt, synthetic construct
  source 1..20: mol_type = other RNA
atttcagccaaagctggcat

SEQ ID NO: 24653 - RNA, 20 nt, synthetic construct
  source 1..20: mol_type = other RNA
atttcaggaatgcaaagttt

SEQ ID NO: 24654 - RNA, 20 nt, synthetic construct
  source 1..20: mol_type = other RNA
atttcagggagaattggtag

SEQ ID NO: 24655 - RNA, 20 nt, synthetic construct
  source 1..20: mol_type = other RNA
atttcaggtggtatttaatc

SEQ ID NO: 24656 - RNA, 20 nt, synthetic construct
  source 1..20: mol_type = other RNA
atttcaggtgtgtaaacact

SEQ ID NO: 24657 - RNA, 20 nt, synthetic construct
  source 1..20: mol_type = other RNA
atttcaggttttcgaccaag

SEQ ID NO: 24658 - RNA, 20 nt, synthetic construct
  source 1..20: mol_type = other RNA
atttcagttaaaagttttcc

SEQ ID NO: 24659 - RNA, 20 nt, synthetic construct
  source 1..20: mol_type = other RNA
atttcagttaacttattgga

SEQ ID NO: 24660 - RNA, 20 nt, synthetic construct
  source 1..20: mol_type = other RNA
atttcatacaagttgtgata

SEQ ID NO: 24661 - RNA, 20 nt, synthetic construct
  source 1..20: mol_type = other RNA
atttcatagcagaatggccc

SEQ ID NO: 24662 - RNA, 20 nt, synthetic construct
  source 1..20: mol_type = other RNA
atttcataggcatctctccc

SEQ ID NO: 24663 - RNA, 20 nt, synthetic construct
  source 1..20: mol_type = other RNA
atttcatcgtaaaaagccat

SEQ ID NO: 24664 - RNA, 20 nt, synthetic construct
  source 1..20: mol_type = other RNA
atttcatgaacaattttctc

SEQ ID NO: 24665 - RNA, 20 nt, synthetic construct
  source 1..20: mol_type = other RNA
atttcatgccatcctggatt

SEQ ID NO: 24666 - RNA, 20 nt, synthetic construct
  source 1..20: mol_type = other RNA
atttcatgcctttcagcata

SEQ ID NO: 24667 - RNA, 20 nt, synthetic construct
  source 1..20: mol_type = other RNA
atttcattaggttgatggct

SEQ ID NO: 24668 - RNA, 20 nt, synthetic construct
  source 1..20: mol_type = other RNA
atttcatttactgaaatcct

SEQ ID NO: 24669 - RNA, 20 nt, synthetic construct
  source 1..20: mol_type = other RNA
atttccaaagatcatgggtt

SEQ ID NO: 24670 - RNA, 20 nt, synthetic construct
  source 1..20: mol_type = other RNA
atttccaagaaccctttgtt

SEQ ID NO: 24671 - RNA, 20 nt, synthetic construct
  source 1..20: mol_type = other RNA
atttccaagattgaaaatgg

SEQ ID NO: 24672 - RNA, 20 nt, synthetic construct
  source 1..20: mol_type = other RNA
atttccacccatgaagccag

SEQ ID NO: 24673 - RNA, 20 nt, synthetic construct
  source 1..20: mol_type = other RNA
atttccacgggtaaaaataa

SEQ ID NO: 24674 - RNA, 20 nt, synthetic construct
  source 1..20: mol_type = other RNA
atttccagcattttataggc

SEQ ID NO: 24675 - RNA, 20 nt, synthetic construct
  source 1..20: mol_type = other RNA
atttccagcctttaatttag

SEQ ID NO: 24676 - RNA, 20 nt, synthetic construct
  source 1..20: mol_type = other RNA
atttccagggggtatggaga

SEQ ID NO: 24677 - RNA, 20 nt, synthetic construct
  source 1..20: mol_type = other RNA
atttccaggtcattacatat

SEQ ID NO: 24678 - RNA, 20 nt, synthetic construct
  source 1..20: mol_type = other RNA
atttccagtactttttcatc

SEQ ID NO: 24679 - RNA, 20 nt, synthetic construct
  source 1..20: mol_type = other RNA
atttccagtgtttggttttt

SEQ ID NO: 24680 - RNA, 20 nt, synthetic construct
  source 1..20: mol_type = other RNA
atttcccatttgatttcttc

SEQ ID NO: 24681 - RNA, 20 nt, synthetic construct
  source 1..20: mol_type = other RNA
atttccccattagagtaagc

SEQ ID NO: 24682 - RNA, 20 nt, synthetic construct
  source 1..20: mol_type = other RNA
atttccctcagaatttgagg

SEQ ID NO: 24683 - RNA, 20 nt, synthetic construct
  source 1..20: mol_type = other RNA
atttccctgcatacactcat

SEQ ID NO: 24684 - RNA, 20 nt, synthetic construct
  source 1..20: mol_type = other RNA
atttccctgcttcatctgga

SEQ ID NO: 24685 - RNA, 20 nt, synthetic construct
  source 1..20: mol_type = other RNA
atttcccttttggatgcaga

SEQ ID NO: 24686 - RNA, 20 nt, synthetic construct
  source 1..20: mol_type = other RNA
atttccgatgataccttctt

SEQ ID NO: 24687 - RNA, 20 nt, synthetic construct
  source 1..20: mol_type = other RNA
atttccgtatccagtggttt

SEQ ID NO: 24688 - RNA, 20 nt, synthetic construct
  source 1..20: mol_type = other RNA
atttccgttgctgcatagta

SEQ ID NO: 24689 - RNA, 20 nt, synthetic construct
  source 1..20: mol_type = other RNA
atttcctatgaaaatttagc

SEQ ID NO: 24690 - RNA, 20 nt, synthetic construct
  source 1..20: mol_type = other RNA
atttccttaagcacagactg

SEQ ID NO: 24691 - RNA, 20 nt, synthetic construct
  source 1..20: mol_type = other RNA
atttccttaagccatttcag

SEQ ID NO: 24692 - RNA, 20 nt, synthetic construct
  source 1..20: mol_type = other RNA
atttccttatagtattacct

SEQ ID NO: 24693 - RNA, 20 nt, synthetic construct
  source 1..20: mol_type = other RNA
atttccttccagtttatatg

SEQ ID NO: 24694 - RNA, 20 nt, synthetic construct
  source 1..20: mol_type = other RNA
atttcctttcagtcggttct

SEQ ID NO: 24695 - RNA, 20 nt, synthetic construct
  source 1..20: mol_type = other RNA
atttcgaattatgctaacat

SEQ ID NO: 24696 - RNA, 20 nt, synthetic construct
  source 1..20: mol_type = other RNA
atttcgcaaagcaacatgct

SEQ ID NO: 24697 - RNA, 20 nt, synthetic construct
  source 1..20: mol_type = other RNA
atttcgcctagataagaaaa

SEQ ID NO: 24698 - RNA, 20 nt, synthetic construct
  source 1..20: mol_type = other RNA
atttcgccttctcagaagga

SEQ ID NO: 24699 - RNA, 20 nt, synthetic construct
  source 1..20: mol_type = other RNA
atttcggctctgtgctgaga

SEQ ID NO: 24700 - RNA, 20 nt, synthetic construct
  source 1..20: mol_type = other RNA
atttctaaaaacgtgcaaac

SEQ ID NO: 24701 - RNA, 20 nt, synthetic construct
  source 1..20: mol_type = other RNA
atttctaaatcaacagtgta

SEQ ID NO: 24702 - RNA, 20 nt, synthetic construct
  source 1..20: mol_type = other RNA
atttctaagccatgtttctc

SEQ ID NO: 24703 - RNA, 20 nt, synthetic construct
  source 1..20: mol_type = other RNA
atttctaaggttctgctatg

SEQ ID NO: 24704 - RNA, 20 nt, synthetic construct
  source 1..20: mol_type = other RNA
atttctaatttccaagaacc

SEQ ID NO: 24705 - RNA, 20 nt, synthetic construct
  source 1..20: mol_type = other RNA
atttctacacaacatgtttt

SEQ ID NO: 24706 - RNA, 20 nt, synthetic construct
  source 1..20: mol_type = other RNA
atttctactggggtcttagt

SEQ ID NO: 24707 - RNA, 20 nt, synthetic construct
  source 1..20: mol_type = other RNA
atttctaggccctaacccca

SEQ ID NO: 24708 - RNA, 20 nt, synthetic construct
  source 1..20: mol_type = other RNA
atttctatagtcattccgct

SEQ ID NO: 24709 - RNA, 20 nt, synthetic construct
  source 1..20: mol_type = other RNA
atttctcatactttgtcagg

SEQ ID NO: 24710 - RNA, 20 nt, synthetic construct
  source 1..20: mol_type = other RNA
atttctcatctgtcactttc

SEQ ID NO: 24711 - RNA, 20 nt, synthetic construct
  source 1..20: mol_type = other RNA
atttctcatgtatgttttag

SEQ ID NO: 24712 - RNA, 20 nt, synthetic construct
  source 1..20: mol_type = other RNA
atttctcggccgggcgcggt

SEQ ID NO: 24713 - RNA, 20 nt, synthetic construct
  source 1..20: mol_type = other RNA
atttctctaatagctagtga

SEQ ID NO: 24714 - RNA, 20 nt, synthetic construct
  source 1..20: mol_type = other RNA
atttctctttaaagctgaac

SEQ ID NO: 24715 - RNA, 20 nt, synthetic construct
  source 1..20: mol_type = other RNA
atttctgagagtattgccag

SEQ ID NO: 24716 - RNA, 20 nt, synthetic construct
  source 1..20: mol_type = other RNA
atttctgcatagagatcttg

SEQ ID NO: 24717 - RNA, 20 nt, synthetic construct
  source 1..20: mol_type = other RNA
atttctgcttagtcttctca

SEQ ID NO: 24718 - RNA, 20 nt, synthetic construct
  source 1..20: mol_type = other RNA
atttctgcttgaatgtgcct

SEQ ID NO: 24719 - RNA, 20 nt, synthetic construct
  source 1..20: mol_type = other RNA
atttctgggctctctattcc

SEQ ID NO: 24720 - RNA, 20 nt, synthetic construct
  source 1..20: mol_type = other RNA
atttctgtaaacatgaacaa

SEQ ID NO: 24721 - RNA, 20 nt, synthetic construct
  source 1..20: mol_type = other RNA
atttctgtatcttttcagtc

SEQ ID NO: 24722 - RNA, 20 nt, synthetic construct
  source 1..20: mol_type = other RNA
atttctgtcatctgaatcaa

SEQ ID NO: 24723 - RNA, 20 nt, synthetic construct
  source 1..20: mol_type = other RNA
atttctgtccttggattgct

SEQ ID NO: 24724 - RNA, 20 nt, synthetic construct
  source 1..20: mol_type = other RNA
atttctgttagatggtgctg

SEQ ID NO: 24725 - RNA, 20 nt, synthetic construct
  source 1..20: mol_type = other RNA
atttctgttgcttaagtcac

SEQ ID NO: 24726 - RNA, 20 nt, synthetic construct
  source 1..20: mol_type = other RNA
atttcttaaaaatgacacca

SEQ ID NO: 24727 - RNA, 20 nt, synthetic construct
  source 1..20: mol_type = other RNA
atttcttacacattaggctc

SEQ ID NO: 24728 - RNA, 20 nt, synthetic construct
  source 1..20: mol_type = other RNA
atttcttcagaagaaattac

SEQ ID NO: 24729 - RNA, 20 nt, synthetic construct
  source 1..20: mol_type = other RNA
atttcttctagtcacatttg

SEQ ID NO: 24730 - RNA, 20 nt, synthetic construct
  source 1..20: mol_type = other RNA
atttcttctccctcttcgct

SEQ ID NO: 24731 - RNA, 20 nt, synthetic construct
  source 1..20: mol_type = other RNA
atttcttctttggctcaatg

SEQ ID NO: 24732 - RNA, 20 nt, synthetic construct
  source 1..20: mol_type = other RNA
atttctttaaaaccagagcg

SEQ ID NO: 24733 - RNA, 20 nt, synthetic construct
  source 1..20: mol_type = other RNA
atttctttccattcaatcct

SEQ ID NO: 24734 - RNA, 20 nt, synthetic construct
  source 1..20: mol_type = other RNA
atttctttggctgttagcct

SEQ ID NO: 24735 - RNA, 20 nt, synthetic construct
  source 1..20: mol_type = other RNA
atttctttttactcatgtct

SEQ ID NO: 24736 - RNA, 20 nt, synthetic construct
  source 1..20: mol_type = other RNA
atttctttttcttgctttgc

SEQ ID NO: 24737 - RNA, 20 nt, synthetic construct
  source 1..20: mol_type = other RNA
atttgaaaaaggaaagtaac

SEQ ID NO: 24738 - RNA, 20 nt, synthetic construct
  source 1..20: mol_type = other RNA
atttgaaagaaagaaggcca

SEQ ID NO: 24739 - RNA, 20 nt, synthetic construct
  source 1..20: mol_type = other RNA
atttgaactcactggccagc

SEQ ID NO: 24740 - RNA, 20 nt, synthetic construct
  source 1..20: mol_type = other RNA
atttgaactttccagaagta

SEQ ID NO: 24741 - RNA, 20 nt, synthetic construct
  source 1..20: mol_type = other RNA
atttgaataaggtctgtaag

SEQ ID NO: 24742 - RNA, 20 nt, synthetic construct
  source 1..20: mol_type = other RNA
atttgaatgatgcgaaagaa

SEQ ID NO: 24743 - RNA, 20 nt, synthetic construct
  source 1..20: mol_type = other RNA
atttgacatgacaggtgagt

SEQ ID NO: 24744 - RNA, 20 nt, synthetic construct
  source 1..20: mol_type = other RNA
atttgaccatgggacaagtg

SEQ ID NO: 24745 - RNA, 20 nt, synthetic construct
  source 1..20: mol_type = other RNA
atttgaccttccttgtgtct

SEQ ID NO: 24746 - RNA, 20 nt, synthetic construct
  source 1..20: mol_type = other RNA
atttgagaatttcaggtgtg

SEQ ID NO: 24747 - RNA, 20 nt, synthetic construct
  source 1..20: mol_type = other RNA
atttgagagtaagttgcata

SEQ ID NO: 24748 - RNA, 20 nt, synthetic construct
  source 1..20: mol_type = other RNA
atttgagcccaggaggttga

SEQ ID NO: 24749 - RNA, 20 nt, synthetic construct
  source 1..20: mol_type = other RNA
atttgaggcattagtgaatt

SEQ ID NO: 24750 - RNA, 20 nt, synthetic construct
  source 1..20: mol_type = other RNA
atttgaggccctattcaacc

SEQ ID NO: 24751 - RNA, 20 nt, synthetic construct
  source 1..20: mol_type = other RNA
atttgagggtgctgatcagg

SEQ ID NO: 24752 - RNA, 20 nt, synthetic construct
  source 1..20: mol_type = other RNA
atttgagggttagaagacaa

SEQ ID NO: 24753 - RNA, 20 nt, synthetic construct
  source 1..20: mol_type = other RNA
atttgaggtagcacaactag

SEQ ID NO: 24754 - RNA, 20 nt, synthetic construct
  source 1..20: mol_type = other RNA
atttgaggtctaggctaatg

SEQ ID NO: 24755 - RNA, 20 nt, synthetic construct
  source 1..20: mol_type = other RNA
atttgaggtcttctagcttt

SEQ ID NO: 24756 - RNA, 20 nt, synthetic construct
  source 1..20: mol_type = other RNA
atttgagtcttgctctcttg

SEQ ID NO: 24757 - RNA, 20 nt, synthetic construct
  source 1..20: mol_type = other RNA
atttgatcctggaatagtag

SEQ ID NO: 24758 - RNA, 20 nt, synthetic construct
  source 1..20: mol_type = other RNA
atttgattgccagttttctg

SEQ ID NO: 24759 - RNA, 20 nt, synthetic construct
  source 1..20: mol_type = other RNA
atttgattgggcattaattg

SEQ ID NO: 24760 - RNA, 20 nt, synthetic construct
  source 1..20: mol_type = other RNA
atttgattgttagccacagc

SEQ ID NO: 24761 - RNA, 20 nt, synthetic construct
  source 1..20: mol_type = other RNA
atttgatttcttctttggct

SEQ ID NO: 24762 - RNA, 20 nt, synthetic construct
  source 1..20: mol_type = other RNA
atttgcaacagaataaatga

SEQ ID NO: 24763 - RNA, 20 nt, synthetic construct
  source 1..20: mol_type = other RNA
atttgcagagcaaactcaga

SEQ ID NO: 24764 - RNA, 20 nt, synthetic construct
  source 1..20: mol_type = other RNA
atttgcagtagtattgaact

SEQ ID NO: 24765 - RNA, 20 nt, synthetic construct
  source 1..20: mol_type = other RNA
atttgcatttctctaatagc

SEQ ID NO: 24766 - RNA, 20 nt, synthetic construct
  source 1..20: mol_type = other RNA
atttgccaaaatgattttca

SEQ ID NO: 24767 - RNA, 20 nt, synthetic construct
  source 1..20: mol_type = other RNA
atttgccaatcaataattct

SEQ ID NO: 24768 - RNA, 20 nt, synthetic construct
  source 1..20: mol_type = other RNA
atttgccacattttaccaaa

SEQ ID NO: 24769 - RNA, 20 nt, synthetic construct
  source 1..20: mol_type = other RNA
atttgcctattctggggctc

SEQ ID NO: 24770 - RNA, 20 nt, synthetic construct
  source 1..20: mol_type = other RNA
atttgcggcttgattagctt

SEQ ID NO: 24771 - RNA, 20 nt, synthetic construct
  source 1..20: mol_type = other RNA
atttgctggctcagtctgtt

SEQ ID NO: 24772 - RNA, 20 nt, synthetic construct
  source 1..20: mol_type = other RNA
atttgctgtataacattttc

SEQ ID NO: 24773 - RNA, 20 nt, synthetic construct
  source 1..20: mol_type = other RNA
atttgctgtcaggcaaggga

SEQ ID NO: 24774 - RNA, 20 nt, synthetic construct
  source 1..20: mol_type = other RNA
atttgcttaggctgttatta

SEQ ID NO: 24775 - RNA, 20 nt, synthetic construct
  source 1..20: mol_type = other RNA
atttgctttactactgcatt

SEQ ID NO: 24776 - RNA, 20 nt, synthetic construct
  source 1..20: mol_type = other RNA
atttgcttttcctggaaaac

SEQ ID NO: 24777 - RNA, 20 nt, synthetic construct
  source 1..20: mol_type = other RNA
atttggaaagggtagagcac

SEQ ID NO: 24778 - RNA, 20 nt, synthetic construct
  source 1..20: mol_type = other RNA
atttggaaatatggtcactg

SEQ ID NO: 24779 - RNA, 20 nt, synthetic construct
  source 1..20: mol_type = other RNA
atttggaagagagaaggctg

SEQ ID NO: 24780 - RNA, 20 nt, synthetic construct
  source 1..20: mol_type = other RNA
atttggaatagagagcccag

SEQ ID NO: 24781 - RNA, 20 nt, synthetic construct
  source 1..20: mol_type = other RNA
atttggaattaaaatgttgc

SEQ ID NO: 24782 - RNA, 20 nt, synthetic construct
  source 1..20: mol_type = other RNA
atttggatgaacgctaaatt

SEQ ID NO: 24783 - RNA, 20 nt, synthetic construct
  source 1..20: mol_type = other RNA
atttggatttgagtaactaa

SEQ ID NO: 24784 - RNA, 20 nt, synthetic construct
  source 1..20: mol_type = other RNA
atttggcaaaaaatgcagta

SEQ ID NO: 24785 - RNA, 20 nt, synthetic construct
  source 1..20: mol_type = other RNA
atttggccagaatccctttc

SEQ ID NO: 24786 - RNA, 20 nt, synthetic construct
  source 1..20: mol_type = other RNA
atttggcccagccatcccat

SEQ ID NO: 24787 - RNA, 20 nt, synthetic construct
  source 1..20: mol_type = other RNA
atttggcctctgcggcggct

SEQ ID NO: 24788 - RNA, 20 nt, synthetic construct
  source 1..20: mol_type = other RNA
atttggctgttaccatttga

SEQ ID NO: 24789 - RNA, 20 nt, synthetic construct
  source 1..20: mol_type = other RNA
atttggcttggggaacagtt

SEQ ID NO: 24790 - RNA, 20 nt, synthetic construct
  source 1..20: mol_type = other RNA
atttgggaaggatggccagt

SEQ ID NO: 24791 - RNA, 20 nt, synthetic construct
  source 1..20: mol_type = other RNA
atttgggaatgtggtcacac

SEQ ID NO: 24792 - RNA, 20 nt, synthetic construct
  source 1..20: mol_type = other RNA
atttgggacagcctagtttt

SEQ ID NO: 24793 - RNA, 20 nt, synthetic construct
  source 1..20: mol_type = other RNA
atttgggactgagacagtat

SEQ ID NO: 24794 - RNA, 20 nt, synthetic construct
  source 1..20: mol_type = other RNA
atttgggatatagctacaat

SEQ ID NO: 24795 - RNA, 20 nt, synthetic construct
  source 1..20: mol_type = other RNA
atttggggattctgctacta

SEQ ID NO: 24796 - RNA, 20 nt, synthetic construct
  source 1..20: mol_type = other RNA
atttggggctaggatttcag

SEQ ID NO: 24797 - RNA, 20 nt, synthetic construct
  source 1..20: mol_type = other RNA
atttgggtttgagtttccag

SEQ ID NO: 24798 - RNA, 20 nt, synthetic construct
  source 1..20: mol_type = other RNA
atttggtattcttatcccta

SEQ ID NO: 24799 - RNA, 20 nt, synthetic construct
  source 1..20: mol_type = other RNA
atttggtctcattcactaga

SEQ ID NO: 24800 - RNA, 20 nt, synthetic construct
  source 1..20: mol_type = other RNA
atttggtgtgtgcaaaggat

SEQ ID NO: 24801 - RNA, 20 nt, synthetic construct
  source 1..20: mol_type = other RNA
atttggttatgcgaatttac

SEQ ID NO: 24802 - RNA, 20 nt, synthetic construct
  source 1..20: mol_type = other RNA
atttggttttactactgtac

SEQ ID NO: 24803 - RNA, 20 nt, synthetic construct
  source 1..20: mol_type = other RNA
atttgtaattcatcctacta

SEQ ID NO: 24804 - RNA, 20 nt, synthetic construct
  source 1..20: mol_type = other RNA
atttgtagatattttctgtc

SEQ ID NO: 24805 - RNA, 20 nt, synthetic construct
  source 1..20: mol_type = other RNA
atttgtatcttcacaaacaa

SEQ ID NO: 24806 - RNA, 20 nt, synthetic construct
  source 1..20: mol_type = other RNA
atttgtcaacttttagtagg

SEQ ID NO: 24807 - RNA, 20 nt, synthetic construct
  source 1..20: mol_type = other RNA
atttgtccatctggattata

SEQ ID NO: 24808 - RNA, 20 nt, synthetic construct
  source 1..20: mol_type = other RNA
atttgtgaaccttgaagtac

SEQ ID NO: 24809 - RNA, 20 nt, synthetic construct
  source 1..20: mol_type = other RNA
atttgtgcatactgtgatga

SEQ ID NO: 24810 - RNA, 20 nt, synthetic construct
  source 1..20: mol_type = other RNA
atttgtggcatctttgttac

SEQ ID NO: 24811 - RNA, 20 nt, synthetic construct
  source 1..20: mol_type = other RNA
atttgttactgatctgctca

SEQ ID NO: 24812 - RNA, 20 nt, synthetic construct
  source 1..20: mol_type = other RNA
atttgttatatccagattga

SEQ ID NO: 24813 - RNA, 20 nt, synthetic construct
  source 1..20: mol_type = other RNA
atttgttcaaaatacagtgt

SEQ ID NO: 24814 - RNA, 20 nt, synthetic construct
  source 1..20: mol_type = other RNA
atttgttcaagcgctgaagt

SEQ ID NO: 24815 - RNA, 20 nt, synthetic construct
  source 1..20: mol_type = other RNA
atttgttcagaaatagactc

SEQ ID NO: 24816 - RNA, 20 nt, synthetic construct
  source 1..20: mol_type = other RNA
atttgttctaatttgtgaac

SEQ ID NO: 24817 - RNA, 20 nt, synthetic construct
  source 1..20: mol_type = other RNA
atttgttctgtcacggtgcc

SEQ ID NO: 24818 - RNA, 20 nt, synthetic construct
  source 1..20: mol_type = other RNA
atttgttgcatccccattca

SEQ ID NO: 24819 - RNA, 20 nt, synthetic construct
  source 1..20: mol_type = other RNA
atttgtttagtagctgtctt

SEQ ID NO: 24820 - RNA, 20 nt, synthetic construct
  source 1..20: mol_type = other RNA
atttgtttgaattaagcacc

SEQ ID NO: 24821 - RNA, 20 nt, synthetic construct
  source 1..20: mol_type = other RNA
atttgtttgtgaagatacaa

SEQ ID NO: 24822 - RNA, 20 nt, synthetic construct
  source 1..20: mol_type = other RNA
atttgttttaccatctaaag

SEQ ID NO: 24823 - RNA, 20 nt, synthetic construct
  source 1..20: mol_type = other RNA
atttgttttccaagccttaa

SEQ ID NO: 24824 - RNA, 20 nt, synthetic construct
  source 1..20: mol_type = other RNA
atttgttttgtgtttgtgac

SEQ ID NO: 24825 - RNA, 20 nt, synthetic construct
  source 1..20: mol_type = other RNA
attttaaaagtcagctaggc

SEQ ID NO: 24826 - RNA, 20 nt, synthetic construct
  source 1..20: mol_type = other RNA
attttaaagggataatgcta

SEQ ID NO: 24827 - RNA, 20 nt, synthetic construct
  source 1..20: mol_type = other RNA
attttaaatcagcaccatct

SEQ ID NO: 24828 - RNA, 20 nt, synthetic construct
  source 1..20: mol_type = other RNA
attttaagattctctttagg

SEQ ID NO: 24829 - RNA, 20 nt, synthetic construct
  source 1..20: mol_type = other RNA
attttaagcctagagattag

SEQ ID NO: 24830 - RNA, 20 nt, synthetic construct
  source 1..20: mol_type = other RNA
attttaagtgcacaatgcag

SEQ ID NO: 24831 - RNA, 20 nt, synthetic construct
  source 1..20: mol_type = other RNA
attttaagttctagggaaca

SEQ ID NO: 24832 - RNA, 20 nt, synthetic construct
  source 1..20: mol_type = other RNA
attttaataagcttcgaagc

SEQ ID NO: 24833 - RNA, 20 nt, synthetic construct
  source 1..20: mol_type = other RNA
attttaatcgaatcctcaca

SEQ ID NO: 24834 - RNA, 20 nt, synthetic construct
  source 1..20: mol_type = other RNA
attttaatctgtcctgaata

SEQ ID NO: 24835 - RNA, 20 nt, synthetic construct
  source 1..20: mol_type = other RNA
attttacaccatgcaggttc

SEQ ID NO: 24836 - RNA, 20 nt, synthetic construct
  source 1..20: mol_type = other RNA
attttaccaaaacagcttct

SEQ ID NO: 24837 - RNA, 20 nt, synthetic construct
  source 1..20: mol_type = other RNA
attttaccaaggctaagttg

SEQ ID NO: 24838 - RNA, 20 nt, synthetic construct
  source 1..20: mol_type = other RNA
attttactgatcttttctga

SEQ ID NO: 24839 - RNA, 20 nt, synthetic construct
  source 1..20: mol_type = other RNA
attttactgctatacaaccg

SEQ ID NO: 24840 - RNA, 20 nt, synthetic construct
  source 1..20: mol_type = other RNA
attttacttaatttacccac

SEQ ID NO: 24841 - RNA, 20 nt, synthetic construct
  source 1..20: mol_type = other RNA
attttacttactagttgtgc

SEQ ID NO: 24842 - RNA, 20 nt, synthetic construct
  source 1..20: mol_type = other RNA
attttagaaggtaagaatgt

SEQ ID NO: 24843 - RNA, 20 nt, synthetic construct
  source 1..20: mol_type = other RNA
attttagatcaagtcctttc

SEQ ID NO: 24844 - RNA, 20 nt, synthetic construct
  source 1..20: mol_type = other RNA
attttagctggggcagcaaa

SEQ ID NO: 24845 - RNA, 20 nt, synthetic construct
  source 1..20: mol_type = other RNA
attttaggacaaggaaagga

SEQ ID NO: 24846 - RNA, 20 nt, synthetic construct
  source 1..20: mol_type = other RNA
attttaggctctgtggtttc

SEQ ID NO: 24847 - RNA, 20 nt, synthetic construct
  source 1..20: mol_type = other RNA
attttaggtcatttttcact

SEQ ID NO: 24848 - RNA, 20 nt, synthetic construct
  source 1..20: mol_type = other RNA
attttagtaattctccactt

SEQ ID NO: 24849 - RNA, 20 nt, synthetic construct
  source 1..20: mol_type = other RNA
attttataatgggcaatcag

SEQ ID NO: 24850 - RNA, 20 nt, synthetic construct
  source 1..20: mol_type = other RNA
attttataggcattccttaa

SEQ ID NO: 24851 - RNA, 20 nt, synthetic construct
  source 1..20: mol_type = other RNA
attttatgctttgtctctgg

SEQ ID NO: 24852 - RNA, 20 nt, synthetic construct
  source 1..20: mol_type = other RNA
attttatggttttttccccc

SEQ ID NO: 24853 - RNA, 20 nt, synthetic construct
  source 1..20: mol_type = other RNA
attttatgtacacgtcttgt

SEQ ID NO: 24854 - RNA, 20 nt, synthetic construct
  source 1..20: mol_type = other RNA
attttattaatttggcttgg

SEQ ID NO: 24855 - RNA, 20 nt, synthetic construct
  source 1..20: mol_type = other RNA
attttattaggtgcacacaa

SEQ ID NO: 24856 - RNA, 20 nt, synthetic construct
  source 1..20: mol_type = other RNA
attttattgataagcacatg

SEQ ID NO: 24857 - RNA, 20 nt, synthetic construct
  source 1..20: mol_type = other RNA
attttatttatacaggtgct

SEQ ID NO: 24858 - RNA, 20 nt, synthetic construct
  source 1..20: mol_type = other RNA
attttcaaggcttgtgcatc

SEQ ID NO: 24859 - RNA, 20 nt, synthetic construct
  source 1..20: mol_type = other RNA
attttcaagggtgttttccc

SEQ ID NO: 24860 - RNA, 20 nt, synthetic construct
  source 1..20: mol_type = other RNA
attttcaaggtagaagtaca

SEQ ID NO: 24861 - RNA, 20 nt, synthetic construct
  source 1..20: mol_type = other RNA
attttcaatcttggaaatga

SEQ ID NO: 24862 - RNA, 20 nt, synthetic construct
  source 1..20: mol_type = other RNA
attttcacagacagtaattt

SEQ ID NO: 24863 - RNA, 20 nt, synthetic construct
  source 1..20: mol_type = other RNA
attttcacagggcagggaga

SEQ ID NO: 24864 - RNA, 20 nt, synthetic construct
  source 1..20: mol_type = other RNA
attttcaggactcatgagag

SEQ ID NO: 24865 - RNA, 20 nt, synthetic construct
  source 1..20: mol_type = other RNA
attttcataacaaagctctg

SEQ ID NO: 24866 - RNA, 20 nt, synthetic construct
  source 1..20: mol_type = other RNA
attttcatagcagcattgtt

SEQ ID NO: 24867 - RNA, 20 nt, synthetic construct
  source 1..20: mol_type = other RNA
attttcataggaaatacttg

SEQ ID NO: 24868 - RNA, 20 nt, synthetic construct
  source 1..20: mol_type = other RNA
attttcatgggttgattttt

SEQ ID NO: 24869 - RNA, 20 nt, synthetic construct
  source 1..20: mol_type = other RNA
attttcatggtatcaattgt

SEQ ID NO: 24870 - RNA, 20 nt, synthetic construct
  source 1..20: mol_type = other RNA
attttcatggttttaatggg

SEQ ID NO: 24871 - RNA, 20 nt, synthetic construct
  source 1..20: mol_type = other RNA
attttcattctacctggagc

SEQ ID NO: 24872 - RNA, 20 nt, synthetic construct
  source 1..20: mol_type = other RNA
attttccattcacacaccct

SEQ ID NO: 24873 - RNA, 20 nt, synthetic construct
  source 1..20: mol_type = other RNA
attttccattcatgtaatgc

SEQ ID NO: 24874 - RNA, 20 nt, synthetic construct
  source 1..20: mol_type = other RNA
attttcccaaagatagactc

SEQ ID NO: 24875 - RNA, 20 nt, synthetic construct
  source 1..20: mol_type = other RNA
attttcccaatctctggtat

SEQ ID NO: 24876 - RNA, 20 nt, synthetic construct
  source 1..20: mol_type = other RNA
attttcccccaattaaacta

SEQ ID NO: 24877 - RNA, 20 nt, synthetic construct
  source 1..20: mol_type = other RNA
attttccctcctttttatca

SEQ ID NO: 24878 - RNA, 20 nt, synthetic construct
  source 1..20: mol_type = other RNA
attttccggttgtatagcag

SEQ ID NO: 24879 - RNA, 20 nt, synthetic construct
  source 1..20: mol_type = other RNA
attttcctaaaactccccat

SEQ ID NO: 24880 - RNA, 20 nt, synthetic construct
  source 1..20: mol_type = other RNA
attttcctaaccactgttat

SEQ ID NO: 24881 - RNA, 20 nt, synthetic construct
  source 1..20: mol_type = other RNA
attttcctccttctgctcac

SEQ ID NO: 24882 - RNA, 20 nt, synthetic construct
  source 1..20: mol_type = other RNA
attttccttatccattcatc

SEQ ID NO: 24883 - RNA, 20 nt, synthetic construct
  source 1..20: mol_type = other RNA
attttcgtatcttttaacag

SEQ ID NO: 24884 - RNA, 20 nt, synthetic construct
  source 1..20: mol_type = other RNA
attttcgtgtactgaaacca

SEQ ID NO: 24885 - RNA, 20 nt, synthetic construct
  source 1..20: mol_type = other RNA
attttctaaattgaacagcc

SEQ ID NO: 24886 - RNA, 20 nt, synthetic construct
  source 1..20: mol_type = other RNA
attttctaagagccaaagac

SEQ ID NO: 24887 - RNA, 20 nt, synthetic construct
  source 1..20: mol_type = other RNA
attttctaggaaccatatta

SEQ ID NO: 24888 - RNA, 20 nt, synthetic construct
  source 1..20: mol_type = other RNA
attttctattcattaccagg

SEQ ID NO: 24889 - RNA, 20 nt, synthetic construct
  source 1..20: mol_type = other RNA
attttctcccaaggttgcct

SEQ ID NO: 24890 - RNA, 20 nt, synthetic construct
  source 1..20: mol_type = other RNA
attttctctacagttaacaa

SEQ ID NO: 24891 - RNA, 20 nt, synthetic construct
  source 1..20: mol_type = other RNA
attttctctcatgttgggta

SEQ ID NO: 24892 - RNA, 20 nt, synthetic construct
  source 1..20: mol_type = other RNA
attttctgactctgtgcttg

SEQ ID NO: 24893 - RNA, 20 nt, synthetic construct
  source 1..20: mol_type = other RNA
attttctgagcaactactat

SEQ ID NO: 24894 - RNA, 20 nt, synthetic construct
  source 1..20: mol_type = other RNA
attttctgcatttggtttgc

SEQ ID NO: 24895 - RNA, 20 nt, synthetic construct
  source 1..20: mol_type = other RNA
attttctgcttctcaataag

SEQ ID NO: 24896 - RNA, 20 nt, synthetic construct
  source 1..20: mol_type = other RNA
attttctgtcattctgcagt

SEQ ID NO: 24897 - RNA, 20 nt, synthetic construct
  source 1..20: mol_type = other RNA
attttcttaccctttactca

SEQ ID NO: 24898 - RNA, 20 nt, synthetic construct
  source 1..20: mol_type = other RNA
attttcttatctaggcgaaa

SEQ ID NO: 24899 - RNA, 20 nt, synthetic construct
  source 1..20: mol_type = other RNA
attttctttgagtagttcat

SEQ ID NO: 24900 - RNA, 20 nt, synthetic construct
  source 1..20: mol_type = other RNA
attttcttttgtgggtaaat

SEQ ID NO: 24901 - RNA, 20 nt, synthetic construct
  source 1..20: mol_type = other RNA
attttgaaaaaacttccctt

SEQ ID NO: 24902 - RNA, 20 nt, synthetic construct
  source 1..20: mol_type = other RNA
attttgaaaaacagatcttg

SEQ ID NO: 24903 - RNA, 20 nt, synthetic construct
  source 1..20: mol_type = other RNA
attttgaagaaagttttgca

SEQ ID NO: 24904 - RNA, 20 nt, synthetic construct
  source 1..20: mol_type = other RNA
attttgaatcatgggagcca

SEQ ID NO: 24905 - RNA, 20 nt, synthetic construct
  source 1..20: mol_type = other RNA
attttgagacctcaggcagt

SEQ ID NO: 24906 - RNA, 20 nt, synthetic construct
  source 1..20: mol_type = other RNA
attttgagagtgcagtatgt

SEQ ID NO: 24907 - RNA, 20 nt, synthetic construct
  source 1..20: mol_type = other RNA
attttgaggcagagagatgg

SEQ ID NO: 24908 - RNA, 20 nt, synthetic construct
  source 1..20: mol_type = other RNA
attttgaggcttttggattt

SEQ ID NO: 24909 - RNA, 20 nt, synthetic construct
  source 1..20: mol_type = other RNA
attttgagttattgcatagg

SEQ ID NO: 24910 - RNA, 20 nt, synthetic construct
  source 1..20: mol_type = other RNA
attttgccagctaactttta

SEQ ID NO: 24911 - RNA, 20 nt, synthetic construct
  source 1..20: mol_type = other RNA
attttgctgccaagtcagca

SEQ ID NO: 24912 - RNA, 20 nt, synthetic construct
  source 1..20: mol_type = other RNA
attttgcttaaagttggtcc

SEQ ID NO: 24913 - RNA, 20 nt, synthetic construct
  source 1..20: mol_type = other RNA
attttgcttttgctttgggt

SEQ ID NO: 24914 - RNA, 20 nt, synthetic construct
  source 1..20: mol_type = other RNA
attttggaagactatgagaa

SEQ ID NO: 24915 - RNA, 20 nt, synthetic construct
  source 1..20: mol_type = other RNA
attttggattgcgattgttt

SEQ ID NO: 24916 - RNA, 20 nt, synthetic construct
  source 1..20: mol_type = other RNA
attttggcaaattgtcagat

SEQ ID NO: 24917 - RNA, 20 nt, synthetic construct
  source 1..20: mol_type = other RNA
attttggggccatctgaatt

SEQ ID NO: 24918 - RNA, 20 nt, synthetic construct
  source 1..20: mol_type = other RNA
attttggtagagatggggtc

SEQ ID NO: 24919 - RNA, 20 nt, synthetic construct
  source 1..20: mol_type = other RNA
attttggtcttaccctctag

SEQ ID NO: 24920 - RNA, 20 nt, synthetic construct
  source 1..20: mol_type = other RNA
attttgtaacgtgtatagct

SEQ ID NO: 24921 - RNA, 20 nt, synthetic construct
  source 1..20: mol_type = other RNA
attttgtatcctgagactta

SEQ ID NO: 24922 - RNA, 20 nt, synthetic construct
  source 1..20: mol_type = other RNA
attttgtgacaagttcagca

SEQ ID NO: 24923 - RNA, 20 nt, synthetic construct
  source 1..20: mol_type = other RNA
attttgtgggaattcagtca

SEQ ID NO: 24924 - RNA, 20 nt, synthetic construct
  source 1..20: mol_type = other RNA
attttgtgtcttctgttttt

SEQ ID NO: 24925 - RNA, 20 nt, synthetic construct
  source 1..20: mol_type = other RNA
attttgttattagggtaatg

SEQ ID NO: 24926 - RNA, 20 nt, synthetic construct
  source 1..20: mol_type = other RNA
attttgttcaggagttttgc

SEQ ID NO: 24927 - RNA, 20 nt, synthetic construct
  source 1..20: mol_type = other RNA
attttgttcattcatctgtt

SEQ ID NO: 24928 - RNA, 20 nt, synthetic construct
  source 1..20: mol_type = other RNA
attttgttgacatcctttgc

SEQ ID NO: 24929 - RNA, 20 nt, synthetic construct
  source 1..20: mol_type = other RNA
attttgttgttgttgtttct

SEQ ID NO: 24930 - RNA, 20 nt, synthetic construct
  source 1..20: mol_type = other RNA
attttgtttatttgctgtca

SEQ ID NO: 24931 - RNA, 20 nt, synthetic construct
  source 1..20: mol_type = other RNA
atttttaaaaagcagctacc

SEQ ID NO: 24932 - RNA, 20 nt, synthetic construct
  source 1..20: mol_type = other RNA
atttttaaaagagcgaagag

SEQ ID NO: 24933 - RNA, 20 nt, synthetic construct
  source 1..20: mol_type = other RNA
atttttaagaaatcgttgtg

SEQ ID NO: 24934 - RNA, 20 nt, synthetic construct
  source 1..20: mol_type = other RNA
atttttacattaaagacagc

SEQ ID NO: 24935 - RNA, 20 nt, synthetic construct
  source 1..20: mol_type = other RNA
atttttacccaacatgagag

SEQ ID NO: 24936 - RNA, 20 nt, synthetic construct
  source 1..20: mol_type = other RNA
atttttacccgtggaaatac

SEQ ID NO: 24937 - RNA, 20 nt, synthetic construct
  source 1..20: mol_type = other RNA
atttttagtagagatgaggt

SEQ ID NO: 24938 - RNA, 20 nt, synthetic construct
  source 1..20: mol_type = other RNA
atttttagtgactggcttaa

SEQ ID NO: 24939 - RNA, 20 nt, synthetic construct
  source 1..20: mol_type = other RNA
atttttatgcatttggtctc

SEQ ID NO: 24940 - RNA, 20 nt, synthetic construct
  source 1..20: mol_type = other RNA
atttttcacaaacacacaaa

SEQ ID NO: 24941 - RNA, 20 nt, synthetic construct
  source 1..20: mol_type = other RNA
atttttcacattcttcacca

SEQ ID NO: 24942 - RNA, 20 nt, synthetic construct
  source 1..20: mol_type = other RNA
atttttcacttcttattggt

SEQ ID NO: 24943 - RNA, 20 nt, synthetic construct
  source 1..20: mol_type = other RNA
atttttcagattgaccttgt

SEQ ID NO: 24944 - RNA, 20 nt, synthetic construct
  source 1..20: mol_type = other RNA
atttttcaggggggccactg

SEQ ID NO: 24945 - RNA, 20 nt, synthetic construct
  source 1..20: mol_type = other RNA
atttttccaacagtttacac

SEQ ID NO: 24946 - RNA, 20 nt, synthetic construct
  source 1..20: mol_type = other RNA
atttttccacataaagtctt

SEQ ID NO: 24947 - RNA, 20 nt, synthetic construct
  source 1..20: mol_type = other RNA
atttttcctttgcctaagtc

SEQ ID NO: 24948 - RNA, 20 nt, synthetic construct
  source 1..20: mol_type = other RNA
atttttctaaactggttttc

SEQ ID NO: 24949 - RNA, 20 nt, synthetic construct
  source 1..20: mol_type = other RNA
atttttctcgacacacaatc

SEQ ID NO: 24950 - RNA, 20 nt, synthetic construct
  source 1..20: mol_type = other RNA
atttttctgaccaactattt

SEQ ID NO: 24951 - RNA, 20 nt, synthetic construct
  source 1..20: mol_type = other RNA
atttttctgagtatattctg

SEQ ID NO: 24952 - RNA, 20 nt, synthetic construct
  source 1..20: mol_type = other RNA
atttttctgcaattggaaga

SEQ ID NO: 24953 - RNA, 20 nt, synthetic construct
  source 1..20: mol_type = other RNA
atttttctgtttctgtgaaa

SEQ ID NO: 24954 - RNA, 20 nt, synthetic construct
  source 1..20: mol_type = other RNA
atttttcttacctaagcatc

SEQ ID NO: 24955 - RNA, 20 nt, synthetic construct
  source 1..20: mol_type = other RNA
atttttgacagccacgtgta

SEQ ID NO: 24956 - RNA, 20 nt, synthetic construct
  source 1..20: mol_type = other RNA
atttttgagaaattgccaaa

SEQ ID NO: 24957 - RNA, 20 nt, synthetic construct
  source 1..20: mol_type = other RNA
atttttgagacaggttgttg

SEQ ID NO: 24958 - RNA, 20 nt, synthetic construct
  source 1..20: mol_type = other RNA
atttttgcaaaccaaatgca

SEQ ID NO: 24959 - RNA, 20 nt, synthetic construct
  source 1..20: mol_type = other RNA
atttttgccagtgttttaaa

SEQ ID NO: 24960 - RNA, 20 nt, synthetic construct
  source 1..20: mol_type = other RNA
atttttgctcacacttacta

SEQ ID NO: 24961 - RNA, 20 nt, synthetic construct
  source 1..20: mol_type = other RNA
atttttgtattctgacctaa

SEQ ID NO: 24962 - RNA, 20 nt, synthetic construct
  source 1..20: mol_type = other RNA
atttttgtcaagtgactcca

SEQ ID NO: 24963 - RNA, 20 nt, synthetic construct
  source 1..20: mol_type = other RNA
atttttgtctggaacacaca

SEQ ID NO: 24964 - RNA, 20 nt, synthetic construct
  source 1..20: mol_type = other RNA
atttttgtctggtggacaaa

SEQ ID NO: 24965 - RNA, 20 nt, synthetic construct
  source 1..20: mol_type = other RNA
atttttgtgtagaggtgaag

SEQ ID NO: 24966 - RNA, 20 nt, synthetic construct
  source 1..20: mol_type = other RNA
attttttaagtggcgctgtt

SEQ ID NO: 24967 - RNA, 20 nt, synthetic construct
  source 1..20: mol_type = other RNA
attttttcaccagcggcata

SEQ ID NO: 24968 - RNA, 20 nt, synthetic construct
  source 1..20: mol_type = other RNA
attttttcccagatacgtta

SEQ ID NO: 24969 - RNA, 20 nt, synthetic construct
  source 1..20: mol_type = other RNA
attttttcccgctacacaag

SEQ ID NO: 24970 - RNA, 20 nt, synthetic construct
  source 1..20: mol_type = other RNA
attttttcttcccatctcac

SEQ ID NO: 24971 - RNA, 20 nt, synthetic construct
  source 1..20: mol_type = other RNA
attttttgagacggaatctt

SEQ ID NO: 24972 - RNA, 20 nt, synthetic construct
  source 1..20: mol_type = other RNA
attttttggcatacaactgc

SEQ ID NO: 24973 - RNA, 20 nt, synthetic construct
  source 1..20: mol_type = other RNA
attttttggtttgtatgtgt

SEQ ID NO: 24974 - RNA, 20 nt, synthetic construct
  source 1..20: mol_type = other RNA
attttttgttgttggtttgt

SEQ ID NO: 24975 - RNA, 20 nt, synthetic construct
  source 1..20: mol_type = other RNA
caaaaaaccactggatacgg

SEQ ID NO: 24976 - RNA, 20 nt, synthetic construct
  source 1..20: mol_type = other RNA
caaaaaacgcggcacttggt

SEQ ID NO: 24977 - RNA, 20 nt, synthetic construct
  source 1..20: mol_type = other RNA
caaaaaactacgagtatcat

SEQ ID NO: 24978 - RNA, 20 nt, synthetic construct
  source 1..20: mol_type = other RNA
caaaaaagcaccagttatca

SEQ ID NO: 24979 - RNA, 20 nt, synthetic construct
  source 1..20: mol_type = other RNA
caaaaaaggtgctgttgtat

SEQ ID NO: 24980 - RNA, 20 nt, synthetic construct
  source 1..20: mol_type = other RNA
caaaaaagtcatgacctgct

SEQ ID NO: 24981 - RNA, 20 nt, synthetic construct
  source 1..20: mol_type = other RNA
caaaaaatcttaaagatgcc

SEQ ID NO: 24982 - RNA, 20 nt, synthetic construct
  source 1..20: mol_type = other RNA
caaaaaatgcagtagtaaag

SEQ ID NO: 24983 - RNA, 20 nt, synthetic construct
  source 1..20: mol_type = other RNA
caaaaaatgtggcatatcac

SEQ ID NO: 24984 - RNA, 20 nt, synthetic construct
  source 1..20: mol_type = other RNA
caaaaacaaaagagtagatt

SEQ ID NO: 24985 - RNA, 20 nt, synthetic construct
  source 1..20: mol_type = other RNA
caaaaacacactgagctttt

SEQ ID NO: 24986 - RNA, 20 nt, synthetic construct
  source 1..20: mol_type = other RNA
caaaaacactgtattttgaa

SEQ ID NO: 24987 - RNA, 20 nt, synthetic construct
  source 1..20: mol_type = other RNA
caaaaacagcatatacatga

SEQ ID NO: 24988 - RNA, 20 nt, synthetic construct
  source 1..20: mol_type = other RNA
caaaaacagtttccctctga

SEQ ID NO: 24989 - RNA, 20 nt, synthetic construct
  source 1..20: mol_type = other RNA
caaaaaccacatttcatagc

SEQ ID NO: 24990 - RNA, 20 nt, synthetic construct
  source 1..20: mol_type = other RNA
caaaaacccaactctttctt

SEQ ID NO: 24991 - RNA, 20 nt, synthetic construct
  source 1..20: mol_type = other RNA
caaaaacctcccaacaggct

SEQ ID NO: 24992 - RNA, 20 nt, synthetic construct
  source 1..20: mol_type = other RNA
caaaaaccttttttaaggaa

SEQ ID NO: 24993 - RNA, 20 nt, synthetic construct
  source 1..20: mol_type = other RNA
caaaaagaaactagaaaaga

SEQ ID NO: 24994 - RNA, 20 nt, synthetic construct
  source 1..20: mol_type = other RNA
caaaaagagaaaaattacag

SEQ ID NO: 24995 - RNA, 20 nt, synthetic construct
  source 1..20: mol_type = other RNA
caaaaagagaacacacaatt

SEQ ID NO: 24996 - RNA, 20 nt, synthetic construct
  source 1..20: mol_type = other RNA
caaaaagatctgtggacttt

SEQ ID NO: 24997 - RNA, 20 nt, synthetic construct
  source 1..20: mol_type = other RNA
caaaaagcacctaccataac

SEQ ID NO: 24998 - RNA, 20 nt, synthetic construct
  source 1..20: mol_type = other RNA
caaaaagtaggggtaaatct

SEQ ID NO: 24999 - RNA, 20 nt, synthetic construct
  source 1..20: mol_type = other RNA
caaaaagtgataccataaag

SEQ ID NO: 25000 - RNA, 20 nt, synthetic construct
  source 1..20: mol_type = other RNA
caaaaagtgtgaccacattc

SEQ ID NO: 25001 - RNA, 20 nt, synthetic construct
  source 1..20: mol_type = other RNA
caaaaataatatgataccct

SEQ ID NO: 25002 - RNA, 20 nt, synthetic construct
  source 1..20: mol_type = other RNA
caaaaatacagctccaaaga

SEQ ID NO: 25003 - RNA, 20 nt, synthetic construct
  source 1..20: mol_type = other RNA
caaaaatacgaaagtgctct

SEQ ID NO: 25004 - RNA, 20 nt, synthetic construct
  source 1..20: mol_type = other RNA
caaaaatactacaagagttc

SEQ ID NO: 25005 - RNA, 20 nt, synthetic construct
  source 1..20: mol_type = other RNA
caaaaatactcaagggcttt

SEQ ID NO: 25006 - RNA, 20 nt, synthetic construct
  source 1..20: mol_type = other RNA
caaaaatacttaagagcatg

SEQ ID NO: 25007 - RNA, 20 nt, synthetic construct
  source 1..20: mol_type = other RNA
caaaaatagaggatgggcat

SEQ ID NO: 25008 - RNA, 20 nt, synthetic construct
  source 1..20: mol_type = other RNA
caaaaatgacacaacttact

SEQ ID NO: 25009 - RNA, 20 nt, synthetic construct
  source 1..20: mol_type = other RNA
caaaaatgtgtctagtgaat

SEQ ID NO: 25010 - RNA, 20 nt, synthetic construct
  source 1..20: mol_type = other RNA
caaaaattagctgggcgaga

SEQ ID NO: 25011 - RNA, 20 nt, synthetic construct
  source 1..20: mol_type = other RNA
caaaaatttaagcacagaat

SEQ ID NO: 25012 - RNA, 20 nt, synthetic construct
  source 1..20: mol_type = other RNA
caaaaattttcattctacct

SEQ ID NO: 25013 - RNA, 20 nt, synthetic construct
  source 1..20: mol_type = other RNA
caaaaattttgttcaggagt

SEQ ID NO: 25014 - RNA, 20 nt, synthetic construct
  source 1..20: mol_type = other RNA
caaaacaaaaaacaaacccc

SEQ ID NO: 25015 - RNA, 20 nt, synthetic construct
  source 1..20: mol_type = other RNA
caaaacaaaacacatggcat

SEQ ID NO: 25016 - RNA, 20 nt, synthetic construct
  source 1..20: mol_type = other RNA
caaaacaaaaccctgttggg

SEQ ID NO: 25017 - RNA, 20 nt, synthetic construct
  source 1..20: mol_type = other RNA
caaaacaaacaaacagaaag

SEQ ID NO: 25018 - RNA, 20 nt, synthetic construct
  source 1..20: mol_type = other RNA
caaaacaaagtctttgggta

SEQ ID NO: 25019 - RNA, 20 nt, synthetic construct
  source 1..20: mol_type = other RNA
caaaacaaatggaaccactg

SEQ ID NO: 25020 - RNA, 20 nt, synthetic construct
  source 1..20: mol_type = other RNA
caaaacaagaagaaaaagca

SEQ ID NO: 25021 - RNA, 20 nt, synthetic construct
  source 1..20: mol_type = other RNA
caaaacaataagacaccgct

SEQ ID NO: 25022 - RNA, 20 nt, synthetic construct
  source 1..20: mol_type = other RNA
caaaacaatagcccagcagg

SEQ ID NO: 25023 - RNA, 20 nt, synthetic construct
  source 1..20: mol_type = other RNA
caaaacaatctaattcgaaa

SEQ ID NO: 25024 - RNA, 20 nt, synthetic construct
  source 1..20: mol_type = other RNA
caaaacacacgggtacacat

SEQ ID NO: 25025 - RNA, 20 nt, synthetic construct
  source 1..20: mol_type = other RNA
caaaacacatggcatcgggg

SEQ ID NO: 25026 - RNA, 20 nt, synthetic construct
  source 1..20: mol_type = other RNA
caaaacacttctgtgatcag

SEQ ID NO: 25027 - RNA, 20 nt, synthetic construct
  source 1..20: mol_type = other RNA
caaaacagcttcttgttaga

SEQ ID NO: 25028 - RNA, 20 nt, synthetic construct
  source 1..20: mol_type = other RNA
caaaacagggttattaacat

SEQ ID NO: 25029 - RNA, 20 nt, synthetic construct
  source 1..20: mol_type = other RNA
caaaacatatgtcagatggt

SEQ ID NO: 25030 - RNA, 20 nt, synthetic construct
  source 1..20: mol_type = other RNA
caaaacatcatctaatttcc

SEQ ID NO: 25031 - RNA, 20 nt, synthetic construct
  source 1..20: mol_type = other RNA
caaaacatgttttcaaatgc

SEQ ID NO: 25032 - RNA, 20 nt, synthetic construct
  source 1..20: mol_type = other RNA
caaaaccaaagaaaggggaa

SEQ ID NO: 25033 - RNA, 20 nt, synthetic construct
  source 1..20: mol_type = other RNA
caaaaccaggaggtttgcac

SEQ ID NO: 25034 - RNA, 20 nt, synthetic construct
  source 1..20: mol_type = other RNA
caaaaccctgttgggctatt

SEQ ID NO: 25035 - RNA, 20 nt, synthetic construct
  source 1..20: mol_type = other RNA
caaaacccttgggatgcagc

SEQ ID NO: 25036 - RNA, 20 nt, synthetic construct
  source 1..20: mol_type = other RNA
caaaacctggtatgagtgtt

SEQ ID NO: 25037 - RNA, 20 nt, synthetic construct
  source 1..20: mol_type = other RNA
caaaacggaaactttatacc

SEQ ID NO: 25038 - RNA, 20 nt, synthetic construct
  source 1..20: mol_type = other RNA
caaaactaggctgtcccaaa

SEQ ID NO: 25039 - RNA, 20 nt, synthetic construct
  source 1..20: mol_type = other RNA
caaaactcctgaacaaaatt

SEQ ID NO: 25040 - RNA, 20 nt, synthetic construct
  source 1..20: mol_type = other RNA
caaaactgaactcaaaatgg

SEQ ID NO: 25041 - RNA, 20 nt, synthetic construct
  source 1..20: mol_type = other RNA
caaaactgaagtttatcagt

SEQ ID NO: 25042 - RNA, 20 nt, synthetic construct
  source 1..20: mol_type = other RNA
caaaactgggggctggacat

SEQ ID NO: 25043 - RNA, 20 nt, synthetic construct
  source 1..20: mol_type = other RNA
caaaacttaggaggctatta

SEQ ID NO: 25044 - RNA, 20 nt, synthetic construct
  source 1..20: mol_type = other RNA
caaaagaaaattttctgagc

SEQ ID NO: 25045 - RNA, 20 nt, synthetic construct
  source 1..20: mol_type = other RNA
caaaagaacaggacttttgg

SEQ ID NO: 25046 - RNA, 20 nt, synthetic construct
  source 1..20: mol_type = other RNA
caaaagacatcactaagagt

SEQ ID NO: 25047 - RNA, 20 nt, synthetic construct
  source 1..20: mol_type = other RNA
caaaagaccaagaattttcc

SEQ ID NO: 25048 - RNA, 20 nt, synthetic construct
  source 1..20: mol_type = other RNA
caaaagagctgggcccgcag

SEQ ID NO: 25049 - RNA, 20 nt, synthetic construct
  source 1..20: mol_type = other RNA
caaaagagtagattccccct

SEQ ID NO: 25050 - RNA, 20 nt, synthetic construct
  source 1..20: mol_type = other RNA
caaaagatacacaagatctc

SEQ ID NO: 25051 - RNA, 20 nt, synthetic construct
  source 1..20: mol_type = other RNA
caaaagatcatttcaaacca

SEQ ID NO: 25052 - RNA, 20 nt, synthetic construct
  source 1..20: mol_type = other RNA
caaaagatgatgaacaaagg

SEQ ID NO: 25053 - RNA, 20 nt, synthetic construct
  source 1..20: mol_type = other RNA
caaaagatgcagaaaaagca

SEQ ID NO: 25054 - RNA, 20 nt, synthetic construct
  source 1..20: mol_type = other RNA
caaaagatgctggtggagta

SEQ ID NO: 25055 - RNA, 20 nt, synthetic construct
  source 1..20: mol_type = other RNA
caaaagcaaaattctaacaa

SEQ ID NO: 25056 - RNA, 20 nt, synthetic construct
  source 1..20: mol_type = other RNA
caaaagcaattattagttgt

SEQ ID NO: 25057 - RNA, 20 nt, synthetic construct
  source 1..20: mol_type = other RNA
caaaagcaccactgagaggg

SEQ ID NO: 25058 - RNA, 20 nt, synthetic construct
  source 1..20: mol_type = other RNA
caaaagcaggccctgagaag

SEQ ID NO: 25059 - RNA, 20 nt, synthetic construct
  source 1..20: mol_type = other RNA
caaaagccaagagcgaggcc

SEQ ID NO: 25060 - RNA, 20 nt, synthetic construct
  source 1..20: mol_type = other RNA
caaaagccatagtgtaaact

SEQ ID NO: 25061 - RNA, 20 nt, synthetic construct
  source 1..20: mol_type = other RNA
caaaagccccaaaccatcaa

SEQ ID NO: 25062 - RNA, 20 nt, synthetic construct
  source 1..20: mol_type = other RNA
caaaagcctcaaaatttagt

SEQ ID NO: 25063 - RNA, 20 nt, synthetic construct
  source 1..20: mol_type = other RNA
caaaagcgaaaggcaaaaaa

SEQ ID NO: 25064 - RNA, 20 nt, synthetic construct
  source 1..20: mol_type = other RNA
caaaagctccccggatgatt

SEQ ID NO: 25065 - RNA, 20 nt, synthetic construct
  source 1..20: mol_type = other RNA
caaaaggacatattttatga

SEQ ID NO: 25066 - RNA, 20 nt, synthetic construct
  source 1..20: mol_type = other RNA
caaaaggaggaactaattga

SEQ ID NO: 25067 - RNA, 20 nt, synthetic construct
  source 1..20: mol_type = other RNA
caaaaggccccttgaaagat

SEQ ID NO: 25068 - RNA, 20 nt, synthetic construct
  source 1..20: mol_type = other RNA
caaaagggaaaacaattact

SEQ ID NO: 25069 - RNA, 20 nt, synthetic construct
  source 1..20: mol_type = other RNA
caaaagggaaatatgaacca

SEQ ID NO: 25070 - RNA, 20 nt, synthetic construct
  source 1..20: mol_type = other RNA
caaaaggtagaagataatgt

SEQ ID NO: 25071 - RNA, 20 nt, synthetic construct
  source 1..20: mol_type = other RNA
caaaaggtttccagtggccc

SEQ ID NO: 25072 - RNA, 20 nt, synthetic construct
  source 1..20: mol_type = other RNA
caaaagtcctgttcttttgt

SEQ ID NO: 25073 - RNA, 20 nt, synthetic construct
  source 1..20: mol_type = other RNA
caaaagtgaaaactaaggtc

SEQ ID NO: 25074 - RNA, 20 nt, synthetic construct
  source 1..20: mol_type = other RNA
caaaagtgaatatagctaag

SEQ ID NO: 25075 - RNA, 20 nt, synthetic construct
  source 1..20: mol_type = other RNA
caaaagtgaatcactacagc

SEQ ID NO: 25076 - RNA, 20 nt, synthetic construct
  source 1..20: mol_type = other RNA
caaaagtgctgttgaggctg

SEQ ID NO: 25077 - RNA, 20 nt, synthetic construct
  source 1..20: mol_type = other RNA
caaaagtttaactttgatga

SEQ ID NO: 25078 - RNA, 20 nt, synthetic construct
  source 1..20: mol_type = other RNA
caaaatacagtgtttttgaa

SEQ ID NO: 25079 - RNA, 20 nt, synthetic construct
  source 1..20: mol_type = other RNA
caaaatacccacaagaaaaa

SEQ ID NO: 25080 - RNA, 20 nt, synthetic construct
  source 1..20: mol_type = other RNA
caaaatacctgggaatccaa

SEQ ID NO: 25081 - RNA, 20 nt, synthetic construct
  source 1..20: mol_type = other RNA
caaaataggattaagacact

SEQ ID NO: 25082 - RNA, 20 nt, synthetic construct
  source 1..20: mol_type = other RNA
caaaataggcagtcctctac

SEQ ID NO: 25083 - RNA, 20 nt, synthetic construct
  source 1..20: mol_type = other RNA
caaaatatattaaccactga

SEQ ID NO: 25084 - RNA, 20 nt, synthetic construct
  source 1..20: mol_type = other RNA
caaaatatgaagcattaatg

SEQ ID NO: 25085 - RNA, 20 nt, synthetic construct
  source 1..20: mol_type = other RNA
caaaatatgtaatgacctgg

SEQ ID NO: 25086 - RNA, 20 nt, synthetic construct
  source 1..20: mol_type = other RNA
caaaatattgaagagggaac

SEQ ID NO: 25087 - RNA, 20 nt, synthetic construct
  source 1..20: mol_type = other RNA
caaaatcaacattgcctcca

SEQ ID NO: 25088 - RNA, 20 nt, synthetic construct
  source 1..20: mol_type = other RNA
caaaatcaaggtgcgggatt

SEQ ID NO: 25089 - RNA, 20 nt, synthetic construct
  source 1..20: mol_type = other RNA
caaaatcagatatgaaagag

SEQ ID NO: 25090 - RNA, 20 nt, synthetic construct
  source 1..20: mol_type = other RNA
caaaatcctctgtagataaa

SEQ ID NO: 25091 - RNA, 20 nt, synthetic construct
  source 1..20: mol_type = other RNA
caaaatctgatgtgtatgtt

SEQ ID NO: 25092 - RNA, 20 nt, synthetic construct
  source 1..20: mol_type = other RNA
caaaatgattttcacagggc

SEQ ID NO: 25093 - RNA, 20 nt, synthetic construct
  source 1..20: mol_type = other RNA
caaaatggaagtgctgggct

SEQ ID NO: 25094 - RNA, 20 nt, synthetic construct
  source 1..20: mol_type = other RNA
caaaatggagacatctgaga

SEQ ID NO: 25095 - RNA, 20 nt, synthetic construct
  source 1..20: mol_type = other RNA
caaaatggagacccatactc

SEQ ID NO: 25096 - RNA, 20 nt, synthetic construct
  source 1..20: mol_type = other RNA
caaaatggatcaaagaccta

SEQ ID NO: 25097 - RNA, 20 nt, synthetic construct
  source 1..20: mol_type = other RNA
caaaatgtgatggcatcatt

SEQ ID NO: 25098 - RNA, 20 nt, synthetic construct
  source 1..20: mol_type = other RNA
caaaatgtggatgcatgagg

SEQ ID NO: 25099 - RNA, 20 nt, synthetic construct
  source 1..20: mol_type = other RNA
caaaatgttcatacaatagt

SEQ ID NO: 25100 - RNA, 20 nt, synthetic construct
  source 1..20: mol_type = other RNA
caaaattaccccattcactc

SEQ ID NO: 25101 - RNA, 20 nt, synthetic construct
  source 1..20: mol_type = other RNA
caaaattctaacaagaagct

SEQ ID NO: 25102 - RNA, 20 nt, synthetic construct
  source 1..20: mol_type = other RNA
caaaatttagtaagggtaaa

SEQ ID NO: 25103 - RNA, 20 nt, synthetic construct
  source 1..20: mol_type = other RNA
caaaattttaaatcagcacc

SEQ ID NO: 25104 - RNA, 20 nt, synthetic construct
  source 1..20: mol_type = other RNA
caaaatttttgcaaaccaaa

SEQ ID NO: 25105 - RNA, 20 nt, synthetic construct
  source 1..20: mol_type = other RNA
caaacaaacacactgggtaa

SEQ ID NO: 25106 - RNA, 20 nt, synthetic construct
  source 1..20: mol_type = other RNA
caaacaaacagaaaggccca

SEQ ID NO: 25107 - RNA, 20 nt, synthetic construct
  source 1..20: mol_type = other RNA
caaacaaatcattaaaaggt

SEQ ID NO: 25108 - RNA, 20 nt, synthetic construct
  source 1..20: mol_type = other RNA
caaacaaatccttttcccag

SEQ ID NO: 25109 - RNA, 20 nt, synthetic construct
  source 1..20: mol_type = other RNA
caaacaattacttcatagat

SEQ ID NO: 25110 - RNA, 20 nt, synthetic construct
  source 1..20: mol_type = other RNA
caaacaattagcacctttat

SEQ ID NO: 25111 - RNA, 20 nt, synthetic construct
  source 1..20: mol_type = other RNA
caaacacaaaacaaatggaa

SEQ ID NO: 25112 - RNA, 20 nt, synthetic construct
  source 1..20: mol_type = other RNA
caaacacacaaaccaacaac

SEQ ID NO: 25113 - RNA, 20 nt, synthetic construct
  source 1..20: mol_type = other RNA
caaacacactgggtaaacaa

SEQ ID NO: 25114 - RNA, 20 nt, synthetic construct
  source 1..20: mol_type = other RNA
caaacaccttacactcaaaa

SEQ ID NO: 25115 - RNA, 20 nt, synthetic construct
  source 1..20: mol_type = other RNA
caaacactggaaatcacagg

SEQ ID NO: 25116 - RNA, 20 nt, synthetic construct
  source 1..20: mol_type = other RNA
caaacacttttcaaacactt

SEQ ID NO: 25117 - RNA, 20 nt, synthetic construct
  source 1..20: mol_type = other RNA
caaacagaaaccctgtaccc

SEQ ID NO: 25118 - RNA, 20 nt, synthetic construct
  source 1..20: mol_type = other RNA
caaacagaaaggcccaaaaa

SEQ ID NO: 25119 - RNA, 20 nt, synthetic construct
  source 1..20: mol_type = other RNA
caaacagactgagccagcaa

SEQ ID NO: 25120 - RNA, 20 nt, synthetic construct
  source 1..20: mol_type = other RNA
caaacagcctaattgtacac

SEQ ID NO: 25121 - RNA, 20 nt, synthetic construct
  source 1..20: mol_type = other RNA
caaacagcgccacttaaaaa

SEQ ID NO: 25122 - RNA, 20 nt, synthetic construct
  source 1..20: mol_type = other RNA
caaacagcttgacattctta

SEQ ID NO: 25123 - RNA, 20 nt, synthetic construct
  source 1..20: mol_type = other RNA
caaacaggatacaaaaagca

SEQ ID NO: 25124 - RNA, 20 nt, synthetic construct
  source 1..20: mol_type = other RNA
caaacagtgaccacagtttg

SEQ ID NO: 25125 - RNA, 20 nt, synthetic construct
  source 1..20: mol_type = other RNA
caaacagtgtgatattggca

SEQ ID NO: 25126 - RNA, 20 nt, synthetic construct
  source 1..20: mol_type = other RNA
caaacagtttttacatgtag

SEQ ID NO: 25127 - RNA, 20 nt, synthetic construct
  source 1..20: mol_type = other RNA
caaacataccccaaccctac

SEQ ID NO: 25128 - RNA, 20 nt, synthetic construct
  source 1..20: mol_type = other RNA
caaacatatgcatgttattt

SEQ ID NO: 25129 - RNA, 20 nt, synthetic construct
  source 1..20: mol_type = other RNA
caaacatcatgatttaatag

SEQ ID NO: 25130 - RNA, 20 nt, synthetic construct
  source 1..20: mol_type = other RNA
caaacatgaataaccaatgt

SEQ ID NO: 25131 - RNA, 20 nt, synthetic construct
  source 1..20: mol_type = other RNA
caaacatgacagatcccaaa

SEQ ID NO: 25132 - RNA, 20 nt, synthetic construct
  source 1..20: mol_type = other RNA
caaacatgtgaggatttatt

SEQ ID NO: 25133 - RNA, 20 nt, synthetic construct
  source 1..20: mol_type = other RNA
caaacattgaaggcagaatt

SEQ ID NO: 25134 - RNA, 20 nt, synthetic construct
  source 1..20: mol_type = other RNA
caaacatttatggaattgcc

SEQ ID NO: 25135 - RNA, 20 nt, synthetic construct
  source 1..20: mol_type = other RNA
caaacattttttgcagagac

SEQ ID NO: 25136 - RNA, 20 nt, synthetic construct
  source 1..20: mol_type = other RNA
caaaccaaaaaatgtggcat

SEQ ID NO: 25137 - RNA, 20 nt, synthetic construct
  source 1..20: mol_type = other RNA
caaaccaaatgcagaaaata

SEQ ID NO: 25138 - RNA, 20 nt, synthetic construct
  source 1..20: mol_type = other RNA
caaaccaacaacaaaaaatc

SEQ ID NO: 25139 - RNA, 20 nt, synthetic construct
  source 1..20: mol_type = other RNA
caaaccaatgttctcttttc

SEQ ID NO: 25140 - RNA, 20 nt, synthetic construct
  source 1..20: mol_type = other RNA
caaaccacacagagaacagc

SEQ ID NO: 25141 - RNA, 20 nt, synthetic construct
  source 1..20: mol_type = other RNA
caaaccacctaactactaat

SEQ ID NO: 25142 - RNA, 20 nt, synthetic construct
  source 1..20: mol_type = other RNA
caaaccactatctaataaaa

SEQ ID NO: 25143 - RNA, 20 nt, synthetic construct
  source 1..20: mol_type = other RNA
caaaccagacatttctcata

SEQ ID NO: 25144 - RNA, 20 nt, synthetic construct
  source 1..20: mol_type = other RNA
caaaccatcaagtgtgatcc

SEQ ID NO: 25145 - RNA, 20 nt, synthetic construct
  source 1..20: mol_type = other RNA
caaaccatcctttccttgtc

SEQ ID NO: 25146 - RNA, 20 nt, synthetic construct
  source 1..20: mol_type = other RNA
caaaccatgttcatgggaag

SEQ ID NO: 25147 - RNA, 20 nt, synthetic construct
  source 1..20: mol_type = other RNA
caaacccaaattaaaggatg

SEQ ID NO: 25148 - RNA, 20 nt, synthetic construct
  source 1..20: mol_type = other RNA
caaaccctacacccatccac

SEQ ID NO: 25149 - RNA, 20 nt, synthetic construct
  source 1..20: mol_type = other RNA
caaacctcctggttttgatc

SEQ ID NO: 25150 - RNA, 20 nt, synthetic construct
  source 1..20: mol_type = other RNA
caaacctggcaatactctca

SEQ ID NO: 25151 - RNA, 20 nt, synthetic construct
  source 1..20: mol_type = other RNA
caaaccttcttatttccttc

SEQ ID NO: 25152 - RNA, 20 nt, synthetic construct
  source 1..20: mol_type = other RNA
caaacctttaagttctccaa

SEQ ID NO: 25153 - RNA, 20 nt, synthetic construct
  source 1..20: mol_type = other RNA
caaacgaaccaattaccata

SEQ ID NO: 25154 - RNA, 20 nt, synthetic construct
  source 1..20: mol_type = other RNA
caaacgcattgtgatgtctc

SEQ ID NO: 25155 - RNA, 20 nt, synthetic construct
  source 1..20: mol_type = other RNA
caaacgtccatcaacagcag

SEQ ID NO: 25156 - RNA, 20 nt, synthetic construct
  source 1..20: mol_type = other RNA
caaacgtgcacacccagtta

SEQ ID NO: 25157 - RNA, 20 nt, synthetic construct
  source 1..20: mol_type = other RNA
caaacgtgctttccttattg

SEQ ID NO: 25158 - RNA, 20 nt, synthetic construct
  source 1..20: mol_type = other RNA
caaacgtttagatgaatgat

SEQ ID NO: 25159 - RNA, 20 nt, synthetic construct
  source 1..20: mol_type = other RNA
caaactaactagaaaaccga

SEQ ID NO: 25160 - RNA, 20 nt, synthetic construct
  source 1..20: mol_type = other RNA
caaactaagtggtattctat

SEQ ID NO: 25161 - RNA, 20 nt, synthetic construct
  source 1..20: mol_type = other RNA
caaactactgatagcgaaag

SEQ ID NO: 25162 - RNA, 20 nt, synthetic construct
  source 1..20: mol_type = other RNA
caaactagaaaaagaataag

SEQ ID NO: 25163 - RNA, 20 nt, synthetic construct
  source 1..20: mol_type = other RNA
caaactatgcttaatctgat

SEQ ID NO: 25164 - RNA, 20 nt, synthetic construct
  source 1..20: mol_type = other RNA
caaactcaaaaggacatatt

SEQ ID NO: 25165 - RNA, 20 nt, synthetic construct
  source 1..20: mol_type = other RNA
caaactcaagttccggttct

SEQ ID NO: 25166 - RNA, 20 nt, synthetic construct
  source 1..20: mol_type = other RNA
caaactcacttattagcaaa

SEQ ID NO: 25167 - RNA, 20 nt, synthetic construct
  source 1..20: mol_type = other RNA
caaactcagatctgagagat

SEQ ID NO: 25168 - RNA, 20 nt, synthetic construct
  source 1..20: mol_type = other RNA
caaactccaaacctttaagt

SEQ ID NO: 25169 - RNA, 20 nt, synthetic construct
  source 1..20: mol_type = other RNA
caaactccaagtctcatgca

SEQ ID NO: 25170 - RNA, 20 nt, synthetic construct
  source 1..20: mol_type = other RNA
caaactctaaataataggtt

SEQ ID NO: 25171 - RNA, 20 nt, synthetic construct
  source 1..20: mol_type = other RNA
caaactgaatcagacaacac

SEQ ID NO: 25172 - RNA, 20 nt, synthetic construct
  source 1..20: mol_type = other RNA
caaactgcagaatgacagaa

SEQ ID NO: 25173 - RNA, 20 nt, synthetic construct
  source 1..20: mol_type = other RNA
caaactgcgtggtttattca

SEQ ID NO: 25174 - RNA, 20 nt, synthetic construct
  source 1..20: mol_type = other RNA
caaactggagtgcagtggtg

SEQ ID NO: 25175 - RNA, 20 nt, synthetic construct
  source 1..20: mol_type = other RNA
caaactgtggtcactgtttg

SEQ ID NO: 25176 - RNA, 20 nt, synthetic construct
  source 1..20: mol_type = other RNA
caaactgtgtgcttggagtc

SEQ ID NO: 25177 - RNA, 20 nt, synthetic construct
  source 1..20: mol_type = other RNA
caaactgttttccacagtga

SEQ ID NO: 25178 - RNA, 20 nt, synthetic construct
  source 1..20: mol_type = other RNA
caaacttagaatataaactc

SEQ ID NO: 25179 - RNA, 20 nt, synthetic construct
  source 1..20: mol_type = other RNA
caaacttgaaccttcctctt

SEQ ID NO: 25180 - RNA, 20 nt, synthetic construct
  source 1..20: mol_type = other RNA
caaacttggtttattttctg

SEQ ID NO: 25181 - RNA, 20 nt, synthetic construct
  source 1..20: mol_type = other RNA
caaagaaaataatgttttcc

SEQ ID NO: 25182 - RNA, 20 nt, synthetic construct
  source 1..20: mol_type = other RNA
caaagaaactacctagaaaa

SEQ ID NO: 25183 - RNA, 20 nt, synthetic construct
  source 1..20: mol_type = other RNA
caaagaaagagttgggtttt

SEQ ID NO: 25184 - RNA, 20 nt, synthetic construct
  source 1..20: mol_type = other RNA
caaagaaaggggaaggaatt

SEQ ID NO: 25185 - RNA, 20 nt, synthetic construct
  source 1..20: mol_type = other RNA
caaagaaattggacgggtgg

SEQ ID NO: 25186 - RNA, 20 nt, synthetic construct
  source 1..20: mol_type = other RNA
caaagaacaggaagggagag

SEQ ID NO: 25187 - RNA, 20 nt, synthetic construct
  source 1..20: mol_type = other RNA
caaagaacaggagttaccat

SEQ ID NO: 25188 - RNA, 20 nt, synthetic construct
  source 1..20: mol_type = other RNA
caaagaaggaaaaaacacct

SEQ ID NO: 25189 - RNA, 20 nt, synthetic construct
  source 1..20: mol_type = other RNA
caaagacaagttcttacctc

SEQ ID NO: 25190 - RNA, 20 nt, synthetic construct
  source 1..20: mol_type = other RNA
caaagacagatcttatggaa

SEQ ID NO: 25191 - RNA, 20 nt, synthetic construct
  source 1..20: mol_type = other RNA
caaagacatcctgatttagg

SEQ ID NO: 25192 - RNA, 20 nt, synthetic construct
  source 1..20: mol_type = other RNA
caaagacattgtcttacata

SEQ ID NO: 25193 - RNA, 20 nt, synthetic construct
  source 1..20: mol_type = other RNA
caaagacctaagcttaagag

SEQ ID NO: 25194 - RNA, 20 nt, synthetic construct
  source 1..20: mol_type = other RNA
caaagacttcaacggacatt

SEQ ID NO: 25195 - RNA, 20 nt, synthetic construct
  source 1..20: mol_type = other RNA
caaagacttcaggaacacct

SEQ ID NO: 25196 - RNA, 20 nt, synthetic construct
  source 1..20: mol_type = other RNA
caaagactttgttttgtttt

SEQ ID NO: 25197 - RNA, 20 nt, synthetic construct
  source 1..20: mol_type = other RNA
caaagagaacaaaatacctg

SEQ ID NO: 25198 - RNA, 20 nt, synthetic construct
  source 1..20: mol_type = other RNA
caaagagaacaatggaatag

SEQ ID NO: 25199 - RNA, 20 nt, synthetic construct
  source 1..20: mol_type = other RNA
caaagagacctgattcttcc

SEQ ID NO: 25200 - RNA, 20 nt, synthetic construct
  source 1..20: mol_type = other RNA
caaagagctgggactacagg

SEQ ID NO: 25201 - RNA, 20 nt, synthetic construct
  source 1..20: mol_type = other RNA
caaagaggcaaaactcctga

SEQ ID NO: 25202 - RNA, 20 nt, synthetic construct
  source 1..20: mol_type = other RNA
caaagataaaggtaaggaaa

SEQ ID NO: 25203 - RNA, 20 nt, synthetic construct
  source 1..20: mol_type = other RNA
caaagatagactcttcagag

SEQ ID NO: 25204 - RNA, 20 nt, synthetic construct
  source 1..20: mol_type = other RNA
caaagatataaaaatggtca

SEQ ID NO: 25205 - RNA, 20 nt, synthetic construct
  source 1..20: mol_type = other RNA
caaagatatgggttattcac

SEQ ID NO: 25206 - RNA, 20 nt, synthetic construct
  source 1..20: mol_type = other RNA
caaagatattagctacaaaa

SEQ ID NO: 25207 - RNA, 20 nt, synthetic construct
  source 1..20: mol_type = other RNA
caaagatcatgggttttaat

SEQ ID NO: 25208 - RNA, 20 nt, synthetic construct
  source 1..20: mol_type = other RNA
caaagatcatttcacttgat

SEQ ID NO: 25209 - RNA, 20 nt, synthetic construct
  source 1..20: mol_type = other RNA
caaagatgccacaaatggag

SEQ ID NO: 25210 - RNA, 20 nt, synthetic construct
  source 1..20: mol_type = other RNA
caaagattatgttccacatg

SEQ ID NO: 25211 - RNA, 20 nt, synthetic construct
  source 1..20: mol_type = other RNA
caaagattcttgtcatgaat

SEQ ID NO: 25212 - RNA, 20 nt, synthetic construct
  source 1..20: mol_type = other RNA
caaagatttacccctacttt

SEQ ID NO: 25213 - RNA, 20 nt, synthetic construct
  source 1..20: mol_type = other RNA
caaagatttactaaactgaa

SEQ ID NO: 25214 - RNA, 20 nt, synthetic construct
  source 1..20: mol_type = other RNA
caaagcaaaagcaaaattct

SEQ ID NO: 25215 - RNA, 20 nt, synthetic construct
  source 1..20: mol_type = other RNA
caaagcaaaccagacatttc

SEQ ID NO: 25216 - RNA, 20 nt, synthetic construct
  source 1..20: mol_type = other RNA
caaagcaaacgtgcacaccc

SEQ ID NO: 25217 - RNA, 20 nt, synthetic construct
  source 1..20: mol_type = other RNA
caaagcaacatgctaagtgt

SEQ ID NO: 25218 - RNA, 20 nt, synthetic construct
  source 1..20: mol_type = other RNA
caaagcaagaaaaagaaata

SEQ ID NO: 25219 - RNA, 20 nt, synthetic construct
  source 1..20: mol_type = other RNA
caaagcaagccttggcaagg

SEQ ID NO: 25220 - RNA, 20 nt, synthetic construct
  source 1..20: mol_type = other RNA
caaagcaagttaaaagacat

SEQ ID NO: 25221 - RNA, 20 nt, synthetic construct
  source 1..20: mol_type = other RNA
caaagcagaaatacagaccg

SEQ ID NO: 25222 - RNA, 20 nt, synthetic construct
  source 1..20: mol_type = other RNA
caaagcataaaatatgtgaa

SEQ ID NO: 25223 - RNA, 20 nt, synthetic construct
  source 1..20: mol_type = other RNA
caaagcatatgaatctagaa

SEQ ID NO: 25224 - RNA, 20 nt, synthetic construct
  source 1..20: mol_type = other RNA
caaagcccaccagcataaga

SEQ ID NO: 25225 - RNA, 20 nt, synthetic construct
  source 1..20: mol_type = other RNA
caaagccctcaggaccaggc

SEQ ID NO: 25226 - RNA, 20 nt, synthetic construct
  source 1..20: mol_type = other RNA
caaagcctgtggaggcagta

SEQ ID NO: 25227 - RNA, 20 nt, synthetic construct
  source 1..20: mol_type = other RNA
caaagccttctctactctgc

SEQ ID NO: 25228 - RNA, 20 nt, synthetic construct
  source 1..20: mol_type = other RNA
caaagctaccctttcttgtt

SEQ ID NO: 25229 - RNA, 20 nt, synthetic construct
  source 1..20: mol_type = other RNA
caaagctctgatgctttctc

SEQ ID NO: 25230 - RNA, 20 nt, synthetic construct
  source 1..20: mol_type = other RNA
caaagctggcatgttggata

SEQ ID NO: 25231 - RNA, 20 nt, synthetic construct
  source 1..20: mol_type = other RNA
caaagctttaaactggatga

SEQ ID NO: 25232 - RNA, 20 nt, synthetic construct
  source 1..20: mol_type = other RNA
caaaggaaaaatctaaccct

SEQ ID NO: 25233 - RNA, 20 nt, synthetic construct
  source 1..20: mol_type = other RNA
caaaggaaggaattttagga

SEQ ID NO: 25234 - RNA, 20 nt, synthetic construct
  source 1..20: mol_type = other RNA
caaaggacactattgagagt

SEQ ID NO: 25235 - RNA, 20 nt, synthetic construct
  source 1..20: mol_type = other RNA
caaaggactggaactcattt

SEQ ID NO: 25236 - RNA, 20 nt, synthetic construct
  source 1..20: mol_type = other RNA
caaaggactgggatcctaag

SEQ ID NO: 25237 - RNA, 20 nt, synthetic construct
  source 1..20: mol_type = other RNA
caaaggagagaagagggggc

SEQ ID NO: 25238 - RNA, 20 nt, synthetic construct
  source 1..20: mol_type = other RNA
caaaggatgtcaacaaaata

SEQ ID NO: 25239 - RNA, 20 nt, synthetic construct
  source 1..20: mol_type = other RNA
caaaggattagaaagtagat

SEQ ID NO: 25240 - RNA, 20 nt, synthetic construct
  source 1..20: mol_type = other RNA
caaaggattcgggggagagc

SEQ ID NO: 25241 - RNA, 20 nt, synthetic construct
  source 1..20: mol_type = other RNA
caaaggattgggaagattgg

SEQ ID NO: 25242 - RNA, 20 nt, synthetic construct
  source 1..20: mol_type = other RNA
caaaggcaggagcagtgtga

SEQ ID NO: 25243 - RNA, 20 nt, synthetic construct
  source 1..20: mol_type = other RNA
caaaggccgctcttgacctt

SEQ ID NO: 25244 - RNA, 20 nt, synthetic construct
  source 1..20: mol_type = other RNA
caaaggcgaagcccgccgct

SEQ ID NO: 25245 - RNA, 20 nt, synthetic construct
  source 1..20: mol_type = other RNA
caaagggcctgttccaggcc

SEQ ID NO: 25246 - RNA, 20 nt, synthetic construct
  source 1..20: mol_type = other RNA
caaaggggcattccgtggaa

SEQ ID NO: 25247 - RNA, 20 nt, synthetic construct
  source 1..20: mol_type = other RNA
caaagggtcactattaacca

SEQ ID NO: 25248 - RNA, 20 nt, synthetic construct
  source 1..20: mol_type = other RNA
caaagggttcttggaaatta

SEQ ID NO: 25249 - RNA, 20 nt, synthetic construct
  source 1..20: mol_type = other RNA
caaaggtagaaacatcccaa

SEQ ID NO: 25250 - RNA, 20 nt, synthetic construct
  source 1..20: mol_type = other RNA
caaaggtgttaagccgttcc

SEQ ID NO: 25251 - RNA, 20 nt, synthetic construct
  source 1..20: mol_type = other RNA
caaaggttgaaaactcaact

SEQ ID NO: 25252 - RNA, 20 nt, synthetic construct
  source 1..20: mol_type = other RNA
caaaggttgagacaagacca

SEQ ID NO: 25253 - RNA, 20 nt, synthetic construct
  source 1..20: mol_type = other RNA
caaagtaaaaagcactatcc

SEQ ID NO: 25254 - RNA, 20 nt, synthetic construct
  source 1..20: mol_type = other RNA
caaagtatatatcatagagt

SEQ ID NO: 25255 - RNA, 20 nt, synthetic construct
  source 1..20: mol_type = other RNA
caaagtatgagaaatgtctg

SEQ ID NO: 25256 - RNA, 20 nt, synthetic construct
  source 1..20: mol_type = other RNA
caaagtatgcatagcagggt

SEQ ID NO: 25257 - RNA, 20 nt, synthetic construct
  source 1..20: mol_type = other RNA
caaagtccccacatgactgg

SEQ ID NO: 25258 - RNA, 20 nt, synthetic construct
  source 1..20: mol_type = other RNA
caaagtcccctgtaattaca

SEQ ID NO: 25259 - RNA, 20 nt, synthetic construct
  source 1..20: mol_type = other RNA
caaagtctttgggtaattta

SEQ ID NO: 25260 - RNA, 20 nt, synthetic construct
  source 1..20: mol_type = other RNA
caaagtgaaaggcaaaggaa

SEQ ID NO: 25261 - RNA, 20 nt, synthetic construct
  source 1..20: mol_type = other RNA
caaagtgagcagaaggagga

SEQ ID NO: 25262 - RNA, 20 nt, synthetic construct
  source 1..20: mol_type = other RNA
caaagtggaaacaactcaaa

SEQ ID NO: 25263 - RNA, 20 nt, synthetic construct
  source 1..20: mol_type = other RNA
caaagttaaacttttgtgca

SEQ ID NO: 25264 - RNA, 20 nt, synthetic construct
  source 1..20: mol_type = other RNA
caaagttaatagcctcctaa

SEQ ID NO: 25265 - RNA, 20 nt, synthetic construct
  source 1..20: mol_type = other RNA
caaagttatgtttatgacaa

SEQ ID NO: 25266 - RNA, 20 nt, synthetic construct
  source 1..20: mol_type = other RNA
caaagtttcctacatactgc

SEQ ID NO: 25267 - RNA, 20 nt, synthetic construct
  source 1..20: mol_type = other RNA
caaataaaacacaaggacag

SEQ ID NO: 25268 - RNA, 20 nt, synthetic construct
  source 1..20: mol_type = other RNA
caaataaaagcttatgatct

SEQ ID NO: 25269 - RNA, 20 nt, synthetic construct
  source 1..20: mol_type = other RNA
caaataacaccatagctgaa

SEQ ID NO: 25270 - RNA, 20 nt, synthetic construct
  source 1..20: mol_type = other RNA
caaataacagttcttaagtt

SEQ ID NO: 25271 - RNA, 20 nt, synthetic construct
  source 1..20: mol_type = other RNA
caaataacatgcatatgttt

SEQ ID NO: 25272 - RNA, 20 nt, synthetic construct
  source 1..20: mol_type = other RNA
caaataactccagcttttat

SEQ ID NO: 25273 - RNA, 20 nt, synthetic construct
  source 1..20: mol_type = other RNA
caaataagaagattgagtca

SEQ ID NO: 25274 - RNA, 20 nt, synthetic construct
  source 1..20: mol_type = other RNA
caaataatagctatcctaat

SEQ ID NO: 25275 - RNA, 20 nt, synthetic construct
  source 1..20: mol_type = other RNA
caaataatcccgcaccttga

SEQ ID NO: 25276 - RNA, 20 nt, synthetic construct
  source 1..20: mol_type = other RNA
caaataattaacactatgtg

SEQ ID NO: 25277 - RNA, 20 nt, synthetic construct
  source 1..20: mol_type = other RNA
caaataattgctgcagtttt

SEQ ID NO: 25278 - RNA, 20 nt, synthetic construct
  source 1..20: mol_type = other RNA
caaatacctagttttccaat

SEQ ID NO: 25279 - RNA, 20 nt, synthetic construct
  source 1..20: mol_type = other RNA
caaatacctctgaatgtgac

SEQ ID NO: 25280 - RNA, 20 nt, synthetic construct
  source 1..20: mol_type = other RNA
caaatatccaatcactggct

SEQ ID NO: 25281 - RNA, 20 nt, synthetic construct
  source 1..20: mol_type = other RNA
caaatcaaaacaataagaca

SEQ ID NO: 25282 - RNA, 20 nt, synthetic construct
  source 1..20: mol_type = other RNA
caaatcaatacttcatttcc

SEQ ID NO: 25283 - RNA, 20 nt, synthetic construct
  source 1..20: mol_type = other RNA
caaatcagaaaaggctgaga

SEQ ID NO: 25284 - RNA, 20 nt, synthetic construct
  source 1..20: mol_type = other RNA
caaatcagatttcaggtggt

SEQ ID NO: 25285 - RNA, 20 nt, synthetic construct
  source 1..20: mol_type = other RNA
caaatcatgaaagtggagaa

SEQ ID NO: 25286 - RNA, 20 nt, synthetic construct
  source 1..20: mol_type = other RNA
caaatccaaattcacagcat

SEQ ID NO: 25287 - RNA, 20 nt, synthetic construct
  source 1..20: mol_type = other RNA
caaatccaggatggcatgaa

SEQ ID NO: 25288 - RNA, 20 nt, synthetic construct
  source 1..20: mol_type = other RNA
caaatccagtcttcaggtct

SEQ ID NO: 25289 - RNA, 20 nt, synthetic construct
  source 1..20: mol_type = other RNA
caaatccctgatcaagttgc

SEQ ID NO: 25290 - RNA, 20 nt, synthetic construct
  source 1..20: mol_type = other RNA
caaatccttttcccaggagc

SEQ ID NO: 25291 - RNA, 20 nt, synthetic construct
  source 1..20: mol_type = other RNA
caaatctctagaacttatgc

SEQ ID NO: 25292 - RNA, 20 nt, synthetic construct
  source 1..20: mol_type = other RNA
caaatctggctgcagggctt

SEQ ID NO: 25293 - RNA, 20 nt, synthetic construct
  source 1..20: mol_type = other RNA
caaatctttagtgttgcttg

SEQ ID NO: 25294 - RNA, 20 nt, synthetic construct
  source 1..20: mol_type = other RNA
caaatgaaaggcgtcggggc

SEQ ID NO: 25295 - RNA, 20 nt, synthetic construct
  source 1..20: mol_type = other RNA
caaatgaaagtcagctaatt

SEQ ID NO: 25296 - RNA, 20 nt, synthetic construct
  source 1..20: mol_type = other RNA
caaatgaacaggttcttcat

SEQ ID NO: 25297 - RNA, 20 nt, synthetic construct
  source 1..20: mol_type = other RNA
caaatgactatgaataaatc

SEQ ID NO: 25298 - RNA, 20 nt, synthetic construct
  source 1..20: mol_type = other RNA
caaatgaggcttttattggt

SEQ ID NO: 25299 - RNA, 20 nt, synthetic construct
  source 1..20: mol_type = other RNA
caaatgaggttgcttttact

SEQ ID NO: 25300 - RNA, 20 nt, synthetic construct
  source 1..20: mol_type = other RNA
caaatgatattcactgattt

SEQ ID NO: 25301 - RNA, 20 nt, synthetic construct
  source 1..20: mol_type = other RNA
caaatgatgaagggttttct

SEQ ID NO: 25302 - RNA, 20 nt, synthetic construct
  source 1..20: mol_type = other RNA
caaatgcaccaacacctgca

SEQ ID NO: 25303 - RNA, 20 nt, synthetic construct
  source 1..20: mol_type = other RNA
caaatgcagaaaataaacca

SEQ ID NO: 25304 - RNA, 20 nt, synthetic construct
  source 1..20: mol_type = other RNA
caaatgccatagagctttaa

SEQ ID NO: 25305 - RNA, 20 nt, synthetic construct
  source 1..20: mol_type = other RNA
caaatgctataaagaacatg

SEQ ID NO: 25306 - RNA, 20 nt, synthetic construct
  source 1..20: mol_type = other RNA
caaatggaaccactgtaggc

SEQ ID NO: 25307 - RNA, 20 nt, synthetic construct
  source 1..20: mol_type = other RNA
caaatggagtgacttaagca

SEQ ID NO: 25308 - RNA, 20 nt, synthetic construct
  source 1..20: mol_type = other RNA
caaatggccttctttctttc

SEQ ID NO: 25309 - RNA, 20 nt, synthetic construct
  source 1..20: mol_type = other RNA
caaatgggaaattagatgat

SEQ ID NO: 25310 - RNA, 20 nt, synthetic construct
  source 1..20: mol_type = other RNA
caaatgggagcatgcacaca

SEQ ID NO: 25311 - RNA, 20 nt, synthetic construct
  source 1..20: mol_type = other RNA
caaatggtaacagccaaata

SEQ ID NO: 25312 - RNA, 20 nt, synthetic construct
  source 1..20: mol_type = other RNA
caaatgtcatcttctctctc

SEQ ID NO: 25313 - RNA, 20 nt, synthetic construct
  source 1..20: mol_type = other RNA
caaatgtctcattgtggatg

SEQ ID NO: 25314 - RNA, 20 nt, synthetic construct
  source 1..20: mol_type = other RNA
caaatgtctgtctttatgcc

SEQ ID NO: 25315 - RNA, 20 nt, synthetic construct
  source 1..20: mol_type = other RNA
caaatgtcttaagaaggaaa

SEQ ID NO: 25316 - RNA, 20 nt, synthetic construct
  source 1..20: mol_type = other RNA
caaatgtgacagaacaaact

SEQ ID NO: 25317 - RNA, 20 nt, synthetic construct
  source 1..20: mol_type = other RNA
caaatgtgactagaagaaat

SEQ ID NO: 25318 - RNA, 20 nt, synthetic construct
  source 1..20: mol_type = other RNA
caaatgtggatagtgctttt

SEQ ID NO: 25319 - RNA, 20 nt, synthetic construct
  source 1..20: mol_type = other RNA
caaatgttaagcccaacttc

SEQ ID NO: 25320 - RNA, 20 nt, synthetic construct
  source 1..20: mol_type = other RNA
caaatgttgcagagactgga

SEQ ID NO: 25321 - RNA, 20 nt, synthetic construct
  source 1..20: mol_type = other RNA
caaattaaaggatgtcaact

SEQ ID NO: 25322 - RNA, 20 nt, synthetic construct
  source 1..20: mol_type = other RNA
caaattaatcagtctgtaag

SEQ ID NO: 25323 - RNA, 20 nt, synthetic construct
  source 1..20: mol_type = other RNA
caaattaccatgtttccata

SEQ ID NO: 25324 - RNA, 20 nt, synthetic construct
  source 1..20: mol_type = other RNA
caaattagccaggcgtggtg

SEQ ID NO: 25325 - RNA, 20 nt, synthetic construct
  source 1..20: mol_type = other RNA
caaattagctttctcccagc

SEQ ID NO: 25326 - RNA, 20 nt, synthetic construct
  source 1..20: mol_type = other RNA
caaattagtcatagcagtgg

SEQ ID NO: 25327 - RNA, 20 nt, synthetic construct
  source 1..20: mol_type = other RNA
caaattatgactgagatact

SEQ ID NO: 25328 - RNA, 20 nt, synthetic construct
  source 1..20: mol_type = other RNA
caaattattgacaagacgtg

SEQ ID NO: 25329 - RNA, 20 nt, synthetic construct
  source 1..20: mol_type = other RNA
caaattatttgagagtaagt

SEQ ID NO: 25330 - RNA, 20 nt, synthetic construct
  source 1..20: mol_type = other RNA
caaattattttcctccttct

SEQ ID NO: 25331 - RNA, 20 nt, synthetic construct
  source 1..20: mol_type = other RNA
caaattcaaagcaagttaaa

SEQ ID NO: 25332 - RNA, 20 nt, synthetic construct
  source 1..20: mol_type = other RNA
caaattcacagaactgtcac

SEQ ID NO: 25333 - RNA, 20 nt, synthetic construct
  source 1..20: mol_type = other RNA
caaattcacagcatgaatac

SEQ ID NO: 25334 - RNA, 20 nt, synthetic construct
  source 1..20: mol_type = other RNA
caaattcacgagactgttag

SEQ ID NO: 25335 - RNA, 20 nt, synthetic construct
  source 1..20: mol_type = other RNA
caaattcatagatcaccagg

SEQ ID NO: 25336 - RNA, 20 nt, synthetic construct
  source 1..20: mol_type = other RNA
caaattcatgcaactgaaaa

SEQ ID NO: 25337 - RNA, 20 nt, synthetic construct
  source 1..20: mol_type = other RNA
caaattccctctacaaaagg

SEQ ID NO: 25338 - RNA, 20 nt, synthetic construct
  source 1..20: mol_type = other RNA
caaattctgagggaaattat

SEQ ID NO: 25339 - RNA, 20 nt, synthetic construct
  source 1..20: mol_type = other RNA
caaattgcatcaactgcttc

SEQ ID NO: 25340 - RNA, 20 nt, synthetic construct
  source 1..20: mol_type = other RNA
caaattggcatttaaaagaa

SEQ ID NO: 25341 - RNA, 20 nt, synthetic construct
  source 1..20: mol_type = other RNA
caaattgtcagattttcttg

SEQ ID NO: 25342 - RNA, 20 nt, synthetic construct
  source 1..20: mol_type = other RNA
caaattgtgtgttctctttt

SEQ ID NO: 25343 - RNA, 20 nt, synthetic construct
  source 1..20: mol_type = other RNA
caaatttaacacacaacaat

SEQ ID NO: 25344 - RNA, 20 nt, synthetic construct
  source 1..20: mol_type = other RNA
caaatttatgttcatgaacc

SEQ ID NO: 25345 - RNA, 20 nt, synthetic construct
  source 1..20: mol_type = other RNA
caaatttctatagtcattcc

SEQ ID NO: 25346 - RNA, 20 nt, synthetic construct
  source 1..20: mol_type = other RNA
caaatttttcacattcttca

SEQ ID NO: 25347 - RNA, 20 nt, synthetic construct
  source 1..20: mol_type = other RNA
caacaaaacaatctaattcg

SEQ ID NO: 25348 - RNA, 20 nt, synthetic construct
  source 1..20: mol_type = other RNA
caacaaaacacacgggtaca

SEQ ID NO: 25349 - RNA, 20 nt, synthetic construct
  source 1..20: mol_type = other RNA
caacaaaacatgttttcaaa

SEQ ID NO: 25350 - RNA, 20 nt, synthetic construct
  source 1..20: mol_type = other RNA
caacaaaactgggggctgga

SEQ ID NO: 25351 - RNA, 20 nt, synthetic construct
  source 1..20: mol_type = other RNA
caacaaaatacccacaagaa

SEQ ID NO: 25352 - RNA, 20 nt, synthetic construct
  source 1..20: mol_type = other RNA
caacaaacaattagcacctt

SEQ ID NO: 25353 - RNA, 20 nt, synthetic construct
  source 1..20: mol_type = other RNA
caacaaactaactagaaaac

SEQ ID NO: 25354 - RNA, 20 nt, synthetic construct
  source 1..20: mol_type = other RNA
caacaaaggcgaagcccgcc

SEQ ID NO: 25355 - RNA, 20 nt, synthetic construct
  source 1..20: mol_type = other RNA
caacaaaggttgaaaactca

SEQ ID NO: 25356 - RNA, 20 nt, synthetic construct
  source 1..20: mol_type = other RNA
caacaaatgttgcagagact

SEQ ID NO: 25357 - RNA, 20 nt, synthetic construct
  source 1..20: mol_type = other RNA
caacaacaaaacacacgggt

SEQ ID NO: 25358 - RNA, 20 nt, synthetic construct
  source 1..20: mol_type = other RNA
caacaacaaaacatgttttc

SEQ ID NO: 25359 - RNA, 20 nt, synthetic construct
  source 1..20: mol_type = other RNA
caacaacaaaatacccacaa

SEQ ID NO: 25360 - RNA, 20 nt, synthetic construct
  source 1..20: mol_type = other RNA
caacaacaacaaaacacacg

SEQ ID NO: 25361 - RNA, 20 nt, synthetic construct
  source 1..20: mol_type = other RNA
caacaacaacaaaacatgtt

SEQ ID NO: 25362 - RNA, 20 nt, synthetic construct
  source 1..20: mol_type = other RNA
caacaacaacaaaataccca

SEQ ID NO: 25363 - RNA, 20 nt, synthetic construct
  source 1..20: mol_type = other RNA
caacaacaacaacaaaacac

SEQ ID NO: 25364 - RNA, 20 nt, synthetic construct
  source 1..20: mol_type = other RNA
caacaacaacaacaaaacat

SEQ ID NO: 25365 - RNA, 20 nt, synthetic construct
  source 1..20: mol_type = other RNA
caacaaccataatgagtaac

SEQ ID NO: 25366 - RNA, 20 nt, synthetic construct
  source 1..20: mol_type = other RNA
caacaagagaggacagttgg

SEQ ID NO: 25367 - RNA, 20 nt, synthetic construct
  source 1..20: mol_type = other RNA
caacaagggttggtgcttcc

SEQ ID NO: 25368 - RNA, 20 nt, synthetic construct
  source 1..20: mol_type = other RNA
caacaatagcaacaaaacaa

SEQ ID NO: 25369 - RNA, 20 nt, synthetic construct
  source 1..20: mol_type = other RNA
caacaatcaacaggtagctg

SEQ ID NO: 25370 - RNA, 20 nt, synthetic construct
  source 1..20: mol_type = other RNA
caacaatgaattctcatatt

SEQ ID NO: 25371 - RNA, 20 nt, synthetic construct
  source 1..20: mol_type = other RNA
caacaattcaacaatagcaa

SEQ ID NO: 25372 - RNA, 20 nt, synthetic construct
  source 1..20: mol_type = other RNA
caacaattcaacagctacta

SEQ ID NO: 25373 - RNA, 20 nt, synthetic construct
  source 1..20: mol_type = other RNA
caacacaaagccttctctac

SEQ ID NO: 25374 - RNA, 20 nt, synthetic construct
  source 1..20: mol_type = other RNA
caacacactagccactgggt

SEQ ID NO: 25375 - RNA, 20 nt, synthetic construct
  source 1..20: mol_type = other RNA
caacacatagtgttaattat

SEQ ID NO: 25376 - RNA, 20 nt, synthetic construct
  source 1..20: mol_type = other RNA
caacacatcagcgctaagtg

SEQ ID NO: 25377 - RNA, 20 nt, synthetic construct
  source 1..20: mol_type = other RNA
caacacatgcacactagacc

SEQ ID NO: 25378 - RNA, 20 nt, synthetic construct
  source 1..20: mol_type = other RNA
caacacatggggcattaatt

SEQ ID NO: 25379 - RNA, 20 nt, synthetic construct
  source 1..20: mol_type = other RNA
caacacattaataagatcat

SEQ ID NO: 25380 - RNA, 20 nt, synthetic construct
  source 1..20: mol_type = other RNA
caacacattcaaaattgttc

SEQ ID NO: 25381 - RNA, 20 nt, synthetic construct
  source 1..20: mol_type = other RNA
caacaccaagcaacactaaa

SEQ ID NO: 25382 - RNA, 20 nt, synthetic construct
  source 1..20: mol_type = other RNA
caacaccagatactcatgct

SEQ ID NO: 25383 - RNA, 20 nt, synthetic construct
  source 1..20: mol_type = other RNA
caacacctgcagtggcgtgt

SEQ ID NO: 25384 - RNA, 20 nt, synthetic construct
  source 1..20: mol_type = other RNA
caacaccttgggaggctgag

SEQ ID NO: 25385 - RNA, 20 nt, synthetic construct
  source 1..20: mol_type = other RNA
caacactaaagatttgccaa

SEQ ID NO: 25386 - RNA, 20 nt, synthetic construct
  source 1..20: mol_type = other RNA
caacactaaccaacattgag

SEQ ID NO: 25387 - RNA, 20 nt, synthetic construct
  source 1..20: mol_type = other RNA
caacactcagatatcaatct

SEQ ID NO: 25388 - RNA, 20 nt, synthetic construct
  source 1..20: mol_type = other RNA
caacactgtgttcttttcct

SEQ ID NO: 25389 - RNA, 20 nt, synthetic construct
  source 1..20: mol_type = other RNA
caacacttcagtggtaagga

SEQ ID NO: 25390 - RNA, 20 nt, synthetic construct
  source 1..20: mol_type = other RNA
caacacttttccagtcttct

SEQ ID NO: 25391 - RNA, 20 nt, synthetic construct
  source 1..20: mol_type = other RNA
caacagaaatttattgtttc

SEQ ID NO: 25392 - RNA, 20 nt, synthetic construct
  source 1..20: mol_type = other RNA
caacagaagaagtttctagt

SEQ ID NO: 25393 - RNA, 20 nt, synthetic construct
  source 1..20: mol_type = other RNA
caacagaataaatgaaaaca

SEQ ID NO: 25394 - RNA, 20 nt, synthetic construct
  source 1..20: mol_type = other RNA
caacagagacagagaatctg

SEQ ID NO: 25395 - RNA, 20 nt, synthetic construct
  source 1..20: mol_type = other RNA
caacagatcctcacatcagt

SEQ ID NO: 25396 - RNA, 20 nt, synthetic construct
  source 1..20: mol_type = other RNA
caacagatctgagaagacta

SEQ ID NO: 25397 - RNA, 20 nt, synthetic construct
  source 1..20: mol_type = other RNA
caacagcaaggctcctgcag

SEQ ID NO: 25398 - RNA, 20 nt, synthetic construct
  source 1..20: mol_type = other RNA
caacagcaccttttttggta

SEQ ID NO: 25399 - RNA, 20 nt, synthetic construct
  source 1..20: mol_type = other RNA
caacagcacttttgtactac

SEQ ID NO: 25400 - RNA, 20 nt, synthetic construct
  source 1..20: mol_type = other RNA
caacagcagaacaaactgcg

SEQ ID NO: 25401 - RNA, 20 nt, synthetic construct
  source 1..20: mol_type = other RNA
caacagctactatgaatata

SEQ ID NO: 25402 - RNA, 20 nt, synthetic construct
  source 1..20: mol_type = other RNA
caacaggaagaggcagctaa

SEQ ID NO: 25403 - RNA, 20 nt, synthetic construct
  source 1..20: mol_type = other RNA
caacaggcctgagccgtcgg

SEQ ID NO: 25404 - RNA, 20 nt, synthetic construct
  source 1..20: mol_type = other RNA
caacaggctgagtgcggtgg

SEQ ID NO: 25405 - RNA, 20 nt, synthetic construct
  source 1..20: mol_type = other RNA
caacagggccactgagagct

SEQ ID NO: 25406 - RNA, 20 nt, synthetic construct
  source 1..20: mol_type = other RNA
caacagggtaagattccgtc

SEQ ID NO: 25407 - RNA, 20 nt, synthetic construct
  source 1..20: mol_type = other RNA
caacagggttttgttttgtt

SEQ ID NO: 25408 - RNA, 20 nt, synthetic construct
  source 1..20: mol_type = other RNA
caacaggtagctgcttttta

SEQ ID NO: 25409 - RNA, 20 nt, synthetic construct
  source 1..20: mol_type = other RNA
caacaggtataaagtttccg

SEQ ID NO: 25410 - RNA, 20 nt, synthetic construct
  source 1..20: mol_type = other RNA
caacagtcattcaggtctat

SEQ ID NO: 25411 - RNA, 20 nt, synthetic construct
  source 1..20: mol_type = other RNA
caacagtgtactagtctcca

SEQ ID NO: 25412 - RNA, 20 nt, synthetic construct
  source 1..20: mol_type = other RNA
caacagtgtgagaccgtgtc

SEQ ID NO: 25413 - RNA, 20 nt, synthetic construct
  source 1..20: mol_type = other RNA
caacagttactttccttttt

SEQ ID NO: 25414 - RNA, 20 nt, synthetic construct
  source 1..20: mol_type = other RNA
caacagtttacacgccttcg

SEQ ID NO: 25415 - RNA, 20 nt, synthetic construct
  source 1..20: mol_type = other RNA
caacataaatagggtgctac

SEQ ID NO: 25416 - RNA, 20 nt, synthetic construct
  source 1..20: mol_type = other RNA
caacataccaaaacccttgg

SEQ ID NO: 25417 - RNA, 20 nt, synthetic construct
  source 1..20: mol_type = other RNA
caacatataaatcaatctgt

SEQ ID NO: 25418 - RNA, 20 nt, synthetic construct
  source 1..20: mol_type = other RNA
caacatcactagctattaga

SEQ ID NO: 25419 - RNA, 20 nt, synthetic construct
  source 1..20: mol_type = other RNA
caacatccacagctttcttt

SEQ ID NO: 25420 - RNA, 20 nt, synthetic construct
  source 1..20: mol_type = other RNA
caacatccctatgcaataac

SEQ ID NO: 25421 - RNA, 20 nt, synthetic construct
  source 1..20: mol_type = other RNA
caacatcgtaaaacctcatc

SEQ ID NO: 25422 - RNA, 20 nt, synthetic construct
  source 1..20: mol_type = other RNA
caacatctgcctcccgggtc

SEQ ID NO: 25423 - RNA, 20 nt, synthetic construct
  source 1..20: mol_type = other RNA
caacatgaaaagatactcaa

SEQ ID NO: 25424 - RNA, 20 nt, synthetic construct
  source 1..20: mol_type = other RNA
caacatgagagaaaattgtt

SEQ ID NO: 25425 - RNA, 20 nt, synthetic construct
  source 1..20: mol_type = other RNA
caacatgccagctttggctg

SEQ ID NO: 25426 - RNA, 20 nt, synthetic construct
  source 1..20: mol_type = other RNA
caacatgctaagtgtttagg

SEQ ID NO: 25427 - RNA, 20 nt, synthetic construct
  source 1..20: mol_type = other RNA
caacatgctcttaagtattt

SEQ ID NO: 25428 - RNA, 20 nt, synthetic construct
  source 1..20: mol_type = other RNA
caacatggcacatgtctacc

SEQ ID NO: 25429 - RNA, 20 nt, synthetic construct
  source 1..20: mol_type = other RNA
caacatggtagaccatataa

SEQ ID NO: 25430 - RNA, 20 nt, synthetic construct
  source 1..20: mol_type = other RNA
caacatgtgtatttagggag

SEQ ID NO: 25431 - RNA, 20 nt, synthetic construct
  source 1..20: mol_type = other RNA
caacatgttttatttctgta

SEQ ID NO: 25432 - RNA, 20 nt, synthetic construct
  source 1..20: mol_type = other RNA
caacattaagggaaacaggg

SEQ ID NO: 25433 - RNA, 20 nt, synthetic construct
  source 1..20: mol_type = other RNA
caacattcatccctctaaat

SEQ ID NO: 25434 - RNA, 20 nt, synthetic construct
  source 1..20: mol_type = other RNA
caacattcattcatgacaag

SEQ ID NO: 25435 - RNA, 20 nt, synthetic construct
  source 1..20: mol_type = other RNA
caacattgagtttcaatgac

SEQ ID NO: 25436 - RNA, 20 nt, synthetic construct
  source 1..20: mol_type = other RNA
caacattgcctccatatggg

SEQ ID NO: 25437 - RNA, 20 nt, synthetic construct
  source 1..20: mol_type = other RNA
caacattgtgcaaccatccc

SEQ ID NO: 25438 - RNA, 20 nt, synthetic construct
  source 1..20: mol_type = other RNA
caacatttgttgcatcccca

SEQ ID NO: 25439 - RNA, 20 nt, synthetic construct
  source 1..20: mol_type = other RNA
caaccaagcccaactttttc

SEQ ID NO: 25440 - RNA, 20 nt, synthetic construct
  source 1..20: mol_type = other RNA
caaccaatcgcagggccatt

SEQ ID NO: 25441 - RNA, 20 nt, synthetic construct
  source 1..20: mol_type = other RNA
caaccactaaggtcaacaca

SEQ ID NO: 25442 - RNA, 20 nt, synthetic construct
  source 1..20: mol_type = other RNA
caaccactgaatcagatttt

SEQ ID NO: 25443 - RNA, 20 nt, synthetic construct
  source 1..20: mol_type = other RNA
caaccactgatggaattctg

SEQ ID NO: 25444 - RNA, 20 nt, synthetic construct
  source 1..20: mol_type = other RNA
caaccactggggagtgtgcc

SEQ ID NO: 25445 - RNA, 20 nt, synthetic construct
  source 1..20: mol_type = other RNA
caaccataatgagtaacatg

SEQ ID NO: 25446 - RNA, 20 nt, synthetic construct
  source 1..20: mol_type = other RNA
caaccatacttttcaactga

SEQ ID NO: 25447 - RNA, 20 nt, synthetic construct
  source 1..20: mol_type = other RNA
caaccatccccgctgtccat

SEQ ID NO: 25448 - RNA, 20 nt, synthetic construct
  source 1..20: mol_type = other RNA
caaccatcttcttagtgttc

SEQ ID NO: 25449 - RNA, 20 nt, synthetic construct
  source 1..20: mol_type = other RNA
caaccattactcttctactc

SEQ ID NO: 25450 - RNA, 20 nt, synthetic construct
  source 1..20: mol_type = other RNA
caacccatgaaaattgaatt

SEQ ID NO: 25451 - RNA, 20 nt, synthetic construct
  source 1..20: mol_type = other RNA
caacccattccaggttttat

SEQ ID NO: 25452 - RNA, 20 nt, synthetic construct
  source 1..20: mol_type = other RNA
caacccccggccctgccgct

SEQ ID NO: 25453 - RNA, 20 nt, synthetic construct
  source 1..20: mol_type = other RNA
caaccctacctagggtgtaa

SEQ ID NO: 25454 - RNA, 20 nt, synthetic construct
  source 1..20: mol_type = other RNA
caaccctcggcctctactga

SEQ ID NO: 25455 - RNA, 20 nt, synthetic construct
  source 1..20: mol_type = other RNA
caacccttgttggacagctg

SEQ ID NO: 25456 - RNA, 20 nt, synthetic construct
  source 1..20: mol_type = other RNA
caaccggaaaatgcttaaca

SEQ ID NO: 25457 - RNA, 20 nt, synthetic construct
  source 1..20: mol_type = other RNA
caacctaaatgtccatcgag

SEQ ID NO: 25458 - RNA, 20 nt, synthetic construct
  source 1..20: mol_type = other RNA
caacctaacatgtcttggtg

SEQ ID NO: 25459 - RNA, 20 nt, synthetic construct
  source 1..20: mol_type = other RNA
caacctaatgaaatttaaca

SEQ ID NO: 25460 - RNA, 20 nt, synthetic construct
  source 1..20: mol_type = other RNA
caacctactttaaatcaggg

SEQ ID NO: 25461 - RNA, 20 nt, synthetic construct
  source 1..20: mol_type = other RNA
caacctataagacccagtgg

SEQ ID NO: 25462 - RNA, 20 nt, synthetic construct
  source 1..20: mol_type = other RNA
caacctcaactttaggttac

SEQ ID NO: 25463 - RNA, 20 nt, synthetic construct
  source 1..20: mol_type = other RNA
caacctcatttgcagagcaa

SEQ ID NO: 25464 - RNA, 20 nt, synthetic construct
  source 1..20: mol_type = other RNA
caacctccgtttttcaggtt

SEQ ID NO: 25465 - RNA, 20 nt, synthetic construct
  source 1..20: mol_type = other RNA
caacctgattagaggctgca

SEQ ID NO: 25466 - RNA, 20 nt, synthetic construct
  source 1..20: mol_type = other RNA
caacctgcaggtatttctaa

SEQ ID NO: 25467 - RNA, 20 nt, synthetic construct
  source 1..20: mol_type = other RNA
caacctgctttcctcatgtc

SEQ ID NO: 25468 - RNA, 20 nt, synthetic construct
  source 1..20: mol_type = other RNA
caacctgtctcaaaaataaa

SEQ ID NO: 25469 - RNA, 20 nt, synthetic construct
  source 1..20: mol_type = other RNA
caaccttatctatttaaaac

SEQ ID NO: 25470 - RNA, 20 nt, synthetic construct
  source 1..20: mol_type = other RNA
caaccttgggagaaaatttt

SEQ ID NO: 25471 - RNA, 20 nt, synthetic construct
  source 1..20: mol_type = other RNA
caacctttgttgaaaacgag

SEQ ID NO: 25472 - RNA, 20 nt, synthetic construct
  source 1..20: mol_type = other RNA
caaccttttaggtgccccac

SEQ ID NO: 25473 - RNA, 20 nt, synthetic construct
  source 1..20: mol_type = other RNA
caacgacaatctctggggtt

SEQ ID NO: 25474 - RNA, 20 nt, synthetic construct
  source 1..20: mol_type = other RNA
caacgaccggacgtggtggc

SEQ ID NO: 25475 - RNA, 20 nt, synthetic construct
  source 1..20: mol_type = other RNA
caacgatttcttaaaaatga

SEQ ID NO: 25476 - RNA, 20 nt, synthetic construct
  source 1..20: mol_type = other RNA
caacgcacccagagcgggtt

SEQ ID NO: 25477 - RNA, 20 nt, synthetic construct
  source 1..20: mol_type = other RNA
caacgcctgtgatcccagct

SEQ ID NO: 25478 - RNA, 20 nt, synthetic construct
  source 1..20: mol_type = other RNA
caacgctgtggctaacaatc

SEQ ID NO: 25479 - RNA, 20 nt, synthetic construct
  source 1..20: mol_type = other RNA
caacgctttttatggaaaca

SEQ ID NO: 25480 - RNA, 20 nt, synthetic construct
  source 1..20: mol_type = other RNA
caacggaaatgagtgagcca

SEQ ID NO: 25481 - RNA, 20 nt, synthetic construct
  source 1..20: mol_type = other RNA
caacggacatttttccaaag

SEQ ID NO: 25482 - RNA, 20 nt, synthetic construct
  source 1..20: mol_type = other RNA
caactaataattgcttttgc

SEQ ID NO: 25483 - RNA, 20 nt, synthetic construct
  source 1..20: mol_type = other RNA
caactaatcaaacatacccc

SEQ ID NO: 25484 - RNA, 20 nt, synthetic construct
  source 1..20: mol_type = other RNA
caactactatttcgcaaagc

SEQ ID NO: 25485 - RNA, 20 nt, synthetic construct
  source 1..20: mol_type = other RNA
caactagagaaagcatcaga

SEQ ID NO: 25486 - RNA, 20 nt, synthetic construct
  source 1..20: mol_type = other RNA
caactagtaagtaaaatcgg

SEQ ID NO: 25487 - RNA, 20 nt, synthetic construct
  source 1..20: mol_type = other RNA
caactatcaaaacacttctg

SEQ ID NO: 25488 - RNA, 20 nt, synthetic construct
  source 1..20: mol_type = other RNA
caactattccataagatctg

SEQ ID NO: 25489 - RNA, 20 nt, synthetic construct
  source 1..20: mol_type = other RNA
caactcaaaaaagaaaaaca

SEQ ID NO: 25490 - RNA, 20 nt, synthetic construct
  source 1..20: mol_type = other RNA
caactcaaacgtccatcaac

SEQ ID NO: 25491 - RNA, 20 nt, synthetic construct
  source 1..20: mol_type = other RNA
caactccacattgtcttaat

SEQ ID NO: 25492 - RNA, 20 nt, synthetic construct
  source 1..20: mol_type = other RNA
caactcctgggctcatctaa

SEQ ID NO: 25493 - RNA, 20 nt, synthetic construct
  source 1..20: mol_type = other RNA
caactctaataacagcctaa

SEQ ID NO: 25494 - RNA, 20 nt, synthetic construct
  source 1..20: mol_type = other RNA
caactctgaccattgtgtgg

SEQ ID NO: 25495 - RNA, 20 nt, synthetic construct
  source 1..20: mol_type = other RNA
caactctggcaggtcaccta

SEQ ID NO: 25496 - RNA, 20 nt, synthetic construct
  source 1..20: mol_type = other RNA
caactcttggccattttctt

SEQ ID NO: 25497 - RNA, 20 nt, synthetic construct
  source 1..20: mol_type = other RNA
caactctttctttgattttt

SEQ ID NO: 25498 - RNA, 20 nt, synthetic construct
  source 1..20: mol_type = other RNA
caactgaaaacatctttttt

SEQ ID NO: 25499 - RNA, 20 nt, synthetic construct
  source 1..20: mol_type = other RNA
caactgaacaacgctgtggc

SEQ ID NO: 25500 - RNA, 20 nt, synthetic construct
  source 1..20: mol_type = other RNA
caactgaagcggggctgcca

SEQ ID NO: 25501 - RNA, 20 nt, synthetic construct
  source 1..20: mol_type = other RNA
caactgactctaaagtctat

SEQ ID NO: 25502 - RNA, 20 nt, synthetic construct
  source 1..20: mol_type = other RNA
caactgagaagagctgtaac

SEQ ID NO: 25503 - RNA, 20 nt, synthetic construct
  source 1..20: mol_type = other RNA
caactgaggcagagtagaga

SEQ ID NO: 25504 - RNA, 20 nt, synthetic construct
  source 1..20: mol_type = other RNA
caactgcaaaactttcttca

SEQ ID NO: 25505 - RNA, 20 nt, synthetic construct
  source 1..20: mol_type = other RNA
caactgcagtctgtcctcgt

SEQ ID NO: 25506 - RNA, 20 nt, synthetic construct
  source 1..20: mol_type = other RNA
caactgcatcttcttttact

SEQ ID NO: 25507 - RNA, 20 nt, synthetic construct
  source 1..20: mol_type = other RNA
caactgcctctacatcacag

SEQ ID NO: 25508 - RNA, 20 nt, synthetic construct
  source 1..20: mol_type = other RNA
caactgctcataatagtctc

SEQ ID NO: 25509 - RNA, 20 nt, synthetic construct
  source 1..20: mol_type = other RNA
caactgcttccctagcccag

SEQ ID NO: 25510 - RNA, 20 nt, synthetic construct
  source 1..20: mol_type = other RNA
caactggcccctccatggaa

SEQ ID NO: 25511 - RNA, 20 nt, synthetic construct
  source 1..20: mol_type = other RNA
caactgggagaatggcaagg

SEQ ID NO: 25512 - RNA, 20 nt, synthetic construct
  source 1..20: mol_type = other RNA
caactggtttctgcatactt

SEQ ID NO: 25513 - RNA, 20 nt, synthetic construct
  source 1..20: mol_type = other RNA
caactgtataaatgttcagt

SEQ ID NO: 25514 - RNA, 20 nt, synthetic construct
  source 1..20: mol_type = other RNA
caactgtcctctcttgttga

SEQ ID NO: 25515 - RNA, 20 nt, synthetic construct
  source 1..20: mol_type = other RNA
caactgttttttcctccctt

SEQ ID NO: 25516 - RNA, 20 nt, synthetic construct
  source 1..20: mol_type = other RNA
caacttactctcaaataatt

SEQ ID NO: 25517 - RNA, 20 nt, synthetic construct
  source 1..20: mol_type = other RNA
caacttagccttggtaaaat

SEQ ID NO: 25518 - RNA, 20 nt, synthetic construct
  source 1..20: mol_type = other RNA
caacttcacaccatttagat

SEQ ID NO: 25519 - RNA, 20 nt, synthetic construct
  source 1..20: mol_type = other RNA
caacttccagcaagacttta

SEQ ID NO: 25520 - RNA, 20 nt, synthetic construct
  source 1..20: mol_type = other RNA
caacttcctgttttagtggc

SEQ ID NO: 25521 - RNA, 20 nt, synthetic construct
  source 1..20: mol_type = other RNA
caacttgaaggcaatgtagg

SEQ ID NO: 25522 - RNA, 20 nt, synthetic construct
  source 1..20: mol_type = other RNA
caacttgatcagggatttgg

SEQ ID NO: 25523 - RNA, 20 nt, synthetic construct
  source 1..20: mol_type = other RNA
caacttgcagaagagtgaag

SEQ ID NO: 25524 - RNA, 20 nt, synthetic construct
  source 1..20: mol_type = other RNA
caacttggtaaaaagtgctt

SEQ ID NO: 25525 - RNA, 20 nt, synthetic construct
  source 1..20: mol_type = other RNA
caacttgtatgaaattagtt

SEQ ID NO: 25526 - RNA, 20 nt, synthetic construct
  source 1..20: mol_type = other RNA
caactttaggttacgtacta

SEQ ID NO: 25527 - RNA, 20 nt, synthetic construct
  source 1..20: mol_type = other RNA
caacttttagtaggtctcct

SEQ ID NO: 25528 - RNA, 20 nt, synthetic construct
  source 1..20: mol_type = other RNA
caagaaaaacctaaacctgt

SEQ ID NO: 25529 - RNA, 20 nt, synthetic construct
  source 1..20: mol_type = other RNA
caagaaaaagcagagaaact

SEQ ID NO: 25530 - RNA, 20 nt, synthetic construct
  source 1..20: mol_type = other RNA
caagaaaatctgacaatttg

SEQ ID NO: 25531 - RNA, 20 nt, synthetic construct
  source 1..20: mol_type = other RNA
caagaaaccacagagcctaa

SEQ ID NO: 25532 - RNA, 20 nt, synthetic construct
  source 1..20: mol_type = other RNA
caagaaagcaggtcatgact

SEQ ID NO: 25533 - RNA, 20 nt, synthetic construct
  source 1..20: mol_type = other RNA
caagaaaggacttcagtcct

SEQ ID NO: 25534 - RNA, 20 nt, synthetic construct
  source 1..20: mol_type = other RNA
caagaaagggtagctttgat

SEQ ID NO: 25535 - RNA, 20 nt, synthetic construct
  source 1..20: mol_type = other RNA
caagaaataaaacatggcca

SEQ ID NO: 25536 - RNA, 20 nt, synthetic construct
  source 1..20: mol_type = other RNA
caagaacaaccttatctatt

SEQ ID NO: 25537 - RNA, 20 nt, synthetic construct
  source 1..20: mol_type = other RNA
caagaaccctttgttatctg

SEQ ID NO: 25538 - RNA, 20 nt, synthetic construct
  source 1..20: mol_type = other RNA
caagaagaaaaagcaacttg

SEQ ID NO: 25539 - RNA, 20 nt, synthetic construct
  source 1..20: mol_type = other RNA
caagaagacatgataaatac

SEQ ID NO: 25540 - RNA, 20 nt, synthetic construct
  source 1..20: mol_type = other RNA
caagaagctgttttggtaaa

SEQ ID NO: 25541 - RNA, 20 nt, synthetic construct
  source 1..20: mol_type = other RNA
caagaaggctagcacagagg

SEQ ID NO: 25542 - RNA, 20 nt, synthetic construct
  source 1..20: mol_type = other RNA
caagaaggtatcatcggaaa

SEQ ID NO: 25543 - RNA, 20 nt, synthetic construct
  source 1..20: mol_type = other RNA
caagaatcctgctattttat

SEQ ID NO: 25544 - RNA, 20 nt, synthetic construct
  source 1..20: mol_type = other RNA
caagaatctttggcaaactt

SEQ ID NO: 25545 - RNA, 20 nt, synthetic construct
  source 1..20: mol_type = other RNA
caagaatgaagtcagagatt

SEQ ID NO: 25546 - RNA, 20 nt, synthetic construct
  source 1..20: mol_type = other RNA
caagaatggtttaacacata

SEQ ID NO: 25547 - RNA, 20 nt, synthetic construct
  source 1..20: mol_type = other RNA
caagaatttcatgcctttca

SEQ ID NO: 25548 - RNA, 20 nt, synthetic construct
  source 1..20: mol_type = other RNA
caagaattttccattcatgt

SEQ ID NO: 25549 - RNA, 20 nt, synthetic construct
  source 1..20: mol_type = other RNA
caagacaagcaaggaagggc

SEQ ID NO: 25550 - RNA, 20 nt, synthetic construct
  source 1..20: mol_type = other RNA
caagacagagctccctctcc

SEQ ID NO: 25551 - RNA, 20 nt, synthetic construct
  source 1..20: mol_type = other RNA
caagacagatgtgcttaatc

SEQ ID NO: 25552 - RNA, 20 nt, synthetic construct
  source 1..20: mol_type = other RNA
caagacaggaagaattattg

SEQ ID NO: 25553 - RNA, 20 nt, synthetic construct
  source 1..20: mol_type = other RNA
caagacataagcattttcta

SEQ ID NO: 25554 - RNA, 20 nt, synthetic construct
  source 1..20: mol_type = other RNA
caagacatgttaggttgaaa

SEQ ID NO: 25555 - RNA, 20 nt, synthetic construct
  source 1..20: mol_type = other RNA
caagaccctgtctctaaaaa

SEQ ID NO: 25556 - RNA, 20 nt, synthetic construct
  source 1..20: mol_type = other RNA
caagacgtgtacataaaata

SEQ ID NO: 25557 - RNA, 20 nt, synthetic construct
  source 1..20: mol_type = other RNA
caagactaaaaaattagaca

SEQ ID NO: 25558 - RNA, 20 nt, synthetic construct
  source 1..20: mol_type = other RNA
caagactacctaaaacaatc

SEQ ID NO: 25559 - RNA, 20 nt, synthetic construct
  source 1..20: mol_type = other RNA
caagactcaaatctcaaaaa

SEQ ID NO: 25560 - RNA, 20 nt, synthetic construct
  source 1..20: mol_type = other RNA
caagactcaacatgtgtatt

SEQ ID NO: 25561 - RNA, 20 nt, synthetic construct
  source 1..20: mol_type = other RNA
caagactttatgtggaaaaa

SEQ ID NO: 25562 - RNA, 20 nt, synthetic construct
  source 1..20: mol_type = other RNA
caagagagattaaataactt

SEQ ID NO: 25563 - RNA, 20 nt, synthetic construct
  source 1..20: mol_type = other RNA
caagagagcaagactcaaat

SEQ ID NO: 25564 - RNA, 20 nt, synthetic construct
  source 1..20: mol_type = other RNA
caagagagcaagtccccatc

SEQ ID NO: 25565 - RNA, 20 nt, synthetic construct
  source 1..20: mol_type = other RNA
caagagaggaataaatggta

SEQ ID NO: 25566 - RNA, 20 nt, synthetic construct
  source 1..20: mol_type = other RNA
caagagaggacagttggcct

SEQ ID NO: 25567 - RNA, 20 nt, synthetic construct
  source 1..20: mol_type = other RNA
caagagcagaactccacctc

SEQ ID NO: 25568 - RNA, 20 nt, synthetic construct
  source 1..20: mol_type = other RNA
caagagcatagactttagag

SEQ ID NO: 25569 - RNA, 20 nt, synthetic construct
  source 1..20: mol_type = other RNA
caagagcgaggcctggaaca

SEQ ID NO: 25570 - RNA, 20 nt, synthetic construct
  source 1..20: mol_type = other RNA
caagagcggcctttgcctct

SEQ ID NO: 25571 - RNA, 20 nt, synthetic construct
  source 1..20: mol_type = other RNA
caagagcgtcgtacctttcg

SEQ ID NO: 25572 - RNA, 20 nt, synthetic construct
  source 1..20: mol_type = other RNA
caagaggttaaaaccacaaa

SEQ ID NO: 25573 - RNA, 20 nt, synthetic construct
  source 1..20: mol_type = other RNA
caagagtctgcagaccaaga

SEQ ID NO: 25574 - RNA, 20 nt, synthetic construct
  source 1..20: mol_type = other RNA
caagagtgtggctttaaggc

SEQ ID NO: 25575 - RNA, 20 nt, synthetic construct
  source 1..20: mol_type = other RNA
caagagttaaaactcacaaa

SEQ ID NO: 25576 - RNA, 20 nt, synthetic construct
  source 1..20: mol_type = other RNA
caagagttacttctggaaag

SEQ ID NO: 25577 - RNA, 20 nt, synthetic construct
  source 1..20: mol_type = other RNA
caagagttccaactgtataa

SEQ ID NO: 25578 - RNA, 20 nt, synthetic construct
  source 1..20: mol_type = other RNA
caagagttcccctatactgt

SEQ ID NO: 25579 - RNA, 20 nt, synthetic construct
  source 1..20: mol_type = other RNA
caagagttgctgacttcctg

SEQ ID NO: 25580 - RNA, 20 nt, synthetic construct
  source 1..20: mol_type = other RNA
caagatactgcactaaacta

SEQ ID NO: 25581 - RNA, 20 nt, synthetic construct
  source 1..20: mol_type = other RNA
caagatcataagcttttatt

SEQ ID NO: 25582 - RNA, 20 nt, synthetic construct
  source 1..20: mol_type = other RNA
caagatctctatgcagaaat

SEQ ID NO: 25583 - RNA, 20 nt, synthetic construct
  source 1..20: mol_type = other RNA
caagatctgtttttcaaaat

SEQ ID NO: 25584 - RNA, 20 nt, synthetic construct
  source 1..20: mol_type = other RNA
caagatgaatctgcaactat

SEQ ID NO: 25585 - RNA, 20 nt, synthetic construct
  source 1..20: mol_type = other RNA
caagatgcataagttctaga

SEQ ID NO: 25586 - RNA, 20 nt, synthetic construct
  source 1..20: mol_type = other RNA
caagatgcataccaagcccg

SEQ ID NO: 25587 - RNA, 20 nt, synthetic construct
  source 1..20: mol_type = other RNA
caagatggcaagtttccatt

SEQ ID NO: 25588 - RNA, 20 nt, synthetic construct
  source 1..20: mol_type = other RNA
caagatgtcaacattaaggg

SEQ ID NO: 25589 - RNA, 20 nt, synthetic construct
  source 1..20: mol_type = other RNA
caagattaatcttgcaaaac

SEQ ID NO: 25590 - RNA, 20 nt, synthetic construct
  source 1..20: mol_type = other RNA
caagattaatcttgtgaatt

SEQ ID NO: 25591 - RNA, 20 nt, synthetic construct
  source 1..20: mol_type = other RNA
caagattactggatacaagg

SEQ ID NO: 25592 - RNA, 20 nt, synthetic construct
  source 1..20: mol_type = other RNA
caagattgaaaatggtttag

SEQ ID NO: 25593 - RNA, 20 nt, synthetic construct
  source 1..20: mol_type = other RNA
caagattgtgtgatttcata

SEQ ID NO: 25594 - RNA, 20 nt, synthetic construct
  source 1..20: mol_type = other RNA
caagattgtttaattctgtt

SEQ ID NO: 25595 - RNA, 20 nt, synthetic construct
  source 1..20: mol_type = other RNA
caagatttcataggcatctc

SEQ ID NO: 25596 - RNA, 20 nt, synthetic construct
  source 1..20: mol_type = other RNA
caagattttcccaatctctg

SEQ ID NO: 25597 - RNA, 20 nt, synthetic construct
  source 1..20: mol_type = other RNA
caagcaacaccagatactca

SEQ ID NO: 25598 - RNA, 20 nt, synthetic construct
  source 1..20: mol_type = other RNA
caagcaacactaaagatttg

SEQ ID NO: 25599 - RNA, 20 nt, synthetic construct
  source 1..20: mol_type = other RNA
caagcaacttgatcagggat

SEQ ID NO: 25600 - RNA, 20 nt, synthetic construct
  source 1..20: mol_type = other RNA
caagcaaggaagggcttgat

SEQ ID NO: 25601 - RNA, 20 nt, synthetic construct
  source 1..20: mol_type = other RNA
caagcaagtaaaagaagatg

SEQ ID NO: 25602 - RNA, 20 nt, synthetic construct
  source 1..20: mol_type = other RNA
caagcaagtgtggtggtctc

SEQ ID NO: 25603 - RNA, 20 nt, synthetic construct
  source 1..20: mol_type = other RNA
caagcaatctgaaacgacct

SEQ ID NO: 25604 - RNA, 20 nt, synthetic construct
  source 1..20: mol_type = other RNA
caagcacaaacctggcaata

SEQ ID NO: 25605 - RNA, 20 nt, synthetic construct
  source 1..20: mol_type = other RNA
caagcacacagtttgagaag

SEQ ID NO: 25606 - RNA, 20 nt, synthetic construct
  source 1..20: mol_type = other RNA
caagcacactttccttggag

SEQ ID NO: 25607 - RNA, 20 nt, synthetic construct
  source 1..20: mol_type = other RNA
caagcacagagtcagaaaat

SEQ ID NO: 25608 - RNA, 20 nt, synthetic construct
  source 1..20: mol_type = other RNA
caagcacaggcatctctcta

SEQ ID NO: 25609 - RNA, 20 nt, synthetic construct
  source 1..20: mol_type = other RNA
caagcaccacttcgagaagg

SEQ ID NO: 25610 - RNA, 20 nt, synthetic construct
  source 1..20: mol_type = other RNA
caagcacgttagcatcacca

SEQ ID NO: 25611 - RNA, 20 nt, synthetic construct
  source 1..20: mol_type = other RNA
caagcactggtaaggaaaca

SEQ ID NO: 25612 - RNA, 20 nt, synthetic construct
  source 1..20: mol_type = other RNA
caagcagaaatgagttccag

SEQ ID NO: 25613 - RNA, 20 nt, synthetic construct
  source 1..20: mol_type = other RNA
caagcagatctgctgtaagc

SEQ ID NO: 25614 - RNA, 20 nt, synthetic construct
  source 1..20: mol_type = other RNA
caagcagggacgggcggggg

SEQ ID NO: 25615 - RNA, 20 nt, synthetic construct
  source 1..20: mol_type = other RNA
caagcagtaaatatactgac

SEQ ID NO: 25616 - RNA, 20 nt, synthetic construct
  source 1..20: mol_type = other RNA
caagcagtcctgccttggcc

SEQ ID NO: 25617 - RNA, 20 nt, synthetic construct
  source 1..20: mol_type = other RNA
caagcatgagtatctggtgt

SEQ ID NO: 25618 - RNA, 20 nt, synthetic construct
  source 1..20: mol_type = other RNA
caagcatggtggtaggtgtg

SEQ ID NO: 25619 - RNA, 20 nt, synthetic construct
  source 1..20: mol_type = other RNA
caagcattgggagctttcat

SEQ ID NO: 25620 - RNA, 20 nt, synthetic construct
  source 1..20: mol_type = other RNA
caagccaaattaataaaatg

SEQ ID NO: 25621 - RNA, 20 nt, synthetic construct
  source 1..20: mol_type = other RNA
caagccacagcgtggaatgg

SEQ ID NO: 25622 - RNA, 20 nt, synthetic construct
  source 1..20: mol_type = other RNA
caagccacatgtggttattg

SEQ ID NO: 25623 - RNA, 20 nt, synthetic construct
  source 1..20: mol_type = other RNA
caagccacattagccactct

SEQ ID NO: 25624 - RNA, 20 nt, synthetic construct
  source 1..20: mol_type = other RNA
caagccagggtctgtctcac

SEQ ID NO: 25625 - RNA, 20 nt, synthetic construct
  source 1..20: mol_type = other RNA
caagccatcctccagcctta

SEQ ID NO: 25626 - RNA, 20 nt, synthetic construct
  source 1..20: mol_type = other RNA
caagcccaactttttctttt

SEQ ID NO: 25627 - RNA, 20 nt, synthetic construct
  source 1..20: mol_type = other RNA
caagccccagttctgcgcaa

SEQ ID NO: 25628 - RNA, 20 nt, synthetic construct
  source 1..20: mol_type = other RNA
caagcccggcacggtggctc

SEQ ID NO: 25629 - RNA, 20 nt, synthetic construct
  source 1..20: mol_type = other RNA
caagccctgccttaaaacat

SEQ ID NO: 25630 - RNA, 20 nt, synthetic construct
  source 1..20: mol_type = other RNA
caagcccttccttgcttgtc

SEQ ID NO: 25631 - RNA, 20 nt, synthetic construct
  source 1..20: mol_type = other RNA
caagccgcaaataatcattc

SEQ ID NO: 25632 - RNA, 20 nt, synthetic construct
  source 1..20: mol_type = other RNA
caagcctgataagctcccag

SEQ ID NO: 25633 - RNA, 20 nt, synthetic construct
  source 1..20: mol_type = other RNA
caagccttaaaagtgctgca

SEQ ID NO: 25634 - RNA, 20 nt, synthetic construct
  source 1..20: mol_type = other RNA
caagccttgaaaatatacta

SEQ ID NO: 25635 - RNA, 20 nt, synthetic construct
  source 1..20: mol_type = other RNA
caagccttggcaaggggaat

SEQ ID NO: 25636 - RNA, 20 nt, synthetic construct
  source 1..20: mol_type = other RNA
caagcgctgaagtacttcaa

SEQ ID NO: 25637 - RNA, 20 nt, synthetic construct
  source 1..20: mol_type = other RNA
caagctaataatttatcaga

SEQ ID NO: 25638 - RNA, 20 nt, synthetic construct
  source 1..20: mol_type = other RNA
caagctaccatttattcctc

SEQ ID NO: 25639 - RNA, 20 nt, synthetic construct
  source 1..20: mol_type = other RNA
caagctatcagaattttatt

SEQ ID NO: 25640 - RNA, 20 nt, synthetic construct
  source 1..20: mol_type = other RNA
caagctccgcctcctggtgg

SEQ ID NO: 25641 - RNA, 20 nt, synthetic construct
  source 1..20: mol_type = other RNA
caagctcgccgtctccctcg

SEQ ID NO: 25642 - RNA, 20 nt, synthetic construct
  source 1..20: mol_type = other RNA
caagctgtttgagctgaaag

SEQ ID NO: 25643 - RNA, 20 nt, synthetic construct
  source 1..20: mol_type = other RNA
caagcttaggtcagattcct

SEQ ID NO: 25644 - RNA, 20 nt, synthetic construct
  source 1..20: mol_type = other RNA
caaggaaaggatggtttgat

SEQ ID NO: 25645 - RNA, 20 nt, synthetic construct
  source 1..20: mol_type = other RNA
caaggaaagtgtgcttgggc

SEQ ID NO: 25646 - RNA, 20 nt, synthetic construct
  source 1..20: mol_type = other RNA
caaggaagcagaatgtccat

SEQ ID NO: 25647 - RNA, 20 nt, synthetic construct
  source 1..20: mol_type = other RNA
caaggaagcttcctaaagag

SEQ ID NO: 25648 - RNA, 20 nt, synthetic construct
  source 1..20: mol_type = other RNA
caaggaaggaaaggagatac

SEQ ID NO: 25649 - RNA, 20 nt, synthetic construct
  source 1..20: mol_type = other RNA
caaggaaggcagggtaggaa

SEQ ID NO: 25650 - RNA, 20 nt, synthetic construct
  source 1..20: mol_type = other RNA
caaggaagggcttgatctag

SEQ ID NO: 25651 - RNA, 20 nt, synthetic construct
  source 1..20: mol_type = other RNA
caaggaaggtcaaatggtaa

SEQ ID NO: 25652 - RNA, 20 nt, synthetic construct
  source 1..20: mol_type = other RNA
caaggacagaaattcaactt

SEQ ID NO: 25653 - RNA, 20 nt, synthetic construct
  source 1..20: mol_type = other RNA
caaggacaggtcacattctg

SEQ ID NO: 25654 - RNA, 20 nt, synthetic construct
  source 1..20: mol_type = other RNA
caaggaccattagcagttct

SEQ ID NO: 25655 - RNA, 20 nt, synthetic construct
  source 1..20: mol_type = other RNA
caaggactggcttcagtgcc

SEQ ID NO: 25656 - RNA, 20 nt, synthetic construct
  source 1..20: mol_type = other RNA
caaggagacctactaaaagt

SEQ ID NO: 25657 - RNA, 20 nt, synthetic construct
  source 1..20: mol_type = other RNA
caaggagagaaaaacaaaac

SEQ ID NO: 25658 - RNA, 20 nt, synthetic construct
  source 1..20: mol_type = other RNA
caaggagggaggattgtttg

SEQ ID NO: 25659 - RNA, 20 nt, synthetic construct
  source 1..20: mol_type = other RNA
caaggataaacaaagagaac

SEQ ID NO: 25660 - RNA, 20 nt, synthetic construct
  source 1..20: mol_type = other RNA
caaggattaatctttctgaa

SEQ ID NO: 25661 - RNA, 20 nt, synthetic construct
  source 1..20: mol_type = other RNA
caaggattgaatggaaagaa

SEQ ID NO: 25662 - RNA, 20 nt, synthetic construct
  source 1..20: mol_type = other RNA
caaggcacagtctgtgctta

SEQ ID NO: 25663 - RNA, 20 nt, synthetic construct
  source 1..20: mol_type = other RNA
caaggcagaacacactgctc

SEQ ID NO: 25664 - RNA, 20 nt, synthetic construct
  source 1..20: mol_type = other RNA
caaggcaggactgcttgagg

SEQ ID NO: 25665 - RNA, 20 nt, synthetic construct
  source 1..20: mol_type = other RNA
caaggccaactgtcctctct

SEQ ID NO: 25666 - RNA, 20 nt, synthetic construct
  source 1..20: mol_type = other RNA
caaggcccaccatgatgcag

SEQ ID NO: 25667 - RNA, 20 nt, synthetic construct
  source 1..20: mol_type = other RNA
caaggctaacagccaaagaa

SEQ ID NO: 25668 - RNA, 20 nt, synthetic construct
  source 1..20: mol_type = other RNA
caaggctaagttgagaaact

SEQ ID NO: 25669 - RNA, 20 nt, synthetic construct
  source 1..20: mol_type = other RNA
caaggctagagctcacacga

SEQ ID NO: 25670 - RNA, 20 nt, synthetic construct
  source 1..20: mol_type = other RNA
caaggctcctgcagacatgc

SEQ ID NO: 25671 - RNA, 20 nt, synthetic construct
  source 1..20: mol_type = other RNA
caaggctgcccgctccggcc

SEQ ID NO: 25672 - RNA, 20 nt, synthetic construct
  source 1..20: mol_type = other RNA
caaggctggagtgcagtggc

SEQ ID NO: 25673 - RNA, 20 nt, synthetic construct
  source 1..20: mol_type = other RNA
caaggcttgctttggctaga

SEQ ID NO: 25674 - RNA, 20 nt, synthetic construct
  source 1..20: mol_type = other RNA
caaggcttgtgcatcagaat

SEQ ID NO: 25675 - RNA, 20 nt, synthetic construct
  source 1..20: mol_type = other RNA
caagggaagaggccacaaag

SEQ ID NO: 25676 - RNA, 20 nt, synthetic construct
  source 1..20: mol_type = other RNA
caagggactgtcgaagctta

SEQ ID NO: 25677 - RNA, 20 nt, synthetic construct
  source 1..20: mol_type = other RNA
caagggctttcaatagtggg

SEQ ID NO: 25678 - RNA, 20 nt, synthetic construct
  source 1..20: mol_type = other RNA
caaggggaatggtactgcct

SEQ ID NO: 25679 - RNA, 20 nt, synthetic construct
  source 1..20: mol_type = other RNA
caaggggagaggcctcatgt

SEQ ID NO: 25680 - RNA, 20 nt, synthetic construct
  source 1..20: mol_type = other RNA
caaggggccttttgtcaagc

SEQ ID NO: 25681 - RNA, 20 nt, synthetic construct
  source 1..20: mol_type = other RNA
caagggtgacagagccgagc

SEQ ID NO: 25682 - RNA, 20 nt, synthetic construct
  source 1..20: mol_type = other RNA
caagggtggctggcactttc

SEQ ID NO: 25683 - RNA, 20 nt, synthetic construct
  source 1..20: mol_type = other RNA
caagggtggtgctggactgg

SEQ ID NO: 25684 - RNA, 20 nt, synthetic construct
  source 1..20: mol_type = other RNA
caagggtgtgtttaatttcc

SEQ ID NO: 25685 - RNA, 20 nt, synthetic construct
  source 1..20: mol_type = other RNA
caagggtgttttccccccta

SEQ ID NO: 25686 - RNA, 20 nt, synthetic construct
  source 1..20: mol_type = other RNA
caagggttggtgcttccttc

SEQ ID NO: 25687 - RNA, 20 nt, synthetic construct
  source 1..20: mol_type = other RNA
caagggtttgtcaattttgc

SEQ ID NO: 25688 - RNA, 20 nt, synthetic construct
  source 1..20: mol_type = other RNA
caagggttttggtatgttgt

SEQ ID NO: 25689 - RNA, 20 nt, synthetic construct
  source 1..20: mol_type = other RNA
caaggtaatctagtttatct

SEQ ID NO: 25690 - RNA, 20 nt, synthetic construct
  source 1..20: mol_type = other RNA
caaggtacaatacactaaat

SEQ ID NO: 25691 - RNA, 20 nt, synthetic construct
  source 1..20: mol_type = other RNA
caaggtacaattacacatct

SEQ ID NO: 25692 - RNA, 20 nt, synthetic construct
  source 1..20: mol_type = other RNA
caaggtagaagtacaaacat

SEQ ID NO: 25693 - RNA, 20 nt, synthetic construct
  source 1..20: mol_type = other RNA
caaggtatctccccaaagat

SEQ ID NO: 25694 - RNA, 20 nt, synthetic construct
  source 1..20: mol_type = other RNA
caaggtcaagagcggccttt

SEQ ID NO: 25695 - RNA, 20 nt, synthetic construct
  source 1..20: mol_type = other RNA
caaggtcaatctgaaaaata

SEQ ID NO: 25696 - RNA, 20 nt, synthetic construct
  source 1..20: mol_type = other RNA
caaggtcagaagtttggaac

SEQ ID NO: 25697 - RNA, 20 nt, synthetic construct
  source 1..20: mol_type = other RNA
caaggtcatcctttcccttc

SEQ ID NO: 25698 - RNA, 20 nt, synthetic construct
  source 1..20: mol_type = other RNA
caaggtcgtttcagattgct

SEQ ID NO: 25699 - RNA, 20 nt, synthetic construct
  source 1..20: mol_type = other RNA
caaggtgcgggattatttgg

SEQ ID NO: 25700 - RNA, 20 nt, synthetic construct
  source 1..20: mol_type = other RNA
caaggtgttagcaggactgg

SEQ ID NO: 25701 - RNA, 20 nt, synthetic construct
  source 1..20: mol_type = other RNA
caaggtgttcctgaagtctt

SEQ ID NO: 25702 - RNA, 20 nt, synthetic construct
  source 1..20: mol_type = other RNA
caaggttataatcagccgtg

SEQ ID NO: 25703 - RNA, 20 nt, synthetic construct
  source 1..20: mol_type = other RNA
caaggttcacaaattagaac

SEQ ID NO: 25704 - RNA, 20 nt, synthetic construct
  source 1..20: mol_type = other RNA
caaggttgcctgttcactct

SEQ ID NO: 25705 - RNA, 20 nt, synthetic construct
  source 1..20: mol_type = other RNA
caaggtttctctccaaggta

SEQ ID NO: 25706 - RNA, 20 nt, synthetic construct
  source 1..20: mol_type = other RNA
caagtaaaagaagatgcagt

SEQ ID NO: 25707 - RNA, 20 nt, synthetic construct
  source 1..20: mol_type = other RNA
caagtaaaagcaacctcatt

SEQ ID NO: 25708 - RNA, 20 nt, synthetic construct
  source 1..20: mol_type = other RNA
caagtaaacaactgactcta

SEQ ID NO: 25709 - RNA, 20 nt, synthetic construct
  source 1..20: mol_type = other RNA
caagtaaacctcaagtcttt

SEQ ID NO: 25710 - RNA, 20 nt, synthetic construct
  source 1..20: mol_type = other RNA
caagtaaatgcaatgcaggc

SEQ ID NO: 25711 - RNA, 20 nt, synthetic construct
  source 1..20: mol_type = other RNA
caagtaacactcagaagtac

SEQ ID NO: 25712 - RNA, 20 nt, synthetic construct
  source 1..20: mol_type = other RNA
caagtaacagttcaatacta

SEQ ID NO: 25713 - RNA, 20 nt, synthetic construct
  source 1..20: mol_type = other RNA
caagtaagtgaaatcataaa

SEQ ID NO: 25714 - RNA, 20 nt, synthetic construct
  source 1..20: mol_type = other RNA
caagtaattgttttcccttt

SEQ ID NO: 25715 - RNA, 20 nt, synthetic construct
  source 1..20: mol_type = other RNA
caagtacaactaataattgc

SEQ ID NO: 25716 - RNA, 20 nt, synthetic construct
  source 1..20: mol_type = other RNA
caagtacatgaaatactcaa

SEQ ID NO: 25717 - RNA, 20 nt, synthetic construct
  source 1..20: mol_type = other RNA
caagtactgcatgattcccc

SEQ ID NO: 25718 - RNA, 20 nt, synthetic construct
  source 1..20: mol_type = other RNA
caagtagcagggactacagt

SEQ ID NO: 25719 - RNA, 20 nt, synthetic construct
  source 1..20: mol_type = other RNA
caagtagctaggaccatagg

SEQ ID NO: 25720 - RNA, 20 nt, synthetic construct
  source 1..20: mol_type = other RNA
caagtagctgggatcacagg

SEQ ID NO: 25721 - RNA, 20 nt, synthetic construct
  source 1..20: mol_type = other RNA
caagtagtacaaaagtgctg

SEQ ID NO: 25722 - RNA, 20 nt, synthetic construct
  source 1..20: mol_type = other RNA
caagtataagatgatgatat

SEQ ID NO: 25723 - RNA, 20 nt, synthetic construct
  source 1..20: mol_type = other RNA
caagtatattacaaaaagag

SEQ ID NO: 25724 - RNA, 20 nt, synthetic construct
  source 1..20: mol_type = other RNA
caagtatctccctgtgcgtg

SEQ ID NO: 25725 - RNA, 20 nt, synthetic construct
  source 1..20: mol_type = other RNA
caagtatgagccactagtca

SEQ ID NO: 25726 - RNA, 20 nt, synthetic construct
  source 1..20: mol_type = other RNA
caagtattaacgaattcttt

SEQ ID NO: 25727 - RNA, 20 nt, synthetic construct
  source 1..20: mol_type = other RNA
caagtattgtatcaatgtta

SEQ ID NO: 25728 - RNA, 20 nt, synthetic construct
  source 1..20: mol_type = other RNA
caagtatttccacgggtaaa

SEQ ID NO: 25729 - RNA, 20 nt, synthetic construct
  source 1..20: mol_type = other RNA
caagtatttcctatgaaaat

SEQ ID NO: 25730 - RNA, 20 nt, synthetic construct
  source 1..20: mol_type = other RNA
caagtatttctcatctgtca

SEQ ID NO: 25731 - RNA, 20 nt, synthetic construct
  source 1..20: mol_type = other RNA
caagtcacaaaaagacaagt

SEQ ID NO: 25732 - RNA, 20 nt, synthetic construct
  source 1..20: mol_type = other RNA
caagtcagcacttctgatat

SEQ ID NO: 25733 - RNA, 20 nt, synthetic construct
  source 1..20: mol_type = other RNA
caagtccccatctccacaaa

SEQ ID NO: 25734 - RNA, 20 nt, synthetic construct
  source 1..20: mol_type = other RNA
caagtcccggaagctgggct

SEQ ID NO: 25735 - RNA, 20 nt, synthetic construct
  source 1..20: mol_type = other RNA
caagtccgtgcatgcctctg

SEQ ID NO: 25736 - RNA, 20 nt, synthetic construct
  source 1..20: mol_type = other RNA
caagtcctttccagaggttc

SEQ ID NO: 25737 - RNA, 20 nt, synthetic construct
  source 1..20: mol_type = other RNA
caagtctcatgcaattcccc

SEQ ID NO: 25738 - RNA, 20 nt, synthetic construct
  source 1..20: mol_type = other RNA
caagtcttttcctagactgc

SEQ ID NO: 25739 - RNA, 20 nt, synthetic construct
  source 1..20: mol_type = other RNA
caagtgaaatgatctttgaa

SEQ ID NO: 25740 - RNA, 20 nt, synthetic construct
  source 1..20: mol_type = other RNA
caagtgaaccaaaaaccaca

SEQ ID NO: 25741 - RNA, 20 nt, synthetic construct
  source 1..20: mol_type = other RNA
caagtgactccaagcacaca

SEQ ID NO: 25742 - RNA, 20 nt, synthetic construct
  source 1..20: mol_type = other RNA
caagtgatgcaactcctggg

SEQ ID NO: 25743 - RNA, 20 nt, synthetic construct
  source 1..20: mol_type = other RNA
caagtgcccattaacagatg

SEQ ID NO: 25744 - RNA, 20 nt, synthetic construct
  source 1..20: mol_type = other RNA
caagtgccgcgttttttgtc

SEQ ID NO: 25745 - RNA, 20 nt, synthetic construct
  source 1..20: mol_type = other RNA
caagtgctgtgattgcaggt

SEQ ID NO: 25746 - RNA, 20 nt, synthetic construct
  source 1..20: mol_type = other RNA
caagtggagcctgctctgca

SEQ ID NO: 25747 - RNA, 20 nt, synthetic construct
  source 1..20: mol_type = other RNA
caagtgggtggatgggtgta

SEQ ID NO: 25748 - RNA, 20 nt, synthetic construct
  source 1..20: mol_type = other RNA
caagtgtaaaaagacattat

SEQ ID NO: 25749 - RNA, 20 nt, synthetic construct
  source 1..20: mol_type = other RNA
caagtgtggtggtctcaccc

SEQ ID NO: 25750 - RNA, 20 nt, synthetic construct
  source 1..20: mol_type = other RNA
caagtgtttatttagtgaaa

SEQ ID NO: 25751 - RNA, 20 nt, synthetic construct
  source 1..20: mol_type = other RNA
caagtgtttcatttacaaaa

SEQ ID NO: 25752 - RNA, 20 nt, synthetic construct
  source 1..20: mol_type = other RNA
caagttaaaagacatctttc

SEQ ID NO: 25753 - RNA, 20 nt, synthetic construct
  source 1..20: mol_type = other RNA
caagttacaaacatatgcat

SEQ ID NO: 25754 - RNA, 20 nt, synthetic construct
  source 1..20: mol_type = other RNA
caagttacaataatatgcct

SEQ ID NO: 25755 - RNA, 20 nt, synthetic construct
  source 1..20: mol_type = other RNA
caagttacatgcttagcctt

SEQ ID NO: 25756 - RNA, 20 nt, synthetic construct
  source 1..20: mol_type = other RNA
caagttactagaagcacttt

SEQ ID NO: 25757 - RNA, 20 nt, synthetic construct
  source 1..20: mol_type = other RNA
caagttcagcatcttcactg

SEQ ID NO: 25758 - RNA, 20 nt, synthetic construct
  source 1..20: mol_type = other RNA
caagttccggttctcaggag

SEQ ID NO: 25759 - RNA, 20 nt, synthetic construct
  source 1..20: mol_type = other RNA
caagttctcctgtgtgcatg

SEQ ID NO: 25760 - RNA, 20 nt, synthetic construct
  source 1..20: mol_type = other RNA
caagttctgatttcaaagtt

SEQ ID NO: 25761 - RNA, 20 nt, synthetic construct
  source 1..20: mol_type = other RNA
caagttcttacctcaaagga

SEQ ID NO: 25762 - RNA, 20 nt, synthetic construct
  source 1..20: mol_type = other RNA
caagttgaatttctgtcctt

SEQ ID NO: 25763 - RNA, 20 nt, synthetic construct
  source 1..20: mol_type = other RNA
caagttgctatccagtctct

SEQ ID NO: 25764 - RNA, 20 nt, synthetic construct
  source 1..20: mol_type = other RNA
caagttgcttggcacagaat

SEQ ID NO: 25765 - RNA, 20 nt, synthetic construct
  source 1..20: mol_type = other RNA
caagttgctttttcttcttg

SEQ ID NO: 25766 - RNA, 20 nt, synthetic construct
  source 1..20: mol_type = other RNA
caagttgtgatatattatga

SEQ ID NO: 25767 - RNA, 20 nt, synthetic construct
  source 1..20: mol_type = other RNA
caagtttaaccaattatgct

SEQ ID NO: 25768 - RNA, 20 nt, synthetic construct
  source 1..20: mol_type = other RNA
caagtttcaccctgcgaagg

SEQ ID NO: 25769 - RNA, 20 nt, synthetic construct
  source 1..20: mol_type = other RNA
caagtttccattctcttaat

SEQ ID NO: 25770 - RNA, 20 nt, synthetic construct
  source 1..20: mol_type = other RNA
caagtttctagccataatcc

SEQ ID NO: 25771 - RNA, 20 nt, synthetic construct
  source 1..20: mol_type = other RNA
caagtttggctcccatgatt

SEQ ID NO: 25772 - RNA, 20 nt, synthetic construct
  source 1..20: mol_type = other RNA
caagtttggttcatttcagg

SEQ ID NO: 25773 - RNA, 20 nt, synthetic construct
  source 1..20: mol_type = other RNA
caagttttaacttaagaact

SEQ ID NO: 25774 - RNA, 20 nt, synthetic construct
  source 1..20: mol_type = other RNA
caataaaagcctcatttgaa

SEQ ID NO: 25775 - RNA, 20 nt, synthetic construct
  source 1..20: mol_type = other RNA
caataaatggtgcaggccag

SEQ ID NO: 25776 - RNA, 20 nt, synthetic construct
  source 1..20: mol_type = other RNA
caataaatttctgttgctta

SEQ ID NO: 25777 - RNA, 20 nt, synthetic construct
  source 1..20: mol_type = other RNA
caataaccacatgtggcttg

SEQ ID NO: 25778 - RNA, 20 nt, synthetic construct
  source 1..20: mol_type = other RNA
caataactcaaaatgttcat

SEQ ID NO: 25779 - RNA, 20 nt, synthetic construct
  source 1..20: mol_type = other RNA
caataagaagtgaaaaatga

SEQ ID NO: 25780 - RNA, 20 nt, synthetic construct
  source 1..20: mol_type = other RNA
caataagacaccgctccacg

SEQ ID NO: 25781 - RNA, 20 nt, synthetic construct
  source 1..20: mol_type = other RNA
caataaggaaagcacgtttg

SEQ ID NO: 25782 - RNA, 20 nt, synthetic construct
  source 1..20: mol_type = other RNA
caataagttaactgaaatcg

SEQ ID NO: 25783 - RNA, 20 nt, synthetic construct
  source 1..20: mol_type = other RNA
caataataactacacatcag

SEQ ID NO: 25784 - RNA, 20 nt, synthetic construct
  source 1..20: mol_type = other RNA
caataatatgcctcatgcat

SEQ ID NO: 25785 - RNA, 20 nt, synthetic construct
  source 1..20: mol_type = other RNA
caataatgcacatgggcatg

SEQ ID NO: 25786 - RNA, 20 nt, synthetic construct
  source 1..20: mol_type = other RNA
caataattctgtgccaagca

SEQ ID NO: 25787 - RNA, 20 nt, synthetic construct
  source 1..20: mol_type = other RNA
caataattcttcctgtcttg

SEQ ID NO: 25788 - RNA, 20 nt, synthetic construct
  source 1..20: mol_type = other RNA
caataatttggatgaacgct

SEQ ID NO: 25789 - RNA, 20 nt, synthetic construct
  source 1..20: mol_type = other RNA
caatacacgtggctgtcaaa

SEQ ID NO: 25790 - RNA, 20 nt, synthetic construct
  source 1..20: mol_type = other RNA
caatacagttaacgtatgaa

SEQ ID NO: 25791 - RNA, 20 nt, synthetic construct
  source 1..20: mol_type = other RNA
caatacctgaaaagtgtatt

SEQ ID NO: 25792 - RNA, 20 nt, synthetic construct
  source 1..20: mol_type = other RNA
caatactactgcaaatatcc

SEQ ID NO: 25793 - RNA, 20 nt, synthetic construct
  source 1..20: mol_type = other RNA
caatactctcagaaattata

SEQ ID NO: 25794 - RNA, 20 nt, synthetic construct
  source 1..20: mol_type = other RNA
caatactgcattgtgcactt

SEQ ID NO: 25795 - RNA, 20 nt, synthetic construct
  source 1..20: mol_type = other RNA
caatactgtctcagtcccaa

SEQ ID NO: 25796 - RNA, 20 nt, synthetic construct
  source 1..20: mol_type = other RNA
caatactgttatgacaagac

SEQ ID NO: 25797 - RNA, 20 nt, synthetic construct
  source 1..20: mol_type = other RNA
caatacttaatagcccaaca

SEQ ID NO: 25798 - RNA, 20 nt, synthetic construct
  source 1..20: mol_type = other RNA
caatacttcatttccattgt

SEQ ID NO: 25799 - RNA, 20 nt, synthetic construct
  source 1..20: mol_type = other RNA
caatacttggatcttatctg

SEQ ID NO: 25800 - RNA, 20 nt, synthetic construct
  source 1..20: mol_type = other RNA
caatactttagacatgggct

SEQ ID NO: 25801 - RNA, 20 nt, synthetic construct
  source 1..20: mol_type = other RNA
caatagcaacaaaacaatct

SEQ ID NO: 25802 - RNA, 20 nt, synthetic construct
  source 1..20: mol_type = other RNA
caatagcagtgctgaaagct

SEQ ID NO: 25803 - RNA, 20 nt, synthetic construct
  source 1..20: mol_type = other RNA
caatagcccagcaggatttt

SEQ ID NO: 25804 - RNA, 20 nt, synthetic construct
  source 1..20: mol_type = other RNA
caatagctagtgtcttagtc

SEQ ID NO: 25805 - RNA, 20 nt, synthetic construct
  source 1..20: mol_type = other RNA
caataggaatagtattcagg

SEQ ID NO: 25806 - RNA, 20 nt, synthetic construct
  source 1..20: mol_type = other RNA
caatagtgggtagaagcagc

SEQ ID NO: 25807 - RNA, 20 nt, synthetic construct
  source 1..20: mol_type = other RNA
caatagtttagttactcaaa

SEQ ID NO: 25808 - RNA, 20 nt, synthetic construct
  source 1..20: mol_type = other RNA
caatataggagactatcgtt

SEQ ID NO: 25809 - RNA, 20 nt, synthetic construct
  source 1..20: mol_type = other RNA
caatatagtgggaccccgtc

SEQ ID NO: 25810 - RNA, 20 nt, synthetic construct
  source 1..20: mol_type = other RNA
caatatcacactgtttgatt

SEQ ID NO: 25811 - RNA, 20 nt, synthetic construct
  source 1..20: mol_type = other RNA
caatatccctgataatcaca

SEQ ID NO: 25812 - RNA, 20 nt, synthetic construct
  source 1..20: mol_type = other RNA
caatatctatcagggctgaa

SEQ ID NO: 25813 - RNA, 20 nt, synthetic construct
  source 1..20: mol_type = other RNA
caatatgcagtatgtgccat

SEQ ID NO: 25814 - RNA, 20 nt, synthetic construct
  source 1..20: mol_type = other RNA
caatatgttaaatgaaggaa

SEQ ID NO: 25815 - RNA, 20 nt, synthetic construct
  source 1..20: mol_type = other RNA
caatattaagagtctcatct

SEQ ID NO: 25816 - RNA, 20 nt, synthetic construct
  source 1..20: mol_type = other RNA
caatattacagtaaggtttc

SEQ ID NO: 25817 - RNA, 20 nt, synthetic construct
  source 1..20: mol_type = other RNA
caatattttggaagactatg

SEQ ID NO: 25818 - RNA, 20 nt, synthetic construct
  source 1..20: mol_type = other RNA
caatcaaaccatcctttcct

SEQ ID NO: 25819 - RNA, 20 nt, synthetic construct
  source 1..20: mol_type = other RNA
caatcaaatccagtcttcag

SEQ ID NO: 25820 - RNA, 20 nt, synthetic construct
  source 1..20: mol_type = other RNA
caatcaaatggccttctttc

SEQ ID NO: 25821 - RNA, 20 nt, synthetic construct
  source 1..20: mol_type = other RNA
caatcaaatttaacacacaa

SEQ ID NO: 25822 - RNA, 20 nt, synthetic construct
  source 1..20: mol_type = other RNA
caatcaaatttaagttactg

SEQ ID NO: 25823 - RNA, 20 nt, synthetic construct
  source 1..20: mol_type = other RNA
caatcaacaggtagctgctt

SEQ ID NO: 25824 - RNA, 20 nt, synthetic construct
  source 1..20: mol_type = other RNA
caatcaataattctgtgcca

SEQ ID NO: 25825 - RNA, 20 nt, synthetic construct
  source 1..20: mol_type = other RNA
caatcacagcacttggggag

SEQ ID NO: 25826 - RNA, 20 nt, synthetic construct
  source 1..20: mol_type = other RNA
caatcacggctgattataac

SEQ ID NO: 25827 - RNA, 20 nt, synthetic construct
  source 1..20: mol_type = other RNA
caatcactggctagtaggca

SEQ ID NO: 25828 - RNA, 20 nt, synthetic construct
  source 1..20: mol_type = other RNA
caatcagggccttcccaaag

SEQ ID NO: 25829 - RNA, 20 nt, synthetic construct
  source 1..20: mol_type = other RNA
caatcagtggccagtgacca

SEQ ID NO: 25830 - RNA, 20 nt, synthetic construct
  source 1..20: mol_type = other RNA
caatcatagctcactagagc

SEQ ID NO: 25831 - RNA, 20 nt, synthetic construct
  source 1..20: mol_type = other RNA
caatcatgtcaagaatgaag

SEQ ID NO: 25832 - RNA, 20 nt, synthetic construct
  source 1..20: mol_type = other RNA
caatcatgttctttatagca

SEQ ID NO: 25833 - RNA, 20 nt, synthetic construct
  source 1..20: mol_type = other RNA
caatccaaaatcctctgtag

SEQ ID NO: 25834 - RNA, 20 nt, synthetic construct
  source 1..20: mol_type = other RNA
caatccaaggacagaaattc

SEQ ID NO: 25835 - RNA, 20 nt, synthetic construct
  source 1..20: mol_type = other RNA
caatccaagtttctagccat

SEQ ID NO: 25836 - RNA, 20 nt, synthetic construct
  source 1..20: mol_type = other RNA
caatccagacagctaatatg

SEQ ID NO: 25837 - RNA, 20 nt, synthetic construct
  source 1..20: mol_type = other RNA
caatccaggatcttactgta

SEQ ID NO: 25838 - RNA, 20 nt, synthetic construct
  source 1..20: mol_type = other RNA
caatccccatctgggatact

SEQ ID NO: 25839 - RNA, 20 nt, synthetic construct
  source 1..20: mol_type = other RNA
caatcccttccccacctttc

SEQ ID NO: 25840 - RNA, 20 nt, synthetic construct
  source 1..20: mol_type = other RNA
caatccgggaacatgacatg

SEQ ID NO: 25841 - RNA, 20 nt, synthetic construct
  source 1..20: mol_type = other RNA
caatcctcagccccctccct

SEQ ID NO: 25842 - RNA, 20 nt, synthetic construct
  source 1..20: mol_type = other RNA
caatccttccttcatgtccc

SEQ ID NO: 25843 - RNA, 20 nt, synthetic construct
  source 1..20: mol_type = other RNA
caatccttctaatcagtaac

SEQ ID NO: 25844 - RNA, 20 nt, synthetic construct
  source 1..20: mol_type = other RNA
caatccttgtaacttttatt

SEQ ID NO: 25845 - RNA, 20 nt, synthetic construct
  source 1..20: mol_type = other RNA
caatcctttgtgcaggtctg

SEQ ID NO: 25846 - RNA, 20 nt, synthetic construct
  source 1..20: mol_type = other RNA
caatcgcaatccaaaatcct

SEQ ID NO: 25847 - RNA, 20 nt, synthetic construct
  source 1..20: mol_type = other RNA
caatcgcagggccattctgc

SEQ ID NO: 25848 - RNA, 20 nt, synthetic construct
  source 1..20: mol_type = other RNA
caatctaattcgaaaatggg

SEQ ID NO: 25849 - RNA, 20 nt, synthetic construct
  source 1..20: mol_type = other RNA
caatctacaggtcggaagga

SEQ ID NO: 25850 - RNA, 20 nt, synthetic construct
  source 1..20: mol_type = other RNA
caatctaggaggtctaagag

SEQ ID NO: 25851 - RNA, 20 nt, synthetic construct
  source 1..20: mol_type = other RNA
caatctcacacctgggtata

SEQ ID NO: 25852 - RNA, 20 nt, synthetic construct
  source 1..20: mol_type = other RNA
caatctcagctcattacagt

SEQ ID NO: 25853 - RNA, 20 nt, synthetic construct
  source 1..20: mol_type = other RNA
caatctcctgatccacctgc

SEQ ID NO: 25854 - RNA, 20 nt, synthetic construct
  source 1..20: mol_type = other RNA
caatctcggcttcactgcaa

SEQ ID NO: 25855 - RNA, 20 nt, synthetic construct
  source 1..20: mol_type = other RNA
caatctctggggttagggcc

SEQ ID NO: 25856 - RNA, 20 nt, synthetic construct
  source 1..20: mol_type = other RNA
caatctctggtattctgaac

SEQ ID NO: 25857 - RNA, 20 nt, synthetic construct
  source 1..20: mol_type = other RNA
caatctgaaacgaccttgct

SEQ ID NO: 25858 - RNA, 20 nt, synthetic construct
  source 1..20: mol_type = other RNA
caatctggaatgcatcgttt

SEQ ID NO: 25859 - RNA, 20 nt, synthetic construct
  source 1..20: mol_type = other RNA
caatctggatataacaaatc

SEQ ID NO: 25860 - RNA, 20 nt, synthetic construct
  source 1..20: mol_type = other RNA
caatctgtttcctaatctaa

SEQ ID NO: 25861 - RNA, 20 nt, synthetic construct
  source 1..20: mol_type = other RNA
caatcttacccccatcacac

SEQ ID NO: 25862 - RNA, 20 nt, synthetic construct
  source 1..20: mol_type = other RNA
caatcttcccaatcctttgt

SEQ ID NO: 25863 - RNA, 20 nt, synthetic construct
  source 1..20: mol_type = other RNA
caatcttcttatttgttact

SEQ ID NO: 25864 - RNA, 20 nt, synthetic construct
  source 1..20: mol_type = other RNA
caatcttgaaaggggccagg

SEQ ID NO: 25865 - RNA, 20 nt, synthetic construct
  source 1..20: mol_type = other RNA
caatcttgagacggaagact

SEQ ID NO: 25866 - RNA, 20 nt, synthetic construct
  source 1..20: mol_type = other RNA
caatcttggaaatgatacct

SEQ ID NO: 25867 - RNA, 20 nt, synthetic construct
  source 1..20: mol_type = other RNA
caatgaatatgtactaccta

SEQ ID NO: 25868 - RNA, 20 nt, synthetic construct
  source 1..20: mol_type = other RNA
caatgaattagcaatgcgaa

SEQ ID NO: 25869 - RNA, 20 nt, synthetic construct
  source 1..20: mol_type = other RNA
caatgacttttatcaattca

SEQ ID NO: 25870 - RNA, 20 nt, synthetic construct
  source 1..20: mol_type = other RNA
caatgagacatttgagggtg

SEQ ID NO: 25871 - RNA, 20 nt, synthetic construct
  source 1..20: mol_type = other RNA
caatgagaccccatctctac

SEQ ID NO: 25872 - RNA, 20 nt, synthetic construct
  source 1..20: mol_type = other RNA
caatgagggcagagataact

SEQ ID NO: 25873 - RNA, 20 nt, synthetic construct
  source 1..20: mol_type = other RNA
caatgagtctgacatactgt

SEQ ID NO: 25874 - RNA, 20 nt, synthetic construct
  source 1..20: mol_type = other RNA
caatgatagactggattaag

SEQ ID NO: 25875 - RNA, 20 nt, synthetic construct
  source 1..20: mol_type = other RNA
caatgataggtcactgcagt

SEQ ID NO: 25876 - RNA, 20 nt, synthetic construct
  source 1..20: mol_type = other RNA
caatgcaatacttaatagcc

SEQ ID NO: 25877 - RNA, 20 nt, synthetic construct
  source 1..20: mol_type = other RNA
caatgcaatgcgtgtgaaac

SEQ ID NO: 25878 - RNA, 20 nt, synthetic construct
  source 1..20: mol_type = other RNA
caatgcaggcgcctggacag

SEQ ID NO: 25879 - RNA, 20 nt, synthetic construct
  source 1..20: mol_type = other RNA
caatgcagtattgttaactg

SEQ ID NO: 25880 - RNA, 20 nt, synthetic construct
  source 1..20: mol_type = other RNA
caatgccagggcgctcctct

SEQ ID NO: 25881 - RNA, 20 nt, synthetic construct
  source 1..20: mol_type = other RNA
caatgcctgccgcagagcaa

SEQ ID NO: 25882 - RNA, 20 nt, synthetic construct
  source 1..20: mol_type = other RNA
caatgcctgcgattgcaggc

SEQ ID NO: 25883 - RNA, 20 nt, synthetic construct
  source 1..20: mol_type = other RNA
caatgcgaatcatctaggca

SEQ ID NO: 25884 - RNA, 20 nt, synthetic construct
  source 1..20: mol_type = other RNA
caatgcgtgtgaaaccaagc

SEQ ID NO: 25885 - RNA, 20 nt, synthetic construct
  source 1..20: mol_type = other RNA
caatgcgtttgttagatctg

SEQ ID NO: 25886 - RNA, 20 nt, synthetic construct
  source 1..20: mol_type = other RNA
caatgctctcttcccccaaa

SEQ ID NO: 25887 - RNA, 20 nt, synthetic construct
  source 1..20: mol_type = other RNA
caatgctgctatgaaaattg

SEQ ID NO: 25888 - RNA, 20 nt, synthetic construct
  source 1..20: mol_type = other RNA
caatgcttgaagagcgcttc

SEQ ID NO: 25889 - RNA, 20 nt, synthetic construct
  source 1..20: mol_type = other RNA
caatggaaaatgtaaaacat

SEQ ID NO: 25890 - RNA, 20 nt, synthetic construct
  source 1..20: mol_type = other RNA
caatggaaatgaagtattga

SEQ ID NO: 25891 - RNA, 20 nt, synthetic construct
  source 1..20: mol_type = other RNA
caatggaatagaagggagaa

SEQ ID NO: 25892 - RNA, 20 nt, synthetic construct
  source 1..20: mol_type = other RNA
caatggaatattactcagtc

SEQ ID NO: 25893 - RNA, 20 nt, synthetic construct
  source 1..20: mol_type = other RNA
caatggggaactttattttt

SEQ ID NO: 25894 - RNA, 20 nt, synthetic construct
  source 1..20: mol_type = other RNA
caatggggcaatctcagctc

SEQ ID NO: 25895 - RNA, 20 nt, synthetic construct
  source 1..20: mol_type = other RNA
caatggggctttactgtatt

SEQ ID NO: 25896 - RNA, 20 nt, synthetic construct
  source 1..20: mol_type = other RNA
caatggtcagagttgtatct

SEQ ID NO: 25897 - RNA, 20 nt, synthetic construct
  source 1..20: mol_type = other RNA
caatggtgggatctctgggc

SEQ ID NO: 25898 - RNA, 20 nt, synthetic construct
  source 1..20: mol_type = other RNA
caatggttaagactgctgtt

SEQ ID NO: 25899 - RNA, 20 nt, synthetic construct
  source 1..20: mol_type = other RNA
caatggttcataatatatca

SEQ ID NO: 25900 - RNA, 20 nt, synthetic construct
  source 1..20: mol_type = other RNA
caatgtaacacagttctagt

SEQ ID NO: 25901 - RNA, 20 nt, synthetic construct
  source 1..20: mol_type = other RNA
caatgtaaggtgcacgctgt

SEQ ID NO: 25902 - RNA, 20 nt, synthetic construct
  source 1..20: mol_type = other RNA
caatgtagggaatagacaaa

SEQ ID NO: 25903 - RNA, 20 nt, synthetic construct
  source 1..20: mol_type = other RNA
caatgtcagagatctgaaat

SEQ ID NO: 25904 - RNA, 20 nt, synthetic construct
  source 1..20: mol_type = other RNA
caatgtctttggctcttaga

SEQ ID NO: 25905 - RNA, 20 nt, synthetic construct
  source 1..20: mol_type = other RNA
caatgtgagccacatacata

SEQ ID NO: 25906 - RNA, 20 nt, synthetic construct
  source 1..20: mol_type = other RNA
caatgtggagttggtgcaag

SEQ ID NO: 25907 - RNA, 20 nt, synthetic construct
  source 1..20: mol_type = other RNA
caatgttaaatttcattagg

SEQ ID NO: 25908 - RNA, 20 nt, synthetic construct
  source 1..20: mol_type = other RNA
caatgttctcttttcctcgt

SEQ ID NO: 25909 - RNA, 20 nt, synthetic construct
  source 1..20: mol_type = other RNA
caatgttgattttgaggcag

SEQ ID NO: 25910 - RNA, 20 nt, synthetic construct
  source 1..20: mol_type = other RNA
caatgttggttagtgttgtt

SEQ ID NO: 25911 - RNA, 20 nt, synthetic construct
  source 1..20: mol_type = other RNA
caatgttgtggatgtcctta

SEQ ID NO: 25912 - RNA, 20 nt, synthetic construct
  source 1..20: mol_type = other RNA
caatgtttggtagatttctg

SEQ ID NO: 25913 - RNA, 20 nt, synthetic construct
  source 1..20: mol_type = other RNA
caattaaactatagacccaa

SEQ ID NO: 25914 - RNA, 20 nt, synthetic construct
  source 1..20: mol_type = other RNA
caattaagcaaccttttagg

SEQ ID NO: 25915 - RNA, 20 nt, synthetic construct
  source 1..20: mol_type = other RNA
caattaatgcccaatcaaat

SEQ ID NO: 25916 - RNA, 20 nt, synthetic construct
  source 1..20: mol_type = other RNA
caattacacatctcccatac

SEQ ID NO: 25917 - RNA, 20 nt, synthetic construct
  source 1..20: mol_type = other RNA
caattaccataaagtcttcc

SEQ ID NO: 25918 - RNA, 20 nt, synthetic construct
  source 1..20: mol_type = other RNA
caattactgtacaaagattt

SEQ ID NO: 25919 - RNA, 20 nt, synthetic construct
  source 1..20: mol_type = other RNA
caattacttcatagatgtta

SEQ ID NO: 25920 - RNA, 20 nt, synthetic construct
  source 1..20: mol_type = other RNA
caattacttccagtgtttta

SEQ ID NO: 25921 - RNA, 20 nt, synthetic construct
  source 1..20: mol_type = other RNA
caattacttgagagcagaga

SEQ ID NO: 25922 - RNA, 20 nt, synthetic construct
  source 1..20: mol_type = other RNA
caattacttttagtttacac

SEQ ID NO: 25923 - RNA, 20 nt, synthetic construct
  source 1..20: mol_type = other RNA
caattagcacctttattaac

SEQ ID NO: 25924 - RNA, 20 nt, synthetic construct
  source 1..20: mol_type = other RNA
caattaggctgtttgagatc

SEQ ID NO: 25925 - RNA, 20 nt, synthetic construct
  source 1..20: mol_type = other RNA
caattagttcctccttttgt

SEQ ID NO: 25926 - RNA, 20 nt, synthetic construct
  source 1..20: mol_type = other RNA
caattatgctgagtgaatgg

SEQ ID NO: 25927 - RNA, 20 nt, synthetic construct
  source 1..20: mol_type = other RNA
caattattagttgtacttga

SEQ ID NO: 25928 - RNA, 20 nt, synthetic construct
  source 1..20: mol_type = other RNA
caattatttgaataaggtct

SEQ ID NO: 25929 - RNA, 20 nt, synthetic construct
  source 1..20: mol_type = other RNA
caattcaacaatagcaacaa

SEQ ID NO: 25930 - RNA, 20 nt, synthetic construct
  source 1..20: mol_type = other RNA
caattcaacagctactatga

SEQ ID NO: 25931 - RNA, 20 nt, synthetic construct
  source 1..20: mol_type = other RNA
caattcacaagattaatctt

SEQ ID NO: 25932 - RNA, 20 nt, synthetic construct
  source 1..20: mol_type = other RNA
caattcacagaatatactca

SEQ ID NO: 25933 - RNA, 20 nt, synthetic construct
  source 1..20: mol_type = other RNA
caattcagaagctaaatttt

SEQ ID NO: 25934 - RNA, 20 nt, synthetic construct
  source 1..20: mol_type = other RNA
caattccataaatgtttgct

SEQ ID NO: 25935 - RNA, 20 nt, synthetic construct
  source 1..20: mol_type = other RNA
caattcctttctaggcatct

SEQ ID NO: 25936 - RNA, 20 nt, synthetic construct
  source 1..20: mol_type = other RNA
caattcggtggcattaagga

SEQ ID NO: 25937 - RNA, 20 nt, synthetic construct
  source 1..20: mol_type = other RNA
caattctagttaataaaggt

SEQ ID NO: 25938 - RNA, 20 nt, synthetic construct
  source 1..20: mol_type = other RNA
caattctccctgaaattgtc

SEQ ID NO: 25939 - RNA, 20 nt, synthetic construct
  source 1..20: mol_type = other RNA
caattgaatggggatgcaac

SEQ ID NO: 25940 - RNA, 20 nt, synthetic construct
  source 1..20: mol_type = other RNA
caattgaccaaacatgtgag

SEQ ID NO: 25941 - RNA, 20 nt, synthetic construct
  source 1..20: mol_type = other RNA
caattgataccatgaaaata

SEQ ID NO: 25942 - RNA, 20 nt, synthetic construct
  source 1..20: mol_type = other RNA
caattgatctgccaggacaa

SEQ ID NO: 25943 - RNA, 20 nt, synthetic construct
  source 1..20: mol_type = other RNA
caattgcactccagcctagg

SEQ ID NO: 25944 - RNA, 20 nt, synthetic construct
  source 1..20: mol_type = other RNA
caattgcagaaaaatagaat

SEQ ID NO: 25945 - RNA, 20 nt, synthetic construct
  source 1..20: mol_type = other RNA
caattgcagccagagagtgg

SEQ ID NO: 25946 - RNA, 20 nt, synthetic construct
  source 1..20: mol_type = other RNA
caattgcgcagaactggggc

SEQ ID NO: 25947 - RNA, 20 nt, synthetic construct
  source 1..20: mol_type = other RNA
caattggaagactatcacga

SEQ ID NO: 25948 - RNA, 20 nt, synthetic construct
  source 1..20: mol_type = other RNA
caattggtgaatctgagtaa

SEQ ID NO: 25949 - RNA, 20 nt, synthetic construct
  source 1..20: mol_type = other RNA
caattgtaatgtctcctctt

SEQ ID NO: 25950 - RNA, 20 nt, synthetic construct
  source 1..20: mol_type = other RNA
caattgtatttttcacaaac

SEQ ID NO: 25951 - RNA, 20 nt, synthetic construct
  source 1..20: mol_type = other RNA
caattgtcctggcagatcaa

SEQ ID NO: 25952 - RNA, 20 nt, synthetic construct
  source 1..20: mol_type = other RNA
caattgttaacatttcttct

SEQ ID NO: 25953 - RNA, 20 nt, synthetic construct
  source 1..20: mol_type = other RNA
caatttaacttctaatgccc

SEQ ID NO: 25954 - RNA, 20 nt, synthetic construct
  source 1..20: mol_type = other RNA
caatttaccatctgacatat

SEQ ID NO: 25955 - RNA, 20 nt, synthetic construct
  source 1..20: mol_type = other RNA
caatttagaaaatgcttatg

SEQ ID NO: 25956 - RNA, 20 nt, synthetic construct
  source 1..20: mol_type = other RNA
caatttagaattctctctca

SEQ ID NO: 25957 - RNA, 20 nt, synthetic construct
  source 1..20: mol_type = other RNA
caatttatatgatactcgta

SEQ ID NO: 25958 - RNA, 20 nt, synthetic construct
  source 1..20: mol_type = other RNA
caatttcagatctctgacat

SEQ ID NO: 25959 - RNA, 20 nt, synthetic construct
  source 1..20: mol_type = other RNA
caatttcagggagaattggt

SEQ ID NO: 25960 - RNA, 20 nt, synthetic construct
  source 1..20: mol_type = other RNA
caatttcatcgtaaaaagcc

SEQ ID NO: 25961 - RNA, 20 nt, synthetic construct
  source 1..20: mol_type = other RNA
caatttctttggctgttagc

SEQ ID NO: 25962 - RNA, 20 nt, synthetic construct
  source 1..20: mol_type = other RNA
caatttgaggtagcacaact

SEQ ID NO: 25963 - RNA, 20 nt, synthetic construct
  source 1..20: mol_type = other RNA
caatttgccaaaatgatttt

SEQ ID NO: 25964 - RNA, 20 nt, synthetic construct
  source 1..20: mol_type = other RNA
caatttgggatatagctaca

SEQ ID NO: 25965 - RNA, 20 nt, synthetic construct
  source 1..20: mol_type = other RNA
caatttgttttccaagcctt

SEQ ID NO: 25966 - RNA, 20 nt, synthetic construct
  source 1..20: mol_type = other RNA
caattttcatagcagcattg

SEQ ID NO: 25967 - RNA, 20 nt, synthetic construct
  source 1..20: mol_type = other RNA
caattttcatgggttgattt

SEQ ID NO: 25968 - RNA, 20 nt, synthetic construct
  source 1..20: mol_type = other RNA
caattttcccccaattaaac

SEQ ID NO: 25969 - RNA, 20 nt, synthetic construct
  source 1..20: mol_type = other RNA
caattttctctcatgttggg

SEQ ID NO: 25970 - RNA, 20 nt, synthetic construct
  source 1..20: mol_type = other RNA
caattttcttaccctttact

SEQ ID NO: 25971 - RNA, 20 nt, synthetic construct
  source 1..20: mol_type = other RNA
caattttgaatgtgttgatt

SEQ ID NO: 25972 - RNA, 20 nt, synthetic construct
  source 1..20: mol_type = other RNA
caattttttggcatacaact

SEQ ID NO: 25973 - RNA, 20 nt, synthetic construct
  source 1..20: mol_type = other RNA
cacaaaaagatctgtggact

SEQ ID NO: 25974 - RNA, 20 nt, synthetic construct
  source 1..20: mol_type = other RNA
cacaaaaagtgtgaccacat

SEQ ID NO: 25975 - RNA, 20 nt, synthetic construct
  source 1..20: mol_type = other RNA
cacaaaaatccagataaatt

SEQ ID NO: 25976 - RNA, 20 nt, synthetic construct
  source 1..20: mol_type = other RNA
cacaaaacaaatggaaccac

SEQ ID NO: 25977 - RNA, 20 nt, synthetic construct
  source 1..20: mol_type = other RNA
cacaaaagaaaattttctga

SEQ ID NO: 25978 - RNA, 20 nt, synthetic construct
  source 1..20: mol_type = other RNA
cacaaaagagctgggcccgc

SEQ ID NO: 25979 - RNA, 20 nt, synthetic construct
  source 1..20: mol_type = other RNA
cacaaaagtgaaaactaagg

SEQ ID NO: 25980 - RNA, 20 nt, synthetic construct
  source 1..20: mol_type = other RNA
cacaaaagtttaactttgat

SEQ ID NO: 25981 - RNA, 20 nt, synthetic construct
  source 1..20: mol_type = other RNA
cacaaaatatgaagcattaa

SEQ ID NO: 25982 - RNA, 20 nt, synthetic construct
  source 1..20: mol_type = other RNA
cacaaaatcagatatgaaag

SEQ ID NO: 25983 - RNA, 20 nt, synthetic construct
  source 1..20: mol_type = other RNA
cacaaaatgtggatgcatga

SEQ ID NO: 25984 - RNA, 20 nt, synthetic construct
  source 1..20: mol_type = other RNA
cacaaacaaatccttttccc

SEQ ID NO: 25985 - RNA, 20 nt, synthetic construct
  source 1..20: mol_type = other RNA
cacaaacacaaaacaaatgg

SEQ ID NO: 25986 - RNA, 20 nt, synthetic construct
  source 1..20: mol_type = other RNA
cacaaacacacaaaccaaca

SEQ ID NO: 25987 - RNA, 20 nt, synthetic construct
  source 1..20: mol_type = other RNA
cacaaacatgaataaccaat

SEQ ID NO: 25988 - RNA, 20 nt, synthetic construct
  source 1..20: mol_type = other RNA
cacaaaccaacaacaaaaaa

SEQ ID NO: 25989 - RNA, 20 nt, synthetic construct
  source 1..20: mol_type = other RNA
cacaaacctggcaatactct

SEQ ID NO: 25990 - RNA, 20 nt, synthetic construct
  source 1..20: mol_type = other RNA
cacaaactgcagaatgacag

SEQ ID NO: 25991 - RNA, 20 nt, synthetic construct
  source 1..20: mol_type = other RNA
cacaaagccctcaggaccag

SEQ ID NO: 25992 - RNA, 20 nt, synthetic construct
  source 1..20: mol_type = other RNA
cacaaagccttctctactct

SEQ ID NO: 25993 - RNA, 20 nt, synthetic construct
  source 1..20: mol_type = other RNA
cacaaagctttaaactggat

SEQ ID NO: 25994 - RNA, 20 nt, synthetic construct
  source 1..20: mol_type = other RNA
cacaaaggactggaactcat

SEQ ID NO: 25995 - RNA, 20 nt, synthetic construct
  source 1..20: mol_type = other RNA
cacaaaggattgggaagatt

SEQ ID NO: 25996 - RNA, 20 nt, synthetic construct
  source 1..20: mol_type = other RNA
cacaaagtccccacatgact

SEQ ID NO: 25997 - RNA, 20 nt, synthetic construct
  source 1..20: mol_type = other RNA
cacaaataattaacactatg

SEQ ID NO: 25998 - RNA, 20 nt, synthetic construct
  source 1..20: mol_type = other RNA
cacaaatggagtgacttaag

SEQ ID NO: 25999 - RNA, 20 nt, synthetic construct
  source 1..20: mol_type = other RNA
cacaaattatgactgagata

SEQ ID NO: 26000 - RNA, 20 nt, synthetic construct
  source 1..20: mol_type = other RNA
cacaacaatgaattctcata

SEQ ID NO: 26001 - RNA, 20 nt, synthetic construct
  source 1..20: mol_type = other RNA
cacaacacatgcacactaga

SEQ ID NO: 26002 - RNA, 20 nt, synthetic construct
  source 1..20: mol_type = other RNA
cacaacactcagatatcaat

SEQ ID NO: 26003 - RNA, 20 nt, synthetic construct
  source 1..20: mol_type = other RNA
cacaacaggcctgagccgtc

SEQ ID NO: 26004 - RNA, 20 nt, synthetic construct
  source 1..20: mol_type = other RNA
cacaacataccaaaaccctt

SEQ ID NO: 26005 - RNA, 20 nt, synthetic construct
  source 1..20: mol_type = other RNA
cacaacatgttttatttctg

SEQ ID NO: 26006 - RNA, 20 nt, synthetic construct
  source 1..20: mol_type = other RNA
cacaacattgtgcaaccatc

SEQ ID NO: 26007 - RNA, 20 nt, synthetic construct
  source 1..20: mol_type = other RNA
cacaaccactgatggaattc

SEQ ID NO: 26008 - RNA, 20 nt, synthetic construct
  source 1..20: mol_type = other RNA
cacaaccactggggagtgtg

SEQ ID NO: 26009 - RNA, 20 nt, synthetic construct
  source 1..20: mol_type = other RNA
cacaacgatttcttaaaaat

SEQ ID NO: 26010 - RNA, 20 nt, synthetic construct
  source 1..20: mol_type = other RNA
cacaactagtaagtaaaatc

SEQ ID NO: 26011 - RNA, 20 nt, synthetic construct
  source 1..20: mol_type = other RNA
cacaacttactactaaaaaa

SEQ ID NO: 26012 - RNA, 20 nt, synthetic construct
  source 1..20: mol_type = other RNA
cacaacttgtatgaaattag

SEQ ID NO: 26013 - RNA, 20 nt, synthetic construct
  source 1..20: mol_type = other RNA
cacaagaaaaacctaaacct

SEQ ID NO: 26014 - RNA, 20 nt, synthetic construct
  source 1..20: mol_type = other RNA
cacaagacagatgtgcttaa

SEQ ID NO: 26015 - RNA, 20 nt, synthetic construct
  source 1..20: mol_type = other RNA
cacaagacataagcattttc

SEQ ID NO: 26016 - RNA, 20 nt, synthetic construct
  source 1..20: mol_type = other RNA
cacaagatctctatgcagaa

SEQ ID NO: 26017 - RNA, 20 nt, synthetic construct
  source 1..20: mol_type = other RNA
cacaagattaatcttgcaaa

SEQ ID NO: 26018 - RNA, 20 nt, synthetic construct
  source 1..20: mol_type = other RNA
cacaagcacagagtcagaaa

SEQ ID NO: 26019 - RNA, 20 nt, synthetic construct
  source 1..20: mol_type = other RNA
cacaagccacatgtggttat

SEQ ID NO: 26020 - RNA, 20 nt, synthetic construct
  source 1..20: mol_type = other RNA
cacaagccagggtctgtctc

SEQ ID NO: 26021 - RNA, 20 nt, synthetic construct
  source 1..20: mol_type = other RNA
cacaagccttgaaaatatac

SEQ ID NO: 26022 - RNA, 20 nt, synthetic construct
  source 1..20: mol_type = other RNA
cacaaggaaggtcaaatggt

SEQ ID NO: 26023 - RNA, 20 nt, synthetic construct
  source 1..20: mol_type = other RNA
cacaaggacaggtcacattc

SEQ ID NO: 26024 - RNA, 20 nt, synthetic construct
  source 1..20: mol_type = other RNA
cacaaggactggcttcagtg

SEQ ID NO: 26025 - RNA, 20 nt, synthetic construct
  source 1..20: mol_type = other RNA
cacaaggattaatctttctg

SEQ ID NO: 26026 - RNA, 20 nt, synthetic construct
  source 1..20: mol_type = other RNA
cacaagggaagaggccacaa

SEQ ID NO: 26027 - RNA, 20 nt, synthetic construct
  source 1..20: mol_type = other RNA
cacaaggtcaagagcggcct

SEQ ID NO: 26028 - RNA, 20 nt, synthetic construct
  source 1..20: mol_type = other RNA
cacaaggtcagaagtttgga

SEQ ID NO: 26029 - RNA, 20 nt, synthetic construct
  source 1..20: mol_type = other RNA
cacaagtagcagggactaca

SEQ ID NO: 26030 - RNA, 20 nt, synthetic construct
  source 1..20: mol_type = other RNA
cacaagtattaacgaattct

SEQ ID NO: 26031 - RNA, 20 nt, synthetic construct
  source 1..20: mol_type = other RNA
cacaagtgtttcatttacaa

SEQ ID NO: 26032 - RNA, 20 nt, synthetic construct
  source 1..20: mol_type = other RNA
cacaatactgtctcagtccc

SEQ ID NO: 26033 - RNA, 20 nt, synthetic construct
  source 1..20: mol_type = other RNA
cacaatcaaatttaagttac

SEQ ID NO: 26034 - RNA, 20 nt, synthetic construct
  source 1..20: mol_type = other RNA
cacaatcatagctcactaga

SEQ ID NO: 26035 - RNA, 20 nt, synthetic construct
  source 1..20: mol_type = other RNA
cacaatccaagtttctagcc

SEQ ID NO: 26036 - RNA, 20 nt, synthetic construct
  source 1..20: mol_type = other RNA
cacaatcttacccccatcac

SEQ ID NO: 26037 - RNA, 20 nt, synthetic construct
  source 1..20: mol_type = other RNA
cacaatcttgagacggaaga

SEQ ID NO: 26038 - RNA, 20 nt, synthetic construct
  source 1..20: mol_type = other RNA
cacaatgagacatttgaggg

SEQ ID NO: 26039 - RNA, 20 nt, synthetic construct
  source 1..20: mol_type = other RNA
cacaatgcagtattgttaac

SEQ ID NO: 26040 - RNA, 20 nt, synthetic construct
  source 1..20: mol_type = other RNA
cacaatgcctgccgcagagc

SEQ ID NO: 26041 - RNA, 20 nt, synthetic construct
  source 1..20: mol_type = other RNA
cacaatgcgtttgttagatc

SEQ ID NO: 26042 - RNA, 20 nt, synthetic construct
  source 1..20: mol_type = other RNA
cacaatggaatattactcag

SEQ ID NO: 26043 - RNA, 20 nt, synthetic construct
  source 1..20: mol_type = other RNA
cacaatggtcagagttgtat

SEQ ID NO: 26044 - RNA, 20 nt, synthetic construct
  source 1..20: mol_type = other RNA
cacaatgttgtggatgtcct

SEQ ID NO: 26045 - RNA, 20 nt, synthetic construct
  source 1..20: mol_type = other RNA
cacaattcacagaatatact

SEQ ID NO: 26046 - RNA, 20 nt, synthetic construct
  source 1..20: mol_type = other RNA
cacaattgcactccagccta

SEQ ID NO: 26047 - RNA, 20 nt, synthetic construct
  source 1..20: mol_type = other RNA
cacaatttgaggtagcacaa

SEQ ID NO: 26048 - RNA, 20 nt, synthetic construct
  source 1..20: mol_type = other RNA
cacacaaaccaacaacaaaa

SEQ ID NO: 26049 - RNA, 20 nt, synthetic construct
  source 1..20: mol_type = other RNA
cacacaacaatgaattctca

SEQ ID NO: 26050 - RNA, 20 nt, synthetic construct
  source 1..20: mol_type = other RNA
cacacaacactcagatatca

SEQ ID NO: 26051 - RNA, 20 nt, synthetic construct
  source 1..20: mol_type = other RNA
cacacaatccaagtttctag

SEQ ID NO: 26052 - RNA, 20 nt, synthetic construct
  source 1..20: mol_type = other RNA
cacacaatcttgagacggaa

SEQ ID NO: 26053 - RNA, 20 nt, synthetic construct
  source 1..20: mol_type = other RNA
cacacaatggtcagagttgt

SEQ ID NO: 26054 - RNA, 20 nt, synthetic construct
  source 1..20: mol_type = other RNA
cacacaatttgaggtagcac

SEQ ID NO: 26055 - RNA, 20 nt, synthetic construct
  source 1..20: mol_type = other RNA
cacacacagtcctgtgtttc

SEQ ID NO: 26056 - RNA, 20 nt, synthetic construct
  source 1..20: mol_type = other RNA
cacacaccaaatcatgaaag

SEQ ID NO: 26057 - RNA, 20 nt, synthetic construct
  source 1..20: mol_type = other RNA
cacacaccactacacccggc

SEQ ID NO: 26058 - RNA, 20 nt, synthetic construct
  source 1..20: mol_type = other RNA
cacacaccctttcttaggaa

SEQ ID NO: 26059 - RNA, 20 nt, synthetic construct
  source 1..20: mol_type = other RNA
cacacacctaccaccatgct

SEQ ID NO: 26060 - RNA, 20 nt, synthetic construct
  source 1..20: mol_type = other RNA
cacacacctattcataggta

SEQ ID NO: 26061 - RNA, 20 nt, synthetic construct
  source 1..20: mol_type = other RNA
cacacacgaagtagtttttt

SEQ ID NO: 26062 - RNA, 20 nt, synthetic construct
  source 1..20: mol_type = other RNA
cacacacgtttatattcctt

SEQ ID NO: 26063 - RNA, 20 nt, synthetic construct
  source 1..20: mol_type = other RNA
cacacagagaacagcattat

SEQ ID NO: 26064 - RNA, 20 nt, synthetic construct
  source 1..20: mol_type = other RNA
cacacagagggagcgccacg

SEQ ID NO: 26065 - RNA, 20 nt, synthetic construct
  source 1..20: mol_type = other RNA
cacacaggagaacttgtctc

SEQ ID NO: 26066 - RNA, 20 nt, synthetic construct
  source 1..20: mol_type = other RNA
cacacagtacaaggctagag

SEQ ID NO: 26067 - RNA, 20 nt, synthetic construct
  source 1..20: mol_type = other RNA
cacacagtcctgtgtttctg

SEQ ID NO: 26068 - RNA, 20 nt, synthetic construct
  source 1..20: mol_type = other RNA
cacacagtttgagaagccac

SEQ ID NO: 26069 - RNA, 20 nt, synthetic construct
  source 1..20: mol_type = other RNA
cacacataagggggaatcta

SEQ ID NO: 26070 - RNA, 20 nt, synthetic construct
  source 1..20: mol_type = other RNA
cacacatcagacacctacat

SEQ ID NO: 26071 - RNA, 20 nt, synthetic construct
  source 1..20: mol_type = other RNA
cacacatccacgcgtaaggg

SEQ ID NO: 26072 - RNA, 20 nt, synthetic construct
  source 1..20: mol_type = other RNA
cacacatgaacctgcatggt

SEQ ID NO: 26073 - RNA, 20 nt, synthetic construct
  source 1..20: mol_type = other RNA
cacacattaactatggacat

SEQ ID NO: 26074 - RNA, 20 nt, synthetic construct
  source 1..20: mol_type = other RNA
cacacattagcctagacctc

SEQ ID NO: 26075 - RNA, 20 nt, synthetic construct
  source 1..20: mol_type = other RNA
cacaccaaatcatgaaagtg

SEQ ID NO: 26076 - RNA, 20 nt, synthetic construct
  source 1..20: mol_type = other RNA
cacaccaacatggcacatgt

SEQ ID NO: 26077 - RNA, 20 nt, synthetic construct
  source 1..20: mol_type = other RNA
cacaccaagacatgttaggt

SEQ ID NO: 26078 - RNA, 20 nt, synthetic construct
  source 1..20: mol_type = other RNA
cacaccaaggtttctctcca

SEQ ID NO: 26079 - RNA, 20 nt, synthetic construct
  source 1..20: mol_type = other RNA
cacaccacatccagctaatt

SEQ ID NO: 26080 - RNA, 20 nt, synthetic construct
  source 1..20: mol_type = other RNA
cacaccactacacccggcta

SEQ ID NO: 26081 - RNA, 20 nt, synthetic construct
  source 1..20: mol_type = other RNA
cacaccatgacagagttcca

SEQ ID NO: 26082 - RNA, 20 nt, synthetic construct
  source 1..20: mol_type = other RNA
cacaccatttagatcatctt

SEQ ID NO: 26083 - RNA, 20 nt, synthetic construct
  source 1..20: mol_type = other RNA
cacacccagtatacacgtat

SEQ ID NO: 26084 - RNA, 20 nt, synthetic construct
  source 1..20: mol_type = other RNA
cacacccagttatctctgcc

SEQ ID NO: 26085 - RNA, 20 nt, synthetic construct
  source 1..20: mol_type = other RNA
cacaccctcctaccttccaa

SEQ ID NO: 26086 - RNA, 20 nt, synthetic construct
  source 1..20: mol_type = other RNA
cacacccttggtaaacagca

SEQ ID NO: 26087 - RNA, 20 nt, synthetic construct
  source 1..20: mol_type = other RNA
cacaccctttcttaggaagc

SEQ ID NO: 26088 - RNA, 20 nt, synthetic construct
  source 1..20: mol_type = other RNA
cacaccgctgcattccagcc

SEQ ID NO: 26089 - RNA, 20 nt, synthetic construct
  source 1..20: mol_type = other RNA
cacacctaccaccatgcttg

SEQ ID NO: 26090 - RNA, 20 nt, synthetic construct
  source 1..20: mol_type = other RNA
cacacctaggcctattttag

SEQ ID NO: 26091 - RNA, 20 nt, synthetic construct
  source 1..20: mol_type = other RNA
cacacctattcataggtaat

SEQ ID NO: 26092 - RNA, 20 nt, synthetic construct
  source 1..20: mol_type = other RNA
cacacctgaaattctcaaat

SEQ ID NO: 26093 - RNA, 20 nt, synthetic construct
  source 1..20: mol_type = other RNA
cacacctggcccctttcaag

SEQ ID NO: 26094 - RNA, 20 nt, synthetic construct
  source 1..20: mol_type = other RNA
cacacctgggtatacagcaa

SEQ ID NO: 26095 - RNA, 20 nt, synthetic construct
  source 1..20: mol_type = other RNA
cacacgagaaggacagcttc

SEQ ID NO: 26096 - RNA, 20 nt, synthetic construct
  source 1..20: mol_type = other RNA
cacacgagtattcaagtttc

SEQ ID NO: 26097 - RNA, 20 nt, synthetic construct
  source 1..20: mol_type = other RNA
cacacgcattgcattgacta

SEQ ID NO: 26098 - RNA, 20 nt, synthetic construct
  source 1..20: mol_type = other RNA
cacacgccactgcaggtgtt

SEQ ID NO: 26099 - RNA, 20 nt, synthetic construct
  source 1..20: mol_type = other RNA
cacacgctggaagggagccc

SEQ ID NO: 26100 - RNA, 20 nt, synthetic construct
  source 1..20: mol_type = other RNA
cacacggaaaacattatttt

SEQ ID NO: 26101 - RNA, 20 nt, synthetic construct
  source 1..20: mol_type = other RNA
cacacgggctgggcgcgatg

SEQ ID NO: 26102 - RNA, 20 nt, synthetic construct
  source 1..20: mol_type = other RNA
cacacgggtacacatcctaa

SEQ ID NO: 26103 - RNA, 20 nt, synthetic construct
  source 1..20: mol_type = other RNA
cacacgtttatattcctttt

SEQ ID NO: 26104 - RNA, 20 nt, synthetic construct
  source 1..20: mol_type = other RNA
cacactagacctttcttagg

SEQ ID NO: 26105 - RNA, 20 nt, synthetic construct
  source 1..20: mol_type = other RNA
cacactagccactgggtctt

SEQ ID NO: 26106 - RNA, 20 nt, synthetic construct
  source 1..20: mol_type = other RNA
cacactagctgacccactgg

SEQ ID NO: 26107 - RNA, 20 nt, synthetic construct
  source 1..20: mol_type = other RNA
cacactagtcaccctacaga

SEQ ID NO: 26108 - RNA, 20 nt, synthetic construct
  source 1..20: mol_type = other RNA
cacactataacagatggaac

SEQ ID NO: 26109 - RNA, 20 nt, synthetic construct
  source 1..20: mol_type = other RNA
cacactccagcatccctcca

SEQ ID NO: 26110 - RNA, 20 nt, synthetic construct
  source 1..20: mol_type = other RNA
cacactccccagtggttgtg

SEQ ID NO: 26111 - RNA, 20 nt, synthetic construct
  source 1..20: mol_type = other RNA
cacactcgcactccacttcc

SEQ ID NO: 26112 - RNA, 20 nt, synthetic construct
  source 1..20: mol_type = other RNA
cacactcgtgtatgatttct

SEQ ID NO: 26113 - RNA, 20 nt, synthetic construct
  source 1..20: mol_type = other RNA
cacactcttaataactgcct

SEQ ID NO: 26114 - RNA, 20 nt, synthetic construct
  source 1..20: mol_type = other RNA
cacactcttggtctttctcc

SEQ ID NO: 26115 - RNA, 20 nt, synthetic construct
  source 1..20: mol_type = other RNA
cacactgaaacaatcgcaat

SEQ ID NO: 26116 - RNA, 20 nt, synthetic construct
  source 1..20: mol_type = other RNA
cacactgacaggacagagca

SEQ ID NO: 26117 - RNA, 20 nt, synthetic construct
  source 1..20: mol_type = other RNA
cacactgattttctgcttct

SEQ ID NO: 26118 - RNA, 20 nt, synthetic construct
  source 1..20: mol_type = other RNA
cacactgctcctgcctttgt

SEQ ID NO: 26119 - RNA, 20 nt, synthetic construct
  source 1..20: mol_type = other RNA
cacactgctcttctattcca

SEQ ID NO: 26120 - RNA, 20 nt, synthetic construct
  source 1..20: mol_type = other RNA
cacactgggtaaacaagact

SEQ ID NO: 26121 - RNA, 20 nt, synthetic construct
  source 1..20: mol_type = other RNA
cacactggtcactggccact

SEQ ID NO: 26122 - RNA, 20 nt, synthetic construct
  source 1..20: mol_type = other RNA
cacactgttgtccaggccag

SEQ ID NO: 26123 - RNA, 20 nt, synthetic construct
  source 1..20: mol_type = other RNA
cacactgtttgattactgta

SEQ ID NO: 26124 - RNA, 20 nt, synthetic construct
  source 1..20: mol_type = other RNA
cacacttactaaatgatctt

SEQ ID NO: 26125 - RNA, 20 nt, synthetic construct
  source 1..20: mol_type = other RNA
cacacttagttcaagatgca

SEQ ID NO: 26126 - RNA, 20 nt, synthetic construct
  source 1..20: mol_type = other RNA
cacacttgatggtttggggc

SEQ ID NO: 26127 - RNA, 20 nt, synthetic construct
  source 1..20: mol_type = other RNA
cacacttgcttgggaacagc

SEQ ID NO: 26128 - RNA, 20 nt, synthetic construct
  source 1..20: mol_type = other RNA
cacactttccttggagaaga

SEQ ID NO: 26129 - RNA, 20 nt, synthetic construct
  source 1..20: mol_type = other RNA
cacactttttgtgagtttta

SEQ ID NO: 26130 - RNA, 20 nt, synthetic construct
  source 1..20: mol_type = other RNA
cacagaaacagaaaaatcca

SEQ ID NO: 26131 - RNA, 20 nt, synthetic construct
  source 1..20: mol_type = other RNA
cacagaaagcctcttcagaa

SEQ ID NO: 26132 - RNA, 20 nt, synthetic construct
  source 1..20: mol_type = other RNA
cacagaacactaaaggggat

SEQ ID NO: 26133 - RNA, 20 nt, synthetic construct
  source 1..20: mol_type = other RNA
cacagaaccatgtaacaggt

SEQ ID NO: 26134 - RNA, 20 nt, synthetic construct
  source 1..20: mol_type = other RNA
cacagaactgtcactgacac

SEQ ID NO: 26135 - RNA, 20 nt, synthetic construct
  source 1..20: mol_type = other RNA
cacagaagtgttttgatagt

SEQ ID NO: 26136 - RNA, 20 nt, synthetic construct
  source 1..20: mol_type = other RNA
cacagaatatactcagaaaa

SEQ ID NO: 26137 - RNA, 20 nt, synthetic construct
  source 1..20: mol_type = other RNA
cacagaattactatatgatc

SEQ ID NO: 26138 - RNA, 20 nt, synthetic construct
  source 1..20: mol_type = other RNA
cacagaattattgattggca

SEQ ID NO: 26139 - RNA, 20 nt, synthetic construct
  source 1..20: mol_type = other RNA
cacagacagggaatggggag

SEQ ID NO: 26140 - RNA, 20 nt, synthetic construct
  source 1..20: mol_type = other RNA
cacagacagtaatttataca

SEQ ID NO: 26141 - RNA, 20 nt, synthetic construct
  source 1..20: mol_type = other RNA
cacagacatgaacaatcctt

SEQ ID NO: 26142 - RNA, 20 nt, synthetic construct
  source 1..20: mol_type = other RNA
cacagacgcaaaggatgtca

SEQ ID NO: 26143 - RNA, 20 nt, synthetic construct
  source 1..20: mol_type = other RNA
cacagactcaagcctgataa

SEQ ID NO: 26144 - RNA, 20 nt, synthetic construct
  source 1..20: mol_type = other RNA
cacagactgtgccttgatcc

SEQ ID NO: 26145 - RNA, 20 nt, synthetic construct
  source 1..20: mol_type = other RNA
cacagagaacagcattatct

SEQ ID NO: 26146 - RNA, 20 nt, synthetic construct
  source 1..20: mol_type = other RNA
cacagagccgaaatgcactt

SEQ ID NO: 26147 - RNA, 20 nt, synthetic construct
  source 1..20: mol_type = other RNA
cacagagcctaaaataggcc

SEQ ID NO: 26148 - RNA, 20 nt, synthetic construct
  source 1..20: mol_type = other RNA
cacagaggcaacagtcattc

SEQ ID NO: 26149 - RNA, 20 nt, synthetic construct
  source 1..20: mol_type = other RNA
cacagaggctttttatattt

SEQ ID NO: 26150 - RNA, 20 nt, synthetic construct
  source 1..20: mol_type = other RNA
cacagagggagcgccacgtg

SEQ ID NO: 26151 - RNA, 20 nt, synthetic construct
  source 1..20: mol_type = other RNA
cacagagtcagaaaattaaa

SEQ ID NO: 26152 - RNA, 20 nt, synthetic construct
  source 1..20: mol_type = other RNA
cacagagttcagcttacagt

SEQ ID NO: 26153 - RNA, 20 nt, synthetic construct
  source 1..20: mol_type = other RNA
cacagataatttcttcagaa

SEQ ID NO: 26154 - RNA, 20 nt, synthetic construct
  source 1..20: mol_type = other RNA
cacagatacaactctgacca

SEQ ID NO: 26155 - RNA, 20 nt, synthetic construct
  source 1..20: mol_type = other RNA
cacagatctttttgtgtata

SEQ ID NO: 26156 - RNA, 20 nt, synthetic construct
  source 1..20: mol_type = other RNA
cacagcactgttaactgact

SEQ ID NO: 26157 - RNA, 20 nt, synthetic construct
  source 1..20: mol_type = other RNA
cacagcagggctcctccaag

SEQ ID NO: 26158 - RNA, 20 nt, synthetic construct
  source 1..20: mol_type = other RNA
cacagcatgaatacctattt

SEQ ID NO: 26159 - RNA, 20 nt, synthetic construct
  source 1..20: mol_type = other RNA
cacagccagtcagtgatgga

SEQ ID NO: 26160 - RNA, 20 nt, synthetic construct
  source 1..20: mol_type = other RNA
cacagcgcccggcccgttat

SEQ ID NO: 26161 - RNA, 20 nt, synthetic construct
  source 1..20: mol_type = other RNA
cacagcgtgcaccttacatt

SEQ ID NO: 26162 - RNA, 20 nt, synthetic construct
  source 1..20: mol_type = other RNA
cacagcgtggaatggtcaat

SEQ ID NO: 26163 - RNA, 20 nt, synthetic construct
  source 1..20: mol_type = other RNA
cacagcgttgttcagttgaa

SEQ ID NO: 26164 - RNA, 20 nt, synthetic construct
  source 1..20: mol_type = other RNA
cacagctacactcaatacac

SEQ ID NO: 26165 - RNA, 20 nt, synthetic construct
  source 1..20: mol_type = other RNA
cacagctatcaggccttcca

SEQ ID NO: 26166 - RNA, 20 nt, synthetic construct
  source 1..20: mol_type = other RNA
cacagctctcatgagtcctg

SEQ ID NO: 26167 - RNA, 20 nt, synthetic construct
  source 1..20: mol_type = other RNA
cacagcttaccaagtgccgc

SEQ ID NO: 26168 - RNA, 20 nt, synthetic construct
  source 1..20: mol_type = other RNA
cacagctttcttttccaacc

SEQ ID NO: 26169 - RNA, 20 nt, synthetic construct
  source 1..20: mol_type = other RNA
cacaggaaagatgtctttta

SEQ ID NO: 26170 - RNA, 20 nt, synthetic construct
  source 1..20: mol_type = other RNA
cacaggactgtgtgtgtcca

SEQ ID NO: 26171 - RNA, 20 nt, synthetic construct
  source 1..20: mol_type = other RNA
cacaggagaacttgtctcgg

SEQ ID NO: 26172 - RNA, 20 nt, synthetic construct
  source 1..20: mol_type = other RNA
cacaggagagcgacagctac

SEQ ID NO: 26173 - RNA, 20 nt, synthetic construct
  source 1..20: mol_type = other RNA
cacaggcatcggccgggcgt

SEQ ID NO: 26174 - RNA, 20 nt, synthetic construct
  source 1..20: mol_type = other RNA
cacaggcatctctctaaaaa

SEQ ID NO: 26175 - RNA, 20 nt, synthetic construct
  source 1..20: mol_type = other RNA
cacaggcatgcgccatcaca

SEQ ID NO: 26176 - RNA, 20 nt, synthetic construct
  source 1..20: mol_type = other RNA
cacaggcgttgagccatcat

SEQ ID NO: 26177 - RNA, 20 nt, synthetic construct
  source 1..20: mol_type = other RNA
cacaggctctcttcaccaac

SEQ ID NO: 26178 - RNA, 20 nt, synthetic construct
  source 1..20: mol_type = other RNA
cacaggctgaagggaggaaa

SEQ ID NO: 26179 - RNA, 20 nt, synthetic construct
  source 1..20: mol_type = other RNA
cacaggctttcctacaatac

SEQ ID NO: 26180 - RNA, 20 nt, synthetic construct
  source 1..20: mol_type = other RNA
cacaggctttgacttctcag

SEQ ID NO: 26181 - RNA, 20 nt, synthetic construct
  source 1..20: mol_type = other RNA
cacagggaaaactacatgta

SEQ ID NO: 26182 - RNA, 20 nt, synthetic construct
  source 1..20: mol_type = other RNA
cacagggactgatgaagaac

SEQ ID NO: 26183 - RNA, 20 nt, synthetic construct
  source 1..20: mol_type = other RNA
cacagggagatacttgatta

SEQ ID NO: 26184 - RNA, 20 nt, synthetic construct
  source 1..20: mol_type = other RNA
cacagggcagggagagagaa

SEQ ID NO: 26185 - RNA, 20 nt, synthetic construct
  source 1..20: mol_type = other RNA
cacagggcccagcctcaaca

SEQ ID NO: 26186 - RNA, 20 nt, synthetic construct
  source 1..20: mol_type = other RNA
cacaggtagacatgtgccat

SEQ ID NO: 26187 - RNA, 20 nt, synthetic construct
  source 1..20: mol_type = other RNA
cacaggtttaggtttttctt

SEQ ID NO: 26188 - RNA, 20 nt, synthetic construct
  source 1..20: mol_type = other RNA
cacagtacaaggctagagct

SEQ ID NO: 26189 - RNA, 20 nt, synthetic construct
  source 1..20: mol_type = other RNA
cacagtacgcttttatgtta

SEQ ID NO: 26190 - RNA, 20 nt, synthetic construct
  source 1..20: mol_type = other RNA
cacagtagaagactcagcag

SEQ ID NO: 26191 - RNA, 20 nt, synthetic construct
  source 1..20: mol_type = other RNA
cacagtatgcacaaataatt

SEQ ID NO: 26192 - RNA, 20 nt, synthetic construct
  source 1..20: mol_type = other RNA
cacagtatgcggggtttcag

SEQ ID NO: 26193 - RNA, 20 nt, synthetic construct
  source 1..20: mol_type = other RNA
cacagtatgctgtttacatt

SEQ ID NO: 26194 - RNA, 20 nt, synthetic construct
  source 1..20: mol_type = other RNA
cacagtcacaaagctttaaa

SEQ ID NO: 26195 - RNA, 20 nt, synthetic construct
  source 1..20: mol_type = other RNA
cacagtccactcacctgtca

SEQ ID NO: 26196 - RNA, 20 nt, synthetic construct
  source 1..20: mol_type = other RNA
cacagtccaggaacttacag

SEQ ID NO: 26197 - RNA, 20 nt, synthetic construct
  source 1..20: mol_type = other RNA
cacagtcctgtgtttctgct

SEQ ID NO: 26198 - RNA, 20 nt, synthetic construct
  source 1..20: mol_type = other RNA
cacagtctcccccaggtggt

SEQ ID NO: 26199 - RNA, 20 nt, synthetic construct
  source 1..20: mol_type = other RNA
cacagtctctgcagagcagg

SEQ ID NO: 26200 - RNA, 20 nt, synthetic construct
  source 1..20: mol_type = other RNA
cacagtctgtgcttaaggaa

SEQ ID NO: 26201 - RNA, 20 nt, synthetic construct
  source 1..20: mol_type = other RNA
cacagtgaattctgacttag

SEQ ID NO: 26202 - RNA, 20 nt, synthetic construct
  source 1..20: mol_type = other RNA
cacagtgactttactgttct

SEQ ID NO: 26203 - RNA, 20 nt, synthetic construct
  source 1..20: mol_type = other RNA
cacagtgaggacgctgatga

SEQ ID NO: 26204 - RNA, 20 nt, synthetic construct
  source 1..20: mol_type = other RNA
cacagtgctccatagcttcc

SEQ ID NO: 26205 - RNA, 20 nt, synthetic construct
  source 1..20: mol_type = other RNA
cacagtgttgagaaagcaca

SEQ ID NO: 26206 - RNA, 20 nt, synthetic construct
  source 1..20: mol_type = other RNA
cacagttctagttctaataa

SEQ ID NO: 26207 - RNA, 20 nt, synthetic construct
  source 1..20: mol_type = other RNA
cacagtttgaaactttaaga

SEQ ID NO: 26208 - RNA, 20 nt, synthetic construct
  source 1..20: mol_type = other RNA
cacagtttgagaagccacac

SEQ ID NO: 26209 - RNA, 20 nt, synthetic construct
  source 1..20: mol_type = other RNA
cacataaaaaaggaatctgg

SEQ ID NO: 26210 - RNA, 20 nt, synthetic construct
  source 1..20: mol_type = other RNA
cacataaaaggatatgggcc

SEQ ID NO: 26211 - RNA, 20 nt, synthetic construct
  source 1..20: mol_type = other RNA
cacataaagtcttgctggaa

SEQ ID NO: 26212 - RNA, 20 nt, synthetic construct
  source 1..20: mol_type = other RNA
cacataaatcacaggaaaga

SEQ ID NO: 26213 - RNA, 20 nt, synthetic construct
  source 1..20: mol_type = other RNA
cacataaatttgccacattt

SEQ ID NO: 26214 - RNA, 20 nt, synthetic construct
  source 1..20: mol_type = other RNA
cacataagggggaatctact

SEQ ID NO: 26215 - RNA, 20 nt, synthetic construct
  source 1..20: mol_type = other RNA
cacataaggtatatttctgt

SEQ ID NO: 26216 - RNA, 20 nt, synthetic construct
  source 1..20: mol_type = other RNA
cacataatataaaaagacac

SEQ ID NO: 26217 - RNA, 20 nt, synthetic construct
  source 1..20: mol_type = other RNA
cacataattgaacccactga

SEQ ID NO: 26218 - RNA, 20 nt, synthetic construct
  source 1..20: mol_type = other RNA
cacatacaaaccaaaaaatg

SEQ ID NO: 26219 - RNA, 20 nt, synthetic construct
  source 1..20: mol_type = other RNA
cacatacacagggaaaacta

SEQ ID NO: 26220 - RNA, 20 nt, synthetic construct
  source 1..20: mol_type = other RNA
cacatactgaaagacagacc

SEQ ID NO: 26221 - RNA, 20 nt, synthetic construct
  source 1..20: mol_type = other RNA
cacatactgcatattgaagc

SEQ ID NO: 26222 - RNA, 20 nt, synthetic construct
  source 1..20: mol_type = other RNA
cacatagaagcgctcttcaa

SEQ ID NO: 26223 - RNA, 20 nt, synthetic construct
  source 1..20: mol_type = other RNA
cacatagacctgaatgactg

SEQ ID NO: 26224 - RNA, 20 nt, synthetic construct
  source 1..20: mol_type = other RNA
cacataggatagttaaacat

SEQ ID NO: 26225 - RNA, 20 nt, synthetic construct
  source 1..20: mol_type = other RNA
cacatagtgttaattatttg

SEQ ID NO: 26226 - RNA, 20 nt, synthetic construct
  source 1..20: mol_type = other RNA
cacatatctaattaacatcc

SEQ ID NO: 26227 - RNA, 20 nt, synthetic construct
  source 1..20: mol_type = other RNA
cacatatctttaggtgtttt

SEQ ID NO: 26228 - RNA, 20 nt, synthetic construct
  source 1..20: mol_type = other RNA
cacatatttatcaacacata

SEQ ID NO: 26229 - RNA, 20 nt, synthetic construct
  source 1..20: mol_type = other RNA
cacatattttaaaagtcagc

SEQ ID NO: 26230 - RNA, 20 nt, synthetic construct
  source 1..20: mol_type = other RNA
cacatattttatgctttgtc

SEQ ID NO: 26231 - RNA, 20 nt, synthetic construct
  source 1..20: mol_type = other RNA
cacatcagacacctacatta

SEQ ID NO: 26232 - RNA, 20 nt, synthetic construct
  source 1..20: mol_type = other RNA
cacatcagattttgaagatt

SEQ ID NO: 26233 - RNA, 20 nt, synthetic construct
  source 1..20: mol_type = other RNA
cacatcagcgctaagtgcat

SEQ ID NO: 26234 - RNA, 20 nt, synthetic construct
  source 1..20: mol_type = other RNA
cacatcagtgctgctctgac

SEQ ID NO: 26235 - RNA, 20 nt, synthetic construct
  source 1..20: mol_type = other RNA
cacatcagttaccaccaaga

SEQ ID NO: 26236 - RNA, 20 nt, synthetic construct
  source 1..20: mol_type = other RNA
cacatccacgcgtaagggta

SEQ ID NO: 26237 - RNA, 20 nt, synthetic construct
  source 1..20: mol_type = other RNA
cacatccagaagtcactttt

SEQ ID NO: 26238 - RNA, 20 nt, synthetic construct
  source 1..20: mol_type = other RNA
cacatccagctaattttcat

SEQ ID NO: 26239 - RNA, 20 nt, synthetic construct
  source 1..20: mol_type = other RNA
cacatcctaatacagtaaag

SEQ ID NO: 26240 - RNA, 20 nt, synthetic construct
  source 1..20: mol_type = other RNA
cacatccttgccaacagtta

SEQ ID NO: 26241 - RNA, 20 nt, synthetic construct
  source 1..20: mol_type = other RNA
cacatctcccataccacctg

SEQ ID NO: 26242 - RNA, 20 nt, synthetic construct
  source 1..20: mol_type = other RNA
cacatctgtcttgtgcatcc

SEQ ID NO: 26243 - RNA, 20 nt, synthetic construct
  source 1..20: mol_type = other RNA
cacatgaacctgcatggtgt

SEQ ID NO: 26244 - RNA, 20 nt, synthetic construct
  source 1..20: mol_type = other RNA
cacatgactggccatccttc

SEQ ID NO: 26245 - RNA, 20 nt, synthetic construct
  source 1..20: mol_type = other RNA
cacatgcacaaggtcaagag

SEQ ID NO: 26246 - RNA, 20 nt, synthetic construct
  source 1..20: mol_type = other RNA
cacatgcacactagaccttt

SEQ ID NO: 26247 - RNA, 20 nt, synthetic construct
  source 1..20: mol_type = other RNA
cacatgcttccaaaagcagg

SEQ ID NO: 26248 - RNA, 20 nt, synthetic construct
  source 1..20: mol_type = other RNA
cacatggcatcggggcctac

SEQ ID NO: 26249 - RNA, 20 nt, synthetic construct
  source 1..20: mol_type = other RNA
cacatgggcatgggtccaag

SEQ ID NO: 26250 - RNA, 20 nt, synthetic construct
  source 1..20: mol_type = other RNA
cacatggggcattaattttt

SEQ ID NO: 26251 - RNA, 20 nt, synthetic construct
  source 1..20: mol_type = other RNA
cacatggtgataactggtgc

SEQ ID NO: 26252 - RNA, 20 nt, synthetic construct
  source 1..20: mol_type = other RNA
cacatgtcagccacaagaca

SEQ ID NO: 26253 - RNA, 20 nt, synthetic construct
  source 1..20: mol_type = other RNA
cacatgtcatgggccgggcg

SEQ ID NO: 26254 - RNA, 20 nt, synthetic construct
  source 1..20: mol_type = other RNA
cacatgtggcttgtggctac

SEQ ID NO: 26255 - RNA, 20 nt, synthetic construct
  source 1..20: mol_type = other RNA
cacatgtggttattgagtct

SEQ ID NO: 26256 - RNA, 20 nt, synthetic construct
  source 1..20: mol_type = other RNA
cacatgttactcattatggt

SEQ ID NO: 26257 - RNA, 20 nt, synthetic construct
  source 1..20: mol_type = other RNA
cacatgttccctagaactta

SEQ ID NO: 26258 - RNA, 20 nt, synthetic construct
  source 1..20: mol_type = other RNA
cacatgttgagtcttgttta

SEQ ID NO: 26259 - RNA, 20 nt, synthetic construct
  source 1..20: mol_type = other RNA
cacatgtttggtcaattgat

SEQ ID NO: 26260 - RNA, 20 nt, synthetic construct
  source 1..20: mol_type = other RNA
cacattaaataagggcattt

SEQ ID NO: 26261 - RNA, 20 nt, synthetic construct
  source 1..20: mol_type = other RNA
cacattaactatggacatga

SEQ ID NO: 26262 - RNA, 20 nt, synthetic construct
  source 1..20: mol_type = other RNA
cacattaataagatcataca

SEQ ID NO: 26263 - RNA, 20 nt, synthetic construct
  source 1..20: mol_type = other RNA
cacattagaatcatccgggg

SEQ ID NO: 26264 - RNA, 20 nt, synthetic construct
  source 1..20: mol_type = other RNA
cacattagccactctgaatt

SEQ ID NO: 26265 - RNA, 20 nt, synthetic construct
  source 1..20: mol_type = other RNA
cacattagcctagacctcaa

SEQ ID NO: 26266 - RNA, 20 nt, synthetic construct
  source 1..20: mol_type = other RNA
cacattaggctctgggtcag

SEQ ID NO: 26267 - RNA, 20 nt, synthetic construct
  source 1..20: mol_type = other RNA
cacattcaaaattgttctaa

SEQ ID NO: 26268 - RNA, 20 nt, synthetic construct
  source 1..20: mol_type = other RNA
cacattcaacaacatggatg

SEQ ID NO: 26269 - RNA, 20 nt, synthetic construct
  source 1..20: mol_type = other RNA
cacattcaagcagaaatgag

SEQ ID NO: 26270 - RNA, 20 nt, synthetic construct
  source 1..20: mol_type = other RNA
cacattcacagcgtgcacct

SEQ ID NO: 26271 - RNA, 20 nt, synthetic construct
  source 1..20: mol_type = other RNA
cacattcagaggtatttggg

SEQ ID NO: 26272 - RNA, 20 nt, synthetic construct
  source 1..20: mol_type = other RNA
cacattccaagagaggaata

SEQ ID NO: 26273 - RNA, 20 nt, synthetic construct
  source 1..20: mol_type = other RNA
cacattccagaccagcagtt

SEQ ID NO: 26274 - RNA, 20 nt, synthetic construct
  source 1..20: mol_type = other RNA
cacattcccaaatgtcttaa

SEQ ID NO: 26275 - RNA, 20 nt, synthetic construct
  source 1..20: mol_type = other RNA
cacattccttccgacctgta

SEQ ID NO: 26276 - RNA, 20 nt, synthetic construct
  source 1..20: mol_type = other RNA
cacattccttcttcacacat

SEQ ID NO: 26277 - RNA, 20 nt, synthetic construct
  source 1..20: mol_type = other RNA
cacattcggccaagatctgt

SEQ ID NO: 26278 - RNA, 20 nt, synthetic construct
  source 1..20: mol_type = other RNA
cacattctagtgatgggaga

SEQ ID NO: 26279 - RNA, 20 nt, synthetic construct
  source 1..20: mol_type = other RNA
cacattctgcctgcagactg

SEQ ID NO: 26280 - RNA, 20 nt, synthetic construct
  source 1..20: mol_type = other RNA
cacattcttcaccattccag

SEQ ID NO: 26281 - RNA, 20 nt, synthetic construct
  source 1..20: mol_type = other RNA
cacattgcacagtctccccc

SEQ ID NO: 26282 - RNA, 20 nt, synthetic construct
  source 1..20: mol_type = other RNA
cacattgtatttctgttaga

SEQ ID NO: 26283 - RNA, 20 nt, synthetic construct
  source 1..20: mol_type = other RNA
cacatttaagaagggaacac

SEQ ID NO: 26284 - RNA, 20 nt, synthetic construct
  source 1..20: mol_type = other RNA
cacatttagtttcatctatg

SEQ ID NO: 26285 - RNA, 20 nt, synthetic construct
  source 1..20: mol_type = other RNA
cacatttcatagcagaatgg

SEQ ID NO: 26286 - RNA, 20 nt, synthetic construct
  source 1..20: mol_type = other RNA
cacatttcgccttctcagaa

SEQ ID NO: 26287 - RNA, 20 nt, synthetic construct
  source 1..20: mol_type = other RNA
cacatttctaatttccaaga

SEQ ID NO: 26288 - RNA, 20 nt, synthetic construct
  source 1..20: mol_type = other RNA
cacatttctacacaacatgt

SEQ ID NO: 26289 - RNA, 20 nt, synthetic construct
  source 1..20: mol_type = other RNA
cacatttgaaagaaagaagg

SEQ ID NO: 26290 - RNA, 20 nt, synthetic construct
  source 1..20: mol_type = other RNA
cacatttgctttactactgc

SEQ ID NO: 26291 - RNA, 20 nt, synthetic construct
  source 1..20: mol_type = other RNA
cacatttggttttactactg

SEQ ID NO: 26292 - RNA, 20 nt, synthetic construct
  source 1..20: mol_type = other RNA
cacattttaccaaaacagct

SEQ ID NO: 26293 - RNA, 20 nt, synthetic construct
  source 1..20: mol_type = other RNA
cacattttcttatctaggcg

SEQ ID NO: 26294 - RNA, 20 nt, synthetic construct
  source 1..20: mol_type = other RNA
cacattttgaatcatgggag

SEQ ID NO: 26295 - RNA, 20 nt, synthetic construct
  source 1..20: mol_type = other RNA
cacattttgtgacaagttca

SEQ ID NO: 26296 - RNA, 20 nt, synthetic construct
  source 1..20: mol_type = other RNA
cacattttgttcattcatct

SEQ ID NO: 26297 - RNA, 20 nt, synthetic construct
  source 1..20: mol_type = other RNA
cacatttttgacagccacgt

SEQ ID NO: 26298 - RNA, 20 nt, synthetic construct
  source 1..20: mol_type = other RNA
cacattttttggtttgtatg

SEQ ID NO: 26299 - RNA, 20 nt, synthetic construct
  source 1..20: mol_type = other RNA
caccaaaaaagcaccagtta

SEQ ID NO: 26300 - RNA, 20 nt, synthetic construct
  source 1..20: mol_type = other RNA
caccaaaactacaggcaaca

SEQ ID NO: 26301 - RNA, 20 nt, synthetic construct
  source 1..20: mol_type = other RNA
caccaaacaccttacactca

SEQ ID NO: 26302 - RNA, 20 nt, synthetic construct
  source 1..20: mol_type = other RNA
caccaaacgtttagatgaat

SEQ ID NO: 26303 - RNA, 20 nt, synthetic construct
  source 1..20: mol_type = other RNA
caccaaactcaaaaggacat

SEQ ID NO: 26304 - RNA, 20 nt, synthetic construct
  source 1..20: mol_type = other RNA
caccaaagacttcaggaaca

SEQ ID NO: 26305 - RNA, 20 nt, synthetic construct
  source 1..20: mol_type = other RNA
caccaaagattatgttccac

SEQ ID NO: 26306 - RNA, 20 nt, synthetic construct
  source 1..20: mol_type = other RNA
caccaaagatttactaaact

SEQ ID NO: 26307 - RNA, 20 nt, synthetic construct
  source 1..20: mol_type = other RNA
caccaaatcatgaaagtgga

SEQ ID NO: 26308 - RNA, 20 nt, synthetic construct
  source 1..20: mol_type = other RNA
caccaacacaaagccttctc

SEQ ID NO: 26309 - RNA, 20 nt, synthetic construct
  source 1..20: mol_type = other RNA
caccaacacctgcagtggcg

SEQ ID NO: 26310 - RNA, 20 nt, synthetic construct
  source 1..20: mol_type = other RNA
caccaacagatcctcacatc

SEQ ID NO: 26311 - RNA, 20 nt, synthetic construct
  source 1..20: mol_type = other RNA
caccaacatccacagctttc

SEQ ID NO: 26312 - RNA, 20 nt, synthetic construct
  source 1..20: mol_type = other RNA
caccaacatggcacatgtct

SEQ ID NO: 26313 - RNA, 20 nt, synthetic construct
  source 1..20: mol_type = other RNA
caccaacccttgttggacag

SEQ ID NO: 26314 - RNA, 20 nt, synthetic construct
  source 1..20: mol_type = other RNA
caccaactccacattgtctt

SEQ ID NO: 26315 - RNA, 20 nt, synthetic construct
  source 1..20: mol_type = other RNA
caccaactgaagcggggctg

SEQ ID NO: 26316 - RNA, 20 nt, synthetic construct
  source 1..20: mol_type = other RNA
caccaagaaaaagcagagaa

SEQ ID NO: 26317 - RNA, 20 nt, synthetic construct
  source 1..20: mol_type = other RNA
caccaagacatgttaggttg

SEQ ID NO: 26318 - RNA, 20 nt, synthetic construct
  source 1..20: mol_type = other RNA
caccaagcaacactaaagat

SEQ ID NO: 26319 - RNA, 20 nt, synthetic construct
  source 1..20: mol_type = other RNA
caccaagccctgccttaaaa

SEQ ID NO: 26320 - RNA, 20 nt, synthetic construct
  source 1..20: mol_type = other RNA
caccaaggtttctctccaag

SEQ ID NO: 26321 - RNA, 20 nt, synthetic construct
  source 1..20: mol_type = other RNA
caccaattgttaacatttct

SEQ ID NO: 26322 - RNA, 20 nt, synthetic construct
  source 1..20: mol_type = other RNA
caccacacttgcttgggaac

SEQ ID NO: 26323 - RNA, 20 nt, synthetic construct
  source 1..20: mol_type = other RNA
caccacatccagctaatttt

SEQ ID NO: 26324 - RNA, 20 nt, synthetic construct
  source 1..20: mol_type = other RNA
caccacattcggccaagatc

SEQ ID NO: 26325 - RNA, 20 nt, synthetic construct
  source 1..20: mol_type = other RNA
caccacccttgatgtcacaa

SEQ ID NO: 26326 - RNA, 20 nt, synthetic construct
  source 1..20: mol_type = other RNA
caccacgtccggtcgttgga

SEQ ID NO: 26327 - RNA, 20 nt, synthetic construct
  source 1..20: mol_type = other RNA
caccactaatgtcacatttt

SEQ ID NO: 26328 - RNA, 20 nt, synthetic construct
  source 1..20: mol_type = other RNA
caccactacacccggctaat

SEQ ID NO: 26329 - RNA, 20 nt, synthetic construct
  source 1..20: mol_type = other RNA
caccactagagtattaccta

SEQ ID NO: 26330 - RNA, 20 nt, synthetic construct
  source 1..20: mol_type = other RNA
caccactccaccttagccca

SEQ ID NO: 26331 - RNA, 20 nt, synthetic construct
  source 1..20: mol_type = other RNA
caccactcccggccgtattt

SEQ ID NO: 26332 - RNA, 20 nt, synthetic construct
  source 1..20: mol_type = other RNA
caccactgagagggaagttt

SEQ ID NO: 26333 - RNA, 20 nt, synthetic construct
  source 1..20: mol_type = other RNA
caccacttcgagaagggaag

SEQ ID NO: 26334 - RNA, 20 nt, synthetic construct
  source 1..20: mol_type = other RNA
caccagaactacacattcca

SEQ ID NO: 26335 - RNA, 20 nt, synthetic construct
  source 1..20: mol_type = other RNA
caccagacaaaaatagagga

SEQ ID NO: 26336 - RNA, 20 nt, synthetic construct
  source 1..20: mol_type = other RNA
caccagatactcaatcagtg

SEQ ID NO: 26337 - RNA, 20 nt, synthetic construct
  source 1..20: mol_type = other RNA
caccagatactcatgcttgc

SEQ ID NO: 26338 - RNA, 20 nt, synthetic construct
  source 1..20: mol_type = other RNA
caccagcataagacccctca

SEQ ID NO: 26339 - RNA, 20 nt, synthetic construct
  source 1..20: mol_type = other RNA
caccagcatcttttgacgcg

SEQ ID NO: 26340 - RNA, 20 nt, synthetic construct
  source 1..20: mol_type = other RNA
caccagcggcatacaggagt

SEQ ID NO: 26341 - RNA, 20 nt, synthetic construct
  source 1..20: mol_type = other RNA
caccaggctggaatgcagcg

SEQ ID NO: 26342 - RNA, 20 nt, synthetic construct
  source 1..20: mol_type = other RNA
caccagggcctctgaagaca

SEQ ID NO: 26343 - RNA, 20 nt, synthetic construct
  source 1..20: mol_type = other RNA
caccaggggctgggggatcc

SEQ ID NO: 26344 - RNA, 20 nt, synthetic construct
  source 1..20: mol_type = other RNA
caccagtaagattctgtctc

SEQ ID NO: 26345 - RNA, 20 nt, synthetic construct
  source 1..20: mol_type = other RNA
caccagttatcaccatgtgc

SEQ ID NO: 26346 - RNA, 20 nt, synthetic construct
  source 1..20: mol_type = other RNA
caccagtttctaattagaat

SEQ ID NO: 26347 - RNA, 20 nt, synthetic construct
  source 1..20: mol_type = other RNA
caccatagctgaaggcactg

SEQ ID NO: 26348 - RNA, 20 nt, synthetic construct
  source 1..20: mol_type = other RNA
caccatcatcatcaggctgg

SEQ ID NO: 26349 - RNA, 20 nt, synthetic construct
  source 1..20: mol_type = other RNA
caccatctaacagaaataca

SEQ ID NO: 26350 - RNA, 20 nt, synthetic construct
  source 1..20: mol_type = other RNA
caccatctctctgcctcaaa

SEQ ID NO: 26351 - RNA, 20 nt, synthetic construct
  source 1..20: mol_type = other RNA
caccatctgataagcccaac

SEQ ID NO: 26352 - RNA, 20 nt, synthetic construct
  source 1..20: mol_type = other RNA
caccatgacagagttccacc

SEQ ID NO: 26353 - RNA, 20 nt, synthetic construct
  source 1..20: mol_type = other RNA
caccatgatgcagcccctgc

SEQ ID NO: 26354 - RNA, 20 nt, synthetic construct
  source 1..20: mol_type = other RNA
caccatgcaggttcatgtgt

SEQ ID NO: 26355 - RNA, 20 nt, synthetic construct
  source 1..20: mol_type = other RNA
caccatggcaggtttcaagt

SEQ ID NO: 26356 - RNA, 20 nt, synthetic construct
  source 1..20: mol_type = other RNA
caccatgtgcttatcaataa

SEQ ID NO: 26357 - RNA, 20 nt, synthetic construct
  source 1..20: mol_type = other RNA
caccattccagccattctct

SEQ ID NO: 26358 - RNA, 20 nt, synthetic construct
  source 1..20: mol_type = other RNA
caccatttagatcatcttat

SEQ ID NO: 26359 - RNA, 20 nt, synthetic construct
  source 1..20: mol_type = other RNA
caccatttattgtcaaggtc

SEQ ID NO: 26360 - RNA, 20 nt, synthetic construct
  source 1..20: mol_type = other RNA
caccattttttcaccagcgg

SEQ ID NO: 26361 - RNA, 20 nt, synthetic construct
  source 1..20: mol_type = other RNA
cacccaagaatttcatgcct

SEQ ID NO: 26362 - RNA, 20 nt, synthetic construct
  source 1..20: mol_type = other RNA
cacccaagccacagcgtgga

SEQ ID NO: 26363 - RNA, 20 nt, synthetic construct
  source 1..20: mol_type = other RNA
cacccaagtggagcctgctc

SEQ ID NO: 26364 - RNA, 20 nt, synthetic construct
  source 1..20: mol_type = other RNA
cacccacgtggagtgcaatg

SEQ ID NO: 26365 - RNA, 20 nt, synthetic construct
  source 1..20: mol_type = other RNA
cacccacttgtcccatggtc

SEQ ID NO: 26366 - RNA, 20 nt, synthetic construct
  source 1..20: mol_type = other RNA
cacccagaccaagtttaacc

SEQ ID NO: 26367 - RNA, 20 nt, synthetic construct
  source 1..20: mol_type = other RNA
cacccagagcgggtttcctc

SEQ ID NO: 26368 - RNA, 20 nt, synthetic construct
  source 1..20: mol_type = other RNA
cacccagctcgaccagggga

SEQ ID NO: 26369 - RNA, 20 nt, synthetic construct
  source 1..20: mol_type = other RNA
cacccagtatacacgtattt

SEQ ID NO: 26370 - RNA, 20 nt, synthetic construct
  source 1..20: mol_type = other RNA
cacccagttatctctgccct

SEQ ID NO: 26371 - RNA, 20 nt, synthetic construct
  source 1..20: mol_type = other RNA
cacccagttcaccagtttct

SEQ ID NO: 26372 - RNA, 20 nt, synthetic construct
  source 1..20: mol_type = other RNA
cacccatccacccacttgtc

SEQ ID NO: 26373 - RNA, 20 nt, synthetic construct
  source 1..20: mol_type = other RNA
cacccatgaagccagcatta

SEQ ID NO: 26374 - RNA, 20 nt, synthetic construct
  source 1..20: mol_type = other RNA
cacccctgctctgcacgtac

SEQ ID NO: 26375 - RNA, 20 nt, synthetic construct
  source 1..20: mol_type = other RNA
cacccgaagaggacgatttt

SEQ ID NO: 26376 - RNA, 20 nt, synthetic construct
  source 1..20: mol_type = other RNA
cacccgacccactagtgaag

SEQ ID NO: 26377 - RNA, 20 nt, synthetic construct
  source 1..20: mol_type = other RNA
cacccggctaattaaacaaa

SEQ ID NO: 26378 - RNA, 20 nt, synthetic construct
  source 1..20: mol_type = other RNA
cacccgtccaatttctttgg

SEQ ID NO: 26379 - RNA, 20 nt, synthetic construct
  source 1..20: mol_type = other RNA
caccctacagactcaataac

SEQ ID NO: 26380 - RNA, 20 nt, synthetic construct
  source 1..20: mol_type = other RNA
caccctaggtagggttgggg

SEQ ID NO: 26381 - RNA, 20 nt, synthetic construct
  source 1..20: mol_type = other RNA
caccctatttatgttgcaca

SEQ ID NO: 26382 - RNA, 20 nt, synthetic construct
  source 1..20: mol_type = other RNA
caccctcaaatgtctcattg

SEQ ID NO: 26383 - RNA, 20 nt, synthetic construct
  source 1..20: mol_type = other RNA
caccctcaggactctgctca

SEQ ID NO: 26384 - RNA, 20 nt, synthetic construct
  source 1..20: mol_type = other RNA
caccctcctaccttccaaag

SEQ ID NO: 26385 - RNA, 20 nt, synthetic construct
  source 1..20: mol_type = other RNA
caccctcctcctcctggcca

SEQ ID NO: 26386 - RNA, 20 nt, synthetic construct
  source 1..20: mol_type = other RNA
caccctgagcatccccgctg

SEQ ID NO: 26387 - RNA, 20 nt, synthetic construct
  source 1..20: mol_type = other RNA
caccctgccccttatcctct

SEQ ID NO: 26388 - RNA, 20 nt, synthetic construct
  source 1..20: mol_type = other RNA
caccctgcgaaggcaatgta

SEQ ID NO: 26389 - RNA, 20 nt, synthetic construct
  source 1..20: mol_type = other RNA
caccctgctccagtatgacc

SEQ ID NO: 26390 - RNA, 20 nt, synthetic construct
  source 1..20: mol_type = other RNA
caccctgggaaagcctggct

SEQ ID NO: 26391 - RNA, 20 nt, synthetic construct
  source 1..20: mol_type = other RNA
cacccttataaaatgagggt

SEQ ID NO: 26392 - RNA, 20 nt, synthetic construct
  source 1..20: mol_type = other RNA
cacccttgaaaatttccagc

SEQ ID NO: 26393 - RNA, 20 nt, synthetic construct
  source 1..20: mol_type = other RNA
cacccttgatgtcacaagcc

SEQ ID NO: 26394 - RNA, 20 nt, synthetic construct
  source 1..20: mol_type = other RNA
cacccttgctgcttctaccc

SEQ ID NO: 26395 - RNA, 20 nt, synthetic construct
  source 1..20: mol_type = other RNA
cacccttggtaaacagcagt

SEQ ID NO: 26396 - RNA, 20 nt, synthetic construct
  source 1..20: mol_type = other RNA
cacccttgtaatcaagtatc

SEQ ID NO: 26397 - RNA, 20 nt, synthetic construct
  source 1..20: mol_type = other RNA
caccctttcttaggaagcta

SEQ ID NO: 26398 - RNA, 20 nt, synthetic construct
  source 1..20: mol_type = other RNA
caccgcaacatctgcctccc

SEQ ID NO: 26399 - RNA, 20 nt, synthetic construct
  source 1..20: mol_type = other RNA
caccgcacctggccgggatt

SEQ ID NO: 26400 - RNA, 20 nt, synthetic construct
  source 1..20: mol_type = other RNA
caccgcactcagcctgttgg

SEQ ID NO: 26401 - RNA, 20 nt, synthetic construct
  source 1..20: mol_type = other RNA
caccgccttcctaccctgcc

SEQ ID NO: 26402 - RNA, 20 nt, synthetic construct
  source 1..20: mol_type = other RNA
caccgcgcccggccaaatat

SEQ ID NO: 26403 - RNA, 20 nt, synthetic construct
  source 1..20: mol_type = other RNA
caccgcgcccggcccagatt

SEQ ID NO: 26404 - RNA, 20 nt, synthetic construct
  source 1..20: mol_type = other RNA
caccgcgcccggccgagaaa

SEQ ID NO: 26405 - RNA, 20 nt, synthetic construct
  source 1..20: mol_type = other RNA
caccgcgcctggtgattaaa

SEQ ID NO: 26406 - RNA, 20 nt, synthetic construct
  source 1..20: mol_type = other RNA
caccgctccacgcccattag

SEQ ID NO: 26407 - RNA, 20 nt, synthetic construct
  source 1..20: mol_type = other RNA
caccgctgcattccagcctg

SEQ ID NO: 26408 - RNA, 20 nt, synthetic construct
  source 1..20: mol_type = other RNA
caccgtgacagaacaaataa

SEQ ID NO: 26409 - RNA, 20 nt, synthetic construct
  source 1..20: mol_type = other RNA
caccgtgcaactagagaaag

SEQ ID NO: 26410 - RNA, 20 nt, synthetic construct
  source 1..20: mol_type = other RNA
caccgtgcccggccagacat

SEQ ID NO: 26411 - RNA, 20 nt, synthetic construct
  source 1..20: mol_type = other RNA
caccgtgccgggcttggtat

SEQ ID NO: 26412 - RNA, 20 nt, synthetic construct
  source 1..20: mol_type = other RNA
cacctaaaaggttgcttaat

SEQ ID NO: 26413 - RNA, 20 nt, synthetic construct
  source 1..20: mol_type = other RNA
cacctaaagatatgtgtagg

SEQ ID NO: 26414 - RNA, 20 nt, synthetic construct
  source 1..20: mol_type = other RNA
cacctaacaatgattatttc

SEQ ID NO: 26415 - RNA, 20 nt, synthetic construct
  source 1..20: mol_type = other RNA
cacctaactactaataaatg

SEQ ID NO: 26416 - RNA, 20 nt, synthetic construct
  source 1..20: mol_type = other RNA
cacctaataaaatgtttagc

SEQ ID NO: 26417 - RNA, 20 nt, synthetic construct
  source 1..20: mol_type = other RNA
cacctacaatattaactttt

SEQ ID NO: 26418 - RNA, 20 nt, synthetic construct
  source 1..20: mol_type = other RNA
cacctacattaatctcatcc

SEQ ID NO: 26419 - RNA, 20 nt, synthetic construct
  source 1..20: mol_type = other RNA
cacctagcctctctgggctt

SEQ ID NO: 26420 - RNA, 20 nt, synthetic construct
  source 1..20: mol_type = other RNA
cacctagctgttttcatgcg

SEQ ID NO: 26421 - RNA, 20 nt, synthetic construct
  source 1..20: mol_type = other RNA
cacctaggcctattttaggc

SEQ ID NO: 26422 - RNA, 20 nt, synthetic construct
  source 1..20: mol_type = other RNA
cacctattcataggtaatac

SEQ ID NO: 26423 - RNA, 20 nt, synthetic construct
  source 1..20: mol_type = other RNA
cacctcaaactagaaaaaga

SEQ ID NO: 26424 - RNA, 20 nt, synthetic construct
  source 1..20: mol_type = other RNA
cacctcaaggcagaacacac

SEQ ID NO: 26425 - RNA, 20 nt, synthetic construct
  source 1..20: mol_type = other RNA
cacctcaaggccaactgtcc

SEQ ID NO: 26426 - RNA, 20 nt, synthetic construct
  source 1..20: mol_type = other RNA
cacctcaagtgatgcaactc

SEQ ID NO: 26427 - RNA, 20 nt, synthetic construct
  source 1..20: mol_type = other RNA
cacctcacattcacagcgtg

SEQ ID NO: 26428 - RNA, 20 nt, synthetic construct
  source 1..20: mol_type = other RNA
cacctcagaaacaaacaaaa

SEQ ID NO: 26429 - RNA, 20 nt, synthetic construct
  source 1..20: mol_type = other RNA
cacctcagccccacaagtag

SEQ ID NO: 26430 - RNA, 20 nt, synthetic construct
  source 1..20: mol_type = other RNA
cacctcagttaaacccaaca

SEQ ID NO: 26431 - RNA, 20 nt, synthetic construct
  source 1..20: mol_type = other RNA
cacctcatccggtctcagtt

SEQ ID NO: 26432 - RNA, 20 nt, synthetic construct
  source 1..20: mol_type = other RNA
cacctccagtgtcctgaatg

SEQ ID NO: 26433 - RNA, 20 nt, synthetic construct
  source 1..20: mol_type = other RNA
cacctccatcactgactggc

SEQ ID NO: 26434 - RNA, 20 nt, synthetic construct
  source 1..20: mol_type = other RNA
cacctcctccggggacccag

SEQ ID NO: 26435 - RNA, 20 nt, synthetic construct
  source 1..20: mol_type = other RNA
cacctcgggttcaagcccca

SEQ ID NO: 26436 - RNA, 20 nt, synthetic construct
  source 1..20: mol_type = other RNA
cacctctacacaaaaatcca

SEQ ID NO: 26437 - RNA, 20 nt, synthetic construct
  source 1..20: mol_type = other RNA
cacctctccgggtaaaaagc

SEQ ID NO: 26438 - RNA, 20 nt, synthetic construct
  source 1..20: mol_type = other RNA
cacctctggactcagggtca

SEQ ID NO: 26439 - RNA, 20 nt, synthetic construct
  source 1..20: mol_type = other RNA
cacctgaaatctgatttgtt

SEQ ID NO: 26440 - RNA, 20 nt, synthetic construct
  source 1..20: mol_type = other RNA
cacctgaaattctcaaatga

SEQ ID NO: 26441 - RNA, 20 nt, synthetic construct
  source 1..20: mol_type = other RNA
cacctgacaagtagtacaaa

SEQ ID NO: 26442 - RNA, 20 nt, synthetic construct
  source 1..20: mol_type = other RNA
cacctgaggggtcttatgct

SEQ ID NO: 26443 - RNA, 20 nt, synthetic construct
  source 1..20: mol_type = other RNA
cacctgcagtggcgtgtgcc

SEQ ID NO: 26444 - RNA, 20 nt, synthetic construct
  source 1..20: mol_type = other RNA
cacctgcgagcggcgggctt

SEQ ID NO: 26445 - RNA, 20 nt, synthetic construct
  source 1..20: mol_type = other RNA
cacctgctctttatctccac

SEQ ID NO: 26446 - RNA, 20 nt, synthetic construct
  source 1..20: mol_type = other RNA
cacctggatcaagtgggatt

SEQ ID NO: 26447 - RNA, 20 nt, synthetic construct
  source 1..20: mol_type = other RNA
cacctggcaacaaaggcgaa

SEQ ID NO: 26448 - RNA, 20 nt, synthetic construct
  source 1..20: mol_type = other RNA
cacctggcccctttcaagat

SEQ ID NO: 26449 - RNA, 20 nt, synthetic construct
  source 1..20: mol_type = other RNA
cacctggccgggatttactt

SEQ ID NO: 26450 - RNA, 20 nt, synthetic construct
  source 1..20: mol_type = other RNA
cacctgggggagactgtgca

SEQ ID NO: 26451 - RNA, 20 nt, synthetic construct
  source 1..20: mol_type = other RNA
cacctgggtatacagcaaaa

SEQ ID NO: 26452 - RNA, 20 nt, synthetic construct
  source 1..20: mol_type = other RNA
cacctgtataaataaaatgt

SEQ ID NO: 26453 - RNA, 20 nt, synthetic construct
  source 1..20: mol_type = other RNA
cacctgtcagaaacaccaac

SEQ ID NO: 26454 - RNA, 20 nt, synthetic construct
  source 1..20: mol_type = other RNA
cacctgtcatgtcaaatttt

SEQ ID NO: 26455 - RNA, 20 nt, synthetic construct
  source 1..20: mol_type = other RNA
cacctgtttaaaaagaaaaa

SEQ ID NO: 26456 - RNA, 20 nt, synthetic construct
  source 1..20: mol_type = other RNA
caccttacactcaaaagcca

SEQ ID NO: 26457 - RNA, 20 nt, synthetic construct
  source 1..20: mol_type = other RNA
caccttacattgtaatcctg

SEQ ID NO: 26458 - RNA, 20 nt, synthetic construct
  source 1..20: mol_type = other RNA
caccttagcccaagctacca

SEQ ID NO: 26459 - RNA, 20 nt, synthetic construct
  source 1..20: mol_type = other RNA
caccttcagaagccctgcag

SEQ ID NO: 26460 - RNA, 20 nt, synthetic construct
  source 1..20: mol_type = other RNA
caccttccctactcactgaa

SEQ ID NO: 26461 - RNA, 20 nt, synthetic construct
  source 1..20: mol_type = other RNA
caccttctgctgggcccact

SEQ ID NO: 26462 - RNA, 20 nt, synthetic construct
  source 1..20: mol_type = other RNA
caccttgaacatgaacgaga

SEQ ID NO: 26463 - RNA, 20 nt, synthetic construct
  source 1..20: mol_type = other RNA
caccttgaactgggacttct

SEQ ID NO: 26464 - RNA, 20 nt, synthetic construct
  source 1..20: mol_type = other RNA
caccttgattttgataaaaa

SEQ ID NO: 26465 - RNA, 20 nt, synthetic construct
  source 1..20: mol_type = other RNA
caccttgggaggctgaggct

SEQ ID NO: 26466 - RNA, 20 nt, synthetic construct
  source 1..20: mol_type = other RNA
cacctttattaactagaatt

SEQ ID NO: 26467 - RNA, 20 nt, synthetic construct
  source 1..20: mol_type = other RNA
cacctttcctgcccctccac

SEQ ID NO: 26468 - RNA, 20 nt, synthetic construct
  source 1..20: mol_type = other RNA
cacctttgtattcatccagt

SEQ ID NO: 26469 - RNA, 20 nt, synthetic construct
  source 1..20: mol_type = other RNA
caccttttttggtatttttt

SEQ ID NO: 26470 - RNA, 20 nt, synthetic construct
  source 1..20: mol_type = other RNA
cacgaaaatatccctggggt

SEQ ID NO: 26471 - RNA, 20 nt, synthetic construct
  source 1..20: mol_type = other RNA
cacgaaagcggtcaacgcac

SEQ ID NO: 26472 - RNA, 20 nt, synthetic construct
  source 1..20: mol_type = other RNA
cacgagaaaagcacaggcat

SEQ ID NO: 26473 - RNA, 20 nt, synthetic construct
  source 1..20: mol_type = other RNA
cacgagaaggacagcttcca

SEQ ID NO: 26474 - RNA, 20 nt, synthetic construct
  source 1..20: mol_type = other RNA
cacgagactgttagggactt

SEQ ID NO: 26475 - RNA, 20 nt, synthetic construct
  source 1..20: mol_type = other RNA
cacgagtaatggatgttttt

SEQ ID NO: 26476 - RNA, 20 nt, synthetic construct
  source 1..20: mol_type = other RNA
cacgagtattcaagtttcac

SEQ ID NO: 26477 - RNA, 20 nt, synthetic construct
  source 1..20: mol_type = other RNA
cacgagtgtgtttcgcaaag

SEQ ID NO: 26478 - RNA, 20 nt, synthetic construct
  source 1..20: mol_type = other RNA
cacgatactttttattttca

SEQ ID NO: 26479 - RNA, 20 nt, synthetic construct
  source 1..20: mol_type = other RNA
cacgatgcttaggtaagaaa

SEQ ID NO: 26480 - RNA, 20 nt, synthetic construct
  source 1..20: mol_type = other RNA
cacgattctgacccagagcc

SEQ ID NO: 26481 - RNA, 20 nt, synthetic construct
  source 1..20: mol_type = other RNA
cacgcacagggagatacttg

SEQ ID NO: 26482 - RNA, 20 nt, synthetic construct
  source 1..20: mol_type = other RNA
cacgcagaacagtgtttaca

SEQ ID NO: 26483 - RNA, 20 nt, synthetic construct
  source 1..20: mol_type = other RNA
cacgcagaaccactgagcac

SEQ ID NO: 26484 - RNA, 20 nt, synthetic construct
  source 1..20: mol_type = other RNA
cacgcagtttgttctgctgt

SEQ ID NO: 26485 - RNA, 20 nt, synthetic construct
  source 1..20: mol_type = other RNA
cacgcatctggtctatctca

SEQ ID NO: 26486 - RNA, 20 nt, synthetic construct
  source 1..20: mol_type = other RNA
cacgcattgcattgactacc

SEQ ID NO: 26487 - RNA, 20 nt, synthetic construct
  source 1..20: mol_type = other RNA
cacgccactgcaggtgttgg

SEQ ID NO: 26488 - RNA, 20 nt, synthetic construct
  source 1..20: mol_type = other RNA
cacgccactgcattccgcct

SEQ ID NO: 26489 - RNA, 20 nt, synthetic construct
  source 1..20: mol_type = other RNA
cacgccatctcgcccagcta

SEQ ID NO: 26490 - RNA, 20 nt, synthetic construct
  source 1..20: mol_type = other RNA
cacgcccattaggatagcta

SEQ ID NO: 26491 - RNA, 20 nt, synthetic construct
  source 1..20: mol_type = other RNA
cacgcccggccgatgcctgt

SEQ ID NO: 26492 - RNA, 20 nt, synthetic construct
  source 1..20: mol_type = other RNA
cacgccttcgcgggcacctt

SEQ ID NO: 26493 - RNA, 20 nt, synthetic construct
  source 1..20: mol_type = other RNA
cacgcgtaagggtacagaac

SEQ ID NO: 26494 - RNA, 20 nt, synthetic construct
  source 1..20: mol_type = other RNA
cacgctggaagggagcccaa

SEQ ID NO: 26495 - RNA, 20 nt, synthetic construct
  source 1..20: mol_type = other RNA
cacgctgtgaatgtgaggtg

SEQ ID NO: 26496 - RNA, 20 nt, synthetic construct
  source 1..20: mol_type = other RNA
cacgctgtggcttgggtgac

SEQ ID NO: 26497 - RNA, 20 nt, synthetic construct
  source 1..20: mol_type = other RNA
cacggaaaacattattttct

SEQ ID NO: 26498 - RNA, 20 nt, synthetic construct
  source 1..20: mol_type = other RNA
cacggaatgcccctttgagc

SEQ ID NO: 26499 - RNA, 20 nt, synthetic construct
  source 1..20: mol_type = other RNA
cacggacttggcacaggaga

SEQ ID NO: 26500 - RNA, 20 nt, synthetic construct
  source 1..20: mol_type = other RNA
cacggctgattataaccttg

SEQ ID NO: 26501 - RNA, 20 nt, synthetic construct
  source 1..20: mol_type = other RNA
cacgggctgggcgcgatggc

SEQ ID NO: 26502 - RNA, 20 nt, synthetic construct
  source 1..20: mol_type = other RNA
cacgggtaaaaataaatcta

SEQ ID NO: 26503 - RNA, 20 nt, synthetic construct
  source 1..20: mol_type = other RNA
cacgggtacacatcctaata

SEQ ID NO: 26504 - RNA, 20 nt, synthetic construct
  source 1..20: mol_type = other RNA
cacggtctcacactgttgtc

SEQ ID NO: 26505 - RNA, 20 nt, synthetic construct
  source 1..20: mol_type = other RNA
cacggtgaagaaccgactga

SEQ ID NO: 26506 - RNA, 20 nt, synthetic construct
  source 1..20: mol_type = other RNA
cacggtgccctacatatggc

SEQ ID NO: 26507 - RNA, 20 nt, synthetic construct
  source 1..20: mol_type = other RNA
cacgtactagtcagcacact

SEQ ID NO: 26508 - RNA, 20 nt, synthetic construct
  source 1..20: mol_type = other RNA
cacgtatttatattttggta

SEQ ID NO: 26509 - RNA, 20 nt, synthetic construct
  source 1..20: mol_type = other RNA
cacgtcaccgcaacctccgc

SEQ ID NO: 26510 - RNA, 20 nt, synthetic construct
  source 1..20: mol_type = other RNA
cacgtccggtcgttggattt

SEQ ID NO: 26511 - RNA, 20 nt, synthetic construct
  source 1..20: mol_type = other RNA
cacgtctgtggtctcagctc

SEQ ID NO: 26512 - RNA, 20 nt, synthetic construct
  source 1..20: mol_type = other RNA
cacgtcttgtcaataatttg

SEQ ID NO: 26513 - RNA, 20 nt, synthetic construct
  source 1..20: mol_type = other RNA
cacgtgaagatggagttacg

SEQ ID NO: 26514 - RNA, 20 nt, synthetic construct
  source 1..20: mol_type = other RNA
cacgtgaagctacagactaa

SEQ ID NO: 26515 - RNA, 20 nt, synthetic construct
  source 1..20: mol_type = other RNA
cacgtgcattcatactgaag

SEQ ID NO: 26516 - RNA, 20 nt, synthetic construct
  source 1..20: mol_type = other RNA
cacgtggagtgcaatggggc

SEQ ID NO: 26517 - RNA, 20 nt, synthetic construct
  source 1..20: mol_type = other RNA
cacgtggcgctccctctgtg

SEQ ID NO: 26518 - RNA, 20 nt, synthetic construct
  source 1..20: mol_type = other RNA
cacgtggctgtcaaaaatgt

SEQ ID NO: 26519 - RNA, 20 nt, synthetic construct
  source 1..20: mol_type = other RNA
cacgtgggtgacagagcaag

SEQ ID NO: 26520 - RNA, 20 nt, synthetic construct
  source 1..20: mol_type = other RNA
cacgtgtattgagtgtagct

SEQ ID NO: 26521 - RNA, 20 nt, synthetic construct
  source 1..20: mol_type = other RNA
cacgttacaaaatatgtaat

SEQ ID NO: 26522 - RNA, 20 nt, synthetic construct
  source 1..20: mol_type = other RNA
cacgttaccctctggaatgc

SEQ ID NO: 26523 - RNA, 20 nt, synthetic construct
  source 1..20: mol_type = other RNA
cacgttagcatcaccatcat

SEQ ID NO: 26524 - RNA, 20 nt, synthetic construct
  source 1..20: mol_type = other RNA
cacgtttatattccttttat

SEQ ID NO: 26525 - RNA, 20 nt, synthetic construct
  source 1..20: mol_type = other RNA
cacgtttgatctggtcacaa

SEQ ID NO: 26526 - RNA, 20 nt, synthetic construct
  source 1..20: mol_type = other RNA
cacgtttgctttggagtgag

SEQ ID NO: 26527 - RNA, 20 nt, synthetic construct
  source 1..20: mol_type = other RNA
cacgtttttagaaatttacc

SEQ ID NO: 26528 - RNA, 20 nt, synthetic construct
  source 1..20: mol_type = other RNA
cactaaaaatcagattaagc

SEQ ID NO: 26529 - RNA, 20 nt, synthetic construct
  source 1..20: mol_type = other RNA
cactaaaacaggaagttgag

SEQ ID NO: 26530 - RNA, 20 nt, synthetic construct
  source 1..20: mol_type = other RNA
cactaaactagtatcaacct

SEQ ID NO: 26531 - RNA, 20 nt, synthetic construct
  source 1..20: mol_type = other RNA
cactaaagatttgccaatca

SEQ ID NO: 26532 - RNA, 20 nt, synthetic construct
  source 1..20: mol_type = other RNA
cactaaaggggatttcatga

SEQ ID NO: 26533 - RNA, 20 nt, synthetic construct
  source 1..20: mol_type = other RNA
cactaaataaacacttgaat

SEQ ID NO: 26534 - RNA, 20 nt, synthetic construct
  source 1..20: mol_type = other RNA
cactaacaaagggcctgttc

SEQ ID NO: 26535 - RNA, 20 nt, synthetic construct
  source 1..20: mol_type = other RNA
cactaaccaacattgagttt

SEQ ID NO: 26536 - RNA, 20 nt, synthetic construct
  source 1..20: mol_type = other RNA
cactaactttaaattttgag

SEQ ID NO: 26537 - RNA, 20 nt, synthetic construct
  source 1..20: mol_type = other RNA
cactaactttctattcccct

SEQ ID NO: 26538 - RNA, 20 nt, synthetic construct
  source 1..20: mol_type = other RNA
cactaagaagatggttggaa

SEQ ID NO: 26539 - RNA, 20 nt, synthetic construct
  source 1..20: mol_type = other RNA
cactaagagtgaaaaggcaa

SEQ ID NO: 26540 - RNA, 20 nt, synthetic construct
  source 1..20: mol_type = other RNA
cactaaggtcaacacatcag

SEQ ID NO: 26541 - RNA, 20 nt, synthetic construct
  source 1..20: mol_type = other RNA
cactaagtcagaattcactg

SEQ ID NO: 26542 - RNA, 20 nt, synthetic construct
  source 1..20: mol_type = other RNA
cactaatccttctcatagtc

SEQ ID NO: 26543 - RNA, 20 nt, synthetic construct
  source 1..20: mol_type = other RNA
cactaatgcctcaaattagt

SEQ ID NO: 26544 - RNA, 20 nt, synthetic construct
  source 1..20: mol_type = other RNA
cactaatgtcacattttctt

SEQ ID NO: 26545 - RNA, 20 nt, synthetic construct
  source 1..20: mol_type = other RNA
cactaatgtccttttcctgt

SEQ ID NO: 26546 - RNA, 20 nt, synthetic construct
  source 1..20: mol_type = other RNA
cactaattcaagtgtttatt

SEQ ID NO: 26547 - RNA, 20 nt, synthetic construct
  source 1..20: mol_type = other RNA
cactacacccggctaattaa

SEQ ID NO: 26548 - RNA, 20 nt, synthetic construct
  source 1..20: mol_type = other RNA
cactacagcatattagctgt

SEQ ID NO: 26549 - RNA, 20 nt, synthetic construct
  source 1..20: mol_type = other RNA
cactacgcccggcccatgac

SEQ ID NO: 26550 - RNA, 20 nt, synthetic construct
  source 1..20: mol_type = other RNA
cactacttagcccctgctgc

SEQ ID NO: 26551 - RNA, 20 nt, synthetic construct
  source 1..20: mol_type = other RNA
cactagaatgtgacttcgtc

SEQ ID NO: 26552 - RNA, 20 nt, synthetic construct
  source 1..20: mol_type = other RNA
cactagacacatttttgaca

SEQ ID NO: 26553 - RNA, 20 nt, synthetic construct
  source 1..20: mol_type = other RNA
cactagacctttcttaggtt

SEQ ID NO: 26554 - RNA, 20 nt, synthetic construct
  source 1..20: mol_type = other RNA
cactagagcttcaacctcct

SEQ ID NO: 26555 - RNA, 20 nt, synthetic construct
  source 1..20: mol_type = other RNA
cactagagtattacctatga

SEQ ID NO: 26556 - RNA, 20 nt, synthetic construct
  source 1..20: mol_type = other RNA
cactagatctcttttccttt

SEQ ID NO: 26557 - RNA, 20 nt, synthetic construct
  source 1..20: mol_type = other RNA
cactagcaaactactgatag

SEQ ID NO: 26558 - RNA, 20 nt, synthetic construct
  source 1..20: mol_type = other RNA
cactagcaatccaggatctt

SEQ ID NO: 26559 - RNA, 20 nt, synthetic construct
  source 1..20: mol_type = other RNA
cactagccactgggtcttat

SEQ ID NO: 26560 - RNA, 20 nt, synthetic construct
  source 1..20: mol_type = other RNA
cactagctattagagaaatg

SEQ ID NO: 26561 - RNA, 20 nt, synthetic construct
  source 1..20: mol_type = other RNA
cactagctattgtcttttct

SEQ ID NO: 26562 - RNA, 20 nt, synthetic construct
  source 1..20: mol_type = other RNA
cactagctgacccactggtt

SEQ ID NO: 26563 - RNA, 20 nt, synthetic construct
  source 1..20: mol_type = other RNA
cactagggactggcctcggc

SEQ ID NO: 26564 - RNA, 20 nt, synthetic construct
  source 1..20: mol_type = other RNA
cactaggggactaacagggt

SEQ ID NO: 26565 - RNA, 20 nt, synthetic construct
  source 1..20: mol_type = other RNA
cactagtcaccctacagact

SEQ ID NO: 26566 - RNA, 20 nt, synthetic construct
  source 1..20: mol_type = other RNA
cactagtcagtatatttact

SEQ ID NO: 26567 - RNA, 20 nt, synthetic construct
  source 1..20: mol_type = other RNA
cactagtgaagtcccatctt

SEQ ID NO: 26568 - RNA, 20 nt, synthetic construct
  source 1..20: mol_type = other RNA
cactagtggaagaatcaggt

SEQ ID NO: 26569 - RNA, 20 nt, synthetic construct
  source 1..20: mol_type = other RNA
cactagtgggatcaaaccat

SEQ ID NO: 26570 - RNA, 20 nt, synthetic construct
  source 1..20: mol_type = other RNA
cactagtgggtcgggtgtca

SEQ ID NO: 26571 - RNA, 20 nt, synthetic construct
  source 1..20: mol_type = other RNA
cactataaatcagtaagaaa

SEQ ID NO: 26572 - RNA, 20 nt, synthetic construct
  source 1..20: mol_type = other RNA
cactataacagatggaactc

SEQ ID NO: 26573 - RNA, 20 nt, synthetic construct
  source 1..20: mol_type = other RNA
cactataagccaatatccct

SEQ ID NO: 26574 - RNA, 20 nt, synthetic construct
  source 1..20: mol_type = other RNA
cactataatccagatggaca

SEQ ID NO: 26575 - RNA, 20 nt, synthetic construct
  source 1..20: mol_type = other RNA
cactatagaaaatagtatga

SEQ ID NO: 26576 - RNA, 20 nt, synthetic construct
  source 1..20: mol_type = other RNA
cactatccacatttggtttt

SEQ ID NO: 26577 - RNA, 20 nt, synthetic construct
  source 1..20: mol_type = other RNA
cactatctaataaaatagca

SEQ ID NO: 26578 - RNA, 20 nt, synthetic construct
  source 1..20: mol_type = other RNA
cactatggcttttgagtgta

SEQ ID NO: 26579 - RNA, 20 nt, synthetic construct
  source 1..20: mol_type = other RNA
cactatgtgttgataaatat

SEQ ID NO: 26580 - RNA, 20 nt, synthetic construct
  source 1..20: mol_type = other RNA
cactattaaccatatggttt

SEQ ID NO: 26581 - RNA, 20 nt, synthetic construct
  source 1..20: mol_type = other RNA
cactattgaaagcccttgag

SEQ ID NO: 26582 - RNA, 20 nt, synthetic construct
  source 1..20: mol_type = other RNA
cactattgagagtgaaaaca

SEQ ID NO: 26583 - RNA, 20 nt, synthetic construct
  source 1..20: mol_type = other RNA
cactcaaaactgaagtttat

SEQ ID NO: 26584 - RNA, 20 nt, synthetic construct
  source 1..20: mol_type = other RNA
cactcaaaagccatagtgta

SEQ ID NO: 26585 - RNA, 20 nt, synthetic construct
  source 1..20: mol_type = other RNA
cactcaagcaatcctccggc

SEQ ID NO: 26586 - RNA, 20 nt, synthetic construct
  source 1..20: mol_type = other RNA
cactcaatacacgtggctgt

SEQ ID NO: 26587 - RNA, 20 nt, synthetic construct
  source 1..20: mol_type = other RNA
cactcacctagctgttttca

SEQ ID NO: 26588 - RNA, 20 nt, synthetic construct
  source 1..20: mol_type = other RNA
cactcacctgtcatgtcaaa

SEQ ID NO: 26589 - RNA, 20 nt, synthetic construct
  source 1..20: mol_type = other RNA
cactcactggcctgagctct

SEQ ID NO: 26590 - RNA, 20 nt, synthetic construct
  source 1..20: mol_type = other RNA
cactcagaagtactactcat

SEQ ID NO: 26591 - RNA, 20 nt, synthetic construct
  source 1..20: mol_type = other RNA
cactcagatatcaatctgga

SEQ ID NO: 26592 - RNA, 20 nt, synthetic construct
  source 1..20: mol_type = other RNA
cactcagcataattggttaa

SEQ ID NO: 26593 - RNA, 20 nt, synthetic construct
  source 1..20: mol_type = other RNA
cactcagcctgttgggaggt

SEQ ID NO: 26594 - RNA, 20 nt, synthetic construct
  source 1..20: mol_type = other RNA
cactcataccaggttttggt

SEQ ID NO: 26595 - RNA, 20 nt, synthetic construct
  source 1..20: mol_type = other RNA
cactcatttccgttgctgca

SEQ ID NO: 26596 - RNA, 20 nt, synthetic construct
  source 1..20: mol_type = other RNA
cactcatttcctttcagtcg

SEQ ID NO: 26597 - RNA, 20 nt, synthetic construct
  source 1..20: mol_type = other RNA
cactccaaagcaaacgtgca

SEQ ID NO: 26598 - RNA, 20 nt, synthetic construct
  source 1..20: mol_type = other RNA
cactccacacacgaagtagt

SEQ ID NO: 26599 - RNA, 20 nt, synthetic construct
  source 1..20: mol_type = other RNA
cactccaccttagcccaagc

SEQ ID NO: 26600 - RNA, 20 nt, synthetic construct
  source 1..20: mol_type = other RNA
cactccacgtgggtgacaga

SEQ ID NO: 26601 - RNA, 20 nt, synthetic construct
  source 1..20: mol_type = other RNA
cactccacttcccactgcta

SEQ ID NO: 26602 - RNA, 20 nt, synthetic construct
  source 1..20: mol_type = other RNA
cactccagaatgaccgagat

SEQ ID NO: 26603 - RNA, 20 nt, synthetic construct
  source 1..20: mol_type = other RNA
cactccagcatccctccagt

SEQ ID NO: 26604 - RNA, 20 nt, synthetic construct
  source 1..20: mol_type = other RNA
cactccagccttggtaagag

SEQ ID NO: 26605 - RNA, 20 nt, synthetic construct
  source 1..20: mol_type = other RNA
cactccatttgtggcatctt

SEQ ID NO: 26606 - RNA, 20 nt, synthetic construct
  source 1..20: mol_type = other RNA
cactccccagtggttgtgga

SEQ ID NO: 26607 - RNA, 20 nt, synthetic construct
  source 1..20: mol_type = other RNA
cactcccggccgtatttttt

SEQ ID NO: 26608 - RNA, 20 nt, synthetic construct
  source 1..20: mol_type = other RNA
cactcctcattcacactagt

SEQ ID NO: 26609 - RNA, 20 nt, synthetic construct
  source 1..20: mol_type = other RNA
cactcgcactccacttccca

SEQ ID NO: 26610 - RNA, 20 nt, synthetic construct
  source 1..20: mol_type = other RNA
cactcgtgtatgatttctag

SEQ ID NO: 26611 - RNA, 20 nt, synthetic construct
  source 1..20: mol_type = other RNA
cactctaatatggttcctag

SEQ ID NO: 26612 - RNA, 20 nt, synthetic construct
  source 1..20: mol_type = other RNA
cactctcaaaattaaattca

SEQ ID NO: 26613 - RNA, 20 nt, synthetic construct
  source 1..20: mol_type = other RNA
cactctcaatagtgtccttt

SEQ ID NO: 26614 - RNA, 20 nt, synthetic construct
  source 1..20: mol_type = other RNA
cactctcatctaaattaagc

SEQ ID NO: 26615 - RNA, 20 nt, synthetic construct
  source 1..20: mol_type = other RNA
cactctccccaagtaaacct

SEQ ID NO: 26616 - RNA, 20 nt, synthetic construct
  source 1..20: mol_type = other RNA
cactctctggctgcaattgc

SEQ ID NO: 26617 - RNA, 20 nt, synthetic construct
  source 1..20: mol_type = other RNA
cactctctttaggaagcttc

SEQ ID NO: 26618 - RNA, 20 nt, synthetic construct
  source 1..20: mol_type = other RNA
cactctgaatcacctcaagg

SEQ ID NO: 26619 - RNA, 20 nt, synthetic construct
  source 1..20: mol_type = other RNA
cactctgaattctctggaat

SEQ ID NO: 26620 - RNA, 20 nt, synthetic construct
  source 1..20: mol_type = other RNA
cactctgcaattttaaatgt

SEQ ID NO: 26621 - RNA, 20 nt, synthetic construct
  source 1..20: mol_type = other RNA
cactctggcctggacaacag

SEQ ID NO: 26622 - RNA, 20 nt, synthetic construct
  source 1..20: mol_type = other RNA
cactcttaaaaggagatata

SEQ ID NO: 26623 - RNA, 20 nt, synthetic construct
  source 1..20: mol_type = other RNA
cactcttaataactgcctaa

SEQ ID NO: 26624 - RNA, 20 nt, synthetic construct
  source 1..20: mol_type = other RNA
cactcttaccaaggctggag

SEQ ID NO: 26625 - RNA, 20 nt, synthetic construct
  source 1..20: mol_type = other RNA
cactcttagtgatgtctttt

SEQ ID NO: 26626 - RNA, 20 nt, synthetic construct
  source 1..20: mol_type = other RNA
cactcttatatcctaaacac

SEQ ID NO: 26627 - RNA, 20 nt, synthetic construct
  source 1..20: mol_type = other RNA
cactcttctgcaagttgcta

SEQ ID NO: 26628 - RNA, 20 nt, synthetic construct
  source 1..20: mol_type = other RNA
cactcttggtctttctccca

SEQ ID NO: 26629 - RNA, 20 nt, synthetic construct
  source 1..20: mol_type = other RNA
cactcttttaaacccatttc

SEQ ID NO: 26630 - RNA, 20 nt, synthetic construct
  source 1..20: mol_type = other RNA
cactcttttaaggtttagaa

SEQ ID NO: 26631 - RNA, 20 nt, synthetic construct
  source 1..20: mol_type = other RNA
cactgaaacaatcgcaatcc

SEQ ID NO: 26632 - RNA, 20 nt, synthetic construct
  source 1..20: mol_type = other RNA
cactgaaaccctcacgaaag

SEQ ID NO: 26633 - RNA, 20 nt, synthetic construct
  source 1..20: mol_type = other RNA
cactgaaacttttcttttct

SEQ ID NO: 26634 - RNA, 20 nt, synthetic construct
  source 1..20: mol_type = other RNA
cactgaagccagtccttgtg

SEQ ID NO: 26635 - RNA, 20 nt, synthetic construct
  source 1..20: mol_type = other RNA
cactgaagggaattttactg

SEQ ID NO: 26636 - RNA, 20 nt, synthetic construct
  source 1..20: mol_type = other RNA
cactgaagtgttgagaggct

SEQ ID NO: 26637 - RNA, 20 nt, synthetic construct
  source 1..20: mol_type = other RNA
cactgaatcagattttaaat

SEQ ID NO: 26638 - RNA, 20 nt, synthetic construct
  source 1..20: mol_type = other RNA
cactgacacaggctgaaggg

SEQ ID NO: 26639 - RNA, 20 nt, synthetic construct
  source 1..20: mol_type = other RNA
cactgacaggacagagcagt

SEQ ID NO: 26640 - RNA, 20 nt, synthetic construct
  source 1..20: mol_type = other RNA
cactgacagtggacaaaggt

SEQ ID NO: 26641 - RNA, 20 nt, synthetic construct
  source 1..20: mol_type = other RNA
cactgactacacatacacag

SEQ ID NO: 26642 - RNA, 20 nt, synthetic construct
  source 1..20: mol_type = other RNA
cactgactggctgtgccaac

SEQ ID NO: 26643 - RNA, 20 nt, synthetic construct
  source 1..20: mol_type = other RNA
cactgagagctcaggccagt

SEQ ID NO: 26644 - RNA, 20 nt, synthetic construct
  source 1..20: mol_type = other RNA
cactgagagggaagtttata

SEQ ID NO: 26645 - RNA, 20 nt, synthetic construct
  source 1..20: mol_type = other RNA
cactgagcacaatgcctgcc

SEQ ID NO: 26646 - RNA, 20 nt, synthetic construct
  source 1..20: mol_type = other RNA
cactgagcatttatataagt

SEQ ID NO: 26647 - RNA, 20 nt, synthetic construct
  source 1..20: mol_type = other RNA
cactgaggtcaagaaataaa

SEQ ID NO: 26648 - RNA, 20 nt, synthetic construct
  source 1..20: mol_type = other RNA
cactgatggaattctgacac

SEQ ID NO: 26649 - RNA, 20 nt, synthetic construct
  source 1..20: mol_type = other RNA
cactgatgtgtagttattat

SEQ ID NO: 26650 - RNA, 20 nt, synthetic construct
  source 1..20: mol_type = other RNA
cactgattgagtatctggtg

SEQ ID NO: 26651 - RNA, 20 nt, synthetic construct
  source 1..20: mol_type = other RNA
cactgattttctgcttctca

SEQ ID NO: 26652 - RNA, 20 nt, synthetic construct
  source 1..20: mol_type = other RNA
cactgcaagctccgcctcct

SEQ ID NO: 26653 - RNA, 20 nt, synthetic construct
  source 1..20: mol_type = other RNA
cactgcacagtatgcggggt

SEQ ID NO: 26654 - RNA, 20 nt, synthetic construct
  source 1..20: mol_type = other RNA
cactgcactccagccttggt

SEQ ID NO: 26655 - RNA, 20 nt, synthetic construct
  source 1..20: mol_type = other RNA
cactgcactctggcctggac

SEQ ID NO: 26656 - RNA, 20 nt, synthetic construct
  source 1..20: mol_type = other RNA
cactgcagaattactgacaa

SEQ ID NO: 26657 - RNA, 20 nt, synthetic construct
  source 1..20: mol_type = other RNA
cactgcagatgaatgagcaa

SEQ ID NO: 26658 - RNA, 20 nt, synthetic construct
  source 1..20: mol_type = other RNA
cactgcaggtgttggtgcat

SEQ ID NO: 26659 - RNA, 20 nt, synthetic construct
  source 1..20: mol_type = other RNA
cactgcattcatccaggcaa

SEQ ID NO: 26660 - RNA, 20 nt, synthetic construct
  source 1..20: mol_type = other RNA
cactgcattccgcctgggcg

SEQ ID NO: 26661 - RNA, 20 nt, synthetic construct
  source 1..20: mol_type = other RNA
cactgcgccaagcagggacg

SEQ ID NO: 26662 - RNA, 20 nt, synthetic construct
  source 1..20: mol_type = other RNA
cactgcgggcccagctcttt

SEQ ID NO: 26663 - RNA, 20 nt, synthetic construct
  source 1..20: mol_type = other RNA
cactgctatgactaatttga

SEQ ID NO: 26664 - RNA, 20 nt, synthetic construct
  source 1..20: mol_type = other RNA
cactgctattgataaatcta

SEQ ID NO: 26665 - RNA, 20 nt, synthetic construct
  source 1..20: mol_type = other RNA
cactgctcagaagctttcag

SEQ ID NO: 26666 - RNA, 20 nt, synthetic construct
  source 1..20: mol_type = other RNA
cactgctcagtccctcacct

SEQ ID NO: 26667 - RNA, 20 nt, synthetic construct
  source 1..20: mol_type = other RNA
cactgctcctgcctttgttc

SEQ ID NO: 26668 - RNA, 20 nt, synthetic construct
  source 1..20: mol_type = other RNA
cactgctcttctattccaga

SEQ ID NO: 26669 - RNA, 20 nt, synthetic construct
  source 1..20: mol_type = other RNA
cactgctgatgtaagtggga

SEQ ID NO: 26670 - RNA, 20 nt, synthetic construct
  source 1..20: mol_type = other RNA
cactggaaaccttttgtaga

SEQ ID NO: 26671 - RNA, 20 nt, synthetic construct
  source 1..20: mol_type = other RNA
cactggaaatcacaggttta

SEQ ID NO: 26672 - RNA, 20 nt, synthetic construct
  source 1..20: mol_type = other RNA
cactggaagtaattgggatc

SEQ ID NO: 26673 - RNA, 20 nt, synthetic construct
  source 1..20: mol_type = other RNA
cactggagaattctactaaa

SEQ ID NO: 26674 - RNA, 20 nt, synthetic construct
  source 1..20: mol_type = other RNA
cactggaggtgcacattcca

SEQ ID NO: 26675 - RNA, 20 nt, synthetic construct
  source 1..20: mol_type = other RNA
cactggatacggaaatataa

SEQ ID NO: 26676 - RNA, 20 nt, synthetic construct
  source 1..20: mol_type = other RNA
cactggatagaagtgtatca

SEQ ID NO: 26677 - RNA, 20 nt, synthetic construct
  source 1..20: mol_type = other RNA
cactggcaaaaatcatcata

SEQ ID NO: 26678 - RNA, 20 nt, synthetic construct
  source 1..20: mol_type = other RNA
cactggcacagcactgttaa

SEQ ID NO: 26679 - RNA, 20 nt, synthetic construct
  source 1..20: mol_type = other RNA
cactggccactgattgagta

SEQ ID NO: 26680 - RNA, 20 nt, synthetic construct
  source 1..20: mol_type = other RNA
cactggccagcattacttag

SEQ ID NO: 26681 - RNA, 20 nt, synthetic construct
  source 1..20: mol_type = other RNA
cactggcctgagctctcagt

SEQ ID NO: 26682 - RNA, 20 nt, synthetic construct
  source 1..20: mol_type = other RNA
cactggctagtaggcaacat

SEQ ID NO: 26683 - RNA, 20 nt, synthetic construct
  source 1..20: mol_type = other RNA
cactggctattagttaacct

SEQ ID NO: 26684 - RNA, 20 nt, synthetic construct
  source 1..20: mol_type = other RNA
cactgggagccctccaggat

SEQ ID NO: 26685 - RNA, 20 nt, synthetic construct
  source 1..20: mol_type = other RNA
cactggggagtgtgcccaag

SEQ ID NO: 26686 - RNA, 20 nt, synthetic construct
  source 1..20: mol_type = other RNA
cactgggtaaacaagactca

SEQ ID NO: 26687 - RNA, 20 nt, synthetic construct
  source 1..20: mol_type = other RNA
cactgggtccccggaggagg

SEQ ID NO: 26688 - RNA, 20 nt, synthetic construct
  source 1..20: mol_type = other RNA
cactgggtcttataggttga

SEQ ID NO: 26689 - RNA, 20 nt, synthetic construct
  source 1..20: mol_type = other RNA
cactgggttctcaccaacat

SEQ ID NO: 26690 - RNA, 20 nt, synthetic construct
  source 1..20: mol_type = other RNA
cactggtaaggaaacagagt

SEQ ID NO: 26691 - RNA, 20 nt, synthetic construct
  source 1..20: mol_type = other RNA
cactggtcactggccactga

SEQ ID NO: 26692 - RNA, 20 nt, synthetic construct
  source 1..20: mol_type = other RNA
cactggtttcagtacacgaa

SEQ ID NO: 26693 - RNA, 20 nt, synthetic construct
  source 1..20: mol_type = other RNA
cactggtttcagtccctcct

SEQ ID NO: 26694 - RNA, 20 nt, synthetic construct
  source 1..20: mol_type = other RNA
cactgtaagaataatgtctt

SEQ ID NO: 26695 - RNA, 20 nt, synthetic construct
  source 1..20: mol_type = other RNA
cactgtactactgacctggg

SEQ ID NO: 26696 - RNA, 20 nt, synthetic construct
  source 1..20: mol_type = other RNA
cactgtactcctagatactc

SEQ ID NO: 26697 - RNA, 20 nt, synthetic construct
  source 1..20: mol_type = other RNA
cactgtaggccccgatgcca

SEQ ID NO: 26698 - RNA, 20 nt, synthetic construct
  source 1..20: mol_type = other RNA
cactgtagttcagtttttct

SEQ ID NO: 26699 - RNA, 20 nt, synthetic construct
  source 1..20: mol_type = other RNA
cactgtatggttcttaagat

SEQ ID NO: 26700 - RNA, 20 nt, synthetic construct
  source 1..20: mol_type = other RNA
cactgtattttgaacaaatt

SEQ ID NO: 26701 - RNA, 20 nt, synthetic construct
  source 1..20: mol_type = other RNA
cactgtcagtgggactggag

SEQ ID NO: 26702 - RNA, 20 nt, synthetic construct
  source 1..20: mol_type = other RNA
cactgtctccatgtcctcac

SEQ ID NO: 26703 - RNA, 20 nt, synthetic construct
  source 1..20: mol_type = other RNA
cactgtgactccaaagcaaa

SEQ ID NO: 26704 - RNA, 20 nt, synthetic construct
  source 1..20: mol_type = other RNA
cactgtgagccactaaaaca

SEQ ID NO: 26705 - RNA, 20 nt, synthetic construct
  source 1..20: mol_type = other RNA
cactgtgatacctagtacgt

SEQ ID NO: 26706 - RNA, 20 nt, synthetic construct
  source 1..20: mol_type = other RNA
cactgtgttcttttccttct

SEQ ID NO: 26707 - RNA, 20 nt, synthetic construct
  source 1..20: mol_type = other RNA
cactgttaactgacttacag

SEQ ID NO: 26708 - RNA, 20 nt, synthetic construct
  source 1..20: mol_type = other RNA
cactgttatctgggaacagc

SEQ ID NO: 26709 - RNA, 20 nt, synthetic construct
  source 1..20: mol_type = other RNA
cactgttctgcgtggttttt

SEQ ID NO: 26710 - RNA, 20 nt, synthetic construct
  source 1..20: mol_type = other RNA
cactgttgatttagaaatac

SEQ ID NO: 26711 - RNA, 20 nt, synthetic construct
  source 1..20: mol_type = other RNA
cactgtttgattactgtagc

SEQ ID NO: 26712 - RNA, 20 nt, synthetic construct
  source 1..20: mol_type = other RNA
cactgtttggacagtaaaaa

SEQ ID NO: 26713 - RNA, 20 nt, synthetic construct
  source 1..20: mol_type = other RNA
cacttaaaaaatgcgcgtcc

SEQ ID NO: 26714 - RNA, 20 nt, synthetic construct
  source 1..20: mol_type = other RNA
cacttaaaatttagatctca

SEQ ID NO: 26715 - RNA, 20 nt, synthetic construct
  source 1..20: mol_type = other RNA
cacttaacatatattaactc

SEQ ID NO: 26716 - RNA, 20 nt, synthetic construct
  source 1..20: mol_type = other RNA
cacttaacatgagatctaaa

SEQ ID NO: 26717 - RNA, 20 nt, synthetic construct
  source 1..20: mol_type = other RNA
cacttacatcagcagtgacc

SEQ ID NO: 26718 - RNA, 20 nt, synthetic construct
  source 1..20: mol_type = other RNA
cacttactaaatgatctttc

SEQ ID NO: 26719 - RNA, 20 nt, synthetic construct
  source 1..20: mol_type = other RNA
cacttacttgagccccagaa

SEQ ID NO: 26720 - RNA, 20 nt, synthetic construct
  source 1..20: mol_type = other RNA
cacttagcatgttgctttgc

SEQ ID NO: 26721 - RNA, 20 nt, synthetic construct
  source 1..20: mol_type = other RNA
cacttagcgctgatgtgttg

SEQ ID NO: 26722 - RNA, 20 nt, synthetic construct
  source 1..20: mol_type = other RNA
cacttagttcaagatgcata

SEQ ID NO: 26723 - RNA, 20 nt, synthetic construct
  source 1..20: mol_type = other RNA
cacttagtttgcaatacagt

SEQ ID NO: 26724 - RNA, 20 nt, synthetic construct
  source 1..20: mol_type = other RNA
cacttatatgaagctaaaaa

SEQ ID NO: 26725 - RNA, 20 nt, synthetic construct
  source 1..20: mol_type = other RNA
cacttattagcaaagaggca

SEQ ID NO: 26726 - RNA, 20 nt, synthetic construct
  source 1..20: mol_type = other RNA
cacttcagtggtaaggactg

SEQ ID NO: 26727 - RNA, 20 nt, synthetic construct
  source 1..20: mol_type = other RNA
cacttccaagtcccggaagc

SEQ ID NO: 26728 - RNA, 20 nt, synthetic construct
  source 1..20: mol_type = other RNA
cacttccagtacatctcaat

SEQ ID NO: 26729 - RNA, 20 nt, synthetic construct
  source 1..20: mol_type = other RNA
cacttccattttgcttaata

SEQ ID NO: 26730 - RNA, 20 nt, synthetic construct
  source 1..20: mol_type = other RNA
cacttcccactgctatgact

SEQ ID NO: 26731 - RNA, 20 nt, synthetic construct
  source 1..20: mol_type = other RNA
cacttcctattagaagaatg

SEQ ID NO: 26732 - RNA, 20 nt, synthetic construct
  source 1..20: mol_type = other RNA
cacttcctctcttaaatccg

SEQ ID NO: 26733 - RNA, 20 nt, synthetic construct
  source 1..20: mol_type = other RNA
cacttcgaaagttcagatag

SEQ ID NO: 26734 - RNA, 20 nt, synthetic construct
  source 1..20: mol_type = other RNA
cacttcgagaagggaagtaa

SEQ ID NO: 26735 - RNA, 20 nt, synthetic construct
  source 1..20: mol_type = other RNA
cacttcgttcagtttagtaa

SEQ ID NO: 26736 - RNA, 20 nt, synthetic construct
  source 1..20: mol_type = other RNA
cacttctatccagtgacacc

SEQ ID NO: 26737 - RNA, 20 nt, synthetic construct
  source 1..20: mol_type = other RNA
cacttctctgctgctgaaaa

SEQ ID NO: 26738 - RNA, 20 nt, synthetic construct
  source 1..20: mol_type = other RNA
cacttctgatatcctgtaaa

SEQ ID NO: 26739 - RNA, 20 nt, synthetic construct
  source 1..20: mol_type = other RNA
cacttctgtgatcagaagag

SEQ ID NO: 26740 - RNA, 20 nt, synthetic construct
  source 1..20: mol_type = other RNA
cacttcttagtaaatatccg

SEQ ID NO: 26741 - RNA, 20 nt, synthetic construct
  source 1..20: mol_type = other RNA
cacttcttattggttatctg

SEQ ID NO: 26742 - RNA, 20 nt, synthetic construct
  source 1..20: mol_type = other RNA
cacttgaaacctgccatggt

SEQ ID NO: 26743 - RNA, 20 nt, synthetic construct
  source 1..20: mol_type = other RNA
cacttgaattagtgatttta

SEQ ID NO: 26744 - RNA, 20 nt, synthetic construct
  source 1..20: mol_type = other RNA
cacttgaggtgattaaaggc

SEQ ID NO: 26745 - RNA, 20 nt, synthetic construct
  source 1..20: mol_type = other RNA
cacttgatccaggtgtatga

SEQ ID NO: 26746 - RNA, 20 nt, synthetic construct
  source 1..20: mol_type = other RNA
cacttgatggtttggggctt

SEQ ID NO: 26747 - RNA, 20 nt, synthetic construct
  source 1..20: mol_type = other RNA
cacttgattactttacagtt

SEQ ID NO: 26748 - RNA, 20 nt, synthetic construct
  source 1..20: mol_type = other RNA
cacttgcttgggaacagcag

SEQ ID NO: 26749 - RNA, 20 nt, synthetic construct
  source 1..20: mol_type = other RNA
cacttggagttttcccccta

SEQ ID NO: 26750 - RNA, 20 nt, synthetic construct
  source 1..20: mol_type = other RNA
cacttgggatgtttctacct

SEQ ID NO: 26751 - RNA, 20 nt, synthetic construct
  source 1..20: mol_type = other RNA
cacttggggaggccaaggca

SEQ ID NO: 26752 - RNA, 20 nt, synthetic construct
  source 1..20: mol_type = other RNA
cacttgggtggaagctgtcc

SEQ ID NO: 26753 - RNA, 20 nt, synthetic construct
  source 1..20: mol_type = other RNA
cacttggtaagctgtgagtc

SEQ ID NO: 26754 - RNA, 20 nt, synthetic construct
  source 1..20: mol_type = other RNA
cacttgtcccatggtcaaat

SEQ ID NO: 26755 - RNA, 20 nt, synthetic construct
  source 1..20: mol_type = other RNA
cacttgtgtaactaccactg

SEQ ID NO: 26756 - RNA, 20 nt, synthetic construct
  source 1..20: mol_type = other RNA
cacttgtttcttttcactct

SEQ ID NO: 26757 - RNA, 20 nt, synthetic construct
  source 1..20: mol_type = other RNA
cactttcatgatttggtgtg

SEQ ID NO: 26758 - RNA, 20 nt, synthetic construct
  source 1..20: mol_type = other RNA
cactttccatcttaggccat

SEQ ID NO: 26759 - RNA, 20 nt, synthetic construct
  source 1..20: mol_type = other RNA
cactttcctattcacactgc

SEQ ID NO: 26760 - RNA, 20 nt, synthetic construct
  source 1..20: mol_type = other RNA
cactttcctgataaggggct

SEQ ID NO: 26761 - RNA, 20 nt, synthetic construct
  source 1..20: mol_type = other RNA
cactttccttggagaagagt

SEQ ID NO: 26762 - RNA, 20 nt, synthetic construct
  source 1..20: mol_type = other RNA
cactttcgtatttttgttat

SEQ ID NO: 26763 - RNA, 20 nt, synthetic construct
  source 1..20: mol_type = other RNA
cactttcgtcatctataagg

SEQ ID NO: 26764 - RNA, 20 nt, synthetic construct
  source 1..20: mol_type = other RNA
cactttgaggttattaagat

SEQ ID NO: 26765 - RNA, 20 nt, synthetic construct
  source 1..20: mol_type = other RNA
cactttgatcatacacatcc

SEQ ID NO: 26766 - RNA, 20 nt, synthetic construct
  source 1..20: mol_type = other RNA
cactttgggattagcttatt

SEQ ID NO: 26767 - RNA, 20 nt, synthetic construct
  source 1..20: mol_type = other RNA
cactttgttgctcaggctgg

SEQ ID NO: 26768 - RNA, 20 nt, synthetic construct
  source 1..20: mol_type = other RNA
cacttttaaggcttggaaaa

SEQ ID NO: 26769 - RNA, 20 nt, synthetic construct
  source 1..20: mol_type = other RNA
cacttttcaaacacttaaca

SEQ ID NO: 26770 - RNA, 20 nt, synthetic construct
  source 1..20: mol_type = other RNA
cacttttcaggtattgagcc

SEQ ID NO: 26771 - RNA, 20 nt, synthetic construct
  source 1..20: mol_type = other RNA
cacttttccagtcttctcat

SEQ ID NO: 26772 - RNA, 20 nt, synthetic construct
  source 1..20: mol_type = other RNA
cacttttctggttttctgga

SEQ ID NO: 26773 - RNA, 20 nt, synthetic construct
  source 1..20: mol_type = other RNA
cacttttgagttcagaaaga

SEQ ID NO: 26774 - RNA, 20 nt, synthetic construct
  source 1..20: mol_type = other RNA
cacttttggaatttaagggg

SEQ ID NO: 26775 - RNA, 20 nt, synthetic construct
  source 1..20: mol_type = other RNA
cacttttgtactacttgtca

SEQ ID NO: 26776 - RNA, 20 nt, synthetic construct
  source 1..20: mol_type = other RNA
cacttttgtgcaacataaat

SEQ ID NO: 26777 - RNA, 20 nt, synthetic construct
  source 1..20: mol_type = other RNA
cactttttaccaagttgaat

SEQ ID NO: 26778 - RNA, 20 nt, synthetic construct
  source 1..20: mol_type = other RNA
cactttttattctgttctag

SEQ ID NO: 26779 - RNA, 20 nt, synthetic construct
  source 1..20: mol_type = other RNA
cactttttgtatttccttat

SEQ ID NO: 26780 - RNA, 20 nt, synthetic construct
  source 1..20: mol_type = other RNA
cactttttgtgagttttaac

SEQ ID NO: 26781 - RNA, 20 nt, synthetic construct
  source 1..20: mol_type = other RNA
cagaaaaaattagcctttta

SEQ ID NO: 26782 - RNA, 20 nt, synthetic construct
  source 1..20: mol_type = other RNA
cagaaaaatccatcttaaaa

SEQ ID NO: 26783 - RNA, 20 nt, synthetic construct
  source 1..20: mol_type = other RNA
cagaaaaccagaaaagtgaa

SEQ ID NO: 26784 - RNA, 20 nt, synthetic construct
  source 1..20: mol_type = other RNA
cagaaaacccttcatcattt

SEQ ID NO: 26785 - RNA, 20 nt, synthetic construct
  source 1..20: mol_type = other RNA
cagaaaactggcaatcaaat

SEQ ID NO: 26786 - RNA, 20 nt, synthetic construct
  source 1..20: mol_type = other RNA
cagaaaagatcagtaaaatt

SEQ ID NO: 26787 - RNA, 20 nt, synthetic construct
  source 1..20: mol_type = other RNA
cagaaaaggctgagacctca

SEQ ID NO: 26788 - RNA, 20 nt, synthetic construct
  source 1..20: mol_type = other RNA
cagaaaagtgaaacaataaa

SEQ ID NO: 26789 - RNA, 20 nt, synthetic construct
  source 1..20: mol_type = other RNA
cagaaaataaaccaagtttg

SEQ ID NO: 26790 - RNA, 20 nt, synthetic construct
  source 1..20: mol_type = other RNA
cagaaaatatctacaaatca

SEQ ID NO: 26791 - RNA, 20 nt, synthetic construct
  source 1..20: mol_type = other RNA
cagaaaatcagtgtgaaagt

SEQ ID NO: 26792 - RNA, 20 nt, synthetic construct
  source 1..20: mol_type = other RNA
cagaaaattttcttttgtgg

SEQ ID NO: 26793 - RNA, 20 nt, synthetic construct
  source 1..20: mol_type = other RNA
cagaaacaacaacaacaaaa

SEQ ID NO: 26794 - RNA, 20 nt, synthetic construct
  source 1..20: mol_type = other RNA
cagaaacacaggactgtgtg

SEQ ID NO: 26795 - RNA, 20 nt, synthetic construct
  source 1..20: mol_type = other RNA
cagaaacaccaacacaaagc

SEQ ID NO: 26796 - RNA, 20 nt, synthetic construct
  source 1..20: mol_type = other RNA
cagaaacagaaaaatccatc

SEQ ID NO: 26797 - RNA, 20 nt, synthetic construct
  source 1..20: mol_type = other RNA
cagaaaccagttgtaatttt

SEQ ID NO: 26798 - RNA, 20 nt, synthetic construct
  source 1..20: mol_type = other RNA
cagaaaccatcgttcacact

SEQ ID NO: 26799 - RNA, 20 nt, synthetic construct
  source 1..20: mol_type = other RNA
cagaaaccctgtacccatta

SEQ ID NO: 26800 - RNA, 20 nt, synthetic construct
  source 1..20: mol_type = other RNA
cagaaactgacaggactcca

SEQ ID NO: 26801 - RNA, 20 nt, synthetic construct
  source 1..20: mol_type = other RNA
cagaaacttccaaccatctt

SEQ ID NO: 26802 - RNA, 20 nt, synthetic construct
  source 1..20: mol_type = other RNA
cagaaagagaatagcagaaa

SEQ ID NO: 26803 - RNA, 20 nt, synthetic construct
  source 1..20: mol_type = other RNA
cagaaagagagaggggggaa

SEQ ID NO: 26804 - RNA, 20 nt, synthetic construct
  source 1..20: mol_type = other RNA
cagaaagattaatccttgtg

SEQ ID NO: 26805 - RNA, 20 nt, synthetic construct
  source 1..20: mol_type = other RNA
cagaaagcctcttcagaaga

SEQ ID NO: 26806 - RNA, 20 nt, synthetic construct
  source 1..20: mol_type = other RNA
cagaaaggcccaaaaagttt

SEQ ID NO: 26807 - RNA, 20 nt, synthetic construct
  source 1..20: mol_type = other RNA
cagaaagttactattttcat

SEQ ID NO: 26808 - RNA, 20 nt, synthetic construct
  source 1..20: mol_type = other RNA
cagaaataaaacatgttgtg

SEQ ID NO: 26809 - RNA, 20 nt, synthetic construct
  source 1..20: mol_type = other RNA
cagaaataaatcctcacatg

SEQ ID NO: 26810 - RNA, 20 nt, synthetic construct
  source 1..20: mol_type = other RNA
cagaaataatacaaatgatg

SEQ ID NO: 26811 - RNA, 20 nt, synthetic construct
  source 1..20: mol_type = other RNA
cagaaatacaatgtgagcca

SEQ ID NO: 26812 - RNA, 20 nt, synthetic construct
  source 1..20: mol_type = other RNA
cagaaatacagaccgatgga

SEQ ID NO: 26813 - RNA, 20 nt, synthetic construct
  source 1..20: mol_type = other RNA
cagaaatagactcccaactt

SEQ ID NO: 26814 - RNA, 20 nt, synthetic construct
  source 1..20: mol_type = other RNA
cagaaatataccttatgtga

SEQ ID NO: 26815 - RNA, 20 nt, synthetic construct
  source 1..20: mol_type = other RNA
cagaaatctaccaaacattg

SEQ ID NO: 26816 - RNA, 20 nt, synthetic construct
  source 1..20: mol_type = other RNA
cagaaatgaaatggccctta

SEQ ID NO: 26817 - RNA, 20 nt, synthetic construct
  source 1..20: mol_type = other RNA
cagaaatgacaagtaaatgc

SEQ ID NO: 26818 - RNA, 20 nt, synthetic construct
  source 1..20: mol_type = other RNA
cagaaatgagttccagtcct

SEQ ID NO: 26819 - RNA, 20 nt, synthetic construct
  source 1..20: mol_type = other RNA
cagaaatgtttaattcctac

SEQ ID NO: 26820 - RNA, 20 nt, synthetic construct
  source 1..20: mol_type = other RNA
cagaaattataagcttcctc

SEQ ID NO: 26821 - RNA, 20 nt, synthetic construct
  source 1..20: mol_type = other RNA
cagaaattcaacttggtaaa

SEQ ID NO: 26822 - RNA, 20 nt, synthetic construct
  source 1..20: mol_type = other RNA
cagaaatttattgtttcact

SEQ ID NO: 26823 - RNA, 20 nt, synthetic construct
  source 1..20: mol_type = other RNA
cagaacaaactcaagttccg

SEQ ID NO: 26824 - RNA, 20 nt, synthetic construct
  source 1..20: mol_type = other RNA
cagaacaaactgcgtggttt

SEQ ID NO: 26825 - RNA, 20 nt, synthetic construct
  source 1..20: mol_type = other RNA
cagaacaaataacaccatag

SEQ ID NO: 26826 - RNA, 20 nt, synthetic construct
  source 1..20: mol_type = other RNA
cagaacacactgctcttcta

SEQ ID NO: 26827 - RNA, 20 nt, synthetic construct
  source 1..20: mol_type = other RNA
cagaacactaaaggggattt

SEQ ID NO: 26828 - RNA, 20 nt, synthetic construct
  source 1..20: mol_type = other RNA
cagaacagtgtttacacacc

SEQ ID NO: 26829 - RNA, 20 nt, synthetic construct
  source 1..20: mol_type = other RNA
cagaaccacctgggggagac

SEQ ID NO: 26830 - RNA, 20 nt, synthetic construct
  source 1..20: mol_type = other RNA
cagaaccactgagcacaatg

SEQ ID NO: 26831 - RNA, 20 nt, synthetic construct
  source 1..20: mol_type = other RNA
cagaaccatgtaacaggttt

SEQ ID NO: 26832 - RNA, 20 nt, synthetic construct
  source 1..20: mol_type = other RNA
cagaaccttagaaatttaag

SEQ ID NO: 26833 - RNA, 20 nt, synthetic construct
  source 1..20: mol_type = other RNA
cagaactaagaccccagtag

SEQ ID NO: 26834 - RNA, 20 nt, synthetic construct
  source 1..20: mol_type = other RNA
cagaactacacattccagac

SEQ ID NO: 26835 - RNA, 20 nt, synthetic construct
  source 1..20: mol_type = other RNA
cagaactccacctcagaaac

SEQ ID NO: 26836 - RNA, 20 nt, synthetic construct
  source 1..20: mol_type = other RNA
cagaactcgaagccttcccc

SEQ ID NO: 26837 - RNA, 20 nt, synthetic construct
  source 1..20: mol_type = other RNA
cagaactcttctccaaggaa

SEQ ID NO: 26838 - RNA, 20 nt, synthetic construct
  source 1..20: mol_type = other RNA
cagaactgctaatggtcctt

SEQ ID NO: 26839 - RNA, 20 nt, synthetic construct
  source 1..20: mol_type = other RNA
cagaactggggcttgaaccc

SEQ ID NO: 26840 - RNA, 20 nt, synthetic construct
  source 1..20: mol_type = other RNA
cagaactgtcactgacacag

SEQ ID NO: 26841 - RNA, 20 nt, synthetic construct
  source 1..20: mol_type = other RNA
cagaacttgacaagtatatt

SEQ ID NO: 26842 - RNA, 20 nt, synthetic construct
  source 1..20: mol_type = other RNA
cagaagaaattacttctttc

SEQ ID NO: 26843 - RNA, 20 nt, synthetic construct
  source 1..20: mol_type = other RNA
cagaagaagaattctatagg

SEQ ID NO: 26844 - RNA, 20 nt, synthetic construct
  source 1..20: mol_type = other RNA
cagaagaagtttctagttat

SEQ ID NO: 26845 - RNA, 20 nt, synthetic construct
  source 1..20: mol_type = other RNA
cagaagaattaaaatctcaa

SEQ ID NO: 26846 - RNA, 20 nt, synthetic construct
  source 1..20: mol_type = other RNA
cagaagacacaaaatcagat

SEQ ID NO: 26847 - RNA, 20 nt, synthetic construct
  source 1..20: mol_type = other RNA
cagaagagaatggctggaat

SEQ ID NO: 26848 - RNA, 20 nt, synthetic construct
  source 1..20: mol_type = other RNA
cagaagagcactatgtaaat

SEQ ID NO: 26849 - RNA, 20 nt, synthetic construct
  source 1..20: mol_type = other RNA
cagaagaggataaggggcag

SEQ ID NO: 26850 - RNA, 20 nt, synthetic construct
  source 1..20: mol_type = other RNA
cagaagagtgaagctggacc

SEQ ID NO: 26851 - RNA, 20 nt, synthetic construct
  source 1..20: mol_type = other RNA
cagaagcacaccaaggtttc

SEQ ID NO: 26852 - RNA, 20 nt, synthetic construct
  source 1..20: mol_type = other RNA
cagaagccctgcagccagat

SEQ ID NO: 26853 - RNA, 20 nt, synthetic construct
  source 1..20: mol_type = other RNA
cagaagctaaattttcatag

SEQ ID NO: 26854 - RNA, 20 nt, synthetic construct
  source 1..20: mol_type = other RNA
cagaagctatagctgagaag

SEQ ID NO: 26855 - RNA, 20 nt, synthetic construct
  source 1..20: mol_type = other RNA
cagaagctttcagacttaac

SEQ ID NO: 26856 - RNA, 20 nt, synthetic construct
  source 1..20: mol_type = other RNA
cagaaggagaaaacaaaaag

SEQ ID NO: 26857 - RNA, 20 nt, synthetic construct
  source 1..20: mol_type = other RNA
cagaaggagaaaccatttac

SEQ ID NO: 26858 - RNA, 20 nt, synthetic construct
  source 1..20: mol_type = other RNA
cagaaggaggaaaataattt

SEQ ID NO: 26859 - RNA, 20 nt, synthetic construct
  source 1..20: mol_type = other RNA
cagaaggagtccagtcctgc

SEQ ID NO: 26860 - RNA, 20 nt, synthetic construct
  source 1..20: mol_type = other RNA
cagaagggaaaggatgacct

SEQ ID NO: 26861 - RNA, 20 nt, synthetic construct
  source 1..20: mol_type = other RNA
cagaagggtatatacaatat

SEQ ID NO: 26862 - RNA, 20 nt, synthetic construct
  source 1..20: mol_type = other RNA
cagaaggtgagggactgagc

SEQ ID NO: 26863 - RNA, 20 nt, synthetic construct
  source 1..20: mol_type = other RNA
cagaaggttaactaatagcc

SEQ ID NO: 26864 - RNA, 20 nt, synthetic construct
  source 1..20: mol_type = other RNA
cagaagtaactcttgagtta

SEQ ID NO: 26865 - RNA, 20 nt, synthetic construct
  source 1..20: mol_type = other RNA
cagaagtactactcattaaa

SEQ ID NO: 26866 - RNA, 20 nt, synthetic construct
  source 1..20: mol_type = other RNA
cagaagtcactttttattct

SEQ ID NO: 26867 - RNA, 20 nt, synthetic construct
  source 1..20: mol_type = other RNA
cagaagtgctgacttggcag

SEQ ID NO: 26868 - RNA, 20 nt, synthetic construct
  source 1..20: mol_type = other RNA
cagaagtgttttgatagttg

SEQ ID NO: 26869 - RNA, 20 nt, synthetic construct
  source 1..20: mol_type = other RNA
cagaataaaaagtgacttct

SEQ ID NO: 26870 - RNA, 20 nt, synthetic construct
  source 1..20: mol_type = other RNA
cagaataaatgaaaacagaa

SEQ ID NO: 26871 - RNA, 20 nt, synthetic construct
  source 1..20: mol_type = other RNA
cagaatacaaaaatgacaca

SEQ ID NO: 26872 - RNA, 20 nt, synthetic construct
  source 1..20: mol_type = other RNA
cagaatacaattacttttag

SEQ ID NO: 26873 - RNA, 20 nt, synthetic construct
  source 1..20: mol_type = other RNA
cagaataccagagattggga

SEQ ID NO: 26874 - RNA, 20 nt, synthetic construct
  source 1..20: mol_type = other RNA
cagaataggcaaattcatag

SEQ ID NO: 26875 - RNA, 20 nt, synthetic construct
  source 1..20: mol_type = other RNA
cagaatatactcagaaaaat

SEQ ID NO: 26876 - RNA, 20 nt, synthetic construct
  source 1..20: mol_type = other RNA
cagaatccccaaataacatg

SEQ ID NO: 26877 - RNA, 20 nt, synthetic construct
  source 1..20: mol_type = other RNA
cagaatccctttcgctaatc

SEQ ID NO: 26878 - RNA, 20 nt, synthetic construct
  source 1..20: mol_type = other RNA
cagaatcgtgatagtcttcc

SEQ ID NO: 26879 - RNA, 20 nt, synthetic construct
  source 1..20: mol_type = other RNA
cagaatcttactggtgttag

SEQ ID NO: 26880 - RNA, 20 nt, synthetic construct
  source 1..20: mol_type = other RNA
cagaatgacagaaaatatct

SEQ ID NO: 26881 - RNA, 20 nt, synthetic construct
  source 1..20: mol_type = other RNA
cagaatgaccgagatactta

SEQ ID NO: 26882 - RNA, 20 nt, synthetic construct
  source 1..20: mol_type = other RNA
cagaatgcatcttttaaaaa

SEQ ID NO: 26883 - RNA, 20 nt, synthetic construct
  source 1..20: mol_type = other RNA
cagaatggccctgcgattgg

SEQ ID NO: 26884 - RNA, 20 nt, synthetic construct
  source 1..20: mol_type = other RNA
cagaatgtccatcaggaaaa

SEQ ID NO: 26885 - RNA, 20 nt, synthetic construct
  source 1..20: mol_type = other RNA
cagaatgtgacctgtccttg

SEQ ID NO: 26886 - RNA, 20 nt, synthetic construct
  source 1..20: mol_type = other RNA
cagaatgttcaagtatttcc

SEQ ID NO: 26887 - RNA, 20 nt, synthetic construct
  source 1..20: mol_type = other RNA
cagaattaaacaatcttgaa

SEQ ID NO: 26888 - RNA, 20 nt, synthetic construct
  source 1..20: mol_type = other RNA
cagaattactgacaatagcc

SEQ ID NO: 26889 - RNA, 20 nt, synthetic construct
  source 1..20: mol_type = other RNA
cagaattagaaagctggact

SEQ ID NO: 26890 - RNA, 20 nt, synthetic construct
  source 1..20: mol_type = other RNA
cagaattatagagggcctaa

SEQ ID NO: 26891 - RNA, 20 nt, synthetic construct
  source 1..20: mol_type = other RNA
cagaattattgattggcaaa

SEQ ID NO: 26892 - RNA, 20 nt, synthetic construct
  source 1..20: mol_type = other RNA
cagaattcaaaaacactgta

SEQ ID NO: 26893 - RNA, 20 nt, synthetic construct
  source 1..20: mol_type = other RNA
cagaattcactgtgactcca

SEQ ID NO: 26894 - RNA, 20 nt, synthetic construct
  source 1..20: mol_type = other RNA
cagaattccatcagtggttg

SEQ ID NO: 26895 - RNA, 20 nt, synthetic construct
  source 1..20: mol_type = other RNA
cagaattccattccttttcg

SEQ ID NO: 26896 - RNA, 20 nt, synthetic construct
  source 1..20: mol_type = other RNA
cagaatttgaggtcttctag

SEQ ID NO: 26897 - RNA, 20 nt, synthetic construct
  source 1..20: mol_type = other RNA
cagacaaaaatagaggatgg

SEQ ID NO: 26898 - RNA, 20 nt, synthetic construct
  source 1..20: mol_type = other RNA
cagacaaaaattttcattct

SEQ ID NO: 26899 - RNA, 20 nt, synthetic construct
  source 1..20: mol_type = other RNA
cagacaacacattaataaga

SEQ ID NO: 26900 - RNA, 20 nt, synthetic construct
  source 1..20: mol_type = other RNA
cagacaataattcttcctgt

SEQ ID NO: 26901 - RNA, 20 nt, synthetic construct
  source 1..20: mol_type = other RNA
cagacacaccatgacagagt

SEQ ID NO: 26902 - RNA, 20 nt, synthetic construct
  source 1..20: mol_type = other RNA
cagacacactagctgaccca

SEQ ID NO: 26903 - RNA, 20 nt, synthetic construct
  source 1..20: mol_type = other RNA
cagacacctacattaatctc

SEQ ID NO: 26904 - RNA, 20 nt, synthetic construct
  source 1..20: mol_type = other RNA
cagacactgggttctcacca

SEQ ID NO: 26905 - RNA, 20 nt, synthetic construct
  source 1..20: mol_type = other RNA
cagacagaaagacagggaga

SEQ ID NO: 26906 - RNA, 20 nt, synthetic construct
  source 1..20: mol_type = other RNA
cagacagacatgcatgcaca

SEQ ID NO: 26907 - RNA, 20 nt, synthetic construct
  source 1..20: mol_type = other RNA
cagacagatatatgcattcc

SEQ ID NO: 26908 - RNA, 20 nt, synthetic construct
  source 1..20: mol_type = other RNA
cagacagctaatatgctgta

SEQ ID NO: 26909 - RNA, 20 nt, synthetic construct
  source 1..20: mol_type = other RNA
cagacagggaatgcccctgt

SEQ ID NO: 26910 - RNA, 20 nt, synthetic construct
  source 1..20: mol_type = other RNA
cagacagggaatggggagct

SEQ ID NO: 26911 - RNA, 20 nt, synthetic construct
  source 1..20: mol_type = other RNA
cagacagtaatttatacaaa

SEQ ID NO: 26912 - RNA, 20 nt, synthetic construct
  source 1..20: mol_type = other RNA
cagacatgaacaatccttct

SEQ ID NO: 26913 - RNA, 20 nt, synthetic construct
  source 1..20: mol_type = other RNA
cagacatgcacgagaaaagc

SEQ ID NO: 26914 - RNA, 20 nt, synthetic construct
  source 1..20: mol_type = other RNA
cagacatgcatgcacacaga

SEQ ID NO: 26915 - RNA, 20 nt, synthetic construct
  source 1..20: mol_type = other RNA
cagacatgccacaccacatc

SEQ ID NO: 26916 - RNA, 20 nt, synthetic construct
  source 1..20: mol_type = other RNA
cagacatttctcatactttg

SEQ ID NO: 26917 - RNA, 20 nt, synthetic construct
  source 1..20: mol_type = other RNA
cagacatttggaatagagag

SEQ ID NO: 26918 - RNA, 20 nt, synthetic construct
  source 1..20: mol_type = other RNA
cagacattttatttatacag

SEQ ID NO: 26919 - RNA, 20 nt, synthetic construct
  source 1..20: mol_type = other RNA
cagaccaagaaaggacttca

SEQ ID NO: 26920 - RNA, 20 nt, synthetic construct
  source 1..20: mol_type = other RNA
cagaccaagtttaaccaatt

SEQ ID NO: 26921 - RNA, 20 nt, synthetic construct
  source 1..20: mol_type = other RNA
cagaccagcagttcaagcac

SEQ ID NO: 26922 - RNA, 20 nt, synthetic construct
  source 1..20: mol_type = other RNA
cagacccgccgcagagccgg

SEQ ID NO: 26923 - RNA, 20 nt, synthetic construct
  source 1..20: mol_type = other RNA
cagaccctggcttgtgacat

SEQ ID NO: 26924 - RNA, 20 nt, synthetic construct
  source 1..20: mol_type = other RNA
cagacccttatgtccagccc

SEQ ID NO: 26925 - RNA, 20 nt, synthetic construct
  source 1..20: mol_type = other RNA
cagaccctttatcggataag

SEQ ID NO: 26926 - RNA, 20 nt, synthetic construct
  source 1..20: mol_type = other RNA
cagacctctattaaatcatg

SEQ ID NO: 26927 - RNA, 20 nt, synthetic construct
  source 1..20: mol_type = other RNA
cagacctctgaagagtctat

SEQ ID NO: 26928 - RNA, 20 nt, synthetic construct
  source 1..20: mol_type = other RNA
cagacctgcacaaaggattg

SEQ ID NO: 26929 - RNA, 20 nt, synthetic construct
  source 1..20: mol_type = other RNA
cagaccttattcaaataatt

SEQ ID NO: 26930 - RNA, 20 nt, synthetic construct
  source 1..20: mol_type = other RNA
cagacgcaaaggatgtcaac

SEQ ID NO: 26931 - RNA, 20 nt, synthetic construct
  source 1..20: mol_type = other RNA
cagactaagacactagctat

SEQ ID NO: 26932 - RNA, 20 nt, synthetic construct
  source 1..20: mol_type = other RNA
cagactaatatgagttcctg

SEQ ID NO: 26933 - RNA, 20 nt, synthetic construct
  source 1..20: mol_type = other RNA
cagactcaagcctgataagc

SEQ ID NO: 26934 - RNA, 20 nt, synthetic construct
  source 1..20: mol_type = other RNA
cagactcaataaccacatgt

SEQ ID NO: 26935 - RNA, 20 nt, synthetic construct
  source 1..20: mol_type = other RNA
cagactcattgcctatagac

SEQ ID NO: 26936 - RNA, 20 nt, synthetic construct
  source 1..20: mol_type = other RNA
cagactccttcccctggtcg

SEQ ID NO: 26937 - RNA, 20 nt, synthetic construct
  source 1..20: mol_type = other RNA
cagactcttgtcccggcatg

SEQ ID NO: 26938 - RNA, 20 nt, synthetic construct
  source 1..20: mol_type = other RNA
cagactgaccaacatggaca

SEQ ID NO: 26939 - RNA, 20 nt, synthetic construct
  source 1..20: mol_type = other RNA
cagactgagccagcaaatca

SEQ ID NO: 26940 - RNA, 20 nt, synthetic construct
  source 1..20: mol_type = other RNA
cagactgattaatttgaggt

SEQ ID NO: 26941 - RNA, 20 nt, synthetic construct
  source 1..20: mol_type = other RNA
cagactgcaggtcttcaacc

SEQ ID NO: 26942 - RNA, 20 nt, synthetic construct
  source 1..20: mol_type = other RNA
cagactgcagttggattata

SEQ ID NO: 26943 - RNA, 20 nt, synthetic construct
  source 1..20: mol_type = other RNA
cagactggagttcactggca

SEQ ID NO: 26944 - RNA, 20 nt, synthetic construct
  source 1..20: mol_type = other RNA
cagactgggcaacagagaca

SEQ ID NO: 26945 - RNA, 20 nt, synthetic construct
  source 1..20: mol_type = other RNA
cagactgtattaccagctta

SEQ ID NO: 26946 - RNA, 20 nt, synthetic construct
  source 1..20: mol_type = other RNA
cagactgtgccttgatccat

SEQ ID NO: 26947 - RNA, 20 nt, synthetic construct
  source 1..20: mol_type = other RNA
cagacttaactataggagtt

SEQ ID NO: 26948 - RNA, 20 nt, synthetic construct
  source 1..20: mol_type = other RNA
cagagaaactggaatcaatc

SEQ ID NO: 26949 - RNA, 20 nt, synthetic construct
  source 1..20: mol_type = other RNA
cagagaacagcattatctta

SEQ ID NO: 26950 - RNA, 20 nt, synthetic construct
  source 1..20: mol_type = other RNA
cagagaactgactgaaggat

SEQ ID NO: 26951 - RNA, 20 nt, synthetic construct
  source 1..20: mol_type = other RNA
cagagaagtgaagcttcaaa

SEQ ID NO: 26952 - RNA, 20 nt, synthetic construct
  source 1..20: mol_type = other RNA
cagagaagttttccaggaaa

SEQ ID NO: 26953 - RNA, 20 nt, synthetic construct
  source 1..20: mol_type = other RNA
cagagaattcagagtggcta

SEQ ID NO: 26954 - RNA, 20 nt, synthetic construct
  source 1..20: mol_type = other RNA
cagagacaaagcataaaata

SEQ ID NO: 26955 - RNA, 20 nt, synthetic construct
  source 1..20: mol_type = other RNA
cagagacacacatcagacac

SEQ ID NO: 26956 - RNA, 20 nt, synthetic construct
  source 1..20: mol_type = other RNA
cagagacacatactgaaaga

SEQ ID NO: 26957 - RNA, 20 nt, synthetic construct
  source 1..20: mol_type = other RNA
cagagacagagaatctgtct

SEQ ID NO: 26958 - RNA, 20 nt, synthetic construct
  source 1..20: mol_type = other RNA
cagagacggggtcccactat

SEQ ID NO: 26959 - RNA, 20 nt, synthetic construct
  source 1..20: mol_type = other RNA
cagagactggatagcaactt

SEQ ID NO: 26960 - RNA, 20 nt, synthetic construct
  source 1..20: mol_type = other RNA
cagagactgtgcttccacag

SEQ ID NO: 26961 - RNA, 20 nt, synthetic construct
  source 1..20: mol_type = other RNA
cagagagacctgaagactgg

SEQ ID NO: 26962 - RNA, 20 nt, synthetic construct
  source 1..20: mol_type = other RNA
cagagagagaagatgacatt

SEQ ID NO: 26963 - RNA, 20 nt, synthetic construct
  source 1..20: mol_type = other RNA
cagagagagacctttcttta

SEQ ID NO: 26964 - RNA, 20 nt, synthetic construct
  source 1..20: mol_type = other RNA
cagagagagtaactggtcca

SEQ ID NO: 26965 - RNA, 20 nt, synthetic construct
  source 1..20: mol_type = other RNA
cagagagatggtgggagagg

SEQ ID NO: 26966 - RNA, 20 nt, synthetic construct
  source 1..20: mol_type = other RNA
cagagaggctaggtgacctg

SEQ ID NO: 26967 - RNA, 20 nt, synthetic construct
  source 1..20: mol_type = other RNA
cagagaggctttttattaga

SEQ ID NO: 26968 - RNA, 20 nt, synthetic construct
  source 1..20: mol_type = other RNA
cagagagtggaaagagccag

SEQ ID NO: 26969 - RNA, 20 nt, synthetic construct
  source 1..20: mol_type = other RNA
cagagataactgggtgtgca

SEQ ID NO: 26970 - RNA, 20 nt, synthetic construct
  source 1..20: mol_type = other RNA
cagagatctgaaattgactt

SEQ ID NO: 26971 - RNA, 20 nt, synthetic construct
  source 1..20: mol_type = other RNA
cagagattgggaaaatcttg

SEQ ID NO: 26972 - RNA, 20 nt, synthetic construct
  source 1..20: mol_type = other RNA
cagagattgtcgttgagtac

SEQ ID NO: 26973 - RNA, 20 nt, synthetic construct
  source 1..20: mol_type = other RNA
cagagattttcccaaagata

SEQ ID NO: 26974 - RNA, 20 nt, synthetic construct
  source 1..20: mol_type = other RNA
cagagcaaactcagatctga

SEQ ID NO: 26975 - RNA, 20 nt, synthetic construct
  source 1..20: mol_type = other RNA
cagagcaacaacctgtctca

SEQ ID NO: 26976 - RNA, 20 nt, synthetic construct
  source 1..20: mol_type = other RNA
cagagcaagcacgttagcat

SEQ ID NO: 26977 - RNA, 20 nt, synthetic construct
  source 1..20: mol_type = other RNA
cagagcacagactcaagcct

SEQ ID NO: 26978 - RNA, 20 nt, synthetic construct
  source 1..20: mol_type = other RNA
cagagcagcactgatgtgta

SEQ ID NO: 26979 - RNA, 20 nt, synthetic construct
  source 1..20: mol_type = other RNA
cagagcaggctccacttggg

SEQ ID NO: 26980 - RNA, 20 nt, synthetic construct
  source 1..20: mol_type = other RNA
cagagcaggggtggggggat

SEQ ID NO: 26981 - RNA, 20 nt, synthetic construct
  source 1..20: mol_type = other RNA
cagagcagtaggcttagata

SEQ ID NO: 26982 - RNA, 20 nt, synthetic construct
  source 1..20: mol_type = other RNA
cagagcatgtcccctggagt

SEQ ID NO: 26983 - RNA, 20 nt, synthetic construct
  source 1..20: mol_type = other RNA
cagagccgaaatgcacttag

SEQ ID NO: 26984 - RNA, 20 nt, synthetic construct
  source 1..20: mol_type = other RNA
cagagccgagcagaagggaa

SEQ ID NO: 26985 - RNA, 20 nt, synthetic construct
  source 1..20: mol_type = other RNA
cagagcctaaaataggccta

SEQ ID NO: 26986 - RNA, 20 nt, synthetic construct
  source 1..20: mol_type = other RNA
cagagcctaatgtgtaagaa

SEQ ID NO: 26987 - RNA, 20 nt, synthetic construct
  source 1..20: mol_type = other RNA
cagagcggaatttttatatt

SEQ ID NO: 26988 - RNA, 20 nt, synthetic construct
  source 1..20: mol_type = other RNA
cagagcgggtttcctcggtc

SEQ ID NO: 26989 - RNA, 20 nt, synthetic construct
  source 1..20: mol_type = other RNA
cagagctagaactagaatac

SEQ ID NO: 26990 - RNA, 20 nt, synthetic construct
  source 1..20: mol_type = other RNA
cagagctccctctccctccc

SEQ ID NO: 26991 - RNA, 20 nt, synthetic construct
  source 1..20: mol_type = other RNA
cagagctttgttatgaaaat

SEQ ID NO: 26992 - RNA, 20 nt, synthetic construct
  source 1..20: mol_type = other RNA
cagaggaagcttataatttc

SEQ ID NO: 26993 - RNA, 20 nt, synthetic construct
  source 1..20: mol_type = other RNA
cagaggagcagttactcctg

SEQ ID NO: 26994 - RNA, 20 nt, synthetic construct
  source 1..20: mol_type = other RNA
cagaggaggaagagatagtc

SEQ ID NO: 26995 - RNA, 20 nt, synthetic construct
  source 1..20: mol_type = other RNA
cagaggagggatgcattcta

SEQ ID NO: 26996 - RNA, 20 nt, synthetic construct
  source 1..20: mol_type = other RNA
cagaggattttggattgcga

SEQ ID NO: 26997 - RNA, 20 nt, synthetic construct
  source 1..20: mol_type = other RNA
cagaggcaacagtcattcag

SEQ ID NO: 26998 - RNA, 20 nt, synthetic construct
  source 1..20: mol_type = other RNA
cagaggcatgcacggacttg

SEQ ID NO: 26999 - RNA, 20 nt, synthetic construct
  source 1..20: mol_type = other RNA
cagaggccaaatgaaaggcg

SEQ ID NO: 27000 - RNA, 20 nt, synthetic construct
  source 1..20: mol_type = other RNA
cagaggccctggtgctttct

SEQ ID NO: 27001 - RNA, 20 nt, synthetic construct
  source 1..20: mol_type = other RNA
cagaggctttttatatttcc

SEQ ID NO: 27002 - RNA, 20 nt, synthetic construct
  source 1..20: mol_type = other RNA
cagagggaaactgtttttgc

SEQ ID NO: 27003 - RNA, 20 nt, synthetic construct
  source 1..20: mol_type = other RNA
cagagggaatctaggaaaca

SEQ ID NO: 27004 - RNA, 20 nt, synthetic construct
  source 1..20: mol_type = other RNA
cagagggagcagcgggcggc

SEQ ID NO: 27005 - RNA, 20 nt, synthetic construct
  source 1..20: mol_type = other RNA
cagagggagcgccacgtgaa

SEQ ID NO: 27006 - RNA, 20 nt, synthetic construct
  source 1..20: mol_type = other RNA
cagagggtaacgtgagctgg

SEQ ID NO: 27007 - RNA, 20 nt, synthetic construct
  source 1..20: mol_type = other RNA
cagaggtactcaacgacaat

SEQ ID NO: 27008 - RNA, 20 nt, synthetic construct
  source 1..20: mol_type = other RNA
cagaggtatttggggctagg

SEQ ID NO: 27009 - RNA, 20 nt, synthetic construct
  source 1..20: mol_type = other RNA
cagaggtcaggaaggcagga

SEQ ID NO: 27010 - RNA, 20 nt, synthetic construct
  source 1..20: mol_type = other RNA
cagaggtctgttactcccga

SEQ ID NO: 27011 - RNA, 20 nt, synthetic construct
  source 1..20: mol_type = other RNA
cagaggtgagctttttcttt

SEQ ID NO: 27012 - RNA, 20 nt, synthetic construct
  source 1..20: mol_type = other RNA
cagaggttaaagcaacagga

SEQ ID NO: 27013 - RNA, 20 nt, synthetic construct
  source 1..20: mol_type = other RNA
cagaggttcttttaaatgcc

SEQ ID NO: 27014 - RNA, 20 nt, synthetic construct
  source 1..20: mol_type = other RNA
cagaggttgcagtgaagccg

SEQ ID NO: 27015 - RNA, 20 nt, synthetic construct
  source 1..20: mol_type = other RNA
cagagtagagaaggctttgt

SEQ ID NO: 27016 - RNA, 20 nt, synthetic construct
  source 1..20: mol_type = other RNA
cagagtatatatgctcccta

SEQ ID NO: 27017 - RNA, 20 nt, synthetic construct
  source 1..20: mol_type = other RNA
cagagtcagaaaattaaatt

SEQ ID NO: 27018 - RNA, 20 nt, synthetic construct
  source 1..20: mol_type = other RNA
cagagtcctgagggtgagac

SEQ ID NO: 27019 - RNA, 20 nt, synthetic construct
  source 1..20: mol_type = other RNA
cagagtgaaactctggctca

SEQ ID NO: 27020 - RNA, 20 nt, synthetic construct
  source 1..20: mol_type = other RNA
cagagtgaacaggcaacctt

SEQ ID NO: 27021 - RNA, 20 nt, synthetic construct
  source 1..20: mol_type = other RNA
cagagtgctgggtagagact

SEQ ID NO: 27022 - RNA, 20 nt, synthetic construct
  source 1..20: mol_type = other RNA
cagagtggctaatgtggctt

SEQ ID NO: 27023 - RNA, 20 nt, synthetic construct
  source 1..20: mol_type = other RNA
cagagtgttcaaaagcccca

SEQ ID NO: 27024 - RNA, 20 nt, synthetic construct
  source 1..20: mol_type = other RNA
cagagttcagcttacagtca

SEQ ID NO: 27025 - RNA, 20 nt, synthetic construct
  source 1..20: mol_type = other RNA
cagagttccacctccatcac

SEQ ID NO: 27026 - RNA, 20 nt, synthetic construct
  source 1..20: mol_type = other RNA
cagagttggcacagccagtc

SEQ ID NO: 27027 - RNA, 20 nt, synthetic construct
  source 1..20: mol_type = other RNA
cagagttgtatctgtgatcc

SEQ ID NO: 27028 - RNA, 20 nt, synthetic construct
  source 1..20: mol_type = other RNA
cagagttttccaataagtta

SEQ ID NO: 27029 - RNA, 20 nt, synthetic construct
  source 1..20: mol_type = other RNA
cagataaattatagctccaa

SEQ ID NO: 27030 - RNA, 20 nt, synthetic construct
  source 1..20: mol_type = other RNA
cagataacaaagggttcttg

SEQ ID NO: 27031 - RNA, 20 nt, synthetic construct
  source 1..20: mol_type = other RNA
cagataacagtggttaggaa

SEQ ID NO: 27032 - RNA, 20 nt, synthetic construct
  source 1..20: mol_type = other RNA
cagataaccaataagaagtg

SEQ ID NO: 27033 - RNA, 20 nt, synthetic construct
  source 1..20: mol_type = other RNA
cagataacctagattttaaa

SEQ ID NO: 27034 - RNA, 20 nt, synthetic construct
  source 1..20: mol_type = other RNA
cagataagatccaagtattg

SEQ ID NO: 27035 - RNA, 20 nt, synthetic construct
  source 1..20: mol_type = other RNA
cagataatttcttcagaaga

SEQ ID NO: 27036 - RNA, 20 nt, synthetic construct
  source 1..20: mol_type = other RNA
cagatacaactctgaccatt

SEQ ID NO: 27037 - RNA, 20 nt, synthetic construct
  source 1..20: mol_type = other RNA
cagatacgttaaaggaaaag

SEQ ID NO: 27038 - RNA, 20 nt, synthetic construct
  source 1..20: mol_type = other RNA
cagatactcaatcagtggcc

SEQ ID NO: 27039 - RNA, 20 nt, synthetic construct
  source 1..20: mol_type = other RNA
cagatactcatgcttgctcc

SEQ ID NO: 27040 - RNA, 20 nt, synthetic construct
  source 1..20: mol_type = other RNA
cagatagaaaagacaatagc

SEQ ID NO: 27041 - RNA, 20 nt, synthetic construct
  source 1..20: mol_type = other RNA
cagatagaattaaatgaaga

SEQ ID NO: 27042 - RNA, 20 nt, synthetic construct
  source 1..20: mol_type = other RNA
cagatatatgcattcccatg

SEQ ID NO: 27043 - RNA, 20 nt, synthetic construct
  source 1..20: mol_type = other RNA
cagatatcaatctggatata

SEQ ID NO: 27044 - RNA, 20 nt, synthetic construct
  source 1..20: mol_type = other RNA
cagatatcacccagaccaag

SEQ ID NO: 27045 - RNA, 20 nt, synthetic construct
  source 1..20: mol_type = other RNA
cagatatccacctgcctcag

SEQ ID NO: 27046 - RNA, 20 nt, synthetic construct
  source 1..20: mol_type = other RNA
cagatatccataaggaaaaa

SEQ ID NO: 27047 - RNA, 20 nt, synthetic construct
  source 1..20: mol_type = other RNA
cagatatgaaagaggagaca

SEQ ID NO: 27048 - RNA, 20 nt, synthetic construct
  source 1..20: mol_type = other RNA
cagatattatcctccaatgt

SEQ ID NO: 27049 - RNA, 20 nt, synthetic construct
  source 1..20: mol_type = other RNA
cagatcaaacgtgctttcct

SEQ ID NO: 27050 - RNA, 20 nt, synthetic construct
  source 1..20: mol_type = other RNA
cagatcaattgaccaaacat

SEQ ID NO: 27051 - RNA, 20 nt, synthetic construct
  source 1..20: mol_type = other RNA
cagatcacaaggtcagaagt

SEQ ID NO: 27052 - RNA, 20 nt, synthetic construct
  source 1..20: mol_type = other RNA
cagatcacgaggtcgagagt

SEQ ID NO: 27053 - RNA, 20 nt, synthetic construct
  source 1..20: mol_type = other RNA
cagatcagtaacaaataaga

SEQ ID NO: 27054 - RNA, 20 nt, synthetic construct
  source 1..20: mol_type = other RNA
cagatcccaaaaaggttttt

SEQ ID NO: 27055 - RNA, 20 nt, synthetic construct
  source 1..20: mol_type = other RNA
cagatcccaattacttccag

SEQ ID NO: 27056 - RNA, 20 nt, synthetic construct
  source 1..20: mol_type = other RNA
cagatcctcacatcagttac

SEQ ID NO: 27057 - RNA, 20 nt, synthetic construct
  source 1..20: mol_type = other RNA
cagatctaacaaacgcattg

SEQ ID NO: 27058 - RNA, 20 nt, synthetic construct
  source 1..20: mol_type = other RNA
cagatctctgacattggtta

SEQ ID NO: 27059 - RNA, 20 nt, synthetic construct
  source 1..20: mol_type = other RNA
cagatctgagaagactaagc

SEQ ID NO: 27060 - RNA, 20 nt, synthetic construct
  source 1..20: mol_type = other RNA
cagatctgagagatagaaag

SEQ ID NO: 27061 - RNA, 20 nt, synthetic construct
  source 1..20: mol_type = other RNA
cagatctgagtttgctctgc

SEQ ID NO: 27062 - RNA, 20 nt, synthetic construct
  source 1..20: mol_type = other RNA
cagatctgctgtaagctggt

SEQ ID NO: 27063 - RNA, 20 nt, synthetic construct
  source 1..20: mol_type = other RNA
cagatctgcttgcagacaat

SEQ ID NO: 27064 - RNA, 20 nt, synthetic construct
  source 1..20: mol_type = other RNA
cagatctgttgcagtccccg

SEQ ID NO: 27065 - RNA, 20 nt, synthetic construct
  source 1..20: mol_type = other RNA
cagatcttatggaatagttg

SEQ ID NO: 27066 - RNA, 20 nt, synthetic construct
  source 1..20: mol_type = other RNA
cagatcttggccgaatgtgg

SEQ ID NO: 27067 - RNA, 20 nt, synthetic construct
  source 1..20: mol_type = other RNA
cagatctttttgtgtatatg

SEQ ID NO: 27068 - RNA, 20 nt, synthetic construct
  source 1..20: mol_type = other RNA
cagatgaagcagggaaatgg

SEQ ID NO: 27069 - RNA, 20 nt, synthetic construct
  source 1..20: mol_type = other RNA
cagatgaatgagcaaggtcg

SEQ ID NO: 27070 - RNA, 20 nt, synthetic construct
  source 1..20: mol_type = other RNA
cagatgacagaaataataca

SEQ ID NO: 27071 - RNA, 20 nt, synthetic construct
  source 1..20: mol_type = other RNA
cagatgagaaatacttggac

SEQ ID NO: 27072 - RNA, 20 nt, synthetic construct
  source 1..20: mol_type = other RNA
cagatgagactcttaatatt

SEQ ID NO: 27073 - RNA, 20 nt, synthetic construct
  source 1..20: mol_type = other RNA
cagatgatcctcccgccttg

SEQ ID NO: 27074 - RNA, 20 nt, synthetic construct
  source 1..20: mol_type = other RNA
cagatgcgtggttcacacct

SEQ ID NO: 27075 - RNA, 20 nt, synthetic construct
  source 1..20: mol_type = other RNA
cagatgcttctagccaaagc

SEQ ID NO: 27076 - RNA, 20 nt, synthetic construct
  source 1..20: mol_type = other RNA
cagatggaactctattttcc

SEQ ID NO: 27077 - RNA, 20 nt, synthetic construct
  source 1..20: mol_type = other RNA
cagatggacaaattaccatg

SEQ ID NO: 27078 - RNA, 20 nt, synthetic construct
  source 1..20: mol_type = other RNA
cagatggccccaaaattacc

SEQ ID NO: 27079 - RNA, 20 nt, synthetic construct
  source 1..20: mol_type = other RNA
cagatggggattgagggtta

SEQ ID NO: 27080 - RNA, 20 nt, synthetic construct
  source 1..20: mol_type = other RNA
cagatggtaaattggtcctg

SEQ ID NO: 27081 - RNA, 20 nt, synthetic construct
  source 1..20: mol_type = other RNA
cagatggtccttttttactg

SEQ ID NO: 27082 - RNA, 20 nt, synthetic construct
  source 1..20: mol_type = other RNA
cagatggtgatacctcttac

SEQ ID NO: 27083 - RNA, 20 nt, synthetic construct
  source 1..20: mol_type = other RNA
cagatgtagagaaacaggat

SEQ ID NO: 27084 - RNA, 20 nt, synthetic construct
  source 1..20: mol_type = other RNA
cagatgtctccattttgcca

SEQ ID NO: 27085 - RNA, 20 nt, synthetic construct
  source 1..20: mol_type = other RNA
cagatgtgagcccccacgcc

SEQ ID NO: 27086 - RNA, 20 nt, synthetic construct
  source 1..20: mol_type = other RNA
cagatgtgcttaatcttcac

SEQ ID NO: 27087 - RNA, 20 nt, synthetic construct
  source 1..20: mol_type = other RNA
cagatgttctaatttcttta

SEQ ID NO: 27088 - RNA, 20 nt, synthetic construct
  source 1..20: mol_type = other RNA
cagatgttgcggtgagcaga

SEQ ID NO: 27089 - RNA, 20 nt, synthetic construct
  source 1..20: mol_type = other RNA
cagatgttttacacatgtca

SEQ ID NO: 27090 - RNA, 20 nt, synthetic construct
  source 1..20: mol_type = other RNA
cagattaaataccacctgaa

SEQ ID NO: 27091 - RNA, 20 nt, synthetic construct
  source 1..20: mol_type = other RNA
cagattaagcatagtttgag

SEQ ID NO: 27092 - RNA, 20 nt, synthetic construct
  source 1..20: mol_type = other RNA
cagattcaatgcaatactta

SEQ ID NO: 27093 - RNA, 20 nt, synthetic construct
  source 1..20: mol_type = other RNA
cagattcaccaattgttaac

SEQ ID NO: 27094 - RNA, 20 nt, synthetic construct
  source 1..20: mol_type = other RNA
cagattcacgcacagggaga

SEQ ID NO: 27095 - RNA, 20 nt, synthetic construct
  source 1..20: mol_type = other RNA
cagattcatcttgacttcac

SEQ ID NO: 27096 - RNA, 20 nt, synthetic construct
  source 1..20: mol_type = other RNA
cagattccttttttatgtgc

SEQ ID NO: 27097 - RNA, 20 nt, synthetic construct
  source 1..20: mol_type = other RNA
cagattctctgtctctgttg

SEQ ID NO: 27098 - RNA, 20 nt, synthetic construct
  source 1..20: mol_type = other RNA
cagattgaaatctaggcata

SEQ ID NO: 27099 - RNA, 20 nt, synthetic construct
  source 1..20: mol_type = other RNA
cagattgaccttgtatccag

SEQ ID NO: 27100 - RNA, 20 nt, synthetic construct
  source 1..20: mol_type = other RNA
cagattgatatctgagtgtt

SEQ ID NO: 27101 - RNA, 20 nt, synthetic construct
  source 1..20: mol_type = other RNA
cagattgatttatatgttga

SEQ ID NO: 27102 - RNA, 20 nt, synthetic construct
  source 1..20: mol_type = other RNA
cagattgcttgagagagata

SEQ ID NO: 27103 - RNA, 20 nt, synthetic construct
  source 1..20: mol_type = other RNA
cagatttcaggtggtattta

SEQ ID NO: 27104 - RNA, 20 nt, synthetic construct
  source 1..20: mol_type = other RNA
cagatttctttttactcatg

SEQ ID NO: 27105 - RNA, 20 nt, synthetic construct
  source 1..20: mol_type = other RNA
cagatttgatcctggaatag

SEQ ID NO: 27106 - RNA, 20 nt, synthetic construct
  source 1..20: mol_type = other RNA
cagattttattaatttagcc

SEQ ID NO: 27107 - RNA, 20 nt, synthetic construct
  source 1..20: mol_type = other RNA
cagattttcttgttataagc

SEQ ID NO: 27108 - RNA, 20 nt, synthetic construct
  source 1..20: mol_type = other RNA
cagatttttaaaatctaggt

SEQ ID NO: 27109 - RNA, 20 nt, synthetic construct
  source 1..20: mol_type = other RNA
cagcaaaagaattaaactca

SEQ ID NO: 27110 - RNA, 20 nt, synthetic construct
  source 1..20: mol_type = other RNA
cagcaaaagcaattattagt

SEQ ID NO: 27111 - RNA, 20 nt, synthetic construct
  source 1..20: mol_type = other RNA
cagcaaaagcaccactgaga

SEQ ID NO: 27112 - RNA, 20 nt, synthetic construct
  source 1..20: mol_type = other RNA
cagcaaagcaagaaaaagaa

SEQ ID NO: 27113 - RNA, 20 nt, synthetic construct
  source 1..20: mol_type = other RNA
cagcaaataaacaaaatcaa

SEQ ID NO: 27114 - RNA, 20 nt, synthetic construct
  source 1..20: mol_type = other RNA
cagcaaatcagaaaaggctg

SEQ ID NO: 27115 - RNA, 20 nt, synthetic construct
  source 1..20: mol_type = other RNA
cagcaaatctctagaactta

SEQ ID NO: 27116 - RNA, 20 nt, synthetic construct
  source 1..20: mol_type = other RNA
cagcaacggaaatgagtgag

SEQ ID NO: 27117 - RNA, 20 nt, synthetic construct
  source 1..20: mol_type = other RNA
cagcaactcttggccatttt

SEQ ID NO: 27118 - RNA, 20 nt, synthetic construct
  source 1..20: mol_type = other RNA
cagcaagactttatgtggaa

SEQ ID NO: 27119 - RNA, 20 nt, synthetic construct
  source 1..20: mol_type = other RNA
cagcaagcagtaaatatact

SEQ ID NO: 27120 - RNA, 20 nt, synthetic construct
  source 1..20: mol_type = other RNA
cagcaaggaccattagcagt

SEQ ID NO: 27121 - RNA, 20 nt, synthetic construct
  source 1..20: mol_type = other RNA
cagcaaggctcctgcagaca

SEQ ID NO: 27122 - RNA, 20 nt, synthetic construct
  source 1..20: mol_type = other RNA
cagcaagggtggctggcact

SEQ ID NO: 27123 - RNA, 20 nt, synthetic construct
  source 1..20: mol_type = other RNA
cagcaattatttgaataagg

SEQ ID NO: 27124 - RNA, 20 nt, synthetic construct
  source 1..20: mol_type = other RNA
cagcacaatactgtctcagt

SEQ ID NO: 27125 - RNA, 20 nt, synthetic construct
  source 1..20: mol_type = other RNA
cagcacactcttaataactg

SEQ ID NO: 27126 - RNA, 20 nt, synthetic construct
  source 1..20: mol_type = other RNA
cagcacagagccgaaatgca

SEQ ID NO: 27127 - RNA, 20 nt, synthetic construct
  source 1..20: mol_type = other RNA
cagcacattaaataagggca

SEQ ID NO: 27128 - RNA, 20 nt, synthetic construct
  source 1..20: mol_type = other RNA
cagcaccaaagattatgttc

SEQ ID NO: 27129 - RNA, 20 nt, synthetic construct
  source 1..20: mol_type = other RNA
cagcaccacccttgatgtca

SEQ ID NO: 27130 - RNA, 20 nt, synthetic construct
  source 1..20: mol_type = other RNA
cagcaccagatactcaatca

SEQ ID NO: 27131 - RNA, 20 nt, synthetic construct
  source 1..20: mol_type = other RNA
cagcaccatctaacagaaat

SEQ ID NO: 27132 - RNA, 20 nt, synthetic construct
  source 1..20: mol_type = other RNA
cagcaccctcaaatgtctca

SEQ ID NO: 27133 - RNA, 20 nt, synthetic construct
  source 1..20: mol_type = other RNA
cagcacctaacaatgattat

SEQ ID NO: 27134 - RNA, 20 nt, synthetic construct
  source 1..20: mol_type = other RNA
cagcaccttttttggtattt

SEQ ID NO: 27135 - RNA, 20 nt, synthetic construct
  source 1..20: mol_type = other RNA
cagcactctgaatcacctca

SEQ ID NO: 27136 - RNA, 20 nt, synthetic construct
  source 1..20: mol_type = other RNA
cagcactgatgtgtagttat

SEQ ID NO: 27137 - RNA, 20 nt, synthetic construct
  source 1..20: mol_type = other RNA
cagcactgctattgataaat

SEQ ID NO: 27138 - RNA, 20 nt, synthetic construct
  source 1..20: mol_type = other RNA
cagcactgttaactgactta

SEQ ID NO: 27139 - RNA, 20 nt, synthetic construct
  source 1..20: mol_type = other RNA
cagcacttccattttgctta

SEQ ID NO: 27140 - RNA, 20 nt, synthetic construct
  source 1..20: mol_type = other RNA
cagcacttctgatatcctgt

SEQ ID NO: 27141 - RNA, 20 nt, synthetic construct
  source 1..20: mol_type = other RNA
cagcacttttgtactacttg

SEQ ID NO: 27142 - RNA, 20 nt, synthetic construct
  source 1..20: mol_type = other RNA
cagcagaacaaactgcgtgg

SEQ ID NO: 27143 - RNA, 20 nt, synthetic construct
  source 1..20: mol_type = other RNA
cagcagaaggtgagggactg

SEQ ID NO: 27144 - RNA, 20 nt, synthetic construct
  source 1..20: mol_type = other RNA
cagcagagaagtgaagcttc

SEQ ID NO: 27145 - RNA, 20 nt, synthetic construct
  source 1..20: mol_type = other RNA
cagcagataagatccaagta

SEQ ID NO: 27146 - RNA, 20 nt, synthetic construct
  source 1..20: mol_type = other RNA
cagcagatctgcttgcagac

SEQ ID NO: 27147 - RNA, 20 nt, synthetic construct
  source 1..20: mol_type = other RNA
cagcagcagagaagtgaagc

SEQ ID NO: 27148 - RNA, 20 nt, synthetic construct
  source 1..20: mol_type = other RNA
cagcagccccgacgcctttc

SEQ ID NO: 27149 - RNA, 20 nt, synthetic construct
  source 1..20: mol_type = other RNA
cagcagctctagcaaacaaa

SEQ ID NO: 27150 - RNA, 20 nt, synthetic construct
  source 1..20: mol_type = other RNA
cagcaggaaaagctaccctc

SEQ ID NO: 27151 - RNA, 20 nt, synthetic construct
  source 1..20: mol_type = other RNA
cagcagggctcctccaaggc

SEQ ID NO: 27152 - RNA, 20 nt, synthetic construct
  source 1..20: mol_type = other RNA
cagcaggggaaggcttcgag

SEQ ID NO: 27153 - RNA, 20 nt, synthetic construct
  source 1..20: mol_type = other RNA
cagcaggggctaagtagtgg

SEQ ID NO: 27154 - RNA, 20 nt, synthetic construct
  source 1..20: mol_type = other RNA
cagcagggtaaagtcaattc

SEQ ID NO: 27155 - RNA, 20 nt, synthetic construct
  source 1..20: mol_type = other RNA
cagcagtcttaaccattgag

SEQ ID NO: 27156 - RNA, 20 nt, synthetic construct
  source 1..20: mol_type = other RNA
cagcagtgaccatatttcca

SEQ ID NO: 27157 - RNA, 20 nt, synthetic construct
  source 1..20: mol_type = other RNA
cagcagttcaagcaccactt

SEQ ID NO: 27158 - RNA, 20 nt, synthetic construct
  source 1..20: mol_type = other RNA
cagcagttcagcctgcagaa

SEQ ID NO: 27159 - RNA, 20 nt, synthetic construct
  source 1..20: mol_type = other RNA
cagcagtttcacttcttagt

SEQ ID NO: 27160 - RNA, 20 nt, synthetic construct
  source 1..20: mol_type = other RNA
cagcagttttaaagaattcg

SEQ ID NO: 27161 - RNA, 20 nt, synthetic construct
  source 1..20: mol_type = other RNA
cagcataagacccctcaggt

SEQ ID NO: 27162 - RNA, 20 nt, synthetic construct
  source 1..20: mol_type = other RNA
cagcataattggttaaactt

SEQ ID NO: 27163 - RNA, 20 nt, synthetic construct
  source 1..20: mol_type = other RNA
cagcatactgtggatatctt

SEQ ID NO: 27164 - RNA, 20 nt, synthetic construct
  source 1..20: mol_type = other RNA
cagcatagcagaaccttaga

SEQ ID NO: 27165 - RNA, 20 nt, synthetic construct
  source 1..20: mol_type = other RNA
cagcatatacatgacatggt

SEQ ID NO: 27166 - RNA, 20 nt, synthetic construct
  source 1..20: mol_type = other RNA
cagcatattagctgtctgga

SEQ ID NO: 27167 - RNA, 20 nt, synthetic construct
  source 1..20: mol_type = other RNA
cagcatccactaggggacta

SEQ ID NO: 27168 - RNA, 20 nt, synthetic construct
  source 1..20: mol_type = other RNA
cagcatccccagaaagagag

SEQ ID NO: 27169 - RNA, 20 nt, synthetic construct
  source 1..20: mol_type = other RNA
cagcatccctccagtccagc

SEQ ID NO: 27170 - RNA, 20 nt, synthetic construct
  source 1..20: mol_type = other RNA
cagcatccctgccgcgcgcg

SEQ ID NO: 27171 - RNA, 20 nt, synthetic construct
  source 1..20: mol_type = other RNA
cagcatcttcactgactaca

SEQ ID NO: 27172 - RNA, 20 nt, synthetic construct
  source 1..20: mol_type = other RNA
cagcatcttttgacgcgcaa

SEQ ID NO: 27173 - RNA, 20 nt, synthetic construct
  source 1..20: mol_type = other RNA
cagcatgaagccctctaagt

SEQ ID NO: 27174 - RNA, 20 nt, synthetic construct
  source 1..20: mol_type = other RNA
cagcatgaatacctatttag

SEQ ID NO: 27175 - RNA, 20 nt, synthetic construct
  source 1..20: mol_type = other RNA
cagcatgctcactgtctcca

SEQ ID NO: 27176 - RNA, 20 nt, synthetic construct
  source 1..20: mol_type = other RNA
cagcatgtcttcagaggccc

SEQ ID NO: 27177 - RNA, 20 nt, synthetic construct
  source 1..20: mol_type = other RNA
cagcattaccctaataacaa

SEQ ID NO: 27178 - RNA, 20 nt, synthetic construct
  source 1..20: mol_type = other RNA
cagcattacttaggcagtta

SEQ ID NO: 27179 - RNA, 20 nt, synthetic construct
  source 1..20: mol_type = other RNA
cagcattatcttaataacct

SEQ ID NO: 27180 - RNA, 20 nt, synthetic construct
  source 1..20: mol_type = other RNA
cagcattgtttacagtagcc

SEQ ID NO: 27181 - RNA, 20 nt, synthetic construct
  source 1..20: mol_type = other RNA
cagcatttcagccaaagctg

SEQ ID NO: 27182 - RNA, 20 nt, synthetic construct
  source 1..20: mol_type = other RNA
cagcattttataggcattcc

SEQ ID NO: 27183 - RNA, 20 nt, synthetic construct
  source 1..20: mol_type = other RNA
cagccaaacagtttttacat

SEQ ID NO: 27184 - RNA, 20 nt, synthetic construct
  source 1..20: mol_type = other RNA
cagccaaagaaattggacgg

SEQ ID NO: 27185 - RNA, 20 nt, synthetic construct
  source 1..20: mol_type = other RNA
cagccaaagctggcatgttg

SEQ ID NO: 27186 - RNA, 20 nt, synthetic construct
  source 1..20: mol_type = other RNA
cagccaaataaaacacaagg

SEQ ID NO: 27187 - RNA, 20 nt, synthetic construct
  source 1..20: mol_type = other RNA
cagccacaagacataagcat

SEQ ID NO: 27188 - RNA, 20 nt, synthetic construct
  source 1..20: mol_type = other RNA
cagccacccttgctgcttct

SEQ ID NO: 27189 - RNA, 20 nt, synthetic construct
  source 1..20: mol_type = other RNA
cagccacgtgtattgagtgt

SEQ ID NO: 27190 - RNA, 20 nt, synthetic construct
  source 1..20: mol_type = other RNA
cagccactatagaaaatagt

SEQ ID NO: 27191 - RNA, 20 nt, synthetic construct
  source 1..20: mol_type = other RNA
cagccagagagtggaaagag

SEQ ID NO: 27192 - RNA, 20 nt, synthetic construct
  source 1..20: mol_type = other RNA
cagccagaggaagcttataa

SEQ ID NO: 27193 - RNA, 20 nt, synthetic construct
  source 1..20: mol_type = other RNA
cagccagatttgatcctgga

SEQ ID NO: 27194 - RNA, 20 nt, synthetic construct
  source 1..20: mol_type = other RNA
cagccagtcagtgatggagg

SEQ ID NO: 27195 - RNA, 20 nt, synthetic construct
  source 1..20: mol_type = other RNA
cagccatcaacctaatgaaa

SEQ ID NO: 27196 - RNA, 20 nt, synthetic construct
  source 1..20: mol_type = other RNA
cagccatcccagctacataa

SEQ ID NO: 27197 - RNA, 20 nt, synthetic construct
  source 1..20: mol_type = other RNA
cagccatggctcactgcggc

SEQ ID NO: 27198 - RNA, 20 nt, synthetic construct
  source 1..20: mol_type = other RNA
cagccattctcttctggata

SEQ ID NO: 27199 - RNA, 20 nt, synthetic construct
  source 1..20: mol_type = other RNA
cagcccccagttttgttgaa

SEQ ID NO: 27200 - RNA, 20 nt, synthetic construct
  source 1..20: mol_type = other RNA
cagccccctccctaccaccc

SEQ ID NO: 27201 - RNA, 20 nt, synthetic construct
  source 1..20: mol_type = other RNA
cagccccctcgaagagacca

SEQ ID NO: 27202 - RNA, 20 nt, synthetic construct
  source 1..20: mol_type = other RNA
cagccccctgagtagctgtg

SEQ ID NO: 27203 - RNA, 20 nt, synthetic construct
  source 1..20: mol_type = other RNA
cagccccgacgcctttcatt

SEQ ID NO: 27204 - RNA, 20 nt, synthetic construct
  source 1..20: mol_type = other RNA
cagccccgcttcagttggtg

SEQ ID NO: 27205 - RNA, 20 nt, synthetic construct
  source 1..20: mol_type = other RNA
cagcccctagcatgcagtag

SEQ ID NO: 27206 - RNA, 20 nt, synthetic construct
  source 1..20: mol_type = other RNA
cagcccctcatcctccgtag

SEQ ID NO: 27207 - RNA, 20 nt, synthetic construct
  source 1..20: mol_type = other RNA
cagcccctgccacactccag

SEQ ID NO: 27208 - RNA, 20 nt, synthetic construct
  source 1..20: mol_type = other RNA
cagcccctggtgatctatga

SEQ ID NO: 27209 - RNA, 20 nt, synthetic construct
  source 1..20: mol_type = other RNA
cagcccgacctccagcgcta

SEQ ID NO: 27210 - RNA, 20 nt, synthetic construct
  source 1..20: mol_type = other RNA
cagcccgtgtgtttagaata

SEQ ID NO: 27211 - RNA, 20 nt, synthetic construct
  source 1..20: mol_type = other RNA
cagccctgatagatattggc

SEQ ID NO: 27212 - RNA, 20 nt, synthetic construct
  source 1..20: mol_type = other RNA
cagccgccgcagaggccaaa

SEQ ID NO: 27213 - RNA, 20 nt, synthetic construct
  source 1..20: mol_type = other RNA
cagccggcatatgtcactgt

SEQ ID NO: 27214 - RNA, 20 nt, synthetic construct
  source 1..20: mol_type = other RNA
cagccgtgattgcaccactg

SEQ ID NO: 27215 - RNA, 20 nt, synthetic construct
  source 1..20: mol_type = other RNA
cagcctaaaccattttcaat

SEQ ID NO: 27216 - RNA, 20 nt, synthetic construct
  source 1..20: mol_type = other RNA
cagcctaaagtccacagatc

SEQ ID NO: 27217 - RNA, 20 nt, synthetic construct
  source 1..20: mol_type = other RNA
cagcctaagcaaatgtaatg

SEQ ID NO: 27218 - RNA, 20 nt, synthetic construct
  source 1..20: mol_type = other RNA
cagcctaagcaagttacatg

SEQ ID NO: 27219 - RNA, 20 nt, synthetic construct
  source 1..20: mol_type = other RNA
cagcctaattgtacacctca

SEQ ID NO: 27220 - RNA, 20 nt, synthetic construct
  source 1..20: mol_type = other RNA
cagcctaggcaagagagcaa

SEQ ID NO: 27221 - RNA, 20 nt, synthetic construct
  source 1..20: mol_type = other RNA
cagcctcaaacaatcctccc

SEQ ID NO: 27222 - RNA, 20 nt, synthetic construct
  source 1..20: mol_type = other RNA
cagcctcaacagcacttttg

SEQ ID NO: 27223 - RNA, 20 nt, synthetic construct
  source 1..20: mol_type = other RNA
cagcctcccgagtagttgta

SEQ ID NO: 27224 - RNA, 20 nt, synthetic construct
  source 1..20: mol_type = other RNA
cagcctctaatcaggttggg

SEQ ID NO: 27225 - RNA, 20 nt, synthetic construct
  source 1..20: mol_type = other RNA
cagcctgatgatgatggtga

SEQ ID NO: 27226 - RNA, 20 nt, synthetic construct
  source 1..20: mol_type = other RNA
cagcctgcagaaggagaaac

SEQ ID NO: 27227 - RNA, 20 nt, synthetic construct
  source 1..20: mol_type = other RNA
cagcctggccaacatcgtaa

SEQ ID NO: 27228 - RNA, 20 nt, synthetic construct
  source 1..20: mol_type = other RNA
cagcctgggcacacgccact

SEQ ID NO: 27229 - RNA, 20 nt, synthetic construct
  source 1..20: mol_type = other RNA
cagcctggtaatgaatagaa

SEQ ID NO: 27230 - RNA, 20 nt, synthetic construct
  source 1..20: mol_type = other RNA
cagcctggtcaacagggtaa

SEQ ID NO: 27231 - RNA, 20 nt, synthetic construct
  source 1..20: mol_type = other RNA
cagcctgtgtcagtgacagt

SEQ ID NO: 27232 - RNA, 20 nt, synthetic construct
  source 1..20: mol_type = other RNA
cagccttaatctcctgagta

SEQ ID NO: 27233 - RNA, 20 nt, synthetic construct
  source 1..20: mol_type = other RNA
cagccttccctgaacaatga

SEQ ID NO: 27234 - RNA, 20 nt, synthetic construct
  source 1..20: mol_type = other RNA
cagccttctctcttccaaat

SEQ ID NO: 27235 - RNA, 20 nt, synthetic construct
  source 1..20: mol_type = other RNA
cagccttggaggagccctgc

SEQ ID NO: 27236 - RNA, 20 nt, synthetic construct
  source 1..20: mol_type = other RNA
cagccttggtaagagtgaga

SEQ ID NO: 27237 - RNA, 20 nt, synthetic construct
  source 1..20: mol_type = other RNA
cagcctttaatttagcgttc

SEQ ID NO: 27238 - RNA, 20 nt, synthetic construct
  source 1..20: mol_type = other RNA
cagccttttctgatttgctg

SEQ ID NO: 27239 - RNA, 20 nt, synthetic construct
  source 1..20: mol_type = other RNA
cagcgccacttaaaaaatgc

SEQ ID NO: 27240 - RNA, 20 nt, synthetic construct
  source 1..20: mol_type = other RNA
cagcgcccggcccgttattt

SEQ ID NO: 27241 - RNA, 20 nt, synthetic construct
  source 1..20: mol_type = other RNA
cagcgctaagcactgcgcca

SEQ ID NO: 27242 - RNA, 20 nt, synthetic construct
  source 1..20: mol_type = other RNA
cagcgctaagtgcatttcgg

SEQ ID NO: 27243 - RNA, 20 nt, synthetic construct
  source 1..20: mol_type = other RNA
cagcgcttgaacaaatatga

SEQ ID NO: 27244 - RNA, 20 nt, synthetic construct
  source 1..20: mol_type = other RNA
cagcggcatacaggagttcc

SEQ ID NO: 27245 - RNA, 20 nt, synthetic construct
  source 1..20: mol_type = other RNA
cagcggggatgctcagggtg

SEQ ID NO: 27246 - RNA, 20 nt, synthetic construct
  source 1..20: mol_type = other RNA
cagcggggatggttgcacaa

SEQ ID NO: 27247 - RNA, 20 nt, synthetic construct
  source 1..20: mol_type = other RNA
cagcgtaactccatcttcac

SEQ ID NO: 27248 - RNA, 20 nt, synthetic construct
  source 1..20: mol_type = other RNA
cagcgtcctcactgtgatac

SEQ ID NO: 27249 - RNA, 20 nt, synthetic construct
  source 1..20: mol_type = other RNA
cagcgtgcaccttacattgt

SEQ ID NO: 27250 - RNA, 20 nt, synthetic construct
  source 1..20: mol_type = other RNA
cagcgtggaatggtcaattt

SEQ ID NO: 27251 - RNA, 20 nt, synthetic construct
  source 1..20: mol_type = other RNA
cagcgtgtgcatgaccctgc

SEQ ID NO: 27252 - RNA, 20 nt, synthetic construct
  source 1..20: mol_type = other RNA
cagcgttgttcagttgaaaa

SEQ ID NO: 27253 - RNA, 20 nt, synthetic construct
  source 1..20: mol_type = other RNA
cagctaaaatgttcagatag

SEQ ID NO: 27254 - RNA, 20 nt, synthetic construct
  source 1..20: mol_type = other RNA
cagctaacttttaacccaca

SEQ ID NO: 27255 - RNA, 20 nt, synthetic construct
  source 1..20: mol_type = other RNA
cagctaagcaccaacagatc

SEQ ID NO: 27256 - RNA, 20 nt, synthetic construct
  source 1..20: mol_type = other RNA
cagctaatatgctgtagtga

SEQ ID NO: 27257 - RNA, 20 nt, synthetic construct
  source 1..20: mol_type = other RNA
cagctaattttcattacttt

SEQ ID NO: 27258 - RNA, 20 nt, synthetic construct
  source 1..20: mol_type = other RNA
cagctaattttctaatcttc

SEQ ID NO: 27259 - RNA, 20 nt, synthetic construct
  source 1..20: mol_type = other RNA
cagctacactcaatacacgt

SEQ ID NO: 27260 - RNA, 20 nt, synthetic construct
  source 1..20: mol_type = other RNA
cagctacataacttcccaga

SEQ ID NO: 27261 - RNA, 20 nt, synthetic construct
  source 1..20: mol_type = other RNA
cagctacctgttgattgttg

SEQ ID NO: 27262 - RNA, 20 nt, synthetic construct
  source 1..20: mol_type = other RNA
cagctacggaggatgagggg

SEQ ID NO: 27263 - RNA, 20 nt, synthetic construct
  source 1..20: mol_type = other RNA
cagctactaaacaaatcaga

SEQ ID NO: 27264 - RNA, 20 nt, synthetic construct
  source 1..20: mol_type = other RNA
cagctactatgaatatactg

SEQ ID NO: 27265 - RNA, 20 nt, synthetic construct
  source 1..20: mol_type = other RNA
cagctaggcgtagtatctca

SEQ ID NO: 27266 - RNA, 20 nt, synthetic construct
  source 1..20: mol_type = other RNA
cagctaggtgagtgagatgg

SEQ ID NO: 27267 - RNA, 20 nt, synthetic construct
  source 1..20: mol_type = other RNA
cagctagtgtgtctgactac

SEQ ID NO: 27268 - RNA, 20 nt, synthetic construct
  source 1..20: mol_type = other RNA
cagctatagcttctgagctg

SEQ ID NO: 27269 - RNA, 20 nt, synthetic construct
  source 1..20: mol_type = other RNA
cagctatcaggccttccacc

SEQ ID NO: 27270 - RNA, 20 nt, synthetic construct
  source 1..20: mol_type = other RNA
cagctatggtgttatttgtt

SEQ ID NO: 27271 - RNA, 20 nt, synthetic construct
  source 1..20: mol_type = other RNA
cagctcaaacagcttgacat

SEQ ID NO: 27272 - RNA, 20 nt, synthetic construct
  source 1..20: mol_type = other RNA
cagctcaattaagcaacctt

SEQ ID NO: 27273 - RNA, 20 nt, synthetic construct
  source 1..20: mol_type = other RNA
cagctcacgttaccctctgg

SEQ ID NO: 27274 - RNA, 20 nt, synthetic construct
  source 1..20: mol_type = other RNA
cagctcagaagctatagctg

SEQ ID NO: 27275 - RNA, 20 nt, synthetic construct
  source 1..20: mol_type = other RNA
cagctcattacagtctcgac

SEQ ID NO: 27276 - RNA, 20 nt, synthetic construct
  source 1..20: mol_type = other RNA
cagctccaaagaacaggagt

SEQ ID NO: 27277 - RNA, 20 nt, synthetic construct
  source 1..20: mol_type = other RNA
cagctcctcagaaggccaag

SEQ ID NO: 27278 - RNA, 20 nt, synthetic construct
  source 1..20: mol_type = other RNA
cagctcgaccaggggaagga

SEQ ID NO: 27279 - RNA, 20 nt, synthetic construct
  source 1..20: mol_type = other RNA
cagctctagcaaacaaacac

SEQ ID NO: 27280 - RNA, 20 nt, synthetic construct
  source 1..20: mol_type = other RNA
cagctctcatgagtcctgaa

SEQ ID NO: 27281 - RNA, 20 nt, synthetic construct
  source 1..20: mol_type = other RNA
cagctcttctcagttgcagc

SEQ ID NO: 27282 - RNA, 20 nt, synthetic construct
  source 1..20: mol_type = other RNA
cagctcttttgtgtcttttt

SEQ ID NO: 27283 - RNA, 20 nt, synthetic construct
  source 1..20: mol_type = other RNA
cagctgagtagcgctttaag

SEQ ID NO: 27284 - RNA, 20 nt, synthetic construct
  source 1..20: mol_type = other RNA
cagctgggagaaagctaatt

SEQ ID NO: 27285 - RNA, 20 nt, synthetic construct
  source 1..20: mol_type = other RNA
cagctgtcactctctttagg

SEQ ID NO: 27286 - RNA, 20 nt, synthetic construct
  source 1..20: mol_type = other RNA
cagctgtccaacaagggttg

SEQ ID NO: 27287 - RNA, 20 nt, synthetic construct
  source 1..20: mol_type = other RNA
cagcttacagcagatctgct

SEQ ID NO: 27288 - RNA, 20 nt, synthetic construct
  source 1..20: mol_type = other RNA
cagcttacagtcatcacagt

SEQ ID NO: 27289 - RNA, 20 nt, synthetic construct
  source 1..20: mol_type = other RNA
cagcttaccaagtgccgcgt

SEQ ID NO: 27290 - RNA, 20 nt, synthetic construct
  source 1..20: mol_type = other RNA
cagcttcactcttctgcaag

SEQ ID NO: 27291 - RNA, 20 nt, synthetic construct
  source 1..20: mol_type = other RNA
cagcttccacccaagtggag

SEQ ID NO: 27292 - RNA, 20 nt, synthetic construct
  source 1..20: mol_type = other RNA
cagcttccgggacttggaag

SEQ ID NO: 27293 - RNA, 20 nt, synthetic construct
  source 1..20: mol_type = other RNA
cagcttcctacccaagctta

SEQ ID NO: 27294 - RNA, 20 nt, synthetic construct
  source 1..20: mol_type = other RNA
cagcttcttgttagaatttt

SEQ ID NO: 27295 - RNA, 20 nt, synthetic construct
  source 1..20: mol_type = other RNA
cagcttgacattcttacctt

SEQ ID NO: 27296 - RNA, 20 nt, synthetic construct
  source 1..20: mol_type = other RNA
cagcttggccaacatggcga

SEQ ID NO: 27297 - RNA, 20 nt, synthetic construct
  source 1..20: mol_type = other RNA
cagcttgggcaagagagcaa

SEQ ID NO: 27298 - RNA, 20 nt, synthetic construct
  source 1..20: mol_type = other RNA
cagctttaaagagaaatagt

SEQ ID NO: 27299 - RNA, 20 nt, synthetic construct
  source 1..20: mol_type = other RNA
cagctttctaattctgacaa

SEQ ID NO: 27300 - RNA, 20 nt, synthetic construct
  source 1..20: mol_type = other RNA
cagctttcttttccaaccaa

SEQ ID NO: 27301 - RNA, 20 nt, synthetic construct
  source 1..20: mol_type = other RNA
cagctttggctgaaatgctg

SEQ ID NO: 27302 - RNA, 20 nt, synthetic construct
  source 1..20: mol_type = other RNA
cagcttttattagagcttta

SEQ ID NO: 27303 - RNA, 20 nt, synthetic construct
  source 1..20: mol_type = other RNA
caggaaaaccagtttagaaa

SEQ ID NO: 27304 - RNA, 20 nt, synthetic construct
  source 1..20: mol_type = other RNA
caggaaaagcaaatgtcatc

SEQ ID NO: 27305 - RNA, 20 nt, synthetic construct
  source 1..20: mol_type = other RNA
caggaaaagctaccctcgag

SEQ ID NO: 27306 - RNA, 20 nt, synthetic construct
  source 1..20: mol_type = other RNA
caggaaacttccagaaactt

SEQ ID NO: 27307 - RNA, 20 nt, synthetic construct
  source 1..20: mol_type = other RNA
caggaaagaccggggactgc

SEQ ID NO: 27308 - RNA, 20 nt, synthetic construct
  source 1..20: mol_type = other RNA
caggaaagatgaagtataga

SEQ ID NO: 27309 - RNA, 20 nt, synthetic construct
  source 1..20: mol_type = other RNA
caggaaagatgtcttttaac

SEQ ID NO: 27310 - RNA, 20 nt, synthetic construct
  source 1..20: mol_type = other RNA
caggaaaggtggggaaggga

SEQ ID NO: 27311 - RNA, 20 nt, synthetic construct
  source 1..20: mol_type = other RNA
caggaaagtgccagccaccc

SEQ ID NO: 27312 - RNA, 20 nt, synthetic construct
  source 1..20: mol_type = other RNA
caggaacaccttgaacatga

SEQ ID NO: 27313 - RNA, 20 nt, synthetic construct
  source 1..20: mol_type = other RNA
caggaacagattcacgcaca

SEQ ID NO: 27314 - RNA, 20 nt, synthetic construct
  source 1..20: mol_type = other RNA
caggaactcatattagtctg

SEQ ID NO: 27315 - RNA, 20 nt, synthetic construct
  source 1..20: mol_type = other RNA
caggaacttacagtaagatc

SEQ ID NO: 27316 - RNA, 20 nt, synthetic construct
  source 1..20: mol_type = other RNA
caggaagaattattgtctgc

SEQ ID NO: 27317 - RNA, 20 nt, synthetic construct
  source 1..20: mol_type = other RNA
caggaagagactatctcttc

SEQ ID NO: 27318 - RNA, 20 nt, synthetic construct
  source 1..20: mol_type = other RNA
caggaagaggcagctaagca

SEQ ID NO: 27319 - RNA, 20 nt, synthetic construct
  source 1..20: mol_type = other RNA
caggaaggcaggaggcctca

SEQ ID NO: 27320 - RNA, 20 nt, synthetic construct
  source 1..20: mol_type = other RNA
caggaagggagagatgccta

SEQ ID NO: 27321 - RNA, 20 nt, synthetic construct
  source 1..20: mol_type = other RNA
caggaagtatgagtcttccg

SEQ ID NO: 27322 - RNA, 20 nt, synthetic construct
  source 1..20: mol_type = other RNA
caggaagtcagcaactcttg

SEQ ID NO: 27323 - RNA, 20 nt, synthetic construct
  source 1..20: mol_type = other RNA
caggaagttgagaaagaggg

SEQ ID NO: 27324 - RNA, 20 nt, synthetic construct
  source 1..20: mol_type = other RNA
caggaatgcaaagtttccta

SEQ ID NO: 27325 - RNA, 20 nt, synthetic construct
  source 1..20: mol_type = other RNA
caggacaattgaatggggat

SEQ ID NO: 27326 - RNA, 20 nt, synthetic construct
  source 1..20: mol_type = other RNA
caggacactggaggtgcaca

SEQ ID NO: 27327 - RNA, 20 nt, synthetic construct
  source 1..20: mol_type = other RNA
caggacagagcagtaggctt

SEQ ID NO: 27328 - RNA, 20 nt, synthetic construct
  source 1..20: mol_type = other RNA
caggacagattaaaatcaga

SEQ ID NO: 27329 - RNA, 20 nt, synthetic construct
  source 1..20: mol_type = other RNA
caggacagtcatcctcaaca

SEQ ID NO: 27330 - RNA, 20 nt, synthetic construct
  source 1..20: mol_type = other RNA
caggacagttattcttcagc

SEQ ID NO: 27331 - RNA, 20 nt, synthetic construct
  source 1..20: mol_type = other RNA
caggaccaactttaagcaaa

SEQ ID NO: 27332 - RNA, 20 nt, synthetic construct
  source 1..20: mol_type = other RNA
caggaccaatttaccatctg

SEQ ID NO: 27333 - RNA, 20 nt, synthetic construct
  source 1..20: mol_type = other RNA
caggaccagcttgggcaaga

SEQ ID NO: 27334 - RNA, 20 nt, synthetic construct
  source 1..20: mol_type = other RNA
caggaccaggcagtcctctc

SEQ ID NO: 27335 - RNA, 20 nt, synthetic construct
  source 1..20: mol_type = other RNA
caggactcatgagagctgtg

SEQ ID NO: 27336 - RNA, 20 nt, synthetic construct
  source 1..20: mol_type = other RNA
caggactccacagagttcag

SEQ ID NO: 27337 - RNA, 20 nt, synthetic construct
  source 1..20: mol_type = other RNA
caggactctgctcaaagggg

SEQ ID NO: 27338 - RNA, 20 nt, synthetic construct
  source 1..20: mol_type = other RNA
caggactgcttgaggccacg

SEQ ID NO: 27339 - RNA, 20 nt, synthetic construct
  source 1..20: mol_type = other RNA
caggactggactccttctga

SEQ ID NO: 27340 - RNA, 20 nt, synthetic construct
  source 1..20: mol_type = other RNA
caggactgtgtgtgtccagg

SEQ ID NO: 27341 - RNA, 20 nt, synthetic construct
  source 1..20: mol_type = other RNA
caggacttttggtacacatc

SEQ ID NO: 27342 - RNA, 20 nt, synthetic construct
  source 1..20: mol_type = other RNA
caggagaaacatggcttaga

SEQ ID NO: 27343 - RNA, 20 nt, synthetic construct
  source 1..20: mol_type = other RNA
caggagaactgcctggaccc

SEQ ID NO: 27344 - RNA, 20 nt, synthetic construct
  source 1..20: mol_type = other RNA
caggagaacttgtctcggat

SEQ ID NO: 27345 - RNA, 20 nt, synthetic construct
  source 1..20: mol_type = other RNA
caggagaatctgggaggtgg

SEQ ID NO: 27346 - RNA, 20 nt, synthetic construct
  source 1..20: mol_type = other RNA
caggagaatggcatgaaccc

SEQ ID NO: 27347 - RNA, 20 nt, synthetic construct
  source 1..20: mol_type = other RNA
caggagagcgacagctacgg

SEQ ID NO: 27348 - RNA, 20 nt, synthetic construct
  source 1..20: mol_type = other RNA
caggagagtcgcttgaacct

SEQ ID NO: 27349 - RNA, 20 nt, synthetic construct
  source 1..20: mol_type = other RNA
caggagattaaggctggagg

SEQ ID NO: 27350 - RNA, 20 nt, synthetic construct
  source 1..20: mol_type = other RNA
caggagcagtgtgaatagga

SEQ ID NO: 27351 - RNA, 20 nt, synthetic construct
  source 1..20: mol_type = other RNA
caggagcatagcttgaacca

SEQ ID NO: 27352 - RNA, 20 nt, synthetic construct
  source 1..20: mol_type = other RNA
caggagcccaccaccatgcc

SEQ ID NO: 27353 - RNA, 20 nt, synthetic construct
  source 1..20: mol_type = other RNA
caggagcctagtcatccact

SEQ ID NO: 27354 - RNA, 20 nt, synthetic construct
  source 1..20: mol_type = other RNA
caggagccttgctgttgtaa

SEQ ID NO: 27355 - RNA, 20 nt, synthetic construct
  source 1..20: mol_type = other RNA
caggagctagaacagaataa

SEQ ID NO: 27356 - RNA, 20 nt, synthetic construct
  source 1..20: mol_type = other RNA
caggaggaggagggtgcagc

SEQ ID NO: 27357 - RNA, 20 nt, synthetic construct
  source 1..20: mol_type = other RNA
caggaggcaaaggttgagac

SEQ ID NO: 27358 - RNA, 20 nt, synthetic construct
  source 1..20: mol_type = other RNA
caggaggcacctgaacccag

SEQ ID NO: 27359 - RNA, 20 nt, synthetic construct
  source 1..20: mol_type = other RNA
caggaggcctcagaattaat

SEQ ID NO: 27360 - RNA, 20 nt, synthetic construct
  source 1..20: mol_type = other RNA
caggaggctgaggcaggagg

SEQ ID NO: 27361 - RNA, 20 nt, synthetic construct
  source 1..20: mol_type = other RNA
caggaggttgaagctctagt

SEQ ID NO: 27362 - RNA, 20 nt, synthetic construct
  source 1..20: mol_type = other RNA
caggaggtttgcactggcac

SEQ ID NO: 27363 - RNA, 20 nt, synthetic construct
  source 1..20: mol_type = other RNA
caggagtaactgctcctctg

SEQ ID NO: 27364 - RNA, 20 nt, synthetic construct
  source 1..20: mol_type = other RNA
caggagttaccataaaacca

SEQ ID NO: 27365 - RNA, 20 nt, synthetic construct
  source 1..20: mol_type = other RNA
caggagttccgatttctcgg

SEQ ID NO: 27366 - RNA, 20 nt, synthetic construct
  source 1..20: mol_type = other RNA
caggagttcttatgaggtta

SEQ ID NO: 27367 - RNA, 20 nt, synthetic construct
  source 1..20: mol_type = other RNA
caggagttgcatcacttgag

SEQ ID NO: 27368 - RNA, 20 nt, synthetic construct
  source 1..20: mol_type = other RNA
caggagtttgagactgcagt

SEQ ID NO: 27369 - RNA, 20 nt, synthetic construct
  source 1..20: mol_type = other RNA
caggagttttgcctctttgc

SEQ ID NO: 27370 - RNA, 20 nt, synthetic construct
  source 1..20: mol_type = other RNA
caggatacaaaaagcaccta

SEQ ID NO: 27371 - RNA, 20 nt, synthetic construct
  source 1..20: mol_type = other RNA
caggatatcagaagtgctga

SEQ ID NO: 27372 - RNA, 20 nt, synthetic construct
  source 1..20: mol_type = other RNA
caggatcaaatctggctgca

SEQ ID NO: 27373 - RNA, 20 nt, synthetic construct
  source 1..20: mol_type = other RNA
caggatccagatgtagagaa

SEQ ID NO: 27374 - RNA, 20 nt, synthetic construct
  source 1..20: mol_type = other RNA
caggatccagtctctaccca

SEQ ID NO: 27375 - RNA, 20 nt, synthetic construct
  source 1..20: mol_type = other RNA
caggatcccggaacaggaaa

SEQ ID NO: 27376 - RNA, 20 nt, synthetic construct
  source 1..20: mol_type = other RNA
caggatcttactgtaagttc

SEQ ID NO: 27377 - RNA, 20 nt, synthetic construct
  source 1..20: mol_type = other RNA
caggatggcatgaaatgggt

SEQ ID NO: 27378 - RNA, 20 nt, synthetic construct
  source 1..20: mol_type = other RNA
caggatgtctttgggaaggc

SEQ ID NO: 27379 - RNA, 20 nt, synthetic construct
  source 1..20: mol_type = other RNA
caggattacaatgtaaggtg

SEQ ID NO: 27380 - RNA, 20 nt, synthetic construct
  source 1..20: mol_type = other RNA
caggattcttgttaagcatt

SEQ ID NO: 27381 - RNA, 20 nt, synthetic construct
  source 1..20: mol_type = other RNA
caggcaaaagatgatgaaca

SEQ ID NO: 27382 - RNA, 20 nt, synthetic construct
  source 1..20: mol_type = other RNA
caggcaaacagcgccactta

SEQ ID NO: 27383 - RNA, 20 nt, synthetic construct
  source 1..20: mol_type = other RNA
caggcaaccttgggagaaaa

SEQ ID NO: 27384 - RNA, 20 nt, synthetic construct
  source 1..20: mol_type = other RNA
caggcaagggactgtcgaag

SEQ ID NO: 27385 - RNA, 20 nt, synthetic construct
  source 1..20: mol_type = other RNA
caggcaccttcagaagccct

SEQ ID NO: 27386 - RNA, 20 nt, synthetic construct
  source 1..20: mol_type = other RNA
caggcagaatgtgacctgtc

SEQ ID NO: 27387 - RNA, 20 nt, synthetic construct
  source 1..20: mol_type = other RNA
caggcagatcacgaggtcga

SEQ ID NO: 27388 - RNA, 20 nt, synthetic construct
  source 1..20: mol_type = other RNA
caggcagtcctctcactcca

SEQ ID NO: 27389 - RNA, 20 nt, synthetic construct
  source 1..20: mol_type = other RNA
caggcagtctagtccatgaa

SEQ ID NO: 27390 - RNA, 20 nt, synthetic construct
  source 1..20: mol_type = other RNA
caggcatcggccgggcgtgg

SEQ ID NO: 27391 - RNA, 20 nt, synthetic construct
  source 1..20: mol_type = other RNA
caggcatctctctaaaaaca

SEQ ID NO: 27392 - RNA, 20 nt, synthetic construct
  source 1..20: mol_type = other RNA
caggcatgagccactgcggg

SEQ ID NO: 27393 - RNA, 20 nt, synthetic construct
  source 1..20: mol_type = other RNA
caggcatgagtcgccatacc

SEQ ID NO: 27394 - RNA, 20 nt, synthetic construct
  source 1..20: mol_type = other RNA
caggcatgatggctcaacgc

SEQ ID NO: 27395 - RNA, 20 nt, synthetic construct
  source 1..20: mol_type = other RNA
caggcatgcgccatcacacc

SEQ ID NO: 27396 - RNA, 20 nt, synthetic construct
  source 1..20: mol_type = other RNA
caggcatgctaactgcagag

SEQ ID NO: 27397 - RNA, 20 nt, synthetic construct
  source 1..20: mol_type = other RNA
caggcatgggggcgcgtgcc

SEQ ID NO: 27398 - RNA, 20 nt, synthetic construct
  source 1..20: mol_type = other RNA
caggcattgtgctcagtggt

SEQ ID NO: 27399 - RNA, 20 nt, synthetic construct
  source 1..20: mol_type = other RNA
caggccaacagggccactga

SEQ ID NO: 27400 - RNA, 20 nt, synthetic construct
  source 1..20: mol_type = other RNA
caggccagatatccataagg

SEQ ID NO: 27401 - RNA, 20 nt, synthetic construct
  source 1..20: mol_type = other RNA
caggccagtgagtgatgaaa

SEQ ID NO: 27402 - RNA, 20 nt, synthetic construct
  source 1..20: mol_type = other RNA
caggcccggggcagagaact

SEQ ID NO: 27403 - RNA, 20 nt, synthetic construct
  source 1..20: mol_type = other RNA
caggccctgagaagtcaaag

SEQ ID NO: 27404 - RNA, 20 nt, synthetic construct
  source 1..20: mol_type = other RNA
caggccctttgttagtgcct

SEQ ID NO: 27405 - RNA, 20 nt, synthetic construct
  source 1..20: mol_type = other RNA
caggccgcccgctgctccct

SEQ ID NO: 27406 - RNA, 20 nt, synthetic construct
  source 1..20: mol_type = other RNA
caggcctcgctcttggcttt

SEQ ID NO: 27407 - RNA, 20 nt, synthetic construct
  source 1..20: mol_type = other RNA
caggcctgagccgtcggtat

SEQ ID NO: 27408 - RNA, 20 nt, synthetic construct
  source 1..20: mol_type = other RNA
caggcctgttgtgaggattc

SEQ ID NO: 27409 - RNA, 20 nt, synthetic construct
  source 1..20: mol_type = other RNA
caggccttccacctgctctt

SEQ ID NO: 27410 - RNA, 20 nt, synthetic construct
  source 1..20: mol_type = other RNA
caggccttcgaggcatctag

SEQ ID NO: 27411 - RNA, 20 nt, synthetic construct
  source 1..20: mol_type = other RNA
caggcgcacgccatctcgcc

SEQ ID NO: 27412 - RNA, 20 nt, synthetic construct
  source 1..20: mol_type = other RNA
caggcgcctgcattgcattt

SEQ ID NO: 27413 - RNA, 20 nt, synthetic construct
  source 1..20: mol_type = other RNA
caggcgcctggacaggatcc

SEQ ID NO: 27414 - RNA, 20 nt, synthetic construct
  source 1..20: mol_type = other RNA
caggcggaatgcagtggcgt

SEQ ID NO: 27415 - RNA, 20 nt, synthetic construct
  source 1..20: mol_type = other RNA
caggcggcagagggagcagc

SEQ ID NO: 27416 - RNA, 20 nt, synthetic construct
  source 1..20: mol_type = other RNA
caggcgtgagccaccacgtc

SEQ ID NO: 27417 - RNA, 20 nt, synthetic construct
  source 1..20: mol_type = other RNA
caggcgtgagccacctcatc

SEQ ID NO: 27418 - RNA, 20 nt, synthetic construct
  source 1..20: mol_type = other RNA
caggcgtggtggcggatgcc

SEQ ID NO: 27419 - RNA, 20 nt, synthetic construct
  source 1..20: mol_type = other RNA
caggcgttgagccatcatgc

SEQ ID NO: 27420 - RNA, 20 nt, synthetic construct
  source 1..20: mol_type = other RNA
caggctcaatacctgaaaag

SEQ ID NO: 27421 - RNA, 20 nt, synthetic construct
  source 1..20: mol_type = other RNA
caggctccacttgggtggaa

SEQ ID NO: 27422 - RNA, 20 nt, synthetic construct
  source 1..20: mol_type = other RNA
caggctccaggtagaatgaa

SEQ ID NO: 27423 - RNA, 20 nt, synthetic construct
  source 1..20: mol_type = other RNA
caggctctcttcaccaactg

SEQ ID NO: 27424 - RNA, 20 nt, synthetic construct
  source 1..20: mol_type = other RNA
caggctgaactgctgacaga

SEQ ID NO: 27425 - RNA, 20 nt, synthetic construct
  source 1..20: mol_type = other RNA
caggctgaagggaggaaaaa

SEQ ID NO: 27426 - RNA, 20 nt, synthetic construct
  source 1..20: mol_type = other RNA
caggctgacttagagggctt

SEQ ID NO: 27427 - RNA, 20 nt, synthetic construct
  source 1..20: mol_type = other RNA
caggctgagtgcggtggctt

SEQ ID NO: 27428 - RNA, 20 nt, synthetic construct
  source 1..20: mol_type = other RNA
caggctggaagaattttaag

SEQ ID NO: 27429 - RNA, 20 nt, synthetic construct
  source 1..20: mol_type = other RNA
caggctggctctttccactc

SEQ ID NO: 27430 - RNA, 20 nt, synthetic construct
  source 1..20: mol_type = other RNA
caggctggttccaaacttct

SEQ ID NO: 27431 - RNA, 20 nt, synthetic construct
  source 1..20: mol_type = other RNA
caggcttgagtctgtgctct

SEQ ID NO: 27432 - RNA, 20 nt, synthetic construct
  source 1..20: mol_type = other RNA
caggctttcccagggtgtag

SEQ ID NO: 27433 - RNA, 20 nt, synthetic construct
  source 1..20: mol_type = other RNA
caggctttcctacaatacag

SEQ ID NO: 27434 - RNA, 20 nt, synthetic construct
  source 1..20: mol_type = other RNA
caggctttgacttctcaggg

SEQ ID NO: 27435 - RNA, 20 nt, synthetic construct
  source 1..20: mol_type = other RNA
caggctttttacccggagag

SEQ ID NO: 27436 - RNA, 20 nt, synthetic construct
  source 1..20: mol_type = other RNA
cagggaaaactacatgtaaa

SEQ ID NO: 27437 - RNA, 20 nt, synthetic construct
  source 1..20: mol_type = other RNA
cagggaaaccttactgtaat

SEQ ID NO: 27438 - RNA, 20 nt, synthetic construct
  source 1..20: mol_type = other RNA
cagggaaatcattcaggaca

SEQ ID NO: 27439 - RNA, 20 nt, synthetic construct
  source 1..20: mol_type = other RNA
cagggaaatggagggccaga

SEQ ID NO: 27440 - RNA, 20 nt, synthetic construct
  source 1..20: mol_type = other RNA
cagggaaccgtaacttcttt

SEQ ID NO: 27441 - RNA, 20 nt, synthetic construct
  source 1..20: mol_type = other RNA
cagggaaggctgcaagcact

SEQ ID NO: 27442 - RNA, 20 nt, synthetic construct
  source 1..20: mol_type = other RNA
cagggaatgcccctgtagca

SEQ ID NO: 27443 - RNA, 20 nt, synthetic construct
  source 1..20: mol_type = other RNA
cagggaatggggagctagag

SEQ ID NO: 27444 - RNA, 20 nt, synthetic construct
  source 1..20: mol_type = other RNA
cagggaccacaggcatgcgc

SEQ ID NO: 27445 - RNA, 20 nt, synthetic construct
  source 1..20: mol_type = other RNA
cagggactacagtcacacac

SEQ ID NO: 27446 - RNA, 20 nt, synthetic construct
  source 1..20: mol_type = other RNA
cagggactcccatatctaca

SEQ ID NO: 27447 - RNA, 20 nt, synthetic construct
  source 1..20: mol_type = other RNA
cagggactgatgaagaacct

SEQ ID NO: 27448 - RNA, 20 nt, synthetic construct
  source 1..20: mol_type = other RNA
cagggagaattggtagtcaa

SEQ ID NO: 27449 - RNA, 20 nt, synthetic construct
  source 1..20: mol_type = other RNA
cagggagagagaaactttac

SEQ ID NO: 27450 - RNA, 20 nt, synthetic construct
  source 1..20: mol_type = other RNA
cagggagatacttgattaca

SEQ ID NO: 27451 - RNA, 20 nt, synthetic construct
  source 1..20: mol_type = other RNA
cagggaggaatccttcagtc

SEQ ID NO: 27452 - RNA, 20 nt, synthetic construct
  source 1..20: mol_type = other RNA
cagggaggcggaggttgcgg

SEQ ID NO: 27453 - RNA, 20 nt, synthetic construct
  source 1..20: mol_type = other RNA
cagggaggggtccccagcat

SEQ ID NO: 27454 - RNA, 20 nt, synthetic construct
  source 1..20: mol_type = other RNA
cagggataaatcccacttga

SEQ ID NO: 27455 - RNA, 20 nt, synthetic construct
  source 1..20: mol_type = other RNA
cagggatattggcttatagt

SEQ ID NO: 27456 - RNA, 20 nt, synthetic construct
  source 1..20: mol_type = other RNA
cagggatattttcgtgtact

SEQ ID NO: 27457 - RNA, 20 nt, synthetic construct
  source 1..20: mol_type = other RNA
cagggatcacagatacaact

SEQ ID NO: 27458 - RNA, 20 nt, synthetic construct
  source 1..20: mol_type = other RNA
cagggatgctgcgagccccg

SEQ ID NO: 27459 - RNA, 20 nt, synthetic construct
  source 1..20: mol_type = other RNA
cagggatttggccagaatcc

SEQ ID NO: 27460 - RNA, 20 nt, synthetic construct
  source 1..20: mol_type = other RNA
cagggcagggagagagaaac

SEQ ID NO: 27461 - RNA, 20 nt, synthetic construct
  source 1..20: mol_type = other RNA
cagggccactgagagctcag

SEQ ID NO: 27462 - RNA, 20 nt, synthetic construct
  source 1..20: mol_type = other RNA
cagggccattctgctatgaa

SEQ ID NO: 27463 - RNA, 20 nt, synthetic construct
  source 1..20: mol_type = other RNA
cagggcccagcctcaacagc

SEQ ID NO: 27464 - RNA, 20 nt, synthetic construct
  source 1..20: mol_type = other RNA
cagggccgggggttggggag

SEQ ID NO: 27465 - RNA, 20 nt, synthetic construct
  source 1..20: mol_type = other RNA
cagggcctctgaagacatgc

SEQ ID NO: 27466 - RNA, 20 nt, synthetic construct
  source 1..20: mol_type = other RNA
cagggcctgcttttggaagc

SEQ ID NO: 27467 - RNA, 20 nt, synthetic construct
  source 1..20: mol_type = other RNA
cagggccttcccaaagacat

SEQ ID NO: 27468 - RNA, 20 nt, synthetic construct
  source 1..20: mol_type = other RNA
cagggcctttaatcacctca

SEQ ID NO: 27469 - RNA, 20 nt, synthetic construct
  source 1..20: mol_type = other RNA
cagggcgctcctctcccgcc

SEQ ID NO: 27470 - RNA, 20 nt, synthetic construct
  source 1..20: mol_type = other RNA
cagggctcctccaaggctgc

SEQ ID NO: 27471 - RNA, 20 nt, synthetic construct
  source 1..20: mol_type = other RNA
cagggctgaaaaacacctca

SEQ ID NO: 27472 - RNA, 20 nt, synthetic construct
  source 1..20: mol_type = other RNA
cagggcttctgaaggtgcct

SEQ ID NO: 27473 - RNA, 20 nt, synthetic construct
  source 1..20: mol_type = other RNA
cagggcttggtggcccacac

SEQ ID NO: 27474 - RNA, 20 nt, synthetic construct
  source 1..20: mol_type = other RNA
caggggaaggagtctgccca

SEQ ID NO: 27475 - RNA, 20 nt, synthetic construct
  source 1..20: mol_type = other RNA
caggggaaggcttcgagttc

SEQ ID NO: 27476 - RNA, 20 nt, synthetic construct
  source 1..20: mol_type = other RNA
caggggaatagaaagttagt

SEQ ID NO: 27477 - RNA, 20 nt, synthetic construct
  source 1..20: mol_type = other RNA
caggggacatagatgaaact

SEQ ID NO: 27478 - RNA, 20 nt, synthetic construct
  source 1..20: mol_type = other RNA
caggggacatgaaggaagga

SEQ ID NO: 27479 - RNA, 20 nt, synthetic construct
  source 1..20: mol_type = other RNA
caggggacatgctctgatag

SEQ ID NO: 27480 - RNA, 20 nt, synthetic construct
  source 1..20: mol_type = other RNA
caggggactttgatgtttta

SEQ ID NO: 27481 - RNA, 20 nt, synthetic construct
  source 1..20: mol_type = other RNA
caggggcattccctgtctgg

SEQ ID NO: 27482 - RNA, 20 nt, synthetic construct
  source 1..20: mol_type = other RNA
caggggctaagtagtggcag

SEQ ID NO: 27483 - RNA, 20 nt, synthetic construct
  source 1..20: mol_type = other RNA
caggggctgcatcatggtgg

SEQ ID NO: 27484 - RNA, 20 nt, synthetic construct
  source 1..20: mol_type = other RNA
caggggctgggggatccagg

SEQ ID NO: 27485 - RNA, 20 nt, synthetic construct
  source 1..20: mol_type = other RNA
cagggggctaaatgctcaca

SEQ ID NO: 27486 - RNA, 20 nt, synthetic construct
  source 1..20: mol_type = other RNA
caggggggaaaaaaccataa

SEQ ID NO: 27487 - RNA, 20 nt, synthetic construct
  source 1..20: mol_type = other RNA
caggggggccactggaaacc

SEQ ID NO: 27488 - RNA, 20 nt, synthetic construct
  source 1..20: mol_type = other RNA
cagggggtatggagacacta

SEQ ID NO: 27489 - RNA, 20 nt, synthetic construct
  source 1..20: mol_type = other RNA
cagggggtcgagactgtaat

SEQ ID NO: 27490 - RNA, 20 nt, synthetic construct
  source 1..20: mol_type = other RNA
caggggtaaaggggatgggg

SEQ ID NO: 27491 - RNA, 20 nt, synthetic construct
  source 1..20: mol_type = other RNA
caggggtggggggatgtaga

SEQ ID NO: 27492 - RNA, 20 nt, synthetic construct
  source 1..20: mol_type = other RNA
cagggtaaagtcaattctag

SEQ ID NO: 27493 - RNA, 20 nt, synthetic construct
  source 1..20: mol_type = other RNA
cagggtaagattccgtctca

SEQ ID NO: 27494 - RNA, 20 nt, synthetic construct
  source 1..20: mol_type = other RNA
cagggtaggaaaagacttct

SEQ ID NO: 27495 - RNA, 20 nt, synthetic construct
  source 1..20: mol_type = other RNA
cagggtaggaaggcggtggg

SEQ ID NO: 27496 - RNA, 20 nt, synthetic construct
  source 1..20: mol_type = other RNA
cagggtcacttcctctctta

SEQ ID NO: 27497 - RNA, 20 nt, synthetic construct
  source 1..20: mol_type = other RNA
cagggtcatgcacacgctgg

SEQ ID NO: 27498 - RNA, 20 nt, synthetic construct
  source 1..20: mol_type = other RNA
cagggtctacaaaaggtttc

SEQ ID NO: 27499 - RNA, 20 nt, synthetic construct
  source 1..20: mol_type = other RNA
cagggtctcactcttaccaa

SEQ ID NO: 27500 - RNA, 20 nt, synthetic construct
  source 1..20: mol_type = other RNA
cagggtctgtctcacctcaa

SEQ ID NO: 27501 - RNA, 20 nt, synthetic construct
  source 1..20: mol_type = other RNA
cagggtcttgctctgtcacc

SEQ ID NO: 27502 - RNA, 20 nt, synthetic construct
  source 1..20: mol_type = other RNA
cagggtgaaacttgaatact

SEQ ID NO: 27503 - RNA, 20 nt, synthetic construct
  source 1..20: mol_type = other RNA
cagggtgcgacctcgaagca

SEQ ID NO: 27504 - RNA, 20 nt, synthetic construct
  source 1..20: mol_type = other RNA
cagggtggagtccaaccaat

SEQ ID NO: 27505 - RNA, 20 nt, synthetic construct
  source 1..20: mol_type = other RNA
cagggtgtagccacaagcca

SEQ ID NO: 27506 - RNA, 20 nt, synthetic construct
  source 1..20: mol_type = other RNA
cagggttacagtatagggga

SEQ ID NO: 27507 - RNA, 20 nt, synthetic construct
  source 1..20: mol_type = other RNA
cagggttattaacataccga

SEQ ID NO: 27508 - RNA, 20 nt, synthetic construct
  source 1..20: mol_type = other RNA
cagggtttctgtttggatga

SEQ ID NO: 27509 - RNA, 20 nt, synthetic construct
  source 1..20: mol_type = other RNA
cagggttttgttttgttttt

SEQ ID NO: 27510 - RNA, 20 nt, synthetic construct
  source 1..20: mol_type = other RNA
caggtagaatgaaaattttt

SEQ ID NO: 27511 - RNA, 20 nt, synthetic construct
  source 1..20: mol_type = other RNA
caggtagacatgagtaaaaa

SEQ ID NO: 27512 - RNA, 20 nt, synthetic construct
  source 1..20: mol_type = other RNA
caggtagacatgtgccatgt

SEQ ID NO: 27513 - RNA, 20 nt, synthetic construct
  source 1..20: mol_type = other RNA
caggtagctgctttttaaaa

SEQ ID NO: 27514 - RNA, 20 nt, synthetic construct
  source 1..20: mol_type = other RNA
caggtagggaggggtattca

SEQ ID NO: 27515 - RNA, 20 nt, synthetic construct
  source 1..20: mol_type = other RNA
caggtataaagtttccgttt

SEQ ID NO: 27516 - RNA, 20 nt, synthetic construct
  source 1..20: mol_type = other RNA
caggtatggcgactcatgcc

SEQ ID NO: 27517 - RNA, 20 nt, synthetic construct
  source 1..20: mol_type = other RNA
caggtattgagcctgttccg

SEQ ID NO: 27518 - RNA, 20 nt, synthetic construct
  source 1..20: mol_type = other RNA
caggtatttctaaatcaaca

SEQ ID NO: 27519 - RNA, 20 nt, synthetic construct
  source 1..20: mol_type = other RNA
caggtattttgttctctttg

SEQ ID NO: 27520 - RNA, 20 nt, synthetic construct
  source 1..20: mol_type = other RNA
caggtcaaactcacttatta

SEQ ID NO: 27521 - RNA, 20 nt, synthetic construct
  source 1..20: mol_type = other RNA
caggtcacattctgcctgca

SEQ ID NO: 27522 - RNA, 20 nt, synthetic construct
  source 1..20: mol_type = other RNA
caggtcacctagcctctctg

SEQ ID NO: 27523 - RNA, 20 nt, synthetic construct
  source 1..20: mol_type = other RNA
caggtcagccagaggaagct

SEQ ID NO: 27524 - RNA, 20 nt, synthetic construct
  source 1..20: mol_type = other RNA
caggtcagtagtacagtgag

SEQ ID NO: 27525 - RNA, 20 nt, synthetic construct
  source 1..20: mol_type = other RNA
caggtcatgacttttttgcc

SEQ ID NO: 27526 - RNA, 20 nt, synthetic construct
  source 1..20: mol_type = other RNA
caggtcattacatattttgt

SEQ ID NO: 27527 - RNA, 20 nt, synthetic construct
  source 1..20: mol_type = other RNA
caggtcggaaggaatgtgct

SEQ ID NO: 27528 - RNA, 20 nt, synthetic construct
  source 1..20: mol_type = other RNA
caggtctatgtgacagaatg

SEQ ID NO: 27529 - RNA, 20 nt, synthetic construct
  source 1..20: mol_type = other RNA
caggtctctctgaaattagc

SEQ ID NO: 27530 - RNA, 20 nt, synthetic construct
  source 1..20: mol_type = other RNA
caggtctctttgaaaggaat

SEQ ID NO: 27531 - RNA, 20 nt, synthetic construct
  source 1..20: mol_type = other RNA
caggtcttcaacctcaactt

SEQ ID NO: 27532 - RNA, 20 nt, synthetic construct
  source 1..20: mol_type = other RNA
caggtgagtggactgtgagg

SEQ ID NO: 27533 - RNA, 20 nt, synthetic construct
  source 1..20: mol_type = other RNA
caggtgcctcctgcctcagc

SEQ ID NO: 27534 - RNA, 20 nt, synthetic construct
  source 1..20: mol_type = other RNA
caggtgcttacagactgatt

SEQ ID NO: 27535 - RNA, 20 nt, synthetic construct
  source 1..20: mol_type = other RNA
caggtggaaggcctgatagc

SEQ ID NO: 27536 - RNA, 20 nt, synthetic construct
  source 1..20: mol_type = other RNA
caggtggatatctgaggtca

SEQ ID NO: 27537 - RNA, 20 nt, synthetic construct
  source 1..20: mol_type = other RNA
caggtggatcaggagattga

SEQ ID NO: 27538 - RNA, 20 nt, synthetic construct
  source 1..20: mol_type = other RNA
caggtgggaggcccggagcc

SEQ ID NO: 27539 - RNA, 20 nt, synthetic construct
  source 1..20: mol_type = other RNA
caggtgggcactgggagccc

SEQ ID NO: 27540 - RNA, 20 nt, synthetic construct
  source 1..20: mol_type = other RNA
caggtggtatgggagatgtg

SEQ ID NO: 27541 - RNA, 20 nt, synthetic construct
  source 1..20: mol_type = other RNA
caggtggtatttaatctgtc

SEQ ID NO: 27542 - RNA, 20 nt, synthetic construct
  source 1..20: mol_type = other RNA
caggtggttctgcctaatct

SEQ ID NO: 27543 - RNA, 20 nt, synthetic construct
  source 1..20: mol_type = other RNA
caggtgtaagagattaattc

SEQ ID NO: 27544 - RNA, 20 nt, synthetic construct
  source 1..20: mol_type = other RNA
caggtgtatgatcttattaa

SEQ ID NO: 27545 - RNA, 20 nt, synthetic construct
  source 1..20: mol_type = other RNA
caggtgtcactggatagaag

SEQ ID NO: 27546 - RNA, 20 nt, synthetic construct
  source 1..20: mol_type = other RNA
caggtgtgaaccacgcatct

SEQ ID NO: 27547 - RNA, 20 nt, synthetic construct
  source 1..20: mol_type = other RNA
caggtgtgagattgatagat

SEQ ID NO: 27548 - RNA, 20 nt, synthetic construct
  source 1..20: mol_type = other RNA
caggtgtgggccaccaagcc

SEQ ID NO: 27549 - RNA, 20 nt, synthetic construct
  source 1..20: mol_type = other RNA
caggtgtgtaaacactgttc

SEQ ID NO: 27550 - RNA, 20 nt, synthetic construct
  source 1..20: mol_type = other RNA
caggtgttggtgcatttggg

SEQ ID NO: 27551 - RNA, 20 nt, synthetic construct
  source 1..20: mol_type = other RNA
caggttcatccatgttgttg

SEQ ID NO: 27552 - RNA, 20 nt, synthetic construct
  source 1..20: mol_type = other RNA
caggttcatgtgtgcttaca

SEQ ID NO: 27553 - RNA, 20 nt, synthetic construct
  source 1..20: mol_type = other RNA
caggttcattttaataagct

SEQ ID NO: 27554 - RNA, 20 nt, synthetic construct
  source 1..20: mol_type = other RNA
caggttcttcatcagtccct

SEQ ID NO: 27555 - RNA, 20 nt, synthetic construct
  source 1..20: mol_type = other RNA
caggttgatactagtttagt

SEQ ID NO: 27556 - RNA, 20 nt, synthetic construct
  source 1..20: mol_type = other RNA
caggttgcattaatgcttca

SEQ ID NO: 27557 - RNA, 20 nt, synthetic construct
  source 1..20: mol_type = other RNA
caggttgggcttatcagatg

SEQ ID NO: 27558 - RNA, 20 nt, synthetic construct
  source 1..20: mol_type = other RNA
caggtttaataaatactagt

SEQ ID NO: 27559 - RNA, 20 nt, synthetic construct
  source 1..20: mol_type = other RNA
caggtttacaggatatcaga

SEQ ID NO: 27560 - RNA, 20 nt, synthetic construct
  source 1..20: mol_type = other RNA
caggtttactccaagaaggc

SEQ ID NO: 27561 - RNA, 20 nt, synthetic construct
  source 1..20: mol_type = other RNA
caggtttagaatatatttac

SEQ ID NO: 27562 - RNA, 20 nt, synthetic construct
  source 1..20: mol_type = other RNA
caggtttaggaagcacattc

SEQ ID NO: 27563 - RNA, 20 nt, synthetic construct
  source 1..20: mol_type = other RNA
caggtttaggtttttcttgt

SEQ ID NO: 27564 - RNA, 20 nt, synthetic construct
  source 1..20: mol_type = other RNA
caggtttcaagtgaaccaaa

SEQ ID NO: 27565 - RNA, 20 nt, synthetic construct
  source 1..20: mol_type = other RNA
caggtttgtgcttggatatt

SEQ ID NO: 27566 - RNA, 20 nt, synthetic construct
  source 1..20: mol_type = other RNA
caggttttatctctctcaag

SEQ ID NO: 27567 - RNA, 20 nt, synthetic construct
  source 1..20: mol_type = other RNA
caggttttcgaccaagttac

SEQ ID NO: 27568 - RNA, 20 nt, synthetic construct
  source 1..20: mol_type = other RNA
caggttttggtaatgggaaa

SEQ ID NO: 27569 - RNA, 20 nt, synthetic construct
  source 1..20: mol_type = other RNA
cagtaaaaaaggaccatctg

SEQ ID NO: 27570 - RNA, 20 nt, synthetic construct
  source 1..20: mol_type = other RNA
cagtaaaatgaaaaaaccta

SEQ ID NO: 27571 - RNA, 20 nt, synthetic construct
  source 1..20: mol_type = other RNA
cagtaaaattcccttcagtg

SEQ ID NO: 27572 - RNA, 20 nt, synthetic construct
  source 1..20: mol_type = other RNA
cagtaaagccccattgtaca

SEQ ID NO: 27573 - RNA, 20 nt, synthetic construct
  source 1..20: mol_type = other RNA
cagtaaagtcactgtggaaa

SEQ ID NO: 27574 - RNA, 20 nt, synthetic construct
  source 1..20: mol_type = other RNA
cagtaaatatactgactagt

SEQ ID NO: 27575 - RNA, 20 nt, synthetic construct
  source 1..20: mol_type = other RNA
cagtaaatgaaatttgaggc

SEQ ID NO: 27576 - RNA, 20 nt, synthetic construct
  source 1..20: mol_type = other RNA
cagtaaatgcctacattaaa

SEQ ID NO: 27577 - RNA, 20 nt, synthetic construct
  source 1..20: mol_type = other RNA
cagtaacaaataagaagatt

SEQ ID NO: 27578 - RNA, 20 nt, synthetic construct
  source 1..20: mol_type = other RNA
cagtaacttaaatttgattg

SEQ ID NO: 27579 - RNA, 20 nt, synthetic construct
  source 1..20: mol_type = other RNA
cagtaagaaaacagataacc

SEQ ID NO: 27580 - RNA, 20 nt, synthetic construct
  source 1..20: mol_type = other RNA
cagtaagatcctggattgct

SEQ ID NO: 27581 - RNA, 20 nt, synthetic construct
  source 1..20: mol_type = other RNA
cagtaaggtttccctgggga

SEQ ID NO: 27582 - RNA, 20 nt, synthetic construct
  source 1..20: mol_type = other RNA
cagtaatcaaacagtgtgat

SEQ ID NO: 27583 - RNA, 20 nt, synthetic construct
  source 1..20: mol_type = other RNA
cagtaatcttgctaaacatg

SEQ ID NO: 27584 - RNA, 20 nt, synthetic construct
  source 1..20: mol_type = other RNA
cagtaattagttacatgagg

SEQ ID NO: 27585 - RNA, 20 nt, synthetic construct
  source 1..20: mol_type = other RNA
cagtaattctgcagtgaaca

SEQ ID NO: 27586 - RNA, 20 nt, synthetic construct
  source 1..20: mol_type = other RNA
cagtaattgtagtttccatg

SEQ ID NO: 27587 - RNA, 20 nt, synthetic construct
  source 1..20: mol_type = other RNA
cagtacaaggctagagctca

SEQ ID NO: 27588 - RNA, 20 nt, synthetic construct
  source 1..20: mol_type = other RNA
cagtacacgaaaatatccct

SEQ ID NO: 27589 - RNA, 20 nt, synthetic construct
  source 1..20: mol_type = other RNA
cagtacagtagtaaaaccaa

SEQ ID NO: 27590 - RNA, 20 nt, synthetic construct
  source 1..20: mol_type = other RNA
cagtacatctcaattcagaa

SEQ ID NO: 27591 - RNA, 20 nt, synthetic construct
  source 1..20: mol_type = other RNA
cagtaccattccccttgcca

SEQ ID NO: 27592 - RNA, 20 nt, synthetic construct
  source 1..20: mol_type = other RNA
cagtacgcttttatgttata

SEQ ID NO: 27593 - RNA, 20 nt, synthetic construct
  source 1..20: mol_type = other RNA
cagtactatcttccctaaag

SEQ ID NO: 27594 - RNA, 20 nt, synthetic construct
  source 1..20: mol_type = other RNA
cagtacttccctctttctca

SEQ ID NO: 27595 - RNA, 20 nt, synthetic construct
  source 1..20: mol_type = other RNA
cagtacttgtctttttgtga

SEQ ID NO: 27596 - RNA, 20 nt, synthetic construct
  source 1..20: mol_type = other RNA
cagtactttttcatccaaac

SEQ ID NO: 27597 - RNA, 20 nt, synthetic construct
  source 1..20: mol_type = other RNA
cagtagaaatcttccagaag

SEQ ID NO: 27598 - RNA, 20 nt, synthetic construct
  source 1..20: mol_type = other RNA
cagtagaagactcagcagtt

SEQ ID NO: 27599 - RNA, 20 nt, synthetic construct
  source 1..20: mol_type = other RNA
cagtagaggccgagggttga

SEQ ID NO: 27600 - RNA, 20 nt, synthetic construct
  source 1..20: mol_type = other RNA
cagtagccaaaggtagaaac

SEQ ID NO: 27601 - RNA, 20 nt, synthetic construct
  source 1..20: mol_type = other RNA
cagtagctcatcatttatac

SEQ ID NO: 27602 - RNA, 20 nt, synthetic construct
  source 1..20: mol_type = other RNA
cagtaggcttagataggatg

SEQ ID NO: 27603 - RNA, 20 nt, synthetic construct
  source 1..20: mol_type = other RNA
cagtagtaaaaccaaatgtg

SEQ ID NO: 27604 - RNA, 20 nt, synthetic construct
  source 1..20: mol_type = other RNA
cagtagtaaagcaaatgtga

SEQ ID NO: 27605 - RNA, 20 nt, synthetic construct
  source 1..20: mol_type = other RNA
cagtagtacagtgagtagaa

SEQ ID NO: 27606 - RNA, 20 nt, synthetic construct
  source 1..20: mol_type = other RNA
cagtagtattgaactgttac

SEQ ID NO: 27607 - RNA, 20 nt, synthetic construct
  source 1..20: mol_type = other RNA
cagtagtttgctagtggtaa

SEQ ID NO: 27608 - RNA, 20 nt, synthetic construct
  source 1..20: mol_type = other RNA
cagtatacacgtatttatat

SEQ ID NO: 27609 - RNA, 20 nt, synthetic construct
  source 1..20: mol_type = other RNA
cagtataggggaactcttgt

SEQ ID NO: 27610 - RNA, 20 nt, synthetic construct
  source 1..20: mol_type = other RNA
cagtatatattttctaagag

SEQ ID NO: 27611 - RNA, 20 nt, synthetic construct
  source 1..20: mol_type = other RNA
cagtatattcatagtagctg

SEQ ID NO: 27612 - RNA, 20 nt, synthetic construct
  source 1..20: mol_type = other RNA
cagtatatttactgcttgct

SEQ ID NO: 27613 - RNA, 20 nt, synthetic construct
  source 1..20: mol_type = other RNA
cagtatcctttcaaggtatc

SEQ ID NO: 27614 - RNA, 20 nt, synthetic construct
  source 1..20: mol_type = other RNA
cagtatctcctttccttcct

SEQ ID NO: 27615 - RNA, 20 nt, synthetic construct
  source 1..20: mol_type = other RNA
cagtatcttgaagaaaccaa

SEQ ID NO: 27616 - RNA, 20 nt, synthetic construct
  source 1..20: mol_type = other RNA
cagtatgaatgcacgtgaag

SEQ ID NO: 27617 - RNA, 20 nt, synthetic construct
  source 1..20: mol_type = other RNA
cagtatgacctcctcccact

SEQ ID NO: 27618 - RNA, 20 nt, synthetic construct
  source 1..20: mol_type = other RNA
cagtatgatgccactcaaaa

SEQ ID NO: 27619 - RNA, 20 nt, synthetic construct
  source 1..20: mol_type = other RNA
cagtatgcacaaataattaa

SEQ ID NO: 27620 - RNA, 20 nt, synthetic construct
  source 1..20: mol_type = other RNA
cagtatgcatagatcacaag

SEQ ID NO: 27621 - RNA, 20 nt, synthetic construct
  source 1..20: mol_type = other RNA
cagtatgcggggtttcagca

SEQ ID NO: 27622 - RNA, 20 nt, synthetic construct
  source 1..20: mol_type = other RNA
cagtatgctgtttacattag

SEQ ID NO: 27623 - RNA, 20 nt, synthetic construct
  source 1..20: mol_type = other RNA
cagtatgtaggaaactttgc

SEQ ID NO: 27624 - RNA, 20 nt, synthetic construct
  source 1..20: mol_type = other RNA
cagtatgtcagactcattgc

SEQ ID NO: 27625 - RNA, 20 nt, synthetic construct
  source 1..20: mol_type = other RNA
cagtatgtgccatttttata

SEQ ID NO: 27626 - RNA, 20 nt, synthetic construct
  source 1..20: mol_type = other RNA
cagtatgtgtctctgacatg

SEQ ID NO: 27627 - RNA, 20 nt, synthetic construct
  source 1..20: mol_type = other RNA
cagtattacacagaaagcct

SEQ ID NO: 27628 - RNA, 20 nt, synthetic construct
  source 1..20: mol_type = other RNA
cagtattgtcttctaaccct

SEQ ID NO: 27629 - RNA, 20 nt, synthetic construct
  source 1..20: mol_type = other RNA
cagtattgtgctgaaacccc

SEQ ID NO: 27630 - RNA, 20 nt, synthetic construct
  source 1..20: mol_type = other RNA
cagtattgttaactgtagag

SEQ ID NO: 27631 - RNA, 20 nt, synthetic construct
  source 1..20: mol_type = other RNA
cagtcaacacactagccact

SEQ ID NO: 27632 - RNA, 20 nt, synthetic construct
  source 1..20: mol_type = other RNA
cagtcaacaccaagcaacac

SEQ ID NO: 27633 - RNA, 20 nt, synthetic construct
  source 1..20: mol_type = other RNA
cagtcacaaagctttaaact

SEQ ID NO: 27634 - RNA, 20 nt, synthetic construct
  source 1..20: mol_type = other RNA
cagtcacacaccactacacc

SEQ ID NO: 27635 - RNA, 20 nt, synthetic construct
  source 1..20: mol_type = other RNA
cagtcaccaaacgtttagat

SEQ ID NO: 27636 - RNA, 20 nt, synthetic construct
  source 1..20: mol_type = other RNA
cagtcactaaaaatcagatt

SEQ ID NO: 27637 - RNA, 20 nt, synthetic construct
  source 1..20: mol_type = other RNA
cagtcagtgatggaggtgga

SEQ ID NO: 27638 - RNA, 20 nt, synthetic construct
  source 1..20: mol_type = other RNA
cagtcagttctctgccccgg

SEQ ID NO: 27639 - RNA, 20 nt, synthetic construct
  source 1..20: mol_type = other RNA
cagtcataatttgtgtcctt

SEQ ID NO: 27640 - RNA, 20 nt, synthetic construct
  source 1..20: mol_type = other RNA
cagtcatcacagtccaggaa

SEQ ID NO: 27641 - RNA, 20 nt, synthetic construct
  source 1..20: mol_type = other RNA
cagtcatcctcaacaagaga

SEQ ID NO: 27642 - RNA, 20 nt, synthetic construct
  source 1..20: mol_type = other RNA
cagtcatgtggggactttgt

SEQ ID NO: 27643 - RNA, 20 nt, synthetic construct
  source 1..20: mol_type = other RNA
cagtcattcaggtctatgtg

SEQ ID NO: 27644 - RNA, 20 nt, synthetic construct
  source 1..20: mol_type = other RNA
cagtccactcacctgtcatg

SEQ ID NO: 27645 - RNA, 20 nt, synthetic construct
  source 1..20: mol_type = other RNA
cagtccagatattatcctcc

SEQ ID NO: 27646 - RNA, 20 nt, synthetic construct
  source 1..20: mol_type = other RNA
cagtccagcaccacccttga

SEQ ID NO: 27647 - RNA, 20 nt, synthetic construct
  source 1..20: mol_type = other RNA
cagtccaggaacttacagta

SEQ ID NO: 27648 - RNA, 20 nt, synthetic construct
  source 1..20: mol_type = other RNA
cagtcccaaatgggagcatg

SEQ ID NO: 27649 - RNA, 20 nt, synthetic construct
  source 1..20: mol_type = other RNA
cagtcccactgacagtggac

SEQ ID NO: 27650 - RNA, 20 nt, synthetic construct
  source 1..20: mol_type = other RNA
cagtccccggtctttcctga

SEQ ID NO: 27651 - RNA, 20 nt, synthetic construct
  source 1..20: mol_type = other RNA
cagtccctagtgtctccata

SEQ ID NO: 27652 - RNA, 20 nt, synthetic construct
  source 1..20: mol_type = other RNA
cagtccctcaccttctgctg

SEQ ID NO: 27653 - RNA, 20 nt, synthetic construct
  source 1..20: mol_type = other RNA
cagtccctcctttctagaat

SEQ ID NO: 27654 - RNA, 20 nt, synthetic construct
  source 1..20: mol_type = other RNA
cagtcccttgcctgacagca

SEQ ID NO: 27655 - RNA, 20 nt, synthetic construct
  source 1..20: mol_type = other RNA
cagtcctctactttcacata

SEQ ID NO: 27656 - RNA, 20 nt, synthetic construct
  source 1..20: mol_type = other RNA
cagtcctctcactccaaagc

SEQ ID NO: 27657 - RNA, 20 nt, synthetic construct
  source 1..20: mol_type = other RNA
cagtcctgccttggcctccc

SEQ ID NO: 27658 - RNA, 20 nt, synthetic construct
  source 1..20: mol_type = other RNA
cagtcctgctaacaccttga

SEQ ID NO: 27659 - RNA, 20 nt, synthetic construct
  source 1..20: mol_type = other RNA
cagtcctgtgtttctgctat

SEQ ID NO: 27660 - RNA, 20 nt, synthetic construct
  source 1..20: mol_type = other RNA
cagtccttaccactgaagtg

SEQ ID NO: 27661 - RNA, 20 nt, synthetic construct
  source 1..20: mol_type = other RNA
cagtccttgtgatctatgca

SEQ ID NO: 27662 - RNA, 20 nt, synthetic construct
  source 1..20: mol_type = other RNA
cagtcctttgggaggtcaag

SEQ ID NO: 27663 - RNA, 20 nt, synthetic construct
  source 1..20: mol_type = other RNA
cagtcctttgtgtcaagtac

SEQ ID NO: 27664 - RNA, 20 nt, synthetic construct
  source 1..20: mol_type = other RNA
cagtcggttcttcaccgtgc

SEQ ID NO: 27665 - RNA, 20 nt, synthetic construct
  source 1..20: mol_type = other RNA
cagtctaaccattaacagct

SEQ ID NO: 27666 - RNA, 20 nt, synthetic construct
  source 1..20: mol_type = other RNA
cagtctaggaaaagacttga

SEQ ID NO: 27667 - RNA, 20 nt, synthetic construct
  source 1..20: mol_type = other RNA
cagtctagtccatgaagaaa

SEQ ID NO: 27668 - RNA, 20 nt, synthetic construct
  source 1..20: mol_type = other RNA
cagtctcaaactcctgcact

SEQ ID NO: 27669 - RNA, 20 nt, synthetic construct
  source 1..20: mol_type = other RNA
cagtctccaatcctcagccc

SEQ ID NO: 27670 - RNA, 20 nt, synthetic construct
  source 1..20: mol_type = other RNA
cagtctcccccaggtggttc

SEQ ID NO: 27671 - RNA, 20 nt, synthetic construct
  source 1..20: mol_type = other RNA
cagtctcgaaaaggaatgga

SEQ ID NO: 27672 - RNA, 20 nt, synthetic construct
  source 1..20: mol_type = other RNA
cagtctcgaccccctgggct

SEQ ID NO: 27673 - RNA, 20 nt, synthetic construct
  source 1..20: mol_type = other RNA
cagtctcgtgaatttggtat

SEQ ID NO: 27674 - RNA, 20 nt, synthetic construct
  source 1..20: mol_type = other RNA
cagtctctacccagcactct

SEQ ID NO: 27675 - RNA, 20 nt, synthetic construct
  source 1..20: mol_type = other RNA
cagtctctgcaacatttgtt

SEQ ID NO: 27676 - RNA, 20 nt, synthetic construct
  source 1..20: mol_type = other RNA
cagtctctgcagagcaggct

SEQ ID NO: 27677 - RNA, 20 nt, synthetic construct
  source 1..20: mol_type = other RNA
cagtctctgctcactgcaac

SEQ ID NO: 27678 - RNA, 20 nt, synthetic construct
  source 1..20: mol_type = other RNA
cagtctgatttacttttaaa

SEQ ID NO: 27679 - RNA, 20 nt, synthetic construct
  source 1..20: mol_type = other RNA
cagtctgcaggcagaatgtg

SEQ ID NO: 27680 - RNA, 20 nt, synthetic construct
  source 1..20: mol_type = other RNA
cagtctgtaagcacctgtat

SEQ ID NO: 27681 - RNA, 20 nt, synthetic construct
  source 1..20: mol_type = other RNA
cagtctgtcctcgtaaaagc

SEQ ID NO: 27682 - RNA, 20 nt, synthetic construct
  source 1..20: mol_type = other RNA
cagtctgtgcttaaggaaat

SEQ ID NO: 27683 - RNA, 20 nt, synthetic construct
  source 1..20: mol_type = other RNA
cagtctgtttgccatcttca

SEQ ID NO: 27684 - RNA, 20 nt, synthetic construct
  source 1..20: mol_type = other RNA
cagtcttaaccattgagcca

SEQ ID NO: 27685 - RNA, 20 nt, synthetic construct
  source 1..20: mol_type = other RNA
cagtcttcaggtctctctga

SEQ ID NO: 27686 - RNA, 20 nt, synthetic construct
  source 1..20: mol_type = other RNA
cagtcttctcatacagattt

SEQ ID NO: 27687 - RNA, 20 nt, synthetic construct
  source 1..20: mol_type = other RNA
cagtcttggtagtttgcacg

SEQ ID NO: 27688 - RNA, 20 nt, synthetic construct
  source 1..20: mol_type = other RNA
cagtgaaagtctccctaacc

SEQ ID NO: 27689 - RNA, 20 nt, synthetic construct
  source 1..20: mol_type = other RNA
cagtgaacatgggaatgcat

SEQ ID NO: 27690 - RNA, 20 nt, synthetic construct
  source 1..20: mol_type = other RNA
cagtgaactccagtctgggc

SEQ ID NO: 27691 - RNA, 20 nt, synthetic construct
  source 1..20: mol_type = other RNA
cagtgaagatgctgaacttg

SEQ ID NO: 27692 - RNA, 20 nt, synthetic construct
  source 1..20: mol_type = other RNA
cagtgaagtcatctggtcct

SEQ ID NO: 27693 - RNA, 20 nt, synthetic construct
  source 1..20: mol_type = other RNA
cagtgaatatcatttgaatg

SEQ ID NO: 27694 - RNA, 20 nt, synthetic construct
  source 1..20: mol_type = other RNA
cagtgaattctgacttagtg

SEQ ID NO: 27695 - RNA, 20 nt, synthetic construct
  source 1..20: mol_type = other RNA
cagtgacacctgaggggtct

SEQ ID NO: 27696 - RNA, 20 nt, synthetic construct
  source 1..20: mol_type = other RNA
cagtgacagttctgtgaatt

SEQ ID NO: 27697 - RNA, 20 nt, synthetic construct
  source 1..20: mol_type = other RNA
cagtgacatatgccggctgt

SEQ ID NO: 27698 - RNA, 20 nt, synthetic construct
  source 1..20: mol_type = other RNA
cagtgaccacagtttgaaac

SEQ ID NO: 27699 - RNA, 20 nt, synthetic construct
  source 1..20: mol_type = other RNA
cagtgaccagtgtgatgggg

SEQ ID NO: 27700 - RNA, 20 nt, synthetic construct
  source 1..20: mol_type = other RNA
cagtgactttactgttctcc

SEQ ID NO: 27701 - RNA, 20 nt, synthetic construct
  source 1..20: mol_type = other RNA
cagtgagcatgctgcaactg

SEQ ID NO: 27702 - RNA, 20 nt, synthetic construct
  source 1..20: mol_type = other RNA
cagtgagcccagagatccca

SEQ ID NO: 27703 - RNA, 20 nt, synthetic construct
  source 1..20: mol_type = other RNA
cagtgaggacgctgatgaca

SEQ ID NO: 27704 - RNA, 20 nt, synthetic construct
  source 1..20: mol_type = other RNA
cagtgagtagaagagtaatg

SEQ ID NO: 27705 - RNA, 20 nt, synthetic construct
  source 1..20: mol_type = other RNA
cagtgagtagggaaggtgcc

SEQ ID NO: 27706 - RNA, 20 nt, synthetic construct
  source 1..20: mol_type = other RNA
cagtgagtgatgaaaagagc

SEQ ID NO: 27707 - RNA, 20 nt, synthetic construct
  source 1..20: mol_type = other RNA
cagtgagttcaaatgttaag

SEQ ID NO: 27708 - RNA, 20 nt, synthetic construct
  source 1..20: mol_type = other RNA
cagtgatggaggtggaactc

SEQ ID NO: 27709 - RNA, 20 nt, synthetic construct
  source 1..20: mol_type = other RNA
cagtgattggatatttgcag

SEQ ID NO: 27710 - RNA, 20 nt, synthetic construct
  source 1..20: mol_type = other RNA
cagtgcaaacctcctggttt

SEQ ID NO: 27711 - RNA, 20 nt, synthetic construct
  source 1..20: mol_type = other RNA
cagtgcagcaagcagtaaat

SEQ ID NO: 27712 - RNA, 20 nt, synthetic construct
  source 1..20: mol_type = other RNA
cagtgcataccaccacattc

SEQ ID NO: 27713 - RNA, 20 nt, synthetic construct
  source 1..20: mol_type = other RNA
cagtgccaacacatggggca

SEQ ID NO: 27714 - RNA, 20 nt, synthetic construct
  source 1..20: mol_type = other RNA
cagtgcccacctgacaagta

SEQ ID NO: 27715 - RNA, 20 nt, synthetic construct
  source 1..20: mol_type = other RNA
cagtgccttcagctatggtg

SEQ ID NO: 27716 - RNA, 20 nt, synthetic construct
  source 1..20: mol_type = other RNA
cagtgctccatagcttccta

SEQ ID NO: 27717 - RNA, 20 nt, synthetic construct
  source 1..20: mol_type = other RNA
cagtgctctcccccgaatcc

SEQ ID NO: 27718 - RNA, 20 nt, synthetic construct
  source 1..20: mol_type = other RNA
cagtgctgaaagctagaaga

SEQ ID NO: 27719 - RNA, 20 nt, synthetic construct
  source 1..20: mol_type = other RNA
cagtgctgctctgacgttta

SEQ ID NO: 27720 - RNA, 20 nt, synthetic construct
  source 1..20: mol_type = other RNA
cagtgctgtgccagtgcaaa

SEQ ID NO: 27721 - RNA, 20 nt, synthetic construct
  source 1..20: mol_type = other RNA
cagtgcttagcgctggaggt

SEQ ID NO: 27722 - RNA, 20 nt, synthetic construct
  source 1..20: mol_type = other RNA
cagtgcttgcagccttccct

SEQ ID NO: 27723 - RNA, 20 nt, synthetic construct
  source 1..20: mol_type = other RNA
cagtggatgactaggctcct

SEQ ID NO: 27724 - RNA, 20 nt, synthetic construct
  source 1..20: mol_type = other RNA
cagtggccagtgaccagtgt

SEQ ID NO: 27725 - RNA, 20 nt, synthetic construct
  source 1..20: mol_type = other RNA
cagtggcccccctgaaaaat

SEQ ID NO: 27726 - RNA, 20 nt, synthetic construct
  source 1..20: mol_type = other RNA
cagtggccctgttggcctgg

SEQ ID NO: 27727 - RNA, 20 nt, synthetic construct
  source 1..20: mol_type = other RNA
cagtggcgcagccatggctc

SEQ ID NO: 27728 - RNA, 20 nt, synthetic construct
  source 1..20: mol_type = other RNA
cagtggcgtgtgcccaggct

SEQ ID NO: 27729 - RNA, 20 nt, synthetic construct
  source 1..20: mol_type = other RNA
cagtggctagtgtgttgact

SEQ ID NO: 27730 - RNA, 20 nt, synthetic construct
  source 1..20: mol_type = other RNA
cagtggcttcctaactggtc

SEQ ID NO: 27731 - RNA, 20 nt, synthetic construct
  source 1..20: mol_type = other RNA
cagtgggaagtggagtgcga

SEQ ID NO: 27732 - RNA, 20 nt, synthetic construct
  source 1..20: mol_type = other RNA
cagtgggactggagaacagt

SEQ ID NO: 27733 - RNA, 20 nt, synthetic construct
  source 1..20: mol_type = other RNA
cagtgggtcagctagtgtgt

SEQ ID NO: 27734 - RNA, 20 nt, synthetic construct
  source 1..20: mol_type = other RNA
cagtgggttcaattatgtgg

SEQ ID NO: 27735 - RNA, 20 nt, synthetic construct
  source 1..20: mol_type = other RNA
cagtggtaaggactgaagtc

SEQ ID NO: 27736 - RNA, 20 nt, synthetic construct
  source 1..20: mol_type = other RNA
cagtggtagttacacaagtg

SEQ ID NO: 27737 - RNA, 20 nt, synthetic construct
  source 1..20: mol_type = other RNA
cagtggtgcaatcacggctg

SEQ ID NO: 27738 - RNA, 20 nt, synthetic construct
  source 1..20: mol_type = other RNA
cagtggtgcttttgctgcat

SEQ ID NO: 27739 - RNA, 20 nt, synthetic construct
  source 1..20: mol_type = other RNA
cagtggtgtggtcttgtctc

SEQ ID NO: 27740 - RNA, 20 nt, synthetic construct
  source 1..20: mol_type = other RNA
cagtggttaatatattttgt

SEQ ID NO: 27741 - RNA, 20 nt, synthetic construct
  source 1..20: mol_type = other RNA
cagtggttaggaaaatacat

SEQ ID NO: 27742 - RNA, 20 nt, synthetic construct
  source 1..20: mol_type = other RNA
cagtggttccatttgttttg

SEQ ID NO: 27743 - RNA, 20 nt, synthetic construct
  source 1..20: mol_type = other RNA
cagtggttctgcgtgttatt

SEQ ID NO: 27744 - RNA, 20 nt, synthetic construct
  source 1..20: mol_type = other RNA
cagtggttggaaaactttta

SEQ ID NO: 27745 - RNA, 20 nt, synthetic construct
  source 1..20: mol_type = other RNA
cagtggttgtgcttcgaggt

SEQ ID NO: 27746 - RNA, 20 nt, synthetic construct
  source 1..20: mol_type = other RNA
cagtggttgtggaattaact

SEQ ID NO: 27747 - RNA, 20 nt, synthetic construct
  source 1..20: mol_type = other RNA
cagtgtactagtctccatac

SEQ ID NO: 27748 - RNA, 20 nt, synthetic construct
  source 1..20: mol_type = other RNA
cagtgtagtcagacacacta

SEQ ID NO: 27749 - RNA, 20 nt, synthetic construct
  source 1..20: mol_type = other RNA
cagtgtccatctcccatcac

SEQ ID NO: 27750 - RNA, 20 nt, synthetic construct
  source 1..20: mol_type = other RNA
cagtgtcctgaatgatttcc

SEQ ID NO: 27751 - RNA, 20 nt, synthetic construct
  source 1..20: mol_type = other RNA
cagtgtctgctacaggggca

SEQ ID NO: 27752 - RNA, 20 nt, synthetic construct
  source 1..20: mol_type = other RNA
cagtgtgaaagtattaaaag

SEQ ID NO: 27753 - RNA, 20 nt, synthetic construct
  source 1..20: mol_type = other RNA
cagtgtgaataggaaagtga

SEQ ID NO: 27754 - RNA, 20 nt, synthetic construct
  source 1..20: mol_type = other RNA
cagtgtgatgggggtaagat

SEQ ID NO: 27755 - RNA, 20 nt, synthetic construct
  source 1..20: mol_type = other RNA
cagtgtggttcatatttccc

SEQ ID NO: 27756 - RNA, 20 nt, synthetic construct
  source 1..20: mol_type = other RNA
cagtgtgtccacacaatggt

SEQ ID NO: 27757 - RNA, 20 nt, synthetic construct
  source 1..20: mol_type = other RNA
cagtgtgttctgccttgagg

SEQ ID NO: 27758 - RNA, 20 nt, synthetic construct
  source 1..20: mol_type = other RNA
cagtgtgtttgtttgctaga

SEQ ID NO: 27759 - RNA, 20 nt, synthetic construct
  source 1..20: mol_type = other RNA
cagtgtgtttttgtaaatga

SEQ ID NO: 27760 - RNA, 20 nt, synthetic construct
  source 1..20: mol_type = other RNA
cagtgttgagaaagcacata

SEQ ID NO: 27761 - RNA, 20 nt, synthetic construct
  source 1..20: mol_type = other RNA
cagtgtttacacacctgaaa

SEQ ID NO: 27762 - RNA, 20 nt, synthetic construct
  source 1..20: mol_type = other RNA
cagtgtttagggacgaatgc

SEQ ID NO: 27763 - RNA, 20 nt, synthetic construct
  source 1..20: mol_type = other RNA
cagtgtttcctagattccct

SEQ ID NO: 27764 - RNA, 20 nt, synthetic construct
  source 1..20: mol_type = other RNA
cagtgtttggtttttatgga

SEQ ID NO: 27765 - RNA, 20 nt, synthetic construct
  source 1..20: mol_type = other RNA
cagtgttttaaagcagggag

SEQ ID NO: 27766 - RNA, 20 nt, synthetic construct
  source 1..20: mol_type = other RNA
cagtgttttaggggggaaaa

SEQ ID NO: 27767 - RNA, 20 nt, synthetic construct
  source 1..20: mol_type = other RNA
cagtgtttttgaattctgct

SEQ ID NO: 27768 - RNA, 20 nt, synthetic construct
  source 1..20: mol_type = other RNA
cagttaaaagttttccaacc

SEQ ID NO: 27769 - RNA, 20 nt, synthetic construct
  source 1..20: mol_type = other RNA
cagttaaaatgaaaatgttc

SEQ ID NO: 27770 - RNA, 20 nt, synthetic construct
  source 1..20: mol_type = other RNA
cagttaaacccaacaaacaa

SEQ ID NO: 27771 - RNA, 20 nt, synthetic construct
  source 1..20: mol_type = other RNA
cagttaacaatactgcattg

SEQ ID NO: 27772 - RNA, 20 nt, synthetic construct
  source 1..20: mol_type = other RNA
cagttaacagtgctgtgcca

SEQ ID NO: 27773 - RNA, 20 nt, synthetic construct
  source 1..20: mol_type = other RNA
cagttaacgtatgaataaac

SEQ ID NO: 27774 - RNA, 20 nt, synthetic construct
  source 1..20: mol_type = other RNA
cagttaacttattggaaaac

SEQ ID NO: 27775 - RNA, 20 nt, synthetic construct
  source 1..20: mol_type = other RNA
cagttacagcatttcagcca

SEQ ID NO: 27776 - RNA, 20 nt, synthetic construct
  source 1..20: mol_type = other RNA
cagttaccaccaagaaaaag

SEQ ID NO: 27777 - RNA, 20 nt, synthetic construct
  source 1..20: mol_type = other RNA
cagttactcctgagcaagga

SEQ ID NO: 27778 - RNA, 20 nt, synthetic construct
  source 1..20: mol_type = other RNA
cagttactctaaaagaataa

SEQ ID NO: 27779 - RNA, 20 nt, synthetic construct
  source 1..20: mol_type = other RNA
cagttactctctctgcctcg

SEQ ID NO: 27780 - RNA, 20 nt, synthetic construct
  source 1..20: mol_type = other RNA
cagttactttcctttttcaa

SEQ ID NO: 27781 - RNA, 20 nt, synthetic construct
  source 1..20: mol_type = other RNA
cagttagcatgcctgacaaa

SEQ ID NO: 27782 - RNA, 20 nt, synthetic construct
  source 1..20: mol_type = other RNA
cagttaggaagccactgcat

SEQ ID NO: 27783 - RNA, 20 nt, synthetic construct
  source 1..20: mol_type = other RNA
cagttatcacacctaggcct

SEQ ID NO: 27784 - RNA, 20 nt, synthetic construct
  source 1..20: mol_type = other RNA
cagttatcaccatgtgctta

SEQ ID NO: 27785 - RNA, 20 nt, synthetic construct
  source 1..20: mol_type = other RNA
cagttatctctgccctcatt

SEQ ID NO: 27786 - RNA, 20 nt, synthetic construct
  source 1..20: mol_type = other RNA
cagttatgtcagtcaacaca

SEQ ID NO: 27787 - RNA, 20 nt, synthetic construct
  source 1..20: mol_type = other RNA
cagttattaagagtgtgctg

SEQ ID NO: 27788 - RNA, 20 nt, synthetic construct
  source 1..20: mol_type = other RNA
cagttattcttcagcaagga

SEQ ID NO: 27789 - RNA, 20 nt, synthetic construct
  source 1..20: mol_type = other RNA
cagttcaagcaccacttcga

SEQ ID NO: 27790 - RNA, 20 nt, synthetic construct
  source 1..20: mol_type = other RNA
cagttcaaggtgttagcagg

SEQ ID NO: 27791 - RNA, 20 nt, synthetic construct
  source 1..20: mol_type = other RNA
cagttcaatactactgcaaa

SEQ ID NO: 27792 - RNA, 20 nt, synthetic construct
  source 1..20: mol_type = other RNA
cagttcaccagtttctaatt

SEQ ID NO: 27793 - RNA, 20 nt, synthetic construct
  source 1..20: mol_type = other RNA
cagttcagcctgcagaagga

SEQ ID NO: 27794 - RNA, 20 nt, synthetic construct
  source 1..20: mol_type = other RNA
cagttctagttctaataaac

SEQ ID NO: 27795 - RNA, 20 nt, synthetic construct
  source 1..20: mol_type = other RNA
cagttctatttctttccatt

SEQ ID NO: 27796 - RNA, 20 nt, synthetic construct
  source 1..20: mol_type = other RNA
cagttctctgccccgggcct

SEQ ID NO: 27797 - RNA, 20 nt, synthetic construct
  source 1..20: mol_type = other RNA
cagttctgcgcaattgcagc

SEQ ID NO: 27798 - RNA, 20 nt, synthetic construct
  source 1..20: mol_type = other RNA
cagttctgtacccttacgcg

SEQ ID NO: 27799 - RNA, 20 nt, synthetic construct
  source 1..20: mol_type = other RNA
cagttctgtgaatttgatta

SEQ ID NO: 27800 - RNA, 20 nt, synthetic construct
  source 1..20: mol_type = other RNA
cagttcttaagttaaaactt

SEQ ID NO: 27801 - RNA, 20 nt, synthetic construct
  source 1..20: mol_type = other RNA
cagttctttcggatatttac

SEQ ID NO: 27802 - RNA, 20 nt, synthetic construct
  source 1..20: mol_type = other RNA
cagttgaaaagtatggttga

SEQ ID NO: 27803 - RNA, 20 nt, synthetic construct
  source 1..20: mol_type = other RNA
cagttgacatcctttaattt

SEQ ID NO: 27804 - RNA, 20 nt, synthetic construct
  source 1..20: mol_type = other RNA
cagttgagagagaattctaa

SEQ ID NO: 27805 - RNA, 20 nt, synthetic construct
  source 1..20: mol_type = other RNA
cagttgagttttcaaccttt

SEQ ID NO: 27806 - RNA, 20 nt, synthetic construct
  source 1..20: mol_type = other RNA
cagttgatgcaatttgtttt

SEQ ID NO: 27807 - RNA, 20 nt, synthetic construct
  source 1..20: mol_type = other RNA
cagttgcagcatgctcactg

SEQ ID NO: 27808 - RNA, 20 nt, synthetic construct
  source 1..20: mol_type = other RNA
cagttgcatgaatttgtttt

SEQ ID NO: 27809 - RNA, 20 nt, synthetic construct
  source 1..20: mol_type = other RNA
cagttgctattcaacaggta

SEQ ID NO: 27810 - RNA, 20 nt, synthetic construct
  source 1..20: mol_type = other RNA
cagttgcttactctaatggg

SEQ ID NO: 27811 - RNA, 20 nt, synthetic construct
  source 1..20: mol_type = other RNA
cagttggaactcttgcggtc

SEQ ID NO: 27812 - RNA, 20 nt, synthetic construct
  source 1..20: mol_type = other RNA
cagttggattatatgttcta

SEQ ID NO: 27813 - RNA, 20 nt, synthetic construct
  source 1..20: mol_type = other RNA
cagttggccttgaggtgaga

SEQ ID NO: 27814 - RNA, 20 nt, synthetic construct
  source 1..20: mol_type = other RNA
cagttggggactcttatggc

SEQ ID NO: 27815 - RNA, 20 nt, synthetic construct
  source 1..20: mol_type = other RNA
cagttggtgaagagagcctg

SEQ ID NO: 27816 - RNA, 20 nt, synthetic construct
  source 1..20: mol_type = other RNA
cagttgtatgccaaaaaatt

SEQ ID NO: 27817 - RNA, 20 nt, synthetic construct
  source 1..20: mol_type = other RNA
cagttgtcagaattagaaag

SEQ ID NO: 27818 - RNA, 20 nt, synthetic construct
  source 1..20: mol_type = other RNA
cagttgtttacttgggtata

SEQ ID NO: 27819 - RNA, 20 nt, synthetic construct
  source 1..20: mol_type = other RNA
cagtttaaaagtaaattcgc

SEQ ID NO: 27820 - RNA, 20 nt, synthetic construct
  source 1..20: mol_type = other RNA
cagtttaaagctttgtgact

SEQ ID NO: 27821 - RNA, 20 nt, synthetic construct
  source 1..20: mol_type = other RNA
cagtttacacgccttcgcgg

SEQ ID NO: 27822 - RNA, 20 nt, synthetic construct
  source 1..20: mol_type = other RNA
cagtttagcaatccaaggac

SEQ ID NO: 27823 - RNA, 20 nt, synthetic construct
  source 1..20: mol_type = other RNA
cagtttagtaaatctttggt

SEQ ID NO: 27824 - RNA, 20 nt, synthetic construct
  source 1..20: mol_type = other RNA
cagtttatatgcctagatga

SEQ ID NO: 27825 - RNA, 20 nt, synthetic construct
  source 1..20: mol_type = other RNA
cagtttatgggtcaaccact

SEQ ID NO: 27826 - RNA, 20 nt, synthetic construct
  source 1..20: mol_type = other RNA
cagtttcaaaagctccccgg

SEQ ID NO: 27827 - RNA, 20 nt, synthetic construct
  source 1..20: mol_type = other RNA
cagtttcacttcttagtaaa

SEQ ID NO: 27828 - RNA, 20 nt, synthetic construct
  source 1..20: mol_type = other RNA
cagtttccctctgagagaag

SEQ ID NO: 27829 - RNA, 20 nt, synthetic construct
  source 1..20: mol_type = other RNA
cagtttctctgctttttctt

SEQ ID NO: 27830 - RNA, 20 nt, synthetic construct
  source 1..20: mol_type = other RNA
cagtttctgatttatctttc

SEQ ID NO: 27831 - RNA, 20 nt, synthetic construct
  source 1..20: mol_type = other RNA
cagtttgaaactttaagagt

SEQ ID NO: 27832 - RNA, 20 nt, synthetic construct
  source 1..20: mol_type = other RNA
cagtttgagaagccacacag

SEQ ID NO: 27833 - RNA, 20 nt, synthetic construct
  source 1..20: mol_type = other RNA
cagtttgctagtattttgtt

SEQ ID NO: 27834 - RNA, 20 nt, synthetic construct
  source 1..20: mol_type = other RNA
cagtttggcaatttctcaaa

SEQ ID NO: 27835 - RNA, 20 nt, synthetic construct
  source 1..20: mol_type = other RNA
cagtttgggtgacagagaga

SEQ ID NO: 27836 - RNA, 20 nt, synthetic construct
  source 1..20: mol_type = other RNA
cagtttgtgttttcactctc

SEQ ID NO: 27837 - RNA, 20 nt, synthetic construct
  source 1..20: mol_type = other RNA
cagtttgttctgctgttgat

SEQ ID NO: 27838 - RNA, 20 nt, synthetic construct
  source 1..20: mol_type = other RNA
cagttttaaagaattcgtta

SEQ ID NO: 27839 - RNA, 20 nt, synthetic construct
  source 1..20: mol_type = other RNA
cagttttatcaattagttcc

SEQ ID NO: 27840 - RNA, 20 nt, synthetic construct
  source 1..20: mol_type = other RNA
cagttttctggaaactcaaa

SEQ ID NO: 27841 - RNA, 20 nt, synthetic construct
  source 1..20: mol_type = other RNA
cagttttgaccaaaacaaaa

SEQ ID NO: 27842 - RNA, 20 nt, synthetic construct
  source 1..20: mol_type = other RNA
cagttttgagtggcatcata

SEQ ID NO: 27843 - RNA, 20 nt, synthetic construct
  source 1..20: mol_type = other RNA
cagttttgtatatggtttaa

SEQ ID NO: 27844 - RNA, 20 nt, synthetic construct
  source 1..20: mol_type = other RNA
cagttttgttgaatcttaac

SEQ ID NO: 27845 - RNA, 20 nt, synthetic construct
  source 1..20: mol_type = other RNA
cagtttttacatgtagtttt

SEQ ID NO: 27846 - RNA, 20 nt, synthetic construct
  source 1..20: mol_type = other RNA
cataaaaaagatcaaatgac

SEQ ID NO: 27847 - RNA, 20 nt, synthetic construct
  source 1..20: mol_type = other RNA
cataaaaaaggaatctgggc

SEQ ID NO: 27848 - RNA, 20 nt, synthetic construct
  source 1..20: mol_type = other RNA
cataaaaaccaaacactgga

SEQ ID NO: 27849 - RNA, 20 nt, synthetic construct
  source 1..20: mol_type = other RNA
cataaaaagcgttggagaca

SEQ ID NO: 27850 - RNA, 20 nt, synthetic construct
  source 1..20: mol_type = other RNA
cataaaaccatttttcagaa

SEQ ID NO: 27851 - RNA, 20 nt, synthetic construct
  source 1..20: mol_type = other RNA
cataaaagcgtactgtgatt

SEQ ID NO: 27852 - RNA, 20 nt, synthetic construct
  source 1..20: mol_type = other RNA
cataaaaggatatgggccaa

SEQ ID NO: 27853 - RNA, 20 nt, synthetic construct
  source 1..20: mol_type = other RNA
cataaaatatgtccttttga

SEQ ID NO: 27854 - RNA, 20 nt, synthetic construct
  source 1..20: mol_type = other RNA
cataaaatgatggcaacaat

SEQ ID NO: 27855 - RNA, 20 nt, synthetic construct
  source 1..20: mol_type = other RNA
cataaacacagaacactaaa

SEQ ID NO: 27856 - RNA, 20 nt, synthetic construct
  source 1..20: mol_type = other RNA
cataaacataactttgaaga

SEQ ID NO: 27857 - RNA, 20 nt, synthetic construct
  source 1..20: mol_type = other RNA
cataaacgacagcaggaaaa

SEQ ID NO: 27858 - RNA, 20 nt, synthetic construct
  source 1..20: mol_type = other RNA
cataaactgaacatttatac

SEQ ID NO: 27859 - RNA, 20 nt, synthetic construct
  source 1..20: mol_type = other RNA
cataaagacagacatttgga

SEQ ID NO: 27860 - RNA, 20 nt, synthetic construct
  source 1..20: mol_type = other RNA
cataaagccggattcctttc

SEQ ID NO: 27861 - RNA, 20 nt, synthetic construct
  source 1..20: mol_type = other RNA
cataaagtcagaggagcagt

SEQ ID NO: 27862 - RNA, 20 nt, synthetic construct
  source 1..20: mol_type = other RNA
cataaagtcttccattttag

SEQ ID NO: 27863 - RNA, 20 nt, synthetic construct
  source 1..20: mol_type = other RNA
cataaagtcttgctggaagt

SEQ ID NO: 27864 - RNA, 20 nt, synthetic construct
  source 1..20: mol_type = other RNA
cataaatagggtgctactca

SEQ ID NO: 27865 - RNA, 20 nt, synthetic construct
  source 1..20: mol_type = other RNA
cataaatcaaggtacaatac

SEQ ID NO: 27866 - RNA, 20 nt, synthetic construct
  source 1..20: mol_type = other RNA
cataaatcacaggaaagatg

SEQ ID NO: 27867 - RNA, 20 nt, synthetic construct
  source 1..20: mol_type = other RNA
cataaatttgccacatttta

SEQ ID NO: 27868 - RNA, 20 nt, synthetic construct
  source 1..20: mol_type = other RNA
cataacaaagctctgatgct

SEQ ID NO: 27869 - RNA, 20 nt, synthetic construct
  source 1..20: mol_type = other RNA
cataacagtattgtcttcta

SEQ ID NO: 27870 - RNA, 20 nt, synthetic construct
  source 1..20: mol_type = other RNA
cataacatctatgaagtaat

SEQ ID NO: 27871 - RNA, 20 nt, synthetic construct
  source 1..20: mol_type = other RNA
cataaccaaattatttcagt

SEQ ID NO: 27872 - RNA, 20 nt, synthetic construct
  source 1..20: mol_type = other RNA
cataactcgtaatgcgatga

SEQ ID NO: 27873 - RNA, 20 nt, synthetic construct
  source 1..20: mol_type = other RNA
cataactgtaaagtaatcaa

SEQ ID NO: 27874 - RNA, 20 nt, synthetic construct
  source 1..20: mol_type = other RNA
cataacttcccagacaggga

SEQ ID NO: 27875 - RNA, 20 nt, synthetic construct
  source 1..20: mol_type = other RNA
cataagaactcctggtctcc

SEQ ID NO: 27876 - RNA, 20 nt, synthetic construct
  source 1..20: mol_type = other RNA
cataagacccctcaggtgtc

SEQ ID NO: 27877 - RNA, 20 nt, synthetic construct
  source 1..20: mol_type = other RNA
cataagagtccccaactgca

SEQ ID NO: 27878 - RNA, 20 nt, synthetic construct
  source 1..20: mol_type = other RNA
cataagatctgtctttggcc

SEQ ID NO: 27879 - RNA, 20 nt, synthetic construct
  source 1..20: mol_type = other RNA
cataagcattttctaaattg

SEQ ID NO: 27880 - RNA, 20 nt, synthetic construct
  source 1..20: mol_type = other RNA
cataagccaccgcactcagc

SEQ ID NO: 27881 - RNA, 20 nt, synthetic construct
  source 1..20: mol_type = other RNA
cataagcttttatttgtcat

SEQ ID NO: 27882 - RNA, 20 nt, synthetic construct
  source 1..20: mol_type = other RNA
cataagggggaatctactct

SEQ ID NO: 27883 - RNA, 20 nt, synthetic construct
  source 1..20: mol_type = other RNA
cataagggtctgttttacat

SEQ ID NO: 27884 - RNA, 20 nt, synthetic construct
  source 1..20: mol_type = other RNA
cataaggtatatttctgtaa

SEQ ID NO: 27885 - RNA, 20 nt, synthetic construct
  source 1..20: mol_type = other RNA
cataagtccctaacagtctc

SEQ ID NO: 27886 - RNA, 20 nt, synthetic construct
  source 1..20: mol_type = other RNA
cataagttctagagatttgc

SEQ ID NO: 27887 - RNA, 20 nt, synthetic construct
  source 1..20: mol_type = other RNA
cataatagtctcacgatact

SEQ ID NO: 27888 - RNA, 20 nt, synthetic construct
  source 1..20: mol_type = other RNA
cataatatatcacaacttgt

SEQ ID NO: 27889 - RNA, 20 nt, synthetic construct
  source 1..20: mol_type = other RNA
cataatcaaattcacagaac

SEQ ID NO: 27890 - RNA, 20 nt, synthetic construct
  source 1..20: mol_type = other RNA
cataatccttagattacaaa

SEQ ID NO: 27891 - RNA, 20 nt, synthetic construct
  source 1..20: mol_type = other RNA
cataatctttggtgctgata

SEQ ID NO: 27892 - RNA, 20 nt, synthetic construct
  source 1..20: mol_type = other RNA
cataatgagtaacatgtgga

SEQ ID NO: 27893 - RNA, 20 nt, synthetic construct
  source 1..20: mol_type = other RNA
cataattgaacccactgagc

SEQ ID NO: 27894 - RNA, 20 nt, synthetic construct
  source 1..20: mol_type = other RNA
cataattggttaaacttggt

SEQ ID NO: 27895 - RNA, 20 nt, synthetic construct
  source 1..20: mol_type = other RNA
cataatttgtgtcctttttt

SEQ ID NO: 27896 - RNA, 20 nt, synthetic construct
  source 1..20: mol_type = other RNA
catacaaaccaaaaaatgtg

SEQ ID NO: 27897 - RNA, 20 nt, synthetic construct
  source 1..20: mol_type = other RNA
catacaactgctcataatag

SEQ ID NO: 27898 - RNA, 20 nt, synthetic construct
  source 1..20: mol_type = other RNA
catacaaggagacctactaa

SEQ ID NO: 27899 - RNA, 20 nt, synthetic construct
  source 1..20: mol_type = other RNA
catacaagttgtgatatatt

SEQ ID NO: 27900 - RNA, 20 nt, synthetic construct
  source 1..20: mol_type = other RNA
catacaatagtttagttact

SEQ ID NO: 27901 - RNA, 20 nt, synthetic construct
  source 1..20: mol_type = other RNA
catacacagggaaaactaca

SEQ ID NO: 27902 - RNA, 20 nt, synthetic construct
  source 1..20: mol_type = other RNA
catacacatcagattttgaa

SEQ ID NO: 27903 - RNA, 20 nt, synthetic construct
  source 1..20: mol_type = other RNA
catacacatccagaagtcac

SEQ ID NO: 27904 - RNA, 20 nt, synthetic construct
  source 1..20: mol_type = other RNA
catacacctggatcaagtgg

SEQ ID NO: 27905 - RNA, 20 nt, synthetic construct
  source 1..20: mol_type = other RNA
catacacgagtgtgtttcgc

SEQ ID NO: 27906 - RNA, 20 nt, synthetic construct
  source 1..20: mol_type = other RNA
catacactcatttcctttca

SEQ ID NO: 27907 - RNA, 20 nt, synthetic construct
  source 1..20: mol_type = other RNA
catacaggagttccgatttc

SEQ ID NO: 27908 - RNA, 20 nt, synthetic construct
  source 1..20: mol_type = other RNA
catacagtgccttcagctat

SEQ ID NO: 27909 - RNA, 20 nt, synthetic construct
  source 1..20: mol_type = other RNA
catacatgagaaatgttaag

SEQ ID NO: 27910 - RNA, 20 nt, synthetic construct
  source 1..20: mol_type = other RNA
catacatgttcagttataaa

SEQ ID NO: 27911 - RNA, 20 nt, synthetic construct
  source 1..20: mol_type = other RNA
catacattttccacatattt

SEQ ID NO: 27912 - RNA, 20 nt, synthetic construct
  source 1..20: mol_type = other RNA
cataccaaaacccttgggat

SEQ ID NO: 27913 - RNA, 20 nt, synthetic construct
  source 1..20: mol_type = other RNA
cataccaagcccggcacggt

SEQ ID NO: 27914 - RNA, 20 nt, synthetic construct
  source 1..20: mol_type = other RNA
cataccaccacattcggcca

SEQ ID NO: 27915 - RNA, 20 nt, synthetic construct
  source 1..20: mol_type = other RNA
cataccacctgtcagaaaca

SEQ ID NO: 27916 - RNA, 20 nt, synthetic construct
  source 1..20: mol_type = other RNA
cataccaggttttggtaatg

SEQ ID NO: 27917 - RNA, 20 nt, synthetic construct
  source 1..20: mol_type = other RNA
cataccccaaccctacctag

SEQ ID NO: 27918 - RNA, 20 nt, synthetic construct
  source 1..20: mol_type = other RNA
cataccccctggaaataagt

SEQ ID NO: 27919 - RNA, 20 nt, synthetic construct
  source 1..20: mol_type = other RNA
cataccgacggctcaggcct

SEQ ID NO: 27920 - RNA, 20 nt, synthetic construct
  source 1..20: mol_type = other RNA
cataccgagtaatgggatgg

SEQ ID NO: 27921 - RNA, 20 nt, synthetic construct
  source 1..20: mol_type = other RNA
catacctggtccttaaattt

SEQ ID NO: 27922 - RNA, 20 nt, synthetic construct
  source 1..20: mol_type = other RNA
catacgaaagcctttatttt

SEQ ID NO: 27923 - RNA, 20 nt, synthetic construct
  source 1..20: mol_type = other RNA
catacgtcgtcccccatccc

SEQ ID NO: 27924 - RNA, 20 nt, synthetic construct
  source 1..20: mol_type = other RNA
catacgttaactgtattgca

SEQ ID NO: 27925 - RNA, 20 nt, synthetic construct
  source 1..20: mol_type = other RNA
catactattttctatagtgg

SEQ ID NO: 27926 - RNA, 20 nt, synthetic construct
  source 1..20: mol_type = other RNA
catactcagccccctcgaag

SEQ ID NO: 27927 - RNA, 20 nt, synthetic construct
  source 1..20: mol_type = other RNA
catactgaaagacagacctc

SEQ ID NO: 27928 - RNA, 20 nt, synthetic construct
  source 1..20: mol_type = other RNA
catactgaaggcatagggcc

SEQ ID NO: 27929 - RNA, 20 nt, synthetic construct
  source 1..20: mol_type = other RNA
catactgcactctcaaaatt

SEQ ID NO: 27930 - RNA, 20 nt, synthetic construct
  source 1..20: mol_type = other RNA
catactgcagcacttttaag

SEQ ID NO: 27931 - RNA, 20 nt, synthetic construct
  source 1..20: mol_type = other RNA
catactgcatattgaagcca

SEQ ID NO: 27932 - RNA, 20 nt, synthetic construct
  source 1..20: mol_type = other RNA
catactggaaggactcacag

SEQ ID NO: 27933 - RNA, 20 nt, synthetic construct
  source 1..20: mol_type = other RNA
catactgtcacaggctttcc

SEQ ID NO: 27934 - RNA, 20 nt, synthetic construct
  source 1..20: mol_type = other RNA
catactgtgatgattttaga

SEQ ID NO: 27935 - RNA, 20 nt, synthetic construct
  source 1..20: mol_type = other RNA
catactgtgcagtggatgac

SEQ ID NO: 27936 - RNA, 20 nt, synthetic construct
  source 1..20: mol_type = other RNA
catactgtggatatctttta

SEQ ID NO: 27937 - RNA, 20 nt, synthetic construct
  source 1..20: mol_type = other RNA
catacttagctaatttcaga

SEQ ID NO: 27938 - RNA, 20 nt, synthetic construct
  source 1..20: mol_type = other RNA
catacttcaaagggtcacta

SEQ ID NO: 27939 - RNA, 20 nt, synthetic construct
  source 1..20: mol_type = other RNA
catacttgctttattacttc

SEQ ID NO: 27940 - RNA, 20 nt, synthetic construct
  source 1..20: mol_type = other RNA
catactttggaaggtaggag

SEQ ID NO: 27941 - RNA, 20 nt, synthetic construct
  source 1..20: mol_type = other RNA
catactttgtcaggcatgct

SEQ ID NO: 27942 - RNA, 20 nt, synthetic construct
  source 1..20: mol_type = other RNA
catacttttcaactgaacaa

SEQ ID NO: 27943 - RNA, 20 nt, synthetic construct
  source 1..20: mol_type = other RNA
catagaagcgctcttcaagc

SEQ ID NO: 27944 - RNA, 20 nt, synthetic construct
  source 1..20: mol_type = other RNA
catagacctgaatgactgtt

SEQ ID NO: 27945 - RNA, 20 nt, synthetic construct
  source 1..20: mol_type = other RNA
catagactttagagtcagtt

SEQ ID NO: 27946 - RNA, 20 nt, synthetic construct
  source 1..20: mol_type = other RNA
catagagatcttgtgtatct

SEQ ID NO: 27947 - RNA, 20 nt, synthetic construct
  source 1..20: mol_type = other RNA
catagagctttaaagttaat

SEQ ID NO: 27948 - RNA, 20 nt, synthetic construct
  source 1..20: mol_type = other RNA
catagagggagcatcttccc

SEQ ID NO: 27949 - RNA, 20 nt, synthetic construct
  source 1..20: mol_type = other RNA
catagagtaccaggtcagcc

SEQ ID NO: 27950 - RNA, 20 nt, synthetic construct
  source 1..20: mol_type = other RNA
catagatcacaaggactggc

SEQ ID NO: 27951 - RNA, 20 nt, synthetic construct
  source 1..20: mol_type = other RNA
catagatcaccaggggctgg

SEQ ID NO: 27952 - RNA, 20 nt, synthetic construct
  source 1..20: mol_type = other RNA
catagatgaaactaaatgtg

SEQ ID NO: 27953 - RNA, 20 nt, synthetic construct
  source 1..20: mol_type = other RNA
catagatgttatgccccctc

SEQ ID NO: 27954 - RNA, 20 nt, synthetic construct
  source 1..20: mol_type = other RNA
catagcaaggaagcagaatg

SEQ ID NO: 27955 - RNA, 20 nt, synthetic construct
  source 1..20: mol_type = other RNA
catagcagaaccttagaaat

SEQ ID NO: 27956 - RNA, 20 nt, synthetic construct
  source 1..20: mol_type = other RNA
catagcagaatggccctgcg

SEQ ID NO: 27957 - RNA, 20 nt, synthetic construct
  source 1..20: mol_type = other RNA
catagcagcattgtttacag

SEQ ID NO: 27958 - RNA, 20 nt, synthetic construct
  source 1..20: mol_type = other RNA
catagcagggtcatgcacac

SEQ ID NO: 27959 - RNA, 20 nt, synthetic construct
  source 1..20: mol_type = other RNA
catagcagtgggaagtggag

SEQ ID NO: 27960 - RNA, 20 nt, synthetic construct
  source 1..20: mol_type = other RNA
catagctcactagagcttca

SEQ ID NO: 27961 - RNA, 20 nt, synthetic construct
  source 1..20: mol_type = other RNA
catagctgaaggcactgtat

SEQ ID NO: 27962 - RNA, 20 nt, synthetic construct
  source 1..20: mol_type = other RNA
catagcttcctaagaaaggg

SEQ ID NO: 27963 - RNA, 20 nt, synthetic construct
  source 1..20: mol_type = other RNA
catagcttgaaccagggagg

SEQ ID NO: 27964 - RNA, 20 nt, synthetic construct
  source 1..20: mol_type = other RNA
cataggaaatacttgatcta

SEQ ID NO: 27965 - RNA, 20 nt, synthetic construct
  source 1..20: mol_type = other RNA
cataggatagttaaacatgt

SEQ ID NO: 27966 - RNA, 20 nt, synthetic construct
  source 1..20: mol_type = other RNA
cataggcacgcgcccccatg

SEQ ID NO: 27967 - RNA, 20 nt, synthetic construct
  source 1..20: mol_type = other RNA
cataggcatctctcccttcc

SEQ ID NO: 27968 - RNA, 20 nt, synthetic construct
  source 1..20: mol_type = other RNA
cataggcttagtacagccat

SEQ ID NO: 27969 - RNA, 20 nt, synthetic construct
  source 1..20: mol_type = other RNA
catagggatgttgcctacta

SEQ ID NO: 27970 - RNA, 20 nt, synthetic construct
  source 1..20: mol_type = other RNA
catagggccttctactttaa

SEQ ID NO: 27971 - RNA, 20 nt, synthetic construct
  source 1..20: mol_type = other RNA
cataggtaatactctagtgg

SEQ ID NO: 27972 - RNA, 20 nt, synthetic construct
  source 1..20: mol_type = other RNA
catagtactccattatatga

SEQ ID NO: 27973 - RNA, 20 nt, synthetic construct
  source 1..20: mol_type = other RNA
catagtagctgttgaattgt

SEQ ID NO: 27974 - RNA, 20 nt, synthetic construct
  source 1..20: mol_type = other RNA
catagtattccatggtatgt

SEQ ID NO: 27975 - RNA, 20 nt, synthetic construct
  source 1..20: mol_type = other RNA
catagtcatcattattagca

SEQ ID NO: 27976 - RNA, 20 nt, synthetic construct
  source 1..20: mol_type = other RNA
catagtcatttgatcttttt

SEQ ID NO: 27977 - RNA, 20 nt, synthetic construct
  source 1..20: mol_type = other RNA
catagtccactttccatctt

SEQ ID NO: 27978 - RNA, 20 nt, synthetic construct
  source 1..20: mol_type = other RNA
catagtcttccaaaatattg

SEQ ID NO: 27979 - RNA, 20 nt, synthetic construct
  source 1..20: mol_type = other RNA
catagtgctcttctgatcac

SEQ ID NO: 27980 - RNA, 20 nt, synthetic construct
  source 1..20: mol_type = other RNA
catagtgtaaactaaaagta

SEQ ID NO: 27981 - RNA, 20 nt, synthetic construct
  source 1..20: mol_type = other RNA
catagtgttaattatttgtg

SEQ ID NO: 27982 - RNA, 20 nt, synthetic construct
  source 1..20: mol_type = other RNA
catagttaatgtgtgaagaa

SEQ ID NO: 27983 - RNA, 20 nt, synthetic construct
  source 1..20: mol_type = other RNA
catagtttgagtatttcatg

SEQ ID NO: 27984 - RNA, 20 nt, synthetic construct
  source 1..20: mol_type = other RNA
catataaactggaaggaaat

SEQ ID NO: 27985 - RNA, 20 nt, synthetic construct
  source 1..20: mol_type = other RNA
catataaatcaatctgtttc

SEQ ID NO: 27986 - RNA, 20 nt, synthetic construct
  source 1..20: mol_type = other RNA
catataaattgcaaaaacag

SEQ ID NO: 27987 - RNA, 20 nt, synthetic construct
  source 1..20: mol_type = other RNA
catataaggggaatcatgca

SEQ ID NO: 27988 - RNA, 20 nt, synthetic construct
  source 1..20: mol_type = other RNA
catataagtggaatcattcc

SEQ ID NO: 27989 - RNA, 20 nt, synthetic construct
  source 1..20: mol_type = other RNA
catataataagcagaattca

SEQ ID NO: 27990 - RNA, 20 nt, synthetic construct
  source 1..20: mol_type = other RNA
catataatccaactgcagtc

SEQ ID NO: 27991 - RNA, 20 nt, synthetic construct
  source 1..20: mol_type = other RNA
catataatctaaccctcctc

SEQ ID NO: 27992 - RNA, 20 nt, synthetic construct
  source 1..20: mol_type = other RNA
catataatggagtactatgc

SEQ ID NO: 27993 - RNA, 20 nt, synthetic construct
  source 1..20: mol_type = other RNA
catatacacaaaaagatctg

SEQ ID NO: 27994 - RNA, 20 nt, synthetic construct
  source 1..20: mol_type = other RNA
catatacatgacatggtttt

SEQ ID NO: 27995 - RNA, 20 nt, synthetic construct
  source 1..20: mol_type = other RNA
catatacgtatttatcatgt

SEQ ID NO: 27996 - RNA, 20 nt, synthetic construct
  source 1..20: mol_type = other RNA
catatagaagtaaatcccgg

SEQ ID NO: 27997 - RNA, 20 nt, synthetic construct
  source 1..20: mol_type = other RNA
catatagtaattctgtgctt

SEQ ID NO: 27998 - RNA, 20 nt, synthetic construct
  source 1..20: mol_type = other RNA
catatataccacattttgtt

SEQ ID NO: 27999 - RNA, 20 nt, synthetic construct
  source 1..20: mol_type = other RNA
catatatactctgagacagg

SEQ ID NO: 28000 - RNA, 20 nt, synthetic construct
  source 1..20: mol_type = other RNA
catatatctgtctgggataa

SEQ ID NO: 28001 - RNA, 20 nt, synthetic construct
  source 1..20: mol_type = other RNA
catatcagggatcacagata

SEQ ID NO: 28002 - RNA, 20 nt, synthetic construct
  source 1..20: mol_type = other RNA
catatcagttatcacaccta

SEQ ID NO: 28003 - RNA, 20 nt, synthetic construct
  source 1..20: mol_type = other RNA
catatcatcatcttatactt

SEQ ID NO: 28004 - RNA, 20 nt, synthetic construct
  source 1..20: mol_type = other RNA
catatccttctacatccccc

SEQ ID NO: 28005 - RNA, 20 nt, synthetic construct
  source 1..20: mol_type = other RNA
catatccttttatgtgcagt

SEQ ID NO: 28006 - RNA, 20 nt, synthetic construct
  source 1..20: mol_type = other RNA
catatctaattaacatccag

SEQ ID NO: 28007 - RNA, 20 nt, synthetic construct
  source 1..20: mol_type = other RNA
catatctacatgtacgccaa

SEQ ID NO: 28008 - RNA, 20 nt, synthetic construct
  source 1..20: mol_type = other RNA
catatctgattttgtgtctt

SEQ ID NO: 28009 - RNA, 20 nt, synthetic construct
  source 1..20: mol_type = other RNA
catatctttaggtgtttttt

SEQ ID NO: 28010 - RNA, 20 nt, synthetic construct
  source 1..20: mol_type = other RNA
catatctttgcttataacaa

SEQ ID NO: 28011 - RNA, 20 nt, synthetic construct
  source 1..20: mol_type = other RNA
catatgaaatcacacaatct

SEQ ID NO: 28012 - RNA, 20 nt, synthetic construct
  source 1..20: mol_type = other RNA
catatgaatctagaaagata

SEQ ID NO: 28013 - RNA, 20 nt, synthetic construct
  source 1..20: mol_type = other RNA
catatgatctatcaatctca

SEQ ID NO: 28014 - RNA, 20 nt, synthetic construct
  source 1..20: mol_type = other RNA
catatgcaggaccaacttta

SEQ ID NO: 28015 - RNA, 20 nt, synthetic construct
  source 1..20: mol_type = other RNA
catatgcatgttatttgggg

SEQ ID NO: 28016 - RNA, 20 nt, synthetic construct
  source 1..20: mol_type = other RNA
catatgccggctgttaggta

SEQ ID NO: 28017 - RNA, 20 nt, synthetic construct
  source 1..20: mol_type = other RNA
catatgctttgagctacaaa

SEQ ID NO: 28018 - RNA, 20 nt, synthetic construct
  source 1..20: mol_type = other RNA
catatggaggcaatgttgat

SEQ ID NO: 28019 - RNA, 20 nt, synthetic construct
  source 1..20: mol_type = other RNA
catatggcaattccataaat

SEQ ID NO: 28020 - RNA, 20 nt, synthetic construct
  source 1..20: mol_type = other RNA
catatgggatgcttaaagcg

SEQ ID NO: 28021 - RNA, 20 nt, synthetic construct
  source 1..20: mol_type = other RNA
catatggttaatagtgaccc

SEQ ID NO: 28022 - RNA, 20 nt, synthetic construct
  source 1..20: mol_type = other RNA
catatggtttacaatggttc

SEQ ID NO: 28023 - RNA, 20 nt, synthetic construct
  source 1..20: mol_type = other RNA
catatgtagggcaccgtgac

SEQ ID NO: 28024 - RNA, 20 nt, synthetic construct
  source 1..20: mol_type = other RNA
catatgtcactgtaagaata

SEQ ID NO: 28025 - RNA, 20 nt, synthetic construct
  source 1..20: mol_type = other RNA
catatgtcagatggtaaatt

SEQ ID NO: 28026 - RNA, 20 nt, synthetic construct
  source 1..20: mol_type = other RNA
catatgtttgtaacttgttc

SEQ ID NO: 28027 - RNA, 20 nt, synthetic construct
  source 1..20: mol_type = other RNA
catatgttttgcttcgaagc

SEQ ID NO: 28028 - RNA, 20 nt, synthetic construct
  source 1..20: mol_type = other RNA
catatgtttttattagcaga

SEQ ID NO: 28029 - RNA, 20 nt, synthetic construct
  source 1..20: mol_type = other RNA
catattagagtgaaaagaaa

SEQ ID NO: 28030 - RNA, 20 nt, synthetic construct
  source 1..20: mol_type = other RNA
catattagctgtctggattg

SEQ ID NO: 28031 - RNA, 20 nt, synthetic construct
  source 1..20: mol_type = other RNA
catattagtctgtagcttca

SEQ ID NO: 28032 - RNA, 20 nt, synthetic construct
  source 1..20: mol_type = other RNA
catattattttttcccgcta

SEQ ID NO: 28033 - RNA, 20 nt, synthetic construct
  source 1..20: mol_type = other RNA
catattgaagccagcaccta

SEQ ID NO: 28034 - RNA, 20 nt, synthetic construct
  source 1..20: mol_type = other RNA
catattgaataatttccagg

SEQ ID NO: 28035 - RNA, 20 nt, synthetic construct
  source 1..20: mol_type = other RNA
catattggattaagggccca

SEQ ID NO: 28036 - RNA, 20 nt, synthetic construct
  source 1..20: mol_type = other RNA
catattggccaggctggttc

SEQ ID NO: 28037 - RNA, 20 nt, synthetic construct
  source 1..20: mol_type = other RNA
catatttatcaacacatagt

SEQ ID NO: 28038 - RNA, 20 nt, synthetic construct
  source 1..20: mol_type = other RNA
catatttatttccttaagcc

SEQ ID NO: 28039 - RNA, 20 nt, synthetic construct
  source 1..20: mol_type = other RNA
catatttcccttttggatgc

SEQ ID NO: 28040 - RNA, 20 nt, synthetic construct
  source 1..20: mol_type = other RNA
catatttgttcaagcgctga

SEQ ID NO: 28041 - RNA, 20 nt, synthetic construct
  source 1..20: mol_type = other RNA
catattttaaaagtcagcta

SEQ ID NO: 28042 - RNA, 20 nt, synthetic construct
  source 1..20: mol_type = other RNA
catattttatgctttgtctc

SEQ ID NO: 28043 - RNA, 20 nt, synthetic construct
  source 1..20: mol_type = other RNA
catattttcattacatttgc

SEQ ID NO: 28044 - RNA, 20 nt, synthetic construct
  source 1..20: mol_type = other RNA
catattttccttatccattc

SEQ ID NO: 28045 - RNA, 20 nt, synthetic construct
  source 1..20: mol_type = other RNA
catattttgtaacgtgtata

SEQ ID NO: 28046 - RNA, 20 nt, synthetic construct
  source 1..20: mol_type = other RNA
catattttgtgggaattcag

SEQ ID NO: 28047 - RNA, 20 nt, synthetic construct
  source 1..20: mol_type = other RNA
catcaaagctaccctttctt

SEQ ID NO: 28048 - RNA, 20 nt, synthetic construct
  source 1..20: mol_type = other RNA
catcaaaggaaggaatttta

SEQ ID NO: 28049 - RNA, 20 nt, synthetic construct
  source 1..20: mol_type = other RNA
catcaaaggacactattgag

SEQ ID NO: 28050 - RNA, 20 nt, synthetic construct
  source 1..20: mol_type = other RNA
catcaaagtcccctgtaatt

SEQ ID NO: 28051 - RNA, 20 nt, synthetic construct
  source 1..20: mol_type = other RNA
catcaaagttaaacttttgt

SEQ ID NO: 28052 - RNA, 20 nt, synthetic construct
  source 1..20: mol_type = other RNA
catcaacagcagaacaaact

SEQ ID NO: 28053 - RNA, 20 nt, synthetic construct
  source 1..20: mol_type = other RNA
catcaacatataaatcaatc

SEQ ID NO: 28054 - RNA, 20 nt, synthetic construct
  source 1..20: mol_type = other RNA
catcaacctaatgaaattta

SEQ ID NO: 28055 - RNA, 20 nt, synthetic construct
  source 1..20: mol_type = other RNA
catcaactgcttccctagcc

SEQ ID NO: 28056 - RNA, 20 nt, synthetic construct
  source 1..20: mol_type = other RNA
catcaagacagagctccctc

SEQ ID NO: 28057 - RNA, 20 nt, synthetic construct
  source 1..20: mol_type = other RNA
catcaagggtggtgctggac

SEQ ID NO: 28058 - RNA, 20 nt, synthetic construct
  source 1..20: mol_type = other RNA
catcaagtgtgatcccaaaa

SEQ ID NO: 28059 - RNA, 20 nt, synthetic construct
  source 1..20: mol_type = other RNA
catcaatgatagactggatt

SEQ ID NO: 28060 - RNA, 20 nt, synthetic construct
  source 1..20: mol_type = other RNA
catcacaatgcgtttgttag

SEQ ID NO: 28061 - RNA, 20 nt, synthetic construct
  source 1..20: mol_type = other RNA
catcacacccagtatacacg

SEQ ID NO: 28062 - RNA, 20 nt, synthetic construct
  source 1..20: mol_type = other RNA
catcacactggtcactggcc

SEQ ID NO: 28063 - RNA, 20 nt, synthetic construct
  source 1..20: mol_type = other RNA
catcacagacagggaatggg

SEQ ID NO: 28064 - RNA, 20 nt, synthetic construct
  source 1..20: mol_type = other RNA
catcacagtatgcacaaata

SEQ ID NO: 28065 - RNA, 20 nt, synthetic construct
  source 1..20: mol_type = other RNA
catcacagtccaggaactta

SEQ ID NO: 28066 - RNA, 20 nt, synthetic construct
  source 1..20: mol_type = other RNA
catcacattttgaatcatgg

SEQ ID NO: 28067 - RNA, 20 nt, synthetic construct
  source 1..20: mol_type = other RNA
catcaccatcatcatcaggc

SEQ ID NO: 28068 - RNA, 20 nt, synthetic construct
  source 1..20: mol_type = other RNA
catcacccagctcgaccagg

SEQ ID NO: 28069 - RNA, 20 nt, synthetic construct
  source 1..20: mol_type = other RNA
catcactaagagtgaaaagg

SEQ ID NO: 28070 - RNA, 20 nt, synthetic construct
  source 1..20: mol_type = other RNA
catcactagaatgtgacttc

SEQ ID NO: 28071 - RNA, 20 nt, synthetic construct
  source 1..20: mol_type = other RNA
catcactagctattagagaa

SEQ ID NO: 28072 - RNA, 20 nt, synthetic construct
  source 1..20: mol_type = other RNA
catcactcactggcctgagc

SEQ ID NO: 28073 - RNA, 20 nt, synthetic construct
  source 1..20: mol_type = other RNA
catcactgactggctgtgcc

SEQ ID NO: 28074 - RNA, 20 nt, synthetic construct
  source 1..20: mol_type = other RNA
catcacttgaggtgattaaa

SEQ ID NO: 28075 - RNA, 20 nt, synthetic construct
  source 1..20: mol_type = other RNA
catcagaattccattccttt

SEQ ID NO: 28076 - RNA, 20 nt, synthetic construct
  source 1..20: mol_type = other RNA
catcagacacctacattaat

SEQ ID NO: 28077 - RNA, 20 nt, synthetic construct
  source 1..20: mol_type = other RNA
catcagagaggctttttatt

SEQ ID NO: 28078 - RNA, 20 nt, synthetic construct
  source 1..20: mol_type = other RNA
catcagagctttgttatgaa

SEQ ID NO: 28079 - RNA, 20 nt, synthetic construct
  source 1..20: mol_type = other RNA
catcagagtgaacaggcaac

SEQ ID NO: 28080 - RNA, 20 nt, synthetic construct
  source 1..20: mol_type = other RNA
catcagattttgaagattta

SEQ ID NO: 28081 - RNA, 20 nt, synthetic construct
  source 1..20: mol_type = other RNA
catcagcagtgaccatattt

SEQ ID NO: 28082 - RNA, 20 nt, synthetic construct
  source 1..20: mol_type = other RNA
catcagcgctaagtgcattt

SEQ ID NO: 28083 - RNA, 20 nt, synthetic construct
  source 1..20: mol_type = other RNA
catcagcgtcctcactgtga

SEQ ID NO: 28084 - RNA, 20 nt, synthetic construct
  source 1..20: mol_type = other RNA
catcaggaaaaccagtttag

SEQ ID NO: 28085 - RNA, 20 nt, synthetic construct
  source 1..20: mol_type = other RNA
catcaggctggctctttcca

SEQ ID NO: 28086 - RNA, 20 nt, synthetic construct
  source 1..20: mol_type = other RNA
catcagtccctgtgtttttt

SEQ ID NO: 28087 - RNA, 20 nt, synthetic construct
  source 1..20: mol_type = other RNA
catcagtgctgctctgacgt

SEQ ID NO: 28088 - RNA, 20 nt, synthetic construct
  source 1..20: mol_type = other RNA
catcagtggttgtgcttcga

SEQ ID NO: 28089 - RNA, 20 nt, synthetic construct
  source 1..20: mol_type = other RNA
catcagttaccaccaagaaa

SEQ ID NO: 28090 - RNA, 20 nt, synthetic construct
  source 1..20: mol_type = other RNA
catcatactggaaggactca

SEQ ID NO: 28091 - RNA, 20 nt, synthetic construct
  source 1..20: mol_type = other RNA
catcatcaggctggctcttt

SEQ ID NO: 28092 - RNA, 20 nt, synthetic construct
  source 1..20: mol_type = other RNA
catcatcatcaggctggctc

SEQ ID NO: 28093 - RNA, 20 nt, synthetic construct
  source 1..20: mol_type = other RNA
catcatctaatttcccattt

SEQ ID NO: 28094 - RNA, 20 nt, synthetic construct
  source 1..20: mol_type = other RNA
catcatcttatacttggcaa

SEQ ID NO: 28095 - RNA, 20 nt, synthetic construct
  source 1..20: mol_type = other RNA
catcatcttttgcctggatg

SEQ ID NO: 28096 - RNA, 20 nt, synthetic construct
  source 1..20: mol_type = other RNA
catcatgatttaatagaggt

SEQ ID NO: 28097 - RNA, 20 nt, synthetic construct
  source 1..20: mol_type = other RNA
catcatgcctgggtaattaa

SEQ ID NO: 28098 - RNA, 20 nt, synthetic construct
  source 1..20: mol_type = other RNA
catcatggtgggccttgcaa

SEQ ID NO: 28099 - RNA, 20 nt, synthetic construct
  source 1..20: mol_type = other RNA
catcattattagcaaacatt

SEQ ID NO: 28100 - RNA, 20 nt, synthetic construct
  source 1..20: mol_type = other RNA
catcattcaaatgatattca

SEQ ID NO: 28101 - RNA, 20 nt, synthetic construct
  source 1..20: mol_type = other RNA
catcattcataaacacagaa

SEQ ID NO: 28102 - RNA, 20 nt, synthetic construct
  source 1..20: mol_type = other RNA
catcatttatacccaagtaa

SEQ ID NO: 28103 - RNA, 20 nt, synthetic construct
  source 1..20: mol_type = other RNA
catcatttgtattatttctg

SEQ ID NO: 28104 - RNA, 20 nt, synthetic construct
  source 1..20: mol_type = other RNA
catcattttatgaaaccatt

SEQ ID NO: 28105 - RNA, 20 nt, synthetic construct
  source 1..20: mol_type = other RNA
catccaaaagggaaatatga

SEQ ID NO: 28106 - RNA, 20 nt, synthetic construct
  source 1..20: mol_type = other RNA
catccaaacagaaaccctgt

SEQ ID NO: 28107 - RNA, 20 nt, synthetic construct
  source 1..20: mol_type = other RNA
catccaaattattgacaaga

SEQ ID NO: 28108 - RNA, 20 nt, synthetic construct
  source 1..20: mol_type = other RNA
catccacaacattgtgcaac

SEQ ID NO: 28109 - RNA, 20 nt, synthetic construct
  source 1..20: mol_type = other RNA
catccacaatgagacatttg

SEQ ID NO: 28110 - RNA, 20 nt, synthetic construct
  source 1..20: mol_type = other RNA
catccacagctttcttttcc

SEQ ID NO: 28111 - RNA, 20 nt, synthetic construct
  source 1..20: mol_type = other RNA
catccacattttgtgacaag

SEQ ID NO: 28112 - RNA, 20 nt, synthetic construct
  source 1..20: mol_type = other RNA
catccacccacttgtcccat

SEQ ID NO: 28113 - RNA, 20 nt, synthetic construct
  source 1..20: mol_type = other RNA
catccacgcgtaagggtaca

SEQ ID NO: 28114 - RNA, 20 nt, synthetic construct
  source 1..20: mol_type = other RNA
catccactaggggactaaca

SEQ ID NO: 28115 - RNA, 20 nt, synthetic construct
  source 1..20: mol_type = other RNA
catccactgcacagtatgcg

SEQ ID NO: 28116 - RNA, 20 nt, synthetic construct
  source 1..20: mol_type = other RNA
catccagaagtcacttttta

SEQ ID NO: 28117 - RNA, 20 nt, synthetic construct
  source 1..20: mol_type = other RNA
catccagctaattttcatta

SEQ ID NO: 28118 - RNA, 20 nt, synthetic construct
  source 1..20: mol_type = other RNA
catccaggcaaaagatgatg

SEQ ID NO: 28119 - RNA, 20 nt, synthetic construct
  source 1..20: mol_type = other RNA
catccagtttaaagctttgt

SEQ ID NO: 28120 - RNA, 20 nt, synthetic construct
  source 1..20: mol_type = other RNA
catccatgttgttgaatgtg

SEQ ID NO: 28121 - RNA, 20 nt, synthetic construct
  source 1..20: mol_type = other RNA
catccattactcgtggttat

SEQ ID NO: 28122 - RNA, 20 nt, synthetic construct
  source 1..20: mol_type = other RNA
catcccaagggttttggtat

SEQ ID NO: 28123 - RNA, 20 nt, synthetic construct
  source 1..20: mol_type = other RNA
catcccaagtgcccattaac

SEQ ID NO: 28124 - RNA, 20 nt, synthetic construct
  source 1..20: mol_type = other RNA
catcccagaggtactcaacg

SEQ ID NO: 28125 - RNA, 20 nt, synthetic construct
  source 1..20: mol_type = other RNA
catcccagctacataacttc

SEQ ID NO: 28126 - RNA, 20 nt, synthetic construct
  source 1..20: mol_type = other RNA
catcccatatggaggcaatg

SEQ ID NO: 28127 - RNA, 20 nt, synthetic construct
  source 1..20: mol_type = other RNA
catccccagaaagagagagg

SEQ ID NO: 28128 - RNA, 20 nt, synthetic construct
  source 1..20: mol_type = other RNA
catccccattcaattgtcct

SEQ ID NO: 28129 - RNA, 20 nt, synthetic construct
  source 1..20: mol_type = other RNA
catccccccacccctgctct

SEQ ID NO: 28130 - RNA, 20 nt, synthetic construct
  source 1..20: mol_type = other RNA
catccccgctgcgagaaagg

SEQ ID NO: 28131 - RNA, 20 nt, synthetic construct
  source 1..20: mol_type = other RNA
catccccgctgtccatttcc

SEQ ID NO: 28132 - RNA, 20 nt, synthetic construct
  source 1..20: mol_type = other RNA
catcccctttacccctgaga

SEQ ID NO: 28133 - RNA, 20 nt, synthetic construct
  source 1..20: mol_type = other RNA
catccctatgcaataactca

SEQ ID NO: 28134 - RNA, 20 nt, synthetic construct
  source 1..20: mol_type = other RNA
catccctcatatcagttatc

SEQ ID NO: 28135 - RNA, 20 nt, synthetic construct
  source 1..20: mol_type = other RNA
catccctccagtccagcacc

SEQ ID NO: 28136 - RNA, 20 nt, synthetic construct
  source 1..20: mol_type = other RNA
catccctcctctggccctcc

SEQ ID NO: 28137 - RNA, 20 nt, synthetic construct
  source 1..20: mol_type = other RNA
catccctctaaataggtatt

SEQ ID NO: 28138 - RNA, 20 nt, synthetic construct
  source 1..20: mol_type = other RNA
catccctgccgcgcgcgaag

SEQ ID NO: 28139 - RNA, 20 nt, synthetic construct
  source 1..20: mol_type = other RNA
catccgggagggaggtaggg

SEQ ID NO: 28140 - RNA, 20 nt, synthetic construct
  source 1..20: mol_type = other RNA
catccggggagcttttgaaa

SEQ ID NO: 28141 - RNA, 20 nt, synthetic construct
  source 1..20: mol_type = other RNA
catccggtctcagtttttaa

SEQ ID NO: 28142 - RNA, 20 nt, synthetic construct
  source 1..20: mol_type = other RNA
catcctaatacagtaaagcc

SEQ ID NO: 28143 - RNA, 20 nt, synthetic construct
  source 1..20: mol_type = other RNA
catcctactagtatttatta

SEQ ID NO: 28144 - RNA, 20 nt, synthetic construct
  source 1..20: mol_type = other RNA
catcctatctaagcctactg

SEQ ID NO: 28145 - RNA, 20 nt, synthetic construct
  source 1..20: mol_type = other RNA
catcctcaacaagagaggac

SEQ ID NO: 28146 - RNA, 20 nt, synthetic construct
  source 1..20: mol_type = other RNA
catcctccagccttaatctc

SEQ ID NO: 28147 - RNA, 20 nt, synthetic construct
  source 1..20: mol_type = other RNA
catcctccgtagctgtcgct

SEQ ID NO: 28148 - RNA, 20 nt, synthetic construct
  source 1..20: mol_type = other RNA
catcctctatttttgtctgg

SEQ ID NO: 28149 - RNA, 20 nt, synthetic construct
  source 1..20: mol_type = other RNA
catcctgatttaggccactc

SEQ ID NO: 28150 - RNA, 20 nt, synthetic construct
  source 1..20: mol_type = other RNA
catcctggatttgggaagga

SEQ ID NO: 28151 - RNA, 20 nt, synthetic construct
  source 1..20: mol_type = other RNA
catccttcccaaatccagga

SEQ ID NO: 28152 - RNA, 20 nt, synthetic construct
  source 1..20: mol_type = other RNA
catccttgccaacagttact

SEQ ID NO: 28153 - RNA, 20 nt, synthetic construct
  source 1..20: mol_type = other RNA
catcctttaatttgggtttg

SEQ ID NO: 28154 - RNA, 20 nt, synthetic construct
  source 1..20: mol_type = other RNA
catcctttataccttttaat

SEQ ID NO: 28155 - RNA, 20 nt, synthetic construct
  source 1..20: mol_type = other RNA
catcctttcccttctgctcg

SEQ ID NO: 28156 - RNA, 20 nt, synthetic construct
  source 1..20: mol_type = other RNA
catcctttccttgtcctaaa

SEQ ID NO: 28157 - RNA, 20 nt, synthetic construct
  source 1..20: mol_type = other RNA
catcctttgcgtctgtgatt

SEQ ID NO: 28158 - RNA, 20 nt, synthetic construct
  source 1..20: mol_type = other RNA
catcgagagatgaatggata

SEQ ID NO: 28159 - RNA, 20 nt, synthetic construct
  source 1..20: mol_type = other RNA
catcgcattacgagttatgc

SEQ ID NO: 28160 - RNA, 20 nt, synthetic construct
  source 1..20: mol_type = other RNA
catcgcgcccagcccgtgtg

SEQ ID NO: 28161 - RNA, 20 nt, synthetic construct
  source 1..20: mol_type = other RNA
catcggaaatataaaaagcc

SEQ ID NO: 28162 - RNA, 20 nt, synthetic construct
  source 1..20: mol_type = other RNA
catcggggcctacagtggtt

SEQ ID NO: 28163 - RNA, 20 nt, synthetic construct
  source 1..20: mol_type = other RNA
catcggtctgtatttctgct

SEQ ID NO: 28164 - RNA, 20 nt, synthetic construct
  source 1..20: mol_type = other RNA
catcgtaaaaagccatttat

SEQ ID NO: 28165 - RNA, 20 nt, synthetic construct
  source 1..20: mol_type = other RNA
catcgtaaaacctcatctct

SEQ ID NO: 28166 - RNA, 20 nt, synthetic construct
  source 1..20: mol_type = other RNA
catcgtgaagtctttatttt

SEQ ID NO: 28167 - RNA, 20 nt, synthetic construct
  source 1..20: mol_type = other RNA
catcgttcacactcgcactc

SEQ ID NO: 28168 - RNA, 20 nt, synthetic construct
  source 1..20: mol_type = other RNA
catcgtttcaatattaagag

SEQ ID NO: 28169 - RNA, 20 nt, synthetic construct
  source 1..20: mol_type = other RNA
catctaaacgtttggtgact

SEQ ID NO: 28170 - RNA, 20 nt, synthetic construct
  source 1..20: mol_type = other RNA
catctaaagccaggctttcc

SEQ ID NO: 28171 - RNA, 20 nt, synthetic construct
  source 1..20: mol_type = other RNA
catctaaattaagcttcgac

SEQ ID NO: 28172 - RNA, 20 nt, synthetic construct
  source 1..20: mol_type = other RNA
catctaacagaaatacaatg

SEQ ID NO: 28173 - RNA, 20 nt, synthetic construct
  source 1..20: mol_type = other RNA
catctaagcctacctccctt

SEQ ID NO: 28174 - RNA, 20 nt, synthetic construct
  source 1..20: mol_type = other RNA
catctaattcacatttaaga

SEQ ID NO: 28175 - RNA, 20 nt, synthetic construct
  source 1..20: mol_type = other RNA
catctaatttcccatttgat

SEQ ID NO: 28176 - RNA, 20 nt, synthetic construct
  source 1..20: mol_type = other RNA
catctagcacagaaccatgt

SEQ ID NO: 28177 - RNA, 20 nt, synthetic construct
  source 1..20: mol_type = other RNA
catctaggcatataaactgg

SEQ ID NO: 28178 - RNA, 20 nt, synthetic construct
  source 1..20: mol_type = other RNA
catctagttaccactagcaa

SEQ ID NO: 28179 - RNA, 20 nt, synthetic construct
  source 1..20: mol_type = other RNA
catctataaggtaatgacaa

SEQ ID NO: 28180 - RNA, 20 nt, synthetic construct
  source 1..20: mol_type = other RNA
catctatgaagtaattgttt

SEQ ID NO: 28181 - RNA, 20 nt, synthetic construct
  source 1..20: mol_type = other RNA
catctatgtcccctggggcc

SEQ ID NO: 28182 - RNA, 20 nt, synthetic construct
  source 1..20: mol_type = other RNA
catctatttccccattagag

SEQ ID NO: 28183 - RNA, 20 nt, synthetic construct
  source 1..20: mol_type = other RNA
catctcaagaaaacaagaat

SEQ ID NO: 28184 - RNA, 20 nt, synthetic construct
  source 1..20: mol_type = other RNA
catctcactcacctagctgt

SEQ ID NO: 28185 - RNA, 20 nt, synthetic construct
  source 1..20: mol_type = other RNA
catctcagcacagagccgaa

SEQ ID NO: 28186 - RNA, 20 nt, synthetic construct
  source 1..20: mol_type = other RNA
catctcccataccacctgtc

SEQ ID NO: 28187 - RNA, 20 nt, synthetic construct
  source 1..20: mol_type = other RNA
catctcccatcactagaatg

SEQ ID NO: 28188 - RNA, 20 nt, synthetic construct
  source 1..20: mol_type = other RNA
catctccttaatccagtcta

SEQ ID NO: 28189 - RNA, 20 nt, synthetic construct
  source 1..20: mol_type = other RNA
catctctaccaaaatataaa

SEQ ID NO: 28190 - RNA, 20 nt, synthetic construct
  source 1..20: mol_type = other RNA
catctctagttttccagtat

SEQ ID NO: 28191 - RNA, 20 nt, synthetic construct
  source 1..20: mol_type = other RNA
catctctccaacagaagaag

SEQ ID NO: 28192 - RNA, 20 nt, synthetic construct
  source 1..20: mol_type = other RNA
catctctcccttcctgttct

SEQ ID NO: 28193 - RNA, 20 nt, synthetic construct
  source 1..20: mol_type = other RNA
catctctcgatggacattta

SEQ ID NO: 28194 - RNA, 20 nt, synthetic construct
  source 1..20: mol_type = other RNA
catctctctaaaaacatcca

SEQ ID NO: 28195 - RNA, 20 nt, synthetic construct
  source 1..20: mol_type = other RNA
catctctctgcctcaaaatc

SEQ ID NO: 28196 - RNA, 20 nt, synthetic construct
  source 1..20: mol_type = other RNA
catctctgcaaaacatttaa

SEQ ID NO: 28197 - RNA, 20 nt, synthetic construct
  source 1..20: mol_type = other RNA
catctgaatcaataagaatg

SEQ ID NO: 28198 - RNA, 20 nt, synthetic construct
  source 1..20: mol_type = other RNA
catctgaattcaagttacaa

SEQ ID NO: 28199 - RNA, 20 nt, synthetic construct
  source 1..20: mol_type = other RNA
catctgacatatgttttgct

SEQ ID NO: 28200 - RNA, 20 nt, synthetic construct
  source 1..20: mol_type = other RNA
catctgagacatcacaatgc

SEQ ID NO: 28201 - RNA, 20 nt, synthetic construct
  source 1..20: mol_type = other RNA
catctgataagcccaacctg

SEQ ID NO: 28202 - RNA, 20 nt, synthetic construct
  source 1..20: mol_type = other RNA
catctgatacacttctatcc

SEQ ID NO: 28203 - RNA, 20 nt, synthetic construct
  source 1..20: mol_type = other RNA
catctgcagtgtccatctcc

SEQ ID NO: 28204 - RNA, 20 nt, synthetic construct
  source 1..20: mol_type = other RNA
catctgcctcccgggtccag

SEQ ID NO: 28205 - RNA, 20 nt, synthetic construct
  source 1..20: mol_type = other RNA
catctggaaggaaacactat

SEQ ID NO: 28206 - RNA, 20 nt, synthetic construct
  source 1..20: mol_type = other RNA
catctggaccagttactctc

SEQ ID NO: 28207 - RNA, 20 nt, synthetic construct
  source 1..20: mol_type = other RNA
catctggatcctgtctcaga

SEQ ID NO: 28208 - RNA, 20 nt, synthetic construct
  source 1..20: mol_type = other RNA
catctggattatagtggtaa

SEQ ID NO: 28209 - RNA, 20 nt, synthetic construct
  source 1..20: mol_type = other RNA
catctggcagcaggggctaa

SEQ ID NO: 28210 - RNA, 20 nt, synthetic construct
  source 1..20: mol_type = other RNA
catctgggatacttctaact

SEQ ID NO: 28211 - RNA, 20 nt, synthetic construct
  source 1..20: mol_type = other RNA
catctggtcctgagctttcc

SEQ ID NO: 28212 - RNA, 20 nt, synthetic construct
  source 1..20: mol_type = other RNA
catctggtctatctcattat

SEQ ID NO: 28213 - RNA, 20 nt, synthetic construct
  source 1..20: mol_type = other RNA
catctgtcaaaaagagaaca

SEQ ID NO: 28214 - RNA, 20 nt, synthetic construct
  source 1..20: mol_type = other RNA
catctgtcactttcctattc

SEQ ID NO: 28215 - RNA, 20 nt, synthetic construct
  source 1..20: mol_type = other RNA
catctgtcttgtgcatcctt

SEQ ID NO: 28216 - RNA, 20 nt, synthetic construct
  source 1..20: mol_type = other RNA
catctgttaaaagatacgaa

SEQ ID NO: 28217 - RNA, 20 nt, synthetic construct
  source 1..20: mol_type = other RNA
catctgttaatgggcacttg

SEQ ID NO: 28218 - RNA, 20 nt, synthetic construct
  source 1..20: mol_type = other RNA
catctgttatagtgtgaaaa

SEQ ID NO: 28219 - RNA, 20 nt, synthetic construct
  source 1..20: mol_type = other RNA
catcttaagaaccatacagt

SEQ ID NO: 28220 - RNA, 20 nt, synthetic construct
  source 1..20: mol_type = other RNA
catcttagccgggaggagcc

SEQ ID NO: 28221 - RNA, 20 nt, synthetic construct
  source 1..20: mol_type = other RNA
catcttagctcttcccttaa

SEQ ID NO: 28222 - RNA, 20 nt, synthetic construct
  source 1..20: mol_type = other RNA
catcttaggccataaatcaa

SEQ ID NO: 28223 - RNA, 20 nt, synthetic construct
  source 1..20: mol_type = other RNA
catcttatacttggcaaaaa

SEQ ID NO: 28224 - RNA, 20 nt, synthetic construct
  source 1..20: mol_type = other RNA
catcttatattaattctgag

SEQ ID NO: 28225 - RNA, 20 nt, synthetic construct
  source 1..20: mol_type = other RNA
catcttcaagatttcatagg

SEQ ID NO: 28226 - RNA, 20 nt, synthetic construct
  source 1..20: mol_type = other RNA
catcttcacgtggcgctccc

SEQ ID NO: 28227 - RNA, 20 nt, synthetic construct
  source 1..20: mol_type = other RNA
catcttcactgactacacat

SEQ ID NO: 28228 - RNA, 20 nt, synthetic construct
  source 1..20: mol_type = other RNA
catcttcatttctaagccat

SEQ ID NO: 28229 - RNA, 20 nt, synthetic construct
  source 1..20: mol_type = other RNA
catcttccatacgaaagcct

SEQ ID NO: 28230 - RNA, 20 nt, synthetic construct
  source 1..20: mol_type = other RNA
catcttcccatgaacatggt

SEQ ID NO: 28231 - RNA, 20 nt, synthetic construct
  source 1..20: mol_type = other RNA
catcttctctctctgcttca

SEQ ID NO: 28232 - RNA, 20 nt, synthetic construct
  source 1..20: mol_type = other RNA
catcttcttagtgttccctt

SEQ ID NO: 28233 - RNA, 20 nt, synthetic construct
  source 1..20: mol_type = other RNA
catcttcttttacttgcttg

SEQ ID NO: 28234 - RNA, 20 nt, synthetic construct
  source 1..20: mol_type = other RNA
catcttgaactaagtgtgaa

SEQ ID NO: 28235 - RNA, 20 nt, synthetic construct
  source 1..20: mol_type = other RNA
catcttgacttcacttccaa

SEQ ID NO: 28236 - RNA, 20 nt, synthetic construct
  source 1..20: mol_type = other RNA
catcttgcaaaacggaaact

SEQ ID NO: 28237 - RNA, 20 nt, synthetic construct
  source 1..20: mol_type = other RNA
catcttgcataactcgtaat

SEQ ID NO: 28238 - RNA, 20 nt, synthetic construct
  source 1..20: mol_type = other RNA
catctttcctgatcacaccc

SEQ ID NO: 28239 - RNA, 20 nt, synthetic construct
  source 1..20: mol_type = other RNA
catctttcctgtgatttatg

SEQ ID NO: 28240 - RNA, 20 nt, synthetic construct
  source 1..20: mol_type = other RNA
catctttgttacagcagctc

SEQ ID NO: 28241 - RNA, 20 nt, synthetic construct
  source 1..20: mol_type = other RNA
catcttttgacgcgcaacaa

SEQ ID NO: 28242 - RNA, 20 nt, synthetic construct
  source 1..20: mol_type = other RNA
catcttttgagggtatcata

SEQ ID NO: 28243 - RNA, 20 nt, synthetic construct
  source 1..20: mol_type = other RNA
catcttttgcctggatgaat

SEQ ID NO: 28244 - RNA, 20 nt, synthetic construct
  source 1..20: mol_type = other RNA
catgaaaacagctaggtgag

SEQ ID NO: 28245 - RNA, 20 nt, synthetic construct
  source 1..20: mol_type = other RNA
catgaaaataaaaagtatcg

SEQ ID NO: 28246 - RNA, 20 nt, synthetic construct
  source 1..20: mol_type = other RNA
catgaaaattgaattatagg

SEQ ID NO: 28247 - RNA, 20 nt, synthetic construct
  source 1..20: mol_type = other RNA
catgaaacttatttccaggg

SEQ ID NO: 28248 - RNA, 20 nt, synthetic construct
  source 1..20: mol_type = other RNA
catgaaagtggagaattact

SEQ ID NO: 28249 - RNA, 20 nt, synthetic construct
  source 1..20: mol_type = other RNA
catgaaatactcaaactatg

SEQ ID NO: 28250 - RNA, 20 nt, synthetic construct
  source 1..20: mol_type = other RNA
catgaaatcccctttagtgt

SEQ ID NO: 28251 - RNA, 20 nt, synthetic construct
  source 1..20: mol_type = other RNA
catgaaatgggtttaaaaga

SEQ ID NO: 28252 - RNA, 20 nt, synthetic construct
  source 1..20: mol_type = other RNA
catgaaattcttgggtgaat

SEQ ID NO: 28253 - RNA, 20 nt, synthetic construct
  source 1..20: mol_type = other RNA
catgaacaagttacaaacat

SEQ ID NO: 28254 - RNA, 20 nt, synthetic construct
  source 1..20: mol_type = other RNA
catgaacaatccttctaatc

SEQ ID NO: 28255 - RNA, 20 nt, synthetic construct
  source 1..20: mol_type = other RNA
catgaacaattttctctcat

SEQ ID NO: 28256 - RNA, 20 nt, synthetic construct
  source 1..20: mol_type = other RNA
catgaacataaatttgttct

SEQ ID NO: 28257 - RNA, 20 nt, synthetic construct
  source 1..20: mol_type = other RNA
catgaacatggtttgatccc

SEQ ID NO: 28258 - RNA, 20 nt, synthetic construct
  source 1..20: mol_type = other RNA
catgaacccaccaggaggcg

SEQ ID NO: 28259 - RNA, 20 nt, synthetic construct
  source 1..20: mol_type = other RNA
catgaacctgcatggtgtaa

SEQ ID NO: 28260 - RNA, 20 nt, synthetic construct
  source 1..20: mol_type = other RNA
catgaaccttcaccaaagat

SEQ ID NO: 28261 - RNA, 20 nt, synthetic construct
  source 1..20: mol_type = other RNA
catgaacgagaacaaaacaa

SEQ ID NO: 28262 - RNA, 20 nt, synthetic construct
  source 1..20: mol_type = other RNA
catgaactactcaaagaaaa

SEQ ID NO: 28263 - RNA, 20 nt, synthetic construct
  source 1..20: mol_type = other RNA
catgaagaaaacactccaga

SEQ ID NO: 28264 - RNA, 20 nt, synthetic construct
  source 1..20: mol_type = other RNA
catgaagccagcattaccct

SEQ ID NO: 28265 - RNA, 20 nt, synthetic construct
  source 1..20: mol_type = other RNA
catgaagccctctaagtcag

SEQ ID NO: 28266 - RNA, 20 nt, synthetic construct
  source 1..20: mol_type = other RNA
catgaaggaaggattggaat

SEQ ID NO: 28267 - RNA, 20 nt, synthetic construct
  source 1..20: mol_type = other RNA
catgaagtcctcaatcatgt

SEQ ID NO: 28268 - RNA, 20 nt, synthetic construct
  source 1..20: mol_type = other RNA
catgaataaccaatgtcaga

SEQ ID NO: 28269 - RNA, 20 nt, synthetic construct
  source 1..20: mol_type = other RNA
catgaatacctatttagagg

SEQ ID NO: 28270 - RNA, 20 nt, synthetic construct
  source 1..20: mol_type = other RNA
catgaatgaatgttgagttt

SEQ ID NO: 28271 - RNA, 20 nt, synthetic construct
  source 1..20: mol_type = other RNA
catgaatggaaaattcttgg

SEQ ID NO: 28272 - RNA, 20 nt, synthetic construct
  source 1..20: mol_type = other RNA
catgacaagaatctttggca

SEQ ID NO: 28273 - RNA, 20 nt, synthetic construct
  source 1..20: mol_type = other RNA
catgacagagttccacctcc

SEQ ID NO: 28274 - RNA, 20 nt, synthetic construct
  source 1..20: mol_type = other RNA
catgacagatcccaaaaagg

SEQ ID NO: 28275 - RNA, 20 nt, synthetic construct
  source 1..20: mol_type = other RNA
catgacaggtgagtggactg

SEQ ID NO: 28276 - RNA, 20 nt, synthetic construct
  source 1..20: mol_type = other RNA
catgacatggttttcctact

SEQ ID NO: 28277 - RNA, 20 nt, synthetic construct
  source 1..20: mol_type = other RNA
catgacatgtgttttattta

SEQ ID NO: 28278 - RNA, 20 nt, synthetic construct
  source 1..20: mol_type = other RNA
catgaccctgctatgcatac

SEQ ID NO: 28279 - RNA, 20 nt, synthetic construct
  source 1..20: mol_type = other RNA
catgacctatctattaacag

SEQ ID NO: 28280 - RNA, 20 nt, synthetic construct
  source 1..20: mol_type = other RNA
catgacctgctttcttgggg

SEQ ID NO: 28281 - RNA, 20 nt, synthetic construct
  source 1..20: mol_type = other RNA
catgactggccatccttccc

SEQ ID NO: 28282 - RNA, 20 nt, synthetic construct
  source 1..20: mol_type = other RNA
catgacttttttgcccactc

SEQ ID NO: 28283 - RNA, 20 nt, synthetic construct
  source 1..20: mol_type = other RNA
catgagaaatgttaagattc

SEQ ID NO: 28284 - RNA, 20 nt, synthetic construct
  source 1..20: mol_type = other RNA
catgagacttggagtttgag

SEQ ID NO: 28285 - RNA, 20 nt, synthetic construct
  source 1..20: mol_type = other RNA
catgagagaaaattgttcat

SEQ ID NO: 28286 - RNA, 20 nt, synthetic construct
  source 1..20: mol_type = other RNA
catgagagctaagggaagtt

SEQ ID NO: 28287 - RNA, 20 nt, synthetic construct
  source 1..20: mol_type = other RNA
catgagagctgtgccgaggc

SEQ ID NO: 28288 - RNA, 20 nt, synthetic construct
  source 1..20: mol_type = other RNA
catgagatactacgcctagc

SEQ ID NO: 28289 - RNA, 20 nt, synthetic construct
  source 1..20: mol_type = other RNA
catgagatctaaattttaag

SEQ ID NO: 28290 - RNA, 20 nt, synthetic construct
  source 1..20: mol_type = other RNA
catgagattacatagcaagg

SEQ ID NO: 28291 - RNA, 20 nt, synthetic construct
  source 1..20: mol_type = other RNA
catgagccacagggcccagc

SEQ ID NO: 28292 - RNA, 20 nt, synthetic construct
  source 1..20: mol_type = other RNA
catgagccactgcgggccca

SEQ ID NO: 28293 - RNA, 20 nt, synthetic construct
  source 1..20: mol_type = other RNA
catgaggaaagcaggttgca

SEQ ID NO: 28294 - RNA, 20 nt, synthetic construct
  source 1..20: mol_type = other RNA
catgaggcatattattgtaa

SEQ ID NO: 28295 - RNA, 20 nt, synthetic construct
  source 1..20: mol_type = other RNA
catgaggcctctccccttga

SEQ ID NO: 28296 - RNA, 20 nt, synthetic construct
  source 1..20: mol_type = other RNA
catgaggtcacccaagccac

SEQ ID NO: 28297 - RNA, 20 nt, synthetic construct
  source 1..20: mol_type = other RNA
catgagtaaaaagaaatctg

SEQ ID NO: 28298 - RNA, 20 nt, synthetic construct
  source 1..20: mol_type = other RNA
catgagtatctggtgttgct

SEQ ID NO: 28299 - RNA, 20 nt, synthetic construct
  source 1..20: mol_type = other RNA
catgagtcctgaaaattcct

SEQ ID NO: 28300 - RNA, 20 nt, synthetic construct
  source 1..20: mol_type = other RNA
catgagtcgccatacctggt

SEQ ID NO: 28301 - RNA, 20 nt, synthetic construct
  source 1..20: mol_type = other RNA
catgataaatacgtatatga

SEQ ID NO: 28302 - RNA, 20 nt, synthetic construct
  source 1..20: mol_type = other RNA
catgatctcacgtcaccgca

SEQ ID NO: 28303 - RNA, 20 nt, synthetic construct
  source 1..20: mol_type = other RNA
catgatctttggaaatgaat

SEQ ID NO: 28304 - RNA, 20 nt, synthetic construct
  source 1..20: mol_type = other RNA
catgatgcagcccctgccac

SEQ ID NO: 28305 - RNA, 20 nt, synthetic construct
  source 1..20: mol_type = other RNA
catgatggctcaacgcctgt

SEQ ID NO: 28306 - RNA, 20 nt, synthetic construct
  source 1..20: mol_type = other RNA
catgatgtttggctccttac

SEQ ID NO: 28307 - RNA, 20 nt, synthetic construct
  source 1..20: mol_type = other RNA
catgattcaaaatgtgatgg

SEQ ID NO: 28308 - RNA, 20 nt, synthetic construct
  source 1..20: mol_type = other RNA
catgattcagtcttggtagt

SEQ ID NO: 28309 - RNA, 20 nt, synthetic construct
  source 1..20: mol_type = other RNA
catgattccccttatatggg

SEQ ID NO: 28310 - RNA, 20 nt, synthetic construct
  source 1..20: mol_type = other RNA
catgattgaggacttcatgt

SEQ ID NO: 28311 - RNA, 20 nt, synthetic construct
  source 1..20: mol_type = other RNA
catgattgggtcaacaaact

SEQ ID NO: 28312 - RNA, 20 nt, synthetic construct
  source 1..20: mol_type = other RNA
catgatttaatagaggtctg

SEQ ID NO: 28313 - RNA, 20 nt, synthetic construct
  source 1..20: mol_type = other RNA
catgatttataatccattgg

SEQ ID NO: 28314 - RNA, 20 nt, synthetic construct
  source 1..20: mol_type = other RNA
catgatttggtgtgtgcaaa

SEQ ID NO: 28315 - RNA, 20 nt, synthetic construct
  source 1..20: mol_type = other RNA
catgcaactgaaaacatctt

SEQ ID NO: 28316 - RNA, 20 nt, synthetic construct
  source 1..20: mol_type = other RNA
catgcaattccccagcctca

SEQ ID NO: 28317 - RNA, 20 nt, synthetic construct
  source 1..20: mol_type = other RNA
catgcacaaggtcaagagcg

SEQ ID NO: 28318 - RNA, 20 nt, synthetic construct
  source 1..20: mol_type = other RNA
catgcacacagagggagcgc

SEQ ID NO: 28319 - RNA, 20 nt, synthetic construct
  source 1..20: mol_type = other RNA
catgcacacaggagaacttg

SEQ ID NO: 28320 - RNA, 20 nt, synthetic construct
  source 1..20: mol_type = other RNA
catgcacacgctggaaggga

SEQ ID NO: 28321 - RNA, 20 nt, synthetic construct
  source 1..20: mol_type = other RNA
catgcacactagacctttct

SEQ ID NO: 28322 - RNA, 20 nt, synthetic construct
  source 1..20: mol_type = other RNA
catgcacgagaaaagcacag

SEQ ID NO: 28323 - RNA, 20 nt, synthetic construct
  source 1..20: mol_type = other RNA
catgcacggacttggcacag

SEQ ID NO: 28324 - RNA, 20 nt, synthetic construct
  source 1..20: mol_type = other RNA
catgcaggagaaacatggct

SEQ ID NO: 28325 - RNA, 20 nt, synthetic construct
  source 1..20: mol_type = other RNA
catgcaggttcatgtgtgct

SEQ ID NO: 28326 - RNA, 20 nt, synthetic construct
  source 1..20: mol_type = other RNA
catgcagtacttgtcttttt

SEQ ID NO: 28327 - RNA, 20 nt, synthetic construct
  source 1..20: mol_type = other RNA
catgcagtagctcatcattt

SEQ ID NO: 28328 - RNA, 20 nt, synthetic construct
  source 1..20: mol_type = other RNA
catgcatatgtttgtaactt

SEQ ID NO: 28329 - RNA, 20 nt, synthetic construct
  source 1..20: mol_type = other RNA
catgcatccacattttgtga

SEQ ID NO: 28330 - RNA, 20 nt, synthetic construct
  source 1..20: mol_type = other RNA
catgcatgcacacagaggga

SEQ ID NO: 28331 - RNA, 20 nt, synthetic construct
  source 1..20: mol_type = other RNA
catgcatgtctgtctgttca

SEQ ID NO: 28332 - RNA, 20 nt, synthetic construct
  source 1..20: mol_type = other RNA
catgcattcgtccctaaaca

SEQ ID NO: 28333 - RNA, 20 nt, synthetic construct
  source 1..20: mol_type = other RNA
catgccacaccacatccagc

SEQ ID NO: 28334 - RNA, 20 nt, synthetic construct
  source 1..20: mol_type = other RNA
catgccagctttggctgaaa

SEQ ID NO: 28335 - RNA, 20 nt, synthetic construct
  source 1..20: mol_type = other RNA
catgccatcctggatttggg

SEQ ID NO: 28336 - RNA, 20 nt, synthetic construct
  source 1..20: mol_type = other RNA
catgcccatgtgcattattg

SEQ ID NO: 28337 - RNA, 20 nt, synthetic construct
  source 1..20: mol_type = other RNA
catgccgggacaagagtctg

SEQ ID NO: 28338 - RNA, 20 nt, synthetic construct
  source 1..20: mol_type = other RNA
catgcctctcccaccatctc

SEQ ID NO: 28339 - RNA, 20 nt, synthetic construct
  source 1..20: mol_type = other RNA
catgcctctgttacagctct

SEQ ID NO: 28340 - RNA, 20 nt, synthetic construct
  source 1..20: mol_type = other RNA
catgcctgacaaagtatgag

SEQ ID NO: 28341 - RNA, 20 nt, synthetic construct
  source 1..20: mol_type = other RNA
catgcctgggtaattaaaca

SEQ ID NO: 28342 - RNA, 20 nt, synthetic construct
  source 1..20: mol_type = other RNA
catgcctttcagcatagcag

SEQ ID NO: 28343 - RNA, 20 nt, synthetic construct
  source 1..20: mol_type = other RNA
catgcgacatatcagggatc

SEQ ID NO: 28344 - RNA, 20 nt, synthetic construct
  source 1..20: mol_type = other RNA
catgcgccatcacacccagt

SEQ ID NO: 28345 - RNA, 20 nt, synthetic construct
  source 1..20: mol_type = other RNA
catgctaactgcagaggtca

SEQ ID NO: 28346 - RNA, 20 nt, synthetic construct
  source 1..20: mol_type = other RNA
catgctaagtgtttaggata

SEQ ID NO: 28347 - RNA, 20 nt, synthetic construct
  source 1..20: mol_type = other RNA
catgctaggggctgttccca

SEQ ID NO: 28348 - RNA, 20 nt, synthetic construct
  source 1..20: mol_type = other RNA
catgctcactgtctccatgt

SEQ ID NO: 28349 - RNA, 20 nt, synthetic construct
  source 1..20: mol_type = other RNA
catgctcccatttgggactg

SEQ ID NO: 28350 - RNA, 20 nt, synthetic construct
  source 1..20: mol_type = other RNA
catgctctgataggataatg

SEQ ID NO: 28351 - RNA, 20 nt, synthetic construct
  source 1..20: mol_type = other RNA
catgctcttaagtatttttg

SEQ ID NO: 28352 - RNA, 20 nt, synthetic construct
  source 1..20: mol_type = other RNA
catgctgaggccccagggga

SEQ ID NO: 28353 - RNA, 20 nt, synthetic construct
  source 1..20: mol_type = other RNA
catgctgcaactgagaagag

SEQ ID NO: 28354 - RNA, 20 nt, synthetic construct
  source 1..20: mol_type = other RNA
catgctgggagaccaggagt

SEQ ID NO: 28355 - RNA, 20 nt, synthetic construct
  source 1..20: mol_type = other RNA
catgctgtgaatttggattt

SEQ ID NO: 28356 - RNA, 20 nt, synthetic construct
  source 1..20: mol_type = other RNA
catgcttagccttccagaga

SEQ ID NO: 28357 - RNA, 20 nt, synthetic construct
  source 1..20: mol_type = other RNA
catgcttaggatcccagtcc

SEQ ID NO: 28358 - RNA, 20 nt, synthetic construct
  source 1..20: mol_type = other RNA
catgcttccaaaagcaggcc

SEQ ID NO: 28359 - RNA, 20 nt, synthetic construct
  source 1..20: mol_type = other RNA
catgcttgctccagagaagt

SEQ ID NO: 28360 - RNA, 20 nt, synthetic construct
  source 1..20: mol_type = other RNA
catggaaacaacctaaatgt

SEQ ID NO: 28361 - RNA, 20 nt, synthetic construct
  source 1..20: mol_type = other RNA
catggaaactacaattactg

SEQ ID NO: 28362 - RNA, 20 nt, synthetic construct
  source 1..20: mol_type = other RNA
catggaagttatttaatctc

SEQ ID NO: 28363 - RNA, 20 nt, synthetic construct
  source 1..20: mol_type = other RNA
catggactagactgcctgag

SEQ ID NO: 28364 - RNA, 20 nt, synthetic construct
  source 1..20: mol_type = other RNA
catggacttcctattttata

SEQ ID NO: 28365 - RNA, 20 nt, synthetic construct
  source 1..20: mol_type = other RNA
catggagacagtgagcatgc

SEQ ID NO: 28366 - RNA, 20 nt, synthetic construct
  source 1..20: mol_type = other RNA
catggaggggccagttgaga

SEQ ID NO: 28367 - RNA, 20 nt, synthetic construct
  source 1..20: mol_type = other RNA
catggatatttggccgggcg

SEQ ID NO: 28368 - RNA, 20 nt, synthetic construct
  source 1..20: mol_type = other RNA
catggcaggtttcaagtgaa

SEQ ID NO: 28369 - RNA, 20 nt, synthetic construct
  source 1..20: mol_type = other RNA
catggcatcggggcctacag

SEQ ID NO: 28370 - RNA, 20 nt, synthetic construct
  source 1..20: mol_type = other RNA
catggccagtatctcctttc

SEQ ID NO: 28371 - RNA, 20 nt, synthetic construct
  source 1..20: mol_type = other RNA
catggcttagaaatgaagat

SEQ ID NO: 28372 - RNA, 20 nt, synthetic construct
  source 1..20: mol_type = other RNA
catgggaagatgctccctct

SEQ ID NO: 28373 - RNA, 20 nt, synthetic construct
  source 1..20: mol_type = other RNA
catgggaatgcatatatctg

SEQ ID NO: 28374 - RNA, 20 nt, synthetic construct
  source 1..20: mol_type = other RNA
catgggacaagtgggtggat

SEQ ID NO: 28375 - RNA, 20 nt, synthetic construct
  source 1..20: mol_type = other RNA
catgggagccaaacttgaac

SEQ ID NO: 28376 - RNA, 20 nt, synthetic construct
  source 1..20: mol_type = other RNA
catgggaggtaatactataa

SEQ ID NO: 28377 - RNA, 20 nt, synthetic construct
  source 1..20: mol_type = other RNA
catgggcatgggtccaagac

SEQ ID NO: 28378 - RNA, 20 nt, synthetic construct
  source 1..20: mol_type = other RNA
catgggccgggcgtagtggc

SEQ ID NO: 28379 - RNA, 20 nt, synthetic construct
  source 1..20: mol_type = other RNA
catgggctaaataaaacatt

SEQ ID NO: 28380 - RNA, 20 nt, synthetic construct
  source 1..20: mol_type = other RNA
catggggagttttaggaaaa

SEQ ID NO: 28381 - RNA, 20 nt, synthetic construct
  source 1..20: mol_type = other RNA
catgggggcgcgtgcctatg

SEQ ID NO: 28382 - RNA, 20 nt, synthetic construct
  source 1..20: mol_type = other RNA
catgggtccaagacaggaag

SEQ ID NO: 28383 - RNA, 20 nt, synthetic construct
  source 1..20: mol_type = other RNA
catgggtggaaattaaacac

SEQ ID NO: 28384 - RNA, 20 nt, synthetic construct
  source 1..20: mol_type = other RNA
catgggttgatttttaatga

SEQ ID NO: 28385 - RNA, 20 nt, synthetic construct
  source 1..20: mol_type = other RNA
catggtaatttgtccatctg

SEQ ID NO: 28386 - RNA, 20 nt, synthetic construct
  source 1..20: mol_type = other RNA
catggtagaccatataatct

SEQ ID NO: 28387 - RNA, 20 nt, synthetic construct
  source 1..20: mol_type = other RNA
catggtatcaattgtaatgt

SEQ ID NO: 28388 - RNA, 20 nt, synthetic construct
  source 1..20: mol_type = other RNA
catggtatgtgccatctcct

SEQ ID NO: 28389 - RNA, 20 nt, synthetic construct
  source 1..20: mol_type = other RNA
catggtcaaatcaatacttc

SEQ ID NO: 28390 - RNA, 20 nt, synthetic construct
  source 1..20: mol_type = other RNA
catggtccacagaggctttt

SEQ ID NO: 28391 - RNA, 20 nt, synthetic construct
  source 1..20: mol_type = other RNA
catggtgataactggtgctt

SEQ ID NO: 28392 - RNA, 20 nt, synthetic construct
  source 1..20: mol_type = other RNA
catggtgggccttgcaagcc

SEQ ID NO: 28393 - RNA, 20 nt, synthetic construct
  source 1..20: mol_type = other RNA
catggtggtaggtgtgtgta

SEQ ID NO: 28394 - RNA, 20 nt, synthetic construct
  source 1..20: mol_type = other RNA
catggtgtaaaatacaacag

SEQ ID NO: 28395 - RNA, 20 nt, synthetic construct
  source 1..20: mol_type = other RNA
catggtgtgtctgcgcctta

SEQ ID NO: 28396 - RNA, 20 nt, synthetic construct
  source 1..20: mol_type = other RNA
catggtgttaaatatttact

SEQ ID NO: 28397 - RNA, 20 nt, synthetic construct
  source 1..20: mol_type = other RNA
catggttctgtgctagatgc

SEQ ID NO: 28398 - RNA, 20 nt, synthetic construct
  source 1..20: mol_type = other RNA
catggtttgatcccactagt

SEQ ID NO: 28399 - RNA, 20 nt, synthetic construct
  source 1..20: mol_type = other RNA
catggttttaatgggcatta

SEQ ID NO: 28400 - RNA, 20 nt, synthetic construct
  source 1..20: mol_type = other RNA
catggttttcctactaacaa

SEQ ID NO: 28401 - RNA, 20 nt, synthetic construct
  source 1..20: mol_type = other RNA
catgtaaaaactgtttggct

SEQ ID NO: 28402 - RNA, 20 nt, synthetic construct
  source 1..20: mol_type = other RNA
catgtaaaacagacccttat

SEQ ID NO: 28403 - RNA, 20 nt, synthetic construct
  source 1..20: mol_type = other RNA
catgtaacaggtttaataaa

SEQ ID NO: 28404 - RNA, 20 nt, synthetic construct
  source 1..20: mol_type = other RNA
catgtaactaattactgttt

SEQ ID NO: 28405 - RNA, 20 nt, synthetic construct
  source 1..20: mol_type = other RNA
catgtaacttgcttaggctg

SEQ ID NO: 28406 - RNA, 20 nt, synthetic construct
  source 1..20: mol_type = other RNA
catgtaatgcaaactctaaa

SEQ ID NO: 28407 - RNA, 20 nt, synthetic construct
  source 1..20: mol_type = other RNA
catgtacaatgaattagcaa

SEQ ID NO: 28408 - RNA, 20 nt, synthetic construct
  source 1..20: mol_type = other RNA
catgtacgccaattttcata

SEQ ID NO: 28409 - RNA, 20 nt, synthetic construct
  source 1..20: mol_type = other RNA
catgtagatatgggagtccc

SEQ ID NO: 28410 - RNA, 20 nt, synthetic construct
  source 1..20: mol_type = other RNA
catgtagttttccctgtgta

SEQ ID NO: 28411 - RNA, 20 nt, synthetic construct
  source 1..20: mol_type = other RNA
catgtatatgctgtttttga

SEQ ID NO: 28412 - RNA, 20 nt, synthetic construct
  source 1..20: mol_type = other RNA
catgtatgtttctcattctt

SEQ ID NO: 28413 - RNA, 20 nt, synthetic construct
  source 1..20: mol_type = other RNA
catgtatgttttagccttaa

SEQ ID NO: 28414 - RNA, 20 nt, synthetic construct
  source 1..20: mol_type = other RNA
catgtattttcctaaccact

SEQ ID NO: 28415 - RNA, 20 nt, synthetic construct
  source 1..20: mol_type = other RNA
catgtcaaatttttcacatt

SEQ ID NO: 28416 - RNA, 20 nt, synthetic construct
  source 1..20: mol_type = other RNA
catgtcaagaatgaagtcag

SEQ ID NO: 28417 - RNA, 20 nt, synthetic construct
  source 1..20: mol_type = other RNA
catgtcagagacacatactg

SEQ ID NO: 28418 - RNA, 20 nt, synthetic construct
  source 1..20: mol_type = other RNA
catgtcagccacaagacata

SEQ ID NO: 28419 - RNA, 20 nt, synthetic construct
  source 1..20: mol_type = other RNA
catgtcatgggccgggcgta

SEQ ID NO: 28420 - RNA, 20 nt, synthetic construct
  source 1..20: mol_type = other RNA
catgtcatgtatatgctgtt

SEQ ID NO: 28421 - RNA, 20 nt, synthetic construct
  source 1..20: mol_type = other RNA
catgtcatgttcccggattg

SEQ ID NO: 28422 - RNA, 20 nt, synthetic construct
  source 1..20: mol_type = other RNA
catgtccatagttaatgtgt

SEQ ID NO: 28423 - RNA, 20 nt, synthetic construct
  source 1..20: mol_type = other RNA
catgtcccctggagttaatt

SEQ ID NO: 28424 - RNA, 20 nt, synthetic construct
  source 1..20: mol_type = other RNA
catgtcccctgtccaagtat

SEQ ID NO: 28425 - RNA, 20 nt, synthetic construct
  source 1..20: mol_type = other RNA
catgtcctcacctcacattc

SEQ ID NO: 28426 - RNA, 20 nt, synthetic construct
  source 1..20: mol_type = other RNA
catgtctaaagtattgtttc

SEQ ID NO: 28427 - RNA, 20 nt, synthetic construct
  source 1..20: mol_type = other RNA
catgtctacctgtctttccc

SEQ ID NO: 28428 - RNA, 20 nt, synthetic construct
  source 1..20: mol_type = other RNA
catgtctgcaggagccttgc

SEQ ID NO: 28429 - RNA, 20 nt, synthetic construct
  source 1..20: mol_type = other RNA
catgtctgtagttacaacta

SEQ ID NO: 28430 - RNA, 20 nt, synthetic construct
  source 1..20: mol_type = other RNA
catgtctgtctgttcacatt

SEQ ID NO: 28431 - RNA, 20 nt, synthetic construct
  source 1..20: mol_type = other RNA
catgtctgtgtagttcatca

SEQ ID NO: 28432 - RNA, 20 nt, synthetic construct
  source 1..20: mol_type = other RNA
catgtcttcagaggccctgg

SEQ ID NO: 28433 - RNA, 20 nt, synthetic construct
  source 1..20: mol_type = other RNA
catgtcttcttggattttct

SEQ ID NO: 28434 - RNA, 20 nt, synthetic construct
  source 1..20: mol_type = other RNA
catgtcttggctattgtcag

SEQ ID NO: 28435 - RNA, 20 nt, synthetic construct
  source 1..20: mol_type = other RNA
catgtcttggtgtgctcttt

SEQ ID NO: 28436 - RNA, 20 nt, synthetic construct
  source 1..20: mol_type = other RNA
catgtgaggatttatttctg

SEQ ID NO: 28437 - RNA, 20 nt, synthetic construct
  source 1..20: mol_type = other RNA
catgtgcaggaaacttccag

SEQ ID NO: 28438 - RNA, 20 nt, synthetic construct
  source 1..20: mol_type = other RNA
catgtgcattattgtaatta

SEQ ID NO: 28439 - RNA, 20 nt, synthetic construct
  source 1..20: mol_type = other RNA
catgtgcttatcaataaaat

SEQ ID NO: 28440 - RNA, 20 nt, synthetic construct
  source 1..20: mol_type = other RNA
catgtggaacataatctttg

SEQ ID NO: 28441 - RNA, 20 nt, synthetic construct
  source 1..20: mol_type = other RNA
catgtggccaggaggaggag

SEQ ID NO: 28442 - RNA, 20 nt, synthetic construct
  source 1..20: mol_type = other RNA
catgtggcttgtggctacac

SEQ ID NO: 28443 - RNA, 20 nt, synthetic construct
  source 1..20: mol_type = other RNA
catgtggggactttgtggcc

SEQ ID NO: 28444 - RNA, 20 nt, synthetic construct
  source 1..20: mol_type = other RNA
catgtggttattgagtctgt

SEQ ID NO: 28445 - RNA, 20 nt, synthetic construct
  source 1..20: mol_type = other RNA
catgtgtaaaacatctggaa

SEQ ID NO: 28446 - RNA, 20 nt, synthetic construct
  source 1..20: mol_type = other RNA
catgtgtatttagggagcat

SEQ ID NO: 28447 - RNA, 20 nt, synthetic construct
  source 1..20: mol_type = other RNA
catgtgtgcttacacacacg

SEQ ID NO: 28448 - RNA, 20 nt, synthetic construct
  source 1..20: mol_type = other RNA
catgtgttggcactgaagcc

SEQ ID NO: 28449 - RNA, 20 nt, synthetic construct
  source 1..20: mol_type = other RNA
catgtgttgtgcacacatcc

SEQ ID NO: 28450 - RNA, 20 nt, synthetic construct
  source 1..20: mol_type = other RNA
catgtgttttatttaggccc

SEQ ID NO: 28451 - RNA, 20 nt, synthetic construct
  source 1..20: mol_type = other RNA
catgtgttttgttttgaata

SEQ ID NO: 28452 - RNA, 20 nt, synthetic construct
  source 1..20: mol_type = other RNA
catgttactcattatggttg

SEQ ID NO: 28453 - RNA, 20 nt, synthetic construct
  source 1..20: mol_type = other RNA
catgttagattaggaaacag

SEQ ID NO: 28454 - RNA, 20 nt, synthetic construct
  source 1..20: mol_type = other RNA
catgttagcataattcgaaa

SEQ ID NO: 28455 - RNA, 20 nt, synthetic construct
  source 1..20: mol_type = other RNA
catgttaggttgaaagttca

SEQ ID NO: 28456 - RNA, 20 nt, synthetic construct
  source 1..20: mol_type = other RNA
catgttatttggggattctg

SEQ ID NO: 28457 - RNA, 20 nt, synthetic construct
  source 1..20: mol_type = other RNA
catgttcaaggtgttcctga

SEQ ID NO: 28458 - RNA, 20 nt, synthetic construct
  source 1..20: mol_type = other RNA
catgttcactgcagaattac

SEQ ID NO: 28459 - RNA, 20 nt, synthetic construct
  source 1..20: mol_type = other RNA
catgttcagttataaaagaa

SEQ ID NO: 28460 - RNA, 20 nt, synthetic construct
  source 1..20: mol_type = other RNA
catgttcatgggaagatgct

SEQ ID NO: 28461 - RNA, 20 nt, synthetic construct
  source 1..20: mol_type = other RNA
catgttcccggattggaaaa

SEQ ID NO: 28462 - RNA, 20 nt, synthetic construct
  source 1..20: mol_type = other RNA
catgttccctagaacttaaa

SEQ ID NO: 28463 - RNA, 20 nt, synthetic construct
  source 1..20: mol_type = other RNA
catgttctttatagcatttg

SEQ ID NO: 28464 - RNA, 20 nt, synthetic construct
  source 1..20: mol_type = other RNA
catgttgaccatttttatat

SEQ ID NO: 28465 - RNA, 20 nt, synthetic construct
  source 1..20: mol_type = other RNA
catgttgagtcttgtttacc

SEQ ID NO: 28466 - RNA, 20 nt, synthetic construct
  source 1..20: mol_type = other RNA
catgttgctttgcgaaatag

SEQ ID NO: 28467 - RNA, 20 nt, synthetic construct
  source 1..20: mol_type = other RNA
catgttggatagtttctcaa

SEQ ID NO: 28468 - RNA, 20 nt, synthetic construct
  source 1..20: mol_type = other RNA
catgttgggccaacttccag

SEQ ID NO: 28469 - RNA, 20 nt, synthetic construct
  source 1..20: mol_type = other RNA
catgttgggtaaaaataatc

SEQ ID NO: 28470 - RNA, 20 nt, synthetic construct
  source 1..20: mol_type = other RNA
catgttgtgtagaaatgtgg

SEQ ID NO: 28471 - RNA, 20 nt, synthetic construct
  source 1..20: mol_type = other RNA
catgttgttcttttcaaaaa

SEQ ID NO: 28472 - RNA, 20 nt, synthetic construct
  source 1..20: mol_type = other RNA
catgttgttgaatgtggcag

SEQ ID NO: 28473 - RNA, 20 nt, synthetic construct
  source 1..20: mol_type = other RNA
catgtttaactatcctatgt

SEQ ID NO: 28474 - RNA, 20 nt, synthetic construct
  source 1..20: mol_type = other RNA
catgtttacagaaatatacc

SEQ ID NO: 28475 - RNA, 20 nt, synthetic construct
  source 1..20: mol_type = other RNA
catgtttagcaagattactg

SEQ ID NO: 28476 - RNA, 20 nt, synthetic construct
  source 1..20: mol_type = other RNA
catgtttccataaaaagcgt

SEQ ID NO: 28477 - RNA, 20 nt, synthetic construct
  source 1..20: mol_type = other RNA
catgtttctcctgcatgggg

SEQ ID NO: 28478 - RNA, 20 nt, synthetic construct
  source 1..20: mol_type = other RNA
catgtttgaattttccattc

SEQ ID NO: 28479 - RNA, 20 nt, synthetic construct
  source 1..20: mol_type = other RNA
catgtttggtcaattgatct

SEQ ID NO: 28480 - RNA, 20 nt, synthetic construct
  source 1..20: mol_type = other RNA
catgtttgtggttttaacct

SEQ ID NO: 28481 - RNA, 20 nt, synthetic construct
  source 1..20: mol_type = other RNA
catgttttaggagtcaacta

SEQ ID NO: 28482 - RNA, 20 nt, synthetic construct
  source 1..20: mol_type = other RNA
catgttttatttctgtatct

SEQ ID NO: 28483 - RNA, 20 nt, synthetic construct
  source 1..20: mol_type = other RNA
catgttttatttcttgacct

SEQ ID NO: 28484 - RNA, 20 nt, synthetic construct
  source 1..20: mol_type = other RNA
catgttttcaaatgctataa

SEQ ID NO: 28485 - RNA, 20 nt, synthetic construct
  source 1..20: mol_type = other RNA
cattaaaaatcaacccatga

SEQ ID NO: 28486 - RNA, 20 nt, synthetic construct
  source 1..20: mol_type = other RNA
cattaaaaggtataaaggat

SEQ ID NO: 28487 - RNA, 20 nt, synthetic construct
  source 1..20: mol_type = other RNA
cattaaagacagctactaaa

SEQ ID NO: 28488 - RNA, 20 nt, synthetic construct
  source 1..20: mol_type = other RNA
cattaaataagggcattttc

SEQ ID NO: 28489 - RNA, 20 nt, synthetic construct
  source 1..20: mol_type = other RNA
cattaacagatgaatgaaca

SEQ ID NO: 28490 - RNA, 20 nt, synthetic construct
  source 1..20: mol_type = other RNA
cattaacagctcagaagcta

SEQ ID NO: 28491 - RNA, 20 nt, synthetic construct
  source 1..20: mol_type = other RNA
cattaactatggacatgagg

SEQ ID NO: 28492 - RNA, 20 nt, synthetic construct
  source 1..20: mol_type = other RNA
cattaagccagtcactaaaa

SEQ ID NO: 28493 - RNA, 20 nt, synthetic construct
  source 1..20: mol_type = other RNA
cattaaggaagaattaacac

SEQ ID NO: 28494 - RNA, 20 nt, synthetic construct
  source 1..20: mol_type = other RNA
cattaaggacatccacaaca

SEQ ID NO: 28495 - RNA, 20 nt, synthetic construct
  source 1..20: mol_type = other RNA
cattaagggaaacagggtta

SEQ ID NO: 28496 - RNA, 20 nt, synthetic construct
  source 1..20: mol_type = other RNA
cattaataagatcatacacc

SEQ ID NO: 28497 - RNA, 20 nt, synthetic construct
  source 1..20: mol_type = other RNA
cattaatctcatccacaatg

SEQ ID NO: 28498 - RNA, 20 nt, synthetic construct
  source 1..20: mol_type = other RNA
cattaatgcaacctgctttc

SEQ ID NO: 28499 - RNA, 20 nt, synthetic construct
  source 1..20: mol_type = other RNA
cattaatgcttcatattttg

SEQ ID NO: 28500 - RNA, 20 nt, synthetic construct
  source 1..20: mol_type = other RNA
cattaattgagagctttctt

SEQ ID NO: 28501 - RNA, 20 nt, synthetic construct
  source 1..20: mol_type = other RNA
cattacaacagcaaggctcc

SEQ ID NO: 28502 - RNA, 20 nt, synthetic construct
  source 1..20: mol_type = other RNA
cattacaattgataccatga

SEQ ID NO: 28503 - RNA, 20 nt, synthetic construct
  source 1..20: mol_type = other RNA
cattacagaaaaaattagcc

SEQ ID NO: 28504 - RNA, 20 nt, synthetic construct
  source 1..20: mol_type = other RNA
cattacagtctcgaccccct

SEQ ID NO: 28505 - RNA, 20 nt, synthetic construct
  source 1..20: mol_type = other RNA
cattacatattttgtaacgt

SEQ ID NO: 28506 - RNA, 20 nt, synthetic construct
  source 1..20: mol_type = other RNA
cattacatgaatggaaaatt

SEQ ID NO: 28507 - RNA, 20 nt, synthetic construct
  source 1..20: mol_type = other RNA
cattacatttgcttaggctg

SEQ ID NO: 28508 - RNA, 20 nt, synthetic construct
  source 1..20: mol_type = other RNA
cattaccaaaacctggtatg

SEQ ID NO: 28509 - RNA, 20 nt, synthetic construct
  source 1..20: mol_type = other RNA
cattaccaataaaagcctca

SEQ ID NO: 28510 - RNA, 20 nt, synthetic construct
  source 1..20: mol_type = other RNA
cattaccaggctggaagaat

SEQ ID NO: 28511 - RNA, 20 nt, synthetic construct
  source 1..20: mol_type = other RNA
cattaccctaataacaaaat

SEQ ID NO: 28512 - RNA, 20 nt, synthetic construct
  source 1..20: mol_type = other RNA
cattaccttatagatgacga

SEQ ID NO: 28513 - RNA, 20 nt, synthetic construct
  source 1..20: mol_type = other RNA
cattacgagttatgcaagat

SEQ ID NO: 28514 - RNA, 20 nt, synthetic construct
  source 1..20: mol_type = other RNA
cattactcggtatgtaccca

SEQ ID NO: 28515 - RNA, 20 nt, synthetic construct
  source 1..20: mol_type = other RNA
cattactcgtggttatagcc

SEQ ID NO: 28516 - RNA, 20 nt, synthetic construct
  source 1..20: mol_type = other RNA
cattactcttctactcactg

SEQ ID NO: 28517 - RNA, 20 nt, synthetic construct
  source 1..20: mol_type = other RNA
cattacttaggcagttatta

SEQ ID NO: 28518 - RNA, 20 nt, synthetic construct
  source 1..20: mol_type = other RNA
cattacttttttgtagagac

SEQ ID NO: 28519 - RNA, 20 nt, synthetic construct
  source 1..20: mol_type = other RNA
cattagaatcatccggggag

SEQ ID NO: 28520 - RNA, 20 nt, synthetic construct
  source 1..20: mol_type = other RNA
cattagaattcaggacagtc

SEQ ID NO: 28521 - RNA, 20 nt, synthetic construct
  source 1..20: mol_type = other RNA
cattagacactaactttcta

SEQ ID NO: 28522 - RNA, 20 nt, synthetic construct
  source 1..20: mol_type = other RNA
cattagagaagaatgagaaa

SEQ ID NO: 28523 - RNA, 20 nt, synthetic construct
  source 1..20: mol_type = other RNA
cattagagccccaagaaagc

SEQ ID NO: 28524 - RNA, 20 nt, synthetic construct
  source 1..20: mol_type = other RNA
cattagagtaagcaactgca

SEQ ID NO: 28525 - RNA, 20 nt, synthetic construct
  source 1..20: mol_type = other RNA
cattagcagttctgtaccct

SEQ ID NO: 28526 - RNA, 20 nt, synthetic construct
  source 1..20: mol_type = other RNA
cattagccactctgaattct

SEQ ID NO: 28527 - RNA, 20 nt, synthetic construct
  source 1..20: mol_type = other RNA
cattagcctagacctcaaat

SEQ ID NO: 28528 - RNA, 20 nt, synthetic construct
  source 1..20: mol_type = other RNA
cattaggatagctattattt

SEQ ID NO: 28529 - RNA, 20 nt, synthetic construct
  source 1..20: mol_type = other RNA
cattaggctctgggtcagaa

SEQ ID NO: 28530 - RNA, 20 nt, synthetic construct
  source 1..20: mol_type = other RNA
cattaggttgatggctgtac

SEQ ID NO: 28531 - RNA, 20 nt, synthetic construct
  source 1..20: mol_type = other RNA
cattagtgaattcacagtag

SEQ ID NO: 28532 - RNA, 20 nt, synthetic construct
  source 1..20: mol_type = other RNA
cattagtggaaaaactgcag

SEQ ID NO: 28533 - RNA, 20 nt, synthetic construct
  source 1..20: mol_type = other RNA
cattagtggtggtagtaagg

SEQ ID NO: 28534 - RNA, 20 nt, synthetic construct
  source 1..20: mol_type = other RNA
cattagttatctcttagacc

SEQ ID NO: 28535 - RNA, 20 nt, synthetic construct
  source 1..20: mol_type = other RNA
cattataaaataggaagtcc

SEQ ID NO: 28536 - RNA, 20 nt, synthetic construct
  source 1..20: mol_type = other RNA
cattataacataaaagcgta

SEQ ID NO: 28537 - RNA, 20 nt, synthetic construct
  source 1..20: mol_type = other RNA
cattatatgaataaaccacg

SEQ ID NO: 28538 - RNA, 20 nt, synthetic construct
  source 1..20: mol_type = other RNA
cattatatttcacaacgatt

SEQ ID NO: 28539 - RNA, 20 nt, synthetic construct
  source 1..20: mol_type = other RNA
cattatcccagacagatata

SEQ ID NO: 28540 - RNA, 20 nt, synthetic construct
  source 1..20: mol_type = other RNA
cattatcccagatctaacaa

SEQ ID NO: 28541 - RNA, 20 nt, synthetic construct
  source 1..20: mol_type = other RNA
cattatccctttaaaatgat

SEQ ID NO: 28542 - RNA, 20 nt, synthetic construct
  source 1..20: mol_type = other RNA
cattatcctatcagagcatg

SEQ ID NO: 28543 - RNA, 20 nt, synthetic construct
  source 1..20: mol_type = other RNA
cattatcttaataacctcaa

SEQ ID NO: 28544 - RNA, 20 nt, synthetic construct
  source 1..20: mol_type = other RNA
cattatcttctaccttttgt

SEQ ID NO: 28545 - RNA, 20 nt, synthetic construct
  source 1..20: mol_type = other RNA
cattatggttgttggctaaa

SEQ ID NO: 28546 - RNA, 20 nt, synthetic construct
  source 1..20: mol_type = other RNA
cattattaccaggttttaat

SEQ ID NO: 28547 - RNA, 20 nt, synthetic construct
  source 1..20: mol_type = other RNA
cattattccataaaaaccaa

SEQ ID NO: 28548 - RNA, 20 nt, synthetic construct
  source 1..20: mol_type = other RNA
cattattcttacagtgacat

SEQ ID NO: 28549 - RNA, 20 nt, synthetic construct
  source 1..20: mol_type = other RNA
cattattttctttgagtagt

SEQ ID NO: 28550 - RNA, 20 nt, synthetic construct
  source 1..20: mol_type = other RNA
cattcaaaattgttctaaca

SEQ ID NO: 28551 - RNA, 20 nt, synthetic construct
  source 1..20: mol_type = other RNA
cattcaaatgatattcactg

SEQ ID NO: 28552 - RNA, 20 nt, synthetic construct
  source 1..20: mol_type = other RNA
cattcaacaacatggatgaa

SEQ ID NO: 28553 - RNA, 20 nt, synthetic construct
  source 1..20: mol_type = other RNA
cattcaagcagaaatgagtt

SEQ ID NO: 28554 - RNA, 20 nt, synthetic construct
  source 1..20: mol_type = other RNA
cattcaatccttgtaacttt

SEQ ID NO: 28555 - RNA, 20 nt, synthetic construct
  source 1..20: mol_type = other RNA
cattcaattgtcctggcaga

SEQ ID NO: 28556 - RNA, 20 nt, synthetic construct
  source 1..20: mol_type = other RNA
cattcacacaccctttctta

SEQ ID NO: 28557 - RNA, 20 nt, synthetic construct
  source 1..20: mol_type = other RNA
cattcacactagtcacccta

SEQ ID NO: 28558 - RNA, 20 nt, synthetic construct
  source 1..20: mol_type = other RNA
cattcacagcgtgcacctta

SEQ ID NO: 28559 - RNA, 20 nt, synthetic construct
  source 1..20: mol_type = other RNA
cattcactagacacattttt

SEQ ID NO: 28560 - RNA, 20 nt, synthetic construct
  source 1..20: mol_type = other RNA
cattcactcagcataattgg

SEQ ID NO: 28561 - RNA, 20 nt, synthetic construct
  source 1..20: mol_type = other RNA
cattcagaggtatttggggc

SEQ ID NO: 28562 - RNA, 20 nt, synthetic construct
  source 1..20: mol_type = other RNA
cattcaggacactggaggtg

SEQ ID NO: 28563 - RNA, 20 nt, synthetic construct
  source 1..20: mol_type = other RNA
cattcaggtctatgtgacag

SEQ ID NO: 28564 - RNA, 20 nt, synthetic construct
  source 1..20: mol_type = other RNA
cattcataaacacagaacac

SEQ ID NO: 28565 - RNA, 20 nt, synthetic construct
  source 1..20: mol_type = other RNA
cattcatactgaaggcatag

SEQ ID NO: 28566 - RNA, 20 nt, synthetic construct
  source 1..20: mol_type = other RNA
cattcatatttgttcaagcg

SEQ ID NO: 28567 - RNA, 20 nt, synthetic construct
  source 1..20: mol_type = other RNA
cattcatccaggcaaaagat

SEQ ID NO: 28568 - RNA, 20 nt, synthetic construct
  source 1..20: mol_type = other RNA
cattcatccctctaaatagg

SEQ ID NO: 28569 - RNA, 20 nt, synthetic construct
  source 1..20: mol_type = other RNA
cattcatctaaacgtttggt

SEQ ID NO: 28570 - RNA, 20 nt, synthetic construct
  source 1..20: mol_type = other RNA
cattcatctctcgatggaca

SEQ ID NO: 28571 - RNA, 20 nt, synthetic construct
  source 1..20: mol_type = other RNA
cattcatctgcagtgtccat

SEQ ID NO: 28572 - RNA, 20 nt, synthetic construct
  source 1..20: mol_type = other RNA
cattcatgacaagaatcttt

SEQ ID NO: 28573 - RNA, 20 nt, synthetic construct
  source 1..20: mol_type = other RNA
cattcatgtaatgcaaactc

SEQ ID NO: 28574 - RNA, 20 nt, synthetic construct
  source 1..20: mol_type = other RNA
cattcattcatgacaagaat

SEQ ID NO: 28575 - RNA, 20 nt, synthetic construct
  source 1..20: mol_type = other RNA
cattccaagagaggaataaa

SEQ ID NO: 28576 - RNA, 20 nt, synthetic construct
  source 1..20: mol_type = other RNA
cattccaatccttccttcat

SEQ ID NO: 28577 - RNA, 20 nt, synthetic construct
  source 1..20: mol_type = other RNA
cattccacgctgtggcttgg

SEQ ID NO: 28578 - RNA, 20 nt, synthetic construct
  source 1..20: mol_type = other RNA
cattccagaccagcagttca

SEQ ID NO: 28579 - RNA, 20 nt, synthetic construct
  source 1..20: mol_type = other RNA
cattccagagggtaacgtga

SEQ ID NO: 28580 - RNA, 20 nt, synthetic construct
  source 1..20: mol_type = other RNA
cattccagattgaaatctag

SEQ ID NO: 28581 - RNA, 20 nt, synthetic construct
  source 1..20: mol_type = other RNA
cattccagccattctcttct

SEQ ID NO: 28582 - RNA, 20 nt, synthetic construct
  source 1..20: mol_type = other RNA
cattccaggttttatctctc

SEQ ID NO: 28583 - RNA, 20 nt, synthetic construct
  source 1..20: mol_type = other RNA
cattcccaaatgtcttaaga

SEQ ID NO: 28584 - RNA, 20 nt, synthetic construct
  source 1..20: mol_type = other RNA
cattcccatgttcactgcag

SEQ ID NO: 28585 - RNA, 20 nt, synthetic construct
  source 1..20: mol_type = other RNA
cattccccacataggatagt

SEQ ID NO: 28586 - RNA, 20 nt, synthetic construct
  source 1..20: mol_type = other RNA
cattccccttgccaaggctt

SEQ ID NO: 28587 - RNA, 20 nt, synthetic construct
  source 1..20: mol_type = other RNA
cattccctgtctgggaagtt

SEQ ID NO: 28588 - RNA, 20 nt, synthetic construct
  source 1..20: mol_type = other RNA
cattccctgtctgtgatgta

SEQ ID NO: 28589 - RNA, 20 nt, synthetic construct
  source 1..20: mol_type = other RNA
cattccgcctgggcgacaga

SEQ ID NO: 28590 - RNA, 20 nt, synthetic construct
  source 1..20: mol_type = other RNA
cattccgcgtttattagaac

SEQ ID NO: 28591 - RNA, 20 nt, synthetic construct
  source 1..20: mol_type = other RNA
cattccgctaaacattttat

SEQ ID NO: 28592 - RNA, 20 nt, synthetic construct
  source 1..20: mol_type = other RNA
cattccgtggaaggccttct

SEQ ID NO: 28593 - RNA, 20 nt, synthetic construct
  source 1..20: mol_type = other RNA
cattcctgaaatgaaccaaa

SEQ ID NO: 28594 - RNA, 20 nt, synthetic construct
  source 1..20: mol_type = other RNA
cattccttccgacctgtaga

SEQ ID NO: 28595 - RNA, 20 nt, synthetic construct
  source 1..20: mol_type = other RNA
cattccttcttcacacatta

SEQ ID NO: 28596 - RNA, 20 nt, synthetic construct
  source 1..20: mol_type = other RNA
cattccttttcgagactgag

SEQ ID NO: 28597 - RNA, 20 nt, synthetic construct
  source 1..20: mol_type = other RNA
cattcggccaagatctgttt

SEQ ID NO: 28598 - RNA, 20 nt, synthetic construct
  source 1..20: mol_type = other RNA
cattcgtagcaggtttagga

SEQ ID NO: 28599 - RNA, 20 nt, synthetic construct
  source 1..20: mol_type = other RNA
cattcgtccctaaacactgt

SEQ ID NO: 28600 - RNA, 20 nt, synthetic construct
  source 1..20: mol_type = other RNA
cattcgttcaaaacatcatc

SEQ ID NO: 28601 - RNA, 20 nt, synthetic construct
  source 1..20: mol_type = other RNA
cattctacagtattacacag

SEQ ID NO: 28602 - RNA, 20 nt, synthetic construct
  source 1..20: mol_type = other RNA
cattctacctggagcctgag

SEQ ID NO: 28603 - RNA, 20 nt, synthetic construct
  source 1..20: mol_type = other RNA
cattctagaaaggagggact

SEQ ID NO: 28604 - RNA, 20 nt, synthetic construct
  source 1..20: mol_type = other RNA
cattctagtgatgggagatg

SEQ ID NO: 28605 - RNA, 20 nt, synthetic construct
  source 1..20: mol_type = other RNA
cattctcccagttgtcagaa

SEQ ID NO: 28606 - RNA, 20 nt, synthetic construct
  source 1..20: mol_type = other RNA
cattctcttctggatagcat

SEQ ID NO: 28607 - RNA, 20 nt, synthetic construct
  source 1..20: mol_type = other RNA
cattctgcagtttgtgtttt

SEQ ID NO: 28608 - RNA, 20 nt, synthetic construct
  source 1..20: mol_type = other RNA
cattctgcctgcagactgca

SEQ ID NO: 28609 - RNA, 20 nt, synthetic construct
  source 1..20: mol_type = other RNA
cattctgctatgaaatgtgg

SEQ ID NO: 28610 - RNA, 20 nt, synthetic construct
  source 1..20: mol_type = other RNA
cattctgcttccttgctatg

SEQ ID NO: 28611 - RNA, 20 nt, synthetic construct
  source 1..20: mol_type = other RNA
cattctggagtgttttcttc

SEQ ID NO: 28612 - RNA, 20 nt, synthetic construct
  source 1..20: mol_type = other RNA
cattctgtagaagtaaatat

SEQ ID NO: 28613 - RNA, 20 nt, synthetic construct
  source 1..20: mol_type = other RNA
cattctgtcacatagacctg

SEQ ID NO: 28614 - RNA, 20 nt, synthetic construct
  source 1..20: mol_type = other RNA
cattcttaataagaaattcc

SEQ ID NO: 28615 - RNA, 20 nt, synthetic construct
  source 1..20: mol_type = other RNA
cattcttaccttctaaaatc

SEQ ID NO: 28616 - RNA, 20 nt, synthetic construct
  source 1..20: mol_type = other RNA
cattcttattgattcagatg

SEQ ID NO: 28617 - RNA, 20 nt, synthetic construct
  source 1..20: mol_type = other RNA
cattcttcaccattccagcc

SEQ ID NO: 28618 - RNA, 20 nt, synthetic construct
  source 1..20: mol_type = other RNA
cattcttctaataggaagtg

SEQ ID NO: 28619 - RNA, 20 nt, synthetic construct
  source 1..20: mol_type = other RNA
cattcttctctaatgtaaac

SEQ ID NO: 28620 - RNA, 20 nt, synthetic construct
  source 1..20: mol_type = other RNA
cattcttgacatgattgagg

SEQ ID NO: 28621 - RNA, 20 nt, synthetic construct
  source 1..20: mol_type = other RNA
cattctttttactcgagggt

SEQ ID NO: 28622 - RNA, 20 nt, synthetic construct
  source 1..20: mol_type = other RNA
cattgaaactcaatgttggt

SEQ ID NO: 28623 - RNA, 20 nt, synthetic construct
  source 1..20: mol_type = other RNA
cattgaagctactattccag

SEQ ID NO: 28624 - RNA, 20 nt, synthetic construct
  source 1..20: mol_type = other RNA
cattgaaggcagaattatag

SEQ ID NO: 28625 - RNA, 20 nt, synthetic construct
  source 1..20: mol_type = other RNA
cattgaagtatagtttgaag

SEQ ID NO: 28626 - RNA, 20 nt, synthetic construct
  source 1..20: mol_type = other RNA
cattgacaatataggagact

SEQ ID NO: 28627 - RNA, 20 nt, synthetic construct
  source 1..20: mol_type = other RNA
cattgactaccaattctccc

SEQ ID NO: 28628 - RNA, 20 nt, synthetic construct
  source 1..20: mol_type = other RNA
cattgagccaaagaagaaat

SEQ ID NO: 28629 - RNA, 20 nt, synthetic construct
  source 1..20: mol_type = other RNA
cattgagtttcaatgacttt

SEQ ID NO: 28630 - RNA, 20 nt, synthetic construct
  source 1..20: mol_type = other RNA
cattgatacaatacttggat

SEQ ID NO: 28631 - RNA, 20 nt, synthetic construct
  source 1..20: mol_type = other RNA
cattgcacagtctcccccag

SEQ ID NO: 28632 - RNA, 20 nt, synthetic construct
  source 1..20: mol_type = other RNA
cattgcaccactgcactcca

SEQ ID NO: 28633 - RNA, 20 nt, synthetic construct
  source 1..20: mol_type = other RNA
cattgcactccacgtgggtg

SEQ ID NO: 28634 - RNA, 20 nt, synthetic construct
  source 1..20: mol_type = other RNA
cattgcattgactaccaatt

SEQ ID NO: 28635 - RNA, 20 nt, synthetic construct
  source 1..20: mol_type = other RNA
cattgcatttacttgtcatt

SEQ ID NO: 28636 - RNA, 20 nt, synthetic construct
  source 1..20: mol_type = other RNA
cattgcctatagacagcatc

SEQ ID NO: 28637 - RNA, 20 nt, synthetic construct
  source 1..20: mol_type = other RNA
cattgcctccatatgggatg

SEQ ID NO: 28638 - RNA, 20 nt, synthetic construct
  source 1..20: mol_type = other RNA
cattgccttcaagttgcttt

SEQ ID NO: 28639 - RNA, 20 nt, synthetic construct
  source 1..20: mol_type = other RNA
cattgccttcgcagggtgaa

SEQ ID NO: 28640 - RNA, 20 nt, synthetic construct
  source 1..20: mol_type = other RNA
cattgcctttattactatta

SEQ ID NO: 28641 - RNA, 20 nt, synthetic construct
  source 1..20: mol_type = other RNA
cattgctaattcattgtaca

SEQ ID NO: 28642 - RNA, 20 nt, synthetic construct
  source 1..20: mol_type = other RNA
cattggaggataatatctgg

SEQ ID NO: 28643 - RNA, 20 nt, synthetic construct
  source 1..20: mol_type = other RNA
cattgggagctttcattatt

SEQ ID NO: 28644 - RNA, 20 nt, synthetic construct
  source 1..20: mol_type = other RNA
cattgggtacataccgagta

SEQ ID NO: 28645 - RNA, 20 nt, synthetic construct
  source 1..20: mol_type = other RNA
cattggttattcatgtttgt

SEQ ID NO: 28646 - RNA, 20 nt, synthetic construct
  source 1..20: mol_type = other RNA
cattggtttgaaatgatctt

SEQ ID NO: 28647 - RNA, 20 nt, synthetic construct
  source 1..20: mol_type = other RNA
cattgtaaaccatatggtta

SEQ ID NO: 28648 - RNA, 20 nt, synthetic construct
  source 1..20: mol_type = other RNA
cattgtaatcctgtttctct

SEQ ID NO: 28649 - RNA, 20 nt, synthetic construct
  source 1..20: mol_type = other RNA
cattgtacatgaagtcctca

SEQ ID NO: 28650 - RNA, 20 nt, synthetic construct
  source 1..20: mol_type = other RNA
cattgtagctatatcccaaa

SEQ ID NO: 28651 - RNA, 20 nt, synthetic construct
  source 1..20: mol_type = other RNA
cattgtatttctgttagatg

SEQ ID NO: 28652 - RNA, 20 nt, synthetic construct
  source 1..20: mol_type = other RNA
cattgtcccgggggagggcg

SEQ ID NO: 28653 - RNA, 20 nt, synthetic construct
  source 1..20: mol_type = other RNA
cattgtcttacataggctta

SEQ ID NO: 28654 - RNA, 20 nt, synthetic construct
  source 1..20: mol_type = other RNA
cattgtgatgtctcagatgt

SEQ ID NO: 28655 - RNA, 20 nt, synthetic construct
  source 1..20: mol_type = other RNA
cattgtgcaaccatccccgc

SEQ ID NO: 28656 - RNA, 20 nt, synthetic construct
  source 1..20: mol_type = other RNA
cattgtgcacttaaaattta

SEQ ID NO: 28657 - RNA, 20 nt, synthetic construct
  source 1..20: mol_type = other RNA
cattgtgctcagtggttctg

SEQ ID NO: 28658 - RNA, 20 nt, synthetic construct
  source 1..20: mol_type = other RNA
cattgtggatgagattaatg

SEQ ID NO: 28659 - RNA, 20 nt, synthetic construct
  source 1..20: mol_type = other RNA
cattgtgtggacacactgaa

SEQ ID NO: 28660 - RNA, 20 nt, synthetic construct
  source 1..20: mol_type = other RNA
cattgtgttgcccacgctgg

SEQ ID NO: 28661 - RNA, 20 nt, synthetic construct
  source 1..20: mol_type = other RNA
cattgttaggtgctggcttc

SEQ ID NO: 28662 - RNA, 20 nt, synthetic construct
  source 1..20: mol_type = other RNA
cattgttcagggaaggctgc

SEQ ID NO: 28663 - RNA, 20 nt, synthetic construct
  source 1..20: mol_type = other RNA
cattgttctctttgtttatc

SEQ ID NO: 28664 - RNA, 20 nt, synthetic construct
  source 1..20: mol_type = other RNA
cattgttgtgtgttaaattt

SEQ ID NO: 28665 - RNA, 20 nt, synthetic construct
  source 1..20: mol_type = other RNA
cattgtttacagtagccaaa

SEQ ID NO: 28666 - RNA, 20 nt, synthetic construct
  source 1..20: mol_type = other RNA
catttaaaagaaaatggcca

SEQ ID NO: 28667 - RNA, 20 nt, synthetic construct
  source 1..20: mol_type = other RNA
catttaaaagaacctctgga

SEQ ID NO: 28668 - RNA, 20 nt, synthetic construct
  source 1..20: mol_type = other RNA
catttaaaatctgattcagt

SEQ ID NO: 28669 - RNA, 20 nt, synthetic construct
  source 1..20: mol_type = other RNA
catttaaaattgcagagtgt

SEQ ID NO: 28670 - RNA, 20 nt, synthetic construct
  source 1..20: mol_type = other RNA
catttaaacgtcagagcagc

SEQ ID NO: 28671 - RNA, 20 nt, synthetic construct
  source 1..20: mol_type = other RNA
catttaagaagggaacacta

SEQ ID NO: 28672 - RNA, 20 nt, synthetic construct
  source 1..20: mol_type = other RNA
catttaattctatctgaact

SEQ ID NO: 28673 - RNA, 20 nt, synthetic construct
  source 1..20: mol_type = other RNA
catttacaaaaacacactga

SEQ ID NO: 28674 - RNA, 20 nt, synthetic construct
  source 1..20: mol_type = other RNA
catttaccccttaaattcca

SEQ ID NO: 28675 - RNA, 20 nt, synthetic construct
  source 1..20: mol_type = other RNA
catttactgaaatcctagcc

SEQ ID NO: 28676 - RNA, 20 nt, synthetic construct
  source 1..20: mol_type = other RNA
catttactgctataaacttc

SEQ ID NO: 28677 - RNA, 20 nt, synthetic construct
  source 1..20: mol_type = other RNA
catttacttgtcatttctgc

SEQ ID NO: 28678 - RNA, 20 nt, synthetic construct
  source 1..20: mol_type = other RNA
catttagccccctgaatacc

SEQ ID NO: 28679 - RNA, 20 nt, synthetic construct
  source 1..20: mol_type = other RNA
catttagtaagtgtgagcaa

SEQ ID NO: 28680 - RNA, 20 nt, synthetic construct
  source 1..20: mol_type = other RNA
catttagtttcatctatgtc

SEQ ID NO: 28681 - RNA, 20 nt, synthetic construct
  source 1..20: mol_type = other RNA
catttatacagttggaactc

SEQ ID NO: 28682 - RNA, 20 nt, synthetic construct
  source 1..20: mol_type = other RNA
catttatacccaagtaaaca

SEQ ID NO: 28683 - RNA, 20 nt, synthetic construct
  source 1..20: mol_type = other RNA
catttatcagcaccaaagat

SEQ ID NO: 28684 - RNA, 20 nt, synthetic construct
  source 1..20: mol_type = other RNA
catttatggaattgccatat

SEQ ID NO: 28685 - RNA, 20 nt, synthetic construct
  source 1..20: mol_type = other RNA
catttattaaagtagaaggc

SEQ ID NO: 28686 - RNA, 20 nt, synthetic construct
  source 1..20: mol_type = other RNA
catttattagtagttaggtg

SEQ ID NO: 28687 - RNA, 20 nt, synthetic construct
  source 1..20: mol_type = other RNA
catttattcctctcttggaa

SEQ ID NO: 28688 - RNA, 20 nt, synthetic construct
  source 1..20: mol_type = other RNA
catttattctgttgcaaatt

SEQ ID NO: 28689 - RNA, 20 nt, synthetic construct
  source 1..20: mol_type = other RNA
catttattgtcaaggtcatc

SEQ ID NO: 28690 - RNA, 20 nt, synthetic construct
  source 1..20: mol_type = other RNA
catttcaaaccaatgttctc

SEQ ID NO: 28691 - RNA, 20 nt, synthetic construct
  source 1..20: mol_type = other RNA
catttcactcttttaaggtt

SEQ ID NO: 28692 - RNA, 20 nt, synthetic construct
  source 1..20: mol_type = other RNA
catttcacttgattacttta

SEQ ID NO: 28693 - RNA, 20 nt, synthetic construct
  source 1..20: mol_type = other RNA
catttcagccaaagctggca

SEQ ID NO: 28694 - RNA, 20 nt, synthetic construct
  source 1..20: mol_type = other RNA
catttcaggaatgcaaagtt

SEQ ID NO: 28695 - RNA, 20 nt, synthetic construct
  source 1..20: mol_type = other RNA
catttcaggttttcgaccaa

SEQ ID NO: 28696 - RNA, 20 nt, synthetic construct
  source 1..20: mol_type = other RNA
catttcatagcagaatggcc

SEQ ID NO: 28697 - RNA, 20 nt, synthetic construct
  source 1..20: mol_type = other RNA
catttcatgccatcctggat

SEQ ID NO: 28698 - RNA, 20 nt, synthetic construct
  source 1..20: mol_type = other RNA
catttccaaagatcatgggt

SEQ ID NO: 28699 - RNA, 20 nt, synthetic construct
  source 1..20: mol_type = other RNA
catttccaagattgaaaatg

SEQ ID NO: 28700 - RNA, 20 nt, synthetic construct
  source 1..20: mol_type = other RNA
catttccagtactttttcat

SEQ ID NO: 28701 - RNA, 20 nt, synthetic construct
  source 1..20: mol_type = other RNA
catttccattcatattttca

SEQ ID NO: 28702 - RNA, 20 nt, synthetic construct
  source 1..20: mol_type = other RNA
catttccctgcttcatctgg

SEQ ID NO: 28703 - RNA, 20 nt, synthetic construct
  source 1..20: mol_type = other RNA
catttccgttgctgcatagt

SEQ ID NO: 28704 - RNA, 20 nt, synthetic construct
  source 1..20: mol_type = other RNA
catttccttaagcacagact

SEQ ID NO: 28705 - RNA, 20 nt, synthetic construct
  source 1..20: mol_type = other RNA
catttcctttcagtcggttc

SEQ ID NO: 28706 - RNA, 20 nt, synthetic construct
  source 1..20: mol_type = other RNA
catttcgccttctcagaagg

SEQ ID NO: 28707 - RNA, 20 nt, synthetic construct
  source 1..20: mol_type = other RNA
catttcggctctgtgctgag

SEQ ID NO: 28708 - RNA, 20 nt, synthetic construct
  source 1..20: mol_type = other RNA
catttctaagccatgtttct

SEQ ID NO: 28709 - RNA, 20 nt, synthetic construct
  source 1..20: mol_type = other RNA
catttctaatttccaagaac

SEQ ID NO: 28710 - RNA, 20 nt, synthetic construct
  source 1..20: mol_type = other RNA
catttctacacaacatgttt

SEQ ID NO: 28711 - RNA, 20 nt, synthetic construct
  source 1..20: mol_type = other RNA
catttctcatactttgtcag

SEQ ID NO: 28712 - RNA, 20 nt, synthetic construct
  source 1..20: mol_type = other RNA
catttctcatgtatgtttta

SEQ ID NO: 28713 - RNA, 20 nt, synthetic construct
  source 1..20: mol_type = other RNA
catttctctaatagctagtg

SEQ ID NO: 28714 - RNA, 20 nt, synthetic construct
  source 1..20: mol_type = other RNA
catttctgaaaaatggtttt

SEQ ID NO: 28715 - RNA, 20 nt, synthetic construct
  source 1..20: mol_type = other RNA
catttctgcttagtcttctc

SEQ ID NO: 28716 - RNA, 20 nt, synthetic construct
  source 1..20: mol_type = other RNA
catttctgcttgaatgtgcc

SEQ ID NO: 28717 - RNA, 20 nt, synthetic construct
  source 1..20: mol_type = other RNA
catttcttacacattaggct

SEQ ID NO: 28718 - RNA, 20 nt, synthetic construct
  source 1..20: mol_type = other RNA
catttcttctagtcacattt

SEQ ID NO: 28719 - RNA, 20 nt, synthetic construct
  source 1..20: mol_type = other RNA
catttgaaaacatgttttgt

SEQ ID NO: 28720 - RNA, 20 nt, synthetic construct
  source 1..20: mol_type = other RNA
catttgaaagaaagaaggcc

SEQ ID NO: 28721 - RNA, 20 nt, synthetic construct
  source 1..20: mol_type = other RNA
catttgaactcactggccag

SEQ ID NO: 28722 - RNA, 20 nt, synthetic construct
  source 1..20: mol_type = other RNA
catttgaactttccagaagt

SEQ ID NO: 28723 - RNA, 20 nt, synthetic construct
  source 1..20: mol_type = other RNA
catttgaatgatgcgaaaga

SEQ ID NO: 28724 - RNA, 20 nt, synthetic construct
  source 1..20: mol_type = other RNA
catttgaccttccttgtgtc

SEQ ID NO: 28725 - RNA, 20 nt, synthetic construct
  source 1..20: mol_type = other RNA
catttgagaatttcaggtgt

SEQ ID NO: 28726 - RNA, 20 nt, synthetic construct
  source 1..20: mol_type = other RNA
catttgagcccaggaggttg

SEQ ID NO: 28727 - RNA, 20 nt, synthetic construct
  source 1..20: mol_type = other RNA
catttgagggtgctgatcag

SEQ ID NO: 28728 - RNA, 20 nt, synthetic construct
  source 1..20: mol_type = other RNA
catttgagggttagaagaca

SEQ ID NO: 28729 - RNA, 20 nt, synthetic construct
  source 1..20: mol_type = other RNA
catttgatcttttttatgct

SEQ ID NO: 28730 - RNA, 20 nt, synthetic construct
  source 1..20: mol_type = other RNA
catttgattgccagttttct

SEQ ID NO: 28731 - RNA, 20 nt, synthetic construct
  source 1..20: mol_type = other RNA
catttgatttcttctttggc

SEQ ID NO: 28732 - RNA, 20 nt, synthetic construct
  source 1..20: mol_type = other RNA
catttgcagagcaaactcag

SEQ ID NO: 28733 - RNA, 20 nt, synthetic construct
  source 1..20: mol_type = other RNA
catttgcttaggctgttatt

SEQ ID NO: 28734 - RNA, 20 nt, synthetic construct
  source 1..20: mol_type = other RNA
catttgctttactactgcat

SEQ ID NO: 28735 - RNA, 20 nt, synthetic construct
  source 1..20: mol_type = other RNA
catttgcttttcctggaaaa

SEQ ID NO: 28736 - RNA, 20 nt, synthetic construct
  source 1..20: mol_type = other RNA
catttggaatagagagccca

SEQ ID NO: 28737 - RNA, 20 nt, synthetic construct
  source 1..20: mol_type = other RNA
catttggcccagccatccca

SEQ ID NO: 28738 - RNA, 20 nt, synthetic construct
  source 1..20: mol_type = other RNA
catttggcctctgcggcggc

SEQ ID NO: 28739 - RNA, 20 nt, synthetic construct
  source 1..20: mol_type = other RNA
catttgggaatgtggtcaca

SEQ ID NO: 28740 - RNA, 20 nt, synthetic construct
  source 1..20: mol_type = other RNA
catttgggacagcctagttt

SEQ ID NO: 28741 - RNA, 20 nt, synthetic construct
  source 1..20: mol_type = other RNA
catttgggactgagacagta

SEQ ID NO: 28742 - RNA, 20 nt, synthetic construct
  source 1..20: mol_type = other RNA
catttggtctcattcactag

SEQ ID NO: 28743 - RNA, 20 nt, synthetic construct
  source 1..20: mol_type = other RNA
catttggtttgcaaaaattt

SEQ ID NO: 28744 - RNA, 20 nt, synthetic construct
  source 1..20: mol_type = other RNA
catttggttttactactgta

SEQ ID NO: 28745 - RNA, 20 nt, synthetic construct
  source 1..20: mol_type = other RNA
catttgtaacatgttagatt

SEQ ID NO: 28746 - RNA, 20 nt, synthetic construct
  source 1..20: mol_type = other RNA
catttgtaattcatcctact

SEQ ID NO: 28747 - RNA, 20 nt, synthetic construct
  source 1..20: mol_type = other RNA
catttgtattatttctgtca

SEQ ID NO: 28748 - RNA, 20 nt, synthetic construct
  source 1..20: mol_type = other RNA
catttgtggcatctttgtta

SEQ ID NO: 28749 - RNA, 20 nt, synthetic construct
  source 1..20: mol_type = other RNA
catttgttgcatccccattc

SEQ ID NO: 28750 - RNA, 20 nt, synthetic construct
  source 1..20: mol_type = other RNA
catttgttttgtgtttgtga

SEQ ID NO: 28751 - RNA, 20 nt, synthetic construct
  source 1..20: mol_type = other RNA
cattttaaagggataatgct

SEQ ID NO: 28752 - RNA, 20 nt, synthetic construct
  source 1..20: mol_type = other RNA
cattttaataagcttcgaag

SEQ ID NO: 28753 - RNA, 20 nt, synthetic construct
  source 1..20: mol_type = other RNA
cattttaattccaaattagc

SEQ ID NO: 28754 - RNA, 20 nt, synthetic construct
  source 1..20: mol_type = other RNA
cattttaccaaaacagcttc

SEQ ID NO: 28755 - RNA, 20 nt, synthetic construct
  source 1..20: mol_type = other RNA
cattttaccatatacacaaa

SEQ ID NO: 28756 - RNA, 20 nt, synthetic construct
  source 1..20: mol_type = other RNA
cattttactgctatacaacc

SEQ ID NO: 28757 - RNA, 20 nt, synthetic construct
  source 1..20: mol_type = other RNA
cattttagatcaagtccttt

SEQ ID NO: 28758 - RNA, 20 nt, synthetic construct
  source 1..20: mol_type = other RNA
cattttagctggggcagcaa

SEQ ID NO: 28759 - RNA, 20 nt, synthetic construct
  source 1..20: mol_type = other RNA
cattttataagggtgataaa

SEQ ID NO: 28760 - RNA, 20 nt, synthetic construct
  source 1..20: mol_type = other RNA
cattttataggcattcctta

SEQ ID NO: 28761 - RNA, 20 nt, synthetic construct
  source 1..20: mol_type = other RNA
cattttattaatttggcttg

SEQ ID NO: 28762 - RNA, 20 nt, synthetic construct
  source 1..20: mol_type = other RNA
cattttattaggtgcacaca

SEQ ID NO: 28763 - RNA, 20 nt, synthetic construct
  source 1..20: mol_type = other RNA
cattttatttatacaggtgc

SEQ ID NO: 28764 - RNA, 20 nt, synthetic construct
  source 1..20: mol_type = other RNA
cattttcaaggtagaagtac

SEQ ID NO: 28765 - RNA, 20 nt, synthetic construct
  source 1..20: mol_type = other RNA
cattttcaatcttggaaatg

SEQ ID NO: 28766 - RNA, 20 nt, synthetic construct
  source 1..20: mol_type = other RNA
cattttccctcctttttatc

SEQ ID NO: 28767 - RNA, 20 nt, synthetic construct
  source 1..20: mol_type = other RNA
cattttccggttgtatagca

SEQ ID NO: 28768 - RNA, 20 nt, synthetic construct
  source 1..20: mol_type = other RNA
cattttcgaattagattgtt

SEQ ID NO: 28769 - RNA, 20 nt, synthetic construct
  source 1..20: mol_type = other RNA
cattttctaaattgaacagc

SEQ ID NO: 28770 - RNA, 20 nt, synthetic construct
  source 1..20: mol_type = other RNA
cattttctctacagttaaca

SEQ ID NO: 28771 - RNA, 20 nt, synthetic construct
  source 1..20: mol_type = other RNA
cattttcttatctaggcgaa

SEQ ID NO: 28772 - RNA, 20 nt, synthetic construct
  source 1..20: mol_type = other RNA
cattttgaaaaacagatctt

SEQ ID NO: 28773 - RNA, 20 nt, synthetic construct
  source 1..20: mol_type = other RNA
cattttgaatcatgggagcc

SEQ ID NO: 28774 - RNA, 20 nt, synthetic construct
  source 1..20: mol_type = other RNA
cattttgagttattgcatag

SEQ ID NO: 28775 - RNA, 20 nt, synthetic construct
  source 1..20: mol_type = other RNA
cattttgccagctaactttt

SEQ ID NO: 28776 - RNA, 20 nt, synthetic construct
  source 1..20: mol_type = other RNA
cattttggcaaattgtcaga

SEQ ID NO: 28777 - RNA, 20 nt, synthetic construct
  source 1..20: mol_type = other RNA
cattttggtcttaccctcta

SEQ ID NO: 28778 - RNA, 20 nt, synthetic construct
  source 1..20: mol_type = other RNA
cattttgtgacaagttcagc

SEQ ID NO: 28779 - RNA, 20 nt, synthetic construct
  source 1..20: mol_type = other RNA
cattttgttcattcatctgt

SEQ ID NO: 28780 - RNA, 20 nt, synthetic construct
  source 1..20: mol_type = other RNA
catttttaagaaatcgttgt

SEQ ID NO: 28781 - RNA, 20 nt, synthetic construct
  source 1..20: mol_type = other RNA
catttttcaaatacctagtt

SEQ ID NO: 28782 - RNA, 20 nt, synthetic construct
  source 1..20: mol_type = other RNA
catttttcacttcttattgg

SEQ ID NO: 28783 - RNA, 20 nt, synthetic construct
  source 1..20: mol_type = other RNA
catttttcaggggggccact

SEQ ID NO: 28784 - RNA, 20 nt, synthetic construct
  source 1..20: mol_type = other RNA
catttttctcgacacacaat

SEQ ID NO: 28785 - RNA, 20 nt, synthetic construct
  source 1..20: mol_type = other RNA
catttttctgaccaactatt

SEQ ID NO: 28786 - RNA, 20 nt, synthetic construct
  source 1..20: mol_type = other RNA
catttttcttagttccatta

SEQ ID NO: 28787 - RNA, 20 nt, synthetic construct
  source 1..20: mol_type = other RNA
catttttgacagccacgtgt

SEQ ID NO: 28788 - RNA, 20 nt, synthetic construct
  source 1..20: mol_type = other RNA
catttttgtattctgaccta

SEQ ID NO: 28789 - RNA, 20 nt, synthetic construct
  source 1..20: mol_type = other RNA
cattttttaagtggcgctgt

SEQ ID NO: 28790 - RNA, 20 nt, synthetic construct
  source 1..20: mol_type = other RNA
cattttttcaccagcggcat

SEQ ID NO: 28791 - RNA, 20 nt, synthetic construct
  source 1..20: mol_type = other RNA
cattttttgcagagacgggg

SEQ ID NO: 28792 - RNA, 20 nt, synthetic construct
  source 1..20: mol_type = other RNA
cattttttggtttgtatgtg

SEQ ID NO: 28793 - RNA, 20 nt, synthetic construct
  source 1..20: mol_type = other RNA
ccaaaaaactacgagtatca

SEQ ID NO: 28794 - RNA, 20 nt, synthetic construct
  source 1..20: mol_type = other RNA
ccaaaaaagcaccagttatc

SEQ ID NO: 28795 - RNA, 20 nt, synthetic construct
  source 1..20: mol_type = other RNA
ccaaaaaaggtgctgttgta

SEQ ID NO: 28796 - RNA, 20 nt, synthetic construct
  source 1..20: mol_type = other RNA
ccaaaaaatgtggcatatca

SEQ ID NO: 28797 - RNA, 20 nt, synthetic construct
  source 1..20: mol_type = other RNA
ccaaaaacaaaagagtagat

SEQ ID NO: 28798 - RNA, 20 nt, synthetic construct
  source 1..20: mol_type = other RNA
ccaaaaaccacatttcatag

SEQ ID NO: 28799 - RNA, 20 nt, synthetic construct
  source 1..20: mol_type = other RNA
ccaaaacaaaaaacaaaccc

SEQ ID NO: 28800 - RNA, 20 nt, synthetic construct
  source 1..20: mol_type = other RNA
ccaaaacagcttcttgttag

SEQ ID NO: 28801 - RNA, 20 nt, synthetic construct
  source 1..20: mol_type = other RNA
ccaaaacccttgggatgcag

SEQ ID NO: 28802 - RNA, 20 nt, synthetic construct
  source 1..20: mol_type = other RNA
ccaaaacctggtatgagtgt

SEQ ID NO: 28803 - RNA, 20 nt, synthetic construct
  source 1..20: mol_type = other RNA
ccaaaacttaggaggctatt

SEQ ID NO: 28804 - RNA, 20 nt, synthetic construct
  source 1..20: mol_type = other RNA
ccaaaagcaggccctgagaa

SEQ ID NO: 28805 - RNA, 20 nt, synthetic construct
  source 1..20: mol_type = other RNA
ccaaaagccaagagcgaggc

SEQ ID NO: 28806 - RNA, 20 nt, synthetic construct
  source 1..20: mol_type = other RNA
ccaaaagcctcaaaatttag

SEQ ID NO: 28807 - RNA, 20 nt, synthetic construct
  source 1..20: mol_type = other RNA
ccaaaagcgaaaggcaaaaa

SEQ ID NO: 28808 - RNA, 20 nt, synthetic construct
  source 1..20: mol_type = other RNA
ccaaaagggaaatatgaacc

SEQ ID NO: 28809 - RNA, 20 nt, synthetic construct
  source 1..20: mol_type = other RNA
ccaaaagtcctgttcttttg

SEQ ID NO: 28810 - RNA, 20 nt, synthetic construct
  source 1..20: mol_type = other RNA
ccaaaagtgaatatagctaa

SEQ ID NO: 28811 - RNA, 20 nt, synthetic construct
  source 1..20: mol_type = other RNA
ccaaaatataaatacgtgta

SEQ ID NO: 28812 - RNA, 20 nt, synthetic construct
  source 1..20: mol_type = other RNA
ccaaaatattgaagagggaa

SEQ ID NO: 28813 - RNA, 20 nt, synthetic construct
  source 1..20: mol_type = other RNA
ccaaaatcctctgtagataa

SEQ ID NO: 28814 - RNA, 20 nt, synthetic construct
  source 1..20: mol_type = other RNA
ccaaaatgattttcacaggg

SEQ ID NO: 28815 - RNA, 20 nt, synthetic construct
  source 1..20: mol_type = other RNA
ccaaaatggagacccatact

SEQ ID NO: 28816 - RNA, 20 nt, synthetic construct
  source 1..20: mol_type = other RNA
ccaaaattaccccattcact

SEQ ID NO: 28817 - RNA, 20 nt, synthetic construct
  source 1..20: mol_type = other RNA
ccaaacaccttacactcaaa

SEQ ID NO: 28818 - RNA, 20 nt, synthetic construct
  source 1..20: mol_type = other RNA
ccaaacactggaaatcacag

SEQ ID NO: 28819 - RNA, 20 nt, synthetic construct
  source 1..20: mol_type = other RNA
ccaaacagaaaccctgtacc

SEQ ID NO: 28820 - RNA, 20 nt, synthetic construct
  source 1..20: mol_type = other RNA
ccaaacagtgaccacagttt

SEQ ID NO: 28821 - RNA, 20 nt, synthetic construct
  source 1..20: mol_type = other RNA
ccaaacagtttttacatgta

SEQ ID NO: 28822 - RNA, 20 nt, synthetic construct
  source 1..20: mol_type = other RNA
ccaaacatcatgatttaata

SEQ ID NO: 28823 - RNA, 20 nt, synthetic construct
  source 1..20: mol_type = other RNA
ccaaacatgtgaggatttat

SEQ ID NO: 28824 - RNA, 20 nt, synthetic construct
  source 1..20: mol_type = other RNA
ccaaacattgaaggcagaat

SEQ ID NO: 28825 - RNA, 20 nt, synthetic construct
  source 1..20: mol_type = other RNA
ccaaaccatcaagtgtgatc

SEQ ID NO: 28826 - RNA, 20 nt, synthetic construct
  source 1..20: mol_type = other RNA
ccaaaccctacacccatcca

SEQ ID NO: 28827 - RNA, 20 nt, synthetic construct
  source 1..20: mol_type = other RNA
ccaaacctttaagttctcca

SEQ ID NO: 28828 - RNA, 20 nt, synthetic construct
  source 1..20: mol_type = other RNA
ccaaacgtttagatgaatga

SEQ ID NO: 28829 - RNA, 20 nt, synthetic construct
  source 1..20: mol_type = other RNA
ccaaactcaaaaggacatat

SEQ ID NO: 28830 - RNA, 20 nt, synthetic construct
  source 1..20: mol_type = other RNA
ccaaactggagtgcagtggt

SEQ ID NO: 28831 - RNA, 20 nt, synthetic construct
  source 1..20: mol_type = other RNA
ccaaactgttttccacagtg

SEQ ID NO: 28832 - RNA, 20 nt, synthetic construct
  source 1..20: mol_type = other RNA
ccaaacttctgaccttgtga

SEQ ID NO: 28833 - RNA, 20 nt, synthetic construct
  source 1..20: mol_type = other RNA
ccaaacttgaaccttcctct

SEQ ID NO: 28834 - RNA, 20 nt, synthetic construct
  source 1..20: mol_type = other RNA
ccaaacttggtttattttct

SEQ ID NO: 28835 - RNA, 20 nt, synthetic construct
  source 1..20: mol_type = other RNA
ccaaagaaaggggaaggaat

SEQ ID NO: 28836 - RNA, 20 nt, synthetic construct
  source 1..20: mol_type = other RNA
ccaaagaaattggacgggtg

SEQ ID NO: 28837 - RNA, 20 nt, synthetic construct
  source 1..20: mol_type = other RNA
ccaaagaacaggagttacca

SEQ ID NO: 28838 - RNA, 20 nt, synthetic construct
  source 1..20: mol_type = other RNA
ccaaagaagaaatcaaatgg

SEQ ID NO: 28839 - RNA, 20 nt, synthetic construct
  source 1..20: mol_type = other RNA
ccaaagaaggaaaaaacacc

SEQ ID NO: 28840 - RNA, 20 nt, synthetic construct
  source 1..20: mol_type = other RNA
ccaaagacagatcttatgga

SEQ ID NO: 28841 - RNA, 20 nt, synthetic construct
  source 1..20: mol_type = other RNA
ccaaagacatcctgatttag

SEQ ID NO: 28842 - RNA, 20 nt, synthetic construct
  source 1..20: mol_type = other RNA
ccaaagacattgtcttacat

SEQ ID NO: 28843 - RNA, 20 nt, synthetic construct
  source 1..20: mol_type = other RNA
ccaaagacttcaacggacat

SEQ ID NO: 28844 - RNA, 20 nt, synthetic construct
  source 1..20: mol_type = other RNA
ccaaagacttcaggaacacc

SEQ ID NO: 28845 - RNA, 20 nt, synthetic construct
  source 1..20: mol_type = other RNA
ccaaagactttgttttgttt

SEQ ID NO: 28846 - RNA, 20 nt, synthetic construct
  source 1..20: mol_type = other RNA
ccaaagataaaggtaaggaa

SEQ ID NO: 28847 - RNA, 20 nt, synthetic construct
  source 1..20: mol_type = other RNA
ccaaagatagactcttcaga

SEQ ID NO: 28848 - RNA, 20 nt, synthetic construct
  source 1..20: mol_type = other RNA
ccaaagatataaaaatggtc

SEQ ID NO: 28849 - RNA, 20 nt, synthetic construct
  source 1..20: mol_type = other RNA
ccaaagatattagctacaaa

SEQ ID NO: 28850 - RNA, 20 nt, synthetic construct
  source 1..20: mol_type = other RNA
ccaaagatcatgggttttaa

SEQ ID NO: 28851 - RNA, 20 nt, synthetic construct
  source 1..20: mol_type = other RNA
ccaaagattatgttccacat

SEQ ID NO: 28852 - RNA, 20 nt, synthetic construct
  source 1..20: mol_type = other RNA
ccaaagattcttgtcatgaa

SEQ ID NO: 28853 - RNA, 20 nt, synthetic construct
  source 1..20: mol_type = other RNA
ccaaagatttactaaactga

SEQ ID NO: 28854 - RNA, 20 nt, synthetic construct
  source 1..20: mol_type = other RNA
ccaaagcaaaagcaaaattc

SEQ ID NO: 28855 - RNA, 20 nt, synthetic construct
  source 1..20: mol_type = other RNA
ccaaagcaaaccagacattt

SEQ ID NO: 28856 - RNA, 20 nt, synthetic construct
  source 1..20: mol_type = other RNA
ccaaagcaaacgtgcacacc

SEQ ID NO: 28857 - RNA, 20 nt, synthetic construct
  source 1..20: mol_type = other RNA
ccaaagcaagccttggcaag

SEQ ID NO: 28858 - RNA, 20 nt, synthetic construct
  source 1..20: mol_type = other RNA
ccaaagcagaaatacagacc

SEQ ID NO: 28859 - RNA, 20 nt, synthetic construct
  source 1..20: mol_type = other RNA
ccaaagctggcatgttggat

SEQ ID NO: 28860 - RNA, 20 nt, synthetic construct
  source 1..20: mol_type = other RNA
ccaaaggactgggatcctaa

SEQ ID NO: 28861 - RNA, 20 nt, synthetic construct
  source 1..20: mol_type = other RNA
ccaaaggtagaaacatccca

SEQ ID NO: 28862 - RNA, 20 nt, synthetic construct
  source 1..20: mol_type = other RNA
ccaaagtatgcatagcaggg

SEQ ID NO: 28863 - RNA, 20 nt, synthetic construct
  source 1..20: mol_type = other RNA
ccaaagtgagcagaaggagg

SEQ ID NO: 28864 - RNA, 20 nt, synthetic construct
  source 1..20: mol_type = other RNA
ccaaataaaacacaaggaca

SEQ ID NO: 28865 - RNA, 20 nt, synthetic construct
  source 1..20: mol_type = other RNA
ccaaataacatgcatatgtt

SEQ ID NO: 28866 - RNA, 20 nt, synthetic construct
  source 1..20: mol_type = other RNA
ccaaataatcccgcaccttg

SEQ ID NO: 28867 - RNA, 20 nt, synthetic construct
  source 1..20: mol_type = other RNA
ccaaatacctctgaatgtga

SEQ ID NO: 28868 - RNA, 20 nt, synthetic construct
  source 1..20: mol_type = other RNA
ccaaatatccatgttttaat

SEQ ID NO: 28869 - RNA, 20 nt, synthetic construct
  source 1..20: mol_type = other RNA
ccaaatcatgaaagtggaga

SEQ ID NO: 28870 - RNA, 20 nt, synthetic construct
  source 1..20: mol_type = other RNA
ccaaatccaggatggcatga

SEQ ID NO: 28871 - RNA, 20 nt, synthetic construct
  source 1..20: mol_type = other RNA
ccaaatccctgatcaagttg

SEQ ID NO: 28872 - RNA, 20 nt, synthetic construct
  source 1..20: mol_type = other RNA
ccaaatgaaaggcgtcgggg

SEQ ID NO: 28873 - RNA, 20 nt, synthetic construct
  source 1..20: mol_type = other RNA
ccaaatgcaccaacacctgc

SEQ ID NO: 28874 - RNA, 20 nt, synthetic construct
  source 1..20: mol_type = other RNA
ccaaatgcagaaaataaacc

SEQ ID NO: 28875 - RNA, 20 nt, synthetic construct
  source 1..20: mol_type = other RNA
ccaaatgggagcatgcacac

SEQ ID NO: 28876 - RNA, 20 nt, synthetic construct
  source 1..20: mol_type = other RNA
ccaaatgtctgtctttatgc

SEQ ID NO: 28877 - RNA, 20 nt, synthetic construct
  source 1..20: mol_type = other RNA
ccaaatgtcttaagaaggaa

SEQ ID NO: 28878 - RNA, 20 nt, synthetic construct
  source 1..20: mol_type = other RNA
ccaaatgtggatagtgcttt

SEQ ID NO: 28879 - RNA, 20 nt, synthetic construct
  source 1..20: mol_type = other RNA
ccaaattaaaggatgtcaac

SEQ ID NO: 28880 - RNA, 20 nt, synthetic construct
  source 1..20: mol_type = other RNA
ccaaattagctttctcccag

SEQ ID NO: 28881 - RNA, 20 nt, synthetic construct
  source 1..20: mol_type = other RNA
ccaaattattgacaagacgt

SEQ ID NO: 28882 - RNA, 20 nt, synthetic construct
  source 1..20: mol_type = other RNA
ccaaattatttgagagtaag

SEQ ID NO: 28883 - RNA, 20 nt, synthetic construct
  source 1..20: mol_type = other RNA
ccaaattcaaagcaagttaa

SEQ ID NO: 28884 - RNA, 20 nt, synthetic construct
  source 1..20: mol_type = other RNA
ccaaattcacagcatgaata

SEQ ID NO: 28885 - RNA, 20 nt, synthetic construct
  source 1..20: mol_type = other RNA
ccaaattcacgagactgtta

SEQ ID NO: 28886 - RNA, 20 nt, synthetic construct
  source 1..20: mol_type = other RNA
ccaaattggcatttaaaaga

SEQ ID NO: 28887 - RNA, 20 nt, synthetic construct
  source 1..20: mol_type = other RNA
ccaacaaacaattagcacct

SEQ ID NO: 28888 - RNA, 20 nt, synthetic construct
  source 1..20: mol_type = other RNA
ccaacaacaaaaaatcttaa

SEQ ID NO: 28889 - RNA, 20 nt, synthetic construct
  source 1..20: mol_type = other RNA
ccaacaaccataatgagtaa

SEQ ID NO: 28890 - RNA, 20 nt, synthetic construct
  source 1..20: mol_type = other RNA
ccaacaagggttggtgcttc

SEQ ID NO: 28891 - RNA, 20 nt, synthetic construct
  source 1..20: mol_type = other RNA
ccaacaattcaacaatagca

SEQ ID NO: 28892 - RNA, 20 nt, synthetic construct
  source 1..20: mol_type = other RNA
ccaacacaaagccttctcta

SEQ ID NO: 28893 - RNA, 20 nt, synthetic construct
  source 1..20: mol_type = other RNA
ccaacacatggggcattaat

SEQ ID NO: 28894 - RNA, 20 nt, synthetic construct
  source 1..20: mol_type = other RNA
ccaacacctgcagtggcgtg

SEQ ID NO: 28895 - RNA, 20 nt, synthetic construct
  source 1..20: mol_type = other RNA
ccaacagaagaagtttctag

SEQ ID NO: 28896 - RNA, 20 nt, synthetic construct
  source 1..20: mol_type = other RNA
ccaacagatcctcacatcag

SEQ ID NO: 28897 - RNA, 20 nt, synthetic construct
  source 1..20: mol_type = other RNA
ccaacaggctgagtgcggtg

SEQ ID NO: 28898 - RNA, 20 nt, synthetic construct
  source 1..20: mol_type = other RNA
ccaacagggccactgagagc

SEQ ID NO: 28899 - RNA, 20 nt, synthetic construct
  source 1..20: mol_type = other RNA
ccaacagggttttgttttgt

SEQ ID NO: 28900 - RNA, 20 nt, synthetic construct
  source 1..20: mol_type = other RNA
ccaacagttactttcctttt

SEQ ID NO: 28901 - RNA, 20 nt, synthetic construct
  source 1..20: mol_type = other RNA
ccaacagtttacacgccttc

SEQ ID NO: 28902 - RNA, 20 nt, synthetic construct
  source 1..20: mol_type = other RNA
ccaacatccacagctttctt

SEQ ID NO: 28903 - RNA, 20 nt, synthetic construct
  source 1..20: mol_type = other RNA
ccaacatcgtaaaacctcat

SEQ ID NO: 28904 - RNA, 20 nt, synthetic construct
  source 1..20: mol_type = other RNA
ccaacatgagagaaaattgt

SEQ ID NO: 28905 - RNA, 20 nt, synthetic construct
  source 1..20: mol_type = other RNA
ccaacatgccagctttggct

SEQ ID NO: 28906 - RNA, 20 nt, synthetic construct
  source 1..20: mol_type = other RNA
ccaacatgctcttaagtatt

SEQ ID NO: 28907 - RNA, 20 nt, synthetic construct
  source 1..20: mol_type = other RNA
ccaacatggcacatgtctac

SEQ ID NO: 28908 - RNA, 20 nt, synthetic construct
  source 1..20: mol_type = other RNA
ccaacattgagtttcaatga

SEQ ID NO: 28909 - RNA, 20 nt, synthetic construct
  source 1..20: mol_type = other RNA
ccaaccaagcccaacttttt

SEQ ID NO: 28910 - RNA, 20 nt, synthetic construct
  source 1..20: mol_type = other RNA
ccaaccaatcgcagggccat

SEQ ID NO: 28911 - RNA, 20 nt, synthetic construct
  source 1..20: mol_type = other RNA
ccaaccactgaatcagattt

SEQ ID NO: 28912 - RNA, 20 nt, synthetic construct
  source 1..20: mol_type = other RNA
ccaaccatcttcttagtgtt

SEQ ID NO: 28913 - RNA, 20 nt, synthetic construct
  source 1..20: mol_type = other RNA
ccaaccattactcttctact

SEQ ID NO: 28914 - RNA, 20 nt, synthetic construct
  source 1..20: mol_type = other RNA
ccaacccattccaggtttta

SEQ ID NO: 28915 - RNA, 20 nt, synthetic construct
  source 1..20: mol_type = other RNA
ccaaccctacctagggtgta

SEQ ID NO: 28916 - RNA, 20 nt, synthetic construct
  source 1..20: mol_type = other RNA
ccaacccttgttggacagct

SEQ ID NO: 28917 - RNA, 20 nt, synthetic construct
  source 1..20: mol_type = other RNA
ccaacctgattagaggctgc

SEQ ID NO: 28918 - RNA, 20 nt, synthetic construct
  source 1..20: mol_type = other RNA
ccaacgaccggacgtggtgg

SEQ ID NO: 28919 - RNA, 20 nt, synthetic construct
  source 1..20: mol_type = other RNA
ccaacgctttttatggaaac

SEQ ID NO: 28920 - RNA, 20 nt, synthetic construct
  source 1..20: mol_type = other RNA
ccaactatttcactaaataa

SEQ ID NO: 28921 - RNA, 20 nt, synthetic construct
  source 1..20: mol_type = other RNA
ccaactcaaaaaagaaaaac

SEQ ID NO: 28922 - RNA, 20 nt, synthetic construct
  source 1..20: mol_type = other RNA
ccaactccacattgtcttaa

SEQ ID NO: 28923 - RNA, 20 nt, synthetic construct
  source 1..20: mol_type = other RNA
ccaactctggcaggtcacct

SEQ ID NO: 28924 - RNA, 20 nt, synthetic construct
  source 1..20: mol_type = other RNA
ccaactctttctttgatttt

SEQ ID NO: 28925 - RNA, 20 nt, synthetic construct
  source 1..20: mol_type = other RNA
ccaactgaagcggggctgcc

SEQ ID NO: 28926 - RNA, 20 nt, synthetic construct
  source 1..20: mol_type = other RNA
ccaactgcaaaactttcttc

SEQ ID NO: 28927 - RNA, 20 nt, synthetic construct
  source 1..20: mol_type = other RNA
ccaactgcagtctgtcctcg

SEQ ID NO: 28928 - RNA, 20 nt, synthetic construct
  source 1..20: mol_type = other RNA
ccaactgtataaatgttcag

SEQ ID NO: 28929 - RNA, 20 nt, synthetic construct
  source 1..20: mol_type = other RNA
ccaactgtcctctcttgttg

SEQ ID NO: 28930 - RNA, 20 nt, synthetic construct
  source 1..20: mol_type = other RNA
ccaacttcacaccatttaga

SEQ ID NO: 28931 - RNA, 20 nt, synthetic construct
  source 1..20: mol_type = other RNA
ccaacttccagcaagacttt

SEQ ID NO: 28932 - RNA, 20 nt, synthetic construct
  source 1..20: mol_type = other RNA
ccaactttaagcaaaatttt

SEQ ID NO: 28933 - RNA, 20 nt, synthetic construct
  source 1..20: mol_type = other RNA
ccaactttttctttttagta

SEQ ID NO: 28934 - RNA, 20 nt, synthetic construct
  source 1..20: mol_type = other RNA
ccaagaaaaagcagagaaac

SEQ ID NO: 28935 - RNA, 20 nt, synthetic construct
  source 1..20: mol_type = other RNA
ccaagaaagcaggtcatgac

SEQ ID NO: 28936 - RNA, 20 nt, synthetic construct
  source 1..20: mol_type = other RNA
ccaagaaaggacttcagtcc

SEQ ID NO: 28937 - RNA, 20 nt, synthetic construct
  source 1..20: mol_type = other RNA
ccaagaacaaccttatctat

SEQ ID NO: 28938 - RNA, 20 nt, synthetic construct
  source 1..20: mol_type = other RNA
ccaagaaccctttgttatct

SEQ ID NO: 28939 - RNA, 20 nt, synthetic construct
  source 1..20: mol_type = other RNA
ccaagaagacatgataaata

SEQ ID NO: 28940 - RNA, 20 nt, synthetic construct
  source 1..20: mol_type = other RNA
ccaagaaggctagcacagag

SEQ ID NO: 28941 - RNA, 20 nt, synthetic construct
  source 1..20: mol_type = other RNA
ccaagaatttcatgcctttc

SEQ ID NO: 28942 - RNA, 20 nt, synthetic construct
  source 1..20: mol_type = other RNA
ccaagaattttccattcatg

SEQ ID NO: 28943 - RNA, 20 nt, synthetic construct
  source 1..20: mol_type = other RNA
ccaagacaggaagaattatt

SEQ ID NO: 28944 - RNA, 20 nt, synthetic construct
  source 1..20: mol_type = other RNA
ccaagacatgttaggttgaa

SEQ ID NO: 28945 - RNA, 20 nt, synthetic construct
  source 1..20: mol_type = other RNA
ccaagagaggaataaatggt

SEQ ID NO: 28946 - RNA, 20 nt, synthetic construct
  source 1..20: mol_type = other RNA
ccaagagcatagactttaga

SEQ ID NO: 28947 - RNA, 20 nt, synthetic construct
  source 1..20: mol_type = other RNA
ccaagagcgaggcctggaac

SEQ ID NO: 28948 - RNA, 20 nt, synthetic construct
  source 1..20: mol_type = other RNA
ccaagagtgtggctttaagg

SEQ ID NO: 28949 - RNA, 20 nt, synthetic construct
  source 1..20: mol_type = other RNA
ccaagagttgctgacttcct

SEQ ID NO: 28950 - RNA, 20 nt, synthetic construct
  source 1..20: mol_type = other RNA
ccaagatcataagcttttat

SEQ ID NO: 28951 - RNA, 20 nt, synthetic construct
  source 1..20: mol_type = other RNA
ccaagatctgtttttcaaaa

SEQ ID NO: 28952 - RNA, 20 nt, synthetic construct
  source 1..20: mol_type = other RNA
ccaagattgaaaatggttta

SEQ ID NO: 28953 - RNA, 20 nt, synthetic construct
  source 1..20: mol_type = other RNA
ccaagattttcccaatctct

SEQ ID NO: 28954 - RNA, 20 nt, synthetic construct
  source 1..20: mol_type = other RNA
ccaagcaacactaaagattt

SEQ ID NO: 28955 - RNA, 20 nt, synthetic construct
  source 1..20: mol_type = other RNA
ccaagcaacttgatcaggga

SEQ ID NO: 28956 - RNA, 20 nt, synthetic construct
  source 1..20: mol_type = other RNA
ccaagcaagtaaaagaagat

SEQ ID NO: 28957 - RNA, 20 nt, synthetic construct
  source 1..20: mol_type = other RNA
ccaagcaagtgtggtggtct

SEQ ID NO: 28958 - RNA, 20 nt, synthetic construct
  source 1..20: mol_type = other RNA
ccaagcacaaacctggcaat

SEQ ID NO: 28959 - RNA, 20 nt, synthetic construct
  source 1..20: mol_type = other RNA
ccaagcacacagtttgagaa

SEQ ID NO: 28960 - RNA, 20 nt, synthetic construct
  source 1..20: mol_type = other RNA
ccaagcacactttccttgga

SEQ ID NO: 28961 - RNA, 20 nt, synthetic construct
  source 1..20: mol_type = other RNA
ccaagcagggacgggcgggg

SEQ ID NO: 28962 - RNA, 20 nt, synthetic construct
  source 1..20: mol_type = other RNA
ccaagcatggtggtaggtgt

SEQ ID NO: 28963 - RNA, 20 nt, synthetic construct
  source 1..20: mol_type = other RNA
ccaagccaaattaataaaat

SEQ ID NO: 28964 - RNA, 20 nt, synthetic construct
  source 1..20: mol_type = other RNA
ccaagccacagcgtggaatg

SEQ ID NO: 28965 - RNA, 20 nt, synthetic construct
  source 1..20: mol_type = other RNA
ccaagcccaactttttcttt

SEQ ID NO: 28966 - RNA, 20 nt, synthetic construct
  source 1..20: mol_type = other RNA
ccaagcccggcacggtggct

SEQ ID NO: 28967 - RNA, 20 nt, synthetic construct
  source 1..20: mol_type = other RNA
ccaagccctgccttaaaaca

SEQ ID NO: 28968 - RNA, 20 nt, synthetic construct
  source 1..20: mol_type = other RNA
ccaagccttaaaagtgctgc

SEQ ID NO: 28969 - RNA, 20 nt, synthetic construct
  source 1..20: mol_type = other RNA
ccaagctaccatttattcct

SEQ ID NO: 28970 - RNA, 20 nt, synthetic construct
  source 1..20: mol_type = other RNA
ccaagcttaggtcagattcc

SEQ ID NO: 28971 - RNA, 20 nt, synthetic construct
  source 1..20: mol_type = other RNA
ccaaggaaagtgtgcttggg

SEQ ID NO: 28972 - RNA, 20 nt, synthetic construct
  source 1..20: mol_type = other RNA
ccaaggaaggcagggtagga

SEQ ID NO: 28973 - RNA, 20 nt, synthetic construct
  source 1..20: mol_type = other RNA
ccaaggacagaaattcaact

SEQ ID NO: 28974 - RNA, 20 nt, synthetic construct
  source 1..20: mol_type = other RNA
ccaaggagggaggattgttt

SEQ ID NO: 28975 - RNA, 20 nt, synthetic construct
  source 1..20: mol_type = other RNA
ccaaggcaggactgcttgag

SEQ ID NO: 28976 - RNA, 20 nt, synthetic construct
  source 1..20: mol_type = other RNA
ccaaggctaagttgagaaac

SEQ ID NO: 28977 - RNA, 20 nt, synthetic construct
  source 1..20: mol_type = other RNA
ccaaggctgcccgctccggc

SEQ ID NO: 28978 - RNA, 20 nt, synthetic construct
  source 1..20: mol_type = other RNA
ccaaggctggagtgcagtgg

SEQ ID NO: 28979 - RNA, 20 nt, synthetic construct
  source 1..20: mol_type = other RNA
ccaaggcttgctttggctag

SEQ ID NO: 28980 - RNA, 20 nt, synthetic construct
  source 1..20: mol_type = other RNA
ccaagggtgtgtttaatttc

SEQ ID NO: 28981 - RNA, 20 nt, synthetic construct
  source 1..20: mol_type = other RNA
ccaagggtttgtcaattttg

SEQ ID NO: 28982 - RNA, 20 nt, synthetic construct
  source 1..20: mol_type = other RNA
ccaagggttttggtatgttg

SEQ ID NO: 28983 - RNA, 20 nt, synthetic construct
  source 1..20: mol_type = other RNA
ccaaggtacaattacacatc

SEQ ID NO: 28984 - RNA, 20 nt, synthetic construct
  source 1..20: mol_type = other RNA
ccaaggttgcctgttcactc

SEQ ID NO: 28985 - RNA, 20 nt, synthetic construct
  source 1..20: mol_type = other RNA
ccaaggtttctctccaaggt

SEQ ID NO: 28986 - RNA, 20 nt, synthetic construct
  source 1..20: mol_type = other RNA
ccaagtaaaagcaacctcat

SEQ ID NO: 28987 - RNA, 20 nt, synthetic construct
  source 1..20: mol_type = other RNA
ccaagtaaacaactgactct

SEQ ID NO: 28988 - RNA, 20 nt, synthetic construct
  source 1..20: mol_type = other RNA
ccaagtaaacctcaagtctt

SEQ ID NO: 28989 - RNA, 20 nt, synthetic construct
  source 1..20: mol_type = other RNA
ccaagtagctgggatcacag

SEQ ID NO: 28990 - RNA, 20 nt, synthetic construct
  source 1..20: mol_type = other RNA
ccaagtataagatgatgata

SEQ ID NO: 28991 - RNA, 20 nt, synthetic construct
  source 1..20: mol_type = other RNA
ccaagtattgtatcaatgtt

SEQ ID NO: 28992 - RNA, 20 nt, synthetic construct
  source 1..20: mol_type = other RNA
ccaagtatttctcatctgtc

SEQ ID NO: 28993 - RNA, 20 nt, synthetic construct
  source 1..20: mol_type = other RNA
ccaagtcagcacttctgata

SEQ ID NO: 28994 - RNA, 20 nt, synthetic construct
  source 1..20: mol_type = other RNA
ccaagtcccggaagctgggc

SEQ ID NO: 28995 - RNA, 20 nt, synthetic construct
  source 1..20: mol_type = other RNA
ccaagtccgtgcatgcctct

SEQ ID NO: 28996 - RNA, 20 nt, synthetic construct
  source 1..20: mol_type = other RNA
ccaagtctcatgcaattccc

SEQ ID NO: 28997 - RNA, 20 nt, synthetic construct
  source 1..20: mol_type = other RNA
ccaagtgcccattaacagat

SEQ ID NO: 28998 - RNA, 20 nt, synthetic construct
  source 1..20: mol_type = other RNA
ccaagtgccgcgttttttgt

SEQ ID NO: 28999 - RNA, 20 nt, synthetic construct
  source 1..20: mol_type = other RNA
ccaagtgctgtgattgcagg

SEQ ID NO: 29000 - RNA, 20 nt, synthetic construct
  source 1..20: mol_type = other RNA
ccaagtggagcctgctctgc

SEQ ID NO: 29001 - RNA, 20 nt, synthetic construct
  source 1..20: mol_type = other RNA
ccaagtgtaaaaagacatta

SEQ ID NO: 29002 - RNA, 20 nt, synthetic construct
  source 1..20: mol_type = other RNA
ccaagttactagaagcactt

SEQ ID NO: 29003 - RNA, 20 nt, synthetic construct
  source 1..20: mol_type = other RNA
ccaagttgaatttctgtcct

SEQ ID NO: 29004 - RNA, 20 nt, synthetic construct
  source 1..20: mol_type = other RNA
ccaagtttaaccaattatgc

SEQ ID NO: 29005 - RNA, 20 nt, synthetic construct
  source 1..20: mol_type = other RNA
ccaagtttctagccataatc

SEQ ID NO: 29006 - RNA, 20 nt, synthetic construct
  source 1..20: mol_type = other RNA
ccaagtttggttcatttcag

SEQ ID NO: 29007 - RNA, 20 nt, synthetic construct
  source 1..20: mol_type = other RNA
ccaataaaagcctcatttga

SEQ ID NO: 29008 - RNA, 20 nt, synthetic construct
  source 1..20: mol_type = other RNA
ccaataagaagtgaaaaatg

SEQ ID NO: 29009 - RNA, 20 nt, synthetic construct
  source 1..20: mol_type = other RNA
ccaataagttaactgaaatc

SEQ ID NO: 29010 - RNA, 20 nt, synthetic construct
  source 1..20: mol_type = other RNA
ccaatatcacactgtttgat

SEQ ID NO: 29011 - RNA, 20 nt, synthetic construct
  source 1..20: mol_type = other RNA
ccaatatccctgataatcac

SEQ ID NO: 29012 - RNA, 20 nt, synthetic construct
  source 1..20: mol_type = other RNA
ccaatatctatcagggctga

SEQ ID NO: 29013 - RNA, 20 nt, synthetic construct
  source 1..20: mol_type = other RNA
ccaatcaaatccagtcttca

SEQ ID NO: 29014 - RNA, 20 nt, synthetic construct
  source 1..20: mol_type = other RNA
ccaatcaataattctgtgcc

SEQ ID NO: 29015 - RNA, 20 nt, synthetic construct
  source 1..20: mol_type = other RNA
ccaatcactggctagtaggc

SEQ ID NO: 29016 - RNA, 20 nt, synthetic construct
  source 1..20: mol_type = other RNA
ccaatcatgttctttatagc

SEQ ID NO: 29017 - RNA, 20 nt, synthetic construct
  source 1..20: mol_type = other RNA
ccaatccgggaacatgacat

SEQ ID NO: 29018 - RNA, 20 nt, synthetic construct
  source 1..20: mol_type = other RNA
ccaatcctcagccccctccc

SEQ ID NO: 29019 - RNA, 20 nt, synthetic construct
  source 1..20: mol_type = other RNA
ccaatccttccttcatgtcc

SEQ ID NO: 29020 - RNA, 20 nt, synthetic construct
  source 1..20: mol_type = other RNA
ccaatcctttgtgcaggtct

SEQ ID NO: 29021 - RNA, 20 nt, synthetic construct
  source 1..20: mol_type = other RNA
ccaatcgcagggccattctg

SEQ ID NO: 29022 - RNA, 20 nt, synthetic construct
  source 1..20: mol_type = other RNA
ccaatctacaggtcggaagg

SEQ ID NO: 29023 - RNA, 20 nt, synthetic construct
  source 1..20: mol_type = other RNA
ccaatctctggtattctgaa

SEQ ID NO: 29024 - RNA, 20 nt, synthetic construct
  source 1..20: mol_type = other RNA
ccaatcttcccaatcctttg

SEQ ID NO: 29025 - RNA, 20 nt, synthetic construct
  source 1..20: mol_type = other RNA
ccaatgcctgcgattgcagg

SEQ ID NO: 29026 - RNA, 20 nt, synthetic construct
  source 1..20: mol_type = other RNA
ccaatgcttgaagagcgctt

SEQ ID NO: 29027 - RNA, 20 nt, synthetic construct
  source 1..20: mol_type = other RNA
ccaatgtcagagatctgaaa

SEQ ID NO: 29028 - RNA, 20 nt, synthetic construct
  source 1..20: mol_type = other RNA
ccaatgttctcttttcctcg

SEQ ID NO: 29029 - RNA, 20 nt, synthetic construct
  source 1..20: mol_type = other RNA
ccaattaaactatagaccca

SEQ ID NO: 29030 - RNA, 20 nt, synthetic construct
  source 1..20: mol_type = other RNA
ccaattaccataaagtcttc

SEQ ID NO: 29031 - RNA, 20 nt, synthetic construct
  source 1..20: mol_type = other RNA
ccaattacttccagtgtttt

SEQ ID NO: 29032 - RNA, 20 nt, synthetic construct
  source 1..20: mol_type = other RNA
ccaattatgctgagtgaatg

SEQ ID NO: 29033 - RNA, 20 nt, synthetic construct
  source 1..20: mol_type = other RNA
ccaattctccctgaaattgt

SEQ ID NO: 29034 - RNA, 20 nt, synthetic construct
  source 1..20: mol_type = other RNA
ccaattgcagaaaaatagaa

SEQ ID NO: 29035 - RNA, 20 nt, synthetic construct
  source 1..20: mol_type = other RNA
ccaattgttaacatttcttc

SEQ ID NO: 29036 - RNA, 20 nt, synthetic construct
  source 1..20: mol_type = other RNA
ccaatttaccatctgacata

SEQ ID NO: 29037 - RNA, 20 nt, synthetic construct
  source 1..20: mol_type = other RNA
ccaatttctttggctgttag

SEQ ID NO: 29038 - RNA, 20 nt, synthetic construct
  source 1..20: mol_type = other RNA
ccaatttgggatatagctac

SEQ ID NO: 29039 - RNA, 20 nt, synthetic construct
  source 1..20: mol_type = other RNA
ccaattttcatagcagcatt

SEQ ID NO: 29040 - RNA, 20 nt, synthetic construct
  source 1..20: mol_type = other RNA
ccaattttttggcatacaac

SEQ ID NO: 29041 - RNA, 20 nt, synthetic construct
  source 1..20: mol_type = other RNA
ccacaaaagaaaattttctg

SEQ ID NO: 29042 - RNA, 20 nt, synthetic construct
  source 1..20: mol_type = other RNA
ccacaaaatatgaagcatta

SEQ ID NO: 29043 - RNA, 20 nt, synthetic construct
  source 1..20: mol_type = other RNA
ccacaaacatgaataaccaa

SEQ ID NO: 29044 - RNA, 20 nt, synthetic construct
  source 1..20: mol_type = other RNA
ccacaaagtccccacatgac

SEQ ID NO: 29045 - RNA, 20 nt, synthetic construct
  source 1..20: mol_type = other RNA
ccacaaatggagtgacttaa

SEQ ID NO: 29046 - RNA, 20 nt, synthetic construct
  source 1..20: mol_type = other RNA
ccacaacattgtgcaaccat

SEQ ID NO: 29047 - RNA, 20 nt, synthetic construct
  source 1..20: mol_type = other RNA
ccacaaccactggggagtgt

SEQ ID NO: 29048 - RNA, 20 nt, synthetic construct
  source 1..20: mol_type = other RNA
ccacaagaaaaacctaaacc

SEQ ID NO: 29049 - RNA, 20 nt, synthetic construct
  source 1..20: mol_type = other RNA
ccacaagacataagcatttt

SEQ ID NO: 29050 - RNA, 20 nt, synthetic construct
  source 1..20: mol_type = other RNA
ccacaagccacatgtggtta

SEQ ID NO: 29051 - RNA, 20 nt, synthetic construct
  source 1..20: mol_type = other RNA
ccacaaggattaatctttct

SEQ ID NO: 29052 - RNA, 20 nt, synthetic construct
  source 1..20: mol_type = other RNA
ccacaagtagcagggactac

SEQ ID NO: 29053 - RNA, 20 nt, synthetic construct
  source 1..20: mol_type = other RNA
ccacaatcttacccccatca

SEQ ID NO: 29054 - RNA, 20 nt, synthetic construct
  source 1..20: mol_type = other RNA
ccacaatgagacatttgagg

SEQ ID NO: 29055 - RNA, 20 nt, synthetic construct
  source 1..20: mol_type = other RNA
ccacacaatggtcagagttg

SEQ ID NO: 29056 - RNA, 20 nt, synthetic construct
  source 1..20: mol_type = other RNA
ccacacacgaagtagttttt

SEQ ID NO: 29057 - RNA, 20 nt, synthetic construct
  source 1..20: mol_type = other RNA
ccacacagagaacagcatta

SEQ ID NO: 29058 - RNA, 20 nt, synthetic construct
  source 1..20: mol_type = other RNA
ccacacagtacaaggctaga

SEQ ID NO: 29059 - RNA, 20 nt, synthetic construct
  source 1..20: mol_type = other RNA
ccacaccacatccagctaat

SEQ ID NO: 29060 - RNA, 20 nt, synthetic construct
  source 1..20: mol_type = other RNA
ccacacctgcaatcacagca

SEQ ID NO: 29061 - RNA, 20 nt, synthetic construct
  source 1..20: mol_type = other RNA
ccacacctggcccctttcaa

SEQ ID NO: 29062 - RNA, 20 nt, synthetic construct
  source 1..20: mol_type = other RNA
ccacactccagcatccctcc

SEQ ID NO: 29063 - RNA, 20 nt, synthetic construct
  source 1..20: mol_type = other RNA
ccacactcttggtctttctc

SEQ ID NO: 29064 - RNA, 20 nt, synthetic construct
  source 1..20: mol_type = other RNA
ccacactgacaggacagagc

SEQ ID NO: 29065 - RNA, 20 nt, synthetic construct
  source 1..20: mol_type = other RNA
ccacacttgcttgggaacag

SEQ ID NO: 29066 - RNA, 20 nt, synthetic construct
  source 1..20: mol_type = other RNA
ccacagagcctaaaataggc

SEQ ID NO: 29067 - RNA, 20 nt, synthetic construct
  source 1..20: mol_type = other RNA
ccacagaggctttttatatt

SEQ ID NO: 29068 - RNA, 20 nt, synthetic construct
  source 1..20: mol_type = other RNA
ccacagagttcagcttacag

SEQ ID NO: 29069 - RNA, 20 nt, synthetic construct
  source 1..20: mol_type = other RNA
ccacagataatttcttcaga

SEQ ID NO: 29070 - RNA, 20 nt, synthetic construct
  source 1..20: mol_type = other RNA
ccacagatctttttgtgtat

SEQ ID NO: 29071 - RNA, 20 nt, synthetic construct
  source 1..20: mol_type = other RNA
ccacagcagggctcctccaa

SEQ ID NO: 29072 - RNA, 20 nt, synthetic construct
  source 1..20: mol_type = other RNA
ccacagcgcccggcccgtta

SEQ ID NO: 29073 - RNA, 20 nt, synthetic construct
  source 1..20: mol_type = other RNA
ccacagcgtggaatggtcaa

SEQ ID NO: 29074 - RNA, 20 nt, synthetic construct
  source 1..20: mol_type = other RNA
ccacagcgttgttcagttga

SEQ ID NO: 29075 - RNA, 20 nt, synthetic construct
  source 1..20: mol_type = other RNA
ccacagctacactcaataca

SEQ ID NO: 29076 - RNA, 20 nt, synthetic construct
  source 1..20: mol_type = other RNA
ccacagctatcaggccttcc

SEQ ID NO: 29077 - RNA, 20 nt, synthetic construct
  source 1..20: mol_type = other RNA
ccacagctttcttttccaac

SEQ ID NO: 29078 - RNA, 20 nt, synthetic construct
  source 1..20: mol_type = other RNA
ccacaggctctcttcaccaa

SEQ ID NO: 29079 - RNA, 20 nt, synthetic construct
  source 1..20: mol_type = other RNA
ccacaggctttgacttctca

SEQ ID NO: 29080 - RNA, 20 nt, synthetic construct
  source 1..20: mol_type = other RNA
ccacagggcccagcctcaac

SEQ ID NO: 29081 - RNA, 20 nt, synthetic construct
  source 1..20: mol_type = other RNA
ccacagtatgctgtttacat

SEQ ID NO: 29082 - RNA, 20 nt, synthetic construct
  source 1..20: mol_type = other RNA
ccacagtgactttactgttc

SEQ ID NO: 29083 - RNA, 20 nt, synthetic construct
  source 1..20: mol_type = other RNA
ccacagtttgaaactttaag

SEQ ID NO: 29084 - RNA, 20 nt, synthetic construct
  source 1..20: mol_type = other RNA
ccacataaagtcttgctgga

SEQ ID NO: 29085 - RNA, 20 nt, synthetic construct
  source 1..20: mol_type = other RNA
ccacataaatcacaggaaag

SEQ ID NO: 29086 - RNA, 20 nt, synthetic construct
  source 1..20: mol_type = other RNA
ccacataattgaacccactg

SEQ ID NO: 29087 - RNA, 20 nt, synthetic construct
  source 1..20: mol_type = other RNA
ccacatacatagtattaaat

SEQ ID NO: 29088 - RNA, 20 nt, synthetic construct
  source 1..20: mol_type = other RNA
ccacataggatagttaaaca

SEQ ID NO: 29089 - RNA, 20 nt, synthetic construct
  source 1..20: mol_type = other RNA
ccacatattttaaaagtcag

SEQ ID NO: 29090 - RNA, 20 nt, synthetic construct
  source 1..20: mol_type = other RNA
ccacatccagctaattttca

SEQ ID NO: 29091 - RNA, 20 nt, synthetic construct
  source 1..20: mol_type = other RNA
ccacatccttgccaacagtt

SEQ ID NO: 29092 - RNA, 20 nt, synthetic construct
  source 1..20: mol_type = other RNA
ccacatgactggccatcctt

SEQ ID NO: 29093 - RNA, 20 nt, synthetic construct
  source 1..20: mol_type = other RNA
ccacatgcttccaaaagcag

SEQ ID NO: 29094 - RNA, 20 nt, synthetic construct
  source 1..20: mol_type = other RNA
ccacatgtggcttgtggcta

SEQ ID NO: 29095 - RNA, 20 nt, synthetic construct
  source 1..20: mol_type = other RNA
ccacatgtggttattgagtc

SEQ ID NO: 29096 - RNA, 20 nt, synthetic construct
  source 1..20: mol_type = other RNA
ccacatgttactcattatgg

SEQ ID NO: 29097 - RNA, 20 nt, synthetic construct
  source 1..20: mol_type = other RNA
ccacattagccactctgaat

SEQ ID NO: 29098 - RNA, 20 nt, synthetic construct
  source 1..20: mol_type = other RNA
ccacattcaacaacatggat

SEQ ID NO: 29099 - RNA, 20 nt, synthetic construct
  source 1..20: mol_type = other RNA
ccacattcccaaatgtctta

SEQ ID NO: 29100 - RNA, 20 nt, synthetic construct
  source 1..20: mol_type = other RNA
ccacattcggccaagatctg

SEQ ID NO: 29101 - RNA, 20 nt, synthetic construct
  source 1..20: mol_type = other RNA
ccacattgtcttaattatta

SEQ ID NO: 29102 - RNA, 20 nt, synthetic construct
  source 1..20: mol_type = other RNA
ccacatttcatagcagaatg

SEQ ID NO: 29103 - RNA, 20 nt, synthetic construct
  source 1..20: mol_type = other RNA
ccacatttctaatttccaag

SEQ ID NO: 29104 - RNA, 20 nt, synthetic construct
  source 1..20: mol_type = other RNA
ccacatttctacacaacatg

SEQ ID NO: 29105 - RNA, 20 nt, synthetic construct
  source 1..20: mol_type = other RNA
ccacatttggttttactact

SEQ ID NO: 29106 - RNA, 20 nt, synthetic construct
  source 1..20: mol_type = other RNA
ccacattttaccaaaacagc

SEQ ID NO: 29107 - RNA, 20 nt, synthetic construct
  source 1..20: mol_type = other RNA
ccacattttgtgacaagttc

SEQ ID NO: 29108 - RNA, 20 nt, synthetic construct
  source 1..20: mol_type = other RNA
ccacattttgttcattcatc

SEQ ID NO: 29109 - RNA, 20 nt, synthetic construct
  source 1..20: mol_type = other RNA
ccacattttttggtttgtat

SEQ ID NO: 29110 - RNA, 20 nt, synthetic construct
  source 1..20: mol_type = other RNA
ccaccaagaaaaagcagaga

SEQ ID NO: 29111 - RNA, 20 nt, synthetic construct
  source 1..20: mol_type = other RNA
ccaccaagccctgccttaaa

SEQ ID NO: 29112 - RNA, 20 nt, synthetic construct
  source 1..20: mol_type = other RNA
ccaccacacttgcttgggaa

SEQ ID NO: 29113 - RNA, 20 nt, synthetic construct
  source 1..20: mol_type = other RNA
ccaccacattcggccaagat

SEQ ID NO: 29114 - RNA, 20 nt, synthetic construct
  source 1..20: mol_type = other RNA
ccaccacgtccggtcgttgg

SEQ ID NO: 29115 - RNA, 20 nt, synthetic construct
  source 1..20: mol_type = other RNA
ccaccactaatgtcacattt

SEQ ID NO: 29116 - RNA, 20 nt, synthetic construct
  source 1..20: mol_type = other RNA
ccaccactccaccttagccc

SEQ ID NO: 29117 - RNA, 20 nt, synthetic construct
  source 1..20: mol_type = other RNA
ccaccactcccggccgtatt

SEQ ID NO: 29118 - RNA, 20 nt, synthetic construct
  source 1..20: mol_type = other RNA
ccaccagacaaaaatagagg

SEQ ID NO: 29119 - RNA, 20 nt, synthetic construct
  source 1..20: mol_type = other RNA
ccaccagcataagacccctc

SEQ ID NO: 29120 - RNA, 20 nt, synthetic construct
  source 1..20: mol_type = other RNA
ccaccagcatcttttgacgc

SEQ ID NO: 29121 - RNA, 20 nt, synthetic construct
  source 1..20: mol_type = other RNA
ccaccaggaggcggagcttg

SEQ ID NO: 29122 - RNA, 20 nt, synthetic construct
  source 1..20: mol_type = other RNA
ccaccatctctctgcctcaa

SEQ ID NO: 29123 - RNA, 20 nt, synthetic construct
  source 1..20: mol_type = other RNA
ccaccatgatgcagcccctg

SEQ ID NO: 29124 - RNA, 20 nt, synthetic construct
  source 1..20: mol_type = other RNA
ccacccaagtggagcctgct

SEQ ID NO: 29125 - RNA, 20 nt, synthetic construct
  source 1..20: mol_type = other RNA
ccacccacttgtcccatggt

SEQ ID NO: 29126 - RNA, 20 nt, synthetic construct
  source 1..20: mol_type = other RNA
ccacccatgaagccagcatt

SEQ ID NO: 29127 - RNA, 20 nt, synthetic construct
  source 1..20: mol_type = other RNA
ccacccctgctctgcacgta

SEQ ID NO: 29128 - RNA, 20 nt, synthetic construct
  source 1..20: mol_type = other RNA
ccacccgtccaatttctttg

SEQ ID NO: 29129 - RNA, 20 nt, synthetic construct
  source 1..20: mol_type = other RNA
ccaccctgccccttatcctc

SEQ ID NO: 29130 - RNA, 20 nt, synthetic construct
  source 1..20: mol_type = other RNA
ccaccctgctccagtatgac

SEQ ID NO: 29131 - RNA, 20 nt, synthetic construct
  source 1..20: mol_type = other RNA
ccacccttgatgtcacaagc

SEQ ID NO: 29132 - RNA, 20 nt, synthetic construct
  source 1..20: mol_type = other RNA
ccacccttgctgcttctacc

SEQ ID NO: 29133 - RNA, 20 nt, synthetic construct
  source 1..20: mol_type = other RNA
ccaccgcacctggccgggat

SEQ ID NO: 29134 - RNA, 20 nt, synthetic construct
  source 1..20: mol_type = other RNA
ccaccgcactcagcctgttg

SEQ ID NO: 29135 - RNA, 20 nt, synthetic construct
  source 1..20: mol_type = other RNA
ccaccgccttcctaccctgc

SEQ ID NO: 29136 - RNA, 20 nt, synthetic construct
  source 1..20: mol_type = other RNA
ccaccgcgcccggccaaata

SEQ ID NO: 29137 - RNA, 20 nt, synthetic construct
  source 1..20: mol_type = other RNA
ccaccgcgcccggcccagat

SEQ ID NO: 29138 - RNA, 20 nt, synthetic construct
  source 1..20: mol_type = other RNA
ccaccgcgcctggtgattaa

SEQ ID NO: 29139 - RNA, 20 nt, synthetic construct
  source 1..20: mol_type = other RNA
ccaccgtgcccggccagaca

SEQ ID NO: 29140 - RNA, 20 nt, synthetic construct
  source 1..20: mol_type = other RNA
ccaccgtgccgggcttggta

SEQ ID NO: 29141 - RNA, 20 nt, synthetic construct
  source 1..20: mol_type = other RNA
ccacctaactactaataaat

SEQ ID NO: 29142 - RNA, 20 nt, synthetic construct
  source 1..20: mol_type = other RNA
ccacctcagaaacaaacaaa

SEQ ID NO: 29143 - RNA, 20 nt, synthetic construct
  source 1..20: mol_type = other RNA
ccacctcagccccacaagta

SEQ ID NO: 29144 - RNA, 20 nt, synthetic construct
  source 1..20: mol_type = other RNA
ccacctcatccggtctcagt

SEQ ID NO: 29145 - RNA, 20 nt, synthetic construct
  source 1..20: mol_type = other RNA
ccacctccatcactgactgg

SEQ ID NO: 29146 - RNA, 20 nt, synthetic construct
  source 1..20: mol_type = other RNA
ccacctcctccggggaccca

SEQ ID NO: 29147 - RNA, 20 nt, synthetic construct
  source 1..20: mol_type = other RNA
ccacctgaaatctgatttgt

SEQ ID NO: 29148 - RNA, 20 nt, synthetic construct
  source 1..20: mol_type = other RNA
ccacctgacaagtagtacaa

SEQ ID NO: 29149 - RNA, 20 nt, synthetic construct
  source 1..20: mol_type = other RNA
ccacctgcgagcggcgggct

SEQ ID NO: 29150 - RNA, 20 nt, synthetic construct
  source 1..20: mol_type = other RNA
ccacctgctctttatctcca

SEQ ID NO: 29151 - RNA, 20 nt, synthetic construct
  source 1..20: mol_type = other RNA
ccacctggcaacaaaggcga

SEQ ID NO: 29152 - RNA, 20 nt, synthetic construct
  source 1..20: mol_type = other RNA
ccacctgggggagactgtgc

SEQ ID NO: 29153 - RNA, 20 nt, synthetic construct
  source 1..20: mol_type = other RNA
ccacctgtcagaaacaccaa

SEQ ID NO: 29154 - RNA, 20 nt, synthetic construct
  source 1..20: mol_type = other RNA
ccaccttagcccaagctacc

SEQ ID NO: 29155 - RNA, 20 nt, synthetic construct
  source 1..20: mol_type = other RNA
ccacctttcctgcccctcca

SEQ ID NO: 29156 - RNA, 20 nt, synthetic construct
  source 1..20: mol_type = other RNA
ccacgagtaatggatgtttt

SEQ ID NO: 29157 - RNA, 20 nt, synthetic construct
  source 1..20: mol_type = other RNA
ccacgcagaacagtgtttac

SEQ ID NO: 29158 - RNA, 20 nt, synthetic construct
  source 1..20: mol_type = other RNA
ccacgcagtttgttctgctg

SEQ ID NO: 29159 - RNA, 20 nt, synthetic construct
  source 1..20: mol_type = other RNA
ccacgcatctggtctatctc

SEQ ID NO: 29160 - RNA, 20 nt, synthetic construct
  source 1..20: mol_type = other RNA
ccacgcccattaggatagct

SEQ ID NO: 29161 - RNA, 20 nt, synthetic construct
  source 1..20: mol_type = other RNA
ccacgcccggccgatgcctg

SEQ ID NO: 29162 - RNA, 20 nt, synthetic construct
  source 1..20: mol_type = other RNA
ccacgcgtaagggtacagaa

SEQ ID NO: 29163 - RNA, 20 nt, synthetic construct
  source 1..20: mol_type = other RNA
ccacgctgtggcttgggtga

SEQ ID NO: 29164 - RNA, 20 nt, synthetic construct
  source 1..20: mol_type = other RNA
ccacggaatgcccctttgag

SEQ ID NO: 29165 - RNA, 20 nt, synthetic construct
  source 1..20: mol_type = other RNA
ccacgggtaaaaataaatct

SEQ ID NO: 29166 - RNA, 20 nt, synthetic construct
  source 1..20: mol_type = other RNA
ccacgtccggtcgttggatt

SEQ ID NO: 29167 - RNA, 20 nt, synthetic construct
  source 1..20: mol_type = other RNA
ccacgtgaagatggagttac

SEQ ID NO: 29168 - RNA, 20 nt, synthetic construct
  source 1..20: mol_type = other RNA
ccacgtggagtgcaatgggg

SEQ ID NO: 29169 - RNA, 20 nt, synthetic construct
  source 1..20: mol_type = other RNA
ccacgtgggtgacagagcaa

SEQ ID NO: 29170 - RNA, 20 nt, synthetic construct
  source 1..20: mol_type = other RNA
ccacgtgtattgagtgtagc

SEQ ID NO: 29171 - RNA, 20 nt, synthetic construct
  source 1..20: mol_type = other RNA
ccactaaaacaggaagttga

SEQ ID NO: 29172 - RNA, 20 nt, synthetic construct
  source 1..20: mol_type = other RNA
ccactaaggtcaacacatca

SEQ ID NO: 29173 - RNA, 20 nt, synthetic construct
  source 1..20: mol_type = other RNA
ccactaatgtcacattttct

SEQ ID NO: 29174 - RNA, 20 nt, synthetic construct
  source 1..20: mol_type = other RNA
ccactacacccggctaatta

SEQ ID NO: 29175 - RNA, 20 nt, synthetic construct
  source 1..20: mol_type = other RNA
ccactacgcccggcccatga

SEQ ID NO: 29176 - RNA, 20 nt, synthetic construct
  source 1..20: mol_type = other RNA
ccactacttagcccctgctg

SEQ ID NO: 29177 - RNA, 20 nt, synthetic construct
  source 1..20: mol_type = other RNA
ccactagagtattacctatg

SEQ ID NO: 29178 - RNA, 20 nt, synthetic construct
  source 1..20: mol_type = other RNA
ccactagcaaactactgata

SEQ ID NO: 29179 - RNA, 20 nt, synthetic construct
  source 1..20: mol_type = other RNA
ccactaggggactaacaggg

SEQ ID NO: 29180 - RNA, 20 nt, synthetic construct
  source 1..20: mol_type = other RNA
ccactagtcagtatatttac

SEQ ID NO: 29181 - RNA, 20 nt, synthetic construct
  source 1..20: mol_type = other RNA
ccactagtgaagtcccatct

SEQ ID NO: 29182 - RNA, 20 nt, synthetic construct
  source 1..20: mol_type = other RNA
ccactagtggaagaatcagg

SEQ ID NO: 29183 - RNA, 20 nt, synthetic construct
  source 1..20: mol_type = other RNA
ccactagtgggatcaaacca

SEQ ID NO: 29184 - RNA, 20 nt, synthetic construct
  source 1..20: mol_type = other RNA
ccactataatccagatggac

SEQ ID NO: 29185 - RNA, 20 nt, synthetic construct
  source 1..20: mol_type = other RNA
ccactatagaaaatagtatg

SEQ ID NO: 29186 - RNA, 20 nt, synthetic construct
  source 1..20: mol_type = other RNA
ccactatctaataaaatagc

SEQ ID NO: 29187 - RNA, 20 nt, synthetic construct
  source 1..20: mol_type = other RNA
ccactattgaaagcccttga

SEQ ID NO: 29188 - RNA, 20 nt, synthetic construct
  source 1..20: mol_type = other RNA
ccactcaaaactgaagttta

SEQ ID NO: 29189 - RNA, 20 nt, synthetic construct
  source 1..20: mol_type = other RNA
ccactcacctgtcatgtcaa

SEQ ID NO: 29190 - RNA, 20 nt, synthetic construct
  source 1..20: mol_type = other RNA
ccactccacacacgaagtag

SEQ ID NO: 29191 - RNA, 20 nt, synthetic construct
  source 1..20: mol_type = other RNA
ccactccaccttagcccaag

SEQ ID NO: 29192 - RNA, 20 nt, synthetic construct
  source 1..20: mol_type = other RNA
ccactccagcctgagcaaca

SEQ ID NO: 29193 - RNA, 20 nt, synthetic construct
  source 1..20: mol_type = other RNA
ccactcccggccgtattttt

SEQ ID NO: 29194 - RNA, 20 nt, synthetic construct
  source 1..20: mol_type = other RNA
ccactctcatctaaattaag

SEQ ID NO: 29195 - RNA, 20 nt, synthetic construct
  source 1..20: mol_type = other RNA
ccactctccccaagtaaacc

SEQ ID NO: 29196 - RNA, 20 nt, synthetic construct
  source 1..20: mol_type = other RNA
ccactctctggctgcaattg

SEQ ID NO: 29197 - RNA, 20 nt, synthetic construct
  source 1..20: mol_type = other RNA
ccactctgaattctctggaa

SEQ ID NO: 29198 - RNA, 20 nt, synthetic construct
  source 1..20: mol_type = other RNA
ccactcttatatcctaaaca

SEQ ID NO: 29199 - RNA, 20 nt, synthetic construct
  source 1..20: mol_type = other RNA
ccactgaaacttttcttttc

SEQ ID NO: 29200 - RNA, 20 nt, synthetic construct
  source 1..20: mol_type = other RNA
ccactgaagtgttgagaggc

SEQ ID NO: 29201 - RNA, 20 nt, synthetic construct
  source 1..20: mol_type = other RNA
ccactgaatcagattttaaa

SEQ ID NO: 29202 - RNA, 20 nt, synthetic construct
  source 1..20: mol_type = other RNA
ccactgacagtggacaaagg

SEQ ID NO: 29203 - RNA, 20 nt, synthetic construct
  source 1..20: mol_type = other RNA
ccactgagagctcaggccag

SEQ ID NO: 29204 - RNA, 20 nt, synthetic construct
  source 1..20: mol_type = other RNA
ccactgagagggaagtttat

SEQ ID NO: 29205 - RNA, 20 nt, synthetic construct
  source 1..20: mol_type = other RNA
ccactgagcacaatgcctgc

SEQ ID NO: 29206 - RNA, 20 nt, synthetic construct
  source 1..20: mol_type = other RNA
ccactgagcatttatataag

SEQ ID NO: 29207 - RNA, 20 nt, synthetic construct
  source 1..20: mol_type = other RNA
ccactgaggtcaagaaataa

SEQ ID NO: 29208 - RNA, 20 nt, synthetic construct
  source 1..20: mol_type = other RNA
ccactgatggaattctgaca

SEQ ID NO: 29209 - RNA, 20 nt, synthetic construct
  source 1..20: mol_type = other RNA
ccactgattgagtatctggt

SEQ ID NO: 29210 - RNA, 20 nt, synthetic construct
  source 1..20: mol_type = other RNA
ccactgcacagtatgcgggg

SEQ ID NO: 29211 - RNA, 20 nt, synthetic construct
  source 1..20: mol_type = other RNA
ccactgcaggtgttggtgca

SEQ ID NO: 29212 - RNA, 20 nt, synthetic construct
  source 1..20: mol_type = other RNA
ccactgcattcatccaggca

SEQ ID NO: 29213 - RNA, 20 nt, synthetic construct
  source 1..20: mol_type = other RNA
ccactgcattccgcctgggc

SEQ ID NO: 29214 - RNA, 20 nt, synthetic construct
  source 1..20: mol_type = other RNA
ccactgcgggcccagctctt

SEQ ID NO: 29215 - RNA, 20 nt, synthetic construct
  source 1..20: mol_type = other RNA
ccactgctatgactaatttg

SEQ ID NO: 29216 - RNA, 20 nt, synthetic construct
  source 1..20: mol_type = other RNA
ccactggaaaccttttgtag

SEQ ID NO: 29217 - RNA, 20 nt, synthetic construct
  source 1..20: mol_type = other RNA
ccactggatacggaaatata

SEQ ID NO: 29218 - RNA, 20 nt, synthetic construct
  source 1..20: mol_type = other RNA
ccactggggagtgtgcccaa

SEQ ID NO: 29219 - RNA, 20 nt, synthetic construct
  source 1..20: mol_type = other RNA
ccactgggtcttataggttg

SEQ ID NO: 29220 - RNA, 20 nt, synthetic construct
  source 1..20: mol_type = other RNA
ccactggtttcagtccctcc

SEQ ID NO: 29221 - RNA, 20 nt, synthetic construct
  source 1..20: mol_type = other RNA
ccactgtaggccccgatgcc

SEQ ID NO: 29222 - RNA, 20 nt, synthetic construct
  source 1..20: mol_type = other RNA
ccactgtcagtgggactgga

SEQ ID NO: 29223 - RNA, 20 nt, synthetic construct
  source 1..20: mol_type = other RNA
ccactgttatctgggaacag

SEQ ID NO: 29224 - RNA, 20 nt, synthetic construct
  source 1..20: mol_type = other RNA
ccacttaaaaaatgcgcgtc

SEQ ID NO: 29225 - RNA, 20 nt, synthetic construct
  source 1..20: mol_type = other RNA
ccacttacatcagcagtgac

SEQ ID NO: 29226 - RNA, 20 nt, synthetic construct
  source 1..20: mol_type = other RNA
ccacttagtttgcaatacag

SEQ ID NO: 29227 - RNA, 20 nt, synthetic construct
  source 1..20: mol_type = other RNA
ccacttatatgaagctaaaa

SEQ ID NO: 29228 - RNA, 20 nt, synthetic construct
  source 1..20: mol_type = other RNA
ccacttcccactgctatgac

SEQ ID NO: 29229 - RNA, 20 nt, synthetic construct
  source 1..20: mol_type = other RNA
ccacttcctattagaagaat

SEQ ID NO: 29230 - RNA, 20 nt, synthetic construct
  source 1..20: mol_type = other RNA
ccacttcgaaagttcagata

SEQ ID NO: 29231 - RNA, 20 nt, synthetic construct
  source 1..20: mol_type = other RNA
ccacttcgagaagggaagta

SEQ ID NO: 29232 - RNA, 20 nt, synthetic construct
  source 1..20: mol_type = other RNA
ccacttgatccaggtgtatg

SEQ ID NO: 29233 - RNA, 20 nt, synthetic construct
  source 1..20: mol_type = other RNA
ccacttgggtggaagctgtc

SEQ ID NO: 29234 - RNA, 20 nt, synthetic construct
  source 1..20: mol_type = other RNA
ccacttgtcccatggtcaaa

SEQ ID NO: 29235 - RNA, 20 nt, synthetic construct
  source 1..20: mol_type = other RNA
ccactttcatgatttggtgt

SEQ ID NO: 29236 - RNA, 20 nt, synthetic construct
  source 1..20: mol_type = other RNA
ccactttccatcttaggcca

SEQ ID NO: 29237 - RNA, 20 nt, synthetic construct
  source 1..20: mol_type = other RNA
ccactttgaggttattaaga

SEQ ID NO: 29238 - RNA, 20 nt, synthetic construct
  source 1..20: mol_type = other RNA
ccagaaaaccagaaaagtga

SEQ ID NO: 29239 - RNA, 20 nt, synthetic construct
  source 1..20: mol_type = other RNA
ccagaaaactggcaatcaaa

SEQ ID NO: 29240 - RNA, 20 nt, synthetic construct
  source 1..20: mol_type = other RNA
ccagaaaagtgaaacaataa

SEQ ID NO: 29241 - RNA, 20 nt, synthetic construct
  source 1..20: mol_type = other RNA
ccagaaacttccaaccatct

SEQ ID NO: 29242 - RNA, 20 nt, synthetic construct
  source 1..20: mol_type = other RNA
ccagaaagagagagggggga

SEQ ID NO: 29243 - RNA, 20 nt, synthetic construct
  source 1..20: mol_type = other RNA
ccagaaataaatcctcacat

SEQ ID NO: 29244 - RNA, 20 nt, synthetic construct
  source 1..20: mol_type = other RNA
ccagaactacacattccaga

SEQ ID NO: 29245 - RNA, 20 nt, synthetic construct
  source 1..20: mol_type = other RNA
ccagaactcgaagccttccc

SEQ ID NO: 29246 - RNA, 20 nt, synthetic construct
  source 1..20: mol_type = other RNA
ccagaagagaatggctggaa

SEQ ID NO: 29247 - RNA, 20 nt, synthetic construct
  source 1..20: mol_type = other RNA
ccagaaggagaaaacaaaaa

SEQ ID NO: 29248 - RNA, 20 nt, synthetic construct
  source 1..20: mol_type = other RNA
ccagaaggttaactaatagc

SEQ ID NO: 29249 - RNA, 20 nt, synthetic construct
  source 1..20: mol_type = other RNA
ccagaagtaactcttgagtt

SEQ ID NO: 29250 - RNA, 20 nt, synthetic construct
  source 1..20: mol_type = other RNA
ccagaagtcactttttattc

SEQ ID NO: 29251 - RNA, 20 nt, synthetic construct
  source 1..20: mol_type = other RNA
ccagaataggcaaattcata

SEQ ID NO: 29252 - RNA, 20 nt, synthetic construct
  source 1..20: mol_type = other RNA
ccagaatccctttcgctaat

SEQ ID NO: 29253 - RNA, 20 nt, synthetic construct
  source 1..20: mol_type = other RNA
ccagaatgaccgagatactt

SEQ ID NO: 29254 - RNA, 20 nt, synthetic construct
  source 1..20: mol_type = other RNA
ccagacaaaaatagaggatg

SEQ ID NO: 29255 - RNA, 20 nt, synthetic construct
  source 1..20: mol_type = other RNA
ccagacaaaaattttcattc

SEQ ID NO: 29256 - RNA, 20 nt, synthetic construct
  source 1..20: mol_type = other RNA
ccagacagatatatgcattc

SEQ ID NO: 29257 - RNA, 20 nt, synthetic construct
  source 1..20: mol_type = other RNA
ccagacagctaatatgctgt

SEQ ID NO: 29258 - RNA, 20 nt, synthetic construct
  source 1..20: mol_type = other RNA
ccagacagggaatgcccctg

SEQ ID NO: 29259 - RNA, 20 nt, synthetic construct
  source 1..20: mol_type = other RNA
ccagacatttctcatacttt

SEQ ID NO: 29260 - RNA, 20 nt, synthetic construct
  source 1..20: mol_type = other RNA
ccagacattttatttataca

SEQ ID NO: 29261 - RNA, 20 nt, synthetic construct
  source 1..20: mol_type = other RNA
ccagaccaagtttaaccaat

SEQ ID NO: 29262 - RNA, 20 nt, synthetic construct
  source 1..20: mol_type = other RNA
ccagaccagcagttcaagca

SEQ ID NO: 29263 - RNA, 20 nt, synthetic construct
  source 1..20: mol_type = other RNA
ccagacccgccgcagagccg

SEQ ID NO: 29264 - RNA, 20 nt, synthetic construct
  source 1..20: mol_type = other RNA
ccagaccctttatcggataa

SEQ ID NO: 29265 - RNA, 20 nt, synthetic construct
  source 1..20: mol_type = other RNA
ccagacctgcacaaaggatt

SEQ ID NO: 29266 - RNA, 20 nt, synthetic construct
  source 1..20: mol_type = other RNA
ccagactggagttcactggc

SEQ ID NO: 29267 - RNA, 20 nt, synthetic construct
  source 1..20: mol_type = other RNA
ccagactgggcaacagagac

SEQ ID NO: 29268 - RNA, 20 nt, synthetic construct
  source 1..20: mol_type = other RNA
ccagagaagttttccaggaa

SEQ ID NO: 29269 - RNA, 20 nt, synthetic construct
  source 1..20: mol_type = other RNA
ccagagaattcagagtggct

SEQ ID NO: 29270 - RNA, 20 nt, synthetic construct
  source 1..20: mol_type = other RNA
ccagagacaaagcataaaat

SEQ ID NO: 29271 - RNA, 20 nt, synthetic construct
  source 1..20: mol_type = other RNA
ccagagaggctaggtgacct

SEQ ID NO: 29272 - RNA, 20 nt, synthetic construct
  source 1..20: mol_type = other RNA
ccagagagtggaaagagcca

SEQ ID NO: 29273 - RNA, 20 nt, synthetic construct
  source 1..20: mol_type = other RNA
ccagagatcccaccattgca

SEQ ID NO: 29274 - RNA, 20 nt, synthetic construct
  source 1..20: mol_type = other RNA
ccagagattgggaaaatctt

SEQ ID NO: 29275 - RNA, 20 nt, synthetic construct
  source 1..20: mol_type = other RNA
ccagagattgtcgttgagta

SEQ ID NO: 29276 - RNA, 20 nt, synthetic construct
  source 1..20: mol_type = other RNA
ccagagcctaatgtgtaaga

SEQ ID NO: 29277 - RNA, 20 nt, synthetic construct
  source 1..20: mol_type = other RNA
ccagagcggaatttttatat

SEQ ID NO: 29278 - RNA, 20 nt, synthetic construct
  source 1..20: mol_type = other RNA
ccagagcgggtttcctcggt

SEQ ID NO: 29279 - RNA, 20 nt, synthetic construct
  source 1..20: mol_type = other RNA
ccagaggaagcttataattt

SEQ ID NO: 29280 - RNA, 20 nt, synthetic construct
  source 1..20: mol_type = other RNA
ccagaggaggaagagatagt

SEQ ID NO: 29281 - RNA, 20 nt, synthetic construct
  source 1..20: mol_type = other RNA
ccagaggagggatgcattct

SEQ ID NO: 29282 - RNA, 20 nt, synthetic construct
  source 1..20: mol_type = other RNA
ccagagggaatctaggaaac

SEQ ID NO: 29283 - RNA, 20 nt, synthetic construct
  source 1..20: mol_type = other RNA
ccagagggtaacgtgagctg

SEQ ID NO: 29284 - RNA, 20 nt, synthetic construct
  source 1..20: mol_type = other RNA
ccagaggtactcaacgacaa

SEQ ID NO: 29285 - RNA, 20 nt, synthetic construct
  source 1..20: mol_type = other RNA
ccagaggtgagctttttctt

SEQ ID NO: 29286 - RNA, 20 nt, synthetic construct
  source 1..20: mol_type = other RNA
ccagaggttaaagcaacagg

SEQ ID NO: 29287 - RNA, 20 nt, synthetic construct
  source 1..20: mol_type = other RNA
ccagaggttcttttaaatgc

SEQ ID NO: 29288 - RNA, 20 nt, synthetic construct
  source 1..20: mol_type = other RNA
ccagagttggcacagccagt

SEQ ID NO: 29289 - RNA, 20 nt, synthetic construct
  source 1..20: mol_type = other RNA
ccagagtttcactctgtcgc

SEQ ID NO: 29290 - RNA, 20 nt, synthetic construct
  source 1..20: mol_type = other RNA
ccagataaattatagctcca

SEQ ID NO: 29291 - RNA, 20 nt, synthetic construct
  source 1..20: mol_type = other RNA
ccagataacagtggttagga

SEQ ID NO: 29292 - RNA, 20 nt, synthetic construct
  source 1..20: mol_type = other RNA
ccagatacgttaaaggaaaa

SEQ ID NO: 29293 - RNA, 20 nt, synthetic construct
  source 1..20: mol_type = other RNA
ccagatactcaatcagtggc

SEQ ID NO: 29294 - RNA, 20 nt, synthetic construct
  source 1..20: mol_type = other RNA
ccagatactcatgcttgctc

SEQ ID NO: 29295 - RNA, 20 nt, synthetic construct
  source 1..20: mol_type = other RNA
ccagatatccataaggaaaa

SEQ ID NO: 29296 - RNA, 20 nt, synthetic construct
  source 1..20: mol_type = other RNA
ccagatattatcctccaatg

SEQ ID NO: 29297 - RNA, 20 nt, synthetic construct
  source 1..20: mol_type = other RNA
ccagatcaaacgtgctttcc

SEQ ID NO: 29298 - RNA, 20 nt, synthetic construct
  source 1..20: mol_type = other RNA
ccagatctaacaaacgcatt

SEQ ID NO: 29299 - RNA, 20 nt, synthetic construct
  source 1..20: mol_type = other RNA
ccagatgaagcagggaaatg

SEQ ID NO: 29300 - RNA, 20 nt, synthetic construct
  source 1..20: mol_type = other RNA
ccagatgcgtggttcacacc

SEQ ID NO: 29301 - RNA, 20 nt, synthetic construct
  source 1..20: mol_type = other RNA
ccagatggacaaattaccat

SEQ ID NO: 29302 - RNA, 20 nt, synthetic construct
  source 1..20: mol_type = other RNA
ccagatggggattgagggtt

SEQ ID NO: 29303 - RNA, 20 nt, synthetic construct
  source 1..20: mol_type = other RNA
ccagatgtagagaaacagga

SEQ ID NO: 29304 - RNA, 20 nt, synthetic construct
  source 1..20: mol_type = other RNA
ccagatgttctaatttcttt

SEQ ID NO: 29305 - RNA, 20 nt, synthetic construct
  source 1..20: mol_type = other RNA
ccagatgttttacacatgtc

SEQ ID NO: 29306 - RNA, 20 nt, synthetic construct
  source 1..20: mol_type = other RNA
ccagattccttttttatgtg

SEQ ID NO: 29307 - RNA, 20 nt, synthetic construct
  source 1..20: mol_type = other RNA
ccagattgaaatctaggcat

SEQ ID NO: 29308 - RNA, 20 nt, synthetic construct
  source 1..20: mol_type = other RNA
ccagattgatatctgagtgt

SEQ ID NO: 29309 - RNA, 20 nt, synthetic construct
  source 1..20: mol_type = other RNA
ccagatttgatcctggaata

SEQ ID NO: 29310 - RNA, 20 nt, synthetic construct
  source 1..20: mol_type = other RNA
ccagcaaatcagaaaaggct

SEQ ID NO: 29311 - RNA, 20 nt, synthetic construct
  source 1..20: mol_type = other RNA
ccagcaagactttatgtgga

SEQ ID NO: 29312 - RNA, 20 nt, synthetic construct
  source 1..20: mol_type = other RNA
ccagcaccacccttgatgtc

SEQ ID NO: 29313 - RNA, 20 nt, synthetic construct
  source 1..20: mol_type = other RNA
ccagcaccagatactcaatc

SEQ ID NO: 29314 - RNA, 20 nt, synthetic construct
  source 1..20: mol_type = other RNA
ccagcacctaacaatgatta

SEQ ID NO: 29315 - RNA, 20 nt, synthetic construct
  source 1..20: mol_type = other RNA
ccagcactctgaatcacctc

SEQ ID NO: 29316 - RNA, 20 nt, synthetic construct
  source 1..20: mol_type = other RNA
ccagcacttccattttgctt

SEQ ID NO: 29317 - RNA, 20 nt, synthetic construct
  source 1..20: mol_type = other RNA
ccagcagaaggtgagggact

SEQ ID NO: 29318 - RNA, 20 nt, synthetic construct
  source 1..20: mol_type = other RNA
ccagcagccccgacgccttt

SEQ ID NO: 29319 - RNA, 20 nt, synthetic construct
  source 1..20: mol_type = other RNA
ccagcagggtaaagtcaatt

SEQ ID NO: 29320 - RNA, 20 nt, synthetic construct
  source 1..20: mol_type = other RNA
ccagcagttcaagcaccact

SEQ ID NO: 29321 - RNA, 20 nt, synthetic construct
  source 1..20: mol_type = other RNA
ccagcagtttcacttcttag

SEQ ID NO: 29322 - RNA, 20 nt, synthetic construct
  source 1..20: mol_type = other RNA
ccagcataagacccctcagg

SEQ ID NO: 29323 - RNA, 20 nt, synthetic construct
  source 1..20: mol_type = other RNA
ccagcatccactaggggact

SEQ ID NO: 29324 - RNA, 20 nt, synthetic construct
  source 1..20: mol_type = other RNA
ccagcatccctccagtccag

SEQ ID NO: 29325 - RNA, 20 nt, synthetic construct
  source 1..20: mol_type = other RNA
ccagcatcttttgacgcgca

SEQ ID NO: 29326 - RNA, 20 nt, synthetic construct
  source 1..20: mol_type = other RNA
ccagcatgaagccctctaag

SEQ ID NO: 29327 - RNA, 20 nt, synthetic construct
  source 1..20: mol_type = other RNA
ccagcattaccctaataaca

SEQ ID NO: 29328 - RNA, 20 nt, synthetic construct
  source 1..20: mol_type = other RNA
ccagcattacttaggcagtt

SEQ ID NO: 29329 - RNA, 20 nt, synthetic construct
  source 1..20: mol_type = other RNA
ccagcattttataggcattc

SEQ ID NO: 29330 - RNA, 20 nt, synthetic construct
  source 1..20: mol_type = other RNA
ccagccaaacagtttttaca

SEQ ID NO: 29331 - RNA, 20 nt, synthetic construct
  source 1..20: mol_type = other RNA
ccagccacccttgctgcttc

SEQ ID NO: 29332 - RNA, 20 nt, synthetic construct
  source 1..20: mol_type = other RNA
ccagccattctcttctggat

SEQ ID NO: 29333 - RNA, 20 nt, synthetic construct
  source 1..20: mol_type = other RNA
ccagcccccagttttgttga

SEQ ID NO: 29334 - RNA, 20 nt, synthetic construct
  source 1..20: mol_type = other RNA
ccagcccctggtgatctatg

SEQ ID NO: 29335 - RNA, 20 nt, synthetic construct
  source 1..20: mol_type = other RNA
ccagcccgtgtgtttagaat

SEQ ID NO: 29336 - RNA, 20 nt, synthetic construct
  source 1..20: mol_type = other RNA
ccagcctcaaacaatcctcc

SEQ ID NO: 29337 - RNA, 20 nt, synthetic construct
  source 1..20: mol_type = other RNA
ccagcctcaacagcactttt

SEQ ID NO: 29338 - RNA, 20 nt, synthetic construct
  source 1..20: mol_type = other RNA
ccagcctgatgatgatggtg

SEQ ID NO: 29339 - RNA, 20 nt, synthetic construct
  source 1..20: mol_type = other RNA
ccagcctggccaacatcgta

SEQ ID NO: 29340 - RNA, 20 nt, synthetic construct
  source 1..20: mol_type = other RNA
ccagcctggtaatgaataga

SEQ ID NO: 29341 - RNA, 20 nt, synthetic construct
  source 1..20: mol_type = other RNA
ccagcctggtcaacagggta

SEQ ID NO: 29342 - RNA, 20 nt, synthetic construct
  source 1..20: mol_type = other RNA
ccagccttaatctcctgagt

SEQ ID NO: 29343 - RNA, 20 nt, synthetic construct
  source 1..20: mol_type = other RNA
ccagccttggtaagagtgag

SEQ ID NO: 29344 - RNA, 20 nt, synthetic construct
  source 1..20: mol_type = other RNA
ccagcctttaatttagcgtt

SEQ ID NO: 29345 - RNA, 20 nt, synthetic construct
  source 1..20: mol_type = other RNA
ccagcgctaagcactgcgcc

SEQ ID NO: 29346 - RNA, 20 nt, synthetic construct
  source 1..20: mol_type = other RNA
ccagcggcatacaggagttc

SEQ ID NO: 29347 - RNA, 20 nt, synthetic construct
  source 1..20: mol_type = other RNA
ccagcgtgtgcatgaccctg

SEQ ID NO: 29348 - RNA, 20 nt, synthetic construct
  source 1..20: mol_type = other RNA
ccagctaaaatgttcagata

SEQ ID NO: 29349 - RNA, 20 nt, synthetic construct
  source 1..20: mol_type = other RNA
ccagctaacttttaacccac

SEQ ID NO: 29350 - RNA, 20 nt, synthetic construct
  source 1..20: mol_type = other RNA
ccagctaattttcattactt

SEQ ID NO: 29351 - RNA, 20 nt, synthetic construct
  source 1..20: mol_type = other RNA
ccagctacataacttcccag

SEQ ID NO: 29352 - RNA, 20 nt, synthetic construct
  source 1..20: mol_type = other RNA
ccagctcacgttaccctctg

SEQ ID NO: 29353 - RNA, 20 nt, synthetic construct
  source 1..20: mol_type = other RNA
ccagctcgaccaggggaagg

SEQ ID NO: 29354 - RNA, 20 nt, synthetic construct
  source 1..20: mol_type = other RNA
ccagctcttttgtgtctttt

SEQ ID NO: 29355 - RNA, 20 nt, synthetic construct
  source 1..20: mol_type = other RNA
ccagctgtccaacaagggtt

SEQ ID NO: 29356 - RNA, 20 nt, synthetic construct
  source 1..20: mol_type = other RNA
ccagcttacagcagatctgc

SEQ ID NO: 29357 - RNA, 20 nt, synthetic construct
  source 1..20: mol_type = other RNA
ccagcttcactcttctgcaa

SEQ ID NO: 29358 - RNA, 20 nt, synthetic construct
  source 1..20: mol_type = other RNA
ccagcttccgggacttggaa

SEQ ID NO: 29359 - RNA, 20 nt, synthetic construct
  source 1..20: mol_type = other RNA
ccagcttgggcaagagagca

SEQ ID NO: 29360 - RNA, 20 nt, synthetic construct
  source 1..20: mol_type = other RNA
ccagctttctaattctgaca

SEQ ID NO: 29361 - RNA, 20 nt, synthetic construct
  source 1..20: mol_type = other RNA
ccagctttggctgaaatgct

SEQ ID NO: 29362 - RNA, 20 nt, synthetic construct
  source 1..20: mol_type = other RNA
ccagcttttattagagcttt

SEQ ID NO: 29363 - RNA, 20 nt, synthetic construct
  source 1..20: mol_type = other RNA
ccaggaaaagcaaatgtcat

SEQ ID NO: 29364 - RNA, 20 nt, synthetic construct
  source 1..20: mol_type = other RNA
ccaggaacagattcacgcac

SEQ ID NO: 29365 - RNA, 20 nt, synthetic construct
  source 1..20: mol_type = other RNA
ccaggaacttacagtaagat

SEQ ID NO: 29366 - RNA, 20 nt, synthetic construct
  source 1..20: mol_type = other RNA
ccaggaagtcagcaactctt

SEQ ID NO: 29367 - RNA, 20 nt, synthetic construct
  source 1..20: mol_type = other RNA
ccaggacaattgaatgggga

SEQ ID NO: 29368 - RNA, 20 nt, synthetic construct
  source 1..20: mol_type = other RNA
ccaggaccaatttaccatct

SEQ ID NO: 29369 - RNA, 20 nt, synthetic construct
  source 1..20: mol_type = other RNA
ccaggagctagaacagaata

SEQ ID NO: 29370 - RNA, 20 nt, synthetic construct
  source 1..20: mol_type = other RNA
ccaggaggaggagggtgcag

SEQ ID NO: 29371 - RNA, 20 nt, synthetic construct
  source 1..20: mol_type = other RNA
ccaggaggcaaaggttgaga

SEQ ID NO: 29372 - RNA, 20 nt, synthetic construct
  source 1..20: mol_type = other RNA
ccaggaggttgaagctctag

SEQ ID NO: 29373 - RNA, 20 nt, synthetic construct
  source 1..20: mol_type = other RNA
ccaggaggtttgcactggca

SEQ ID NO: 29374 - RNA, 20 nt, synthetic construct
  source 1..20: mol_type = other RNA
ccaggagttcttatgaggtt

SEQ ID NO: 29375 - RNA, 20 nt, synthetic construct
  source 1..20: mol_type = other RNA
ccaggagttgcatcacttga

SEQ ID NO: 29376 - RNA, 20 nt, synthetic construct
  source 1..20: mol_type = other RNA
ccaggatcaaatctggctgc

SEQ ID NO: 29377 - RNA, 20 nt, synthetic construct
  source 1..20: mol_type = other RNA
ccaggatccagtctctaccc

SEQ ID NO: 29378 - RNA, 20 nt, synthetic construct
  source 1..20: mol_type = other RNA
ccaggatcttactgtaagtt

SEQ ID NO: 29379 - RNA, 20 nt, synthetic construct
  source 1..20: mol_type = other RNA
ccaggatggcatgaaatggg

SEQ ID NO: 29380 - RNA, 20 nt, synthetic construct
  source 1..20: mol_type = other RNA
ccaggcaaaagatgatgaac

SEQ ID NO: 29381 - RNA, 20 nt, synthetic construct
  source 1..20: mol_type = other RNA
ccaggcagtcctctcactcc

SEQ ID NO: 29382 - RNA, 20 nt, synthetic construct
  source 1..20: mol_type = other RNA
ccaggcatgatggctcaacg

SEQ ID NO: 29383 - RNA, 20 nt, synthetic construct
  source 1..20: mol_type = other RNA
ccaggcatgggggcgcgtgc

SEQ ID NO: 29384 - RNA, 20 nt, synthetic construct
  source 1..20: mol_type = other RNA
ccaggccaacagggccactg

SEQ ID NO: 29385 - RNA, 20 nt, synthetic construct
  source 1..20: mol_type = other RNA
ccaggcccggggcagagaac

SEQ ID NO: 29386 - RNA, 20 nt, synthetic construct
  source 1..20: mol_type = other RNA
ccaggcctcgctcttggctt

SEQ ID NO: 29387 - RNA, 20 nt, synthetic construct
  source 1..20: mol_type = other RNA
ccaggcgcctgcattgcatt

SEQ ID NO: 29388 - RNA, 20 nt, synthetic construct
  source 1..20: mol_type = other RNA
ccaggcggaatgcagtggcg

SEQ ID NO: 29389 - RNA, 20 nt, synthetic construct
  source 1..20: mol_type = other RNA
ccaggcggcagagggagcag

SEQ ID NO: 29390 - RNA, 20 nt, synthetic construct
  source 1..20: mol_type = other RNA
ccaggcgtggtggcggatgc

SEQ ID NO: 29391 - RNA, 20 nt, synthetic construct
  source 1..20: mol_type = other RNA
ccaggctgacttagagggct

SEQ ID NO: 29392 - RNA, 20 nt, synthetic construct
  source 1..20: mol_type = other RNA
ccaggctggaagaattttaa

SEQ ID NO: 29393 - RNA, 20 nt, synthetic construct
  source 1..20: mol_type = other RNA
ccaggctggtcttgtactcc

SEQ ID NO: 29394 - RNA, 20 nt, synthetic construct
  source 1..20: mol_type = other RNA
ccaggctggttccaaacttc

SEQ ID NO: 29395 - RNA, 20 nt, synthetic construct
  source 1..20: mol_type = other RNA
ccaggctttcccagggtgta

SEQ ID NO: 29396 - RNA, 20 nt, synthetic construct
  source 1..20: mol_type = other RNA
ccagggaaaccttactgtaa

SEQ ID NO: 29397 - RNA, 20 nt, synthetic construct
  source 1..20: mol_type = other RNA
ccagggaggaatccttcagt

SEQ ID NO: 29398 - RNA, 20 nt, synthetic construct
  source 1..20: mol_type = other RNA
ccagggaggcggaggttgcg

SEQ ID NO: 29399 - RNA, 20 nt, synthetic construct
  source 1..20: mol_type = other RNA
ccagggataaatcccacttg

SEQ ID NO: 29400 - RNA, 20 nt, synthetic construct
  source 1..20: mol_type = other RNA
ccagggatattttcgtgtac

SEQ ID NO: 29401 - RNA, 20 nt, synthetic construct
  source 1..20: mol_type = other RNA
ccagggcctctgaagacatg

SEQ ID NO: 29402 - RNA, 20 nt, synthetic construct
  source 1..20: mol_type = other RNA
ccagggcgctcctctcccgc

SEQ ID NO: 29403 - RNA, 20 nt, synthetic construct
  source 1..20: mol_type = other RNA
ccaggggaaggagtctgccc

SEQ ID NO: 29404 - RNA, 20 nt, synthetic construct
  source 1..20: mol_type = other RNA
ccaggggaatagaaagttag

SEQ ID NO: 29405 - RNA, 20 nt, synthetic construct
  source 1..20: mol_type = other RNA
ccaggggacatagatgaaac

SEQ ID NO: 29406 - RNA, 20 nt, synthetic construct
  source 1..20: mol_type = other RNA
ccaggggacatgctctgata

SEQ ID NO: 29407 - RNA, 20 nt, synthetic construct
  source 1..20: mol_type = other RNA
ccaggggctgggggatccag

SEQ ID NO: 29408 - RNA, 20 nt, synthetic construct
  source 1..20: mol_type = other RNA
ccaggggggaaaaaaccata

SEQ ID NO: 29409 - RNA, 20 nt, synthetic construct
  source 1..20: mol_type = other RNA
ccagggggtatggagacact

SEQ ID NO: 29410 - RNA, 20 nt, synthetic construct
  source 1..20: mol_type = other RNA
ccagggggtcgagactgtaa

SEQ ID NO: 29411 - RNA, 20 nt, synthetic construct
  source 1..20: mol_type = other RNA
ccagggtctgtctcacctca

SEQ ID NO: 29412 - RNA, 20 nt, synthetic construct
  source 1..20: mol_type = other RNA
ccagggtgtagccacaagcc

SEQ ID NO: 29413 - RNA, 20 nt, synthetic construct
  source 1..20: mol_type = other RNA
ccaggtagaatgaaaatttt

SEQ ID NO: 29414 - RNA, 20 nt, synthetic construct
  source 1..20: mol_type = other RNA
ccaggtagggaggggtattc

SEQ ID NO: 29415 - RNA, 20 nt, synthetic construct
  source 1..20: mol_type = other RNA
ccaggtatggcgactcatgc

SEQ ID NO: 29416 - RNA, 20 nt, synthetic construct
  source 1..20: mol_type = other RNA
ccaggtattttgttctcttt

SEQ ID NO: 29417 - RNA, 20 nt, synthetic construct
  source 1..20: mol_type = other RNA
ccaggtcagccagaggaagc

SEQ ID NO: 29418 - RNA, 20 nt, synthetic construct
  source 1..20: mol_type = other RNA
ccaggtcagtagtacagtga

SEQ ID NO: 29419 - RNA, 20 nt, synthetic construct
  source 1..20: mol_type = other RNA
ccaggtcattacatattttg

SEQ ID NO: 29420 - RNA, 20 nt, synthetic construct
  source 1..20: mol_type = other RNA
ccaggtggttctgcctaatc

SEQ ID NO: 29421 - RNA, 20 nt, synthetic construct
  source 1..20: mol_type = other RNA
ccaggtgtatgatcttatta

SEQ ID NO: 29422 - RNA, 20 nt, synthetic construct
  source 1..20: mol_type = other RNA
ccaggtgtgagattgataga

SEQ ID NO: 29423 - RNA, 20 nt, synthetic construct
  source 1..20: mol_type = other RNA
ccaggttcatccatgttgtt

SEQ ID NO: 29424 - RNA, 20 nt, synthetic construct
  source 1..20: mol_type = other RNA
ccaggtttacaggatatcag

SEQ ID NO: 29425 - RNA, 20 nt, synthetic construct
  source 1..20: mol_type = other RNA
ccaggtttgtgcttggatat

SEQ ID NO: 29426 - RNA, 20 nt, synthetic construct
  source 1..20: mol_type = other RNA
ccaggttttatctctctcaa

SEQ ID NO: 29427 - RNA, 20 nt, synthetic construct
  source 1..20: mol_type = other RNA
ccaggttttggtaatgggaa

SEQ ID NO: 29428 - RNA, 20 nt, synthetic construct
  source 1..20: mol_type = other RNA
ccagtaagattctgtctcta

SEQ ID NO: 29429 - RNA, 20 nt, synthetic construct
  source 1..20: mol_type = other RNA
ccagtaatcttgctaaacat

SEQ ID NO: 29430 - RNA, 20 nt, synthetic construct
  source 1..20: mol_type = other RNA
ccagtacatctcaattcaga

SEQ ID NO: 29431 - RNA, 20 nt, synthetic construct
  source 1..20: mol_type = other RNA
ccagtactttttcatccaaa

SEQ ID NO: 29432 - RNA, 20 nt, synthetic construct
  source 1..20: mol_type = other RNA
ccagtagaaatcttccagaa

SEQ ID NO: 29433 - RNA, 20 nt, synthetic construct
  source 1..20: mol_type = other RNA
ccagtatacacgtatttata

SEQ ID NO: 29434 - RNA, 20 nt, synthetic construct
  source 1..20: mol_type = other RNA
ccagtatattcatagtagct

SEQ ID NO: 29435 - RNA, 20 nt, synthetic construct
  source 1..20: mol_type = other RNA
ccagtatctcctttccttcc

SEQ ID NO: 29436 - RNA, 20 nt, synthetic construct
  source 1..20: mol_type = other RNA
ccagtatgacctcctcccac

SEQ ID NO: 29437 - RNA, 20 nt, synthetic construct
  source 1..20: mol_type = other RNA
ccagtatgatgccactcaaa

SEQ ID NO: 29438 - RNA, 20 nt, synthetic construct
  source 1..20: mol_type = other RNA
ccagtcactaaaaatcagat

SEQ ID NO: 29439 - RNA, 20 nt, synthetic construct
  source 1..20: mol_type = other RNA
ccagtcagtgatggaggtgg

SEQ ID NO: 29440 - RNA, 20 nt, synthetic construct
  source 1..20: mol_type = other RNA
ccagtcatgtggggactttg

SEQ ID NO: 29441 - RNA, 20 nt, synthetic construct
  source 1..20: mol_type = other RNA
ccagtccagcaccacccttg

SEQ ID NO: 29442 - RNA, 20 nt, synthetic construct
  source 1..20: mol_type = other RNA
ccagtcccactgacagtgga

SEQ ID NO: 29443 - RNA, 20 nt, synthetic construct
  source 1..20: mol_type = other RNA
ccagtccctagtgtctccat

SEQ ID NO: 29444 - RNA, 20 nt, synthetic construct
  source 1..20: mol_type = other RNA
ccagtcctgctaacaccttg

SEQ ID NO: 29445 - RNA, 20 nt, synthetic construct
  source 1..20: mol_type = other RNA
ccagtccttgtgatctatgc

SEQ ID NO: 29446 - RNA, 20 nt, synthetic construct
  source 1..20: mol_type = other RNA
ccagtcctttgggaggtcaa

SEQ ID NO: 29447 - RNA, 20 nt, synthetic construct
  source 1..20: mol_type = other RNA
ccagtcctttgtgtcaagta

SEQ ID NO: 29448 - RNA, 20 nt, synthetic construct
  source 1..20: mol_type = other RNA
ccagtctctacccagcactc

SEQ ID NO: 29449 - RNA, 20 nt, synthetic construct
  source 1..20: mol_type = other RNA
ccagtctctgcaacatttgt

SEQ ID NO: 29450 - RNA, 20 nt, synthetic construct
  source 1..20: mol_type = other RNA
ccagtcttcaggtctctctg

SEQ ID NO: 29451 - RNA, 20 nt, synthetic construct
  source 1..20: mol_type = other RNA
ccagtcttctcatacagatt

SEQ ID NO: 29452 - RNA, 20 nt, synthetic construct
  source 1..20: mol_type = other RNA
ccagtgaactccagtctggg

SEQ ID NO: 29453 - RNA, 20 nt, synthetic construct
  source 1..20: mol_type = other RNA
ccagtgaagtcatctggtcc

SEQ ID NO: 29454 - RNA, 20 nt, synthetic construct
  source 1..20: mol_type = other RNA
ccagtgacacctgaggggtc

SEQ ID NO: 29455 - RNA, 20 nt, synthetic construct
  source 1..20: mol_type = other RNA
ccagtgaccagtgtgatggg

SEQ ID NO: 29456 - RNA, 20 nt, synthetic construct
  source 1..20: mol_type = other RNA
ccagtgagtgatgaaaagag

SEQ ID NO: 29457 - RNA, 20 nt, synthetic construct
  source 1..20: mol_type = other RNA
ccagtgagttcaaatgttaa

SEQ ID NO: 29458 - RNA, 20 nt, synthetic construct
  source 1..20: mol_type = other RNA
ccagtgattggatatttgca

SEQ ID NO: 29459 - RNA, 20 nt, synthetic construct
  source 1..20: mol_type = other RNA
ccagtgcaaacctcctggtt

SEQ ID NO: 29460 - RNA, 20 nt, synthetic construct
  source 1..20: mol_type = other RNA
ccagtgcagcaagcagtaaa

SEQ ID NO: 29461 - RNA, 20 nt, synthetic construct
  source 1..20: mol_type = other RNA
ccagtgcccacctgacaagt

SEQ ID NO: 29462 - RNA, 20 nt, synthetic construct
  source 1..20: mol_type = other RNA
ccagtgctctcccccgaatc

SEQ ID NO: 29463 - RNA, 20 nt, synthetic construct
  source 1..20: mol_type = other RNA
ccagtgcttgcagccttccc

SEQ ID NO: 29464 - RNA, 20 nt, synthetic construct
  source 1..20: mol_type = other RNA
ccagtggcccccctgaaaaa

SEQ ID NO: 29465 - RNA, 20 nt, synthetic construct
  source 1..20: mol_type = other RNA
ccagtggctagtgtgttgac

SEQ ID NO: 29466 - RNA, 20 nt, synthetic construct
  source 1..20: mol_type = other RNA
ccagtgggtcagctagtgtg

SEQ ID NO: 29467 - RNA, 20 nt, synthetic construct
  source 1..20: mol_type = other RNA
ccagtggttgtggaattaac

SEQ ID NO: 29468 - RNA, 20 nt, synthetic construct
  source 1..20: mol_type = other RNA
ccagtgtcctgaatgatttc

SEQ ID NO: 29469 - RNA, 20 nt, synthetic construct
  source 1..20: mol_type = other RNA
ccagtgtctgctacaggggc

SEQ ID NO: 29470 - RNA, 20 nt, synthetic construct
  source 1..20: mol_type = other RNA
ccagtgtgatgggggtaaga

SEQ ID NO: 29471 - RNA, 20 nt, synthetic construct
  source 1..20: mol_type = other RNA
ccagtgtgtttgtttgctag

SEQ ID NO: 29472 - RNA, 20 nt, synthetic construct
  source 1..20: mol_type = other RNA
ccagtgtttggtttttatgg

SEQ ID NO: 29473 - RNA, 20 nt, synthetic construct
  source 1..20: mol_type = other RNA
ccagtgttttaaagcaggga

SEQ ID NO: 29474 - RNA, 20 nt, synthetic construct
  source 1..20: mol_type = other RNA
ccagtgttttaggggggaaa

SEQ ID NO: 29475 - RNA, 20 nt, synthetic construct
  source 1..20: mol_type = other RNA
ccagttactctctctgcctc

SEQ ID NO: 29476 - RNA, 20 nt, synthetic construct
  source 1..20: mol_type = other RNA
ccagttaggaagccactgca

SEQ ID NO: 29477 - RNA, 20 nt, synthetic construct
  source 1..20: mol_type = other RNA
ccagttatcaccatgtgctt

SEQ ID NO: 29478 - RNA, 20 nt, synthetic construct
  source 1..20: mol_type = other RNA
ccagttatctctgccctcat

SEQ ID NO: 29479 - RNA, 20 nt, synthetic construct
  source 1..20: mol_type = other RNA
ccagttcaaggtgttagcag

SEQ ID NO: 29480 - RNA, 20 nt, synthetic construct
  source 1..20: mol_type = other RNA
ccagttcaccagtttctaat

SEQ ID NO: 29481 - RNA, 20 nt, synthetic construct
  source 1..20: mol_type = other RNA
ccagttctgcgcaattgcag

SEQ ID NO: 29482 - RNA, 20 nt, synthetic construct
  source 1..20: mol_type = other RNA
ccagttgagagagaattcta

SEQ ID NO: 29483 - RNA, 20 nt, synthetic construct
  source 1..20: mol_type = other RNA
ccagttgtaatttttaaaag

SEQ ID NO: 29484 - RNA, 20 nt, synthetic construct
  source 1..20: mol_type = other RNA
ccagttgtcagaattagaaa

SEQ ID NO: 29485 - RNA, 20 nt, synthetic construct
  source 1..20: mol_type = other RNA
ccagtttaaagctttgtgac

SEQ ID NO: 29486 - RNA, 20 nt, synthetic construct
  source 1..20: mol_type = other RNA
ccagtttatatgcctagatg

SEQ ID NO: 29487 - RNA, 20 nt, synthetic construct
  source 1..20: mol_type = other RNA
ccagtttctaattagaatta

SEQ ID NO: 29488 - RNA, 20 nt, synthetic construct
  source 1..20: mol_type = other RNA
ccagtttctctgctttttct

SEQ ID NO: 29489 - RNA, 20 nt, synthetic construct
  source 1..20: mol_type = other RNA
ccagtttgggtgacagagag

SEQ ID NO: 29490 - RNA, 20 nt, synthetic construct
  source 1..20: mol_type = other RNA
ccagttttctggaaactcaa

SEQ ID NO: 29491 - RNA, 20 nt, synthetic construct
  source 1..20: mol_type = other RNA
ccagttttgttgaatcttaa

SEQ ID NO: 29492 - RNA, 20 nt, synthetic construct
  source 1..20: mol_type = other RNA
ccataaaaaccaaacactgg

SEQ ID NO: 29493 - RNA, 20 nt, synthetic construct
  source 1..20: mol_type = other RNA
ccataaaaagcgttggagac

SEQ ID NO: 29494 - RNA, 20 nt, synthetic construct
  source 1..20: mol_type = other RNA
ccataaaaccatttttcaga

SEQ ID NO: 29495 - RNA, 20 nt, synthetic construct
  source 1..20: mol_type = other RNA
ccataaactgaacatttata

SEQ ID NO: 29496 - RNA, 20 nt, synthetic construct
  source 1..20: mol_type = other RNA
ccataaagtcagaggagcag

SEQ ID NO: 29497 - RNA, 20 nt, synthetic construct
  source 1..20: mol_type = other RNA
ccataaagtcttccatttta

SEQ ID NO: 29498 - RNA, 20 nt, synthetic construct
  source 1..20: mol_type = other RNA
ccataaatcaaggtacaata

SEQ ID NO: 29499 - RNA, 20 nt, synthetic construct
  source 1..20: mol_type = other RNA
ccataaatgtttgctaataa

SEQ ID NO: 29500 - RNA, 20 nt, synthetic construct
  source 1..20: mol_type = other RNA
ccataagagtccccaactgc

SEQ ID NO: 29501 - RNA, 20 nt, synthetic construct
  source 1..20: mol_type = other RNA
ccataagatctgtctttggc

SEQ ID NO: 29502 - RNA, 20 nt, synthetic construct
  source 1..20: mol_type = other RNA
ccataagtccctaacagtct

SEQ ID NO: 29503 - RNA, 20 nt, synthetic construct
  source 1..20: mol_type = other RNA
ccataatatatttcacaatc

SEQ ID NO: 29504 - RNA, 20 nt, synthetic construct
  source 1..20: mol_type = other RNA
ccataatccttagattacaa

SEQ ID NO: 29505 - RNA, 20 nt, synthetic construct
  source 1..20: mol_type = other RNA
ccataatgagtaacatgtgg

SEQ ID NO: 29506 - RNA, 20 nt, synthetic construct
  source 1..20: mol_type = other RNA
ccatacaaggagacctacta

SEQ ID NO: 29507 - RNA, 20 nt, synthetic construct
  source 1..20: mol_type = other RNA
ccatacagtgccttcagcta

SEQ ID NO: 29508 - RNA, 20 nt, synthetic construct
  source 1..20: mol_type = other RNA
ccataccacctgtcagaaac

SEQ ID NO: 29509 - RNA, 20 nt, synthetic construct
  source 1..20: mol_type = other RNA
ccataccccctggaaataag

SEQ ID NO: 29510 - RNA, 20 nt, synthetic construct
  source 1..20: mol_type = other RNA
ccatacctggtccttaaatt

SEQ ID NO: 29511 - RNA, 20 nt, synthetic construct
  source 1..20: mol_type = other RNA
ccatacgaaagcctttattt

SEQ ID NO: 29512 - RNA, 20 nt, synthetic construct
  source 1..20: mol_type = other RNA
ccatactcagccccctcgaa

SEQ ID NO: 29513 - RNA, 20 nt, synthetic construct
  source 1..20: mol_type = other RNA
ccatacttttcaactgaaca

SEQ ID NO: 29514 - RNA, 20 nt, synthetic construct
  source 1..20: mol_type = other RNA
ccatagagctttaaagttaa

SEQ ID NO: 29515 - RNA, 20 nt, synthetic construct
  source 1..20: mol_type = other RNA
ccatagagggagcatcttcc

SEQ ID NO: 29516 - RNA, 20 nt, synthetic construct
  source 1..20: mol_type = other RNA
ccatagctgaaggcactgta

SEQ ID NO: 29517 - RNA, 20 nt, synthetic construct
  source 1..20: mol_type = other RNA
ccatagcttcctaagaaagg

SEQ ID NO: 29518 - RNA, 20 nt, synthetic construct
  source 1..20: mol_type = other RNA
ccataggcacgcgcccccat

SEQ ID NO: 29519 - RNA, 20 nt, synthetic construct
  source 1..20: mol_type = other RNA
ccatagtgtaaactaaaagt

SEQ ID NO: 29520 - RNA, 20 nt, synthetic construct
  source 1..20: mol_type = other RNA
ccatagttaatgtgtgaaga

SEQ ID NO: 29521 - RNA, 20 nt, synthetic construct
  source 1..20: mol_type = other RNA
ccatataaggggaatcatgc

SEQ ID NO: 29522 - RNA, 20 nt, synthetic construct
  source 1..20: mol_type = other RNA
ccatataatctaaccctcct

SEQ ID NO: 29523 - RNA, 20 nt, synthetic construct
  source 1..20: mol_type = other RNA
ccatatacacaaaaagatct

SEQ ID NO: 29524 - RNA, 20 nt, synthetic construct
  source 1..20: mol_type = other RNA
ccatatccttttatgtgcag

SEQ ID NO: 29525 - RNA, 20 nt, synthetic construct
  source 1..20: mol_type = other RNA
ccatatctacatgtacgcca

SEQ ID NO: 29526 - RNA, 20 nt, synthetic construct
  source 1..20: mol_type = other RNA
ccatatctttgcttataaca

SEQ ID NO: 29527 - RNA, 20 nt, synthetic construct
  source 1..20: mol_type = other RNA
ccatatggaggcaatgttga

SEQ ID NO: 29528 - RNA, 20 nt, synthetic construct
  source 1..20: mol_type = other RNA
ccatatgggatgcttaaagc

SEQ ID NO: 29529 - RNA, 20 nt, synthetic construct
  source 1..20: mol_type = other RNA
ccatatggttaatagtgacc

SEQ ID NO: 29530 - RNA, 20 nt, synthetic construct
  source 1..20: mol_type = other RNA
ccatatggtttacaatggtt

SEQ ID NO: 29531 - RNA, 20 nt, synthetic construct
  source 1..20: mol_type = other RNA
ccatatgtagggcaccgtga

SEQ ID NO: 29532 - RNA, 20 nt, synthetic construct
  source 1..20: mol_type = other RNA
ccatattagagtgaaaagaa

SEQ ID NO: 29533 - RNA, 20 nt, synthetic construct
  source 1..20: mol_type = other RNA
ccatattggccaggctggtt

SEQ ID NO: 29534 - RNA, 20 nt, synthetic construct
  source 1..20: mol_type = other RNA
ccatcaacagcagaacaaac

SEQ ID NO: 29535 - RNA, 20 nt, synthetic construct
  source 1..20: mol_type = other RNA
ccatcaacctaatgaaattt

SEQ ID NO: 29536 - RNA, 20 nt, synthetic construct
  source 1..20: mol_type = other RNA
ccatcaagtgtgatcccaaa

SEQ ID NO: 29537 - RNA, 20 nt, synthetic construct
  source 1..20: mol_type = other RNA
ccatcacacccagtatacac

SEQ ID NO: 29538 - RNA, 20 nt, synthetic construct
  source 1..20: mol_type = other RNA
ccatcacactggtcactggc

SEQ ID NO: 29539 - RNA, 20 nt, synthetic construct
  source 1..20: mol_type = other RNA
ccatcacattttgaatcatg

SEQ ID NO: 29540 - RNA, 20 nt, synthetic construct
  source 1..20: mol_type = other RNA
ccatcactagaatgtgactt

SEQ ID NO: 29541 - RNA, 20 nt, synthetic construct
  source 1..20: mol_type = other RNA
ccatcactgactggctgtgc

SEQ ID NO: 29542 - RNA, 20 nt, synthetic construct
  source 1..20: mol_type = other RNA
ccatcagagaggctttttat

SEQ ID NO: 29543 - RNA, 20 nt, synthetic construct
  source 1..20: mol_type = other RNA
ccatcagagtgaacaggcaa

SEQ ID NO: 29544 - RNA, 20 nt, synthetic construct
  source 1..20: mol_type = other RNA
ccatcaggaaaaccagttta

SEQ ID NO: 29545 - RNA, 20 nt, synthetic construct
  source 1..20: mol_type = other RNA
ccatcagtggttgtgcttcg

SEQ ID NO: 29546 - RNA, 20 nt, synthetic construct
  source 1..20: mol_type = other RNA
ccatcatcatcaggctggct

SEQ ID NO: 29547 - RNA, 20 nt, synthetic construct
  source 1..20: mol_type = other RNA
ccatcatgcctgggtaatta

SEQ ID NO: 29548 - RNA, 20 nt, synthetic construct
  source 1..20: mol_type = other RNA
ccatcattttatgaaaccat

SEQ ID NO: 29549 - RNA, 20 nt, synthetic construct
  source 1..20: mol_type = other RNA
ccatccacccacttgtccca

SEQ ID NO: 29550 - RNA, 20 nt, synthetic construct
  source 1..20: mol_type = other RNA
ccatcccagctacataactt

SEQ ID NO: 29551 - RNA, 20 nt, synthetic construct
  source 1..20: mol_type = other RNA
ccatccccgctgtccatttc

SEQ ID NO: 29552 - RNA, 20 nt, synthetic construct
  source 1..20: mol_type = other RNA
ccatcccctttacccctgag

SEQ ID NO: 29553 - RNA, 20 nt, synthetic construct
  source 1..20: mol_type = other RNA
ccatcctatctaagcctact

SEQ ID NO: 29554 - RNA, 20 nt, synthetic construct
  source 1..20: mol_type = other RNA
ccatcctccagccttaatct

SEQ ID NO: 29555 - RNA, 20 nt, synthetic construct
  source 1..20: mol_type = other RNA
ccatcctctatttttgtctg

SEQ ID NO: 29556 - RNA, 20 nt, synthetic construct
  source 1..20: mol_type = other RNA
ccatcctggatttgggaagg

SEQ ID NO: 29557 - RNA, 20 nt, synthetic construct
  source 1..20: mol_type = other RNA
ccatccttcccaaatccagg

SEQ ID NO: 29558 - RNA, 20 nt, synthetic construct
  source 1..20: mol_type = other RNA
ccatcctttccttgtcctaa

SEQ ID NO: 29559 - RNA, 20 nt, synthetic construct
  source 1..20: mol_type = other RNA
ccatcgagagatgaatggat

SEQ ID NO: 29560 - RNA, 20 nt, synthetic construct
  source 1..20: mol_type = other RNA
ccatcgcgcccagcccgtgt

SEQ ID NO: 29561 - RNA, 20 nt, synthetic construct
  source 1..20: mol_type = other RNA
ccatcggtctgtatttctgc

SEQ ID NO: 29562 - RNA, 20 nt, synthetic construct
  source 1..20: mol_type = other RNA
ccatcgttcacactcgcact

SEQ ID NO: 29563 - RNA, 20 nt, synthetic construct
  source 1..20: mol_type = other RNA
ccatctaaagccaggctttc

SEQ ID NO: 29564 - RNA, 20 nt, synthetic construct
  source 1..20: mol_type = other RNA
ccatctaacagaaatacaat

SEQ ID NO: 29565 - RNA, 20 nt, synthetic construct
  source 1..20: mol_type = other RNA
ccatctaattcacatttaag

SEQ ID NO: 29566 - RNA, 20 nt, synthetic construct
  source 1..20: mol_type = other RNA
ccatctcaagaaaacaagaa

SEQ ID NO: 29567 - RNA, 20 nt, synthetic construct
  source 1..20: mol_type = other RNA
ccatctcactcacctagctg

SEQ ID NO: 29568 - RNA, 20 nt, synthetic construct
  source 1..20: mol_type = other RNA
ccatctcagcacagagccga

SEQ ID NO: 29569 - RNA, 20 nt, synthetic construct
  source 1..20: mol_type = other RNA
ccatctcccatcactagaat

SEQ ID NO: 29570 - RNA, 20 nt, synthetic construct
  source 1..20: mol_type = other RNA
ccatctccttaatccagtct

SEQ ID NO: 29571 - RNA, 20 nt, synthetic construct
  source 1..20: mol_type = other RNA
ccatctctaccaaaatataa

SEQ ID NO: 29572 - RNA, 20 nt, synthetic construct
  source 1..20: mol_type = other RNA
ccatctctagttttccagta

SEQ ID NO: 29573 - RNA, 20 nt, synthetic construct
  source 1..20: mol_type = other RNA
ccatctctccaacagaagaa

SEQ ID NO: 29574 - RNA, 20 nt, synthetic construct
  source 1..20: mol_type = other RNA
ccatctctctgcctcaaaat

SEQ ID NO: 29575 - RNA, 20 nt, synthetic construct
  source 1..20: mol_type = other RNA
ccatctgaattcaagttaca

SEQ ID NO: 29576 - RNA, 20 nt, synthetic construct
  source 1..20: mol_type = other RNA
ccatctgacatatgttttgc

SEQ ID NO: 29577 - RNA, 20 nt, synthetic construct
  source 1..20: mol_type = other RNA
ccatctgataagcccaacct

SEQ ID NO: 29578 - RNA, 20 nt, synthetic construct
  source 1..20: mol_type = other RNA
ccatctggattatagtggta

SEQ ID NO: 29579 - RNA, 20 nt, synthetic construct
  source 1..20: mol_type = other RNA
ccatctgggatacttctaac

SEQ ID NO: 29580 - RNA, 20 nt, synthetic construct
  source 1..20: mol_type = other RNA
ccatctgttaaaagatacga

SEQ ID NO: 29581 - RNA, 20 nt, synthetic construct
  source 1..20: mol_type = other RNA
ccatctgttatagtgtgaaa

SEQ ID NO: 29582 - RNA, 20 nt, synthetic construct
  source 1..20: mol_type = other RNA
ccatcttaaaattcatatga

SEQ ID NO: 29583 - RNA, 20 nt, synthetic construct
  source 1..20: mol_type = other RNA
ccatcttaggccataaatca

SEQ ID NO: 29584 - RNA, 20 nt, synthetic construct
  source 1..20: mol_type = other RNA
ccatcttcaagatttcatag

SEQ ID NO: 29585 - RNA, 20 nt, synthetic construct
  source 1..20: mol_type = other RNA
ccatcttcacgtggcgctcc

SEQ ID NO: 29586 - RNA, 20 nt, synthetic construct
  source 1..20: mol_type = other RNA
ccatcttcatttctaagcca

SEQ ID NO: 29587 - RNA, 20 nt, synthetic construct
  source 1..20: mol_type = other RNA
ccatcttccatacgaaagcc

SEQ ID NO: 29588 - RNA, 20 nt, synthetic construct
  source 1..20: mol_type = other RNA
ccatcttcttagtgttccct

SEQ ID NO: 29589 - RNA, 20 nt, synthetic construct
  source 1..20: mol_type = other RNA
ccatcttgcataagtttttt

SEQ ID NO: 29590 - RNA, 20 nt, synthetic construct
  source 1..20: mol_type = other RNA
ccatgaaaataaaaagtatc

SEQ ID NO: 29591 - RNA, 20 nt, synthetic construct
  source 1..20: mol_type = other RNA
ccatgaaaattgaattatag

SEQ ID NO: 29592 - RNA, 20 nt, synthetic construct
  source 1..20: mol_type = other RNA
ccatgaaacttatttccagg

SEQ ID NO: 29593 - RNA, 20 nt, synthetic construct
  source 1..20: mol_type = other RNA
ccatgaacatggtttgatcc

SEQ ID NO: 29594 - RNA, 20 nt, synthetic construct
  source 1..20: mol_type = other RNA
ccatgaagaaaacactccag

SEQ ID NO: 29595 - RNA, 20 nt, synthetic construct
  source 1..20: mol_type = other RNA
ccatgaagccagcattaccc

SEQ ID NO: 29596 - RNA, 20 nt, synthetic construct
  source 1..20: mol_type = other RNA
ccatgacagagttccacctc

SEQ ID NO: 29597 - RNA, 20 nt, synthetic construct
  source 1..20: mol_type = other RNA
ccatgacatgtgttttattt

SEQ ID NO: 29598 - RNA, 20 nt, synthetic construct
  source 1..20: mol_type = other RNA
ccatgagattacatagcaag

SEQ ID NO: 29599 - RNA, 20 nt, synthetic construct
  source 1..20: mol_type = other RNA
ccatgatctttggaaatgaa

SEQ ID NO: 29600 - RNA, 20 nt, synthetic construct
  source 1..20: mol_type = other RNA
ccatgatgcagcccctgcca

SEQ ID NO: 29601 - RNA, 20 nt, synthetic construct
  source 1..20: mol_type = other RNA
ccatgattcaaaatgtgatg

SEQ ID NO: 29602 - RNA, 20 nt, synthetic construct
  source 1..20: mol_type = other RNA
ccatgcaggagaaacatggc

SEQ ID NO: 29603 - RNA, 20 nt, synthetic construct
  source 1..20: mol_type = other RNA
ccatgcaggttcatgtgtgc

SEQ ID NO: 29604 - RNA, 20 nt, synthetic construct
  source 1..20: mol_type = other RNA
ccatgcattcgtccctaaac

SEQ ID NO: 29605 - RNA, 20 nt, synthetic construct
  source 1..20: mol_type = other RNA
ccatgcccatgtgcattatt

SEQ ID NO: 29606 - RNA, 20 nt, synthetic construct
  source 1..20: mol_type = other RNA
ccatggaaactacaattact

SEQ ID NO: 29607 - RNA, 20 nt, synthetic construct
  source 1..20: mol_type = other RNA
ccatggaggggccagttgag

SEQ ID NO: 29608 - RNA, 20 nt, synthetic construct
  source 1..20: mol_type = other RNA
ccatggcaggtttcaagtga

SEQ ID NO: 29609 - RNA, 20 nt, synthetic construct
  source 1..20: mol_type = other RNA
ccatggctcactgcggcctc

SEQ ID NO: 29610 - RNA, 20 nt, synthetic construct
  source 1..20: mol_type = other RNA
ccatgggacaagtgggtgga

SEQ ID NO: 29611 - RNA, 20 nt, synthetic construct
  source 1..20: mol_type = other RNA
ccatggtatgtgccatctcc

SEQ ID NO: 29612 - RNA, 20 nt, synthetic construct
  source 1..20: mol_type = other RNA
ccatggtcaaatcaatactt

SEQ ID NO: 29613 - RNA, 20 nt, synthetic construct
  source 1..20: mol_type = other RNA
ccatggtgttaaatatttac

SEQ ID NO: 29614 - RNA, 20 nt, synthetic construct
  source 1..20: mol_type = other RNA
ccatgtaacaggtttaataa

SEQ ID NO: 29615 - RNA, 20 nt, synthetic construct
  source 1..20: mol_type = other RNA
ccatgtcatgtatatgctgt

SEQ ID NO: 29616 - RNA, 20 nt, synthetic construct
  source 1..20: mol_type = other RNA
ccatgtcctcacctcacatt

SEQ ID NO: 29617 - RNA, 20 nt, synthetic construct
  source 1..20: mol_type = other RNA
ccatgtctaaagtattgttt

SEQ ID NO: 29618 - RNA, 20 nt, synthetic construct
  source 1..20: mol_type = other RNA
ccatgtcttggctattgtca

SEQ ID NO: 29619 - RNA, 20 nt, synthetic construct
  source 1..20: mol_type = other RNA
ccatgtgcattattgtaatt

SEQ ID NO: 29620 - RNA, 20 nt, synthetic construct
  source 1..20: mol_type = other RNA
ccatgtgcttatcaataaaa

SEQ ID NO: 29621 - RNA, 20 nt, synthetic construct
  source 1..20: mol_type = other RNA
ccatgtgttggcactgaagc

SEQ ID NO: 29622 - RNA, 20 nt, synthetic construct
  source 1..20: mol_type = other RNA
ccatgtgttttgttttgaat

SEQ ID NO: 29623 - RNA, 20 nt, synthetic construct
  source 1..20: mol_type = other RNA
ccatgttcactgcagaatta

SEQ ID NO: 29624 - RNA, 20 nt, synthetic construct
  source 1..20: mol_type = other RNA
ccatgttcatgggaagatgc

SEQ ID NO: 29625 - RNA, 20 nt, synthetic construct
  source 1..20: mol_type = other RNA
ccatgttgttcttttcaaaa

SEQ ID NO: 29626 - RNA, 20 nt, synthetic construct
  source 1..20: mol_type = other RNA
ccatgttgttgaatgtggca

SEQ ID NO: 29627 - RNA, 20 nt, synthetic construct
  source 1..20: mol_type = other RNA
ccatgtttccataaaaagcg

SEQ ID NO: 29628 - RNA, 20 nt, synthetic construct
  source 1..20: mol_type = other RNA
ccatgtttctcctgcatggg

SEQ ID NO: 29629 - RNA, 20 nt, synthetic construct
  source 1..20: mol_type = other RNA
ccatgttttaggagtcaact

SEQ ID NO: 29630 - RNA, 20 nt, synthetic construct
  source 1..20: mol_type = other RNA
ccatgttttatttcttgacc

SEQ ID NO: 29631 - RNA, 20 nt, synthetic construct
  source 1..20: mol_type = other RNA
ccattaaaaccatgaaaata

SEQ ID NO: 29632 - RNA, 20 nt, synthetic construct
  source 1..20: mol_type = other RNA
ccattaacagatgaatgaac

SEQ ID NO: 29633 - RNA, 20 nt, synthetic construct
  source 1..20: mol_type = other RNA
ccattaacagctcagaagct

SEQ ID NO: 29634 - RNA, 20 nt, synthetic construct
  source 1..20: mol_type = other RNA
ccattacatcaacatataaa

SEQ ID NO: 29635 - RNA, 20 nt, synthetic construct
  source 1..20: mol_type = other RNA
ccattaccaaaacctggtat

SEQ ID NO: 29636 - RNA, 20 nt, synthetic construct
  source 1..20: mol_type = other RNA
ccattactcggtatgtaccc

SEQ ID NO: 29637 - RNA, 20 nt, synthetic construct
  source 1..20: mol_type = other RNA
ccattactcgtggttatagc

SEQ ID NO: 29638 - RNA, 20 nt, synthetic construct
  source 1..20: mol_type = other RNA
ccattactcttctactcact

SEQ ID NO: 29639 - RNA, 20 nt, synthetic construct
  source 1..20: mol_type = other RNA
ccattagacactaactttct

SEQ ID NO: 29640 - RNA, 20 nt, synthetic construct
  source 1..20: mol_type = other RNA
ccattagagtaagcaactgc

SEQ ID NO: 29641 - RNA, 20 nt, synthetic construct
  source 1..20: mol_type = other RNA
ccattagcagttctgtaccc

SEQ ID NO: 29642 - RNA, 20 nt, synthetic construct
  source 1..20: mol_type = other RNA
ccattaggatagctattatt

SEQ ID NO: 29643 - RNA, 20 nt, synthetic construct
  source 1..20: mol_type = other RNA
ccattataaaataggaagtc

SEQ ID NO: 29644 - RNA, 20 nt, synthetic construct
  source 1..20: mol_type = other RNA
ccattatatgaataaaccac

SEQ ID NO: 29645 - RNA, 20 nt, synthetic construct
  source 1..20: mol_type = other RNA
ccattattccataaaaacca

SEQ ID NO: 29646 - RNA, 20 nt, synthetic construct
  source 1..20: mol_type = other RNA
ccattcaatccttgtaactt

SEQ ID NO: 29647 - RNA, 20 nt, synthetic construct
  source 1..20: mol_type = other RNA
ccattcaattgtcctggcag

SEQ ID NO: 29648 - RNA, 20 nt, synthetic construct
  source 1..20: mol_type = other RNA
ccattcacacaccctttctt

SEQ ID NO: 29649 - RNA, 20 nt, synthetic construct
  source 1..20: mol_type = other RNA
ccattcactcagcataattg

SEQ ID NO: 29650 - RNA, 20 nt, synthetic construct
  source 1..20: mol_type = other RNA
ccattcatattttcattaca

SEQ ID NO: 29651 - RNA, 20 nt, synthetic construct
  source 1..20: mol_type = other RNA
ccattcatctctcgatggac

SEQ ID NO: 29652 - RNA, 20 nt, synthetic construct
  source 1..20: mol_type = other RNA
ccattcatgtaatgcaaact

SEQ ID NO: 29653 - RNA, 20 nt, synthetic construct
  source 1..20: mol_type = other RNA
ccattccacgctgtggcttg

SEQ ID NO: 29654 - RNA, 20 nt, synthetic construct
  source 1..20: mol_type = other RNA
ccattccagccattctcttc

SEQ ID NO: 29655 - RNA, 20 nt, synthetic construct
  source 1..20: mol_type = other RNA
ccattccaggttttatctct

SEQ ID NO: 29656 - RNA, 20 nt, synthetic construct
  source 1..20: mol_type = other RNA
ccattccccttgccaaggct

SEQ ID NO: 29657 - RNA, 20 nt, synthetic construct
  source 1..20: mol_type = other RNA
ccattccctgtctgtgatgt

SEQ ID NO: 29658 - RNA, 20 nt, synthetic construct
  source 1..20: mol_type = other RNA
ccattccttttcgagactga

SEQ ID NO: 29659 - RNA, 20 nt, synthetic construct
  source 1..20: mol_type = other RNA
ccattctcccagttgtcaga

SEQ ID NO: 29660 - RNA, 20 nt, synthetic construct
  source 1..20: mol_type = other RNA
ccattctcttctggatagca

SEQ ID NO: 29661 - RNA, 20 nt, synthetic construct
  source 1..20: mol_type = other RNA
ccattctgctatgaaatgtg

SEQ ID NO: 29662 - RNA, 20 nt, synthetic construct
  source 1..20: mol_type = other RNA
ccattgacaatataggagac

SEQ ID NO: 29663 - RNA, 20 nt, synthetic construct
  source 1..20: mol_type = other RNA
ccattgagccaaagaagaaa

SEQ ID NO: 29664 - RNA, 20 nt, synthetic construct
  source 1..20: mol_type = other RNA
ccattgcactccacgtgggt

SEQ ID NO: 29665 - RNA, 20 nt, synthetic construct
  source 1..20: mol_type = other RNA
ccattgggtacataccgagt

SEQ ID NO: 29666 - RNA, 20 nt, synthetic construct
  source 1..20: mol_type = other RNA
ccattgtaaaccatatggtt

SEQ ID NO: 29667 - RNA, 20 nt, synthetic construct
  source 1..20: mol_type = other RNA
ccattgtacacatattaaat

SEQ ID NO: 29668 - RNA, 20 nt, synthetic construct
  source 1..20: mol_type = other RNA
ccattgtgtggacacactga

SEQ ID NO: 29669 - RNA, 20 nt, synthetic construct
  source 1..20: mol_type = other RNA
ccattgttctctttgtttat

SEQ ID NO: 29670 - RNA, 20 nt, synthetic construct
  source 1..20: mol_type = other RNA
ccatttaccccttaaattcc

SEQ ID NO: 29671 - RNA, 20 nt, synthetic construct
  source 1..20: mol_type = other RNA
ccatttagatcatcttatat

SEQ ID NO: 29672 - RNA, 20 nt, synthetic construct
  source 1..20: mol_type = other RNA
ccatttatcagcaccaaaga

SEQ ID NO: 29673 - RNA, 20 nt, synthetic construct
  source 1..20: mol_type = other RNA
ccatttattcctctcttgga

SEQ ID NO: 29674 - RNA, 20 nt, synthetic construct
  source 1..20: mol_type = other RNA
ccatttattgtcaaggtcat

SEQ ID NO: 29675 - RNA, 20 nt, synthetic construct
  source 1..20: mol_type = other RNA
ccatttcaggttttcgacca

SEQ ID NO: 29676 - RNA, 20 nt, synthetic construct
  source 1..20: mol_type = other RNA
ccatttcatgccatcctgga

SEQ ID NO: 29677 - RNA, 20 nt, synthetic construct
  source 1..20: mol_type = other RNA
ccatttcatttctgtttttt

SEQ ID NO: 29678 - RNA, 20 nt, synthetic construct
  source 1..20: mol_type = other RNA
ccatttccagtactttttca

SEQ ID NO: 29679 - RNA, 20 nt, synthetic construct
  source 1..20: mol_type = other RNA
ccatttccctgcttcatctg

SEQ ID NO: 29680 - RNA, 20 nt, synthetic construct
  source 1..20: mol_type = other RNA
ccatttccttaagcacagac

SEQ ID NO: 29681 - RNA, 20 nt, synthetic construct
  source 1..20: mol_type = other RNA
ccatttgaccttccttgtgt

SEQ ID NO: 29682 - RNA, 20 nt, synthetic construct
  source 1..20: mol_type = other RNA
ccatttgattgccagttttc

SEQ ID NO: 29683 - RNA, 20 nt, synthetic construct
  source 1..20: mol_type = other RNA
ccatttgatttcttctttgg

SEQ ID NO: 29684 - RNA, 20 nt, synthetic construct
  source 1..20: mol_type = other RNA
ccatttgggactgagacagt

SEQ ID NO: 29685 - RNA, 20 nt, synthetic construct
  source 1..20: mol_type = other RNA
ccatttgtaacatgttagat

SEQ ID NO: 29686 - RNA, 20 nt, synthetic construct
  source 1..20: mol_type = other RNA
ccatttgtggcatctttgtt

SEQ ID NO: 29687 - RNA, 20 nt, synthetic construct
  source 1..20: mol_type = other RNA
ccatttgttttgtgtttgtg

SEQ ID NO: 29688 - RNA, 20 nt, synthetic construct
  source 1..20: mol_type = other RNA
ccattttaataacaaaaggt

SEQ ID NO: 29689 - RNA, 20 nt, synthetic construct
  source 1..20: mol_type = other RNA
ccattttagatcaagtcctt

SEQ ID NO: 29690 - RNA, 20 nt, synthetic construct
  source 1..20: mol_type = other RNA
ccattttattaatttggctt

SEQ ID NO: 29691 - RNA, 20 nt, synthetic construct
  source 1..20: mol_type = other RNA
ccattttcaatcttggaaat

SEQ ID NO: 29692 - RNA, 20 nt, synthetic construct
  source 1..20: mol_type = other RNA
ccattttcgaattagattgt

SEQ ID NO: 29693 - RNA, 20 nt, synthetic construct
  source 1..20: mol_type = other RNA
ccattttgccagctaacttt

SEQ ID NO: 29694 - RNA, 20 nt, synthetic construct
  source 1..20: mol_type = other RNA
ccattttgcttaataattca

SEQ ID NO: 29695 - RNA, 20 nt, synthetic construct
  source 1..20: mol_type = other RNA
ccattttggtcttaccctct

SEQ ID NO: 29696 - RNA, 20 nt, synthetic construct
  source 1..20: mol_type = other RNA
ccatttttatatctttggaa

SEQ ID NO: 29697 - RNA, 20 nt, synthetic construct
  source 1..20: mol_type = other RNA
ccatttttcagaaatgttta

SEQ ID NO: 29698 - RNA, 20 nt, synthetic construct
  source 1..20: mol_type = other RNA
ccatttttctcgacacacaa

SEQ ID NO: 29699 - RNA, 20 nt, synthetic construct
  source 1..20: mol_type = other RNA
ccatttttctgaccaactat

SEQ ID NO: 29700 - RNA, 20 nt, synthetic construct
  source 1..20: mol_type = other RNA
ccattttttcaccagcggca

SEQ ID NO: 29701 - RNA, 20 nt, synthetic construct
  source 1..20: mol_type = other RNA
cccaaaaacaaaagagtaga

SEQ ID NO: 29702 - RNA, 20 nt, synthetic construct
  source 1..20: mol_type = other RNA
cccaaaaaggtttttatttt

SEQ ID NO: 29703 - RNA, 20 nt, synthetic construct
  source 1..20: mol_type = other RNA
cccaaaacttaggaggctat

SEQ ID NO: 29704 - RNA, 20 nt, synthetic construct
  source 1..20: mol_type = other RNA
cccaaaattaccccattcac

SEQ ID NO: 29705 - RNA, 20 nt, synthetic construct
  source 1..20: mol_type = other RNA
cccaaaccatcaagtgtgat

SEQ ID NO: 29706 - RNA, 20 nt, synthetic construct
  source 1..20: mol_type = other RNA
cccaaagaaggaaaaaacac

SEQ ID NO: 29707 - RNA, 20 nt, synthetic construct
  source 1..20: mol_type = other RNA
cccaaagacatcctgattta

SEQ ID NO: 29708 - RNA, 20 nt, synthetic construct
  source 1..20: mol_type = other RNA
cccaaagactttgttttgtt

SEQ ID NO: 29709 - RNA, 20 nt, synthetic construct
  source 1..20: mol_type = other RNA
cccaaagatagactcttcag

SEQ ID NO: 29710 - RNA, 20 nt, synthetic construct
  source 1..20: mol_type = other RNA
cccaaagatattagctacaa

SEQ ID NO: 29711 - RNA, 20 nt, synthetic construct
  source 1..20: mol_type = other RNA
cccaaagcaaaagcaaaatt

SEQ ID NO: 29712 - RNA, 20 nt, synthetic construct
  source 1..20: mol_type = other RNA
cccaaaggactgggatccta

SEQ ID NO: 29713 - RNA, 20 nt, synthetic construct
  source 1..20: mol_type = other RNA
cccaaagtgagcagaaggag

SEQ ID NO: 29714 - RNA, 20 nt, synthetic construct
  source 1..20: mol_type = other RNA
cccaaataacatgcatatgt

SEQ ID NO: 29715 - RNA, 20 nt, synthetic construct
  source 1..20: mol_type = other RNA
cccaaatacctctgaatgtg

SEQ ID NO: 29716 - RNA, 20 nt, synthetic construct
  source 1..20: mol_type = other RNA
cccaaatccaggatggcatg

SEQ ID NO: 29717 - RNA, 20 nt, synthetic construct
  source 1..20: mol_type = other RNA
cccaaatgcaccaacacctg

SEQ ID NO: 29718 - RNA, 20 nt, synthetic construct
  source 1..20: mol_type = other RNA
cccaaatgggagcatgcaca

SEQ ID NO: 29719 - RNA, 20 nt, synthetic construct
  source 1..20: mol_type = other RNA
cccaaatgtcttaagaagga

SEQ ID NO: 29720 - RNA, 20 nt, synthetic construct
  source 1..20: mol_type = other RNA
cccaaattaaaggatgtcaa

SEQ ID NO: 29721 - RNA, 20 nt, synthetic construct
  source 1..20: mol_type = other RNA
cccaaattggcatttaaaag

SEQ ID NO: 29722 - RNA, 20 nt, synthetic construct
  source 1..20: mol_type = other RNA
cccaacaaacaattagcacc

SEQ ID NO: 29723 - RNA, 20 nt, synthetic construct
  source 1..20: mol_type = other RNA
cccaacaggctgagtgcggt

SEQ ID NO: 29724 - RNA, 20 nt, synthetic construct
  source 1..20: mol_type = other RNA
cccaacagggttttgttttg

SEQ ID NO: 29725 - RNA, 20 nt, synthetic construct
  source 1..20: mol_type = other RNA
cccaacatgagagaaaattg

SEQ ID NO: 29726 - RNA, 20 nt, synthetic construct
  source 1..20: mol_type = other RNA
cccaacatgctcttaagtat

SEQ ID NO: 29727 - RNA, 20 nt, synthetic construct
  source 1..20: mol_type = other RNA
cccaaccctacctagggtgt

SEQ ID NO: 29728 - RNA, 20 nt, synthetic construct
  source 1..20: mol_type = other RNA
cccaacctgattagaggctg

SEQ ID NO: 29729 - RNA, 20 nt, synthetic construct
  source 1..20: mol_type = other RNA
cccaactctttctttgattt

SEQ ID NO: 29730 - RNA, 20 nt, synthetic construct
  source 1..20: mol_type = other RNA
cccaactgcaaaactttctt

SEQ ID NO: 29731 - RNA, 20 nt, synthetic construct
  source 1..20: mol_type = other RNA
cccaacttcacaccatttag

SEQ ID NO: 29732 - RNA, 20 nt, synthetic construct
  source 1..20: mol_type = other RNA
cccaactttttctttttagt

SEQ ID NO: 29733 - RNA, 20 nt, synthetic construct
  source 1..20: mol_type = other RNA
cccaagaaagcaggtcatga

SEQ ID NO: 29734 - RNA, 20 nt, synthetic construct
  source 1..20: mol_type = other RNA
cccaagaatttcatgccttt

SEQ ID NO: 29735 - RNA, 20 nt, synthetic construct
  source 1..20: mol_type = other RNA
cccaagatcataagctttta

SEQ ID NO: 29736 - RNA, 20 nt, synthetic construct
  source 1..20: mol_type = other RNA
cccaagcaagtgtggtggtc

SEQ ID NO: 29737 - RNA, 20 nt, synthetic construct
  source 1..20: mol_type = other RNA
cccaagcacactttccttgg

SEQ ID NO: 29738 - RNA, 20 nt, synthetic construct
  source 1..20: mol_type = other RNA
cccaagccaaattaataaaa

SEQ ID NO: 29739 - RNA, 20 nt, synthetic construct
  source 1..20: mol_type = other RNA
cccaagccacagcgtggaat

SEQ ID NO: 29740 - RNA, 20 nt, synthetic construct
  source 1..20: mol_type = other RNA
cccaagctaccatttattcc

SEQ ID NO: 29741 - RNA, 20 nt, synthetic construct
  source 1..20: mol_type = other RNA
cccaagcttaggtcagattc

SEQ ID NO: 29742 - RNA, 20 nt, synthetic construct
  source 1..20: mol_type = other RNA
cccaaggaaggcagggtagg

SEQ ID NO: 29743 - RNA, 20 nt, synthetic construct
  source 1..20: mol_type = other RNA
cccaagggttttggtatgtt

SEQ ID NO: 29744 - RNA, 20 nt, synthetic construct
  source 1..20: mol_type = other RNA
cccaaggttgcctgttcact

SEQ ID NO: 29745 - RNA, 20 nt, synthetic construct
  source 1..20: mol_type = other RNA
cccaagtaaacaactgactc

SEQ ID NO: 29746 - RNA, 20 nt, synthetic construct
  source 1..20: mol_type = other RNA
cccaagtaaacctcaagtct

SEQ ID NO: 29747 - RNA, 20 nt, synthetic construct
  source 1..20: mol_type = other RNA
cccaagtgctgtgattgcag

SEQ ID NO: 29748 - RNA, 20 nt, synthetic construct
  source 1..20: mol_type = other RNA
cccaagtggagcctgctctg

SEQ ID NO: 29749 - RNA, 20 nt, synthetic construct
  source 1..20: mol_type = other RNA
cccaatcaaatccagtcttc

SEQ ID NO: 29750 - RNA, 20 nt, synthetic construct
  source 1..20: mol_type = other RNA
cccaatcatgttctttatag

SEQ ID NO: 29751 - RNA, 20 nt, synthetic construct
  source 1..20: mol_type = other RNA
cccaatcctttgtgcaggtc

SEQ ID NO: 29752 - RNA, 20 nt, synthetic construct
  source 1..20: mol_type = other RNA
cccaatctacaggtcggaag

SEQ ID NO: 29753 - RNA, 20 nt, synthetic construct
  source 1..20: mol_type = other RNA
cccaatctctggtattctga

SEQ ID NO: 29754 - RNA, 20 nt, synthetic construct
  source 1..20: mol_type = other RNA
cccaatgcctgcgattgcag

SEQ ID NO: 29755 - RNA, 20 nt, synthetic construct
  source 1..20: mol_type = other RNA
cccaatgcttgaagagcgct

SEQ ID NO: 29756 - RNA, 20 nt, synthetic construct
  source 1..20: mol_type = other RNA
cccaattaaactatagaccc

SEQ ID NO: 29757 - RNA, 20 nt, synthetic construct
  source 1..20: mol_type = other RNA
cccaattacttccagtgttt

SEQ ID NO: 29758 - RNA, 20 nt, synthetic construct
  source 1..20: mol_type = other RNA
cccacaaaagaaaattttct

SEQ ID NO: 29759 - RNA, 20 nt, synthetic construct
  source 1..20: mol_type = other RNA
cccacaaaatatgaagcatt

SEQ ID NO: 29760 - RNA, 20 nt, synthetic construct
  source 1..20: mol_type = other RNA
cccacaagaaaaacctaaac

SEQ ID NO: 29761 - RNA, 20 nt, synthetic construct
  source 1..20: mol_type = other RNA
cccacaagtagcagggacta

SEQ ID NO: 29762 - RNA, 20 nt, synthetic construct
  source 1..20: mol_type = other RNA
cccacacctgcaatcacagc

SEQ ID NO: 29763 - RNA, 20 nt, synthetic construct
  source 1..20: mol_type = other RNA
cccacagataatttcttcag

SEQ ID NO: 29764 - RNA, 20 nt, synthetic construct
  source 1..20: mol_type = other RNA
cccacataggatagttaaac

SEQ ID NO: 29765 - RNA, 20 nt, synthetic construct
  source 1..20: mol_type = other RNA
cccacatgactggccatcct

SEQ ID NO: 29766 - RNA, 20 nt, synthetic construct
  source 1..20: mol_type = other RNA
cccaccagcataagacccct

SEQ ID NO: 29767 - RNA, 20 nt, synthetic construct
  source 1..20: mol_type = other RNA
cccaccaggaggcggagctt

SEQ ID NO: 29768 - RNA, 20 nt, synthetic construct
  source 1..20: mol_type = other RNA
cccaccatctctctgcctca

SEQ ID NO: 29769 - RNA, 20 nt, synthetic construct
  source 1..20: mol_type = other RNA
cccaccatgatgcagcccct

SEQ ID NO: 29770 - RNA, 20 nt, synthetic construct
  source 1..20: mol_type = other RNA
cccacccctgctctgcacgt

SEQ ID NO: 29771 - RNA, 20 nt, synthetic construct
  source 1..20: mol_type = other RNA
cccaccctgctccagtatga

SEQ ID NO: 29772 - RNA, 20 nt, synthetic construct
  source 1..20: mol_type = other RNA
cccaccgccttcctaccctg

SEQ ID NO: 29773 - RNA, 20 nt, synthetic construct
  source 1..20: mol_type = other RNA
cccacctcagccccacaagt

SEQ ID NO: 29774 - RNA, 20 nt, synthetic construct
  source 1..20: mol_type = other RNA
cccacctgacaagtagtaca

SEQ ID NO: 29775 - RNA, 20 nt, synthetic construct
  source 1..20: mol_type = other RNA
cccacctttcctgcccctcc

SEQ ID NO: 29776 - RNA, 20 nt, synthetic construct
  source 1..20: mol_type = other RNA
cccacgcccggccgatgcct

SEQ ID NO: 29777 - RNA, 20 nt, synthetic construct
  source 1..20: mol_type = other RNA
cccacgtggagtgcaatggg

SEQ ID NO: 29778 - RNA, 20 nt, synthetic construct
  source 1..20: mol_type = other RNA
cccactagtgaagtcccatc

SEQ ID NO: 29779 - RNA, 20 nt, synthetic construct
  source 1..20: mol_type = other RNA
cccactagtggaagaatcag

SEQ ID NO: 29780 - RNA, 20 nt, synthetic construct
  source 1..20: mol_type = other RNA
cccactattgaaagcccttg

SEQ ID NO: 29781 - RNA, 20 nt, synthetic construct
  source 1..20: mol_type = other RNA
cccactccacacacgaagta

SEQ ID NO: 29782 - RNA, 20 nt, synthetic construct
  source 1..20: mol_type = other RNA
cccactctccccaagtaaac

SEQ ID NO: 29783 - RNA, 20 nt, synthetic construct
  source 1..20: mol_type = other RNA
cccactcttatatcctaaac

SEQ ID NO: 29784 - RNA, 20 nt, synthetic construct
  source 1..20: mol_type = other RNA
cccactgacagtggacaaag

SEQ ID NO: 29785 - RNA, 20 nt, synthetic construct
  source 1..20: mol_type = other RNA
cccactgagcatttatataa

SEQ ID NO: 29786 - RNA, 20 nt, synthetic construct
  source 1..20: mol_type = other RNA
cccactgctatgactaattt

SEQ ID NO: 29787 - RNA, 20 nt, synthetic construct
  source 1..20: mol_type = other RNA
cccactggtttcagtccctc

SEQ ID NO: 29788 - RNA, 20 nt, synthetic construct
  source 1..20: mol_type = other RNA
cccacttacatcagcagtga

SEQ ID NO: 29789 - RNA, 20 nt, synthetic construct
  source 1..20: mol_type = other RNA
cccacttcgaaagttcagat

SEQ ID NO: 29790 - RNA, 20 nt, synthetic construct
  source 1..20: mol_type = other RNA
cccacttgatccaggtgtat

SEQ ID NO: 29791 - RNA, 20 nt, synthetic construct
  source 1..20: mol_type = other RNA
cccacttgtcccatggtcaa

SEQ ID NO: 29792 - RNA, 20 nt, synthetic construct
  source 1..20: mol_type = other RNA
cccagaaagagagagggggg

SEQ ID NO: 29793 - RNA, 20 nt, synthetic construct
  source 1..20: mol_type = other RNA
cccagaaataaatcctcaca

SEQ ID NO: 29794 - RNA, 20 nt, synthetic construct
  source 1..20: mol_type = other RNA
cccagaactcgaagccttcc

SEQ ID NO: 29795 - RNA, 20 nt, synthetic construct
  source 1..20: mol_type = other RNA
cccagaaggttaactaatag

SEQ ID NO: 29796 - RNA, 20 nt, synthetic construct
  source 1..20: mol_type = other RNA
cccagaataggcaaattcat

SEQ ID NO: 29797 - RNA, 20 nt, synthetic construct
  source 1..20: mol_type = other RNA
cccagacagatatatgcatt

SEQ ID NO: 29798 - RNA, 20 nt, synthetic construct
  source 1..20: mol_type = other RNA
cccagacagggaatgcccct

SEQ ID NO: 29799 - RNA, 20 nt, synthetic construct
  source 1..20: mol_type = other RNA
cccagaccaagtttaaccaa

SEQ ID NO: 29800 - RNA, 20 nt, synthetic construct
  source 1..20: mol_type = other RNA
cccagacctgcacaaaggat

SEQ ID NO: 29801 - RNA, 20 nt, synthetic construct
  source 1..20: mol_type = other RNA
cccagactggagttcactgg

SEQ ID NO: 29802 - RNA, 20 nt, synthetic construct
  source 1..20: mol_type = other RNA
cccagagaggctaggtgacc

SEQ ID NO: 29803 - RNA, 20 nt, synthetic construct
  source 1..20: mol_type = other RNA
cccagagatcccaccattgc

SEQ ID NO: 29804 - RNA, 20 nt, synthetic construct
  source 1..20: mol_type = other RNA
cccagagattgtcgttgagt

SEQ ID NO: 29805 - RNA, 20 nt, synthetic construct
  source 1..20: mol_type = other RNA
cccagagcctaatgtgtaag

SEQ ID NO: 29806 - RNA, 20 nt, synthetic construct
  source 1..20: mol_type = other RNA
cccagagcgggtttcctcgg

SEQ ID NO: 29807 - RNA, 20 nt, synthetic construct
  source 1..20: mol_type = other RNA
cccagaggtactcaacgaca

SEQ ID NO: 29808 - RNA, 20 nt, synthetic construct
  source 1..20: mol_type = other RNA
cccagataacagtggttagg

SEQ ID NO: 29809 - RNA, 20 nt, synthetic construct
  source 1..20: mol_type = other RNA
cccagatacgttaaaggaaa

SEQ ID NO: 29810 - RNA, 20 nt, synthetic construct
  source 1..20: mol_type = other RNA
cccagatctaacaaacgcat

SEQ ID NO: 29811 - RNA, 20 nt, synthetic construct
  source 1..20: mol_type = other RNA
cccagatggggattgagggt

SEQ ID NO: 29812 - RNA, 20 nt, synthetic construct
  source 1..20: mol_type = other RNA
cccagattccttttttatgt

SEQ ID NO: 29813 - RNA, 20 nt, synthetic construct
  source 1..20: mol_type = other RNA
cccagcactctgaatcacct

SEQ ID NO: 29814 - RNA, 20 nt, synthetic construct
  source 1..20: mol_type = other RNA
cccagcacttccattttgct

SEQ ID NO: 29815 - RNA, 20 nt, synthetic construct
  source 1..20: mol_type = other RNA
cccagcagaaggtgagggac

SEQ ID NO: 29816 - RNA, 20 nt, synthetic construct
  source 1..20: mol_type = other RNA
cccagcagccccgacgcctt

SEQ ID NO: 29817 - RNA, 20 nt, synthetic construct
  source 1..20: mol_type = other RNA
cccagcatccactaggggac

SEQ ID NO: 29818 - RNA, 20 nt, synthetic construct
  source 1..20: mol_type = other RNA
cccagcatgaagccctctaa

SEQ ID NO: 29819 - RNA, 20 nt, synthetic construct
  source 1..20: mol_type = other RNA
cccagccaaacagtttttac

SEQ ID NO: 29820 - RNA, 20 nt, synthetic construct
  source 1..20: mol_type = other RNA
cccagcccctggtgatctat

SEQ ID NO: 29821 - RNA, 20 nt, synthetic construct
  source 1..20: mol_type = other RNA
cccagcccgtgtgtttagaa

SEQ ID NO: 29822 - RNA, 20 nt, synthetic construct
  source 1..20: mol_type = other RNA
cccagcctcaaacaatcctc

SEQ ID NO: 29823 - RNA, 20 nt, synthetic construct
  source 1..20: mol_type = other RNA
cccagcctcaacagcacttt

SEQ ID NO: 29824 - RNA, 20 nt, synthetic construct
  source 1..20: mol_type = other RNA
cccagcctcagcctcccaag

SEQ ID NO: 29825 - RNA, 20 nt, synthetic construct
  source 1..20: mol_type = other RNA
cccagctaaaatgttcagat

SEQ ID NO: 29826 - RNA, 20 nt, synthetic construct
  source 1..20: mol_type = other RNA
cccagctacataacttccca

SEQ ID NO: 29827 - RNA, 20 nt, synthetic construct
  source 1..20: mol_type = other RNA
cccagctcgaccaggggaag

SEQ ID NO: 29828 - RNA, 20 nt, synthetic construct
  source 1..20: mol_type = other RNA
cccagctcttttgtgtcttt

SEQ ID NO: 29829 - RNA, 20 nt, synthetic construct
  source 1..20: mol_type = other RNA
cccagctgtccaacaagggt

SEQ ID NO: 29830 - RNA, 20 nt, synthetic construct
  source 1..20: mol_type = other RNA
cccagcttccgggacttgga

SEQ ID NO: 29831 - RNA, 20 nt, synthetic construct
  source 1..20: mol_type = other RNA
cccaggaacagattcacgca

SEQ ID NO: 29832 - RNA, 20 nt, synthetic construct
  source 1..20: mol_type = other RNA
cccaggagctagaacagaat

SEQ ID NO: 29833 - RNA, 20 nt, synthetic construct
  source 1..20: mol_type = other RNA
cccaggaggcaaaggttgag

SEQ ID NO: 29834 - RNA, 20 nt, synthetic construct
  source 1..20: mol_type = other RNA
cccaggaggttgaagctcta

SEQ ID NO: 29835 - RNA, 20 nt, synthetic construct
  source 1..20: mol_type = other RNA
cccaggagttgcatcacttg

SEQ ID NO: 29836 - RNA, 20 nt, synthetic construct
  source 1..20: mol_type = other RNA
cccaggcatgatggctcaac

SEQ ID NO: 29837 - RNA, 20 nt, synthetic construct
  source 1..20: mol_type = other RNA
cccaggcggaatgcagtggc

SEQ ID NO: 29838 - RNA, 20 nt, synthetic construct
  source 1..20: mol_type = other RNA
cccaggcggcagagggagca

SEQ ID NO: 29839 - RNA, 20 nt, synthetic construct
  source 1..20: mol_type = other RNA
cccaggctgacttagagggc

SEQ ID NO: 29840 - RNA, 20 nt, synthetic construct
  source 1..20: mol_type = other RNA
cccaggctggtcttgtactc

SEQ ID NO: 29841 - RNA, 20 nt, synthetic construct
  source 1..20: mol_type = other RNA
cccagggaaaccttactgta

SEQ ID NO: 29842 - RNA, 20 nt, synthetic construct
  source 1..20: mol_type = other RNA
cccagggataaatcccactt

SEQ ID NO: 29843 - RNA, 20 nt, synthetic construct
  source 1..20: mol_type = other RNA
cccagggatattttcgtgta

SEQ ID NO: 29844 - RNA, 20 nt, synthetic construct
  source 1..20: mol_type = other RNA
cccaggggacatagatgaaa

SEQ ID NO: 29845 - RNA, 20 nt, synthetic construct
  source 1..20: mol_type = other RNA
cccagggggtcgagactgta

SEQ ID NO: 29846 - RNA, 20 nt, synthetic construct
  source 1..20: mol_type = other RNA
cccagggtgtagccacaagc

SEQ ID NO: 29847 - RNA, 20 nt, synthetic construct
  source 1..20: mol_type = other RNA
cccaggtattttgttctctt

SEQ ID NO: 29848 - RNA, 20 nt, synthetic construct
  source 1..20: mol_type = other RNA
cccaggtcagtagtacagtg

SEQ ID NO: 29849 - RNA, 20 nt, synthetic construct
  source 1..20: mol_type = other RNA
cccaggtggttctgcctaat

SEQ ID NO: 29850 - RNA, 20 nt, synthetic construct
  source 1..20: mol_type = other RNA
cccaggtgtgagattgatag

SEQ ID NO: 29851 - RNA, 20 nt, synthetic construct
  source 1..20: mol_type = other RNA
cccagtagaaatcttccaga

SEQ ID NO: 29852 - RNA, 20 nt, synthetic construct
  source 1..20: mol_type = other RNA
cccagtatacacgtatttat

SEQ ID NO: 29853 - RNA, 20 nt, synthetic construct
  source 1..20: mol_type = other RNA
cccagtcctttgggaggtca

SEQ ID NO: 29854 - RNA, 20 nt, synthetic construct
  source 1..20: mol_type = other RNA
cccagtgcccacctgacaag

SEQ ID NO: 29855 - RNA, 20 nt, synthetic construct
  source 1..20: mol_type = other RNA
cccagtggctagtgtgttga

SEQ ID NO: 29856 - RNA, 20 nt, synthetic construct
  source 1..20: mol_type = other RNA
cccagtggttgtggaattaa

SEQ ID NO: 29857 - RNA, 20 nt, synthetic construct
  source 1..20: mol_type = other RNA
cccagtgtctgctacagggg

SEQ ID NO: 29858 - RNA, 20 nt, synthetic construct
  source 1..20: mol_type = other RNA
cccagtgtgtttgtttgcta

SEQ ID NO: 29859 - RNA, 20 nt, synthetic construct
  source 1..20: mol_type = other RNA
cccagttatctctgccctca

SEQ ID NO: 29860 - RNA, 20 nt, synthetic construct
  source 1..20: mol_type = other RNA
cccagttcaaggtgttagca

SEQ ID NO: 29861 - RNA, 20 nt, synthetic construct
  source 1..20: mol_type = other RNA
cccagttcaccagtttctaa

SEQ ID NO: 29862 - RNA, 20 nt, synthetic construct
  source 1..20: mol_type = other RNA
cccagttctgcgcaattgca

SEQ ID NO: 29863 - RNA, 20 nt, synthetic construct
  source 1..20: mol_type = other RNA
cccagttgtcagaattagaa

SEQ ID NO: 29864 - RNA, 20 nt, synthetic construct
  source 1..20: mol_type = other RNA
cccagttttgttgaatctta

SEQ ID NO: 29865 - RNA, 20 nt, synthetic construct
  source 1..20: mol_type = other RNA
cccataaactgaacatttat

SEQ ID NO: 29866 - RNA, 20 nt, synthetic construct
  source 1..20: mol_type = other RNA
cccataccacctgtcagaaa

SEQ ID NO: 29867 - RNA, 20 nt, synthetic construct
  source 1..20: mol_type = other RNA
cccatactcagccccctcga

SEQ ID NO: 29868 - RNA, 20 nt, synthetic construct
  source 1..20: mol_type = other RNA
cccatataaggggaatcatg

SEQ ID NO: 29869 - RNA, 20 nt, synthetic construct
  source 1..20: mol_type = other RNA
cccatatccttttatgtgca

SEQ ID NO: 29870 - RNA, 20 nt, synthetic construct
  source 1..20: mol_type = other RNA
cccatatctacatgtacgcc

SEQ ID NO: 29871 - RNA, 20 nt, synthetic construct
  source 1..20: mol_type = other RNA
cccatatctttgcttataac

SEQ ID NO: 29872 - RNA, 20 nt, synthetic construct
  source 1..20: mol_type = other RNA
cccatatggaggcaatgttg

SEQ ID NO: 29873 - RNA, 20 nt, synthetic construct
  source 1..20: mol_type = other RNA
cccatcacactggtcactgg

SEQ ID NO: 29874 - RNA, 20 nt, synthetic construct
  source 1..20: mol_type = other RNA
cccatcactagaatgtgact

SEQ ID NO: 29875 - RNA, 20 nt, synthetic construct
  source 1..20: mol_type = other RNA
cccatccacccacttgtccc

SEQ ID NO: 29876 - RNA, 20 nt, synthetic construct
  source 1..20: mol_type = other RNA
cccatcccctttacccctga

SEQ ID NO: 29877 - RNA, 20 nt, synthetic construct
  source 1..20: mol_type = other RNA
cccatcctatctaagcctac

SEQ ID NO: 29878 - RNA, 20 nt, synthetic construct
  source 1..20: mol_type = other RNA
cccatcctctatttttgtct

SEQ ID NO: 29879 - RNA, 20 nt, synthetic construct
  source 1..20: mol_type = other RNA
cccatctcactcacctagct

SEQ ID NO: 29880 - RNA, 20 nt, synthetic construct
  source 1..20: mol_type = other RNA
cccatctctaccaaaatata

SEQ ID NO: 29881 - RNA, 20 nt, synthetic construct
  source 1..20: mol_type = other RNA
cccatctctagttttccagt

SEQ ID NO: 29882 - RNA, 20 nt, synthetic construct
  source 1..20: mol_type = other RNA
cccatctgggatacttctaa

SEQ ID NO: 29883 - RNA, 20 nt, synthetic construct
  source 1..20: mol_type = other RNA
cccatcttccatacgaaagc

SEQ ID NO: 29884 - RNA, 20 nt, synthetic construct
  source 1..20: mol_type = other RNA
cccatgaaaattgaattata

SEQ ID NO: 29885 - RNA, 20 nt, synthetic construct
  source 1..20: mol_type = other RNA
cccatgaacatggtttgatc

SEQ ID NO: 29886 - RNA, 20 nt, synthetic construct
  source 1..20: mol_type = other RNA
cccatgaagccagcattacc

SEQ ID NO: 29887 - RNA, 20 nt, synthetic construct
  source 1..20: mol_type = other RNA
cccatgacatgtgttttatt

SEQ ID NO: 29888 - RNA, 20 nt, synthetic construct
  source 1..20: mol_type = other RNA
cccatgatctttggaaatga

SEQ ID NO: 29889 - RNA, 20 nt, synthetic construct
  source 1..20: mol_type = other RNA
cccatgattcaaaatgtgat

SEQ ID NO: 29890 - RNA, 20 nt, synthetic construct
  source 1..20: mol_type = other RNA
cccatgcaggagaaacatgg

SEQ ID NO: 29891 - RNA, 20 nt, synthetic construct
  source 1..20: mol_type = other RNA
cccatgcattcgtccctaaa

SEQ ID NO: 29892 - RNA, 20 nt, synthetic construct
  source 1..20: mol_type = other RNA
cccatgcccatgtgcattat

SEQ ID NO: 29893 - RNA, 20 nt, synthetic construct
  source 1..20: mol_type = other RNA
cccatggtcaaatcaatact

SEQ ID NO: 29894 - RNA, 20 nt, synthetic construct
  source 1..20: mol_type = other RNA
cccatgtctaaagtattgtt

SEQ ID NO: 29895 - RNA, 20 nt, synthetic construct
  source 1..20: mol_type = other RNA
cccatgtgcattattgtaat

SEQ ID NO: 29896 - RNA, 20 nt, synthetic construct
  source 1..20: mol_type = other RNA
cccatgtgttggcactgaag

SEQ ID NO: 29897 - RNA, 20 nt, synthetic construct
  source 1..20: mol_type = other RNA
cccatgttcactgcagaatt

SEQ ID NO: 29898 - RNA, 20 nt, synthetic construct
  source 1..20: mol_type = other RNA
cccattaaaaccatgaaaat

SEQ ID NO: 29899 - RNA, 20 nt, synthetic construct
  source 1..20: mol_type = other RNA
cccattaacagatgaatgaa

SEQ ID NO: 29900 - RNA, 20 nt, synthetic construct
  source 1..20: mol_type = other RNA
cccattaccaaaacctggta

SEQ ID NO: 29901 - RNA, 20 nt, synthetic construct
  source 1..20: mol_type = other RNA
cccattactcggtatgtacc

SEQ ID NO: 29902 - RNA, 20 nt, synthetic construct
  source 1..20: mol_type = other RNA
cccattagacactaactttc

SEQ ID NO: 29903 - RNA, 20 nt, synthetic construct
  source 1..20: mol_type = other RNA
cccattagagtaagcaactg

SEQ ID NO: 29904 - RNA, 20 nt, synthetic construct
  source 1..20: mol_type = other RNA
cccattaggatagctattat

SEQ ID NO: 29905 - RNA, 20 nt, synthetic construct
  source 1..20: mol_type = other RNA
cccattataaaataggaagt

SEQ ID NO: 29906 - RNA, 20 nt, synthetic construct
  source 1..20: mol_type = other RNA
cccattcaattgtcctggca

SEQ ID NO: 29907 - RNA, 20 nt, synthetic construct
  source 1..20: mol_type = other RNA
cccattcactcagcataatt

SEQ ID NO: 29908 - RNA, 20 nt, synthetic construct
  source 1..20: mol_type = other RNA
cccattccaggttttatctc

SEQ ID NO: 29909 - RNA, 20 nt, synthetic construct
  source 1..20: mol_type = other RNA
cccattccctgtctgtgatg

SEQ ID NO: 29910 - RNA, 20 nt, synthetic construct
  source 1..20: mol_type = other RNA
cccattgacaatataggaga

SEQ ID NO: 29911 - RNA, 20 nt, synthetic construct
  source 1..20: mol_type = other RNA
cccattgcactccacgtggg

SEQ ID NO: 29912 - RNA, 20 nt, synthetic construct
  source 1..20: mol_type = other RNA
cccattgtacacatattaaa

SEQ ID NO: 29913 - RNA, 20 nt, synthetic construct
  source 1..20: mol_type = other RNA
cccatttcatgccatcctgg

SEQ ID NO: 29914 - RNA, 20 nt, synthetic construct
  source 1..20: mol_type = other RNA
cccatttgatttcttctttg

SEQ ID NO: 29915 - RNA, 20 nt, synthetic construct
  source 1..20: mol_type = other RNA
cccatttgggactgagacag

SEQ ID NO: 29916 - RNA, 20 nt, synthetic construct
  source 1..20: mol_type = other RNA
cccatttgtaacatgttaga

SEQ ID NO: 29917 - RNA, 20 nt, synthetic construct
  source 1..20: mol_type = other RNA
cccattttcgaattagattg

SEQ ID NO: 29918 - RNA, 20 nt, synthetic construct
  source 1..20: mol_type = other RNA
cccatttttctcgacacaca

SEQ ID NO: 29919 - RNA, 20 nt, synthetic construct
  source 1..20: mol_type = other RNA
ccccaaaaacaaaagagtag

SEQ ID NO: 29920 - RNA, 20 nt, synthetic construct
  source 1..20: mol_type = other RNA
ccccaaaacttaggaggcta

SEQ ID NO: 29921 - RNA, 20 nt, synthetic construct
  source 1..20: mol_type = other RNA
ccccaaaattaccccattca

SEQ ID NO: 29922 - RNA, 20 nt, synthetic construct
  source 1..20: mol_type = other RNA
ccccaaaccatcaagtgtga

SEQ ID NO: 29923 - RNA, 20 nt, synthetic construct
  source 1..20: mol_type = other RNA
ccccaaagaaggaaaaaaca

SEQ ID NO: 29924 - RNA, 20 nt, synthetic construct
  source 1..20: mol_type = other RNA
ccccaaagatattagctaca

SEQ ID NO: 29925 - RNA, 20 nt, synthetic construct
  source 1..20: mol_type = other RNA
ccccaaataacatgcatatg

SEQ ID NO: 29926 - RNA, 20 nt, synthetic construct
  source 1..20: mol_type = other RNA
ccccaaatacctctgaatgt

SEQ ID NO: 29927 - RNA, 20 nt, synthetic construct
  source 1..20: mol_type = other RNA
ccccaaccctacctagggtg

SEQ ID NO: 29928 - RNA, 20 nt, synthetic construct
  source 1..20: mol_type = other RNA
ccccaactgcaaaactttct

SEQ ID NO: 29929 - RNA, 20 nt, synthetic construct
  source 1..20: mol_type = other RNA
ccccaagaaagcaggtcatg

SEQ ID NO: 29930 - RNA, 20 nt, synthetic construct
  source 1..20: mol_type = other RNA
ccccaagccaaattaataaa

SEQ ID NO: 29931 - RNA, 20 nt, synthetic construct
  source 1..20: mol_type = other RNA
ccccaagtaaacctcaagtc

SEQ ID NO: 29932 - RNA, 20 nt, synthetic construct
  source 1..20: mol_type = other RNA
ccccaattaaactatagacc

SEQ ID NO: 29933 - RNA, 20 nt, synthetic construct
  source 1..20: mol_type = other RNA
ccccacaagtagcagggact

SEQ ID NO: 29934 - RNA, 20 nt, synthetic construct
  source 1..20: mol_type = other RNA
ccccacataggatagttaaa

SEQ ID NO: 29935 - RNA, 20 nt, synthetic construct
  source 1..20: mol_type = other RNA
ccccacatgactggccatcc

SEQ ID NO: 29936 - RNA, 20 nt, synthetic construct
  source 1..20: mol_type = other RNA
ccccacccctgctctgcacg

SEQ ID NO: 29937 - RNA, 20 nt, synthetic construct
  source 1..20: mol_type = other RNA
ccccaccgccttcctaccct

SEQ ID NO: 29938 - RNA, 20 nt, synthetic construct
  source 1..20: mol_type = other RNA
ccccacctttcctgcccctc

SEQ ID NO: 29939 - RNA, 20 nt, synthetic construct
  source 1..20: mol_type = other RNA
ccccactccacacacgaagt

SEQ ID NO: 29940 - RNA, 20 nt, synthetic construct
  source 1..20: mol_type = other RNA
ccccagaaagagagaggggg

SEQ ID NO: 29941 - RNA, 20 nt, synthetic construct
  source 1..20: mol_type = other RNA
ccccagaaggttaactaata

SEQ ID NO: 29942 - RNA, 20 nt, synthetic construct
  source 1..20: mol_type = other RNA
ccccagaataggcaaattca

SEQ ID NO: 29943 - RNA, 20 nt, synthetic construct
  source 1..20: mol_type = other RNA
ccccagagattgtcgttgag

SEQ ID NO: 29944 - RNA, 20 nt, synthetic construct
  source 1..20: mol_type = other RNA
ccccagcagccccgacgcct

SEQ ID NO: 29945 - RNA, 20 nt, synthetic construct
  source 1..20: mol_type = other RNA
ccccagcatccactagggga

SEQ ID NO: 29946 - RNA, 20 nt, synthetic construct
  source 1..20: mol_type = other RNA
ccccagcccctggtgatcta

SEQ ID NO: 29947 - RNA, 20 nt, synthetic construct
  source 1..20: mol_type = other RNA
ccccagcctcagcctcccaa

SEQ ID NO: 29948 - RNA, 20 nt, synthetic construct
  source 1..20: mol_type = other RNA
ccccagctaaaatgttcaga

SEQ ID NO: 29949 - RNA, 20 nt, synthetic construct
  source 1..20: mol_type = other RNA
ccccaggcggcagagggagc

SEQ ID NO: 29950 - RNA, 20 nt, synthetic construct
  source 1..20: mol_type = other RNA
ccccagggaaaccttactgt

SEQ ID NO: 29951 - RNA, 20 nt, synthetic construct
  source 1..20: mol_type = other RNA
ccccagggatattttcgtgt

SEQ ID NO: 29952 - RNA, 20 nt, synthetic construct
  source 1..20: mol_type = other RNA
ccccaggggacatagatgaa

SEQ ID NO: 29953 - RNA, 20 nt, synthetic construct
  source 1..20: mol_type = other RNA
ccccaggtggttctgcctaa

SEQ ID NO: 29954 - RNA, 20 nt, synthetic construct
  source 1..20: mol_type = other RNA
ccccagtagaaatcttccag

SEQ ID NO: 29955 - RNA, 20 nt, synthetic construct
  source 1..20: mol_type = other RNA
ccccagtggttgtggaatta

SEQ ID NO: 29956 - RNA, 20 nt, synthetic construct
  source 1..20: mol_type = other RNA
ccccagttctgcgcaattgc

SEQ ID NO: 29957 - RNA, 20 nt, synthetic construct
  source 1..20: mol_type = other RNA
ccccagttttgttgaatctt

SEQ ID NO: 29958 - RNA, 20 nt, synthetic construct
  source 1..20: mol_type = other RNA
ccccatcacactggtcactg

SEQ ID NO: 29959 - RNA, 20 nt, synthetic construct
  source 1..20: mol_type = other RNA
ccccatcccctttacccctg

SEQ ID NO: 29960 - RNA, 20 nt, synthetic construct
  source 1..20: mol_type = other RNA
ccccatctctaccaaaatat

SEQ ID NO: 29961 - RNA, 20 nt, synthetic construct
  source 1..20: mol_type = other RNA
ccccatctgggatacttcta

SEQ ID NO: 29962 - RNA, 20 nt, synthetic construct
  source 1..20: mol_type = other RNA
ccccatgcaggagaaacatg

SEQ ID NO: 29963 - RNA, 20 nt, synthetic construct
  source 1..20: mol_type = other RNA
ccccatgtgttggcactgaa

SEQ ID NO: 29964 - RNA, 20 nt, synthetic construct
  source 1..20: mol_type = other RNA
ccccattagagtaagcaact

SEQ ID NO: 29965 - RNA, 20 nt, synthetic construct
  source 1..20: mol_type = other RNA
ccccattcaattgtcctggc

SEQ ID NO: 29966 - RNA, 20 nt, synthetic construct
  source 1..20: mol_type = other RNA
ccccattcactcagcataat

SEQ ID NO: 29967 - RNA, 20 nt, synthetic construct
  source 1..20: mol_type = other RNA
ccccattccctgtctgtgat

SEQ ID NO: 29968 - RNA, 20 nt, synthetic construct
  source 1..20: mol_type = other RNA
ccccattgacaatataggag

SEQ ID NO: 29969 - RNA, 20 nt, synthetic construct
  source 1..20: mol_type = other RNA
ccccattgcactccacgtgg

SEQ ID NO: 29970 - RNA, 20 nt, synthetic construct
  source 1..20: mol_type = other RNA
ccccattgtacacatattaa

SEQ ID NO: 29971 - RNA, 20 nt, synthetic construct
  source 1..20: mol_type = other RNA
ccccatttttctcgacacac

SEQ ID NO: 29972 - RNA, 20 nt, synthetic construct
  source 1..20: mol_type = other RNA
cccccaaaaacaaaagagta

SEQ ID NO: 29973 - RNA, 20 nt, synthetic construct
  source 1..20: mol_type = other RNA
cccccaaaacttaggaggct

SEQ ID NO: 29974 - RNA, 20 nt, synthetic construct
  source 1..20: mol_type = other RNA
cccccaaagaaggaaaaaac

SEQ ID NO: 29975 - RNA, 20 nt, synthetic construct
  source 1..20: mol_type = other RNA
cccccaattaaactatagac

SEQ ID NO: 29976 - RNA, 20 nt, synthetic construct
  source 1..20: mol_type = other RNA
cccccacccctgctctgcac

SEQ ID NO: 29977 - RNA, 20 nt, synthetic construct
  source 1..20: mol_type = other RNA
cccccagcccctggtgatct

SEQ ID NO: 29978 - RNA, 20 nt, synthetic construct
  source 1..20: mol_type = other RNA
cccccaggtggttctgccta

SEQ ID NO: 29979 - RNA, 20 nt, synthetic construct
  source 1..20: mol_type = other RNA
cccccagttttgttgaatct

SEQ ID NO: 29980 - RNA, 20 nt, synthetic construct
  source 1..20: mol_type = other RNA
cccccatcacactggtcact

SEQ ID NO: 29981 - RNA, 20 nt, synthetic construct
  source 1..20: mol_type = other RNA
cccccatcccctttacccct

SEQ ID NO: 29982 - RNA, 20 nt, synthetic construct
  source 1..20: mol_type = other RNA
ccccccaaaaacaaaagagt

SEQ ID NO: 29983 - RNA, 20 nt, synthetic construct
  source 1..20: mol_type = other RNA
ccccccacccctgctctgca

SEQ ID NO: 29984 - RNA, 20 nt, synthetic construct
  source 1..20: mol_type = other RNA
cccccctaaaacactggaag

SEQ ID NO: 29985 - RNA, 20 nt, synthetic construct
  source 1..20: mol_type = other RNA
cccccctctctctttctggg

SEQ ID NO: 29986 - RNA, 20 nt, synthetic construct
  source 1..20: mol_type = other RNA
cccccctgaaaaatgagaaa

SEQ ID NO: 29987 - RNA, 20 nt, synthetic construct
  source 1..20: mol_type = other RNA
cccccctggaacaatcaaac

SEQ ID NO: 29988 - RNA, 20 nt, synthetic construct
  source 1..20: mol_type = other RNA
cccccgaatcctttgcttcc

SEQ ID NO: 29989 - RNA, 20 nt, synthetic construct
  source 1..20: mol_type = other RNA
cccccgcccgtccctgcttg

SEQ ID NO: 29990 - RNA, 20 nt, synthetic construct
  source 1..20: mol_type = other RNA
cccccgggacaatgccaggg

SEQ ID NO: 29991 - RNA, 20 nt, synthetic construct
  source 1..20: mol_type = other RNA
cccccggggctcgcagcatc

SEQ ID NO: 29992 - RNA, 20 nt, synthetic construct
  source 1..20: mol_type = other RNA
ccccctaaaacactggaagt

SEQ ID NO: 29993 - RNA, 20 nt, synthetic construct
  source 1..20: mol_type = other RNA
ccccctacacccagttcacc

SEQ ID NO: 29994 - RNA, 20 nt, synthetic construct
  source 1..20: mol_type = other RNA
ccccctccctaccacccgtc

SEQ ID NO: 29995 - RNA, 20 nt, synthetic construct
  source 1..20: mol_type = other RNA
ccccctcgaagagaccacag

SEQ ID NO: 29996 - RNA, 20 nt, synthetic construct
  source 1..20: mol_type = other RNA
ccccctctctctttctgggg

SEQ ID NO: 29997 - RNA, 20 nt, synthetic construct
  source 1..20: mol_type = other RNA
ccccctcttctctcctttga

SEQ ID NO: 29998 - RNA, 20 nt, synthetic construct
  source 1..20: mol_type = other RNA
ccccctgaaaaatgagaaac

SEQ ID NO: 29999 - RNA, 20 nt, synthetic construct
  source 1..20: mol_type = other RNA
ccccctgaatacccctccct

SEQ ID NO: 30000 - RNA, 20 nt, synthetic construct
  source 1..20: mol_type = other RNA
ccccctgagtagctgtgatt

SEQ ID NO: 30001 - RNA, 20 nt, synthetic construct
  source 1..20: mol_type = other RNA
ccccctggaaataagtttca

SEQ ID NO: 30002 - RNA, 20 nt, synthetic construct
  source 1..20: mol_type = other RNA
ccccctggaacaatcaaacc

SEQ ID NO: 30003 - RNA, 20 nt, synthetic construct
  source 1..20: mol_type = other RNA
ccccctgggctcaagccatc

SEQ ID NO: 30004 - RNA, 20 nt, synthetic construct
  source 1..20: mol_type = other RNA
cccccttatgtgtgtataac

SEQ ID NO: 30005 - RNA, 20 nt, synthetic construct
  source 1..20: mol_type = other RNA
ccccgaatcctttgcttccc

SEQ ID NO: 30006 - RNA, 20 nt, synthetic construct
  source 1..20: mol_type = other RNA
ccccgacgcctttcatttgg

SEQ ID NO: 30007 - RNA, 20 nt, synthetic construct
  source 1..20: mol_type = other RNA
ccccgatgccatgtgttttg

SEQ ID NO: 30008 - RNA, 20 nt, synthetic construct
  source 1..20: mol_type = other RNA
ccccgcatactgtgcagtgg

SEQ ID NO: 30009 - RNA, 20 nt, synthetic construct
  source 1..20: mol_type = other RNA
ccccgcccgtccctgcttgg

SEQ ID NO: 30010 - RNA, 20 nt, synthetic construct
  source 1..20: mol_type = other RNA
ccccgctgcgagaaaggcga

SEQ ID NO: 30011 - RNA, 20 nt, synthetic construct
  source 1..20: mol_type = other RNA
ccccgctgtccatttccagt

SEQ ID NO: 30012 - RNA, 20 nt, synthetic construct
  source 1..20: mol_type = other RNA
ccccgcttcagttggtgaag

SEQ ID NO: 30013 - RNA, 20 nt, synthetic construct
  source 1..20: mol_type = other RNA
ccccggatgattctaatgtg

SEQ ID NO: 30014 - RNA, 20 nt, synthetic construct
  source 1..20: mol_type = other RNA
ccccgggacaatgccagggc

SEQ ID NO: 30015 - RNA, 20 nt, synthetic construct
  source 1..20: mol_type = other RNA
ccccgggcctggttagggag

SEQ ID NO: 30016 - RNA, 20 nt, synthetic construct
  source 1..20: mol_type = other RNA
ccccggggctcgcagcatcc

SEQ ID NO: 30017 - RNA, 20 nt, synthetic construct
  source 1..20: mol_type = other RNA
ccccggtctttcctgatcag

SEQ ID NO: 30018 - RNA, 20 nt, synthetic construct
  source 1..20: mol_type = other RNA
ccccgtacgctccctcgcgc

SEQ ID NO: 30019 - RNA, 20 nt, synthetic construct
  source 1..20: mol_type = other RNA
ccccgtctctgcaaaaaatg

SEQ ID NO: 30020 - RNA, 20 nt, synthetic construct
  source 1..20: mol_type = other RNA
cccctaaaacactggaagta

SEQ ID NO: 30021 - RNA, 20 nt, synthetic construct
  source 1..20: mol_type = other RNA
cccctacacccagttcacca

SEQ ID NO: 30022 - RNA, 20 nt, synthetic construct
  source 1..20: mol_type = other RNA
cccctactttttgtcacacg

SEQ ID NO: 30023 - RNA, 20 nt, synthetic construct
  source 1..20: mol_type = other RNA
cccctagcatgcagtagctc

SEQ ID NO: 30024 - RNA, 20 nt, synthetic construct
  source 1..20: mol_type = other RNA
cccctagtggatgctgggga

SEQ ID NO: 30025 - RNA, 20 nt, synthetic construct
  source 1..20: mol_type = other RNA
cccctatactgtaaccctgt

SEQ ID NO: 30026 - RNA, 20 nt, synthetic construct
  source 1..20: mol_type = other RNA
cccctcaggtgtcactggat

SEQ ID NO: 30027 - RNA, 20 nt, synthetic construct
  source 1..20: mol_type = other RNA
cccctcatcctccgtagctg

SEQ ID NO: 30028 - RNA, 20 nt, synthetic construct
  source 1..20: mol_type = other RNA
cccctccatggaaactacaa

SEQ ID NO: 30029 - RNA, 20 nt, synthetic construct
  source 1..20: mol_type = other RNA
cccctccctaccacccgtcc

SEQ ID NO: 30030 - RNA, 20 nt, synthetic construct
  source 1..20: mol_type = other RNA
cccctccctacctggcagtc

SEQ ID NO: 30031 - RNA, 20 nt, synthetic construct
  source 1..20: mol_type = other RNA
cccctccctccccccacggt

SEQ ID NO: 30032 - RNA, 20 nt, synthetic construct
  source 1..20: mol_type = other RNA
cccctccctgctttaaaaca

SEQ ID NO: 30033 - RNA, 20 nt, synthetic construct
  source 1..20: mol_type = other RNA
cccctcgaagagaccacagg

SEQ ID NO: 30034 - RNA, 20 nt, synthetic construct
  source 1..20: mol_type = other RNA
cccctctctctttctgggga

SEQ ID NO: 30035 - RNA, 20 nt, synthetic construct
  source 1..20: mol_type = other RNA
cccctcttctctcctttgag

SEQ ID NO: 30036 - RNA, 20 nt, synthetic construct
  source 1..20: mol_type = other RNA
cccctgaaaaatgagaaacc

SEQ ID NO: 30037 - RNA, 20 nt, synthetic construct
  source 1..20: mol_type = other RNA
cccctgaatacccctcccta

SEQ ID NO: 30038 - RNA, 20 nt, synthetic construct
  source 1..20: mol_type = other RNA
cccctgagaacttcagtata

SEQ ID NO: 30039 - RNA, 20 nt, synthetic construct
  source 1..20: mol_type = other RNA
cccctgagtagctgtgatta

SEQ ID NO: 30040 - RNA, 20 nt, synthetic construct
  source 1..20: mol_type = other RNA
cccctgccacactccagcat

SEQ ID NO: 30041 - RNA, 20 nt, synthetic construct
  source 1..20: mol_type = other RNA
cccctgctctgcacgtacta

SEQ ID NO: 30042 - RNA, 20 nt, synthetic construct
  source 1..20: mol_type = other RNA
cccctgctgccagatgttct

SEQ ID NO: 30043 - RNA, 20 nt, synthetic construct
  source 1..20: mol_type = other RNA
cccctgctgttcccaagcaa

SEQ ID NO: 30044 - RNA, 20 nt, synthetic construct
  source 1..20: mol_type = other RNA
cccctggaaataagtttcat

SEQ ID NO: 30045 - RNA, 20 nt, synthetic construct
  source 1..20: mol_type = other RNA
cccctggaacaatcaaacca

SEQ ID NO: 30046 - RNA, 20 nt, synthetic construct
  source 1..20: mol_type = other RNA
cccctggagaaagcccagcc

SEQ ID NO: 30047 - RNA, 20 nt, synthetic construct
  source 1..20: mol_type = other RNA
cccctggagttaattccaca

SEQ ID NO: 30048 - RNA, 20 nt, synthetic construct
  source 1..20: mol_type = other RNA
cccctggatcccccagcccc

SEQ ID NO: 30049 - RNA, 20 nt, synthetic construct
  source 1..20: mol_type = other RNA
cccctggggcctcagcatgt

SEQ ID NO: 30050 - RNA, 20 nt, synthetic construct
  source 1..20: mol_type = other RNA
cccctggtcgagctgggtga

SEQ ID NO: 30051 - RNA, 20 nt, synthetic construct
  source 1..20: mol_type = other RNA
cccctggtgatctatgaatt

SEQ ID NO: 30052 - RNA, 20 nt, synthetic construct
  source 1..20: mol_type = other RNA
cccctgtaattacatacttc

SEQ ID NO: 30053 - RNA, 20 nt, synthetic construct
  source 1..20: mol_type = other RNA
cccctgtagcagacactggg

SEQ ID NO: 30054 - RNA, 20 nt, synthetic construct
  source 1..20: mol_type = other RNA
cccctgtccaagtatttctc

SEQ ID NO: 30055 - RNA, 20 nt, synthetic construct
  source 1..20: mol_type = other RNA
ccccttaaattccaaaagtg

SEQ ID NO: 30056 - RNA, 20 nt, synthetic construct
  source 1..20: mol_type = other RNA
ccccttatatgggatatcta

SEQ ID NO: 30057 - RNA, 20 nt, synthetic construct
  source 1..20: mol_type = other RNA
ccccttatcaggaaagtgcc

SEQ ID NO: 30058 - RNA, 20 nt, synthetic construct
  source 1..20: mol_type = other RNA
ccccttatcctcttctgaag

SEQ ID NO: 30059 - RNA, 20 nt, synthetic construct
  source 1..20: mol_type = other RNA
ccccttatgtgtgtataacc

SEQ ID NO: 30060 - RNA, 20 nt, synthetic construct
  source 1..20: mol_type = other RNA
ccccttgaaagatcatttag

SEQ ID NO: 30061 - RNA, 20 nt, synthetic construct
  source 1..20: mol_type = other RNA
ccccttgacgaagtcacatt

SEQ ID NO: 30062 - RNA, 20 nt, synthetic construct
  source 1..20: mol_type = other RNA
ccccttgccaaggcttgctt

SEQ ID NO: 30063 - RNA, 20 nt, synthetic construct
  source 1..20: mol_type = other RNA
cccctttacccctgagaact

SEQ ID NO: 30064 - RNA, 20 nt, synthetic construct
  source 1..20: mol_type = other RNA
cccctttagtgttctgtgtt

SEQ ID NO: 30065 - RNA, 20 nt, synthetic construct
  source 1..20: mol_type = other RNA
cccctttcaagattgtttaa

SEQ ID NO: 30066 - RNA, 20 nt, synthetic construct
  source 1..20: mol_type = other RNA
cccctttctttggttttgac

SEQ ID NO: 30067 - RNA, 20 nt, synthetic construct
  source 1..20: mol_type = other RNA
cccctttgagcagagtcctg

SEQ ID NO: 30068 - RNA, 20 nt, synthetic construct
  source 1..20: mol_type = other RNA
cccgaagaggacgatttttc

SEQ ID NO: 30069 - RNA, 20 nt, synthetic construct
  source 1..20: mol_type = other RNA
cccgaatcctttgcttccca

SEQ ID NO: 30070 - RNA, 20 nt, synthetic construct
  source 1..20: mol_type = other RNA
cccgacccactagtgaagtc

SEQ ID NO: 30071 - RNA, 20 nt, synthetic construct
  source 1..20: mol_type = other RNA
cccgacctccagcgctaagc

SEQ ID NO: 30072 - RNA, 20 nt, synthetic construct
  source 1..20: mol_type = other RNA
cccgacgcctttcatttggc

SEQ ID NO: 30073 - RNA, 20 nt, synthetic construct
  source 1..20: mol_type = other RNA
cccgaggtgcacaagggaag

SEQ ID NO: 30074 - RNA, 20 nt, synthetic construct
  source 1..20: mol_type = other RNA
cccgagtagttgtaactaca

SEQ ID NO: 30075 - RNA, 20 nt, synthetic construct
  source 1..20: mol_type = other RNA
cccgagtatctaggagtaca

SEQ ID NO: 30076 - RNA, 20 nt, synthetic construct
  source 1..20: mol_type = other RNA
cccgatgccatgtgttttgt

SEQ ID NO: 30077 - RNA, 20 nt, synthetic construct
  source 1..20: mol_type = other RNA
cccgatttcagttaacttat

SEQ ID NO: 30078 - RNA, 20 nt, synthetic construct
  source 1..20: mol_type = other RNA
cccgcaccttgattttgata

SEQ ID NO: 30079 - RNA, 20 nt, synthetic construct
  source 1..20: mol_type = other RNA
cccgcatactgtgcagtgga

SEQ ID NO: 30080 - RNA, 20 nt, synthetic construct
  source 1..20: mol_type = other RNA
cccgcccgtccctgcttggc

SEQ ID NO: 30081 - RNA, 20 nt, synthetic construct
  source 1..20: mol_type = other RNA
cccgccctcccccgggacaa

SEQ ID NO: 30082 - RNA, 20 nt, synthetic construct
  source 1..20: mol_type = other RNA
cccgccgctcgcaggtggga

SEQ ID NO: 30083 - RNA, 20 nt, synthetic construct
  source 1..20: mol_type = other RNA
cccgcgaaggcgtgtaaact

SEQ ID NO: 30084 - RNA, 20 nt, synthetic construct
  source 1..20: mol_type = other RNA
cccgctacacaagtattaac

SEQ ID NO: 30085 - RNA, 20 nt, synthetic construct
  source 1..20: mol_type = other RNA
cccgctctgggtgcgttgac

SEQ ID NO: 30086 - RNA, 20 nt, synthetic construct
  source 1..20: mol_type = other RNA
cccgctgcgagaaaggcgaa

SEQ ID NO: 30087 - RNA, 20 nt, synthetic construct
  source 1..20: mol_type = other RNA
cccgctgctccctctgccgc

SEQ ID NO: 30088 - RNA, 20 nt, synthetic construct
  source 1..20: mol_type = other RNA
cccgctgtccatttccagta

SEQ ID NO: 30089 - RNA, 20 nt, synthetic construct
  source 1..20: mol_type = other RNA
cccgcttcagttggtgaaga

SEQ ID NO: 30090 - RNA, 20 nt, synthetic construct
  source 1..20: mol_type = other RNA
cccggaacaggaaaaggaca

SEQ ID NO: 30091 - RNA, 20 nt, synthetic construct
  source 1..20: mol_type = other RNA
cccggaagctgggctagagc

SEQ ID NO: 30092 - RNA, 20 nt, synthetic construct
  source 1..20: mol_type = other RNA
cccggagaggtgaactatta

SEQ ID NO: 30093 - RNA, 20 nt, synthetic construct
  source 1..20: mol_type = other RNA
cccggatgattctaatgtgc

SEQ ID NO: 30094 - RNA, 20 nt, synthetic construct
  source 1..20: mol_type = other RNA
cccggattggaaaactaggt

SEQ ID NO: 30095 - RNA, 20 nt, synthetic construct
  source 1..20: mol_type = other RNA
cccggcatgcctctcccacc

SEQ ID NO: 30096 - RNA, 20 nt, synthetic construct
  source 1..20: mol_type = other RNA
cccggccaaatatccatgtt

SEQ ID NO: 30097 - RNA, 20 nt, synthetic construct
  source 1..20: mol_type = other RNA
cccggccagacattttattt

SEQ ID NO: 30098 - RNA, 20 nt, synthetic construct
  source 1..20: mol_type = other RNA
cccggcccagattccttttt

SEQ ID NO: 30099 - RNA, 20 nt, synthetic construct
  source 1..20: mol_type = other RNA
cccggcccatgacatgtgtt

SEQ ID NO: 30100 - RNA, 20 nt, synthetic construct
  source 1..20: mol_type = other RNA
cccggcccgttatttttatc

SEQ ID NO: 30101 - RNA, 20 nt, synthetic construct
  source 1..20: mol_type = other RNA
cccggccgagaaatcggaac

SEQ ID NO: 30102 - RNA, 20 nt, synthetic construct
  source 1..20: mol_type = other RNA
cccggccgatgcctgtgctt

SEQ ID NO: 30103 - RNA, 20 nt, synthetic construct
  source 1..20: mol_type = other RNA
cccggctaagatgaggtctc

SEQ ID NO: 30104 - RNA, 20 nt, synthetic construct
  source 1..20: mol_type = other RNA
cccggctaattaaacaaaca

SEQ ID NO: 30105 - RNA, 20 nt, synthetic construct
  source 1..20: mol_type = other RNA
cccgggacaatgccagggcg

SEQ ID NO: 30106 - RNA, 20 nt, synthetic construct
  source 1..20: mol_type = other RNA
cccgggcctggttagggaga

SEQ ID NO: 30107 - RNA, 20 nt, synthetic construct
  source 1..20: mol_type = other RNA
cccggggcagagaactgact

SEQ ID NO: 30108 - RNA, 20 nt, synthetic construct
  source 1..20: mol_type = other RNA
cccggggctcgcagcatccc

SEQ ID NO: 30109 - RNA, 20 nt, synthetic construct
  source 1..20: mol_type = other RNA
cccgggtccaggcagttctc

SEQ ID NO: 30110 - RNA, 20 nt, synthetic construct
  source 1..20: mol_type = other RNA
cccgggtttaagcgattctc

SEQ ID NO: 30111 - RNA, 20 nt, synthetic construct
  source 1..20: mol_type = other RNA
cccggtctttcctgatcagc

SEQ ID NO: 30112 - RNA, 20 nt, synthetic construct
  source 1..20: mol_type = other RNA
cccgtacgctccctcgcgcg

SEQ ID NO: 30113 - RNA, 20 nt, synthetic construct
  source 1..20: mol_type = other RNA
cccgtccaatttctttggct

SEQ ID NO: 30114 - RNA, 20 nt, synthetic construct
  source 1..20: mol_type = other RNA
cccgtccctgcttggcgcag

SEQ ID NO: 30115 - RNA, 20 nt, synthetic construct
  source 1..20: mol_type = other RNA
cccgtctctgcaaaaaatgt

SEQ ID NO: 30116 - RNA, 20 nt, synthetic construct
  source 1..20: mol_type = other RNA
cccgtggaaatacttgaaca

SEQ ID NO: 30117 - RNA, 20 nt, synthetic construct
  source 1..20: mol_type = other RNA
cccgtgtgtttagaataata

SEQ ID NO: 30118 - RNA, 20 nt, synthetic construct
  source 1..20: mol_type = other RNA
cccgtgtgttttgttgttgt

SEQ ID NO: 30119 - RNA, 20 nt, synthetic construct
  source 1..20: mol_type = other RNA
cccgttatttttatcataac

SEQ ID NO: 30120 - RNA, 20 nt, synthetic construct
  source 1..20: mol_type = other RNA
cccgttttttccttcattta

SEQ ID NO: 30121 - RNA, 20 nt, synthetic construct
  source 1..20: mol_type = other RNA
ccctaaaacactggaagtaa

SEQ ID NO: 30122 - RNA, 20 nt, synthetic construct
  source 1..20: mol_type = other RNA
ccctaaacactgtagttcag

SEQ ID NO: 30123 - RNA, 20 nt, synthetic construct
  source 1..20: mol_type = other RNA
ccctaaagagaatcttaaaa

SEQ ID NO: 30124 - RNA, 20 nt, synthetic construct
  source 1..20: mol_type = other RNA
ccctaaatacacatgttgag

SEQ ID NO: 30125 - RNA, 20 nt, synthetic construct
  source 1..20: mol_type = other RNA
ccctaacagtctcgtgaatt

SEQ ID NO: 30126 - RNA, 20 nt, synthetic construct
  source 1..20: mol_type = other RNA
ccctaaccaggcccggggca

SEQ ID NO: 30127 - RNA, 20 nt, synthetic construct
  source 1..20: mol_type = other RNA
ccctaaccccagagattgtc

SEQ ID NO: 30128 - RNA, 20 nt, synthetic construct
  source 1..20: mol_type = other RNA
ccctaataacaaaataggat

SEQ ID NO: 30129 - RNA, 20 nt, synthetic construct
  source 1..20: mol_type = other RNA
ccctacacccagttcaccag

SEQ ID NO: 30130 - RNA, 20 nt, synthetic construct
  source 1..20: mol_type = other RNA
ccctacacccatccacccac

SEQ ID NO: 30131 - RNA, 20 nt, synthetic construct
  source 1..20: mol_type = other RNA
ccctacagactcaataacca

SEQ ID NO: 30132 - RNA, 20 nt, synthetic construct
  source 1..20: mol_type = other RNA
ccctacatatggcaattcca

SEQ ID NO: 30133 - RNA, 20 nt, synthetic construct
  source 1..20: mol_type = other RNA
ccctacattgccttcaagtt

SEQ ID NO: 30134 - RNA, 20 nt, synthetic construct
  source 1..20: mol_type = other RNA
ccctaccacccgtccaattt

SEQ ID NO: 30135 - RNA, 20 nt, synthetic construct
  source 1..20: mol_type = other RNA
ccctacctaaaaagggagtc

SEQ ID NO: 30136 - RNA, 20 nt, synthetic construct
  source 1..20: mol_type = other RNA
ccctacctagggtgtaaaag

SEQ ID NO: 30137 - RNA, 20 nt, synthetic construct
  source 1..20: mol_type = other RNA
ccctacctggcagtctagga

SEQ ID NO: 30138 - RNA, 20 nt, synthetic construct
  source 1..20: mol_type = other RNA
ccctactcactgaaaccctc

SEQ ID NO: 30139 - RNA, 20 nt, synthetic construct
  source 1..20: mol_type = other RNA
ccctactttttgtcacacgg

SEQ ID NO: 30140 - RNA, 20 nt, synthetic construct
  source 1..20: mol_type = other RNA
ccctagcatgcagtagctca

SEQ ID NO: 30141 - RNA, 20 nt, synthetic construct
  source 1..20: mol_type = other RNA
ccctagcccagcacttccat

SEQ ID NO: 30142 - RNA, 20 nt, synthetic construct
  source 1..20: mol_type = other RNA
ccctaggtagggttggggta

SEQ ID NO: 30143 - RNA, 20 nt, synthetic construct
  source 1..20: mol_type = other RNA
ccctagtggatgctggggac

SEQ ID NO: 30144 - RNA, 20 nt, synthetic construct
  source 1..20: mol_type = other RNA
ccctagtgtctccatacccc

SEQ ID NO: 30145 - RNA, 20 nt, synthetic construct
  source 1..20: mol_type = other RNA
ccctatactgtaaccctgtt

SEQ ID NO: 30146 - RNA, 20 nt, synthetic construct
  source 1..20: mol_type = other RNA
ccctatgcaataactcaaaa

SEQ ID NO: 30147 - RNA, 20 nt, synthetic construct
  source 1..20: mol_type = other RNA
ccctatgccttcagtatgaa

SEQ ID NO: 30148 - RNA, 20 nt, synthetic construct
  source 1..20: mol_type = other RNA
ccctattcaacctataagac

SEQ ID NO: 30149 - RNA, 20 nt, synthetic construct
  source 1..20: mol_type = other RNA
ccctatttatgttgcacaaa

SEQ ID NO: 30150 - RNA, 20 nt, synthetic construct
  source 1..20: mol_type = other RNA
ccctattttctacaggtata

SEQ ID NO: 30151 - RNA, 20 nt, synthetic construct
  source 1..20: mol_type = other RNA
ccctcaaaagatgcagaaaa

SEQ ID NO: 30152 - RNA, 20 nt, synthetic construct
  source 1..20: mol_type = other RNA
ccctcaaatgccatagagct

SEQ ID NO: 30153 - RNA, 20 nt, synthetic construct
  source 1..20: mol_type = other RNA
ccctcaaatgtctcattgtg

SEQ ID NO: 30154 - RNA, 20 nt, synthetic construct
  source 1..20: mol_type = other RNA
ccctcaatccccatctggga

SEQ ID NO: 30155 - RNA, 20 nt, synthetic construct
  source 1..20: mol_type = other RNA
ccctcacagtcacaaagctt

SEQ ID NO: 30156 - RNA, 20 nt, synthetic construct
  source 1..20: mol_type = other RNA
ccctcacagtccactcacct

SEQ ID NO: 30157 - RNA, 20 nt, synthetic construct
  source 1..20: mol_type = other RNA
ccctcaccttctgctgggcc

SEQ ID NO: 30158 - RNA, 20 nt, synthetic construct
  source 1..20: mol_type = other RNA
ccctcacgaaagcggtcaac

SEQ ID NO: 30159 - RNA, 20 nt, synthetic construct
  source 1..20: mol_type = other RNA
ccctcactaagtcagaattc

SEQ ID NO: 30160 - RNA, 20 nt, synthetic construct
  source 1..20: mol_type = other RNA
ccctcagaatttgaggtctt

SEQ ID NO: 30161 - RNA, 20 nt, synthetic construct
  source 1..20: mol_type = other RNA
ccctcagcaaaagcaattat

SEQ ID NO: 30162 - RNA, 20 nt, synthetic construct
  source 1..20: mol_type = other RNA
ccctcaggaccaggcagtcc

SEQ ID NO: 30163 - RNA, 20 nt, synthetic construct
  source 1..20: mol_type = other RNA
ccctcaggactctgctcaaa

SEQ ID NO: 30164 - RNA, 20 nt, synthetic construct
  source 1..20: mol_type = other RNA
ccctcaggtgtcactggata

SEQ ID NO: 30165 - RNA, 20 nt, synthetic construct
  source 1..20: mol_type = other RNA
ccctcatatcagttatcaca

SEQ ID NO: 30166 - RNA, 20 nt, synthetic construct
  source 1..20: mol_type = other RNA
ccctcatcctccgtagctgt

SEQ ID NO: 30167 - RNA, 20 nt, synthetic construct
  source 1..20: mol_type = other RNA
ccctcattgaagctactatt

SEQ ID NO: 30168 - RNA, 20 nt, synthetic construct
  source 1..20: mol_type = other RNA
ccctcattttataagggtga

SEQ ID NO: 30169 - RNA, 20 nt, synthetic construct
  source 1..20: mol_type = other RNA
ccctccaggatccagtctct

SEQ ID NO: 30170 - RNA, 20 nt, synthetic construct
  source 1..20: mol_type = other RNA
ccctccagtccagcaccacc

SEQ ID NO: 30171 - RNA, 20 nt, synthetic construct
  source 1..20: mol_type = other RNA
ccctccatggaaactacaat

SEQ ID NO: 30172 - RNA, 20 nt, synthetic construct
  source 1..20: mol_type = other RNA
ccctccatttccctgcttca

SEQ ID NO: 30173 - RNA, 20 nt, synthetic construct
  source 1..20: mol_type = other RNA
ccctcccccgggacaatgcc

SEQ ID NO: 30174 - RNA, 20 nt, synthetic construct
  source 1..20: mol_type = other RNA
ccctccccctccccctccct

SEQ ID NO: 30175 - RNA, 20 nt, synthetic construct
  source 1..20: mol_type = other RNA
ccctcccgcggcctccccaa

SEQ ID NO: 30176 - RNA, 20 nt, synthetic construct
  source 1..20: mol_type = other RNA
ccctccctaccacccgtcca

SEQ ID NO: 30177 - RNA, 20 nt, synthetic construct
  source 1..20: mol_type = other RNA
ccctccctacctggcagtct

SEQ ID NO: 30178 - RNA, 20 nt, synthetic construct
  source 1..20: mol_type = other RNA
ccctccctccccccacggtc

SEQ ID NO: 30179 - RNA, 20 nt, synthetic construct
  source 1..20: mol_type = other RNA
ccctccctgctttaaaacac

SEQ ID NO: 30180 - RNA, 20 nt, synthetic construct
  source 1..20: mol_type = other RNA
ccctcctaccttccaaagta

SEQ ID NO: 30181 - RNA, 20 nt, synthetic construct
  source 1..20: mol_type = other RNA
ccctcctcctcctggccaca

SEQ ID NO: 30182 - RNA, 20 nt, synthetic construct
  source 1..20: mol_type = other RNA
ccctcctcctctacaagttt

SEQ ID NO: 30183 - RNA, 20 nt, synthetic construct
  source 1..20: mol_type = other RNA
ccctcctctggccctccatt

SEQ ID NO: 30184 - RNA, 20 nt, synthetic construct
  source 1..20: mol_type = other RNA
ccctcctttctagaatgcat

SEQ ID NO: 30185 - RNA, 20 nt, synthetic construct
  source 1..20: mol_type = other RNA
ccctcctttttatcaccctt

SEQ ID NO: 30186 - RNA, 20 nt, synthetic construct
  source 1..20: mol_type = other RNA
ccctcgaagagaccacaggc

SEQ ID NO: 30187 - RNA, 20 nt, synthetic construct
  source 1..20: mol_type = other RNA
ccctcgagtaaaaagaatga

SEQ ID NO: 30188 - RNA, 20 nt, synthetic construct
  source 1..20: mol_type = other RNA
ccctcggccacagcagggct

SEQ ID NO: 30189 - RNA, 20 nt, synthetic construct
  source 1..20: mol_type = other RNA
ccctcggcctctactgactc

SEQ ID NO: 30190 - RNA, 20 nt, synthetic construct
  source 1..20: mol_type = other RNA
ccctctaaataggtattcat

SEQ ID NO: 30191 - RNA, 20 nt, synthetic construct
  source 1..20: mol_type = other RNA
ccctctaagtcagcctgggc

SEQ ID NO: 30192 - RNA, 20 nt, synthetic construct
  source 1..20: mol_type = other RNA
ccctctacaaaaggaggaac

SEQ ID NO: 30193 - RNA, 20 nt, synthetic construct
  source 1..20: mol_type = other RNA
ccctctagctccccattccc

SEQ ID NO: 30194 - RNA, 20 nt, synthetic construct
  source 1..20: mol_type = other RNA
ccctctataattctgccttc

SEQ ID NO: 30195 - RNA, 20 nt, synthetic construct
  source 1..20: mol_type = other RNA
ccctctatggcaggcacctt

SEQ ID NO: 30196 - RNA, 20 nt, synthetic construct
  source 1..20: mol_type = other RNA
ccctctcagtggtgcttttg

SEQ ID NO: 30197 - RNA, 20 nt, synthetic construct
  source 1..20: mol_type = other RNA
ccctctctctttctggggat

SEQ ID NO: 30198 - RNA, 20 nt, synthetic construct
  source 1..20: mol_type = other RNA
ccctctgagagaagtcagac

SEQ ID NO: 30199 - RNA, 20 nt, synthetic construct
  source 1..20: mol_type = other RNA
ccctctggaatgcccatcct

SEQ ID NO: 30200 - RNA, 20 nt, synthetic construct
  source 1..20: mol_type = other RNA
ccctctggccttctatattt

SEQ ID NO: 30201 - RNA, 20 nt, synthetic construct
  source 1..20: mol_type = other RNA
ccctctgtgtgcatgcatgt

SEQ ID NO: 30202 - RNA, 20 nt, synthetic construct
  source 1..20: mol_type = other RNA
ccctcttcaatattttggaa

SEQ ID NO: 30203 - RNA, 20 nt, synthetic construct
  source 1..20: mol_type = other RNA
ccctcttcgctcttttaaaa

SEQ ID NO: 30204 - RNA, 20 nt, synthetic construct
  source 1..20: mol_type = other RNA
ccctcttctctcctttgagg

SEQ ID NO: 30205 - RNA, 20 nt, synthetic construct
  source 1..20: mol_type = other RNA
ccctctttctcaacttcctg

SEQ ID NO: 30206 - RNA, 20 nt, synthetic construct
  source 1..20: mol_type = other RNA
ccctgaaaaatgagaaacct

SEQ ID NO: 30207 - RNA, 20 nt, synthetic construct
  source 1..20: mol_type = other RNA
ccctgaaattgtcagaaaag

SEQ ID NO: 30208 - RNA, 20 nt, synthetic construct
  source 1..20: mol_type = other RNA
ccctgaacaatgattttctt

SEQ ID NO: 30209 - RNA, 20 nt, synthetic construct
  source 1..20: mol_type = other RNA
ccctgaatacccctccctac

SEQ ID NO: 30210 - RNA, 20 nt, synthetic construct
  source 1..20: mol_type = other RNA
ccctgagaacttcagtatat

SEQ ID NO: 30211 - RNA, 20 nt, synthetic construct
  source 1..20: mol_type = other RNA
ccctgagaagtcaaagcctg

SEQ ID NO: 30212 - RNA, 20 nt, synthetic construct
  source 1..20: mol_type = other RNA
ccctgagcatccccgctgcg

SEQ ID NO: 30213 - RNA, 20 nt, synthetic construct
  source 1..20: mol_type = other RNA
ccctgaggatataacgatag

SEQ ID NO: 30214 - RNA, 20 nt, synthetic construct
  source 1..20: mol_type = other RNA
ccctgagtagctgtgattac

SEQ ID NO: 30215 - RNA, 20 nt, synthetic construct
  source 1..20: mol_type = other RNA
ccctgagtccagaggtgagc

SEQ ID NO: 30216 - RNA, 20 nt, synthetic construct
  source 1..20: mol_type = other RNA
ccctgataatcacagacgca

SEQ ID NO: 30217 - RNA, 20 nt, synthetic construct
  source 1..20: mol_type = other RNA
ccctgatagatattggcaac

SEQ ID NO: 30218 - RNA, 20 nt, synthetic construct
  source 1..20: mol_type = other RNA
ccctgatatgtcgcatgaaa

SEQ ID NO: 30219 - RNA, 20 nt, synthetic construct
  source 1..20: mol_type = other RNA
ccctgatcaagttgcttggc

SEQ ID NO: 30220 - RNA, 20 nt, synthetic construct
  source 1..20: mol_type = other RNA
ccctgattgagattagcgaa

SEQ ID NO: 30221 - RNA, 20 nt, synthetic construct
  source 1..20: mol_type = other RNA
ccctgatttaaagtaggttg

SEQ ID NO: 30222 - RNA, 20 nt, synthetic construct
  source 1..20: mol_type = other RNA
ccctgcagccagatttgatc

SEQ ID NO: 30223 - RNA, 20 nt, synthetic construct
  source 1..20: mol_type = other RNA
ccctgcatacactcatttcc

SEQ ID NO: 30224 - RNA, 20 nt, synthetic construct
  source 1..20: mol_type = other RNA
ccctgccacactccagcatc

SEQ ID NO: 30225 - RNA, 20 nt, synthetic construct
  source 1..20: mol_type = other RNA
ccctgccccttatcctcttc

SEQ ID NO: 30226 - RNA, 20 nt, synthetic construct
  source 1..20: mol_type = other RNA
ccctgccctgtgaaaatcat

SEQ ID NO: 30227 - RNA, 20 nt, synthetic construct
  source 1..20: mol_type = other RNA
ccctgccgcttcgcctttct

SEQ ID NO: 30228 - RNA, 20 nt, synthetic construct
  source 1..20: mol_type = other RNA
ccctgccttaaaacattttt

SEQ ID NO: 30229 - RNA, 20 nt, synthetic construct
  source 1..20: mol_type = other RNA
ccctgccttccttgggcaca

SEQ ID NO: 30230 - RNA, 20 nt, synthetic construct
  source 1..20: mol_type = other RNA
ccctgcgaaggcaatgtaac

SEQ ID NO: 30231 - RNA, 20 nt, synthetic construct
  source 1..20: mol_type = other RNA
ccctgcgattggttggactc

SEQ ID NO: 30232 - RNA, 20 nt, synthetic construct
  source 1..20: mol_type = other RNA
ccctgctactcaggagatta

SEQ ID NO: 30233 - RNA, 20 nt, synthetic construct
  source 1..20: mol_type = other RNA
ccctgctacttgtggggctg

SEQ ID NO: 30234 - RNA, 20 nt, synthetic construct
  source 1..20: mol_type = other RNA
ccctgctatgcatactttgg

SEQ ID NO: 30235 - RNA, 20 nt, synthetic construct
  source 1..20: mol_type = other RNA
ccctgctccagtatgacctc

SEQ ID NO: 30236 - RNA, 20 nt, synthetic construct
  source 1..20: mol_type = other RNA
ccctgctctgcacgtactag

SEQ ID NO: 30237 - RNA, 20 nt, synthetic construct
  source 1..20: mol_type = other RNA
ccctgctgccagatgttcta

(The sequence listing continues in the following parts.)

1. A method for modifying in a cell at least one allele of the Amyloid Beta Precursor Like Protein 2 (APLP2) gene, the method comprising
introducing to the cell a composition comprising:
at least one CRISPR nuclease, or a polynucleotide molecule encoding the CRISPR nuclease; and
an RNA molecule comprising a guide sequence portion having 17-50 nucleotides, or a nucleotide sequence encoding the same,
wherein a complex of the CRISPR nuclease and the RNA molecule affects a double strand break in at least one allele of the APLP2 gene.

2. The method of claim 1, wherein the composition further comprises a donor molecule comprising a sequence of nucleotides that is introduced at the double strand break site wherein the introduced sequence comprises a sequence from:
i. an Alpha-1 antitrypsin, Glucose-6-phosphatase (G6PC), Serpin Family A Member (SERPINA), Transthyretin (TTR), ornithine transcarbamylase, argininosuccinic acid synthetase, arginase, argininosuccinase, carbamoyl phosphate synthetase, and N-acetylglutamate synthetase, Alpha Galactosidase A, Coagulation Factor IX, Coagulation Factor VII, Lysosomal Alpha Glucosidase, Fibrinogen, Phenylalanine 4 Hydroxylase, Alkaline Phosphatase, Glucosylceramidase, Beta Galactosidase, Porphobilinogen Deaminase, Arylsulfatase B, Beta Glucuronidase, Alpha-N-Acetylglucosaminidase, Lysosomal Alpha, Alpha L-Iduronidase, Mannosidase, Phosphatidylcholine Sterol Acyltransferase, N-Sulphoglucosamine Sulphohydrolase, Coagulation Factor X, N-Acetylgalactosamine-6-Sulfatase, Sphingomyelin Phosphodiesterase, iduronate-2-sulfatase, Lysosomal Alpha Glucosidase, Cyclin Dependent Kinase Like 5, Prolow Density Lipoprotein Receptor Related Protein 1, Phenylalanine Ammonia Lyase, Protein Glutamine Gamma Glutamyltransferase K, or Lysosomal Protective Protein encoding gene; or
ii. an acid α-glucosidase, α-L-iduronidase, α-galactosidase, iduronate-2-sulfatase, N-acetylgalactosamine-6-sulfatase, N-acetylgalactosamine-4-sulfatase, a lysophosphatidylcholine metabolism-related protein, preferably phospholipase A2, a T-REC or K-REC related protein, β-glucosidase, β-glucocerebrosidase, arylsulfatase A, Factor VIII, insulin-like growth factor 1 (IGF-1), surfactant protein A, surfactant protein B, aspartyl-β-glucosaminidase, acetyl-CoA α-glucosaminide, acetyl-CoA-arylamine N-acetyltransferase, N-acetylglucosamine-6-sulfatase, N-acetylglucosamine-1-Phosphotransferase, α-N-acetylglucosaminidase, acid ceramidase, aspartoacylase, lysosomal acid lipase, acid sphingomyelinase, arylsulfatase B, α-L-fucosidase, galactosylceramidase, galactocerebrosidase, β-galactosidase, protective protein/cathepsin A, β-glucoronidase, heparan N-sulfatase, β-hexosaminidase A, hyaluronidase-1, alpha-D-mannosidase, beta-mannosidase, alpha-neuraminidase, beta-hexosaminidase A, beta-hexosaminidase B, palmitoyl-protein thioesterase, tripeptidyl peptidase I, Battenin, Ceroid-lipofuscinosis neuronal protein 5 (CLN5), Ceroid-lipofuscinosis neuronal protein 6 (CLN6), Ceroid-lipofuscinosis neuronal protein 7 (CLN7), Ceroid-lipofuscinosis neuronal protein 8 (CLN8), (Cathepsin D), cystinosin, cathepsin K, Sialin, Lysosome-associated membrane protein 2 (LAMP2), human growth hormone, follicle-stimulating hormone, erythropoietin, CD-19, a cytokine, a chemokine, IL-10, IGF1, TGF-β, IL-15, CXCR4, IL-4, or a granulocyte colony-stimulating factor (G-CSF) encoding gene.

3. (canceled)

4. (canceled)

5. (canceled)

6. (canceled)

7. (canceled)

8. (canceled)

9. (canceled)

10. The method of claim 2, wherein the introduced sequence comprises at least one of (i) a sequence encoding a protein or a polypeptide expressed by a cell, (ii) a sequence encoding a protein or polypeptide that is secreted by a cell, (iii) a sequence encoding a signal peptide, (iii) a sequence encoding a signal peptide encoded by the allele of the APLP2 gene, (iv) a sequence encoding a 2A self-cleaving peptide, (v) a sequence encoding an APLP2 signal peptide, (vi) a sequence encoding a soluble protein, (vii) a splice acceptor sequence, or (viii) a splice donor sequence.

11. (canceled)

12. (canceled)

13. (canceled)

14. The method of claim 10, wherein the introduced sequence comprises a splice acceptor sequence, a sequence encoding a polypeptide expressed by a cell, a sequence encoding a 2A self-cleaving peptide, a signal peptide, and a splice donor sequence.

15. The method of claim 2, wherein the donor molecule comprises a first homology arm sequence that shares at least 90%, preferably 100%, sequence identity with an APLP2 sequence upstream of the double-strand break and a second homology arm sequence that shares at least 90%, preferably 100%, sequence identity with an APLP2 sequence downstream of the double-strand break.

16. (canceled)

17. (canceled)

18. (canceled)

19. The method of claim 1, wherein the RNA molecule comprises a guide sequence portion having 17-50 contiguous nucleotides containing nucleotides in the sequence set forth in any one of SEQ ID NOs: 1-159641.

20. The method of claim 19, wherein the RNA molecule comprises a non-discriminatory guide portion that targets Intron 1 of the APLP2 gene, a 3′ untranslated region (3′ UTR) of the APLP2 gene, or a sequence that is located within a genomic range selected from any one of 11:130142110-130144147 and 11:130070140-130109426.

21. (canceled)

22. (canceled)

23. (canceled)

24. The method of claim 1, wherein the cell is a stem cell, a monocyte, a macrophage, an iPS-derived monocyte, an iPS-derived macrophage, a hematopoietic stem cell (HSC), a hematopoietic stem and progenitor cell (HSPC), a myeloid precursor cell, a myeloblast, a lymphoblast, an erythroid precursor cell, a platelet cell, a natural killer (NK) cell, a B-lymphocyte, a T-lymphocyte, an eosinophil, a neutrophil, an iPS-derived cell, or a basophil.

25. The method of claim 24, wherein the cell is a stem cell, and the method further comprises differentiating the stem cell after modifying the stem cell.

26. (canceled)

27. (canceled)

28. A composition comprising an RNA molecule comprising a guide sequence portion having 17-50 contiguous nucleotides containing nucleotides in the sequence set forth in any one of SEQ ID NOs: 1-159641.

29. The composition of claim 28, further comprising at least one CRISPR nuclease.

30. The composition of claim 29, further comprising a donor molecule.

31. The composition of claim 30, wherein the donor molecule comprises a sequence from an Alpha-1 antitrypsin, Glucose-6-phosphatase (G6PC), Serpin Family A Member (SERPINA), Transthyretin (TTR), ornithine transcarbamylase, argininosuccinic acid synthetase, arginase, argininosuccinase, carbamoyl phosphate synthetase, and N-acetylglutamate synthetase, Alpha Galactosidase A, Coagulation Factor IX, Coagulation Factor VII, Lysosomal Alpha Glucosidase, Fibrinogen, Phenylalanine 4 Hydroxylase, Alkaline Phosphatase, Glucosylceramidase, Beta Galactosidase, Porphobilinogen Deaminase, Arylsulfatase B, Beta Glucuronidase, Alpha-N-Acetylglucosaminidase, Lysosomal Alpha, Alpha L-Iduronidase, Mannosidase, Phosphatidylcholine Sterol Acyltransferase, N-Sulphoglucosamine Sulphohydrolase, Coagulation Factor X, N-Acetylgalactosamine-6-Sulfatase, Sphingomyelin Phosphodiesterase, iduronate-2-sulfatase, Lysosomal Alpha Glucosidase, Cyclin Dependent Kinase Like 5, Prolow Density Lipoprotein Receptor Related Protein 1, Phenylalanine Ammonia Lyase, Protein Glutamine Gamma Glutamyltransferase K, or Lysosomal Protective Protein encoding gene.

32. The composition of claim 30, wherein the donor molecule comprises a sequence from an acid α-glucosidase, α-L-iduronidase, α-galactosidase, iduronate-2-sulfatase, N-acetylgalactosamine-6-sulfatase, N-acetylgalactosamine-4-sulfatase, a lysophosphatidylcholine metabolism-related protein, preferably phospholipase A2, a T-REC or K-REC related protein, β-glucosidase, β-glucocerebrosidase, arylsulfatase A, Factor VIII, insulin-like growth factor 1 (IGF-1), surfactant protein A, surfactant protein B, aspartyl-β-glucosaminidase, acetyl-CoA α-glucosaminide, acetyl-CoA-arylamine N-acetyltransferase, N-acetylglucosamine-6-sulfatase, N-acetylglucosamine-1-Phosphotransferase, α-N-acetylglucosaminidase, acid ceramidase, aspartoacylase, lysosomal acid lipase, acid sphingomyelinase, arylsulfatase B, α-L-fucosidase, galactosylceramidase, galactocerebrosidase, β-galactosidase, protective protein/cathepsin A, β-glucoronidase, heparan N-sulfatase, β-hexosaminidase A, hyaluronidase-1, alpha-D-mannosidase, beta-mannosidase, alpha-neuraminidase, beta-hexosaminidase A, beta-hexosaminidase B, palmitoyl-protein thioesterase, tripeptidyl peptidase I, Battenin, Ceroid-lipofuscinosis neuronal protein 5 (CLN5), Ceroid-lipofuscinosis neuronal protein 6 (CLN6), Ceroid-lipofuscinosis neuronal protein 7 (CLN7), Ceroid-lipofuscinosis neuronal protein 8 (CLN8), (Cathepsin D), cystinosin, cathepsin K, Sialin, Lysosome-associated membrane protein 2 (LAMP2), human growth hormone, follicle-stimulating hormone, erythropoietin, CD-19, a cytokine, a chemokine, IL-10, IGF1, TGF-β, IL-15, CXCR4, IL-4, or a granulocyte colony-stimulating factor (G-CSF) encoding gene.

33. (canceled)

34. (canceled)

35. The composition of claim 30, wherein the donor molecule comprises at least one of (i) a sequence encoding a polypeptide; (ii) a sequence encoding a protein expressed by a cell, (ii) a sequence encoding a protein or polypeptide that is secreted by a cell, (iii) a 2A self-cleaving peptide, (iv) a sequence encoding a signal peptide, (v) a sequence encoding an APLP2 signal peptide, (vi) a sequence encoding a soluble protein, (vii) a splice acceptor sequence, or (viii) a splice donor sequence.

36. (canceled)

37. (canceled)

38. (canceled)

39. The composition of claim 35, wherein the donor molecule comprises a splice acceptor sequence, a sequence encoding a polypeptide, a sequence encoding a 2A self-cleaving peptide, a signal peptide, and a splice donor sequence.

40. The composition of claim 30, wherein the donor molecule comprises a first homology arm sequence that shares at least 90%, preferably 100%, sequence identity with a first sequence in the APLP2 gene, and a second homology arm sequence that shares at least 90%, preferably 100%, sequence identity with a second sequence in the APLP2 gene.

41. (canceled)

42. (canceled)

43. (canceled)

44. (canceled)

45. A method for modifying an APLP2 allele in a cell, the method comprising delivering to the cell the composition of claim 28.

46. A method of treating, ameliorating, or preventing a disorder or disease in a subject, the method comprising delivering to a cell of the subject the composition of claim 28.

47. (canceled)

48. (canceled)

49. (canceled)

50. (canceled)

51. (canceled)

52. (canceled)

53. (canceled)

54. (canceled)

55. (canceled)

56. A method of treating, ameliorating, or preventing a disease or disorder in a subject, the method comprises delivering to the subject cells modified by the method of claim 45.

57. (canceled)

58. (canceled)

59. (canceled)
